United States Patent Application Publication US 2011/0183924 A1 - sequence listing, part 251

SEQ ID NO: 712459 - DNA, 1423 bp, Homo sapiens
acaaaacaccaaatggcggatgacgccgtgtgcagcggggatggccctggtgtgtgccctggtggccctggtgatgggtgaacctgcggtgtgcttcctgctggagtgtttctggcatgtgtgcatcctgtgggcctgggtgtcgcgtgcctgtggactgtggtgcctgtgtggcccgatgtgcctgctgtgcagctctgctgtgagtgcacatgtgccgaggactagaggagtaggattgccctagtcgaccaatgctaatgtggccagcttgaggtccaagtgacgatgaacgatcaaggtcccgtggcaggactgatcatgatctacttactaccctagcccaatctacctggaactcatgtacgaatcactaggaatttctcgtatcgcttgagtgtgggccctacgtcttcagagcgcagttgaggcgcttttagacaatcgaatctagttgcccagcgtagccacgacatggcaggaaaccgcgatgaccagagcgcagacagccacccaggcggttacaacagagcccactctatagcgttatgccgtaccttcaggcggcgagcctactcaaacttgatgtctcaaccagttacgcgtacattgggagctagctctacaccgcctaggcattcacaagatgcggaagagcttgcgcccaatccatggccagttccctgatagagagtggccacttcactccccttgtgccccaaatgcatatctttcccaattcgagatccccccgagatagccgagcaagcgcaaaggcctaaccctagagcgcgaggagaccaacagagcacttctgggccacagtgcccacccacaaccaatccaagaataccactattgcgaaaccgggatagaccacgggcccagcaatagcagaggctcgattgctacgccttgaggtaaaacaggcccatccaagttatccacctttggcagagccgcaaagaggaatgacaaccaatgaggcagattccgattacctccagagctaagcccagaggcttccccccttacatacgaaaaaaggactcgactatccatttggactttggacgactatggtcaaactatccgggacatttaaacctaggctaaacaacacatttcagagcaccagcaatagtcgtttgccacactcatgatccgaacacccagtgcgaggctcagatactcttttagcggtccacagatggtaccaaaccctttttgttcactgtgcccaaatataccaaagagaaaccgatatcatgggttcacccaggaaagaccctacggagaccgatgtgagcaaaagctgggcaacgttgactcatattaccaaccaagaggaatcactacccctaaatcacgagaaagattatcagctgacccagacactaatgactttcatgaacaccgaaac

SEQ ID NO: 712460 - DNA, 632 bp, Homo sapiens
ctctagaggatctgtaatatgctgtctcagagaaactcgtaaaggggtctaggttaataaaatcttaaggactttccagaacaaagtacaccggctcagggtatcttttcggaactccagcgtctcttggaatagcagaagacactggcagaaaatggtggcattttccagaagcttaatctttcagggaactaccattaaaggtacagcagccctaaatcttaagtatcccttatgggaatcctttcttctggtataatctggggtttaaacattaaggtggggggtcactcatggtgtgtgggaaaaggacatgtggcctccttcttaaaacaacaacaccatagtccgggacttggaaccccattctaacaacagaagcggtccagccacttctatggcccaccccgtctggccagggttgcattctgtatggccaggggatgggctgaggtgggggtgtggagaagatgagcaacccaagcatcttaagtacctggagaaatcagggtcctacggcagacggagaataatctagctcgttttacaggcattggaaggaggatgatcctagtttctaagcaaagcagtaaaaaggggcaaagtgtctttttcccttgtaagcatctcct

SEQ ID NO: 712461 - DNA, 179 bp, Homo sapiens
acaggacacgtgtagtacgggtaggcgtataggtcaggtcttcggcggcatttgttgaacacattgaccaccgacagcgacaggcgcgagtggtcgtcgaagcggtgctgagcgaagcgttgtagcggtacgtcgccttgatgtacgggctgtcaccgctgtcccacgtgaatacctgg

SEQ ID NO: 712462 - DNA, 4251 bp, Homo sapiens
gggcgacacccgggccgtgccgccagcgtccgtcgggagagtgaaggctcgcaacgccttgcccgggggaaggtaacgcgccgcgcccggggctgcgcggtttgcaccgccaggccgagggctgggggccagaagacaagagagacggcgaggcgcgctccctgcccggcagcgactcggaggtaggtgatgctctgatgctgctgcctcttatgaattgacgacaggtgcagagagagaataaactgtgtctaagactggaccagagagtgagtgtgctggaagccaccataggaacaagcgacctgtttggcaaggaatacagcatccttctgagagcctcttctcgacactatcccacagaccaggacttcctcatgggaaagagcacttaggatcttgctatcagctgccctaaacttttgctgagccaaaataagactttgatgcagaactgaacaagatatttcatttttgtgtgttttaatcttcctggttgcagtcttagttgttcagccctgagaattttgagccacatttgttgctattatttttgcatgcacttttcaaaatgattgacttaagcttcctgactgaagaggaacaagaggccatcatgaaggttttgcagcgggatgctgcgaggccatcatgaaggttttgcagcgggatgctgctctgaagagggccgaagaagagagagtcagacatttgcctgaaaaaattaaggatgaccagcagctgaagaatatgagtggccaatggttttatgaagccaaggcaaaaaggcacagggacaaaatccatggcgcagatatcatcagagcatctatgagaaagaagaggccccagatagcagctgagcagagtaaagacagagaaaatggggcaaaggaaagctgggtgaataatgtcaacaaagatgctttccttcctccagagctggctggcgttgtagaagagccagaagaggatgcagcaccagcaagcccgagttccagtgtggtaaatccagcttccagtgtgattgatatgtcccaggaaaacacaaggaaaccaaatgtgtctccagagaagaggaagaatccgtttaatagctccaagttgccagaaggtcactcgtcacaacaaactaaaaatgaacagtcaaaaaatggaagaactggtttatttcagacttcaaaagaggatgaattgtcagagtcaaaagaaaagtcaactgtcgcagatacttcaatccaaaagttagagaaatcaaagcagactttgccaggcctttcaaatgggtcccaaatcaaggctccaatccccaaagccaggaagatgatctacaaatcaactgatttaaacaaagatgataaccagtcttttcctagacaaaggacagactccctgaaagcgagaggggctccgagagggatcctcaagcgcaactccagttccagtagcacagactcagaaacccttcgttataatcacaactttgaacccaaaagcaaaattgtgtcacctggcctaaccatccatgagagaatttctgagaaggagcattctttagaagacaactcttccccaaactccctggagccattaaagcatgtgagattctctgcagtgaaggatgagcttccacagagtcctgggctaatccatggtcgggaagtaggagaatttagtgttttagaatctgacagattgaaaaatggaatggaagatgcaggggacacagaagagtttcagagtgaccctaagccttctcaatacagaaagccttcgctttttcatcaatcaacctcaagcccatatgtatcaaaaagtgaaacacatcagccaatgacttctggttcttttccaattaatgggctgcattctcattcagaagttttaactgcaagaccacagtctatggagaattcaccaaccatcaatgaacccaaagataaatcatcagaattaacaaggcttgaatctgtattacccagaagccctgctgatgaactgtctcattgtgttgagcctgagccatctcaggtgccaggtggcagttctagagaccgtcagcaaggttcagaagaagaacccagtcctgttttgaaaactttggaaaggagtgccgctaggaaaatgccttccaaaagtctagaagacatttcatcagattcatcaaatcaagcaaaagtagataatcagccagaagaattagtgcgtagtgctgaagatgatgagaaaccagatcagaagccagttacaaatgaatgcgtaccaagaatttccacagtgcctacacaacctgataatccattttctcaccctgacaaactcaaaaggatgagcaagtctgttccagcatttctccaagatgaggtgagtggcagtgtgatgagtgtttatagtggagactttggcaatctggaagttaaaggaaatattcagtttgcaattgaatatgtggagtcactgaaggagttgcatgtttttgtggcccagtgtaaggacttagcagcagcggatgtaaaaaaacagcgttcagacccatatgtaaaggcctatttgctaccagacaaaggcaaaatgggcaagaagaaaacactcgtagtgaagaaaaccttgaatcctgtgtataacgaaatactgcggtataaaattgaaaaacaaatcttaaagacacagaaattgaacctgtccatttggcatcgggatacatttaagcgcaatagtttcctaggggaggtggaacttgatttggaaacatgggactgggataacaaacagaataaacaattgagatggtaccctctgaagcggaagacagcaccagttgcccttgaagcagaaaacagaggtgaaatgaaactagctctccagtatgtcccagagccagtccctggtaaaaagcttcctacaactggagaagtgcacatctgggtgaaggaatgccttgatctaccactgctaaggggaagtcatctaaattcttttgttaaatgtaccatccttccagatacaagtaggaaaagtcgccagaagacaagagctgtagggaaaaccaccaaccctatcttcaaccacactatggtgtatgatgggttcaggcctgaagatctgatggaagtctgtgtagagcttactgtctgggaccattacaaattaaccaaccaatttttgggaggtcttcgtattggctttggaacaggtaaaagttatgggactgaagtggactggatggactctacttcagaggaagttgctctctgggagaagatggtaaactcccccaatacttggattgaagcaacactgcctctcagaatgcttttgattgccaagatttccaaatgagcccaaattccactggctcctccactgaaaactactaaaccggtggaatctgatcttgaaaatctgagtaggtggacaaatatcctcactttctatctattgcacctaaggaatactacacagcatgtaaaagtcaatctgcatgtgcttctttgattacaaggcccaagggatttaaatataacaaaatgtgtaatttgtgactctaatattaaataagatatttgaacaagctaggaaaattgaatttctgctgctgcttcaaagaaaaagctgccccagagcattaaacatggggtattgttaagaagcaaaatgttcttgtttgccatcatgtgtttcacaccacaattctgtgccacagttaagagggtctggtacccttgcaggacctttgtaggttgtgggaaaaagtcgcagaaagatactcaaagtggagcagggaatggagacagacatcagtgatgataaaaaaaaaaaatggaccttaagaaactatttactctgtaatctctaataaaatatggaattccatattagggcaatgagactgaaactactggtgtttttctgccttgagaaaacaaacagttaaaacaagcctcaaatgtattttagtgccacccactggccataggtacaattcagttgttggcttgttttgacttaattctaaaataggtctcaagcctgtatttttatgagtttatttttttaaaaccctgcatatatatgattgtttttcttataactttactatatgaaagcagcataagagtagtcacaaacatgttttgcaacaaagttttaattagaatgtaagttgctcagttatactgttcttcttatgtatgtaaaattttcgtattttgtaaaaacccttagaataaattatcatttgatttaaattgt

SEQ ID NO: 712463 - DNA, 683 bp, Homo sapiens
  misc_feature (111)..(111): n is a, c, g, or t
  misc_feature (129)..(129): n is a, c, g, or t
  misc_feature (180)..(180): n is a, c, g, or t
  misc_feature (186)..(186): n is a, c, g, or t
  misc_feature (209)..(210): n is a, c, g, or t
  misc_feature (230)..(230): n is a, c, g, or t
  misc_feature (242)..(242): n is a, c, g, or t
  misc_feature (257)..(258): n is a, c, g, or t
  misc_feature (269)..(269): n is a, c, g, or t
  misc_feature (277)..(277): n is a, c, g, or t
  misc_feature (332)..(332): n is a, c, g, or t
  misc_feature (335)..(335): n is a, c, g, or t
  misc_feature (360)..(360): n is a, c, g, or t
  misc_feature (371)..(371): n is a, c, g, or t
  misc_feature (373)..(375): n is a, c, g, or t
  misc_feature (444)..(444): n is a, c, g, or t
  misc_feature (449)..(449): n is a, c, g, or t
  misc_feature (452)..(452): n is a, c, g, or t
gggccccaggctcgggagacatggcgggcgtaaagctctcgtggcattatccttcagtggggctatggactgacttttcttatgctgggatgtgccttagaggattatggngtttacctggcccttatncgtcctgattttccacgccactctcccccatcccccatttcattgccaaangagtcncctatgactcagatgcaaccagnnagtgcctgtcgggaactggnatatttcttcanttactggaattgtgnnttcttgccttntggatttnctgttattcttgctcgtgtggctgtgatcaaatggggagcctgcggccttgtgtnggnaggcaatgcagtcattttccttacnattcaagggtntnnnccttatatttggaagaggagatgattttagctgggagcagtggtagcactttattctgattacagtgcnttganttncttagaactcatactatctgtatcatgtgcacatgcggcattgttactatgaaattgaatatgctgggtcgttgaatacctttatcatactcatgtcgcactttcagaaagacttgcataagtaggagatgagttccattctcagcaagatagacctgtgcaaatttagatgatgttcactcaagttatgtaactggtcctggctgtagcatgtagtcacggtgctctcag

SEQ ID NO: 712464 - DNA, 214 bp, Homo sapiens
tggaactggggacctcataaaatactataagcttattattcttgatttaaaaacgtttatgctcacatctttatatatgtacggttatttctggagacctcattttattgtcatctataatagtggatttatatatttttacctctttttaaaccaatttatgcggtgttaagatctcgactacacagtccttcttagcttttaaatttcagat

SEQ ID NO: 712465 - DNA, 241 bp, Homo sapiens
gcacgagatttaaatgccatgaccaggaggattttagactgatgaaaagccaggcccaaccattcccaatgggaaccttgccaacattaaggttccttaaaaagcaggtgaccttcttccttccaaggcatatcttgtccaacctttatcatttcaacctacacacctggtatttgaggttcttaattcggatccactggaactagttagatgggccagactagcgttgctgatgcttgac

SEQ ID NO: 712466 - DNA, 200 bp, Homo sapiens
tatttttgtgaaagaaagtgggcctgtcaaaggcctcctctaaaaaaaaaattagggttaaagtcttaaaatttgttttctaaaggtgaaacggggggttatttttgggaacagcccgatgtttgggcccttttttccccaaaaaaaacaagtcctttttaaacccggaatttggagaaaaaaaaaaccctggtttttta

SEQ ID NO: 712467 - DNA, 105 bp, Homo sapiens
ggccacagcagaatctgtacaccaggagccctgactaggcacgcagcctctctgccaccgggaccttggcatggcagtggtggtgaccaaccacataactcgaga

SEQ ID NO: 712468 - DNA, 937 bp, Homo sapiens
  misc_feature (527)..(527): n is a, c, g, or t
  misc_feature (531)..(531): n is a, c, g, or t
  misc_feature (919)..(919): n is a, c, g, or t
  misc_feature (932)..(932): n is a, c, g, or t
cagcctgggcaacaaagtgagacccccgtctctacaaaaaatacaaaaattagccatgcatggtggcacacacctgtagtcccagctgcttgggaggctgaggcaggaggattgcttgagcccaagaatttgaggttgcagtgaactatgattacaccactgcagtctaccctgggcagcagagtgagaccctatctattttaaaaaaaaacaaacattattaacatacttaaaacctgacatccttcatgttagctaacctttataatctctttggatgtagtaaatttttagtattttttagattgaatttgtatcatatttgctagcaaattgagtataaagagtagcatatttttactacagatgtattattttaactaacaaaggcatattatacatttttttcatatataaactttggaataggattttacattaacttaagttttttatttctacccatgtgtcaaagttttatgctaaattctgaatagaatagttgtaactcccactctgggtatttnattnattttaaacagttctagtattgtttcctgtgaattttttccagggattgctactttctgcactattcattagaccaagagcatttcaccaaatacttaaaacttaaaaatttttaaacttttccaaatttgattaaaaggataacatattctaaaggtattcaatatttttacttatctttgaaaaacttaatcacataaaagcatacattttacacatacagctctctccatcttccacaatagattaagacataaaacataaccagtatttttgaaaagcccccttaactggcatgcttcttactgaaattatcataaaaggttcgtatgagaaaggattccagaatatcccttaattgtgttgtagcttatgcatttctatttantttatacattatntaatt

SEQ ID NO: 712469 - DNA, 124 bp, Homo sapiens
aggctgctcagctgggcgcggtagctcacgcctgtaatcccagcactttggaaaatggtttgacaagtatccactaaagctaaacatatgtcttccctatgctctgggccattcaacgcctgcg

SEQ ID NO: 712470 - DNA, 401 bp, Homo sapiens
cctctcccatgcacgtaaacactcctaacaagactgttggttagctggacatgctttggcaatttttttatactaacaagtgaacataaaggcatggcatttgttgtgactggcaaccaatgtttgattttttttttaaaactatcccattaaaattaagggctgggaatgttctggttcccaattaatttaaataatcaacttctcccaaaatttctaaacctgttggcacctcagggcagaggatggttctggaccctccccctcttgggtcctaataaaaaactctcaacagatcttggggcccagtcattgggttttatcaggtggcttaatggggaactaaggttttttacttccacagaataaaagccactaccttctgacctccccacccccgc

SEQ ID NO: 712471 - DNA, 804 bp, Homo sapiens
  misc_feature (804)..(804): n is a, c, g, or t
tccccttcccagccattctattgtaaggaatgtccattagaactacttcccaaacctctgtatgtcaacaataagtcacatagatcctgtacatacttacaaacaggattattaaaatctccagtatgtcacaacatacttataccacagtctccaaacaccatgtgggagaaaccagggccatacttattgcccagggtgctaagttggatacgccagagacagggaagttaagatacattgatgagtctggccccatgtgtatatgctcatgactctcatgtgttgtgtgagaaattctacattaacaggtcctttggtttaggcgcctaactgtgatctccatagaacataaatctcgtggaaaaaacacctgtggttgtgtatcatctgtggtggaatgccatgtggccgtgtgtattttctaccaagaacatttttggcgcgcagccccggtcaaatttaccccgcaaagaaaaagccccacaaaaaccaaattgtctccgaatacaccaatgtaaactctcccttcgtacgatatttaacgtccttaatatataccacaagaataataaatatcctcctactagtggttctctgtcgcaagtataatcttcggcgtgtgtcttcctttgtggaccatcttttccccacaatatttgctcttcttcgaagagcagaagtcttaaacactccctcctagaagaggggggaatctttttacacctatttttctcctcctcttattcacctttgggggaatattttcccacaggggggtacacagcggggtatactcaatan

SEQ ID NO: 712472 - DNA, 162 bp, Homo sapiens
  misc_feature (5)..(5): n is a, c, g, or t
  misc_feature (129)..(129): n is a, c, g, or t
ctgtngcggggggattgaatgagctctcaggagggaggatgcgtgcaggcaggggtgaggagcgcagcgggcggtgagcgggaggcactggcctccagagcccgttggccaaggctgggcctcgcgggncggcgaacggagccgtggaatcggtgcctcagc

SEQ ID NO: 712473 - DNA, 436 bp, Homo sapiens
aactttcatctatcccagagaaaccccactttaaaaacagctaaagggactttagcagcccagagttttaatttttttaaggagaaatcagtttacctgtttttaaaaaatttaaatctagttaactttgcttcacctgcgttaacggggacagctcaggctcttggtgactttgccagcggaatttccggcccttcaacacccggggcccagaccctcggggccatgccttgtggggccctgtgtcggccttggggcctgccaggtggccgccccgaccacgacttggcttccttgtgccttaaaaaacttgccttcctgcagccacacaccacccggggtgtcctggggacccaaggggtgggggggtcacaccagagagaggcaggggcctggccggctcctgcaggatcatgcagctggggcgcggcggacc

SEQ ID NO: 712474 - DNA, 387 bp, Homo sapiens
  misc_feature (91)..(91): n is a, c, g, or t
  misc_feature (94)..(94): n is a, c, g, or t
gtgtccctttccgcttccgccgccttcgaagttcccggcttcgagctcgtgtacacttcgcccgtggaagcgaaactcgacgcgcccgacntgngcaatcccaccgacgtttgggtggaaatgatcgacggcgcgaagaagacgctcgatttcggcgaaatgtacgccgtgggcaaagcgggcgaaccgctcgaccgcgtgatcgaagccttgagcaaagcgggggaccgcggcgtgaagacgcgcttcatgctcgagaagaaaatgctccgtgcctccgacgacgccaccatcgagcgcctgaaaaaaatcaaaggcctcgagctgcgtatctacgaattcgccaagctgggcaccaacggcatcgtgcacgccaagtacttcgtg

SEQ ID NO: 712475 - DNA, 176 bp, Homo sapiens
  misc_feature (36)..(36): n is a, c, g, or t
ggccaagaccagagcagcttcctgagacacaacagngttttctccagccactggttcatgactgacatcgccattgggagtgccatcggggattataactaagccatgtttctcaataagctcatctctttgccgcaggccttctttaagttcttccatcttatgctgcaacaggt

SEQ ID NO: 712476 - DNA, 406 bp, Homo sapiens
  misc_feature (400)..(400): n is a, c, g, or t
tgagacagagtctcgctctgttgcccaggctggagtgcagtggcgtgatcttggctcactacaacctccatctctcaggttcaagcgattctcctgcctcagcctccggagtagctaggaataaaggttcccaccatcacacccggctaatttttgtatttttagtagagatggggttccaccatattggccaggctggtcttgaactcctgacctcaggcgatccacccatcttggcctcccaaagtgctaggattacaggtgggagccactgcatctggctaatttttatcataactttatattctgctgcaagctgcttttgaattattcaagttgaagagggaaggtaaaaaaaataattttccagttcttgacctggaggttgaaaaaaaagganaaagga

SEQ ID NO: 712477 - DNA, 211 bp, Homo sapiens
  misc_feature (6)..(6): n is a, c, g, or t
ctgtantcacttctttactgggttgatccttgagagcagcttaatctgggttaatcattactggtttccaaatttggtttttaagttagcagatgattggaagattaaaccccttctaggctctaatctcatctggaagttagaatggttcttgcctgaactgcaaactatccagagcatgcagtcaaaacaagaatgcgggatctctaga

SEQ ID NO: 712478 - DNA, 133 bp, Homo sapiens
cttttggatacctgtgacttgaggatgcttctttctcatgcaggacctcagcccattgatttgcatttatttggttgccttgttttgttttgtttttgagacagtctcgctctgttggccaggctgaagcgca

SEQ ID NO: 712479 - DNA, 807 bp, Homo sapiens
aactgagggctccgcctcattgggcgcgcgctgggaacaggaagcgcaggagcctcgtccgggcgtgcggcccgcgtcggcgggaggcaagcgcgcgtgagaggatggccggcgtttcacaaagggcaagagcgcacgagacctgcgctgaacgggaacagagacagcacaaccaatcgagcaaatgaagcggcgaccagcagagacaccagaaggcaccacgtacctagacacgttccacttccctgggacatgaaggtcctgcagacccaatcccacgaaaacctacacatacaaacatcgatcactgaacactgtgacgtgggacatccgcaaagacgcatggtaaccgaccaaacacacgaagctagatcatgggcagagcaacacaaaccaaatggaacacccatgggcaaatgggccaagaccaggcgatgcaacgaacagagaggcattcaacatggcccacgaggacaacaccaagccacaaacagacacgaactacacacgaataccaatagggagtcacctaccatggaatgacgccaagaggtaacacacaccagcgcggcctgagcactacagggagacgggaatacccaatcacactgggcaccagacggcactagtcacaaacactatccacaaggcaacgtactggtaggactgccaagacaaagcaagaggaaagtactaggacggcaaggtccagggaaccacatagcaatgggcagaacacggaagaatggtacatcaaagacgggaaacaaaaaataaaaatagcagaaaaggcacttacatggaaac

SEQ ID NO: 712480 - DNA, 138 bp, Homo sapiens
gctcctgttcaggacgtcttaggcaagagccgagctcgtgctcagcggcgacgacgtcgatgcggcgagcaggacctgcagaccgcgctcctccagctgcgccgctggacccgcaccgactccagggccgtgtctgat

SEQ ID NO: 712481 - DNA, 183 bp, Homo sapiens
  misc_feature (21)..(21): n is a, c, g, or t
  misc_feature (42)..(42): n is a, c, g, or t
  misc_feature (66)..(66): n is a, c, g, or t
acctagccacccaccaacagnaataatggctgaaaaagcggngtctatattttcacaccttctggntcctattcttctcgtgattggctggattgtgggctgcatcataatgatttatgttggcttctcttagaaaggcaagaagatatcagattgacatcatttagaagaattaagaaaact

SEQ ID NO: 712482 - DNA, 879 bp, Homo sapiens
  misc_feature (16)..(16): n is a, c, g, or t
  misc_feature (73)..(73): n is a, c, g, or t
  misc_feature (75)..(75): n is a, c, g, or t
  misc_feature (87)..(87): n is a, c, g, or t
  misc_feature (121)..(121): n is a, c, g, or t
  misc_feature (228)..(231): n is a, c, g, or t
  misc_feature (233)..(233): n is a, c, g, or t
  misc_feature (236)..(236): n is a, c, g, or t
  misc_feature (281)..(281): n is a, c, g, or t
  misc_feature (285)..(285): n is a, c, g, or t
  misc_feature (287)..(287): n is a, c, g, or t
  misc_feature (325)..(325): n is a, c, g, or t
  misc_feature (332)..(332): n is a, c, g, or t
  misc_feature (365)..(365): n is a, c, g, or t
  misc_feature (370)..(370): n is a, c, g, or t
  misc_feature (387)..(387): n is a, c, g, or t
  misc_feature (437)..(437): n is a, c, g, or t
  misc_feature (542)..(542): n is a, c, g, or t
  misc_feature (573)..(573): n is a, c, g, or t
  misc_feature (577)..(577): n is a, c, g, or t
  misc_feature (607)..(607): n is a, c, g, or t
  misc_feature (642)..(642): n is a, c, g, or t
  misc_feature (686)..(686): n is a, c, g, or t
  misc_feature (691)..(691): n is a, c, g, or t
  misc_feature (750)..(750): n is a, c, g, or t
  misc_feature (765)..(765): n is a, c, g, or t
  misc_feature (804)..(804): n is a, c, g, or t
  misc_feature (865)..(865): n is a, c, g, or t
actatactaatgaaanaaattatatgtagaccaccttcaatatttttccatcatctttatataactgtaacantnctttcaaaaganattttgtgaaggacattaatttcacatttaaaangtgtttcaaaaataagggaacattaaagaacatcaaattagtctgaaatatatctcacaatgctgagaggcatactcttctttatcaaattaagtgtatgtgtagtnnnntnaanatggcttttaactaatgacatttcttgtccatttcagtaatttcntggntngaaaacaaaatctgtgtatttatttctttgaaaacatnatttgtngagggtggttttactgccatggaatgatttggnttctnaatggagtggattttanggggaggttggattttgtgtgggagtttttggaagaagttttttttaaanattttatttggtgagggtgatagaaagagtatagggtgttttaaaggaaagaggttttgatgtgtgagtttatggtggtggtttggatggtggagtgggtaaganatagaaatgagagggcgaagaaaatgatgancatnatgtgggtgaatgtgagagattagagaagnaggtgctcttgagcggattgaacgaggtcgaaganaaagaggtgcaagtatgtattctcctgatgtcttcaggtaattnaaaantgatttatacgccttaattctatgtacaatattaaggactttacaggtaaatatcaggnagaaaaaaccatganatgcaagaagggatgccagtaaaatcaaatgaggaagantcatatctactgatgctccatgtgtaagaattattacatatgtgaagctcttgtgaggtancaaagaaacagcat

SEQ ID NO: 712483 - DNA, 101 bp, Homo sapiens
cctagtgtaatgacaaggatttatcctcttcatctttctccgatcccagttagcaggaatactttagcctgggaggagatctttccagagaacagcgtgag

SEQ ID NO: 712484 - DNA, 328 bp, Homo sapiens
  misc_feature (9)..(9): n is a, c, g, or t
  misc_feature (88)..(88): n is a, c, g, or t
  misc_feature (98)..(98): n is a, c, g, or t
  misc_feature (132)..(132): n is a, c, g, or t
  misc_feature (136)..(136): n is a, c, g, or t
  misc_feature (141)..(141): n is a, c, g, or t
  misc_feature (151)..(151): n is a, c, g, or t
  misc_feature (186)..(186): n is a, c, g, or t
  misc_feature (231)..(232): n is a, c, g, or t
  misc_feature (235)..(235): n is a, c, g, or t
  misc_feature (237)..(237): n is a, c, g, or t
  misc_feature (239)..(239): n is a, c, g, or t
  misc_feature (250)..(250): n is a, c, g, or t
  misc_feature (257)..(257): n is a, c, g, or t
  misc_feature (266)..(266): n is a, c, g, or t
  misc_feature (271)..(271): n is a, c, g, or t
  misc_feature (281)..(281): n is a, c, g, or t
  misc_feature (288)..(290): n is a, c, g, or t
  misc_feature (315)..(315): n is a, c, g, or t
  misc_feature (318)..(318): n is a, c, g, or t
aaaattctnttaaaatttttcgcaatttttttccattaaaaagtactgattttaaaaactaataacttaaaactgccacacgcaaaanacacaaccanagtcgtccacaaaacactctcctttccttctganggcnttacnatgcattgtnatcattaaccagtcttttactactaaacttaaatngccaattgaaacaaacagttctgaaaacgttcttaaaacaatgannaanantngggtggaaggnattaggnataatattnatttnggattctganctttttnnntagatttggtgattttgttagtttnagntgcttttttg

SEQ ID NO: 712485 - DNA, 705 bp, Homo sapiens
acaatatttctgccaggttgttaggaggccacatgatacttattcagaaaaacgtcctagagattcttagctcttgggatgcaggcgtcaggccgctggagcgatgagcttctgtgtgtacctgagaacttggggtgatgttttagttttcacagtatgggctaaacaggagttgtacaagcatagagtaaatatgtgtcatcaagtactgaagcctctggctagaggacatgattcacatgtgaactatatatgtgaacatatatgaaagggttctggtgacttgacaatcaagagtgttcgggacatggtgccctctggaggcaagtctccgcattattagattgttttaaaggacacctactagtgtggcattcctttcgtttaaactataggtaattaaggcagctgacaagagtaagattgccttctagacactgaaggcgaatcgtccttggtccagttgtacctggaacaccagaatgatttgtactatacaggagaggtgggaggtgtgaaagagcatcatcatagaggatgagtgtaatttacggaaatggtcaaggtgtcacagaaaagaagtgttggatacttgatttctgtctcatagttgtaaaagaccagaattaggtcagttcatagttttctggaatgggtttggatcaaggaatagggggacaatttaaaaatatctagtggggatgc

SEQ ID NO: 712486 - DNA, 862 bp, Homo sapiens
tccgtgtgacgtgtggtctttgagagtcaactctcctgtaccagcgtaggccgcagtgagtggggggcgggctcccggcgggtccgtgctcggtgggagtggtgagtgaccggacccgcccggccacttccggtcctcgaagacctctgtaacgacgtacctcgggcaatcgcactcacatagtccgctaagccattggcttaggctcgcgcgctgtgacggttggcgctacatcatggccttccatggttctttttggtattgtcgtggaatgcctggggacgcgttggctaggcctgatgtgcctcctctcggcgtccttattctggttagctaaagccccagtacggttacttggcttgcacctgagtaggccactacttgcgtagatgcgcgcttcacgaagcgcctagacacacttcagccgcaggacacgtcgtggatctccggtcgtctggcctctacgttctctcgggtggtcgtggtcgtctgactagacattagtgtactggaccccgaacgtaggagaaggttcgccgaggagcagtcgccggggcctcgtggctggcagcaaagcgccatagcgaaggctgcagtccatagcctcatctccgtcaaggattacatcccagcgtaatagaagtcggacacaggggacagatcgggacggcaagaatcggttgaggctgcctcgcattgcatgaatttgggaccttaaaagctgcctttcggtctcatgcctaatgactcgattacggggcgcgcgtgtgtcatccctttacgagggtgggcctgaggtattgcggttgccggcgggaacgaggggaacttgccggtgcttgcgcgcggttgccccggtaca

SEQ ID NO: 712487 - DNA, 528 bp, Homo sapiens
  misc_feature (27)..(27): n is a, c, g, or t
  misc_feature (44)..(44): n is a, c, g, or t
  misc_feature (59)..(59): n is a, c, g, or t
  misc_feature (70)..(70): n is a, c, g, or t
  misc_feature (255)..(255): n is a, c, g, or t
gggaaattattaaacctgtatttaatnaagctgcctatgaaaanaatcaaaatctgaanaattccttaanaagtctagaatgatatcaaccccacttactgtcccctttcctagcaggcaagaacttaataactatcctcagggaactgattccctcccatcctgaaacacccttaacaaccgggaaaatagccaagacccagacaagtctgctgtggggacaattagataaaaggaggctgcacagtggctcanacctgtaaacccagtgctctgggaggccaaggtggaaggactgcttgagccccaggagtttgagaccagcctgggtaacacagcaagaccccatctctacaaaacatttttaaaaattagttgggcatggtggtatgtgcctatagtcctggctactcaagaatctgaggcaggaggatcactggagcccaggagtttgaagttgcagtgaactataatcatgccactgtactttagcctggacgacaaagggagactctgtctctttttaga

SEQ ID NO: 712488 - DNA, 205 bp, Homo sapiens
acacagggtctgctcctgtgccaggctgaagtgtaagtggcatgatctggctcactgcatcctcaacctcctgggttcaagcaatgctctgcctcaacctcttgagtaactgggactacatgcgtgtgccactatgcctagctaatttttaaattttttgcagagacaaggtctcaatacattgtccaggctggtcttcaactcc

SEQ ID NO: 712489 - DNA, 504 bp, Homo sapiens
ctggactctacctgcttggttcagtgtcctgaagagttatttaaatgaaccactacttagtaattagttcttttttaaagtatctacttctaaaattacctagttgaaaatatgaaggatatgcttagttttagaaatatcatgaagcaaggatctagtcagtgttacagggtaaaggtggagttttttaaagtctgtatttaaatggtgcactgatggattcattttttaattttgcattccacaaaatgttgctcaggtaatcagtattttattcaatgtagtgtgcatattgagatgttatatcatagaaaaatcataatgctttaattagtatgtatccaatatctatggttattgggtatcatgtcctttataccaatgttcctgtaaaccattgttagcatgcgtatctgtaaacccactttttacaattttataccccttattattatatcttttgaaaaatctccttcatctaatataatattagtccttcgttct

SEQ ID NO: 712490 - DNA, 1195 bp, Homo sapiens
gagcataacaagagcggggacgggatgaggctggcggttgatcccagtgtggcgagtggcggcgacctgaggcggtgagctggtggccctggctgcctgaccctgatgtgcatgcctgaccctgccctctgctgctgctgctgcccttccgcctgtagcctgtgtgtcctcacttctgcactggcgtgctgaccacgagcgcatttgtagaccgtgtgcgatgcgcagaagctggtggatgtgcctggtcgcctggcagctgctcttcgccaacttcaaccaggacaacactgtccctagctgttggtagtaagtccgggttataaagtttttctccctttcttactgtggataagctggaacagatctatgaagtgcaccgattacggaagatgtgttgcattgtagagagattgttctccagacagcctagtggccatcgtagaagccttaaagcaccaaggaagctaaagggtatgccactttaagacgggaactgagaattcttgcaactacagctactccaacacgattcctggcctgtgaagctcaacaggcagaggcttgatagtatgccttggaggaggtcccttgtacattcaacaacaattcggggacattgacgggatgctggcattacaatcaagggaagacggcctcaaaaacccttgcagggcattgtgtagaacaatgtaaagtcaacaaacgaaaacttggtatactatgggcgttaaccccagaggaagcgtccgagaccaatcagggaggagattgcgggatataccgaataaccacaataaaattgaaagagactgtcaaacatctaatatcagggatctaagtaaatgtgcctttaaggggcgcacatgtgcaattttggacgaccaagtatggaaatttaagattattgccacaggggtatcgggagaaaagagggaacagagagataagagggagaattaacccaaattccaagaagtgtgtgcgaacacaagccttatgggggatactgaagaaaaaagagaaaaaaaaacaggcaggtataacaatttgaagccgagtagtctaataagcaatgtaggaaatagttacaaactgtcgacaagaagaacaaattgagaacagtggcagaattaataaacgcagagagactggtaaaagaaaaccagcagatagatgcaagccagtgttagtt

SEQ ID NO: 712491 - DNA, 294 bp, Homo sapiens
gaaatggccagcaggaaggcggggaccggggcaaggtggcagcaccaagcaggcccacgtggttctttcaacgtcttttcatgtttgaacaagctcagatacaggagttcaaagaagcttcagtgtatcgaccagatcgtgtggcatcatctgcaggcagacctgaggcagactactccagctgggaaggtgagtgtccagagaggagctggacgcatgctgcagagggcaaggcccatcactcacgtcttctacgctctttgggagagctaatgcaaactgagacgatcttag

SEQ ID NO: 712492 - DNA, 330 bp, Homo sapiens
  misc_feature (42)..(42): n is a, c, g, or t
  misc_feature (275)..(275): n is a, c, g, or t
aaaggtccggtaaatttttttaataccgtcacccttcagganttggtggaattgaattcctctctcctctacttgagtgtgggctgggtttagtgactacttcgaatgtgtagaatatgacggaagtgttgatgcgtgacctctgaaactaggggataaaaggcattgctgcttcctccttgttctctactaaatcactcactccgggggaagccagccaccgtgtcgtgagggacatttaaggcagccctaggaggaggagggtccgcaaggtngaggaaacttgagggccgccttgcttgacagccatgttgagggggagccaccttg

SEQ ID NO: 712493 - DNA, 1186 bp, Homo sapiens
tattcatatatacaaaaagagagaggagggagagagggggaggggggcggagagagagagagagagagagaaaaaaaaagggggggggggggggcgcgcgcttcttcttgtgtgggggggggaacaaagaaagaaggaaggggggaaagacagagagagggggggggggggaggggagaagagcggagggggggggggaggaggcgcgggggcgggagagggaggcggcggcgcgaggagagggaaaaaaggtgggtgtgtgtgtgagagagaggaagaagaggagggagagaggagagagggacggcgagaggagggagaagagcacggcgcgcgaggggagggcgcggggaggcggaggagagagagagagggagagaggaggagagagaaggagagagggagagcacacacacacagaagagagagagagagagagagagggagtgaggaggagagggtgagcgcgacaaacagagaggcggaggcaacagaacacagaagaggtgcgcagggagaacacaagaaaaaggaagagaggagagagagagagagacaacacgagcgcgcgcgagcgaggagcgcggtgcgccgacagagagagagagagagagaagagggagagagaaaaagaaaacgaaagagagagagaagagagaagcacaccacacaagaacaacacacacccacagcagaaagcagagaaagagaacgtcaaacaagaacgaggagagggcagaacgacgacacaaaacaaacaaacagagcgacagagaggggaagagagacgaaaaaaaaaacaccagaaagcaacaagcgaacacgaaccgacaaggaaaagaagaagaacacaacacgcaaacgaagaaaggagaagagaaagcaaacagaaagcacgcggaagaggaggaaacaaagaagaacagaacgcaagaagacagcaaaaaaaagcatacagaagtaaagacacatgagccgaagccaagggccagagcacgcaacgcgaagtagaagaggcgagtaaagagagagcacggagtgacggaacaccgacgacaacacgacacgcgacgacgagggaagagcacgccgcaaaccacaccctaagcaacagatagaaacgaaacgcgacgacgaagaggagagagagaaagaagaccacaacaaaacaagaacggagcagggg

SEQ ID NO: 712494 - DNA, 419 bp, Homo sapiens
ccccaaaataaaaacccccccccggggggggggtggttttttaaacccagtgggaacccggtttggttttcccccccccctcttgggggggccccccggggggggggggaaaaaccccccttttttttttttttgccatctctcaaaagaaggggggcccctcaccacgtggggccattgttgagccctgggctttcgtgtgtgaccatcccggcgtgttacatatctgtattttttcccatggactgggggcttcttacgccgcgcactcagccagtgggcccgggccgcgggcagcccgcgcgcaagagcagagcagggataaaaagaaaaataaattataaaattatttttaataaccaaagcgattctttatgactataaaatatggaaaataaaatattaacaaaaacccttgt

SEQ ID NO: 712495 - DNA, 263 bp, Homo sapiens
  misc_feature (192)..(192): n is a, c, g, or t
gcacggatccccgcgtatgacataccactgcactccagacctggtgtggcacgaactgagaccaagaaaagacttttttccccccttaccatcaagaaatattattttcctcaaagatacctttatgttttaatagatagaagattacaaatagctaacaagagcgtttcaatgaggtcagacctgtctttnctagtttggggtgtgctattcactagcggtaccatgagcctcgaattctgtcacatccatggctcttagcg

SEQ ID NO: 712496 - DNA, 406 bp, Homo sapiens
ttgtgactcgagcaatctttcaacccgagcctcccaaagtgctgggataacaggtatccagcacaatgcccccgatatggactctttactgcatccttcccatcagtattaattcctcagcaatttagtacattcctccaccatttcaaaatgctcccagaactcacactagttggtacttcactacaaccttcaacctcaccatttaattttgatgtatgtctttggatttaccaacagtactttctttcatgactactttgatttagttcagaatgctcactgtacactgaatgttaattactcagctaattcacactgatttcctgtttacaaatatgatctcctccaggccattcatgtgaagtcagggtacagctgatgccagctacagaatcactatgta

SEQ ID NO: 712497 - DNA, 463 bp, Homo sapiens
gtctccaaaaaccaagctctccgagtgagcaattcctgtccctcttaagggcttacaactctaagggggtccgcgtgagagggtcttgatggattgaggaagcagagggtacgtgactgggggctgcatgcacaggtaattagatcagaacaaaacaggacagggattttcacagtgcttttctatacgtaatgtctgtaatctatagataacataaccgagtaggtcaggggtcgatctttaactaccaggcccagggtgtggcgcggggctgtctgcctgtggatttcatttctgccttttagattttacttcttctttctttggaggcagaaattgggcataagacaatatgaggggagatctcccttcaagctatctgtgtctgtgtctttgtgtgtccgtgtgtgtgtgcccgggtgtggtgtgtgtgtgtgtctgcgcgcatgcacccgtgtgtatc

SEQ ID NO: 712498 - DNA, 212 bp, Homo sapiens
tctgagcacttccagatggccgaacatgtggaggctggcaggaacaggaacgagaactcacccatgtgcggatgcaggtggcgcaccccaactccatggggagggaagctcctgccctgagacccttccagacctcgccctacgtatctcttcatcagcctggttatttgtatcctgttaaatatcctttgtaataaattagtaatctgaaa

SEQ ID NO: 712499 - DNA, 212 bp, Homo sapiens
atccgagaatacccgcagaacttttacacagcagcaccctcgctgtcagtgtgtgctgctccaagcaccctgagccacccgcagcagatagcactcctggaccagagtaaaacattggcagagtctgccctgcagtagctatacactgccaaggaggctggtggtaacccaaagcaagcagctcacacccaaggaagccctggaaggaggct

SEQ ID NO: 712500 - DNA, 188 bp, Homo sapiens
aggctccacgcttaacgatatttggaggtcagcactggtgctcactgtgtcgagcggaacttgtacatgggaggcatgcacctgagatgtgggtgaatacactgtctgaccatggctccagtgttaactgatattttggaggtcagcgactggtgctcactgtgtctgacggatacttgtcctaggga

SEQ ID NO: 712501 - DNA, 530 bp, Homo sapiens
  misc_feature (8)..(8): n is a, c, g, or t
  misc_feature (19)..(19): n is a, c, g, or t
  misc_feature (113)..(113): n is a, c, g, or t
  misc_feature (174)..(174): n is a, c, g, or t
  misc_feature (295)..(295): n is a, c, g, or t
cctccgtncgctcagtccntgaacgtctaacaaactgactgttccccgctccccgtggtggtacatcggtgcctgttgtctacacgctgtaaggtcactggaaatgtgaacancactattgtcgtgccgcggaggatgggagaggcctggcaagcacaatggaccccgaggctntctcccgacaagtaaagtgacatgatgatgatgactgccaatgtgacttagatagcgttatgaaatggattacgcctttcctagccgagcgtacagagtaagtatcacattcacggatgantagattgccaggtgttcatggatatggaaactgcagcatctcctgtcccccagccatgtcattctagctgtgaactggcacgaatgtcagcagcttttcattcagctgaatgctctttgagagattagggcagagaatggagtgttttaatgagttggaaattcatgctttgatgagatataagacctatgtgcatcttttctaatacctcctgcacccttctcctgaactctgc

SEQ ID NO: 712502 - DNA, 275 bp, Homo sapiens
cgtcagcaacatacccccatcccgtgcctatgtccgcatggacagaagcacagaagaggccacttcatcagcttgcctgagaagccaggtgacagtgaggacacagcatcagcagcctcacttctagaggagcaacagtacagcccagcttccccaggctcctccgcaaacttctgactcagttaaacaagaacctgtccttgcccagcctgcagtcagcaactctggcactgcagcatctagtactactgaggtgtaagcggggatcctctaaa

SEQ ID NO: 712503 - DNA, 361 bp, Homo sapiens
  misc_feature (100)..(100): n is a, c, g, or t
gccctgccctgtccgccgtccgccctccggtagggttcgggccttccggatgcggcttgggcgctcttcggggacctccgtggcgcggaagacccgagcntgccggggggaggccgcggcgccgcacctgcccgcctcggcgttcgtgactcagccgccccatcccgagtcgctaagggctgcggggaggccgcagcaccttctggaagacttggccttccgctctgacgcagggccgaggtgggcagtccaggccgagagcggcggccctgaaggtgagtgaggccctcggcagctgcagccggggtgtctggtacccccccggcgtggtgcttagcccaggactttcagacgcggccgc

SEQ ID NO: 712504 - DNA, 312 bp, Homo sapiens
aggatccccaaccaatatggcctcgaacaaatggacaggtaacggcaggttgatgcttgcctagccacagctggtactgtgaacaatggctcgaatacgatttacccttaaccatcacatgtccatatattcatagatgattacttatattaagtatatgttgacacctgcaagacgatattaagttcaagcacatgccaactgctaactgttcaggtattaggtagcaaggccagccaaaagttcttctggcaatccgagactacagaaatgaaccaaacgtcgaggccaaatgtatggtgggtaaccgag

SEQ ID NO: 712505 - DNA, 353 bp, Homo sapiens
  misc_feature (100)..(100): n is a, c, g, or t
gccctgccctgtccgccgtccgccctccggtagggttcgggccttccggatgcggcttgggcgctcttcggggacctccgtggcgcggaagacccgagcntgccggggggaggccgcggcgccgcacctgcccgcctcggcgttcgtgactcagccgccccatcccgagtcgctaagggctgcggggaggccgcagcaccttctggaagacttggccttccgctctgacgcagggccgaggtgggcagtccaggccgagagcggcggccctgaaggtctgcgctggggccgggacgaagcacttggtaacaggcacatcttcctcccgagtgactgcctcctaggaggacatt

SEQ ID NO: 712506 - DNA, 227 bp, Homo sapiens
tgataatacgtcaatgaaaagcgaatgccaatgacaatcgcacattatcctttaaaggctgtcgaacaagagactgattgcagtctagttaaatcagacagtgctaaatggtatcaggataaagaactgaaggacagaaagaactaattttcacttcatgtaacacacccagatctacagtggcttgtatgcagaagaacgcagccgcagccaaagagtaggccagg

SEQ ID NO: 712507 - DNA, 472 bp, Homo sapiens
  misc_feature (424)..(424): n is a, c, g, or t
ttagtatttcctattttgtcacatattaggtttgatgtacttgacgatatggtttcgatgctgagtatgcagcaaaagttggtcaggagccctcaagcttaatcacaaatttgagagtcaatcattcagtcgacaaatacttacccatcatttactatgtcccaggtctgttctaagcaccatggatgcaatggtgaacataataaagtacttgtctcctcacaaaacttacgattccagtgcagacaagaaatatataccgtaatatcagtcgtgacgagggctatgatagcgaaggcaataatgccaggcacagtggctcatacctacaatcccagcacttttggggggccaagacagatggatcgcttgagcccacgattcaagacaagcctgggcaacgtggcagaaccctgtctctacnaaaaataccaaaaaattagccaggcttggtggcgtgtgcctgtactcc

SEQ ID NO: 712508 - DNA, 1194 bp, Homo sapiens
  misc_feature (509)..(509): n is a, c, g, or t
agagacgcagcggaggttttcctggtttctggaccctcagcgggccggatggtgaaatccatccgctgcagcggatcctcaatagccacgtgcgttcgccgagagagaaggcacaggggataaatccctagcgcctacatccacggccagcctgtagccatgccgcttccttagagcctgcactagccgctggcgcgcgagctagcgagtgcacgagttccagagggtcttcccttctcatcttgcttgtgagttaacccgggggtcccgggggccttcgggtgggtgctcccttgaattgcccccttcgacacactaactccctgagagtattccccagggtgggcgccgcagggcgcaactaagctcgaagaggggaattcagccaaatcctgttcagcgtaaacgtttattttcttacgtcacgtattgacatcgagcttgatctgtgttataccaacgaccggaaaccttaagcggttcacaaacgatcatagacgcgacgggantttcctcacagcggtcccaggttccgagggccttcagcacgaatcgtccaaaagcgggcattttaacctgtgtgcggaacaagggtgcatgacagtggcgcagagcaggctcttcttaccaattcagaagattcccgggagacgggccggcagcttggccccgacggggccagccaacgtgacccaggcttgtatggcagagtacctccctgtgggcaggtttccggcttgacgagaagcaatgcttggcaggaagctgggaacccagtggttgcttaccaatatttggcgtatcgcaacagaaggaataccagtctgacgggcacccaggagtcacgacacttgtgtgctccacggcaagcacatatacaggcgctataactgtggaggccttcttgggcacggacattggtcgcacgcaccccgggggggacattcccccctttgtgttcccgcagaagagaagcaccctcaggaacgactgatagggcttcccagagggggccgtaagcacacggttatccgaacagaaggcacgaacggtcattaccggggcgaagcatggcgcgagcacgccgagatataggagcccgggcgcatcgggagagcactgggcggcattccgcgcgccacccatgggaggggcaacaccccctttgggtcgacccccggagacgcgcgccaa

SEQ ID NO: 712509 - DNA, 196 bp, Homo sapiens
tcaggctcggtacccagcctcgctggcgctgccacacccgtgcttcagttagctcaagtctcactataagaattcagttaccttgccagacgcggtgactcacacctgtaatcccagcattgtgggaggccaaggaggatggatcacgaggtcaggagttcaagatcagcctgggcaatatggtgaaaccccatct

SEQ ID NO: 712510 - DNA, 120 bp, Homo sapiens
tctagagatcccccacggtattatggcgcccagcgaatcggccaggatcaggacgccgccgggtttgaggacgcgcgccagcttcacgcagcacacgttcgggtttgtgcgtgtggtgga

SEQ ID NO: 712511 - DNA, 228 bp, Homo sapiens
tctcctggaacgtgacacaggtgaaaagagagagggagagggagagagagagaaagacacagagagagattggcccccctttttttatttggcttttaaatttgatgtataattttagcaaaaaaagttaaaatttcgctcctcccacctcataatgaggtgagtacatcaggcttaatcactggttgtcacctgtgtcattcaattcacaaaggagaatatgtttca

SEQ ID NO: 712512 - DNA, 216 bp, Homo sapiens
gagagtacaaccttaattgcttgtatagtctataaggcctacataatcttggcttctgccttcttctatgcttggataattattaaccccaatgagatgccttttatgctggaacatcccaaatatacttctgtcttgggccgggtctgagcgattttcgtctgtctggaatacttttgcctgacatcttcacttgactgatctataggagtggtg

SEQ ID NO: 712513 - DNA, 403 bp, Homo sapiens
  misc_feature (44)..(44): n is a, c, g, or t
  misc_feature (192)..(192): n is a, c, g, or t
  misc_feature (204)..(204): n is a, c, g, or t
  misc_feature (274)..(274): n is a, c, g, or t
  misc_feature (295)..(295): n is a, c, g, or t
  misc_feature (337)..(337): n is a, c, g, or t
  misc_feature (356)..(356): n is a, c, g, or t
actcctgcatacctcagatacacaggaatgtggttataaatttncctcctattgccttgtaattataagttagataacctgagacagagtttggaactagtgctttcttgcttctaagcagggacttagacagaagccatgggaatgtgagtctggcttactgttgctatgatttcctgctcttggtcattnacttgggccagnggcatgagagaagccatgaaagcccagcttttcttcccccctcgatctgctgccaggcagttgaacaaanagaaaaaaagagctatggagncaacgttccagttatggccttcctgggtttctcccccccaanaattttatggaattgaagngggccccttgggcttagttgggaaaagattggttgggctaggtttgg

SEQ ID NO: 712514 - DNA, 111 bp, Homo sapiens
atgacaaccttcactattagaatgtaaaatgtttgtccatggaccttctaaagtcatcgttatcccaccataagtacattatctctctttgggaaccctcaaacggggtaa

SEQ ID NO: 712515 - DNA, 869 bp, Homo sapiens
  misc_feature (41)..(41): n is a, c, g, or t
  misc_feature (126)..(126): n is a, c, g, or t
  misc_feature (129)..(129): n is a, c, g, or t
  misc_feature (248)..(248): n is a, c, g, or t
  misc_feature (268)..(268): n is a, c, g, or t
tttttaaagttggaagtagcaggatattctgatggagtttnactttggtttgggcccactgagtttgagatgcctttgagaaatgaaagaagtagagagagaattaaaaactggccaggagtggtngtnacgcctgtggtcccagcactttggggggctgaggtgggtggatcacctgagaccagcttgggcaacatggtggagccctgtctctacagaagatacaaaaattggctgggcattgtggnacacgcctgtagtctcgtcnactcacggggctgagatggaggattcaattgagcccatgagttcaaggctgcagtgagtcgtgattttgccactgcactcctgcctgggtgacagaagagaccctgtctcaaaaaagaatctgaaaacaacggaaccatgccttcagaattctataaagttattttcaactgataaatctatattcaggcaaagaatcaagggtgaaggtaaaataatacatttttagacaagcaaagactcaggggttacatgtaccctttcttgggaagctatcggagaaaatactccagcaaaatgaaggcgtacacaaaccagagaatgacgtggatccagcaaatagtatccaacacaggcaatattccagctatggagctagctttaaaaagaaacagtaaaaatactaatagattagctgggtgggatggcccatgcttgtagtcccagctactcaggaggctaagcaaaaggatggcttgagcccaagagttcagagcagcctggccaccatagtgagatcccttctcttaaaaataataggttattgccagatttggggcatttggaaagaagtgcattgaagataaagcaaaagtaaaaaa

SEQ ID NO: 712516 - DNA, 278 bp, Homo sapiens
acgttgacacttcagattctttttttgagacagggtctcttctgtcacccaggcaggagtgcagtggcgcgatctcggctcactgcaaactccgcctcccgggttcacacaattctgtcccagctactcaggaggctaagcaaaaggatggcttgagcccaagagttcagagcagcctggccaccatagtgagatcccttctcttaaaaataataggttattgccagatttggggcatttggaaagaagtgcattgaagataaagcaaaagtaaaaaa

SEQ ID NO: 712517 - DNA, 135 bp, Homo sapiens
gactatatgggtggcaagccagtgcagaatagagaacttcaaggatataagtctagtgactttagttagctatatcaaaggcggtctgaaatacaaggctgtaggcgtggcatctaggattaaatcatgttctta

SEQ ID NO: 712518 - DNA, 400 bp, Homo sapiens
ttaatctgatttttaaaggtctttttgtatgttacgtgttaaggggttgtttggtatccccctgaaatgttctgtgttgcagaccagagtctgtttatgtcagggggatggggcccttgcatcctttgcccttgtccccaaatttgtggagtagtaacttaatatgtaaagttgttacctcccccccttttaaatggaaatgcagaaaactgttgaatgtcctgtgttttatgttttttgtatttaagcaactgatttgtctgtctgtaacttaagtgtgggtccaagggctccttatttctttgcttttgttatccccttagtttttgggcaaatgccacctcagttttttttttgtattatcatagtttggtttaaataaactatatagtaacaatta

SEQ ID NO: 712519 - DNA, 900 bp, Homo sapiens
tgctccggttgtcgtgccgtctgtgtggcgccgggtttgtagactcttcggccgctgtgtccctgcccttgaccccgtcggggcaatacttcccgatttttaacttgcgtttgtttgttccgcccccctttgtgtacgcgcgtgtcaaagcgtggcgcccgctccctgggtattccctgggggcgtcattttaccgcgcgtgctgtgcgttggcccaccgcagcctggtttgcggtccgttgcgaagtgctgtccagtcaggcgccgcacagccctcgggtggtgtgagcaccccctttgcttttatccaaaacccgcccgagtgtgtttcttccgcgggcaccgataattttttaaaattcgtcccccggggttaaagtccctccacttgtgtattttgtgcgctactgccaactctacaatattgtaacgcacttctacccacttcgccattccaatgaatccctcttcttaaaggagattttccaaattatttaactcccccctcgaataaccttgttgagaagaactgttctatagccaaccttcgtgcttaaccttcgcccctctatcccccccccgttttactcctctgcggacaacttctcttgttggctataggaaaacaacgtgtttgccctagtccaatattcatctctcctagcttatcacggagctccacactattatcgttcccacacccctcataactccccttatcaaaattgatcacccaccacacacattgggctcaactcacccccccaccacattaaccacaacttaaaactctcctttcaccaccgagagaaacacccctcatatgttcaaacccccttccccccatttccccccttccccccacccccccccccttcccgggtttcctcttaaaaaaaa

SEQ ID NO: 712520 - DNA, 188 bp, Homo sapiens
gtgctagtgctataggtttggtcatagcctttctattagctcttagataagattacacatgcaatgcatccccgttccagcaaaaaagatcacctgcgtgagtaaataatggctccagcccagaatggttcctgcccagaaagccacaggccagaaagcagcgcctgctccaaaatgctcagaactgg

SEQ ID NO: 712521 - DNA, 102 bp, Homo sapiens
ggtctggccgtcgcgattgactactcccggcgaaagctttccggatgatgagtgggtcgatggacttgttggtgtcctgtaaagatccagtatgaagtgcct

SEQ ID NO: 712522 - DNA, 157 bp, Homo sapiens
gtgagcagaggccctgagcggacgcgaggcgactgctggagagtggcggcctgtgtgccgaagatgaggctgacgcagagggcgtgctgagagtcttgagggcctgtgagcaggaagctggagggcagaatcgcgtgggcatgtgtgcgagggactc

SEQ ID NO: 712523 - DNA, 799 bp, Homo sapiens
ggcgcgacctcgggggcccggccgcgacgcaccttgtccgggggggggcccccccgcttcatgccgccgccccccccacgcgccgtgtgcccggccggcccagcagcagggtttccaggcctgaggtgcccgcctggcccaggagaatgaaccagccgcagaggatggcgcctgctgggcacagacaaggagctcagacgacctcctggacttcagcatgatgttcccgcatgcctgtcaccaacggcaagggccggcccgcctccctggccgcggcgcacgcctcggaggttcacgggtctctgaggaccggcccagctcaggctcctgggcgcagcggcgaccagagcagctcctccttcgaccccagccggaccttcagcgagggcacccacttcactggagctcgcacagcagcctctcttcatccacattcctgggaccgggactcggaggcaagcagcggcgagcggggcgcctatgcctccttcgcgagagcaccgcacgcgtgcccggctgccctcaggcggctcctgctcaggccgagctggccctcacagcccccgggcccctgttccccttcgggcatgacggggaccctcccgagtactacccctccctactccggcagctcccggccggaacagcggccgaccggcagcctaagacaacgcaggcccaacaaggtccggaaggtccccgcgggctctcacgcatccgcgtacccagccaggccagcgtgagcacctacggccggactgcaccgaccacccgttcgcaacgaccccaacacccctac

SEQ ID NO: 712524 - DNA, 1208 bp, Homo sapiens
gcgaggcatcgaggggagtctgaccacagactgttgtgctgggaagggagacagaggcggcggtggctcaggtgatccgaggctgcagtggtggtagtaggaagatgtcgggcgaggacgagtcaacattggagcaacactatcagcttgagagacctggatctgtgaccgagtataatgcatggcggggcagaggatcgccacaacctagggatagcgttgcgggtactcgtgtgtgttgtggaaggtcgatctgagcatcagagtgtgtcggctacatgagtcgctgatgtgaggaaaggtgtagtggcgcagtgattattggcaaggagagacaggggaacacatgcgtttgcaagaagaggagagatagggactatggaacggaatggctcatatgacttgttgccccaccccagcattttacgcgtggagattgatactcgctcgatacttgtgcgagcttttctactgccatctctagcaaagcagccagagcgagcgatgtatgatttcgtccaaagggaaggggtaggatcgtatgggtgaaaatatattgggacgctttggtagggttactcgattgtaggtattggagcgtatcaaatgcgacttaattgagtaggcttgcgagcagcatattgtaggttgggattaggatggttagcatcatgggggggaaactacgaaaagttgaaacacagcgggatgggaaagaggctacggaatgatatgattttgcgatgtggcttatgggacttgccaaactcttatttggttagcagttcgcaaagggcgtcgtcactccttaacagtctcattggcgatccacacgcaattcgtgggtggtaccactatttcaaagaatgagccactatcaaaacggcttggaaaccacggcaaagggtctcctcgggggagacactagaagaggtgtttgtgacgcgcgaacacatcgtagtgttataaaccctgtggggcgatgcagggccaaagatatgggcacacgcggatattgcggtggtgcacaacaacccaacgggtttggaagaggcacaggccagtggttcacattcgtaactggggagggggaacaaaaaacccaactgtgatacacaggaaatgcgccgacaaagagccaagacagagcaaagacaaggggaaacattgaacagaacaggcgatggaaaataatagagggggtaaca

SEQ ID NO: 712525 - DNA, 121 bp, Homo sapiens
acagaggcctgtcttgcctaggtcttgtacatagcctccccctgacagcaggtcagagtggtggtggcagcggtggtggcagcagcagtggcagctggtagttaggtcggcattcctctct

SEQ ID NO: 712526 - DNA, 147 bp, Homo sapiens
caggagacagagtccctgggccaggtgtcgtcaggcctattttggacgtgggaaaaataagcagtctcttgatgcacgaacgccctgcctatctgtattcattggaggtgcagctgactgcacagacgtcactggggcctgtgtctg

SEQ ID NO: 712527 - DNA, 670 bp, Homo sapiens
  misc_feature (193)..(193): n is a, c, g, or t
  misc_feature (510)..(510): n is a, c, g, or t
tggagacatggagtctcactctattgcccaggctggattgcagggtgtgcaatttagactcactgcaaccgccgccccccaggtccaagcaattctccgtgctctcccatctcccaaagctgctgggattacaaggcttgcgccaccagtgctcggtgtaattttttcggatgatttccagctagaagacggngtttccaccatgttttggccaggcgtggtctcgaaactccgtgacctcaggttgatccacccaccttaagcctccacaaaagtgctctcagattgcgaggctttagcccacttgtgtgcctgtgttccagagaaacacacagatttctctgtagatggaacacttaggtgacgaccagacattcgcccgttaggaactctgaacgaggacgctcgttgggcgtgcctcacaggggaaagcccatttgtggccgagcacaattagcctcgtgatacagtgtgaaatacggggatttccccttgaagcactttcacagncagaatctcggggatatgtctcgtggtaaagaccctcatttgagcttctagaagggccgcgaaatttcaggaattggctgtgctgcaaaacgagacccatgattaccaggtcaaaagagcaaacgacaatataggccacagaggaactagtgtaaggata

SEQ ID NO: 712528 - DNA, 553 bp, Homo sapiens
ctcgagtatacactgaaaatggtagttggccttcaaactagccttcacatctgttcaactctttttttgttttgttttgttttgttgaggcaggatctcactctgtcactcaagtgggagtgcaatggcaccatcacgcctcaccgcagccttgacctcctgagatcaagcaatcctcctgccttattttttgactttttgtagagacaagttgtcactgtgttaaactcttgatgcagctgaaccgcggcattagctgtactagtttgaattctgagtcctcgaaccatgaggaaattcagtgtaggaaggacgagaaagagctttttaagcataggaatcttcaggccccagccctggagagtctaattcaagaggtcaggagtgggatctgggagaatacaggtgattcctacctgcagccaggtttgtgaaccactgctctaggaactggtagtgtttgtttgtttgtttgtttgtatgtttgtttgtttgagacggagtcttgctctgttgcccaggctgaagtgcaggaaacaagaccggggatcct

SEQ ID NO: 712529 - DNA, 140 bp, Homo sapiens
agccgtgtgtacactagatgaacttgataatgggaatcctccgaagctctcccacactcatgcatttgtatggcttctctccagtgtggactctctgatgggcttgaagatttgaactcagagataaagaccttttccat

SEQ ID NO: 712530 - DNA, 205 bp, Homo sapiens
ctctacaggctcagcgcttagttctttgagcctcggctggccgtcggcctctggcaagctcgaacttccggcccttggcgcggacgtagggtttgcgtgtggctgtgcggggttcctgggcgccttgccctgaaatgcctggtacacctactcggccccttgcgacggaccggacgacgcaggacagatgccacatgcccgttag

SEQ ID NO: 712531 - DNA, 1622 bp, Homo sapiens
  misc_feature (1358)..(1358): n is a, c, g, or t
cctcgcgtgctcgcttcagttgactcgttcgtgtttgtttgtccctagtgggtggtccgggttgttatcttcgtgcgctcgtctcgtgtgtggtggttgccgccaccttcgtcctccgcatcgtcctgttgcgtccgctccccgcaataagtaggtgtgggtcgccagcagagcttcccgcgcggggcgcacagtggttgcgtgcgcacaccgccagaggtggtcgcagcctcttttggggggtcgtccacccgggagcatatatgtcctcgccctttgtcgtcccggcatgtcagtccagggggtctcccctgtgtggtgttgcggcggagtaccgacactggcgtccttggctctcctcgcccctcgcttggtggaagtggtgtggtcgccctcttttattgcgggccctctacagtggagtggtcggccctgtggggagccctaccccagaagtggcgcgcgttgaaaattgtgggcggaagagagggacgcctgtcttttgtcgcccgctgtttgaagacctgtgttctttattacttctgtcgcgcagagcgccgcctttttgtgtggtgccccgcctcctcttccccctgggggatgtttgtagaattctctctcgaggagttatatgtgaaaatagggagggaggaaattagggtgctttctgtgccaacacctttgtcggtggggatagccccccaaaggagccctcggcgttccgccaaaatgtgttgaaaggaagtggggcccccctcctcggacgcacctctgtgagaggagtgttgcggccccccaccctctatgcacagggagaagtcttctgttcttttgtgagagaggcctcgagagtgagagaggcaacagggaagttttttctctctcgcccctctctttgtccacaaagaactcttgtgtccctcgcccctcgagacaccctccgagagggggaaaatactataatttctcgggagtgtccacactccgcgctctctcgggtggttgagatatacccccacctcgctcacagacaagggagacacactttgtctctgaggtgtatgagacaccgcggtttgtgaatacatttagagagagatggccacccagaggtgttatctcacaccggaaacatttcttctcagacgcatctcccggatggtgacccctgtgtgaaataaaagaaatgtgcgcacgcacccacctccagatgccacgcccgcataatatatgtcacccccctccaagataattaaaaaaaagagaaatcccaatattctctgtatagaagaacaccacgcgcttgtctcaagcgccccttttctctcgcccacgtttttctcaaggaggcgcgcacnaagaatatagagatttggtgagaatataggagaatataagctcttatagttctttacaccaccgcagcacctcctacccagagtttatgagaaaaaagtttaccaccactaatcttatgtttaccacgagaaaatacttgtgctatgaatatactttttcaaaaggtacattttgaaatacccctttaaaactgctttttttttccacgcccagtatcccacccacttgtttttgcttccaataaattttttgggaaaactcca

SEQ ID NO: 712532 - DNA, 884 bp, Homo sapiens
ccgagggtacgtctttggccccgtccgagcgccccccttggtggttgttcgccacggcggcgtcgcgcccgcgttcgggtccgccggtggtgtttgtcaggccccgccgcgggtgtgttcccgccgcacgattgttttgttggtcggcgcacccagcgcgccttctgcatcggcaccgcttcgggtggcgccgagagggcctcgctctctacctgtcctggttgggggcgagggacgcacaacctccttcggaacatcgtctgcggcgcgcgtggatcttccctcgccacggtgggtgcgcacggcctgcctctgagggtgcaaaccgctcacacgtcgttcctgttgggcccccgcgcacttacattgtgcgcggggtagcctcctctcgtcgctcctccgtcgcggatgattgtattcccccggccgccccatctttgtgtttctcttgcgtgggggggccatcccctcgcgcgggcgggggcacgcaaccgatgttctctcttctctcctcgcggcggcgatctttcttcgagcgccgccactcgtcggggtgtatcttcctgcggcagccgcgcgctcacacgaacttgtttcatctcccccgggtgtgcgtttggagtggtcggcgcccccccagcgcacaccacacgctggcgtgtggtgcagcacactcacgcacgggttcattcactcgcttcagtgtggagcagggttggtgcctcccccaccttgtggtgccccccccacgcgattacgtcccccccgccgtggcttttctctctcggtcgcgctcctttctacgcacgccatagattgggccaccccccctgttcttgtcccccccgggaagttgggatattaaatcacaaaccaacataaca

SEQ ID NO: 712533 - DNA, 851 bp, Homo sapiens
gaactcggtggtggccactgcgcagaccagacttcgctcgtactcgtggcgcctcgcttcgctttgcctccgcaatcatgtctgacaaacccgatatggctgagcatcgagtaaattcgatccagtcgaaactgagagaagacagagacgcaggagaaaaatccactgccttccatagaaacgatgaacaggagaagcaagtcaggcgaatcgtaatgaggcgtgcgccgccaatatgcgctgtgcattgccacaagcattgccttcttatttatacttctttgtagctgtttaactgggtaagatgcactgaggttggttccagtttaacttgactgtgctgcccctttcacatcatagaactactgacatccgaaggccgtcgcctgctttcccatctgtactatctatctggctggctagggaaaggcaaagaactgtgcatgttggtgaaggccggaagtggggtggaagaagtggggtgggcacgacagtgcagactctaggagtacatagccaagctggcccaaggctgtgctgtaggctgtacgtgcagtgtcatcagagtgccatttctttctttcgtcccgcgtgcttctgactatatggaatgccaaatttccgttatatatgcatatagctccttaatggcaacataatttaatgtgtgggctccggtcagtccgggacaccgtgtaaacccatgtgctgggccttaccgctgtcgtggtggctcggacgccgcgttgcaagggaccgggtccaggcccgtggagtctcccagtaaacccgcggcccgggctttcacaccagaggtgtgggtagggcgtaaaggccaaagcgtaaccggg

SEQ ID NO: 712534 - DNA, 430 bp, Homo sapiens
  misc_feature (394)..(394): n is a, c, g, or t
tcctttaaattaatgcctgtacttactaattaaactttctttaatattacattttgtcaaatgaacctcacttctattgctacctagtaatgtttggtttggttctttattttggtatttctgactcttacaatttagaatcttttattaaaacattgaaaccaggcgtggtgattcacgcctttaatcccagcattttgagatgctgaggtggggggattgcttgaggcaaggtatttgagactggcctgagccacatagtgagatcctgtttttacaaaagataaaaaaaattagccaagcctggcagtcctagcttctcaggagggtgaggtgggaggatagctagagcttgggagtttgatgttgtagtaagctatgatcacaccagtgnactcaagtcttggcaacagagtgacaccctgcctca

SEQ ID NO: 712535 - DNA, 167 bp, Homo sapiens
ggttggctcaagtcgtttccacacactcgattttctctccgtattccaggcttggagtcttctgttaacccattgcgtggatgcctcacgagaatcaccatttatgatgatcaagcctatccattctctcaattcttacccttcactctcaccagttcttccctcga

SEQ ID NO: 712536 - DNA, 135 bp, Homo sapiens
  misc_feature (99)..(99): n is a, c, g, or t
  misc_feature (129)..(129): n is a, c, g, or t
gcagcacgttgatcactggcgcgtcggcttcctgcacctcgggttgctgccgtcgcagtctgccatcgcaaccggctccgcagtgttcagcgtgttgtnctcactggccgcccgatggttcgggaagcnggtacc

SEQ ID NO: 712537 - DNA, 98 bp, Homo sapiens
tcaagcttctaacgatgtacggggacatgtctgtagctattttcctccctttctctgtacctctaagaagaaagaatctaactgaaaataccaaaaaa

SEQ ID NO: 712538 - DNA, 416 bp, Homo sapiens
tttcgatacttcgacagccggctcagctcctcatggccctgctgcaactgggtcgcctgggcctccaccaaacgcacgcacaactccatgatgtcaaacaatcactcatatgtactacaatcacagtagatctagcagagacataatccagtgcccgtccccggtaaccagatagagccgtcactcaaagcagctcctgcctcttctgactcctgggccaggcgcctgggaacctctgcgttgtgggtcagggcagcctccaggctctcagccccccgccagaaatcccggcgagcctctcggaaaccccgtagacctctgaggatgggaaaataacacagaatcgcagctaacacccacctgccccagcagagcattcccagggtaaagccctcatgtccttccagttagtctct

SEQ ID NO: 712539 - DNA, 777 bp, Homo sapiens
ggtggcggtccgctccctccgcggctcatggcgagccgacgtcttggcacggatccgggaccctcaggccgttgcagtcgccgtgccggctgctcgggccccagccgccgggacgctgtggtgactccgtcgcgctctcgcccgtcggccccgttctccgcaccgatgacccaatatgctcagggactaattgtcattagcctccggtagcggccgtaaggtagactcgggccttgtctggcatagtgcgccctgcacaaggaatccattaatttggacgagggtcattgaagaaatcgcatgaaccaaagaagatctctggcaaccatcatttagtaggataacatacatttcattgttagaagaaggccttgaagtagccgggcacggggttgccagggttggattgacgatacttccgatgaggagagtggagattccagtaccagtgatctcattcagtatgtctagctgatccaaggggacaatagaatctataggtgggtcgatgacgatatggggctgacctggtttggagattaatagcatgtgttgtctaattgccttccagtagcaatcctccattgggacagatcgtagggtatccctttgagaaatagatcgcttgcgtttgttttgcaactggccgagataattatagtatcgaaatgccaataacctttaatccctttaagggggacctggcatggaaggaactgttctgtagggggggaaacagggattttgcgaagcccaggaaggaggattctgaaatta

SEQ ID NO: 712540 - DNA, 524 bp, Homo sapiens
ctggaaaacctcttcttgggggcctgtcttgagagtttccatgaaaaaggccgtctcttccatttttagaccttctgtcgcccccccccggggtccagcctttacatggtggccgataaattgcacccgccccccgaaaaagctgaaaggggggttggttattttttttaaaaagccaggctgggtgcccagatttttttttaattggggccggggggtttgggggcacaagccgtccccccccctccgccaggggtttaaaaggcccaaagcccttccctttaaagcccgatgggggccctgaatttttggaaaaaactttatccgaaaagcggggccgggggccccaactggggcaccccagattttgggttttttttgaggccccttaaggaaaggtggaaaaaaaacccccccaagaaaggtggaataattaaacttttttataaaggggggcctcccttttgggaaccccctttttggggttaatttttgagaattgggataaaattggttccttttta

SEQ ID NO: 712541 - DNA, 713 bp, Homo sapiens
gtttggtggggttacacgcgggttcaacatgcgtatcgaaaacgtgtctatttctgtgtcggtggcccatctatcctggacacggtcagtgactgttcgtccgcaacgattgcaaggtgttcagatttgtgcaaatctaaagtgtcataaagaaactttgaaacactgaagcgcaatcctcgcaaagttaggtggaccaaagcattccggaaagcagctggtaacagagcttacagtggataattcatttgacatttgaaaaagcgtagaaatgaacctatcaaataccagcgcaggagctatggagataaaactattgatgcgatgaagagaggttgaagaaatcaaacagaagcgccaagctaaatttataatgaacagattgaagcaaaagataaagagctacagaaagtgcaggatatcaaagacagtcaagcaaaagatccatcttatccgagcccctcttgcaggcttaggggagacagttggaagagaaagtggtacagcagttacaagcaggatgtggacatggaagatgcgtccttgaaaaatctctgtaaccattgtcttttatgtacatttgacaatgccctttggatacttggaacctgtaactgatttactctttcgtacagtaaggtcacttaaatgaaaaagcgattaagagacatctttgctgcatgggcaatctacataatatcagatattacgga

SEQ ID NO: 712542 - DNA, 315 bp, Homo sapiens
cctgagacgaattcatcacttgacgatgagtgtaaagagagtccagaacaacaacagccttacgcaaagaagagtaaaattgcaatcatcagggagaagcacacagctttgatgacgcccatcgtatttgctttggagcatgtgaggagtatcacagcggatcctgaagaaacacctcatgaaaaatggtttcaggataagtatggtgatgccattaaaaatgccctcagaataactgaagactccattgaacccagccaagcctgggagcagctggattccatttaaagagataatgctaagttcgatcgagct

SEQ ID NO: 712543 - DNA, 155 bp, Homo sapiens
cagtgtataatgagacagcgatagtattattcttctaggcatacgtagggacggatatgaggtgtgagcgactatactagatattcctagaagtgagatggtacatgctagtataatatttatgtaaatgaggggcaactcgaaagccccaagcg

SEQ ID NO: 712544 - DNA, 356 bp, Homo sapiens
ctgcgcatccacgcatggcactctcgtctggcctcccttttggaccaccatgcctgctcacaggcttggcaacaacattccttcctcccagctattcgcacgacgctgttccctctgcctggcaatgacggaaccgtggcacaggctccactggtgttttacgagggttaagcctcttcttcatatggtgccattttctctcccgagtgacccccagcctccagtgtctaagttcttagaatgggagtgaggtggacacattggcctggcatatagccagcagcccctatcctcttcttcccggcctcttttgcatccacttggcttccctgccccccatgcgtcgattgccaggt

SEQ ID NO: 712545 - DNA, 106 bp, Homo sapiens
gcctcttcataactacctgatgttcctgtcgacgtgggatagaggaacggtcccacagccgagcatcctaaagccccggccctgtgaacaggcaagcttatctttc

SEQ ID NO: 712546 - DNA, 421 bp, Homo sapiens
ctagatacaacatgagcagtgctctaaggtacacggctggggtgcagctagaagctgactgactcaccttttcctgagtgacccacatagccgccttccaccttctaacaaggtcctataacatgccttcgctggtggcttgtggttcacattgtgaccaaggaactgcatgatacacttctgctgggggaggagagaataaagatctatcaatcactaagccagaccctgaacttgctcaccaaactgtccactctgctgtgactataatcactgctgctcaggaacctatcgaaagtgcatgcagcccttcgaatctggggacctgcatccatggattcaaccagcagactgaagatattcgagacaaatcactcaaagatggctattacgaattacacaatagagtgtgacaactctt

SEQ ID NO: 712547 - DNA, 393 bp, Homo sapiens
ctcggtgtcgtaatgctccagaagaaccctctttactctgccttcggcgtttctcaccgcagagggagtctctcctcacagacaccacatgctggggaatgtagcggggtcacacctagatgccagcacatctactgagtctcactacgaggcccatggcatgtactacctaggttaccactagctgattattcaaggcccaagggctctttagtcagatagtgaagaatcctgccattactgagtccttcccttcaaggaagcaggttcccttgtagcccagagtttgtttagagatgttatcccaaagctgagacctgaaaggggggtctcatgactctgaccagtgccccctcctactgtaagctagtatccaagatgcaagacaaagtc

SEQ ID NO: 712548 - DNA, 599 bp, Homo sapiens
  misc_feature (3)..(3): n is a, c, g, or t
  misc_feature (327)..(327): n is a, c, g, or t
  misc_feature (329)..(329): n is a, c, g, or t
  misc_feature (338)..(338): n is a, c, g, or t
  misc_feature (400)..(401): n is a, c, g, or t
  misc_feature (453)..(453): n is a, c, g, or t
  misc_feature (455)..(455): n is a, c, g, or t
  misc_feature (467)..(467): n is a, c, g, or t
  misc_feature (471)..(472): n is a, c, g, or t
  misc_feature (495)..(495): n is a, c, g, or t
  misc_feature (503)..(503): n is a, c, g, or t
  misc_feature (514)..(514): n is a, c, g, or t
  misc_feature (517)..(517): n is a, c, g, or t
  misc_feature (520)..(521): n is a, c, g, or t
  misc_feature (555)..(555): n is a, c, g, or t
ttngcaggccaatgatttcatcaatatccaattaaattttagtgtgacaactacatttagtttgttttcttacacagattgaacattcaccattatgacagtttcatcatgctaaaatctattcacaaacttacactttggaaaaaagtgtatttctagaaaattttatgtacaatacaaatggaatagatattaagtcactgaattgtcaagctacataaaataaaaccaatcaaccaccagtagtatacattaacagcatttttgaaaaaaaattttcttttacattcagcagagttatgttcatgaagaatttctacatttttnanagtaatganagtgtacacaatttaataattgtgaaaatagaaagaattaaatagcccaaatatagtataannctaaacaccgttactgtctatcagtttgggcttatgtgaaataaagggcgcngnggctctggggcngttnngctttgggctttgggggtgggtnggccatgngcgcagagganggnttnngctttacattgacacatttctgtgtgtcaatgtngaagggaaaagaggtttaattataccttttaagcaggcaaacca

SEQ ID NO: 712549 - DNA, 185 bp, Homo sapiens
  misc_feature (178)..(178): n is a, c, g, or t
cggccatgccgcactgtcagcggcgtatgccgccggagcgccagcgaaaccgcaagcgacagtcgcgatatcccgcacggtgtcgtagcgcagcagcgggtggtcatggacatcctgcgatgcccagatcaacccggccagatcaccctgcccataaaagacgcatgtcacccgcaanctggtac

SEQ ID NO: 712550 - DNA, 118 bp, Homo sapiens
ttactgagaaaggaaggccaagggatgaggtggaacgggcctggggcgccacagactaaggcagagactcccctacctagcgcccagcccaaacagttggccgatcctgcccatgctt

SEQ ID NO: 712551 - DNA, 214 bp, Homo sapiens
gtatccccatacagagtacattataaattcaaagctaaattctttcattacactgaaatcgctaaaaaaaaaaaaaaaaaaaaaaaaaaaaaaactttggcttaaaaaattctcccccgggttaagtttttccatttaatagttttcttgttgggggccatattttcccccagaaatttttcccactttaggtgtaaacatttggaaccgcggg

SEQ ID NO: 712552 - DNA, 187 bp, Homo sapiens
gagaatctgagcttgagatggaggctgctcagagccagctctgcccaacgaacccctcgtcaatttccagtgcggaagcagcccctggacgactggtgccacatggcaggactgggcgtggtcttgcaggaggatctccagtacccctgcctgccctcccttacatgtcctctctgtccttgaatgt

SEQ ID NO: 712553 - DNA, 116 bp, Homo sapiens
tagctggcccagattcggattgatagtgagaaagtgctgacgtagaagtggagctggacgggcttagagacacagtgaaggccctgactcgggaacaagagaagctccttgggcaa

SEQ ID NO: 712554 - DNA, 430 bp, Homo sapiens
tccagcgtccggatccgggccagctgctccagctgcagcaccttgtagggctgcagctcttgcacctgctgtgccatctgtgccgcgcgcgcctccatctccaacagctgcgcgcgcaccccgtcctcgcgcccgtggtagagcgaggccagttccgcccgctgccagtggatctgcgctaggtccacgcggttctgctcgtccagccggacgatggctttggcgcagcgctgggcgcgcgcgctcacgtagctggcgtagagccggttctcctcgcgcaggcgcagcgcctcgcggtccaggaaggcgttctctcgcagcacctggtcaacgctctcctcgcaggtgtccagctgctccgagagcagcgcgtgttcgcgttgcaggtactgcgcgcgctccgatagcggctgctcggcacccgcggccg

SEQ ID NO: 712555 - DNA, 2509 bp, Homo sapiens
  misc_feature (8)..(8): n is a, c, g, or t
agcggagnagcctctgctccaccgcggcgagaggcatgggcacgtggctgccgagggtggccgagctctgggaagaaaagcccgtgtgcctctgcatagcgtcgctacagcgctgactcggtgtggattgattggaaaggtttgagggagtacttgggaagcatggtggcacatgatgagactggaggtctcctacctattaaaaggaccatacgagtcctagatgtcaataaccagtccttcagagaacaagaggagccaagcaataaaagagttcgacctctggctcgtgtcacgtccttggcaaatttaatctctcctgtaagaaatggagctgtcagacgttttggtcaaacaatacagtcatttacccttcgtggtgaccacagatccccagcctctgcccagaagttttctagcaggtcaacagtcccaacacccgccaagagaaggagcagtgcactgtggtcagagatgctggacatcaccatgaaggagtctctcaccaccagggagatcagacggcaggaggcaatatatgaaatgtcccgaggtgaacaggatttaattgaggatctcaaacttgcaagaaaggcctaccatgaccccatgttaaagttgtccatcatgtcagaagaggaactcacacatatatttggtgatctggactcttacatacctctgcatgaagatttgttgacaagaataggagaagcaaccaagcctgatggaacagtggagcagattggtcacattctcgtgagctggttaccgcgcttgaatgcctacagaggttactgtagtaaccagctggcagccaaagctcttcttgatcaaaagaaacaggatccaagagtccaagacttcctccagcgatgtctcgagtctcccttcagtcgaaaactagatctttggagtttcctagatatccctcgaagtcgcctagtcaaataccctttactgttaaaagaaattcttaaacacactccaaaagagcaccctgatgttcagcttctggaggatgctatattgataatacagggagtcctctctgatatcaacttgaagaaaggtgaatccgagtgccagtattacatcgacaagctggagtacctggatgaaaagcagagggaccccagaatcgaagcgagcaaagtgctgctgtgccatggggagctgcggagcaagagtggacataaactttacattttcctgtttcaagacatcttggttctgactcggcccgtcacacggaacgaacggcactcttaccaggtttaccggcagccaatcccagtccaagagctagtcctagaagacctgcaggatggagatgtgagaatgggaggctcctttcgaggagctttcagtaactcagagaaagctaaaaatatctttagaattcgcttccatgacccctctccagcccagtctcacactctgcaagccaatgacgtgttccacaagcagcagtggttcaactgtattcgagcggccattgcccccttccagtcggcaggcagtccacctgagctgcagggcctgccggagctgcacgaagagtgtgaggggaaccacccctctgcgaggaaactcacagcccagaggagggcatccacagtttccagtgttactcaggtagaagttgatgaaaacgcttacagatgtggctctggcatgcagatggcagaggacagcaagagcttaaagacacaccagacacagcccggcatccgaagagcgagggacaaagccctttctggtggcaaacggaaagagactttggtgtagagaaggctctgtgtgttaactgatgggagagactgtttgtttataaatgtgtacagttttgttttctcgtaaggggagcatcatagggttactttataccagttgtaacattttcattgtttttggttgttcttttttctttttttaatggcagctaaagatatacagattactgttaaattgcagtccttttttttttaaagatattttcttgagttatttagaacatggtaagcctggtattttttaatcaaacaaaatatttatgaaatgggttttctcttaattctggattcatcatggctttctaataccaattgtaatatttacaatattcaccaaaacttagaattttgcaaatgctggaattctgccagtgtttctttgctaagccttgcatgcaaaatttgaaattttaacattggcacccaaaacctacatggaatgtatgtctggagtatttcaaactttacattgaaacataatttccttggaaaacaaaccataagcctgaggaggtttttatcaactggaatgctttatattagtttgtttttcactgtacattcctcattttacattcatttaacctgccgattatttaatttttttattgtaaagtagtttttagcatttgcttttatttttttactttgatgccttttcaaattggcatgtctttaaagtatttttcttcctgattaaaaatgtgtgtgta

SEQ ID NO: 712556 - DNA, 1098 bp, Homo sapiens
cgccttgaaaccagacatctgatcagcatgcaaacacacacacacacacacacacacacacacacaacacacacacatacacacgcccggggaggcaggccggagagacctcgctcgcgcaagaaggaggggaagacgacggaaggcataggcatcaaatacagacacgacaagtagagaacaaggagtacaaagaaagactgagaaacacataaagcacacgacacccaaacaagaggataccaacacacagacgagacgggccaaaaaaagagaaagaagaaaaacaaagaaaacgaacgaaacacaaacgcaaactcaagaagacacgcaacactcaggcagcgagagagacaaacacacaacagacgacccggagaaaggaagccacaaaagaaggacaaaagaaagacacgactagacgagaaaacaagcgaaaaaaaaaagaacgcgcacgacacaaagacaacccaagggacaaaagacgaaagagaaggaaaaaaacgaagcaagaagcaaaagaaaaaagaaacaaaggagacaaaaagcccaacgaacaagaacaggagaagaacgaaaacaacaccaaagaaaaaagacagaaaacgaaaacaaaaagaaaaagaaagaaaaaggcagaagagagaagaagcggaccagaagcaaggaaaagagaagcagccaaaccacagagccagaaagaggcggaccggacacgaacgccaagagcaggaacacggcaggaacagaggcgagagaaagacgacgcgcgacaaaaaaacagggagaagacaggagagcagaaaggcacaaggagaacagagcagacgatagcacggaacagagaagcaaaggagagagaagaaagagacccaaacggagcacaacgggagagaaaaacacgcagacagaaacacggacggagagcaagaaaaagaaagaggaacacgagagagacgcaaagacgcagaacaaaaacagcaaaagaaaaagacagaacaaacgaaaaggaaaagcaaaccgaacgccaaagccacaaaaacacaaaaagaaaacaaagaagaagaaagagaagacgaacaaagaaaagacagaaag

SEQ ID NO: 712557 - DNA, 464 bp, Homo sapiens
  misc_feature (8)..(8): n is a, c, g, or t
agcggagnagcctctgctccaccgcggcgagaggcatgggcacgtggctgccgagggtggccgagctctgggaagaaaagcccgtgtgcctctgcatagcgtcgctacagcgctgactcggtgtggattgattggaaaggtttgagggagtacttgggaagcatggtggcacatgatgagactggaggtctcctacctattaaaaggaccatacgagtcctagatgtcaataaccagtccttcagagaacaagaggtaagactttaagagaaacgttaggcaaaaggaatgttttctaactccacggagcttttaaaatttttaacaaggtattaacagtataattttaaacttttgatcttattattacaatgtatgttcttgatttatgtgcaagcttgaaatgtgtttagggactgtggtctaagtttaaatagtttatacatagcatagcttgagtgtac

SEQ ID NO: 712558 - DNA, 957 bp, Homo sapiens
gttattatcgaaaccatcagcctactcattcacccacgtagccctggcgtacgcctaaccgcttagcattactgcatgaggcacgtactcatgcaccataattggaagcgcgacgcctagcaatatcgatcggcattgaatggcttccctctacagcttatcatcttcacaagttctaattctactgactatcctagtacagatcgctgtcgacccttaaatccacagcctacgcttttcatcagctttctagataagccttctacactgcacgacaacacataatgacccaccaatcaccatgccatatcactatagtaaaacccagcccatgacccctaacaggggccctctcattcctcctaatgacctccggactaccatgtgatttcaacttccactccataacgctcctcatactaggactagtaaccaagcacagctaaccatagtaccaatgagtggcggcgatgtatacacgaggaaagccacatatcctaatggccatcatcacggagccatccctgtcccaaaaaaggccttcgatattcgggatacctcctatttattactcggtccgaagtattgttcttcgcagagattttgctgaggccttttagcactccagcctagtccctaccccctactggggaggcgatgtgggccgcaggtggcattaccccgctcatatccgctataagttccagtcctaacacatgcgtttctcgcatgggagttttatcacctggctctcatggtctactgtgtctcacgtcggcatgttccagcctggtattccattactgggtcctattttcccctaaggctcagaattgggtccgtgcctgccagggtttagctctcttttggccggtcccgggtgcggttaggtccgtcccatggcccccattttgtccccttttttccccgcttttttggggctgtttcctgtggcca

SEQ ID NO: 712559 - DNA, 349 bp, Homo sapiens
acaggtacggtccgaatcgatattcgaagcgtcggatatacaggagttctgaatatcaactttgaagaaagggtgaatcccgaggtgccatgtatttacatcgacaagctggagtacctggatgaaaagcagagggaccccagaatcgaagcgagcaaagtgctgctgtgccatggggagctgcggagcaagagtggacataaaccttttaaccaatttttttccccatgggttttccacacgaacgaattctttgaggatatcctggaccttcaggaccccgatcaaccacgggaaaacgtaaacgggtcaacctctttaaccaggatgttacccgggtcaggccaaa

SEQ ID NO: 712560 - DNA, 3236 bp, Homo sapiens
  misc_feature (8)..(8): n is a, c, g, or t
agcggagnagcctctgctccaccgcggcgagaggcatgggcacgtggctgccgagggtggccgagctctgggaagaaaagcccgtgtgcctctgcatagcgtcgctacagcgctgactcggtgtggattgattggaaaggtttgagggagtacttgggaagcatggtggcacatgatgagactggaggtctcctacctattaaaaggaccatacgagtcctagatgtcaataaccagtccttcagagaacaagaggagccaagcaataaaagagttcgacctctggctcgtgtcacgtccttggcaaatttaatctctcctgtaagaaatggagctgtcagacgttttggtcaaacaatacagtcatttacccttcgtggtgaccacagatccccagcctctgcccagaagttttctagcaggtcaacagtcccaacacccgccaagagaaggagcagtgcactgtggtcagagatgctggacatcaccatgaaggagtctctcaccaccagggagatcagacggcaggaggcaatatatgaaatgtcccgaggtgaacaggatttaattgaggatctcaaacttgcaagaaaggcctaccatgaccccatgttaaagttgtccatcatgtcagaagaggaactcacacatatatttggtgatctggactcttacatacctctgcatgaagatttgttgacaagaataggagaagcaaccaagcctgatggaacagtggagcagattggtcacattctcgtgagctggttaccgcgcttgaatgcctacagaggttactgtagtaaccagctggcagccaaagctcttcttgatcaaaagaaacaggatccaagagtccaagacttcctccagcgatgtctcgagtctcccttcagtcgaaaactagatctttggagtttcctagatatccctcgaagtcgcctagtcaaataccctttactgttaaaagaaattcttaaacacactccaaaagagcaccctgatgttcagcttctggaggatgctatattgataatacagggagtcctctctgatatcaacttgaagaaaggtgaatccgagtgccagtattacatcgacaagctggagtacctggatgaaaagcagagggaccccagaatcgaagcgagcaaagtgctgctgtgccatggggagctgcggagcaagagtggacataaactttacattttcctgtttcaagacatcttggttctgactcggcccgtcacacggaacgaacggcactcttaccaggtttaccggcagccaatcccagtccaagagctagtcctagaagacctgcaggatggagatgtgagaatgggaggctcctttcgaggagctttcagtaactcagagaaagctaaaaatatctttagaattcgcttccatgacccctctccagcccagtctcacactctgcaagccaatgacgtgttccacaagcagcagtggttcaactgtattcgagcggccattgcccccttccagtcggcaggcagtccacctgagctgcagggcctgccggagctgcacgaagagtgtgaggggaaccacccctctgcgaggaaactcacagcccagaggagggcatccacagtttccagtgttactcaggtagaagttgatgaaaacgcttacagatgtggctctggcatgcagatggcagaggacagcaagagcttaaagacacaccagacacagcccggcatccgaagagcgagggacaaagccctttctggtggcaaacggaaagagactttggtgtagagaaggctctgtgtgttaactgatgggagagactgtttgtttataaatgtgtacagttttgttttctcgtaaggggagcatcatagggttactttataccagttgtaacattttcattgtttttggttgttcttttttctttttttaatggcagctaaagatatacagattactgttaaattgcagtccttttttttttaaagatattttcttgagttatttagaacatggtaagcctggtattttttaatcaaacaaaatatttatgaaatgggttttctcttaattctggattcatcatggctttctaataccaattgtaatatttacaatattcaccaaaacttagaattttgcaaatgctggaattctgccagtgtttctttgctaagccttgcatgcaaaatttgaaattttaacattggcacccaaaacctacatggaatgtatgtctggagtatttcaaactttacattgaaacataatttccttggaaaacaaaccataagcctgaggaggtttttatcaactggaatgctttatattagtttgtttttcactgtacattcctcattttacattcatttaacctgccgattatttaatttttttattgtaaagtagtttttagcatttgcttttatttttttactttgatgccttttcaaattggcatgtctttaaagtatttttcttcctgattaaaaatgtgtgtgtatgtgtgtgtgtgtgtgtatatatatatatttttttaaatcacattaattttaccaagtgaaaccaagccatactgtttttgagccaattaagaaaattgccatttttaaagtgtagcatttcagggtaaagacccatgaaatggcttgatgtattctagactactgaaagaaaaccacttcaaagattttgttgaaagttttagtgttgtctgaaatgcaagagggaaggtgattggtagtgagttaaaagaaaaagagaggaaaagagagtagttttgtcttcaagtaaaatgtctggttgtgccagacatttcacaagtgtgaaaggagataggagaagctcaacttgagggcgtgtagtaagttgtagaaggctcgaggggacgtggacttatttgccttggtttgcaatacctgcaaataatgagtttgaaaagaaacaatgaaatgtgttaaaaatttgaccatattagataaattttggtggatttagtcataagatggaaaaagactggtgaatcttttattacaaaatgtttctgttaaaatgggatcatcatctttgaaaggggggaggaggagtaaaagcccgattataatggtgatcaattcaagtcagtgttgactattctgtgaaatatatttggccagtggaaatgataatcagaaaagactgtaaatagatccatccaaatgatttctctgtacaaatgaatgatactatta

SEQ ID NO: 712561 - DNA, 3356 bp, Homo sapiens
gcggtggcggctgcagtccgctgagaggcgctttctgcctggcagaggctggcgggcatcgtgcccgtccctgccggtctcccgggcacccggccaccgccccaccccctcctccgtgccatggagcccgagctggcggctcagaagcagcctcgaccgcggaggcgaagccgccgggcctctgggctcagcacggagggagcgacggggccttcggccgacacctccgggtcggagctggacgggagatgttcccttcggagaggcagctccttcacattcttaacacctggccccaactgggacttcactttgaaaagaaaacgcagagagaaagatgatgatgttgtaagccttagcagccttgatctgaaggagccaagcaataaaagagttcgacctctggctcgtgtcacgtccttggcaaatttaatctctcctgtaagaaatggagctgtcagacgttttggtcaaacaatacagtcatttacccttcgtggtgaccacagatccccagcctctgcccagaagttttctagcaggtcaacagtcccaacacccgccaagagaaggagcagtgcactgtggtcagagatgctggacatcaccatgaaggagtctctcaccaccagggagatcagacggcaggaggcaatatatgaaatgtcccgaggtgaacaggatttaattgaggatctcaaacttgcaagaaaggcctaccatgaccccatgttaaagttgtccatcatgtcagaagaggaactcacacatatatttggtgatctggactcttacatacctctgcatgaagatttgttgacaagaataggagaagcaaccaagcctgatggaacagtggagcagattggtcacattctcgtgagctggttaccgcgcttgaatgcctacagaggttactgtagtaaccagctggcagccaaagctcttcttgatcaaaagaaacaggatccaagagtccaagacttcctccagcgatgtctcgagtctcccttcagtcgaaaactagatctttggagtttcctagatatccctcgaagtcgcctagtcaaataccctttactgttaaaagaaattcttaaacacactccaaaagagcaccctgatgttcagcttctggaggatgctatattgataatacagggagtcctctctgatatcaacttgaagaaaggtgaatccgagtgccagtattacatcgacaagctggagtacctggatgaaaagcagagggaccccagaatcgaagcgagcaaagtgctgctgtgccatggggagctgcggagcaagagtggacataaactttacattttcctgtttcaagacatcttggttctgactcggcccgtcacacggaacgaacggcactcttaccaggtttaccggcagccaatcccagtccaagagctagtcctagaagacctgcaggatggagatgtgagaatgggaggctcctttcgaggagctttcagtaactcagagaaagctaaaaatatctttagaattcgcttccatgacccctctccagcccagtctcacactctgcaagccaatgacgtgttccacaagcagcagtggttcaactgtattcgagcggccattgcccccttccagtcggcaggcagtccacctgagctgcagggcctgccggagctgcacgaagagtgtgaggggaaccacccctctgcgaggaaactcacagcccagaggagggcatccacagtttccagtgttactcaggtagaagttgatgaaaacgcttacagatgtggctctggcatgcagatggcagaggacagcaagagcttaaagacacaccagacacagcccggcatccgaagagcgagggacaaagccctttctggtggcaaacggaaagagactttggtgtagagaaggctctgtgtgttaactgatgggagagactgtttgtttataaatgtgtacagttttgttttctcgtaaggggagcatcatagggttactttataccagttgtaacattttcattgtttttggttgttcttttttctttttttaatggcagctaaagatatacagattactgttaaattgcagtccttttttttttaaagatattttcttgagttatttagaacatggtaagcctggtattttttaatcaaacaaaatatttatgaaatgggttttctcttaattctggattcatcatggctttctaataccaattgtaatatttacaatattcaccaaaacttagaattttgcaaatgctggaattctgccagtgtttctttgctaagccttgcatgcaaaatttgaaattttaacattggcacccaaaacctacatggaatgtatgtctggagtatttcaaactttacattgaaacataatttccttggaaaacaaaccataagcctgaggaggtttttatcaactggaatgctttatattagtttgtttttcactgtacattcctcattttacattcatttaacctgccgattatttaatttttttattgtaaagtagtttttagcatttgcttttatttttttactttgatgccttttcaaattggcatgtctttaaagtatttttcttcctgattaaaaatgtgtgtgtatgtgtgtgtgtgtgtgtatatatatatatttttttaaatcacattaattttaccaagtgaaaccaagccatactgtttttgagccaattaagaaaattgccatttttaaagtgtagcatttcagggtaaagacccatgaaatggcttgatgtattctagactactgaaagaaaaccacttcaaagattttgttgaaagttttagtgttgtctgaaatgcaagagggaaggtgattggtagtgagttaaaagaaaaagagaggaaaagagagtagttttgtcttcaagtaaaatgtctggttgtgccagacatttcacaagtgtgaaaggagataggagaagctcaacttgagggcgtgtagtaagttgtagaaggctcgaggggacgtggacttatttgccttggtttgcaatacctgcaaataatgagtttgaaaagaaacaatgaaatgtgttaaaaatttgaccatattagataaattttggtggatttagtcataagatggaaaaagactggtgaatcttttattacaaaatgtttctgttaaaatgggatcatcatctttgaaaggggggaggaggagtaaaagcccgattataatggtgatcaattcaagtcagtgttgactattctgtgaaatatatttggccagtggaaatgataatcagaaaagactgtaaatagatccatccaaatgatttctctgtacaaatgaatgatactatta

SEQ ID NO: 712562 - DNA, 3193 bp, Homo sapiens
  misc_feature (8)..(8): n is a, c, g, or t
agcggagnagcctctgctccaccgcggcgagaggcatgggcacgtggctgccgagggtggccgagctctgggaagaaaagcccgtgtgcctctgcatagcgtcgctacagcgctgactcggtgtggattgattggaaaggtttgagggagtacttgggaagcatggtggcacatgatgagactggaggtctcctacctattaaaaggaccatacgagtcctagatgtcaataaccagtccttcagagaacaagaggagccaagcaataaaagagttcgacctctggctcgtgtcacgtccttggcaaatttaatctctcctgtaagaaatggagctgtcagacgttttggtcaaacaatacagtcatttacccttcgtggtgaccacagatccccagcctctgcccagaagttttctagcaggtcaacagtcccaacacccgccaagagaaggagcagtgcactgtggtcagagatgctggacatcaccatgaaggagtctctcaccaccagggagatcagacggcaggaggcaatatatgaaatgtcccgaggtgaacaggatttaattgaggatctcaaacttgcaagaaaggcctaccatgaccccatgttaaagttgtccatcatgtcagaagaggaactcacacatatatttggtgatctggactcttacatacctctgcatgaagatttgttgacaagaataggagaagcaaccaagcctgatggaacagtggagcagattggtcacattctcgtgagctggtggcagccaaagctcttcttgatcaaaagaaacaggatccaagagtccaagacttcctccagcgatgtctcgagtctcccttcagtcgaaaactagatctttggagtttcctagatatccctcgaagtcgcctagtcaaataccctttactgttaaaagaaattcttaaacacactccaaaagagcaccctgatgttcagcttctggaggatgctatattgataatacagggagtcctctctgatatcaacttgaagaaaggtgaatccgagtgccagtattacatcgacaagctggagtacctggatgaaaagcagagggaccccagaatcgaagcgagcaaagtgctgctgtgccatggggagctgcggagcaagagtggacataaactttacattttcctgtttcaagacatcttggttctgactcggcccgtcacacggaacgaacggcactcttaccaggtttaccggcagccaatcccagtccaagagctagtcctagaagacctgcaggatggagatgtgagaatgggaggctcctttcgaggagctttcagtaactcagagaaagctaaaaatatctttagaattcgcttccatgacccctctccagcccagtctcacactctgcaagccaatgacgtgttccacaagcagcagtggttcaactgtattcgagcggccattgcccccttccagtcggcaggcagtccacctgagctgcagggcctgccggagctgcacgaagagtgtgaggggaaccacccctctgcgaggaaactcacagcccagaggagggcatccacagtttccagtgttactcaggtagaagttgatgaaaacgcttacagatgtggctctggcatgcagatggcagaggacagcaagagcttaaagacacaccagacacagcccggcatccgaagagcgagggacaaagccctttctggtggcaaacggaaagagactttggtgtagagaaggctctgtgtgttaactgatgggagagactgtttgtttataaatgtgtacagttttgttttctcgtaaggggagcatcatagggttactttataccagttgtaacattttcattgtttttggttgttcttttttctttttttaatggcagctaaagatatacagattactgttaaattgcagtccttttttttttaaagatattttcttgagttatttagaacatggtaagcctggtattttttaatcaaacaaaatatttatgaaatgggttttctcttaattctggattcatcatggctttctaataccaattgtaatatttacaatattcaccaaaacttagaattttgcaaatgctggaattctgccagtgtttctttgctaagccttgcatgcaaaatttgaaattttaacattggcacccaaaacctacatggaatgtatgtctggagtatttcaaactttacattgaaacataatttccttggaaaacaaaccataagcctgaggaggtttttatcaactggaatgctttatattagtttgtttttcactgtacattcctcattttacattcatttaacctgccgattatttaatttttttattgtaaagtagtttttagcatttgcttttatttttttactttgatgccttttcaaattggcatgtctttaaagtatttttcttcctgattaaaaatgtgtgtgtatgtgtgtgtgtgtgtgtatatatatatatttttttaaatcacattaattttaccaagtgaaaccaagccatactgtttttgagccaattaagaaaattgccatttttaaagtgtagcatttcagggtaaagacccatgaaatggcttgatgtattctagactactgaaagaaaaccacttcaaagattttgttgaaagttttagtgttgtctgaaatgcaagagggaaggtgattggtagtgagttaaaagaaaaagagaggaaaagagagtagttttgtcttcaagtaaaatgtctggttgtgccagacatttcacaagtgtgaaaggagataggagaagctcaacttgagggcgtgtagtaagttgtagaaggctcgaggggacgtggacttatttgccttggtttgcaatacctgcaaataatgagtttgaaaagaaacaatgaaatgtgttaaaaatttgaccatattagataaattttggtggatttagtcataagatggaaaaagactggtgaatcttttattacaaaatgtttctgttaaaatgggatcatcatctttgaaaggggggaggaggagtaaaagcccgattataatggtgatcaattcaagtcagtgttgactattctgtgaaatatatttggccagtggaaatgataatcagaaaagactgtaaatagatccatccaaatgatttctctgtacaaatgaatgatactatta

SEQ ID NO: 712563 - DNA, 3685 bp, Homo sapiens
  misc_feature (988)..(988): n is a, c, g, or t
gcggtggcggctgcagtccgctgagaggcgctttctgcctggcagaggctggcgggcatcgtgcccgtccctgccggtctcccgggcacccggccaccgccccaccccctcctccgtgccatggagcccgagctggcggctcagaagcagcctcgaccgcggaggcgaagccgccgggcctctgggctcagcacggagggagcgacggggccttcggccgacacctccgggtcggagctggacgggagatgttcccttcggagaggcagctccttcacattcttaacacctggccccaactgggacttcactttgaaaagaaaacgcagagagaaagatgatgatgttgtaagccttagcagccttgatctgaaggagccaagcaataaaagagttcgacctctggctcgtgtcacgtccttggcaaatttaatctctcctgtaagaaatggagctgtcagacgttttggtcaaacaatacagtcatttacccttcgtggtgaccacagatccccagcctctgcccagaagttttctagcaggtcaacagtcccaacacccgccaagagaaggagcagtgcactgtggtcagagatgctggacatcaccatgaaggagtctctcaccaccagggagatcagacggcaggaggcaatatatgaaatgtcccgaggtgaacaggatttaattgaggatctcaaacttgcaagaaaggtcagtaaataactttttatcagatgccctagtttttaaaaattacatttcacaaaatctaaaggatagttttcttaacctttagaagtagaagaatagaaaatatctactggtgaatacattttttttaggtgaggtctagacacatcctcaaatacaagtattagtaagagagtttatttggggattaatacatactaatttattttatgtgtagcaaacagaatccacgctagcttttatgtaattaattctctttgattccaagtatagntccctcatgttttcctcacatgatctctctgtgacacatttctcccctctgacaggcctaccatgaccccatgttaaagttgtccatcatgtcagaagaggaactcacacatatatttggtgatctggactcttacatacctctgcatgaagatttgttgacaagaataggagaagcaaccaagcctgatggaacagtggagcagattggtcacattctcgtgagctggttaccgcgcttgaatgcctacagaggttactgtagtaaccagctggcagccaaagctcttcttgatcaaaagaaacaggatccaagagtccaagacttcctccagcgatgtctcgagtctcccttcagtcgaaaactagatctttggagtttcctagatatccctcgaagtcgcctagtcaaataccctttactgttaaaagaaattcttaaacacactccaaaagagcaccctgatgttcagcttctggaggatgctatattgataatacagggagtcctctctgatatcaacttgaagaaaggtgaatccgagtgccagtattacatcgacaagctggagtacctggatgaaaagcagagggaccccagaatcgaagcgagcaaagtgctgctgtgccatggggagctgcggagcaagagtggacataaactttacattttcctgtttcaagacatcttggttctgactcggcccgtcacacggaacgaacggcactcttaccaggtttaccggcagccaatcccagtccaagagctagtcctagaagacctgcaggatggagatgtgagaatgggaggctcctttcgaggagctttcagtaactcagagaaagctaaaaatatctttagaattcgcttccatgacccctctccagcccagtctcacactctgcaagccaatgacgtgttccacaagcagcagtggttcaactgtattcgagcggccattgcccccttccagtcggcaggcagtccacctgagctgcagggcctgccggagctgcacgaagagtgtgaggggaaccacccctctgcgaggaaactcacagcccagaggagggcatccacagtttccagtgttactcaggtagaagttgatgaaaacgcttacagatgtggctctggcatgcagatggcagaggacagcaagagcttaaagacacaccagacacagcccggcatccgaagagcgagggacaaagccctttctggtggcaaacggaaagagactttggtgtagagaaggctctgtgtgttaactgatgggagagactgtttgtttataaatgtgtacagttttgttttctcgtaaggggagcatcatagggttactttataccagttgtaacattttcattgtttttggttgttcttttttctttttttaatggcagctaaagatatacagattactgttaaattgcagtccttttttttttaaagatattttcttgagttatttagaacatggtaagcctggtattttttaatcaaacaaaatatttatgaaatgggttttctcttaattctggattcatcatggctttctaataccaattgtaatatttacaatattcaccaaaacttagaattttgcaaatgctggaattctgccagtgtttctttgctaagccttgcatgcaaaatttgaaattttaacattggcacccaaaacctacatggaatgtatgtctggagtatttcaaactttacattgaaacataatttccttggaaaacaaaccataagcctgaggaggtttttatcaactggaatgctttatattagtttgtttttcactgtacattcctcattttacattcatttaacctgccgattatttaatttttttattgtaaagtagtttttagcatttgcttttatttttttactttgatgccttttcaaattggcatgtctttaaagtatttttcttcctgattaaaaatgtgtgtgtatgtgtgtgtgtgtgtgtatatatatatatttttttaaatcacattaattttaccaagtgaaaccaagccatactgtttttgagccaattaagaaaattgccatttttaaagtgtagcatttcagggtaaagacccatgaaatggcttgatgtattctagactactgaaagaaaaccacttcaaagattttgttgaaagttttagtgttgtctgaaatgcaagagggaaggtgattggtagtgagttaaaagaaaaagagaggaaaagagagtagttttgtcttcaagtaaaatgtctggttgtgccagacatttcacaagtgtgaaaggagataggagaagctcaacttgagggcgtgtagtaagttgtagaaggctcgaggggacgtggacttatttgccttggtttgcaatacctgcaaataatgagtttgaaaagaaacaatgaaatgtgttaaaaatttgaccatattagataaattttggtggatttagtcataagatggaaaaagactggtgaatcttttattacaaaatgtttctgttaaaatgggatcatcatctttgaaaggggggaggaggagtaaaagcccgattataatggtgatcaattcaagtcagtgttgactattctgtgaaatatatttggccagtggaaatgataatcagaaaagactgtaaatagatccatccaaatgatttctctgtacaaatgaatgatactatta

SEQ ID NO: 712564 - DNA, 104 bp, Homo sapiens
tgagctcaaccaaaggctggcaagctttgggcctcatttaagggattttgatgagccgatgggccctggaggcagcccattaaagcatttggctcgtttttgga

SEQ ID NO: 712565 - DNA, 3823 bp, Homo sapiens
  misc_feature (988)..(988): n is a, c, g, or t
gcggtggcggctgcagtccgctgagaggcgctttctgcctggcagaggctggcgggcatcgtgcccgtccctgccggtctcccgggcacccggccaccgccccaccccctcctccgtgccatggagcccgagctggcggctcagaagcagcctcgaccgcggaggcgaagccgccgggcctctgggctcagcacggagggagcgacggggccttcggccgacacctccgggtcggagctggacgggagatgttcccttcggagaggcagctccttcacattcttaacacctggccccaactgggacttcactttgaaaagaaaacgcagagagaaagatgatgatgttgtaagccttagcagccttgatctgaaggagccaagcaataaaagagttcgacctctggctcgtgtcacgtccttggcaaatttaatctctcctgtaagaaatggagctgtcagacgttttggtcaaacaatacagtcatttacccttcgtggtgaccacagatccccagcctctgcccagaagttttctagcaggtcaacagtcccaacacccgccaagagaaggagcagtgcactgtggtcagagatgctggacatcaccatgaaggagtctctcaccaccagggagatcagacggcaggaggcaatatatgaaatgtcccgaggtgaacaggatttaattgaggatctcaaacttgcaagaaaggtcagtaaataactttttatcagatgccctagtttttaaaaattacatttcacaaaatctaaaggatagttttcttaacctttagaagtagaagaatagaaaatatctactggtgaatacattttttttaggtgaggtctagacacatcctcaaatacaagtattagtaagagagtttatttggggattaatacatactaatttattttatgtgtagcaaacagaatccacgctagcttttatgtaattaattctctttgattccaagtatagntccctcatgttttcctcacatgatctctctgtgacacatttctcccctctgacaggcctaccatgaccccatgttaaagttgtccatcatgtcagaagaggaactcacacatatatttggtgatctggactcttacatacctctgcatgaaggttagatgtgccacttaattgtcattaaatctaaagagccagcggtgcatgtaattttcagtctaaacttctaatgtagtgctgacctattttttaaataaacctgttaatggtgtttatgcttttttatcacttcagatttgttgacaagaataggagaagcaaccaagcctgatggaacagtggagcagattggtcacattctcgtgagctggttaccgcgcttgaatgcctacagaggttactgtagtaaccagctggcagccaaagctcttcttgatcaaaagaaacaggatccaagagtccaagacttcctccagcgatgtctcgagtctcccttcagtcgaaaactagatctttggagtttcctagatatccctcgaagtcgcctagtcaaataccctttactgttaaaagaaattcttaaacacactccaaaagagcaccctgatgttcagcttctggaggatgctatattgataatacagggagtcctctctgatatcaacttgaagaaaggtgaatccgagtgccagtattacatcgacaagctggagtacctggatgaaaagcagagggaccccagaatcgaagcgagcaaagtgctgctgtgccatggggagctgcggagcaagagtggacataaactttacattttcctgtttcaagacatcttggttctgactcggcccgtcacacggaacgaacggcactcttaccaggtttaccggcagccaatcccagtccaagagctagtcctagaagacctgcaggatggagatgtgagaatgggaggctcctttcgaggagctttcagtaactcagagaaagctaaaaatatctttagaattcgcttccatgacccctctccagcccagtctcacactctgcaagccaatgacgtgttccacaagcagcagtggttcaactgtattcgagcggccattgcccccttccagtcggcaggcagtccacctgagctgcagggcctgccggagctgcacgaagagtgtgaggggaaccacccctctgcgaggaaactcacagcccagaggagggcatccacagtttccagtgttactcaggtagaagttgatgaaaacgcttacagatgtggctctggcatgcagatggcagaggacagcaagagcttaaagacacaccagacacagcccggcatccgaagagcgagggacaaagccctttctggtggcaaacggaaagagactttggtgtagagaaggctctgtgtgttaactgatgggagagactgtttgtttataaatgtgtacagttttgttttctcgtaaggggagcatcatagggttactttataccagttgtaacattttcattgtttttggttgttcttttttctttttttaatggcagctaaagatatacagattactgttaaattgcagtccttttttttttaaagatattttcttgagttatttagaacatggtaagcctggtattttttaatcaaacaaaatatttatgaaatgggttttctcttaattctggattcatcatggctttctaataccaattgtaatatttacaatattcaccaaaacttagaattttgcaaatgctggaattctgccagtgtttctttgctaagccttgcatgcaaaatttgaaattttaacattggcacccaaaacctacatggaatgtatgtctggagtatttcaaactttacattgaaacataatttccttggaaaacaaaccataagcctgaggaggtttttatcaactggaatgctttatattagtttgtttttcactgtacattcctcattttacattcatttaacctgccgattatttaatttttttattgtaaagtagtttttagcatttgcttttatttttttactttgatgccttttcaaattggcatgtctttaaagtatttttcttcctgattaaaaatgtgtgtgtatgtgtgtgtgtgtgtgtatatatatatatttttttaaatcacattaattttaccaagtgaaaccaagccatactgtttttgagccaattaagaaaattgccatttttaaagtgtagcatttcagggtaaagacccatgaaatggcttgatgtattctagactactgaaagaaaaccacttcaaagattttgttgaaagttttagtgttgtctgaaatgcaagagggaaggtgattggtagtgagttaaaagaaaaagagaggaaaagagagtagttttgtcttcaagtaaaatgtctggttgtgccagacatttcacaagtgtgaaaggagataggagaagctcaacttgagggcgtgtagtaagttgtagaaggctcgaggggacgtggacttatttgccttggtttgcaatacctgcaaataatgagtttgaaaagaaacaatgaaatgtgttaaaaatttgaccatattagataaattttggtggatttagtcataagatggaaaaagactggtgaatcttttattacaaaatgtttctgttaaaatgggatcatcatctttgaaaggggggaggaggagtaaaagcccgattataatggtgatcaattcaagtcagtgttgactattctgtgaaatatatttggccagtggaaatgataatcagaaaagactgtaaatagatccatccaaatgatttctctgtacaaatgaatgatactatta

SEQ ID NO: 712566 - DNA, 3546 bp, Homo sapiens
  misc_feature (8)..(8): n is a, c, g, or t
  misc_feature (3290)..(3290): n is a, c, g, or t
agcggagnagcctctgctccaccgcggcgagaggcatgggcacgtggctgccgagggtggccgagctctgggaagaaaagcccgtgtgcctctgcatagcgtcgctacagcgctgactcggtgtggattgattggaaaggtttgagggagtacttgggaagcatggtggcacatgatgagactggaggtctcctacctattaaaaggaccatacgagtcctagatgtcaataaccagtccttcagagaacaagaggagccaagcaataaaagagttcgacctctggctcgtgtcacgtccttggcaaatttaatctctcctgtaagaaatggagctgtcagacgttttggtcaaacaatacagtcatttacccttcgtggtgaccacagatccccagcctctgcccagaagttttctagcaggtcaacagtcccaacacccgccaagagaaggagcagtgcactgtggtcagagatgctggacatcaccatgaaggagtctctcaccaccagggagatcagacggcaggaggcaatatatgaaatgtcccgaggtgaacaggatttaattgaggatctcaaacttgcaagaaaggcctaccatgaccccatgttaaagttgtccatcatgtcagaagaggaactcacacatatatttggtgatctggactcttacatacctctgcatgaagatttgttgacaagaataggagaagcaaccaagcctgatggaacagtggagcagattggtcacattctcgtgagctggttaccgcgcttgaatgcctacagaggttactgtagtaaccagctggcagccaaagctcttcttgatcaaaagaaacaggatccaagagtccaagacttcctccagcgatgtctcgagtctcccttcagtcgaaaactagatctttggagtttcctagatatccctcgaagtcgcctagtcaaataccctttactgttaaaagaaattcttaaacacactccaaaagagcaccctgatgttcagcttctggaggatgctatattgataatacagggagtcctctctgatatcaacttgaagaaaggtgaatccgagtgccagtattacatcgacaagctggagtacctggatgaaaagcagagggaccccagaatcgaagcgagcaaagtgctgctgtgccatggggagctgcggagcaagagtggacataaactttacattttcctgtttcaagacatcttggttctgactcggcccgtcacacggaacgaacggcactcttaccaggtttaccggcagccaatcccagtccaagagctagtcctagaagacctgcaggatggagatgtgagaatgggaggctcctttcgaggagctttcagtaactcagagaaagctaaaaatatctttagaattcgcttccatgacccctctccagcccagtctcacactctgcaagccaatgacgtgttccacaagcagcagtggttcaactgtattcgagcggccattgcccccttccagtcggcaggcagtccacctgagctgcagggcctgccggagctgcacgaagagtgtgaggggaaccacccctctgcgaggaaactcacagcccagaggagggcatccacagtttccagtgttactcaggtagaagttgatgaaaacgcttacagatgtggctctggcatgcagatggcagaggacagcaagagcttaaagacacaccagacacagcccggcatccgaagagcgagggacaaagccctttctggtggcaaacggaaagagactttggtgtagagaaggctctgtgtgttaactgatgggagagactgtttgtttataaatgtgtacagttttgttttctcgtaaggggagcatcatagggttactttataccagttgtaacattttcattgtttttggttgttcttttttctttttttaatggcagctaaagatatacagattactgttaaattgcagtccttttttttttaaagatattttcttgagttatttagaacatggtaagcctggtattttttaatcaaacaaaatatttatgaaatgggttttctcttaattctggattcatcatggctttctaataccaattgtaatatttacaatattcaccaaaacttagaattttgcaaatgctggaattctgccagtgtttctttgctaagccttgcatgcaaaatttgaaattttaacattggcacccaaaacctacatggaatgtatgtctggagtatttcaaactttacattgaaacataatttccttggaaaacaaaccataagcctgaggaggtttttatcaactggaatgctttatattagtttgtttttcactgtacattcctcattttacattcatttaacctgccgattatttaatttttttattgtaaagtagtttttagcatttgcttttatttttttactttgatgccttttcaaattggcatgtctttaaagtatttttcttcctgattaaaaatgtgtgtgtatgtgtgtgtgtgtgtgtatatatatatatttttttaaatcacattaattttaccaagtgaaaccaagccatactgtttttgagccaattaagaaaattgccatttttaaagtgtagcatttcagggtaaagacccatgaaatggcttgatgtattctagactactgaaagaaaaccacttcaaagattttgttgaaagttttagtgttgtctgaaatgcaagagggaaggtgattggtagtgagttaaaagaaaaagagaggaaaagagagtagttttgtcttcaagtaaaatgtctggttgtgccagacatttcacaagtgtgaaaggagataggagaagctcaacttgagggcgtgtagtaagttgtagaaggctcgaggggacgtggacttatttgccttggtttgcaatacctgcaaataatgagtttgaaaagaaacaatgaaatgtgttaaaaatttgaccatattagataaattttggtggatttagtcataagatggaaaaagactggtgaatcttttattacaaaatgtttctgttaaaatgggatcatcatctttgaaaggggggaggaggagtaaaagcccgattataatggtgatcaattcaagtcagtgttgactattctgtgaaatatatttggccagtggaaatgataatcagaaaagactgtaaatagatccatccaaatgatttctctgtacaaatgaatgatactattaaaaaaaaaaaaagcacacacataatcaccctgaaggtttcttgcctggtggctnctattgttgggggcatttggcaaaatatgctggtgtggcaaaggaggtagtggtaagcctcataaaagttagtaaaaattgtagttcaacctttgaaatcattgatgaatcagcgaaaggtaggtaagtcttgtgttaggaaatcttttaagaacatggtgtaatccagacacagcaattggtattgaaaataactgaacacctggtaccttcctggataggatagtaagggtagtagtggcaaggatcctgatta

SEQ ID NO: 712567 - DNA, 255 bp, Homo sapiens
  misc_feature (15)..(15): n is a, c, g, or t
  misc_feature (37)..(37): n is a, c, g, or t
  misc_feature (48)..(48): n is a, c, g, or t
  misc_feature (81)..(81): n is a, c, g, or t
  misc_feature (162)..(162): n is a, c, g, or t
  misc_feature (179)..(179): n is a, c, g, or t
  misc_feature (195)..(195): n is a, c, g, or t
  misc_feature (210)..(210): n is a, c, g, or t
  misc_feature (218)..(218): n is a, c, g, or t
  misc_feature (228)..(228): n is a, c, g, or t
  misc_feature (248)..(248): n is a, c, g, or t
gcacgagctcgtgcncaacagggcctgagatttcatntgctctccttnctggagcccagaggagggcagcagaagggggtngtgtctccaaccccccagcactgagggacgaccggggctctcctcatttcacccctccctttctcccctgccccaggactnggcacttctgggtgggncagtgggtccagattnggctcacactgagantgtaaganctacacacanaatttctattaaattaaatnttgtgtc

SEQ ID NO: 712568 - DNA, 3180 bp, Homo sapiens
  misc_feature (2)..(2): n is a, c, g, or t
  misc_feature (16)..(16): n is a, c, g, or t
  misc_feature (483)..(483): n is a, c, g, or t
anattcggaacgaggnctgaattacaattttcagactgagttactttttaaaatgccgttcaaaacatcaaataatgtaattatcagttgtatataattttcctttctcgaaggaatgacctctgatgtttgctggatgtttttaggcaatatatgaaatgtcccgaggtgaacaggatttaattgaggatctcaaacttgcaagaaaggtcagtaaataactttttatcagatgccctagtttttaaaaattacatttcacaaaatctaaaggatagttttcttaacctttagaagtagaagaatagaaaatatctactggtgaatacattttttttaggtgaggtctagacacatcctcaaatacaagtattagtaagagagtttatttggggattaatacatactaatttattttatgtgtagcaaacagaatccacgctagcttttatgtaattaattctctttgattccaagtatagntccctcatgttttcctcacatgatctctctgtgacacatttctcccctctgacaggcctaccatgaccccatgttaaagttgtccatcatgtcagaagaggaactcacacatatatttggtgatctggactcttacatacctctgcatgaagatttgttgacaagaataggagaagcaaccaagcctgatggaacagtggagcagattggtcacattctcgtgagctggttaccgcgcttgaatgcctacagaggttactgtagtaaccagctggcagccaaagctcttcttgatcaaaagaaacaggatccaagagtccaagacttcctccagcgatgtctcgagtctcccttcagtcgaaaactagatctttggagtttcctagatatccctcgaagtcgcctagtcaaataccctttactgttaaaagaaattcttaaacacactccaaaagagcaccctgatgttcagcttctggaggatgctatattgataatacagggagtcctctctgatatcaacttgaagaaaggtgaatccgagtgccagtattacatcgacaagctggagtacctggatgaaaagcagagggaccccagaatcgaagcgagcaaagtgctgctgtgccatggggagctgcggagcaagagtggacataaactttacattttcctgtttcaagacatcttggttctgactcggcccgtcacacggaacgaacggcactcttaccaggtttaccggcagccaatcccagtccaagagctagtcctagaagacctgcaggatggagatgtgagaatgggaggctcctttcgaggagctttcagtaactcagagaaagctaaaaatatctttagaattcgcttccatgacccctctccagcccagtctcacactctgcaagccaatgacgtgttccacaagcagcagtggttcaactgtattcgagcggccattgcccccttccagtcggcaggcagtccacctgagctgcagggcctgccggagctgcacgaagagtgtgaggggaaccacccctctgcgaggaaactcacagcccagaggagggcatccacagtttccagtgttactcaggtagaagttgatgaaaacgcttacagatgtggctctggcatgcagatggcagaggacagcaagagcttaaagacacaccagacacagcccggcatccgaagagcgagggacaaagccctttctggtggcaaacggaaagagactttggtgtagagaaggctctgtgtgttaactgatgggagagactgtttgtttataaatgtgtacagttttgttttctcgtaaggggagcatcatagggttactttataccagttgtaacattttcattgtttttggttgttcttttttctttttttaatggcagctaaagatatacagattactgttaaattgcagtccttttttttttaaagatattttcttgagttatttagaacatggtaagcctggtattttttaatcaaacaaaatatttatgaaatgggttttctcttaattctggattcatcatggctttctaataccaattgtaatatttacaatattcaccaaaacttagaattttgcaaatgctggaattctgccagtgtttctttgctaagccttgcatgcaaaatttgaaattttaacattggcacccaaaacctacatggaatgtatgtctggagtatttcaaactttacattgaaacataatttccttggaaaacaaaccataagcctgaggaggtttttatcaactggaatgctttatattagtttgtttttcactgtacattcctcattttacattcatttaacctgccgattatttaatttttttattgtaaagtagtttttagcatttgcttttatttttttactttgatgccttttcaaattggcatgtctttaaagtatttttcttcctgattaaaaatgtgtgtgtatgtgtgtgtgtgtgtgtatatatatatatttttttaaatcacattaattttaccaagtgaaaccaagccatactgtttttgagccaattaagaaaattgccatttttaaagtgtagcatttcagggtaaagacccatgaaatggcttgatgtattctagactactgaaagaaaaccacttcaaagattttgttgaaagttttagtgttgtctgaaatgcaagagggaaggtgattggtagtgagttaaaagaaaaagagaggaaaagagagtagttttgtcttcaagtaaaatgtctggttgtgccagacatttcacaagtgtgaaaggagataggagaagctcaacttgagggcgtgtagtaagttgtagaaggctcgaggggacgtggacttatttgccttggtttgcaatacctgcaaataatgagtttgaaaagaaacaatgaaatgtgttaaaaatttgaccatattagataaattttggtggatttagtcataagatggaaaaagactggtgaatcttttattacaaaatgtttctgttaaaatgggatcatcatctttgaaaggggggaggaggagtaaaagcccgattataatggtgatcaattcaagtcagtgttgactattctgtgaaatatatttggccagtggaaatgataatcagaaaagactgtaaatagatccatccaaatgatttctctgtacaaatgaatgatactatta

SEQ ID NO: 712569 - DNA, 1142 bp, Homo sapiens
  misc_feature (4)..(4): n is a, c, g, or t
tgcncggcccctcctctcctttcgtgcgtggggtattttaaatattagaacccgggcacggccttctctttttttttgtatgttgtgtgaccgcctctttcctgatgtttggtgttccttcctcgtggagttggattacctctcccttgatccacccccgcgcttttgttttttgtagtccccctccttctcattttgtgtgttagatcactcgctgtggcgcggcctcgctgttattccattcgatccgtctctcgcagaggatgttttttatgtcttctcttgtggctccccgcggcggggcgggagttattatcacactttttttcatcaccccaacgcgaggtaactcactcgattttttttgtgcccccttctttgggcccgcgccttttttatgttggggtagcacacactcatttttatgacacacacaccagggtttgtgtgttgtccacacacaaaatagaacccgcttgcttgtgttttatcccgctcttcctctcgagatttatttctccgcgccgagttatatcatcgccgcgctttcgtgtagagtggggcccccccccctctctacatgggagacttctctctgtggtgggtgatatcacacctgtgtggcacacacacacagtttggttttttctctcttctagattttttttcattacattgaatacactccactctctctcgcccacacctctttttatacacctctgcggggttgccatattttacctctccttacagagacaacctctttttttagacaattcatctttttttctcgcgcgagttaaatacaccacgacattttttgtgtgaacaacaaacacacaggaggtggttgacactttatgggcgcccaataggtgctccacaggagtgtgttagaacccctggtgtcacccaggccccctccgtatagataccaagaaggagaaagaagaaagaacacttccctatgctggggtggtttcctcccccatacattaatgattcccccccccaccattgatttctcccctcttccaaatttcccagttgacccccttataaaaggggggggccttgggggcccccccttttttgtgttgccccaccaaaaaaatccccgtgttgttttcacacccaca

SEQ ID NO: 712570 - DNA, 330 bp, Homo sapiens
gggcccacttggaggatgaactgttatctgtaatggacagtaacgcccgttctcctttggtgaaagtagatgacaggtaggtgtggtctgtgtggtcgctggaagtcctttgttcaatagctgtgccacgcagttgaccgtagctaatcccagcgactccgagtgcactggaggcggccagtgaccgtgagaccaggcccatgtcgtccgtcacgtttacgtgcagagaggcaccctctgtttcttggtgcatggccgctgcagggctgcctgcttccccagaagtcgtgctcatgctggtgttggtgagggtgacagaccgcagtgtgc

SEQ ID NO: 712571 - DNA, 418 bp, Homo sapiens
ggatgtgaatgttgctacagcagtgtgtgaacggtgcagatccccggactgtacttgagtctgcgatcgccctcgcgattatatctgcgcttggaacctgcgggaccatctctttaggccatctcctgcttctgtgacctgccagcaccgattgtgtggttagcttcttgttgtcaccgaccatgagctgccagattcgccagaatcattccaccagcgtggaagcaggcgataacaggctggtcaatttgtaccagctgtcctgctacacctacctctctgtggggtgatatttcaaccgcgacgatgtggctgtgcaaggcgtgcgccactacttgcgtgaattggccgaggagaagcgcgagggctaggagcgtatactggacgcgctaccagcgagcgggtcgcgctctattac

SEQ ID NO: 712572 - DNA, 206 bp, Homo sapiens
aacttacacttttatttatcaaattcacaaaattcacagtgatgctgactgtgtaataaccactatggggaaacatcccgtaaacctgcctgttgccatgccaatgaaatgactgaactggtgacatctgtttgaccatgctttgtgtggctggtagaatgccaccgtagtgcatacactttgtacctcaggggtcaagagagggt

SEQ ID NO: 712573 - DNA, 302 bp, Homo sapiens
  misc_feature (3)..(3): n is a, c, g, or t
  misc_feature (45)..(45): n is a, c, g, or t
  misc_feature (113)..(113): n is a, c, g, or t
  misc_feature (127)..(127): n is a, c, g, or t
  misc_feature (139)..(139): n is a, c, g, or t
  misc_feature (204)..(204): n is a, c, g, or t
  misc_feature (265)..(265): n is a, c, g, or t
tantacccagctttctttttaatacaaatgttatttatagtttanaatgaatgcactgcataaaaactttgtagccttcattattgtaaaacatattcaagatccctacagtnagagtgaaacattnacaaagatttgncgttaatgaagactacacagaaaacctttcctagggatttgtgtggatcagatccatatcttggnaaatttttgagttttacattcttaccagaaaagtcccatttaaaagtgatcatttgtaagnccaaaatataaataaaaagtttcaaaaatctatctga

SEQ ID NO: 712574 - DNA, 182 bp, Homo sapiens
cagccaatctgatgtttgtacgtccagttgtcccctcttctagacacattctaatggccgatggtgatagctgtggtttatggtactgaggctctaaactcgtaagaagtttcgcagaccttacatccagtaccctgatgctacagacgaggacttcacctcacacatagttcagcgtctga

SEQ ID NO: 712575 - DNA, 263 bp, Homo sapiens
gagcccagaacatatcccccataaaaaagtcaccccaacaccgtatggtcctcgaccacagtggcatcaaataggaaaaaaatgacaggtacgcacctgtagttcctgctactagggaggctgaggtgggaggctcgcttgaggccaggagctcaagaccagcctgggccaacatggccagaccctatctttgcatatttgcaatatatatatctaaacacatataggcaaggtattcaattgaacacatttccatcgattcc

SEQ ID NO: 712576 - DNA, 158 bp, Homo sapiens
attctgttcattcaacatacaactttagggaatggaagtaagttcatttttcagctgtgttgtcagtaggtccggtgtctagggtagtgaatcctgtaagttcacatttatgattaggtcacgagttgacattgagattgtccttttccctgatccaa

SEQ ID NO: 712577 - DNA, 662 bp, Homo sapiens
gtttttcattttaatgaagtctaacttataaattttatctttttatggttattgctttctgtgtcttgcctgaaaaaaaccactgcctactccattggaggagatagtctcccttttttattttttgtaagaatttgatagttttagcttttaaatttagatctgtaatccacttgggttaatattgtgaatggtgtgaatagaggtcaaggatcttttttttttttccaccgggataaccagttcttccagcatcatggttgaaaacatttcctttccctatgggattgcccttgggttccttgggccaaagatcagatgaccattaaagcgtggggtctatttctgggactcttttcggctttccacaagatctggttttgaagatccctggtgtgagtaccacacggtctggattgctatagcttaatagtgaagtctggaaaccagatagtataggtgctccaacgcttattcttctcaggatagcttgggatatcccgaggttctgggggttccattgtccaaccagtgggggttctgaagaaaagcgggcgggatcatgatcgcagcgcatcaccgctgtcaacaattgccagattcgaacctccttacttgccgactgtgtagccctggttactctgggcaacaagcaagacttg

SEQ ID NO: 712578 - DNA, 346 bp, Homo sapiens
  misc_feature (63)..(63): n is a, c, g, or t
agctggcaaagagagccaccttaaatatccataggctgaagttggaaagaagggaaacacccnaacttattccttaaagaaagtactttgcccccaggtactgtggcttaggccagtaatccctagcatttggggaagccaagttgggcagatggcttgaaccccaggatttcgagatcagccctggacaacatggagaaaccccatctctacaaaatatgtaaaatttaactgcttggtgggcctgcacttctggtcccagctattccagggctagggtgggaggattgtttgatccctggaggtcaaggctgcagtgagccatgatcacagcaatgcgctccag

SEQ ID NO: 712579 - DNA, 235 bp, Homo sapiens
tacactcctcccacctccccacctttggactctccgatgtattattcactctctgtgtcatgtgtacacactgtttagcccccacttacaagtgagaccatgtggtatctgattttccatttttgaattatttcacataggataatgatctccagttccatccatattgctgcaaaagctgagtagtatatcacggtatacattacaccacagttttcttttttttttctttttt

SEQ ID NO: 712580 - DNA, 426 bp, Homo sapiens
atcatctgatccttacatctttgttgctactttttactaatatctagctccctatctttattattttaaaagaatatacaggccgggtgcagtggctcatgcctgtaatcccagcactttgggaggccgaggcgggtggatcacttgaggtcaggagttcaacaccagcctggccaacatggtgaaaccccgtctctacaaaaatacaaaaaaattagccgagcatggtggcacacgactataatcccaggtacccgggaggctgagacaggagaatcgcttgaacccgggaggcggaggttgcagtgagctgagatagtgccattgcacaccagcatgggcgacagagtgagacttcatctcaaaaaaagggagaaattatattgaggccagcctggacaataagaccacatctccaaaaggaaa

SEQ ID NO: 712581 - DNA, 123 bp, Homo sapiens
  misc_feature (77)..(77): n is a, c, g, or t
  misc_feature (91)..(91): n is a, c, g, or t
gctccctccgcgcagccgagccacatcgatcagacaccatggggaaggtgaaggtcggagtcaacgcatttggtcgntattggggcgcctngtcaccacggcctgccttttaactcctggtaa

SEQ ID NO: 712582 - DNA, 240 bp, Homo sapiens
ctatagagctagcaacgagagccagccacctgcagctggtgctgccacctacgtaaggctggagaagcaagtacacggccaaggcacaaggagcagcaggcacagacagaaagctctgccagctctatcctggaggcgctcaaggagaactacaaggtgcacccggcccacaaggtggccatgatcctggacccgcagcagaagctgaggcctgtgccaccctaccagcacgaggagacc

SEQ ID NO: 712583 - DNA, 149 bp, Homo sapiens
tgtgtctttcctgtatgactgtgaggctgacatcaatggctgcgcatgatgctggatgagctgacccttgccagtgagctgactggagatcagatctgaagtgcctgaagtgaagagctggcctacctgaagaagaaccaacatactgt

SEQ ID NO: 712584 - DNA, 120 bp, Homo sapiens
agacatagaataaagttaaatgtcatcaacagaggaatggataaagatgtgttatatatttacaacggaatattactcagccataaaaaacaatcttgcacgttcgtgacaaaacgggat

SEQ ID NO: 712585 - DNA, 126 bp, Homo sapiens
  misc_feature (16)..(16): n is a, c, g, or t
taaaagccagcgctgntttatgggtaatggggtaatccttctcaggttttccagtgaaaatggggacactaaaatactgagtctctggtcatgggtgtgacagtgcctggcacaggccctgtcaca

SEQ ID NO: 712586 - DNA, 158 bp, Homo sapiens
acgagcatgctgccttcaggcatctgtttaacaaagcacatcttgcaccgcccttaatccatttaaccctgagtggacacagcacatgtttcagagagcacagggttgggggcagggactgcttcagttgtcgacgcggccgcgtcgaccctcacgag

SEQ ID NO: 712587 - DNA, 792 bp, Homo sapiens
gacagagctgctgctgctagaagtctgtcaaaagacctagatcggccagaatctcaatctccaaagaggcccccatgtacgtgactttgagacccctatctggggcaacgacccctgccgaagggctgaccacagtggcactatctgtctctatcagtgaactgtgctgaagagctctcaacagacctgactgcccctgctgtcctgtcctgaggtgccccaaggtgagcacccccaccaaaccgaagacgatccggcacgccacgcagcctgtaccaggtggacgaagaggtggatgcgtgctcccacgggcctgcacgactattctcttctccaggcttgcagcgctgcaaacatgctgcacgcaaacgctgcaggtgcccaccctgagagctcatactgcaaccatgcgccatgtagatgccccgcaagcaaccccaacgatgcgatactaatgtcagatggcacaccacgaccatccaccacctgccgacggaatatggctacaccaactggactctaacccaaatacatatcactgcgctcactcgtccagcgacacacctagccctcccctactccacccacaggacctaacctgagacccacacaaccatacactcctgggacacgtatcacgccttgacgctggaccactcccgaaccacacccattggcacaacatcccactttagattaattactcgcacccaagacctgaccgacaccccatcccatgcacccacagcagcgaacaagtactccacatcagctctcctcacgctaccaaaa

SEQ ID NO: 712588 - DNA, 112 bp, Homo sapiens
tgtgctcccaccagctcactctctgtagtctatgaggaggatgggtccttcaaggagtatcgtttcttcgggcgcaatccagatgcggtaatagtagatacgtgccgttatt

SEQ ID NO: 712589 - DNA, 702 bp, Homo sapiens
ggccgcggacctggtttaggccggggccgcgataactagggaatcacggccagcgataaggagtgattgcccagtggccatgaagatccagttgctcaaggacatctagatcaagtccctggcggagaactatctctcgtccatggccattaaggaattagacaccatagatttcttcctggtggccatactgccggatcaggatttgacgcgtatgccagtgcagaagcagaccctggcatgacagcgtatcaggttcaaggcatttcatgttatcgaggactacaatggccacgtagatctggacgtcaaatgctgcaaggaggtgaccatcgccatgcgtggcaccatcattgctggcaaggtctacataggcaccagcgcagcgggtactagagtaaccctatcatgaatgcccgacacttgccgttttacggtgccaagccgctgcggttcattcaatggtacgcataaatccgttcacccaatgggactaagaattctattcataacctgctgctacagagctggtgatgagggatgaattcaatgaacgctacaccttaggccagttctggactgccacccttggctttgtcctacctttgacgacactcctaagtacttacagtacactggactccaacatttgtaaggatactgaattaacctaagactcctataaggcgttctgacgccccg

SEQ ID NO: 712590 - DNA, 451 bp, Homo sapiens
gaccaagatcacaaaaagaagccagttcttttctgctttctgttcctcgcctggagagagctctggccacttccattttctttctttctttttgaaatgaaggaacagagcttcaagttttcctttgcacaacagcccccaggagctttaaaacctactgatgcctcagccccaccttcagagattcggacttaattgggatggagtgggacttcccagggtattctaatatgccaccgaagttgaggaccactggcttgtcactgtgctatcttttccatgtttacctctaacaatgatcatggatcctttcctccctggctgagtgtatacagcctcactcagagactggaaacctacaccgaggccttttttgtttgtgttttcaatgtgttcattttatttatttatttgaagatactgctttttattacaaaatcacacagttaaa

SEQ ID NO: 712591 - DNA, 190 bp, Homo sapiens
ccaaccccatcagctcatgagtgaaaccgtcagcccttcaaatggtgtatgtatgacagcctattggtgccttgattccccaatttcactgatccgttcgtcagtgttattatctggcatggatgatttgccagaggaaactaaatagttccatataaatttaacttttaatacatgtttccaattgcta

SEQ ID NO: 712592 - DNA, 128 bp, Homo sapiens
tcaccctcatgcgttcctggagctctgaagaagctagcccagctgtcagatttcatcctagctactacagacgacaggattggagttgctgttgatcggggtcctgcgagcactgttcagaccaggag

SEQ ID NO: 712593 - DNA, 826 bp, Homo sapiens
actgtactgctgccatctcggctcactgcagcctccctgcctgattctcctgcctcagcctgccgagtgcctgcgattgcaggcgcgcgccaccacgcctgactggttttcttatttttttggtggagacggggtttcgctgtgttggccgggctggtctccagctccgaactgcgactgatccgccagcctcggcctcccaaggtgccgggattgcagacggagtctggttcactcagtgctcaatggtgcccaggctggagtgcagtggcgtgatctcggctcgctacaacctccacctcccagccgcctgcccttggctcccaaagtgccaagattgcagcctctgccccgcacccggtctgggatgtgaggagcgcctctaccacagccgcgacccgtactgggaggtgaggagcgtctctgcccagcgccccgtctgaagaagtgaggagacctcccgctgtcaaccgccccaatatgacacgctgcaggagcacctccgccggcacccactcagtctgcgcaattgacgaccgtaatctgaccggggaagcctacaccatccccgggacgcgacggacagagcacgcgacagccccccccgcaccggaggccgacgccaccacacacgctagcaacaacgaccaacaaccgaaccacacaacctcacacccacctacaaccccacattcacccacccccccactcacccccaccaccaccacaccccaacaccacacaaacaccccccactcgcactccacccaaccacacacaacacccacaaccacccacccacccacaacccccccacccccccccc

SEQ ID NO: 712594 - DNA, 247 bp, Homo sapiens
aaagatcgagagaggagcagaactttgtgggagcagatgggtcagataggataaaatatgcagagagagatgttcatgtgggcaccatgtcccctagcacttcataggtaaaggacctgaaaggacccgtcctgtttatcttttcttcaagcaaaaagaagaagcagagctgtagcgtgaagtcaccttggcctggctgcctggcaggcagtgaatagggtatctcccttgatgagcactgaccgct

SEQ ID NO: 712595 - DNA, 1463 bp, Homo sapiens
  misc_feature (564)..(564): n is a, c, g, or t
ctcgactgaatgagctctgctggacgcatatccccaagacagcaaccaatcagagagatacagagaccgattatgcaagcaggtacaatgaatcgcatgatgaatgcactaggcacatacacgatcagacgatcccatcgtgtcatccagcaatggcacctactatacaacaaacagaagcatatatacaacagtgatgatgagtcatgaccacacccacagcactgacctgtgaacactaactgatacccactcaaccgattatactgactgtgatactacgcatatgactgtgcttgtggactacgcacaatcactgtattacatatactatgttctatattgaccttgacatgcgacaaattaagtacaccccaccgcactttgattgactatgacactggacaacagacatctaccttggagcacgtacctaacatagttactttctatctacgatctgaccaaatcgatgatcgaacagagaacacatcacattacacacggagaattaacattattgtcgacgtcacaaaacagataacaagaacaaccgtggatagncaccacactggctaacttaccagattggagattgatagaaacgatgagaacagccaacagctaactgtagaccgctacaacatacaatatgagatatacattggcaccgtacgcactacgttgaccacacataccacttacattgaacactagaacatcaggcaatacgacgttagcggaatactagtacctatatattacacttacatgtaacaacctgggaacgaacacacgtgtacaactaagatgtgcagatagcacgaagcttggactagggacccaagcaacggacgacgtagtgaatccacggagtcacaatgtcgccttagtggtgtgcaacagacacgcgtgacaagtgaatgttcactagcaacactagagtgttgccattgacaatagggagacacgatttattgcgtcctaagacagcagcgttgactaggaaccacaagtgtgtctccgcagaacgatgtccgaagcagcccagtactagtagatacagtacacaacagcgtgtggatagtgtgacgacatggttcgccatatcgcagactcagtaccattggcgggcttatctgactcttcactgacacgctgtgtctcctctataagagtcctagactagcatactcatgtgccgaatgtcgtatctcttacgcatagagcatgtagatctcttgatatcctagaactgtcagcatcctgcacaagtatgatctatgtacatgtggacactacgctgatatgatacacactaatatacactacaggttgactcgtacagctgacagggtactgagctacgctcgtctctacgctatctctgactaagactagcgtgaatatccacttggcctacatttctcgttcatcgtttcacttactggcatcacacttcc

SEQ ID NO: 712596 - DNA, 407 bp, Homo sapiens
ttttttaggatcccgtcatgggggaaggtcctttaaattatgctcaactgtggggcgggcctttaaaatgccccatactttgggggtttcaaaaatggaacccccgttgtacaggggttgggtgggggttgcaggactcccctcccaagcctccttatgtcaaggacagggggacaggggtggcctcccccagtccccaagcccccctgtgccttgttgtttgctggggggccatagctggccctgccccccgtaaaggccctcgcccattttcccccttcctgtacccctcggggccagcatcctccccttttttaactgaccagtgggggtttctccctgctgccaggtccttccccttcccggggggtttttgtgcccctgaataaagttccccttttttttca

SEQ ID NO: 712597 - DNA, 108 bp, Homo sapiens
cggcctactacaggtgtagtctcttctcccgtctcttataagtaccctggtatactggattcagcgcctatctagttagtgcaggatgtatcccatctgcaagatcct

SEQ ID NO: 712598 - DNA, 868 bp, Homo sapiens
  misc_feature (867)..(867): n is a, c, g, or t
tgggtagagacagggtcctcaccatgtggtcgccgggctgtggttccttgaactccttaggctcaaggtggcagtcctttccacctcagccctcccaagggtgcgtgagatttacagactttgagccgcggagtggcttggccagactcttattttttaaatggccctaccttagtggccaaaactttgggagtgccataaaagtggatctcaggagagctatgatgccgtgccaattaagagctctacttttggaattaaatcagatacagtagggggtttcccttaagttcaaaatatgggccctgtccatgttttaaaccctaccttggagtgttatcttacatagacaatagccagtggtgtatacgcttttctctgaaagattctggtatcctctccggaagtttcttctctactcttggaagtgtgagctttcattagccccaaaaaattcttgggcgaaagggactttaatagtacttacggcaaagggtaccatattattcctggactttgggcaagaaattcccttccataagagtcccctcgggttgttccttcttctttttcaccgccttgaaattgcaccacagatttatattatgtccccttcttaactaggagtctttggttatttctcccagttaatagttcacccagtgacggagggggacacgccgtgtacccacattggaacgcgagggaggacccgagcgggaacacactccgtgagtggaacgttttgaaaagacgggtgaggacgttcacatttgagtgggacatagtcacgcggcgtatcggtgacgatctggagaacacaagaaaaagagcaccaaaagcggagagagtgtatgccatcgtccna

SEQ ID NO: 712599 - DNA, 347 bp, Homo sapiens
tgaggagacaaagtctcactctgtcgcccaggctggagtgcagtggtgcaatctcaactcactacaacctccgcctcccgggttcatgccattctcctgcctcagcctcccgagtagctgggaccacaggcacgcgccaccaagcccggctaattttttgtatttttaatagagacggggtttctcagtattagccaggatggtcttgatctcctgaccccgcgatccacctgcctcggcctcccaaagtgtcgggactacaggcgtgacaaccgtagcctggcccaaaaacaggatttttttggtacatctgaaacatgataacaatagtaaaatcgctgtcgacg

SEQ ID NO: 712600 - DNA, 417 bp, Homo sapiens
aataccccattggtcggcggccaagagtcaccgtgcatagtctatcacgaggtggcaccgggcggcagctgtcctcacaactgcggcgtgtacttcaccacagggaatgggcacaagcttggaagattttcggctttgtgatcctcagtgtccagtgtcacccagatgggccggaagctgcctttgaagccaacgaatgccatttgctctttcaacttgagacccctgtctgcccggggcttttccagcactctggtccatgggcctctggagacgtatcttccctttgatgccataagcactatggaattgtcagggatggtcgccacatagttcaaaagctgccatggtatgccttgcagaatggagttcctgaagctcgtgtggctcaccacgcgcccttggttcccgtcaatc

SEQ ID NO: 712601 - DNA, 566 bp, Homo sapiens
agcccctcgcgttcccgacgtgtccgttccccccgtgccgtcgttcgtcccgccaccgacgcgcctggcttccgcaggccgtattccaccgaggagaaggaatcgtatcgtatgtccgctatccagaagctccactctttcgaccccttgctgatgcaagtaagggtgatgaccctgctgtcctgctggcacgtgaggattatatccatataagaattcaacagagaaacggaggaagacccttactactgtccaatgggatcgctgatgcttccgatcaacaagaaactagtgaaggcggtccaagacacaacttaagcctgcactgtggtactgtcattgagcatcgcggactcatgggagaagtaattcagacccaccagcggctcgacccaaccgcaagacacacatgccatgcttcctccgtaacacattcgcacttggctacggacgatcaagctgaaggtccaatgggttttccatgtgctatgtggatcacttgacgcttaaactgaggatttcctctgtcaatcgcagtcagactctgcccttactcctcccttgct

SEQ ID NO: 712602 - DNA, 159 bp, Homo sapiens
cccgatcacgcagactggccaacgtggtgaggctcatctctgctgaaaatacaaaaatgagtcgggcgtggtggcagagacctgtagtctcagctgctcgggaggctgaggcaggagaatggcttgggcccgggagctggatgttgcagtgtgcttccg

SEQ ID NO: 712603 - DNA, 215 bp, Homo sapiens
tggggcagtggccctgacctgagacctgggcctggctcccacgtccatgagtgtatttcttacacctgccatgtcccggcccggccgctgtggagcccctgcttcatttgcacgtgggctacgtaggacgacaacccagattctgtgagtgttacgacaagcgaacgccgcgaagtcctgagggacaggagccccctgggctgccagttggataa

SEQ ID NO: 712604 - DNA, 500 bp, Homo sapiens
agagagagagagagagagaaaaaacgagaggctcagagagaacaagctactggcctgaggacacacagcctccacttcctgggctcaggtgatcctcatgcctcagcctcctatgtaactgggactacaggggcaagccaccatgcccagttaattttcttttcttttttgtagacatgaggtcttgctatgttgcccgggctggtctgaatctcctgggttctagtgatcctcctgcctcagcctcccaaagtgctagaattaggagtgtgagccacggtgccgggcctatggagtttttcttgaggttgggaaggacgtctgtttcctctccctttccctgttctggagctttttcactgctgtcctgacctctgtctactcctggttggtcacgggacattggtggctcaggagtgttggggacactccattcctttgagagtgtgggctacctgtagattgactggctgacttgcaaaagcttccttgtgattaag

SEQ ID NO: 712605 - DNA, 467 bp, Homo sapiens
  misc_feature (93)..(93): n is a, c, g, or t
  misc_feature (162)..(162): n is a, c, g, or t
tactccagcctgggcaacaagagtgaaatccgtctcaaaaaacaaaacaaaacaaaagaaacaaaaagtgtgcggttcaagctgggtgtggtngtcacgcctgtaatcccaacactttgggaggccaaagtggacggatcacttgaggccaggagttcgagnccagcctggccaacatgacaaaatcccatctctactaaagatacaaaaattagcaaggcatggtggcttacacctgtaatcccagctacctgggaggctgaggcacgagaatctcttgaatacagaagacgaaggtggcagggagtcgaggttgcgtcactgagctccagcctggcaaaaaaaaaaaaaagtatacagtttagtgattccagtatattcacagagctgtgcagccatcaccacagccagacataggacaccccagaggtaccaggtgtccctcagctgttgaccccccaggatgt

SEQ ID NO: 712606 - DNA, 179 bp, Homo sapiens
  misc_feature (35)..(35): n is a, c, g, or t
  misc_feature (56)..(56): n is a, c, g, or t
  misc_feature (114)..(114): n is a, c, g, or t
  misc_feature (166)..(166): n is a, c, g, or t
aggagatccgcatgttgaagaaggtcgtgtcggtncatccgggagatgtgctcatnacctcctgcacgtacaacacggaagaccgggagctggccacagtggggggcttcgggntcctggaggagatgtgtgtcaatacgtgcactactacccccagacgcagctngagctctgcaaga

SEQ ID NO: 712607 - DNA, 276 bp, Homo sapiens
cccccccccccctttaagggaaagggccttccccgaaaaaaggggggtttttggttttaaaccaatttttttttaccccacgttgggggaaaaccgggggggccttttgttaagggggaaattcttggtttccgggttttttttttgggggggttccccccctggggggggaaacaattttccccggtatttttttaaccgggggaaattcccccccctttggggggccttttttttggggcctttttttccccccacaattttttttttttttta

SEQ ID NO: 712608 - DNA, 174 bp, Homo sapiens
  misc_feature (63)..(64): n is a, c, g, or t
  misc_feature (99)..(99): n is a, c, g, or t
tggggcagcacccagccccacaccaggcaggaggccaccgtgacccgggcaacggcagcatcnnccagtctcaccaccggcatccgggggccgctctcnaaaaaagaacccaggacattgaaattaaggcccaccccaagcccagaatgacctcgcaagaccccccactccacg

SEQ ID NO: 712609 - DNA, 619 bp, Homo sapiens
gaattcactgggcgcatcttacaagtaatttttggattctgcattgactacctacaagtgccttctgggtgcaagtccacaggcaagatttgttctgcaaatcttccatgaccaaggtcacctctttggattggcagacccagggagtccatattgggaagataaattcacacttcaccccttgttgagatctccatccagccttgctcctctgataaccagtttttggcatctcagatgaggaagagtgatgggcgacaggtgatggtgacaactattaataagatctgaaagtaaacagtctcatgaaaggtggccaggagagggcagtcaccttttatcaggagcacagactgaatttgcaaagggtcctacaggtatggatctctggcagctgctgttgaccttggcactggcaggatcaagtgatgctttttctggaagtgaggctctgaaatacctacttccaagagaacgaaatttattcaagaaatgttggatggaaattgaagagtgagcttggaaacgagacacagagtggcaggagcccagaccaacctgtttatgaaagatgcctttgcccatagagggaaaaatacaccttaaaacctcaaaaaaa

SEQ ID NO: 712610 - DNA, 368 bp, Homo sapiens
  misc_feature (1)..(1): n is a, c, g, or t
ntccgcagtatacatgcgcaatgtacccatcagctttccacatataagatgcacagtgggtatgccacccttccatcttccgcgttttgtccaaatagattctttgggattgttgccaatggcccaaagtcaaatgcaagtcctgtctctcctagagatgcggtacacgcccttcttttattgagaactagacttccctctccggcttctgaaagtattgtcacgtaagtgggtgtctccggctcacgtagtgagtaaattctgataccgttgtctgatgtcaacagcaaagtgtgaggatccaggatttcacgtgtataacatgcagcatgttatagagtcagagaggtagaacttgtaaaatatct

SEQ ID NO: 712611 - DNA, 229 bp, Homo sapiens
tccatttgacttctctactggactcttgagtactctcatccacgggtgattgtcagaataagtgggtctgtggggagcatgacggctgaaaactcctattcctatcttacttgtattacctcaaagccttccaattttagagaaaaaaatattttcaacctagaattttatacctagtcaaataatcaatcagaaaagaaaaaataaaaacctggcctcggtgacctca

SEQ ID NO: 712612 - DNA, 1003 bp, Homo sapiens
agtactgggactacgggcgtgcgccacaagcctggctaatttatgtatttttttagtggagacggggtttcaccatgtggccaggctggtctctgacttctgacctcgtgatctgcctgcctcggctcccaaagtgccgggatgtgccatgcactccagcctgggcgacagtgtgagcctccatctccaaaaaaaaaaaaaaggtgggtttataagccggccttctttttcttattcccagggctcttaaagttccgtacagataaagggaagagatcccagttctggataacatatgaggaagattcctgagttggtggctccagatacgaaattgatgtgctggactcaactggggtattagtcctgacctggcttcctggaggacttggtcaggtactggcttctccgagagggccccaagtgtgtgcggcgggtgggagggattgggcccgggaaactggtgaaaggcccggtctcagcggggaccctccatcagaaaaaattctcattcttcgagggccatgaaggggacatgacatggtggagatgcctgggacccaagagaactcaaagaagaggcaagccccagagatggcaactgaggatggccacctggtatttccctgggcccctcatcatgaagggcatctccaggggcgggacacatggccggtcatggggcccgatacaaaaactgttcctggccacgaaagcgaggtggtcgccgacgatggtggtaccacaatcaaccgggagcgggtcagaacagggggggcaagggaggctgtgctatggcccacgcatggcaaggctagcagaaaaccgggcctgggaatcaccctgaggatgggcattaccagaaaccccatagcctaagttggacataggtgccggccgacagccttgggcttggtggacagcatgcacagagacacacgagagtggacacatgcccaataggatatccacgacataagaaggattgagtaccaccaagacg

SEQ ID NO: 712613 - DNA, 489 bp, Homo sapiens
agcaatgcaaagtgtatttgctaccatagaaaaatggttatacaagaagcaacttacaacactgcaaatatagtattcctttttttaaaaaaagttcatattcatgtgcatttatgtgaatgtattacataagaaaagttcagaagtcaaaaccttcacaaatacctctagattttgtgaattgaaaatttaaaggcaccaaccactacagaattaaaaataaataaactaacattttataacccaactttctggtcaagttttgcagcatctattatttaccctccctccccaaaattcttgagatattgtgatactgtaaactgaatgaatgtttaatataattgtacatttatcaccagaattatgaaatcagaagtgaaaattttaataggtaacttgcttgacactgaatcaatttttcccttagttaatgttccaacttgtatcatttcctttattacaaagggaacgaattcttcatggcca

SEQ ID NO: 712614 - DNA, 234 bp, Homo sapiens
tccccccccaaaaaggggtttttggcccccccccccccccccctgggttccaaggggggggggggccggcccgctccatccctttttcttgggggatttctttttcccgggccccagcccccccccccccccccgggggtgggggaaaaattaagggttgggtgcccttcttttgcggggggctttgttttttttttttttaaggccccccaattaaaattaaaagggtcttta

SEQ ID NO: 712615 - DNA, 185 bp, Homo sapiens
aaaagccgatttctaggggagacggcaataccgggtgaccgggcacagatgaataggcaagcagatcagaaagagatcttaatacatggtgaatagaggtcctgatttctagagagatctccaaggtggaattattaaaaccctcacatttacctcctctgggagctctgtgggagttaaacagc

SEQ ID NO: 712616 - DNA, 408 bp, Homo sapiens
gggagaaaatccgatcctgtgctctgtcaaagagggcgccactcactcactcactcggctcccaccaaggaacccaagggtgaaacgaggagggagacgggagaagagatgcgggacccggggtcaggcccagcggctgggattacaagcaagccctatgtgacatacttcctggcccgcccccagctctcgctctcagacgctcagcttagctgggactcggtgtcccactgtgatgcctctgcatggggtaccaccacaacccgctcactgcatgatcctgcgcctgtcaagtcccacctcacctttagggaagtggactctggccctgagggcctgtcctgctctgtgcacctgcccgcccggggtgtcctttctaccacagcatttctcacacggcatcacaat

SEQ ID NO: 712617 - DNA, 631 bp, Homo sapiens
cctggaggcagaccaagtctggacaaccctgcgagtgaccctgaagaaatgaaagccctgctccagtaacccagaagctgactgggtccacgcacagcctgaagcatgaggaagctcattgtgggcttcatttttcttaaattttggacttacagtaagggcttcaactgttcttactcaaactggggactattcccagtgtattcatcaggtcagtgaggtaggacagcaaatgaaaacaatctttctgttctatagttattatcaatgtatgggaacgttaaaagagacttgtttgtataatgccactcagtacaaggtatgtagcccaggaaatgacttgacctgatgtgtgttataaccatctgagcccctacaacaccagtttgaattagattagaactggcctttcctaggtgataccagtgaattactactagaacgagaaagggatcccaaacagtaactttaagattggacgcttgtgcagcttatagtaaaggcgggacggtgtggtccttaatggaacgagtagagtaaaacaaatctgctgagcggggtggcactggcactgccgtttaggatggaacgaacagggtttcgcaagaagccctcgtgcgggcacaaatcc

SEQ ID NO: 712618 - DNA, 321 bp, Homo sapiens
gttttttgcactttttaagttccgaaggttatttttttggaaattgaaaaaggtttggtgggccggcttttattccttttcccccaggatttacctcggattttttttaatcttttgggggttgcccggttcccggtttcctttataattggcttttccctttattaaaggaccttattcttggtcccctttttttttaggtggtttgaaatggttttttatccccgctttaactttgtttgcttggtacttttcttgtggttacaaatttctttggattgggggggccaccattaattaaaaattcccctccccccccca

SEQ ID NO: 712619 - DNA, 447 bp, Homo sapiens
ggctgtgggtccaggaggcacgaagtcggaggtgatctcaccatggcctggagtctcctcatagcttctgcgcactgctcttcacttctcatgacgacaggacctcgtgacgagccatccatctgaaccttggacagcaacacaatcactcgggtgtgatgcacctgtatcaccgcagaggatgagcaccggccgaggcagtcagccctgttgctggcaggatgccatgtgactaaaaggcacatatggctgcattaggctaactcagaagcaagtcgcaggcccagtggccacctgactttgagttattctacgagagaatctgcagaggccgctcatgggactcccgtgcgctgatttgtctggctcaatgcttcatgggacaataaggtgcacgttggactcaatcagctgtgattgtccaggcaccgagacgcatgacggctg

SEQ ID NO: 712620 - DNA, 618 bp, Homo sapiens
  misc_feature (520)..(520): n is a, c, g, or t
  misc_feature (526)..(526): n is a, c, g, or t
  misc_feature (528)..(528): n is a, c, g, or t
  misc_feature (530)..(532): n is a, c, g, or t
gcggccgctactactactaatcgcggcggtcgacctcgtagtaacagccattctcatcccgacccctgaagcttcaccggcgcagtcattctcataatcgcccacggacttacatcctcattactattctgcctagcaaactcaaactacgaacgcactcacagtcgcatcataatcctctctcaaggacttcaaactctactcccactaatagctttttgatgacttctagcaagcctcgctaacctcgccttaccccccactattaacctactgggagaactctctgtgctagtaaccacgttctcctgatcaaatatcactctcctacttacaggactcaacatactagtcacagccctatactccctctacatatttaccacaacacaatggggctcactcacccaccacattaacaacataaaacctcattcacacgagaaaacaccctcatgttcatacacctatccccattttcctcctatcctcaaccgaaatcattacggggttccccctnaaacancncnnnggggccgctcaaagtcccgccggggccacattcgcaccgcatgtggtagggccaagggtgtagccgccggctgaccgacggaagta

SEQ ID NO: 712621 - DNA, 514 bp, Homo sapiens
ggtcgctgcggtgttgctgttggcagactcgattgttgcgtgacagcgaaatgaacgataatcaagaatgccggagcagacgatagtgagccgttctccaacccgtttgtgcccccgactggcgcacgaatgatggtatgatcctcactccgttccactcaaatctaagaatcgtcaccagaatgatagacgttcagtgaaacttctcatgacccccagggcttgctcctacctctgcgaccatgcttctaagttcacgtcaccatgagatgccaagggagtacaaatgaggactgaagacccagtcgtgcacgaaggaggaccaaagagaaagttctctatgccaagctacgccgaacacaccgaaagttgagagcagagagagagctagcagagaagtaccgggatcgtgccaaggaacggagagatggagtgagacacaacgtattatgaacgacacaccgagcttatcagtcacacagactaatctatacggcgctgtaggccccacatg

SEQ ID NO: 712622 - DNA, 142 bp, Homo sapiens
gtaccagcggcaggttcagctccatgataacctcttcagagagaccctccatgatgcttgacaatgccccgtgagactgttgccatgggctgcaatcgagtacacgtttcccctccgttgatctgggggacacgaatgttca

SEQ ID NO: 712623 - DNA, 173 bp, Homo sapiens
cattctcaaccccctgacaaaacacatagcctaccccttccttgtactaccctgcattaatcttaaaactaggcggctatggtataatacgcctcacactcattctcaacccctgacccccatgcctcaggatactcctcaatagccatcgctgtagtatacccaaagacaca

SEQ ID NO: 712624 - DNA, 306 bp, Homo sapiens
cacgcgtcgtgcacttgctgctgctagagcgctgagcactggcccgaaagaaagcaaaggagcagcaattgtgaagtaagagggagaaaagtttaccgatccttgaggcataatttcatattttttttaataggattgtgtaaagatgtcatctgatagcttccttgcaccttgaaaagattttcttttccttgtggatgatgcatatctatgttgtaaaatgacctcttcacgtgccatcttctgtgtgtaacatattggtgttttgacacgtcatctggtttgaaaaatcaggactcaggctgg

SEQ ID NO: 712625 - DNA, 1844 bp, Homo sapiens
  misc_feature (1746)..(1746): n is a, c, g, or t
  misc_feature (1752)..(1752): n is a, c, g, or t
  misc_feature (1754)..(1754): n is a, c, g, or t
  misc_feature (1756)..(1758): n is a, c, g, or t
ctttccagagtaggtagagggatgatgctaataagtaggctgtgggtggttgtgatgaccccaattatgtgttttttggaaagcatgcccctcatttacataaatattatactagcatttaccatctcacttctaggaatactagtatatcgctcacacctcatatcctccctactatgcctagaaggaataatactatcgctgttcattatagctactctcataaccctcaacacccactccctcttagccaatattgtgcctattgccatactagtctttgccgcctgcgaagcagcggtgggcctagccctactagtctcaatctccaacacatatggcctagactacgtacataacctaaacctactccaatgctaaaactaatcgtcccaacaattatattactaccactgacatgactttccaaaaaacacataatttgaatcaacacaaccacccacagcctaattattagcatcatccctctactattttttaaccaaatcaacaacaacctatttagctgttccccaaccttttcctccgaccccctaacaacccccctcctaatactaactacctgactcctacccctcacaatcatggcaagccaacgccacttatccagtgaaccactatcacgaaaaaaactctacctctctatactaatctccctacaaatctccttaattataacattcacagccacagaactaatcatattttatatcttcttcgaaaccacacttatccccaccttggctatcatcacccgatgaggcaaccagccagaacgcctgaacgcaggcacatacttcctattctacaccctagtaggctcccttcccctactcatcgcactaatttacactcacaacaccctaggctcactaaacattctactactcactctcactgcccaagaactatcaaactcctgagccaacaacttaatatgactagcttacacaatagcttttatagtaaagatacctctttacggactccacttatgactccctaaagcccatgtcgaagcccccatcgctgggtcaatagtacttgccgcagtactcttaaaactaggcggctatggtataatacgcctcacactcattctcaaccccctgacaaaacacatagcctaccccttccttgtactatccctatgaggcataattataacaagctccatctgcctacgacaaacagacctaaaatcgctcattgcatactcttcaatcagccacatagccctcgtagtaacagccattctcatccaaaccccctgaagcttcaccggcgcagtcattctcataatcgcccacggacttacatcctcattactattctgcctagcaaactcaaactacgaacgcactcacagtcgcatcataatcctctctcaaggacttcaaactctactcccactaatagctttttgatgacttctagcaagcctcgctaacctcgccttaccccccactattaacctactgggagaactctctgtgctagtaaccacgttctcctgatcaaatatcactctcctacttacaggactcaacatactagtcacagccctatactccctctacatatttaccacaacacaatggggctcactcacccaccacattaacaacataaaacctcattcacacgagaaaacaccctcatgttcatacacctatccccattttcctcctatcctcaaccgaaatcattacggggttccccctnaaacancncnnnggggccgctcaaagtcccgccggggccacattcgcaccgcatgtggtagggccaagggtgtagccgccggctgaccgacggaagta

SEQ ID NO: 712626 - DNA, 226 bp, Homo sapiens
  misc_feature (69)..(69): n is a, c, g, or t
  misc_feature (128)..(128): n is a, c, g, or t
  misc_feature (166)..(167): n is a, c, g, or t
tggagaactctgctaaggcagtgcggaagggaaatatggggtgggagcccccacacagagtccctactngagcattgcgctagtggacgctgtgagacagagggccactaatcgcgttataccccaangaatgatggatccacctgacatgcttgcacttgtgcanncctggaaaagccacatgacacataaacaccatgcccgatagaaagcaccacagtgaggg

SEQ ID NO: 712627 - DNA, 1795 bp, Homo sapiens
ctttccagagtaggtagagggatgatgctaataagtaggctgtgggtggttgtgatgaccccaattatgtgttttttggaaagcatgcccctcatttacataaatattatactagcatttaccatctcacttctaggaatactagtatatcgctcacacctcatatcctccctactatgcctagaaggaataatactatcgctgttcattatagctactctcataaccctcaacacccactccctcttagccaatattgtgcctattgccatactagtctttgccgcctgcgaagcagcggtgggcctagccctactagtctcaatctccaacacatatggcctagactacgtacataacctaaacctactccaatgctaaaactaatcgtcccaacaattatattactaccactgacatgactttccaaaaaacacataatttgaatcaacacaaccacccacagcctaattattagcatcatccctctactattttttaaccaaatcaacaacaacctatttagctgttccccaaccttttcctccgaccccctaacaacccccctcctaatactaactacctgactcctacccctcacaatcatggcaagccaacgccacttatccagtgaaccactatcacgaaaaaaactctacctctctatactaatctccctacaaatctccttaattataacattcacagccacagaactaatcatattttatatcttcttcgaaaccacacttatccccaccttggctatcatcacccgatgaggcaaccagccagaacgcctgaacgcaggcacatacttcctattctacaccctagtaggctcccttcccctactcatcgcactaatttacactcacaacaccctaggctcactaaacattctactactcactctcactgcccaagaactatcaaactcctgagccaacaacttaatatgactagcttacacaatagcttttatagtaaagatacctctttacggactccacttatgactccctaaagcccatgtcgaagcccccatcgctgggtcaatagtacttgccgcagtactcttaaaactaggcggctatggtataatacgcctcacactcattctcaaccccctgacaaaacacatagcctaccccttccttgtactatccctatgaggcataattataacaagctccatctgcctacgacaaacagacctaaaatcgctcattgcatactcttcaatcagccacatagccctcgtagtaacagccattctcatccaaaccccctgaagcttcaccggcgcagtcattctcataatcgcccacggacttacatcctcattactattctgcctagcaaactcaaactacgaacgcactcacagtcgcatcataatcctctctcaaggacttcaaactctactcccactaatagctttttgatgacttctagcaagcctcattctccaccccttgacaaaacacatagcctaccccttgcttgatctatccctatgacgcataattgttacaagatacatctgtctacgacaatacagacctaatatcgctcattgcatactcttcaatcagccacatagaccttgatgtaacagccattctcattcaaacccgctgaagctttaccggtgcagtcattattatacatcgtccacagacttacatcctgattactattatgactagcagactcaaactacgaacgcactcacagtctcatgataatacactctcaatgactctaaactctactgccacttataactttt

SEQ ID NO: 712628 - DNA, 220 bp, Homo sapiens
cggagaatcagaaccactcttcgctgccggacagcgatggcactggcgggccagcaggaacacgcctggcttcaccatctgttgccgagtgcagtgtaggccgacaccggcgtcggtgcagccatggtgtgtggcagccagaagtggaaggggaattgcgcgcttttgttcagggcgccgatcagcaccagggcgagcatagatcgggtaccagcgaatg

SEQ ID NO: 712629 - DNA, 1907 bp, Homo sapiens
  misc_feature (1809)..(1809): n is a, c, g, or t
  misc_feature (1815)..(1815): n is a, c, g, or t
  misc_feature (1817)..(1817): n is a, c, g, or t
  misc_feature (1819)..(1821): n is a, c, g, or t
ctttccagagtaggtagagggatgatgctaataagtaggctgtgggtggttgtgatgaccccaattatgtgttttttggaaagcatgcccctcatttacataaatattatactagcatttaccatctcacttctaggaatactagtatatcgctcacacctcatatcctccctactatgcctagaaggaataatactatcgctgttcattatagctactctcataaccctcaacacccactccctcttagccaatattgtgcctattgccatactagtctttgccgcctgcgaagcagcggtgggcctagccctactagtctcaatctccaacacatatggcctagactacgtacataacctaaacctactccaatgctaaaactaatcgtcccaacaattatattactaccactgacatgactttccaaaaaacacataatttgaatcaacacaaccacccacagcctaattattagcatcatccctctactattttttaaccaaatcaacaacaacctatttagctgttccccaaccttttcctccgaccccctaacaacccccctcctaatactaactacctgactcctacccctcacaatcatggcaagccaacgccacttatccagtgaaccactatcacgaaaaaaactctacctctctatactaatctccctacaaatctccttaattataacattcacagccacagaactaatcatattttatatcttcttcgaaaccacacttatccccaccttggctatcatcacccgatgaggcaaccagccagaacgcctgaacgcaggcacatacttcctattctacaccctagtaggctcccttcccctactcatcgcactaatttacactcacaacaccctaggctcactaaacattctactactcactctcactgcccaagaactatcaaactcctgagccaacaacttaatatgactagcttacacaatagcttttatagtaaagatacctctttacggactccacttatgactccctaaagcccatgtcgaagcccccatcgctgggtcaatagtacttgccgcagtactcttaaaactaggcggctatggtataatacgcctcacactcattctcaaccccctgacaaaacacatagcctaccccttccttgtactatccctatgaggcataattataacaagctccatctgcctacgacaaacagacctaaaatcgctcattgcatactcttcaatcagccacatagccctcgtagtaacagccattctcatccaaaccccctgaagcttcaccggcgcagtcattctcataatcgcccacggacttacatcctcattactattctgcctagcaaactcaaactacgaacgcactcacagtcgcatcataatcctctctcaaggacttcaaactctactcccactaatagcttttgatgacttctagcaaggcttgctagaagtcatcaaaaagctattagtgggagtagagttggagtgatgacttctagcaagcctcgctaacctcgccttaccccccactattaacctactgggagaactctctgtgctagtaaccacgttctcctgatcaaatatcactctcctacttacaggactcaacatactagtcacagccctatactccctctacatatttaccacaacacaatggggctcactcacccaccacattaacaacataaaacctcattcacacgagaaaacaccctcatgttcatacacctatccccattttcctcctatcctcaaccgaaatcattacggggttccccctnaaacancncnnnggggccgctcaaagtcccgccggggccacattcgcaccgcatgtggtagggccaagggtgtagccgccggctgaccgacggaagta

SEQ ID NO: 712630 - DNA, 146 bp, Homo sapiens
gcatcacaccatcagcatgaccctcaccactcactgtcatcaccaccatcatcaccatcaccttctccaccatcgtcaccatcatcatgaccaacaccattgacaccaccaccacaatcaccaacactgtgtctccaacacgatca

SEQ ID NO: 712631 - DNA, 199 bp, Homo sapiens
  misc_feature (71)..(71): n is a, c, g, or t
gtttttttttgggggccccccccagatttcccccggaaagggtccctgaatccctttttttgttccggggnttgggcagtttgtccccccttcgggtccctccccccccagttgggatgaatttccaaaccccccggggccccgttttaattttttttgtaggggtgtttttttttccataaatttggggcccccccca

SEQ ID NO: 712632 - DNA, 1706 bp, Homo sapiens
ctttccagagtaggtagagggatgatgctaataagtaggctgtgggtggttgtgatgaccccaattatgtgttttttggaaagcatgcccctcatttacataaatattatactagcatttaccatctcacttctaggaatactagtatatcgctcacacctcatatcctccctactatgcctagaaggaataatactatcgctgttcattatagctactctcataaccctcaacacccactccctcttagccaatattgtgcctattgccatactagtctttgccgcctgcgaagcagcggtgggcctagccctactagtctcaatctccaacacatatggcctagactacgtacataacctaaacctactccaatgctaaaactaatcgtcccaacaattatattactaccactgacatgactttccaaaaaacacataatttgaatcaacacaaccacccacagcctaattattagcatcatccctctactattttttaaccaaatcaacaacaacctatttagctgttccccaaccttttcctccgaccccctaacaacccccctcctaatactaactacctgactcctacccctcacaatcatggcaagccaacgccacttatccagtgaaccactatcacgaaaaaaactctacctctctatactaatctccctacaaatctccttaattataacattcacagccacagaactaatcatattttatatcttcttcgaaaccacacttatccccaccttggctatcatcacccgatgaggcaaccagccagaacgcctgaacgcaggcacatacttcctattctacaccctagtaggctcccttcccctactcatcgcactaatttacactcacaacaccctaggctcactaaacattctactactcactctcactgcccaagaactatcaaactcctgagccaacaacttaatatgactagcttacacaatagcttttatagtaaagatacctctttacggactccacttatgactccctaaagcccatgtcgaagcccccatcgctgggtcaatagtacttgccgcagtactcttaaaactaggcggctatggtataatacgcctcacactcattctcaaacccctggacaaaacacatagctaccccttccttgtgactatcctatgaggcataattataacaaggctccatctgctacgaaaaacggccttaaaaccgttaatgcaacttttaatcggccaaaggccctggagaaccagccttttaattcaaaccccttgagttcaaccggcgcagttttttatacggcccccggttacatccaatactattctgcctgtgaatttaaatatgaacgctttcacggggaataaaaacctttttaaggctttaaacttttccccacaaaaagattttttgaggactcaaaagagcttgttaaaccggttaccccccattatacacctgggggaacttttgtgtataaccctttttccagaaaaatctttttcttttgggggaaaatatttggcgggctttatccttttttttctccaacaagggggggttactcccccttataacaaaaacactttttcccagagaaaaccttttttgaaccacccaccccttgtttttttatctctcccatataaggtgtttttcttaaagcgcgcgctctgctctcttcactttatc

SEQ ID NO: 712633 - DNA, 1499 bp, Homo sapiens
ctttccagagtaggtagagggatgatgctaataagtaggctgtgggtggttgtgatgaccccaattatgtgttttttggaaagcatgcccctcatttacataaatattatactagcatttaccatctcacttctaggaatactagtatatcgctcacacctcatatcctccctactatgcctagaaggaataatactatcgctgttcattatagctactctcataaccctcaacacccactccctcttagccaatattgtgcctattgccatactagtctttgccgcctgcgaagcagcggtgggcctagccctactagtctcaatctccaacacatatggcctagactacgtacataacctaaacctactccaatgctaaaactaatcgtcccaacaattatattactaccactgacatgactttccaaaaaacacataatttgaatcaacacaaccacccacagcctaattattagcatcatccctctactattttttaaccaaatcaacaacaacctatttagctgttccccaaccttttcctccgaccccctaacaacccccctcctaatactaactacctgactcctacccctcacaatcatggcaagccaacgccacttatccagtgaaccactatcacgaaaaaaactctacctctctatactaatctccctacaaatctccttaattataacattcacagccacagaactaatcatattttatatcttcttcgaaaccacacttatccccaccttggctatcatcacccgatgaggcaaccagccagaacgcctgaacgcaggcacatacttcctattctacaccctagtaggctcccttcccctactcatcgcactaatttacactcacaacaccctaggctcactaaacattctactactcactctcactgcccaagaactatcaaactcctgagccaacaacttaatatgactagcttacacaatagcttttatagtaaagatacctctttacggactccacttatgactccctaaagcccatgtcgaagcccccatcgctgggtcaatagtacttgccgcagtactcttaaaactaggcggctatggtataatacgcctcacactcattctcaaccccctgacaaaacacatagcctaccccttccttgtactatccctatgaggcataattataacaagctccatctgcctacgacaaacagacctaaaatcgctcattgcatactcttcaatcagccacatagccctcgtagtaacagccattctcatccaaaccccctgaagcttcaccggcgcagtcattctcataatcgcccacggacttacatcctcattactattctgcctagcaaactcaaactacgaacgcactcacagtcgcatcataatcctctctcaaggacttcaaactctactcccactaatagcttttcagacgatttctagcacgcatcgctaacatcaccacagcgcacccatttgccag

SEQ ID NO: 712634 - DNA, 1427 bp, Homo sapiens
ctttccagagtaggtagagggatgatgctaataagtaggctgtgggtggttgtgatgaccccaattatgtgttttttggaaagcatgcccctcatttacataaatattatactagcatttaccatctcacttctaggaatactagtatatcgctcacacctcatatcctccctactatgcctagaaggaataatactatcgctgttcattatagctactctcataaccctcaacacccactccctcttagccaatattgtgcctattgccatactagtctttgccgcctgcgaagcagcggtgggcctagccctactagtctcaatctccaacacatatggcctagactacgtacataacctaaacctactccaatgctaaaactaatcgtcccaacaattatattactaccactgacatgactttccaaaaaacacataatttgaatcaacacaaccacccacagcctaattattagcatcatccctctactattttttaaccaaatcaacaacaacctatttagctgttccccaaccttttcctccgaccccctaacaacccccctcctaatactaactacctgactcctacccctcacaatcatggcaagccaacgccacttatccagtgaaccactatcacgaaaaaaactctacctctctatactaatctccctacaaatctccttaattataacattcacagccacagaactaatcatattttatatcttcttcgaaaccacacttatccccaccttggctatcatcacccgatgaggcaaccagccagaacgcctgaacgcaggcacatacttcctattctacaccctagtaggctcccttcccctactcatcgcactaatttacactcacaacaccctaggctcactaaacattctactactcactctcactgcccaagaactatcaaactcctgagccaacaacttaatatgactagcttacacaatagcttttatagtaaagatacctctttacggactccacttatgactccctaaagcccatgtcgaagcccccatcgctgggtcaatagtacttgccgcagtactcttaaaactaggcggctatggtataatacgcctcacactcattctcaaccccctgacaaaacacatagcctaccccttccttgtactatccctatgaggcataattataacaagctccatctgcctacgacaaacagacctaaaatcgctcattgcatactcttcaatcagccacatagccctcgtagtaacagccattctcatccaaaccccctgaagcttcaccggcgcagtcattctcataatcgcccacggacttacatcctcattactattctgcctagcaaactcaaactacgaacgcactcaccacattaacaacataaaaccctcattcacacgagaacga

SEQ ID NO: 712635 - DNA, 299 bp, Homo sapiens
  misc_feature (222)..(222): n is a, c, g, or t
ctcaaccttctgggctcaaacaatccacctcagcctcctgagtagctggggccacagttgcataccaccacgccctgttaatttttgttttaaaaacttttttgtgggccagttgcggtggctcacgcctgtaatcccagcactttgggaggcagaggcaggtggatcacctgaggtcaggagttcgagaccagcctggccagcatggtgaaatcccttctntactaaaaatacaaaaattagccgggcatgctggcatgtgcctataacccagctactcgggaggcttgagaccagag

SEQ ID NO: 712636 - DNA, 602 bp, Homo sapiens
  misc_feature (5)..(5): n is a, c, g, or t
  misc_feature (121)..(121): n is a, c, g, or t
  misc_feature (141)..(141): n is a, c, g, or t
  misc_feature (192)..(192): n is a, c, g, or t
  misc_feature (205)..(205): n is a, c, g, or t
  misc_feature (247)..(247): n is a, c, g, or t
  misc_feature (263)..(263): n is a, c, g, or t
  misc_feature (280)..(280): n is a, c, g, or t
  misc_feature (292)..(292): n is a, c, g, or t
  misc_feature (304)..(304): n is a, c, g, or t
  misc_feature (329)..(329): n is a, c, g, or t
  misc_feature (341)..(342): n is a, c, g, or t
  misc_feature (352)..(352): n is a, c, g, or t
  misc_feature (416)..(416): n is a, c, g, or t
  misc_feature (422)..(422): n is a, c, g, or t
  misc_feature (433)..(434): n is a, c, g, or t
  misc_feature (461)..(461): n is a, c, g, or t
  misc_feature (464)..(464): n is a, c, g, or t
  misc_feature (483)..(483): n is a, c, g, or t
  misc_feature (522)..(522): n is a, c, g, or t
  misc_feature (562)..(562): n is a, c, g, or t
tatantaataattatagaattttactatggtttgttttatattttttattgggacatcttgcagaaccgtgaagaacaagttcatttttttatttgataccttattaaggtaaattaaganatggtttttgcttaattttnttcggtttaaatggttagattttttaatcatttttactttttgttttatgngaattaaactatnttttatttttaaattaacaattgctattttggatgtaaaatntttccctgtgtaactnaaacttagggagatttngaagttggtgtnggctttgggttnattaaaagttttatttaaattttgnactcctaaagtnnatgggaaatnttttttttttgggaaaatattatattttaaagatatttggaggtagacacatccttctcctgtnactttnatgctgtattnnccaggcagctctggcaatgagacctgntgnagtaacaggcggttgttcnctgtccacttggaatttgctggaaaatgtccctgaagantggatagtgacctgtgcagcctttccagtcctggtaaatntggctgctccatatttggccacaccatggagacacaccac

SEQ ID NO: 712637 - DNA, 1850 bp, Homo sapiens
  misc_feature (1249)..(1249): n is a, c, g, or t
  misc_feature (1252)..(1252): n is a, c, g, or t
  misc_feature (1255)..(1255): n is a, c, g, or t
  misc_feature (1257)..(1257): n is a, c, g, or t
  misc_feature (1287)..(1287): n is a, c, g, or t
  misc_feature (1361)..(1361): n is a, c, g, or t
  misc_feature (1365)..(1365): n is a, c, g, or t
ctttccagagtaggtagagggatgatgctaataagtaggctgtgggtggttgtgatgaccccaattatgtgttttttggaaagcatgcccctcatttacataaatattatactagcatttaccatctcacttctaggaatactagtatatcgctcacacctcatatcctccctactatgcctagaaggaataatactatcgctgttcattatagctactctcataaccctcaacacccactccctcttagccaatattgtgcctattgccatactagtctttgccgcctgcgaagcagcggtgggcctagccctactagtctcaatctccaacacatatggcctagactacgtacataacctaaacctactccaatgctaaaactaatcgtcccaacaattatattactaccactgacatgactttccaaaaaacacataatttgaatcaacacaaccacccacagcctaattattagcatcatccctctactattttttaaccaaatcaacaacaacctatttagctgttccccaaccttttcctccgaccccctaacaacccccctcctaatactaactacctgactcctacccctcacaatcatggcaagccaacgccacttatccagtgaaccactatcacgaaaaaaactctacctctctatactaatctccctacaaatctccttaattataacattcacagccacagaactaatcatattttatatcttcttcgaaaccacacttatccccaccttggctatcatcacccgatgaggcaaccagccagaacgcctgaacgcaggcacatacttcctattctacaccctagtaggctcccttcccctactcatcgcactaatttacactcacaacaccctaggctcactaaacattctactactcactctcactgcccaagaactatcaaactcctgagccaacaacttaatatgactagcttacacaatagcttttatagtaaagatacctctttacggactccacttatgactccctaaagcccatgtcgaagcccccatcgctgggtcaatagtacttgccgcagtactcttaaaactaggcggctatggtataatacgcctcacactcattctcaaacccctggacaaaacacatagctaccccttccttgtgactatcctatgaggcataattataacaaggctccatcgtgcgctacgggacaagagcagggaccgttagaagagtccggcttccanttngcncnatactcttcaatcgagccacatagccctcngtagtaacagccagttgctcaatcgcgagagagcgttcgcgcgtggcacaggccgtttcgagcccggggccggncagntcgattctcataatcgcccacggacttacatcctcattactattctgcctagcaaactcaaactacgaacgcactcacagtcgcatcataatcctctctcaaggacttcaaactctactcccactaatagctttttgatgacttctagcaagcctcattctccaccccttgacaaaacacatagcctaccccttgcttgatctatccctatgacgcataattgttacaagatacatctgtctacgacaatacagacctaatatcgctcattgcatactcttcaatcagccacatagaccttgatgtaacagccattctcattcaaacccgctgaagctttaccggtgcagtcattattatacatcgtccacagacttacatcctgattactattatgactagcagactcaaactacgaacgcactcacagtctcatgataatacactctcaatgactctaaactctactgccacttataactttt

SEQ ID NO: 712638 - DNA, 200 bp, Homo sapiens
gatggccgggtcccctgggtagacctaacataagcattcttatataactatatatattatcctaactactaccgcgttcctactactcaacttaaactccagcgaccacgagcctactactatctcgcgacctgaaacaagctaacatgagtaacacccttaattccatccaccctcctctccctaggaggcctgcgccc

SEQ ID NO: 712639 - DNA, 406 bp, Homo sapiens
tagcatagctgcatgtgtgtgcgtgtgtgtggtcagaatatctaagctatactctcttagcaggtcccaagtatagaatatattaactatagtcaccaatcgggacgttagtgtcaagaacttatacatctgataactctatgttggtacccttcaacatttcctatttcccctactccctgacccctagtaaccacccttctactctctgtttctctgagttcaagctttatagaattccatatgtaactgggatagtgcagtatttgtctttctgtgtctggctatttcacttagcataatatcctccaggttcatctatgttgtcataaatggcatgatttcctgctttttaaaggatgaatatttcattgtgtgtgtgtatatatgtgtgtgtgtgtgtctg

SEQ ID NO: 712640 - DNA, 1535 bp, Homo sapiens
ctttccagagtaggtagagggatgatgctaataagtaggctgtgggtggttgtgatgaccccaattatgtgttttttggaaagcatgcccctcatttacataaatattatactagcatttaccatctcacttctaggaatactagtatatcgctcacacctcatatcctccctactatgcctagaaggaataatactatcgctgttcattatagctactctcataaccctcaacacccactccctcttagccaatattgtgcctattgccatactagtctttgccgcctgcgaagcagcggtgggcctagccctactagtctcaatctccaacacatatggcctagactacgtacataacctaaacctactccaatgctaaaactaatcgtcccaacaattatattactaccactgacatgactttccaaaaaacacataatttgaatcaacacaaccacccacagcctaattattagcatcatccctctactattttttaaccaaatcaacaacaacctatttagctgttccccaaccttttcctccgaccccctaacaacccccctcctaatactaactacctgactcctacccctcacaatcatggcaagccaacgccacttatccagtgaaccactatcacgaaaaaaactctacctctctatactaatctccctacaaatctccttaattataacattcacagccacagaactaatcatattttatatcttcttcgaaaccacacttatccccaccttggctatcatcacccgatgaggcaaccagccagaacgcctgaacgcaggcacatacttcctattctacaccctagtaggctcccttcccctactcatcgcactaatttacactcacaacaccctaggctcactaaacattctactactcactctcactgcccaagaactatcaaactcctgagccaacaacttaatatgactagcttacacaatagcttttatagtaaagatacctctttacggactccacttatgactccctaaagcccatgtcgaagcccccatcgctgggtcaatagtacttgccgcagtactcttaaaactaggcggctatggtataatacgcctcacactcattctcaaccccctgacaaaacacatagcctaccccttccttgtactatccctatgaggcataattataacaagctccatctgcctacgacaaacagacctaaaatcgctcattgcatactcttcaatcagccacatagccctcgtagtaacagccattctcatccaaacccctgaagttcacgggccggcattctcataatcgccacggataaatcctcataaatatatggcagaaataatagagggtcaagggggaaaaaacctcaagggaaatggccccatagttggagtcttaagggcgaacgcgtaccccctataatgagagtctgtgaactctcgaaattctcataggaaaaggcccttaaagggggccaaaagaaagactccacgaacagaaagagtggagacgatcgtg

SEQ ID NO: 712641 - DNA, 1132 bp, Homo sapiens
tgaattaccttgtttcttatcggtctcccggaaggcataataaatcggccacgacatgatccgggtatactaatcccgttggcttacaacacggtaaaggagttcgaactaaggtataccgacggaatccccttttcatgaggaacttatttcgcgttacaatggctaaatctgatctcgtgagcaacggggcaacatggttccctacgttattcctttccgatacctaacgtaataggtaataacgtgggtaaaacctttcattttagcgcctcggtccatttcggggacttgcatcctcgggacaatatgagggttaccataagggaactgggcgacatcaggatacacgggattactctctgcggccctctagttttacggatgcctggtatctacagacctattttaggatgctctgctgcgcgatgttttgcttcatgcgtttcatctagatacgagcttagcttatgatctcgtggattccagacatccgtaacaatggacggcacatgatgtgcgtgataattgcgcagtgttcattgcatatctattacacggtcgtaacgataccgaacatatggatgctatcattaccctatatgtattctagtacgggtaaacctcatctctgatcgatagactagcgtaatttacgagagtattcttcatataatatgttggatccttacttctagccacagtgttgttatctgttatgcttaccatgtcgtagtgattcttgatcctcagctcactttcatacatataagtcgtcacgtggtctatgcgaactgctcccgtggagatgttaaagtcatgaaatgcacccagatatcggccaagagcagctttggacatctttgaacgatgcaaggatgtaattacactaagcgtggaatgcggggtatttagggatctgtagtagagccttatatgaaataatcgcatgggaatgctgaacttgctggatactatatgtgaaagtgctgtgcatcgtgatctggcttttgctatattattcatgggttctgtgggcagtcaacgtatcctttctgaagctctaagaagacctgcccatgatactatgtagcagaaatacgaagaagaattacgccgtggtacagcctgc

SEQ ID NO: 712642 - DNA, 956 bp, Homo sapiens
gaatcggaggacaatacagtatgctaccctttaacacatttattggactagtcgtgtccgtactatagcttcacaacaatcctaatcctaataccaactatctccctaattgaaaacaatatactcgaatgggcctgtccttgtcagtgataaaactaaattacgccagtcttgtaaatctggcaggatgaaaacctttatgccaatgggctacaatctagttgaaccaagtctttagctccaccatggagcacccaaagcatacggattgctaaattgtataacatattctctgtgcctgttcatggggtgaagcagattgggggtagcacccaaggtatgacatctagcccagtcatcaagcagatttgtattccccgtacgattactgcctagccacctagtgaaatatatgtaccggtacgcataatatacttgacccaccctgttgttacagtatataaacccaatcgtagaatcaaaaacctccgctcgctcgatgctatagctacatggcaaggtatcagcaaatacaaatcctcaacctatcagagcatcaactgcaagtccaaagtgaccccgtcaccccatttaggataccacgaaagtttaccaccctaaatagacatgcgtacttaacagtcatctgaccgtaactgcagattacagtcaatgtaccttctcgtgcgcatgggatgacccccctcaggatgaggggtcctggtcgcattctcgtgaaatcaatttcccggaagagtggagcactcgtactggaccattagcactggggtaactaaaggaatggttcgacactgttctcacttaaggcaataagcgcaatagccacagtccctaaaacatctcagaaaaggtttacttacagtgggacccagcatggaagcgagggacaacatgcacgacggccattaacgtggtggcctaaaaaaaagttttcg

SEQ ID NO: 712643 - DNA, 197 bp, Homo sapiens
gatgagctggtaccataggaatactgggcatgttactcacatgcattagtagctagtttttatttgagaaagtaacagcaaggaactgattgaaaactaaactatacatagtacttaagatgctgcacatagctggaagaaggccaggtgccaagttattaagaaaagattaatgaaatgagacaaggtatagccga

SEQ ID NO: 712644 - DNA, 109 bp, Homo sapiens
cccttcacaatcaggcaagccaacgccacttatccagtgaaccactatcacgaaaaaaactctacctctcatatactaaacatcaaacctatactacgggtaccgagct

SEQ ID NO: 712645 - DNA, 1033 bp, Homo sapiens
gaagctctggttcgatgtcttcatcaggtatacatcgctcgagtgacaaagcacaccatttgtctggtgatgtcattctgctgtgcaactcactgtgcaagtgctatctagtactctcttgagtctcatggtccaagctagatacgtcgaatgtttcacatagccgtttgatcagcactcatcaatggtgtaacaggtatacggccatactctcaataagtggtgaagaaaggtataaatatctggagacgatttggctagtgagtcatagtacgtgattggggtgacccaggataatcctatatatctaaaagtgaggaatgtgcgtgtaatcgggatgtagggatgctggaggatgtgtcttccagagaagagtagaagcctggacacgctcctatactaatatacaacatggcttttataatagagtgcactggtcgcactcaattgtgtaacttacacttgttacgcatccaagttcgactgtcgagctgattgaagtgtagtgggctggtacccattcctagaatgaaaagttacaagcatatttgtctagcacgctacatgctttgaaaatcgatactatgagatgcataataaagtccgactaattactgcacatagcatctctttataagcttaaaggtcttggcatacatagtagaaggagtgtggccggttatggttaccatcacgcgcgaagggcttgccatggtggatttgctgggctattaacagagaggctaccgatttaagggcctgtatgataaggattgtgcctagtttgttggcaatcgctttgccgacgaatctgcagattgcgtaagagtggtcaggcgcctccttggtgggggtgactagtggccaccccctggaataaacctcgcgggaaaaactcagcccgttactgtgaacaaacaattactccgggtgaattcccgacgagtatattaaataagcggcgataacaacaatggactccatcagacaaatgcaagagcacagtctcataggagacaactctataacaacg

SEQ ID NO: 712646 - DNA, 168 bp, Homo sapiens
ttcttaattggcttgagtggagctcaggggctattgggctccagggcaggatgcagtctggtgggggttgagctcaatacggtgctgtgatgtagttgcttggggctcctggtgtgagtgggacccagtgtgaattctctctctggaacggttagtcatgtggattcc

SEQ ID NO: 712647 - DNA, 908 bp, Homo sapiens
  misc_feature (42)..(42): n is a, c, g, or t
  misc_feature (166)..(166): n is a, c, g, or t
  misc_feature (170)..(170): n is a, c, g, or t
  misc_feature (192)..(192): n is a, c, g, or t
tactggggagcatacaaaatcccttagtcacacagtatttgnaatgccactggcaatcgctggtgcagctggagtttgtctcaggcaaggctcctgacttccttcttgccggctcaacttctccgactctaccagctgatgctcttcaccctgccagggacccctntttntcagctacggggatgagattgngcctggatgcagctgcccttcctggacagcctatggaggctccagtcatgctgtgggatgagtccagcttccctgacatcccaggggctgtaagtgccaacatgactgtgaagggccagagtgaagaccctggctccctcctttccttgttccggcggctgagtgaccagcggagtaaggagcgctccctactgcatggggacttccacgcgttttccgctgggcctggacttttttcctatatccgccactgggaccagaatgagcgttttttggtagtgcttaactttggggatgtgggcctctcggctggactgcaggcctccgacctgcctgccagggccagcctgccagccaaggctgacctcctgctcagcacccagccaggccgtgaggagggctccccttttgagctggaacgcctgaaactggagcctcacgaaggggtggtggtccgcttcccctacgcggcctgacttcagcctgacatggacccactacccttttcctttccttcccaggccctttgggttttgattttttttttttttaaaaacaaacaaacaaactgttgcagattatgagtgaaccccccaatagggggttttttgccttcaaataaaagtcccccctgcatggtgaagtcttccctcaaagcgaggatgacctgaaaggactcggggggcctttttcgggttgggcaacacgggttcaca

SEQ ID NO: 712648 - DNA, 407 bp, Homo sapiens
  misc_feature (42)..(42): n is a, c, g, or t
tactggggagcatacaaaatcccttagtcacacagtatttgnaatgccactggcaatcgctggtgcagctggagtttgtctcaggcaaggctcctgacttccttcttgccggctcaacttctccgactctaccagctgatgctcttcaccctgccagggacccctgacttcagcctgacatggacccactacccttttcctttccttcccaggccctttgggttttgattttttttttttttaaaaacaaacaaacaaactgttgcagattatgagtgaaccccccaatagggggttttttgccttcaaataaaagtcccccctgcatggtgaagtcttccctcaaagcgaggatgacctgaaaggactcggggggcctttttcgggttgggcaacacgggttcaca

SEQ ID NO: 712649 - DNA, 358 bp, Homo sapiens
tttggggttttaatttttttctccccggccccaaaagccttgtccttttatataggagcctctttaaaaaaaaaaaaacctggtagggttttaaaataaaaatccgaggcctatctccccttttaatttgtcccgtaaaagttttattaatcaaatgaaaggtggccttgcccgaaactttccctttacctgccctactagggtagggagggcttagggatgtttcctgtgtcggatgggcttttctttttttcatatgatccattctgttgggattttcagtatttcctttttcaaagctaaaaagatataccttttggatacttgggggggggattaatttaagttttccccctta

SEQ ID NO: 712650 - DNA, 833 bp, Homo sapiens
  misc_feature (42)..(42): n is a, c, g, or t
  misc_feature (166)..(166): n is a, c, g, or t
  misc_feature (170)..(170): n is a, c, g, or t
  misc_feature (192)..(192): n is a, c, g, or t
tactggggagcatacaaaatcccttagtcacacagtatttgnaatgccactggcaatcgctggtgcagctggagtttgtctcaggcaaggctcctgacttccttcttgccggctcaacttctccgactctaccagctgatgctcttcaccctgccagggacccctntttntcagctacggggatgagattgngcctggatgcagctgcccttcctggacagcctatggaggctccagtcatgctgtgggatgagtccagcttccctgacatcccaggggctgtaagtgccaacatgactgtgaagggccagagtgaagaccctggctccctcctttccttgttccggcggctgagtgaccagcggagtaaggagcgctccctactgcatggggacttccacgcgttttccgctgggcctggacttttttcctatatccgccactgggaccagaatgagcgttttttggtagtgcttaactttggggatgtgggcctctcggctggactgcaggcctccgacctgcctgccagggccagcctgccagccaaggctgacctcctgctcagcacccagccaggccgtgaggagggctccccttttgagctggaacgcctgaaactggagcctcacgaaggggtggtggtccgcttcccctacgcggcctgacttcagcctgacatggacccactacccttttcctttccttcccaggccctttgggttttgattttttttttttttaaaaacaaacaaacaaactgttgcagattatgagtgaaccccccaatagggggttttttgccttcaaataaaagtcccccctgcatggtg

SEQ ID NO: 712651 - DNA, 124 bp, Homo sapiens
ctaagttgtggctcaggagttgatcagttcttgggcagtgagagtgagtcgtcagaatgtttagtgagcctagggtgttgtgagtgtaaatcagtgcgatgagtagggcaagtgatcactccat

SEQ ID NO: 712652 - DNA, 670 bp, Homo sapiens
gcgaaggtgatcatcccacctcagcctcctgagtagctgggatatgtaccatagatagcctatggaggctccagtcatgctgtgggatgagtccagcttccctgacatcccaggggctgtaagtgccaacatgactgtgaagggccagagtgaagaccctggctccctcctttccttgttccggcggctgagtgaccagcggagtaaggagcgctccctactgcatggggacttccacgcgttttccgctgggcctggacttttttcctatatccgccactgggaccagaatgagcgttttttggtagtgcttaactttggggatgtgggcctctcggctggactgcaggcctccgacctgcctgccagggccagcctgccagccaaggctgacctcctgctcagcacccagccaggccgtgaggagggctccccttttgagctggaacgcctgaaactggagcctcacgaaggggtggtggtccgcttcccctacgcggcctgacttcagcctgacatggacccactacccttttcctttccttcccaggccctttgggttttgattttttttttttttaaaaacaaacaaacaaactgttgcagattatgagtgaaccccccaatagggggttttttgccttcaaataaaagtcccccctgcatggtg

SEQ ID NO: 712653 - DNA, 763 bp, Homo sapiens
  misc_feature (42)..(42): n is a, c, g, or t
tactggggagcatacaaaatcccttagtcacacagtatttgnaatgccactggcaatcgctggtgcagctggagtttgtctcaggcaaggctcctgacttccttcttgccggctcaacttctccgactctaccagctgatgctcttcaccctgccagggaccagggacccctgttttcacggctaacggggactgagattggcctggactggcagcgtgccctctccgtggacagggccagagtgaagaccctggctccctcctttccttgttccggcggctgagtgaccagcggagtaaggagcgctccctactgcatggggacttccacgcgttttccgctgggcctggacttttttcctatatccgccactgggaccagaatgagcgttttttggtagtgcttaactttggggatgtgggcctctcggctggactgcaggcctccgacctgcctgccagggccagcctgccagccaaggctgacctcctgctcagcacccagccaggccgtgaggagggctccccttttgagctggaacgcctgaaactggagcctcacgaaggggtggtggtccgcttcccctacgcggcctgacttcagcctgacatggacccactacccttttcctttccttcccaggccctttgggttttgattttttttttttttaaaaacaaacaaacaaactgttgcagattatgagtgaaccccccaatagggggttttttgccttcaaataaaagtcccccctgcatggtg

SEQ ID NO: 712654 - DNA, 1491 bp, Homo sapiens
  misc_feature (282)..(282): n is a, c, g, or t
  misc_feature (346)..(346): n is a, c, g, or t
  misc_feature (372)..(372): n is a, c, g, or t
  misc_feature (374)..(374): n is a, c, g, or t
  misc_feature (556)..(556): n is a, c, g, or t
ggatggcgaaaggaaatgaagcgtcacacggtgaaacggaaggtggctccggtcccatcggtcgtggatgatctggagtgcttatagtaacatgatggcttgaatccctcatgatgatgcagaaagaggccattctcacatattgggcatagtggcaggatcagtcacgagtcgcacaaagatgagacacgtgcaatgctcgtcttatgcgtaaattggtgcaccggtatgagtgatcaagggtttgcgatcaaggattgaatagggccggtgcatcgtatngcaagttgggctctgtaataagttgccgtcacgttcctgcatttatacccatgtcttcaccacntagagtcgcatttgggtcggcgcgananacgcagattacacttctatgctagtttgtccaagcgtttggctcgcaaactagcgatgacgagccatccaaggtagggaacgataatgactaaatgggatgtgagaggccaacagcttgccggcatggaaccttgtttcgggtctctctgagttgcacggggaagcacacgttacagcgctntgggcatttgtgaccagcaccggacgaggggatctggttccccggaatacttggagaaggaaaggacgcggactctaatagagtcgccgctttcctagaaagcctggaagagcaaagaatatatcactaacgcggtatcacaacacggaatgcaatatggcgcatcgggtactgaagatcacaagtagatagagcgcttttcgacagactttggtggatggtcgcatagaatttttggcgactcttcggggacttgattgaggaaggtctctcccactccttattaaagcttaaggtaccttggtctccccgtgtaggcaaccttttggcacgtaaagtggggttccgcatatcaacatttgcggagggtggtgcccccactgttaactgcgtcataaaatatccaaatggtgggaaacacggcgcataaaatgaacgttgggcgcggacctttttggttcaaacgtacctagcgtatatgggcaaaaggagcccttatgggacaaaacccttcactgttgaggttggcggggctcctttttacaacccaattcaagggggcgtgtggaagacccttccttgtgaagtgtgaaacaacacacgtgtgggcgcggcattatttatgcgccataacagtggccgcatggacatctaggggggagggcacttatttgccacgatgagatccccaaggttttaagcaaaactcgaaaacgtggaatttatccgacattgtgagcgcgcctccacggggccggaatgccaacttgagatcggcccttgaatcaaagatcgagttcacgttgtgggaaccccgtaaacgctccgttgtggtgtggcttgccgacacattcaggcgcatccgcctacgccagcaacgggggctccaagggcctccttatggtgccattctcgggcaccttcacccacttggg

SEQ ID NO: 712655 - DNA, 330 bp, Homo sapiens
tataacttcacacccaagccctgccagcccccgcttcctaagccataccctagatggagctgctcaagcgcctggacccatccgctgcctatcaacggggttgactgcaactccttgtccttcctgagtgtctatcaccgacggcgacctgggagacagcgggacgcggacgacgggcttggagatggaccccatcgactgcacaacacccgagtaccatacttgccagtgtatgccgggagcggacactgtgtcccctgcagaccccaaaaacgtgactggaaaccctatggcagagcctgaaagtacataaccatgagcaggatggaa

SEQ ID NO: 712656 - DNA, 200 bp, Homo sapiens
gttgtggttggcctgtttgctgggcgtgatctggcacctgacgtcacaccggcaccatgcgctttcacttcgtgcatctcgcagctgagcgacggcctgcagatcgtggcgctggccatgggcctgttcggcgtggccgacttcctcaagaacatcaaccagatcggcggcgacaccaaggtcaccagtaccaaggtcag

SEQ ID NO: 712657 - DNA, 650 bp, Homo sapiens
cctattggggtgttctgcgcgagtgtgagagggaagcgccgcggccctgtatttctagacctgcccttcgcctggttcgatggcgccttgatgaccccgggtcccctgacctgcctgcaatttcggaaattgcgctgtgctcctgtgctacggcctgtggctgtacttgcctgcgtgctgcccaatctggctggcaagatgaagcgtctccctggtggccgcgatgctgctgctggtcagcgcggcgcgggccgaggcaggaggcacaagcaaggaggacgtgggccggtggtcggcatcgacctggggaccaccgtactcctgcgtcggcgtgttcgaagaacgtgccgcgtggaagatcatcgccaacgatcagggccaaccgacttcacgccgttcctatgtcgcccttcactcctgaaggggaccgtctgattggccgatgcccgccaagaaccagctcaacctcgaaggcccgaggaacaccgggtcctcttggaacgggccaaagccgggcatccaattctgggcccgttcacccgtttggcacatttgacccccggttcctggtcgcaacgcaagggcaacatttcaagggtttcctttgccccgttcccaaccggtgcgtccgcactaccgaccacctcacc

SEQ ID NO: 712658 - DNA, 339 bp, Homo sapiens
tacttttccacaggcttaaagttcagaaggctgaggctaggagaggttgcagtcttgtgccttcagctcaggccagtagccagatagagaagctgaaatgagcagaccactccacaagctctggagagggtgtgtgtgtacatgtatgtgtatgtgtgtgcatgtacatgtgtatgtgtgcagatgtagtatgtgcatgtacatgtgtgcacatgcacgtttgcatgtatgtgtgtacctgtgtgtgtactgtgtggttgggtgtgtacttgtgtgtgcgtgtatgtgtgtgtgtacgtgtgtgtgatgtgtgtttagtgggggtgcttctcggcctcc

SEQ ID NO: 712659 - DNA, 766 bp, Homo sapiens
gtgatgtccctgtccagttcggcttgcccgtggctgctgacgttacgagaccatttagcttcagttggagcagcagcaattgttgtctccttatttaaaattttctggcaaatgcttgtagagaagctggagtgtatacatctaccaagaacataattctggctagtcacttcaatgaaggaggagcagagccagctgcagtttgatatgactcggaagtcttttccctttgttttctcactattgcaagagaccagaaaattattttaagacactataaaagtaagccgtgtagtgtttggaattgtgaacgtcggttctgcactactgcgtgaaagatgtactgcagtcagcttcagggcagcttcctgccacagcatgcattaagatgaagttggaatttacaaagctggctcaacaagatgttgagattctacttaatttgaggacaatgttggcctaatactggaaaataatgtctttcagaaaaaggtttctttggtgtagttgtctaagacagaggaagccaatggatttcaagttatatgatgaaattctgaattaatgaacagtggaacaacttgtatagaacttacttgattatcttgggatctatggtgtattaatgatgctgaccatatgtccttcatcctcttgttcctaaggtaaacaaaaacagataacgaaacaatggagaactcgattctatttacaagtataaatgctgagttatgtcctggtgaagaacgaccgagattttggttac

SEQ ID NO: 712660 - DNA, 1030 bp, Homo sapiens
tgggtcataggggggggattggtggccatgtgcccctgggggtttggtaatgacggtgctaaaaaaaaaaagctttttttttttaatgattggtctttgccccctgtgtctttgagtgctctggtataacgttattggatataaagttgggagacgctccataaaaaaaaagtggtggccataggttttcactaaaaaacaacaaaacaaacaaaacaaaaaaaaaaagggggggcggcgcgcaaaaaaaagaaaaatccccactcgggagggggcgcccagcgatctaccgcggctaccccaggtttctttgggcaaccagacgggggggccccataataggggcgcgctcgatataaaaaacggcaagcgacgggcgccggcgttcaacccagcgcgtcgcagcaggggaaaacccgggaaccgggcggacgaactttggggagaggcgagacccctatccttcggggggggggggcgacactatggggcggcaacctcactaacaacgaggaagataagccggcctcagaggggaacaatcaaaacaaattacaacgggggtacacggggcgcacccccaacccggcgaaatatcgctcaggccgcaaggaaagtattgcctcaccgggagcaatcggtcttgtcgaagacattttcataccggaggatgcttagatacactcgacaccgcacgcaacacagacacaacagagacaaccagataggcagccagccaatcaggggcaagcacacgccgacacgaccgcggccagcagaggaccacaccacgacagcagcaacaggccgagccgcgcacccacccgcgcgcaagactccgaacgcgaggcgagcaagcccacgaagagcgcgaagagcgccatagagccacaaggaagtagaccgcgaacaccgaaccgaagcgaaagaagcgtgagaagcggcgagcgtagagggacgcggccgagcccgcagacgaacaaagagaaggcgagcgagcgcggccaaagcaagccaggagagggtccat

SEQ ID NO: 712661 - DNA, 994 bp, Homo sapiens
taatcgcaatggcggttcctaatgcttaccgaacgaaaaattcttaggctatatacaactacgcaaaggacccaacgtagtaggcaccctacgggctactacaaccttcgctgacgccataaaactcttacaccaaagagcccctaaaacccggcacatctaccatcaccctctacatcaccgcccgaacttagactctcaccatcgctcttctactatgaacccaccataacccatacacacaagagccgctagaaaaacatcagaacaaggcctcacaatcagaaacataagacgcacactcatagcccatagcagagaaagacatacaagcctctgacacgggaagagcacaataaaacgcaagaaaagccacaagaacggagaaaagaagagaaagaagggacaaaaaagaacaaagaatcgaaaaaaacagactagagacaaagacaaacagagcagagcaaacaacccaacaccgaggacgggacccaaagaaaaccggacagacagcacccaacagagcaaaaaacaacaagaccagaacatgcacaggaacaacaggacaaccaacagaccacaccgaacaaaaaaacagacagaaaacgaacacaaacaccacgaagacgacaagacgaacgagcgagagaacaagcagcgaacggccacaaacaagcaaaaaacagagagaaaacccacgagccgcgaaggaacacgagacgagaaccactagccccgccagccacaacagaagaccggacacagcagaaacacaatcaaacaaagaagaccagcgaagacagaaaacccaagaaaagcaccaaacaagtagaagagcaacagaagcgaaaccagaacacgaaggacaagaaacgccggaagaagaagaaaaagacacaaagaacgacagcagaggaaaagaagacagcagcagcaagagaaacagaagaaaaaaaaaacagcgacagccagaggaacaacggagcgagacaca

SEQ ID NO: 712662 - DNA, 680 bp, Homo sapiens
  misc_feature (680)..(680): n is a, c, g, or t
acgagtagatgagatgatgagatgaaatgagatgaaaagatgaaactgtatgcgatgacatagtgaacatgatgagatgaagatgagtgtagaaatggacatgtagatgacatgtattgagatgaccatgaaatgacataatgaatatgaaataatgaccatgatgatgatactgaggtacatgacttggatgctattcaatgaggatgtccaatgaaatgtgcagaatgtctgagtatacagaccatgatgagcatgaaatgatgaaatgagatgagataaaatgagatgaaatgatgagatgagatgaaatatgagatgaaatgacataatgactgacatgatgaaccggcaatcaatgcacaatgccacaatgccgcagcctgcagatgctcacgcagttgcaacatgcagcatgcacctgcatgcaccatgcatgcagcatgcacactgcatgcagcatgccacatgctgcctgcaccctgcacctgcacttgcatgcccatcacaccctgcaccacggcacatgcagccatgttccatggatggcgaatgcaacatgcagaatgccacatgcagcagccacatgcatcgcatggagcatacacatggctctgcaatcgcatggacatgccattggatgaccatgcatgagcatgaatgtatgcacatgaatggan

SEQ ID NO: 712663 - DNA, 630 bp, Homo sapiens
  misc_feature (630)..(630): n is a, c, g, or t
ctttgaaaaaagtatctcaaaaaggcaacatgggccgagcgcagtggctcacgcctgtaatcccagcacttggggaggccaaggtgggaggatcccttgaagccaggagtttgagacaagcctgggcaacaaaaagcaagaccctatctcggaaaaaacaaacacaaaacaaacaaaaagaaaaaaacactttggggcgcgcgcgctctgaggccctctggagaaaagtttttaaacacaattctcggttgggaagcgcgcgaggggaccacaaatgagacgtgaacagggaacacacgtggcgccaaacaacggatggtcacacaaaaagaagacaccaggggagacaagagaacaaagagcggagaggagagagtctcctccacaccattataagaacaagcgccacggggggggaaaaccacaccgagaaaggcggccctcgagcgaaaacaacattcacccacagggatgtggagagcatcacagaaaaaagagggaacacaaaaccaggggggagagatcaaaaaaacagaaaaaggggaagagcggcccaaaaggacagacacaaccaaagagtaccacacaacatatgaacaccgcccgcagcatatcgtgggggggacacan

SEQ ID NO: 712664 - DNA, 802 bp, Homo sapiens
  misc_feature (588)..(588): n is a, c, g, or t
ggtggctgatatcgtacgtgtgacttgggatcgtcggtcgggggatctaccgattgtggcctctgctagtggtcagaggtactggatgcgtaagtagtaccctggccagacagatggagatggcaagggtcctgggcagagcattttggtcagaagcgggtgacagctagacagtgcagattctctctcccggttctgagcaggcggtaacgagaaattcaaaaggctggattacggtagcatctctgtgccctcctgaggtgtatgtctgcggccggcatggttagccgttttaggaggctcggtattcactttgggatagccaactccaaaaatgtaatcggcagggtgtctgggtctcagtgtcagacgatctagcatattttcgttttccatgtgggttcctgtttttcggattcgcctctggtgggtgtcagtaaactcccagttgactttccttttttcataacatcaaacactttagttaacgaaggtgcttctttctcattcttggcatctcctagacttccactatctgacttgaatctagctgattttttcctggaaagagtatcacattcgatgagnttatgggaactgaagagctgtctccggctatctaaacttgatgttaacttccctcggtacaacttaattcacttccttcagattttccgctgctctatcactttgcagtttcctcgaaagcttctgaataagttgggacacggatgttccttcgttacagcgccttatatgagttgcttttctattgcttcctgtttccgtactaggcatacta

SEQ ID NO: 712665 - DNA, 581 bp, Homo sapiens
  misc_feature (540)..(540): n is a, c, g, or t
gcacgcccagctaattttatatttttagtggagtcaggtttctccatgttggacaggctggtctcggactcccgacctcaggtgatacacccacctcggcctcccagggtactgggattgcaggtgtgagccaccacgcccagctgccagtttcttatttcttgtagagatggggtctcgctatgttacccaggctggtcttgaactcctgaacatgagtgatcctccaacctcggcctcccaacgtgctgggattacaggtgtgaaccaccgtgcccagccttaaattgatttttcttaataattggctgagcatgctggctcgcacctgtggtcccagcactttgggaggccgaagcaggcagattgcctgaggtcaggagtttgagaccagcctggccagcatggcgagaccccatctctacaaaaaatacgaagatttatctggattggctgggcacgttggctcatgcctgtgatcccagcacattgggaggccgaggccaggtggatcacctgaggtcgggaattcgagagcangctgacgcaatatggtgaaaccccatctctactaaaaatac

SEQ ID NO: 712666 - DNA, 202 bp, Homo sapiens
gcagactcgggactggatcgatgggactcaccggcctctccatcaggcccgatcttccagaagggcctgaaggatggaactatcttatgcacactcatgaacaacgcttacgagccgcgtgctccgttgccgcaagatcaaccagctccatgctgtacactggcaccaggctagaaaacctgtccaagcttcatctaaggcc

SEQ ID NO: 712667 - DNA, 191 bp, Homo sapiens
cggggtccaaaggcccggttttgggggccccttaattttcccgttttgggggcccccccgggggccccctttttggccctttttttaggccccccaagggggggggggattgggggggggggacccgggtttggtttttttttttccccccccggggtttaaaaattaaggttgccgggttttgcccccca

SEQ ID NO: 712668 - DNA, 460 bp, Homo sapiens
cgttattgaaaaatcgtaagtttttaaaagaaattattatttttaacactttcttcaagcccccttgttttatgctaataactgttttgttaggccctatcctatgtagctgttaaacatggtcacaggcatgtagtacattctatgtccgtatactttaaccaaaatatctgtactggacgtgctcgcaggcatgtcccagctcacagcctatgccccttttttatttcggaatgttattacttttctaagtccttttgtaaactacttcctcttttcccttgtctttccattacttttacctgttttaaaaagttttaaactgttacccaatcaagttttagtttaaattttaagatctggctccagcaacggagacacaatacaattacaaggacaaactacgtaaagaataaaaattgcatccctcctttatttagatatgctctcgccattgttc

SEQ ID NO: 712669 - DNA, 631 bp, Homo sapiens
cggtccaggagcagagagagagagggggggaagacaaccagatctcatgagaacttactatcaaaggaatagcaccaaggggatgttgctaaaccattcagaaaggacgaccctcattatcctgtcaccttgcaccaggccccacccccaacattggggattacagtgacatgacatttgggcagggacacagatccaaaccatacatttcatatagttgttctataaattttatccagagatgaggattgcttgagctcaggagttagagaccagccttggcaagatagggagatcccatctctaccaaaaattaaaaaaaaaaaaaaaattagcggggtgtgggggtgcgtgcctgtggttggtcccagctactggggaggctgaggtaggaggatggctggggccggggaggtagaggatgcagtgagcaccactgcactccagccggggtgacggagtgaaaccctgtctcagaaaaaaattctttttaattttaatccagagtttatagtccaatctatgggagggtcattgggaaaggggccattacttggccagaagaagaaccttcctggtttacattgggagaaaaatagatggaatcctatagtatcgtgtgagttgactt

SEQ ID NO: 712670 - DNA, 870 bp, Homo sapiens
agcggggaggcgcagcctgagcagcagagtgcagtggcagctgggagaggcgggagcatgctgtgtggcagcagagctggattggggtgttgagtccaggctgagtagggggcagcccactgctcttggtccctgtgccttgctgggtggtgcccttgccctgaactccatgtgcagcgtgggacagggcgaggtgccaccttagtctggctaggggagggcggacgatgaggagtgatgggtgcagcgcatgctggcacactccatcctctgtcaggaagccaagcaggtaccctggcaagaggcagacctggcttgatgccagctgttggccaagcaatgagtactttccctacagaagcactggtgatagaggccgggtgcgcctgcccggctggcatgcacattagcagccaggacatgccttgcatgtgaagtgcaccttagtgatgatgtactagaggactacttgtcagatctgacattatacacggccatgcaaacgatagcatgtcacagtggatggcccatgtcaagcctggtgcttacccccgagttggaaagacatggtctatacaccgtaccctaacttggcatggttagaaggtaccccaggaatgagtgtgtagaatggaccacccacaacatagaagacttggccccaacgggaagggggcgcataagcgtccgggttcaagtgcgatcatacagttcatccccagaaaaggcgagctggtgtcgttgcgatgtggtgacatgaggcttaaccacatgaaggttgcgcaactggtaaaaatccctatgtgccagggcatggttggcatctactatggagtcacatgagatccaaaaagtagctgtgctcaattg

SEQ ID NO: 712671 - DNA, 375 bp, Homo sapiens
gtgactggggtcttgggctgctgcgccaccttcaaggagcgtcggaacctgctgcgcctggtcaggagggcgcagggccacggggtgggggtggtgcaaatgggcccaaagaggttgtcgctgccggctttgaacctgtgccttgctgtgctcacctgggggggggtcacggtcctatcacacctgcctactacggtgggtccctacgttcctgctggaccaggtaagggaagacaccacctgcacaaaaaagcttcagggtgggcggacgcccttcaccctccacctggactccacgcgaaccagggcgaagaccctgttatcaggtgcattttggatccagatttggtcttagagcaaggtttccctttgagc

SEQ ID NO: 712672 - DNA, 243 bp, Homo sapiens
gtagctctagaccatccctatatgctgtctcaaaaataataataattcaaattgaaaggtgaggctatttataataatcttttaactttgagaccgagtctcagtctagcataccaggctagagtgcactggtgcaatctcggttcagttgcaactccacctcccgggttcaaacagttctatactagcctcaagcctcccaagtaagctggggattattgggcaccccggaagcaacacctg

SEQ ID NO: 712673 - DNA, 945 bp, Homo sapiens
acctcggggtgcgccctttggcacccggtaagatatgtgttctcgtccctcaaacggacctctcttctcaaaaccgcgcccttggtccagtggcgcccctgtcccgcccgttcgagggtattccctaaccgcgtcgtggttggccctcttaatatctgggcgggcggatacaacaccatgcgggggctgctccaccacaaacatgacgtcgtggtggctccaggatactattcgaccccacaggaggggcccgccctgacatggttccatcgcggctggtgctgcccccatgagagttacgtcctcctcccgccccccgccttcttgttcacgaccaatggagggtttgcgcttcccacccatggcgttcttagagagtgacccccccccccgggtaaggttgttttgttgttgctcacccccactccccgcgtcctcattcttcttgcctatgacacacacacggcacgatgttctcttcttgctccggctcttgtcttctagaaaataatggcatggtttgtacaactgtaaactacaaataaggcgcgcgcaccacactgtatttattttttctctctcgctggcgtgagcctgttttccatgaagtatctattcttgaggagaagattcgcgcctttaacttccttgactgcaaatgttcctaaatatgtgggatctggcattacatacaaagaaataatatgtcttatgttttaattgtattgcccaagagactagggcagcaggccccttcgtgcaaaattttcttctagggcgggggcgaggggagcgggattcgcgtctacttaggcccgcctctctgagtgtacttcacccaagaataaagggaatttaaataatagatagaggaggcacacaaacaatacaacaaacagaaataaaacaaaaatcaaaaaagaaaacaaaacgacccacatgaca

SEQ ID NO: 712674 - DNA, 355 bp, Homo sapiens
ctcccgtccttcgtggcacgccttgttcctgtggggctgggaactggacagccggataagtcaatcagggcagagtccgatgtcctgtgggaattcttccgactgtccccatatctagtccagacctaattcaccaccgaagttttctttcaagagaatcaatttatatctatgctttccaaagcactcagttgacagtttttgtagaaataactttctctttgcactcatgcaaaaatccagttgccccaggatttaatgaaatcatagaactattgtaataaaaccagaatgaacagatctgggagtgaacacatttgatcctgtgtaagtatgagattccagtgtgggagca

SEQ ID NO: 712675 - DNA, 352 bp, Homo sapiens
tgcccgcgactctgatttcaaaaatgggggaaatgatgcccctgtgtccctgatcttctctgcctcttcatcctcttcggcatgtcatcgtcaggcttcagcgactctaatgagtgagcgagagtcaagccctccagaaaaagaggaagcccaagagaagactgggaaaactgagccaagcttcaccaaaagaaaacagccggttctctaacaaaacaccagatcaacctccccggcactgccaccaagatctgtcatctgataacgcagcatggaacatagaggtagagaagaactctcatgcactcctcccatgtaaaatggtggctacagggaaaagtactgggatagg

SEQ ID NO: 712676 - DNA, 728 bp, Homo sapiens
agtgggcacccggggctggaggaaagggccagctatgggagggctgtgtgcactcggagtgttgggtcgaagaatcttagggattatgaggggctcatggccagcgtacgtgtgccaggaagcaattctggaagcgcagcaacagcaatgctcccggagcagcatccagacacgtgtatggtgcccagcacccccaccttatgatccactgttacatggcactttgctcaggtccacgtgcaaagatgccgaccacaccagtgaaggccaagagggtcagcaccttccaggagtttgagagcaataccagcgatgcctgggacgctggggaggacgacgatgagctacctggccatggctggcgtgagagcctgaactaccgaggtggtcatggagacgtgcaaacgtgtagctgcgtaaccacaagaccagctggaagggtgcggcccacgctgcagtgaggggccagggcattcaggagaagcccaggcacgagggcagagccagcctacacgccacccagatgtgcgatctccggctggtagaacgtcggtcagtgagagaccacacgtactgttcctgcagaacagtgccaggggatgcaggccctctgaagaaggtcccagatcactacccaaacgtcgagcagcggacgaggctgggatggaacatcttagccccaagcacatctcagaagatcaggtgctgagcagagagagaggctcacg

SEQ ID NO: 712677 - DNA, 455 bp, Homo sapiens
tttttttttttgagacagagtctccgcatggagtgcgatgacgtgatcttggctcactgcaacctccgcctcctgggttcaagcgattctactgcctcagccttctgagaagctgggattacaggcatgcccaccacgcctggctaatttttggtatttttagtagagatggggtttcaccatgttggccaggctggtctcgaactcctgaccttgtgatccgcccacttcagcctcccaaagtgctgggattacaggtgtgagccactgcgctcagcctagaaatctttaaggtgcaataaggtttttttgtttgtttgtttgttttaacttcttgaaaaaaaatagagacagtgtctcactatgttgcccaggctggtctcaaactcctggcttcaagagatcctcctgcctcagccttccaaagcgctgggattacaggcgtgacaccaatt

SEQ ID NO: 712678 - DNA, 157 bp, Homo sapiens
ctatcacggccccccagatgggcctggacgatgcctcctgaccggccttgttgcttctggcctgcgcacgcgaagctcagtactgcgcgctactatgacagacacagtgctgcagcagctgctgcacgtggcgccctgccgaactgtcagttgcgta

SEQ ID NO: 712679 - DNA, 135 bp, Homo sapiens
gactctcaggatcccgacactctaggggcattccccacattctgcaggacaggagccaccttcccctctctcacctcccctggccctgttcaccagtaggttctctatgtattaatttctcggcctatccggact

SEQ ID NO: 712680 - DNA, 213 bp, Homo sapiens
  misc_feature (10)..(10): n is a, c, g, or t
tcaagatcgntgatcgctaccgtcctgtgtggtcgtgatatagtaggacagtggatctcgtcatcatcatgcgcgtcactataatgacgagcttggtacttagaagtcatagtactccgcgttaccgcgcttcattgaattttcacttgacatcagagcactggcagaaatcacatcggtcacaccgcgcgggctcgcgatgtttgtttaatt

SEQ ID NO: 712681 - DNA, 732 bp, Homo sapiens
agggtgtggggcatccatatagtcactccaggatgtatggagggttctcctactattaggacttggacgcttcgaaacgaaggcttctctgatcatgataattattaatattactgctgttatagaattgattgagcctaacagaatgataggatgtgacatgtggtgtatgcatcggtgtagtccgagataacgtcgggggtttccggataggccgagagagtgttgtgggaagaaagttagaatttacagctcagatgaatataaatagtgaaatggatttcggtgtagggttaggtctagggtgtatgctgtagaatagtgggaaatcagtgaatgaatgcctgtctagtgatgtgcagagatatagtgtcctattgatatgggacatagtggagagtgagtcgtacaaatgtaggacagtggtcggatagtaggtgaccgatagtcatgaatgatgtaggttgtgatggattacaagtggatcgacgtctaggcctacacgtgacggtgcaaaaaagtcccggatcgattgcactagggcgtcatgaggtgtttggaaacgaaatgcaatttcgatatatgcgtatccagtgtatgtggttgatagaagtccatgccttttcttagttaagactgactggtaggtggaatacgcgatcgcattattggccagcggtggggtcgaaatgatgctcgatgttcgttttcgatattatacactaactagta

SEQ ID NO: 712682 - DNA, 318 bp, Homo sapiens
agtagctctaagatcccagtacttattgcatacacagcatcaggagctttcagcgcattcggacagtcatgcatgtcgcgagcctctcactgtaaaggcgaggtgacgaatgagtcacgagctgagagcacatgacgactcgttctgatatagcagtacaggatgcacgcagagaggaggagattcgggaggaggcgagaggaggctaggcagacgcccatcactcagctttagttccttaccgtttactaactgcctttctctcctcaaattgtgtttgtgcctcttatctgtattgctaatcttgtgggactggga

SEQ ID NO: 712683 - DNA, 211 bp, Homo sapiens
  misc_feature (183)..(183): n is a, c, g, or t
ctctatcattgaatgctaccggtcacggtctgatccggaattattgcctcaattatgtgccgccgtgttccgtcagtacgcgaaggatatcggttcattaagttggactaaatgctcttccttcagaggattatccggggcatctactcgatgaaaaaccattgattaatttctttgtatttnagcataacacttttgaaaaaaccctttc

SEQ ID NO: 712684 - DNA, 315 bp, Homo sapiens
gtggaatcctattagggcacgatattcttcctcgagcttcattatattagacacattagctttatctctttctgctgtcaataatttaacattggactgtatatcttccatactatttttcaaagtctttctatgcatacgctgtaaattcatctcatttctcttagtgatctcgatgaattttctgcatattgtaatcagccccttttcttggatgttctaaattattgaagctatcttcacgttgcgctattacttgtaagagcaagatcttcgctgtattatatgttggagtctctctagctctttcttata

SEQ ID NO: 712685 - DNA, 996 bp, Homo sapiens
agcaggagtattcggagcgcggaggacacggggcgcaacggtcctgtggtcgagcaacgtggtagagtacgctaccaggggccccctccggaggggggccattcagtccatggggtgcacacacgccagagtctcgaacggagagttaaagggggagcaaggtgcaaaacaagaggttatcctactgtgtgtaaaccggtctgccgccccgtggcaaggggtgtttccccgcgctggaaccgtagggggtgctgcaacccacgaagcatcaagggggtcggacaatattagcagactaccggggaggttacagtacgccgcaactggggcggggtggacgaccaaatgtggcgttgtgtcggttgtcaagtccgaaatggctatgcctcaaccccttttgtccccacaactgatgggggttttctagtaatgtgcaagcgggcaggggattgtttgcgtttacagtgttttcattcgtacgacctcttgtttccactctggtgggttatcattaggcaacggtgggctcccacacacggatgggttttaaggcaaggggcgtgcccaccattataagcgagggtgggcaccacgagggtgtcttttgttatacagaacgactccacatctttgtgggttccaaaatctagatgtctttgtcaaattgctcgcgccctccaaagctgtggttacaaaatattctaagcgcgggcggacgatgcgtaatatctcgcccggtgataaatacccccgccgactaggatcttgggcgggaaaattatgaaaaaatactatttcgtgccgggaggtatttagcggatagtctgtttttctaataaattaatttgagacacctttctgtttcgcaatatacacgaactacgatcatgacttggttgtagacagaccgcttcgagtgcacgagtaagagcgtgcgtcggggggaaaaaggtttaatttgcccccaagaaaaaaacaaaaaacgccacaaaaaca

SEQ ID NO: 712686 - DNA, 203 bp, Homo sapiens
  misc_feature (115)..(115): n is a, c, g, or t
  misc_feature (137)..(137): n is a, c, g, or t
  misc_feature (167)..(167): n is a, c, g, or t
gatctagaggatcctgggatgaggaacgtcactcaagtattgtcactcatcggcagggtgagactgacctggctcctaatcataattcagggtaatgtggagtcaagagaagggncttgtgacaggcaaggccaatntagaatctttccctaggactgatgtataanaagctggggggaaaatgcttttctctttcccctggg

SEQ ID NO: 712687 - DNA, 363 bp, Homo sapiens
gctcgacttttttttttttaaatgttggacaattttggacaatgcctctgcccactgagaaccccataagttcaacaccaaaagtatcaaagtgatctacccccttaaatgcaaaatctctaaatcaggggatccgaaggaccattaaggctcatgtaaacacaacactctgtggaaaacattgtcaacgctatgaaagagaggcccatagacagaacatcatgaaagtctggaaaattacaccatagaagatgccattattatagaaaaaagtcatgaatgccatcaagccccaaagcaatagattcctgttggagaaaattgtgtccagatgttgtacacatgacttcgcgggatttacaa

SEQ ID NO: 712688 - DNA, 167 bp, Homo sapiens
aaaaaaatttttaaaagtagccgaacatagtggtgcatgcctgtaatcccagctacttgggaggctgaggtgggaggatcacttatgcccaggaggttgaggctgcagtgaactgagattgtgccactgcactgtagcctgggcggcttagtgagatgctgtctgaa

SEQ ID NO: 712689 - DNA, 1525 bp, Homo sapiens
aggaacatgcagcgtgcctcagtgaagctacagatgatgtgaatccctgatggggccatctactccagtccccatcatggaggacggaggaggtggaagctccacatccagaagacccagcagaggccccataggacgcgtcctagaaataaagaaacacaaaaccagggataccgaccgacggggattcacagaacgaggccaggtaaggcactgggcaggaagaagagcacatatgcagatagacgaagagaaacgacggagcgacgaacgaacgcggagggacggagcgcgagccagacggccacaggagaggcaaatggacaccacagcgcagccacacgaccgcacccggagcacccaacaggaccctcatcatcacacaaacagaaaacaaagccaccccagagaagggcagataaaacaacaaccaaaggcaagaccaagacaacaagggacagacacacagccagcacccaggggtgaacactccacacgagaacacctgaaaacgacacacagaccacgaacaacaaaacacaaaggacccacacaacgagagtcaccaaagaaaaccacaacaaccacacggagacaccgaagcagcacacaacatccccccaccagcaacgacaggagacacgaaaggcgacaaacccaacaaaacacacacctagccccaaacccgccaggggacgaagacacgcggcaacacaaacgacacagagctagagacggcaacgacgcaaaccccaacgcagacaggaatccaaacaagcaacaccaacacacaaaggacatgcacacacacaacaagagagaaaaaaaaaacaacaagaagaaacagaactaagagaaaggaaccacacaagggagagggcgaccacatacccacaggacaatatacagacgacgaacacaaacgacgacaaccacaagaagcagggaaacacacagacgccaacaacgagagagaacagacagaacatgacaacaagacgaaccacaacggaacgaaaaagcagccgaccaagacagcagggcacacagcaacgtgccaagaaacaaaaaacgagcaagcaaaaacaagaacagcgacaaaaacagaagaacacaacagcagcaagaaaaaacgagagaagaaagaagcaagagaacacagaacaaacagaaggagcaacaaaagagcgaacaggcgagacacagagtacgcaaagaagccacaaaaagcaaaagacccaacgaaaaaagggagggacagcgaagcagaagaaaacacgcgacccagcccagagagaagacaaccacagcgcggcagaaccagacaaaacgagagagagccgcacggccagcacgccgacacgagccggacacgcgcaccgccagcggagacgaaaacggcagcacacagaagcaaccgagcacgcacaaacaaagagaacagaaagcgcacacagcgcaacgcgaggcagcggcgaagcgcacgcacgaacgcaacacgcgaaacacaggagacggacaggaa

SEQ ID NO: 712690 - DNA, 407 bp, Homo sapiens
  misc_feature (45)..(45): n is a, c, g, or t
  misc_feature (84)..(85): n is a, c, g, or t
  misc_feature (97)..(98): n is a, c, g, or t
  misc_feature (100)..(101): n is a, c, g, or t
  misc_feature (104)..(104): n is a, c, g, or t
  misc_feature (109)..(109): n is a, c, g, or t
  misc_feature (117)..(117): n is a, c, g, or t
  misc_feature (121)..(122): n is a, c, g, or t
  misc_feature (131)..(131): n is a, c, g, or t
  misc_feature (142)..(142): n is a, c, g, or t
  misc_feature (204)..(204): n is a, c, g, or t
  misc_feature (208)..(208): n is a, c, g, or t
  misc_feature (210)..(210): n is a, c, g, or t
  misc_feature (225)..(225): n is a, c, g, or t
  misc_feature (234)..(235): n is a, c, g, or t
  misc_feature (248)..(248): n is a, c, g, or t
  misc_feature (289)..(289): n is a, c, g, or t
  misc_feature (317)..(317): n is a, c, g, or t
  misc_feature (330)..(330): n is a, c, g, or t
  misc_feature (402)..(402): n is a, c, g, or t
gagtaactgtgccaaattcttaaaatttctttaggtgtggttttngtcatgtagcagtttttatgtagatctatatataaaagnncacacctccccnncnngcnaatgngggggctnaatnngaatctgtncaacctaaatngtagttacagtcctctattgtgcgaaaatagttacactacatacacaaatatacaataggcnaaananccttcatggtaaganagcctaggnnccagctacctgtnaccattttgtcactctcatagttttgtgtcatccattgttngagaagaaagaggcacaggactattgtnttttatgaatttnggtgacagttgtcaaatttgtacagtgaactctgttccccctcattttagtctttttacccccctttcaagntcctc

SEQ ID NO: 712691 - DNA, 154 bp, Homo sapiens
ccagatacaccggcagatacacttaatgaattcattgttttccacagtatgttaaaatatttaaagaacagttatttgctacctgcacgagtttccagacaaggtttttgtctgagaagtggaatgaaaatgttcagtatctctcagaagatag

SEQ ID NO: 712692 - DNA, 594 bp, Homo sapiens
  misc_feature (548)..(548): n is a, c, g, or t
  misc_feature (584)..(584): n is a, c, g, or t
cactcgtatggcacaatgagtgaggtgaaaagcttcttgttatgttaacataagcaacatactcgttttcgagctgttaacatgacggccatggctctttaactgatctgaatcttagctggaaccatggccaaacggaaataacttacatcagactgtgcagacaaagccccattaaataggtgatgaattttggatcgcacttttcagcgtatctagcctacgcgtgtcaacgaactaggtgtcgctggacccctcctattgagtgtccgttgtatgccattctcctaataactcattacgtgctgcgaaacacccgggtgaagcaaggggcccgaacaatgtcattatcataaccattacgatgtcgatgctcctagagtaaaagacacactggttgctgagtccaatgacatgcacgagcatacactaagatattcaccaaccacatctttgcttgtacacgcaattatcctcaaactctgtaatcgagattgattccattacatgaactgctatgccatttatggatggagaagaacttgtgngctcaggatacatactaataacatcagcgccactcnattgctatct

SEQ ID NO: 712693 - DNA, 135 bp, Homo sapiens
gacgatggagcttgattgcgtgtgatgggtcaaagatatacatacggtctctgtgttggagaaccctctcggagtgtaggaagctgaataatttatgaaggagaggggtcagggttgattcgggaggatcctatt

SEQ ID NO: 712694 - DNA, 121 bp, Homo sapiens
ttgagccggtctttccgttctgtcccctcacggctgggccctttcgtgctacccgtgtcccctgttttactaccgactcactgacttactggaccgactcccttttggaccccttttacca

SEQ ID NO: 712695 - DNA, 230 bp, Homo sapiens
gcgaagactgtggtggtacggggagagactccttctgcttgagaaaggggagggaagagtacgggaactttgtttttgcatgcttaggtatcagcttgaccacagtaaggcagagcaacaagagggttcttgaggtccctgattccaggccttggctcttggatggtatttctgcacctgaactgggccacagtcttcgcctgatccacagtcttcgcctgatgggtacc

SEQ ID NO: 712696 - DNA, 1283 bp, Homo sapiens
  misc_feature (1)..(1): n is a, c, g, or t
  misc_feature (7)..(7): n is a, c, g, or t
  misc_feature (9)..(9): n is a, c, g, or t
  misc_feature (12)..(12): n is a, c, g, or t
  misc_feature (14)..(15): n is a, c, g, or t
  misc_feature (17)..(17): n is a, c, g, or t
  misc_feature (21)..(21): n is a, c, g, or t
  misc_feature (25)..(25): n is a, c, g, or t
  misc_feature (34)..(34): n is a, c, g, or t
nacgctngncancnngnccgntcgnctccacgcnggtcaccaacaccagcatccagttcaacctgcgcaacctctaccgcctctccaaggccctcttcccgccggagcccctggtgctgcgagagatgtgcaagcagggataccgggatggcctgcgctttctgcagcggaacggcctcctgaaccggcccaaccccttgctggcgttgccccccgcccgcccccacggcccagaggacaaggaccaggcagtggagagcgcccaagcggaggattactcgcagctgcccggagaagatcacatcctggagcacctgcccgcccggctcaatgaggccctgctggaggcctgcgtggagcccacggacctgctgaccaccctctccaacatgctgcctgtgcgtctggccacggccatgatggtgccctacacgctgccgctggagagcgctctgtccttcaccatccgcttgctggagtggctgcccgacgttcccgaggacatccggtggatgaaggagcagacgggcagcatctgccagtacctggtgatgcgcgccaagaggaagctgggcaggcacctgccctccaggctgccggagcaggtggagctgcgccgcgtccagtcgctgccgtccgtgccgctgtcctgcgccgcctacagagaggcactgcccggctggatgcgcaacaacctctcgctgggggacgcgctggccaagtgggaggagtgccagcgccagctgctgctcggcctcttctgcaccaacgtggccttcccgcccgaagctctgcgcatgcgcgcacccgccgacccggctcccgcccccgcggacccagcatccccgcagcaccagccggccgggcctgcccccttgctgagcacccctgctcccgaggcccggcccgtgatcggggccctggggctgtgagaccccgaccctctcgaggaaccctgcctgagacgcctccattaccactgcgcagtgagatgaggggactcacagttgccaagaggggtctttgccgtgggccccctcgccagccactcaccagctgcactgagaggggaggtttccacacccctcccctgggccgctgaggccccgcgcacctgtgccttaatcttccctcccctgtgctgcccgagcacctcccccgcccctttactcctgggaactttgcagctgcccttccctccccgtttttcatggcctgctgaaatatgtgtgtgaagaattatttattttcgccaaagcacatgtaataaatgctgcagccca

SEQ ID NO: 712697 - DNA, 1150 bp, Homo sapiens
  misc_feature (32)..(32): n is a, c, g, or t
tcgactctagaggatcccgtcagcatttcagnagcggaacggcctcctgaaccggcccaaccccttgctggcgttgccccccgcccgcccccacggcccagaggacaaggaccaggcagtggagagcgcccaagcggaggattactcgcagctgcccggagaagatcacatcctggagcacctgcccgcccggctcaatgaggccctgctggaggcctgcgtggagcccacggacctgctgaccaccctctccaacatgctgcctgtgcgtctggccacggccatgatggtgccctacacgctgccgctggagagcgctctgtccttcaccatccgcttgctggagtggctgcccgacgttcccgaggacatccggtggatgaaggagcagacgggcagcatctgccagtacctggtgatgcgcgccaagaggaagctgggcaggcacctgccctccaggctgccggagcaggtggagctgcgccgcgtccagtcgctgccgtccgtgccgctgtcctgcgccgcctacagagaggcactgcccggctggatgcgcaacaacctctcgctgggggacgcgctggccaagtgggaggagtgccagcgccagctgctgctcggcctcttctgcaccaacgtggccttcccgcccgaagctctgcgcatgcgcgcacccgccgacccggctcccgcccccgcggacccagcatccccgcagcaccagccggccgggcctgcccccttgctgagcacccctgctcccgaggcccggcccgtgatcggggccctggggctgtgagaccccgaccctctcgaggaaccctgcctgagacgcctccattaccactgcgcagtgagatgaggggactcacagttgccaagaggggtctttgccgtgggccccctcgccagccactcaccagctgcactgagaggggaggtttccacacccctcccctgggccgctgaggccccgcgcacctgtgccttaatcttccctcccctgtgctgcccgagcacctcccccgcccctttactcctgggaactttgcagctgcccttccctccccgtttttcatggcctgctgaaatatgtgtgtgaagaattatttattttcgccaaagcacatgtaataaatgctgcagccca

SEQ ID NO: 712698 - DNA, 441 bp, Homo sapiens
tgggagtgcattattttctctgcttaaaataaaagccggggctgggtgcagtggctcatgcctgtaatcccagcactttgggaggctgaggcgggtggatcacaatgtcaagagatggagaccatcctggccaacatggatgtaaaaatacaaaaatcagccgggcgtagtggaaagcgcctgtagtcccagctactcaggaggctgaggcagaagaatcaattgaacctgggaagtggaggttgcagtgagccgagatcacgccactgcactccagcctggcgacagagcaacactccgtctcaaataaagaaataaattaaagctgggcaggtggctcattcctgtaatcccagcactttgggaggtgaagcggatggatcacctggagtcacgaatttgaggccagcctggccaacgtggtgaaaccctgtttctact

SEQ ID NO: 712699 - DNA, 152 bp, Homo sapiens
atgagctggtaccactcattgatattcaaccgtgagcaaccgcagagaaacgccgcacacgcggggtcatcccgtgcctggcggcgagatgacggacgcgattacagcgtgcgcaagatccggttcagcagcggccccagcactttgaacga

SEQ ID NO: 712700 - DNA, 224 bp, Homo sapiens
ctcacgctcgaagttacgccgcagatcacgccggacggaacatcatcctcgacgtgaacatcaccaaggacagccgggcaagaccacgcctgccggattcgcgatcaacaccaagcacgtaaggacccaggtactgttcgagaccggcggccggtggtaatcggcggcatcttcgagcaaggtcgaccgggataaggtgtcgcaaatatcattccagggtaccc

SEQ ID NO: 712701 - DNA, 1156 bp, Homo sapiens
agcggccgcgctgatgaactgagaatcccttctctccccaaccccaggcctcctgaaccggcccaaccccttgctggcgttgccccccgcccgcccccacggcccagaggacaaggaccaggcagtggagagcgcccaagcggaggattactcgcagctgcccggagaagatcacatcctggagcacctgcccgcccggctcaatgaggccctgctggaggcctgcgtggagcccacggacctgctgaccaccctctccaacatgctgcctgtgcgtctggccacggccatgatggtgccctacacgctgccgctggagagcgctctgtccttcaccatccgcttgctggagtggctgcccgacgttcccgaggacatccggtggatgaaggagcagacgggcagcatctgccagtacctggtgatgcgcgccaagaggaagctgggcaggcacctgccctccaggctgccggagcaggtggagctgcgccgcgtccagtcgctgccgtccgtgccgctgtcctgcgccgcctacagagaggcactgcccggctggatgcgcaacaacctctcgctgggggacgcgctggccaagtgggaggagtgccagcgccagctgctgctcggcctcttctgcaccaacgtggccttcccgcccgaagctctgcgcatgcgcgcacccgccgacccggctcccgcccccgcggacccagcatccccgcagcaccagccggccgggcctgcccccttgctgagcacccctgctcccgaggcccggcccgtgatcggggccctggggctgtgagaccccgaccctctcgaggaaccctgcctgagacgcctccattaccactgcgcagtgagatgaggggactcacagttgccaagaggggtctttgccgtgggccccctcgccagccactcaccagctgcactgagaggggaggtttccacacccctcccctgggccgctgaggccccgcgcacctgtgccttaatcttccctcccctgtgctgcccgagcacctcccccgcccctttactcctgggaactttgcagctgcccttccctccccgtttttcatggcctgctgaaatatgtgtgtgaagaattatttattttcgccaaagcacatgtaataaatgctgcagccca

SEQ ID NO: 712702 - DNA, 812 bp, Homo sapiens
tgtcgaataattaagttatctccacgccaatgttcaaagagtacagaccagcatagttctgctaatcacagttttacagatgggcactatgaggtttgcaaaaagggagaaggatctttttcactgtactgtattgggacgctggtaacgtgttaacccaggtgttcagcatagcagctatatatatatatatatgtatatactttcattattcttcactataatttgccagacagagatcagaattgaacctgtcaatgtgaaataaacgagttctccttgtacttgaataataaccacgattccaacccaggtctgctttggggcttatcagaactcctttctaaggagcactagaatgagacatcatgttgctcgatcgtttcacatctgatatatcagactctaaagcagagatgtctaatggtgatactccaagcgtggcatagccatcacatttacaaccttccagatttgagctgccatggcgggaatccatatcagctcctgcataagattatatacacacagctgtccactcacaaaaaggctggatgttgcttacatccaactggcaatgctttattctatccaaggtacattcatactcaaaagaggccagtacatattgaccactcccttgaccctctcctgtgtcatcaagggccccaaaattaaccagctaggcacaggctacccaacctcacagtcgacatcgtacataaaacgattccatagatcattgaaccactagcacccaatcgcagaaacacaggagcttacacataaccctgactggctgcgctaagtat

SEQ ID NO: 712703 - DNA, 1034 bp, Homo sapiens
  misc_feature (1029)..(1029): n is a, c, g, or t
ggcggccccagtcagacgcaggcagccccaaagcctgaacaggcagggccagacccagcttcttcgcctccgccagcggggaccccgagctagagccgcagcgggacctgcccggcccccggctccagcgagcgagcggcgagcaggcggctcacagaggcctggccgcccacggaacccggggcccggcggccgccgccgcgatgtttccccgcgagaagacgtggaacatctcgttcgcgggctgcggcttcctcggcgtctactacgtcggcgtggcctcctgcctccgcgagcacgcgcccttcctggtggccaacgccacgcacatctacggcgcctcggccggggcgctcacggccacggcgctggtcaccggggtctgcctgggtgaggctggtgccaagttcattgaggtatctaaagaggcccggaagcggttcctgggccccctgcacccctccttcaacctggtaaagatcatccgcagtttcctgctgaaggtcctgcctgctgatagccatgagcatgccagtgggcgcctgggcatctccctgacccgcgtgtcagacggcgagaatgtcattatatcccacttcaactccaaggacgagctcatccaggccaatgtctgcagcggtttcatccccgtgtactgtgggctcatccctccctccctccagggggtgcgctacgtggatggtggcatttcagacaacctgccactctatgagcttaagaacaccatcacagtgtcccccttctcgggcgagagtgacatctgtccgcaggacagctccaccaacatccacgagctgcgggtcaccaacaccagcatccagttcaacctgcgcaacctctaccgcctctccaaggccctcttcccgccggagcccctggtgctgcgagagatgtgcaagcagggataccgggatggcctgcgctttctgcagcggaacggtgcgcggacccgggcgggagagggcggggtgggctcggctctgctaccccctgcgggccgcggccgcnagctt

SEQ ID NO: 712704 - DNA, 417 bp, Homo sapiens
  misc_feature (20)..(20): n is a, c, g, or t
  misc_feature (72)..(72): n is a, c, g, or t
  misc_feature (76)..(76): n is a, c, g, or t
  misc_feature (81)..(81): n is a, c, g, or t
  misc_feature (104)..(105): n is a, c, g, or t
  misc_feature (114)..(114): n is a, c, g, or t
  misc_feature (121)..(121): n is a, c, g, or t
  misc_feature (124)..(124): n is a, c, g, or t
  misc_feature (133)..(133): n is a, c, g, or t
  misc_feature (203)..(203): n is a, c, g, or t
  misc_feature (205)..(205): n is a, c, g, or t
  misc_feature (223)..(223): n is a, c, g, or t
  misc_feature (280)..(281): n is a, c, g, or t
  misc_feature (398)..(399): n is a, c, g, or t
catattgggagaaatttgangatgagaacttcatcctaaagcatacgggtcctggcatcttgtcatggcaanttgntgganccaacacaaatggttcccagttnntcatctgcnctgccangantgagtggtnggatggcaagcatgtggtgtctggcaaagtgatagagggcatgaatattgtggaggccatggagcgcttngngtccaggaatggcaagancagcaagaagatcaccattgctgactgtggacaactcgaataagtttgacttgtgtnntatcttaaccaccagatcattccttctgtagctcaggagagcacccctccaccccatttgctcgcagtatcctagaatctttgtgctctcgctgcagttccctttgggttccatgtnntccttgtaccctcccatg

SEQ ID NO: 712705 - DNA, 123 bp, Homo sapiens
tcacggagatgtacggctcctcttttgacttggcctatgactttcaacgggactattatgataggctgtacagttacccagcacgtgtacctcctcctcctcctattgctcgggctgtagtgc

SEQ ID NO: 712706 - DNA, 909 bp, Homo sapiens
tagtgtgccctgaaaaatgtacacgtttttcttattgttcaccacatgttcacctttatcagcgtggatactgtcagcatgagtacatatttcaacccactgcttgtcaaaagacatgagagtctcatattaaggaccatacattcagttccttggtccttggaagacctatatacttctgtagttacgtgaaaagcgaagagtcaattctgaattgattcatctttacattatttttccgaccatgtcatttgaaaacttgcttttaaccttctgcataagagattcttatgccaaaaacattaaacagaagaagtcattttttggctatgtaatacctcgcaactttgctctagaatcaagctcagttattattttcccaagttcgacccatgttccattatcagatgccttgtaaattatgtcttaacgttacttatagactaactttcctcttttccacctgccagatttgctaaacatagctcgaaaatgagcatgaaaaaagcagtacactgtattatttctcctaaaactaaggcatatctgtgtggttggcattgctgctcctatgtggtacgtctcggatagtagatgcttctacagcgtaagaagtagcgtatgataattccctttgtatctcttccagtacatcagtgctgaaaaactcctgacttcttggatcatagtgcactgaattacagtataatggttggtggcccagtacagctatatattgtggctcttacagccttgggattcatgtgccttttaaaatctctattcccttgttccactctaaaggcacggtaccagtttgccataagttgcgctgaacagggtgggacacattcacgggcgctcgaagaatcttgcgaacaaaaaaaaggggggcaaacacggggccaa

SEQ ID NO: 712707 - DNA, 1298 bp, Homo sapiens
agcggccgcgctgatgaactgagaatcccttctctccccaaccccaggcctcctgaaccggcccaaccccttgctggcgttgccccccgcccgcccccacggcccagaggacaaggaccaggcagtggagagcgcccaagcggaggattactcgcagctgcccggagaagatcacatcctggagcacctgcccgcccggctcaatgagggtgcgcacctgggggacgggaggggaggaggggaggcaggagggaaagagagagaggagaggacggtgagcaggggagggaagccgagcgggtcctgggccccgctgcctccactggccgccgacctcccgcccacccgcagccctgctggaggcctgcgtggagcccacggacctgctgaccaccctctccaacatgctgcctgtgcgtctggccacggccatgatggtgccctacacgctgccgctggagagcgctctgtccttcaccatccgcttgctggagtggctgcccgacgttcccgaggacatccggtggatgaaggagcagacgggcagcatctgccagtacctggtgatgcgcgccaagaggaagctgggcaggcacctgccctccaggctgccggagcaggtggagctgcgccgcgtccagtcgctgccgtccgtgccgctgtcctgcgccgcctacagagaggcactgcccggctggatgcgcaacaacctctcgctgggggacgcgctggccaagtgggaggagtgccagcgccagctgctgctcggcctcttctgcaccaacgtggccttcccgcccgaagctctgcgcatgcgcgcacccgccgacccggctcccgcccccgcggacccagcatccccgcagcaccagccggccgggcctgcccccttgctgagcacccctgctcccgaggcccggcccgtgatcggggccctggggctgtgagaccccgaccctctcgaggaaccctgcctgagacgcctccattaccactgcgcagtgagatgaggggactcacagttgccaagaggggtctttgccgtgggccccctcgccagccactcaccagctgcactgagaggggaggtttccacacccctcccctgggccgctgaggccccgcgcacctgtgccttaatcttccctcccctgtgctgcccgagcacctcccccgcccctttactcctgggaactttgcagctgcccttccctccccgtttttcatggcctgctgaaatatgtgtgtgaagaattatttattttcgccaaagcacatgtaataaatgctgcagccca

SEQ ID NO: 712708 - DNA, 1106 bp, Homo sapiens
ggcctctagctgctgatgagcttcagagctcaagatatagacagatgctggctgatgcaccacgtctgttggagaacgagcatccatgggctccgcaaggtcattgatgcacaccaagtatcgacatcggacatgctagtcgtggcagacagcgatctgaggcgtctccaggagggagctgctcttcactgaagaagaaccacgaagaggaagtaacaggcctacaagcccagattgccagctcagggtagaccgtggaggtagatgcccccaaatctcaggagctcgaccaaagatcatggacagacatccgggcccaatatgacgatgctggctctggacagaaccgagaggacgctacgacaacgtactggtctcaagcacgacttgaggacgagcatgcacagtggtcaccctagacagtctgctgaggttggacgctgcctagagtaccgacgctcacgagagtctagagacagtacagtccacgtccttgcgagaatcgaccctggaactccatgagaaatctcgaacggtccagcttggagaaacatgcctgacgccggtggcaagccctggtaatgccctacaagattgagaagcactcatcaaacgggatcctgcctgcagcctttgaagtccaggagcatgggaacaggatcccggggtcagaagggacagcgcaccaggtcccaggatgatatgaggcgccctggttgacaacatgaacggtcaaagcgtggtcggcttgagaatcgcccaaccttaccgcacgccttgcttggaacgatggcgagggcattttcgatcttggatagaatgcctaggggagagcagcaacaatccaatgcgaatcgcatccagagaagaccagcccaagccctgcccgggcagtacgtgcaaaagcgcaacaggcatgcaagagtcttgaagacccaaatggacaaccacagggtccaggcggccattaagagcacaccccgcacgcagaggatacgcactatgggggcaaacaaggaggcgcccaataaccgagcacacagaagtacaaaggccaacacaaacacaacacgtcgaaggcgagacacactccgaggacacgacac

SEQ ID NO: 712709 - DNA, 867 bp, Homo sapiens
  misc_feature (849)..(849): n is a, c, g, or t
ggcggccccagtcagacgcaggcagccccaaagcctgaacaggcagggccagacccagcttcttcgcctccgccagcggggaccccgagctagagccgcagcgggacctgcccggcccccggctccagcgagcgagcggcgagcaggcggctcacagaggcctggccgcccacggaacccggggcccggcggccgccgccgcgatgtttccccgcgagaagacgtggaacatctcgttcgcgggctgcggcttcctcggcgtctactacgtcggcgtggcctcctgcctccgcgagcacgcgcccttcctggtggccaacgccacgcacatctacggcgcctcggccggggcgctcacggccacggcgctggtcaccggggtctgcctgggtgaggctggtgccaagttcattgaggtatctaaagaggcccggaagcggttcctgggccccctgcacccctccttcaacctggtaaagatcatccgcagtttcctgctgaaggtcctgcctgctgatagccatgagcatgccagtgggcgcctgggcatctccctgacccgcgtgtcagacggcgagaatgtcattatatcccacttcaactccaaggacgagctcatccaggccaatgtctgcagcggtttcatccccgtgtactgtgggctcatccctccctccctccagggggtgcgctacgtggatggtggcatttcagacaacctgccactctatgagcttaagaacaccatcacagtgtcccccttctcgggcgagagtgacatctgtccgcaggacagctccaccaacatccacgagctgcgggtcaccaacaccagcatccagttcaganccgcgcctcagttcagat

SEQ ID NO: 712710 - DNA, 296 bp, Homo sapiens
ttgtgctctttgctctgttgcccagggtgaagtggggtagtgcgatcttggttcactgcagcctcaacctcctgagatcaagcgatcctcccacctcagcctcccaaatagctaggactacaggcacacattaccacacgtagctaatttttttttttttttttttttttggggggggaaagaaggttttttaatttagcaaggggggtttagaatttccggggctaaagagtttctccccttttgtcccccaaaggggttgggtttacggtaaaaaccccccggcctggacaaaa

SEQ ID NO: 712711 - DNA, 1408 bp, Homo sapiens
  misc_feature (813)..(813): n is a, c, g, or t
  misc_feature (847)..(847): n is a, c, g, or t
  misc_feature (855)..(855): n is a, c, g, or t
  misc_feature (1403)..(1403): n is a, c, g, or t
ggcggccccagtcagacgcaggcagccccaaagcctgaacaggcagggccagacccagcttcttcgcctccgccagcggggaccccgagctagagccgcagcgggacctgcccggcccccggctccagcgagcgagcggcgagcaggcggctcacagaggcctggccgcccacggaacccggggcccggcggccgccgccgcgatgtttccccgcgagaagacgtggaacatctcgttcgcgggctgcggcttcctcggcgtctactacgtcggcgtggcctcctgcctccgcgagcacgcgcccttcctggtggccaacgccacgcacatctacggcgcctcggccggggcgctcacggccacggcgctggtcaccggggtctgcctgggtgaggctggtgccaagttcattgaggtatctaaagaggcccggaagcggttcctgggccccctgcacccctccttcaacctggtaaagatcatccgcagtttcctgctgaaggtcctgcctgctgatagccatgagcatgccagtgggcgcctgggcatctccctgacccgcgtgtcagacggcgagaatgtcattatatcccacttcaactccaaggacgagctcatccaggccaatgtctgcagcggtttcatccccgtgtactgtgggctcatccctccctccctccagggggtggtgagtattcctagccctggacaccttctatggggtgggccgtgggatgagggacagaggaggaggccgcctagagccatccttcaggcccttgctctgccaccgcctgttacccacttccccntgtgttactcaaaaacagctgtggcaacgcacgnttcctggncccccattcccttcctccgtccctgccttcccccgtctaccatctgctcagtgcccaggctggcccacagccagtgcccagtgggtaaaacgctcaaatgaggtagccactgaatggggcccttggtggccgggtggggtggctggggtgggtggccagtgcagccacaggccctcacatacggtcctgtctgtgtgtcccgtggaagcgctacgtggatggtggcatttcagacaacctgccactctatgagcttaagaacaccatcacagtgtcccccttctcgggcgagagtgacatctgtccgcaggacagctccaccaacatccacgagctgcgggtcaccaacaccagcatccagttcaacctgcgcaacctctaccgcctctccaaggccctcttcccgccggagcccctggtgctgcgagagatgtgcaagcagggataccgggatggcctgcgctttctgcagcggaacggtgcgcggacccgggcgggagagggcggggtgggctcggctctgctaccccctgcgggccgcggccgcnagctt

SEQ ID NO: 712712 - DNA, 1112 bp, Homo sapiens
attacctcagaaatttttttcttcgcaggatttttctgagccgttttaccacatccagacctagcccctaccaccccaattaggagggcactggccccccaacaggcatcacacccgctaaatcccctagaagtcccactcactaaaacacatccgtattactcgccatcaggagtatcaactcacctgagcatcaccaatagatctaatagaaaacagccgaacaccacaaatacatctcaagcactgcctctatctacacatctctcacatgggatctctagttattaccctcctacaagcctcagagatacttcgagtctcccattcaccattatccgcacgcgcatctacgagatcaacattaaaccagtagaacaacaggccttcccacggactatcacgtccattactcggctcaaactttcctcactcatcctgcttcattccgccacactcactatctcacacctttaccatccaaaacacactcacataagggactccggaaacgccgaccgaccctgaactaacaggacatacacagtcaaaacggtcggctaagcaacaaataacccagaaatgacaatccccaaataccacgcaagacggggccgcaaccaccacagcaagcaaaaacaacacaaaaagaacaaatcacgcaaaagaaagccaaaagggacgaacgacatcgcgtacgagcgggggcggcgggccgccgcggggccgagggcagaatgatcccaccagaaccaaccacacccgtgcagagccactgctacggacaccgtaaacgcccgacctgccccaaggcacaagggagatagaaccaatgagatggacgacagaagagaaacacgggacggaaccggagacaaggaaggagacggcagcaaataaaaagccagacgaaaagacagacacttgaggggagcaacaaagaggcacacaagcacaggacgacaacacgaagcacgagggcggcgcaaaagcgaaagcagaccacacgagtggggatgtataagaacaaggacggggaacacaccaggagccagcgagaggaaagaagcccacgaacggggcggggcacgcagaagagaaggaaacgcaac

SEQ ID NO: 712713 - DNA, 157 bp, Homo sapiens
ctgatagactgctgtgcacgctgatgcgagttgctgacgctgccctgtgctcatgaagctgctccatcacggcaccgctggccgcccacatctcctttgtgaacaaggccgttgtcgactacttcttcgtggagctgctcctggaggcgcactatga

SEQ ID NO: 712714 - DNA, 375 bp, Homo sapiens
actttgggaggctgaggcgggcagaaaaactgaggtcaggagttctagaccagcctggccaacaggtgaaaccccgtctctactaaaaatataaaaaaattagccaggcatggtggtgggcacctgtaatcccagctactcgggaggctgaggcaggagaattgcttgaacccaggagatggaggttgcagtgagccggcacggtgccattgcactccaggcctgggcgacagagtgagactccatctcaaaaacaaaaaaaacacaaaattgctgcgtcacaggcacgagccactatgcctggctctcctctcgccttatcttatttttctctatctcgagacagggtgtttctctctcccccagcctggagtc

SEQ ID NO: 712715 - DNA, 1522 bp, Homo sapiens
  misc_feature (799)..(799): n is a, c, g, or t
  misc_feature (1186)..(1186): n is a, c, g, or t
ggcggccccagtcagacgcaggcagccccaaagcctgaacaggcagggccagacccagcttcttcgcctccgccagcggggaccccgagctagagccgcagcgggacctgcccggcccccggctccagcgagcgagcggcgagcaggcggctcacagaggcctggccgcccacggaacccggggcccggcggccgccgccgcgatgtttccccgcgagaagacgtggaacatctcgttcgcgggctgcggcttcctcggcgtctactacgtcggcgtggcctcctgcctccgcgagcacgcgcccttcctggtggccaacgccacgcacatctacggcgcctcggccggggcgctcacggccacggcgctggtcaccggggtctgcctgggtgagcggggccgggggcggcaggcggggggctggcgggaaggccgtgcggggccgggggatggtctccgtgagcggaggggccccgcggcgagtcggtgggtaccgtggggagggttccggtccgcgcctggggaacccggcgaggatccaatccgggtcgctggcctgggggcggggcctggtttgttttgctccgagggtgcccggggcccgcctgtcgggcgcaaaggtttgggggcgggcaggtgcagcaaaagctgcttaattggacagaaaaagtaactcgtgggcgggaccgtgagaatccgaggagggacctaagtcaccccgtggccctggatattacaaccggtgccagcggtcggtcacagtgtcctgggcttcgcagttgcaggctgctatcaggnggcctggcatggggtagcctcttgagaggcgtctgggaaccgtgacctggtccttcccaagggcccggaggaggagccccgctgaggtcagggctgggcgcgaaggggctctcctgccctctccttgcacacggtgccctgtggcctggctccccgctgcggcccaccgcgtttgcacacttcatgggtgagggtgcttctgggctctggtgcctgggtcaggagtggatgggtctctgtgtgctgggctggcctcggctcgcaccatcggctgccatgagggagtgatgtttacagcacacgacttcaggagcctgtgaggacacccaagatgacaggggcactctgctcagcaggagcctgtccggggctcacccctgccctctncctctgaactttgtcctgggagggagggggctggaccacagaagtgaacctcaacaggaacgacaataactagagctataattgagaaaagcacccatacgaaacacgataaaaacatcaatggaagaccaacagaaaagacgacagcaaaaggacagcaggaaacaagaacaataaaggacccaagaaaacacgagacgcaagagacaacatagtacaccacaggcgcaaagaaaaaggagacgaataaatacaaccgacaaagcagcaaaagatggaacaaaaaaacacgcagacaaagaaacaaaaggaaacaagaaaaaaaataaacaaagc

SEQ ID NO: 712716 - DNA, 1648 bp, Homo sapiens
  misc_feature (799)..(799): n is a, c, g, or t
  misc_feature (1186)..(1186): n is a, c, g, or t
ggcggccccagtcagacgcaggcagccccaaagcctgaacaggcagggccagacccagcttcttcgcctccgccagcggggaccccgagctagagccgcagcgggacctgcccggcccccggctccagcgagcgagcggcgagcaggcggctcacagaggcctggccgcccacggaacccggggcccggcggccgccgccgcgatgtttccccgcgagaagacgtggaacatctcgttcgcgggctgcggcttcctcggcgtctactacgtcggcgtggcctcctgcctccgcgagcacgcgcccttcctggtggccaacgccacgcacatctacggcgcctcggccggggcgctcacggccacggcgctggtcaccggggtctgcctgggtgagcggggccgggggcggcaggcggggggctggcgggaaggccgtgcggggccgggggatggtctccgtgagcggaggggccccgcggcgagtcggtgggtaccgtggggagggttccggtccgcgcctggggaacccggcgaggatccaatccgggtcgctggcctgggggcggggcctggtttgttttgctccgagggtgcccggggcccgcctgtcgggcgcaaaggtttgggggcgggcaggtgcagcaaaagctgcttaattggacagaaaaagtaactcgtgggcgggaccgtgagaatccgaggagggacctaagtcaccccgtggccctggatattacaaccggtgccagcggtcggtcacagtgtcctgggcttcgcagttgcaggctgctatcaggnggcctggcatggggtagcctcttgagaggcgtctgggaaccgtgacctggtccttcccaagggcccggaggaggagccccgctgaggtcagggctgggcgcgaaggggctctcctgccctctccttgcacacggtgccctgtggcctggctccccgctgcggcccaccgcgtttgcacacttcatgggtgagggtgcttctgggctctggtgcctgggtcaggagtggatgggtctctgtgtgctgggctggcctcggctcgcaccatcggctgccatgagggagtgatgtttacagcacacgacttcaggagcctgtgaggacacccaagatgacaggggcactctgctcagcaggagcctgtccggggctcacccctgccctctncctctcatggaggccttcagacaagcgcctcagtcggccccctggcttcaagatacatcaaggtccctgctacccgagccaaggacacctctcccacagtgcttccccaccctgctcccaacaagactccttctcacgggtggtcttgcacagctggagcccatagtgcagcaggtgctggctgaagagcccctggctccacactgccccactcctgaccagggtggggaagcactgtgggagaggtgtccttggctcgggtagcagggaccttgatgtatcttgaagccagggggccgactgaggcgcttgtctgaaggcctccatgagagggagagggcaggggtgagccccggacaggctcctgctgagcagagtgcgcctgtcatcttgggtgtcctcacaggctcctgaagtcgtgtgctgtaacatcactccctcatgcagcctattgtctacccc

SEQ ID NO: 712717 - DNA, 176 bp, Homo sapiens
ggtagaccagtgtcatgtatactccatgattttttttctcctccttcttcccttgactgttgggatacagaaatatttcacacaaatgatttctaatacgattgagtaggaaggaaatcagcttactttaaaagtctagaagcattcttaagtctgcttttcccagaatacaaaca

SEQ ID NO: 712718 - DNA, 812 bp, Homo sapiens
  misc_feature (330)..(330): n is a, c, g, or t
  misc_feature (499)..(499): n is a, c, g, or t
tcagagttgaaaaattttattaaacaaacaggtttcaacgaaaaagcaaatgaatacccctagaaaacttggacagcatttcccccagccagacaggcaggggaagggaggccaggaggggtaagccaaggggtgttccctaggaaagggccaggtttcccttctatccagcgtgggggccccgagaagcggcctcatttcagggaagctccaggagtggcagctgaaggcagcaggttttagcagccaaagcccaggcctaggtggatagacagggttccaaaagtggtgaccctttcatagggcgtggtatatctcaccagtgggggncgttcatgtgggctgacggatttcgtggcaaatattcggaacattcaacacagcggcagaaatgtggacagcattggaagctacctcatatcatttgtgcttcggtgatccatccgagctccgaaattttggcaacagctgattgcaagcgacgcagtataagaacagncgacccaagcacaccatttacagactaaagcttgaggccgacctatgctgaagaatcatgcccagaaggttcatgtagtccggcagtcgggtacgtccaaggccgcgttaatattcgctcgagaggggggattgtacctcagacactttgttacggcctccggtgggtccgacatatggtctagtggacataagcgagtcgaaaggcaacatcgttttttaaaccctgcggggcaatccctggaagaaccgcgtgatgccagggacaaacgcggcacgggaagcaacacctccttaaaattccactgtgctac

SEQ ID NO: 712719 - DNA, 381 bp, Homo sapiens
  misc_feature (12)..(12): n is a, c, g, or t
  misc_feature (27)..(27): n is a, c, g, or t
  misc_feature (63)..(63): n is a, c, g, or t
  misc_feature (223)..(224): n is a, c, g, or t
  misc_feature (296)..(296): n is a, c, g, or t
acttggcccctnccctaaagatggaanagttttggcaacccctgccttgtctccaggagcaancacttgcccaacagaaattctctgatgatatggctggttgtggtggctcacgcttgtaatcctagcacatcgggatgccgaggcaggtggatcccttgagctcaggagttcgagaccagcctgggcaacatggcgaaaccctgtctctacaaaaaatatnnaaaattagccaggtgtggtggcatctcaggaggccaagtcccagctacttgggaggctgaggtgggaggatnacttgagcccaggaggttgatgctgcaatgagctgtgattgcaccactgtactccagcctgggcaacagagcaaggtcctgcttc

SEQ ID NO: 712720 - DNA, 463 bp, Homo sapiens
ggccggagaggggggtgggggagcaaaaaccaaccccttttcccctgggttcctgttttggggcccgcaccaggaagggcccccttttttttttccccagcctttttattttcgcctttccaggaaatgggcccccccccctccatttggcattggtcccccccctggcctggtccatttgaggtttccagaggggccccaaatggtcctttctttttttggtttttttttcccccccccccagcctcatttttcctccgggagcctttcccccctaacctttggatcccccagcctcatgttctgccccctccctatcctgcctggtccctgggtttcccccagatccccttttttcaaacagggcccgggcgggggggggccgggggtggggcccagccccccaactgccccccccccccccctttttggtttattttataaaaaaatgggggggcttcca

SEQ ID NO: 712721 - DNA, 236 bp, Homo sapiens
cggcttcagcctcccgagtagctgggactacgggtacatgctaccatgcttggctaatgttcttgatttttttttttaaagagttaaagtctcattacatggccgggggtggtctagatctcctgagctcaagcgatctgcccacctgggcccccaaaaggcggggattataggtgtgagccacggcgcatggctgccagcttttggtgctctccctctccagggggtacggagct

SEQ ID NO: 712722 - DNA, 306 bp, Homo sapiens
ggaagaaggaagcttctccccttcctaagctgaagccaaagcgaaggctttaaaggccaagaaggcagttttgaaaggtgtccacagccacaaaaagaggaggatccgcacgtcacccaccttccggcggccgaggacaattcgattccggagacagcccaaatatcctcggaagagcgcttccacggcgaaccacgcttgaccattatgttatcatcaaggttcccgtgaccactgagcttcatgaggagtagagacacacacactgttttcatttggatgtaagccacagcccatttaacaggt

SEQ ID NO: 712723 - DNA, 165 bp, Homo sapiens
ctgtgactgcaaagtttttatggagatgtcagaaagggaggaggagctgtgctggggctggtctgggttggctttttcctaccggatcctcgggcatggaagcgaatccaggttggatctgcagcaaacctgtaacctgacggtttcccacacagacaggacatg

SEQ ID NO: 712724 - DNA, 404 bp, Homo sapiens
cggcttattggttcaaaaatttggtcatttccaaatcttgttcgcaaattttcgcaaagtattccgtcttagtattttccgtttgcgtttccgtctgcgcaactgttgaaaagggctatcggtctgggcttctttgctttaaggttttgtgccttaaggtgtttttgtttcaagtctatttagttggttaacgcctggtttttgccaatctggtatttgtaaaccttcggccatttactttgtaatgagtctctttataggctgatttgggttccgggatcccccttgattttttttttttttttttttttttttttttttttttttttttgcggcaataaattcagtagctttatttttatatttcaattaggttccttgtatgctcaagaaacaagtgtgac

SEQ ID NO: 712725 - DNA, 866 bp, Homo sapiens
aacatggcacgatagggcgggtgggaattggacgaggtctgtgctgcagtggtgcctcccgtcagcatgctctcggcctcgcccggctgcagcgctgtctccgcggcagttcagcacctcggccagaacaatgctaaagttagctgtgctaggggcctctggaggcatcgggcagccatttcacttctcctgaagaacagcccttggtgagccgctgagcctctatgatatcgcagcacgacacccggagtggcgcagatctgagaccacagtcgagaccaaagctcgctgtgaaaggctacctcggacctgaacagcctgcctgactgcctgaaaggttgtgatgtggtagttattccggcgtggagtccccagaaatgccaggcatgacccgggactgacctgttcaacacgcaatgccacgattgtggccaccctgaccgttgcactgtgtcccagggactggccgggaagaccatgatctgcgtcattgcctaggtccaggttaattccatcgcgatcccctatcgacagcagaagttgttcaagaagcatggagtgtaacaaccctggacaaagatcttcggcgtgacgacgcctggacgatcgtcagagccaacactttgttgcagagactgaagggttaggatccaagctcgagatccaagagtcacctgtcattggtggccatgctgggaagaaccatcatgccccctgatctcatcaggtgtagccccaatgtggactttccccaggaacaagtgacagcactcactgggcgggatccaggagggcgccatggagtggtccaggctaaagccggagcaggctctgcacactctccatgggggtaatgccggcgccgc

SEQ ID NO: 712726 - DNA, 840 bp, Homo sapiens
  misc_feature (840)..(840): n is a, c, g, or t
gggcgcggtggctcacgcttgtaatcccagcactttgggaggccgaggcgggcggatcacgaggtcatgagatcgaggaccatcctggctaacagcggtggaaaccccgtctctactataaaaaaatacataatacactagattagccggtcgtgatggcgggcgcctgatagttcccagcttactcatgggaggctgcatgtgcagagtaggatatggccgtgtaaccctgggagcggtcgagtaaggggtgcggttgagccgatgatcgcgctaattgcatctccagttctggtgcagacacggagtgagattccgtctcataatgaagtggacctggtaggccaagagattgctttatacccttttccttggtctctgacccagtcctagttgacaccatttctcgtatcaactccaagatttcagcgtggagattaattccataaccatcacagaatttataacgtataaggtatatttggacttgcttataggtcaatgagtatactgtaaaaataagcctcagggtattattatccttctaaagccggctacaacttcaagtgcacctatcttataccccacttactggttcgtcttagttggggaacacaagcgtagggcctggtgttcacctgcctggaggtgagcctcaggggcctcaatctggggtgcccaaaataaacttattcgctgaaatttcccctggcatttgttctggcccccttccgttctttgggttccccactgggcccaagttctcgagaggccctggtttttgtatttcttggcactcgtcctttcctcgggtctcccttgtgatcggcggggtggccn

SEQ ID NO: 712727 - DNA, 324 bp, Homo sapiens
gggaatttaaaaatagcaggaggaaagcagtgaatcacaatataagggaagccccatcagactaacagcagaaatcttataggccaggagagaatgcgactgatatacttcaacaatactggacagaatgaaactactggaccaagaatactacacctcgacacagctgtctttttagacatgaaggataaatacattctttcccagatcagaaaaaaatcaagggaatttatcaacactagatagccctacaagaaatgcttcagggagttctaaatctgaaagtgaaacgcggcaatatgtaccgccatggagtaaatggca

SEQ ID NO: 712728 - DNA, 324 bp, Homo sapiens
  misc_feature (203)..(203): n is a, c, g, or t
aaacagtattgcccttataaggaagccccagccaggtgtggtggctcacgcctataatcccagcactttgggaggctgaggcaggtggatcatgaggtcaggagttcgagaccagcctggccaataaggcaaaacaccatcttgactaaaaatacaaaaattagctgggcgtggtggcatgtgcctgtagtcccagctacttnggaggctaaggcaggagaattgcttgaacccaacaggcagaggttatagtgagccaagatcacacttcagcctgggcaataagagcaaaactatcttttaaaaaaaaaaaaggcagtgcca

SEQ ID NO: 712729 - DNA, 236 bp, Homo sapiens
  misc_feature (22)..(22): n is a, c, g, or t
  misc_feature (27)..(27): n is a, c, g, or t
  misc_feature (35)..(35): n is a, c, g, or t
aaaagtggagtgtttgtgtgcntgggngtgctttntctgtgaccagtgaagttggttgtgcgtttgtcaggctcggtgtccctgcagtgagatccaatttcgggtactcatataccgtagtagtccggtcttgaatcctggccgctggtgctcccgcctgcatctcggccctttgggggctgggtgggatccttggcctgggtcgctgcctgccccctggtgggcccccgtctcta

SEQ ID NO: 712730 - DNA, 172 bp, Homo sapiens
catccctttgtgaatgatcggactgctggtaatgacgctggaatcatgctgctgaatcataatatgactgctcatcatctgagccttgatgttgatcatagcctgactgctggtcatatgaatcttgtagaccatagactggctggtcataggcaggtgctcttccaacttg

SEQ ID NO: 712731 - DNA, 241 bp, Homo sapiens
ctctgagagcggtacaagagttctgtgcctgtgtgtccgagccctggaagccagccagtgcatttatttaaagctcttagaagcaactccttgggccaggaatgtgtgacccctgagatgggtccacgcatctcttctacacttccttctctccgtgggatactggcctcgtgttacaacgcgcattctctactcacgcatatacatgagctatagtcgcactttctgaatcacggtacgt

SEQ ID NO: 712732 - DNA, 812 bp, Homo sapiens
  misc_feature (41)..(41): n is a, c, g, or t
  misc_feature (58)..(58): n is a, c, g, or t
  misc_feature (63)..(63): n is a, c, g, or t
  misc_feature (67)..(67): n is a, c, g, or t
  misc_feature (70)..(70): n is a, c, g, or t
  misc_feature (84)..(84): n is a, c, g, or t
  misc_feature (87)..(87): n is a, c, g, or t
  misc_feature (144)..(144): n is a, c, g, or t
  misc_feature (162)..(162): n is a, c, g, or t
  misc_feature (183)..(183): n is a, c, g, or t
  misc_feature (204)..(204): n is a, c, g, or t
  misc_feature (264)..(264): n is a, c, g, or t
  misc_feature (272)..(272): n is a, c, g, or t
  misc_feature (303)..(303): n is a, c, g, or t
  misc_feature (312)..(312): n is a, c, g, or t
  misc_feature (324)..(324): n is a, c, g, or t
  misc_feature (358)..(358): n is a, c, g, or t
  misc_feature (370)..(370): n is a, c, g, or t
  misc_feature (394)..(394): n is a, c, g, or t
  misc_feature (407)..(407): n is a, c, g, or t
  misc_feature (415)..(415): n is a, c, g, or t
  misc_feature (422)..(422): n is a, c, g, or t
  misc_feature (429)..(429): n is a, c, g, or t
  misc_feature (522)..(522): n is a, c, g, or t
  misc_feature (558)..(558): n is a, c, g, or t
  misc_feature (590)..(590): n is a, c, g, or t
  misc_feature (606)..(606): n is a, c, g, or t
  misc_feature (646)..(646): n is a, c, g, or t
  misc_feature (658)..(658): n is a, c, g, or t
  misc_feature (675)..(675): n is a, c, g, or t
  misc_feature (703)..(703): n is a, c, g, or t
  misc_feature (708)..(708): n is a, c, g, or t
  misc_feature (724)..(724): n is a, c, g, or t
  misc_feature (732)..(732): n is a, c, g, or t
  misc_feature (749)..(749): n is a, c, g, or t
  misc_feature (772)..(772): n is a, c, g, or t
taattgctctatgcatttattattagctattattaatgcanaatgagggaacaaaaanctcanaaanacnctacacaatttcanaanacgcattgcaggggaaaaagtgactgagaaggatcaacagtttgctaaggtcttggnggacgcattcctgggggngggggacctctaatgcctggnggagggggtctcattcccggnggcggcatgccttttggcgtccctcgagcagggggaagcccaattggtgggcccatgggnggtctcanaccagggggaggagccaaaatgcctggaggnggggttgcnctgccgacgggngggggcggagtgccccgtcctggtgggtactgtnttggggctccancaatactggcagttgcagcaacancagccgctgctanagtgcctnttccctntggagtnattacctgctgggatggtcccccaactcctcggacagggcctgccaatccagcaggggcctggggaattggcacaccaactggtactcctctnccagctgccctaccaaccccagggcctccagcagcnccagcaagtggtacccgagcaatgccagtttntttgggggggggcccnccacagttatggataccaagttctccccacgcagcaacancagaaccaaaanccgctttttttcacgcnctggttgcttcgcattctttggcttganctttntgaactcatcacaatnacagaggntcaaattcatatgcttntaaaaagccttaaaggggcaatnaagattcggccattttgcaggataaatctcattctatagt

SEQ ID NO: 712733 - DNA, 635 bp, Homo sapiens
  misc_feature (2)..(2): n is a, c, g, or t
  misc_feature (11)..(11): n is a, c, g, or t
  misc_feature (34)..(34): n is a, c, g, or t
  misc_feature (46)..(46): n is a, c, g, or t
  misc_feature (60)..(60): n is a, c, g, or t
  misc_feature (85)..(85): n is a, c, g, or t
  misc_feature (141)..(141): n is a, c, g, or t
  misc_feature (237)..(238): n is a, c, g, or t
gncccaaggcnactgaggttcacacagatttctngctggccaatgngaatggtagagatngaaagtggaagagatgagatgaggnttccatgggtggctgtgtctgtacccttagcaagccacagctgctgtgggctgccntctcccgtggctgcagctactgtctccgtggtccggaacaccactccctccccttcaggccccagggtggtgacagctcctgctgtggccagcccnngtgcatagcacctcccttgttagttttccttataaagaatctctttgtacagtctcttcagtttggagagtaacatctctttccttcagggaccctgaccgggcccccgcctcgctggctcagcactgccaatgggacttgccatggggagtcactgtcatcttgtgtcatgttttgattaaaggagagggtcttccagtggaggagaggtcccagaatggagaccatgggacagtgaagctcttgaaactgaatgcccaacggtggattgtacgagctctttttttagagagaagatcatagctgtcattctatttgtgaaaactgtcccccaaaactgagccaaaaataaacattctaaacagtctcatgctaaataaagcaccagagaagccaa

SEQ ID NO: 712734 - DNA, 560 bp, Homo sapiens
ctagaggatcccgccggagggggtggggattgtgatgagaagtggttcttcaaattgtttttatggccttgcaaactcagaacttaaccatgataatgacatggtctgggaggggtgtctaagtttggctcaccatgagcagggaagggtggctgtgtaggagcaagtcctaattatagtgtaacagaaactcttctcaagatcagcagaggaaaacttaaacccatcaggggtgggggtatgcaaaggggaaattcctggtaggccttgtgaatttctgaaaggaaaaattgatttagtttacgtatctcacctttctcaggagaggccaggtgggctgaaaagggttggtctttgaccttcttatgatggtgggtccatctaaataaattggacagctcttcatgaagccatgaactctcgggtggggaatgatttcgtaagcagtcatttactccatatgccaccagcagcagccacatcagggctacaatcacgaccagcatggctaacatcaccatctccagaatcgccaccaccatctcctccacccaatatca

SEQ ID NO: 712735 - DNA, 140 bp, Homo sapiens
  misc_feature (83)..(83): n is a, c, g, or t
ggtcgtgcagctggaaagcaagaggaagaccatgcaggctcatcttctgaccaaggaggtcacccaggtggagagggaccccngcctggacagacaggcgggccagctcaggatccagatccagcaggtccgcggggagg

SEQ ID NO: 712736 - DNA, 188 bp, Homo sapiens
attgctcagatgagcgacgccaccacttatggcaaatggggtgctagctacccttaatcttccagcagcaattgacgatgtgtctggagacactgtacctcagtctatattgactacatccagatctgtgctagcacagggcggcctccagcactgtagcatccgctgcatcaaagcaatgcctgaat

SEQ ID NO: 712737 - DNA, 403 bp, Homo sapiens
tgaacattcgtgtccacggcaaagcaatgcaggtagcaggaactcaggaacgtgtattgattgagattttgtgcatcgatagaacacagtcacggaaatccgagaaattgtcatatgttatcagtcagaatttggacgagaccttgaacaggacattaggtcagatacatcaggacattttgaacgtttactcgtgtccatgtgccagggaaatcgtgatgagaaccagagtataaaccaccaaatggctcaggaagatgctcagcgtctctatcaagctggtgaggggagactagggaccgatgaatcttgctttaacatgatccttgccacaagaagctttcctcagctgagagctaccatggaggcttattctaggatggctaatcgagacttgttaagc

SEQ ID NO: 712738 - DNA, 117 bp, Homo sapiens
gagggaggatattgaggcaagttaacagctgcaatgtgaccattataaataaaatagtgattgtaagtgttgatccagtataggagagagaggagatggtgatctggaggagaaggt

SEQ ID NO: 712739 - DNA, 236 bp, Homo sapiens
gggctactgtaatcccgacactttgggaagcttagatgggagaatccctaggggccaggagttcaataccagcctgggcaacatagggagaccctgtctctacaaaaaaaatttttaacaattagcccggtgtggtggtgtgagcctgcagtcccagctacttagaggcagatgtgggaggatcacttgagcccagtttgaggctagtccaggcaacatggcaagatcctatctct

SEQ ID NO: 712740 - DNA, 749 bp, Homo sapiens
  misc_feature (45)..(48): n is a, c, g, or t
  misc_feature (91)..(91): n is a, c, g, or t
  misc_feature (95)..(95): n is a, c, g, or t
  misc_feature (97)..(97): n is a, c, g, or t
  misc_feature (100)..(101): n is a, c, g, or t
  misc_feature (161)..(161): n is a, c, g, or t
  misc_feature (217)..(217): n is a, c, g, or t
actgtggctgtgggttttctcctatttctaaaaatgttctcttcnnnnctatgacagtttgaagtatggataaccaagagctcaggtcacncagncntgnnccccatcttgcttgcagttagctttgagatactaagcaagcgagggacttcactcttgancctgttttttcctcatctgtaaagtggggatagtggtacggcctacctcatagggntgtaatgagcactaaatgtgaagtgcttggcacagtgcctggcacatggtgagccacagctactgtgagtttctgtttatcccccttttttttttttataagcccatggtttattcttggagaattggtggtaacttcttcaggataacaccggagtccacaggctggagcagctggtgggcccagacagaactggcggtcccggctgggctggtccagcagggggggcgcttggcctcggtgagggcacagcagcaaggttcacgggatatccggggtgtctggtctgggggccaccaggcacaggttgggcttccgggtcagtgtcccgacacggggcgggaggggacaacggagcaaagcagcgcagggggtcagggaggggggacgacacgtgttggaaatcacattaccccaccctcagttgaagccccacgttccacaaacgtggggtcatagatggtccagtcaatggtccctccctggtgcagcacagcaccagaggaaggggtaactgaatctttaccacttg

SEQ ID NO: 712741 - DNA, 323 bp, Homo sapiens
cccccccccccccccccccccaaacaaacagggaagtttttttttgtggggggggggccgggcccccccctttttccttgggggcagggggggcctttttccgggcccgggggggaccccaaaattttttttttttttccccccccccctttaaggaaaggaagggttgggggagggccaacttttttgggccccgggtccggccccggccctttccccccctttttgggtgggcccaaacttgggggggggggggggggggggggggggggtttccccttttttccctttttttttaaaaaaaaggaaagccctttttggga

SEQ ID NO: 712742 - DNA, 1707 bp, Homo sapiens
  misc_feature (1707)..(1707): n is a, c, g, or t
gctctcccgagctgcagactcatgcaggacatcctcggggaccctggggacaactggccgacgtgggccggcatgagccctgaggttaaggcccggtcacagtcagggacccatgtgacgggggaaagtgctgccatggtctggactacgaggcgatagactagtacggggccatgcccgaggagtccctatgacgttccagctccacccacggctcgccacagatggcactccggcaacctgagggttacgaccgatctccgaactcgagaccccgaatcacagacacggggcgaaagagagtacgacgacgggaacgccatatacacagacgcagagaccaaacagacacatccaaagtgacaggacgcaaaggtgcacagggcaatacaaacacacacgagaaaaacagatggtaaccatgcaaggcatctaagccaatagcacaccacatatacaaaggagacggaaagaacgatcaagagcaaaaggcccagagtacacctgcatagaacacgaaagggaagaacaacaaggaacacaaaaggacgaccggagaaccggagagaggaaagaccgagccaatacgtgaaacacaagacagatccacgagtgcaacttaccaggaatggacgacacagacacacgaactacgacaacagaacacatggagaacgtgatacggcaacaacaaacggggcacacagaacagcgacacaacggagacatgacaatcgaaacaagtacaccagaggagtacgcacaaccgtgggcagacacacacatatgggcacgataccacgtaaccacgagaggggataaacacacgcgtgggcacgggtacaaccaccataggaaacagaggagaccacactgacaaagcacccgagagacaactaccaaactacggacacacacattagaaaaaaaagacaccaacagggacacagaagaaacacgggagaacacaaacagggaatagataaacccaactggagcgcacaacgagacaccaaataggggacaacgcagcagaaggataaagcgaacggagagacagacacacgagacacacgaacgagaccaaagcgaaaaggagaaaccgcaacgaacagaatgcgcagaagcagacaaccacaggagcaagagaaacacacacaacaaaaaagcagagatcacgacagacaagacacatgacaacacagaagcaaataaagtacaccagacaccacaggtgagattgagccaacacacccacgaaacaggacacaaggtagtaacaatacacgagcacagcacgagaacatgaggcacaacgaaacagccaaggaagcaacaacccacaaaagggaggagaaccaacacaggaacacgaaaaagaggatgcaatacacacgaaacagggacaaagaacacacacacaccgttaagcaacgagagaaaggaacggcagcacacattatcagagacataggagcgaccagaaacgaacaacaagggcgaccacgactatacaccacacgtctaagcacaaccacagtcgtaagaaagaggacacaacaccgaaagcagtgtagacgcaataagacaccgcagaggacaaacccaggtgaagtgagacacacagaaaacaaagaacataagcgaacaacaaaagaagaagagacgaacgagagaactacaaacactagcggggtagccacaagn

SEQ ID NO: 712743 - DNA, 802 bp, Homo sapiens
gcagcgacggttcttcattcctttacgagcacggcgctcttgcgctacgccctggatgagatgcccacgacgccttcctcagggcaccatcaagcatgaaccagtgcacatgatgtggtggatggggagggccgcaacgggccagaagttctccctgtgtattctgacgcctgagaaggagcatttcatccggtgcggagaccaaggagatcgtcagatgtggtggcttggatgatgctcatggtctatccccggtaccatacaagtcagcaatcagaacgaagaagacggaaagtggaggccctctcacacacacatggcagtcctggggacctgtcgctagatgggtggcatgttcaccatgcagtcgggcagacagcagcagcaggcagcagcatccccagtgctgagaaagtccccacacaccaagatccagcactctggtcagtgaagcaagagagaggagccgcgcacgggagcgggaggcgagagggccgcgtcctacgaccttgtgagctggtgctgaggttcctgtcccatccagcaggccctggctcaggagcgtggtgggcggcgtggggcctgtctgacagccactgagcccctgctgccctgctgcggagctttggggaagctgtatgcgggatcttgcccggaggcgggaggagcgccgaaagcgcgtcgggatgtcgattccacgacgggcccgggcttatgattgacctgggcctggtgttggcggcccagggggccttgggagcctcggcttagcccgtggattgacgggctcgggggccctttg

SEQ ID NO: 712744 - DNA, 191 bp, Homo sapiens
  misc_feature (19)..(19): n is a, c, g, or t
ctttggcatgtaattgtgnaaattattaaaatattataattagagctgggtgcagtggcttaatgcctgtaatcccggttatttgggaggttaaagtgggaggatcacttaagcccaggagtttgaggctgcaatgaagctatgattgcaccactgcattccagcctgggctacagagcaagacctcatct

SEQ ID NO: 712745 - DNA, 241 bp, Homo sapiens
ttttcaccagagaaggcgcccttcctatggccagaggtctcccccatggcattgtcctggatggcgaacctaaggatgatggtccagatcatacccagggtcatctttgctgttgccgtccacaatctctatctgccccgagtggagaccatgcatgacgccatttgctgggcaatacaagtccacgcgctttgttcacatgtgttgatttgtgtgcactctcactcttccccctgctccg

SEQ ID NO: 712746 - DNA, 1611 bp, Homo sapiens
  misc_feature (122)..(122): n is a, c, g, or t
cacggatcggcagcgggactgagccgcgcccacgtggaagccgccgcaggcttcgcgcggggccccccgggtgcacgcgggcagggccggggtctcccgacgcacgaccccggagagtgttnaaagggtcggagctgcccggaggcggcggcagggctgagccagcgacgccctccattcactctccgcgcccgttctccggctgtcctcccgttccgctgcccgccctgccaccatgacggaacaggccatctccttcgccaaagacttcttggccggaggcatcgccgccgccatctccaagacggccgtggctccgatcgagcgggtcaagctgctgctgcaggtccagcacgccagcaagcagatcgccgccgacaagcagtacaagggcatcgtggactgcattgtccgcatccccaaggagcagggcgtgctgtccttctggaggggcaaccttgccaacgtcattcgctacttccccactcaagccctcaacttcgccttcaaggataagtacaagcagatcttcctggggggcgtggacaagcacacgcagttctggaggtactttgcgggcaacctggcctccggcggtgcggccggcgcgacctccctctgcttcgtgtacccgctggatttcgccagaacccgcctggcagcggacgtgggaaagtcaggcacagagcgcgagttccgaggcctgggagactgcctggtgaagatcaccaagtccgacggcatccggggcctgtaccagggcttcagtgtctccgtgcagggcatcatcatctaccgggcggcctacttcggcgtgtacgatacggccaagggcatgctccccgaccccaagaacacgcacatcgtggtgagctggatgatcgcgcagaccgtgacggccgtggccggcgtggtgtcctaccccttcgacacggtgcggcggcgcatgatgatgcagtccgggcgcaaaggagctgacatcatgtacacgggcaccgtcgactgttggaggaagatcttcagagatgaggggggcaaggccttcttcaagggtgcgtggtccaacgtcctgcggggcatggggggcgccttcgtgctggtcctgtacgacgagctcaagaaggtgatctaagggccgcggcctcctccacacacacacacacaccaggggaaccaagagaaccacgtagaatcctcaaccgtgcggaccatcaaccttcgagaaattccagttgtctttttcccagccgcatcctgcctgtagatggccggggaaggctctagaaaaggggcgcattgcgatccaaccatcggcagccgattccgtgtcttgatcacggggtgggagggaaccgtggcgtccctgcgtggggcccatgggtgagacactccagtactgagacctagagtccagatgcttgtaggagccaagtcgtgttctaagtatttatttaaaacaaaagaatcacgttttcccatttgtacttcagcgctagcccctgttttgcacagccgagtactggcgagtatgttctatgttgggcctcctgctgcaaaacaataaacagaggacgcagaacgcgccttaatggatcctctagatcacccaca

SEQ ID NO: 712747 - DNA, 1634 bp, Homo sapiens
  misc_feature (122)..(122): n is a, c, g, or t
  misc_feature (1586)..(1586): n is a, c, g, or t
cacggatcggcagcgggactgagccgcgcccacgtggaagccgccgcaggcttcgcgcggggccccccgggtgcacgcgggcagggccggggtctcccgacgcacgaccccggagagtgttnaaagggtcggagctgcccggaggcggcggcagggctgagccagcgacgccctccattcactctccgcgcccgttctccggctgtcctcccgttccgctgcccgccctgccaccatgacggaacaggccatctccttcgccaaagacttcttggccggaggcatcgccgccgccatctccaagacggccgtggctccgatcgagcgggtcaagctgctgctgcaggtccagcacgccagcaagcagatcgccgccgacaagcagtacaagggcatcgtggactgcattgtccgcatccccaaggagcagggcgtgctgtccttctggaggggcaaccttgccaacgtcattcgctacttccccactcaagccctcaacttcgccttcaaggataagtacaagcagatcttcctggggggcgtggacaagcacacgcagttctggaggtactttgcgggcaacctggcctccggcggtgcggccggcgcgacctccctctgcttcgtgtacccgctggatttcgccagaacccgcctggcagcggacgtgggaaagtcaggcacagagcgcgagttccgaggcctgggagactgcctggtgaagatcaccaagtccgacggcatccggggcctgtaccagggcttcagtgtctccgtgcagggcatcatcatctaccgggcggcctacttcggcgtgtacgatacggccaagggcatgctccccgaccccaagaacacgcacatcgtggtgagctggatgatcgcgcagaccgtgacggccgtggccggcgtggtgtcctaccccttcgacacggtgcggcggcgcatgatgatgcagtccgggcgcaaaggagctgacatcatgtacacgggcaccgtcgactgttggaggaagatcttcagagatgaggggggcaaggccttcttcaagggtgcgtggtccaacgtcctgcggggcatggggggcgccttcgtgctggtcctgtacgacgagctcaagaaggtgatctaagggccgcggcctcctccacacacacacacacaccaggggaaccaagagaaccacgtagaatcctcaaccgtgcggaccatcaaccttcgagaaattccagttgtctttttcccagccgcatcctgcctgtagatggccggggaaggctctagaaaaggggcgcattgcgatccaaccatcggcagccgattccgtgtcttgatcacggggtgggagggaaccgtggcgtccctgcgtggggcccatgggtgagacactccagtactgagacctagagtccagatgcttgtaggagccaagtcgtgttctaagtatttatttaaaacaaaagaatcacgttttcccatttgtacttcagcgctagcccctgttttgcacagccgagtactggcgagtatgttctatgttgggcctcctgctgcaaaacaataaacagaggacgcagaggtcaaanaaaaaaaaaactaacaatgcggccgcatttcgagctccttggccttcg

SEQ ID NO: 712748 - DNA, 1652 bp, Homo sapiens
  misc_feature (122)..(122): n is a, c, g, or t
cacggatcggcagcgggactgagccgcgcccacgtggaagccgccgcaggcttcgcgcggggccccccgggtgcacgcgggcagggccggggtctcccgacgcacgaccccggagagtgttnaaagggtcggagctgcccggaggcggcggcagggctgagccagcgacgccctccattcactctccgcgcccgttctccggctgtcctcccgttccgctgcccgccctgccaccatgacggaacaggccatctccttcgccaaagacttcttggccggaggcatcgccgccgccatctccaagacggccgtggctccgatcgagcgggtcaagctgctgctgcaggtccagcacgccagcaagcagatcgccgccgacaagcagtacaagggcatcgtggactgcattgtccgcatccccaaggagcagggcgtgctgtccttctggaggggcaaccttgccaacgtcattcgctacttccccactcaagccctcaacttcgccttcaaggataagtacaagcagatcttcctggggggcgtggacaagcacacgcagttctggaggtactttgcgggcaacctggcctccggcggtgcggccggcgcgacctccctctgcttcgtgtacccgctggatttcgccagaacccgcctggcagcggacgtgggaaagtcaggcacagagcgcgagttccgaggcctgggagactgcctggtgaagatcaccaagtccgacggcatccggggcctgtaccagggcttcagtgtctccgtgcagggcatcatcatctaccgggcggcctacttcggcgtgtacgatacggccaagggcatgctccccgaccccaagaacacgcacatcgtggtgagctggatgatcgcgcagaccgtgacggccgtggccggcgtggtgtcctaccccttcgacacggtgcggcggcgcatgatgatgcagtccgggcgcaaaggagctgacatcatgtacacgggcaccgtcgactgttggaggaagatcttcagagatgaggggggcaaggccttcttcaagggtgcgtggtccaacgtcctgcggggcatggggggcgccttcgtgctggtcctgtacgacgagctcaagaaggtgatctaagggccgcggcctcctccacacacacacacacaccaggggaaccaagagaaccacgtagaatcctcaaccgtgcggaccatcaaccttcgagaaattccagttgtctttttcccagccgcatcctgcctgtagatggccggggaaggctctagaaaaggggcgcattgcgatccaaccatcggcagccgattccgtgtcttgatcacggggtgggagggaaccgtggcgtccctgcgtggggcccatgggtgagacactccagtactgagacctagagtccagatgcttgtaggagccaagtcgtgttctaagtatttatttaaaacaaaagaatcacgttttcccatttgtacttcagcgctagcccctgttttgcacagccgagtactggcgagtatgttctatgttgggcctcctgctgcaaaacaataaacagaggacgcagaggtcctactgcctggccagtcgtaggtggatctagcacgctgcgagcatagtgcttagtctgacagtcgcctgc

SEQ ID NO: 712749 - DNA, 105 bp, Homo sapiens
aaatgcattcaggcttctcacgagttgcacacagcttttactatgatgtcagagttgacaggcagctttgtaataagtaggtatgatttctgagtttgagtatga

SEQ ID NO: 712750 - DNA, 1864 bp, Homo sapiens
  misc_feature (122)..(122): n is a, c, g, or t
  misc_feature (1492)..(1492): n is a, c, g, or t
  misc_feature (1522)..(1523): n is a, c, g, or t
  misc_feature (1533)..(1533): n is a, c, g, or t
  misc_feature (1540)..(1540): n is a, c, g, or t
  misc_feature (1554)..(1554): n is a, c, g, or t
  misc_feature (1561)..(1561): n is a, c, g, or t
cacggatcggcagcgggactgagccgcgcccacgtggaagccgccgcaggcttcgcgcggggccccccgggtgcacgcgggcagggccggggtctcccgacgcacgaccccggagagtgttnaaagggtcggagctgcccggaggcggcggcagggctgagccagcgacgccctccattcactctccgcgcccgttctccggctgtcctcccgttccgctgcccgccctgccaccatgacggaacaggccatctccttcgccaaagacttcttggccggaggcatcgccgccgccatctccaagacggccgtggctccgatcgagcgggtcaagctgctgctgcaggtccagcacgccagcaagcagatcgccgccgacaagcagtacaagggcatcgtggactgcattgtccgcatccccaaggagcagggcgtgctgtccttctggaggggcaaccttgccaacgtcattcgctacttccccactcaagccctcaacttcgccttcaaggataagtacaagcagatcttcctggggggcgtggacaagcacacgcagttctggaggtactttgcgggcaacctggcctccggcggtgcggccggcgcgacctccctctgcttcgtgtacccgctggatttcgccagaacccgcctggcagcggacgtgggaaagtcaggcacagagcgcgagttccgaggcctgggagactgcctggtgaagatcaccaagtccgacggcatccggggcctgtaccagggcttcagtgtctccgtgcagggcatcatcatctaccgggcggcctacttcggcgtgtacgatacggccaagggcatgctccccgaccccaagaacacgcacatcgtggtgagctggatgatcgcgcagaccgtgacggccgtggccggcgtggtgtcctaccccttcgacacggtgcggcggcgcatgatgatgcagtccgggcgcaaaggagctgacatcatgtacacgggcaccgtcgactgttggaggaagatcttcagagatgaggggggcaaggccttcttcaagggtgcgtggtccaacgtcctgcggggcatggggggcgccttcgtgctggtcctgtacgacgagctcaagaaggtgatctaagggccgcggcctcctccacacacacacacacaccaggggaaccaagagaaccacgtagaatcctcaaccgtgcggaccatcaaccttcgagaaattccagttgtctttttcccagccgcatcctgcctgtagatggccggggaaggctctagaaaaggggcgcattgcgatccaaccatcggcagccgattccgtgtcttgatcacggggtgggagggaaccgtggcgtccctgcgtggggcccatgggtgagacactccagtactgagacctagagtccagatgcttgtaggagccaagtcgtgttctaagtatttatttaaaacaaaagaatcacgttttcccatttgtactgcaaanaaaaaaaaaaaaaaaaaaaaaaaaaatttnngggccggccngggcccngaaaaaagtttttnaaacccnttcgtttgggggcggggccccattggtgttatagtcgaacccagtgtgcctcacagacgctgggtcccctaagagaagaaccccggtggtcccagagaaacaatgaggcgtcttggggtattctcccccaaatgtataaaaaaacgccccgcgggggtgcgaaccgagacgccgttttgtgaacacaatactcccaggatagtggaagtactgcgagggggccacaaacaggaggacatccaaatcacaacgagggactcccaagcagaaggcgctggattatctcaatatttacgcccccgc

SEQ ID NO: 712751 - DNA, 985 bp, Homo sapiens
  misc_feature (73)..(73): n is a, c, g, or t
  misc_feature (132)..(132): n is a, c, g, or t
  misc_feature (149)..(149): n is a, c, g, or t
  misc_feature (199)..(199): n is a, c, g, or t
  misc_feature (209)..(209): n is a, c, g, or t
  misc_feature (229)..(229): n is a, c, g, or t
  misc_feature (257)..(257): n is a, c, g, or t
  misc_feature (279)..(279): n is a, c, g, or t
  misc_feature (304)..(304): n is a, c, g, or t
  misc_feature (317)..(317): n is a, c, g, or t
  misc_feature (327)..(327): n is a, c, g, or t
  misc_feature (340)..(340): n is a, c, g, or t
  misc_feature (347)..(347): n is a, c, g, or t
  misc_feature (349)..(350): n is a, c, g, or t
  misc_feature (356)..(356): n is a, c, g, or t
  misc_feature (359)..(359): n is a, c, g, or t
  misc_feature (361)..(361): n is a, c, g, or t
  misc_feature (374)..(375): n is a, c, g, or t
  misc_feature (377)..(377): n is a, c, g, or t
  misc_feature (381)..(381): n is a, c, g, or t
  misc_feature (389)..(389): n is a, c, g, or t
  misc_feature (412)..(413): n is a, c, g, or t
  misc_feature (425)..(425): n is a, c, g, or t
  misc_feature (434)..(434): n is a, c, g, or t
  misc_feature (438)..(438): n is a, c, g, or t
  misc_feature (445)..(445): n is a, c, g, or t
  misc_feature (447)..(447): n is a, c, g, or t
  misc_feature (451)..(451): n is a, c, g, or t
  misc_feature (454)..(454): n is a, c, g, or t
  misc_feature (457)..(457): n is a, c, g, or t
  misc_feature (470)..(470): n is a, c, g, or t
  misc_feature (482)..(482): n is a, c, g, or t
  misc_feature (500)..(500): n is a, c, g, or t
  misc_feature (506)..(506): n is a, c, g, or t
agcggatttgtacacataacatgggttatttagtttaactctggcaaaaaaaaaaaaaaaaaaaaatttggtntgtggatgttggtataccgtccagtataaaagtgtcctaagcattttagccaatctttncacagtagagcatactnaagggctgctgggtactggagtatacttaaatataactccaaaatccagngactgggtgntaaaaccagggattagagcntgtaaagggtacatctagatccatattnggaatcttaaactggtattttnctctaagtatggctaatgagtaaanaaaagtctcatanggtagccaantgaaaaagaatgnaaggggnanngtgaanaantnagggggacaaaannangggnatgtgaanacgaagaatcctagttggagggnngactcatattcncgatggatncaangcgtgantnggtnggnaancttgtcccaaatntctaaaatccgnttctctgccaaaagcaangtcttnctgggtgatattggagttttaacagggtcaaatcttcctaattttcggtatcttagagggcacgcactagaagaaatcagcaggtctaatcccaccagttaagaaaactaccatcttcttgatttttaccgatttcaacaacaattctttccagtgaccttccttttagtgtaatctaccaattttaaacactaggctaaatatagggggtttcccctttcacccaagttgattgtcacagtccgatgcaaaatcaattgatcccgaatgatcgggggtaaaaaataacccaacggtgttcttaggggtcactttgggttgccaacacaatttacttggattaccggggtgtctggaccgggcccgattgggtcgctttgaaacgccgaattgagccaaacctgggaatgcctctaaaatccgaactatggactcgggttaaacccgggggacactacagtggctaatctcatgggaaa

SEQ ID NO: 712752 - DNA, 2062 bp, Homo sapiens
  misc_feature (122)..(122): n is a, c, g, or t
cacggatcggcagcgggactgagccgcgcccacgtggaagccgccgcaggcttcgcgcggggccccccgggtgcacgcgggcagggccggggtctcccgacgcacgaccccggagagtgttnaaagggtcggagctgcccggaggcggcggcagggctgagccagcgacgccctccattcactctccgcgcccgttctccggctgtcctcccgttccgctgcccgccctgccaccatgacggaacaggccatctccttcgccaaagacttcttggccggaggcatcgccgccgccatctccaagacggccgtggctccgatcgagcgggtcaagctgctgctgcaggtccagcacgccagcaagcagatcgccgccgacaagcagtacaagggcatcgtggactgcattgtccgcatccccaaggagcagggcgtgctgtccttctggaggggcaaccttgccaacgtcattcgctacttccccactcaagccctcaacttcgccttcaaggataagtacaagcagatcttcctggggggcgtggacaagcacacgcagttctggaggtactttgcgggcaacctggcctccggcggtgcggccggcgcgacctccctctgcttcgtgtacccgctggatttcgccagaacccgcctggcagcggacgtgggaaagtcaggcacagagcgcgagttccgaggcctgggagactgcctggtgaagatcaccaagtccgacggcatccggggcctgtaccagggcttcagtgtctccgtgcagggcatcatcatctaccgggcggcctacttcggcgtgtacgatacggccaagggcatgctccccgaccccaagaacacgcacatcgtggtgagctggatgatcgcgcagaccgtgacggccgtggccggcgtggtgtcctaccccttcgacacggtgcggcggcgcatgatgatgcagtccgggcgcaaaggagctgacatcatgtacacgggcaccgtcgactgttggaggaagatcttcagagatgaggggggcaaggccttcttcaagggtgcgtggtccaacgtcctgcggggcatggggggcgccttcgtgctggtcctgtacgacgagctcaagaaggtgatctaagggccgcggcctcctccacacacacacacacaccaggggaaccaagagaaccacgtagaatcctcaaccgtgcggaccatcaaccttcgagaaattccagttgtctttttcccagccgcatcctgcctgtagatggccggggaaggctctagaaaaggggcgcattgcgatccaaccatcggcagccgattccgtgtcttgatcacggggtgggagggaaccgtggcgtccctgcgtggggcccatgggtgagacactccagtactgagacctagagtccagatgcttgtaggagccaagtcgtgttctaagtatttatttaaaacaaaagaatcacgttttcccatttgtaaaaaaaaaaaaaaaaaaaaaaaaaaaaaaaaaaaaaaaaaaaaaaaaaaaaaaaaaaaaaaaaaaaaaaaaaaaaaaaaaaaaaaaaaaacaacaaccgggtggggcgcgcgcgcgcgcgcgcggcgcccgcagaaagagctttacaaacaccccgcgggtggggcgcgcgcgcggggcgccaaaggagagaaagaagaaagtgtggaaaagagggtgtacccataggagaacaccgggggaaataaaataaggggggggagggtatccccacacaaattaaaaaacgccgggggggagaaacacgagagggtggtcttagggagaaaaacacccagaggagggaggccacgggaggagcacaaaaggaggggcacataacacaggggggagcaccaaaggaggccccaaagacaacaaaaaaaaaggcccgcgggtgcgagggggggggaggaaccgacgcacgcagcgcaacaaagcgcagcacaacccataccacaaaacaccacacaacaaccacacgaacaagaagggcacgaaacacaagcaaaagaccagacaccaagcgcgaaccgtacg

SEQ ID NO: 712753 - DNA, 1579 bp, Homo sapiens
  misc_feature (755)..(755): n is a, c, g, or t
  misc_feature (1099)..(1099): n is a, c, g, or t
  misc_feature (1143)..(1143): n is a, c, g, or t
  misc_feature (1177)..(1177): n is a, c, g, or t
  misc_feature (1302)..(1302): n is a, c, g, or t
tcaccctcctgagtttttactttggctccggggcgtggaacaattgtcttcaagcgggtcgctgttttgttgccctctggcgcctttgttggggcgcacacgtgtaggagcaccagttgtggtccaacaaatcctcgtgcgctggttgccgcgtgcgccgcggaatttcccccggggaatttttgttgtgacaccaccatgcgttctctggcgtctcccggagtgtgcccacccccgtcgttgtcgtgctccccgagattttatcaaagggccttctgtttgctttaaagcttgttaggcgcccctgcgttgttcgtgttcgggcgcccgctgccgaagttcgccgccattcccgttggaggttatttcttaacccggggggcccccttctcacttcttagctcgccccccgaatttggtgaggaatgggtgttttccttgcccgcggaagcagaatttgttaacaccaagagatttctccggcggggagatatttctctcgggtcacccagggtttttgttccccctcggtgagagttgtggtaaaagggggggaataaagaattggggcttcacacatgatagaggcaaccacagcaagagagggttgaacaccacatctgtgatagtgatctcgcgccgcttctcacatatttggtttgcgaaaaatatgccccccccccgcctctggataaagggccccccccccgaacagtggcgcgaaaaagggttgataccccgggataatgcccacnccacagcagaaattcacctcgggtgtgtttcggagatatatttggtcccacatcgagacgcccacctgtcacccccctcgtctcacgggagaaaacacacacggttgttgtcacacacacaaagagaaaggcctctcacctccacggagaagtgacacactctcgcacagggagtgtacacacacgaggaaaaatccacactcccacacaaagggaggaaacacctctcgaggagagagacccacgcagagagccccacgcagacagagagagtgagaaaccccctctcttaatgaacccccgcggggctgctcacgagacccacatatcacaagcaccacatncccttggctataattcttcacacaaacactattccacgcgtgtntctttatattggggtgagaaaccacatgagaatnccacagagatgggcacatgtggttgtcgtctatatttgtgagactacaccgctgagggagatgggtgtgacgccccaacataatatatgagattgttcctttataaggagatgggtttatgaganaatgtgagaaaaatggttataccacacactgttggccacattatattttggagtctatatcaccccgttcacatcactaaactggctctctggcttgtcacatccaccaccacacaccccggagcttatagagcacaaatgggagctgaatgtcactcttgaggctcttcacatttaattttgagctgtgaatttatatttggaggtggaaggccattgtttttaagaaaaacctgtcatgtaggttgtttaaaaattaaaagccatttaaactcca

SEQ ID NO: 712754 - DNA, 1540 bp, Homo sapiens
  misc_feature (122)..(122): n is a, c, g, or t
cacggatcggcagcgggactgagccgcgcccacgtggaagccgccgcaggcttcgcgcggggccccccgggtgcacgcgggcagggccggggtctcccgacgcacgaccccggagagtgttnaaagggtcggagctgcccggaggcggcggcagggctgagccagcgacgccctccattcactctccgcgcccgttctccggctgtcctcccgttccgctgcccgccctgccaccatgacggaacaggccatctccttcgccaaagacttcttggccggaggcatcgccgccgccatctccaagacggccgtggctccgatcgagcgggtcaagctgctgctgcaggtccagcacgccagcaagcagatcgccgccgacaagcagtacaagggcatcgtggactgcattgtccgcatccccaaggagcagggcgtgctgtccttctggaggggcaaccttgccaacgtcattcgctacttccccactcaagccctcaacttcgccttcaaggataagtacaagcagatcttcctggggggcgtggacaagcacacgcagttctggaggtactttgcgggcaacctggcctccggcggtgcggccggcgcgacctccctctgcttcgtgtacccgctggatttcgccagaacccgcctggcagcggacgtgggaaagtcaggcacagagcgcgagttccgaggcctgggagactgcctggtgaagatcaccaagtccgacggcatccggggcctgtaccagggcttcagtgtctccgtgcagggcatcatcatctaccgggcggcctacttcggcgtgtacgatacggccaagggcatgctccccgaccccaagaacacgcacatcgtggtgagctggatgatcgcgcagaccgtgacggccgtggccggcgtggtgtcctaccccttcgacacggtgcggcggcgcatgatgatgcagtccgggcgcaaaggagctgacatcatgtacacgggcaccgtcgactgttggaggaagatcttcagagatgaggggggcaaggccttcttcaagggtgcgtggtccaacgtcctgcggggcatggggggcgccttcgtgctggtcctgtacgacgagctcaagaaggtgatctaagggccgcggcctcctccacacacacacacacaccaggggaaccaagagaaccacgtagaatcctcaaccgtgcggaccatcaaccttcgagaaattccagttgtctttttcccagccgcatcctgcctgtagatggccggggaaggctctagaaaaggggcgcattgcgatccaaccatcggcagccgattccgtgtcttgatcacggggtgggagggaaccgtggcgtccctgcgtggggcccatgggtgagacactccagtactgagacctagagtccagatgcttgtaggagccaagtcgtgttctaagtatttatttaaaacaaaagaatcacgttttcccatttgtattaacacccgcagaagggcactcagtataccttagcacgtgtttttttctttttct

SEQ ID NO: 712755 - DNA, 788 bp, Homo sapiens
gatcccggaagtgatgccgagcgcagatcgcttgcagcttgctagctgtgtgggctgggaggtctggtagggctgagcttgcaagaggatcaacatgcctttgctacgagatttactacatccgtccttggaagaggaaaagaaaaaacataaaaagaaacgcctagtacacaagtccaaaattcttactttatggctgtaaacatgtccaggttgctacaagatcaccacggtatttcagacatgctcagacagtggttcttatgtgtaggttgtcaacagtgttgtgccagctacaggaggaaaggccagactcacagaaggtctatcatttggcattctccacacccagtgatgagatgactgattatacatgtctctatcttcacctgcaaagtgtaccagcacatcttgagtgattaccaaaaataaccttatctttcatggtgtgctttcagtaagaatggcctgtcaaatggatatattgatacctcttgaccttgcagtgaactcccatttgaaccttcattttactagtacgttgagacccacacattggattccactgaggtgtgcgttacttgggacagaaagttaaggtcagcaagtcagaaggccaagacttaactacactggtatattcggacatgagaaatttaataaacaagataagtaactcatagaagaagacagaagtgtgacatggcaccaagggtggattgccgagtagcacttcagacacgggattgtgcacccgcgaaagtaactgacggacccagtaggtaccc

SEQ ID NO: 712756 - DNA, 769 bp, Homo sapiens
  misc_feature (213)..(213): n is a, c, g, or t
  misc_feature (320)..(320): n is a, c, g, or t
  misc_feature (404)..(404): n is a, c, g, or t
agcctgttaagaaaggttttaaacccatagaggccaactgacaaggcatatccgctacaaggaataccatgggaccctaattttcaaggattgttacaagctggacgatttaaagtagtcaaaccagtttaccagcccaagagttgggctacatatccttaggtttaagcgcagtggcatagatcaatgcaatcaattcaatcagtgatcttnttttaagcacgaacaaagcagatgaaaagttatgcgttccacaagaagaatgcgattttcagagcatttatagacgtctagaaaccccatgcatagggacttccttntggaaaggttaagaaatcctgagaaaaaagcctcgtcaaaatgtgtttgtaaactctgacggtacaggaaaatactactggaancagaattaagtgtagaatcagggcagaccagaatatacatgctgattgccgttacatgaaaggtacagcgccaggcgggcaggcagccagccacagaaaagggagaggggctcaggaggaagtggctagacctgtcgctaggcaccaggggaggcggggaaggagggcagaggcagtagagttcactgtgagagctcaacaaggagtagctgctgccaaacatctacattcatttagccgcatttcacagacacaggcttggggaggttaagtaacttgctaacagacataaagttgccaagtagtccagtcaggattcgatgcagctgcagtgccctattaggtgcgagtccgctcagatgggg

SEQ ID NO: 712757 - DNA, 1565 bp, Homo sapiens
  misc_feature (122)..(122): n is a, c, g, or t
cacggatcggcagcgggactgagccgcgcccacgtggaagccgccgcaggcttcgcgcggggccccccgggtgcacgcgggcagggccggggtctcccgacgcacgaccccggagagtgttnaaagggtcggagctgcccggaggcggcggcagggctgagccagcgacgccctccattcactctccgcgcccgttctccggctgtcctcccgttccgctgcccgccctgccaccatgacggaacaggccatctccttcgccaaagacttcttggccggaggcatcgccgccgccatctccaagacggccgtggctccgatcgagcgggtcaagctgctgctgcaggtccagcacgccagcaagcagatcgccgccgacaagcagtacaagggcatcgtggactgcattgtccgcatccccaaggagcagggcgtgctgtccttctggaggggcaaccttgccaacgtcattcgctacttccccactcaagccctcaacttcgccttcaaggataagtacaagcagatcttcctggggggcgtggacaagcacacgcagttctggaggtactttgcgggcaacctggcctccggcggtgcggccggcgcgacctccctctgcttcgtgtacccgctggatttcgccagaacccgcctggcagcggacgtgggaaagtcaggcacagagcgcgagttccgaggcctgggagactgcctggtgaagatcaccaagtccgacggcatccggggcctgtaccagggcttcagtgtctccgtgcagggcatcatcatctaccgggcggcctacttcggcgtgtacgatacggccaagggcatgctccccgaccccaagaacacgcacatcgtggtgagctggatgatcgcgcagaccgtgacggccgtggccggcgtggtgtcctaccccttcgacacggtgcggcggcgcatgatgatgcagtccgggcgcaaaggagctgacatcatgtacacgggcaccgtcgactgttggaggaagatcttcagagatgaggggggcaaggccttcttcaagggtgcgtggtccaacgtcctgcggggcatggggggcgccttcgtgctggtcctgtacgacgagctcaagaaggtgatctaagggccgcggcctcctccacacacacacacacaccaggggaaccaagagaaccacgtagaatcctcaaccgtgcggaccatcaaccttcgagaaattccagttgtctttttcccagccgcatcctgcctgtagatggccggggaaggctctagaaaaggggcgcattgcgatccaaccatcggcagccgattccgtgtcttgatcacggggtgggagggaaccgtggcgtccctgcgtggggcccatgggtgagacactccagtactgagacctagagtccagatgcttgtaggagccaagtcgtgttctaagtatttatttaaaacaaaagaatcacgttttcccatttgtacttcaagagagaataatatggctggagcccaaaaaagagctcttgaacatgaaaatatgtaccataaaatacatgtcggca

SEQ ID NO: 712758 - DNA, 2334 bp, Homo sapiens
  misc_feature (122)..(122): n is a, c, g, or t
  misc_feature (2132)..(2132): n is a, c, g, or t
  misc_feature (2153)..(2153): n is a, c, g, or t
  misc_feature (2156)..(2156): n is a, c, g, or t
  misc_feature (2158)..(2158): n is a, c, g, or t
cacggatcggcagcgggactgagccgcgcccacgtggaagccgccgcaggcttcgcgcggggccccccgggtgcacgcgggcagggccggggtctcccgacgcacgaccccggagagtgttnaaagggtcggagctgcccggaggcggcggcagggctgagccagcgacgccctccattcactctccgcgcccgttctccggctgtcctcccgttccgctgcccgccctgccaccatgacggaacaggccatctccttcgccaaagacttcttggccggaggcatcgccgccgccatctccaagacggccgtggctccgatcgagcgggtcaagctgctgctgcaggtccagcacgccagcaagcagatcgccgccgacaagcagtacaagggcatcgtggactgcattgtccgcatccccaaggagcagggcgtgctgtccttctggaggggcaaccttgccaacgtcattcgctacttccccactcaagccctcaacttcgccttcaaggataagtacaagcagatcttcctggggggcgtggacaagcacacgcagttctggaggtactttgcgggcaacctggcctccggcggtgcggccggcgcgacctccctctgcttcgtgtacccgctggatttcgccagaacccgcctggcagcggacgtgggaaagtcaggcacagagcgcgagttccgaggcctgggagactgcctggtgaagatcaccaagtccgacggcatccggggcctgtaccagggcttcagtgtctccgtgcagggcatcatcatctaccgggcggcctacttcggcgtgtacgatacggccaagggcatgctccccgaccccaagaacacgcacatcgtggtgagctggatgatcgcgcagaccgtgacggccgtggccggcgtggtgtcctaccccttcgacacggtgcggcggcgcatgatgatgcagtccgggcgcaaaggagctgacatcatgtacacgggcaccgtcgactgttgggaggaagatcttcagagatgagggaggccttcttcaagggtgcgtggtccaacgtcctgcggggcatggggggcgccttcgtgctggtcctgtacgacgagctcaagaaggtgatctaagggccgcggcctcctccacacacacacacacaccaggggaaccaagagaaccacgtagaatcctcaaccgtgcggaccatcaaccttcgagaaattccagttgtctttttcccagccgcatcctgcctgtagatggccggggaaggctctagaaaaggggcgcattgcgatccaaccatcggcagccgattccgtgtcttgatcacggggtgggagggaaccgtggcgtccctgcgtggggcccatgggtgagacactccagtactgagacctagagtccagatgcttgtaggagccaagtcgtgttctaagtatttatttaaaacaaaagaatcacgttttcccatttgtacttcagcgctagcccctgttttgcacagccgagtactggcgagtatgttctatgttgggcctcctgctgcaaaacaataaacagaggacgcagaggtcctcctgcctggccacgcacctctccacagggcggcctggggtctggagatgggcgctgggcccacgggacgcagatggggccacgctctgcccgtggctggcccacgttcctggtctgcagtgctgcctcctccccagcacccctggggcacagagggcagggtcacagctgggaagaggcggggggtagaaaccaaggctggcagaagtgtagccgggctccctgataaatgctggaggaccccagggcacctgcacttactgtaccctctctgagagcatttgtatgatctcatgtctcagctctggaggctggaggtcccagaaaaccaaggtatggtagattcagtctctggtgagtacccagttcctggcttctagatggcgccttctccctgtgtgtcctcagatgatggatgaggccagggtgctctctggagtcctttctgtaagggcactgatcccatccatgaggcctcatgactcccaaagacccccactttccaacgccatcacttgggagaggggcgttttcagcgtgaatcttggggaanctgaaacagggtgacacctgngtncntctcactctgtagctcccgaaggccactccagcccccattccaacatgaacagtggaagtggtcggggtccccaaattggcagctgtggttccccggggttcacccgtgagaaatccaccccaagggggtcccccccgcgagggaccaaaagcttccttcaagcttttttttggtc

SEQ ID NO: 712759 - DNA, 167 bp, Homo sapiens
caggagatgcctaatcttttagagtatttatgctggatgacagttattgctctattgcgattgcagtaaatttctgcagcttagatgattcatcacaaaaatgtggctgttaatctcaatgaggtgccattaatttcctacccctgaaggattgttgtgctgggcgc

SEQ ID NO: 712760 - DNA, 1906 bp, Homo sapiens
  misc_feature (122)..(122): n is a, c, g, or t
cacggatcggcagcgggactgagccgcgcccacgtggaagccgccgcaggcttcgcgcggggccccccgggtgcacgcgggcagggccggggtctcccgacgcacgaccccggagagtgttnaaagggtcggagctgcccggaggcggcggcagggctgagccagcgacgccctccattcactctccgcgcccgttctccggctgtcctcccgttccgctgcccgccctgccaccatgacggaacaggccatctccttcgccaaagacttcttggccggaggcatcgccgccgccatctccaagacggccgtggctccgatcgagcgggtcaagctgctgctgcaggtccagcacgccagcaagcagatcgccgccgacaagcagtacaagggcatcgtggactgcattgtccgcatccccaaggagcagggcgtgctgtccttctggaggggcaaccttgccaacgtcattcgctacttccccactcaagccctcaacttcgccttcaaggataagtacaagcagatcttcctggggggcgtggacaagcacacgcagttctggaggtactttgcgggcaacctggcctccggcggtgcggccggcgcgacctccctctgcttcgtgtacccgctggatttcgccagaacccgcctggcagcggacgtgggaaagtcaggcacagagcgcgagttccgaggcctgggagactgcctggtgaagatcaccaagtccgacggcatccggggcctgtaccagggcttcagtgtctccgtgcagggcatcatcatctaccgggcggcctacttcggcgtgtacgatacggccaagggcatgctccccgaccccaagaacacgcacatcgtggtgagctggatgatcgcgcagaccgtgacggccgtggccggcgtggtgtcctaccccttcgacacggtgcggcggcgcatgatgatgcagtccgggcgcaaaggagctgacatcatgtacacgggcaccgtcgactgttggaggaagatcttcagagatgaggggggcaaggccttcttcaagggtgcgtggtccaacgtcctgcggggcatggggggcgccttcgtgctggtcctgtacgacgagctcaagaaggtgatctaagggccgcggcctcctccacacacacacacacaccaggggaaccaagagaaccacgtagaatcctcaaccgtgcggaccatcaaccttcgagaaattccagttgtctttttcccagccgcatcctgcctgtagatggccggggaaggctctagaaaaggggcgcattgcgatccaaccatcggcagccgattccgtgtcttgatcacggggtgggagggaaccgtggcgtccctgcgtggggcccatgggtgagacactccagtactgagacctagagtccagatgcttgtaggagccaagtcgtgttctaagtatttatttaaaacaaaaaaaaaaaaaaaaaaaaaaaaaaaaaaaaaaaaaaaaaaaaaaaaaaaaaaaaaaaaaaaaaaaaaaaaaaaaaaaaaaaaaaaaaaaaaaaaaaaaaaacacaccttagaaagaaataaaaaaaatgggcggccctctagtttaattttatctggtccacttccccttggggggggtcaaataaaattgggtgggcgtttgaaattaaccgcctttgaatgagaaaaccctggcctaactaaaattagttgttttgaaacccatttttttttggccggtttggcttataaaagagggggcccgaccggattttctattcaaaaaggtgggcatccctgaatggggaaagtaaacggtggcattttttttttcgttcggtaatcctttttgcaacaatcagtttatttttcaacgccgatgggcccgaatcgggcctttttcttt

SEQ ID NO: 712761 - DNA, 2767 bp, Homo sapiens
  misc_feature (122)..(122): n is a, c, g, or t
  misc_feature (2565)..(2565): n is a, c, g, or t
  misc_feature (2586)..(2586): n is a, c, g, or t
  misc_feature (2589)..(2589): n is a, c, g, or t
  misc_feature (2591)..(2591): n is a, c, g, or t
cacggatcggcagcgggactgagccgcgcccacgtggaagccgccgcaggcttcgcgcggggccccccgggtgcacgcgggcagggccggggtctcccgacgcacgaccccggagagtgttnaaagggtcggagctgcccggaggcggcggcagggctgagccagcgacgccctccattcactctccgcgcccgttctccggctgtcctcccgttccgctgcccgccctgccaccatgacggaacaggccatctccttcgccaaagacttcttggccggaggcatcgccgccgccatctccaagacggccgtggctccgatcgagcgggtcaagctgctgctgcaggtccagcacgccagcaagcagatcgccgccgacaagcagtacaagggcatcgtggactgcattgtccgcatccccaaggagcagggcgtgctgtccttctggaggggcaaccttgccaacgtcattcgctacttccccactcaagccctcaacttcgccttcaaggataagtacaagcagatcttcctggggggcgtggacaagcacacgcagttctggaggtactttgcgggcaacctggcctccggcggtgcggccggcgcgacctccctctgcttcgtgtacccgctggatttcgccagaacccgcctggcagcggacgtgggaaagtcaggcacagagcgcgagttccgaggcctgggagactgcctggtgaagatcaccaagtccgacggcatccggggcctgtaccagggcttcagtgtctccgtgcagggcatcatcatctaccgggcggcctacttcggcgtgtacgatacggccaagggcatgctccccgaccccaagaacacgcacatcgtggtgagctggatgatcgcgcagaccgtgacggccgtggccggcgtggtgtcctaccccttcgacacggtgcggcggcgcatgatgatgcagtccgggcgcaaaggagctgacatcatgtacacgggcaccgtcgactgttgggaggaagatcttcagagatgagggaggccttcttcaagggtgcgtggtccaacgtcctgcggggcatggggggcgccttcgcctggtcctgtctactagctcaaacaggtttcctccacacacacacacacaccaggggaaccaagagaaccacgtagaatcctcaaccgtgcggaccatcaaccttcgagaaattccagttgtctttttcccagccgcatcctgcctgtagatggccggggaaggctctagaaaaggggcgcattgcgatccaaccatcggcagccgattccgtgtcttgatcacggggtgggagggaaccgtggcgtccctgcgtggggcccatgggtgagacactccagtactgagacctagagtccagatgcttgtaggagccaagtcgtgttctaagtatttatttaaaacaaaagaatcacgttttcccatttacttcagcgctagcccctgttttgcacagccgagtactggcgagtatgttctatgttgggcctcctgctggtcctgtacgacgagctcaagaaggtgatctaagggccgcggcctcctccacacacacacacacaccaggggaaccaagagaaccacgtagaatcctcaaccgtgcggaccatcaaccttcgagaaattccagttgtctttttcccagccgcatcctgcctgtagatggccggggaaggctctagaaaaggggcgcattgcgatccaaccatcggcagccgattccgtgtcttgatcacggggtgggagggaaccgtggcgtccctgcgtggggcccatgggtgagacactccagtactgagacctagagtccagatgcttgtaggagccaagtcgtgttctaagtatttatttaaaacaaaagaatcacgttttcccatttgtacttcagcgctagcccctgttttgcacagccgagtactggcgagtatgttctatgttgggcctcctgctgcaaaacaataaacagaggacgcagaggtcctcctgcctggccacgcacctctccacagggcggcctggggtctggagatgggcgctgggcccacgggacgcagatggggccacgctctgcccgtggctggcccacgttcctggtctgcagtgctgcctcctccccagcacccctggggcacagagggcagggtcacagctgggaagaggcggggggtagaaaccaaggctggcagaagtgtagccgggctccctgataaatgctggaggaccccagggcacctgcacttactgtaccctctctgagagcatttgtatgatctcatgtctcagctctggaggctggaggtcccagaaaaccaaggtatggtagattcagtctctggtgagtacccagttcctggcttctagatggcgccttctccctgtgtgtcctcagatgatggatgaggccagggtgctctctggagtcctttctgtaagggcactgatcccatccatgaggcctcatgactcccaaagacccccactttccaacgccatcacttgggagaggggcgttttcagcgtgaatcttggggaanctgaaacagggtgacacctgngtncntctcactctgtagctcccgaaggccactccagcccccattccaacatgaacagtggaagtggtcggggtccccaaattggcagctgtggttccccggggttcacccgtgagaaatccaccccaagggggtcccccccgcgagggaccaaaagcttccttcaagcttttttttggtc

SEQ ID NO: 712762 - DNA, 163 bp, Homo sapiens
acacggcagtgaatcgagctcggtaccatctcgtgacttggcgattatttgctatgcatgaagatggatagtaatatgggtcaaggcacgcctccatagatttgttcacgggactggtatcgcgagcaaattgtgtcacgcgatataggaacatatcatttcg

SEQ ID NO: 712763 - DNA, 716 bp, Homo sapiens
  misc_feature (229)..(229): n is a, c, g, or t
  misc_feature (243)..(243): n is a, c, g, or t
  misc_feature (246)..(246): n is a, c, g, or t
ttacctgtgtagatagtattaattagatggttgcagctattaattcatcataaagataaaatgaagaaactctccctttttttaaacaaaaaaaattatttctagataataggctagtagttatttctgcagaaacaacgtatggaactgaaaagccacctatttttattttagactaatttaaaccactttggaatggattctaggaaacatcttaagcttgtgtgtngcctgtggtggttngtngggggtgttttcggtcttcggtttcgatttcctggtatttgtcaatctgggggatcctccccgtccgtcggtccggttgggtttcggtttcatacttttctgggcattgtctatggcagttcacacgtggtcatactttgtgctttcagatagggacatcaggttataatcatggtttcttcctctaaattgctctttgggctttacattcaggtccaggattcttcagggtttctcccaaaaataggattctgtgtcagtgtttgccttgctgagtaagtcaccctttctggctccaaatttcgtgggtgggccatctgtggccagcttctggtggccaattgggcttttccgaaagccatggtccaccttatttctttatattgccaggaccatttccactttatgacccgcgggggactttctcagattttcccaggcatttctttaatttgggccccccaggggga

SEQ ID NO: 712764 - DNA, 676 bp, Homo sapiens
  misc_feature (48)..(48): n is a, c, g, or t
  misc_feature (630)..(630): n is a, c, g, or t
taattttgtatttttagtagagaaggggtttctccacgttggtcaggntggtctggaactcccgatctcaggtgatccacctgcctcccaaagtgctgggattacaggcgtgagccaccacgcccaggctctgacattcttgaatatccctatcaacccctctcacccacccaaagcctgctgctcaaagcagctctaagcagaagagatggagaaacattcagactgggtggagcatggcccaggctgtgttgctgcccacttctgtctagatgggcagttcttgacttccccgcctgacgctgctgagcagccacagtcccgactgcattctggcttgtaccctttactatagtgccagccacagagagcagccatgcagcatttttaagtagccaaggaaaggcccgttctcacagcagtgcttggggaatcttcagacttggtattaggaaccatagcaatgagacttgttacaagcttgcaaaacaaaatgggatttttctgtgtggtccaacaaggatctagacagaaagtctgcttgattttgttttgccttgttggcttcataaacccacgtagcagaagcactttgtgaatcaaaaatggaagcattgttctttgatactngaggaatgcctttcctgaatggctactgtgggtgggaattgcctct

SEQ ID NO: 712765 - DNA, 320 bp, Homo sapiens
agatatgatgtcagtgtatatctgggataataagcaccgactctactgagagtctacttatgcgaagcactgtattctaagcacttgacacggtctcacatgacatcttggcaatgacccagacatgaactgttattcccactatttttatacagaataatcaaagctgtggagccagaggttaggtaacctgttcaaaactgacacaactattatatgactaggtcatagcttatagcctgattcatctgacttcaaagcctacattcactactagtatgctatacaggtgacatcttaatctggggcccaagcctgct

SEQ ID NO: 712766 - DNA, 126 bp, Homo sapiens
ctagaggatcccgtctcacatacttcaaacagtgtctggagtgatagactatatgtgtgacgtgggcatgtattgaatagggtgggaatcttttccccagttagaaaaacagatttaaataaacta

SEQ ID NO: 712767 - DNA, 305 bp, Homo sapiens
  misc_feature (222)..(222): n is a, c, g, or t
  misc_feature (268)..(268): n is a, c, g, or t
ggaaagcaggtctcattatgttgcccaggctggtcttgaactcctggccttaagaaatcctgccgcctcagcctcccaaagtatacttttatatagtaactgattcagtgctcacatcaatcctacaacgtagatactattatcatcttcattttatggatgaggacactgagacactaaatctgactaccaaaaaaaaaaaaagcagggtcaggcacagtngctcacgtctataatctcaacactttggaaggctgaggtgggcagnttgcttgagtccaagagttcaagaccagcctgggaca

SEQ ID NO: 712768 - DNA, 413 bp, Homo sapiens
ctgaagccagatcttccccaccacacatgcatctcccctgggctcagctcaagtgtcacctcctaaaaggctcccctatttttctttgacagcacctcagattcctgcacaaggcttactgtgacatgcactattttatttgggggattactggcctgctctgcctgccaagacctgaagttccagctttgactggaaggcagggaccttcttgttcccaatgtctccacagcaatcagcgcaaggcctagtacatagcagggatgtaaaatatgctgcttaaatgggccaagcacagtggctcacacttgtaatcccaacacttcgggaggccaaggcgggcaaatcacgatgtcaggagtttgagaccagcctggcaaacacagtgaaaccccgtctccactaaaaataca

SEQ ID NO: 712769 - DNA, 210 bp, Homo sapiens
tatcacgttgcagtgaggtcaccctctaagatcacacgatcaaaagggacaagcatcaatgcacgcagcaatgcagctcagaacgcttagccgtagaccacacaccccacgggtaaacagacagtgagttacacctttagacaactaacacgaacagtttaactcaagactatacataaccccagggattggctcaatattcgatgccag

SEQ ID NO: 712770 - DNA, 458 bp, Homo sapiens
  misc_feature (397)..(397): n is a, c, g, or t
  misc_feature (458)..(458): n is a, c, g, or t
ggttttcgccatgttggccaggctggtctcaaactcctgacctcaggtgatgtgtctgtctcggcctcccaaagtgctgggattataggcatgagctaccgcgcctggctacaaaagcacttgttaccccataaacttatacaatttctttagcagccgcgatctcttgaggagggcagagcctttgtgacctaatcacctctgaaaggccctgcctgtcaacactgttgcatcagggattaaatttatcttttgagatggagtttcactcttgttgcctgggctggagtgcaatggtgcagtctcagcacactgcagcctccgcctcccgggttcaaggaattctcctgcctcagccttccaagtagctgggattacaggcatccaccaccacgcncaagcttttggattttttagtagagctggggtttcactgtgtttgcccgctggtctcctcn

SEQ ID NO: 712771 - DNA, 806 bp, Homo sapiens
  misc_feature (33)..(33): n is a, c, g, or t
  misc_feature (41)..(42): n is a, c, g, or t
  misc_feature (47)..(47): n is a, c, g, or t
  misc_feature (55)..(55): n is a, c, g, or t
ctgttggtcgacccatcgatatcattcgtaagnattcgaannccttnagcaaaancccggcggcgtgggctatagcacccccggatccgacgagctgtaggaaatccttatgagcgcacgaccattttcaacctgtagcgcagggtcatcgtcataagggcaacggcgtgcaacgcggcctggtgggctagatcatcaagcgctttgagcagaagggattccgtctcgtggccatgaagttcctacgggcctttgaagaacacctgaagcagcactacattgacctgaaagaccgaccattcttccctgggctggtgaagtacatgaactcagggccgcttgcggccatggtctgggaggagcagaacgcggagaagacaggccgagtgattgcttggggagaccaatccagcatattcaaagccaggcaccattcgaggggacttctgcattcaggttggcaggaacatcattcatggcagtgattcagtaaaaagtgctgagaaatcagcctattggttaagcctgaagaactggttgactacaagtcttgtgctcatgactgggtctattaataagacgtggacacaacagccggttccttcagcacggtcgtggagtgtccctggacacagctcttcattccattgacttattggcaacaggattgaacatttcttcatagaagcatattcgcccattaaagtttttaggtagcgcggaataacatattcaaataatacttgagggtgggctcccggtctcaggtacgtttcaccctcttctcctattggggtcccctttct

SEQ ID NO: 712772 - DNA, 162 bp, Homo sapiens
gttcttccacttaggcctcaattccttccttttcaggggcagccttagttccatggccctgaaacacacacattttcccctttctttccagaagccactggcccccatagcacccagtgattctttttacaagtggaggactagggtggtttccaaaggttt

SEQ ID NO: 712773 - DNA, 3376 bp, Homo sapiens
gtgtcagagaggctaaatgacttgccaagatagtagagctgacttcagagaatttcctttattaagaatgctttggatacatcatcttattttgttctttcaacaatcctgtaaggtaggagcattagctacatttttccagctggggaaactaaggcttggagaagttagttaacttctccaaagtcagacagcttgtattcacagccaagctgggatataggacaacaaagcctgtactcttaaattacaggctaagttaacacctattatagaggcatgttgtctaacaagaaagacattgtcattaacatggagtatgtctagataatacacaaatacacatgcacacacaccctgcaccttaagagaattagaatcgcaaagcacttttatatagcttagaagtgagagtttgggaaagttattctcagaggtaatggtggaaagcaatcagatagattggagagtttttgaaaacacctaattacaatccagcaggtgtatacccctaggcaccttcagcaggtaaaatggtatctggggcctgattgaatatttctttcactaggtgttcctttctgtctacattgtgcttctgtgagctgagagatttaataacagatgctctgggatgattcctaagcaaaagaattgtcttttgtcactgtagatgcattttccgaccttgtgttcaccatgaatatatcataagagaaatgatcgcctgacacacaagcaatgggaagtgtaacctggggttgggtttcacttgattgtaattacagaatctcagcttcattaacatacgtttttatacatgaaactttttttctcatagtagcccttatttgaaatgaacacctttcagcttcaaggccacaacaattatgttcaggttgaagagcagtttgtttctacttatgtgagagtaaacaaaacaagttattgtctctgttttccttccccatttgtgtttggttctgtgtttgctgcacggcacaccaatactaaatacttctcatttgtcctaaagtgagcattggatgaaatggctctatgtataatatgggtttgtattctgttgtctcaaagcagttacttagtgttttgaatccatgtcgatttaatgatcttattcattcaataagatatgagaggaaggaaggcaaacatgtcccctgcctgtatgtggcttatagtctggcagaggggtaaggcaggatattttgtctatcttgttcactgctatgcccagtgcgtgcctgggacttagtgctcaataaatacttgttgaatgagtgtatgcacaataaaatagattaagagctatgaaagaaggattactagaggaccatggaaatgtacagtgctggactgatttcctgcagggaagggaataaagagttgaggcagatgctctcagaaagagaattcccacagcatggcacaataaaatatggcccccattgtcacgtaaatgagagtatagatcctacttccacatttgccaggcctgaaagtgttgacaggttattcctcccaagcctcaggtttctcaattgtgaaatagaaaattatgcatatgatgctcttgttagtgaccagcacatgatggacagtcaatacctgtagctactgttgactgcaaagaacctgttgtggtctcactgtgcagaattatgttattcctttcaaatgaaacttgcagtagattcagtgttttaacagaatcgtgatggaagtcaataattgaatgcatcaaatgggggaaaaaaagcacaacctctcaactcgagatattttaaggtgtgactgtttttttttaaatgtttctgttacatgcatctaaatgactggtgtcttcttaagaagagcagaattttctattatgctgtgccacttctgtcttttgatttgggggaagttgctagatctcccagaggttcagtttccaataccataaaatggaaagaataaaagtaaatatataaaggcattaacttctatatcttagtgagtttttactaggcctgtgtctgcctaggatcttcttttttgattcatctattcaccaaatatttagtggcctctggtgatatgcaatgcattgtgccagtcaaatgatgagatatctgcttggaggagcaaaagatagggtggtgggcagagacggacttatgcaaattattccaatgaagggtagtaagtgctatggtagagggagatacgaatgctatgagcatattactaatagccaaagcaatcctaagcaaaaagaacaaggaggtatcacattacccaacttcaaactatactacaatgttgcagtaactggtacaacatggtacgggtacaaaaacagatgtatagaccaatggaacagaatacagaacacagaaataaagctgcacacctacaaccatctgatcttcaacaaagcagacaaaaataagccctggagaaaatgactgcctattcaatagatggtgctggggtagctggcaaacctcatgcagagggataaaactgaactcctacttctcaccatatacaaaaattaacccaagatgaattaaagacttaaatttaggacctcaaactgtaaaaatcttataagaaaacttaggaaatagcattctggatatcaatcttgggaaagaatttacgactaagttctcaaaagcaattgtagcaaaaacaaaaattgacaagtgggactcaattaaactaaagagcttctgcacagcaaaagaaaatatcaatagagtaaacagataacctacaaaaggggataaagtattcacaaactatgaatctgaggaaggtctaatatccagaatctatcaggaacttaattcaataagcaaaaccaaaatgaccccgtttaaaagtgggaaaaggacatgaacagacacttctcaaaagaagacatacaaattgtcaacaaatatatgaaaaaaatgctcaatatcactaatcgtcagaaaaatgtgaatcaaaatcacaataagctaccatctcacaccagtcagaatggctattattaaaaagtcaaagacaacaggtgctggtgagtctgtggagaacacttatacactcttggtgggaaaatgaatttgttcagccacagtggaatgctgtttggcaatttctcaaagaactaaaaacagaactaccattcaacccaacaatcccattactaggtatagacccaaaggaagataaattgttccatgaaaaagacacatgcacttgtatgttcattgcagcactattcataatagcaaagacatataatcaacataggtacccatcaagaatggattggacaaagaaaatttggtacatacacaccatggaatactacacagcc

SEQ ID NO: 712774 - DNA, 213 bp, Homo sapiens
ctttaggtaagttcacttagaagcttgtaaaacaaaaagtaattaattcttttacaagtttccattgaggtgtgatatacatccggcaaagtgcaccggtcttagatctacaggctcagtgaagcttcagaaatgcatgcatgcttttcgccatgactcagatcaagatacggaagagcccagcactccacgatgctccatcatgcccctttg

SEQ ID NO: 712775 - DNA, 101 bp, Homo sapiens
aaactgttatcttttcagtatttaataccggtagttcagttagtaactttttcatatatagcatgtgcctgtatgcagttgaactatataaagttcattgc

SEQ ID NO: 712776 - DNA, 167 bp, Homo sapiens
cactatgccctgtacctttgtgtccgcctaaggatttggtaccccatatgtattgtgaaatgcgtataatacctgggaagaaaatgaggctcaaagagaggtgaactgactagctcaaggaccactagtaccagatcctagactcctgcgaggacttgtgagacccc

SEQ ID NO: 712777 - DNA, 1095 bp, Homo sapiens
gttttttgtttgtctcttgtttgttggtttttatgttttttttgtttattatggcaaaggaggcaggacggagctgtccgcgcagtgagacgaggcaggagcaggagggacagcaagaacaaaagaaaggaggcgtatgcgataatatgtgtgggccaaagcgctcatattctgtccgtccttggggttatacagagtgttctactttttgccgccgtctctctacaaaccacgggggtcctgcacgacgggagcacacccccctactcggcttctttgggggaaaaacaccttgtgtgaaaacgccccgtgtgatgtgtaaagtgtccagagcgccccctgtgaagggcgcccccgggcgaaagagaaggcgtctccggagtgaaacccatgagccccagcgttgtccggataggagggaataaaaggctgtcgctcccttcgttccttgagagggaagatgggtgaatgggacccggcccctggcttctgacccccagtcccacgacccctttgcttcacctgcgcccagatacccttgtgttggaagaaattaagccccagtactcccatgaggacaccctctctggtgcactgccataattttgggaacaccttgataaaagaccgcggtccccgtgggactcagagtattgcttccctggagaactctactcagaccttcatgagctgccattgttatccctgggaaagttcccacgactggacacaactggaggaagaaaagcctttgcccgagtcctacctttttgggaccccaccataccactctccatttttggaatttgggtcttccgaggcccagacttgccctttctccgctgagtcccagattggccacggtggactaccgagtcaaacacaccatgccggaaactggtccctgccagcgaggagacccccaacagcgtggtttcgagagtacattttccctgggagggggccctcccgcatagtgggccaaaccttccatcagggccagattttcaaatgaaactcttttgccctcacctagctgcctgcacctgccctttcagggagaatgggggtcacttaaaggaaactgaacccttg

SEQ ID NO: 712778 - DNA, 285 bp, Homo sapiens
cggacacttagctgaagtatatcagctgaaggagctttgggctgagactatgggtttattagatatagaattaagtcatctgcaaaggagacgtaggttgacttcccgtcttcctatttagaatacccgtttatttctctctcgttacctgaactgccctggccagtgacttccaggtactatcgttgtaataggacgtggtggagagacagcgattctgtgtcgttgtgtcacgttttcacaaggggaatgtttccacgcttttgagttatggtggatcgctcg

SEQ ID NO: 712779 - DNA, 381 bp, Homo sapiens
gaacagccccagtgccctgggggaggggagggagtgaggggcagtggtgcccttcctgcaaaaaaaacatgcaacagtagcgctggcgccatttgcaggagctggcgggctggccttttggaccctggcttttcccccctgtaacgcctgttaccccccaactgttgtgggttcctgccaggctttaaaaaaatgatttgaattttttcccccctttgggtttattttggtgggttaatttggggtttcttttttcccttttggggggtattcaaagtgggctgggcccctgggcgagacccaactacctttgttggcattttttttatacccggaaccccgcggctttagccccttagcgggttaatttaattaagttga

SEQ ID NO: 712780 - DNA, 306 bp, Homo sapiens
cgaaaaattccttagctaccgtttggctttttttaatgccgatcaaaaccaagcaggtaagctacaaacgcgaattgaccgtggcattggctcactcacccgtctggtacaaatcttttttatcgatattttgccactttttagcagtgccattgtggcactggggttgatgtactatgccaacttctacgtcggtttggtggcgaccagtattatcccgatttacttttggctgaccttccaacaagctaagaaactgggcggatggcggcgcaacctacgtgatggccgtgaaaaaaagagcca

SEQ ID NO: 712781 - DNA, 938 bp, Homo sapiens
  misc_feature (68)..(68): n is a, c, g, or t
  misc_feature (71)..(71): n is a, c, g, or t
  misc_feature (79)..(79): n is a, c, g, or t
  misc_feature (107)..(107): n is a, c, g, or t
  misc_feature (171)..(171): n is a, c, g, or t
  misc_feature (176)..(176): n is a, c, g, or t
  misc_feature (185)..(185): n is a, c, g, or t
  misc_feature (199)..(199): n is a, c, g, or t
  misc_feature (211)..(211): n is a, c, g, or t
  misc_feature (244)..(244): n is a, c, g, or t
  misc_feature (253)..(253): n is a, c, g, or t
  misc_feature (263)..(263): n is a, c, g, or t
  misc_feature (272)..(272): n is a, c, g, or t
  misc_feature (282)..(282): n is a, c, g, or t
  misc_feature (306)..(306): n is a, c, g, or t
  misc_feature (314)..(314): n is a, c, g, or t
  misc_feature (322)..(322): n is a, c, g, or t
  misc_feature (338)..(338): n is a, c, g, or t
  misc_feature (352)..(354): n is a, c, g, or t
  misc_feature (361)..(361): n is a, c, g, or t
  misc_feature (383)..(383): n is a, c, g, or t
  misc_feature (390)..(390): n is a, c, g, or t
  misc_feature (396)..(398): n is a, c, g, or t
  misc_feature (400)..(400): n is a, c, g, or t
  misc_feature (411)..(411): n is a, c, g, or t
  misc_feature (414)..(414): n is a, c, g, or t
  misc_feature (426)..(427): n is a, c, g, or t
  misc_feature (456)..(456): n is a, c, g, or t
  misc_feature (482)..(482): n is a, c, g, or t
  misc_feature (517)..(517): n is a, c, g, or t
  misc_feature (541)..(541): n is a, c, g, or t
  misc_feature (546)..(546): n is a, c, g, or t
  misc_feature (573)..(573): n is a, c, g, or t
  misc_feature (595)..(595): n is a, c, g, or t
  misc_feature (597)..(597): n is a, c, g, or t
  misc_feature (630)..(630): n is a, c, g, or t
  misc_feature (640)..(642): n is a, c, g, or t
  misc_feature (647)..(648): n is a, c, g, or t
  misc_feature (657)..(658): n is a, c, g, or t
  misc_feature (691)..(691): n is a, c, g, or t
  misc_feature (709)..(713): n is a, c, g, or t
  misc_feature (716)..(717): n is a, c, g, or t
  misc_feature (720)..(720): n is a, c, g, or t
  misc_feature (725)..(725): n is a, c, g, or t
  misc_feature (767)..(767): n is a, c, g, or t
  misc_feature (806)..(806): n is a, c, g, or t
  misc_feature (827)..(829): n is a, c, g, or t
  misc_feature (845)..(845): n is a, c, g, or t
  misc_feature (861)..(861): n is a, c, g, or t
  misc_feature (864)..(864): n is a, c, g, or t
  misc_feature (895)..(895): n is a, c, g, or t
cgccgcgctcccgcgctccgttccgcccaggccgcgcccagctggaatgccgagatcgccgcccggcnacngcgcacangacgccccgcccgcccgccgcgactgtncatgggccccgggacacggggccgccgctgacacgcgcggcctcgccgccggccccgccgcccnccccnccccccccncgcccccctccccncccaccccccancgcagtcccccgcccacccccacccggggcgcnatcccctcnccccggccgnccgccgggnacgccacccngcacaccactcgcccatcccccgncccatcancgcctccntggtctccgccaaggnccaccgccaccccnnnctcaccngaccccggacctgcacaacgcngtcctcngccacnnncngcgccaacgcntcnaacgcacctccnncgcgggcgggagaagcgggccctttcgtnggaggcaagccagaacggctagcgcngtgcagcactttgcgcgaaccaccccaaactacanagtaccgggccgctccgcagaganagcanagcgcgcaaaggcccaggcgagctggnagcccgggcctcctagctcccngngattaggcgcccccgcaggccaccgcccgaagnctttaccccnnnggcgnntgggctcgnntcgcgccttaccgcgagcaagcccccgctgggngccgagttcgacggcctnnnnnaanncanacccnagcgctcgcctctggacggcctggaacccggcgaggctgccntcttcccaccgcccgcggcgcccgaggactgcgcgctgnggcccttccgcgcgccctacnnnccaccgagttgtcgcnggacccggcggttgcnacngggctccctggcggaagcgctcaggaccgcncccccgccgcgcgctcgctggcctgtctacggcacctgggcac

SEQ ID NO: 712782 - DNA, 729 bp, Homo sapiens
agcggaggatggcttgaatccaggagttggaggctgcagtgagccatgatcatgccacactaccctccagcctaggtgacagagtctagacctatctcaaaaaaacaaacgaacaagggccaggagcggtggctcacgcctgtgatcctcggcctcccagagtgctgggattgcgggcgtgagccactgcagccatggccgatacgtagttttacgaaaatattaactgtgcatgcttgatctctgtagtcttccattttttcatcgaacattgggtgttccagcaaatgacaccgaatgccacagtacaacagtcgtgctgctcagctcgtatagggagacagaatcaaactcagcatcgcactctcaagcaacagcggaatgcatggcgactgatgtaagtcactggaggctggatgtgtatcctgtagcatacatgttcacttcatagaacaaagtgattatgatcctgagtaggtaaaacttggtctacctggagttgtcttggcaaggcattagtgtacagtggattcttactatggaagtagttatgtgctgtcaattcatcatgagtactggatgagcgaataactaggaacattggctcactacggagaacatacagggatgagggtcccctataagcctcctgggtctcacttgtcagtcaacctggactcagtacataacccttagtgtgaaccatgtggttaactaggttaagggacc

SEQ ID NO: 712783 - DNA, 667 bp, Homo sapiens
ccaggatgtgagccagggactttctggaagtgtttgttctggccccacccgaccccaggcagtccccagctgtctgcacagtcggatggggagggggcttgcacagagttggagccagaggagagagctggctcatcctctacggctggatggggaaacctaacagaccacattgttacccgtcctcatctctccatccaggcgctcatagggtaactcttacccatctcatgcacttctctgaaccacattgacccactctgcactacttcccattctcctacccccatttgtcactgaagccctacaatcatggctgttgaaggaggaatgaaatgtgtgaacttcttgctctacatactactactagtcttttgcgcctgtgctaacgccactgattaccagtacttttctgatgcacaccttagtcctgattcataccataattcaattcgctaccactctctctctcttgcaatacctatatctacataaatatctttctcttacttcaggcttttcccaactctactttaccttctaatctaaatattcgcaattattctgttttatctccttatacatttatcatatcataatttacttacaactttcactcacacattcgtaatatcccttcaacacctcactccttctatctacacat

SEQ ID NO: 712784 - DNA, 140 bp, Homo sapiens
actgcatagtttttagaccttccttccctgatcttatacggccatttgatccttgatagtttaggtgagaactctttaaaatacattctctgtgggtccgacgcaatttataaaaattatgttctcaagaaggcaaaaaa

SEQ ID NO: 712785 - DNA, 2086 bp, Homo sapiens
  misc_feature (122)..(122): n is a, c, g, or t
cacggatcggcagcgggactgagccgcgcccacgtggaagccgccgcaggcttcgcgcggggccccccgggtgcacgcgggcagggccggggtctcccgacgcacgaccccggagagtgttnaaagggtcggagctgcccggaggcggcggcagggctgagccagcgacgccctccattcactctccgcgcccgttctccggctgtcctcccgttccgctgcccgccctgccaccatgacggaacaggccatctccttcgccaaagacttcttggccggaggcatcgccgccgccatctccaagacggccgtggctccgatcgagcgggtcaagctgctgctgcaggtccagcacgccagcaagcagatcgccgccgacaagcagtacaagggcatcgtggactgcattgtccgcatccccaaggagcagggcgtgctgtccttctggaggggcaaccttgccaacgtcattcgctacttccccactcaagccctcaacttcgccttcaaggataagtacaagcagatcttcctggggggcgtggacaagcacacgcagttctggaggtactttgcgggcaacctggcctccggcggtgcggccggcgcgacctccctctgcttcgtgtacccgctggatttcgccagaacccgcctggcagcggacgtgggaaagtcaggcacagagcgcgagttccgaggcctgggagactgcctggtgaagatcaccaagtccgacggcatccggggcctgtaccagggcttcagtgtctccgtgcagggcatcatcatctaccgggcggcctacttcggcgtgtacgatacggccaagggcatgctccccgaccccaagaacacgcacatcgtggtgagctggatgatcgcgcagaccgtgacggccgtggccggcgtggtgtcctaccccttcgacacggtgcggcggcgcatgatgatgcagtccgggcgcaaaggagctgacatcatgtacacgggcaccgtcgactgttggaggaagatcttcagagatgaggggggcaaggccttcttcaagggtgcgtggtccaacgtcctgcggggcatggggggcgccttcgtgctggtcctgtacgacgagctcaagaaggtgatctaagggccgcggcctcctccacacacacacacacaccaggggaaccaagagaaccacgtagaatcctcaaccgtgcggaccatcaaccttcgagaaattccagttgtctttttcccagccgcatcctgcctgtagatggccggggaaggctctagaaaaggggcgcattgcgatccaagaaaaaaaaaaaaaaaaaaaaaaaaaaaaaaaaaaaaaaaaaaaaaaaaaaaaaaaaaaaaaaaaacggctgtgagcgcgcgccgcgcgccgcggcgcccctgagaaaacgcttccaaaaccactgggggggagagcgggggcacacaaagagagaacagagcaaaagggggcccaaggggtgcccaaggaaaaacaggggaacaaaaacaacgcagcgcgggggcagcctacccccacacaaaagaaaagagcgcgcggcgagaccacaaggacggcgtatgaacaacaacaccacaccgaggcgacctgagagacaccacaagagagggcacaaaacacaacggagaaccactaggaggaccgagaaaaaaacaaaacaacccccagagccggtggaaacaaagaaaaaaagacaaaagaagagacaacacgaaaaaaaaacagcgaaacacacacgcacaaacaaggaacaggagccacgcaggaacgaccagcacagcgccgcacggggcaccccgaccaggcggcaagacaagcggacaacgagagcggcaggaacgagcggcaaagacagacgggggggagacgaggcggagaggagccgagccgaccgaggcacggagccgaagaacgccgaaggtgaggagagagggaagagaacgaagagaggggaagaagacggcgagggagaagcaggaggaacaaagaaagaaggcgcgaaaggacgaggaaaaaaggagagacagagaaggcgacggcaagggacagcaggaagcc

SEQ ID NO: 712786 - DNA, 128 bp, Homo sapiens
tgacaacacacactactgacaggaataaaaacatcatacagcgactttggaaaaccgtatggcaacttcttaaaaagttaaattaaattaggctgggcgcagtggaatcactcatcagatccaggaat

SEQ ID NO: 712787 - DNA, 2771 bp, Homo sapiens
  misc_feature (122)..(122): n is a, c, g, or t
  misc_feature (2569)..(2569): n is a, c, g, or t
  misc_feature (2590)..(2590): n is a, c, g, or t
  misc_feature (2593)..(2593): n is a, c, g, or t
  misc_feature (2595)..(2595): n is a, c, g, or t
cacggatcggcagcgggactgagccgcgcccacgtggaagccgccgcaggcttcgcgcggggccccccgggtgcacgcgggcagggccggggtctcccgacgcacgaccccggagagtgttnaaagggtcggagctgcccggaggcggcggcagggctgagccagcgacgccctccattcactctccgcgcccgttctccggctgtcctcccgttccgctgcccgccctgccaccatgacggaacaggccatctccttcgccaaagacttcttggccggaggcatcgccgccgccatctccaagacggccgtggctccgatcgagcgggtcaagctgctgctgcaggtccagcacgccagcaagcagatcgccgccgacaagcagtacaagggcatcgtggactgcattgtccgcatccccaaggagcagggcgtgctgtccttctggaggggcaaccttgccaacgtcattcgctacttccccactcaagccctcaacttcgccttcaaggataagtacaagcagatcttcctggggggcgtggacaagcacacgcagttctggaggtactttgcgggcaacctggcctccggcggtgcggccggcgcgacctccctctgcttcgtgtacccgctggatttcgccagaacccgcctggcagcggacgtgggaaagtcaggcacagagcgcgagttccgaggcctgggagactgcctggtgaagatcaccaagtccgacggcatccggggcctgtaccagggcttcagtgtctccgtgcagggcatcatcatctaccgggcggcctacttcggcgtgtacgatacggccaagggcatgctccccgaccccaagaacacgcacatcgtggtgagctggatgatcgcgcagaccgtgacggccgtggccggcgtggtgtcctaccccttcgacacggtgcggcggcgcatgatgatgcagtccgggcgcaaaggagctgacatcatgtacacgggcaccgtcgactgttggaggaagatcttcagagatgaggggggcaaggccttcttcaagggtgcgtggtccaacgtcctgcggggcatggggggcgccttcgcctggtcctgtctactagctcaaacaggtttcctccacacacacacacacaccaggggaaccaagagaaccacgtagaatcctcaaccgtgcggaccatcaaccttcgagaaattccagttgtctttttcccagccgcatcctgcctgtagatggccggggaaggctctagaaaaggggcgcattgcgatccaaccatcggcagccgattccgtgtcttgatcacggggtgggagggaaccgtggcgtccctgcgtggggcccatgggtgagacactccagtactgagacctagagtccagatgcttgtaggagccaagtcgtgttctaagtatttatttaaaacaaaagaatcacgttttcccatttacttcagcgctagcccctgttttgcacagccgagtactggcgagtatgttctatgttgggcctcctgctggtcctgtacgacgagctcaagaaggtgatctaagggccgcggcctcctccacacacacacacacaccaggggaaccaagagaaccacgtagaatcctcaaccgtgcggaccatcaaccttcgagaaattccagttgtctttttcccagccgcatcctgcctgtagatggccggggaaggctctagaaaaggggcgcattgcgatccaaccatcggcagccgattccgtgtcttgatcacggggtgggagggaaccgtggcgtccctgcgtggggcccatgggtgagacactccagtactgagacctagagtccagatgcttgtaggagccaagtcgtgttctaagtatttatttaaaacaaaagaatcacgttttcccatttgtacttcagcgctagcccctgttttgcacagccgagtactggcgagtatgttctatgttgggcctcctgctgcaaaacaataaacagaggacgcagaggtcctcctgcctggccacgcacctctccacagggcggcctggggtctggagatgggcgctgggcccacgggacgcagatggggccacgctctgcccgtggctggcccacgttcctggtctgcagtgctgcctcctccccagcacccctggggcacagagggcagggtcacagctgggaagaggcggggggtagaaaccaaggctggcagaagtgtagccgggctccctgataaatgctggaggaccccagggcacctgcacttactgtaccctctctgagagcatttgtatgatctcatgtctcagctctggaggctggaggtcccagaaaaccaaggtatggtagattcagtctctggtgagtacccagttcctggcttctagatggcgccttctccctgtgtgtcctcagatgatggatgaggccagggtgctctctggagtcctttctgtaagggcactgatcccatccatgaggcctcatgactcccaaagacccccactttccaacgccatcacttgggagaggggcgttttcagcgtgaatcttggggaanctgaaacagggtgacacctgngtncntctcactctgtagctcccgaaggccactccagcccccattccaacatgaacagtggaagtggtcggggtccccaaattggcagctgtggttccccggggttcacccgtgagaaatccaccccaagggggtcccccccgcgagggaccaaaagcttccttcaagcttttttttggtc

SEQ ID NO: 712788 - DNA, 224 bp, Homo sapiens
aaaatcaggctgtattgagagggaagtaatgtgggaactgaaaagtgtgtcaagggcttgaaacaagcaaaagttcagctcctttgctgtcattgctgtgggctgtatctcctcattcttgcccagtcttttcatctacaggctgtgctactatgcatcacacatgtcacgtaagcattagaaatacctgaactaaggggctgactgtcgaggtaccgacgctc

SEQ ID NO: 712789 - DNA, 2789 bp, Homo sapiens
  misc_feature (122)..(122): n is a, c, g, or t
  misc_feature (2587)..(2587): n is a, c, g, or t
  misc_feature (2608)..(2608): n is a, c, g, or t
  misc_feature (2611)..(2611): n is a, c, g, or t
  misc_feature (2613)..(2613): n is a, c, g, or t
cacggatcggcagcgggactgagccgcgcccacgtggaagccgccgcaggcttcgcgcggggccccccgggtgcacgcgggcagggccggggtctcccgacgcacgaccccggagagtgttnaaagggtcggagctgcccggaggcggcggcagggctgagccagcgacgccctccattcactctccgcgcccgttctccggctgtcctcccgttccgctgcccgccctgccaccatgacggaacaggccatctccttcgccaaagacttcttggccggaggcatcgccgccgccatctccaagacggccgtggctccgatcgagcgggtcaagctgctgctgcaggtccagcacgccagcaagcagatcgccgccgacaagcagtacaagggcatcgtggactgcattgtccgcatccccaaggagcagggcgtgctgtccttctggaggggcaaccttgccaacgtcattcgctacttccccactcaagccctcaacttcgccttcaaggataagtacaagcagatcttcctggggggcgtggacaagcacacgcagttctggaggtactttgcgggcaacctggcctccggcggtgcggccggcgcgacctccctctgcttcgtgtacccgctggatttcgccagaacccgcctggcagcggacgtgggaaagtcaggcacagagcgcgagttccgaggcctgggagactgcctggtgaagatcaccaagtccgacggcatccggggcctgtaccagggcttcagtgtctccgtgcagggcatcatcatctaccgggcggcctacttcggcgtgtacgatacggccaagggcatgctccccgaccccaagaacacgcacatcgtggtgagctggatgatcgcgcagaccgtgacggccgtggccggcgtggtgtcctaccccttcgacacggtgcggcggcgcatgatgatgcagtccgggcgcaaaggagctgacatcatgtacacgggcaccgtcgactgttggaggaagatcttcagagatgaggggggcaaggccttcttcaagggtgcgtggtccaacgtcctgcggggcatggggggcgccttcggctggtcctgtacgacgagctcaagaaggtgatctaagggccgcggcctcctccacacacacacacacaccaggggaaccaagagaaccacgtagaatcctcaaccgtgcggaccatcaaccttcgagaaattccagttgtctttttcccagccgcatcctgcctgtagatggccggggaaggctctagaaaaggggcgcattgcgatccaaccatcggcagccgattccgtgtcttgatcacggggtgggagggaaccgtggcgtccctgcgtggggcccatgggtgagacactccagtactgagacctagagtccagatgcttgtaggagccaagtcgtgttctaagtatttatttaaaacaaaagaatcacgttttcccatttacttcagcgctagcccctgttttgcacagccgagtactggcgagtatgttctatgttgggcctcctgctggtcctgtacgacgagctcaagaaggtgatctaagggccgcggcctcctccacacacacacacacaccaggggaaccaagagaaccacgtagaatcctcaaccgtgcggaccatcaaccttcgagaaattccagttgtctttttcccagccgcatcctgcctgtagatggccggggaaggctctagaaaaggggcgcattgcgatccaaccatcggcagccgattccgtgtcttgatcacggggtgggagggaaccgtggcgtccctgcgtggggcccatgggtgagacactccagtactgagacctagagtccagatgcttgtaggagccaagtcgtgttctaagtatttatttaaaacaaaagaatcacgttttcccatttgtacttcagcgctagcccctgttttgcacagccgagtactggcgagtatgttctatgttgggcctcctgctgcaaaacaataaacagaggacgcagaggtcctcctgcctggccacgcacctctccacagggcggcctggggtctggagatgggcgctgggcccacgggacgcagatggggccacgctctgcccgtggctggcccacgttcctggtctgcagtgctgcctcctccccagcacccctggggcacagagggcagggtcacagctgggaagaggcggggggtagaaaccaaggctggcagaagtgtagccgggctccctgataaatgctggaggaccccagggcacctgcacttactgtaccctctctgagagcatttgtatgatctcatgtctcagctctggaggctggaggtcccagaaaaccaaggtatggtagattcagtctctggtgagtacccagttcctggcttctagatggcgccttctccctgtgtgtcctcagatgatggatgaggccagggtgctctctggagtcctttctgtaagggcactgatcccatccatgaggcctcatgactcccaaagacccccactttccaacgccatcacttgggagaggggcgttttcagcgtgaatcttggggaanctgaaacagggtgacacctgngtncntctcactctgtagctcccgaaggccactccagcccccattccaacatgaacagtggaagtggtcggggtccccaaattggcagctgtggttccccggggttcacccgtgagaaatccaccccaagggggtcccccccgcgagggaccaaaagcttccttcaagcttttttttggtc

SEQ ID NO: 712790 - DNA, 2334 bp, Homo sapiens
  misc_feature (122)..(122): n is a, c, g, or t
  misc_feature (2132)..(2132): n is a, c, g, or t
  misc_feature (2153)..(2153): n is a, c, g, or t
  misc_feature (2156)..(2156): n is a, c, g, or t
  misc_feature (2158)..(2158): n is a, c, g, or t
cacggatcggcagcgggactgagccgcgcccacgtggaagccgccgcaggcttcgcgcggggccccccgggtgcacgcgggcagggccggggtctcccgacgcacgaccccggagagtgttnaaagggtcggagctgcccggaggcggcggcagggctgagccagcgacgccctccattcactctccgcgcccgttctccggctgtcctcccgttccgctgcccgccctgccaccatgacggaacaggccatctccttcgccaaagacttcttggccggaggcatcgccgccgccatctccaagacggccgtggctccgatcgagcgggtcaagctgctgctgcaggtccagcacgccagcaagcagatcgccgccgacaagcagtacaagggcatcgtggactgcattgtccgcatccccaaggagcagggcgtgctgtccttctggaggggcaaccttgccaacgtcattcgctacttccccactcaagccctcaacttcgccttcaaggataagtacaagcagatcttcctggggggcgtggacaagcacacgcagttctggaggtactttgcgggcaacctggcctccggcggtgcggccggcgcgacctccctctgcttcgtgtacccgctggatttcgccagaacccgcctggcagcggacgtgggaaagtcaggcacagagcgcgagttccgaggcctgggagactgcctggtgaagatcaccaagtccgacggcatccggggcctgtaccagggcttcagtgtctccgtgcagggcatcatcatctaccgggcggcctacttcggcgtgtacgatacggccaagggcatgctccccgaccccaagaacacgcacatcgtggtgagctggatgatcgcgcagaccgtgacggccgtggccggcgtggtgtcctaccccttcgacacggtgcggcggcgcatgatgatgcagtccgggcgcaaaggagctgacatcatgtacacgggcaccgtcgactgttgggaggaagatcttcagagatgagggaggccttcttcaagggtgcgtggtccaacgtcctgcggggcatggggggcgccttcggctggtcctgtacgacgagctcaagaaggtgatctaagggccgcggccctcctccacacacacacacacaccaggggaaccaagagaaccacgtagaatcctcaaccgtgcggaccatcaaccttcgagaaattccagttgtctttttcccagccgcatcctgcctgtagatggccggggaaggctctagaaaaggggcgcattgcgatccaaccatcggcagccgattccgtgtcttgatcacggggtgggagggaaccgtggcgtccctgcgtggggcccatgggtgagacactccagtactgagacctagagtccagatgcttgtaggagccaagtcgtgttctaagtatttatttaaaacaaaagaatcacgttttcccatttgtacttcagcgctagcccctgttttgcacagccgagtactggcgagtatgttctatgttgggcctcctgctgcaaaacaataaacagaggacgcagaggtcctcctgcctggccacgcacctctccacagggcggcctggggtctggagatgggcgctgggcccacgggacgcagatggggccacgctctgcccgtggctggcccacgttcctggtctgcagtgctgcctcctccccagcacccctggggcacagagggcagggtcacagctgggaagaggcggggggtagaaaccaaggctggcagaagtgtagccgggctccctgataaatgctggaggaccccagggcacctgcacttactgtaccctctctgagagcatttgtatgatctcatgtctcagctctggaggctggaggtcccagaaaaccaaggtatggtagattcagtctctggtgagtacccagttcctggcttctagatggcgccttctccctgtgtgtcctcagatgatggatgaggccagggtgctctctggagtcctttctgtaagggcactgatcccatccatgaggcctcatgactcccaaagacccccactttccaacgccatcacttgggagaggggcgttttcagcgtgaatcttggggaanctgaaacagggtgacacctgngtncntctcactctgtagctcccgaaggccactccagcccccattccaacatgaacagtggaagtggtcggggtccccaaattggcagctgtggttccccggggttcacccgtgagaaatccaccccaagggggtcccccccgcgagggaccaaaagcttccttcaagcttttttttggtc

SEQ ID NO: 712791 - DNA, 2851 bp, Homo sapiens
  misc_feature (122)..(122): n is a, c, g, or t
  misc_feature (1045)..(1045): n is a, c, g, or t
  misc_feature (2649)..(2649): n is a, c, g, or t
  misc_feature (2670)..(2670): n is a, c, g, or t
  misc_feature (2673)..(2673): n is a, c, g, or t
  misc_feature (2675)..(2675): n is a, c, g, or t
cacggatcggcagcgggactgagccgcgcccacgtggaagccgccgcaggcttcgcgcggggccccccgggtgcacgcgggcagggccggggtctcccgacgcacgaccccggagagtgttnaaagggtcggagctgcccggaggcggcggcagggctgagccagcgacgccctccattcactctccgcgcccgttctccggctgtcctcccgttccgctgcccgccctgccaccatgacggaacaggccatctccttcgccaaagacttcttggccggaggcatcgccgccgccatctccaagacggccgtggctccgatcgagcgggtcaagctgctgctgcaggtccagcacgccagcaagcagatcgccgccgacaagcagtacaagggcatcgtggactgcattgtccgcatccccaaggagcagggcgtgctgtccttctggaggggcaaccttgccaacgtcattcgctacttccccactcaagccctcaacttcgccttcaaggataagtacaagcagatcttcctggggggcgtggacaagcacacgcagttctggaggtactttgcgggcaacctggcctccggcggtgcggccggcgcgacctccctctgcttcgtgtacccgctggatttcgccagaacccgcctggcagcggacgtgggaaagtcaggcacagagcgcgagttccgaggcctgggagactgcctggtgaagatcaccaagtccgacggcatccggggcctgtaccagggcttcagtgtctccgtgcagggcatcatcatctaccgggcggcctacttcggcgtgtacgatacggccaagggcatgctccccgaccccaagaacacgcacatcgtggtgagctggatgatcgcgcagaccgtgacggccgtggccggcgtggtgtcctaccccttcgacacggtgcggcggcgcatgatgatgcagtccgggcgcaaaggaggtactcgggggggcggggacccttgctgccgggaagggaaccaagctccttgccctgggcccgtgggaggncaggaaccatcaaaggaggcacttccagggcgtgtgagacaagcaagtgtgtccgaaagtaacctggctgtgtggaaggattttcctgaacgatgggcttctgatctttttggggtttcatggtccgggcggcagtttctaaatccccgcctcctagaacctctgttgcacccacaccctcgatcctgccttctctgcatggaccccggggtggagatgggggacacccagggcggggcctgaagtcctgtgtccagccctccctgagacagtggcttaggaggagagcttaaactaagagaacctcagatatccctcctgtaatcagaactgtggctcaggcgtctggggtgttatttctgtgaaacgtctttgtgggtgcaggtggcgtccgtgtcttgaagagcttggcggcgaggccctcactgtctccctgtcgttgcagctgacatcatgtacacgggcaccgtcgactgtaggaagatcttcagagatgaggggggcaaggccttcttcaagggtgcgtggtccaacgtcctgcggggcatggggggcgccttcgtgctggtcctgtacgacgagctcaagaaggtgatctaagggccgcggcctcctccacacacacacacacaccaggggaaccaagagaaccacgtagaatcctcaaccgtgcggaccatcaaccttcgagaaattccagttgtctttttcccagccgcatcctgcctgtagatggccggggaaggctctagaaaaggggcgcattgcgatccaaccatcggcagccgattccgtgtcttgatcacggggtgggagggaaccgtggcgtccctgcgtggggcccatgggtgagacactccagtactgagacctagagtccagatgcttgtaggagccaagtcgtgttctaagtatttatttaaaacaaaagaatcacgttttcccatttgtacttcagcgctagcccctgttttgcacagccgagtactggcgagtatgttctatgttgggcctcctgctgcaaaacaataaacagaggacgcagaggtcctcctgcctggccacgcacctctccacagggcggcctggggtctggagatgggcgctgggcccacgggacgcagatggggccacgctctgcccgtggctggcccacgttcctggtctgcagtgctgcctcctccccagcacccctggggcacagagggcagggtcacagctgggaagaggcggggggtagaaaccaaggctggcagaagtgtagccgggctccctgataaatgctggaggaccccagggcacctgcacttactgtaccctctctgagagcatttgtatgatctcatgtctcagctctggaggctggaggtcccagaaaaccaaggtatggtagattcagtctctggtgagtacccagttcctggcttctagatggcgccttctccctgtgtgtcctcagatgatggatgaggccagggtgctctctggagtcctttctgtaagggcactgatcccatccatgaggcctcatgactcccaaagacccccactttccaacgccatcacttgggagaggggcgttttcagcgtgaatcttggggaanctgaaacagggtgacacctgngtncntctcactctgtagctcccgaaggccactccagcccccattccaacatgaacagtggaagtggtcggggtccccaaattggcagctgtggttccccggggttcacccgtgagaaatccaccccaagggggtcccccccgcgagggaccaaaagcttccttcaagcttttttttggtc

SEQ ID NO: 712792 - DNA, 252 bp, Homo sapiens
  misc_feature (212)..(212): n is a, c, g, or t
caggatcccaactcaagtgcgagctgcgatgcctcgagctggcatcgagactatggatcgagcacgtgtaccacggaacagcaaattcaggacaaagtggctacctttcgactcatgttgctggacaaggatgtgaaccctgggggccaggaggacaccccatggtcagaggccagcgcgtcacggtagactcaccagttagcaggtgtgtnccgtacgctcgaagttcgtaactcctgggtcttacgctct

SEQ ID NO: 712793 - DNA, 1205 bp, Homo sapiens
  misc_feature (122)..(122): n is a, c, g, or t
  misc_feature (1135)..(1135): n is a, c, g, or t
cacggatcggcagcgggactgagccgcgcccacgtggaagccgccgcaggcttcgcgcggggccccccgggtgcacgcgggcagggccggggtctcccgacgcacgaccccggagagtgttnaaagggtcggagctgcccggaggcggcggcagggctgagccagcgacgccctccattcactctccgcgcccgttctccggctgtcctcccgttccgctgcccgccctgccaccatgacggaacaggccatctccttcgccaaagacttcttggccggaggcatcgccgccgccatctccaagacggccgtggctccgatcgagcgggtcaagctgctgctgcaggtccagcacgccagcaagcagatcgccgccgacaagcagtacaagggcatcgtggactgcattgtccgcatccccaaggagcagggcgtgctgtccttctggaggggcaaccttgccaacgtcattcgctacttccccactcaagccctcaacttcgccttcaaggataagtacaagcagatcttcctggggggcgtggacaagcacacgcagttctggaggtactttgcgggcaacctggcctccggcggtgcggccggcgcgacctccctctgcttcgtgtacccgctggatttcgccagaacccgcctggcagcggacgtgggaaagtcaggcacagagcgcgagttccgaggcctgggagactgcctggtgaagatcaccaagtccgacggcatccggggcctgtaccagggcttcagtgtctccgtgcagggcatcatcatctaccgggcggcctacttcggcgtgtacgatacggccaagggcatgctccccgaccccaagaacacgcacatcgtggtgagctggatgatcgcgcagaccgtgacggccgtggccggcgtggtgtcctaccccttcgacacggtgcggcggcgcatgatgatgcagtccgggcgcaaaggagctgacatcatgtacacgggcaccgtcgactgttgggaggaagatcttcagagatgaggggggcaaggccttcttcaaggtgcgtggtccaacgtcctgcgggcatggggcctcggcgccgaaagccaagggtaagggggccccaccaccgggacaaacaanccgggcgaccaaacagtccgatcggcggcgaaggacaccgtcgggccgcccaacctccccaccctccggg

SEQ ID NO: 712794 - DNA, 2776 bp, Homo sapiens
  misc_feature (122)..(122): n is a, c, g, or t
  misc_feature (2574)..(2574): n is a, c, g, or t
  misc_feature (2595)..(2595): n is a, c, g, or t
  misc_feature (2598)..(2598): n is a, c, g, or t
  misc_feature (2600)..(2600): n is a, c, g, or t
cacggatcggcagcgggactgagccgcgcccacgtggaagccgccgcaggcttcgcgcggggccccccgggtgcacgcgggcagggccggggtctcccgacgcacgaccccggagagtgttnaaagggtcggagctgcccggaggcggcggcagggctgagccagcgacgccctccattcactctccgcgcccgttctccggctgtcctcccgttccgctgcccgccctgccaccatgacggaacaggccatctccttcgccaaagacttcttggccggaggcatcgccgccgccatctccaagacggccgtggctccgatcgagcgggtcaagctgctgctgcaggtccagcacgccagcaagcagatcgccgccgacaagcagtacaagggcatcgtggactgcattgtccgcatccccaaggagcagggcgtgctgtccttctggaggggcaaccttgccaacgtcattcgctacttccccactcaagccctcaacttcgccttcaaggataagtacaagcagatcttcctggggggcgtggacaagcacacgcagttctggaggtactttgcgggcaacctggcctccggcggtgcggccggcgcgacctccctctgcttcgtgtacccgctggatttcgccagaacccgcctggcagcggacgtgggaaagtcaggcacagagcgcgagttccgaggcctgggagactgcctggtgaagatcaccaagtccgacggcatccggggcctgtaccagggcttcagtgtctccgtgcagggcatcatcatctaccgggcggcctacttcggcgtgtacgatacggccaagggcatgctccccgaccccaagaacacgcacatcgtggtgagctggatgatcgcgcagaccgtgacggccgtggccggcgtggtgtcctaccccttcgacacggtgcggcggcgcatgatgatgcagtccgggcgcaaaggagctgacatcatgtacacgggcaccgtcgactgttgggaggaagatcttcagagatgagggaggccttcttcaagggtgcgtggtccaacgtcctgcggggcatggggggcgccttcgcctggtcctgtctactagctcaaacaggtttcctccacacacacacacacaccaggggaaccaagagaaccacgtagaatcctcaaccgtgcggaccatcaaccttcgagaaattccagttgtctttttcccagccgcatcctgcctgtagatggccggggaaggctctagaaaaggggcgcattgcgatccaaccatcggcagccgattccgtgtcttgatcacggggtgggagggaaccgtggcgtccctgcgtggggcccatgggtgagacactccagtactgagacctagagtccagatgcttgtaggagccaagtcgtgttctaagtatttatttaaaacaaaagaatcacgttttcccatttacttcagcgctagcccctgttttgcacagccgagtactggcgagtatgttctatgttgggcctcctgctggtcctgtacgacgagctcaagaaggtgatctaagggccgcggcctcctccacacacacacacacaccaggggaaccaagagaaccacgtagaatcctcaaccgtgcggaccatcaaccttcgagaaattccagttgtctttttcccagccgcatcctgcctgtagatggccggggaaggctctagaaaaggggcgcattgcgatccaaccatcggcagccgattccgtgtcttgatcacggggtgggagggaaccgtggcgtccctgcgtggggcccatgggtgagacactccagtactgagacctagagtccagatgcttgtaggagccaagtcgtgttctaagtatttatttaaaacaaaaaaaaaaaaagaatcacgttttcccatttgtacttcagcgctagcccctgttttgcacagccgagtactggcgagtatgttctatgttgggcctcctgctgcaaaacaataaacagaggacgcagaggtcctcctgcctggccacgcacctctccacagggcggcctggggtctggagatgggcgctgggcccacgggacgcagatggggccacgctctgcccgtggctggcccacgttcctggtctgcagtgctgcctcctccccagcacccctggggcacagagggcagggtcacagctgggaagaggcggggggtagaaaccaaggctggcagaagtgtagccgggctccctgataaatgctggaggaccccagggcacctgcacttactgtaccctctctgagagcatttgtatgatctcatgtctcagctctggaggctggaggtcccagaaaaccaaggtatggtagattcagtctctggtgagtacccagttcctggcttctagatggcgccttctccctgtgtgtcctcagatgatggatgaggccagggtgctctctggagtcctttctgtaagggcactgatcccatccatgaggcctcatgactcccaaagacccccactttccaacgccatcacttgggagaggggcgttttcagcgtgaatcttggggaanctgaaacagggtgacacctgngtncntctcactctgtagctcccgaaggccactccagcccccattccaacatgaacagtggaagtggtcggggtccccaaattggcagctgtggttccccggggttcacccgtgagaaatccaccccaagggggtcccccccgcgagggaccaaaagcttccttcaagcttttttttggtc

SEQ ID NO: 712795 - DNA, 2314 bp, Homo sapiens
  misc_feature (122)..(122): n is a, c, g, or t
  misc_feature (2112)..(2112): n is a, c, g, or t
  misc_feature (2133)..(2133): n is a, c, g, or t
  misc_feature (2136)..(2136): n is a, c, g, or t
  misc_feature (2138)..(2138): n is a, c, g, or t
cacggatcggcagcgggactgagccgcgcccacgtggaagccgccgcaggcttcgcgcggggccccccgggtgcacgcgggcagggccggggtctcccgacgcacgaccccggagagtgttnaaagggtcggagctgcccggaggcggcggcagggctgagccagcgacgccctccattcactctccgcgcccgttctccggctgtcctcccgttccgctgcccgccctgccaccatgacggaacaggccatctccttcgccaaagacttcttggccggaggcatcgccgccgccatctccaagacggccgtggctccgatcgagcgggtcaagctgctgctgcaggtccagcacgccagcaagcagatcgccgccgacaagcagtacaagggcatcgtggactgcattgtccgcatccccaaggagcagggcgtgctgtccttctggaggggcaaccttgccaacgtcattcgctacttccccactcaagccctcaacttcgccttcaaggataagtacaagcagatcttcctggggggcgtggacaagcacacgcagttctggaggtactttgcgggcaacctggcctccggcggtgcggccggcgcgacctccctctgcttcgtgtacccgctggatttcgccagaacccgcctggcagcggacgtgggaaagtcaggcacagagcgcgagttccgaggcctgggagactgcctggtgaagatcaccaagtccgacggcatccggggcctgtaccagggcttcagtgtctccgtgcagggcatcatcatctaccgggcggcctacttcggcgtgtacgatacggccaagggcatgctccccgaccccaagaacacgcacatcgtggtgagctggatgatcgcgcagaccgtgacggccgtggccggcgtggtgtcctaccccttcgacacggtgcggcggcgcatgatgatgcagtccgggcgcaaaggagctgacatcatgtacacgggcaccgtcgactgttgggaggaagatcttcagagatgagggaggccttcttcaagggtgcgtggtccaacgtcctgcggggcatggggggcgccttcgcctggtcctgtctactagctcaaacaggtttcctccacacacacacacacaccaggggaaccaagagaaccacgtagaatcctcaaccgtgcggaccatcaaccttcgagaaattccagttgtctttttcccagccgcatcctgcctgtagatggccggggaaggctctagaaaaggggcgcattgcgatccaaccatcggcagccgattccgtgtcttgatcacggggtgggagggaaccgtggcgtccctgcgtggggcccatgggtgagacactccagtactgagacctagagtccagatgcttgtaggagcaagtcgtgttctaagtatttatttaaaacaaaagaatcacgttttcccatttgtacttcagcgctagcccctgttttgcacagccgagtactggcgagtatgttctatgttgggcctcctgctgcaaaacaataaacagaggacgcagaggtcctcctgcctggccacgcacctctccacagggcggcctggggtctggagatgggcgctgggcccacgggacgcagatggggccacgctctgcccgtggctggcccacgttcctggtctgcagtgctgcctcctccccagcacccctggggcacagagggcagggtcacagctgggaagaggcggggggtagaaaccaaggctggcagaagtgtagccgggctccctgataaatgctggaggaccccagggcacctgcacttactgtaccctctctgagagcatttgtatgatctcatgtctcagctctggaggctggaggtcccagaaaaccaaggtatggtagattcagtctctggtgagtacccagttcctggcttctagatggcgccttctccctgtgtgtcctcagatgatggatgaggccagggtgctctctggagtcctttctgtaagggcactgatcccatccatgaggcctcatgactcccaaagacccccactttccaacgccatcacttgggagaggggcgttttcagcgtgaatcttggggaanctgaaacagggtgacacctgngtncntctcactctgtagctcccgaaggccactccagcccccattccaacatgaacagtggaagtggtcggggtccccaaattggcagctgtggttccccggggttcacccgtgagaaatccaccccaagggggtcccccccgcgagggaccaaaagcttccttcaagcttttttttggtc

SEQ ID NO: 712796 - DNA, 335 bp, Homo sapiens
gccgttacagcatggccttgtaaagcctataaactctccttacaattcccccatttgacctgtcctagaaccagacaagccttacaagttagttcaggatctgcgccttatcaaccaaatggttgggcctatccacccggtggtgccaaacccatatactctcctatcctcaatacctccctcaacaacccattattctgttctggatctcaaacatgctttctttactattccttcgcacccttcatcccagcctctcttcactttcactgggactgaccctgacacccatcaggctcagcaattgaccggggctgtactgccacaagccagtg

SEQ ID NO: 712797 - DNA, 2323 bp, Homo sapiens
  misc_feature (122)..(122): n is a, c, g, or t
  misc_feature (2121)..(2121): n is a, c, g, or t
  misc_feature (2142)..(2142): n is a, c, g, or t
  misc_feature (2145)..(2145): n is a, c, g, or t
  misc_feature (2147)..(2147): n is a, c, g, or t
cacggatcggcagcgggactgagccgcgcccacgtggaagccgccgcaggcttcgcgcggggccccccgggtgcacgcgggcagggccggggtctcccgacgcacgaccccggagagtgttnaaagggtcggagctgcccggaggcggcggcagggctgagccagcgacgccctccattcactctccgcgcccgttctccggctgtcctcccgttccgctgcccgccctgccaccatgacggaacaggccatctccttcgccaaagacttcttggccggaggcatcgccgccgccatctccaagacggccgtggctccgatcgagcgggtcaagctgctgctgcaggtccagcacgccagcaagcagatcgccgccgacaagcagtacaagggcatcgtggactgcattgtccgcatccccaaggagcagggcgtgctgtccttctggaggggcaaccttgccaacgtcattcgctacttccccactcaagccctcaacttcgccttcaaggataagtacaagcagatcttcctggggggcgtggacaagcacacgcagttctggaggtactttgcgggcaacctggcctccggcggtgcggccggcgcgacctccctctgcttcgtgtacccgctggatttcgccagaacccgcctggcagcggacgtgggaaagtcaggcacagagcgcgagttccgaggcctgggagactgcctggtgaagatcaccaagtccgacggcatccggggcctgtaccagggcttcagtgtctccgtgcagggcatcatcatctaccgggcggcctacttcggcgtgtacgatacggccaagggcatgctccccgaccccaagaacacgcacatcgtggtgagctggatgatcgcgcagaccgtgacggccgtggccggcgtggtgtcctaccccttcgacacggtgcggcggcgcatgatgatgcagtccgggcgcaaaggagctgacatcatgtacacgggcaccgtcgactgttgggaggaagatcttcagagatgagggaggccttcttcaagggtgcgtggtccaacgtcctgcggggcatggggggcgccttcgcctggtcctgtctactagctcaaacaggtttcctccacacacacacacacaccaggggaaccaagagaaccacgtagaatcctcaaccgtgcggaccatcaaccttcgagaaattccagttgtctttttcccagccgcatcctgcctgtagatggccggggaaggctctagaaaaggggcgcattgcgatccaaccatcggcagccgattccgtgtcttgatcacggggtgggagggaaccgtggcgtccctgcgtggggcccatgggtgagacactccagtactgagacctagagtccagatgcttgtaggagccaagtcgtgttctaagtatttagtttgagagcggagaggaatcagcgttttccgcatgttgtagcttcagcgctagcccctgttttgcacagccgagtactggcgagtatgttctatgttgggcctcctgctgcaaaacaataaacagaggacgcagaggtcctcctgcctggccacgcacctctccacagggcggcctggggtctggagatgggcgctgggcccacgggacgcagatggggccacgctctgcccgtggctggcccacgttcctggtctgcagtgctgcctcctccccagcacccctggggcacagagggcagggtcacagctgggaagaggcggggggtagaaaccaaggctggcagaagtgtagccgggctccctgataaatgctggaggaccccagggcacctgcacttactgtaccctctctgagagcatttgtatgatctcatgtctcagctctggaggctggaggtcccagaaaaccaaggtatggtagattcagtctctggtgagtacccagttcctggcttctagatggcgccttctccctgtgtgtcctcagatgatggatgaggccagggtgctctctggagtcctttctgtaagggcactgatcccatccatgaggcctcatgactcccaaagacccccactttccaacgccatcacttgggagaggggcgttttcagcgtgaatcttggggaanctgaaacagggtgacacctgngtncntctcactctgtagctcccgaaggccactccagcccccattccaacatgaacagtggaagtggtcggggtccccaaattggcagctgtggttccccggggttcacccgtgagaaatccaccccaagggggtcccccccgcgagggaccaaaagcttccttcaagcttttttttggtc

SEQ ID NO: 712798 - DNA, 246 bp, Homo sapiens
acgatacccttcggggtatcataaactcccttcccctactcatcgcactaatttatactcacaacaccctacgctcacggggggtgctactatgtctccataatcatttgtttttggctcccacatgtgagtgagaacatatatgtctttctgtgtccagattatttcatttaaaataatatccacccatattcttgcaaataataggatttcattctttttatggctgaataatatttcattgtg

SEQ ID NO: 712799 - DNA, 2082 bp, Homo sapiens
  misc_feature (122)..(122): n is a, c, g, or t
cacggatcggcagcgggactgagccgcgcccacgtggaagccgccgcaggcttcgcgcggggccccccgggtgcacgcgggcagggccggggtctcccgacgcacgaccccggagagtgttnaaagggtcggagctgcccggaggcggcggcagggctgagccagcgacgccctccattcactctccgcgcccgttctccggctgtcctcccgttccgctgcccgccctgccaccatgacggaacaggccatctccttcgccaaagacttcttggccggaggcatcgccgccgccatctccaagacggccgtggctccgatcgagcgggtcaagctgctgctgcaggtccagcacgccagcaagcagatcgccgccgacaagcagtacaagggcatcgtggactgcattgtccgcatccccaaggagcagggcgtgctgtccttctggaggggcaaccttgccaacgtcattcgctacttccccactcaagccctcaacttcgccttcaaggataagtacaagcagatcttcctggggggcgtggacaagcacacgcagttctggaggtactttgcgggcaacctggcctccggcggtgcggccggcgcgacctccctctgcttcgtgtacccgctggatttcgccagaacccgcctggcagcggacgtgggaaagtcaggcacagagcgcgagttccgaggcctgggagactgcctggtgaagatcaccaagtccgacggcatccggggcctgtaccagggcttcagtgtctccgtgcagggcatcatcatctaccgggcggcctacttcggcgtgtacgatacggccaagggcatgctccccgaccccaagaacacgcacatcgtggtgagctggatgatcgcgcagaccgtgacggccgtggccggcgtggtgtcctaccccttcgacacggtgcggcggcgcatgatgatgcagtccgggcgcaaaggagctgacatcatgtacacgggcaccgtcgactgttgggaggaagatcttcagagatgagggaggccttcttcaagggtgcgtggtccaacgtcctgcggggcatggggggcgccttcggctggtcctgtacgacgagctcaagaaggtgatctaagggccgcggccctcctccacacacacacacacaccaggggaaccaagagaaccacgtagaatcctcaaccgtgcggaccatcaaccttcgagaaattccagttgtctttttcccagccgcatcctgcctgtagatggccggggaaggctctagaaaaggggcgcattgcgatccaagaaaaaaaaaaaaaaaaaaaaaaaaaaaaaaaaaaaaaaaaaaaaaaaaaaaaaaaaaaaaaaaaacggctgtgagcgcgcgccgcgcgccgcggcgcccctgagaaaacgcttccaaaaccactgggggggagagcgggggcacacaaagagagaacagagcaaaagggggcccaaggggtgcccaaggaaaaacaggggaacaaaaacaacgcagcgcgggggcagcctacccccacacaaaagaaaagagcgcgcggcgagaccacaaggacggcgtatgaacaacaacaccacaccgaggcgacctgagagacaccacaagagagggcacaaaacacaacggagaaccactaggaggaccgagaaaaaaacaaaacaacccccagagccggtggaaacaaagaaaaaaagacaaaagaagagacaacacgaaaaaaaaacagcgaaacacacacgcacaaacaaggaacaggagccacgcaggaacgaccagcacagcgccgcacggggcaccccgaccaggcggcaagacaagcggacaacgagagcggcaggaacgagcggcaaagacagacgggggggagacgaggcggagaggagccgagccgaccgaggcacggagccgaagaacgccgaaggtgaggagagagggaagagaacgaagagaggggaagaagacggcgagggagaagcaggaggaacaaagaaagaaggcgcgaaaggacgaggaaaaaaggagagacagagaaggcgacggcaagggacagcaggaagcc

SEQ ID NO: 712800 - DNA, 327 bp, Homo sapiens
aagtcactcctctctcctcagcttcccaaatgttctgggattacaggtatgagccactgcatcctaccttaatttctttctttctttctttttcagagacagagtctcactttgttgcgccggctgtgctcaaactccaggccttaagcgatactcatgccttgcatctccaaagcacatgagcaacttcttaatcattcttaagagacagagtcgtgacatgcgcccaagctgatgtcaagctcatgttctcaaagagacactctcgccgtatcctctcgagcagctgtgactacactcgacagcaagagtaccagctgacgcaac

SEQ ID NO: 712801 - DNA, 295 bp, Homo sapiens
tgcagggcaacagctactctgcgcatcttacgagctcttacttctcgctgctggttctgttctctcccagccagtaatctttgccccattttgctacttaagattctcctgagcccggaaggctcgcctggcccgtagagccctgtagaccggaccagcctctgtgatgcagccagtgcctcagtgtagaagctccacacactcaccccctcgtggtacaggcactccacgttagcatttacatctgttattgctattgtggagtgcctgtacctcagggggtgagtgtgtgtag

SEQ ID NO: 712802 - DNA, 902 bp, Homo sapiens
gggtggcggcggcggggacccttggggtctgggacgcgacgggggggaagttgaacggccccttccaagctttcggagtcggtactgtgctctcccgcaggggccgcggaagaacgatccccatttaccaggcggacccccagtgttaccccaaatgtggcctggtttttatccacccattcaacaaggggaagaccccaacaacatttgggggcaaaacccttccttttaaatctccacaagttctttaagaagaggacgccggaaaagggttcgcataatttggcggcgtgggccataccaaaaagtggtccccccaaaacccccttttttggaggcacaagaggcttacatctcaaatccagggattgtggaaagaaccaaaacgcgccgggagaacttaagacatgccccccagaggagaagggccttttaaaacccaaggcgggccaatacacagccgggagacctctcattccaaggtcggaagtcgtgggcacccttgtcgtttggaaagggaaaaagcagctatacgcgggggggtggggcgccaattaacagagtaggacataatgacaaggggcagagcgggaatttggcggcgttaaggcgggggccccaagcagagggggggcgcctccgtagctcgcgggggccctggtgttagcagcccctacgaggttacccatattaacctctggtgttggcccttaggacaccctctattccggggttttccaggaggggtgtacaccacacacacaccccaggagtgaggaaaagaagggcgagagcccggagtcaccacaaaaggcacatttgtgtgccctccgtgccttttttggtgggcgcacaagccccttttaagcacttggtggaaccacacgagagtggttagtccc

SEQ ID NO: 712803 - DNA, 181 bp, Homo sapiens
catagacatcctgaggtgctgggcctagtgttataccctgcgtgagatacactgagcctgtctagcgtagtatggcagaggaccaaatctcatgacacctagcttgtggagaccaggccagcaggagatggaaccttccagaagtgtgcagctgtggtggtgccttctgaagaagagcaga

SEQ ID NO: 712804 - DNA, 162 bp, Homo sapiens
  misc_feature (49)..(49): n is a, c, g, or t
  misc_feature (56)..(56): n is a, c, g, or t
  misc_feature (107)..(107): n is a, c, g, or t
  misc_feature (116)..(116): n is a, c, g, or t
  misc_feature (133)..(133): n is a, c, g, or t
atggatcaaactacctctataatgaagactgttctcaaaaacgcgaggnaatgtgngacgacactgacctatcagacaagagggcatgcccccctggccacctttgncgctgtttntgcaacgttcgcagtgntactctgcgtgaaccggtagactgcttgg

SEQ ID NO: 712805 - DNA, 1126 bp, Homo sapiens
  misc_feature (540)..(540): n is a, c, g, or t
  misc_feature (1123)..(1123): n is a, c, g, or t
gagaatcgcttgaacccgggatgcttgaggttgcagtgagccaagattgcaccattgcactctagcctgggtgtcaaaagcgaagctccatcacaaaaaaaaaaaaaaaaaaaatgatttataattttcccgggcgaaaaaagaggtctcttgtttcaaaaagaaaaaaaaaaaaaaaaaaaaaaaggggtttggggggggggggggctccgcgcccgccccccacacgtgcgcggcgtccgccgcaacatgtggggctgcccccgcgggcgtgcggccgcccctattttgggttccggcgagctttctaccccacagggtggttgccagaacacgccctgttgatttcccagaatctgggggtgcggctgcggccctaacagactcgcggcgtgtccccgagtcctccccgcctgggtccccgcggggggacaattcagtaccccccgggctttggacgacactatttattcacccccgaagatggtgcccccttggttaggcggcgccccacttcttctagccacagggtggcgcccnataggagagagtagacaccctttcctcatccccacataaaggcccctgtgtggagcacccactacacagccaccttcggccctttggggtttgaccaacacgcacaaacgaccgccgggggctccgacaccggggctccggcccatcgtgttgtgggcggcgcccctctgcccgtgggtgcttgtggggacccccctctggcacatatagagcgaaaccctgccgcgcagctcgcgccggccccccaactggcccccccctggtgtcgcccacagtccccccccctttatttcgccacccctttggtcatgctgggaccctgccttggcgtcgttcgttaccccgcccatacccctactgggtctctcccttaaattcccctttagtggggactccagattttggtcctcccccagatttgggcccctcctcgaggtaaagccgcgccggggccacttgtcccctgggcggggcgcggtccccgcagtacaaccccgcggcgcgaaaaaaggggggcccccaggcggttctgggggccggcccctccgcacccgctcctgccccctcccccctccctcaccangag

SEQ ID NO: 712806 - DNA, 153 bp, Homo sapiens
tactgatccgagctgagtctgcaatctacatcacagctcacggcaatgccagatcgttaacccactgagcaagggcggggatcgaacccacaacctcatggttcctagtcgattccttgaccactgcaccacgacgggaactccagttggggg

SEQ ID NO: 712807 - DNA, 610 bp, Homo sapiens
atagaattatagtagacagtgaagtatctaaacccaggaatcagattgaggcaccatgtgcatcgccttgagaattaataggctgcatttctgggttctcctttgtttgttttttttttggcccaactgagtctttctgtgaaccttttacatggaacttcttattctctaaaatcatgaagttacttgaaaatattcttggattgggaaaaacctggatgtagggccgtatgaaaaaatcattcgaaatcagatttaggggtataaggtgggataggaatgttttagaacagaagaatgtacaggcagataactaattggtcacatccaagaagtataaaacgtgctactttttccctagaacaagggacagctcattttttaggcagcctaaaccagtacagattttcttacctcctccaagtgcagattcttggtgaccttatcgattgtgtcaaaaactatttcttggggccctatgcattgccagagtgatctctaaagaacaggcaagttcaccacatttttttctgcgaggaaactaacttcccactccgtgataaacaattctctttacacacattcggataactacattttaacgacagaa

SEQ ID NO: 712808 - DNA, 130 bp, Homo sapiens
agcaccagcggcgcatcacagccttcagcagagagtttgccattctctgtccttgtcctcgctgtccagtttgatgtccagattactctatcagttttgctgtcacctccttacatgatacacgagtggt

SEQ ID NO: 712809 - DNA, 1703 bp, Homo sapiens
  misc_feature (1634)..(1634): n is a, c, g, or t
tgggggaaaaagccaggtgactttatttggctctggggggcaggggggctcagggagctctgggtgggggcggggtccgtttcctcttcaccatcacagggtcttctgggctggccgcgggatgggcgctgggccctgggggatgggctgcacaggtgcgacaggggtggggaggcggaacctgtgtggttcttggggagatctcggtggtggtctgtggaagtgcgtgcgtggaggggtgtggggggcgagagagacaatttcgtggagtgagaagtggtgggctccgacaccattagggagggggcgggacagagcgctatcatcgcgggcgtgggggcgcgggaaatctctcgcgcgcatatagagtgagaccacacgacagcggaaacaccacccatgtgtggcgcgccgcgaggcagtggcgcgggactctcacaagcgcgcccaaagagagctcgagagggcggggggaagaaaatctcgagcgcacccggtgtgagaatacgcgaggagagaggagagatgtgcgggggagcccttcatacaagggtactagggagggggccctcaagggagcgcgagggaagagagcactgtcgcgatataaatcaccactctgtgtgagctccagggagaaacagcgtgtgggagcgaccaaaggtctccacccgatcgagttggaaccaccgatattcaccgatgtggtgtcaagaaaagttgtcggccgcgaaaccagtatggggggcgggagggtgggttctccccccgcttccgcggacgaaggagcgggggcatgtaataaaacacagaccaaaagaagggacgaacccccccagaagcttaataaacaaacaatatgagggaggaaaggatctatctcaaacctagtttcaacctgtgtggaaacagcggcgcagtctaggagaggacgatagaaagacccgtaaagacgccccgcaaaaaaaacccacacagcagtcccacacgcatgtataacataacgcctaggaaaaaagaaaccatgatgatgtgccgacaaaaacccactatttttgaacaccccaacaaacaataaacgcgagaatcaaggggggggaaatacagcaacaagctgtgggagaaccccggtgggggcgccgaacgcaagaagaattatagtagaacaccccgcacgagggggtgagcacacagaagtagttgacgccaaacactaacttaattaataaacgccaacgagcagagaatataaatagtaagtagacaacgggggcgtggtaaaaaacccccgctaaaaaagcagagttcagttggaagacagaaggagaagctaaccccaggccaaacaaacaacacgccgtcgcaggggaggaagaccaacagccagtcataataagaaccccccgagtaacaacagagcagcagctattctacaaaggagataatagagaggagcaccaccgtgttattatttgagaccactgggggtagaacaatttatcagagagaggagaagagcaaacaacgtaggtgaggtagtaggacgaagatgaagataggagaacagtcgagtatagaaggcaggaatagagcacctaagactaatagtggaatgaaggcagagacgaactggnatgaacgcagaagtaagagctagcgaagaatatattaccgatggaagtgacgaagcatgcagagctaag

SEQ ID NO: 712810 - DNA, 1177 bp, Homo sapiens
  misc_feature (73)..(73): n is a, c, g, or t
  misc_feature (340)..(340): n is a, c, g, or t
  misc_feature (480)..(480): n is a, c, g, or t
  misc_feature (528)..(528): n is a, c, g, or t
  misc_feature (551)..(551): n is a, c, g, or t
  misc_feature (583)..(583): n is a, c, g, or t
  misc_feature (590)..(590): n is a, c, g, or t
  misc_feature (600)..(600): n is a, c, g, or t
  misc_feature (611)..(611): n is a, c, g, or t
  misc_feature (614)..(615): n is a, c, g, or t
  misc_feature (623)..(623): n is a, c, g, or t
  misc_feature (663)..(663): n is a, c, g, or t
  misc_feature (667)..(667): n is a, c, g, or t
  misc_feature (670)..(670): n is a, c, g, or t
  misc_feature (674)..(674): n is a, c, g, or t
  misc_feature (684)..(684): n is a, c, g, or t
  misc_feature (686)..(686): n is a, c, g, or t
ggacgccgttacccgtggggagcgttccgccatttttgaaaattaattgggaaggtactggttttaagtgtanttgccgacgcaatggcagcctttgcagtggaatcctcaggggcccgcgttaggatctgaaccaatgatgctgggttcacccacatctccaaagccaggagttaatgcccagttcttacctggatttttaactgggggatttgccagctccggtgactccacaacctcgatcaattagtggcccttcagtaggagtaatggaaatgagatcacctttacttgcaggtgggtcaccaccacaaccagttgtaccagctcataccgatanaagtggcgctccaccagttagaagtatatatgatgacatttctagcccaggacttggatcaacacctttaacttcaagaagacagccaaacatttcagtaatgcagagtcctcttgttgggagttacatctactcctggnaacaggggcaaagtatgtttagtcccagcaaagtatccggtcagccancgaaagacgacattatctcctgnccagttggatccttgttatactcaaggagatnctttganttcgaagatnacctcgatgantcnntgggtgantgtattgggttcctcaagcatctgtcttcctacatattantacnatntgcncagatgggantntctcaccatgtgatggtggtacatacaggaaaaaagggggcgtatatcgtgatcaaacttaaactgtggggcggagaaaggctctaagcagatggggggaatttggggaatcccccatgattggggttgaccctgttttgggccacgtggtttgggagcgtgaagatgtgttatcaattcacttaacttttaacaccatcaaatatggggtcccaccactgtgattgtataggttttttgagggaaaggcaaaaataaattggtccagatggacttttggggtgtctaacaaaggtggtcaaagagcaaggggggccggaaaacgtcagaaggttaattaaacgtagacagtggcgaagtgattaaaaacaggtgtgtcgggcattgttatgcacatcgtcagttgtcttgaatcacttgtcagttttttgatattgaaataagaacaagagagaggagaaaggcagagagagaaaaaagaaaagaagatg

SEQ ID NO: 712811 - DNA, 133 bp, Homo sapiens
acgaccctattacctaaatttattatgctgtggctctggcataggcctggtggctacagctcctattcgactcctagcctgggaacctccatatgcctgcgggaggcggcccaagaaattaccaaacaaaaaa

SEQ ID NO: 712812 - DNA, 290 bp, Homo sapiens
ctcctttcccctccccttttttcctcccctttgccctttgtttccttgttttgccccggcgtgggcctgggccttctccgccccccccttctagttgggggcttgtcgttgttctgccggctcccgccccgcctgtgtggaaggggggcccccgggcccttggggggccggtttctcccctcccgctggggcggccggggcgggcgagaaaggtggtgctcccgtggtggccctggggggcccttcgtttcccctccgttgctgctgttttaaaggtttcctttttgcta

SEQ ID NO: 712813 - DNA, 635 bp, Homo sapiens
tgtggctggggaagagtggaactcaatgacgatgctaaatgagaagaatgcaacttgtagttaagaccagtcggtgggacaatgcactgacagccctgtggtcttgggtgtgaattccaccttccctcctgtcatggtgctgagaggcagcgatggacggagaggacagcggcatctctaggctcttctgagagggacagagaaagaatagcaaatgttgcctaaaagcataaatgagtatcacctggagaaaattagtgcattcccgtctatggaaacacgtctctgtgagtttgcatatcatttggcgttggagccctggctcgatgcctcatggatctttctccccaaggagggccgtcttgaggggtccgagcctcaggccaaggaacccctgatgcagactctggaatccctggcccaaaggcgctgtatgggcccatctggggctgaggacaagcagatacatcatgacaactgcagaaatgtatccttctgaggaccacttagcatatgccgcagcgggtgtggcccaaccctcactcacctggggacgccgttcttccggacagtagacagcctgcctgtgccgcgagatgtcctgggggcccctgctctccctgaaagatgctgag

SEQ ID NO: 712814 - DNA, 241 bp, Homo sapiens
agtcatgtaggccactggagggcagcaagggatttatatggggacgtaggccgattccgggtgtgtaggtttctctttgggaggcttatactcatgaatctatgtctgaagctttcgagggcagactgccaagtcctggcgaaatagtagatggcaagttagtgggtttattatttttatacgggatttggcggaaacccgtatgattttgatacgccacatggagcaagtttcagcaaaa

SEQ ID NO: 712815 - DNA, 218 bp, Homo sapiens
tctagaggatcccttcgatgctgggctctagcggcggcagtccgctgcccagtcttggggggaggctgtccacagagagctttggaacagagtgaccccaggagaccatcctgttggcctgtgggctccccgtgacgtgcgtatccgtgtgcctgttgctctccttccgtgtcctggtgtgcccaccctgtgacggcaggatgtggcaaggctgggtg

SEQ ID NO: 712816 - DNA, 129 bp, Homo sapiens
  misc_feature (86)..(86): n is a, c, g, or t
  misc_feature (122)..(122): n is a, c, g, or t
tgtgtagaaaaaacttcatacgtttttctacagtgatttgtatgaaaggtaacatcaaatcaaggaatagcattcagtaaagtcangtagtgttcagtaagatgatgtaattaaatttgtanctaggga

SEQ ID NO: 712817 - DNA, 1052 bp, Homo sapiens
  misc_feature (149)..(149): n is a, c, g, or t
  misc_feature (175)..(175): n is a, c, g, or t
  misc_feature (186)..(186): n is a, c, g, or t
ccctagactgtcaggtattatccagtgcaggccaaagcccttctctcctcaactgtcagctcctatcacgacgaagaacggacaagagactccaccagcggaagcatcctgaatcttaacctggatcgaagcaaagctgagatggattngaaggagctgagcgagtcggtccagnaacagtccacncctgttcctctcatctctcccaagcgccagatctcgtagcaggttccagctgaactcttgacaagcaccatacagagttgcaaagcacaacttaggcataaatgacacatctcggacacatgtctatacggccgatagagcacagcgattcggaggcatctgagcacgctcagcatagctagcgcatagctgagcgtatactcacgctgcatgcatgagccacgcacacgctcctccagcaccacgagcccagcacagaccacagcacgcgacacaccgccaagcgcctagatccacgcatgcgccaccacaacgcagccccaactccctgacactgcctccacccacacccccacagcccccaacacagcccaccttaatcacaacaccaccccaacgcatgcccacgcaccatctaacacaagacacgagaaaaacacttggcacacaacacacggccaccggcttccacacccaacggccccacaacggcaacacacaaagggccaacgaaacaaccccttgggcaacgtactcaacaccatcacaacaatgtgaacaccatacgtgccaccccacacaccccccccttaattcgcccccatttaaccgacacacgggacacccaatcataatatcaccctagaaaaaccacacagagcatcatcaaatataccccctttttccaaaccccctgtccaataccacccaccaaacattcaatccacgccagcacatttaccctaccccctttgcaacacacagcgcgagaaacccacaacactctaccttcaccacaccacacccatcaccaaaattatctcccccaccactaacaccacgcaaacctttccccaacatccatc

SEQ ID NO: 712818 - DNA, 146 bp, Homo sapiens
tggaccgatttgacgcgtctcctctttgctgattctgtgtttggcccaatgcagcctgtcctgcgtcttcttgtctgcgatgctgaaacctggcctacccagcaccacatagaagtccaggccgtagataccaatgcttgggtcat

SEQ ID NO: 712819 - DNA, 943 bp, Homo sapiens
ttggcttatatagaaaagaagctaaataatcatcttattttaaagctaacctaacatttgtcttttaatctagtcatttgatttgtgaatatgatatgtagtagtcccaaagaatagaaaatccaacaatctggcaagtacttaacagtgtgtgttattttttactgttgttcctttttttctttttctgttacatatatcccagtcacttttttttttttttttttttttggaaaatgggatgtctttgcttgtttgttgcgcccaggctgctgtgggcccaatctcggttctttggcaacctccacttccggggttcaaggtgattctcctgcctcagcctctcgagtacgctggggtttcacgggtgccaccaccaccgcccggttaatttttggtttttagtaagagatggggtgtttccccttgttggccaggctggtctcaattctcctgacctcaggtgatctgcctgtttcggcctcccaaagtacggggtttacgggcgtgagccacagccacccaccccgtggtcacgtttttaaagccactttcatatccagttttcattggctcacacctgtattcccagctacttaggaggccgacgcagaagggattggttgaggacagaagttcaagacagctgagaaggttgggaagactctggcttcctaaaattaaaaactttagaattgtaaaaacctccctttagggaagccttttttaatgaggacatatgtgggcacatatataggaaaaccagcccctggaaagttcaggacataaaaaggggcggccaagtgacacggggcgaaagtctcaatatcagagagtatgaggtgaaactgttcacaccgctttcattgtagacagatgtgtccagtttaagtgtaaccctcccggaaattagtgttgtaaaaaacggttacagtgacaaatc

SEQ ID NO: 712820 - DNA, 268 bp, Homo sapiens
ctagtttctgtatactctttctgaatacctagaagggttctacttgtcagtgaaacctcatgcacgccctggaacacacacaagataaagtctccaggccaacagtgatcaagactgcatttttctttttctttcatgtaagctttctatttttttttttttttcggagatgggtttccactcttggttacctttaaacggtccttccttgaagcttatccgggtctccgctcacaaagagggcagggagaccagggtagacgcgagg

SEQ ID NO: 712821 - DNA, 113 bp, Homo sapiens
tgctgggattacaggtgtgaggcaccgcacctagccaactgctgatttctttagggcatggtccccataaacttttcataaagtatcagtgagcccaacatgggggtaccgag

SEQ ID NO: 712822 - DNA, 657 bp, Homo sapiens
tattcaggagcctaagaccctcccagtagcccagtgtgcttcaccgcattaccgcaagccattgagcacatcacccaaagcagtggccaacatcgcggacccctgtgccttgtcacagatgggtgctggtcctcaggcgttgggtgacactgcgtggggtcgagtgggcgtcggatttctgccagtttctgctctgacagtccaaatgactggtcagaagcagttgtcacttcagtaagcagtcaagtgctcaagagacactggcaaccgttcagtggtacttaggtattcgaaatatacaactacagattctctgacagaaaccagcacggggtcttcaccttcattcaccccacaggcgacatgctgagggagaacagcatctcagttggtgattcccaaaccaagcctttgtgttcggtgtaggggtgcggggggtctgctttaatgttttcgaaacttgtccgactgttgggcttcgtattgggatgtccactgaggaggtactggcattttaggggcctgttgtaccgggacatcgcaagcttgtgaacgacccatcggatcttgtattcccatgtgcgttgcgtcctgaatagagtttgcgttccccacgggccccttggggccccccccggggtgcttttttgggggcca

SEQ ID NO: 712823 - DNA, 184 bp, Homo sapiens
ctcgaattgcgctggtacccccgactagcccgacaggcggctggcgggcgggggctgacccccacgcctcctcccggacggggcggctgccaggcggaggggctcctcacttctcagccggggtggctgctgggcggagccgctcctcacttcccagacagggtggctgtcgggctcgtcgggg

SEQ ID NO: 712824 - DNA, 285 bp, Homo sapiens
catctcatctagctttattttaaatcagtaactaaacaaccatattgattgttgtgaattgggaaaacccctgggaatattataaaaatcactgaattgtacattttaaatgggtgaattttatggtatgttaattatatatcaatagaacagaatttgtgtgtgtgtgtgtgtgtgtgtgtgtgtgtgtgtgtgtcactgtattagacaggattctccagagaataatgtttcttcactctctaaagacacagctccttacatgagctttggtggaggtaaaga

SEQ ID NO: 712825 - DNA, 1899 bp, Homo sapiens
  misc_feature (122)..(122): n is a, c, g, or t
cacggatcggcagcgggactgagccgcgcccacgtggaagccgccgcaggcttcgcgcggggccccccgggtgcacgcgggcagggccggggtctcccgacgcacgaccccggagagtgttnaaagggtcggagctgcccggaggcggcggcagggctgagccagcgacgccctccattcactctccgcgcccgttctccggctgtcctcccgttccgctgcccgccctgccaccatgacggaacaggccatctccttcgccaaagacttcttggccggaggcatcgccgccgccatctccaagacggccgtggctccgatcgagcgggtcaagctgctgctgcaggtccagcacgccagcaagcagatcgccgccgacaagcagtacaagggcatcgtggactgcattgtccgcatccccaaggagcagggcgtgctgtccttctggaggggcaaccttgccaacgtcattcgctacttccccactcaagccctcaacttcgccttcaaggataagtacaagcagatcttcctggggggcgtggacaagcacacgcagttctggaggtactttgcgggcaacctggcctccggcggtgcggccggcgcgacctccctctgcttcgtgtacccgctggatttcgccagaacccgcctggcagcggacgtgggaaagtcaggcacagagcgcgagttccgaggcctgggagactgcctggtgaagatcaccaagtccgacggcatccggggcctgtaccagggcttcagtgtctccgtgcagggcatcatcatctaccgggcggcctacttcggcgtgtacgatacggccaagggcatgctccccgaccccaagaacacgcacatcgtggtgagctggatgatcgcgcagaccgtgacggccgtggccggcgtggtgtcctaccccttcgacacggtgcggcggcgcatgatgatgcagtccgggcgcaaaggagctgacatcatgtacacgggcaccgtcgactgttgggaggaagatcttcagagatgagggaggccttcttcaagggtgcgtggtccaacgtcctgcggggcatggggggcgccttcggctggtcctgtacgacgagctcaagaaggtgatctaagggccgcggcctcctccacacacacacacacaccaggggaaccaagagaaccacgtagaatcctcaaccgtgcggaccatcaaccttcgagaaattccagttgtctttttcccagccgcatcctgcctgtagatggccggggaaggctctagaaaaggggcgcattgcgatccaaccatcggcagccgattccgtgtcttgatcacggggtgggagggaaccgtggcgtccctgcgtggggcccatgggtgagacactccagtactgagacctagagtccagatgcttgtaggagccaagtcgtgttctaagtatttatttaaaacaaaagaatcacgttttcccatttcttcagcgctagcccctgttttgcacagccgagtactggcgagtatgttctatgttgggcctcctgctgcaaaacaataaacagaggacgcagaggtcctcctgcctggccaaaaaaaaaaaaaaaaaaaaaaaaaacggggggtaaaggggggggggggaaaaaggagggtcactgaaggggccaagcgtcataccgggtcccgggacccaggtttccttgggaccagggggaactcctgcggggccccaaaagagggggcgaataattcagaaacgcgggtactgtagagttggcgagagacgacgagggaacaccaccaacaggagaatggggcagcgaacactccatcagcaccacacgcgccaatgaggacaaaaaacacacaacacgagcagaaccaaaccaacacagcagatcgaa

SEQ ID NO: 712826 - DNA, 2503 bp, Homo sapiens
  misc_feature (122)..(122): n is a, c, g, or t
  misc_feature (2015)..(2015): n is a, c, g, or t
  misc_feature (2126)..(2126): n is a, c, g, or t
  misc_feature (2301)..(2301): n is a, c, g, or t
  misc_feature (2320)..(2320): n is a, c, g, or t
  misc_feature (2322)..(2322): n is a, c, g, or t
  misc_feature (2430)..(2430): n is a, c, g, or t
  misc_feature (2471)..(2471): n is a, c, g, or t
  misc_feature (2494)..(2494): n is a, c, g, or t
cacggatcggcagcgggactgagccgcgcccacgtggaagccgccgcaggcttcgcgcggggccccccgggtgcacgcgggcagggccggggtctcccgacgcacgaccccggagagtgttnaaagggtcggagctgcccggaggcggcggcagggctgagccagcgacgccctccattcactctccgcgcccgttctccggctgtcctcccgttccgctgcccgccctgccaccatgacggaacaggccatctccttcgccaaagacttcttggccggaggcatcgccgccgccatctccaagacggccgtggctccgatcgagcgggtcaagctgctgctgcaggtccagcacgccagcaagcagatcgccgccgacaagcagtacaagggcatcgtggactgcattgtccgcatccccaaggagcagggcgtgctgtccttctggaggggcaaccttgccaacgtcattcgctacttccccactcaagccctcaacttcgccttcaaggataagtacaagcagatcttcctggggggcgtggacaagcacacgcagttctggaggtactttgcgggcaacctggcctccggcggtgcggccggcgcgacctccctctgcttcgtgtacccgctggatttcgccagaacccgcctggcagcggacgtgggaaagtcaggcacagagcgcgagttccgaggcctgggagactgcctggtgaagatcaccaagtccgacggcatccggggcctgtaccagggcttcagtgtctccgtgcagggcatcatcatctaccgggcggcctacttcggcgtgtacgatacggccaagggcatgctccccgaccccaagaacacgcacatcgtggtgagctggatgatcgcgcagaccgtgacggccgtggccggcgtggtgtcctaccccttcgacacggtgcggcggcgcatgatgatgcagtccgggcgcaaaggagctgacatcatgtacacgggcaccgtcgactgttgggaggaagatcttcagagatgagggaggccttcttcaagggtgcgtggtccaacgtcctgcggggcatggggggcgccttcgcctggtcctgtctactagctcaaacaggtttcctccacacacacacacacaccaggggaaccaagagaaccacgtagaatcctcaaccgtgcggaccatcaaccttcgagaaattccagttgtctttttcccagccgcatcctgcctgtagatggccggggaaggctctagaaaaggggcgcattgcgatccaaccatcggcagccgattccgtgtcttgatcacggggtgggagggaaccgtggcgtccctgcgtggggcccatgggtgagacactccagtactgagacctagagtccagatgcttgtaggagccaagtcgtgttctaagtatttatttaaaacaaaagaatcacgttttcccatttaaaaaaaaaaaaaaaaaaaaaaaaaaaaaaaaaaaaaaaaaaaaaaaaaaaaaaaaaaaaaaaaaaaaaaaaaaaaaaaaaaaaaaaaaattttttataatatatattttttcaattacttgacattccccaactctatcatcgttaatccccttccccctctttcctttaacccttcctctcatcatctctttctccccccttctctctatccttcacttacattctcctcactccttttaccctaactcttcattctttctccacattcccctctacttctgtcaacatctactctcttcccccactatcttttctcactcccactcctctttctcccataccattcaccttctttcccccttcttcctcatcctttctcctcttccttctttacatctacttttcatctcccccacaatcttttcaataatctcctattctttattattcctccacctccttttatccacaatatctttaatcctttctttctctatactctctctatattctcactccaactacccattctctcttctatcttttatacttantatattatacctctcttcttctttataactaatatcccactcttccaattctccttctccttcacattactctctatccattttctcactcaacttctcttcctcttcatntatcatctcttcttctatttctcctctttattctctctctcatctctttttctacatcactcttctcattctatctctcacttctaatttcttataatctctttccctattcctctcatacttccacactatccgtctcatctatcatttatctctctctactctatctctattnctacctcacatatatactncnccttactccttctatctctctcttacctatcatatcttctcttctttcacttctctcatcctccctcctatctccctctccattcctctaacatatttcattccaccntcttatttactctcattacttctctctcttatcacctcgcntatatcactctcttatcccttcntataccccc

SEQ ID NO: 712827 - DNA, 150 bp, Homo sapiens
actatgttgatttatcctcgtgttttacttcatgcatgcttcagtaccgctctgcagatgagccgatgaccaccttctacaagtgctgcaatgctcagtgtggacaccgctgtgagggattagaggccgaggatgtgccagtctgcccta

SEQ ID NO: 712828 - DNA, 1881 bp, Homo sapiens
  misc_feature (122)..(122): n is a, c, g, or t
cacggatcggcagcgggactgagccgcgcccacgtggaagccgccgcaggcttcgcgcggggccccccgggtgcacgcgggcagggccggggtctcccgacgcacgaccccggagagtgttnaaagggtcggagctgcccggaggcggcggcagggctgagccagcgacgccctccattcactctccgcgcccgttctccggctgtcctcccgttccgctgcccgccctgccaccatgacggaacaggccatctccttcgccaaagacttcttggccggaggcatcgccgccgccatctccaagacggccgtggctccgatcgagcgggtcaagctgctgctgcaggtccagcacgccagcaagcagatcgccgccgacaagcagtacaagggcatcgtggactgcattgtccgcatccccaaggagcagggcgtgctgtccttctggaggggcaaccttgccaacgtcattcgctacttccccactcaagccctcaacttcgccttcaaggataagtacaagcagatcttcctggggggcgtggacaagcacacgcagttctggaggtactttgcgggcaacctggcctccggcggtgcggccggcgcgacctccctctgcttcgtgtacccgctggatttcgccagaacccgcctggcagcggacgtgggaaagtcaggcacagagcgcgagttccgaggcctgggagactgcctggtgaagatcaccaagtccgacggcatccggggcctgtaccagggcttcagtgtctccgtgcagggcatcatcatctaccgggcggcctacttcggcgtgtacgatacggccaagggcatgctccccgaccccaagaacacgcacatcgtggtgagctggatgatcgcgcagaccgtgacggccgtggccggcgtggtgtcctaccccttcgacacggtgcggcggcgcatgatgatgcagtccgggcgcaaaggagctgacatcatgtacacgggcaccgtcgactgttgggaggaagatcttcagagatgagggaggccttcttcaagggtgcgtggtccaacgtcctgcggggcatggggggcgccttcgcctggtcctgtctactagctcaaacaggtttcctccacacacacacacacaccaggggaaccaagagaaccacgtagaatcctcaaccgtgcggaccatcaaccttcgagaaattccagttgtctttttcccagccgcatcctgcctgtagatggccggggaaggctctagaaaaggggcgcattgcgatccaaccatcggcagccgattccgtgtcttgatcacggggtgggagggaaccgtggcgtccctgcgtggggcccatgggtgagacactccagtactgagacctagagtccagatgcttgtaggagccaagtcgtgttctaagtatttatttaaaacaaaagaatcacgttttcccatttcttcagcgctagcccctgttttgcacagccgagtactggcgagtatgttctatgttgggcctcctgctgcaaaacaataaacagaggacgcagaaaaaaaaaaaacgacacgaagggcaaaaaaaaaaatgatgtggcgcgccgtggatccccggcgaaaaagacgtttctagaagaaccactctgcgtggggccgcgcggcgcccccgaacacggtcacaagtgaaaagtgggccacagagaggtgttcctaaaggaaaaccgcgggtcaatgaacagggtggcggggcattctccccccaatataaaaaagcgaccgggggggaacacacacgggtcgcgaaaaaaacccccgaggggagtcgggagggccacgaggggccccaacaaaagggggagccaagggagcccgaatacagtcgc

SEQ ID NO: 712829 - DNA, 1877 bp, Homo sapiens
  misc_feature (122)..(122): n is a, c, g, or t
cacggatcggcagcgggactgagccgcgcccacgtggaagccgccgcaggcttcgcgcggggccccccgggtgcacgcgggcagggccggggtctcccgacgcacgaccccggagagtgttnaaagggtcggagctgcccggaggcggcggcagggctgagccagcgacgccctccattcactctccgcgcccgttctccggctgtcctcccgttccgctgcccgccctgccaccatgacggaacaggccatctccttcgccaaagacttcttggccggaggcatcgccgccgccatctccaagacggccgtggctccgatcgagcgggtcaagctgctgctgcaggtccagcacgccagcaagcagatcgccgccgacaagcagtacaagggcatcgtggactgcattgtccgcatccccaaggagcagggcgtgctgtccttctggaggggcaaccttgccaacgtcattcgctacttccccactcaagccctcaacttcgccttcaaggataagtacaagcagatcttcctggggggcgtggacaagcacacgcagttctggaggtactttgcgggcaacctggcctccggcggtgcggccggcgcgacctccctctgcttcgtgtacccgctggatttcgccagaacccgcctggcagcggacgtgggaaagtcaggcacagagcgcgagttccgaggcctgggagactgcctggtgaagatcaccaagtccgacggcatccggggcctgtaccagggcttcagtgtctccgtgcagggcatcatcatctaccgggcggcctacttcggcgtgtacgatacggccaagggcatgctccccgaccccaagaacacgcacatcgtggtgagctggatgatcgcgcagaccgtgacggccgtggccggcgtggtgtcctaccccttcgacacggtgcggcggcgcatgatgatgcagtccgggcgcaaaggagctgacatcatgtacacgggcaccgtcgactgttgggaggaagatcttcagagatgagggaggccttcttcaagggtgcgtggtccaacgtcctgcggggcatggggggcgccttcggctggtcctgtacgacgagctcaagaaggtgatctaagggccgcggcctcctccacacacacacacacaccaggggaaccaagagaaccacgtagaatcctcaaccgtgcggaccatcaaccttcgagaaattccagttgtctttttcccagccgcatcctgcctgtagatggccggggaaggctctagaaaaggggcgcattgcgatccaaccatcggcagccgattccgtgtcttgatcacggggtgggagggaaccgtggcgtccctgcgtggggcccatgggtgagacactccagtactgagacctagagtccagatgcttgtaggagccaagtcgtgttctaagtatttatttaaaacaaaagaatcacgttttcccatttcttcagcgctagcccctgttttgcacagccgagtactggcgagtatgttctatgttgggcctcctgctgcaaaacaataaacagaggacgcagaggtcctcctgcctggccaaaaaaaaaaaaaaaaaaaaaaaaaaaaaaaaaaaaaaaaaaaaaaaaaaaaaaaaaaattaaaaaataaaaattttaaaaaaaatttaaatataatgtacgatattttttcttaattgtaatattatccaactccgggccaaatttggggctatattgccccatttccccctttgggggggcctagtcaaagctcagggggcgtggtttttcatcccggtggcgttgtgaacaacttggggtaccccccattgaccggtatggtgctcgctccttattccgagtgtggc

SEQ ID NO: 712830 - DNA, 1182 bp, Homo sapiens
gaattccggaagacacttgaaactgatacagttacaggtaagtctggtgagaagattgactactctacaacacctcgaattgatgaatggcgtgacaagggttatcgcttagttgaagatggtttcgctgaagcaggcacaccggtttatgatgataatgatgatgtcgaacaaatctttatcgttaaattggatcatgatactgcaccagttgggccaaatgatccacatgaaccagaaacaccaatcaatccaaacgatccaaatggaccaaagtggccagctaaggatagctacacaaaacaatatacgtcaacggttcattttgtagatgaaaacggtaataaactacacgattataacgttcaaacatcaaattggacacgaacattgattgtcgataaggctactggtgaaatcttgaatccagatgaagcatggcattctgatattgataagtattctgatgtcaaagttgatcctattaagggctactatactgaccgcaatagtgtaccaggtgaagtagcacaacaacaagatattgtgaatacggttgtttataagcaaattggtaagattgtaccggttgatccatcaggaaacccaattccagatgcaccaacaccacaatacagaaacaatcctaacgatccaactaaggttatcgtaacgaatacgccagaaattccaggtatgacaccagaagtaccaagtgttacaccagaaaatccaggtgaagatacaccaattgtttacaacaaggttgaaacaccaacaccaaagacagtagatgtgacaccagaaacgccgaaaacagtcgacgttacgtcagaaacaccaaaggcaacaccagttaaaactgcgcctcaagttgaaaaagttaaggcgccagaattaccacaaactggtgaaaagcaaaataaggcgttaactgccgtcggtgcatctattatgactggtctattaggaatccttgcctttgctaagaaaaagaaggatgacaaagaaatctagtcatttggtttaagaaagaagagtcgaaagactctttttttattggtgtgcgtgataataggttaattattttttggtaatatctcatgaaaaactatgcataattttaggtgcaaattagccaacgatatatcaatatttttatataatagttgcccggaattc

SEQ ID NO: 712831 - DNA, 1967 bp, Homo sapiens
  misc_feature (122)..(122): n is a, c, g, or t
  misc_feature (1967)..(1967): n is a, c, g, or t
cacggatcggcagcgggactgagccgcgcccacgtggaagccgccgcaggcttcgcgcggggccccccgggtgcacgcgggcagggccggggtctcccgacgcacgaccccggagagtgttnaaagggtcggagctgcccggaggcggcggcagggctgagccagcgacgccctccattcactctccgcgcccgttctccggctgtcctcccgttccgctgcccgccctgccaccatgacggaacaggccatctccttcgccaaagacttcttggccggaggcatcgccgccgccatctccaagacggccgtggctccgatcgagcgggtcaagctgctgctgcaggtccagcacgccagcaagcagatcgccgccgacaagcagtacaagggcatcgtggactgcattgtccgcatccccaaggagcagggcgtgctgtccttctggaggggcaaccttgccaacgtcattcgctacttccccactcaagccctcaacttcgccttcaaggataagtacaagcagatcttcctggggggcgtggacaagcacacgcagttctggaggtactttgcgggcaacctggcctccggcggtgcggccggcgcgacctccctctgcttcgtgtacccgctggatttcgccagaacccgcctggcagcggacgtgggaaagtcaggcacagagcgcgagttccgaggcctgggagactgcctggtgaagatcaccaagtccgacggcatccggggcctgtaccagggcttcagtgtctccgtgcagggcatcatcatctaccgggcggcctacttcggcgtgtacgatacggccaagggcatgctccccgaccccaagaacacgcacatcgtggtgagctggatgatcgcgcagaccgtgacggccgtggccggcgtggtgtcctaccccttcgacacggtgcggcggcgcatgatgatgcagtccgggcgcaaaggagctgacatcatgtacacgggcaccgtcgactgttgggaggaagatcttcagagatgagggaggccttcttcaagggtgcgtggtccaacgtcctgcggggcatggggggcgccttcgcctggtcctgtctactagctcaaacaggtttcctccacacacacacacacaccaggggaaccaagagaaccacgtagaatcctcaaccgtgcggaccatcaaccttcgagaaattccagttgtctttttcccagccgcatcctgcctgtagatggccggggaaggctctagaaaaggggcgcattgcgatccaaccatcggcagccgattccgtgtcttgatcacggggtgggagggaaccgtggcgtccctgcgtggggcccatgggtgagacactccagtactgagacctagagtccagatgcttgtaggagcaagtcgtgttctaagtatttatttaaaacaaaagaatcacgttttcccatttgtacttcagcgctagcccctgttttgcacagccgagtactggcgagtatgttctatgttgggcctcctgctgcaaaacaataaacagaggacgcagaggtcctcctgcctggccaaaaaaaaaaaaaaaaaaaaaaaaaaaaaaaaagggggggggggtaaaaaattctccccgggggggcccaatttcggttccccgttttttttgtaaaagggggccccaaaaggggaggcgggtattaataaagaggaagagggcaggggggcgcggcgggttaacacaccggtggtgagcgggggagaaccggcgtgctgtggggtatcttgtgggagaggaggacccttattctcgtggggtggcggcgcctttgctcgggcaacttcccttaaagagaaatttaatagtcgaagggggaaacttttacactttcgcgtgtttgttggtgtaccccacggcggataattggtgcgcggtagaaaggttcgggtgcccgtgtattggtttatgaan

SEQ ID NO: 712832 - DNA, 127 bp, Homo sapiens
gagccttagaggttaacaaacagcgaaacgccgtcgaggttatcacgagagacagaaaacaacatgaacaggagcagtgctgaacatcgactggaaccatgtggtctggctgcagattggacccaga

SEQ ID NO: 712833 - DNA, 2412 bp, Homo sapiens
  misc_feature (122)..(122): n is a, c, g, or t
  misc_feature (1527)..(1527): n is a, c, g, or t
cacggatcggcagcgggactgagccgcgcccacgtggaagccgccgcaggcttcgcgcggggccccccgggtgcacgcgggcagggccggggtctcccgacgcacgaccccggagagtgttnaaagggtcggagctgcccggaggcggcggcagggctgagccagcgacgccctccattcactctccgcgcccgttctccggctgtcctcccgttccgctgcccgccctgccaccatgacggaacaggccatctccttcgccaaagacttcttggccggaggcatcgccgccgccatctccaagacggccgtggctccgatcgagcgggtcaagctgctgctgcaggtccagcacgccagcaagcagatcgccgccgacaagcagtacaagggcatcgtggactgcattgtccgcatccccaaggagcagggcgtgctgtccttctggaggggcaaccttgccaacgtcattcgctacttccccactcaagccctcaacttcgccttcaaggataagtacaagcagatcttcctggggggcgtggacaagcacacgcagttctggaggtactttgcgggcaacctggcctccggcggtgcggccggcgcgacctccctctgcttcgtgtacccgctggatttcgccagaacccgcctggcagcggacgtgggaaagtcaggcacagagcgcgagttccgaggcctgggagactgcctggtgaagatcaccaagtccgacggcatccggggcctgtaccagggcttcagtgtctccgtgcagggcatcatcatctaccgggcggcctacttcggcgtgtacgatacggccaagggcatgctccccgaccccaagaacacgcacatcgtggtgagctggatgatcgcgcagaccgtgacggccgtggccggcgtggtgtcctaccccttcgacacggtgcggcggcgcatgatgatgcagtccgggcgcaaaggagctgacatcatgtacacgggcaccgtcgactgttgggaggaagatcttcagagatgagggaggccttcttcaagggtgcgtggtccaacgtcctgcggggcatggggggcgccttcgcctggtcctgtctactagctcaaacaggtttcctccacacacacacacacaccaggggaaccaagagaaccacgtagaatcctcaaccgtgcggaccatcaaccttcgagaaattccagttgtctttttcccagccgcatcctgcctgtagatggccggggaaggctctagaaaaggggcgcattgcgatccaaccatcggcagccgattccgtgtcttgatcacggggtgggagggaaccgtggcgtccctgcgtggggcccatgggtgagacactccagtactgagacctagagtccagatgcttgtaggagccaagtcgtgttctaagtatttatttaaaacaaaaaaaaaaaaaaaaaaaaaaaaaaaaaaaaaaaaaaaaaaaaaaaaaaaaaaaaaaaaaaaaaaaaaaaaaaaaaaaaaaaaaggggggngcgcgcgcgcgctaaagaaatatctctcctctagagagggcgcccacaatataactctcacgcgacgcaccgacacttattcttataaagaaagaagagggcgcacccctatatatagagcaggccagatatatatatataatgcacagagcgccttagggcgcgcaggcgagtttatacacgcgagagggtggcgagagggtgcgtgagcagacaccaaccgcgtggagcacaggtggggggaactctcttgtgtgctggagagaggagagagaccctctcatctctatctccgtgggtggggagaggagagaaaaaaaaaaaatgtgtgtgagtgacgaaaacaactaccccccaaccgacaggcagcaggatatataatatacggcgcgcccactccgagggagaggggagaaacaatcacatagtatcaccaagagatctcatgacgagaggggcgcgtgctatagcacacagggcgagtgcttatgacacaccaccaactgacacgggcgcgactccgaactaatacgacacaaccgagcggcgcgcgccgcgaagggacggccgtctgtgagcgagcgacagacaagggagaggggtgttataactatctaatggacacaagagcactttctctctatactaccaccgggggggcaccttcactactgggctgctgacattaacgacgcgacggggcgggggagtagcgcggcgtccgcggacgggcggatgcaacgacgccaagacaaccaggaccgcgcgccgcacgacggcgcgagcacgacgagaagtgcgatggacggggcgagagggcgcacagcgcgcaccgacgccaccaccctccgaggcgagcccacccgaccgcccccccgagccacc

SEQ ID NO: 712834 - DNA, 1857 bp, Homo sapiens
  misc_feature (122)..(122): n is a, c, g, or t
  misc_feature (1546)..(1546): n is a, c, g, or t
  misc_feature (1549)..(1549): n is a, c, g, or t
  misc_feature (1623)..(1623): n is a, c, g, or t
  misc_feature (1656)..(1656): n is a, c, g, or t
  misc_feature (1661)..(1661): n is a, c, g, or t
  misc_feature (1665)..(1665): n is a, c, g, or t
  misc_feature (1668)..(1668): n is a, c, g, or t
  misc_feature (1670)..(1670): n is a, c, g, or t
  misc_feature (1687)..(1689): n is a, c, g, or t
  misc_feature (1692)..(1692): n is a, c, g, or t
  misc_feature (1699)..(1699): n is a, c, g, or t
  misc_feature (1704)..(1704): n is a, c, g, or t
  misc_feature (1709)..(1710): n is a, c, g, or t
  misc_feature (1716)..(1718): n is a, c, g, or t
  misc_feature (1722)..(1722): n is a, c, g, or t
  misc_feature (1724)..(1724): n is a, c, g, or t
  misc_feature (1730)..(1730): n is a, c, g, or t
cacggatcggcagcgggactgagccgcgcccacgtggaagccgccgcaggcttcgcgcggggccccccgggtgcacgcgggcagggccggggtctcccgacgcacgaccccggagagtgttnaaagggtcggagctgcccggaggcggcggcagggctgagccagcgacgccctccattcactctccgcgcccgttctccggctgtcctcccgttccgctgcccgccctgccaccatgacggaacaggccatctccttcgccaaagacttcttggccggaggcatcgccgccgccatctccaagacggccgtggctccgatcgagcgggtcaagctgctgctgcaggtccagcacgccagcaagcagatcgccgccgacaagcagtacaagggcatcgtggactgcattgtccgcatccccaaggagcagggcgtgctgtccttctggaggggcaaccttgccaacgtcattcgctacttccccactcaagccctcaacttcgccttcaaggataagtacaagcagatcttcctggggggcgtggacaagcacacgcagttctggaggtactttgcgggcaacctggcctccggcggtgcggccggcgcgacctccctctgcttcgtgtacccgctggatttcgccagaacccgcctggcagcggacgtgggaaagtcaggcacagagcgcgagttccgaggcctgggagactgcctggtgaagatcaccaagtccgacggcatccggggcctgtaccagggcttcagtgtctccgtgcagggcatcatcatctaccgggcggcctacttcggcgtgtacgatacggccaagggcatgctccccgaccccaagaacacgcacatcgtggtgagctggatgatcgcgcagaccgtgacggccgtggccggcgtggtgtcctaccccttcgacacggtgcggcggcgcatgatgatgcagtccgggcgcaaaggagctgacatcatgtacacgggcaccgtcgactgttgggaggaagatcttcagagatgagggaggccttcttcaagggtgcgtggtccaacgtcctgcggggcatggggggcgccttcgcctggtcctgtctactagctcaaacaggtttcctccacacacacacacacaccaggggaaccaagagaaccacgtagaatcctcaaccgtgcggaccatcaaccttcgagaaattccagttgtctttttcccagccgcatcctgcctgtagatggccggggaaggctctagaaaaggggcgcattgcgatccaaccatcggcagccgattccgtgtcttgatcacggggtgggagggaaccgtggcgtccctgcgtggggcccatgggtgagacactccagtactgagacctagagtccagatgcttgtaggagcaagtcgtgttctaagtatttatttaaaacaaaagaatcacgttttcccatttgtacaaacaactccaaccaaaaaataaaaaaatgtgggccgctttggccaagtcgactttagactcgggcaggtttttccatcgcgccntgnggccgaatttggggttaattgggccaattccccttatggggggcggattaacaattaatgggccggggtttaanaacgtgcggactgggaaaaccctggggttcccnaattnaatngcntngaaaaaatccccttttnnncanttggggnaatancaaannggcccnnncggntngccttnccaaaaagtggccaagcctgattgccaaagggaaatggaaggggtaaaaatttggtaaaaattcgggttaaattttggtaaaacggttaatttttaaccaatgcccgaattcgaaaaatcctttttg

SEQ ID NO: 712835 - DNA, 268 bp, Homo sapiens
gtacagcatgtctcttcctaaccctaaacgaagaaaacagcagcagctttaaaaatagctataggttgctaatctgacactaaatttaatcacagaactaagagcaagcctaatactctactctgtcacagactgggcactgaggtaaatgctttacaaatatacacaataaacattataaccccgtaacaatcctacagggatggacacaaacactcagaaaattaagtagcatgtaaggtcatctagctcgacaacattgtgatta

SEQ ID NO: 712836 - DNA, 1884 bp, Homo sapiens
  misc_feature (122)..(122): n is a, c, g, or t
cacggatcggcagcgggactgagccgcgcccacgtggaagccgccgcaggcttcgcgcggggccccccgggtgcacgcgggcagggccggggtctcccgacgcacgaccccggagagtgttnaaagggtcggagctgcccggaggcggcggcagggctgagccagcgacgccctccattcactctccgcgcccgttctccggctgtcctcccgttccgctgcccgccctgccaccatgacggaacaggccatctccttcgccaaagacttcttggccggaggcatcgccgccgccatctccaagacggccgtggctccgatcgagcgggtcaagctgctgctgcaggtccagcacgccagcaagcagatcgccgccgacaagcagtacaagggcatcgtggactgcattgtccgcatccccaaggagcagggcgtgctgtccttctggaggggcaaccttgccaacgtcattcgctacttccccactcaagccctcaacttcgccttcaaggataagtacaagcagatcttcctggggggcgtggacaagcacacgcagttctggaggtactttgcgggcaacctggcctccggcggtgcggccggcgcgacctccctctgcttcgtgtacccgctggatttcgccagaacccgcctggcagcggacgtgggaaagtcaggcacagagcgcgagttccgaggcctgggagactgcctggtgaagatcaccaagtccgacggcatccggggcctgtaccagggcttcagtgtctccgtgcagggcatcatcatctaccgggcggcctacttcggcgtgtacgatacggccaagggcatgctccccgaccccaagaacacgcacatcgtggtgagctggatgatcgcgcagaccgtgacggccgtggccggcgtggtgtcctaccccttcgacacggtgcggcggcgcatgatgatgcagtccgggcgcaaaggagctgacatcatgtacacgggcaccgtcgactgttgggaggaagatcttcagagatgagggaggccttcttcaagggtgcgtggtccaacgtcctgcggggcatggggggcgccttcgcctggtcctgtctactagctcaaacaggtttcctccacacacacacacacaccaggggaaccaagagaaccacgtagaatcctcaaccgtgcggaccatcaaccttcgagaaattccagttgtctttttcccagccgcatcctgcctgtagatggccggggaaggctctagaaaaggggcgcattgcgatccaaccatcggcagccgattccgtgtcttgatcacggggtgggagggaaccgtggcgtccctgcgtggggcccatgggtgagacactccagtactgagacctagagtccagatgcttgtaggagcaagtcgtgttctaagtatttatttaaaacaaaagaatcacgttttcccatttgtaaaaaaaaaaaaaaaaaaaaaaaaaaaaaaaaaaaattgtgggggggccggggccccgggaagagagctttttgaaacacacatcctggtgtgtgggcggcgcgggggccccagatgaggtaaggggaaacagggggaccaaaggggtgttccctagaggagaaaccggggacacgcgacacaagagggggggggatatcctaccacaacaataaaaaaagcggccgcgggggggggaaaaaaaacgcgagacggcgtcttatggagaaaaagaaaacatcgccagagacagggagggtcatccaggggggggccaaataagcacgagggggcagacacaacatccaccgggggaggagacacacgaagggaggatgacggcgaaattaccagaaaattagagcgccgccggcagcgcgggggca

SEQ ID NO: 712837 - DNA, 1814 bp, Homo sapiens
  misc_feature (122)..(122): n is a, c, g, or t
  misc_feature (1496)..(1496): n is a, c, g, or t
cacggatcggcagcgggactgagccgcgcccacgtggaagccgccgcaggcttcgcgcggggccccccgggtgcacgcgggcagggccggggtctcccgacgcacgaccccggagagtgttnaaagggtcggagctgcccggaggcggcggcagggctgagccagcgacgccctccattcactctccgcgcccgttctccggctgtcctcccgttccgctgcccgccctgccaccatgacggaacaggccatctccttcgccaaagacttcttggccggaggcatcgccgccgccatctccaagacggccgtggctccgatcgagcgggtcaagctgctgctgcaggtccagcacgccagcaagcagatcgccgccgacaagcagtacaagggcatcgtggactgcattgtccgcatccccaaggagcagggcgtgctgtccttctggaggggcaaccttgccaacgtcattcgctacttccccactcaagccctcaacttcgccttcaaggataagtacaagcagatcttcctggggggcgtggacaagcacacgcagttctggaggtactttgcgggcaacctggcctccggcggtgcggccggcgcgacctccctctgcttcgtgtacccgctggatttcgccagaacccgcctggcagcggacgtgggaaagtcaggcacagagcgcgagttccgaggcctgggagactgcctggtgaagatcaccaagtccgacggcatccggggcctgtaccagggcttcagtgtctccgtgcagggcatcatcatctaccgggcggcctacttcggcgtgtacgatacggccaagggcatgctccccgaccccaagaacacgcacatcgtggtgagctggatgatcgcgcagaccgtgacggccgtggccggcgtggtgtcctaccccttcgacacggtgcggcggcgcatgatgatgcagtccgggcgcaaaggagctgacatcatgtacacgggcaccgtcgactgttgggaggaagatcttcagagatgagggaggccttcttcaagggtgcgtggtccaacgtcctgcggggcatggggggcgccttcgcctggtcctgtctactagctcaaacaggtttcctccacacacacacacacaccaggggaaccaagagaaccacgtagaatcctcaaccgtgcggaccatcaaccttcgagaaattccagttgtctttttcccagccgcatcctgcctgtagatggccggggaaggctctagaaaaggggcgcattgcgatccaaccatcggcagccgattccgtgtcttgatcacggggtgggagggaaccgtggcgtccctgcgtggggcccatgggtgagacactccagtactgagacctagagtccagatgcttgtaggagcaagtcgtgttctaagtatttatttaaaacaaaagaatcacgttttcccatttgtaaaaaaaaaaaaaaaaaaaaaaaaaaaaaaggggggngcgcgcgcccggggccccgggagaaactttagagaacccccggggggggggcgcggggggcccaaagagagggaaagaggaaaacaggggcacaaagagggtgtcccaagagggaacaccggggccaagagaaaaaggggggaggattcccccaccaattaaaaaggcccgggggggaaacgcgcggagggttcgggagaaaaatccccgagaggggggagacgagaggggaccaaaaggagggggatctataaaaagggggagtcccagagggagaaccgcaatttcccaattaagggccccgcgcggggggggaac

SEQ ID NO: 712838 - DNA, 1861 bp, Homo sapiens
  misc_feature (122)..(122): n is a, c, g, or t
  misc_feature (1550)..(1550): n is a, c, g, or t
  misc_feature (1553)..(1553): n is a, c, g, or t
  misc_feature (1627)..(1627): n is a, c, g, or t
  misc_feature (1660)..(1660): n is a, c, g, or t
  misc_feature (1665)..(1665): n is a, c, g, or t
  misc_feature (1669)..(1669): n is a, c, g, or t
  misc_feature (1672)..(1672): n is a, c, g, or t
  misc_feature (1674)..(1674): n is a, c, g, or t
  misc_feature (1691)..(1693): n is a, c, g, or t
  misc_feature (1696)..(1696): n is a, c, g, or t
  misc_feature (1703)..(1703): n is a, c, g, or t
  misc_feature (1708)..(1708): n is a, c, g, or t
  misc_feature (1713)..(1714): n is a, c, g, or t
  misc_feature (1720)..(1722): n is a, c, g, or t
  misc_feature (1726)..(1726): n is a, c, g, or t
  misc_feature (1728)..(1728): n is a, c, g, or t
  misc_feature (1734)..(1734): n is a, c, g, or t
cacggatcggcagcgggactgagccgcgcccacgtggaagccgccgcaggcttcgcgcggggccccccgggtgcacgcgggcagggccggggtctcccgacgcacgaccccggagagtgttnaaagggtcggagctgcccggaggcggcggcagggctgagccagcgacgccctccattcactctccgcgcccgttctccggctgtcctcccgttccgctgcccgccctgccaccatgacggaacaggccatctccttcgccaaagacttcttggccggaggcatcgccgccgccatctccaagacggccgtggctccgatcgagcgggtcaagctgctgctgcaggtccagcacgccagcaagcagatcgccgccgacaagcagtacaagggcatcgtggactgcattgtccgcatccccaaggagcagggcgtgctgtccttctggaggggcaaccttgccaacgtcattcgctacttccccactcaagccctcaacttcgccttcaaggataagtacaagcagatcttcctggggggcgtggacaagcacacgcagttctggaggtactttgcgggcaacctggcctccggcggtgcggccggcgcgacctccctctgcttcgtgtacccgctggatttcgccagaacccgcctggcagcggacgtgggaaagtcaggcacagagcgcgagttccgaggcctgggagactgcctggtgaagatcaccaagtccgacggcatccggggcctgtaccagggcttcagtgtctccgtgcagggcatcatcatctaccgggcggcctacttcggcgtgtacgatacggccaagggcatgctccccgaccccaagaacacgcacatcgtggtgagctggatgatcgcgcagaccgtgacggccgtggccggcgtggtgtcctaccccttcgacacggtgcggcggcgcatgatgatgcagtccgggcgcaaaggagctgacatcatgtacacgggcaccgtcgactgttgggaggaagatcttcagagatgagggaggccttcttcaagggtgcgtggtccaacgtcctgcggggcatggggggcgccttcgcctggtcctgtctactagctcaaacaggtttcctccacacacacacacacaccaggggaaccaagagaaccacgtagaatcctcaaccgtgcggaccatcaaccttcgagaaattccagttgtctttttcccagccgcatcctgcctgtagatggccggggaaggctctagaaaaggggcgcattgcgatccaaccatcggcagccgattccgtgtcttgatcacggggtgggagggaaccgtggcgtccctgcgtggggcccatgggtgagacactccagtactgagacctagagtccagatgcttgtaggagccaagtcgtgttctaagtatttatttaaaacaaaagaatcacgttttcccatttaaaaaaaaaaaaaaaaaaaaaaaaaaaaaaaaaaaaaaaaaaaaaaaaaaaaaaaaaaaaaaaaaaaaaaaaaaaaaaaaaaaaaaaaaacntgnggccgaatttggggttaattgggccaattccccttatggggggcggattaacaattaatgggccggggtttaanaacgtgcggactgggaaaaccctggggttcccnaattnaatngcntngaaaaaatccccttttnnncanttggggnaatancaaannggcccnnncggntngccttnccaaaaagtggccaagcctgattgccaaagggaaatggaaggggtaaaaatttggtaaaaattcgggttaaattttggtaaaacggttaatttttaaccaatgcccgaattcgaaaaatcctttttg

SEQ ID NO: 712839 - DNA, 1054 bp, Homo sapiens
tataagggttatatgcccgagagggccactctgtgggttgtgcgcgcgagaaatggtgcagcggcgcaagctgcatgggggtgcctcgtcgccactgtattgaacttgttggtagtaaaggcggccccatgatcacgggaagagggagtgtaccccggcgatgttgtgtgtcaccacattgtatgtatatgggagacacgtcgccgcgtcgtggttgtgtaagaatggaggaatggggagaggggtgtaccaaatgggggtgggggccgcaccatcagagagtggatgatggtgctccccacaaagtggacgccgtatagaggcaactccccaagggagagccgtgggcgcacagaacgccacacggagaaataggtgcgcggcacacaagcgcgctgtgccaacagggggtactacatggagaggagagccgcacaggcacacagggtgcttgtctcgtcacaaagtggtcgcgcgcaggggggctaacacgctggagagagggagagcccacactggttttgcgcccctcggagagagacacacgtgtgtgtctaaaccgtgggggtacaacgctcgtgacacacacagatgtgagaggggtgttagtgcccacgcgatgtctctctccgcgtgtgatattaacactctttcgatatcgtgtgcacacacacgcgtagagatgtgttggacacaggtgcacacgacgctgttagcgcccggttagaccgcgttcccagagagaactgtgccaaggagaccttcgggcaactgaaagagttctgtgaagaggtgtgagacgcactctgcgagaactccacaagaaggggtaaactgtcaccagagatacctcaccagcaccggtgaggtgctgtgcccacactggtgccggcaccaagtgaagccgtagagctggggctgggtccagccaacccgaattcccagtttagaggcggatttggtcgtggacgtggtcagcccaccactccagtataaattggagaggattctttgtgccattgaatataacttaccagccctaagaaaccgttaa

SEQ ID NO: 712840 - DNA, 414 bp, Homo sapiens
  misc_feature (369)..(369): n is a, c, g, or t
atatccacatccattgccttgatagcatcatccacagcctccaagaaatgagccttccattcccgtaggactcggctctgattctgtgcgatgaatctcaggaccctgatcttgctgcactcatggcgggctcgcaggccccagagacattcatactcggggggttgctgttggggatcttcttgtattccaggtacttctgcttcacaaagtcatctgtgatgagcttcctcagatcgccgaggaatgggtgcctcaccccagggcgcagtcccatcttgcgtagtgcctcccagaggacagcctcgctggcacggttgccattcatgaagatgacgcccagaatcaccaagaggagactcagcctgngagtgtccttggtttttccaaggaggcgagctgaggagtcccgtg

SEQ ID NO: 712841 - DNA, 560 bp, Homo sapiens
caaaaaagccttgcatctggttccggcagggggatggtaaagagcgccccgagctgggggggtcaaaagagggtgattccaggggagggggaaaaccaattcccctaccccgttttgggggaggggtgcccgaacccccctgggggatggggcaacaccgttttttaatattgaacccgcaagggtgggggactccccatgggggatattgccccctttaacctgggtggtcctgaccaaaaatttggggggggcggtggccccggtggctttttataaacccaactttttttggaatcccccccaaaaaaattttacccccaagggggtccttttggtttttttttggccaccagggcgaggggccggccaaattccggttttttttttcccaaagggttgggaccgggataatttggcaaagaaaaaaggtacttttttttttttgggggtccccccaaacccattcaaagggtttttggtttttttttttccccattcccatttccaaagggttccaggggggtttaataaataaacttcccccctttttttggtta

SEQ ID NO: 712842 - DNA, 304 bp, Homo sapiens
  misc_feature (263)..(263): n is a, c, g, or t
ctgtagtccagctactcaggaggctgaggcagaatggcgtgaacccgggaggcgtagtttgcagtgagccgagatcgcgccactgcattccagccttgtcaacagagcaagactccgtctcaaaaaaaaaaaagaagagtggcctggagcctccttcactttctccacctagacccacttgacagtgggtgacatatttgggttttggctgacccatttaggagtaacttgagatcatgacatcgcgacttcatatcttcggngaaaaatagtgtgtgccagccacgaattgtcggggtaccga

SEQ ID NO: 712843 - DNA, 869 bp, Homo sapiens
ggtcccggctgcgggggtaggaggtccgcgggcagcctccgggtaagccaagcgccgcgcagtgctgagttcccgcacgccgcagagccagggaggatcggcaccgagatcagccgcaagatccggtagtggcgatgtaaggggaaattacaagaattaggagcttatgttgatgaagaacttctctgattacattatggtgatggtggcgcaagaaggaaaagtcaggagcaaatgacagaggatcttgtgcctgatttctagggaacaacacaattcggattcagccgtcatggactatcagtggtgtattcagatagaacttgcgctctgttacaactgaaccctctagtctgaagtcttgctgataccaacatctttgatagtaacgtgccttcaaacaagagcaatttcagtcggtggagatgagaggaggcatgaagctgcagtgccatccacttgccatgtccgtagcgcgagaccgtgaatcaaagagattccagagtttctacaagttcgcaggagtcaaaaaagccacaaagtgtcagacagacttacgatgatggagctgcaatccgactaatgtcaacagtgaaacctttgagggagccagcagcctctgacagatgtgatgatatgaagccagaaccagatgatctcattgaggaagacctcacttgtgtgcaggagaattcccttatctcagagacaaacctacggtggacacttacatatgggtcttctcggccttctatggaaatgtatcgacactgaaggtagaagatgcgaagaggaggtcattaaacaggtgcatttcaagagagaagatagataatgtggaaagaggatggatgcgaagaggggaaagg

SEQ ID NO: 712844 - DNA, 133 bp, Homo sapiens
ttacctagattagactctcaaatcaatggctgtagataacgggatcgactttacctcacaagccaaaaccaagagagctctgacttactgaacatccttcatgaccacatacaaataggtctaaatgcaatca

SEQ ID NO: 712845 - DNA, 220 bp, Homo sapiens
gtgaatctcacagatagtgaagagactaacatgaacatctcagtacacagaccccctgccatgactgtgaaaaagaacccagagaggaacgaaagggccccaagaaagggactgctgctctgggcaaagcaacagacaggtgtccattactggcttcttccagaggaaataaactgccatctctggtagatcagagacttggagtggtcaagggagaaga

SEQ ID NO: 712846 - DNA, 292 bp, Homo sapiens
aggaaactaaaatgtattgaatgtctgctctgtgtcaggtaatttgccaggcatttttcatgttattgcctttatttaacccctcaaaactcaacttgcagcgttaggtttaaacaatttgcccaagtttcaaaagcgtggagctggcaccgtgttgcctgactccaaagcccggtgtgtgcttcccatttaaggcacacttccctgtgcccagaagccaggcgcagcttcagatgtgcctcctcgggctcggcgttgtgaggaagggacgaggttacagaaagggcttttg

SEQ ID NO: 712847 - DNA, 1279 bp, Homo sapiens
tcttcccataaaaatgggttcccactgtgctgcccaggttgctctccaatcccgttgggcgtcaagcaatcctcctgcctctgcctcccaaagcgctgggattacagttgagaagccactgtcctctgcactgaggaggctccttaacctggcggaacatcaggcaggtcttgccaggccaggtttcagaacttaacggaaagctggtctggatgtagtgcttgtagagaagcttctgaaaaatggggcacactccgtggtcacgttggcatgcattcctccgtgtcctaagtgtttcattagacaagttctcgtgacaggtgactgtaaaagtgctagaccactacgtgctaaaactgctttgccacgacactaagagacgactagtgataaccatctccgagagataataacagcgacgtgtcactggtgcgcacccacaggggcacagccaaaccagacaaccactaaaagaacaaatctcgaacaacagaagactcacgaagggcaaaacgggacactatagccgccaaggacaaccagtaaaaggaccgcagaaagaaataccacagtgagccccaacgtttacaatacacagcacagcgaaacgagacaacttcgcagtacaaatacccgaggatcagcgacaacaataatacacgcaccctagatggcaaaccgaccaccaaagcgacaccaaggataaaaaatcaaaagaggggcaaacacaggggcacaacaacgagcagagcgagtagatacaaacccccgtgctagaaaaggcgacactattacaaccgctggcggagcaaaggaacgacaaccaaggagcaacacacggtagcgacaccccccctccaagacgagactgaactaccagcacgaaaaacgggggcgaaaaaaacatcgaggcggaaacagcaggggcgacacacccaccaacggaccatgcccaccacacaaaagactagccaagaatgaagaaagggcgaaaacacagggcatgcaccagcgcgggcaaccaacacaggaccagaaagtcgcaaaccacctgcagacacccaaactacgtataggcgccacacaacaggagatgcgtagggcagacaactcagagaaaacaccacgcacgctaagagcgactcactaacaacagacgtgaccaagccaactcacccagctcggacagccatcacacagagtcactcacaccgtggaaaagacaatagccggtgaggagaaagcacacacaggcgagttggaacaatgcacgcacgaa

SEQ ID NO: 712848 - DNA, 133 bp, Homo sapiens
aagaccatctgagtgacttaatgtaggcaaggtcccgggactatgtgcagacttcttctgggcttacccatgcacgggcgtccctgagagcccagggcagctttcagatagtgtcctccccaggagcagggaa

SEQ ID NO: 712849 - DNA, 336 bp, Homo sapiens
tgagaatgcactcttttttaaatgacgtgacgcacactcacgaccctaccggacgacacctctcgactgacacgccagagcttacgttaatcttgactacactggagtgcacgtcaggtagtctatacgtataattattggtcgaggggcagggaccagtggaggcagtatagattttgacggaagccaaacaggacagcctgatgaattcacgatttccagcatatatacatcttcaccaatcccaccaccttgctccagcctgtcatatcactgtgtctacatcaaccaaaacaacacaaaaaaacccccagggcccacctctctgccctttct

SEQ ID NO: 712850 - DNA, 331 bp, Homo sapiens
ccgtgtcatccccttgtgtctctcccagacttacagtaaaggggggggcttgcccgacaatcttgtggacacacactcgggcaagtccttggcactgctcggtgcagcatcctggcctggctcggtgaggcacagagggaagcccaagtacactccccgatgtgagtgaatcctggtataactcttgagcacaggcttgtgccaggtgccgtcacaccctttctcaccttcagtagcatacattaacccgggaagtgactgctgctctcaccagggcgagggaggtaacacacttaacccaaggaccacccacccacagcttagttagtgg

SEQ ID NO: 712851 - DNA, 237 bp, Homo sapiens
accccgctggccaactggcagccataggtacaggtaacaggtgcaggctttcttaagtaccctgcctccactctatagcccagctgctgcgtggagtccaggaccttagacccaggatgagcaaaatggatcccaccacggttgtccatggaccagttgccatgggtgacccctagagttcttcagaccctgtgtctagatacgtgcatacatgtagccattgggccaggcgggggc

SEQ ID NO: 712852 - DNA, 218 bp, Homo sapiens
cgcaaactgccctgtgccatgcaggcacatcagctgcccgcgatccaggcagaccagccccaccgcgcccgcgtgctggtcgccagccgacgcccgtatcggcacggcacggcccaggaggtcctcgcgtgtatagccgacatcgtcggcttcctggcgcacaggccggaagaagatcgcgcggaaactccagcgcgtcgatccagtccaggtaatag

SEQ ID NO: 712853 - DNA, 651 bp, Homo sapiens
  misc_feature (418)..(418): n is a, c, g, or t
tcgggggttcaagatgtcgaagcgaggacgtggggggtcctcgttgggtgcgaaattccggatttcctgtgggtcttccggtaggagctgtaatcaatggtgctgacaacacaggagccaaaaaccggtgtatatcatctccgttgaaggggactcaagggacggctgaacagacttcccgctgcgtgggtggtgggctgacagtggtgatggccacagtcaagaagggcaaaccagagctcagaaaaagggtacatccagcagggggtcattcgacaagcgaagagctcataccgtagacaaagaatgggcggtgtctcattacactgttgggaagcataagtgcaggagctcataggtggaacaataagaggcgagacagtgacagaggctctcgggcccatctacgggggaccangtagccaacaggcaggtggtgccagcactgggtgggcccccgggaatggccaatcccaacgtggctgggccaggcaatgtggccaatggaattctcccagaggaatatatgtggctacaaacaaacacaacaacaacagggggcgcgcgcgccccagaaagatactcccccggagagggggggccacaaggcgattaggcggtacccgaggctttacggggatccaacagggg

SEQ ID NO: 712854 - DNA, 173 bp, Homo sapiens
ccccctctatcatgcaagaatggccatcatcaaaaaatcaaaaagcagtagatagattttagtgtgcatgtggtgaacagggaacacttttttttttttgggaaaacggtttggctcttgttcccccaggtggaattgtttgggcccactctcagttcttggaaccctcggcc

SEQ ID NO: 712855 - DNA, 110 bp, Homo sapiens
tgctccagagaaatttcatgaaaggaagagtccatccaggcagcaaactgtctcacggtcttatttcaggagaatcgcttgaacccctcaggcaaaggttgcagtgagcc

SEQ ID NO: 712856 - DNA, 133 bp, Homo sapiens
tgagctcgcaccgctaaaatattttaaaatggtgtctttattagtacaacggcattttcattaggtaacaaaattacctgtcattgcaatacttccttcttatctgtagtccctgtagttctgactgtgaatg

SEQ ID NO: 712857 - DNA, 1037 bp, Homo sapiens
gttgcttctgggactcctgttacccgcaaaggattggaccggcggtgtcgaggagcctgaacctggtaggagactgagttgagaatgcgttatgggatcgatgcatcctgaccgttgacctgtctatgtgagagggctacgagaccaatctttcggaacgtaggtgagttgtgctcctactaatgtacaaacatggcgtctatagagtgtcagtgctgcctacgcctagtgcacgccttattcatctctccagcgttgaaagaggaggatggcgaacacatccctgtctctcaatccaagggcctgtggaatccgcctgcagtctaggttggatgaccccgaaatgcatgacgatgcctcccctgacttagcgtgaagaactaaatgcgtatctaggtggggatcatatgaattcttgtatatgtgaccgtccaacatcacaggcgaatacgcagcatggaagattcaggagatcaccaggtgaagttctctatctcggctactatcaatcagccttcgactgggatgatgaacacagccaacggtctccaggcagcatcgtcttaaacgctaccaaagccagacctatgggcaatgggtccaagtgcgacttagtgggaggccccgggatggtcgaggtcggttcctctgtgaacgagggtgcaggtttctctggggacgtaccatcgatcgcggtggaccagcctttgtctgctctgattgttgctgaccattttgactcctcgggtttggcctgcacccggttctagcagggcccgaacaagggtctgcaccgagggccaacctcatgataccaataccgttaggccacgtaatatatgccatggtccgacgtacacccgacacacccttttggtaaacaccgatcagacgacgaagatcaacgcccccgagtcggcgatcaactggtgaggccaacaatggagggtattgacacgctatataggtctgcatgtgcaaccaccacacacgccgtaatatctggatggcaccacgccgcgcactgtccgtaacat

SEQ ID NO: 712858 - DNA, 569 bp, Homo sapiens
  misc_feature (40)..(40): n is a, c, g, or t
  misc_feature (45)..(45): n is a, c, g, or t
  misc_feature (104)..(104): n is a, c, g, or t
  misc_feature (223)..(223): n is a, c, g, or t
tttgaacgaggatacgagacccgattcctgtgcaaccacntcganggaatggaagaaagcaggagttgagcagctacggctcagcacagtcgacatgactgggntcccaaccttggccaatctccacaaaggagtccagtttgctctcaagtaccaggcactgggccagtgtgtctatgtgcattgtaaggctggtcgatcccagaaagttccacaatggtgncagcctaatctgattcaggtacacaactggagcccagaggaggctatagaagcgatcgccaaaatccggtcacacatctccatcaggcccagccagctggaagttctcaaagagttccacaaggagatcactgcaagggcagcaaagaattaactactgattatctctcatgctgacttaagagtctgaagactgtggataacaaagaacttggatctccctgagatatagtaacaagtttacaggacaaagcagcttaacccgaccacactgcaaatgtgctgactggtagataatgtgtctcctttgccttccttcctgaaataacacttggatggctacagag

SEQ ID NO: 712859 - DNA, 933 bp, Homo sapiens
tgttcttccgcccgcgtccgccgtcgcgtttctctgccggtcgcactggaagaagagatcgcgcgcgctggtcattgacaagtggctccggcatgtgcgaagctggttgtgcgtggggacgacgctccccgatgccgtgtttccgttcctatctgttcgggcgcccctagacacccaggtcagtctaatggtgtgggctagtgggccataaagagtactcctacagttgggcgatctgagggcgcagagctaagcggtgtgcataacctggacccgtgtaaggtacccgcattgagctactggacatacgtctactcacactgtgagaccgaagcattgtggatgcacatgaatactgggcgattgcagcgaccttttctaggcgaaagctgaaggctttgacccgctgctggggcccccgtggagggataggccaagctccatagttggcctagcctagaagccagaaaggggccacccccctgtgaaccctcctaatgagcccaagcgttagagacgaaagaaaggattgatcctacaacagatcttacatgattatcacgaccgtacctcgattcgaaaagacacccccccctggggtgcctatttggttaccatgttgtggctccgtttcccactaggctcgaggttagcatttggtctcgcagatccataccagagccattcaatagaggagctcggcatccaaacgttaggtcgactttttgtataagatagggaacttccattggcgttggaactctggtggggtccacgccactagcgaacaaatagtgtggtcccatattcctataacagaaaagaggggctaacgggcacactataccaccgcccaaagtggacccgaattccttgagcaggttctattggaacccatttgtgcactttgtgacctttgaaaccccttaaaac

SEQ ID NO: 712860 - DNA, 796 bp, Homo sapiens
  misc_feature (472)..(472): n is a, c, g, or t
tagcatagtggccatgacagagtaaggcacttcagtaaatcaatggccatttatctcatctataaggcagtgacaagtagaattttcacaccagggttgtaccagaaagtagagcggcctgcctggcagcaccaccactcacatccagcgccgcgcaatacacccagagctagtgccacggcccgcgcagacaaggcgccagtgcaactcgatatctcgaccccacaaccgcattggcaggcagcgccgatgagcgccgtgagaagcgactcccctttgtgtcacacctatcagcggacgtttggaagagcccacacgaccctgtgcggcaccaaacaccacaacggtgtcgccacgcaattgggtgtagggcccctcccccacaaaacaccacacacaatcacaattacaccaccacacaactcaagacgccctgggcctcccttgggccgcccctccacatctgcggggncacaacgagacctatacacaacggggccccccgcccacaaaaaacacatttgacgctcgctcaccgccccgctgttcataggcgggctgcaggagcggtgcggtggagccagacacggcaccgaccgacactctatgagcgagggcgccggcccggcgcgaccccgggaagcacgcgcgaggacgggtgacgcgccgccgaagcaggagccggctcacgccccggctcgtcgcgagagtgtacgacacgaccggcagggcgggcgcttgccgtaggaggacacaacacagacaggggggatataaacaacgcgccaagaacgaa

SEQ ID NO: 712861 - DNA, 521 bp, Homo sapiens
  misc_feature (15)..(16): n is a, c, g, or t
tcactgggaagtttnntggcaatccttggtattatggcaaagtcaccaggcaccaggcagaaatggcattaaatgaaagagggcatgaaggagacttcctcattcgtgacagtgaatcttcgccaaatgatttctcagtatcactaaaagcacaagggaaaaacaagcattttaaagtccagctgaaagagactgtttactgcattgggcagcggaaattcagcaccatggaggaacttgtagaacattacaaaaaggcaccgatctttacaagtgagcaaggagaaaaattatatctcgtcaagcatttgtcttgatagtgctcgtcagcagtgactgttccacagctttaactggtcatgtaactggagactgagaaagtgctgggccaattgtacttgcttggaaagtgctgtttctaactatatgagaattgactataatacatgagtatttttgttataactcagcccatacgtatatctacatatgcagtgcatctctatgaagagttcttatcc

SEQ ID NO: 712862 - DNA, 627 bp, Homo sapiens
ggggagatggaggtagcagtgagcaagatagcaccactgcattccaacctgggtgatgaagtgtgactctccaaaaaaaaaaaagaaattataaatcccggccggtgctctacatagcctcaggggcatcatgggatagctcagagggcccttgattctggcagggcaaataaggccagaatgagaaattaccatcttctactaagagaaaaccaagagaaaaatttttatgctaggatgccttaatgaccacttaatttttaaatacttaagtttattgggtctctacccgggtggctaactggctggacagtgggccactctctttttggggggatggagggggcctacataactaagttgggccttaccccatatctttggtccaaacataataccatcttttggcttctccggaactttagatctccataacacatgtacggtagaatggtgagggaaaagcatggatgagaatttatgggcagtccagatggtgtgtccccaccttaggctctttataagtgggttagggtttcctccaaaaagggatttcaccagtgggaattattagtgtaccagggggcccgatactttcttcctctctgcttgtgatcccagcgtaac

SEQ ID NO: 712863 - DNA, 129 bp, Homo sapiens
aaccctgtcttatgctatgtgttgcagccaacgcttatttctttgatttgaaggctgtaattcttacgcgagtctcagtaacttttgcaagagcagccatgacaggtgcccgccatctctctagccaga

SEQ ID NO: 712864 - DNA, 959 bp, Homo sapiens
  misc_feature (27)..(27): n is a, c, g, or t
  misc_feature (245)..(245): n is a, c, g, or t
gagaaagagagatagagctactactancgtaggcgattatactcacgtgcaagggtatatgcttcctattgggctcactacggtctgtcattacgcgcttgttatacccccaccaggggttttctttatagcgccctctcggggggttctctggcgtgtagtcctctcttgcatgtgatcagcgcccctttgggtctatggccctcgttaatgtctttcggaaacgttattaacgtctctccccnttgagacaggattgtctggtcttcgtctagcaccacacgtgctgtctggacgcgaaacccttggggcggcccttcacggacagtatgtagtggacagttgtgcaccatacagagtggtccgcaatcctacaaaggccctcaaatggtagtgtcccaaatggaattggcataacgggagtgacccccaaattcttgggtagatcacccccctggttacgtgggaattgttatctttgtccgccgaaatggagcgtgatacccttttttgaccagcaataatgcggttacaagggggagcaccaactgctcaatgttctcttgttgtattgaatataatggggccacacaaccgccgttggtgaggagacacacattggtgacaacaccatgctgggaaataatggaggaaggaagggcaacaatacacgcgaaaaaggtggtgaagcgttctctggaaagaacacagcagccaatggcgctgtggaagatgtctaacaagtaagaaccacagagaagcgcccccagcggggggcggaaaccaatctaacccggcgcgaccgcgggggggtcaacgtgccctgatacccccgcccccttcgcgggagaccggtgcgcggccgccccggggttctccgcgaggcttcctgggtataagcagaccccgcgcgtcccacaaagcgggaacccttcttttagtaaaaaaaccacataaca

SEQ ID NO: 712865 - DNA, 594 bp, Homo sapiens
gggggccttttcaggcccgaggaccgggctggcacgagggctgcacctgctgaagaaccagcttcgggccctggctgtgctggcccatactcaggcagctggagctcatcgacctcagtcagccatcccttccactgtgactgccagtgtgcttccgctgcccaggtggcttactgggctgaacctgcgggtgggggccactgcgccacccctcccaatgcccgtggacagacgggtgaaggcgtgcagctgcgtgtctcttgagaagactgcccgggcggggctgcagaaaggccaaggggacaccagcctccaggcccaggccaggagaagccctcatcaaaggaacgacagtgtggagcagataaggtggggaaggagaagggtcgtctctgagcacgtgatgcaggctgtgtcctgcgcttgatcccagcccggtggctcttactctgcgaccaggaacaggctccgacgagatcgtgtcctggcacccatgagggtcgtacctccagcaggggcttctggacccctggctgaggggtcgcgtcttagtgggcgggatactttgcccttgaataaaatggattcaaaccc

SEQ ID NO: 712866 - DNA, 356 bp, Homo sapiens
  misc_feature (2)..(2): n is a, c, g, or t
cngcacatatactacactcacaataatacctgtaagggaggtttttcaatctcttctttgtatatatatatattgttttttgagaaggagatttgctcttgctgcccaggctggagtacagtggtgtgatctcggctcactgcaacctctgcctcccgggtccaagcgattctcctgcttcagcctcccaagtggatgggattctgggtgtgcaccaccacacccagctaatttgtgtatttttaggagagggggggtttctccatgttggccagactggcgtagaacttgtgaactccagtgacctgcccaccttggtctcccagagcgctgggattacagttgtgagccaccgc

SEQ ID NO: 712867 - DNA, 307 bp, Homo sapiens
cgagatgaatggctgggagaccccctggcttgtgcacatggccaaaaacagaggggcaaccccccttattgaacgcccctgaagggatacggcggccttattcccctgagcatcttgtattacaggtgtctgtcacgccatctagatacttatcagttggattcttccccaaggaagcaagcatatcatgcaaatcttccttgccgatgaaaccatctctgttctgaccaaccatgttgaaggcctctttgaactccagaggcggtcacacggcacacaaacaaaaaccagtgtgttaaaagggaag

SEQ ID NO: 712868 - DNA, 851 bp, Homo sapiens
  misc_feature (23)..(23): n is a, c, g, or t
  misc_feature (27)..(27): n is a, c, g, or t
  misc_feature (35)..(36): n is a, c, g, or t
  misc_feature (47)..(47): n is a, c, g, or t
  misc_feature (51)..(51): n is a, c, g, or t
  misc_feature (61)..(61): n is a, c, g, or t
  misc_feature (104)..(104): n is a, c, g, or t
  misc_feature (120)..(120): n is a, c, g, or t
  misc_feature (125)..(125): n is a, c, g, or t
  misc_feature (128)..(128): n is a, c, g, or t
  misc_feature (149)..(149): n is a, c, g, or t
  misc_feature (153)..(153): n is a, c, g, or t
  misc_feature (158)..(159): n is a, c, g, or t
  misc_feature (164)..(165): n is a, c, g, or t
  misc_feature (169)..(169): n is a, c, g, or t
  misc_feature (173)..(173): n is a, c, g, or t
  misc_feature (181)..(182): n is a, c, g, or t
  misc_feature (185)..(185): n is a, c, g, or t
  misc_feature (189)..(189): n is a, c, g, or t
  misc_feature (191)..(191): n is a, c, g, or t
  misc_feature (199)..(200): n is a, c, g, or t
  misc_feature (207)..(207): n is a, c, g, or t
  misc_feature (211)..(211): n is a, c, g, or t
  misc_feature (214)..(214): n is a, c, g, or t
  misc_feature (216)..(216): n is a, c, g, or t
  misc_feature (218)..(219): n is a, c, g, or t
  misc_feature (224)..(224): n is a, c, g, or t
  misc_feature (230)..(230): n is a, c, g, or t
  misc_feature (240)..(240): n is a, c, g, or t
  misc_feature (242)..(242): n is a, c, g, or t
  misc_feature (244)..(244): n is a, c, g, or t
  misc_feature (255)..(255): n is a, c, g, or t
  misc_feature (260)..(260): n is a, c, g, or t
  misc_feature (268)..(268): n is a, c, g, or t
  misc_feature (281)..(282): n is a, c, g, or t
  misc_feature (286)..(286): n is a, c, g, or t
  misc_feature (293)..(293): n is a, c, g, or t
  misc_feature (296)..(296): n is a, c, g, or t
  misc_feature (300)..(300): n is a, c, g, or t
  misc_feature (305)..(305): n is a, c, g, or t
  misc_feature (310)..(310): n is a, c, g, or t
  misc_feature (312)..(314): n is a, c, g, or t
  misc_feature (319)..(319): n is a, c, g, or t
  misc_feature (324)..(325): n is a, c, g, or t
  misc_feature (328)..(329): n is a, c, g, or t
  misc_feature (332)..(332): n is a, c, g, or t
  misc_feature (337)..(337): n is a, c, g, or t
  misc_feature (341)..(342): n is a, c, g, or t
  misc_feature (349)..(349): n is a, c, g, or t
  misc_feature (358)..(358): n is a, c, g, or t
  misc_feature (368)..(368): n is a, c, g, or t
  misc_feature (370)..(371): n is a, c, g, or t
  misc_feature (395)..(395): n is a, c, g, or t
  misc_feature (410)..(411): n is a, c, g, or t
  misc_feature (418)..(418): n is a, c, g, or t
  misc_feature (435)..(435): n is a, c, g, or t
  misc_feature (446)..(446): n is a, c, g, or t
  misc_feature (449)..(449): n is a, c, g, or t
  misc_feature (453)..(453): n is a, c, g, or t
  misc_feature (461)..(461): n is a, c, g, or t
  misc_feature (465)..(465): n is a, c, g, or t
  misc_feature (489)..(489): n is a, c, g, or t
  misc_feature (492)..(492): n is a, c, g, or t
  misc_feature (644)..(644): n is a, c, g, or t
  misc_feature (650)..(653): n is a, c, g, or t
  misc_feature (655)..(657): n is a, c, g, or t
  misc_feature (659)..(660): n is a, c, g, or t
  misc_feature (667)..(667): n is a, c, g, or t
  misc_feature (669)..(670): n is a, c, g, or t
  misc_feature (672)..(673): n is a, c, g, or t
  misc_feature (675)..(675): n is a, c, g, or t
  misc_feature (677)..(677): n is a, c, g, or t
  misc_feature (820)..(820): n is a, c, g, or t
gcaacccaagcttccctggagtnggcnccacggannaaacggcaggnggcngaatgcagcngctccaaggcccgggcaggcaaacagtggctgccgcatggganaatggccactcctgtntacangcnaataggcacgcaagcaaacanaaanggcannaaaanngaanaacnaaacgcannaantagnancaactacnnggacaanaccnacnancnnggtcnaaagcnggaaggtggncncnacacgcacggngaagnggcaaaanggcaaagcgtagnnaacnaaaaaanatnctcnaagcncgaanannnctccnaaaannaannaancaacngaannaaacacncccaaaaancaagccttgnanngggcgtaaaaaaacaacaagaacnaaaacaggccaaaannatctccnaaaaaaggcacccaagnacgcagtcacnccnaaantaaaactntctnccatacaacacaaggacacgaacnganccagaaagccaacggtctccacggcttcatgaattggcctcataatctgctaacggtgagctgaggagagagccgacgttctagggcccttctctggagtgaagggtccccatctccaccccctgacagctttgcggtggggtttcccttangacaannnnannntnnaaaaaanannannantntctctgtccgaggtgacggaggagggcgtccgcttccgctccccctacgacggcaatgagaccctgctgagcccggagaaatccgtgcagatccagaatgcgctgggctcggacatcatcatgcagctggacgacgtggttancagtactgtgactgggccacgtgtggaggag

SEQ ID NO: 712869 - DNA, 2421 bp, Homo sapiens
  misc_feature (122)..(122): n is a, c, g, or t
cacggatcggcagcgggactgagccgcgcccacgtggaagccgccgcaggcttcgcgcggggccccccgggtgcacgcgggcagggccggggtctcccgacgcacgaccccggagagtgttnaaagggtcggagctgcccggaggcggcggcagggctgagccagcgacgccctccattcactctccgcgcccgttctccggctgtcctcccgttccgctgcccgccctgccaccatgacggaacaggccatctccttcgccaaagacttcttggccggaggcatcgccgccgccatctccaagacggccgtggctccgatcgagcgggtcaagctgctgctgcaggtccagcacgccagcaagcagatcgccgccgacaagcagtacaagggcatcgtggactgcattgtccgcatccccaaggagcagggcgtgctgtccttctggaggggcaaccttgccaacgtcattcgctacttccccactcaagccctcaacttcgccttcaaggataagtacaagcagatcttcctggggggcgtggacaagcacacgcagttctggaggtactttgcgggcaacctggcctccggcggtgcggccggcgcgacctccctctgcttcgtgtacccgctggatttcgccagaacccgcctggcagcggacgtgggaaagtcaggcacagagcgcgagttccgaggcctgggagactgcctggtgaagatcaccaagtccgacggcatccggggcctgtaccagggcttcagtgtctccgtgcagggcatcatcatctaccgggcggcctacttcggcgtgtacgatacggccaagggcatgctccccgaccccaagaacacgcacatcgtggtgagctggatgatcgcgcagaccgtgacggccgtggccggcgtggtgtcctaccccttcgacacggtgcggcggcgcatgatgatgcagtccgggcgcaaaggagctgacatcatgtacacgggcaccgtcgactgttgggaggaagatcttcagagatgagggaggccttcttcaagggtgcgtggtccaacgtcctgcggggcatggggggcgccttcgcctggtcctgtctactagctcaaacaggtttcctccacacacacacacacaccaggggaaccaagagaaccacgtagaatcctcaaccgtgcggaccatcaaccttcgagaaattccagttgtctttttcccagccgcatcctgcctgtagatggccggggaaggctctagaaaaggggcgcattgcgatccaaccatcggcagccgattccgtgtcttgatcacggggtggaaggaaaccgtggcgtccttgcgtggggccaatggttgagacattcaagacttgaaacttaaagtcaaaagcttggaagaaccaagtcggggtctaaggatttaattaaaaccaaaggattaaggttttccaattggactttaagggttggcttcagcgctagcccctgttttgcacagccgagtactggcgagtatgttctatgttgggcctcctgctgcaaaacaataaacagaggacgcagaggtcctcctgcctggccacgcacctctccacagggcggcctggggtctggagatgggcgctgggcccacgggacgcagatggggccacgctctgcccgtggctggcccacgttcctggtctgcagtgctgcctcctccccagcacccctggggcacagagggcagggtcacagctgggaagaggcggggggtagaaaccaaggctggcagaagtgtagccgggctccctgataaatgctggaggaccccagggcaccttgaaaaaaaaaaatctctccccctcacaccacttatctaaaataatcctcaacacccgaattgggttaattggcaattcgcctaaaggggagcgtttaacattcattggccgcggtttaaaacgtgggtctgggaaaacctggtgttccaactttaaccctttgggaaatcccctttctcacatgtggtaaaatcaaaagagcccacctgtcgcttttcaaaagtggcgaccctaatggcaaagaacttggaggggtaatatttttaaaatcggctaaacttgtgttaaaccgttttttttaaacaaggcccaattggaaacctcttaatacaatcctccgaaaggtctgggtttccccttacaacaggtccttataagaagcgcgtcccactagaggcaaacacctttataggcggccctcattgggcacccctcaagaatctttggccccgcggcccaagatttatatacctatagaggccccttataatcttctgtagacccctccttcaacatgccgtactcaagctccctgttctcctcttccatcctcgcctacacacctccgttatatctctactcttgctcacgccct

SEQ ID NO: 712870 - DNA, 1447 bp, Homo sapiens
  misc_feature (122)..(122): n is a, c, g, or t
cacggatcggcagcgggactgagccgcgcccacgtggaagccgccgcaggcttcgcgcggggccccccgggtgcacgcgggcagggccggggtctcccgacgcacgaccccggagagtgttnaaagggtcggagctgcccggaggcggcggcagggctgagccagcgacgccctccattcactctccgcgcccgttctccggctgtcctcccgttccgctgcccgccctgccaccatgacggaacaggccatctccttcgccaaagacttcttggccggaggcatcgccgccgccatctccaagacggccgtggctccgatcgagcgggtcaagctgctgctgcaggtccagcacgccagcaagcagatcgccgccgacaagcagtacaagggcatcgtggactgcattgtccgcatccccaaggagcagggcgtgctgtccttctggaggggcaaccttgccaacgtcattcgctacttccccactcaagccctcaacttcgccttcaaggataagtacaagcagatcttcctggggggcgtggacaagcacacgcagttctggaggtactttgcgggcaacctggcctccggcggtgcggccggcgcgacctccctctgcttcgtgtacccgctggatttcgccagaacccgcctggcagcggacgtgggaaagtcaggcacagagcgcgagttccgaggcctgggagactgcctggtgaagatcaccaagtccgacggcatccggggcctgtaccagggcttcagtgtctccgtgcagggcatcatcatctaccgggcggcctacttcggcgtgtacgatacggccaagggcatgctccccgaccccaagaacacgcacatcgtggtgagctggatgatcgcgcagaccgtgacggccgtggccggcgtggtgtcctaccccttcgacacggtgcggcggcgcatgatgatgcagtccgggcgcaaaggagctgacatcatgtacacgggcaccgtcgactgttgggaggaagatcttcagagatgagggaggccttcttcaagggtgcgtggtccaacgtcctgcggggcatggggggcgccttcggctggtcctgtacgacgagctcaagaaggtgatctaagggccgcggcctcctccacacacacacacacaccaggggaaccaagagaaccacgtagaatcctcaaccgtgcggaccatcaaccttcgagaaattccagttgtctttttcccagccgcatcctgcctgtagatggccggggaaggctctagaaaaggggcgcattgcgatccaaccatcggcagccgattccgtgtcttgatcacggggtgggagggaaccgtggcgtccctgcgtggggcccatgggtgagacactccagtactgagacctagagtccagatgcttgtaggagacgcgtcaaatcgtaaacctctagg

SEQ ID NO: 712871 - DNA, 1904 bp, Homo sapiens
  misc_feature (122)..(122): n is a, c, g, or t
cacggatcggcagcgggactgagccgcgcccacgtggaagccgccgcaggcttcgcgcggggccccccgggtgcacgcgggcagggccggggtctcccgacgcacgaccccggagagtgttnaaagggtcggagctgcccggaggcggcggcagggctgagccagcgacgccctccattcactctccgcgcccgttctccggctgtcctcccgttccgctgcccgccctgccaccatgacggaacaggccatctccttcgccaaagacttcttggccggaggcatcgccgccgccatctccaagacggccgtggctccgatcgagcgggtcaagctgctgctgcaggtccagcacgccagcaagcagatcgccgccgacaagcagtacaagggcatcgtggactgcattgtccgcatccccaaggagcagggcgtgctgtccttctggaggggcaaccttgccaacgtcattcgctacttccccactcaagccctcaacttcgccttcaaggataagtacaagcagatcttcctggggggcgtggacaagcacacgcagttctggaggtactttgcgggcaacctggcctccggcggtgcggccggcgcgacctccctctgcttcgtgtacccgctggatttcgccagaacccgcctggcagcggacgtgggaaagtcaggcacagagcgcgagttccgaggcctgggagactgcctggtgaagatcaccaagtccgacggcatccggggcctgtaccagggcttcagtgtctccgtgcagggcatcatcatctaccgggcggcctacttcggcgtgtacgatacggccaagggcatgctccccgaccccaagaacacgcacatcgtggtgagctggatgatcgcgcagaccgtgacggccgtggccggcgtggtgtcctaccccttcgacacggtgcggcggcgcatgatgatgcagtccgggcgcaaaggagctgacatcatgtacacgggcaccgtcgactgttgggaggaagatcttcagagatgagggaggccttcttcaagggtgcgtggtccaacgtcctgcggggcatggggggcgccttcgcctggtcctgtctactagctcaaacaggtttcctccacacacacacacacaccaggggaaccaagagaaccacgtagaatcctcaaccgtgcggaccatcaaccttcgagaaattccagttgtctttttcccagccgcatcctgcctgtagatggccggggaaggctctagaaaaggggcgcattgcgatccaaccatcggcagccgattccgtgtcttgatcacggggtgggagggaaccgtggcgtccctgcgtggggcccatgggtgagacactccagtactgagacctagagtccagatgcttgtaggagccaagtcgtgttctaagtatttatttaaaacaaaagaatcacgttttcccatttgtacttcagcgctagcccctgttttgcacagccgagtactggcgagtatgttctatgttgggcctcctgctgcaaaacaataaacagaggacgcagaggtcctcctgcctggccaaaaaaaaaaaaaaaaaaaaaaaaaaaaacatttttgggggcggcgcttggcgccccgaaaaacttttttaaaaaccttttgtttggggcgccgggggccccatctaaggttagtctgaacaactgggccatagctctggttcccagaggagagacacgtgggcctgaagcataagggcggtgggtgttcctcaccaattaaaaaaaacccgcgggggacaacccagaggctttttgaaccaatcccaggagggattccccgaggggcataaagggggtcttacacaagggattccaaggaagtcgatttcaattaacgcgctcgtgtgagc

SEQ ID NO: 712872 - DNA, 629 bp, Homo sapiens
tccagaggatttatatgcgatggatatgaccctccaaaggtataccacctgtaccagctgagaagaagtatgccatacgggtgctgtctctctttgatggaattcgctacagggctcctggtgctagaaggacttgggatacaggtggaccgatacattgcctcggaaggtgtgtgaggactccatcacggtgggcatggtacggcaccaggggaagatcatagtacgtacggggacttccgcagcgtcaacacagaagcatattcaggagtggggcccaattcgatctggtgattgggggcagtccctggaaatgacctctccaatcgtaaacactgctctgcagggtctctactagggcactggcccgctctactaagagttctaccgcctcctgcatgatcggcgtcccaaaggagggagattgtcgccccttcttctggctctttgcgaatttggtggccttgggcgttagtgacaagagggacatctcgcggattctcgagtccaaccctttgatgatagatgccaaagaagtgtcagctgcacacaggccccgctactaatgaggaaccttatcggtattaaaccgccgttggatccatggtattataacctgagtgcatgat

SEQ ID NO: 712873 - DNA, 2012 bp, Homo sapiens
  misc_feature (122)..(122): n is a, c, g, or t
  misc_feature (1490)..(1490): n is a, c, g, or t
  misc_feature (2012)..(2012): n is a, c, g, or t
cacggatcggcagcgggactgagccgcgcccacgtggaagccgccgcaggcttcgcgcggggccccccgggtgcacgcgggcagggccggggtctcccgacgcacgaccccggagagtgttnaaagggtcggagctgcccggaggcggcggcagggctgagccagcgacgccctccattcactctccgcgcccgttctccggctgtcctcccgttccgctgcccgccctgccaccatgacggaacaggccatctccttcgccaaagacttcttggccggaggcatcgccgccgccatctccaagacggccgtggctccgatcgagcgggtcaagctgctgctgcaggtccagcacgccagcaagcagatcgccgccgacaagcagtacaagggcatcgtggactgcattgtccgcatccccaaggagcagggcgtgctgtccttctggaggggcaaccttgccaacgtcattcgctacttccccactcaagccctcaacttcgccttcaaggataagtacaagcagatcttcctggggggcgtggacaagcacacgcagttctggaggtactttgcgggcaacctggcctccggcggtgcggccggcgcgacctccctctgcttcgtgtacccgctggatttcgccagaacccgcctggcagcggacgtgggaaagtcaggcacagagcgcgagttccgaggcctgggagactgcctggtgaagatcaccaagtccgacggcatccggggcctgtaccagggcttcagtgtctccgtgcagggcatcatcatctaccgggcggcctacttcggcgtgtacgatacggccaagggcatgctccccgaccccaagaacacgcacatcgtggtgagctggatgatcgcgcagaccgtgacggccgtggccggcgtggtgtcctaccccttcgacacggtgcggcggcgcatgatgatgcagtccgggcgcaaaggagctgacatcatgtacacgggcaccgtcgactgttgggaggaagatcttcagagatgagggaggccttcttcaagggtgcgtggtccaacgtcctgcggggcatggggggcgccttcgcctggtcctgtctactagctcaaacaggtttcctccacacacacacacacaccaggggaaccaagagaaccacgtagaatcctcaaccgtgcggaccatcaaccttcgagaaattccagttgtctttttcccagccgcatcctgcctgtagatggccggggaaggctctagaaaaggggcgcattgcgatccaaccatcggcagccgattccgtgtcttgatcacggggtgggagggaaccgtggcgtccctgcgtggggcccatgggtgagacactccagtactgagacctagagtccagatgcttgtaggagccaagtcgtgttctaagtatttatttaaaacaaaaaaaaaaaaaaaaaaaaaaaaaaaaaaaaaaaaaaaaaaaaaaaaggggggngcgcgcgcgcccccctttaattttcccctgtgtggcccccaatttttagcatctcatccccagttttttttgctcacaggggggccccctatataagggggggtcgtatttaaacaacatagacaacatgaggcccgaggtttaacacctcctttctttgtgtgggaaacatctcgtactactcttagtcgaacactttgtggagaaagggaagcccttatatcacctcggtgagggggggggacgaaacaatattttggtggagagaagaattcaccctacaagaagacgaatttttaaagaggccatcattaggggggataattatattacaaatttttattacagcgttgtgttattatttgtgggtttttacaccactcgacacgcctgagtaaatttattttgggaggtagtcttaaaagagaattttgttgtcgatcactcgagagatattagatcttagttactagagacttttttttatatcaccgggggagattatttttttataaaaagggn

SEQ ID NO: 712874 - DNA, 1858 bp, Homo sapiens
  misc_feature (122)..(122): n is a, c, g, or t
  misc_feature (1576)..(1576): n is a, c, g, or t
  misc_feature (1579)..(1579): n is a, c, g, or t
  misc_feature (1653)..(1653): n is a, c, g, or t
  misc_feature (1686)..(1686): n is a, c, g, or t
  misc_feature (1691)..(1691): n is a, c, g, or t
  misc_feature (1695)..(1695): n is a, c, g, or t
  misc_feature (1698)..(1698): n is a, c, g, or t
  misc_feature (1700)..(1700): n is a, c, g, or t
  misc_feature (1717)..(1719): n is a, c, g, or t
  misc_feature (1722)..(1722): n is a, c, g, or t
  misc_feature (1729)..(1729): n is a, c, g, or t
  misc_feature (1734)..(1734): n is a, c, g, or t
  misc_feature (1739)..(1740): n is a, c, g, or t
  misc_feature (1746)..(1748): n is a, c, g, or t
  misc_feature (1752)..(1752): n is a, c, g, or t
  misc_feature (1754)..(1754): n is a, c, g, or t
  misc_feature (1760)..(1760): n is a, c, g, or t
cacggatcggcagcgggactgagccgcgcccacgtggaagccgccgcaggcttcgcgcggggccccccgggtgcacgcgggcagggccggggtctcccgacgcacgaccccggagagtgttnaaagggtcggagctgcccggaggcggcggcagggctgagccagcgacgccctccattcactctccgcgcccgttctccggctgtcctcccgttccgctgcccgccctgccaccatgacggaacaggccatctccttcgccaaagacttcttggccggaggcatcgccgccgccatctccaagacggccgtggctccgatcgagcgggtcaagctgctgctgcaggtccagcacgccagcaagcagatcgccgccgacaagcagtacaagggcatcgtggactgcattgtccgcatccccaaggagcagggcgtgctgtccttctggaggggcaaccttgccaacgtcattcgctacttccccactcaagccctcaacttcgccttcaaggataagtacaagcagatcttcctggggggcgtggacaagcacacgcagttctggaggtactttgcgggcaacctggcctccggcggtgcggccggcgcgacctccctctgcttcgtgtacccgctggatttcgccagaacccgcctggcagcggacgtgggaaagtcaggcacagagcgcgagttccgaggcctgggagactgcctggtgaagatcaccaagtccgacggcatccggggcctgtaccagggcttcagtgtctccgtgcagggcatcatcatctaccgggcggcctacttcggcgtgtacgatacggccaagggcatgctccccgaccccaagaacacgcacatcgtggtgagctggatgatcgcgcagaccgtgacggccgtggccggcgtggtgtcctaccccttcgacacggtgcggcggcgcatgatgatgcagtccgggcgcaaaggagctgacatcatgtacacgggcaccgtcgactgttgggaggaagatcttcagagatgagggaggccttcttcaagggtgcgtggtccaacgtcctgcggggcatggggggcgccttcgcctggtcctgtctactagctcaaacaggtttcctccacacacacacacacaccaggggaaccaagagaaccacgtagaatcctcaaccgtgcggaccatcaaccttcgagaaattccagttgtctttttcccagccgcatcctgcctgtagatggccggggaaggctctagaaaaggggcgcattgcgatccaaccatcggcagccgattccgtgtcttgatcacggggtgggagggaaccgtggcgtccctgcgtggggcccatgggtgagacactccagtactgagacctagagtccagatgcttgtaggagccaagtcgtgttctaagtatttatttaaaacaaaagaaaaaaaaaaaaaaaaaaaaaaaaaaaaaaaaaaaaaaaaaaaaaaaaaccccggattaaaaaaaaaaaaaaaaaaaaaaaatccttgtggggccgcttgggcccattcaattttaaatttgaccaatcttttgcntgnggccgaatttggggttaattgggccaattccccttatggggggcggattaacaattaatgggccggggtttaanaacgtgcggactgggaaaaccctggggttcccnaattnaatngcntngaaaaaatccccttttnnncanttggggnaatancaaannggcccnnncggntngccttnccaaaattttcccaccctgaagggcaatggaaatttaagcctaattttttggtaaaaaccgggtaaatttttttaaactttttttttaccggcctggc

SEQ ID NO: 712875 - DNA, 190 bp, Homo sapiens
gaatgaacctgccatgattgtcccagaaagataaaatatgccagcatattgcagactacccatccttctgcatataataactagaatactaacagaggccaagctaagacccaaaccagacagctactaagacagctaaagagccccctctattagcaaatagtcgcagtttataggagagcccaaccag

SEQ ID NO: 712876 - DNA, 204 bp, Homo sapiens
gatcggtcttcctcgtgcagatggggcatccagtggcccgggtgggggagggtccagttcctctcagtcagtgggaagaagtgccccgggcagtcgatgtccgggtggctggtgggaagccacacggatcccttcatggagggaatatgtcaatggccaacagagctcgtccaacagaacggcgctacaggcacgtgtgtccaa

SEQ ID NO: 712877 - DNA, 1570 bp, Homo sapiens
  misc_feature (122)..(122): n is a, c, g, or t
cacggatcggcagcgggactgagccgcgcccacgtggaagccgccgcaggcttcgcgcggggccccccgggtgcacgcgggcagggccggggtctcccgacgcacgaccccggagagtgttnaaagggtcggagctgcccggaggcggcggcagggctgagccagcgacgccctccattcactctccgcgcccgttctccggctgtcctcccgttccgctgcccgccctgccaccatgacggaacaggccatctccttcgccaaagacttcttggccggaggcatcgccgccgccatctccaagacggccgtggctccgatcgagcgggtcaagctgctgctgcaggtccagcacgccagcaagcagatcgccgccgacaagcagtacaagggcatcgtggactgcattgtccgcatccccaaggagcagggcgtgctgtccttctggaggggcaaccttgccaacgtcattcgctacttccccactcaagccctcaacttcgccttcaaggataagtacaagcagatcttcctggggggcgtggacaagcacacgcagttctggaggtactttgcgggcaacctggcctccggcggtgcggccggcgcgacctccctctgcttcgtgtacccgctggatttcgccagaacccgcctggcagcggacgtgggaaagtcaggcacagagcgcgagttccgaggcctgggagactgcctggtgaagatcaccaagtccgacggcatccggggcctgtaccagggcttcagtgtctccgtgcagggcatcatcatctaccgggcggcctacttcggcgtgtacgatacggccaagggcatgctccccgaccccaagaacacgcacatcgtggtgagctggatgatcgcgcagaccgtgacggccgtggccggcgtggtgtcctaccccttcgacacggtgcggcggcgcatgatgatgcagtccgggcgcaaaggagctgacatcatgtacacgggcaccgtcgactgttgggaggaagatcttcagagatgagggaggccttcttcaagggtgcgtggtccaacgtcctgcggggcatggggggcgccttcggctggtcctgtacgacgagctcaagaaggtgatctaagggccgcggcctcctccacacacacacacacaccaggggaaccaagagaaccacgtagaatcctcaaccgtgcggaccatcaaccttcgagaaattccagttgtctttttcccagccgcatcctgcctgtagatggccggggaaggctctagaaaaggggcgcattgcgatccaaccatcggcagccgattccgtgtcttgatcacggggtgggagggaaccgtggcgtccctgcgtggggcccatgggtgagacactccagtactgagacctagagtccagatgcttgtaggagccaagtcgtgttctaagtatttatttaaaacaaaagaatcacgttttcccatttcttcagcgctagcccctgttttgcacagccgagtactggcgagtatgttctatgttgggcctcctgctgcaaaacaataaacagaggacgcaga

SEQ ID NO: 712878 - DNA, 1357 bp, Homo sapiens
  misc_feature (122)..(122): n is a, c, g, or t
cacggatcggcagcgggactgagccgcgcccacgtggaagccgccgcaggcttcgcgcggggccccccgggtgcacgcgggcagggccggggtctcccgacgcacgaccccggagagtgttnaaagggtcggagctgcccggaggcggcggcagggctgagccagcgacgccctccattcactctccgcgcccgttctccggctgtcctcccgttccgctgcccgccctgccaccatgacggaacaggccatctccttcgccaaagacttcttggccggaggcatcgccgccgccatctccaagacggccgtggctccgatcgagcgggtcaagctgctgctgcaggtccagcacgccagcaagcagatcgccgccgacaagcagtacaagggcatcgtggactgcattgtccgcatccccaaggagcagggcgtgctgtccttctggaggggcaaccttgccaacgtcattcgctacttccccactcaagccctcaacttcgccttcaaggataagtacaagcagatcttcctggggggcgtggacaagcacacgcagttctggaggtactttgcgggcaacctggcctccggcggtgcggccggcgcgacctccctctgcttcgtgtacccgctggatttcgccagaacccgcctggcagcggacgtgggaaagtcaggcacagagcgcgagttccgaggcctgggagactgcctggtgaagatcaccaagtccgacggcatccggggcctgtaccagggcttcagtgtctccgtgcagggcatcatcatctaccgggcggcctacttcggcgtgtacgatacggccaagggcatgctccccgaccccaagaacacgcacatcgtggtgagctggatgatcgcgcagaccgtgacggccgtggccggcgtggtgtcctaccccttcgacacggtgcggcggcgcatgatgatgcagtccgggcgcaaaggagctgacatcatgtacacgggcaccgtcgactgttgggaggaagatcttcagagatgagggaggccttcttcaagggtgcgtggtccaacgtcctgcggggcatggggggcgccttcgcctggtcctgtctactagctcaaacaggtttcctccacacacacacacacaccaggggaaccaagagaaccacgtagaatcctcaaccgtgcggaccatcaaccttcgagaaattccagttgtctttttcccagccgcatcctgcctgtagatggccggggaaggctctagaaaaggggcgcattgcgatccaaccatcggcagccgattccggactgtgagtcgtcgactgggtgtcctctagagtcaacactcaggaacagcgtg

SEQ ID NO: 712879 - DNA, 314 bp, Homo sapiens
gaggcatatataaacaagttgcctgtacttactatgtatgtcagatacacagatacattgtgttacagttgcctacagtatcagtacagtaacgttgccttcaagttaaaagcacaaggttacttacaccatatagcctaggtgtggaggaggctccaccacctgttttttaggtccatgtaggtacacatggtgttcacaggaaaaactggcttgaacaggcatttctcagaacacattcctgtggttaagccatggtttgactattatttcaaaattcgaaaaaccccccaggttggaaaaaatctgggtct

SEQ ID NO: 712880 - DNA, 1381 bp, Homo sapiens
  misc_feature (122)..(122): n is a, c, g, or t
  misc_feature (1170)..(1170): n is a, c, g, or t
  misc_feature (1236)..(1236): n is a, c, g, or t
  misc_feature (1240)..(1240): n is a, c, g, or t
cacggatcggcagcgggactgagccgcgcccacgtggaagccgccgcaggcttcgcgcggggccccccgggtgcacgcgggcagggccggggtctcccgacgcacgaccccggagagtgttnaaagggtcggagctgcccggaggcggcggcagggctgagccagcgacgccctccattcactctccgcgcccgttctccggctgtcctcccgttccgctgcccgccctgccaccatgacggaacaggccatctccttcgccaaagacttcttggccggaggcatcgccgccgccatctccaagacggccgtggctccgatcgagcgggtcaagctgctgctgcaggtccagcacgccagcaagcagatcgccgccgacaagcagtacaagggcatcgtggactgcattgtccgcatccccaaggagcagggcgtgctgtccttctggaggggcaaccttgccaacgtcattcgctacttccccactcaagccctcaacttcgccttcaaggataagtacaagcagatcttcctggggggcgtggacaagcacacgcagttctggaggtactttgcgggcaacctggcctccggcggtgcggccggcgcgacctccctctgcttcgtgtacccgctggatttcgccagaacccgcctggcagcggacgtgggaaagtcaggcacagagcgcgagttccgaggcctgggagactgcctggtgaagatcaccaagtccgacggcatccggggcctgtaccagggcttcagtgtctccgtgcagggcatcatcatctaccgggcggcctacttcggcgtgtacgatacggccaagggcatgctccccgaccccaagaacacgcacatcgtggtgagctggatgatcgcgcagaccgtgacggccgtggccggcgtggtgtcctaccccttcgacacggtgcggcggcgcatgatgatgcagtccgggcgcaaaggagctgacatcatgtacacgggcaccgtcgactgttggaggaagatcttcagagatgaggggggcaaggccttcttcaagggtgcgtggtccaacgtcctgcggggcatggggggcgccttcgtgctggtcctgtacgacgagctcaagaaggtgatctaagggccgcggctcctccaacacaacacacaccagggaanccaagagaacccgtagaatctccaacgtgggacatcaacctcgagaaatccaggtgctttccccancgancgctgtaaaggcgggaggctcaaaagggcttggtccccacggcccggccggttgacacggggagggaacgggccgggcccggccaccagagcacaacagttgggacgcggtttttaaaaaaagggcgaacgggggcacgta

SEQ ID NO: 712881 - DNA, 2059 bp, Homo sapiens
  misc_feature (122)..(122): n is a, c, g, or t
cacggatcggcagcgggactgagccgcgcccacgtggaagccgccgcaggcttcgcgcggggccccccgggtgcacgcgggcagggccggggtctcccgacgcacgaccccggagagtgttnaaagggtcggagctgcccggaggcggcggcagggctgagccagcgacgccctccattcactctccgcgcccgttctccggctgtcctcccgttccgctgcccgccctgccaccatgacggaacaggccatctccttcgccaaagacttcttggccggaggcatcgccgccgccatctccaagacggccgtggctccgatcgagcgggtcaagctgctgctgcaggtccagcacgccagcaagcagatcgccgccgacaagcagtacaagggcatcgtggactgcattgtccgcatccccaaggagcagggcgtgctgtccttctggaggggcaaccttgccaacgtcattcgctacttccccactcaagccctcaacttcgccttcaaggataagtacaagcagatcttcctggggggcgtggacaagcacacgcagttctggaggtactttgcgggcaacctggcctccggcggtgcggccggcgcgacctccctctgcttcgtgtacccgctggatttcgccagaacccgcctggcagcggacgtgggaaagtcaggcacagagcgcgagttccgaggcctgggagactgcctggtgaagatcaccaagtccgacggcatccggggcctgtaccagggcttcagtgtctccgtgcagggcatcatcatctaccgggcggcctacttcggcgtgtacgatacggccaagggcatgctccccgaccccaagaacacgcacatcgtggtgagctggatgatcgcgcagaccgtgacggccgtggccggcgtggtgtcctaccccttcgacacggtgcggcggcgcatgatgatgcagtccgggcgcaaaggagctgacatcatgtacacgggcaccgtcgactgtaggaagatcttcagagatgaggggggcaaggccttcttcaagggtgcgtggtccaacgtcctgcggggcatggggggcgccttcgtgctggtcctgtacgacgagctcaagaaggtgatctaagggccgcggcctcctccacacacacacacacaccaggggaaccaagagaaccacgtagaatcctcaaccgtgcggaccatcaaccttcgagaaattccagttgtctttttcccagccgcatcctgcctgtagatggccggggaaggctctagaaaaggggcgcattgcgatccaaccatcggcagccgattccgtgtcttgatcacggggtgggagggaaccgtggcgtccctgcgtggggcccatgggtgagacactccagtactgagacctagagtccagatgcttgtaggagccaagtcgtgttctaagtatttatttaaaacaaaagaatcacgttttcccatttgtaaaaaaaaaaaaaaaaaaaaaaaaaaaaaaaaaaaaaaaaaaaaaaaaaaaaaaaaaaaaaaaaaaaaaaaaaaaaaaaaaaaaaaaaaaacaacaaccgggtggggcgcgcgcgcgcgcgcgcggcgcccgcagaaagagctttacaaacaccccgcgggtggggcgcgcgcgcggggcgccaaaggagagaaagaagaaagtgtggaaaagagggtgtacccataggagaacaccgggggaaataaaataaggggggggagggtatccccacacaaattaaaaaacgccgggggggagaaacacgagagggtggtcttagggagaaaaacacccagaggagggaggccacgggaggagcacaaaaggaggggcacataacacaggggggagcaccaaaggaggccccaaagacaacaaaaaaaaaggcccgcgggtgcgagggggggggaggaaccgacgcacgcagcgcaacaaagcgcagcacaacccataccacaaaacaccacacaacaaccacacgaacaagaagggcacgaaacacaagcaaaagaccagacaccaagcgcgaaccgtacg

SEQ ID NO: 712882 - DNA, 2786 bp, Homo sapiens
  misc_feature (122)..(122): n is a, c, g, or t
  misc_feature (2584)..(2584): n is a, c, g, or t
  misc_feature (2605)..(2605): n is a, c, g, or t
  misc_feature (2608)..(2608): n is a, c, g, or t
  misc_feature (2610)..(2610): n is a, c, g, or t
cacggatcggcagcgggactgagccgcgcccacgtggaagccgccgcaggcttcgcgcggggccccccgggtgcacgcgggcagggccggggtctcccgacgcacgaccccggagagtgttnaaagggtcggagctgcccggaggcggcggcagggctgagccagcgacgccctccattcactctccgcgcccgttctccggctgtcctcccgttccgctgcccgccctgccaccatgacggaacaggccatctccttcgccaaagacttcttggccggaggcatcgccgccgccatctccaagacggccgtggctccgatcgagcgggtcaagctgctgctgcaggtccagcacgccagcaagcagatcgccgccgacaagcagtacaagggcatcgtggactgcattgtccgcatccccaaggagcagggcgtgctgtccttctggaggggcaaccttgccaacgtcattcgctacttccccactcaagccctcaacttcgccttcaaggataagtacaagcagatcttcctggggggcgtggacaagcacacgcagttctggaggtactttgcgggcaacctggcctccggcggtgcggccggcgcgacctccctctgcttcgtgtacccgctggatttcgccagaacccgcctggcagcggacgtgggaaagtcaggcacagagcgcgagttccgaggcctgggagactgcctggtgaagatcaccaagtccgacggcatccggggcctgtaccagggcttcagtgtctccgtgcagggcatcatcatctaccgggcggcctacttcggcgtgtacgatacggccaagggcatgctccccgaccccaagaacacgcacatcgtggtgagctggatgatcgcgcagaccgtgacggccgtggccggcgtggtgtcctaccccttcgacacggtgcggcggcgcatgatgatgcagtccgggcgcaaaggagctgacatcatgtacacgggcaccgtcgactgtaggaagatcttcagagatgaggggggcaaggccttcttcaagggtgcgtggtccaacgtcctgcggggcatggggggcgccttcggctggtcctgtacgacgagctcaagaaggtgatctaagggccgcggcctcctccacacacacacacacaccaggggaaccaagagaaccacgtagaatcctcaaccgtgcggaccatcaaccttcgagaaattccagttgtctttttcccagccgcatcctgcctgtagatggccggggaaggctctagaaaaggggcgcattgcgatccaaccatcggcagccgattccgtgtcttgatcacggggtgggagggaaccgtggcgtccctgcgtggggcccatgggtgagacactccagtactgagacctagagtccagatgcttgtaggagccaagtcgtgttctaagtatttatttaaaacaaaagaatcacgttttcccatttacttcagcgctagcccctgttttgcacagccgagtactggcgagtatgttctatgttgggcctcctgctggtcctgtacgacgagctcaagaaggtgatctaagggccgcggcctcctccacacacacacacacaccaggggaaccaagagaaccacgtagaatcctcaaccgtgcggaccatcaaccttcgagaaattccagttgtctttttcccagccgcatcctgcctgtagatggccggggaaggctctagaaaaggggcgcattgcgatccaaccatcggcagccgattccgtgtcttgatcacggggtgggagggaaccgtggcgtccctgcgtggggcccatgggtgagacactccagtactgagacctagagtccagatgcttgtaggagccaagtcgtgttctaagtatttatttaaaacaaaagaatcacgttttcccatttgtacttcagcgctagcccctgttttgcacagccgagtactggcgagtatgttctatgttgggcctcctgctgcaaaacaataaacagaggacgcagaggtcctcctgcctggccacgcacctctccacagggcggcctggggtctggagatgggcgctgggcccacgggacgcagatggggccacgctctgcccgtggctggcccacgttcctggtctgcagtgctgcctcctccccagcacccctggggcacagagggcagggtcacagctgggaagaggcggggggtagaaaccaaggctggcagaagtgtagccgggctccctgataaatgctggaggaccccagggcacctgcacttactgtaccctctctgagagcatttgtatgatctcatgtctcagctctggaggctggaggtcccagaaaaccaaggtatggtagattcagtctctggtgagtacccagttcctggcttctagatggcgccttctccctgtgtgtcctcagatgatggatgaggccagggtgctctctggagtcctttctgtaagggcactgatcccatccatgaggcctcatgactcccaaagacccccactttccaacgccatcacttgggagaggggcgttttcagcgtgaatcttggggaanctgaaacagggtgacacctgngtncntctcactctgtagctcccgaaggccactccagcccccattccaacatgaacagtggaagtggtcggggtccccaaattggcagctgtggttccccggggttcacccgtgagaaatccaccccaagggggtcccccccgcgagggaccaaaagcttccttcaagcttttttttggtc

SEQ ID NO: 712883 - DNA, 159 bp, Homo sapiens
cattgtcacccaggctgtagtacagtggcacaatcacagctcactgcggccttgattcctgggcccaagcaatcctcccacctcagcctcccaagaagtgctgggattacagacaggaacctctctgcctggctgggtttcttttattgggtaccgagc

SEQ ID NO: 712884 - DNA, 383 bp, Homo sapiens
aattgattattaggatatattcccctgaaggattctttttttaaaaaaatgtgaaatgtcatcttggacttacccctttcatgaaaagggatttcctgcttttgtactgcatgggtggcagttgtgaggaaaagcccgtccaatgaccttttttcaaaagaaatgcagtggtcccttcagttgagagtggctttttaataccccaaggtcccctagaagaattccactgtttcaagaatcaagggacccccatatatctcgccattcccaactttgtttgaggggctcgttatcccgctcttgggagccccccctgccatgtaaaatggaagaaaatgcaaagaaacccaatgtgccgagtgaataaagggttgtcatttcca

SEQ ID NO: 712885 - DNA, 355 bp, Homo sapiens
gtgcaggctctctagcggggaggcggggagggaagctctctttcttctgggaggggacaaagcttcaggcagggagctgccagcggagcggggcatggaatcgggggacctcatggaggtctggggctgacaccccactcccggttggacggcccagccgggactgggggagaatgactttccctttgttggccccagtaggggctagcataagcggaggtagaacttatctttaagcggcagcaaaatcagggagtgactttggtcccctctcgtgtggaccctggtaaagagccgtaaaccactgggtgacgtaggtgggtgtggttgcccggggtggcctgtggctccgccc

SEQ ID NO: 712886 - DNA, 377 bp, Homo sapiens
cagaagactttataacaatactcactgcacaaaattgttaaagggtggggttatgctgtgatattatttttcctcatataatgtcccacttgtactgttctagaactccttacagtttccacggtaaatttgttttcaaaatgccgaattgtgaaactcttgctgggcttcacgtttcttattatcctttcatagtttctctgtgttgctgtttgtaagtttccttgtgatgacacattctatcatctaagaaacccaggttatccctgttttcaatgcgatccgtaatcaccttgtgctcattaatcacattggactgatgcatatcggttccagccttgatgttcgtctgtatctccagtaggtttctgggtggc

SEQ ID NO: 712887 - DNA, 481 bp, Homo sapiens
atatccactatactttaatttaatctcgaaacagactaaatataaaagattttagctttaaataagcccttagacctcgtgattgctcaaaccttttcatattcaaatggcctgacagagagcaaagaagtctcacctcagtgataataagatgctcagaatgtgtttgctgtaattgcataacacaatgcactgtgttgtaaaaccttctcaagaaaccagatataattatatttaatacatactattttaatataatataattacattaggaataaacaataatgtacattatattataatcgccaatcatggcactaaagactagagatgaaacattcactttgaggaggtttgctttctttatgcttaatgaaaacactgacagaactactatagaataactgattgtaaaccaataaaatcctcgctgaaaaacaccacctacaattaaaatttgatcagagagttaaactcacca

SEQ ID NO: 712888 - DNA, 120 bp, Homo sapiens
  misc_feature (49)..(49): n is a, c, g, or t
gggcttccagctccccatcctttttgttccctcccacacacctgaccgntgttttcctccagcatccccttttgatgggttcttccaccttttcccaggattctcctcatccaaacccac

SEQ ID NO: 712889 - DNA, 201 bp, Homo sapiens
acgactcgagccggtaccataaatgcaggagaaatgcttatgtatccagccggacaaacgggctctgatgttgttagaatggggcatgcacatatatgggtttacgctgttcctcttccatctctcattgtggcagatatcactaatcaatgatggcactcatttctagcaagtccatgaggcctcaaaatcttgtcaaaa

SEQ ID NO: 712890 - DNA, 901 bp, Homo sapiens
gcgaacaaggatgctcctgtccctcctacagctgtaagccacagcgaaggctttaagagagccatactgaaggcacgctgttgaacaggtgtccactgccatcctccagaagaagatccgcgagcgtcacccaccttccggcggtcgagagacactgcgactccggagacagcccaaagtatcctcggtaacgagctgcgtcccaggagaaacaagcttgaccactatgctatcatctagtttccgctgaccacgtgagtctgccatgaagaagatagaagacaactagacacgacttgctgattacacttgtgtgcatgtctagagagccaatcataccaccacattaaactggctgtcaagaagctgtatgacattgatgttggccaaggttgcaacgaccctgattcgcgcactgatggagaagcaatgaacgggatatgttcgactggctcctgattgacgatgcctctcgtgactgttggccataccaagaattgcgatcatctatagactgagtccagctgcctaattctgagatatatatatatgtatctatctatacagcttgatccaggcaccttttggatcttcatgccctgtgttctgcccgctacggacccccatctctgtgacttcctgggagactcacttcctagcatgaggcaagtgaagcttgatcaagaagatgggtgaccaccgtgaccactctccagaggctgagtgagccggaaggctgcgcttgaacgaggtatctcattaccacagggcatcactctccagcacgactaagagccttcttgagcccatctgacttctgaaggggcccctttgcaagtacatagggcctcatgcctaagcctacctccctccagacaataagcaagcttcttcactaacc

SEQ ID NO: 712891 - DNA, 760 bp, Homo sapiens
  misc_feature (2)..(2): n is a, c, g, or t
  misc_feature (40)..(41): n is a, c, g, or t
  misc_feature (561)..(561): n is a, c, g, or t
anttaagaaagcggggtctaatatatagtgtatacattcnnagttttctttttttcttttataggtaagcataaactcccatgggggcagaaaatattactgaaaattctttgtatgtgtgtctgtgcttcaatacaatttggttgggctggggtttttttgtttgtgggggtttttaacatgaatacatgaggtgtgatatctgggcttcacgtgtaacagtatgagctcagcagtgactggtagagggagtgctgtttcttctaccatgtgtcttccccagagtccagttaatactccttgtatagtgctcaggagtggcctatcggtctgctttccctacctgtgtccctttcatctctctccagtgctctccctgaagggaagagtatgaattgtgaccctgggctcagataaaggaactgccccacgaacttaaggtctatgcccaattatcatcttttcaccccttccctagagacaaacacattgtcatgatctagactataaaatcaacaatggaagactgataatccatttattctttttttctttttgggntaaaggatttggatcagatgtaagaccaaacatgtaatattttgtatcatcaaatgcagccaagggcagtggttacttctgaatcccaacactttggaggccaaggaaacgttcacctggagtcagagtttagaccagctggcaactggtgaacccctttttcttgatctgttacccgtgtggtggcctgccttgggcc

SEQ ID NO: 712892 - DNA, 183 bp, Homo sapiens
cctccgctactcagtgaggcaaggcaggcagattgctcaggtcgagagttcaatgaccagcctggccaacatggagaaaccccgtctctactaaaaacacaaaattagccgggcattgtggcacgtgctgtactcccagctactagggaggctgaggcaggagaatctcttgaaaccggaagg

SEQ ID NO: 712893 - DNA, 1395 bp, Homo sapiens
  misc_feature (87)..(87): n is a, c, g, or t
ggagttcctccttgctctcgcccctactctttctggtgttagatcgagcaaccctctaaacagcagtttagagtggtcaaaaacaanacaaaaaacaaaccaaaacggctcgcgaagccaacaaaagggcatgaaattttcttacggggaaatcctcctggttatcccgttaacggatcgtccggatcccttaagaagctcctttcgggagaaagctttttagatctccttaaagagggacgaacactcgatgatcaccgcgggaagaacaagcgcgcggatggaataaagcgaggatcgctggcggcgatgagacgtaggagagacgagctggagcttggcgcttaatgaatttggggcgtagaagcgtataaacaacgcacaagatggggttaacctcctgggggatattacactcacggcactgggaactaggcgacgcagaacacagggctcgcccaaatgggcaacgggggacctggtggttcgccaacggtccccaattagccctttgggcgggtaaagacacgtgcgcgaggcacacacggcgcaaggcatcatttgcaaccaggctctgcgcaaaacgcaacggcgtcgaacgcgccagacacatttggggcagcactaggtaagaaggtgaacgtctcacaaggtcaacaattcgacatgcggcgcgcgaggttaaagtactcagtgaaacacattcacaggacaatctacggttctgcgggcctacaacgcgcaagaggacaagcccttccaaggcattgcggcaacaagcaagctttttgcgcaagtctcgaacatgggtccacctctgggcacaccacatttctgtcgggagcacttacacaaacaaggggggacctcctaagcagtcacccctcgaggacaaagtgcaagctacactcgcgacaataacacgcacatgaggggcacagaagttcgggtagacacgagggcggagcataaccgtcgaaccagccagggaacacaattggtcataccggaggaccccactgctgtgcataaacagcaggcggcaggacatacaccagtggatgaccaacacagcagccacggctatcagggacaggggcgccagccggaggaaatctagacaatcagaaaacacacgttgttagcgacacgccaacgtgaccacacgtgcggtgcttagcaccagtatgaccaaacagaacataacactgtgaggcaggcctcacaaaagcacgccaaaagacagagtgacgactggggccgtccactaagattagacgggggaacacagcaccggggggcttagccgaaccgaacaaagaatcacacgatgtcagaccagatgtggaggcaccccacctgcggggaaacccgcggagggacacccgtggacaa

SEQ ID NO: 712894 - DNA, 642 bp, Homo sapiens
  misc_feature (71)..(71): n is a, c, g, or t
  misc_feature (358)..(358): n is a, c, g, or t
  misc_feature (370)..(370): n is a, c, g, or t
  misc_feature (400)..(400): n is a, c, g, or t
  misc_feature (409)..(409): n is a, c, g, or t
tgtggtagggttagaacttctgggagtacccattacattataacggtaatgaggaagccacgtttctggtnggagacgtgcctagagcagtggatctcaaactgtaacatgcttccaaatcactgaggctcccctattaaaccacaggtcactgggctgcattctgtgggtccagggctgggcctcggaatctgcatcttgacaagttcctgcatgctattgctggccagggaccacacattgccttagaaggtgcctaccagaggcttaactgggtgacctgcttcgactgttcaaaggggcatgccatgaactttagcattcactgtttaaacactgaacaaaaaccaggccccanacaactgaagantttttcattaaaaatgaagcttaggcttgnatccaaccnaagtaagcattttatttcctaaagttattttttagtccttgcaagtcatttttttaagaacaaaaatgcaaagacaattttttaaaagtgcgaacttagtctttgaagtgtaagaatgacttttgagaaaagtcatgtcaaatgtaaagtaacacaaatcaaactaagcctaagaaataatcaacttcacaataattaagagtagagaagcagaggaaatcaaaaaaaaaaaa

SEQ ID NO: 712895 - DNA, 151 bp, Homo sapiens
caggagcaggatcccagagtgaagtgagagcccagtgatctagatggcttctatcttcataagtcattgattcatcatgtgtagcctgagtgtagcgtagccagaacatcagcagagccctcaaatgttgcctcagattaaagtaaaggtt

SEQ ID NO: 712896 - DNA, 185 bp, Homo sapiens
ctcgtataggatcctcattttaagccgattaatatgattgtcgaacatgtactctagggcgatacgttgggatccaagctgtaccctgagtaattgggagcaaatcatttaattaagcctcctatgatagccaatacagttcctattgatgcgacatagtgtaagtcagctacaacgtattacgt

SEQ ID NO: 712897 - DNA, 362 bp, Homo sapiens
tatattatgaagtcttttaacagtctctctatatataaatacacagagtttggtatgatatttaaatacatcatctggccaggcatggtggctaacgcctgaaatcctagcactttgggaggccgagacgggcggatcacctgaggtgaggagttcaagaacagcctgcccaacatagtaaaactccgtctctaccaatatacaaaaattagccgggcatgatggtggtggcctgtaatcccagctacttgggaagctgaaacagaagaatcgcttgaacccaggagacggtggttacagtgagcaaagatcgagccactgcactccagcctgggcagctgaacaagactccgtctcaaaaa

SEQ ID NO: 712898 - DNA, 205 bp, Homo sapiens
taatcgagctcggtccaggtgtgtcgtctggtgtcagaggagtcaacttctcccatgattcagacaagtatgttagtacctaggtgggcagtgaaacctcctggaaatgtgatttctgtgattcagtacaccaactcactgagccgatccaattcatttgaaaggtctgagtcagtcgaacttgtggcttgcacacaggataaag

SEQ ID NO: 712899 - DNA, 281 bp, Homo sapiens
aggttaacaagcacagtgaaacgaagatccgtaatggtgaaggcaattacccgaagaccgatgtatgtcaaccgcagcacagggcgttgatcgagtccgatttcactgaaaaagtgtctgcccgtcgccaggcgtttggttcagcgcgggatcgccaagtgctttctatcagaagcatggtcgcaggcgggacaaatgccgccacgtccgccttcgtcttgcgctatgagccccagtgcatcgcgcggcacgatcctctattcggtgaagggttataaaaa

SEQ ID NO: 712900 - DNA, 501 bp, Homo sapiens
  misc_feature (44)..(44): n is a, c, g, or t
  misc_feature (142)..(142): n is a, c, g, or t
  misc_feature (350)..(350): n is a, c, g, or t
  misc_feature (393)..(393): n is a, c, g, or t
  misc_feature (485)..(485): n is a, c, g, or t
  misc_feature (487)..(487): n is a, c, g, or t
gcctgaatagccaatacaatattaaagaaaaacaaagggagaangcagacagacttgaagacagtatagctgggtgcagtggctcatgcctgtaatcccagcactttgggaagctgaggcaggaggttcgcttgagcccagnagtttaaggccagcctgggcaacacagtgagacctcatctctccaaaaaaaaaattagccaggtgtggtggtgcacacctgtagtcacagctactccgaggctgagacaggaggattgcctgagcccaagagattgaggctgcagtgagccatgatcaagttactgcactcaagcttgggcaacagaattagaccttgcctaaaaaangaaaaaaaaatagtatatgttccaatatatcaagacagtgtantattgaagccaaggcgagtgaatcacttggggtcagttagtttgagaccagcctggccaacatggtgaaaccctgtttctactaaaaatatnanaatcagctgggcgt

SEQ ID NO: 712901 - DNA, 522 bp, Homo sapiens
  misc_feature (4)..(4): n is a, c, g, or t
ctgntctgggcttagacggctgtcttgcgggttctgtggtgcctgggttctttctggaggcgccttagacagtgtgtcttgcgggttctgtggtacctgggttctgtctgggcaccttagacggctgtcttgcaggttctgtggtacctgggttctgtctgggcgccttagacggctgtcttcagggttctgtggtacctgggttctgtctgtgtgccttagacggctgtcttgtgggttctgtggtgcctgggttctgtctgggcaccttagacgactgtcttcagggttctgtggtacctcgcttctgtctgggcgccttagacggctgtcttcagggttctgtggtacctgggttctgtctgggcaccttagacggctgtcttcagggttctgtggtacctgggttctgtctgggggcaccttagatagctgtctccagggttctgtggtgcctgggttctgtctgggcgccttagacggctgtctatgtgggttctgtggtacctgggtcctgtctgg

SEQ ID NO: 712902 - DNA, 366 bp, Homo sapiens
  misc_feature (44)..(44): n is a, c, g, or t
cctgcctcagcctcccagattgctgggattacaggcgtgagcanccatgcccagcctaaattgtctgatttagtctgtgctcagcttgtttttcccaactgttgttgggaaaacatgttcccaacatgttgggaaggcatgttcatgataatatactgttgatattttaatttttaagttaaattcctataaataaatatgagaaatttgttaggatatttaaagcatcttctaacctttaaaaatatgtgcttttaaaaattattaggttgtagaattgggaaaaaatgcaatttgtcttatctttttctattagcatgtttccagtgtacagttcattcaaagggggggtagtgtggcaaaaca

SEQ ID NO: 712903 - DNA, 294 bp, Homo sapiens
  misc_feature (6)..(6): n is a, c, g, or t
tggggnggactctagagaatcccggacaaacggcaccacatggcagccaggacaatcgctcattctgcattgggagtctgcaagaagactctgggttcccttctttgacagagctgaggcagtaaaagcaaaagcagatgagtggcccaaaactgctccaaagaaagatgagaacagctcatgacctcatgccactgaagacagggacggagagagtgataattcagaccgtgttcctgtgcccagttctcaaaattacttcagccaagctatagaagcagccttcatgaaact

SEQ ID NO: 712904 - DNA, 94 bp, Homo sapiens
ggatttgctggtgcagtacaactaggcttaatagggacatgtcgcccacaattttaactaggaaaatataagtgccatttataaggaaaaaaaa

SEQ ID NO: 712905 - DNA, 522 bp, Homo sapiens
  misc_feature (35)..(35): n is a, c, g, or t
  misc_feature (46)..(46): n is a, c, g, or t
  misc_feature (174)..(174): n is a, c, g, or t
  misc_feature (213)..(213): n is a, c, g, or t
  misc_feature (223)..(223): n is a, c, g, or t
  misc_feature (288)..(288): n is a, c, g, or t
  misc_feature (309)..(309): n is a, c, g, or t
  misc_feature (358)..(358): n is a, c, g, or t
  misc_feature (475)..(475): n is a, c, g, or t
  misc_feature (490)..(490): n is a, c, g, or t
  misc_feature (500)..(500): n is a, c, g, or t
cgatcttatcccacagagtaacggacgcgccaagnctgtctacaanctgaggagctgagaagccagtggtgaatcactcttagtcccaaaacctccaaagtagggaagccgaccgtgaagcctccggtctgtgaccaaaggcccgagagcccctggaaaatcactggtgtaagnacaagagtccaaaagttggttaacttggagtctgatgtncgagggaagnaagcatccagcacgggagaaagatggaggccacaagactcagcaagtctgctttattctagctgnactggcaatggattagatagnccccacccacactgagggtgggtctgcttcacccagtccactgactcanatgttaatctccttggacaacacctttacagacacgcccagggacaatactttgcatccttcaatccaatctggttgacacttaatattaccatcagagggtggtcttggtgttgtngtcctgagcttgtgnaagtgggtgnctgtcacttcctgggccattct

SEQ ID NO: 712906 - DNA, 1166 bp, Homo sapiens
tgtggcagaaactggccttccatctctctcagacaccaagcttgcagatccaggcttttcttgggcacacagtgaggccacccatggctctggcagcaagtctcttgtcctggctccttctgcttgtcctggatacttgctcggttgctgtggcatggagtccacgccgtatcccatgtggcaacggcaatccctgtgtgccacaacgaaacttcccaggctgcgcacagccatactgcgaactccagaccaggttccgcccacagccaggccagcctccgcaacgcgtcactggctcacaacccaagacatgcacttgcaagggcagccctgcgcaaatcaattagcacccaccaaggcgggccagaggatggccccacagagacaccccaacggcttgacacgccagcgcctatgatacatggataggcccaacaggacaggccacccccgtattagtgcttaaggaacttctggttcccacagtggacactttggttaccgtatggctttatccacaagtgtgaccaaccaactcgagagtccaacccccctgtgcgcgcacaacggaacaacgacggagggacccccaacgaggcgcacacaacaggttcggccttcaccacaacaagcaaaatgcgcagaccaccataacacgaacagagccccattatgggcccacaccaagttacccagcccaagacgcaaccacttaggggacgccgcggggccgcagaatgtaaaaagcagaccaacaacaaccgggcgggcaacgtcacctccaagggacccgctgtaaacacgcccaccccgcaaaccaccgccgctcgtggagctgggcccgcatgatttaccaccccacggatgagacaaacgcgcccaaagagcccgacccaccggcgacaccacccgtgtaccaccgcatacccgtacacccacaagcccaaacctgttgcgccacgcatccgaggacccttggggccaccgccccactgatgcctgctgccaccacaccagcgatacgcgtaaaggtagcaccgcccacatgacttatccgtttgtcactagtgcccgcccgacactgccgaattagccccaacacgccatttgtgttcgctagtgatacacattccccaccacataatcaccagcgtggatactacctc

SEQ ID NO: 712907 - DNA, 487 bp, Homo sapiens
tagaggatccccgtaagcagcgcagccacatcaataaagaagaagataggaagcgagtttccagtatgagtgccggcgtgggggagctgggggtgagatttagtcttgtgtgtggaggtacggagtgagtgatccctcgagtcttattattcggtccgcctcggagtggtgggttgggttggatcgggggccagtggtttcgtggatgcgcgagtaaggggggtagcgtccagtttggaattttaggcgagttaaccgagttggcaggtcgaggcgatgagtggggagtgtccaggatgggttggatgggggattgctgtgaggtcggctatggtgtacctggtttaaggtagccgaggaaggttgatgtggtatttcgaaggtgggggagaggagtcgttgcgggtgggaagctgtagggatggaggtagtgtggaccggtcgagttataagggtttgctggcattgatgtgggttggcttgtaag

SEQ ID NO: 712908 - DNA, 124 bp, Homo sapiens
  misc_feature (47)..(47): n is a, c, g, or t
  misc_feature (86)..(86): n is a, c, g, or t
tgaatttcccccccgggtgggggtctttggccgaaggcgcaaaattnttcctgtgggcaaactggcaaagtccgtggcaaggtttntttttatagtatagtagtaatagtaataatgatatgat

SEQ ID NO: 712909 - DNA, 229 bp, Homo sapiens
  misc_feature (9)..(9): n is a, c, g, or t
  misc_feature (71)..(71): n is a, c, g, or t
aaggcccantaacccggaaggggaaaaacccaagatggttttcaccaagatccgagcccaggtaatcctcntaggtagctcttcattatttttttcatcctggttaagtatgtatgtatgtattttatttatttatttatttaatttttgagacagggtctcactctgtcacccagactggaatgcagcggtgcaatttcagctcactgcaacctccacctaccaggtc

SEQ ID NO: 712910 - DNA, 160 bp, Homo sapiens
agtcagtcagcttttatacccggaggatgggcagctaactctataccccattcacagagagataccgagactatggcccagaaagccctgcacctcaattcctgaatgctgccatcaatgatcagtgtcattgttgtcatggctatcctcctggtgggtc

SEQ ID NO: 712911 - DNA, 2772 bp, Homo sapiens
  misc_feature (122)..(122): n is a, c, g, or t
  misc_feature (977)..(977): n is a, c, g, or t
  misc_feature (992)..(992): n is a, c, g, or t
  misc_feature (1003)..(1003): n is a, c, g, or t
  misc_feature (1005)..(1005): n is a, c, g, or t
  misc_feature (1023)..(1023): n is a, c, g, or t
  misc_feature (1028)..(1028): n is a, c, g, or t
  misc_feature (1034)..(1035): n is a, c, g, or t
  misc_feature (1039)..(1039): n is a, c, g, or t
  misc_feature (1041)..(1042): n is a, c, g, or t
  misc_feature (1045)..(1048): n is a, c, g, or t
  misc_feature (1067)..(1068): n is a, c, g, or t
  misc_feature (1070)..(1070): n is a, c, g, or t
  misc_feature (1075)..(1075): n is a, c, g, or t
  misc_feature (1087)..(1087): n is a, c, g, or t
  misc_feature (1090)..(1090): n is a, c, g, or t
  misc_feature (1094)..(1094): n is a, c, g, or t
  misc_feature (1097)..(1097): n is a, c, g, or t
  misc_feature (1100)..(1100): n is a, c, g, or t
  misc_feature (1102)..(1105): n is a, c, g, or t
  misc_feature (1107)..(1108): n is a, c, g, or t
  misc_feature (2570)..(2570): n is a, c, g, or t
  misc_feature (2591)..(2591): n is a, c, g, or t
  misc_feature (2594)..(2594): n is a, c, g, or t
  misc_feature (2596)..(2596): n is a, c, g, or t
cacggatcggcagcgggactgagccgcgcccacgtggaagccgccgcaggcttcgcgcggggccccccgggtgcacgcgggcagggccggggtctcccgacgcacgaccccggagagtgttnaaagggtcggagctgcccggaggcggcggcagggctgagccagcgacgccctccattcactctccgcgcccgttctccggctgtcctcccgttccgctgcccgccctgccaccatgacggaacaggccatctccttcgccaaagacttcttggccggaggcatcgccgccgccatctccaagacggccgtggctccgatcgagcgggtcaagctgctgctgcaggtccagcacgccagcaagcagatcgccgccgacaagcagtacaagggcatcgtggactgcattgtccgcatccccaaggagcagggcgtgctgtccttctggaggggcaaccttgccaacgtcattcgctacttccccactcaagccctcaacttcgccttcaaggataagtacaagcagatcttcctggggggcgtggacaagcacacgcagttctggaggtactttgcgggcaacctggcctccggcggtgcggccggcgcgacctccctctgcttcgtgtacccgctggatttcgccagaacccgcctggcagcggacgtgggaaagtcaggcacagagcgcgagttccgaggcctgggagactgcctggtgaagatcaccaagtccgacggcatccggggcctgtaccagggcttcagtgtctccgtgcagggcatcatcatctaccgggcggcctacttcggcgtgtacgatacggccaagggcatgctccccgaccccaagaacacgcacatcgtggtgagctggatgatcgcgcagaccgtgacggccgtggccggcgtggtgtcctaccccttcgacacggtgcggcggcgcatgatgatgcagtccgggcgcaaaggagctnacatcatgtacacgngcaccctcaantnttgaaaaaaaataaaaanaaatnaccccnnaaancnnggnnnnaacccgcccgccgccaacnncnccccnccagcccccccnccntccnccnggncnnnnannaacacggaaaaaaagtgtcctccacacacacacacacaccaggggaaccaagagaaccacgtagaatcctcaaccgtgcggaccatcaaccttcgagaaattccagttgtctttttcccagccgcatcctgcctgtagatggccggggaaggctctagaaaaggggcgcattgcgatccaaccatcggcagccgattccgtgtcttgatcacggggtgggagggaaccgtggcgtccctgcgtggggcccatgggtgagacactccagtactgagacctagagtccagatgcttgtaggagccaagtcgtgttctaagtatttatttaaaacaaaagaatcacgttttcccatttacttcagcgctagcccctgttttgcacagccgagtactggcgagtatgttctatgttgggcctcctgctggtcctgtacgacgagctcaagaaggtgatctaagggccgcggcctcctccacacacacacacacaccaggggaaccaagagaaccacgtagaatcctcaaccgtgcggaccatcaaccttcgagaaattccagttgtctttttcccagccgcatcctgcctgtagatggccggggaaggctctagaaaaggggcgcattgcgatccaaccatcggcagccgattccgtgtcttgatcacggggtgggagggaaccgtggcgtccctgcgtggggcccatgggtgagacactccagtactgagacctagagtccagatgcttgtaggagccaagtcgtgttctaagtatttatttaaaacaaaagaatcacgttttcccatttgtacttcagcgctagcccctgttttgcacagccgagtactggcgagtatgttctatgttgggcctcctgctgcaaaacaataaacagaggacgcagaggtcctcctgcctggccacgcacctctccacagggcggcctggggtctggagatgggcgctgggcccacgggacgcagatggggccacgctctgcccgtggctggcccacgttcctggtctgcagtgctgcctcctccccagcacccctggggcacagagggcagggtcacagctgggaagaggcggggggtagaaaccaaggctggcagaagtgtagccgggctccctgataaatgctggaggaccccagggcacctgcacttactgtaccctctctgagagcatttgtatgatctcatgtctcagctctggaggctggaggtcccagaaaaccaaggtatggtagattcagtctctggtgagtacccagttcctggcttctagatggcgccttctccctgtgtgtcctcagatgatggatgaggccagggtgctctctggagtcctttctgtaagggcactgatcccatccatgaggcctcatgactcccaaagacccccactttccaacgccatcacttgggagaggggcgttttcagcgtgaatcttggggaanctgaaacagggtgacacctgngtncntctcactctgtagctcccgaaggccactccagcccccattccaacatgaacagtggaagtggtcggggtccccaaattggcagctgtggttccccggggttcacccgtgagaaatccaccccaagggggtcccccccgcgagggaccaaaagcttccttcaagcttttttttggtc

SEQ ID NO: 712912 - DNA, 2334 bp, Homo sapiens
  misc_feature (122)..(122): n is a, c, g, or t
  misc_feature (2132)..(2132): n is a, c, g, or t
  misc_feature (2153)..(2153): n is a, c, g, or t
  misc_feature (2156)..(2156): n is a, c, g, or t
  misc_feature (2158)..(2158): n is a, c, g, or t
cacggatcggcagcgggactgagccgcgcccacgtggaagccgccgcaggcttcgcgcggggccccccgggtgcacgcgggcagggccggggtctcccgacgcacgaccccggagagtgttnaaagggtcggagctgcccggaggcggcggcagggctgagccagcgacgccctccattcactctccgcgcccgttctccggctgtcctcccgttccgctgcccgccctgccaccatgacggaacaggccatctccttcgccaaagacttcttggccggaggcatcgccgccgccatctccaagacggccgtggctccgatcgagcgggtcaagctgctgctgcaggtccagcacgccagcaagcagatcgccgccgacaagcagtacaagggcatcgtggactgcattgtccgcatccccaaggagcagggcgtgctgtccttctggaggggcaaccttgccaacgtcattcgctacttccccactcaagccctcaacttcgccttcaaggataagtacaagcagatcttcctggggggcgtggacaagcacacgcagttctggaggtactttgcgggcaacctggcctccggcggtgcggccggcgcgacctccctctgcttcgtgtacccgctggatttcgccagaacccgcctggcagcggacgtgggaaagtcaggcacagagcgcgagttccgaggcctgggagactgcctggtgaagatcaccaagtccgacggcatccggggcctgtaccagggcttcagtgtctccgtgcagggcatcatcatctaccgggcggcctacttcggcgtgtacgatacggccaagggcatgctccccgaccccaagaacacgcacatcgtggtgagctggatgatcgcgcagaccgtgacggccgtggccggcgtggtgtcctaccccttcgacacggtgcggcggcgcatgatgatgcagtccgggcgcaaaggagctgacatcatgtacacgggcaccgtcgactgttggaggaagatcttcagagatgaggggggcaaggccttcttcaagggtgcgtggtccaacgtcctgcggggcatggggggcgccttcggctggtcctgtacgacgagctcaagaaggtgatctaagggccgcggcctcctccacacacacacacacaccaggggaaccaagagaaccacgtagaatcctcaaccgtgcggaccatcaaccttcgagaaattccagttgtctttttcccagccgcatcctgcctgtagatggccggggaaggctctagaaaaggggcgcattgcgatccaaccatcggcagccgattccgtgtcttgatcacggggtgggagggaaccgtggcgtccctgcgtggggcccatgggtgagacactccagtactgagacctagagtccagatgcttgtaggagccaagtcgtgttctaagtatttatttaaaacaaaagaatcacgttttcccatttcttcagcgctagcccctgttttgcacagccgagtactggcgagtatgttctatgttgggcctcctgctgcaaaacaataaacagaggacgcagaggtcctcctgcctggccacgcacctctccacagggcggcctggggtctggagatgggcgctgggcccacgggacgcagatggggccacgctctgcccgtggctggcccacgttcctggtctgcagtgctgcctcctccccagcacccctggggcacagagggcagggtcacagctgggaagaggcggggggtagaaaccaaggctggcagaagtgtagccgggctccctgataaatgctggaggaccccagggcacctgcacttactgtaccctctctgagagcatttgtatgatctcatgtctcagctctggaggctggaggtcccagaaaaccaaggtatggtagattcagtctctggtgagtacccagttcctggcttctagatggcgccttctccctgtgtgtcctcagatgatggatgaggccagggtgctctctggagtcctttctgtaagggcactgatcccatccatgaggcctcatgactcccaaagacccccactttccaacgccatcacttgggagaggggcgttttcagcgtgaatcttggggaanctgaaacagggtgacacctgngtncntctcactctgtagctcccgaaggccactccagcccccattccaacatgaacagtggaagtggtcggggtccccaaattggcagctgtggttccccggggttcacccgtgagaaatccaccccaagggggtcccccccgcgagggaccaaaagcttccttcaagcttttttttggtc

SEQ ID NO: 712913 - DNA, 140 bp, Homo sapiens
ctttgacgcgtacggtcaagtactctaagtaccatgtgaagtttaagaattctcaaatatttaagataaaacaagtatgtgacaaggataacgatatgaataaaactaattcaaaatatatactggaggaaaataattca

SEQ ID NO: 712914 - DNA, 1373 bp, Homo sapiens
  misc_feature (122)..(122): n is a, c, g, or t
  misc_feature (1353)..(1353): n is a, c, g, or t
cacggatcggcagcgggactgagccgcgcccacgtggaagccgccgcaggcttcgcgcggggccccccgggtgcacgcgggcagggccggggtctcccgacgcacgaccccggagagtgttnaaagggtcggagctgcccggaggcggcggcagggctgagccagcgacgccctccattcactctccgcgcccgttctccggctgtcctcccgttccgctgcccgccctgccaccatgacggaacaggccatctccttcgccaaagacttcttggccggaggcatcgccgccgccatctccaagacggccgtggctccgatcgagcgggtcaagctgctgctgcaggtccagcacgccagcaagcagatcgccgccgacaagcagtacaagggcatcgtggactgcattgtccgcatccccaaggagcagggcgtgctgtccttctggaggggcaaccttgccaacgtcattcgctacttccccactcaagccctcaacttcgccttcaaggataagtacaagcagatcttcctggggggcgtggacaagcacacgcagttctggaggtactttgcgggcaacctggcctccggcggtgcggccggcgcgacctccctctgcttcgtgtacccgctggatttcgccagaacccgcctggcagcggacgtgggaaagtcaggcacagagcgcgagttccgaggcctgggagactgcctggtgaagatcaccaagtccgacggcatccggggcctgtaccagggcttcagtgtctccgtgcagggcatcatcatctaccgggcggcctacttcggcgtgtacgatacggccaagggcatgctccccgaccccaagaacacgcacatcgtggtgagctggatgatcgcgcagaccgtgacggccgtggccggcgtggtgtcctaccccttcgacacggtgcggcggcgcatgatgatgcagtccgggcgcaaaggagctgacatcatgtacacgggcaccgtcgactgttggaggaagatcttcagagatgaggggggcaaggccttcttcaagggtgcgtggtccaacgtcctgcggggcatggggggcgccttcggctggtcctgtacgacgagctcaagaaggtgatctaagggccgcggccctcctccacacacacacacacaccaggggaaccaagagaaccacgtagaatcctcaaccgtgcggaccatcaaccttcgagaaattccagttgtctttttcccagccgcatcctgcctgtagatggccggggaaggctctagaaaaggggcgcattgcgatccaaccatcggcagccgattccgtgtcttgatcacgaagggggatgacanaggatcctgctagagccagc

SEQ ID NO: 712915 - DNA, 157 bp, Homo sapiens; identical to SEQ ID NO: 480870

SEQ ID NO: 712916 - DNA, 177 bp, Homo sapiens
  misc_feature (13)..(13): n is a, c, g, or t
  misc_feature (71)..(71): n is a, c, g, or t
  misc_feature (154)..(154): n is a, c, g, or t
  misc_feature (158)..(158): n is a, c, g, or t
gccgggaacagtntggagagcttggctacatccatcctcctcaggcaggagcaggcttcctgagagagtcnaggtcgtacgagttttacgacttaggcgggctgcagattccttcctgggtgtttggtttaagccttgggtccagccctctctnagtnttccgggagttcgtgggtt

SEQ ID NO: 712917 - DNA, 699 bp, Homo sapiens
  misc_feature (306)..(306): n is a, c, g, or t
agaaataatttttttaaagaaaaggaaaagccttttaaaaaaacactcgaagaaaaggtttccaaggggacaaggtacctcgtaaagggggccaaaataaggcgtaacgcatgttaaaaccaaccacgaaaaaagctcccaaggtgggccggttaaggaataactggggaaacccacggcttttttcttcggccctcccaagcacaatccttccaaggtccactgtaatcacctccaaagcgtgaccctgtgcctgacaatgtagtcagatcctgttcaacaccctcttcttgaatgtgtgctgtntgggattcatagcattgacaaactccgtaagtcaaggacaagcaatatggttgtcaacgtatccgggtccatgtcctatgcctcacagcagaagtgcctgaacatctggaccgtgattctgggcatcttcatgaccattggattcatcctgttactggtattcggctctgtgacagtataccatattatgttgcagataacacaggaaagtcggggtcactagtacccgcctatagccaacaacctttgcaatccactgttcaatcctggccatgcacactgtggttgatgcccctgccccattggtcctgcccgtacatacagcagtttataccaacacagctgtcctcagtgtcattcaataaagtgcaggtgagtgtgaaaaaaaaaaaa

SEQ ID NO: 712918 - DNA, 122 bp, Homo sapiens
cttgacaacgcaccacggttttcggaaaacatatctctcttctaaattcgtaagatttgattcgaaatgaggtattttatgcagattggtaatacaacaacaaaggcaataattagtagacg

SEQ ID NO: 712919 - DNA, 1050 bp, Homo sapiens
  misc_feature (17)..(17): n is a, c, g, or t
  misc_feature (90)..(90): n is a, c, g, or t
  misc_feature (92)..(92): n is a, c, g, or t
  misc_feature (161)..(161): n is a, c, g, or t
  misc_feature (217)..(217): n is a, c, g, or t
  misc_feature (388)..(388): n is a, c, g, or t
  misc_feature (511)..(511): n is a, c, g, or t
  misc_feature (625)..(625): n is a, c, g, or t
  misc_feature (712)..(712): n is a, c, g, or t
  misc_feature (715)..(715): n is a, c, g, or t
  misc_feature (753)..(753): n is a, c, g, or t
  misc_feature (755)..(755): n is a, c, g, or t
  misc_feature (770)..(770): n is a, c, g, or t
  misc_feature (784)..(784): n is a, c, g, or t
  misc_feature (841)..(841): n is a, c, g, or t
  misc_feature (850)..(850): n is a, c, g, or t
  misc_feature (869)..(869): n is a, c, g, or t
  misc_feature (884)..(884): n is a, c, g, or t
  misc_feature (907)..(907): n is a, c, g, or t
  misc_feature (943)..(943): n is a, c, g, or t
  misc_feature (969)..(969): n is a, c, g, or t
  misc_feature (984)..(984): n is a, c, g, or t
  misc_feature (988)..(988): n is a, c, g, or t
  misc_feature (1045)..(1045): n is a, c, g, or t
gcagctaggcggcctgnagccgcccctgccagaccctcctctgcactcctctgcctaagtcacggcccaagccctggacacgtaggagtntnggcgggcaggggcaaggccaaggaaggggtggagtggtccaatgcagaagtaaaggtccaacccgactnccttactgagtttaggtgtgggggcccccctctcacccctccctccctgcacagcnctggctctccctggagttaggaggctgtttgtcccacaactgctgtggtctggaaggtgaacccatccccaggcaatggggaggccaggaagggccagaaccagaagagggcccagcggggccccagggctgcctgcaggtggtggcagggacccaggacaaaggagtccnggccccgagcccactcccatgtggcctggccccgcagcagccgcctcccatggaagagcagcccagccccgcacagcagcccacccgccacgcacgtttccgtaacgaaggccaaggcaaacngtgccaaaaaaactttgcctgtaagcaacaagagccaggaaagcaggaggagggcagccatgtggaggggcgtgtgggctcgcagcagggccgacagttcagggcccagcagcncagagacgtggagcaggacgccggcggcatgaagcagccggcacaggaagggccggtagttgccgaagcccacgcagcggcccagcnggnggcagttgtggtcccgacgcaggaagcagaagcggcangnagaacagttttcgcngcgtggcggcaccnggctttggcattggtagcagttagcccagccccggcccagaacgcggccggccagcntcacgccanggatgctgggatccgagcncaggaagagccccangttgcccagcaggttgagcagcnggaaggcggccagccccacgcaaaggcccgggccangggttccagcggcggcggcccgggancgagcccaacccgtnagcnagctccagggccacggcgcggcccaaagcgcggtgagcacgaaaagaactgcccggnccccg

SEQ ID NO: 712920 - DNA, 337 bp, Homo sapiens
cccagctacttaggaggctgatgcagggagaatcgcttgaacccaggaggcagaggtttcggtgagctgagattgtgtcgcactctagtcctgggcagacgagagccgagactccatcccaaaagaaaacaaaaagcgagtggtcgtttgtcaagttctggttcctgggtctttaagagtgattgggaggctggggcattgggtgggcttatgcctggtaatcccagcactttggggaggccaagggtgggcggatcatgtgaggccaggagttcgagaccatccgggcttaacattgattaaaccccgtttctagtaagaaattacaagaagatta

SEQ ID NO: 712921 - DNA, 503 bp, Homo sapiens
gctacatccacataagaaaacgccgcggcagtgtcaacacgaagtcgtttctagaaacaatatctcagatggagattcttgatagtcattactgtatacttagtcaacatgagtccaagcgaggctcgatatacaaatatcgcctcccggacactgtaattcagcagtataaacatttcctcacctgacagataactttgtttgccaaaaaagttgtttttaataaactataatcttttgaaaaacttcctttttgtattaagtttagaaagccccgttatttttcaacaaaggggggattttgtaccacagtaacaatgggtttagttttacgtcttacacttctggcacacaaataaaaacaaacaacattttgggtattgttaagaactgcttggtactttaccgatcacgacataaacaggtgtcaccttaaccacatattagccaactcttataaccagaagacgcatctctaaggatgatggggcactgagaatacc

SEQ ID NO: 712922 - DNA, 590 bp, Homo sapiens
cattgcagacgacgactgaagcacgagcctcattttatctcatctcaggagaatgtgcacttaatgatagtagcatatgcctcttagggttgtgagaattaagagcatttactggccatgtgatgaaactggtctcaggaaggcaacctcaaatgggacttatagtcaccagcaagtatgcgcttacagtgactaagcctgccttctacaaaagagttgccatcaaatcacagtttttacatggtttatagtaccagcactactgacatttgagcctgtcctgtactagtatcatcgaggattaaacaattataaaagcactgtatatagtgagggaaagattccacttttctccaaagtaactttatcctcttgattatcccatttcttctctcaatgggatctttgcttttggctttatatattcacaagccttccatgagaaagtaacaagaacaaaacatactcattttcctccagctatcttccagatttcctccacttcaaaatcaaattcagagagccttcaaatagtctgtttgcttccatttcttcagttcttaattcctgacatgctcaagcagtcctgt

SEQ ID NO: 712923 - DNA, 223 bp, Homo sapiens
tgccctagccccccgatatgcaccaaacttgttctccccgtcctggtccaggggtggggtttttaaaaactgacagcctttgccccaggcctgagtccttagcaagggttgggtaaggaggttttaagggaaaaggtccagtccttagcccttgaaaaacaaagcttttttgaccctgaatttggaggccccttgttttaaataataaatcgtgtttcccaga

SEQ ID NO: 712924 - DNA, 287 bp, Homo sapiens
gtttactgctgatacacatcagagcgcggatattcatagggtgaatgatattaccgaggataacctcagagtcttgcaggtgaatggcttggctcatgatgttcggcgatgacgatctgaagatcatgtagcagtactgcaatatgagcactgaattagcctggacatgctgcgctgatgaactatcatgccactgagacagacacacattgatacacctagtggcgacctcatgcacacttccaactgttctagaagcctatagtgcaatggctgactgctgtgcg

SEQ ID NO: 712925 - DNA, 387 bp, Homo sapiens
cttatccatgccctgcgcccagtcatcgaatggtcggacaacttatttgaattttttttgacgtcaaatatctgtagttcatgagtatcaaggaggcctcatgaaacgcaacgaccttttcactatcgagtaccagctgcacggcgagcccaagtccttcatcgtgcgcgcaccgcgcatggacaatgccgaggcttggcattgggccagttgtgacgctgatgtgccggtcatccccaaatttgggcaacacacgttcaagcgtgtgtccaaaccgatggcggagaaatacggcattacccaggtgcgctggagtggcgcggcacagattaaatgggcggagggcctcagaggatgaacagtcagactcttgtttacacaactaca

SEQ ID NO: 712926 - DNA, 288 bp, Homo sapiens
cggcacgaggtgatagtgtgcggcagactcaggagtaccagcggatcatggacatcaattcgcgaatggagcaggtgattgccacgtaccgcagcctgctcgtgggacaggaagatcttgacaacaatttgtctactcacaaggtcctttgaggcagcagcctgtgcggtctgtgctgtcaattggagggtgtcttctgggtcgagggatgggaaggaagggaccattacccccggctgttctcctgacctgccaataaaaatttatgcctcacgggaaaaaaaaaaa

SEQ ID NO: 712927 - DNA, 134 bp, Homo sapiens
aagaacaagcagtcaatcagtccatttcactttcactgtctgcagcatcagggtctctcacgcaccaggatagcagggtggcatgtcagctcatcatggcactcgcatttgcttcctggcaccttttcccagca

SEQ ID NO: 712928 - DNA, 912 bp, Homo sapiens
  misc_feature (199)..(199): n is a, c, g, or t
  misc_feature (211)..(211): n is a, c, g, or t
  misc_feature (260)..(260): n is a, c, g, or t
  misc_feature (265)..(265): n is a, c, g, or t
  misc_feature (280)..(280): n is a, c, g, or t
  misc_feature (288)..(288): n is a, c, g, or t
  misc_feature (299)..(299): n is a, c, g, or t
  misc_feature (312)..(312): n is a, c, g, or t
  misc_feature (321)..(322): n is a, c, g, or t
  misc_feature (324)..(324): n is a, c, g, or t
  misc_feature (327)..(328): n is a, c, g, or t
  misc_feature (332)..(332): n is a, c, g, or t
  misc_feature (334)..(334): n is a, c, g, or t
  misc_feature (338)..(338): n is a, c, g, or t
  misc_feature (345)..(346): n is a, c, g, or t
  misc_feature (354)..(354): n is a, c, g, or t
  misc_feature (356)..(356): n is a, c, g, or t
  misc_feature (362)..(362): n is a, c, g, or t
  misc_feature (367)..(367): n is a, c, g, or t
  misc_feature (370)..(370): n is a, c, g, or t
  misc_feature (378)..(380): n is a, c, g, or t
  misc_feature (385)..(385): n is a, c, g, or t
  misc_feature (387)..(387): n is a, c, g, or t
  misc_feature (393)..(393): n is a, c, g, or t
  misc_feature (396)..(396): n is a, c, g, or t
  misc_feature (401)..(402): n is a, c, g, or t
  misc_feature (405)..(405): n is a, c, g, or t
  misc_feature (420)..(420): n is a, c, g, or t
  misc_feature (429)..(429): n is a, c, g, or t
  misc_feature (432)..(432): n is a, c, g, or t
  misc_feature (434)..(434): n is a, c, g, or t
  misc_feature (438)..(438): n is a, c, g, or t
  misc_feature (444)..(444): n is a, c, g, or t
  misc_feature (452)..(453): n is a, c, g, or t
  misc_feature (455)..(456): n is a, c, g, or t
  misc_feature (460)..(460): n is a, c, g, or t
  misc_feature (466)..(466): n is a, c, g, or t
  misc_feature (471)..(471): n is a, c, g, or t
  misc_feature (474)..(474): n is a, c, g, or t
  misc_feature (476)..(477): n is a, c, g, or t
  misc_feature (480)..(480): n is a, c, g, or t
  misc_feature (483)..(483): n is a, c, g, or t
  misc_feature (489)..(489): n is a, c, g, or t
  misc_feature (498)..(498): n is a, c, g, or t
  misc_feature (506)..(506): n is a, c, g, or t
  misc_feature (511)..(512): n is a, c, g, or t
  misc_feature (517)..(518): n is a, c, g, or t
  misc_feature (520)..(520): n is a, c, g, or t
  misc_feature (523)..(523): n is a, c, g, or t
  misc_feature (525)..(526): n is a, c, g, or t
  misc_feature (534)..(534): n is a, c, g, or t
  misc_feature (547)..(547): n is a, c, g, or t
  misc_feature (554)..(554): n is a, c, g, or t
  misc_feature (562)..(562): n is a, c, g, or t
  misc_feature (571)..(571): n is a, c, g, or t
  misc_feature (607)..(607): n is a, c, g, or t
  misc_feature (611)..(611): n is a, c, g, or t
  misc_feature (614)..(614): n is a, c, g, or t
  misc_feature (617)..(617): n is a, c, g, or t
  misc_feature (621)..(621): n is a, c, g, or t
  misc_feature (624)..(624): n is a, c, g, or t
  misc_feature (632)..(632): n is a, c, g, or t
  misc_feature (643)..(643): n is a, c, g, or t
  misc_feature (648)..(648): n is a, c, g, or t
  misc_feature (652)..(652): n is a, c, g, or t
  misc_feature (698)..(698): n is a, c, g, or t
  misc_feature (702)..(702): n is a, c, g, or t
  misc_feature (704)..(704): n is a, c, g, or t
  misc_feature (709)..(709): n is a, c, g, or t
  misc_feature (714)..(714): n is a, c, g, or t
  misc_feature (717)..(717): n is a, c, g, or t
  misc_feature (732)..(732): n is a, c, g, or t
  misc_feature (740)..(740): n is a, c, g, or t
  misc_feature (742)..(742): n is a, c, g, or t
  misc_feature (752)..(752): n is a, c, g, or t
  misc_feature (755)..(755): n is a, c, g, or t
  misc_feature (759)..(759): n is a, c, g, or t
  misc_feature (770)..(770): n is a, c, g, or t
  misc_feature (773)..(773): n is a, c, g, or t
  misc_feature (777)..(778): n is a, c, g, or t
  misc_feature (804)..(806): n is a, c, g, or t
  misc_feature (809)..(809): n is a, c, g, or t
  misc_feature (814)..(814): n is a, c, g, or t
  misc_feature (817)..(817): n is a, c, g, or t
  misc_feature (852)..(852): n is a, c, g, or t
  misc_feature (890)..(890): n is a, c, g, or t
tcatatagtatatattttattagttagtttgtactaatacattctcatattacaaaggcaatttaatggaagaatcttccttttgatatttgaatcatctgaaataacacaaacagaacaatacattcaaagaaatctcatttgcataacaaaaagacaagttaaacaacaaaaaaatttttcctttctcacaggtggncattgaagtggncctaattcggttttccttttaaaagccccgcaaacaaaagtcgtttaanacctntttaaaatgaataanaaattggnttactaaactnctggtctccggcnccattttcnntnttnngtantntggntgccggnncttctttntntgtttnttctnttngtcttttnnnaggtncngttgcnccnttttnntcntgttcatcatgttcntcatcactngcnantttngttttnttgccctnngnntgtncttttnctttnccngnnccnggntgggcngctttattncactttcnttttnntttanntntangnncttttganttcgatttgtttngggattnttgttggncttctattnttttcttcagtgcttctttttccacctctccttctngtanttnccnagtnacntctttgtnccttaattgtnggttnccantatttgcatctttggcttacccaatgcttccttggctttttctttnaatngnattanccccnctnttgctcctctgacgngtctaatncnttttatttcnccntganttgagaaaagnatntgtnnatcttctctacaggtctgatcatctnnntcncccgnaantttcagcaagcatccaatcttttcttctagagatntcatttcagcatcttcttctaacttttgttttgcttcntgctcctgtttagctcttaatt

SEQ ID NO: 712929 - DNA, 254 bp, Homo sapiens
  misc_feature (6)..(6): n is a, c, g, or t
cgtcgnggtaccactacaaaaaaactttcaaggaacgtaaatttttcatgttagaattgtttaagacttttattgggtggaagataattaagtgaaattaaaccaaaacattgaaattttctgttggggaaattcacaaaaatgcttacaatgtgggttttaaaaaagcttcagttttgtggaaaagagggaagaaaaaggatactaatgatcttatccccattaagaagttttaattaggcaggaagcggtgg

SEQ ID NO: 712930 - DNA, 288 bp, Homo sapiens
gcgccaggaaaactcaagggggtttttctatcaagaaggacaattggggacctatcttctcttggtgaccggggtgttgccatatccaatcgagggggatttggagtgttttgtgagctgggatctttaaagtcctgcgcacctcattaaaggcgctcaaccttcccctagatgaaacggcgccattgcgtttggaagccacaccgaaaaacggggagggggggtgctccggattagcaggcccggttccagagaaaatatcaccacccaaggcgtctggccgggttc

SEQ ID NO: 712931 - DNA, 859 bp, Homo sapiens
gcctgcgtcccctttctgcccaaatgggttgatgtggctagcatatcaaagaacctgagcatatggcggcataggacagcagaagctatgcctctctccagactgcatgcatgtagtaagaatccatgcgtggccaaagagaagtcgggggattatgacataaatggtgctgggaaagaaacctcgtgcctagaatagctgtctccttctccatggatgctgacaaccggaaatccacgcatcgcagagagtaagcttctcttgcggattctttcctcctgtccttgacagagtaacacgttaatctggttgcttggtggtgttcagggactagatccctctcaggaaaggcacacatggtatgatgggctcttcccagagtctatgtgagtgctacataacttgcagctgatctcagctggagacatgcttcctacatgacggtgttagagcacagcctaatccagggcacacgaaagactagtaagaggcacgtgctgaaagatggaaggccgccctgattagatcaataaccaccagtgcatatgtattgacactgtctgtttgtccaccatgttcctaagtgtgtatgggagaatattggttatttaccctgcacagatacagtgctggaggcggttaggccatagcgtagttagggcgaacttaggttataaaaactaaaataaagtttctctactgttgagactagaagggaaaacaacaagggacacagacggcccaagcgaaaaaaccgggcgcacacacacacggggcgccgcaccaaggcggtaaacagcggggcccgccataggggggccgacaccacttggcaaaaaacggattagacggcccccaa

SEQ ID NO: 712932 - DNA, 91 bp, Homo sapiens
tccgctagaggatcctgttgctaggctggagtggggaaattggacagaaaagttatgtcaaaaccgttaagaataaatttttatgcttttt

SEQ ID NO: 712933 - DNA, 755 bp, Homo sapiens
acttgttgaggactatggaatggaattaacgaaaaggttcccttgagagtcctgcaacggatgtcttggttctacagaggaaggtgaaaaaaggtggaaagacttgaagaacagagttgttgaacataatattagaataatggccaagtattatactcggataacaatgaaaaggatggcacagcttctggatctatctgttgatgagtccgaagcctttctctcaaatctagtagttaacaagaccatctttgctaaagtagacagattagcaggaattatcaacttccagagacccaaggatccaaataatttattaaatgactggtctcagaaactgaactcattaatgtctctggttaacaaaactacgcatctcatagccaaagaggagatgatacataatctacaataagggtcttagtgctttagaaaaaagttaaaattggaagtcattaaaaaaagactgttataatggtgtatatgttggggttttttttctaagcttctttgtcttaaattttaaaatagtgaatatgtttgagactccctttgacctttcagttccccaagttcattgttaactttgcatttgcaattggtgcaaaaatacagatttctgtcgtctgaatacacaaaaagttgtgtcataacttacccagatatgtttttctatcatttgaaacctttttagctactgtttgttttcattcaactaacaaacatattccaataataaaagcagtatatacata

SEQ ID NO: 712934 - DNA, 282 bp, Homo sapiens
tctagccctctgaaagacgtccagtccggcgggcagcaataagacccactttgcggccagcaggggcatctctgcgtcttgcgggggctgcgccgcacgacggcagcccccgcaagacgggcagcccacgtcctcaggagcccaccccagtgtaggtccgggggaccctccagtgttcaacagactgcctgcaggggccacagaccatactatagacacagacccctgctcctgagacaccagccccaaggagaagcctccgactccgactatgcgggggct

SEQ ID NO: 712935 - DNA, 165 bp, Homo sapiens
tgtgtaaggtacagctagagaccctaaattaggacatcacgtgagcaggcaactagagacagtgcctcagtctagtagattattatacaaagctatactggatagagaaacacgaagatagttcctaatagccagtcaatactagcagagtatcacgtcctaaca

SEQ ID NO: 712936 - DNA, 680 bp, Homo sapiens
caggggccggcgaggaggggaggcggtaggtccagagggcgggccgccttaggagattacataatgggcccttcattatactcggataacaatgaaaaggatggcacagcttctggatctatctgttgatgagtccgaagcctttctctcaaatctagtagttaacaagaccatctttgctaaagtagacagattagcaggaattatcaacttccagagacccaaggatccaaataatttattaaatgactggtctcagaaactgaactcattaatgtctctggttaacaaaactacgcatctcatagccaaagaggagatgatacataatctacaataagggtcttagtgctttagaaaaaagttaaaattggaagtcattaaaaaaagactgttataatggtgtatatgttggggttttttttctaagcttctttgtcttaaattttaaaatagtgaatatgtttgagactccctttgacctttcagttccccaagttcattgttaactttgcatttgcaattggtgcaaaaatacagatttctgtcgtctgaatacacaaaaagttgtgtcataacttacccagatatgtttttctatcatttgaaacctttttagctactgtttgttttcattcaactaacaaacatattccaataataaaagcagtatatacata

SEQ ID NO: 712937 - DNA, 255 bp, Homo sapiens
tacgactcccggggttatgcatcctcccacatcagactcctgggtagctgggactacaggcatgtgtcagcacatctggctaattttcgtatctgtctgtagagatggggtttcgccggattgcccggactggtctcgatctcctgagttcaagtgatctgcccaccttccaaggtgctgggattataggtgtgagccactgtgcccggcctttcttctttttaaatgtagtggttgttgtcgtgggtggttcgc

SEQ ID NO: 712938 - DNA, 942 bp, Homo sapiens
  misc_feature (926)..(926): n is a, c, g, or t
acttgttgaggactatggaatggaattaacgaaaaggttcccttgagagtcctgcaacggatgtcttggttctacagaggaaggtgaaaaaaggtggaaagacttgaagaacagagttgttgaacataatattagaataatggccaagtattatactcggataacaatgaaaaggatggcacagcttctggatctatctgttgatgagtccgaagcctttctctcaaatctagtagttaacaagaccatctttgctaaagtagacagattagcaggaattatcaacttccagagacccaaggatccaaataatttattaaatgactggtctcagaaactgaactcattaatgtctctggttaacaaaactacgcatctcatagccaaagaggagatgatacataatctacaataagggtcttagtgctttagaaaaaagttaaaattggaagtcattaaaaaaagactgttataatggtgtatatgttggggttttttttctaagcttctttgtcttaaattttaaaatagtgaatatgtttgagactccctttgacctttcagttccccaagttcattgttaactttgcatttgcaattggtgcaaaaatacagatttctgtcgtctgaatacacaaaaagttgtgtcataacttacccagatatgtttttctatcatttgaaacctttttagctactgtttgttttcattcaactaacaaacatattccaataataaaagcagtatatacatatttcctttctacagttacctctgattctcaacattttgtggggtagtgatttggcaagtgttttttaaataaaacaaatctcattgtaaagttatcagtcatttagtagaatagaaaagcaacatagagcatacaagaacatttggggatagagttggtgatttgtgaagnaatttggtactttgga

SEQ ID NO: 712939 - DNA, 388 bp, Homo sapiens
  misc_feature (10)..(10): n is a, c, g, or t
tggtattcanaaccaaatgaaaagtcactttgttttcttaacaaaacttttgttgttaattgtttggccaatgaatttttaaaaacttgcacaaatagaaaagttggaaaaggataatatagactgtattaaatgtttttttttgttttaaaaactgcttggcagccccaggtgaagtattaaggattgtttggtattaaaaattgggttcaccgcatgcaccaaaagtgtgtaccctgtaagaatgaaaccagtgttttttgttttttttttagtttttattccggagcctcaaacaagcattaaaccttttgtgattatcatttcctttcctataattatttttgtagcactccacactgatttttggaaacttgccccttattta

SEQ ID NO: 712940 - DNA, 148 bp, Homo sapiens
acagcgtaggcgggggtaaaggcacggggcccctccctctccaggctacgcctggcgcactcgagtagccccttatactggcccgtctggcgcaaggtcagacgcgatcttctagacaactgttcataggccatgaatcttgagaact

SEQ ID NO: 712941 - DNA, 1097 bp, Homo sapiens
acttgttgaggactatggaatggaattaacgaaaaggttcccttgagagtcctgcaacggatgtcttggttctacagaggaaggtgaaaaaaggtggaaagacttgaagaacagagttgttgaacataatattagaataatggccaagtattatactcggataacaatgaaaaggatggcacagcttctggatctatctgttgatgagtccgaagcctttctctcaaatctagtagttaacaagaccatctttgctaaagtagacagattagcaggaattatcaacttccagagacccaaggatccaaataatttattaaatgactggtctcagaaactgaactcattaatgtctctggttaacaaaactacgcatctcatagccaaagaggagatgatacataatctacaataagggtcttagtgctttagaaaaaagttaaaattggaagtcattaaaaaaagactgttataatggtgtatatgttggggttttttttctaagcttctttgtcttaaattttaaaatagtgaatatgtttgagactccctttgacctttcagttccccaagttcattgttaactttgcatttgcaattggtgcaaaaatacagatttctgtcgtctgaatacacaaaaagttgtgtcataacttacccagatatgtttttctatcatttgaaacctttttagctactgtttgttttcattcaactaacaaacatattccaataataaaagcagtatatacataaaaaaaaaaagaaaaagaaaaaaaaaaaacatgttgtgtgggggggatttgggccttgagaaaagttttttgaaaacaaatgttggtaggggggcggggggaccaaaggagggataggggacacgggggcacaagcagggtgtccccagagagagaaccgcggggacagaaaaaaagggagtgagaattcagcaccagagtgaaaagaggcgccgcgggggcaacaggaagtcgttgcgagaacacataccgcagggggaccccgaggggcacaaagagggagatctatacagagaggacctcacaaagagagcgagattaaaattgaccgccgggggggct

SEQ ID NO: 712942 - DNA, 119 bp, Homo sapiens
  misc_feature (108)..(108): n is a, c, g, or t
gcgcatgcagtagacagacagaacgagagcgtcgcttggaggagccactgacagcagaaaagaataggagtactctgagagaagagctgtgttacctttgtacatctnagtacgtgcta

SEQ ID NO: 712943 - DNA, 219 bp, Homo sapiens
cgtctaactgtgcggttgatctccagtgctacatgggccgctggtttgtcatcgcgaatatcccgtactttggcgagcgcggcaccgtcggcagcttacgccgagtgttgctctgcggcccgacgtgccgttatcgacgactacctagtgtttaccgtacccgggcggtttcgactgcgcccttcaatgcgcatgcaagtttgtggacttcggtgcgta

SEQ ID NO: 712944 - DNA, 181 bp, Homo sapiens
gaggcgttctagagatcccccatcggctctaatccatctatcatctatctacctggctatctacccatccttctatttatctattatctatctatctatctatcatctatctctaatccatctatcatctatggcagtggttgcaaccaggcacaactgtacttcccacaggacccttgct

SEQ ID NO: 712945 - DNA, 158 bp, Homo sapiens
ccgcatagggtggggaggtgcttaacagcattttttttgagccttgaagcggattgagagagagcccacagaggtcttacccaacagccttaacaagccttgagggtcttgagggtacccgtaaccgcccaattcctgtttgctgtgtatgaataaag

SEQ ID NO: 712946 - DNA, 558 bp, Homo sapiens
  misc_feature (40)..(40): n is a, c, g, or t
  misc_feature (178)..(178): n is a, c, g, or t
  misc_feature (307)..(307): n is a, c, g, or t
  misc_feature (326)..(326): n is a, c, g, or t
caggggcaagagagtggccttcaccctgccggccccttcntgttggtggggtccaaggcaagggtgcgcctttccaccttttgggcaggagctcacaaaaaattgatgcccaactgcaagtgggtgtccaacctggcggtgccccctgcaggtgacaacgtcatttgttggagctacnataacaaactggtgtggtttgacctgggtctttcccccaaaccatacaggatgttgagaccccccaaaaagggtttggggggtgtggccttccccccccgggaccccctttttgggtcagggtcggacnacggcagtgttattgtttnccatgggatggtggacaatgaccttttgcaaaaccccttggtggtgcccgtcaaggtgcttaagggacacgttctgaccccagatttgggaggggtgggggtttttttcccccccccccaaccgtgggttttttccttggggggagagggggctgtccgcctttttccctaactgttttgcctgcctgggggtgggggggttgtgtttaagtcaacaaagccttttccctga

SEQ ID NO: 712947 - DNA, 1477 bp, Homo sapiens
  misc_feature (68)..(68): n is a, c, g, or t
  misc_feature (104)..(104): n is a, c, g, or t
  misc_feature (511)..(511): n is a, c, g, or t
  misc_feature (884)..(884): n is a, c, g, or t
  misc_feature (978)..(978): n is a, c, g, or t
  misc_feature (1069)..(1069): n is a, c, g, or t
  misc_feature (1174)..(1174): n is a, c, g, or t
ttcacccccttgagggctttttcacaacaaaatgtcttttctcgtagaggaggtttatataaagaatngtttcgcccgcacaagggtgttgccgccgccgggcnaccaaagttagtagtttgttggaccgacacacacatgtgttagaaggggggcccccaaccagcagaagaaggtgatgtttttccttgtatatattccatagaggtgccccagcagagcccaacattgtgcgaaaaggaagttttcgttgtttctcccccgcggttggggggggtggttcccaccacccccgggggaacaccccgcgggattttttggtaaggcaaccccacagcgggtgtgtttcccccgacgaagtgtgaaagccctttaacatttgtgttaaatttgggccttttttttgtcgccccctcccccccaaatggagaaaaatgtctccccaccgtcgacgtgtttgtggcgcacccagcggtcctctcacaaaaggacttggaagggggcgaacccntttgtgtgcccttctgcgcgccacaacatgggtggacgccttcccgccgtatgattaatagtgtgttaaaaagattctcgccacggagttatccacggagacacgcccgttgtgaaatggcccttgtttcaccccctcagataaactggggcttctctgtagagagggggagaatgtaccacacaatacaccttttgttttatagcccacgcgcgagaggaaattgcccacaaacacgcgtgccacatgtgtgccacacacaggcgcttttgtaagaaaaaagagataaaaagagaagagatgcccgcacaaaagggctcttccgcctcctttgccccacgctatagagattttccccgcgcgagaaaatttntcgcgagaaagagaagcccacacatctgtgtagtacaccaccatctgtcgtctaagatatatgggtccaactctctcttggttgtgggtctttnatatggctctatatttgccccctctctatatgtgttgtgtatatctctcgagaagagaatatatatatatgacccacgcccactcgagagngagaaaccacacaatcacattggtggtgagatttatatctgccacacacgcgtctgtctgtatagttaagatacccacgctcacctctttctcacacaaaatttnggagattttttatagataataataaactatagctgctatattcacaaatgtgaattctacccacatcgttttataatttatatggttcacaccccgctcttgttgagagactgaatttcttgcacaatgcactaagatatataaagcccaatatgagctcacctcacttttcttggggtcgtaattcctgagtttcacgaaagaaggagtcactaactgagaacacacacactaagaccacaataataaatcatgtgcttttaacatatttgagaataaaaaggactagccaattaaactcca

SEQ ID NO: 712948 - DNA, 146 bp, Homo sapiens
gaagaagtggagaggtgtgatgatcttgtgttttctctttcctttttcttgctgatttcatgcaaagggctggcattctgattgttcttttttcaggtttaatcctttttctaggtaaagtcttcaagcaaaaattaaaaaaaaaa

SEQ ID NO: 712949 - DNA, 731 bp, Homo sapiens
  misc_feature (537)..(537): n is a, c, g, or t
  misc_feature (562)..(562): n is a, c, g, or t
  misc_feature (567)..(567): n is a, c, g, or t
  misc_feature (575)..(575): n is a, c, g, or t
  misc_feature (580)..(580): n is a, c, g, or t
  misc_feature (584)..(584): n is a, c, g, or t
  misc_feature (593)..(593): n is a, c, g, or t
  misc_feature (611)..(611): n is a, c, g, or t
  misc_feature (622)..(622): n is a, c, g, or t
  misc_feature (637)..(637): n is a, c, g, or t
  misc_feature (643)..(643): n is a, c, g, or t
  misc_feature (674)..(674): n is a, c, g, or t
cgctggtagtccggcagcttcagatagtccgggcggaagttgtggccccattcggaaatacagtgcgcctcatccaccaccaacaaggaaatctgcacgctttgcaggaagttacggaagcgctcgttctttaagcgctccacggaaatcatcaaaatcttcaactcacccgaacgcgcgcgggtcatcacctcattggcatcttcacggctctgcgccgaatcgatactgccagcacaaatgccatggcgttgcaggaaacccaactggtcctgcatcagcgccaacagcggcgacaccaccagcgtcaggtgcggcaacagcaccgccgacagctgataacacaaagacttgcccgagccggtgggggaaaatagccgcagccgaaacgaacgggccagcaccgcgctgatcgcggcttcctgggcccaaaacgaaaactgttggataaccaaaaaaactgtttggaagggtgtttgttgcaataaagcctgtcactccatttgaaccgcctgaaaccaaattccaaaaaccttntaacccagcgaatcaagttaaaaanggtcnggggaatnaaacncttnccaaactgnattcccgaaaaaaaaccngccaagaaccncccaaaaatgcaaanagtacncgcctgattacaaacccccaacaaggattcntgaattttccatgccccgtttccttgctctcccaatccttctgctgatggtgtcacc

SEQ ID NO: 712950 - DNA, 152 bp, Homo sapiens
taccgtatcagcgtacgcaagtcggccaagtgttggatgatggcaggcgttcttcaaggcgatcatccctcaagcaatctgaatacaccgctgatgactgaaaattatgagccgacaccaagcgaggccttggtgtcggctcagaaacatcg

SEQ ID NO: 712951 - DNA, 558 bp, Homo sapiens
ctacatctcatggcaaagtgagcatatactgcagcctctctctttatctaactatggtacgctgctccatcaatgcaatacgccgccgtatgtgctgcaggacacgtggagtaacaagacgctgaatcttgggtgcttgggtcctaggtttcttaccttctttatttaagggctttcttacaacatactggcggacatcatcttctttatagagattgaaaagtttgcggattctgctaactcttttggggcccaggtcggcgaggcactgtagtatcagtcagtccaggaatatccttctctcctttttttactataaccaagttgagaacgctctagatttgcatccacaatgcaaccacgaagctgatgttctctttcagacccaaatattcgactagatgcttgaccctgcttccctcccagtctctgggacttctgggtatcgtttggcttgatcctgcgaatgtagtggggcgtacatttcatcagggtgctcactaggtcatcgctgtgacctgagattgggcttccggcaggagaaccgcgtcacaatcg

SEQ ID NO: 712952 - DNA, 107 bp, Homo sapiens
  misc_feature (10)..(10): n is a, c, g, or t
ggtcaccatngtgcggctgggctgtgtatctgtgtatcaacgggagcggctgctgaggtgaccacagccttctcctaatacaagcgtaagtatttaaaacctaaaaa

SEQ ID NO: 712953 - DNA, 920 bp, Homo sapiens
tccccttgcgtggctgggctgctcgggttagatcgtcagtgaaaagcctaaaggttagacttgtaatgaaaagaaaatagaagccatgtttctgaagacctgtattacaggtacttctgtcagttttgtaatgacatgacgtcctgaaacaactaccatgttttggttcttgaaagatccctgaatcgtgtgcacttactatgggcgagtgggtcacggaccctgtcttgagacaggtggacatggaaaaaatccagtcacaatatttcctctagcaactaatgagatgtggcgatcagtgggatatgtgaatgtttaccaacttgggtgatgtcatgtcaaaatgacaacatggcacagaatatcatgtattcctggccagtgcctcagagactgtggcatatcaatatgtgaaaaaggggtctcgaactttacttttggaagggacaaatagacctatggtgaatacatggataaaaataatgtgacgtgcgacaagcaacaacactcatagctgatactactgactatttctgaggtgaccagacgaacgcagaagcgcagtgaccggatgactctacttggggccatcacttgtgtacagcctcatttccacagtcatgtttactctttatgtgcctccaagggtgcccatgaactccgaagtactccatttacccgatgaacaaatagaaacaaaacgaacgacacacaccgttgcgcgaccccgcacccaatgcccacaacaagaaaggctaaaaacaccaacaactgtgcacaacggagccccgaaaagcccagcgcgcacacgacgccaaacgagagccaccaacggaacccggcacaaaaacaccgtcctagagaccaccacacagaaatcccagcgggcccaaatgacgcaagaaacacaccgagaacac

SEQ ID NO: 712954 - DNA, 155 bp, Homo sapiens
tttttttttttcaaatctaaaagttgcaatcttcttattctgccacaatccaaactgaatatatccttcatccactcgatccttctggttatcttactttggacatttgtcaactctttcttaaagattaaattaatgagtattcctgaagcagc

SEQ ID NO: 712955 - DNA, 304 bp, Homo sapiens
gcgtagtgaacagaaatcgcgccactcactccagcctgggcaatagagccaggtccttagaccctgtctcaaggggaataaagaaagaaagaaatagagaaacaatataaaagtgtataggctaagaaagaatggttcatgcctgataattgcagcactttgggagactggggcaggaggattgcttgagccgagacgtacaagaccagcctgggtgacagagcgagactctgtctccaagaaaaaacaaagaagcagttggatcagccgacaaaatgtgggtcccctgtgttttacaaggggg

SEQ ID NO: 712956 - DNA, 143 bp, Homo sapiens
acggccgtgtattactgtactagagaccatattgtagtagtaccagctgctacgacacctacgtattatgattacgtttgggggagttatcgttactactactactactacatggacgtctggggcaaagggaccacggtcac

SEQ ID NO: 712957 - DNA, 245 bp, Homo sapiens
  misc_feature (113)..(113): n is a, c, g, or t
  misc_feature (201)..(201): n is a, c, g, or t
agctgatgtcatccccttcgtctctgagtagtaggactacaggcacacactactgtgccagtaacttattttatttttatggagatggggtcttgctttgttgcccaggctgntcgtgaactcctggcttcaagcagtcctcctgcctcagcctcctaaagtgctgagggctttaagtggtttcacatttgaacgcctganagttgctaacgacttacggttgtttctttatatctcggtttcaa

SEQ ID NO: 712958 - DNA, 1277 bp, Homo sapiens
gcacagtttcgccatggccctggggccccaaggaagcacttaaagcagtgattagcagcgccgaaggcattggatgcttggacaacaaggtaatcggtggtgtatttggcacctgcgttgcgcatacgaacaggtccccaaccaaggctgagggaatgctacttgcctcgtgagtcgctcattaccatcagggaatatgactgcaaggtactgtcgttgcacgtaggaggactgacggtaataggaacgatatagtactgcaaacgtattgcagttcgaaaattccgtataggccaagggatttcgacgctggtatgatccactagtacctcctgctaggcattctagtggaatgatcattcgagcaatcagtagaacaccaggtgaactatatccagcgcatggttctatgtacgacccaaggagcgcagcaacttccgcatggttcacctgaatcgacaggctgcgcaagaaggccacacagtacgacaggttgtagcacaaaagtagagagaaaccgattgaccttggtgggcgatgcttgcccacggggaattcccctttcaccatgagttggactcccaaaggatttgcattcgtgaaagaaaaatcctgttaaacaacacgcaatgcgtcgttgattccagatgggtcccaaatccgcattgagtccggtgggcccatgaattccgcattctttaaccggcgcaatccttgggggacaggcaatcacaaatcctagagcctatatagggcccaatagtgaacggactcaaggagaggcaacagagtgtgtgtctagctcactaacgatcggaagtatggccccgagtacgtacaaaaaaggtgccgataacggccgcttcgcgcccgctagcagtccaatccacatcgcggcttcataggaacccattgggcgttgggggtcaccgtgggaacgcattgcactcgccggtaagctaaatgccttgcaaattgcgacattgaactccacattcggagggtagacagaaagggaatgtggtgttaccaaggagaattagtcacatacatataccaaaaaggaggtcacgggaaggctgggagaaaaggagattcggattgtctggccagagataattacaacaggtgggaaggaaatatgcactgcatgtgctaaccgaagagggggcaaacattggggaagcattttcgaagagccaagggacaagagattgggccttaacggaacgggagaattacattaaccgataggttcatttgtgtgagacgcaaaa

SEQ ID NO: 712959 - DNA, 192 bp, Homo sapiens
gggaaaaaaaaaagtgcccccggggggggttggggggcccccccccccccccaggggggggggggcttggggggggggggggcccccccttttttcccctttttgggtttcccccgctttttttttttaaaggggggcccccccctttttgcccccccccaaaaagagggggggtttttttttttcccccca

SEQ ID NO: 712960 - DNA, 116 bp, Homo sapiens
caataccatctactgactatctagaaatcgctgtcgccttaatccaagcctacgttttcacacttctagttaggttctaccggggtttaggtctacctgggtttaggtctaccggg

SEQ ID NO: 712961 - DNA, 170 bp, Homo sapiens
gctcactatctatcacacaccaggactgaatccatcagcagatactgccctgtgggaggggcagaggaaagagaaggcagacggactgacagacaccacagaggaacaggagagttagcctgggaccaatggaggagaagtacgaacccttggggatcttggcctctgtg

SEQ ID NO: 712962 - DNA, 433 bp, Homo sapiens
  misc_feature (45)..(45): n is a, c, g, or t
  misc_feature (152)..(152): n is a, c, g, or t
taattaagaacagtttaaaaattaagtggacaataaaaacaaacncattaattggcagtcgtggtggctcatgcctgtaattctaacacttaggaggtgaagcgggtggatcaccctgagtcaggacttcaaaaccagcctggtcaacatgntgaaaccccatgtctactaaaaatacaaaaattagccgggcatggtggcacatgcttgtaattccagctactcaagaggcagaggcacaagattcacctgaacctcggaggcagaagttgcagtgagccgagatcgcaccactggactccagcctgggtaaaggagtgagactctgtctcaaaacaaacaaacaaacaaacaaaaaccaaaatattaacgtaactgggcagcttaacttcaaaatgcatttgaaaacttttttttcccctttcgtcgacgc

SEQ ID NO: 712963 - DNA, 945 bp, Homo sapiens
tgggggggtttccccttttgggggggggggggggaaaaagggggggaaacccgggccccgggccccccccccccccgggtataaaaaaatttcccggcccaagccccccacgaagtaggggggggtaaatcagtagtatcgacccaaccatcggcggggtataattatctcggtgtgttataaagagaagaaacagggtggtgtcactccaccaagggtggggcgcacagagggggtgtcatagaacacactcgagcaccacagaggagagagaatcagcgccaggatcatcggcagcacctccaccagagaggtggtcgggagatataccagcgcaggcagtagaaagtatccagcgggcgcgcgcgtgagccacgcaaaagagagtgtgtatggtacatatacatcagacgagaaatcaacgcgtgtcacaggtagggagagtgtgtggcgtgaaagagagagggggtataaaaccaacgcagtgggcgcagtgcgcgcgtggagacacccctctaggggggatctacaagaggggatggggaggcagtgtgtgcttacaaatgaaggctagaaatatctgtgacgacgaatgggtgacaacacatcagaggagagggggtaacatcatctccgagcgaagcgagaggaaaaaacactcgtgtttgagcgaaagaaaaccccataatgtgtgttttgtgtgagtacgtagagaaaaatatgtgtgtgtggtgttgttgtgcaactgagagtgatggtgatcttaagagataaatcggggcacgtgagtggagtcaccaaaaaaaatgtatcttgttggtgtggcactagttgaaaaaaaacaaaacaaagacaacagaaaacaaacaaaaaaaaaacatcatcaggggagtgattatatttttggtgggtggggaggaaacaaaaaagaagtgataatcacag

SEQ ID NO: 712964 - DNA, 523 bp, Homo sapiens
  misc_feature (94)..(94): n is a, c, g, or t
  misc_feature (157)..(157): n is a, c, g, or t
  misc_feature (173)..(173): n is a, c, g, or t
gttcaccgaaggtcgttggcagctgtcagtggcggtgtgtcgctgaagaaagaccatctggccttgtggggattggctgtgtgcaatactcctncaggagaggctaagatatatgtgtacacaagagattctgtgatgttctgtgagagaaatcccntaaaatatgcagcatnatagaagtgtatacagaacagtattacaaattgagaagctggctagtggttaaaggcggaacccagatgttcaaaaatattcagagagaccaacttccagaggcggtccaatctagacagaggtgcattccttcagggcgtgacacattgaatctaatatctggcgcaaggacaaacatgagcggaatgggacaactattgggagccacttagtgggaaggagcctccttgccggatcagctggaatatggccacatatacattatttaacgtgaacttggtgctggtgtcccatggcggaacactggagtgtacattaacatatttctggttattattaagaagcgtcg

SEQ ID NO: 712965 - DNA, 310 bp, Homo sapiens
gtgcactgtgcatgctaagtggagataaagcaaagtgtgaaggacgcaacacagcagacgcatccgcgaggttgtcttgctagacctgctcctccaaagccagagcccaagcctaacaagtgccctgcaacgaagggagagacggtacccaaagggacaaagggaacagctgatgctggcaaggaggggaataaccctgcaggaaaatggcgcatgcaaaacgagacctggcgacgagcaaagctgcaggtgctgagatgccaagtgaagggtgtgcattcttggatactgtttacttctggtgacggta

SEQ ID NO: 712966 - DNA, 505 bp, Homo sapiens
  misc_feature (4)..(4): n is a, c, g, or t
  misc_feature (495)..(496): n is a, c, g, or t
tggntcaggaaagccccctgtgggagagccccaggcgcacagggcatgtggggtgtgggaagcgccgttccccacgccctgttgtgggtgaactcgatagagaaggaaggagggtgacacccaccggaggtgccaattagtaaccacagtggcctcaaagaactcaaatgaaaggaagacttgcacgtctctcacttgaagtccagagctagaaatgattaaggttagtgaagatgtagaattttcatagctagagagaagtcaacgcttggcttcaaaacttcaaaggatgggctgactctctttgaggaccactgcagctggtgactttaagttacagccagtgctcattgaccgctctgaaaatctcagggcccttaagaattatgcaaaatctattctttctgtgctctagaaatggaacatcactgtctgggtgacagcacatcttttaatagcatggtttactgaatattttaatcccactattgaganntactgctca

SEQ ID NO: 712967 - DNA, 870 bp, Homo sapiens
agggggatgtgtgtgtgcgtgtgtgtcagtctgttggtgagtgtgttaaaggctacagagcacagtcggttcaaaatgcttggaacttcccaaactggctttactttatgtatatacaggtgctcagggttaacgcagtacatccatgccatctgctgtggcgaggtatccccggagtgcatgtgttcttgacgtctataaatagtagaaagatatatatgggtattcgtttgtaccaacttgaataggttgtattaaagcatgaagtgaaaggttgcagtatcagtgcattcaggttattgtctaattttggttctgacagtgcatgtctttggaagcatgctgaaagcagagattaacacaggagtcgagtaagcagagagaaacatttgtgagatgtacagcattgggttatgcattggtatagtgtttataccgtgggtagtggctgtcaaaccctgcagatccccgtcctgtcccgcttctccctgcccgtgggtgtctctggtcacaggtcaactgaatagcatacatttgtcgtgtgataaatactcgttaaccagtggaatttgaactgtcattaatagtattcctaagtgtgtgcgtgcacgaaagtgggtatgagcctgcttaaagtttgccatttgcagatcttaacaggtgagtggtagacaggaagtacgagagtggggtttcatctttgtcaaaaaatcgtttttaacttcatgatcttaattgtgctttgtcactcataagaaggaaaagcatacctgagttgtagacaagggagggaaagcacttgagggttctggtggtgtggtgcttagtaatggggggtaatggttgtaactcagttaagcttggattatg

SEQ ID NO: 712968 - DNA, 603 bp, Homo sapiens
  misc_feature (447)..(448): n is a, c, g, or t
  misc_feature (450)..(450): n is a, c, g, or t
  misc_feature (454)..(455): n is a, c, g, or t
tcgccccccccccgtggcttctcgtggtgcggtctagtaaattcttgatatatttctcgtggtctcgtctctcttctttgtgctccccccgctgtgtgtagtatatagatgctcccccccgtgtattttgttgcccctcctcggtgatcctccccctcgtctttgtgagattgttttctcccaagaagccctctccctctggttgtttctcccccgccgcgggcgctctttttgtatatttgtgtgtagagagaagtccccccggcccctctggttcactgtccccgggattttctcctcatgggaacccactttttggccccacgttgttcacctttaccctcctggggcccgcgcgcgcccccacacacgcgagttgtgtttctagaaaagctcttctctccgggggcccgggcgcgcgcgccgcacacaaagtttttttttttnntntttnntttttttttgcgaatgaggcaatttattaacccagcatggtttgttctaatgcttcttgttggcagctgccacctgtccggcgattctgtccagatctctttgtcccttctgtcgtcttctcgcagccgtatagtagtagtagcgccg

SEQ ID NO: 712969 - DNA, 611 bp, Homo sapiens
  misc_feature (174)..(174): n is a, c, g, or t
  misc_feature (181)..(182): n is a, c, g, or t
  misc_feature (185)..(185): n is a, c, g, or t
  misc_feature (200)..(201): n is a, c, g, or t
  misc_feature (207)..(207): n is a, c, g, or t
  misc_feature (209)..(210): n is a, c, g, or t
  misc_feature (219)..(219): n is a, c, g, or t
  misc_feature (253)..(253): n is a, c, g, or t
  misc_feature (258)..(258): n is a, c, g, or t
  misc_feature (275)..(275): n is a, c, g, or t
  misc_feature (304)..(304): n is a, c, g, or t
  misc_feature (324)..(324): n is a, c, g, or t
  misc_feature (347)..(347): n is a, c, g, or t
  misc_feature (358)..(359): n is a, c, g, or t
  misc_feature (427)..(428): n is a, c, g, or t
  misc_feature (446)..(446): n is a, c, g, or t
  misc_feature (487)..(488): n is a, c, g, or t
  misc_feature (493)..(493): n is a, c, g, or t
  misc_feature (503)..(503): n is a, c, g, or t
  misc_feature (512)..(512): n is a, c, g, or t
tttttttttggttttgtaagatttttaatttctatattaaaatatctatttaatctatgtttttttttttacgaatgaggcaatttattaacccagcatggtttgttctaatgcttcttgttggcagctgccacctgtccggcgattctgtccagatctctttgtccctgaggngtcagtnnagncggccgccatctgtnngtcctntnntccaccatntttcagcccctccagggcttggaggacccggggngccanactcttggagcctcggntgaagtggctgggcatgacgccgtttctntgacgtcccccatagatctnggtcatggagccaaccccagcgncaccccggagnntccaggtgccgcgctgtggaagcagctcgcgtgtagaaccagttctcatcgtagggagcaagctcttnngtgcttggccagcttganggtatccacccattcggggactttcagcttcccggactttnngaggnaggctgccanagctctgangaactcctgctggttaacgtcttttacagtaactccaggcatcgcgcggctagactgagcattgcatatctggatcaaccagatgattaaccgttgata

SEQ ID NO: 712970 - DNA, 782 bp, Homo sapiens
atcgaaatagtatgatcgacacgtatcgtctatagccccaagagtatttacactagcactgctagtccggaggaactctgacgtggagatgtgtgtgctcgtgactgagggtccactgcctttttagagcagtggggactcgtaccttatcaagttgacccggagaagtagacgcccatggcaaggggagctcctcctactcctcatttgaatgtattagctgataccccctctgggcgttgtgcctctgcgatctgtcggatgcacctcaggttccgtgctgtcgtcaagcagatgctagattttcctgtagaaaaagcaaggaaaaagcagttgattcgcagaacttgtggtctccgtattgacatttactccaagaaaacgattagcaacagagtaaaggtgctagtgctggcaagagaatggactgaacaggagacccttctactcctggaggccctggagatgtacaaggatgatcggcacacaagtgtcggaacatgtggaagtcgtactcaggatgaatgcatcctccactttttgagacttcccatttgggacccataccttgagaattcagatgcttcccttgggccttttggctagcagctgtgcccttcagtcagtcaggtactccagtttatgagtactgttgcgttgtgggatcttgtgggtggccctcgcgtggcttctggggcacggaccagggggtttggagccacttttctcgggtccagggggcggtgcccttggggttgggttgacggtttgttagaagtcag

SEQ ID NO: 712971 - DNA, 725 bp, Homo sapiens
aggtcaagtatcgtttggaggcttccttggttggttttgtcctgtttcgtacattccatgggaatagcagtgagacctttgggccctcttggcggttacattgccagcgcgaaggccactctgctgcagcgcaagtcacgcagcctgagctcacagctcacagccatccatttcgttttctcacgtttctgacaaattgcaaatgacaggatgtgcgggcgagtgagccacaagggtcccctgggtccttgcctcgcagacccagatgggtaactgtttgacctgggttaggcctgacttgactgtcgggtaaacagccacccaatcaacccatgggccccctgcacccaagggaagggaggaagcagcctgcatgtcctcatgcccctgaagaacgaatcaagagacccaaaccagaccaggcacagtggctcacacctgcaatcccagcaccttgggaggccgaggcaggagaatcatctgaacccagaaggcggagatgcgcagtgagctagagatggcgccactgcacatccagcctgggcgacagagcaagagactcaaaaaagagacccagaccaggattacgaatgaggcaatttattaacccagcatggtttgttctaatgcttcttgttggcagctgccacctgtccggcgattctgtccagatctctttgtcccttctgtcgtcttctcgcagccgtatagtagtagtagcgccg

SEQ ID NO: 712972 - DNA, 107 bp, Homo sapiens
cacgtatgcggagtgctacgctggactgtcttttggcataacttgttacacgtttggcatggctagcacacaggttggtgtcttcaaaaaggccaaccagataggcc

SEQ ID NO: 712973 - DNA, 173 bp, Homo sapiens
aacgacttttttttttttccccctcttttttttttcgaatgaggcaatttattaacccagcatggtttgttctaatgcttcttgttggcagctgccacctgtccggcgattctgtccagatctctttgtcccttctgtcgtcttctcgcagccgtatagtagtagtagcgccg

SEQ ID NO: 712974 - DNA, 1472 bp, Homo sapiens
  misc_feature (321)..(321): n is a, c, g, or t
  misc_feature (381)..(381): n is a, c, g, or t
gtcctcttctttccacaccatgacgctaccagtaccaggcatgccccgtaacactaccgaacaatgaccgctttgtgctctccaagggccatgcagttcccatcctctacgcggctctgagcctgaagctggtgttccctgcgccacgatgcgcgatgcctgtctgcaacgctgtagagaagagatcagacatcctgaacttggtacggcgcaccgcgagatcctctgaaacaaacgctttcaccctgatcgatggtccacatgtgcttccccttgcgtgcctacgtggtccttacgagtggacctggcgtgtgcttgcgncatttggcgctaggagaccgagactaaggtacatttccgacctaatgggccagcgtagcncagatcgatcatagtcttgcctatgcgtgcgcgacgaatagagtgcgcacgctggtaccagaagcgtgcgtcttgatagatagtgcgatgggcccagttgtgcacttttcaggcaccaactcaattctaacttaatgtcctagcgaagcgaaaacccttagtttgagcccaccaatattcttaaaggtaccaattccatagttcagtcactttgtgtgccctccataaattatcgaatcaccagggccccccaggtctttgcctaacgtcaaaccgccgagtaatttgaggtaaccaatttcattcaactcaagaaagaatgttccgcgattaggccccgatggggtcccttgttacgggagtttgttggggccaatttcgtcccggattccacttgcccagattggggcacttcgaggaaaccacaccacatgccgagatagttgaaacgaggaattggaccttgtgttttgacctatattggtgtccacatttattccgtgcccacaataggaggcccacaaaaagccacaaaccccaaaagaccacaaaaaaaccaaatggccgccaatttccaaattttgccccaaaatggaagccgcgttttcccaaaccggggcgggcccctggaaaaggggggaacttcaaccctcgcgcggggcggttttagggaacaacgggcacctcacaacggcggcacagcgcttcccttttttgtggcccaactttgcggcgaaaaagccccccgcttctttttccacaccaccgaagaataaagaaagaagacaaattgagtgtgccttttgaaaggcggcagaggcaatttcccatttcccccaatggtggcaacgcgcaattacctttaaccaatgggccgccacaggaaatgtccccagaggaaaggccacagacaacaaaagggcaacagggtagttcctctgtggtgggtctaaaaaacacacccctttgtctacaaaccaatgtggtagagaggaaacccggccatacccgccttacacaaagggttagggggaaccactatttggcccctatagattctatttcccctggttcaaatttgtacgccccga

SEQ ID NO: 712975 - DNA, 579 bp, Homo sapiens
  misc_feature (516)..(516): n is a, c, g, or t
agcaggtgtctcctctatcttaggggccatcaatattcatcacaacacttatcactatataaccccctggcataacccaataccaaacgcgccctcttcggctgagtccgtgctaaatcacagcgagtgcctacattcgtcgctatactctcgccagatcctagactgcgtggcgatctacctatactgactacacagagccgcgaaacctcaacaagcagcacttgcttcgagaaccccggcgcgaggtagggaagaaaccccattgctatatcacagagcaccgtatttcgtggatattatatcggggtctacaccctgtgaagagtttactcatattctctagtctctatacacgaggctctcggggaattaaatcgtgccgcactatattggtaacgtctacgtaatcccggagagaagaaacgagacccaattgtggagtatccactatgggtgacttcgatgcttgagagcctatttgacgtactcacaatgtcgggcgtttccctatangcgcgtatacatccggaggatggaaagacacgccacaccacattacgtcagtctgtcaaccag

SEQ ID NO: 712976 - DNA, 209 bp, Homo sapiens
tttttttttggttttgtaagatttttaatttctatattaaaatatctatttaatctatgtttttttttttacgaatgaggcaatttattaacccagcatggtttgttctaatgcttcttgttggcagctgccacctgtccggcgattctgtccagatctctttgtcccttctgtcgtcttctcgcagccgtatagtagtagtagcgccg

SEQ ID NO: 712977 - DNA, 401 bp, Homo sapiens
  misc_feature (2)..(2): n is a, c, g, or t
gncgactctcgaggatgcccctgatgttggcctggctaagaaactgtgtattaataagtcatttgattaaaaaaagggacttgggggggaattgtggctcatgcctgtaatcccaacacactgggatgctaaagaataagctgaggagttcaagaccagcctggtcaacacagtgagacccccatttttataaaacaaaaattcttaatattatctttttacaaaggacttatttatatggcatcttcaagtatttcaaacatttcgtgtttggattatggaatatgtctccagaagaattaacactatttctatttaaggtaattttacatcatttcctttattagaagaaataacagatctgcagatggcattttgtgaaggctgccttctattaatag

SEQ ID NO: 712978 - DNA, 600 bp, Homo sapiens
gcgttgcttagcgtaaaaagcgagctggaatgcgtgccaacatcaccctggcaaatgtcatccgccagctgggcagcctgagtaaaaatgcaaaggacatttttggagagctcttttctcaggccaatacctttgcctttcgggtaagctcccttgctgagagggtcgaccgactacaggttaaagtcactcagctggattccaaggaagaagaagtgtccctgcaaggaatcaacccccgaaaagccttcagaagttcccccattcaagaccagaagctttttggcagaaactctttcccagtgcctgttttagaaacatacaatacctgtgatactcctccccctctcaacaattttaccccttacaggggcgatggaaaaaaggccctcaaattttacccagacccttcatacttttttgatctttggaaggagaagatgctgcaggacccccaggatatcattaaaaagaagagaaagcataggaaagaaaagaaagattatcccaatcgagggaatgttaacccccgtaaaatccagacccgtaaggaaaagtgggagaaaatgaaaatgctgcagggcccccaggatttcatta

SEQ ID NO: 712979 - DNA, 122 bp, Homo sapiens
tactctagtaggatccccagcccgagctgcgctacgctacctggtgacggcgactgcaacggccgattccgactgacccgccacttcgccggggcgacgcggtgtgacctggggcgcgcatc

SEQ ID NO: 712980 - DNA, 241 bp, Homo sapiens
ccaggcgcggaccttctcctgcatcttggtctgcaagaggcagaggtgcttggtgtcgcgcacctcgatattccgcgagcccgagatcaccgagtacggattgatcaggtcggtcgggtccagcaggttgccgcagttgtcgcattggtcgccccgcgccttctcgaagccgcaatgcggacaggtcccctcgacgtagcgatccggcaggaagcgctcgtcgtcgaccgagtagacctct

SEQ ID NO: 712981 - DNA, 641 bp, Homo sapiens
  misc_feature (641)..(641): n is a, c, g, or t
ggaaagccactgatttttttgatttaaaaaattttacagggccaggggctgttttgccaaaaagggggccaatgggtttcaaacggtttgaaagtgagggtgggggtgagggatgggccccaaaatcctttcaggaaagctgggaactgtccccagggaactggcaaggaaaaaaggccggggggggcttgctaaagcggaaatccaaaaaaaagttcaaagggtttggggaaaaaactcccaaaaacccccggagcccgtcgggggggagtcccacaatagcatttttttcttttgaaaaggacagggggggggcccctactcggctgaaaactttggatgggggctggggattgaaagcttcccagagagcatcacaagagggggtcgccccattcttgaaggcttcctaaacacccccgggactgtttggcgttggccccacaagggttttttacccatttccgaaagaggtttttattttttttttatcccaaaaactgggcaagggcaacaattaggcttgggaaaaccccttttcttccggtttttggcccggagtttaacaattccacggagggtttcccatgggttttccccaaaggggttttccaagaaatttggggcttttgggggttgtn

SEQ ID NO: 712982 - DNA, 172 bp, Homo sapiens
ccaaaaaaaaaacaaaaaaatcagccaggcatggtagtgcgtgcctgtaatcccaccactctggaggctgagacacgagaatcgcccgaacccgggaggcagaggctgcagtgagccaaaatcacgccaaagcactctagccttggtgatggagtgagactctgcctaaaaa

SEQ ID NO: 712983 - DNA, 384 bp, Homo sapiens
  misc_feature (2)..(2): n is a, c, g, or t
  misc_feature (51)..(51): n is a, c, g, or t
  misc_feature (133)..(133): n is a, c, g, or t
  misc_feature (149)..(150): n is a, c, g, or t
  misc_feature (180)..(180): n is a, c, g, or t
  misc_feature (195)..(195): n is a, c, g, or t
  misc_feature (253)..(253): n is a, c, g, or t
gngcccgtaatcgataacccccgaacctcaccacctgctcagccttttttncccctttttcagcaacccctgatgaggctacaaagtagccgcaagtcccccgtaaagacgttaggtcaaggtgtccccatgnggtggcaagaaatggnntacattttctcccccagaaaactacgatancctttatgaacttangggtcgaaggtggatttagcagtaaactgagagtagagtgcttagttgaacaggcccntgaagcgcgtacacaccgcccgtcaccctcctcaagtatacttcaaaggacatttaactaaaacccctacgcatttatatagaggagacaagtcgtaacatggtaagtgtactggaaagtgcacttggacc

SEQ ID NO: 712984 - DNA, 405 bp, Homo sapiens
  misc_feature (87)..(87): n is a, c, g, or t
  misc_feature (381)..(381): n is a, c, g, or t
gacagttacgctcgggggtatattccagctggggaactggagcgggttaaacagcgtccgtgaccacaataccatttggaagagctnctgtaaactggagcccaccctgaagaatgcaagaattgtgggtgaactcactggcttccggccagtccggcctcaggtccggctagaaagagaatggcttcattttggatcttcaagtgcagaggtcatccacaactatggtcatggaggttacgggctcacaatccacttggggttgtgcaatggaggcgggccaacctcttcgggaaaattctagaggaaaagaagttgtccaggttgcctccctcccacctctgaggactctagtgatcaccgtgtgccccaagacgactncccccccttcggccaatgatatgt

SEQ ID NO: 712985 - DNA, 724 bp, Homo sapiens
  misc_feature (483)..(483): n is a, c, g, or t
acgtcggtacccccaaatggaatctcacgctgaaaaataagtgcagttgatccggtgctccgggcttgagcggaacgttttgcgcgccgccaaggtccagatacttgtaagcccacctatgggttttatcgaggaggcaccgatgcaaacgtggcaaattaccttcgttgatgatcacggtgaaacgtccgtgcagcagttcacctgcgaacaaaagcccagcctcgaagacgctgcgcatatgattcgtgcgaagctggtgccgattgctgccaagctcgatctcaatgacctggaaggccgtaaacccgagccgacggtcaagattctcaaagaccagaacagtatccagattctcgatatttctccctccgtctaaacatttttcacgcgccacacgagcacctctggtggcggtgatagcttcacgctactctgcaatcgagatcagcgaatgaatcgctaaggtctggtcttgtcagntacatgcttgttttcctgcggtgatgttatgccgtggtgcccgcgccagcagggcgcggggcttcaggaagcacggaaagtctatccatcggtgtgaggaggacgtttcatgagcacagcctatcaagaagacatcagcaccaacgtactgcgccgcatgaaagaaggcggctttgatttctcgcgcttcaccccatcgagtctacgccattcccggatgaggaacgggccgcaggctggg

SEQ ID NO: 712986 - DNA, 248 bp, Homo sapiens
atgtatctacttatgatgcagaacatcatcaatgctgtctcccaccatggttggaaacaatgataccctggacattgtgcttcacagctaactctgcattcctctttttggttcaaaaattccctttttcaagggattgattggggccaatccgaagtttaattgccttccttgaacacccaggggagaagattaactcccaggccagaggaggaaagttggctgaattagggaggtccatccttgga

SEQ ID NO: 712987 - DNA, 202 bp, Homo sapiens
gggggggaaaaaaatgggtcccctgggggccccccccggttttgttttttgcccaaaagggggcccgggggggaaattttttccttaaggggggggtgttttgggggtttttttccccccccggttcaacccggggtgttttttttttttgggccggcccctgggggggttttttttttttaaaaggaaccctgggggccca

SEQ ID NO: 712988 - DNA, 1172 bp, Homo sapiens
gattagagtagcagcttcttcagcccaccgttccgcggggcattgtgccccaggtgttctctggttcctcctgtacctttcctggccacaccagggtgtggtaacaatcacaggacaccctgagtctcagggtcggtcatcagcctgacattctgacccccttttctgtctcttcctaatgccacagggagcctcaaatggcacggtagacatctcagcttctaaagggattatgacattgtgccctgtggcttccttccctcctttctttccttctttccttccttccttccttccttccttccttccttccttccttccttccttccttccttccttccttctttccttcctttctttcttctttctttctgagagcacaggttttgctcttgttgcccaggctggtgtacaatggcctgatcttggctcactgcaacctctgcctcctgggttcaagtgatactcctgcctcagtcttcccaagtagctgggataacaggcatgcaccatcacgcccagctaattttatatcttcagtaaagatggaggtttctgcatgtaggtcaggctagtctcgaactcccgacttcaggtgatccgactgactctggctccaaaatagctgggattacaggtgtgagccaacgatgcccagcgggcagcatttccttgcttgcattggactagacctttcacgactgctggagtcggcgaggacacggactgactaattctaagagtgcggtcattggatgccatctgaggcaatacttacctccttgtaaccaattagatcccatgaagtttttcagccctgtaagcggacacaccggcacagctggtacctgccttccactcactcaggcacagccaagcagacccttccggacactagctaacgccttggaagcgtgagggttgctcaatacatcgtgcaccgacactgtgagtatatagtagcgagcactagttactagacacctgtgtgctatcaccacgcaccggttcgatgaccactactcttatgcgaatccgcacatacttttgttgtctgtctgactcattctcacacacagcatacgaccagcggccggttcatagagcagcaccctccgtctccgagccacttcagtacgaaacattatctataatagtgcagcgggcctgtt

SEQ ID NO: 712989 - DNA, 5375 bp, Homo sapiens
  misc_feature (4597)..(4597): n is a, c, g, or t
atggccgccgacgtcttcatgtgctccccgcgccggcctcgcagccggggccgccaggtgctgctcaagccccaggtgtccgaggacgacgacgactcggacacggatgagccgtccccgccgcccgcctccggcgcggccaccccggcccgggcccacgcgagcgccgcgccaccgccgcctcgggccgggccgggccgcgaggaacctccgtggcctccagcagatcatccacagcggccacttcatggtgtcgtcgccgcaccgagagcacccgcccaagaagggctacgatttcgacacggtcaacaaacagacgtgccagacctacagcttcggcaagactagctcctgccacctgtccatcgacgcctcgctcaccaagctcttcgagtgcatgactttggcctacagtgggaagttggtgtctccaaagtggaagaatttcaagggcctgaagctacagtggagagacaagatccggctcaataatgccatctggcgggcctggtacatgcagtatctggagaagcgcaagaatcctgtgtgccactttgtgacacccctggacggctctgtggacgtagacgagcaccgccggccggaggccatcaccacggaagggaagtactggaagagccgcatcgagattgtgatccgggagtatcacaagtggagaacctacttcaagaaaaggctacagcagcacaaggatgaggacctctccagcctggtccaggacgatgacatgctgtattggcacaagcacggggatggatggaagacccccgtccccatggaggaggatcccctgctggacacagacatgctcatgtcggaattcagcgacaccctcttctccacactttcttcacaccagccggtggcctggcccaatccccgggaaatagcacatctgggaaatgcagacatgatccagccgggactgattcctttgcagcctaacctggacttcatggacacctttgagcctttccaggacctcttctcttctagccgctccatttttggctccatgctacctgcatctgcctcagcacctgtaccagatcccaacaacccacctgcacaggagagcatcctgccgaccacagccctccccactgtgagccttcctgacagcctcatcgcgccccctaccgccccatccctggctcacatggatgggcagggctgtgaacacacctcccggactgaggacccgtttatccagcccacggacttcggtccctcagagccgccactgagtgtcccgcagcccttcctccctgtcttcaccatgcccctgctgtctcccagccccgccccaccgcccatctcccccgtgttaccattagttcctcctcctgccactgccctgaaccccccggctccacccaccttccatcagccacagaagtttgctggagtcaacaaagcgccgtctgtcatcacccacacggcctctgccaccctcacccacgatgcccccgccaccacctttagccagagtcagggccttgtgatcaccacccatcaccctgccccgtcagcggccccttgtgggctggcactgtctcctgtcacccggcctccccagccacggttaacttttgtgcaccccaaacctgtatccttgactgggggcaggcctaagcagccccacaaaatagtgcctgctcccaaaccagagcccgtgtccttggtgttgaagaatgcccgtatcgccccagctgccttttcaggccaaccacaagcggtgatcatgacgtcagggcctctgaagagagaagggatgttggcctccaccgtgtcccagtccaacgtggtcattgcgcctgctgccatcgccagggctcctggggtcccggagttccacagcagcatcctggtgacagatctcggccatggcacgagcagcccgcctgcccccgtctcccggctcttcccaagcacagcgcaagaccccctggggaagggcgagcaggtcccgctgcatgggggcagcccccaggtcactgtcacagggcccagtcgggactgcccaaactcagggcaggcctctccgtgtgcatcggagcagagccccagtcctcaatctccccagaacaactgctcagggaaatccgaccccaaaaatgtggctgcactaaagaaccggcagatgaagcacatctcagctgagcagaaaaggcgcttcaacatcaagatgtgcttcgacatgctcaacagcctcatctccaacaattccaagctgaccagtcacgccatcacactgcagaagaccgtggagtacatcaccaagctgcagcaggagagaggccagatgcaggaggaggcccggcggctgcgggaggagatcgaggagctcaatgccaccatcatctcctgccagcagctgctccctgccacgggagtccccgttacccggcgccagtttgatcacatgaaagacatgtttgacgaatacgtgaaaacccggaccttgcagaattggaagttctggattttcagcatcatcatcaagccgctgtttgagtcgttcaagggcatggtgtccaccagcagcctggaggagctgcaccggacggcgctctcctggctggaccagcactgctccctgcccatcctcaggccgatggtattgagcacgctgcggcagctgagcacctccacctccatcctcacagacccggcacagctgccagagcaggcgtccaaggctgtcaccaggattggcaagagattgggagagtcctagctgcttagctggcatgtggccgcatgagatgccaggagacccttccctgcccatggagagtaggctgcgccccccagcccttcctgacgctcagcctcggggcctctctccaactctgccggcccaccgtggcatcgggaggccatgctcaggtctgaagcaggtttggggcctgctgacagcaatagcccgcctttgggaaccccttgctgtgaactctctcactcagtgacctcagtcaccaacctcctctgccctcggggcagcccacacaaaagggaagtgctggccgtgctggtcctgccctgctggtggcctgccgggcctggcgccggtgagcggaatcgatgggatgagggtgacagggcctgctcctgtcctgaggcccagccttgtccctcctgccacgtcctgtccacatgcatgcctctgcctgatgccctgctccactctctggtctgcccgtggggcagttggaaggcatctttctttctcccctcaactctgacagcacccagcccttgtggatggacttgggcttctattcaggcttatgcatggcaggctgccagggggaagtgccttcttcagaggtcctccaggacacatgtgtgcagaaacggtggatgtggaacacacaggaccagaatggaagcgtgtgatgcacggtggctgctctggctgagaggccctgctgggcatgtttcatctgtccccttttagctccacctgacattgcaggatccatggggactcagcccagggccttctcggatgtcacctcaccgctgtggcccttctgccgttcttctccacttggctccagctgcagctgttgacagatcaagcatgtcctgtgggagcttagaaccctgaagttctagtgtctgaaagatcagactccacgtcctgctgtcagccttgtcatcttgtctgatgtctttcagctgggagccccaaaccaggacagttctcggaccaaagatgcccccacactcaaaagtctgtcccgtcttgtgtttggagaaggaaacaatgttggcaggcagcactctgtggtggtcagccctcagagctgtttctaggcatctctcagatcagacagcaaagaatctacccagatctgggctgggtggaggtgtggctgggctgggggccattctgagcctgcagtgagagtttggcccagcctcagtccttgctcttctctggctacctctgcagggagctgcaggggcaagcactctctccagcactcaggaagcccggccgagggtacctcctcgtggaaagaatgcactttaaagctctgctgaggagttcggagcccaggctttcaggcgacctctgccctccctgcctctcctcaccctccctctcttcctgcagggcctgggaagggctttgagggagcctgggagccatgtgaagaggggcacgcctgggctgtcccacagtttagatccagttggaggttctccctggctcctgcaggcctgcggggatctctccccacttcaggcctccggccagctgcctgccctcttgtctgtgcttcagccctgcacaaaagcagcttggtgacaccactcagccacccagagtacgtgtttacaggctttccagatcaccttcctgtggggtgaacgtaatgaggcggggctggtccttggaatttcccctggaaaatggtaacagactccatccttgacccggggatgagcatgaaggcattgtcccaaaggcagaggccaccgtggtaggaattccaccaaggccagaagggaaaaaggaagaacccaccgtgtctggctgtgcgggccctggggagggtcngtgagtgcatgcccctctctacttctgtgcctttgtaaaacgtgtagataaccgcactggttcggctgagccaagaactctcctaaatcagtggacttatctcctccagcccttgctggggagatcatttctacacaaaatctgtgggatataaacatggctcctgctgattcagcctactctcactctgctgactacattgtcgagattctgaaccttccagactatccagggtgcccacgctgcgcagcagccctgacagagcgatgcgcgtgctcccacagaacggcccactggccaggacacgcctgcaccgcatgcgagaataccgcggaaacacacacccaggcgggacaccaacagccaccgcgccacaggcccacgcgccgccaatcaagcaggagacaaaagagatagaaaaccagtgcaaaacagcagacaccaggacaagacaaactatagccagcacgaaacccagcaccaaccaaccgaggcacacacgcggccactagcacagaccacccaggacacagcgcacagaccactgacagccacctgcagccagcacaccgcaggtgacacaggaccagcagggcggcggacagtcaacccacctacgacgccagagctgcgacccactaacgcaattaaactaacccaccgccacacgcaaccacacctgagcgcgagcaagacaccaaagcaagaagcgagagacaagcgcccatgctcaaacaagctcacacgagtgacgcgtatttagcacaactacacgacc

SEQ ID NO: 712990 - DNA, 4036 bp, Homo sapiens
atggccgccgacgtcttcatgtgctccccgcgccggcctcgcagccggggccgccaggtgctgctcaagccccaggtgtccgaggacgacgacgactcggacacggatgagccgtccccgccgcccgcctccggcgcggccaccccggcccgggcccacgcgagcgccgcgccaccgccgcctcgggccgggccgggccgcgaggaacctccgtggcctccagcagatcatccacagcggccacttcatggtgtcgtcgccgcaccgagagcacccgcccaagaagggctacgatttcgacacggtcaacaaacagacgtgccagacctacagcttcggcaagactagctcctgccacctgtccatcgacgcctcgctcaccaagctcttcgagtgcatgactttggcctacagtgggaagttggtgtctccaaagtggaagaatttcaagggcctgaagctacagtggagagacaagatccggctcaataatgccatctggcgggcctggtacatgcagtatctggagaagcgcaagaatcctgtgtgccactttgtgacacccctggacggctctgtggacgtagacgagcaccgccggccggaggccatcaccacggaagggaagtactggaagagccgcatcgagattgtgatccgggagtatcacaagtggagaacctacttcaagaaaaggctacagcagcacaaggatgaggacctctccagcctggtccaggacgatgacatgctgtattggcacaagcacggggatggatggaagacccccgtccccatggaggaggatcccctgctggacacagacatgctcatgtcggaattcagcgacaccctcttctccacactttcttcacaccagccggtggcctggcccaatccccgggaaatagcacatctgggaaatgcagacatgatccagccgggactgattcctttgcagcctaacctggacttcatggacacctttgagcctttccaggacctcttctcttctagccgctccatttttggctccatgctacctgcatctgcctcagcacctgtaccagatcccaacaacccacctgcacaggagagcatcctgccgaccacagccctccccactgtgagccttcctgacagcctcatcgcgccccctaccgccccatccctggctcacatggatgggcagggctgtgaacacacctcccggactgaggacccgtttatccagcccacggacttcggtccctcagagccgccactgagtgtcccgcagcccttcctccctgtcttcaccatgcccctgctgtctcccagccccgccccaccgcccatctcccccgtgttaccattagttcctcctcctgccactgccctgaaccccccggctccacccaccttccatcagccacagaagtttgctggagtcaacaaagcgccgtctgtcatcacccacacggcctctgccaccctcacccacgatgcccccgccaccacctttagccagagtcagggccttgtgatcaccacccatcaccctgccccgtcagcggccccttgtgggctggcactgtctcctgtcacccggcctccccagccacggttaacttttgtgcaccccaaacctgtatccttgactgggggcaggcctaagcagccccacaaaatagtgcctgctcccaaaccagagcccgtgtccttggtgttgaagaatgcccgtatcgccccagctgccttttcaggccaaccacaagcggtgatcatgacgtcagggcctctgaagagagaagggatgttggcctccaccgtgtcccagtccaacgtggtcattgcgcctgctgccatcgccagggctcctggggtcccggagttccacagcagcatcctggtgacagatctcggccatggcacgagcagcccgcctgcccccgtctcccggctcttcccaagcacagcgcaagaccccctggggaagggcgagcaggtcccgctgcatgggggcagcccccaggtcactgtcacagggcccagtcgggactgcccaaactcagggcaggcctctccgtgtgcatcggagcagagccccagtcctcaatctccccagaacaactgctcagggaaatccgaccccaaaaatgtggctgcactaaagaaccggcagatgaagcacatctcagctgagcagaaaaggcgcttcaacatcaagatgtgcttcgacatgctcaacagcctcatctccaacaattccaagctgaccagtcacgccatcacactgcagaagaccgtggagtacatcaccaagctgcagcaggagagaggccagatgcaggaggaggcccggcggctgcgggaggagatcgaggagctcaatgccaccatcatctcctgccagcagctgctccctgccacgggagtccccgttacccggcgccagtttgatcacatgaaagacatgtttgacgaatacgtgaaaacccggaccttgcagaattggaagttctggattttcagcatcatcatcaagccgctgtttgagtcgttcaagggcatggtgtccaccagcagcctggaggagctgcaccggacggcgctctcctggctggaccagcactgctccctgcccatcctcaggccgatggtattgagcacgctgcggcagctgagcacctccacctccatcctcacagacccggcacagctgccagagcaggcgtccaaggctgtcaccaggattggcaagagattgggagagtcctagctgcttagctggcatgtggccgcatgagatgccaggagacccttccctgcccatggagagtaggctgcgccccccagcccttcctgacgctcagcctcggggcctctctccaactctgccggcccaccgtggcatcgggaggccatgctcaggtctgaagcaggtttggggcctgctgacagcaatagcccgcctttgggaaccccttgctgtgaactctctcactcagtgacctcagtcaccaacctcctctgccctcggggcagcccacacaaaagggaagtgctggccgtgctggtcctgccctgctggtggcctgccgggcctggcgccggtgagcggaatcgatgggatgagggtgacagggcctgctcctgtcctgaggcccagccttgtccctcctgccacgtcctgtccacatgcatgcctctgcctgatgccctgctccactctctggtctgcccgtggggcagttggaaggcatctttctttctcccctcaactctgacagcacccagcccttgtggatggacttgggcttctattcaggcttatgcatggcaggctgccagggggaagtgccttcttcagaggtcctccaggacacatgtgtgcagaaacggtggatgtggaacacacaggaccagaatggaagcgtgtgatgcacggtggctgctctggctgagaggccctgctgggcatgtttcatctgtccccttttagctccacctgacattgcaggatccatggggactcagcccagggccttctcggatgtcacctcaccgctgtggcccttctgccgttcttctccacttggctccagctgcagctgttgacagatcaagcatgtcctgtgggagcttagaaccctgaagttctagtgtctgaaagatcagactccacgtcctgctgtcagccttgtcatcttgtctgatgtctttcagctgggagccccaaaccaggacagttctcggaccaaagatgcccccacactcaaaagtctgtcccgtcttgtgtttggagaaggaaacaatgttggcaggcagcactctgtggtggtcagccctcagagctgtttctaggcatctctcagatcagacagcaaagaatctacccagatctgggctgggtggaggtgtggctgggctgggggccattctgagcctgcagtgagagtttggcccagcctcagtccttgctcttctctggctacctctgcagagctttaaagtgcattctttccacgaggaggtaccctcgcccacgcgtccg

SEQ ID NO: 712991 - DNA, 5233 bp, Homo sapiens
  misc_feature (4455)..(4455): n is a, c, g, or t
atggccgccgacgtcttcatgtgctccccgcgccggcctcgcagccggggccgccaggtgctgctcaagccccaggtgtccgaggacgacgacgactcggacacggatgagccgtccccgccgcccgcctccggcgcggccaccccggcccgggcccacgcgagcgccgcgccaccgccgcctcgggccgggccgggccgcgaggaacctccgtggcctccagcagatcatccacagcggccacttcatggtgtcgtcgccgcaccgagagcacccgcccaagaagggctacgatttcgacacggtcaacaaacagacgtgccagacctacagcttcggcaagactagctcctgccacctgtccatcgacgcctcgctcaccaagctcttcgagtgcatgactttggcctacagtgggaagttggtgtctccaaagtggaagaatttcaagggcctgaagctacagtggagagacaagatccggctcaataatgccatctggcgggcctggtacatgcagtatctggagaagcgcaagaatcctgtgtgccactttgtgacacccctggacggctctgtggacgtagacgagcaccgccggccggaggccatcaccacggaagggaagtactggaagagccgcatcgagattgtgatccgggagtatcacaagtggagaacctacttcaagaaaaggctacagcagcacaaggatgaggacctctccagcctggtccaggacgatgacatgctgtattggcacaagcacggggatggatggaagacccccgtccccatggaggaggatcccctgctggacacagacatgctcatgtcggaattcagcgacaccctcttctccacactttcttcacaccagccggtggcctggcccaatccccgggaaatagcacatctgggaaatgcagacatgatccagccgggactgattcctttgcagcctaacctggacttcatggacacctttgagcctttccaggcaggagagcatcctgccgaccacagccctccccactgtgagccttcctgacagcctcatcgcgccccctaccgccccatccctggctcacatggatgggcagggctgtgaacacacctcccggactgaggacccgtttatccagcccacggacttcggtccctcagagccgccactgagtgtcccgcagcccttcctcccccgtgttaccattagttcctcctcctgccactgccctgaaccccccggctccacccaccttccatcagccacagaagtttgctggagtcaacaaagcgccgtctgtcatcacccacacggcctctgccaccctcacccacgatgcccccgccaccacctttagccagagtcagggccttgtgatcaccacccatcaccctgccccgtcagcggccccttgtgggctggcactgtctcctgtcacccggcctccccagccacggttaacttttgtgcaccccaaacctgtatccttgactgggggcaggcctaagcagccccacaaaatagtgcctgctcccaaaccagagcccgtgtccttggtgttgaagaatgcccgtatcgccccagctgccttttcaggccaaccacaagcggtgatcatgacgtcagggcctctgaagagagaagggatgttggcctccaccgtgtcccagtccaacgtggtcattgcgcctgctgccatcgccagggctcctggggtcccggagttccacagcagcatcctggtgacagatctcggccatggcacgagcagcccgcctgcccccgtctcccggctcttcccaagcacagcgcaagaccccctggggaagggcgagcaggtcccgctgcatgggggcagcccccaggtcactgtcacagggcccagtcgggactgcccaaactcagggcaggcctctccgtgtgcatcggagcagagccccagtcctcaatctccccagaacaactgctcagggaaatccgaccccaaaaatgtggctgcactaaagaaccggcagatgaagcacatctcagctgagcagaaaaggcgcttcaacatcaagatgtgcttcgacatgctcaacagcctcatctccaacaattccaagctgaccagtcacgccatcacactgcagaagaccgtggagtacatcaccaagctgcagcaggagagaggccagatgcaggaggaggcccggcggctgcgggaggagatcgaggagctcaatgccaccatcatctcctgccagcagctgctccctgccacgggagtccccgttacccggcgccagtttgatcacatgaaagacatgtttgacgaatacgtgaaaacccggaccttgcagaattggaagttctggattttcagcatcatcatcaagccgctgtttgagtcgttcaagggcatggtgtccaccagcagcctggaggagctgcaccggacggcgctctcctggctggaccagcactgctccctgcccatcctcaggccgatggtattgagcacgctgcggcagctgagcacctccacctccatcctcacagacccggcacagctgccagagcaggcgtccaaggctgtcaccaggattggcaagagattgggagagtcctagctgcttagctggcatgtggccgcatgagatgccaggagacccttccctgcccatggagagtaggctgcgccccccagcccttcctgacgctcagcctcggggcctctctccaactctgccggcccaccgtggcatcgggaggccatgctcaggtctgaagcaggtttggggcctgctgacagcaatagcccgcctttgggaaccccttgctgtgaactctctcactcagtgacctcagtcaccaacctcctctgccctcggggcagcccacacaaaagggaagtgctggccgtgctggtcctgccctgctggtggcctgccgggcctggcgccggtgagcggaatcgatgggatgagggtgacagggcctgctcctgtcctgaggcccagccttgtccctcctgccacgtcctgtccacatgcatgcctctgcctgatgccctgctccactctctggtctgcccgtggggcagttggaaggcatctttctttctcccctcaactctgacagcacccagcccttgtggatggacttgggcttctattcaggcttatgcatggcaggctgccagggggaagtgccttcttcagaggtcctccaggacacatgtgtgcagaaacggtggatgtggaacacacaggaccagaatggaagcgtgtgatgcacggtggctgctctggctgagaggccctgctgggcatgtttcatctgtccccttttagctccacctgacattgcaggatccatggggactcagcccagggccttctcggatgtcacctcaccgctgtggcccttctgccgttcttctccacttggctccagctgcagctgttgacagatcaagcatgtcctgtgggagcttagaaccctgaagttctagtgtctgaaagatcagactccacgtcctgctgtcagccttgtcatcttgtctgatgtctttcagctgggagccccaaaccaggacagttctcggaccaaagatgcccccacactcaaaagtctgtcccgtcttgtgtttggagaaggaaacaatgttggcaggcagcactctgtggtggtcagccctcagagctgtttctaggcatctctcagatcagacagcaaagaatctacccagatctgggctgggtggaggtgtggctgggctgggggccattctgagcctgcagtgagagtttggcccagcctcagtccttgctcttctctggctacctctgcagggagctgcaggggcaagcactctctccagcactcaggaagcccggccgagggtacctcctcgtggaaagaatgcactttaaagctctgctgaggagttcggagcccaggctttcaggcgacctctgccctccctgcctctcctcaccctccctctcttcctgcagggcctgggaagggctttgagggagcctgggagccatgtgaagaggggcacgcctgggctgtcccacagtttagatccagttggaggttctccctggctcctgcaggcctgcggggatctctccccacttcaggcctccggccagctgcctgccctcttgtctgtgcttcagccctgcacaaaagcagcttggtgacaccactcagccacccagagtacgtgtttacaggctttccagatcaccttcctgtggggtgaacgtaatgaggcggggctggtccttggaatttcccctggaaaatggtaacagactccatccttgacccggggatgagcatgaaggcattgtcccaaaggcagaggccaccgtggtaggaattccaccaaggccagaagggaaaaaggaagaacccaccgtgtctggctgtgcgggccctggggagggtcngtgagtgcatgcccctctctacttctgtgcctttgtaaaacgtgtagataaccgcactggttcggctgagccaagaactctcctaaatcagtggacttatctcctccagcccttgctggggagatcatttctacacaaaatctgtgggatataaacatggctcctgctgattcagcctactctcactctgctgactacattgtcgagattctgaaccttccagactatccagggtgcccacgctgcgcagcagccctgacagagcgatgcgcgtgctcccacagaacggcccactggccaggacacgcctgcaccgcatgcgagaataccgcggaaacacacacccaggcgggacaccaacagccaccgcgccacaggcccacgcgccgccaatcaagcaggagacaaaagagatagaaaaccagtgcaaaacagcagacaccaggacaagacaaactatagccagcacgaaacccagcaccaaccaaccgaggcacacacgcggccactagcacagaccacccaggacacagcgcacagaccactgacagccacctgcagccagcacaccgcaggtgacacaggaccagcagggcggcggacagtcaacccacctacgacgccagagctgcgacccactaacgcaattaaactaacccaccgccacacgcaaccacacctgagcgcgagcaagacaccaaagcaagaagcgagagacaagcgcccatgctcaaacaagctcacacgagtgacgcgtatttagcacaactacacgacc

SEQ ID NO: 712992 - DNA, 532 bp, Homo sapiens
ccacaccgcggctaaatttgtattagttagtgaatgagtgggttaccccatgttggccaggctggtcttgaactcctgacatcaagtgatccgcccacctgtaatcccagctactcaggaggctgagtcgggaggatcacttgaacccaggaggcggaggttgcagtgagtcgagatcgcaccactgcactccagcctgggtaacagagcaagactctgtctaacataactcaattaataaatcaaatcatgcagaccgcatccccaggaggcagtctgaaatggtctcaggaaaaacaaataaccaggatgaaatcttggcagggggctccctcttgacacggggttcggaaggacaggggtttgtcgccaaacttacccaccctcctagtggcagctggaccctggacccctttaccaccaccagcctgccccttgctactcatcaccagccagctcatgtcctagacttctctgcatccctcctctctctccatccacgttgttgcctcactgtctctggccaccctgg

SEQ ID NO: 712993 - DNA, 187 bp, Homo sapiens
  misc_feature (76)..(76): n is a, c, g, or t
  misc_feature (83)..(83): n is a, c, g, or t
tgtatggagtttacaccaggtgagttagcttatgggaggggtgctaaacactcttacgcgctctatgacttggtancgtgtgncgccggtggtgcacgaaattgacaccctggggtagtatagctagtaacttcgtttatggtagatatagaagagtgccttttgggtacgagctcgaatcgaaatc

SEQ ID NO: 712994 - DNA, 156 bp, Homo sapiens
agcaacggcagtcagcagcagcacacgacgtttcatgaaggtctccaaaggttgactcggcaagcgtgggcctggacactcggggcagtggcgtcgcctgcgcgtggcgacgatcctaaaggcttcgtgttcgcattgcaaccgagtgttcgtata

SEQ ID NO: 712995 - DNA, 4918 bp, Homo sapiens
  misc_feature (4140)..(4140): n is a, c, g, or t
tgtctcagtttcgggacggacgctccctctgtggggtttcccgctggattgcctaaggcctgattgtagtgccggatactcagtacaccagttgagctttgctaatcaagcagagccccctcttcactctgctctctgtccctgtcctaggccatcaccacggaagggaagtactggaagagccgcatcgagattgtgatccgggagtatcacaagtggagaacctacttcaagaaaaggctacagcagcacaaggatgaggacctctccagcctggtccaggacgatgacatgctgtattggcacaagcacggggatggatggaagacccccgtccccatggaggaggatcccctgctggacacagacatgctcatgtcggaattcagcgacaccctcttctccacactttcttcacaccagccggtggcctggcccaatccccgggaaatagcacatctgggaaatgcagacatgatccagccgggactgattcctttgcagcctaacctggacttcatggacacctttgagcctttccaggacctcttctcttctagccgctccatttttggctccatgctacctgcatctgcctcagcacctgtaccagatcccaacaacccacctgcacaggagagcatcctgccgaccacagccctccccactgtgagccttcctgacagcctcatcgcgccccctaccgccccatccctggctcacatggatgggcagggctgtgaacacacctcccggactgaggacccgtttatccagcccacggacttcggtccctcagagccgccactgagtgtcccgcagcccttcctccctgtcttcaccatgcccctgctgtctcccagccccgccccaccgcccatctcccccgtgttaccattagttcctcctcctgccactgccctgaaccccccggctccacccaccttccatcagccacagaagtttgctggagtcaacaaagcgccgtctgtcatcacccacacggcctctgccaccctcacccacgatgcccccgccaccacctttagccagagtcagggccttgtgatcaccacccatcaccctgccccgtcagcggccccttgtgggctggcactgtctcctgtcacccggcctccccagccacggttaacttttgtgcaccccaaacctgtatccttgactgggggcaggcctaagcagccccacaaaatagtgcctgctcccaaaccagagcccgtgtccttggtgttgaagaatgcccgtatcgccccagctgccttttcaggccaaccacaagcggtgatcatgacgtcagggcctctgaagagagaagggatgttggcctccaccgtgtcccagtccaacgtggtcattgcgcctgctgccatcgccagggctcctggggtcccggagttccacagcagcatcctggtgacagatctcggccatggcacgagcagcccgcctgcccccgtctcccggctcttcccaagcacagcgcaagaccccctggggaagggcgagcaggtcccgctgcatgggggcagcccccaggtcactgtcacagggcccagtcgggactgcccaaactcagggcaggcctctccgtgtgcatcggagcagagccccagtcctcaatctccccagaacaactgctcagggaaatccgaccccaaaaatgtggctgcactaaagaaccggcagatgaagcacatctcagctgagcagaaaaggcgcttcaacatcaagatgtgcttcgacatgctcaacagcctcatctccaacaattccaagctgaccagtcacgccatcacactgcagaagaccgtggagtacatcaccaagctgcagcaggagagaggccagatgcaggaggaggcccggcggctgcgggaggagatcgaggagctcaatgccaccatcatctcctgccagcagctgctccctgccacgggagtccccgttacccggcgccagtttgatcacatgaaagacatgtttgacgaatacgtgaaaacccggaccttgcagaattggaagttctggattttcagcatcatcatcaagccgctgtttgagtcgttcaagggcatggtgtccaccagcagcctggaggagctgcaccggacggcgctctcctggctggaccagcactgctccctgcccatcctcaggccgatggtattgagcacgctgcggcagctgagcacctccacctccatcctcacagacccggcacagctgccagagcaggcgtccaaggctgtcaccaggattggcaagagattgggagagtcctagctgcttagctggcatgtggccgcatgagatgccaggagacccttccctgcccatggagagtaggctgcgccccccagcccttcctgacgctcagcctcggggcctctctccaactctgccggcccaccgtggcatcgggaggccatgctcaggtctgaagcaggtttggggcctgctgacagcaatagcccgcctttgggaaccccttgctgtgaactctctcactcagtgacctcagtcaccaacctcctctgccctcggggcagcccacacaaaagggaagtgctggccgtgctggtcctgccctgctggtggcctgccgggcctggcgccggtgagcggaatcgatgggatgagggtgacagggcctgctcctgtcctgaggcccagccttgtccctcctgccacgtcctgtccacatgcatgcctctgcctgatgccctgctccactctctggtctgcccgtggggcagttggaaggcatctttctttctcccctcaactctgacagcacccagcccttgtggatggacttgggcttctattcaggcttatgcatggcaggctgccagggggaagtgccttcttcagaggtcctccaggacacatgtgtgcagaaacggtggatgtggaacacacaggaccagaatggaagcgtgtgatgcacggtggctgctctggctgagaggccctgctgggcatgtttcatctgtccccttttagctccacctgacattgcaggatccatggggactcagcccagggccttctcggatgtcacctcaccgctgtggcccttctgccgttcttctccacttggctccagctgcagctgttgacagatcaagcatgtcctgtgggagcttagaaccctgaagttctagtgtctgaaagatcagactccacgtcctgctgtcagccttgtcatcttgtctgatgtctttcagctgggagccccaaaccaggacagttctcggaccaaagatgcccccacactcaaaagtctgtcccgtcttgtgtttggagaaggaaacaatgttggcaggcagcactctgtggtggtcagccctcagagctgtttctaggcatctctcagatcagacagcaaagaatctacccagatctgggctgggtggaggtgtggctgggctgggggccattctgagcctgcagtgagagtttggcccagcctcagtccttgctcttctctggctacctctgcagggagctgcaggggcaagcactctctccagcactcaggaagcccggccgagggtacctcctcgtggaaagaatgcactttaaagctctgctgaggagttcggagcccaggctttcaggcgacctctgccctccctgcctctcctcaccctccctctcttcctgcagggcctgggaagggctttgagggagcctgggagccatgtgaagaggggcacgcctgggctgtcccacagtttagatccagttggaggttctccctggctcctgcaggcctgcggggatctctccccacttcaggcctccggccagctgcctgccctcttgtctgtgcttcagccctgcacaaaagcagcttggtgacaccactcagccacccagagtacgtgtttacaggctttccagatcaccttcctgtggggtgaacgtaatgaggcggggctggtccttggaatttcccctggaaaatggtaacagactccatccttgacccggggatgagcatgaaggcattgtcccaaaggcagaggccaccgtggtaggaattccaccaaggccagaagggaaaaaggaagaacccaccgtgtctggctgtgcgggccctggggagggtcngtgagtgcatgcccctctctacttctgtgcctttgtaaaacgtgtagataaccgcactggttcggctgagccaagaactctcctaaatcagtggacttatctcctccagcccttgctggggagatcatttctacacaaaatctgtgggatataaacatggctcctgctgattcagcctactctcactctgctgactacattgtcgagattctgaaccttccagactatccagggtgcccacgctgcgcagcagccctgacagagcgatgcgcgtgctcccacagaacggcccactggccaggacacgcctgcaccgcatgcgagaataccgcggaaacacacacccaggcgggacaccaacagccaccgcgccacaggcccacgcgccgccaatcaagcaggagacaaaagagatagaaaaccagtgcaaaacagcagacaccaggacaagacaaactatagccagcacgaaacccagcaccaaccaaccgaggcacacacgcggccactagcacagaccacccaggacacagcgcacagaccactgacagccacctgcagccagcacaccgcaggtgacacaggaccagcagggcggcggacagtcaacccacctacgacgccagagctgcgacccactaacgcaattaaactaacccaccgccacacgcaaccacacctgagcgcgagcaagacaccaaagcaagaagcgagagacaagcgcccatgctcaaacaagctcacacgagtgacgcgtatttagcacaactacacgacc

SEQ ID NO: 712996 - DNA, 3745 bp, Homo sapiens
  misc_feature (3637)..(3637): n is a, c, g, or t
  misc_feature (3653)..(3653): n is a, c, g, or t
  misc_feature (3681)..(3681): n is a, c, g, or t
  misc_feature (3705)..(3705): n is a, c, g, or t
  misc_feature (3736)..(3736): n is a, c, g, or t
atggccgccgacgtcttcatgtgctccccgcgccggcctcgcagccggggccgccaggtgctgctcaagccccaggtgtccgaggacgacgacgactcggacacggatgagccgtccccgccgcccgcctccggcgcggccaccccggcccgggcccacgcgagcgccgcgccaccgccgcctcgggccgggccgggccgcgaggaacctccgtggcctccagcagatcatccacagcggccacttcatggtgtcgtcgccgcaccgagagcacccgcccaagaagggctacgatttcgacacggtcaacaaacagacgtgccagacctacagcttcggcaagactagctcctgccacctgtccatcgacgcctcgctcaccaagctcttcgagtgcatgactttggcctacagtgggaagttggtgtctccaaagtggaagaatttcaagggcctgaagctacagtggagagacaagatccggctcaataatgccatctggcgggcctggtacatgcagtatctggagaagcgcaagaatcctgtgtgccactttgtgacacccctggacggctctgtggacgtagacgagcaccgccggccggaggccatcaccacggaagggaagtactggaagagccgcatcgagattgtgatccgggagtatcacaagtggagaacctacttcaagaaaaggctacagcagcacaaggatgaggacctctccagcctggtccaggacgatgacatgctgtattggcacaagcacggggatggatggaagacccccgtccccatggaggaggatcccctgctggacacagacatgctcatgtcggaattcagcgacaccctcttctccacactttcttcacaccagccggtggcctggcccaatccccgggaaatagcacatctgggaaatgcagacatgatccagccgggactgattcctttgcagcctaacctggacttcatggacacctttgagcctttccaggacctcttctcttctagccgctccatttttggctccatgctacctgcatctgcctcagcacctgtaccagatcccaacaacccacctgcacaggagagcatcctgccgaccacagccctccccactgtgagccttcctgacagcctcatcgcgccccctaccgccccatccctggctcacatggatgggcagggctgtgaacacacctcccggactgaggacccgtttatccagcccacggacttcggtccctcagagccgccactgagtgtcccgcagcccttcctccctgtcttcaccatgcccctgctgtctcccagccccgccccaccgcccatctcccccgtgttaccattagttcctcctcctgccactgccctgaaccccccggctccacccaccttccatcagccacagaagtttgctggagtcaacaaagcgccgtctgtcatcacccacacggcctctgccaccctcacccacgatgcccccgccaccacctttagccagagtcagggccttgtgatcaccacccatcaccctgccccgtcagcggccccttgtgggctggcactgtctcctgtcacccggcctccccagccacggttaacttttgtgcaccccaaacctgtatccttgactgggggcaggcctaagcagccccacaaaatagtgcctgctcccaaaccagagcccgtgtccttggtgttgaagaatgcccgtatcgccccagctgccttttcaggccaaccacaagcggtgatcatgacgtcagggcctctgaagagagaagggatgttggcctccaccgtgtcccagtccaacgtggtcattgcgcctgctgccatcgccagggctcctggggtcccggagttccacagcagcatcctggtgacagatctcggccatggcacgagcagcccgcctgcccccgtctcccggctcttcccaagcacagcgcaagaccccctggggaagggcgagcaggtcccgctgcatgggggcagcccccaggtcactgtcacagggcccagtcgggactgcccaaactcagggcaggcctctccgtgtgcatcggagcagagccccagtcctcaatctccccagaacaactgctcagggaaatccgaccccaaaaatgtggctgcactaaagaaccggcagatgaagcacatctcagctgagcagaaaaggcgcttcaacatcaagatgtgcttcgacatgctcaacagcctcatctccaacaattccaagctgaccagtcacgccatcacactgcagaagaccgtggagtacatcaccaagctgcagcaggagagaggccagatgcaggaggaggcccggcggctgcgggaggagatcgaggagctcaatgccaccatcatctcctgccagcagctgctccctgccacgggagtccccgttacccggcgccagtttgatcacatgaaagacatgtttgacgaatacgtgaaaacccggaccttgcagaattggaagttctggattttcagcatcatcatcaagccgctgtttgagtcgttcaagggcatggtgtccaccagcagcctggaggagctgcaccggacggcgctctcctggctggaccagcactgctccctgcccatcctcaggccgatggtattgagcacgctgcggcagctgagcacctccacctccatcctcacagacccggcacagctgccagagcaggcgtccaaggctgtcaccaggattggcaagagattgggagagtcctagctgcttagctggcatgtggccgcatgagatgccaggagacccttccctgcccatggagagtaggctgcgccccccagcccttcctgacgctcagcctcggggcctctctccaactctgccggcccaccgtggcatcgggaggccatgctcaggtctgaagcaggtttggggcctgctgacagcaatagcccgcctttgggaaccccttgctgtgaactctctcactcagtgacctcagtcaccaacctcctctgccctcggggcagcccacacaaaagggaagtgctggccgtgctggtcctgccctgctggtggcctgccgggcctggcgccggtgagcggaatcgatgggatgagggtgacagggcctgctcctgtcctgaggcccagccttgtccctcctgccacgtcctgtccacatgcatgcctctgcctgatgccctgctccactctctggtctgcccgtggggcagttggaaggcatctttctttctcccctcaactctgacagcacccagcccttgtggatggacttgggcttctattcaggcttatgcatggcaggctgccagggggaagtgccttcttcagaggtcctccaggacacatgtgtgcagaaacggtggatgtggaacacacaggaccagaatggaagcgtgtgatgcacggtggctgctctggctgagaggccctgctgggcatgtttcatctgtccccttttagctccacctgacattgcaggatccatggggactcagcccagggccttctcggatgtcacctcaccgctgtggcccttctgccgttcttctccacttgggcttccaaccttgcaagcttggttggacaagaatcaaaagccattgttccctggtngggggaagcctttaanaaaacccccttggaaagtttcttaagtnggtcttggaaaaaagaaatccagnaactttcccacccgtttcccttggcttggtncaagcccct

SEQ ID NO: 712997 - DNA, 5683 bp, Homo sapiens
  misc_feature (811)..(811): n is a, c, g, or t
  misc_feature (816)..(816): n is a, c, g, or t
  misc_feature (818)..(818): n is a, c, g, or t
  misc_feature (820)..(820): n is a, c, g, or t
  misc_feature (4905)..(4905): n is a, c, g, or t
atggccgccgacgtcttcatgtgctccccgcgccggcctcgcagccggggccgccaggtgctgctcaagccccaggtgtccgaggacgacgacgactcggacacggatgagccgtccccgccgcccgcctccggcgcggccaccccggcccgggcccacgcgagcgccgcgccaccgccgcctcgggccgggccgggccgcgaggaacctccgtggcctccagcagatcatccacagcggccacttcatggtgtcgtcgccgcaccgagagcacccgcccaagaagggctacgatttcgacacggtcaacaaacagacgtgccagacctacagcttcggcaagactagctcctgccacctgtccatcgacgcctcgctcaccaagctcttcgagtgcatgactttggcctacagtgggaagttggtgtctccaaagtggaagaatttcaagggcctgaagctacagtggagagacaagatccggctcaataatgccatctggcgggcctggtacatgcagtatctggagaagcgcaagaatcctgtgtgccactttgtgacacccctggacggctctgtggacgtagacgagcaccgccggccggaggccatcaccacggaagggaagtactggaagagccgcatcgagattgtgatccgggagtatcacaagtggagaacctacttcaagaaaaggctacagcagcacaaggatgaggacctctccagcctggtccaggtgggtgagcctgggagctctgaggacccccacttgacatgagacagcagggacttcggtggcccaccaggnagccntncnaggcggcaggccatgggccctccctggagtctcaggaatggctcaagaagcagtccagctctctctcctgggtgggctggagggagccgctctccaaatgcctccaccctgctgcctcacttccacggagcacccctttgacgaatttccccaggtgacaggcgtgggaattcttcgtcccactgttactctttgatgcttcctcccctgtgttggtgttgtgttaggacgatgacatgctgtattggcacaagcacggggatggatggaagacccccgtccccatggaggaggatcccctgctggacacagacatgctcatgtcggaattcagcgacaccctcttctccacactttcttcacaccagccggtggcctggcccaatccccgggaaatagcacatctgggaaatgcagacatgatccagccgggactgattcctttgcagcctaacctggacttcatggacacctttgagcctttccaggacctcttctcttctagccgctccatttttggctccatgctacctgcatctgcctcagcacctgtaccagatcccaacaacccacctgcacaggagagcatcctgccgaccacagccctccccactgtgagccttcctgacagcctcatcgcgccccctaccgccccatccctggctcacatggatgggcagggctgtgaacacacctcccggactgaggacccgtttatccagcccacggacttcggtccctcagagccgccactgagtgtcccgcagcccttcctccctgtcttcaccatgcccctgctgtctcccagccccgccccaccgcccatctcccccgtgttaccattagttcctcctcctgccactgccctgaaccccccggctccacccaccttccatcagccacagaagtttgctggagtcaacaaagcgccgtctgtcatcacccacacggcctctgccaccctcacccacgatgcccccgccaccacctttagccagagtcagggccttgtgatcaccacccatcaccctgccccgtcagcggccccttgtgggctggcactgtctcctgtcacccggcctccccagccacggttaacttttgtgcaccccaaacctgtatccttgactgggggcaggcctaagcagccccacaaaatagtgcctgctcccaaaccagagcccgtgtccttggtgttgaagaatgcccgtatcgccccagctgccttttcaggccaaccacaagcggtgatcatgacgtcagggcctctgaagagagaagggatgttggcctccaccgtgtcccagtccaacgtggtcattgcgcctgctgccatcgccagggctcctggggtcccggagttccacagcagcatcctggtgacagatctcggccatggcacgagcagcccgcctgcccccgtctcccggctcttcccaagcacagcgcaagaccccctggggaagggcgagcaggtcccgctgcatgggggcagcccccaggtcactgtcacagggcccagtcgggactgcccaaactcagggcaggcctctccgtgtgcatcggagcagagccccagtcctcaatctccccagaacaactgctcagggaaatccgaccccaaaaatgtggctgcactaaagaaccggcagatgaagcacatctcagctgagcagaaaaggcgcttcaacatcaagatgtgcttcgacatgctcaacagcctcatctccaacaattccaagctgaccagtcacgccatcacactgcagaagaccgtggagtacatcaccaagctgcagcaggagagaggccagatgcaggaggaggcccggcggctgcgggaggagatcgaggagctcaatgccaccatcatctcctgccagcagctgctccctgccacgggagtccccgttacccggcgccagtttgatcacatgaaagacatgtttgacgaatacgtgaaaacccggaccttgcagaattggaagttctggattttcagcatcatcatcaagccgctgtttgagtcgttcaagggcatggtgtccaccagcagcctggaggagctgcaccggacggcgctctcctggctggaccagcactgctccctgcccatcctcaggccgatggtattgagcacgctgcggcagctgagcacctccacctccatcctcacagacccggcacagctgccagagcaggcgtccaaggctgtcaccaggattggcaagagattgggagagtcctagctgcttagctggcatgtggccgcatgagatgccaggagacccttccctgcccatggagagtaggctgcgccccccagcccttcctgacgctcagcctcggggcctctctccaactctgccggcccaccgtggcatcgggaggccatgctcaggtctgaagcaggtttggggcctgctgacagcaatagcccgcctttgggaaccccttgctgtgaactctctcactcagtgacctcagtcaccaacctcctctgccctcggggcagcccacacaaaagggaagtgctggccgtgctggtcctgccctgctggtggcctgccgggcctggcgccggtgagcggaatcgatgggatgagggtgacagggcctgctcctgtcctgaggcccagccttgtccctcctgccacgtcctgtccacatgcatgcctctgcctgatgccctgctccactctctggtctgcccgtggggcagttggaaggcatctttctttctcccctcaactctgacagcacccagcccttgtggatggacttgggcttctattcaggcttatgcatggcaggctgccagggggaagtgccttcttcagaggtcctccaggacacatgtgtgcagaaacggtggatgtggaacacacaggaccagaatggaagcgtgtgatgcacggtggctgctctggctgagaggccctgctgggcatgtttcatctgtccccttttagctccacctgacattgcaggatccatggggactcagcccagggccttctcggatgtcacctcaccgctgtggcccttctgccgttcttctccacttggctccagctgcagctgttgacagatcaagcatgtcctgtgggagcttagaaccctgaagttctagtgtctgaaagatcagactccacgtcctgctgtcagccttgtcatcttgtctgatgtctttcagctgggagccccaaaccaggacagttctcggaccaaagatgcccccacactcaaaagtctgtcccgtcttgtgtttggagaaggaaacaatgttggcaggcagcactctgtggtggtcagccctcagagctgtttctaggcatctctcagatcagacagcaaagaatctacccagatctgggctgggtggaggtgtggctgggctgggggccattctgagcctgcagtgagagtttggcccagcctcagtccttgctcttctctggctacctctgcagggagctgcaggggcaagcactctctccagcactcaggaagcccggccgagggtacctcctcgtggaaagaatgcactttaaagctctgctgaggagttcggagcccaggctttcaggcgacctctgccctccctgcctctcctcaccctccctctcttcctgcagggcctgggaagggctttgagggagcctgggagccatgtgaagaggggcacgcctgggctgtcccacagtttagatccagttggaggttctccctggctcctgcaggcctgcggggatctctccccacttcaggcctccggccagctgcctgccctcttgtctgtgcttcagccctgcacaaaagcagcttggtgacaccactcagccacccagagtacgtgtttacaggctttccagatcaccttcctgtggggtgaacgtaatgaggcggggctggtccttggaatttcccctggaaaatggtaacagactccatccttgacccggggatgagcatgaaggcattgtcccaaaggcagaggccaccgtggtaggaattccaccaaggccagaagggaaaaaggaagaacccaccgtgtctggctgtgcgggccctggggagggtcngtgagtgcatgcccctctctacttctgtgcctttgtaaaacgtgtagataaccgcactggttcggctgagccaagaactctcctaaatcagtggacttatctcctccagcccttgctggggagatcatttctacacaaaatctgtgggatataaacatggctcctgctgattcagcctactctcactctgctgactacattgtcgagattctgaaccttccagactatccagggtgcccacgctgcgcagcagccctgacagagcgatgcgcgtgctcccacagaacggcccactggccaggacacgcctgcaccgcatgcgagaataccgcggaaacacacacccaggcgggacaccaacagccaccgcgccacaggcccacgcgccgccaatcaagcaggagacaaaagagatagaaaaccagtgcaaaacagcagacaccaggacaagacaaactatagccagcacgaaacccagcaccaaccaaccgaggcacacacgcggccactagcacagaccacccaggacacagcgcacagaccactgacagccacctgcagccagcacaccgcaggtgacacaggaccagcagggcggcggacagtcaacccacctacgacgccagagctgcgacccactaacgcaattaaactaacccaccgccacacgcaaccacacctgagcgcgagcaagacaccaaagcaagaagcgagagacaagcgcccatgctcaaacaagctcacacgagtgacgcgtatttagcacaactacacgacc

SEQ ID NO: 712998 - DNA, 5197 bp, Homo sapiens
  misc_feature (811)..(811): n is a, c, g, or t
  misc_feature (816)..(816): n is a, c, g, or t
  misc_feature (818)..(818): n is a, c, g, or t
  misc_feature (820)..(820): n is a, c, g, or t
  misc_feature (4419)..(4419): n is a, c, g, or t
atggccgccgacgtcttcatgtgctccccgcgccggcctcgcagccggggccgccaggtgctgctcaagccccaggtgtccgaggacgacgacgactcggacacggatgagccgtccccgccgcccgcctccggcgcggccaccccggcccgggcccacgcgagcgccgcgccaccgccgcctcgggccgggccgggccgcgaggaacctccgtggcctccagcagatcatccacagcggccacttcatggtgtcgtcgccgcaccgagagcacccgcccaagaagggctacgatttcgacacggtcaacaaacagacgtgccagacctacagcttcggcaagactagctcctgccacctgtccatcgacgcctcgctcaccaagctcttcgagtgcatgactttggcctacagtgggaagttggtgtctccaaagtggaagaatttcaagggcctgaagctacagtggagagacaagatccggctcaataatgccatctggcgggcctggtacatgcagtatctggagaagcgcaagaatcctgtgtgccactttgtgacacccctggacggctctgtggacgtagacgagcaccgccggccggaggccatcaccacggaagggaagtactggaagagccgcatcgagattgtgatccgggagtatcacaagtggagaacctacttcaagaaaaggctacagcagcacaaggatgaggacctctccagcctggtccaggtgggtgagcctgggagctctgaggacccccacttgacatgagacagcagggacttcggtggcccaccaggnagccntncnaggacctcttctcttctagccgctccatttttggctccatgctacctgcatctgcctcagcacctgtaccagatcccaacaacccacctgcacaggagagcatcctgccgaccacagccctccccactgtgagccttcctgacagcctcatcgcgccccctaccgccccatccctggctcacatggatgggcagggctgtgaacacacctcccggactgaggacccgtttatccagcccacggacttcggtccctcagagccgccactgagtgtcccgcagcccttcctccctgtcttcaccatgcccctgctgtctcccagccccgccccaccgcccatctcccccgtgttaccattagttcctcctcctgccactgccctgaaccccccggctccacccaccttccatcagccacagaagtttgctggagtcaacaaagcgccgtctgtcatcacccacacggcctctgccaccctcacccacgatgcccccgccaccacctttagccagagtcagggccttgtgatcaccacccatcaccctgccccgtcagcggccccttgtgggctggcactgtctcctgtcacccggcctccccagccacggttaacttttgtgcaccccaaacctgtatccttgactgggggcaggcctaagcagccccacaaaatagtgcctgctcccaaaccagagcccgtgtccttggtgttgaagaatgcccgtatcgccccagctgccttttcaggccaaccacaagcggtgatcatgacgtcagggcctctgaagagagaagggatgttggcctccaccgtgtcccagtccaacgtggtcattgcgcctgctgccatcgccagggctcctggggtcccggagttccacagcagcatcctggtgacagatctcggccatggcacgagcagcccgcctgcccccgtctcccggctcttcccaagcacagcgcaagaccccctggggaagggcgagcaggtcccgctgcatgggggcagcccccaggtcactgtcacagggcccagtcgggactgcccaaactcagggcaggcctctccgtgtgcatcggagcagagccccagtcctcaatctccccagaacaactgctcagggaaatccgaccccaaaaatgtggctgcactaaagaaccggcagatgaagcacatctcagctgagcagaaaaggcgcttcaacatcaagatgtgcttcgacatgctcaacagcctcatctccaacaattccaagctgaccagtcacgccatcacactgcagaagaccgtggagtacatcaccaagctgcagcaggagagaggccagatgcaggaggaggcccggcggctgcgggaggagatcgaggagctcaatgccaccatcatctcctgccagcagctgctccctgccacgggagtccccgttacccggcgccagtttgatcacatgaaagacatgtttgacgaatacgtgaaaacccggaccttgcagaattggaagttctggattttcagcatcatcatcaagccgctgtttgagtcgttcaagggcatggtgtccaccagcagcctggaggagctgcaccggacggcgctctcctggctggaccagcactgctccctgcccatcctcaggccgatggtattgagcacgctgcggcagctgagcacctccacctccatcctcacagacccggcacagctgccagagcaggcgtccaaggctgtcaccaggattggcaagagattgggagagtcctagctgcttagctggcatgtggccgcatgagatgccaggagacccttccctgcccatggagagtaggctgcgccccccagcccttcctgacgctcagcctcggggcctctctccaactctgccggcccaccgtggcatcgggaggccatgctcaggtctgaagcaggtttggggcctgctgacagcaatagcccgcctttgggaaccccttgctgtgaactctctcactcagtgacctcagtcaccaacctcctctgccctcggggcagcccacacaaaagggaagtgctggccgtgctggtcctgccctgctggtggcctgccgggcctggcgccggtgagcggaatcgatgggatgagggtgacagggcctgctcctgtcctgaggcccagccttgtccctcctgccacgtcctgtccacatgcatgcctctgcctgatgccctgctccactctctggtctgcccgtggggcagttggaaggcatctttctttctcccctcaactctgacagcacccagcccttgtggatggacttgggcttctattcaggcttatgcatggcaggctgccagggggaagtgccttcttcagaggtcctccaggacacatgtgtgcagaaacggtggatgtggaacacacaggaccagaatggaagcgtgtgatgcacggtggctgctctggctgagaggccctgctgggcatgtttcatctgtccccttttagctccacctgacattgcaggatccatggggactcagcccagggccttctcggatgtcacctcaccgctgtggcccttctgccgttcttctccacttggctccagctgcagctgttgacagatcaagcatgtcctgtgggagcttagaaccctgaagttctagtgtctgaaagatcagactccacgtcctgctgtcagccttgtcatcttgtctgatgtctttcagctgggagccccaaaccaggacagttctcggaccaaagatgcccccacactcaaaagtctgtcccgtcttgtgtttggagaaggaaacaatgttggcaggcagcactctgtggtggtcagccctcagagctgtttctaggcatctctcagatcagacagcaaagaatctacccagatctgggctgggtggaggtgtggctgggctgggggccattctgagcctgcagtgagagtttggcccagcctcagtccttgctcttctctggctacctctgcagggagctgcaggggcaagcactctctccagcactcaggaagcccggccgagggtacctcctcgtggaaagaatgcactttaaagctctgctgaggagttcggagcccaggctttcaggcgacctctgccctccctgcctctcctcaccctccctctcttcctgcagggcctgggaagggctttgagggagcctgggagccatgtgaagaggggcacgcctgggctgtcccacagtttagatccagttggaggttctccctggctcctgcaggcctgcggggatctctccccacttcaggcctccggccagctgcctgccctcttgtctgtgcttcagccctgcacaaaagcagcttggtgacaccactcagccacccagagtacgtgtttacaggctttccagatcaccttcctgtggggtgaacgtaatgaggcggggctggtccttggaatttcccctggaaaatggtaacagactccatccttgacccggggatgagcatgaaggcattgtcccaaaggcagaggccaccgtggtaggaattccaccaaggccagaagggaaaaaggaagaacccaccgtgtctggctgtgcgggccctggggagggtcngtgagtgcatgcccctctctacttctgtgcctttgtaaaacgtgtagataaccgcactggttcggctgagccaagaactctcctaaatcagtggacttatctcctccagcccttgctggggagatcatttctacacaaaatctgtgggatataaacatggctcctgctgattcagcctactctcactctgctgactacattgtcgagattctgaaccttccagactatccagggtgcccacgctgcgcagcagccctgacagagcgatgcgcgtgctcccacagaacggcccactggccaggacacgcctgcaccgcatgcgagaataccgcggaaacacacacccaggcgggacaccaacagccaccgcgccacaggcccacgcgccgccaatcaagcaggagacaaaagagatagaaaaccagtgcaaaacagcagacaccaggacaagacaaactatagccagcacgaaacccagcaccaaccaaccgaggcacacacgcggccactagcacagaccacccaggacacagcgcacagaccactgacagccacctgcagccagcacaccgcaggtgacacaggaccagcagggcggcggacagtcaacccacctacgacgccagagctgcgacccactaacgcaattaaactaacccaccgccacacgcaaccacacctgagcgcgagcaagacaccaaagcaagaagcgagagacaagcgcccatgctcaaacaagctcacacgagtgacgcgtatttagcacaactacacgacc

SEQ ID NO: 712999 - DNA, 640 bp, Homo sapiens
acagtgtgagcagaacagatgggtatgtgctagagggcaaatagttgaagttctatctaaggaaaatcaaggcccgcaagggcatataaatccttgtgatgtccacacccatgcaaagctaggaaaccgaagcgtacagaacgtatgtccgacactgcacgccagagagaacaattactagaaaccaatcaaggagggagtccagagcgagcatagataataaaataacgcccacgaacatgcattacaaaaagcaaacactccgtgaagcaaacaaacaacagcagtgcgaagatctgacacaccaacaataaaaaaaacagccccgcgcgcgtgaagaaaccaacgcacgagtcttctgaaagcaaaccaacccagaatgaggagcgagcacagagaacgcaacaaacgaggcgggctgtaacataaaccagcaggcgaaccaacaagcaaggaccacagcctaataaagaaaagaatagtccgccccccaagacgcagattggatagcagcaaggacaggacgagcacgaacacaacagtagccaagacagtacagaagagctagacagaacgaagcctcagtaagacgagacaacatagaacagatcaagaaatgaacctagtaagaacgaacagt

SEQ ID NO: 713000 - DNA, 4941 bp, Homo sapiens
  misc_feature (176)..(176): n is a, c, g, or t
  misc_feature (4163)..(4163): n is a, c, g, or t
tggattactagttatatcacttctgtatatggtctgtcacgtttgactaagcaattccttatagttgcttacaggtgcttggggctacagagctgagtgaggtaccattctttgtccttacggagccctcatgcttatgcccatgaccagttagacactggtaacctggcaccatnttcaaacgggctccgggaagaattgctactgcagagactgggatctgaaccattgattcctcgtagcttttcttatttaggaagaggtggcctgatgaccagttgacacgtgaaattgtcctcggggattcccgagcagctgcaatccaggctgcctctgctcagtaatagaagatggcagagactttggggagactctgctggactccagaaacaagatattcccaggctgctagccagctgtgtgagggccgttgccttatctgagctctgagttatttagtttttaatggaaacaagacccccgcagacacgcagggaaacacaaatccctatcagatcagcagccatggacgtggagacgtggcctttgtccctctgtcccagcgcccggcctgtgtagttggacttggcagtgtgcagcgctagaaaggaattgtctgaccccagcattgcttcctggctcctttcttcctttttcaggagagcatcctgccgaccacagccctccccactgtgagccttcctgacagcctcatcgcgccccctaccgccccatccctggctcacatggatgggcagggctgtgaacacacctcccggactgaggacccgtttatccagcccacggacttcggtccctcagagccgccactgagtgtcccgcagcccttcctccctgtcttcaccatgcccctgctgtctcccagccccgccccaccgcccatctcccccgtgttaccattagttcctcctcctgccactgccctgaaccccccggctccacccaccttccatcagccacagaagtttgctggagtcaacaaagcgccgtctgtcatcacccacacggcctctgccaccctcacccacgatgcccccgccaccacctttagccagagtcagggccttgtgatcaccacccatcaccctgccccgtcagcggccccttgtgggctggcactgtctcctgtcacccggcctccccagccacggttaacttttgtgcaccccaaacctgtatccttgactgggggcaggcctaagcagccccacaaaatagtgcctgctcccaaaccagagcccgtgtccttggtgttgaagaatgcccgtatcgccccagctgccttttcaggccaaccacaagcggtgatcatgacgtcagggcctctgaagagagaagggatgttggcctccaccgtgtcccagtccaacgtggtcattgcgcctgctgccatcgccagggctcctggggtcccggagttccacagcagcatcctggtgacagatctcggccatggcacgagcagcccgcctgcccccgtctcccggctcttcccaagcacagcgcaagaccccctggggaagggcgagcaggtcccgctgcatgggggcagcccccaggtcactgtcacagggcccagtcgggactgcccaaactcagggcaggcctctccgtgtgcatcggagcagagccccagtcctcaatctccccagaacaactgctcagggaaatccgaccccaaaaatgtggctgcactaaagaaccggcagatgaagcacatctcagctgagcagaaaaggcgcttcaacatcaagatgtgcttcgacatgctcaacagcctcatctccaacaattccaagctgaccagtcacgccatcacactgcagaagaccgtggagtacatcaccaagctgcagcaggagagaggccagatgcaggaggaggcccggcggctgcgggaggagatcgaggagctcaatgccaccatcatctcctgccagcagctgctccctgccacgggagtccccgttacccggcgccagtttgatcacatgaaagacatgtttgacgaatacgtgaaaacccggaccttgcagaattggaagttctggattttcagcatcatcatcaagccgctgtttgagtcgttcaagggcatggtgtccaccagcagcctggaggagctgcaccggacggcgctctcctggctggaccagcactgctccctgcccatcctcaggccgatggtattgagcacgctgcggcagctgagcacctccacctccatcctcacagacccggcacagctgccagagcaggcgtccaaggctgtcaccaggattggcaagagattgggagagtcctagctgcttagctggcatgtggccgcatgagatgccaggagacccttccctgcccatggagagtaggctgcgccccccagcccttcctgacgctcagcctcggggcctctctccaactctgccggcccaccgtggcatcgggaggccatgctcaggtctgaagcaggtttggggcctgctgacagcaatagcccgcctttgggaaccccttgctgtgaactctctcactcagtgacctcagtcaccaacctcctctgccctcggggcagcccacacaaaagggaagtgctggccgtgctggtcctgccctgctggtggcctgccgggcctggcgccggtgagcggaatcgatgggatgagggtgacagggcctgctcctgtcctgaggcccagccttgtccctcctgccacgtcctgtccacatgcatgcctctgcctgatgccctgctccactctctggtctgcccgtggggcagttggaaggcatctttctttctcccctcaactctgacagcacccagcccttgtggatggacttgggcttctattcaggcttatgcatggcaggctgccagggggaagtgccttcttcagaggtcctccaggacacatgtgtgcagaaacggtggatgtggaacacacaggaccagaatggaagcgtgtgatgcacggtggctgctctggctgagaggccctgctgggcatgtttcatctgtccccttttagctccacctgacattgcaggatccatggggactcagcccagggccttctcggatgtcacctcaccgctgtggcccttctgccgttcttctccacttggctccagctgcagctgttgacagatcaagcatgtcctgtgggagcttagaaccctgaagttctagtgtctgaaagatcagactccacgtcctgctgtcagccttgtcatcttgtctgatgtctttcagctgggagccccaaaccaggacagttctcggaccaaagatgcccccacactcaaaagtctgtcccgtcttgtgtttggagaaggaaacaatgttggcaggcagcactctgtggtggtcagccctcagagctgtttctaggcatctctcagatcagacagcaaagaatctacccagatctgggctgggtggaggtgtggctgggctgggggccattctgagcctgcagtgagagtttggcccagcctcagtccttgctcttctctggctacctctgcagggagctgcaggggcaagcactctctccagcactcaggaagcccggccgagggtacctcctcgtggaaagaatgcactttaaagctctgctgaggagttcggagcccaggctttcaggcgacctctgccctccctgcctctcctcaccctccctctcttcctgcagggcctgggaagggctttgagggagcctgggagccatgtgaagaggggcacgcctgggctgtcccacagtttagatccagttggaggttctccctggctcctgcaggcctgcggggatctctccccacttcaggcctccggccagctgcctgccctcttgtctgtgcttcagccctgcacaaaagcagcttggtgacaccactcagccacccagagtacgtgtttacaggctttccagatcaccttcctgtggggtgaacgtaatgaggcggggctggtccttggaatttcccctggaaaatggtaacagactccatccttgacccggggatgagcatgaaggcattgtcccaaaggcagaggccaccgtggtaggaattccaccaaggccagaagggaaaaaggaagaacccaccgtgtctggctgtgcgggccctggggagggtcngtgagtgcatgcccctctctacttctgtgcctttgtaaaacgtgtagataaccgcactggttcggctgagccaagaactctcctaaatcagtggacttatctcctccagcccttgctggggagatcatttctacacaaaatctgtgggatataaacatggctcctgctgattcagcctactctcactctgctgactacattgtcgagattctgaaccttccagactatccagggtgcccacgctgcgcagcagccctgacagagcgatgcgcgtgctcccacagaacggcccactggccaggacacgcctgcaccgcatgcgagaataccgcggaaacacacacccaggcgggacaccaacagccaccgcgccacaggcccacgcgccgccaatcaagcaggagacaaaagagatagaaaaccagtgcaaaacagcagacaccaggacaagacaaactatagccagcacgaaacccagcaccaaccaaccgaggcacacacgcggccactagcacagaccacccaggacacagcgcacagaccactgacagccacctgcagccagcacaccgcaggtgacacaggaccagcagggcggcggacagtcaacccacctacgacgccagagctgcgacccactaacgcaattaaactaacccaccgccacacgcaaccacacctgagcgcgagcaagacaccaaagcaagaagcgagagacaagcgcccatgctcaaacaagctcacacgagtgacgcgtatttagcacaactacacgacc

SEQ ID NO: 713001 - DNA, 424 bp, Homo sapiens
ctcgagctgggtacctgttgatcgcgcgaaacggtcgcggacaatatcgccggcaaagcgcatgatcgccatggtcatggagaaagctggaagccaaaaccagcgaccgtaactgacgcacccatttcatcgcgcagactatatgcaccccaatcaagtatcgcgccctccggggtcatcgagaacaatgcgataatgccgaccagccatggcagcgcattgcgcggcagcaccagcttctgcttctcgccgcttggatggtgaaacttgtccgcaacaatcgaaggccatgcaaaaatcagcaatcctgctgccacaagggtcgcaatcagcgcatgaatagtcgagccgacatgcgcgatgagaaagccaccagttgctgccccgatcaatccgccaaggctccagaatgcatgacaggacg

SEQ ID NO: 713002 - DNA, 4551 bp, Homo sapiens
  misc_feature (3773)..(3773): n is a, c, g, or t
atggccgccgacgtcttcatgtgctccccgcgccggcctcgcagccggggccgccaggtgctgctcaagccccaggtgtccgaggacgacgacgactcggacacggatgagccgtccccgccgcccgcctccggcgcggccaccccggcccgggcccacgcgagcgccgcgccaccgccgcctcgggccgggccgggccgcgaggaacctccgtggcctccagcagatcatccacagcggccacttcatggtgtcgtcgccgcaccgagagcacccgcccaagaagggctacgatttcgacacggtcaacaaacagacgtgccagacctacagcttcggcaagactagctcctgccacctgtccatcgacgcctcgctcaccaagctcttcgagtgcatgactttggcctacagtgggaagttggtgtctccaaagtggaagaatttcaagggcctgaagctacagtggagagacaagatccggctcaataatgccatctggcgggcctggtacatgcagtatctggagaagcgcaagaatcctgtgtgccactttgtgacacccctggacggctctgtggacgtagacgagcaccgccggccggaggccatcaccacggaagggaagtactggaagagccgcatcgagattgtgatccgggagtatcacaagtggagaacctacttcaagaaaaggctacagcagcacaaggatgaggacctctccagcctggtccaggacgatgacatgctgtattggcacaagcacggggatggatggaagacccccgtccccatggaggaggatcccctgctggacacagacatgctcatgtcggaattcagcgacaccctcttctccacactttcttcacaccagccggtggcctggcccaatccccgggaaatagcacatctgggaaatgcagacatgatccagccgggactgattcctttgcagcctaacctggacttcatggacacctttgagcctttccaggacctcttctcttctagccgctccatttttggctccatgctacctgcatctgcctcagcacctgtaccagatcccaacaacccacctgcacaggagagcatcctgccgaccacagccctccccactgtgagccttcctgacagcctcatcgcgccccctaccgccccatccctggctcacatggatgggcagggctgtgaacacacctcccggactgaggacccgtttatccagcccacggacttcggtccctcagagccgccactgagtgtcccgcagcccttcctccctgtcttcaccatgcccctgctgtctcccagccccgccccaccgcccatctcccccgtgttaccattagttcctcctcctgccactgccctgaaccccccggctccacccaccttccatcagccacagaagtttgctggagtcaacaaagcgccgtctgtcatcacccacacggcctctgccaccctcacccacgatgcccccgccaccacctttagccagagtcagggccttgtgatcaccacccatcaccctgccccgtcagcggccccttgtgggctggcactgtctcctgtcacccggcctccccagccacggttaacttttgtgcaccccaaacctgtatccttgactgggggcaggcctaagcagccccacaaaatagtgcctgctcccaaaccagagcccgtgtccttggtgttgaagaatgcccgtatcgccccagctgccttttcaggccaaccacaagcggtgatcatgacgtcagggcctctgaagagagaagggatgttggcctccaccgtgtcccagtccaacgtggtcattgcgcctgctgccatcgccagggctcctggggtcccggagttccacagcagcatcctggtgacagatctcggccatggcacgagcagcccgcctgcccccgtctcccggctcttcccaagcacagcgcaagaccccctggggaagggcgagcaggtcccgctgcatgggggcagcccccaggtcactgtcacagggcccagtcgggactgcccaaactcagggcaggcctctccgtgtgcatcggagcagagccccagtcctcaatctccccagaacaactgctcagggaaatccgaccccaaaaatgtggctgcactaaagaaccggcagatgaagcacatctcagctgagcagaaaaggcgcttcaacatcaagatgtgcttcgacatgctcaacagcctcatctccaacaattccaagctgaccagtcacgccatcacactgcagaagaccgtggagtacatcaccaagctgctcctgtcctgaggcccagccttgtccctcctgccacgtcctgtccacatgcatgcctctgcctgatgccctgctccactctctggtctgcccgtggggcagttggaaggcatctttctttctcccctcaactctgacagcacccagcccttgtggatggacttgggcttctattcaggcttatgcatggcaggctgccagggggaagtgccttcttcagaggtcctccaggacacatgtgtgcagaaacggtggatgtggaacacacaggaccagaatggaagcgtgtgatgcacggtggctgctctggctgagaggccctgctgggcatgtttcatctgtccccttttagctccacctgacattgcaggatccatggggactcagcccagggccttctcggatgtcacctcaccgctgtggcccttctgccgttcttctccacttggctccagctgcagctgttgacagatcaagcatgtcctgtgggagcttagaaccctgaagttctagtgtctgaaagatcagactccacgtcctgctgtcagccttgtcatcttgtctgatgtctttcagctgggagccccaaaccaggacagttctcggaccaaagatgcccccacactcaaaagtctgtcccgtcttgtgtttggagaaggaaacaatgttggcaggcagcactctgtggtggtcagccctcagagctgtttctaggcatctctcagatcagacagcaaagaatctacccagatctgggctgggtggaggtgtggctgggctgggggccattctgagcctgcagtgagagtttggcccagcctcagtccttgctcttctctggctacctctgcagggagctgcaggggcaagcactctctccagcactcaggaagcccggccgagggtacctcctcgtggaaagaatgcactttaaagctctgctgaggagttcggagcccaggctttcaggcgacctctgccctccctgcctctcctcaccctccctctcttcctgcagggcctgggaagggctttgagggagcctgggagccatgtgaagaggggcacgcctgggctgtcccacagtttagatccagttggaggttctccctggctcctgcaggcctgcggggatctctccccacttcaggcctccggccagctgcctgccctcttgtctgtgcttcagccctgcacaaaagcagcttggtgacaccactcagccacccagagtacgtgtttacaggctttccagatcaccttcctgtggggtgaacgtaatgaggcggggctggtccttggaatttcccctggaaaatggtaacagactccatccttgacccggggatgagcatgaaggcattgtcccaaaggcagaggccaccgtggtaggaattccaccaaggccagaagggaaaaaggaagaacccaccgtgtctggctgtgcgggccctggggagggtcngtgagtgcatgcccctctctacttctgtgcctttgtaaaacgtgtagataaccgcactggttcggctgagccaagaactctcctaaatcagtggacttatctcctccagcccttgctggggagatcatttctacacaaaatctgtgggatataaacatggctcctgctgattcagcctactctcactctgctgactacattgtcgagattctgaaccttccagactatccagggtgcccacgctgcgcagcagccctgacagagcgatgcgcgtgctcccacagaacggcccactggccaggacacgcctgcaccgcatgcgagaataccgcggaaacacacacccaggcgggacaccaacagccaccgcgccacaggcccacgcgccgccaatcaagcaggagacaaaagagatagaaaaccagtgcaaaacagcagacaccaggacaagacaaactatagccagcacgaaacccagcaccaaccaaccgaggcacacacgcggccactagcacagaccacccaggacacagcgcacagaccactgacagccacctgcagccagcacaccgcaggtgacacaggaccagcagggcggcggacagtcaacccacctacgacgccagagctgcgacccactaacgcaattaaactaacccaccgccacacgcaaccacacctgagcgcgagcaagacaccaaagcaagaagcgagagacaagcgcccatgctcaaacaagctcacacgagtgacgcgtatttagcacaactacacgacc

SEQ ID NO: 713003 - DNA, 190 bp, Homo sapiens
gccttccgggcaaaggatgtcctcagtgtgtatggaggcatggacgaatagacggtttctactatggcgcattaactggagcaaggggcctggtatccatccaacttcctggagggccctgggcctgaggcaggcggactggacagggaacccaggacaacccaggctgagagtcagagaacgaggagga

SEQ ID NO: 713004 - DNA, 2065 bp, Homo sapiens
  misc_feature (1)..(1): n is a, c, g, or t
  misc_feature (10)..(10): n is a, c, g, or t
  misc_feature (32)..(33): n is a, c, g, or t
  misc_feature (40)..(40): n is a, c, g, or t
  misc_feature (50)..(50): n is a, c, g, or t
  misc_feature (1287)..(1287): n is a, c, g, or t
ncatttatcngcttgaatagaagccatgtccnnccacaanggctgggtgntgtcagagttgaggggagaaacggtggatgtggaacacacaggaccagaatggaagcgtgtgatgcacggtggctgctctggctgagaggccctgctgggcatgtttcatctgtccccttttagctccacctgacattgcaggatccatggggactcagcccagggccttctcggatgtcacctcaccgctgtggcccttctgccgttcttctccacttggctccagctgcagctgttgacagatcaagcatgtcctgtgggagcttagaaccctgaagttctagtgtctgaaagatcagactccacgtcctgctgtcagccttgtcatcttgtctgatgtctttcagctgggagccccaaaccaggacagttctcggaccaaagatgcccccacactcaaaagtctgtcccgtcttgtgtttggagaaggaaacaatgttggcaggcagcactctgtggtggtcagccctcagagctgtttctaggcatctctcagatcagacagcaaagaatctacccagatctgggctgggtggaggtgtggctgggctgggggccattctgagcctgcagtgagagtttggcccagcctcagtccttgctcttctctggctacctctgcagggagctgcaggggcaagcactctctccagcactcaggaagcccggccgagggtacctcctcgtggaaagaatgcactttaaagctctgctgaggagttcggagcccaggctttcaggcgacctctgccctccctgcctctcctcaccctccctctcttcctgcagggcctgggaagggctttgagggagcctgggagccatgtgaagaggggcacgcctgggctgtcccacagtttagatccagttggaggttctccctggctcctgcaggcctgcggggatctctccccacttcaggcctccggccagctgcctgccctcttgtctgtgcttcagccctgcacaaaagcagcttggtgacaccactcagccacccagagtacgtgtttacaggctttccagatcaccttcctgtggggtgaacgtaatgaggcggggctggtccttggaatttcccctggaaaatggtaacagactccatccttgacccggggatgagcatgaaggcattgtcccaaaggcagaggccaccgtggtaggaattccaccaaggccagaagggaaaaaggaagaacccaccgtgtctggctgtgcgggccctggggagggtcngtgagtgcatgcccctctctacttctgtgcctttgtaaaacgtgtagataaccgcactggttcggctgagccaagaactctcctaaatcagtggacttatctcctccagcccttgctggggagatcatttctacacaaaatctgtgggatataaacatggctcctgctgattcagcctactctcactctgctgactacattgtcgagattctgaaccttccagactatccagggtgcccacgctgcgcagcagccctgacagagcgatgcgcgtgctcccacagaacggcccactggccaggacacgcctgcaccgcatgcgagaataccgcggaaacacacacccaggcgggacaccaacagccaccgcgccacaggcccacgcgccgccaatcaagcaggagacaaaagagatagaaaaccagtgcaaaacagcagacaccaggacaagacaaactatagccagcacgaaacccagcaccaaccaaccgaggcacacacgcggccactagcacagaccacccaggacacagcgcacagaccactgacagccacctgcagccagcacaccgcaggtgacacaggaccagcagggcggcggacagtcaacccacctacgacgccagagctgcgacccactaacgcaattaaactaacccaccgccacacgcaaccacacctgagcgcgagcaagacaccaaagcaagaagcgagagacaagcgcccatgctcaaacaagctcacacgagtgacgcgtatttagcacaactacacgacc

SEQ ID NO: 713005 - DNA, 277 bp, Homo sapiens
  misc_feature (12)..(12): n is a, c, g, or t
  misc_feature (112)..(112): n is a, c, g, or t
  misc_feature (213)..(213): n is a, c, g, or t
  misc_feature (238)..(238): n is a, c, g, or t
ctacgtagttancgagaaatggattggtaacttaaaattagaagaaacacaccttcaaacttcaacttctttaaaagaaaaaaaaaaaacggtcctatctggttctggtaanaatattagaagcgcttggttttacaaaagaatgatgaagagaattcttccacagtgtacttctggtgcttagaaacatttttacgggaccttaagcgcggngagacgtggctggcagtcggcgggngttttttttttcatacacccgagcacggaagtatgtagt

SEQ ID NO: 713006 - DNA, 513 bp, Homo sapiens
  misc_feature (1)..(1): n is a, c, g, or t
nagtgcatggctggggaggctctatgaaacttaccataatggtgggaggtgaaggagaagcaaggtgtcttctttataaggtggcaggaaggagaagggctgagtgaagggggaagagcgccttataaaaccatcagatcttgtgagaactcagtatcatgagaacagcatggggtaaactgcccccataattcaattacctccacctggtctctaccttgacacgtggggatgataggcattatggggtttacaattcatgatgagatttgggtgggaagacaaagcctacccatatcaatggctcactgcagcctcaatctcccaggcacaagtgattctcccagcctcctgagtggctgggaccacagtactgcgagaccactcacagttcatttttgtattttttgtagagatggggtctcacaatgttgctcaggctgcgctcagacgatttgcctgcctcagcatcccaaagcactgggattacaggtgtgagccattgcactccgg

SEQ ID NO: 713007 - DNA, 116 bp, Homo sapiens
tgctgggattacaacgtgtgagccaccacacctggcctggaaggaacctcttaaaatcagtttacgtcttgtatctcgctctgtgatgcaggacactggagagagttgctatgcca

SEQ ID NO: 713008 - DNA, 313 bp, Homo sapiens
cgcgaaatgaggtttggttaggtcatgtgactatcccaagacacttttttttttaaacggaatttcgctctatcttgcccaggctagagtgcaatggcgcgatctcggctcactgcaacctccatctcccaggttcaagcgattctcctgcctcagcctcccaagtagctgggattacaggcatgcgccatcatgcctggctaattttgtgtttttagtagagacggggtttctccatgttggtcaggctggtcttgaactcccaacctcaggtgatcctcctgtcttggcctcccaccgtgcttatctcact

SEQ ID NO: 713009 - DNA, 717 bp, Homo sapiens
agcgggatctaagctcgtgagactgacgaacctacttaaaagctatggcacaaggcactggacgattgagctaggtgggcacaacagagcagtgtcgtcatttgtgcaacaacattgacaaacaagcagataataacgacacttgaccggaacggatacgaccgaagatagcgggagctgttctctcaatcagccccggcagcggcggaccagaatgagacgcgctgtgcaacccatagaccccggaccaagacattgacctacagaattagacgcaggtggcaggatccatcaacttaggacgtacacctgtgaggacgagaccgtaagcatgatgatgcatacgatggacataacctggggaaacgtcgagaaccaaggacagaaaacatatcgacaaaataaataccaagagacgatgactgcacctatctagaggcagagaaaaaagagaacatccacctgaattcaacaagagcacataaagacagagacaatccgtcggaaaaagcacagtaacatgggaagaaactaaataggtaaaaagaaacgccagggactagaacgagaataagcgacaaaaaaatgcacaagaagagagcatagacataccaagcaacatcacaccccacaagacacccagacagggccaaagacaagcagccacactaggaccagtaaaacccacaaaacgcactaacagaaacgaacaaaaag

SEQ ID NO: 713010 - DNA, 789 bp, Homo sapiens
  misc_feature (675)..(675): n is a, c, g, or t
  misc_feature (704)..(704): n is a, c, g, or t
  misc_feature (725)..(725): n is a, c, g, or t
agcgggaactgccaggcagcagcagccttccctgcccaggcctgactgaagatccaggctccagacacttctgttcattatcccccgggatccctcccctaaaagtcccaactgccacccagcacggtggcctagcccagaaccagctcacaagggtgcccatcatccaacaggccggcggcctcgagcaaaaggggtgtctcccctggggggctgaactgtcctgggcaggtcctgcgccctccgcagtctctgccaccgaggccacccagccagcctcgtgtcactcacacctgaaaaatgcacaaaggccccggaggcataacagctatgcaccaccacagggaaacaaagggagttttacaccctgaaaacagccgtcttgcacacttctgattttatgggcttaaagaaatgtgtttgtttcatcaaaacaataagtgccttcgatgacgcatgtcactcactggaccccgcgctggctgcctcgcttagtcctgctggagacccccataccttttcgatatgcaatataattaatcaatacatcctggagcattgcagagaatgccacccagcaaaataggagctgtccccagcaccagagagggaggccccgcccctcaaagcaccgcagggcatcagcaagcccctccctctcgtttaactaggccnccccctttgtaagacagctgtaggcgcantcagaaaatcacctgcatttntttccactgaagtaaaaatacctgaaatgaaaacttatcttctgaatttttcacccttgccgct

SEQ ID NO: 713011 - DNA, 215 bp, Homo sapiens
gttaaaggaaacaataaagacattactggccagtgctaacttggaagaagtcacaatgaaacagatttgcaaaaaggtctatgacagttatcctacttatgatttaacttgacagagcaagatttcataaagacaactgtaaagcagctaatttcttgagatagaggacagagagatgactcgttccatagagttgaggtctgatttctaccatt

SEQ ID NO: 713012 - DNA, 172 bp, Homo sapiens
atctcacacttgttcatctccaggccacgtttgcggcctgtagcccatgccccgctggaactccttggtggctgaacatggagagatagtgcaggagaggggcctcggaaataatctcaaagtaccggattgagctgtcacccttgcgacagcggtagacgattttggatag

SEQ ID NO: 713013 - DNA, 259 bp, Homo sapiens
tggaccttccaagtagctgggaccacaggcatgcgccaccatgccaggttaattttttgtatttttttttggtagagatggggtttctccatgttgcctaggctcatcttgaactcctgagctcaggcgatctgcctgcctcggcctcccaaagtgctgggattataggagtgaatcaccgtacccggcctcattactatgttttctaaagttgttccattcctacctttctcctcgaagcccctcagcttcaaatatt

SEQ ID NO: 713014 - DNA, 293 bp, Homo sapiens
  misc_feature (158)..(158): n is a, c, g, or t
aactctaaaactaggcctagttttggaagtttcaatagcataaaacattccaagaagtgaagagtgatctataatacccaagttctatgtgcaactaccagttaaacaaggaaaacattggctgtatcattctgtttgacaaccagtataaacccagnagaatcaagatctgattccttttccacacatctgctatggaaacttctaaaactaggtaccacagcggaaggggatttgggactggtggcagccaaagggtggtggggaaggagcatgaatatgaactatgactg

SEQ ID NO: 713015 - DNA, 318 bp, Homo sapiens
aatcgtcgcgcatgacaaacgaccccgatagtagagaggatataccgcaagcaacgcgcgcagctcgttactgattacggtttacaaccgaagatggacaaaggaaagggctcacagaagctccaccctctggaggtccataaaaggaaaaggtggctgggtggccacacctcttcctttctgaggacaggtacggccaacagatgaaggggcccgctgaggaagcaggtgagggcggactcggacacaacggcggcgccagccctgagaagcatggtaaggcttgcccagagccaccagctatgcaccgggagacca

SEQ ID NO: 713016 - DNA, 1260 bp, Homo sapiens
gtcacctgacgtatgcatcctattttaagggtacagcgtagttaatggagagtacataagacctaatccttgatgactttaaggggaaatattggtgctttagctgtatatcctttggatttcaccatgtgagtgtccttacagaaattgtgcttttagtgacataatgctaacgtattgagcgatgtgaactgtgaagcttgtcgcagctctcaaatggattcccaggtttataccatcttgactggataaatacaccaagaaagaatggtggtatgggccattcatgaacatcgtacttctgtcagacttaactaagcagatttcccgagactacggcgtgctgttagaaggttctggtcttgcactaagaggtctcttcataattgaccccaatggagtcatcaagcatttgagcgtcaacgatctcccagtgggccgaagcgtggaagaaaccctccgcttggtgaaggcgttccagtatgtagaaacacatggagaagtctgcccagcgaactggacaccggattctcctacgatcaagccaagtccagctgcttccaaagagtactttcagaaggtaaatcagtagatcacccatgtgtatctgcaccttctcaactgagagaagaaccacagttgaaacctgcttttatcattttcaagatggttatttgtagaaggcaaggaaccaattatgcttgtattcataagtattactctaaatgttttgtttttgtaattctggctaagaccttttaaacatggttagttgctagtacaaggaatcctttattggtaacatcttggtggctggctagctagtttctacagaacataatttgcctctatagaaggctattcttagatcatgtctcaatggaaacactcttctttcttagccttacttgaatcttgcctatactaaagtagagcaacacacattgaaagcttctgatcaacggtcctgaaattttcatcttgaatgtctttgtattaaactgaatttcttttaagctaacaaagatcataattttcaaatggattaggccggtgtaatcctggcaatgaatgttatgggattgagcaaatgtgatcggattatttacaaagtggagagtgattaatgatatgatgatcttaatcctgaatgggtaaggtgccataactaattataataggaagtggcaatattcagaatgaggtagataagatataagcgggggggaatagtggggctgtaaaaatataaaaaaaagg

SEQ ID NO: 713017 - DNA, 987 bp, Homo sapiens
tataaaaccttggggccaaaaataaatataaaaatgggcttaaggggggttggaccccccttttgggcaaaattaaaaattcccccattatggtcaaaattttccctcaggcggcctgttctttatggtgtgcggtcttataattgtagtatcattggttttaggaaattcggcgcgccttctgtcccccccgcggtctggccgtatcggccagggagggcgtatactctcggcaccctcttctgccccgcccgcgtttcacaagaccgatattcttctcgtgccactccagactccccgcgaaacaccagtctgataatcaacgagcgctgccggccccccccaccccaacgttggctgccctccacatctcggcgtacatagtctatcagcgtcagaacacacggggtttctcagccgattgtgtgggccctaacgcgcgggaattcctcctcgcaggacaccctcacgcgggtggaactcgcgcccccctctcgggccctccaaaagagtcgtggctgggcatacagcggccgttgaaccccacgtttgttccccagcccgcaccactacaaacgccgtcttggaaaaaatcggacaaattctttgcaccaacaactcagcccccttgtggctgtgtctaaccacccccacacttttttttttcccgtgcgaacacccgcgtgttgcggcaaacaacagaagcctttgttgttcctcttgcctccaaacagacaagacaaacaacaaacccaacaagccaaagccaacgaacaacaccgaagacggggggccggcgcccacatacaaaaaccaccccctccgagcggggcgccgccacgaccatcacgacacgaccccccgcgcgctgtgtgcggtcagacaggggccgccacccaacgtacgatgagcctcgctaaaaaacacccgaacccgcgcgcgcacataacacagcccgtgcgcagacgaaccgtctccgccgcggat

SEQ ID NO: 713018 - DNA, 776 bp, Homo sapiens
gaaggttaccccagcaaagtagggaggggtactccccgacgaggagtctgatggtgccaggagcctgctgcctcgccgacgctgggagtgagccccgtgtcccgccgcgcttgccaagggttggctgcgcgtgcggcgggagtagaggcgccttgcgcaccaggaagtgacatgtattccccgccgcagcaaaccaggccatccgcatggccttatagttatgccgcctcaggtatgtaagaggatttactaggtatacagacaggaaggtggatttcagtgtgttcttatggatggcaggccttaagagaagagtccacactgcacagcctcagatacttcatctaccatggtgggtctcttcatccaaaccaggactgattccctggtatgccagaaatacacaggatggtacacagactctatactgggcacagaatgtaagggagatatcacccgtgtgatagccacgaaatgtcagaaaggacaaaaaaagtcagaagaaaccaagcattcttggaccactagatggtaacctggcgaggaaaggctggatgatgtcgtgaacacactctggagggttgatcttttgaagaaaagttcaaggtgaaaattgaagtcagaagaaaatattaaaagactagaagttaaaatcaaatgctcaatggagtcagagtgatacgggatgaccagaatatgaggtcaatgggagttcaagctataatcacttactggatcaggtacgaatagtcagatttgtgacggagctaggaaac

SEQ ID NO: 713019 - DNA, 226 bp, Homo sapiens
cgggagccttaaccctagggaagggtagatgttttgtgagggagtgataccaaaatgacccagaggaatagtagggaaataggacagttgcatggcatgtcaggatggtatcttccagaaatgagtcacactggtggtggcggaaagagacaagaaaggtggatgttatcattcaagatgatatcattcaagaattacccagaggaataggggtaagggctcccgg

SEQ ID NO: 713020 - DNA, 458 bp, Homo sapiens
  misc_feature (7)..(7): n is a, c, g, or t
  misc_feature (67)..(67): n is a, c, g, or t
  misc_feature (81)..(81): n is a, c, g, or t
  misc_feature (105)..(105): n is a, c, g, or t
  misc_feature (117)..(117): n is a, c, g, or t
  misc_feature (134)..(134): n is a, c, g, or t
  misc_feature (143)..(143): n is a, c, g, or t
  misc_feature (148)..(148): n is a, c, g, or t
  misc_feature (174)..(174): n is a, c, g, or t
  misc_feature (181)..(181): n is a, c, g, or t
  misc_feature (197)..(197): n is a, c, g, or t
  misc_feature (199)..(199): n is a, c, g, or t
  misc_feature (233)..(233): n is a, c, g, or t
  misc_feature (235)..(235): n is a, c, g, or t
  misc_feature (269)..(269): n is a, c, g, or t
  misc_feature (281)..(281): n is a, c, g, or t
  misc_feature (293)..(293): n is a, c, g, or t
  misc_feature (331)..(331): n is a, c, g, or t
  misc_feature (339)..(339): n is a, c, g, or t
  misc_feature (347)..(348): n is a, c, g, or t
  misc_feature (352)..(352): n is a, c, g, or t
  misc_feature (357)..(357): n is a, c, g, or t
  misc_feature (365)..(365): n is a, c, g, or t
  misc_feature (387)..(387): n is a, c, g, or t
  misc_feature (426)..(426): n is a, c, g, or t
gggagancttcggctcacagcagggatagcccggtggcaggggggatggggattctgaagtgtggtnaggggccttatgcncggaggtgggaaggatggggcttntgcagtgtacanaggggccttatgcaaangttgaaaantgagngtgggccctgaaatgacttgggggtntggaatntcctggtcctccctcnanttaagggcaggaaccctcaggttccaaattggtncnaatgcccgcactgctccctggccaatccaaggtnaaggtggaggantcaggagagacnaagctgggtaagttagttcctggacggggtcaacatantctggggnacacacannaaanagagngcctgganacggcgggaaggggggcaatcnccagcagccccatccccaagggccaggccagatccccanaacacacacacgcatgcacacacacatacaca

SEQ ID NO: 713021 - DNA, 1231 bp, Homo sapiens
  misc_feature (1)..(1): n is a, c, g, or t
nccctcttcgtcgttgcgcgccgattcttcttttgttgtcgtcgtttgtgtgtccatcgctgcttcgtcataatgcgtcgtcgttcgctttaccgctgcttttttgcttgtattctctcattggtgttcgctgcgtcgttcttatctttttgctccctggcccctagaaaggcgttggccgaatgatgggtcctactttccccccctcgtggtttgctcgtggccttctcgtcaagcgccccctttctaggggggctttgatttgtgtctcgtgtgtcgtttatgagggtggtccctcctcccgtctcccccctcctggacacaggtggccgtgccacccctggcaattcacaggtgttctcctgttgaccagaatcgcatggtcggaagacctccagtgtctgttctccgtatgtctggcgtattgttgagtttctactcccgtaatgggctcctccctgtggcgctgtgcgccatcccaccctggcagtcgccccggttgtcccgagagaggaatgggaggaagttgtaagctgtgagtaacgctattccagtccacggaccccctccggaccgttcttggaccaggccctgaaatgccccttgcgtgcccttggcggtctcctccggacgaccgcccaagatggtgtctccaggcccgaggccccacgggctgtaagatccttgttgtccaattgtgatcttgggtctcttgtagggaccctgggccacactgcggtgcgcccaccctggggtccccctccgcaggctggcctcttctggagctctcctgtgtgagagaatctcccttggcccggcgccaccggcccgatgtggttcctgtgcgaggccccttcggagagtgctggaggtgccctggccgtccgggccatctcgtgagtgcccgatggttcttggccacttatgacccttgtggaaaaagaaagcccctggatagctaattgggccattttagaccagaccagccaacgggaagaataatccaccaccaggagatgcgccagccacagccctgcggctcgctgccttcggcccagctccataaagtcctaggcatggaccctctgccttcccagatgccccagaaacccaagaatgaaaaccccgtggactacccccgttccagatccccacccagcacccacctatgccccttacgcccctgaaacgccccatggaggaggacgcgggaggagaagtcgccccgcca

SEQ ID NO: 713022 - DNA, 239 bp, Homo sapiens
gatccttgcacctcagccctccgaggagctgggactgcagttgcatgccaccatgcccagctagtttttggcagagatggggttttgccatgttgctcaggctggttttcgactcctgggctcatgcaatccactcgcctcggtttcccagggtgctgggattacaggtatgagtcacagtgcctggcccagtattccttttgaggagaaaattttatctgggaatctctcaaaaacat

SEQ ID NO: 713023 - DNA, 894 bp, Homo sapiens
ggggcagaaggctcttttaattaggaagagagggaggacaaaggagagccttttctttgtccattactcttagaaatgaacaggtacataatagaaaataaataattattgtggtaactgtttacacagcagtgttagagcctctctgtaggtgaaacaaaaataaatgttcttacaaaaaaaaaaaaaaaggaggcaaggattaaacatcaaggagctatattttttcgtgattttagaaaattaacgggattgacggttaaatactgtgtccgggaattcttaagaaaatggttttcatattaggcctattcagtgtagcattttatatttggcattaattttggtcaaattttgattctccactgtagggggtctctcatggacaatggttcccttgtgtacctatagaaaagcctcttgggaagatttcccgggttaataattttttacccagaagatactggggagggtccttggtatgtacctggtagattacatcccagtagggtcctatggagaaagacctgtggtcatcattaccttcattattctactgtgaacgtcattaggcgaataatatctccagagattttctacatggaattctccagtaaagttttaactgagaattcacaggtggcaaattgttggtcaatgtgtgttattctcaacagaggttggctgtggggaacaaggattggtagggagggaattggaataacccttgatggggtacacatggccaaccatgtgcaaggctcggtgttgaaaaggggggcgctttcaaactatcgggggggggacagtggaccattggggggggtgtccggccgacgaactgtgcaggtgacgtcaaaaaagggggggggggcacggagggcactacggttc

SEQ ID NO: 713024 - DNA, 326 bp, Homo sapiens
  misc_feature (7)..(7): n is a, c, g, or t
  misc_feature (272)..(272): n is a, c, g, or t
  misc_feature (322)..(322): n is a, c, g, or t
gcgaaangggggcatattctctgcagaatttctggaagttttccttccatctctgctgctctctcatttgctggccatcggattggggatctatattggaaggcgtctgacaacctccaccagcaccttttgatgaagaactggagtctgacttggttcgttagtggattacttctgagcttgcaacatagctcactgaagagctgttagatcctggggtggccacgtcacttgtgtttatttgttctgtaaatgctgcgttcctaatttangtaaaataaaagaatagacactaaaatcatggttgatctataaattacanccta

SEQ ID NO: 713025 - DNA, 886 bp, Homo sapiens
ggcacagccagagctaaaggctagagcctggagtgccgcgcagtcgcctagaggtcctctaccggttattcctgtgccggatctacatcgcccacagggccccactgagacgtttctgcctcccttctttcttcctccgcttctttctctttccctctcgttgcagcttgccttgggagccttgcaacaggcgcacagccccggggtcgcccccaaaacccccttctggcttctgccccattcacaagcgtgcccactttaccggccatgggcgcccctccacttatctccctcccttctttctccccgactaaattgtgggcaaagacaagcaacgatggccgcattttgtggactcgcgttcgggcccttgtgcgattgcttggcctggccagagcaaccagcccaatcccgttgtgttcacaaccgtggaagagttcaggcggcaagaattaagtccaaccaaacgcaattttcccataacccaactgttggtctctcaacgtgggtcggcacccacccaggtcagcaacattaattcacacgcacacaattcgtggtttcccaccagccaatgggccgactcgctgcgggctcggtcccacagcacttagcaacattagggccctcctcctggggacagccattttccttttcgcaagaaataccccaaggcgtcctccactctcagagagggcgtaagaattagccaaccgaattcggtggcaccgcgcaatttcccggcacgctagccgcaatgagcgctggccagcaacagcgcttctgggacgacatggccttcgcagaagctggcacgtgcctgtaaccttttttgcaaaccaaaccaggtatttcgccaaaatgcgatggggcatcagtggactgc

SEQ ID NO: 713026 - DNA, 130 bp, Homo sapiens
gaggatccccgatattctttatgaaagaaatatgctagcaggccagttatcttttgaggctagtcttagtttattataaagcaaccatatcatccttatagttcttcatggtcttatgatgtgggatggg

SEQ ID NO: 713027 - DNA, 960 bp, Homo sapiens
ccgccgctccgtgcccctctctgcagcctctcctgccactctgtgggcccccgttccccctcccggtggtggggggctgcccccgtgggctgggggctggcctggttggcccggggccgggctgtagcggggctctcgggatgtgcggacgggggttggtgtggctcgcgcacgatcgtggctttcgctcggcagctctggagcttctcattaaccttttgcggagggcagattccgacggaaaatacagtaccaaagctgtccgaaatgaattcctccctttaatctcgttgtgtccgggaatcggatatgcccaaggtggactgagcgaggcatcctgttggcgggatctggcatgaggccagtaatatcaactcccaccagtggtttggggggctccctgaggcgccccaacaggtccggcccatgggaacacccccttcgtagactttgcatccctcgagtgtgggaaataggaccagaactatccgtgtaccggggttttgtttgcacaataagggatggccccaattgttggatttccttccgtggaagttggtgacgccaaggttgggtcacgagcttgttggttgtccacggcaagggcttgcagatcataatggctcttgtggtgccagattacaggctgggcaccagataggcaggagaggcaattcgctaaggaaggacgacataattaccggagcaggatactgccctttttgcattgttggtcccgtctcacaatcaacggaccttctcctggtgggtccccagggtgagcctctcccaggcattggtagtcccgggagataacccccccgggggcatacaggggacacccgaaaaaggggttcccataattcggttttattgaccccggcaaacgccttttaagcgtgccagttggatgctccatggtccctggattttcgcggtggcacgagtccccacgcgttg

SEQ ID NO: 713028 - DNA, 474 bp, Homo sapiens
gcacgagggagagtagaaaaacaagaaagaaaaaaagcaaacagtaaatacaaatgtacattttatcatcatacaacactctatttcttaccaacaacttcccaatcgtcaccatcttcaacagtcaattgagcagttttatcctgtagcttttcaactgccgcatcaactttgttttcttttgcgtctccattttgcttttcagcctcttcatcttcatcatcatcttcagtacgtaaaacatcataaacagacttctggatttttggttgctcatcagtagtctttttgttagttagagacctatccttgtaggtatttttggtttgttgaggcttaccaaactgagcacctctggcagcaccccaatccaaagccggttcttccttttctctttctcttcttggtggtcttgaggagctttggaagttggagcctctggctgcactccaatcgatatctggctcttctctt

SEQ ID NO: 713029 - DNA, 780 bp, Homo sapiens
gccatcgcgccctagtcgggtaccgaggcacgcgccgggcgtcgcgtgcgtttcgcggcgagcggaaatgacgcgagttgtgtgagccgccagtatggccgggcctatggccggcgagcactggtctacgtgcgtactgtggggagcggcgcggtgctgggtgctgcggtggcgatgctggcgcgccggcggggggcgggttcccacctgcagcaggagcgtggttgctccgaggccagcgtgacctgcgacgcctctctctccttgggcactgtgtgggcctgaggccctggcaatcgggggccaagtggcgtgaggttttgggaagcgagtcagccgtcggcggtaggcgcagttctccggggggcgaggacgcctccgatgggcggcgcggtaggaaggagtccggcggcgcgcggggcacgtcgcgggcggtccggggaaggcccggtcataacggcgctcacgcccatgacgatccccgtatgtgtttccgaacctgccggtcatcgccatcacccgcaagccggtgttcccgcgcttgatcaagcattatcgaggttaacaagagtaagaagtcggtagagactgcgtgagaaggaaagttcgtctcgacccagccttatgtcggggtcttctaaagagagatgacagcaaatgagtcggatgtggtcgagagcctggatgacatctaccacacggggacgtttgccagatccatgaaatgcaggaacttgggggacagctggcatgaatcgctgcgacccggaaaagtctata

SEQ ID NO: 713030 - DNA, 1121 bp, Homo sapiens
ggcaaagagggatttttctggaaatctgctggctcccaatccagcagacaaatgtcaacagcctagtaactggcaatccgtactgggagccagtgaagcacgcagcagcagctgtatactcccgatgacggggcagtgtgaaatgtttgcctcagcgtgacgtggccaggagctgtggtgcttgctgactactggatgctacaattactgcagaagtgggcaaggcatgtgagatggtcgtgactgccatgctcttggtgctctcacccatatggcgctagctgtgcagcatcctggtagccggcgcagtgtgagtgccagacccggcgatcacgtggtcagcactgtgagtcgactgtgaggtacaaccacatttgggtattggacctgaaggctgcgaatgaccctgtgactgtcatcctgagggatctctttcacttcagtgcaaagatgatggtcgctgtgactgcagagaaggcttcgtgggaaatcgctgtgagcagtgtgaagaaaactattgctacaatcggtcttggcctggctgccaggaatgtccagcttgttaccggctggtcaaaggataaggtgcctgatcatagagtgaagctccaggaattagagagtctcatagcaaaccttggaactggggatgagatggtgacagatcaagaccttcggaggatatgactcacatggatgggagagagggaaagttcatggagcgtccttcgtgagggaccacgaatgtaacaagatgttgagcagaatctcgctggatcgctacatgcacagtgacttacgcgctgacagggaaagtaacccgtgatcaagaaatatcacggaagaaccatcggaagaccacagggcaagcggggagacaaggcaggtccacgtgcaggacacgaaggcggacgaaggaagagcgaatcgaagaaaacagaacaccacgcgccgacgacaaggatgtaaacacaggccgagattacgaaacacaccaagggcccatgtgggaaacaggccgacggtaaacgcaacacgacgcaggacggtagggacagaacagagaacagggaaacccgccagagacgagaacaacaccggagagagacagagagcgacaa

SEQ ID NO: 713031 - DNA, 224 bp, Homo sapiens
gaattccggctctctggggaattccggctctctgggcttctgttttccttactgtaaaggctggagtgcagtggcacgatctcggctcactgcaatctctcaaccccaggagggttcaagcgattctcctgcctcagccttcccagaagctggaactacaggcgcccgccaccaggcctggctaatgttttgtatttttagtagagacggggtttcactgtgtt

SEQ ID NO: 713032 - DNA, 452 bp, Homo sapiens
  misc_feature (4)..(4): n is a, c, g, or t
  misc_feature (6)..(6): n is a, c, g, or t
  misc_feature (60)..(61): n is a, c, g, or t
  misc_feature (89)..(89): n is a, c, g, or t
  misc_feature (104)..(104): n is a, c, g, or t
  misc_feature (109)..(109): n is a, c, g, or t
  misc_feature (121)..(121): n is a, c, g, or t
  misc_feature (140)..(140): n is a, c, g, or t
  misc_feature (181)..(181): n is a, c, g, or t
  misc_feature (187)..(187): n is a, c, g, or t
  misc_feature (189)..(189): n is a, c, g, or t
  misc_feature (191)..(191): n is a, c, g, or t
  misc_feature (207)..(207): n is a, c, g, or t
  misc_feature (282)..(282): n is a, c, g, or t
  misc_feature (317)..(317): n is a, c, g, or t
  misc_feature (343)..(343): n is a, c, g, or t
  misc_feature (345)..(345): n is a, c, g, or t
  misc_feature (416)..(416): n is a, c, g, or t
gagncnccgttcgcgctgccagcagcttccgcctgctacggtcctggcaatgcacctcgnnattacatttctttacacccatttgactnactggaaacagtagntaggnagtcgttccganttgagttaaagaaagtatnggggcacttaaaaaactgagtaatcggccgcagatgtaccntcgtgntntnggacggttaaatttgnggttgtccaatggagaggtgtaacgtatattgtcttcctgtccgtccgtctgtgttgtagggtttttgctatggntaaagggtttctattacgtccttgcgatgaactgngatctatatatctttcgctgtttttntnggcctgcggggatttaaaggttgaaataaccgatgcgtagaaataatgctacaaataaacgtacatcctancgactttttttgcgtaaccattgttttagtgaatcc

SEQ ID NO: 713033 - DNA, 362 bp, Homo sapiens
  misc_feature (31)..(31): n is a, c, g, or t
  misc_feature (76)..(76): n is a, c, g, or t
  misc_feature (89)..(89): n is a, c, g, or t
  misc_feature (91)..(91): n is a, c, g, or t
  misc_feature (96)..(97): n is a, c, g, or t
  misc_feature (104)..(104): n is a, c, g, or t
  misc_feature (107)..(107): n is a, c, g, or t
  misc_feature (109)..(109): n is a, c, g, or t
  misc_feature (115)..(115): n is a, c, g, or t
  misc_feature (117)..(117): n is a, c, g, or t
  misc_feature (136)..(136): n is a, c, g, or t
  misc_feature (143)..(143): n is a, c, g, or t
  misc_feature (209)..(209): n is a, c, g, or t
  misc_feature (218)..(218): n is a, c, g, or t
  misc_feature (231)..(232): n is a, c, g, or t
  misc_feature (235)..(239): n is a, c, g, or t
  misc_feature (241)..(241): n is a, c, g, or t
  misc_feature (244)..(245): n is a, c, g, or t
ttaattaacaaaaatacaaagctctggtggntttttttgtctctcgccccccccaccaccactcctacccaaccanccccttgccacgnanccccnncccgaanccncnaccccnancccccacgctgccccaggnctcaggngaaacggtggtccaggtctctctgggggctagcagagtatgagtaggccttgcccaataccaagcngtcccggancagctcccccccnnccnnnnngnggnnggagaggatgagggccagcgagatggtctggtgccacttttcagaggacattagggagtacagctgatagacaatgacagcgccctccagcagcaggaggatgttgaggatccgcag

SEQ ID NO: 713034 - DNA, 851 bp, Homo sapiens
  misc_feature (402)..(402): n is a, c, g, or t
ccatgggccgtgtgatcccgtggcacagagcgacatgggcgccgggtctgtgttccgcgcgcacgtgaagcaccgtaactggcgctgcgcgcctggcgcgccgtggatttcgtcgtgacgtcggcactggctacactcaaggcgcatcgtcgaaggacactcatccacgacccgtggccgcggccgctgcccctcgcgctaagggaggtcgtatccagtggcatcacgctatcagagttttaaggaaagcaggactggacgctgttcatatgccgaccgatggtgctattcacagcgagtgcccaagtgaggtggtattagcgcggcgagatgagaggcgcactatgctcagagcaacttggcgcgagatttgtagcgactcgcttagtggtgacacctaantgcccattgacggagtactaaaactcgatcgtcgcgtgaccttgtgcaagcgtatgaaatgcacctagtggaggaaccccgattgaggcacaagcatgggtcgcactgtgttgcccaattcgatgcggtaacactaatttgacactagctcggtttgattgcgtactccctagcagatcgcacctgcaaggtagcgcaaaacgtaaagggaaccccagataggggtagcacaggccaatggacaccatcttgcgcgagacaatcacaaagggaaacgagcgctttcaaataccatcccgtttcgaaggaacgccaaaacccaagtaaagcgacaatggcacatagcgctcacatgggactggcctgggggactggaggccctatggggaacgggggggcaggaggtccccggaagagaactcttggaaccaaacgacattcctccccaa

SEQ ID NO: 713035 - DNA, 1194 bp, Homo sapiens
  misc_feature (102)..(102): n is a, c, g, or t
gccccccacaagtgtctgtgttgtgttgcgtgaataagttgactcccctggtccccaccgctgttgtgtcgtcgcaacggggacaagccctgtgaaatagtnggggtgggggagaatatgcacaagccaacatgaccggcagccgcacaacgaggtgggacccacacaacaaaaaggggggtttaaaaggggtggcttacacccagcaccacaagcggtttgtaataaaagatgggaacaaacaatttgtgggaggggaatttctgtttattttctcttaaggcgaaaaaaaagggggccccaaccccttttgtgggcggccccacacccccgcctgttctcttgagaagaccgcctctcaccaaaaagggggataactgtgtaaaaaaatattataggggtcacaacaatgaaaggggtgtgttgtggtgagagagagagaatatatgatctcgagttgctccccaggtataaccggtttcttcgcccactcaatagaggaaagaggtgtggggtccccacagacgtttataatgtgtgtgtgtgttggggcccacacgtatataaagatgtgtatggcacacgcgctttcgtgtatgaacaccaccactctgtttatgcgccccgcccacactggggtagaccacacagaggactttattgtgtttgttcctctgttgttgagaatgtcctgttggagatctctggactcgcctgtgtgagccccgcttctccacattcttgcgctagattttgtgttgtggttgttgtgggaaccccacaacaccacagctttgttctacagagaatagaaaggagcgcccctttatataaaatataaaagatgtcacccttgaggtaaacttcacgtatgagatgaatgaggaggtgtgtggaggctatcccctcacccctccaccccccttgggctttttattcccgagattttcccacgttttcttaaaccacggaaaatgactgatataattatctttttggaaactgacgcccttaattttttttagagggggaaataagttttcccccactcaccccagccataacgccatgtttgcaccacgccaatataatcgcccgttgtaaactactgagagtattgtatctgttctggtacacccagtaccagaatgtggaactgtcttatgaatataaataaattctatatttccttta

SEQ ID NO: 713036 - DNA, 958 bp, Homo sapiens
  misc_feature (264)..(264): n is a, c, g, or t
ggacgcgtgggtcggacgcgtgggtcgacccacgcgtcgcgtatttttttattttttttggtccaggactggactccggtcccataatttgtgctataacaaatcattccgtgtgtcaagtgtgtaaccactgtgctccacgttagtttgacactctcgtgggactcaagaaacagctctagtttaaagtatgatctcccatacataacgtggcgtgggggcacattctaactcaactgctgaaagagacacgatcacacaatnccaccttgtctggctggtattaccacggcctgggggtactctggcctttctccccttaaccctccccgctctcccaccttaccctgcgaacaacagcccttctaagcctaggggggcttcgtcagatgtagatgtgaaagagttccacaggatcgacatacctgtgtgtgggcacctacgtggcaaaggagtgctgtatggggatgattctctcgaccgtggaccccagtgagaattcgtatataaagttctttaagttgagtgcccctgttctcaaaaccacatcactcctgatcccacaacgactaccatacacaatacccgtcgcctatggccccgaatgacataggatgtgttaatcccccagtccaagatccccccatctgtaacagtggggcacttctaggggtgaaggaaatatccaaggggtctttgaccacacatatatcttactttctccccccccaagtacagttatcaatcaagaaagagagtcgatagttagcggtgtattagactacacctatcgttaccgatcacaagggatcccatattgagcacacaggtcaacgccatgcaagatatcttttacaatgagaccagttacacctttgacattaggtcacagaaaaacactcagagataacagtggtggcagtagaagccactgagagctcgcccaatgtctaaatgt

SEQ ID NO: 713037 - DNA, 327 bp, Homo sapiens
  misc_feature (52)..(53): n is a, c, g, or t
  misc_feature (55)..(55): n is a, c, g, or t
  misc_feature (57)..(59): n is a, c, g, or t
  misc_feature (61)..(61): n is a, c, g, or t
  misc_feature (63)..(63): n is a, c, g, or t
  misc_feature (66)..(69): n is a, c, g, or t
  misc_feature (72)..(72): n is a, c, g, or t
  misc_feature (76)..(77): n is a, c, g, or t
  misc_feature (267)..(267): n is a, c, g, or t
acagctcctttaatggcagtggcatgaacataacagctcctttaatggcagnnantnnntngnacnnnnagncaanntcgtgagccatgttcatgccactgccattaaaggagctgttcatgccactgccattaaaggagctgttcatgccactgccattaaaggagctgttcatgccactgccattaaaggagctgttcatgccactgccattaaaggagctgttcatgccactgccattaaaggagcggtgccgagctcgattanaggagctgttcatgccactgccaaaaaggagctgttcatgccactgccatataagagtgc

SEQ ID NO: 713038 - DNA, 392 bp, Homo sapiens
gcttttaatggcaggcatggtggcactgcacctgtatcccagctactcagaaggctgatgtcaaaggactgcttaagcccagaagttcgaggctgcagtgagccatgatgccactgccattaaaggagctgttgagccatgttcatgccactgccattaaaggagctgttcatgccactgccattaaaggagcgctcctttaatggcaggagaatggcttgagcctagaaggtggaggttgcaccgagccatgttcatgccactgccattaaaggagctgttcatgccactgccattaaaggagctgttacagctcctttaatggcaggacaatcagttgagcctaggaggtcaaggctgcagtgagccatgttcatgccactgccattaaa

SEQ ID NO: 713039 - DNA, 202 bp, Homo sapiens
tatcctaacagcatgaatgaaatctttatgattagtctatccttgggagaatgagagctaaggtactatgcctgtatttgatttgctcatacattttactggtctgatttacttatagactgcagacggttttttgttgttgtggttgttgggttttgggttttggtttttgtttttttcgagactgagtctggctctttcg

SEQ ID NO: 713040 - DNA, 211 bp, Homo sapiens
ttggggctgcttgtttccaaagaacaatgatactgaaattaggccagttataaacttcagtttctataaggcgaggagagtgaggaatctgctagaaacaagttggaagctagcacaggttggttcgtgcggtttaaggaaagacaccatctacagaatgtcaaagtgcataacaaaacagcaagtgctgactgagaagctgtggcggtcg

SEQ ID NO: 713041 - DNA, 398 bp, Homo sapiens
ctgcacggatccctacaagagaagagacgagatgatcttatttacgggggatggcgctttgtgaagtatgccttatttctcttgtcctttcgtacaggaggacattctgtagtaattgaaatccgacctggctcactccggtctgcactctcatcacgttagattttaatcgttgaacaatcgaacctttcatagcggctgcaccatccggatgtcctgatccaagcatcgaggtcgtcaaccctattgttgatcttgcttctctaatagggattgcgctgttttcccttgggtaccttgttccgttgttcgggtttttggatcgtttgagtattgtagttcgttttgactggtgcagtcttagcttgtactgctcggagtttgggttctgctcctcg

SEQ ID NO: 713042 - DNA, 832 bp, Homo sapiens
  misc_feature (832)..(832): n is a, c, g, or t
atcccagcacttgggaggccgaggcgggtggattacctaaggtcaggagttcaagaccagcctggcagcatagtgaaaccccatctctactaaaaatacaaaaattagccaggcgcagtggcacacccctgtaatcccagctactcgggaggctgagggaggagaatgcttgagcccgggagacagaggttgcagtgagtcaagatcatgccactgcactccagcctggcaacagagcgagatgtcccccccccaaaaaaaaaaagagagagactggctttcaaagaggaccaagactacggggaatttaaaacggttggctggctgggcatggtggctcacacctgtaatcccagcactttggaaggccgaggcggtggatcacctgaggtcagaagtcgagatcagcctgaccgacataagtggaaccctgtctttactaaaaataccaaaattagctgggcatgggggcggacctgtaatgcagctcctccagaggcttgaggcaggagaatgctgaacccagggtgggaggtggagtgagccaagttgcgcatgcactcagctgggcaatgtgtgaacttcttttcgaataaaattaacatagaatatgtgacttgttcattagttgcgaagactttgcaagtcagagttttagaatattcacattgatggtcagagtgcaggaactgctggagatcatttaagcacaggaccgggtgtgactatgggaaacagaaatgaaggcggcgttcaaaagggaataccggatgtttgaaccacaggggggcgagataaccagagatgacatagctcgcgtgactggtcggcn

SEQ ID NO: 713043 - DNA, 184 bp, Homo sapiens
  misc_feature (37)..(37): n is a, c, g, or t
cggtcgctctacgacggactcccccatgttgggctanctgcgggtcttgggactgtctcccccgcagacaacgggacggacctacctgtactacgtgtctttctgacgctttttacggtaaccacggacgactaacccgcctcactaactctacggtgtatgctacatacaaaaactcagacat

SEQ ID NO: 713044 - DNA, 123 bp, Homo sapiens
atttatgccggtgtggtatcaggactgtggtatgttaggtactgtttgcattataaattacagccatagggtcttctcgtcttgctgtgtcatgccgctcttcacgggcggtcaatttcactg

SEQ ID NO: 713045 - DNA, 1286 bp, Homo sapiens
gctgcagattctaaaagtaagctccaggtgtgcaagcattagcattccatggagtcgcagtacatgggtggacgctcgaggcgacgaacgctgggatcgacacgagagacaacagcaacggcgatcgaagacggacgccaggcggccgcgcaggcacggcgtgacacgtgacgagaccgtcggtaaacgtcgccacgtgacacgagacggagggccaaggacggctagtacacccgtggcagacgataagaacgagccggttaccggcgaacaaaccaagaggcagtcgtgaactacagacctacgacaagggtagaagacaaaacccacggcaaagtacactaacccctggaggccacgggcaatcacgccatagaataagacttcacagccccatcgaagactccccataggagacatgacgctcccgcgggagaatcgcaccacaaggcttaacattagggcgccgcaatggggccaaaaacatgtagacaacgcagacaaggaggccacggtaggcacggcggcgaggaaggaggaaccagcaagaaagataccgacaccgaccggtgcacacaccacgtacgccggaagacacaccagcgtggccaccgagcggcacgaggagcagaacgacccgacgacgactacgggacggagccccagcacaaacaaaaggacaaactaggcagccaccaccaaccacaacaccacgtagcgcgcgcaacatcccacccgaccaaaaaagagcgcctacacacgtatggggcggcgtgcaaccagcaggcacacacacagcgacgccacatgaacatatgggcgagacggagcacatcacgccttaccaggctgacgactcaccctcgactcaccgcccagaaacaaacactcccaagatccaccacagcagaaacgcgagactaaggagacaccaaacacgagaaagcgatattgagagagccaggagagcgctcactgcaccgacccagacaatcgcaagacagacataccaccaacagcacagctagtggaccttctcgtccctagccaacacaaacagggatgacagaacatacacacgcagtcaacacaacgaacatagacaaacgcggccgcaaacatgaaccactaccatcatgtcgaacaccagacaccgacacacacccatccgaacgacaggagaaacaacacacacaatcaccacaacactgagcagcaatggagagcatgcacacacaacaccacaccagcaggagcacacacacgccaaggaaaggatacacacc

SEQ ID NO: 713046 - DNA, 535 bp, Homo sapiens
cacacaatgcacatggctagagcctcagaatgtgccaccccttgcagaagtgcctgtcattccggagatggggccaccttggggcccacagggctggcttcttccccctcttgaaaggggaggggggagcatggcacctggcatgaggagggggtggcctcctctccatcccctgaagagctcaggcagggccttgcagagaacactcatgttccttcggggacaccggccggggaactttccctggccaggactcagcctgaaggaagctgctcctgaggcaggtatgaggtcagtgcctagggcacgtggaactggagggaggacatatcagaggggcagagctgtgggctcggtggtactctcctgcatcctggtagactcactttgctgagtcccatgcactggccctgagggtagccatgcccttgcttggcccaatttttgatcggggccatcctggagggggtggagacctgctgtcatgagctggccaggagaagctggtataaaaaagtcgagggtgggttccttt

SEQ ID NO: 713047 - DNA, 224 bp, Homo sapiens
gggcatggtggcgtgtgcctgtagtcccagccactcgggaggctgaggtgggaggatcacctgagcctggggaggatgagactgcagtgagccatgattgtaccactgtaccccagcctgggtgacagagtgagacccccgtctcaaaacaaaacaaacaaacaaaaaaaacaactaggggaagactgcacaagaaaagaaaacatagggaaaagggaaacaaa

SEQ ID NO: 713048 - DNA, 779 bp, Homo sapiens
agacccgcgggtcaaacggactggggccaagagccgggagcgcgtgcgcaaaggcaccagggcccgcccagggcgccgcgcagacggccttgggggttctgcgggccttcgggtgcgcgtctcgcctctagccatggggtccgcagcgttggagatcctgggcctggtggtgttggctgtgtgtgctcgtggggggcgtgagattgctggtgtgcgtgctgccatgtggaggtgaccgcttcctggaccacaacatcgtgacgggcagaccacctggaaggggctgtggatgtcgtgcgtggtgcagagcaccgggcacatgcagtgcaaagtgtacgactcgggtgctggctctgagcaccgaggtgcaggcgggcgggcgctcaccgtgagcgcccgtgcctgctggagtcgttgcgctcttcgtgaccctggcgggcgcgcagtgcaccactgcgtggacccgggcccggcaaggcgcgtgtggccctcaccgggaggcgtgctctaccctgtctgtgcaggagctgctggagctcgtgccactctgctgggttcggccaacatgtcgtccgacgagttgaaacgacccgtctgtgccccgggtcggaagaaggtaccgagctgggcgcagcgctctacctcgggtgggcggccacacgcagccgagaatggaaggagggagcccctgagctgggaggcgtggtcggaccggcgccgactcaagtgcccggagaaccagcgcggaggggccacggccacgggagatagacagagac

SEQ ID NO: 713049 - DNA, 434 bp, Homo sapiens
agaaaaagtggatggaaagtctcagaggtaggtggggtgtggtcacatgcacctgtaatcccagtgctttggggggccgaggtgggaggatcacttgagaccaggagttcgagatcagttgggcaacgtagtggaccctgtctctacaaaaaataattagccaggcatggtggtgtgcacctatagtcccagctactcaggaggctgaggtgggaggatggcttgaacccaggagttccaggctgcagtgagctatgattttgccactgcactgtaggctggatgacaaagcaagcccttgtttctgacatcatgatgatgatgatgatgatgatgatgatgatgattattgagacggaatttgactccagcctgggcaacaagattgaaactccatttcaaaaataaataaataaataaataaataataaata

SEQ ID NO: 713050 - DNA, 360 bp, Homo sapiens
  misc_feature (37)..(37): n is a, c, g, or t
cgtcctgatgataggggctatcagtgctcaatgcatnctctccctgcagccctatacataagttgccactacaggcatcgccgaggcccaggttcctgagctttcttagcttgtctgctaaggttttgacaaaacttttttttttttttttttaaaagacagagccttattctttgcccaggtgggagtgcaggggtgcaatctcgggtcactggtaacctcgggctccggggttcaagcaattctcaggtgtcagcctcctgagtagctgggataacaagtgtccaccaccatgtccagttaattttttcagtagagatggggatcaccatgttggccaggctggtcttgaactcctgt

SEQ ID NO: 713051 - DNA, 177 bp, Homo sapiens
gttcacatcagtgtgtaggatatgctatcacgtatgtgcatgagaagaatggagaaaatggatctatgcggatgtctgtacacacacacacacacacatacacaacaagcttgcacatgtatagaggatccgaaattccaccaatactgacgaactacaaacgtaacagcagcaggc

SEQ ID NO: 713052 - DNA, 144 bp, Homo sapiens
atggtagcttacctacatacaatcataattacacccagagagataaggtgctataccttcactgtgaactaagagtgagactacacctacatttggtggctaaatggtcagagctccctgtcagtcccaggttcagggctccgt

SEQ ID NO: 713053 - DNA, 328 bp, Homo sapiens
ttttttttcccccgggggttcccccttggaaagcggggggcccgtttttttccccttaaaacccggggcctttttttttgggggcccccccttttagtcctttcttttaaagggggaggccccctaaaaggtgaacccccgggtcaaaaattaacgggagggccccttttgggtcttttttttttccaacaccccccggggggggggcccccgcaattttttcgggtgggggcccctttttcctttttttttaattaaatttaaaaaaatttgggtccttttgggccccttgggccttttggtttaaaaaaccccggggtttttttta

SEQ ID NO: 713054 - DNA, 503 bp, Homo sapiens
  misc_feature (21)..(21): n is a, c, g, or t
  misc_feature (86)..(86): n is a, c, g, or t
  misc_feature (96)..(97): n is a, c, g, or t
  misc_feature (105)..(105): n is a, c, g, or t
  misc_feature (111)..(112): n is a, c, g, or t
  misc_feature (115)..(115): n is a, c, g, or t
  misc_feature (118)..(118): n is a, c, g, or t
  misc_feature (120)..(120): n is a, c, g, or t
  misc_feature (124)..(124): n is a, c, g, or t
  misc_feature (126)..(127): n is a, c, g, or t
  misc_feature (129)..(130): n is a, c, g, or t
  misc_feature (142)..(142): n is a, c, g, or t
  misc_feature (148)..(149): n is a, c, g, or t
  misc_feature (153)..(153): n is a, c, g, or t
  misc_feature (160)..(160): n is a, c, g, or t
  misc_feature (163)..(163): n is a, c, g, or t
  misc_feature (165)..(165): n is a, c, g, or t
  misc_feature (207)..(207): n is a, c, g, or t
  misc_feature (211)..(211): n is a, c, g, or t
  misc_feature (224)..(224): n is a, c, g, or t
  misc_feature (230)..(230): n is a, c, g, or t
  misc_feature (245)..(245): n is a, c, g, or t
  misc_feature (250)..(250): n is a, c, g, or t
  misc_feature (252)..(252): n is a, c, g, or t
  misc_feature (256)..(256): n is a, c, g, or t
  misc_feature (269)..(269): n is a, c, g, or t
  misc_feature (282)..(282): n is a, c, g, or t
  misc_feature (297)..(298): n is a, c, g, or t
  misc_feature (314)..(315): n is a, c, g, or t
  misc_feature (317)..(317): n is a, c, g, or t
  misc_feature (326)..(326): n is a, c, g, or t
  misc_feature (334)..(334): n is a, c, g, or t
  misc_feature (338)..(338): n is a, c, g, or t
  misc_feature (346)..(346): n is a, c, g, or t
  misc_feature (355)..(355): n is a, c, g, or t
  misc_feature (361)..(362): n is a, c, g, or t
  misc_feature (374)..(375): n is a, c, g, or t
  misc_feature (424)..(424): n is a, c, g, or t
  misc_feature (503)..(503): n is a, c, g, or t
acatactgttacataattctncacactgaagcataatgacaatttcctatcctgtgttaaatctaaatcagctaaccctgagatgncatcccagtnntgagttcnaccagnnatnctntngttntnntnntttttgtgtgtnttttanntttnttttttnctntnttttcttttagtttttttgttttttttttttttttttttttntttnttgtttttttttntttttntttgttttttttttnttttntntttnttttttttttttnttttttttttttnttttttttttttttnnttgttttttttttttnntnttttttttntttttttntttntttttttnttttttttnattttnnttttttgtgttnntttttttttgtaatcccagaactttgggaggctgaggcaggaggattgnttgagcccatgagtttgagaccagcctgagcaacatagtgagacctcatttccacaaaaaataaaacaaaattagctgn

SEQ ID NO: 713055 - DNA, 155 bp, Homo sapiens
agtgacccgtcactgactgtctggtgactgactgaccggtgactggtgaccgactggtgaccactgactgactacctgaccgactgactggtgactgactgacccggtgactgtgtgacactggtgactgagccgcacctgactgcgctggtgac

SEQ ID NO: 713056 - DNA, 264 bp, Homo sapiens
  misc_feature (25)..(25): n is a, c, g, or t
  misc_feature (31)..(31): n is a, c, g, or t
  misc_feature (261)..(262): n is a, c, g, or t
taaaagtgtgtacattgtttttganttttantttttgagactgggtcttgctctgtcacgtaggcgcagtgcagtggtgtgatcatggctcattgcagcctcaacctccctggctgaagcaaccctcccattttagcctcccagctacttgggaggctgaggtgggaggatcacgtgagcccaagaatccaagtcaatgtgagttactgtcacactgctgcactccagcttgagtaacagagtgagaccccatctctaacnnaa

SEQ ID NO: 713057 - DNA, 150 bp, Homo sapiens
ggcaagcagcagtatctgcagtccatagaagagcgtgagaaactggacgggctctacgagtgcattctctgatcctgctgtagcaccagctgccccagctactggtggacggagacaaatatctagggccctgcagttcttatgcagcct

SEQ ID NO: 713058 - DNA, 1212 bp, Homo sapiens
  misc_feature (1113)..(1113): n is a, c, g, or t
agactcttgtacttcctgaagtgaattcggtaagttaagtcgaagtcaaaaaagattagtgcattatgtcgaatggacagaactagctgtaacactagtactagttatcccatgcttatcctcgttcaggatcgagttaggaggtacaatagtggatgttactttcatctcgatttcgtgatgtttctaatttgcaatcattaatcttcttcctaggctctagtgcctggcgtagacggtgtaatacaatatagtagctagaacattagtcaagaatcaaacaacatgttagatttcagttaaattgtatctcttatcagttttgtcttgtgtagcggagatgttatggtgaagtccctaggtacatctagagtaatgaagtttccacttgccgttctatttactgttggtgttataatggctgattctttattctaagatattggtaaagtgggcaaggcgttagatggttggatatgtagatggttgttctttgagcaataataagacagaatataagatttctctacaatcacgcgtttccaaatgcctgctgacaaacttagcgatagggtagacagtctaactctttcatctacattcttctaaattccattggggctttccgtattgggccaggggtaataccagaagtactgtggagtcattagtccgagcttggcatctgttattaagaaatgtcgtgatgacaggggcaggagggtcatgtcagtaatacgtaagcaatttgggaagactgaagtagggcaaatggttgagaaataggcatcaggcataggggcaaagaaacaggattcataaaagaacacgaacacaggggggaggggcgctaacaaatgatccccagaggggaccaagaatacgcggaaaccagcgttgtggtacacaggggatccaaaggagaggagaaactaagacaggaaaggcgcaggcgtacacaagcaggcggcggaaaacggcagaacggggaacgcgcgagaggaaaccaccaacgcgcgggggaacaacgagcaaacacccgccaggtaaacgacgagaaacaaaaaaagacgagagctaggaacacgcgacattgtgcggcagaagaagggnaatatgagaagcaaacaaagacacacacagacacataaacagaaaagactacatacatacaaaagagaaacagcaccatcttagatacaaccacaacag

SEQ ID NO: 713059 - DNA, 128 bp, Homo sapiens
aaggctgaggcaggcagatcatgaggtcaggagttcaagaccagcctgaccaacatggtgaaaccccgtctctactaaaaatacaaaaagtgtaaaaaatacactttggaaggctgaggcaggcggat

SEQ ID NO: 713060 - DNA, 478 bp, Homo sapiens
aatataaggtttaatgtttttggatgaaccaatatggtaaatagtaggctgggcacggtggcccacgcctgtaaccccagctctttgggaggccgaggcgggcggatcacttgaggtcagcagtttgagaccagcctggccaaaatggtgaaaccctgtctttactaataatacaaactaaagaaaaagtaagaatggccgggcgcggtggctcactcctgtaatcacagcactttgggaggccgaggcgggtggatcacctgaggttgggagttcgagaccagcctgagcaacgtggagaaaccctgtctctactaaaaatacaaaattagccggacgtggtggcgcatgcctgtaatcccagctactcaggaggctgacgcaggagaatcgcttgaacccaggaggcagaggttgtggtgagctgagatcgcaccattgcactccagcctgggcaataagaggaagctccatctcg

SEQ ID NO: 713061 - DNA, 800 bp, Homo sapiens
ttttctctttaaaaacattttctctgcggtaatttccttgtcatccttgtgtctacataaatcacttgaatccattgaaagtgctcaagggtaatcttgggtttctagcaccttatctatggatgttactttggcgaatgggaataatcacctggtcacctgccccaagactttcccctctgaataaatacccatgaactctgatggctgtgtatcaaaggaacttttcttgtataaattgctgatgcaggaagttaagtttaaacacaacgtctatagaaaagaaaggagagttattacccagaattcaacatgtagcgattattaaggacaattcttttgtgatttaactaaacaaacagtggcggcaggggtggggggtggcaactcatttaatcttcctatacatacaaaggatatgtcaacaaatggggtacttctctgtgagcgttattctgatgcgctgtatacagtttgtcacctctttactttttagttaagtcatcactgatagactttcctctaaaagccattcattccaagattgtacctgggcggaattattctacaatatgttaattcctctataagagtcatcaatcaatcatgagggggcgcgagtttggcagtcaggccctaaatgttatgtaactagttcgactattataagcttgagtgaagtagaggtctattgaaataataacacaggttgggaacatcggtgaatagcagactacggagaatctcacggatttaacgtacagtgcaaaggatgaaactgtgtaaacgagggcaacccg

SEQ ID NO: 713062 - DNA, 169 bp, Homo sapiens
cagatatcggtcagtatagaaacatagagaacagtctggaatcaaccaagggtgtactagattgacctgaggaatgatctggataggttgttgtgaaagtggagaagattcacgaaaaggtctaaatgaattgcgtgtgcagggcgcggatttaaagtccaatttctca

SEQ ID NO: 713063 - DNA, 153 bp, Homo sapiens
cctttcggtgaccccatgcattggctcatgtcgttgggagtgttgtcgtagtcactctcaggtgtgctgttctgcttctccagcctaggcaacacagtgaaacccgtctctacaaaaattttaaaatgaggtcagacgcagaacgcgcctaat

SEQ ID NO: 713064 - DNA, 195 bp, Homo sapiens
ctgagacaggtggatctgctgagctcggagtttgagcacagcctgggaacactgtgagacccatctctacaaaacatgcaaaagttggccggccatggtggcatgaacctgtggtcccagctactccggagtctgaggaaggactgctcgagccggggcaggaaaggctgcagtaagccaagatcacgccactcc

SEQ ID NO: 713065 - DNA, 182 bp, Homo sapiens
tccggttcaatcacttccctgtctcggctcccaggtggctgggattgcaggtgacgccaccacgcccggtgattttttttgtatttttagtagagatggggttcaccattttggccgggctggtctcaaactcctgacctcaggcagtccgcccgcttcggcctcccaaggtgctgagcttg

SEQ ID NO: 713066 - DNA, 144 bp, Homo sapiens
tgggtaggtaccaaaggaatagcatacatttgtcaaattgaatgatctggacatagttgataatgtcatagttaaatatgcttcataagtattgtagtcttttacaaggaaaatgggaatgtgtgtaatgtgaatatagcagct

SEQ ID NO: 713067 - DNA, 463 bp, Homo sapiens
agtgtttagaaaggggtaaaactaggacacagaaagacgctgggaattaccacgacccccaagtgcttccggctccaggaaataaccattcaggtgttggctggaggtcacacaattttcccctattaccgggtgcaaaaggactcatcacttcccaaaagcttcttttcaaaccacgattttcccatttatttgggtccaaggcagtcccattctttatggcctatagtctcactcccaactacccccggggggggttaaaaaaaaacaaaagggattcccctctgggggggccccaaaaattcagattaaaataggagggggggtgggcagcttcggggagattagaacacttggagggttaaatctaccttcccaggaggggaaatttaatccaggatagggtgggagactcatatatggcacaatagggataaaacctagagggtagaattctcacatt

SEQ ID NO: 713068 - DNA, 263 bp, Homo sapiens
gtacattcttctcagcaccttagagcccactgatgcaggcatactgggacgactaaggactcaccaagctgggtctgctcatggtgcttctagcatcatcttcatgatggaatcggtccagtgaggctgtcatctggaggtgctgcgcagttggggctgcgctggggatacatcattcactcttgggacgtgagagctcatcactaatgagttgtgagcagagtacctgactatgcagagtcccatagcatcccctaatatag

SEQ ID NO: 713069 - DNA, 154 bp, Homo sapiens
ccagcccatctgatcgaagtcaagcgggagcatgctggtaacaagaaacttgacggtgagtacatctacctcaagccggaatgggccgacaagctggcatctcgtgcctacctgctcggtggtgtcaatcctcggtatcagccgatggtagtgc

SEQ ID NO: 713070 - DNA, 414 bp, Homo sapiens
  misc_feature (253)..(253): n is a, c, g, or t
  misc_feature (323)..(323): n is a, c, g, or t
aaaaatacattatagtaatttccttggccatggttttatggcacgcagtatgtgctgaaataaatgctagcttttttttcctgggactttttcaataacgttttgtagagccactataagagtagaagagtgtaggctgggcatggtggctcacacctgtaatcccagcactttgggaggcagaggcgggtagatcacgaggtcaggagttcgagaccagcctgaccaacatggtgaaaccccgtctctactnaaaatacaaaaattagccggatgtggtggcaagcgcccataatcccagctactcaggaggctgaggcaanagaatcgcttgaacccaggaggcagaggttgcagtgagctgagactgccattgcacttcagcctgggcgacagagcaaggctccgtctctg

SEQ ID NO: 713071 - DNA, 1621 bp, Homo sapiens
agggtaaatcccacgctgattacttagcgtccagtgacagtgactcccaagaagaataatctgaaccgaccacggaggctgccatagagcacactagatcatggcaagatacttactacattcctagtggtgtgccgagttgccaagctcgcctgtgcctccacggcacagctagagaatacaccctacacacatactggtgacgatctagtcagggattggccaagtaagtgccaatgagtgaaatcgctaacatgacgctttatctcctaataacaagcatcacctagccacaagatttggctagcctagtacaacaatagacgaccacccactgatgaccaccccaactcctcgcgctctagagggtactacccgttggctcgtacaacacgacaccactaaagagctaacacttacacttatcaaaccacactatacccaacttcaacgcttacacttcttaaccacaccaacttataaatcacataacaacacaacaactacacccccctacacccacacaacctcattcatacctacacaggaacccacatgtccaccctacttacccacagtaaccatgtatccctaactcattagccgccaacacatatacgcagaagagcacacccgtaagagatgaacacaccattacacccctaggacagcgtgtaaacacagcataacgctcaacaccgtagtgcaaagaaacacggctggcgcatttatccgtttcaacaacagaattatccaaacacattcccaaaccacacctacacagtacgacccggtcaaccgcaacatgcggctggaccacacaactccccaactacaccacacataatccttttaacccttacacaattacacccataaataacaacactaacactatgaaagaagccccgtaaaaaacttcatataacaccacccacattaacataacaactaccaaaacaaacttctacatcagcacaccacaaacacttcaacacaccaacacagtactaacacaaaagaaatattagacatcacaatcaactcattatgacactcacgctccaacacaacaccacatacaaccacccctacacccagctcacgacaccactaataatacgacaacccatataatacgcacactagatgtcaccacacaacaactaccgccacaccaaagcctacacacaagcaccacatacatacacctattcgcaaaaaacatctattcagcaacaccagctcctacacaccacacatcacacccctagatattccacccaaacacacaacccgacacactatgcaacagcataaccagcttatcgcacgctagagcgaaagcgagcgcatagagcgcgccccctaatggcgaccacaacgggcagtccaaccacgccacccccagcgatcaggtagacaaactaggaccaacatcgaaccgtgcaccactcgcaactcctaatgtcgagcacgtctcgtcacaccccgcaccagaacaaaaatgagaccacgacagcatgtcttacagccaaaggggcccggccagtacgatatcgcacaacgtcagcacccacgctgggcggaccttatcacggccggagccaccaagggggaa

SEQ ID NO: 713072 - DNA, 436 bp, Homo sapiens
cccgcttctgggagtggggaaagaacatcgtctgcgtggggaggaactacgcggaccacgtcagggagatgcgcagcgcggtgttgagcgagcccgtgctgttcctgaagccgtccacggcctacgcgcccgagggctcgcccatcctcatgcccgcgtacactcgcaacctgcaccacgagctggagctgggctgtggtgcatgggcaatgcgctgcctgcgcagtcccctgaggcttgcggccatgtgactactgtgtggctggctaatgccctgatgcctgggatatgacctgcccgggacagtgcatggacgatgtgcaagcaagaaggggctgccctgagactctggcgaagagcttcactggcgatcctgccctggtccagctgcgttctgtgccacaaggcagacagatccactgaacccatccacagg

SEQ ID NO: 713073 - DNA, 552 bp, Homo sapiens
gcagatccaggtcacaggggactgaatctcatcaccccacaaacataccattcaggttttgccaagaatgacactgtaaatgtaacaaagcttccatgcttgttagtgaacaccaactcagctcctctcctctattcagaaatcaggatgagatgaaaacaacaagcaggccaggcacggtggctcacgcctgtaatcccaccactttgggaggacgaggcatgtggatcacctgaggtcgggagtttgagaccaccctgatcaaaacagagaaaccccatcactactaaacatacaaaattagccgggcatggtggcaaatgcctgtaataccagctactcaggggctgaggcaggagaattgcttgaacccgggaggtggaggctgcagtgagccgagatcacaccactgcgctctagcctggacaacaagagtgaaactctgtctcaaaagaaaaaaaatttaaaataaaagaacaaggaaacaaaagtaacaaggcttgacaccagatgagcctgaatctaagcaagaaaagccagaagacatccatt

SEQ ID NO: 713074 - DNA, 295 bp, Homo sapiens
ctaagttctacattaacagttgcttacaaggatttcagaaaaggaactacattctcttctgctggctataatggtataaatcagatctacaaatcgtatgggaacgagtcatctactctgtcctctatctcaagaaattagctcttttacatgttgtttttatgaaactcttttctttcagttaaatcataagtaggataattttcatagacctttttgcaaatctgtttcattgtgacttcttccaagttagcactggccagtaatatatatattgtttcctttctgaccaaag

SEQ ID NO: 713075 - DNA, 825 bp, Homo sapiens
cagcataatatacgcatgggaggagctgtggttgtaacactctacaaccatgggtttccggaagccgccagtatttcaggaatgcatcacgtgaagcttgtcccaaccaaaggttctggcgggtgatgggttttaaggcataaagctgtataaaaggcagattgcagtaggaagattggagagcaggaagggcgaaacagcttgtgtgcaagagacatccggtggtatatctatgcccttcaaaggtgaatgatggtccctgggggttgtgaaagaggtcaacgtgtggtgggtgggatgtgaagtaatggataagtggaatcaagtgctttcttaactctagtatgagaaagggctgaatggaacaagtcagcaaatggctgagctgaaaaaccttactgtggggcattaaggtgagctggggtcatgatgtgaaatccatcaaaatcggtgctatcattatcagaaggtgacatatttggacaaatcactggactgacatggggtctcgctatgaacgattagcagagaagactctcagagcgttcagcgcagagtagaggctatggcttctgattgaactcccttatgactactttggaaaatcacgatgatgataatatggataatatatccatacattttaattgtccagaatttagcacttggaattgcacatggaaaatagcgtgggataacgatatgttcgccaacggggtgtgaaccagtcctgtgttgcctatgacactgggctgaaaagacctgatgggttaacaagtggtttgggcaaatggctacccctgttgcgttaaccctcaaccttgg

SEQ ID NO: 713076 - DNA, 1112 bp, Homo sapiens
  misc_feature (148)..(148): n is a, c, g, or t
  misc_feature (914)..(914): n is a, c, g, or t
tgactacgcgcggcgggagcggatgcggagtcggcaggcgccccgtggtgcgcagggctcggacacctcactcgacgggacggaaagccggagcagcagaagaccgggacgcgggagaggactgatgcatcgctacaccggctgagcngaggaacgatcgcaggtttagcgacaatacgatggttggcgcgcagtgatgactctggcgcagatactcctgcgagtgctggctgatgtcatcgtcatcacgtcctacggtgacgcgcatgatctacccgcaggtgagacaatccttccagaacaaacagttaagaagatatactcattgttgccgtgaccaaagattgatcctgaacttaccgagagacatgaatatcacaggtactccacagaacacagccagtacttagcggtggagaccacttccatggaagaaggatatgaatgttgccagaaaaagtgtatgcgaggttgaattcctcggattaagggacgccagcctgactcacgtaggaagaaaattggcagtccttaagataattcactccactgtcatccaaggggcgtagtccagtcataggtctaatacttcgcaatgattcccctcggtggatggatgcaagttagctcccgcggccctgcgaatcatgaaggaattatgccgtggttgtaaatggccggcgctgggaagacaccaagacctgctccagtgtggtatcgctttgtcctaagccctctcctttcccaatgggcaatatccccctggggtagttcacagaggtagggactgcgagttctccgggggcccctgtttttttgcttgtgcgtcgaccagtttttcactctcccaaataccctcagaagtcccttctccaccttgagaatgcaacgcgaggatcgattcgaaccggggnattcatgtccctgattgtcagaggcctttggcatttccgatgttttgcgcacttgcttctggggatgttcgcgaccacacagggcgtttgtcccgggctcccttgtgtgaacccccccgtgtgttggatcccacacagccctagtaccttcacacgggcatgtcactcagagtagattacgcgagccctgctattcct

SEQ ID NO: 713077 - DNA, 271 bp, Homo sapiens
  misc_feature (40)..(40): n is a, c, g, or t
  misc_feature (55)..(55): n is a, c, g, or t
  misc_feature (70)..(70): n is a, c, g, or t
  misc_feature (89)..(89): n is a, c, g, or t
  misc_feature (229)..(229): n is a, c, g, or t
tttttaaaaattttaagttgtatttaaacaaagagaaccnatggattaaaagacnttaaaataatagcanccaatggaaatacatgacnggaattctgatgcgaacaccctattaaagaaattttttagagactattggagattgggcacagtagctcatgcctgtaattccagtactttcagaggccaaggtgggtggatagcttgaacccagcaagttcgagactancctgggcaacatagtgaaacccatctctattaaaaattcgaa

SEQ ID NO: 713078 - DNA, 945 bp, Homo sapiens
  misc_feature (50)..(50): n is a, c, g, or t
  misc_feature (76)..(77): n is a, c, g, or t
  misc_feature (104)..(104): n is a, c, g, or t
  misc_feature (131)..(131): n is a, c, g, or t
  misc_feature (147)..(147): n is a, c, g, or t
  misc_feature (149)..(149): n is a, c, g, or t
  misc_feature (176)..(176): n is a, c, g, or t
  misc_feature (203)..(203): n is a, c, g, or t
  misc_feature (207)..(209): n is a, c, g, or t
  misc_feature (213)..(213): n is a, c, g, or t
  misc_feature (239)..(239): n is a, c, g, or t
  misc_feature (243)..(243): n is a, c, g, or t
  misc_feature (324)..(325): n is a, c, g, or t
  misc_feature (336)..(336): n is a, c, g, or t
  misc_feature (342)..(342): n is a, c, g, or t
  misc_feature (353)..(353): n is a, c, g, or t
  misc_feature (374)..(374): n is a, c, g, or t
  misc_feature (382)..(383): n is a, c, g, or t
  misc_feature (389)..(389): n is a, c, g, or t
  misc_feature (402)..(403): n is a, c, g, or t
  misc_feature (405)..(405): n is a, c, g, or t
  misc_feature (471)..(471): n is a, c, g, or t
  misc_feature (538)..(538): n is a, c, g, or t
  misc_feature (668)..(668): n is a, c, g, or t
  misc_feature (670)..(670): n is a, c, g, or t
  misc_feature (674)..(674): n is a, c, g, or t
  misc_feature (855)..(855): n is a, c, g, or t
atattacataaatacagcttacatactagagtatcaaacactctgttccngtaagaagttcaagagtacatttagnnctatcttaagaaatatgaatactttgncttccattattacattagatgacaaantcaattcaaataagantngtcatatcctgctatgattaacaaaanaccacgtcgggggagtgggggggtgtntttnnnaganataaagataatcaaatgctttttganaganctgttctcttcactgccacacatattcatacaaatgacttagtaatctaatatgggaggtggtccttcacttatattaggnncttggtaagtntttgtngaatgagtggnctatctatgggtatgggtttnctactttnntttgtnctttttttgttanntngttttcaagtaagagcaatagtaaacatactgagttcacattttgctcagatcataagcctataanacagtgattgttacaaacaccacccatcatagcacaaatcaatgtgcatttctgaagctagtaaganaagttctatcatgttgtagaacgaattctaaccgactaattcactgggcttcaatcacttgtgatatggtcaagaaaagggggctggggctcctaggcttgtatctatttcagctatcagtgaattcctntntttngggcctcactccccttcccaccccaatagacacaaatttaaaaacattgctaaaaatagtagttgtagcatgtcttcacccacttgtaatttggctctgaaaatgtattcaggctccaggttcagaagagagactttccaagcaggagacaaaattcactaagggagctcactcaaatggnaatgagttcatggaccagagagcaaagcaaaacattgctcttaaaagcaagctcaacggacacacatgatgagactcacagttgcacact

SEQ ID NO: 713079 - DNA, 403 bp, Homo sapiens
  misc_feature (261)..(261): n is a, c, g, or t
  misc_feature (395)..(395): n is a, c, g, or t
gcaaagttccaggttccttactggatggctccagggccgtcggatgcaccccttcggagctaattagcggagattgagaaaccagtgggtttgcacttgaaacgaaaatgtacttggggagaaacttgaccgcaaaatgatccatcacaggactatgtcgcaaagtgactgtgaagaagaccctgaagttgagttcttaaagtcgctcaccaccaagcagaagcagaagctcctcaggaaattggatagacttgaaaaganaaaaaagaaaaagaaaagtgataagaaaaagaagaagttacagaagagcaagcttaaacacaagaaacgtaaaaacaaatccccttcctcttcctcctcttcctcctcttcctcctcttcctcctcctcctccncctcttcc

SEQ ID NO: 713080 - DNA, 212 bp, Homo sapiens
aaagagatctggtgatacttgtgtcagccagatagcaggattgtgtcctgtactccagctggacgttacaccagtgcatagcagtacagagcaccagccaaaaaagtacgccctcagccagtcgctatcagcactttcggaccaggactagcataaagagcgtccacctgaggccacccatctcacctgacactgatactgcctgtagaagt

SEQ ID NO: 713081 - DNA, 107 bp, Homo sapiens
catgtacaggtcttatggcgctggctgatttctcctctcatcgtgacgggccagctgagaggcaggcaaggatcctacaatcgacttgctcagaggatccagtaaat

SEQ ID NO: 713082 - DNA, 444 bp, Homo sapiens
ccaagggtcccttagcctcccaagtagctgggattaccagcatgcaccaccatgactagctaatttttgtatttttagtatagacagggtttcaccatgtttggccaggctggtcttgaactcctgacctcaagtgatccacccgcctcagcctctcaaagtgctgagattacatgcgtgaaccactgtggcctgctgaggcttggttatttttaagcggtgattttgtcatatgctacctgaaggtagcacttgatggtgctttctctattgactttttctgtattgctagcaggacacttagggtggaaatgattcaaaaggaaatgttttacccagttttcatgtatccaatgtggaaggaaccatttgttatatacagttctttccagtatgtgcaaatatgaatgatcggctaacgaccttgggggatcctctaacgag

SEQ ID NO: 713083 - DNA, 263 bp, Homo sapiens
ctcgtgagtgagtgtacatgacaggcagtaataactgaatcaatgaatgtagcaggggactccgatggaccctggaccccactgttaaccgagtggccaaatataaggtgtatcttccttgcatgaaagcaggagttctcatgtctgctttccttatggaagagcagtgggggattaacttcaggatgaatatattagtcaccttgctaggaaagttggaggtgttcatttaaacataaagtgggatgaatatatagcttgcc

SEQ ID NO: 713084 - DNA, 214 bp, Homo sapiens
gagctttccttaaatagagggattgactcgggtgttgtgtgatcattatggctgacgcctgtttctctgcgaggtaggacggctgctttctggtctggcagggatgggtccgctttgcaaatgctctacgaggctcctccttgcatggcctgcaatctggccgcagcccctagtagattcctcgctgatccgatttcttttctctctgcgcttg

SEQ ID NO: 713085 - DNA, 268 bp, Homo sapiens
actcaattatacagatgctatagggattactatgcaccttcttacatctattgctacatagataaactattattatcctaaatcactgtctagcttacaagcacatccctccctgtgactgaagaatttgtattttgtgctaagatgcaatgaaatgtgcaaattgttcactgcatagcaaaaaaaatcacagcacaattaaaacccacgaaaccatctttcccaaccaagggcaatttcaaggcttcactccaattccattctcaac

SEQ ID NO: 713086 - DNA, 606 bp, Homo sapiens
gttaatggtcagtccagtgttttaatctgacgcaggcttatgcggaggagaatgtttccatgttacttttactaactttagttcttctatagggtgatagatgggcccaatggggtgtgaggagtccagttatattgtttggggattttttaggtagtgggttgttgaggcttgaacgcttccttaatgggtgggctgctttaaagcgcctactatgcggtgtaaaattttttactctctctacaaggtttttccctattgtccaaagagctgtccctcttgggcactaacagttaattttcacaaggggatttagaagggtcctgtgggcaattttaagtttgacactaagattctatctgtggacaaccagcttatcaccaggcccggtaggtttgtcgcctctaccttataattcttcccactattttggctcacttagacgggtgtgccctttaagctgtccttaggtagctcgtcgggttccgggggcctaagcttgggctccccttgcaaagttattcctagttaatccattatgccgaaggtataggggttagccccttgcaataataatgccgggaataattttccatcttccccttg

SEQ ID NO: 713087 - DNA, 769 bp, Homo sapiens
gcgtcggacccacgcgtcggcgagaagcttcgagagttgtgtgggaccccagggtatctagcgccagagatccttaaatgctccatggatgaaacccacccaggctatggcaaggaggtcgacctctgggcctgtggggtgatcttgttcacactcctggctggctcgccacccttctggcaccggcggcagatcctgatgttacgcatgatcatggagggccagtaccagttcagttcccccgagtgggatgaccgttccagcactgtcaaagacctggtgagcgggggctgaagaggaacagtaggggagggccaagaaacgtggccctctatagtgtctcgggtgtctctctcagatatctcacggggtggtgcaggtggcactcctgaggcgacgcctgacagatgagcaggccctacagcaccccttctttgagcgttgtgaaggcagccaaccctggaacctcacccccgcaagggttccgggtggcagtgtggacagtgctgggtgctggacgagtggccctaagcacccatcgtgtaacggcactgaccaagaatgcagctgttgagggacccttatgcgctgcaggtcagagcggcacctcatcgacaactgttgccttccgggctctacgggcactgggtaaacgaaggggagcagcagaacgggggctctctcccagcacggcccctgggctttccatcatgggcctgaagagagggagacctgtgtataacgaggtgaagcggttgtctggtaagac

SEQ ID NO: 713088 - DNA, 171 bp, Homo sapiens
tggtgactctcgaggatccctcataggttcgcaggggattacagtatataccaccacgcccagctaattctttatttttgtagtagagacagtgtcttactgtgtgcccaagcggtctcaaattcctgcttcaagccatcctcctacctctgtcaccctgcgaacctatga

SEQ ID NO: 713089 - DNA, 286 bp, Homo sapiens
tgctttggaggatccagtgttgctggggatgcgcttcggcagtggctggctacatgtactgatagacagagagtcccaggagatgaagccacaaaggtgggcatggcccggggtcatcaagcgccccaatgccaggccgagaagtgtaggtcgctgaggagctgtgaagggtgttgagcaaggaagggccaatgtggtttggtctacgtggagtcaggaggacacagatagaattagggaaacaggagggagttgagaatgccaattggacgggaattcttttatt

SEQ ID NO: 713090 - DNA, 89 bp, Homo sapiens
gctcgaccaagaccctacttctaacctccctgttcaaatgaattcgaacagcatacccccgattccgctacgacaaactcatacaactc

SEQ ID NO: 713091 - DNA, 190 bp, Homo sapiens
taagaccgtggatgtatgtaagaagaggcgattagagggtcttgtactctggactaaagtgaaggggctatcctatttattgctatagcatatgatataatgatgagtatgataggagtattggtatggtcattgtccggagagtatattgttgaagaggatagctataagaaggatcatggatgcggtt

SEQ ID NO: 713092 - DNA, 953 bp, Homo sapiens
  misc_feature (868)..(868): n is a, c, g, or t
aagacaccttaacaaagaaaaaaaaaaaaaaaacctttgacccttattttatactttaaaggacagtgttttggagtacaagtgagctatagcttgcttaatgacctggtgagatttgatttccccctttccaatttgcctgattcagattactccgggggatgatgcatggtagggagggacagaactcaagttctcagatagtctctatacatttccagcattgagtaaggacatggtgtggactcttacaagcctttgtgaagcagcctgtgattgggcacttgaaagtgtgcacgaaggtgtgtttccgtgtgtatgtgttcgcgcgttggtgtatcaacaacagcgtatgttgcagaattaacaccccacgaggccagtgatgatgaagcacagggagaaaagtatccctgtgccaaggttatccccctcaagaactctgcggacaactcccggggacaatgagcgaagctatcacaggacattgagacaacctgttgacatgaacgtagaaacgtgagaactacttaccacataaacacatactatacaaactttaccccagaaggtgaactatagagacaatatacagagaccactatctacaatccactgtgattacaataatacacaaccctatggtgagcaccccttgcattaatgaccacccaaacaagaacggaagccagcgcagttcgacagagcacgatccacattcacacgaggacagaaaaaccaccttaacaagtgggcttaacaagaggacgaaaacagatatgaagcacatttgcccatggcgtccaaagcatgaggacaactgttggctgccgtctaccgcgagggtaataccattaacacgtatagncaacaaaagcgcctgcacacgagcgcgccacaaagataaccatcagtgtggaggtaacacaccacaagtgagtcgaccatgtaca

SEQ ID NO: 713093 - DNA, 1375 bp, Homo sapiens
  misc_feature (1)..(1): n is a, c, g, or t
ngtagtgatgtgtgtgttgtgatgcagatgtgtgtgtgtgtaggtattgttgtataagcaatgcttatgagtatgatcagctctacataaactaaccctgtgtggttgtaagaacacacaaccgagtgttgggccccccctttattggatcccttcgagagggagtcccccacccgagtgggtgtggcacacacaaaaaagccacggggccttttgttttataatccctgccggcgcccccttgtttctcttaatcgccggtgtcactaaaaggttacctcgaagccccttggggttgcccaaaaattttcggacaccagaagggggttccacaccacaagtgtcctgccggagattccgtcataaaaaggtttcctccgggggtacatgggaaaaaatttctttgggcgtgggcccaaaagcccaaacacccccctgcgtccccttgggaaggtccccgggagtacccctcttattgagggagaaaaaccggtgacacaccgtgccgggggaagctccccggcactattgatcggagagaccccaaagggctcggataagtggaaaatagtgcacaggcttagaacccccgggacctttgccctgaatttcgtgccccctaccctcccctcggataggggaaaagaacacaaggatgccccccacggcgccaataggccacttcttggcgggcgtaccatctcgctttgccacaagcacccaacaatgtttttggttgaagacctgaaaggaatggtaaaaggatttcggagaggtgtgagcacatcacatatagagaagaccacacagtaaatgggaattttcccgcaccaccacaccgtgagatatagggcttctcgttaccacgcgtctctgagccccccgcgaaaacctgagagcctctcccgttaactctggaaagaggctacacctgggagcacacactggaaccacaatttctccccacgtttttctgcgggaaaattctccacatggtttgcccgcgggaaaaagcttaccctcttgtggaatttttctcaccctaatgaatatccttggaatcacgaacccgtagtatattggagacccccaagggccctggaatgaggttccccacaacctcgaaaggcttttcaatgtgcccttttgagaggctttggaggaaaattcgctgcctaacttaccacgtctgagatcacagttcctgccaagaatgcccactcacacccacccaagaatggcccacagtggggcacaacaagcctgtatatgctgacccggaggccagacttgcagagcttgttttgtttcatacctgtccgtaaggggtcagcgctcttgctttgctcttttccaatgaatagcccttctgtta

SEQ ID NO: 713094 - DNA, 355 bp, Homo sapiens
  misc_feature (1)..(1): n is a, c, g, or t
ngtgtcagcccatgtatatagcacgtgctcactgtggtcttaggtatttcacacagggtcctctgtgagtgtctgagtccctgactacagccactctggtcacccgaagagcataaggtagcgcacttatctcacacagcctacactctctcagaaagtgtcccatcacaaagaaatgatgaatgtttgacatgatgggtatgttaatcactctgatggtgatcaccatacattacatgtataaaaaagacagttaaagtcatgaagacgctaacatggaaagcgctccttctcaagaacaggagtctcctctgtatgtggagaagaccaagggccaaaatatcgcccgctctct

SEQ ID NO: 713095 - DNA, 428 bp, Homo sapiens
taggatcaggtgaaagatttttcttgtaactcaacactatatacagtttcagcctaaaaagagccaagatctcacctattattactttgaaccagagctttatcaaaagatgccataaaatagctgattgaccatgaggccacaagccttaagactcatcaactatctgcctctaattccactgccagagagctgctcttacatttccctcagagccaggtttgggccatggagaaggaacttcttattttgtagtcagggtgggcactgtatcattctcccacacaaatgctttaaatggggtaggatgtgaaccaacagatcttaaaatgagcagatccttttcaaccgggaacttgacaaaggagaaaactggacaattttcaaaacttgtgggaaacaacagcgtcgacgcggccgcgaattta

SEQ ID NO: 713096 - DNA, 1658 bp, Homo sapiens
  misc_feature (1449)..(1449): n is a, c, g, or t
gcttggctcccggatccataccccgtgattctccgatagataataagtgggcacgtataacgtgtcattcctcacaggagtactggcatctacgatgagatcttccctttgtacatgacctttgtatcacgctgctggagtcggccctagacaaactgttgttagtgttgaacggaacagtatacgtgcctaacgagggtccgtgcatgtgtgcgactgccatgatgatgaggtgaagtcatctccctatccagtcatgtcaagtcaaccgcgagtgcactagagtcccggcattgcctctctagcgataccgtcgtacaatggccactggcttaaagctaggtccgtatgcctcctcgggagtatctcgagggatcacttcacacgcacggtatccctcgactacatgaaacgtctcttgtgtgactccttcaacacgcggcgccttgtcgtcacgtaccctcacctgcatgtacaggcaagtccctcgaagtaagttaaggtcgtgatgcgtaccgcggtaagcgcccgagacaagaggtgctcgaaatgccaaggggccctaacacgcgggtcctcgggggaagaacttagcaggcagacaataacaatgcgcacggagcgcaacggattgtaggagcgccaggatccctgttgtatcccacccttctatcgcaccattattgacattcgagcccgagtttaaccaatcaccttttcattatgaaaggcgatagctccctctcatggtcgattggactcccattgatagagagcgggcctccatacatactaaagcgtgcacccaaatgctgcgctcctaatggcacctcgcaattcgaattaccttatttaaagacacacccccaagtcggtgtgggcgctaatataacgactcccgcggatatgccctccggcgcttagacaatgtcgcgccgcattccgtgtacggtgatgacgttagcaattcaccttgtgtcccctgtgtagattcggtttcgtgtttggcgcactagcaaccgcgggtaagaggctatacagttcttctgttgcgcatgccatcaaccgttgcaccgctgaggttcttacaccacttcaggagcgattggcacgtggcgtgcgggttcgcgacgtcatattcatcacctgttgattctctcaacacgttaacggagtcgcgcggtggataaccaccccttcatatggcaaaaaggcgtatcgcggttaatcggaattaccagaacacgtttggccaagtgcgcggttccacgtgtcgatgtgagcacacccaccacgcgctatcggagatatcccattattgtacccccacaggaacggaattgggcggttacctgacggcctttggcgcaaggcgcaatgaccacagggggcgccctcacactccttgatgacggagaatcgcctgtatccgagcccaggcgcgccganagcaaaatagccacgataaccgcacaaggggaacacattaacgggcggcgacacaaaaaggcggcccttacgctacgaggagtcagatacccggagtacaaccaacgaaacgttaggaggcccgccaccgcacacacacccaatgagagggaacgcccccacagggtcgggggaccacaccaaaagaggagcattacggggcgagccca

SEQ ID NO: 713097 - DNA, 114 bp, Homo sapiens
  misc_feature (71)..(71): n is a, c, g, or t
ttgtgggtggttttatctcttgaaggctgacttccacaacctattcccatcctaaagcaatggagtccttngggatgttagcactctttagtcgttgggattcacagaggcttg

SEQ ID NO: 713098 - DNA, 447 bp, Homo sapiens
ttcaccgctgcttcataaacaatcttagcagcgtgtgctgaaagccttttgtgcttgtgggtggaaagcaaagataatcgtgttacgcggctttgctgtcaacatagccttaaaaattgttgttgacgttgggttagttgttggcacgataccagccaataccccaagtggtgcagcgacttcaacctttccttagattttatcttcgctaatcacaccaactgtcttatcacacttgatcgcgttataaacagattctgaagcaaaacggttctttgtatccttatcttcaacaccccacgaccagtttcgtcgtgtgcttcgtgcgccaatagcaatgagttttctgatccagccaaggccattgctgcaacaatcttatcaacttgttcttgtgtatatgttgagaattttttttttttttatcaattggttaattctgaaaaa

SEQ ID NO: 713099 - DNA, 176 bp, Homo sapiens
ccttttactgggtatgttctggcttttgaaatacattacctattctcttctaaagccaaaattactacagactaaggctggacactttgtctcccctcttggtctttgaaaaattacaattatccccaatttgtgtttgatatggggcaaaatatctccactctttttgtgttaga

SEQ ID NO: 713100 - DNA, 168 bp, Homo sapiens
aaaagaagacaaaaccaccacccaccacacagacatcggcactgatggactcattgagctgcggataatcaggctgactaaggactgttgccgcatagtatgagtcatgggttagtttcagatcatttgccagcatgctatattttctgcttagctgccatgcgaccg

SEQ ID NO: 713101 - DNA, 258 bp, Homo sapiens
atctagaggatcgtcaactggttcgagttcggtgtgcagcgcttgccaatgtctatctcagtgtttccacgtcgctcgctcttgacggtgacgacactgggtctgaggtgtaagcgctttcaggcccttccctggggcttggaggcgaatggcgcaaaggacttttctctacaaggcgaagccccttgcagttacccaaagagtattgtctgcttattgtcctaagagggttggactccctgaaaagcctgtgacagg

SEQ ID NO: 713102 - DNA, 223 bp, Homo sapiens
ttatcccggggtagtcatgctcagtgcaccatgaagtaagagaagagatggatacacctcagccccacctctctggaacaggaaagatgattgtggagggagcacaggtcagcgtgggaagagggtcatggtggcgttggggctgggttgtttccccaacttctccaattattgctaaacgaaccctgacaccttgcgggtgtgctttggcgaaaccaagtct

SEQ ID NO: 713103 - DNA, 608 bp, Homo sapiens
aataccaagtcagacgcccaacgcaaaaaaacgcgagatagtaaaattgccgcaggagctggtcagtcagctgggggtgcgatctgatcaggacctatccactgagttcggtttcaccctgcactacctgaagaaagagcgcaaagcccggggcatttcgagtgtaaatgtgcctaagtaccccgaagaaatgttgtccttgcttgggaaggtagccgatcgtgatttggtggccaggttgggctactcatcaaccacactttcaatacttcgaaagaagttggggatcaagcggcaccataaggtctggacggccgaacgcattgcgttactgggcaaaattaaagactcagaggtcgcggccttgctcggcggcgcatttacaaaaggatcggtcggtcaatgtcgtcgctccctgggaatacctatttgccgaggaccaagaaatggcgccccaactgcccttttcctctcgctcagtcggggcttaaccagcgggaagatggaagcattgccaagcgcacaaccaggtgagaccggacaattgactcaatttccgctagtccctggttcagaagccaattcgtttcaagcctaagccaaaggat

SEQ ID NO: 713104 - DNA, 493 bp, Homo sapiens
tggaacattgcgatttggaatgtaagcaccagccacaaaaacctcaaaaaaaaaaaaaaaaaaaaaaaaaaaaaaagtgtggtgcgggcgcgccccgggccccgggagaaagagctttttagaacacccattcgcggtgggggcgcgcgcggggcccacaagagaggaaaagtgtgaaacgtgtggccccaagagcggtggtctccaagagagagaaactcggggcgccgagagaaaatgagggcgggggactctctctccaccacaataacaaaaaaagcgccgcgggggggaaaacccgcggaggcggtcacgtgagagacaaacactctccaagaaaggaggagatgtatctgaggggggcgccatatataacgcggggggagctctatatacaaacaaagcgagagagcgcaccacaaaggagagagcgcccagcaggaaactaacgcaaacactctcacgcgcccgcccgcgcgcccaacgggggaga

SEQ ID NO: 713105 - DNA, 443 bp, Homo sapiens
ccaagttcctggagaatgaggacaaaggtgtgccagcttcatttcccccacctgcccattctgggaacctatgatttgaagagcgtcctgggtcaactgggcatccctaaggttttcaacaatggggctgaccttctcggggttacaaaggaggccccccttaagctttccaaggccgggcataagggtgtgttgaccctcgacgagaaaggggctgaagctgctggggccatgtttttaaaggccatacccatgtttatcccccccgagggcaagttcaacaaaccctttgtttttttaatgattggcccaaaaacccagtttcccctcttcatggggaaagtggtgaatccccccccaaaataaatgccttttgctcctccacccctcccctccatccctggccccctccctggatggcattaaaaaagggttgagctgga

SEQ ID NO: 713106 - DNA, 280 bp, Homo sapiens
tctctatccgggaatgtctggtcggcgtgggcaatcagaatacaaagggtggggagaggtctgtatttctttatttttaaataaaaaaacagatttagcgctcggatcgggtcagcatatgatctcttatataatctggcatctagacactaaagaccggtgcaaactctcctcccaggatggggtctactcggtcggagcagggtaagtaaaaatttctgggtatggacccagtcagttcctaaaaccagaatctgcagggggaggtagagagccgggc

SEQ ID NO: 713107 - DNA, 179 bp, Homo sapiens
ggaaaaaaaaaaaaaaaaattttcttttcctttttgggtttggccggaattggcttgggggaaaaggttgaacccccccaaaacccaggggaaattgaaggaaaaaaaacttgcccctgtccccctggggccccgggtccacccccaaggtttccaattaagggttgtttaaaggttga

SEQ ID NO: 713108 - DNA, 501 bp, Homo sapiens
  misc_feature (23)..(23): n is a, c, g, or t
  misc_feature (97)..(97): n is a, c, g, or t
  misc_feature (117)..(117): n is a, c, g, or t
  misc_feature (119)..(119): n is a, c, g, or t
  misc_feature (142)..(142): n is a, c, g, or t
  misc_feature (187)..(187): n is a, c, g, or t
  misc_feature (192)..(192): n is a, c, g, or t
  misc_feature (269)..(269): n is a, c, g, or t
  misc_feature (289)..(289): n is a, c, g, or t
  misc_feature (311)..(311): n is a, c, g, or t
  misc_feature (321)..(321): n is a, c, g, or t
  misc_feature (325)..(325): n is a, c, g, or t
  misc_feature (330)..(330): n is a, c, g, or t
  misc_feature (343)..(343): n is a, c, g, or t
  misc_feature (362)..(362): n is a, c, g, or t
  misc_feature (364)..(364): n is a, c, g, or t
  misc_feature (385)..(385): n is a, c, g, or t
  misc_feature (387)..(387): n is a, c, g, or t
  misc_feature (420)..(420): n is a, c, g, or t
  misc_feature (430)..(430): n is a, c, g, or t
  misc_feature (451)..(451): n is a, c, g, or t
acaggcagaatcaaaaaaaatanaaaacagaaaaaacacaacacaacccagcaatcggccagcatgccgggggtcgacaagaggcaggcgagaccangagactacatagcaaagggncnttaagaggattggggggggaganagagaaaaagcagagcggagggaagccggggcgagcccaaaagcngagcnacatccctcaacacgagagcagtccggggcggggcagagccgcgaagggcggcggaggcacaacactcccactggantctgcaaattccaccgcagnggcaggcggccatcgggcggangccgtcggcnatgncaggntggcccacaaggngacagcatcggcaaccggngncacaggagcaaagcgagcggngngtggggggcccaaacacctcaagccatgagcangacgccactnagcaaagtgtcgcgggaaggntttgggccctcggtaggtgtagtttccacaaatctcacagttgtagttga

SEQ ID NO: 713109 - DNA, 441 bp, Homo sapiens
  misc_feature (23)..(23): n is a, c, g, or t
gatagggggaggggaggccctcncggcgattgtcggaagcgccaacacaagacccccgttcaccctcacgccagactaccggagggtcgggcggacgccgcccattgtctccgatatccccgacgtcaccgtgacccccgcgaggctgcttttcttcgcgcccacccgccgaacggtgccgcttgaggatatggccccggccgctgacgccatcatgtcaaccgaagaggaactggacgggtacgatccgcagcctctcgggaagcggtcgaatgtactgccgatgatggagctgctcagggaatttggtaataacaccagtactgacggctcaataccctcgactgcggcgccagcagacgatggaggacgagctgtaccggatgacgatggagattatttctcagtaccctccggagcagtccacacagccccaggacc

SEQ ID NO: 713110 - DNA, 198 bp, Homo sapiens
gaaggctgatctcggtggatgggggttgatggcgtatttgcccccttatgcgagtgggaagcgagtaccggaggcgcggtggtacagcaccttggtgttgcgggagaagtgcatgtgcagggtgctgtcgtcgctgacggtcacggagactttcttcagggtcttgtacccacatgtgtgagcaagaacactctggct

SEQ ID NO: 713111 - DNA, 932 bp, Homo sapiens
aaaccctacatatgtgaaaaatgtggtaaagcttttaaccaatcctcaacccttaatttacataagagaattcattctgcacaaaaatactacaaatgtgaagaatgtggtaaagcctttaagtggtcctcatcccttaatgaacataagagaattcatgctggagagaaacccttctcatgcgaagaatgtggcaatgtctttaccacatcctcagacttgctaaacataagagaattcatacaggagagaaaccctacaaatgtgaagaatgtggaaaatcctttaataggtccacaactcttacgacacataagagaatccatactggagagaaaccctacacatgtgaagaatgtggaaaagcctttaatggtcctcaacccttaatgtacacaagagaattcactctggaaaaaatccctacaaatgtgaagatgtggcaaagcctttaaagtgttgcaaacctgcataatcataagaaaattcatactggagagaaaccctacatatgtaaacaatgtggcaaagcctttaaacagtcctcacacttgaataaacataagaaaattcacactgtagataaaccctacaatgtaaagatgcgggaaagctttttaagcagtactcaaccttcctcaaataaggagaaactcattactggaggacaattttaggacatggtgagcactgtgggaccctttaagtcttccctcatctttttaatcatatcatactggaaaaaaaatctacactggaaaattgccaagttttaccgaaatcatcggttctaactatcaaactggtttcgccaacctaaaattaaaaagggaaacttcagctgcgacctccgcaatattcgcgacacccgatataagggaaccaacccatcttcgcccaccaacacaaccgatatagaagcacccgtccaa

SEQ ID NO: 713112 - DNA, 346 bp, Homo sapiens
aggggggggggggggttcgggggggggttttaaaaaacaaagcccttttttttcacccccaagttgccgggggacccccccccccctttttttcccccccaaaaaaaacccgggggcggtccccccccccggttttttccttggcccgggggggggaaacaattttcccccgggaaacagttttccccctgggccctttttggggcccccaaaaaaccagttttttccaaaaaaccggggggggcccgccccggattccccgggaatttttccccccccggccccccccccccaattttttttttcccccctttttaaaataaaaaaaaaaaaggggcccccccca

SEQ ID NO: 713113 - DNA, 910 bp, Homo sapiens
cccgtgatcctggctgtcccagggtcgccgagggggttctcgtcccgtcgcccgccccctgtggactccagagtctttgtctctctgggcgcaaattattcccgtcgtggattcggcgggttccattcctggctcggtgggtccccgcttcccgcgcagatggggaccacacacgccgcgttttctacgtgttccggcccctcattgtttgcccgcccaaaattgtctttttgccgccattattacatttattgggggggtacccgcccgttttgtgggcagaaaaccttatatcgttgtcgcccaaaacccaagattgaggaattatggcacgcccttaatttcgttcttctttgcgttcttctttcggggttttttttttttttcttggcgtgacttcacggagttttataatactggggagcggtgaaaggtggacaccgccactcgggtgtggaggcgagcatccccccaatgttcacccaagtggccgaggaactcttgagattgcagcacctgttggttttttaatagtcacttcccaatatgaggagagcattgtttacacgggagtcccttgcgcatcgctaaaagccacccccccttctcttctataggaggaatggccccgtcctcttcccagtgccaaccacacggggagggtgatagcacttgctttcgtgtagattatgttatgcaaaatcttttttaatctttgccctatataattttttattttgttttattttgaatgatgagccttcgtgcccccccttccccctctttttgtccccccaattgaaaattattaaagcttttggttttcctgggaatgggtggaggcaaccaggggttacctgtacactgaattgagacccattggattaaaatgcaccccctttaaaaatga

SEQ ID NO: 713114 - DNA, 271 bp, Homo sapiens
cccttggttccagggcatccagtgtgcagtgaaagttgagaaccatatggtctaagtgttcatacacactaaccttctaccctctctatcttcctttctgcattctttaaataaagaaattaagtaacatgcttatgataagaaaatacaaactgtgcaggagagcatggctctctcacctttccagaataaactattgctgacaagtatagtgcataaacaatcatagtagacatcacacatccatacataatccacgaagagattatac

SEQ ID NO: 713115 - DNA, 241 bp, Homo sapiens
ttcccggcgttcagcccggcccgcaaaggtgggacggctcccggcttcagttacggaagcggcccgtgtccagcgacgagggttcgaaaatgccccgcgcgttcctaggtgaagaagccgtgcgtctccacgtgcaagagggcaaactggggcagccgatgctccccgacgaggagcgcggcgagatctacgtgccagtcagcctgggcttcgtgcccaaccacagcccttaccgggggaa

SEQ ID NO: 713116 - DNA, 143 bp, Homo sapiens
acagctcataacattagcctagccacaccccgaattaaacagcagtgattaacctttagcaataaacgaaagtttaactaagctatactaaccccaggattggtcaatttcgtgccagccaccgcggtcgctggtgtataccg

SEQ ID NO: 713117 - DNA, 249 bp, Homo sapiens
  misc_feature (1)..(1): n is a, c, g, or t
  misc_feature (142)..(142): n is a, c, g, or t
ngctctataggatcccccgcgaattcgggtgctgctgatagctcattcctgcgagccttagatattctcgtgaaagcggcacagaagtctgcagcctttgaagagcagtagaatgagacagtggtgccgaaagagaagatgnttagctgcattgcccagatcatcgcagcacaggaagaaatgcttcggaaggaacgagagctggaagaggcgctgaagaaactgtcccagatccggcagcagcaccac

SEQ ID NO: 713118 - DNA, 275 bp, Homo sapiens
cattcgcgaatcacattctgtatattgctcatggtcaacaaacgtgattcaaatgattgtaagttatcccaccatttaaagagaaaagtcgctgcaataattttaaaccagtggcgttatcattaatttcaccacgggactgctttttaacagaagttcttttagtgcttccgtttgacacattaacaagtagcttttaactctcatttggcgatcgtggattcacaagttacatttcttcctcaccaacataaatgtaatcacatttcagtgtt

SEQ ID NO: 713119 - DNA, 118 bp, Homo sapiens
gccttatctagagggagctgagtactgttgaaaagagaagcaaactttggcagggtggaaggcctaggaggcacaatggttggtggataattcaagcgaaggcacagcatgaagagat

SEQ ID NO: 713120 - DNA, 546 bp, Homo sapiens
ccagaaagcattgtctccttagggtataagttcgaatttcaggagttttacctgtgcctcggagttcctttttcttgtatttctgtatttcctgtggaggctttcccccaaatgctaagccagccttggatatgtgcttatgcttgagtcggctgctcaaaatattggttaccctgttttcaaacagggtaattatgttttcagtgtactcagaagctgcctgaggacttaattaaaaccagcagtttagcaaagttagggatctgatattctggagcacagatttaaaaaaatctattctccttaaaatccttttatgaaacttcgagtaagagacccgctgaaacagagaggagagaacacatttccacacttggccacctcttgactctcctggatcccattaggggagagtgagtgctagttctctgccaacccaggattaggccctaaggctgccgtaaaaaggatcccaggagaaaactcaggaataaaagtggagaaagtgagacatctgactaaaatgactagaagccctcaggaagt

SEQ ID NO: 713121 - DNA, 189 bp, Homo sapiens
  misc_feature (41)..(41): n is a, c, g, or t
  misc_feature (61)..(61): n is a, c, g, or t
  misc_feature (186)..(186): n is a, c, g, or t
ttgctgcggtgctctacgacggctcccgtggcttgtgttgnttcggtttcatggggtcccnttttggggcctgttgtacgtctgtactttcttgactcttccgctggcggttactacgacggtaccgtgctgacgggccgtgcacgtgcccacttacttgacctggcggcgtgctacccaccacgntga

SEQ ID NO: 713122 - DNA, 159 bp, Homo sapiens
tacgatacgaggctaatcctatatataacctacagaagtctgatacttcgcgggatctaactgagcctatcaccactccagcctaagcccctaccccccattaaggagggcactggcccccaacaggcatccccccgctaaagcccctaagaggtgtcg

SEQ ID NO: 713123 - DNA, 400 bp, Homo sapiens
cctgcgcaaaaatgatcttccagttgcccgagaagatgggcatgggggcttcccgggagggaaccccgtagactcctaggctgtagcactgggcactgtcttttagacaaaagagacgcgccgcgccggttcgcagttttgggggcacctttcttgtggcttgagggcacttatggtctctgtgggccaaatctcctcataagctatctgaccgtcaggtgcttggctcccaggagtcccagggaattgattccaaagctgggaagaggcagtcctctgggcccagcactgtgcaagagtttccatatggtgtcctgggggtgtctgattccaaagctttgcttttaaacacttcagaatggaatttggttgagccctggaagaggaataaaagtgtgct

SEQ ID NO: 713124 - DNA, 386 bp, Homo sapiens
tagagcggtctgggtcaaaccagagctgtagccgccagcctatgccacagccacagcaactcgggatctgagctgcctcgtgtgacctacacaacaactcatggcaatgctgcatccttaacccactgagcgaggccagggattgaacctgaaacctcatggttactagctgggttcgttcaccactgagacatgataggaactctgcgaagcagtttggatttaaccgcatgagtccctcagattcctcaaactttcactgagggaaattattaagcaactcaacattttgaggcatttacatacagatttgtcttttagtataaaacatcttcggtgaatatagcgccccgaatgaaattctgtttttcacacttatctgtgtg

SEQ ID NO: 713125 - DNA, 317 bp, Homo sapiens
atagcacactacagtgttctaggtattataacctaagactgtcagatatcaggtcactatactttaaaagttcaactgtacctcttaattcccatccctcatctctactgagtattctggagactgggagtggggggcaaatgtgtacccggaaatacagtgacaggatggacctcatacctcatagcctgtgctactcagccagccagtgagacatgcctcagtggctctcaaataccattcttctcagctagtagattttagagatcactctgcctgctcccttagtgattagggcagggaaccctccccgcact

SEQ ID NO: 713126 - DNA, 182 bp, Homo sapiens
tctagaggatcccaaggctccaataggggtctggtgtgttccatcgtctgaattctctctcgagtctgcactctttcttaatacattttcatcattttatccaagaataaaacgatgatgcgatgcttgcatgggttgttgagcctagggaatttatccatccatgagccctggcccatatg

SEQ ID NO: 713127 - DNA, 609 bp, Homo sapiens
  misc_feature (352)..(352): n is a, c, g, or t
  misc_feature (410)..(410): n is a, c, g, or t
  misc_feature (512)..(512): n is a, c, g, or t
agtgagccgagatctctccactgcactccagcctgggcgacagagcgagactccatctcaagaaaaaactatcatgtggcaatgtagtgagtgttaaacttttgtgttgtccaaatcctggattatttttcagttcatatctttctgggcttgacatggctgatggggtagcttgaacccttcctacactaaaaagccattaatcctttctgtaataggagcaggaaaatagtaatcatccacctagtaatataaagatactgtgaatattatcttttatacattaaaaccagttctagtttgtaggaaaataccatacaaagtttatttttaaattctagttattttcagngcttacttaaatgtaattctagaattcctccacacctttaataattttgtatgccagngaatcctaaagataatcatgattggtggaagtgttcctgttggcagcttgaagaagaattcacggaatttcggggatggggggaaacaaccaaaaatcaggngccttttatttggtggacacccggggggaccacaccgaattcttaggcccctcgccaaccggcccactgggcccttgcctccctccttttttttttc

SEQ ID NO: 713128 - DNA, 1310 bp, Homo sapiens
  misc_feature (1042)..(1042): n is a, c, g, or t
  misc_feature (1264)..(1264): n is a, c, g, or t
cggactggtggtgtggtgatcatcccaggtttcgggctgtcatgcgttatctcacatggaagcatggaaatccgagacgttccacctctgtccttggcggtgattctggttagggcctgcacggtacttctgagattgtcgcacagagacctgttccacacgcatgcacgtccaaccgttccgtactgctagtatcctgccgttggcagcggaaccatctcctcgaaggccacgaagccgaggtctacgtgtgaactctcgtagtaggctcaatgcgtggcacaaatttggcattgcagctcctaacaggagactagaaccgagcagcgagggtgacagttggggaccatgagggagactgacggaggtcagctgaaggccttggggtagggtcagagtactccagaacgcgggccgttgggtttcaggtgggtgctatactggtgcaccgcgtgaaagggtgcgaggggatacccgcgtaacgcgtgctagcccaaggaaagcgcattttaccgagtgaagcgcacattcaatgaacttggtgatggcgggatgcttgtatcatagggatacatgggtttggaaaaaaactacgtggggtgcgtgtgtcggcgctggaagtagcttatccttccggatgtgtcttaggaataggtcagggagggtggcaccgatggacttttggacacggccctcccccagggattcctttgtggtcgcctttcttgcaatgcaggcgtgagactaattgttacttcgctttgttggtacatagttttgtcaacttttttcaacgcgcccggtagaatttcgcaggacatatcaaaagccacctaattacttctaacattttcaggctagataacccctctggataggcggatttataccattttccaataataattctttcatttattggcaaattatagagcgccaaggtaggggtacaaagcggctctaagattattgtgtacacccttcgggtggagaaaaggatatacaggcggggtgggtgaagagcaaatttttacccgtgtanccatttagaaagaggacattgttcacacatatatatccatttccaggagagtgggtgttgacaaacagcccccatatgtgtgaatggacagggccacatttcgagctgggacttgcgcgatcatgggtcgagtttatccattggacattcaggacagcgcgctgcagacacggtaatatcgtgggcgaagacctcaggagaagacagcggaagactctccanacgtgcatcgaacactataagtttgagcgaggagagtgatatttgg

SEQ ID NO: 713129 - DNA, 357 bp, Homo sapiens
  misc_feature (4)..(4): n is a, c, g, or t
tgcncatgcacagtggagagatggttaacgtcattaatcaataagaaaaggcaaatcaaagtcacaatgtaggggctgggtgcggtggctcacacctgtaatccctggaccagcacattgggaggctgacgcaggtgaatcacgaggtcaagataccgagaccatcctggccaacatggtgaaaccctgtgtctactaaaaatacaaaaattagctgggcgtggtggtgggcacacacctgtagtcccagctacttgggaggctgaggcaggagaattgcttgaacccaggaggcagagggtgcagtgggccgagatcgtgccattacactccaagctggcaacagagcaagactcc

SEQ ID NO: 713130 - DNA, 469 bp, Homo sapiens
aacagaggacattgggaggcagatgcaggagcgcagaggatcaaacagcacgtgaaactcgcacagacatctcacacaggtaccatgaaggtctccgcggcagccctcgctgtcatcctctattgctactgacctctgcgctcctgcatctgcctccccatattcctcggacagcatcaccctgctgaattgccaatattgcccgaacattgccccgagcacacatcaaggagtctcactacaccagtggcacgtgctccaacccaacaatcgtctaagtcacccgaaagcaccgccaagtgtgtgccaaaccagagaagaaatgggttcgggagtacatcaactcttaggagatgagctgggatggacagtccttgcccctgaacaatacacaaaatttgcctgtatctagcttgcacaagtcctagcttggaaggctacccctcactatcctacccctccttgtcca

SEQ ID NO: 713131 - DNA, 417 bp, Homo sapiens
atcagtctcagcatttttttcagccttgaagttaccagtttaaatgaatacagagtactccagttcaggatgacataacaaaaccaaaatcctaacaatatgagcaacaaataggtttaaataactaaactaaagaaacaaaaatattcaggcaatgttaaataaagaatagagctagcattcagcaaaagaacaagacagacatctaagaatcaacctggggcagctccccacagcttccagttttgccatctactgaaacattaagtgaggagaagtgaatgaataaaatcctgaataatagctttcagagagcgagacagaatgagatcaggtgtgtagaagcagcaaaattgccctgaaaggagaaactgtgcctcagtgacttccacattctaccagagactacaaaaaaaa

SEQ ID NO: 713132 - DNA, 887 bp, Homo sapiens
agcgggctgcgggctcgagaaccgagctggagctggtttgatccttcagtgtcctaaaacgcgcgggcgtgcgttctgggtttattgattgatttccgccggcgcgggagcctctgcagagatgagagcgctgatagatggagattgggcagacggattcttttagagctgcggaacaggactccctctgatgttgcataaggaacttgtcctggacaacagtcggtcgcaaatgacagtgcataactcgaaggcctcgcagatgaatttgaagaactggaattcctatggtatcaaatcaaccgtagagtcctcacctcaatcgcaagacttaccaaagtgttaagacagaacttaagaaagcttgtaactaggtcgtatgacagagtctcagggtggccttgtgatagtattcgtgcagaaacatgtgtcccgagatgctcacggcatctaagagttttagaagtgtgcaacccagaatagttagaaaggatcctctagacactgaatacgaggccacgtgagaataatgttaggagaagacctgctacagaggcttaggaccttttgcgattttgcgaggtagcctaaccttgaacgagtaccgagagaaactgtgttcaaggctcctcccgcagtctcacatatctcgacggctatgaccgggacgacaaggaggccctgactcggatgctgagggcgtacgtggagggcctggattgatgaggaatgaggatgagggatgcacgacgagtatgatgaccgatgctccagtattgtaagacgaagaggcgagaggctgaggatgagtcaggtgacaagtagcacgtgacttgagaggggaatcaggataaccaagttataccgagccggctatccgcgcaata

SEQ ID NO: 713133 - DNA, 447 bp, Homo sapiens
  misc_feature (170)..(170): n is a, c, g, or t
  misc_feature (409)..(409): n is a, c, g, or t
  misc_feature (438)..(438): n is a, c, g, or t
acaggctccctggctggcgtcagctaaagtggctgttgggtgtccgcaggcttctgcctggccgccgccgcctataagctaccaggaggagctttacgacttcccgtcctgcgggaagtggcgggcacgatcgcaaggtagcgcagaagcttctcaatggccagcgccanctgcaagccccggcggcgcactcgcctcacctgagcctgggaggaaaattcttccaaggatgatctccactcagagctgaggaacttttctactcagcagatgtgtgtgttttgatgttgacagcacggtcatcagtgaagaaggaatcggacggatctcgctctgtcaccaggctggagtgcaatggtgcaatctcggctcactgcaacctccgcctcctgggttcaagcaattctcntgcctccacctgcctgagttagctgaaantacaggatt

SEQ ID NO: 713134 - DNA, 633 bp, Homo sapiens
tgtaacgctccactgactgatagagcgaccggcgaccatggcgcccggagtggaccgcgggccgacgccgtactggaggttgcgccgtcggtggcgcccgcgactgctcgctgctgattcatcccggttggcagccgcgcaggagccgtccccggagctgttgtgttctcagaacgacaaagacgaaaatctgtgaagagtgcctgaagaaccgtctccgtgtcttgtggtgcaacactaacagaggcttgtctgggactacccagttacaaagcgtcttgccaccgggtttcccttttgtaaatttgagctctgcacgctggggagtttggtgggtgaaccttgtgaggcgctgatcatcaccatgtcggtagtcgggggaacccctccgtcgtgggcatgccaatctgtgctgtgttgcttgcaggaggaagaggagccggaagccggacaggagttgaggagaagggcatgcggtgagccggtaggagaggcggaatacggcaggagggaaccggagagcagaggattgaaggacaaggaccatgattgaaaatccggaaaaaaatattattgggcctgttttaaacgaaagaaaaacccgtattgctaaatttgggaaaaacaacttaa

SEQ ID NO: 713135 - DNA, 151 bp, Homo sapiens
gaacgagcaagttgaacttctcttcttcagcgtcgagctgcttctgatagtccttcttgtcctcgatggccatggagtgatcgaccaccttgaggtagtcggggatttcatcggccttggtgtagggtccggtgatgttgtcgagagcgcg

SEQ ID NO: 713136 - DNA, 188 bp, Homo sapiens
ttggatcatagttagatatcctaaggccagttcctagaactctaagtagaaggcatggttaagtattatgaagaagcaacccattccattactgtactatctctatatccccctgagagattcaccctctattcttaaggagaaagggctgcagatctccaattgctgaaagcgacatccttgcttga

SEQ ID NO: 713137 - DNA, 153 bp, Homo sapiens
agacttgtaatgggctcggcatatataccacctcgaagccccgtattatgcactcgctccacaaaagctgagttggccacctgctcttatgctctcaccatgtgatgtaatatgatggactatctgtgtctaccttcatgcgcagaaacatac

SEQ ID NO: 713138 - DNA, 685 bp, Homo sapiens
tgatgttcttgtgttctccccgcccgtgtccgcccgaccctgcgcccgcgatgctggcgctgcgctgcgtgctcccgctggctctggcctgctctcctgtccctgctgtctcctgatgcctgcatgctgcactccccagcgtgcccagctgctctgcaagcaatggtgctcctgtgctgaccctgtcctcttcctcctcctccgtggaaccctgctcgatgtaccttggactgtggactgccaacctgtgtgaatgcctgctctgtgcctgctgttgtgttgcttgtgagcttgaatgtgcagatgtcgtcccaaaagacatgcttgagaacttcagagccctgtgcacttggtgagaacgtgtgcttcggctacaaagtgctccaccttccacagtggtgatcccttccttcatgttgccatgtgcggtgcgacttcaccaacccatcaatgtgcacatgtgcgtggaagtccatctactgtgaagccgctttcctgacgagaactttacactgaagcacgtggggccaggtgtcctgtccatgtgctaatgctggtcctaacaccaacggctcccagttcttcatctgcaccataaagacagactggttggcatgggcaagcatgtagtgtacggtcacgtcaaagagggcatagacgtcgtgaagaaaatagaatctatcgg

SEQ ID NO: 713139 - DNA, 1813 bp, Homo sapiens
  misc_feature (461)..(461): n is a, c, g, or t
  misc_feature (466)..(466): n is a, c, g, or t
  misc_feature (472)..(472): n is a, c, g, or t
  misc_feature (480)..(480): n is a, c, g, or t
  misc_feature (498)..(498): n is a, c, g, or t
  misc_feature (505)..(505): n is a, c, g, or t
  misc_feature (549)..(549): n is a, c, g, or t
aaatttctttgtaaggcaaagcaatagtatgtatatactttcctaaagatgtcaagttcagtttgcttaaatttaacagtacatgtgacactttctgtttgaagaataagttggttttaagtttataccaaacaaaagcatctcttttgttttgcaaaatctgaaactttgatctttctagttgtgacttcttgtaaatatgttttatataaatattctatgaattggttattaacaaggtaaagaaagattgatatgtaagctgattcttaaacattaattttctggagataacttttttaaaattatgctttaaaaatattttaacacatgttatcaaaaaggaactgaaatatcttaggcataaaagacatctctagaggtcattattcagtttccagaaagtactgaaactatctctgacagattgatacgttttctgcatttatagctctctgganagagnttctgnatatttancaattctcactgtgaggnatatttnaagtatttcaaatttaaatgctcatttcagattcagatattatnatcatcatcattatttggttctggcttcagtaaaaatgtgaaaaacacttttccatcttctgataatatttcatatttataaaattattattaagttataactcagctttttcatttatgctttaaatccttttattatctcatcacaaccatctttgactgtttatcagaaatggttctcttttgtacattgaccattattttatagatcacatttaagttaatataaatcatgcctataaatttcagcctgcttattttttataatctagtcagatatcagctagacatattgttaccaagtttggagagccttgggataagctagtttcaaaactggctgttagcatccctcagttgtgttttgggagcaaaggacacccttaaaaaagggaggcagttatattttgtgagcattataaaataaacttaaattctcataaaattagtgaatatgtttggaacagtgtgaattacgtgtgtgctacatgaagtatatagaattcatttgaagtaggaagtctggccttacctcaaaagacagtcattcaattaagcagttaaacataagccaccataagaagtttttttgatacttagagagagaaaggcaacgtgtattaaaattccgggaccattatctcaggagtgctgtgttattattgactgggggcctgctgggacctagaaatatatctaaaatgtggcaggtggttaattagagcatatgaataaatatatataaatttggttaaagcgttcactttatgggtaaactataactcaattaaaaagaaaaaatatgcaccaaagaaaataaataatgaagtggaaatatagagcctctaaaatcaaagttagaaaaggcagattattcaaatttggcggaattgatggtcaacgggaatgatggtgatagaatcaagtctcacctaagctcatggacactagggattcggtccaagggttaaatcgactgcgtgtaactgaattttttcaagacaataaattaacaggcccaacgtttcactggtaattggggtcgccgtggtgtgtatcccataaggggttatgttctaacatggccgtaattttcaatctgcaccactttacctcgtttcttcggcgacaccacgaaaacggccaaaacattttccatcatatataaggactcacccatttttcttcaacacttttcccaccggcccttctcacactggtccacttaaccctcttcgaacgccttgaatgccaaattccccaa

SEQ ID NO: 713140 - DNA, 430 bp, Homo sapiens
  misc_feature (66)..(66): n is a, c, g, or t
  misc_feature (89)..(89): n is a, c, g, or t
  misc_feature (117)..(117): n is a, c, g, or t
  misc_feature (171)..(171): n is a, c, g, or t
  misc_feature (267)..(267): n is a, c, g, or t
  misc_feature (282)..(282): n is a, c, g, or t
  misc_feature (315)..(315): n is a, c, g, or t
  misc_feature (340)..(340): n is a, c, g, or t
  misc_feature (403)..(403): n is a, c, g, or t
ccatcccaaaaaaaaaaaaaaaaaaagatgtattagaatctggccacaccccaatgtgtgtgtagnacttagaaatgctttagcaaccnccaaacaaaaacttcaaagtggagtagnggcacagagaccatatggcctgcagaatggaaaatgtcacctgtaaggcctctnaccagaaaaatttgccaaccgcacaactagggtgtgatggagaatcccaaggtgacccttccctcccaaagccactcagggaatcatctgaacccntgtggcctgcatttnaacaaacagagacacaaacacatttttaaagangctagaaatcttccctcccaaaacnaagtgtggttaatcaattgaccaaaacccagttttctttctttctatcaatcttaaaatgggngacagagcaagatcttctgtctcggaa

SEQ ID NO: 713141 - DNA, 93 bp, Homo sapiens
ttcaagcttctaacgatgtacggggacatgtctcaattctttgtatatgcattcttttcagatgtattaaacaaacaaaaaccctacaaaaaa

SEQ ID NO: 713142 - DNA, 453 bp, Homo sapiens
  misc_feature (53)..(53): n is a, c, g, or t
  misc_feature (143)..(143): n is a, c, g, or t
  misc_feature (280)..(280): n is a, c, g, or t
  misc_feature (427)..(427): n is a, c, g, or t
  misc_feature (450)..(450): n is a, c, g, or t
ctgtgagtcctagagtctagctctgtcatccaggctggagttgtactggtgtnatctcggctcactgcaacatcctcctcccgggttcaagagattctcctgcttcagcctcccgagtagctgggactactggcgcatgcacncacgactggctaatttttgtattttttagtagagatggggtttcaccatcttggccaggctggtctcgaactcctgacctcaggtgatccacccgtctcggcctcctaaagtgctggcattacaggcgtgacaactngtgcccagccaccagcagtaaatttttgaggaacttaaactaccagccttatcttggtagataccccatcttctcaaccttgatgagccacaggattttgttgttactgttatttgaatttttataattccaagccatttaaagggnacaagtgtggtcagctttattangat

SEQ ID NO: 713143 - DNA, 1633 bp, Homo sapiens
agcggagtgacgcactagggacgcgccctgtgggggcatggcgtccgatcgaggcgggcgttcacgggcggccagggttgagtcccgggtcggggccgggggattgccggcgcatcagggccgagggctggggctggcggggccgctcgctgcctctcgctcgcagcagcggcggcaggcgcgggcgagggccacggggagaggagacgcagccccgcgggtggcacgctcggccgggccccggcccgcgctcaacgggcgcgatgctcttctcgctccgggagctggtgcagtggctaggcttcgccaccttcgagatcttcgtgcacctgctggccctgttggtgttctctgtgctgctggcactgcgtgtggatggcctggtcccgggcctctcctggtggaacgtgttcgtgcctttcttcgccgctgacgggctcagcacctacttcaccaccatcgtgtccgtgcgcctcttccaggatggagagaagcggctggcggtgctccgccttttctgggtacttacggtcctgagtctcaagttcgtcttcgagatgctgttgtgccagaagctggcggagcagactcgggagctctggttcggcctcattacgtccccgctcttcattctcctgcagctgctcatgatccgcgcctgtcgggtcaactagcctcaccgaggtgccggagagggagcgctggacaactagaatgttgacctcgagccgaggccctacttgcagcgcaccggaggagaggctctctagtctgaaggcaccgccggcttgcgccgagctgagtgccgggttccctattccaatcctgtttgaaatggttcttcagcagggcttaaaagagcagccttcatcctgaaaatgtatttccttttgtttaatgctttgagtagataatcctgaattgaggtcatgaggaggccccccaggccagacagtcctgaacccctctgacacttggaaactgaatataagtaaaatgtccaggtggactctgagtatttcctgtggatcctgggaaagtactgttgcacaaaggctgcaaagctggactcaggaatgtcctccaaccagcagcgctgacctaagagctccctgtgccgtctatccagaccagacttcggtagatgcctttgttagatctatcacatgtaaacgagcttgtatctccttccctgtgccacgagagagattggctttttattccagtctaggcagagacagaagaatgttgaataagagcacgattagagtcctgtctggttatctgttgcccaagaaaagaactctgctgtccaggcactgcttggcttactatcccagcaaagactgcagttttgtggacttttgaccaccttgggctggcactcttagcacacctgagacagatttaagcctccctaagagactgaagagaggaacaggtgtcagatactcataggcactgagatctacaaatgggaagcttgtgagtggcccatctttgttggcctacgaactttggtttgatgccagtcaggtgccacatgagaacctttgctgagatgcaaataaagtaagagaatgttttcccaaggaagaagtggtatcaagtaaataaaaaaagtcgtttcgat

SEQ ID NO: 713144 - DNA, 365 bp, Homo sapiens
  misc_feature (101)..(101): n is a, c, g, or t
gagttgaagtcagcagatagaaatgcttggggttaagataaggggggctgtggaagctgaggtacttgttatgtagatggagcctccaggtggcacgctcnagagagaatagatggtaactgtctcttatcagaccttaaaaggtgccagactcttaattaaatctctcctggatcaggaaaagacctggaaagggaaggggattttctacagagtgtagattttccccacaagaaatggctttgtgctgggcgttgtggcttacacctgtaatcccagcattttgggaggccaaggcaggtggatcacctgaggtcaggagttcaaggccagcctggccaacgtgatgaaatcccatctctact

SEQ ID NO: 713145 - DNA, 653 bp, Homo sapiens
taaaatccattctggcacttggtgatgaatgtgttggctggcagctaagaacttgctagaatgcaagtatgcaagtcttcaccatttatatcgacacttcctttccaggaaagagcctttctaatctttgaatcagtggatttatcaatttgcataaaatatgccatcctcaatgaacacatttatcatctaccacttaactttccttctgttaaaaaaaaaaaaaaagcaaattcacctttcctgttgattcagcagcttttaatttcagctgtgcttgggttgaagcttgtttaagggttagagaaggagccattcacttagaaagggggagaaagcaggaattaaaattgattctttttcttatttctccattgatttttttagtgtttctctgtttaaattggtttaaattacccaatttaggtttagattgctaatttaaattgttaaaatttactgggcttgttctccaattattgcttgtttaacagtttgtacttcttggttgtttcgtattttacctaactcttgagagatcttcagagcagcccagctgattttaaagaaggcttccaactgcccaggatatgcatcagcttcctgaacaaagaaaagaacaccccaggatcaacagaagctactatcaatcc

SEQ ID NO: 713146 - DNA, 124 bp, Homo sapiens
gctcgaattcaagcttctaacgatgtacggggacatgagaacctttgctgagatgcaaataaagtaagagaatgttttcccaaggaagaagtggtatcaagtaaataaaaaaagtcgtttcgat

SEQ ID NO: 713147 - DNA, 222 bp, Homo sapiens
cagcaagtttttagcagggccttcaaagtaaaaagaatttgagccccgcatagtgtcccgcccctgtgatcccagctacttaggaggttgaggctgggaggatcccttgagcccaggagtttgaggctttagtgatttaagatcatgcccctgccctccagcctgggcaacagagtgagaccctgtttttaaaaaaaaataaagataatttagctaccttta

SEQ ID NO: 713148 - DNA, 1693 bp, Homo sapiens
  misc_feature (1630)..(1630): n is a, c, g, or t
  misc_feature (1632)..(1632): n is a, c, g, or t
  misc_feature (1652)..(1652): n is a, c, g, or t
  misc_feature (1657)..(1657): n is a, c, g, or t
  misc_feature (1675)..(1676): n is a, c, g, or t
  misc_feature (1678)..(1680): n is a, c, g, or t
  misc_feature (1682)..(1682): n is a, c, g, or t
agcggagtgacgcactagggacgcgccctgtgggggcatggcgtccgatcgaggcgggcgttcacgggcggccagggttgagtcccgggtcggggccgggggattgccggcgcatcagggccgagggctggggctggcggggccgctcgctgcctctcgctcgcagcagcggcggcaggcgcgggcgagggccacggggagaggagacgcagccccgcgggtggcacgctcggccgggccccggcccgcgctcaacgggcgcgatgctcttctcgctccgggagctggtgcagtggctaggcttcgccaccttcgagatcttcgtgcacctgctggccctgttggtgttctctgtgctgctggcactgcgtgtggatggcctggtcccgggcctctcctggtggaacgtgttcgtgcctttcttcgccgctgacgggctcagcacctacttcaccaccatcgtgtccgtgcgcctcttccaggatggagagaagcggctggcggtgctccgccttttctgggtacttacggtcctgagtctcaagttcgtcttcgagatgctgttgtgccagaagctggcggagcagactcgggagctctggttcggcctcattacgtccccgctcttcattctcctgcagctgctcatgatccgcgcctgtcgggtcaactagcctcaccgaggtgccggagagggagcgctggacaactagaatgttgacctcgagccgaggccctacttgcagcgcaccggaggagaggctctctagtctgaaggcaccgccggcttgcgccgagctgagtgccgggttccctattccaatcctgtttgaaatggttcttcagcagggcttaaaagagcagccttcatcctgaaaatgtatttccttttgtttaatgctttgagtagataatcctgaattgaggtcatgaggaggccccccaggccagacagtcctgaacccctctgacacttggaaactgaatataagtaaaatgtccaggtggactctgagtatttcctgtggatcctgggaaagtactgttgcacaaaggctgcaaagctggactcaggaatgtcctccaaccagcagcgctgacctaagagctccctgtgccgtctatccagaccagacttcggtagatgcctttgttagatctatcacatgtaaacgagcttgtatctccttccctgtgccacgagagagattggctttttattccagtctaggcagagacagaagaatgttgaataagagcacgattagagtcctgtctggttatctgttgcccaagaaaagaactctgctgtccaggcactgcttggcttactatcccagcaaagactgcagttttgtggacttttgaccaccttgggctggcactcttagcacacctgagacagatttaagcctccctaagagactgaagagaggaacaggtgtcagatactcataggcactgagatctacaaatgggaagcttgtgagtggcccatctttgttggcctacgaactttggtttgatgccagtcaggtgccacatgagaacctttgctgagatgcaaatgggaagcttgtgagtggcccatctttgttggcctacgaactttggtttgatgccagtcagntnccacatgagaacctttgctnagatncaaataaagtaagagaanntnnncntgagaaaaggg

SEQ ID NO: 713149 - DNA, 107 bp, Homo sapiens
gcattgacaagctgacagagaaatcccaggtatcagaagatggtaccttgaggtccctagagcctgaatcccagtcaagttcagcggaaggcagcccgtctgaaggg

SEQ ID NO: 713150 - DNA, 1590 bp, Homo sapiens
  misc_feature (1527)..(1527): n is a, c, g, or t
  misc_feature (1529)..(1529): n is a, c, g, or t
  misc_feature (1549)..(1549): n is a, c, g, or t
  misc_feature (1554)..(1554): n is a, c, g, or t
  misc_feature (1572)..(1573): n is a, c, g, or t
  misc_feature (1575)..(1577): n is a, c, g, or t
  misc_feature (1579)..(1579): n is a, c, g, or t
agcggagtgacgcactagggacgcgccctgtgggggcatggcgtccgatcgaggcgggcgttcacgggcggccagggttgagtcccgggtcggggccgggggattgccggcgcatcagggccgagggctggggctggcggggccgctcgctgcctctcgctcgcagcagcggcggcaggcgcgggcgagggccacggggagaggagacgcagccccgcgggtggcacgctcggccgggccccggcccgcgctcaacgggcgcgatgctcttctcgctccgggagctggtgcagtggctaggcttcgccaccttcgagatcttcgtgcacctgctggccctgttggtgttctctgtgctgctggcactgcgtgtggatggcctggtcccgggcctctcctggtggaacgtgttcgtgcctttcttcgccgctgacgggctcagcacctacttcaccaccatcgtgtccgtgcgcctcttccaggatggagagaagcggctggcggtgctccgccttttctgggtacttacggtcctgagtctcaagttcgtcttcgagatgctgttgtgccagaagctggcggagcagactcgggagctctggttcggcctcattacgtccccgctcttcattctcctgcagctgctcatgatccgcgcctgtcgggtcaactagcctcaccgaggtgccggagagggagcgctggacaactagaatgttgacctcgagccgaggccctacttgcagcgcaccggaggagaggctctctagtctgaaggcaccgccggcttgcgccgagctgagtgccgggttccctattccaatcctgtttgaaatggttcttcagcagggcttaaaagagcagccttcatcctgaaaatgtatttccttttgtttaatgctttgagtagataatcctgaattgaggtcatgaggaggccccccaggccagacagtcctgaacccctctgacacttggaaactgaatataagtaaaatgtccaggtggactctgagtatttcctgtggatcctgggaaagtactgttgcacaaaggctgcaaagctggactcaggaatgtcctccaaccagcagcgctgacctaagagctccctgtgccgtctatccagaccagacttcggtagatgcctttgttagatctatcacatgtaaacgagcttgtatctccttccctgtgccacgagagagattggctttttattccagtctaggcagagacagaagaatgttgaataagagcacgattagagtcctgtctggttatctgttgcccaagaaaagaactctgctgtccaggcactgcttggcttactatcccagcaaagactgcagttttgtggacttttgaccaccttgggctggcactcttagcacacctgagacagatttaagcctccctaagagactgaagagaggaacaggtgtcagatactcataggcactgagatctacaaatgggaagcttgtgagtggcccatctttgttggcctacgagatgccagtcagntnccacatgagaacctttgctnagatncaaataaagtaagagaanntnnncntgagaaaaggg

SEQ ID NO: 713151 - DNA, 554 bp, Homo sapiens
gccaccacctgccccgggcaagcacgtgcggactacgctacaggcagccaggatgggcaaggagaagcgcgagagaagaacgatcaccgcagcgcggaaaggtagacgaagaccgtcgagaaatggcaacgaagaagaaggcgatcagtaggaaccatggatgatagaggtcatacttcagtatataggtggatctgatggagtatcatgcgaagtaaatccagaaattattcaaagatatcagggaatggggccatgatgaagatgacatgacgctgtaaggcatgttaacccaacatgctacacatgtggaaatttgtcaagctgtgagacctccaattgccggcagtgtatgagagtgacaccgtggatatgaaagaacaagttcacgttacaagcgatgccgtgacactcaggaagtgacctttccctaatcaatggccttcaatggttgatcaatatccaaaagggttatctttgcatgaggtcagttccaaagatatatctaagttccatgaccaacagatggcttgcaagacaaggaccagaatgac

SEQ ID NO: 713152 - DNA, 1157 bp, Homo sapiens
ggtctgacggtcagtggatcggtgggtttatctcaaggcctgagtagccggtaacaaacgagggttcccgtggattggaccgacgcagccatgctgggcatggtagcatgcgcctgtagtcccagctacttgggaggctgaggcaggagaatcgcttgaacccgggaagcagaggtttcagtgagcagagatcagcgccactgcactccagcctggacgacagagcgagacttcgccactgcactccagcctggacgacagagcgagacttcgtctcaaaagagaaaaaaacctctgcgacttgatatcaaaagaaagctaactgctagatctgatcgagttaagagtgtggatctgatcctacagagccatggatgtggcaagtctttacaatggacagtgtgtgtgtatggaatcatgaaacacagaactggtgcaagacatttgcacgtatgtgatcttcctgttcgaggctgcaaagtatgttgcagggacacgcaattggcgtgagacaggagcgggctgccatgcagatacagaggtgttcaactttacaataactctggagcagacgtccatatgtacggaaagcacaacatcagacagagcacttcagactgaaatgggctgtacccattacgaatcaccaggcacatttaccaatgctaaacatatgacaagaatgagagcacgagtggaggatcagtttcacagaccaccggagcaactaggggtataacacacatagagggaacttggcatacaacaaaaggtaggcaatatagaaagggacacagacacacagagcaatagtggagtcagatctgcaaggaaattatgcatgaaaaccacaagccccacgaaagcaattcaacgcaacactcagggctatggagccaagggagtgaccgtatccctatagtggagacgaggaggagctaaatcgacgggctgatagggcaaatgttaggtacatattgcttatcgggcatcaacacaatagcatcagtttacaagagagatgggcacggacacatactgaacaaataggagagagtagatacaacaatgagcagattggagaaaataccaaaagcaaggtgtagtagtgcaggagcatcaaaatgcagcagcaggagaccgtaaacagtattaag

SEQ ID NO: 713153 - DNA, 630 bp, Homo sapiens
ggcgtcataaggcttcggatctgttgctcttcctattgaccattacgcatccgcatcccgtcgccgcgtatcaagcgccgcagaggtttccggtaccgcatctagtagtcgtgccattgccattggtcttggtggtgccagttagatcaccacttagtgtgcgtatagtgtttgcgtcagcgtttacgatcgcgtcagcagacaattcgcgcattaatggtagcgcagcgtgaatatgtgcgtccggttcggtcatggcaaccggtggcagtgattcatcagccacagccggcggcatatgcacaaaggcaggcgcgtcgtcgtgtctcggtggtagggcagccgcagagggtggcggtattgccgccaccattgccgtcagtgggcgcatcgcctatgccatactacccctggcccccactagtcgtgccatcgtccgccgtattggtggtagtgaccgtcccttcttcctcgctaaatcctaaggccatcacacgttcttcctggacgatgttagcctatcgcttgaccaatcggttctgaagcagttgcagatcgtgggccgtgtgtaaaggtggagcctcgcacaaggccacacaacagactatccttaatcagaaatgtgaaatc

SEQ ID NO: 713154 - DNA, 633 bp, Homo sapiens
taggcatgggcgggactcgctgaggtgcgaaaactgtagccagggcagggcttttgaccatctacttgggcgtgaagggtgcggcgcccgcacgaaggggcgtcccagacttggaggcgtgggcccggatgggaggggcggggccgagtgcagtatccctcgcagtatggcgaggcctaggagtatcagagtgctgatcggactatatgtcatggtcgcgcgaagcaggcggagcggcggttagaaggcacccgggggaggatccctccagtaagttctgacccatctaggagcagccgggagccttgctttctagctgtgtggaggacaccttgtcccctcataaccacagtttcttcgccgttcgttcacctacattggcgccccaatggtctagcacgctgacaaggtgcgtactaagggagggggatgcacagccggtttaccattctttgtgccagactatgtctcacaacgtggcacatacacccagggggttaagacatcttatcactggaagtaactagccctgtggcacacagcatattaagaacgaaactttatctggccaattacatagaatataattgcacttcttacttcgtaacaatctcaattataaccaccacgcta

SEQ ID NO: 713155 - DNA, 1110 bp, Homo sapiens
ggagagaactagtctcaagtttttgtgtttttttttgggtcagaaaaaattttttaaataaaagagtaggtatccaggggttaagttttgggtaagcctcggtgtgggcccgtcgggcctcgggcacgctcgaacttccgggccctgggagcggactgtaagggtatgggggtgggctagtgggggggtccctgggggcctgtgcagagaaagtggccgggatacacactctctgtcgggcgcctggagagagggaccggagaaacgcaggagaacagggcgccacaaggcccttaagggggagaggtccaggggcacagcggggtcagaaagcgggaggagactctggcccctcgttggcctctggaggagataggcgggttggcggggcgcccggtgctgggtgtcacaccgcgcgcggtgggcactataactctatacagttggggggtgtaactcttctctggagaaccccgagaactataacatcacatgttatatggggtccccccacaaaaaaaccaaacggaggccgtctcgtggggtttaccccgcggacccaggaaagagatctactcaatactatccgcgggacataaaacacgcggggaaggggggaccagagagggcggacgcgggagagggaggcgaatctcccaataaaaaacaaaccctcacatatacaaaaacaacacacccctgggggtatgagaaatggtgggggcacgctggggcggaccctactaccagggggcccaaaaaacacccttggagaataaacttaggaccccacaaaaggccctcacaaggggagaaagaaaaatcccgcgggaggccacctggggggggcaacccatagggggagacacgaaaacccttaaaagagagcaccctagggagacaaaggcgcggagacatgtccacatctcccccaatgaaaaggcggggcctacctgagcatccgccggaggggcaagagagaggataaggagacaacaacgcattagtagcaccgagggggagaaccatcagcaacgacacaggcgaggaaacacgaaacagagtggccaccccaggggagccctctcacaagggggaccgcacatgagg

SEQ ID NO: 713156 - DNA, 519 bp, Homo sapiens
cgtgggtcgggatccgttaccgtcttccccggcagccgccattgtcgcgctcggagcccctcagctcaggcggcctgaggcggaggcagctgtgctggcgggattggctggactgccaacaatggccgaggtgcccggggccactggtggctgacagcccgcacctgtcggcccgcagagccgccgggcgagccgcggcgagagcctgcaccccgcggaggcggagaagcagcagccgcagcacagcagcagctccaagtggcgttaccttggcgaatgatgaatcagcaaaagaagagaaatctgacttaaccggaacaattctacaggacgtacgaaggccaatagatttcatccttattcaacaagacaagaattcgggcactggagacaaagaagggtccgaattcgtacacagagttccattagcaagcatcccatatgacatgacaatggcaagctattacaagcatctaatgagagcagaacgtcggagaggttacatacgtggagctcttg

SEQ ID NO: 713157 - DNA, 102 bp, Homo sapiens
ttcatatcgagagctttcagccttagggtccagaagagcaatggaggaagtgacagctaatgttgcagttcttattgtatggcatgaaggcgctggatatga

SEQ ID NO: 713158 - DNA, 908 bp, Homo sapiens
  misc_feature (188)..(188): n is a, c, g, or t
  misc_feature (270)..(270): n is a, c, g, or t
gctcctgtgaccccacctggtgcccacccggccccttagacggggttaacccccccaccgaataatggccgtattctaatcatttgcaaaacccttcatagtaaaatataacaccttaacaccgcgagtctttgacacaccgcctcaaatgtgagaatacattccttcaagaaatgttttattctcgnacaatattggtcgggaagtaaaaacttcttaacagagcagccccagcctgaaatatacctgcgtacaccccagacttttcancccggtaacatggtttacccactgcatcgtagtatttcccttgccaccaaagtatccgcccctcccccttcattcccccgccggggggtagaaaccctcggccccaatataatttgggcctcacctgtaaaaccccttgggcctgtgtctattgttaattcaggaagccttgtgtaactgcccacgaagcttctagcgtgtgttgcccggggcaaaaccgcggggtcccgccctccccctcgcccgccgcggtgttatctgtttaccatatatttattgagtgagagagagagcgggagggtcttacaccactccatggtaaccgcagtgtggtttgtggccatcccccgggccccctcgtttcccccctcccgctcacctctccccacagatctcgcgagatacacgcagtgtcaccccctgcacacgctggcgctctcaacatgcctattttaaaacatagtgaatactagaacccactattaaacccaccactgttagttatatctttgttccacatctccccttgctacacgcaccaactctatcatgcagaagtgtgccgcacaattcaacttatagcaccattcttcatagcagaaaaatccctcaaaaaaattaaagcgtcccccacatac

SEQ ID NO: 713159 - DNA, 581 bp, Homo sapiens
agcaacctccaataattcattaacccattttctttttcttttttcatttaaaaatttttatttattttttatccagacgggatttcaccgtgttgcccaggctgatcttgaatttttggtttgaagtgatctgcctgcctcagccttccaaggtgctggaattacaggcatgagacaccatgcccggccttttagtcctttattttattttattttatttttggagacagagtctctgttgcccaggctggagtgtggtggcatgatcacagctcagtgtagactctacctcctggactcaatcaatcctctcatctcagccttgcatagctgggtctacaggaacacgccaccacacctggctaatttatttgtattttttgtagagacagggttttgccacattgctcaggctggtcttgaactcctgagctcaagcgatctgcctgccttggcctcccaaagtgttggggttacaggcaagagcatgtcgcccaggctagagttgattggctccatcatagctcactgtagccttgaactcctgggctcaagcaatacttttccctcggccttccaag

SEQ ID NO: 713160 - DNA, 166 bp, Homo sapiens
cctgcattctctctccctggacacagtccgttcccgtggttcctagcttccaagctcgtacaagacttgcatttacagggctggctgggcaggtttggggctggagggcctggagttggggtcccctggactgagggtcatggattgtgtgtcttctccatgaaga

SEQ ID NO: 713161 - DNA, 217 bp, Homo sapiens
gatcgaccaccggtggaacgggtgctgagcctgcactggccagcctggaatcgaccattcgcgatgtgcagcaggcgttggctaaatacagctcatgtgggagcaggcttctccaaagtgggtcagttaatacatcaagtgactgacacaccgcgttccagcaacgcacaagcctgctcccacattggatttgcgccgctcgttacattgcgcttaa

SEQ ID NO: 713162 - DNA, 875 bp, Homo sapiens
  misc_feature (13)..(13): n is a, c, g, or t
  misc_feature (54)..(54): n is a, c, g, or t
  misc_feature (172)..(172): n is a, c, g, or t
  misc_feature (178)..(178): n is a, c, g, or t
  misc_feature (181)..(181): n is a, c, g, or t
  misc_feature (192)..(192): n is a, c, g, or t
  misc_feature (210)..(210): n is a, c, g, or t
  misc_feature (212)..(212): n is a, c, g, or t
  misc_feature (214)..(214): n is a, c, g, or t
  misc_feature (225)..(225): n is a, c, g, or t
  misc_feature (227)..(227): n is a, c, g, or t
  misc_feature (243)..(243): n is a, c, g, or t
  misc_feature (484)..(484): n is a, c, g, or t
  misc_feature (784)..(784): n is a, c, g, or t
  misc_feature (826)..(826): n is a, c, g, or t
ggcctagagtggnggcgggaggtagtgagggctgcctgggaagcaggatggcanggagggggctggaggtggtggcggtggcagcttggatggccctgggaggggcaggcccggggcaaagcgtcagagctcagctctggatctggggtcctggataccaggcacctttgangaggcnccnaaggagtcatnaaacgggcttgtagagtnantnccctgcatatnanggctcaggtggggcanagtgggcccgtcctgcaccccatggtcctggggccccacccccacgctggctcacgggccctggccatgttgcctgctgctggtcagcgtacagcttcccagggccagccacctcggcttcacacctgcccagagctggcttctgtctgcctggacactcctcccatggctctggggctagggacacccagggctgccttggacacctggggctctcgtccagccagagcctctggcagtncctggggtcggggtcggggccggggccgagtcaggcctgcctgtctcgtggagctcagcaggttgccctcctgttgcatgaacctgggcagccacacacagctggggggcccctcacgcccctctttgtcgctcagacaccactccttctgggtgggcgacgtggtccgggtcatcggcgaccttgacacagtgaagcggctgcaggctgggcatggcgagtggacggacgacatggcccctgccctgggccgcgtcgggaaggtggtgaaagtgtttggagacgggaacctgcgtgtanagtcgctggtcagcggtggacctcagccctcctgcctggtgnctaccggccgaggaggatgcaacctggacgtggcgagcgcgccgggaga

SEQ ID NO: 713163 - DNA, 204 bp, Homo sapiens
tgcttcaacctggtgctatcgtccctatagcaggctgtgccgcgcctcatgctgcctggcggcccgagaggctcccttctgagcctctccttgctgctgatctgatcacctctggctttgtctcttgccgggccgtgctgtcctttgcgtccttcttgctcttccctccttcccttctctccttccctctcacatcaaagcgcg

SEQ ID NO: 713164 - DNA, 481 bp, Homo sapiens
taacataacatagctcattatatcggatgagaaaagggcttaatactgggtaatcatccacaccgtgatagagtacataaatcctggggaaagacatcagttccaaaaattagagggtaatgaatgacagtgacataaacttatctgaaaataatagtaaaatttccttataaaaatcaaataaccggacaggcgtggtggctcatgccggtaatcccagcacttttccaggtcaagggaggcagatcacttgaggtcaggagtccgagaccagctgggccaacatggtgaagtcccgtctctactgaaaatacaaaaataagcctggcgtggtggtgggcgccttgtaatcccagctactcgggagggtgaggcaggagaatcacttgaaccggggaggcagaggtggcagtgagctgagatcttgccatggcactccagccggggcgatagagtgagacccggtcttaaaaaaaaaaaa

SEQ ID NO: 713165 - DNA, 109 bp, Homo sapiens
ctcgagcattcctcccacttggctcccagagtgctggtatgcaggcaagagccaacataccggcgggaaagtttttctttatagaactttggtacctaaaaaaaaaaag

SEQ ID NO: 713166 - DNA, 315 bp, Homo sapiens
gtcgacgacatcaaaacccggttggcatccctccgtagagcagagaacctacggaaacacagaaggaataaagaacaaactagaactcgattctataaagatcccttcaagttccttaaaagtctcttcacgaaggaaaaaagtggagctctaaaaacaacaaagaaagacctagaggagcacctgagaacaacaaactctgatgacttaaagcgacatgaacatctggccatcccatcagatattccacccattgaacccccggaacataatattgagaccagcccttcgacatgataagaggtgaaagtcgac

SEQ ID NO: 713167 - DNA, 186 bp, Homo sapiens
gtcccatttgctcattagaatttcctctcacacaagtgggaaacagaaatcagtttctcccctgccaggtccttgggatggttgacccccgcctcagcagaagccttttgtgagtcggctaagggagctctcacacacctcggctctggggttgaaacctgagcctgcaatagagccctgaaatca

SEQ ID NO: 713168 - DNA, 137 bp, Homo sapiens
tcgatgagtaagtcactgcgttttgacacgacactttgctagatacgttcgcccgacagccgaccctacgttggtttcctccttttggctgctgtggttgatgctgctatcaacgtgggttacaagcatctcttcaa

SEQ ID NO: 713169 - DNA, 460 bp, Homo sapiens
ccgcccatagaagtgttccctgatcaccgcattcatgccaacatctactgtttattattattttttttattatggccatccttgcaggagcaacatggtatcacattgtggttttgattgcatttcccttatcattagtgatattgagcattttttcacatatttcttggccatttgtatatcttctttggagaatggccttagcccactttttgatgagactgcttgtttttttattttcttatagattggtttgagttggttatagattccagatattagtcctttttcagacgtatagatggtgaagatttttctcctactccgtgggttgcccatttactctgctgactgttccttttgctgtcgggctagtcggggctgtcgggctagtcgggggctgtcgggctagtcggggctgtcgggctagtcggggactgtcgggctagtcgggggggta

SEQ ID NO: 713170 - DNA, 854 bp, Homo sapiens
cagtgggttttccggaaggcctgggaacaggaggtcggagaagaaacaaggcctcctaaggtttcttggggcaacccaaaatttccagtgggattagacgttgacccccggcaattttcccctcccctcgcccataattcgtcggttatccccaccggcgtccaagtatttagctgacttcgcccacgactcccccggaagccatatgaaatgatctgcgtccaagtgcttctgaaccctaggatgtcatctttctgtttccaccgtaggtggcctgactggccatgtgtgattacgcccactcatccctagacctcgtatctacccgacacgtaatacgttgtagccccgatgtcccactatggcctatccataggagctgtatttgcccatcataggaggcttcattcactgatttcccctattctcaggcgtacaccctagacccaacctacgcccgaaatcccatttcactatctatattcatcggcgtataatctaactttctgtccccacaacactttctcggcctatccggaatgccccgacgttactcggactaccccgatgcatacaccacctggaacatcctatcatctgtaggctcattcatttctctacagccgtgatattaataattttcatgaattgagaagccttcgcttcgaagcggaaagtcctaatagtagaaggaccctccataaacctggagtgactatatggatgccccccaccctaccacacatttgaagacccgtatacattaatttagaccaaaaggaaggaatcgaacccccccaagctggtttcaagccaccccctggcctccatgacattttcaaaaagaaaaaaaa

SEQ ID NO: 713171 - DNA, 284 bp, Homo sapiens
  misc_feature (133)..(133): n is a, c, g, or t
ggggcccttttttccccccccgggccccggggcccccccccccaaaagggtttggggggggggggaatttaaaaaaggcccttttcctttcgggggggttttttaaaaaaaaatggcccggtcccggggttgngggaggggcccttttttccccccatttttaaccctaaaaaaaaggggcccccgggggggtcctgtttttaaaatttctggaaggaaacccccccccccccgggggcgggggcccggggggggggggggcccaaaaaatttttgggggggga

SEQ ID NO: 713172 - DNA, 147 bp, Homo sapiens
ggccgaggctaactagtcacagccctgatacgcccgctacatatttaccacgaacacaaagaggctcactcacccaccacagttaacaagctataagaaccctcattcacactgagaaaacaccctcatgttacatacaccaccccc

SEQ ID NO: 713173 - DNA, 185 bp, Homo sapiens
acgtcagcgagctgaagacggggggcggctgtatacttggcctgctcctaagtcttctgggtgggggcagtgttgcctgggcaagaactgcttcttcaattccttaacaactgcaaccaccatcacccagatctctctctctctttattttcagtttttttgctgttatccagcaacgaaccaca

SEQ ID NO: 713174 - DNA, 232 bp, Homo sapiens
acatgatacaatcgagctcggtaccttccaggctgattgcaggcgaatcacttgaacccaggagacacaggttgcagtgagctgagattgcgccactgtcactccatgccttgtgacagagcgagactccgtctcaaataaaaataaaaagatttactattaggcagggcatgctgtgctcactgcctgttaatcccaggcacgttgagatggccgagcacgcgacagatca

SEQ ID NO: 713175 - DNA, 496 bp, Homo sapiens
acccagcgtatggggatagcaacctctcaccctgggctaacctatcacaacccttggctgacaggctatgtggatgtggggctgatcccagccggcgcacgcgagatccagcatccaacacataaactaggcatgccaagcaaacacctgcgcggcactgattgagcacccgaagaattcttcctcaatggtggctgcaccatccagtgaagcggactaccacgtggcagggaacaccttcacatacgcacgcaggggcaactgggagaacctcacgtccccgggtcccaccaaggagcctgtctggatccaggtgcctgcctcccgtggcccaggcggggggagcagaggcggagtccccaggcccagcaccctccatggcaggtctcgtcctggaggagtgagccctggttcagtcacagagcctggctctgagccaggccctcctgctgcggcctctacctcagtttccccatctttaaaatggcccaatctt

SEQ ID NO: 713176 - DNA, 301 bp, Homo sapiens
gctctcaggtactccctagctccttgcaagacttgatcttggttacaaatttttcgtctatttatgcctttaaaatacttaatagaaactcattttgctcatgagtatttgattaggcatgcatacaattggagatatttacacatcagtattatgtcatgaggtaacattggtttggtactctcctcttcctggtcctctggtagcacacactggtaatctggatttctcagtttttctctgggactccccactggtttcacactgctctcctcccaaatggagtaatgtttatcccaga

SEQ ID NO: 713177 - DNA, 638 bp, Homo sapiens
  misc_feature (89)..(89): n is a, c, g, or t
  misc_feature (119)..(119): n is a, c, g, or t
  misc_feature (121)..(121): n is a, c, g, or t
  misc_feature (125)..(125): n is a, c, g, or t
  misc_feature (144)..(144): n is a, c, g, or t
  misc_feature (147)..(147): n is a, c, g, or t
  misc_feature (154)..(154): n is a, c, g, or t
  misc_feature (225)..(225): n is a, c, g, or t
  misc_feature (231)..(231): n is a, c, g, or t
  misc_feature (244)..(244): n is a, c, g, or t
  misc_feature (264)..(265): n is a, c, g, or t
  misc_feature (267)..(268): n is a, c, g, or t
  misc_feature (270)..(270): n is a, c, g, or t
  misc_feature (280)..(280): n is a, c, g, or t
  misc_feature (286)..(286): n is a, c, g, or t
  misc_feature (292)..(292): n is a, c, g, or t
  misc_feature (301)..(301): n is a, c, g, or t
  misc_feature (304)..(304): n is a, c, g, or t
  misc_feature (313)..(313): n is a, c, g, or t
  misc_feature (323)..(323): n is a, c, g, or t
  misc_feature (336)..(336): n is a, c, g, or t
  misc_feature (352)..(352): n is a, c, g, or t
  misc_feature (359)..(359): n is a, c, g, or t
  misc_feature (363)..(363): n is a, c, g, or t
  misc_feature (399)..(399): n is a, c, g, or t
  misc_feature (405)..(405): n is a, c, g, or t
  misc_feature (407)..(407): n is a, c, g, or t
  misc_feature (415)..(415): n is a, c, g, or t
  misc_feature (467)..(467): n is a, c, g, or t
  misc_feature (469)..(469): n is a, c, g, or t
  misc_feature (479)..(479): n is a, c, g, or t
  misc_feature (484)..(484): n is a, c, g, or t
  misc_feature (487)..(487): n is a, c, g, or t
  misc_feature (496)..(496): n is a, c, g, or t
aaaagttcctgctttattattccaaataatttttcccatgtaaaataaatgtccaatagttcctggtatgtgggaagataatgtttgtnaaagtcacaatgaagccttattgacggaancntggntatataaacagcacaagtnganaaaaggnttaatctccaaacctattagactggatgaagtaagatcagtaacggccaccttgcgaaattacaggaggtnaaaaanaacaataaaaaanaaaaaaaaacaaaactggtnngnngncacaattggnggtacntgcccntacgggggnatngcaccaggnaggtatactngcaagcaataaanatgaacaccatactgnccatgangtgncattgggggtctcattccttgtagatgtgggatgcntgactntngtggaatnatacctcaaattggtccaactggtggattaccgatgggggcctgtcctggcngnggaagattangttgntanttaggtaantgtggccttctctcttccagggatatatcctcatctggatggatcaacttactggttgcactagttgttgtaagtgtagcaggcttacttgttattgaaagccgctgaattaagctgaagtactatatatgattgtaactag

SEQ ID NO: 713178 - DNA, 831 bp, Homo sapiens
  misc_feature (271)..(271): n is a, c, g, or t
ctgaacgcatttctcttattcatttactatttctgagcatcggctaatggctcctgagtcccacttagtctgcagccacgatataagctatgtagatcctaatcacggacgttttgaacgaacgacttatagtccccattggtgcagcttacacaagtgcatgtgctgtgtcctttgccatgaacaccctgccataatcgtgcatcatctttgtggtcatccagcagtcttgcatatccggtacgactctccgaagtcaggggcagtgatnattgccattgaggactatcttgaagcctaagcaagcttggctcccgatatcgtcaccttggtttgattcaatccgaggatcattgtgctgtgagtcgccgaagacacgaagtcctcctatggagatagttctatctcgacactaatagacttgggttgttagtggacggccgtcctagaacaaatcaacagttctaatttaccctttcttataacgggaccctaatgacgtaaagagggatttctaaaaccggcctcgactgagggggatagcctggggtaaggactgtttcaacgcacctcgtggacatggggttcagcaattatttctaaggcaaggagccttaataagacccacagtatctgaaacagccacaacttcaaggactggaattcacgggcgctgtaagctccccaggacagactaactaggggcgtggacttcataacgtgggatattatgtgaaaggcggaccatttggaaccacgacgggtacctagggaaccgtagtccctctgctaccactcaggatgcgattgcccccgcgccctagatgttgg

SEQ ID NO: 713179 - DNA, 1857 bp, Homo sapiens
  misc_feature (864)..(864): n is a, c, g, or t
  misc_feature (1301)..(1301): n is a, c, g, or t
  misc_feature (1784)..(1784): n is a, c, g, or t
taggcccatttgaatatttggtttccaataagggaaatagtgggaattaggattagaattgtggtgaagtatagtccggatgctacttgtccaattgttgggtaaaaggggatagcttactgggtttgtccctcccgattacagtgttaaaatagaggaaggtctcgcggctagagagtccaataaatgtgattgggctacacgggggcagaaatattatggctctggttggtgtggggctactttatatcgcggagagaagagggggcattaattggctaagagaatagcagcgtattgcgtatcagctcatatgaggcgccaaggaaccgcccctccctaagattgggtcaaaggcacacaggaaactcggaaaaaattgggtgtaagcgcccatatcaaggaaatatatattccctctcgcgggggtctttgagattgttggcggagagagggggtgtgttaacaaagcggtgggtgggggcgctaccaaggggtagaataaacatatgtgttctgagggggtccccgcccctaaaagagaaagggttcctgtggggtgacagagcaaatacaatgtgtgttttacaagtgtgtccattttaaaggggcagcgaaacaacagggtgacaccgacacaaagtttataccgcgccggaaagggcagggctctcatttgagaacatcgtgtttccgtcccacacaacgggggcgttgtggacaccgcggcgtgtatagtacttacacctgcggagaaaaacttgttggcgaaaaggggtagagacaaccccccctaaaagaaggggggcggctaagtaaatatggaaaccccccccccgtttatctacgagtgactcgccaagnaacacacttatagagaaagggggatgtgagaacgagtgtgtcacagtctcactaaaacgaagggacgcggcagtgacaccacatcattagcaaaagacgcgggggcacaaacataacatctaaaactggttctatataataggagtggtgatacaaacccaacaccatctgtgtgttgtgagagcaacggttgttgtagcacagacagtttgtaccacaacttagtaggtagtatatcagccctcccctccccaacgaaagcaattcaaacttctagtgtgtactaaacaacaacaagaagttaggtttgtcgtcgccccccacaccacatgtattttagttgtctgagtgttttgagtcgggaggactatcaatctcataacacatactacgctagtgttatatatacacaagatagtgcgtgtaggcgcggaccncccacacaccataaatacgattagatatcttcgattaggtttggctccttctcgaccagcgtagaggcaggaaggagtataattcaatccctcctcacatatagacatgagaagagggtcgtgatgtcgtcgcgattccaatcgatcaatcaaagagcatggtatctagttatcataggacatcctatcgttcatcattagatatgtatagtgattaggatagactaaagataaaaaaaagtcgacactataatagatatgaaagcaaagcagaataacgtatagagaagagtaagagagagataaatacatacacaaataactaacagacacacagcaacataaaaacaaaatatatataatatcagtacaagaacaataagaagtagagtagcaaacttactacataagaatcacagacaacagcaagcatcatacgatatctatctttcttctctctctcttcttgttatctctctcctncccctcttcttcctcgcgtctcctcctcttccacctacatctcactactcctccctgcatacttcccacgtca

SEQ ID NO: 713180 - DNA, 1263 bp, Homo sapiens
gcgtccctggaccaaaagctgaagtatcaagatgacaagctgatcaagactgcagtgacaggcagccttagtgagaatgacccacttcgttttaagcctcatcccagcaatatgcatgcagcaagttgcagctctgcaggcatgcaggcaggcaagcatgcaagccagccaagcatgcacccagtctgcaggcttccagggcaaagaaatctgtgcaagggcagtgtctcaagcaacatcatgttcctccacgcgttggttcccagtaccattatgcatgaaacagaagctgcagcggcgcgcaagcacagcgtctagcacacggagcccaagcagacgggcattgcagcaagctctgtccattcagtgaactctaacacggagcagtaactccagaatgctcccaagaggcaaaatccgtgatggcgtcgggacatccaccaatggtataccacaggccaagaaaatcaggcagagcaccaaacaaccagggcatttcaacctcattggcagggcagcagcccattgcaatcgggttgcaggtgtatggcgaagccaggtccgaagtcaaaagacggcagcacgcacaagggggaccggggtgccaaaaacgggaggcaaacaactggttccaatagctagacctccaacaaaggtatccatataccccattaaaccagcacacttttcgaggttggcacccattgccgaggtcgcctctctaggacaccagaggagcgcacaactgtggtgatgccattacttggggcatggaagggattcacaggcatatcgcttaattgaacacacaaagctgggacacggaaaaggcaataaccccactcacagcaacaaaagcggtacgaggcgacacaagacaaaacaaccacaggggcacaacaccacgcgaaacggaccgggccggagcagaaaaatacaacgacgcagaagctgtagcaacgcatacttcgacgggcacgacaagtaatcatagtggggctacaatatccatggcaaggacattacgcgtagcgttagcatatgctcaaattatcggggtaataacatacagcatataggacaatataaaccaccggtgagtaagaaatcacacattaaacacaataggcattaaggtagactcataggggaacaacacatctgagattgacgaagaacaagagaaggagcaaatacaagtaaaacggatgaagaacacatagggagacgatgaaaccagtctgagagtagcaaatagataaa

SEQ ID NO: 713181 - DNA, 1061 bp, Homo sapiens
cccacgcgtacgaattatgtcaaaatgaaaactgttcgtttcatgacaaattatatagtctgataaatataaactggcaagtcaattattcactattaattgcagctacacaggcaggtttgctgcagggcagcggtgcagcacctaagcattgggcaacagtcaggccaccatgccaggcttccattccacgccacacatcatattggcttcatctcatagtcgtagtcgacatagctgcctagacaacagtaggagcaataacaaacggctaggccccacaacagaatccatcctcagaacgcaagtaggtatcacccagcacgggcgctagcgcgcaagcacaacgcatgtcttagccccccaccacagcgcacgcacaagcctaggactaacacacgaatgctgcgcacgcaccacccctgctctactgcgcacagcgcctgcgccgcgcgcctgctctagaacgacgcggactaacctataactgccaatgactatgctccacccctgcgccgcctgcgccatcgggtctcaattgcggccaccttgaacgaggtctcatatgaaagcgagactcccccatctccgctcgttaccactgggaaacctctcacgccctactgcgggcccacatgcgtgacacttgtgccccggtgtcgtaacatttctcgcagctttccgtggtctcatgacacccggcgcggagacaaacgcaccttttacccactgctaacacccacgccatcctatctggcttgcttacatactcatacgacagaaaaatatcctttggggcacgtgcttaggagtctcatcgcttcccccacaggtaacttccgaccgcacacaccagggccctccaacgctcctccttcttcggagatcccttcctatcattccgcgtttggggctgttattcctgaccttccaactcggtttggttctcattgggccactcgggtctcctatgctcttgcctctggcctggttggctacccttgaccctcggttgcccgcggacccttgggcatggttccgccggttgattctgccttggt

SEQ ID NO: 713182 - DNA, 898 bp, Homo sapiens
  misc_feature (302)..(302): n is a, c, g, or t
  misc_feature (760)..(760): n is a, c, g, or t
taacaacagtaccctgtttctacaaaattttaaaaatgacccgggcgcggggacccccccctgtatcccccgcatcttgggggggccaaagcagggggtatccatagaggtaccgggagtatccacgaccatcctctgggccttgtccaaaaatgtgtgtgtgttttctctccctatggggactcttattcccaggagcctcctattccgattatattcttggtccccacacagtgagaggacgtgttgaatgtcccccatccctctgtgtaacacctataacccattactcttgccccatnttatgtgaggccgggtgttgtgtggcgtggatctctcaaacgagcttgtgtgtggacttcttctcccctcattattgtgttgtgatctcacagaagtgtatatctcagaaccatctccgtggagtgcctctcttctctctcaacatctcccatataaatttttaaccctcctagcgtgagtcagcccctgtgtgtctgtgtgttgtccgcccaaagaattttgtgtgggctccctataacagcgtgtggggacgcaccccagcggaaacagcgggggcttaatatacttcgcgtgtggctctgtgtgtggcacgccccttgttttgacacatgtgtgtgtacacacacgagcggctctccccagaactctctcaagcgtctctaccacagagtttgttgctaccgttctggggggcctcccctctatagtcttcaccccatctgtgtcttcccccaancacctgtttgcttggtgggtgcggacaccctgtggggcgcacccatatttggagtagcacttatttaacaccgtggtgctcccctccacacaatttaaaacttaccattcgtggacgggtcggcacaacgtgggctcc

SEQ ID NO: 713183 - DNA, 960 bp, Homo sapiens
  misc_feature (912)..(912): n is a, c, g, or t
aaaaagctgccaacagcttggaagcgttcatatttgagacccaggacaagctgtaccagcccgagtaccaggaagtgtccacagaggagcagcgtgaggagatctctgggaagctcagcgccgcatccacctggctggaggatgagggtgttggagccaccacagtgatgttgaaggagaagctggctgagctgaggaagctgtgccaagggctgttttttcgggtagaggagcgcaagaagtggcccgaacggctgtctgccctcgataatctcctcaaccattccagcatgttcctcaagggggcccggctcatcccagagatggaccagatcttcactgaggtggagatgacaacgttagagaaagtcatcaatgagacctgggcctggaagaatgcaactctggccgagcaggctaagctgcccgccacagagaagcctgtgttgctctcaaaagacattgaagctaagatgatggccctggaccgagaggtgcagtatctgctcaataaggccaagtttaccaagccccggccccggcctaaggacaagaatgggacccgggcagagccacccctcaatgccagtgccagtgaccagggggagaaggtcatccctccagcaggccagactgaagatgcagagcccatttcagaacctgagaaagtagagactggatccgagccaggagacactgagcctttggagttaggaggtcctggagcagaacctgaacagaaagaacaatcgacaggacagaagcggcctttgaagaacgacgaactataacccccacctctgttttccccattcatctccacccccttcccccaccacttctatttatttaacatcgagggttgggggaggggttggtcctgccctcggctggagttcctttctcaccccngtgattttggaggtgtggagaaggggaagggagggacagctcactggt

SEQ ID NO: 713184 - DNA, 445 bp, Homo sapiens
gaggatatttaaatctagcacatcaagcccattactagagcgagaaatacacccaagctactattactacaacaaccataaattacagttaagaagtcatctgcaacaaccaaacatctaatcaaatatcgcaacaactcacgaattactgagcaaagggcattactacagtatacagagatgctatgcagttttctaacttaaaacagcctatgataactggcagcaaagaaggttcttgcagtagactgcctctgctagagaacatatgacgtaattatcgcatgctgctaatatactatctaaacactaaagatactcctaaaatatttgatggtagactatgaataagacattacactacagaaaaactttatgcagaaggaaatcctaactgacgagcttctgctttaaatattgtgaaaacattacagcgttatgaatt

SEQ ID NO: 713185 - DNA, 1005 bp, Homo sapiens
  misc_feature (583)..(584): n is a, c, g, or t
  misc_feature (587)..(587): n is a, c, g, or t
  misc_feature (957)..(957): n is a, c, g, or t
aaaaagctgccaacagcttggaagcgttcatatttgagacccaggacaagctgtaccagcccgagtaccaggaagtgtccacagaggagcagcgtgaggagatctctgggaagctcagcgccgcatccacctggctggaggatgagggtgttggagccaccacagtgatgttgaaggagaagctggctgagctgaggaagctgtgccaagggctgttttttcgggtagaggagcgcaagaagtggcccgaacggctgtctgccctcgataatctcctcaaccattccagcatgttcctcaagggggcccggctcatcccagagatggaccagatcttcactgaggtggagatgacaacgttagagaaagtcatcaatgagacctgggcctggaagaatgcaactctggccgagcaggctaagctgcccgccacagagaagcctgtgttgctctcaaaagacattgaagctaagatgatggccctggaccgagaggtgcagtatctgctcaataaggccaagtttaccaagccccggccccggcctaggcccccaaaaaaaggggaaaaatttggggggggggnnaancccgaggacaagaatgggacccgggcagagccacccctcaatgccagtgccagtgaccagggggagaaggtcatccctccagcaggccagactgaagatgcagagcccatttcagaacctgagaaagtagagactggatccgagccaggagacactgagcctttggagttaggaggtcctggagcagaacctgaacagaaagaacaatcgacaggacagaagcggcctttgaagaacgacgaactataacccccacctctgttttccccattcatctccacccccttcccccaccacttctatttatttaacatcgagggttgggggaggggttggtcctgccctcggctggagttcctttctcaccccngtgattttggaggtgtggagaaggggaagggagggacagctcactggt

SEQ ID NO: 713186 - DNA, 743 bp, Homo sapiens
gctattgagtggtggtggaccacgcctgacatccccactcaagaaatctgacccggtcgtctcgtaccgtgagacggtcagtgaagagtcgaacgtgctctgcctctaccaaggtcccccaaacaagcacaaccggctgtacatgaaggcgctggcccattccccagacggcctgtgccgaagaacatcgagtaaagcgcgaggtgtccgccccgtcaggagactcaagcagacgcggcgccgctatcctggcccgagcaagtacgagctgggacgctggcctgagagcccgcaaagactcttggtcgcttatgaggcccagacggcaccctgggccccaaacatcctacaccgactatacaccaaagggtagtgcagtagctacaaccgaggatacaaggacaacgcttgttgactggcaccgggactctcccccagtggggccacccaaggaaagggacgcactagtagatagagggaagaacaattcgccggacggtgtagcagctctcagaacggatacaaaagaacggtccaaccccctgacacagcatcgatcggccaataacaaacacaaacgtgaaaagaggaggcccaaggaatccagtacgactgaaacaagcacacgagaaggcttagcaccctcttacggccgaagtagtggcatagaacctagcccaacaacaaaaccacgtccagtgggcagtcagccaatcgataacattggatagggcagaatcaca

SEQ ID NO: 713187 - DNA, 1243 bp, Homo sapiens
  misc_feature (436)..(436): n is a, c, g, or t
  misc_feature (641)..(641): n is a, c, g, or t
gcgctaacctttccgaggtgagtggttgtgtgatcgccagtcttagggaagagatgttcgtcgtctcggtgggggcacgctgggcagcaggggtgaactcgcacattcgaatcgacggctcgagaatctggagctggtgcgacggagtggctctcgagggaccatccgacagtgagcatccgcgcatgggacccacggggccaagccccgaacggctctcggcaatccgtgggcaagtccgtccgaccggtggaaagaagtacagatccgatgagactttggctaccgacgaaaagtatggaatgacaactgtgatgggctataggctagaggagtcgtgtagagatctagtaggctactgagcataacaactggctgatggctgcgcctcgtgggagtttgtacgatgaatattgccgttgtgcaaggctggaanccctgaagaatgctactagagggagcgattagtctttaactggaattatctttctagattagcaccttttagagagggatggaaatgtggtaggctacagctgggttatagagattaaataggggagtggaggcctgccgaacatgtgtcctttggcctaactgccattgtgcacgcggtaactcatgcaagggtctggcacttntgtatgacatgttgctttagacagctccttgggaatagcccaatggaatggccttgggagaaggaagagataactctagttctctgtgaggcgcaatcaacatatgacctttgcagcagtagacggtagtttgccaaaggtggctggaaactgcctagtgtggctcggacatttggcccccatggggaatctctatgggaaagggctcgggtaaagcgagtcctgaaatccagagactgcaatggcaccggttaatttggcgcatggactgcttgagtgggacttgctacgttcccgcgacatagtggctgtttcacagggagaccgaaagggggctaattagaaggcatttggcaggacacacggggggggtgtcggttccccaccataggggggagtggacggacctgtggggatcactatgcccacaggaattgcacaaaggtttgccgcctgccttttgagaacacgtcacttcgatgagaagagcccctgggccaacaagttgtggggggcgctccaaaaagccccgcgaaagagagtggtggctaaacgccaaagagagcgcgtggatggaccatttggacacaaggcgtgaaaaa

SEQ ID NO: 713188 - DNA, 534 bp, Homo sapiens
agatggagtttcactcttgttgcccaggctggagagcaatggcatgatctcggctcaccacaacctccgcctcctgggttcaagcgattctcctgcctcagcctcccgagcagctgggattacaggcatgtgccaccatgcctggctaattttgtatctttagcagagacgggattcctccatgttggtcagactggtcttgaactcccaacctcaggtgatctgcctgcctcaaccttccaaagtgctgaggcagacagatggcttgagctcaagagtttgagatcagcctgagcaacatggcaaaactctgtctctacaaaaaatataaaaatcagccaggtatgttggtgtgcacctgtagtcccagctactggggaggtcgaggcaggaggatcgcttgagccctggaggcttaggctgcattgagccatgattgtgccactggattcttgcctggtccactgtcttacacataatgggaacaaactggtttccccttttaacaagcttaaacagctaacaaacttggtc

SEQ ID NO: 713189 - DNA, 1216 bp, Homo sapiens
  misc_feature (1216)..(1216): n is a, c, g, or t
gcccggctcgcgtcccagctccttccgcgcggctctgcgatgcgtgcctgcagggtgaccctggtgcgggagtcctggggaccctgcgatcatgccccggaggacggggtggggtcggcgccaaacatggagcgccgtggacctgctgtggacccctgcactactgtgcgatcctgcctgtcctgcctggtgtagctctgtgtgcatgtgtgagtgtccctgtgatgatgtgctgacaaatatttatcctgtgccccgctgcgtccgcatgtccgcagccgaccattatcctgtgtggcctgcccagcttacagcttaacgtacttcctgcgctgaatgcctgactcctcacatatgctagaaggaaacttgtgggtgccatctcctggtgatggacgatgaaggggctttttgcccttttgagaatccctgtgtgagctgcctatcgtgggtgccttgcttacacgcgcgaaaggcattggggggggatccgtacccgtgtaggaaactcaatgggcatgggtgtctcgcctgggccttgggcgcttgggtggtaccctgtgtggcgggttaccctatttccccctccgtacttatccctttacccgcaacccttactggctttgtggttaccccgggtgtataccgctaacccttggccggcccccaagttggctggggacgctatgctactacctgaagcggccccggccgtatgccaccatcatccaaacccctgagcccaccaaggcaggctaaggctggaaatccgccgggggccccgttggggattcaagcacctgtgggtgcgccatagagtggtttgcactttggcctattctccactagaagatttggaccctgcggtggttggcagcaatggttgaatgtgcaaacaaccaaccaactggtgcccttatggagagggccttgacatgcccccaggaaagaggcccagacgagcgatgggagcccttggggactttggaagcatataggggcttcccattggtgtaacatcacccatgggacctactataccccccaaatttgttgaacaccccgagacagtcggtaagcgagctattgccccaaacgtgaaccgggcagccagggggtaacaccccctccccaaagtgtggcggggacaattggttgggacaacaaagggccaaaccggcccccaggaaattaggggacttgacacacagccacn

SEQ ID NO: 713190 - DNA, 306 bp, Homo sapiens
cgggttgtcagcgacccttctctatctcagtttctgactagctgggtctataggtgcacactatgtgcacctaattcttaaatttttcatagacagagggtcttgctatgtggcccaggctggtcttgaactccagcctcaagcaatcctcccaccttggcctcccaaagtactaggattacaggcgcaagccactgccccttagtccatttcagtggttttttctttttttttttggagacggagtcttagtctgtctctcagcctagagtgcattggcatgatctgggctcactgcagcctccc

SEQ ID NO: 713191 - DNA, 108 bp, Homo sapiens
actacatacttccggggggcagtgccgtttcacgggaggaaggcagagctccttggcgatatctgcgttttggagagtcaaggcttcctccaccgcggaagtatgtag

SEQ ID NO: 713192 - DNA, 1144 bp, Homo sapiens
  misc_feature (127)..(127): n is a, c, g, or t
cgtgatgtcgcctgtccgtctctacgtcccatcggggtgtactgtcttccccactctggtctcctggcctcgctgggtttgttttctccccctgctatgtttctatactatgtgtgcctatgcatcnctcatgtggtcgtgcgtcctttctctatattgtttcgggtccgcttcgtcttatggtcgctgcgattgcccctcttatgtccctcggtctttgtgtccgtgcctcattctctctattggctgcggtccccggggttcacgtcctgcgttatatcgtcgttgtggtaatgtcctcgtccatttctggtggtggctcgccccctttggtgaacggtgtatcatacggtgtttgtatttcgtcccggttctttttaattggttccttcgagcgatatgtctgttctgtgcctgtgtcttccatgccgctcagttttgtctctgccctggggcatcgtttctctttgcttcgcggtgtacgtcgtactgtgttgtgtgtcgcaccatggccttccttcatagcagtggtatatcggcggttccttttggtatttcccctacccgtttccacgtccatagtcggtcgtggtttccagtctgtcctgtcctttgtggggttttagatggtgacattctgtcctttgctgtaatcgctccccgtgcctccctttttgattggtagcatcctcctttttgtctttggtatcggctctggttgcaccatcgtccgttcctcaccttggggtttctcactgggatgtctggtggtgtggggcaccccaccctgggacctaggtggcgcctgctaaaccacactggactccggccctcagtaaccctagcgcccaagtccgtccacctcgacgttgtacaagcccccccttccactgttttccttgtgatggtgtgtcttctttgctgataggaaacagactcgattcatagtgaatattatatatttgggtattgtaacagggaggggaagagggggcgtatcgcggcggcgttggcccctgccgcctggtactcaagcccgtcggggacattgggacaggggacccccgcccgcttgccctcccctctctgcaacgtactgtggattaagaaacatgcacttagtctctaaagagtttatcgatta

SEQ ID NO: 713193 - DNA, 89 bp, Homo sapiens
aagacagcagcatatatctctgcagcgtattcgcagggacagctagaaccggggagctgttttttggagaaggctctaggctgaccgta

SEQ ID NO: 713194 - DNA, 1528 bp, Homo sapiens
  misc_feature (271)..(271): n is a, c, g, or t
  misc_feature (275)..(275): n is a, c, g, or t
  misc_feature (277)..(277): n is a, c, g, or t
  misc_feature (314)..(314): n is a, c, g, or t
  misc_feature (362)..(362): n is a, c, g, or t
  misc_feature (376)..(376): n is a, c, g, or t
  misc_feature (423)..(423): n is a, c, g, or t
tacctcgcatatcagtagaaagagcttagcactctttcatgatcacgcaccacttcatttagtctattgattgccttgactcttgctctcacttgagtgctcgtgtagtcgcccttcttctctcttaatcgactcactaatcgatagacttatacataagtgatcataatcaattctcaagacagcctcaggagaattcagagaactcggtgccatgcaactatcacctcgcacgggcgcaagtcactcgcgtagcgctcctctctagtcncgcncncatctcgccatgcgcctactgctactctcctcttacnagtgaagcgatcgaccggaaggtcacaatcgcgactcacgcgtctccntatactcaactcanagaaaatcgagagtgtaggtgcctatcgcgaattgcgttactcaganacacatatacccgaatgtgaacgagcacggagctagtccgtgacgaaggatctgggaattctatgcgagagcgtcctctcacctatggacgtgtactccgccaatgttcatatccgctcatgtatatcctatgtgtcgaaacccttgcagtgatctcccatgtgaagccgagtgtgtacgacactgcgcatggtgaggctaagcttcctcggtatggtgacaaggcgccagcccgattgtccggtaaacttagatgatatatgatcgatacaacgtagagcagcgcttgttggcttaccttccacgttgacggcgttggtgcgcacgcaatcgagtattacgcgcttcctaataacacatccgcggcatttggtccttattgttccccctgtgccaccagattactaaaaaaacgccaagaaaccccaaacttatttcaaacccggacttaaccaaacggaaacccgcggcgggcggttctattgaccttcaaacaggggtacacaaattctgccatacctacggcaataacatttccctgggtggcggaagcccaaaatagcgcggaacaaagttgttctgcccaatggggcacacggaatacgcggtatccctttcaggcccaaattccatatctttccccccccttctcagatacaaacaatacgtattatcggcacacattcaaagggggccccccccgtgcctaacttcttctaacccaccccttatacttaaaggaccagaacacgagccccgccgttagcggtaaaaggacaccccccccattacggtcaaaggaaagtccccaagaagagaagaaggagcgaccacacaccacacacaggggcggggcgcagcagcagaccgcaacctcccaaggaaaggagtatccttcacccgcctccaaaagcggcgggggacccccaacacgccatattagagcggcagcgggttagcgccccagagagcaatacatagctcgtcggcgtcgcaccacacggagtggggcgaccgcccccgaacataaacgggcaagacagcagcccgcgcctactagacatacaagcggccgaccgaaccacccaactgttgtaggcccgcg

SEQ ID NO: 713195 - DNA, 640 bp, Homo sapiens
  misc_feature (190)..(190): n is a, c, g, or t
  misc_feature (194)..(194): n is a, c, g, or t
  misc_feature (572)..(572): n is a, c, g, or t
  misc_feature (609)..(609): n is a, c, g, or t
gtctgaagatctagaagagcaatcagtgctcttaaccactgagccacctcttcatcccttatttttttcttatatttggtattatatgttttctctctatcctaggttctcaataatgttttacaacttctatgaaaattcaaagagtctaactcaaatattttaatattgtctcgtgccgaattcgganagtntgtgactgagcagccatggacagcggcttcggctcggattttggcggcacgggtggcgggaagctggacccgggggccattatggagcaggtgaaagtgcagatcgccgtggccaacgcgcaggagctgctccagagaatgacggacaagtgtttccggaagtgcatcgggaagcccgggggctccttggataactcggagcagaaatgcatcgccatgtgcatggaccgctacatggacgcctggaataccgtgtcccgcgcctacaactctcgactgcagcgggaacgagccaacatgtgaccgggaccctgtgcctcgggacaccgtgcttatggtctgaacttgttttccctgccagttagggtgtctccttcntagccgccctgaagtcttggcagcatggaagggcttnggggattcgaaggcctcttccctggggttaa

SEQ ID NO: 713196 - DNA, 372 bp, Homo sapiens
  misc_feature (42)..(42): n is a, c, g, or t
  misc_feature (102)..(102): n is a, c, g, or t
  misc_feature (241)..(241): n is a, c, g, or t
  misc_feature (280)..(280): n is a, c, g, or t
tgttgggtccgccgaggatctatgtctggctggaagacgaancctctggcaatgtgctgcctgcaaaataacgtcaacgtcgaagtgattttcgcttgccgncgaaacctcatgccgagtcgtcggggtgaactcgctaatgcgtcgatcaccgctgttagtcaccctgcatgtcaaacgtaacccgtcgtaagcccatgctcgtcctaagcgttcaggtcaacgaagagccccccgtggngggtggcgccgacgatctcggcgtcctgaatgtgatcgnggcggcggcaggaaaacttggcgaagccgcgcgtccaggacgacccgatgaaccgcccgacattcatctttcggttggtgggctgacgtcgc

SEQ ID NO: 713197 - DNA, 368 bp, Homo sapiens
actgacggggtaattgtatgagtactttgctatgaccagatagataaccaagggtggatgctggggatagactattctttatcctgagatgctgttctttcacttctttccttttattcagcaggttggggtaatttacgcgtcccttctttaatggaatgatggcaatagtacgtggcagttgcctctcctaaaatgtcctcaatggaccagatcaccagtgggcaattcggtgttgatttctcaattctcggccctcgctgatcttatccgtgtagttttaggggcaccaagacctagatgatcttaatgaagctttccgagttatgtgtgattgaggggaagaggaaggagaacactgtatcacg

SEQ ID NO: 713198 - DNA, 147 bp, Homo sapiens
acctcttctcccctgcacagaaaccgcatggcatgagaagtgtcacgtttcccgcactcgtcccttcccctcaggctccgtggccaccacacattgcttgctggtgtctatatgatctgcctaatcctgcggcagccttatatgaat

SEQ ID NO: 713199 - DNA, 126 bp, Homo sapiens
gcaggcctgcccccgatgctagtccatggtacattctgggaagcactggccatccagcctactcaaaggcctgtcctggcagggaaggacgcacattcacctggccccaggaatgcctggagaccc

SEQ ID NO: 713200 - DNA, 407 bp, Homo sapiens
ggtctcttgggttccggataggtggcagatgaggaactcccagtagaggggccggtgggacgctctggcttgacaatcgtcctggccactgcagtgcttgtactgaccgctctgggcatggcactcaggatggcaaaccagaggtaccagtggcccagtgattatgtaatgcacatatgtttacacttgaatatgctatgctctaggactgcatgaattacgggttacaacagcggtcaaagtcaagcctcaaactatgagctgatacgagctcggaagtctgccataaagatcttacatcacatagtgccaagtaggttatcgagtcgtgcattctctatgagtggtatgcttaagagagccttggaggcattctcttacctgactttacctcatgtctgatttct

SEQ ID NO: 713201 - DNA, 443 bp, Homo sapiens
aataccagcaactccgaagacatcttgtcctcggcctgctacacttgaggaacctgatgcctcgcagccacaactggccaagcagtacttctccagcagcatgctcaacaacatcatcaacctgtgccgaagcagtgcctcacccaaggccgcagaagctgcccggcttctcctgtctgacatgtggtccagcaaggaactgcagggtgtcctcagacagcaaggtttcgataggaacatatcttggaacctttacttgggccaacaaccttcagaaattcaacttccgatttttaggaggaaattttcaagcaaatttaggtttcaggaagatatgacccagctgagaaacccttaagccttcgttgaatgggttttttggtcattcttgtccattatttgggaaagttcccaggaaactgagaggaaacctaaaaactgtg

SEQ ID NO: 713202 - DNA, 201 bp, Homo sapiens
ccggggcccgggggttttttttttttcccgggggggccgggggcggggggggcggtgggtttcccttggggggggtcccggggccccccttggcccccccttgtccccccctggttttgggggggccccccaacctttgccttttgggggaataaaaaagggccccccccccgcccccccggtttttttggggtttttcca

SEQ ID NO: 713203 - DNA, 823 bp, Homo sapiens
accgctgtgtctcaagttacagcgtgaaaattgctccctcacaagtctcggctcagctgtatctttcaaggagcatgcgtctgttcttcgtctgtgttcccgtcccacggtgactttcggacccataatttgcagaaaattcatccgcgtggtcgatcaacacggcgcagcttttgattgtgtgattctttgaggtcctagaggatctttatcaatcttttgccagaggatatgggttcgcatgtcagaggtaaggatgcgttcctgtatcgatctgcagacacccagaaggtggctgcacactgcatgctcggggattctcaagggattacgagacctccaacatactagtctgaaggcgatgattctgaccatggcccctctgccaagcatgtgtgcgatgcccttggtgtctttagtgcatagaagcctaggctcagatagcacagcagcgccatctttccgtttcaggggttgtgatgaaggccaaggaaaaacatttatctcttactatgttacctacgtataaagttttagttcattgggtgtccgatacaccctttgtatcactttgaaatggcacttctattcttttttcttccatgctctgttctcttggacatttggggatgtgagtgtgtagagtctggtgagagaggagatcaggtggccttcccaccgatggtcctggcctccacctgcccatctcctccatgcctgatcaccgcatttccaatgttgcccttcaagagaacttaagtcaaggagagttgaaattcacaggccagggcacatcttttatttacttcagttatgttgggcg

SEQ ID NO: 713204 - DNA, 571 bp, Homo sapiens
ccaccgtctcatcttgctgaatcagtcagagctgctcccaagtataataggtaaactggtacagggaggtattctgggaagtttcggaggcatggagttggcaaagctaaggagtgacaagcattgtcggccgtctctgtagctggggcagcggccactaatgttttctgatagagggattgtgacagtggacttgagcacccatggcaggttagcgggatagatggagctcgttctgcgcttgtcggaaagatacttcagcaggccccgtaaaataggacctatgattaaacgtgtggtaaccaccaggcaaggataccaggcatttccaccatttcactcacccgccccgaccctgtttccttcccacaataaactagaaagaccatagtctctttcttcctttgattttgcccaaataacagctgctcagtttgttacataggtattatccagctaaagtgacttctctcccttaacagagagaagaggggacaaatttggttgtgaagtaaacaagaaacacaagacggctaaaactctccaggggcaggtaaagccctgctgggct

SEQ ID NO: 713205 - DNA, 143 bp, Homo sapiens
tgctgaatggctgagcgacttccctatctccccagatgtcgtgcctttccctgtgtgaatgttgtatctagcctaaagtttccctaggctttcctgttccagagaggtggggctggatgtctacatctcgtctcttccttgta

SEQ ID NO: 713206 - DNA, 1389 bp, Homo sapiens
  misc_feature (208)..(208): n is a, c, g, or t
  misc_feature (259)..(259): n is a, c, g, or t
  misc_feature (820)..(820): n is a, c, g, or t
gggtcatggagaaaggtgaccctgatcccaagaactgtgcctccgcaagtctctggtgttggggagcggcccgtgatgtcagtgtagagcttgggtgtgcgtgtaggtctatcggtgtggatactcctgttgttccagggtctagtgctagatgtcgcatagtgcatcacatgactaccgtgcgagactcatcacaccacctaggttnagccgtcgtcgaccatgatgggaccatactgctcatacgtgcggaattaanatggaggtggtgatcacttactttcatgggtgatgatagaggacgagtggctcacgcgttgcgacaggaagtgggagtggggtgtggtaagctaatagatggagggaggaaggagatcaccttcttgagtggactcataattcgcctgaaggatgtcctgtttccgtgaggtgccacaatgttagctgacaagaccatgcatctacctcccgttgatcgttgtgagtgacgcggcatcccacaaggacgcgtagcagcttagggccaccgagttgacatctcgaatgaccacgccgacttgtgcaatcatgttcctggggggcgattggggactcgggatcgacgaatggcttcgaagtgaaattgtatgcgcatgggctttgtgccactccagtacttaagtggttcctctcggggaaaccaataggctacttggcttttaggtgagggactctggggggtttaagcacatttgtgttaaatacactcatgctggaataggctcccttgggaaattatctgggagttaacataaactgtgccggggtggtggtgggaacntgaagcggaaaacccctttcatattccttgtgtgcccttgtttggtcccccctggggccttatccaaaacccgtagaagctccgtaaggcaaatggtttctccgtaaggctaccggcccatgtaccacgtatggtttgacaagcccctttggagtggggcttgggacaagaaaggcggggtttcaagcggaagagcgttgggaaccctcccagaagagaatctcccccttatccagcgttcttttaggcgtcttcccattgtaaccccccttgtgtcccagtggaagcataccgagagaacccgcgggcccgcagaattgggttgggttggcccccaagagaaacgcccaggttctggcgagccccaatattgaaggcgcgaaagggggcaaaaacccggggaaacttcgggtccaaggaaacaaccgatgggggcgctgcgagagaaaggcacaaacaagagcagcgccaagaaggaaaccgcgtgcaccaaagctagggacgacggtatagcgcaacagcgaacgagggagagagccaagagcaccagagagcaccaacacaatagc

SEQ ID NO: 713207 - DNA, 881 bp, Homo sapiens
  misc_feature (1)..(1): n is a, c, g, or t
  misc_feature (25)..(25): n is a, c, g, or t
  misc_feature (82)..(83): n is a, c, g, or t
  misc_feature (104)..(104): n is a, c, g, or t
  misc_feature (259)..(259): n is a, c, g, or t
ntgtgggaacttggctgagcagtgntggaagccacagttctcgcattgaccgcacaaacttttctaatgataaaaccatctnngggggttgggtacctctaatntataggattagatactaatagaagagaaaaattgtaacacactgaacaatagatactgtatgttcttaagactatgtatactagaataatagtagcagagtagggtgaaaaggaactttctgttctgtttgtaagcgactgggggggctactaanaatgtctgacactgaaaaaaaaaaaataaaatatgttttcaacaagcaaaaatatagtattctaagattaaaatgtgattacaaaatatttagtgtgaacatttaatttaaacttgtctcatggaatctttaatttcaatgaacattaccgcttatatatgttatttggggagacatcagatacagttaaccatttaaaaattatataagaaaaaataaaaagaagaaaaaaaaaaagatgaatggtagatagaattgtaggtacaaaggggagtggcttggggtgtaattggggtttatgtgatgagggggtttgaaagatactggctcgatggcggggttgggcatgtgagcgcgagagttgtgtgtaatagaaatagagtagtcgaaattgatttttttagtctgattgtcgacatcggaatgagataagagtatggggggggcgaagacattactcatgttgagttttcggctgttgtttcgcggtgtgagagatagtatggtaagatcgtgagacgagtgaggggggcgcgcacggtatgattggatcgtgtggcaccagagtagtggattacgtgtgggtgtagagtcattagacgccccggtggatgtagagcac

SEQ ID NO: 713208 - DNA, 223 bp, Homo sapiens
acacataggtgaattctttgccctagctccaagtacagctatctagtactatacgagacttaaatcgtccaacaaatactatgcgatcatttaggagcattccattcatttttttcaatagctctataaagctgctatactgcgtctcaaagtgtacaaatccatagccctaggcaacattttcatcacaaaccaccttacatgacaggatgttaccaaaagc

SEQ ID NO: 713209 - DNA, 201 bp, Homo sapiens
caagctcttaaggagccagtagtaaataaaacaagccgattatacacaatgccatatcccattgctgcctgcctgcaaaagtgaacgaacccaacaagaattccatatggcaggagctgcagaagtgtgatgccaatcattacatcatactgtttcgtgatgctggctgccaattcagcgccgcataactagctactatac

SEQ ID NO: 713210 - DNA, 226 bp, Homo sapiens
catgaatgggctctcacgtaagagcttctgcagacactgggccaatggggagggaacagccagtgagaaaccatgccaccaacagggctgtccaggtccaccaagttattcctcacattccagcttggcagctgtgctggcgggcctaaagagtaaataacggctgcagccaggtccaggagtcttcctcacacgcttcagcgaagagtccagagctttgctcctg

SEQ ID NO: 713211 - DNA, 298 bp, Homo sapiens
tccatccaggtttttatcccccggccaaaaaaaaccaaattttaaggctaaacctttttaaaaagaaaagggggatttgggggcccgcggctttaaaaaaacggcccccggtttaaggggcaccccaaaaggggtttccccggtccccaggggggaaaaaaaccccaaatttcccataaggtttcccctaaggaggggggggggggaaaataccccttggaatttcccggcccaaaaaaagggggcgggctcctttattttaactttttccggcaaaagggaaaaacccccggggggg

SEQ ID NO: 713212 - DNA, 968 bp, Homo sapiens
aataataacatgatggccaaaactttggaagagtgtagagttaccttggaagggctaaaaatggagaatggctctttgaagtctcatttgcagggtgagaagcagaaagccacagaggccagtgctgtggagcagacggcagagcagctgcgacagttccagcaacatgttgacacagtagcccgcagcagcagaaagatctactggcaactgtcttgcaaatgagctcagcacgaagcaattcactcaaaggccaaacggtgcaacattaaaccatgtttccaagtctgctggccaaggtggcaaaaggattattcatacctgaaggcagatcatgtgatcaccaaagccgaaccagcttgagcagaaccagcctacaagctgcaagcaaacaccgccatccagagcagtgcatgcagaggatcgaaagacatgaaagaaaccagtatttgacattggcaagatcagtgtggcaacagcaccgggctgtcaagttacacaataatcaactcatcagtgagctagaacagtagtgtgactcaagctggaggaacaggaagtcaagacctggagaggcagctgaagactctgaccaagcagatgaaggaggagcacgaggaatggcaggcggcccaggcggatctgcagaccgcagaggtggtggccaatgacatcaagtgtgaggcccagcagggagctgcggcagccggtgaacgacgtgaaacctggcgtgggagcgagcgacggagcacgaaatggccccggcatgcaaaacggagactgcgggggcaatgactgacaggggcacaagggcaagggatgggagcccaaggaaacagcagggcaccgtaccacgctggcggccagcccgcaggcagaaggaccacgtgaaggaccgaaaggaggcaggaacggacgggccgggagcgcacaagaaagcggaacagaagacaaggagacacgaggag

SEQ ID NO: 713213 - DNA, 261 bp, Homo sapiens
gaggaccattgcagtaatccaggcaagagatgctgggggcttgggtcatatgctggcaggggaggtgctgagagttgataaggttctggacataacgaaaacacaacagtgcaaaccctgtgggatgcagcagaagcagttctaagaggaaagtttataacaatgcaagacttaggaaataagaagaatctcaaataaacaacctaaccttaacctaaaggagctagaaaaagaataaacaaaacccaaagttagtcgaag

SEQ ID NO: 713214 - DNA, 277 bp, Homo sapiens
ccttctttatcttgtggaatagtgtcagaaagattggtaacaactcttctttgaatgtctggtagaattctgctgtgaagccatctggtcctggactttttttgttggtaatttttaaattaccatttcaatcttgctgcttgttattggtctgttcagggtatccaattcctcctgatttaagctaggagggttgtattttccctaaacccatttattttacaatactctcctattatctaaatactcaattatggacaaatgattaactaatggc

SEQ ID NO: 713215 - DNA, 444 bp, Homo sapiens
ggggttagtgaagggcttattaagttgtaggggaagcaagctgggaagaatcagatcagatattttcctgacaaaaaaaaatgaccctgtagacagcatcaaaatgtggtgttcttgttaagtaattgatcgtggtctttgctttaatcttagttccgccaggcacggtggctcacacctgtaatcccagcactttgggaggccgaggcgggcagatcacctgaggtcaggagttcgagaccagcgtggccaacatggtgaaacccgtctctactaaagataaaaaaattagctgggtgtgttggtgggtgcctgtagtccagctactcgggaggctgaggcaggagaatcacttgaacccaggaggcagaggttgcagtgagctgagattgcgccactgtactccagcctgggcaacaaagcaagactctgtctcaaaaaaat

SEQ ID NO: 713216 - DNA, 213 bp, Homo sapiens
ttgagaccaccctggcgtacatggtgagactctaactctaccataaatttttaaaatgttggccaggtgtcgtgacgtcgtgatcatagctcttcccgagctgctcgggaaactgaggcaggaggctctcttgggcccaggagattgagggtgcggtgaaccacagttgtaccactgcactgcagcctgggcaacagagcaagaccctgactc

SEQ ID NO: 713217 - DNA, 489 bp, Homo sapiens
  misc_feature (182)..(182): n is a, c, g, or t
  misc_feature (204)..(204): n is a, c, g, or t
  misc_feature (225)..(225): n is a, c, g, or t
  misc_feature (227)..(227): n is a, c, g, or t
  misc_feature (231)..(231): n is a, c, g, or t
  misc_feature (245)..(245): n is a, c, g, or t
  misc_feature (249)..(249): n is a, c, g, or t
  misc_feature (259)..(259): n is a, c, g, or t
  misc_feature (263)..(263): n is a, c, g, or t
  misc_feature (273)..(273): n is a, c, g, or t
  misc_feature (285)..(285): n is a, c, g, or t
  misc_feature (407)..(407): n is a, c, g, or t
tcctttttggaatggaggctcccaccagaagaaggttccggcaagaatcccatctccacgtttgggcagagaaagcagcccgggtccggaaggtgtagagagtcccggcctcactcagctcacagggcgtgccaggcggcaaacccaaaattttcagaaggcccagctccaccggcacacgnagcttcccatccagtccttaangtcaatttttacccaacacgngnttcngttgttttgagacnaatnaccacctgtnaaanggcaggtggntccagaggggtnaagacccccccccgcccccgctccacctggagcccacccccatgggcaccgcgtgccgcctgcacgtgggctgtcttcacaggtctgatgtgaaaattcaatcagacgttaaccggctcganagagcgccggctagaggcttcattatctattatttaccaacgcgattgagacggacttaaccacagcgaaaggtaaaattgg

SEQ ID NO: 713218 - DNA, 1108 bp, Homo sapiens
ggcgtgctgcagtgcgtgccgagcgggactggctgggtcggctgggctgctggtgcgaggagccgcggggctgtgctcgtgctggccaaggtggacatgctgctgtgggtggcctgatggatcgcttgctgtgggctggtagctccgtgctgccccgtagctcggtgacttgctgctgcctgtgcctcacacatgccgatgtgcgtggctcgtgtgcacagtcgcttgctcctgctgctgctgctgccctggctgtgctgctccatgtgttgcttgacatgctgctgagatgatgctggctggccctcatgggatgcaatggcgacatgtatagacaacgattgtacagcaagtggtgtacgataaccagggaagaccaagtttggaggaaagcttaccacagggactgaaacttacgtttctagacgacaaaaggcaaggtaagtttcaggggcgccttggagcggcgtttaggagagaattgaagcagcaagttgccagtgttttaccgagaagggttttggctggagggagcactgaaggttggtctctgcaggcggcacagccagacactgccctttccaacgccggttacacctctgtgcggggggtgcgcacgcgggcagccagctcaatgcgcgatgagcgttgcgagtgcgcggggcaacggcacccacatgtgccacgacactcgcatgaagagcaggcgttccggccgcgtgcacgcctggccgccgcccaccacgcgcatctagcgcccacgtggccagttattgcatcgcaggcgaatcacgcgccgtgccagcggtgtggcgaggagggaggaagcatcccggggagacaagacgcctgtgcaacacacgtagcggcgattggagcacgaaggaagagttcgggctttcggcacacttggtttgcaccaggctggtgaacacatcgaggaaccagggcgcaagcgcgaggtcatctagagcggtggcgaccacaggcggtcgaccagacgcgccaacaaagctagcacacgaaaaccgaagactggctgctgcgcgccgcttgttgggcgacgtcccactcgtgggtaatgagtaaggcagacgcaaaggcaaat

SEQ ID NO: 713219 - DNA, 251 bp, Homo sapiens
cttatgtgatggttgtgggtagctagacgaaggagttagagtggagcacgagctagggatgcgcactgattgtcactgacgaagcccagctcatccggccgctcccccagctctggtgggctgcgcacagaggttggccacagactggggcgcggcataccataggtggtgtcattgtacaccagtgcagccgttctcccttctcaatgcctccactacttgtgcccgcgattcgcgggttcactggacag

SEQ ID NO: 713220 - DNA, 877 bp, Homo sapiens
  misc_feature (231)..(231): n is a, c, g, or t
  misc_feature (492)..(492): n is a, c, g, or t
gacattgcattctgcaatcacgggaatctgcttgtgagaggctgcacgaacaatgacttgacaagatatgtctgattacaacaacgcgcttcactggagtgagaagacccaagcaactccttccggaaggatgtgtagcacctacaggcatgccggatcagcatgatatgtcaaaggtcgacgatccaaggatagtaatgcaatcggagtatcgctttcggtgatgagagnaaagaactagcatacttatgctggagaatctaggctatccagagatcgttacaggactacttgctaatgtcctgatgtatgaaacgccttgggtcgtcgtcacatcatacaatacaagcttgtcagaccaatcacgaggcgtgggctgtctgctaacaaaaggtgactggaccaataggttcatgtgataactcacttgcacgcagattacataccctgacttctactactaggacgactataggttctacccagctgtgnctagtacgcgttgtagaagtgatgcaatgactgagtagcgcatgtatgacactgcgacagaaactataaggctctgtcgtctcgatctgtatagttagtgctcttttcaggatagatatgtgaggtggacgtacgatgttcgatcttgatatgcttgcatgttgaaacgagctgtgatttgatgcgactcgatgtggatcgtgctgtgcatgaatgggaagatgctcaaattagttagtgtcatgaatctgtgaagctgaagcaaaaatgatggttgctaacaaagcagataaaatacagcaagctaaaaatgaaataagagagtgggaggcgaaagtgcaacaaggggaaagagattttgaacagatatctaaaaagattcgaa

SEQ ID NO: 713221 - DNA, 830 bp, Homo sapiens
  misc_feature (337)..(337): n is a, c, g, or t
gcctttccggcggtgacgacctacgcgcacgagaacatgcctcctcgcaaaggatctccttcatccctctccagaagaggagaagaggaatacaacaagaagaaacgcctggtgcagagccccaattcctactgcatggatgtgaaatgcccaggatgcttatacaaatcaccacggtctttagccatgcacaaacgggtagtggttgttggtggtggggctgctccacgtgtcctctgccagcctacgaggaggaaagagcgagaggtttacagtaacggatgttccttcagggaggaagcaagcactgggaagcactctgagtcaagactgaagntgcggaaaccattctccaataaacagcatttgggcatggactcacataagagaacacacggtggaaacaaaagtttggtggcacgcaggggactccttcgtaaaagagattaatgcaacgcacttttggttggggcgcgaaagacacccggaggcacgtgatgaagaaaatcgcatcaatgggacctttcgcaagagagataaccgagagtgcaaggagcacccgcgcgtggggttaacagcgcggtacaaaaaaaaacgcacgggggaaccccgcatggcctgcgggagcaacataacaaatcaggggacaagggggaggtccaagaagggggaaaattacaacagagaaagcaaggaaccagttgctgaaaatggccgcgccgcgggggagaatctcaaacagggtcggacccaaaaccaacttgaccgggcacgctcgtaccgggggaatagcccagtcggacacacgacagcgatggcaccacaacgtc

SEQ ID NO: 713222 - DNA, 326 bp, Homo sapiens
cgaaaaaaaaaaaaaaaaaaaaaaaaaaaaaaaaaaaaaaaaaaaaaaaaaaaaaaaaaaaaaaaaaaaaaaaaaaaaaaaaaaaattttttccccccctttgggggccccccccttttcccccctttttggggggggggggggggaaaatttttttccccccccggggggggggtggggggggggggtatccccccccccccccccccccggggggggggggggggtttttttttaaaaaaaaaaaaaaaaaaagatttttttttgcccctttaagggggaaaaaattttttttttcccccccggttgtttttgtgggggggcgc

SEQ ID NO: 713223 - DNA, 416 bp, Homo sapiens
  misc_feature (40)..(40): n is a, c, g, or t
  misc_feature (253)..(253): n is a, c, g, or t
tgctcctcttcatgattagttataaatatattgctataanatcatcataaatctactccctacgtagtggaatagcaagtcaagggtaaaaggtcatgcataaaatagatcccaccagatattatataatagtctttaattcttcaacaaatcataaaacattaatttatacttcactatacagcacttcaaggtttttctttatatattaatgtttatatatcacagacaattttacaaaaagataatcatntttttcataaaataggaaaagaaagccacagtactaaaaaaaaaaaatcaatctgcagagtgtaaacattttttataagaatacaaactaaaagaacaatgaaactcaagtacattatcagaaacagtggttgacctccctcttttttcctttactccctttt

SEQ ID NO: 713224 - DNA, 1446 bp, Homo sapiens
gtgcttggacggaaccctggcgctcgttccccaccccgtggcggcctgaccatagccatgccctccgtcacctcttcaccgcaccctcggactgccccaaggaccccgccgacgctccagcgccgcgacagccaccgaccgcgccgccgcactactcctatagtcgacgccatgacgacacgcgatccacctcgcaggtgcgccagaactaccaccaggactcagaggccgacatcaaccgacagatcaacctggatgctctacgcctccatacgtatacactgtccatgtcttactactttgaccagcgatgatgtggctcttgcaagaacttgagccacaatcactttcttcacccaatctacctgagtgcagcagggcaaccatgcatgcagcacaactgcaatgcaagctgcaagaaccgaacgcaggttggccgcaatctcaccattccggcatcatcaaggcaaacccagcacactgttgatgcacctggcgcgaggcgcggctgacatgcacacttggcagtgttgccatgaccatctttcggcgcacaccaccacatcgtcgcacatccacgtccctcagctggacacctggcgacccaaacctgggcccaccgggaaccaaaccacatcgcacgacaccactaccggcgacgcgcacccacacgcagacccacgcaacgccctgcaccagacgccccgctgcccaggcccgcacacggcaaatccgccctggcccaccgttgaacacacacatggcagcgacgacaaggcacagcggcccgcgcaaactcagggaatcagagcggaaacgactctacttcggccacctcccacacaccctcgagccagcacacccgtggaaacactcaacaccgccaaaagccagacagcgcatacaacagcccccccgatcagccgccgattggagcgatggaacgacccgctgaggtcaaccacaacggccgagcgaacgcccactgttgtgcgaggataccacaacacaacggtggacacacacaaggtcgaacgagcaacacacaccacaccgagcagggccacgacggaacaagggcacacgagagcccgtcgcaaccgctacacggacacactgtcgtaggcccaacagcgagtacgcacagcttggcggacaccgcaacacgacaaaacccacgagcagggcacgaagacagcgccaacacgcgacaccgcgacaacgcagcacaagagggacacgcaagacgcagcgccgcccgcgaaccacccgtgaccaccacaacccgcgccaacaggacaccacccacgctgcacgcaacactcgccctcacccccacaccacccacagccaggcccgaccgcgagcgcaaggctcacaagcctacagacccacgcacaccgacccgcaggacacaccagcaccgctagcgcgccaactgcacga

SEQ ID NO: 713225 - DNA, 150 bp, Homo sapiens
gctgccagctcctttaatttaaatttggcctaattgctgctattgcgatgggcagcacaaaactcctgtgttttaaagagcacggtgttgccatggcactcccccacagggtgagcagggtgtggaggagcatacagatgaggtccggtg

SEQ ID NO: 713226 - DNA, 1118 bp, Homo sapiens
  misc_feature (130)..(130): n is a, c, g, or t
  misc_feature (393)..(393): n is a, c, g, or t
  misc_feature (509)..(509): n is a, c, g, or t
  misc_feature (642)..(642): n is a, c, g, or t
ggtggtcccagtccctgttaatgggctccgattgtccaacttcaggctcacgctctgtcactgtcgctatagtgagtgtctagccgcaggccatgcggttgctggtcgtcgcaatatgattttcgttaancagcatgagtcgtgaattatagaccaggagccagactctgcgacgcacatatacctgcagactgatcaagaagagccatcgttccaagaccatcaattagtgcgggtgcgatgtgagaccttggcactacgagcctggtggtactcccagacgtctcgcacagccatcgcataggtgaaggctcgcctagtgagggcctggcgcagcggctttggtccacgcaacgtctatcctcgattggctgccatagatggtagactggntgggctctcctatggctgccaaccctgctgcgcatggctgatcggtgacgtatgtcatggcacatggcctgtgggcgcgtggcggcagtccgctcatcgcatctgctccgcacggntgctctatagtgctgacctgggctgtgaggtccttccaagagagggtcttcaagtcataggacttgataacgaagggtagggccgaggaaaggggcatccgatagcgactgggaattgcgggagaacggtctngcagcgtggattacccaaggcctcggcggtttaactagcgtagtctccgtacgcttgacgaccagcatgctacgatgacatgggcttctgtggcgagctgaaatagaacctcagtttcatcctggattcacccgattactctagaggccctgtaaggctgcagcttcggtattaggtgtaccctccattggcagtgggagctttctaagtgaatcgagactacaactccctccgatgggattttgaatcatattgaaaggacattcgcagggggggaaaagcagtcctgcaaagggctaccacagggggacaccagggttcgccggtcggccccacaagaagctggtccccgttgggtagactccacgcaggctgttgccctgttgagtccggattgtgggctgttggtcctgctggttgtccccatcgcgacgcgggcgtctaggtataaagggctaccaaatccaccaggtgcg

SEQ ID NO: 713227 - DNA, 918 bp, Homo sapiens
  misc_feature (2)..(2): n is a, c, g, or t
  misc_feature (67)..(67): n is a, c, g, or t
  misc_feature (74)..(74): n is a, c, g, or t
  misc_feature (149)..(149): n is a, c, g, or t
  misc_feature (184)..(184): n is a, c, g, or t
  misc_feature (193)..(193): n is a, c, g, or t
  misc_feature (258)..(258): n is a, c, g, or t
  misc_feature (261)..(261): n is a, c, g, or t
  misc_feature (322)..(322): n is a, c, g, or t
  misc_feature (343)..(343): n is a, c, g, or t
  misc_feature (351)..(351): n is a, c, g, or t
  misc_feature (365)..(365): n is a, c, g, or t
  misc_feature (432)..(432): n is a, c, g, or t
  misc_feature (436)..(436): n is a, c, g, or t
  misc_feature (532)..(532): n is a, c, g, or t
  misc_feature (536)..(536): n is a, c, g, or t
  misc_feature (564)..(564): n is a, c, g, or t
  misc_feature (568)..(568): n is a, c, g, or t
  misc_feature (571)..(571): n is a, c, g, or t
  misc_feature (576)..(576): n is a, c, g, or t
  misc_feature (579)..(579): n is a, c, g, or t
  misc_feature (583)..(583): n is a, c, g, or t
  misc_feature (586)..(586): n is a, c, g, or t
  misc_feature (624)..(624): n is a, c, g, or t
  misc_feature (781)..(781): n is a, c, g, or t
  misc_feature (798)..(798): n is a, c, g, or t
  misc_feature (800)..(800): n is a, c, g, or t
  misc_feature (807)..(807): n is a, c, g, or t
  misc_feature (830)..(830): n is a, c, g, or t
  misc_feature (832)..(835): n is a, c, g, or t
  misc_feature (837)..(839): n is a, c, g, or t
  misc_feature (844)..(844): n is a, c, g, or t
  misc_feature (850)..(850): n is a, c, g, or t
  misc_feature (906)..(906): n is a, c, g, or t
cnaacatcaggtcatgatgtagcttctattaaaagggaacagaaaagagggtacaaaatggatttangtgatcnaggggattcagaaaaggtaattttaagacaaaaaagtaaattctactttacagagaaagcactaagtgtgtagtngaggttgggctatgaaattatatattatggaaatnttaccaaanagtaaaggtatttttttaatgacagtggccatagaatagctttttaaaggaaattacgaggggcnggngtgcaacttcctgctggggctggtgggggggggggcggccttccgccattctgcatcaggncttgttggtgccacataagcngggatgtngtacttcagggggnggaccttccatctgattcagcatggtgggttatgtctggggtgctcctggtgctgttcggcctgggnggcnggcggggctttcccccgctccctttctctcgggatgggctgtgatgctcaccttgctcatgaatggcctgggattctggattttcccatttaagcngtcntttcattggcgggggagggatggttggnggcnccngtgcngcntggnganggtattctgagtgcagtcccattccatatgcactggcngcggcttggggcaattaggtatggcgggcgcgtgtgaaagacgcgatgcgggaaccacagttactatctttaaaagacatcttagagaacacatctcagggcatagaatagagaaagaatgctgacacagtcttcttccacccttaagaagttaggngctaaccagaaaggatnanagtacgnaacatatatacttacatatcaancnnnngnnngtgtntatttntctcttcaacctttcttccctttttttatttcttcttctttccctttctatttttntcattttccttt

SEQ ID NO: 713228 - DNA, 853 bp, Homo sapiens
  misc_feature (528)..(528): n is a, c, g, or t
tcatccattgatttcacctattctcaggctatactctagaccaagacctacgccaagagatctcattctcagctattcatacttcatcgaggtaaatctaactttacttcccgacataaacttttctcggggcatatccggaatgcccgcagatgttactcggattaccccagatgcatagaccacatgaaatactcctatctagtctgtaggctctattcattgtctctacatcagcagatacactactttaataagtctcttcagtgatactgacgaagcctctcgtctcacgcatgtcgaagaagtcctaatagtagaagaactcctcccattaaaccatgggagtgactaatagtggatgccgctccactactctgagctacacattcggatagaacctcgtatacataaaagtctagacatataaaggcaaggacttgaaccccatcaaagctgggtttcaagccagaccgccatggtctcgatgacttgtcatagtggtaagactatttctgtaatagactnccagtcctagtggggactgacgcggtcttaaaaaaaaaggtttttaagaaccacattttgttgtatagagcgccaggggccccaaaaaggggatattgtgcaccgcggtgggacaaaacagggtggtaccaaaggagaaaccccgcgacacatagacaagagggcgggaggagtcgcacaacaattataaaaagcgccgcggcggagacacagagcgttttgaacacattccgaaaggaaatccagagggcaatacacgggagtaaaacgggcgggccaagcggcgcatattcaaataccgggccgtgtgtgcaccagggagaaa

SEQ ID NO: 713229 - DNA, 248 bp, Homo sapiens
ctcgaagaaagcagttgaaggagcttagggctgagactatgggtatatgagatataggaatgaagtcatctgcaacagagacgtagttcgacttccctcttcctatttgaataccctttatttctctctcttacctgactgccctggccaggacttccagtactatgttgaataggagtggtgggagacagcattctggtcttgtgtcagttttcaaagggaatgtttccagctttaggttatttcag

SEQ ID NO: 713230 - DNA, 192 bp, Homo sapiens
  misc_feature (188)..(188): n is a, c, g, or t
cattttaaggagggagagcacccactattgatgaaactgttatggcaacccccaacccagggtgaaccgtatgtaaaccaggctgaactctccacatcgccggcctcaccatcctgggatacaattctgactataaactcagcatcagataaacctagatattaccagcaatgcagcaggaaaattanattt

SEQ ID NO: 713231 - DNA, 695 bp, Homo sapiens
gccctccgtgttcgttgctcgtctttccggtgacctgagggtaccttgtcgggccgtcatctgctcgtgctctacggtgctgtcagcagcctggctgctcgccgcttcggccgctgctgctccatcctcagcgtctcacctagcatggctctcccgtcatggcgggacgttctgcccaagtggcctagctggaacaaggtctgtcacctcgtgccatcaacggtgcaagtctgcgccatcaacctctaaggtcgtggtcatgctatcatgcccagccgtgccccagccctgcctactgtcggccgttgcagccttcgactggccgcagctctactctgggcactcagcatcctaccgtggttctggaccgtgttgcgcttgctccacaggagcacacctttactggcccatcagctcccatccagccatcttcctgtactgggcttccttgatacgaggaccagaaacggggagaccctgctggctaggcccacatcgagggcctggctgggagtggcatgtatgacgtgactggcctgctggatcgtggagggggcgcgctgtcaggcagcaggatagagtgggactagttcctgagaccagccaacctgggggctttagggacctgccccttcctagcgcagccatgtgattaccctcatgggtctcagtgtcctcatctgtaaaatggagaa

SEQ ID NO: 713232 - DNA, 920 bp, Homo sapiens
tagtgtgtgggggcgcgcggaggggggagggggggggttcgaggctgccgacccaggagattctacccagtggaaactcccacagcaacgcaggtagatggggctgacctggcctctccatggggcggggggtagcaaaaacctcatgtccatgaagctgcgtcgttcctctggctcagccaataaatcctaaggagacaagcagcccagcagggatcagcagtggccaccttagcacgaacatagggttaaccctttcaagccttcatgtctgccatggggggggggtgtttcttcctgtacatttatttaagaaaacactggatttaaataattgtaaataattgggagctgaatattaaagatttaagttatttattgggtgcatttttttgccacaatgcaagctggcatattttgagggcagggggagttttattctacaccctgtaccttgctacataataatggctaaggagggggatctgtagcgtgatggggaacggggagcgcaagacggtgggcgattagtatcgttatcaattgggcccgatcgcagacttatggggcagtaagggagtaagcggtgtaaagagggaaatttagcatggaagcgtgagggggggggcctgaaggggtggagctcttactacagtgtagtgggacggagggatgctggacgaacagagaaggggttaagggcggggcgtgcgggagaggtgtgggaggcgcaggacgaagggggacgccggtgcgcgatggagggggaagcgtgtatactgctaatgacagggtggctggggtaggggcggcgcgcgggggttgcggcgcatagaatggtgtgtgctgggtgtgagtgaggtggagggagggttgtgcggagggtggcgcgatgatagagatggtggcgacgtgggcgg

SEQ ID NO: 713233 - DNA, 380 bp, Homo sapiens
  misc_feature (320)..(320): n is a, c, g, or t
  misc_feature (349)..(349): n is a, c, g, or t
  misc_feature (357)..(357): n is a, c, g, or t
agaggttgcagtcagccgagatcgcaccactgtacttcagccagcctgggtgacagagcgagactctgtttcaaaaataaataaataaataaaatagaattctgaattttatttttaataattattttagtaaagagaatgtcttgttttttggagttgttgaatttattgaattggcaaaaattatgtataagaggttatacaaaatgaccgtgattgaagtatgtatacattacagaaatggctaaatcaagttaaataacacttcacaattcaagattccctcatttatataataccttcatgattcaagattcccntatttttataattgtgggtaattgtgccnttcccccntgaatgttggtgggatttttgga

SEQ ID NO: 713234 - DNA, 880 bp, Homo sapiens
  misc_feature (465)..(465): n is a, c, g, or t
ggcagaagtccggggctggcagggcgcttcctgcgcagcgccgaggcgacctggagtttgtgacgctgtgatggtctagaggctggagattcaagatctgggtgccatcatttctggttctgttgatgaccctcttccagtgtcagaataaattatcacttatgggaactggaaacactcaccgattcaaatgctcagctatcatgtgttaattatgcaagtaacaatgtttaaccgcgtgaactcagtcaagtggcagaaacaaaaaacacctgaaacaattccctgggatgaagacgttctcataacattaggacacagaagagttccaaaagtctgagacaagatcttgaaagggttacgtgtccactagagggagtcaaaggaatgacacagttaaggggaacgacttagaagtgggaacaacgggtggtgggatgaacaggcaacagataatggaatctncttaatgtactacaccagtgaattggaacaattagggttgaaaccattttctgaatccaagactctttactgaactgaaaactaaaatgtttatatacacgaatataaggagcaactctttgagtacccttggggcgagtttctaagaagaacatttccttctggcctgatagaagggtgctaacacacgaaaagatcacaccttccagaattcatctgtaaacctgataacactggctgacatggtaggagattcttactacctagatattgatgtccccatggatccaatgtcaaattaggatcctttgacactttagtaggctgttcggtatggacagcccggacactcgaagataccggatagattgaggtccacgaagggtctgttcacacggacactcctcacgacggg

SEQ ID NO: 713235 - DNA, 412 bp, Homo sapiens
  misc_feature (17)..(17): n is a, c, g, or t
  misc_feature (31)..(31): n is a, c, g, or t
  misc_feature (187)..(187): n is a, c, g, or t
ccttttccatttggttnatatatttacaaanccccttcacaccttagaaaatacctccccccggaaatgccttttttgaaagtgtgaattaaataagaaatgggggtaaaatagaaaagaaatttattgcctgattggccccaggtgcggtggttcgtgccctgtaatccccagctctttgggaggnccaaggcaggtagatcacaaggtcaggaaattgagacccatccctggcctaatacagtgaaacccccatgtctgcctaaaattacaaaaaattagctgggcgtggtggtgcacgcctgtagtctcagctactcaggaggctgaggcaggagaatcgcttgaacccgggaggcagaggtagtagtgagctgaagtcccgccactgcactccagcctgggcaacaga

SEQ ID NO: 713236 - DNA, 128 bp, Homo sapiens
gacagattaaagtgtccccgttgcaagcctgttgtctggcatatataaccacaaattccttttgctttcctcttgactcgtactctactcacgttatacaaagtggctggtctgcaaactatttttat

SEQ ID NO: 713237 - DNA, 987 bp, Homo sapiens
  misc_feature (6)..(7): n is a, c, g, or t
ttctgnnacacagagatgccgacgctcctgtttttgtttctgtctaccttctctgcctcgcccggtgtgggcgccttttgtgacctgattgtgtcgctaatccggattccttcccgggttcgggactccccttttataagggctccggtttaacctacgtccccttgtggcacgaaccgttggtgacgcaggccgccccaatgtataacgcccccctcgggccgtccgcccgggggtattatccgccctcgcttcaggaggacacacaccttggtctcgggacaccacgcctcgtgtttcccctcccccctgggaggccacgccttttttcgcggtggtgaacgtcccccccggggctcctgtgtcgttttcgcccccgtccgcccgtagtgacacaccgccgggcagttgggtctcctccttcactcggggggcgcacacctagttcttgctcctccttgatggactccggggcgagggcgcacccgcaaatcccacaatgtctctcctgtctttgtaggctggcagagtgggtgcacaattgtgcggccgctgcacttttcatgtgtaggctgctgcctcatagaggccacccggtcccctcgggggtggtttctcctactgagttatggattcgtgtctctctcttcccccctggaggatggatgttggcccccccctggcgttggaatacaacaatgatgccggaccccctgcgaggcctcccgctcgaaaggcggaggccacaggggggcggggtggtcaccttgatcgtgcctcccccccgtgcgcctggctgaccgaggcacgcgggggcgtagccccttgggccacccccctcggcaccctaggggttccacgcacgagtttgcgcacgctcctcagtgtgcctcctaagtacgccttgttttgtcttgcgggtaccccagaacaggaagacaagatgaaaacagaacaataaataaaaaactataacaaatgatcaaa

SEQ ID NO: 713238 - DNA, 447 bp, Homo sapiens
  misc_feature (93)..(93): n is a, c, g, or t
  misc_feature (96)..(96): n is a, c, g, or t
  misc_feature (101)..(101): n is a, c, g, or t
  misc_feature (129)..(129): n is a, c, g, or t
  misc_feature (143)..(143): n is a, c, g, or t
  misc_feature (199)..(199): n is a, c, g, or t
  misc_feature (203)..(203): n is a, c, g, or t
  misc_feature (209)..(209): n is a, c, g, or t
  misc_feature (224)..(224): n is a, c, g, or t
  misc_feature (227)..(227): n is a, c, g, or t
  misc_feature (251)..(251): n is a, c, g, or t
  misc_feature (289)..(289): n is a, c, g, or t
  misc_feature (312)..(312): n is a, c, g, or t
  misc_feature (317)..(318): n is a, c, g, or t
  misc_feature (348)..(348): n is a, c, g, or t
  misc_feature (356)..(356): n is a, c, g, or t
  misc_feature (364)..(364): n is a, c, g, or t
  misc_feature (429)..(429): n is a, c, g, or t
  misc_feature (432)..(432): n is a, c, g, or t
  misc_feature (439)..(440): n is a, c, g, or t
  misc_feature (442)..(442): n is a, c, g, or t
  misc_feature (445)..(446): n is a, c, g, or t
gggggggggggggggggggggggggggggggggggggggggggagggggggggggggggggggggggggggggggggggggggcggggggggnggnggggngcgggggggcggcgcggggggggctgcngggggccatcagcntcccagcgggggggcacgtctttcattcagacgctccaatgcttttgatttcagtntgtnaaaggncgggttttacagggngtnctttacagtaatttcatgccaganaccaggtttcttcgatggtacacagctccatgaaattngtgtttccatccagttgacaggnataannggggatttttatttttgtctttttttgggncgttgtgncgtaaaanggtcagattcctttaggaataaatgaggaaaaggagaggaaagagaagatctgggctgtgctggngcnggtttcnncncgnnt

SEQ ID NO: 713239 - DNA, 414 bp, Homo sapiens
gcgtggagactcattgtatgtataagaatattctgacagtgagtgacccggagtctctggtgtaccctcttaccagtcagctgcctgcgagcagtcattttttcctaaaggtttacaagtatttagaactcttcagttcagggcaaaatgttcatgaagttattcctcttaaacatggttaggaagctgatgacgttattgattttgtctggactatgtctctggaataattttaccaaaacaagctatttgagtctcgacttgacaaggcaaaacatgccactggattccctttacaactcgacaacaaaaatccttattctctacaaaggacttcccttttcgtaacctaatcctttctattgctaaaaatcgtaacttaaaatgcgcaacttcaaaacaacaaaaaacaac

SEQ ID NO: 713240 - DNA, 349 bp, Homo sapiens
ccccctccccgggtatctatagctgcttttgcattaaaatgacatagtgagtagttggaccagagagaactatttgcctgtttacagaaggtttgcccacctttactctaaaataatagaaataattttcacaagaggcaaacttacaaaaatcacaaggcatgttactagaaggcaaaagtgactagataaattcaatctactggggaatttgtctcatcaaactttcttcacacacacacccattaggcaaatggaatcaacttctttgttgtgctggaaaaagtaggtacatcttggccaggcgcggtggctcacgcctgtaatcccagtacccggggaggggggg

SEQ ID NO: 713241 - DNA, 142 bp, Homo sapiens
cagataactctcatctgtacctatatatctcatcaatttcttgtatattttatgtcagtcgctctcgctgtttattgtctttaaaataacatgtcaacttcaatgttctatctggaagcagactacaatatttccatagact

SEQ ID NO: 713242 - DNA, 873 bp, Homo sapiens
  misc_feature (579)..(579): n is a, c, g, or t
taaaaacaaaattgtttaatgttgtctccttggttttaagcccttcccatggtaaaatcaactgaaacttaggttctcgccatctatataaaaactgaaaaaggaggccccagattggtatatgcagggccacgggaaagcactggtggtggcctattatatttacctggcgaatacaagatacttatcagctttaattttaaaacaaaacctcaagaaatctttatctccaccaaagaaaagcatacacgcatttggctatgatcataatacgttgtgcgggtaccgcagtcagtgggaaaaacacagatacacaggccacatagacagcagtattgttaaaggggaagaaaccgtgttcaaacccaatctctgtaatctacatctatgaggtgttcaggtgataaggagaggcaaaaggggtaaaaaatacgagtatatttcagcgaaaacatcagtccagcctcaccaaacaagggttcgtgggtaaaaagtacaggaggagaggaatgtggaacaccatttcgcaaaactggtgaaaaacccatttgttctccacgcggcaaaacagtattgcangctgtcctcaacagtgccgaggtatacgctataagggaaacaattgacgtttttcggacaaattgggactcggtggacttcgtcaatatctaaactcatcgggggtggtctattactcccaacagttggctcacgatagcgcgatttatcataagatccctttatcccacaaattatggggggccaagtcaagccttaaatatacaccccttatatttacagaaaggggcaaagtgtaccccatttaaacaacggctgaattaatttctgaggtaatcaacacaaaagggtaag

SEQ ID NO: 713243 - DNA, 2152 bp, Homo sapiens
gaggctcaggaaaaagatgaactggtcccattcctgcatctccttttgctggatctactttgctgcttccagactgagagctgcagagacggcagatggaaaatatgctcagaagttgtttaatgacctttttgaagattattctaatgctcttcgtccagtggaagatacagataaagtcctgaatgtgaccctgcagattacgctctctcagattaaggatatggatgaaagaaaccaaattctgactgcttatttgtggatccgccaaatctggcacgatgcctatctcacgtgggaccgagatcagtacgatggcctagactccatcaggatccccagtgacctcgtgtggaggccagacatcgtcttatataacaaggctgatgatgaatcttcagagcctgtgaacaccaatgtggtcctgcggtatgatgggctgatcacctgggatgcaccggccatcaccaaaagctcctgtgtggtggatgtcacctacttcccttttgacaaccagcagtgcaacctgacttttggttcctggacctacaatggcaatcaggtggacatattcaacgccttggacagcggagatctctctgacttcattgaagatgtggaatgggaggtccatggcatgcccgctgtgaagaatgtgatctcctatggctgctgctctgagccttacccggatgtcacattcaccctccttctgaagaggaggtcctcgttctatatcgtcaacctcctcatcccatgcgtcctcatatcttttctggctcctctgagtttttatctcccagcagcctccggagaaaaggtctccctgggagtgaccatcctgttggccatgactgtatttcagctaatggtggcagaaatcatgccggcctcagaaaatgtgcccctgataggtaaatactacatagccacgatggccctgatcacagcctccactgcgttgaccatcatggtgatgaatatccacttctgtggggccgaggcccggccggtgccacactgggccagggtggtcatcctgaaatacatgtccagggtcttgtttgtctatgatgtgggtgaaagctgcctcagcccgcaccacagtagagagcgggaccacctcacgaaagtttatagcaaactcccagagtctaacctgaaagcagccaggaacaaagacctttccagaaagaaggacatgaacaaacgcttaaagaacgacctgggctgccagggtaagaaccctcaggaggccgagagttactgtgcacagtacaaagtgctgacgaggaatattgagtacatcgccaagtgcctcaaagaccacaaggccaccagttccaaggggagtgaatggaagaaggtggcgaaagtcatagaccgattcttcatgtggatttttttcattatggtgtttgtgatgactattttgatcatagcaagagcggattagtcacagatattggctttgctatctgggtagaaattaatacaattccctgtgatctattccaatgttcttccaagatttttgttcatctataatttaggggttatgttgtctgtgctttttatttttagcttcaaatgaatgtcgaagctatctgctctgttaaattaagcagaagatccaaaatttcaagggtaggaagatggaagaaatagggaaagagcccttttatagcccaccgtagtggtgggtgactggcctctagtttatataattatttacctctttggcagtacagataacaaaatacactttactggtaaaatttaaaacaaaaaaggcaaaacaaaacaaactcattttccccttagttcccattaaaatatgcatttgaaaaatgaaatagtcatatatatattagtgtgatttaagtctcaatggtaccttattcaggcatagtgcatttgaagtcatatctcaaatagtggaataaaaggttttgtcccatgtaaagaaagtctaagcatcagctgtttaatggggaaaagaactttcttcataatggtgatgtcgtatatgttggttatgttttatataaacccaaaagatgaagtcattcctgcatttaccctttgattaaaatatgatagatgaagctgttcctgcatttagtcttgtattaaaataaggtgattagca

SEQ ID NO: 713244 - DNA, 1584 bp, Homo sapiens
tgcaatcaaaactggtcttatggtctctgggtttacacgaaagagcaatgaaagacattatactttagagcagtagttctcaaagtggtggtccccagatgcacagcatcggcatcccctgggaacttatagaaacacaaaacctcagggcccaccggaagcctactgaatcagacattctggagataaggccctggcatcctgttttaacaaggcttatgggtgattctgatgcattttctgttgaagtctgaaatccactgacccagaggttaagacctgattttgaagtcaaagaaacttgcatttgaacgctgacttcactgctcactccttgatcaaacaggtaaatactacatagccacgatggccctgatcacagcctccactgcgttgaccatcatggtgatgaatatccacttctgtggggccgaggcccggccggtgccacactgggccagggtggtcatcctgaaatacatgtccagggtcttgtttgtctatgatgtgggtgaaagctgcctcagcccgcaccacagtagagagcgggaccacctcacgaaagtttatagcaaactcccagagtctaacctgaaagcagccaggaacaaagacctttccagaaagaaggacatgaacaaacgcttaaagaacgacctgggctgccagggtaagaaccctcaggaggccgagagttactgtgcacagtacaaagtgctgacgaggaatattgagtacatcgccaagtgcctcaaagaccacaaggccaccagttccaaggggagtgaatggaagaaggtggcgaaagtcatagaccgattcttcatgtggatttttttcattatggtgtttgtgatgactattttgatcatagcaagagcggattagtcacagatattggctttgctatctgggtagaaattaatacaattccctgtgatctattccaatgttcttccaagatttttgttcatctataatttaggggttatgttgtctgtgctttttatttttagcttcaaatgaatgtcgaagctatctgctctgttaaattaagcagaagatccaaaatttcaagggtaggaagatggaagaaatagggaaagagcccttttatagcccaccgtagtggtgggtgactggcctctagtttatataattatttacctctttggcagtacagataacaaaatacactttactggtaaaatttaaaacaaaaaaggcaaaacaaaacaaactcattttccccttagttcccattaaaatatgcatttgaaaaatgaaatagtcatatatatattagtgtgatttaagtctcaatggtaccttattcaggcatagtgcatttgaagtcatatctcaaatagtggaataaaaggttttgtcccatgtaaagaaagtctaagcatcagctgtttaatggggaaaagaactttcttcataatggtgatgtcgtatatgttggttatgttttatataaacccaaaagatgaagtcattcctgcatttaccctttgattaaaatatgatagatgaagctgttcctgcatttagtcttgtattaaaataaggtgattagca

SEQ ID NO: 713245 - DNA, 510 bp, Homo sapiens
caggaattggaagtactgactgcaaatatccaggatcttaaggaagaatattctaggaagaaggaaactatttctactgctaataaagcgaatgcagagaggttgaaaaggctgcagaaatacgcagacttgcataaagatcgacttggactagaaattctaaaaatttatggtgagaaattgcagttgattatcactaatattgaccctaagaatcctgagagcccatttatgtattccttacatctcaatgaagcaagggactatgaagtgtcagatagtgcccctcatcttgagggcctagcataatttcaagagaatgtaaggaagaccaacaatttttcagatgttcctgccacagatcggaaagcatctactgccacgagctataattaacatacagatagtgtatataataaacggaatatatatcttctatattacatagtctgttgcttctctcgtgactattatgattatactttaagttttagggtacatgtgcacaat

SEQ ID NO: 713246 - DNA, 129 bp, Homo sapiens
tctcctgctcactatggtaagacagcagccactaggtactgccagaaagaagagggcggagcaggaggctcttactgggtgagtgcaatgagcttggaaaagaagaatgaggctctaaaagtggggagg

SEQ ID NO: 713247 - DNA, 190 bp, Homo sapiens
tagtctcagctgctcaggaggctgagatgagagaatctcttgagcccagtaattcagggctgcagtgagctatgatcatgccactgcattccagcctggtcaacagagcaagacccagtctcaaaaataaaaaataaaatgaaataaaacacaaagtaaatatacaagtagcggacctgttggaactttg

SEQ ID NO: 713248 - DNA, 916 bp, Homo sapiens
gcgcgtctgagtgcagagctgctgtcatggcggccgtctgtggagcttctttcccgtcctgtgctgtgctgtatcgggggatgtccagagctcggaggtgcccgggttgtgctgagggatcgggaggggaggtggggtcggcataggagatcgttacaagatgtgaggggcgtgcagttgtccaagggtgtggaagccctccagggatggtatctcgggggcccagagtgctggtaacaggagaaagagccagtgtcggtttcctttaagaacagatgggagtttggggggtacatgataataccttgctgattcttaatgtagggtggaaaggtgtgtatctcccagtttacagatttgggatcccggtcgagtgatatcactttcgaaggggaaaactggaaggagcaaggtttttgtgatttacttcaaaaacatcaagaaggtggtcaagatgtgccttatctctctccaaattgaaatcttcagcgtcccaccttcttacttttattaaaagggaaatcgtgggggtgtggaaaaggatttctaatggaccccaagtgtattgatgaatggttctcccttgatttgatatgtgtgctttctgcataaaaggtgttcaacaacaatgtgatcctgacttgagagggaaatgagcagtcaaatgaatatgtgaatcaacatgagtggctggtgttctgagtttgacaagatttttttcaaatatttggggatttagagggagagttaaagggaaatggtggcacagaggggtcggcgcaaatgggttggacaatcgacctgtgggccacttgggacggtggaataatatggccaggggtaaggtgtttctaagtgtgttggccaacctctttgttggaggtgaagtaaggaatatttttttaaaaagaggggg

SEQ ID NO: 713249 - DNA, 1292 bp, Homo sapiens
  misc_feature (1204)..(1204): n is a, c, g, or t
  misc_feature (1211)..(1211): n is a, c, g, or t
agcggagcgcccggcggccacctctttcccgcgggcgggccggggcggggcactgaagggggcggtccaggaccctgacttgtctcgcggttactgggccggcgcgagcacgcgaggctcgggggcggcacggggcggggtttagcctgtggtgggcgctgcgggtgtttgcaggaggttgcagtactcgctgggctgaggtcgtctcgggtgaggaggtcgcgccggaagtggctctagccgtggcgcctcggcgtagtaaggagcctgcaacagagttttgttgtttagggggcgcggcaccgcaccgctcccttcaccttgcagcagccatggcgaaaggcagagtcgccgaacgatcgcagttgggcgctcaccacacgacccccgtgggggacggggcagcggggacgcggggtctcgcggcgcctggcagcagagaccaccagaaggaaaaatcctgggtagaagctggatcagcaagaatgtcactccttatattggtgtccattttcttatctgcagcttttgttatgtttttggtatataaaaattttcctcagcttagtgaagaagaaagagtgaatatgaaggttcccagagatatggatgatgccaaggctctaggaaaagttttatccaaatacaaggacaccttttatgttcaagtacttgtagcttattttgctacatatattttcttgcaaacatttgctattccaggctctatatttctcagtatactctcagggtttctttatccctttccactagccttatttcttgtttgtttgtgttctggacttggtgcctctttctgttatatgctttcctatttagttgggagaccagttgtatacaaatacctaacagagaaagcagtaaaatggtcacagcaggttgaacgtcatagagaacatctcattaactacattatatttttgagaataacaccatttctgcctaattggtttattaatatcacatctcctgtgataaaaaaacaacaaacgcaaaaaaaaaaacaaacaaacaaaacaaaaaactgtgtgggggggccgcggcccccgaaaaaagttttcacagcaccactttcgttgggacgcgggggccccagtaggtagtgggacatgggcaaaacgcgctcccaagggaaacccgggcagacacaggggcgtgagttttccaacaaaaaaacaccccncggcggnaccggcggtctggaacactcccagggcgtgggagcctcacggcttcacaggagccacatcgtacaccgcgcggggggcgaa

SEQ ID NO: 713250 - DNA, 867 bp, Homo sapiens
agcggagcgcccggcggccacctctttcccgcgggcgggccggggcggggcactgaagggggcggtccaggaccctgacttgtctcgcggttactgggccggcgcgagcacgcgaggctcgggggcggcacggggcggggtttagcctgtggtgggcgctgcgggtgtttgcaggaggttgcagtactcgctgggctgaggtcgtctcgggtgaggaggtcgcgccggaagtggctctagccgtggcgcctcggcgtagtaaggagcctgcaacagagttttgttgtttagggggcgcggcaccgcaccgctcccttcaccttgcagcagccatggcgaaaggcagagtcgccgaacgatcgcagttgggcgctcaccacacgacccccgtgggggacggggcagcggggacgcggggtctcgcggcgcctggcagcagagaccaccagaaggaaaaatcctgggtagaagctggatcagcaagaatgtcactccttatattggtgtccattttcttatctgcagcttttgttatgtttttggtatataaaaattttcctcagcttagtgaagaagaaagagtgaatatgaaggttcccagagatatggatgatgccaaggctctaggaaaagttttatccaaatacaaggacaccttttatgttcaagtacttgtagcttattttgctacatatattttgtatccttttaactgaaaaaatgttttctaattttgttcaagaaaaagtgtaaaaggtctgctcttcatttatacataactattttccttttaaaatttgttattgcagtgtgacaatattaaataattgaaaaattaaaatggaaaaaaattatcactttaatcct

SEQ ID NO: 713251 - DNA, 296 bp, Homo sapiens
gtactcataatcaaagacaacagatcctggacctgagtgtttagtaaagggagaaagctcaggacatgtttcatctcttacactatttgaaatagacctcttttccccaggctcctgcaagtgctcagggtaaacatacccattaccctgggaagccccgtgtagcagaatgtactccccatccaacccgggggtggctcgtgctggcccagtgaggccctgtttttctggtgtcctgctggccaaggcgggagtcctgcctttattcggagtgtagtgttccctagtgttcccta

SEQ ID NO: 713252 - DNA, 1067 bp, Homo sapiens
agcggagcgcccggcggccacctctttcccgcgggcgggccggggcggggcactgaagggggcggtccaggaccctgacttgtctcgcggttactgggccggcgcgagcacgcgaggctcgggggcggcacggggcggggtttagcctgtggtgggcgctgcgggtgtttgcaggaggttgcagtactcgctgggctgaggtcgtctcgggtgaggaggtcgcgccggaagtggctctagccgtggcgcctcggcgtagtaaggagcctgcaacagagttttgttgtttagggggcgcggcaccgcaccgctcccttcaccttgcagcagccatggcgaaaggcagagtcgccgaacgatcgcagttgggcgctcaccacacgacccccgtgggggacggggcagcggggacgcggggtctcgcggcgcctggcagcagagaccaccagaaggaaaaatcctgggtagaagctggatcagcaagaatgtcactccttatattggtgtccattttcttatctgcagcttttgttatgtttttggtatataaaaattttcctcagcttagtgaagaagaaagagtgaatatgaaggttcccagagatatggatgatgccaaggctctaggaaaagttttatccaaatacaaggacaccttttatgttcaagtacttgtagcttattttgctacatatattttgtatccttttaactgaaaaaatgttttctaattttgttcaagaaaaagtgtaaaaggtctgctcttcatttatacataactattttccttttaaaatttgttattgcagtgtgacaatattaaataattgaaaaattaaaaaaaaaaaaaaaaaaaaaaaaaaaaaaaaaaaaaaaaaaaaaaaaaaaaaaaaaaaaaaaaaaaaaaaaaaaaaaaaaaaaactaagaaacaaaaaacccaagacaccaatttggaaacaaggaaatattcaaaaaggaaacctgttacatttgtctccccgtggcaaaaatttccacagaattttttaacccgctttgaaaaagttcttccccggggcatttccca

SEQ ID NO: 713253 - DNA, 4186 bp, Homo sapiens
agcggagcgcccggcggccacctctttcccgcgggcgggccggggcggggcactgaagggggcggtccaggaccctgacttgtctcgcggttactgggccggcgcgagcacgcgaggctcgggggcggcacggggcggggtttagcctgtggtgggcgctgcgggtgtttgcaggaggttgcagtactcgctgggctgaggtcgtctcgggtgaggaggtcgcgccggaagtggctctagccgtggcgcctcggcgtagtaaggagcctgcaacagagttttgttgtttagggggcgcggcaccgcaccgctcccttcaccttgcagcagccatggcgaaaggcagagtcgccgaacgatcgcagttgggcgctcaccacacgacccccgtgggggacggggcagcggggacgcggggtctcgcggcgcctggcagcagagaccaccagaaggaaaaatcctgggtagaagctggatcagcaagaatgtcactccttatattggtgtccattttcttatctgcagcttttgttatgtttttggtatataaaaattttcctcagcttagtgaagaagaaagagtgaatatgaaggttcccagagatatggatgatgccaaggctctaggaaaagttttatccaaatacaaggacaccttttatgttcaagtacttgtagcttattttgctacatatattttcttgcaaacatttgctattccaggctctatatttctcagtatactctcagggtttctttatccctttccactagccttatttcttgtttgtttgtgttctggacttggtgcctctttctgttatatgctttcctatttagttgggagaccagttgtatacaaatacctaacagagaaagcagtaaaatggtcacagcaggttgaacgtcatagagaacatctcattaactacattatatttttgagaataacaccatttctgcctaattggtttattaatatcacatctcctgtgataaacgtgccattgaaagttttttttattggtacttttctaggtgtcgcacctccttcttttgtagccattaaggcaggaacaacactgtatcaacttacaacagcaggagaagctgtttcctggaactcaatatttattctgatgatcttggctgttctttctattctgccagccatcttccaaaaaaaactaaagcagaaatttgagtaaaaataatcatctgatttttagttttgctgtcatcaccatctcaggattaacaggtgcatccatttatgttttaaaatcacctcttcagtaattaaacaaggaatttgtaaaataaaatttcctatcagatagttaaagtaatacatttaagtgacaaggggagaagaaagtaaaaatggaaattggtatactgtgaaaagtgctatcaatagttaaggtagacatcttagacatcttataaattattataccaagggtagctgtagataatagtagtgtggtaggaaattgttgatccagctaattcattcaatttaattgaatattttttatctttaataactaaaatagatatttttaaattctagattttttaaagtagtgttgcaggttttgttaatgttaggcttttttcagagcataaactggaaaacttaaaaagagatttacattttcttcctctttttttttttttttttttctgttttgagacggagtctagctctgccgcccaggctggagtgcagtggcgcgatctccgctcattgcaagctccacctcctgggttcacgccattctcctgtctcagcctcctgagtagctgggactacaggcgcccgccaccatgcccagctaatttttttgtatttttagtagagacggggtttcaccgtgttagccaggatggtctcgatctcctgacctcgtgatctgcccgccttggcctcccaaagtgctgggattacaggcatgagccaccgcgcctggcccattttcttcctcttttgaggtaatggatttgtttggagatggcatgttagtagacgactgaatatggaaaggatatcgagttatctattttgttaattttatttttgttttttatcatctagatttttatcatggattagtctgaaatttaaagttctggccagtcggttttctttcatcttgtagtttttacagtatttccactgtgcatatgcaaaatgggtattacataactgtatcatatttggtattgataatttttttttttttttgagacggagtcttgctgttgcccaggctggagtggagtgcgtggtgtgatctcggctcactgcaaactccgcctcctgggttcaagcgattctcctggcccagcctcctgagtagctgggattacaggtgtgtgccaccatgcccagctaatttttgtgtttttagtagagacggggtttcaccatgttggccgggctggtcttgaactcctgacctcaggctatatgcccacttccacctcccaaagtgctgggattacaggcatgagccactgtgcccagcctggtattgataatttatattcagataatttgttatggctctttaatatcccacaaggggctctaaaaagcaaacattcaagagtatgtagtttttagacattaagttaattattttaaacagtgacagcaaaacacaagtgattaaatatagtttatttgttccaatgactaaattttacctcatttattaatctggtcattaaggaatatatttaataatattatgtaattattctttttatgcatgatacacctagaaaaatgccttttgtttctattgatggctttgttgtttggagctacttttgattacttattgcagtttcccaatttagtctttactttatctaactcacaaagtaaaattaactgatcacatggcaactactgtatttaaatagttctggaaaaatgaaagtgctttttgctgcttggtaaatgggtaatgcccttgattccttgactgtaggacatagctgatctaaagtactctgtcagttttaccttcacccatgactgtcattagttgtcaaagttgaaaagtactttagctgtgagaaatccttgtatgtttttattataagaggtataatcatcctcaaagcctgtttttattacatgatgtggactgattattttttctatcacagtgttaacagatggattttattgtaaatacaaagaaaacatattgattattgtagtattcttatgtcacctggccttttgcgtgagattatttattatttctagcaaggctttcttcctttcttattgcccagagactgactgatacatcttttgttatttttacacataaattaaacatagcctttttggacaaattcactaaatattaatgtataaaatgtaattgagtaaatttttatcagaattttaaaaataaaagagcttagactcagtagaactcagtagaagcttcactatttactccagcgtgtgtaaattgtacttactctattctcagagtatatttactgtccttaccattgattctttccctttgctaatttttttttttgttaatggtagctgcgactttaggtggggtatattttcttctcctaagagaatagacagtttttccagattcatcatcattgactgtcaagaaaggacccttcagcaaggctgtaccctcaatgcagttgatggcctgtcttcacggatttacagacttggcctgatgcccatgtaaattcaagctttggcttgtggtaacaaccacaagaagacaagcatctgtggtgcggaggcaagcaggctaactaggagttgacaagctaagaaagtgaaactgttctttcttagttaactgtctttctctggagctctgttattttgagtataatatttccacgacacttagtaaatgcaagctaaaatgtaataataataaattgtattggagaaacctaaaaaaaaaagaaaacacgagacagaacagacgacaaaaacacaaaaaacacagaacaacacagacgcagaacacaacagaccaagaacacgcagaaaaacacagacagaggaagagaacagaaacaaaacacccagaaaccacataagaacagaaacagagaaaagcacaaacaagcaaacagcgcaaaataaagcagaaaaaagaaacag

SEQ ID NO: 713254 - DNA, 325 bp, Homo sapiens
cctataccactgaaacacaggtcaactgttgcatgtcattgaaaaaattccagttcttcacttggacccttaaagaatactgaagagcagccactgtatgtctctaaatcccttttctacatcctaaccttctttcaccagcacaaactctggagctaacaaaaagataccaacttctcctcgtcgtcctggcctttccctgttggtggttttttttaagacagggtctcgctctgtcacccaggctggagtacagtggctcgatcacagctcactgcagcctcgacctcctgggctcaagtgatcctcccaccggtggtatcag

SEQ ID NO: 713255 - DNA, 4046 bp, Homo sapiens
agcggagcgcccggcggccacctctttcccgcgggcgggccggggcggggcactgaagggggcggtccaggaccctgacttgtctcgcggttactgggccggcgcgagcacgcgaggctcgggggcggcacggggcggggtttagcctgtggtgggcgctgcgggtgtttgcaggaggttgcagtactcgctgggctgaggtcgtctcgggtgaggaggtcgcgccggaagtggctctagccgtggcgcctcggcgtagtaaggagcctgcaacagagttttgttgtttagggggcgcggcaccgcaccgctcccttcaccttgcagcagccatggcgaaaggcagagtcgccgaacgatcgcagttgggcgctcaccacacgacccccgtgggggacggggcagcggggacgcggggtctcgcggcgcctggcagcagagaccaccagaaggaaaaatcctgggtagaagctggatcagcaagaatgtcactccttatattggtgtccattttcttatctgcagcttttgttatgtttttggtatataaaaattttcctcagcttagtgaagaagaaagagtgaatatgaaggttcccagagatatggatgatgccaaggctctaggaaaagttttatccaaatacaaggacaccttttatgttcaagtacttgtagcttattttgctacatatattttcttgcaaacatttgctattccaggctctatatttctcagtatactctcagggtttctttatccctttccactagccttatttcttgtttgtttgtgttctggacttggtgcctctttctgttatatgctttcctatttagttgggagaccagttgtatacaaatacctaacagagaaagcagtaaaatggtcacagcagtgtcgcacctccttcttttgtagccattaaggcaggaacaacactgtatcaacttacaacagcaggagaagctgtttcctggaactcaatatttattctgatgatcttggctgttctttctattctgccagccatcttccaaaaaaaactaaagcagaaatttgagtaaaaataatcatctgatttttagttttgctgtcatcaccatctcaggattaacaggtgcatccatttatgttttaaaatcacctcttcagtaattaaacaaggaatttgtaaaataaaatttcctatcagatagttaaagtaatacatttaagtgacaaggggagaagaaagtaaaaatggaaattggtatactgtgaaaagtgctatcaatagttaaggtagacatcttagacatcttataaattattataccaagggtagctgtagataatagtagtgtggtaggaaattgttgatccagctaattcattcaatttaattgaatattttttatctttaataactaaaatagatatttttaaattctagattttttaaagtagtgttgcaggttttgttaatgttaggcttttttcagagcataaactggaaaacttaaaaagagatttacattttcttcctctttttttttttttttttttctgttttgagacggagtctagctctgccgcccaggctggagtgcagtggcgcgatctccgctcattgcaagctccacctcctgggttcacgccattctcctgtctcagcctcctgagtagctgggactacaggcgcccgccaccatgcccagctaatttttttgtatttttagtagagacggggtttcaccgtgttagccaggatggtctcgatctcctgacctcgtgatctgcccgccttggcctcccaaagtgctgggattacaggcatgagccaccgcgcctggcccattttcttcctcttttgaggtaatggatttgtttggagatggcatgttagtagacgactgaatatggaaaggatatcgagttatctattttgttaattttatttttgttttttatcatctagatttttatcatggattagtctgaaatttaaagttctggccagtcggttttctttcatcttgtagtttttacagtatttccactgtgcatatgcaaaatgggtattacataactgtatcatatttggtattgataatttttttttttttttgagacggagtcttgctgttgcccaggctggagtggagtgcgtggtgtgatctcggctcactgcaaactccgcctcctgggttcaagcgattctcctggcccagcctcctgagtagctgggattacaggtgtgtgccaccatgcccagctaatttttgtgtttttagtagagacggggtttcaccatgttggccgggctggtcttgaactcctgacctcaggctatatgcccacttccacctcccaaagtgctgggattacaggcatgagccactgtgcccagcctggtattgataatttatattcagataatttgttatggctctttaatatcccacaaggggctctaaaaagcaaacattcaagagtatgtagtttttagacattaagttaattattttaaacagtgacagcaaaacacaagtgattaaatatagtttatttgttccaatgactaaattttacctcatttattaatctggtcattaaggaatatatttaataatattatgtaattattctttttatgcatgatacacctagaaaaatgccttttgtttctattgatggctttgttgtttggagctacttttgattacttattgcagtttcccaatttagtctttactttatctaactcacaaagtaaaattaactgatcacatggcaactactgtatttaaatagttctggaaaaatgaaagtgctttttgctgcttggtaaatgggtaatgcccttgattccttgactgtaggacatagctgatctaaagtactctgtcagttttaccttcacccatgactgtcattagttgtcaaagttgaaaagtactttagctgtgagaaatccttgtatgtttttattataagaggtataatcatcctcaaagcctgtttttattacatgatgtggactgattattttttctatcacagtgttaacagatggattttattgtaaatacaaagaaaacatattgattattgtagtattcttatgtcacctggccttttgcgtgagattatttattatttctagcaaggctttcttcctttcttattgcccagagactgactgatacatcttttgttatttttacacataaattaaacatagcctttttggacaaattcactaaatattaatgtataaaatgtaattgagtaaatttttatcagaattttaaaaataaaagagcttagactcagtagaactcagtagaagcttcactatttactccagcgtgtgtaaattgtacttactctattctcagagtatatttactgtccttaccattgattctttccctttgctaatttttttttttgttaatggtagctgcgactttaggtggggtatattttcttctcctaagagaatagacagtttttccagattcatcatcattgactgtcaagaaaggacccttcagcaaggctgtaccctcaatgcagttgatggcctgtcttcacggatttacagacttggcctgatgcccatgtaaattcaagctttggcttgtggtaacaaccacaagaagacaagcatctgtggtgcggaggcaagcaggctaactaggagttgacaagctaagaaagtgaaactgttctttcttagttaactgtctttctctggagctctgttattttgagtataatatttccacgacacttagtaaatgcaagctaaaatgtaataataataaattgtattggagaaacctaaaaaaaaaagaaaacacgagacagaacagacgacaaaaacacaaaaaacacagaacaacacagacgcagaacacaacagaccaagaacacgcagaaaaacacagacagaggaagagaacagaaacaaaacacccagaaaccacataagaacagaaacagagaaaagcacaaacaagcaaacagcgcaaaataaagcagaaaaaagaaacag

SEQ ID NO: 713256 - DNA, 153 bp, Homo sapiens
agctaactagacagatagatcaatgggacggatacagagtccagaaagacagccacatagtcttgtgggctatgtgtctactccgtgctgtgcatccatgcttgggtgctttacactacaagcagtgcagacaacgacagtcccgtgtatgca

SEQ ID NO: 713257 - DNA, 4241 bp, Homo sapiens
agcggagcgcccggcggccacctctttcccgcgggcgggccggggcggggcactgaagggggcggtccaggaccctgacttgtctcgcggttactgggccggcgcgagcacgcgaggctcgggggcggcacggggcggggtttagcctgtggtgggcgctgcgggtgtttgcaggaggttgcagtactcgctgggctgaggtcgtctcgggtgaggaggtcgcgccggaagtggctctagccgtggcgcctcggcgtagtaaggagcctgcaacagagttttgttgtttagggggcgcggcaccgcaccgctcccttcaccttgcagcagccatggcgaaaggcagagtcgccgaacgatcgcagttgggcgctcaccacacgacccccgtgggggacggggcagcggggacgcggggtctcgcggcgcctggcagcagagaccaccagaaggaaaaatcctgggtagaagctggatcagcaagaatgtcactccttatattggtgtccattttcttatctgcagcttttgttatgtttttggtatataaaaattttcctcagcttagtgaagaagaaagagtgaatatgaaggttcccagagatatggatgatgccaaggctctaggaaaagttttatccaaatacaaggacaccttttatgttcaagtacttgtagcttattttgctacatatattttcttgcaaacatttgctattccaggctctatatttctcagtatactctcagggtttctttatccctttccactagccttatttcttgtttgtttgtgttctggacttggtgcctctttctgttatatgctttcctatttagttgggagaccagttgtatacaaatacctaacagagaaagcagtaaaatggtcacagcaggttgaacgtcatagagaacatctcattaactacattatatttttgagaataacaccatttctgcctaattggtttattaatatcacatctcctgtgataaacgtgccattgaaagttttttttattggtacttttctaggtgtcgcacctccttcttttgtagccattaaggcaggaacaacactgtatcaacttacaacagcaggagaagctgtttcctggaactcaatatttattctgatgatcttggctgttctttctattctgccagccatcttccaaaaaaaactaaagcagaaatttgagtaaaaataatcatctgatttttagttttgctgtcatcaccatctcaggattaacaggtgcatccatttatgttttaaaatcacctcttcagtaattaaacaaggaatttgtaaaataaaatttcctatcagatagttaaagtaatacatttaagtgacaaggggagaagaaagtaaaaatggaaattggtatactgtgaaaagtgctatcaatagttaaggtagacatcttagacatcttataaattattataccaagggtagctgtagataatagtagtgtggtaggaaattgttgatccagctaattcattcaatttaattgaatattttttatctttaataactaaaatagatatttttaaattctagattttttaaagtagtgttgcaggttttgttaatgttaggcttttttcagagcataaactggaaaacttaaaaagagatttacattttcttcctctttttttttttttttttttctgttttgagacggagtctagctctgccgcccaggctggagtgcagtggcgcgatctccgctcattgcaagctccacctcctgggttcacgccattctcctgtctcagcctcctgagtagctgggactacaggcgcccgccaccatgcccagctaatttttttgtatttttagtagagacggggtttcaccgtgttagccaggatggtctcgatctcctgacctcgtgatctgcccgccttggcctcccaaagtgctgggattacaggcatgagccaccgcgcctggcccattttcttcctcttttgaggtaatggatttgtttggagatggcatgttagtagacgactgaatatggaaaggatatcgagttatctattttgttaattttatttttgttttttatcatctagatttttatcatggattagtctgaaatttaaagttctggccagtcggttttctttcatcttgtagtttttacagtatttccactgtgcatatgcaaaatgggtattacataactgtatcatatttggtattgataatttttttttttttttgagacggagtcttgctgttgcccaggctggagtggagtgcgtggtgtgatctcggctcactgcaaactccgcctcctgggttcaagcgattctcctggcccagcctcctgagtagctgggattacaggtgtgtgccaccatgcccagctaatttttgtgtttttagtagagacggggtttcaccatgttggccgggctggtcttgaactcctgacctcaggctatatgcccacttccacctcccaaagtgctgggattacaggcatgagccactgtgcccagcctggtattgataatttatattcagataatttgttatggctctttaatatcccacaaggggctctaaaaagcaaacattcaagagtatgtagtttttagacattaagttaattattttaaacagtgacagcaaaacacaagtgattaaatatagtttatttgttccaatgactaaattttacctcatttattaatctggtcattaaggaatatatttaataatattatgtaattattctttttatgcatgatacacctagaaaaatgccttttgtttctattgatggctttgttgtttggagctacttttgattacttattgcagtttcccaatttagtctttactttatctaactcacaaagtaaaattaactgatcacatggcaactactgtatttaaatagttctggaaaaatgaaagtgctttttgctgcttggtaaatgggtaatgcccttgattccttgactgaaggtaaaactgacagagtactttagatcagctatgtcctacagtcaaggaatcataggacatagctgatctaaagtactctgtcagttttaccttcacccatgactgtcattagttgtcaaagttgaaaagtactttagctgtgagaaatccttgtatgtttttattataagaggtataatcatcctcaaagcctgtttttattacatgatgtggactgattattttttctatcacagtgttaacagatggattttattgtaaatacaaagaaaacatattgattattgtagtattcttatgtcacctggccttttgcgtgagattatttattatttctagcaaggctttcttcctttcttattgcccagagactgactgatacatcttttgttatttttacacataaattaaacatagcctttttggacaaattcactaaatattaatgtataaaatgtaattgagtaaatttttatcagaattttaaaaataaaagagcttagactcagtagaactcagtagaagcttcactatttactccagcgtgtgtaaattgtacttactctattctcagagtatatttactgtccttaccattgattctttccctttgctaatttttttttttgttaatggtagctgcgactttaggtggggtatattttcttctcctaagagaatagacagtttttccagattcatcatcattgactgtcaagaaaggacccttcagcaaggctgtaccctcaatgcagttgatggcctgtcttcacggatttacagacttggcctgatgcccatgtaaattcaagctttggcttgtggtaacaaccacaagaagacaagcatctgtggtgcggaggcaagcaggctaactaggagttgacaagctaagaaagtgaaactgttctttcttagttaactgtctttctctggagctctgttattttgagtataatatttccacgacacttagtaaatgcaagctaaaatgtaataataataaattgtattggagaaacctaaaaaaaaaagaaaacacgagacagaacagacgacaaaaacacaaaaaacacagaacaacacagacgcagaacacaacagaccaagaacacgcagaaaaacacagacagaggaagagaacagaaacaaaacacccagaaaccacataagaacagaaacagagaaaagcacaaacaagcaaacagcgcaaaataaagcagaaaaaagaaacag

SEQ ID NO: 713258 - DNA, 4132 bp, Homo sapiens
agcggagcgcccggcggccacctctttcccgcgggcgggccggggcggggcactgaagggggcggtccaggaccctgacttgtctcgcggttactgggccggcgcgagcacgcgaggctcgggggcggcacggggcggggtttagcctgtggtgggcgctgcgggtgtttgcaggaggttgcagtactcgctgggctgaggtcgtctcgggtgaggaggtcgcgccggaagtggctctagccgtggcgcctcggcgtagtaaggagcctgcaacagagttttgttgtttagggggcgcggcaccgcaccgctcccttcaccttgcagcagccatggcgaaaggcagagtcgccgaacgatcgcagttgggcgctcaccacacgacccccgtgggggacggggcagcggggacgcggggtctcgcggcgcctggcagcagagaccaccagaaggaaaaatcctgggtagaagctggatcagcaagaatgtcactccttatattggtgtccattttcttatctgcagcttttgttatgtttttggtatataaaaattttcctcagcttagtgaagaagaaagagtgaatatgaaggttcccagagatatggatgatgccaaggctctaggaaaagttttatccaaatacaaggacaccttttatgttcaagtacttgtagcttattttgctacatatattttcttgcaaacatttgctattccaggctctatatttctcagtatactctcagggtttctttatccctttccactagccttatttcttgtttgtttgtgttctggacttggtgcctctttctgttatatgctttcctatttagttgggagaccagttgtatacaaatacctaacagagaaagcagtaaaatggtcacagcaggttgaacgtcatagagaacatctcattaactacattatatttttgagaataacaccatttctgcctaattggtttattaatatcacatctcctgtgataaacgtgccattgaaagttttttttattggtacttttctaggtgtcgcacctccttcttttgtagccattaaggcaggaacaacactgtatcaacttacaacagcaggagaagctgtttcctggaactcaatatttattctgatgatcttggctgttctttctattctgccagccatcttccaaaaaaaactaaagcagaaatttgagtaaaaataatcatctgatttttagttttgctgtcatcaccatctcaggattaacaggtgcatccatttatgttttaaaatcacctcttcagtaattaaacaaggaatttgtaaaataaaatttcctatcagatagttaaagtaatacatttaagtgacaaggggagaagaaagtaaaaatggaaattggtatactgtgaaaagtgctatcaatagttaaggtagacatcttagacatcttataaattattataccaagggtagctgtagataatagtagtgtggtaggaaattgttgatccagctaattcattcaatttaattgaatattttttatctttaataactaaaatagatatttttaaattctagattttttaaagtagtgttgcaggttttgttaatgttaggcttttttcagagcataaactggaaaacttaaaaagagatttacattttcttcctctttttttttttttttttttctgttttgagacggagtctagctctgccgcccaggctggagtgcagtggcgcgatctccgctcattgcaagctccacctcctgggttcacgccattctcctgtctcagcctcctgagtagctgggactacaggcgcccgccaccatgcccagctaatttttttgtatttttagtagagacggggtttcaccgtgttagccaggatggtctcgatctcctgacctcgtgatctgcccgccttggcctcccaaagtgctgggattacaggcatgagccaccgcgcctggcccattttcttcctcttttgaggtaatggatttgtttggagatggcatgttagtagacgactgaatatggaaaggatatcgagttatctattttgttaattttatttttgttttttatcatctagatttttatcatggattagtctgaaatttaaagttctggccagtcggttttctttcatcttgtagtttttacagtatttccactgtgcatatgcaaaatgggtattacataactgtatcatatttggtattgataatttttttttttttttgagacggagtcttgctgttgcccaggctggagtggagtgcgtggtgtgatctcggctcactgcaaactccgcctcctgggttcaagcgattctcctggcccagcctcctgagtagctgggattacaggtgtgtgccaccatgcccagctaatttttgtgtttttagtagagacggggtttcaccatgttggccgggctggtcttgaactcctgacctcaggctatatgcccacttccacctcccaaagtgctgggattacaggcatgagccactgtgcccagcctggtattgataatttatattcagataatttgttatggctctttaatatcccacaaggggctctaaaaagcaaacattcaagagtatgtagtttttagacattaagttaattattttaaacagtgacagcaaaacacaagtgattaaatatagtttatttgttccaatgactaaattttacctcatttattaatctggtcattaaggaatatatttaataatattatgtaattattctttttatgcatgatacacctagaaaaatgccttttgtttctattgatggctttgttgtttggagctacttttgattacttattgcagtttcccaatttagtctttactttatctaactcacaaagtaaaattaactgatcacatggcaactactgtatttaaatagttctggaaaaatgaaagtgctttttgctgcttggtaaatgggtaatgcccttgattccttgactgtaggacatagctgatctaaagtactctgtcagttttaccttcacccatgactgtcattagttgtcaaagttgaaaagtactttagctgtgagaaatccttgtatgtttttattataagaggtataatcatcctcaaagcctgtttttattacatgatgtggactgattattttttctatcacagtgttaacagatggattttattgtaaatacaaagaaaacatattgattattgtagtattcttatgtcacctggccttttgcgtgagattatttattatttctagcaaggctttcttcctttcttattgcccagagactgactgatacatcttttgttatttttacacataaattaaacatagcctttttggacaaattcactaaatattaatgtataaaatgtaattgagtaaatttttatcagaattttaaaaattgtgtaaattgtacttactctattctcagagtatatttactgtccttaccattgattctttccctttgctaatttttttttttgttaatggtagctgcgactttaggtggggtatattttcttctcctaagagaatagacagtttttccagattcatcatcattgactgtcaagaaaggacccttcagcaaggctgtaccctcaatgcagttgatggcctgtcttcacggatttacagacttggcctgatgcccatgtaaattcaagctttggcttgtggtaacaaccacaagaagacaagcatctgtggtgcggaggcaagcaggctaactaggagttgacaagctaagaaagtgaaactgttctttcttagttaactgtctttctctggagctctgttattttgagtataatatttccacgacacttagtaaatgcaagctaaaatgtaataataataaattgtattggagaaacctaaaaaaaaaagaaaacacgagacagaacagacgacaaaaacacaaaaaacacagaacaacacagacgcagaacacaacagaccaagaacacgcagaaaaacacagacagaggaagagaacagaaacaaaacacccagaaaccacataagaacagaaacagagaaaagcacaaacaagcaaacagcgcaaaataaagcagaaaaaagaaacag

SEQ ID NO: 713259 - DNA, 178 bp, Homo sapiens
cgagcacagttggagaagcgatgtaatgttgaagaggcccgtcacccaagtaggaccttaggtcctgcctgaggatagactggaaccatgagcttgcaggaggaaccaacttcagcgacacagttcaggctgatccccaaacggttacccgcctgctctatgggttcctgattaaagc

SEQ ID NO: 713260 - DNA, 1833 bp, Homo sapiens
tgcagatattttaggttgtcacacatagagggggtgctactgcccatctagtaggtagagagaccaaggatgttgctaacatcctatagggcacaggacagcccccacaataaagaatcaacgtggcctaaaacatcagtagtgctggctgggattacaggcatgagccactgtgcccagcctggtattgataatttatattcagataatttgttatggctctttaatatcccacaaggggctctaaaaagcaaacattcaagagtatgtagtttttagacattaagttaattattttaaacagtgacagcaaaacacaagtgattaaatatagtttatttgttccaatgactaaattttacctcatttattaatctggtcattaaggaatatatttaataatattatgtaattattctttttatgcatgatacacctagaaaaatgccttttgtttctattgatggctttgttgtttggagctacttttgattacttattgcagtttcccaatttagtctttactttatctaactcacaaagtaaaattaactgatcacatggcaactactgtatttaaatagttctggaaaaatgaaagtgctttttgctgcttggtaaatgggtaatgcccttgattccttgactgtaggacatagctgatctaaagtactctgtcagttttaccttcacccatgactgtcattagttgtcaaagttgaaaagtactttagctgtgagaaatccttgtatgtttttattataagaggtataatcatcctcaaagcctgtttttattacatgatgtggactgattattttttctatcacagtgttaacagatggattttattgtaaatacaaagaaaacatattgattattgtagtattcttatgtcacctggccttttgcgtgagattatttattatttctagcaaggctttcttcctttcttattgcccagagactgactgatacatcttttgttatttttacacataaattaaacatagcctttttggacaaattcactaaatattaatgtataaaatgtaattgagtaaatttttatcagaattttaaaaataaaagagcttagactcagtagaactcagtagaagcttcactatttactccagcgtgtgtaaattgtacttactctattctcagagtatatttactgtccttaccattgattctttccctttgctaatttttttttttgttaatggtagctgcgactttaggtggggtatattttcttctcctaagagaatagacagtttttccagattcatcatcattgactgtcaagaaaggacccttcagcaaggctgtaccctcaatgcagttgatggcctgtcttcacggatttacagacttggcctgatgcccatgtaaattcaagctttggcttgtggtaacaaccacaagaagacaagcatctgtggtgcggaggcaagcaggctaactaggagttgacaagctaagaaagtgaaactgttctttcttagttaactgtctttctctggagctctgttattttgagtataatatttccacgacacttagtaaatgcaagctaaaatgtaataataataaattgtattggagaaacctaaaaaaaaaagaaaacacgagacagaacagacgacaaaaacacaaaaaacacagaacaacacagacgcagaacacaacagaccaagaacacgcagaaaaacacagacagaggaagagaacagaaacaaaacacccagaaaccacataagaacagaaacagagaaaagcacaaacaagcaaacagcgcaaaataaagcagaaaaaagaaacag

SEQ ID NO: 713261 - DNA, 1858 bp, Homo sapiens
agcggagcgcccggcggccacctctttcccgcgggcgggccggggcggggcactgaagggggcggtccaggaccctgacttgtctcgcggttactgggccggcgcgagcacgcgaggctcgggggcggcacggggcggggtttagcctgtggtgggcgctgcgggtgtttgcaggaggttgcagtactcgctgggctgaggtcgtctcgggtgaggaggtcgcgccggaagtggctctagccgtggcgcctcggcgtagtaaggagcctgcaacagagttttgttgtttagggggcgcggcaccgcaccgctcccttcaccttgcagcagccatggcgaaaggcagagtcgccgaacgatcgcagttgggcgctcaccacacgacccccgtgggggacggggcagcggggacgcggggtctcgcggcgcctggcagcagagaccaccagaaggaaaaatcctgggtagaagctggatcagcaagaatgtcactccttatattggtgtccattttcttatctgcagcttttgttatgtttttggtatataaaaattttcctcagcttagtgaagaagaaagagtgaatatgaaggttcccagagatatggatgatgccaaggctctaggaaaagttttatccaaatacaaggacaccttttatgttcaagtacttgtagcttattttgctacatatattttcttgcaaacatttgctattccaggctctatatttctcagtatactctcagggtttctttatccctttccactagccttatttcttgtttgtttgtgttctggacttggtgcctctttctgttatatgctttcctatttagttgggagaccagttgtatacaaatacctaacagagaaagcagtaaaatggtcacagcaggttgaacgtcatagagaacatctcattaactacattatatttttgagaataacaccatttctgcctaattggtttattaatatcacatctcctgtgataaacgtgccattgaaagttttttttattggtacttttctaggtgtcgcacctccttcttttgtagccattaaggcaggaacaacactgtatcaacttacaacagcaggagaagctgtttcctggaactcaatatttattctgatgatcttggctgttctttctattctgccagccatcttccaaaaaaaactaaagcagaaatttgagtaaaaataatcatctgatttttagttttgctgtcatcaccatctcaggattaacagctgcgactttaggtggggtatattttcttctcctaagagaatagacagtttttccagattcatcatcattgactgtcaagaaaggacccttcagcaaggctgtaccctcaatgcagttgatggcctgtcttcacggatttacagacttggcctgatgcccatgtaaattcaagctttggcttgtggtaacaaccacaagaagacaagcatctgtggtgcggaggcaagcaggctaactaggagttgacaagctaagaaagtgaaactgttctttcttagttaactgtctttctctggagctctgttattttgagtataatatttccacgacacttagtaaatgcaagctaaaatgtaataataataaattgtattggagaaacctaaaaaaaaaagaaaacacgagacagaacagacgacaaaaacacaaaaaacacagaacaacacagacgcagaacacaacagaccaagaacacgcagaaaaacacagacagaggaagagaacagaaacaaaacacccagaaaccacataagaacagaaacagagaaaagcacaaacaagcaaacagcgcaaaataaagcagaaaaaagaaacag

SEQ ID NO: 713262 - DNA, 147 bp, Homo sapiens
caggttctggctcacagtcttggtgcctgctccttgcagcagggtccacttggtgtccagaaccttgtgctgctgctccaggaaccgcaccttgtcgatgaatgaggcaaacttattgttgggggtcttgatggaagcgtcgcgcat

SEQ ID NO: 713263 - DNA, 694 bp, Homo sapiens
cggcgccggcgcaggcgcagagagacaacgacgtctacttgttccttgggttacacatttcctgagagtatctacatattcataggcaacaccgatgtgaatgtgacagattagctccagaaagaaagcagtgtgaaaaagatgaaacacagatttgaaagcaatcttgaagatcagacagaaaaccagcctatgaatcaaagaagaaaatcaaaatcagacttcataactgcttcagtaacccttggcaacagacaacacactggattttggcgaataacactaaaatttttgctggtgaggtcttcagaaactggatagatgtgaaaccaccagaacagaagtggagcgggcatggtatctgtttcttcaatttgtagttttatagtcaaaaactggcatgtatatacttaattggtaacatgtaagtcacgtgcctctatcccaactctaagagaggttgagaacttaatttctggcttctaccttgggaaggatcaggcttataagctggaaaattagccaacatacacaggatattcaaagcttctaggcagtcaaaatactgtcaagtggtaaaacagacatgaaaaaacctttttctctctcctaaatttaaaaaaatataatttttgtaaaacactgtatgtggctttccataaaaattaaaagagtcttgggagacagaacatcc

SEQ ID NO: 713264 - DNA, 1175 bp, Homo sapiens
gttacctcaccctattttcaagcagtgatcattgtcgtaattcgacctgaactgggcgagagcggtacactggaggatagctgtgctgacgtaagtctagggaccctcctacatctggggctacaggtattaggaacattctgacgaattcaaagaactgtgagaaactatttccgtacagaccagtactcttataagcttgtcttccactctcgtaccttgggccctgtgagagtgtagatgtggaccctgatagtcccgagttccttggccctctttgcgtttagtatgatcagctattgcatattgaattgaacatgagtgaagcgctacacatgctgtgggatcccttcgcgttatgaaaccataatagggggagacgcatttgaattgtaaacactcaagagatgtgcgaagcgagctcattatgctactctagttcatttgggcacttgggttgacgcaatcgcggaaagcggtaagaacggccgttggtcctacttcgttggcccatcgtacaatcaatgtaggggtccgtctgagggaccagtgcgcaaaatggcggaggtcacttgtaccgcgagttgctattctcaaactaaggaatgggacgtctggaccatccttgcaagccgtgagacgagacgccattctatggtgcgcctcgtctaggcttcgttaggccaaaacgtggcgggggcgacttgtagaaaggtgcgttgttcgatcccttgctggtgagggcgtcacgcaattgcctggagccttgtcaagtaccagccctaggttaaaggcccgccggaaaggtgatacactgctgggtccccgaggtaatgagacgacagggcttttggtaactatgaaatcgattgccctcgtatatgcgttgttcatcccacttacctgacatcactctttatatggggacattgggttcttcccgaatcgtccttctatggggcaagaggatgccgtttttggccccatgtggggccctttaatgacttgtgtgaaacagccccatcccaagtggataattttactggctcacaagtttcgtccttcacaattgcgtggtcaattcattgtaacgggaggacaggcgggcgtccagtattgatagtcggttgggtagagaccgttgcgaatataagtattgcaccggttggttgacg

SEQ ID NO: 713265 - DNA, 218 bp, Homo sapiens
ctcacatgtacactctgcatttctggaacaatgaacagagcacatacagacgcattgccatcattgaccaataccttcatacctggctattgtactcggctcaggcaacatgggcaatactgtggctctttgctgcgtgtgactgacaccaattggccatactgtagcggccggatgataagtgtaatcatacagagaatgctgttcttcgaggcagc

SEQ ID NO: 713266 - DNA, 561 bp, Homo sapiens
tctccacaccacaatactatgcacactacacatacataccactacacgcacacaccattacacacacactacacacaccactatgcacacactacacatacacgccactacacacaccactacacacacgcaacacacaccactatgcacacaccactacacacactacacacaccactacactacacacacaccactatgcacactacacatacacaccacacacacatacaccacaaacacagcacttatacacaccatgcaccacccacataccacacacagtatacacacataacactcacaatacactccacacacacatatacataccccaggtacctactacacacacagaccacacacacatatcaggcatacacctgcacacacctcacagaatacctacaatcctcatatgtagaactcaattgggctttcaaggagcctggatagtaaagtatctcatgggcgtgtgagtgagccaagaaaatgcgtataaatacacatacagcaccacacacattccactggctatacactgtatgtggaggtagcact

SEQ ID NO: 713267 - DNA, 178 bp, Homo sapiens
ggggcccctgggggggccccttggggcccctgccttggggtcccgggtcaagggcctgccctgcctggccgggcggggggttttccctgttgtggggggtgttggcgttgggttttgggtttttttttgtttaaatttttccgggttggcccttttatttttacccctgccttccgga

SEQ ID NO: 713268 - DNA, 105 bp, Homo sapiens
tggcgagtaaggggcacgtgtggctgccttcccttgccaccatggcattgttgctgctgcgcttttcctgcatgcgggttgcagtttactgaccggctggagagg

SEQ ID NO: 713269 - DNA, 135 bp, Homo sapiens
aggcaagctcgggtacgttgacacgagaggacgagcgctcaatcatgcttcgatggaggagcgggccagctgtccttcaacacggacactgctctgatgaccacccatgagctgtgccagtggaggacactgctc

SEQ ID NO: 713270 - DNA, 168 bp, Homo sapiens
tgctggctgtccagaggacccagcggcctctttactactgcgcggactcttactaatggccggtatctctcctcatgagcggatctttactaatggcatctttactcatgcccggcatctttactaatgagcggatctttactaatgtacggcatcattactaatgaa

SEQ ID NO: 713271 - DNA, 315 bp, Homo sapiens
gggcgtgcacgccaagcagctttgtaggagtggaggaagtgcatgcctatccctatctcagtgatacgcagaattttacgggagaaacaggtgggctgccggcagcagtggctgcccaggaataagagcatggggcataaaacagcagtttattcgagcatggaagagcagcttgctgcagcggtgcgtcatgtgagctgctttgcagctagagctgaggtgaggcctggcagggctgtattccccaccctaaggtgggtggtctatcttgcaggtagaaggaagcccctgaatgatgtagacagaggggcgata

SEQ ID NO: 713272 - DNA, 347 bp, Homo sapiens
gtagcatgccatgctcgcagcggccgcccagtgtgatggcatcttctgccagcacattcgtgcttttgtgatgtttccagactgcgggcacagggccaggcaacactttgtatcaacagcagcctggttgctcaggcagtgcagggggcacttttcccacacatcagggcacacaggttcaccaggtgcagcattggcccggcagcaagttgtttcatcagcacacggtgtcaacctcggccagccaggcacaggtcatgaggcacagttccacctataagcaaccaaagcacaccacaggcacagttcaaacactttgcacagggcaaatcccatagtcatctcaa

SEQ ID NO: 713273 - DNA, 889 bp, Homo sapiens
attaatcccctggcccaacccgtcatctactctaccatctttgcaggcacactcatcacagcgctaatgctcgtcaactgattttttacctgcaggtaggcctagagataaacactgctagctttgattccagtctctacaccaaaacaaataaaccctcgttccagcatgagagctgccatcgagagtatttccgtctacgcaaggcaaccggtgtccataaagtctcgttctatagtagctatccttcttcaacaagatatagcgtctcgcggacagagtgaagcctagtaaccgaatagctaaccgaatcatatactcatcaattagagtaatcgatattggcgtattaggcaagattaaaaactagggatataagcccgcctttcatctttcctgatgtcccgatgaaggttacccgagatggcaccctgtcgtgactattcgcgggtctgcttcttctcagcatgacaagagatacgtagccgccgcatctcaggtcatatacctaatatctcgtccctcactaaagctgtaagggcttctccttcatttctcatcaatcttattgcatcatagcaggcaggttgaggtgttattaaaccataatcccagcgtaggcaagatcttgagcagtagtcctcaattacccacagtaggatgaattaatcaggcagtgctaccgtacaagccttaagataacattgcttaatgttaactatttatattattcctaactactaaccggattcctaataatcaattaaaatcccgggcccagaacctaatattatttggacctggaacaagttaatgtttaacaccttatttctcaacctctttcctaaagggtgcccgaaaccggtttgccaaggctttcggaatccaa

SEQ ID NO: 713274 - DNA, 334 bp, Homo sapiens
aaatcagaaacctagaaatccccttagatttttcaagggggtttaacttcctttgggtgcgggcccccaaggcattttcatttttttgggaaagggccctttatttccccccgggtttttccccttttccaggatattcaaaagaaaagcaagttttcttttttttttttttggggtattacatttttttggggtttggtggcctctagttttacccccccccaaggttgtttaacattttttttttttaaaaataccccccatgggtttttccccaacaggccgctttccgggggtgaacccctcccggggggttattattttttgttattta

SEQ ID NO: 713275 - DNA, 275 bp, Homo sapiens
tcgatctctagcaggatccccaagttcatctgggatcaaccagatagcttcactagattttatttgttattctaccttgcagtaaactaagtgtgaagcttgccagtatgcttggaatcatcttttgttttaaaaatcataatgcccaattgctaacttcttatctctttatttcctacatatggaaggagctacctcctaccagatgtcttgctaagtataaccacctatagcttctactcaactgatctacgttcaagatagggtttcgatga

SEQ ID NO: 713276 - DNA, 195 bp, Homo sapiens
  misc_feature (6)..(6): n is a, c, g, or t
  misc_feature (38)..(38): n is a, c, g, or t
  misc_feature (73)..(73): n is a, c, g, or t
  misc_feature (91)..(91): n is a, c, g, or t
  misc_feature (96)..(96): n is a, c, g, or t
  misc_feature (106)..(106): n is a, c, g, or t
  misc_feature (112)..(112): n is a, c, g, or t
gcacancatcattggctcgccagttccacaggaccagntacagatcatcattgcagtgacagacatgttgcancatgcagttcactcatcnatcanattgcagacnatcccnactcgacgtggctttccagtggccacagcatctatggcaatccatctgtcatccaattctgccaatcagtgtcatttcttggc

SEQ ID NO: 713277 - DNA, 259 bp, Homo sapiens
gttcagaaacgggagggagggagcgcaggagaaacagaggaatggtagggacgacagtgtagaagggcaaaaatgggaaaaaagaaaagatacatatgtacaacttttatgcatccataaaacataagaaagaaaaaaaaagaaaagagagacgcggagggagagagggagagaaagaagagtaaacacagcacagacatactgtacaagaaggaagtgactttcaccattgtcttacattcagctgtgctgacctgca

SEQ ID NO: 713278 - DNA, 382 bp, Homo sapiens
aaggtcctgctgcgtgagcattgacgtgtttggagctggagacggcctgggtgctggcgaagcggaggccggagtaagaagactgttagaatgccctcggtaacacagaggctgagagatcctgacataaatccttgtttgtcggaatctgatgcttccaccagatgtctggatgaaaataactatgacagggaaaggtgttccacttacttcttgaggtacaaaaactgccggagattctggaattctatcgtgatgcagagaagaaagaacggagtgaagccatttatgcctacggcagcagaaagagatgaaatcttgagagcagtgggaaatatgccctattgaatgtttgcattaaaagtgtttatataacttagaa

SEQ ID NO: 713279 - DNA, 151 bp, Homo sapiens
ctgtgaaagacggtgcattatcgaggatgtagctgacagtcgatattcgtcgttgcaatgtcatagccttaccctgtgtgacattagtgctcctgcaagggtaaatagagacccagtaaaattgtaataagcagtgcttgaattatttggt

SEQ ID NO: 713280 - DNA, 1660 bp, Homo sapiens
aaggtcctgctgcgtgagcattgacgtgtttggagctggagacggcctgggtgctggcgaagcggaggccggagttaatacacgaggaactcatgcaaaggaggggactttcggaaatccaaacttagagtgccttgtatttagaatccggaaggaaaaggaaatgaaatgtgaagaaactcatgcaccaaactcgaactggtaagaagactgttagaatgccctcggtaacacagaggctgagagatcctgacataaatccttgtttgtcggaatctgatgcttccaccagatgtctggatgaaaataactatgacagggaaaggtgttccacttacttcttgaggtacaaaaactgccggagattctggaattctatcgtgatgcagagaagaaagaacggagtgaagccatttatgcctacggcagcagaaagagatgaaatcttgagagcagtgggaaatatgccctattgaatgtttgcattaaaagtgtttatataacttagaagcagatgaatatttctaataaatgattgctgtaatatttaagactgtacacccctcacccagacagaccttaagttcttcaagtggagacagtgaagtcaccccgtgtcctttttgcttgctctcagtgccatgccgatggtatgttgctgttggctgtgttgtggcatgagtttgcatgactttctggaggcatggagttaggtaaggctacatgagaaattgagcttttccactgggttttgaaagaagagtatgatgtgaacaagtaaagactgaatggggctgagatgaaggcaatgtttccaaggaaaggaaatgttatgagcaagagtgtgaggcaagagaagctggaaccacattcagagagtatcctgtagattgctccacctagaatctcaggtgggtggagcagtggtgggagaagactggaaaggtaagttgaaggtaaggaatgtgtggtgggcctcagatcccaggctcattcctcaaatcacttcttacttccctcacttatctttgtttaaataaggttagtacattcactaggggcaaatgggtttttctaaataaatgacataaaaaagaactggttgtctttctttaaagaaagtcttagttacaggattctgtgattaaaatccttaaatattgggttgccttctgcagctgtagtatcagtttttgaaccacagtaatgggaagaaagacaaatggattcccttagaagtaagatttctatttgcaggatgagttgggcagggaaaagggtcagggttcatcaggtgaactcaacactgggatgagactagaacttcactttatgatataaacacaatacgattattcaatgtggtgactggggtagactgtgaagcagccctccttatgcccactgccttttagaatcgtttgttttattcatggtagttttatgaagacatactattattgaatgaaatttaatgtgtacttgaaaacattgcttttgtcccttctcttcatctggtcttgggtcaagaacattgttttaatggctgccgacaatgaactgtctgtctgagtctaaaaccaagctcaggtttctaagccacatgaccttgattgttaaatgtagttatatttgaataaaaaatgaatcatttccaaaa

SEQ ID NO: 713281 - DNA, 901 bp, Homo sapiens
agttttttcctttttagatctcacttactggaaaagacagaagatatgtgtgggatcatctataaaggccgtttggggaagtcctcattgacacacatctcttcaagccttgctgcagcaataagaaagcagctgctgagaagccagaggagcaggggccagagcctctgcccatctccactcaggagtggtgactgaggtttttatgtagaaggggaacaaaaaaaaaaatatctgaattttggaaaaaccacaaagctacaaatttgaccctctttttttttggagacggagtttggctctggtaacccaggctggagtgcaggggcgtgatctgggttcactgcaattccgtctcccgggtccaggtgattctccgggcctcagcctcccaagtgggctgggttaatagggtgcccgccaccagacccggttaatttataagttataagtagagacggggttccaccaggtggggccaggctggtcttaaagtgaccctcttatttttaacttggatacctgtattctgcaaaagacaattcctagagtagtttggatgtgggtggatttcccccactcccaaaatctgaagccagtgtctagcttactaaaaacaagagttgtctctaatatttacagatgttgagtatacataggaaaacgtgatgtcgttgtaaggtgtcttaaagtctttgtgttttatccccttctattgattggacttcgggaatccggggaccagagtgggttggggtgacacctgtgtggttaacactttcgttggaaaccaggtggggattaaaagggggaattgtgcatgaaaattggaacgaaatgatgcctaggttggaattaaataggtcgttgtcacggcgttaaggaggctggaatggagaac

SEQ ID NO: 713282 - DNA, 105 bp, Homo sapiens
gaacaggtcaaaaagaacctttattaccttttatgattgccacttatgctttcctgccagaagcctttggaagcaaggtgcctttttgggctggggcttttttga

SEQ ID NO: 713283 - DNA, 530 bp, Homo sapiens
aaggtcctgctgcgtgagcattgacgtgtttggagctggagacggcctgggtgctggcgaagcggaggccggagttaatacacgaggaactcatgcaaaggaggggactttcggaaatccaaacttagagtgccttgtatttagaatccggaaggaaaaggaaatgaaatgtgaagaaactcatgcaccaaactcgaactgggtatatgtgatgttacctagtaagaagactgttagaatgccctcggtaacacagaggctgagagatcctgacataaatccttgtttgtcggaatctgatgcttccaccagatgtctggatgaaaataactatgacagggaaaggtgttccacttacttcttgaggtacaaaaactgccggagattctggaattctatcgtgatgcagagaagaaagaacggagtgaagccatttatgcctacggcagcagaaagagatgaaatcttgagagcagtgggaaatatgccctattgaatgtttgcattaaaagtgtttatataacttagaa

SEQ ID NO: 713284 - DNA, 426 bp, Homo sapiens
aaggtcctgctgcgtgagcattgacgtgtttggagctggagacggcctgggtgctggcgaagcggaggccggagtaagaagactgttagaatgccctcggtaacacagaggctgagagatcctgacataaatccttgtttgtcgatcctgttctaccttttaaatgatgcctctcttatatctgtaaggaatctgatgcttccaccagatgtctggatgaaaataactatgacagggaaaggtgttccacttacttcttgaggtacaaaaactgccggagattctggaattctatcgtgatgcagagaagaaagaacggagtgaagccatttatgcctacggcagcagaaagagatgaaatcttgagagcagtgggaaatatgccctattgaatgtttgcattaaaagtgtttatataacttagaa

SEQ ID NO: 713285 - DNA, 574 bp, Homo sapiens
aaggtcctgctgcgtgagcattgacgtgtttggagctggagacggcctgggtgctggcgaagcggaggccggagttaatacacgaggaactcatgcaaaggaggggactttcggaaatccaaacttagagtgccttgtatttagaatccggaaggaaaaggaaatgaaatgtgaagaaactcatgcaccaaactcgaactgggtatatgtgatgttacctagtaagaagactgttagaatgccctcggtaacacagaggctgagagatcctgacataaatccttgtttgtcgatcctgttctaccttttaaatgatgcctctcttatatctgtaaggaatctgatgcttccaccagatgtctggatgaaaataactatgacagggaaaggtgttccacttacttcttgaggtacaaaaactgccggagattctggaattctatcgtgatgcagagaagaaagaacggagtgaagccatttatgcctacggcagcagaaagagatgaaatcttgagagcagtgggaaatatgccctattgaatgtttgcattaaaagtgtttatataacttagaa

SEQ ID NO: 713286 - DNA, 442 bp, Homo sapiens
  misc_feature (7)..(7): n is a, c, g, or t
gaaaacnacgttcaagtttttattcacaaagtacagagaatacatgaagttcctcactaagtgatcattatgccaaaatcaaaatttcagtaagaagactgttagaatgccctcggtaacacagaggctgagagatcctgacataaatccttgtttgtcgatcctgttctaccttttaaatgatgcctctcttatatctgtaaggaatctgatgcttccaccagatgtctggatgaaaataactatgacagggaaaggtgttccacttacttcttgaggtacaaaaactgccggagattctggaattctatcgtgatgcagagaagaaagaacggagtgaagccatttatgcctacggcagcagaaagagatgaaatcttgagagcagtgggaaatatgccctattgaatgtttgcattaaaagtgtttatataacttagaa

SEQ ID NO: 713287 - DNA, 268 bp, Homo sapiens
gaaaaaaaagaaacaaaagcccccaaaacaaaccagaagcaaagtagggagattaaaatgaggcttccagaacagtgtgcaaatagggagtgtcattaagtgtcagtgcttgtccatcttagcctcatttggccctgttttccccatctctctgcagtgcccttcatctcttgcatatcctctctggatatctctcggggggacatcttcttctaggatatctctgcgggggtcttctccttctggatatctctctggtagctatcat

SEQ ID NO: 713288 - DNA, 1532 bp, Homo sapiens
aaggtcctgctgcgtgagcattgacgtgtttggagctggagacggcctgggtgctggcgaagcggaggccggagtaagaagactgttagaatgccctcggtaacacagaggctgagagatcctgacataaatccttgtttgtcggaatctgatgcttccaccagatgtctggatgaaaataactatgacagggaaaggtgttccacttacttcttgaggtacaaaaactgccggagattctggaattctatcgtgatgcagagaagaaagaacggagtgaagccatttatgcctacggcagcagaaagagatgaaatcttgagagcagtgggaaatatgccctattgaatgtttgcattaaaagtgtttatataacttagaagcagatgaatatttctaataaatgattgctgtaatatttaagactgtacacccctcacccagacagaccttaagttcttcaagtggagacagtgaagtcaccccgtgtcctttttgcttgctctcagtgccatgccgatggtatgttgctgttggctgtgttgtggcatgagtttgcatgactttctggaggcatggagttaggtaaggctacatgagaaattgagcttttccactgggttttgaaagaagagtatgatgtgaacaagtaaagactgaatggggctgagatgaaggcaatgtttccaaggaaaggaaatgttatgagcaagagtgtgaggcaagagaagctggaaccacattcagagagtatcctgtagattgctccacctagaatctcaggtgggtggagcagtggtgggagaagactggaaaggtaagttgaaggtaaggaatgtgtggtgggcctcagatcccaggctcattcctcaaatcacttcttacttccctcacttatctttgtttaaataaggttagtacattcactaggggcaaatgggtttttctaaataaatgacataaaaaagaactggttgtctttctttaaagaaagtcttagttacaggattctgtgattaaaatccttaaatattgggttgccttctgcagctgtagtatcagtttttgaaccacagtaatgggaagaaagacaaatggattcccttagaagtaagatttctatttgcaggatgagttgggcagggaaaagggtcagggttcatcaggtgaactcaacactgggatgagactagaacttcactttatgatataaacacaatacgattattcaatgtggtgactggggtagactgtgaagcagccctccttatgcccactgccttttagaatcgtttgttttattcatggtagttttatgaagacatactattattgaatgaaatttaatgtgtacttgaaaacattgcttttgtcccttctcttcatctggtcttgggtcaagaacattgttttaatggctgccgacaatgaactgtctgtctgagtctaaaaccaagctcaggtttctaagccacatgaccttgattgttaaatgtagttatatttgaataaaaaatgaatcatttccaaaa

SEQ ID NO: 713289 - DNA, 151 bp, Homo sapiens
gactctagagaacccccggaggcgttgaatgccattcaacgccggaggcgtttgaatggccactacagacctgacagccaacgggatcagtttatgtctcagctcagtatccctctttgccggccctgagctgacttccaccaggcctccg

SEQ ID NO: 713290 - DNA, 1576 bp, Homo sapiens
aaggtcctgctgcgtgagcattgacgtgtttggagctggagacggcctgggtgctggcgaagcggaggccggagtaagaagactgttagaatgccctcggtaacacagaggctgagagatcctgacataaatccttgtttgtcgatcctgttctaccttttaaatgatgcctctcttatatctgtaaggaatctgatgcttccaccagatgtctggatgaaaataactatgacagggaaaggtgttccacttacttcttgaggtacaaaaactgccggagattctggaattctatcgtgatgcagagaagaaagaacggagtgaagccatttatgcctacggcagcagaaagagatgaaatcttgagagcagtgggaaatatgccctattgaatgtttgcattaaaagtgtttatataacttagaagcagatgaatatttctaataaatgattgctgtaatatttaagactgtacacccctcacccagacagaccttaagttcttcaagtggagacagtgaagtcaccccgtgtcctttttgcttgctctcagtgccatgccgatggtatgttgctgttggctgtgttgtggcatgagtttgcatgactttctggaggcatggagttaggtaaggctacatgagaaattgagcttttccactgggttttgaaagaagagtatgatgtgaacaagtaaagactgaatggggctgagatgaaggcaatgtttccaaggaaaggaaatgttatgagcaagagtgtgaggcaagagaagctggaaccacattcagagagtatcctgtagattgctccacctagaatctcaggtgggtggagcagtggtgggagaagactggaaaggtaagttgaaggtaaggaatgtgtggtgggcctcagatcccaggctcattcctcaaatcacttcttacttccctcacttatctttgtttaaataaggttagtacattcactaggggcaaatgggtttttctaaataaatgacataaaaaagaactggttgtctttctttaaagaaagtcttagttacaggattctgtgattaaaatccttaaatattgggttgccttctgcagctgtagtatcagtttttgaaccacagtaatgggaagaaagacaaatggattcccttagaagtaagatttctatttgcaggatgagttgggcagggaaaagggtcagggttcatcaggtgaactcaacactgggatgagactagaacttcactttatgatataaacacaatacgattattcaatgtggtgactggggtagactgtgaagcagccctccttatgcccactgccttttagaatcgtttgttttattcatggtagttttatgaagacatactattattgaatgaaatttaatgtgtacttgaaaacattgcttttgtcccttctcttcatctggtcttgggtcaagaacattgttttaatggctgccgacaatgaactgtctgtctgagtctaaaaccaagctcaggtttctaagccacatgaccttgattgttaaatgtagttatatttgaataaaaaatgaatcatttccaaaa

SEQ ID NO: 713291 - DNA, 1704 bp, Homo sapiens
aaggtcctgctgcgtgagcattgacgtgtttggagctggagacggcctgggtgctggcgaagcggaggccggagttaatacacgaggaactcatgcaaaggaggggactttcggaaatccaaacttagagtgccttgtatttagaatccggaaggaaaaggaaatgaaatgtgaagaaactcatgcaccaaactcgaactggtaagaagactgttagaatgccctcggtaacacagaggctgagagatcctgacataaatccttgtttgtcgatcctgttctaccttttaaatgatgcctctcttatatctgtaaggaatctgatgcttccaccagatgtctggatgaaaataactatgacagggaaaggtgttccacttacttcttgaggtacaaaaactgccggagattctggaattctatcgtgatgcagagaagaaagaacggagtgaagccatttatgcctacggcagcagaaagagatgaaatcttgagagcagtgggaaatatgccctattgaatgtttgcattaaaagtgtttatataacttagaagcagatgaatatttctaataaatgattgctgtaatatttaagactgtacacccctcacccagacagaccttaagttcttcaagtggagacagtgaagtcaccccgtgtcctttttgcttgctctcagtgccatgccgatggtatgttgctgttggctgtgttgtggcatgagtttgcatgactttctggaggcatggagttaggtaaggctacatgagaaattgagcttttccactgggttttgaaagaagagtatgatgtgaacaagtaaagactgaatggggctgagatgaaggcaatgtttccaaggaaaggaaatgttatgagcaagagtgtgaggcaagagaagctggaaccacattcagagagtatcctgtagattgctccacctagaatctcaggtgggtggagcagtggtgggagaagactggaaaggtaagttgaaggtaaggaatgtgtggtgggcctcagatcccaggctcattcctcaaatcacttcttacttccctcacttatctttgtttaaataaggttagtacattcactaggggcaaatgggtttttctaaataaatgacataaaaaagaactggttgtctttctttaaagaaagtcttagttacaggattctgtgattaaaatccttaaatattgggttgccttctgcagctgtagtatcagtttttgaaccacagtaatgggaagaaagacaaatggattcccttagaagtaagatttctatttgcaggatgagttgggcagggaaaagggtcagggttcatcaggtgaactcaacactgggatgagactagaacttcactttatgatataaacacaatacgattattcaatgtggtgactggggtagactgtgaagcagccctccttatgcccactgccttttagaatcgtttgttttattcatggtagttttatgaagacatactattattgaatgaaatttaatgtgtacttgaaaacattgcttttgtcccttctcttcatctggtcttgggtcaagaacattgttttaatggctgccgacaatgaactgtctgtctgagtctaaaaccaagctcaggtttctaagccacatgaccttgattgttaaatgtagttatatttgaataaaaaatgaatcatttccaaaa

SEQ ID NO: 713292 - DNA, 418 bp, Homo sapiens
ggggtgagcagaacagggggctagtctatatcgtcggagtgagactacgggggcatgccactttggcggaggttagtcgatcttatctaggttcaaatttatatacagaaattgctaataatatgccatatttccttaagggtatacctcatgatgtctcctctttgagtcctaatactggtaaatggtgtctatttcctttttttactagatcattctacttagaggtttataaaaaactcgcttgggtttctttcctttgcacgacttatttttctgttcttaatttcatggattttcgttcattatgatgtcttctgcttccttggggtttaattgggtctccaattttagtttcttaggtggaagtttaatggattggaggtctttcttcttccctaatacaagctttaatgct

SEQ ID NO: 713293 - DNA, 1783 bp, Homo sapiens
  misc_feature (593)..(593): n is a, c, g, or t
  misc_feature (670)..(670): n is a, c, g, or t
tggccaagggaacaggactatcatttaattggcctctagggtcctccggggaaagggatctgggggggccttgggcaaagtctctctgtggcgtgatgtggaaccaacagagggtgcccattcagccagtgtgccaggcaggatgtgggggccccaatgtgcttgggcgtgggggcagccagcatttgggggcgtggtggctataaaacaatttctttgaggacataatgtgggttaaggaaatgtggtgtgcctttatgaagtggggggaagaggggacttacatttatagaaggaggaaattgcacgagggagagtgtgggtctcaaagaggggtcctttacagtgggccgaggtgtgaaaggctgtgggtggtaaagttgtgtgtgggtgaagtgcgggagtctcccacagacagaggggggaaaactctctgtgggacacacgagcgtcgtgtgacaactctcaaagacgccagagagcttctcagaggtgaaacactctccctgtgtgcaagccgggtgtggtttgtggtgctctccccacacaagagcgctctctcataggaaaagagagcggctcactataaatgntccccccacaagcagtgtaaatgtgggtgtcgccccctccggatttgaggaaccaaaatccctcgggggcgtggtgnggcgggtgtgggaggctcttatggggggtggtttggcgcccctgtgccccaaaaggtggtctctccggggggatctagggggggcgagaggagtgtggcgaaaccgtgtcgagaacgcgtgggggagcataacattcgacggcggggggagggccataaagagatcatattcctcggagaggccacaaaaaatcggtactttgtggtgcgggggcgtagcaacaggggccgccgggaaggattttaaaaaagagaggggcggttttataaaaactcctcgtcggggtggtggagaaaaagagacaccttcttctcttcatatggtggaggaacaaagaagtggttttctaaagacaagggggggggctgttgagaaaaagttttttttgaaaaaatgggctttttggacccgtggtgggtgggcaaccaactcgggttgcgggtgcgctgaggaattgtgtgcacaccatattggctacccgtggagaggagtttagaacactctcgagatgaaaacaggatggcccaacaaggcggcttcccgagaaaaactacttgggcgggcgttggagagaagaaccccgggtttataatttggtgggcccacaggggagggcgcgaccaagaaaacatttgggagtggaggcgccacccaggggagagatatgttccccttatgaaagcggagggcgcggcggggaaaaaaaccccacccatttaaattggtgggcggcgcagagacgggcagcagacagattatataatgaaaacgccacgcaggggggcgccctttcatctacacaacaggtgggggggaaggagcgccaccgcgcggcagcgggagggagatggtattaacacacaagtggggtgaaacgcacccgtccctccgcgtgctttagtagtacaatcatgagtccagcttctcaacaaaacggggcgtgctggctgacttaacacacgcgccaatcaacaagcgaggggagagagcagctgacggcttgggtgcgaaacacacacctccctgctgtgcgatagttactcacatcgagacaaaggataatcataaacaacgaacatctgatcgagaaaacaatagacactcacttcagc

SEQ ID NO: 713294 - DNA, 1680 bp, Homo sapiens
aaggtcctgctgcgtgagcattgacgtgtttggagctggagacggcctgggtgctggcgaagcggaggccggagttaatacacgaggaactcatgcaaaggaggggactttcggaaatccaaacttagagtgccttgtatttagaatccggaaggaaaaggaaatgaaatgtgaagaaactcatgcaccaaactcgaactgggtatatgtgatgttacctagtaagaagactgttagaatgccctcggtaacacagaggctgagagatcctgacataaatccttgtttgtcggaatctgatgcttccaccagatgtctggatgaaaataactatgacagggaaaggtgttccacttacttcttgaggtacaaaaactgccggagattctggaattctatcgtgatgcagagaagaaagaacggagtgaagccatttatgcctacggcagcagaaagagatgaaatcttgagagcagtgggaaatatgccctattgaatgtttgcattaaaagtgtttatataacttagaagcagatgaatatttctaataaatgattgctgtaatatttaagactgtacacccctcacccagacagaccttaagttcttcaagtggagacagtgaagtcaccccgtgtcctttttgcttgctctcagtgccatgccgatggtatgttgctgttggctgtgttgtggcatgagtttgcatgactttctggaggcatggagttaggtaaggctacatgagaaattgagcttttccactgggttttgaaagaagagtatgatgtgaacaagtaaagactgaatggggctgagatgaaggcaatgtttccaaggaaaggaaatgttatgagcaagagtgtgaggcaagagaagctggaaccacattcagagagtatcctgtagattgctccacctagaatctcaggtgggtggagcagtggtgggagaagactggaaaggtaagttgaaggtaaggaatgtgtggtgggcctcagatcccaggctcattcctcaaatcacttcttacttccctcacttatctttgtttaaataaggttagtacattcactaggggcaaatgggtttttctaaataaatgacataaaaaagaactggttgtctttctttaaagaaagtcttagttacaggattctgtgattaaaatccttaaatattgggttgccttctgcagctgtagtatcagtttttgaaccacagtaatgggaagaaagacaaatggattcccttagaagtaagatttctatttgcaggatgagttgggcagggaaaagggtcagggttcatcaggtgaactcaacactgggatgagactagaacttcactttatgatataaacacaatacgattattcaatgtggtgactggggtagactgtgaagcagccctccttatgcccactgccttttagaatcgtttgttttattcatggtagttttatgaagacatactattattgaatgaaatttaatgtgtacttgaaaacattgcttttgtcccttctcttcatctggtcttgggtcaagaacattgttttaatggctgccgacaatgaactgtctgtctgagtctaaaaccaagctcaggtttctaagccacatgaccttgattgttaaatgtagttatatttgaataaaaaatgaatcatttccaaaa

SEQ ID NO: 713295 - DNA, 214 bp, Homo sapiens
tgcttcagttcgtgcatggtgcgctgcaccgactgtcctgcatccactatctggcactccctagtgagatgaacccggtacctcagatggaatgcagaaatcacccgtcttctgtgtcctcacgctgggagctgtagacgggagctgttcctattctgccatcttggctccacctatactgatgatttctaagaggtgaacatattcagacgtc

SEQ ID NO: 713296 - DNA, 830 bp, Homo sapiens
gacgggagtcgggtgggatcccaggctggccccgcggcggctgattctcttccctggcaagtctctgagatcttctcccaggcgatgcaaagtactcgtaccagcttggacctgtctgcagtatctcctctggacctgccatgctgaggacccattctcacctctgagggactcctgtcctaggactaaggtggagcctgggccattggtacagctggctcctgcggcagcaatgacgagttcaccttaaggagcgacactgtgcctgtcgagatgtccaccttataccccgaaccatagacatctcattgtacggtgaacagccgtggggcagccagttttcctgtccaaattcaagcttctatggagcaagaatcttgacagatcaggagccagggttggccgtcacagagatgttcccacaaaagggagcctccttctgctgagacaggcagcacaggtccctccaggatgtgccatggtaatgagggttctccctccaggccggaactgacacacactgccaggaatggctgaaggtacagtggatgaggatgggatttgacgtcggtgagaagaccacgagccggctctgatccaaaccaaggaggcctcttagagacagggtcctcccttggttagcccaggaagagccgcgtctgggaaaggaacgcaagggcggggttctagaaaatcgcgcgatctcttgccggtgccagaattgccaaagactcgtgccggggtgtttgcaactggcgcagcggctctgaaccgccctgccacgttggggccccccttgccggaacggttaccccatagggggcataatc

SEQ ID NO: 713297 - DNA, 460 bp, Homo sapiens
agagctgcacggtttcttccaactgcatctattgtctgagactgcgtctcattttccctgtcttctgcactgagcaatcactaaccactctgtgggcctcttggcaggttattagtcaggttctctagagggacagaactaataggacaggtgtatatatgcaagggagtttattaaggagtattgactcacatgatcacaaggtaaagtcccacaataggccatctgcaaggctgaggagcaagaaagccaatcctagtcccaaaacctcaaaagtagggaaggagtgcagccttcagtctgtggccaaaagcctgagagcccctgggaaaccactggtgtaagtctaagagcccaaaagctgaagaacttggagtctgatgtttgggtgcaggaagcatccagcatgggagacagatgaagggcagaagactcagcaagtctgctctttccaccttct

SEQ ID NO: 713298 - DNA, 879 bp, Homo sapiens
ggcccaggcttccccgcagccgggcccggcaccccagccgcactcctgaccgctggccaagcaggaggagctggatgcgggactggcccagcgctccgaggagcggtgcaatgtggttttgaggccacagacagcaggacccagaggtgcctgctggtgagtgggcctgtgccggtggcctgggtgcccccctgactgaggaccagcaaaactggcttagtgaggagatctgagaagaagtggcttggagctggagaagctgcccctgctgggagaataagcgggtgcccctcactgccctgtcaaccaaagccgctggagagcgcctgagggcccccaagtgacgggcacgaggccactggagaaggaggttcaggctcttcggtgcccagactggaggcgttggctgtctccaagggtggaggctcctcagagatgcactgaagatcccatggacgggattggccacatcccccccggggatacatctcacaaggagcgcatgtgacgcgcagcctggcagacgatggatcgtcctcgcacatgcaggttcatggaggagctgcaagaggaccaacgaagcgggagcatgcacgcgacctgcagccacggagacagggaggtggcgtcctggactgcggagaacggcaaggcaccgggcctcagacccatatgaacggcccagacagcagggcctagtccaggacaggagcttgagacagcggaggctgacgcaaggagacggacttctccagcatgtggcccgggcttgcactccggggaagccgaacgcagtcagatgtggggtcactgacaacgagagctggagggatgctatcgcaagcagccctctgcaggggctgcttggggaatgggcca

SEQ ID NO: 713299 - DNA, 118 bp, Homo sapiens
aactgcgttggtgaagtaaggggtgccacttaagggcaccgggtttctggttaagatgcgacactgcgccctccagtgcaccgacactaggacagagcgcagctcggcagtcgcttgc

SEQ ID NO: 713300 - DNA, 283 bp, Homo sapiens
ccccctccccgggtagctgtgattacaggcatgagccaccatgcccggctaattttgtatttttagtacagacggggtttctccatactggtcaggctggtcttgaactcctgacctcaggtgatccatccacctcggcctcccaaagttctgggattacaggcgtgagccaccatgcccgtcccccttgttctttcttaaacgtcctctttactttctctatcatttgtcagactattcttatcttttttaaatgtgtgttacccggggaggggggggtacc

SEQ ID NO: 713301 - DNA, 659 bp, Homo sapiens
  misc_feature (457)..(457): n is a, c, g, or t
tggggggactggcttttggtcttaaatccaatctactcagtaacactggcagggtccaggggctggggaagaggttctggtggggcacaacgggggtgggacggacctggatgggtcccagcccactgggggtaacgcaggggatgtgattggacgcgggggaccaatgtcgcattcttctcaccaaagtgttctctctggtgggcgcttgggcttctctaaaacaatctccaagaaagggcttggagtgtccaggcaccagcaaggtggagcaggttcttacatctggaaaaagagggccagagaacggggaaccatctggtgtgtgggggggagaacaccacccgagcccccgagggacaccaccactgggggagagtggtgcacgagtctgggagtctcccgaggacacacacagagtctgggtgacactctctggggggtgtgtgccccaccnaagagggcgagaactggtgcccctattctctctttccacccagagaggaacaaggagaacctctccacctgtgtgggcgtggagcgaagtagcccaagaccgaggcgagagggttaaggaagaggggtagccccgaggggcgcccactgggcgaggcccaaactcgtgggtgaagtgcgcgtggcctttggggaaaccaggc

SEQ ID NO: 713302 - DNA, 329 bp, Homo sapiens
agggactccggacccacgccaccctgctcaccggtcgtgggctggcctgtccactcctcttgagctgcccgtgtcacgcacttctcacctcctctccacctcctggtccaggcccggccttggcccctgggctcctgcactgtctcctcttggcctccccacccctagtcttgcccccgacggtggattgtccatgcagagctcaaagcgatctttaaaaatgtggatctgatcacatcagttcctgctcaggatgttccactggcctccctccctgtaaagtaaaacccagagtctgtgttgtggcctttcaggtccgcccagcatga

SEQ ID NO: 713303 - DNA, 921 bp, Homo sapiens
gggccttgtgacggggcggggcagggggcggggccgggcgagcttcggggtgggaggggcaggtgggcggggcttccgcggacccctcccgctgcgccgccttgcgtgtcctcttcgctccggccagaggcccgcctctcactgtctgccgaggggtggggtcgggcggtgggcgctgaagacccctggaggcagaagtctggtctggccaatttgactggccgttcggtagttaagaaatttattcctaaatgcgggatttgctgaagctgcccgggactgaccgtccgttctcggccttaaaacccgacgttcacttcttttcatccagatctctcccaaatcaagaagcctaatcctttagttcccaaagtcgaggcctcgtggtttaattgccccatttgctctgtcagcccaaactctgccaggcctgctactagagacccttttttatttgtttaattcttgtggatacatagtaggtgtatatttacgggctacatgggatgtttagatacaggcatgccatggataagtaatcacatcaagtagagacagagtttcaccgtgttagccagaatggtctcaatctcctgacctcgtgatccgcctgccttggcctcccaaagtgctaggattacaggcagggttaggcttgctgaggggcaggcacaggagtcctggctgagctcatggcctgaggctgcctagcggacaccggggaatggtgcaatggcggaggcagagggcaggggtggcaagtggaggtccgtggactgccccctgccgtgcccgacgaggctgctcactctctaacttgaaaaccggcgacgctctggagggagacctgggtggagctggcaggagactgggctgtgggggcgtcctcaacttaacagaagctggagacgcggagagggc

SEQ ID NO: 713304 - DNA, 107 bp, Homo sapiens
cggcgctgtgacggtcattcccgggctcgatgccggaaaaacacttggccgccggaagggcaggcacatgggcataggtaagcggaagggtgcagccaatgcccgaa

SEQ ID NO: 713305 - DNA, 391 bp, Homo sapiens
atcgttcatccccttgtctccaacaccatcacgcagccacaggtctggagaggggggctgcaggctagccagaggtctgcaggtgcctcatctcactggtgcggccgtggtgacactgaggagggagcgtggcagagggaacgatggccgtggtgacactgaggagggagcgtagcagagggaacgatggccgtggtgacactgaggagggagcgtggcagagggaacgatggccgtggtgacactgaggagggagcgtggcagaggggaacgatggccgtggtgacactgaggagggagcgtggcagagggaacgatggccatggttgccattgaggagggaactggcagagggaacgatggccatggctgacactgagaagggagcgtg

SEQ ID NO: 713306 - DNA, 174 bp, Homo sapiens
  misc_feature (3)..(3): n is a, c, g, or t
  misc_feature (16)..(16): n is a, c, g, or t
  misc_feature (67)..(67): n is a, c, g, or t
  misc_feature (97)..(97): n is a, c, g, or t
  misc_feature (167)..(167): n is a, c, g, or t
agncttttgtcctcanggttgtggacaggaggtcgcaccactggcctggcgagaggcctctggtggnccgtggctttcccccagttatctgctaagnaaaactgtgctcttcgaaaggcagagccaagaagtcagccctgacttttgtaaaattttattaaatacanaacctgg

SEQ ID NO: 713307 - DNA, 1509 bp, Homo sapiens
ggcagacatctcgcaaactctgtgcttctgctcgatctgcgcgctctgcgtttctctgctctggtcgacaactggaacgaagaggagtctgcctgggcttggttcaattggaccagatgtgcatcacggcgatgtttgcactagcctgggtgtgtatgcctagtgggtacagaccgacatcacgcactaagacgcagatggtttgcccttaccgcatcgctcaggtgcgcactccgccaattaagaagcggcagggccagttgactgggtgtaagtcaactggagtgcaattaggacggactcggtacgtagcgcgaacggcagagcccaagagcatagccggtggtgatctcttgaattcgcatgaacgtaatccctcgattcgcatgctatggacgatcgttctacccaaagttgggggtaccgcacgatgtcacggaaagtatgctgggcaatgaacacctttcgtagcaactgacatcgtgctgccgtggaccccgttgaggaggctatcctcatgtggcgtgacatggaccccgcattgggggcgcacaccctggaaagcttcacctagaggggcgccaaacatgaaggagttgcactcacgtgtagcatcaggaaattaaattgctcattgtaggcaccactgtcataactacccgcgcggggcactattgttagccgttgttcaccattcgcatgggccgcaaggtgggcctttgatcacaccgttccctcacctgcccctttgcataggaggggccaggcaaagcgacgagcctttggggaccaacgtatagcttcgacttctgtggcattccttcggttgcgaattaggaaccaagggggcgcttcacaaaacgcccgaacaaagcggcgtttcggaacgcaccaaattgccttaaaccccaacgaggcgccttaagcaagtcgcgttctgtcacaccgcacaccgccgaggaagggcactaactttccgtttggacccgcctttctgtgggaaacaccgtggcgcccttgggttccctgagggtttagcccacgtggtacacacctgcaccccttagcaccgttcgcagtttgcagcaagaaaacttccccctttccaactttgtactgtcccgaacagaagacctttactatcgacactttcttccccgctaaaccaaacacgaagcgcctcgacattcggggttgagaacaatttctgggtagcccgtcgggagagcacatcgcacatagagggagggcacaaagctttggttcggcctgtaaaccggctcggagcgctcgcgtatagagcaccgttatacagggacagcgcaaacggggaaagggagatttgcggactccagagccacagggaagcgcggaaagatcccccttacacccttccttttcccattccttttgggatccacacagatccactctcgtaacagaaactcgcttaaggacacccggggattttggggcccataaggggggtccaagatatgagcgccccct

SEQ ID NO: 713308 - DNA, 434 bp, Homo sapiens
ccgcattgagcctggatgtctccgtgtgtctattaaatctacttttggaggtccaacaggcattacccttaacatcttagacaaggcagcagtgcatcctctcggtaggaccacgtcttacacataggcctcagcaaccaaggtttactcccaacacatcgctaggcagagctggcttctctcaaggccttctacggataagggctctggctcccctaaacatgcctcccctccgagcatcgctgatgtctagcattactcatttccggatccaccactgactccccatactgcttacgacatcagctggaaacggccgctccatcgtaaggcaggaactctgcattgatcttaggatgaggatctgtggcaggaagtaacgggtctactgcagactgctgaggagaaatagttcgagcctatgctgacggctt

SEQ ID NO: 713309 - DNA, 88 bp, Homo sapiens
gcggccgcctactactactactgctcgaattcaagcttctaacgatgtacggggacatgttaacttaagaaacatttgatcagttcct

SEQ ID NO: 713310 - DNA, 188 bp, Homo sapiens
cgacggggattatactatcatagactgttgtttctaaacacgaaactcacggctgggcacagtggaatacgcctgctatcccagcactttgtggaggccgatggcaggcggatcacccgcaggtcagcagctcgtagaccacgcccggccaatcatggccaatatccccgggtcgaaccgggtacctg

SEQ ID NO: 713311 - DNA, 250 bp, Homo sapiens
ctctagagtatcccctctcaaatggcacagaagtacagtacctgcttagactgcatcggcttggctagagctgagggatcataggagtgcttataatggtgtccaactttctttcaaaatttctttagaactctggagcccacgtgccaggttggagcctttgttctcccactttctatctctgctgtccttcaacccgttactttatttctgggcctcgatttcctcttctcgtgtaccgagctccaat

SEQ ID NO: 713312 - DNA, 371 bp, Homo sapiens
cggcatgcggtctgaaggcatcatatcccatcggtcaggacaatgcttatgctgataagttagctaaagaagcaactagcgatccgacttctgtccctcagggtcagtttgtcttcttcgcattgtgcactcccacctactcccgcactgaaactgccacctatcaatctgtccccacacaaggcagatggctcttagaccagggaaaatctgtccttccagcctgacaggcccattctattctgtgatcatttcataacctcttccatgtaggttacaagccgctagcctgcctcttagaacattttcctttattcgtggaaatctgtcctcaaggaaattacttctcagtgttccatctgctattctac

SEQ ID NO: 713313 - DNA, 227 bp, Homo sapiens
agaggcacgtcttgctctgcacccaggcttgtgcaactggtgcgacctagaatcactgcaaactccacttcacaggttcaagggattctcatgcctcagcttccagagcagctgggattacaggcatgtgccagcaagcccggctaattttttttgtattgttagtaaagacggggttttagtatgttcctcaggctggtctcgaactccttacctcaagtgacccg

SEQ ID NO: 713314 - DNA, 378 bp, Homo sapiens
  misc_feature (35)..(35): n is a, c, g, or t
  misc_feature (52)..(52): n is a, c, g, or t
  misc_feature (55)..(55): n is a, c, g, or t
  misc_feature (112)..(113): n is a, c, g, or t
  misc_feature (229)..(229): n is a, c, g, or t
  misc_feature (244)..(244): n is a, c, g, or t
  misc_feature (256)..(256): n is a, c, g, or t
  misc_feature (319)..(319): n is a, c, g, or t
  misc_feature (341)..(341): n is a, c, g, or t
  misc_feature (358)..(358): n is a, c, g, or t
atactcgctgtatccttgaactcctgagctcaggngatcctcctgcctcagnctnccaagtagctaggaccataggcatgtgcacaatgcctggctaattttgaattttttnntttcataaacagggtcttgctatgttggccatgctggtttcaaactcctgggcctcaagctatatttcctcctcagcctaccaaagtgttgggattacaggtgtgagccaccatgncctgccacttagggngttgtgttattnttatctttgattgattgggttttctttggggaaaagtatttaactggataatttatgttgggngattcatatttctaatagttcnggaaatattcatatttncgagtaggaaagttgttttt

SEQ ID NO: 713315 - DNA, 634 bp, Homo sapiens
tgtgtaagggcccaaactgctgcaaacagagtggtgatggcccctaagcttagtgttagagttgggattagggggctatttcctgctagggggtggaaccggatgagtaaaaagatccctgctacaactatagtgcttgagtggagtagggctgaaactgggtgtggggccttctatggctgatggggatttcaggggtggagacctaatggggctgatttgcctgctgctgctaggaggaggcctagtagtggggtgaggcttggattaccgtttagaagggctattggtgagggggcttcctcatgagtttggagtgtacggataaatcatgccaaggcgaggatgaacccgatatcgccgatacggttgtataggattgcttgaatggctgctgtgtgggcatctgcctcgggcgtatcatcaactgtatgaccacagaaggatataatacctacgccctctcagccgatgaacagttggaataggttgtcaccggtacctaaaattcgtatggtaatcaggaagatgagctacgatatttgaagaactgataagtgtgggccccgagtaatatatccagcgagactctatgatggccctgtacgaacaatgctccggttgacattacgga

SEQ ID NO: 713316 - DNA, 410 bp, Homo sapiens
tactttcacagggattcaaaaatggttcaacataagtaaatcaataaacatgatacatcaaatcaacagaataaagaacaaaaatcatattattatctcgacaaatgtagaagaaaatttgataaaattcaacatcccttcatgataaaaactctcacaaaactaggcatagaaagagcatatctgaaaataataaaggccacatacaacaaacccataactaccatcacactgaatagggaaatatctgaaagcctatcctctaagaactggaacaagacaaagttatccaccttcaccattcctattcaatattgtactgaaagtcctagccagagaaatcaggcaagagaaaaaaactaaccggcatccaagttggatgagttagcccgagttagctagtagacttc

SEQ ID NO: 713317 - DNA, 99 bp, Homo sapiens
atcaggccagtttccaaaaacttgaccctcatcaaaaagatgacataaataaaaaggcatttgataagttcaaaaaagcacatggagtggtaccttgag

SEQ ID NO: 713318 - DNA, 274 bp, Homo sapiens
taaattgggggccgcgtcgacgactacaggcgccaccacctcgccaggctaattttttgtatttttagtagagatggggtttcaccgtgttagccaggatggcctcgatctcctgacctcgtgatccgcccgccttggcctcccaaagtgctgggattacaggcgtgaccaccgcgcccggcctattttcttcactttttgcatagtagccaacagagaacctgccacttgatttggagtcatatacgtgatgggttaaatacattgttttagg

SEQ ID NO: 713319 - DNA, 401 bp, Homo sapiens
  misc_feature (19)..(19): n is a, c, g, or t
  misc_feature (62)..(62): n is a, c, g, or t
  misc_feature (111)..(111): n is a, c, g, or t
  misc_feature (125)..(125): n is a, c, g, or t
  misc_feature (130)..(130): n is a, c, g, or t
  misc_feature (139)..(139): n is a, c, g, or t
  misc_feature (149)..(149): n is a, c, g, or t
  misc_feature (324)..(324): n is a, c, g, or t
  misc_feature (385)..(385): n is a, c, g, or t
ctaaggaaccactaatccnactatgaactacaaagcctctatcccaggaggtggccatggcncgcttctgctggcctggatctccccactccaggggtcaggctccattangatttgccccttcncatcncttcctacncaaccactcnaattaatctttctttacctgagaccagttgggagcactggagtgcagggaggagaggggaagggccagtctgggctgccgggttctagtctcctttggcactggatggccacactattaccatgagaagaggggcctgtggggagcctggcaaacttcactggcttcaagaaganattgggagacttcctggccctgtttggtgtaatagatggcaaggattattttattattatntttttttgggttgtat

SEQ ID NO: 713320 - DNA, 109 bp, Homo sapiens
ggtttgtcgcagaaggaagatggcggatcttggaggagcagttgtcttgatgaagagaaggttcggtatagcaggcaaaaattcatcattcatgcccctcctcggagaa

SEQ ID NO: 713321 - DNA, 191 bp, Homo sapiens
atcttagaggatccccaccaagagagaaccctatgtaacgatggactatagcgtatgatgtgtcaatagtcaggctcatcaacatgtaacataatcataccactctggtgtgggatgctgatcattaggtgaggctgtgtcctagtatgtgggaaatacattccacatttctagtgcccatttcaagggta

SEQ ID NO: 713322 - DNA, 435 bp, Homo sapiens
gtgataatgagatcttgtatgtgctagctaagggtgacacagcctgtacacggtgctgtgaggctgctggacaactgagtggaatatggtgttataccaacccaagcaagatggatgagtagagggggttgtccctgggcccaaggctcatgcagacgcaacctattgtggcagggagagtaaggacggaagcagttttgggtggtgatgtcgtggtatgcccaatactcttgcgcatcctcgcttgtgtgccctaggatgtcctctgtactgagtaagagggcaggttcagtcacgcagacctgcttgtgcattcattgactgaagcctcactcagagtggccctttttctgtagctactgtagtcagctgggagtggggatgttgcatctcaaaatagcctgtggatcctgggaacaccgggtggatcctcta

SEQ ID NO: 713323 - DNA, 109 bp, Homo sapiens
gcacgacgggagactgcttgacgtccggacgctcagacccggctgggcaccatggcaaaaccctgtgctgtccacctcctctgtgctgtcccctcctctgtgctgtcca

SEQ ID NO: 713324 - DNA, 951 bp, Homo sapiens
gacttccggcgtagccatggcggctaacgctactaccaacccgtcgcagctgctgccgtcagagcttgtggacaacatgtctaggatcaagaattcacatcgtgatgaatgagtgataaggaaattgttggtactctatctaggatttgatgactgttgtcgaagtatggatactggaaggatgtcattgagttagaaagtcacatccaagtaaggaatgaaggattactaaattagatcagattttgctaaatggtaataagtataacaatgctgtttcctggaggacgagaggacctgaagtgtgaatgagttatccttgagttactactagattatgtgtgggcgttataatgaacccagcaccagatggacattgttgtttgtccgcatctttctatactgtttaatatcaccataaagctatagtttgcccgattaagagggaaagtgctttgaagatgtgttacccattttttgtacacgttaattcatgattatcctggacaaaaacgaagaaaagagcttcttctttgcagatgaacaataacaggtgtccggttaactgtcatttgttattctactgcagtagccagtggcacacaaaaggttgggagttattttcggcactttacttttgctgtcattatatggcttattgggtgtcatttacgtgaccatttgattctcaaccaaagtgttccaagcaaatgatgaactttgcttgaccggtggctctcaccacggggaatgtccttgaacacccactgaaatgccggctttgtaacaacaaaaaaagaacaaaaattgcggcggcgccccaaaaaaaccactgggccgggccacaaaaacgccttatccgcaaacgctgaagcggtcacaaaaacgggcggcgcaacaaatgtttttcaacgaaacagccgcggaaaatccacttatacaatagaacaa

SEQ ID NO: 713325 - DNA, 240 bp, Homo sapiens
ctaattggttcttcgatgacgccagccacgtctgttggtctataccacagctcatggcaatgccagatccttgacccactgaacaaggccagggattgaatctgtaacctcatagttcctagttggattcacttcctccgtgccatgacaggaactccaagcttgattttttcagtactgaaaattgtttttttttttttttttgggaaaggggggacccgccatcaaaaaaccatttgg

SEQ ID NO: 713326 - DNA, 753 bp, Homo sapiens
tgtggtgcacgcattgtgtgctccaactccctcaggcctgtgttgccgcactctgctgctatgagcttcctcaaaagtttcccgcctgctgtgccagcggaggggctccgtgctgggcagccgcaagacattgaggctgtcgttgaaacggagaaggtgctcgcgcacgtggctaccctttatacatcgctgagagccgcctgtctttgttaaagaatgcctctggatagggatctcacttgaataccccaaccattagtataacattgcatttaatcccaggggacccgaagttgacctgtctaagggaagaggcattgtggtattgctgtatgggtgaactgccaaaatttggaggaaggacttcaaaaaagaaacctgttggccgaatgaaagaaagaaggaaggacaggtgcttgcatggatgtggaacccttattgagtgaatttagcattgtggtggcctagtgataaactcagggtttgggaggcaatgttcaactgtgcaatgtgcgaatggcatggccttgcattccaagatcctggagcgatgcggatccagattgactaacgatggacacagattatgatgtgcacagccatgaacaaggaccggggaacactccttacatttaacacttatgaagaaggttatcccattacaagagaggcaagccacactgagagactacagaatgctctcagtctgtaccagcagataaatggtgggtcggacagaagatcacaagaata

SEQ ID NO: 713327 - DNA, 299 bp, Homo sapiens
ttggtcatggctgattcttgagggtacaaggacttgtttcctgcacttcgtgggggcaagacaggtgttttacttaaggtcaggagtttgggaatagcctggccaacatggcaaaaccttgtctctactaaaaatacaaaaattagccgggcatggtggttcgtgcctgtaattgcagctactcaggagggtgaggcaggagaattgcttgaatctgggaggtgaaggttgcagtgagctgagattcaaccactgcactccagcctgggcaacaagagtgagactctgtcaaaaaaaaa

SEQ ID NO: 713328 - DNA, 275 bp, Homo sapiens
gattacacagaggctttgtgaagggaagactaaaggaagagatgtagaaagaggggaaagggccgggcgcggtggctcacgcctgtaatcccagcaccttgggaggccaaggcaagtggatcacgaggtcaggagagtgagaccatcctggctaacacagtgaaaccccgtctctactaaaaatacaaaaaaacttagctgggcgtggtggcaggtgcctgtagtcccagctactggggaggctgaggcaggagaatggcgtgaacccggcaggt

SEQ ID NO: 713329 - DNA, 1062 bp, Homo sapiens
  misc_feature (833)..(833): n is a, c, g, or t
gctgcacctgatggaaaagatatatgacggcttcatgacattcctaaactatcttagtgcttatggccacagtctagcgttctacggtggcacgtccctcttcgtcgaatacatcagtgatggaaggatggatagacaaaaacaactaagcaagctagggcacaactcacaaaaaccccacttccattgatcttccctacagggcgttgacattgtggcgacactgcttagtaagtcacccgacagcccacagtgtaggggaagctctacagagtagcccaacggcccgcgaagtctcgtgttttatgtaaaagaactagccagttacgcattactacagtggcaacactgtcatctgcgcattaacttttcctaactcccactctaggctatagccctgcatgtctacctacttttaggccaattatgcgatgaaagatgaaaagaaattgacacataggaaagattgcgcacgcaatgagggttgcccaaacttgacaaaataagtaatgtgaagcatggcgagtctagtatgtgcactaagtttgccagagtggacaaagtattctcatcaaataactctcatttgatgttccatgatcaagaaagaatccctatctctatttgacaagtaattcaaagaggccaaataactgtgtaaacaaggacaaaggtaacttgtcaacagtcataactagtaaattatgagagccttgttctcataaacccagggtctttcttactacaaaatcgctgtgaatgtttggaaaataaccaaaatgtctctccaatgtctgcataaactgtgagagccaagtcaacagctttatcangaattactctctgacagcattaacaagcctggagaacagagagccgatcagatttacccaggggttaaaagactcggactttcccccttggaaacactgctctaattttaaacggggtttctgaggggacccagggtgaccccgaatctcgggaaggttcaaggctggtcacggcattcaaattagctacaaagcagggaacggaagaggacaggcaggaaaaacctaa

SEQ ID NO: 713330 - DNA, 954 bp, Homo sapiens
taatgaggaaatcttgggcattgactggatcctgactttgcaaatggcaaatacgattgcctgtctcgaggaaacttgattgatctttatggaaaccaaggtctgcaccccaccaggacctacaccatcagtcaactcctgtccagaccaaccttcccaacataaaaagggagctcacagagatctgaagcacgagacactggacaaaagagaggcagaaaacggacaatcacaaacatgaccgacacagaagaaccaagaaatcaccaaaaatgaccgcataaaagaacaaggaactaagaacacccaagaaccaatgaaaccagacatgcacaaggaacaaggaaaaccaacttacaaaagcatccgaggaatatataccgaacagtagcacacgagaacagcaacgacgacaacaagaaactagaaaaacagacagacacgaaacatggaccacgacaaaccggacaaaagaagccacagaaaaacaggaaatagacactgcaggaccgaagaacaaagaaaaacaccttaaaccaataccacgggatacacaagcaactccagacaaagagagaaacagaacaaacaaggaagaaacccgaaacaaagcaaaacagcagacaaaaaacaaccatacaaacacatgcagacacatacacctgacagacaaccatccgacaacacagcaggaacaaacaccacaacaacaaagcatccagaaaatgagaactgagaacaacacagaaaaatagagaacacaaaaaaaagggaccaacactgaaaacaacaagaaagaaaaaaccataaaccgagagagacagaccacccatacgcaaagcaccgaaaacaaaaaaaaccgaaagggaagacagaagagaggagcagagagaaagagaacggcacccgagaaagagcagtaaagaagggaagaatcaaagaagaagagaggag

SEQ ID NO: 713331 - DNA, 149 bp, Homo sapiens
acttctagaggatcccaggattcgtagatcactgacagcttgcacttgtgtgcctggaaaagctgcagacactcaatgcagccagaaggggggctgtaccctgactctgactgaaccacggagctcaccctggacagtatcactccgtg

SEQ ID NO: 713332 - DNA, 551 bp, Homo sapiens
  misc_feature (10)..(10): n is a, c, g, or t
  misc_feature (60)..(60): n is a, c, g, or t
  misc_feature (149)..(149): n is a, c, g, or t
  misc_feature (176)..(176): n is a, c, g, or t
ggtccgacgncctacctgcctcgctgtcagccaccacgcagcatgaggactaatactaantacttacctcctcgaccgccacgtgctctttcttctcctcctgctggatgatgtggtgatcgagagtacgacgacgtgtagttggtcgnccacactgctgcagcagctgtcgtcgnctcgcgcgcgtcgcgacgtacgtcgtcgacgacgcgtctactccccccacccgcggccgccgcccccgtgtcgagatacactactgctcctgtggtgtcgtcgtctcctctgctctctctcgcccccctctcgtcttctggtctactcgcgcgcgagagtatactctgtagtagagagagaggtgtgtgtcgtctgtgtcttgtctgtgtgtcagagcacactccctcgtccgcgcgcgcgtcgcccactccctcgtgaggatgctccccacgcgctcttttttgtggggctctttctttgttgtttgttgtctgttggttttctcttatatatatatatataaagagagaagaaaatactttccaccaaaaaca

SEQ ID NO: 713333 - DNA, 786 bp, Homo sapiens
  misc_feature (23)..(23): n is a, c, g, or t
  misc_feature (61)..(61): n is a, c, g, or t
  misc_feature (67)..(67): n is a, c, g, or t
  misc_feature (74)..(74): n is a, c, g, or t
  misc_feature (84)..(84): n is a, c, g, or t
  misc_feature (94)..(95): n is a, c, g, or t
  misc_feature (97)..(97): n is a, c, g, or t
  misc_feature (99)..(99): n is a, c, g, or t
  misc_feature (105)..(105): n is a, c, g, or t
  misc_feature (108)..(108): n is a, c, g, or t
  misc_feature (110)..(110): n is a, c, g, or t
  misc_feature (112)..(113): n is a, c, g, or t
  misc_feature (122)..(123): n is a, c, g, or t
  misc_feature (125)..(126): n is a, c, g, or t
  misc_feature (129)..(129): n is a, c, g, or t
  misc_feature (137)..(138): n is a, c, g, or t
  misc_feature (140)..(140): n is a, c, g, or t
  misc_feature (150)..(150): n is a, c, g, or t
  misc_feature (154)..(154): n is a, c, g, or t
  misc_feature (163)..(164): n is a, c, g, or t
  misc_feature (173)..(174): n is a, c, g, or t
  misc_feature (179)..(179): n is a, c, g, or t
  misc_feature (188)..(188): n is a, c, g, or t
  misc_feature (197)..(197): n is a, c, g, or t
  misc_feature (201)..(202): n is a, c, g, or t
  misc_feature (205)..(205): n is a, c, g, or t
  misc_feature (209)..(210): n is a, c, g, or t
  misc_feature (213)..(213): n is a, c, g, or t
  misc_feature (215)..(216): n is a, c, g, or t
  misc_feature (221)..(221): n is a, c, g, or t
  misc_feature (223)..(223): n is a, c, g, or t
  misc_feature (231)..(231): n is a, c, g, or t
  misc_feature (234)..(234): n is a, c, g, or t
  misc_feature (237)..(237): n is a, c, g, or t
  misc_feature (239)..(240): n is a, c, g, or t
  misc_feature (251)..(251): n is a, c, g, or t
  misc_feature (254)..(254): n is a, c, g, or t
  misc_feature (263)..(263): n is a, c, g, or t
  misc_feature (285)..(285): n is a, c, g, or t
  misc_feature (300)..(300): n is a, c, g, or t
  misc_feature (312)..(312): n is a, c, g, or t
  misc_feature (317)..(317): n is a, c, g, or t
  misc_feature (325)..(325): n is a, c, g, or t
  misc_feature (342)..(342): n is a, c, g, or t
  misc_feature (347)..(347): n is a, c, g, or t
  misc_feature (375)..(376): n is a, c, g, or t
  misc_feature (383)..(383): n is a, c, g, or t
  misc_feature (388)..(388): n is a, c, g, or t
  misc_feature (391)..(391): n is a, c, g, or t
  misc_feature (393)..(393): n is a, c, g, or t
  misc_feature (395)..(395): n is a, c, g, or t
  misc_feature (433)..(433): n is a, c, g, or t
  misc_feature (441)..(441): n is a, c, g, or t
  misc_feature (443)..(443): n is a, c, g, or t
  misc_feature (456)..(456): n is a, c, g, or t
  misc_feature (499)..(499): n is a, c, g, or t
  misc_feature (517)..(517): n is a, c, g, or t
  misc_feature (541)..(541): n is a, c, g, or t
  misc_feature (580)..(580): n is a, c, g, or t
  misc_feature (584)..(584): n is a, c, g, or t
  misc_feature (586)..(586): n is a, c, g, or t
  misc_feature (589)..(589): n is a, c, g, or t
  misc_feature (596)..(599): n is a, c, g, or t
  misc_feature (609)..(610): n is a, c, g, or t
  misc_feature (612)..(612): n is a, c, g, or t
  misc_feature (681)..(681): n is a, c, g, or t
  misc_feature (692)..(692): n is a, c, g, or t
  misc_feature (694)..(694): n is a, c, g, or t
  misc_feature (723)..(723): n is a, c, g, or t
  misc_feature (769)..(769): n is a, c, g, or t
ttctcatattactcatggtaggntgagaatgcattaaaaagttaaaataaaaaaaaaatanagaatnaaattgnaaaagcagtnataaacacanntntncaaaanatnantnntataaatanntnnatnactaaatnntntagccacatnttanccatgcatnnaataaaaanntattnctatttgtnttttataanatannttnatannttngnntaatnantatagatnaanaantnnaattttttatntangaaaaagtntatcgcgatcgtcagaaaagangtgcgataaatcgangcatggaaggtngaaangtttcgancattaaacgtcgtttgngaacngtatgtttgcatgcgagcttgcgcaganntgaaaancatgntcncntnttcaccaaggattctgtgcagcatttggtgactctgtnacttactngngttttctgcatgnaacacacataactggttcaggaccacggatagatagtcttctncacagggcattctttttncttcaggatgtttacaacatttgntgcccacttttcctaggtttcttgagacctctacaagantttnanttnacacttnnnntactttcttnntntaacgaactaatagcgcattctggaatttgtactctccaatcttctcaaaaatctcacaattttttttnattaaattctnantctcttccacaatatttttaaattcatcnaacactttttcatatcattcattattatcttcatcttcacatcacntctctatatttttttca

SEQ ID NO: 713334 - DNA, 806 bp, Homo sapiens
  misc_feature (40)..(40): n is a, c, g, or t
  misc_feature (68)..(68): n is a, c, g, or t
  misc_feature (79)..(79): n is a, c, g, or t
  misc_feature (83)..(83): n is a, c, g, or t
  misc_feature (265)..(265): n is a, c, g, or t
  misc_feature (269)..(269): n is a, c, g, or t
  misc_feature (296)..(296): n is a, c, g, or t
  misc_feature (330)..(330): n is a, c, g, or t
  misc_feature (429)..(429): n is a, c, g, or t
  misc_feature (435)..(435): n is a, c, g, or t
  misc_feature (441)..(441): n is a, c, g, or t
  misc_feature (517)..(517): n is a, c, g, or t
  misc_feature (595)..(595): n is a, c, g, or t
  misc_feature (606)..(606): n is a, c, g, or t
  misc_feature (612)..(612): n is a, c, g, or t
  misc_feature (658)..(658): n is a, c, g, or t
  misc_feature (666)..(666): n is a, c, g, or t
  misc_feature (676)..(676): n is a, c, g, or t
  misc_feature (679)..(679): n is a, c, g, or t
  misc_feature (721)..(721): n is a, c, g, or t
  misc_feature (780)..(780): n is a, c, g, or t
tatttctaaacagaatgggccgactcagtcacagtaactntcgacctccatagtagagcgacccacanagacagacctnattnttttcccataaccaggggtgaaaaatatacaacttgtttctgaaccaaaaccacaatttctgcagtctaaaatgtttcactgccaaaatggccctggtagaaattatgttgttttttttcttctttaaaaaaaaaaaattaaaaaaatttcctaagacacttaatcctcaatctggaatgtngaanctgagcccaaagcagcccagttaaccnaaaaaataaagaaaaaattcccatcacctgtttnagtggggcctgagaggagagaggtggtgtggggaaccctgccttggtatggagagtgagggcccccggacccagaccgagaccgtgagtggccatagcnggggcntctctnaggataaactcggatgtgggaagtttcaccctcatgagaccggaattgggtgtcacccagtttacgcggggcatancccatgtctccttttctgagacactcgaccatccccactccatccttctgcacaccagcttaacagaaatccccagcntctagcatgtnaccctncaggtcctgccagccgcctgacggaggaagtcctgaaacaagaccncggaaatnagacctcctngtnggaggcccatccctcccaccacggggccacccaccccgaccnccataagtcctggggaactccacaagaagccgaaattggccataaatcataaccatttnttccataaatagcatcctctgcatct

SEQ ID NO: 713335 - DNA, 655 bp, Homo sapiens
  misc_feature (361)..(362): n is a, c, g, or t
  misc_feature (534)..(534): n is a, c, g, or t
  misc_feature (560)..(560): n is a, c, g, or t
  misc_feature (615)..(615): n is a, c, g, or t
  misc_feature (618)..(619): n is a, c, g, or t
  misc_feature (637)..(637): n is a, c, g, or t
ggtgcagcccacctcagaggagcgcatccccaagaccatcgagatcaagtccatcacgcacgatattgaggagaaaggcgtccggatgaagctgacagtgattgacacaccagggttcggggaccacatcaacaacgagaactgctggcagcccatcatgaagttcatcaatgaccagtacgagaaatacctgcaggaggagggtcaaaatcaaacggaaaaaagggcttacggaacacgggtgtacacgtgtgtgtctcatattatatccgcgacggcggactactctcctcgaggcctgctggacatcgagttgatgaacactgcctgagcaagggtggtcaacatcgtccctgtcatnnccaaggggaacactcaccctggaggagagggtccacttcaaacagggatcaccgcagacctgctgtccaacggcatcgacgtgtacccccagaaggaatttgatgaggactcggaggaccggctggtgaacgagaagttccgggagatgatcccatttgctgtggtgggcangtgaccacgagtaccaggtcaacggncaagaggatcttgggaggaagaccaagtgggttgaaacaccaacactgtgagttnccnnactgcgccttctcatcangcgcccatcgtgcgcttc

SEQ ID NO: 713336 - DNA, 317 bp, Homo sapiens
  misc_feature (26)..(26): n is a, c, g, or t
  misc_feature (56)..(56): n is a, c, g, or t
  misc_feature (74)..(74): n is a, c, g, or t
  misc_feature (82)..(85): n is a, c, g, or t
  misc_feature (94)..(96): n is a, c, g, or t
  misc_feature (130)..(131): n is a, c, g, or t
  misc_feature (133)..(133): n is a, c, g, or t
  misc_feature (156)..(156): n is a, c, g, or t
  misc_feature (158)..(159): n is a, c, g, or t
atcaagcgacatgtagagttcataanttctggccaaatggtcatacctcaaacctnatcagcagtaaggctctntacttgcnnnnaaaatatgnnngctggggaatttggaaatgatatataatatatannantatatatataatagattaatatntnntatatataatacatatataatatatatgtaatagatatacaatatataatatataatagatatataatattatatataatagatatataactttccatgtgattttcctcttaatttttttctagctgatccatatgaattcctcttattaagaaaaa

SEQ ID NO: 713337 - DNA, 302 bp, Homo sapiens
  misc_feature (59)..(59): n is a, c, g, or t
  misc_feature (134)..(134): n is a, c, g, or t
tggaaacgggatgatttaggcctctggctgcagtgcacgcaagttaacaatcgtttttntttagactgcagatggaatatttaatcctttccagccaggcatttgcatctttgtaccccatctgtagagctatngtctgccttaaatcttttacctctacaaccattaccttagttgggtggttctagagatgggaggagagcgctgagcctgatatgtttgggcacagtgttgggtcccacatgttcttccagactctgggtctggatttctttattgtccttagctgatgctctagctaa

SEQ ID NO: 713338 - DNA, 733 bp, Homo sapiens
  misc_feature (565)..(565): n is a, c, g, or t
  misc_feature (606)..(606): n is a, c, g, or t
ggaaaggttcctggagaaaaatatatccacgctaaggcctgtaggacaaccagatgtcagctattgttaggcacagaggtaaggggagaaagaaaaagcactgtagatgcgttgtagacatagaaactccgcaagaggtgagggaggacctggcatattctaggggttctggtgcaagagtatccatgtgtgaaaaggaagtagaagacataaggctgaaaaagtaagcagaccccagaaggtgaggcactcatgaaccatgttaaagagttaaccactgaacagtggaacgggaagcctgtgaaggttttgctttgtgagatttacacttcaggatgataaccctgcttcctacgtgaaccaaaggggcagtggccaggaaggctgaaagcctttagacaaatgcaggaaaaaggtggcggtgaactgagctagcgtaacagtggtggcagtgaaaagaagcagacagattcaaagattttcaagaagggaacatggacagttcttagagttggatgactcgtgtggcccaagaaaagagaagactctaaatgatacatgtggntgggtcattgtaagttacttaactacttagttatctttggntcaagttttctctaatcacttgacaagaaagaaagaaaagtccctttaaattaacagtgcattaagggattttatttagcaagggtcataatttgcaaaattggagaaattacagtttattctaacc

SEQ ID NO: 713339 - DNA, 240 bp, Homo sapiens
  misc_feature (9)..(9): n is a, c, g, or t
  misc_feature (92)..(92): n is a, c, g, or t
  misc_feature (170)..(170): n is a, c, g, or t
  misc_feature (221)..(221): n is a, c, g, or t
tgtgaattnttaatggcaacaaaattttatttattttatttttaagagggaatctcactccagcctgggaaacagagagagactttgtctcnggaaaaaaaaaaaaaaaaagccaggcatgcacttgtagtccaagctactcaggagctgaggccagaggatcacttgancctaggagtttgaggttgcagtgaactatgatcacggcacttgcactctancctgggcaacagagcaaga

SEQ ID NO: 713340 - DNA, 293 bp, Homo sapiens
cagctcctccttggaagatgctgcagtgctgtttccagaatgtggctggctgctaaaataccctagtgtccctgtaattggtgccacgagtctgtggacacagggtgggcggggctggaataggacgtggaagagagggatgattctgaagaaccgtgagagggggggtttccaggtctcagtgcagtagtgcgataactgtatcctggagactgtgtaggatgtcctctgaagggggaggaactctgctgaaggaggcttcgtgattctgtccgaggactacttgtgttgtc

SEQ ID NO: 713341 - DNA, 171 bp, Homo sapiens
cctgcgcccgtgaaagacaggttcgtcatttcaagagatgattcaaagaaaacagtgagcctgcaaatggacagtctgaaaatcgaagacacggccgtgtatttttgtgccacagagttattgccgggtcttgaccactggggccagggagccctggtcaccgtcgcctca

SEQ ID NO: 713342 - DNA, 104 bp, Homo sapiens
ctcaggtctctcccaatgtccttcaggccttgctccaaagctctgtccgggtgaagctcccctcccatcctccttaaagcttcagcctctaccttgggacactt

SEQ ID NO: 713343 - DNA, 81 bp, Homo sapiens
  misc_feature (1)..(1): n is a, c, g, or t
  misc_feature (25)..(25): n is a, c, g, or t
  misc_feature (68)..(68): n is a, c, g, or t
nattgttggttgggcgatcccgaangcatcttgcttcacgggtcaaaaggttaacccatctttgtggngggggaatggttt

SEQ ID NO: 713344 - DNA, 840 bp, Homo sapiens
  misc_feature (335)..(335): n is a, c, g, or t
gggcattcctcccccttgggggcccaaccaacggggttccctggaccacccggtgccttgtggccccgcctattttccgcaagcccctgtcaatttctcctatgggagacccccgcccccctctggctgtgcccggcgccccaaggccacgtgttcagatcgttcttggccgttggctcgaccccgtctgcttcggtgctttgatgtctacccccccgcttgtctcctcgcgcccagatagtggaatgttcctccggcctttgtctccccgtggattcacgcgcgtgcaactatgcacgctcgtacgaaatagtccgcctccctgccgtcttgtnggtggataagactccacacactctgtctttctttagaacactactagatgggcgcactgacctcccccatttggttgttttctttgatggacaccgctcataattctgtctccaccctctcctcagaatatgtgcgggcggataacactgtttcaccctccctcaagcctgcgcgtcaatctgagagaagttaagacagagtcacacacgtcgtcagtcgcgatactagtctgcgagctgtcttgacaaaaggacacgccgcctctctcactgaaacaatatcgtttccacactctgtacatcattcggtacataaatgatgcagttttctctttagattcgggaaataatactctatattttcgacgagcgtacgaaactccttgtcttaaccagtgttacagacaccgctgtcatgacaaccacactctttccccacaccacccaccccccggcctcacgatgaataaccaaacctaacaatccacacggactcatcataaca

SEQ ID NO: 713345 - DNA, 966 bp, Homo sapiens
  misc_feature (23)..(23): n is a, c, g, or t
ggatccttctggcgaactctatngatgggcccaagcgtaaccaggctcttctgattggccggtgtacttcagtttccgtccaaggtccgcctcctacctccttctgcttcggtgcgtttgcttctgaggatctccagtgtcacaacaaacacatgccagccctgttttacagggagccctggaggagttgggatagaggccacattgactgagggtagttgccagggtcctgcagttatacacaaagtccttaggataagaccatggccttgagagcatgtggcttgatcatcttccgaagatgcctcattcccaaagtggacaacaatgcaattgagtttttactgctgcaggcatcagatggcattcatcactggactcctcccaaaggccatgtggaaccaggagaggatgacttggaaacagccctgagggagacccaagaggaagcaggcatagaagcaggccagctgaccattattgaggggttcaaaagggaactcaattatgtggccaggaacaagcctaaaacagtcatttactggctggcggaggtgaaggactatgacgtggagatccgcctctcccatgagcaccaagcctaccgctggctggggctggaggaggcctgccagttggctcagttcaaggagatgaaggcagcgctccaagaaggacaccagtttctttgctccatagaggcctgagctgactggagcagagtcatttgcttcagcaggatccttgtgggccttctaagatgaagccaccctcaggtccagggaaggttgtgctggtatttggctcatgacagccaagagcagatttgtgaaatcggctcaactcccaggtgagagcaagcaaaaatcttggctgggtggaaaggaaggcaaaagagtaaaaattaaaaaggccaggcccagtaagtgtaccttgtactttataaataaacctcaagcagctcaa

SEQ ID NO: 713346 - DNA, 246 bp, Homo sapiens
  misc_feature (3)..(3): n is a, c, g, or t
  misc_feature (7)..(7): n is a, c, g, or t
  misc_feature (35)..(35): n is a, c, g, or t
  misc_feature (49)..(49): n is a, c, g, or t
  misc_feature (53)..(53): n is a, c, g, or t
  misc_feature (65)..(65): n is a, c, g, or t
  misc_feature (75)..(75): n is a, c, g, or t
  misc_feature (99)..(99): n is a, c, g, or t
  misc_feature (111)..(111): n is a, c, g, or t
  misc_feature (148)..(148): n is a, c, g, or t
  misc_feature (151)..(151): n is a, c, g, or t
  misc_feature (173)..(173): n is a, c, g, or t
  misc_feature (178)..(178): n is a, c, g, or t
  misc_feature (183)..(183): n is a, c, g, or t
  misc_feature (187)..(187): n is a, c, g, or t
  misc_feature (196)..(196): n is a, c, g, or t
  misc_feature (217)..(217): n is a, c, g, or t
  misc_feature (230)..(230): n is a, c, g, or t
aancgtnagaagttttaaacagctttcacacaaantagatgcaactgtncccntgtctgagtacntatttaaaanaaaggtaaagattggcctgttagnaaaagcataatntgagcttggattactggatttttttttttttttaaanacncctggagaggacatttgaaaanactgntcttncccncgaaccctnatttggttccattatgtaaanatttcaaatattnaaaatgtatatatttg

SEQ ID NO: 713347 - DNA, 374 bp, Homo sapiens
cgatcttaacacggcgacgtccgggtaggaccctgaggattatgttgctcgtataaggaggagctggatggtcacggcacgtggtcctggcctggtggtgtgaccgggctgctgcttggggagttgcagatgacggctcgccctccacgcgggcggggtgtggcggcgattccccaaaaaggcacagcaactcgtcctcctcgctcagtgcacggcgggggctgatggtcagttgcacctccccctgtgcccgctggttcatgtcctgttggctgggcgctggttgacgggcacgcaaggctttgcttcggatccacagcccagtggtggcttccctcgggcccgggggacacttcggccttccggggtgcatc

SEQ ID NO: 713348 - DNA, 497 bp, Homo sapiens
ggggcctggaaggatcaagaatggtgagaatggaggatgaggccaggcgcagtggctcacacctgtaattccagcactttgggaggccgaggcgggcgaatcacgaggtcaggagtttgagaacagcctggccaacatggtgaaaccctgtctctactaaaaacacaaaaaattagttgggcgggcgcctgcaatcccagctactcgggaggctgacgcaagagaatcgctggaacctgggaggcagaggttgcagtgagccgagatcaagccaccgcactccagcctggggggaaagagtgagactccatctcaaaaaaaaaaaagatgggaggatggccaggcttgggggctcacatcagtcatcccagaacttggggaggccgagacagggggatggcttgaggccaggagttcaagatcagcctgaacaacatggcaagacctcatctctaccaaaaactttaaaacttacccaggcatggtggcatgcaccc

SEQ ID NO: 713349 - DNA, 200 bp, Homo sapiens
attctgtggccgacggacgacgacgacgacagacgacgacgacgacgacgacgacgacgacgacgacacgacgacgacacgacacacgacgacgaacacgactggcgaccacaaccacgacaaacaccaaataacacgacgcgacacagacataaccagagagtcgaccagcaacacagcgacacacgataataggacac

SEQ ID NO: 713350 - DNA, 1059 bp, Homo sapiens
  misc_feature (23)..(23): n is a, c, g, or t
ggatccttctggcgaactctatngatgggcccaagcgtaaccaggctcttctgattggccggtgtacttcagtttccgtccaaggtccgcctcctacctccttctgcttcggtgcgtttgcttctgaggatctccagtgtcacaacaaacacatgccagccctgttttacagggagccctggaggagttgggatagaggccacattgactgagggtagttgccagggtcctgcagttatacacaaagtccttaggataagaccatggccttgagagcatgtggcttgatcatcttccgaagatgcctcattcccaaagtggacaacaatgcaattgagtttttactgctgcaggcatcagatggcattcatcactggactcctcccaaaggccatgtggaaccaggagaggatgacttggaaacagccctgagggagacccaagaggaagcaggcatagaagcaggccagctgaccattattgaggggttcaaaagggaactcaattatgtggccaggaacaagcctaaaacagtcatttactggctggcggaggtgaaggactatgacgtggagatccgcctctcccatgagcaccaagcctaccgctggctggggctggaggaggcctgccagttggctcagttcaaggagatgaaggcagcgctccaagaaggacaccagtttctttgctccatagaggcctgagctgactggagcagagtcatttgcttcagcaggatccttgtgggccttctaagatgaagccaccctcaggtccagggaaggttgtgctggtatttggctcatgacagccaagagcagatttgtgaaatcggctcaactcccaggtgagagcaagcaaaaatcttggctgggtggaaaggaaggcaaaagagtaaaaattaaaaaggccaggcccagtaagtgtaccttgtactttataaataaacctcaagcagctcaaaaaaaatatacacacgaaaaaaaaaaccgggttcttggggggaaaaaaaaaggcaggtattctccacaccttttaagaggagggccacgggaa

SEQ ID NO: 713351 - DNA, 1139 bp, Homo sapiens
ggagcctttctgtggctgcacttggggacccttgtggaccatggggtgtggctagggaacccctaagtttcagactaaaggaaagatcctgggtgatgctggctttttgcttctttcttctgccctcccacctcagcttgtaagcggggatgtgtgtatgtctggggagaggaggtgtagggtgcgtatgtccatggggggaggggcttgtgtgtgcagtcattgttccaaggtgtttccagtagcgacttctgtccccctatccccaccctggtccccactttgcgcccccgggctccctgcctttggtgcacacaggatcctgcccgccccccttgccagagccagagaagggggttggggccattccaaggaggcaggactgaaaccctcaccagggttactccccaacatccttttgcctgagtcaccctctaagcgctttaaccacgggcagctgcctgttccccagacagtttttggtggggggggtccagggtcccccttgctggtacctccctcacccctctttttgtttttccatctgtgcctgttccttccacagcccaggcacacagaagcccaccttcttccccttaggaggagggatagtcaacacccctgctgtctctctgtcactcacacactgatttatggggtctgagctgggctgttcctgcaggatggacaggacccagcgccctcttctccccacaggctgtaaatagacttccaatcaccaggccagcccccacacaccctcactcattccagggaagcccaggtaggtggtgaacccgctgccacgtctatcagtcctcttgttttatgcaaagatttactgtaaagtagatttctttccctccctcccccattcttttattgtaaatattgtctctaaatgtgtaacatattataaagaatttataaggatttttaaagatgttttgctcatttacaaaagtgttgtaacagtgttggacaaagccttccaccccatgtccgcatggctcctttcactgtgtccttgacacacctctctggcaacaactaaaatttcctgcttctgaaaagtcctgtcttaaaagtacagtctatatcttggaaataaatagctttcctcaaggcatgaaaaaaaa

SEQ ID NO: 713352 - DNA, 993 bp, Homo sapiens
  misc_feature (23)..(23): n is a, c, g, or t
  misc_feature (988)..(988): n is a, c, g, or t
  misc_feature (990)..(990): n is a, c, g, or t
ggatccttctggcgaactctatngatgggcccaagcgtaaccaggctcttctgattggccggtgtacttcagtttccgtccaaggtccgcctcctacctccttctgcttcggtgcgtttgcttctgaggatctccagtgtcacaacaaacacatgccagccctgttttacagggagccctggaggagttgggatagaggccacattgactgagggtagttgccagggtcctgcagttatacacaaagtccttaggataagaccatggccttgagagcatgtggcttgatcatcttccgaagatgcctcattcccaaagtggacaacaatgcaattgagtttttactgctgcaggcatcagatggcattcatcactggactcctcccaaaggccatgtggaaccaggagaggatgacttggaaacagccctgagggagacccaagaggaagcaggcatagaagcaggccagctgaccattattgaggggttcaaaagggaactcaattatgtggccaggaacaagcctaaaacagtcatttactggctggcggaggtgaaggactatgacgtggagatccgcctctcccatgagcaccaagcctaccgctggctggggctggaggaggcctgccagttggctcagttcaaggagatgaaggcagcgctccaagaaggacaccagtttctttgctccatagaggcctgagctgactggagcagagtcatttgcttcagcaggatccttgtgggccttctaagatgaagccaccctcaggtccagggaaggttgtgctggtatttggctcatgacagccaagagcagatttgtgaaatcggctcaactcccaggtgagagcaagcaaaaatcttggctgggtggaaaggaaggcaaaagagtaaaaattaaaaaggccaggcccagtaagtgtaccttgtactttataaataaacctcaagcagctcaaggttgtccttctaaaaaaaatncnaaa

SEQ ID NO: 713353 - DNA, 129 bp, Homo sapiens
  misc_feature (119)..(119): n is a, c, g, or t
agcatgtgagactccttgtaattttggtggctgagtatacaacggagctggcttcacactgatcctgctggaagaggtccacacttcctgatagatgtatatgatttcctggtgatacncagtgcagcc

SEQ ID NO: 713354 - DNA, 898 bp, Homo sapiens
  misc_feature (731)..(731): n is a, c, g, or t
ccttaggggggaggaccccgggaatcggggccctggtgggagggggcgggggcggcggggccccccaggacccgcgcccggggcgcgccccgtccagagcccgcactcgctcacgtagattttcttttgatatatctcctatagcccatcctccctgcgcccaccctactccgcagagcgtgccgctggccagcaatcgccgggcgggggggctctgcgtccgcctccctccgtacacgcacactcacacccggcaagctcgatctatggggcccgcattcgttcccgcgcgtcgcagtcaaagctcgcgctcatcccctccgacacctctcaggaccgcccgttgctgaccggggcggcgcggcgccctacaacgggagaaacgaagaatgctggagattatagattcaacacgactgctagccccacgcacgtaccaccatcattcacgacctctgcggctacccccccctccccccacacccccctccaccgatactattcctcgctccatcgcctctccgcactccctcgccgccaccggacgtgctcgggcgtcgccagcggacggctgtgagagacatccatactctccctctcgctaacctatacacctctcgtgtgctcaccgtgctagtcacaagctgaagtgcgcgcgttgtaaccgtcgcgcgtaggatgtcttccgtgctagagagtagacgcgcgcatcgcgcccagcatgacggccnaggcctgcattcgatgtagtggcactcggcagcgttctgaaagggtcggccctgctataccctattcttagttaataatatctacctcagattactcttatctcatttctttgagacatcccccgcttacgttcgaatctcacactccacccccatctcactcgtct

SEQ ID NO: 713355 - DNA, 888 bp, Homo sapiens
  misc_feature (29)..(29): n is a, c, g, or t
  misc_feature (58)..(58): n is a, c, g, or t
ggaagcagggagagagaactggccagggnataaaaagggcccacaagagaccggctcnaggatcccaaggcccaactccccgaaccactcagggtcctgtggacagctcacctagtggcaatggctccaggctcccggacgtccctgctcctggcttttgccctgctctgcctgccctggcttcaagaggctggtgccgtccaaaccgttccgttatccaggctttttgaccacgctatgctccaagcccatcgcgcgcaccagctggccattgacacctaccaggagtttgaagaaacctatatcccaaaggaccagaagtattcattcctgcatgactcccagacctccttctgcttctcagactctattccgacaccctccaacatggaggaaacgcaacagaaatccaatctagagctgctccgcatctccctgctgctcatcgagtcgtggctggagcccgtgcggttcctcaggagtatgttcgccaacaacctggtgtatgacacctcggacagcgatgactatcacctcctaaaggacctagaggaaggcatccaaacgctgatggggaggctggaagacggcagccgccggactgggcagatcctcaagcagacctacagcaagtttgacacaaactcgcacaaccatgacgcactgctcaagaactacgggctgctctactgcttcaggaaggacatggacaaggtcgagacattcctgcgcatggtgcagtgccgctctgtggagggcagctgtggcttctaggtgcccgagtagcatcctgtgacccctccccagtgcctctcctggccctgaaggtgccactccagtgcccaccagccttgtcctaataaaattaagttgtatcatttcaaaaaa

SEQ ID NO: 713356 - DNA, 1008 bp, Homo sapiens
  misc_feature (23)..(23): n is a, c, g, or t
ggatccttctggcgaactctatngatgggcccaagcgtaaccaggctcttctgattggccggtgtacttcagtttccgtccaaggtccgcctcctacctccttctgcttcggttctacagtgatggggtgcttccttttggcttctggaatgggtgcgtttgcttctgaggatctccagtgtcacaacaaacacatgccagccctgttttacagggagccctggaggagttgggatagaggccacattgactgagggtagttgccagggtcctgcagttatacacaaagtccttaggataagaccatggccttgagagcatgtggcttgatcatcttccgaagatgcctcattcccaaagtggacaacaatgcaattgagtttttactgctgcaggcatcagatggcattcatcactggactcctcccaaaggccatgtggaaccaggagaggatgacttggaaacagccctgagggagacccaagaggaagcaggcatagaagcaggccagctgaccattattgaggggttcaaaagggaactcaattatgtggccaggaacaagcctaaaacagtcatttactggctggcggaggtgaaggactatgacgtggagatccgcctctcccatgagcaccaagcctaccgctggctggggctggaggaggcctgccagttggctcagttcaaggagatgaaggcagcgctccaagaaggacaccagtttctttgctccatagaggcctgagctgactggagcagagtcatttgcttcagcaggatccttgtgggccttctaagatgaagccaccctcaggtccagggaaggttgtgctggtatttggctcatgacagccaagagcagatttgtgaaatcggctcaactcccaggtgagagcaagcaaaaatcttggctgggtggaaaggaaggcaaaagagtaaaaattaaaaaggccaggcccagtaagtgtaccttgtactttataaataaacctcaagcagctcaa

SEQ ID NO: 713357 - DNA, 660 bp, Homo sapiens
  misc_feature (41)..(41): n is a, c, g, or t
  misc_feature (150)..(150): n is a, c, g, or t
  misc_feature (155)..(155): n is a, c, g, or t
  misc_feature (191)..(191): n is a, c, g, or t
  misc_feature (244)..(244): n is a, c, g, or t
  misc_feature (339)..(339): n is a, c, g, or t
  misc_feature (351)..(351): n is a, c, g, or t
  misc_feature (384)..(384): n is a, c, g, or t
  misc_feature (481)..(481): n is a, c, g, or t
  misc_feature (501)..(501): n is a, c, g, or t
  misc_feature (532)..(532): n is a, c, g, or t
  misc_feature (552)..(552): n is a, c, g, or t
  misc_feature (556)..(556): n is a, c, g, or t
  misc_feature (627)..(627): n is a, c, g, or t
tctgcgcttgtctgccatgctaacgttgaagcaaggatganaatagaacctccctaaaactgatgccgtccttgtccaggagctgaacccacttttgtaagatgaatgaaaggccacaagattaggatttggtgcgttggggcctgaatnctgtnaaaatacaggcatagtttctgtaaccccttactgcncaggagtcatgtggccagaggtcacaagacttgtgtctcccccagtgcctccngtagataacatcactattgtggaacctaaaattggccttttgggatgtttctcagacttaccccacctggactcaacctgtggccccacccagangtggactcagtncataaggactatttccacacccgtatgattgcntccccaaccacttggggtaacatcattcattcatttgcacgtggaaatccagttttcccaataccattgtaattccctggtgggttcttcctgcttnctgcacagacaaaaccagtncactgaggccatggtattgcagtcaggagtngaattaactcaatgccagcnacanggaaggactggagttatcactgaaatcagcctccccaaaggctcagaggttagggtgtttcaaggaaagtnttgtgggcaggcaggggactcaggaatgggtgc

SEQ ID NO: 713358 - DNA, 832 bp, Homo sapiens
  misc_feature (10)..(10): n is a, c, g, or t
ccggaggcgnttgaatggccccctcgaaccactcagggtcctgtggacagctcacctagtggcaatggctccaggctcccggacgtccctgctcctggcttttgccctgctctgcctgccctggcttcaagaggctggtgccgtccaaaccgttccgttatccaggctttttgaccacgctatgctccaagcccatcgcgcgcaccagctggccattgacacctaccaggagtttgaagaaacctatatcccaaaggaccagaagtattcattcctgcatgactcccagacctccttctgcttctcagactctattccgacaccctccaacatggaggaaacgcaacagaaatccaatctagagctgctccgcatctccctgctgctcatcgagtcgtggctggagcccgtgcggttcctcaggagtatgttcgccaacaacctggtgtatgacacctcggacagcgatgactatcacctcctaaaggacctagaggaaggcatccaaacgctgatggggaggctggaagacggcagccgccggactgggcagatcctcaagcagacctacagcaagtttgacacaaactcgcacaaccatgacgcactgctcaagaactacgggctgctctactgcttcaggaaggacatggacaaggtcgagacattcctgcgcatggtgcagtgccgctctgtggagggcagctgtggcttctaggtgcccgagtagcatcctgtgacccctccccagtgcctctcctggccctgaaggtgccactccagtgcccaccagccttgtcctaataaaattaagttgtatcatttcaaaaaa

SEQ ID NO: 713359 - DNA, 987 bp, Homo sapiens
gctacctccttctgcttcggggagggcatgggatcagctacctgtttctgcctcaaccatggaccaataatatgagatctttgttcaccagttctacagtgatggggtgcttccttttggcttctggaatgggtgcgtttgcttctgaggatctccagtgtcacaacaaacacatgccagccctgttttacagggagccctggaggagttgggatagaggccacattgactgagggtagttgccagggtcctgcagttatacacaaagtccttaggataagaccatggccttgagagcatgtggcttgatcatcttccgaagatgcctcattcccaaagtggacaacaatgcaattgagtttttactgctgcaggcatcagatggcattcatcactggactcctcccaaaggccatgtggaaccaggagaggatgacttggaaacagccctgagggagacccaagaggaagcaggcatagaagcaggccagctgaccattattgaggggttcaaaagggaactcaattatgtggccaggaacaagcctaaaacagtcatttactggctggcggaggtgaaggactatgacgtggagatccgcctctcccatgagcaccaagcctaccgctggctggggctggaggaggcctgccagttggctcagttcaaggagatgaaggcagcgctccaagaaggacaccagtttctttgctccatagaggcctgagctgactggagcagagtcatttgcttcagcaggatccttgtgggccttctaagatgaagccaccctcaggtccagggaaggttgtgctggtatttggctcatgacagccaagagcagatttgtgaaatcggctcaactcccaggtgagagcaagcaaaaatcttggctgggtggaaaggaaggcaaaagagtaaaaattaaaaaggccaggcccagtaagtgtaccttgtactttataaataaacctcaagcagctcaa

SEQ ID NO: 713360 - DNA, 172 bp, Homo sapiens
gatacctggtcccatgcctgtatccacagctactcgggaggctgaggcgagaatcgcttgaacccaggaggcggaggttgcggtgagctgagatcgcaccattgcactccagcctgggcaacaagagcgaaacaacaagagaaaaaaaaggaagctgcacgacagcccaaaa

SEQ ID NO: 713361 - DNA, 886 bp, Homo sapiens
  misc_feature (29)..(29): n is a, c, g, or t
  misc_feature (58)..(58): n is a, c, g, or t
  misc_feature (797)..(797): n is a, c, g, or t
ggaagcagggagagagaactggccagggnataaaaagggcccacaagagaccggctcnaggatcccaaggcccaactccccgaaccactcagggtcctgtggacagctcacctagtggcaatggctccaggctcccggacgtccctgctcctggcttttgccctgctctgcctgccctggcttcaagagggcagtgccttcccaaccattcccttatccaggctttttgaccacgctatgctccaagcccatcgcgcgcaccagctggccattgacacctaccaggagtttgaagaaacctatatcccaaaggaccagaagtattcattcctgcatgactcccagacctccttctgcttctcagactctattccgacaccctccaacatggaggaaacgcaacagaaatccaatctagagctgctccgcatctccctgctgctcatcgagtcgtggctggagcccgtgcggttcctcaggagtatgttcgccaacaacctggtgtatgacacctcggacagcgatgactatcacctcctaaaggacctagaggaaggcatccaaacgctgatggggaggctggaagacggcagccgccggactgggcagatcctcaagcagacctacagcaagtttgacacaaactcgcacaaccatgacgcactgctcaagaactacgggctgctctactgcttcaggaaggacatggacaaggtcgagacattcctgcgcatggtgcagtgccgctctgtggagggcagctgtggcttctagctggcccgggtgggatccctggngacccctcccaaggcccttctggcctggaagtggcatccagtggccacagcttggctaataattagtggctcatttaaacataatatcc

SEQ ID NO: 713362 - DNA, 833 bp, Homo sapiens
  misc_feature (23)..(23): n is a, c, g, or t
ggatccttctggcgaactctatngatgggcccaagcgtaaccaggctcttctgattggccggtgtacttcagtttccgtccaaggtccgcctcctacctccttctgcttcggtgtccttaggataagaccatggccttgagagcatgtggcttgatcatcttccgaagatgcctcattcccaaagtggacaacaatgcaattgagtttttactgctgcaggcatcagatggcattcatcactggactcctcccaaaggccatgtggaaccaggagaggatgacttggaaacagccctgagggagacccaagaggaagcaggcatagaagcaggccagctgaccattattgaggggttcaaaagggaactcaattatgtggccaggaacaagcctaaaacagtcatttactggctggcggaggtgaaggactatgacgtggagatccgcctctcccatgagcaccaagcctaccgctggctggggctggaggaggcctgccagttggctcagttcaaggagatgaaggcagcgctccaagaaggacaccagtttctttgctccatagaggcctgagctgactggagcagagtcatttgcttcagcaggatccttgtgggccttctaagatgaagccaccctcaggtccagggaaggttgtgctggtatttggctcatgacagccaagagcagatttgtgaaatcggctcaactcccaggtgagagcaagcaaaaatcttggctgggtggaaaggaaggcaaaagagtaaaaattaaaaaggccaggcccagtaagtgtaccttgtactttataaataaacctcaagcagctcaa

SEQ ID NO: 713363 - DNA, 310 bp, Homo sapiens
gcccgagttagaggggctgcaagaagaaggtcgtccacatatgaagatgactgggagacaggtttaaggaagtgaggtttcgggctagagcttgtccaaagaaatgagggctatccctgaagccctgagggaggacagtccatgtgagttgttgtgactggagggtgtcagggtcagtccaggtgaaagcaaataggtgcccgagtagcatcctgtgacccctccccagtgcctctcctggccctgaaggtgccactccagtgcccaccagccttgtcctaataaaattaagttgtatcatttcaaaaaa

SEQ ID NO: 713364 - DNA, 241 bp, Homo sapiens
  misc_feature (17)..(17): n is a, c, g, or t
  misc_feature (38)..(38): n is a, c, g, or t
  misc_feature (64)..(64): n is a, c, g, or t
  misc_feature (70)..(70): n is a, c, g, or t
  misc_feature (115)..(115): n is a, c, g, or t
  misc_feature (150)..(150): n is a, c, g, or t
  misc_feature (169)..(169): n is a, c, g, or t
  misc_feature (182)..(183): n is a, c, g, or t
  misc_feature (192)..(194): n is a, c, g, or t
  misc_feature (208)..(208): n is a, c, g, or t
  misc_feature (235)..(235): n is a, c, g, or t
ctttggccaaatgggcntaacaaggggcttccccgggnaccggtccccttgcttccctggggcnttttangggcccttgcttcttgccctggccccttgggcttttcaaagtagngggccaagttgccctttcccaaacccaatttcccnttatccaggctttttgacnacgctatgctccnngcccatcgnnngcaccagctggccnttgacacctaccaggagtttgaagaancctata

SEQ ID NO: 713365 - DNA, 987 bp, Homo sapiens
ccacctctgcctcccaacgtgccgggaccacaagcgtgagccacaccgccagaccaagatgatttaaagtatacaggaggatgtatgtaggttatgtacaaacactacgccattttatgtcagggactggatccccaggggggttttggaatcattgaggatcccaaggcccaactccccgaaccactcagggtcctgtggacagctcacctagtggcaatggctccaggctcccggacgtccctgctcctggcttttgccctgctctgcctgccctggcttcaagaggctggtgccgtccaaaccgttccgttatccaggctttttgaccacgctatgctccaagcccatcgcgcgcaccagctggccattgacacctaccaggagtttgaagaaacctatatcccaaaggaccagaagtattcattcctgcatgactcccagacctccttctgcttctcagactctattccgacaccctccaacatggaggaaacgcaacagaaatccaatctagagctgctccgcatctccctgctgctcatcgagtcgtggctggagcccgtgcggttcctcaggagtatgttcgccaacaacctggtgtatgacacctcggacagcgatgactatcacctcctaaaggacctagaggaaggcatccaaacgctgatggggaggctggaagacggcagccgccggactgggcagatcctcaagcagacctacagcaagtttgacacaaactcgcacaaccatgacgcactgctcaagaactacgggctgctctactgcttcaggaaggacatggacaaggtcgagacattcctgcgcatggtgcagtgccgctctgtggagggcagctgtggcttctaggtgcccgagtagcatcctgtgacccctccccagtgcctctcctggccctgaaggtgccactccagtgcccaccagccttgtcctaataaaattaagttgtatcatttcaaaaaa

SEQ ID NO: 713366 - DNA, 231 bp, Homo sapiens
tacgaggcctactctctcctcccgtacggcgccggaatcctatctccacttaccaggccgcggttaccccgccgtcccctccgattcccgccaccccgctctcggcaggttcttcaggattcaagtccgtaggccctttaaggggtctatttgccgtttgctacgccctgggactttggtcccacacagccgggatccggatggctttcgtgccggcttcgacaggcctag

SEQ ID NO: 713367 - DNA, 154 bp, Homo sapiens
cacctcagccttcccagtagctgcgacgtacatgcatgcgccatcatggctggccagtattcgcagctactgggaaggctgaggtgggaggatcgcttgagcccaggagatcaaagctgcactgagccatgattgcgccactgtactccagctg

SEQ ID NO: 713368 - DNA, 497 bp, Homo sapiens
  misc_feature (13)..(13): n is a, c, g, or t
  misc_feature (44)..(44): n is a, c, g, or t
  misc_feature (121)..(122): n is a, c, g, or t
  misc_feature (142)..(142): n is a, c, g, or t
  misc_feature (319)..(319): n is a, c, g, or t
caggcgtggaganaacggaggccgcgattccccggggccccttntgttttcccccctggacgccccagggggcaaagggtgggtttccttaacccaccgggtagggcgctattacttgggnntgggcccttgggcctccaanggggtcctttcgaaagaacccccccaaaatttggccttgccccttccacccaaattggtatccgccagggtaaaatccccaaacctttttttggtggtttcttccaaaaaaaaaaggtgggggagccccgccccccgggagggtgggtttttccccccaaaaaaaagaaatttttgntttcggggccgggccaggttggtccgaaaagtgggggccccccaatttttcccaaaatccaaggttttcccccggtcccggggcccccggggtttggggttggttttgcggaagggatttttcccccccaattgggggttttaatgtttttaggaccctatttaaaagctggccccca

SEQ ID NO: 713369 - DNA, 943 bp, Homo sapiens
tccgggtcctcatggattccggggtcctcatggattccggggtcctcatggattccggggtcctcatggattccggggtcctcatggattccgcgctcctcatggattccggggtcctcatggattccgggctcctcatggatccagggtcctgtggacagctcacctagtggcaatggctccaggctcccggacgtccctgctcctggcttttgccctgctctgcctgccctggcttcaagaggctggtgccgtccaaaccgttccgttatccaggctttttgaccacgctatgctccaagcccatcgcgcgcaccagctggccattgacacctaccaggagtttgaagaaacctatatcccaaaggaccagaagtattcattcctgcatgactcccagacctccttctgcttctcagactctattccgacaccctccaacatggaggaaacgcaacagaaatccaatctagagctgctccgcatctccctgctgctcatcgagtcgtggctggagcccgtgcggttcctcaggagtatgttcgccaacaacctggtgtatgacacctcggacagcgatgactatcacctcctaaaggacctagaggaaggcatccaaacgctgatggggaggctggaagacggcagccgccggactgggcagatcctcaagcagacctacagcaagtttgacacaaactcgcacaaccatgacgcactgctcaagaactacgggctgctctactgcttcaggaaggacatggacaaggtcgagacattcctgcgcatggtgcagtgccgctctgtggagggcagctgtggcttctaggtgcccgagtagcatcctgtgacccctccccagtgcctctcctggccctgaaggtgccactccagtgcccaccagccttgtcctaataaaattaagttgtatcatttcaaaaaa

SEQ ID NO: 713370 - DNA, 287 bp, Homo sapiens
aatgacagagagagagactgaaatgcacagaatatacaagagaggtagaggcctggaggatgaacttggaaggaatattagctaatgtgcctttagatggacagagtgagctagaaaaagaaaagacacacggagaacttagcgaagagcaccctgagcaaaagaaagtagtcttcaggcaggagatgttagttctgaccctcacagagatgctagagacaagaaagcaagtcgtatcgatgtcgagcgatcgcgcgcccgtcgacgcggccgcgaatttagtagta

SEQ ID NO: 713371 - DNA, 457 bp, Homo sapiens
  misc_feature (31)..(31): n is a, c, g, or t
  misc_feature (59)..(59): n is a, c, g, or t
  misc_feature (114)..(114): n is a, c, g, or t
  misc_feature (139)..(139): n is a, c, g, or t
  misc_feature (146)..(146): n is a, c, g, or t
  misc_feature (264)..(264): n is a, c, g, or t
ggtgccccgagtgacctctctggtaaagttncacattcccggtatgtggtacatccaancacactactactcttaagtcccagttactcattcatacgaaaaaaagcttgtggnccatggaacgtaagaactcataaanctcttanatatatagttatttttgtgggagataattttaataggacgttctttgctgttgttggtcgcagctaatagactggacatttaacttttctaccatttctgcaagttaggtatgtttgncaggagaaaagtatcaagacgtttaactgcagttgacttcctccctgttcctttgagtgtcttctaactttattctttgttctttatgtagaattgctgtctatgattgtactttgaatcgcttgcttgttgaaaatatttctctagtgtattatcactgtctgttctgcacaataaacataacagcctctgc

SEQ ID NO: 713372 - DNA, 393 bp, Homo sapiens
tcgaccaggagactcgctgttaccccagaggctgaggttgcagcgagccagtacatgccactgtactccagcctgggcgacagagcaagactctgtacacaactcacccaccccctcctgcctcagcctcccgtgtagctgggactacaggcgcgtgccaccatgcccggctaatttttgtatttttagcagagacggggtttcaccgtgttagccaggatggtctcgatctcctgacctcgtgatccacccgtctcggcctcccaaagtgctgggattacaggcaatgagttgatttttaactactgggtttaggccaggcaggcccaggcctggttttgggcctggcgctgggctgcctgtctttggttttacttccttgttgtattttct

SEQ ID NO: 713373 - DNA, 886 bp, Homo sapiens
  misc_feature (29)..(29): n is a, c, g, or t
  misc_feature (58)..(58): n is a, c, g, or t
  misc_feature (797)..(797): n is a, c, g, or t
ggaagcagggagagagaactggccagggnataaaaagggcccacaagagaccggctcnaggatcccaaggcccaactccccgaaccactcagggtcctgtggacagctcacctagtggcaatggctccaggctcccggacgtccctgctcctggcttttgccctgctctgcctgccctggcttcaagaggctggtgccgtccaaaccgttccgttatccaggctttttgaccacgctatgctccaagcccatcgcgcgcaccagctggccattgacacctaccaggagtttgaagaaacctatatcccaaaggaccagaagtattcattcctgcatgactcccagacctccttctgcttctcagactctattccgacaccctccaacatggaggaaacgcaacagaaatccaatctagagctgctccgcatctccctgctgctcatcgagtcgtggctggagcccgtgcggttcctcaggagtatgttcgccaacaacctggtgtatgacacctcggacagcgatgactatcacctcctaaaggacctagaggaaggcatccaaacgctgatggggaggctggaagacggcagccgccggactgggcagatcctcaagcagacctacagcaagtttgacacaaactcgcacaaccatgacgcactgctcaagaactacgggctgctctactgcttcaggaaggacatggacaaggtcgagacattcctgcgcatggtgcagtgccgctctgtggagggcagctgtggcttctagctggcccgggtgggatccctggngacccctcccaaggcccttctggcctggaagtggcatccagtggccacagcttggctaataattagtggctcatttaaacataatatcc

SEQ ID NO: 713374 - DNA, 918 bp, Homo sapiens
  misc_feature (29)..(29): n is a, c, g, or t
  misc_feature (58)..(58): n is a, c, g, or t
ggaagcagggagagagaactggccagggnataaaaagggcccacaagagaccggctcnaggatcccaaggcccaactccccgaaccactcagggtcctgtggacagctcacctagtggcaatggctccaggctcccggacgtccctgctcctggcttttgccctgctctgcctgccctggcttcaagaggctggtgccgtccaaaccgttccgttatccaggctttttgaccacgctatgctccaagcccatcgcgcgcaccagctggccattgacacctaccaggagtttgaagaaacctatatcccaaaggaccagaagtattcattcctgcatgactcccagacctccttctgcttctcagactctattccgacaccctccaacatggaggaaacgcaacagaaatccaatctagagctgctccgcatctccctgctgctcatcgagtcgtggctggagcccgtgcggttcctcaggagtatgttcgccaacaacctggtgtatgacacctcggacagcgatgactatcacctcctaaaggacctagaggaaggcatccaaacgctgatggggaggctggaagacggcagccgccggactgggcagatcctcaagcagacctacagcaagtttgacacaaactcgcacaaccatgacgcactgctcaagaactacgggctgctctactgcttcaggaaggacatggacaaggtcgagacattcctgcgcatggtgcagtgccgctctgtgtgaggcagctgtgggttctaacatgcccgcgtgggatccctgtgaaccctccccaaaggctctccttggcctggaagtttgccccctatggccaccaaccatgtcctaccaaatactgttgttccacaaaacaacaacacaaaacaacacaaaacacaaacatcc

SEQ ID NO: 713375 - DNA, 869 bp, Homo sapiens
agcgggtgccggcgtgcccgggcccctgacacagcggcgacatcctgggcctggtggtcaacgccgacggcgagctgcacctcagtccacaatggtcgcggccgccgggatgcagctgtgcgtgtgacgcctcgcaggccgctttggagtgctcttcggcctgcacgggaccgtcgacgctagatccgcgtcctcggctccactatcctggctcgagctggggtatcccatcatctcccctgcatcccctgtgctcgcatcgcgcaatcgctctgcctcacgtgcccttggtgcgagcctgcactgtcgtgagcgcccgttgcgtcaagcacgtgcagcatctgtgctcctctgtgggtagcgtctagctggttgggacaggccctcgcgaattcgctccgttgagcactgctcgccgaagtccgccatgttgaggcccgagggtctcctggtgccacgtgtggacgcgactgaggatgcgatcgcatcttgtgcggtactgtaaacactgctggtgggacacgaggtctattctacatcactgtgggccacatgtgatgccttctgacatacgtgcctgtggaccctgacgccgtgcgtggaagtgctctgtcagggccgtgtgtgcccctagtctgccggcgctgccatcataggatcgtcactcgaggagcctaccgcatgctccttatgtccgttgcggttggtcccatcccgcgatacgccgatcttcgtcggtgcttcagccccgagtcaccaagctgaggagctgggccagtgggtggcccctttctctttcctcattttgggaaaccttttgccgtcactctagttaagacattggggaaacgttgcaacctatggggatc

SEQ ID NO: 713376 - DNA, 893 bp, Homo sapiens
  misc_feature (29)..(29): n is a, c, g, or t
  misc_feature (58)..(58): n is a, c, g, or t
ggaagcagggagagagaactggccagggnataaaaagggcccacaagagaccggctcnaggatcccaaggcccaactccccgaaccactcagggtcctgtggacagctcacctagtggcaatggctccaggctcccggacgtccctgctcctggcttttgccctgctctgcctgccctggcttcaagaggctggtgccgtccaaaccgttccgttatccaggctttttgaccacgctatgctccaagcccatcgcgcgcaccagctggccattgacacctaccaggagtttgaagaaacctatatcccaaaggaccagaagtattcattcctgcatgactcccagacctccttctgcttctcagactctattccgacaccctccaacatggaggaaacgcaacagaaatccaatctagagctgctccgcatctccctgctgctcatcgagtcgtggctggagcccgtgcggttcctcaggagtatgttcgccaacaacctggtgtatgacacctcggacagcgatgactatcacctcctaaaggacctagaggaaggcatccaaacgctgatggggaggctggaagacggcagccgccggactgggcagatcctcaagcagacctacagcaagtttgacacaaactcgcacaaccatgacgcactgctcaagaactacgggctgctctactgcttcaggaaggacatggacaaggtcgagacattcctgcgcatggtgcagtgccgctctgtggacgggcagcgtgtgtgcttctagtggtgcccgagtagcatcctgtgacccctccccagtgcctctcctggccctgaaggtgccactccagtgcccaccagccttgtcctaataaaattaagttgtatcatttcaaaaaa

SEQ ID NO: 713377 - DNA, 825 bp, Homo sapiens
gcccaaaggaatgttgcgtcctggcatattgaatgcaacgaccacgccattatgcattgctccctcaagcccttctgttgcccctccatgaggaggtagaagccttgtcggttcatgtcatgaatgggaaaccattacctgtgagtaggtaatgtttgctttgcgggagctgacaggttcggtctggggactcattgagatggtagtgtacgtgcgtgtttcgtgtgaatgatgcattgtcttgccgttcgacgaatgcgtgcgatttcattaaggaacctaactagaagacggctccaggctcatgacgttaagaggaagtacgttgccaacgtacttcatgaaactattggttattgaagatggcgtatacaagtcgagatgtgagtcaaatttgtgttggagacatgaatgatggattactagctttgatgcacgcacagtgaatcatgtggacagtagtacgactgctactcgatgtgtgtcacaatttcgttgatcactcgttgctcgaaaatgtgtcctgcaggcgtaaggagtagttcagaggagaattgcccagcactggagctgggctgtgcagtggctacagaagaagatgtcagaacattactggacaccacagagtaatgtctctaatgaaagcatcaactggaacaaacctttcagcgaaccatttcatgctcagtgacacgttagcgtattgccagcagtttgtcgaatgaacaatgagcaatcaggaagcagtgatgggtcggagagtagtcctggcaatgagaacggagagaggcatctacagagggttcagaatctcccatgatgatg

SEQ ID NO: 713378 - DNA, 316 bp, Homo sapiens
atacgggaatcgagagaacatatcatgtcgagtcctccacaggacagggaagaatggacagaacgctatccaggctggagccgacagactgcagaggccagaagaggagagaatgaattgtagtccaacttcacaaattgataatataggcgcggcagagcatggcatgcctctcacaaccccatcatcaacagcaaagcacaatgaatgcattttagactattatgaaactcactaggtcgaaggcaacttttgggcaaagttcatttatggttcggagcacacaggcaagtggcacaaatcactatgctcatgc

SEQ ID NO: 713379 - DNA, 397 bp, Homo sapiens
atgcttgttggtcgtctctcacggatccccccggtcccatctactggttgaatacagggatcctgactgtggcgacataaattcctgtctgctggtctctatctccattttgctgtatctcgccgcaagacctttagtccctcaactttctgattttggtttttacagccctgcttgagagattcctgttgttgctttcagaactggtcatcggagataatcttgtcatgcccgatgagttctcgcgctgatggggacggctcttgcatacgtgttcttgcaggattcctttctttgccatcttaagaggactacctaaagtcttctcctatcccatagtacgcctgactggcctgtgaaggtcgtggttgcagatatttttgattaactagtcgat

SEQ ID NO: 713380 - DNA, 489 bp, Homo sapiens
aatggggattgtaccactatatggccttttgtgtctggcttcttctactcagcataatgttttccaaggttcaatccatgttgtagcatgtgtcgggtattttgtttctttttatgagactgaataatattccattgtatggatataccccacattttgtttatccattcatcagtggtggacataggggttgtttccactgttggggttgtgaatagtgctgctgtgaacattcttgtgcaagcttttgtctgaacaagtgtatttaatttgttttagtctatactaagagtggaatttcagggtcctgtcgtgcttctgtgtttagcttaaggtggaactgccaaacttccacggcagctgtacccttttacattcccactagcaatgtgtgagggatctcatttctccacatcttcaccaacacttatatttcattaaagattttttattataaaccccctagtgggtgtgaaatgataaaaaaaa

SEQ ID NO: 713381 - DNA, 256 bp, Homo sapiens
gcagtatgtatcggcatcctcccaggcatgggtgcatactctgggaacagcgactccgagtccagctcagacagcgaaggcaccatcaatgccgccggaaagattgtgtcctccatgttccgaaacaacaccttcgtagaggccccccaccctctccgcccctaaaaagggagctgctccccaagggtagatcggaccgttcatgttgcccataggcattatgtccctcaaaaaaaaactcctttgcctgcaaaaa

SEQ ID NO: 713382 - DNA, 824 bp, Homo sapiens
  misc_feature (813)..(813): n is a, c, g, or t
gcttgtaggtaagctcttcctggggtacaatgtgggcttcaatgtcaagttatgtgtctgtcaaggtatgtttcgtcgtggcatacggttgctggtgaccagcatatatgtaccctacctatggtagtctgctggcttctactgctcaggtgtatttatcctgataccatcctaggcctatatatagcgccggctatgcccctgtattggtattgcctacacggctcacatttgcatgcaagtttgctgagctgaaggaaattgattgatcgccgttctggttaaatagctggaagatggccctatattcttgatagtctggtgtatgctgccattgttgatatggttcctggcatagcccatgtgtgttgtagagcttctcagactatcctacctctgggtcgctttgctgttcgtgtattatgtagtactagtactagttgtcggtgggtgtcatcaaagctagtggtacttagtaaggctgctggtagcttggcataggtcaccaagtctgccctagaatagctcagataggcataatatgatatacttatcccttattaccgtgcctacccctactcttttatcagtggtggtagacggtctcagaactgtttgtttcaattggccattaagttgtagtagtatagactggttatgatacatatgcatcgtataccttcagaaggaaaggagatgtttgtgaccactggtttcttatgcagtgaacagttttaaatgagtcagcaaattcagcgacacattttcaagtgaagctactgccactaaaagtattaccaagggagacaactnaaagatagcgg

SEQ ID NO: 713383 - DNA, 551 bp, Homo sapiens
  misc_feature (45)..(45): n is a, c, g, or t
  misc_feature (52)..(52): n is a, c, g, or t
  misc_feature (56)..(56): n is a, c, g, or t
  misc_feature (58)..(58): n is a, c, g, or t
  misc_feature (61)..(62): n is a, c, g, or t
  misc_feature (66)..(66): n is a, c, g, or t
  misc_feature (75)..(75): n is a, c, g, or t
  misc_feature (95)..(95): n is a, c, g, or t
  misc_feature (100)..(100): n is a, c, g, or t
  misc_feature (104)..(104): n is a, c, g, or t
  misc_feature (106)..(106): n is a, c, g, or t
  misc_feature (114)..(114): n is a, c, g, or t
  misc_feature (118)..(118): n is a, c, g, or t
  misc_feature (123)..(123): n is a, c, g, or t
  misc_feature (135)..(136): n is a, c, g, or t
  misc_feature (140)..(141): n is a, c, g, or t
  misc_feature (144)..(145): n is a, c, g, or t
  misc_feature (147)..(147): n is a, c, g, or t
  misc_feature (154)..(154): n is a, c, g, or t
  misc_feature (157)..(157): n is a, c, g, or t
  misc_feature (316)..(316): n is a, c, g, or t
  misc_feature (443)..(443): n is a, c, g, or t
  misc_feature (501)..(501): n is a, c, g, or t
tattggttggacgaggtggctcatgcctataatcccaggactttnggaggcngagncnggnngatnatgaggtcnggagttcgagaccagcctgnccaanatgntnaaaccccntctntactnaaaatacaaaannagcnnggnntngtggcangcncctgtaatcccagctactcgggaggctgaggcaggagaattgcctgaacccacgaggtggaggttgcagaaaccatgatcacgccactgcattccagcctgggcaaaagagcaagattctgtctcaatcaaacaatcaataaaaatgtaaggaggaagnatttactgtgtatttatatgtctggtattatgtgaagcactttactatcttatcaaatcttcgggacagatcttcagttctcatgaccacaaaagaggatactaaagctcagacaggagaagagacntggccagcctgtgtccccagggcctatggtcttaccactaggttacagtgtttccagntatcacatgttgtgagatttttgctttaaatgaccaaaaaaaaaccaaag

SEQ ID NO: 713384 - DNA, 407 bp, Homo sapiens
caggtggctgaggtgggaggattgctcgaggctgggaggttgaagctgtagcgagccatgatcgcaccactgcactccagcctgggcaagagagggagaccctgtctcaaaaaaaaaaaaaggggggaaaggaaaggaaaagggaaaggaaattctcagggcctgggttccctaagggaaaaaacagaaagggggggaaaaaccttcttaaagagggggggctcccctttcttggcaaatgctaagaaaaggccaaaatttcaaattcaaaaattgggaaaagggctttccccttggcccaaaacaatgactaaggcttggagaagggaatccggtcatcctaggactaaaaaggggcggggcctaaaaaaaaaaatccaacattaaatggcccggcaaaaaaaagg

SEQ ID NO: 713385 - DNA, 421 bp, Homo sapiens
  misc_feature (45)..(45): n is a, c, g, or t
  misc_feature (52)..(52): n is a, c, g, or t
  misc_feature (56)..(56): n is a, c, g, or t
  misc_feature (58)..(58): n is a, c, g, or t
  misc_feature (61)..(62): n is a, c, g, or t
  misc_feature (66)..(66): n is a, c, g, or t
  misc_feature (75)..(75): n is a, c, g, or t
  misc_feature (95)..(95): n is a, c, g, or t
  misc_feature (100)..(100): n is a, c, g, or t
  misc_feature (104)..(104): n is a, c, g, or t
  misc_feature (106)..(106): n is a, c, g, or t
  misc_feature (114)..(114): n is a, c, g, or t
  misc_feature (118)..(118): n is a, c, g, or t
  misc_feature (123)..(123): n is a, c, g, or t
  misc_feature (135)..(136): n is a, c, g, or t
  misc_feature (140)..(141): n is a, c, g, or t
  misc_feature (144)..(145): n is a, c, g, or t
  misc_feature (147)..(147): n is a, c, g, or t
  misc_feature (154)..(154): n is a, c, g, or t
  misc_feature (157)..(157): n is a, c, g, or t
  misc_feature (186)..(186): n is a, c, g, or t
  misc_feature (313)..(313): n is a, c, g, or t
  misc_feature (371)..(371): n is a, c, g, or t
tattggttggacgaggtggctcatgcctataatcccaggactttnggaggcngagncnggnngatnatgaggtcnggagttcgagaccagcctgnccaanatgntnaaaccccntctntactnaaaatacaaaannagcnnggnntngtggcangcncctgtaatcccagctactaaggaggaagnatttactgtgtatttatatgtctggtattatgtgaagcactttactatcttatcaaatcttcgggacagatcttcagttctcatgaccacaaaagaggatactaaagctcagacaggagaagagacntggccagcctgtgtccccagggcctatggtcttaccactaggttacagtgtttccagntatcacatgttgtgagatttttgctttaaatgaccaaaaaaaaaccaaag

SEQ ID NO: 713386 - DNA, 472 bp, Homo sapiens
  misc_feature (246)..(246): n is a, c, g, or t
  misc_feature (251)..(251): n is a, c, g, or t
  misc_feature (273)..(273): n is a, c, g, or t
  misc_feature (291)..(291): n is a, c, g, or t
  misc_feature (321)..(321): n is a, c, g, or t
  misc_feature (334)..(334): n is a, c, g, or t
  misc_feature (349)..(349): n is a, c, g, or t
  misc_feature (357)..(357): n is a, c, g, or t
  misc_feature (362)..(362): n is a, c, g, or t
gtgttatgtgcaatgacctatttaaggtaaacccattccaactacagcagttcaggggtgatccaagcactgcctccctcctgctctgtccaggtggtttgggccataaactcaactttaaaaggaaggcttggggttgaggacttgtgatcaaaaaaactgaaaatggaagttttggccggggctcattaaacatgagtcctccctttgtgtcctgaggccgggtcattttttcaacctccctgnccccncacacttattccagacacaacnccatgtggtttggaggtnccagccccccccctaaaaaggttatccctnagaactcccccanacttgggagcccaantgcagtgnctggnggtggtcccatttgccgccccccttttttcctgcaattggtttggactccctggggtgtgctttcccctgtttaccccatgtatggaaataaaggcccttttcctcctga

SEQ ID NO: 713387 - DNA, 265 bp, Homo sapiens
cctccgcctcccgggttctagcgattctcctgcctcagcctcccgagtagctgggattccaggcacctgccgcgacccccagcaaatttttgtatttttagtagagatggggtttccccatgttggttaggctggtcttgacctcctgccctcaggtgatccacccgccttggtctcccaaagtgctgggattacaggcgtgaccccccgtgcctggcctgtaatgtggtttttatattcagtgaaataaaaatttcttggacca

SEQ ID NO: 713388 - DNA, 235 bp, Homo sapiens
ggggaaaaaggagttttttaaaaaaactttttgctcctctgtttcaaaaagccagacttttgggttttaccctgtgtccccgtgggcagtggcaggtggcctggccctgcatggagccagcacgtttacctcccatttgccgccccccttttttcctgcaattggtttggactccctggggtgtgctttcccctgtttaccccatgtatggaaataaaggcccttttcctcctga

SEQ ID NO: 713389 - DNA, 3273 bp, Homo sapiens
atatatagggtcttatatgtttcttaataaattgatcccattactttatagtcacagctcctattagaagttttaatgaagactctccatgagcttaggcttcaaattacttgttttggaaaaggtcatcttgtcctttataaactgtaaattcatatattatttagctttaatatgcaaatacaatatccttgagttcatcctattaatttagaaactcccaggaggtaagatgggtggttggagcgcattctttggttattttcattagcattaagtccttattctttataggtggatttaattcttgaaaatattcaaaagtaattcagagtcaaggtgttggggatggagagaaaggaggaacagagaggaaaaaaattagcatttgttgagtgttgacgatttgtagagcattttgacaagcacttaatatacatcatcattcattttgatcctcttaattaccttgcaaagatttgattcttttttttttttgagacagagtcttgctctgtcacccaggctggagtgcagtggcttaatctcagctcactgcaacctccgcttcctgggttcaagtgattctcctgtttcagtctcctgaggaactgggattaaggtgtgtgccaccacacccagctattttttttctatttttagtagagagagggtttcaccatgttggccaggctggtcttgaactcctgacctcaagtgatccacctgccttggcctctcaaagtgctgggattacaggcatgagccaccatgcccggctgattttattatttttttaaaaaacatatgaaaccaagactcagagaagtaaaataactcatttaggatcatacagaatggtaaagtcaggattcagacatagatttctcccactccattattcattttttacactacgcaatgtatacaatagcttttggttaacaaaggcaaggtgactataaaatcgtgagattaaagcatttcaattttttgatatattaccgtttatgaagagtagagaggtttttttgtgtaaataaaaaaaactgtaggaaacatctgtaggaaatatcaagatttaatgtttaactagattttcaaggtaaatttacatttatttagctaagtgttatattaaagttatttgtcataacatacctcaaatatttatttatagttcatatttaatacagaacaaatctagtcttcgtgttaacatcgggtctcggcagagtttctgaaatgaaacattatgaagaaaggtagttcagatttgttgaatctgagctttagggatttcaagtgtatttttttttattttcctctttcagaatattaacatctctattagttttttgatgaatatgagttttaagattcctaataagggttttaagtgaacacacataaaatacatatcaaaccactgatcccgattgttccctttagtcgctgtgacattgttacctttagtggcatgcacttggaaatgtcagccttcagagaagggggagttacatggagtaaggcctcatggatgtcatggtggtcctccatgttcaccaaccaccaagaaaattcttcttcagtccacaattccagcttgcgctctttggtgcacttggagccagaaagtgtctttttggccctgttttgtagaaaccgtgcatgtaccaaagagaaactttagagtttggatggagctgaagcattgatgggaattccctagtgcacccaggagcaggaggcaagcccaagcctcgggtggtagccaattatattttgtgatcgtgtatgtacttaaaacatcagagatgacacagcacatgaatataactattgatatgtaggtgcatactgagtattctaagtagcagatagataccaaaatactgtataatcccagaattgcctaaactgcaggtttgctagttctctgttatacagaccagtaggtagcctttccacacatttgtgttttctcttccataataagagagtgctgcggctggcaggcaaaggtagttgcctcatgcactttatctttttgtctttttctcttcttcatcttttgggatgctgctggctgtatctgtcccaaacttcttgttgcattagaatcagatctgtgtatgtttgaggaggttttattttaaagacttcagttttactcagctctaggaagggtcaaatacaacaacaacaacaaaaaacagaaaacaaaaaaccctccctaggtgtttgcttttgcaacattaaaagaaatgccttggtgctaaaaagtatttaatgacgcatgttcaccactaaaaagcgccactgaattcacagtatttcactgctaagtggctgcatgtactttgtgtttggaaatctgaagaattttccagaaaacaagcatccattactctcatttcaacagttactccatctatgctgcaaaaatgaagcgtgaaaggggggatacttttctatggaatactcagtgcttttgatatttattttagcaagaataatcagatgccaaaaataatttcagagaaaggtagaaaaaatatttcagataaccttttcttatttcttctccaaaaagattacacccatgtaaggtatttttaacactggggttttgaaggtgttatcttttctggtatcctatcactacatgttaaaattgaaggagaaaatattattgaaactaaagtaattgcagggacacattaaaccaaaggggtgaacaaaagaggtttaaagtttgtatctagaaatgaaaaataagaatcattggtaagactagtaccgattattggcaattggtaattgataattggtaagagtagtaccaaatagtgggcatttttcttaaaatacatacctctaccccaaaccccaaatgttaatttagaatcctgaaacaggcaggtcaggctctgactcttttgtttaaggaaatgtaatactgtgtcaactaaactggcattaggttcttagtggagtgtgtgtttgtgtgtgtgtgtgtgtgttttgtgtagaggtatgtttgtgatgaaaggttttgcactgttgcataaagaagtttgattttgtgatttttaaaatgatattcatttggagactttttaaggtaatttaaaagatgtataatttccgtgtgtttaatgaaatctgttgtcgatgtactaatcttggtttacagcatcttgaatacttgattattgaaaattaagaaaaaagttaaaaatgaataaagtgtgttggactgaaaaaaaa

SEQ ID NO: 713390 - DNA, 863 bp, Homo sapiens
tcccgccaggacagtacaaacctcgggtaaaagcaggcgtgaaacaagccgcccaaaagcctattttccggcggcctccaaaaacccgggggccacactcccccctgtggtgggtacctcggcggtcgccacaccacacaagcggtgggtggcatacacacaaagcacgtgtcgcacacacagtacggcggtgcaccccccacaagggggggaatatagttaccaccccacacaaggagagacacgaaggacacgacttccccgcgaaccccgcggtgggtccacgccctcctgttggatacccccacacgcaccatccgggggggcgcaccaaccgggagcgacaaacagaccacacacacgtggtccaatgccgtgcgtttttctaacaaacacgccctcgcggggtgaacaaactacagccggagcaacaccctctctcctcttggttcaaccagtacaatacacacccctaaaggtgtagaccccaccaggcgcggtggtgtggtggcgcagctaccaagcgaagatcacccaccccttgccgcgcggggcgcgtgtttgccacgcaagcgcgagagtcatactcgcgcacacctagtagtgagtcccggggtgtgagtccgcaactgtggtcggtgaaaagattgccaccatggcccttgttcctcctcctggccccccgttgattagatactctttgtttgcctccaacaaagatatttagctaaaaagggtgcacatactaaaaaggttcaacaagtactcccgaaggcaaataccccactaagatattctttgcaaaaaggagccaggaggacgactttcccggcttctagaacgtttaaaaaaggcccccacat

SEQ ID NO: 713391 - DNA, 907 bp, Homo sapiens
cagcacggcgccaacgtgaacgctcagatgtattctggcagctcggctctgcattctgcgtctggccgcgggcttctgcctctggtgcgcacgctggtgcgcagcggggctgacagcggcctcaagaactgtcacaatgacacacctctcatggtggcgcgcagccgcagggtcattgatatcttaagggggaaggcctctcaggctgcttcagggtcacagcctgagccatccccagaccaaagtgccaccaactcccccgagagcagcagtcgtctcagctccaatggcctccagtcctcgccaagctcctcaccctcgctgtctcccccgaaagatgctcctggcttccccgcgactccccaaaactttttccttcccacaacatctacacctgccttcctgcccttcccaggagtcctccgaggccctggccggcccgtacccgcttccccagctccaggaagcagctgagacggatgggggggcagacccggactcatgaggaggggcctccctgccctgtggggaccactcttctggaaactgtgaggaccttgttctgcttccccccgccaatcctcgggaccaggttttgcaccaaggcacatgcacatactactgagcacagatcctcccaatcgcgcccttgcccaggatctcagcccccaccttaatctcaggcaccaggttccctgtgctggaatccaccagatactcaattctctgagtggaggacccaaaggacagcagctctctctggcaactccaacttgaggaccagaaacagagggtctggagggctggacacggtaaatataggtggtcaatccttgtataacattgttctaacaaacaaaaaaagggggggaaatcccggggcaatagcacattttaagggctagga

SEQ ID NO: 713392 - DNA, 200 bp, Homo sapiens
tgtgataccatttaaaatgttcttacacagctgtagaaatgtaaattatacaacctctattgaaaatgaactagaaaaactcaaaatagaactacttatcaaagaactcaaaatagaactaccattcgatccagcaatcccatgactgcatatacgcccaaaggaaaacaaatcattgtatcaaaaagatacctgcactg

SEQ ID NO: 713393 - DNA, 112 bp, Homo sapiens
  misc_feature (28)..(28): n is a, c, g, or t
ctcggtccgactcctcctgctgtctttntctgcatccaacctggcaaggccctcctgtggggtgccatctgtgcctttattccggctgtgccctcgactttccgtatggatg

SEQ ID NO: 713394 - DNA, 226 bp, Homo sapiens
gtgaccagaggatccctccataatgtgtgcccagactggtcttaaactcctaggctcaagtaatcctcccatctcagcctcccaaagtgtggggattacaggtgtgagccactgcgccgtcgcctacacactaataaattcctcaaaacttagcagcttagaagaacaatagcgtaaggtactagctctcacagtttctttgcatcaaggcgccgtcgcctacgca

SEQ ID NO: 713395 - DNA, 203 bp, Homo sapiens
gctcaagcaatcgtcatgtaatgctagttcaccagtgaaatttgggatcttggctccttcaaatgggttctgttcctagagacagaattacttttgatgctttcccaggagagcctcacaaggacgctgatactcagaagaggatttcggagcagatacagactgatctgcacactaatgatgagtaatttgctacatacaaa

SEQ ID NO: 713396 - DNA, 352 bp, Homo sapiens
acggacaaagactgtatgtcattacaacagaaaggtcactcgattaggggtgagaggtctgtgataaggcgtaaagccccactggctaaagattcatcctttatgcaaaggattatctgaagctattatgtgatgtgatttgtattttgaaaagatcagaggaataatctgcacaatgttcccattcttgaagggatctttctgatctcttacaaagtcttagtggcagctgctactactgactctttggagcaatgttattctcgacggagcttaacgcttcaatccaaactatttgaatttagccttaaaactctttttccagctgaggggggatcactagagcacccag

SEQ ID NO: 713397 - DNA, 535 bp, Homo sapiens
gtcccttctctaaagatgtataaacaaagggtccccaagggatcaaggctgaaatgtaccacaattaacatttttagaaattatctagaaaaaacaatagtgaaatcttcccagtttgcagatgactctacagcaacacatagaagtacaatggtgcaaggctctgtgtgttcagcaatgtgaaaaacagcttccatgtagacaaaaataaggtaattcagtgacagaaaaatagttcaaactataattatcaaacgatgagctctaaaactacctgttttaacataggaaaggggtttcaaagtccctagactgtaccctgaatacagctacaaaaaggcaacaaaatactggctgtcattatgaaagctttggaaacacagaacatattatcctatccttgtacaaaccaaagtgtacctgtacctagaatagaatgtgtagttgtagtcatcatagcacaaaaaaggtaaaatagagaaggcctagaaagatatcacagaagaccaaagggaccagaggggcttctatatga

SEQ ID NO: 713398 - DNA, 182 bp, Homo sapiens
cctccccttttttttccccttattcaatgttttgcctttggggaggggggttgttcaagaatttggggtttggtttgggcattttgttccccccccccccttccccccttaatttccccccggcttcccctcccccgggggttttattcttgaataaaaaataattttgttgttggggttta

SEQ ID NO: 713399 - DNA, 430 bp, Homo sapiens
ggcaaacctgatctaatggcacttgatattaccaagaaatgaagaaacctgtgacctgtccttgacttccacctccctgtcacccctatctttacgccatcaccaagtcctattaaattaagctcctaaatgtctctcatattagttctcttcttgatatccaccagcaccagccccacctcagaccaagccaccagtatctctcacttcaaatatcctcccagttggcccctatccagtatgttcgccacacagaggtcacagatatctttgtgaaaattcagttctgattatgtcccatccctcagttgaagcttctcaatggcttcccattgcttttaggataaagaccagaatatttaacataggcttcaaggttctaagtgatatggcccctgctcccctgcttcatctccccatctctactttg

SEQ ID NO: 713400 - DNA, 803 bp, Homo sapiens
gatactggtacaaaagcatggtgctggtacaaaagcagacacatagatcaatggaacagaatagagggcccagaaataaagctacacacctacaaccatctaatctttgacaaagttgacaaaaatacgcaatggggaaagaattccccattcagtaagtggtactgggataactaggctagccatatgcagaggattgaaactgaaccacttccttacaccatatgcaaaaatcaactcaagatggattaaagacttaaatgtaaaaccccaaactataaaaactctggaagataacctaggcaataccattctggacataggaacggaaaaagatttcatgacaaagatcccaaaaataattgtaacgaaagcaaaaattgacaaatgggacatgattaaatagaattaccatttgactcagcaatcccattattggttatatacccaaaggaatctaaatcattctgtcataaagacatatatacacaaatgttcacggcagcactatacacaatcgcaaagtcagggaatcaaactaaatgtccatcagggtagaacaggatcacagaaaatgtggtggcagggagtggtggcttcatgttctgtaaatcccagcactttgggaaggctgaggcggggtggttcacctgaggtcaggagtttgagaaccaggcctggcaacatggcgaaactccgtctccgcgtaaaaatacgaaaattaggcaggcgtggtggggaagaactgtgaatccaggtactggggaggctaagcgtgagaatcggttgacctggaagggggg

SEQ ID NO: 713401 - DNA, 689 bp, Homo sapiens
gagaggaaggcgcagcgtcaagcagcgaagacacaaatgtaggacgattactactactatgggcatcatctaatgccacctcatgccaggggccgtggcaggcgtgccagccgtggtggttactcctacccgccagactattccggctatgaagattactacgattactatggttacgattaccataactacaggggtggctatgacgacccgtacttcggctatgatgatttccaggcgcccgctcgaggccgagggggccgcggcagtgccagaggtgggacatcccatgcgcgtggcagaggggccagcgctccacggggtagggcaggctttccgcagcgcggaggtgccggggccgggccgggagccagcaggggcctgcgcggaggagccagaggcggtgttctgccgagagggcgcggggtacgtggtgctcggggtggacgcggtgcaaatgtaggaggcaagcgcaaagccgatggctacacccagccagattccaaacggcgccagaccattaatcagaactggggctcgcaacccattgcccagcaacccttgcaaggtggcgatcattctggtaactatggttacaaatctgacaaccaggagttttatcaggattcttttgggcaacagtggaagtagagaatatgtagggctctttgtgttttcagtaaaaaaaa

SEQ ID NO: 713402 - DNA, 290 bp, Homo sapiens
atctccaaaacagtaaaaaacccactttttgttgggcaatatgaaatttttaaaggagtagaatcccaaatgatagaaccagccggcctgaattgagaattttgattttttaaagggtgtttctttttaaatggctgtcccttaatttgattaatttaattcatgtattatgattaaatttgaggcaaatgagcttccaagtattgaaataattactaattaatcccaaatgtgaagttaggcatgatgtaaaaaatccaaccattttaattaaaggctttgccccccca

SEQ ID NO: 713403 - DNA, 636 bp, Homo sapiens
gtgagcccaagtacagtacagagatcaggatcagctttgaaggctggattctatctacataagtcctttcaattccaccgagggcctagagcagctccaccactgtgcacttagccatgatggcaacagaaaccaagagacacaattacgcagtgtatttagaagcagagggacaaccagaaggcccttaactatcaccagtgcatcacatctgcgcactctcttgctccattccctagcaggaacttctatggctcatttaagcagataaagaaactgaggcccacggtttcagctagacaattgatttaggcctatggctctgagttaagcacaatgggccactgtctctggcctatcttccctgtgaccaacgagggtgattacctctcattttccagcttctcagtttctgcctgtgcaatggtccagggcccaggaagtgcggagagtccgtgatggaggggagaggggtcatacgcgattcgccctgcttggttctagtgctgctgtacagcaaggccctgtatactgtctgttctggatatatgtctctttgagagttgagaatttcgttatatgtcaagactctaaaggactaatgacttgtaatggtcaaaaaaagatcgaattgaa

SEQ ID NO: 713404 - DNA, 86 bp, Homo sapiens
ctacaggttatagtgccacacatagtaggtgctaattcattgctgtctaatgagtcagtcaataaacaaatgaatgttctataact

SEQ ID NO: 713405 - DNA, 438 bp, Homo sapiens
tttcgcggtggctcaagccttcaatcccagcactttgggaggccggggcgggcggatcacaaggtcaggagatcgagaccatcctggctaacacggtgaaaccccgtctctactaaaaatataaaaaattagctgggcgtggtggcgggcgcctgtagtcccagctgcttcggaggctgacgcaggagaatggcatgaacctgggaggcggagcttacagtgagctgagatcgcgccactgcactccagcctgggcgacagagcaagactccgtttcaaaagggaggctgaggcagaagaatcacttgaaccaggaggcagagtgtacagtgagccgagatcatgccaccacactccagcctgggtgacagagcgagactctatccccaaaaacatcctactcatctcactaactacatgttggccggtttggccatg

SEQ ID NO: 713406 - DNA, 830 bp, Homo sapiens
agcggagtgaggcgctgtttaaagatggcggcggaggaacctcagcagcagaagcaggagccgctgggagcgactccgaaggtgttactgtctggcctatgatgaagccatcatggtccagcaggaccgaattcagcaagagatttgctgtggagaaaccctctgtgtgtcagagcgggtggaagcttcctcggtccttataccaaggagtattgctgaagatgacgaacttcttatccaaccaggaaaggatccagggaccctccacaaaaggtaactcgtaaccattccgaaagacccagggcctgaggggcaaacttgtttctatcgggctttcggaattctccccactttggaggccaactgctgggattgacaggacaacgggacgttgccaggcgggtaccaaagggctgtgttctgccaggaagcaagggaaagaccctgttgttccccaagggcttcaaccttgaattcaccaaattggacggatttcccaacaaaaccacgtttcatgtgaccctgattgcagcaggtgtggagaagcagaccctctgtctgccggacctgtgctgggcctcctttcaaattgacccagaggaactttccaggataaacctttggtggttcttacacctggcggggttggttccacccttccggggctaaccttggcagccgcgagagacccaaagttccttccgggcaacttccatccgaggcgtgggaccgggcttgtcaacggagtttcctggccagcagggcggtgggacccccttgtggcatgggagacgccgacccattccaaattcatttgtgctttggccccg

SEQ ID NO: 713407 - DNA, 870 bp, Homo sapiens
  misc_feature (512)..(512): n is a, c, g, or t
atttttttcctcatggaaactcccaaaaatccgatgctttgcgtgtttttttatttgcctgataactgatcctttccttgacatttattttagtggactttcagtaactgaaagatggaaacccttttgtaccgtggaagaatttgcagaagactttcagtcgttttgctggaatgattgagcttacattttttattctttccgcattcaaacttagagacactcacctctggtatttgtaatacctggcttttccattttggaattttctggatgattgtcatattatttttcttttaactcttggggattccataccaaattaaatgactgccataaagtatattttactccaggacagattacaatagccttgatagaatcatggcatccaaagggatgcgccatttttgcttgatttcagagcagttggtgttctttagtcttcttgcaacagcgattttgggagcagtttcctggcagccaacaaatggaatattcttgagcatgtntctaatcgttttgccatgggaatccatggctcatgggctcttccatgaatggcgtcactgtttaggaggaacatctgtgggatatgctattgggatttccaccaacttctgcagtcctgatggtcagcaacactgctcccccagaactgtcaggagtaaattgaggctactggctgtcatgcttccaggatttgttcttggttgggacttggttgggctttccagtggcggcttggactgttcataagtctgatggaggtgccattgtttttgtcggcccgtgcggggtggggaaccggcctggggaggagtcgccttaaagcggggaatctgggtcggtgctttcttgtgtttcttg

SEQ ID NO: 713408 - DNA, 591 bp, Homo sapiens
atttttttcctcatggaaactcccaaaaatccgatgctttgcgtgtttttttatttgcctgataactgatcctttccttgacatttattttagtggactttcagtaactgaaagatggaaacccttttgtaccgtggaagaatttgcagaagactttcagtcgttttgctggaatgattgagcttacattttttattctttccgcattcaaacttagagacactcacctctggtatttgtaatacctggcttttccattttggaattttctggatgattgtcatattatttttcttttaactcttggggattccataccaaattaaatgactgccataaagtatattttactccaggacagattacaatagccttgatagaatcatggcatccaaagggatgcgccatttttgcttgatttcagagcagttggtgttctttagtcttcttgcaacagcgattttgggagcagtttcctggcaggtaagcttattgtttgtccagcaaccccaatgacgtgtaataaaatgctagcttcaataattgaaattaaagttataaggtcaagttcctgatttcaaaaggaaaaaa

SEQ ID NO: 713409 - DNA, 138 bp, Homo sapiens
  misc_feature (34)..(34): n is a, c, g, or t
gttatgttaagatctatgccatgcctgggggtantgactcaaggctgctggtcagcgcctcccaggatgggaagctcatcatctggtgacagctacaccaccaacagtgtcctggcctcccacagtgtcctggcctcc

SEQ ID NO: 713410 - DNA, 109 bp, Homo sapiens
gacaaaacgtccagtggtccacaaggcatacgtggcgataagggagagcccggtgacaaggggcccagaggtctggcatggacttaaatgggacacacatggattgcaa

SEQ ID NO: 713411 - DNA, 406 bp, Homo sapiens
agggtcttgctctgtagtcatggctggagtgcattggcacaattacagctcattgcagcctcgaactcctgggctcaagtgacccccctgccttagcctcctgaatagctaggactataggcatgtgccacttatagctggctaatttttatttaaaaattttttttgtggccgggcgcggtggctcacgccagtaatcccagcactttgggaggccgaggcgggcacatcacgaggtcaggagatcaagaccatcctagctaacatggtgaaaccctgtctctactaaaaatacaaaaaaattagccggtcgtggtggcgggcgcctgtagatccagctacttgggaagctgaacttgcagtctcccgggaggcggagcttgcagtgagccaagatagcgccact

SEQ ID NO: 713412 - DNA, 449 bp, Homo sapiens
caatatgacttgagtccacaaggacacaaacccctgagtagttgggcagcccttggcagggtttaagccaggaagtaaaaatgatttggcctaaatatttaagggaactttaggaagaggcctaggtttttaaaatcctgtttttttgtcttaccataaaaggctgacccttttttcatttttttgaagggccacttgtgttttttgttttgggaacttcattcatttttcaacggggttgttgatctttccagtaatttttaggagctgtttatgtttggaggtaattggtcctttgtccaaaaatatgaaatgtaagttttattttccagtttatttttttgcttattttttttgactttttattgtaaaataaaacatcaaactgcccagaacagttgaatagcttaatgaataactccagtaaaagttatggtaaccccccccca

SEQ ID NO: 713413 - DNA, 108 bp, Homo sapiens
gaggatcttatgtgtcatctgaagcagcatgtttaccaaatacacccaatctagcaagcattagcctgcagtgaggtggctagacatactggtagaggtgaggggttg

SEQ ID NO: 713414 - DNA, 207 bp, Homo sapiens
gggacacgagagcagagtgtgcacccacgggtgtgtctagtctctgtgtgagtgcatgcgtggggaggggcgcatgtatgtaatagtgtgcatgtgtgtatgggcatgtgtacctgatctacatgtgatgcacgtgcactacgcctgtgacacatgatgcatgcaatgtgatcatgggccatgtgatacactgtgacagatgccatg

SEQ ID NO: 713415 - DNA, 142 bp, Homo sapiens
atcaggcaaaagcgaactgtacacaggagtaaagatcgccgtcccctgtaaagcagcatatagcattttagccaaatgttgacaaacccaaatcaaccagccttgactatgaatagccagtgcaaatccccacgtttgcagg

SEQ ID NO: 713416 - DNA, 1102 bp, Homo sapiens
  misc_feature (250)..(250): n is a, c, g, or t
  misc_feature (439)..(439): n is a, c, g, or t
  misc_feature (723)..(723): n is a, c, g, or t
  misc_feature (725)..(725): n is a, c, g, or t
  misc_feature (760)..(760): n is a, c, g, or t
cgccgacagtgacacgaagaacgctcaaggctggggttctcaagggaatgaaccgaaggtgggaagacaagcagcaacaagcgggtggcgagaagaacccacgaacatcacagctctcttagggaaagtggaagcacccgatgaatgtgccgaatcaaatgaacacttttccctgtgcaggaattacacttggccggtgaaaggaagaaagtaatgtgcaaaggtaacctggacctcaacaagtggccangaacggggaatgtgcgggcacaaacggccttcccggcaaaaggctcacagtggtctccacttggtgtgaaggcggccctcacactataactctcaatggaatgtaatgtcaacgggggcaggcaaacacaacgcggcaaaagacaaggcatcacatgtaaccatggtgtgcggcaacatctggtctcanaggcacatgtggccctattcgcaaagaaatcacatatcacacgcgctgtgcgtctaacacggtggcgcaaagaaaaaccccatctctggacagtggtctcctgggggtgtaaaaccggcgcacatcacatctcaaacacaggtgggggttccccccgcggggacaaggagacttctcaaacacacgggcaaatattgggggggcgggcgggcacggcggggaaacatgggtgtacagacacggatacacgagggcgtgtgtgtggacatcggttggtctccgcncncgcatgtgagggcacggtgggtgtaaaaaccacanggggcacttactgtgggcttgggctggtggcaccacggggcggccccggtagaaaaggctgggcctttccccggggaaccatttaaagacaccatatgtgttgaaattggccttggccaagaatagaagctccatactcaattgggttggcccaaaggggctctcatctggaaaaatatccttatatcccacatttcaggaaagaaaagggccgaagcctgtggagcgttgtttggcgccaagtccccaaacggctggaattattccccacaattggtgggccccaataaaaccttttgtttggcctttttgggggccgacgccccaaccagcacacaatcc

SEQ ID NO: 713417 - DNA, 766 bp, Homo sapiens
gctcagcgatttggggacgctctcaggctctcggagcacggccaggttcttttgtaatgtctactggttcaggaaacatagctgtgccacgcacagcatttgcaagggttgactcggctctataatcgcccaacgggcaagtctggcgtcgtgtcccatgtccaaatggtacattgagtgactgcttggagctgcggacgctttgtaaccatttgtaaagcatgcacattcacggacccagctggtgttgtgattactgtcaggaagtgtgtacacacgaatttgtggctcgtggccggagaggtcacattgcgtctggcagcacaagggataattggcatatcgacgtacccaagtaggtggggccttagaaggagtgctcgttgcgttcaggacatctggaatgctaagcacgtaagttcttggcacgaccttgtgcgggcgaaggtagagacctggggcctaattggaagtactcccttgcggccaaggctattgatcagcttctgatgcttgaaaaggtctgacctatgaaactgggctcaggtgacgaccgtgacggagggaactggctcgtcccttggtggaatccactggggttatgccactgaagaaactggtccaacgttacgaccgagtccagagaggtagttaacgcaagcacgatcgtgaagcgcgtggagttttggtgaccaggaggttgtctcttggagagagggatcagtgctttgcgtgaaagactgtgcatgaagttccggcggggcag

SEQ ID NO: 713418 - DNA, 138 bp, Homo sapiens
ctgtctcgatctgactgagcaccttggcctcccaaaatgctgggattataggcgtgagccactgtgcccggccaacaataaatttttttaaggctagtcaaactaacaaaaaatttaaaagtcaatcagtagttctaa

SEQ ID NO: 713419 - DNA, 371 bp, Homo sapiens
ccgttaccattcacagagactctcaactggcctgggagggttttttccacagcattgacatctttggctgagggcattgtcatttataagaatgctggctagaaccaactgggggaagcaagtatagcatccgcttttaatatctcctgaacaagagctttgtgagtgaaaactgctttacagtgctttattggtttcatctattcaggcaaaacaacatgctcaataagataccaaattatcagatttttaggcctacactactacctttgtttgggagagaatcacacactattaggcttttagtgttgttcagacttcttttgtatagaatcatcagatgatgaactgaaatggccgggaccgagctc

SEQ ID NO: 713420 - DNA, 129 bp, Homo sapiens
gtgagaagagtaagccgcttacagaagccgcaccacagacagtttaatcataccgtgacaggttttacaacaggattagcaacctgaccctatcttacttaagcatgtcttgtgaccttgacagtgcta

SEQ ID NO: 713421 - DNA, 875 bp, Homo sapiens
  misc_feature (111)..(111): n is a, c, g, or t
gtctcacaatgttggctcgcttgggaatctgtgaattcttagactgtctccgagctcgaaggcgtaagagtcatggttacaaagtaagtcgaagccgagttatcatgtccntccaagtccctacgcgacaattggtgacacattgctgctgatgtgcttcatggcgcacatgagctattttctctcgaaggagcaggatagaggaaactttagatccaattgatgaggtcgctgctactcatcgcagccaccattcatgatgtggatcaccctgggagaaccaaatccttccggtgtaaggctggaagtgagctggccatcttgtatgatgagcactgctggtgctggagagccgacacatgcggtctggaccttccagctgagccactggagatgatcaaatgcaagtatatgtcagaaagcatggagaggaagtgattatcggacgctgcgccgggggattatcgacttggtcttagccagagaaagtgacgaagcactttgagcgatgtcaacaacatttgtcaacagcatcaacaaaatccttggaaacaactagcaggaaaatgggggaaactggataaacaacgcaggcaagtcatcaaacgactatgcttgaggagtccgggagaacctggacctaaatcgaaagaatgttgattactcgtgctgatgtgtccaatacctggcgaccctgcgagtagtgcatcgacgtgggctgtgcgcaatttcggaagaaatatttttctcggcgaatgatgcagacgagcaggcagggtttactggtggtgatgccagtgtttgaccgaaatacgtgagattcccgaatccaaattttttacataggttattatccagagagatggaggctggat

SEQ ID NO: 713422 - DNA, 490 bp, Homo sapiens
agcttaaataatacctcgttcaaaagatgactaattgaggctccaaataccacctcccagccctctttaattcgctcagttgagaaagaggaagaggggaagaaactatggaaaatcattgagaggatggtttcctgtgtaattttgaatagattgtgttgaacatggaagacaccggtgttacctattgtgcgtttcctttaaggctgttgctgtgtgtatgtcttagcaaattcagattattttgcactctcaaaactgagagcttgcttttttcccccatatactttcttacatgaccagtctcttagatggttgtgacattgtagtctgtataatgaattcctgccttggtgggctttctggttcctttgaaccttagggaaaggcttggttagtttccatttgctgtgcattggctgagaagcagagataactgagtgaaaggaaaaacacttcttgttaactgtatagtggaagcttggaaaag

SEQ ID NO: 713423 - DNA, 1410 bp, Homo sapiens
tttcttgctccctgcttttctcttctgtgggatgatctcagatgcagggagctaggtttatgggagttaatcctagcttgtgccaaggtgctaggacactagctagggtgggctaggcaaagcccactacccattcctagtcctatctagtggcctccatcccctcatgggtgctgccatccttcctggagagagggaggtgaaagctggtgtgagcccagtgggttcccgcccactcacccaggagctggctgggccaggaccggtgagagggagcactagctgccctacactggcccatgctccttaccgcacgttagcgcggtggaccgacgccatcgcttatcacccactagttatcggagcggaagggcgcaagcgaggggcgtctaaccagggcataggcagcacaggcatgagagcggatgctgggcgtggcagcacgatgacgatcacagagagggtgcctcaatggagcgtcgggcaaggccctagcgggttgcaaatagcagaacagggccccagcacaccgtgcacgggacatgccgagcagcggcgcacacgctggtcccaatgagctgcacaccgcacgcggggcacccacaccataccctgaggcggcactgccctgagcgagctagaaccgctcacgcgtgcagctcgacgacatggcgccctggcacccggacagcgggctacacctggcgggaagccccttcgaacgcggtacatctcaatctggtgacccctcgctggtaactaccacactataacttacccaccgcggacacaccacggcccttaaagcgttcatacttacactagattccgcggcaccctggagtcacccaacaagggatacttccacatacctggagctccccgtagcctacccatccaatttggctgactcacagctagaattggaaacgcgacacaaccacaaaggccgaacttgacaaatcgcacgccactgagcgaatccacccaaatcacctcacacagccgccgccgccacgaccacgcctctccactcaacagcggcttgcaccattgacatcacccacagcatacaggagacaaccctaaacaggccactactcagatcccacagtagccccatcccaggaacaaccgacaccgacgactcagggcgctcgcacactgcgtcggcaccatctccgcccacacagccaccgtggagtcgtaagtactacgaccagcatgaggacgacgcgatgatagcacaaccaggcgccgacgtcgaccgtgcaagccaactcaaactgagccaggcgataccatagctcacacatgacaccatcgcgccaccagaacgccgccatccagcctctgctcgagacgccacaacacctcaagagccactgcagaccgccacgtgcatcgcac

SEQ ID NO: 713424 - DNA, 140 bp, Homo sapiens
catgtgtaatacttaaatggagaaaagtcaacgcaagtatacctgctttccctccttttgtaagagaatctgtattttgttcttggcagttccactgccccctacatggtgcgtggcttcatgactctgtggccatccct

SEQ ID NO: 713425 - DNA, 100 bp, Homo sapiens
gtgtcggaagcctgtgatttcctaggaaaggatctgggttaagcccattagaaaaatagcagtttacagcagtgtcacactgagctgcctgagagggtac

SEQ ID NO: 713426 - DNA, 374 bp, Homo sapiens
  misc_feature (63)..(63): n is a, c, g, or t
gcgcgcggttcggcatgcaacccggcatgcagccgttcattgcaaccgagtagccgccgtcgncacgagcgcatgccccgacacatagctggaatcgtccgatgcgaggaacgcaacgaccgttgccatttcgtcggcggatgccaggcgtccggccggtgtcgattcggcaaaagccagtcgcgcttcgtccgatgcccagatgccgcggtgatggaacggcgtatcgatcagcccggggcacagcgcgttgacgaacggccgcgcctggaaccatttcgattcgacgccgtctttcgtcatcccgattcaccgcgtgctttgctgggcgatattaggaccgacgcgtttttcgaagccgatggacggccgcc

SEQ ID NO: 713427 - DNA, 960 bp, Homo sapiens
  misc_feature (391)..(391): n is a, c, g, or t
ggaaccaggttgaagagtctaccctccctttagcaggcaactggtcccaccgctgtgagcctccgtggatcttagaccagtacttctccttacacctagcaggtatctcctctatctataggggccatcaatttcgatcgacaagcgaattagtcaagtataacaatcgccctgtccatatacccagagtaccaagaacgcgcccgtcgtgtcgttctgaatctcgtccttagattctagctagctatgtcctagcttctgccgtgatcatctcccgagttcgctacgcggtctggcggtcaacatctagctactagagaatgaccgacaagcttcaaggagcgcaccgtgtcttcggatccccgcgcaggacggaagggatgacgcgccnacttctgagtagcacaaccaccataattctggagttcttgacggcgtcaccccttgcaagtttatattcgtatatcgcgtgaccgagtgctatcgagaatcacatcgtcgcgcatgatgtggtatacttgacatactcctgtgaggaagacacgaacaccatttgggatcactgtcaggtcatcggtctagagcgtatggatatctaatgtgggctgtccttagcggtttatcgctgtgagcaacacccatcatatttaacaagctcaggcacatcagcaccgtagacacactgcagcatattatcgaccgtcctgcttaggcaataaatcgattcggcatgatcgccccaaccgtggcgtccaagacgatatttttaaggcgttgacttgcgtcccacgagcttccagcgtggaacggcaactacatagaaatagtcgaatcgtgggtggccggatgcgtcccggaagcccttagggaattccactctggtgtctcattgtcgccggaacgaggtgagcccttgacactgggcattggatttgacgaaacgtcacatcactaataaca

SEQ ID NO: 713428 - DNA, 325 bp, Homo sapiens
tctagacgcgtcccaggcgctcctggcttcgatgcagaggctgtcgtcgcgaattcagattctacggttgcaactcgcacggggcggattggtgccccgtgagtggctgtatggcgctgccacgtcggtgttgtccacgcttggcattgcctagttcgttacgccgttcgcctgatgacgattggtcgccgccacggtggcagaaatcgcgaaaatactggagggggaatatgacacaagtacaacgcttcctggtgaagctaaagcctggtgcatcgcacgcaacgacatccctcgcactggatagcgggaagattcgcttcgc

SEQ ID NO: 713429 - DNA, 265 bp, Homo sapiens
ctgtgcatgctatgcatgtctatcaggattcctaaatagccgctagatgatcttcacaggagtaatagcgatcatcccctgtaggaacttagcaagaattgtcataaacctcttcagcatccagaaatccatagtgtatccttggatgctcgcaaagtgttccttctcccacatcagtggacactcctcagattacacacacactctatacgatcggcgtgcttgatagtctcatgtgtatatatctacatatactacagtaacg

SEQ ID NO: 713430 - DNA, 708 bp, Homo sapiens
  misc_feature (364)..(365): n is a, c, g, or t
tggagatgcttctagcctcccagtaggaggccccagccatgccttcaaccgtggcaggaggtgtagccactcctcatcctccctgagtgctgatattctctctctctctttctcttcctcttctttctctctcgttctcctctgtttctctcctcgtctctcttcctctccgtctcttcctctgccttctctcttgctctggcctctctctcttcctcttctctctcttcccctccgtgtctcctcccctcctctctctcttcctctcctctctcttcctctcctctctctacccctcctgtctctcctcccctcctctctcttcctctcctctctctcttcctctcctctctcttcccttccnntctctcttcccctcctctctctcttccgtcctctatctcttcccctcctctatctcttcctctcctctctctcttcctctcctctctctctcttcctttcttctctctctcctgtctcggctgttgtgggttgcaggttgggtgctgctgtgtggtccttcccagaaactgccagtagagggcagcctgggcatcctaatgcttactctggttgttacacaaagaaaatatggggtcactggcgagcccacccacactcacagaatctccagtgtagtcccctaacaaacagccttcattcctcttccacttcagcaattgtattctgatgcattggctcaga

SEQ ID NO: 713431 - DNA, 143 bp, Homo sapiens
agttgctgaagcttatgagtactgttgatcccaagttgaatcatgtagctcctggcctcgtttcaccaagtctgaaatcggatacctctagtaaagagatagaggaagctatgagaagagtacgagacgcacaggcctcattc

SEQ ID NO: 713432 - DNA, 259 bp, Homo sapiens
gatttatttcatagtggttttaactgacatttccatgaacattagtgatgtgcactttagccatttgtatgtcttcttttgaaaaacatctcttcaggtcctttgccttttttttttttttaggaaagggggctccacttttgccccccaggttggggggcaggggcccaatttcatttcaaaaaaattacaacttttagggcccttgcattttttttcccagggcccccaaaagggttgggattaggggggggacccc

SEQ ID NO: 713433 - DNA, 114 bp, Homo sapiens
cacgggacgaagagcgccttaaacgcactatgctctcaaaagtgggccagtaatatccaggacagtagtgcttgcacagcagtggctccgaccggaccagtctgagcattagat

SEQ ID NO: 713434 - DNA, 2290 bp, Homo sapiens
ccatgtgaccctctgactcaggttttgtgttcttcctagtggaaggagcctgggagaggccaggcctccccggactgctagcctgcttttcctggggtccctggagccggaggaagaaccaggatgttgctgcctgcagaagctcagctcaggaagacttccaggaacctgaggaggagctgccactaacagccatatttcccaatggagactgtgatgaccttggaagggggtcaaaagcctgtgatggagtcgtacacactcctgctgagcccaccggagactcaagatgaaggctggacccttgcgctgtccctggctctaacctacagactggggcctggctccgtcttactggcccccaggtctccatggagactgcagaaacccccgcctgctggaggcctgccacactcacagttaccagctagacagtggggcttactaagacaagcaggacctaaaacagtgtctcccctgggaacctactccccacccacagttaccagctagacagtggggcttactaagacaagcaggacctaaaacagtgtctcccctgggaacctactccccacccagcatttgctaagtctgatcacagggaggttattttgtctctctgtctcggtttctctgagccactgagacagatggctgtccgctttgaggctctgcagagctgtggcaccccatggtgtgtctgcagtgttctgggcacatgcatgggcacccatcgttgagagtgcagctgggaagaactctgaaccagaagtcatcagagctgaggcatggccttgaacatgtcactcagtctctggggcttctgtttcacaaatgcatgagggggccaccagcccagtggctttaaaccaggggcaggttgtccctccaggcagcattggaaatgtgtgtgtgttgagggggtcacagtgactgtgggggcacccctggcatctagtgggcatcccacaatgtgcagaacagtctctgacagcaaagaattggtccattcaatgccaattgtagtacctttgagacattctggctgagccaatgccttctccctgtcagagtcccccagagcagagagggtcaggcttccctggaccttggctcccagagcaagccaaaataaagactacactgttgccttgggggcttgtcgggccagggccaagacggtctgcgtgctgcagggccaggacagaaatagccacacatgccggtgagaacaaagagcctctttctttctcatgttgacatcgactttctgtgccaagtcctttgggtataaggatgctagggaattcctataggcaccaaacagaaggaaagctaggggcttggactactgggtataggacttgctctagctctcaggtcctagcccaagctcaatgcaaacacagcccctccgggctctctgtttctgtgaggttctggaatcccttcctctgtgtccgtgagtctgacagaatcgatgatgttcccttagagctgggaaatccatgtgtttattcacggagggaactcaccattacctcccttgtcttctttgcctgccttggagaaatccagagtcttcggaatggcaaaggcagctcctggatttccctggaggggaggcactagctgagggaagtagctcccttcattcatgatgcacagtttacgcagcagacacacaactgcgcctactatttgctcggtgccctgcaagtgctgcctaactttgatttgttatttcagctctctccaggatagtgccaaatggtgcaatgggaaacctgttttgctggggggctctagatcactggctccagaactcccggctgccagggtagcccctacccccagccccttgctcctggacagcagtgggtctcacctttagcctctgcccccagttctggtctgacccaacagaggggctctatgatattaagaaggggcccttcctgctctgtgcctcaacctattctccataatagggagtctaatcctattccttccctgcctgatgaggatggtgtgaggatgaggaggacggcatctcatttggggctttttggcagtgggcctcattttaatcctgcagggctgcctgccagtggatctatccagctgcttccttgtagccaagaatgagttcaatgaattgtgattcactgattttattgattttgttttaaaacagggagactggtatttttgaagctgctatcattttctatttctttattaatttctttgtaatcatcttattaaagttttcttatttagtggg

SEQ ID NO: 713435 - DNA, 193 bp, Homo sapiens
aagcgcacacgagaccctggacatgaatgaatcaattagattacccacccatccatccggggcaggacacatgggctgaactgggtgctggaggtcgcgggcagggccatggcaggcaccagtgagctgcctacccgtctctggcatgtggctgctcctgatcctgggcccccagaatggaagtcaccttctc

SEQ ID NO: 713436 - DNA, 720 bp, Homo sapiens
tcgactggcccggagtcttgggtcctacctggacatctgttgctccggtgcatgctgctgagcgagccacaggcttcggtgtggccctcctgctggcgctctctcggccgtgcctctgaggaccgctctgctgaacctggtgtccccacctgggactgtgaggatggatcgtcgaggaggcgaggacgtggggacgggactccaagagacgcaggcttgtgcgagcctcctgcctcggccctgacaacacggggatcttgttacctcactgtgcacctgattaattttaagcaattgaaagatccgcccttcatatgggttttcggtgttgtactttcctggtcgtcagcgctgcgtggtggaaacagctgaagctttctaggagacagacttagggtttaggtgcagggccacggggaggggaccgggaagcgctggggcttgtttctgtttgttacttacaggactgacacatcttctgctcaaactgtctacccctggggccttccgctaccccggggcgaggcctcactgcctgcatggtgcccttgtcccagccccaggtcccgtgcagggcacctgcgtggctgacaagccaggctcttacctccagccggggctgccagcgcatccagccagcccacgccctgtgaaagatggagctgacgttgctgtaggggacctgatttatagggtaacgagcaagtcgcactctgcctc

SEQ ID NO: 713437 - DNA, 432 bp, Homo sapiens
tcatagctcttgtggtgcatccataaaggccctcatgctatcttcaaatgtatcttgtatgtcgtctacgaagtcgttggttgcaaatgcttccaattctctgcagtccataagcgcttatcacactctcaccgctttggctcaagagatagtctacatctggtcacatactcattctgaactaggtgagactgaatggcgtccacagcttctgagccgtcatagctgtcagtatgctcgtttcatgctgagccatcgtctttcctcatccacgtgtgtgtgcagagtgtttatgatgctgccccacacatacgtgtctgcctatggcttctgatgtacgctcaagcccgcagccctgtgccctgtgctgtccacatccgagaggtccagagcaccagccctttcgtgctcggtgaccaagacccttgctac

SEQ ID NO: 713438 - DNA, 742 bp, Homo sapiens
caaaaactacattacatataataagagtttagttccttctacttgaggtgtgacatgaacgaaagtaatggaaattaagttctgccctcccattctcgaaggtgaccagaggggaagttcacagtatagaagcaggaagtgattctggaagttgacactggaatctcgtcactggcatcccaaagaaatgactgatctttgtcactcttacctgtttcattccctgggggcgagatacaaaaaggactgcactccaaagatcggacatgaaccaagaactgggtttcatataaaatattttattctgtcctcttgagatgtgacatgagaaaagtattgagaatacttctatcgacctcatgcttcaagaatccgtaggaattctcccatggtggacttaacggttaacctgaacaggtcttggaaaaaggactttaaacattctcctgttctgtggaataagtatacgtttgtgctggacgatacaccttgtcagtgagttccatgtgatactagagttgcatagatttttaacctttacgccagatgaagatctgaggcaatacattgcccttttgttagaagtattgcatttggtcactgataactgtgataattgatcttgttgaaaagcctgggatattgaagatctgatatgtgattataccgggtttcctcaatgaaaaaagagtacaatgaaaggaggctgagaatttggtgcttttcaggggttggtgatgac

SEQ ID NO: 713439 - DNA, 399 bp, Homo sapiens
caagtagtcaatcagcatgctatcgtatcttggggcagatttataaggggaacgggaaggcagaacagaggtgagtaaatacacgttgaataacatagactcacgttctttcttcccttcagtgtttgctgtgtaggctttccttgccatgtgaccctagtattcagagctgtctcctaacccgggctgatgaccgcattttttacgagataagagatgaaaggattttgctaggacagcccagtgttgtattttaaacaagtctgcctcacaagtgtgagggccacaacaatacactgactcttattacagggctgggtaggatttgtagcaagctgcctaggcagtacatttgggtctagcaaataagtttgtactcactaccccacagagagagcg

SEQ ID NO: 713440 - DNA, 87 bp, Homo sapiens
  misc_feature (87)..(87): n is a, c, g, or t
gaaggccagcaacccatcgtcagaaaagttgtggagcatggcctgtttgtcaagcactgcaaagtcgaggtgtatttgctggaactn

SEQ ID NO: 713441 - DNA, 185 bp, Homo sapiens
tggcccgagcacccttgaaatggttccctttccttttttgtaaccagactttgaaaaattgtttgttttatcagggtttgttcctcaaaggccttttggtaggggcctcccgaaaaatttgtttttttgtataaaagacaaagtgttgaaaatgtatttcctgaaataaatgtttccaatgcaga

SEQ ID NO: 713442 - DNA, 112 bp, Homo sapiens
ccttgttcccatttactgtcaggtccattttcgttagaatgacaaggattcacctttaacatctttttcaaaataataagccacatcagctatgtcccgtggggtaggaggt

SEQ ID NO: 713443 - DNA, 1928 bp, Homo sapiens
ggagcagttcaggcaggtccctgacgtggatctgatctcattgacttcaactagtagttaaggacggaacatgatcctggtggactctcttccagcactccgacactgcccatccgacttatcctactcctgcattgcaaccgtccggagtaccagtcattcatcggaccatcatccatgccttcgtgcggaaaccgtgcacaagcaacacgatatattatgatggattcagcatccatatcatttgaccaagccacagcacaatgaagacatcaccagaatatcagatcaggaaaattactttcacgaacctggaacagataggaaagagacgatgcccaggtacaaacaacgcaccatgggttccaaaatataatggtcaccccttgcaaggggccacatcactatacacccattaacccatcttacattccttgtgcgcatatacattaatttatcagaccactgcaagaaactgaacctgtactgagctattcattgctgacaatgggagctggtatgcagtgcacccaacatctctacaatttcctcatagctggaacaccgttggtgaccccgtcacgacggcacgcacatccgccggcaagaacagttgacgcgctaactaggtaagtccaggttcacttcaccgttgaagcgagcaagtggccacacaccaaagccaccaatatggctgacttggtaccatgatggcacctcgcaagatcacatccgatcactctccccaagtagacaacgaacatcgaaacggcaagaacgcccccaacgccgctgtacaacgtcactggcacggcactggagcggcgactaacaacacagcaagccccaccaagcagaacgacggccccaccatggcaagcagacgcgcgcttgcaacaagatggcggccacgccacgagtgtaggcacggcaccaacacacacaccggccgttgcgcacaccgaaccgacggagacacaccgatcaatcagctcgcgcagtgtatcccgtcgtcacaacttgggacaccgcgctgtgtagcgactacagcccatgaaccccacggccacgaccgggaccaacaaccgccgacacaagacagatcccatgaggagagtaccagctgaattcgcccatgaggacacaggaccacacaacacctcgcccccacaacagatgaccagcagcacacgcgagcaaacgacgacaatgacactccaacaacgacagcagcaaatgggggcgactgacacccaaccacatgtgaaacacccaaaagacgacgacaacaccgcggcaccttgtggacactgcggcccctgagcgactgctcctccgctaggcacaggagaccgcagaacacactgacaacgcagacataacgacacacaagcgggcgacgatcaacgcgacgccgagcaagcgacccgacagagaccatacagacgcaccgcacatgatctgtgcgaacgaccgctcacacgcacacaacactccagtcgaacaacgcgccctcacaccacatgcacagcagcagcccagcacacgacgagcgacaacaccgacgcaccgagagcccaccacgcacagactcccaccaacaacgcaccaggagctgacacaatgcactcgacatcattctcgacacacaacccgtccgtcacgacacactgcacgcaacgaacgcacccagactcgcacaacgagcaaaactagataacagacacagacacacaaggcagtactcgcacgacacgaccacgaacacgacaccacgacagcaacagctcccgacgcgccagcccacacagccgcacactaaagctaacaacgaacgagaacaacaccacgaacgtagatgacacccacacagcaagaagacacgatccaccacacacgcagcaccctcgatctaccacaccagactc

SEQ ID NO: 713444 - DNA, 131 bp, Homo sapiens
aaggggggggaggccaaacccccttttttggggggggggttttcccctttttttaaaagccccctttttcccaaaaacccttttttttttgaaaaattttttgggggtttttttattccccccccccccga

SEQ ID NO: 713445 - DNA, 164 bp, Homo sapiens
ggctgggactaacagaagcatgccaccatacctggctgatttttgtatttttagtagagattggggtttcaaccattgtttggccaggattggtctttgaacttccaaccttcaaggtattttgcccacttcaagcttcccaaaggtgttgggattcaaggcgt

SEQ ID NO: 713446 - DNA, 107 bp, Homo sapiens
tgaaacagaagtctcattctgtggtccaggactgtactgtgtgaaccccactgactaaattagtgaaaaccataggcgtggaaatttctcaccttttacaatgataa

SEQ ID NO: 713447 - DNA, 206 bp, Homo sapiens
atcccgtgtaaatcattcttaatataatctgcttgatagccctggctattattgccctcttacaggacctgtagatactcagggcttactctatacaccaatgagtcttctattgatcctaagaccaccactgaagttttttatgttcttttggacaaacatgcatgacttcttcagatactttttttttacctttgatggcagca

SEQ ID NO: 713448 - DNA, 986 bp, Homo sapiens
  misc_feature (132)..(132): n is a, c, g, or t
  misc_feature (159)..(159): n is a, c, g, or t
  misc_feature (197)..(197): n is a, c, g, or t
  misc_feature (208)..(209): n is a, c, g, or t
  misc_feature (231)..(231): n is a, c, g, or t
  misc_feature (257)..(257): n is a, c, g, or t
  misc_feature (261)..(261): n is a, c, g, or t
  misc_feature (270)..(270): n is a, c, g, or t
  misc_feature (279)..(279): n is a, c, g, or t
  misc_feature (285)..(285): n is a, c, g, or t
  misc_feature (457)..(457): n is a, c, g, or t
  misc_feature (483)..(483): n is a, c, g, or t
  misc_feature (501)..(501): n is a, c, g, or t
gacgcgcaataaggaggggcgaaaggacatttttttttttcttgctcccgcctctgttcttcccccacctgccacgtacagagcccaagttctccgctaggcttgttgggtcagcgcgattggccggggccngcgcgagcctgcgagcgatggtgcggnggttgcgaaggtgcaaccgagcgggccgtgaccaccgnctccccgcganngccccagtccagtggcctcgcngtccgcccattcagcggagacctgcnggangaggcggcngtgccgggnctccgnaagccgtctttctctagagttgtatatatagaacatcctggagtccaccatgaacggacagttggatctaagtgggaagctaatcatcaaagctcaacttggggaggatattcggcgaattcctattcataatgaagatattacttatatgaattagtgctaatgatgcaangagttttcagaggaaaacttctgagntaatgatgaagtaacaantaaagtataagagatgacagatggcagatcttcataaccacatttgttgatagttctgacctgttcctttgcgaagtgtcaggtgcagtaggatactgaaaactgacgattgatttgtctaatgggccaggccagagaccccctttgaatcgaagctcaggtgaaatatcgtccgtcgagaactgatagaacttcgagaataacagtgaatcgtttgattggatagcttggaaccacctggagaaccaggaccttccaccaatattcctgaaaatgatactgtggatggtagggaagaaaacgtctgcttctgattcttctggaagaacaggctactcaggtgatggcagcaagtatgtctgctttgatcctttagaaaaccaagatgaaatcaataaaaatgttgtgtcagcgtttggcttagcagatgatcaggtttcagggccacccagtgctcctgcagaagatcgtcaggaacaccgacg

SEQ ID NO: 713449 - DNA, 120 bp, Homo sapiens
tggtacctaacacaaagctgatatgtcgtgcgaaccaggcgggaaccgaatcacttttgggtcatcaaaattgcgcaccacaatcggcaccactcctatagatcagtccgttcgcatgtt

SEQ ID NO: 713450 - DNA, 870 bp, Homo sapiens
gccggatcgcgagcagtagttgggtgggcgccatggttgggatcaccatcatttgtggtggtgaagcgcatatcatccaggttctgctacacaagactgtgcaagatgatgcacaggagtgagctgagcgcttccgagcgattaattagtagaggagacatggcgtggtcccgtgcgaaacaggctgtacggcgtgaggtggaactcctattacatccgtaggatccagctggatttgaagaagacgctgtaccggtgctctggatcgcctggcctctgtcctgtatactggtctggaccgaagtctgcatagaatacgtcgtgcctgatgaggagtgatgcacgacggtatgaatggttgtcgagtggtcggggctcccgagtcttatcatgaaaagtcgctactcaccatgagaactcccgaaggtcgtcagaagactgggctgcatcggtgagactgaacgtgggtaatacgcgcacagatgtgtagatgcatggtaggagtcgcggtgcgtaggctgttgcactggatgaggttacgatggcctacatcattggtgtctttcggtggactgccagccctacctgttggtccatagagtagggaatagatggctagatacgaaacgtgaactggacccatgagggcttccctaggtggtctcgacgctcgcggggccttgtgtcaaatagcgtacctctactaaaggagaggaaatgaattgcccttttcgattgacaggactctctcccattacttgtaccttgccgtagacaacactacggcagcgcaagagagaccaggtccatgtcgattggcaggagccccttgggaaggacaacacaggagaggagagtgtttgctggaac

SEQ ID NO: 713451 - DNA, 883 bp, Homo sapiens
gctgttactggtcctggaatttataggcatgtggaaggttcgtgtgctagattagatgggcgccaggtgtcgccggcaggtaaagcatggatggggtctattggagtggcctttgagggaacattgagtcctattcttgttcctgcctgtgtgtgcctcgatgtggcggcttggacgccccgagatgactggcctgctgccctagtgcatgggccggcggacgattgctgcgtgtcctgctcctcttagtgcccgggaccgcgggatgggttgtcggcgtgaccagtgacctgagctccctgtctctcctcagtgacatcgtctttaaaccctgctgtggcaatccctgactgcaccgccgtgatgcccagggaagacagggcgacctggaagtccaactacttccttaagatcatccaagctattggatgacttatccgacaatgttcccatctgtgggaggcagacaatgtgtggctccaagcatgatgcagcgagatccgcattgtccccttcgcgggaaggctagtggtgctgattgggcaagaacaccatgatgctgcaaggccatcctgagggcacctggaacaacaacccagctcttggagaaacttgttgcctcatatccgggggggaatgtgggcttggtgttcaccactggcaggacctcactggagatcaggggacatgttgctggccaataatgggtgccagccttgcttgcccgtagcttggttggccattgcccccattgtgaaggtcacttgtgccaggcccagaacgactggatctcgggccccgaaaagacctcctttattcccaggctaaagggtatcgccactaaaattttccagggagcaccatttgaatccctgcatacgtg

SEQ ID NO: 713452 - DNA, 674 bp, Homo sapiens
gtgtgtctggtggggatatggaccgtttaaacgtccaagatgatttgctaagactcagcagcatgaacacccaatttgctttcaataagacaactcctctcatggcaattatgcatacaaatcgggttccgaggctaataaagctaagatgagtcagtcattccttctttccgaaccagcttcgctaaagttagacatttgtcatttcaacatgagaaatagtttgcccacttagctcattcgattgataaatcgttcagattagttcctttttagacttaaaccacaggttcaaagcatgcttttcatgatttttttatgtcaaatgtaacatgtatggagtcacatgtagtgccatatgactactttgtgtataaagatgttgaaatcagtggaagttctccataaatcaaaggaacaaagcccatttatgatgagaaactaacaccaatttctgtttttaagaggaaaaagaatgactgatgtaccctaagtattgttatgagctgtctctatttgctgccaggctttagtagcttgtgactgatcttcttagactgtcatcatggctagggttctgtgacgtatgttacattacacccccctctcacaggtcgagctaaacagaaaaaaaagctggagactacctggtccggaatcctgcagcccggggg

SEQ ID NO: 713453 - DNA, 1410 bp, Homo sapiens
ggcgagagagagagagagagagagagagagagtgggtgttagactgcagggcaccaccagaccagtctcttcgctggtctcactctcgtctgtctgcgatctctatcgtcttaagcagacgtcaggcgcgaaggacatagcgtcttctaatgatgtccccatcttctaaacccaatcctaatatggcgatgtggaagtccaatgtgggaatggaaaaacagggtcgttacatcgatatctagctgaattcgcacagcctttgtgatggacacaggaaaatgttctagaagtccgcgaagattgtgatttggagtttgaagaacagtgtgaggaggttgtggagctaggattgaatggcaggccgagatagttaagatcgtgcatgagagttgtcagtgttagcgaaggaatgaaagagaggagggcgaatgatccgaagagatcagttggaagacgatgatttacctttgcaagtgtagggctatgaagagcaatattaggaacaaccatatagagtaataatgcgttgaacaaattagatgaaattaggcaaacgctaccaagggactggggcactattgtgggaaaatggggaggcatgtcgagaaaggagtaaaaaagtgtgagattatcaaaaaaaagtaacactaataaagaggacaatcaagagacaagagtttaatattgaaaaaaggatttcagaatggaatatacgatataataaatatctgttaacattggaagaagagaggaaggatataaaaagcggatgatccaaacgtgataaagttcacgattcgacgacggatagtgaggtatagcgaacgaagaagaacgtaaaataagaaaaatgggacaggaagtgactatacgcagatgaagaacgtgcaaaagatctacaagcagatctgtagtagcaaggacatcgaatgggggtggagtgacaacgaagtgaaaacaaaaatgtgaacagcgacccatgttacactccccgtaaagacatagtaggaccatctgaacaacatgtgaattatggaaacgcttcacaaaggtcgaatgaatgggaataattgattcccaaggaaactaagatgaaacgacggaaacaatgccccccaggagaccaagaccaatgaatgaactcaacatctgtgacaacaaccacatcaatccagcgcaagataggaccgaagcgacaaaaccagacgcacccactacataacccgccaccgatcacaaaacacagcggacaaaacaaaaaagagaacaagccactgagcagacacacaccgtgacaacaaactaagcggacaacaaaagaaggaccgagcagaagaagaaaaaacaggacagaacaaggaataacagacacacaaaaacagagatagacaggcagaaggccaccaccag

SEQ ID NO: 713454 - DNA, 191 bp, Homo sapiens
cgtacagaaccacgagtcatgctcctaatctcgagaagactcaggttacacactatgcttgatcaagaacttttcgttgccttttttacttggtatcattttggtatgaactaactccatcaatagatttctatacaagctcagtatctcaagtactatcaacacttgtcacacattatccgttccaaaaa

SEQ ID NO: 713455 - DNA, 375 bp, Homo sapiens
ggcgctggcaggcagggagcttcggacatagccgctgcttcgtgaggctggcttgggggtggcctaatgccaccatcaccacttccctcaagagtgagggagaggaagaggaggaggaggaggaagaagaggaggaggaagagggtgaaggagaggaagaggaggaggacggggaggaggaggaggaggaagggggggaaggagaggacttgggggaggaaaggaggtggaggaggagggtgatgttgatagtgatgaagagaggaggaaatgagggagctcctcgggggcttgagctgaggactggccaggagtatgcagccgtgacttcggcttatggtgcccagagaccatgcctactctgctttctgaagt

SEQ ID NO: 713456 - DNA, 909 bp, Homo sapiens
gctgcggctgcagaagtaccgcctgcggaagtaactagccaagatgctgtccgtgcgcgttgctgcggccgatggtccgggcccttcctcggcgggccgagactggtcgtccagaaatgctatgggttcaatcttttcattagcttgcaaaggtaacttgccatgcctcgtaacactcatctatcaacaagactagggactagctgagatgtacctctagttactatgcactgagcgtacttcttgcgagctggagtacctctagtctagatcttgcaagaaacctgggcgcagtcttaacgtataggtgcatggtgattgccgcgcggtcacactagggcctgaggcaaatgtctcagagcagcagagcacaatgggtcagagactttagcatgtcaggcctatacacagtggcatatggtccttggacacacctgtggaaacgcgtgaacggatgctctgggtgcttcggtcagcgtgttcgcgggaacaatgggagtcacaaccctagactctcaacggcacatgggacgaactactaaggtagcatcacaacgcggaccaacgtgacggcccgactagtgtcagcgaacgcgtacacccaggatccggcgtggcagcgacgtgctgtaagcgcgactcaggaagggtaaggcctatcagaacaccaagctccccacacgcgacctgacgcactgggagaagaaacatcggaagaatgaggaacaacaggagagaggtaacacccaacgatagcgcgggcacaccagcacaaccgcaaacgaggacagagctagcgagacccaaccagtaccggggacaggcaggcaacacacgacgcgcaacagccgagcagaaagtcacgagacacccctcatcggcaaagactgtcaccacagcgcgaccgca

SEQ ID NO: 713457 - DNA, 407 bp, Homo sapiens
cggcgccacagcttctctcatgcataatcgcttcctctgagataccttccttgaatggctacctatttctcctaaagcacttgtcctattgttggaattctatctttgtctgttcaggttattaatatttatctctccaaatatcagagaccattcctgttatgctcatcactgttttcccagaacagtgtctggtgtatcatatggctcaacatgcaattgtgttgtatgatataactatttgactgaactgcattgcccactgttacaatcatcaaaatgagaatttgatgcccttggaggaaactgacttagccatgtcctaagctgactctttttatagctgtttgcttcatatacatttagaaaaatacatgcttggcctggtgcagtgggtcacatctgta

SEQ ID NO: 713458 - DNA, 741 bp, Homo sapiens
ggcgaggctgggggaagcggggcccaattacggatcccgggagttacaggtgccgacgtgatgtcgcttctctggtgcccagctcccttcctggtctggagactagctctgggggtgggggggcccccacacgctgtccccgttccaccctgcctgtgctggcttgtctgtgcctgtgtccagagccctgtgtgggggaggatggtggccaccctgagaccggggaggagacgggcgtctgcctgggttggcgggagaagccgcttaatggggttgtggtcggtccagacacctttgttctccaggggggatgggcgtgaggggcaagcaaggagaattccccaccgtttgagcaaagaacctttttctgtgttttaaacacattcagggtccttcatttttcacatggggaattacaaggtgagtttgtggaaaccttaaaaaaaaaaaagaaaatagcagaaaaaacaatttgtggggcgcctgtggcccggagaaaaggttttttttcgaaacaccaatcgtggtggggggggcggcggaccccaatgttgagtttatgtgcaaagtggggtcataagcgtgttcacgagggagaatcggtggtgagaagacggtgtgtgtttttcccccaataaaaaagggcgcggggagacagggggtgtttggaaaaattcgagggggtctgaggacatagggggtcttgagagggtcagggacggattatgtgggcgcgtggga

SEQ ID NO: 713459 - DNA, 343 bp, Homo sapiens
tgtctgcagcttgtcctgctacatttcctggttccctgactgggaagtgaggtgattggtggatggtcgaggcagctccttaggtgacttaagcctgccctgtggaacattccggtgggggactctggccagcccgagcaacgtggatcctgagagcactcccaggtaggcatttgccccggtgggacgccttgccagagcagtgtgtggcaggcccccgtggaggatcaacacagtggctgaacactgggaaggaactggtacttggagtctggacatctgaaacttggctctgaaactgcggagcggccaccggacgccttctggagcaggtagcagcatg

SEQ ID NO: 713460 - DNA, 267 bp, Homo sapiens
aggaccggggaagggtggcctgagagcagcgatacctctggggtcactgtccccggagggacttcacctggaacaagagctggcaggcagccgcttgccccgtgaggcttgtcccctgcaggcgcttcgccggtgagtgtgcgggctcggtggcctctaagtctctcctgtgagcacggtgctgcgcgtgcgctcgtcggcttaccgcggcggccagtcccttctgggtcgtaacgggtacctgagctcaaatcttcgtaatcctag

SEQ ID NO: 713461 - DNA, 274 bp, Homo sapiens
aacatttgtcttattcatatgttttgcccctacatattggaagaatatttgatagactcatttataattccacaaaatttgaaacagtatatttttacataggcttcttttttgctttgggtacagggtctcattgtgtcacccaggctggagtgcagtgacatgatcatggctcacagtagcctcaacctactgagctcaagcaatcctcctgccttggcctccctagtagctaggaatacaggcatgtgccaccatgcccagccaatttttt

SEQ ID NO: 713462 - DNA, 157 bp, Homo sapiens
acaacttcgacgctcggaccaggagcgggggaagacaggatacgatggttgctgtggagacaggatgcggagttggaaaggaagaaggagctcatgtgccaggaacagattagcaggtggggggtctcaagtacgagttattttccagtgaaaacag

SEQ ID NO: 713463 - DNA, 561 bp, Homo sapiens
gtagcatggtggtaaatctctagaacataccaattatctgggctacctcccccgagcacatgtgacgcatgtggatttccaaacatgccagaagtgtatggttcccaactgtactaagtaggtgggaagctgaagtcctcaagtgtacatcttccaacttttcccagtctgtggtctgtcttgggatccagccaataattgcctgaacagctcactatggcttcgttgcttttggtctgtagctctctgagctcctctatgtgcagcaatcgcagaatttgcagcagcttcattaagacactgcatctcctgtgtcaaaaccacgaatatgttggtctacagcaacaggtaagccctctttggtatgctttggccttagcaactgcatcctgtgtcaggcgctcctgaaccaaaatccgaatggccttaagcattacccaggtaatcatcatgacgctgaatctgaagccaggtaagccaaagccatcacaccagccttaaaatcaggatcatttactccaaatggctcaatggtactgcattttagttgcatagtccgca

SEQ ID NO: 713464 - DNA, 228 bp, Homo sapiens
ccctcgtagctgcacgaagcgttcagtacgggatagccctctgccgagggctcacaatgatgctgttggcattttgccccggagtttcaggtcctggcttgggcgtctctcctgccaggggctctgaccctatggggtcacgtggccccagccccttccagagcgctgtgagactgccctattcccgcgctggctctgcaggggccgcctgggaccgagcgctgtcca

SEQ ID NO: 713465 - DNA, 791 bp, Homo sapiens
cggaagagtgggccgttttaagaacccgccggggggagggattcccctctccaaccgggaaatacaaaggtggccaattataataggtccgggttctccccaagaccccgaggcttgttggttttaaaattccccgccaagggtttgggggccttgggacgtatttctttttggtaaggggccgcttattttcggggttttggccaatgtttggggttaaccctcatggaaggggccataaactgcagttcctctgcagtgtcgagcactctagaatgattggttccacgcggctcaagaatacggccccaggagctgcttgttcagggtctttcagttagagacatcatactgacttagcgtccgccatcgtaagacggtgagggatcatctagacaggtcattccacagcaaggctgtgatgagcagtatagtctcgtgatgtatcaggtcagcaggctcacagtcactagcattcccctcacatgggccagtaggaaatacagccaaggtattttgtggatgtgacagaaagtacattccctatagggctaagtccgtgggatagtctcccatcactgtgggtgagcctgacaagatcagtcctaaggcctatagttcgtagctaagggtttccgtaaggcacaggctctgcctgagtgcaccagtgcagtgctcgcagtgagatcatcgcgtcctctctttttgatagcttaccagcgccacgtttaagcctgtaacagccgctggtgcgtacgctccagccttcccgttgcaatctatctcaatgt

SEQ ID NO: 713466 - DNA, 204 bp, Homo sapiens
gtggaactaattgcccgaggctcagcaaggccaagaggagacagccgtgacggtaaacctcccctctaccagcctccaagccccacgccagcgagcaggctgcctgcccaccccgatgtcccccagccagtctgctgtgtcaggggcagtagcatgtccaacatctgttatatagatgggggtttttgccaatgcaactgagtg

SEQ ID NO: 713467 - DNA, 155 bp, Homo sapiens
  misc_feature (1)..(3): n is a, c, g, or t
nnnaaatgcagaccttaacaacctcaacttgccccatcacaacaggtccacccagagcttttaacgtgcagacaggcatgtgaacctctgataaagagagggaaaatggagaggcacttcctctgacttaatacaacccttttactttggagaaa

SEQ ID NO: 713468 - DNA, 149 bp, Homo sapiens
tagctaagtttttgtattgttagtagagagggatttgccatgtgcccaggcggttcacgaacgtcctgagctcaagtgatcctcctggcctggcttcctcttggcacacgggcgttattctctctcttccaccgaggacttctctgaga

SEQ ID NO: 713469 - DNA, 685 bp, Homo sapiens
ctgaaaacaccgtccgaatcgttcattcagaaatatcgggtcgactgctctgttgccaaaactcgagaatagaacttagacgtatgtctgagtccctgagatcacatgctaaagtcgatgaaaagtaaccactgccactgtcttgatgtcagaacttttacaggtacagaaaataacagaatagccttctgataatgaggcgtcctgttagagtttagcatgagattctaatacttaccgtaggacccatacctacgtggttcatctacaatggttaccataaaaaatctggcaggatttaagaagctcaagtcagctctatccttatgagctacgtgacttgaaaagaccagagagaaggaaacgagagcatattaagtccatgccagtgtgcttggctagagatatgatcaagcgactatgtagtagaccacaaggttgcaaagaaacacgtatgtcacgcgctagcaaacatggacgtcgtatattcctaaaacattactaaggcagcagtttgctcgagtgtcctaatccagctgactgtaattggaagggacacgaggaataacactaacccaggttagtctcctgggcacgagcaccgaagagcctggccgatggcgaggcagtcgctacggagccctaagagggccgcgatcatgtactgacccaggaccgggtgatc

SEQ ID NO: 713470 - DNA, 495 bp, Homo sapiens
  misc_feature (14)..(14): n is a, c, g, or t
  misc_feature (142)..(142): n is a, c, g, or t
  misc_feature (209)..(209): n is a, c, g, or t
  misc_feature (223)..(223): n is a, c, g, or t
aacaattctgggcncggtgaagcccatgcaaacagaattgcttagatttccaaagagggaatgatgttgccttcccctttaaccccgcgttcaatgagaacaacaggaaagtcattgtttgcaatacaaagctggataatanctggggaagggaagaaaaacagtcggttttccccttttaaagtgggaaaccattcaaaaaacaagtnctggttgaacctgnccccttcaagggtgcagtgaatgatgctcccttgttgcaggacaatcatcgggttaaaaaactccaatgaaatcaccaaactgggaatttttggggacataaacctccccagggctttatataccatgatataatttgaaaggggccgattaaaaaaaaaaaaaagaatttaaaccttacatgggtaaaggtttcatgttccctgtgagtgaaaatttttacattcatcaaaatccctcttgtaagtcatttacttaataaatatttcagtg

SEQ ID NO: 713471 - DNA, 367 bp, Homo sapiens
  misc_feature (259)..(260): n is a, c, g, or t
aagacacgtgtgtatccatagcctcagaccactagtagaaatgtctaaaaatgagaatgtctgaactactaagcagataaaagagaaaagaaaaataattcgtcactaacttggataagttatcttgtagggcaacaggtaacattttcaagaaagatacagttatatagcgatttcgctctgaacagtatgcgtgtacacgtatacgcgtaatgtgttcatggtattcatctcataccagtatacttttatctgagcnngcctactatgtgctcaggtggcttaacgatgcatcagacgaataacgacaagagatcctttggccctcaagggacgccttatattctggatagcagcgcatacacac

SEQ ID NO: 713472 - DNA, 575 bp, Homo sapiens
ggacctatattaagactccaatgcacccctcctccatcctctcaggatccttatggctcagtgtcacaggcatcaaggcgatagtctgttgacccttatgcaaggcctgcatggacaccaagagctatagataatattactcataatcagtcaaatgatccatataagtcaggctccccttacctggacaaccagcagtgaatgcctcttttgcacaatccttcacgggctttatcccaggctggaaaccatatcaaggccaagatctcaggacccatactctcataacgccaggtatgcatgcctacctggggcgtctgcccacagcagtgctgcagaaccgttaaccctcatttggacacgatcacttttgctgcgggatcattccctaactgctcctcagacagagtacaggaataacatgatttgttattggcctgtactatcatcaactgccagagcctcctgcaggaacaagggaaccctgaactttcattaaggagagcaagtttgagctctttcacagacccagcttacctgtgggtgctccgcgagtattgggctacatctgtgta

SEQ ID NO: 713473 - DNA, 697 bp, Homo sapiens
  misc_feature (635)..(635): n is a, c, g, or t
tccatttaaaagagttttataacgggatataaatatttaggacacttcagaaccaccttatacttctaatcagattgggggtaccgggtttaaaagtgtccactgtgaatattttcctcatacggtcttccaggttaaagttacttctcagaagacgtgttaaagaagagtgtcaatttggagtctaaccagttatactcctttaattacccgtgagacatcaatctccagtggaactagctttcatagtggataggtttaacagagtgctctctggatagcttgggcaagttgtgctctctcgtgatttccggaacagtgcgtttccctaaacccaacagtgaaacctcccttcgtttcccaggctgtggggctttcgtgcacctgtgccctctaacttttaacagacacaatctcaacagacctgggaccagcgtggttatagctcgtgcatttaagataagccaagctagaaagaaccctcaaggttatctccacccagtatttttatccccaacaacagtctcaagcaattgtggcgacccaaaagaaggattgcgacactactgacgattttgccccggccagtgatccggccctctttgaggggggtgtcatagccatacacttatggntcctaggccacgagccggcggcctggcaacgggcaaactgccgcacgctgcatggcaagttg

SEQ ID NO: 713474 - DNA, 245 bp, Homo sapiens
ggacccctagtttagaagttcaatagcatttctgtagtgctggttgggtagggacaaattcccctggcattggtttaaaatgactttatttctccttcatttacaaaacttagtttgtgggataaaaaattcttggctgacagttgttctgtttaaagaggttgaagacaggaccctaatctctttgggctggtaaggtttctgctgagaagtctgctgtggctattgaaacttctaaaactagg

SEQ ID NO: 713475 - DNA, 156 bp, Homo sapiens
  misc_feature (126)..(126): n is a, c, g, or t
cattataaaacagcctaacttcccttatgccatatgattgccttaaaaagaccagatctcaaggaaaagatcatcaaagagcagagatcttgaagcggcacagttttccagcagttttcgtatttntttttatttacgaatgccatactctgtttt

SEQ ID NO: 713476 - DNA, 719 bp, Homo sapiens
  misc_feature (536)..(536): n is a, c, g, or t
taacgaacatatcataccataccctctacatcgacttcgaaagctgccatagcgcatcttcgctatcgatcgcgccagttcttctccacgctagcacaccttcgctacgtatgtaccatattctcgctacacaccttacctgcccatcaatccccgcattactggcagcaggtagctagcgagagccacaagtcaggccctcttctacaagctccttatcgctgcaccatctattcaggcattaacctgttatcgtaccttcgtggcttcgggtagtaatgtttactggaacactccatcctgagtatgctgccaggggtctttgaaatcagcaaagcaacgtcctcgcgttattcccgtctgactggggtccatttcctcttttattaacggaacagctctttcctcaggagaacctatctcatggatttaggtaggactgactcggtagtgtacataactgtttaatggccagctggggccaggcggagggacagggacgaaagccttatcttgtagaattgcccatttcccanggtgtaaaactcccccactaccagcttcaagctacagacataacatcactgagacgtcactgaccttggactcgggaacagatgagcacacccagctctcacaaacacatccccggtgctgattttaccccatccagggctgggcacatgacccaaagctgccctgaggaactcccatagggc

SEQ ID NO: 713477 - DNA, 129 bp, Homo sapiens
aaaaaaaaccccccaaggttttggattttctatattttaaagccttgggtaaggttattttggtaaataaagggaactgctttttgtctttaaaatgatattttaaataaaacccttactttttgttga

SEQ ID NO: 713478 - DNA, 451 bp, Homo sapiens
agactggcgatttatacgcgactgagaaagactgctgtccaggggcctaagaagaagaagaagcacctccttataggagtgtcctcagatcgaggactgctgtggtgctattcattcctcccttgctaaaacagatgaccagcgaggttgctacactaacagcagctgagaaagaagttatgcttgtaggaattggtgacaacatcagaggcatactatatataggactcattctgaccagttactggtggcatacaaagaagtgggaagacagccccccacttatggagatgcgtcagtcattgcccttgaataactaaatactggatatgaattggatgaaggctccatcatctttaataaattcaggcctgtcatctcctatacgacagaagaaaagcccatctttacccttaataccgttgccagtgctgacagcgtgagtatctat

SEQ ID NO: 713479 - DNA, 133 bp, Homo sapiens
gaggaaacgaagcggctctttccgctatctgccgcttgcccaccggaagcgagttgcgacacggcaggttcccgcccggttgctcgttcaaagggtttgaggaccggcaacatggtgtcggcggtgaataagg

SEQ ID NO: 713480 - DNA, 480 bp, Homo sapiens
ggctgcgtgcgcatgcatggtgtggtcgataactgagtgtcacacatgtgacacacaacggtcagacgagtcgacacgtggcagaaatcatcatctcctcgtggaggtgatggttgtcatgtgtgggtcaccgttgtgcagggcagccccatcctgggtctggagcttccctagacccaggcaccatgcacaggcattccctgctcagttcctgaacccggaccctcctgcctggtcacgtccgctatcgcaccctcctgcatcacggccgagggcccaccctgggctcctttaacttccagggtgttccaggatggtcaagttccagcactgagaacagatcatgtgtgagtgtgagctattgtggagagccgtgtctggtgaacctggttgaactatggtggtgggacggtgctgatgcaggggagctacagaggattacgagcgactcgggtctgacagcacaggcccaggcaggcg

SEQ ID NO: 713481 - DNA, 169 bp, Homo sapiens
ttgttaccttgtgaagaaggtacgacagtcttgattttacagaagaggaaactagagatgagattccctggcgcaagtatacactgcaagtaccagatagcccaagtgaccaaccctcgtctttatgacgttaaaccttatgcattccgttcaaattaaaggaaaatga

SEQ ID NO: 713482 - DNA, 777 bp, Homo sapiens
acaaaaaacaaaaaaaactttaatatagctaggagatctttccctatcagaatgctgagtattcattcccttgttatatatagctacatattattacactgcatagatgtacagtggcttatttaatgagttttctattgatgtgcatttaggttatttctaatcttgtttggatacataaaactgtagtgggccagacgtggtgactcatgcctgtaatcccagcactttgggaggccgaggtgggcagatagcatgaagccaggagttcgagaccagcctggccagcatggtgaaaccccgtctctattaaaaatacaaaaattagctgggcatggtggcaggcgcctgttatcccagctacttgggaggctgaggtgggagggtgtcttcagccttggaatttgaggctacaatgagctgtgatcacaccacctgcactccagcctgggtgacagaacaagaccctgtcgcaaaaaaaaacaaaagacagaaagaaagaaaaactttttgggggcggtttgggcccgggaaagatttttaaacacattggttggggccgggggcccagtgggacggtcacactggggacaagcgagggacccaaggagaaacccggggaaagagaaagggggcggtgagatttcccgcccaatataaaaaaacccccgggggacaaccaggacgggcttgaaccaactccccaagaggggtccaccagaggggcataagggggaccataaacagggagtccaaagaggcgcaaagtaaataccg

SEQ ID NO: 713483 - DNA, 962 bp, Homo sapiens
gtttatgtgccaccaaggtgggcagcgctgctgtacgcccggctcctcgccctggacatgtgtggggtctgccttgtcaacacccttgtgggccctgcccatcatccacatgacaccctggcctgcagagccctggctgcacccggaatgcccatgagtgggctacactgtgttgtcagggtgtggccggctggacgtgctctcacacgacaccctcacaccagtgctctggactccaggagacatttggatggcagcgctgctgcccgcactactggtatattggggcccggggagctggggtcatggcgttcacgggggctccacgagctacacaatgaccacatgcataaccatgccgccatcgagatccgacacatgagcagactcgcattcggcgaggacctcgcgtccacatagtaacaccccagatattgacccaccaaccgcctaggaccgaacctagagccacagaattatcgcactaccatggacgggacacaacatcccgcaaagacaaaaaaactcaactgacacccaatgcacatgacagccaactgagggacactccaattcccctgaacaacaaacgcacacagcaccagaggcggatcagacagacagacgaacgccgtgaaatactagcgcgaacatgccgcgccacacaaaacggcccatgataccaccacgagagcaacgttcaaaagctagaaccaaagagccacgaaccatgacacacaccaaggaaaagacactcccataacaaacgtaaaagcaacaagcaaacacaaggagagatcgaacccgacgccaaaacgacgagcacagtcgaacaaacagaggcacaatgagacatccaacagagcagaattgccaaatcaccaagacctacaactggacgaaagtagccagacccaaagacaagagagaagaccaccatcgacaaacaaccacaggtatca

SEQ ID NO: 713484 - DNA, 200 bp, Homo sapiens
  misc_feature (93)..(93): n is a, c, g, or t
  misc_feature (171)..(171): n is a, c, g, or t
gaacctctgggctctcatcctctcctattgacagtgaagcccatggcaaatagaagaagctcagtatcggctcctcccaccataaccgcgttnaaatcgcctcctggaccatagtttcctccaccataagtccccccatgctcctgctaccaccgaagttcccactcctgngcgaaccgtagttagaagatcgctgttat

SEQ ID NO: 713485 - DNA, 1180 bp, Homo sapiens
  misc_feature (697)..(697): n is a, c, g, or t
  misc_feature (723)..(723): n is a, c, g, or t
gcacagcgctggcgcagtctgacaggatagggacggagcctagatggcggcggacgacggatgacgactcggcgtgtaccccatcgtcggtgctcatatgacgaactccgcgagtgaggacgtacagcttcgcgctcaatagcatcaaggaagctgtcccaccagtctgccttgtgcccttgtgggttgaaaggagccgaagtgagcttctagcctttccgttacagataccatcgtatgatgagggatgaggtcgctcctggccctgcgcagaacatgctgggcaaaccattcagcatagctcctggctgggatggcccagcagctacgtgacacctgcacttgcctgacagcacgctcgggagtgcgcctaggtcccatcagcttgcgacggcagacacgatgggtgcgggtagcaagtgcacgttggcacgctcctcttaccgggggccactcgtcagcgatcggagcatctacgctcgctcgtgatccttgggagggccgcacgttcgtgtgctcgcgtagctggaaaggcgcgcgtaggacggggactggctgacttgtgtttcgagccctcccctgtggacgctcggacgctgcaggcctgctatctccggtctgggttaccccccggaggttgtcccaggtgccttgtgcaaggggccggaaccgtgtcgcagcagataacattcgcggnaacccctggtgcgtccagtattgacnacgccaccattggttgacgtgcgtgtgctcgacgagaccgatccatagctgtggggcagttatgcgcataggttcgctgggagactgggaccacacgttccaaagacgtggagagtcatcgcccgcatgtaactccaaagccttggccttctgtacgaagcaagggactcgagtagcggatggcatgggacgggtcggagggcgttgcgttgaacattacgcacagcttactggccccaaggaaggaatcctgggacgagccctgggtgatggccccactcatgcgccacaggaccgctggaagaacaaatccatgggcgacgtccggtaacaatggtggctgacaagttcaaaggaggtccagacaagccaggggcggcccgaaatcaccacaacgacctggaccagcatccagaaccggagaacgatgggaagcgaaggaaggccgaacactcca

SEQ ID NO: 713486 - DNA, 1815 bp, Homo sapiens
tgggtcttggtaccaaaattttattaaaagggttctttagaaaagcaacatccaaatccccaaaatacaggtgccaagggaaacccgtttatgtgcgtggggggacgtggggtggggacatgtggcagggggctctctgtggcttccccccccttcttgtgttccgtgaaatgtgcggggtgtgggtgggcagatatctctctcattcttgtggggttctccaccaaggtgcctcaggttgtgctcagggcgagggggacttctttatagggcgccacatctctttaccacgtgtgggagtctcccagggggacaaacatgtagattttctcacccttgtagatgcgccacaagacaacaccctgtgtgtcttagaagcacaaacacgcgtgtgggcgcacacaagacatgtgtgtctcaaggcgagtagagaggtgtaaacacagaggggggtctctcgcggctgtgtgtgagactctcactctcagggggcacactctcccacacaaaaacctctctcagtgtgagagatatttagcgccctctctgtcgtctcactgctgagaaaagaataatactctcacagaagaacacaccacccagtacataacacgctctctgtaaaagcccgttgtgtgttgtctccccccacaactctcttctctgcagaggggatgatgatgaaaacaccccgcgacctgatgtgctcacaacaaccacaaagaatatgatcatgatgatgtctgccccctcgtgctgataacacaagagacaaaaaaaatgcgcctctcctctccctcctgataaggagaagaaggtagttgtggtggtcatcacaaccgcgccaaaagtaaagaatacctcttgctgtgcaccgctgttgggggccccaaaatgtggggccgcacacacagagaaggagaaccacctcttcttaataagtggttgtggccgcccaccccttttatatattacagaagagaacaaaatataagaagcacccttcttataagaagaatgtggtgggcccccctatctcctgttgagtgaaaaaaataaggtcgtacgaagaataagccctcttcattcttttacttgctagacaaaccctcattataagcagacaggagcaaagtctataccgaaagtattactcccccgcggaataaaaaatcatcgtgcaggaggcgagaggtgaacacccatatttttatattagacaaccccgaagataacaacacactatatttctccggtggaattatacagcggggaggggaaggggactcataacagaacaaaactatacgaaggaggaatatcgctggagtgggcacacaccaggggggaattatgtgggggagattggaattataacacctctttgtcaagcaagcaacactcactattcaaatgaaaagactctaccagagaaaagagtaatgaagccgccagaagtatattatacagaggaagacagaagtactcctccgcgagcaatagatgaattagacagaaacaaaacagtttcataatattaaagaagagccgaccgacgagtctttatgataaaaacgaagaagtgtgaccccattactaagggactcgagaacgtaaataagtattcacccatcgtatgcatgagtcggagagaaaaaatacttgggggacgcacggtgcagacactatatctatgtggcagcagacacgtcacgaggatagacaaaataaaccgccgggagttctattatattaagtcagaccgtggtgggtatatatacccccagcacgaggagtgtatttcttactacaaag

SEQ ID NO: 713487 - DNA, 209 bp, Homo sapiens
  misc_feature (94)..(94): n is a, c, g, or t
  misc_feature (103)..(103): n is a, c, g, or t
  misc_feature (148)..(148): n is a, c, g, or t
  misc_feature (177)..(177): n is a, c, g, or t
cggtctacctggttagaaatgacttaaagacaatcatcgttggtattttctgccctatggatcattgggacatggtctcttataggaggaaggngggcagatngaaaaacaaatataaaaacacagtcactgaagatgtggccacggngaggaccttgcagagctggtgttgttacnagaacacactcctatcaacctaagcatggttc

SEQ ID NO: 713488 - DNA, 202 bp, Homo sapiens
gtgactctacaggatcttaccagctactcagtgaggcaactcagccagtatcacttggggttaggagttcgagaccatcctggcaacatggtgaaaccctgtatctgctaaaaatacaaaaattagctcagtgtggtggtgcgcacctgtaaatcccagctactcaggaggctgaggcaggagaatggtgtgaaccagggag

SEQ ID NO: 713489 - DNA, 547 bp, Homo sapiens
agaggcaaccctagagatacacgataactagtcaacaaataagcaatctatatacaggttaaccaagcgttacacgtgacacactatgcaataaaacataggccaagtcaacaaagtcctcaggatattatatatcttgaagactatgtgggaacttcacgtcagttatacacgtgaagtgccctagaggaagacccccaggcaaaattaacactactcccttagtgtcaagagcttctagcccaagtcacagaaactcaaaagagatctgactacagggaatatagctgctgagtcatagagagactcaggtctcaagtgctgtaggcgaagtaatggtgtgcacaggatctacaaagtctattacagatcaagtacagaaataaaccaattcttacaaagatcatgatcatgaagaacacgcgaaaatgaaaacgggtgatctgtaggatatcggtgtgcgtggtgcactatcactcagatgggtacaaatgagttcgcatatcataccaaatataccataccttgttagtacaatgatattagc

SEQ ID NO: 713490 - DNA, 178 bp, Homo sapiens
  misc_feature (104)..(104): n is a, c, g, or t
  misc_feature (162)..(162): n is a, c, g, or t
  misc_feature (164)..(164): n is a, c, g, or t
ccacatccctctctgtacttacagcccccaatggtcccccaaaaagaccagagcccaagaaaggatgatgccaaggcagcccccaaggcagctccagctcccgnacctccccctgagcctgagcgccctaaaggaggtcgagtttgatgcttccatgttcangnttgagttcacacct

SEQ ID NO: 713491 - DNA, 740 bp, Homo sapiens
gtgtcgccgctctgccgcttctgttgctcctgaggctgctggctgaggccggaggatcgatgcggcgtgctggcggcttgcggctgatgagggctggcgtgatggtgagcggagcgggacgagggaacgggaggaagcgagcgaggagcgcgcagagcgcgcttttccgtccgcctgaggagccgaatgcagccccaggccccgccgcctgccgccttgccctgccggacaaagcctgagatgcctcgcgcccacagcgcatgtccgtcgtcatgccggcatgcgtgcaaccagcctcagccatgagcccgctgccatcccacaccacgacacctgtggcccatcagctgacttcccgcgcgagcttaccttcaatagagctattgcaaccgacgcccctggggtggactgctctatctaccaacgcacacgctggtgacggcaagctctgaagtcgatttactgcacagcaaacgttttcttgttcggcatccgtacgcaaagttcctccccatgtgctcatgacccccagccgtgtccgaccttgccccatatattccccagcgatgtcacgtatgccgctggacacccgttaagttgacatgacttccaagagctacgaacgtaagacagatattgacacaagctttgacacaagtccacgtacagtgaaatcattgcagtttggcggattgcatgtctccagttacggagcattggaccagtcttgacttcttcct

SEQ ID NO: 713492 - DNA, 154 bp, Homo sapiens
gaaaaatctctgcgtcgatctagaggaccccccttccccacagtgagcagagagacatggacttctgcaagttgctagacaattaaatggccaagtgaaactaaagtgaggtaagggtactgatgtgaaaatgctgagggtgtgatgaggacaa

SEQ ID NO: 713493 - DNA, 102 bp, Homo sapiens
ggccgcgcggtgaggttgtctagtccacgctcggagccatgccgtcaagggccccctgcagtctgtcaaggttttcggacccaagaagaaagccacacgttg

SEQ ID NO: 713494 - DNA, 320 bp, Homo sapiens
gaaatgtgatgctggggtctgcttggcttccgggggggtgcctcgggaaacttaccatcatggcagaaggcaaagggggagccggcccttcacatggctggcggtggtggtgggggcgatatggggggacttcccgcccccttttaagtgaccagatttcatgagaccaaccccaagagggagctctgcccccatgatccagtcccctccccccaagcccccccgccagcattggggatgacaattcaacatgagacctggggggagacccagatccagggggagacccagatccaaattatgcatttttcccctaatta

SEQ ID NO: 713495 - DNA, 2020 bp, Homo sapiens
gccagtgaaccccccaaagctggtttcaagccaaccccactggcctccaatgaccgtttttcaaaaaacaaaaaaaaaaaaaaacaacaaacaaaacaaaaaaacaaaacaacaaacaacaacaacaacaacaaagagaggcgcggcgcgcgcgcgcgccaaaactctctctctcctcccgcgcggcggccgccccgtctccccgcgcgccacccacccagtctctctctctagcgagcaaccaacacggcggcgcgccctcacatacatagtagtgtgtgcgcgctcgtctatatctatatatacgcgccacaacggcaaccgagcgcggcgagcggcaatctaacaaacacacgcccgccatcatatcagcgcgcgccgcaccacacccgccgcgaacgaccaaccagtgagcgacgtctcctatctcgcagacaaacaagaccccccctatcactctctctctactcgacgggggagcgagagcgacaccacaccataatagccaggcgctagacacactacactacaaccacacatcttatatatcatacttatatctcatcacacactactctgcacctctctcgagcgcgagcttctataatattcttataccaaatcatctctcacaacagagcgtcgtgctaacatcacgacacgagccgtgcgacatacaccaccaccagattaccaccactctgacacaatcataagtaacgctagcgccccacaccgccgacgtacgccacacgaccgctctgactctgacgcgcagccacatacactaccgagtagtagtactcatatacataatctgacctctgactgacatacagctcaacaccactaataatattatactaacacgcccaacgagcagcagaccctaccaccatcagataaaaaaataacctcccgtcttcggcctcacatcatacgctgagcatcaactcagatccaacatcccaaccaccaccgcaccccattactatcgctactcactgactcccatgacaaccactcaatacctctccaacctctccctacacttctcccctactcaccaactccctcactatcccaccaccaaccctcatccttatatacattacaccaaacatctattcctctatgataatttcacaataataacctatcactctaccacaaacttcacaataactcatactaagacagccaaataaatcaattatacaccacaccaaccactcatacccgtctccaacctccacatctaacacccccacactgcacgcagctatccacactccgcctcacacaaaaactcacaattcacataactctacactcataaacctactaactccttactacacacacctccacaacatcactgaacaatacgactgcaacacttcactccacacactacctaccacgaatgcaaaactgaaagctaaatagactacacttctatccccacctaccagctgtcctaactctccaatcatcctccacatcctatactctctcttactccacctctagcatccacacatccgacataaggcgtcaggtgcgactgctctgacgtcgctggactcgcagtagatagaggtagcggacattgtagagtcacaacgaaacagagccgaaagacaccacgatagcgatgcgagttagcgatgactctccagagaagcaacaaggagcatgatcggtatatataacttgatagaacacatgcacgaattaattaacaacgatcctctataccacgaatgctgagtacaacatatcgattagatacaaccgtaatcaacatcgtaactacagatcacatgaaacgaataagacattcaatctcgctttgagagtaaagtaactagtcatacgcataatataagcagcttcatgacacgtatagcctactctcctgtgatatgtcgtatattattcatgcgttcatcactcactacacctcatcacaagtgacacttcagtgaggatatgttctgacattactcagtacaga

SEQ ID NO: 713496 - DNA, 115 bp, Homo sapiens
gagtgtgggtttagtcaatggggtttgtggggttttcttctcaagccttctcctcatttcatgaggggttccagtcattgcattgttcaagcggtgtggtcagggatgtgttcat

SEQ ID NO: 713497 - DNA, 496 bp, Homo sapiens
gtttagtggcataatgatgctcaacgtgaaatggggcttcaccttgtacttgggcattgggctctggtcctcagtgcagagatcctaggcaagaggatcaatggactgggcccagccaagttgcttaaaagccagtgcagcactagaggaccagttgcaagtccagagtcttgggaaacggaggcaaaatctcaacccctatgtatagagcaacatgacgctcggagggaaggacgaaggcaatgcagtggtcctgggcttctacgttaatcctgagagtggccccgcaactcttcatctttctcttccctggctttaggcatgtatcttgcaactagcacttgcttaatggatttgacacacctccctacacttacccctttccatacaaagtgccaggtcctctgaaagctccctatatcacctggccaattggcattttcacagccaaggccccaaccaggtgaggtccgcctctcaacctccaccttcgccc

SEQ ID NO: 713498 - DNA, 364 bp, Homo sapiens
  misc_feature (67)..(67): n is a, c, g, or t
  misc_feature (101)..(101): n is a, c, g, or t
  misc_feature (109)..(109): n is a, c, g, or t
  misc_feature (114)..(114): n is a, c, g, or t
  misc_feature (137)..(137): n is a, c, g, or t
  misc_feature (198)..(198): n is a, c, g, or t
  misc_feature (221)..(221): n is a, c, g, or t
  misc_feature (269)..(269): n is a, c, g, or t
  misc_feature (340)..(340): n is a, c, g, or t
tcctcctcagccagcatcactggtgtcctaacaggtgaggcaccaggcaccgggtggggggtgactnccaggcgcatgaggtattgtcctggcccttaaanactcatanctaantaagatggaaagacaggtaccanggaacacctatccagggggccacctgcaaaaattcacatcccacccgccacctgccaccantgtgaccttggacagccactgancacatctgagacccgtggtccggtgtgtaaatgtgacgtcaaatgccnggccaaaggttgctgtaaggtcatgggacaagatccaaaatctcaatatatatatatcaacccggaatccngacgtaccgcagctacacttccta

SEQ ID NO: 713499 - DNA, 198 bp, Homo sapiens
tgggcttttccccccccggtttggttggaaaccaaaaaaaaaaaaaccttttaaaacaaaaaaaaaaaggtcccccccccccaaaagcccccccgccaaaaagggcaaaaaaaaaaaccccctttttttaatgccctttcccccccccaaggggtttttcccaaggggaaaacaaaaagggggggggaggcccccccc

SEQ ID NO: 713500 - DNA, 996 bp, Homo sapiens
gcttcccgtgtcgggtctcgctctagtgtccgggttcttcgcggttgatcaagatgaacccgactcttcgggaaagcgaaagccaaggctccaggcagtccaggcttgggtgttctgcatgggtcacggtggacaggtagagcgagaatcgcattgtcaaggaagcattcctcgatggggtgctgtagctgagtgaatgtgtggaggttcagatcgagtgatgatgcagagagggtcctgcaatggattgtggctcgagcagaaagcgttgctcatgtctcaaaagagcatccagaggcggtttgatgcggcgagcgggaacgaatctgtgcccaagtgagctcatctctagcaggggaaacatgcgccacctgtataccatccaggtctttgagaggacatccaaagaccaccggtttgatgctattgaccactgggattacaagggagactgaacgtacggcctacatggcaagtgaggatcgccagattgggatttacaagaccagctagagggatctgatggaatcatggcaatgcttcatggaagcggtgcttgcgtttgtgtcccagaactggtgaagagtgtggaaagcaagtggcatgcctaatgggtgagctcctggtcgagaaacagtctcattgcgtacggccatttgcctggattccgagtgtcccctgtcaaacacgatgggcctggggcggcactggtgaagaacccgccacagtgtgctcccgatctttgcaatccacttttggcgagaactatctctccatcgtcaacaaagatccttcccgcagagaaagccatttcgcacactcggaggccacacactcgcactccacacaactacgcccctttaccacatccatcggcgcgtctttgttgtggtaatgttgtgtcatcacaccacccccagtcagcccatacacgaccaaccatccacaccaacaccaccacctcatcacatcgccgcacccccacagacacaacag

SEQ ID NO: 713501 - DNA, 743 bp, Homo sapiens
ggaatgaagaggagctgggcagtaactgccaacatgaagctggagggttgggattttgttgttttttgaggctcaaaaaatgctgggagaaatgaaaatgctgtgggatagggctcctgttgcctttcagaggaagtctgacactacagcgttggcacagtgccgtgaacagtggaactgtgcccaagggactctgattatccaagcatcttccgaagagtgttgtggtcaccttaaagagacttccccttctggaaatgtggtgacttggcttagtcttcaaactggattcatggatttgaagtaactgtaaaccctaaatcttcattttcatcccagatctggttgagtataaacctcagaattgtaggggctggcctgagctgtttatttcaaaagatactattcaatttaaagctatttttcctcagagtttttgttttctatatattaagtctaaattaagttttctactcattaagactaacatctccccactccatccccactgaaatttgtggaagaaaatttagtacttggctctgaggttgccagttatacaataatctattttgcatatgaaagtttgtatttaacttttttgttcattaaaaaccttactgatatggttataacttcagacagtttagagttggtcagaacatattttgcaagatctagtgcctagtgttgcttttctgatgtaataaaaggtggtctggcagaacctaaaaaaaaaaaaa

SEQ ID NO: 713502 - DNA, 734 bp, Homo sapiens
ggaatgaagaggagctgggcagtaactgccaacatgaagctggagggttgggattttgttgttttttgaggctcaaaaaatgctgggagaaatgaaaatgctgtgggatagggctcctgttgcctttcagaggaagtctgacactacagcgttggcacagtgccgtgaacagtggaactgtgcccaagggactctgattatccaagcatcttccgaagagtgttgtggtcaccttaaagagacttccccttctggaaatgtggtgacttggcttagtcttcaaactggattcatggatttgaagtaactgtaaaccctaaatcttcattttcatcccagatctggttgagtataaacctcagaattgtaggggctggcctgagctgtttatttcaaaagatactattcaatttaaagctatttttcctcagagtttttgttttctatatattaagtctaaattaagttttctactcattaagactaacatctccccactccatccccactgaaatttgtggaagaaaatttagtacttggctctgaggttgccagttatacaataatctattttgcatatgaaagtttgtatttaacttttttgttcattaaaaaccttactgatatggttataacttcagacagtttagagttggtcagaacatattttgcaagatctagtggcagaccaccttttattacatcagaaaagcaacactaggcactaggtcgac

SEQ ID NO: 713503 - DNA, 500 bp, Homo sapiens
cggactgactgaaaggagatgcttattatactgtagaaggataagcactcaccataaaatctatccagtgtatcacttgcatgagctcatgtagacaatgaagacgacaacgttgtctatagccttagaacaactgagtacaaattatttgggacaagttaaacaacgtctaaaaacaaagtctatgcaaaccacttaacaatcattccatagtagtttatcaggtcacgtattcgattcttatgcttcttgccagaaatacattatgataaagtggaaatacataacgatgaagtggaaagagcaaacacttaggaatcaaacagagttgcaatcaaacctgacatgtactgtcatgaatactcacaaattatttagtatacctgaatcttggtttctttttataactgagtcatactggttacatctcaggtagtttgaggattgactaaaaccatgcgcgcatgtcgtatgtgactgaataacaatttaaactctgc

SEQ ID NO: 713504 - DNA, 149 bp, Homo sapiens
tggtaccgagttttctctgtggggaggggagcaggcaggaggagcagaattgccaacattgcacagccaggcgtgggagcagcctagggagagcccccatcatgcccaccacccacatccgtactggcccgcccccacagagagagcgt

SEQ ID NO: 713505 - DNA, 142 bp, Homo sapiens
tagttttaagacagagtttcactcatcacccaggctgtctcgaactcctgaccccgtgattcacctgtctcggacttgcaaggtgctgggattacaggcgtgagccaccgcgcccagcccgatcttgtatcttctgatgctt

SEQ ID NO: 713506 - DNA, 110 bp, Homo sapiens
cttatggtgacccagggtgtccagccggcgctgttatcatggcgcgggtcggggggggcaggggagcctacgtccagtccccctgattgggcatgtactcgggcagcagc

SEQ ID NO: 713507 - DNA, 345 bp, Homo sapiens
  misc_feature (149)..(149): n is a, c, g, or t
ccttaccttagataaatccctgaaatcttgtgtcctgattgattctatgcaaggcttgattccaagagtgtgataaatgtggttgcatctcaaaactcagaagtcgctctctgctggacttcactgaatgaaatcttcatgagaacgantaaacttggaattcacatgagattctctcgctcctttgtatctcatctcttacacaacttttgtgtgggtttttgctcagcttaaacaatgacaggatctgtccaaatgtcaagccggagtatattgagagcaggaagagaagatgcctgtctactgcagccacatccatcacagcacgtgaaatgcattgaacgc

SEQ ID NO: 713508 - DNA, 983 bp, Homo sapiens
  misc_feature (449)..(449): n is a, c, g, or t
attgaaatgacttaatagaacccttgtgtcctgctgcaaaaatttttcctctctaaagaaaaggtttatggtggcaaatgatgtttattttattttgtaaaaaaaaaaaaaatgtcctatgtactttgggtgtaaacccctgaaaaatctcgtggtcatctccgagaaattacctgtccaacgggtttctctatagtgctgatcgtcttggggcaaggggcaatttacattgaccttgggtgttggctctcctttggcagctctttttttttctccccccaattttctttccttaattagggaaaacaaaaacaaaaaaaggggttccccctgtggtgtgtgggttctccaatatccccgcggtgtggcgagaggggaaaacacttgcagagtttccccagaagaactttggcgagtgtggggggactttcactcaaaaaccccctggngtgggcgccgagcggtggtgcgccccgtgtttactccgcatcttccttagaacttctcttttcaaaaattacagagggctaacacacatccgacggggggggggagacaatatatcagctgcgtctaacacgcgtcttataatcattcaaagctctacaattccttcttttctcaacagcaccaatttttcatctttatattttatcccccatctttgctatggacccttagagggagcaaatctgggcaagcgaaacctcctgtcaacaccatttccgaagggggggcccctctggaacaaaaaggggcggacccacaaaatcgggggagatggacgccccatatatatacaacaaacccaagaatttcactgtgtctgtgggatgtaataaccccccaaatgatttatgaaccccctcatatttcttcaacgaggggacttgggtgtaatctcggtgtataattcaaaaaagcttctttttctacacacttttttagaagcaccacgtgcaacgcacccacagcaacaggac

SEQ ID NO: 713509 - DNA, 113 bp, Homo sapiens
tcttatccgtttttgttttctgttattttatttcccgagtgaaggtttactgatgacgattcttcaattacagtctgggacgtcttggcttcgctgggcctcctcaacaagca

SEQ ID NO: 713510 - DNA, 197 bp, Homo sapiens
tatcccagttttatcatggatcatcctgaagagtcaagccacaatcactcggtgtagccagcccagtgttggagtgagtggaaagcgaagaagagaagatgaatccatgataaaactgggatacggcctcttgatctgaaggatgccactctctttaattcttcatcaggaatatttgctggcacaaccaagattgt

SEQ ID NO: 713511 - DNA, 121 bp, Homo sapiens
actgtgggcccgttcttttgccatgtgcgagtcatggtttgactccaccgctattccttctttagaatctggaggtcagtggatcaccagagaacataggatttcttcacgttgaatatca

SEQ ID NO: 713512 - DNA, 788 bp, Homo sapiens
gttcctccaaatgttgcatatgcaggagttccttctttttgaggctgaattttttattgtgtatatataccacttttcctttttttgagacagagtctcactctgtcacccaggctggagtacagtgacatcatggcttattttggccttgacttcttggactcaagcaatcctcctgcctcagcctcccgagcagctgggaccacaggctacaacaccaagcctggctaatttttgtattttttatacagatagggtctcactatgttgcacgggttggtcttaaactcccgacctcaagcaatcatccctcccaaagtgctgggattacagacgtgagccactgcgcccagctcactttttttttttttttggtaagagtctgtgctgggtcgcccaagctgggagtgcagtgggcttgatctcggctcactggcaacctctgcctcccaggttcagggcaattttcctggcctcagcctcccgagtagcagcggggactacgggtgggccgccaccacaccgggctaatttggtatttaagtagagaaccggggtttcaccttgttgggccaggctggtctcgaactcttgacctctatgatccgccgtgtatgggcctcccaaagggcggggattcacggcgtgagccagtgtgctggcacatattcttatatcatggtggacccccggactgattctatttctgccttatgatatggtccgggacatggggtatggcttcccttggaatctgatgtctcccttggtttttccctaggggatgc

SEQ ID NO: 713513 - DNA, 403 bp, Homo sapiens
aaccactaaaacaaattcgctggatgtggcggcacacggcgggagtcccagctactcaggaggctgaggcaggagaatcgcatgcgcccaggaggtcacggttgcagtgagccgagatagtgccacatgtactccagcctgggcaacagcagcaagcacctggtctccaaaacattcaaaacagcaatgctcacagggaaccagtcttgtattctatcgtggcaggctttggccagtcatactgtcagggccaaattcctagcaatatcacattgcttgatcaaatggcatatgccttttcccttttcacacggcaccatggccacttcatgccacatgcaaacagcaagcaggcacggtttcccagagtcatcaggctcatggtgaagtttataaaagagtt

SEQ ID NO: 713514 - DNA, 1654 bp, Homo sapiens
  misc_feature (1466)..(1466): n is a, c, g, or t
ggtaatcctgcgtggctctttttgtcttggtgaaagtaagcaccccccttctatctctggtactcatcactgtgggtgccctcgcggtcctatatacacaactcgtgggggttgttgttacaccagccacagttgacatcaactgtagtgggctcccctccctaccaggtggctgtatctattctcactgttgtatgtgtttgagacccaactatttccttggttcgtgttatcgcacacaagggacgacacacaccactgggggtctttgttaagttgagtaaaacaccttctgagtaattgcttggttgggtataaacagaaaagatatatttctcttgtgtgctccggtcgccactaacgctttatgttaccctacgggtgggatgaacagaaatttatcttctctcggttgcctcgctccgcaccccgcctgtcgccgtgtgttgttttttgtgtgtcgcgcgcggggtggtttattccatctttctttttggtgagggtgacaccactgtgcgttgttcttattggcgaaccatgactaatgtcctgctcccatcgccctcatattcagcaccaccggtgtgtggtagagatggttcttccccccaccagcccgcccagcactgtggctgctttgtggggaggtgtctcccctccccccctttgaggttcttcccccctcccctctccgtgtggaggattttcttatataggggctcctcacaaacgatgctgttccccaaaggtttataccctttgggatgattcccccgttgtgaagactatttttctccggggggaaattatttgcgcccaaagttcttcccactacgcgctacaccagagaatggtctcccacgagtcgcctccccacttgtggatgagtgtcctcccccccgcggcgccacatattttctccgccccctgtctgagcagggcgacacactctgtgagagacatggtagagagagtatctctgtgtagaaaatgctttctcccccgctgtccttttgatgagatagttctttgcgcctcctctgtatactcccacagcagagagagaattttttctccacacacgaacacactttgtgccccccggggtgggcccccccggtggggccccccccccactgggctttatagcggcgccgcgagaggggtgtgtctctttcgctctctatttgtcttggtttctctcacacctgatacccccctctgtgtttctctctctttgagcacacacgcgagtgctctctctgtgattgtctctcacacctcttctctctctgtgtgtctcctctctgggcgtgtggcgtgtgacacacacagagagagagttgtgcccactcttctctctctttgtcacagagagtctgtggcgctctctcagagagtgcgcacacacatgagcgacactctgtgaagtgtgttctttgcgcacacacacaagttctaacagnggagacccatcggcttgcctcgctcctctggggagacggacacaccacaattctcccctctctgggccctcttttcggcctctcttggagacccctgggcccaaggccaagggaatggcccaaggtctgttgtttggtttggccccagttccccctcctttaactccccccgactgctgcccttaata

SEQ ID NO: 713515 - DNA, 148 bp, Homo sapiens
cttctgttggtgtcatgtagtaaacatttctttagtttattgaaagaaatgtttacaacatgacaccaacagaagggatcaaagtgtgtcgtgtgtaaacatttctttcaataaactaaagaaaaattattaaaggacgaaaaaaaca

SEQ ID NO: 713516 - DNA, 438 bp, Homo sapiens
  misc_feature (21)..(21): n is a, c, g, or t
  misc_feature (39)..(39): n is a, c, g, or t
  misc_feature (56)..(56): n is a, c, g, or t
  misc_feature (102)..(102): n is a, c, g, or t
  misc_feature (117)..(117): n is a, c, g, or t
ccatcaagctagtgttaaaancccagccctccccactcnaaggggaagctgaaaanacctgtaagagagagaagtttaagtgtgcccatgagatacatgcancccaggcttcctatncccaggtcaaatttggggagcagcattgaatgcagttggggaatgatatggtttggctgtgtccccacccaaatctcatcttgaattcccacatgttgtgggaggaatctggtgggagattattgaatcatggaggcaggactttttcatgctgttcttgtgataatgaatgagtctcatgagatctgatagttttaaaaatgagagtttccctgcacaagctctcttctcttgtctgccaccatgtgagacatgcctttcaccttccaccctgattgtgaggcctcccagccacgtggaactgtgaatccaataaacctc

SEQ ID NO: 713517 - DNA, 973 bp, Homo sapiens
tggcgtcaccgataacggacattacagtcccgactagtgatgcggacccaggggagcctgcggatgatcctcaaaccaatgctgtgggctcagatgcgtgatcgacgaggccagcgagaagagcatcgcatcatagcatgagaacaccgagtaccagtgtcgtgacggttcttcctgattctccggccgaagctccacaggacgacaggtcagttgtaatgcaggccctgcaccagcagcatgctggggctgcgccggccggtggagcaatggagcttggaggccagtgatgcgctgcgctctgagtgttggggcagcccatcctgtcgaggagtgacgacggcgacgatcgactgagtgtcctggctccttcagtggccgccgcagcgtggtgctcggtgatcgagcggggcacggggccagacctaccgtggcagcgtcttggtccggctcggggctgccccgtggtgctcaccgataggctttgtgttgttgtccgtcttatttcaacgctgggggcctcgccttgccaggccttgttggagaggtcactagctgggtccagggacggagcacttgggcagtggtctcggtaggagcccctcggtgagtgtgggtggtcctggtgccttcgcgcagacaagggaagcccggttcataaacagaggaacatggaaccacaaagacattgttaatgcatgttaagttgaatagcctggattatgtcgtctctacctgaccttgggacacaagctggccaggtacctaacgcgaaagccaggttggcatccgtgcaaggacacgccaacaattccgagagtacacagggtacgggccgaaaccaggttgtgcctcggcctggtcgagacaccaggccggttcctggagatcgacacagcgtgttaagcaaagtctggcgtgttacacaaatctacggaggcatacatttaaacgaccgcccgaataatacccc

SEQ ID NO: 713518 - DNA, 119 bp, Homo sapiens
atccgcctgcctcagccttccaaagtgtattttttacactttttgtatttttagtagagacggcgtttcaccatgttggtcaggctggtcttgaactcctgacctcatgatctgcctgc

SEQ ID NO: 713519 - DNA, 406 bp, Homo sapiens
  misc_feature (24)..(24): n is a, c, g, or t
  misc_feature (28)..(28): n is a, c, g, or t
  misc_feature (31)..(32): n is a, c, g, or t
  misc_feature (139)..(139): n is a, c, g, or t
  misc_feature (233)..(233): n is a, c, g, or t
  misc_feature (254)..(255): n is a, c, g, or t
gctaaagaatatggtttagatcantgtntgnnatgaaacatgcatgtaacttttatgaataacaaaaaggttgaggagtgatcgattgtgtatagtttcagcccatcgtttgaacaaaaggaaatgcttgaaaaagtgncagcttttatgaaggaatatgtatatccgagtgaaaagtatatggtgccgcatcgtggactgcctgaagaaattttgaaaccgcttcaacaaanagtcaaagatatggggctttnngctgcacacatgccgaaagaagcggggggatcaggattaggtcttgtgtctttggcattgttatctgaagtggtgggacgtagtcctgtagggccttacgtttttggtttcatggctccggacgcaggcaatagtgcgtggggtaggaggt

SEQ ID NO: 713520 - DNA, 571 bp, Homo sapiens
  misc_feature (257)..(257): n is a, c, g, or t
  misc_feature (402)..(402): n is a, c, g, or t
  misc_feature (420)..(420): n is a, c, g, or t
  misc_feature (447)..(447): n is a, c, g, or t
  misc_feature (542)..(542): n is a, c, g, or t
  misc_feature (556)..(556): n is a, c, g, or t
cactggcattcgtggggccactccccacccaagctccacgtgtgtccgtctgtgctcctggcctctgggggaccagctgggacatgaacttgtctgccaggcccccgtcgcgtgctgaacggtgttagtttgtaggtaacgcacacaccccacacctaaggtgtctgcatcctcctgccaacgcatgggctccacgtggtgtgctcgctggctgtcgtgactgtcagctgtctcttgggaggggctgtgggggcccnctgggctgcctcctttcccgctagttgtgcctgagagttgctgttgttcctgctttcccttcccttcctttcatcccctgaagggctagggtgtggttttccgtgcccggtttccccacacaccccacacgggaaacctttttgnagaacccaagcagggccntcacccccttaatatttaaactggagncccggtccaaaggcctttagaaatgcccttacaaaccaaaggctcaagttttgtccttttttggggaagaaaaggcaaaaatggccccaacttanttttggcccttttnccaacaaaaagaaag

SEQ ID NO: 713521 - DNA, 165 bp, Homo sapiens
ccaggggtccgcccaggggtccgcccaggggtccgccctattgaaaataagaatttgaaaaaacatttgttttttcaaatatttgctatgagggggtgagggattaattaaataagtcaattcctggaatgtgagagggcaaataaagccctgggacccttccca

SEQ ID NO: 713522 - DNA, 221 bp, Homo sapiens
  misc_feature (14)..(14): n is a, c, g, or t
acgttcagccttgnaattgttcccacaaccatccccatcacccgttccagtgctttcttgaaccccaattcattgcttatcatcaccataggtactcaacttgcccaacagctcctccgccgtcacacgctgtatctcaaggccttctgggactccatttttgagccaaaactgtgcccacgagagacgtcacctcctgcctgagtcgacgcggccgcgaa

SEQ ID NO: 713523 - DNA, 451 bp, Homo sapiens
cttttggggtctttgctcctttatgacttttgggtaaataatgaaattaaggcagaaattaagaatttatctgaagctaatgagaagaaagatacaacatgccagaatccctgggacacaactaaggcaatgaaaagagggaaatttatagcactaaatgcccacatcaaaaagttagaaagatctcaactaaccacctaacatcacaactaaaagaactaaagaatcaagagcaaaccaaccccaaagctagcagaagacaagaaataaccaaaatcagagctgaactgaaggaaatcaagacacaaaaaaaattcacaggatcaacaaatctaggagtttgttttttgaagaaattagtaagacatgctgctagctagactaataaaaaagaaaagagacacaatagaaatagcaaagaccccaaaaggggtctttgctgaataaccat

SEQ ID NO: 713524 - DNA, 666 bp, Homo sapiens
  misc_feature (17)..(17): n is a, c, g, or t
  misc_feature (303)..(303): n is a, c, g, or t
  misc_feature (469)..(469): n is a, c, g, or t
  misc_feature (656)..(656): n is a, c, g, or t
cacgatggggaccgttntctgcaacagaactcactggctatccacagagtgtacacgagctgccagctagtctgagctcgctgagcaagaattgcgagatagttagagactgtcgtgtttggtcagtcaaccatgagcaacggcatgcgagatgatgatcacttgaggtgcagaacacgcgctgacatagccatgatgtcggtgagtatcatgatactagctgcagatcactgaatgactgctgtggagacactctaggcgcagaagccacctttgatgacacctatggagatgaggtgagcncgtgtgcataacacgaatctgctagagattatggctgactgtgaggacagagagcacaactatagccgtcgcacgagaggtgtgactcgacgatgattgtgagtacactgctttacaggacactgaatactctgtctcgctgatgttgtgatctgcaatgccctangacactcctccctataggcgcccggcacctcccgtttctgctgaatggtataccaaagttgttcctgattgtagccatcctgtggagagcctgctacctgttcgccaaattgtgagcttttgatcactggagagtccgctgcccaagggctttaggtgcgcccccgtacgcggctttcaacttgggngggttccgcc

SEQ ID NO: 713525 - DNA, 441 bp, Homo sapiens
  misc_feature (283)..(283): n is a, c, g, or t
tccttgtaatccaagcagtcggcatcatcaccatcatcatcattattttggtttgtttgtttttgagacagatcttgctttatggcccatgctggagtgcagtggcataatcacagctcaccgcatcctcagactcctgggcttaggtgaccctgccacctcagcctctcaagtagctgggactacagacacaagctaccatgcctggctaattttttgttttctatttttggtagacagaaggttaatccaagcagtcgaatcaggctgagatacgacatanattttggagttatcagacaggaaatttaaaataactatgattaatgtgtaaaggactctgatgaaaaaagtagacagcatgcaagagcaaataggtaatataagatagatgaaaaaataaaaaagaacgactgcttggattacaaggagggtaccgag

SEQ ID NO: 713526 - DNA, 250 bp, Homo sapiens
gagattcccactgtccctacctactatccagctcggccaagttcggccagcgtcccgccgcgcctcggccaaggtttcaacggaccacaaccaaattgcctcttcaaattgggacacaggcattggaaaccaagaatggttacatatttcacaaatttcgctctggggatataagggctcaattaacacacggagggagctctagagtactcacatgagaaaggaggtgtctcctgagatttttgagaac

SEQ ID NO: 713527 - DNA, 254 bp, Homo sapiens
aaacagcacaaccaatgacaggatgcaagaactgatagggcgccgcaaaaaaaaagcgggccaaagatgaagtaaataaacgtaagggaggtaccgaatctggggggcttggcgtagagtaagggagaggagcttcaactatctcaataagggcaagaaaacacaaacaactccttcattcgtccaaaatgcttctgaattgcaccacaattgacacacacacacctcaaagcagaatccgcactgacctaagt

SEQ ID NO: 713528 - DNA, 345 bp, Homo sapiens
  misc_feature (308)..(308): n is a, c, g, or t
taatctgtactcatgcgcagagttcatttgcttattcattcaaagatgtgtatggagggcctactctgtgccaggtagtgttaagtgctggagccataacactaagcagtctttttttttttgaaacggagtcttgctctgtcgcccaggctgaattgcagtggggccatctcagctcactgcaaccttcaccttccgggttcaagcagttctcatgcctcatcctcccaagtagctgggattacaggcttttgccattatgcctggtaattttggtatttttagtagagatggggttccatcatgtngacagactgtttgacctgacctcaggtgatccgcccg

SEQ ID NO: 713529 - DNA, 142 bp, Homo sapiens
taatgcgtcaagacatatgttctgcaagctaacatgtttacagctcagggtcctttacagatgaaactggctgatcacagagctacatgtcctagattcttcccaggttaaaggatgattaagtcctcgtggggtaggaggt

SEQ ID NO: 713530 - DNA, 216 bp, Homo sapiens
tagaggatgctaacctggaataccacccctactcaacacacatgaaaaacagggcgggcagcgggcacactgcactgtcaatgaataactcacctactgtagtgaaccctgggagctagagcaggagggtagaaacggggaaggccggtttcccactaaactaggcaggcaaggcaaatagtgggctgtccctatggccctctctagcaggtgcgg

SEQ ID NO: 713531 - DNA, 120 bp, Homo sapiens
ccggggggttttttttttaaacttccatgggcccagggttccatcctggaatttttttttctttgtttggatatgggtaaatggttttaaaattaaactgttaaatatttgttcggagga

SEQ ID NO: 713532 - DNA, 988 bp, Homo sapiens
tcccgacggggaatagtgagccctcctccttgtgataagtgatccacctcgtcgatagagggtcgtcctcgcaattatgctccacggagggttaaacacgctgtgtacatttcccgcttgagtcacacgtggtgacattgttgtgaagacaaaccatattgggattctgctaacgggtatgtgcgctctgcacgaaaggttgccccaactgaaaagaaattaggggtgcaaacttgttccccctagtgcgcccccccaaggcgttgttaccaaaaggtctgtattttcgtctttgaattcaaggggccccacgtgtaccccacggggtaggcaccatggcgccaatctctggcttatggcacacccctgaacctccctgggggggcaaacaaaataacttgtgtcccttagtgcgtttctcctgggtgtgaccccaaacaataaactggtgcgggtgtacccccccccacccccggccgaaattgtttatattaataaaaaatttgtttgtgaaaagggtttttttctcagtggttcccccggtaggtgttctttaaaacatcagtacacagacgaggcgcctccacacaacgggtctgcactccccaacctcgctggcgggttaccactgttaagccccccgtgcccccgtccgtcttgcacttttcacatgtgcagacgttcactcttggttctccccatatgtacagcagagccacacacaattcgtgctcgtcgtcgttggcaaagaagatcatcagtgatgccagctcactccctagaggaccacaagagcagcaaccatgtcccgccggtcgcgcccttactctggggagaaccaaccaagtgggtgtagtcgttaccccatgtaaatgttgtctccccggcattgtgaataatattgtggtctcttgcattgggataggaagcataagaaaacagccaggtgggggtgtaaattcaaaccaaaaaagcctccaaaaagaca

SEQ ID NO: 713533 - DNA, 351 bp, Homo sapiens
  misc_feature (3)..(3): n is a, c, g, or t
  misc_feature (7)..(7): n is a, c, g, or t
  misc_feature (10)..(10): n is a, c, g, or t
  misc_feature (337)..(337): n is a, c, g, or t
tanggcnttnactatctggatccaaaccagggacccaaagaaatgagattctagataaaggtaaaccgttctcaagatagagatgacctcaatttaaatagtaaaaaggagaaccaatcagaagagatcaattacgaaccccgagaccggcgtcagaagtaaggaacgataaagaacgggtcaattatatccaaatcgaataccccctaaaccatactatcgaccgaataacatcgaaaatatcacaccctgcgagtgatcaaaagatgtttaatagggagattatattctacaaaccgacctttccgttgtaggatcgttggtgccaattgattangcggatggcaacgg

SEQ ID NO: 713534 - DNA, 515 bp, Homo sapiens
gcaacaagaacaagactccgactgaaaaaaaaaaaaaaaaaccagaagggtaaggcagatagccataatgtcatctttttttattatcattatgcttaaagttctagggtacatgtgcacaacgtgcaggtttgttacatatgtatacatctgccatgttggtgtgctgcacccattaactcgtaattaacattaggtatatctcctaaggctatccttcctccctccccataatatcatctttaccggacccttgtaaggaccaaaaggggatttatgtttgcagaaaaccaaaattaaccaattttgcctgttaaaccagggctaaaactgagtcacctttcctgccccccccatgagacttccatagggtgaaaaaaggtgggggaaatgtcctccctggcattcagggccgggggccccattcccagggtgttcccataatggacctggctttctgcccttttgggcctctttggcctttctctggctccacgggggaacatccggtttgg

SEQ ID NO: 713535 - DNA, 286 bp, Homo sapiens
attctctagatggatctctctgaatctgacttccatcattcagtctaactatgacagttgttagtagtgtatatttctaaaaggcaaaaataataatcctgggtaatagatgagtagctcatagagaggcttagtccattttgtgctgctaaaacagaataccacagactgggtaatttataatgaacagacatttattggcttatagttctggaggtcgagaagtccaatataaagtactagacatctggtgacggccttcttatgcatcataatggtagagata

SEQ ID NO: 713536 - DNA, 356 bp, Homo sapiens
actacttatcaatctatttcaaagttgaaaactacaattttcatataatgggacctttctgtctttctttgcaccacgcgccaaatctgtcagctcattcccgccttttctgactgcttgctttatgttaacctgagaccagggttttcacctctcagtgttctggtaaagacagaattttatggtgactggccaggtaatgaaagtgtcatatctccctttatattagggacactagagaattatgcctggtgcattccaacccttcctgtcatttaagactgtacaattttttatgcatataatgtttctctgggaagtataaaagtaggaaatatctccatatgcttttaaat

SEQ ID NO: 713537 - DNA, 181 bp, Homo sapiens
tttttttaagaccctcatcatttaatgtggggggacatacaggaaatagtcaaaaccaaatcttacaaaaatcgccagtatcaaggcgggcgggttttgaagccaaaatgtgatgtgtgtgtgtgtgtatgtgtaaaatttgtgtggatatatatatatatatgtgtgcgcgcgcgtgtat

SEQ ID NO: 713538 - DNA, 100 bp, Homo sapiens
gcccacattatgacatgaggtcagcatatacacaaaagtagtatgatcttaggaagcttaataaagagaggggtctaatcaaggttacctgtaggatctg

SEQ ID NO: 713539 - DNA, 166 bp, Homo sapiens
  misc_feature (89)..(89): n is a, c, g, or t
taattttaaaatattttattgataaaaatgctaacacagagacatgaagtcagcacgtgctgttggaaaatggcactgatagacctgcncaatgctgggttgccacaaacattcaatttgtaaaaaaatctaaccgcggagcataataaagcaaagtgccataaaa

SEQ ID NO: 713540 - DNA, 279 bp, Homo sapiens
cgtcggtacctgatgcagagaaccgggaggcagaggtgcagtgagccgagatagtgcactgcactccagcctaggcaacagagcgagactccgtctaaaaacaaaacaacaaaaagaccctgaagagcttctctgccttttctgccacgtgaagacacagcaagaaggcaccatctatgaatcagggagtgagccctcaccagatgccgaatctggtggtgctttgattttggacttcccagcctccagtactgtgagaagtaaatttctattgtttat

SEQ ID NO: 713541 - DNA, 1052 bp, Homo sapiens
gctaagcagggaacgatcgcagtcacaacagtcgggcccatgtgtgtgtcttacttcaagcctttggtgtgttctatggtgcagttgtagaggagacctctatacaaatgtgactatattcaaaaaattacaaaaaccatgccggcatgctcaacgactgactttgcattcatgcaatgtaaacccagcaaccagcacatcacacacagcacatcatgcaacatgttcatttctgggtttcgaacatgcaagcacaatgccatcacagcgacacatcactgcatgcactcatccagcgttaggagcacgacctgtgtgcaacacatccatcacgtttagccaatctcaaggcaacaacatgcaacagcaccttcatcctcactttcaggacaacagtagcttccgagtgtgccgcaactttaaaccacttcggcattttcaccgtcagcaatccagcaacagcattcacatgcacacattcacgaatcacacagtttagccaccaggcaacatcagccaaaggcgaactgcgatgggtttccaggcccaggtagtcataggccaatcatcgcacacttggatgcagtataccatcagcaatcgtcaaaattggaggagctggaatggaggatggagtatgatactatatagtctacttgaacggtgtagcagtacattcatttataatagggtagacgttacattttaacatccataaggtataacatgtaaagatttataagacatggtatcactaacaacatactacagaagacacggttaaacgaacgaaggaaccaaccccatagggaaaggataaagaaaccaaagacgtccataattaccagagccaccagcgacacaagaacaatatggcgagcacattacccatgtgatacaggacgcagtagaaaatacatcagcaggatcacgccgaacgaatagacaagtaacagattcaacgggaacccaccttccaaattagaacgtcatacagggaaccactatccatatgtacacgggccatcacgtgggaataaaagcaagatgac

SEQ ID NO: 713542 - DNA, 163 bp, Homo sapiens
atccgaggatcccctacataaatgtctaagttgttttaagtccactttcccttcacgtttggtggctgacctgaaaagaggtcccttagtttttggtcacttgttctcctaaaaatgctatccctaaccatatatttatatttcgttttaaaaacacccatga

SEQ ID NO: 713543 - DNA, 753 bp, Homo sapiens
cccgcagacggggctgtgtgtgttaccaagcacgcgggcgtgtgtgccacctcggcctcacgtggtagttaggttgtctcgccgccgacttgcttcctcccgtcagacgtttgtctaggcgtctcacctagcgaggagaattgtgttgctgcccccccgcctccacgtctaggtccactccgctgaggcgccatactccacactgccgcccacatggactgcaacccctccgggcggtggcggtgtctctgtggattgatgtttccgtaggccgccacgcatatgtgatctgtatgacgttacggggatggcacacgcaaaagtccgcagataagtttgtatccgacgcggtggtttgtatagagaacacgcccgccccacggagatggggtcttctccgggtaccagaaaccgcgcggctgtctatcttcatatctccagtggttgcccaagctgtcccccatttctgtgtatatctccccacccggtaggtattgttttatgtacgctccgaggatagatctgggaatgtgagaatctcttacgtatgtgagaatgtcctatgttttatctgtgcgtgcgagagcacacctcttctctccctgagagaggatctctgggcaacaagtctcacttaccaccgccgtaggggacaccacatcttctgtcttatcatacgccccggctgtggtcctattcttctctaacaaaataaggacataataaacagacacaacaaatagaccaagaaaa

SEQ ID NO: 713544 - DNA, 112 bp, Homo sapiens
caggggctgcatgtggaccccccggcggcccagggaccacgccccgacccaggggctgtggacgatgtacaggcaaaagacgtacgcactcctttccttttggaagcaagaa

SEQ ID NO: 713545 - DNA, 167 bp, Homo sapiens
gggaaacccgtgtgctattagccatggtcaacccaccgtgtttcttgacattgccgtcgacggcggagcccttggccgcggttctcctttgagctgtttgcagacaagggtccaaagacagcagaaatttttcgtgctctagcactgagagaaggactttggtacta

SEQ ID NO: 713546 - DNA, 131 bp, Homo sapiens
taactcgatcaaacaaaaaatccagtgatttgagaagatcaatcatattgatcaatctctagctcactacgtagataaggatacaagaaatgtaacaggaaagaaagattggacatttacccagataatac

SEQ ID NO: 713547 - DNA, 168 bp, Homo sapiens
gactaatcaaattaacctcaaaacaattgttaaccttacacaacattaaagggacgaacctgtatctcttatactagtatcccgaaacatttggtatggccacatctaatccttccgcggtactccggtctataacttaattaacaaccacccaacctatttttttat

SEQ ID NO: 713548 - DNA, 136 bp, Homo sapiens
  misc_feature (114)..(114): n is a, c, g, or t
acagactgcgcgggggtggttttcagcctgggggcgttgaaagctagcaaagggccgcagcccgtcggtgtttgcgccctggcggctctccttggtcctgtgcggcgggcgcangctgtgagggggtaccgagctc

SEQ ID NO: 713549 - DNA, 511 bp, Homo sapiens
ctttttgaagaaattctactttcccccatccgtcaacgaaatggttcgaacactacataattgaactcccccgagcacgattactcttgtgtatattatcccccctctccagagcacactctgtcgaccaatttggaaaggtccccctcgaattagtagaagctctgtcccattactccacacgtctcctcaatattatccacgcctcgttacctgctacttgcttcttctcccacctataaccgggatcacgaacagaacctcttcagttagtactttcgaactcaagcctgtcgctagaccttttcttcaagcctccgctgtctcagacaactaacttttaatgacagcttttgactcgatcatttaccactccattaccatgcaatttcatcataagattacgtgccacctttggtcaacaaccccttctattccccacttctacttcttctggccaatactccccactctgtcccccccccctccccccttacggacacacataaca

SEQ ID NO: 713550 - DNA, 351 bp, Homo sapiens
tcagataagtgaggttaagtggcaagagagaaatggtgagaactccactcaaaggaaatcttggattcagtgaagctctgactcccaggagcatacaggagggagcagggaagagctccatttgggttcggagctgtactcagatcctgagtaccacataagagctagctaggtacagcgtgggcctgccataccacagtcttcccaagatccacagttgccaggcccacgaaaacagagaagacactccccacaatcattcatcaaaaccccaatcacatataagaagatggaagccactggtagaaaactttattcaggacgttccccaattaggaggcaggtcgacgc

SEQ ID NO: 713551 - DNA, 970 bp, Homo sapiens
ggccgcacacggttcggttctgtatgtctctccttccccagaagaagccactaaaagcacgttgactcgaaatgaattggtaggaattgtggacagcataagccacttgtatgttagtctttagctcaccgcaaataagacggcgcccagggctcacctcactaatcagtatatgcatagaatggcaagtgttacgagctgattcccaataccatgctacatcaattcgcctaccagggccaagcatcgctccttcgaggttagcttctatggcacgttagtcccacgaggacttcacgaacctgtgctagcaatactagtccttccgtagccagaaattgcttcaactaagaccaaagtccgtcgctggactgctcaggggtgccaagacctcaatcctatgcctaaaactaattgccctggtgcttttccgtccagctgctcctagaccaccatttaagtactatgagaaccagcttcttcacgagggttccacgagtcatgtcgaacgacagacgtgtggctagacacatcaacacagacgaatgggtccacgtcctgcagctgcagccgctgcagctactcctgctgtccgcaccgttccacagtataaatatgctgcaggagttcgcaatgcctcaggcaacactcttaatgcacagccactagttacaaagtgcaacatgctgctgttcatgtacaaagggtcaggaacctttgactgcttgcatgtttggcatcttgcccctcctcaagaggcaaagccaaatgttgcggtgaacgggtgttttcctcttattcaagcatggaccctacttctttgcggtgtaaatccctggctgttgttggagatggtaagtccacaacttttcatatagggcgagatctcccaagagacccggctaaggtagagaagcgtgctttttaaaagccccagtaaaggtgcccaaacattaagccccggttcacg

SEQ ID NO: 713552 - DNA, 162 bp, Homo sapiens
acttccaccatttctactcttcagtgcccttggtcctctaactcgcatcctctaagggatacgttctgctatgcaaagtatactcttcagtgtattggaaaatatggctttaccttctgaccaaaattacattcaactgcacagttgtggcagagaacatgc

SEQ ID NO: 713553 - DNA, 102 bp, Homo sapiens
atatatatatatatgtaaatatatattcacacatctctatatattttaatgtattgcacatgtatatttaaaatatatacgaaagaactgctaaaaaaaaaa

SEQ ID NO: 713554 - DNA, 411 bp, Homo sapiens
ggtcccagctacttgggaggctgaggcaggagaattacttgagcctgggaggcggaggttgcagtgagccgagatcgcgccactgcactccagcctgggcaacagagcaagtgtctaaataaaaagaaagaacacgacagacagacaggaaggaaggaaggaaggaaggaacagcggaaacgaaaggcaggaacggaaggacaacagcacagacacggaaggaacggacagcggaacgcgcaggaagggaggcacgaacagacagagaagacgacaacgacagtgttacttccttatttcgccacgggtgacgggtggcggacggcgacaaactagcgcctgttaccctctgtataataggcccctagaattaggccgacaggcagacagagtctcacttctgatcgccat

SEQ ID NO: 713555 - DNA, 681 bp, Homo sapiens
cgcagtggctcacgcctggaatcccagcactttgggaggccaaggcgggcgaatcgcaaggttaggagtttgagaccagcctggccaacatgttgaaaccccgtctctactaaaaatacaaaaattagccaggcatgatggcaggcgcctgtagtcccagctgctcgggaggctgaggcaggagaattgcttgaaccagggaggcggagattgcagtaagccaagaccatgccatcgtactcttgcctgggtgacagagtgagactccatctcaaaaaaaaaaaaaggtgggcttctttgaccacagtccttctcaagctgccatctcatagtggtcctctctcctttctactttaaaggacccttattgattatttggggcctacattagataattacagaattgatctccctactttaaaattcaacgtgtttagcaactttaattcccattgggcaaccttgtgtaccattaacattacgtcacattttggggcatttagaccgtggatatcatggggtgggtgagaagcatttatccagtttaccacttacaccattctattagaccaagaacctaaaaccacttgatcatctcattagacaaggaaaccccattgggctgggtacggtggctcatgcctgtaatcccagcctttgggaggctgaggccggaattcg

SEQ ID NO: 713556 - DNA, 186 bp, Homo sapiens
gtcgagtcggagctgtacttccttatcgcccggtacctatcggcgggcccgtgtcggagagcggcccaggtgctggtgcaggagctggagcagtaccagttgttgccgaagagattggacttgggagggcaacgagcacaacaaggagcttcaggagggagttggtcttgtccattaggcatttgg

SEQ ID NO: 713557 - DNA, 658 bp, Homo sapiens
acatctgggcccttagttttattctgttattatatgtctctgtctctctctatgtgtgtgtgtgtgtgtggtgtgtgtgtgtgtgtgtgtgtgtgtgggcagagagtgccacccacagggctgctgacaactctctctattcacctccatgtgtgtgtgtgtgtgtatctgtctgagagaattccgcggggcgccatgcagggcgtatctcgagaggggagagagcgcgctctctctacgtcgtgcgcggccccgtcgtagacacagcaggggtccaccccaccagggacgacccagacgcgtgtggagggcgcctatgcagacgactggggtgtgtggctggctgacgcagagcagagaccccccagatacataagacgtgggcataaacagagggagaaaggtagtggccaacccttctctctctactacctacctattgccataaaacgcccagagatgacagctcgtgacaaagctgctctcggtggagaacaccctggacacgttggagaggagaagcggcgacgagaaaacgaggactctccccatcgggggccctgatccagatcctgtgcaccaacacaaagacaggtgggggtcccccgtggagaaccccgtcagtgtgacaggcccgctctgtgcgccacagatcggg

SEQ ID NO: 713558 - DNA, 874 bp, Homo sapiens
aggtgggctttcccctcacttgtcattggaggcatctttgggaagtacgacgccagcccctattgaagcacccttgtcgcaccgcagaacgatcgcccgggagattccacgcccagccatggtacaagtctactgtcatcgcacatgactgttggaggcttcctgcctttacagtgcacatctactgtggacactgtactacatctttgccacagtatggtgctcgggagcagtacactttgtacggcatcctctctctgttgtcattcgccatcctgctgagtgatgggtggacttgcatgctcacattgcagctcactctacattccagatttgtttctgcgggacgggacttatccgcctggtagagtggacgagtcatgtggctgagtgatattggctccacacggcctcgttcatcgttccctctactgcagttcttctagttagtgcctcggcgcttccaacattgtcttgggtgcacgtacacgagcagctagaagttcatctcggctagcatccgttagctcacatggtctaatgttcttcttcgcgtcagtgcatgggcagcgcagtctcccgttatgtttgtcgttctcctaaagattcatgccggtagtatactagtgttaagcctcaagtactggaactgagttgcgtgtactggcagaactatttgcatgttctctcccgtgtcattcactgccctgttgaactctcgctaccagcgtctcttctgattgactgaattgtgtgatggcatcgttgccttcccttttgccctattgggcattccttccaccagagagggcctggaaattataaatctctatcacataaggattatatatataactcttggagtgcctttagt

SEQ ID NO: 713559 - DNA, 317 bp, Homo sapiens
ggggggggggaaaaaaagcatttagtataatgttgccttatttgttagttaattaagtacccttttaccagatagtactgttgttagctaagattaagatttgtaaagagcgcgcaacatgttcaagagccagtccgcagctttttagtgaatgggacctcttatgcaagcctttttaaataggttaaagtgcgtttttcacctgaagcatgttatttaagctgtttttggcagtattgttgagaggtgccaaaagtacatgtttgcacctttctagttgaaaataaagtgtatattttttctataaaaaaaaaaaa

SEQ ID NO: 713560 - DNA, 1082 bp, Homo sapiens
  misc_feature (10)..(10): n is a, c, g, or t
  misc_feature (46)..(46): n is a, c, g, or t
  misc_feature (141)..(141): n is a, c, g, or t
  misc_feature (200)..(200): n is a, c, g, or t
  misc_feature (202)..(202): n is a, c, g, or t
  misc_feature (220)..(220): n is a, c, g, or t
  misc_feature (244)..(244): n is a, c, g, or t
  misc_feature (277)..(277): n is a, c, g, or t
  misc_feature (283)..(283): n is a, c, g, or t
  misc_feature (287)..(287): n is a, c, g, or t
  misc_feature (310)..(310): n is a, c, g, or t
  misc_feature (328)..(328): n is a, c, g, or t
  misc_feature (337)..(337): n is a, c, g, or t
  misc_feature (353)..(353): n is a, c, g, or t
  misc_feature (359)..(359): n is a, c, g, or t
  misc_feature (375)..(376): n is a, c, g, or t
  misc_feature (383)..(383): n is a, c, g, or t
  misc_feature (408)..(408): n is a, c, g, or t
  misc_feature (413)..(413): n is a, c, g, or t
  misc_feature (415)..(415): n is a, c, g, or t
  misc_feature (419)..(419): n is a, c, g, or t
  misc_feature (435)..(435): n is a, c, g, or t
  misc_feature (450)..(450): n is a, c, g, or t
  misc_feature (455)..(455): n is a, c, g, or t
  misc_feature (462)..(464): n is a, c, g, or t
  misc_feature (480)..(480): n is a, c, g, or t
  misc_feature (494)..(494): n is a, c, g, or t
  misc_feature (503)..(503): n is a, c, g, or t
  misc_feature (528)..(528): n is a, c, g, or t
  misc_feature (539)..(539): n is a, c, g, or t
  misc_feature (549)..(549): n is a, c, g, or t
  misc_feature (589)..(589): n is a, c, g, or t
  misc_feature (598)..(598): n is a, c, g, or t
  misc_feature (610)..(610): n is a, c, g, or t
  misc_feature (618)..(618): n is a, c, g, or t
  misc_feature (631)..(631): n is a, c, g, or t
  misc_feature (633)..(633): n is a, c, g, or t
  misc_feature (673)..(673): n is a, c, g, or t
  misc_feature (739)..(739): n is a, c, g, or t
  misc_feature (855)..(855): n is a, c, g, or t
  misc_feature (867)..(867): n is a, c, g, or t
  misc_feature (896)..(896): n is a, c, g, or t
  misc_feature (912)..(912): n is a, c, g, or t
  misc_feature (952)..(952): n is a, c, g, or t
  misc_feature (1019)..(1019): n is a, c, g, or t
  misc_feature (1068)..(1068): n is a, c, g, or t
attacaaaanaaattttattattacaaaacatacaatctcacaaangtacaatttgaaatacggggacacccttctaactaccacccaggtgaagaaacagaactttgtcaggcaccccagaacccctccaagtgcctcancacaatgacaactccttccctctagaagtagccattattcttgtatagtactgactgtntntctttatggttttatctnattttttagagacagggtcttgtnctgtcacacaagaacaagtggacaggtggagtncagtgntgtncatagctcactgcatcttgagcncctgggctcaggtgatcnccctgcctnagcctcccaaggtgcngggatnataggcgggtgtcacnncacccancccagttttattttttttttgaganggggncntgcnctgtcacccaggtgtngcccaggcttgagtncagtngcgcgannncagcccactgcaaccnccgcctcccaggtncacgcaatnctcctgcctcggcctcccgagtagngggatacaggngcccgccccntgcctggctaattttttgtatttttagtagagacggggtncaccatgtnggccaggctggnctcaaacnctgacctcaagtnanccgcccgcctcggcctcccaagtgctgggattcagatgtnaggaccgtccaccgtgcccggccgagttttattcttgaatcgtgcatgtctctgttcactacagtntagtgcaccatttaaataaatttgttgtcttttaagttcatcaaaaatatttcttttgaagcactataataatgctggtgatggaactcgccaccattattccctgggagcttctngcagattctgtnagttggaatctctaattcttttctcagtngacctttttacttgantcccacagtactttaagtagcttctttttttccagggttnctttgctctttttttcctttcttgtattttcttcgccgcttctcgtttttctttgttaacaggactntcttcaccattgtagaaacatctactttctcttgtaggatttccgagcnagcttctgtgctga

SEQ ID NO: 713561 - DNA, 125 bp, Homo sapiens
ttgaattatgacctgcttttttgcgggacagttttaatttgtttggaggagtgtgtaccaaaagtacatgtttgcacctttctagttgaaaataaagtgtatattttttctataaaaaaaaaaaa

SEQ ID NO: 713562 - DNA, 802 bp, Homo sapiens
  misc_feature (16)..(16): n is a, c, g, or t
  misc_feature (37)..(37): n is a, c, g, or t
  misc_feature (40)..(40): n is a, c, g, or t
  misc_feature (43)..(43): n is a, c, g, or t
  misc_feature (46)..(46): n is a, c, g, or t
  misc_feature (58)..(58): n is a, c, g, or t
  misc_feature (62)..(62): n is a, c, g, or t
  misc_feature (84)..(84): n is a, c, g, or t
  misc_feature (91)..(91): n is a, c, g, or t
  misc_feature (96)..(96): n is a, c, g, or t
  misc_feature (111)..(111): n is a, c, g, or t
  misc_feature (116)..(116): n is a, c, g, or t
  misc_feature (125)..(125): n is a, c, g, or t
  misc_feature (153)..(153): n is a, c, g, or t
  misc_feature (182)..(182): n is a, c, g, or t
  misc_feature (194)..(194): n is a, c, g, or t
  misc_feature (197)..(197): n is a, c, g, or t
  misc_feature (206)..(206): n is a, c, g, or t
  misc_feature (210)..(210): n is a, c, g, or t
  misc_feature (213)..(213): n is a, c, g, or t
  misc_feature (249)..(249): n is a, c, g, or t
  misc_feature (254)..(254): n is a, c, g, or t
  misc_feature (259)..(259): n is a, c, g, or t
  misc_feature (280)..(280): n is a, c, g, or t
  misc_feature (287)..(287): n is a, c, g, or t
  misc_feature (290)..(290): n is a, c, g, or t
  misc_feature (292)..(292): n is a, c, g, or t
  misc_feature (300)..(300): n is a, c, g, or t
  misc_feature (313)..(314): n is a, c, g, or t
  misc_feature (316)..(316): n is a, c, g, or t
  misc_feature (344)..(344): n is a, c, g, or t
  misc_feature (348)..(348): n is a, c, g, or t
  misc_feature (354)..(354): n is a, c, g, or t
  misc_feature (356)..(356): n is a, c, g, or t
  misc_feature (359)..(359): n is a, c, g, or t
  misc_feature (362)..(362): n is a, c, g, or t
  misc_feature (365)..(365): n is a, c, g, or t
ggcggtcacgcccggnaggctttctctggctggtaancgntantcncggacaccagancacngcttccgtacacaggggcccgnatcccancctcncggacctaagagccngggtnccctgtatncggaggtccgcttcccgggccccagatnctggcatcccagccctcagtgtccaaganccaggcagaccnggntccccgacngccnggntccaggcgtccgggatctgcgccaccagaacctagncctcnctgcnagacctccgccatctgggggnactcaanccncntggagccnaggtgccccacgnncncacccagagaaactctcgtattcccagnttcncaggangnaanccnggncgctccgaactcccagctttcggacatctggcacacggggcagagcagagaagcctcagcgcccagcctggggaatttaaacactccagcttccaagagccaaggaacttcagtgctgtgaactcacaactctaaggagccctccaaagttccagtctccaggtgctgttactcaactcagtcctaggaacgtcgggtcctgggaaggagcccaagcgctcccagccagcttccaggcgctaagaaacccggtgcttcccatcatggtggccgatcctcctcgagactccaaggggctcgcagcggcggaggccaccgcaacgggggccttggcgctggctccatcgaggaccaaggcgcggcagcaggcggtactggggttccgggacaggtgcgccgtgcttcgagccaactggctgtgctgctgaacagtgggg

SEQ ID NO: 713563 - DNA, 248 bp, Homo sapiens
ggacaactgggacacgggggacgagttggcgtgggatgaagaactacgaggggctccagcagctggacagtctagtccacttcattttagtactggaaagactcatcgccggtttcatgtgagaagacccgtgcggatgagggcttctgtcaccgaaaaggggtctgcagttggcagaggggcgacgatcttcaaagtaacccttcttctcctggccaacagtccggggaatgcgtatgctggcgcta

SEQ ID NO: 713564 - DNA, 264 bp, Homo sapiens
atactaccagttgaaattagacataggcgtaatcaaagtttaaacacaggcgattttgcctagtacctaagatgtcaatgttccaggaaatgaatatgaatcagtcttatttcttactccaatgatttgtgaaagggatcactcaaatatggtccaaattaagatgtaactgttaaacttctaatctgtaaagttcatgtggtcttctgtgagaaacacaatgttttatttttatataacttccagtagaattcactcaaaact

SEQ ID NO: 713565 - DNA, 400 bp, Homo sapiens
gagtgcgcgaagaaacggcggcctcagcgtgtggcacgtatggcttctcccgcgagcaggaacaacaggaacagttgatctacagcgacgaaggcatcgtcgggcaggccgcccagcgcgatcgcctgattcgcctggacgatgtgccggtggattacttcaaggtcagttccggcctcggtgaaggggccgcccgcagcgtattggtggtgccaaccagcgatgatgaccgtgtcaatggcgtggtcgagctgggtttcctgcgcccgctggatgagcgtgatatcgaactgctggaactgatcgccggcaatatcggcacctccatcgaagccgcgcgctatcgccagcgcttgcaggaagtgctggccgagacccagcagctcaacgaagaactgca

SEQ ID NO: 713566 - DNA, 584 bp, Homo sapiens
ctatgaggagataggcatcttcgtggagaaggctcaggatagatcccagcactgtccgtgttccgggcccagactgggctgtccttcctggtgccctgagcctgaggacctggagggacctgtacagccgctacaagaagcttgcagcaagagctggagttcctggaggtgcaggaggaatacattcaaagatgaggcaaacatgaacctttgaaaaacggaagtttctccagtgcccagggacggagcgttgaccgcgaagtccaaaggcatctccgcttggttcactcgtgagcaagtttccttggcacgggctggtggcatcacgacatatccagggtcaatcgggtggggcttcctacccaacgaggggcgtcccagaagcgtaatatcagtttggttgccagcgagtttcccgttggagggccagagcccaattccggactcccgggggaaaggccttggccttccaagaaggcccgcaaagagtggcccgttccatgttttggtgcccccttccccaaggaaaagggcagacaatggcgaagagttcggcagccttggggttggggacccagttagcg

SEQ ID NO: 713567 - DNA, 761 bp, Homo sapiens
  misc_feature (761)..(761): n is a, c, g, or t
aaattctgcatgcttaaagacacccatgtttaagatttttcatcactaacgtatccattaaaagtatcaactggccaggcagggtggctcacgcctgtactcccggcatttgtgaggccaaggtgggtggatcacctgaggtcaggagtttgagaccagcctgaccaaacatggcgaaaccccatctgtactgaaaatacaaaaattaggcatggtggtgcatgcctgtagttccagctacttgggaggctgagacaggcgaattgcttgaacctgggaggcagaggttgcagtgagctgagactgtgccatgcactccagtctggttaacagagcaagacactgtctcaaaaaaaaaaaaaaaaaaaaaaggtttccacccacaaattgttcccaaaatacggggactccaggggggaaattgtcccttataatttttcaatcccttttccaaaagagggctgggggctttcccacttaaaattgggaaaacggggtatattacaccctaacatctcaacatcttccaacagcagaatgagggttttcgggaaatgccccccttaattatatatctaaagtattcctttctcacgaaaatttggacactcggagattggtgttcccccattctgttggggcccattaaacttcacatcttgcactccacgtctatcggacaggaataataggccccctgggtgtaaactgcaatccctcatcggagacggcgccggcttcgatgggttgaaccgacattn

SEQ ID NO: 713568 - DNA, 928 bp, Homo sapiens
gccccacgatgatggctggcaatggctggtggctgctgcggggattagcgagtggctgcttcctggtggcgtgacgcaggccgtggcggggctggggtgcgtggtgcgcggctgcgtgggcgcagcagcagggtcatgcgggactatgatctcctgtgtggtcggcgtggggatcttggtgtgcctggcttgtgccaaggatggcctgctcaggctgtggaagtgaaggtgtcctgtggtggactacgtggaaccttctccccaaggcacccgcgtggggcctcgcgctggcacctgctgtcaacgtggtgcttgcatccccaaagaagctgatgcaccagtgctggcactgctgggaggcctgatccaagatgcccccaactatggctgggagtgtggcccagaccgtgccgcatgactggaggaaagatggcacgaagctgttcaacaatcacgtgaaaatccttgaactggggccaacccgtggtccagcttcaggacagaaaaagtcaccgtactttaacatcaaagccagctttgttgacgacgcaacacggtttgcggctgttgccaagatggtgggaacagagattctgctgtcagccgatcacatcatcatttgctactggattggctggccgagattaccccaactgcaacatcgaaagtgtgcctttgagaatacttggaatcaccacgtgattgaacatcttctggcttgaacggaatcccctggaaaaaacgatggtcggtcgggggaccaggatattgttggggcctgggagtattggttgcttcctcaacctgacgattgtgcttggacaacaccaataattgatgcgcagaattcccctcggcggtatcagacaggcgagatgtctcactggtctataagcacattggaattccatggcaccggtcctaaagg

SEQ ID NO: 713569 - DNA, 107 bp, Homo sapiens
cctttgtcttaacttagctcataacatttttgcagtgttggaggttaatgagctggagtctcgctctgtcgcccaggctggagtgcagtggtgcaatcttggctcac

SEQ ID NO: 713570 - DNA, 111 bp, Homo sapiens
gacgtggcaagtctcagatgcatgtttggagagtcagatcttactccttgtaatatctttcgataaacagcaaggtggtgtgatcttaatatatttgaaaaaaacttcatt

SEQ ID NO: 713571 - DNA, 1035 bp, Homo sapiens
ctgaaaggcaagcatttcacggatcagtcaataggcagcaatgcagtatagactcaagagtgtcgtgacaatgatgtatatacgagccaggcagctgtgcactgacatgtgccaagccacgactagtgatctgtctgtgtcgtacatgtaagagtgagggagggaaggaaggaactacagagagcagtcggcagcatgatgacagtcaggacacaacaaatatccccagtgcgcagttgaatgcgtctgtggttgaccagcatgattccttgcagatctaggaatgcatacgcaatgcacaggtccatgaaataatcaggagctgtaacgtaaagatgtaggtgaatgacgtgtaaagcatcatgccgtgaaggtcaaggcaggacaaggtaagcctagccattggtaacgagaatagcgtcaagcgtgacaaggacatagcagaatcgacatgtcatgtatccatcgtcccatgcgcttcctctactcaaggacttgtcccgtcgcgtggaagagacggcttagggtaagatcttgggcacaggcaagctttctcgttaactgataaaagttggaatagacattacaaacaacaccagtgcgactattccaacagaattatagcgcaatgtagaaattagggatcagacggagtacgtaattgtccagaaactagatggataaaagcatacaaccatagggagcgagtatagctggaggtgattagcgacaattgtggcggtattaggaacgcacagtgaggagcacaataagggcgtaaattgtatgtaggaacagtggagcaccgaggagattgcgtggtacaagtggactggtgtaaacagtaatgcgccacataggtatgaaaactgcgtaaccaaatataggaaggtcgataggcctagagatgcgggaagggacagcgaagtctcggggaaggcattacccaaaggattggacgaaagtaatcgggcacacactcgtgagacataccagaaatcgcaagagttccgaagaaccaacaacaacacaagg

SEQ ID NO: 713572 - DNA, 881 bp, Homo sapiens
  misc_feature (19)..(19): n is a, c, g, or t
  misc_feature (48)..(48): n is a, c, g, or t
  misc_feature (85)..(85): n is a, c, g, or t
  misc_feature (122)..(122): n is a, c, g, or t
  misc_feature (125)..(125): n is a, c, g, or t
  misc_feature (127)..(127): n is a, c, g, or t
  misc_feature (238)..(238): n is a, c, g, or t
  misc_feature (248)..(248): n is a, c, g, or t
  misc_feature (254)..(254): n is a, c, g, or t
  misc_feature (262)..(262): n is a, c, g, or t
  misc_feature (291)..(291): n is a, c, g, or t
  misc_feature (393)..(393): n is a, c, g, or t
  misc_feature (408)..(408): n is a, c, g, or t
  misc_feature (416)..(416): n is a, c, g, or t
  misc_feature (420)..(420): n is a, c, g, or t
  misc_feature (422)..(422): n is a, c, g, or t
  misc_feature (444)..(444): n is a, c, g, or t
  misc_feature (459)..(459): n is a, c, g, or t
  misc_feature (481)..(481): n is a, c, g, or t
  misc_feature (630)..(630): n is a, c, g, or t
  misc_feature (669)..(669): n is a, c, g, or t
  misc_feature (684)..(684): n is a, c, g, or t
  misc_feature (693)..(693): n is a, c, g, or t
  misc_feature (738)..(738): n is a, c, g, or t
  misc_feature (759)..(759): n is a, c, g, or t
  misc_feature (762)..(762): n is a, c, g, or t
  misc_feature (770)..(770): n is a, c, g, or t
  misc_feature (777)..(777): n is a, c, g, or t
  misc_feature (798)..(798): n is a, c, g, or t
  misc_feature (880)..(880): n is a, c, g, or t
ctgcgactcagcgaggccnacagccgcgtgcagtcatcgcagttcganatcggagagctatacgactccatcacccggccctggngcgctgctacgtgggcaaccgccggcccatctcccancanantggcgccatcatcttccagcccatcaacaggacggtgcctctgcggtgcctggaggagcattatggcacctccccaggccaggcccgggagggcagcctcaccaagggaangccggatgtngccaanaggctgancctcaccatgggtggcgtccaggcccgancagcagaatttcgcccacgcgggaaacctcctcagaacacaaagcaaaagacgttgtgtatccagcccgcctgcctgtgatcacatcgcatggacagaaganccttgtccctcaaancccaccantcananagctacctgccgattggctgcnagctgtccacctcantcctcgggtgtggacacaagcncctgcccaaactcacctgtgttcaggacgggaagcgagcctgccctgagcccaccagtggttcggagggtctcctcagacgccagggctggggaggcgctgaggggatcagcacagtcaactgtgccctaagcccccgcctaagccctncaagtgccgttcctcaaggttccctcgtctccctctgcntggctcaactcagangccaactantgtgaactgaacccagcgtttgccacaggctgcggcaggggagcnaagctaccctcatgtgcccanggnagccacanagaactnctcacagccaagcagaatgangcgccaggtacccggaactctggcgtcaactacttgatccttgatgatgatgacagggaaagaccttgggaacctgcggcanc

SEQ ID NO: 713573 - DNA, 755 bp, Homo sapiens
tgaggggcagtgctcgcggtcggtgaggcggggtgtcatggtgagaccaaaagtcaggcccgaagacgtgaccgggtgctctaacagacatgtccttacatcccggtggccgaggattccgacttccccatccactattctgccctacggcgtcttctcgaccagaggcgacccaagaccgaggataggtgtggccattggttgttcagatcctggacctcagacatcatcaagacacctctttactggtacctgtaccgtactccaaacaccaggatgtcttcaatcagactacatacaacagcttcatgggccatgggtcaggctgcctggaaggaggcagagagtgttcttgcagaacttgctagtctgtgagccaagccagggctcagagatgacaccgacacttcggaagtgtgcatacatcatccacaggattcatgccaagatgcaccattccagcacaacataggacgaataccacaagacttactataaccttctcggacagacatgataaccaaacgtcgcgaatcatgtacaagcggacaacggagaatgccgtatgatgcacaacatcgggatagaacaaaaccagaggagctaccattggcacgaagccatccatcatggtcgagcgctgactgtgaacacacaacacccgaaaggcccatgggaaaaggatgaaccatgatgacactaaagccaccggacaatgggagcaagcaagcacgagggacaaggcgcagggaaaa

SEQ ID NO: 713574 - DNA, 424 bp, Homo sapiens
tctcgcgttgggctatgcttatgtatagtcgaagtggtatgtgcgccctagattgtctattgctagtatgctttggtatgcgggctctttatcattcatatgaatataggatgcttttccagcttgtgaagaatgttggtgatactgtgatgggaatagcactgaatatgtagattgcttttcgcagtatggtcatattcacgatattgattctacccatccatgagcatgagatgtgtttccatttgtttgtgtcatctatgatttctttcagcagtgttttatagttttcattgtagaggtctttcacctccttggtaacaggtatattcctcagtattttattttattttttgcagctattgtaaaagaggctgagttctctgattgattctcagcttggttactgttggtgtacagcagt

SEQ ID NO: 713575 - DNA, 117 bp, Homo sapiens
tatgtctctcgttatccatcttggtgcatcctgactaacaatcaagatgatgctcacagcagctacaaatatggcttttgcagctgtgaactacagtcttacaagtttgtttctgga

SEQ ID NO: 713576 - DNA, 707 bp, Homo sapiens
cacatctctgcaggaagtcctcagtccctccaaggaactcacgttcactaggtcaagctcatcagataatctgtctatcttatattggaccgacttgggatctcgattacatctgttaactcgttcatgccatcaatagtgacacaatcacaggagtgacatctcctcagtagctttgtctacactctggaggaagtgattatatatgagcacagatcactgggggtcatctcaggattctgtgtaccataatattataaagacacagctattaaaagagtataacagatttctgcttctgtctggtagaataaatcatatcacactaaccctgcctgcataaaccgtataatcggtttcatcagtgtacaccaggcagtccacgagctcaagggggaagccccacgacttgctagatgtctggggagaatttctcaccagctgcatagtgagctagagtgcactcatggcagggcagctcactgagctgagaaggcacagatcacagttcatgacggctgtagcaactgcaatctgcagggcagggcaccacagtggagacagctcgtctaaggtgcagctctcatagtctatgtggagagtcatgtgcgtacttatcatgggagtggactctacctgcacaacgcacatgtacttgaggtggaagaaggttggcgattgttataggagggtctgcctcctgttgg

SEQ ID NO: 713577 - DNA, 329 bp, Homo sapiens
tctgctgccgcccgcaagcagagggactcggagatcatgcaggggaagcagaaaaaggcaaacaagaagaaggaggaacccaagcagctttgcggcttcgcgtccaaccctcttgcccttcacctacgcgcctagagccagtcccaccacgctcgcgtttcctcctgtagcgctcacaggccccagcaccgatggcattccctttgacctaagcctacagcaggccccttttgtgcttccttcccctcaggcagcctctttccccctgggccactcccgggggtgagggggttgtccttcccgatgctttttgttaccgtggggtttgc

SEQ ID NO: 713578 - DNA, 945 bp, Homo sapiens
  misc_feature (382)..(382): n is a, c, g, or t
  misc_feature (426)..(426): n is a, c, g, or t
  misc_feature (430)..(430): n is a, c, g, or t
  misc_feature (436)..(436): n is a, c, g, or t
  misc_feature (438)..(438): n is a, c, g, or t
  misc_feature (452)..(452): n is a, c, g, or t
  misc_feature (466)..(466): n is a, c, g, or t
  misc_feature (472)..(472): n is a, c, g, or t
  misc_feature (485)..(485): n is a, c, g, or t
  misc_feature (530)..(530): n is a, c, g, or t
  misc_feature (578)..(578): n is a, c, g, or t
  misc_feature (605)..(605): n is a, c, g, or t
  misc_feature (612)..(612): n is a, c, g, or t
  misc_feature (616)..(616): n is a, c, g, or t
  misc_feature (650)..(650): n is a, c, g, or t
  misc_feature (667)..(667): n is a, c, g, or t
  misc_feature (669)..(670): n is a, c, g, or t
  misc_feature (735)..(735): n is a, c, g, or t
  misc_feature (755)..(755): n is a, c, g, or t
  misc_feature (865)..(865): n is a, c, g, or t
  misc_feature (873)..(873): n is a, c, g, or t
  misc_feature (919)..(919): n is a, c, g, or t
ggactccagaaagcctgaaaagctatcatggcagcaaggcccaaagcatccactatcccaacggaagaggccggatggagtccgtgagatgggttttagctagccagccggagtcgagtttagatgaagaatttctaggaaacaaaagaaacagttagtacaagttgcagagatggtaaccacctgctgttccaacaagtagcccatgggtgaaattgacgggatgaagttggtacagacccgaagcattctccactacatagcagacaagcacaatctctttggcaagaacctcaaggagagaaccctgattgacatgtacgtggaggggacactggatctgcatggaactgcttatcatgcatcctttcttaaaaccagnatgatcagcaaaaggaagtggttaacatggcccagaaaggctantaanttggantnctttcctgtgtttnaaaagattttaacngggttnacggaacaaaggnattacttgttgtgtaatgcagctgaggccttggcagagtgtgatntttactccaaaaccatttttagctctagaagagaaaaattccataaanatccatgtctgaatttcctttcctccnggaatanacangtgaaactaaagtactatccctacaattaaaganattccttgaacctgggngnnagaagaagcctccccctgatgaaatttatgtgagaaccgtctacaacatctttaggccataaaanaacacatccatgtgtgagtnacagtgtgttcctagagatggtattgtctacagtcatgtcttaatggatcccagctctgtcatggtgctatctatgtattaagttgggtctaagttgggtcttttgtgtnaagagatntctcttctagaatatcaccttttttgtcagtaaatattgtaagggntcttattggaaactttttggagaggc

SEQ ID NO: 713579 - DNA, 666 bp, Homo sapiens
  misc_feature (582)..(582): n is a, c, g, or t
aattcaggcttaccaacattgaactcgatcgacaagtctgagtgcgggtctgacgaagttccgaaagagatcttgacaactctggtgtgacggcgttgactgtcacatgccattggagccgacgacatggtcggcacgtgatgagggtcagcaaggctgctggttctcacctgatggtcccagcaccgcaccgtaggagagccgatgaggtttcgtaccgctgtcaccctggcactgtttggagcgctcattggcggtgctccaggcgcagtcgcagcccccaccgcttccgccacgaccaccacgacctatgtagattgttcggctcccacgcccggcagggggaccgaaacgagcccgttgaactccctaacccagctcaaaagtgcctttggcccaggcaggaaagtgctgttgcgtcgtggtagtacgtgcgttggcactgtcgtcatcaatgcctccggacgcgccggtgccgacactctactaggtgcctacggtgtggggaagactccggtgatcgacgccaaggcctcggcgcacaatccgcgttcggccatcgaggtcgacaacaagtcgcanttcgtcatccaggacctcaccgttcgcaacggctatttcaatgacatctccgtcgaggctcaatgcttgctgggatcctctgag

SEQ ID NO: 713580 - DNA, 259 bp, Homo sapiens
ccctatgagaaaatagcagtagtaagacattgacactgtgaagaaactacatcacacaatgggcaaatacccagctaggatcaaattcacacataacactattaaccttaaatgtaaataggctaaatgccccaattaaaagacacagactggccaataggctacagagtcaagacccattggtgtgctgtattcaggagacccatctcacgtgcgaagacacacataggctcaaaataaaggggtggcggtggtatag

SEQ ID NO: 713581 - DNA, 357 bp, Homo sapiens
taaggatatctaatggccaaagttcatgatagactcactgctgccactatcatgctagtaaatacatactcaatgctgtagtcaggtcacacaggcagccgatagattatgtactggaagtattaggagagtccagagagaggatgtaagccaggactgtgtactgaaatgccagaggcaactatgtggatataacctgtaatcccagcactatttgggaggccgagatggacggatcatgagctgcaagagatcgagaccatcctagccaaaatggtgaaacaccgtctctactaaaaatataaaaattagctgggtgtggtggtgtgcccctctagtcccagctagtcaggaggc

SEQ ID NO: 713582 - DNA, 839 bp, Homo sapiens
aactacaagttgaggtcagtggcacatctgcctgagaaggcattcgcgtacaaggctttcaacaccttcatgaatgacgtctttgctttcatcatcagcatgcccacgtctctacggctggcctgcttcagggacaacgtggtgtatctggtctacctgtacgagcggtggctttatcctgtgcataaacgcagagtgaacgagtttggggagtcctacgagaagaaggccacgcgggcgccccactcggactgaaggccgcctgggctgccgccagccaagtgcaacttgaattgtcaatgagtatttttggaagcatttggaggaattcctagacaatgcgttttctgtgttgccaaaatcccttcggacatttctcagacatctcccaagttcccatcacgtcagatttggagctggtagcgcttacgatgcccccacgtgtgaacatctgtcttggtcacagaagctgggtagctgcccagtcaccttgagactgtggtggctacccaggcacacgagatgtcccggggttacgagccatggtcctacacagcgggacagagtggtgtggaggccactcaccagagcaacgcgggtgcctgtgtgtgatgttcacatattcaaggatgggtttctcgtagagctgcctcccttatagtggatatattcacagacacccgtatgagaaattccatatccgacactgggcgtcatggggatcataaggtcttctttgcctactttatgtttgaagaggttgcgttgtatttaaagactataatcgtactgtttcctatttttaaaagtaaagttgtttcaagaactgtggcaaaaag

SEQ ID NO: 713583 - DNA, 854 bp, Homo sapiens
gggagttcctccttgctctcgcccctactctttctggtgttagatcgagcaaccctctaaaagcagtttagagtggtaaaaaaaaaaaaaacacaccaaacgctcgcagccacaaatggggatgacatttcttctggacatcctccgtgcttctcccgtactgatcgtctgctcccttagagtccttcgtgaagcttttattcctaagaggagaaattcagtcaccggcgaaatcgtgctgattacaggagctggcccctggactggggagactgactgcctatgaatttgctaaacttaaaagcaagcgggttctcggggatataaatacagcttggctctggaggaaacccgctgccaattgcaagggactgggtgccacaggttccatacccttgtggggtcaactgcggacgcgagaagatttttacagctctgcacaagaccggtgacgggcagaaatgggagatgtcagtattctacgtacataatgctgggtagtctatacatccgatttgtgtgttaccaagatcctcagattgacacgcctttgacggtgcatgtactggcccttttcgggctacaagggctttttcctgccatgacgaggatccgcatgccctatgtcgtgtgctcgggcagtgggctgtcccggtcctctttactggttatgttcaagcaggtgcgtgggtggttctcaccttggccgtcgccggcctccattctggtccaccctgtggccattcggacggtctccactcgcgtgggccccggtcggggtgacggggtggttctggcagttccctcgtacaggggccgtcgcacacctggtgttaccctttcttttttctttt

SEQ ID NO: 713584 - DNA, 187 bp, Homo sapiens
gttcagaggatcccaagcttacgaggtcaggagatcgagtacatcctggctaatacagcgaaaccctgtccctgctaaaaatacaaaaaaattagccgggtgtggtggctactcgggaggccgaggcaggagaattgctggaacctgggcaggtaggaggttgcacgcgagtcgactatcatgccat

SEQ ID NO: 713585 - DNA, 172 bp, Homo sapiens
ctctgctcggaccctcataatgtagagcatttcctggaatatcttctgcagccccaggttcatctcgagcgcaacaccgggcgggagcgcaacaccgggcgggagcgcaacaccgggcgggagcgcaacaccgggcgggagcgcaacaccgggcggagcgcagcaccgggcg

SEQ ID NO: 713586 - DNA, 356 bp, Homo sapiens
acccccggtgtgggctcgttggcagtgacttgcacgatcaggctgagcatcccccgtgtgtctacgtgaaccagcgagtcgtaaagcggaggagggtgcttcgtatcgcaaggtagggaggagctggtgctgcctctgcagtcatctgggcagcctgaggtggctttcccatgatctagcctggcctccagcctccatctcctcagtaccttatggggctgttctaggaattcctcaaaacaacgtgtgtgagcgcaacaccgggcgggagcgcaacaccgggcgggagcgcaacaccgggcgggagcgcaacaccgggcgggagcgcaacaccgggcggagcgcagcaccgggcg

SEQ ID NO: 713587 - DNA, 180 bp, Homo sapiens
ctgccaggaaaaggtctgtgcgggtgagggagcgcatcctatggatatctagaggaagagcggaacaccgggcggagcgcaacaccgggcgggagcgcaacaccgggcgggagcgcaacaccgggcgggagcgcaacaccgggcgggagcgcaacaccgggcggagcgcagcaccgggcg

SEQ ID NO: 713588 - DNA, 267 bp, Homo sapiens
taaagggtatggctttggtgatagcataaataatggtttccctttttggtgaatggtaaattaattggctgggcaactttggtattcccatagacgggggaagcttaatggcctttacaagtacttatgtacaacttggtatcaaattttctggtaatagttaatgctttagtactattattttgtactaataattttatctggacttctggtgttatatcatttggtgacaattacatgggttggtaaaataaacttttaaacctc

SEQ ID NO: 713589 - DNA, 455 bp, Homo sapiens
  misc_feature (107)..(107): n is a, c, g, or t
  misc_feature (209)..(209): n is a, c, g, or t
  misc_feature (218)..(218): n is a, c, g, or t
aactgttaaagcgcgctaacagtacctgccctgtatgcttcacaagggtatgattattgcaatctgaaagaattttgtttcaacaaaagcaagtttgcctgaagganaatgagctgtgtaaacagttaacgaattaggaatgccactccatatgtacagaaagtgttccaagaacactggcttattcactaaacccttactgctactgnacagggttngtgtgccaaattctgtgctagtcactttcatgtattgtctatttcacatttctaaaggtaataaccaaaatctggatcatttgaaagatcctacaaatttactttataacagaaaagtcatacctagaataatgtctttgtctggttgtgttgccataaaggaatccctgaggctgggcagtttataaagaaaagaggtttatttggtgcacagttctgcaagctgtacaagaaaga

SEQ ID NO: 713590 - DNA, 468 bp, Homo sapiens
  misc_feature (196)..(196): n is a, c, g, or t
  misc_feature (240)..(240): n is a, c, g, or t
  misc_feature (268)..(268): n is a, c, g, or t
  misc_feature (329)..(329): n is a, c, g, or t
  misc_feature (393)..(393): n is a, c, g, or t
  misc_feature (422)..(422): n is a, c, g, or t
caccactgttgtatctggtctctgctcaatcacgggtgctgccagctagtcacccagactccagctagagtgttactataaacttcattctcttctattactccttgtcccttttcatgcacataaatcccaccaatgctggccatcatgacattttgttattgccagaacaagttggacaactagtttgtcctanatttgaattcctgtctaatgcattgccataatatgtcatttccnttcatataaggcctctgtccatcaccanaagatgtaaactctctccttgatttcctattaaatatagcaatttccctcttattgttggngtcactaatttgacggtatatcctatacacctgcaaatgttgtttgcatagcattttattctcntatgaattgtcctcttctctttttcatgngacatatattcctccagtctggccatggtgaatttcacatcgaacc

SEQ ID NO: 713591 - DNA, 133 bp, Homo sapiens
  misc_feature (1)..(1): n is a, c, g, or t
  misc_feature (110)..(110): n is a, c, g, or t
  misc_feature (123)..(123): n is a, c, g, or t
ntgatcacacactttgaaaggtccaaaatggagtaaggaatgggaagatttcgcagttaaagatggctaccatcagggaaagagatcaagcatctgtgtcacgcttctgngcttaatttcagncgtgccagtg

SEQ ID NO: 713592 - DNA, 372 bp, Homo sapiens
agaaatgtgtggaatttatatgaagatacagggttatgtacctgaagcactctaccgtgtcagcggcgaaataaaactgaccaaggacaatattcaaaagcagtttgatcaagatcataatatcaattctagtgtcaatggaagtaacagtaaatgctgtaggtgggggcccttaaagcttactttgcagatcgtgccagactcctttacttccatatgctcttcatccagaactataggaagcaagcgaaaatcccggagtaaaacagaacgtctccatgccttgaaaggaaatggtcgagaaatgacaatccgtgtaaactatgatgtattcagaatacgtgaataacacatctaaacagggttagtcag

SEQ ID NO: 713593 - DNA, 150 bp, Homo sapiens
ctgatatttctggaagagattgacatttgaatcagtaaactgagatgaagcagattgccctcccgagtgtagggtgggcctcatccaacccatggcacggcttgaatacagctgatgggtataagaacaggtttctagctccactgtctt

SEQ ID NO: 713594 - DNA, 166 bp, Homo sapiens
  misc_feature (139)..(139): n is a, c, g, or t
  misc_feature (147)..(147): n is a, c, g, or t
ccgagctcgaattcgtcgaggtggcggccctgtccgctcccaaggcttaggtatccagcgcagggcatctggtggggaggcctgctggtaaaggtcgacgcgctgggtgcggaagacaacacaagaaagcctccggcgngggcttgngacgggaaccgaggccaga

SEQ ID NO: 713595 - DNA, 456 bp, Homo sapiens
  misc_feature (75)..(75): n is a, c, g, or t
  misc_feature (84)..(84): n is a, c, g, or t
  misc_feature (335)..(335): n is a, c, g, or t
  misc_feature (383)..(383): n is a, c, g, or t
  misc_feature (385)..(385): n is a, c, g, or t
  misc_feature (409)..(409): n is a, c, g, or t
  misc_feature (429)..(429): n is a, c, g, or t
  misc_feature (449)..(449): n is a, c, g, or t
attcggcacaggggtgtgccccgccatccagggcacttactgtaacagctctcgcaggcccggccagccccaggntctggccgncggcccccgtgccgttcaccacaccggccttgacgttgttgacgctgatttggttcggatttggcttgttacttaaagagggaaaggagagacgagaggagttgcaggagcacaaacctcgagggcccatgtgccagcaggcaccgcggctgaccaccccttgtccagaaccacgtcctcgcacccctcggcctcggcagggatcttcctttctcccctttcagttcctggggagccattgttgaggtctnagcccttcttcagggcccccgtgcttccccttagcattggagcccagntnaggggactgaacctgggcggtgtngggttggaattcccaatggnccctttattgaaccaagganggcaagg

SEQ ID NO: 713596 - DNA, 164 bp, Homo sapiens
acctatctgtactgactatctatactggacttatctatactgacctatctatactgacctatctataccacctatctatactacctatctatactacttatctatactgacccataattgtcggcgcggaggtatagataggtagtatagatgcgtcagtatag

SEQ ID NO: 713597 - DNA, 212 bp, Homo sapiens
gctcccccctccccccgagcgccgctgcggctggcaccgcgctgcgtctgccggagtgttgcaagtctgcgtggctgaaggtgaggcgcccctgcgtgcggtgctgccccgtgcaagtgcgcccatgcatggatgtgatgctgacccccggagcaccccccatgcagcccaccgatgggagatggtgtgtcgccgcacatgtgaacaaaaat

SEQ ID NO: 713598 - DNA, 249 bp, Homo sapiens
  misc_feature (5)..(5): n is a, c, g, or t
tccgnatctcagtgatcgagtgtgtatcgacacagcgggggctggtagactgaagatgaattccggaaagatgcggccgctgacttggttgagctagctgagcagttccaagtagagtgacagggaccttgccccttcttgttgcctctctcgccaatgagccagtcaaggcctgcttatgcaggccttgactggggaccagaaagcctttgtaaaactaacactttggccacaagattagaaatgacg

SEQ ID NO: 713599 - DNA, 433 bp, Homo sapiens
  misc_feature (6)..(7): n is a, c, g, or t
aggggnnaaaattttttcccccccctgttttgttcttttgccaagaaatttttttttccccttgtgcttaaaaagaaaccccctttccacattccctctggggtgggccaaggggggcctttactataaacaaaaactgggttcccccttttgtaagggggttaacccagttaaagcttgccaagtcggcccccagaaaaattttggttccttttgccccctgggaagttttttttccctccccccccccccccttttggctttttttaaaccacctgtgggcccaagtgtttattaaatttttttcccaaaaaaatttaaaaaattggtttttcctcccaataaccacccaaattttttttttacgtaaaaaaacccgttttttttttgcttttgcccccccctttttagttaatttttaagggcttgggga

SEQ ID NO: 713600 - DNA, 235 bp, Homo sapiens
atacctaattacgactagtcggtttgttactcactgagctgcgatgggaactcccccaggtagaatttctgagagggtagcccataccgtaaaagatgcttaggttatggagccagatggtcaagcctgggttagaatcccagcctttgttttcctgaaggcagcaggaccttctgtgggcgggtgactcagcctctgcaggtctctttcttttcatctgcaaggtcaagacacc

SEQ ID NO: 713601 - DNA, 747 bp, Homo sapiens
gaagggcgccctcaccgcgagttgcgcactgccgtcctttggaacgaaaaacgtgtggtcgggcggacccaccaagtgactgttccacccagtgcctagaataaagcgtgatttcttgcccccaacgtctcacaccaaggcttgggagcacccctggggcgcggtcccacaagcccacgggcacgaacatttttggcggctgtgtcccccgtccgaagagccccccactttgacaccccgaggggtctgcgctcccacgggcctccccacgaaggtgggctggcacccaacacaccctctatttccacatatagtgggcactttgccctgggacgtcgcgcctaacttcgaagcttcgggttcacatgaacgccttctcgatatttcttcgtgcacgagaacctggagccaacgtttacacaaccggctcgcctcgaaatccgcttatggccccgccccttcccccaatgttcccgtccccggccccagtcaacgtggcgcctgggcacacttccctgctgcctgtaaatactttgtttaatcccccgttcgcctggagccctccgccttcacactttcccctggggaacccacacgtggctgcgtgcccctgctgctgtcacccttttcccccgggaacctggggcttttgtccacagagttcctgtccccatttgtcggcctccccccccccccaagattatttttcaccccaacctccaaataaatcccctgcgtttttggtaa

SEQ ID NO: 713602 - DNA, 294 bp, Homo sapiens
atactatgctcgtattatgaaactattagctattattcaaccagtagccctagacgacgactgacagacaacattacagcagggcacctataaattcatctaattggaggggccacattagcactactcaacatcaacactataacagcttttatcacatttactatcctcattctattaactattcttgaattagcagtagctctgatccaagctcatgtgttcacactgctagtaagcttatacctacacgacaatacataatgacccaccaaacacacgtcggctaattct

SEQ ID NO: 713603 - DNA, 716 bp, Homo sapiens
gctcacgcctgtaatcccagcactttgggaggccaaggtgggcggatcacctgatgtcaggagttcgagaccagcctgaccaacatggagaaacctcgtctctactaaaaacacaaaaaattagccaggcgtggtggcgcatgcctgtaatcccagctactcgggaggctgaggcaggagaatcgcttgagcctaggaggcagaggttgcagtgagctgagattgcaccactgcaccccagcctgggcaataagagtgaaactccatctcaaaaaaaaaaaaaaaaaagggggcttgaaacttttgaagcaaaaggtgaaagtccccattttttccctttttcccagagggtgatcttttgggggccaatcgggtttcattttcctcccagacacctttctctagggcatttctatgtgcctctatttcacatttttacacaaaattagggacgtttcccttgtgctcccctttaaatggcgcattattgtattcttccacgtctttttttttccccctagggggactctttaataccttaaaagctcacccgggggctgggagcggagggcctcatacggtgtaatcccaggccttgggagccccaggggggaaggattcccttgagctcaggagttccagacaattcccaaggcaaaacacaaagggcatctcgaacactcgtgtgggccaactttagaaaagccccatttttt

SEQ ID NO: 713604 - DNA, 862 bp, Homo sapiens
ggcgtgcgtgagaagccgatgagcagcatagtctctcggcgacaccctgtacgactgctggtgcgggaatgtcctgcacgaggaaccagcgcaagcgccgcatagttcctggatgacggtggacgttgcatatcagtcttgaagaactatgatccccagaaggacaagcgcttctcgggcaccgtcaggcttaatgtctcactccccgcgctaatgttctctgtgtcgtgtccttgtgggggactcatgctagcgactgtgactgatggctaagggccgtggatatcccccgacatgtgacatctgatggctgctgaagaaaactcaacaatgaataacacaaactggtctaatgaatgctggccaatgaagtatgatgcgtttaatggcctcagagtctctgatcaagcagattccacggaatcctcggcccaggtttacaataaggccaggaacagttcccttccctgctcacacacaacgaaaacactggtggccaacagtggatgaggtgaagtccacaactcaagttccaaatgaagaaggtgttatgtctggcctgctcgctgcttggtcacgtgcacgatgacagacgagtgaagctagtgtagtacacattcacctggcatgtcaacgctcctctggatgtccattgctcaacgaaaaactggcagaatgatcccgcggaccttagtattatcaagaagcacccatggtgcaacagggcccccagacggcgtactcttcaaggcgacacttgcactaacagttactagtcaccacggataacaaagcacacgcacccgaaccactgcgaggcacccaaaagaaggcgtgtcgcaaaccggagttagctcacacg

SEQ ID NO: 713605 - DNA, 186 bp, Homo sapiens
ggctgtgggcgcgcctgcagcgcgataaacccaatggctgacctctttgtggcggccggccccattcacgtcgcctgctagggccattggcatttgcccttctcatgcgatgtcctacggaaattcactcagcgcatgctatctcacccatctcacaggtttcctacaagtgccccgcgcccacaa

SEQ ID NO: 713606 - DNA, 593 bp, Homo sapiens
gtgggcggatcatttggggtcaggggtttgagatcagcctggccaacatggtgaagccctgtgtctactgagggtacaagaaagattagctgggtgtggtggtgtgcgcctgtaatcccagctactaaggcaggagaatggcttgaacccgggaggtggaggtcgcagtgagctgagatcgcgccggtgcgctccagcctgggcgacagagtgagactctgtctaaaaaaaaaaaaaaaggaaaggaaacaaggaaaactttggagagaacataacttttctacttttgaaataggataatttttcaaaattggtttaaactccgtggaacattaacgtggtcatttgttaataactgggagtttgagagataccttttcagaggaaaacaagagggctaaattccatggttaacgagctaagtagtattttttgcttaacaattttggcgaaaatttgcttcatagtggagccaaagggagaatacatgtctacaataaattctagtttctaaatatttattcacagatggggaacaggtcttgaaaaagggtaatatccggggattaaatagccctgtaattagatggaat

SEQ ID NO: 713607 - DNA, 202 bp, Homo sapiens
ctgcatgctgcaagtcgatctagattatcccccctctacagaccatgcttctaacctccctgttgcttatgaattcgatacagttatacccccgattccgtctactatcaagctacatacacctcctataaaaaacttcctaccactcaccctatcattacttatatgatatgtctccatacccattacaatctccaacatt

SEQ ID NO: 713608 - DNA, 320 bp, Homo sapiens
tcttgtttcctgcacttcgggaggccaacgagcggatcacccgaggtcgggtgatcccgcggtattgctctatatagggagatccctatatagggtctcactctattgtccaggctggtctggcctggccaatgtggtgaagcctcatttctactaaaaatacaaaaattagctgggcatagtgatgcgcacctataatcccagctactcaggaggctgaagtaggagaattgcttaaactcaggagacagaggttgcagtgagccgagattgcgccactgtactctagcctggaagtgcaggaaacaagacgggtaccg

SEQ ID NO: 713609 - DNA, 280 bp, Homo sapiens
  misc_feature (16)..(16): n is a, c, g, or t
  misc_feature (134)..(134): n is a, c, g, or t
  misc_feature (142)..(142): n is a, c, g, or t
  misc_feature (216)..(216): n is a, c, g, or t
  misc_feature (224)..(224): n is a, c, g, or t
  misc_feature (260)..(260): n is a, c, g, or t
cgcgcacacgccacangtgtgtgtgtgtgtgtgtgtgtgtgtgtgtgtgtgtgtgtgtgtgtgtgtgtgtgtgtgtgtgtgtgtgtgtgtgtgtgtgtgtgtgtgtgtgtgtgtgtgtgtgtgtgtgtgtgtgngcgcgcgngtgtgtgtgtgtatgtgcgcatgtgtgtatatgtgtgtgcacacacgtgtgtgcgcgcacatgtgtgtgtgtgngtgtgtgngcgcgcgcgcgcatatacgcgcgcgcacacacacangtgtgtgtgcgcgcgcgcgc

SEQ ID NO: 713610 - DNA, 683 bp, Homo sapiens
cgagaagggagcgaaggttttttgcttgcgccaacgcatgtgacctgaagtgctccggtctactctctggcctgtatccttggctgatagattggtgccacgtggatggcttgtggtatcattgggcccctgtgctccatgctcatttgctcgtgctcgtgctgcaggtctgggcaacttcattcgaggatcgagcccctcttcaggcgtgcacaggctggggccatgcgcattcggccatggacaccattatcgaggtgctgtgtgctgggttgggggcccgtggcgcgagatcacccgagtggggcattgcccctgccacttgaaggtacgtgcaaagtttgcggtgtgcacgtaggacagtgttgggcctatatcgctttgacgtcgccctaggttgaatgagggacctatttctcgtaacccagggcgcaagtcgtgggcactaccttggatgcgaggtggctgcgatggctcaaacaacaaatatggtcgcgtctattcttgggtcgggtactccaacggggacagaagcttgttgcattccgcagttcttggggtgttagggagacttgtggagtctaaagagggcttccggaggtgcaccctgaaggtttagaaactcccaggaaccaaggaaaaccttgccagtttccacgagcaggatttgactgaccgaggca

SEQ ID NO: 713611 - DNA, 851 bp, Homo sapiens
agtgggactgggggactcggcactgatttacaccttcacacaggaggggaaccaacaaatcgacttgagatcttatgacatgccatagtgccactcgaggcagtcagctgtcttgcatacagctcaggaaggtgcccgaaaactgctggtcgtggggtcttatgactgcacaattagtgtacgcgatgcccggcaatggcacgtgctcctcataactctggagggccatagcaaaaccattctttgcatgaaggtggtgaatgatctcagtgtacagatggctccagtgatcagtcagatccatgcctcacaacattcacactggtgagactcgtgcggatctatacaaggtcacaatcatgcagtgactgtggtgaactatcctaggaccacgtgatggtgactgcttgccctggataccatttgtcacgtgtctatgaattacagtctcatgatcgattacaaggatcatggcaggacacaaaggacatgacttatgtgtatgaaccactccataaaaggcatgattcgacactggactgatcatgatggccagctattcagggcaccgtagaacgcttaacatcgtgatgcagcaaattacacgcatgttggatggccatggatgcagcatctgcataatgctggcagatagatagagtcattttagaaaagaaagcacgtttgcagaacacgaaccagcacataattcccgaacatataccaggacctccctgaaaactgttgcgctgggacagaaacctgacgcattagctcgtcggcagcactgcggtacggaaagcggatcaccagctaggaatggctggacaggacgttctagggacccgaac

SEQ ID NO: 713612 - DNA, 298 bp, Homo sapiens
ttctacttccacgcaaggatcaagggaacaatgggaaaggggattgcggtgtgtgtgtgtgtgtgtgtgtgtgtgtgtgtgtctgtgtgtgtgtcgtgagtagagtgtctgtctctcctccagaaaacacagacttatactggagctcctaccatgctagcgagaggtctatgctgtaaggcacagtatatggatgctacagaggggatgcaggcttcccccgagacagagcagaagccaacacattcatttgaagaaatctctcttgtgcttcagctttgccgtctaggagcgtact

SEQ ID NO: 713613 - DNA, 430 bp, Homo sapiens
gtagtgcactgtgtgggatatagggtgccattttaaaatgcattcgtgattcctcgttcgtcatagttgtgtgtctgattttgttatcgcctagtctatagggaacctggtgtttgttggcaggcagtttgactgttttgcttttaaggcagtgtcatatttcaatgcagacatttcccatgccaccctgataacatgcggaatggatttttgaaataataggaaaaggtagggttgttcaaagtattgtttattaagatttccatgtttttccatgaggcaattctgagttgacagtgacacacaaaccgcataattctgagatgaacttaatgtcccctcctgtactccctgttcactcatgattgcatggcgccaacaccatcataaagtttgcccatgacactacagtgatcaccgacgtcgacgc

SEQ ID NO: 713614 - DNA, 313 bp, Homo sapiens
ttagttgctgcacatggataacaacaaaaatttgattattctcgtgttagtattgttaacttctttaaatgatgtaacgcagtcgcaaaaagaagttaacaatactaacacgagaataatgttaacttctttttgcgactgcgttacatcatttaaagagaatgctgtgtattgtaaacttaaattgtatatgataacttactgtcctttccatccgggcctaaactttggcagttcctttgtctacaaccttgttaattactgtaaacagttgtacgccagcaggaaaaatactgcccaacagacaaaatcg

SEQ ID NO: 713615 - DNA, 801 bp, Homo sapiens
  misc_feature (554)..(554): n is a, c, g, or t
tcttgctgccggtgacgcgccgaagaagccatcgttaaagtctctcttcaccctgccgtcatgtctaagtcagagtctcctaaagagccgaacaggtgaggaagctctcatggagggtcgagcttgaaacaattgatgagagcctgaggagccatttgtgagcaatggggaacgctcacggattgtgtggtattgagagatccaaacaccaaggcgctccaggggctaggggttgtgtcacatatgccattgtggaggagggtggatgcagctatgaattgcaaggcacacaaggtggactggaagatttgtggaccaaagagagtggtctccagagaaagatctcaaagaccaggtgcccacttaattggtgaaaaacgatattgtgtgtggtggcattaaagaagaacactggaagaacatcactaggagattatttggaaccagttatggaaacaattgaggtgattgaacatcatgattgaccgagcagtggcaaggaaaagggggctttgcttttgtaaccttttggccgaccccattgactccggtgngtaacggatgtgtccatttcagaaaattacccatactggtggaatgggccccaactggtacacgttaagaaaaagccctgtcacaaggccaggagactcgcttagggtgtcatccaggccaaaagaaggtccgacagtggttcttggcaccctctggtgggcgtgtccgtcgacggttggttccggctggacatgcacacactcggcgcgggaggaaactccagtgccgggtggctttgttgcccct

SEQ ID NO: 713616 - DNA, 402 bp, Homo sapiens
ggggggttaacaaaataaaaaaaaaaaaaaaaaaaaaaaaaaaaaatttgggggcgcgcgccttgggccctggaaaaagtttttaagacaccaatccggtggggcggcggggcgcccagttgggtaaaggggacacagtgggcgcaaagagcggggtccctagggggaaacccggggcgcaaggaaaagaggggggggatttttacaccaaatataaaaaagcgccgcggggggaaacccgggggggtttgggagcaaaaacccaaagaggggggagtcccagggagggcgcaatacacgggggctcataatcaaaagggggggcccaaagaggagagcctcggaatatctaaaaatttacgcgccccgggcccctgggggtggacacccacagcacacgat

SEQ ID NO: 713617 - DNA, 262 bp, Homo sapiens
ctggagactgctgacctcggggggcaggaggtctagaggaaggagatgcatggcaggatgtgatggggatgatgagccgggcagcagactatggctcctgagcactctgtggggacctagccctgtgagcctcagaaacgccccacaatggcacctcttattccagtgctggagatggtcaaacaggcccagagagaagtcacttgcccagggtcacgcagttcgggtaaggcagagcccctggctggagctcctcctcatg

SEQ ID NO: 713618 - DNA, 335 bp, Homo sapiens
  misc_feature (299)..(299): n is a, c, g, or t
gggaaggatcagagggttgggactttcagtcccacccccgcctaacctccagggaagggagaggggctgaaggtcaagttgatcaccaatggccacggtttaatcaatcaggcctacgtaatgacgcttccatacaagccaaaaagatggggttcagggagcctccaagcagctgaacacatggaggtttctggagggtgatgtgcccggggagggcatggaatctccgtgccccattccacatgcctggccctgtgcatctctttatctgcatcctttgtaatatccgttatcataanccgataatataagtaaagtgtttatccgaaaaaaaa

SEQ ID NO: 713619 - DNA, 927 bp, Homo sapiens
gagagagagcactagtctcgagttttgttatgattttttttgtgtcagaaatggggcttggtcatggtgacccagcttgggtctggaatctcgtgggctcgcgcaatttctcccaccttttgccttcccaaattgcgggtgggattccagggcttgagtcatccattgcccatgcctaggattagagttcagtaacaattgggtcatgctgggggagactggagaaaacgccgggcttagggagcacgcaggctgtatggagacggtggctcgtggtgcgggcgtggaatggatatagccattggacggcaaataaggagagcctctgtgcatggaaagagctcttggaacataaggcggaggagaagaacgcggatagacggcctgggtgatgcccttgtgtggacatgcggcacccatataggcgccaaaggagtgggctctcacgagaggtggaaccgagggggcaagaaaataagaccgaagcgcgggaactcccgaagggggttatgcaaatgagagtggcagaagcacactgtgtactccagccctatgaaatgcctcgagaagagacctaaaacagagaaacaacacaacggacacacaatgataagagccccccaagaggaaagacaaaccctcctacaacgagcgagcgaaacttacctcacgagagtgaccaccgtctgtccatgtttatccagcgaaaatggtcgacggaaaagggtttgagaagcagagttgaattacatcctacggtttaccccaatagagtgttttgtacgacagtagggacgatcccgactttacggtccacttaggtgtcacgacacgaaagcgcggtctatagcccccaaacaacccaaagctaatgtcactaaagacgactatcattctgacacaatacgtgctacccgaaaagcagcg

SEQ ID NO: 713620 - DNA, 571 bp, Homo sapiens
  misc_feature (113)..(113): n is a, c, g, or t
cctttctgggttttccgctgaggtttgttgaaaagacgcctcccagactcttcactcacgaagtgtgttacaaaaactctcccggcaactgtcctgaccctcaccaatcacgntacagcccccattcgattgcttgcacaaagaaaacatttaacacaggtgtgatcaacctcggtcaagatgcagagtcatcaacctcggtcaagatgcaaaaaggtggccttttctgcgaaggccacgccctctgtaaatacagttactacttggtgaaaagcgctctacttcctagctcttgttggtgagagggagagcaaagaaccagggcccggcattcttacgagaggaattcaatgtcacaggcactgcctgtttgaggagaagatcagaaacggtccgactcccagaacgcagcacccagttgctttgcacgccaggccagtcctggggaaacggtgcaacgcttgtctgggcgtcgaggaggctcccttgcggtcctccctgggcccttgccagtcccaaggagttccaaccctgctttctaaccctttaaaatctggagagggcggccgca

SEQ ID NO: 713621 - DNA, 696 bp, Homo sapiens
agagttttagagagagagagagagttagagagagagagagagagatagagagagatatagatagatatagagatagatacctatattgatatcgttctactattttcatatctctttatacatttatacgtctacacttatatttctatgctcatctccttctctctatggctctttctccttttctctccttcttctacccattctctctcattctctcactctcttcccttgttcattttcctacttttccttatctcaccctttcttgcctctttccctcctctttcatctttctcccccttctctcctctccctctctcttctccttctcctccttcccctttcttcctttttcctctctttccctcattctctctctttccctctcctctatctctctcttctacccgtcgccttccttcttttctcttcttcttcctctccccttttttctctccctctctcctcttcctctgtccccccttgttcttatctcctatctctctcttctttcttttccttcctcttttctttctctctcctctctctcttcctctttcttcttctctcttcctcttcccctctccttcttcctctgtttttctcccctcccctctcttctccctccctcttctccccttcctctccttccctctttctcccccctctccttccttttctcccctcctccct

SEQ ID NO: 713622 - DNA, 94 bp, Homo sapiens
ctcaaggtgacccaaggccccggctccgccccgaccagctgaagattctctgctcatacagcttcgcggaggtgctgggtgtggaatgccgggg

SEQ ID NO: 713623 - DNA, 657 bp, Homo sapiens
ctgacttgcttgtatattgtttatcagaaaacttaaattagaaaaaattttttttaattctgagtggtatttagtttacatttggtactctgagacaaaacacagtgatggggcgaatatttatgttctgtttgataatgtgtaaccacaaacagtgttagggcaacttaaactagcagagaaagttgtatgtacatttaataaagtccttagccatcatctaccagtaaataagtttgtagaataatgaaatatttgccatttttgattttttttttttttttggaaacggggtctcgctctgtcactcaggctggagtgcaggggtataatcatgcctcactgaagcctcggtttccggggctcgggtgattcttccaccccagcctcccaagtagccaggaccacgggtgtgtgccacgacaccgggctaattttggtatttgggtagacataggatttggctgtgttccccgttggtgatctcgaactcctagacgggggccttctgccaccttggctcccaaagtgctgggactacaggcatgagtcacggtgccaagcctgtttggattctaagagtccttgcaattgccttggattcctggtggcagttaagcaggaggtagagaccacctgttgcaagatgtgcagtcc

SEQ ID NO: 713624 - DNA, 1034 bp, Homo sapiens
agctgcgacagatgggctactgtagtcgtgttggtcatatttccggacagctactctcctaactaagtgcgtggcgtcgcccgatggaatgatccatagtgagtacactgacacagtagacgacctcgacatggaggtcccctagtaaaacgtcctcctgcttgctgaggtcttgtgcaacctttgaaagagctccgtactaagagtaattagtcactttacaccgggtcgcgactctgtagagtggagaaaatggagacaccagtatatacttttaatgcaacggtgacagattaatggagctgtgttgcggaaaggatgaggttgcagatcgtgtgaactcagcggcaaatgtagtgatccacggcagtccgcctctgcatttcacgatgtggcaatagttgagattggtgtgcttgtgacgtctctaacctgtatgtgcctatgtgagagggagttctgccctatacacagcaacacaggtgtgtcattccaggttgtcggtgtggtacctgggtgaccggagcaatattgcgtggagagtggcttaattagctgtggctgaggatctatgagcccgaaagcggttagagcagggggcatcgatgcgggactgtcatgcctagtcttggagccgtgatttgcccggtgtctggtgggctgggtgtccagtagtactatgatacacttgctgcatgatgcagattgtgttgctgatgaatggtgtgtatgcagcatcaggaatgtgggttgggatcacaagaccggtaggcagtataagaagaactactatgtatcaagtacaagaaacagcaacaggagtggaaagaccaaacaatggtgggacagagctatagcagaagttacagcacattaggaagagaacacatcacaccaggtattaggagaagaagcgaagatggaacgagggggttccgcagagacgatagccaaagagtgacgcagcatgcacgaagagttgtgaaaaaaaagagagaacgagacactcagcacaaacacagagaagactgcaa

SEQ ID NO: 713625 - DNA, 229 bp, Homo sapiens
tccgttacattccgtcacagtggagagacagatgatccagtgaaaccaatggtacactggtggcccctggggcagagtgggctgctcaacctgcggccagaccgacttcgtcttctacgtcggggggtaccccatgtaccttcacgcccccgtcccctggtttcggtttcccccgggctacccgggggcttgggtcggaggttccaacgcagggttaccgaggctcgaa

SEQ ID NO: 713626 - DNA, 886 bp, Homo sapiens
ttctgttgaacaaaatatcacaacaggcagttgtgatacgaatagaacaaaaaaaaagggaaaaacactaaaacttggtgaggactccgatgagttggggacttcaggaaaaatcaacccagcaccagcagctaccaaccaccatcccatctcttcacttgaaccagcattaagtaaagtccagatgtgggaacccttctctgggaagaaagtgcctaatggtgtctcagaaccggtgtaaacaaaccagccagccgccaccttgctaaacctataagctttttaaaatcccaatatatacctgccaagaaatatgcctgtgatagtaagccctcagcccataggtgttattggtttttaaacagaattatatatgtctggggggtgaaaaaaccctttgcattccaaagggtccatactgggttactgggttccattggccaccacttagtgggatgtccagtttagaaccatttggtactggctccctctgggaagccttgcgcagagcttacttggtacatcggtgggagaatacctggctgaatttataacgctggtttcgacgttcgattcgccaccattggcaccacaactcaatatgacaacctattttaactatattcataatctggtgaacacgtattcccacggacacattcggtcatacggtacttaatcacgtagtgatgacacccgcaatacactaatagtactccttgaactagaggtcacaatttatgatggcccattattaaatcgggaacaattgtgacagcggtatgtccgtattacacacgtaaaatatatgcctttgtgaaaccttccctggggatatttcaaacgtgtaaacgtggctcacccaacatcttaaatataagaagct

SEQ ID NO: 713627 - DNA, 858 bp, Homo sapiens
taaggggacagggggggggggttttccggggggtcccaaaaaaaaaatatttctagggggcaaaaggggttgggcctcaatataaaaatctttgggaagaaagtcccagcggcctattaaaaaaaaagaagaatatgggctccgccgcagaacagcacagcacgggcgcggaacaaaaacagcggaaccggcgcgagcggagagcacaagtgccctatgcggggggggggtcgccagaagatagaggcgacgaagtacctcgcgacgcgggggctcttgtgagcagaacacaaaaacgtggcgtagacagagagggagagagacgaatgcggcgggggaggaaagaagggatcatcacctctctcgagcgggggcagccccgagcgaggagaggagagagagagacgaggagagacagaaagatctggacgaagaagacgagtggccccaccttgtataagtcaatcgggctcgtacacgaacaaatctatccaagggcaagtctccccatcgacagacatccctgcagccgagagggggcacggaaaacatgattaccgccccccacaaggaaggagaccgacctcccggccctacctcggtaccaagaattaggcttatgcgaaaaacacccacgatcagcgcggtaccacaacaagttgagctggggccccctctgtatcagaaggagcaagcacaaaagcggactaagtgggtagtcacaatcacacaaacaacgtggtgtgatgttggaatcacccaccttcgtgggtggcaccacaaacgccgcgggggtgctctccaaacaaaatcagtctcaagtccacaacaggggcgcggcggcaaccaacaaacctc

SEQ ID NO: 713628 - DNA, 130 bp, Homo sapiens
ttcgagtaacaaagtataacagaagcctgagatcaaaatgaagcgaaaatctgttcgcttcattcattgcccccacaatcctaggcctacccgccgcagaactagatcattctatttccccgcgctattg

SEQ ID NO: 713629 - DNA, 713 bp, Homo sapiens
gccgccctcggctccccgccaccggctcggctcggcctggagccccttcctgctcgccggggcccagtccctggagctgcccctggccctggctggcttgtggctagctgtgtcccggtgtccattgtccggcggtcctgtcttgtcctgggaggtgctggtggcccagtggacccagagctgcagctgcagctgcctgatgtgctgcctgtgatacatgatcacttggattcatgtctgagttttgcttttgctcctgtggtgaacttgcaccagagctgtgagtgttagcatcttgcaatgtgagtgtcagtaacatatccatgtctgtgaaactgtgtgaaatgaccagagctacttgcatcatgggaaacattgtccctgtctggaaacatgacaaagtccaaataacatgttcacttgggatcaagtattttgcttggtgctagaatgatgcaatgccctgccatggcgattgattgaaaacttgattttcctggagaccttgtgcatgtcagctgacaagctataccaacaactaatgagatcatggactccagtagcaggtgacaagtgagggtgatgactgaggatgactgacacaagatgaatgtctcttcccacacatcagaggacacgatggctggggtggtcaaatgtggagacagagttagaacatcatgaacagccttgttggtgggaacgaagtggta

SEQ ID NO: 713630 - DNA, 765 bp, Homo sapiens
  misc_feature (21)..(21): n is a, c, g, or t
  misc_feature (112)..(113): n is a, c, g, or t
  misc_feature (118)..(118): n is a, c, g, or t
  misc_feature (128)..(128): n is a, c, g, or t
  misc_feature (130)..(130): n is a, c, g, or t
  misc_feature (136)..(136): n is a, c, g, or t
  misc_feature (140)..(141): n is a, c, g, or t
  misc_feature (173)..(173): n is a, c, g, or t
  misc_feature (182)..(182): n is a, c, g, or t
  misc_feature (191)..(191): n is a, c, g, or t
  misc_feature (202)..(202): n is a, c, g, or t
  misc_feature (238)..(238): n is a, c, g, or t
  misc_feature (316)..(316): n is a, c, g, or t
  misc_feature (352)..(352): n is a, c, g, or t
  misc_feature (359)..(359): n is a, c, g, or t
  misc_feature (430)..(430): n is a, c, g, or t
  misc_feature (505)..(505): n is a, c, g, or t
  misc_feature (523)..(523): n is a, c, g, or t
  misc_feature (528)..(528): n is a, c, g, or t
  misc_feature (551)..(551): n is a, c, g, or t
  misc_feature (592)..(592): n is a, c, g, or t
  misc_feature (620)..(620): n is a, c, g, or t
  misc_feature (652)..(652): n is a, c, g, or t
  misc_feature (700)..(701): n is a, c, g, or t
  misc_feature (730)..(730): n is a, c, g, or t
tgctaagctgtgatgtttggnagattaggtgtattaaacacatttcaacttgcaatactttcaacctatgatgtactcaccggaatgtaacccattgtaaactgaggaacanntgttnctcaccccanangaaggnatgnnggaggaaggtcaagcgcctcttccaggtcagntggggcagnggttggatncaaaccaggcngcctgggtccatggtaaaagatcctccactaagtgnggctggggctgaatcccacgtttcctgcctcaaggagattgcagcaggcccccctcttttcccctctctccagagcgngttaccccctggctcccagacagccacacctggtgnaggagantgcggtgacaatggagagaacccccaggttcagtaagctgcctcgtctggtctcactaacacctagctgtngggagatctccctccggtcagtcacctcagcctttggcgcacagaagggtccagggtcccctgctcagaggctancacttggccgaagagaanggcantttccaagtttggggttgatctntggctaggaaggggctcacttctggccccaccaaagggtgngggtgggggaccaaagtgatagagcccntgatccacccactctctgaaacttctttgctnaataaaacatttcctactacgcttgtgttttgtttggggtagagggtnnatcgacaaacacgacccccgcctcaaaanggaaagcttcgtttggcagacgcacggccaggatt

SEQ ID NO: 713631 - DNA, 738 bp, Homo sapiens
taagatactgaaagtcctggggcagtatcttctgatggtgtgcatgtgaggagaagactgaggttaggactgagaagtgcagaagttggaacagcggtaaggctgtattaaaactccgatgtttcgtattacctactatgctcctgcggcatcaagacgctagagagtagaatgtgactccaagaggagagattcagattaagtctctgaaatgcatcaaaagctagactattttctcaccatctcatcacagtctgagtctggtccattgctaccccaattctctggggacaataaacaccaggctggaaagcggatccaaggaacgtttgaaactagtagacatactcgaatccactatgtcccaagggctaaggaatagtgagtttcattctgtgaagcgaactggtgaagcttaggtctaattagtgcctgggtgatgacctatgcaatcacaccgcttatgaccatcctagaggagggccctgatcaccagctcgatcttagggcatttccaaagctaacctgcgttatatgcctgggatagggttgtacattagacctttctatgcctatccttgccttaacctaactgcctgaggttgggctgcagattgtagagtcaacgactttgctaatctcttcctctgtgttgaactttcattcagaaattaagtcctactaatactgacagggcccccatgctgaatgtcatctgccggatccggaattgctata

SEQ ID NO: 713632 - DNA, 427 bp, Homo sapiens
taccggacctatttgtcggcgcggggagcccgcttcatctcagtgggctacgtggacgacacccagttcgtgaggttcgacagcgacgccgcgagtccgaggacggagccccgggcgccgggatagagcaggaggggccggagtattgggaccgggagacacagatctccaagaccaacacacagacttaccgagaggacctgcggaccctgctccgctactacaaccagagcgaggccgggtctcacaccctccagtggatgtatggctgcgacgtggggccggacgggcgccccctccgcgggtataaccagttcgcctacgacggcaaggattacatcgccctgaacgaggatctgcgctcctggaccgccgcggacacggcggctcagatcacccagcgcaagtgggaggcggccggacaaaa

SEQ ID NO: 713633 - DNA, 166 bp, Homo sapiens
tcattcatgggggggtggtataaaccggggcagctgtgcatatggcagggaagagggatccggtggaggaacagtgcagaaggctttatgttcagaatctctctggcttttcttctagactggagttccttgagcatgggggaaggctggtgtattattcatcccg

SEQ ID NO: 713634 - DNA, 256 bp, Homo sapiens
tccacgtgcgagtatatatttatttagaatgccactaacagcatgacgataaactgtacattcacaaacctgtacaagaagcacgtactctttaacaatgtgtagtatcacaagtaatataagtatagcattataattataaggtacttgagtcaaagacgaacatatagatcctacagcgttgcagcattcagtaacatcattgtctagatcaggcagaggaatgaaacttcaaaagcactatactataactact

SEQ ID NO: 713635 - DNA, 387 bp, Homo sapiens
  misc_feature (379)..(379): n is a, c, g, or t
ggtattgcagcaagcccgaggagccgtgtgaatctcctcctagctggacgtgatcgtaaggagctcaggaccactctttggcaacagaacctcttctcctcagcctatgcctaaaacagccagacggatattgctaacctctattttccccccagtttccgatatttaaatatttctttttggtcactcaaagcagctgtccttacaacacttcctctcgtagacgtgttagtgtttttccaagatgggagtttctttttcataacttacattcctggggccagcaccctctgtcccttgctgaatgttggggaaacaccggcctttatttagggaacacacaacttcattcctagttgattcttgactacaaggattncacagatg

SEQ ID NO: 713636 - DNA, 703 bp, Homo sapiens
ggaagaacagggtccaggcttggttctcagatggtcagggactacctgagaaccaagcctgaacctgaatgtgcgcagaacaggagaagaactgacgaggatgcggccgaaattgatgcaggatcccgccagcaagcagatccgaggagctttgaaatagagatgtgtgcaaatcttgctggagaaactcgagataagcactggagcggagcatcgagaggagtggcagcgtcatcgcgcgccatggcaacataggacgaccgtttaaccgcttcacagacggcctatttgcgccttgcgtaggcgagcgtgtagccttggcgcgaaaggactacctaattgtgcgcagcattcaggcagcaggcggtccgtggcgaggcaaggccagcacaggatgtgagacggatcgttgggaggaaccctcgaggaatatacaagcacggttgcaagaatcggcaagggaggatcccgagttcaagtaagtcagcaactgcgtcaacgcgtggggtacaagaaagttggttcaacagcagggtcaacccatggggtaacaagtgccacgggtgtcacactagagaagcccaactagcaaagggttgggggtcacaatgagattcccttacctagacgacaagaggtgtagaggtaggaaaggcgcagaattcccctgggggcactctgccaaactagggcccgctaaact

SEQ ID NO: 713637 - DNA, 147 bp, Homo sapiens
gaatgtggcaaagcctttaacagttctcaaatcttacctacacataaaaaaattcatactggagagcaaccctacatatgtgaagaatgtgtgaaattttttacccaatcctcaacccttactacacataagagaattcatactgag

SEQ ID NO: 713638 - DNA, 272 bp, Homo sapiens
tttgggttttccgaggccaggagcttgcctttcccctgagtccaaattggcaggtggactacgagtcatacacatggcggaaactggatcctggcagcaaggagaccccaaacggtggtttgaaagtactttttctgggagggggccttccagcatgtgggcaaagccttcaatcagggcaaaattttcaagtgaacattttttgccatcccctaactgcctgcccctgcccttcagggaaatgggggtcattaaaggaaactgaacattta

SEQ ID NO: 713639 - DNA, 80 bp, Homo sapiens
aagatgacccagttgttcatagaatattttgaaggtgaacacacaccccaacccaataaaactgatgttactagcctctc

SEQ ID NO: 713640 - DNA, 401 bp, Homo sapiens
tttatcatgggttgattccgactgaaaacttggtcacatcctccacatttgtaaggtttctctccagtatgaatctatgatgtgaaagtggtgatggtggataaaaagcctggtcacattcataacacttgtaaggatatcctccagtatcaatggccttatcaataagaagggctgaattttggaccaaaggatctggccacactcatttacgaatggtaacggttttacttccagtatagaagtctacagagggcaggataagggatagactccggactggaaggtctggccacacttctttacactggtaagggtttctcaccaggggtgacttctatcatgggcatgcaaggtatggctcgtgattaaagagctggccacatacttcagggtaccga

SEQ ID NO: 713641 - DNA, 197 bp, Homo sapiens
tccggtttgcgagactgcttggccagcagtttgcccaatctccagttggtcggagcacgaggtgctgaaaaagaacactttcttaaagtgaaatatcaaacagcacacaaataaatggttaataactaaatgagcatactgcattagtgacatccttcattgaatgtacttggatttgcgacgactgcttggccaag

SEQ ID NO: 713642 - DNA, 247 bp, Homo sapiens
  misc_feature (111)..(111): n is a, c, g, or t
  misc_feature (153)..(153): n is a, c, g, or t
  misc_feature (182)..(182): n is a, c, g, or t
  misc_feature (192)..(192): n is a, c, g, or t
  misc_feature (195)..(195): n is a, c, g, or t
  misc_feature (218)..(218): n is a, c, g, or t
gcatggaattcggcacgaggagctgtgtcaccactgtgggtccctggttgtttcctcaccctgtccgtgacgtggattggtgctgcacccctcatcctgtctcggattgtnggaggctgggagtgcgagaagcattcccaaccctggcaggtncttgtggcctctcgtggcagggcagtctncggcggtgtnctngtgcacccccagtgggtcctcanagctgcccactgcatcaggaacaaaagcg

SEQ ID NO: 713643 - DNA, 1729 bp, Homo sapiens
ctcgtctgtggtaatgagcgctggtgtctcttgtgtaggataggttgcttctgcgtggtgcctgctatgtcggactctagtccacgtgtgtgttcgcgacggacggtggtgttgcgcgatcagtcagttggtgtggcccgacgccgtgtgtgttgccccgccgttagtgttctcctctggctgtcaagttctctctcgcccgcttctctcgttagagaccttgctcgcctcgtgttgcggagcaaccactagctgtggtggcctggggggcccagtcctgctgcccccgttgtgatgggaagctctttggggaaaccccgcctctgtctaattgggggaagccgcggtttgtttgggaacccgcagtgcgtgtcctggaaatttttctaaggctcccacagatgctttgttgggggagacggaaggaggctgttttgactcctggggccgccccctctggggggggggataggcctctgggagcccgccacgtgcttggtgagtgtgggtggggaatcctccttgccgcggatatgataatggaggtgcggatggagtgggatgacgggaataagagtgtggatgtgtgtagtggggcccactcactccccctggtgatttgtggggactccatcggcgcgttttttatttgtgagggcgccgccctctgccctcggacccaccacgttggacgcctgcttgatgtcgagcgcctgtcccctcgtgggaggcgcgctctgttttctaaagccgcagaggtggcccgctgtgccctgggggagaatatgggggagagaacaccccccccctttgtgtaacacctccctgttttggagcgccgtttgtagggggtaggaacgggagatgtcagacggaattcttggaacggggaagaggccccgaaacatgtggcaccccgcggatatagcttgagagcacaccaccctctctgcaggccagtgcgtgtggtctcagcacgtggtgcgggtttcgccccacgcaggatatggagtggttctcactgctcccaccctcgtgtttgggagtggggggcgcccccttcgatatagtgggagtttcacacccgcccacccactcttgtatttgagcccactggtgtcccccgcgcttaatttggatgcccccgccgagatagggtctcccgcgcgctctcctcggagagtgcttcgccccaaggttgttgtgacaattggggcgccctcgggggcgcccttcgagaagagcgcctctcgggagcgccctcgtgagatcccctcatcatgggcccacctcgtagcctccacgcagatgtattgtagggcgagagccacatctctgtctcgcgcgagagacacgccacggcggctctccacggtatagagagaaggaaggaacctccacgctgagccctcggctggcctgaggcaccgcctgtccgcaaccacgagagcccacaaaataaccgcgagaaggctcacgcccccacggaccacgcccgctgggggccacgcccacgagaaatatatataggagtctcacaatctttatggtcccctccaccacctatgccctctttttctggaccctaacgttctggaatgacctgggctgtcaacacccacgaagccaccctctccccccacgttccccaggaacttgtcactttcactgtttcttattttagacctctttttgtaaataaaactgtttcccacaggaaaaagatgga

SEQ ID NO: 713644 - DNA, 415 bp, Homo sapiens
ttacaaaacagcttgagagcgcttcaggaacgcgggcaagtccaattttcagagtggccaaatgagcagtccccacccagccaaacctcaaaaagccaatcagatggtttcaaaacagcagccagttggatgtgaatgttgcccactgtcagtccccttttgttagttggccccctcgacccccttctgggccacatccagttaacgccacaattcctcaacgccccctcagtccttttggaaagccttttttggcacccctgccccaacaggcttgtgggatttgcacgtggaatcacaaggctggttgcatgcaacggcaaaaggcatgcttttttgccttggggaaggccttttgttccttccaacaggttccgggacagggctggcaacccccccagccccccaaattaaa

SEQ ID NO: 713645 - DNA, 441 bp, Homo sapiens
  misc_feature (63)..(63): n is a, c, g, or t
  misc_feature (328)..(328): n is a, c, g, or t
gcctccatcaggaactgtgcaggactgtgcactctgctgatactcacatggtggaattatatntgccttggccaaccctaaagccatcaagatagcagcaactcctctatcattactgtacccaccacctgtatggatctcgttgcccatatgaaactgagtaaggaacaatgtgcatcacactcacagagaaagatggacaaaattaatgaaggatcattattaagtttttaatgggtcaagagaaagttaccactgaggtcttctctacctgggcaacaattgactcctaacaaccactataagcttggaagatgatccctccccngctgatccttcaggtcagatttttcacagagccatagatatcttatcatcctctgtggcatgaagactaatggcaataaaacatttctcaataaaggaggctataccataaaa

SEQ ID NO: 713646 - DNA, 318 bp, Homo sapiens
tgaggtgctatagaggatccgaatcatcagccagcagtggataaagaaaatgtgatatatatgcactatggaatactaagccataagaaggaatgaaataatggcatttgcagcaacctaaatggagttggagaccattattctaagatgaagtaactcaatgaatggaaaaccaaatattgtatgttctcactcgtaagtgggagctaagctgcgaagatgcaaaggcataagaatgatatagtggactttgaggactcaagggttgaaggatgagactacacattgggtacagtgtgcactgctggctgatgaatt

SEQ ID NO: 713647 - DNA, 309 bp, Homo sapiens
  misc_feature (63)..(63): n is a, c, g, or t
gcctccatcaggaactgtgcaggactgtgcactctgctgatactcacatggtggaattatatntgccttggccaaccctaaagccatcaagatagcaggtttggaataattcactgtcgaagtcttcttgagctgagcagtcatgtgagcttggaagatgatccctctccagctgatccttcagctcaggccatcatctacatctggattcctgacccggagaaactatgagtaatgtgtgctgcttttgagccactaagctacatggtaataggctatgcttcaataaacaataatacacttgaaaaa

SEQ ID NO: 713648 - DNA, 401 bp, Homo sapiens
gataaaggaaacccctggattgtaggagggggccaggttccctccggcacaataagggcttcagttctatttaggaaggccaaatgttttttgtcattggcggcacacgtggtgtgtggggtgggtgtggggtgtgaaggtgtcttaaatcttttaccatttctttcaaatgcaagaggccgggctttctaatttgaaaactggtttgtggatcatatcataaatcatttaagcagtttgaaggcaaacttttgcatagaaataaaaaaaatactgatttggggcaatgaggaatatttgccaattaagttaattttcacgtttttgccaactttgatttttatttcatctgaacttgtttcaaaaatttatattaaaaatttggcatcccagagatatga

SEQ ID NO: 713649 - DNA, 195 bp, Homo sapiens
  misc_feature (9)..(9): n is a, c, g, or t
  misc_feature (27)..(27): n is a, c, g, or t
  misc_feature (49)..(49): n is a, c, g, or t
  misc_feature (52)..(52): n is a, c, g, or t
  misc_feature (64)..(64): n is a, c, g, or t
  misc_feature (81)..(81): n is a, c, g, or t
  misc_feature (84)..(84): n is a, c, g, or t
  misc_feature (93)..(96): n is a, c, g, or t
  misc_feature (102)..(102): n is a, c, g, or t
  misc_feature (113)..(113): n is a, c, g, or t
  misc_feature (115)..(115): n is a, c, g, or t
  misc_feature (117)..(118): n is a, c, g, or t
  misc_feature (123)..(124): n is a, c, g, or t
  misc_feature (126)..(126): n is a, c, g, or t
  misc_feature (134)..(134): n is a, c, g, or t
  misc_feature (141)..(141): n is a, c, g, or t
  misc_feature (144)..(144): n is a, c, g, or t
  misc_feature (168)..(168): n is a, c, g, or t
  misc_feature (177)..(177): n is a, c, g, or t
  misc_feature (180)..(180): n is a, c, g, or t
  misc_feature (182)..(182): n is a, c, g, or t
  misc_feature (191)..(191): n is a, c, g, or t
ggctcactntgaaaagcagccgcctcnccaatctgcggaaatccaactnctnccacttcgtccnggccctctaccacacanacngccaccccnnnnacatcnagaggacagcngntnnggggnncngggagaangaaaaanaanccaacagcgaaaagaccaataacncaatttacnacntnttttaactnctct

SEQ ID NO: 713650 - DNA, 505 bp, Homo sapiens
  misc_feature (63)..(63): n is a, c, g, or t
  misc_feature (392)..(392): n is a, c, g, or t
gcctccatcaggaactgtgcaggactgtgcactctgctgatactcacatggtggaattatatntgccttggccaaccctaaagccatcaagatagcaggtttggaataattcactgtcgaagtcttcttgagctgagcagtcatgtgagcttggaagatgatccctctccagctgatccttcagctcaggccatcatctacatctggattcctgacccggagaaactatgagtaatgtgtgctgcttttgagccactaagctacatgaattaatgaaggatcattattaagtttttaatgggtcaagagaaagttaccactgaggtcttctctacctgggcaacaattgactcctaacaaccactataagcttggaagatgatccctccccngctgatccttcaggtcagatttttcacagagccatagatatcttatcatcctctgtggcatgaagactaatggcaataaaacatttctcaataaaggaggctataccataaaa

SEQ ID NO: 713651 - DNA, 259 bp, Homo sapiens
tcaacaccgtctctagtacacaatagaaaaatgagctgggcgtggtggcgggcacctatatcccagctggctcaggaggctgaagcacaagaatcgcttgaacccaggaggcagaggttgcattgagccgagattgtgccactgcactccagcttgggtgatatagcgagactcagtctcaaaaacaaaacaaaacaatcttcatatgtacccatatcctttctcaatcctgattttttcttaatgttacctttttccc

SEQ ID NO: 713652 - DNA, 1080 bp, Homo sapiens
  misc_feature (38)..(38): n is a, c, g, or t
  misc_feature (683)..(683): n is a, c, g, or t
  misc_feature (801)..(802): n is a, c, g, or t
  misc_feature (812)..(812): n is a, c, g, or t
  misc_feature (824)..(824): n is a, c, g, or t
agcggattaggaaggcccccagctgtggccagcccagngccgggctgcccaccgtgccagcccagtttcaatgacccacctgagggtttccatcgtgggccagggaccggcgcaggcgggcatccggagccaggcagtggccagcccatcccgggcagggtcataggtggggctgcaggcctcgaagccgccatgtgaaggcagcagcgaccccaggcagggcgggccaggttgaccttgcacctgctctcccctcagccccgcggccatgccgaccctggtcgtgggcacgccgcccacctgcctgggggacacacctcagccctgccacaagaacagccagaggcagggccccttctcccatggggccccagggagagcagccgactggaaggctgttgccaagcccaggctctgcgcacctgcagctgaggatgacgtggcagccctgaggtggcccgggccctcccagcagccagacccaccctgggcagctccccacgtggtcgggtctgacgacctcaaggaaccaggcccctgggggaaggcgtgcagcctgcccatgtggtccacaggcccggaggctagggatggggacagctcggtgtcatcgggccgcctctcgtgctcttcggggggccacgacgtgtgtgtgtcttggaaggagaggccaccccaggtgntggggccccagcagaggcccagaaagagtgacgcgcggctggagcagctgagagacaagatccgggcccaggcgtggcagcagggagctgtgcgtcctgggcacctcagcccctccanngcctccagantccacaaagctncacgctgacgctttaggaggaaaggcaacggaaggcaaaaaaatcccgcttccaagcgccttgaaagtgcctcagggtttcaagcatcttggagtgcagctggagcgcagaggttgaagcccaagggcatcccacgggccagggggcgcgagctctcagggtctccagacacagtgtctgtactgagggaaaaccctaaggggttcaaagcagttcttggaaagaagagaaagacccaaggtgcctcccgttgcgg

SEQ ID NO: 713653 - DNA, 756 bp, Homo sapiens
  misc_feature (359)..(359): n is a, c, g, or t
  misc_feature (477)..(478): n is a, c, g, or t
  misc_feature (488)..(488): n is a, c, g, or t
  misc_feature (500)..(500): n is a, c, g, or t
gcccgcatcacggcctcagagacagccgcatgtctgggccagtcacggctcttggcctctgggccccaccgttgctgggaaggggaggctctgcgcacctgcagctgaggatgacgtggcagccctgaggtggcccgggccctcccagcagccagacccaccctgggcagctccccacgtggtcgggtctgacgacctcaaggaaccaggcccctgggggaaggcgtgcagcctgcccatgtggtccacaggcccggaggctagggatggggacagctcggtgtcatcgggccgcctctcgtgctcttcggggggccacgacgtgtgtgtgtcttggaaggagaggccaccccaggtgntggggccccagcagaggcccagaaagagtgacgcgcggctggagcagctgagagacaagatccgggcccaggcgtggcagcagggagctgtgcgtcctgggcacctcagcccctccanngcctccagantccacaaagctncacgctgacgctttaggaggaaaggcaacggaaggcaaaaaaatcccgcttccaagcgccttgaaagtgcctcagggtttcaagcatcttggagtgcagctggagcgcagaggttgaagcccaagggcatcccacgggccagggggcgcgagctctcagggtctccagacacagtgtctgtactgagggaaaaccctaaggggttcaaagcagttcttggaaagaagagaaagacccaaggtgcctcccgttgcgg

SEQ ID NO: 713654 - DNA, 339 bp, Homo sapiens
  misc_feature (213)..(213): n is a, c, g, or t
  misc_feature (244)..(244): n is a, c, g, or t
  misc_feature (246)..(246): n is a, c, g, or t
  misc_feature (259)..(259): n is a, c, g, or t
  misc_feature (272)..(272): n is a, c, g, or t
accactgatagaggaacccgccagaaccactaatgagaatgtgttacactgatttgggagatgcccaaggaaagcaacaatgggacatgtaggatttgaccccagtaagggaaagaaacatttctcctctcttttttttttagacaaggtgtctctctgtcacccaggctagagtgcagtggtaccatcacagctcactgcagcctcgatctnatggggtaaaggaacctcctgcctcagcttnanaaatactcactancatgcactggctnattacttttattttttgcgccagcagatggggtcttgctatgttagcgcacacgagctggttttgaa

SEQ ID NO: 713655 - DNA, 236 bp, Homo sapiens
  misc_feature (193)..(193): n is a, c, g, or t
cgggtactggagacgaagtacgagggctcataagatctagaggaggagcgggccagctgtcttcaacacggacacgctctgctgaccacccagagctgggccagggaggacactgctccacttgaccacccatgagctgggccagggactcaacacatggggacagcaagtcccccatgtgctctgccagggntctggatgtggacggttcatggaaccaatgggtgcttcttggt

SEQ ID NO: 713656 - DNA, 687 bp, Homo sapiens
tgccctcggccatcaggcacagcgggagcggagcaagtcgtccggatcgccagcgccgtgcgggttcctccgggagtgaggcggcgcgggagccggggacgccgcgccggcatatctcagacaccccgcaagcggcaccggcgctgcccagaccgaggccatgaatgcagattctcggggtgatcgcacaaggagatagcttcggagaccgggagaagaaaaagggtaagcttgattgattacgcagggaactgaatgaacataggggggtaagaggcttaagtcaagatctagctggagtagccgtttctaaggtaccagagaagtcgacaaataagttatggagttgttgcaaagaggaattagcagaggcagtttcatggcgactaacgtcgaagatattgcagaaagagcaataaatgaaggacaggacgtcgggagcagctgtatgagagaagaagctgaacaggaagaggtttaaagactgtagttgagctacagtatgttttggacaagttgggagatgatgaacgtgcggactgacctggaaacacggttgattggagtgccaatattgtccgaagaggagtagtcggtgtggatgaatgctataagctagtagaccctgaagggacatgagctggaggttgaatgaccagttgaactggctccattcagctgggggac

SEQ ID NO: 713657 - DNA, 138 bp, Homo sapiens
tgtctagtctatcaacggtgtaaatacaagatatacaggcgggctcggtggcttatagcctgtaatcccagcactattgagaggccaagtcgggtggatctcgaggtcagacgatcgaggccatacctggctaacatg

SEQ ID NO: 713658 - DNA, 103 bp, Homo sapiens
accctcagtttacacaatacacatatgaattagcaatagcactccttggcatttacctaaaggagttgaaaacttatgtccatatagagaacctacaaatggg

SEQ ID NO: 713659 - DNA, 269 bp, Homo sapiens
gggaagctgaggacaaagtgagttcagagcctagcgcgtcacctgtgtgcgtgtgaggagcggaggactcaaaggtgcaacgtccgagagagccattttctctctgatggcgcttggagcacacttaccctgacagagaagaggagtattacacagagccagaagtggcggatctgacgcagctcgacagagactcaatacactgaagtctgaatctcaaagctgactgtgaggagagaacattacagcattagagattcactctgaaa

SEQ ID NO: 713660 - DNA, 447 bp, Homo sapiens
tatttccacagggtcagaagggttgataaaacaaatagccgaaaggtgcaaattattagccaatacttcagagcaccccatgccctgctcaggtctacccattttgagaaagtattgtggaatcagtgagatgcccagaagaggccctgacttgccagcccatgggccagaatcagtatgcctactactgtaagccagagggctactgacgatgagaatatcttaattgtccctggtgagagaccaaaaaagcaccccatcaattctagagttaaccatcttcactagcccagagagttgccttgctcaagtaagtttactggggtctctgacccttgacatgacaaacggctttccacagtggaagacaagtggccacttgaatatttttgttcagtgtcaccactgttgggtgacttctgcagtggctcaggaactccagaatct

SEQ ID NO: 713661 - DNA, 260 bp, Homo sapiens
  misc_feature (25)..(25): n is a, c, g, or t
  misc_feature (44)..(44): n is a, c, g, or t
  misc_feature (99)..(99): n is a, c, g, or t
  misc_feature (103)..(103): n is a, c, g, or t
  misc_feature (113)..(113): n is a, c, g, or t
  misc_feature (178)..(178): n is a, c, g, or t
  misc_feature (217)..(217): n is a, c, g, or t
ggactccaagcttgcttcctagggntctttgccctcatcctctntggcaaatgcagttacagcccggagcccgaccagcggaggacgctgcccccaggntggntgtccctggnccgtgcggaccctgaggaagagctgagtttcacctttgccctgagacagcagaatgtggaaagantctcggagctggtgcaggctgtttcggatcccagctctnctcaatacggaaaatacctgaccctagagaatgtggctgatct

SEQ ID NO: 713662 - DNA, 358 bp, Homo sapiens
cccccaatcaagatttagaacatttccatcaccccaaaattccctgggattggtccctgggtcccaggcaagccctgatttgttttctgtcactgtggatcagatttttcttttctagagtttcataaaaatgtgtttttataaaatgaatagacttttgtgaaggttttttttcctcagcataatgtttttagacttgtttatgtggcatgaatgaggggttcatttttgtttatcactgagtatttttccagggtatgtatataccccaatttgtttatataccccaaatgttgatggacatttaggctttgtccagttttgtttattatgaataaagccattatgaacttttata

SEQ ID NO: 713663 - DNA, 123 bp, Homo sapiens
tctaggacggatccccgaccacgtgaaactagtaaaccaccaaccccgtctctactataatataccataaaagaaactaataaaaaagaaaaactgagctctgttttttattgccctggcctc

SEQ ID NO: 713664 - DNA, 225 bp, Homo sapiens
cgaggcaaagacaaaatacacacaggcaagaggcacggactcaggggagactgggaaggacctcaggccattcaggaccatgcggacgagcaccgccccatgggcccgtcaccccgacaggatatgcctcacaaacgcatcatagttgacacaaccatggctgtcctcatgccctgccaccagcatctcgtttcttctctagtacatctcggtctcttctcttgg

SEQ ID NO: 713665 - DNA, 113 bp, Homo sapiens
atgacagcgacgctcttatggggggtgaagatacacactaaaatccacatgggaacacaactagacttcagacacagcagagggctacttcaacggcagagaagcaacatcag

SEQ ID NO: 713666 - DNA, 747 bp, Homo sapiens
  misc_feature (3)..(3): n is a, c, g, or t
  misc_feature (62)..(62): n is a, c, g, or t
  misc_feature (97)..(97): n is a, c, g, or t
  misc_feature (100)..(100): n is a, c, g, or t
  misc_feature (108)..(108): n is a, c, g, or t
  misc_feature (121)..(121): n is a, c, g, or t
  misc_feature (123)..(123): n is a, c, g, or t
  misc_feature (125)..(125): n is a, c, g, or t
  misc_feature (128)..(128): n is a, c, g, or t
  misc_feature (132)..(132): n is a, c, g, or t
  misc_feature (138)..(138): n is a, c, g, or t
  misc_feature (144)..(144): n is a, c, g, or t
  misc_feature (146)..(146): n is a, c, g, or t
  misc_feature (169)..(169): n is a, c, g, or t
  misc_feature (171)..(171): n is a, c, g, or t
  misc_feature (188)..(189): n is a, c, g, or t
  misc_feature (196)..(196): n is a, c, g, or t
  misc_feature (200)..(200): n is a, c, g, or t
  misc_feature (219)..(219): n is a, c, g, or t
  misc_feature (224)..(224): n is a, c, g, or t
  misc_feature (230)..(230): n is a, c, g, or t
  misc_feature (238)..(238): n is a, c, g, or t
  misc_feature (256)..(256): n is a, c, g, or t
  misc_feature (261)..(261): n is a, c, g, or t
  misc_feature (264)..(265): n is a, c, g, or t
  misc_feature (267)..(267): n is a, c, g, or t
  misc_feature (282)..(282): n is a, c, g, or t
  misc_feature (286)..(286): n is a, c, g, or t
  misc_feature (288)..(288): n is a, c, g, or t
  misc_feature (295)..(295): n is a, c, g, or t
  misc_feature (300)..(300): n is a, c, g, or t
  misc_feature (311)..(311): n is a, c, g, or t
  misc_feature (314)..(314): n is a, c, g, or t
  misc_feature (317)..(317): n is a, c, g, or t
  misc_feature (347)..(347): n is a, c, g, or t
  misc_feature (350)..(351): n is a, c, g, or t
  misc_feature (375)..(375): n is a, c, g, or t
  misc_feature (381)..(381): n is a, c, g, or t
  misc_feature (391)..(391): n is a, c, g, or t
  misc_feature (396)..(396): n is a, c, g, or t
  misc_feature (399)..(399): n is a, c, g, or t
  misc_feature (428)..(428): n is a, c, g, or t
  misc_feature (443)..(443): n is a, c, g, or t
  misc_feature (449)..(449): n is a, c, g, or t
  misc_feature (462)..(462): n is a, c, g, or t
  misc_feature (496)..(496): n is a, c, g, or t
  misc_feature (626)..(626): n is a, c, g, or t
  misc_feature (669)..(669): n is a, c, g, or t
  misc_feature (677)..(677): n is a, c, g, or t
  misc_feature (727)..(727): n is a, c, g, or t
ggncgggtttaattgagttcggggcgcaggaagtgcgcccgccgcccgcggggccggggttnaggggcgggaaagcggggtcaaggtgggtttttangtntttccctngggcgggatttangnanttngttngaagcngccgtntnaagttgggggaagcgggaaggancncgcgccgagggccaggnngcggggncagnccgggtaggcgcggggctngtgtnggttcngggccgtntgttttggggttcacctngtttngtnntngcggcccacttggcntttncnttggttntgctnataggtgtgtnttnttnttgaatacgtctgagttctcggggtttcgnttnntccccatgagcgccccccagcttnccgggntgtttagggntccgntgntgtttatgtttgggttttttttttttatntttgactgtctgttncttgcnatgtccagcgtgnggttgtcgtggcagccgttctccacgaagcgcantctctcgccgtgcgacacgtgcttgagcttgggcagccggcgctgccagcagttgtagagcaggccaagcgcaatgatgatgatgcagatggccccaatgaccaccagcaccacgaagagcgtgccgtantcgctgcgcacctggctggcccgcgcctggcagctgctggttntggaatanttctggatgccaatctcctccaggctcctgcggatgtcacccagcatggnaaaggacatcttgagtgggg

SEQ ID NO: 713667 - DNA, 183 bp, Homo sapiens
ttggtgttactcctgcttggcatgtctgacagttgacactgctggtgctgacgctccccactgtctttggctgggtgacaccagaccacgtttcttggaggaggttaagtttgagtgtcacttcttcaacgggacggagcgggtgcggttgctggaaagacgcgtccataaccaagaggagta

SEQ ID NO: 713668 - DNA, 200 bp, Homo sapiens
gcggctcatggtctccatcacgccctccacaatccattctccaacccccgtgcacaccacacacatcagcctcacccccttcccttgtcactcatcacctcatgcaggccatcaattcatccagcaagcgtcccatcatgacctcacgcaccccaccagcacctcaacacatccgcgtccattcgccatcactccttcca

SEQ ID NO: 713669 - DNA, 278 bp, Homo sapiens
gcttattggtcatcagtttttcctaggaaacctgggccccaagtttttggttggtttcggacccccagtagggggtgaattaattaaaggtgtttttttaattcagccccaaagcatttgatttgcttaggaaatttattaggcatatattacctggatgatgtcaatttttatgtaaccctttttttcctgggtaattgatgagcctcctaatgttgatttttttttttttttccaagccctgttttttgttaataaaaaatacagaatagggttta

SEQ ID NO: 713670 - DNA, 641 bp, Homo sapiens
gagcatgagcgtgagcctggctcctgatggagtctggtatacagcgtgaccactggaccaccgtgtcttgtgtccctgactttccgtgttgcatcagggacaggcatgtgcgatctcatctttccttaatcagcatcagctatcctctagccagaaacatgctggtgactggactagcagttgcccatttcattggggaagctccttgttgaggggacagaatccaacttctggtgagttagactaaattctcagccaactcctccttgattttctgggcaagtgtttcctgacgcatatccaccattcagagatatgaaacatttctagtagacagtattaagttttcccacggtggtccgtgtctcacactcattcttacctagtgaatacacttggggaccctgaatgacacccaaactctatagtcaggctattttctacgaataacgttagcctaacacgctattatctccacgtcagcagcccgaagaaacatcaggctccacagctaaaaatgtcttctttataacaggcaacttgcttcaaacagtgggttggacacacacttagtaccagagtgcatccccagtgttgaaatcaggatccacattgatccatcataacccactataccgcgg

SEQ ID NO: 713671 - DNA, 342 bp, Homo sapiens
  misc_feature (100)..(100): n is a, c, g, or t
  misc_feature (217)..(217): n is a, c, g, or t
  misc_feature (231)..(231): n is a, c, g, or t
aagggaccatagaagatgttggccatttgggaggaaataatgaattgcacgctttcctttgatctcgaggtatggaagcatctgagaaacaagacatgantgaatcagatggtaatgagaacaacaggagaggaagaggaattggagaccagttgagccatctagtcacatgcagggctgggcaacagcagggcagctcttcctaggagggcagttncttgccgtagcacntggagtctcagcccgatggacccaggactccccttgaataatgactaccttataacactccttttactcacctgaaatgaaattcatagattcctacacatgcatgactga

SEQ ID NO: 713672 - DNA, 976 bp, Homo sapiens
attaaattccaaaagatggaaaactgtctaaaagatcacttatataaataatagtgcatctgtacagttgaagacaatgcagctataaactctaggtactaaaatggaaagatgtccaagacatactaaatgaaaacagcaaggtgtgaaacagtttctgtataaccctgtatacatgcataaaagatctctgaaaggacacaccaagaaactgcaaacattagttgttggggtggcaggacgaatactacatggctggagcagtagaatgggagacttttcactgtatactgttatgcttttaattttttttttttttttttttggaaacggagttcgctccttgtgtgcccaaactggagcttgcgggagccaaaatcgcgccatgacctccagcccgggcaacaaagcgggactcggtgctcaaaaaaaaaaaaaaaaaagtgtgagttttataaatatcccctctctttcagaaaaaggccatatatctagaagaaaatctacctatacacatctaaaagaaaggtctagcggggcatgtattataactaaaataaacctctcctggattctaccctctgtaattgggggcttctggaaagctccgaggaaggaattagggatgggatcccttaaggaggtccactggccattccgggaccatctgtggcgtgtttgggcgcactacctggttggcggggggggggtccacccagtggggccccagagggattctccccaatttagagattttccccgagggaattctctcccgcaaaattcgggggagctacgttctgagcagcaggaaaaaacggggatagacggaaattcaaaactgccccggtgtaacctggataagaaccctcaaagggagttggcacagaatcgggataaatcggtagaccgctaacggcaccgagggagagaccacgtgcaggaagagtacccgaaaggcgcgggcacacaaggg

SEQ ID NO: 713673 - DNA, 984 bp, Homo sapiens
  misc_feature (346)..(346): n is a, c, g, or t
  misc_feature (863)..(863): n is a, c, g, or t
  misc_feature (938)..(938): n is a, c, g, or t
  misc_feature (966)..(966): n is a, c, g, or t
  misc_feature (982)..(982): n is a, c, g, or t
ggcaattctgataattatagtccctggaggttatgcagctaattaaaggtcaaacgcagaactttaaagacgcgttttcaggaagagattcaagtattacgcggttgccactggctttttattatggaatgtatgcatatgctggctggttttacctcaactttgttactgaagaagtagaaaaccctgaaaaaccttttctgagcggctactgggaaatttctcattagcagttccgatctttgttgccctctcctgctttggctccatgaacggtggtgtgtttgctgtctccagcaccctttgacaatgataatgctcttctctggagacctcgacagtcttntgaatttcctcagttttgccaggtggctttttattgggctggcagttgctgggctgatttatcttcgatacaaatgcccagatatgcatcgtcctttcaaggtgccactgttcatcccagctttgttttccttcacatgcctcttcatggttgccctttccctctattcggacccatttagtacagggattggcttcgtcatcactctgactggagtccctgcgtattatctctttattatatgggacaagaaacccaggtggtttagaataatgtcagagaaaataaccagaacattacaaataatactggaagttgtaccagaagaagataagttatgaactaatggacttgagatcttggcaatctgcccaaggggagacacaaaatagggatttttacttcattttctgaaagtctagagaattacaactttggtgataaacaaaaggagtcagttatttttattcatatattttagcatattcgaactaatttctaagaaatttagttatanctctatgtagttatagaaagtgaatatgcagttattctatgagtcgcacaattcttgagtctctgatacctaccnattggggttaggagaaaagactagacanttactatgtggtcatntc

SEQ ID NO: 713674 - DNA, 287 bp, Homo sapiens
aggtacagccatggcacttagtctcagctgatgaagcgtacacagagatctctcagatatggagtagactaagtcccttcattggggatcagtccatttaaactttacaccctagtgttctggttaactttgaagcaggccgagatgggcaccacacgggtcttttgcctccccctatctttcctatgcaggctcccccatgccgggaagattctgatgatgttcacggaaaccaggctagaacctcagctacctcctacagctccgggtacccgaggctccgaatt

SEQ ID NO: 713675 - DNA, 1011 bp, Homo sapiens
gaagaagaaaggcttagaatgagggaacatgtaatgaactgaggttgactactaacaaagacagattggtgactctggaggagtcttcgaaagccacagaaaaaacagaattcttggagccagatagctgggagcacattagatgagcaacagttcttcacagaggaagacactaaacagaatctgcacacaatatctcattgctttacaagcaacaatgacacttcaccgaagcaaggcagcatgagcttcagcacaacacaacagacgacctacaacgtccgcatgactcaacctggaggctcagacgcctggccatatcatcaggtcatacagccagatggaacaaaaaacaccccccccaccacccaccaccccctacccgccacaccatacacacatacacacacacactcatataacacacacctacttcacaacacactacatacacacacaataaaaaaatacaaaaactcaataacaaaacaacagaaaacacacacacacacaccatcaccacacaaaacacgaaggaccagaaaaacacaccacaaaataaaaaaaactcactggggagcacaccagaacataaagagacacaaataccaaaaagaacaacaacgacaacaaaaccaccaggacaaatctacaaacagagaccaacagagaacaaggtaagaaaaaggagccgcaaaccgggaacacaaaacaagcacaggacgaagacaagcacacaagcacagacgaagcaaccatagccacaacccacacacaaagaaaaaccacagcgaagcagaaacaaggcacaccaacgaggacgcagggaggaggagcagagagcggagggggccgcgggcccgcgggcggagacgagagagggcgagaacagagagcggcggaccagcgcgagggcaggacggcggaggcgtcgccggccggcgagggagggggagggggcggggagagaggggacagcagagaggggcgggccacggcgggggagggggc

SEQ ID NO: 713676 - DNA, 854 bp, Homo sapiens
  misc_feature (10)..(10): n is a, c, g, or t
  misc_feature (16)..(16): n is a, c, g, or t
  misc_feature (53)..(53): n is a, c, g, or t
  misc_feature (197)..(197): n is a, c, g, or t
  misc_feature (236)..(236): n is a, c, g, or t
  misc_feature (433)..(433): n is a, c, g, or t
  misc_feature (489)..(489): n is a, c, g, or t
  misc_feature (501)..(501): n is a, c, g, or t
caggccgaancgcagnttcttggcttaggtacttctactcacagcggccgatnccgaggccaactccagcaatggcttttgcaaatctgcggaaagtgctcatcagtgacagctggacccttgctgccggaagatcttgccagatggagggctgcaggtggtggaagagcagaaccttagcaaagaggagctgatancggagtgcaggactgtgaaggccttattgttcgctctgncaccaaggtgaccgctgatgtcatcaacgcagctgacgaatactcctaggtggtgggccagggctcgtgcacagcgtggtggacgagtgttggatctcggtaggccgcaacacgaaggcacagcggcatctttgggttcattgaacaccacctcgaatggagaacgagccttcagtgcctgcagtaactcgacttgntggcaactgactcatgatgtccctgggccgcagggccgaggattctcgccgatggnctgcatcgggcntttccgtagtgtacagggacgggctaacatgcggcagcgtggaagaaggtgcatggtggaacctgagctgaatggaaagaccctgggacattcttgggtctgggcaggattgggagagaggtagctacccggatgcagtcctttgggatgaagactatagggtatgaccccatcatttccccagaggtctcggcctcctttggtgttcagcagctgcccctggaggagatctggcctctctgtgatttcatcactgtgcacactcctctcctgccctccacgacaggcttgcttgaatgacaacaccttttgcccagtgcaagaaggggggtgcgtagtggtgaactgtgccg

SEQ ID NO: 713677 - DNA, 146 bp, Homo sapiens
  misc_feature (100)..(100): n is a, c, g, or t
gcgtgagccacgtgtgaggtttcagtataaatattctaatagccactttaacagtcaaaggaaacaggtgaattaagttttaaatctttatataacccanaattatatggccaagttattatcactttcaccatttaatccagtat

SEQ ID NO: 713678 - DNA, 503 bp, Homo sapiens
  misc_feature (10)..(10): n is a, c, g, or t
  misc_feature (16)..(16): n is a, c, g, or t
  misc_feature (53)..(53): n is a, c, g, or t
  misc_feature (197)..(197): n is a, c, g, or t
  misc_feature (236)..(236): n is a, c, g, or t
  misc_feature (274)..(275): n is a, c, g, or t
  misc_feature (311)..(311): n is a, c, g, or t
  misc_feature (329)..(329): n is a, c, g, or t
  misc_feature (332)..(332): n is a, c, g, or t
  misc_feature (335)..(335): n is a, c, g, or t
  misc_feature (345)..(345): n is a, c, g, or t
  misc_feature (354)..(354): n is a, c, g, or t
  misc_feature (357)..(358): n is a, c, g, or t
  misc_feature (360)..(360): n is a, c, g, or t
  misc_feature (366)..(366): n is a, c, g, or t
  misc_feature (375)..(375): n is a, c, g, or t
  misc_feature (381)..(381): n is a, c, g, or t
  misc_feature (396)..(396): n is a, c, g, or t
  misc_feature (423)..(423): n is a, c, g, or t
  misc_feature (427)..(427): n is a, c, g, or t
  misc_feature (437)..(437): n is a, c, g, or t
  misc_feature (464)..(464): n is a, c, g, or t
caggccgaancgcagnttcttggcttaggtacttctactcacagcggccgatnccgaggccaactccagcaatggcttttgcaaatctgcggaaagtgctcatcagtgacagctggacccttgctgccggaagatcttgccagatggagggctgcaggtggtggaagagcagaaccttagcaaagaggagctgatancggagtgcaggactgtgaaggccttattgttcgctctgncaccaaggtgaccgctgatgtcatcaacgcagctgagnnactccaggtggtgggcagggctggcacagtgtgganaatgtggatctggaggangcnacnaggaagggcntcttggttntgnncncccccnatgggaacngcctcngtgccgcagaactcncttgtggaatgatcatgtgcctggccnggcngattccccanggcgacggcttcgatgaaggacggcanatgggagcggaagaagttcatgggaaaagagctgcctgg

SEQ ID NO: 713679 - DNA, 366 bp, Homo sapiens
aaaacaccaacctgctaaaagagatcttttcattagtcttattttcagctttcttagctgtcgttcacttaagcttaaagataggttaatttgtcaatggccaagtttgttttgaggtttttcctcaataactggtttcccaggcctattaggccatctctttacgatgagctcccttttctaaggcgttcaggacctttgtatgtatgctattatgctgttatttcgtagtcccatttactgcagtggtaccatgttttggatgtgtgatgcttatatgggagaacacagcgttgatgtatagccctgtatacaatggagatactatttatgtcgcacaaggcttatgctatgcaccagtactgc

SEQ ID NO: 713680 - DNA, 411 bp, Homo sapiens
  misc_feature (20)..(20): n is a, c, g, or t
  misc_feature (32)..(32): n is a, c, g, or t
ttcatcacctgccaaattgnttggctgtgcangcaagaggacctgaggccagacttcaggatctgtgtccagaaaaacaagacagatatgctgacacacttgtaattctagtgctagagagacagagacaggtggaaccctagagcctactggttaaccaacatagttcagtgaacaagtatctgtcaatgagtgagctgtgtcaaaatcaagttatatgttcctaagaagcgatagccatggttgacctctgatccctgacttctgtatatgcttgggcttccatacacacatgagcgcacacctaaataactaaataaaacaagaacatttaaccttgtcaaagaggatcttctgacaatacctagtgaaccctaaaattcagacaggaaataaagaggagtttttaca

SEQ ID NO: 713681 - DNA, 240 bp, Homo sapiens
ctcgcccctattagacttattctgccaaggggcaagtatggctaagtagaaagacagttaggagataattgcaacaatccgtgcaagggatggcttagatgagtgtgctgatgtgtggagtgtggggaagtgagtgagaagtggtcacatccatggtgtatattttagtgcgggtgtggctatggagtgatatggatcttgcattttcatttcacatacctggacacatttccaatgttt

SEQ ID NO: 713682 - DNA, 242 bp, Homo sapiens
gaattcggcacgaggttggtgtgatagcggcagagggggggctcggagaggtgctcggattctcgtagctgttccgggacttaaccaccaccatgtcgagcaaaagaacaaaggcccaagacccaagaaggcgcctcagcgtgcaacatcccatgtgtttgctatgtttgacccgtcacagattcaagggttcaaagaggctttcaacatgatttgatcagaaccgagattggtttcatcga

SEQ ID NO: 713683 - DNA, 397 bp, Homo sapiens
catgccaggacagaataaataaaggcattattgatggtccaggcatggttggctcaagccgtgtctactccccagtcatgttatgtgcgaggccagaccacgtgtgcggtactcacgacggtcaggagctcgagatcagcgccgtacccactggtgaaagcccgtctgtattacaaatacgaataaattagtcaggtttggcggtgggtgtctgtactcccatgctactcgggaggctgtcgcaggagatttgcttggaagtctgggagatggatacttgccgcgaggcaaagatctcatccattgcagtccaggcctaggtaatgagagcgagactccgtcggctttatgtctgtggcgtgcatggttattgcaatttacttatgcggattagcca

SEQ ID NO: 713684 - DNA, 154 bp, Homo sapiens
cgatcttattcatttcagttctcaaatactccattgttgcaaccttttatcagcaatgtctttatgacctgtattttgtgttgacctcccgtctcatccaaatgccttaaccatctgggaatgcagcccaggtaggtttcagcctcattttacc

SEQ ID NO: 713685 - DNA, 160 bp, Homo sapiens
  misc_feature (97)..(97): n is a, c, g, or t
  misc_feature (147)..(148): n is a, c, g, or t
ctggtgcatgatgtgtcatggggatggtatgtgctccccagcgtggcaagggtgggctggattcagcaggcctcagaaacgacccccctcctgttgnccctccccactttctagagtgtggggcatgctgggcttgcgagggggctnnttgggctgggat

SEQ ID NO: 713686 - DNA, 720 bp, Homo sapiens
gagccaagcgagatgaaggtgcagatgctgagtccggaatccggactaatctatgtccgcgagatccaagttgtcacttacagagcagttccaagaaactatgatcctggctttacatcctttcgaggtcccacgagaatatataagagctttaacatgctaccaatactggaacgagtatttgcagaaatcattccttgtcttcgctggatggtcaccgtgatgtcagtctattgcttggcatctcttccagagaagctgtctactgtcctttctggggcgtgtgatggacaggttcagaatattggaatctaactcgagctggaattgtatccgtgacaatacaagcacagtgaatggctttgtacgaggaagtactgtactcgctttttgtgggacttcttttttccctgttggtgatgagcaaaactgtgaagcagtggaataagatggactgggccagggctatggacgacgaccgaagagccattacttacaatattaggacaagacagtgtatactggggacttggatcatcatctggaaacgaagctgtatttctgccacatgtggacagcaccgtagacgatttgggatgaagctaaagaactaatcctatatgttcaatgacctggggatctgaccagtatcagtagtgtcaaatttaagcccaattgagacatttctcttgtggaagttgtgcatctgacaggcatatc

SEQ ID NO: 713687 - DNA, 952 bp, Homo sapiens
  misc_feature (222)..(222): n is a, c, g, or t
  misc_feature (231)..(231): n is a, c, g, or t
  misc_feature (234)..(234): n is a, c, g, or t
  misc_feature (250)..(250): n is a, c, g, or t
  misc_feature (262)..(262): n is a, c, g, or t
  misc_feature (265)..(265): n is a, c, g, or t
  misc_feature (315)..(316): n is a, c, g, or t
  misc_feature (325)..(325): n is a, c, g, or t
  misc_feature (340)..(341): n is a, c, g, or t
  misc_feature (362)..(362): n is a, c, g, or t
  misc_feature (374)..(374): n is a, c, g, or t
  misc_feature (377)..(377): n is a, c, g, or t
  misc_feature (382)..(382): n is a, c, g, or t
  misc_feature (393)..(393): n is a, c, g, or t
  misc_feature (437)..(437): n is a, c, g, or t
  misc_feature (440)..(440): n is a, c, g, or t
  misc_feature (442)..(442): n is a, c, g, or t
  misc_feature (465)..(465): n is a, c, g, or t
  misc_feature (485)..(485): n is a, c, g, or t
  misc_feature (494)..(494): n is a, c, g, or t
  misc_feature (506)..(506): n is a, c, g, or t
  misc_feature (519)..(519): n is a, c, g, or t
  misc_feature (544)..(544): n is a, c, g, or t
  misc_feature (569)..(570): n is a, c, g, or t
  misc_feature (622)..(622): n is a, c, g, or t
  misc_feature (628)..(628): n is a, c, g, or t
acatccggtgtggtcgacgggtcctccaagagtttggggcgcggaccggagtaccttgcgtgcagttatgtcggcgtcggtagtgtctgtcatttcgcggttcttagaagagtacttgagctccactccgcagcggtctgaagttgctggacgcgtacctgctgttatatactgctgaccggggcgctgcagttcggttactgtctcctcgtggggaccttnccccttcanacntcttttcttctcgcgngcttcatctctntgntgtggggagtttcatcctagcggtttgcctgagaatacagatcaacccannagaacaaangcggatttccaaggnnatctccccagagcgagccttngctgatttctcnttngccancaccatcctgncaccttgttgtcatgaactttgttggctgaatcattctcattgnacntnaattgaggagtaggagactaaangaatgttcactctttgaatntcctggatnagagttctgganatggcagcttatnggacacatggattttcttcagattntgcacttactgctagctctgctttnnatgcaggagagaagcccagagttcactgtgtgtcagaacaactttctaacanaacatntattaatccagtctctgtctttcattaaatgtaaccttttgccttccaaatttaagaactccatgaccgatcctctcggataaatatactcttcattctctccttaatgaccattaacactattctcaccagaactactaggcgacccagagaaggggcggcctaacaaaaccttcaagaggcgctccccaaataaaggcccggcaggattttggctaaaagggccccaaagaggcggatcgtactaaaaaacgagaggggtgttaacaaaatgttggcagagcaacctactagacctggaaaaaaccatcggggggaattggc

SEQ ID NO: 713688 - DNA, 263 bp, Homo sapiens
aacccacaaataggtttcagttcaggccctgtttaaagccccagggtgggttagggggtttaggaaaccaactccccctcaacattttcccttaatcccacaggacaggaattagccgaaacttggctggtttttcctacgagactgtaagccctttagggacaggggcagggttttatttatttttgggtttttagggcaaagccgggcccccggttggggtttaaaaaagggggttttttttaaatgcccccgccccccca

SEQ ID NO: 713689 - DNA, 219 bp, Homo sapiens
gcggccgctgtaaaccccttccaggatccctctgtgacccagctgaccagctgaccaacgccccgcagccctggcggaattcaacccttctcagagacaaatgcagcgacaacagttctgtcaccaactctggtctacagcagcgttcagcatcagtgacaccagcgactcagcgtgtgtcgagcaggctgctcgcgagcagagactgaacggaagtca

SEQ ID NO: 713690 - DNA, 960 bp, Homo sapiens
cgggtgcccaatgaccgggcgtccctttgatttcttgccgggggtacatttctccaggacggatgctcttgcggctttgggcagcaaagagcgaaggggggccagagaagcgggggggccgcgcggggttccggaggtggtttcccccgcgtcgtgactgtccgaattttgtttaagggggaatataagagccgcttataactagatggggggcgcaaacggtgtgttggttagtcctcctcccctgcgtcccccagtactcggaggctcctccttcttctgccttggtgttgtctcgttgggcgccgcccagggagcggcgttgagtcctttttcttggggaccgccttttagtagtagggcgacccgtgcttgtgggcgccggatttcgcccccccccccggcgttcttttaattagaagggaggtccgtcttagctcctgctggatctctcgaggtaaccgccactcaggagcgctctcgtttgtgtagccgcccgcccttctattatgtttggtgtgtgagaggcgagccgagtgggaggatatgtgtctggccgggaggaggaattttgtggagggggtttttggtcgcgcccccccccgccgggggtttttttaacaacacgagtgggggagaattttgtgggtgggtctgtggtgaggacatttttttaatataccaggagagtagttgtgcagcaccccccggtgtgtagtagttgccccctgtccgggggttgttaataaaatacgcaccccgtgggagagaacacgccgtggttgatgagagtactcccccctccgtgtgttgtggtaaaaccacacacgaaggttgttgggaaggattgtgtgcgccccccccccgtttttttttttttttttaaagggagtgagggtttttaaggggggtttcggcgccccttttataaaaaaaaaaaggggaacccccctcccctga

SEQ ID NO: 713691 - DNA, 217 bp, Homo sapiens
  misc_feature (18)..(18): n is a, c, g, or t
  misc_feature (74)..(74): n is a, c, g, or t
  misc_feature (80)..(80): n is a, c, g, or t
  misc_feature (90)..(90): n is a, c, g, or t
  misc_feature (106)..(106): n is a, c, g, or t
  misc_feature (111)..(111): n is a, c, g, or t
  misc_feature (124)..(124): n is a, c, g, or t
  misc_feature (161)..(161): n is a, c, g, or t
  misc_feature (195)..(195): n is a, c, g, or t
  misc_feature (201)..(201): n is a, c, g, or t
tcaccattgtcttgtgcngtgtcatccttgtaggaataggttgaggtgaccccgtaggagctgccccgtgcacncaggcnggagccccgncacccgtgtttgggcntaganaggcgtaacaatnccctgcttcttgcggcccaagccgctgcccatctttncagcccatggcctgaaagcatccgaatgccaatnttatcnctgcccaccccgtccc

SEQ ID NO: 713692 - DNA, 656 bp, Homo sapiens
tcgaagtcagctaatggacttttatggctctatcttttccttgcagtgaagaaccctatttaaagaactgggtcatcattgtcctgttctagcaagatagtcttcagttttcatttgcctgtgccctgtggtagtgggaaacaaatcataatgtattattgaaatgtttaacatcatgcataacagcgtgtattatacagggtagatttctttagctgccacagtaatactcattcctgtgtgtgtgtcttggagtgcattgactccaggaaaagccatttggtttgccttaactagaatgataaatgtacccctctcagtctgcagtatgagtggtttaaagtatatgtgcagtctgcttacaaggaggggttaccatgtatcacacctaatctgcccaatgttgggatattaaaacacaaagtccttaacatgcaggctcaaggtcttataaggagttctagatctttgacgagaatcagacaacatttgtgtgtgttacgaagcccattcatcagaagtgtggggtcatggtattacactccaaatgagccattggaaggcactgcatgaacttatgcacgggtttgcacatgcttcactgtcttgcctgtgatgatgtcaaaagtatgtgctccattttactttacatggtg

SEQ ID NO: 713693 - DNA, 118 bp, Homo sapiens
atcttgtcatgatagatggagcggggcaccaacgcccaagcgtggcacgctcgcgccagcttcctgccggtaccgctgctgctcgctggcgcggccagcacacccagcttgcttcttg

SEQ ID NO: 713694 - DNA, 159 bp, Homo sapiens
acagcggcgagactgagattatgttcagagtacttttgcagctgcagtactagggctcgaacgggagtgcagggaagggtaatttagaagagaataaggtgaccatgacactttctgaacacctcagcatccagcttccttcagcctacgactgggtgg

SEQ ID NO: 713695 - DNA, 975 bp, Homo sapiens
ctccctacagaatctcggcttaagttataagcgattgcacagaccacgagagacgtaagtcagtatcttgagtatcgttctatcgaagaccacactgtatccccagcttggactatcatcacccgagtgaggcaaccgagcgcgagagacgccgtgaagcgcaggctaggatacttccgtattctaggaccgcgtagtaggctgcccgttccccgtactcatcgacgatctaactgtacgagcgtacacgaagcaccgcgtaggctcactaacacattcgtagctgacgtgcaccctcagcgtgcccaatgaatctatcaaatcatcctagagtccaatcaagcttaagtatgagctagcttacgcaatagcttgtataggagagagtacctctttacggtactccacttatgactccctaaagcccatgtctgaagcccccagtcgctgggtcaatagtactatgccgcagtagctcttgagactaggcggatatggtataatacgcctcacactcattctcaagcccctgataaaacacatagcctgacccttccttgtactagtccctattgaggcataatcataacaagctccagtctggctactgagaaagagacctaaagatcgctcattgcatactcttcaaatcagacacatagccctcgtagtaagcagccatttctcatccaagacccctgaagcttcaagcggcgcagtcgattctcattaatcgcccaacggacttacactcctcatttactattctgctaagcaaagtcaagattacgaagccactcacaagtcgccatcataagtcctctcttcaagacttccaaatctatacccaataatagccttttgactgatttctagcaagcttggttaacttcgctttacccccaataataacctactgggagaacctctgggcgaaagaacacggtctcctgagaaatatcatctcctaataag

SEQ ID NO: 713696 - DNA, 141 bp, Homo sapiens
ggagagggggtctcactatgtggcgtaggcggtaaaacaaacaaacaataggtaagagagggatttttctagggggggagaaggttggggggatgtgtctggggctttcttttggccaggcttccttcaaagcataccggc

SEQ ID NO: 713697 - DNA, 464 bp, Homo sapiens
aaggtgaatcattatatacactcatatatacacatatgtttatatagctaatcggtagtgcgatggggcattcacagtcaactgcaaggggtccgtattgtaggaattccggctattgcaacagaacagtaccctacacggtcttgtgagcacgggtcaagataatgatttaacaggtgttaaactgacactgacaaagaccaggttctcaatggtattaccagaagtggactcaggcattagcacttattctccggagtcaggatgtgatgacttatttgagtacaaactcatgtgtgcatacaacatactggcctatagctaggtgtgcgtagagtcctagatgacatggtgggtgatgccacctaataacgaaccatgatcgacaggatgtctgccctcgagcgcatggctcgatcggagatcatagtgaccacgagtgcggctgctatgatcaagctggt

SEQ ID NO: 713698 - DNA, 444 bp, Homo sapiens
  misc_feature (33)..(33): n is a, c, g, or t
  misc_feature (129)..(129): n is a, c, g, or t
  misc_feature (240)..(240): n is a, c, g, or t
  misc_feature (285)..(285): n is a, c, g, or t
  misc_feature (332)..(332): n is a, c, g, or t
  misc_feature (395)..(395): n is a, c, g, or t
  misc_feature (416)..(416): n is a, c, g, or t
  misc_feature (433)..(433): n is a, c, g, or t
tctcctgacctcgtgatccacccacctcggccncccacagtgctgggattacaggcatgagccactgcacctggcctttttttttctttagagacagtcttgctctgtcacccaggctggagtgcagtngcattaattatagcttactgcagcctcgaactcctgggcctcaagcaatcctcctgggtttccttcccaaagctatgaaattgcagacaggagccaccatggcctgggctngtttttggggggccatggcaagtgcaggcttgtcagagggaattnggagaagcagggattagttagggaaaacctctccacttcttgtgttntcatggccagggtagtgttttgttaactttcagaaacccgccctttacctttaaccttacctnaccatgtttatggttcatttnacccattgttcccttgncgtataagggg

SEQ ID NO: 713699 - DNA, 881 bp, Homo sapiens
tcaaacccatcaaaatctacttatttataaatccaaggggtggcagcatcactctgtcctagcattctcttgggtggaaagtggctcgtgggtgcctagccgtgggaagttgagcagcagcccactccccggtttcactttctctagcccatcattaccgtggtgaaacgtgcaggtggggcagctcagtggcaaatagaaattgtgggccgtggggatttcctccttcttttccagctccatgtgtttgtgcccccgtgctaggaaaattagaaagaacgagaaccaccagtgttccccaggacacccagggttctcacttcctctctgggcagtgagtggtgtgtggctaaaacctcccctttgtgcgtggccttgtgtgccaggtgaatcacgtgagaaaacaccacctttgaccaagaaaaaacgtgccccgaggtgtgcgaacccacgccacgtataacccataggtggaggtgcacgtgtccccccccttttccctagagcgaaaagtgcgtgaatcccaagaaaggtgccacccctcctttgtgcacttgagggctcccccgagagaacccccctgttgtgtccccgtggaaagtctgaggggcaacataaaacttaaataagcccacaaaaagttaatttatggttgccaaagtcgcataactctggggtgaacacacggcggttgggggcccactctctctatcaaccgggacctaaagcggggactctgcggtggggagctcaactcgcgcttataaacgcgttcttgaggaacccccaaagatctccccttaaaaagccccacgcctgaataaaactcatttacactaatctccttacaaggcgaaccaccacttaaatggcattgtacc

SEQ ID NO: 713700 - DNA, 287 bp, Homo sapiens
ctaatcagcagaagctagggttctgatcctgttgctgatcttgatgcaaactctcacagcctttctgcaccccgaggttccctcatccatacagaagttgctgatgccttttctggctttgtgattctacttaagtaagctgcctcctgtgcggcattagaaagccactctatcagcagcactgtctccttccatggccccgaatgtgaagcgagcgaggttgctcctccacctcagcacaggtcggtgagcctgccagccgggctaatccatgcgtggattgccat

SEQ ID NO: 713701 - DNA, 233 bp, Homo sapiens
gttttgtataacatcactatctatgctgcggaagaaaatcaagaaagtacacctgtggtcattcaacaagaaaccactggcaccctacgcttagatacagtgccctctcccagtgacctgcagtttgtggcagtgacagacgtgaaggtcaccatcatgagaacaccgcctgagagtgcagagaccggctaccgcgtggaagtgatccccgtcaacctgcctagcgagcacgg

SEQ ID NO: 713702 - DNA, 350 bp, Homo sapiens
cagtaaagaacttagatattttagaggtctgatttgggggttgagaaaaactgctaagactggtggtcacagtcaacatggtggctcacgcctgtaatcccagcactttgggaggccaaggcaggtggatcatgaggtcaggagttcaagatcagcctggccaacatggtgaaaccccatctctactcaaaaaacaaaagttaaccaggcatggtggcatgcgcctgtaatcgcagctacttgggaggctgaggcaggagaatggcttgaacctgggaggcgtaggttgtggtgagctgagattgcaccactgcactccagcctgggcaacagagagagactctgtccca

SEQ ID NO: 713703 - DNA, 623 bp, Homo sapiens
agctgtacgctcgatcgagaagttggaccagcgtcggtaccacgacgccgagagcatctgtacaaatgacgcagtatcagatgaagtacagtaacagggcagtacaaccatccgcagcatcctgaaggtctacaccacatgcctgtgccaaagctgctgacttcctggacctcacagagcaggagttccggatccatgcgttcttgtttcaaacacaagatgaagaacctcgttgtggaaccagcggtatctcagccctggatggtgaatttcagtcagctcagaggttgacttctacattgataaggacatgatccacatcgcggacaccaaggtcgccaggcgtacatggggatctcttcatccgtcagatccacaaatttgaggagcttaatcgaaccctgaagaagatgggacagagaccttgatgatattcacacacattccaggaacctgttcgatgtattataggcaggaagtgtcaagctaccgtgacacctttacctagatcagccatcagcctgtcaactcagataacaagttaaggaccgaagtgttaccagtggatctcagtacaacggatcttggcagccacaaaaaccacacgcagagatcgtaacaca

SEQ ID NO: 713704 - DNA, 1494 bp, Homo sapiens
gatgggtgtcggcgtgaccaggcctgagctccctgtctctcctcagatgacatcgtctttaaaccctgcgtggcaatcacctgacgccacgccgtgcatgccccagggcacagcaccagggcgcacctggcacagtccaactcacttccttcaagcatccatcccaactcattggcatgcattcatccgcacacatgtttccattagtgggccagcagcaccaatgtgcggctcccaagccagcatgccagccagcatccagacatgtcccattcagcagggcaaggctagtaggtagctagcatgaggcacagcacacaccaatagcattgcgcacaggcacatccagcagggccaccatggcaacaacacacccaagctcttaggcagcaacactagcatgcccatccatatccaggaggtgcaatgtgggcacttagctgttccacccacaggcaggcccccatccacatgcagcatccagggcaccatgtatgcatagggcccacatcacaggtgccacaagacctgcagacccagatgcactggatgcccactgagaccaccaaatgatgacagctccacatgagtgccaaggacccaccgacaacacatgagatcttccgaggaccacgtcagacacgaacacatccgatataaaacccaggacataccagggtcattcacacaacattcaacaacacatcccacgggggacacacccattggacaccatcactggaccgatgcatcgtgcgacgcatggcattccaacgcaacttgcgaagcaccaccacaggtgcgggcagcccaagcgaacacacccacggcctggcgttgaacccatgacgtacaaacgcgctcctccccacaatatacaggccctcttgcggactggggtcgcatcccagagcccgcggggttccagcacccacagggccagacccaatcatcaccaaccccctgccaagcagcgatcggccaactcacgccagacaggaccaccacagtggcaatccatcgaccgtcaccagggcacgcgggagctcaccgcaccactgcacacgccagacgagcaataggacagtaccagcaatggagcaatccccaacaagtgatggacaaccgagacaccaaactgacagcaacaagcgcgagcaaacaccaacgatccgtgagccaagtgacagcggggacacacgagcaacaaaccagaccaccagagtagacacgagcagggaccatacgaggacaacaagactaacagcgagacaggaacagatgaaacagcaaccaaaagcacaagccaagtcacaccacaactagacaccaacaacaagcaaccagaacagaagaggaagcccgacaccacaaacaacatgcacaagacacaagagcagaagcaggacaccaacagaccatcatacagaccgcacagcggagcctggcagcgaagagcgacacgaacaaaaaggagaaaaagtaagcaaaaac

SEQ ID NO: 713705 - DNA, 536 bp, Homo sapiens
taacataattgtatcaaaagacaacgaaattagtcacggctttgggtgctattcagctggaccgattccaggggcagcttagtgtggtttttcattggcaaaaatggagacctttaaaatggcaaaacaaatgaccggaggaagaggggtggttggacccacgcagttgtcttggttgtaaacagtgaacattgtgctttgttgtctcatttagatggagggctgcagcatgggaggtaccacgctggcagtcagcagtcacaccagggtggtcagagacactggtgacagcatctgtgcttgcaactgcattcccagggtgtctgttttgttcccaagtgtctcccacaaaattccccaggaggttctccgattaaatgtcctcagagtgaaaagcatggactccaaatcactccgtatccacttccatgagatgtcttgatgctccagttcaatgagtaacaatttctcaagaggctctgattagttcattaaaaaataagcgacccacctcattccccgggggacagcatatc

SEQ ID NO: 713706 - DNA, 794 bp, Homo sapiens
gcacagccaaagataagaaccgctgggaggaccctggtaagcagctctacaacgtggaggccacatcctgatgccctcttgggcctactgcagctaaaagacgtttgactttgtgcctcccgtcgtgcgttggctcgaatgaacagagatactacggtggtggctatgggtctacccaggccaccttcatggtgttccaagcctgtggctcagataccaaataggacgccccatgaccagccaggaactgaaccgttgatgtgtccctccaactgcccagcgcagcagctccaatgatgcaccaccgatatccactgggaatctgccagtcctcctgcgatcagaagaggccaaggtaaaatgagggtttcacagtcgacagctgaaggaaacaggccaaggcaccttgtcgcgtggtgacacatgtaccatgctaaggccagaagattcaactcacctgtcagtaaattcgacctcaaggtcaccttacataccagcagcggcaaacatgaagagaggcctcaggatgggcaagaacgtttatgatccttgacgatctggaccaggtacggggcacaaccacggatgcccactgatgtctatcataggcacatctcccatggcttgaactgggctatgggtacccggaaaccagattgaacctggcaaggcatgctgggctcacggggacgtacgaaaaacatccgatctaccaaccttgtgaccttggagccagtgccctctcccgatctagaactaccctccatcatctggcctggggaatagaggctgcc

SEQ ID NO: 713707 - DNA, 331 bp, Homo sapiens
ttttttttttttctttgggccccccggggtagtggccggggttgcttttttcacctttgggccaagtgggggctttgggccctttcccctcccggggttttttttttttcaggggggggcccctttttggtttccctcccccccatcccgtgaagcgcccccgtcccccacagtgggtgtttttttgttttgggccccggggtcccccttgggggcgggggggggtttttccgagctcctttaaggtttttttttcgggccccttcccccgtttgggttttgtttttggcggggggtggtttgcattcccaataaagctttaaaagttata

SEQ ID NO: 713708 - DNA, 1523 bp, Homo sapiens
actcaactatccagagacccaatcgtcatcctcactatagcgcaaacagaagagagtattatctggacaacatcctctaccatgatgcgctgcatgtacaattattacatatgcgccacatgggcacaatcattgacacacacatacttgctacctttatgaactctatgtgcaactgtagctaataccctctaaaatgctttcatgtcagtaagtggacgatagagcgtagaacattcaagctgtcttgatgaagttcggccgggtgatcatgatacccgcggaaatggcgaggacctaaggctacccttacacgcaacttggtaccagaggaggccccactctgctctattggtatgcatcatgtacctcataacgacttcacttatgtgcaacatggctcactgagagccctaccacgatgcctgtgccagagtatgcctggctatgttctcgaggaattgaggaaatcgtgtaaagtgtgcaatgtgtggcagacatagggcacgcaacgccaagcccgtcgttcctagtaccccttctggtgaaagttttaccgcctgttccagtctcaaagagatagtaacagttctcctctttgctgagcaacgtagggcataagaagaccgcttttgcatattgacgcaagaacgttaaacagagcagaatgttatagcccaaccctaataagggtacgagtcgcgttacacaccatgcgcatgtccttcccccacaggttcaaatggaaagaggacgggtttgcgacagagacctccagacgagactctaacataacccctaaagagcatataattcatctaggaaagcccatgtattagacctttgtataccttctcggtacaagtgaaccacgaacgttgtgggtaccccaaagtttccttattccaaccccccttattaaggacaaagcaaaacgtcatactcgggtaaaggtaattacagcgttaacaccgacggggacacggacgacgcgagtttccttccgagacctgatctattacaaggcgcgtgaggcgggtccacgagtgtacataaaacggaactgtttgacacaccttagaactaaaattttaaacagcaaagacgcccaagagttgattccttacccaaaattcagaatgccaagatcgaaataaaaagaataaaagacagaagaggcgcaacaatttagggaacatagcaaagttaactacaccaaatcgagtatccggtacaaactgtagggaaccaagaccacttggacgtaagacgttgaggggacaatcatataggagagaccatgtgacaccacctattaagagttacataagatgagtaatggttagcaccacaaacacatgtgtgggacacaaactagataacacgataaggagttaagaccattcataaaaaaagcgagcacacgaagtggataaaaataaatatacacaaacatagtgaaacgaggggacattaaacatgttgtgactataacaacttcaacgctgcaaatatgcatcaga

SEQ ID NO: 713709 - DNA, 395 bp, Homo sapiens
  misc_feature (341)..(341): n is a, c, g, or t
gtcggtacgccagagataggatcgcggcgatgacgatcagtcctggctggagcaggctggaataaacgtgggagatcactgtggccagcagctccctgagacacaaacaccgttcttcctgtggtctggcccgttgtcgtgtaagcgggggacaggaagcatgagggagcttgtggaggtcgggccacgtgccatcccagacatcaagaggccccaatgggtttttacttgtttctcgcagtctggaggggcagccatgaaaactccaagcgccccttggcataagaaggagatgccccagactctccacgtccagaaactggtgggatctggctcatggngagcggcagagcggcagtgataggacttcaggtgagcccaaggtgctgggggaa

SEQ ID NO: 713710 - DNA, 901 bp, Homo sapiens
ggaaataaacagccttgttgctcacacaaagcctgtcggtggactctcttcacacagacgcatgtgacatttggtgctatgacttggacctggggacctcccttgggagatcaatcacctgtccccctgctctttgctctgtgagaagatccaactatgacctcgggtcctcagaccagcccaagaaacacctcactaattttaaattggggacccactggaaatccgactgcccagcctcgcccggcagccactcctagagcccctaaagctctggcccgaggctctctgaccgactccttcccagatctgctcggccttagctggctgaagacctaacactgcccgactcaccttggaagccccctggaccatcacagacgccgagcctcgggaaactctcacagccggaggaactgtaatatcggccaggcgcgactggctcacacctgtaaactcccagcacctccgacgcaggccatggccggacagatcacttgcaggtcaggagttcaagaccagcctggccaacatggctgaacacccgtctctacaaaactcaccaacacttagccagctgctatgaagcgcattccagcagttgctccatgaaggacatctcaacagtccttcgaaccttcgctgaaggcccatgtaagcacacaaaattcatcatcagatgacacgagatttctctccctcgttctgtcaaaatattcgactacacccttaggtcacacaccaggagcttctgttccacagggcaaagccacacatcccaagccttcagcctatgctcggccagaatcggcacccctcttcgccgctgtgttcccgcgcctactttggtctaatggtggacccgagtggtaggttccgcccaccacagggcgaccgccga

SEQ ID NO: 713711 - DNA, 310 bp, Homo sapiens
  misc_feature (182)..(182): n is a, c, g, or t
  misc_feature (201)..(201): n is a, c, g, or t
atggtttgcccgggggacgaggaaggggcgccttggtaccgaggaactccggggtctgggggacttcgggggcgtctctgtgaagcggtgtaatcagttcaggcggagggggaccccattctggagtcttctctggctccccaagactttggctcatccccctactcttctggaggtggggngggcctctgggcagatggntgtccccctgttccccctccactcttctcttcctctcttttttggggggagaaacctcggaatttctatgagacctcccccagggaggggttcagttgggcccccatcc

SEQ ID NO: 713712 - DNA, 104 bp, Homo sapiens
ggaagacattatggaggttctccaaacaactaaactcgaactaccatacgatcctgcaatcccattactgggaatattctcaaaggaaataaaatcacgcggat

SEQ ID NO: 713713 - DNA, 476 bp, Homo sapiens
gacatcgccaagtttaatcacagcatcatgactgctcatgtcatgaccacgcagaggggcagtaactcccttcaggttgtgtcacgaagaaacacgtgtctctagggccacacatgagcctcctgtaggaaggatttttcattctactgtgtaagattgagcaaaacccaaaacctcagttccgccaacttccctaaaaggatgacagggccacgtgaaattgaaaccctgaatgtgggccattcttaccaaaagtcactaccgagctgtccaaagggcttgtttgactttctctcctttccctgagcacccgctccctggcaggcgggaggtggtgactgtcaagtcctggaggccctaccagctggagatgcaacctgggataattatatatatcagctattggaggaggagggtgccgaatctctaaggcaacatccctaagctcagcccagggattagtgagattttactta

SEQ ID NO: 713714 - DNA, 1060 bp, Homo sapiens
gtgtattctaaacagtacttgaagaacaacaagatagcctctgacatgattcccaaagggtaaagtttaccaatagaaattaaatggtctaaacggtggagataacgcactgtgggcagatgaagaggaagtaccagtgtctgcaatgtgacccggcggcccagtccaggtcaccaaacattcccgatgcagacaggagagcgggcagacggtggagtgcacggtggcccagtatacaaggacaggcacaagttggttctgctgctgaaccccgacctgccatgttgtacaagatcggacaggagcagcaagacacacctagcttcccctggaggtctgtaacattgtggcaggacaaagatgtattgacaccagattaacggacaatcagagctcaagcatgatcagagcaactgctaggctcggcgcccgatcggcaagaagagattagcaaattgatgcgaagtgcaagtttcaacacagatccatacgtccgtgaatattggaatacatggtacaaacgatgaggatgacagaccgtgactggagacgggtgacattgcacccgacacactccatacctctaaaggggagcacggaattaaagcctaattggcgatcaccatgtaccaggaggcagtactggagaacaatggagggaaacaaaagcaggtccagcaccgaggcaaatcgcaagaaatcacaagatgatagagtgcaccaaatgccgagacatctcaggacccccacaatcagacacgatgcacgggacagtatccacactgagaggtccatacagcagcagagcaacatcagaaaagaatctcagcaaagagacgacatgggcatgccccaaatccagcgggccagacacggggcatcctgcacaacacaaccgcaagtgggcgagaacggcagggagacacaaggaaccgggcaccctggcggacacagcgttaagcacggctcgaaccaacgaaggaggacacaccaaggcagcggcaaagacgaccaggcagcaccagaggcaacgacagccagcatgaacacaacacagagg

SEQ ID NO: 713715 - DNA, 436 bp, Homo sapiens
  misc_feature (51)..(51): n is a, c, g, or t
  misc_feature (96)..(96): n is a, c, g, or t
  misc_feature (386)..(386): n is a, c, g, or t
atggcctgcgttgacatcaacgagtgtgataaggccaaggctgcctccccnctgtgcgtcaacgcgcgttgcctcaacacggatggctccttccgntgcatttgccgcccgggatttgcacccacgcaccaaccgcaccattgtgggcccgcacggccccgggcttaaaccctggcacccgttggccgcccacccgcgcccgccacttggggcccctgccgcgcatcctgcagcccgtttatgggtatgtgcacggggccgcccgcctggacctggaaaagggacctacggacgcttggaaattgcgacgccctgcactgctcccgcctccacaagggcctcccactaatgttgtggtcccgggcctggcccaggggcccctttanatgccctttcccttttataaaattttccattaaaaaccccctatttttta

SEQ ID NO: 713716 - DNA, 135 bp, Homo sapiens
ttacatgtaaccgcctcccaacaaaacgtccaagggctcttggttttgtgacttattcttgtgttgaatgaggtggatgcagcactgtgtgctcgaccacacaaggttgatgggcgtgtagtggaaccgaaagag

SEQ ID NO: 713717 - DNA, 460 bp, Homo sapiens
tcgagctcggtaccgattacgctcctagacggggatcctcagacagatctagtaactgaaaacctagacaggattcaccattttaaataccattaagaatattcatggcaggctgggcgcggtgactcatgcctgtaatcctagcactttgggaggccgaggcgggcgaatcacaaggtcatgagtttgagaccagccgggccaacatggtgaaaccctgtctctactaaaaaaatacaaaaattagccgggcatggtggtgtgggcctgaaatcccagctacttggaaagctgaggcaggagaatcacttgaatctgggaggcggaggttgcagtgagccgaaatcgtgccactgcactccagcctgggcgacagagcaagactttgtctcaaacaaaaaaacaaaacaaaaatttccagggccgggcacagaacctagggcctgtaatcccagaagtt

SEQ ID NO: 713718 - DNA, 120 bp, Homo sapiens
gaagcgcgcccatgatctagagctgaagaatgttatacttcgtccatggagcatcacagtcagctgttagagaagcagaacatagcaaagaaaaaattaaagaactagaacagaaaaagt

SEQ ID NO: 713719 - DNA, 765 bp, Homo sapiens
aggaccctttaatacatttaggatcctctaggagattccaggatgaaaatccatccgcgtgccaacgagacatatcgtccccccgctgtctccccaagatgtttactctatggaacgccttgttagtacgtctggcgccttttaatacgtcatttcaacgcattgcatgcactcacggaaaagggattcaatagtcctaaaagctcacagggctggcgtccggtagtcgtgcacctctacagctccccatgggggactgtcaggttcacgactttcaggcgattaccctggtggctatagccttgatcccctagagatgatctggtcagtagtaagagaaggcgcgcagagtataataggtgtgatgtatatcttaatatagagaggtgaggagtcgtggcttggagatatgaatggctctctccccaccatagtaatggcttcctctcagaattttattccaggctagcttgctgcagctctgagtaattggatcatggctaccaactgggattgggatggaaagcattgaggggagtagaggttccagtctctaggagacattgtgctcaggaatgttgaatacgctgctatacttacctctggttactacatttcttccactcccgctttcccctacctgccttaaccaaggctcatagcagtcgtgtccttagccctcagatggagccaggaagctcagtgaaaggcttccgtaccctgtgcactagtgtctctgcagaatacgcgccggttgtagtgtga

SEQ ID NO: 713720 - DNA, 138 bp, Homo sapiens
tgcgccactgaaatgcagagacggccaggactttatgacccaccgtgtgacagatgggaaagaatctattcttccttttagtatctacgtgttgcttcaatactagcaaggcggactgtgctatcgtgtgtagtagca

SEQ ID NO: 713721 - DNA, 386 bp, Homo sapiens
  misc_feature (85)..(85): n is a, c, g, or t
  misc_feature (113)..(113): n is a, c, g, or t
  misc_feature (157)..(157): n is a, c, g, or t
  misc_feature (161)..(161): n is a, c, g, or t
  misc_feature (224)..(224): n is a, c, g, or t
  misc_feature (246)..(246): n is a, c, g, or t
tcttgtatggctttggtaggcatacttggagaacataacccacattaggaattgatttaagccctgagagtttgagggctttaancctttaaaacttggagaagctggctggncgcggtgctcacgcctgtaatcccagcactttgagagaccgagncggncggatcacgaggtcaggagatcgagaccatcctggctaacacggtgaaaccccatctctactnaaaatacaaaaaattagctggncgtggtggcaggcgcctgtggtcccagctactcgggaggctgaggcaggagaatagtgtgaacccgggaggcggagcttgcagtgagccaagatagtgccactgcacttcagcctgggtgacagagtgagactctgtctc

SEQ ID NO: 713722 - DNA, 130 bp, Homo sapiens
tatacagagggtgatcagctgctgagataaatggggaggaggaagagagtgatgaggagcggagcggaagaccaggccagagtccgaagaggagagctccgagactggatgatgatggactatgcagcga

SEQ ID NO: 713723 - DNA, 105 bp, Homo sapiens
ctcttcgatagtccttttcaaaatggcaaactcccatcactgctttattttctctgtcgtacttaccactatcttttttttttcttcttttttggagacagagtc

SEQ ID NO: 713724 - DNA, 702 bp, Homo sapiens
tgacgcatgcctgtttttggcaaggtcgactataattagtctttccccgtcaccaagtggcaccgcttgctcaatgacatgatgagctggttactgtcggacatctagatcatgtccctgaccaagaaggaattcgtgagcattgctatctttccagcagcctgcataagcgtagaccgtatgcagattatgcgcgtgcaggatcagacccgtgtgcccccgagtaccaggatccaggcattagttgttatcggagtcaacgacgttcacgtgctcatgggtgacaagggatgcagagcgtaggtcgacgacatctgctaggacagcactctggccaagcgtgcatcgaccacgggcgcaaagtttacggagggttcatgatcggcattcccgacactgccccttacatgcagtcatgccttttcagttgtgtggtgctacggatttagactgtatcaattgcagcagctatccctacagcaattatgcctaacagtgctatcaagactgctgatatggagctgtggttcaccttaagacctttagcgacctgtcatcctggctaaattcgcatggcctccttggaaccatggcgaccacttctccacacccctgcttctgtaagagacggatgtacttttaggatatgagtaccgaccatccttccagcctcatcagcgtctctgactggtcatcgtttcc

SEQ ID NO: 713725 - DNA, 252 bp, Homo sapiens
gtacagataaaactctttatggcatctctttcatggacagtgattgatcttttcacaatgtatgtagcctctagacttttgtacatatgtttgctctgtggttgtacagactatttagttgttgagaaacaggggcgcttcctaatttggtctttatcctgcgacaacactttcagcagactagcctctccttatctcacagatcacaagccccctagatagtgtgattctgcagatagcatttatgcaaag

SEQ ID NO: 713726 - DNA, 872 bp, Homo sapiens
  misc_feature (28)..(28): n is a, c, g, or t
  misc_feature (67)..(67): n is a, c, g, or t
  misc_feature (84)..(84): n is a, c, g, or t
  misc_feature (88)..(89): n is a, c, g, or t
  misc_feature (101)..(101): n is a, c, g, or t
  misc_feature (113)..(113): n is a, c, g, or t
  misc_feature (124)..(124): n is a, c, g, or t
  misc_feature (136)..(136): n is a, c, g, or t
  misc_feature (138)..(138): n is a, c, g, or t
  misc_feature (141)..(141): n is a, c, g, or t
  misc_feature (176)..(176): n is a, c, g, or t
  misc_feature (180)..(180): n is a, c, g, or t
  misc_feature (182)..(182): n is a, c, g, or t
  misc_feature (189)..(189): n is a, c, g, or t
  misc_feature (485)..(485): n is a, c, g, or t
  misc_feature (498)..(498): n is a, c, g, or t
  misc_feature (557)..(557): n is a, c, g, or t
  misc_feature (594)..(594): n is a, c, g, or t
  misc_feature (723)..(723): n is a, c, g, or t
  misc_feature (734)..(734): n is a, c, g, or t
  misc_feature (857)..(857): n is a, c, g, or t
gcctgcccagcaggccccccaggagagngctcgggcgcccctggcagcccccatacccccaggaccnggctcgtgagggcgtcngggnnaggaagagaccnctctgtgcggcncaggctgagangcagagggcggngntcnaaaactggaagcgaccggtgacgtgtattgaaggngggngngccaaangcggccgacggaggtgctggcctgtggtgtggtgtggcgctgctggccccgtgtggtcgatgcaagtgcctgggggatgtgctgcgtgcccagccgccctgcggggagagcagcgccgcctgcccatggggccgtggggcgtgctgtgctgcactgcactggctgaagcaacccgccagcctgccgtgccccaccccacccagcacgcactcattcagtgcattgccttaatttaagcctgagggggctgtgttctcacaatataaacgaataaagtgtggtgctggccgtacttntgaatgacttctnaactgtgtggtttggggaagggagggaaacctaaaatcccgtccaaatgagtgaaattnctgagagaagtggcgtgagtgctaccaggttggggtnagggaaatgtgctgggttcaggcgcccctcccagggctgagaaagtgcagccagggacagctttctgtgctctcccagggtggctaggttagtatctgacatgacaaaaaactgagagtgtgctaactnctgtgcaagcnaggttaatcctgagactaaatcttggcgttcagactcccgtagaggtcatctgtgtccaggcccacccgggcgccggctcagcggtagtgccgaagtaggatgagcttctggggagggaactnctcccggcagagggg

SEQ ID NO: 713727 - DNA, 1403 bp, Homo sapiens
gtttgtgctgatatgtatatagtcttttttttggtttgtagtgtaaatgtgtataagagagcgatatgctcgtgtttgttgttaggctatttatgtgtttagtgttcaaatatggagatgttgtctaataaacgttgaaatggtgctgtagagtatattagatagatgaccctgagtaattgtcgcattatatggaatatattatgtctagttttacgttctaaaagattgtttgttatgatcatggagtgtttattaattaaatatggggtgtgcgttgtaagaaggtgttaagatgtgttttgtgttgttgtcgatacgtgatggactatgtgcgtgttcgggtagtcaaatcttgtgtgtgttggacaactcatgtatgtgattgagtgttagggtattacacaactctgggccatatgtggtcccatatttaaaaacgttcgtctgtatgtgcaatgtcttgtttgtttcactatatagccatgtgtgtgtatatttagccattgttgaaggacccaagtagggaatttaagtgttgtatgaagtcctcggatattgtctacactttatttgatcctataccgcctagtaatatggatttgtgtggacttctaatgggtctattgtaagtactgtacacgtatcgttagtatttattggtgtctccaactttgacgggagtcatgcaactagtttgagcccattttatcgtcattgctatatgtctttgttattaatcagccttaattcagttgtagtagcgttgcacccctttcggggttataccctatatgtctagttctgtagttggttgtgcttactcccttatgctcttgatatagtagtaatgtacttgctgctactggttctcaggtcatgtccattaggtattgtcgtctacactcaatagagggatgggaagccgaaaataccattacatttagagattaattattggtacctacactatctttaatcttgctctattacagtgtacttcgtaccccgtgaacctgtcattctaaatagttgcataatagcttaccagtcagtgtatacaattagaatagttgtggaaagacagtcttgtatttcctctgtaggctgtgtatatatatataattatgtacttctggcaattctatctgtatttaaagatgtgacaatcgttgacaccgaattcttacagcaattagtctgtgagaccgaagttacagagactaatccctactcaagtgataaacttgatgtgtgttaagagggtacagaattatcaactgatctatggtcagttgcttcccatgtctggcttgatttccctcagttgtgtaaacacttgacagggtactgtgacaaatgggaaaattatccaggtataagacatgtctttgccgcgcgct

SEQ ID NO: 713728 - DNA, 338 bp, Homo sapiens
gtagagttggatgcagttaaggtttatgtttgcaatagatcgtgtgcaatggcaggtctgtcgggggtcccatggtgtagttagtatattgtgtccatgcaatggtacagacaagctggctgaaacgggaactttagagaacatattagcccaaatatatgatagcaaagtatttgccatttgctgattgtcagggaggcagtaattttagtagtatagaaactggcctgtatatttactcacaacacttctgacactaaatgtatgggtattttcccctataccaactgatatggtatgactgtgttcccacccaaatctcatcttgaattgtaact

SEQ ID NO: 713729 - DNA, 1318 bp, Homo sapiens
tcgccagtcgagccacatcggtgagactaccatggagaaggtgaaggtcggaatccatcgagatttggtcgtattgggcgcctggtcaccagggctgctttctaactctgcgctaaagatggatattgttgcgcatcaagtgaccccatatcagttgtagcctcaaactacatggtatatacagtgttccacaataggtgattccaccgcattggcaaatttgccatggacaccgtcgaggctgatagacgcgtcaacgctctgtcagtcaatggaaagtcccatctaccagtactgtaccagggaggcgagaattccctgcacaaaaatccaagatgggagacgatagctgcgcgctgagtagcgatcgtggcatgctccaacgtgagtcgggtctttgcaacacaaccactgtgcatgaaacgtgcttggcgtgcctcaatttcgcagaggggggaagcctctaagggctacagtgcattcttctggcaccgcactttctgcgtgactggtccacaccatgattgcgtgcatggggtgctggaaactcactgcagagagaggtgatggacagatcatgacctgcacagagtcattcagcagatgtcctccatgcatccaggcaagctggcttagccagcccccttttggtccccaaacgatagtccagattgggattgagacctttgaacccagtgacgcggtgtctagggatcaaaaccgttgcgcgacatttattgagtggaccgagtcaggagggacagaggtcgagtcgaaaccgcaaggagcgatcggaggacggagggctcccccccttctaaaagggcgctctcccatgggagacgcttaatcaacgattgatgccagacccatggcgtgggaggttccttcgcttcgttgaaccgtttgcaagagcaagtcagcacacaaatacgcctaccttcactgttccggaacccgttccggaccgatccttgcggggggccgttggggcggttttgcgccccttcaaaacgaaccccaaccttttattgatcccaaatggaccgtgcccaatttatacccccttgacgttaattgtggaactaacacgcgacaactctttaggcgcttaaaccataggccgaaaccaagtgggcgttggcggtctgggagacccccttcacaattggtgggtcgcccaccagattgtggtctctttccctcacacggcgaaacgttaaagtaggagccccccccatggtgataagccgcacgtcgagggtctcgtccataagcaaaacagtagggcgcacacaatgacagcgcatcgacatga

SEQ ID NO: 713730 - DNA, 573 bp, Homo sapiens
  misc_feature (8)..(8): n is a, c, g, or t
  misc_feature (355)..(355): n is a, c, g, or t
  misc_feature (362)..(362): n is a, c, g, or t
  misc_feature (378)..(378): n is a, c, g, or t
  misc_feature (444)..(444): n is a, c, g, or t
ttcgcttncctcgcaccaattctgacaaccagaatatgctgagtcgagaatttcgataagtcgaactgagaaagcagagacgaagagaaaatctccctgctttccaaagaaacgatggaacaggagaagcaagcaggcgaatcgtaatgaggcgtgcgccgccaatatgcactgtacattccacaagcattgccttcttattttacttcttttagctgtttaactttgtaagatgcaaagaggttggatcaagtttaaatgactgtgctgcccctttcacatcaaagaactactgacaacgaaggccgcgcctgcctttccattctgtctatctatctggctggcaggggagganaagaacntgcatgttggtgaagnaagagtgggggtggaagaagtgggggtgggacgacagtgaaatctagagtaaacccaaagctggcncaagggtgtcctgcaggctgtaatgcagtttaaatcagagtgccattttttttttttgtttcaaaatgattttaaattattggaaatgcacaattttttttaatatgcaaataaaaggtttaaaaactt

SEQ ID NO: 713731 - DNA, 1085 bp, Homo sapiens
  misc_feature (10)..(10): n is a, c, g, or t
  misc_feature (73)..(73): n is a, c, g, or t
  misc_feature (75)..(75): n is a, c, g, or t
  misc_feature (102)..(102): n is a, c, g, or t
  misc_feature (178)..(178): n is a, c, g, or t
  misc_feature (244)..(244): n is a, c, g, or t
  misc_feature (276)..(276): n is a, c, g, or t
  misc_feature (284)..(284): n is a, c, g, or t
  misc_feature (290)..(290): n is a, c, g, or t
  misc_feature (293)..(293): n is a, c, g, or t
  misc_feature (297)..(297): n is a, c, g, or t
  misc_feature (300)..(300): n is a, c, g, or t
  misc_feature (314)..(314): n is a, c, g, or t
  misc_feature (321)..(321): n is a, c, g, or t
  misc_feature (332)..(332): n is a, c, g, or t
  misc_feature (343)..(344): n is a, c, g, or t
  misc_feature (348)..(348): n is a, c, g, or t
  misc_feature (350)..(350): n is a, c, g, or t
  misc_feature (359)..(361): n is a, c, g, or t
  misc_feature (364)..(364): n is a, c, g, or t
  misc_feature (368)..(368): n is a, c, g, or t
  misc_feature (370)..(370): n is a, c, g, or t
  misc_feature (383)..(383): n is a, c, g, or t
  misc_feature (392)..(392): n is a, c, g, or t
  misc_feature (403)..(403): n is a, c, g, or t
  misc_feature (442)..(442): n is a, c, g, or t
  misc_feature (444)..(444): n is a, c, g, or t
  misc_feature (471)..(471): n is a, c, g, or t
  misc_feature (481)..(481): n is a, c, g, or t
  misc_feature (485)..(485): n is a, c, g, or t
  misc_feature (490)..(491): n is a, c, g, or t
  misc_feature (495)..(495): n is a, c, g, or t
  misc_feature (497)..(497): n is a, c, g, or t
  misc_feature (514)..(514): n is a, c, g, or t
  misc_feature (516)..(516): n is a, c, g, or t
  misc_feature (521)..(521): n is a, c, g, or t
  misc_feature (525)..(526): n is a, c, g, or t
  misc_feature (941)..(941): n is a, c, g, or t
  misc_feature (958)..(958): n is a, c, g, or t
  misc_feature (1010)..(1010): n is a, c, g, or t
  misc_feature (1022)..(1023): n is a, c, g, or t
  misc_feature (1063)..(1063): n is a, c, g, or t
agtgccaaanatacactgacattaagcaaattcactgaaaggaagaaactacagaatgcacggattcagaaancnattttaagtgattaacaaataaagtancgaagaactcaaaaacgggctctgtatgctatatcgagtttatcccttcccgaacaaaatttctgttatttgggcnaattcttaaaccatggtttaaaccgtaatggttacaaaccacaaacacatccatccagagactganaccgtttctatccggtcagtggcaaaactgtngagagggnaatagntgnggcngtngggttttatatagngtgaacnctgataaatantcctaccaggnntaananacagcacgnnntgngggngntggctgactcacnaaggttgtnacaaacaaganctactcttcactcgacaccatggctcagaggccaccganangcacgagtgactgacagctcctctgcntacaaacgantganacccnnagtngntgtcgttctcacagcantnaaagntctnnaggactcacactgatccaatactaactttcttccctattttacacatatttttctactgtccagtggaaatcattttctgttttggctaaacaacaaatactagtttataacaggaatggtaaaatctgtgagaattctgctcaatttaatacaagatcactactttctttagaatggtttctgcgtgtttctacgtcaccctctgtatttttagcttccagtttcctggtaaggaataagttctccttcccagtcacactcggggtcatttacacgtttctgggatgcccttgctcgtccatggaggccaggtgcgtgcagtgactcactctgcctcttccctcttctcaggaccagtccccgaaccttctgccttgcagatcctcctgtttccgccacactctcgcgctcggnagcgagctcctggatanacagctgcaaggctggccggtccttgtttgccagtcgctcttttctgggtgngggactgtcgtnnactctgcgctcttccagtctctcatggctccccggggccngtgtctggttcccttttcctct

SEQ ID NO: 713732 - DNA, 425 bp, Homo sapiens
  misc_feature (375)..(375): n is a, c, g, or t
  misc_feature (416)..(416): n is a, c, g, or t
gtttattgtgcgtgtctgctctttgagtctataaagggattaacagctgaatatagactttaaatcactgttgggatttaaatttttactctgaaagactaggtcatttgacagtaatcaagggtattttcattctcaagactgttttgcaggcccagcagaaaacccctctatttaacccatgaggggagtcatcctcagggctgaggcatatgaaatctggggtacttcacacagaaaaataataaaaatgtagggggatttgccttgtgggttgaatccggggaagttctaaattgggcaataaggcagataggggaacaattttgttcaggatactgtgggatttaatgggtattttaaaagggcaccctngtttatttatttttttggatggcaccaattaatttttaccntcttgccag

SEQ ID NO: 713733 - DNA, 1112 bp, Homo sapiens
  misc_feature (274)..(274): n is a, c, g, or t
  misc_feature (298)..(298): n is a, c, g, or t
  misc_feature (307)..(307): n is a, c, g, or t
  misc_feature (404)..(404): n is a, c, g, or t
  misc_feature (491)..(491): n is a, c, g, or t
  misc_feature (579)..(579): n is a, c, g, or t
  misc_feature (633)..(633): n is a, c, g, or t
cgtcgtcctgccatcgctttataatcatattttctagtgatcaccctgtactcagatagcagtgaatactatcgacgtcagtgcagcagtactcatttgtgccactcaggctaatagtctcttgcaattgcactcatagtggatagctctatcgatacaattgcatttatactatctcacatagcatatatgtcagccgagtgcatgctacaattgcactacatcagctatcttgcgctacgccagtgtcagctacactcactagcactctatntaccttcatccttgctgtgtcaancactcgtgncgtctgtacgatatgtcactgttcttcgttgtaatcttacactctccactgtctagccactagatatcaaccaacgaagtgtctggattatagctanaggaacagtctagcggatcagcagcgttacatgacgtatattagtgagctactcacatctagtcatagttctaactctaggctagcnacagctcaagatgctgtacacagtaccgatgcttaataccgaacatgactctcatgtgcgacatctaggacgcatatacatggtctcntgtctgcactatataatgtgaacctcatgacacgcataccacaacccatgcacnacatcagcaggtacaacgcgctacatcgctcagtctgtagactcactatatcatacaatgaacaaccctatcagagatctaatctagtacgacgtatccgacgatgtgactgcacaccgcgtgtgtgagctctatcggaagtacgatcacagttgcattaagtgaacttatcacacataagttcaacgatcaccagactcgtactctcgtacactacacgcacacagtgattactgcacacatgatcatacgcactcgtccgtgtgtaccatcacgactgacagagtagtaatgtgatcttcagagcattgcacagcaatgtgactccattatcgctgctacacagaagtttcatgatcgacaactagaggatagtatcatcgcatgtacagactggggcggcaacttcagtcgactgccgatacattgtgtatccatattggacatcacaccgtgacatgctaccacgtgcgcagtac

SEQ ID NO: 713734 - DNA, 759 bp, Homo sapiens
  misc_feature (19)..(19): n is a, c, g, or t
  misc_feature (23)..(23): n is a, c, g, or t
  misc_feature (109)..(109): n is a, c, g, or t
  misc_feature (519)..(520): n is a, c, g, or t
gaggacccgcagcagagangacncctgcagcaaggagaccaggaaggggtgagacaaggaagaggatgtctgagctggagaaggccatggtggccctcatcgacgttcnccaccaactattctggcaagggattgggagactcatgcacaagctgaagaaatccgacactgcatggagcatcgatcaacaatgagcgtctcccatttcttagaggacaactcaaagagccaggaggctgtgtggacaaaagtcattggaatgcatcgtggacaatgatggagacggcagaatgtgaccttccaggaattcaatgtgcctttgttgccactggtgtactacttgcgctgcctacagagtactctctgaacatgacgtgagattagcaaagcagtcaaaccttatcctggtcaacagacgacaggtcatgcgagaaagcagacagcaagggcttgcagctataggagctgagctttccagcggtgtagctataggaagcttgattgctttgtgatgaaaanntgaaaactctttccaaaggcgttaacggctgcatcatcttctgtatataggctggtgtaagtgatgccccaggactctgttaacagtaaccttaggagtcaggtctcagtgataaagcgtgcaccgtgcagccgcatggcgtgtaaaacccttaaaaccggagggaaaccctgataccagaaatttaccccgggggcacctttaaaattttcataactttaaaaaacaaagcttatcag

SEQ ID NO: 713735 - DNA, 906 bp, Homo sapiens
gccagaacacaggtgtcgtgaacactacccctaatagccaaaaatgggaaaggaagaagactcatatcaacattgtcgtcattggacacgtagattcgggcaagtccaccactactgggccatctgatctataaatgcggtggcgtcgacaaaagaatccattgaataatttgagaaggaggcagctagagatgggaaaaggctccgttcaatgtatgcctggtgtcttggataagactgaataggctgagcgtgaagcgtggaatcaccacttgatatctccttgtggagaatatgagaccagcatagtactatgtgactatcattgatgccccagtgacacagagactttgatcaaacaaacatgattacagggacatctcaggctgactgtgctgtcctgattgttgctgctggtgtgtggtgaattcgaagctggtatctccaagaatgggcagacccgagagtcatgcccttctggcttacacatcctgggtgtgacaacaactaattgtcggtgttaacaacaatggattccactgagtccaccctacagccagaagagatatgaggaaatcgttaaggaagtcaagcacttacattaagaaaaattggaacaatcccgacacagtagcatttgttgccaagtttctgttggacatggtgacaacatggctgggagccagtgctaacatgctgggttcaagggacggaaagtcaccccgtaggagtggcatggcagtggaaccacgcgttgaaagtcggactgatccaacacaactggcaagtgaaagccttggctgctctcgaaggcacaaatggggacggacctcctggcatcgactgttcaccggtggggcctggcccaacaaagtaattaggccaaaggaccgaaggaaaattaag

SEQ ID NO: 713736 - DNA, 661 bp, Homo sapiens
  misc_feature (19)..(19): n is a, c, g, or t
  misc_feature (23)..(23): n is a, c, g, or t
  misc_feature (109)..(109): n is a, c, g, or t
  misc_feature (421)..(422): n is a, c, g, or t
gaggacccgcagcagagangacncctgcagcaaggagaccaggaaggggtgagacaaggaagaggatgtctgagctggagaaggccatggtggccctcatcgacgttcnccatatctggaggaggagacagccaagctgaagaatcgaatcagagctcatcacatgagcttcccatgcttaaggaatcaagagcagaggtgtggacaagtcatgaaacctgacatgatggaacgggaatgtgattcaggaatcatggctgttgcatggttctactgctgcacgagtcttgaactgagtgaataaagcgcaaactcctgtacagaacggcatgcaaaagcagacagcaagggcttgcagctataggagctgagctttccagcggtgtagctataggaagcttgattgctttgtgatgaaaanntgaaaactctttccaaaggcgttaacggctgcatcatcttctgtatataggctggtgtaagtgatgccccaggactctgttaacagtaaccttaggagtcaggtctcagtgataaagcgtgcaccgtgcagccgcatggcgtgtaaaacccttaaaaccggagggaaaccctgataccagaaatttaccccgggggcacctttaaaattttcataactttaaaaaacaaagcttatcag

SEQ ID NO: 713737 - DNA, 206 bp, Homo sapiens
ttcagctgacagtcctcagttctctttgccaggctgagctggggctgggctctttgtgggttgagttttcatcggcagatccaatgctgacgaactcacttgacacatgcggctcattgagtccattatatgtttattaagcaccatactatgtgacttgcactgtctattaagccatgtccttaatttcttcattctagaagagg

SEQ ID NO: 713738 - DNA, 291 bp, Homo sapiens
agcggagcacctctgcgacgcccgctcttctgctgctgtttgtctacttcctcctgcttccccgccgccgtcgccgcaatcatgagggaaatcgtgcacttgctggccgggcagagcggaaaccaaagtcggcagccaaggtcttcgggaggtgatcagcgatgagcacggcatcgaccccacgggcacctaccacggggacgagcagacctgcagcatggtaacgcactcagcgtgtactacaactgaggccaccggcgggcaacggtacgtgccccgcgccgtgctcgt

SEQ ID NO: 713739 - DNA, 84 bp, Homo sapiens
gaccaatatgaaatgatctgctgcagaagtctgagccctaggattcatctttctttccaccgtaggccctgactggcattgtat

SEQ ID NO: 713740 - DNA, 1150 bp, Homo sapiens
tcgaccacgccgtacgtgaacgtactgtctatagcaacgtacacaagcatgaaccccattgtagctgtatatagagagaggtgtgatactctcacctgctcgagtactgccagctcaatgcccacaaggaccaccagtaccagttcttagaggatgcagtgcaggacaccagcgtcaagctcctggcctcactggatgaagcgccttggggtacaaactatgcaacattgcagaagagcaccaaggaggttcgcagctcaatccgccaggtgtctagacgtacagaaagcgtgtagcaagtggatgtcaagatggccatcctgcagatcatgacggagctgaataagacggggccagtgtgcctggctcacctgactgcccacgacaggctgctacttgatgtgggctagccaggcagcgtcctgtgcagcggctagcacctggtaccatgaccatagattcccatgaatgcaccatggagcacacttcctgtcgcctagcccctctctgcgcgccctcctcgcgacgacgctgccccacccacaccccccccgccccctctctccgccttctcccttacgccaccctccgcactctaccttccctaccccttgcccccgcgcgctctcccttcaccgctactgccactcgcgtgcggcactccccgctggccgccccacccctgcacccccaccctgccccgcatccaccagctggcgcacccctccccctcgcacctgcacccccaccgcacgtgccccgccccgcccctctcgccttcccacgacacccgcgccccccgaccgccgcctccccctgcccccactacacctccacccagcgccccctgtcaccccccctggcccccctgtccccacccctccccccaacgggtccccctgctcccagcgacacgagcctcccctcggccacaacaccaatagcaaacaaccaagatcgcataaggcataaccatcaagcaaaagccgccaccaataagaacacatccgcaaactcaagcaaaaacaagaaacaccccataccatcaccacaatacaagcacgaaccccaccccgcagaaccacaggacaccgacacaccgacgcgaaaacaccgacacacagcgaacaaccgagcccagccacgaacc

SEQ ID NO: 713741 - DNA, 314 bp, Homo sapiens
agagacaggacagtgataagccacaggcttgtcacagaccacatacacacacacgcacacacacgcgcacacacacacacacacacacaaagagtgcaatcgagagccttgaggcccaggacgctaaaagatagggatgtaattctcgataatggcgcggtggcgctgggcgatacattcagccgatccacacaatgtcagcgacactcctgctccttgagctacacgaaggcatagaagacaccaaagtggaactggtacaggaaggccaacttgttccagctttaacctacgtagctcagtcgaacggactg

SEQ ID NO: 713742 - DNA, 915 bp, Homo sapiens
gcgccccgaacctcctcctgctactctcgtggggccctggccctgacccagacctgggcgggctcccactccatgagtgtatttcttcacatcctgtgtccctggcccggccgtgtgggagccccgcttcatcgccgtgggcctaacgttggacgaccacggcagttacgttgcgggttcggacaagctgactgcctgctgaaggccagaaggattggagcctgctgggcgcctgtggatagcagcagcgaggggcctggaggtattgggggaccaggggagaccaccggaattgtgaaggggcccaggtcacgagactatgaccgagtttggaaccttggggaacccttgcagcggcattaactaacaaacgcaagacgcgtgagggccggggttatctcacaaccattccaatgaatacattgttattgcgcttgcacgaacgtgtagtcggctccgggacgggggccgcctctcccattacccggcgcgtgagacataccgccggtgacatgtgaaccagccctattaacagtaactgtgcttacaggcggcatttacgcatttcgggccccccttggtagaactgtagtcggaccctttgcggggccttcatttttgaggcaccccgtggcggcgcgaggtgcaacaacagtttggcgacggtcagcatccaagaggacgtcaaacccagaaagaggcggcgccaaactgcgttggcgcgactagcggcgtacgggcccccaaatatgaatagggcgggagacgagcaagagatagtagcggaggcaagcgcccaataaaccgctgggggaatttcggccaccgcgattgcgactgcatagaaagagatcgggcacatccgggccaggaaatatacccctttggagaggcaacctgggcggaaacggtcgg

SEQ ID NO: 713743 - DNA, 325 bp, Homo sapiens
atcggaactctttacgtacagtcagaatgtcaatgggagactactgcttatctgggtcttatgaaccagaaaaatacagctgggtctttacgaatactttctgctagggtttactacggggtttatagattttactatatgaccgtctcatgtgctccttttcaaggctctgccaaagtgagtgaacaggaacactgtacctttatagtggctggagagctccacgaaacttctactagagatgggtccaaaacagctcactgccctggaacaggagatgtgtagatctaaacccacctttcatctggagactcacaggcctacg

SEQ ID NO: 713744 - DNA, 1237 bp, Homo sapiens
  misc_feature (593)..(593): n is a, c, g, or t
  misc_feature (616)..(616): n is a, c, g, or t
  misc_feature (657)..(657): n is a, c, g, or t
  misc_feature (661)..(662): n is a, c, g, or t
  misc_feature (725)..(725): n is a, c, g, or t
  misc_feature (895)..(895): n is a, c, g, or t
  misc_feature (943)..(943): n is a, c, g, or t
  misc_feature (1034)..(1034): n is a, c, g, or t
ttaccatctcacttctagcaatttctattctatcgttcacagcatcatatcctccctactatgccaagaaggaatcctactatcgattgatcatccatgatgcaacactacataaaccctacaactagccagtccctcttagaccatgtatagagcctacttgcacatcacctaagtactcatgtcgactgctaacctcctgcaggcctagcccgactagtgtgtatctccagcacattttgtgccctagacgtgacgattcatgactctaaacaactgagcatccaaatgctaaacactaaatacgtcccaacacttataatgcaccaagccacggtaccatgtactgctccgataggataaaacctcatatattttgatagtttcgagtcagcagagatatctgaatacagtgggtctggggcgggttctgagaatctccatactgaaaagcacttccaaggtgatgccaatgctgctagtccatgctggtccttggattcccacttgattggaaaaccctggcgatccatagatctggacattcattccctgcagtacagcaaacctggctgggtaggattcagcaacantcctgagcaatggaggaatattnggaattccaaactgggtgtaaagttcatattgattttattnattnnatttttacctcccaaggctatagacattcctaagaaacacgcagtcagcttttggtgagagtngaatcaagctatggaattctcatttggatctgcttccagtttctgaacagtgaagcgcgagaattctgaacagtaaagcaggagctctgtattcagcgagactctggggcctggaaagtgggattacagcatccattttgtctaattgctttccttctttcttttatgtngctgctaaagccccatgaccttcactatttaactgcttcatcagagtnaaagaattgccttgatgttcataaggattacttgtttcacactgacctttaaaaagttgtcactcactagatttttcagtgcatggttgangtcactggacagtgttctttaatcagttttggtggcatttgttgcctatttgaggtggagactttcttttaattgctttaatcaattaatgcattgctttgataggattctgcatggggtggaatattattggcctttgttcagataagcttgtgccagggaatcctccatcagtatattcattaaactgctcatgggctctc

SEQ ID NO: 713745 - DNA, 1271 bp, Homo sapiens
  misc_feature (593)..(593): n is a, c, g, or t
  misc_feature (616)..(616): n is a, c, g, or t
  misc_feature (691)..(691): n is a, c, g, or t
  misc_feature (695)..(696): n is a, c, g, or t
  misc_feature (759)..(759): n is a, c, g, or t
  misc_feature (929)..(929): n is a, c, g, or t
  misc_feature (977)..(977): n is a, c, g, or t
  misc_feature (1068)..(1068): n is a, c, g, or t
ttaccatctcacttctagcaatttctattctatcgttcacagcatcatatcctccctactatgccaagaaggaatcctactatcgattgatcatccatgatgcaacactacataaaccctacaactagccagtccctcttagaccatgtatagagcctacttgcacatcacctaagtactcatgtcgactgctaacctcctgcaggcctagcccgactagtgtgtatctccagcacattttgtgccctagacgtgacgattcatgactctaaacaactgagcatccaaatgctaaacactaaatacgtcccaacacttataatgcaccaagccacggtaccatgtactgctccgataggataaaacctcatatattttgatagtttcgagtcagcagagatatctgaatacagtgggtctggggcgggttctgagaatctccatactgaaaagcacttccaaggtgatgccaatgctgctagtccatgctggtccttggattcccacttgattggaaaaccctggcgatccatagatctggacattcattccctgcagtacagcaaacctggctgggtaggattcagcaacantcctgagcaatggaggaatattnggaattccaaactgggtgtaaagttcataaaatcaatggatgatgctatgaactttacacccattgattttattnattnnatttttacctcccaaggctatagacattcctaagaaacacgcagtcagcttttggtgagagtngaatcaagctatggaattctcatttggatctgcttccagtttctgaacagtgaagcgcgagaattctgaacagtaaagcaggagctctgtattcagcgagactctggggcctggaaagtgggattacagcatccattttgtctaattgctttccttctttcttttatgtngctgctaaagccccatgaccttcactatttaactgcttcatcagagtnaaagaattgccttgatgttcataaggattacttgtttcacactgacctttaaaaagttgtcactcactagatttttcagtgcatggttgangtcactggacagtgttctttaatcagttttggtggcatttgttgcctatttgaggtggagactttcttttaattgctttaatcaattaatgcattgctttgataggattctgcatggggtggaatattattggcctttgttcagataagcttgtgccagggaatcctccatcagtatattcattaaactgctcatgggctctc

SEQ ID NO: 713746 - DNA, 293 bp, Homo sapiens
ctttggccccccccccccccccccgggggggggggattccccccggggggtggggggccccatgggggggggggttgcttttttcccccaaaagggggtttcccctgggggcccttagggggggggggaaaaccaaggggggggggggggggaccccctggggggggggggggggggttaaaattttgggtttgggggttggggggggggggggggggcggggttgggcccccccagggggtaaggggggggggcccctttttttttggggcccaaaaaaaggttttccccca

SEQ ID NO: 713747 - DNA, 159 bp, Homo sapiens
ggcccgagtaactctgtctggatagaggtaagccactgtatgcctctggaaaaaataataatgccactgtaacagttaaggtcttggtcaaaatttatttgtgaacatataagcagtatgatagaccacagacattaactgatttctaaatacattttt

SEQ ID NO: 713748 - DNA, 477 bp, Homo sapiens
ctagccaacatgtggccaacatggcgaaacctggtctctactaaaaatacaaaaagccaggtgtgttggtgctcacctgtagtcccagctactcaggaggttgaggcacgagaatcacttgaaaccaggaggctgaggttgcagtgagctgagatcatgccaccgcactcaagcctgggtgacagagctagactgtctcaaaaaacaaacagacaaacaaaaactataggctggacacggtggctcatgcctgtaatcccaacgggcagattgcttgagctcgggagtttgagaccagcctgggcaacatggcaaaacctcttctctactgaagatataaaaaattagccaggcaggattgtgtgtgtctgtggtcccagctaccagggaggctgagataggacgattacttgagcccgggaggcggaggttgcagtgagctgagatcttaccactgcattccagcaagactcagtc

SEQ ID NO: 713749 - DNA, 441 bp, Homo sapiens
  misc_feature (275)..(275): n is a, c, g, or t
aaaaaaaacaaaaaacaaaaaacaagaaaaagaatgcatggagtaagttccattctcatcgccccctggaactaatgagcaaaagacaatacctatgtgaccgacaagtctctttaggggccccccaatatagactgagctgttaataacatttaatgagctcacatggattcgctggcaaaaaaagaagaaaagagttgaggacattgctgccctgtccatgaccaaaaattaccgtaaactgaaagttgctttgtgttccttcacacccatcngctggaaattttaacaagatcttaaattttgtaagtccaattgatagaaacagcaattgtgttcttaaaactgtaagaaaaaaaaatggtgaacaacacagaaatggactcaatctttcccaaaacccaattctgtcacagttagttttcaaaactgtaggttctt

SEQ ID NO: 713750 - DNA, 299 bp, Homo sapiens
  misc_feature (40)..(40): n is a, c, g, or t
  misc_feature (115)..(115): n is a, c, g, or t
  misc_feature (140)..(140): n is a, c, g, or t
  misc_feature (143)..(143): n is a, c, g, or t
  misc_feature (206)..(206): n is a, c, g, or t
  misc_feature (248)..(248): n is a, c, g, or t
  misc_feature (267)..(267): n is a, c, g, or t
  misc_feature (289)..(289): n is a, c, g, or t
tgggatctgtgaatcacattgtaattcctgttgacaaagntttacttgttaacatcagttgatactgacattctccataaagatatagtagtaatgtgtctcattaaacctagtntatcagtgttttagcagatttactntgnaacttttgagacagagtctcactgtcacccaggcttgagtgcagcggtgtgattcatcattcnattcatacttcattcagaggtcctaagtttataacctactgngcctttctgtcccggggantattcgcatgcaccacttacangggccagtaa

SEQ ID NO: 713751 - DNA, 223 bp, Homo sapiens
gggggctttttttttcccccgggccctccccccccccttttttccccttagggggggggggggggggggttttccccttttttttttggccccccccttcccccccccccaggggttttggggggggtaattttttttttttttttaaaagggttttttttttttgggggttgggggcccgggcgggggcccttttttttttttttttttttccggcccttta

SEQ ID NO: 713752 - DNA, 649 bp, Homo sapiens
gcccaagatccagggctgtttagctccgccaactctcccttcctccctgtgcttcagccacgtccctgacgctgagcactgtgcttcctgagtcatcacagacagaagcttgtacagctctggaaccagcttgctcattgcaggagtgtttgaacttcaaccttgagtggtggcctgacagttgccctcccaagcaccagcagcactgcacttggcacctttccgcggcgttggcagcactcagcaggccagggagcctgccaggggcactgcatttccctgcttgggtcttgggacacacaacttgcaggcccagcccaccctcacaggcgtgcgcaggggttgggcgtgcaccatcagataggttttccccccaagggcactgcctccattttgccagtttccgttggtcgcctggtcgttgggcctgcttgcccctttgtgcgtgcacccaccagtcacccccctatctccagattccattaggccaagcacattggacacaccccacccctgggccccttctcacgagctgtagcccccaaacacctcacccatctgtcgcccgtcgtcccccaacgcccctcttggcggcaacttcggctagcacatggatttcggttcacagccccaatatgcattaacccca

SEQ ID NO: 713753 - DNA, 211 bp, Homo sapiens
agcaccatttgtccctcggtgcccactaacaggccataaccgatcagcggaatattccatcgcgttaccgaaagtgggtttcgctttcgaaatgtgtttgcgttcccgacgaaaggcatacatcaccatggtaccatgatgttggcgggctacgatggatcagcaaaaacaggtagccacggcatatggctcatcagacctggagatctcc

SEQ ID NO: 713754 - DNA, 125 bp, Homo sapiens
tattcgggctgctaaagcgattgactttgaagtgtctgatgatgggtcgccgatggatgcatgtctgaatcaggtggagaagcacttcaacgctggacgatgtaaagattatagtagtaattata

SEQ ID NO: 713755 - DNA, 762 bp, Homo sapiens
attctagaggccgaaggtggacgtattgtgtgtggatgtttagaaatccagtaggggagcagggaggctgggtgtggtggctcacaccttgttgagtctcaacacatattgggaggctgaggcgagacggatcacttgaggtcaggagttcaagacgaaacgcctggacaactagtaatgaaaccccatcgtctactaaaaatagaaaaattagccaggcgtggtggcacacaccgtgtaatcccagcgtactcgggaggcctcagacaagagaatcacttcaagcctgagaggtggaggtagtacgtgagctggaggatcgcacacacgtgtcactccagacctgggtgatggaaatgggactacttaccaacagaaaagcgcaacacagaaaacaaatcttacaaaaacattttttgggccagggggggggcaccaccgaaaggagaagtgtctcagaacgcatagcgaaagggagcgaccgggcggcccccgggataggggcacagtgccaaaagtggtggacaacagaagctgggttgtggctgaagagaagaaactctgcgggtatcagtgagaaaacaagtgggcggtgagattattctgagaacgatgtgaatcaaagacgccgccgggaggtgaaagaagcagtggtgttttcgagaggaagaaccgaggagagagagtatatggggtgggcaaaacggggaaatttgttaaccaggggggatatgaggaagatatcgtagtaggaccttagag

SEQ ID NO: 713756 - DNA, 667 bp, Homo sapiens
ttgagactagcctggccaatatggtgaaaccctgtctctactaaaaatacaaaaattagctgggcgtggtggcaggcgcctgtaatgccagctgctcgggaggctgaggcaggagaatcgcttgaacctggaaggcggaggttccagtaagccaagatcgtgccactgcactccagcctgggtgacaagagtgaaaccctgtctcaaaaaaaaaaaaaaaaaaaaaaaaggggaaaaaaaaatcccggggggagaggggaagggtttttttaaaaacgccgctttttaaaaaggcatccccttgggggggcgttccgggccaggcgcctcattgaaacgaaggtagataactttaacacccgtggaatttatagggcgggaggagcctatcctttggaaaggaagcacaacacacaccgtggccacagcacgcgcggggacatccacggaacccaacgggagaggaatctctccgaaaaagcatttttcaaagaatatagttaagaattccccaattattccggcacccacatttttcttctactgggaacacaacccaagtttggtctagggcatctactttgggggaacaggaaaaggttcaggaataaatttccataatgtgacatccatggaaccggtcatggacggcaggccggttgggacc

SEQ ID NO: 713757 - DNA, 308 bp, Homo sapiens
aaggtgtgtggagcccattcattggctgataatacttctgagcggctaccacattgacagacacaaggctcagatgaagaggtgaatggaacacgttcctgacctcaaagagccggcggcttttggacatttaccagaaaattatagtaccataagtaataagggattacaggcgtgagccacggcgcccagccttatggtgttttacataatgtatgggtccacggtagatgggtttatatttttaaagaacaggggcaccggggggagaccttatctcttaacaaacaaaaggagtagagatacgg

SEQ ID NO: 713758 - DNA, 615 bp, Homo sapiens
tgcctgacacggtggtccacatgaccagtttctcggtcttctggaagttgctctccccaggagatcctctgactcactcctctctctaaatcgaattcggtcagatcgttgccagccgctcaacagctccacgcacgaagctcgacctggcatcctcgtgagaggtagctcggggcatgattgtttatgcatcctcctcctgtcatgtgttgtatccatccgtgcctggtggactgtctcctgacactcgtggtgatcccggctgtgtcctcaggggctgcacgccagaggttcgtgtcgatcgccagcagtccgagtgggggtcgccctcagtatcttgcttgtgctgcccattggtccagtggcgtctcccccctgtcgtcctgtgctctccctctgtgactgtgtgggtctcctcctgaccctgtgtggagtcccaacaggtctcagtggcttgcccgcacttgggtctgctcgtctcatcttatgtgctaggtggatcctccgctgtatcctgtgcgtaccccctttgggtgccagcggatgtcggactcgtctcaggcaatgggttgtgagtgcgattcttggtttttcctctccttgctagttttgctc

SEQ ID NO: 713759 - DNA, 805 bp, Homo sapiens
cagagcattggcagctcctgggtcacagtgtcaccccacagggctcccagagatccctatggccagtgagctggtgttcacctgggtagcctggagtgtgtggcagtgtgggccttgtggtaacagctgcccagctgtctggatacctgtgccatgcacccccatggcctgggccacccactctgcatgacctcatccgccaactgggagatgaagtgtgtgtggatgatgacctctgcactgggagaaaaccatgtccctggctgtgtaacaatgaatgtgtaaagatgcatgttgcctggaaatgtgcatcccgtacttgccctgctgcgccactgatgctggcccctgtatgtgtgggtgcccatgtgtgccagaagaacatgccctggcacctatcagtgagctgtccagagtgcccctgtgagacccagcagttggatggagaccgatttggccagggacccttgcaatccagttcaatttcccctcattgcactgaggatagtaaatgtagttcagcacgtcatgtggcccagagtggtatgctcaatggccataacatacctcttgtatcagaaccttgggagcaagtggcgcctaacttttggccaaaagtgccgcaaaagtggggacacacgaatagcgaggtagcattattagcattaggcgtacgatttgcgaacccatatagaacacatcacagagtatagggaataggtccatatcgttggatagcccgtcgggctagataggaaatcactatcgttcgacagaggtctagagcgatccgcactatggtggc

SEQ ID NO: 713760 - DNA, 961 bp, Homo sapiens
  misc_feature (186)..(186): n is a, c, g, or t
  misc_feature (197)..(197): n is a, c, g, or t
gtgggatgggtggggggtaacgggggaaactggggaagtggggaaccgaggggcaaccaggggaagatggggtgctggaggagagcttgtgggagccaaggagcaccttggacatctggagtctggcaggagtgatgacgggtggaggggctagctcgaggcagggctgtggggcctttgaatccnggacacaaaanccctctagcttggaaatgaatatgctgcactttacaaccagctgcactacctgactcaggaatcggctctggaagggtgaagctagaaggaaccagaccgttcatcagcccaacatcaaaagacgaccatcggaagcagacaagacgcacacggcaacgacgaaacacacaaaacacaacaggacaaccggggccggaaacgtccccaagttcgtttaccaattgggaccaacacgcacccaccgatgacaggagacagggaaaccgaggaattatgggaacacccagaaacaccgcaaagtcgaacaccaaaaacacacaaaaaaaaatacaaagattccgccgacacaagaaaacgcaaccggttgcaagagacgaacgattcacaccagatcacccaaaatgacaggaggacggcaaatttgaccgacggcagcgaggacaaacaacgccaaaaccacaaaagaccaaacacaacccccattcccagtaacagtaaatccacttaaaaaaagtacacacaaattaaacacaaaataaaacaattagcaatacccatcacaaatttatcagagcaacaatcaaatacaactctgcaaaaacgcacacaaataaaaattaacaccaaattggaaaatacaccactatattacaccaccaacaacataataacaacataaattcacattcataacaaaaagcccaaaaaggaaaaaaattttaaccaaaaaaataaaaccactatacaaacaccaatttcaaca

SEQ ID NO: 713761 - DNA, 463 bp, Homo sapiens
  misc_feature (92)..(92): n is a, c, g, or t
  misc_feature (94)..(94): n is a, c, g, or t
  misc_feature (104)..(104): n is a, c, g, or t
  misc_feature (108)..(109): n is a, c, g, or t
  misc_feature (117)..(118): n is a, c, g, or t
  misc_feature (128)..(128): n is a, c, g, or t
  misc_feature (130)..(130): n is a, c, g, or t
  misc_feature (132)..(132): n is a, c, g, or t
  misc_feature (135)..(135): n is a, c, g, or t
  misc_feature (153)..(153): n is a, c, g, or t
  misc_feature (156)..(157): n is a, c, g, or t
  misc_feature (164)..(164): n is a, c, g, or t
  misc_feature (171)..(171): n is a, c, g, or t
  misc_feature (176)..(176): n is a, c, g, or t
  misc_feature (194)..(194): n is a, c, g, or t
  misc_feature (196)..(196): n is a, c, g, or t
  misc_feature (199)..(199): n is a, c, g, or t
  misc_feature (202)..(204): n is a, c, g, or t
  misc_feature (206)..(206): n is a, c, g, or t
  misc_feature (246)..(246): n is a, c, g, or t
  misc_feature (265)..(265): n is a, c, g, or t
  misc_feature (281)..(281): n is a, c, g, or t
  misc_feature (298)..(298): n is a, c, g, or t
  misc_feature (313)..(313): n is a, c, g, or t
  misc_feature (320)..(320): n is a, c, g, or t
  misc_feature (346)..(346): n is a, c, g, or t
  misc_feature (363)..(363): n is a, c, g, or t
  misc_feature (394)..(394): n is a, c, g, or t
cagaaggcagacctcaatacaaaatgggcagccccccggttggccaagaagatttaagccaaagaaaggaaagcccaaatgacagattttgntngtttttaagntatnnaggccaannaaattagggncngnatnatccagaatgaagttaanagnntccaaangcagctntcctnaaagctttccccaaaaancnccnggnnntnaggggctgctgctgctggctgctgctgctgctgctgctgntaaagttccagcaaaaaanatcccccccgggagtnaaaagggtccagcccanaaggttcctgcccanaaaaccncaggccagaaaacagggcctgctccnaaagctcagaagggtcnaaaagctccagcccagaaagcccctgctccnaaggcatttggcaagaaagcataagtggccatcataaaaagtaataaaggttttttttggcctgtttga

SEQ ID NO: 713762 - DNA, 2522 bp, Homo sapiens
  misc_feature (1563)..(1565): n is a, c, g, or t
  misc_feature (1569)..(1569): n is a, c, g, or t
  misc_feature (1571)..(1572): n is a, c, g, or t
  misc_feature (1583)..(1583): n is a, c, g, or t
  misc_feature (1591)..(1591): n is a, c, g, or t
  misc_feature (1604)..(1605): n is a, c, g, or t
  misc_feature (1624)..(1624): n is a, c, g, or t
  misc_feature (1635)..(1635): n is a, c, g, or t
gtgggatgggtggggggtaacgggggaaactggggaagtggggaaccgaggggcaaccaggggaagatggggtgctggaggagagcttgtgggagccaaggagcaccttggacatctggagtctggcaggagtgatgacgggtggaggggctagctcgaggcagggctggtggggcctgaggccagtgaggagtgtggagtaggcgcccaggcatcgtgcagacagggcgacatcagctggggacgatgggcctgagctagggctggaaagaagggggagccaggcattcatcccggtcacttttggttacaggacgtggcagctggttggacgaggggagctggtgggcagggtttgatcccagggcctgggcaacggaggtgtagctggcagcagcgggcaggtgaggaccccatctgccgggcaggtgagtcccttccctccccaggcctcgcttccccagccttctgaaagaaggaggtttaggggatcgagggctggcggggagaagcagacaccctcccagcagaggggcaggatgggggcaggagagttagcaaaggtgacatcttctcggggggagccgagactgcgcaaggctgggggggttatgggcccgttccaggcagaaagagcaagagggcagggagggagcacaggggtggccagcgtagggtccagcacgtggggtggtaccccaggcctgggtcagacagggacatggcaggggacacaggacagaggggtccccagctgccacctcacccaccgcaattcatttagtagcaggcacaggggcagctccggcacggctttctcaggcctatgccggagcctcgagggctggagagcgggaagacaggcagtgctcggggagttgcagcaggacgtcaccaggagggcgaagcggccacgggaggggggccccgggacattgcgcagcaaggaggctgcagggtgctcggcctgcgggcgccggtcccacgaggcactgcgggcccagggtctggtgcggagagggcccacatgtggacttggtgactgctgtatgccctcaccgctcagcccctggggctggctttggcagacagtacatgcatccaggggagtcaagggcatggggcgagaccagactaggcgaggcgggcggggcggagtgaatgagctctcaggagggaggatggtgcaggcaggggtgaggagcgcagcgggcggcgagcgggaggcactggcctccagagcccgtggccaaggcgggcctcgcggggcggcgacggagccgggatcggtgcctcagcgttcggggctggagacgaggccaggtctccagctggggtggacgtgcccaccagttgccgaagggccaagacgccaggtccggtggacggtgacaagcaggacatgacatggtccggtgtgacggcgaggaccagaggaggcgcgtccgggccttccctgaacaccttaggctggtggggctgcgggcaaagaaagcgggtctgtttctttaacttcctccacgggagtcggcaccacatatggctgccctctgggctcccagnnncccncnnacatgaaaganaatggtgntacccagctcaanncctggggcctttgaatccnggacacaaaanccctctagcttggaaatgaatatgctgcactttacaaccagctgcactacctgactcaggaatcggctctggaagggtgaagctagaaggaaccagactctatcaggccgatactatcaaagtagaccgatgcgggaactgcagcgcccgtaggaacccctacctcctgcagccggcggattccatctttcaccggccaagccgctgcgtgcggacgggttgaccaagcagccagctacatcatccgagtagctgagcatccgtccagggggtatgacggcctgtccccagcaagtcgcctcttctgcttgtgcatccttcatgtctacttggtaccttgaagcctgttcctggtcataggcgcttatgtgctgagcagaattcaaaaggcctccagaggagtcctgttaagcgccggtacccttcgtggacttgcacttttgccactagagttcagttgccgcatgggaaggcagatgtggacgcagggctttagaccccgagcggccaagtgtgccgtttaagtgtgtagcacgcacccattgaggaacgctgcccttgccgcagtgcccctgagcgggccccacaaattggggacggagggggacaaggggggcccggcggatgggtgtgccccaatgagctgcacaccagtcccatcacaagaatgggagaccccggggcgaccacacagggagagccccgccaacgaacaacatagcgcccgactttgttggtggtgccccccccaggggactcaagagccgggggaacacaatacaaacgcggcgccgagcaccagaaccacacagcgcccactatcgtcggtcgaggcaaaaagacggacacaactgcaacatgctaggcagacggcgctgctagaccgg

SEQ ID NO: 713763 - DNA, 246 bp, Homo sapiens
ccccgaatgagcggattgaatgtgggaaatccttcagaaggaactctaacctggtgatacatgagagaagtgatactggagaggaaccgtacgaacgcactcaatgtggagagcccttcagccaaagctagcagttagatgcacataaaagaactcacactggcgaaaggccctatgaaagtaacgagagtcgaaaagccttcaatcgaagcagcaagctcagcaggcagacgcgaatagagactg

SEQ ID NO: 713764 - DNA, 1756 bp, Homo sapiens
gtgggatgggtggggggtaacgggggaaactggggaagtggggaaccgaggggcaaccaggggaagatggggtgctggaggagagcttgtgggagccaaggagcaccttggacatctggagtctggcaggagtgatgacgggtggaggggctagctcgaggcagggctggtggggcctgaggccagtgaggagtgtggagtaggcgcccaggcatcgtgcagacagggcgacatcagctggggacgatgggcctgagctagggctggaaagaagggggagccaggcattcatcccggtcacttttggttacaggacgtggcagctggttggacgaggggagctggtgggcagggtttgatcccagggcctgggcaacggaggtgtagctggcagcagcgggcaggtgaggaccccatctgccgggcaggtgagtcccttccctccccaggcctcgcttccccagccttctgaaagaaggaggtttaggggatcgagggctggcggggagaagcagacaccctcccagcagaggggcaggatgggggcaggagagttagcaaaggtgacatcttctcggggggagccgagactgcgcaaggctgggggggttatgggcccgttccaggcagaaagagcaagagggcagggagggagcacaggggtggccagcgtagggtccagcacgtggggtggtaccccaggcctgggtcagacagggacatggcaggggacacaggacagaggggtccccagctgccacctcacccaccgcaattcatttagtagcaggcacaggggcagctccggcacggctttctcaggcctatgccggagcctcgagggctggagagcgggaagacaggcagtgctcggggagttgcagcaggacgtcaccaggagggcgaagcggccacgggaggggggccccgggacattgcgcagcaaggaggctgcagggtgctcggcctgcgggcgccggtcccacgaggcactgcgggcccagggtctggtgcggagagggcccacatgtggacttggtgactgctgtatgccctcaccgctcagcccctggggctggctttggcagacagtacatgcatccaggggagtcaagggcatggggcgagaccagactaggcgaggcgggcggggcggagtgaatgagctctcaggagggaggatggtgcaggcaggggtgaggagcgcagcgggcggcgagcgggaggcactggcctccagagcccgtggccaaggcgggcctcgcggggcggcgacggagccgggatcggtgcctcagcgttcggggctggagacgaggccaggtctccagctggggtggacgtgcccaccagttgccgaagggccaagacgccaggtccggtggacggtgacaagcaggacatgacatggtccggtgtgacggcgaggaccagaggaggcgcgtccgggccttccctgaacaccttaggctggtggggctgcgggcaaagaaagcgggtctgtttctttaacttcctccacgggagtcggcaccacatatggctgccctctggggcgggggtgactgtgcgccgggctgtgtgcccggaggctcaaccttgccctcgcctagtcgtgaagctcggacggagatcacggagcacgccttcaggcaatcccatttaacgcgcaaatctcggctcttgtggcccatccccaccagggggttcagccgaggaggcccgttggactcatcattcaactggctgcatgttg

SEQ ID NO: 713765 - DNA, 200 bp, Homo sapiens
tggcccgaggtccaaatgtgagttttttccaagcaccccccctgaaccctaaaaaatggaaaccatttttttttgaaagggtcgggaaaatcattttttaaaaagaatggggatctaaactaaggtttttatatgaaaaacataggggtttttgtggttttaaaaacaactgtgaaataaaattgtttccccccctggta

SEQ ID NO: 713766 - DNA, 2734 bp, Homo sapiens
  misc_feature (665)..(665): n is a, c, g, or t
  misc_feature (702)..(703): n is a, c, g, or t
  misc_feature (719)..(720): n is a, c, g, or t
  misc_feature (1775)..(1777): n is a, c, g, or t
  misc_feature (1781)..(1781): n is a, c, g, or t
  misc_feature (1783)..(1784): n is a, c, g, or t
  misc_feature (1795)..(1795): n is a, c, g, or t
  misc_feature (1803)..(1803): n is a, c, g, or t
  misc_feature (1816)..(1817): n is a, c, g, or t
  misc_feature (1836)..(1836): n is a, c, g, or t
  misc_feature (1847)..(1847): n is a, c, g, or t
gtgggatgggtggggggtaacgggggaaactggggaagtggggaaccgaggggcaaccaggggaagatggggtgctggaggagagcttgtgggagccaaggagcaccttggacatctggagtctggcaggagtgatgacgggtggaggggctagctcgaggcagggctggtggggcctgaggccagtgaggagtgtggagtaggcgcccaggcatcgtgcagacagggcgacatcagctggggacgatgggcctgagctagggctggaaagaagggggagccaggcattcatcccggtcacttttggttacaggacgtggcagctggttggacgaggggagctggtgggcagggtttgatcccagggcctgggcaacggaggtgtagctggcagcagcgggcaggtgaggaccccatctgccgggcaggtgagtcccttccctccccaggcctcgcttccccagccttctgaaagaaggaggtttaggggatcgagggctggcggggagaagcagacaccctcccagcagaggggcaggatgggggcaggagagttagcaaaggtgacatcttctcggggggagccgagactgcgcaaggctgggggggttatgggcccgttccaggcagaaagagcaatgatgtggcatgtggatgtgtgatgncacatgtggtgttgtggccatgctgttagtgtgtccnnatgcactgtggtgtgnnttgtgtacccctagtgcccttggtgttcatagacatgtggtacaaatgtgcatgtggtgaacaaccatgtgccacatgcatgtgtgtgtttcccctatgcgttgcaccagccgtcaacacccaacactgactagagttcaattttaatggtatggcatggtgggcacatggggtggccatggctccctgtggcaactgggcataattcatcccatggtgccctaattttgcctgtgatcgccctctcgatgtgtgctgttgtgatgatgctgtgtgacacgacaatgtggcatgttggctctcggtggcagtttggcattgcatggtgaccattcacccatgggcagtggctgaaagctgtggcccacgtggtgatgtgtgtgtgttgcccctgtgtgcacatttgctgccatgcaatgggatgtgcttgcatgtggtgctctgtgccttgctgtggctgcctgtgtcccactgatgtgcacttgctgtgccccagggtctggtgcggagagggcccacatgtggacttggtgactgctgtatgccctcaccgctcagcccctggggctggctttggcagacagtacatgcatccaggggagtcaagggcatggggcgagaccagactaggcgaggcgggcggggcggagtgaatgagctctcaggagggaggatggtgcaggcaggggtgaggagcgcagcgggcggcgagcgggaggcactggcctccagagcccgtggccaaggcgggcctcgcggggcggcgacggagccgggatcggtgcctcagcgttcggggctggagacgaggccaggtctccagctggggtggacgtgcccaccagttgccgaagggccaagacgccaggtccggtggacggtgacaagcaggacatgacatggtccggtgtgacggcgaggaccagaggaggcgcgtccgggccttccctgaacaccttaggctggtggggctgcgggcaaagaaagcgggtctgtttctttaacttcctccacgggagtcggcaccacatatggctgccctctgggctcccagnnncccncnnacatgaaaganaatggtgntacccagctcaanncctggggcctttgaatccnggacacaaaanccctctagcttggaaatgaatatgctgcactttacaaccagctgcactacctgactcaggaatcggctctggaagggtgaagctagaaggaaccagactctatcaggccgatactatcaaagtagaccgatgcgggaactgcagcgcccgtaggaacccctacctcctgcagccggcggattccatctttcaccggccaagccgctgcgtgcggacgggttgaccaagcagccagctacatcatccgagtagctgagcatccgtccagggggtatgacggcctgtccccagcaagtcgcctcttctgcttgtgcatccttcatgtctacttggtaccttgaagcctgttcctggtcataggcgcttatgtgctgagcagaattcaaaaggcctccagaggagtcctgttaagcgccggtacccttcgtggacttgcacttttgccactagagttcagttgccgcatgggaaggcagatgtggacgcagggctttagaccccgagcggccaagtgtgccgtttaagtgtgtagcacgcacccattgaggaacgctgcccttgccgcagtgcccctgagcgggccccacaaattggggacggagggggacaaggggggcccggcggatgggtgtgccccaatgagctgcacaccagtcccatcacaagaatgggagaccccggggcgaccacacagggagagccccgccaacgaacaacatagcgcccgactttgttggtggtgccccccccaggggactcaagagccgggggaacacaatacaaacgcggcgccgagcaccagaaccacacagcgcccactatcgtcggtcgaggcaaaaagacggacacaactgcaacatgctaggcagacggcgctgctagaccgg

SEQ ID NO: 713767 - DNA, 708 bp, Homo sapiens
gtgggatgggtggggggtaacgggggaaactggggaagtggggaaccgaggggcaaccaggggaagatggggtgctggaggagagcttgtgggagccaaggagcaccttggacatctggagtctggcaggagtgatgacgggtggaggggctagctcgaggcagggctggtggggcctgaggccagtgaggagtgtggagtaggcgcccaggcatcgtgcagacagggcgacatcagctggggacgatgggcctgagctagggctggaaagaagggggagccaggcattcatcccggtcacttttggttacaggacgtggcagctggttggacgaggggagctggtgggcagggtttgatcccagggcctgggcaacggaggtgtagctggcagcagcgggcaggtgaggaccccatctgccgggcaggtgagtcccttccctccccaggcctcgcttccccagccttctgaaagaaggaggtttaggggatcgagggctggcggggagaagcagacaccctcccagcagaggggcaggatgggggcaggagagttagcaaaggtgacatcttctcggggggagccgagactgcgcaaggctgggggggttatgggcccgttccaggcagaaagagcaaaaggcatttggcaagaaagcataagtggccatcataaaaagtaataaaggttttttttggcctgtttga

SEQ ID NO: 713768 - DNA, 102 bp, Homo sapiens
gatctcttgatggtatcccccatggcataacagctatgacctcagccagaatacttaaaggaaactcagtagcaatatacgagtgaggctcattttttattt

SEQ ID NO: 713769 - DNA, 780 bp, Homo sapiens
ggggtggtctccgataagagggggggggcgcgaccaagcaggggcaagaagaaagtgaggggggccgcccgccaccaatagaggcgaggggggcgtacagaaccggccgagaagggggagctgataggagagtggggtgagcacatggaggggtggcgagatgtcgtcctgcagaaggtgtgaggagaggtcctctccgctggtgtagagagcgtggcggaagaaacgagtgaagaagaagagcctggcgagcagcgcgtgtgtggagcgcacccgccgctagagcagggcagaggatgtggagcagctgctgtctgggggtggtgaagcagaggcgtgtattaacggcggctctttatcgtctcctcaaagagagggtctatttggcgagcgcggatagaaagaagatctcgtcacagcctgctgcggcgagatccacgctgctatgtagtgggagaccagtggatctcctgtcgagaggttcttactggccgcgccgggtcgctaggcgagctatatatctcgctgagaaacataggcttctatcgcgcgttagcgagggaagatggtcgtaacgggggagttccatttcggagaggggcaaaaacacacttgtgggagggtgctgagatacatattggagtaacatattctcgggggagtgggaatacaggggacccgatttccaggagtcgtgcgcaacagtgtcttttcccaaaaaaggcaccatgttggtattgaagttggatcttcacgcccactttctggtcgacccccaac

SEQ ID NO: 713770 - DNA, 714 bp, Homo sapiens
gtgggatgggtggggggtaacgggggaaactggggaagtggggaaccgaggggcaaccaggggaagatggggtgctggaggagagcttgtgggagccaaggagcaccttggacatctggagtctggcaggagtgatgacgggtggaggggctagctcgaggcagggctggtggggcctgaggccagtgaggagtgtggagtaggcgcccaggcatcgtgcagacagggcgacatcagctggggacgatgggcctgagctagggctggaaagaagggggagccaggcattcatcccggtcacttttggttacaggacgtggcagctggttggacgaggggagctggtgggcagggtttgatcccagggcctgggcaacggaggtgtagctggcagcagcgggcaggtgaggaccccatctgccgggcaggtgagtcccttccctccccaggcctcgcttccccagccttctgaaagaaggaggtttaggggatcgagggctggcggggagaagcagacaccctcccagcagaggggcaggatgggggcaggagagttagcaaaggtgacatcttctcggggggagccgagactgcgcaaggctgggggggttatgggcccgttccaggcagaaagagcaagaggcaggaggagcacagggtgccagcgtaggcagcactggtgacccagctggtcagaagaacatgcaggactac

SEQ ID NO: 713771 - DNA, 113 bp, Homo sapiens
ctcagtgactctggcttctatctctgtgcctggaggacaggcatggctacaccttcggttcggggaccaggttaaccgttgtagaggacctgaacaaggtgttcccacccgag

SEQ ID NO: 713772 - DNA, 118 bp, Homo sapiens
catacgcatggtaaaaggctcccccgaaacacacgcaggttcagattccacataacaaatagtctttaaggaaccaccatttgttgagttttagtgtagtatcaaagaagactatact

SEQ ID NO: 713773 - DNA, 283 bp, Homo sapiens
  misc_feature (203)..(203): n is a, c, g, or t
  misc_feature (264)..(264): n is a, c, g, or t
tcctggctcagcctcctgagtgctgggactacaggcgcgtaccttctttagtagagactgggtttcaccatgttggccaggatggtctctatctcctgaccttgtgatctgcctgcctcagcttcccaaagtgctgagatgacaggtgtgagccatcagacccagcatttttttttttaatttaaatttaaattttttttcanttttttgagaggttttttttgttttgttttgttgttgttgttgttgttgtttttgagacantcttgctctgtcaaccagg

SEQ ID NO: 713774 - DNA, 129 bp, Homo sapiens
tccagtccacggagtcaggggacacagcactgtatttctgtgccagcagcgacaggctatggctacaccttcggttcggggaccaggttaaccgttgtagaggacctgaacaaggtgttcccacccgag

SEQ ID NO: 713775 - DNA, 708 bp, Homo sapiens
gggagtaaaattagtattagaaagctgtacaataaaaacagtacagtatgatacaagaatggaaagacagagtatcggtggaacagactagaaagcctgaaaagagatttagttattaacatataaaggagtaagagtgtggtttaaaaataaaaactggcattataggtaagtggatgaaaagagttaaacatcaaaagtagttgaaataagattgaatgtattctgatctttggctagagaagctttatatctaaaagcaaaggaaggatttatcaagaaaactacaggcatcaaaaatatatttgcattgtttacccatgtttatagcagcattattcacaatagccagaaggtagaaacagcccaatatccactcagcaaaatgtggtatatacgtaaatggaatattactcagctttaaaaaggaaagtattggctgtgtagagagcattgaaaaaaaattgtgacacatgctacagcatgtgtcagaactttgaagtcagtatgctaagtgaaataatctagtcacacaaaaggaaaaatatcatatgattgcacttgcacgaagtgcctagagtaggttcatggagatagaaagaatggtgattaccaggagctgggaaaagtgggaaatgagttttcttgttaaatgggtttcagttacagaagatgatcaagttctagagatagatggcagtgatgctg

SEQ ID NO: 713776 - DNA, 119 bp, Homo sapiens
ctcagtgactctggcttctatctctgtgcctggaggacaggcggaatcagccccagcattttggtgatgggactcgactctccatcctagaggacctgaacaaggtgttcccacccgag

SEQ ID NO: 713777 - DNA, 135 bp, Homo sapiens
tccagtccacggagtcaggggacacagcactgtatttctgtgccagcagcgacaggctggaatcagccccagcattttggtgatgggactcgactctccatcctagaggacctgaacaaggtgttcccacccgag

SEQ ID NO: 713778 - DNA, 151 bp, Homo sapiens
  misc_feature (74)..(74): n is a, c, g, or t
tccagtccacggagtcaggggacacagcactgtatttctgtgccagcagcgacaggctttcggtcgagacgccnagattcacccctccactttgggaatgggaccaggctcactgtgactagaggacctgaacaaggtgttcccacccgag

SEQ ID NO: 713779 - DNA, 350 bp, Homo sapiens
  misc_feature (305)..(305): n is a, c, g, or t
taggtcattctcccaacgtttcatatgatacagtagatacgttcacgatctagaaaggagtgacattcatgtacagcgtctttgtgcatacgaaaccgctcaagaaaaaaacaagttctacaaacagagcgattatgttgcaactgcaacagttgctgccggggactaaccagccatgcaagttcggactaaccagccatgcaagttcggactaaccagccatgcaagttcggactaaccagccatgcaagttcgggactaaccagccatgcaagttcgggactaaccagccatgcaagttcggnactaaccagccatgcaagttcggactaaccagccatgcaagttcg

SEQ ID NO: 713780 - DNA, 108 bp, Homo sapiens
cacgaggtcacctcctcccccctgcttcatctgcctcttcctcacccccatggaaatcaggccgaaggaacctcaactttgcaatcgtgaagaacggagatacttggg

SEQ ID NO: 713781 - DNA, 114 bp, Homo sapiens
ctcagtgactctggcttctatctctgtgcctggaggacaggccacccctccactttgggaatgggaccaggctcactgtgactagaggacctgaacaaggtgttcccacccgag

SEQ ID NO: 713782 - DNA, 273 bp, Homo sapiens
  misc_feature (228)..(228): n is a, c, g, or t
ctgactctagacgatccccaaccagccatgcaaagttcggtctaaccagccatgcaagttcggactaaccagccatgcaagtttcggactaaccagccatgcaagttcggactaaccagccatgcaagttcggactaaccagccatgcaagttcggactaaccagccatgcaagttcgggactaaccagccatgcaagttcgggactaaccagccatgcaagttcggnactaaccagccatgcaagttcggactaaccagccatgcaagttcg

SEQ ID NO: 713783 - DNA, 132 bp, Homo sapiens
aatcctgtcctcagaaccgggagacacggcactgtatctcgcgccagcacatccgggaatcagccccagcattttggtgatgggactcgactctccatcctagaggacctgaacaaggtgttcccacccgag

SEQ ID NO: 713784 - DNA, 126 bp, Homo sapiens
aatcctgtcctcagaaccgggagacacggcactgtatctcgcgccagcacatccgatggctacaccttcggttcggggaccaggttaaccgttgtagaggacctgaacaaggtgttcccacccgag

SEQ ID NO: 713785 - DNA, 119 bp, Homo sapiens
  misc_feature (42)..(42): n is a, c, g, or t
  misc_feature (47)..(47): n is a, c, g, or t
atgtatctctgtgccagcagcttagtagtctgggacaggggnggtancacccctccactttgggaatgggaccaggctcactgtgactagaggacctgaacaaggtgttcccacccgag

SEQ ID NO: 713786 - DNA, 146 bp, Homo sapiens
cgatgtgagagatactgctggccaggatgaagccacagctaaggctgtgttggagcccattcagagcaccagtctaattgggactttaaccaggacatctgacagtgaggttccagatgtggaatctcgtgaagacttaattaaaa

SEQ ID NO: 713787 - DNA, 156 bp, Homo sapiens
aatcctgtcctcagaaccgggagacacggcactgtatctcgcgccagcacatccgtccgggacagagggtcgggaccctcggatcacccctccactttgggaatgggaccaggctcactgtgactagaggacctgaacaaggtgttcccacccgag

SEQ ID NO: 713788 - DNA, 735 bp, Homo sapiens
cagctactccggaggctgaggcaggagaatcacttgaactcgggaggcggagtttgcagtgagctgaggtagcgccagtgcactccagcctggacgacagagcgagacttcatctcaaaaaaaaaaaaaaaaaaaagggaaaaagaaaaaaattcaaagccccatttccccatttttaatggactttgtcaacccagccattataggtggcataacaatctataggtggatcctgatatagcctcttatggtgggcctaatttcatccaggcctcaggacatgggcttccagcctgtggtctggccaagggggccagatgcaattcaggaatcagtgctagagtccatctgctcattttctcccactcataatgtctattaagaactcaaatgcctacggggccctgtgagatccatgagtatcaggacatggttcctgctctgtcaaagttctacatagttaagtgagtcaataccgttgacaacgaattagtttgtcgaggaaccctgtagtaagtgccacaaatcacggcacaggagttgtcaaacgagtgttggtgatgacacagacacaggagctttcagcccgtgggaacgggaagaggacaccaggcggggctcgcaggagttgcagaggggaccggggccttgaatgcaccacggccgatgggaccaaccccggggggaattgcctccaagcgtgttctcttgcccacggagaaaaacttattccac

SEQ ID NO: 713789 - DNA, 141 bp, Homo sapiens
  misc_feature (55)..(55): n is a, c, g, or t
  misc_feature (61)..(61): n is a, c, g, or t
  misc_feature (132)..(132): n is a, c, g, or t
  misc_feature (138)..(138): n is a, c, g, or t
atggaacctgtggctgaaggaagtaggctgaattcccgcttctctgccagttatngcacanctctctttgaagagaggaaagaaactaaacccacccaagggatgatttcagggggagaggtggaggcagangcctgncaa

SEQ ID NO: 713790 - DNA, 356 bp, Homo sapiens
ttttggtgcctaaaaaaaaaaggctgtttgttggggttttaaataagcttattttgtgtgtctctccccacctattaccccctgttgctttgtggggttgttttggatgggcgtgtgttaaacaggagttaaatttccctgcagaaaaattaatgtcctggattttcatattaggattctttattgtaaatcaagcatggaatttatttaaaaaaggaggtctttctaaatggatatgcatggatttcagattaaactaggattttttggattaaaaaccgattgtgttaactgtaacttaaaaaaagaatgtttaaataaatgaaaccgatttttttttttcattccccaatgga

SEQ ID NO: 713791 - DNA, 258 bp, Homo sapiens
aacgaccgaaacagacgcaagtcatgagggcttcagctgttgacgacaggtgatgcatgatctgtacagccagtgtgggatgtgatgagggccttggcgaccctaacaagcgaggtgctcaggtcctgggaacccaagagtgatggattaatgtgaaggtgctggactttgagcactttcttgccatgctgcagacagtggccaagaacaaggaccagtgcacctatgaggattatgtcgaaggtctacggggcgtag

SEQ ID NO: 713792 - DNA, 102 bp, Homo sapiens
aaggagtataagtggcgtcgtataaggtatctttactataaaagctatggtgtaagctagtcatattaagttgttagctcaggagtgggatagttcttgggc

SEQ ID NO: 713793 - DNA, 275 bp, Homo sapiens
  misc_feature (2)..(2): n is a, c, g, or t
  misc_feature (18)..(18): n is a, c, g, or t
  misc_feature (22)..(23): n is a, c, g, or t
  misc_feature (97)..(98): n is a, c, g, or t
  misc_feature (107)..(107): n is a, c, g, or t
  misc_feature (109)..(109): n is a, c, g, or t
  misc_feature (113)..(115): n is a, c, g, or t
  misc_feature (126)..(127): n is a, c, g, or t
  misc_feature (151)..(151): n is a, c, g, or t
  misc_feature (161)..(161): n is a, c, g, or t
  misc_feature (164)..(164): n is a, c, g, or t
  misc_feature (181)..(181): n is a, c, g, or t
  misc_feature (202)..(202): n is a, c, g, or t
  misc_feature (233)..(233): n is a, c, g, or t
  misc_feature (246)..(246): n is a, c, g, or t
  misc_feature (251)..(251): n is a, c, g, or t
  misc_feature (254)..(254): n is a, c, g, or t
  misc_feature (263)..(263): n is a, c, g, or t
  misc_feature (267)..(267): n is a, c, g, or t
  misc_feature (270)..(270): n is a, c, g, or t
cnatgtacaaagggaggnaacnnggtaggaggtgattggatacataagggatggtttaacacaatgactgttacacatgatagctgagtgagttacnncagaaagantnctgnnnggttttaaaanntgtggaaacctacacttactttgntactatgctnctncctgacaatacatgtangatatgccttgcttccccttnaccttctgccatgattgtaagtttcttgagncctccccctcccnagccntgnagaactgtnagtnaantaaat

SEQ ID NO: 713794 - DNA, 117 bp, Homo sapiens
atagcatctcagctgacacacctaattgccgttttcccttagctcagctgaactgacagtctcttaccttgggtcagttaagtactgttcccaggtgcctttcaggcaattttagca

SEQ ID NO: 713795 - DNA, 466 bp, Homo sapiens
  misc_feature (5)..(5): n is a, c, g, or t
  misc_feature (75)..(75): n is a, c, g, or t
  misc_feature (92)..(92): n is a, c, g, or t
  misc_feature (137)..(138): n is a, c, g, or t
  misc_feature (161)..(161): n is a, c, g, or t
  misc_feature (163)..(163): n is a, c, g, or t
  misc_feature (166)..(167): n is a, c, g, or t
  misc_feature (169)..(169): n is a, c, g, or t
  misc_feature (177)..(177): n is a, c, g, or t
  misc_feature (187)..(187): n is a, c, g, or t
  misc_feature (192)..(192): n is a, c, g, or t
  misc_feature (215)..(215): n is a, c, g, or t
  misc_feature (246)..(246): n is a, c, g, or t
  misc_feature (255)..(255): n is a, c, g, or t
  misc_feature (283)..(283): n is a, c, g, or t
  misc_feature (303)..(303): n is a, c, g, or t
  misc_feature (312)..(312): n is a, c, g, or t
  misc_feature (327)..(327): n is a, c, g, or t
  misc_feature (333)..(333): n is a, c, g, or t
  misc_feature (335)..(335): n is a, c, g, or t
  misc_feature (338)..(338): n is a, c, g, or t
  misc_feature (351)..(351): n is a, c, g, or t
  misc_feature (404)..(404): n is a, c, g, or t
  misc_feature (407)..(407): n is a, c, g, or t
ttttngcgatgtgtgacatatgacattcatttaacagacacacaaagcaagccaacaggtaaacatgcttacacngcctgcggaaatcgtcnggttttaacttgttttttaagaaaacaaccaaaacaaccaaaaannaccatgacccggtacaggaaaancnggnngnctcaggtnaatactggtnttgcnggtcttttttggttttgaaacanattttttttttttccaacttgttcaattttnctctaggtncgggtgggataaatggctaatttatttngttaaccatttttttttttntaggtgcantttacctttaaaatngcggangnacnacagcagcggggnacccaaaaccccaaccagatccccaaaggcaaaatgtgtagagagaaaagggnggngatggaatgacctactttgtgatgtttttacgctttacaaaaagcagatttggtattca

SEQ ID NO: 713796 - DNA, 652 bp, Homo sapiens
  misc_feature (452)..(452): n is a, c, g, or t
  misc_feature (455)..(455): n is a, c, g, or t
  misc_feature (458)..(458): n is a, c, g, or t
  misc_feature (464)..(464): n is a, c, g, or t
  misc_feature (467)..(467): n is a, c, g, or t
  misc_feature (537)..(537): n is a, c, g, or t
  misc_feature (609)..(609): n is a, c, g, or t
  misc_feature (649)..(649): n is a, c, g, or t
ggaaagaggtcaccaagggcagaggtgtccaggccggatccaggggccccactgttgggatgctggctgcagtggggcgccccaagcccaggtcccctctgtcttctctttcaactttgcagctgtacttgttttgctcctctacccgcaggagctgacatggacccaaatcctcaggccgccctggagcgccagcagctccaccttcaggagcggcaccatctgcatctcaagtcacagagaccccccataggtagtatctcatccatggaagtgaatgtggacacactggagcaagtataacttattgaccttggggacccggatgcatcatatgtgttcttgccttgcgaagatcctccaccaaccccccattcatctgggatggacaaccatttggaggagcttgacctgccggtgcctacatcatacaggaccacatctatgacctnctnctnctcctnctncaactgctgcaccaacctgcataacccagatccaagtgatgattgagcatatacaccctttgcacattcngatgaagaggatgaaaggtgttgatgatgggcataacctggaccctgcactaacactggcccccttctacanactgccacacttgctattctcacatgataccacagcccanccc

SEQ ID NO: 713797 - DNA, 125 bp, Homo sapiens
ggggagggggctggcagtccctcgcccaccagcgcctcccctcaccgagtttgcgcctttttagcaacagagcacaaggaccaggctccggcggcgcgcgggggtcacatacgggttccctcaac

SEQ ID NO: 713798 - DNA, 1194 bp, Homo sapiens
ttgccagtcgcccatgggcccgaagggcatttaaagcaggatgtgtgcgcctgcgcttgagggacatgccattttcacctgagaagtggggaatgtgtccccagacaatttctggttcaaatccccccatgggttattccattccccgcagtgacccaattggcggaatggtaaactttggacgacgttatcgggccctggcgaatgtcctggcaagcctttgggcattggggtactcttggcccatggacatggcataacaacccctttacaagtctatctacacgacgggacgaaaccttccgggccccttacacaacttaacctatgtgggctggacggagtggttcacaacgggcctggcatgggacctaacaaattttcctcatgggccacccggaagaaggctcccatacttagctgggccattccaggcggcgggccttagaaaactgggaaacgtctagaagccattcctttcaattaagaggacgctggggtttctaatgcaattcaagcccggccttataaccgccccaataagtggggatccattcgagcacaccaacacttttcacaccggatacaaggggcaaccaaaccgttggggaagaccccccgaaacagaaccacggaaaggttcaaaccccaaaacccaatgccccataaatttgggcgagggccgcacacggaaacatttggtttcccaacggggccttgggcaaacttccccggatctatgtggcgcgacgacaccaatctggcgacaacctgggagcaatttgccgccataatatagaggcttcccatgtggggtcacacacttcggtatattcgcttcccttttcccattggaaccagggaccctctttttccatcattgtggcccttccccagcgacctcgggggaccggggcgtacggccccccaaatgggttcgtttggttgattgcaacagtcgtggtcgcgggccagggattaaaccgtccgtccttcccaaactgggatggcggcatgaaaaggccaaatcccacacctattaccatatgggggcctgggccaaattgccggccaaatcacgacacaatattaccaaccgttgtggtaccctcccgtgtgggataggttccgcccgagtgggacgacgtaatccgagtcactcggttatacgtggtgtcccttcattgtgttttc

SEQ ID NO: 713799 - DNA, 189 bp, Homo sapiens
ggggggggggggggggttgggggggccccctttttttccccccccccccccccccccctgggggggggggggcccccccctttttttttccccggtttgggctttgggggcccccccccccccccccggggggggaccattttttttttgggccccggggctttttttcattaaaccccttttccccca

SEQ ID NO: 713800 - DNA, 300 bp, Homo sapiens
cgtcgaccttcctttgttgctaggtatgtctgatgaccgtaatagttagaagaaaggaattgctttccttggcccccactcaagtgtacatacaccttcttaaaatccattcatatgtccagtatcccatccatccacctgtacatcttattcactatctttttatataccaatttatccatctacatatccatcaatctattcacttacctatccagcctctcatctatctgtctactggtctacgcacccactcacttaccagttcatcctttacccatgtgttcgccacgtcgacgc

SEQ ID NO: 713801 - DNA, 592 bp, Homo sapiens
aacagagaacaggaaagctatggatgtagcactaggaatgaccctcctaggccaggaagcccggagacaatgctgtaattcatcagtcaataactgagtccatccactgaacaaattgagtggagcaactctgagactccaaacttgaaaaattacctaataatacggcacatgatctatgtcggcttttccaaattagatgcaaaccagatgcaaatgtacatgtggccctcccaaatgatatcatataactggacttggccttcaggaaaatctgtgctgcctacacatatgcgtagtacacatacctgcaggcctattgcttacttggctgtggagtctggctgacaattctgtcaaattgtatctggagacaacaggttggtccgatggatctttctggagccactggcacgaggtcacctggagagatgacagtggtcctcagctcctgttgacactttgccatccactaagccctagggaaatctagcagaggctgcctctattcaggcagaacttaacaatcagaaacttttcctcatgttcgtgcgtcactgtatatctttactaaaacagtcaaacaaatcta

SEQ ID NO: 713802 - DNA, 136 bp, Homo sapiens
  misc_feature (55)..(56): n is a, c, g, or t
  misc_feature (63)..(63): n is a, c, g, or t
  misc_feature (98)..(98): n is a, c, g, or t
cgcgacatatccggggatttttatttttgacgcagtgttagtcctacggttaacnntttccgngtatacagtgccgtaccaccccccatttcagggtncgccagcggcaccccataggtgtttgggcccagccccc

SEQ ID NO: 713803 - DNA, 208 bp, Homo sapiens
tctaattttttttctgcttttgtacagcaaagaaagaaaaagagcaggcgttttgaattgcataatgaaaagttcgtgctttctgcaccatagtgttttccatttctcaaatttttcttggttttatatatacatacacacccctacctacctacctatctacatacacagtcatgtgcctcacagtgaggaagcatgtacgtttggt

SEQ ID NO: 713804 - DNA, 164 bp, Homo sapiens
ttatacagcagagaaggagccagctagtacttgtaacggagggcaagaagtggagagtaggaaaatcaatgaaaatgtataccaagctggtagatagaggacacagagctgaaacagcgtggcttaagataatacaacgtgtagtacaagcagcgacatatgca

SEQ ID NO: 713805 - DNA, 814 bp, Homo sapiens
atgggacatgcaggcgcaagtaggtctacaagatgctacttcccctatcatagaagagcttatcgcctttcatagatcacgaccctcataatcatttgtccttatctgctgcctagtcctgtatgcccttttttctatacatctcacaagcaaaactatctaaatactaacgatctcagacgctcaggaaatacgaggaccgtctgaactatcctgcccgctcatcatcctagtcctcatcgcccatcccattccataacgctgatccttatgacattatacagagcgaggtcgagagattcgctcccattacacattcaagactcatataggccatccagatggttaactggacatccatacgagatatcagccgagaataacgcgtcgtgacgtattcttgtcacatgtcctgatcatacttccccgatttattccttatgtaatccaaggacgaactgctgaactccttgcatcgttgacgaactcagaggtgaggtaacatacccgtattgagagcccgccatattcgatcgtaataattacttgacgagacgtctatggtatttcattgaggcctgatacccagcattagggcttatgcagcgatgccattcccggtacgagtctaaactgaaacactttcagcgggtacacgatcggggagtaatactacgtgtctaatgctctgaaatctggtggagcgaaagccacaggggtcatgaccaagtcgaaccataatgaattaatttccccttaaaaatcgtgcacaatcggcccgtattgtacccttatagcagcgtcactttaggca

SEQ ID NO: 713806 - DNA, 949 bp, Homo sapiens
gcgactgaccgtggtcgtgggtgtgagcggtagtgcagcgcggaggagctgggtgtcgctgtgggtctgcgtaagcgagagcccgggacgtgcgcgcttgtgtgcacgatcctgaaggggagctcctgaggggcccgggtctccagtggctgggtgcggcctattccctggagcctcgggctggctggggcccggctgagatactaggtttagggccgtcccagtggctccggggcgcacccggtggcactgctgctttgcacgctgggagggcagctgctggtggcgcggtgtggctcgggacgacagcgtttctcccggaagtcttcctcggggcagccagggtgggaagtggggaagccggacgcggccagctgtgccacgcctggttctctccgacgagtgtcaggctagccctatgcgcccatgcaattgcccttgccgctgtgggtgccctgactggggctttggctcttgcctggcgttgctttgccttgggccgggtgcggggaccaagccggcactgcggtgaataaaccagttgagttgggacagaaaaacgtcaattcattggttatcaagcgccacgtgggcgcccttgaaggaacacggtattggccgacgacaagattctcgaagaatacgcgaactgttacgaaggacccgcgatccggggaaatttacctcgggaagcaaagtaaccatttcgggaacgttcaagttggtggcccccgggaatttaggaaccacgttggacaggcgggactcggtaacgatacgcgaacttcgtgtggaggccccttttcaaaattttttaccaaaagggcaagacattttacaacgggacgtcgtttttatgcgccagtgaaccaacttggcacgggggccattaagcttggggcccctttgacctggttagagtttacagactacgagtttaccccaaaaa

SEQ ID NO: 713807 - DNA, 172 bp, Homo sapiens
ttgactctagaggatgctttctgtggtgcctttccctgggacatctgcctggcactataggaaggaggcttctacccacctgcctgcacacgggtctgtccctgtggtaccatgcctctgtctgtgtgcccctcatgcctcccgtggtgagacacgcaaatgacttgatgat

SEQ ID NO: 713808 - DNA, 366 bp, Homo sapiens
cttttggttttggtggctgggttggtttttttctaccggggtcccccaaactggggtccaaaaagctttgggttaatccaaaaaaatctatgtggaagagaaaagttgttctcatgaaggcccttcagatgagtgctatagactctctaggcaactccaaaaggcttctcaaccaagggtggccagtgaaagctgctatggaatcaatggccaaactgccagggcctgctttaaaagccaggtacccagttaaggaaaaaattttttttaaagggttaaaggttaaaattatccctttaaccctttgtgatgggattttcagggttcctttttttaaaggtaaccaattttttccaatgtgataat

SEQ ID NO: 713809 - DNA, 334 bp, Homo sapiens
  misc_feature (42)..(42): n is a, c, g, or t
  misc_feature (44)..(44): n is a, c, g, or t
  misc_feature (46)..(46): n is a, c, g, or t
  misc_feature (48)..(48): n is a, c, g, or t
  misc_feature (245)..(245): n is a, c, g, or t
  misc_feature (275)..(275): n is a, c, g, or t
  misc_feature (314)..(314): n is a, c, g, or t
  misc_feature (323)..(323): n is a, c, g, or t
tttaagcgtggtgatgggtgagcgctctggcccaggctggcnancntncccgcccaagcatgaacaggacttgaccatctttccaacccctggggaagacatttgcaactgacttggggaggacacagcttcagcacagcctctcctgcgggccagccctggcggaaccctccaccagctaccggaggagggagggaggatgcgctgttggggttgttttttgccataagcgaacttttgtgccngttcctaggaagtgaaaattttttcaagtnccaggaacttatgttatttttgaatttatttttaaaagnttaaaattntttttttttaa

SEQ ID NO: 713810 - DNA, 267 bp, Homo sapiens
gccgaggatgggtcatgccttctatgctcaggtcatgtattgccgctcatttttaggaatctctgttgtgccttccatttcccgctgatcttggactcattggccgttgcgtgatggacaacttaaggccctcattgagtgcaccatgcttctctgggaactgggaagctggaattcgcggatctccatgctgtagaagctatcatgcccattcccaagatgcttgctcttaaagctgtctgagtagtccggaatcttgatcctctt

SEQ ID NO: 713811 - DNA, 1396 bp, Homo sapiens
  misc_feature (1323)..(1324): n is a, c, g, or t
  misc_feature (1349)..(1349): n is a, c, g, or t
  misc_feature (1353)..(1353): n is a, c, g, or t
tagtccgtacagcctaccaggaacatgtgtgttttctttattttttaaaatcattatattgagtgtgttttcagcactatattggtcaagatagccaagcagtttgtataatttctgtcactagtgtcatacagttttctggtcaacatgtgtgatctttgtgtctcctttttgccaagcacattctgattttcttgttggaacacaggtctagtttctaaaggacaaattttttgttccttgtcttttttctgtaagggacaagatttgttgtttttgtaagaaatgagatgcaggaaagaaaaccaaatcccattcctgcaccccagtccaataagcagataccacttaagataggagtctaaactccacagaaaaggataataccaagagcttgtattgttaccttagtcacttgcctagcagtgtgtggctttaaaaactagagatttttcagtcttagtctgcaaactggcatttccgattttccagcataaaaatccacctgtgtctgctgaatgtgtatgtatgtgctcactgtggctttagattctgtccctggggttagccctgtgggccctgacaggaagggaggaagcctggtgaatttagtgagcagctggcctgggtcacagtgacctgacctcaaaccagcttaaggctttaagtcctctctcagaacttggcatttccaacttcttcctttccgggtgagagaagaagcggagaagggttcagtgtagccactctgggctcatagggacacttggtcactccagagtttttaatagctcccaggaggtgatattattttcagtgctcagctgaaataccaaccccaggaataagaactccatttcaaacagttctggccattctgagcctgcttttgtgattgctcatccattgtcctccactagaggggctaagcttgactgcccttagccaggcaagcacagtaatgtgtgttttgttcagcattattatgcaaaaattcactagttgagatggtttgttttaggataggaaatgaaattgcctctcagtgacaggagtggcccgagcctgcttcctattttgatttttttttttttaactgatagatggtgcagcatgtctacatggttgtttgttgctaaactttatataatgtgtggtttcaattcagcttgaaaaataatctcactacatgtagcagtacattatatgtacattatatgtaatgttagtatttctgctttgaatccttgatattgcaatggaattcctactttattaaatgtatttgatatgctagttattgtgtgcgatttaaactttttnngctttctcccttttttggggtgtgncgcnttcttttacaacaagcctctagaacagatagttctgagaattc

SEQ ID NO: 713812 - DNA, 275 bp, Homo sapiens
  misc_feature (8)..(8): n is a, c, g, or t
  misc_feature (40)..(40): n is a, c, g, or t
  misc_feature (45)..(45): n is a, c, g, or t
  misc_feature (72)..(72): n is a, c, g, or t
  misc_feature (74)..(74): n is a, c, g, or t
  misc_feature (163)..(163): n is a, c, g, or t
  misc_feature (268)..(268): n is a, c, g, or t
atgcacancgacactctgtatctagctgctctgtgggctngagancttatatctagctcaggattgtaaatncncccatcggcactgtgtatctagctcaaggtttataaacacaccaatcaacaccctgtgtctagctcagggtttgtgagtgcaccaatcnacactctgtatctagctgctctggtgggccttggagaacctgtgtgtcgaaactctgtatctaactaatctgatggggacgtggagaacctttgtatctagctcngggattg

SEQ ID NO: 713813 - DNA, 335 bp, Homo sapiens
gccctttacccccccatgggggggggtaatttacccccccgtttcccgggtaataagccttttttgttccccaaaggggaattttgaactttggtcctgtttgcggggaaaattttttttaaaggggggggggctttccctttaaggactttttggcccccgccccccccaagcccccttttttcccgctaatgggggggctttgtggggggggggcccaaacccggggggttggttcttagggggcccggttttccgaaccccccgccggttttttttttaattcctgggcgggggggccccaaggggaaattaaaggtcctttttttttttta

SEQ ID NO: 713814 - DNA, 1342 bp, Homo sapiens
  misc_feature (1269)..(1270): n is a, c, g, or t
  misc_feature (1295)..(1295): n is a, c, g, or t
  misc_feature (1299)..(1299): n is a, c, g, or t
tagtccgtacagcctaccaggaacatgtgtgttttctttattttttaaaatcattatattgagtgtgttttcagcactatattggtcaagatagccaagcagtttgtataatttctgtcactagtgtcatacagttttctggtcaacatgtgtgatctttgtgtctcctttttgccaagcacattctgattttcttgttggaacacaggtctagtttctaaaggacaaattttttgttccttgtcttttttctgtaagggacaagatttgttgtttttgtaagaaatgagatgcaggaaagaaaaccaaatcccattcctgcaccccagtccaataagcagataccacttaagataggagtctaaactccacagaaaaggataataccaagagcttgtattgttaccttagtcacttgcctagcagtgtgtggctttaaaaactagagatttttcagtcttagtctgcaaactggcatttccgattttccagcatattctgtccctggggttagccctgtgggccctgacaggaagggaggaagcctggtgaatttagtgagcagctggcctgggtcacagtgacctgacctcaaaccagcttaaggctttaagtcctctctcagaacttggcatttccaacttcttcctttccgggtgagagaagaagcggagaagggttcagtgtagccactctgggctcatagggacacttggtcactccagagtttttaatagctcccaggaggtgatattattttcagtgctcagctgaaataccaaccccaggaataagaactccatttcaaacagttctggccattctgagcctgcttttgtgattgctcatccattgtcctccactagaggggctaagcttgactgcccttagccaggcaagcacagtaatgtgtgttttgttcagcattattatgcaaaaattcactagttgagatggtttgttttaggataggaaatgaaattgcctctcagtgacaggagtggcccgagcctgcttcctattttgatttttttttttttaactgatagatggtgcagcatgtctacatggttgtttgttgctaaactttatataatgtgtggtttcaattcagcttgaaaaataatctcactacatgtagcagtacattatatgtacattatatgtaatgttagtatttctgctttgaatccttgatattgcaatggaattcctactttattaaatgtatttgatatgctagttattgtgtgcgatttaaactttttnngctttctcccttttttggggtgtgncgcnttcttttacaacaagcctctagaacagatagttctgagaattc

SEQ ID NO: 713815 - DNA, 454 bp, Homo sapiens
tagtccgtacagcctaccaggaacatgtgtgttttctttattttttaaaatcattatattgagtgtgttttcagcactatattggtcaagatagccaagcagtttgtataatttctgtcactagtgtcatacagttttctggtcaacatgtgtgatctttgtgtctcctttttgccaagcacattctgattttcttgttggaacacaggtctagtttctaaaggacaaattttttgttccttgtcttttttctgtaagggacaagatttgttgtttttgtaagaaatgagatgcaggaaagaaaaccaaatcccattcctgcaccccagtccaataagcagataccacttaagataggagtctaaactccacagtatagctctacatacagatacaactattgtaccttaatcactagcctaccagtatgactctgcatcagttaaatcagcaa

SEQ ID NO: 713816 - DNA, 169 bp, Homo sapiens
aagccataccagcagccaccaggcaatgagagcggttacataaccaggactgttctttcctcaacccttttggcaagactacggatgctgactcttcctcagctggcactccctataaccacttgtctacccactcgaacagcatcacatggatagggtacctgagctc

SEQ ID NO: 713817 - DNA, 232 bp, Homo sapiens
cggaggcgttgaatggccagatggagctgaaaaccatggcacgagaaccatgtgaggcatgcaaaatcttcaatagccgattcgatcaagtggaagaaagggtatcagtgattgaagatcaaattaatgaaataaagcgagaagtttagagaaaaaagagtaagaagaaatgaacaaagcctccaagaaatatgggactatatgggccattcaacgcggggtaccgagctcg

SEQ ID NO: 713818 - DNA, 489 bp, Homo sapiens
aatgcagcggaatcggaggcagtagtggcagcagagcagctgacggcaggagcaggagaaggagcagttgcgggaaccggagggctgtgctaagctgtaggggtactactggaacactggtctcaggtggctcattgcaaagaggtccagctcaggtgcagcctctgcaataccttcagagggggcaaaggggtcatttcctgaacatgcatcaggtgctgctgctacaggggttggggtagcttggtgcggaggccccttcggatgctgcaggggccttccccagggagaagctgcaaagggatctccaaagagatccagttcagcagttacaggggtaacagttgtagtaagtggaggcaggaagctgaggccagttgcaatttcaggcagttgtcagtaggagggggtaggtacttggtgcgaatgggtctgaaatcttgtggttcagaagggaaccagaggaaagttcatgcccaagaatcctct

SEQ ID NO: 713819 - DNA, 136 bp, Homo sapiens
aaacttgtaaaggtagagcctggagggctgatgtgtgttgggtgttgggcggaacagtggacgcagctgtgctatggggttctttgcattggatgtattgagcatgcgatgggctgtttaaagtgtgactcctcac

SEQ ID NO: 713820 - DNA, 882 bp, Homo sapiens
gaggacgtgggcccttgccttgacttcacagtgcaggagctctcagctctggttcggactgctgtggaggacaacacactcaccattgagcctgtggcttcacagacactgcccgctgtgaaggtgcccactgttgagtgtaacaacaccaaacacatgtgccctgagtggcctggcacgtacctgccaccatcgaatccgcctgggggactctgacagccactattacatctcaccgtcctcccgggccaggatcaccgcagtatgcaacttcttcacctatattcgctacatccagcaaggtctggttcggcaggatgctgagccgatgttctgggagatcatgaggcttcggaagggcatgtcactagccaagcttggcttcttcccccaggaggcctagggcatggccccaggcctgaagtaagctctgagctagagcaaacagctgccttgggacagacagacaagaaatcctggagccagctctgagccagaagctgaaaggacagataaacaaccaggctgtagagacagttctgagcccgtaccacccatccgtcctgagacagacaaaaggacagcctggcctggacttcatcagatgaccccttcttgcccactgagctctgtagccaacaacgagaatcttcaagaaagcaccaatagaccaaggtgctcggaagcaaggagctccagcctgggcgagaggaccctggagtagccagttaccctcacacaaatcccctgtgctttaccaatgctctcttgctggcacatcttccagaaagcggtggtctagggtggtggattccagccctggagaacacggcccctttgggcctttctcactctgttcccaggtggcctcttaatgcccag

SEQ ID NO: 713821 - DNA, 138 bp, Homo sapiens
tcatgagttacacacggcggcagaactgtctcgccaggtgatgaagtcctcctccaagttcccatcgtcgtcgccacacccagctcaaagatgctgctggtgtgccgagctgctcccagccggttgtgcactgtactt

SEQ ID NO: 713822 - DNA, 154 bp, Homo sapiens
agaaacatgttctcctgttaagaccccaaaaatggacgaaagaacggtagaggggcgagaaagccttggatcacttcttggttcctccagataccacttttggggcagtcagagttgccacaacttaaagccaaggccaactgactggttaagc

SEQ ID NO: 713823 - DNA, 206 bp, Homo sapiens
taattattatcctttgattttaacttcacaatagttgaaatatgtaatatacgtcttataccttctaaaactattttatctaatttttgacttaaagcaaaaccatgtacaatttttaatttatctatataaaaacttcctttaacttctataaatcctactaatcagggtttactcattacatttttaatatcttccaaagtatt

SEQ ID NO: 713824 - DNA, 228 bp, Homo sapiens
ccctggcgtacaagtatatgtgtttggttagaaaactcacatagtattggattaataagctaccaacatataaatcttttattaaaggaagaacaatattgacttactattcctatttgttggtctaacgaatacttctgctacgtgtatcatccatccccaatgactgaaagaaagcatgccatttgtctctatttgtctatcttcctataatgggacggaagatca

SEQ ID NO: 713825 - DNA, 167 bp, Homo sapiens
aagctccaacaagagcgaaactctctctcaagaaaaaaaaaaagaaagaaaatgtaaagtaaggtgtttgtaagtggctattgttgtatttttattgggcaacaactcctgttgaaaataacccctgggtgttgggggacaggaccttttacttaatgtaatgtggt

SEQ ID NO: 713826 - DNA, 904 bp, Homo sapiens
ggccgtggcccaccacttcccaaggcccatccaaggcctccactgccccccaggcccctcaccagccagcacttttcctgggggaagtggccagtggggatgaccggtcgttgctcggtgctgcagatggcacaagacgctgagcgaggtggatctttgcccctgctgggccttgtacgctctagcgctcctcccaggccccctggcagctgctgccccgcccggggtactgccctcggactatgtgccggctcccatcagcttcctctcctaccccgtcattccgggagagcatcctaggaagacctggcacgcaggcaggctccgtgccatgcctagggcggcgcggcgccacgcgggcctgcagcgaggcaggcctgagtgcctggctgcgggccatcggatcggcgcgctatgaggacgggcctggctgcattacttggcctcggggacagagctggcagttcccctcagtgactctcaccgaggagcgactcgcgaggacgcgccatgggggtgcacgtgacccgtgctcactaagcgcctccattcggggaacagaccttgaatgactcagtccaagtggcatagccgggaggcaactcatgaaatgcctgttgacaactcaagaggcccacatctcctgcataacctaagggtcctctaggctatgggtccccagggattatgaaaaccggtacaacttgacaccgagtcacgggtgacaacgctacaatcacttcctgcgtggcgcgtaacataacaatttggcgcgtattggccgtaaagtataactctgggcgagacttcctgagcagtttacgccacagtgtgtaccaccaaattcaagtatttgagaacataggcccccttaacttaatgcgaggaattcccgtggaacccc

SEQ ID NO: 713827 - DNA, 131 bp, Homo sapiens
gcagcagccaaatggaattcagcaatgccacggtttctgctggacacgagtctggagcctcctctgtgcggacagacattgtgtgacaaaaagaggtcattgccagctacaatcagctctcctggaggagg

SEQ ID NO: 713828 - DNA, 889 bp, Homo sapiens
ataaacgcggctggcggatggctctgatgtgccgagatcccggcaaccaggcctcatgtggctcgcgtcatcgtcattcctcctgtatactcagtgggtacacgtgtgagttgaacaggctgaacagctccgaaactaaagggacgtggacgtgcgaatagctgagccacctatgtgaaccgacgaacctgtagaggcagtagtgtccctacggactgggggcgatggtccagaggcaccaagaagagcagtctcgagtggtcaccgacaggaacgaggataggggatcgaccggtctctcggactcgaagtgagaagtcgctcactgagttattcttttcctcgaggaaagcgttggggaccgttacgacgacgcgcaatcctccctggggggccgtgccgagctcaacagggcgttcgtcctccgtatctctactgcctcgacatgtcatgcgtatgggccatttgcgtttcctcgaccctttgcgctactctcgcccgtctgcctttacctcttgtatgcgtctacccgggttctcttgaaaggcccgtcgcctttttgaacctcgtcttgttacgcggaaattttacaggttccgagtcgcaggggtctgttgagtactcggatcttaccaaacacaaatcgtccgccttttcccctcggcggctaaaggccccttgcaggtgctggagcaaagttgatttgcagccctaggaagtcccttccactttctgctatcatgacctttgaggactcttctcgccgctttggcctttttacctaaaggtggaagggtcctggattcccatgaatcaggagaccgtaatcgctacaaaaagggatccgcggacttagaaatgggatacgtctgaagaaactattcttcag

SEQ ID NO: 713829 - DNA, 297 bp, Homo sapiens
ccgggaaagttgggccccctccccccccccccccagggggttttttttttggtttgggcaaacccggggcttggcccttcccccaaagccttttggccagttttttcccccccccattttttccgtttataagggttccaaaatcctgggagggttttacccttctgaagggaaaaatttgcccccccggccccggggcttttggaattgcctttttggtttgtttaaaagccccccccgccttgtttgggccttttttttttttttttaaataaaaaggttggcggccccccccca

SEQ ID NO: 713830 - DNA, 700 bp, Homo sapiens
  misc_feature (333)..(333): n is a, c, g, or t
gctcctctgggtctagctacccagtgaagctgcaacactccaggatggtgctggggaatgtttgcaaggggtccagtgatgtgacctgtctgaggcaatatcttttgtgtatgtggggtttctggtgttttgaaatagttctacaatgaacacttgttagttttgtcatcagaaataaattctttcagtgtagtgcaagtaagttctatgttttcaggcatttcctcagcctctgtctgcaagttaatctaaaaatgtgaaggatgtttgtattggcagattgagatgtgaattgtgcatacaaaggtaggaaaaggtagaaattatgttaanccaaatgtctttgtggaaaagtaataagctgtggcatgagacatgccttcaaagttaattaggtaattattagcctaaagaagcaaaaggtcaaagttgaatagttttagcgataaagcttaaaagattcattaacacaaaatgaacacaggaagttccagaactaactatgaatccctggttcttataactaaaaaggtcatcttctgatcgttttaactaatgttcctccatccaaaataatgaggaagacaattttgctctgctccccaacgcatgtaaataacataatgtcagagtgaagaggttaaaaattaacattttctagttgcatttagtgaaaatgtttaattttcaaaatcagtga

SEQ ID NO: 713831 - DNA, 573 bp, Homo sapiens
cccagccgaggacgtcggatgtcatcgtccttcttgctttgccaccccattcccgtcaatagagtggtttgaacccaaaaaaaaaaaaaaaaaaaaaaaaaaaaaaaaaaaaaaaaaaaaaaaaaaaaaaaaaaaaaaaagggggggcccccaaattttccccgggggggcccactgttttccgcttcgtccgccgccagttttttttgacaaacagggggcgcccctattaggggcagcctgctgttttattaacaccgacgagccgcggcgcgcgcggtgttatacacacgtctcagctggggaacaaccactcgctcgcgcgcaccctctgcgcgccgccgccccctctcttcgggggggggggcccaccaccaaatttgtgtggcgacacacacacctctcctcccacaaagaaattattaaaaccccccacaggggcaaatatctactacatctttcaaagggtcttatataactggtgttaaccccacccaccgcgaccataattcactcccccgtgaaaaaaaatttgtccccatcaccatatattacttatttctcacaacttct

SEQ ID NO: 713832 - DNA, 96 bp, Homo sapiens
catggatttgctggtgcagtacaactaggcttaatagggacatgccactgcactccagcctgggcaacagagtgagactctgctttaattaaaaaa

SEQ ID NO: 713833 - DNA, 638 bp, Homo sapiens
cgaggctgtcctcccttcaaggccgttagcctcttcctactcgtcgtactcccggaacaacagccgcctcgtcatcaagcacgctacccaacctggttgatattactataaaattctatccaatggggaatttctagggtatagtacaataccgtgtcaactaggttcttgtactaaaatactctgcttgacatatttcaggcctaaagttgtggccaatattatcatcgaattcttctgtcgtttggatttcctgctaggatcttcgtcctagttcactaccaacgatgcaagataggcgacggagcggtaagctactatgtcgtctgtgagacctactgctgcagcttgtcgtgccgtcaggagatccaggaagcctgtgctgatgcgtgtatactatcatggacccatctgtcttagtatatctactgaggtataatatgccatgtaaatagacatattttttataatctttacatgatggtttaaattcagaaggaaatagatccaaggaaatatatatattttcttctaaaacgttatgtaaattcgtgtgacaaataatcaggtttcatcttggcagcaaaaagttctcagtgacatattttgtggtgtttctttttgaaaagcaaagctga

SEQ ID NO: 713834 - DNA, 148 bp, Homo sapiens
tggccggggtttggttttttggcccggtggggccccagggaaggcttctttttaggaaaaccaaaccaaacccaaccccccaccctttggtattttttttttttggggcaaatggaaaaccttaaccaccccctttggagaggggccc

SEQ ID NO: 713835 - DNA, 423 bp, Homo sapiens
  misc_feature (311)..(311): n is a, c, g, or t
ctctagaggaccccgagagatgacagaagggagaaagaaataaaagcatcaaattggaagggagaaatccaattggtactggttacatattggatggtcttacaatagggaaaagctaaaagatctaccaaaagaactcttggaaatggtaagttcggtaagggttcagaataccaaataaatacacaaaaatcagtggtatttctgtatacaaacaacacacattaaaaatcaagaaagccatcatatttacaataactgaaaaaacttttaaagtctgtgttatctgaaatgaaataagtgtagctttnggttttcatttacatggaatatcttttttcatctcttagctttccctctgggtgtcttcacagttgaaatgagtttcttgtaggcaacatgtaattgactctagggttttaa

SEQ ID NO: 713836 - DNA, 315 bp, Homo sapiens
tgatggcgctgatgacacccaccacgcccaccggttcgcgggtaaccaggccaagctggtcgtgcggggtcggggcgacttcgtcgtagaccttgtcgatggcttcggcagtccagtggatggcttgggccgcacctgggatgtcgatgctggaggagtcgccgatcggcttgcccatgtccagggtttccagcagcgccagctcttcgacgttcttgcgcagcaggtcggcgaagcgaatcaagcttggccttgcgcttggccggagccagttgcgaccagacgccggagttgaaggtgtcatcagcgccatca

SEQ ID NO: 713837 - DNA, 1229 bp, Homo sapiens
  misc_feature (672)..(672): n is a, c, g, or t
  misc_feature (687)..(687): n is a, c, g, or t
  misc_feature (692)..(692): n is a, c, g, or t
  misc_feature (694)..(694): n is a, c, g, or t
  misc_feature (714)..(714): n is a, c, g, or t
  misc_feature (718)..(718): n is a, c, g, or t
tcgatccccgagctccggataccggtgcctcgccatggctgaaccagctgactgaggaacagattgcagagttcaaggaagccttctccctcttcgacaaggatggagatggcaccattaccaccaaggagctggggactgtgatgagatcgctgggacagaaccccactgaggcggagctgcaggacatgattaatgaggtggatgctgatggcaatgggaccattgacttcccagagttcttgaccatgatggccagaaagatgaaggatacagacagcgaggaggagatacgagaggccttccgtgtctttgacaaggatgggaatggctacattcagcgctcgcagagctgcgtcacgtaatgacgaaccctgggggagaagctgaccgatgaggaggtggatgagatgatcagggaggctgacatcgatggagatggccaggtcaattatgaagagtttgtacagatgatgactgcaaagtgaaggccccccgggcagctggcgatgcccgttctcttgatctctctcttctcgcgcgcgcactctctcttcaacactcccctgcgtaccccggttctagcaaacaccaattgattgactgagaatctgataaagcaacaaaagatttgtcccaagctgcatgattgctctcttctccttcttcccntgagtctctctccantgccncntcatctcttcctatttgccntcgncctcttccatccacgtcttccaaggcctgatgcattcataagttgaagccctcccacagatccctcttgagggtagcactctgcaacgtcactcgcagacaccaggacttggctcgtccttacattgttggtgtgtgattaacctcgtcggtatcgtcattcttaattgcgaggtgcatgtgggatggtctgaccaacgcacttgttccgctgggacgcttgcatgggaagggacaatgaagagaccttccctccagggcagaagaagcagtgcccttttgccgtttgctatgcaatcatggcctgtgattcctcgtgcagatcccaagcaagacctgttggcggcagggtgtgccaattatgaggcagtccagaaggactgaggtgggcgttgaggaattgtgggcgttgactggaatgtgggccaaagagaggagtcgaagggcgccaactcaccaaaagggcgactgacagtgggcaaaactctcctccactggctgctgttctgaac

SEQ ID NO: 713838 - DNA, 271 bp, Homo sapiens
tagaatggtcacctcctcattcaggtccaccttttccccggtcatggcgaatcggtgcgttaaaccactgctcgaaagtgctgcagcacttgaagatggtgtgacagcgggaagttgagcagggcccagagctcgggaagcttgtgctggagcggtgttgccgtcagcagcaggtgacggggtgccacataatgcgttgttgagcacctgcgtaagcttgcattggtggttcttcatgcggtgaccttcgtccataatcatgtaataccaa

SEQ ID NO: 713839 - DNA, 374 bp, Homo sapiens
  misc_feature (141)..(141): n is a, c, g, or t
  misc_feature (206)..(207): n is a, c, g, or t
  misc_feature (332)..(332): n is a, c, g, or t
gacaaggtaaaaggaggcgtgcagcgagcatgaaccggctgggctgctggcccgcaaggagcctgccaaggacagaaaagggccctgggcagaggagttttggacttgggggccacccttcaggttttatttttccaggcnccccagcggcgaagaggacctgggagtcccctggtgtgagggccagagactgtccactgtctgtnngtcttctaagtagatgtcagggttctgggaggaggcctgcagggggctgagggcccaggggaagcccctcggactccctcccacaagtggactctgctatctgcttcctgctgggctggcctacnctccggccgtgggctgtggagagctgggccgtggctcaggcg

SEQ ID NO: 713840 - DNA, 977 bp, Homo sapiens
tcgatccccgagctccggataccggtgcctcgccatggctgaaccagctgactgaggaacagattgcagagttcaaggaagccttctccctcttcgacaaggatggagatggcaccattaccaccaaggagctggggactgtgatgagatcgctgggacagaaccccactgaggcggagctgcaggacatgattaatgaggtggatgctgatggcaatgggaccattgacttcccagagttcttgaccatgatggccagaaagatgaaggatacagacagcgaggaggagatacgagaggccttccgtgtctttgacaaggatgggaatggctacattcagcgctcgcagagctgcgtcacgtaatgacgaaccctgggggagaagctgaccgatgaggaggtggatgagatgatcagggaggctgacatcgatggagatggccaggtcaattatgaagagtttgtacagatgatgactgcaaagtgaaggccccccgggcagctggcgatgcccgttctcttgatctctctcttctcgcgcgcgcactctctcttcaacactcccctgcgtaccccggttctagcaaacaccaattgattgactgagaatctgataaagcaacaaaagatttgtcccaagctgcatgattgctctcttctccttctcctgaatgtccctccacgccctcacggttctttgcgcttccctttcattccaagtctccacgctgtgttcctatgtgagcccattgcctgcctggggagcgtctggctccttcctcagggcggtgggctcctccgggtggggtgggtcccttgtggctttggtggcgggtgggccatctggcctgtgggggggaggaggcgtgcggggggaatcccgccctgtgtgccacccgttttgttatcaccttgtgggggggaggagaccccgtggtccacacgcggggggtttgagagaacaaactgggaggcg

SEQ ID NO: 713841 - DNA, 389 bp, Homo sapiens
  misc_feature (70)..(70): n is a, c, g, or t
  misc_feature (332)..(332): n is a, c, g, or t
  misc_feature (345)..(345): n is a, c, g, or t
gacaactgaaagtgaaaagttaattcaagaatagtgtcaggctgggcacagtgtctcacacctgtaatcnctcctttttgggaggctgaggcaggtggatcacttgaggccaggagtttgagaccagcctgcccaacatggtaaaaccccatctctaccaaaaatacaaaaattagccaggtgtggtggcaggagcttgtaatcacagctactgaggaggctgaggcaggagaaacacttgaacccaggaggcagaggttgcagtgagccgagatcacaccactgcactccagcctgggctacagagcaagactcggtatgaaagaaagaangaaagaaagagangaagagagaaagaaagaaagagagaaagagagaaaaagagaaag

SEQ ID NO: 713842 - DNA, 94 bp, Homo sapiens
cttccccctctcccttccccttctccctttcccctctccccttcccgagtttcccacatttccagcctgggcaacaagagtgaaactctgtctc

SEQ ID NO: 713843 - DNA, 486 bp, Homo sapiens
  misc_feature (52)..(52): n is a, c, g, or t
  misc_feature (365)..(365): n is a, c, g, or t
  misc_feature (458)..(458): n is a, c, g, or t
ggtgtcagtgggcaagcgtgcatgaagaagtgcagcgggaaacgggacatgncacagccagcttcgcagtcatattgagctggctgggaagcccagcaggtggtgccccactcatggtagcagacaccaggtggttcaggtcaccataggtgggcgtggtcagctttagggttctgaagcaaatgtcgtagagagcttcgttatcaaatgcagtaggtctcgtctgtgttttctacgagctggtggactgagagggtggcgttgtagggctccaccactgtgtctgacactttgggcgaaggcaccacactaaacgtgttcatgatcctgtctgggtactcctcccggatcttgctgatgaggangggtacccatcccagacccagtccccccacccagggagtgggtcagctggaaaccctgcaggcagtcacagctctcagcctcctttctcacanaatccagcacaagaaacacacggggtta

SEQ ID NO: 713844 - DNA, 803 bp, Homo sapiens
  misc_feature (474)..(474): n is a, c, g, or t
  misc_feature (497)..(497): n is a, c, g, or t
agaaactataggtctagtacgaggctgggtttaaattcggccgaggcttagtgcctgcgttcgcgtgtctcccgcgccgccgtccactgtcgcgcttcgctctcctgccgcccgaggcccgcgcgctcgtccatgtcccgtggccaccgtccaccgcgggtcgcctcggttgctgggcaccatgtgagactgggcgccgccgatggacgcgcccgctcagctgccgtcggccgtgcgcgcctttctggagcgcgtgccgatcgaccgataccgtggacatcggccttctatgtcaggcgacggtccagctccgagcatccatcctggtgcggcctggggctcgtggcttggcgtcggtgagctgatgttgcccgaaggtgcaatagatttcgccgagccaatggccacagcccattgtggaatgggaagaatctacattaacacgcctgtgcatcagtgctcctgtgtcccatncgtggaatgcatccgttccattncaaagacgcgctttgcagtgttccgccaatgtgtgaccttcgttcataccctaacaatcgtcaccgtagaaccgacagggcgacaccccgattggccgtaatgaggacgctgtcattgtcgcttgacctaggcgtgggtgctagccaacgcatgcgcgagaattcgctggcagtgcttagggctctccaaattagtggctaccttggcgaaaggtgtccggagaattcgtgttacccttcttggaatatcaatggcgctggatcctgccgaagtgtgttccagggcatgttcaaagctaccaccgt

SEQ ID NO: 713845 - DNA, 226 bp, Homo sapiens
aattattaagggggggggggtcctgtgtaaataagtagacattggattgggttggtaaagagttcagttctttagtatctaatttgtcttttaaaatgagtacatatataggcataatatatatgctcagatcaatatacttgttagaaacttcaggcatcaaaacctaggaggagtattttaatagtatttgtataaatcggtgggtatgtttttaattagttcc

SEQ ID NO: 713846 - DNA, 1003 bp, Homo sapiens
caaaattgtcctgatcatggctgcgtggcgatcggtcaccaggtgggggtgggggagccccgcaggagatgctgtggacaggatcctggaggcagagcttgctgtggaacagaagagtgaccaggcgttgagggtctgggggaaaccgggggtagcggagcagccaaatgacctgtgactaacatctgtcaggcagtgacaaacagtattcacgcttgttgagtgggcgaagaggatccacacttttctccttggctttggcatgatcaggtccatattggtgcgggcaggctggaatgaactcctcattgctccttttcacaccgatccattgatgttcgagcatggatactccttgccaacaaggtcttcacgtgcaccgcaactcagcccccattcagccaggagtaggagccatcttttgatcgggtgctgacagagctagtgtcccaacacatgcgtgcacatgaggcatggacaagcacagagcttggcttgctgagggcaatcattctcgtttaatcccagatagccaagggctctccaacctcagtgaggtggaggtcctgcgggcagcaaagttgtatgcattcacttgtagacctactgcaaaacagaagtacctgagcagcagggacggttttgcaagctgttgctagttttcctgcctccggtccataggcttcagtgtctagagcatctgtttttctttcaaagctcacttggtgacagcgcccatcgaaagcttcgtcatggagaatagttgaggtccccatcaatggctgagctcagaaccagaagtgtggttctcaacctggagaggccacattccagaaggatccaggcctgggccggtggggggcctgtccacgaacttaatgggtgcgaagaccggcggaaccagcaacataacctccaggatcgttgattcccgtggaggacccatacctaaagaggtggtctcggggcagccaactaggggtcccgaggggataccatgccc

SEQ ID NO: 713847 - DNA, 607 bp, Homo sapiens
  misc_feature (77)..(77): n is a, c, g, or t
  misc_feature (138)..(138): n is a, c, g, or t
gcatgtttctccacacgtttcacgttgacttacacattacatggatctataggctttctttttatccttttgtgcangtgccttgcattccacgtggttgttgtgttttttcgtgtgtgggcactactttatttcctntacctcgtggtttctttctccttacatgcttattgttcgtgacaatgtgttatttcctaaaatacgttgttttcctcttgttacttttctggctcgagtgacttccgagtaacttaccatgtgtttataagcgtgatgttcaaagcctttcagtctgggagactttctgccacctatctgactgtacctttatcttcaagcttatctctttccaaacaagaggctcatttagcagctttctctgattgccatgttcatcctaacactcagcctcattcagtttacagcatggaaactggtataggacctctttcctatagaaattgaagacattaaataggaagaaaattaaaatatacattgtgatacatgagtatccagtcaaataatatctataaaataccagatagagtataaaagacaatgaaggacaacagagtgatgaaaggacttattaggcattggattg

SEQ ID NO: 713848 - DNA, 237 bp, Homo sapiens
ggtgtttcatcatgttggccaggctggtctcgaactcctgaccttcaagtgatccacccacctcggcctctcaaagtgctgggattacaggcgtgggccactgctcctggccgtctttcctcttatctaattagtgtaaacattctgcttgttcagtttaagtagatagtatagtaattaagaacacagattctggaaccagattgtccaggttcaaagttgtgtttacgcccttgt

SEQ ID NO: 713849 - DNA, 498 bp, Homo sapiens
  misc_feature (140)..(140): n is a, c, g, or t
  misc_feature (145)..(145): n is a, c, g, or t
  misc_feature (182)..(182): n is a, c, g, or t
caagaactcaggggaagtgaaccatttggtgaagaatctactaaaaatacgggctttccgcaaacgaaggatgaatggaaaatgtaaataaaaagaactggccagtgtatatcagatgtttaactataaggaccagaacntaagnagtggagactatttgccatagaccacaatgtaaattntttaagtgaggaaggaaaaatcaggaatcaaaaggggccaggtgcagtggctcacatcctataatcccagagctttgggagttcgaggcaggaggatcacttgaagccagttttgagaccagcctatgcaacacattgagaccctatctctacaaaaaatagattagctgggcacggtggtgcatgcctattgtcctacctactgtggaggctgaagtaggaaatcacttgagcccgagagtttgaggttacagtgagctatgattataccactgcactccagcctgggcaagagagcaagaccttgtctcttaaa

SEQ ID NO: 713850 - DNA, 302 bp, Homo sapiens
catctgcacaacaaaacaagttgcccacgtgttcacacctttgaacaagagtacaaaaggtctgagacagagtcaatcaggcaagacaaagaaatcaagggcatgcagatcaggaagcatgaagtcaaattatccctgtctgcacatgacaggatcaaatatatagaaaaccctaaactccaaaagtggcaccaaagaaatcttaggactgataaattcactgaacttgcaggatataaaatcaacatgcaaaaatcagcagcatttctatacaccaacaatgaattagctgaacaagaaat

SEQ ID NO: 713851 - DNA, 447 bp, Homo sapiens
  misc_feature (2)..(2): n is a, c, g, or t
  misc_feature (16)..(16): n is a, c, g, or t
  misc_feature (29)..(29): n is a, c, g, or t
  misc_feature (53)..(53): n is a, c, g, or t
  misc_feature (74)..(74): n is a, c, g, or t
  misc_feature (80)..(80): n is a, c, g, or t
  misc_feature (140)..(140): n is a, c, g, or t
  misc_feature (201)..(201): n is a, c, g, or t
  misc_feature (215)..(215): n is a, c, g, or t
tncgtggccttttccnggttcctaccccnacttggccccctgtcccttatggnggtattttccttaagggattnctcccngatgtaggttggtaggtagggtttccaccaaggtactggaaattaccatagaccgtatangattcgccatcttaacctggaaacctaaacctacttttaaattgtccgccttatttttaanatgtgtgagatatntgtggtgacacagtgaaatatactgaaatgcataatatctagttgttccatatatgtttttaaaataaatgcttcagcaaatctgttaactatttttgtaaatctcagcattcattcttgctttttggaataggagcaagatttttttttttaaagagacagtttaggaaattttagacgaatcctcagaattatttgttgtggacaccaaccactgtaaaaatacctaaat

SEQ ID NO: 713852 - DNA, 413 bp, Homo sapiens
  misc_feature (383)..(383): n is a, c, g, or t
ttgcatctgcctcataactatgtatttggaccagagtcaagggaagaccagtgaacaccacaggatgcaggcagtacaacaaacaaatgaagttcaaggagcatccatccagacgtgatgccctccgtcctctctgtgcatcagagcccaccctcctcaccccacagactgaccacaaacaagagcctcaacctcatccgtccagtgtttctgcttctcctgctcttcccacctctaaagcactcttccaggggacagagaactccagtgcacatcagctcgctcccaagcctctgcagaagccttccgaggactggcagtgcccaccgctcgctgctggctgggttgaagggcttatatgtgtgttaggcaggcttggggangaagctggaatgttgcacttggagtttcta

SEQ ID NO: 713853 - DNA, 905 bp, Homo sapiens
atggtccgggtggacctggatcaagctgcgggcgtcgggcgcgggcaaagccatcggcgtcctgagcagcggcggcgacgcgcaatggcatggaacgctgctgtccgggctgtgacgcgcatgggcatttaatgtgggtgccaagagtcttcctcatctacgagggctatgagggcctcgtggagggaggtgagaaccatcaagtcaggccaactggctgaggcgtctccaacatcatccagctggtgcggcacctatcattgggcaggcgctcgctgccaggcctttaccaccagggaggggtgctggggcgggcggtctacaacctggtccaggcacggcatcaccaagctgtgcgtcatcggcggggatggcaggcctcactagggtgccaacattcttctcgagcgagtggggctgcctgctggaaggagctgctggcgggacggtagagagtcgtcacgaggactacagcccggaggctacatcgcaccctgaacatcgcgggcctagtgggctccatcgatagacgacttctgggtgcaccgagtagtgaccatcggcacggactcggcctccaccgcatcttggcaggtcatcgatgccattacccaacactgctcatgagccaccagaggaccttcggtgcttggaagtgatgggccggcactgcggggtacctggcgctggtatcttgcactgggctcaggggccgactggttgttaatccccgaggctccacccgaggacggtgcgagaacttccttgtgtgcgaggctggtggagactcggagcggggtccgactgagcgtcatctcttcgctgggggtgcctggccggaggggagccttcgtcttggggaggctgtggtcaggtggctgccccgtttgtggcttgggggggcc

SEQ ID NO: 713854 - DNA, 263 bp, Homo sapiens
catcccagacttgagaggttgagatgggaggattgcctgagttcaggcagtttgagtccagacgtagcacatacggcgcaaagctccgtctctatcatccacatactaaacattagccatgtctggtggcacacgcctgtggtctcagctatttgggatgctgagattggaggatcacttcaaccttgccaggctgaggttgcggtgaactgagatcgcgccactgcactgtatcctgagctcgaattcttcttaattgataa

SEQ ID NO: 713855 - DNA, 1964 bp, Homo sapiens
  misc_feature (1435)..(1435): n is a, c, g, or t
  misc_feature (1904)..(1904): n is a, c, g, or t
gctcatctaccccatgatcctcgtctctccggggcttcccatggccgcacgacagtggaccaggggaatgtcctgacgagtgcgtgcagcacactgacgattcacatcttcaggcgtagccgcatggcactgatacatagcatcaggagctcttgctctatcatagggcggtgacggcgtcactgatgaggaggaagcgggcctccgggtgctgtcatcgaatcctcgcgaggctggtgcatgctacgtgtgcctaacgagccatccaggtacgtctgcacgctttgagctcacacgcctgactgcgggcgcctgagtttgtcgtctccctcttgcgatgtcccctgttgcgtgcgcgtgctatgcctcacgtctcatcacgcagcatcatcgcgtatccggtattgataagcacgcaattgtcgtcgtgaggcataccctcggaacgcttagatgccttacggcgtttagcccctgtcggatctaggcaccaccgctatctcatctaagaggttcacattctcaggcaaacagcaaagggcacgcaaatcgcggcgcgccaatggctttcgcacatggggaaccctctccagaatttgaacctgtccgtatcggccccaacagcgttttccacttcactagggccagcccgatagtcacccagcaagccctcggcatgaccgacgtcacgggacaacccacacgagctacggcctggcgcaccctggaccgcgggaaggtcttggtcggtagggcttaggcgtttggcctgtcacgacatgccatcactgaccacgctacccgtgacatgtcaccactacacccctgacctttttctcgggagagcggcgccttcggtttacactgaacggtcctaagtgcacgggagttccctggcgggcaagcccgtgggagctaccccgttggggcctgtgtgccggacggcacccagcatttggccccgaaccctccacgaagctgggacgcactaacggtccacgggccaagccgtaccctacgctggccggcacagccgccccggcaagcatgagggcccttggggcacggcggaaacgcaacctccgctctgtatgtcccacactcccattggccccaaggggccggaccgcacccttcacatttgcacacctcgcacgcggaaagcaagcgttcgcccattgggaagggccgcggcattgcacgtatagccggtccccgcaagggacgaccctagggcgtgttgcagctgggggaacacggcctggcggcctcaaccacgggtgcgcgcccgcgcaccgcaccgtggcctggtgttcatcacttcagccctactgggctgtcccctgggaagagcctctcgcacgaccacagacagccaacaccggctacccacgccgcttgcaagctggccacccggcacacagtccttcctttncttcccctgtgcgcacggacaccacgtctggacccccgacacgcacgtgaggaattcgcgccgtcacgcctgccgcagcgcgcgacaccatcccacgtctacgcacagcccgacatctcctccgcggtcacacatagtcaccgcctcaccacccaaatcccactgaacctcatctccccccctcactaccccacactgcaccactccccgctcccccacctacaacctacaaccgtgcctcgcccatataccaattccgctcatccaccactaccagcacaattacatcccatcaaccccccctcactccatcactactacacattccctactcgccttataacactcaaccctgaatcatacccactacactacccgagttccacaaccaccgccgtcatcatgctccccccttctcctacaaatctctgcccaatcacatccgctcgccaccccttcactcgcatcntacatacactccactaccgcagacgtactatcacactaatatgtcgactactatactcac

SEQ ID NO: 713856 - DNA, 752 bp, Homo sapiens
agcgcggctcgaatccctgcccgcgagttttgtgtttcgccccctcccctggggtcttgcttgttcgtcccccccgcggggagttccccgccggggggtcccgttacttcactagaaactccccgggtgggtctccccactcccgctatatctctctgtgggggtgcacccccggcagcgggttgacatttctcctgggggcaacaccctttgtggtcccgggagccgcttatgctgccgcccctcggccgtcttcgcccccggtaattgttttgtgcccgcgcaatgcacagcagcagaagtggggtcacaagggtttgtcaacccgaggcgaacccaattggtgggcgccataggcccaccactggtggcccgcatgtgtgttttccgcacaaacagaggcgcgcacccacggcgaccattcgcttcgcctcttctgtgttgtggcgggctttccgccccccttgggttgacactgtacagcgtgggtcatatctcgggggccgttttttccaacctagtccgaagggatcgatctcccacgtgctcttgttgtggagtttcttcaacgcagggatgggcccaaccttttttgagaggtgccaccaccatcgacagcgtctcgaagtaaagttccacttttttccacgctctccaccagtggtcaccaagacccatgtctttcgaggggcgaaatttgcgtcattggcctcccctgaccaatacagggcgtcctcccaaagtcaaaaaca

SEQ ID NO: 713857 - DNA, 223 bp, Homo sapiens
cgggggcggaccgggtgggggcgggccagcgggggcgggactggaacggagccgtgcggcccgcgcgctcgcagtctgtctcccgccgtcccacgcacgcgtccggctcacgcgtcggccgcgggatcggaggttggcagctataggcgatgtgtcagactgatagctcactgtcccatcgacgatcctatagagcgcaggtctgaatgacatccccccccct

SEQ ID NO: 713858 - DNA, 137 bp, Homo sapiens
agtatgagctcaacagagtgaggtgtatcgcgtgctgacgcccttagcaggggcttggggcagcccagcctctcctccacccagaccaagatgccttaggagctgcctgcgcttcttccatctgagaaagcaccctc

SEQ ID NO: 713859 - DNA, 672 bp, Homo sapiens
  misc_feature (541)..(541): n is a, c, g, or t
  misc_feature (574)..(574): n is a, c, g, or t
  misc_feature (592)..(593): n is a, c, g, or t
  misc_feature (602)..(602): n is a, c, g, or t
  misc_feature (648)..(648): n is a, c, g, or t
  misc_feature (653)..(653): n is a, c, g, or t
  misc_feature (656)..(656): n is a, c, g, or t
aaatgaatgatccaaaacctctttagagactggatgttggatgcagaatcctaggaggttctagccacacctgtcccttgtccttcagaggctgacatccatgtttcatccccccactacctcttgcccctaaagccaccccacctcatgcaactctgaagctctttggccaccagaggattctcagggctcctttgtcctggactgtggaactgggggcagctggtccctggggtctctgaagtcagtgtctccctcactgctcactgccatggtgtctctgcctctgcttctctgtgtccctcatcttcctcccacttcattctgactggcaagccctgtcctgcacagcttcttcccccacccctaggccttccccagacactccctctaactaggctggctgttctgttcccttcccgctaacactgtggcctggcccacctcccaggaaataggaaaggtgcagaaatcacctggagttgccactcctgccaggcttcatctcgagccaatgtccccaggtcactaagagaatgancttccactgtattcccatccagggctctttccntttgtgaggctgacctgnngacaagacnatgggacagggataggcagttcctccatccattcataattgccagncaagntcntctggcctcctgcaga

SEQ ID NO: 713860 - DNA, 296 bp, Homo sapiens
  misc_feature (69)..(69): n is a, c, g, or t
ccagttcagtggatcatgcttgtaatccgcagcatgttgggaggctgaggagggtggacccacttgagncccaggagtttgagatcagtctgggcaacagggtgaaaccccgcctccactaaaaatacaaaaaaaagaaaaaaaaaaagaaaaaaatagctggccattgtgacatatacctgtaaccgtagctactctggtggctgaggcttgagtatcgcctgggaggcagaggttgcagtgagccaagatggcactgctgcactctagcctgggtgacagtgagactgtcttta

SEQ ID NO: 713861 - DNA, 370 bp, Homo sapiens
  misc_feature (353)..(353): n is a, c, g, or t
ttccagttattatgaaaatattttaaaatctctgcttctgtgaatttgttgaattgctgattttaatgatttttcttatattaaaaaaaaaaacacaactgtgacccttttgtatagcaaatgctttccccattgtccacaatatatatttgccttgtatctcttaggattcttttgtttgcaagtacctgaaagcaaaatctcaaactggcctaaatgataattgacttctgtaactaaaacgtccagagctaggggctgggatttaggataaggctatattgctttgggctccattaattaatgtccaataggtgtccccaaaggaccccaattttttcccttccattctngtctttagggggggtca

SEQ ID NO: 713862 - DNA, 735 bp, Homo sapiens
  misc_feature (28)..(28): n is a, c, g, or t
  misc_feature (36)..(36): n is a, c, g, or t
  misc_feature (53)..(53): n is a, c, g, or t
  misc_feature (95)..(95): n is a, c, g, or t
  misc_feature (142)..(142): n is a, c, g, or t
tgaatggcttggcaatggttttggtggnccagtccngatttaaggtaaaaccngactggtcataaaagtgggtacgggtctttattaaagcaacnagttccccagttgtataccatgctacccacggctctcccctttctcnaagataaggattgggacttaattagcaatgttttactttccataaatagggcatgtcacctcaaacctactaaatggttttatacttagatttatataactgggcatatgaatatgcttaaacactgggaaaattctatcactgtctcagaaacaagaagactcaaatgtgtttcagtttgtgttcactggcctctttcaggtcatggctaaccaccaggaggcaactgtctattcttgacagtgcagttttaattagaattccctacatcaaggatgttgccttttactattgaaaggcatttactgtggtttatgtatgatatcaaataaagagtatttaacacttctttatagttgatctgcaaattaaaatgcttttagaaacaagcaagttaggccttttaaattctctattttctaagactaagttgtaaatcagaattgtccttaaatacccactcagaaacacacataactggaattcgattaggaatggcactctttgctaacttactagatggaaagatggaaataaaggaaatagtttgtatcagcagacagtcagaagataattaaatcaatcccaaatca

SEQ ID NO: 713863 - DNA, 1489 bp, Homo sapiens
gactagttctagatcgcgagcggcgcccttttttttttgtatttttttatagtggaaaaggggtattcagggtggcccagtgggtggagggcagggggggtgacactctctagagttgcgacaggggctttatcccctcgcggggcatcaagcaagatagcatctccaactcatcagccactttcgaacttaacgagggaactataacgttttgcgagtaaccattggcgagtcatagttgaattttgtgtggtaaagattggagcctcttcacatattgttcaccgcaggtgttgggtctctaaaacctcgcgtgaaacccataataaattcttccttattcgtaccagcctcccaagaggtgcccgagggttctacgaaacaatgtggagacccaagcgtgggccagtggtcaatagaacagtgtaagcacatatcaccaacggtgggccaatttcatcacgcgtggtcggtggcacccagggggggccacgcccaataagaaacaaagagaagagggcctccccgaaagataaactctcacctgtatctcacaaaagcgcgcgtggtaagaccctctgtggggaaatatactctccgcggtgtgtgtgcacaggcttaaccaaaaggactgtgggaattctacaatcgatgtggtgaagggagatgtatccactgctcacggggtgtctccaccaatttggtcgcacctcaatcttaatccaagaagacaaggtggtgagggggggtacaacattccccgtgtaatagaaaccgccgtggagaacattccagcggggggcaaatcacacaaataccctagctggtgacccacaagaggcccgtcaaaggagggaggcgggtcctcaacaaatttccaaagacaaataaagtcaccgatgaaactctatagagaagcaagcgccccactatgagctcgcaaaatacgcagagcggtatttaacccaaaaaggtgacagacaatagggcccgccagagggaacactgactgcacaacgccacctaacacaacaccccgccttttggtgggcgcacacacaagagaagcatctcatgtcgaggcgaaaccaactaatacacactttgggcgggtaggagaaggaagcccgcaacactcatggggagacagaacaaaaaaacgccgcggacccacccaaataaaaaaattttcacacccagcgagcgaattactaacaatagagggaacccacgaggggaggatataccacccaggacaagcccaacatacaccaaggcgggtatacacgaaagaacaaagcgaagacctcgttgagggagacagactagaggagcaccaagagcggggatgcccaccagccgactgaaccaaacacagaacacatcaagacggaggaacgacgcaaagaacaaacgaaacaacagcaatcgtgaagaggacacgacagtagtgataaacaccaagcaggtcaaccaaacgtttgcaaac

SEQ ID NO: 713864 - DNA, 411 bp, Homo sapiens
ttgagctcggtacccattcgtgtcgacaaacccacagagtctaagagctaccaaacctgcattaaaagatttcggtcgggagcgacctcggagcagaacccaacctccgagcagtacatgctaagacttctccagtcaaagcgaactactatactcaattgatccaactaactatgaccaacggaacaagttaccctagggataacagcgcaatcctattctagagtccatatcaacaatagggtttacgacctcgatgttggatcaggacatcccgatggtgcagccgctattaaaggttcgtttgttcaacgattaaagtcctacgtgatctgagttcagaccggagtaatccaggacggtttctatctacttcaaattcctccctgtacgaaaggacacgaatgttca

SEQ ID NO: 713865 - DNA, 201 bp, Homo sapiens
ggtcaagaactcattgtttttgcacatgaacaatttgggacccgaggacacggctgtctattattgtgcgagagaagggtggagttgtagaactaccagctgtcctgtggactcctggggccggggaaaccctggtcagcgtctcctcaccatccccgaccatgccccaagagtcttccctgctgagccatctgcagcacc

SEQ ID NO: 713866 - DNA, 536 bp, Homo sapiens
  misc_feature (16)..(16): n is a, c, g, or t
  misc_feature (18)..(18): n is a, c, g, or t
tgacacttgactcctnancctacatctatagcttggcacagagagattcacgcaccctcaagagtgtgggtgagacatatacagcctgttagacctgaaggcagatggctcttcttaaggccaataaggatctcatttccgcaggattgaaggagttcagcgttctgctgaatcagcaggtcttcaatgatcctctcgtctctgaagaagacatggtgactgtggtggaggactggatgaacttctacatcaactattacaggcagcaggtgacaggggagccccaagagcgagacaaggctctgcaggagcttcggcaagagctgaacactctggccaaccctttcctggccaagtacagggacttcctgaagtctcatgagctcccgagtcacccaccgccctcctcctagctcagggacccagcccctcctctctgagaaactctgaccttcatgtccttaggctgtgctcctgccactctaccctgacacctcaataaagaccagtgctggttttgttggaaaaaaaaaaaa

SEQ ID NO: 713867 - DNA, 769 bp, Homo sapiens
  misc_feature (16)..(16): n is a, c, g, or t
  misc_feature (18)..(18): n is a, c, g, or t
tgacacttgactcctnancctacatctatagcttggcacagagagattcacgcaccctcaagagtgtgggtgagacatatacagcctgttagacctgaaggcagatggctcttcttaaggccaataaggatctcatttccgcaggattgaaggagttcagcgttctgctgaatcagcaggtcttcaatgatcctctcgtctctgaagaagacatggtgactgtggtggaggactggatgaacttctacatcaactattacaggcagcaggtgacaggggagccccaagagcgagacaaggctctgcaggagcttcggcaagagctgaacactctggccaaccctttcctggccaagtacagggacttcctgaagtctcatgagctcccgagtcacccaccgccctcctcctagctcagggacccagcccctcctctctgagaaactctgaccttcatgtccttaggctgtgctcctgccactctaccctgacacctcaataaagaccagtgctggttttgttggaaaaaaaaaaaatttccctatataatacattattctttcattctatatctatatactttattcttacaattaaaaaaaaacttttgggccccttgggcccaatcgacttataaattcgacaaagtttatccatgcgtccgaaattcgaactcaattggcccaatttcccttatatgggagcgtattacaatttaattggccgcggtttcggttgacctggtcccttgggttacccattttcgttt

SEQ ID NO: 713868 - DNA, 1025 bp, Homo sapiens
  misc_feature (16)..(16): n is a, c, g, or t
  misc_feature (18)..(18): n is a, c, g, or t
tgacacttgactcctnancctacatctatagcttggcacagagagattcacgcaccctcaagagtgtgggtgagacatatacagcctgttagacctgaaggcagatggctcttcttaaggccaataaggatctcatttccgcaggattgaaggagttcagcgttctgctgaatcagcaggtcttcaatgatcctctcgtctctgaagaagacatggtgactgtggtggaggactggatgaacttctacatcaactattacaggcagcaggtgacaggggagccccaagagcgagacaaggctctgcaggagcttcggcaagagctgaacactctggccaaccctttcctggccaagtacagggacttcctgaagtctcatgagctcccgagtcacccaccgccctcctcctagctcagggacccagcccctcctctctgagaaactctgaccttcatgtccttaggctgtgctcctgccactctaccctgacacctcaataaagaccagtgctggttttgttggaaaaaaaaaaaagaaaaaaaaaaaaaaaaaaaaactaaaaaaaaaaaaaaaaaaaaaagaaaaaaaagagggggcggcgccgctcaaaagataacacacaacagggagccaaaaatataagcagacacagacagatgtagagataaaaaggggcgacccacaaagaaaagagagcaagaacaacgaaaagagaaagcggagcacaataataaaacacgacgcgagcgtcgggcgaaaaccacacgagcaccccgaggagacctaagggacagaggaacccaccaataatgccggggaggggtgaacaccaacaaacgggggaaacacaccacctcgcgcgacacggaataaggaagcgccccaggaacaaaacactgatcgcaagttcatagcggggatgcaacgaagcgtgcggcaaaacacagagaagaaaaagagcgagggacgcaacgcgacgaaaatacgcgccacagaactagagcaggaggcgaacaaacacag

SEQ ID NO: 713869 - DNA, 229 bp, Homo sapiens
cttttttttttgggggggggggggggggggcctcttgaggcttttttttttttccaaagttagtttgtgatccccgattccctcccattgaagtgtttctttgtccgaattttttttcctttgtgtgccctgctagattccctgggtggagctgttccttttttttttgtaaattttccccacctttacataaaatatttcataataaaatatttttgcatccccctta

SEQ ID NO: 713870 - DNA, 751 bp, Homo sapiens
  misc_feature (16)..(16): n is a, c, g, or t
  misc_feature (18)..(18): n is a, c, g, or t
tgacacttgactcctnancctacatctatagcttggcacagagagattcacgcaccctcaagagtgtgggtgagacatatacagcctgttagacctgaaggcagatggctcttcttaaggccaataaggatctcatttccgcaggattgaaggagttcagcgttctgctgaatcagcaggtcttcaatgatcctctcgtctctgaagaagacatggtgactgtggtggaggactggatgaacttctacatcaactattacaggcagcaggtgacaggggagccccaagagcgagacaaggctctgcaggagcttcggcaagagctgaacactctggccaaccctttcctggccaagtacagggacttcctgaagtctcatgagctcccgagtcacccaccgccctcctcctagctcagggacccagcccctcctctctgagaaactctgaccttcatgtccttaggctgtgctcctgccactctaccctgacacctcaataaagaccagtgctggttttgttggaaaaaaaaaaaaattttataaccttttaattatatatattatctattttattctataatacttaatataaacctcacttgtccaattactccctaaaaaaaaaaaaaacattttggcccgcttgggccatgcaatttttaacttggcaaacttttttctagggcgccgatttgggcctattttggctttccccctatgggaggttgttttttacatgggcccggttt

SEQ ID NO: 713871 - DNA, 538 bp, Homo sapiens
  misc_feature (16)..(16): n is a, c, g, or t
  misc_feature (18)..(18): n is a, c, g, or t
  misc_feature (506)..(506): n is a, c, g, or t
tgacacttgactcctnancctacatctatagcttggcacagagagattcacgcaccctcaagagtgtgggtgagacatatacagcctgttagacctgaaggcagatggctcttcttaaggccaataaggatctcatttccgcaggattgaaggagttcagcgttctgctgaatcagcaggtcttcaatgatcctctcgtctctgaagaagacatggtgactgtggtggaggactggatgaacttctacatcaactattacaggcagcaggtgacaggggagccccaagagcgagacaaggctctgcaggagcttcggcaagagctgaacactctggccaaccctttcctggccaagtacagggacttcctgaagtctcatgagctcccgagtcacccaccgccctcctcctagctcagggacccagcccctcctctctgagaaactctgaccttcatgtccttagggttgttgcttccttgccattttttacccttggacaccttnatttaaaggaccagttgtttggttttttgttt

SEQ ID NO: 713872 - DNA, 828 bp, Homo sapiens
  misc_feature (308)..(308): n is a, c, g, or t
ctgttttcctagcgcaaggagcacgcagtgaccctgtagcagcatggcgccagccgaatgcatggtctgaagccacttccacaagactgcagcggcgcgtggcacgtggtcaaccagctggcccgtaaatccgcagacgtaaggcccggcaagcaggcgcgcgatcgcccgcgctccggtggtccatccggccatcgtgcgctgcccacggttcggtaccacacgaaggtgcgcgcgggccgcggttcagcctggaggagctcagtgtggccggcattcacaagaaggtggcccggaccatcggcatntctgtggatccgaggaggcggaacaagtccacggagtccctgcaggccaacgtgcagcggtgaaggagtaccgttccaaactcatcctcttcccaagtaagccctcgtgccccaagagagggagaccagttctggctgacagaacgtgaaacgtgcgcacccagctgaaccgtaccgggttcatggcccggtccggaagcgtctataagaagggagaaagctcgagtcatcacttgaggcaggacgaagaatattcaaagcccttcgcgtaatctcccgttatgcgccgtgccaaggcccgggctctgcggcaatacgggcaaaaaggagccaagtgatgccgcaagaaccaggattgttcgacacgacaatatagaggcctccttggggacttgggaagtccacaaaggctacaggcggctgcattctgtatccagcggccaaggtcccccccaggtccaactgggcgcgcccctagttccggaccgtttcggcccagctatagttagcccttcacaag

SEQ ID NO: 713873 - DNA, 110 bp, Homo sapiens
gagagtgacctccattgagaaggctgaatgtgacttgcctgattaaaaggaccgagaggccaatgagtgaccatgtcctgtggagatgtagatggtgcatcctgtggtga

SEQ ID NO: 713874 - DNA, 513 bp, Homo sapiens
  misc_feature (85)..(85): n is a, c, g, or t
gaagtaatggtggagttgatggaaacaacgagagacacgggatacaatgcagaggaaagagaatgtgagagttggtgctgtggcntattctagtattcccgaatcccattgctgaccacattctcccttgccaactgcctctccgcaaccccccaggtcttcaatgatcctctcgtctctgaagaagacatggtgactgtggtggaggactggatgaacttctacatcaactattacaggcagcaggtgacaggggagccccaagagcgagacaaggctctgcaggagcttcggcaagagctgaacactctggccaaccctttcctggccaagtacagggacttcctgaagtctcatgagctcccgagtcacccaccgccctcctcctagctcagggacccagcccctcctctctgagaaactctgaccttcatgtccttaggctgtgctcctgccactctaccctgacacctcaataaagaccagtgctggttttgttggaaaaaaaaaaaa

SEQ ID NO: 713875 - DNA, 357 bp, Homo sapiens
gggggaccctttttccccccccccttttggttttcccggttcccttggagggagaccctttttccccccggtggcccggcccccttggggaaaatttccggaggtgggccggaatattggggtcctaaaaatcctcccccccccgggtggggggggaccccaggggaaattttttcccccttttttttttaatttgaggaaaacaccccccctttctctggaaggggctagggaaattccaaagggggggaccccggggggcctttcccttttcccggcccccccacttttaaagccagcccctttttttttcccctttgaaattccccaagggccttaaaataaattttttttgga

SEQ ID NO: 713876 - DNA, 392 bp, Homo sapiens
tgctgaatcagtcttcattacctcccaatctgatgaaacgatataatatagtaacatttcccagaatggtggagtacattattttatcgtatatttttgtccgagctatgagctgacggtggtattgcttctctgcattttatcagtgtgtacatctagtgcttttcatgtgtcatttgtgagccactaatgcaaagttaccatttgaattcagtcaggctacagggtggtgtcagtctaggtctttcaggtggcggagaaattggttagggctcccattgccaaatgcaagcagatagcataacctgactgttatgttccctcaggcagcatgctttgggacaactctttggcctgggggacatctgtgtcacagtccagaattgccgcga

SEQ ID NO: 713877 - DNA, 1224 bp, Homo sapiens
  misc_feature (365)..(365): n is a, c, g, or t
gatctcgccctccggcctctccttttttttctccccccccgcttacggggccccctcccgccgcttgacttccaccgggccctccggccccgcctccgggaacccaccttggcgattaaaagcaaccccgggttttagaaaagcaccagtggggaccctctttctttgaaccctattggccaaactcccccgggaagcacacaactttattggggtgccctttttggaaaatgaggagaatgggaaaaggttttaatttttttaaaatgggtgggtaaattaatgggaagaaatcgtcccccacggtataaagaaaccttgtaagggggtctcagaatttgacccctctcgcccctccttaggtnaattccgaatcccagatctccccgaaagagaatatccctgggtttaaatttcacgcgaacagggagtttatacccccccaatgtctcaacctctccctgagaaaacgacccacgcgaccacgttttaaataagaaaacgcgctttttaaacacaccacgccccattgggagagtttataacaccccgttttcctcccacgagattattctctccccctctcccaacctctctcaacagaaaagaggaataaaataaatccctcactggaacacccccaagacttccccgccctcttctggagcccactttttggatatttctctccctcttactcgtatagcccccagccaatatttaagccgcgtctttcttcacacctccccactcccattgtgggagaccccatatgtctctactccacaagagaaagagaagagatttccccagataaatctctggtagacagccttctctggtcccacagagaatttactccccaggagaagaactccacatggacctgttaattagagggggaaccggtcttaaaccatatttcttaaaagatggtgttcttgccagatgcttataacagttatatggtgccaccttgggaatagcccaattggagccaccataccattggaacaccatatgttgctgtccaccccaagggactttccagaaaaattgcccagagaaatgggagagccgtgaaacatcccgtttgtgaaaactgagaaatccggctcgccacttccccatcttttcctccgtttgtccacgccaattgggatgaacgcccacccaaagatctttgcttaataagaagaaaaaagaggccacaggagaaaacga

SEQ ID NO: 713878 - DNA, 452 bp, Homo sapiens
  misc_feature (26)..(26): n is a, c, g, or t
tggttttttcacaatcttctcaacanaaaacttcatctatcctgccaccctgcgcatcttgcaggtagccctcttgttttgtcacacacatccttcagcagctgggaaacgaacacgaatccttcccaaccatgatgccaataaacaattcatcttaaaaatgttagcctctaactggacgaaaaattctctcgccatcttaataacaaaataaactacaaattcctgacccaaggacactgtgttataagaggcgtgggctcccctggtgcgtgaccaaatcagctgcactggcacttacaccccatctgcatgcagcacagaagggtgtgaccatgccctcaacaccactctagtccccactgaacggcaactgagactgagagtacctggagattctgaagtgcctttgctgtggttaacaaaataataaagattatagtattcaactc

SEQ ID NO: 713879 - DNA, 104 bp, Homo sapiens
acacgataaccagagccaagataaggctaagcggcacgtcgctcacccgtatagtcgtactccacgcgacccagcacccactcgcgtagagcctgaacttcaca

SEQ ID NO: 713880 - DNA, 211 bp, Homo sapiens
ccaccccttggcttttgggaattgcccttttgggcctttggggtttggaccctgctttgggtcattggtgaaacttggaaggggcagccccccctggttttttggttttggggttgccaccccccgggtatcccttttaatttttgggggggggtcagtcccgcctttactgtttttccaaagcccggggggggtcccccttttttttccc

SEQ ID NO: 713881 - DNA, 388 bp, Homo sapiens
catagtcgattcttgagctatccccctttgttgatggcagtggtcgttgcattaaccatgaggctctgctatcgagatggcacgtggataacaccttaggctagcacaaatacttcgagatcctggttctgctgcatagactgacggggagcatgtacctatgttgctcaagcatgctgaggccgccactcttgctgctgctgtcttagagggaggctctatgaagctctcaggtgtggctagctgaccagctgccggagaaaagctggctaccattgcacctttcccaagtggttgtgtctgtatttggtcatgctgtggggtcacctgagtttctggagaagatcaacgcttgggagggatgtgccagctgtgttcgtcacgttca

SEQ ID NO: 713882 - DNA, 496 bp, Homo sapiens
ataataaggactgacacccctttttttttggctgccaaaaaattctaagaggaagactttaaacttacctttacttatcacatgttgataatagggataaactgggaataaccttaatgttcaactataaaaagaagattatttcatttatttgtttgcagtctctcttttttatagaatgtaagatttattttggtttgccttcacatgtgtaacatgcaacacaggacctggcctagagttttcatttaagaacatttgtggaatgggtgaagggatgaatgatactggcatttaaaaatactttacttgaaggcagcatgctcgttaagagtcatcaccactccctaatctcaagtacccagggacacagacactgcggaaggccgcagggtcctctgcctaggaaaaccagagacctttgttcacttgtttacctgctgaccttccctccactattgtcctatgaccctgccataatcgccggtcacgagat

SEQ ID NO: 713883 - DNA, 1060 bp, Homo sapiens
cagtggatgatgcacaggaaattcttcactccagatttccaatgccaagatacattgacactgaacatggaggcagccaggcccgtttcctcctttcaaaagtcaacccttcacagactcataataatatgtatgcctgggggcaggagctctggagcacctattcttacagatgatgttagtttacaagtgtttatggatcacttgaagaaacttgctgtgtccagtgctgcttgcaagtgctaataatgttacaagacacttaagaagatgacataatattcaaatttcattttttcctttttccatttatctgtggcaaaccaacagcatattgctctatatttacagtcattacgtatggttcgagacaacatatggcaacatgttcacatctgtcagattaagctggcacatcctcagtgcagagcaatcaagaaccaatttatcatcggcttaccacagatgttatacgctggttctacgaacatttgaacgtctttataactttacattcatgtttacactacacacaaatacgagtctgcctcgtaccacaagatgtacacctcattcgctatacttgcagacagaccccaaactggccactgaacttactggctcacctattaaacactggtccgttaatattagacagaaagcaaagaaacattagtacgaatcaagtgtgacacattcaagctctacgtcgcatcattactggaacaccagccactcatgaatacacactgcacaggacataccaggaaagacacatacaccacacacctggccaacaaaactggaccacaaaagcgcaccagaaggacagaaatggcacgcggcaactcggcacacacgcgcgacgacacggccagggccacaacccaggcccgagacaaggcagtctcaacaagcacactctcaaccgacaaataaagagcccaacaaggacgacgcgagaacaacaccagacacaggactacacaacacagaaagactccaccaagcgacaacaacacgaggagcctgcaggtaccctatcttgaccatcgtacag

SEQ ID NO: 713884 - DNA, 1024 bp, Homo sapiens
  misc_feature (316)..(316): n is a, c, g, or t
  misc_feature (649)..(649): n is a, c, g, or t
  misc_feature (679)..(679): n is a, c, g, or t
  misc_feature (684)..(684): n is a, c, g, or t
cagccttcctgagcacctttccttctttcagccaactgctcactcgctcacctccctcctctgcaccatgaccacctgcagccgccagttcacctcctccagctccatgaagggctcctgcggcatcgggggcggcatcgggggcggctccagccgcatctcctccgtcctggccggagggtcctgccgtgcccccagcacctacgggggcggcctgtctgtctcatcctcccgcttctcctctgggggagcctacgggctggggggcggctatggcggtggcttcagcagcagcagcagctttggtagtggcttngggggaggatatggtggtggccttggtgctggcttcggtggtggcttgggtgctggctttggtggtggctttgctggtggtgatgggcttctggtgggcagtgagaaggtgaccatgcagaacctcaatgaccgcctggcctcctacctggacaaggtgcgtgctctggaggaggccaacgccgacctggaaggtgaagatccgtgactggtaccagaggcagcggcctgctgagatcaaagactacagtccctacttcaagaccattgaggacctgaggaaccaagatcattgcggcaccatatgagaatgcgcagcccaatttggcagatngacaatgccaggctggcagcgatgacttcnggacnaagtataagagctagaccttggcctggaggcaaactgtggaggcagaacgtcaatggcctagagccgggagaacgaaaaaagctgaacgctggcaaggacatgaccgtgaagatgcagattcagaaagagccctagaagggaggaacgtggacctacccatgaggaaaaaacacacagcaaagacaggagaagtcaagggcacagaagacgggtcaacaccggagcgaacaaatgagacacggggaagatgggagagctgaaacaggacgagggaccccgaacccgcaaatcctgaacagaaagacgtgaccagaacgaccgaaaagcagaaaaaaaaca

SEQ ID NO: 713885 - DNA, 1098 bp, Homo sapiens
  misc_feature (316)..(316): n is a, c, g, or t
  misc_feature (802)..(802): n is a, c, g, or t
  misc_feature (805)..(806): n is a, c, g, or t
  misc_feature (829)..(829): n is a, c, g, or t
cagccttcctgagcacctttccttctttcagccaactgctcactcgctcacctccctcctctgcaccatgaccacctgcagccgccagttcacctcctccagctccatgaagggctcctgcggcatcgggggcggcatcgggggcggctccagccgcatctcctccgtcctggccggagggtcctgccgtgcccccagcacctacgggggcggcctgtctgtctcatcctcccgcttctcctctgggggagcctacgggctggggggcggctatggcggtggcttcagcagcagcagcagctttggtagtggcttngggggaggatatggtggtggccttggtgctggcttcggtggtggcttgggtgctggctttggtggtggctttgctggtggtgatgggcttctggtgggcagtgagaaggtgaccatgcagaacctcaatgaccgcctggcctcctacctggacaaggtgcgtgctctggaggaggccaacgccgacctggaaggtgaagatccgtgactggtaccagaggcagcggcctgctgagatcaaagactacagtccctacttcaagaccattgaggacctgaggaacaagattctcacagccacagtggacaatgccaatgtccttctgcagattgacaatgcccgtctggccgcggatgacttccgcaccaagtatgagacagagttgaacctgcgcattgagtgtggaagccgacatcaatggcctgcgcagggtgctggacgaactggaccctggccagaggtgacctggagatgcagattgagagnctnnaggaggagctggcctactgaagnagaacacgaggagggccatgcaatgccctgaaaggccaggtgggtgtcgattgtccactgttgcagattggacgcgtgactcttggcggtggaccattaacgcggcattcttgaaccgagaattcgtggaccactaattgagcatgaatgcagcagatagaccggcaaggatgccgaggcagtgtttcttcagcaaagcacggtggatcttgaccgggaaggatgacacacaaaggtaccttgtgtgcagtcggcaagacggacatata

SEQ ID NO: 713886 - DNA, 360 bp, Homo sapiens
attcatcttaaggcacacatatttaaaagtaaagtgaatgaaaccatttgtgattcagatacatagacagaacttccatgtagaaaacaaaaaagaccttgctgggaaacagatgatgcgaaacatggtcaaacatttcacagacgcacaaaaagctcacaatgtaaacagggattaagctgcgtctgatttagccccgtaacatcaaggtttcattttgcgtcagcctgagatctcgctcaaattcaaactgcctgtgatccactcggtcgaggaaggctttccgattcaggtaccccctctttccctcgattatggatggccagttcttcaccaatcccctcttcctccttgaagctc

SEQ ID NO: 713887 - DNA, 1127 bp, Homo sapiens
  misc_feature (30)..(30): n is a, c, g, or t
  misc_feature (49)..(49): n is a, c, g, or t
  misc_feature (345)..(345): n is a, c, g, or t
  misc_feature (831)..(831): n is a, c, g, or t
  misc_feature (834)..(835): n is a, c, g, or t
  misc_feature (858)..(858): n is a, c, g, or t
ccgggacaggatatcacatgaggaaagtcntatcaccccgtaccaaagncacctagaacattggcttcagactcgctcacctccctcctctgcaccatgaccacctgcagccgccagttcacctcctccagctccatgaagggctcctgcggcatcgggggcggcatcgggggcggctccagccgcatctcctccgtcctggccggagggtcctgccgtgcccccagcacctacgggggcggcctgtctgtctcatcctcccgcttctcctctgggggagcctacgggctggggggcggctatggcggtggcttcagcagcagcagcagctttggtagtggcttngggggaggatatggtggtggccttggtgctggcttcggtggtggcttgggtgctggctttggtggtggctttgctggtggtgatgggcttctggtgggcagtgagaaggtgaccatgcagaacctcaatgaccgcctggcctcctacctggacaaggtgcgtgctctggaggaggccaacgccgacctggaaggtgaagatccgtgactggtaccagaggcagcggcctgctgagatcaaagactacagtccctacttcaagaccattgaggacctgaggaacaagattctcacagccacagtggacaatgccaatgtccttctgcagattgacaatgcccgtctggccgcggatgacttccgcaccaagtatgagacagagttgaacctgcgcattgagtgtggaagccgacatcaatggcctgcgcagggtgctggacgaactggaccctggccagaggtgacctggagatgcagattgagagnctnnaggaggagctggcctactgaagnagaacacgaggagggccatgcaatgccctgaaaggccaggtgggtgtcgattgtccactgttgcagattggacgcgtgactcttggcggtggaccattaacgcggcattcttgaaccgagaattcgtggaccactaattgagcatgaatgcagcagatagaccggcaaggatgccgaggcagtgtttcttcagcaaagcacggtggatcttgaccgggaaggatgacacacaaaggtaccttgtgtgcagtcggcaagacggacatata

SEQ ID NO: 713888 - DNA, 356 bp, Homo sapiens
atgcgggcaagctccatctgctgctgtagtatctcaaacagcatggaaagcatgtatcttctgctccgagtgggctgtcaggagctggtcccgcaggatgaacagctaggtgaatcatgaccagaagctggagctcctactactgctaggctctctatgggtccctttagacatctattggcttccatagagtaaccttcctagaaacctctccttccagtcactaggacaagagcttctctatagctggcatcacattctttcaaatttcggttgaagtcacagcttctcctggattcccagaggcaagcctccgacaatcctggtactacagggtactaggaggcccattaacc

SEQ ID NO: 713889 - DNA, 1302 bp, Homo sapiens
cagccttcctgagcacctttccttctttcagccaactgctcactcgctcacctccctcctctgcaccatgaccacctgcagccgccagttcacctcctccagctccatgaagggctcctgcggcatcgggggcggcatcgggggcggctccagccgcatctcctccgtcctggccggagggtcctgccgtgcccccagcacctacgggggcggcctgtctgtctcatcctcccgcttctcctctgggggagcctacgggctggggggcggctatggcggtggcttcagcagcagcagcagcttttgtgtaagttggcttcggtggtgacggatattggtggtgtggcctatgtggtgcttgtgcttactggtagtgttgtgctatggagttgcttggctattgcgtggtgggttttagctgagtaggagtgattggggcttcatggttggagcaaggtcgaagacaggagtagatcgcattgccaggagaccgtcaattgactctgcgcttggcactcgctaccttgtgacgaatggtgcgttgctcttggagcgaagtgtcaacggccgaggcttggaacggtgcacggatccgtcgaccttggtacccatacgtgcagctcgggtcccaagttgcagatcgagaagcacttacgcatgtgccccttactatgcaacagaacacacttctggagggacccgtgacgttgaacctcaggaatcaattatgcggtgccaccaatttgaggaaattgcagcagagcccaattatagcacagacttttgaccgcaattggccagggctggcgccaaggccgggatgacctttcaggagaccaagggtcagtgacagcatttgcatctgtggcccgttgagggtgcacgaattgtttgcactggaccatgacggtccgattgggcccttgcagcccggggtagccttcggaatgaaagctagggacccgttgggcaccagcgtacttgatccgtgtaacacattgccccagtccgacaagtggccctgcagcacgggaagggacagcgtcgggcccgtcaccgcctgaagagggaccaggaaacccaacggaaggggcaagagctaatgggccgaggagcccacgagagacacggctaagagcacccggggagcaggaggcgagggtggaggcagcgcagcaagcgggcgcagctgcgaggcacccagtgagcagagtggaaacccaggcgccccagcgatccctgacacgagcaaaagcgcggaggagcccggagaggaacgcaggagtggcgagacgacagccc

SEQ ID NO: 713890 - DNA, 301 bp, Homo sapiens
cccttcccctccatgggctttgggccacagtatgaacctttgaggcctgtaaattgttttgtactttcttataagttgtaattgtgaaggtattgtgggtttatttgggtcccctccccagccttctttttcgctcccctgccgtccagttattagttgttttccggcgcggaggttttaaaacccctttgggggttttccctttccccctttggttgggggcggtttttgtcctcctggaaaagaataaaaaaaattaaattttaataaaaaaaataatttttaaagaaaaaaagaaaat

SEQ ID NO: 713891 - DNA, 553 bp, Homo sapiens
  misc_feature (318)..(318): n is a, c, g, or t
  misc_feature (356)..(356): n is a, c, g, or t
  misc_feature (359)..(359): n is a, c, g, or t
  misc_feature (368)..(369): n is a, c, g, or t
  misc_feature (371)..(371): n is a, c, g, or t
  misc_feature (376)..(376): n is a, c, g, or t
  misc_feature (385)..(385): n is a, c, g, or t
  misc_feature (389)..(389): n is a, c, g, or t
  misc_feature (392)..(392): n is a, c, g, or t
  misc_feature (396)..(396): n is a, c, g, or t
  misc_feature (400)..(400): n is a, c, g, or t
  misc_feature (416)..(416): n is a, c, g, or t
  misc_feature (424)..(424): n is a, c, g, or t
  misc_feature (434)..(434): n is a, c, g, or t
  misc_feature (438)..(438): n is a, c, g, or t
  misc_feature (455)..(455): n is a, c, g, or t
  misc_feature (461)..(461): n is a, c, g, or t
  misc_feature (478)..(478): n is a, c, g, or t
  misc_feature (483)..(483): n is a, c, g, or t
  misc_feature (500)..(500): n is a, c, g, or t
cagccttcctgagcacctttccttctttcagccaactgctcactcgctcacctccctcctctgcaccatgaccacctgcagccgccagttcacctcctccagctccatgaagggctcctgcggcatcgggggcggcatcgggggcggctccagccgcatctcctccgtcctggccggagggtcctgccgtgcccccagcacctacgggggcggcctgtctgtctcatcctcccgcttctcctctgggggagcctacgggctggggggcggctatggcggtggcttcagcagcagcagcagcaactttgcgctagctgnctttgcgcgcgcgcgcgatatgcgctgcgctgcgcatntgnctgcatgcnntntgcgnctgcctgcncttntgnctgnctgncattgtgcatgcctgnctgcatgncgcattatgnctgncgcaagctgcagcaagnctgcanaaatgccagcaagcctncagangcagctgccctgcgccntgcctaagcatgcgcacaaaaggctgccgctgcctcctgcgcagcgcagcgcc

SEQ ID NO: 713892 - DNA, 535 bp, Homo sapiens
tcttactcaatgactagtagtagaaaaaaacagccagattgaactccttaaaaatttaaaatgttgggccttcagattgcagagacctcctgcgttaaaaaaatgaaaaaattagtggccctgtagtgaaatgctcacaatagcaatgattgtggtagcccctcaagtcctggggttcactaattaccctttaatgaggtcagtctgccccggctttttccctaccttgggaggaaaagcacacaagacagttggagttcaagtggatcttgctgtatttgcaacttagcataactgctttgaaagcccccagggtgcttaattggggcctgggcatttttgtttggggagagactacacacagctcctcattgtgcttgtagaagccactgtgcatcttggaagcattacatgcttttgttgatggtgcatagttttataaactccaaatgagcttattgctttttaaccattgggagagctaaataatggaagaacctagaagtctttgggttgggtagccgccaaacagaaa

SEQ ID NO: 713893 - DNA, 1125 bp, Homo sapiens
  misc_feature (316)..(316): n is a, c, g, or t
  misc_feature (829)..(829): n is a, c, g, or t
  misc_feature (832)..(833): n is a, c, g, or t
  misc_feature (856)..(856): n is a, c, g, or t
cagccttcctgagcacctttccttctttcagccaactgctcactcgctcacctccctcctctgcaccatgaccacctgcagccgccagttcacctcctccagctccatgaagggctcctgcggcatcgggggcggcatcgggggcggctccagccgcatctcctccgtcctggccggagggtcctgccgtgcccccagcacctacgggggcggcctgtctgtctcatcctcccgcttctcctctgggggagcctacgggctggggggcggctatggcggtggcttcagcagcagcagcagctttggtagtggcttngggggaggatatggtggtggccttggtgctggcttcggtggtggcttgggtgctggctttggtggtggctttgctggtggtgatgggcttctggtgggcagtgagaaggtgaccatgcagaacctcaatgaccgcctggcctcctacctggacaaggtgcgtgctctggaggaggccaacgccgacctggaaggtgaagatccgtgactggtaccagaggcagcgggccttggcttggaggaattccaaacacagggaaaaccgtttaacaagggttccctacttcaagaccattgaggacctgaggaacaagattctcacagccacagtggacaatgccaatgtccttctgcagattgacaatgcccgtctggccgcggatgacttccgcaccaagtatgagacagagttgaacctgcgcattgagtgtggaagccgacatcaatggcctgcgcagggtgctggacgaactggaccctggccagaggtgacctggagatgcagattgagagnctnnaggaggagctggcctactgaagnagaacacgaggagggccatgcaatgccctgaaaggccaggtgggtgtcgattgtccactgttgcagattggacgcgtgactcttggcggtggaccattaacgcggcattcttgaaccgagaattcgtggaccactaattgagcatgaatgcagcagatagaccggcaaggatgccgaggcagtgtttcttcagcaaagcacggtggatcttgaccgggaaggatgacacacaaaggtaccttgtgtgcagtcggcaagacggacatata

SEQ ID NO: 713894 - DNA, 286 bp, Homo sapiens
cctgaatctgtgcccataatctctgtcagtctgctggtttgcaggcgtcattgctgctaagatccggtctttggtccctttgatttaacctgtgacaacagttgcctgcagaaaatgtaattgaatcctgaagggggcattataaatggtgtacagactccatgaactatcttcttgatcctctgcatttcatcatggtcatcctggctccaatcctgaggcttttggcttctcgtatgattcagtctccttgtgcatgggccaattatgattgcgattgccaaat

SEQ ID NO: 713895 - DNA, 505 bp, Homo sapiens
  misc_feature (316)..(316): n is a, c, g, or t
  misc_feature (469)..(469): n is a, c, g, or t
cagccttcctgagcacctttccttctttcagccaactgctcactcgctcacctccctcctctgcaccatgaccacctgcagccgccagttcacctcctccagctccatgaagggctcctgcggcatcgggggcggcatcgggggcggctccagccgcatctcctccgtcctggccggagggtcctgccgtgcccccagcacctacgggggcggcctgtctgtctcatcctcccgcttctcctctgggggagcctacgggctggggggcggctatggcggtggcttcagcagcagcagcagctttggtagtggcttngggggaggatatggtggtggccttggtgctggcttcggtggtggcttgggtgctggctttggtggtggctttgctggtggtgatgggcttctggtgggtgtgtcgggggtctacctgattgggggtcactgcccggagttcagttgggtagcnggtggctggtccagcacaaaaccaacagaccagcat

SEQ ID NO: 713896 - DNA, 1060 bp, Homo sapiens
tggctggggaggcctcagaatcatggtgggaggcaaaagacacttcttacattgtggcaagaacaaaatgaggaagaagcaaaagcagaaacccctgataaactgatcagatctcatgagacttatacactgtcacgagaatagcacgggaaagactggcccccatgattcaattacctccccctgggtctgtcccacaacacgtgggcaattctgggagatacaattcaagttgagatcctgtgggcgggacacaaccaaaccatatcagcatcctttcaagaatattagataattggagctgcagtactcaggaacttgacctgtaagctagacctactgctagtttcttaattttaatatcacatcacctgaaacagtaaaacaacaggcttagccaacgtggatgcttaacagtaacagtgacagtggagctgaataccaaatgtatagccctggtggttcctatctactatcaggcaaacatggtcagtatactgtaaagtacccctggcctacatgattactttgctctgggcaagtggaatatgattaggctcatctcaaagcccacagcataagaaatgtcagcatagccacagacgtctgagaatcctgagttaagcctaacacagagtctcacgattcaagtattctctggacattgcggcaaatgatccactattgggcatcaaggtgaatgaataattaacagaatttcaagcaattgataacaagatacttggcaaaagtcgttaagacttaattagaaacacaggcattagtacacagcatgagaaacagacctgagaattcgaattgtctacctataataaaaaagctgtaataaccaataatacacacaccacacacaatacacagcaaataaaaaacaaataagaaaacataataacgataacacatcaaacctgaaaaactaacctcatacaccaacacacctcaacctatccacaacctactacaaacactaagaaacttaaaccacaaaacaaattagtcaaaaacaatacaccaccaatctaataccacacactctaat

SEQ ID NO: 713897 - DNA, 1117 bp, Homo sapiens
  misc_feature (821)..(821): n is a, c, g, or t
  misc_feature (824)..(825): n is a, c, g, or t
  misc_feature (848)..(848): n is a, c, g, or t
cagccttcctgagcacctttccttctttcagccaactgctcactcgctcacctccctcctctgcaccatgaccacctgcagccgccagttcacctcctccagctccatgaagggctcctgcggcatcgggggcggcatcgggggcggctccagccgcatctcctccgtcctggccggagggtcctgccgtgcccccagcacctacgggggcggcctgtctgtctcatcctcccgcttctcctctgggggagcctacgggctggggggcggctatggcggtggcttcagcagcagcagcagcagcattaatggtagtgtacttgtgttgcggcgagcgatatgagtggtggccttgcgtgcctggcttgggtggtaaggctttgcgtggtggcatttgctggtggagatgggcgtactggtgggcagtgagaaggtgaccatgcagaacctcaatgaccgcctggcctcctacctggacaaggtgcgtgctctggaggaggccaacgccgacctggaaggtgaagatccgtgactggtaccagaggcagcggcgtgcttggatgatcaacgactacagtccccttacttacatagaccattgacggacctgcagagaacaagattctcacagccacagtggacaatgccaatgtccttctgcagattgacaatgcccgtctggccgcggatgacttccgcaccaagtatgagacagagttgaacctgcgcattgagtgtggaagccgacatcaatggcctgcgcagggtgctggacgaactggaccctggccagaggtgacctggagatgcagattgagagnctnnaggaggagctggcctactgaagnagaacacgaggagggccatgcaatgccctgaaaggccaggtgggtgtcgattgtccactgttgcagattggacgcgtgactcttggcggtggaccattaacgcggcattcttgaaccgagaattcgtggaccactaattgagcatgaatgcagcagatagaccggcaaggatgccgaggcagtgtttcttcagcaaagcacggtggatcttgaccgggaaggatgacacacaaaggtaccttgtgtgcagtcggcaagacggacatata

SEQ ID NO: 713898 - DNA, 111 bp, Homo sapiens
tctcctaagctaatgcaaaaaagttatttattttaactttcttagatcatttagccttctcgttatccagcccccaattgcctgacgagaggttcaaccatgatcccgcac

SEQ ID NO: 713899 - DNA, 194 bp, Homo sapiens
ataaatctggaaatcgagtcgtcagttatagaatgtgtggagttggaggagtgtggctggtgggccatcctgtttggagaaagtttcagctgtgagtgtagggccagtagggcaatcctagaagaatgacgatgctccggttgccgaccattgtctgacccaggttgcaaacgaggcctttcgtgcagaaacgg

SEQ ID NO: 713900 - DNA, 232 bp, Homo sapiens
gggggatttaaattttttttgctgaaaacccttatggtccacccaccccagccggcatggccagaatttgtttttttttcaaaaaaattaggggttttcttatttttttggcttaggaggttgaaaaaaacaaggggtttttcctccttttggccctttcccttttgaggaaggtttttttttaagggcaagggctcccctaataaaggaatgtttttccttcccaaaatta

SEQ ID NO: 713901 - DNA, 331 bp, Homo sapiens
aaaccctaagttacgcatcgggtcgtaaaccctattgtcgataggaactctagaataggattgcgctgttatccctagggtaacttgttccgttgatcagaatttgggatcaataaggtgatgttatggttatttggactggttggtctagattaaaatcactcggggggtttatggtactccgaggtcaccccaaccgagatggctagtccatgttaagttgatgttttatccctttgtggttgaatagtttaactttgggaatagttaattaaagctccatagggtcttctcgtcttattttgtgatacccgcctccgtaataagggtt

SEQ ID NO: 713902 - DNA, 771 bp, Homo sapiens
cagcaaaataagaactcctaactgaacagaaatttttctacctagcaatgttattcttgtaaaatagttacctattaaaactgtgaagagtaaagaaaactaaagccaatttattatagtcacacaagtgattatactaaaaattattataaaggttataattttataatgtatttacctgtcctgatatatagctataacccaatatatgaaaatctcaaaaattaagacatcatcatacagaaggcaggattccttaaactgagatccctgatccatctttaatatttcaatttgcacacataaaacaattatataaacaactttgtaggactatgcccttttgtgtacattcaggcatacccattttaatcaatttgaaaggttaatttaaacctctagaggtgaatgagaaacatgggggaaaagtatgaaataggtgaaaatcttaactatttctttgaactctaaagactgaaactgtagccattatgtaaatagtttcatatgtacctgtttatttggcagattaagtcaaaatatgaatgtatatattgcataactatgttagaattgtatatattttaaagaaattgtcttggatattttcctttatacataatagataagtctttttcaatgtgggttgactcgtttgattaatgtgtttgctctttcccaaaacgtaatactgcctgtgtcccagtgccgattcctggttttggaacaaaatctgggtcacaccgatccatccattcaccaatctttggc

SEQ ID NO: 713903 - DNA, 499 bp, Homo sapiens
  misc_feature (303)..(303): n is a, c, g, or t
  misc_feature (499)..(499): n is a, c, g, or t
tcagctcgtaccgtaggttgtgttggctggcctcctggatttggatcaggcacatctgggaaatacttggagtagagtggaaacacagtggaaggtgtgtgcaggcagacagccgcacctggcctggcactcccctgcttgtgacctgggtgcacaccgccctgcgccccgctttgctggcgggtcagatggtatggaagtcaccgccttgcaccgttatcattgtgtgcctggtagtgccctgtcccttggtccttgtgctaataataacaactacagtaacaatgatggggtcaggtggantcagacacggcactgcagctttcagctgactagctgtgtgacttgggcaagccccttaatctctctgatctcgggctccctcctctgtaaaatggaattaagaataacctcattgaggagcttcctgaggaggtaaggaaagtgcctggcacagtgccaggctgctaagagatcaataaatgttccattccccagn

SEQ ID NO: 713904 - DNA, 1238 bp, Homo sapiens
ggaccatgctgcgtgtgctgtttccatgcatacgagcagcactaacatgacctatactacggtgatgaagcggcctgatcatcagtgcattacgaatcaagaaagcgtgcctgataacctctgtggtagtagcctccactgcacaaactcatgctgtgatccatgtgatacgctgatggcttgtagaacattgtgctagagataacgcgtcgtgactatacacatccgcagccctgtgtgacctagtacgcctgcttcgtgactctcgtgacttgacagggtacgacttgagacttcggtctattcatctgagtcgtcgtaactgtgtgcgagacgtacaactaagcaaattcaagagacgtccttcacttgcgtgttgcgcttgtcacagtggtcgtttagccaagacgtccgtgggagcgcccctgttcgcatattgatagctcataaaagttacatctgatgaggtcatgtcgttggatagaccaggagatgagcactagaaatcacatacctgtgatacatgtgttgctcgagtgcgtgtccaggccttaacgcaagcgtaggctataggtggcaccgttggaagggagtctaagtctatgtctatgacaacttgtgcatcctggacacacccccagtgactttgcttggattgtggcactggggtgcccatgtctttggggaagtccctccctgagtctacgtatcggatgggcctacatgtatgccaataccgtgtcccaggtgcccagctcgcactcgatggaacacgggggggggtaattccaagctgtttcttgcctcaaacccgtccgtccttctgcgccccttgaaagccgacgtgagcgcgccagaggggactagtgcccttgttatccccagtgttccttggtacgcaggcacgtaagcttggttcaaaggggctatgaacaagtggcttgagaagcgccctgtccttgcgaagattcccagggcaatcagctgggcaggcatgggcttggctcttccattgggttgcccatgtgtcgcctggccaggggtcccaccaagggctctattgcctggtgggaaccacaaaccccaaggtgtcacaaacagggacttggggtttgctttgaagcccaaaacacccagggaagaaagggtgggataaagtggggttacacaagtggggcttcccttggcaggctaagggtggaaggaagcaaccccccgggttccctaatttgtgacca

SEQ ID NO: 713905 - DNA, 123 bp, Homo sapiens
  misc_feature (38)..(38): n is a, c, g, or t
  misc_feature (78)..(78): n is a, c, g, or t
atctagaggactcctgtgctcctcttcaggaattcacnatacttttctccttaatcactccccaccttggctcatgcnccactcatcctttaggtttgacctgtgtgttgggtaggactggat

SEQ ID NO: 713906 - DNA, 159 bp, Homo sapiens
ttcccttaggaataaggggggtggtctaggaggtacagaaagggacctgtcttctccccaatccaaaagcgtcgttgggcgtccttcttctgttatccccccacttaaccccacaagtataaaatacctctactcccttttttgggcacttctccgagg

SEQ ID NO: 713907 - DNA, 310 bp, Homo sapiens
  misc_feature (121)..(121): n is a, c, g, or t
  misc_feature (235)..(236): n is a, c, g, or t
  misc_feature (272)..(272): n is a, c, g, or t
  misc_feature (281)..(281): n is a, c, g, or t
atcatctactcgtggaccggattctgtggtgaagctggagaattggacagatgcatcacgggtggatggtgttgttttagaaaaagtgcaggaggatgagttccgctatctgaatgtaccnagactcagtgtctcacgacgcagggcttgtacccgctgcatggtagacagccgtggtctcctagtcagggcgcacgcctttggcgtagaagcagcaaccatgtctctccacatnncctattgagacatgacttccacaacctcaggtcctnatgtttaantgcttctgtgcatttcagacacaccatca

SEQ ID NO: 713908 - DNA, 2041 bp, Homo sapiens
ggcacgaggggcggttgagacagcggcagtactgggaggctaggtgagggtcgcgaggctgcccgagcttctgagcgagcgcggtgcttttgggaacgcgggacgggcgatctgcggcgccaggagctgggccgaggcgcggcggcgcggctgccggctgccctgtgaatgggaagttacacgaagtccacccagcgtttctgaggcaatctgaaggcaaatcctgtttagacccaggcgaaggttcccggtgacccgggctctcaccagccaattgtcccttgccgtcctcctgagggtgcctggagcttaagcactgtgtgctcttggcctccacactggggatgccactgactcccactgtccagggcttccagtggattctccgaggccctgatgtagaaacttccccattgggtgcaccaagagcagcctcacatggtgtgggctgacatcaagagctgccagatccaacaggtcctgggggagtaggagccagtgcaaggagagaagtccattgagaaaggcaaatggatgacatcagacccaggggctgaggtccccaactgcagctgggtagcttctggagtggacaaggagcaacagggaagttcgtggcctggtgttctgggatccactgtctcatctcattcttgtgggcaccagaacgtatccaaagacaagactcagtgtctctggcaacagtgagccagagatagaatgtgtttcagaggaggaggaaggggttgttgtaccccatggaaacagtatattgttttacagtagcgtgtctttctctaataactacttagcgtgttcctgttaatggaaaatattggtggtgtaagtttccccactgttctcatcttcatgtaaatttgttcatttccttccttccttccttccttccttccctacttccctccaactctctttctctctctttttattctttccctccttcccacccgccctccatccctcccttccttcctccttccctcccttctttcctttcttcctttcttcttcttctttctctctcatgctctctctttttctttccttttcattctctctacttttttgaagagatcacactgtactgaaacctacattattttccaaaatctctggatctgcttctgtcttgcaggcagagagctcatccagtagcccttagctcttcccagccccctcctttgatttgtgggtgccactgcggcagctgctgagtctcagtggtttctagtcttcaccaagttctgcccacccagatggtttttacctgtcctcaccagaaacctgcactgtctagattgctgaggctgcttctccttaaccgatctgctatctgtattccaggggcaccccagggttagaggtaaatggcacaggccttgaaatctccaactgctctgactccaggttggtgcacttcaatgccaagtactaaccacacaattacaggatgccaccaaaaccttgatatggggcttctgcatcctaactaaaaaaacagttaatagacattattttttagaacagttctaggtttacagaaaacttgagtggataatacagagagttctcctaggctcccctgtcctccagcacacaattttccctactagtatgttgtattagtgtggtccattcattacaattgatgaaccactgttgatacgtcattatcaactaaagtccatagtttacattagagttcattctttgagtttcacagattatgggttttggcaattacataatgtcctaaatccccaatacagcgtcatgcgaaagagtttcactgctgaaaattccctgtgcttcaccatttcacgcatcctcctctcctccacccctgacaaccactcaccattttactacttctatctttttgactttccaagaatgtcctagagttggagtggtacagtatgtgggtttccagactggcttctttctagcattatgtactttaagttccttcatgtcttttcatggcttgataacttgttttttaaaatcagtgaatcag

SEQ ID NO: 713909 - DNA, 336 bp, Homo sapiens
gtaaagcacaccctctccccttttgaagcgatcacatcactgctccaaaggacgttttctacaggatgttcgacccgtatggtcactggatagcttgcataaccggctccctcgcaccatgtaagtaaggacattggaagggagatcgaagtgctcgtgattaagacgctttgccgctccagacatatccaagatggtggtggcatacccctcctcgccccccccttatctccgtcataaaggctgcgatgaagctgaactgtccgaattccacgccgcttaaataccgaccgcgtgtgatcgtagatacgcctgatttcacctagcgcgatttcg

SEQ ID NO: 713910 - DNA, 916 bp, Homo sapiens
gctggagctaagttccaggggtctaatgaaggtgagccggtctcctgctcgaatccctgtcacctctgatgacataatatctgtgcgatgtatgcggttgactgggtgtacaccttgccatggaacgggaacgctccactagaggaactggtgcttgagagtgtgatctttggcacgctcggtgcacatatagcgcccgatgatcgtgactgatgagatggatgatagttaggacactgcatccatgagcgggctgtgaggggttgcgcatcaacctagagggacacgaatgagtgtccatgggacgaccacggcatggatatcgatacgaacgattggcgcgtggatctacatgtgcaagtcgtcatccaggcaaactttctgagtgactggacacgcaactagcccagtggagcatccgggagaaccttggtctgcatcagaggcggactgccccttggcgccacattcatacgaacccaccctacaaagaaccgtccaccccttggggaccaggtcttcggacgacaatttcaactcccttgaagcacctccttcactaactacttactcacctttttcacactttagggctccaaaaggtaggccttgtggtacaaaggccctacgacagcccaagagactttgcggacacatcgcacgcacttttgcgaaagtagcacgttcgggatagcaccataagtcggccgtgatttctgccggacgcttgaaaaattggcgaaaacctactgttaccatagtggacacccacaccttgtacggtatggccttcgctccactagtgcgtaaacttctaggggcgcaagcggctagggagtagatgcaacatggggcggcatagcgcctcgatcggaacgccattacattcgcgaacagcatctaatctcaacaccaa

SEQ ID NO: 713911 - DNA, 357 bp, Homo sapiens
gagaagtcagcagaataggctgagggggaggcccttcagacagatcgactggtgcctcgtccagagtcgctggcccgaagagacagggggagctgcgttatcagagcctccttttccgggtacacttcagacaccttattcatcttggtgaaaatctggttgatctctatgaacgtcttggacttggtctccgggacaatcaagaagatgtagatggtggtgaggtgagattgcgccactgcactccatcctgggcaacagaatgagactccatctcaaacaaaacaaaacaaaacaaaacaaaacaaaacaaaacaaaacaaaacactatcaggggtcctgtcgggctagtcgggg

SEQ ID NO: 713912 - DNA, 799 bp, Homo sapiens
  misc_feature (391)..(391): n is a, c, g, or t
ggaccgttcccgccctaccgaaaggggaattctaccacccagcacctgggtctaagaagacccccttccaaccccctttgaggacttgacctataatcactggctggttctggcttgtgggctatggcacctgaagcctcacagccctttgggattgcgattatcctggaattgcttataaaacccagctggggcaccccgctggggtgagaaatggctaacttccggagtcccccgaaggaacctgatggagatgtgccaattggaggagcattagccagatggccagcccaccccgccaatatccgttaaattgttagaggtaatagcccttcccagtgatttccataaatgatctgcgcatccagattgttaaagaggggaattggtnataatatccacccaggacgtgtagaacatttccagccagccaatctccagaaagcgttcaccaatagagtgttccctgagagatatttgtgcttcagggactttaaactcgcccctaagttttgaatataccttcttcacatcggcccactggccacttttttttctagagtgattgcacaataagtggggatttttctggagagattggtcacgctatgagagtaataaaggtgttgcttaatgcactgttgtgaagattccaacactgctatattttttataaatccatgtgaaacatagacttatttttaaattgtacccatcaccagaaataatggccataattatccaaactttttaaatagatggtcatattttttaaataaagttttccacataactgcca

SEQ ID NO: 713913 - DNA, 976 bp, Homo sapiens
  misc_feature (361)..(361): n is a, c, g, or t
gagtcggaaatatggtgtccaggcagggcgtagacatggcttgtagatcccgccgaagggtgtcgacgcccatgaatatgctaaattgcgacgacagaaggatcaccggagagagagaccagaaaagtagtaggcctgaaccatatgcagactgtcatgcagactactcttggcggcatctggatctacgaggctgaacgttggattccacagctgtgggatggacgatgagtcattgactcacaccgacaatacccctcatatctgcataattggtgcgtgtctattcaactgtctcctgctcctgttggaaggctgtagtgcgtgataggactctcgggtccacttgctggtatcaccnttcatgcgtaggcaagcaatcaagatgtaaacctgggcttgtctctgctgtgctgcgaacgtttcaaacgctgctagcaggtgaacaagcagtctgcatgtgtccccagagccaagaagattggagagagtccgcagcaaggttcatcgacttatgcaacgcctggttgatcggcctcttctatgaacgaggagtgaagagggcgtggcgtacgagattggtagtgccaccactggtagccatctgcgggtgaaccatgcacttgcctttctgaggaaggcccatggggcgtcctggggctgggccctctggtttggtccccccattagagtggtgaggagccagaggggtccgatggggcatgcaggctacttgtggcgagctgctgttggcgactactccggaatggggcggcttgcagtcaacgccggcccagttccggccctgccccgttggagccatttttagcccggttgcccgcgctcagaacggtccccggtgcgaaactccgtggtgacgcgtttcaactcgggcccactcgtgggtggcgccctcgtctctctctgtctctttcgctcgtgtctccctctcgcctcacccccgggaacaaaaaaa

SEQ ID NO: 713914 - DNA, 368 bp, Homo sapiens
gaccctgccccctccttggggcccctcttaaagccataccctcccccatttgggggccctgggctcccatcctcatttttctccttgactggaattgttgctacccagttggggtgggtaaggcctcccctaattggggcctggggcaggggggtcaagaaaagggttttggccccttccctccccaataaggaggggacccttgggcccctctccccctttttttttattttttggaccaaaaacagggggggtcgggtggagggaaaaccccccctccccccaggaccctaggagggggggggggcaggtagggggaaatggccttgctcctcctcgctggacccccagtaaagagttttttccca

SEQ ID NO: 713915 - DNA, 863 bp, Homo sapiens
agcggagtcgtaactcggaagccggagcccagacgggcccgcggcgggggggtgggggctgcgcgggggcgggagtggcggaggtggccgccctggcggcgggtttgtttatcccggggaacgaagtttaggagcgggagatagggacaggagggcgggtcggcggaggaaggatgcggttcggcggacgccggcgccacagggacttgccgccatcaccccttgctgccaccaccgcagcctcgggctccagggcggacacggcaccgctcagcgggagaggagtctccaccaggactgaccgctgccgcccagcagcatcccccttttcgcaggacacgcacgagcatgaggagaaaaacctgacaaagtcctgacagatgtaccttatgctagtaatgaatgtcggcattggcgtgatccgcatggagctcctaccgcttattcactctaatcgctgtaacatatcccttttcgataatgtgtctccggttggtcaccctaatttggtgggatgagcatgtacggcttggttctctgtacgtcattcgtcatcttgtgttccctgcaaacctggtgcgacaccaagacgacataccgctgacccccacgtcgcatcgtcacggccagggcgacaggtgagcgatgccacgactgcccggcgccaccactcgcacgacgcacaatggccaccgacgggggcccgcgaacgggccacgaccaggccccacggtcgccaccggccacccgacagcagcccgacacggccaactcataagctgcccggaccatcgaaggctcacagctacacagcgcgagcgcgctacgcaacaatcgcggtccatgcgctgcggacgctgccg

SEQ ID NO: 713916 - DNA, 315 bp, Homo sapiens
  misc_feature (63)..(63): n is a, c, g, or t
ggtgacacaataaggaagggtccccacgtggggtagagccccaagttgagacataatgaacanattatgtatgaacaattgttagagacagctaatcacaaacaacctgcgggcacaatgacctcattccacacgtagcacccttcagcaggaccctataaaactttcctccagcccttgcctctttgcaggtagccccttctctgctgagctgcccactgcaacatattttcacaatttctctaataaatctgcccttctttacctacaactatcttggtaaatggctttaccacctgcaaaactgaccctagg

SEQ ID NO: 713917 - DNA, 254 bp, Homo sapiens
cccactttggggcccatgggtttttttggggtgagggaaaaggtggaaaatgctatccatccccggagttttttccccgggggagggtgaaacccccgattcctttttaacccccctttttaaaaagccccctcctgtttgcttaaaaggggcagccaaaaaaattttttttgtgttccctgtttcccgccttttttccccctgggggctgtccagttttgggttccaaaaaaaacctttgaatttccaagtta

SEQ ID NO: 713918 - DNA, 2879 bp, Homo sapiens
gggcgttcttggtgctgccgggcgtggtgagtcgggctcccgtggccgcgtgctgggaggagactggagcccggttaggaagaatggagttggcgactcgctaccagatccctaaagaagtggctgacatctttaacgcccccagtgatgatgaagagtttgttggcttccgagatgatgttcccatggaaaccctctcgtcagaggagagctgcgatagttttgactcactagagtcagggaaacagcaggatgtgcgctttcattccaaatacttcacagaagagctaagaagaatttttatagaggacactgactcagagactgaggattttgcaggatttacgcagagtgatctgaatggaaagactaacccagaagtaatggtcgtggagtcagatttgagtgatgatggcaaagcatctttggtgagcgaggaagaggaagatgaagaagaagataaggctacccctagaagaagcaggtctagaagaagtagtattggtcttcgagtagcctttcagttccccaccaagaagctggccaacaaaccagataaaaacagttcttccgagcagttgttttctagcgcacgcttacagaatgagaaaaaaacaattcttgaaagaaagaaagactgtagacaggtgatacaaagggaagattctacctctgagtctgaggatgactctcgggatgagagccaggagagttcagatgctttgctgaaaaggaccatgaacatcaaggagaacaaagccatgcttgcccagttattggcggaattgaactcgatgccagatttcttcccagtacgaaccccaacctcagcttctaggaagaagacagtgaggcgggccttctcggagggacagatcacgcggcgtatgaacccaacccggagtgcgcggcctcctgagaagtttgctctagagaacttcactgtctcagccgctaaatttgcggaagagttttacagcttccgaagaaggaagacaattggggggaaatgccgggagtacagacgacgtcaccgtatatcttcttttcggccagtggaggatatcaccgaagaggacttagaaaatgttgccataactgttcgagataaaatctatgataaagttctgggtaacacgtgccatcagtgtcgacaaaagaccatcgacaccaagacagtgtgtcggaaccagggttgctgtggtgtgcgaggacagttctgtggaccatgcctgcggaaccgctatggggaggatgtcagatcggcattgctggacccggattgggtgtgtcccccctgtcgtgggatctgcaattgcagctactgtcggaagcgtgacggccgctgtgccacaggaatcctcattcatctggccaagttttatggttatgacaatgttaaggaatatctggagagcttacaaaaggagctggtagaagacaattaagaggaaaacaaacagaaccagccacctcaccatagagtactccaacaagacatgcataccattggtgcctaagatttttttacagttgtgtttttatacagaaattctttgtagaaattactattttttgttaaagattgtttatatgcttacaaagatttctcaggaagacagcagagcagaggaatctatatagatgtatgcacagacctgtctgtatgctgaactttgttaaaaatatctgccagttattaaaaagcacagtttaaatggggtggggttaaagttcaggtaagtaagttagagagaaaacattgtatgatcagctcctgcacttgatctatctttggcttcccaaacagtaactcactccaggccaagtgtgccttagcacgagtgaccacagtttaatagaccacacacatcgtttaacctgctcttggtcattggaaatttacactgaacaaagtgcaattaactgtagaacagttttatttttattaaaacttgactgaacaaaaggggaccatcaacattgtagacactggaggccttacagagtgctagcctcttccttcaggactcacctggggcctgctgcttttatattttgaaagagtttaagggctaataatttaatttgttgtttgttaaaaattaaaatctccgttctttccggctgcattgcttttgcatgttcacatatgatgtacttttatgatgtacttttttttttttgagatggagtcttgttctgttgcccaggagggagtgcagtggtgcaacctcggctcactgcaacctttgcctcctaggttcaagtgattctcctacctcctgagtaactgggattacagtcgtgtgccaccacgctcagccctgagttagtttctagtatttttttctgactttcactctaaggatagcgttgaaaaaagaatgcacgtgtgagttactaaaaagtcagaataatgtgcatgggaacagtgcagcaacatgctagaaaatcctcactgcactccagcagaggctagaggaatgccagtgttaccttacgcttctagaagcagagccactccagccagaacccattttgcagtcttctcttcgctcttcagcctgaaggtccagatgtagctggggcctctcagtttggttctatacacagggcactcgtaggtctgtttggtttcttgtctgtccacgggggtggcttttgcaaagatgaccggcatagggcatgccagctccttgagacgggcttcaacaatggttcctgcttgggtgtcccagcgggcgcctatggcaaaaacacagcggttgcaattgtgtggcagcttgctactaatgataatgatcaagttgtttgatgcaataaacattcaacattctggttttgtcataaaaaaaaaaacaaaacaaaaaaaacac

SEQ ID NO: 713919 - DNA, 2741 bp, Homo sapiens
gggcgttcttggtgctgccgggcgtggtgagtcgggctcccgtggccgcgtgctgggaggagactggagcccggttaggaagaatggagttggcgactcgctaccagatccctaaagaagtggctgacatctttaacgcccccagtgatgatgaagagtttgttggcttccgagatgatgttcccatggaaaccctctcgtcagaggagagctgcgatagttttgactcactagagtcagggaaacaggtcgtggagtcagatttgagtgatgatggcaaagcatctttggtgagcgaggaagaggaagatgaagaagaagataaggctacccctagaagaagcaggtctagaagaagtagtattggtcttcgagtagcctttcagttccccaccaagaagctggccaacaaaccagataaaaacagttcttccgagcagttgttttctagcgcacgcttacagaatgagaaaaaaacaattcttgaaagaaagaaagactgtagacaggtgatacaaagggaagattctacctctgagtctgaggatgactctcgggatgagagccaggagagttcagatgctttgctgaaaaggaccatgaacatcaaggagaacaaagccatgcttgcccagttattggcggaattgaactcgatgccagatttcttcccagtacgaaccccaacctcagcttctaggaagaagacagtgaggcgggccttctcggagggacagatcacgcggcgtatgaacccaacccggagtgcgcggcctcctgagaagtttgctctagagaacttcactgtctcagccgctaaatttgcggaagagttttacagcttccgaagaaggaagacaattggggggaaatgccgggagtacagacgacgtcaccgtatatcttcttttcggccagtggaggatatcaccgaagaggacttagaaaatgttgccataactgttcgagataaaatctatgataaagttctgggtaacacgtgccatcagtgtcgacaaaagaccatcgacaccaagacagtgtgtcggaaccagggttgctgtggtgtgcgaggacagttctgtggaccatgcctgcggaaccgctatggggaggatgtcagatcggcattgctggacccggattgggtgtgtcccccctgtcgtgggatctgcaattgcagctactgtcggaagcgtgacggccgctgtgccacaggaatcctcattcatctggccaagttttatggttatgacaatgttaaggaatatctggagagcttacaaaaggagctggtagaagacaattaagaggaaaacaaacagaaccagccacctcaccatagagtactccaacaagacatgcataccattggtgcctaagatttttttacagttgtgtttttatacagaaattctttgtagaaattactattttttgttaaagattgtttatatgcttacaaagatttctcaggaagacagcagagcagaggaatctatatagatgtatgcacagacctgtctgtatgctgaactttgttaaaaatatctgccagttattaaaaagcacagtttaaatggggtggggttaaagttcaggtaagtaagttagagagaaaacattgtatgatcagctcctgcacttgatctatctttggcttcccaaacagtaactcactccaggccaagtgtgccttagcacgagtgaccacagtttaatagaccacacacatcgtttaacctgctcttggtcattggaaatttacactgaacaaagtgcaattaactgtagaacagttttatttttattaaaacttgactgaacaaaaggggaccatcaacattgtagacactggaggccttacagagtgctagcctcttccttcaggactcacctggggcctgctgcttttatattttgaaagagtttaagggctaataatttaatttgttgtttgttaaaaattaaaatctccgttctttccggctgcattgcttttgcatgttcacatatgatgtacttttatgatgtacttttttttttttgagatggagtcttgttctgttgcccaggagggagtgcagtggtgcaacctcggctcactgcaacctttgcctcctaggttcaagtgattctcctacctcctgagtaactgggattacagtcgtgtgccaccacgctcagccctgagttagtttctagtatttttttctgactttcactctaaggatagcgttgaaaaaagaatgcacgtgtgagttactaaaaagtcagaataatgtgcatgggaacagtgcagcaacatgctagaaaatcctcactgcactccagcagaggctagaggaatgccagtgttaccttacgcttctagaagcagagccactccagccagaacccattttgcagtcttctcttcgctcttcagcctgaaggtccagatgtagctggggcctctcagtttggttctatacacagggcactcgtaggtctgtttggtttcttgtctgtccacgggggtggcttttgcaaagatgaccggcatagggcatgccagctccttgagacgggcttcaacaatggttcctgcttgggtgtcccagcgggcgcctatggcaaaaacacagcggttgcaattgtgtggcagcttgctactaatgataatgatcaagttgtttgatgcaataaacattcaacattctggttttgtcataaaaaaaaaaacaaaacaaaaaaaacac

SEQ ID NO: 713920 - DNA, 229 bp, Homo sapiens
tacctaatgtagtcatctgcttaaaaccaaaagataacactgaactcagaaaaaaacaaccacatacatcaatctgaactacagactctatgtgagcaaaccaccaattatccgaccatcatctcctaccactcttaccctttcttaccatactttagccacactagcttgctttctgttccttgactatactctcagttgattatctgcccatgcgggtaacagcttg

SEQ ID NO: 713921 - DNA, 1742 bp, Homo sapiens
  misc_feature (1)..(1): n is a, c, g, or t
  misc_feature (3)..(3): n is a, c, g, or t
  misc_feature (13)..(13): n is a, c, g, or t
  misc_feature (35)..(35): n is a, c, g, or t
ncnggaaacacgngccatttattctcagaagacancgcaccaagacagggggcggattatttttaataagaggcgccaccccctgtggaccatgcctgcggaaccgctatggggaggatgtcagatcggcattgctggacccggattgggtgtgtcccccctgtcgtgggatctgcaattgcagctactgtcggaagcgtgacggccgctgtgccacaggaatcctcattcatctggccaagttttatggttatgacaatgttaaggaatatctggagagcttacaaaaggagctggtagaagacaattaagaggaaaacaaacagaaccagccacctcaccatagagtactccaacaagacatgcataccattggtgcctaagatttttttacagttgtgtttttatacagaaattctttgtagaaattactattttttgttaaagattgtttatatgcttacaaagatttctcaggaagacagcagagcagaggaatctatatagatgtatgcacagacctgtctgtatgctgaactttgttaaaaatatctgccagttattaaaaagcacagtttaaatggggtggggttaaagttcaggtaagtaagttagagagaaaacattgtatgatcagctcctgcacttgatctatctttggcttcccaaacagtaactcactccaggccaagtgtgccttagcacgagtgaccacagtttaatagaccacacacatcgtttaacctgctcttggtcattggaaatttacactgaacaaagtgcaattaactgtagaacagttttatttttattaaaacttgactgaacaaaaggggaccatcaacattgtagacactggaggccttacagagtgctagcctcttccttcaggactcacctggggcctgctgcttttatattttgaaagagtttaagggctaataatttaatttgttgtttgttaaaaattaaaatctccgttctttccggctgcattgcttttgcatgttcacatatgatgtacttttatgatgtacttttttttttttgagatggagtcttgttctgttgcccaggagggagtgcagtggtgcaacctcggctcactgcaacctttgcctcctaggttcaagtgattctcctacctcctgagtaactgggattacagtcgtgtgccaccacgctcagccctgagttagtttctagtatttttttctgactttcactctaaggatagcgttgaaaaaagaatgcacgtgtgagttactaaaaagtcagaataatgtgcatgggaacagtgcagcaacatgctagaaaatcctcactgcactccagcagaggctagaggaatgccagtgttaccttacgcttctagaagcagagccactccagccagaacccattttgcagtcttctcttcgctcttcagcctgaaggtccagatgtagctggggcctctcagtttggttctatacacagggcactcgtaggtctgtttggtttcttgtctgtccacgggggtggcttttgcaaagatgaccggcatagggcatgccagctccttgagacgggcttcaacaatggttcctgcttgggtgtcccagcgggcgcctatggcaaaaacacagcggttgcaattgtgtggcagcttgctactaatgataatgatcaagttgtttgatgcaataaacattcaacattctggttttgtcataaaaaaaaaaacaaaacaaaaaaaacac

SEQ ID NO: 713922 - DNA, 508 bp, Homo sapiens
  misc_feature (18)..(18): n is a, c, g, or t
acttacttttccacaggncagcccatagaaaaaaaatctatagctataaaatataaccagaaagccctttattttcaacctttctagctgaatattaatttcaaatagcagatgtcctaatatattcaagaacactgtccagtagcaatacaaaaacactaaattcttatttcatcatttcataacactgactcagtaacagaacaagtaagaaatcaaactttaatttctactgtgtttaggccagaaaaaaaaatcctttcctccaggattctgtacctcaagtcatcttagatgtttctactgtcataaaaatgttcttcagccacaaatgacattagaattccttattgtgatttccatgtcacccagtggtaaaatagaaactgagctactgggatagataagttaacctaaaaaacagcagccatcaacattattaattttgcataaggaaacacgaatgtgcgttatactgggaagtttaacatctgctacaagaaaatcc

SEQ ID NO: 713923 - DNA, 138 bp, Homo sapiens
gtttagtctttgatatactgctcgctggcgggaggcagattgtggggttctgctgtcagcaccaccaagtcgtcgatgatgccctgcaggtaggtgatctctcccagcatggtcagctctccattcaccacaggctgc

SEQ ID NO: 713924 - DNA, 194 bp, Homo sapiens
ccctgctgaggggagggctgtgcttgcgcagcaacacgaagagcagcctggtcccccggctggccctgttggaaaggccgagtcctgcgcttgccatgagaacgatctgctgttgctgctgctgctgccgaacacttcatctgtattcaaatgactgctgccatgtgattgccttgaacgagaacgctggctgc

SEQ ID NO: 713925 - DNA, 1746 bp, Homo sapiens
  misc_feature (1450)..(1450): n is a, c, g, or t
  misc_feature (1454)..(1454): n is a, c, g, or t
  misc_feature (1463)..(1463): n is a, c, g, or t
  misc_feature (1478)..(1478): n is a, c, g, or t
  misc_feature (1515)..(1515): n is a, c, g, or t
  misc_feature (1523)..(1523): n is a, c, g, or t
  misc_feature (1652)..(1652): n is a, c, g, or t
  misc_feature (1688)..(1688): n is a, c, g, or t
  misc_feature (1694)..(1695): n is a, c, g, or t
  misc_feature (1711)..(1711): n is a, c, g, or t
gggcgttcttggtgctgccgggcgtggtgagtcgggctcccgtggccgcgtgctgggaggagactggagcccggttaggaagaatggagttggcgactcgctaccagatccctaaagaagtggctgacatctttaacgcccccagtgatgatgaagagtttgttggcttccgagatgatgttcccatggaaaccctctcgtcagaggagagctgcgatagttttgactcactagagtcagggaaacagcaggatgtgcgctttcattccaaatacttcacagaagagctaagaagaatttttatagaggacactgactcagagactgaggattttgcaggatttacgcagagtgatctgaatggaaagactaacccagaagtaatggtcgtggagtcagatttgagtgatgatggcaaagcatctttggtgagcgaggaagaggaagatgaagaagaagataaggctacccctagaagaagcaggtctagaagaagtagtattggtcttcgagtagcctttcagttccccaccaagaagctggccaacaaaccagataaaaacagttcttccgagcagttgttttctagcgcacgcttacagaatgagaaaaaaacaattcttgaaagaaagaaagactgtagacaggtgatacaaagggaagattctacctctgagtctgaggatgactctcgggatgagagccaggagagttcagatgctttgctgaaaaggaccatgaacatcaaggagaacaaagccatgcttgcccagttattggcggaattgaactcgatgccagatttcttcccagtacgaaccccaacctcagcttctaggaagaagacagtgaggcgggccttctcggagggacagatcacgcggcgtatgaacccaacccggagtgcgcggcctcctgagaagtttgctctagagaacttcactgtctcagccgctaaatttgcggaagagttttacagcttccgaagaaggaagacaattggggggaaatgccgggagtacagacgacgtcaccgtatatcttcttttcggccagtggaggatatcaccgaagaggacttagaaaatgttgccataactgttcgagataaaatctatgataaagttctgggtaacacgtgccatcagtgtcgacaaaagaccatcgacaccaagacagtgtgtcggaaccagggttgctgtggtgtgcgaggacagttctgtggaccatgcctgcggaaccgctatggggaggatgtcagatcggcattgctggacccggattgggtgtgtcccccctgtcgtgggatctgcaattgcagctactgtcggaagcgtgacggccgctgtgccacaggaatcctcattcatctggccaagttttatggttatgacaatgttaaggaatatctggagagctaagtaagtctctagcagcttacaaaacagcntganatcttgagnctgagcacaggagancctctgggcaagtagttgttgccttcccgtgtgactnacttactnatataaaccacgagtaccatccattctgtatctgtttgcattggaaaagctcaggcctgatattttccctattagggaatcttctcctttgctagatttttcaactcaactccacgttgcctttaaccnaatttctccttgaggtgtatgacagaaatggaaggnacaacnnacaagcaggctgaggnaagacacagattatgaagagcacagctgcagtcgg

SEQ ID NO: 713926 - DNA, 207 bp, Homo sapiens
  misc_feature (59)..(59): n is a, c, g, or t
ttatttcttattcctcgggcgatgttacttctaatgtcacagggggtgtacatttttcnaaatgaggcataggtattttagaaagatgctactcctgatgtcacagagggtgatatgggggtgaccaccgtgtacatcactgaggccactgcaccctgtctcagggaagatgacacatctgaactgaggtagcttccaacgcctgtt

SEQ ID NO: 713927 - DNA, 357 bp, Homo sapiens
ttttttttaaaatgtcaagagagtgaaggtctgaatctctctgaatagcatttgtcacttggccagtaaatacagcatgcaaagtatatgtgctttaaaatataagcgtatttcgtcagactctacaagtccttcttgaccccttggtgcacagatccatatataacctcccttttcagtatggctgtgtgtgattaacctacaacacatatgcatgcatagatgtgaatcctgcactactttttttttctttttcccccccaaaaattctctgggaaaaagttttaagaacgtaactaaccttaatttggctgctatttggcgcatggacccgaatagctggcgggtaaccgagct

SEQ ID NO: 713928 - DNA, 372 bp, Homo sapiens
tggggcataaacacaaactttatggaggccctcagactagttctctttctccggcacagtctgggttccccggaaacgtccagtccggggggcagcaatgaaacccactttgggcggccagcgggggcatctcgtggcggatgtgggtggagggctgccgagtgtgcgtgggtggtgtgccacctccaaagggagtgctccacgaggatccagtggccacacccgcgatactcggtggccagcagttcctcttggcctatatattgggtggtacgcccggccagccttcaagaagtgggttggtcaagttcggccacctccagccaccacaccaaccacagctctgtgggcgtgaggagaataaccttctgg

SEQ ID NO: 713929 - DNA, 633 bp, Homo sapiens
  misc_feature (500)..(500): n is a, c, g, or t
aacagaaaccctgtctcagatgagtaattttaaaatttcctgtggaatcaagttcttcagtgacgtgtattacactcaagaacaatcttaagcctaagatcctcagttcagtacaggagacctctcatgtggcattttagttttctggactttccagtcagccacttgtgttcctaaaatcttcctgccatttcctctttgagatgccgccctatttcttcctctacactttacggttttatgttacgcagccagtatacctacatgcctctatccctgaataccccgagtactactgatcacatctacttaactggcacaatgaacacagtaggtacttttagcttatgttggcctttgggagtgggtgtccaagatcagcacttcctcgcgctgactgcgtaattcccaagttcaatttcattagcattctaatatacaacttccaacttccggccttgaagtactgctcacttctggtgaatacagcatcagtgcantttggtttgccttaaaaccacaatcctgggaggctgagacagaatggcgtgaacccgggaggcggagcgtgcagtgagccaagattgcgccactgcactccagcctagacgacagagcaagactgtctcaaaa

SEQ ID NO: 713930 - DNA, 501 bp, Homo sapiens
ctgtatcgtgggagacataaaaaataaatacataaataaatagtatacaaactgcatacgatgccttctgcacaggaagcacacgggatgctagatgaaagaaaacaacagagagacatctgcctctaaaaaaaagaaaggcacagggcaaccagcgaaggtagcagtaagcactcagtaatcagccatgtcgccgtgtgatgtgataagcatggagtgagtgggtgatgtatggcagacactccacgtctttcaatgcccttcctctgcctcctgagcactgcagtagagtctctctcatggactcttgttgatggtctgcttggtctgctctcttaccctccaatacatctgctatcccacaactacatgttatcttttccgaacatggatctgatcaaggcactctccagccttcacagcctctttgagtccatggcctgcctgatttgctggccatccagtagaccgctccaccccgggatacaggggtaccgagct

SEQ ID NO: 713931 - DNA, 281 bp, Homo sapiens
  misc_feature (44)..(44): n is a, c, g, or t
ctaaatgctgttacctataatgctgtgtgactttgagcagaatnatgagtacaaagcccctaaataccctaggaagagttttattagcactatatccttcgacctcagtcctgttttaacttatcatgccgaactccctgactcaagactattcttccctatactggtccattatgatctgcacagaattgaactcttagctttttggttgtgttcttcaccctactaccgtccgctagattgcgatttccgttctcctcatctacggctctcgctattac

SEQ ID NO: 713932 - DNA, 136 bp, Homo sapiens
gcccgggtcatctcttctgccacgcggttgcctaccctgcgtgagtcgggtgggcgagctgtgcctcgtggagttcagagacctcaacgcctcggtgagcgccttccagagacgctttgtggttgatgttcggcgc

SEQ ID NO: 713933 - DNA, 505 bp, Homo sapiens
  misc_feature (387)..(387): n is a, c, g, or t
  misc_feature (409)..(409): n is a, c, g, or t
  misc_feature (439)..(439): n is a, c, g, or t
  misc_feature (456)..(456): n is a, c, g, or t
  misc_feature (468)..(468): n is a, c, g, or t
  misc_feature (487)..(487): n is a, c, g, or t
aaaacagcattcttgtaaaggcagcaaaccaaaacaagactgcagtgccttaacagagtagtctgaattcctcaaagcttgcctgtctgtacacattagtactttcaaggaaaaccttcaaatacgactcatctagttgcgcaccctggagtatatttcgcggaatcttagaactggaagccctaacgtgcatgtgtttccctctcatgcccttaaaattctaatgaattcatcagcggtccaaagtgatgctaaataagtaaattaatgctaaatctggattagtgatacaaatacagctaagtcttaatcctatgttctattattttataagacagacctacaaatactcaagtttagagaaactacattgacaaaaatatccangttcgtgtatatagaatattcnggagacgcaatcccaaccagtgaaatgtgnatatcacgtgacatacnctaggccaattngggatagtttttttaaagnggttagtgtggtgacatt

SEQ ID NO: 713934 - DNA, 902 bp, Homo sapiens
ggattctcctgcctcagctactcgggaggctgaggtagaagaatcacttgaacccaggaggcagaggctccagtgagccgagattacgccagtgcactccagcctaggagacagagcgagactccatctcatcaaaaaaaaaaaaaaaaatttttttccagggtcccaggaatttcccccaagtttttgggaattttcgacaaagagggccagaatagcaattctatccagaaattcatggctatactgggaagctagaaaagaccccttcttttacttagtggagaaacagttgatagaacttatgcttctagataaaagaaggagtgctcttcaagtcagagagtgctcagtgtgctccagggagctgaccccagtgtgtgttgggtacgtaagggcttataagtaacgcaaggaagagagagtcattgggagaatacggtcaagggaccaacgccgagattctgacatgtattacctgggagaaagggctcatagtaggctggcccgtgcagggagtatttacattttcaatttggcccagagcaggtgattggtcccctcaaggggggcgttctagaccttccctaatttccatttttttcaaaagactttttaagagtaattgggggtccgcaaggaaaatttggatcagcagagttacagagaagaagcctggggtatccccaaattgcccttcaccatttttcccctttttaattaatacttggccctttattgtgggtcacattccgtgtttccattgtgttgaccccgattatcggataccttattattacctaagaggtccattagcctaccattgaggggtcccccctcgttgtgtggtgtacattgcgggggggggtttggagaactggtccttataccgtgtttccgca

SEQ ID NO: 713935 - DNA, 353 bp, Homo sapiens
gataaggtgaatgtgaggaggaacggatcggagcggtaaaagtgaatgggcgtccagatggaggttctgaaccccgagaagctactgacagggcgaagcttcaaatggggatcgggaagcagatgagttctgaattcggagcgggggtgcggttgggttgggattcgcatttgggaagttgcatggaggttttgagtcaggaggaatcatctaacagtacagatcgaggtcaaggaatctgaggatttcgaacgatgggagggatcggacaggggttttgaatcagggaggatcgggaggggcattgaattggggtttggggggtggaaggggattcagaatccaggctgaag

SEQ ID NO: 713936 - DNA, 435 bp, Homo sapiens
cttttggggtctttgctgggcattataatactagtatcttacaaaaacagacatctgttggaactacattatcaagtatttatagatgaaatgatagatcttggatttgctttaaaatagtccagggaaaagataaaataagaacagcagaatgttgctgatagctgttaaaactaaaaaagaaaaaaatagaccgaaaacccatgtggcagcccataaaaatccaacaaaagaaaaaaactaaaaaaataacaacaaccctctcccaaaaaaactgggtacatggaagttcactgtattagtctctctaacttctggctatgtttgagatttctaaattaggaagtaaaattaaaaagcaaaaagtacctgggctagattacttagatgtctgagtcaataatcattaaggaaaaatgaaaagcatatgatcaa

SEQ ID NO: 713937 - DNA, 802 bp, Homo sapiens
ggagggtcgctacggacctcctcgttgatttgctctggaaacgtggcagctcacagagtctatacatctcacgctttgacatcctgtgtgtggtgacggtgacatcgtggaccctagtccaggactacgatgactcgggccgcttcgttggtgggctgccacgtcagaaaccagcccagcaacaatgaggaggaggggctggagccaatggcagcgctagtgaggcccgcgcattgcccaacacggtatggcggtggagcctcctgtggccccattggaggctcctgttgacagaattacagtcattctacgtccaatggtaggagggctcttcagcacgaagtgtcaacacagcaatggtagcaggatcgcgagggtgggtccaagcatgttccggtgaaccgtgaggaacacgtaagtctatgtgcgaggaggcagaatccgcattacgggtgcggcacagtcgaggtccatgatccgcaatggtggaggaccatcgtcgcgcatccagtctgcgggactagtgtgatctgaagatgacgtcaagccctggcgcatccgcgttgatgctggtaggagcttcgatacgatcatctctcctagaagttcagggtcagtgcgcagcgatgcgcaagacgttttgcccgcgtacctttcgttcccggcggtgacgaagcaagtgaggctgttgcatctttcattacctgaagtcaggcagtggaagacgcaggtgactagtatcagcggcaaccgattgggcggcccagcaaggaccacctattgaggtcctgagaaggacttg

SEQ ID NO: 713938 - DNA, 121 bp, Homo sapiens
  misc_feature (46)..(46): n is a, c, g, or t
  misc_feature (88)..(88): n is a, c, g, or t
aggaaaagatgggaatatgtttctttcctttgagaattcacaaaanggggtcaaaaacaaagcaatgctgaaagcgaacatccatttngcctgcaattcaaggcgaaaatccaaaggcatc

SEQ ID NO: 713939 - DNA, 301 bp, Homo sapiens
  misc_feature (43)..(43): n is a, c, g, or t
  misc_feature (51)..(51): n is a, c, g, or t
  misc_feature (146)..(146): n is a, c, g, or t
  misc_feature (160)..(160): n is a, c, g, or t
  misc_feature (162)..(166): n is a, c, g, or t
  misc_feature (170)..(170): n is a, c, g, or t
  misc_feature (174)..(174): n is a, c, g, or t
  misc_feature (182)..(182): n is a, c, g, or t
  misc_feature (185)..(186): n is a, c, g, or t
  misc_feature (192)..(192): n is a, c, g, or t
  misc_feature (194)..(194): n is a, c, g, or t
  misc_feature (198)..(198): n is a, c, g, or t
  misc_feature (200)..(200): n is a, c, g, or t
cccgccccaccaccccggcccctttgaagagtttttcacagancagggttntgggggaaacctgtcttgacattcaaaacctttttcttcccgatctgaacccctgttgactaatcttgcctgggtttgtgtaggtctgcaggaangaaggctgaaaaancnnnnnaagntttngacttaantgnnactttntnattnanttttttttttttttaagtccggatacagtggaatctttatggactaggaaaaacttgattttgatgctaaaattccccaattcatatatgacatcttttta

SEQ ID NO: 713940 - DNA, 280 bp, Homo sapiens
cagagtgagccaggagatgtggccaagaacatgcactcttgtcttccaccaagttcccccaccccaattgcttagcatgccacttgtgtggcatgtttctccaccactcctggtttttctcttcttaacagaggtccacccagggatcctactcttgggagcttggaggcatctttagggaggtctcggcagcatggttatggtgctgctcctttccccgggcatccacatattccatatccactcaactttggcggccactgatctgcagttacttcgc

SEQ ID NO: 713941 - DNA, 83 bp, Homo sapiens
tgctttgcactgtgggactgctttgcactgtgggagatatcttaagtttagagaacatttcttaagaatgccctgctacctct

SEQ ID NO: 713942 - DNA, 354 bp, Homo sapiens
  misc_feature (354)..(354): n is a, c, g, or t
cttagacatattctgagcctacagctgaggaacctacagtctcagcaccatgaatcagactgccattctgatatgctgccttatctttgtgactctaagtggcattcaaggtatggaacatcaaaggatacttaatttgtaagatgagaaataggaatcggtataagttctatacagtcatgtatatgtgatcatacaacttatatgaattgaagtgagagagacttatagaatacgagatagagaatgagctagggaatgaggacagaatagatggggaagagggaggatagagagagacaatgtgatggaatgctgacagagatgagatacagagacttccttacctactgn

SEQ ID NO: 713943 - DNA, 1466 bp, Homo sapiens
  misc_feature (127)..(127): n is a, c, g, or t
  misc_feature (314)..(314): n is a, c, g, or t
  misc_feature (339)..(340): n is a, c, g, or t
  misc_feature (876)..(876): n is a, c, g, or t
  misc_feature (970)..(970): n is a, c, g, or t
  misc_feature (1040)..(1040): n is a, c, g, or t
gcccggctctgcggcctggaccgaaccttggaccaggctatcacggaatgactgtaggctggcggcgatatgctggcagagtcattcaaacgagatcaacggactgtcacagacgctaccaggtgantacatgcgtgctaacacgcaagtgcacaaccatatgtccagtgcaagcatacatgtgacggcatgcgcctgcgctactgtgtctagcctgcagccgacgaacagtactccatggactggttgcatacattatgttccgcagccaatagtcctccgacgatctgccagtgatcccctcacgtgtcccntccaggcaacagagctgagctcagnnctttgatgtgcatactccacacaggggtccacctgacggccgtctcccaatgcactcctatacgtgcgagatcgtgggcacgtgagggtcgtgggtcttctcacctgggtgcagccaggacagagtatggccttgggtagtaaaacgctggaaagggtagacgcaatcctaggggcgttcccctaacttgtgcgcatccgcgcgtctacacccagcgctactcgcgggaaataacaaaatgccttgtttactacaacaggacccgggtggtgtcctatttttgcgtatgcactctttgcgcgtccctaaagcgctctcttctgggcgttgctccctgacatattagtctgggcgtttttgtgcctcgtactcccctcggcaggacaagacatcacctgtttcagaaccttgagcggtctcacaggcttagaccacaggtaggtaacttcccttcaggctgtctgcgataggagtgacgaggggggggttggagagaccttagtctcaaagagtgtcgaggcttccttgaggatacntttgccgttgaggcgagcgccgaagattaggggttacgctaatcaccgctctaatatgtcgcaattttattattttaaaggggctctaagaganccaaaaaccggccctttgtggcttaaaggggtcccccatatcccctattattaaacacagtgtaaaaacnttttgggccccgaatagttagacccgagaccattggtatgtagaccctccgcgagtctcacacaaacgcattgtatatagaaagccccatattgaatggggggacgccaagttcaatatatccctaaggaccaacagcccagaggtatagcacaggatttccggcccttcttcggggcatatggaggcaaattagcgccggactcccatttgcgcgaatggtaattcgcgagacactcccacggaagatttgtgtgtgtggcacaacccttcgtggttcacacacgacgcctttttttgtgacgaccaacggtctaaacagccctcatcaacacgcggtcaacacacgcgcaaacacactatgttggtcgtctgtgtagccccccacaaacataaagggggcgcctccagaaagcgccacaaccag

SEQ ID NO: 713944 - DNA, 315 bp, Homo sapiens
ccaaagaacgtattacataaaaaggagaaaacgaactgctagactgcttgccaaagtgactgagcattctacacatctatcacaaatgcatgctttctagttgcgccacatcttcaacatttggtgttgtcagcctttcccatttttagccatcccattgggtgtgtagtggtatttcactgtggttttaatttgaatttcccagatgactaatgatgttcagcacttttttcatgtgcttattggcttttcataatagcttctttggggaagtgtctggacaaatacttgcccataataaatttagggttgatg

SEQ ID NO: 713945 - DNA, 152 bp, Homo sapiens
agggggttccgggaagatggtctgatcaaggaattccgtgtggttttacatgttctattcaggagtatcaggttggcagtttactctgttgcagaagatagtaagatgagactgtgtgagaggattgcagtcttaagatgaccttatggaag

SEQ ID NO: 713946 - DNA, 672 bp, Homo sapiens
  misc_feature (53)..(53): n is a, c, g, or t
  misc_feature (129)..(129): n is a, c, g, or t
  misc_feature (167)..(167): n is a, c, g, or t
  misc_feature (173)..(173): n is a, c, g, or t
  misc_feature (202)..(202): n is a, c, g, or t
  misc_feature (230)..(230): n is a, c, g, or t
  misc_feature (234)..(234): n is a, c, g, or t
  misc_feature (418)..(418): n is a, c, g, or t
  misc_feature (460)..(460): n is a, c, g, or t
  misc_feature (462)..(462): n is a, c, g, or t
  misc_feature (489)..(489): n is a, c, g, or t
  misc_feature (531)..(531): n is a, c, g, or t
  misc_feature (563)..(564): n is a, c, g, or t
  misc_feature (580)..(580): n is a, c, g, or t
  misc_feature (604)..(604): n is a, c, g, or t
  misc_feature (670)..(670): n is a, c, g, or t
tcaaacagtccctcctgggataactcagacaggtagaggattacaacacatgnctgcaagtactgggtgactaaagttttggcttctgttccctggctgtgccaagatgggcgatttgagcttcctggnaaatttcctggtggaagtacataagcactctaccgtgnttggcnaggtctggctcactgtcctcttcatattncgtatgcttgtgctgtgcactgctgctntgtnttccttgggggatgagcaggctgatttcctgtgtgttatgattcagcctggctgccagtatgtctgctacgaccaggctttccccttctccttcattagctacttggtgctgctagatcttcttcgtctccacgccctctctggtgtacatgggccacgccatgcatactgtgttcattctgtngaagcgcaagctacgggtggccgatatggccaaagaggtccngngttctggcttttatgagtacccgttgncagatgaaggtatatactgtcctgcttggaggaatggaatgnaaggattgtctctagggcattctgctcaatanntatgtgtgcagcattntgatccgtaccatcatggaggtgntgtcttcattgtgggccagtatcttcatctacggaatcttcttttatcaccctgcatgtctgtcgnag

SEQ ID NO: 713947 - DNA, 521 bp, Homo sapiens
cctgcggcaaagtgctaggattacaggcgtgagccactgtgactggcctattttttcattttttaaagacagcatctcgctctcttgcccaggttaaagtgcagtggtacaatgatagctgactgcagcctcgaccttcctggctgaagcaatcctcctctctcagcttcccaagtagctaggacctatagtccctggctaattttttttttttttttttcgaaacggggtctggtccttttgcccaggctggagtacagtggctatacacaggtgtgatcatagtgtactataacctcgactcctgtgctcaagtgatcctctgtgccccatcctccacatagcagggactacaagtttttgccactgtgtgcagctcttaatggttcgggataattttgtgaacatatggtatcctaaattggatattcagattgttcattgctaaatacagttgactttcatatactgatctgtgtcttgtcacctttttgaactcatttattagttgaggtaacccg

SEQ ID NO: 713948 - DNA, 205 bp, Homo sapiens
  misc_feature (19)..(19): n is a, c, g, or t
  misc_feature (30)..(30): n is a, c, g, or t
  misc_feature (35)..(35): n is a, c, g, or t
  misc_feature (85)..(85): n is a, c, g, or t
  misc_feature (113)..(113): n is a, c, g, or t
  misc_feature (115)..(116): n is a, c, g, or t
  misc_feature (125)..(125): n is a, c, g, or t
  misc_feature (127)..(128): n is a, c, g, or t
  misc_feature (136)..(137): n is a, c, g, or t
  misc_feature (162)..(162): n is a, c, g, or t
  misc_feature (170)..(170): n is a, c, g, or t
  misc_feature (188)..(188): n is a, c, g, or t
  misc_feature (202)..(202): n is a, c, g, or t
cctggtggtgagtggaccnccccgctcccnacaanctctggatggctgcagtgttgtactagactttgttcaggctgtctcatcncagtattgccccttcctttcaactttcncnncttcatctnanncctgttgnnactttccccgaaacgaataaagtcnccccagcncctgctgtgtaggctggncagaaaccacaacncgt

SEQ ID NO: 713949 - DNA, 661 bp, Homo sapiens
tctggtgctggggagggaggcggatgttgcatgtgagctgagattgtgccacttcactccagccgtgggtcgatatgagcgaatctcatctcaatagataataactgaaccaactacacataacacacaacaaaatagaatacaatgaattgagcttatatctcgggattccctttctgccctagctgattacttgtttcttacatctggagcagtggttcttaactgaaggtgattttgctccccagggcacacttgccaaggtctggagttggttgtgagattgtcgggggagcggtctactgcatccagtaggtagaggccattgatgctgctcagtgccctacaatacacaggacagctcccacacagcaaagaattacccggccgcaaataccaatagggctgagattgagaaaccacggtctagaatccagcaaaatctttcgatcttcaccactgtcgactggggagggctcagcacaactcatgaagccatgggtttcagcacagccagggaaggtccccgagtgaaggtcagatggggagaggcctgcatggctggcaccgaggagacacagccagaccagtagctgcatgctcttgggcaagctcttccgtctgaattagtttccttaatgcaagtgaagaagcagcaggt

SEQ ID NO: 713950 - DNA, 111 bp, Homo sapiens
tgtcaggcgcatgagtgtggggaggaatggggtgggtttcgtatgttccaactgtcattttatttttacgttgttagatatggggcagtcgtgtggttcaggtggcgtccc

SEQ ID NO: 713951 - DNA, 581 bp, Homo sapiens
  misc_feature (439)..(439): n is a, c, g, or t
  misc_feature (568)..(568): n is a, c, g, or t
  misc_feature (573)..(573): n is a, c, g, or t
gtcagaacagacatgtaataacgccttgaatttacaaaatgcagttcctttctcctctttttagattggtattttagtccagttagtagatccatgtctactattaaaatattaatattggcagcatttttcatgaacctatgtagatgttcttatctgtaatatttatacacagaacatttacttacaaattagttcatcaaatcttgaatgacaaactatattgtttcattctcctctaatataaatgattttgttggacaaaagttttgataatgtttgatatacatttcagatggcaatttactacattaatgcaaaaattatgaacaaattaagtgtttgtatgacagtattctgttaaatttattgttttctggaaaatgtttactttgtttattcaacagttattgagcatctaataagaacgcagtcctgntacataggcagtaagaatatataaaaatgagtaagctatgtaaaaatgagtaagaaccattttagtgcaatgctgcttgatctttttaggttactaatccctttgcaaaatctgatgaaagctggaatnctttncaccccaa

SEQ ID NO: 713952 - DNA, 213 bp, Homo sapiens
tttccagcttttcagtttttgcctgggcaatggcccggggcccggagtggggaaagtttttatggaggggaaaggggtccccccccccccccgcctggttttagggtgttgcccccccaggccccgcatctgtttgctctgcaaatatgtctctttggggttggaatttccttttttgttaaaaaaataaaggaaaatgccttgtaaggtcca

SEQ ID NO: 713953 - DNA, 244 bp, Homo sapiens
ggccagcagcattggcatcacctgggacttgtgagaaatccagcatctcatgctccacagcaggtctcttaaatcagaatctacagtttatcaagatccccagcagatgtgtgtgtaagctcaagaacctgttcagaggagcacctagcataagtcctggcttgtgacagatctgccaccctctagctgggtgacttttagccaagtgatcgacctctttgagccagagtttctaccttgtaaa

SEQ ID NO: 713954 - DNA, 355 bp, Homo sapiens
  misc_feature (326)..(326): n is a, c, g, or t
tgggaagacccaagtctctacaaaagagaaaaattagcaggggcatggtggcgcacatctgtagttccagctacttgggaggcggaggtgggaggattgcttgagccgggggaggttgaggttgcagtgagctgtgactgcaccactgcactccagcctgggtgagagagtgagaccctgtctcaaaaataaacaaaaaaccccaaagtgaatgaggctgggcatgggttcacacctgtaatcccagcacttggggaggctgaggcaggatcatcacttgaagctcggagtttgagaccagcctgggcaaaatagcaagaccccanccatttctacaaagaaacaagaaaaagaa

SEQ ID NO: 713955 - DNA, 159 bp, Homo sapiens
tattatgcagcaaaaagaacaaagtaactagaaaaaactttaacaaaagaagtttaacagctgggtacagtggctcatgcctgtaatcccagaactttgggaggccaaggcaggtggcatcacttgcaggtccaggcagttccaagtaccgatgcctgg

SEQ ID NO: 713956 - DNA, 198 bp, Homo sapiens
aggacaaaagatattcttcagagggcttgacaattctttgaagattacttctattaaggctagtgtcggtttcttgtgtcgtgtattctacgaagaagcgtatgagcttaagtcgcttgatgatttcaacacggttgaagaatctatccgtggtcagttgcctgctggtggctattaccaaacaagtattgcttttag

SEQ ID NO: 713957 - DNA, 138 bp, Homo sapiens
ggcaaaatattttaaaagcccatttttaaaaaataaatacattaatatagtgtccctgtgtacataagtaattcccaaagttaataaaaagctatgagacattgctagaatttctccaataaaattcctgtagaccca

SEQ ID NO: 713958 - DNA, 206 bp, Homo sapiens
ataccgggagcagtacaaggcaattacccgacgagtatgtcacccgcagcaaagggcgctgctcgaggccgatttcactgaaaaaggtctgcccgtcgccagggctttaggtacagtgcgggatgcccagagctatctatcagtcacatggtcgcaggcggacaacatgccgccacgtccgcctcgttttgcgcctgagcccggcg

SEQ ID NO: 713959 - DNA, 2069 bp, Homo sapiens
  misc_feature (232)..(233): n is a, c, g, or t
  misc_feature (235)..(235): n is a, c, g, or t
ctctcacgctgccttcaggatccccagcccccaactcttcttcctgaggatggaaatccactccagccccactaggactgatgtgggtgccatacaggcaggagcagcccaccaggaaagtgtaaggagggagctgaactccccagagtagctggaccacagagacttgggtcagagctgatttcaaccccagaattgtctcttgggttcaccctactcttctgaagatgannanttgtttggggccttggtaaccgatagcggtacaaactccaaggcactgtggacttgagtccattcctatctgacctctttttgtccccctcaagcctcaggggcctcaagccttccttagtagcccttggtgactgggccctgagcccaagcatccttctttcccaacaaccctccttccccatccttcccccacccttacctacacccaaagtggagcacactgcagtcagattctccaggagggagatccaagcctcctcccaggggtggagtccactctgggcttactttgaggcctgttctgtggattggtgagccaagctggcactccttgccctggtcttacccaggctctctgtccccctctcacttcctgtggggccggaatctgtatttatccatccccctttcccttctttatagaagtccctgtcctaaactccctccctagcccaagagagccccagaactggggaagcctgacccatacagaatggggagggcactctaggcaggagagacattaatgagcctggctgcagagtggccctggaaaggcaggccagagtggctgagaggctgggagtaggggagcctgttctctcagcgatagtgatgggggtgcctttccgagggggtggggtgggaagaccaagggggtggggggtagatagggtacatttaggagggttttcctccatttcttttttctaactgcctggattcaccattggattttgtaaatggaaaaactgaaatgaacaatgctatactggatgttttctctttctgactgtgtgtgtgtgtgtgcgtgcgtgcgtgcatgtgccctgtctgaccacatgtggagagacatgattgagtgatagtgtgtgtctgtgtgactttgtgtggggaggcactcctgaagaaaacttgcccggtgcacacacgtaaaatgcctgtatatggggacagatacagcacgtgcatgcatacacacacacacacacacaccacagttgagaggagacaaactagagtatgtgcccgtggtaggaagtcgagtggtcaagagatggatcttggaaactacataggtcggtagcaagagggtagactcccatctcacaagatgggcctcccttggcccaggccctgagcacgggagggctggggccgccagggaacttgaaaacctcatctcctcacaaagcctgtagccccatctcaaccccgtctcagtctccttcccaaactcaaacaaggtgttcctaaaattggaccaccatggagaatggggactgggaattgaggatcaaatgtgagggaaactgatgaggttaggaaatgccccccacaaagtaatggcttctggagggactgctcagtctgggatgggagcccttcctaggggccactgtatgcagctgggactttggtcagctttgaccaaatttagagggagggatgtcatggggaaaaaaaacccaagcccaggagtctacccagccagcctgctccctagacagttaatttactatctggttattctctcaggtgcacagaattgagttgaccatactcctcagttcttggcacactatatcatcattggtccatgtgaggcccttttatttttttttcttcagttttgtccccttcatcacccattcctgatcccatcctccccgccccctacacaggcacccactctcgtgtatttaacgtacgtccttccaatccaccgttcatgtgtttatttacatatatgtgtatctgtgaaaaatgtatggtattgctgtgtgttttaatttacataacccgtcatgtcccctcccccacccaacaca

SEQ ID NO: 713960 - DNA, 181 bp, Homo sapiens
ggaaaaaaattttaagtttcagggccaaaatcggagatccagggtggagatttaggtgagggccccggcaaaaaaatgtcctaggaaaaagtccctgtccaattttgagttttttgccctttccaaaattttgtataaagtttattaaatttgtaataaccgctagaaccccctggttgca

SEQ ID NO: 713961 - DNA, 1096 bp, Homo sapiens
gcggggcctgccctggactgctgacgccgccacagcttgtgggccagttctgcccagtcagtggtgatggctcgtgtctggcctcgtggggtctgactgatcccccgtgtgtagtgcgactgtgccctgtccatgtgcctcacttccctgctgtcctgcaaaactggtggtggacaactgcagcctaatgtgcagagcctgcgccaatgtgtccctcgctgtcgcctgggctctggctggcctgaccgggcctggggtccgagcgtgcccccgggcctgggggggtcgccgcgatggactcgctggcagcgcccatggaccgcctgtgtgcgagcagcttgctgtctgccgctgggacccagtgaccagaggcgtgctcaatggacatttgacaatgcatgtacgtggcgcttctgacacacttgccccaacacaggtgcacaccgcaatgtccggttgacgcacacacggctttgactttcacactcaattggtggcatggtgaagtcagtgcctggtggaagtccacactggtccacaagactcttcctgcacagacttgtccaaggaccggcaatgccttgctcagtgcttgacggagcgcaattcacgccagacgggtagagcattcctaaaacaccaccacgttggcaccttgaccgagaaggggacgtccaatcttgaagatcaccatcgtggcacacgccgggaatacgggaggcacgccatggtcagcaacaccggaagtgcttgaaaacccatcagccgacctcatgtgggaaccaggcagctttgtagcaggattccgtgcagtacgagcggactcaaccggaagaaccatccaacacacagatgactggtgcttatcaggtcatcgtcccccctatggggcattggccttgggccaaagcagagagcgggttccctggcacggacattgacgagagaaagtgtcaccagagagcccctgactgcgccaacctccgtttctgttcagagtgtaaccggaaacaagcagaacgcaccctggagcactatcagtcgtggacccatacacatcccagagtgaatctacggaagcacaacaccagagatg

SEQ ID NO: 713962 - DNA, 233 bp, Homo sapiens
cacacacacagacacagagacacatacgcacacacgtgcacacatgtacacacgggatacacacacacacacacacacacacacacgtgctatatcgtgagcacgcccctcgcagtgggtctcactcgttgcacctttcttcagagattattatagtgtgaagagatttattatatactatttttctctctctttttttctccaaacatcatcttattatatcttattaagaa

SEQ ID NO: 713963 - DNA, 365 bp, Homo sapiens
tccttatactatccctattaggcatacttataacgcgctaccatcatgctacgcaaaacagcactaaaatcgctacattgcgtagtcttcaatacaggcacatagcccacgtagtaacagccatactcatccaacccccctagaagctacaccaggcgcaatccttctacataatcgcccaagggcttacattcctcattactattctgactagcaaactcaaactacgaacgcactcacagacgcatcataatcctctctcacggcattcaaactctactcccactaaatagctaaaagatgacttctaacccgcctcgataacctcgccttaaccccggtgtctggtcgggccaagggggatc

SEQ ID NO: 713964 - DNA, 332 bp, Homo sapiens
tcagagagtacagttgcctcataggactttaaccccttgagattttcattctactcaaatcctatcacaaaaccatctcgctagtttataactctggctcgtaactagttgataactatatatacatacatacatatatatatacacacccacacacaaattagctgggtgtggtggcgcacacctgtaattccttccttcctccctccctctcttttttttttctttctgaggatggagtctcgttctgtcacccgggctgggagtgcaatgggcagattcttgggcttcactggcaacctccgccttccggggttcaaggcgatttcttc

SEQ ID NO: 713965 - DNA, 430 bp, Homo sapiens
gtcttcctcaaacaatggtggggggggggcgctccgcgctcctaccatacaagtgagggtgggtagagttgtagtgcacatccgaaaatggggtggttgtctgtgttgtatctaccatgtgatgatgtgtgtggggtttaaactagcgttagtgaggagttttcacaacaaaactaagtgtaggtatactggagcgcgatcagggtgtgttgtggtagtagtatgtagaaccgtcaaccgcggcggggttggtatgacagtagagacaggtaatgaaatagtagagaagtgtaaaatcgatggtgtgtgagggtttcgttccacacaatatagttgtttatgtctttgttactaacattcttataatatattggttacacgctccgtacagttggatgcagaggggaggtgagaggtggtcggtcacgac

SEQ ID NO: 713966 - DNA, 844 bp, Homo sapiens
ctactgcaggtgacttgccagtgctcctcttcctgctgctctgcttctgggctcctctctgttggtcactataccatagaggctatcccaatcatggtgactgtcacccactgggacattctgccattgctactaccagaagtcagagaacctacccatcgcaggcgacaggtcaccagacttcaggcccatagtcctcatatatctggttgactgagtgagtgctgaggccgatcggagtttgtggaggaactgtgaccggagcagtccaggatggtgtggatcgagtatgccgaggtcctagctggtaactatgatcacacaaacatcaccgacagtatgtaccatgcatagattctgtctgcagagagaacgatgcatgtagccaatcagcaaccctgaatgtacggcacctgcaggctcaggaagtttgactgtgagagccagtttgcaggaactatccatctattgaagcggatcatacaagaaggttcatggacctagaactgggcagcgctgcctgcccaggagctggaggagtacaacaagatcctgttggatatggaaaccacctacagcgtggccactgtgttgccaaccgaatggcagctgcctgcagctcgagccagatctgacgaatgtgatggccacatcccggaaatattaagacctgttatgggcatgggagggctggcgagacaatggcggcggagagccatcctccagtttaaccctgaaatacgtggaactcatcaaccaggctgcccgggttcaatggctatgtagatgccaggggactcggtggaggtctatgtacgagacaccatccctgggagcatgaact

SEQ ID NO: 713967 - DNA, 293 bp, Homo sapiens
gacacagcccttcctcaactccggggacagactggatcctcacaaagctgagcacaacagccactacgactgagtccactggatccacggacgccgcagattctccacacccaggtagcacctggatcctcacagagcccagcactacagccaacgtgaaggtagccaacggatacacggacaccgactcctacaaccgggcaacagatggcagcctacaaagtagcagaccagcacggacaacaaaacacacagtcatacaagatcccagagacattccctcctccagtcca

SEQ ID NO: 713968 - DNA, 119 bp, Homo sapiens
tgcactgttgttcatacttgcactgttgttcatacctgcactgttgttcatacctagtcgctgtatcgggagtatgctgttcgaattcataagaacagttagggtatgaacaacagtgt

SEQ ID NO: 713969 - DNA, 268 bp, Homo sapiens
aaaaaacaaaaaattagccgggcatggtggcttgggcctatagtcctagctacacaggaggctgaggtgggaggatcatttggacccaggaggtcgaagctgcagtgagctgtgattgcaatactgcactccagcctgagcaacagagttgagaccctgtctcaacaaaacaaaacaaaaacccaaaaaaccacaatgagctgtcacctcatacctgttaggacagatattataataaaaacaaaaaataacttgtttgatgaagatg

SEQ ID NO: 713970 - DNA, 249 bp, Homo sapiens
gggccggtgcagaatacgcgagtttgctcttgttgctccataagagagggacttctgcatgtgcatatctagacacggccacgcttgagttcaggacccttaattaagatcctcaagttggctggaggatacatctcgcgagtagggtaccaggtcgactatgaaaagatctagctttcgtgggcaacgcggtgaaaagaatagttgcgtttcggtgggtgacgcagcgtacatgctgcaccaaagggt

SEQ ID NO: 713971 - DNA, 951 bp, Homo sapiens
  misc_feature (85)..(85): n is a, c, g, or t
tgtgtattaaaggataagtcttcattgctcaagagtatgttacaaatagatcgtacgtaacatcgacgtcgcctttggtcgaatngtccgtttccgttgagttgattaggaatggcctgtcgctctgggacgtgatctctctattaagtccatcccctatgagatgctgatgacatccgtgtacttcagtctaccgggggatggtggaaggagggagaagaggagagggtcgaacgggagaggggcctctattgtcgtaaggtaagtctcccataatcctagcatcgactggtcctgtatgattcgcactatagccagcagtgtgctatcagatgcagacgttttgtaagtcagaacgatgcctgctgcttcatgtgtaggacagatacgatatctattttgtagccaagcatgctaagagctctttaacgaaatggggcgttgaccatagttgtcatcgatgaaactagactgacgacgctctatgtgacactctacgacctatattcgtgagagaataaccactgtctggtctcataaagtttgatcatgcgataacatctcttcgagagcaatgggacgattcgttaagccatccctacttgcaagacacgtggtacttgctcgacgcgtactatggtctcactttgaggcgatgtggagccaagcaggagaggtgggcaggcatagggatatctagtagccaagtggtgaaggatgcaattgtcaattgccatggaatggctgctactcccatttattaatggttcccatgagtttctaaacgatctctctggattcacgacccatttggagtcggtgactggccaatttctccattgggcctgtggtgacctaattaacagtaaaacacacttaaattccatacttgagcatagtcactactttgtgggcgcgacaataattactaaaccgggtaataagcactcg

SEQ ID NO: 713972 - DNA, 793 bp, Homo sapiens
agcgtggtagtgttcggggtcaccgggcgtcccgggcgcggacatggcaaggacgcagccgtgcgggcccgcggacgctaggtgctggttcggcgttcgctgccggagcaggcggctgcgaggtgaagcgtggtgcgggctcattcagctgccccaactttcagattgcgaagagcggccgtgagaatctgaagaataatcgatccatccaaatttgaagatcctatattagttcctcttcaagaatttgcatggcattcaatatctacaggagaaaaaaagggaatcaaagaatgaaacctgggaatattcttcctctgtgatttcttttgttaatggtacagttgtctgggtgatgcatttggatctgcagaaatgggcccacgaggtgtgggatatagttgaccattaaaagcctctgcacttaatgacgcactcactgaggatttttccgctaagttcttaagagaaacaagcatgattcgagtttttggacattggtattgatacttctccaatttggaagattgaattttgagctatactgtgatgtgtgtctcaaaacttgttacaaacttccaaggtcttgtgcacaggaaaaagcagggttttctcaaccgtggccataagaactacatttacaaaaattcccatttttccattcgaaatacttacagaaatgggtgggataccaaggcaggcgataataagtgttttggaaaaccgacattaatggggcaggtgattaagggcaacatttgaagatgaaaactttggagtctcataataaaga

SEQ ID NO: 713973 - DNA, 195 bp, Homo sapiens
ccgctctcgtgagactcaccacttggaggaagatcgaacgcgagcaccatttgagcatggggagggatctctggtcgtgtgtccgtgctactggcgacaagcgccgagcgacagacttaattattgtaggtcttaccggatatgtccatgtgcaggacgcagatgtagagcgagggtaaaaagcagggtttagca

SEQ ID NO: 713974 - DNA, 1157 bp, Homo sapiens
gctcgtggaagtgacttcgtctttaaacccgtgcgtgggaatccctgacgcaccgccgtgatagcccacggaacgacagggacgagccatggtatgtccaagctgagcttcctataatgactcatccacaacgtattgcgatcgatgtatcgcgatacatgtttgcactcgtgtggcagcagagcgaatagtgggactccaacggcaggatgtcgagcgatgagtccggctagtgtccacttcgtcgcgtgacaggctcgtgagttgctagatggtccgaagaagcaccagtgtatgtcgacaagtgcgcactcacgagtgggcattccttagagtaaaacacaagactcgcgatgtctgctaggcagaaaactggtgtggtcgcatcgaatatttcgccggtgtcggagactgctagtgctgcattttgttagctatgccagctcaccaggaacggatcgcgtcagcgtaggatcactcacggggtacccatgtgtgcctcgtgcgcaactgaagggtagccgagaccgtgcatgcctcgaagtctggggtagcggcatgtgacccacgatgttgaagctcacgtgagtggcactacgtcgccatgaactatctggatactacgagtgatcccgtgagaaggacactcgcttatttgtccaaggcgttataggggtattcactcgagctagaagatcgttccacgggggacagccccatttggaacatcgctgaagtcgatcgttgctacgcatgtgatcgacaggactgggtaggaccaagagctggagagcgcatgactgaacggccacaagcgtggctgaaacgtatgcgtacaactaatctctccacctatctctccttgttggcgcgtggtccagtcccagcagggtggtttcggaccaagttggtcaggcacatcttagctaactctcttgagaggtgcattgtagtatcagcgagagagacaaactcctgcgatttcctcgactatccttgggagcggtggtcccgcaagtggttgcccagtgtcatggtctgcaagattgtggtaccccaaactggttggcatcaggtacccccatttctatcattcaacgggttacaaaacgagtccttgggccttgtctgggggagacgggatttacaccttccca

SEQ ID NO: 713975 - DNA, 893 bp, Homo sapiens
  misc_feature (594)..(594): n is a, c, g, or t
  misc_feature (790)..(790): n is a, c, g, or t
tccccaaaattttaaaatttttttaaaaaaaaaaaaaattttttccccagaaagttttccccttttttttttttactgtcttagttgccccggtccatctctgtagtggggaagcgcgtagaaaaaataattaacgtcggcgcacttattacgtggtagcctagagaaaagtagctcttcccgccctccttagaggagtgagtgcttcatcaatccccaccatcctccacccaaccacatctcttttatttatatgatattttattataccccctctctatacaagagatcttatcatcaaacaaccaacgaataaaatatatctactgacgccaatacatatagtgcgaaaaacaaaaaaacaaagagaggggggcggcgcgctccacctacaagacagtatatatcctctcccgaggagcgggcgccccaccagacgatctacagtagcgcgctcacacacacgactacttctttgtgtgtgaccaaacaagagcaggagtgcgctccctcaataaagtagaggagagagcgaccgataaaatatcaaagacagctgcgagccgaacgtagggcgcgcgcgcgcgcgctttnatacacacaaaccgccgcgacggcgaagatcgagtgacgaaacacggcggcgtctcaacccgagaggagcagacctcttgtcggtgagagagcgagcacaacccctcatataactctcgcgccgcggggagcgggcggaccaactacataatctcggcgcgccgaaccaaccacccgcacgcctagacaggagaanatatatctaaaacacgcacgtccccaactaggaggggcacgacaatactaacactagccacgctactcaacaaagacgagtgacaaaaaagagggcggcggca

SEQ ID NO: 713976 - DNA, 527 bp, Homo sapiens
acatgctctactcttgaaggatcgtacctcattgcatctcagaaaaagttagtgatgcgtttggaacaaatttaagcttagacttaagcacagtctgctcccattatttgcggtaattctgtagtcatcatgatcactcatttagtgctgctgagccaatgttcctgggagtgatgtagagttttcaccagagatagattgtggatcataatcttgaatcctaaaaataactcttcctggtagatcctattttctttacaaaacagagaatgctgctgggtgtggtggctcacacctataatcccagctcttcgggaggctgaggcaggcggattccttgagctcaagagttccaagaccagcttcggcaacatggcaaaacccttctcgtcaataaatcctcaaattagccaggtatggtggctggcatccgtggtcccagctgctcgggagggtgagtcaggagaatcacctcagcctagcgcgccgcaggatgcattgaggcgttgttcaaaaaacagccctcc

SEQ ID NO: 713977 - DNA, 160 bp, Homo sapiens
cgtgcaactgaaattcagcagcgggagaagatggacaagagaaagctcgggcgacggccatcttcatcctgataagaaatgatgttaaatgcaaaaccagaggatgtccatgtacaatcacggactgtccaaattcagaagctcagacacgctggagtct

SEQ ID NO: 713978 - DNA, 850 bp, Homo sapiens
gaaacggtcaaatggcccacgggggtgacgagtctgccatagaaaacccgcggggcgcgcaaccaatagcgccgccgtgtcaaggacccaaagtctgacagggacacaccacgcggtgcgcacagggataaattatcggaacgcgcccccgaggggacgcgttggttcaccaagaagctcgatgccccaggggaagaacaagcccgtcaggtggaccccccacggtgctactaccacacgggctcagaaaaagcagcccccgctcttctgcaggaggcagcaaaaaagacagccgccagtggcagcgggcagagaacacaaccgccccgcgcccgtatggtagcgttgtcacccgcccaggaagagcacacacattttggggcgatagaccaccgattctgtctgccgacactctgttgataaagcccgtttgggtagaaaaacagaccccgaagtgccaacatttgtggtataacacaaacaaaagtgtagcctaacgtctcatcttgggaggagaggcgaaagtctcactcagtaccacattattaccaacaggcgaggtgtgtttgatgctgttcgtgttggtgagctcgcaccacactatcattgttcaaaagagtggcaccgccttatacacactcgccacaacgaagcgatccaccaaccctccctcacgcacgagtgtgctcacacagttgttatgggggatctggcggaccttttaaaaagaggtaggggagggggcatatagatgaattttattagatagtagcgccgtctgtctagataagcacgaaaatgatggagggcaggcttatttaaaacaagaaatttcccccccccacataac

SEQ ID NO: 713979 - DNA, 729 bp, Homo sapiens
ttacagccaggctacacagccccaccgcctccacctccaccaccacctgcctacaactagggtgtgctacggcggttacaagcccgggcctgcgtatagctgatgtgagctgaaggcagcggatgctgctgcacttcagtaggtgcagtccgtgagcgaggccagaaggaggggggatgaggacatgagaggccaccttagccgccaaaggtattccgagcgccagcgacatgagctggaggcttatcccgcaggaaccacaggggtgttacctcacgatcacgcgcaataaccgagaacagtcccaaacaaagagcacgcggcagagccccccgggggagccccactcaacaagcgccagcacctgggcgaagcaccataccgacctgcaacagcccaccatcccgaggaagccaccggaaagcaccccagcctcaagggccctgcatcagcctacaccaccaggggaggacgcaaccctagggaaagggagaacaatgaccacattccactagcgcgaacaagggcgactcaaatacaagaaagaacaccacaacagggccacagaaaatgaaacgagcgctcacacagcccgatagagtgcccacacacgtcccacacaacaaacacaaacgcagccgacaacatgccaaagcgataccaacaagacacagaggaaaagaaaaaaacacaacgaaacacaggaacaatacaatgaacgacaaaggg

SEQ ID NO: 713980 - DNA, 170 bp, Homo sapiens
ttagcacctctaaatcaccacgctcaaaagggacaagcatcaagcacgcagacaatgcagctcaaaacgcttagcctaggccacacccccacgggaaacagcagtgattaacctttagacactaaacgaaagtttaactacagctatactaaccccagggattggatcaa

SEQ ID NO: 713981 - DNA, 203 bp, Homo sapiens
tgttacctgatgtcatcccgttgtagtctcaatcacacctctaagttcttttatcctcatttgacagatacggaaactgagactcacggaggttagtgtacacattgcctacgtgttacaccagccacgtaaactctgcagagctagaccctgaactcatgatttgccagcctccacaaggcttccagcacttctaacgcgta

SEQ ID NO: 713982 - DNA, 410 bp, Homo sapiens
  misc_feature (11)..(11): n is a, c, g, or t
  misc_feature (23)..(23): n is a, c, g, or t
  misc_feature (43)..(43): n is a, c, g, or t
actcgggtcanaacaaacctccncctcccgggttcaaataaancctcatgcatcagcctctcccagtagctgggataaacaggcacacgcccacccacaccctggctgaattttgtattttgagtagagacggggtttcaccatgttgccccaggctagtcttgaactcctgacctcaggtgatgcactcacctcggcctcccaaagtgctaggattacaggcgtgagccaccatgcccccaccttattattttttgtagagatggagtctcactatgttgcccaggatggtctcaaactcctgggctcaagcaatcttcctgcctcggcttcccaaagcactgggattccagacatgagccactgtacctggcccaataactttacttttgttatggttgaacattcct

SEQ ID NO: 713983 - DNA, 150 bp, Homo sapiens
cttcatgtccttctccggtcatggggggatcccatgcctccctccctcgacggtgaaggaggccgtcagaccattgaaatcctcgacgaacacctcgagagggaccggtgcagttgtcaggacgatgcactcgtgatcattgcgacgact

SEQ ID NO: 713984 - DNA, 162 bp, Homo sapiens
cccagtgcagtagcgtcatgctgcagacagcactcaaggagggtcgaacaaatccaagagtcgggcttcaaacctaatggtatcccggggggacccaaggggctcttcctcactcaggtcttggcaatctggcatgtccagtttttaaacaagagcggttta

SEQ ID NO: 713985 - DNA, 301 bp, Homo sapiens
tctcttcattagggcactggtgccccttctcccagccttttaagcaacaggcactagggtcacaagcgagctacagaatgacagacatagcccacttgggctaagtgcacattggcgagtggacgaagggaactgggttggatactcaacggtgtacggtctcctgatgcccctgtaatccctggacgattccagtataggctttcaaggaggttgtccttagcttattcagaaaatccaccatggcagagtcggacttgtccacctgggcttgggaggcccggtgaagagtattcagata

SEQ ID NO: 713986 - DNA, 196 bp, Homo sapiens
acaattctggtacagacatgactttggtgaggatacagaggagatgccacttctcactcaccacgtaccagccagcctcagaaggccccagagagaccctgctagaccacggagggagcgacacttgaatgtagaataggcagggggccctgccccaccctatgcagcacttacccgggacccgaggctctaattt

SEQ ID NO: 713987 - DNA, 393 bp, Homo sapiens
tgatatatgatcctaactttaagacacattgacgatatttgcaaaataatttcaataaatgtaaattaccgttataaatgtctctttgtaacacatttagaattttaaaaaatttttgttaagaatttatgtttagacaatttcttttttttttctaccattcgtattttttcaagaaaatacgggtttcaggttaaactccgtcaaatgtaataccgatttagaaagtcagagttctgagtcggttccaacactccaacgtaaactagtacgtaaactttgttcaagtatccactaacgagtcctgtaaagacaatcttccttagcaaaaggaatgaaaaggaatgcgtgttctcaaggcatcgacaagttcaaacacaaagttgacaagag

SEQ ID NO: 713988 - DNA, 1251 bp, Homo sapiens
gctcatttcgcgtgattctagctgaccaggcggagaccgctgcgtgtcccgtatccagcgtctagcgtgccaagcgctgcgcgaccgcacctcgtatcttgcataccacgcttatcgtcaccatcgcatcgagttaggggcacagaaggtcagttcactcggacaggcagtcaccggaccgtccgactgcagtccatagtgagaaagtgtaggtggttaacggtggcctcctcagcgaatgactctccgggcggatcaccacttgtgtagagctcttagcagcttctgccccggaggaagagcagtgcagcgcagcgcattgcaccgcagtgtagagtgagaaccggcgtagtgcctaacaggcccaagacttgacgtgctcagcctatgggcaaagcaatcccaagtcatgggattactactgtgtgaaagcctatgtgcccaaggagaaccctgtgtgcggcagaagaacacgcgagccaagcgaatcgttgtttccgtatgtgactttcgttgggtgacacaaatcgaggggacagacttgcaagcattacgagcgtggagaagacccctaaggaacttggtttgtgcacacaccgcctagaaaacacttggattgactgtggagcacaagtggacccctattccacacaatcgacgcaaaactaggtgatatccttctcccatttggcgcacaaacaacacaggcaattggaagaacgaaatatgagtaaagcggcacatggcggggcttggcacgcaagaaagccctccaagaaaggttacgtaatatatggatcaaagctgcgattttttacccccccatgtgaagattagccatgtatctatggaccatgcgtggagccccgtgagggtatccagggcacctcttctttgatataggccggaagttaacgcagcgtggtggatgtacaatgtgcgcgtagagcgtccagagtacaacaatacgaggcgttcgaacttctacgaacatatataagtttaccggtcccggtcacgtttttggcttaccttgtggcgaattacgtccctaacggtatttgcacatttaccacctaccacttttatggcgtttgccccctatgagagggaccttctgcagctggaagagcccacgaagtttgaaggaagcgcagacgattactcgcgcagggaagagctaagagaacggcgggtagcattgttgctgtcacaccggcacaggcaaccagacaggttacaccctttcgc

SEQ ID NO: 713989 - DNA, 331 bp, Homo sapiens
tgaccatagaggatcccgcccaaacaaccagtcgtaacgcaaccagtcgtggagggagggatatgaagtagatagaaaccgacctggataactaccggtctagaactcagatacacgtaggactttaatcgtatgaacaaacgaacctattaatagcggctgcaccatcgggatgtcctgatccaacatacgaggtcgtaaaccctattgttgatatggactctaagaataggatatgcgctgttataccctagggtaacttgttccatatggtcaagtaataaggatcaatatgagtatagtaagttcgtctaacgactggttgtatggg

SEQ ID NO: 713990 - DNA, 185 bp, Homo sapiens
ggcgggaattattggaggaggtaatttcaggcttacaagggttgacccaaccgcaaggaacatattgccacgttcctcgtagagatttggacttggctaaggacggttcagcttgaaggtttcattgggtttttaaggtgcttgtggctcacttgaggcttaagttaggatttccttcaattagt

SEQ ID NO: 713991 - DNA, 726 bp, Homo sapiens
agcgggccggctaatttttttgtatttttaatagagacggggtttcaccgtgttagccaggatggtctccatctcctgaccttgtaatccgcccacctcggcctcccaaagtgctgggattacaggcgtgagccaccacacccggcctattttttgtatttttagtagaaatgaggtttcaccatgttgtccaggctggtcttggactcctgacctcaagtgatctacccaccttggcctcccaaagtgctgggattataggcatgagccactgtgaccggcccctagtcccatttttgtactatcttttcatattctacttcatcttatttttctgttatccatctttctttttttttaattaaaatcttccctacttgttcttttacaagggcatttgtctgttactggccttttgaatttctgtacacttttttatttcctttgagatggagtctcactctgttgcctaggctggagtgcagttgtgtgatcttgactcactgcaacctctgcctcctgagttcgggaaattctcactgcctcagactcccaagtggctgggattacaggcatgcaccaccacacccggcataatttatatattccttagtaaagatggggtatcacatgtgttggccacggctgggttcggaaactcctggactcaggtgattcgcctgctcaaccttccaaggttgctggattaccaggcgatgacaccat

SEQ ID NO: 713992 - DNA, 611 bp, Homo sapiens
  misc_feature (166)..(166): n is a, c, g, or t
ggaggaaaagcagagtatcgcacctctgaaaggctcaaaaacaaaatggacagccatcctcccagactctttgcatgttccaacaagacaggacaactccttattgaagaggtgccaggagagatgactcaggaagacttggctccagatgatgtcatgatctggnacacctgggatcaggtctttgtttggattggaaatgaagcaaatgaagatgaaaagagtgaagctttaactttagcggccaaatacatcgaatcagatcctgccggtagggataagagaacccctattgttacagtgaagcagggttttgaacttcccacctttacaggctggttcttggggttggaatcatgacttctggagttctgacccactgcatcgggccatggctggtctgaaaatgtaattggattgatctactgtaacaccaagatgactaaatgctgtatgctgcccattgtttacctttttcatccatgtttgatacccgtctatggaaaatctaaacatgtttcttgtcgaaatccttttaaaatgcattagaacttgaatttatttactgatcaactcattgaaaaacacaagaataaaaaaaaatatatgta

SEQ ID NO: 713993 - DNA, 210 bp, Homo sapiens
cttcaccttatgcgtgtgaggataagcacatatcagcaagccaggtttgtagtacctcctctggaacatcaccagtatctcagcttctatggtcagacaagtctagcgtactcccctatctctattgacagctgggtgtattgtgcacaaagctagcaacccaacgtgagataagaaaaagccacgtagggaataatgaggatccgcatg

SEQ ID NO: 713994 - DNA, 1708 bp, Homo sapiens
  misc_feature (287)..(287): n is a, c, g, or t
  misc_feature (577)..(577): n is a, c, g, or t
  misc_feature (617)..(617): n is a, c, g, or t
  misc_feature (619)..(619): n is a, c, g, or t
  misc_feature (623)..(623): n is a, c, g, or t
  misc_feature (1074)..(1074): n is a, c, g, or t
  misc_feature (1315)..(1315): n is a, c, g, or t
  misc_feature (1708)..(1708): n is a, c, g, or t
ttattcaagtaatcggcaaataggaaacctaaagaagggagccccgaggtggggacaaatcatgtggcatacccctctccccaaaaaaaacggggggagggaggtgtggcccctataaacgccttttatgtggctcagatttcggggccccctttggtcaacttcgtgctgtgacagaatctccatgaggggcgagggcgccacacctttccgctgtgggacctgtggggagagtaagtctccgtgcgtaaccccacaggctctgtgtcacatgtgcgccacaggcncgcgcttcttctccccacaacaagagagaggtttctcttgctggggagaaggggagatctctggtgggcgcaagacacacaggagaggcgcacatgtgaggagatatgaacacattgtgcggcgcgcgcgtggtgatagcacagcccgacgccacatgtgcacgcggcatgtgtcttcagaagaaaagtggcacaccatgtgtgacacacaaaaataaaacacacatacacacagagtgtgtgtcacagagaggtgatatgtgtgtgtgtgtgcacacacgagcgacggnacacaagtgtgtgcacaccacagaaaaaactctgtggtgngngcgnggcccgagggggctagagaagaacccaagagaagagagtggggcggacattgcgggcagagaggccgcgcgacgcaccaggcgggtgttgaagagcctactcccggcatgtgtggttacagtcgtgggggggtcccgccccaattttcgtgagacagcgaggaggggggcgacaacatgggggctctgaaagttgtagtggcgcggaaacacgccccacaaaagtgtcacgaggggggtctaacggggggagaacagaaccaggcccccaacaagaggccccaagcatctctctcaggggtgtggtggcgcgggcgcccaccaaggggggtctcacttatggaggggcccctcaaaacgtcgtggggggaccaacatcaaaggcggtcaagacgtggggaagtcccctcccacaattatccaacccccagagaaatatatattgctgtccnctccccaagagaattccccccaaggggcgggagaacgggggccaatgggcgggcgtctttgtgggcagccccaacctggccgtcaacaagcaggcggacgttctgggcgcgcgttttcaccgctccctttccttggggatttcccttgttgaaagccccgaagggggggggctttgtccccaccctctattcgccgggggcgctccagcgggcacttttgcggcgaaatcgcgcatcaatnatgttgggtcgcccgccctgtctcgtcgaccaacaccacactgtctgggcgtcggggggaaaacacaccgggcggggcgcacagaaagcccccccctctcacatgtggggccaacacctctgccgcggcctgcaacggagagcgaggagacaatacacagaggtgcgcacgcacaaacaaacacggacgcgtgcggacacccaactaaaggacgagggagaagcaaccctaacggcggccacattaagtagcaacccacacgagcactcacaagcgaaaagaagaggtgcggcgccacataaagacagagaagagagtccccccacacaagaagggagcgaacagacaacagcagaatgtgaagtacggaactgtacgtacaaccaagcatgn

SEQ ID NO: 713995 - DNA, 390 bp, Homo sapiens
  misc_feature (9)..(9): n is a, c, g, or t
  misc_feature (30)..(30): n is a, c, g, or t
  misc_feature (385)..(385): n is a, c, g, or t
taaacccgngattaccggaagccttttttncctataatttttaaaccttttgaacccttttgtgacaataccttagcttaaaacacctaatacattgtaactgcataaaaattgtttctttgttttttgttttcttttgtttttttcttgagattgtgccactgcagtccagccctgggcgacagagcgagactgtctcaaaataaataaaataaaataaaaaaattttaaaaatacagaaattagctgggcatgtcaatgtgtgcctgcagccccagctacttgggaggctgagttgggaggatcacctgagcccagaaggtcaaggctgcagtgagctgtgatagcaccaccatactccagccttggcaacagagaccctgantagtt

SEQ ID NO: 713996 - DNA, 1238 bp, Homo sapiens
tgggaataatgggggaacttcgtggccaccacctcgtacttgtgggggggtgtttttctgtggggggagaaaacacctctgtcataggggcaaggaccacacctctcggatggggcccaccaccgaggtttgtttcgctgcgtttctacagccaccccacaaactgttgtgccacggtcacggtgacaacaaaagttgtctctcctctggggggcccccctaggcgtttttcaaagacgacccggggggcgccttttagccgcctctaccacaaaattttcgagaagaatctgggtcttctcccccgggggagagaagaatagaaaatagggccggccgcctgttattgtgttgacaacacaacaagtgggcgacaaagttgtcttctgtgtggtggtgtggggcccccccacttctgggcccccaccacggaggagttgtgtgtgtggcggcgcttcatcaaaacacacttgggagcacctctcaccacgaccactgttgttctcgtcttcaccagcggagaatagacacaccacacgtgtggtggtgaagagacgactctcctcgagacgacacactacagtcgtttgtgtttgtcaacgacgcaccacgcagggggggttgtccccctctctgggtgtttctcctacaccacagtgtgatcaccctgcgagtgtgtccccccacaacggggggacgaacaggcacaccctcatactcttccagtgtgtgtcacagtgcgtgtgtgagagagaacccagagactgttcgcagaccactgttgatacagcccgctctgtctggtgaacacaaacacacgcggccacaacccaaaaagggggcccccctcggtgcgagaggagactttttccgccactgggcgcacacctctctctaacacagcgccggagcgccacgagcacccgccacgggggttgaggtgtataaaggagagaaaattttcccgccctttttacaaaggcccacgggctttcaccacgaggataccacttgttttcctgcccccaaccgagtaaagtgcactgacgggacacataggagcttccccacgggctgaaactgggagttccggccacgccacggtgagcccccaccgcttctggagagtttttggtttgttcctttcccgagcccctgccccgggttcccgccacaagcaaaccctgcccaattggggtttatcctgcacaattaaacttccggaagcaagtcagtta

SEQ ID NO: 713997 - DNA, 276 bp, Homo sapiens
gatgagtaagctagcggggaccaggtgaggtggggacagggagggcgccagcccgctgtgctgggggctttccctgagctgcaggaccctcggggggtcccctctgtgccctggctccgctcctgggcacactggtgcccagctgtgggagccaagatttactcatcggccaagatttattcatcgagcaagattaactcatcgaccaagatttattcatcggccaagatttagtcatcgaccaagattgactcatcgggcaagattgagtcatcg

SEQ ID NO: 713998 - DNA, 685 bp, Homo sapiens
tacgcgttactacgagactgaatcgcagtcgcgagtagacctgagtcatgaaggaccgtgctttagccccaacagagtgattggactctcaagctgacttgcagcacacgtagagatggcggcattctatgactctgcagtccaggatgccctgagctccagtgttgcaagtatgctgaggatgtactgtctggaacaggtgtcagctgacatagtactgtgggccgcttcctgatgagcctggttaaccatagttacctgacaaatagttcccgatgagcttcgcgacctatgctcaacagcttagacattcatatgatccttttgatggtgatccttacctggccagacctcacacacggtcacacgattggcactcgacatgatagaacacttgtagacacctgttgaatggagccccaatgcagtacatcttgctggtctaggtattaatccccaggactcagaagtgaaggcgaaatgggtctatgctggtgggctccttgagtcactactgacgcatagtcagttcgtgtggtgactgctacacttaaccggagcctaccttgtggtaagcttaaccatgaaaccgagatacaaaagcgcgagtgctccaaagtcacgcggaacgggcaacaggcggactccctctgggctcgctgcgcttaggggtctccggaacccg

SEQ ID NO: 713999 - DNA, 785 bp, Homo sapiens
ggctgaggcaggagaattgcttgaacccgggaggaagaggttgcagtgagccgagatcgcaccactgcattccattctgggtgaccgaaggagactctgtctcaaaaatgaaaaaaagaaaaaacttgggctttggcgtcatcctagctactttggaggctgaggcaggagaacagtttcaacccaggaggcggaagttgcagtgagccgagaccgacacattgcactccagcttgggcaagaggattgaaagtccaatgagaaaagataaataaagtaaagtaaagtaaaataaactaaagtaaagtaaatagtgaaagaaagtagagcaaagccagaaagtcttagatggcatgaagcgtcagagagcgaaatgcctgttcagctggccagggctccagtcattatgcacaaagcgtgaagcctagcgacagatgtgcaacgtgttctagactacgcaagttactggcaggaccagcatcagggcacggcagccgctgacgcttggcttgttctggcaagtttaaagttagactggatcaggtaaaagtcgagtgtatatgcagtgcagttatacaatagttcgtatagatgggacttacagtgaccatgtggaaaggccaggatttggcaagtagcaagacagaagcagtttatgtacgtaggccctttacgtataagtttgggatgaaatgcattaagttaaacgttagaagaaaatggagaagagtggtggcctgagtatcagggaatggcaatggtgagaaagaaagcacagtgagagc

SEQ ID NO: 714000 - DNA, 333 bp, Homo sapiens
ccgggagctccgtcgttttggttaacattagtcgactagtgccagggagttctccagataagcctggatttattttcggcagtgaaagggccttaccggataactgactttatgcttgccctgccccgtataaaataacttaaaagcagcgtgccttggctacagcttgttccacgtgcggtgctcgccgtgagtgatcacctaccctacaggtggtagatggatgcctgaagtgtagactgctgctagctgaataccatctgggagcataaagttgacctgaaggatgtccttggtgaggagtctgaaaatttgatcttcacaagagttgcc

SEQ ID NO: 714001 - DNA, 156 bp, Homo sapiens
aggagcaggctccagttgtgaagtgaaagcccatgtgatctagtaggcttctatcttcataagtcattgatatcatacatgtgttgcctgatgtgtagctagccagaacatcacggagagccctcaagatgtttcctacagttaaagaaaggttga

SEQ ID NO: 714002 - DNA, 681 bp, Homo sapiens
ggagagagagaactagtctcgagtttgtctatttctgttctggtggggtgagtgaggaatattgtaggagtaggggggtaattttggggggccaaagggaagtatgaatgggggctgtcccggataggccgaggaaacggtgtgggggataaaaaagttaatatttacgccggtgtaatttgcatgagggagatagggagtttgggcagtaaggattggattgctagaggtgattcccggaaaaataggggatagatcataagaatagacatcgccctctatgaatgggtaaatgacttgactccctagtattgaatcatgaagacgatacggggtagatttggggcctagaatcgatgaatcatgctgtcgggagctctatcgcaagtgttacatgatggatcacgtctgagaagtgcgccaacaaacaggcgcccccctcatccgggagccacagcagaatacgcggcaccaactcgtagcgcgcgcctccaatgagccagtggcaagcggcaaccattccagaattcgattgccggggaccggccgtccagagcctcgcaaaatagaactcctcgcacgcctgggtggctgcactgcagaaggatggattgtccaccacggggcgctcgacccatcaccacccccagcgtcaaccgtcggaacgcccccgagcacacc

SEQ ID NO: 714003 - DNA, 142 bp, Homo sapiens
gtaacattgtcagacaagatgtcacgacctaggtggcaggaaacctcctggaaatgtgatttcttgtgattcatgcacaccaactcactgaaccgacccaattcatttgaaagtgtcttgagtcagcacgaactatgttgtg

SEQ ID NO: 714004 - DNA, 232 bp, Homo sapiens
agctaaacgagagctggagtgtcagcacggtgctcatgtgtcgacggaacttgtacacgggatggcatgcacctgatgtggtgaatacacgtcgcccaggctccagcttaacgatatttggagagtcagcacggtgctcacgtgtcgacggaacttgtccagggaggcatgcaccggcagttggtgaatacacgtcgacctgcaggcatgcctgcatgctcgtggtactgga

SEQ ID NO: 714005 - DNA, 109 bp, Homo sapiens
ctaggcaagaagagtactgctggacacacaggctgagttgtgccagctcatgccagctgagagtttcttttctctccccctcgcttaggagtacagttgtaagaatctt

SEQ ID NO: 714006 - DNA, 349 bp, Homo sapiens
gcacgaccacgacagactatgtctgggctgttgacatgtattcacactggaaatttaaaataattccgatttgattaacatactaagggctctaaggaaaaaagtagacaatatgcaaaaatacatgtgtaatgtaagcagagatgcagaaagaatcaaaaacaaatgctaaagatctaaaacactacaacagcaatgaagaatgactttgatagactctgtacactggacacagctgaggaaaagaatctctgaacttgaggatatgtcaataaaaactctcaaaactaaaaatcaaagagaaatgactaaaaaaaaaaaagaacaacaacaacaaccggccaggcgc

SEQ ID NO: 714007 - DNA, 579 bp, Homo sapiens
  misc_feature (373)..(373): n is a, c, g, or t
  misc_feature (450)..(450): n is a, c, g, or t
  misc_feature (452)..(452): n is a, c, g, or t
agatcatgcagattaacccgggagcggaggttacagtgagcccagactgcgtcactgcagtacagcatgggcgagagcgagactctgtctcaaaaaaaaggccaggcgtggtggctcacacctgtaatcccagcacttggggaggctcaggcgggtggctcacctgaggttgagagttcacgaccagcctgaccaacagagaagccccttctctactaaaaatacaaagttagccgggcatggagtcacgcgcctgtaatcccagttacttgggaggctgaggcagtagaatcatttgaacccgggaggtggtggttgcagtgagccaagactgtgccaccgcaccccagcctgggcgacagagtgagaccgnctcaaaaaacaaaaccaaaccaaaccttaatgacttaggaaggtggctttagtggccgcatgaagcacaccctgatngncgaggaacaagagtgcaaagctaagaaactgaggcattttgaagagtttgaagacacttggcttccttatctgacccccaaagatgaattccatcagccgtggcagctgaaatattctaaattaatt

SEQ ID NO: 714008 - DNA, 788 bp, Homo sapiens
gccgaaatcctgcggagcgagttccccgaaattgacggacaagtcttcgactacgtgaccggcgtcttgcacagcggcagcgcggacttcgagtctgtggatgacctggtggaagctgtaggggaactatatgcaatgaggttgtcctggtggacatgcaatggatgactgctgggcatcatgtggcctgtgtgccatgcgcatgtacaacactctgctgtctggcttgagccactaaagccagggaaatagccagtgtgctacttgtgactgcccctatccagttgtcaaagataactggagaactacgacttgtggaaccaaacttccagtgactgctaaatgatgggaacatgtcctcgacagtgaatgcaaagaagttagagaatggccgaggctcgacttaatggcaaagcagggatgacagcgctcagagaaggacacgctcaagaccagcgaaccctctagtcttagaagaggcatcagcccagccaaggcaggcagcacgacaacggagagtcctgttggaactcatcttggcaggacacacaatcctatgcatgtgcgaattctgcggaccttttgactgtgtcctttgggcgatacgagtacttgttggcttggagctggattgttacccctgtgctttgtgcccgcccgttacagggctggttgggccggcactgggtttgggcgatacaactcgtactgaagattgtgggcccccggagcctgggggtccagcccactttccttgttgctgttgacccgcggtctgggatgactcg

SEQ ID NO: 714009 - DNA, 852 bp, Homo sapiens
gcgtcaccgtgtattcatctcgggcgcgttttattgtacatctggccgtgtcttacattaacacaacagggccacatacaagccccacatatgactcaggctggcccttcgagaaggttggctagatagccataggaaacagatagcaggagaagaagaatgtagggcaagtcctcctggtaccagggccagagaaggagaactagggcaagtggctagtagagaccctagagaccagcgaagggagaagttagggaagctacgttctgtatggccaccagactatgcatttcagcctactgttcataatagctactgccctccctaccacccgaagtaactctagtaggtaggatagagcgactactacgcacctaggaccactaccacccgactctcactagacgctactgcacagagggtatagagagacagtagaagcactaatcggatagtaagaggaggacacaacgcccaaggacgaacagccggcagaggtacaagacgaggcaggaccgagccaagatacacatgacacgcacactattaaccccgagcacactagagcaagaagagaggcagataagaggacaggccacacacgataaagaccaaggaacgccaggccaatagaaacgacagtacccatcgtaggccgacgacaagcactacagtgcgtccgatagtcataccctacaacaggacacagtaggcgacacagcggaagccagaacgcacgaacaccaaccagtgggacatcagacgcagctcaccaccgacaaattgaggagcgcaaaacctatcaagggagagtatcaacagcagatcgatacatcaggcatgaaacacaag

SEQ ID NO: 714010 - DNA, 285 bp, Homo sapiens
taaagggcagggtctcactcttgcacagattggagtgcagtgcaggtgtgatcgtagcttactgcatcctcaaagtcctgggctcaagcagtcctcctacctcagcctcctcaccatgcttgactaatttttcttatttcttttttagagacagggtctcgatatgttgcccaggctggtcttgaacctctggcctcaggtgatccttctgcctcagcctcccatgcagctgggatcacaggctcacgccaccgtacccggctgtcctttccttaagcggatcag

SEQ ID NO: 714011 - DNA, 584 bp, Homo sapiens
cggtacctgtttgagcctgctgagtggttagaccagcatcctccagcttcccgggtgtcctgaactccccttccatggggttgtccacatccacagcatttatattgtattgcctgctttctctagtgacttgactccttaaaatgtagacttctgtttccccatcttttgtccttctgaataaagaattcatttatatgcatttcctttagagaatcaaacttggtgtgattttgagaaagaagaagatccataagctcaaaatactgatttcgctttccttgttttcattgctatccctagcacttaacgtggtgtcagatacgtggtagaaattcacatattttaggtgaatgctagtgatgaccagatttttgttttagccttaacctcttctgaattctagtgccatacgtgtaagtctctctctctgacattaccactggggtatcatctaggcactttaaattcagtaaacccagacctcacattatttccctctgggctctcctttcccttccactcccttctcttttttttctgttgttcttctgtcattggcatttccaacctggaaactactc

SEQ ID NO: 714012 - DNA, 778 bp, Homo sapiens
gctatgtgagttcgacacaccatgctgatgtcagcgtgaagcgtgatctgctcttccaagccctgggccgacctacaacatctgagaaggaaataataagtaaagaacaaggtaatgtaaaggcagcaggagcctctgatgttgttctttacaaaattgagtccctgccaatagatatgatctcctgtgtctgggaagggatgggtcgaggacttcaggtcttcaaagaaaggataagggctccagtgtataaacggtgtaatggcctgatggaaaaatccagaaattgattatcacagaagagacagttaagatacgtccttttgcggtagaaggaagttctccgtaatataaggtttactaaaagatcgatatgacagttcatgtgaaacttcaggagaacttacttcagaatatgggaggaaaagagcaggtgttgccatggtacccatgattgtgacactttgtgtcggggccatttattatatgaaaagcgtcctgcagatatcaaattcaagcctctaaataagaacaagggagtatacaaggctgtgaaatggtgaacttattacaaagacgtgacaatcacggtgaaacattttctacattttctttggaaaacaaacccgtgtgtacaggttatctaatgtagcgaaggtggtgcgcctttaaggggcccaacaacaggggggacatccagaaaaaggaaattagaaatttatgaagcgggaacgcttaacaagaaaaatttggattggccagggggattgggaaatgg

SEQ ID NO: 714013 - DNA, 686 bp, Homo sapiens
  misc_feature (686)..(686): n is a, c, g, or t
agcgggcgccagggcccccgcccatccgccctggccaccaccatccgccctggcccacacggtgcgacaggccccaccgctgatccgccaggcccaccggtgatccgccaggcccaccgtgatccgccaggctccaccgtgtgatccgccaggcccgcccgctgatccgccagggcgccgcgaaccatccgacctgccccagaaggtcgtgggcaaccaggccaccgctctggcaggcccttacaaaacccccaaccattccaaagtggacggtgcaaggggcccccccgcaaagggccttaggggccattgcccggggaccccccggcaaggtgttgcaatggagccggggagccgaaaagggagtgacataacagataggcacagcacaggtgcacagcagccaagcggtataccagcagagaaggggccagcgcaggcagccgaggtagggggccacagcgaggatgcagccccaacagcacttaggacaggatgaggccagcggcgcccacggaacagagcaattagggcacgagaacactaggaaattacggcgcccgcgcacacgagacagtgcgtacgagatggggccgatgcacccaaagaaaagcactggggcagaagcggacccacacaaagcagaggacaacgcgccccacagcagggacggaacaaccaaagan

SEQ ID NO: 714014 - DNA, 687 bp, Homo sapiens
ttcttttttgtgtgtgaccctcaaaacttttgaaagttaagagtcctacaataaaacatggaacacaattttggatcattttggttcctagccatattctttacaaataatggcttgaaaaaaacgacgttcaatggattttcggttggggcaacttatacatcccgcgtgtaacaaggccagtattcttaaccatatgaatagccatgaggcatattcggttacctgacattgcaaagttatcatgccaccggtaatagctaaaggggtgaagaggctcaatccttttgcattgctgcagattgaccaaatatgtattttagtctaatgggatttgggtagattggttttaggcaaataagggtagcaatctttgatcttgagtcttcattgtctgccacgcagtcagtttctaactggaaatgatcagtcctgacaacagaatttccacttttggaggcaattctaaggtgtctatgccagccgtcttggagactccatcacatggatctctgagtgaaaggcaaggaggtcagatttattcaattgagcgccagagggcaaaatgccccgtgttggagtgacatatgttctgaggcggattcccctcctgtacagctgagacagcttcttctgccccatcattccatcagtggaccccacggcccaatgctgggaaatccggtt

SEQ ID NO: 714015 - DNA, 408 bp, Homo sapiens
  misc_feature (284)..(284): n is a, c, g, or t
ttcatgatctagcagaaaagttctagcaatggctaatatatggcagccatccagaatttcccctcactactgtgagaggctaacatgtactggtgagttgggctggattgcaaagacatccaatcttgtttttaaatgaatacacttagaaccaggggcctgagagtaaataaagttcaagtcatcactggcactgtgatgtgtctttcactttaagggcttttaaaactgggtctgattggccaagctttaccaaggttgtgttgagcaggaaaaaaaaagcncaatatataaccaagagtcatttgttttatgtatgcattgtcccaaagctccaattcccagtttaattagtatcaatggattgtttctagccagagaagaaggatcctaaagatttttcaaaaa

SEQ ID NO: 714016 - DNA, 941 bp, Homo sapiens
  misc_feature (16)..(16): n is a, c, g, or t
  misc_feature (276)..(276): n is a, c, g, or t
  misc_feature (317)..(317): n is a, c, g, or t
  misc_feature (359)..(359): n is a, c, g, or t
  misc_feature (368)..(368): n is a, c, g, or t
  misc_feature (495)..(495): n is a, c, g, or t
  misc_feature (498)..(498): n is a, c, g, or t
  misc_feature (529)..(529): n is a, c, g, or t
  misc_feature (553)..(553): n is a, c, g, or t
  misc_feature (651)..(651): n is a, c, g, or t
  misc_feature (675)..(675): n is a, c, g, or t
  misc_feature (690)..(690): n is a, c, g, or t
  misc_feature (693)..(693): n is a, c, g, or t
  misc_feature (742)..(742): n is a, c, g, or t
  misc_feature (755)..(755): n is a, c, g, or t
  misc_feature (768)..(768): n is a, c, g, or t
  misc_feature (811)..(811): n is a, c, g, or t
  misc_feature (913)..(913): n is a, c, g, or t
tccggctccgacagcngggtgtccaggccatggggcagccctgggcggctgggagcacggacggggcgcccgcgcactgcctctcgtgctcaccgcgctgtgggccgcggccgtgggcctggagctggcttacgtgctggtgctcggtcccgggccgccgccgctgggacccctggcccgggccttgcagctggcgctggccgccttccagctgctcaacctgctgggcaacgtggggctcttcctgcgctcggatcccagcatccgtggcgtgangctggccggccgcggtctgggccggggctgggcttactgcnaccaatgccaaaaccaggagccgccacgcagcggacactgcnctgcctgcngcgtctgcatcctgcgtcgggaccaccactgccgcctgcagggccgctgcgtgggcttcggcaacaaccggcccttcctgtgccttcagcttcaagccgccggcgtcctgctccacgtctctatacngcngggccctgcactgtcggccctgctgcgagcncacacgcccctacacaaggctgcnctcctcctgcatccctggctcaagtagcacacaggcagagtgtctttggcacagtttgccttggccttcgtgacggacacgtgcgttgcgggtgcgcngctgttcggggctgggctgctctnccatgggatgctgcngcngcggggccagaacacaagggagttggctcggggccagcacttctattanctgggttcctgcnacaacctgcaggnagccctggggccccgctgggccctccgtctggctctggccctncctggcctccccattgcctggggatgggatcaccttccagaccacagcagaagttggaaaaaagcctcctgactcaggaagagcagaactgtcagggaggangggtgagaaggggccccacactagacta

SEQ ID NO: 714017 - DNA, 124 bp, Homo sapiens
gatttagcttgttattccatccactccattgcttcatttgtgcttatattctaccttgtgtccatgtcagccagcatccaaatgatccatcactggtcctccgttgattttttgcaaagcagct

SEQ ID NO: 714018 - DNA, 185 bp, Homo sapiens
cctggcttcagctgcctgagggaagactgacaatctctcacaccacccctcagggtgagcatcaggcacccgctggcctccacagatatccagagccatgtttttcttcaagcgcacaaatgttgaggttagagtcctgtgcatctctgcaccgtggtcatgccccagtgacgactgtgcagaat

SEQ ID NO: 714019 - DNA, 471 bp, Homo sapiens
  misc_feature (84)..(84): n is a, c, g, or t
gacgtagccacctgagtgagcagcagatagtatcaacacgttagttcgagcctcatgacggctgtctgctattctgcaattatntttgagactcccctccgaggtggacgttgcagtgctgaaaagcgcgagcgaaagctgctgcagaaaatacctgtgtgacgaagcagaaggagctacaggcgctctacgccctccaggcccttttagtgaccttagaacaggctcccaaactgctgcggattgttctttgacgcactgtatgacgaggacgtggtgaaggaggatgccttctacagttggggaagaagtagcaaggaccccgctgagcagaagggcaagggttgtggccccttaaatctgtcacaagccttcttcaaaggtggctccgtgaagcagaggaggagtctgacccacaactgagggcaggtgtggctacgtcgaacgtagcccacctgggtccagaggaca

SEQ ID NO: 714020 - DNA, 228 bp, Homo sapiens
gaccctttgtagtcttaactctgaccagacatgtaatacagtcatttatctagtacattctgagaagactcatttttttgacctacctcgtacagatgtgaggatttagatgtccgctaacttcacaactgtgcttcaagtagactaataatatatgctcatatcagatgtcagtattcatttgacttgattcatttttggctcaggtcatagggtactacgctttgg

SEQ ID NO: 714021 - DNA, 1842 bp, Homo sapiens
aattgaggactttgtacgaaggtgggtgtgtttggagtgtgagtcgatcaatggtggttttgcgcatggagagtgggttgagagtgaacgtcgctgcgtgtgcatggatcctgtggcgaggcttgttgcggcggagatcggattatcgtattcgctgagaggaagtagtcgttgaggatttgctcgggtgagctctcgtgatgaattgtatggtgacgtgtgtggttcgcagtcatattttttgatagatgcgtgagggtgtgtggcagtagataaggtgccgagagatggcatctgcccagtgactatgggcgctcgcttgttgtttaagtagtgtatgtgtggggtatcaatagtgttgtgagataaaatttagattgatagttgtagggttaagatagtagaagagttggtatgttggtgagtgaggtggagtgttgagagggttgcagcagtttgagagggttggagtaggagtgattgtagaaggaagttatgcgacaaagatatagtgcgagtgtgagtgtggtggggattgttgtggttgttgtggagtagtagtagtgtaggtatgtggttcgtttcagtgtgggttgttatagtgtttgttttgtgtataggtattgtttgtattgatgtggtgatgtgttgatgtatgtggtctgatatagtgtgatttttggggcttttgtgtatgtatattttgtttgttattgttatagtctgatgattttgtaattttgtgtttatgttgaggtagtatgtatcattagtagtggtgtcggtatagttcgtcgtagctgagtgccgaggcgtcaagtctgtcagggtgtttcgcgaggattgatgagggtgcagtactttgtccgggaagtttatgtcgtgggtggatgtgagagtgggctcgtttaagatttgtcgtagttttgaacccggtgtccagaggtagatgtgttgttcattgtgatgtttcgctgtgtgccgttcaaagggcggtacaatggcgggtttttcggtcgatgggcgccgtatggtttgataccctagctcgtcgtccaatggccgcgtaatggctgcctggagtagcgtcgcgtgctcgaaaatgtgtgacgggagattgcgtggccagtcattggggccgtcttctgtgagagtcgatgggagctaatttcctagtcgccctgctggtctgtatagaatgtcctctgcacggttagggaaggttgctctcaggctgccgtgaatagcatgcagtgcgcggtaagtgtgaggcctctcggcagtgcagggggaggtgaggtgcaggagtcaggcgctcgagggcgtgtcagccaagtgagtgctgataggtaggatagagagagcaagcgccggaggagagcgcaagagtgagattgcatagcgagcgtggctgtagtgtgagctaatgatgtgtatgctggggtgcgtgcgtatgtgtgtagctccgtctcgtagcagagcccgtcagaggtagcttgctgatgtctgccctgtcagccagtttgccgatcggcatcgtacgcgctcagacatttgtgttgtagccacagggcttgcgcacggaccttcacgtcacttattggctcaactttcgctcactagtctgcttcatccgccaactaatatttcacttttacagtccaaacatcagctttggcttcgaagccgccgcctgatactggcattttgtagatgtggtttaactactttgctgtagtgtcgtccatctatgaggggcgtttggtgtgttttgggcggtgggtgggttgtggggggggtggggtggggttgtgggttggggtgggtgtgggggggttgttt

SEQ ID NO: 714022 - DNA, 162 bp, Homo sapiens
atatttgtggaccaagcgaagagaacgagccaaatcagtgtggtactacttcggagctaatggtaaggcttacaagagaagcgattcagctacaggcgatgtttctttaaagactatcaacggtaagaagtatacattcaatactgacggtaagatgcagta

SEQ ID NO: 714023 - DNA, 110 bp, Homo sapiens
  misc_feature (22)..(22): n is a, c, g, or t
tgatctacagatcctctttcgngagactgagggagaagaatacttgaatcggggaggtggaggttgcagtgagattgtactccagcctgggcacagagcaagactgtctc

SEQ ID NO: 714024 - DNA, 809 bp, Homo sapiens
gtataaaatgcttattttttaatttccaatggtaatttattcttcgagatgcgcgcaagcgctcagggtcaagtactgcagggtcatgccccagctcctgacatcctgggtcccgtcagaatgctccttcgaatgggcaaaggaccctgagagttgtcaggccccttcagtgtgtccctggagaggctccagcccttcatgtctctttcccccgacgacctgcacccgtccttctggactcccccgacaatagtagccatccgtggcctctagggcctgctcttaccaggcgtggtactcattcttatgaccgccgcctcccgaccagctgcccccagctcttcctgcccccctcccctctctggcagctagcaggtcaattggcggggaggagtgcggactgaggatctgaggactctagtgggcccaggccctgccctcttacccggaggggctccgtttgcattccttggtgctctctgagtgcacgcctggtgtcccgccctctgttcgtggtgcgggtacgtcctagtgtgtcggtgctgtgatggtgcctgtccagtgtatatatcgtctccttagcttccattattgaagaaattgttctgtacagagagagatgcagcaggggacgggagggcagagtgcaccggaggtggagcagccgcacccccagcaccgggtgtctgcggtaggacacaagaggtgctgagagggtctggtcctggcccaggatcccccttgggctcagcacgaaagggctttcaatgaattaagtgagaacttagtaacctccttacaaaaatgcc

SEQ ID NO: 714025 - DNA, 853 bp, Homo sapiens
cttcacttggggatgtggaattgtgctaagcagtgtaggccacaggtaaatgaacaaccccttcaggtaatggattggaagagctgatccagtggacaaaagaggggaaactatgggagttccgcaattcaacgaatgaagcaggtttgagtgatgatggttcagaagttatcatgaacatatatttctggagaaacacctggagagctttccaacatacaaggaccaacttcgccagcttcagtggcagctggttgacttgtggtgctttccaaaaacccatatcttagtgtgaaagcagaaggttgaacacatagagtggttgagaaagttatttttaagtgaacaaacaaggatattactaaacagaaagtaacataacagtttcaattaagaggcatggaaattattttatttcagaacaacttacgagatggatattgacaagctaaattaaaataatattagctagaaacacaaaagagaaactacaaagatgaaacagaaagcggcgggcgagcgctgtgcaagagacattgcccacgtgaagcgggcaccccagtcaatgcctggctgcgaacgaaatttcccaggcacagagggcgggccacaagaagggaggtgcacagtaccataaggaacagtagagggaccggtcgcctgaaagaacaccgtgcaaaggagaacggggcaagaaaggatgtaacctgggggaattccaggagggaaacaaaccactgtaaccactccaggggggagcgaaaacaacgtgagccacccaagggaaccagaaaagagaatgttaaaacgccacaaagggcaaataccatcaatccaagaggaggggcacacg

SEQ ID NO: 714026 - DNA, 639 bp, Homo sapiens
ctaactagtataaatcacatttcctagagtataaaatgtgactgtgacatcacgttaaatctccatatcacttcatcttaggagatacacctctaaatttcagtacctaattcacaggtggggattcaagccaacttgcctaaaggcaggaggctactcaaactatagttacagactaaatcagcaacagcatcacttgcaagtttgcttgaaacagaaattcttgggccccaccccaatctaactgaatttgagacttgggaagggtgtggagagacaggaaactatgtattaatgagctcaccaggcaatttttctgctttggactataagagatcatgtaattgatttctaaaagttccttctggttatagggtctgtgactacagctctgcaaaaatctgagcaaagaacctcataatcaacagatgaaaactggtaattcaagtccttaaagagatatttaaccatttaacctaaacaggatatttaaacattctagcacaccctaatgaaattatggattaacaaatcttttcagcctggaagttacataacattactcatctaggaccaggtgcagtggctcatgccttgtaatcccaacattttgagaaggcgaggtagaaggatcacttg

SEQ ID NO: 714027 - DNA, 880 bp, Homo sapiens
cctatgtccagcaggtggcgcgcagcggcggtagccgagcgagggcgcggtggcctctgacaggaatgactctgcgcacgtgcgtttcgcagcagtggaagtcttcacacccggaaactcgactttggccgtttctccatttctcctcacgcactgtctttccttgggccctcgtcactcctggcaccgggggaagggcttccccgcctctggccgggcgctggggcgcgaccgaaggcgaggcggcggcgaggaaccttctggaattcggccgtcggggcaggcgtcgagtttacaggagaaggcgcggtgtcccgggatgagcggagtcgccctcacttaaggagcgagggaggcctcgggggtccccagccggtgatgagccctcctcttcagctaggaaaatgacggtgttcagaaagttaaaacttcttcgctggaaggatttcatcttaaagttgggagactggaagaaattaaagtgttctaaatggaagagcattcaccacatgtgttctgttttgggttgacatttagcttttgtttttattttagaaacggaagactctggtagcagtccttgaaatcttgatgccattgctattttctgcattgtattgtatcttcgttttagtagtgctccaataaaaagacctgctactagctgccatgcaattgatatcagtttgttgccagacttctacaattttcctgaaaaataagattcaactagtttatatcccttctataaggtgaaaccttgacgggtgtcaccgaaatggtggaacagatcttcgatgtgacgttgcaccgttagatgtccatatgggtaacgatcgggaggaccattccactaagtacagttgaagttataccagag

SEQ ID NO: 714028 - DNA, 662 bp, Homo sapiens
cctatgtccagcaggtggcgcgcagcggcggtagccgagcgagggcgcggtggcctctgacaggaatgactctgcgcacgtgcgtttcgcagcagtggaagtcttcacacccggaaactcgactttggccgtttctccatttctcctcacgcactgtctttccttgggccctcgtcactcctggcaccgggggaagggcttccccgcctctggccgggcgctggggcgcgaccgaaggcgaggcggcggcgaggaaccttctggaattcggccgtcggggcaggcgtcgagtttacaggagaaggcgcggtgtcccgggatgagcggagtcgccctcacttaaggagcgagggaggcctcgggggtccccagccggtgatgagccctcctcttcagctaggaaaatgacggtgttcagaaagttaaaacttcttcgctggaaggatttcatcttaaagttgggagactggaagaaattaaagtgttctaaatggaagagcattcaccacatgtgttctgttttgggttgacatttagcttttgtttttattttagaaacggaagactctggtagcagtccttgaaatcttgatgccattgctattttctgcattgtattgtatcttcgttttagtagtgctccaataaaaagacctgctact

SEQ ID NO: 714029 - DNA, 309 bp, Homo sapiens
cgggcctcatgttgaatggggtggtcgactttccaggagttttccagctccacattcccatgtatttcagggatgccattctgaagcgggaggtggtacagcacagagtttatgcagtcaggctctggcggacggccttcctgtcacttccaggaaccaatgtgtcttcatctatcgactgaggatatgcgtggcccctgctctccctgggcttcgggaggatgcagagtcactggaaagtgcttaatcttgtgcctggtacagagtacctggcattactattagcccagcagctgcaaacacacaatg

SEQ ID NO: 714030 - DNA, 568 bp, Homo sapiens
cctatgtccagcaggtggcgcgcagcggcggtagccgagcgagggcgcggtggcctctgacaggaatgactctgcgcacgtgcgtttcgcagcagtggaagtcttcacacccggaaactcgactttggccgtttctccatttctcctcacgcactgtctttccttgggccctcgtcactcctggcaccgggggaagggcttccccgcctctggccgggcgctggggcgcgaccgaaggcgaggcggcggcgaggaaccttctggaattcggccgtcggggcaggcgtcgagtttacaggagaaggcgcggtgtcccgggatgagcggagtcgccctcacttaaggagcgagggaggcctcgggggtccccagccggtgatgagccctcctcttcagctaggaaaatgacggtgttcagaaagttaaaacttcttcgctggaaggatttcatcttaaagttgaaacggaagactctggtagcagtccttgaaatcttgatgccattgctattttctgcattgtattgtatcttcgttttagtagtgctccaataaaaagacctgctact

SEQ ID NO: 714031 - DNA, 393 bp, Homo sapiens
  misc_feature (200)..(200): n is a, c, g, or t
  misc_feature (210)..(210): n is a, c, g, or t
  misc_feature (215)..(215): n is a, c, g, or t
  misc_feature (217)..(217): n is a, c, g, or t
  misc_feature (346)..(346): n is a, c, g, or t
aggcatccagaccagaaaccgaaaaatgtctagcaaatccaaaaagtgcaaaaaagtgcatgactcactggaggacttccccaagaacagctcgtttaacccggccgccctctccagacacatgtcctccctgagccacatctcgcccttcagccacatgtcctccctgagccacatctcgcccttcagccactccagcnacatgctgcnacgcncncgccgatgcacccgccatccagcctgtcctttggaccacaccacccctccagcatggtcaccgccatgggttagagccctgctcgatgctcacagggcccccagcgagagtccctgcagtcctttcganttgcatttttgcaggagcagtattcatggaaggcttaaacgcgatgg

SEQ ID NO: 714032 - DNA, 137 bp, Homo sapiens
tatatgttcttttaatagttgggggaaatgacctagaaaccaatgcagttggtagccaaattactcttggtttatttgtcctttgtgtgtgaaagtcctactattccgtgcgtcagacttcctcacagaactgttga

SEQ ID NO: 714033 - DNA, 434 bp, Homo sapiens
ggagtgtgcctcggagtcatggacaactagtttggcgtccgcaggcactgaatgtggcgctgcgaccgtacgtcccctgtcaggcgtgcactagaaggctggctctagaacgtgctaggacggagggccacagatgtgaggcgtggcgggcgcgtcgtgagcatgctcatggatactgtccacattagcgcatggtgtggcgaggtcctgtgtccacttggagcgcagcccccacgagactagaatgtaatagcaagaacgagaatcactgagtacgcgctaggacagcggtttcatccgctgggaacgcatgaaaatactcccatgtacagtctgcttgccgagcaaggtataggaattgtggtcaacacacaatagtcattatctgtaaattgcgaacataagagcagaatgtcccaagattgcctggactg

SEQ ID NO: 714034 - DNA, 368 bp, Homo sapiens
cagatttcctttcatccgagagttctaagtctttccttaagttttcatggtctaaaccatcttgagaaatactggccaggtatcctgtagaatgtttttgaaatctagatttgtctttttttttttttttggaaaggggcgtctggctctgtggcccaggcggaagtgcaagggcagaatctaccttctttgcaaccttctgtgttctcccaagtttcaggcaattttctcctgtgccttcagcttccccaaggttcgctggaatttacagggcattgccaccacacacactgttggtttaatttgtggtatatttttataagtataaagaagcgggcgtttctcctccagcgtttggtctccaaacg

SEQ ID NO: 714035 - DNA, 388 bp, Homo sapiens
gggaccatcatggggttctggacatcatgatgttgaagagggcatcagagtatctggagaaacgttcaccacttccgtctccatccacaatcgttcaacttgttctagaggctccatgtagcatgttttaggttcatggcagaatcgagcagaaggcacagagatttcccagacacccctgctccccagacatgcacggactcccccgtcatcagcatcctccactgaagtggtccatttgttacaactgatgaacctgcgttgacatgtcttggtcacccagggtcacagtttacattagggttcactgttggtgttgtatattctacaggtttggacatgtagccacgtgtcattatacattttagagtagtttcactgtccgcaa

SEQ ID NO: 714036 - DNA, 150 bp, Homo sapiens
tggaaagggagtctggcttgttgcccagcggggagtgcgggggtgcaatcccagttcagggaaagttccacctccggggttcacgcaattctcgggcctaagcctccggagcaggggggcaccacgggcaccggggaggtagagggtacg

SEQ ID NO: 714037 - DNA, 711 bp, Homo sapiens
ggtcgttcgtagggcggagctgggttgcacgctcgtcgattgtgcggctcttgcctcgggcagcggaagtcggcgcggcgcggtccggtagaagtggcactaaaacttcggcgttggtgtgaaagaaaatggcccgcaaccaaagcgagactgctcgtaagtcctaccggtggtgaaagctccgccccggcagaaacagcttggccacgaaaggcgaccaggaaaagcgctccctctaccggcggggtgaagaagcctcatcagctacgaaggccctgggaccgtggcgcttcgagagattcgtcggttatcagaagtcgaccgagcatgctcatcctggaagctgtccttccagaggttggtgagggagatcgcagcaggatttcataaaccgacctgaggtttcagagcgcagccatcggtgcgctgcgaggaggctagcgaagcgtacctgggtgggtctgttcgaagataccaacctgtgtgccatccacgctatagatgagtcaccatcatgcccaaagacatccagttggctcgccggatacggggagagagagcttaagtgaaggcagttttatatggcgtttgtagtaaattctgtaaaaatacttggtttaatttgtgacttttgttgtaacgaaccttgtttataactatgtggccttgtacttagtcatcccatctttcactcaggatgaatggaaaagt

SEQ ID NO: 714038 - DNA, 229 bp, Homo sapiens
  misc_feature (222)..(223): n is a, c, g, or t
tctaagatcccctaggctgagtgatgggtgatctcagctccgcagctctgctcttggattcatgccgggcaacagtgttagactctgtctcaaatataaataaataaataaataaataaataaacaagggttgggtattggtggtacactgcctgcactatccctagcactttgacgaggctgacggtacggcggactcacttgacgctcacggagttcgannctccag

SEQ ID NO: 714039 - DNA, 966 bp, Homo sapiens
gcttctttctccctccggcctcccgagcaccagtgcgctctgagctgcccccagtggtccctcaccccgcctgcagcaggcccatttggagggaggaacgataagggaagattgacgagtgaagtgtgtacgacttttaccgtactacacacatgcacatgaagcccagcgctaacactgtgccttttcgtgcgttgaaccacaacacaaacaaacaatctccaccccagctattttacccaagaccacaaaccaatctaaacaccacactctacaacaacactcaatccatcaacaacaatacaccacaacacaaattcacaaacataatacaccaatctcaatcaccaatcccatcctactatcaccaagaacaatcaacacacacacaaacacaacatagcatagacatctcatcaacaatgcacccactacacgacaccagcacgcgagtaccaatcgctcacacacaagcgcaacacacaagacatacacaccagtctcgacgaccaagaaaaccacaagaaacatcacacaatgcatatacataatcaggcaagccaaaatgtctataacccaaatccacttatcataccacattctctatctctaatctatgaattcactacatgccacaacccacacatcaccactcaccatcaactactccttgtcatcctaatctcacgagatgcgggacctgcgaattaacggtgggaagcgctgcgaggacgacttccgtgacaggaagagaggcggtgcggacgcatgagcgaacatgacaggggggacgcactaacgtctcgccgcacggtgctcgcctcgaagcagactcaccgcgcacaagtgagcgagaggcaggcgcagacgcgacggagcagagggacaggcgcgtgtcagcgccggagcatccacatgaggatgagagtgcgcgtcggagtggcagccaggaatagcgctggccca

SEQ ID NO: 714040 - DNA, 335 bp, Homo sapiens
atcagaagaggcacatgtgctcatatgagcatcttcgctgaacgtcacattgtagagaaagctggaatgctggttggttatggatatgtacacatgctctcgacttatgatggggttgcctcctactcaagccattgtaggttggaaatatgtaagtcaaatacatgtttaatacacctaacctcccaagctcatagcttagcctcacctaccttaaacatgctcagaacacttatcttcacctacagttgggcaaaatcatctaacacgaagccaactttataattaagtgttgaatatctcatgtaatgaattgaagagtgtactgaaggtga

SEQ ID NO: 714041 - DNA, 762 bp, Homo sapiens
  misc_feature (139)..(139): n is a, c, g, or t
  misc_feature (143)..(143): n is a, c, g, or t
  misc_feature (356)..(356): n is a, c, g, or t
tggaaacacagtctctgtcaccctaggccggaatgcaggggcgtgatctcggctcactgtaacctctgcctcccaggttcaagcgattctgtgtgcctcagccttttccggagttgtgcgtgggattatgagttgcacnaccnacaacctcccgtgctaaatttttttttatttttttttggaagaaggggagttcctcacaacctcttgtgcccggaagctgtggaagtgttgccaaggggggtgttgaactcctcggggctctccactgtgcaacacccctctgtgccctctctcgaggttctcaagaaaaatctcctcgcgtgcgcctacaagcacctccccgaagtgtaagntcgtgggaaacctacacgcggttttatgttgccccccacctgtgcccccaggtgtggatatttttctctattttttcttgcagtataaggaaagatagtggggttttcccacccaagtgtttgtggcccgagggcgtggttcctgtgaacacctgtgtgtgacaccctccaggttggatatctcggcccaccacctcgtgtgtggtcctctccccacaagagctctagtcgtggggatataaacaccgagggtctagtgaaaccccaccgcggtgctccggtggccagaaaaaagagtctttcctttatctccggttttcgtgaaagaaggtgtgtgacagcggttccagggagaaaccccaaaaatattccaaggtttcctccaacaactctttgtcacaaacgc

SEQ ID NO: 714042 - DNA, 387 bp, Homo sapiens
aatggttgaatactaatgagaggtgtcccatatgcagagtgaacattgaggctcagatgacaagagagagacgctaccatgtttaagaactctcgcccttgctctcattctgatcgctctctggtactgcagtcaaccaaagatggcatgacttacctgcgcagattgggaagcattgaactgatagtgctggatctggtatatggtacaattaatgctagacctacaggttatgtatacagttgattgtgatgtatgtatgaatgagtacttgaattgcatctatttgcacatattatgggcttgtgaccctcgtgcatgcaaggatagctgttgtagtaagttgaatattgtgggctgttggttgatgacatggcagcagccttg

SEQ ID NO: 714043 - DNA, 469 bp, Homo sapiens
  misc_feature (74)..(74): n is a, c, g, or t
  misc_feature (81)..(81): n is a, c, g, or t
  misc_feature (101)..(102): n is a, c, g, or t
  misc_feature (107)..(107): n is a, c, g, or t
  misc_feature (109)..(109): n is a, c, g, or t
  misc_feature (164)..(164): n is a, c, g, or t
  misc_feature (183)..(183): n is a, c, g, or t
  misc_feature (257)..(257): n is a, c, g, or t
  misc_feature (261)..(261): n is a, c, g, or t
  misc_feature (265)..(265): n is a, c, g, or t
  misc_feature (370)..(370): n is a, c, g, or t
  misc_feature (440)..(440): n is a, c, g, or t
  misc_feature (443)..(443): n is a, c, g, or t
  misc_feature (451)..(451): n is a, c, g, or t
  misc_feature (460)..(460): n is a, c, g, or t
aagggcctggactataaggaaggtggctcccccttcctgccctaaaaatgtgtgatttcctccccaggaagggntgggcantcttgcaccccggccgcctnncccantnccccgaggggctgccaacgacctggggcccacgctacatcatggtgtcctttgtngacccctgacactcaaccnctttgccaaacctgccctgccattgtgcctttttagggggcctggcccccgtcctgggagttgggggatgggtntttntgtntccccccttcctgagttcatgttccgggggcctgaactgaatatgtccccttgctcccaaaacccggccctctcaggaagctcccggagtccccccctttttccnccgcccccaggggtttgtgggcccagggcttttggggactccccgcgtgataaattattaatgttccccngtntccctttnaataaaggncagtttgta

SEQ ID NO: 714044 - DNA, 101 bp, Homo sapiens
tcattcattgcctcccacaatcctaggctacccgcccaggtagtgatcattctatttcccaactctattgatccccacctccaaatatctcatcaacaacc

SEQ ID NO: 714045 - DNA, 122 bp, Homo sapiens
ggagggtaaaagaagggcaggggaaccggaaacaagggcaaaagcggtacccggaggaaaacggacggcaaggaaacacggaaaacggggaaaaacggaaacagggaggaaaaggaaggaca

SEQ ID NO: 714046 - DNA, 90 bp, Homo sapiens
gagagagatgaagggtcttactactgtgcctgtgacacaccccccgactgggggatacgccatagctcctgggacacccgacagatgttt

SEQ ID NO: 714047 - DNA, 564 bp, Homo sapiens
ccttcccatagaagaaggtagacaagctgcacataagatccatgactctcatataacatacaacagtggcgagtagcagatattaaactgaaatggcgcaaagacaggtgaaggtgcaaaggataccaaagagtacccccatgccatcactaactgaagaaaagcgtccgacagttgaactaagtatcagacactgcgtactgcaggtggtgagcgatgttagaggcaagagaggcattacataaccacccaaaggccaattcaacaggtagataaaacaatttatcaataagcagagcaatccacttcatataatatcaaagtatgtgaaccaaaaagttacagaactaagagacagactcatccacaagcgcagactctcaggggccgctgacccagcgttcctacttctggatctgtactcaacagaagtgtgaatacatgcacagcggaaggagacaaagaagctttcattgtaaaagcctagaattcagaatgtaccgatgtccactaacagtagactggatacatgaactgtggcatattcatatcatacaatattat

SEQ ID NO: 714048 - DNA, 581 bp, Homo sapiens
  misc_feature (477)..(477): n is a, c, g, or t
  misc_feature (568)..(568): n is a, c, g, or t
accaactcccatagccactctggcctagaggaactccaccatctctggcctgcctggaggggagagcacaggaaaagggatgcctgggctggatgtcaagccagtctgcactgctgtgtatccagctcaccctcccaagccctgcagatggacagcggtgacctcaggcatctctcctgggttcccaaggcaccagaaaccttagtgggacctgtgagcctcaggcaaggtctgtactaagggcatggtttcctgtgacctcccgctgttgggagcaggagtgactgtccacctactgtggacggtgctctgctgaaacttcaacctacatccaacccatgatgtcctggacctcctggtccccaaggagtgcaggcacagggaaggttgcctctcctgaacaactcctaggcagcagtcctcctcacctcattgtccctcccggacagggacaccaattcaattgctttgtggctnggccaagaacaaaatttggggcctgtcccttcctttcgcgacccaacccttaactttcttttcctcttccttcttcccgggcaacctcctncccccttttttcc

SEQ ID NO: 714049 - DNA, 345 bp, Homo sapiens
  misc_feature (1)..(1): n is a, c, g, or t
  misc_feature (122)..(122): n is a, c, g, or t
  misc_feature (151)..(151): n is a, c, g, or t
  misc_feature (189)..(189): n is a, c, g, or t
  misc_feature (212)..(212): n is a, c, g, or t
  misc_feature (234)..(234): n is a, c, g, or t
  misc_feature (273)..(273): n is a, c, g, or t
  misc_feature (276)..(276): n is a, c, g, or t
  misc_feature (283)..(283): n is a, c, g, or t
  misc_feature (334)..(334): n is a, c, g, or t
ngaggggatcttggggtaggaggaggctggggtactcactgtactgtagtgatgtggctaggaggtgttcacaagcccagggggcaaggatatctagtaaagaagggtttcctaagtaagtnccttccgggattgaattggggtggggatnggtgaaaaggaaaaaactgtagttaacttctttctggnttggagatgttcttaacaaaggngagagggaaggttgcctaacanaacaaagttgggaacctatagatggtagtgtccggtttnganatccaantccggagatctccttcttcaacctcactaggtttagagtgaaacagttagngaaggaacaac

SEQ ID NO: 714050 - DNA, 494 bp, Homo sapiens
taataagggcttataactatgggctgggatcttttggctctagtcttctaagaaggggccattttatttttatagatgtcacttctaaagtcatggtgggtaattaatcttgggaagactggtgttggcgtatagagtggctggatacaatttaaaacccaagtagacctcattggcttggtcaccctatgaatggttggacaatgggacagggaatacctggcctggtagtatcactggtgcacttctgggattggataacgctggaggaaagaaagttaacgttccttttttacataagtcagaaaaacttacagcgggggtccctagtttccgggttggacctcagcagatgaagtgaacagatcagtggtaatccagatggaagaacattatctggaatctgggttggggtagatttacaatctacttgcaatattacctaaatcagatagcttttacagtttcacttgtgtcacataggttccctccgg

SEQ ID NO: 714051 - DNA, 106 bp, Homo sapiens
gcaggcagaatctattcatctatgtatttccagtgcctagtcacaatacctggtcatcaaaaaagatcctaaactattaactattaaattaacaaactaaaaaact

SEQ ID NO: 714052 - DNA, 505 bp, Homo sapiens
aagtagtaaaattgatacctttatctaagtattttacctatttactcaaataacaaaacctatgtaaacactaaaaagttagtaatttaagagttaatcaggccaggcatggtggctcacacctataatcccagcactttgggaagcaggtggattgcctgaggttaggagttcgagaccagtgtggccaacatagtgtaaccctgtcccttctaaaacttcaaaaaaattagctgggcgtggtgctttgcacctgtaatcccagctactcaggaggctgaggcaggggaatcacttgaaccagggaagtagaggttgcagtgagccaagatcgcaccactgcactcctgcctgggtgacagagagagactctgtgtgaaaaaaaaaaaaaaaaaagtttatgattatacatgtcacaaagaaatagcagttaccaggcagcaagtatttcaaggataagaaaagtagagcttctcttaagaaaagtggagagtaggcataaact

SEQ ID NO: 714053 - DNA, 410 bp, Homo sapiens
attgcttgaggtcaggagttcactaccagtctggccaacatggtgaaaccctctctctactaaaaatacaaaaaattagctgggcatggtggcgcatgccggtggttctagctactcaggaggctgaggcaggaaaattgcttgaatccaggaggcggagtttgcagtgagccgagattatgccagtgcactccagcctgtgcagaagagtgaggctctgtctcacaaagaaaaaaaaaaaaaatagcttgtacttcctagggtggggggagtttcagtaagataaagcaggtgtaaggcacttagaagagtgcctatcacagagtaggtgaggatataatagtaataatggtaccgcaggtttctcctgctgggaattgtttatccctgcccccttgcaggttgcaagg

SEQ ID NO: 714054 - DNA, 152 bp, Homo sapiens
agatattagatgtctgtagatgatcacacatatactgagactcactccaattattcctttatttaagaggctgccagcatatctaatatggggttgaaccggactacctacttatattgtcattcccggcatgagaacaaggtaacagtgga

SEQ ID NO: 714055 - DNA, 942 bp, Homo sapiens
  misc_feature (159)..(159): n is a, c, g, or t
  misc_feature (306)..(306): n is a, c, g, or t
  misc_feature (361)..(361): n is a, c, g, or t
  misc_feature (365)..(365): n is a, c, g, or t
  misc_feature (368)..(368): n is a, c, g, or t
  misc_feature (387)..(387): n is a, c, g, or t
  misc_feature (413)..(413): n is a, c, g, or t
  misc_feature (419)..(419): n is a, c, g, or t
  misc_feature (425)..(425): n is a, c, g, or t
gagaagtctatctctgtgggaccatgcgggccatcattacaacttccctcgtgtacttcagcagtgtggttctctttggcgcctgcattgagtgagtgtggttctccgggacaagtatggcgatggtgtcagcaggaacttggtggtgggcacactggnctggccttcaccctgggtcatcgtcatcggctccttcttttcaacgtgtggcgctggcctccagagcctcacaggggcaccacgcctattgcaggccattgccaaggacaacatcatccccttcctccgggtgtttggccacggganggtgaatggtgaacccacatgggcactcctcctgacggcactcatcgccgagctngggnatncatcatcgcctccctcganatggtggaccccatcttatccatgtncttacntgatgntgctacctgttcgtgaacctcgcctgtgcggtgcagacactccatgaggacccccaactggcggccccggttcaagtactatcactgggcgctgtccttcctgggcatgagtcatctgactggacctatatgtaagtctcctcctggtactatgccctggtggacatgcatcatcgaccggcatgatctacaaatcacatcgagtaccaaggggctgaggaacggagtgggagtgacgggcatccgaaggcagacccatgaaacgcagacccagcaaagcgcatgaacgcaggaatggaggcacggggcacaactccacaccaaagaaaatgggcaggcccaggcgagccatgagcgcgtcgcaacaatggaccgcccgcgcacgacaggaacgatacacacgcagacggcaaccccggcggaatcccgacacacgtaagacagtccaacagactccaaggacctgagacaaaggagcccgacgcaacaggcaggatacacggccatcccaaagggg

SEQ ID NO: 714056 - DNA, 948 bp, Homo sapiens
attgtacttaacattttaggccatccttttactgttcctgatgctttaatatatattaatttataattatcctgatattttgtacatttttcaaacttaaaaatcaggatttttttttttttttggggcaatagtactaccatagggtttaatctggggatacatatggtatgggtctggttgggtggaccttgacatctggatcactggatgtcaatggacctattgggcctcattcaggacaccggcagagagtatgcaaagtccgagaagggaaaacagaaatctggtatgtgagagggtcatggtacagaaagaaggggcccctctgcaattggtcctcacagaacacgaattgggtggtggtcagccaatcaacatctgagaaatgttagacctttggcaatttaatatggtcctggacctttttgggccttttcggggggtggagggggggataaacaacgatgggcattatcaacgaacggtgacttttctttccctcaaaaaataaaagtccttttataatcttatgggtcccatgttaccttgtggtggtaatttcacactggcgacttggaaagggtatatagggaactgcggctcttcccttcatataaaaatcccgggggtggccctgtaaacaatgcagatgtttcttccgggaaaagctttcttttttctaccgaaggaaaaattcgttgtcgcgtggtataattccggggtggcgtggttttctccagaattaattaggggtacctggcgtgtggttgtaaattaaaccagattttgatgtgcttaggacaagaacgaagagaacacacacaattgtgtggggggcgcggacgaggaaagtgtttgtagacacacggtgtggggggggcagagtgaataagaacggtgaagaggtatcacagaaaactggctacatatggggggtgttcacaa

SEQ ID NO: 714057 - DNA, 467 bp, Homo sapiens
ggtgcagtaaagcatgtactgtcggaggttgggttctgctccgatggtctgccccaaccgaaattgaaaatagcaggtttggtagtaaaggaccatgtgggatttgttaggtacagtactgcataaataaattagagctccataatgggtcttctcgtcttgctgtgtcatgcccgactcttcacgggcaggtcaatttcactaggttaaaagtaagagacagctgaaccctcgtggagccattcatacaggtccctaattaaggaacaagtgatcatgctacctttgcacggttaaggtaccgcggccagttaaacatgtgtcactgggcaggcggtgcctctaatactggtgatgctagaggtgatgtttttggtaaacaggcggggtaagatttgacgagttcctttaactataatttaaacctttccttatgagcatgcctgtgttggtcacacaataaatat

SEQ ID NO: 714058 - DNA, 925 bp, Homo sapiens
  misc_feature (925)..(925): n is a, c, g, or t
ggcgtgaacgccgccggccgcgggtcgggctctgtgtcagcagccggtgcgggcgctcgtggctgtgtgacattgcagcctgtacagccctggctgtggccctggcctgtgggcatgccgctggtggtcccggtcgctgactggggccctggtggccaaggcctgctctgtgcggctggccttgagctggatgccttctctgccagcgtcgaccactgacgactgcggaggcacctctcgtcccgaaaccgaccagagggcaaagtgttggagacagttggtgtgtttgaggtgccaaaacagaatggaaaatatgagaccgggcagcttttccttcatagcattttctggctaccgaggtgtcgtcctgtttccctggcaggccagactgtatgaccgggatgtggcttctgcagctccagaaaaagcagagaaccctgctggccatggcttccaatggaggtgaaaggcaaaactcacacttactatcaggtgctgattgatgctcgtgacttgcccacatatatctcagagatctcagacagaagctgtgaccttcttggctaaccatgatgacagtcgggccttctatgccatcccaggcttggactaatgtcagccatgaagacatcctcccctacagctccaattgatcagggtttcccatccaacatgaacttcttttgaaagatttcttctgtatgaccagacaaaaagcaccttcctttatgtggcctcgggagaacgctaaggggccttgcaaacgacgaagaatcaccccttggcttggagctctccgattgttcatcggggaaacaaattgaggaacgatacgttgtcactgtgatccccttcttaattggcattgaggggacgccagaattccactgtgtactggtggcgctactgaatccggagggagacn

SEQ ID NO: 714059 - DNA, 1046 bp, Homo sapiens
ggcgctttccgggtccagcttcagctgtcaactcgcgagccctgggcgtcagcaggtatgagggaggatggagcagcggtgcatgaagcgcgccatcagaggaggcaccgcggtgtccaactttgtcggtctccggctatcacttgcgcggacggcgcgtatcccgaccagcactggcaattttctgctgcgcactgcgcacgcgattgccggttgtgacggtgcacctggctccggttggggtcggcttctgtcaactgcgccgtcccagtccgaccacgtggtcccctgagggggaagcatcggtaaggtgtcagtatctcggagggactcggcgtgtcgtactgtgggcagaggagggtggcgtgtgccagccttggctctcgttgggattaccggctggatggtgacggcataggagaaaaggagacgggtgtctgaatggagaggaaagtcctatgaaccaccgtgtgtcgggcgattcccaggagagcgtgacgggacgcgaaagcatgggcatgcgccgcacgcatagatgtgctgggagaactatgggaacctgccttgctattatgaggaggactccatcgtagcccaaagagatttacgatgcgcctggcatttacaacaccacgttgttagggagaggttcgttagggaagaactccaatttcacaccattgggactctccggtggaattgggcacgaaaatggtggcccgtttggcggggccgggataaatcctttggaggcacaccagacccttctgacccggaaaacgaggacggtaactttgcaaccggacggagcaaggggtttgggcgccccgccacgaagccaacattggaagagaaagattcccgaggaaaaggaccaattgtgactggaaaacttttcccaaagaaggcaattgaagcgaagaatttctcgccatttttgcaacgaagagccttagctttaccatggccacaagaaaccttcccatgttttgggatgggaaacacccaggtagagttttcctcccacgttcaaaccaacgccagca

SEQ ID NO: 714060 - DNA, 330 bp, Homo sapiens
tgcacacgccgaatccccatacggaggtgggaggatcacctgagcttagtaagtcgaggctgcagcgaaccatgatcacaccacattgcactccagccagggtgatgagagtgagaccctgtctcaaaaaaaaaaaaaaaaaaaaacccccaaaattttcccccccttttttttgggggggggttttttgcaaaaatttttttccaaggcccccaggggcctttttatttttatggtgggccttaaaaatttaagtttaattaaaattttttaagtttttttgaaatattttttttaagggggaccttccggggttgccagggccccgcc

SEQ ID NO: 714061 - DNA, 529 bp, Homo sapiens
gccgggcgcggtggcgcgtgcctgtagtcccagctactcgggcagagactgaggagggaggatgataagggatcccggactctgtatgattgaaataaagagaaataaacaaaaaaaaaaaaaaaaaaaaaaaaaaaaaaacacaaaaaaacaaacaaaaaaaaaaaaaaaaaaaaaaaaacaaacacacaaaaaaaaaaaaaaaaaaaaacaaaaaacaacagcgcggggggggggggcgggcagcgagaagaaaggaacaacaaacaacaaggggggggggggggggcggagaaggggaagagagggggggaggagaggggagggaaggggcgagggaaaaaaaaagggggggtgaggttcacacacacaaaaaaaaggggggcggggcagcaggaggagggttgtaggtgacgagaacaaccgaggaggagaatgatggagatagtgagggcgtgttgtacaaagaagcgaggaagagaggaggagaacgaagaaaaagccccggcggaggggggggtgttggggt

SEQ ID NO: 714062 - DNA, 265 bp, Homo sapiens
ggccccaatcatcgtgttccgcggggagcatggctacatcggctgcctgcaaggtcacggagtcagccctggactgccaatcgctcctagctatgacgtcttccatgctggagttcaacgatggcgcctacacacatcagaatgactccatcgaggcgaatactggagcggtgggcagtgactccggggtcaccagcagcggtgacgctcctgtggacttcttcttcgagttctgcgactataacaggggtggccactcacggct

SEQ ID NO: 714063 - DNA, 133 bp, Homo sapiens
tttttcccttttcccaaacagccagaaattttttatggccaaaaaaattccctttaaaaattgggctggaacatgggaaagggtaaaagtttttcatgggttccatccatggggaataaaattttatttttga

SEQ ID NO: 714064 - DNA, 1454 bp, Homo sapiens
  misc_feature (502)..(502): n is a, c, g, or t
  misc_feature (615)..(615): n is a, c, g, or t
gcgctgctccagcgctctggggcgcattgccaaccttccaggcgctgggagcggtcggaggaagataacaattactatatgtgctgtgccccgatactatactcgtggcagagcgagcgagacacagaaatttgagattatgtagaccgatgtcagtggcaaatcgctggcgacatcgccagaggctgggtcagctgtgggcaactcggagatcggatgccgaaggtctcctgggtcaggctgagtccaggatgactcggaagcgattggcaagttctgaatccgcctagaccgagtcacctctaactcgatcggtgggatgcggagtcgatctcgtgtcacgtctcgagtagctcgtgagtcgtctggtgatatctcatgaattgtaagtccacccagtggtaggtcacaactactggtatccgtctgcttgccgataccctggggtaggaatcttcagtaagccatggggtgtacgcaagtagtgtacgtcgtagtatcncgcttcaaggggtcgcattattggcgctcaaggattcgttggaagaagctcgagggaccaacgtttcgtgatatttagggtcgacgtcgtgtggggacgcctaggctcaaccnaacattgtgggcctgaaatagtgcacacaggtaactcacttagccaggggcagtccggtcagacactggggcttaggataatcggtgatcccttggacatcgcttgggtgaccgagcagaggggaggcgcagcagtagcctcgttgtcacatctggcgttgctagggcgcgttgccgagactagacactctaacgtgcagctatggcgacgtgggggcctaccaggggctcctggggcatactggggccaactgcatccctctcatccagccaaggatacccgaagaacagaaataacccctgaaggcagagatcattgacattgcgctatctacgctgtggttgtgcgcttcaatgccaataatgctgtgctggacaacccggtgggatccggaatgccctatacaaaattgtcaagacccatcttccaggtaccaattcaagttggggacgaggacaatactggacattgaagacaccttattgggcactttggaccaacagacgggcccttcataatggagaacacgcgggtagccggagagaatcagaaaagggtggacacagaaccgaaaacctaaagggggaacataggaccaaccgtcgtggtcccagcaacccatgagcgtggtgtcaacaaccgtgaatcacggtaccgagggccggcgaaaaggggaccccccgaaactgtcgcacaccaccgtggcgccattgcagagacacaacaccatgcacgggatgaccaattacacacgccgggaacgcgaacagaagccacaggggaaacacacgaagttcagagcaaaagaagggggacccaagggaccaacacatgacag

SEQ ID NO: 714065 - DNA, 137 bp, Homo sapiens
cgtgggccacaaattggactcgaaagcccttacgtcttacagctcgtatctcgtgccattgcttggcgcagtcgctagctggcggcagcagcgtctcatgcacgaattgtcgttattgcgggagtgtaagatagaag

SEQ ID NO: 714066 - DNA, 311 bp, Homo sapiens
gcatcactgtgtgctactgagagctgtatgtgcccatgggtagggccctgcctactggactcatcccctgacgcccaggactgcattctggtcctctctgagccacttgtagtgtagtctcttcagtttctatctgggcatatctctttttcttctgggtcatctcctcttctggtttagtaacaatctgttccttttccgtagggatcatctccctgtggcagggagagctcatgtctgggttaatccgatcttgagctctgtagtgtccggcggcgcatcttaggtgcttcgttcacttggatattctc

SEQ ID NO: 714067 - DNA, 1095 bp, Homo sapiens
ggactgtatctctaagtgatgtgtactagtataaagtcctggtgaggtaccgctgagataaatatggtcaaatctattgcgcctgtgggaactacttgataggactctagcagagagttgttggtcgccgtgtgtcgtccacgtcatcgactcaggtctgttaagatgactcaaggactgggggatctcgatgatgctcgctctacctttttggtgttgttggtcttatagcttggttggatgctacagggttgacgcgaacgacatgacgcggcaaaagggtccaggacgatggtaggggtgacgcggtgtgtgtcaattgagggagctctcaggtggaaggtggggacttgggtgttatgcaaatgggtttgagttctcctgatagagctgattggcagttgggaggagtccatctttatgaaggactggcaatggtcccaatcacagctggggataaccaaggactttggtttggtggaaaacccatctctcgtaggtggtcccacgtgtgtctaattgtgatggccaaacaacgagtagctacgagggttacgagggggggcgtacaaggttactcgacagggtatagagatattaccgtggcatcgagtagttaacgggggcacaaagttgacagcgggggtggtaggtggtagtaattagagggttcctatgggtatccgtctagtaggcatggtggacgcgttgccaattcttttcaagcgatttgggtcgtactagcatataatggttggagggtcaaccctgggcatgggtgatggctcaaaagtcacaagtagtccccagggggtcatacccttgtacaaagcttactctggacctaagtaatcacccgcccaattcgaggggtgttgggcaatccttgtccaagcacttcgagttctatcacaggaaagggagggaaaccttttggattgcttgcccggcaggaacagcgtttggcccacttatcgtgccatccaaaggtatcactcttgaggaggggtatgtgggattcagggggctccgaggacccagaagattccagtccccatggttagggtttgcgtcttcaataattgcctttaagcg

SEQ ID NO: 714068 - DNA, 298 bp, Homo sapiens
ctgagagtgggagtgtgtgctcgggctcggacacacattatattagaaaatcagaaaaatctaaaaaatcttttaaaaacccaaaaaaattacaaaaaatccgcgtctcccccgcggagactttattttttttcttcctcttttataaaataacccggtgaagcagccgagaccgacccgccgcccgcggcccgcggcagtccaagaaggaaccaagagacgaggccttcccgctgccggaccgacacgcaccctcgctcgccgccggcagcggcagcagcggagtggattcgacccg

SEQ ID NO: 714069 - DNA, 224 bp, Homo sapiens
tgttttcctgcgcaggagccgcaggccgtacagccatggccgcagggaatggatggtcttgaagccccacttccacaggactggcagcggcgcgtggccacgtccttcaaccagccggcccgtaagatccgcagacgtaggcccggcaagccaaggcgcgcgcatcgccccgaccccgctcgtcccatcggcccatcgtgcgctgccccacggttcggtaccac

SEQ ID NO: 714070 - DNA, 267 bp, Homo sapiens
  misc_feature (61)..(61): n is a, c, g, or t
gaaatagtcataatgggcaggtgggattggggtaggatatggttggggtgacccatgtctntgcacacatggcagtcttaggagaaggcataggctggtgacaagaagttaagactgcaactgccagtcaataaagctttgtcaaaaagcggtatcactgtatttccatattaatgtacttgctagcattgtatactcagttttatttatgcctatgtaatgctttgtaaatttgctttacttgattaaattttttgatttgccagt

SEQ ID NO: 714071 - DNA, 756 bp, Homo sapiens
tgatttaattttgacactagggagatctcacagcagaagtacaaatcatatgtacaagggttgtgtgcaatgaaaatttccattggggattttttggcagaatattggtcttgactctgtggaataaatgacgacgtaaacgtagctgcacaggggtgttcccgtataatgcttgaatcaattgtgtgtgaaagcatcatgcagagggggggttaaattgggtgatgactgaaagggtataaatccttcattccagctccacgagcagatccccttctccaactgtggctccagcttgacaggtgacagatttcaccgggccacgcttcccacctggcataccattctgcattttcatgggtgcaatcacacaattgtgttggccttgctggtccttgggggggggggggggttaagagagtctctcgccgctcgacgtgccagagcgaggggggattagagcactggactgggaggtgcttatttaagctggggggaggggcttgagggggttgtggggcggaggggatgctagggaggagggaggaggggggcggggtggcaagcggttgctgttgtgggggggggggaggcggggtgccggggcgggggtggttcaggcgaggtagggagtggaggtcacggggttagcgtttgggggagggcgcgtcctgggggagcgtagcgacgcaaggtcgcgccgtgcgttactcgtcggccgcgaccggtggtggggggggtcgctgagcgcgtggt

SEQ ID NO: 714072 - DNA, 628 bp, Homo sapiens
cttaaccagtacaccaagacatttggttacccacccactgacgaagatccctgccaagtttctttgggagcatgctcggtcaggagatagacccgctcaggaatgtgctggtgactgttgctggctatggggccctgttcacaacgttccaggccctggtggacgaaggagacgaggtcatcatcatcgaaccctttgttgactgctacgagcccatgacaatgatggcagggggtcgtcctgtgtttgtgtccctgaagccgggtcccatccagaatggagaactgggttccagcagcaactggcagctggaccccatggagctggccggcaaattcacatcacgcaccaaagccctggtcctcaacacccccaacaaccccctgggcaaggtgttctccagggaagagctggagctggtggccagcctttgccagcagcatgacgtggtgtgtatcacttccaccatgtaccgatcacatcccagctctgcatggcccctgctaaggctcaggtataacctcaccttccctggctcatcttggccttggggagttgccttttagcttgagtcctcaagcctctccttttcgtccataataaaatgtttaagttattaagaaaaaaa

SEQ ID NO: 714073 - DNA, 113 bp, Homo sapiens
tgccctattactatccatacctcatcctagcaataatacccctccccacatcaagcccgaatgatatttcctattcgcctacacaattctccgatccgtccctaacaaactag

SEQ ID NO: 714074 - DNA, 193 bp, Homo sapiens
ctaattggttcttcgatgacgtccaaatccctgactagcatctaaactacacttaaggtaggagatacaaggagagtgggtgtagaaaagcaagcaaagaccagccagtagcacaaatggaaattaagaaatcctcaggagcaaggaagtaacacggaaggttatttcaccacgtcatcgaagaaccaattag

SEQ ID NO: 714075 - DNA, 762 bp, Homo sapiens
  misc_feature (119)..(119): n is a, c, g, or t
ctgagatcgcggccttttatttactctttggagacatgatgttgctgtgtcaacgaagctgtttggcacaccttcttgtatcagcttgtgctcactgcctcgtcgcttatcacatatantggagactactcacaactactccactaccgcctgcattattattagatcttttatggagatctgggatcgccatgtctcactgatcctattgatactgctgagctacaccatgactcctgctcatatcttatagcgtactgaattcgtagatatagcgactggactactcctctatctgaatagatatattatagctctctctctaattgcgagttgctgtgacctgtggcacaacactgttgaaaatatgccacctaataacccaattattcgcctctattacatattgcctctcactctctgtagatggccgctaactatttaagtgaaacgaagagttccgcatgtatcactgtggctgctcagacaggtggagtaaatccttatcaacacagcgtgtcatagctaagatatacttgtcacactgcctcttgctgcaaacagcgacgaagctcgtgtcaagtgtccctagcggagacagacgttctactctagtgacacatgaatattaggatagcagtacaaccttcttagctgtatcgggatggagtagcctagatggacgattatacctgctgcaacactaccttaaggccaaggcgtattccacagatgtgcctcacactctttattagggggccg

SEQ ID NO: 714076 - DNA, 341 bp, Homo sapiens
  misc_feature (182)..(182): n is a, c, g, or t
gaggactagagcaccgaacacatcacaccggataagaatacaagcctgaggcaggttgcctggtgtactccttgagcgcaccgatcacgaacgggccgatatagccgccgaggttgcccaccgagttgatcaaggcaataccggccgccgcactggcgccggcaaagaagcgccccggcagngtccagaacacggcggtgcaggaaaacatggcaaacgccgccaggcacagcgcggccatttgcagtactggcaccgtgagccaggcgctgcagaacaggccgatggcgcccagcacatagagcgcggcgagatggccgtaacggtcgttcaaacggtcg

SEQ ID NO: 714077 - DNA, 109 bp, Homo sapiens
ccggtcagttgtttcctaagtataggtgaacacataagcaggtaaagtgtgaggaagacttagatacagcattgttcccacctaccaacttgaaagcacacaccatggt

SEQ ID NO: 714078 - DNA, 287 bp, Homo sapiens
cacggtgccgaagcgggtatccctcgcgagccggatcgggatcgctccgaaaacgctcgacagagttctcaacggcgatattctcgctcccctcgaacgcaccatacccaatccttgcgccgtgcctcccgccgccatccgcgtgggttacgaatccgcccgcgccgtatcccgcgcgcaagtagtcgagctgcccggtaagagcggtgatctggctcttgcgcgcgttacggatttccgcccggccacacccgccggatcgccggcgccatgatctccgtcgccgc

SEQ ID NO: 714079 - DNA, 148 bp, Homo sapiens
ggaccgccaaaaagccagtgtcatgaagaactatctgtgaagacaatctttggcaggcacctgaactcccaaagccactgaggagaagatggaggccattgaactttcagtggatccaacgtctaacaaaagacaatgtcttgttttc

SEQ ID NO: 714080 - DNA, 1076 bp, Homo sapiens
  misc_feature (17)..(17): n is a, c, g, or t
  misc_feature (69)..(70): n is a, c, g, or t
  misc_feature (83)..(84): n is a, c, g, or t
  misc_feature (142)..(142): n is a, c, g, or t
  misc_feature (154)..(154): n is a, c, g, or t
  misc_feature (246)..(246): n is a, c, g, or t
  misc_feature (289)..(289): n is a, c, g, or t
  misc_feature (314)..(314): n is a, c, g, or t
  misc_feature (364)..(364): n is a, c, g, or t
  misc_feature (430)..(430): n is a, c, g, or t
  misc_feature (452)..(452): n is a, c, g, or t
  misc_feature (476)..(476): n is a, c, g, or t
  misc_feature (558)..(558): n is a, c, g, or t
  misc_feature (707)..(707): n is a, c, g, or t
  misc_feature (719)..(719): n is a, c, g, or t
  misc_feature (722)..(722): n is a, c, g, or t
  misc_feature (735)..(735): n is a, c, g, or t
  misc_feature (776)..(776): n is a, c, g, or t
  misc_feature (781)..(785): n is a, c, g, or t
  misc_feature (787)..(789): n is a, c, g, or t
  misc_feature (795)..(795): n is a, c, g, or t
  misc_feature (818)..(819): n is a, c, g, or t
  misc_feature (993)..(993): n is a, c, g, or t
  misc_feature (1017)..(1017): n is a, c, g, or t
  misc_feature (1027)..(1027): n is a, c, g, or t
  misc_feature (1043)..(1043): n is a, c, g, or t
gcgagcccccaaagtgntgagccgccgcgccccgccgagagcgcgcccctgcccccgggaggagcccannaaggaggaagggnncccaaaaaaactgaggcgcccgcagctcctgccgcccaggagaccaaaagtgacgggnccccagcttcanactcaaaaccccggcagctcggaggctgccccctcttccaaggagacccccgcagccacggaagcgcctagttccacacccaaggcccaggnccccgcagcctctgcagaagagcccaagccggtggaggccccngcagctaattccgaccaaaccgtanccgtgaaagagtgacaaggacagcctataggaaaaacaataccacttaanacaatctcctctctctctctctctctctctctctctctctctctatctcctctctccctcccctcncctatctctcctctctctctcncctatactacacttgtttcaaatngcgaagatcacatcgatagtgtatgtgcccaaggaaaaatacaggatgttgtcccatcaagggagggagggggtgggagaanccaaatagtatttttgtggggacaatatctaatataccttcagtcaactttaccaagaagtcctggatttccaagatccgcgtctgaaagtgcagtacatcgtttgtacctgacactgccgccacacgcactcctccaccgctgagagntgaatagctttnctnctgcaatgggagntgggagtgatgcgtttgattctgcccacagggcccctcccnccccnnnnngnnntttacngagagccgagtattttctgtgtnntctttttaattcacagcctttcttattttgatatttttttaatgttgtggatgaatgccagctttacagacagagccacacttagcttcgtctcacatggatctcaatgccaacccaccaccccccccccccagatatttttgggagtgacaaacattctctcatcctacttancctacctagatttctcatgacganttaatgcatntccgtggttgggtgcncctgtagttctgtttattggtcagtggaaatga

SEQ ID NO: 714081 - DNA, 169 bp, Homo sapiens
  misc_feature (162)..(162): n is a, c, g, or t
gctggggtatcaaggatcctttgcggagcctcagatcaaaactcagtgctgggccgggcgtggtggctcacgcctgtaatcccagcactttgggaagccaaggtgggcagatcacttgaggtcaggagttcaagaacagcctggccaaatgtgggtgaaacncctgtct

SEQ ID NO: 714082 - DNA, 765 bp, Homo sapiens
  misc_feature (26)..(26): n is a, c, g, or t
  misc_feature (104)..(104): n is a, c, g, or t
  misc_feature (108)..(108): n is a, c, g, or t
  misc_feature (113)..(114): n is a, c, g, or t
  misc_feature (133)..(133): n is a, c, g, or t
  misc_feature (143)..(143): n is a, c, g, or t
  misc_feature (150)..(154): n is a, c, g, or t
  misc_feature (163)..(163): n is a, c, g, or t
  misc_feature (166)..(167): n is a, c, g, or t
  misc_feature (172)..(172): n is a, c, g, or t
  misc_feature (176)..(176): n is a, c, g, or t
  misc_feature (190)..(190): n is a, c, g, or t
  misc_feature (194)..(194): n is a, c, g, or t
  misc_feature (201)..(201): n is a, c, g, or t
  misc_feature (207)..(207): n is a, c, g, or t
  misc_feature (215)..(215): n is a, c, g, or t
  misc_feature (218)..(218): n is a, c, g, or t
  misc_feature (221)..(222): n is a, c, g, or t
  misc_feature (233)..(233): n is a, c, g, or t
  misc_feature (238)..(239): n is a, c, g, or t
  misc_feature (243)..(243): n is a, c, g, or t
  misc_feature (248)..(248): n is a, c, g, or t
  misc_feature (271)..(271): n is a, c, g, or t
  misc_feature (278)..(278): n is a, c, g, or t
  misc_feature (320)..(320): n is a, c, g, or t
  misc_feature (384)..(384): n is a, c, g, or t
  misc_feature (690)..(690): n is a, c, g, or t
  misc_feature (753)..(753): n is a, c, g, or t
tggctctccattcattcgccaatttnagagtacagtggtggggtgcggtgtgtgcatcggtgcacggacagacagaaccacgagcagcaactaccatgggtganaggnttttnnttggggtgtgacccttganattagaagangcctcgnnnnntttggtttnatnnggttngtanaatgaaataaagcntagngaagctncctttncaaaaggncantgnncagcaacagcnagggnncggnctggncaccatcccaggtcttcgggganggggaangtgtgctcccaggtaagcagggtcaaaccacccccaagagcntcactttttcctggtggctctgccactgaactgactcttagaaaccggaaacggatgagctttntagccagaaaaccggagggaatcttgacaggcacacagcatccaaaccaacagcacttctgcagctggggcgcggctggcgagaggggtgctgcctgctgcctgcaaatcctgccagagtcaagggtttgctttcctactggtcttcctttggctagaaaagtgacaaaactgagctgggtggggtataagttacaggggcgagagcttcagtggcctgtttatcgggaggagttggagctggagcggctcctgtggcggcggcggcccggggaccgtgatctccggcgcacggggggactgcgcntcggggagcgggaccttctcctcatccgtgggggagactgcgccacataggcggtggtggcanattctcctggga

SEQ ID NO: 714083 - DNA, 152 bp, Homo sapiens
cccccccctttccaaaaccggccggcttaaacccttaaccaaaaggtttaggggggaaaacccttgggttttaaaaagtggatggggtttattttttgccccccaaaccaatttaaaattttttaaaattttcccgccttttttgggcggga

SEQ ID NO: 714084 - DNA, 252 bp, Homo sapiens
  misc_feature (155)..(155): n is a, c, g, or t
tactagatatcaatcaagacagaagtactatggtggtgcaggtgagggaggagcatggatactgttatgatatagagttcagttgaaagataagacattctgggatggaggtggtatatttatataacagtgtaattgtgttaattacactgaanatatacttaaaaatgggtaagaagggtaattttattgttacatattgttctatcacaaattacaaaagaatctccctacaagagattgcggtgtttg

SEQ ID NO: 714085 - DNA, 1226 bp, Homo sapiens
tggtaacccccccgtgcccagccctccacctgcacgggaacccccagggcactggggaaaccggggtgtgactgcggagaccggggaaactgtgggggacaggggagacaagcagcagggcatgtggcacggggtcgggggccctcatgtggaaacgaggcgcccgagggggcaacttggtgactggcacacagcggttcaagggagggccctgtgcaggactccttacacccgtgtgtgcctttgccaatgggtgccgtggccagccagaccttccggccaatattgggtcattagacgggacagcaacgttggccagtggtgtgcatgtggccctccagacactatactattctcacagcgcgggggcaatttgcacatggtcgtgttgcaggaaatttttgtgggaacgcgggggctacaccggtgaaacttaacgtgtcttttgggtgccctacaggggggccgctccaggtaaggggggtgccaaaggttcagaagaagaggctacactttcctgtgacaacaacgcgtgtaattcccttcacgccgtggctcctcccttaagacccttcacagagttcagtggatggcgccacaaggactcctcctcgcataatgagcgacccggggttccagtgcgggacaacctgggctgtgaacgagcacacggaggggggacaacatgtggtcctcccaatgagaccacatttaccggggacccttgagagcgaagaaactccagcgccaattgggactgagaaactctcatcaccaaaaaacgcccagagtccacctgtaacctcagggcggggcaaacacccacacgggaagcctgggagagaccccagggggcgccaaggcgccccccccgggggcagaaacccgcaaaaacgacgcgccgagacagagaggggaaactaaaggggccggcacccccccaggggacgtggcgccacgcctgtacacgcgacacgggcaaaaacagggaagtggaaggggggacactcaggaagacggagaaaagagctgctgcccaccagaaagcagacacaagcggagcccaacagagcaacagacgcagagaaaagagacataacaaaggcgacacccgcaatacgaatacgccgtgtgtcacgcaaaaacgacacggtgagcagtaccaaccccagcgatacagagaaatgaacacgcactctgtgtgtgtgagcgccaccactgacaca

SEQ ID NO: 714086 - DNA, 152 bp, Homo sapiens
acccttataggaaaggttaaaaaagtaaaaggaaccggaaatcttaccccgcctgtttatcaacaaacatcacctctagactatctacccagatattagaggcaccgcctgcccagtgacacatggttctaacggccgcggtaccctaaccg

SEQ ID NO: 714087 - DNA, 386 bp, Homo sapiens
ctagtttagaagttcattgctgcctggggtctactgaagctaggtgctatgaacactcctagtctagaagtttcaatagcagactaattgttgagtaactttttgtagtagagacggtgctttcacgcatggtgggcaggctggtctatgaacttctagcctcaagtgagctgcccacgctcgccctcccaaagtgctgggattagaggcatgagccgaggtgctcacgggctgaaccttttattaagagtggtaaatataaagtgttgatgtgagctgtaaagcataaattctcttgaaacagaggtttaaatctctttctatatgtcgcattcttgcggtgcctattaattttactgttgctgatagaaacttctaaaactagg

SEQ ID NO: 714088 - DNA, 261 bp, Homo sapiens
  misc_feature (4)..(4): n is a, c, g, or t
tttncatctgatgaaaaaagtaatcttagaattcagtccatcaggtaatcttctcatacgcaagtcttctaggacttgacagggaagttatcccttaaaacaaaagccgaaggccaaagtcaaattcccccagttgtctccctagagagtgatcgtgtattgctgatgggtgctttcctgttcacattcagagactgtctccaaacaccacaccactagtccaacaaaaagaaagctttgctgggattttccttgatattt

SEQ ID NO: 714089 - DNA, 1238 bp, Homo sapiens
cttagagaggtccccggtgtccgacggcggctcaagtcagagttgctgggtttgctcagatggtgtgggaagagcctgcctgtgggtgagccgggcccctgaccggtcaccatgtgggccttctcggaattgcccatgccgctgctgatcaatttgatcgtctcgctgctggagatttgtaggccacaagtcaccctcatccctggccttccaggggccacttcacttgcttgcagcgccatctgtaggtcagtgaccatcaacaaaaccagccagacagcatgatcccaagaatcccagggagtgactcagcggtgctgtatatccattatcatccatcttctgcattcatccctttccccttcctgaactgctttgtgacaggagcagtgtaaggcattcccccaaccatgactttgtggccctgatagcgtgccctccttgccatctgcctgcactgatcttcctgaggcctttgcggatgatgtactgaatctgcgctggcgccataagctgctgcatacctacagctgacatcaacatacctctcctcatggtctatctcaccaaacttaggacaccacgacattgatggtgccccaagaccttccgaccgatcacttggacctgcatctaggacttgcggaatcctatgtactattgtctcaacatggggtgcttggccagtgttcctggaaccactgccgatcacagtatccattagcaacgcacttaacagtgcttacaagcgtggccagacaacacaccccttacatgataacaatcaatagacattcaacctggccaagttgacaacgcacatcacgcagacaaccaatctatccacccaccacacctaatacatacccactacactacacacaccctacagcatatgccataacaccaagctgaaatcccgactagcagacgcattgcgtatgctgcaaacattgctcggatgccgatcacgacgacaagactaatagaagaaggagagaaaaaagcaaaacacattgcagaatgcagcgatgcaccaatcgacaggccgagagcagaatgctcatccgagcacgcaagaacaatacatccgcggccctcgcagccagacgaagatgctcatcagaaaaccagatctacccacacaccaccattcacaacatcaccactcccgccatgcatgaagaatcctcgctccgcttatgtcgcttccttcttgtggttgcacagtccaatag

SEQ ID NO: 714090 - DNA, 989 bp, Homo sapiens
cttagaaagtggcagcccctcggcttgtcgcctggagctgagaaccaagagctctgaaggggccatatgacatctcctcctcggacccctggacacacacagccctggacgactggagccttggagcatggcaagtccagagcaccctgggagccctggctgcatgggacccataacccagtgcacgggcaaggacccgagcgaggaagcacctatgcctactggtcccctgtaccctccccgcgacccatggtacctgactggcgcacttagacacacacagtggccctgagctccatagcgtcctatgcatgaccactgcgggagcttcagcagtactgggcagaaccagaaatgccgctggaagcacgtcaaactgctctttgagatcgcttcagcctcgcatcgagtgagacgaacaacgtctctaagcttctcgtgatcgcgggaaatcaaggcctggagagatgagcttatccatgggctcacgtggcgagcacacgtggacagctaccagaaccagacccgcagatgtccacgtcaaagtgacatgctctgagaggcagcacactacagaataaccctgctatccaaattccaggaagctcttaggggtcatccagctgggcctaggggtgcagggtcagtgctgatggcctgggcagggccgctagcctccctgagctttctggccttcagtgctgggagtgcacagttcagggtggactgtgaccccttggcctagaatgccctttagctctgctctctagtggctgtccccatagctggaactctagtttggagtggccaacaccagttccacctgctgttagggcgtaggatggctccaacacattccccagcaggcctctcttggcgctccaaaagccaagctgtgcccagccacagttccaaattgcttcttgaccccatgcagcaatgctttaagtggctttccaggatttcctgcatgcacacacagccttctc

SEQ ID NO: 714091 - DNA, 160 bp, Homo sapiens
catgatgcgcaaggcacatccgagggcacatgtaaaacaagccgcagatctggagacactgctgcctcctatccgggggaatgtgaggctattgtgttcaccacaggaggacctcactgacgatcagggcacatgttgcatggccactcaaggtgccagc

SEQ ID NO: 714092 - DNA, 418 bp, Homo sapiens
tgcacgagtcgcttactcctgtaatcccagcactttgggaggcccagtgaggtgggagaatagcttgaacccaggaggcagaggttgcagtgagctgagattgcaccactgcactccagcctgggtaacacagtgagactcttgtctcaaaaaaaaaaaaaaaaatctaagatagaggttgggtcaacagtgcttaataataaataagaacctcctgccattcataatatcctgatgaaccccataccccacacacccttcacgaacatagatatcagcagtattaccacggtataaagactgtgcaccttgattatgtcatttcaggcacatggatccaggagaaggccagtggagtggaagaactggtaaacatttgaggtttgccccaggccttgtgtacacgcaataagtggtg

SEQ ID NO: 714093 - DNA, 561 bp, Homo sapiens
cgcggtggctcacgcctgtaatcccagcactttgggaggctgaggcgggcggatcagttgaggtcaggagttcgagacaagcctggctaacacagtaaaaccccgtctgtactgaaaatacaaaaaaattagccgggtgtggtggcaggtgcctgtagtcccagctacttgggaggctgaggcaggagaatggtgtgaacccaggaggcggagcttgcagtgagccaagatcgcgccactgcactccagcctgggcgacagagcgagactccatcttaaaaaaaaaaaaaaaaaaaaaaaaaaactttttggggggcttgggccctggaaaggttttaaaaaccatccgtggggcacgcgggccacagatgggtagaggaacaggggccaaacgggtcccaaggaaaccgggcccggacaaagggcgggttctcaccaattaaaaaacgccggggggacacggcagggtcgtggaaaaatcccagaagggggtcagaggggcaacacgggcctctaaaaggaggacccagcggagccgaattaaataccgccgggggggcc

SEQ ID NO: 714094 - DNA, 644 bp, Homo sapiens
  misc_feature (110)..(111): n is a, c, g, or t
  misc_feature (619)..(619): n is a, c, g, or t
aaaaaaaaaaaaaaagaaaaaggtgctctttcacaaaaaaaaaaacccccccccccgggcccttttttttgtgtttttttttaaaaaaaaaaaaaaaaaaaaagaggggnnaaagggtggtgtgtttttttctccccccccgggggggggggggagaaaaaaaaaaaaaaaaatttggggggtgttttttttttacacaaaaaaaaaaaaataatttatgttcttcccccccccccccccccctcttttttttttttttgggggggccccccccccccaaaaaaaaaaaaaacacacccaccccccaaaaaaaaaaaaaaaaaaaaactttcccccaaaacaatttgttttttgcccctttcttccctcacaaaagggggccgcggcgggcccttttttcccagaagaacgggggagccccggggacaattttttttaaccccccccccccccccacctggggggaaaattgggggggttcaaaggaaaccctttttgtggcctttggaggcccaaaccaaaaaacccgttgtgttccggcttaattgggttccaattcccggtcagggggcaaaaccattagaatcgctgggccttaaagggaaaatagtgcaggtcntggtgcaggggggtgacccggacgt

SEQ ID NO: 714095 - DNA, 925 bp, Homo sapiens
  misc_feature (103)..(103): n is a, c, g, or t
gtgtctctatccggtgctctggtctccttcctttgtgccccacatatcgtccacttgggccggcaagacgtctgtcccgcgttgttataagcgccgcctctcnctcccactgtttatcctaagggcgcgccatgagatttgcgtcggtgcgccgcctcgtaaatttttgtggttgagggtcctcctcctatattcggggatttattgggacgccccccacgagggagggtgcttctgttaccaccccgcgtcccccgggggtctatgttcgttggtcggcccccagctactgtgcgttggtaacgttgttctctccgcgcgggctgggaaacacctagccggggtccacggctgccactgtagcgtcgcctttaagtggctcgcccacttgtcagcccaaatgcccccgcctgtcccaaaggttaaacccacctcctttttgttgtccaacataatataaggggaccagtgttctgttgcaccactattagtttaattttcctttccctgttatggaggcacacacacaaaacaatgcgcctatggacaaatcgtgtataaccacgtccacgcttccgccaacttcatcccctctgaacaccattattcattccgcgccaactataataaacagagtcacatccactcgtcgtatataatcatccaacaagggcatctattctctatttctaccactagaataatcattattatacatttattccccctagctcagcttttcatgacccacccccagttctctaacattagtctagtctttcaccacataaagtttataataccacctcgctgtttctctttcccacatcatcttcaagggatcatgcaacaacaatgacagcccccccctcttttcacaatcacaggaaaaaaaaaatatattttcttcgaaccacatagacaa

SEQ ID NO: 714096 - DNA, 291 bp, Homo sapiens
  misc_feature (77)..(77): n is a, c, g, or t
  misc_feature (248)..(248): n is a, c, g, or t
  misc_feature (259)..(259): n is a, c, g, or t
gtagagacggggtttcaccatgttggccaggctggtcttgaactcctgacctcagatgatccgcttgcctcggcctnccaaagtgctgggattacaggtgtgagccaccacacctggcccacttgtattttaaaatacaagaccaaagaatatttctgacatgtgtgagtcatacagaatggcaataaaacgaactcccatatgcataccccctagcttaggacataagaaattactatctttgaggnccccatttcgnctcttccctaatgctattcctctttattcgca

SEQ ID NO: 714097 - DNA, 278 bp, Homo sapiens
  misc_feature (50)..(50): n is a, c, g, or t
  misc_feature (53)..(54): n is a, c, g, or t
  misc_feature (59)..(59): n is a, c, g, or t
  misc_feature (105)..(105): n is a, c, g, or t
  misc_feature (165)..(165): n is a, c, g, or t
  misc_feature (216)..(217): n is a, c, g, or t
atttaacatatttgggtccaacttcaataatgtaataattaatacattantannatttnatttcctttctagaaaaatgcacaggctaaggcatagacaaaacanagagaaatgctgagaaatttgccactggagacaagcaatctgaataaatatttgccaaangttctttttatgtcatatagtgtcaggatttgacggagctattcccccccnnatgttgcaactagcaactcatcttcggaagacacagccaggagatgacgtagaggtgaaag

SEQ ID NO: 714098 - DNA, 570 bp, Homo sapiens
  misc_feature (249)..(249): n is a, c, g, or t
  misc_feature (259)..(259): n is a, c, g, or t
  misc_feature (276)..(276): n is a, c, g, or t
gtgaacatgtacatggtctgctctcatttattcattcttctctcaaaagtcaaatgaatgcagagggagctggtcaaactgctttgtttcaactgcaggcaggggagcaaaaggacgccatgtgagcattaggaaaaaaaatactcactcttactaacaatttttatacagaaaatgagtcatttggaaatgattcttatgttttttttttttctccttttagaaaattctccaaaaggtttggatgtngaatctgggnctgggacctgttttttnccttggagggtttttggtttttggttttttctaggatttcatggtgatgtttgggtttggtttttggcttttggtttaagtggtgctgacaccaaacacatccagtttataatcagtacatgggaaagcgggtatggatgtagaaccagtgcataacttttaagggggttggtaatgggtttttttttttggtaaagtgtgaataacagggttatgttactcattttccctgaacacggtgtgggtaaggtgcttcatgacaattccagtgaaggtgagctggagctggtgggc

SEQ ID NO: 714099 - DNA, 1247 bp, Homo sapiens
agtgttgactggggtgattgatccagactatcaagatgaaatcagtctaccactccagcaacggaggtaagaaagagtatgcatggaatacaagagatgtgggaggatcacttgagcccaggtgtttaagtccagtctgggaaacatagtgagaccctgtcactaaactaaaaacaaaaataagatatcgttcagcaatttgtgcgagcggcgtgtaacatttcaaagcactatttcaacatactttacaaatacactcacaaacaacaggaatcctattctgagggccgctcctcctcaagacaaatcggtgcccggtggctcctgtcgtgacattagggcgggtgtcacacagtggggggcatgaatctattagatcgatggactatggccacccaatgactcctatatgagcgcaaggtgcctacttctacgaccagactatgtgcctcgctagagtagcgctctttttcgcgggcacaagtttgacagccggtttttactgcggggatataactgatcagcgattgctagtagtctacactcaacatactaactgcagcctctgtgcctcgttagtctctctgcgtcctcccgcagttccgcgcctacattcttctcttttctccctctcgctgtgctcgactcctgctcgcatcgcgaggtctctatcttgtctttcttttccccctttgctcgtctcgtggttggctgttcactccgtacgctctgctgcgcttctctctctatgcagttctacgcgggcttctgtgctcttcgagcggtgttgcgtcgcgggcgttcctcagagtggcccgcgcggtgttttgtcgctctcggcgtcggttgtgtgcggctacgtccccgtcgtggggtgtcctcgttcgtctctctgtgggtggcgtctcgtccgtcgtgcgtcccgtctagtctgcgctccccctccccttgcctcttcttttgtgtgcggtgttggctctgtcgtctgtgctgtgcgtgttcgtctgtgggtgcggtcgccgtgtggtttctgtgtgccacacctccgtccttgtgtggtctgttcttggcgtgggtccggacgtacgtctatcgtgtcggccgccctgttgtaggtcgtgtgtgtcacgtcgagtgctgaccgcctccgctgtcgtcgcacgtctgtactatgtcactcgtacctactcgcgccactgggtcggagttcgccccggctgctgtccgtgcgctacgtctctcttccc

SEQ ID NO: 714100 - DNA, 466 bp, Homo sapiens
  misc_feature (45)..(45): n is a, c, g, or t
  misc_feature (90)..(90): n is a, c, g, or t
  misc_feature (163)..(163): n is a, c, g, or t
atagggctctatatttattcccggcatgcataccatgctcttggngtaaaatggaaaaccaatgttaccaagggagttctaccaaaggangacactattttccttctttatccacttctggtattaaaatcttgctattgtgggggaatatttttgggcaccngaactgacagatttacagtgctttttcttctttttaacttttccctctgaaaccaaaacggtaatacatgaaaaatgcagaaaacatccaaaaggatgaaaatctaaattacttataaacctactaccaactcccactgttaagaatgtatgttatcattcttccagatttcacgatgcacaaatttgttaatgattaattttcaacctccttctttcatttaaatatattctgtatatttaatccagcattaaatgttcttctaaaacattatttttcatggctgcttactagtgcatattt

SEQ ID NO: 714101 - DNA, 781 bp, Homo sapiens
ccacgcgtcgaggcagggtgggcaggtgcccaggaggaaagatatctggtgtcctgcaggctccagtttgagctctggcgaggctgcacggcataggcaggtgagcgtggctgactctgcttcccaccccgtaccgtgaggaaggacgagttcttttgttggttatttttcactggatggctgtgaggattgaaaaaaagaaatccccttatagaacagtaggagctgtccgggcgcggaggctcacacctgtaatccccagcagcttggggaggcccaggcgggtgtgatcacctggaggtcaggagttcaagaccagtctggcccaacatgtgtgatgaccccggtctcgtactaaaatagctagaaagacagttagccggggcatggtggtgggcgcctataatcccaagtactcgggagggcctgaggcaggagaatcgcttgaatccggtgaggcagaggttgcagtgagccaagattgtgccagctgtcactccagcctgggcaaacaagagcgaaactctgtcacaaacaaagtaatgaaaacctgtaaggacctgttcgtaaaacacacacccgaggatgcctttccccgggacagtaacttcccatagagagagctcaggttgtgacgtatgcttcacccaagtgaccggaccgctgtgcttttccacaggtgagtaactcaatcgaggcctcataacgatgctatgacgaatggatctatgattatacgcactagcaggtgaaaagatgaggagcagagttgagggacttc

SEQ ID NO: 714102 - DNA, 1295 bp, Homo sapiens
gcagaagacgtgcggagggagacgcacgagacagagtgagatggcctggcagccacccagtctcgtgggggagcacttagctcccccgccccgtgctcccgacctgtccgtgggtggctcctgaatgccctcagccccaaccccgtggcgtccaccatggaagccagctgtgccaccaggaggagcaggaggatggtggagtctggctgaatgccacacggatgccgcaccgtgggccccatgagcacgatccaccgagtcctaggcgcgctgccactaatgggacacgcgaggaagaaaaagaagcacacagcagcaccgagggccgagcacgcaagagagcgcgacaaggaagcggcggggcgggcagagagagaggcagggcgagagacaagaggaggcggcgaggagcgcgcggaaggcggaggagaacggaggggcaggagcgaagggagaggcgaaagtcagcgaggagagagaggaggtagcggaggggaaagacaagagagaggacagagggaggagaagagagggaggggagaggagagcaggcgcggggaggaacagcgcacgagaacacggagcgagaagaggcgagcagagggcgaggcaggaagagaaagacggcgaagagggggagggaggcgaggcccggcggccgaggagcggaccgcggccaacagcggggcggcggagaggaggggagaggcacaggagaaaggaagagaagggccacgccggaggcgaaggaagcggaggaacgcgggcaccggagcgagaccgacgaaggaccggcaaggagacgagcaggaaggaaggcaggcgaaaaacaacaaagaacgaaacagaaagcaggaccgacgaggcaagaagacaggcagggagaaagacgcgagagagcgagccgtgcagcgacgaggcaggagcggggcgacaggcgagaaagacagaggagagagaaagaggagaagagaggaggagaagcacgcggacacgcagaccaaagaggagaccggcagaacaggcgacagggacgcgagagacagacgggggacggcaggaagcagaagcgcgcagacacacaaagaggagaccgacaggcaagacaaggcaggcgacaaagccgaaagaagcgaggagaaggaagacggacggacagacaagaaggaggggagagaggggaggacaagagagaggaacgaacgaggagaggagaaaagggaagggagacgggcaggaagcccgacacgcggagaacagcgggggcggacaaggacgaagacagacggcgtgaa

SEQ ID NO: 714103 - DNA, 231 bp, Homo sapiens
cacgaggagagatcccctggcccaccttgacactccccaaaccaaactctcacggtcccactccatgtaacatcgtcttcctgtagacttcagaccggtccaatcccatcttcctgttcatgtgctcggtggattcggccgccagaactcaccccgtttcccacgtgctggtcctgatgaaagggcttccgggtggccacccctctctgcctcggtacctgcgtatctcac

SEQ ID NO: 714104 - DNA, 265 bp, Homo sapiens
cgggtcttcgtactgtggtggtcttgccgctggtggttagagcagctggcgctcgagtagctgacggcggtggtggtgctggtcgtactggcgtcactgttggtcgtcgagctgctgctggatttcggattggtgacggtcgccgtgcagctgttgctcttggcggtgcacgtgtaggtaccgccgccggtgagcgacgccgacttgccggtcgaggtggtcgaaccgctgacgctggtggagctgctgctactggacgaggttg

SEQ ID NO: 714105 - DNA, 441 bp, Homo sapiens
  misc_feature (369)..(369): n is a, c, g, or t
gtcgactgataatacaatcatacatcacttagccacagggtaagccacagggaaatgcatccttaggtgattttgttgtgtgaacatcgtcaagtgaacttactcagacctaggtggtgaaacctactacacacctaggctgtatggtacagcctgttactcctaggctacaaccctgtacagcacattattgtactgaataggtgctaggcgtggtggcttacacctgtaatcccaacactttgggaggccaaggtgggaggatcccttgaggccaggagttcaagaccagcctgggcaacatagtgagacacccccccacacacaccgattccctgtctcttaaaaaaattttttttaattagctgngagtggtggtgcatgcctgtagacccagctactcaggaggttgaggcaggaggattgcttgagcccaggagg

SEQ ID NO: 714106 - DNA, 248 bp, Homo sapiens
ctgggtacggacgggaggatacccggtctttggatgatgagagggagacgaaagccgagacgtggactctggttttacctgtggcaggtttaaacaaagtcctcaagatttctttatgtgccagagagtacatctctggacttaatctctaggggggcaaaacagaataactagaaacaaatataatgatcattctggaatccgtgttctttacttggttcacgcgcatattaattctcataccttca

SEQ ID NO: 714107 - DNA, 425 bp, Homo sapiens
tcctggcaggtcctacctttagaccaggattgggggatagggaggtctcatctggaagacaattaaaggcggcttttcaaggtgtaatatatgcaaggtagggcatggaagcaatctgaaatggcatccggtttggactggccatggctttggtatgttcttatccagcacccttaaaaggtccaaaggggtggggaaatttggtcaggttgggtgcccccaaaacacacaaatccccattcctagccgggggatgattgaatctcggggacggagcagctaccaacggcaaagccaaagctctctgctggtatccaggcccctagggcaaggccgggatctcgagggcgcctaagccagagctggagtccggaaggctggtcccacggtagagggggtgacgacggctgaataagcagcccttg

SEQ ID NO: 714108 - DNA, 159 bp, Homo sapiens
cggaggcagaggtctagaggagtcccccctgagtttagaagtacacagcagcggttaggatacacaaacatatatatacaatttctaagacaagtaaataaaagcagtttagtatatctgcctgaattcatatattcaaaatcttaccaaaatattgat

SEQ ID NO: 714109 - DNA, 586 bp, Homo sapiens
  misc_feature (360)..(360): n is a, c, g, or t
cagcccgacattaattgcaataagttaaaaaaaattgattagaaaaatttactttacattaacacaaacatgctgtttttaacaaaatggtgccaaatcggagtaatggcatctacggatcatgaattattcttatcatattactcttttttttcttaaagcattcaccattgcacacatgccgaacacaggagtattagccattcatatctgaaaagctacaggatttaagaatcatacaaccccaaacataaacaccagtgacactggcggatcaaaacatctgccaattctatagctttacattgaacaactctggatactcagcgtgttgccaaggaaaggaactcctgtcagtgngatgacaaattgtatagcatgcaattgaataagaaggccgtttaccgctaggccactgacgttactttgaggccaaaagccaagcaccggcattttcaaagctttatgatccatggttctgtccctcctttaaaactctcaacattacttgatcggcagaacaatacacaggagacttatggctaaagtcgcttggtgccccagcttactttaacaatcaagaaaa

SEQ ID NO: 714110 - DNA, 494 bp, Homo sapiens
acccagaacacgtgggatgcaagtaatcagagtagggaaactagttagaatataattatgtgctccgcacttgggcttctctttgctcgtgctaaggacgtgctctcctatccgctgcctactacctctccctactctcctctggaacaagacacaagttaaactgaggtggaggagcttggtgttctctaagtaatcattgcagtaatagatcactgcgtgactaaacgtacacccagtaggctggtgcatcgtttgtgtctctgggtcaaatacacgttgagagaagtctcatttattgttcctcgaatttgtgcaaacctgaacatatgtctatctctaagtttatgccacccctatttacttgcttttggtcctgtttcctttcttcatataacactctttatcctgtaagaggacagtttccttcgctgcagtgggaccacagactatagagaattaggacctggaaacagaatgtgcagttatagggg

SEQ ID NO: 714111 - DNA, 170 bp, Homo sapiens
taatcgatgaaaagttacacattttggcagagaaaagtcttagctgaaggaaaatcaagtggaaaaatgaaatctatttttaatattactactatatgaattatctttttttaaacttgtagataaagagtgttccatgtcatcaggaaaatcctcaagacaaattgact

SEQ ID NO: 714112 - DNA, 805 bp, Homo sapiens
taattaaccactcattcatcgacctccccaccccatccaacatctccgcatgatgaaacttcggctcactccttggcgcctgcctgatcctccaaatcaccacaggactattcctagccatgcactactcaccagacgcctcaaccgccttttcatcaatcgcccacatcactcgagacgctcacatcatggctgaactcatccgcctaccttcacgccaactggcgcctcaactattctttatctgcctcttcctacacatcgggcgaggcctactacttacggactcatttctctactcagaaacctgaaacactcggcattatcctcctgccttgcaactataccaacagccttcactaggctatgtcctcccatgaggccaaactactcatctctgcaggggccacagctaattacaaacttactatccgccatcccatacactcgggacagcacctacttcaactcaactctgacgaggctactcacctacacacgtcccaccctcacacgactccctctaccttccacttcatcctgcccttcatctatcgcagccctagcaacactccacctcctattcttgcccgaacccgggatcccacaaccccctacgaatcacctcccattccgatcacaatcaccttccacccttactacacaactcaaagacgccctcggcttactttctcttccttctctccttaatgacattcaccctattctcaccagaactcctacgcgacccaaccactactcccaaaccacccctcaaacccctccccaatacgccccacgccac

SEQ ID NO: 714113 - DNA, 1035 bp, Homo sapiens
agaaatcggcaatatcatctctgatgcgatgaaaaaagttggaagaaagggtgttagttcacaggtaaaggatggaaaatctactgacatgatgaattacaaattattgaaggcatgaagtttgatcggaggctatatttctccatactttattaatacatcaagaaggtcagaaatgtgaattccaggatgcctatgttctgttgagtgataaagacaaatttctagtatccagtccattgtacctgctcttgagatattgccaagtgctcaccgtaagcctttgtgatcataatcgctgaaagatgttgatggagaagctctaagtacactcgtcttgaataggtccgtactaggttgggtcttcaggttagtggcacgatacacacggctccaggggttaggtgacaagttaagaggagaaccaggcttaaaggatatgcgtctattgctactggatggttgcacgtggtggtggagaacgatggggattgaccctgaatgccttgataacgacgtttcatgcctacatgacttaggaaaatgttggagaggggtcattgttgaccaaagacgatgccatgctcttcactaggaaataggtgacaggctcattctgaaccaacgtatccaggaaatcattgagcagttcgatgtcccccctagtgattccaaccaggaagatgaatgaacggttgcaaagtcgaatggagtgggtgatcgctgaagggtggtgggccatgatgctttgacgggaacttgaacgaaaaccagttcattggccttatggttcaaaactgcgttgaaaagcgtgtttgcgcggggggggtgtcccccccttaagatcaaaccggggacatgttcccgcttggtagagaacaacggtttgattcttgtaaaccacagccccacgtctagaacgagtggatacgtatagagacctcacctatatggcgtgtccagcattcagaagcacaacaaacaatgagagtggtcacatcaaaccaagcatcaaggtatcactaataagaagct

SEQ ID NO: 714114 - DNA, 600 bp, Homo sapiens
gaaggctaagagcgaaactgtcccagctgttctgtcctaggggagggggacatagccctagcaggagctcccagcccctcttggcactctgacacacaagtacacccatctggggcccgctttgccacgaagagctgggcaggcctgcagggtgtagggtgaaggacggatcacgaacctgcaagaaaggagagcgtcgaaccccagggaacagcgggtcccttcccgtccgtgcagacacaagccacctcagcatatgtggctcttggcccccagcccgcaccaatcccacctgttgcacttagttcaacagacaactgacagctgatatttattggacaatttgcagccatgctcaagcattcggcttggattatacccagttgtttctcacagccggtatttattgtctgctctctctgtgccaggtatctgtgctctggacatggggcactgcatgggctgcctgacctgagtggagcttgtggtcatgataggagtgagagctgacctcaagcccacccacattgcctatacagggcatagggcaagagtatacaacaggggcctcatataatatgtcgtaaatatataagacgg

SEQ ID NO: 714115 - DNA, 516 bp, Homo sapiens
ttccctgtcatgtaccttgtctttgctgaagttacttgttttatatgattggtggcatttaaaaacttggactaactcataacattctttgcttttttattgtcatgttgtgtttgtgcaggaaatatgttttttattcatttgtatagtataggtctgatacaccaaaagaaattcattagaacatatttatttgatgtttgaaggactctttaaaatagtttatctgtttaaataatgtgtaagatttatgcatttttatataacaaaccaaaatcacatgtgtatttaactgctttgttagttgctgataatttatgtaacaaaattttcttggagtcttaagtctcacaaaacatcttatttttgtgcatccacacatgccaataagtgaatcatggtgcctttcccaagccttgtatgaacaggactggggtaagggctattttttttcttatcatgggtacttagaataagctttacaaagaaaattccatgtttctcaggcaaaaaaaa

SEQ ID NO: 714116 - DNA, 464 bp, Homo sapiens
ccatcatcggtgctgggagcgtgctcgatgtaggacggattaaatgggtcggtgtatgagacgtgctggagcagtgtcacgcagcatcatcaccatttgaatagctattacctaatgccctgcagatgcactggcacaaagcaagagaggcatattgactaggctgagcagttacctttagattctgacgttatttgcacatgaatgtatagcgatagttatgggtcacagtgagtatataatccagcttaaggaagtagacccttgtctagctgtattagacttacgatatttccagatatgggtccagctattagaatttggggttactggccatcttcttgctctaatcaatattcactttctgaagtctttcctcagttctcatgtggactccagctggggctttcccttagaaccggactcatgggatattacaggccagggcttcaggatcctccagc

SEQ ID NO: 714117 - DNA, 908 bp, Homo sapiens
cagaccgctcatcacgaacatcatcgtgtgatgaagaagaggagaatgaagagatccctcccaaatcccaaccagtttccttacctgacgaatagaatcgggttcgattatcactgggcatgcagttgcccactctagagtgagaaactctgaccggagaagagttcatcagagtgtttctgccgtgctcctcctcactcctaagctccatctcgaaaggccagcagcatctctcgtttcctcgcgtctgctccggaaaagcagcagtggagacttcatgcaacaatgattcccaaatttagaagcctcgaatgtctcggaattctcaggctagaatcataactggagaaaccggtgtgttgctcgtctcgcactgtgtgcccagagaggcaaacttccccttctccacccaggagtctgactctgaatcaacttgtctagactcagagacaccactgcaaaggttatccgagaggggccatcccatgtccgagcagcaacccggttccgaatggtagagaagaggtctgagaatcatcatgtctcctgcaagacatcgtcgtcgcattacgatggaaagctcgtggggagggactcctccactaccagcacgatgccagtaagctatcattcatgctgctagggatccttcagagaatcggggacgccagagggaatccggcacggggaagacagctgattcggtcatgcagagctaattcaccgatgctggccgcaaggaagtatagccggaacactcccaggggggctccgcggtgggaacccggatggaagggcaccgcggggaagggggaacccggaacccagacaaaaaggcgccgagcgccttgcaacaaacaaggggagcccaccaccccgggcggctcaacttccctacaaaaagggcc

SEQ ID NO: 714118 - DNA, 878 bp, Homo sapiens
tacgggatcgggctgcttacctgcagctgcccgtgctgtgactgtgacctagaccccgactccctttggctcagccctgtgcgccccagtgccctggcctggtgtgtgcgcgacgggaggatagagctggcgggctggtggaaggaggagccgctcagccgcagctgtgcaactggggccctcaaagtctccgtctggagtactggtgctgcggagcgacgcgtgcctgggaggataaggatgaattttcagatgtgatctactggttccgacagatcattgctgtggtcctgggtgtcattatggggagttatgccattacgagggttctctgggaatagcagggtaacgtcttgaggtatcttatatatcacatggtatcatttctttttagatagacggcttctccttcctgttcccggacaaggccattcgctgcaactggacccttgctgctgtgcgttcgtcgatcgactctactggcacgaaacgtagtaccctaacacgactagggtcccatacactggggacctgagctggcacaacgtacgcctacaggacagctaccactggacactaccctggaccacgactgcaactgacacgggacaatccctagacagccgcccaccacctcccgggccggaaaccgcacacaccactatgaccgacgcacccgacagcccatgccacgccccacgccagcaaacgcaccagaccgacacacgaaacgcggcctccccacgaccgtaccccgccacgcgccacgcgctcactagtgggccgccacaccgacggtccccagccaacccaacccgaaggaggaacgcgtcagcacggaccgaggggggcagactggcccagaggacacgaacagc

SEQ ID NO: 714119 - DNA, 341 bp, Homo sapiens
atcggtggcatgtgatctcatagttcaattcccacctatgagtgagaatatatggtgttggtttttgttctgcgatagtttactgagaatgatgatttccaatttcatccatgtccctacaaaggatatgaactcatcattttttatggctgcatagtattccaagcctgttaatctttaatcaaattccagatattgtgaattttatatttttgggtgctggattatttttattcctattaaatcttgagggtgatttgcaattcagttattgtatttgtcaacgttcgcttttttttttttttttttataatttggtagggccagtattataaacataa

SEQ ID NO: 714120 - DNA, 182 bp, Homo sapiens
  misc_feature (34)..(34): n is a, c, g, or t
  misc_feature (108)..(108): n is a, c, g, or t
  misc_feature (130)..(130): n is a, c, g, or t
  misc_feature (134)..(134): n is a, c, g, or t
cctcccagtctcagggtggccagggagatacttnactatccttgggttccctgcaaaaacctgccctccttccctggttgtattctccagccccttgtgggaagaganatctagccactgtgctctgagnacantgtgtgtcctaggattcattcagttcaggaagttacaaatgaactttc

SEQ ID NO: 714121 - DNA, 213 bp, Homo sapiens
  misc_feature (86)..(86): n is a, c, g, or t
  misc_feature (97)..(97): n is a, c, g, or t
  misc_feature (105)..(105): n is a, c, g, or t
  misc_feature (135)..(135): n is a, c, g, or t
  misc_feature (168)..(168): n is a, c, g, or t
  misc_feature (171)..(171): n is a, c, g, or t
  misc_feature (190)..(190): n is a, c, g, or t
ggcacgagattttaattagacatgcaacagttttcactaccttttcaggattttttgttcctgttaacagaggcttttgctttttnacagagaggtnggcaggtngagaggttatcttcttcttcagttcttaangttgttaagattcctcttggaaggctacccttnttngggacttacagtttcaatnccagcaagctaggcctgctccag

SEQ ID NO: 714122 - DNA, 94 bp, Homo sapiens
catgagctggtccgacggtttccctgtgagcagcagagcacacaatatatgaggcactgtgccagtgctccaggtggcctccctgtgctgtcac

SEQ ID NO: 714123 - DNA, 494 bp, Homo sapiens
ccctcgggatgcaagtgtcggtaattggcaacagtgatcgtgagaaggtcatagtctaagaattatctaaaatattttaaaaactataaagctgcaacacactgatgtttacaccatagttactaagaaaactaagagaaagcacttattacgctctgcaataacagtaacatgagaaagcactatttacataatcagacaaacaaaaaccttctatatgcattatcagcaaagattttatacatacaagagaggcatattgctcaagtcagaaggggttctataacgaaaagcacttactaagttagcgactaacagaacaaccagtttaaagatgaattaaatgcccaatttggggaggcatggcaggtgtaagagaaaggaaaagcttaagaaaacatttcctgataataccaacctttctttcatcatctactgcatttgacagaaattaaccttttagagtttttacccgtgacactttgcatccagag

SEQ ID NO: 714124 - DNA, 155 bp, Homo sapiens
cgcccgctaccaataaggaaccagctctcagagagccctgaggcagctcagaatgcagttatttaagccaggacttaattgttgttcatgcgccaaaaaagagtgttagttttcctctatgcttagctcaaaaattctatcaaatatagagttcc

SEQ ID NO: 714125 - DNA, 594 bp, Homo sapiens
taatgggcttgggtgagggaggtaggtggtagttggtgtttaatattttagtggggtgatgaggaatagtgtaaggagtatgggggtaattatggggggccatagggtaatattaagtgggggcattttaaattcttgagagcgaaagcctataatcccgggcggcccgctcataaggggactgggccagggctgaggtctacataaggatagtcgggtggggtgggggggtacatgagtgagaggcagagacgtcccgaggaggtataagtggtggggcacatcaaacaatcgactagaccagcgatcctgagttatcaaacggaaaatcgagggtctcgcccacctctgaacaggctgaggtgcaacgcgcggcacactccactgagggcgattccgacagggtacagactttgagcatcaaaagccactgaggtccggcggtggccagaatccaagcccgacattgaacgcaatgaaacaaacataagcgcaacaggagcgacgcacacaaaaacaacagggggggcacacataccaccgagcaccccgaccacgagccgaccgacccacccacacaagcccccacgagcc

SEQ ID NO: 714126 - DNA, 160 bp, Homo sapiens
cagctcctctgattctgaatctgaatgatgaggctgacgaggatgaagaacgaaggcgacgtcactttccgacccacctgacgaagcttctgaatcagaagaccctgttttctgagtggaggacagaactttctgttaggaaactctaccaaagtctttc

SEQ ID NO: 714127 - DNA, 197 bp, Homo sapiens
atggttcatttcccagcaacagcaagcagcaatggccaacagtcatgcagcacaggctgcagcatcaacaggcagcatagggatgcagccatgccatcagcggcacaatcacacatgccatcaacatcatcatcacatttcgcacagcattcatcagcacagcacaggagcaacatcagcacacacatggcaccacc

SEQ ID NO: 714128 - DNA, 524 bp, Homo sapiens
cctccgcgtaaaagcactctacaagatactgttcacgttgaaaggaaaggatattttgcatagcaccaaccgcaggtgatgagccctgttcaccggacagggtctagctgcgacagtgaatataaacgcactgtttcctcgggcacaaagtgaagtgatcatggaacgagacggtaacgctcatttctcggatcctctgtttacaacaacatctgaagaataaactaaggcgtctggtgccgtgaacagcatataatgcaaatctgtacaaagcgcctgttttctactctagcctgttcatatgcaccgctctccaacaagtaacccaagtataatttggcacgagcgggtgttcacaatcacgtaaaaaagggtttggggaaaaggtgctcaataaggcaggaggtgtcctttttcccagacgcagtataaccctgtcgcagacgggattttaagcatagaaaggccccgtatgaatctataaaattcccagttggatccggaaaagcaaacgtaaaataaaa

SEQ ID NO: 714129 - DNA, 157 bp, Homo sapiens
  misc_feature (2)..(2): n is a, c, g, or t
  misc_feature (42)..(42): n is a, c, g, or t
  misc_feature (132)..(132): n is a, c, g, or t
tnctgggacaccatggtttcaaacgaagatgaattgaatctnctggttattgtagttaatgccaacccaatttggtggggaaagcaagcattaaaggaatctaagttcactttatccaaatgcatagatgcngtgatggtgctgggaaattgcattt

SEQ ID NO: 714130 - DNA, 180 bp, Homo sapiens
cctgggtgattaatctcgaaggaggataggaatgatggatgataggcgagtccctgcacgcgttccgctccgcgcgggggcccggctcccgggcgcggtcctcgggcggacggagcgggcggccggcggcggagacggcgcgcggcgcttccggagccagcgggtgctagtggagccgga

SEQ ID NO: 714131 - DNA, 135 bp, Homo sapiens
actgcatccgagtgtcgcccctaccgaaatttttaatgcatggctttggtaatttagagacctgtgggtttgttaggtactgtttgcattattaaattaaagctccatagggatcatctcgtctcttctcttgta

SEQ ID NO: 714132 - DNA, 435 bp, Homo sapiens
ttttttttttattttaaggtttgagggggaatgctggaaattgtaaggggtatggcaccgtgggtttaagtaatgctagggtgagttgtgtaggaagtttttcataggaggtgtatgaattggtcgtagcggaatcgggggtatgctgttcaaattcataaaaccgcgggaggttaaaagtagggtctgggctgccacacacatattttggggggtcgagtcagaggggtgcaagaaggtgcgtcaatctatgtgtggctcccttagtggaaacgaatgggctacgctggagtcggcagaggcttgtgtaatgagataaataaagtgatatagaggtgataatctcgggcgtatgtcaagacaaaatagaggcggaaaagaggtgcacattgcggaggagattatatcatagtgttagaaagcccctgtagaatt

SEQ ID NO: 714133 - DNA, 426 bp, Homo sapiens
  misc_feature (210)..(210): n is a, c, g, or t
cggatctatctgcaccacagcgcatcgcacgtctggtgcgggctcatcgcacactgtcctcctttgacctgcttctaccgagactgctgctggtgcacgcttctaccttatgagatgctgctcatgtgggatgcgctgaaccagccgaacctcacctgcggcaatcagacacagatctactgagtcagcatcagggtccccagcctctgngctcctgtttccataggaaggggcggcccttcctcccaggaagctgagacctttgtggtctgagcataagggagtgccagggaaggtttgaggtttgatgagtgaatattctggctggcgaactcctacacatccttcaaaacccacctggtactgttccagcatcttccctggatggctggaggaactccagaaaatatgcatcttctttttgcg

SEQ ID NO: 714134 - DNA, 177 bp, Homo sapiens
ccataatataagtatttatcatgtattctgtgtctggaatacaattcaatgacctatttcagaaaaatcttttcaagtactggctgaaagagtgagggatacattaggagactgcaaataaactggcaatcacaagaactttttcggataaaatgaaattgtgccgaaatgtataca

SEQ ID NO: 714135 - DNA, 154 bp, Homo sapiens
atacatcggggctcattttctctcattctgaccatgtatctccttgtgatcagaacctccaaatactggcatgagaaactagagggcaggtcttcatacaaatgccctttgaacccccttcctgccctgtgttcatgagatagggttaatgggc

SEQ ID NO: 714136 - DNA, 251 bp, Homo sapiens
gaaacagaaaactttatcacccttccccctcccaaattaagccaaaggtcaaagatctcaaatgaagcgaagcacatgcgacggggaaaggtgattccataatgatgaataacctacctccccagaacaaggcagaagggaagattaagatacacaacttgtacagtttaaaaactggagaccaacagtacgctgtacacatgcaaatagttgcaggtggaaaacatggacagtcagacagatcaagatac

SEQ ID NO: 714137 - DNA, 891 bp, Homo sapiens
ttgtgtgaaaggcccaggtgacaggtcatgatgtagtagtgtcttaacggttttttaataaatcctttgtataaaaatgtattggtctttatcatcagaataggaaaaattgtcatggattcaagttattaaaagcataagttggaagacaggttgcgaaatgaggaatgattaaaatgcagtgaagttgaaatgttgcagaaaatctaattttttgcataatgtgtcctcccatgtccaaattgggaagtgacttaatgtcaattgtgtgtgggtgttttaataatacttccttatgtagcgcattaagatttatactgaatattgttcccaaatgcccagtttgtgttaatatgtatagtgcttttagaacaaatctggataaatgtgcaaaagtaccgctttgcacagatagttaatgttttatgcttccattaaataagaaggacttaaaatctgttaagttataatagaacatgggtagttcagagagatttgtagagctgtggtggacttcatagatgaattccagtgtcgagggaggatttccgaaatttgtgcgtgaaacacaaagcaggggggcggcaagaataactggagggggccagtttagggtacccagtttttgtacaggggggccctatggaggacggtcaaagcacaggcggggcggcgaaaacggcgggtgggagacacggacccggacgttggagggccctctctggggggcccatcggccacaccgcaagagaacgccaaggaataacactaaggacagggaccacgacttgggcgcacgttgcggactacaacttcaggcgagaccaggggacagcgagcacgcgacacaaagcaacacaacgccacgacacagcaaacacaccgccacca

SEQ ID NO: 714138 - DNA, 486 bp, Homo sapiens
gtttagagaactaacatgctgtaacaccagactaaatcattttcccctttccgataaaggagcaggcttccgcacaaaaatctttggtctctctctaacctgactgactaagtcccttcatgctaaagcttgcacctaagttggtctacacccccctagtcaacatacaataccaagcagtttctacccagggtgtacaggtcatttgatcacttaaagccattctcatgactacaatgagtacaccaacctccacagcttgaaaaatggtgagacagaccccgcagatcccttactttgagaacatgagcctgtgaaattcatctatctttgaatctaattgggctttctcctcccttcggagtacatgaacatcacaccaaaatagattgcctggcaactacattgctaaatcgggggcactaggaacctgtactagggcacgcttgaatagaagagctcccagggtccctactatggtacact

SEQ ID NO: 714139 - DNA, 167 bp, Homo sapiens
ggtgagaatctagggattatgaggctaccaacatgcatccagccagtaacggagccggccctggaaaccggaccttcggaccacaagttgtccgggtgtggctacacccgtcccttttccaactcatacggtcacctgatgggagcaagatgggggtaccgagctcg

SEQ ID NO: 714140 - DNA, 796 bp, Homo sapiens
tgttgttttttttcggttgtttgtttgttttttatcatctgagattctgtaatgtatttgcaaataatggatcaattaatttttttttcgaacgctcataacttgtatctttttaaaacaccatgtccgttggatatacaaaagccacgagtgaccacgtgaccacacaatctatttacgcgttctctgtgtatgacatcctcgatcttcaactgctagcgattcagctaaatcttctgagcttctatgactctgtggaacattccggccactgaatatggcaactctcatatctcgtaccataccagtagctatacttcaccatcctactatacctcagttccatacgaaaactgcttccagctaactgttgaactcaacactacttaattccgatagttcacggaggcctaatttacgattcaaaaagactaatactaactaatactctaactacacatgactcacatgacacacatgtgttcttgagcgtagcgcttcttgcgacagcatcctaggataagaactgcctgctcgcgtacacacaccactctacgctcttagttcacccagacacgcgaggcaacagtcaacattacaactcggatacacaaacatttcaaacaatcatctggttgtctacactccaccccagtggtgcacctccattatataggggacacacaatctctcgtgcgtcctactcttgtactttattgtcgcgagtcgttgtaaactttttcacacactacagtttaaacaacaattaccccaacaagtggtatgaataaataat

SEQ ID NO: 714141 - DNA, 192 bp, Homo sapiens
  misc_feature (39)..(39): n is a, c, g, or t
ctcagaggcacaaggaggtccataggttctccttgaganccatcccaatcggcactgtacaccaccctgtcttgccacccatgcagtgctgtagccccgccatggtctcctggcagctgcttcacctgcctaaggtctatcttccgcttgtggccacagggacccatgaaattatttccatcagtccacact

SEQ ID NO: 714142 - DNA, 1030 bp, Homo sapiens
  misc_feature (12)..(12): n is a, c, g, or t
  misc_feature (72)..(72): n is a, c, g, or t
  misc_feature (78)..(78): n is a, c, g, or t
  misc_feature (81)..(81): n is a, c, g, or t
  misc_feature (84)..(84): n is a, c, g, or t
  misc_feature (96)..(96): n is a, c, g, or t
  misc_feature (112)..(112): n is a, c, g, or t
  misc_feature (122)..(122): n is a, c, g, or t
  misc_feature (134)..(134): n is a, c, g, or t
  misc_feature (136)..(136): n is a, c, g, or t
  misc_feature (144)..(144): n is a, c, g, or t
  misc_feature (164)..(164): n is a, c, g, or t
  misc_feature (168)..(168): n is a, c, g, or t
  misc_feature (175)..(175): n is a, c, g, or t
  misc_feature (178)..(178): n is a, c, g, or t
  misc_feature (181)..(182): n is a, c, g, or t
  misc_feature (185)..(186): n is a, c, g, or t
  misc_feature (190)..(190): n is a, c, g, or t
  misc_feature (197)..(197): n is a, c, g, or t
  misc_feature (212)..(212): n is a, c, g, or t
  misc_feature (223)..(223): n is a, c, g, or t
  misc_feature (236)..(236): n is a, c, g, or t
  misc_feature (268)..(268): n is a, c, g, or t
  misc_feature (278)..(278): n is a, c, g, or t
  misc_feature (280)..(280): n is a, c, g, or t
  misc_feature (311)..(311): n is a, c, g, or t
  misc_feature (341)..(341): n is a, c, g, or t
  misc_feature (386)..(386): n is a, c, g, or t
  misc_feature (395)..(395): n is a, c, g, or t
  misc_feature (397)..(397): n is a, c, g, or t
  misc_feature (419)..(420): n is a, c, g, or t
  misc_feature (513)..(513): n is a, c, g, or t
  misc_feature (533)..(533): n is a, c, g, or t
  misc_feature (730)..(731): n is a, c, g, or t
  misc_feature (763)..(763): n is a, c, g, or t
  misc_feature (773)..(773): n is a, c, g, or t
  misc_feature (834)..(834): n is a, c, g, or t
  misc_feature (1000)..(1000): n is a, c, g, or t
ttattattatanataccttcacagacaatactgtaatttttagaggagttccacatcattacatcaacagtntgaatntanaanaaaagcaaaaanaaacaccatagtttanaagtagaaanaacatgcttgangncaacagangttcactaaggatgcacgantganctgagangtnttnnaanntcgncctcgcnctcctcctcctcggnctccccttgtncgtcggccgtggngtcctggtactgctggtactcgggcaccaggncgttcatgtngntctcggcctcggtgaactccatctcgtccangggctcgcccgtgtaccagtgcaggggggncttgcgccggaacatggccgtgaactgctcggagatgcgctttancagctcctngntggccgtgctgttgccgatganngtggccgacatcttcaggccgcggggcgggatgtcgcacacggccgtcttcacgttgttggggatccactccacgaagtagctgctgttcttnttctgcacgttgagcatctnctcgtccacctccttcatggacatgcggccccggaagatggcagccaccgtcagtagcggccgtggcgcgggtcgcaggcggccatcatgttcttggagtcgaacatctgctgggtgagctcgggcaccgtgagcgcccggtactgctggctgccccggctggtcaggggcgcgaccgggcatgaagaagtgcgggnnatgtattgtctcatgttcaccgccagcttgcncaggtctgcnttcagctggtccgggaagcgcacgcaggtggtgaccccgctcatggtggccgacaccaggnggttgaggtccccgtatgtgaggggtggtcagcttcagggtgcggagcagatgtcatacagggcctcgttatcaatggagtaggtttcatctgtgtttttccaccagctggtggaccgagagggtggcgttgtagggctccacaccgtgtctgacacttgggtganggcatgacgctgaatgtgttcatgatgcgg

SEQ ID NO: 714143 - DNA, 152 bp, Homo sapiens
gatgatgagctggtacccaacagctgggtactggcttgtctccgggtgttcggctgcccccactggtccccagaacggacactttcgccctccagtggatactcgagccaaagtggtactcccaccctccctcccagagagcctggaattct

SEQ ID NO: 714144 - DNA, 207 bp, Homo sapiens
ctcgctggagtccagtgttgcgactcctcactgcactctacctcctggttcaaagtcattctctgcctcggctcctgagtagctgggactacaggcgcgtgcaccaagcctggtactttttgtatttttagtagagacggggtttcgccgtattggccaggctgctcttgaactcctgacctcaggtgatcctcctgccttggctcc

SEQ ID NO: 714145 - DNA, 202 bp, Homo sapiens
tgctggaattacaggcttgagccaccgcacccagcctcctgacccttcttataagggcactaattccctcgtgacttagttacctcccaaaggtctcacttccaaataccatcgtactggggaggcttcaacatatgaatttagggggaccaaacattgaacggtagcttgcgggtccgagctcattcgtatctggctagtg

SEQ ID NO: 714146 - DNA, 1390 bp, Homo sapiens
tgttgcagcagtcacattggaaggatagagtggtaggatagaggtcaaggtatcgttgagtttgatagtgagtttgttagtgaaagatgaaggagaagtctgtgggatggtctcgacagagtagttgcagggggtgcgtataagtccagagtctgtgagtcagggagataggcggactaagctagagtgagcggagtgacgattcgggcggcggagcaggacggggcatcgacggtcttgacaagggggatccggcggcacgaatagggggcactgtcagtgacgacggtaatgtggactaaaggtccagaagtggaatatactcgaagtgtgactttatatcaggtaaagttaggaaagcagaggatatatgaataggtacttgtgacatggctatcatgaaaggtgcaaggggtatggcagtaggctatcgatgagagatgacgaatacgatggaatgtgtatgggatggaataatagtccttggataggggatgaaacggagacatgacgagattgacatgaggcggtaacttggcgacgtggatagacaggccggacgaagcaaccggctagatacggatacgctaataagcttggcccaaaacaggacaccgcagacaggcggggtgaactggcaccgcagcaaggttaacacagggtaccgcaccgaaaggggctcaactggaaacgaaggggtaaaccggtgaccgtgggggccgggaaaaagcttgacacgtggtcacaagtgcaaccggcaataccctggtggggcggcaaatgcagaacactaaggcacgcgcaacacaaagatagtgcacggcgagcctcaccggggcttataacgcaacgcatcggaccttggagaggcgtcggacaaacctcgtcgtttacacccgcacgagagaacagcgcactcgggcagggaaaacgacaggacaccccgcagccgacaacttccccgcagtgggctgaaagaataaggcccccgagggtgagagttacacacgagaagacgatacagggggggacaacggtgcacaggcgaaggcgagtacaacccagtagaagaccaacaaaaaagagggacaaccgtccaccaaggtaacagaagaacaccacgatcgcgagccgcggggaacaggagcaacacaacacagggacgttataggtggaggaaaacctgctagtggaaaaggctcgggcaagcagtgaagataaaggtgaggagtgaccagcggagtcacaaagttatagacggacagggttatagatagagcagagcaacatcgtcgacaaagatgagttgttccctcttccttccttttttttctctacttttatcctttgcgatgagtggagaagcagtaaacaaaaagagagaaatagc

SEQ ID NO: 714147 - DNA, 276 bp, Homo sapiens
tacgtagactattgttcaagaactcaacgactggtaacttgtgtaacacttcttcattctcaactgtcagtgagccattcatcaagtcactagcatgatagacaacatgagcgtcttctgtccacgtctcgatattgtattcaatgttaacttgctgaacttgtccgttcgttgtgattgtttgtactggaacataacgcacagccataatcggcttgtagtcaacttccgtgttataaatcatgaaagtgttttcaggggtaggcgtacgatgcg

SEQ ID NO: 714148 - DNA, 887 bp, Homo sapiens
agcggacttccgcctccagcctcttcctcgttcccggctcccagggcccgtcggtcccccgggagccctggaggcgcagccccaccccggccggcgcggctcgctcccactgcccccgccgcggctctcgcgtggagcggacggactgagtcagagggggcgcgcatgcggctgcaggagctgactatggaccctagaatcctcgggccgcccgtggcatgcgccagcagctccgccgttcgggagcagccagaattcttctgaggacattttacagccagatgacagagtttgtctttcctctgtcccgatcgtgctatctcgagtcgcagagacccccgcataggtacgtatctcgagtccatggaacgtgatatgtgcgacacactgtgagcaagtagaacttatggacgctgtggggacccggtgtgcagcaggatgtgttcttgccgttgtcgaaagatccgtcctaaccaatcccgcgcagtcgtcgtggggggtggcacgaagccatgttggtaggatgctgagcctgacggtgccttacatcagacgaggaccacatctaggacctcctcctcctcctcctccgacttcctccagcgacctgcgaataggccaatatccaagtgatgatggagcagatacgcccttggcacagtcggatgaagaggaggaaaggggtgctggaggggcagagcctggagcctgcagctagcagtgggcccctgtctactagagctgacacgctggctattctccactagtgagaccacagggcccagccagagctgtctgggagaagaccagaattctttacttgcaagtagggcaccagaggtgggaaaggatggtgggaatggtgtacctttctaagaattaaccct

SEQ ID NO: 714149 - DNA, 199 bp, Homo sapiens
gtcactctaagatccaatcacggtttctgctattgcatatattgtcattttttctagctcttaggtggagctgagatctgatttgaagctctgttagtgtataacttgcctataagtacaggctgatatccctattaaaatgcttgggaccagacatatttcagattgcggactttttagtacttgcagaatatctact

SEQ ID NO: 714150 - DNA, 477 bp, Homo sapiens
  misc_feature (318)..(318): n is a, c, g, or t
  misc_feature (354)..(354): n is a, c, g, or t
  misc_feature (361)..(361): n is a, c, g, or t
  misc_feature (376)..(376): n is a, c, g, or t
  misc_feature (412)..(412): n is a, c, g, or t
  misc_feature (424)..(424): n is a, c, g, or t
cgaggagctgtagggagattggtttttagtataaattacaataaaattttgtgtatgtgtacagctgtgttcacatccacagtgtaagctgtgatatggtttggatgtttgtcccctccaattctcatgttgaaatgtgatccccagcattggaggtggggcctgatgggaggtgattgggtgatgggggaagttgcctcatgaatgacttggtgccctcctggaagtgatgagtgagttctcgctgagctcactcaagatgtggttgtttaaaagagtgtggcacgtccctcccccaactctccctctcactcccgnctctcaccatgtgacacacctggcttcccccttcgnccttccnaccatgattggaagncttcctgaaggcccttaccagaagcagaatgccagnccccacacttcnctgtaccacctgcagaaccataaaccaaaataaagctcttttctttccccatt

SEQ ID NO: 714151 - DNA, 464 bp, Homo sapiens
ttttccaagttttaatatggtgcttttaagaaaagaccctcctgactcagttgatgattacatgtattcatcttactccatcttctaactgccgatttcaggcgggggattcgaagcctaagagttgtttggataactagtgaaatactaatttgctgaataaacgtatgcataggaaaattgatcctatatttacgcaaaagtcggatactcctgtggctactaaaaacgtttagccctcaatgcctgagaacatggtgaaaggagacttgcaggtctttgcaccttgtgagagggttaaactggacccaataaaattgttatatgcctgctcagcttaatgctatgcgaatgttttccataataccttgggaaatctcacacggatgtactcctgatgccagttataaccattgtgcattgatacgggcttctaggtggttaacgctgagtgagatactagt

SEQ ID NO: 714152 - DNA, 846 bp, Homo sapiens
  misc_feature (846)..(846): n is a, c, g, or t
cggccgcatagctgcccattttatgcgctcataggctcagactggatgccactgctctactgctatggagagctatgcgctctatggttagcataactgactcctatatactaccaagtgatatatatcattggtcgcttcaacctaatatgtagatgcaatgacgggcgtggcgtcaacgcacctatatccatactggtatttttagtagagatggggtttcaccatgttggccaggcttgtcttgagcgggtgatctcatctcaagccacccttcttggcctccgaaagtgctgggattacaggcatgaggcaccgcgccgggccgaacatttaatttttgattgtagaacttgaatatctcttgcagtgacactttggttatcacttgatcagaaaaatactcgtcccagctcagacattacctctatggtaatgaggatgacaatcatccactccaagcggagggccctcttctcattcaggtgattcccgattagatctgttagtttcatgcagtgctgaaagtttcattcatgaacttaactcttccggccatggctaaggaattgacacgttttatcgtaaaggtccttcaggtttttttttgcccaagaaaaatcagggagtatcaggaagtttaactcaagtttatacggggctggagcggtgggtaataaaaaagtccttgcacttagttcagactgtggggaaaaaccatgattgggaaaaatatacggggatgggcttttggcaaaaattcctggatttcccccgggggtttccaggggaagaaaaaaatttggaggtctaggcggtgggcagtgatatagaaaaccggagttn

SEQ ID NO: 714153 - DNA, 256 bp, Homo sapiens
gctgatgatcccaggtttagaccaggaggtgaagatacttgggtaggaggagggcggctgatctctgggttagaccaggtaggtgaagatactcgggtaggaggagggtggctgatctctgggttagaccaggaggtgaagatactggaggaggaggctggctgatgatcccagggttagaccaggaggtgaagatactggagaaggaggctggctgatgatcccagggttagacgaggaggtgaagatactcagg

SEQ ID NO: 714154 - DNA, 394 bp, Homo sapiens
ggcagtgtcatggagccacacacacacagtaaacatatcccgacagggacagacacagacacacagacacacacagacacacacagacacactcagtaaacacatccgaacagggacagacacagacagacatgctcagacacacagacacacacagagagacacacacacacagagacacacacagtaacgtatccgaacagggacagagacactctgtaaagacatacttacaggtacgcatacacacacacattcagacacactgagacacacatagttgacacattccgacagttacagacacatacagagagacacacacagacacactcagtatgcatatcttaacagctacagacacagactgacatgcacagacacacagacacac

SEQ ID NO: 714155 - DNA, 151 bp, Homo sapiens
ctgtgatagaccctgtggcatcttcctaaatgtcaacggatgtcttagcttctagggtaactacgacgctgaacttgaatgcccgcattcaggtaaacgagaaggaacaatggaaggagggtgaaggggtccaattaggtttggaaggttc

SEQ ID NO: 714156 - DNA, 261 bp, Homo sapiens
  misc_feature (72)..(72): n is a, c, g, or t
  misc_feature (110)..(110): n is a, c, g, or t
  misc_feature (117)..(117): n is a, c, g, or t
  misc_feature (135)..(135): n is a, c, g, or t
  misc_feature (197)..(197): n is a, c, g, or t
  misc_feature (226)..(226): n is a, c, g, or t
atcagagagaaggaatccaccttcttacgctatggcaggtaagaaagtactcattgtctatgcacaccaggnacccaagtctttcaacggatccttgaagaatgtggctntagatgnactgagcaggcagggctncaccgtcacagtgtctgatttgtatgccatgaactttgagccgagggccacagacaaagatntcactggtactctttctaatccctgaggntttcaattatggagtggaaacccacgaagcctaca

SEQ ID NO: 714157 - DNA, 438 bp, Homo sapiens
gagtggtctcacaaaactaagtatactgtcaccgtaagatccagataattgtcttggcatttaaccaaaggcatggaaaactgaggtcaacacaaaaatctatacattgatgtttataggagttttattcataattgcccaaaggtggaagcaacttcagtaagtgaatgaataaacaaactctggtacactcatacaatagaatgttattaagtgataaaaaggtacacactatttaactatgagaagacatgggaaaaaaaaaaccttaaatgcccatcgctaagtgaaagaagccgatctgaaaagactacatactgtgtaagccgaactatatgacattctttaaaaggcagaatgatgaagacaatgaaaagtacagttgttgccagagattggcggggagaaggagggatcaataggtggagcacaggggat

SEQ ID NO: 714158 - DNA, 961 bp, Homo sapiens
aatacaagccctgcggccgaggatctgtagatgctatggatatattaacgtcaggaatacaggagcctggttccatccattgagaattagatcccatctactgaatggtcgtaatgcccgtaacatagaaccatggcaaacttgtccaaaactcaacgcggatgttttcctatctgcgtaggctagaatatgaaacttctttgttggatcaaagctactatgtaaatcatcgtaggtcatgatgtaccttattaccccatcccacagcagggtcgtggtaacacgtcgatcagccagacgccgtacagtggagagacacccttgaatcactttagatcggggtctgttagtcgtactagtattgttttcactagttaacgcgctggatagtaagggcaggtatcttctaaagtgctctcttctcgtagacgctctttcagataagggttgaaactagttcgttcgcgagctggagatcacatatacgaacgcccatgctaagcactagttgagacgtcgaggccctctctcgagtgaagacccttgttctgcaacacataggctctcatgttcactccgagcgggacctgttaatccggaatcccccctctagtcgattctatctgggcctaggtggctataagcacacgaagactgcgaagaggttggggatgtatactctccacgcgcaagcacaagcacctgtgtcattcagtgatccttaagtgagcggagtactttgactaaatacgcgtgttggcgtcattggttactatgtacgctcgtggatcttgctcatttaagtaagcaccaatgggacaatctgattgaaacgttcaaaagtgggagtgcgagatacctttaagtcggccggttggaagattgagttccattgtagcatggtcctatcaagaagtgcttggtagcgaaccgtagtgggccatttccataattttagcgg

SEQ ID NO: 714159 - DNA, 685 bp, Homo sapiens
tcaaagtgaaaaagacgctgttttggatttacaatgaacaaaatttacaaaagggggtgggggggtctgggaactgtcccagtcccccgcggacgggggggggctctagggcagccgtgtctgacagaccaggaccccaggattgtttgggccccgacgataggatttgacctacgtctcacttgtgaccttgtgacgtggggcccagcagccgtgagtccaccacagaggtgccggacaccctgggggaggccggtgaggtcaggaaggacatcgataccgcttttctccctcctcccatctcggtggtgagacagacagaaccataggatctggggaactggcccggggggccacaggccctcagatcccccaggggcccaacctagggcatgggaggaggctagctgggtgcagtgggcggaggcggaggccagttgccccacagtgtggaagcgtaaggcacattttcaaaatcacctcgagaaccccgacaggtgaacaccccgagtgcgtggctacgtgacggccggagggagcgggggcgggggcgtggcagcatggacagcggatgcccagcaggaatatggcctcagaaggaagcatgatacgagcctaaacgcaggggcgggtacaggcgtgcaccccactccggattgaggcagcgtccacgggaaaagaaggg

SEQ ID NO: 714160 - DNA, 1246 bp, Homo sapiens
  misc_feature (400)..(400): n is a, c, g, or t
  misc_feature (463)..(463): n is a, c, g, or t
  misc_feature (760)..(760): n is a, c, g, or t
  misc_feature (772)..(772): n is a, c, g, or t
  misc_feature (790)..(790): n is a, c, g, or t
ggggttttcccgtcgccagggtcccctcgggggacccgggctctttgggcggtggcccttgccggattttttttgccgcaccgaaaggcgccgtgtgtgccgttgtctataaaggggccgaccgggccaccaaattcccacgcggcaatctaatcccaatatttcgcagccaacaaaggggaaacgttaaatggggagccaagcgtggaaaggtttgtgggggaaaacccaacttaaagaggaaccgtgaaccttggagagcgtcctcgccactgggagactcctccacaggttccatagagatttttgggagaaataaaatacacccgcacagggctgtgtacccacacgtggcacagggtgctccctcacccgcggggagaagtcccgtcgttactcnccccgagaaaaacccccccggggtggggcccacaaaaggagatgaaagagagagcgcacattntttggagagagcatttggcgccaaaatgtgaactcggctgacccacaaagaatgggtgttgggcccgcaatgtgggttctaattgagaagaatttctcgttggaattctccacactttctctcacgcgaggacccccacttggcactctcactttggcccgccaccacactcgggtggtgccccactgaggaaaaagccccacgcaatgagacttgtggcccacacaagggtgtgagaaatatgtagaagagataagttaccacacaagaccacgcggatacacgcctgtgagaagnttcgctttgtgngctttgtgggtgttatantttgggagattcgcgccgcacacatatagacccctttccctctggagatgtaagttctcgagagggcccctcctataactccacttctcgttattctctcggctaagcctcgtatagagaaattgtattcctcgagtataaccacttataaccacctcgtatattcttataaaagggtataattgtgtgacctttttcaagagttgcctttataaagtaccctgtagtgaggaaactgagatttatgagtccccttggagaagaatttgtaataagttttaataaaacctccacgtttaaaatgtcctgtttccaatgaccctgtaattttgcccagacttaaatccccagatgggtattaaacttgtccagaatttctttgtcaattcaagccctgtgaataaaaacccctgtatggccccttattatgaggctatttaaagaatcccaattcca

SEQ ID NO: 714161 - DNA, 166 bp, Homo sapiens
tagtgacaccccagaagtgctctgacccccaatcctcaaaatgaatgatactgacaccagctttgccctcccctgtcacctgcgcacccaccctgaccactccctcagctgtcctgtgcccctgccctctcctctgcatagccgtgtacatgcaatggggtaccga

SEQ ID NO: 714162 - DNA, 202 bp, Homo sapiens
agcctgtccatgagctcaatagggaagcctgtgatgactacggactttgcgaacgctacgccatggttcatggatacaatgctgcctataatcgctacttcaggaaacgccgaggggccaaatgagactgagggaagaaaaaaaatctcttttttttctggaagctggcacctgattttgtatcccctcctctctgcgtttg

SEQ ID NO: 714163 - DNA, 198 bp, Homo sapiens
atcggcttttacctgcttggtgcccgtggatgcgaggccgagggcggtgtaggcgcgctggtggatggtgttgagggcctcgccgccggagaggacgtagatcttgaagcgctcttcggtgccgcgggcgaggtggacgaagtcgcgcactttgcgcttggtggggacgtcggtgacgaggccgtgcatcgtctccgg

SEQ ID NO: 714164 - DNA, 1011 bp, Homo sapiens
cgcagtggctcacgcctgtaatcccagcactttgggaggctgaggcgggaggatcacctgaggtcaggaattcaagaccagcctggccaacatggcgaaactctgtctctactaaaaacacaaaacttagctgggcctggtggcaggcacctgtaatcccagctactcggaaggctgaagcataagaatcacttgaacgcgggatgcggaggttgcagtgagccgagatcacgccactgcactccagcctggatgacacgagcaagactctgtttcaaacaaacaaaaaaaaattcaaattagaacaaatggcacaaaagaccattcaacagacattttactgaatacacatatacagatggcgactaagcacaagcaatacggcacaacgaacaacgtgtccaacttcatccactattcagagaagcaccaattaaaatccacaatgaaggcccagtactttgcggaggctgaggccagtagatcgcctgacgtcacggagttcaagaccagcctggacccagccctgggcaacacaggcgaaacccaactctactaaaaaacacagaaattagcccgggcatggttggtgcccactttgttaatccacagcttactaacggggacgcctgagggcccgcagccacacagctgaacacgcgcggagggccagaacgcttggcacgggacgccacagacttgtgccactgaactcccagcctgggccaccaggcactgagctcccggaccacgagcacgaccaacgtgcagaagcagcagaccagactgtgctgctgcgcgccctccgccccccgtggtcagagcgcctgtcagcaggaccaccactaagcttagtgggggaccgcggggcaccaccagtgagggctggcagctgcaacaatgaggaccagcagggatcgcacctcagagcaccccttggcgagccaacaacacgcgggggtggactcccacctacgcaaataaacacccccaccgggtgtaaccaggcgg

SEQ ID NO: 714165 - DNA, 319 bp, Homo sapiens
tgatctagaggatccctcataggttcgcaggctggggaaggaatgcttcccaggggtaggcctgtagacgaccactctgggattgtctgtcttatgcagttgagataagggatgaaatacaccctgttctcctgcagtgtcctcaggcttactaggattgggaaattccagcctggtgaactctagtcagaccggttgtctgctctccaacccagtttccttttaagatgtttatcaagacaatacgtgcccagagggacatggaccctcatcagtaattctaatttcacccttgccttgtgatcctgcgaacctatga

SEQ ID NO: 714166 - DNA, 135 bp, Homo sapiens
tgggtgcaccaagcaggcgatgaattagatctaatagttacctggtctacagaaagaagatgccagatgacacttaagacctacttgttatatttaacatatgcaataaaagacctattgatttggaaaaaaaaa

SEQ ID NO: 714167 - DNA, 308 bp, Homo sapiens
tataataacatgcttgctatcagaggaagtgaagaatgtgccttcctgaatgacaatggagtcaccaggggcagaatctacatgaccagaaaatggatttgtagcaagccaaacaattaggttacaagttgccagtaaggtcccccttggaaactacctaagaaaagtggtaaaaaaaggcccccattcttcaaaattcaaaaagggggaattatcagcagcttcccccatgcccctggaaaaactgcaagtaacagacctgcacatgtatcccctacatttaaaataaaagttggaaaaaaaaaaaa

SEQ ID NO: 714168 - DNA, 295 bp, Homo sapiens
  misc_feature (208)..(208): n is a, c, g, or t
  misc_feature (210)..(210): n is a, c, g, or t
  misc_feature (213)..(213): n is a, c, g, or t
  misc_feature (217)..(217): n is a, c, g, or t
  misc_feature (232)..(232): n is a, c, g, or t
  misc_feature (238)..(238): n is a, c, g, or t
  misc_feature (252)..(252): n is a, c, g, or t
  misc_feature (258)..(258): n is a, c, g, or t
actatggtcttactggaaactttttttcaaaaaaagcacaaattaaagtaggaaattcatatccatagatagttcattcattcaacaaatatttaccaagttcctaatataagtgaaggaccacttctcatattagattactaagtcatttgtatgaatatgtgtggcagtgaagagaacaggtctttcaaaaagcatttgattatcntnatntttnttaaatacactctcntatttntctacttgtttttntgttantcatagcaggatatgacaactcttatttgaattgatt

SEQ ID NO: 714169 - DNA, 711 bp, Homo sapiens
  misc_feature (308)..(308): n is a, c, g, or t
gcaggacatctgtggtacatgcagggacagatacaaacggagatatctttgttgcatggagcgtgtgcgcactgactcgtgtggtgatcgcgtagtaacatcggaacagtgtatgagcgctggtggtacgagaagctcatcagcatgacctagtgtcccatgacgagaggtgttgtgcttgtggcgtcagaacatggcttctgcaggacccagtctcaactaagttctatactaaaaagtgtcgggagctgtactacatgtgctgcacaggacagcatggcagcgcgctgccgcccgacagcaagagnagtcaaacccgggacctgcagattggcgtggcgagttccctgtgcacggacctgaacgactggtgatgggttggacctgctcgcaggtgaccctgggaagggatcaacctctaattcatgcagcaatcaggtttgcgataggatgcgtgagtcagcagttgacaacaagtgcgactaccatgtatcggacggcgtcgtttcgtcctgcggaggaattaatgttaccatggaatttcaaggaggtggtgagccacgacatgtagcacaggacatcgcgagatgggcactagggaaatctgctactccgtattatgtctcttcgtcgtacgtggcgtgcagttcatagcagtgaggaagatctcagaaccccgtcccgggtctgtctctagctgatggagagggg

SEQ ID NO: 714170 - DNA, 334 bp, Homo sapiens
  misc_feature (137)..(137): n is a, c, g, or t
gacaggctgtctggatactgtccataaaaataaaatgtgatcggctgggcacggtggctcacaactgtaatcccagctctctgggaggcccaggcgggtggatcacgaagtcaggagtttgagaccagcctgacaancatggtgaaaccctgtctctactaaaaaaaaaaaaaaaaattagccgggtgtagtggcacgtgcctgtaatcctagctactcgggaggctgaggcagaagaattgcttgaatccgggaggaggagattgcagtgagccgagattgcaccacggcactccaacctgggcgacagagtgagactccatctcaaaaaata

SEQ ID NO: 714171 - DNA, 593 bp, Homo sapiens
  misc_feature (25)..(25): n is a, c, g, or t
ttttttttttaaaaaaaaaaattancgcccgggaacttccacttaataggggaattttggccctgaaggccaaagaattcggcacgagggcaaaattagtgctcccaaagtggataacttttgactatggaattgttagaaaacaagaaactttaaggtttatatattgtataaacatacccagtatgtgcatccgatcgcgagaacgttggcgtcttttaggaaactccgcgcacgcactttatcagccgctgctgcggtggtggctccaggagaaactcaactgccaattgcagaccagttttttttttttaaacacagccacttataattcttaagctctttgcaaatgtttgtttaaaaaatgaaaaattaaaaaaaatctagtagtgtcaaacgcatttggtcaattttattttgctttgttaatattagaaaacttatttattattgtttgctaccatttctacttatcttgattcattttttacgttttctactcgagatcattttattttaatttagcaaagccaactgcccttgtttaatgtattttgttttgcaaatgattaaaataaacgtgaaaaggggga

SEQ ID NO: 714172 - DNA, 392 bp, Homo sapiens
  misc_feature (54)..(54): n is a, c, g, or t
gtaactctgatatagtacgtctactcatgtataatagcatgggatagctaactnttaaaaattatgatttctcctgttaagattacagaaactcatataaatcaggccttttgacattttaaattgtatctttactagacatgagatctttttccttggagctgaattataatgtgggtttggcggtttcagcagcaccagttgactgctcgtgtgccagcggtgtggggaggacggggcaggacgctgcagctctctccagccctgttgggatactcagtgcctgcaggactctcgctgcctgttgggctgtctggggggtgcgcatttagggatcgtggggacggggtccaccccaagaagaagaaaggccgtcacaggccggtctgggc

SEQ ID NO: 714173 - DNA, 265 bp, Homo sapiens
ctcggctcaccgcaacctctgcctcccgggttcaagcgatcctcctgcctcagtctcccaagtagctgggattacaggtgtgcaccaccacgcctgactaattttgtatttttagtagagacagggtttcaccatgttagtcaggctggtctcgaactcctgacctcaggtgatccacccgcgttggcctcccaacgtgctgggattataggcgtgacaacccacggcccgcctaaaatccatattcaaagaagcaatttcagtt

SEQ ID NO: 714174 - DNA, 870 bp, Homo sapiens
atggatccagctgtgtgcatggatcaggtctcatgatagcaaagcagagaaagaagggagatgacgagggaggggtccctggaagaatcaggcagtggctatttcctgcaacagctcccttctcctctccttccctgctatgcctctcatttttctaatttgttaattctggataataatatcacataagagtgttgtgaacattgccgacagaatatatgggaaaccattttctccactgtaaagctctgtgtaattatgtaattatgagccattcattcctctctctgactatattgcttgtggctctattttgtacacttgaaactctatcttctattttgtgtgtgtttcatcttttttttttcctgcacttgtgcctcaccatccacccactgcccatgtctattggaagctcctgggcagcaggggttatttctgaaattctcttcctttgccccaagagctggcaaaatacgggtgagcatttaataaacattcattggactgaatgaagttgaaatggtttctgtagcttgcagctccaacactctccaggactcaagagtggcttgatgcagattttaccataaatggtgctgcaccgtctccccagcgccccccagccgggcgtctggaacttcaaagatgctctgtgtctgttaaagggaacacactgcgtcttggattggcgttcacatttatacctcttctgtcctcttgccagtctctaaggatgggctttcaaaaaaaaaaaatccgaggttattccttggcggaaaaagggttataattggcatggcatgttttccgaccatttctgtcaaaggggaaatcggccctagagcggttattgaacagacaataaga

SEQ ID NO: 714175 - DNA, 266 bp, Homo sapiens
actagagttcccaagtatcagcagagaccgagaagataagagaagagaagagaagagaagagaagagaagagaagagaagagaagagaaaagaaaagaaaagaaaagaaaagaaaagaaaagattgtttccatgcctgctaacacaacatccattcttcagcccatgagtcaaggagtaattttaactttcaagtcttattatttaaaaaatatatttcttaagactatagctgccataaataatgacttctctgctggatacctt

SEQ ID NO: 714176 - DNA, 1507 bp, Homo sapiens
aggtgcaagaaggcttataaagactccagcaaagctccagtctcttaattatgtcacctcagggtgatgcggtcgagttatgaaactttgggaaaagagagaacaaggaacgcgggcgatcagaggcccagccgcgagacctgccccgctggggcctccagccggcaccgcgacgccccgggacctggcaccgcctcgctccacccctgcgaatccggggcgaatccgggcggagagttcctgccggccgcgcagcgcagagccccctccggcccgccctctctccctccctcccgctgagctccagctgtgccagaggcacccgagccctgagagtccgccgccaacgcgcaggtgctagcggccccttcgccctgcaggagagaatatcctttgaacctacgtggaagcctacaagaaggggaattctgggcaatgtggttcagcccagccacatcacatactattatttagtagtcatgaagagagagacatagacagtgaagagtaagtgaagaatttgagggtcatcagccattgtgaactcatcaaaatattcccactctgccactgcccaaaggggctcttatctgaggaatactgctgacttcgtgtacctagttttacagagccatctttctgaagcataaattagattacattattctacagcttaaatccctccatgaacttcccatcacccaagagtggatctgaaactccttagagtgtcattcaagacccttctgtatgtggctgccatgcatttttttcaactttatttccagccttgcaatgtacatacatccatctctgtcccacgccctctgcagggctttttggttccagaacgtgccatgtgcttttctcctttggagctctttgaataggatgcccttcctcccttgtctgcctgtagatagaaacatcctgtgcattggtgagttggccctgaccaccattttcttagcatgctgaattacttctgttcccctctgtgtttgcacagctttgtttgtgcacagtagacttttggctgggccatgtagactgcctcctccatgagtttgccagctttttgaggacaatgtctgttttattcatcctcgaattctcagtgcctagcagagtgcatagcacagggtagttatgcaatacatattggagtaaaggaatacaattcaaaaaaacagtctcattaacagatgcaaaccaactcctctcatgacgcagagaatctaagctcaaacaaattaccagagttggcagttgaagtactatatatagacagaacttaataaatgcttttctttgtcttaagcctttgatgacagtgatgtgtttttatgaacgtagataaccacaagcagatgtgtcaaagctcttttgtccaggaataaactgagtttcgtcatcatcttgacagtactttcctggatgagtgttcaggaaacatgaaaagtttttaaacaattcaacaaatgtgtaataaaagtttgttatcttg

SEQ ID NO: 714177 - DNA, 159 bp, Homo sapiens
  misc_feature (111)..(111): n is a, c, g, or t
ctggctggggaatgagggttgtgaacgctgagcattgaggaccatatttaaatgaggactataaaatgatggaccatgctgatggatctatatgaacatgtgtggggatcnctctacgatgtcgaccgtgcagtgcattgcaatgcttgtgcacgtggc

SEQ ID NO: 714178 - DNA, 365 bp, Homo sapiens
gagtccttgatgctctatcacagcttatctcgagaagctgacgcatggaggatcgtctgaacccgggaggcggaaattgcaatgagccgagatcaagccactgcactccatcctgggcaacaagagtgaaaattaggtgtcaaaaaaaaaaaaaaaaaaaaaaaaatttatagagggttgtggaattattccatcctttatccttttttctggaataaggctttataacctttttgatgccttttattatagtttccttttcagataaaaaaatttttttggagcccaccgcgccccgtgccgtgttttacccttttggaagagacgtgcctgccagttctgttttcccaaaaacagcttgcaca

SEQ ID NO: 714179 - DNA, 206 bp, Homo sapiens
ccccctcccccttttttttaccccctttgaaagccccggggcccttcccccccccgttttttcccttgggcccggggcggtttactttttcccccggggaaccgcttttcccctttgccctttccaaaaagcttttttgtgcgcccttttgagggtccccccccgggtcccgttccgggtttcccgggtctcccccccccttctga

SEQ ID NO: 714180 - DNA, 964 bp, Homo sapiens
ggtcctttgcatctggacgtgtacgcagtcgttgttccgcgatgctgcctctgctgctgtctgagtgcgcccgtgtgctgaggctcctcgcgtcggccgagcctccgagctggcgcgtagtccgcactctgcctttccggacaaggtgcctgcagaacggtaggacccgcgggttggttgcaccctggacccttctgtggctcgctcagtagtagctgcgcagtggttcctgagcggggagctggaacctccatgcggaccttcgtcgtggacccacgtgtcgtccatgtgggacatggtgagtcgtggcagagggtcgccgtagtaggactcgtacaggatgaaccaaaaggcttgtgtagtccagagtgtattcctggaggtgaatagtaagatgtaaagagcaggatagagacaaatatattccagatagggcattaatagaacactcaccctgaagcagtgtctgggagggtcaggcgagactggaaagtggaaatggggacagagatgcgaagattgatggtgcggaagagtgagacagtggggatgaagagaattcatgagtcgcttttcaatccattatagaaagagtcatcgaagcaagattagatggtgaggaaggaaaccttcgataggggtgaaggttgaaagagcagggagcgatgaacgtgacctgtccactcccaacttacgtgatcgacagttgtacaacagtgatgatggcaaaagggccgtgtggttggactgtcatcatccatcaggctgagcgtggccagaaacaacgctgaatgactctctctagcgggaactacctctagcccgggtcgacctaagcgacacacatatacccgacgagcacggaggcaataacacaaggtccccgcgaggaagcatcaccgcgggcgaaaccacgaaatatcacgtagcatgcttcgctggagtcatacatattaagggggaa

SEQ ID NO: 714181 - DNA, 1302 bp, Homo sapiens
  misc_feature (996)..(996): n is a, c, g, or t
cgctctagagatccccgtggccacgcaccgacagatattcccactctgccactgcccaaaggggctcttatctgaggaatactgctgacttcgtgtacctagttttacagagccatctttctgaagcataaattagattacattattctacagcttaaatccctccatgaacttcccatcacccaagagtggatctgaaactccttagagtgtcattcaagacccttctgtatgtggctgccatgcatttttttcaactttatttccagccttgcaatgtacatacatccatctctgtcccacgccctctgcagggctttttggttccagaacgtgccatgtgcttttctcctttggagctctttgaataggatgcccttcctcccttgtctgcctgtagatagaaacatcctgtgcattggtgagttggccctgaccaccattttcttagcatgctgaattacttctgttcccctctgtgtttgcacagctttgtttgtgcacagtagacttttggctgggccatgtagactgcctcctccatgagtttgccagctttttgaggacaatgtctgttttattcatcctcgaattctcagtgcctagcagagtgcatagcacagggtagttatgcaatacatattggagtaaaggaatacaattcaaaaaaacagtctcattaacagatgcaaaccaactcctctcatgacgcagagaatctaagctcaaacaaattaccagagttggcagttgaagtactatatatagacagaacttaataaatgcttttctttgtcttaagcctttgatgacagtgatgtgtttttatgaacgtagataaccacaagcagatgtgtcaaagctcttttgtccaggaataaactgagtttcgtcatcatcttgacagtactttcctggatgagtgttcaggaaacatgaaaagtttttaaacaattcaacaaatgtgtaataaaagtttgttatcttgttttattngttgttatattgtctcttggcttgagtttttatttgggaagctaatagagagacgggatattagaaaaccagaggcaaactgcttggtttattgaagcactaactgaatgaatgcaggtatacgagtaatccaggaatcccatgcattaaggaaaaatttatttctatcacctctgtattgttgttaccttgtgaacctggcttggttttttcagcagttggtaaactgataagcctgtttctcactctgtcattcatctcatcagtttaccagcccagaaatactcctttcagtctttacaaaaa

SEQ ID NO: 714182 - DNA, 1648 bp, Homo sapiens
  misc_feature (1342)..(1342): n is a, c, g, or t
aggtgcaagaaggcttataaagactccagcaaagctccagtctcttaattatgtcacctcagggtgatgcggtcgagttatgaaactttgggaaaagagagaacaaggaacgcgggcgatcagaggcccagccgcgagacctgccccgctggggcctccagccggcaccgcgacgccccgggacctggcaccgcctcgctccacccctgcgaatccggggcgaatccgggcggagagttcctgccggccgcgcagcgcagagccccctccggcccgccctctctccctccctcccgctgagctccagctgtgccagaggcacccgagccctgagagtccgccgccaacgcgcaggtgctagcggccccttcgccctgcagatattcccactctgccactgcccaaaggggctcttatctgaggaatactgctgacttcgtgtacctagttttacagagccatctttctgaagcataaattagattacattattctacagcttaaatccctccatgaacttcccatcacccaagagtggatctgaaactccttagagtgtcattcaagacccttctgtatgtggctgccatgcatttttttcaactttatttccagccttgcaatgtacatacatccatctctgtcccacgccctctgcagggctttttggttccagaacgtgccatgtgcttttctcctttggagctctttgaataggatgcccttcctcccttgtctgcctgtagatagaaacatcctgtgcattggtgagttggccctgaccaccattttcttagcatgctgaattacttctgttcccctctgtgtttgcacagctttgtttgtgcacagtagacttttggctgggccatgtagactgcctcctccatgagtttgccagctttttgaggacaatgtctgttttattcatcctcgaattctcagtgcctagcagagtgcatagcacagggtagttatgcaatacatattggagtaaaggaatacaattcaaaaaaacagtctcattaacagatgcaaaccaactcctctcatgacgcagagaatctaagctcaaacaaattaccagagttggcagttgaagtactatatatagacagaacttaataaatgcttttctttgtcttaagcctttgatgacagtgatgtgtttttatgaacgtagataaccacaagcagatgtgtcaaagctcttttgtccaggaataaactgagtttcgtcatcatcttgacagtactttcctggatgagtgttcaggaaacatgaaaagtttttaaacaattcaacaaatgtgtaataaaagtttgttatcttgttttattngttgttatattgtctcttggcttgagtttttatttgggaagctaatagagagacgggatattagaaaaccagaggcaaactgcttggtttattgaagcactaactgaatgaatgcaggtatacgagtaatccaggaatcccatgcattaaggaaaaatttatttctatcacctctgtattgttgttaccttgtgaacctggcttggttttttcagcagttggtaaactgataagcctgtttctcactctgtcattcatctcatcagtttaccagcccagaaatactcctttcagtctttacaaaaa

SEQ ID NO: 714183 - DNA, 439 bp, Homo sapiens
acctcaaagggtaccgccttttttttgccgcatccatttttgtttaagccttccactgttagggatttggggttacctgatatgctttatgctcataactgatgtggctggggaattggttttgaattttttgcctccgccgaaccgaaaatgtggtgtattttatgcatgtcaataaaggaatggccttttcttgttttaccgggaatggaaattggaagtcaaaccccctttgttttccaaaattgggtttcaaaccttttgtaattttcatttaaattgttagggggcttggggcttttagttaatttatcttccaataccctgtttaattttgcactgaataaatggtgcaagttgtcaatgggtgggtgatcaactaatagctctggttgtaattggtttatttttcttcaataaagttgccttaacccatgga

SEQ ID NO: 714184 - DNA, 170 bp, Homo sapiens
tgacgtctgggcacaattgagccaacttccgtcgtgaatctttataatgattgactgtggtgtatagtgcagtaaacaaatagtgctcgtagttaagtatgtgtcagcatccttttgtctctaacttgtttatattttgacagccacacaattcttggcatgtattaaga

SEQ ID NO: 714185 - DNA, 142 bp, Homo sapiens
tggggctagagggggcactacagtgctatgaaatgtggtgacaagaggggctgagaggggttggggtcctgaatgatcagctgccagcttgcgtggattgagcggctcagacagctgttgtggacggtgtgggggcagtgga

SEQ ID NO: 714186 - DNA, 643 bp, Homo sapiens
  misc_feature (519)..(519): n is a, c, g, or t
cgccaagagctcaggtcgccgtctcgccgtaatagctgtagaagaacgggatcaggccatcgaagatgccggtctcaaaccaggacggaccgaaacgccgacgatgtcccagacctgcaggtccccttcgaccatgccgatgaagtccaccaagggcaggcatactccaaagggatacagccccaccagcgattcgagctggttatgcgcctcagcctcgaactggccgctgatcagattcagtgcatagctgtcctgacgccccaaggcatgggcgacaaaactaaaaacgattcttttcggcccgagcttgcacccgttgtagtgagacatcgccaacaccttgcgtccggtgataaacaacatcaggcttttcgccaggcgttgcagctcggcttgcgcacgtcgcagcaactcttcatacgcctcggcgtcctgcacgtccgggcgtaccgatgcgaccacctcgacggtcttgcgggcatcgatgaactggtccagctcctccattagcaagtngtgctgcaccttatccacctgaacccagtcgataaccgcctgcggcctgggatcagggtccagggcaacggctcgcctggcacaggccgacatactgggtcaggctgagctgattgccagcgct

SEQ ID NO: 714187 - DNA, 419 bp, Homo sapiens
  misc_feature (26)..(26): n is a, c, g, or t
  misc_feature (128)..(128): n is a, c, g, or t
  misc_feature (159)..(160): n is a, c, g, or t
  misc_feature (191)..(191): n is a, c, g, or t
  misc_feature (202)..(202): n is a, c, g, or t
  misc_feature (232)..(232): n is a, c, g, or t
  misc_feature (322)..(322): n is a, c, g, or t
  misc_feature (354)..(354): n is a, c, g, or t
aaatgggaatgctcccatgaatcccnggccctggtcagggaaatggtgggacttgttccctttgaggcaaagctccagaggaaagcagggctgcttcttgttcatcccaaggcattcattctttcctnagtcctcagaggaaaaattatatgctgtgannaggtgcggtggctcatgcctgtaatcccaanactttgggaancccaggattgctggagcccaagagttcaanaccggtatggtcaacatagggagaccctgtctctgcaataaaagaaaaaaattagcctggtgtggtggcacatgcctgtggtctcagctncctgggaggctaaggtgagaggattgcttaancccgggagattgaggctgcagtgagctgtgatcacaccactgcactccagcctgagtgacagagc

SEQ ID NO: 714188 - DNA, 860 bp, Homo sapiens
ctaaaaaaaaaaaaaattttttttttttaaaagataagggtatggctatgtggcccaggctggtctgaaactccgggtctcaagcaatcctccgggcctcagcctcccaaagtgtgggggttgcacgcatgagccatcaggctcagcctcggtcatctttctacatggaggtttgggtttgggtttcttcatatgggtaaaatctcgtgaggacttatcttcaagctttacggagtccaaatcaaatccacgggtgggaggccatctcagtgaattttccatttaaggtaatgggggcttcttcactgggattccattggggtgcctttcaacatatgggctactttcataaatcaccattattataccttccttaaattttaaaacaggcttttcttaagtccttggaagatacttcaaatagtcatttggaacgtcttgggctactatgccaaagatagggggcccttcaaagataatttctattaccgtggcttttttctccgtgtgaagtgccaactttccgtgatgctgtgacgtggtctggactttaccatttcggagagactcttcgatgatttcttggggcacgccagggacggattctggctttgggggccacctgttgtggtgtggggctgggggaagacgggggcgaaaactggttcacctccccacagggcaccaaggtggggggggagccacaaggagctcaacccacggggggggggggagggaaaaacaccccagagggggcgcgtgcggtgttacacagaagaagtaggttgctctgtttttcacattaaaccacatccaacacacagcaacaacacccacccacaacgagacaaccagccgtg

SEQ ID NO: 714189 - DNA, 287 bp, Homo sapiens
gttatccccgtatcagtgagttcacctctaaatcaccatcagatcaaaaggcgacaagcatcaagcacgcagcaatgccagctcaaaaacggcttagcctagacacaacccccaacggggaaaaacagcagttggattaacctttagcaataacgaaagtttaactaagctatactaaccccaggtttggtcaatttacgtgccagccaccgcggtcacacgattaacccaagtcaatagaatgccggcgtaaagagtgttctagatcaccccctccctaagaccta

SEQ ID NO: 714190 - DNA, 240 bp, Homo sapiens
  misc_feature (68)..(68): n is a, c, g, or t
aatcgacagtgcagacagaaaaagatttgaagagacgggtcaggaactagcggaattactggaggtgntaaactaagttgtgtgccagtgctcatctttgctataagcaggatttgctcacagcagcccctcctctgtattgcagagggactaacctcataccatccgcgacctagtctgcagatccagtcttctcagctctcacaggagagggcgttcaggatggcatgtactgggtct

SEQ ID NO: 714191 - DNA, 129 bp, Homo sapiens
tgaggggatgggggaagggaagaaatgaggggaggaaatgcatggtttatagaatcaggtctctaaaggagtcaaagctgtttccttcccccgaggagctgtctctcaggggccggggctttttgcagg

SEQ ID NO: 714192 - DNA, 212 bp, Homo sapiens
tttccgtttccccaccaaactcacaaagggagattaaacccttccaggatggccatcaagcttcccgagagggccaggcccaagaaagaatcatctctcaacaggttaagaaagggcggccattcttaggctcgggggtggaagcagcagcattcccaggacccaggggccagagagaggaaaagaaaggacggtagggagacagcatatca

SEQ ID NO: 714193 - DNA, 273 bp, Homo sapiens
cgggtttttaaaaaaaagggggggaaacccctcccgggggggtggccccaaggtaagttttttttaaggggggggcccgggtttccccccaagggtttttttttttccccctgctttttcgggggggggggggggaaatggcaatttaaaagggcggcccccaaggttttttattttcccttttttgcgggccgggggggatttttaccccttttaaggccaattttggggatggtttttttttggggggtttaattaacccggtttttggga

SEQ ID NO: 714194 - DNA, 418 bp, Homo sapiens
  misc_feature (166)..(166): n is a, c, g, or t
  misc_feature (193)..(193): n is a, c, g, or t
  misc_feature (345)..(345): n is a, c, g, or t
  misc_feature (355)..(355): n is a, c, g, or t
gttgaactggggggggggggtcagcggggaggggtggggcggggagtggccgtggggcgggttgggagggatggcggtcgggtctgggggggctgggccgaggggagttacggcggggtgggggtctggggaggttgggggatggggttcacggcttgattggctntgggggaggggtgggggggggggcggncgttggggaggtcgggaggactaggctacagcgggggggctgcggactgtgggcgggcttttatccgctcgggatattaggcagggcccaagggggggggcgggcccaccacattaacagcataaaaccctcattcacggggggagacaccntgggggtganacacctatcccccatcttcctcctatccctcaaccccggcatcattgccggttttgcctttta

SEQ ID NO: 714195 - DNA, 359 bp, Homo sapiens
cattcgggaaacagctatacgttgctgagtgggaaacactttgggcgttttttctatcacagcaaaccaggtttatgttttgtgatggagaaacacgccgggactctttctaagcagaaaaccgactatgattcgagtggacgtgaaacctcctcccagtgtttacggaggaaaaacacaaaagtcgacgacactctagaactggagagaggtccagattgcgacaggagccacaccagagtgtgcaggcttcatggaggacagaagcgaggttttgtgccgggacttacaaagataaggaggccaggtgtggtggctaatgcctgcaatcccatcactgtagaaggcagaggccggca

SEQ ID NO: 714196 - DNA, 276 bp, Homo sapiens
cagggtggtgtgaagtggtgcaatcatagctcactgtggcctcaaactactgggctcaagctattctcctgccttagctgagactacatgtgcacactaccatgcctggctaattttaaaactttttgtagagcttgtctttaaccgaactgtcacactgaaggaagacccaggaaaggtgtgagctggaagcactgaacctacctcatcctcctggagggtgtggctaccctcgccaccccaaattccatgtcaataaagaacagctaaattctc

SEQ ID NO: 714197 - DNA, 459 bp, Homo sapiens
  misc_feature (349)..(349): n is a, c, g, or t
ttttctagtttatggatgtgacgatggtcatagaagtcttgaataatcttttgtatttctgtggtggtatcagcggtaatatctcccatttcatttctaatagagcttatttggatcttctctcttcttttcttgattaatcttgctaatgcttatcaattttatttatcttttcaaagaaccagctttttgtttcatttatctgttggattttttgtttcaatttcatttagttttgttctgattttgttatttcttttcttctgctgggtttggatttggactgttctagtttctccaattctgtgaggtgtgaccttagattgtttatttgtgctctttcagactntttgatataggcatttaatgctatgaattttcttcttacctccacttttgctgtatcccagagtttttgataggctgtgtcactattatctgtcagttcaaagaattttt

SEQ ID NO: 714198 - DNA, 1058 bp, Homo sapiens
ttagtcgccaggaacatcaggtgtcgtgaaaactacccctaaaagccaaattatgggaacaggaacaacgactcatatcaacattgtcgtcattggacacgtagattccgggcaagtccaccactactggccatctgatctatacaatgcggtggcatcgacaaaagaaccattgataaacctttcgagaaggaggctgcctgagataggtgagaagggctccttctatacgtgattgcctggggtcttggatacaactggagaagctcgcaggcagtgaaccgtgtgtatcaaccattgatatctcacttgatcggaaattatgagcacccagccacacgctactcatgtgagtatctattcgcatgcccctaggtaccacagcagagctttatctaataaaccatgagttacagggcactatctctagtgctgactgtcgctggtccatgatttgtttgcttgctggtagttcgggggaagtgctgatatgctggtagtctccaaagaattgtggacatgacccggagagcatgcccgttcgtggtcttacacaccgtggtaatgtgaaagcaactaaattgtcggtgttgaacaaaaatggattccagcttgagtccaaccgtactagcaggaagagaatactgagggaaaatgtgtccaacggaaagtcaggtcttaccttaggagaatcggttacaaccgccgaccagtaagcatttgtgccaatatctggtatggaatggtgacactatgctgagagcccaagtgctaacatgcctgggtcacggatgggaaagtcacccgtaacgatggccactgccaggtggaacacgctgtagaggtcgggaatggattctaacaccaatcgtccactgaacaaaccttggctgctctacaggatgtttacacaatgggggattgcgatgtctgtaggcgatggacatggggtcctacaccgggtttgggcctcgccatcaataagagaaaattccagccaaactgagaccacgcgaaaggaaacatgtaaacgccgacgacacacaaagttgaaccca

SEQ ID NO: 714199 - DNA, 536 bp, Homo sapiens
  misc_feature (22)..(22): n is a, c, g, or t
tcggctcggtaccagatatttnctatggcagcatgttgtcaagggccccagtggttgtgtagagagtctggaggtgacctgcagacgggcagatgctggagagaagccaaaggcctttattcactgggtgtcacagcctttgatgtgtgaggttcgcctctatgagcgactattccagcacaagaaccctgaagatcctactgaggtgcctggtggatttttaagtgacctgaacctggcatcactacacgtggtggatgcagcattagtggactgctctgtggccctggcaaaacccttcgacaagttccagtttgagcgtcttggatatttctccgtggatccagacagccatcagggaaagcttgtctttaaccgaactgtcacactgaaggaagacccaggaaaggtgtgagctggaagcactgaacctacctcatcctcctggagggtgtggctaccctcgccaccccaaattccatgtcaataaagaacagctaaattctcatagaaaatatctcggggatcctcttgag

SEQ ID NO: 714200 - DNA, 205 bp, Homo sapiens
attgtggcgggtgctgtaatcccagctactcgggaggataggcacgagaatcgcttgaacccgggaggcagaggttggggtgagcgagatcatgccattccattgcactccagcctgggtgcgagactgtctcaaaaaacaaaacaaaaaacaaatttagctaaaaaggaaagctaggcattaactagggtggggataccagggg

SEQ ID NO: 714201 - DNA, 261 bp, Homo sapiens
gcacccgattcttatgcaattcggtcacgcatacgccaacttccgtgatgagcacctcatacaccacctatgaaaaaacttcctaccactcaccctagcattacttatatgatatgtctccatacccattacaatctcacaaaaaaaaaaaaaaaaaaagaaagaataatgtcccattcataaggagtgtggcctttttgttccctttgagagaagagtaaaggccagtaagaatcagtggggctgctctccctttcttct

SEQ ID NO: 714202 - DNA, 433 bp, Homo sapiens
ttactccttaaagtagggggcaaacatggtggttgttataatccatataaaactataccctggacccccacggtggttgttatggtccatataatactatagcctagagccccattcagtcccttacccaaagtcacaaagttattgaggacccgggcctcctgacccttagtccctcggcttctttggcttaagaaggatgttagggggaggtgtctgtggtgaaacctgcccaggcctccctggccttgttctgggttggtggtcatccttttccctctgccctccagcttgtctttaaccgaactgtcacactgaaggaagacccaggaaaggtgtgagctggaagcactgaacctacctcatcctcctggagggtgtggctaccctcgccaccccaaattccatgtcaataaagaacagctaaattctc

SEQ ID NO: 714203 - DNA, 509 bp, Homo sapiens
  misc_feature (17)..(17): n is a, c, g, or t
  misc_feature (128)..(128): n is a, c, g, or t
  misc_feature (196)..(196): n is a, c, g, or t
  misc_feature (198)..(198): n is a, c, g, or t
  misc_feature (235)..(235): n is a, c, g, or t
  misc_feature (248)..(248): n is a, c, g, or t
  misc_feature (250)..(250): n is a, c, g, or t
  misc_feature (256)..(256): n is a, c, g, or t
  misc_feature (269)..(270): n is a, c, g, or t
  misc_feature (277)..(277): n is a, c, g, or t
  misc_feature (304)..(304): n is a, c, g, or t
  misc_feature (321)..(321): n is a, c, g, or t
  misc_feature (323)..(323): n is a, c, g, or t
  misc_feature (328)..(329): n is a, c, g, or t
  misc_feature (332)..(333): n is a, c, g, or t
  misc_feature (340)..(340): n is a, c, g, or t
  misc_feature (344)..(344): n is a, c, g, or t
  misc_feature (350)..(350): n is a, c, g, or t
  misc_feature (361)..(361): n is a, c, g, or t
  misc_feature (377)..(377): n is a, c, g, or t
  misc_feature (424)..(424): n is a, c, g, or t
  misc_feature (506)..(506): n is a, c, g, or t
gcaggagatcacttgancccaggagttcaaggctgcagtgagccatgatcatacaccaccacactccagactgcatgacagagtgaggccctgtctcaaaaaaaaaaaatagaggctgggggtgggtnttgggttcctacagtatcacttcttgggatattgcgggtggccctgttctgatggttctttccgtttngnctgttggtttgatcctatttgtcagtatatctgtggnctatgaggttttngngattgntgtttgtgattgnnctttgtntgctttgttgcttctcccatgtttgtncggtttggtgggttttngntctgnnggnnctgttgntgtncttttntttcgtttcgngggcctgatctgtggntcagggtgtgggggtggccgggccggggcagcccctgctgggctggngccctttcatagttgcctgtggggtgtgggccctgtgtggctggaccatgccttcaaagtctgattgagtttaaatgatggnaaa

SEQ ID NO: 714204 - DNA, 452 bp, Homo sapiens
tttttattgcccccactaacctcctcggactcctgcctcactcatttacccccacccccccacttttttattaacctagccctggccctccccttatgagcggggcccgtgattataggctttcgctctaagattaaaatgccctagcccaccttcttaccacccaggcacacctacaccccttatccccctactagttattatcgaaaccactcagcctactcattcaacccatagcctggccgtacgcctaaccgctaacatttctgcaggccacctactcatgcacctaattgggagcaccaccctagccatatcaacccttaaccttccctttacacttatcattttcacaattttaattttactgactatcctagaattctgtcgccttaatccaagcctacgttttcacacttttagtaagcctttacctgcccgacaacacatta

SEQ ID NO: 714205 - DNA, 3296 bp, Homo sapiens
agcggagaatagtcagagcaaaaccacgcctgtgtcttcctcctgcctcagggacgaacaccttccttccaggtccgtggcaaatatctccaaaagccctgccgcctgccaacaccccttcaagttcccagttccacggaggcggaagcaaagcccccggaaaggccggtttgtccgccctgtgttgtttaaaggggatagacgaccttggagcgccccgccccctcccgccaaggaaggaccccattggctctccccggaggcttcactctcattggtcagcgagtgaatgccgacctgcagactggggcctaagtttcttttagtttccggtgtctctgcaatggcggctctagactccctgtcgctcttcactagcctcggcctgagcgagcagaaggcccgcgagacgctcaagaactcggctctgagcgcgcagctgcgcgaggccgctactcaggctcagcagaccctgggttccaccattgacaaagctaccgggatcctgttatatggcttggcctcccgactcagggatacccggcgtctctccttccttgtaagctacatagccagtaagaagatccacactgagccccagctaagcgctgcccttgagtatgtgcggagtcaccccttggaccccatcgacactgtggacttcgagcgggaatgtggcgtgggtgtcattgtgaccccagagcagattgaggaggctgtggaggctgctattaacaggcaccggccccagctcctggtggaacgttaccatttcaacatggggctgctgatgggagaggctcgggctgtgctgaagtgggcagatggcaaaatgatcaagaatgaagtggacatgcaggtcctccaccttctgggccccaagttggaggctgatctggagaagaagttcaaggtggcaaaagctcggctagaagaaacagaccggaggacggcaaaggatgtggtggagaatggcgagactgctgaccagaccctgtctctgatggagcagctccggggggaggcccttaagttccacaagcctggtgagaactacaagaccccaggctatgtggtcactcccacacaccatgaatctactaaagcagcacctggagattactggtgggcaggtacgtacccggttcccgccagaacccaatggaatcctgcatattggacatgccaaagccatcaatttcaactttggctatgccaaggccaacaatggcatctgttttctgcgttttgatgacaccaaccctgagaaggaggaagcaaagttcttcacggccatctgtgacatggtagcctggctaggctacacaccttacaaagtcacatatgcgtctgactattttgaccagctatatgcgtgggctgtggagctcatccgcaggggtctggcttatgtgtgccaccagcgaggagaggagctcaaaggccataatactctgccttcaccctggagagaccgtcccatggaggagtcactgctgctctttgaggcaatgcgcaagggcaagttttcagagggcgaggccacactacggatgaagctggtgatggaggatggcaagatggaccctgtagcctatcgagtcaagtatacaccacaccaccgcacaggggacaaatggtgcatctatcccacctacgactacacacactgcctctgtgactccatcgagcacatcactcactcactctgcaccaaggaattccaggcccgacgctcttcctacttctggctttgcaatgcactggacgtctattgccctgtgcagtgggagtatggccgcctcaacctgcactatgctgttgtctctaagaggaagatcctccagcttgtagcaactggtgctgtgcgggactgggatgacccacggctctttacactcacggccctgcgacggcggggcttcccacctgaggccatcaacaacttctgtgcccgggtgggagtgactgtggcacaaaccacaatggagccacatcttctagaagcctgtgtgcgtgatgtgctgaatgacacagccccacgagccatggctgtgctggagtcactacgggtcatcatcaccaactttcctgctgccaagtccttggacatccaggtgcccaacttcccagctgatgagaccaaaggcttccatcaggttccctttgcacccattgtcttcattgagaggactgacttcaaggaggagccagagccaggatttaagcgcctggcttggggccagcctgtgggcctgaggcatacaggctacgtcattgagctgcagcatgttgtcaagggccccagtggttgtgtagagagtctggaggtgacctgcagacgggcagatgctggagagaagccaaaggcctttattcactgggtgtcacagcctttgatgtgtgaggttcgcctctatgagcgactattccagcacaagaaccctgaagatcctactgaggtgcctggtggatttttaagtgacctgaacctggcatcactacacgtggtggatgcagcattagtggactgctctgtggccctggcaaaacccttcgacaagttccagtttgagcgtcttggatatttctccgtggatccagacagccatcagggaaagcttgtctttaaccgaactgtcacactgaaggaagacccaggaaaggtgtgagctggaagcactgaacctacctcatcctcctggagggtgtggctaccctcgccaccccaaattccatgtcaataaagaacagctaaattctcctagaaaaaaaaaaaaaaaaaaaaaaaaaaaaaaaaaaaaaaaaaaaaaaaaaaaaagggggggggcgccaaaaaaaatcccccgggggggcccccaagatcatagcggaccacccgacgacttatttgacaacaaagggggcccccataatgagggacgccactaataaaacacgacagagaacgacggccgccgctggtataaccacgacaggcgaggagcacgaggagaaacagcggcaaacgaggggaactatgatggaaaagaccaccatacactacggagggggggagaacacaaataggcgcgcagcgaaacacactaccacaaacaaggaaagaatataaaagagccgccccagacagggaacatcatacatacacacaacaaagaaacaacgaccaaaagaggggggggacgtaaccaaaccgagaagtaaagaggataaggcagggcagaagaaaaaagacggcgcacaacaacgaggaggaccaccaccacagagcaacagatgctccaagcacgggaggg

SEQ ID NO: 714206 - DNA, 438 bp, Homo sapiens
tctagcggatcgcttagtaatatgtaaccaatagcactgaaatgttacgtttttggtgattatatcaacatcaaagaaatgcaatcaaaaccacaataagatgccatctcacaccaatcagaatggctattattacaaagtcaaaaaataacagatgttggcaaggctgcagagaaaagggaatacttatgtactgtttgtaggaatgtggactggttcagccactgtggagagcaatttggagatttctcaaagaatttaaaatggagctaccatttgacccggcaatctcatgactgggtatatacccaaaggacaataaataattttacacaaatgagacatgcacttgtatgctaatcacagcactgttcacaatagcaaagacgtggaatcaacctgggtgtccatcgatggtggattggataaagaaaatgt

SEQ ID NO: 714207 - DNA, 432 bp, Homo sapiens
atggagtgctgaacaatcttgtttccagaaggggcagtgttccaccttcccataccaggcagctgttttttccttgtatgttctgatccaggagaaggccctaatatatggtctccttgcttacaagtaggatcccatttaccttattgtggctttgggagcttggcaactaaagttggatcagagcatcacaggaaagcttccagttttgtatcattaacacaacagtgggagcaaaaggtagaatcattagtgcaacagagatatagacactcaacctcccaggtccaggtaatagtgattgtggatgtccaggtggaatccattaagtgggagagagtttcacttaacatgtaggggtttgggtatttcaggatttctatggtgagttatagggttgcgggggatggtcatatgattttctagcaagcc

SEQ ID NO: 714208 - DNA, 3062 bp, Homo sapiens
ataatttactttgtattcttgaataaaaaacatttgtacattcctgatactgggtttatagagccatgtaccagtgtactgctttcttttagtttccggtgtctctgcaatggcggctctagactccctgtcgctcttcactagcctcggcctgagcgagcagaaggcccgcgagacgctcaagaactcggctctgagcgcgcagctgcgcgaggccgctactcaggctcagcagaccctgggttccaccattgacaaagctaccgggatcctgttatatggcttggcctcccgactcagggatacccggcgtctctccttccttgtaagctacatagccagtaagaagatccacactgagccccagctaagcgctgcccttgagtatgtgcggagtcaccccttggaccccatcgacactgtggacttcgagcgggaatgtggcgtgggtgtcattgtgaccccagagcagattgaggaggctgtggaggctgctattaacaggcaccggccccagctcctggtggaacgttaccatttcaacatggggctgctgatgggagaggctcgggctgtgctgaagtgggcagatggcaaaatgatcaagaatgaagtggacatgcaggtcctccaccttctgggccccaagttggaggctgatctggagaagaagttcaaggtggcaaaagctcggctagaagaaacagaccggaggacggcaaaggatgtggtggagaatggcgagactgctgaccagaccctgtctctgatggagcagctccggggggaggcccttaagttccacaagcctggtgagaactacaagaccccaggctatgtggtcactcccacacaccatgaatctactaaagcagcacctggagattactggtgggcaggtacgtacccggttcccgccagaacccaatggaatcctgcatattggacatgccaaagccatcaatttcaactttggctatgccaaggccaacaatggcatctgttttctgcgttttgatgacaccaaccctgagaaggaggaagcaaagttcttcacggccatctgtgacatggtagcctggctaggctacacaccttacaaagtcacatatgcgtctgactattttgaccagctatatgcgtgggctgtggagctcatccgcaggggtctggcttatgtgtgccaccagcgaggagaggagctcaaaggccataatactctgccttcaccctggagagaccgtcccatggaggagtcactgctgctctttgaggcaatgcgcaagggcaagttttcagagggcgaggccacactacggatgaagctggtgatggaggatggcaagatggaccctgtagcctatcgagtcaagtatacaccacaccaccgcacaggggacaaatggtgcatctatcccacctacgactacacacactgcctctgtgactccatcgagcacatcactcactcactctgcaccaaggaattccaggcccgacgctcttcctacttctggctttgcaatgcactggacgtctattgccctgtgcagtgggagtatggccgcctcaacctgcactatgctgttgtctctaagaggaagatcctccagcttgtagcaactggtgctgtgcgggactgggatgacccacggctctttacactcacggccctgcgacggcggggcttcccacctgaggccatcaacaacttctgtgcccgggtgggagtgactgtggcacaaaccacaatggagccacatcttctagaagcctgtgtgcgtgatgtgctgaatgacacagccccacgagccatggctgtgctggagtcactacgggtcatcatcaccaactttcctgctgccaagtccttggacatccaggtgcccaacttcccagctgatgagaccaaaggcttccatcaggttccctttgcacccattgtcttcattgagaggactgacttcaaggaggagccagagccaggatttaagcgcctggcttggggccagcctgtgggcctgaggcatacaggctacgtcattgagctgcagcatgttgtcaagggccccagtggttgtgtagagagtctggaggtgacctgcagacgggcagatgctggagagaagccaaaggcctttattcactgggtgtcacagcctttgatgtgtgaggttcgcctctatgagcgactattccagcacaagaaccctgaagatcctactgaggtgcctggtggatttttaagtgacctgaacctggcatcactacacgtggtggatgcagcattagtggactgctctgtggccctggcaaaacccttcgacaagttccagtttgagcgtcttggatatttctccgtggatccagacagccatcagggaaagcttgtctttaaccgaactgtcacactgaaggaagacccaggaaaggtgtgagctggaagcactgaacctacctcatcctcctggagggtgtggctaccctcgccaccccaaattccatgtcaataaagaacagctaaattctcctagaaaaaaaaaaaaaaaaaaaaaaaaaaaaaaaaaaaaaaaaaaaaaaaaaaaaagggggggggcgccaaaaaaaatcccccgggggggcccccaagatcatagcggaccacccgacgacttatttgacaacaaagggggcccccataatgagggacgccactaataaaacacgacagagaacgacggccgccgctggtataaccacgacaggcgaggagcacgaggagaaacagcggcaaacgaggggaactatgatggaaaagaccaccatacactacggagggggggagaacacaaataggcgcgcagcgaaacacactaccacaaacaaggaaagaatataaaagagccgccccagacagggaacatcatacatacacacaacaaagaaacaacgaccaaaagaggggggggacgtaaccaaaccgagaagtaaagaggataaggcagggcagaagaaaaaagacggcgcacaacaacgaggaggaccaccaccacagagcaacagatgctccaagcacgggaggg

SEQ ID NO: 714209 - DNA, 271 bp, Homo sapiens
agaaccacaatctggtataggttctaagaatgtaaatgatcattttaacctatgcagaaccaattagaacaggcagattatttatccaaaatgaggtccaaagcaaactaataaggtgtaactatcggtcatacctcaccagagaccggtcagtgcctttatagactgagaactaacgtggaagataacatgctgaagactatatagcctaagtcatttttggtctaatacgtcaataaagaggagcacctgaacccatataaataatcca

SEQ ID NO: 714210 - DNA, 322 bp, Homo sapiens
gttctagaggatcccagctcgcttagatgtcccgggctcaaagcattctcccgcctcagcctcccgagtagctggaaccacaggcgcctgccaccatgcccgactaacttttgtatccttagcagagatggggtttcgccatgttagtcaggctggtcttgaactcctgaccccaggtgatccacccaccttggcctcccaaagtgctgggattacaggtgcgagccactgtgcccggcctgagagcctttttctctgctgccgccccgtatgtagataagcccgatgtggtccctccaccccatagctcggttgagcccca

SEQ ID NO: 714211 - DNA, 3018 bp, Homo sapiens
  misc_feature (13)..(13): n is a, c, g, or t
ccgggacaccaancactttgtctaggtacgggctcggtgtaattttcgtgccgagggtctctgcaatggcggctctagactccctgtcgctcttcactagcctcggcctgagcgagcagaaggcccgcgagacgctcaagaactcggctctgagcgcgcagctgcgcgaggccgctactcaggctcagcagaccctgggttccaccattgacaaagctaccgggatcctgttatatggcttggcctcccgactcagggatacccggcgtctctccttccttgtaagctacatagccagtaagaagatccacactgagccccagctaagcgctgcccttgagtatgtgcggagtcaccccttggaccccatcgacactgtggacttcgagcgggaatgtggcgtgggtgtcattgtgaccccagagcagattgaggaggctgtggaggctgctattaacaggcaccggccccagctcctggtggaacgttaccatttcaacatggggctgctgatgggagaggctcgggctgtgctgaagtgggcagatggcaaaatgatcaagaatgaagtggacatgcaggtcctccaccttctgggccccaagttggaggctgatctggagaagaagttcaaggtggcaaaagctcggctagaagaaacagaccggaggacggcaaaggatgtggtggagaatggcgagactgctgaccagaccctgtctctgatggagcagctccggggggaggcccttaagttccacaagcctggtgagaactacaagaccccaggctatgtggtcactcccacacaccatgaatctactaaagcagcacctggagattactggtgggcaggtacgtacccggttcccgccagaacccaatggaatcctgcatattggacatgccaaagccatcaatttcaactttggctatgccaaggccaacaatggcatctgttttctgcgttttgatgacaccaaccctgagaaggaggaagcaaagttcttcacggccatctgtgacatggtagcctggctaggctacacaccttacaaagtcacatatgcgtctgactattttgaccagctatatgcgtgggctgtggagctcatccgcaggggtctggcttatgtgtgccaccagcgaggagaggagctcaaaggccataatactctgccttcaccctggagagaccgtcccatggaggagtcactgctgctctttgaggcaatgcgcaagggcaagttttcagagggcgaggccacactacggatgaagctggtgatggaggatggcaagatggaccctgtagcctatcgagtcaagtatacaccacaccaccgcacaggggacaaatggtgcatctatcccacctacgactacacacactgcctctgtgactccatcgagcacatcactcactcactctgcaccaaggaattccaggcccgacgctcttcctacttctggctttgcaatgcactggacgtctattgccctgtgcagtgggagtatggccgcctcaacctgcactatgctgttgtctctaagaggaagatcctccagcttgtagcaactggtgctgtgcgggactgggatgacccacggctctttacactcacggccctgcgacggcggggcttcccacctgaggccatcaacaacttctgtgcccgggtgggagtgactgtggcacaaaccacaatggagccacatcttctagaagcctgtgtgcgtgatgtgctgaatgacacagccccacgagccatggctgtgctggagtcactacgggtcatcatcaccaactttcctgctgccaagtccttggacatccaggtgcccaacttcccagctgatgagaccaaaggcttccatcaggttccctttgcacccattgtcttcattgagaggactgacttcaaggaggagccagagccaggatttaagcgcctggcttggggccagcctgtgggcctgaggcatacaggctacgtcattgagctgcagcatgttgtcaagggccccagtggttgtgtagagagtctggaggtgacctgcagacgggcagatgctggagagaagccaaaggcctttattcactgggtgtcacagcctttgatgtgtgaggttcgcctctatgagcgactattccagcacaagaaccctgaagatcctactgaggtgcctggtggatttttaagtgacctgaacctggcatcactacacgtggtggatgcagcattagtggactgctctgtggccctggcaaaacccttcgacaagttccagtttgagcgtcttggatatttctccgtggatccagacagccatcagggaaagcttgtctttaaccgaactgtcacactgaaggaagacccaggaaaggtgtgagctggaagcactgaacctacctcatcctcctggagggtgtggctaccctcgccaccccaaattccatgtcaataaagaacagctaaattctcctagaaaaaaaaaaaaaaaaaaaaaaaaaaaaaaaaaaaaaaaaaaaaaaaaaaaaagggggggggcgccaaaaaaaatcccccgggggggcccccaagatcatagcggaccacccgacgacttatttgacaacaaagggggcccccataatgagggacgccactaataaaacacgacagagaacgacggccgccgctggtataaccacgacaggcgaggagcacgaggagaaacagcggcaaacgaggggaactatgatggaaaagaccaccatacactacggagggggggagaacacaaataggcgcgcagcgaaacacactaccacaaacaaggaaagaatataaaagagccgccccagacagggaacatcatacatacacacaacaaagaaacaacgaccaaaagaggggggggacgtaaccaaaccgagaagtaaagaggataaggcagggcagaagaaaaaagacggcgcacaacaacgaggaggaccaccaccacagagcaacagatgctccaagcacgggaggg

SEQ ID NO: 714212 - DNA, 125 bp, Homo sapiens
aatcgagctcggtaccttgtgagtctgtaagtaggagagtgatattgatcaggagaacgtggttactagtcacagccctatactccctctacatatttaccacaacacaagggggctcactcacc

SEQ ID NO: 714213 - DNA, 2764 bp, Homo sapiens
agcggagaatagtcagagcaaaaccacgcctgtgtcttcctcctgcctcagggacgaacaccttccttccaggtccgtggcaaatatctccaaaagccctgccgcctgccaacaccccttcaagttcccagttccacggaggcggaagcaaagcccccggaaaggccggtttgtccgccctgtgttgtttaaaggggatagacgaccttggagcgccccgccccctcccgccaaggaaggaccccattggctctccccggaggcttcactctcattggtcagcgagtgaatgccgacctgcagactggggcctaagtttcttttagtttccggtgtctctgcaatggcggctctagactccctgtcgctcttcactagcctcggcctgagcgagcagaaggcccgcgagacgctcaagaactcggctctgagcgcgcagctgcgcgaggccgctactcaggctcagcagaccctgggttccaccattgacaaagctaccgggatcctgttatatggcttggcctcccgactcagggatacccggcgtctctccttccttgtaagctacatagccagtaagaagatccacactgagccccagctaagcgctgcccttgagtatgtgcggagtcaccccttggaccccatcgacactgtggacttcgagcgggaatgtggcgtgggtgtcattgtgaccccagagcagattgaggaggctgtggaggctgctattaacaggcaccggccccagctcctggtggaacgttaccatttcaacatggggctgctgatgggagaggctcgggctgtgctgaagtgggcagatggcaaaatgatcaagaatgaagtggacatgcaggtcctccaccttctgggccccaagttggaggctgatctggagaagaagttcaaggtggcaaaagctcggctagaagaaacagaccggaggacggcaaaggatgtggtggagaatggcgagactgctgaccagaccctgtctctgatggagcagctccggggggaggcccttaagttccacaagcctggtgagaactacaagaccccaggctatgtggtcactcccacacaccatgaatctactaaagcagcacctggagattactggtgggcaggtacgtacccggttcccgccagaacccaatggaatcctgcatattggacatgccaaagccatcaatttcaactttggctatgccaaggccaacaatggcatctgttttctgcgttttgatgacaccaaccctgagaaggaggaagcaaagttcttcacggccatctgtgacatggtagcctggctaggctacacaccttacaaagtcacatatgcgtctgactattttgaccagctatatgcgtgggctgtggagctcatccgcaggggtctggcttatgtgtgccaccagcgaggagaggagctcaaaggccataatactctgccttcaccctggagagaccgtcccatggaggagtcactgctgctctttgaggcaatgcgcaagggcaagttttcagagggcgaggccacactacggatgaagctggtgatggaggatggcaagatggaccctgtagcctatcgagtcaagtatacaccacaccaccgcacaggggacaaatggtgcatctatcccacctacgactacacacactgcctctgtgactccatcgagcacatcactcactcactctgcaccaaggaattccaggcccgacgctcttcctacttctggctttgcaatgcactggacgtctattgccctgtgcagtgggagtatggccgcctcaacctgcactatgctgttgtctctaagaggaagatcctccagcttgtagcaactggtgctgtgcgggactgggatgacccacggctctttacactcacggccctgcgacggcggggcttcccacctgaggccatcaacaacttctgtgcccgggtgggagtgactgtggcacaaaccacaatggagccacatcttctagaagcctgtgtgcgtgatgtgctgaatgacacagccccacgagccatggctgtgctggagtcactacgggtcatcatcaccaactttcctgctgccaagtccttggacatccaggtgcccaacttcccagctgatgagaccaaaggcttccatcaggttccctttgcacccattgtcttcattgagaggactgacttcaaggaggagccagagccaggatttaagcgcctggcttggggccagcctgtgggcctgaggcatacaggctacgtcattgagctgcagcatgttgtcaagggccccagtggttgtgtagagagtctggaggtgacctgcagacgggcagatgctggagagaagccaaaggcctttattcactgggtgtcacagcctttgatgtgtgaggttcgcctctatgagcgactattccagcacaagaaccctgaagatcctactgaggtgcctggtggatttttaagtgacctgaacctggcatcactacacgtggtggatgcagcattagtggactgctctgtggccctggcaaaacccttcgacaagttccagtttgagcgtcttggatatttctccgtggatccagacagccatcagggaaagcttgtctttaaccgaactgtcacactgaaggaagacccaggaaaggtgtgagctggaagcactgaacctacctcatcctcctggagggtgtggctaccctcgccaccccaaattccatgtcaataaagaacagctaaattctc

SEQ ID NO: 714214 - DNA, 97 bp, Homo sapiens
taagctttgatcttccctctgtgtgtgaatagaagcaaagcagaagcagtatctcttgactggtcaggtcctcagtgatggaaaagtcttcatccat

SEQ ID NO: 714215 - DNA, 2793 bp, Homo sapiens
agcggagaatagtcagagcaaaaccacgcctgtgtcttcctcctgcctcagggacgaacaccttccttccaggtccgtggcaaatatctccaaaagccctgccgcctgccaacaccccttcaagttcccagttccacggaggcggaagcaaagcccccggaaaggccggtttgtccgccctgtgttgtttaaaggggatagacgaccttggagcgccccgccccctcccgccaaggaaggaccccattggctctccccggaggcttcactctcattggtcagcgagtgaatgccgacctgcagactggggcctaagtttcttttagtttccggtgtctctgcaatggcggctctagactccctgtcgctcttcactagcctcggcctgagcgagcagaaggcccgcgagacgctcaagaactcggctctgagcgcgcagctgcgcgaggccgctactcaggctcagcagaccctgggttccaccattgacaaagctaccgggatcctgttatatggcttggcctcccgactcagggatacccggcgtctctccttccttgtaagctacatagccagtaagaagatccacactgagccccagctaagcgctgcccttgagtatgtgcggagtcaccccttggaccccatcgacactgtggacttcgagcgggaatgtggcgtgggtgtcattgtgaccccagagcagattgaggaggctgtggaggctgctattaacaggcaccggccccagctcctggtggaacgttaccatttcaacatggggctgctgatgggagaggctcgggctgtgctgaagtgggcagatggcaaaatgatcaagaatgaagtggacatgcaggtcctccaccttctgggccccaagttggaggctgatctggagaagaagttcaaggtggcaaaagctcggctagaagaaacagaccggaggacggcaaaggatgtggtggagaatggcgagactgctgaccagaccctgtctctgatggagcagctccggggggaggcccttaagttccacaagcctggtgagaactacaagaccccaggctatgtggtcactcccacacaccatgaatctactaaagcagcacctggagattactggtgggcaggtacgtacccggttcccgccagaacccaatggaatcctgcatattggacatgccaaagccatcaatttcaactttggctatgccaaggccaacaatggcatctgttttctgcgttttgatgacaccaaccctgagaaggaggaagcaaagttcttcacggccatctgtgacatggtagcctggctaggctacacaccttacaaagtcacatatgcgtctgactattttgaccagctatatgcgtgggctgtggagctcatccgcaggggtctggcttatgtgtgccaccagcgaggagaggagctcaaaggccataatactctgccttcaccctggagagaccgtcccatggaggagtcactgctgctctttgaggcaatgcgcaagggcaagttttcagagggcgaggccacactacggatgaagctggtgatggaggatggcaagatggaccctgtagcctatcgagtcaagtatacaccacaccaccgcacaggggacaaatggtgcatctatcccacctacgactacacacactgcctctgtgactccatcgagcacatcactcactcactctgcaccaaggaattccaggcccgacgctcttcctacttctggctttgcaatgcactggacgtctattgccctgtgcagtgggagtatggccgcctcaacctgcactatgctgttgtctctaagaggaagatcctccagcttgtagcaactggtgctgtgcgggactgggatgacccacggctctttacactcacggccctgcgacggcggggcttcccacctgaggccatcaacaacttctgtgcccgggtgggagtgactgtggcacaaaccacaatggagccacatcttctagaagcctgtgtgcgtgatgtgctgaatgacacagccccacgagccatggctgtgctggagtcactacgggtcatcatcaccaactttcctgctgccaagtccttggacatccaggtgcccaacttcccagctgatgagaccaaaggcttccatcaggttccctttgcacccattgtcttcattgagaggactgacttcaaggaggagccagagccaggatttaagcgcctggcttggggccagcctgtgggcctgaggcatacaggctacgtcattgagctgcagcatgttgtcaagggccccagtggttgtgtagagagtctggaggtgacctgcagacgggcagatgctggagagaagccaaaggcctttattcactgggtgtcacagcctttgatgtgtgaggttcgcctctatgagcgactattccagcacaagaaccctgaagatcctactgaggtgcctggtggatttttaagtgacctgaacctggcatcactacacgtggtggatgcagcattagtggactgctctgtggccctggcaaaacccttcgacaagttccagtttgagcgtcttggatatttctccgtggatccagacagccatcagggaaagcttgtctttaaccgaactgtcacactgaaggaagacccaggaaaggtgtgagctggaagcactgaacctacctcatcctcctggagggtgtggctaccctcgccaccccaaattccatgtcaataaagaacagctaaattctcatagaaaatatctcggggatcctcttgag

SEQ ID NO: 714216 - DNA, 288 bp, Homo sapiens
  misc_feature (5)..(5): n is a, c, g, or t
acacnaacctaggtggtagagcctactgcacacctgggctagatggcaaagtctgtcgcttctgggctacagacctgtacagcatggtactgtattgaatactgtaggcaactgtaacacaatggtatctgtgtaatctaaacatagaacagataatacattgtgctacaatgtaacaatggctgtggcatcactaggtgataggaatttttcagttccattataatcttataggatctctgtcatatgtggtcaattgttgatcgatacatgactgtatgtcgtatt

SEQ ID NO: 714217 - DNA, 630 bp, Homo sapiens
ggcaaagggcccgtgtttctgttgcgggaagctcccgggggtcgcacgtgcgtccgagcccaagccccttcccactctcacttccccttcactgcgtgcccgcggtagtcgccaagtcggaatacgttcttctcggcccgccgagtatgggactcagaacccggtggaaccagcatcgtcagaacatgtggaaaaaagatgtgtggatccctgacagaatattgagatgcaaaatggcaaagagaggtgttctgaacaagttcaagattttacaaatgttgcaagaactctcgagttcttatggtagtaaaatgccggaaagacaattctgcattgaaagaatgtctaaactgcttactataatgatccagccttatatgaagaatgcaaaatggaatacctgcaggcaagggaagaattcagaaaaactggaattcctacaaagacaaggctacagaagcttccaacgaaggcatgtaggcagagtatgaaatgacatgcaggaactctaatatacatggaagatcatggactagtccttaaataatggcataaagacataatatgttgggtgtaccttaattatggaaatagtaactgatctgaaaataaatataaaataagaaagag

SEQ ID NO: 714218 - DNA, 2714 bp, Homo sapiens
agcggagaatagtcagagcaaaaccacgcctgtgtcttcctcctgcctcagggacgaacaccttccttccaggtccgtggcaaatatctccaaaagccctgccgcctgccaacaccccttcaagttcccagttccacggaggcggaagcaaagcccccggaaaggccggtttgtccgccctgtgttgtttaaaggggatagacgaccttggagcgccccgccccctcccgccaaggaaggaccccattggctctccccggaggcttcactctcattggtcagcgagtgaatgccgacctgcagactggggcctaagtttcttttagtttccggtgtctctgcaatggcggctctagactccctgtcgctcttcactagcctcggcctgagcgagcagaaggcccgcgagacgctcaagaactcggctctgagcgcgcagctgcgcgaggccgctactcaggctcagcagaccctgggttccaccattgacaaagctaccgggatcctgttatatggcttggcctcccgactcagggatacccggcgtctctccttccttgtaagctacatagccagtaagaagatccacactgagccccagctaagcgctgcccttgagtatgtgcggagtcaccccttggaccccatcgacactgtggacttcgagcgggaatgtggcgtgggtgtcattgtgaccccagagcagattgaggaggctgtggaggctgctattaacaggcaccggccccagctcctggtggaacgttaccatttcaacatggggctgctgatgggagaggctcgggctgtgctgaagtgggcagatggcaaaatgatcaagaatgaagtggacatgcaggtcctccaccttctgggccccaagttggaggctgatctggagaagaagttcaaggtggcaaaagctcggctagaagaaacagaccggaggacggcaaaggatgtggtggagaatggcgagactgctgaccagaccctgtctctgatggagcagctccggggggaggcccttaagttccacaagcctggtgagaactacaagaccccaggctatgtggtcactcccacacaccatgaatctactaaagcagcacctggagattactggtgggcaggtacgtacccggttcccgccagaacccaatggaatcctgcatattggacatgccaaagccatcaatttcaactttggctatgccaaggccaacaatggcatctgttttctgcgttttgatgacaccaaccctgagaaggaggaagcaaagttcttcacggccatctgtgacatggtagcctggctaggctacacaccttacaaagtcacatatgcgtctgactattttgaccagctatatgcgtgggctgtggagctcatccgcaggggtctggcttatgtgtgccaccagcgaggagaggagctcaaaggccataatactctgccttcaccctggagagaccgtcccatggaggagtcactgctgctctttgaggcaatgcgcaagggcaagttttcagagggcgaggccacactacggatgaagctggtgatggaggatggcaagatggaccctgtagcctatcgagtcaagtatacaccacaccaccgcacaggggacaaatggtgcatctatcccacctacgactacacacactgcctctgtgactccatcgagcacatcactcactcactctgcaccaaggaattccaggcccgacgctcttcctacttctggctttgcaatgcactggacgtctattgccctgtgcagtgggagtatggccgcctcaacctgcactatgctgttgtctctaagaggaagatcctccagcttgtagcaactggtgctgtgcgggactgggatgacccacggctctttacactcacggccctgcgacggcggggcttcccacctgaggccatcaacaacttctgtgcccgggtgggagtgactgtggcacaaaccacaatggagccacatcttctagaagcctgtgtgcgtgatgtgctgaatgacacagccccacgagccatggctgtgctggagtcactacgggtcatcatcaccaactttcctgctgccaagtccttggacatccaggtgcccaacttcccagctgatgagaccaaaggcttccatcaggttccctttgcacccattgtcttcattgagaggactgacttcaaggaggagccagagccaggatttaagcgcctggcttggggccagcctgtgggcctgaggcatacaggctacgtcattgagctgcagcatgttgtcaagggccccagtggttgtgtagagagtctggaggtgacctgcagacgggcagatgctggagagaagccaaaggcctttattcactgggtgtcacagcctttgatgtgtgaggttcgcctctatgagcgactattccagcacaagaaccctgaagatcctactgaggtgcctggtggatttttaagtgacctgaacctggcatcactacacgtggtggatgcagcattagtggactgctctgtggccctggcaaaacccttcgacaagttccagtttgagcgtcttggatatttctccgtggatccagacagccatcagggaaagcttgtctttaaccgaactgtcacactgaaggaagacccaggaggatgaggtaggttcagtgcttccagcctcgtgccgaattcgccaccaggc

SEQ ID NO: 714219 - DNA, 2692 bp, Homo sapiens
agcggagaatagtcagagcaaaaccacgcctgtgtcttcctcctgcctcagggacgaacaccttccttccaggtccgtggcaaatatctccaaaagccctgccgcctgccaacaccccttcaagttcccagttccacggaggcggaagcaaagcccccggaaaggccggtttgtccgccctgtgttgtttaaaggggatagacgaccttggagcgccccgccccctcccgccaaggaaggaccccattggctctccccggaggcttcactctcattggtcagcgagtgaatgccgacctgcagactggggcctaagtttcttttagtttccggtgtctctgcaatggcggctctagactccctgtcgctcttcactagcctcggcctgagcgagcagaaggcccgcgagacgctcaagaactcggctctgagcgcgcagctgcgcgaggccgctactcaggctcagcagaccctgggttccaccattgacaaagctaccgggatcctgttatatggcttggcctcccgactcagggatacccggcgtctctccttccttgtaagctacatagccagtaagaagatccacactgagccccagctaagcgctgcccttgagtatgtgcggagtcaccccttggaccccatcgacactgtggacttcgagcgggaatgtggcgtgggtgtcattgtgaccccagagcagattgaggaggctgtggaggctgctattaacaggcaccggccccagctcctggtggaacgttaccatttcaacatggggctgctgatgggagaggctcgggctgtgctgaagtgggcagatggcaaaatgatcaagaatgaagtggacatgcaggtcctccaccttctgggccccaagttggaggctgatctggagaagaagttcaaggtggcaaaagctcggctagaagaaacagaccggaggacggcaaaggatgtggtggagaatggcgagactgctgaccagaccctgtctctgatggagcagctccggggggaggcccttaagttccacaagcctggtgagaactacaagaccccaggctatgtggtcactcccacacaccatgaatctactaaagcagcacctggagattactggtgggcaggtacgtacccggttcccgccagaacccaatggaatcctgcatattggacatgccaaagccatcaatttcaactttggctatgccaaggccaacaatggcatctgttttctgcgttttgatgacaccaaccctgagaaggaggaagcaaagttcttcacggccatctgtgacatggtagcctggctaggctacacaccttacaaagtcacatatgcgtctgactattttgaccagctatatgcgtgggctgtggagctcatccgcaggggtctggcttatgtgtgccaccagcgaggagaggagctcaaaggccataatactctgccttcaccctggagagaccgtcccatggaggagtcactgctgctctttgaggcaatgcgcaagggcaagttttcagagggcgaggccacactacggatgaagctggtgatggaggatggcaagatggaccctgtagcctatcgagtcaagtatacaccacaccaccgcacaggggacaaatggtgcatctatcccacctacgactacacacactgcctctgtgactccatcgagcacatcactcactcactctgcaccaaggaattccaggcccgacgctcttcctacttctggctttgcaatgcactggacgtctattgccctgtgcagtgggagtatggccgcctcaacctgcactatgctgttgtctctaagaggaagatcctccagcttgtagcaactggtgctgtgcgggactgggatgacccacggctctttacactcacggccctgcgacggcggggcttcccacctgaggccatcaacaacttctgtgcccgggtgggagtgactgtggcacaaaccacaatggagccacatcttctagaagcctgtgtgcgtgatgtgctgaatgacacagccccacgagccatggctgtgctggagtcactacgggtcatcatcaccaactttcctgctgccaagtccttggacatccaggtgcccaacttcccagctgatgagaccaaaggcttccatcaggttccctttgcacccattgtcttcattgagaggactgacttcaaggaggagccagagccaggatttaagcgcctggcttggggccagcctgtgggcctgaggcatacaggctacgtcattgagctgcagcatgttgtcaagggccccagtggttgtgtagagagtctggaggtgacctgcagacgggcagatgctggagagaagccaaaggcctttattcactgggtgtcacagcctttgatgtgtgaggttcgcctctatgagcgactattccagcacaagaaccctgaagatcctactgaggtgcctggtggatttttaagtgacctgaacctggcatcactacacgtggtggatgcagcattagtggactgctctgtggccctggagcttgtctttaaccgaactgtcacactgaaggaagacccaggaaaggtgtgagctggaagcactgaacctacctcatcctcctggagggtgtggctaccctcgccaccccaaattccatgtcaataaagaacagctaaattctc

SEQ ID NO: 714220 - DNA, 852 bp, Homo sapiens
  misc_feature (247)..(247): n is a, c, g, or t
aatccagaaaagaagtctcgaactctcaccgattaagaacccaaagctaagattcataatttaaactattactctgtggctttcatggggaagcagagtggggataccacgcctaagtattgactcatgccatcgaacaagcagcatatgtatatcggtacagttactggcctagtgctagccattgaaatagtgggtacgggataccaatacaagtagttgaccaacctgtagtatgtaaaaaccncaagccactatccaaaaccccccgtcggtcagtgcttactaggctggtacaagctgattcaacccgtcgaacttaatcacactatcacatttgctaacatcgctaagagtctagccccgtcaacccagttaggtgatagccaaacaaataggctaggccagccttaactagtgacatatgtcacataaagtcatcttaccgtgagcagtagcacatgtacagatcaaatcgcttctcgtccccatggtagtgatcgccctcagataaggggtcccgttggtcgaacaatccttccggaagacaatcgaatagtcccgacaacaagagattgcaagtctcctcgctctggtggcccataacacttggtgggtaagctaaaagttgatactgtagtccggacatctggttcctacttcagggtcatacatgcctaaatagcccacacgttccccttaaataagacatcaccgatggatcacaggtctatcagcctattaacactcacgggagctctccatgcccttggaatattcgactgagggggtgtgcacgcgatagagattgcgagacgctggagccggaagcaccctatgtcaaaaaaaaaa

SEQ ID NO: 714221 - DNA, 105 bp, Homo sapiens
ggactggagtagaggaaggtcggctgatctttgataacttgaagaaattcattggttataacttaaacaataatctttccggaaatcacccggtcctggtattta

SEQ ID NO: 714222 - DNA, 119 bp, Homo sapiens
ggggggccccccccatgggggggccccggggtttttttcccccccccccccccccccccccgggggtttatttggggggggggggggggggggggaaaaaaaaagggggtttttggcca

SEQ ID NO: 714223 - DNA, 443 bp, Homo sapiens
  misc_feature (52)..(52): n is a, c, g, or t
  misc_feature (82)..(82): n is a, c, g, or t
  misc_feature (121)..(121): n is a, c, g, or t
  misc_feature (127)..(127): n is a, c, g, or t
  misc_feature (171)..(171): n is a, c, g, or t
  misc_feature (376)..(376): n is a, c, g, or t
  misc_feature (412)..(412): n is a, c, g, or t
ttactatggcatatgatcaattttaatcggcagggtgcaggcaggactaaancaaacccaacttcgaaaaatcatagcatantcatcaatcgcacacataggatgaatgacagcagtattnccatanaacacaaccataacaatcttaaacctactaatttacatcacaanaacactagcaatattcatactattaatccacagctcagcaaccacaactttatccctatcccatacatgaaacaagatacccatcatcacaagcctaataatagtaaccctactctcaataggaggcctgcctccactatcaggatttataccaaaatgaataatcattcaagaaataacaaaaaatgaaagcatcatcatgccnacactcatagcaataacagcactgctaacctctatntctacatacaactagcgtcggctaatttaaa

SEQ ID NO: 714224 - DNA, 217 bp, Homo sapiens
agggggggtccgtcactgtcttctagcggtataagaatatgcgagaacagtttacggaactacagagaaacagattataatctataaattctgagagagagggtcttattattgtatgcccaggcgaggtgtccaaataggtagcagtcataagcatcattgcagacctatgatatgtctagggtaccagatggtaactcccacctacagactccct

SEQ ID NO: 714225 - DNA, 381 bp, Homo sapiens
ccaaggctcgaaaaggggtctggagtggtaagagaaatccaaactctgcttcagtggatgcctacaccaagtctgacgcggtcactgtccctgccaggctctacttgaatcatggcgacaacctgaagacggagtcagtggtccactagaagctgatcatgcagctcatcccccagtcagtctgtctgaccaccctgggccctttgttcctggaactcaaggatggtccagttccatttcaccaacaaggacctggagtctctcagaggcctctaccgcatcatgggctacggcttcgcgggctgcgtgcacttctcccagtcggcgccctgtgaggtgcgcgtgctcatgctcctgtactcgtccacgaagacgatcttc

SEQ ID NO: 714226 - DNA, 458 bp, Homo sapiens
  misc_feature (375)..(375): n is a, c, g, or t
  misc_feature (419)..(419): n is a, c, g, or t
  misc_feature (449)..(449): n is a, c, g, or t
acacttttgagccattcagtcaaaatactgtaaacatgaaagaccaggcaactacaacaagcgtccataaggccaggtgcagcggctcacacctgcaatcccagcactttgggaggccaaggcaggaggatcgcttgtgcagtggctcacacctataatcccagcactttgggaggccaaggcaggaggatcgcttgtgcagtggctcacacctgtaatcccagcactttgggaggccaaggcaagaggatcgcttgtgcagcagctcgcacctgtaatcccagcactttgggaggccaaggcaggaggatcgattcgaggccagggagttccagaccagcctggggcaacataggcgagacccccaccttttancaaaaatttttaaaatttaggccagaggttgggggttgcacacntgttagttcccagttatttcaggaaggccnaaggcaggg

SEQ ID NO: 714227 - DNA, 1546 bp, Homo sapiens
  misc_feature (114)..(114): n is a, c, g, or t
  misc_feature (761)..(761): n is a, c, g, or t
  misc_feature (1030)..(1031): n is a, c, g, or t
ctacctatttatgctaccccccgtggtgtgtcgtagtcccccaggccggcgtgtttgcggtgcacccctgttttgtgaccccttctggcagagggggttcctcccgcaccacgnggtgtggtgacccccgcagtcaacgccccggcgcccttgtgtggtttagaccacgctcctgcgcgctcgcggtttatctgtatttttgcccgcggggtctctccttaatatggggttactctccgcggaggggccctccgctctgggggggtgtggggccggcagattattcctccggcccacatctagaagggggggaatgggcgtatatatcgtccccgcttgggttgacgctgtatgtgtatgccgcccatgtggggggtcgtgacgcacccccccccccccgcgcgggggttttcttgttgttgcgggcaccccaattgtgcgccctcgttctgtgtaagccggggccgagaagcggccgcctcctctttggtggagcccgccggccgtcgttgttgtcctccttgtttgggatgaccctgtttttttgcgcctcaaggcccacagggggtgtccccccacaaagactcaccgctcaccgagagatactttttttttcggctggcttctcgttgaggcccacctctcggcgaagaggagagataatacggggagaatttttttgggctgttattatataaagggggtgtttccctgcggctgtgttgcacacacgagaagtgtatatttttccacaccgcggntttatatatggtgggttatcacagcgcgttggtgtggacacttgttcacacacaccggccacttatatattggccccacttgggttggcccacaagatcccacatatctatgatcgcggggagagaaaaatgtttgagaagcaattgagagagacactttcaatatccctatataagccacttatcacgagagttctcctggacacatctttgggtccccagtgggcacacaatgtccctgggagacccacaaacacgccacaatgggnngtgtctccacaggtttgtgtcacagtctgtgcacgcctgtcacacacagagacgtgagaggtgtggtgtgtgagattgtgacacacagacacatggtgtgggtgttgttggcacacaaggtgagacaagagaaggcacatgagaatatattgttggagaggccacctggaggcccctttgtgggtccacggagaatgtgccacagagccacgcccacagaaagagatcacccccttgcttgagcctgtgtggacacacactcgagaataaatttgaacttgtgttttattcttataccacccacgagtcacttcctcttctgtagctccacaggaagacgcaccccctcccacccccactcttgcttcccacgtattcctataaattctttgtgcttctcgctgcagttccccttgggttccactgttttccctgttccctcccacatgcctagctggagttgcacgagttaagtttatgaattaatgaaaattaaaactaaataacccattgtc

SEQ ID NO: 714228 - DNA, 326 bp, Homo sapiens
gaagcagtttgaataaagtactgtctctaatgaaaagtactttaggctgggcatggctgctcatgcctgtaatcccagcactttgggaggctgaggcaggtggatcacaaaatcaggagttcgagaccagcctgaccaacatggtggaaccccatctctactaaaaatacaagaattagccaggcatagtggtgcatgactgtagtccaagctacttgggaggctaagacaggagaattgcttgaacccaagaggtggaggttgcagtgagccacgattgtgccattgcactccagcctgggtgacagagtgagactccatctcaa

SEQ ID NO: 714229 - DNA, 252 bp, Homo sapiens
  misc_feature (11)..(11): n is a, c, g, or t
  misc_feature (23)..(23): n is a, c, g, or t
  misc_feature (39)..(39): n is a, c, g, or t
  misc_feature (79)..(79): n is a, c, g, or t
  misc_feature (113)..(113): n is a, c, g, or t
cggggggcagnaccaatgtgggnaggcctgtctggactnaagctaaaggcccctctgtgcatgatgtgggaacctggtnattcccatgccccatccagacccagggctgtggntccaccactgagcatcccttgcccactgtcctcccctccttggcactcccagccctccactcctgcatcacagcagttttaaggcccattattgtactgatttatccttgtaataaatgtttctgtaagaaaaaaaaaa

SEQ ID NO: 714230 - DNA, 141 bp, Homo sapiens
ggatacagctaggatccgggtaggacgtggcgcggtacattgacgtacggcgtgacggaggcatccctgcgtgtaccccaacaacgtcttcctgtccacagtgggccagcgatgccatcgtgactgtgtgctgaagctgct

SEQ ID NO: 714231 - DNA, 755 bp, Homo sapiens
atttgtccttggataggggaccggggggggcttggaatgttgcaaaaaaaaaagttacccaagggatgtcagttttttatccctctgcatgggttggattttccaaaatcataatttgcagaaggaaggccagcatttatgatgcaatatgtaattatatatagggtggccccactagggcggggtccttcccccctcacagctttggcccctttcagagattagaaactgggttagaggattgcagaagacgagtggggggagggcagggaagatgcctgtcgggtttttagcacagttcatttcactgggattttgaagcatttctgtctgaacacaaagcctgttctagtcctgggggaacacactgagggtgaaggcgtgcgaagatgccgtaatgaaaccggttagtcaattttggcttaatattggcgacaattctgtaaagttcctttatatgaatacttctgattaagctatctcacctttcttttgaaatccttcccttttaggagaacatttgacacttgtgaaatagcttgtaaaaaagccccttccttcttcttttaaacctttaaatgacaaatctaggtcaataatgttttgaattcttatcttggctttcttttaaatgaccatttgtctttcccaatacgactcgtcgatactggtaaatggccaaaaccaaaatttattttgcgccaataacaaacgctctctcaggcaaactacagacactttttcgtgacaccata

SEQ ID NO: 714232 - DNA, 198 bp, Homo sapiens
gcaggacgctgcgcacaacatgggcaaccaccctgccgctcctgcctgcagagagttaggaggaagatgaatggaagttgaagacgagcatagtaaagagcaaaaaccaacatcataattttgacacagtctgccgacatcacatacatacctaggtgctgatatggagatttcatggcaggctttcacgatgacgac

SEQ ID NO: 714233 - DNA, 382 bp, Homo sapiens
gaacaacatacacgctagttccgcaggggagctgccctgtctccgtaggggggtggctcccggcgcaacacgacgacatgaacaatccacagatcatgcagtccccacaacacccatgtgaggtaggccgtaagttggcaacgatcttcacgcccacttcacagacaagcccgggacacagtcaagcgcgagcgcatggtaggctgagcccgccggtgcaggtcctgggccgctccccgcgttcccaccagtccctgccagagccgggccgcctgcaacacagtcacttggacacaggataaaagatcatggttttaaaaaataaatgattaaaaagaacaaaaaccaaaaaagtgatgctagagaaggggaataaatagac

SEQ ID NO: 714234 - DNA, 344 bp, Homo sapiens
aacgacggcagggaaagaccgactcatgaccaaggctgtgtccctgcgggaaaacaagggccctgggacccagaatcatcggcaggggcgtttcctgaagaagaaagctccagcagtgccctcagccccaccctcctatgaggaagccacctctgaagaggggatgaaggcagtggccttccccccagcccccacagcggtgcctctccaccctagctgggcctatgtggaccccagcagcagctccagctatgacaacggtttccccaccggagaccatgagctcttcaccactttcagctgggatgaccagaaagttcgtcgagtctttgtcagaatgttct

SEQ ID NO: 714235 - DNA, 221 bp, Homo sapiens
ccacctccgccgtacagatcacagatacgtccgctcggcccggaatcggatgcaccccaaagcggatgcgcggatggtcgatgggcccgaacggctcgatgccgaaggcgtgcagggccgaggtcttggcgcccgtgtccaccttggcgcggatggccggcaggccgagctcgggtagggcgagccattcctcccagccgaacacgatcgggccggccggc

SEQ ID NO: 714236 - DNA, 805 bp, Homo sapiens
gcattttaataaactcttgccaccgcacactctttgggtctgtgtatttgtctaatcaagctgtaaccctcgccgctgtggtccacggtttcattccctgaagcccgtgagaccacgaacccttcgatcgagaaaagaccttcaatcgggagaagacttctcgtctcaaaaagcatccgggcatcgggccttatcctgttggaaacgactcctttttggatctctgctcctatactttccagcgcttactgctcttgacagatacgaaacggaccatgttattctaataacagactccggactgcagcatcaaataccaggggcacccggagcattcaaggcgcaagaataacctggttgtcggactggactcactggcttcatctcggttttatggaaacaagtctctaagttttgcctagaatctcgctatacggcagacctgtattacgtgattcaggtgactcagtatccacatatcgccaaaacactctactaatcagtcggtatacactgtgactaatatctttcttgtacgttccctaccttacctactttctgtgtacctggctgtgcggctatactagaattgctcatgacacgttctactgcgacggttacacactttccctcacaacgcatactttgacctacacataccaactcggtctctctaccggcctacctaacatccagtggacagtacgctctgatggatattccactgcccatcctcgagatatcgccatgaagcctacactccctctcatatgctgcctatcgccgtccacatttgcaacaacta

SEQ ID NO: 714237 - DNA, 445 bp, Homo sapiens
tcttgactagaagcctgagaaggagagcttggaaggaggtgagctcttcatgtgtcttacatctgggctctgagcccagctctgtggcaggaggctgactcaccccatcagtcgctctcccagcattgctgtgcatggatcccttcaggaagaagctctggagtggggccgaggccccatgatgctctgctgggggtctggggacttgagctgcctcctgtctctcccactctggagcccctgggctcttgcctccttgttgaatttgcccctttggcttgccccgggccccattttgtgccatagaggggttgcttcatttgccggaggggtggctgaaaacaccattcctgggcttgcatctatctcgcttaaagtcaatccttatatcactgcactactgcagtcagtgcccagcggcggatgccaccttcgctggccctct

SEQ ID NO: 714238 - DNA, 174 bp, Homo sapiens
gctcgacaggcggaggtggcagtgagctgagatcgtgccactgtattccagcctgggtgacagagtgagattccatctgaaagaaagaaataaaaggaaagaagaaagagagagagaaagaaagaaagaaagaaagaaagaaagaaagaaagaaagaaagaaagaaagaaagag

SEQ ID NO: 714239 - DNA, 235 bp, Homo sapiens
gttcttcacagatgacagctttgcagtcgggagtagctgtcaagccaggacaagcactacttcccaggttaatgaacttgcccattatcggcagcaaccacccgggcctacagccatgctctggtggctgaaattgaccgataacctcgcaaagtgacagctgccatgggccaagaagaagatcgccacagagatcaaagataaacatcttttgctgaaagttgtataactacaa

SEQ ID NO: 714240 - DNA, 412 bp, Homo sapiens
agccaaatctttgttatcataccttgaaatacattccccagttcaagattaaacatctattcatattttcttcttggacattcaagtttaatccttatggaatgaattttggcatatacagtggattagagaactaattttatttttttaatgattggccaattttagtaacattttctaactgattattgctggtatatgagaaagccaatgatttttatgtatttatcctaaaattggcaaccttcctcaaattcttattctaatattcacttgcttctaatttttctaggtagaaaattatatacctttctttctaatatttatacttcttgtcttatttttctatttatttggctctaatttctagaccaatgttagataccagtgtggatatcatggtattttcttt

SEQ ID NO: 714241 - DNA, 928 bp, Homo sapiens
tgctgcagccttcagctctccaccctggactacgccatgtttgggtgtttgttgtggtctgtgtgtgtgcctgctgctcctgtgcctcctgtgtggcccttgctgtgatgactcaccctcttcatgctgtctgctgcccccatgctcatgctcttacttgctgtgtgcctgctcctgactgtgctgtgtccatccctgtcatgtggactatgctggctgcaaatcatctccttctgccaaaatgcatgtgctgcctgccacctgggtgctgcatctgttgtgctgtgtcatttgtgctgcatgttgtgcttgtgactgtccattgttcttgacttgatgctgtgacttaacccaccatattatctacaacttgcccctgtgaaaagttgcaatggtgccatgtgtgagaccagaaccgttgtgtttcttgggacgtgttgtgcccatgccattttgctggttgacgatgcaccaacgctacatgtgacctactttgcctattgtgacttgtgtaccatgacatggtgctttgcgcttacccatgtgcccatgaaacatgtaccttgtgacttcttggttgcacccaattcaaaaatctccttgttctggtccccttgaagaactcttgcgcgcagaatcaatgaactgttcatttggacgaaacctattttcatgagcacgagtgtccccattccaaaaaccgaaaacaattttttgctccccatttcaatgccttgagtgcttcccagaactttcattgcaaattgaagttgttgacgccagtgtacattccttggctggacctggctattacgcggctgtccgatcttgctagctccccttatttcggctgctctgccaccgctttgggccttccgcggttgctgcctggaggttgcgcaagctgttcctgttccatgggggctac

SEQ ID NO: 714242 - DNA, 271 bp, Homo sapiens
gctgatatagaggatcccccgctaagcgcggtcttatagcagaacgggctgaccttgggattcccaaatcagcctttccattgaagacagtgtggggctcttctttaccccgctccatcctcttcttcttggctatcacctaaaaaatccaccaggttgggagttcccgtcatggcgccatggttaacgaatccgactaggaaccataaggttgcaggtttgatccccagccttgctcagtgggttaaggatctggcgttgccatgagctg

SEQ ID NO: 714243 - DNA, 116 bp, Homo sapiens
ctctacccaacgtatcccagagctgcactgtattagtaccatcttatttcttcttggggattatacatctcagaccgcctgagtactggggtcagctctttatacaaagggaaaca

SEQ ID NO: 714244 - DNA, 1146 bp, Homo sapiens
ggcctgacccctgtaattaaatgtcaaaagccccttgtcccctcccctagggctaccaggtaacatactctactgcatatgttctagtggaagagaaggccggggttctaggaaagaagagccaaattttggtgggctttggtgccccctctcagactccccatgacaagacaacggggctgcagacgactgtgtgttcagtctgcccaggggctggggctctttaagtgcttggtcagagtagacggtttccatgtgagccttcaaaggtgtccagcaggctgcatggggaacaggcaaagctccctccttgcaaggaaaggagatgtccagaccaatgatgcccggcttctgacggcccatgaggagcaagtgggatgggagccaggccctggggctgcgtgtcccggaacatgaaatcgaagggggctgcctatctcgagattaggatgtggcacggtgtaagcaagtggatgttgctaagaccaagccaatggaggtgagcatctctggagaatccacaagaagaggcgtcggagcatcagacatagctcagaccatggagatcgcacgtgtgatagggatacaaagagggctcatactccagacgaccaagagagaagtacacggatagctcctttggcagaacgtcatggaagatgctcaggcgcacaaaggtctgaaaggtacccctgtaattcgctacaagggatttcacaccggcataggtgaacgaaatgcactcgctagagatcaaagcttggagagcttaacaagacaagcgaagtgaccctccattggggatcgcgacggagagaccattaaatggatcgcctatcaccgatgtagggaccaccccactcgattgcgggcggcaactggggaaacaagggtttggcatgacacattaggaagccacaaggaattgacaagtgtcgttcaccacgaactggagcgaagacgagagacattggggtgacacaacagagcgacacgagtatcggccgtaatcggacaccccgtaagcggtcgcaggaagaagaggaacaaggagggcttagtcaaataccacgacatagcagaccaacgataagatacatagtcgagaccaataggcaagggacaaaaaaggctacatacaacaag

SEQ ID NO: 714245 - DNA, 722 bp, Homo sapiens
  misc_feature (622)..(622): n is a, c, g, or t
gaattcggcaccttgacgtgcccatttaacagatatgaaaactgtggccgcgagaagaggaactgtaacttccagtttccttccccttgcacccagaaacaggttctgtgagcccctctccccataccatggagggtggggatgggtcttactcacccagaccgtgttcctccagggagaatagtcctcctcggaccagaggttcttcaaaggcattggcaactatctgcgggcagagatcctgtaccagctgtagatacccccctttgagaaggaccagtcggacctggaggccctgcagcaacacatgccgagcccggagctgaccctgagccacaagataaggaccaagctgcagaatccagacctgctggagctatgtcactcagtgtccaaagaagtggtccagttgtgtgaggccaaagatggcagcaacctctgcttcagcaaaagattgtgtaaccctgtggcacttgtccctctctggacctgattcaccgatttgaaagttcgagccctagctgttactcaatagactaagacctcttactagtcaatagtggtttcaggctgggcgcaatggctcattgctgtaatccaacacttacgggaggcgagtggngtggcttaccttacgtcgggagactagaaccatctgtccacctgtgaaaccccactcttttgctccttccacagtgggggtgcgtggacttgacttcctg

SEQ ID NO: 714246 - DNA, 107 bp, Homo sapiens
tcccaagaatgagaaattgcggacaccccgagcgagcaccccaaagtgcacaaagcatgagtaaaaagctgcccccttcaaacagaactagactcagtttacaattc

SEQ ID NO: 714247 - DNA, 149 bp, Homo sapiens
cttaggacatagatacctgcaaaaaaaaaaagaaatgagttatggaataggaaccagttatgtgatgattctgaaactttaacttagagcttcattactttaagaattggaaaacaccctctgagttttgattccccaaagttttcatg

SEQ ID NO: 714248 - DNA, 4362 bp, Homo sapiens
acggcgagcgcgggcggcggcggtgacggaggcgccgctgccagggggcgtgcggcagcgcggcggcggcggcggcggcggcggcggcggaggcggcggcggcggcggcggcggcggcggaggcggcggcggcggcggcggcggcggcggctgggcctcgagcgcccgcagcccacctctcgggggcgggctcccggcgctagcagggctgaagagaagatggaggagctggtggtggaagtgcggggctccaatggcgctttctacaaggcatttgtaaaggatgttcatgaagattcaataacagttgcatttgaaaacaactggcagcctgataggcagattccatttcatgatgtcagattcccacctcctgtaggttataataaagatataaatgaaagtgatgaagttgaggtgtattccagagcaaatgaaaaagagccttgctgttggtggttagctaaagtgaggatgataaagggtgagttttatgtgatagaatatgcagcatgtgatgcaacttacaatgaaattgtcacaattgaacgtctaagatctgttaatcccaacaaacctgccacaaaagatactttccataagatcaagctggatgtgccagaagacttacggcaaatgtgtgccaaagaggcggcacataaggattttaaaaaggcagttggtgccttttctgtaacttatgatccagaaaattatcagcttgtcattttgtccatcaatgaagtcacctcaaagcgagcacatatgctgattgacatgcactttcggagtctgcgcactaagttgtctctgataatgagaaatgaagaagctagtaagcagctggagagttcaaggcagcttgcctcgagatttcatgaacagtttatcgtaagagaagatctgatgggtctagctattggtactcatggtgctaatattcagcaagctagaaaagtacctggggtcactgctattgatctagatgaagatacctgcacatttcatatttatggagaggatcaggatgcagtgaaaaaagctagaagctttctcgaatttgctgaagatgtaatacaagttccaaggaacttagtaggcaaagtaataggaaaaaatggaaagctgattcaggagattgtggacaagtcaggagttgtgagggtgaggattgaggctgaaaatgagaaaaatgttccacaagaagaggaaattatgccaccaaattcccttccttccaataattcaagggttggacctaatgccccagaagaaaaaaaacatttagatataaaggaaaacagcacccatttttctcaacctaacagtacaaaagtccagagggtgttagtggcttcatcagttgtagcaggggaatcccagaaacctgaactcaaggcttggcagggtatggtaccatttgtttttgtgggaacaaaggacagcatcgctaatgccactgttcttttggattatcacctgaactatttaaaggaagtagaccagttgcgtttggagagattacaaattgatgagcagttgcgacagattggagctagttctagaccaccaccaaatcgtacagataaggaaaaaagctatgtgactgatgatggtcaaggaatgggtcgaggtagtagaccttacagaaatagggggcacggcagacgcggtcctggatatacttcaggaactaattctgaagcatcaaatgcttctgaaacagaatctgaccacagagacgaactcagtgattggtcattagctccaacagaggaagagagggagagcttcctgcgcagaggagacggacggcggcgtggagggggaggaagaggacaaggaggaagaggacgtggaggaggcttcaaaggaaacgacgatcactcccgaacagataatcgtccacgtaatccaagagaggctaaaggaagaacaacagatggatcccttcagatcagagttgactgcaataatgaaaggagtgtccacactaaaacattacagaatacctccagtgaaggtagtcggctgcgcacgggtaaagatcgtaaccagaagaaagagaagccagacagcgtggatggtcagcaaccactcgtgaatggagtaccctaaactgcataattctgaagttatatttcctataccatttccgtaattcttattccatattagaaaactttgttaggccaaagacaaatagtaggcaagatggcacagggcatgaaatgaacacaaattatgctaagaattttttattttttggtattggccataagcaacaattttcagatttgcacaaaaagataccttaaaatttgaaacattgcttttaaaactacttagcacttcagggcagattttagttttattttctaaagtactgagcagtgatattctttgttaatttggaccattttcctgcattgggtgatcattcaccagtacattctcagtttttcttaatatatagcatttatggtaatcatattagacttctgttttcaatctcgtatagaagtcttcatgaaatgctatgtcatttcatgtcctgtgtcagtttatgttttggtccacttttccagtattttagtggaccctgaaatgtgtgtgatgtgacatttgtcattttcattagcaaaaaaagttgtatgatctgtgccttttttatatcttggcaggtaggaatattatatttggatgcagagttcagggaagataagttggaaacactaaatgttaaagatgtagcaaaccctgtcaaacattagtactttatagaagaatgcatgctttccatatttttttccttacataaacatcaggttaggcagtataaagaataggacttgtttttgtttttgttttgttgcactgaagtttgataaatagtgttattgagagagatgtgtaatttttctgtatagacaggagaagaaagaactatcttcatctgagagaggctaaaatgttttcagctaggaacaaatcttcctggtcgaaagttagtaggatatgcctgctctttggcctgatgaccaattttaacttagagcttttttttttaattttgtctgccccaagttttgtgaaatttttcatattttaatttcaagcttattttggagagataggaaggtcatttccatgtatgcataataatcctgcaaagtacaggtactttgtctaagaaacattggaagcaggttaaatgttttgtaaactttgaaatatatggtctaatgtttaagcagaattggaaaagactaagatcggttaacaaataacaacttttttttctttttttcttttgttttttgaagtgttggggtttggttttgttttttgagtcttttttttttaagtgaaatttattgaggaaaaatatgtgaaggaccttcactctaagatgttatatttttcttaaaaagtaactcctagtaggggtaccactgaatctgtacagagccgtaaaaactgaagttctgcctctgatgtattttgtgagtttgtttctttgaattttcattttacagttacttttccttgcatacaaacaagcatataaaatggcaacaaactgcacatgatttcacaaatattaaaaagtcttttaaaaagtattgccaaacattaatgttgatttctagttatttattctgggaatgtatagtatttgaaaacagaaattggtaccttgcacacatcatctgtaagctgtttggttttaaaatactgtagataattaaccaaggtagaatgaccttgtaatgtaactgctcttgggcaatattctctgtacatattagcgacaacagattggattttatgttgacatttgtttggttatagtgcaatatattttgtatgcaagcagtttcaataaagtttgatcttcctctgctaaattgatgttgatgcaatccttacaaatgattgcttttaaaattttaagctaggaaaagaaatctatagaaagtgttctgttacaaaatgtaactgttaccattggaaatttcacgtcataggaagttagcctttatctacccaactttcaagaaggttctttaataaagcgaaaactcaaccaaatggtacttttccacagtgtaccattaaaatatgcactagtctctttttacaaggctgtattcagcaagggcctaacttgcttaaagtgtaattactaacttctaaaactgtactttgattcacatgttttcaaatggagttggagttcattcatattacaatatttgtgtgctaaacgtgtatgtttttcagttcaaagtcatgatgtttttaaaatcttattaaagtttcaaaaatctgaagattgtttatctagatgtaaatttt

SEQ ID NO: 714249 - DNA, 195 bp, Homo sapiens
cacgaggggaggagaaccggctggacaagaatggtctcttcaacaatctccaagtcgccacagtcgccgatctcttgaggcagcacgcagaacaggtcgccgaggaccgaaagaaagcgcgtgtcgtcgttccgcgcagccatccaaaagattccttcctgcaggtcgtggcctcgcccgatgggaagtgggcgg

SEQ ID NO: 714250 - DNA, 4248 bp, Homo sapiens
acggcgagcgcgggcggcggcggtgacggaggcgccgctgccagggggcgtgcggcagcgcggcggcggcggcggcggcggcggcggcggaggcggcggcggcggcggcggcggcggcggaggcggcggcggcggcggcggcggcggcggctgggcctcgagcgcccgcagcccacctctcgggggcgggctcccggcgctagcagggctgaagagaagatggaggagctggtggtggaagtgcggggctccaatggcgctttctacaaggcatttgtaaaggatgttcatgaagattcaataacagttgcatttgaaaacaactggcagcctgataggcagattccatttcatgatgtcagattcccacctcctgtaggttataataaagatataaatgaaagtgatgaagttgaggtgtattccagagcaaatgaaaaagagccttgctgttggtggttagctaaagtgaggatgataaagggtgagttttatgtgatagaatatgcagcatgtgatgcaacttacaatgaaattgtcacaattgaacgtctaagatctgttaatcccaacaaacctgccacaaaagatactttccataagatcaagctggatgtgccagaagacttacggcaaatgtgtgccaaagaggcggcacataaggattttaaaaaggcagttggtgccttttctgtaacttatgatccagaaaattatcagcttgtcattttgtccatcaatgaagtcacctcaaagcgagcacatatgctgattgacatgcactttcggagtctgcgcactaagttgtctctgataatgagaaatgaagaagctagtaagcagctggagagttcaaggcagcttgcctcgagatttcatgaacagtttatcgtaagagaagatctgatgggtctagctattggtactcatggtgctaatattcagcaagctagaaaagtacctggggtcactgctattgatctagatgaagatacctgcacatttcatatttatggagaggatcaggatgcagtgaaaaaagctagaagctttctcgaatttgctgaagatgtaatacaagttccaaggaacttagtaggcaaagtaataggaaaaaatggaaagctgattcaggagattgtggacaagtcaggagttgtgagggtgaggattgaggctgaaaatgagaaaaatgttccacaagaagaggaaattatgccaccaaattcccttccttccaataattcaagggttggacctaatgccccagaagaaaaaaaacatttagatataaaggaaaacagcacccatttttctcaacctaacagtacaaaagtccagaggggtatggtaccatttgtttttgtgggaacaaaggacagcatcgctaatgccactgttcttttggattatcacctgaactatttaaaggaagtagaccagttgcgtttggagagattacaaattgatgagcagttgcgacagattggagctagttctagaccaccaccaaatcgtacagataaggaaaaaagctatgtgactgatgatggtcaaggaatgggtcgaggtagtagaccttacagaaatagggggcacggcagacgcggtcctggatatacttcaggaactaattctgaagcatcaaatgcttctgaaacagaatctgaccacagagacgaactcagtgattggtcattagctccaacagaggaagagagggagagcttcctgcgcagaggagacggacggcggcgtggagggggaggaagaggacaaggaggaagaggacgtggaggaggcttcaaaggaaacgacgatcactcccgaacagataatcgtccacgtaatccaagagaggctaaaggaagaacaacagatggatcccttcagaatacctccagtgaaggtagtcggctgcgcacgggtaaagatcgtaaccagaagaaagagaagccagacagcgtggatggtcagcaaccactcgtgaatggagtaccctaaactgcataattctgaagttatatttcctataccatttccgtaattcttattccatattagaaaactttgttaggccaaagacaaatagtaggcaagatggcacagggcatgaaatgaacacaaattatgctaagaattttttattttttggtattggccataagcaacaattttcagatttgcacaaaaagataccttaaaatttgaaacattgcttttaaaactacttagcacttcagggcagattttagttttattttctaaagtactgagcagtgatattctttgttaatttggaccattttcctgcattgggtgatcattcaccagtacattctcagtttttcttaatatatagcatttatggtaatcatattagacttctgttttcaatctcgtatagaagtcttcatgaaatgctatgtcatttcatgtcctgtgtcagtttatgttttggtccacttttccagtattttagtggaccctgaaatgtgtgtgatgtgacatttgtcattttcattagcaaaaaaagttgtatgatctgtgccttttttatatcttggcaggtaggaatattatatttggatgcagagttcagggaagataagttggaaacactaaatgttaaagatgtagcaaaccctgtcaaacattagtactttatagaagaatgcatgctttccatatttttttccttacataaacatcaggttaggcagtataaagaataggacttgtttttgtttttgttttgttgcactgaagtttgataaatagtgttattgagagagatgtgtaatttttctgtatagacaggagaagaaagaactatcttcatctgagagaggctaaaatgttttcagctaggaacaaatcttcctggtcgaaagttagtaggatatgcctgctctttggcctgatgaccaattttaacttagagcttttttttttaattttgtctgccccaagttttgtgaaatttttcatattttaatttcaagcttattttggagagataggaaggtcatttccatgtatgcataataatcctgcaaagtacaggtactttgtctaagaaacattggaagcaggttaaatgttttgtaaactttgaaatatatggtctaatgtttaagcagaattggaaaagactaagatcggttaacaaataacaacttttttttctttttttcttttgttttttgaagtgttggggtttggttttgttttttgagtcttttttttttaagtgaaatttattgaggaaaaatatgtgaaggaccttcactctaagatgttatatttttcttaaaaagtaactcctagtaggggtaccactgaatctgtacagagccgtaaaaactgaagttctgcctctgatgtattttgtgagtttgtttctttgaattttcattttacagttacttttccttgcatacaaacaagcatataaaatggcaacaaactgcacatgatttcacaaatattaaaaagtcttttaaaaagtattgccaaacattaatgttgatttctagttatttattctgggaatgtatagtatttgaaaacagaaattggtaccttgcacacatcatctgtaagctgtttggttttaaaatactgtagataattaaccaaggtagaatgaccttgtaatgtaactgctcttgggcaatattctctgtacatattagcgacaacagattggattttatgttgacatttgtttggttatagtgcaatatattttgtatgcaagcagtttcaataaagtttgatcttcctctgctaaattgatgttgatgcaatccttacaaatgattgcttttaaaattttaagctaggaaaagaaatctatagaaagtgttctgttacaaaatgtaactgttaccattggaaatttcacgtcataggaagttagcctttatctacccaactttcaagaaggttctttaataaagcgaaaactcaaccaaatggtacttttccacagtgtaccattaaaatatgcactagtctctttttacaaggctgtattcagcaagggcctaacttgcttaaagtgtaattactaacttctaaaactgtactttgattcacatgttttcaaatggagttggagttcattcatattacaatatttgtgtgctaaacgtgtatgtttttcagttcaaagtcatgatgtttttaaaatcttattaaagtttcaaaaatctgaagattgtttatctagatgtaaatttt

SEQ ID NO: 714251 - DNA, 112 bp, Homo sapiens
tctaaaggctcccccgaaacacacgcaggttcagattccacataacacattgtctttaagtgaaccaccattctgttcgagttttagctgtagtatcctagaagactatact

SEQ ID NO: 714252 - DNA, 637 bp, Homo sapiens
agccagcggcaggacagcgggcgggggcccacaacaaaagctggcagtgctgacagagtgcggcctcaggacggaccttctggctactgaccgttttgcttgtggttttccctggattgtgtgtagtgtgtgagatcaaccatgatgttcctgttgcatgtttatgacccaatgagagtttttgcttgaaacacctgaatgtgtggctgtgttcctgcagacaagactcagagagtttgcgcgactcataagatttcatgaaatgatgtgagatgtcgacaccatcacaaaccttcacaaaggatttgccgttcaccatcacacatttccatgcagaaaatgcatgcatttgccgttgggaaaggttgccacaatggagaccactgcatgggaggccatggtgggacacaaagaatccggaaccacaatcacaggcattcagtgtcaactcacgtctacgaggtgattaccaatgttacacccttgggaagggcagcatgaaaaaacgtaccatatggagtactgacatcccaagcatcttcggaacgaaacgcgatcgaaacacagtgacaatacacacgtactgtgccctttgaagagactcacgtgccgagacgcacagcctgtgatggacttc

SEQ ID NO: 714253 - DNA, 295 bp, Homo sapiens
tagcgttaggtatgagcctcggtgttaatcggcgagggttgggcaacgtgttgctagtctggtcgttggtgacagtgaggcttctgcgctcgctgctggtgagcagccccggcgtgccctggtggctggaaggaggcgtgtggcgtgatgcggccgtggacgcggactgagtgcgcgggagcccctgtgaggagccgggcagccgctgagcccctggtgccccgtgccgggctggagaacctggcctccctggagctggcgagcgcgcccggggcatggcgggcccgcaggaagc

SEQ ID NO: 714254 - DNA, 125 bp, Homo sapiens
agccagaccaagtgtttctagacttcactgctcccagatgctatgcatgaacttcttctccctcgtgtcatcgacggtcccttcatctttataatccatgtttcgacaatttataattatgtttc

SEQ ID NO: 714255 - DNA, 209 bp, Homo sapiens
gcactagcggatccccattatggacgttgacagctggtgattaatgatgctcgagttgctggacgtttgttctgccccaggggtgcttgaagatctcgaagggatgcattctgagccgagaatgtccactgtgctgcgggggggaaggacacattgtactccaccgccatgtagctcaggtagacaaccttctgctggaggtcctgcat

SEQ ID NO: 714256 - DNA, 889 bp, Homo sapiens
ggcactcttcaccaaggaagctggagaaagtgtacgacccaaagaatgaggaggacgacatgcgggagatggaggaggatgcgactgcgcatgcgtggagcatgtgatgaagaatgtggacaccaaccaggaccgcctcggtgaccctggtaggtagttcctcgcatccactcagaggaaggagtttggggacaccggggagggctgtgagacagtggagatgcatcctgcctacaccgaggaagagctgaggcgctttgaagaggagctgggctgcccggtgaggcagagctgaatgcctaaggcccagcgtcctcagccaggagagagatggctctagggcggtcccaggccgtctggaggcccatgaagagagagctggatgtaggctgtgctgcatcatggagcatgcggaagcagcgagctagtcagcagcgagcaaggccatgaggtcccggggtgcccaccctgaggggcagctcatgttccaaccaagaacacatgacgatgtaactgttccaggctccagccggtgaccagcacaggtaggtggacacttcagaacagaaattctcgagcggtacctgaggttgaggtgcccagcatctgtgatcctccggggacccccagcccctccggattcctgatgctccaaggcgactgactgggcgctggatgaagtggcaccgtcagcttccctggggggccggtgtcatgttggggctcctggggccggggcacggcctggcatttacacgcatttgttgcacccaggatggccgtttccatttcagcggtttcaagtttgtggttctccttctgttccacgagggtgccttatctcggtccggcgaggcagggtcggcttactttagagcgcgccctacct

SEQ ID NO: 714257 - DNA, 495 bp, Homo sapiens
  misc_feature (1)..(1): n is a, c, g, or t
  misc_feature (7)..(7): n is a, c, g, or t
  misc_feature (14)..(14): n is a, c, g, or t
  misc_feature (44)..(45): n is a, c, g, or t
  misc_feature (71)..(71): n is a, c, g, or t
  misc_feature (80)..(80): n is a, c, g, or t
  misc_feature (105)..(105): n is a, c, g, or t
  misc_feature (107)..(107): n is a, c, g, or t
  misc_feature (137)..(137): n is a, c, g, or t
  misc_feature (246)..(246): n is a, c, g, or t
  misc_feature (329)..(329): n is a, c, g, or t
  misc_feature (382)..(382): n is a, c, g, or t
  misc_feature (411)..(411): n is a, c, g, or t
  misc_feature (429)..(429): n is a, c, g, or t
  misc_feature (479)..(479): n is a, c, g, or t
ncccctnaagttanccgttgaactcgaagccggggcataggccnncggatgccaatgtcagaaatccgggntcctggttnaggttgaaccccgggggtcagcatngnggccccagacgcaggggccagcgcgggttngcccttcgctccgcgggcggtcccaccaagcaacttttttccaattttaccttttcaaaataaaagatgtttgggccaggcgcagtggctcacgcttgtaatcccagcnctttgggaagccgaggcgggtggatcctgacctgaggtcaggagttcaagatcagccccgccgacatggcgaaactccgtctntactaaaaatacaaacatcagccggacgtggtggtgggcgcctgtaatccccnctactcgggaggctgaggcaggagaatcncttgaacccgggaggcanaggttgcaatgagccgagatcatgcccctgtactccagcctgggtgacanagtgagactctgtctc

SEQ ID NO: 714258 - DNA, 376 bp, Homo sapiens
tactccgacacgtcagctattagaagtaaacatttaaacttgaacatgtaagatctctggttgctacacatctcaccagtattgaggttagcaatccttaagttttgcatgctctggtgggtgcattctatactttactattctttttttttgagatggagtttcactctagcctgggcaacaagattgaaactccgtctgaaaaaaagccctgccgcccccgccccccaaaaaaaactatgcagacaataaaacagtcagttacctggagtttggagcagggagggatgaatagttggagcacagggagggatgaatagttggagcacagggaaggatgaatagttggagcacagtgaaattattctgtatgtta

SEQ ID NO: 714259 - DNA, 317 bp, Homo sapiens
  misc_feature (137)..(137): n is a, c, g, or t
  misc_feature (150)..(150): n is a, c, g, or t
  misc_feature (296)..(296): n is a, c, g, or t
  misc_feature (305)..(306): n is a, c, g, or t
cagctttgatggaacaacgctttttttggaagttcaaaagggctgtcgggggggtggccctgattttcgcttgttttgtcatcatttgtcaacgacaattggacaaaaaggctttggaaaaggtccggaaacaaatngagtccaaatagntacattccccccttgtattgtgggttttaaagaccctatttcagacagtgaaagtgaaaaggactgatttgcccttttggttttttggaaccttgggggggaaaccccttttccccatttttttttttcagatcattaatgagcanaataaaaanngttaaatggga

SEQ ID NO: 714260 - DNA, 348 bp, Homo sapiens
gtcgacttcatatgtatgttgtatgtgtgtgtgtatctctgtgtgtttgttgtatgtgtatgtctttgtgtatctgtgtgtgtcatagatgtgtgtgtatctatgtgtgtgttgtctgtatgcttctgtctatgtgtgtcagtgtgtgttgtctatgtatatgtgtatgtgtatgtctctgtgtttgttttatgtgtgtgtacgttctcagctcatttctattcttaagtcccatagacctgctcatcctgggcttccattgatttcatcttcatcttggcctccttgagatcacccagtccccaggggaccatgggcagggtgatctccagagggattcaggtcgac

SEQ ID NO: 714261 - DNA, 425 bp, Homo sapiens
taaccgaccgaacatactccaggaaggcacggaccgccggagcgcgcaagaagatcacactagcaggatcggcaggccaagccaggccacggccattgcacccatggggggcccaggtgaacatagctcgcgaccaagcagagaagagaagatgagggacatcaccagaggccagaccagaagacctcgtgtgtgcccccgtccggtgtctgcctgtctgcagctgttgtccacaccaagggtggcctacagagggaagtgaggatccttgggacttcgctccaggacagaccctgcgactgtcgcaaatctgccagctctgcatggcagaggctgcctaccagtacaagcccttgtatccagctttctgtgcccgtagaataaacttctgctgggattgagccactcagcacttctgtggctgg

SEQ ID NO: 714262 - DNA, 608 bp, Homo sapiens
atcgatgagatagattgtcatcatatgattgttcgtcatatcctagtgcgctccctggtacagtcacggtgtgcctttcgagtctcctgagacccatacatgaccagttcggtccgtatcttatagcacctagactagcagcactaaaaataggtcgaatagggaccagtactggatctcgatgaagacttaaaagtgcctaccacgattcttgaacggataaataggccctacagatagtatgacctacaattaccttcatggattgacctcagattaccatgccgagttccatccgttaccatagcagggccactcactacaattacaggatatgcttgagttcatattcgctcttgactgtgaacctatcgtacatgcggcctcgaaaacaagggccactccatttgaatgtcatcctctttgcctgactagtccttctcatctttcagatgtcattttagtgatcgtttcctctgggaagccttctgtgacctaccaaatgtaagtcaataccctccctatgtgctccaataacactttgtacttttttttttacaattcgaagctgtcgggctttcggggctgtcgggctaatcggggctgtc

SEQ ID NO: 714263 - DNA, 145 bp, Homo sapiens
attcgcggccgaattgaccaaactctgatttccgtgggggaatgtcatggtcttgctattactaagttttgagactggcaggtaatgaaacttattaggctgagaaccctgtggaatgcatttgacccaactgataaaggaagtt

SEQ ID NO: 714264 - DNA, 864 bp, Homo sapiens
gtggtctgtcgggccgctacctgccggggcacaagtgctattgcgcgcccgccgctcgccgggcctgctgtggacgccagccttgcggagtacggcaaccttcgctcagtgcgctccagttcgtgcctggagactgcaggttagcctgctggacaacgtgcctgctgtggtggcctcctgagcagtcctctcagcccacattgcactggtgggaagtgtggatttgatgttggcagcctgtttttgagactgatgaagcaataatggggcaggctacttttttggagcatctggctttcaagggtgaacaaaaagaatcgggccttggcagtgccctggacgaattgatgcgtggaagagcatgggggcccatcttaattggcctacatgcacccgtggagcacacagtcttaactaccatcaatggctgcttgtccaagggatctgccgaaaggctgtggacgctcctgggtgacatatgtgcaggaacttgtaaggtcgtgggcagacctcacatgatttgagaagggcagcgttgatgtggaatccttgcgggagacttgcacggacacattggatgcatctattgcgagaatgtggcccttacactaacatgcattgccccaggcattacattggtgccaacacttctatgtcaccagtgcttcttgaggtgtgcccaattcagaactgtcaaggcagctgatatcgtcgcggacttgaccggaataatcttcaacaccattacaaggccctcgatgttgtggcagcagtggattgattgggcccagtagctgttactcgccagaagacctgtggctcgtgaaattcgggacgcgcccagatatcaagcgacggagggac

SEQ ID NO: 714265 - DNA, 449 bp, Homo sapiens
  misc_feature (6)..(6): n is a, c, g, or t
  misc_feature (403)..(403): n is a, c, g, or t
ctgaangcagcctgctgagcagagcagtggtacccagtgcttggccccctaaactattctttcctcctacggctgtggacctgtgaggctaggggctgtctccaagttctctgagattgcctttgaggccttttcccattgtcttggatactagcacttggctcccatttagtcatgctagtttctctagcaagtagttgctccataccctgctgggattctttctctgccacatggccaggctgcaaatttgctgaattttatgctctgcttcccttttgaatataagttccaactttaagtcattcctttgctcccatatctgatcacaggttgttacaaggagtcaggccacatcttgaatgctttgctgcttagaaatttcttctgccagagaccctanattaccactcttaaattcaaacttccacagatccttggtacatgaa

SEQ ID NO: 714266 - DNA, 279 bp, Homo sapiens
  misc_feature (2)..(2): n is a, c, g, or t
  misc_feature (17)..(17): n is a, c, g, or t
  misc_feature (26)..(26): n is a, c, g, or t
  misc_feature (30)..(30): n is a, c, g, or t
  misc_feature (69)..(70): n is a, c, g, or t
  misc_feature (88)..(88): n is a, c, g, or t
  misc_feature (91)..(91): n is a, c, g, or t
  misc_feature (109)..(109): n is a, c, g, or t
  misc_feature (111)..(111): n is a, c, g, or t
  misc_feature (129)..(129): n is a, c, g, or t
  misc_feature (132)..(132): n is a, c, g, or t
  misc_feature (137)..(137): n is a, c, g, or t
  misc_feature (162)..(162): n is a, c, g, or t
  misc_feature (184)..(184): n is a, c, g, or t
  misc_feature (188)..(188): n is a, c, g, or t
  misc_feature (220)..(220): n is a, c, g, or t
  misc_feature (231)..(231): n is a, c, g, or t
  misc_feature (233)..(233): n is a, c, g, or t
  misc_feature (259)..(259): n is a, c, g, or t
gnacgagccagcctggnaaacacggnaaanatgtacaaaaaaaaaaaaaaattagccaagtgtggtggnnggcacctgtaatcccagnaantcaggaggccgaggcggnanaattgcttgaacctgggnggnagagngcttgcagtgagccgagaccgcacnactgctttgtagcctgggcaanagantgagatgcatttcaataaaataataaactatnacatgtaaccncnaaatatgtacatcattgtgtatcaanaaaaataaataaatgtgaat

SEQ ID NO: 714267 - DNA, 292 bp, Homo sapiens
  misc_feature (227)..(227): n is a, c, g, or t
ccgttcaggcttgattgaggcagttgaggtggattaaccaaaccagctacgcaaaatcttagcatactcctcaattacccacataggatgaataatagcagttccagcgtacaatccgtaacataatccattcttaatttaacgtatttatattgatcctaatctactaccggcattccgtacatactcacacttaaatctccagtcaccacagaccctcactactnatctctgcgcgctgcaatcaatgcctggtaaggcggatccttctaggagtcgacctcgcagcgca

SEQ ID NO: 714268 - DNA, 410 bp, Homo sapiens
caggtggtgtgctagatttggcccatagtccaactgtactttctgtgatgatggaaatgttcaatatttcctcaattgtctaatatggtaaccactagccacatgtggctactgatcatttgaaaggtggttacatggactgagaaactgttttttttttttttttttgagatggagttttagtttgggaagaagaagtagttctggaaaagggtagtgatggttgcacaatcatgtgaatgtacttaatgctactgaactttacaaataaaatgatcaaaatggtcaggtgtggtggctcatgcctgtaatcctagcactttgggaggtaagattggacgattgcttgaggccaggagtttaagactggcctaggaaacatagccagtccccatctctaccaaaaaaaa

SEQ ID NO: 714269 - DNA, 485 bp, Homo sapiens
  misc_feature (19)..(19): n is a, c, g, or t
  misc_feature (38)..(38): n is a, c, g, or t
  misc_feature (236)..(236): n is a, c, g, or t
  misc_feature (248)..(248): n is a, c, g, or t
  misc_feature (318)..(318): n is a, c, g, or t
  misc_feature (368)..(368): n is a, c, g, or t
  misc_feature (398)..(398): n is a, c, g, or t
  misc_feature (439)..(439): n is a, c, g, or t
gactttgaacttgaaaatncaaggaaatgtagaaaatncaggaacttgtgaaagaaaccaaggatgttagtgactctgacaaaagacagactgattttgtgaaagacttttattctcggactttcaggatggaaggaatgacacttgaccctcatcaggttggaatgacctcttcctagaagtcttttgaaattacagatgttaaacccctaaaggggagaccatctatccagggncaatagggaagnaatcgctgggcaaaggagggaaaaaccaaattcaccatagaggaatgtgacacggacaaggatagttttnggctgatgtgaaagttcacatccttgggctccttccaaaatatcaagatngcaagaactgccatttgcaacctaatcttnggaaatctccttccaaggtttatggcaatattcgagctgtngctagcagatcagcagatcgattctgatttcaagtcagagactttt

SEQ ID NO: 714270 - DNA, 247 bp, Homo sapiens
aagactctcgagacccccggcacgagcacaggctcaaaatgcgtccagtactgctcagctcagcccaaaagtgaccaggcttgcttacagtaggcctcaaaatgtcgaccagcacttgctagctcaggctccaaaatgtgaccagcacttgcgcaggtggagctgaaaaccgcaccaggctcatgttcattccctactcaaaaactgaaactgcactctcagacgcgtaagtccttaaaaaggggcc

SEQ ID NO: 714271 - DNA, 751 bp, Homo sapiens
cgcagtggctcacgcctggaatcccagcactttgggaggccaaggcgggcgaatcgcaaggttaggagtttgagaccagcctggccaatatgttgaaaccccgtctctactaaaaatacaaaaattagccgggcgtggtggcgcgtgcctgtagtcccagctacttgggaggctgaggcaggagaatggcgtgaacccgggaggtggagcttgtagtgagccgagatcacgccactgcactccagcctgggcaacagagccatctcaaaaaaaaaaaaaaaaaaaggaaattaaaattgcaaggggtttccaaagttttccttgttttgtgccctttaattttggtgcccttccaaccccactttggggtctgcacttattttttccccagaatttactctctaaaattattgaagggccctaaggtggggatatccttcaggggtaagagcgtcctataaggagggatgtccgggctccttgcaggtacgggagaaaagctcgggcgggcactttccagtttgacaagtattcccttcggggaccagggcgctttcacacggttgggtcccctataacgacagaaattcgggtattcggatccagcaatacagcattgtctacaactccctgtttcaagtgggactgtttctcgaatcagactggtgtgggttttcccccaaattttggtggggtaattgacacaatttccctactttatcaccgtacctacggcgtggaccagaaatcc

SEQ ID NO: 714272 - DNA, 91 bp, Homo sapiens
aattcaagcttctaacgatgtacggggacatggactcacagggtcctgtgtggttacatcttggaaaaaatgcagatgtatttcactctca

SEQ ID NO: 714273 - DNA, 332 bp, Homo sapiens
ggggccccccgggccattttttttaaaaaaaaaagttttaccaggggggggtggggtccccgccccccccctggggccccctttgggccctggcccggggtggggccaaggggcttttccaagtccttaaaatccctttataaaaaaaaaaaggttttttttccattagccccccccaatggggttctaattgggccccccccgccccccggtgggtaggggaatttggccgggttttttgggtttccctttttgccggggggggaaaattggtattttttgaaaaaaagaattgaaaaccccccatggaaaaaagggttttttttagggga

SEQ ID NO: 714274 - DNA, 223 bp, Homo sapiens
  misc_feature (82)..(82): n is a, c, g, or t
tgtggtgtaccgtagcacatacgttttatgttggggagtgggcagcagcagccgaggggtatgtagagatgaaaaagacagnccccgcctccgtaatagaaaggaaatgaggacaggctacgttttgaatgtggaggggtctgaaaggaaaagcttcagatcgtgactcaaccgaatcacacaacatgccggagcaatgccgtgctcttggaaggtggaattc

SEQ ID NO: 714275 - DNA, 841 bp, Homo sapiens
tccgaaaaagagtttggctctgtgtcccccaggggggggtgcggggggtgatctgggttcagtggcaaccttctggcctcttcccgggttcaaggcgattctcctgtgccttcagccctcccagggtacgcggggattcacggggtgctcactattagtgcccagctaatttgggtttttcaatagagagggagttcgccgtgtggactcagggtgggccctcggactccgtgacctcgggtgactccacccgcctcggccttcccgggggtgcggggattacgggcttgagcctgcacgccgggccataaaggtcacttttcaacgggtgcctcaaagacaataattatactctggtgtacccagagggctttatttcactttacccggaatacaatcttataagcttggtccccacaacaaattattctccaagtcaaaatcatttttaaaggaccctcaggggggtcaaaaatttccctaacatatatgggcaggataggatgtttagaccctttaaatgggtgcagatatccaattcccggattccgtcccttttatccgaaaagtggaaacttttaccagaggggtatggccaagtgaactcaccctggttggtgggacccggtggaacgcactgacaatatggggtcattccaaagcgccagaggtatcgacggcaagggtggcatgtgtgtgccttggaacccagagaaaagaaaattgttgggcccggatataaattggcggccgagaagagatggcagcgaggataggtgaacagcggggcgctgttggtgcgcttccccgccggtaaaagagaggatagtactagtaggct

SEQ ID NO: 714276 - DNA, 270 bp, Homo sapiens
  misc_feature (15)..(15): n is a, c, g, or t
  misc_feature (33)..(33): n is a, c, g, or t
  misc_feature (58)..(58): n is a, c, g, or t
  misc_feature (99)..(99): n is a, c, g, or t
  misc_feature (162)..(162): n is a, c, g, or t
  misc_feature (201)..(201): n is a, c, g, or t
cggcacgagcggacngagacattgcagaagctntgcccaggggggcagctcccattcntgctgtatggcactgaagtcacacagacaccaacaagattnaggaatttttggaggcagtgctgtgccctcccaggtaccccaagctggcagctctgaaccctnattccaacacagctgggctggacatatttgccaaatttnttgcctacatcaagatttcaatcccagcactcaatgacaatctggtgaagggctcctgaaggcctgagg

SEQ ID NO: 714277 - DNA, 1047 bp, Homo sapiens
tgcttaagctcttcttggcacaagagctttagtaagaggggaatgcaaagggaagccctgttagaaattagagtcttgagcggacagcactcaactaggcctgttattatgtatgaggtagaattgctacataattatcatgggaacatgattggtctgctgtgtagttatgaagttcatgtagcaaagaacttgttacgatgggattctgctcattgtattaaaaagctactgacttgactgtcatcctgttcttggttaggccattgtgaataagattttagtgttgataattctgttatgttacatatctctaatttagttatgaaattcaaaggtgaaaataaccaaatgatgtgcctaagataaaaagtttaccaaaaccaaaataatataattcgtggagacaaagtccaaaaagtggggcgcgaggtggcaactgacgacttcttcgccccgaggggggcccaaagttaagcagttccgcggagccattgttgtgctaacccaaggagggctccccagagggggagaggggcagagacactaacacgcataccgccaggcgcgcgcgtggactcttaaaaaaccgggggtatggcggcgccaaataagctccagccggagggacaatttccgggaaaagagaggacgaaggcccactcggggagtggcgcgagaagatcacacggggacgaatgttaccaaaccccggcgaattacccgcatccccccgggtgcaacacttgaccaagtttcgacagggcagcaaacaagcggtgtccacgacacgcggcacacaattacagcgcacagttaaggacaaccttgggaggactcccgggaaagaaaagggagaccgggaaccactggtcactgacgcggagcgggaagacaacgaagaaacatagttgagacccaagaaaatcaagacgaagagaaaccccaaccagaacacccccgctgggggagcgagtaacaggtgaggacaaatggggggaaaaaccccgggggacaaaaaaacaacgggaaagggagacacgggac

SEQ ID NO: 714278 - DNA, 264 bp, Homo sapiens
  misc_feature (26)..(26): n is a, c, g, or t
tgatctagaggatcccagggggaacntcacttatgaatgatgggaagagtgaggaacgggagacgtgattacagataactcgtcagggagtttggctgtttaaagaaacaaatgccgtagtagttagaagtggatgtgaattgtttttgttaaggaagatatcatagcatgtgggtaagactaaggggaatgatccaatagaaagagacggctagagagagatgatgtggatgatgtaagagagagaagtgatggttccccgcg

SEQ ID NO: 714279 - DNA, 433 bp, Homo sapiens
  misc_feature (83)..(83): n is a, c, g, or t
  misc_feature (96)..(96): n is a, c, g, or t
taaatggaatgcttgttgccctgttcccaggcgagtggctccatgagactgaggccacacttgggggccaatcagtggtttcntccttctttctcntccaacaccccccaaccttggtgccttaaaatcgcccctggacaaagtttctgggcaaaggggaaaacagctcccaggccttactcaggcctcaggtccatgggttgggcagccagtttgggcccttttcaggatcctcatttccatcctcatcctcttccttcacagcatttacttggagctttttgtgacacaccatgtcagtcatgatgaatcggccaacagccagcccttgccagctgacgtcccagtttaaaatgggaaactgtggtacaaataaacatgaaaaaagcttagcagtgattgaggtggtgactaaatatacagtccttgaata

SEQ ID NO: 714280 - DNA, 188 bp, Homo sapiens
taaaagatggggtctccctcggttggcccaggtggaagtgcaggggcgtggtaagggctcacggcagcctcgaattcctccgggtctcgggcgatcctctggcttgggggtcccgagtagcggggactaagcgtctctgccaccacgcgcggttgtatctagaatattttctacccaaatatatgttt

SEQ ID NO: 714281 - DNA, 217 bp, Homo sapiens
ctcaaatggatcacaagacttaaatgtaaaaagtaaaactataaaagtccataaaaataaaaaaaataggaaaaaatcatgtcctttgagttaggcaaatttccttaaactcaaattattataaaatatcataaatcattataattattatcttggtttactgcaacccctgcctcctgggttcaagtgattctcctgcctcagcctcccgagtagc

SEQ ID NO: 714282 - DNA, 533 bp, Homo sapiens
  misc_feature (362)..(362): n is a, c, g, or t
  misc_feature (499)..(500): n is a, c, g, or t
ctctctcttgcccaggctctagtgtaatgacacgatatcggctcactgcaacctctgcctcttgggttcaggcgattctcctgcttcaccctcccgggtagctgggactacaggctaccgccaccacataggctaatttttgtatttttagtagagacggggtttcgccctgttggccaggctggtctcgaactcctgacctcaagtgatccgcccgcctctgactcatgaaatactgggattgcaggcatgaaccaccatgcctgacctgttctaccatctcttttataaatattggtctgcttctctttgaagggttcttattctagtagtagaataagatagaataagatcatgtttgntatctctgtattgacaggcttataagtggctgttgattgaatttaaagagaataaataaggtatcattcagatatttgaaatcaatttctaaagtgacagtaaattattttagttatctccctgacctttgactgcnncagagcagctttggaatacaaagaggtggagaa

SEQ ID NO: 714283 - DNA, 123 bp, Homo sapiens
cacatagctggttactgaggtctccatacggcagactgtattcctgcccatcatgtctggaagagcgtgggcccaaacacaattgccaggttgtgcacgttcatctggttcgtgtctgagaag

SEQ ID NO: 714284 - DNA, 607 bp, Homo sapiens
ctgctgctcttctctcccattgaattatagtgctaagtacatggtcacatctgtatcccgcacttggagccaaggacagagatcactgagcccagagttcaaggtgcagcgatctgtgattgtaccactgcactccagcctgagtgatagagacactctctaattttgagacagagtctcgctctgtcgccaggctgaagtgcagtggtgtgatctcggctcactgcagcctctgcctcccaggttcaagtgattctcctgcctcagcctcccgagtggctgggattataggcacccaccaccacgcccagctaatttttgtatttttagtagagacggggtttcaccatgttggccaggacggtctccatctcctgacctcaggtgatccgcctgccttagcctctcaaagtgctggaactacaggcataagccaccgcacctggccaaaaattttttagaaaaccaacaatttaatacaacctcatgagtcaaaagtgatacatggagctaggcaccgtggtgcacgcctgtggtcccagctgcttgggacctgaggcaggaggatggcttgagtcaaggagttcgaggccaccctgaacaacat

SEQ ID NO: 714285 - DNA, 642 bp, Homo sapiens
atggaggtgctgcggcgctcttcggtcttcgctgcggagatcatggacgcctttgatcgctggcccacagacaaggagctggtggcccaggctaaagcactaggccgggagtacgtgcacgcgcggcttttgcgcgccggcctctcctggagcgctccagagcgtgcctcgcctgcccctggaggacgcctggcagaggtgtgcaccgtgctgctgcgcttgggagatgagctggagcagatccgtcccagcgtatatcggaatgtggcccggcagctgcacatccctctgcagtctgagcctgtggtgactgatgccttcctcgctgtggccggccacatcttctcagcaggtatcacatggggcaaggtagtgtccctgtactcggcggctgcgggactagcggtggactgcgtccggcaagctcagccagccatggttcatgccctggttgactgcctgggggaatttgtacgcaagaccttggctacctggcttcggaggcgtggtggatggacggacgtcctcaagtgtgtggtcagcacaaaacctggcttccgctcccactggctcgtggccacactctgcagctttggccgcttcctgaaggctgcattcttcctcctgttgccagagagatga

SEQ ID NO: 714286 - DNA, 610 bp, Homo sapiens
gaaaatactcactgcgctggaaaaaatataaataataaatggccgcttcggcggcctgtttctctgtttgaacgatgactaaatagtgactgcgaaatgagataagccgttctcaaggcgtcctgcgccccaaattcgtgggaatttattttactaattcagatgatcaaatttactctaaaaggagtgaagggatgtctgatataaaccatgcaggttctgaccttatatttgaactggaggatcgccctccctttcatcaggctctcgttggtgccattacccatctgttggcaattttcgttccgatggtaacccccgcgttaatcgtgggtgcggccttacagctttccgctgaaacaactgcctatcttgtttctatggcgatgatcgcctctggtattggtacctggttacaagtaaaccgctacggcatcgtcggttctggcctactctcaattcagtcagtcaatttttcatttgttacggtcatgattgcgctgggcagcagcatgaaaagcgacggttttcacgaagagttaatcatgtcgtcgcttctcggcgtctccttcgttggcgcatttctggttgtcggatcttcatttatctt

SEQ ID NO: 714287 - DNA, 93 bp, Homo sapiens
aagacagcagcatatatctctgcagcgttgaaggggccgggacagggtcctcacgtgagcagtacttcgggccgggcaccaggctcacggtca

SEQ ID NO: 714288 - DNA, 280 bp, Homo sapiens
  misc_feature (10)..(10): n is a, c, g, or t
  misc_feature (92)..(92): n is a, c, g, or t
  misc_feature (128)..(128): n is a, c, g, or t
  misc_feature (147)..(147): n is a, c, g, or t
  misc_feature (201)..(201): n is a, c, g, or t
  misc_feature (203)..(203): n is a, c, g, or t
tttttttganacacggtcttgttctgtcacccaggctgtagtgcagtggtgctatttcagctcacttgcaggctcaacctcctgggctcaantgatcttcccagctactcgggaggctgaggcagganaattgcgtgggcctgggangaggaacttgcagtgagccacaatcgcgccactgcactccagcctgggtgacanantgagactctatctcaaaataaataaataaataaataccacttccataaacaaattgccaaaaatgatgctgagggaa

SEQ ID NO: 714289 - DNA, 1418 bp, Homo sapiens
  misc_feature (606)..(606): n is a, c, g, or t
caagcagacccgggagcagatgtatagcatcgagcgactctgtgtgttttctgcacgagaattaggtgcattgatgagcatattactctctccccccacccctgcccacctatcatgtcctgctaggcagggggagtggcctgggacaagtctagccttagagcacacttctaacggaccgtaggcctgcatcaaagtagttatgcaatgctgccaatgatctgatgaaagactgtgcaaaggcggtgacctgagacccgtaacttcatttgagtaggaaccacatggtagaacggatggtgaccatcgctatgtgaacaactacacgaaagcagtttcgggaggatgaagatggtaggtgcgacctgcactaccatgataggagatagctcgcagtgtgacctggactagcgcatgagggtggggatccgcgtacatctatacccagctgcctcgctctcctgggccgaattctacctaaggaaagcatcagctcaaggaaagtaaagtgttcgatactaacttctcatatggggcattgcaaatggtgaagctgagcagcgcttcgcccggtgatcgtggggaagctaaacttcccttcgcagncattttgcagcaatagctactgtatcaatggactgctgctccccgtaccgataagcgaaaggatcaagagttcccttcctgtcttcccctgaacaagggggtaagtcgctcgtcacgcatactattgctgggagggcccgaaaaaggacccccactagaggggccaccaagaacgcgctcaagaacctgttggggcaatagtactggtcctgaggcagaactctattgcgtaggtactcgaccttacccgagacccagttgcctaccggtccaagcgaaagggcatagaccgggagtagggggttcgcctagacctggaacatgcctccctattggaaacgtcttcgcgtatggggccgggactaggggtacactcgacgggcccgcctaggggagacccccctgatctgcctgttcgccttccccttggggaccccgctggtcgtaggcttcctatgtgcggcccttttccaatagatgccttttatcctctcgttcgcctgttggtaacttgggggtcgcgttgacggggtaagccttggcgtcccgtggccaacgcatggcccacttgcctggcttggacccgctccttgaggcatagactcctccattggggacgcgcgcgaggttttctccgggcccctcctgcccggaacttggtcccgcaattggggtgtcccgctctttcccacgctttgcgggacgctctcctttttccttggagcctttgttgacaccctcacgatttgggtccccgcccgtgcccttctccctggtggcctccacgaaggggctatgctgcccgttcacga

SEQ ID NO: 714290 - DNA, 545 bp, Homo sapiens
gaaaagagtaaccacagtcccactggtacttatcgtggggagcgggcaggtgtgaggtaggagggccggtatcgcctgatctgtccaggaacctcaatcttccagtgaggtgctcgaatttggggttcacaagaggagaagccagcgactgcagactggtccatggtgtcgatgaggttcttgtcgctgtaggagaggcgcgccttctcgtacaggaactcctggtcacagttactgtagtctctgcgtgacttcactttgggcctgacgggtggctccaacctccgcttttccagcagagtccagtaaatggtctagaagaaggggtggatagtgatgtatcccgtcactcccagcctcttggttggttccctttcaaagagcttctccaggatgtccttggactccttggtgaatccagcgggcataatgtggcgtgtccacccgggctggactccgaagagtacatcctcatcatcaaccatggaaggtggactggccaatgagcatctcgtacaaaaggacccggaagaccacagtccaca

SEQ ID NO: 714291 - DNA, 698 bp, Homo sapiens
ccacgcgtccgctcgctggcctactctctcctcccggtacggcgcctggaatcccagcgtccacttaccatggccgcggcataccccgaccgtcccccccgacatcccgaccacccctgctctctcatggctcttcagtgatccaatgtccgctccgccctattaagcgggtctacgttgcctgtttgcgacggccctgcggacttcgggtcccatgacacgcggggactccggatggcttcctgtgcggactccgcgaggccaaggacgggagactgtggcagatactcctgaggctgcattcggcgtgaacgacctgcaggccggacgctacgccgacattcgacaaaactctcgtgatcacggtgaacgatcacgtgacagaacgccactgagcagcagcactggctcaaggacgacaatacctatactactcacatgccaccgcgctagcagcaagattcttccgagcgcccggcgcgcctacgtggcggccctgcgctggcgggctatggcgatatactatcacatctaccgctacatggccaggcacgcaccattcatctggcaggatctctatgtgatgccggactatcgggccccaagcgactaggaaccaaaataatcacaaaggagcgcagagcgaggccatggcatagcggatgctcccacatcccgccaggcccgcctggacagca

SEQ ID NO: 714292 - DNA, 231 bp, Homo sapiens
tgactacattcttactatatatccagcatatacagtaatggatatgttaaccttaaaagaaactgccagttttccaaagtggttggagtagtttctgttccctccagcagggtttgagcattccagttgctccacatccctgccaacatttggtattttgactttttttttttttggaaaatggattctcgctttgtggccaagcctagcaacgggggaaaaccccttgtc

SEQ ID NO: 714293 - DNA, 520 bp, Homo sapiens
ccgccttttttttgtttttttaacaaaattaagtgtgcttagagtcattcctctacatgggctgtggttgtcagcccataggttggtcagttcacatcaaaactgtgggtataacctgttgaacccaatcacattaaaatattaaggtgggcacaggggtgtgcctctgtcgtcccagctactggggaggctgaggcaggaggatcgcttaagcacaggagtgggaatccagcctgagcaacagagcaaaaccccgtctctaaaatacaagataaaatattggtgtagcttttggatacaactggactacagcggtcagtataaaatacatgtcgcttttaaggaagtgcttcttcagtgtatctaacagagggaagttattggcatgggataagagcatttatatatgctctcgtatgcaggggttaattggatttcgtgtccatatctggtcaaactaggtttcatactcctaatttaactctctaagctacaaggcttaaacacttggcataccaaa

SEQ ID NO: 714294 - DNA, 347 bp, Homo sapiens
  misc_feature (40)..(40): n is a, c, g, or t
cgtataagcgcaggtcgtgtctgtctactgagcgagcttngtgagcatcaggaagagatggagaagatctctcactaaaatgcggtgatgtggtggtaaattgcagtccatccagcggggccttctgggctgcctcaagtacctgtacacgggggagctagatgagaacgagcgtgaactcatgcacattggccacattgctgagctgctcgaggtctttgatctgcgcatgatggtggccaacatttctcaacaattaggccttcatgaaccaggagatcaccaaggccttccacgtccgccggaacaaccgggttaaaggagtgcttggccaaaagggcaccttc

SEQ ID NO: 714295 - DNA, 106 bp, Homo sapiens
cggcattggggactcaaggcctccatctttccaccctagggtgtccagcagccatgagaatctggagcctgagacagaaaccgagtcagtagtgtcactgaggcgg

SEQ ID NO: 714296 - DNA, 560 bp, Homo sapiens
gacatcgaactgcgggcccatctgaggacggcgcagatgcgcgccgccggccacccgccgcacctggtctcgcgctcgtccagccgccacatgtattggagcgaggcgcagatggtcacccaccacaccatcaacgggtgtgacctacgcccgggcgacctgctcggcaccggcaccctgtccggacccaccccgggttccgaaggcactctgatggagctcagtcacggcggaaacgaccccatcacattgcccaacggcgaaattcggacgtttgtcgaagacggcgacgaagtcctgctgacggccagagctcgccgcccaggcgccgccagcatcggattcggtgaatgcgtggccgtggtccaaccggcgatcacctacccgtgacttcagcggcgtcatgcatcaggcggtgcgccatctcgtcgtccacgtcggcgaagaagccgccgatcacgtcttcgatctcagtgaatcctctggcgcagaaaagaactggttgatagtgcgtgatgtcgtaggtctgcacccccattcggccgatgtcgagcggccgc

SEQ ID NO: 714297 - DNA, 97 bp, Homo sapiens
  misc_feature (7)..(7): n is a, c, g, or t
  misc_feature (31)..(31): n is a, c, g, or t
tgggaangtcagttctgttttaagtaacagnctgtccccttaatccaagcctaggttttcacacttctagtaagcctctccctgcccgccaacacat

SEQ ID NO: 714298 - DNA, 358 bp, Homo sapiens
gtgtggtgttccagtagaggcaggttcaccaggtggtccatattcgtctcgaacaccggacctcaggtgatccacccacctgggcctcccaaagggcggggattataggtgtgagccacagcacccggctcactttaaggtttggacccttcattcacattttggtatgcagcaccattgtcagtgattttaatatacataggggaaatgggagtgtggtttactccccatgagcatgactgagtggatgtgctacagaatggtatgtatcccaccggcttattttagtctcttggtttctccccagttgtaaagccaatggcatctttcgaaaattccgatagttgtaaatggcggg

SEQ ID NO: 714299 - DNA, 195 bp, Homo sapiens
ctctcgcggatcccctcttctcccctgacaccaagtacctgtctcattagtgtcactagtaaatcagtccgtatcgagcccagatacagcagcctgtaacgtcgcgcaaaaactcataaatgttagttatgatcatagttaaaattgtgtcattctgatttcttataaacctgagacccatgggcaccagattgc

SEQ ID NO: 714300 - DNA, 233 bp, Homo sapiens
tcacacagcagctaacagtacagtacaagcacaatgaatgactatctcttaccagtaccatactgttttgtactactgtgtacgtgatacagacctcatagttgtgcactgcaactggtttatttacatagttaattcctgcggtctgatatgtaatgatttttgtgctttcaattcttctcttaatatagcatcctattaactcacacagctgagagggggacgagcccaaa

SEQ ID NO: 714301 - DNA, 758 bp, Homo sapiens
tcatggtgagtggacatcctgccataacaaggaccgaaaggttcggtgcgcacatggtagcccaagagccagagatatctacctgaggctgtatggtcaagttatacatggttatctgtgccagaagaaccaactccacattcacaccaggtattgatgtttgaaggaggtattggtttagtgatggtcagctaccaaacctggctctgcactacatgtccccgtttgccgctgggacttgatcctgtgagagggatgaatggcattccatggtccgtggacaaatcatagacgtggccgtgcgttatgatgtggagaccaataaatcgttgacttgacctgtagctgcgagatatcaagagacgagtacccccaaagaccttggaacgtgtactagcttgcaaccttgccagcggttgagcccatggcccctgtgtgcccctgccacggaccggctatccctcacgtggccagaggtagtgcaacgaaatcgctcatcttttctgaccaggctttggccactgagtacctcgcccccagtaaaagggggggccttggcttgtggccgagccgtgttcccttggctttccattccaggggtccagtcgctacacgggggcccagacagaatggatgataacctggtcacttatctgggcaataggaccaccagtgaaaccacccggcaacagagacaacaagcccaaaaccgcccgtaacagagtcccgggcatccccaaaggggcgcccgggaaaag

SEQ ID NO: 714302 - DNA, 159 bp, Homo sapiens
caatggatcctcgttttttatttattgtggactcattccaattacaggggctcgtgagagttctgtattgttaccccttcgtcactaccttcccgggtcggtagtgggtaatttgcgcgccggctaccacattcaaggaaggcagaagacgttacgtgt

SEQ ID NO: 714303 - DNA, 792 bp, Homo sapiens
  misc_feature (561)..(561): n is a, c, g, or t
gcaggtgggctccgaggtgcaaagtgggaagtgtgagtcctcagtcttgggctattcggacacgtgcctgccggacatgggacgactggagggtcagcgagtcgtggagtccgtggccttttgcgtccacgggtgggaaattggtcattgccactggcagggtaactggagactcaggcggccccccggccgtttctctatccgtccaccggactcgtgggacgctcgcagtggtgctgatgtagtttcctgatcctctgacccgtattgtctccagattaagaggtacgaccatttggaggcccgagcggagaaatcgtcaccgggagaaacgtcaccggggcgagagccgggcccgctgtgtgctcccccggaaggacagccagctatgtagggggggagtgtcacgctgaaagacaaatttcctacggtccccaaagggtgaacgtcttccggaggacagctggatcgaataccatgtgtggtgtgcacgaaaaattgcacctcgtgagtcctcaaagtgctgaccccggggtcagttccagagagaaggactccctncctgcttggaagagactcacaccgtcatccacgatgccaacggtctgaaggtggatggattcctggcgtggattcatcactcccgcattcaaaaaggccaacggagccaactagaaacatgggtcccaagggtgggtcaaggccctttaaatgacctaagttgggtgaagcccttacaattaattctttttctattttggaaaacaatgcttagttttggcaactttgttt

SEQ ID NO: 714304 - DNA, 271 bp, Homo sapiens
  misc_feature (1)..(1): n is a, c, g, or t
nctggccaggctctctacgggagacagcatcagatcccacaggtggaggcctcggtccccaggacggtcccacttctggaggtcaatcaaaagccccaggcggtaaccggggcttctgggcagaccagatatgaatgggggttcccacaacccactccgggggtttaatggattggttaggagggctcacaaaactcaaggaaacactttccttaggtgcacgggtttatagtaaaggatatggcaaaggatacagatgaagagcgggcaa

SEQ ID NO: 714305 - DNA, 220 bp, Homo sapiens
agcccaggagttcaagaccagactggacaacatagcaagatcccatcactacaaaaaaataatttaaaaataaattagccaggcatggtggcatgtgcctgtgatcccagccacacttgggaggctgaggtgggagaatcacttgagctcagtgagccatgatcatgccacatgacactctagcctgggtaacagagtgtgataccatctcttaaaaaaa

SEQ ID NO: 714306 - DNA, 825 bp, Homo sapiens
agaggccttagcaatgatttggtttttttcttaagagacgggagtcttggtgtgtgctcaggctggacttgaactcctgggctcaaatgttcttcctgccttagccttctaagtagctgggactacaggagtgcatccctgtacctgccttggttttttcttgtatgatacataataattgtacatattatgttatttttttttttggagacagcgtcttactctatcgtctaggctgagtgcaggggcccaatcatggctcacattcagcctcaacctccggggctcaagcaatcctcctgcctcagcctcctgagtagctgggaccataggcgcgtgccaccatgcccagctaatttttatattttttggtagagacgggatctgctatgtggcccacactagtctcaaactcctggtctcaagcgatcctcctgactgggcctcccaaagtgctgggattacaggcgtgagccacccagttaagtgagtataatttataaatagccctatgtgacaaggggctacttttatgggccaggcgtcagcatctaaggattcactccctccaaggttgggcactccacaaagacttacctccgaagtgggcacccacgcggggggcaataccgggccagggtggataccaactcacagactacggacaggaacacaatccatccagtaaccatcggcacggtctccgcagcccacatcaaaggtcaaagccgacataacgggcccccttcaaccacgacccaacacagacaacaccaccctcgacaccacacacacacagaaacaccgcggggcgccgaccgcgaa

SEQ ID NO: 714307 - DNA, 337 bp, Homo sapiens
tcttcacgaggcattttgtaaaacacacatacaatgcggtagattttggcaccacatcctataacgacacacaaattatgcttgatatgtacaaagctgatctcacgacgagctccccaggacctttcaaattcctggatacactgttccagatgtcaatgatgaagtgtgtacattcaccatagagatgtcggcattcggatatgtgttcccttcatacacattaattctgccatcattagagctgtcagtccttcatgtccctagtgtcaagctttctcttccagatttcaaggaattgcgtaccataagccatatttttattcctgcctgggct

SEQ ID NO: 714308 - DNA, 705 bp, Homo sapiens
  misc_feature (435)..(435): n is a, c, g, or t
gacattcatagataagaggtgcctgctatttcttcgaacgtcttatggagggcatatacaatgattaagacagtcgggcttatctagggctatcaacgttgggaagatgatgtactatatatcgctactcagaaagattggctcctaaccatgaatactacagacctgactactgtctagcagaggatgtaggcggtacatcggctccaaacatggtctgtcttgcttctagctcataggcgagacgcatcgattgtagaccatcttgctgtatagggagctttgtgcgacgagctcacgtattggatgaacactcgatttggagactgagccatatcttacatatcacatgtttatgaccacccccaattctgtggactgttctaccatagacttaagtactgctaaggttgtatatccaactgcagacacagngtttcataggtgctgtggacgcaggcgatctatgatcgctgagttccacaagcgggatgtactttttatcatgacaacgctctcgctgtgacataccactatactgcctgcagacgcgtgacctggctgactaacatatatctgacgttatggcgcgctgatatgtgcttaccatggttagacgatagaagtcattgtgacgcacgaatattgtggatacatcctctctctggtgagagatctggacattgcattactgtgcggacagac

SEQ ID NO: 714309 - DNA, 191 bp, Homo sapiens
ataggataagcggataaggggctggaccagagaatcagagcggcaggtatggaggcagggtggaggctatggtgatgggtaggtgagagggatgggaaggaaggagatatagaggagaagtccacctggtgtgactagagtagaggcccctgggggtcagcgcttgccatgtagaggggtggagtccccag

SEQ ID NO: 714310 - DNA, 110 bp, Homo sapiens
ccataaaatgcacttccctgtaattcagcatattgctgttccactgtagactctggaaagtggttaccaataccccacaggccccttcggtgttcttttgcaaccggata

SEQ ID NO: 714311 - DNA, 173 bp, Homo sapiens
agaaccttctgcgcacattctttctagttccactccatttagtttcttgcctttgtgtgatcctgatctatctcttcctttcaaacttttacaaagttcagctggtgacttcctttttctcgcggtattttcccctgtgcttctgttgacccttcttgaaggtttcctgtggt

SEQ ID NO: 714312 - DNA, 1078 bp, Homo sapiens
gtaaagctgaaaataaaaccagggtttctatttatcttttttttttttaatgttgcactgtgtagtttcattacaaaagatcagatcatgaaaggcagtaactctccaggacgggaatatctgattgctcaggtgttaatagtagtctcaggctggtggtgagatggttaaacaggggtgcaagacgtgtggcttctctttttttatagatatttttctatctctcacttctcagggatgacaattcttttccaaagtttggaagttccttgcaacttagccgtgatgtgagtggttatccctagataaaattaacaaggatttttaaaaaggtaattactggcacttaaaatgataaataggtaattggacatactttatttaaagctcctgggttaattatttggtctatggtctcagctataaattcaaatttatacatactatggagtattaatattctcggatttcaggcagaatctgtcagtcacatgatgattatgtctcggtcttaacattctttccatgcactggtcattccatcaattggctgaatgctgagaccagaccagggtctacagattctcatggtcagaaaatctaataaagttctggccctttttacacatggctgcctctacgaaaaacaacagcggtaaattattagccaaaaagagagcccaaaaaattcccaatttcacgtgtgtacccaagaaactggttctggggaggcattactcttcccaaatccttaattccatctggggggggcagccttggggcggggggccaaatcacggggttgccacacgctcatcgcgagcagcagctctcggtgtcttctcctaccccctggagcggcgcggctccacacacgccttcgtcacagcgggagactactgcgtgctgcgctgcaccacacaacaggacagggcggcttgccactacgtcggtcttctatctccaacaaaaacgcaatgaccgcatgcactgattgtcgttgtctcctatctcatagctctgctgcatgacctgacatcacacatccagacaaagcgcaccccagacgcgagacggt

SEQ ID NO: 714313 - DNA, 1030 bp, Homo sapiens
atttagctgttccccaagccattttccgtccgtccccctaacaacgcccccgtccataagtactaactaccatgactcactaccccgtcacgaagtcatggcaagccaacgccacttatccagtgaaccactatcacgaaaaaaactctaccatctcgtatactactctccctacacatctccttgaattataaccattcacagccacagaactaatcatatctatatcattcattcgaaaccacacattatccccaaccttggactatcatcaacccgatgaggacaaccagacagaacgcctgaacgccaggcacatacgtcctattgctacaccctagctaggctcccttcccctactcatcgcactgataacactcacaacaccctaggctcaataaccattctactactcactctcactgcccaaagacactatccccacatcctgacgccaaccaacctcactactgacccagcacacaccaacagccccaactcagaacacccacacccctcgacagggcaacccgcaaatgaccgcccaacagcccagccagaaagacccccacatcgcacgcgaccagatcagatacaccggccagcaagctacatcatacaacactacagacggactcaagaaatacactaagcgaacaaaactcaatcatcaaaacacccgccaacacacccatcaggacgagaccacacctggaaccaaccacaatgacgcacaaagacaacacatccaacagccacacacacaccgacacaaaccccacggacacacacacacgcacaaaacccaaacaccacaaacaaaccacacacgaaaacacggcaggcaccacccccacagacagacccaccacaaaccacaatgccgcaaccacgaagacgcgcaccaacgaccacccaacacaagaaagtccaccagccactgactcccagccagtcgcccacaaacagaaacgacgagcaacacaccagcaacaaacatcaacaaaccacagaaccaccgcagacgcac

SEQ ID NO: 714314 - DNA, 164 bp, Homo sapiens
cccccccccttttccccccccggtttttgaaccgggccaattcccccgttttttttccaaacttttaaaagggccccttgtttttgggcctccccccccccaaccccttttttttttttttggtttaacccccaaaggggccttaattttttttttttggccca

SEQ ID NO: 714315 - DNA, 190 bp, Homo sapiens
  misc_feature (126)..(126): n is a, c, g, or t
tgctatttatgttttgttttaattctgatgtacttcattggtgaactgtcttttcctctcatactctacacttggctacagatgacagagctttggtagttaaacaattgagttaaaggattattntagtgttggttagggctcaattagcttattatgtttgggaatcagtatgtatgatctaagcaca

SEQ ID NO: 714316 - DNA, 137 bp, Homo sapiens
  misc_feature (71)..(71): n is a, c, g, or t
atgtgtttcaccagagccacagcaacacgggatcgagccacgtctgcaacctacaccacagctcatggcantgccggatccttaacccactgagcaaggccaggatcgaacccgcacccacatagttcagcgtctga

SEQ ID NO: 714317 - DNA, 105 bp, Homo sapiens
ccccccccctttttccggccagttttttcagctttacagaacgggattaaaagtttctagggaaacctttttaccgggccaaaaaaaataccattttttcaaata

SEQ ID NO: 714318 - DNA, 119 bp, Homo sapiens
tacaatcgagctccctaccgtatcgaaacctcctgcggaaagcaatataagaggccccaaataaccccgtgtaaattggctgtagtggtctacttgtatacgggtttagggtttgatga

SEQ ID NO: 714319 - DNA, 142 bp, Homo sapiens
tcatgtccggaagagtatatagttagaagaggatagctattagaaggagttatggatgcggttgctatgcgtgaggaaatacttgatggcagcttctgtggaacgagggttcatttttctctggttagaactggcaataaaa

SEQ ID NO: 714320 - DNA, 182 bp, Homo sapiens
tttcctttcaattcattccacaggtagcatgcactatttcaggcacaccatagttttcatcactagtcatatttattcacattcacacagccacagtgccgttgcatagtcacattcccatagtaccatccatatgcttcacaccctctatatgggcatgcaggatgcagttcattcaatgc

SEQ ID NO: 714321 - DNA, 100 bp, Homo sapiens
taccgtgaatgatgccgcaccatccgctaccgacccctcatcaaggtgaatgataccattcagattgatttagagactggcaagattactgatttcatca

SEQ ID NO: 714322 - DNA, 322 bp, Homo sapiens
ccccccccgttttttttttgggggggaggattttttttttaaggggggaaggggtttttttttattttttgcggggaagattttttttcccccctttttttaaatttttttaaaaaaaattttttcccaggttttttttttttttttttttttttttaaagggccctttaagttttttttgggccccctgggttttgggaaaaaaaagaaaaaaaaatttttttttttggggcccccttttttttgggtttttttttttctttttttttttttttttttttgggattttaaaaaaacgtttttttttttttttttttttcca

SEQ ID NO: 714323 - DNA, 652 bp, Homo sapiens
  misc_feature (339)..(339): n is a, c, g, or t
  misc_feature (347)..(347): n is a, c, g, or t
gggattgtcctttgggtatatacccagtaatcggatggctgggtcaaatggtatttccagttctagatccctgaggaatcgccacactgacttccacactggttgaactagtttacagtcccaccaacagtgtcaaagtgtccctatttctccaaatcctctccagcacctgtggtttccggactttttaaataattgcaatcttactggtggtgaaagggtatctaatggtggttttgtttgcgattctctgatggcagtgatgtgagcatggttcatgtgtttttgggtgcataaatgtctcttttgagaagtgtctgtcataaaaaaaaaaaaaanacaaaaanaaaacaaaacaaaacaaaaaacaaaactttaaaaaaaaacccaaaaaaaaaaaaactgttggccgcttgcccaatcaatttaacttgagcaagcttatcattgggccgaatttggttaattggccaattcgcctaaggggggccttttccaataaatgcccggcttttaaacttcggaatggtaaaacttggggtccccaactaaacccttggaagaaaaccccttttcccagtgggctaattccaaaggcccccaccgaacggttttcattgccaacttaatggccaatgatttcctttttttt

SEQ ID NO: 714324 - DNA, 105 bp, Homo sapiens
gccaggtgaagttggtacctacaattgataaccccgtgaggaggacagaattgcccaggtagcatgctagcagcaagcaggatggatgacatacccaatctatga

SEQ ID NO: 714325 - DNA, 638 bp, Homo sapiens
  misc_feature (513)..(513): n is a, c, g, or t
  misc_feature (516)..(516): n is a, c, g, or t
  misc_feature (521)..(521): n is a, c, g, or t
  misc_feature (607)..(607): n is a, c, g, or t
gtcaagaaaagggggtaagaaggaactgaagaatgtggaatgagcataaaggagagaaaagtcaataaaataaggaagtgaaaaaaactgaaaagagggcagttatcagttactgaagttttaccagaaagagaaactcatggtggtgacattcaaagtgcggccacgggagtaagctgctggaatgtaataaagtcactgggcagaagtccaaggtatcagcaaggtatcagaaagatcatccaaagatgacaacaggagttgaggtagacagaaagaccatgagcaagatatcaagttaggctctctggcctttaacactcacccctattattaaaggccaaaaacactttaaaattcaagtaggttatgaaaagaattgcctccaaaaacatattgactaatgtgggactaacctagcttggtttttatcctcattactcacttgaaaagccatgcattggcttttaaacaaaatagaaaataatttttaaatttttataaaatgcctanggnaagtngaaattttttatacaattagaatacatgggcaaatatttaaccacatgaatccttggtgagacttcatatttaccttatgaaaagnaaccgaattagcttaaacttcatttgcctaa

SEQ ID NO: 714326 - DNA, 848 bp, Homo sapiens
gactccaatctctgccttctgctctgtcttcacacggccttccctctgtgtctctgtgtcctcttctcctcttataaggacaacagtgatgagatttgaggcctaccccgcatgcagataatctgatctcaagattatcaccttaattacatctgtaaaagaccttattcctaaataaagttgccctctgagttctgagtggacatgaatttgcagggcaggctactcttcaacccactatgcatgtacttccctgctctgaggcccataaaagccccaggctcagccagagcaggacagaggacagagagatgaccagaaaggatggatgactagctgcaaagaggagctaccatctctgctggatagcggcagacaacaggataaccagctgcagagaggaaccgcccactccagggcctcctctctgctgagaactgaacactcaacaggacgacctttcccacagagaggagctacccactgtgtgtctcctctgagctattctaacacttcaataaaactcctgcttcaatctgttaacctttctaaaaaaaaaaacaagcagcaacaacgtctcgacacggcccacaacgcatcacctcgcaccaccacaccgaaccaacggcggccacgccaaacgacacacaacaacaacgaaaagctgtggggggggcggccccccaggcaaaaatacacaacactggtgtgggcgcggccaccccaaagatgaattggaccacggttcgcacaacaggcgcagagaggggtggcttccacccaaaaaagcccgcggcgcggcgaccacacacaggggcggcacggtcttcaacgacagccatacggcc

SEQ ID NO: 714327 - DNA, 343 bp, Homo sapiens
  misc_feature (294)..(294): n is a, c, g, or t
ttgtacgtagaagatactgtcatcttttaggacaaagtattgtaaaattatctgttttagcccatgttctgatgacccacagctctgtcacctttgagcatcatctccccattctaagtttttttcccacttaattcctaaccctgcctctttgagggaagcccattgacggggcaattaaaaccttctcattgctcctgaggaccaggaacgggcaaggatgtttcctttcaggaagctgaggagccacaagggagggacaggcagtgaggcatctggcacaggaaacgaggntcaggaggacgcccgtgtttcagtggggaggcacgccgatgggggttgg

SEQ ID NO: 714328 - DNA, 153 bp, Homo sapiens
agtgcatggtatgcagatggcgtctcccagggagtcaagtggttgatgcatgtgatggcgttagcttgcatgatcatatcggatgctatgatgagtaattggttacttacattgtccacaatgtctcaagttagacgcaatgtgtctagtagg

SEQ ID NO: 714329 - DNA, 184 bp, Homo sapiens
agacgatcccttatagtgtgccgtaatatgtttagtgatgccatctaggaggtgaagtggagagcacaggatcagatatacatattgagaactagaatggactctggcagccaggtcggggcagacttccagggtgccacaggctgtgaggctatcgactagccatcctggacaggcagaagta

SEQ ID NO: 714330 - DNA, 139 bp, Homo sapiens
ttcaaatgttaagaacgggaagaatgggtggcaatggtggctcctgtgaaagctcacccagcacaggtgccctgagctcggagccttggtttcctgtccctgggggaggatttattatttacataacaattttttatat

SEQ ID NO: 714331 - DNA, 584 bp, Homo sapiens
  misc_feature (29)..(29): n is a, c, g, or t
  misc_feature (33)..(33): n is a, c, g, or t
cccggcggccgagtgattggcgagccacnagtnttatggacggttccccaccgtggtccggctggcgggcaacgaggtgccccaggacagagtgatttacggcaaagaccttctgcccttgcttctgggggcagcccaacactcagaccacgagttcctgatgcattattgtgagaggtttttgccgcagccaggtggcatcaacgggacagaaggaacaatgtggaaagtcccctttgtgacgcctgtgttccagccaaagggagccggtgcctgctatggaaaaaaggtttgcccgtgctttggggaaaaagtagtcccccccgatccccctttggtttttggcctttcaaaagacccttttgagacccacatcctccccccagcctcagaggccgtgttttatcaggtgatggaacgagtccagcaggcggtgtgggaacaccaacggacactcagcccagttcctttgcagctgggcagggtgggcaatatttggagaccgtgggtgcagccctgctgtgggccgttccccctttggtggggccttagggaagatgacccccaataaatgtttgcagtga

SEQ ID NO: 714332 - DNA, 533 bp, Homo sapiens
gttatgaagttctggtatcctgtcgagtcttcgcgtctctggcaaggatcttgtaccaaactacattctttcatattaccttgtataatcatgtgtgctatgtggccggaacaaagtgacaaatggcctacagctgatgagagcaaatggacatctcctccgtgaactctgagaagatgtcaaaatccacagggcaacttcctcactttgatcccaaagctattgacaaagttgttcagcagactggaatgcgttttggctctggcatgactgctggtgacactgttagaagatgccaacctttgtggaacgccaatggccagatgcatggtattctccgtttctgtacaccttgggttagacgtgggtgaacacgaaactggcttgccaaggctggggacagtccctaagaagctggttccgtgccaggcagctttcaactgactacgcagtttttggccacgtgaaatgggaattggcggtgaactttattagagataaccagaatcaacgagactacttgacaagagaca

SEQ ID NO: 714333 - DNA, 168 bp, Homo sapiens
tcgccgccagagacggttgatagcccggacaggctatgtctgatccccgggctggtactgtgcttcagcggaggtgaatgtagtcctccaggaagtactgcaggtactctataggtaggcctcatcctccgggtccacgacggccagagtctgctctccatggcctcc

SEQ ID NO: 714334 - DNA, 434 bp, Homo sapiens
tatagtcagtcagcatagcaacctctcctctggacactagtgtagagagcaggcacgtgttccatggtctcaggccttcctgaatacatccttattatgctatgattcctccatttctcttctattacagctactcctagtgtctaggcgtcagctctaggtccccgagtcgctgcgctgaactaaacgccgagcccagtctagccagcgcgtttccagccacaagatccagcccatgacccctaacaggggccctactcagacctcgtaatgacctccggcctagccatggtgatctcacttccactccataacgctcctcatactagggctcttaaccaacacactatccatataccaatgatggcgcgatgtcacacgagaaagcactataccaaggccaaacacacaacatctgtcgggctagtcggggt

SEQ ID NO: 714335 - DNA, 110 bp, Homo sapiens
  misc_feature (34)..(34): n is a, c, g, or t
ggggacgcgacgctgacgggaaagctgagtgctngtgtgggatctcgctgtatcctcagtcgggccgggaataaactttacagctcaggcacggggttctggttggtgta

SEQ ID NO: 714336 - DNA, 189 bp, Homo sapiens
ggcgactcctgtgggcggtacggcgaggtacgacggcttgctacaagtcatcaaaaagctattagtgggagtagagtttgacatcgtccttgacgagaggattatgatgcgactgtgagtgcgtccgtcagtttgagttatgctaggcagacatagtaatcgaggatgtaacgcccgtgggctgattat

SEQ ID NO: 714337 - DNA, 152 bp, Homo sapiens
gagcagaatgacagaaactgacttcagagcaacttccaaattgcatactgctgcctagaagttgctctgaagtcagtttctatcagtgctgctctttgattcaaagcactgcccctctcactgggcctccaaccatgttcccttcttcttag

SEQ ID NO: 714338 - DNA, 663 bp, Homo sapiens
  misc_feature (3)..(3): n is a, c, g, or t
  misc_feature (79)..(79): n is a, c, g, or t
  misc_feature (83)..(83): n is a, c, g, or t
  misc_feature (217)..(217): n is a, c, g, or t
  misc_feature (221)..(221): n is a, c, g, or t
  misc_feature (226)..(227): n is a, c, g, or t
  misc_feature (229)..(231): n is a, c, g, or t
  misc_feature (238)..(238): n is a, c, g, or t
  misc_feature (259)..(259): n is a, c, g, or t
  misc_feature (265)..(265): n is a, c, g, or t
  misc_feature (443)..(443): n is a, c, g, or t
  misc_feature (445)..(445): n is a, c, g, or t
  misc_feature (455)..(455): n is a, c, g, or t
  misc_feature (457)..(458): n is a, c, g, or t
  misc_feature (460)..(461): n is a, c, g, or t
  misc_feature (463)..(463): n is a, c, g, or t
  misc_feature (476)..(476): n is a, c, g, or t
  misc_feature (480)..(480): n is a, c, g, or t
  misc_feature (492)..(492): n is a, c, g, or t
  misc_feature (498)..(498): n is a, c, g, or t
  misc_feature (508)..(508): n is a, c, g, or t
  misc_feature (511)..(511): n is a, c, g, or t
  misc_feature (587)..(587): n is a, c, g, or t
  misc_feature (606)..(606): n is a, c, g, or t
gtngtactgggctgccacctcggagggtggatggtcttgaccagttagggtcttcacgaagatttgcatcccacctctnaganggagcaccaggtgcagggtggactctttctgagatgtccgtacgatcacgcagagggtgcgtgccatgcgttccagctgttcttctcatgcaaagatcaacctctgctggtcaggagggatgccttctttgttngganttttnntnnnattctcnatggtgttactgggctccacntcgagngtgatggtcttaccagttagggtcttcacgaagatctgcatcccacctctaagacggagcaccaggtgcagggtggactctttctggatgttgtggttagagagggtgcgtgccatgcttccagctgttttccagcaaagatcaacctctgctggtcaggagggatgccttccttgtntnggatctttgncnngnngntctcaatggtgtnactnggctccacttcnagagtnatggtcttancanttagggtcttcacgaagatctgcatcccacctctaagacggagcaccaggtgcagggtggactctttctggatgtngtagttagagagggtgcgnccatcttccagctgttttccagcaaagatcaacctctgctggtcaggagggatgcct

SEQ ID NO: 714339 - DNA, 858 bp, Homo sapiens
aaaatgtggaagtgaatttggaactgggtaacaggcagaggtgaacagttgcaggctgcggaagaagacagaaaaatgtgaggaagttggaacttcctagagacttgcagaatggtttagaggaaaatgctgatagtgacatggacaatgaagtccaggctgaggtggtctcatatggagatgaagaactcgtggggaactggagtaaaggtgactcttgctatgcaaagagactgatggcattttgcccctgccctagaaatctgtggaactttaaacttgagagacatagtttagggtatctggcagaagaaattcctaagtagcaaagtgttcaagaggaagcaaagcataaaagttttaagaaattttgcagcttgatgatgagatagaaaaggaaaacccattttctggagagaaattcaagccagctgcagaaatttgcataagtaaagaggagctgaatattaatcaccaagacaatgggaaaatgtcttcagggcatgtcagagaccttcaaggcaactcaaaccatcacaggccaggaggcctaggaggaaaaaaatggtttcatgggcccagtgcagggacttgctgctctgtgcagtctcaggacttggttccctgtgtcccaatcatggctaaagggccaatgtacagctcaggccatggcttcagagggtaaaggccccaagccttggcagcttacatgaggcgtcgggcctgcgggtgcacagaagtcaagaatcgaggtctgggaatctacgcctaaattcagaggatgcatggaaacgcgtgggtgttcaggcacaaatttgtgcacaggggaccggagcctcatggggaactctggtaagg

SEQ ID NO: 714340 - DNA, 1072 bp, Homo sapiens
agcttgccagtttctgatcaagtttcatgaaaggaggaatgacacagatcatcgtctttgcctgacaatgctgttcgccctaaaggcaatatgccacttcgactgcacacaacaccctactactctacggcacctacgctctcagccggcggcacacagcgcatgcccccccttctctcagcaactttccacgcccacccacacctcccacaaattcacaccctccatctctccatatcccaaggctcacgctgcaccccctctcgctcccgccaccctgcccgcgcaaccccacactgctccctccacttccaccactcctccacttccccacctgcgctgcgccttcccacgcgccgctcccgcgacaccgcccccacaccccgcgcctacccggccggccctcgccctctcccgacgccctccccccccccggcgacctcggtccgccccacccccacgctacccccgtcgccccctctcccctcctaccctccaccctgcgcctaactccccacggcaacaaccacccaccgcacacaccgcgccccctcccccatccaaccccaccccccggcccgccacgcacatcccaccgccctcacccactcccccggcctctcctaccgccgttccccccgcgctcgccctctcccccacccaccctccaccctcgccccctcgcccactcgccgcgcacccgcaccctcgccgcccctcccccctcccctcgctcctccctcctcaccccccacccctgcccccgccccccctccacctcagcccactgcctccctgcgccctgtcccctcccttgcaactccccgtcaccctgccccccccccgccgcgcccgcgctggccctgcccccctcgcgcgcgcaacccctcagccgcacaccaccgacccccctccccctcacgcccgcacctcccaccgggccggccctgcactgcgccctcctcctctccacccttaccctacctccgctcactccgcctcccccccgctctgtgccactcctgcccgccctccacttgccccgctctcctcccccttctcccccgcaccc

SEQ ID NO: 714341 - DNA, 361 bp, Homo sapiens
acctgggaatcattacgatccctaacagctcatcctgcccttttaaaaccctcccttttcagggctgggtcagaatttaacctatttattgactgtccttagggcctttaaaacaggccgaacctggagggcctggatttctttttggggtggaaaactgccctaagggggggggtggcttttactcaggaaaattttgtgcccaacccatggacagggccaactgggggccccatgttgacacaaactccctcaaagacccttagacactgggccaggcctcctttcagccttttttttgtccaaatttccaaagctggataagttggtcctttattaaaaaaggaaaagccctttggga

SEQ ID NO: 714342 - DNA, 868 bp, Homo sapiens
tggaagctgcagtgagccaagatcacaccactgcactccagcctgggcgacagagactccatctcaaaaaaaaaaaaaaagtgtttaatgaacttacagtcccactgggctggggtgggcttcaagaatcatggcggaaggcaaggaggagcaagtcacttcttacttggatggcagcaggcagagagagcttgtgcagccaaaactcccatttttaaacctatcagatctcatgagacttattcactatcatgagaacagcttgggaaagacctgcccctatggaacggggtcccttccatgacacgtgagattggtgggagttaccaattcaagatgagatctggggggggacacagcccaaccatatcagaggccttggaaggaaccaaccctgccaacacctttgatgtggctgtgacctgtgaggacgtaaataaatctctgtgtttaaggccacctagctggtgatatttgttacaggagccctagcaaagtagcacactaaggcttaacaatgctgcgcggctgaatttggtcatgtgcacttatgccttctgactgtgggctgaaatgagccaggtggccaggtctggtgcccaacattggttcaaagcaccttctcaggaggcttccttatccatccagagaattgggcccttctcggactcggacctgtggagattctagagggcttggtttgccagttataagggcggcccggacaattacgggccagggcgaaccgctcccgggtcctggggagaccccgcttgcctgcggcgagaccgggtgtccaggggaaccggactccggaccggggggactcgccacgggcttttaattggcggtttcttgtcttcgctgg

SEQ ID NO: 714343 - DNA, 379 bp, Homo sapiens
  misc_feature (14)..(14): n is a, c, g, or t
  misc_feature (308)..(308): n is a, c, g, or t
ttggtttttcctantgtcaggcaatgcagttaacctttagcaatatagagcacttaagagttttgcaagccttgttttgcatccatttttctcctgcatagaacatttgattgtttcatctggttttcattttatacaatgatgtaggtagaggcaaactctaagacctggtaattacagcctcatggcagcccaactgatgcataagagacgtttgctaattacagtgatatgaaggctctccctcctctgaaggctcactgtgtttctttaaggtgtctcttttgttccttaatctagttgcttantacaagagtacattgatcaaactgctttctagtaacaaagcatattctcaaagaaatgttaattttacaaa

SEQ ID NO: 714344 - DNA, 1015 bp, Homo sapiens
taacacctttattcagatgtaattcgcaccatacagttcacctaaagtgtacaattcagtgtttttagtatactcagttgtataacccatcaccacaaataaatctttgagaagatttatgtgtgccaccacctcccaagaaaatcccgtgaactttatcagctgctcctcctccttcaccccatgcccttctgccctaccctacctagtcaacaactgatctattttctgtctctatagattgcctgtttgggacatttcatgtaaataaaatcatacaatatgtggaaaaaaaaaaaaaaacaaaaaaaaaggggaaacaaaaaaaaaacaaaaaaaacaaacaacttgtgtcggggcgcccgcgcagccacacggaaaaaaagctttaacgaaaccaaatcggtggtgggggaccaggccgccacaagtagtagtagtcaaccgagtggcctatggagtggtgccaaaaaggaagccacgcgggggaaacaaaaaaggaggggtggggtattctcaccccaaaaaaaaaagacgtgcgcgggggacagcccgacggcgcgttctagaacaacaaacacgacgggcgattgcaggcggccaataagcgcgggacttaacaaagagcgggtccacgaggcgaggtggaataaaaaatagcgccccgggcgggggcgatgaaagcagacaacgaatgacgacgtactaactatgagaggcaagcaggaagtagaaagagcagagcgacaagggacgagagagagcggccgacgggagaggagcaaagaataagacagggaaccaaaacagggagagcgtgaagaggacgaacgcgactaggggacgagaagagcagagagacgagcagagagcagcgaaagagacgcgagaagaaaaaagaaacgaagcctacggaggggcagcagacaagagaaaagaagaaaagacaaaggaatcgagccagaaaaggagaacagaggaagacgacagaagagacgaaacagcagaaaacgaa

SEQ ID NO: 714345 - DNA, 525 bp, Homo sapiens
  misc_feature (80)..(80): n is a, c, g, or t
  misc_feature (101)..(101): n is a, c, g, or t
  misc_feature (232)..(232): n is a, c, g, or t
atggctttctacatctggaatgtgatgaccttgacccctccaaggtagcatctgacaggtacccgactccttttcttggncaaacctctggcagggtgccntttctgttcaagggtaacagaggcattacccctttcagttgtcagatacttgtggtctcatttcttgaggaaaaggcaaaagccatctccttcttaactgtttctccaagagctagacagctccagaaatnctatggcagacccaggaaggacagagtccacagtccaggcaagacaacacagaagatcggctccctcgtgtacctgagtctgtctgcatcactctgtcacaggctagcactgggcctgctcatgtgaccttctgcagctgactggccagcagacacaggtcctgtgcccagcccaggttgcctggctcccctccagccttgttgcctctgtatatttctctagacaccctgtggctaattttattacaactgcacaatgtctgttgccattttgtattaaatatactgcaagg

SEQ ID NO: 714346 - DNA, 154 bp, Homo sapiens
agtgggtcaacggtcctcactatctgcttcatccgccaactaatatctcacttcgcatccaaacatcactttggcttcgaagccgccgcctgatactggcatttcgtagatgtggttagactttccgtatggatgcaaaaaaaacaacaaaaag

SEQ ID NO: 714347 - DNA, 791 bp, Homo sapiens
gatgaatacctaactggaccctttggcctgattgcacagtattcactattgaaggaacatgaagtggaaaaaatgttcacacttaaaggaaatcgtttgccggcagctgatgtgaagaatataagtggaaaagatgtacacactgtaaaggaaatccgtatgccggcagctgatgtgaagcaacctataatttacttgatgtcagacccaggctagagttgatggatataatcgcgtgaaaacgtgctcaggtgagaggatagacgaggcccaacgagagagttttcatatgtctgtcctgtgccacgccgtaacctgttgtgcgaacagcggttgcaaggactctgggtgtcttgggatccttgtattcacagggaggagtacagcttatgatctcattccattcgatggggatctcttgatccatggcaatcagagggtgcgttcaacagagtgctacctggagggtgaccagacgagcctgtaccacgcaggccaggggctgatgaccctgccagctctgtgtggaacgatgcccccagaatctttgggaaacggcgaatgcgctcggcaacgtggccaattatgattgatcaggatggaagagagagttagcgcggaaagacaagaatccaattattcccctgatctttcgataatctcctggttgcttgatcgggaatggtggctctattaaacaactctttgccaaatcagcctgacatataacaggatcattgattcaccttgtggtcttcaaacgatatctaaatacccaaagaaattggccc

SEQ ID NO: 714348 - DNA, 495 bp, Homo sapiens
ctaccgtatatcttgcatgccacgtttcagtcagcaggatgtggctctctagatagctgtgtttagaaggaatctgaggcttcagccttcagacaggggaaagactactgcgattgatagcaatatccaacatctcactcaagcgagaagaaaccaatggcaccaaaagttggcagcacagttggcacctggctgtcccaccaggaccaataatgggaccggccaaggtctgcgggaacctctggagcgggccattctggtggtatctggcccagaaggtacatggcattctggacccagggatctccaaaatctccttcctcatcccaggtcagcagctctaaactccatgtcattcccagctccagtgcccagatacaaggctcatctccaattcccattgcggggttcttgcaatcagcccggggcttcgggctcagttgcagacgatccaagaggatccagggctcatcttgagccctccatgaacgtgtg

SEQ ID NO: 714349 - DNA, 667 bp, Homo sapiens
  misc_feature (241)..(241): n is a, c, g, or t
gcggaggcggccgcccagctcgttttaagttctacggtttttgggccctgggtctggcggggcagggacatttccctaaaacccgcggggggcgtgggttggggtttttctgcgccacatacccctcgcggactttggcgcgggcccaagtggagtccaagactgtgggtgcccctccgtttcatcttcccccatctatgagccgttgaattggacccgctctgtggtggcccgtgaaaanctctatccccaagaggcccaagtacagtggaaggtgggttacgcccctccatcggggtctccccggagagtgtcccaaagcagggcagcaagggcggccccttcagcctcagcagccccctggcggtgagcaaagccggtttcgggaaacccaaagttttcgcctgggaagtcccccctcagggcctggggtcgcccgtcccaaaaaggttcccccggggggggggtttaagggggaagggcccccccctggtcctcagttccagcctggcccccccccctcctttgggctttggccctttttccccagggggccccccccttttgggggcccccgggtctttttttccccccccccccccccccccccggggttttattttggtaatgttggggggggatggattaataaaggggttttttgcca

SEQ ID NO: 714350 - DNA, 480 bp, Homo sapiens
tcgctattcatcggcacactgcaactacgactcctgggctcaagtgatcctcctgcctcagcctcctgagtagctaagactacaggcacatgccgccatgctcagctttttctttttttttttccctgaaatggagcctcgtcctgttgcccaggatggggtacaggggcacgatctcagctcattgcctctgcctccggggttttcaagtgactctccggcctcagcctccggagtagctgggaccacaagcaccgtgccaccaagcccagctaattttggcattttacgtagagagtgggtatcaccatgtgtgggccaggcgtggtctgaacttctgacctcaagtgactcaccggcctgggcctcccaaagggcgggggtaatgggggtgagaccaccaggctggtacaacggctcccttttaactgacttcttcccattcatccggccagtaaaatttctcaggggtgccgatga

SEQ ID NO: 714351 - DNA, 284 bp, Homo sapiens
tggttttgttgtgtgtgtgtgtgtgtgtttgagacagggtcttgctctgtcccctaggctggaatgcagtggcatgatcatagctcactgcagccttgaactcctgggctcaagggatcctcctgcctcagcctttcgagtagctgggaccacagccatgcaccaccatgtctggctaattttttcaattttttggtagagatgggatcttgctacattgccttgttacattgctacattgcctggtctcaaactcctggcctcagtaagagcaatccttccgc

SEQ ID NO: 714352 - DNA, 1446 bp, Homo sapiens
  misc_feature (1442)..(1442): n is a, c, g, or t
cgagaaacaaatggaggtctgaatctgggattcaaacctcattctgtctaactcaagagtcaaattttcatgatactcttctctgtctaggtctctgatatgactgttctttatatattttttttaattctgaggctttctatgtaatttaactttcctaatgattttgagtatttcccattccagcatatggccagcatttcatgttcccattggcaatgacaccaacactaggagaagtgacccctgcaatgtacaaatttcaaaatgtttataaacacacttgaccagaagaatgttttatcttctgtgtaatgccagttatcaaaaattaaataatcacatgtgttctagaggaagtgaagattgaaaaagaatcgcaaatgaagacaatagaatgaaaagattatatggatctagatgtaaatgtgcaacttaagcaatccacatgacaggaacacttaatcctgtatcaggagagaaaatgagttaaatatgaatttaggaccataccctaatgaaattcaatgtcaagataaacctaatagtctgtcattggcatactttacatttgttctgtaaaaggcaaagcctgaaaaaaagcaagttgcttataatcccataaatagaacttgaaataaataagaaatttatttttatatgaagatttcagttgcttttaccataacttgcttcatgtcatttctgtatatgtgtgtatatatatatgtgtgtgtgtgtatgtgtgtgtgtatgtgtgtattatacactagatttttacattttcatatgtgcatctgtattttacatctatatatattaaatatgtatatgttttacacacacacatacaccaaattttcatgactcattagggagaggtggctaacctactagaaagagcagtaaagaaaaaaaaaacccttttttttccaaaaatctgtctgtagatttcttccttcctcccttcctcccttccttcttttcctccctaccccagacatttcttgcacaaatgtttcctcttgccttaggaaaatgtatgatttctctcttgatgacactccatcaagctccttcttaggtttgcatccttagatgctaagatgcattgtgagtgcagaagagtggaggaaagtagaggcactcaccagggagaaggggcgacaggagcacagagactgggctgttgccttcggaatagcatctaagggcttggcaaagggtccacttggtttacatatttctcaaagtacctggggaggagggatgttgtcaataaaaacacacggatgaaggacactgaagaggaacatggagagaatggaaaacagtcatttcctcttgcgcaactttgccccaatgtagaggagtcctgcctgagataacatagaactttccctactatattgcccaaggagacatagtgggttgacatgttncagt

SEQ ID NO: 714353 - DNA, 1702 bp, Homo sapiens
  misc_feature (425)..(425): n is a, c, g, or t
  misc_feature (577)..(577): n is a, c, g, or t
  misc_feature (908)..(908): n is a, c, g, or t
  misc_feature (1156)..(1156): n is a, c, g, or t
  misc_feature (1702)..(1702): n is a, c, g, or t
ggccattgccatgtatcccaggaagtaggaccgtttcgtcgcgtgagtgtccactcgtcttcaattccttgcaacggtggatgtgcatatatactcttagctcagctgagacgtagagcctaagaaagtactggacataacgtcgtggaacgttgaggagtgcgatcattatacccgaactgagcgacaggcatagactggattcattgctccactgcacctcaccaacagggacgcacattgtctcttcgcatcgaggcacatgtgcgactgagcagccagttgcccgtgaactagaaccttagatgataggtaccacgagagacgggctctggctattccgatgacgcgtgtcagtgtcataacgcgtttaaatcgcatcgaatatcatcgtcggtcccattattcgtaggttcattgttgtngcactatctctgcgcacggagggtcgagcgatccctctctccttggggttctcaccaaaaagaatctcataagtgcagtgggcttgtgctaactgtctcgctcgcccaaagggcccgctcgcctattcgcgcctcgcttcctagagtcgccntacactccaactcgcggtcgaaggatggcgcagccccccataagagacgtaggcataagcgtttttggtagtgattgctccttcgagagcaaacaacttccccgtaagcgtatcagggaggcgtggctcacataggtctcgactttggacacgatctatcgtttgcggaattgcgtccctttgcattcgcatttctccaaaccaagaacgcgttatcaatgctcggtgctttcaaaccagaacataaacccgtttgtgggaaagaacctagactttggtaaggcagcctcggattcgttccggtggaccgtgcgaccgaacatagggggtngtgggctccgccggtaagcgaaggcaactttgaagacgaagcatggagagcgcaacttctagtggggcattcagacgccggctcgagtggaagccccaagagtttggggctcaaacgttcctcaggggaaccccctcatagtggaaatttcctctcacattgttgcccttgtgaaccctaggccctttaagggaaattccgtttggggctattcacccaatttacggacctcggatttgaattgacantttgtggtcaattcgcaagccctctccagattttctttcaactgaccatcatctgagagagaggtgcggttgggctaaaaagggcccctattggaatgcccccaggccttctaagacgcacaatttgtgctcgcccacattttttctcatgtttgcaccccaccagacaaggcgaaacttatcacaccagcagggttggggtctcctctcccgaaatatggcgtccaacggtctgtggacaacattggcctgccggagtacggttccatgcggccacctagtattgctgcttgcatttaggattgaacccctttgttatctcaaactactttattttgtaggcaatggttacgccataaccacgaagggtacttccttatctccccacacttgggatcttcgggaggggaacaaaccccaatagcacagggtggggcttttcaccacggagttcaaagggcacatccccactttgtcccggttccccctttttaatccaatttcccgccagtgggcgaaacttggtcaacaacaggttttgacatn

SEQ ID NO: 714354 - DNA, 126 bp, Homo sapiens
accaaaataccatgggatttgggttttcttctggagattaaagctgttttcttgggataagtgcagcagcaaaacagaaaccagttgatcaaaaaagcatttctgccataattccaataatttcag

SEQ ID NO: 714355 - DNA, 177 bp, Homo sapiens
aaaactcgggagggagggggcagggccctccccacccaataaaacagtttttttgcccttcccttgcaaagggggaacccacccaagtgtgtccccccggcggtggggggggagaaggggactgtgtgtgcaaacctcagttggaaaggggggggggttgggaaataaaggtttgca

SEQ ID NO: 714356 - DNA, 1414 bp, Homo sapiens
  misc_feature (1414)..(1414): n is a, c, g, or t
gctggcacggaaaaaggcaaggctgtctttggtcatcaggagtcccagcctgcttcagagtggggccaagaagaaagcacaggtgaggaaggcagggaagccctgagcacaggtacgggcccccctcagcccctgcctccatctgcctgagacgcctatttttttttttttttttaaaaccatgattttaaatacgcaagcgtgtttcataaggcgcgtgccacgtggggaggggtggctgatggccgccgtgcccgggaattcgtggctcgtggcaagcacagccgtgagccattccgtgcaggggttcccagggtgtgcaaaaaccttcccaacacccgcggttatcgtgggcgtgggacccgtgggtctccaggggccagtgttccagggggcatcgtgggtgattgagcacgtggagatgtggtgtgcagagtatgaatggtgcgtgagctatgacaggcaaggtgtgttgaaccaaatctgtcctcggtgaccctgtgccaacacactcttttgtgcgccacacagggcatataataaggcatgagttgtagggagaaagccaccacaagggggggtgtgaatatcaagaatgagagataaaagttacacttgacgatatgtagaaaagagaggcaagtaataaattgtggggagtgtacatactatcttataaagaaacattcgtgaaagaattgtgcaacaaaaataccaggaaaggcattctataaaaaagtatacagagggaagacagattagggggatttcccggaaaaggaaacaagtggagcgccacaaaaaacaaaacaaaacaacagtaaaaacaagcacaacaaaaccaaccacaaccaacaaccccaacgaaccaggaagaaaaaaggaacaggaagaaaaccaccagaagacggcgagagcagacaagtcgctagaagaggccagagcagaacaacccaaacgacacggagagcaacaagacaacaaggcacagggagtaaacagcagacaggaacggaaggacaaacgaaaacgatgaatatgataaggacccaaacgcagggtgagcagaaacacatagaagcggaggatctcaccacgaacaagagggcagaggcagacaacacccaagcacaacacacagacgacggggaacaacaccgacctgataaacgtaacgcggagacgagagaaaaagaaaggagaaacgcaacagcagcgagcagaacgaccggagaacgagaaagagcggggagcacagccgaccaaacgaagagacgaacaaaaagcagggggaagacgacgcaacgaaaggacgcgacgggacgaaagatacatacaggacgcacaagaagagaaacaaagaaaaggactcgaactagtaaagcacgaaccagatagagaagccacaggagcn

SEQ ID NO: 714357 - DNA, 393 bp, Homo sapiens
ccgagcgttagctcactcccttttcacactcagatccaccctcagcagatgataatatcaagacacctgccgagcgtctgcggggagcgtctgcgggggccgctttcaccctcagcggatgataatctcaagacacctttcgagcgtcagctcacttccctttcacacctcagcttcacaccttagcagatgataatatcaagacacctgccgagcgtctgcgggggccggtttcacaccttagcggatgagaatctcaagacacctttcgagcgtgaggttacttccctttcacaccttagattcacaccttagcagatgataatatcaagacacctgccgagcgtgtgcgggggccgctttcacccttagaggatgataatctcgaccctt

SEQ ID NO: 714358 - DNA, 468 bp, Homo sapiens
gactcccaggttcttttcccctcaactctttgaaggtaagctatgagaattagagaagaaaaaagaataagtggcaaatggaaaaaaagtagcaagatggtagggacttaaagcgaatcacgttgatattacatgaaatgtaagtggtctaaatactctaattaaaagtcagagacctagatttctccccccctgaaaaaaaaacagcaagagccaactatttgttttctacaaagacacaccttacatcataagacacagataagtcaaaaggatggaaaaagatataacatgaatgagaaagctgccaattgaacaaaattaacttcagaacaaatcttagaaccaaagcgtccttgatacaatgctttcccattcaccctcacatctagtaaatcagcaactgtggtgactttgtacagcaaggccctaaaactctttgaggggaaaagaccctggggtaccgag

SEQ ID NO: 714359 - DNA, 124 bp, Homo sapiens
gggaaagcgaggtggacattcatctgggtccactgagtctgagtcttcaagggtttcacctccagctaacacagaattttaaaagcacgtgtgcccactattacgcataaacaacggggccccc

SEQ ID NO: 714360 - DNA, 838 bp, Homo sapiens
acagagtgaccctgggggtgctcttgaccagacagccgcacgccccgtgcgtctagagacctccgagacagggatgcatctggaggtctagggaagacacttccagcccctcctctcctcaatcctggcaggcatggtgagtagttaacatcccgtcccgaaagccccgacttgatacagggatcccacagagttccaagcagattgacgagaggagcatccagagagatcaaccctaccagcctgtaaggaccattgatactccaaaggacagctgacagcaacgtccatgtagcctgcattattagcacacatatacataccgcaacagctgacaccagacacttgccaacgaatacacatccatatgagctgattcatcacatattccaggacttatgacactctcaaaaattccacaatgagcgcaagaaccttgatacccgacatggagaggacagagcgtgacacggataaacgaaagaaacgatcccccaagccacactacttcactcacacagcgcgccgaggcagcacacgcactgcgcataacccaaaggaatagcatcgcaagcaactgatcacagatcaccggccccacagaaccccatggcaatagcatctcccaactggcagagtcaagccatacggccggcgcgcaatcaaacagggaacgtgagagagcacaaagacacatgaccccccacaatatcccgtcacccgagaagcaaagacgtcacaaaacatcacacagaacaacggaaacgccatcgaacacggccttcgcaaaccacaccaacaatagaaccaaccaccctggaacgagagcacgaagaag

SEQ ID NO: 714361 - DNA, 3799 bp, Homo sapiens
gaaaaagaaggaaagggagagggagacggctggagcccgaggacgagcgcggagccgcgggccgagcggggggcgggagacaggaaggagggaggcgagcagagggaaggggaagaggtcggggagcgagggcgggagcggtcgcggtcgcgatcgagcaagcaagcgggcgagaggacgccctcccctggcctccagtgcgccgcttccctcgccgccgccccgccagcatgcccggcgtggcccgcctgccgctgctgctcgggctgctgctgctcccgcgtcccggccggccgctggacttggccgactacacctatgacctggcggaggaggacgactcggagcccctcaactacaaagacccctgcaaggcggctgcctttcttggggacattgccctggacgaagaggacctgagggccttccaggtacagcaggctgtggatctcagacggcacacagctcgtaagtcctccatcaaagctgcagttccaggaaacacttctacccccagctgccagagcaccaacgggcagcctcagaggggagcctgtgggagatggagaggtagatcccgtagccggcgggcggcgacgtcccgaccagagcgtgtgtggcccgatggggtcatcccctttgtcattgggggaaacttcactggtagccagagggcagtcttccggcaggccatgaggcactgggagaagcacacctgtgtcaccttcctggagcgcactgacgaggacagctatattgtgttcacctatcgaccttgcgggtgctgctcctacgtgggtcgccgcggcgggggcccccaggccatctccatcggcaagaactgtgacaagttcggcattgtggtccacgagctgggccacgtcgtcggcttctggcacgaacacactcggccagaccgggaccgccacgtttccatcgttcgtgagaacatccagccagggcaggagtataacttcctgaagatggagcctcaggaggtggagtccctgggggagacctatgacttcgacagcatcatgcattacgctcggaacacattctccaggggcatcttcctggataccattgtccccaagtatgaggtgaacggggtgaaacctcccattggccaaaggacacggctcagcaagggggacattgcccaagcccgcaagctttacaagtgcccagcctgtggagagaccctgcaagacagcacaggcaacttctcctcccctgaataccccaatggctactctgctcacatgcactgcgtgtggcgcatctctgtcacacccggggagaagatcatcctgaacttcacgtccctggacctgtaccgcagccgcctgtgctggtacgactatgtggaggtccgagatggcttctggaggaaggcgcccctccgaggccgcttctgcgggtccaaactccctgagcctatcgtctccactgacagccgcctctgggttgaattccgcagcagcagcaattgggttggaaagggcttctttgcagtctacgaagccatctgcgggggtgatgtgaaaaaggactatggccacattcaatcgcccaactacccagacgattaccggcccagcaaagtctgcatctggcggatccaggtgtctgagggcttccacgtgggcctcacattccagtcctttgagattgagcgccacgacagctgtgcctacgactatctggaggtgcgcgacgggcacagtgagagcagcaccctcatcgggcgctactgtggctatgagaagcctgatgacatcaagagcacgtccagccgcctctggctcaagttcgtctctgacgggtccattaacaaagcgggctttgccgtcaactttttcaaagaggtggacgagtgctctcggcccaaccgcgggggctgtgagcagcggtgcctcaacaccctgggcagctacaagtgcagctgtgaccccgggtacgagctggccccagacaagcgccgctgtgaggctgcttgtggcggattcctcaccaagctcaacggctccatcaccagcccgggctggcccaaggagtacccccccaacaagaactgcatctggcagctggtggcccccacccagtaccgcatctccctgcagtttgacttctttgagacagagggcaatgatgtgtgcaagtacgacttcgtggaggtgcgcagtggactcacagctgactccaagctgcatggcaagttctgtggttctgagaagcccgaggtcatcacctcccagtacaacaacatgcgcgtggagttcaagtccgacaacaccgtgtccaaaaagggcttcaaggcccacttcttctcacagacaaggacgagtgctccaaggataacggcggctgccagcaggactgcgtcaacacgttcggcagttatgagtgccaatgccgcagtggcttcgtcctccatgacaacaagcacgactgcaaagaagccggctgtgaccacaaggtgacatccaccagtggtaccatcaccagccccaactggcctgacaagtatcccagcaagaaggagtgcacgtgggccatctccagcacccccgggcaccgggtcaagctgaccttcatggagatggacatcgagtcccagcctgagtgtgcctacgaccacctagaggtgttcgacgggcgagacgccaaggcccccgtcctcggccgcttctgtgggagcaagaagcccgagcccgtcctggccacaggcagccgcatgttcctgcgcttctactcagataactcggtccagcgaaagggcttccaggcctcccacgccacagagtgcgggggccaggtacgggcagacgtgaagaccaaggacctttactcccacgcccagtttggcgacaacaactaccctgggggtgtggactgtgagtgggtcattgtggccgaggaaggctacggcgtggagctcgtgttccagacctttgaggtggaggaggagaccgactgcggctatgactacatggagctcttcgacggctacgacagcacagcccccaggctggggcgctactgtggctcagggcctcctgaggaggtgtactcggcgggagattctgtcctggtgaagttccactcggatgacaccatcaccaaaaaaggtttccacctgcgatacaccagcaccaagttccaggacacactccacagcaggaagtgaccactgcctgagcaggggcggggactggagcctgctgcccttggtcgcctagactggatagtgggggtgggcggaaggcaacgcaccatccctctcccccaggccccaggacctgcagggccaatggcctggtgagactgtccataggaggtgggggaactggactccggcataagccacttccccacaaacccccaccagcaaggggctggggccagggagcagagcttccacaagacatttcgaagtcatcattcctctcttagggggccctgcctggtggcaagagggaatgtcagcaggaccccatcgccatccctgtgtctctacacgctgtattgtgtatcaccgggggcattattttcattgtaatgttcatttcccacccctgctccagcctcgatttggttttattttgagcccccattccaccaccccagtttcctggggcacaagtgtctgtgcatgtcccccaggagccaccgtggggagccgatggggaggggatggagaaacaagacagggcttctctcaggcccagtggccggtcagccacaccagggcaccgcagccaataaaccgaaagtgttacagccaaaaaaaaaa

SEQ ID NO: 714362 - DNA, 4482 bp, Homo sapiens
gaaaaagaaggaaagggagagggagacggctggagcccgaggacgagcgcggagccgcgggccgagcggggggcgggagacaggaaggagggaggcgagcagagggaaggggaagaggtcggggagcgagggcgggagcggtcgcggtcgcgatcgagcaagcaagcgggcgagaggacgccctcccctggcctccagtgcgccgcttccctcgccgccgccccgccagcatgcccggcgtggcccgcctgccgctgctgctcgggctgctgctgctcccgcgtcccggccggccgctggacttggccgactacacctatgacctggcggaggaggacgactcggagcccctcaactacaaagacccctgcaaggcggctgcctttcttggggacattgccctggacgaagaggacctgagggccttccaggtacagcaggctgtggatctcagacggcacacagctcgtaagtcctccatcaaagctgcagttccaggaaacacttctacccccagctgccagagcaccaacgggcagcctcagaggggagcctgtgggagatggagaggtagatcccgtagccggcgggcggcgacgtcccgaccagagcgtgtgtggcccgatggggtcatcccctttgtcattgggggaaacttcactggtagccagagggcagtcttccggcaggccatgaggcactgggagaagcacacctgtgtcaccttcctggagcgcactgacgaggacagctatattgtgttcacctatcgaccttgcgggtgctgctcctacgtgggtcgccgcggcgggggcccccaggccatctccatcggcaagaactgtgacaagttcggcattgtggtccacgagctgggccacgtcgtcggcttctggcacgaacacactcggccagaccgggaccgccacgtttccatcgttcgtgagaacatccagccagggcaggagtataacttcctgaagatggagcctcaggaggtggagtccctgggggagacctatgacttcgacagcatcatgcattacgctcggaacacattctccaggggcatcttcctggataccattgtccccaagtatgaggtgaacggggtgaaacctcccattggccaaaggacacggctcagcaagggggacattgcccaagcccgcaagctttacaagtgcccagcctgtggagagaccctgcaagacagcacaggcaacttctcctcccctgaataccccaatggctactctgctcacatgcactgcgtgtggcgcatctctgtcacacccggggagaagatcatcctgaacttcacgtccctggacctgtaccgcagccgcctgtgctggtacgactatgtggaggtccgagatggcttctggaggaaggcgcccctccgaggccgcttctgcgggtccaaactccctgagcctatcgtctccactgacagccgcctctgggttgaattccgcagcagcagcaattgggttggaaagggcttctttgcagtctacgaagccatctgcgggggtgatgtgaaaaaggactatggccacattcaatcgcccaactacccagacgattaccggcccagcaaagtctgcatctggcggatccaggtgtctgagggcttccacgtgggcctcacattccagtcctttgagattgagcgccacgacagctgtgcctacgactatctggaggtgcgcgacgggcacagtgagagcagcaccctcatcgggcgctactgtggctatgagaagcctgatgacatcaagagcacgtccagccgcctctggctcaagttcgtctctgacgggtccattaacaaagcgggctttgccgtcaactttttcaaagaggtggacgagtgctctcggcccaaccgcgggggctgtgagcagcggtgcctcaacaccctgggcagctacaagtgcagctgtgaccccgggtacgagctggccccagacaagcgccgctgtgaggctgcttgtggcggattcctcaccaagctcaacggctccatcaccagcccgggctggcccaaggagtacccccccaacaagaactgcatctggcagctggtggcccccacccagtaccgcatctccctgcagtttgacttctttgagacagagggcaatgatgtgtgcaagtacgacttcgtggaggtgcgcagtggactcacagctgactccaagctgcatggcaagttctgtggttctgagaagcccgaggtcatcacctcccagtacaacaacatgcgcgtggagttcaagtccgacaacaccgtgtccaaaaagggcttcaaggcccacttcttctcagaaaagaggccagctctgcagccccctcggggacgcccccaccagctcaaattccgagtgcagaaaagaaaccggaccccccagtgaggcctgccaggcctcccggaccccttgttactcaggaacctcaccttggacggaatgggatgggggcttcggtgcccaccaaccccccacctccactctgccattccggcccacctccctctggccggacagaactggtgctctcttctccccactgtgcccgtccgcggaccggggacccttccccgtgccctaccccctcccattttgatggtgtctgtgacatttcctgttgtgaagtaaaagagggacccctgcgtcctgctcctttctcttgcagtctgcttgtccatgtgtctatttttccacttgtccatctgtccagtaagcaggtaatggtgacccatgctggtccgctcggacccccatcctcctctccccacagctgggccctgctcagctggtcctgctggatgcagtgcccctttggacccccttgtcgcctggcctcccactcccggccacctggcctggccagctctgccagctgttgctctgtcccggtgggagaaagtccagccaggcctccacttcccctggggcatcccaacctcagccctgcacagacccagcgtctgcccttatttgctcccctgcagacaaggacgagtgctccaaggataacggcggctgccagcaggactgcgtcaacacgttcggcagttatgagtgccaatgccgcagtggcttcgtcctccatgacaacaagcacgactgcaaagaagccggctgtgaccacaaggtgacatccaccagtggtaccatcaccagccccaactggcctgacaagtatcccagcaagaaggagtgcacgtgggccatctccagcacccccgggcaccgggtcaagctgaccttcatggagatggacatcgagtcccagcctgagtgtgcctacgaccacctagaggtgttcgacgggcgagacgccaaggcccccgtcctcggccgcttctgtgggagcaagaagcccgagcccgtcctggccacaggcagccgcatgttcctgcgcttctactcagataactcggtccagcgaaagggcttccaggcctcccacgccacagagtgcgggggccaggtacgggcagacgtgaagaccaaggacctttactcccacgcccagtttggcgacaacaactaccctgggggtgtggactgtgagtgggtcattgtggccgaggaaggctacggcgtggagctcgtgttccagacctttgaggtggaggaggagaccgactgcggctatgactacatggagctcttcgacggctacgacagcacagcccccaggctggggcgctactgtggctcagggcctcctgaggaggtgtactcggcgggagattctgtcctggtgaagttccactcggatgacaccatcaccaaaaaaggtttccacctgcgatacaccagcaccaagttccaggacacactccacagcaggaagtgaccactgcctgagcaggggcggggactggagcctgctgcccttggtcgcctagactggatagtgggggtgggcggaaggcaacgcaccatccctctcccccaggccccaggacctgcagggccaatggcctggtgagactgtccataggaggtgggggaactggactccggcataagccacttccccacaaacccccaccagcaaggggctggggccagggagcagagcttccacaagacatttcgaagtcatcattcctctcttagggggccctgcctggtggcaagagggaatgtcagcaggaccccatcgccatccctgtgtctctacacgctgtattgtgtatcaccgggggcattattttcattgtaatgttcatttcccacccctgctccagcctcgatttggttttattttgagcccccattccaccaccccagtttcctggggcacaagtgtctgtgcatgtcccccaggagccaccgtggggagccgatggggaggggatggagaaacaagacagggcttctctcaggcccagtggccggtcagccacaccagggcaccgcagccaataaaccgaaagtgttacagccaaaaaaaaaa

SEQ ID NO: 714363 - DNA, 4981 bp, Homo sapiens
gaaaaagaaggaaagggagagggagacggctggagcccgaggacgagcgcggagccgcgggccgagcggggggcgggagacaggaaggagggaggcgagcagagggaaggggaagaggtcggggagcgagggcgggagcggtcgcggtcgcgatcgagcaagcaagcgggcgagaggacgccctcccctggcctccagtgcgccgcttccctcgccgccgccccgccagcatgcccggcgtggcccgcctgccgctgctgctcgggctgctgctgctcccgcgtcccggccggccgctggacttggccgactacacctatgacctggcggaggaggacgactcggagcccctcaactacaaagacccctgcaaggcggctgcctttcttggggacattgccctggacgaagaggacctgagggccttccaggtacagcaggctgtggatctcagacggcacacagctcgtaagtcctccatcaaagctgcagttccaggaaacacttctacccccagctgccagagcaccaacgggcagcctcagaggggagcctgtgggagatggagaggtagatcccgtagccggcgggcggcgacgtcccgaccagagcgtgtgtggcccgatggggtcatcccctttgtcattgggggaaacttcactggtagccagagggcagtcttccggcaggccatgaggcactgggagaagcacacctgtgtcaccttcctggagcgcactgacgaggacagctatattgtgttcacctatcgaccttgcgggtgctgctcctacgtgggtcgccgcggcgggggcccccaggccatctccatcggcaagaactgtgacaagttcggcattgtggtccacgagctgggccacgtcgtcggcttctggcacgaacacactcggccagaccgggaccgccacgtttccatcgttcgtgagaacatccagccagggcaggagtataacttcctgaagatggagcctcaggaggtggagtccctgggggagacctatgacttcgacagcatcatgcattacgctcggaacacattctccaggggcatcttcctggataccattgtccccaagtatgaggtgaacggggtgaaacctcccattggccaaaggacacggctcagcaagggggacattgcccaagcccgcaagctttacaagtgcccagcctgtggagagaccctgcaagacagcacaggcaacttctcctcccctgaataccccaatggctactctgctcacatgcactgcgtgtggcgcatctctgtcacacccggggagaagatcatcctgaacttcacgtccctggacctgtaccgcagccgcctgtgctggtacgactatgtggaggtccgagatggcttctggaggaaggcgcccctccgaggccgcttctgcgggtccaaactccctgagcctatcgtctccactgacagccgcctctgggttgaattccgcagcagcagcaattgggttggaaagggcttctttgcagtctacgaagccatctgcgggggtgatgtgaaaaaggactatggccacattcaatcgcccaactacccagacgattaccggcccagcaaagtctgcatctggcggatccaggtgtctgagggcttccacgtgggcctcacattccagtcctttgagattgagcgccacgacagctgtgcctacgactatctggaggtgcgcgacgggcacagtgagagcagcaccctcatcgggcgctactgtggctatgagaagcctgatgacatcaagagcacgtccagccgcctctggctcaagttcgtctctgacgggtccattaacaaagcgggctttgccgtcaactttttcaaagaggtggacgagtgctctcggcccaaccgcgggggctgtgagcagcggtgcctcaacaccctgggcagctacaagtgcagctgtgaccccgggtacgagctggccccagacaagcgccgctgtgaggggtgttatgatctacaggttgggaaacccctgttgtgggacagacactgtttccgcctctccacgcatggtcccgagatgctggggacagcactccgaggctaatggctccagctcactaggccgatcctgctgtgcccccgagctgctccctttcctgcacctcccaggaccgcccctccctgaactgctttccctgagccccttattcccgctcactccctcttggaggaccttggcctgttcatttgcagagaagatagaaatggccacacttatgaccccttagctcccccactcctccctacaggcccacccctgaggacacccaggccaccctgcctcctcccgtccgccccagagggaccagacacaggtccctgagccttggggagtccacaggctccccatcttctccttactgcatcccagcccacatctcagcccttccccatggcaggggctccccgcagacgatgccaccttccttgtccccgcagctgcttgtggcggattcctcaccaagctcaacggctccatcaccagcccgggctggcccaaggagtacccccccaacaagaactgcatctggcagctggtggcccccacccagtaccgcatctccctgcagtttgacttctttgagacagagggcaatgatgtgtgcaagtacgacttcgtggaggtgcgcagtggactcacagctgactccaagctgcatggcaagttctgtggttctgagaagcccgaggtcatcacctcccagtacaacaacatgcgcgtggagttcaagtccgacaacaccgtgtccaaaaagggcttcaaggcccacttcttctcagaaaagaggccagctctgcagccccctcggggacgcccccaccagctcaaattccgagtgcagaaaagaaaccggaccccccagtgaggcctgccaggcctcccggaccccttgttactcaggaacctcaccttggacggaatgggatgggggcttcggtgcccaccaaccccccacctccactctgccattccggcccacctccctctggccggacagaactggtgctctcttctccccactgtgcccgtccgcggaccggggacccttccccgtgccctaccccctcccattttgatggtgtctgtgacatttcctgttgtgaagtaaaagagggacccctgcgtcctgctcctttctcttgcagtctgcttgtccatgtgtctatttttccacttgtccatctgtccagtaagcaggtaatggtgacccatgctggtccgctcggacccccatcctcctctccccacagctgggccctgctcagctggtcctgctggatgcagtgcccctttggacccccttgtcgcctggcctcccactcccggccacctggcctggccagctctgccagctgttgctctgtcccggtgggagaaagtccagccaggcctccacttcccctggggcatcccaacctcagccctgcacagacccagcgtctgcccttatttgctcccctgcagacaaggacgagtgctccaaggataacggcggctgccagcaggactgcgtcaacacgttcggcagttatgagtgccaatgccgcagtggcttcgtcctccatgacaacaagcacgactgcaaagaagccggctgtgaccacaaggtgacatccaccagtggtaccatcaccagccccaactggcctgacaagtatcccagcaagaaggagtgcacgtgggccatctccagcacccccgggcaccgggtcaagctgaccttcatggagatggacatcgagtcccagcctgagtgtgcctacgaccacctagaggtgttcgacgggcgagacgccaaggcccccgtcctcggccgcttctgtgggagcaagaagcccgagcccgtcctggccacaggcagccgcatgttcctgcgcttctactcagataactcggtccagcgaaagggcttccaggcctcccacgccacagagtgcgggggccaggtacgggcagacgtgaagaccaaggacctttactcccacgcccagtttggcgacaacaactaccctgggggtgtggactgtgagtgggtcattgtggccgaggaaggctacggcgtggagctcgtgttccagacctttgaggtggaggaggagaccgactgcggctatgactacatggagctcttcgacggctacgacagcacagcccccaggctggggcgctactgtggctcagggcctcctgaggaggtgtactcggcgggagattctgtcctggtgaagttccactcggatgacaccatcaccaaaaaaggtttccacctgcgatacaccagcaccaagttccaggacacactccacagcaggaagtgaccactgcctgagcaggggcggggactggagcctgctgcccttggtcgcctagactggatagtgggggtgggcggaaggcaacgcaccatccctctcccccaggccccaggacctgcagggccaatggcctggtgagactgtccataggaggtgggggaactggactccggcataagccacttccccacaaacccccaccagcaaggggctggggccagggagcagagcttccacaagacatttcgaagtcatcattcctctcttagggggccctgcctggtggcaagagggaatgtcagcaggaccccatcgccatccctgtgtctctacacgctgtattgtgtatcaccgggggcattattttcattgtaatgttcatttcccacccctgctccagcctcgatttggttttattttgagcccccattccaccaccccagtttcctggggcacaagtgtctgtgcatgtcccccaggagccaccgtggggagccgatggggaggggatggagaaacaagacagggcttctctcaggcccagtggccggtcagccacaccagggcaccgcagccaataaaccgaaagtgttacagccaaaaaaaaaa

SEQ ID NO: 714364 - DNA, 1472 bp, Homo sapiens
gctttaagacagactctgccggcgccgtccggagccttagaaaccggccccgtgatctgcgagcctggagcctggagccggagcctggggcctggcctgggctgctgaggccctgagctggcaggagcgcagacgcggagcgctgagccaggctgcccagtctgctgagaatgctgccgccgcctctgccctgcccggcagaccgcaagcccctggtgctggatccaatgagggcatgggcactggcagtcagacattgacaggcagccaggcaagacccctggaaggggcagaacagcgttaggcagctgaagcaatcttgatccccagacaaggatcagcaggaccatgggggctgtgcgggatggcagcatgccccatgccccccaggggccccccttgtggacgcgccacccggccagcagggatcacaccaaacacattccaattgtggacaggcgcatatcaaaaaggagggtgagcaattgacgccatggggatgcggtgaattgcacggggaaagggggggcctcgcgggtgcactggcactggaacaagacccgtggcacaaaccacgcaatgcacaattgtggagcaccgagaacgtttccccaacccgtggtgcccccgctgagccgctggtacctgaaggcacccacaggcaggaagaccccaggagtccggagtgaaaccatcactggcacgatgtcaggcaagattccgatcctgggaccgacccagggacaggcattgaccccaaggaggaacaaggggaaggacggcgagcgaaggagaggggaacaacaccgcaaaaaggggaggagcccccggaaggggaaacaaggaagggaatgccgggggaaagggacaaaccgtgtagccgtatgcggggctgagcctagccaggacacgaaacccagagacacaaagcaaagtgcacagggcaaacgccaagcaggggggaaggagccgacaacggtataccggccagcatatccagccaaaagacccatagcaaggaatgggcaacagacgcctaaaaagggcccacgggtaacccaagaacgggagacccgagtcacccccgaccatggaaggccttagcgggcaagagcagaacagacgaagagatgggaccaaagcgaacaccggaaacaggagcggtgaagaacactctggcaacagcaaaccaggaaaaaccaaagaggcgaaccgccgagagacgtacccggcacaacgaccactggacaaagggtgggcacaagcaccgaattacacagcacataatgaggccaaagaggacacgaatgacgacggagaccctaaaccagggagcgccacaacggtagcaccaaacacaaccacaaaagcaatcaaaacacacagagacaagacgaacacaggataaccagaaaaacgaaacaaggacatacaagacgacatacgacacgaacgaaaaccacatccaccag

SEQ ID NO: 714365 - DNA, 4519 bp, Homo sapiens
gaaaaagaaggaaagggagagggagacggctggagcccgaggacgagcgcggagccgcgggccgagcggggggcgggagacaggaaggagggaggcgagcagagggaaggggaagaggtcggggagcgagggcgggagcggtcgcggtcgcgatcgagcaagcaagcgggcgagaggacgccctcccctggcctccagtgcgccgcttccctcgccgccgccccgccagcatgcccggcgtggcccgcctgccgctgctgctcgggctgctgctgctcccgcgtcccggccggccgctggacttggccgactacacctatgacctggcggaggaggacgactcggagcccctcaactacaaagacccctgcaaggcggctgcctttcttggggacattgccctggacgaagaggacctgagggccttccaggtacagcaggctgtggatctcagacggcacacagctcgtaagtcctccatcaaagctgcagttccaggaaacacttctacccccagctgccagagcaccaacgggcagcctcagaggggagcctgtgggagatggagaggtagatcccgtagccggcgggcggcgacgtcccgaccagagcgtgtgtggcccgatggggtcatcccctttgtcattgggggaaacttcactggtagccagagggcagtcttccggcaggccatgaggcactgggagaagcacacctgtgtcaccttcctggagcgcactgacgaggacagctatattgtgttcacctatcgaccttgcggctcgggaccgcccccctgagctggccccgccctccaggtgctgctcctacgtgggtcgccgcggcgggggcccccaggccatctccatcggcaagaactgtgacaagttcggcattgtggtccacgagctgggccacgtcgtcggcttctggcacgaacacactcggccagaccgggaccgccacgtttccatcgttcgtgagaacatccagccagggcaggagtataacttcctgaagatggagcctcaggaggtggagtccctgggggagacctatgacttcgacagcatcatgcattacgctcggaacacattctccaggggcatcttcctggataccattgtccccaagtatgaggtgaacggggtgaaacctcccattggccaaaggacacggctcagcaagggggacattgcccaagcccgcaagctttacaagtgcccagcctgtggagagaccctgcaagacagcacaggcaacttctcctcccctgaataccccaatggctactctgctcacatgcactgcgtgtggcgcatctctgtcacacccggggagaagatcatcctgaacttcacgtccctggacctgtaccgcagccgcctgtgctggtacgactatgtggaggtccgagatggcttctggaggaaggcgcccctccgaggccgcttctgcgggtccaaactccctgagcctatcgtctccactgacagccgcctctgggttgaattccgcagcagcagcaattgggttggaaagggcttctttgcagtctacgaagccatctgcgggggtgatgtgaaaaaggactatggccacattcaatcgcccaactacccagacgattaccggcccagcaaagtctgcatctggcggatccaggtgtctgagggcttccacgtgggcctcacattccagtcctttgagattgagcgccacgacagctgtgcctacgactatctggaggtgcgcgacgggcacagtgagagcagcaccctcatcgggcgctactgtggctatgagaagcctgatgacatcaagagcacgtccagccgcctctggctcaagttcgtctctgacgggtccattaacaaagcgggctttgccgtcaactttttcaaagaggtggacgagtgctctcggcccaaccgcgggggctgtgagcagcggtgcctcaacaccctgggcagctacaagtgcagctgtgaccccgggtacgagctggccccagacaagcgccgctgtgaggctgcttgtggcggattcctcaccaagctcaacggctccatcaccagcccgggctggcccaaggagtacccccccaacaagaactgcatctggcagctggtggcccccacccagtaccgcatctccctgcagtttgacttctttgagacagagggcaatgatgtgtgcaagtacgacttcgtggaggtgcgcagtggactcacagctgactccaagctgcatggcaagttctgtggttctgagaagcccgaggtcatcacctcccagtacaacaacatgcgcgtggagttcaagtccgacaacaccgtgtccaaaaagggcttcaaggcccacttcttctcagaaaagaggccagctctgcagccccctcggggacgcccccaccagctcaaattccgagtgcagaaaagaaaccggaccccccagtgaggcctgccaggcctcccggaccccttgttactcaggaacctcaccttggacggaatgggatgggggcttcggtgcccaccaaccccccacctccactctgccattccggcccacctccctctggccggacagaactggtgctctcttctccccactgtgcccgtccgcggaccggggacccttccccgtgccctaccccctcccattttgatggtgtctgtgacatttcctgttgtgaagtaaaagagggacccctgcgtcctgctcctttctcttgcagtctgcttgtccatgtgtctatttttccacttgtccatctgtccagtaagcaggtaatggtgacccatgctggtccgctcggacccccatcctcctctccccacagctgggccctgctcagctggtcctgctggatgcagtgcccctttggacccccttgtcgcctggcctcccactcccggccacctggcctggccagctctgccagctgttgctctgtcccggtgggagaaagtccagccaggcctccacttcccctggggcatcccaacctcagccctgcacagacccagcgtctgcccttatttgctcccctgcagacaaggacgagtgctccaaggataacggcggctgccagcaggactgcgtcaacacgttcggcagttatgagtgccaatgccgcagtggcttcgtcctccatgacaacaagcacgactgcaaagaagccggctgtgaccacaaggtgacatccaccagtggtaccatcaccagccccaactggcctgacaagtatcccagcaagaaggagtgcacgtgggccatctccagcacccccgggcaccgggtcaagctgaccttcatggagatggacatcgagtcccagcctgagtgtgcctacgaccacctagaggtgttcgacgggcgagacgccaaggcccccgtcctcggccgcttctgtgggagcaagaagcccgagcccgtcctggccacaggcagccgcatgttcctgcgcttctactcagataactcggtccagcgaaagggcttccaggcctcccacgccacagagtgcgggggccaggtacgggcagacgtgaagaccaaggacctttactcccacgcccagtttggcgacaacaactaccctgggggtgtggactgtgagtgggtcattgtggccgaggaaggctacggcgtggagctcgtgttccagacctttgaggtggaggaggagaccgactgcggctatgactacatggagctcttcgacggctacgacagcacagcccccaggctggggcgctactgtggctcagggcctcctgaggaggtgtactcggcgggagattctgtcctggtgaagttccactcggatgacaccatcaccaaaaaaggtttccacctgcgatacaccagcaccaagttccaggacacactccacagcaggaagtgaccactgcctgagcaggggcggggactggagcctgctgcccttggtcgcctagactggatagtgggggtgggcggaaggcaacgcaccatccctctcccccaggccccaggacctgcagggccaatggcctggtgagactgtccataggaggtgggggaactggactccggcataagccacttccccacaaacccccaccagcaaggggctggggccagggagcagagcttccacaagacatttcgaagtcatcattcctctcttagggggccctgcctggtggcaagagggaatgtcagcaggaccccatcgccatccctgtgtctctacacgctgtattgtgtatcaccgggggcattattttcattgtaatgttcatttcccacccctgctccagcctcgatttggttttattttgagcccccattccaccaccccagtttcctggggcacaagtgtctgtgcatgtcccccaggagccaccgtggggagccgatggggaggggatggagaaacaagacagggcttctctcaggcccagtggccggtcagccacaccagggcaccgcagccaataaaccgaaagtgttacagccaaaaaaaaaa

SEQ ID NO: 714366 - DNA, 793 bp, Homo sapiens
  misc_feature (365)..(365): n is a, c, g, or t
  misc_feature (622)..(622): n is a, c, g, or t
  misc_feature (624)..(624): n is a, c, g, or t
  misc_feature (677)..(677): n is a, c, g, or t
  misc_feature (792)..(792): n is a, c, g, or t
gagacgcgcgggcgggaagatggcggctgggttcaaaaccgtggaacctctggagtattacaggagatttctgaaagagaactgccgtcctgatggaagagaacttggtgaattcagaaccacaactgtcaacatcgggttcaattagtaccgcagatggttctgctttagtgaagtgggggaaatactacagtaatctgtggagttaaagcagaattttgcagcacccatcaacagatgccccctgataaaggatacgttgttcctaatgtggatctaccacgccctgtgttcatcgagattccggtctggacctcctggagaagaggcccaagtggctagccagttcatttgcagatgtcatntgaaaaattcacagataattcagaacagaggacttatgcatgttctccaggaaagcttgtctggggttctatactggtgatctcattttgcctcgactacgatggaaacatttgtggatgcctgcacattgtgcttgtgctaggcgggtttaaaaactgtacagtttgcctgaagttacctataaatgaagaaactgtttagcagaagttaatttaaagaagaaaagttatttgaatattagaactcatccagttgnancttcctttgtgtgttgatgacactttgcttatagttgaccctactggggaggnggaacatctggcaacaggaaccttaacaatagtaatggatgaggaaggcaaactctgttgtcttcacaaaccaggtggaagtgggctaactggagctaaacttcaggactgtatna

SEQ ID NO: 714367 - DNA, 183 bp, Homo sapiens
  misc_feature (104)..(105): n is a, c, g, or t
atggtcatggaagtggcaccttggacgctggaggctgcgggcgctgctgggggagcgagcggcgcaatgcctgctgctggatgccgctccttcttcgctttcannacggccacatcgccggtctgtcaacgtggcttcagaccatcgtgcggcgccggccaagggcgcatgggcctggagaca

SEQ ID NO: 714368 - DNA, 4608 bp, Homo sapiens
gaaaaagaaggaaagggagagggagacggctggagcccgaggacgagcgcggagccgcgggccgagcggggggcgggagacaggaaggagggaggcgagcagagggaaggggaagaggtcggggagcgagggcgggagcggtcgcggtcgcgatcgagcaagcaagcgggcgagaggacgccctcccctggcctccagtgcgccgcttccctcgccgccgccccgccagcatgcccggcgtggcccgcctgccgctgctgctcgggctgctgctgctcccgcgtcccggccggccgctggacttggccgactacacctatgacctggcggaggaggacgactcggagcccctcaactacaaagacccctgcaaggcggctgcctttcttggggacattgccctggacgaagaggacctgagggccttccaggtacagcaggctgtggatctcagacggcacacagctcgtaagtcctccatcaaagctgcagttccaggaaacacttctacccccagctgccagagcaccaacgggcagcctcagaggggagcctgtgggagatggagaggtagatcccgtagccggcgggcggcgacgtcccgaccagagcgtgtgtggcccgatggggtcatcccctttgtcattgggggaaacttcactggtagccagagggcagtcttccggcaggccatgaggcactgggagaagcacacctgtgtcaccttcctggagcgcactgacgaggacagctatattgtgttcacctatcgaccttgcgggtgctgctcctacgtgggtcgccgcggcgggggcccccaggccatctccatcggcaagaactgtgacaagttcggcattgtggtccacgagctgggccacgtcgtcggcttctggcacgaacacactcggccagaccgggaccgccacgtttccatcgttcgtgagaacatccagccagggcaggagtataacttcctgaagatggagcctcaggaggtggagtccctgggggagacctatgacttcgacagcatcatgcattacgctcggaacacattctccaggggcatcttcctggataccattgtccccaagtatgaggtgaacggggtgaaacctcccattggccaaaggacacggctcagcaagggggacattgcccaagcccgcaagctttacaagtgcccagcctgtggagagaccctgcaagacagcacaggcaacttctcctcccctgaataccccaatggctactctgctcacatgcactgcgtgtggcgcatctctgtcacacccggggagaagatcatcctgaacttcacgtccctggacctgtaccgcagccgcctgtgctggtacgactatgtggaggtccgagatggcttctggaggaaggcgcccctccgaggccgcttctgcgggtccaaactccctgagcctatcgtctccactgacagccgcctctgggttgaattccgcagcagcagcaattgggttggaaagggcttctttgcagtctacgaagccatctgcgggggtgatgtgaaaaaggactatggccacattcaatcgcccaactacccagacgattaccggcccagcaaagtctgcatctggcggatccaggtgtctgagggcttccacgtgggcctcacattccagtcctttgagattgagcgccacgacagctgtgcctacgactatctggaggtgcgcgacgggcacagtgagagcagcaccctcatcgggcgctactgtggctatgagaagcctgatgacatcaagagcacgtccagccgcctctggctcaagttcgtctctgacgggtccattaacaaagcgggctttgccgtcaactttttcaaagaggtggacgagtgctctcggcccaaccgcgggggctgtgagcagcggtgcctcaacaccctgggcagctacaagtgcagctgtgaccccgggtacgagctggccccagacaagcgccgctgtgaggctgcttgtggcggattcctcaccaagctcaacggctccatcaccagcccgggctggcccaaggagtacccccccaacaagaactgcatctggcagctggtggcccccacccagtaccgcatctccctgcagtttgacttctttgagacagagggcaatgatgtgtgcaagtacgacttcgtggaggtgcgcagtggactcacagctgactccaagctgcatggcaagttctgtggttctgagaagcccgaggtcatcacctcccagtacaacaacatgcgcgtggagttcaagtccgacaacaccgtgtccaaaaagggcttcaaggcccacttcttctcacaggaggggagctatttggacttttgggacacccaccgaggagaccctaagccaagaaggagaagaaagagcctgaagaccttcagtctgacccctgccaccttccggggcatttgggcactgtaggaaaagaggccagctctgcagccccctcggggacgcccccaccagctcaaattccgagtgcagaaaagaaaccggaccccccagtgaggcctgccaggcctcccggaccccttgttactcaggaacctcaccttggacggaatgggatgggggcttcggtgcccaccaaccccccacctccactctgccattccggcccacctccctctggccggacagaactggtgctctcttctccccactgtgcccgtccgcggaccggggacccttccccgtgccctaccccctcccattttgatggtgtctgtgacatttcctgttgtgaagtaaaagagggacccctgcgtcctgctcctttctcttgcagtctgcttgtccatgtgtctatttttccacttgtccatctgtccagtaagcaggtaatggtgacccatgctggtccgctcggacccccatcctcctctccccacagctgggccctgctcagctggtcctgctggatgcagtgcccctttggacccccttgtcgcctggcctcccactcccggccacctggcctggccagctctgccagctgttgctctgtcccggtgggagaaagtccagccaggcctccacttcccctggggcatcccaacctcagccctgcacagacccagcgtctgcccttatttgctcccctgcagacaaggacgagtgctccaaggataacggcggctgccagcaggactgcgtcaacacgttcggcagttatgagtgccaatgccgcagtggcttcgtcctccatgacaacaagcacgactgcaaagaagccggctgtgaccacaaggtgacatccaccagtggtaccatcaccagccccaactggcctgacaagtatcccagcaagaaggagtgcacgtgggccatctccagcacccccgggcaccgggtcaagctgaccttcatggagatggacatcgagtcccagcctgagtgtgcctacgaccacctagaggtgttcgacgggcgagacgccaaggcccccgtcctcggccgcttctgtgggagcaagaagcccgagcccgtcctggccacaggcagccgcatgttcctgcgcttctactcagataactcggtccagcgaaagggcttccaggcctcccacgccacagagtgcgggggccaggtacgggcagacgtgaagaccaaggacctttactcccacgcccagtttggcgacaacaactaccctgggggtgtggactgtgagtgggtcattgtggccgaggaaggctacggcgtggagctcgtgttccagacctttgaggtggaggaggagaccgactgcggctatgactacatggagctcttcgacggctacgacagcacagcccccaggctggggcgctactgtggctcagggcctcctgaggaggtgtactcggcgggagattctgtcctggtgaagttccactcggatgacaccatcaccaaaaaaggtttccacctgcgatacaccagcaccaagttccaggacacactccacagcaggaagtgaccactgcctgagcaggggcggggactggagcctgctgcccttggtcgcctagactggatagtgggggtgggcggaaggcaacgcaccatccctctcccccaggccccaggacctgcagggccaatggcctggtgagactgtccataggaggtgggggaactggactccggcataagccacttccccacaaacccccaccagcaaggggctggggccagggagcagagcttccacaagacatttcgaagtcatcattcctctcttagggggccctgcctggtggcaagagggaatgtcagcaggaccccatcgccatccctgtgtctctacacgctgtattgtgtatcaccgggggcattattttcattgtaatgttcatttcccacccctgctccagcctcgatttggttttattttgagcccccattccaccaccccagtttcctggggcacaagtgtctgtgcatgtcccccaggagccaccgtggggagccgatggggaggggatggagaaacaagacagggcttctctcaggcccagtggccggtcagccacaccagggcaccgcagccaataaaccgaaagtgttacagccaaaaaaaaaa

SEQ ID NO: 714369 - DNA, 819 bp, Homo sapiens
  misc_feature (391)..(391): n is a, c, g, or t
  misc_feature (648)..(648): n is a, c, g, or t
  misc_feature (650)..(650): n is a, c, g, or t
  misc_feature (703)..(703): n is a, c, g, or t
  misc_feature (818)..(818): n is a, c, g, or t
gagacgcgcgggcgggaagatggcggctgggttcaaaaccgtggaacctctggagtattacaggagatttctgaaagagaactgccgtcctgatggaagagaacttggtgaattcagaaccacaactgtcaacatcgggttcaattagtaccgcagatggttctgctttagtgaagtgggggaaatactacagtaatctgtggagttaaagcaatgactttcagtaacctgtccaggaggaattttgcagcacccatcaacagatgccccctgataaaggatacgttgttcctaatgtggatctaccacgccctgtgttcatcgagattccggtctggacctcctggagaagaggcccaagtggctagccagttcatttgcagatgtcatntgaaaaattcacagataattcagaacagaggacttatgcatgttctccaggaaagcttgtctggggttctatactggtgatctcattttgcctcgactacgatggaaacatttgtggatgcctgcacattgtgcttgtgctaggcgggtttaaaaactgtacagtttgcctgaagttacctataaatgaagaaactgtttagcagaagttaatttaaagaagaaaagttatttgaatattagaactcatccagttgnancttcctttgtgtgttgatgacactttgcttatagttgaccctactggggaggnggaacatctggcaacaggaaccttaacaatagtaatggatgaggaaggcaaactctgttgtcttcacaaaccaggtggaagtgggctaactggagctaaacttcaggactgtatna

SEQ ID NO: 714370 - DNA, 185 bp, Homo sapiens
cagacgcagctacaaggtccatgaccgcaatgccaccgtatatcagttgagagagactatcatcaacaacatgtaacagtgtcttggagtcctatgtatattgatgataaagagaggagtcacggaagatgatgggagacccatttatgcgttggtgaatcttgctacaacttctagttcctcat

SEQ ID NO: 714371 - DNA, 4848 bp, Homo sapiens
gaaaaagaaggaaagggagagggagacggctggagcccgaggacgagcgcggagccgcgggccgagcggggggcgggagacaggaaggagggaggcgagcagagggaaggggaagaggtcggggagcgagggcgggagcggtcgcggtcgcgatcgagcaagcaagcgggcgagaggacgccctcccctggcctccagtgcgccgcttccctcgccgccgccccgccagcatgcccggcgtggcccgcctgccgctgctgctcgggctgctgctgctcccgcgtcccggccggccgctggacttggccgactacacctatgacctggcggaggaggacgactcggagcccctcaactacaaagacccctgcaaggcggctgcctttcttggggacattgccctggacgaagaggacctgagggccttccaggtacagcaggctgtggatctcagacggcacacagctcgtaagtcctccatcaaagctgcagttccaggaaacacttctacccccagctgccagagcaccaacgggcagcctcagaggggagcctgtgggagatggagaggtagatcccgtagccggcgggcggcgacgtcccgaccagagcgtgtgtggcccgatggggtcatcccctttgtcattgggggaaacttcactggtagccagagggcagtcttccggcaggccatgaggcactgggagaagcacacctgtgtcaccttcctggagcgcactgacgaggacagctatattgtgttcacctatcgaccttgcgggtgctgctcctacgtgggtcgccgcggcgggggcccccaggccatctccatcggcaagaactgtgacaagttcggcattgtggtccacgagctgggccacgtcgtcggcttctggcacgaacacactcggccagaccgggaccgccacgtttccatcgttcgtgagaacatccagccagggcaggagtataacttcctgaagatggagcctcaggaggtggagtccctgggggagacctatgacttcgacagcatcatgcattacgctcggaacacattctccaggggcatcttcctggataccattgtccccaagtatgaggtgaacggggtgaaacctcccattggccaaaggacacggctcagcaagggggacattgcccaagcccgcaagctttacaagtgcccagcctgtggagagaccctgcaagacagcacaggcaacttctcctcccctgaataccccaatggctactctgctcacatgcactgcgtgtggcgcatctctgtcacacccggggagaagatcatcctgaacttcacgtccctggacctgtaccgcagccgcctgtgctggtacgactatgtggaggtccgagatggcttctggaggaaggcgcccctccgaggccgcttctgcgggtccaaactccctgagcctatcgtctccactgacagccgcctctgggttgaattccgcagcagcagcaattgggttggaaagggcttctttgcagtctacgaagccatctgcgggggtgatgtgaaaaaggactatggccacattcaatcgcccaactacccagacgattaccggcccagcaaagtctgcatctggcggatccaggtgtctgagggcttccacgtgggcctcacattccagtcctttgagattgagcgccacgacagctgtgcctacgactatctggaggtgcgcgacgggcacagtgagagcagcaccctcatcgggcgctactgtggctatgagaagcctgatgacatcaagagcacgtccagccgcctctggctcaagttcgtctctgacgggtccattaacaaagcgggctttgccgtcaactttttcaaagaggtggacgagtgctctcggcccaaccgcgggggctgtgagcagcggtgcctcaacaccctgggcagctacaagtgcagctgtgaccccgggtacgagctggccccagacaagcgccgctgtgaggctgcttgtggcggattcctcaccaagctcaacggctccatcaccagcccgggctggcccaaggagtacccccccaacaagaactgcatctggcagctggtggcccccacccagtaccgcatctccctgcagtttgacttctttgagacagagggcaatgatgtgtgcaagtacgacttcgtggaggtgcgcagtggactcacagctgactccaagctgcatggcaagttctgtggttctgagaagcccgaggtcatcacctcccagtacaacaacatgcgcgtggagttcaagtccgacaacaccgtgtccaaaaagggcttcaaggcccacttcttctcagtcttggagggggcaggggaccgacactcacatctatcaggcctggagttactgctctgcccccatgccctggtcgacactgtgcccgccccaccctcagccctgcacggagacacacacgcccacacgcacacacatgtgcacacacattgccccatcgcacaagaaacctgcagaggacccccactgggggcatcgaggctcagccctcagggcccggggcatctgactctggccccccaggaggggagctatttggacttttgggacacccaccgaggagaccctaagccaagaaggagaagaaagagcctgaagaccttcagtctgacccctgccaccttccggggcatttgggcactgtaggaaaagaggccagctctgcagccccctcggggacgcccccaccagctcaaattccgagtgcagaaaagaaaccggaccccccagtgaggcctgccaggcctcccggaccccttgttactcaggaacctcaccttggacggaatgggatgggggcttcggtgcccaccaaccccccacctccactctgccattccggcccacctccctctggccggacagaactggtgctctcttctccccactgtgcccgtccgcggaccggggacccttccccgtgccctaccccctcccattttgatggtgtctgtgacatttcctgttgtgaagtaaaagagggacccctgcgtcctgctcctttctcttgcagtctgcttgtccatgtgtctatttttccacttgtccatctgtccagtaagcaggtaatggtgacccatgctggtccgctcggacccccatcctcctctccccacagctgggccctgctcagctggtcctgctggatgcagtgcccctttggacccccttgtcgcctggcctcccactcccggccacctggcctggccagctctgccagctgttgctctgtcccggtgggagaaagtccagccaggcctccacttcccctggggcatcccaacctcagccctgcacagacccagcgtctgcccttatttgctcccctgcagacaaggacgagtgctccaaggataacggcggctgccagcaggactgcgtcaacacgttcggcagttatgagtgccaatgccgcagtggcttcgtcctccatgacaacaagcacgactgcaaagaagccggctgtgaccacaaggtgacatccaccagtggtaccatcaccagccccaactggcctgacaagtatcccagcaagaaggagtgcacgtgggccatctccagcacccccgggcaccgggtcaagctgaccttcatggagatggacatcgagtcccagcctgagtgtgcctacgaccacctagaggtgttcgacgggcgagacgccaaggcccccgtcctcggccgcttctgtgggagcaagaagcccgagcccgtcctggccacaggcagccgcatgttcctgcgcttctactcagataactcggtccagcgaaagggcttccaggcctcccacgccacagagtgcgggggccaggtacgggcagacgtgaagaccaaggacctttactcccacgcccagtttggcgacaacaactaccctgggggtgtggactgtgagtgggtcattgtggccgaggaaggctacggcgtggagctcgtgttccagacctttgaggtggaggaggagaccgactgcggctatgactacatggagctcttcgacggctacgacagcacagcccccaggctggggcgctactgtggctcagggcctcctgaggaggtgtactcggcgggagattctgtcctggtgaagttccactcggatgacaccatcaccaaaaaaggtttccacctgcgatacaccagcaccaagttccaggacacactccacagcaggaagtgaccactgcctgagcaggggcggggactggagcctgctgcccttggtcgcctagactggatagtgggggtgggcggaaggcaacgcaccatccctctcccccaggccccaggacctgcagggccaatggcctggtgagactgtccataggaggtgggggaactggactccggcataagccacttccccacaaacccccaccagcaaggggctggggccagggagcagagcttccacaagacatttcgaagtcatcattcctctcttagggggccctgcctggtggcaagagggaatgtcagcaggaccccatcgccatccctgtgtctctacacgctgtattgtgtatcaccgggggcattattttcattgtaatgttcatttcccacccctgctccagcctcgatttggttttattttgagcccccattccaccaccccagtttcctggggcacaagtgtctgtgcatgtcccccaggagccaccgtggggagccgatggggaggggatggagaaacaagacagggcttctctcaggcccagtggccggtcagccacaccagggcaccgcagccaataaaccgaaagtgttacagccaaaaaaaaaa

SEQ ID NO: 714372 - DNA, 4648 bp, Homo sapiens
gaaaaagaaggaaagggagagggagacggctggagcccgaggacgagcgcggagccgcgggccgagcggggggcgggagacaggaaggagggaggcgagcagagggaaggggaagaggtcggggagcgagggcgggagcggtcgcggtcgcgatcgagcaagcaagcgggcgagaggacgccctcccctggcctccagtgcgccgcttccctcgccgccgccccgccagcatgcccggcgtggcccgcctgccgctgctgctcgggctgctgctgctcccgcgtcccggccggccgctggacttggccgactacacctatgacctggcggaggaggacgactcggagcccctcaactacaaagacccctgcaaggcggctgcctttcttggggacattgccctggacgaagaggacctgagggccttccaggtacagcaggctgtggatctcagacggcacacagctcgtaagtcctccatcaaagctgcagttccaggaaacacttctacccccagctgccagagcaccaacgggcagcctcagaggggagcctgtgggagatggagaggtagatcccgtagccggcgggcggcgacgtcccgaccagagcgtgtgtggcccgatggggtcatcccctttgtcattgggggaaacttcactggtagccagagggcagtcttccggcaggccatgaggcactgggagaagcacacctgtgtcaccttcctggagcgcactgacgaggacagctatattgtgttcacctatcgaccttgcgggtgctgctcctacgtgggtcgccgcggcgggggcccccaggccatctccatcggcaagaactgtgacaagttcggcattgtggtccacgagctgggccacgtcgtcggcttctggcacgaacacactcggccagaccgggaccgccacgtttccatcgttcgtgagaacatccagccaggcgttctccactcttcactgctccttctcagctgtggctctagaaatggtgcttccttcccatgttcccttgagtcctccactcaccaggccctctgctggacaggactcttcctcagaccctccccattccccaggctccccttggctgctccccggaccctcagggcaggagtataacttcctgaagatggagcctcaggaggtggagtccctgggggagacctatgacttcgacagcatcatgcattacgctcggaacacattctccaggggcatcttcctggataccattgtccccaagtatgaggtgaacggggtgaaacctcccattggccaaaggacacggctcagcaagggggacattgcccaagcccgcaagctttacaagtgcccagcctgtggagagaccctgcaagacagcacaggcaacttctcctcccctgaataccccaatggctactctgctcacatgcactgcgtgtggcgcatctctgtcacacccggggagaagatcatcctgaacttcacgtccctggacctgtaccgcagccgcctgtgctggtacgactatgtggaggtccgagatggcttctggaggaaggcgcccctccgaggccgcttctgcgggtccaaactccctgagcctatcgtctccactgacagccgcctctgggttgaattccgcagcagcagcaattgggttggaaagggcttctttgcagtctacgaagccatctgcgggggtgatgtgaaaaaggactatggccacattcaatcgcccaactacccagacgattaccggcccagcaaagtctgcatctggcggatccaggtgtctgagggcttccacgtgggcctcacattccagtcctttgagattgagcgccacgacagctgtgcctacgactatctggaggtgcgcgacgggcacagtgagagcagcaccctcatcgggcgctactgtggctatgagaagcctgatgacatcaagagcacgtccagccgcctctggctcaagttcgtctctgacgggtccattaacaaagcgggctttgccgtcaactttttcaaagaggtggacgagtgctctcggcccaaccgcgggggctgtgagcagcggtgcctcaacaccctgggcagctacaagtgcagctgtgaccccgggtacgagctggccccagacaagcgccgctgtgaggctgcttgtggcggattcctcaccaagctcaacggctccatcaccagcccgggctggcccaaggagtacccccccaacaagaactgcatctggcagctggtggcccccacccagtaccgcatctccctgcagtttgacttctttgagacagagggcaatgatgtgtgcaagtacgacttcgtggaggtgcgcagtggactcacagctgactccaagctgcatggcaagttctgtggttctgagaagcccgaggtcatcacctcccagtacaacaacatgcgcgtggagttcaagtccgacaacaccgtgtccaaaaagggcttcaaggcccacttcttctcagaaaagaggccagctctgcagccccctcggggacgcccccaccagctcaaattccgagtgcagaaaagaaaccggaccccccagtgaggcctgccaggcctcccggaccccttgttactcaggaacctcaccttggacggaatgggatgggggcttcggtgcccaccaaccccccacctccactctgccattccggcccacctccctctggccggacagaactggtgctctcttctccccactgtgcccgtccgcggaccggggacccttccccgtgccctaccccctcccattttgatggtgtctgtgacatttcctgttgtgaagtaaaagagggacccctgcgtcctgctcctttctcttgcagtctgcttgtccatgtgtctatttttccacttgtccatctgtccagtaagcaggtaatggtgacccatgctggtccgctcggacccccatcctcctctccccacagctgggccctgctcagctggtcctgctggatgcagtgcccctttggacccccttgtcgcctggcctcccactcccggccacctggcctggccagctctgccagctgttgctctgtcccggtgggagaaagtccagccaggcctccacttcccctggggcatcccaacctcagccctgcacagacccagcgtctgcccttatttgctcccctgcagacaaggacgagtgctccaaggataacggcggctgccagcaggactgcgtcaacacgttcggcagttatgagtgccaatgccgcagtggcttcgtcctccatgacaacaagcacgactgcaaagaagccggctgtgaccacaaggtgacatccaccagtggtaccatcaccagccccaactggcctgacaagtatcccagcaagaaggagtgcacgtgggccatctccagcacccccgggcaccgggtcaagctgaccttcatggagatggacatcgagtcccagcctgagtgtgcctacgaccacctagaggtgttcgacgggcgagacgccaaggcccccgtcctcggccgcttctgtgggagcaagaagcccgagcccgtcctggccacaggcagccgcatgttcctgcgcttctactcagataactcggtccagcgaaagggcttccaggcctcccacgccacagagtgcgggggccaggtacgggcagacgtgaagaccaaggacctttactcccacgcccagtttggcgacaacaactaccctgggggtgtggactgtgagtgggtcattgtggccgaggaaggctacggcgtggagctcgtgttccagacctttgaggtggaggaggagaccgactgcggctatgactacatggagctcttcgacggctacgacagcacagcccccaggctggggcgctactgtggctcagggcctcctgaggaggtgtactcggcgggagattctgtcctggtgaagttccactcggatgacaccatcaccaaaaaaggtttccacctgcgatacaccagcaccaagttccaggacacactccacagcaggaagtgaccactgcctgagcaggggcggggactggagcctgctgcccttggtcgcctagactggatagtgggggtgggcggaaggcaacgcaccatccctctcccccaggccccaggacctgcagggccaatggcctggtgagactgtccataggaggtgggggaactggactccggcataagccacttccccacaaacccccaccagcaaggggctggggccagggagcagagcttccacaagacatttcgaagtcatcattcctctcttagggggccctgcctggtggcaagagggaatgtcagcaggaccccatcgccatccctgtgtctctacacgctgtattgtgtatcaccgggggcattattttcattgtaatgttcatttcccacccctgctccagcctcgatttggttttattttgagcccccattccaccaccccagtttcctggggcacaagtgtctgtgcatgtcccccaggagccaccgtggggagccgatggggaggggatggagaaacaagacagggcttctctcaggcccagtggccggtcagccacaccagggcaccgcagccaataaaccgaaagtgttacagccaaaaaaaaaa

SEQ ID NO: 714373 - DNA, 4749 bp, Homo sapiens
gaaaaagaaggaaagggagagggagacggctggagcccgaggacgagcgcggagccgcgggccgagcggggggcgggagacaggaaggagggaggcgagcagagggaaggggaagaggtcggggagcgagggcgggagcggtcgcggtcgcgatcgagcaagcaagcgggcgagaggacgccctcccctggcctccagtgcgccgcttccctcgccgccgccccgccagcatgcccggcgtggcccgcctgccgctgctgctcgggctgctgctgctcccgcgtcccggccggccgctggacttggccgactacacctatgacctggcggaggaggacgactcggagcccctcaactacaaagacccctgcaaggcggctgcctttcttggggacattgccctggacgaagaggacctgagggccttccaggtacagcaggctgtggatctcagacggcacacagctcgtaagtcctccatcaaagctgcagttccaggaaacacttctacccccagctgccagagcaccaacgggcagcctcagaggggagcctgtgggagatggagaggtagatcccgtagccggcgggcggcgacgtcccgaccagagcgtgtgtggcccgatggggtcatcccctttgtcattgggggaaacttcactggtagccagagggcagtcttccggcaggccatgaggcactgggagaagcacacctgtgtcaccttcctggagcgcactgacgaggacagctatattgtgttcacctatcgaccttgcgggtgctgctcctacgtgggtcgccgcggcgggggcccccaggccatctccatcggcaagaactgtgacaagttcggcattgtggtccacgagctgggccacgtcgtcggcttctggcacgaacacactcggccagaccgggaccgccacgtttccatcgttcgtgagaacatccagccaggcgttctccactcttcactgctccttctcagctgtggctctagaaatggtgcttccttcccatgttcccttgagtcctccactcaccaggccctctgctggacaggactcttcctcagaccctccccattccccaggctccccttggctgctccccggaccctcagggcaggagtataacttcctgaagatggagcctcaggaggtggagtccctgggggagacctatgacttcgacagcatcatgcattacgctcggaacacattctccaggggcatcttcctggataccattgtccccaagtatgaggtgaacggggtgaaacctcccattggccaaaggacacggctcagcaagggggacattgcccaagcccgcaagctttacaagtgcccagcctgtggagagaccctgcaagacagcacaggcaacttctcctcccctgaataccccaatggctactctgctcacatgcactgcgtgtggcgcatctctgtcacacccggggagaagatcatcctgaacttcacgtccctggacctgtaccgcagccgcctgtgctggtacgactatgtggaggtccgagatggcttctggaggaaggcgcccctccgagggcccaacactggccagggatgacaacctggtatgggagccaggagtcctggcatcattagtcccagatagctgcattactcacttgctgcgagacttcaggccgcttctgcgggtccaaactccctgagcctatcgtctccactgacagccgcctctgggttgaattccgcagcagcagcaattgggttggaaagggcttctttgcagtctacgaagccatctgcgggggtgatgtgaaaaaggactatggccacattcaatcgcccaactacccagacgattaccggcccagcaaagtctgcatctggcggatccaggtgtctgagggcttccacgtgggcctcacattccagtcctttgagattgagcgccacgacagctgtgcctacgactatctggaggtgcgcgacgggcacagtgagagcagcaccctcatcgggcgctactgtggctatgagaagcctgatgacatcaagagcacgtccagccgcctctggctcaagttcgtctctgacgggtccattaacaaagcgggctttgccgtcaactttttcaaagaggtggacgagtgctctcggcccaaccgcgggggctgtgagcagcggtgcctcaacaccctgggcagctacaagtgcagctgtgaccccgggtacgagctggccccagacaagcgccgctgtgaggctgcttgtggcggattcctcaccaagctcaacggctccatcaccagcccgggctggcccaaggagtacccccccaacaagaactgcatctggcagctggtggcccccacccagtaccgcatctccctgcagtttgacttctttgagacagagggcaatgatgtgtgcaagtacgacttcgtggaggtgcgcagtggactcacagctgactccaagctgcatggcaagttctgtggttctgagaagcccgaggtcatcacctcccagtacaacaacatgcgcgtggagttcaagtccgacaacaccgtgtccaaaaagggcttcaaggcccacttcttctcagaaaagaggccagctctgcagccccctcggggacgcccccaccagctcaaattccgagtgcagaaaagaaaccggaccccccagtgaggcctgccaggcctcccggaccccttgttactcaggaacctcaccttggacggaatgggatgggggcttcggtgcccaccaaccccccacctccactctgccattccggcccacctccctctggccggacagaactggtgctctcttctccccactgtgcccgtccgcggaccggggacccttccccgtgccctaccccctcccattttgatggtgtctgtgacatttcctgttgtgaagtaaaagagggacccctgcgtcctgctcctttctcttgcagtctgcttgtccatgtgtctatttttccacttgtccatctgtccagtaagcaggtaatggtgacccatgctggtccgctcggacccccatcctcctctccccacagctgggccctgctcagctggtcctgctggatgcagtgcccctttggacccccttgtcgcctggcctcccactcccggccacctggcctggccagctctgccagctgttgctctgtcccggtgggagaaagtccagccaggcctccacttcccctggggcatcccaacctcagccctgcacagacccagcgtctgcccttatttgctcccctgcagacaaggacgagtgctccaaggataacggcggctgccagcaggactgcgtcaacacgttcggcagttatgagtgccaatgccgcagtggcttcgtcctccatgacaacaagcacgactgcaaagaagccggctgtgaccacaaggtgacatccaccagtggtaccatcaccagccccaactggcctgacaagtatcccagcaagaaggagtgcacgtgggccatctccagcacccccgggcaccgggtcaagctgaccttcatggagatggacatcgagtcccagcctgagtgtgcctacgaccacctagaggtgttcgacgggcgagacgccaaggcccccgtcctcggccgcttctgtgggagcaagaagcccgagcccgtcctggccacaggcagccgcatgttcctgcgcttctactcagataactcggtccagcgaaagggcttccaggcctcccacgccacagagtgcgggggccaggtacgggcagacgtgaagaccaaggacctttactcccacgcccagtttggcgacaacaactaccctgggggtgtggactgtgagtgggtcattgtggccgaggaaggctacggcgtggagctcgtgttccagacctttgaggtggaggaggagaccgactgcggctatgactacatggagctcttcgacggctacgacagcacagcccccaggctggggcgctactgtggctcagggcctcctgaggaggtgtactcggcgggagattctgtcctggtgaagttccactcggatgacaccatcaccaaaaaaggtttccacctgcgatacaccagcaccaagttccaggacacactccacagcaggaagtgaccactgcctgagcaggggcggggactggagcctgctgcccttggtcgcctagactggatagtgggggtgggcggaaggcaacgcaccatccctctcccccaggccccaggacctgcagggccaatggcctggtgagactgtccataggaggtgggggaactggactccggcataagccacttccccacaaacccccaccagcaaggggctggggccagggagcagagcttccacaagacatttcgaagtcatcattcctctcttagggggccctgcctggtggcaagagggaatgtcagcaggaccccatcgccatccctgtgtctctacacgctgtattgtgtatcaccgggggcattattttcattgtaatgttcatttcccacccctgctccagcctcgatttggttttattttgagcccccattccaccaccccagtttcctggggcacaagtgtctgtgcatgtcccccaggagccaccgtggggagccgatggggaggggatggagaaacaagacagggcttctctcaggcccagtggccggtcagccacaccagggcaccgcagccaataaaccgaaagtgttacagccaaaaaaaaaa

SEQ ID NO: 714374 - DNA, 344 bp, Homo sapiens
  misc_feature (137)..(137): n is a, c, g, or t
attcaaagagaaaagtcagaaagcccttttaaatatatatatatatatatataaaacttggggccgggcatggtggctcacgcctgtaatcctagcactttgggaggccgaggcgggcagatcgcgaggtcaggagntcgaaaccagcctggccaacatggtgaaaccccgtctccactaaaaatacaaaaattagctgggcgtggtggtgcacccttgtaatcccagctactggggaggctgaggcaggagaatggcttcattgaacccagggaggcagaggttgcagtgagccgagatccgtgttactgcgctccagcctggggtgacaagcaagacttcag

SEQ ID NO: 714375 - DNA, 5347 bp, Homo sapiens
gaaaaagaaggaaagggagagggagacggctggagcccgaggacgagcgcggagccgcgggccgagcggggggcgggagacaggaaggagggaggcgagcagagggaaggggaagaggtcggggagcgagggcgggagcggtcgcggtcgcgatcgagcaagcaagcgggcgagaggacgccctcccctggcctccagtgcgccgcttccctcgccgccgccccgccagcatgcccggcgtggcccgcctgccgctgctgctcgggctgctgctgctcccgcgtcccggccggccgctggacttggccgactacacctatgacctggcggaggaggacgactcggagcccctcaactacaaagacccctgcaaggcggctgcctttcttggggacattgccctggacgaagaggacctgagggccttccaggtacagcaggctgtggatctcagacggcacacagctcgtaagtcctccatcaaagctgcagttccaggaaacacttctacccccagctgccagagcaccaacgggcagcctcagaggggagcctgtgggagatggagaggtagatcccgtagccggcgggcggcgacgtcccgaccagagcgtgtgtggcccgatggggtcatcccctttgtcattgggggaaacttcactggtagccagagggcagtcttccggcaggccatgaggcactgggagaagcacacctgtgtcaccttcctggagcgcactgacgaggacagctatattgtgttcacctatcgaccttgcgggtgctgctcctacgtgggtcgccgcggcgggggcccccaggccatctccatcggcaagaactgtgacaagttcggcattgtggtccacgagctgggccacgtcgtcggcttctggcacgaacacactcggccagaccgggaccgccacgtttccatcgttcgtgagaacatccagccagggcaggagtataacttcctgaagatggagcctcaggaggtggagtccctgggggagacctatgacttcgacagcatcatgcattacgctcggaacacattctccaggggcatcttcctggataccattgtccccaagtatgaggtgaacggggtgaaacctcccattggccaaaggacacggctcagcaagggggacattgcccaagcccgcaagctttacaagtgcccagcctgtggagagaccctgcaagacagcacaggcaacttctcctcccctgaataccccaatggctactctgctcacatgcactgcgtgtggcgcatctctgtcacacccggggagaagatcatcctgaacttcacgtccctggacctgtaccgcagccgcctgtgctggtacgactatgtggaggtccgagatggcttctggaggaaggcgcccctccgaggccgcttctgcgggtccaaactccctgagcctatcgtctccactgacagccgcctctgggttgaattccgcagcagcagcaattgggttggaaagggcttctttgcagtctacgaagccatctgcgggggtgatgtgaaaaaggactatggccacattcaatcgcccaactacccagacgattaccggcccagcaaagtctgcatctggcggatccaggtgtctgagggcttccacgtgggcctcacattccagtcctttgagattgagcgccacgacagctgtgcctacgactatctggaggtgcgcgacgggcacagtgagagcagcaccctcatcgggcgctactgtggctatgagaagcctgatgacatcaagagcacgtccagccgcctctggctcaagttcgtctctgacgggtccattaacaaagcgggctttgccgtcaactttttcaaagaggtggacgagtgctctcggcccaaccgcgggggctgtgagcagcggtgcctcaacaccctgggcagctacaagtgcagctgtgaccccgggtacgagctggccccagacaagcgccgctgtgaggggtgttatgatctacaggttgggaaacccctgttgtgggacagacactgtttccgcctctccacgcatggtcccgagatgctggggacagcactccgaggctaatggctccagctcactaggccgatcctgctgtgcccccgagctgctccctttcctgcacctcccaggaccgcccctccctgaactgctttccctgagccccttattcccgctcactccctcttggaggaccttggcctgttcatttgcagagaagatagaaatggccacacttatgaccccttagctcccccactcctccctacaggcccacccctgaggacacccaggccaccctgcctcctcccgtccgccccagagggaccagacacaggtccctgagccttggggagtccacaggctccccatcttctccttactgcatcccagcccacatctcagcccttccccatggcaggggctccccgcagacgatgccaccttccttgtccccgcagctgcttgtggcggattcctcaccaagctcaacggctccatcaccagcccgggctggcccaaggagtacccccccaacaagaactgcatctggcagctggtggcccccacccagtaccgcatctccctgcagtttgacttctttgagacagagggcaatgatgtgtgcaagtacgacttcgtggaggtgcgcagtggactcacagctgactccaagctgcatggcaagttctgtggttctgagaagcccgaggtcatcacctcccagtacaacaacatgcgcgtggagttcaagtccgacaacaccgtgtccaaaaagggcttcaaggcccacttcttctcagtcttggagggggcaggggaccgacactcacatctatcaggcctggagttactgctctgcccccatgccctggtcgacactgtgcccgccccaccctcagccctgcacggagacacacacgcccacacgcacacacatgtgcacacacattgccccatcgcacaagaaacctgcagaggacccccactgggggcatcgaggctcagccctcagggcccggggcatctgactctggccccccaggaggggagctatttggacttttgggacacccaccgaggagaccctaagccaagaaggagaagaaagagcctgaagaccttcagtctgacccctgccaccttccggggcatttgggcactgtaggaaaagaggccagctctgcagccccctcggggacgcccccaccagctcaaattccgagtgcagaaaagaaaccggaccccccagtgaggcctgccaggcctcccggaccccttgttactcaggaacctcaccttggacggaatgggatgggggcttcggtgcccaccaaccccccacctccactctgccattccggcccacctccctctggccggacagaactggtgctctcttctccccactgtgcccgtccgcggaccggggacccttccccgtgccctaccccctcccattttgatggtgtctgtgacatttcctgttgtgaagtaaaagagggacccctgcgtcctgctcctttctcttgcagtctgcttgtccatgtgtctatttttccacttgtccatctgtccagtaagcaggtaatggtgacccatgctggtccgctcggacccccatcctcctctccccacagctgggccctgctcagctggtcctgctggatgcagtgcccctttggacccccttgtcgcctggcctcccactcccggccacctggcctggccagctctgccagctgttgctctgtcccggtgggagaaagtccagccaggcctccacttcccctggggcatcccaacctcagccctgcacagacccagcgtctgcccttatttgctcccctgcagacaaggacgagtgctccaaggataacggcggctgccagcaggactgcgtcaacacgttcggcagttatgagtgccaatgccgcagtggcttcgtcctccatgacaacaagcacgactgcaaagaagccggctgtgaccacaaggtgacatccaccagtggtaccatcaccagccccaactggcctgacaagtatcccagcaagaaggagtgcacgtgggccatctccagcacccccgggcaccgggtcaagctgaccttcatggagatggacatcgagtcccagcctgagtgtgcctacgaccacctagaggtgttcgacgggcgagacgccaaggcccccgtcctcggccgcttctgtgggagcaagaagcccgagcccgtcctggccacaggcagccgcatgttcctgcgcttctactcagataactcggtccagcgaaagggcttccaggcctcccacgccacagagtgcgggggccaggtacgggcagacgtgaagaccaaggacctttactcccacgcccagtttggcgacaacaactaccctgggggtgtggactgtgagtgggtcattgtggccgaggaaggctacggcgtggagctcgtgttccagacctttgaggtggaggaggagaccgactgcggctatgactacatggagctcttcgacggctacgacagcacagcccccaggctggggcgctactgtggctcagggcctcctgaggaggtgtactcggcgggagattctgtcctggtgaagttccactcggatgacaccatcaccaaaaaaggtttccacctgcgatacaccagcaccaagttccaggacacactccacagcaggaagtgaccactgcctgagcaggggcggggactggagcctgctgcccttggtcgcctagactggatagtgggggtgggcggaaggcaacgcaccatccctctcccccaggccccaggacctgcagggccaatggcctggtgagactgtccataggaggtgggggaactggactccggcataagccacttccccacaaacccccaccagcaaggggctggggccagggagcagagcttccacaagacatttcgaagtcatcattcctctcttagggggccctgcctggtggcaagagggaatgtcagcaggaccccatcgccatccctgtgtctctacacgctgtattgtgtatcaccgggggcattattttcattgtaatgttcatttcccacccctgctccagcctcgatttggttttattttgagcccccattccaccaccccagtttcctggggcacaagtgtctgtgcatgtcccccaggagccaccgtggggagccgatggggaggggatggagaaacaagacagggcttctctcaggcccagtggccggtcagccacaccagggcaccgcagccaataaaccgaaagtgttacagccaaaaaaaaaa

SEQ ID NO: 714376 - DNA, 730 bp, Homo sapiens
gacccacgccgtcctgcgcactgggtagcgtgggtcagtggcttgggctgccagctaccgccgtggcgcctcgagcttcccggtgcctccgccgtgcgcccagggatgtagctggagctgctgcgagatgcgacctggggcggagtgaggagtgcgccctgggcggcgacgtgagcgggaatgccgggccagtgctccgtgctgctcttcccgggccagtggcagccagtgtggttgggcatgtggcctgtggtctgctcaactaccctgctgcgtcctgcaaaacctctacgcctgcctggccctgcctgcggtgcttggtgctactgacctgcttggaaacttgagcctgcactgtgtgcctgcaaggagaccctgtgacctgcaccgttgcacttgtcagccctgagatcttcagtggcatcgcttgtcctgatgtcgagaaactacatcacctgcaggccctcggtgattgagaactgtgttgcttgctgctggattcaggtgtgggagagtttgcagccctagttgttttgccggagcccatggaaatttgctgaaggtttgtattgcagtgaaaatcctgagctgaggccatgcaggaagcttcagaagcttgtccccagtgggatgctgtcttgtcctcggccagcctcaagtccaagtttcaaattcgcctgttttggaagccctgggaaacactgaaagttttaggcatagaaaacccgta

SEQ ID NO: 714377 - DNA, 4229 bp, Homo sapiens
cgtgagctacggatggagcgcactgacgaggacagctatattgtgtcacctatcgaccttgcggtcgggtacgccccctgagctggcccgccctccaggtgctgctcctacgtgggtcgccgcggctgcctttcttggggacattgccctggacgaagaggacctgagggccttccaggtacagcaggctgtggatctcagacggcacacagctcgtaagtcctccatcaaagctgcagttccaggaaacacttctacccccagctgccagagcaccaacgggcagcctcagaggggagcctgtgggagatggagaggtagatcccgtagccggcgggcggcgacgtcccgaccagagcgtgtgtggcccgatggggtcatcccctttgtcattgggggaaacttcactggtagccagagggcagtcttccggcaggccatgaggcactgggagaagcacacctgtgtcaccttcctggagcgcactgacgaggacagctatattgtgttcacctatcgaccttgcgggtgctgctcctacgtgggtcgccgcggcgggggcccccaggccatctccatcggcaagaactgtgacaagttcggcattgtggtccacgagctgggccacgtcgtcggcttctggcacgaacacactcggccagaccgggaccgccacgtttccatcgttcgtgagaacatccagccagggcaggagtataacttcctgaagatggagcctcaggaggtggagtccctgggggagacctatgacttcgacagcatcatgcattacgctcggaacacattctccaggggcatcttcctggataccattgtccccaagtatgaggtgaacggggtgaaacctcccattggccaaaggacacggctcagcaagggggacattgcccaagcccgcaagctttacaagtgcccagcctgtggagagaccctgcaagacagcacaggcaacttctcctcccctgaataccccaatggctactctgctcacatgcactgcgtgtggcgcatctctgtcacacccggggagaagatcatcctgaacttcacgtccctggacctgtaccgcagccgcctgtgctggtacgactatgtggaggtccgagatggcttctggaggaaggcgcccctccgaggccgcttctgcgggtccaaactccctgagcctatcgtctccactgacagccgcctctgggttgaattccgcagcagcagcaattgggttggaaagggcttctttgcagtctacgaagccatctgcgggggtgatgtgaaaaaggactatggccacattcaatcgcccaactacccagacgattaccggcccagcaaagtctgcatctggcggatccaggtgtctgagggcttccacgtgggcctcacattccagtcctttgagattgagcgccacgacagctgtgcctacgactatctggaggtgcgcgacgggcacagtgagagcagcaccctcatcgggcgctactgtggctatgagaagcctgatgacatcaagagcacgtccagccgcctctggctcaagttcgtctctgacgggtccattaacaaagcgggctttgccgtcaactttttcaaagaggtggacgagtgctctcggcccaaccgcgggggctgtgagcagcggtgcctcaacaccctgggcagctacaagtgcagctgtgaccccgggtacgagctggccccagacaagcgccgctgtgaggctgcttgtggcggattcctcaccaagctcaacggctccatcaccagcccgggctggcccaaggagtacccccccaacaagaactgcatctggcagctggtggcccccacccagtaccgcatctccctgcagtttgacttctttgagacagagggcaatgatgtgtgcaagtacgacttcgtggaggtgcgcagtggactcacagctgactccaagctgcatggcaagttctgtggttctgagaagcccgaggtcatcacctcccagtacaacaacatgcgcgtggagttcaagtccgacaacaccgtgtccaaaaagggcttcaaggcccacttcttctcagaaaagaggccagctctgcagccccctcggggacgcccccaccagctcaaattccgagtgcagaaaagaaaccggaccccccagtgaggcctgccaggcctcccggaccccttgttactcaggaacctcaccttggacggaatgggatgggggcttcggtgcccaccaaccccccacctccactctgccattccggcccacctccctctggccggacagaactggtgctctcttctccccactgtgcccgtccgcggaccggggacccttccccgtgccctaccccctcccattttgatggtgtctgtgacatttcctgttgtgaagtaaaagagggacccctgcgtcctgctcctttctcttgcagtctgcttgtccatgtgtctatttttccacttgtccatctgtccagtaagcaggtaatggtgacccatgctggtccgctcggacccccatcctcctctccccacagctgggccctgctcagctggtcctgctggatgcagtgcccctttggacccccttgtcgcctggcctcccactcccggccacctggcctggccagctctgccagctgttgctctgtcccggtgggagaaagtccagccaggcctccacttcccctggggcatcccaacctcagccctgcacagacccagcgtctgcccttatttgctcccctgcagacaaggacgagtgctccaaggataacggcggctgccagcaggactgcgtcaacacgttcggcagttatgagtgccaatgccgcagtggcttcgtcctccatgacaacaagcacgactgcaaagaagccggctgtgaccacaaggtgacatccaccagtggtaccatcaccagccccaactggcctgacaagtatcccagcaagaaggagtgcacgtgggccatctccagcacccccgggcaccgggtcaagctgaccttcatggagatggacatcgagtcccagcctgagtgtgcctacgaccacctagaggtgttcgacgggcgagacgccaaggcccccgtcctcggccgcttctgtgggagcaagaagcccgagcccgtcctggccacaggcagccgcatgttcctgcgcttctactcagataactcggtccagcgaaagggcttccaggcctcccacgccacagagtgcgggggccaggtacgggcagacgtgaagaccaaggacctttactcccacgcccagtttggcgacaacaactaccctgggggtgtggactgtgagtgggtcattgtggccgaggaaggctacggcgtggagctcgtgttccagacctttgaggtggaggaggagaccgactgcggctatgactacatggagctcttcgacggctacgacagcacagcccccaggctggggcgctactgtggctcagggcctcctgaggaggtgtactcggcgggagattctgtcctggtgaagttccactcggatgacaccatcaccaaaaaaggtttccacctgcgatacaccagcaccaagttccaggacacactccacagcaggaagtgaccactgcctgagcaggggcggggactggagcctgctgcccttggtcgcctagactggatagtgggggtgggcggaaggcaacgcaccatccctctcccccaggccccaggacctgcagggccaatggcctggtgagactgtccataggaggtgggggaactggactccggcataagccacttccccacaaacccccaccagcaaggggctggggccagggagcagagcttccacaagacatttcgaagtcatcattcctctcttagggggccctgcctggtggcaagagggaatgtcagcaggaccccatcgccatccctgtgtctctacacgctgtattgtgtatcaccgggggcattattttcattgtaatgttcatttcccacccctgctccagcctcgatttggttttattttgagcccccattccaccaccccagtttcctggggcacaagtgtctgtgcatgtcccccaggagccaccgtggggagccgatggggaggggatggagaaacaagacagggcttctctcaggcccagtggccggtcagccacaccagggcaccgcagccaataaaccgaaagtgttacagccaaaaaaaaaa

SEQ ID NO: 714378 - DNA, 464 bp, Homo sapiens
  misc_feature (242)..(242): n is a, c, g, or t
  misc_feature (315)..(315): n is a, c, g, or t
  misc_feature (320)..(320): n is a, c, g, or t
  misc_feature (418)..(418): n is a, c, g, or t
  misc_feature (449)..(449): n is a, c, g, or t
gaatctgcttaccaaaacataagacgacttatatatttgaaagaagtcaaatgaatgagctctctaatagaagtccatgagttgagtgggtatttcttatttgaaagtgtttttctttaatcaaaagtccttagaatgagggaaacaaaatatttatttgttttggaatcccacttatcaaatcattcaaaactttcagctggagtggggtttgctttgtgttgtttgtgtccataagaganatggtagaagatgaagcatatgaagacactgttatgaggttagagaaaaaaacagcagggcttagtttcagcnagcgntcccagtttagagattaatttttaccccctaaggaatatccatccaaagacgctgggtgggagcgtccagcatagcactgggttgagtttctggctgnaaatggtgaagaatggacttttatgctaccngatctagactagtcc

SEQ ID NO: 714379 - DNA, 1228 bp, Homo sapiens
gtgggctgattcgtccgagggagatgcgttgtcggagatcggatctttgctcgcgagaaaaatggggggaacatgaaggattctgcttcatggagattacgcattaggtgtaatactatgtggagtgatgattttttcaggaggagcctaatgtcagaaaatcatagaagtgaatatactatttagtttaatatctaattttcattatcttgaatgctcaaaatctcgtttaaatgaactatccttgatagaacctataaatgtgagacataagtgtgtgttctgcaacaggtgggtgtgacgccttctgattttggacgctctcattcgttctacttatcctaacgtcctatatatcctcacacatcttctagaaaaccaaacatcgagtgtactcgatccataggatagatgtaacgaacagaagatacgagagtgctttttagacgggtaggccttgtaaaaaacggacgctcatggaaagaggtggtaaggagagagttgggctggagcagaggtggattaggtcgcggagggtggatgagctagggaggatgctgttgcatagattaactcggttgatcgaatcagctcgggttagcgatccgttgggctttgacaggtgagtgtggtgataaggtagcgtgtattggcataagcaaggggataccaccaagccatgtagcgagaagtaagcatttgtcgcgtgatggtgacactagcagcgtctatagtaagtaagagagcgtaatcttatctcgggaagggatcgacgcacataggaaggtgggaggatatcgaggaatggcgttgagttcactagagaatccttgagaataccaaaagtactgaaggtaacaaagttccgcgttagggaggcttctcgagagaaggagtctcttggggaagggatcccttcacgagggaagaataatgaggtggggtagaactcacttggggtagaaagagggttcttgatttggaaagccgcacaccgtagacgcaaggacaaacttcaaggaacgataggacggaaacagaggtaatgcaaggttagagggatacaagggagcggacctgagtcaaaaacgcctgcacatgatactgccggccccggagacatgccacaaagacagacacacacagggggggggaccgccccactagagggtacccacaagaggagacacaacaactagtagtgtcgccaacatcggggccacaagag

SEQ ID NO: 714380 - DNA, 1056 bp, Homo sapiens
  misc_feature (625)..(625): n is a, c, g, or t
  misc_feature (656)..(656): n is a, c, g, or t
  misc_feature (694)..(694): n is a, c, g, or t
  misc_feature (751)..(751): n is a, c, g, or t
  misc_feature (854)..(854): n is a, c, g, or t
ccattatggcccgggtgcctacactcgcacgaccaatttattcgtgccgaactcattttatacaaagctggtcttagtgttcccttgctctctgcttgactgagttgcactcacatttttagaacggctatcgatacgtagacgccattttagtaactcacaagccagctccaaacatgttcgtacgtagagtggcacctttagcacctggcatttacaacaatcggtacgtgacatcgctccggtagccacaggagcagtatcgtcttgtccatccgtgcgacgtatcagcgcattcttatgaagggatagtgcccatgcaacagctctaactagtgacgcactgtttcacttgacggtatacacagcggcgatgtcagtcgagactatctctggacatgtcctagatggcctcattagccacttactacgaagtcacttcgaagacagcttgactctagagtatcatatcacactatgtcggacaatgcgctgctgaaccgctgcaccatagcaatcggcacatctcatgtcacttattcgcaacaacgactcgagctctaaagtagcgtgcatccactagctgcatcagagcactctgcatgtcgacgatctacgtagcgcngtttttcggccacactatgagccaagtatcncttcatccgcatcgacgcaatgcatctaagtgagcgcntcacgaagtggcgcatacacactcgatgattggtctaccttagaactaactggctanatttataaactacctccttgtgtagtagcacctggtagtatacgttggatccatcccatgagcacgacctacagattcgttcgcacctctatctgtcacgagncactctactgaagccattcttcacccaatggtcgtaccggccgtatgcaagcctgcactgtatatcccgtccgaacgacaattctaacattcacggtcgcctaacgttccccttaccattcccccttcgttcttgcatcagtctttctattggtcccccatagctgctagtgcgcttgtcaccatcttagagttctggtccg

SEQ ID NO: 714381 - DNA, 960 bp, Homo sapiens
  misc_feature (414)..(414): n is a, c, g, or t
  misc_feature (560)..(560): n is a, c, g, or t
  misc_feature (576)..(576): n is a, c, g, or t
  misc_feature (814)..(814): n is a, c, g, or t
ggacaactgtattatgtatggttaagagcatgaacttcaaaatgaacagccctgggtgtgaattcgagctctgccactgactagcagtttaatgttaggcagattacttaaattctgtgaaataggattaataaaatcaactgaaaagattgtttcaaagacagtatatgacatagtcaaaatagcactgtgcctgacatgtgagtgtttaataaatggcaattgctattattatcctatatggtctgaattctgccttgtcatttcttttctctaaaacttagttctcatcctttattctattagaatgtgttttctaccctacttcaattaatctcttctaaaatttgagtggtccctaacttgatgggttcatttctagtaatttcttattatctctgctaattggaaatngtgatttagattttgttgttcagttgtaaatgcttaatctttttaaattgtttataagcttactgagggcagaagactccataatcaaggtttttgaactcagcatgagacccagtgtctttttctagtagaaacaatgaatagtngtttaagcttcagatngtcaattggaatctctaatcaaattttagaaaacacatttcactatttaaaaattttgtctagttctgattttacaatgacctttcaagcaatgcagtcttacttttattatttccattggatttatttacttctttttttccaaaatgaatttaatggcatgaattcatgaatttctggatatttcttcaaatagagtatcatgtagctgcagtggattgggctgaactttatccangtcttttcttcttaccttttcaaatgacattctgtcacctcattctatatttatatattttccctttctctatattgtgaaaatttagaatcatatatctatatttgatattaattccagacttgtttgggatttcctaagtatta

SEQ ID NO: 714382 - DNA, 349 bp, Homo sapiens
gaagagatcttcctaatgccttggatgagaaacagctaaattgaaaaacatgaatctgtctgctaattcaaggatagagaaaatttgctgcctattcaaatttcttgcaaaggaaaaggataatatagatatcacacttcagtggccttattcagcattcaaaatctagaggaggctgaagcatctcctgaagtcttccagtcctctggctatattctagattattgtccgtcctctgagtattccagaatacggtcttcctaacccagaattgcttttcagagttattctatgtcactgtgagatgatatcctatctcataagatagctggtgtatataagcagacaa

SEQ ID NO: 714383 - DNA, 611 bp, Homo sapiens
gcctggacggaccctcgccagtgctctgcgcaggattggaacatcagttaacatctgaccactgccagcccaaccccttcccacccatcgtcgattgcatctctgggctccaggtataaagcaggtcttggggtgcaccatgatttcaccattcttagtactggccattggctcctgccttactaactccttagtgccagagaaagagaaagaccccaagtactggcgagaccaagcgcaagagacactgaaatatgccctggagcttcagaagctcaacaccaacgtggctaagaatgtcatcatgttcctgggagactggcgatgcggctgtctccacatgtgacggctgcccgcatcctcaagaggtcaagctccaccatcaatcccatggggaggacgaccagtgctggaccattggacaacgttccccattcgtggaccttctccaatgacgtacaacaccatatgcccaatgtccctgatcagcgccggcacctgcaccgcctacctgtgtggggtgaaggccaatgagggcaccgtggcgggtaagcgctgccactgatcgttcccgtgtgcaacacctacccaggggaactaggtcacctcca

SEQ ID NO: 714384 - DNA, 226 bp, Homo sapiens
tggggcaacaaaagctcggtagggctgcaaacattaaaagttcacataatcatctggtaagaacattatgttattttgggtggaaattactagaaattttttctccgtgattttggccatatatagtggattggcatatttttggatataagtgcaaaagttatattgacttggttttttagtggtgatacaccattaaaatatttacaaggggtgggattactat

SEQ ID NO: 714385 - DNA, 144 bp, Homo sapiens
atttctgttggaggttctggaaggggatgtatatgagacccgtgactccacggcgtctgggctgtcccggattagtttataagtggaccagcacctggccggttcaggcccagtgcctcacctagagggcacaggaagtcacag

SEQ ID NO: 714386 - DNA, 198 bp, Homo sapiens
tttttttgcctcaaaaagtgacatttatcaaagaaaaaaaatgacaagatgtcatccttggtcccttccctcccccctctcgtcactcagccagagattgacgctgcgtggctgtgcgagacagcctcagatgagtcacgcataggcattcctatgagttgagagtatgagtctgtttcaataacactccgcaccatc

SEQ ID NO: 714387 - DNA, 310 bp, Homo sapiens
ttaaccctcacctaaagaatcaacaacatacctggtagagggtactacgcacaacctctatctttccctaaggtcaaagacactatcatctgctgtgttagggatgggttctgattggcagaaattaaacagctcccaatgagagcccacggaaataaatagggtcccaagaaaaaaaacgggagctatataacagaaccgagctactgccaaaattcattacctcaaacctttaatgagggttactacgggccggggtaccgaactaaaattcgaaactcatggacaataacaatatacctgaaagaaa

SEQ ID NO: 714388 - DNA, 240 bp, Homo sapiens
ctcggatccgttatcgccccacatgcaacttcagcaaagtctcaggatacaaaatcaatgtaccaaaatcacaagcattcttatacaccaacaacagacaaacagagagccaaatcatgagtgaactcccattcacaattgcttcaaagagaataaaatacctaggaatccaacttacaagggatgtgaaggacctcttccaggagaactacaaaccacatttaccttctccagctgctc

SEQ ID NO: 714389 - DNA, 1009 bp, Homo sapiens
cgtgaccgcgtgggcggacgcgtgagctctctgggtgtggggtatggacgcaccaggagaggtacttaataatggcttcacctggaacatcataaagtacctctctgggtgtggggtaggacgcaccaggatagctattgattaatgttaagggtgtctacccacagaaagcacaccctcttaaaccaggcactgcctgggtcctggtccctgagagcgctaccaggatcaggttcctgcaagccgtcagaatgtgggagcccccagcccaactgattgtaactgtcccctgttacctgtgacatgaacctccaacagcacctggaaacggttcccctctggtccaagtggtctggtaacgggctgtgggagaagactctcagagttaccacatctcgctgtgttgtaggggaggttggggagtagaggttaggaatggcaagtgcccttggaacctcccacagtatggccgtcctgacctcatcgcaggaactctacggtgaccaggaaccaccctctgacgaggtctgtagcggccttctcagagtggaacagccacagtgctagttgtgcctggtcttactgtactccacggacctcggtgaagcaaaagcttcaggcagagggaatgaggcacccagttggtagccccgcggggcccccgtggcttcctgctctcctattgcacgtcgagggcggggagagaccttccctaattcaacatatctcatcacacgcaacggatgaaccctgctgctccgccgccgggcatggacgcccgacccacccggccatgtagctcaacctaacaattggcatggcttacaccacaggaagcacaactcaacccttcaagtgcaacacgccacacgccggacggcacacctctcgcggaccaccacactcgccccacactcgacacacgcaaggtcgcccgagcaaaccccgcgcgcacataccaccactcaaacgacgaacaccccagcaccgccactgtcacctccacgta

SEQ ID NO: 714390 - DNA, 955 bp, Homo sapiens
  misc_feature (467)..(467): n is a, c, g, or t
  misc_feature (472)..(474): n is a, c, g, or t
  misc_feature (477)..(477): n is a, c, g, or t
  misc_feature (479)..(479): n is a, c, g, or t
  misc_feature (483)..(487): n is a, c, g, or t
  misc_feature (564)..(564): n is a, c, g, or t
agcggagacacacctttgatcttgctgaaagatggactcagcatgtttgctctaatgactaagtgaaatgcggcattccaaaagaactcactgtcctgattgggatagcagagaaagctggggacatgaaagctatcgtggaagtcacaagcggaagaggagatctcatagtagcacacaagagaacaggcattgtaaaccacatcaccagtttaaagaatctgattgtcattatttagaagcaaggtccttgaatgagcgagattatcgggaccggagatacgttgacgaatacaggaatgactactgtgaaggatatgttcctagacattatcacagagacattgaaagcgggtatcgaatccactgcagtaaatcttcagtccgcagcaggagaagcagtcctaaaaggaagcgcaatagacactgttcaagtcatcagtcacgttcgatatgattggtttcgntttcnnnttnantggnnnnntatttgtgtgtactcttaacgagctgataagtttctaattttttatatatatatatataaaatactatttggatatnttataattgtatttatattacttaaatccttaaaggaaacctccaaattcttgtagctgatctgtatatttattagctagccctcatttgcccacatttcctcatattctgcagaccagataatgagtttattgattttaataataaaactatttttttatttgtaacatattcttatgaaaaaatcatgcacccatatcttttctttcatcttaagcattttttttttcttagaaaccctttatctggtacttgaaaataaatgtgaaatattgcactggtggacacctgaatgttactaacctgcatagagcatagttccatagtccagtgcatcattgtctgcaatgaattcttttgaagttgtgaaaatgggtgctgaatgggaaac

SEQ ID NO: 714391 - DNA, 603 bp, Homo sapiens
cccagaatttgaaggtggtcaaataatgttgctgaaactaagtgcaatatcaccgtatgtcgaaaatctaggaatcaattagcgtactgaaaggtttatatgtatggccgtgtgggatatggtacaacctcttcctcatccgtgtcttttactttactactagtctccccctacaccacagaaaggcacgtgctttaatgctatgcctggcacctaataggaagcactaatattatcttctccttagcaaaataatagaaaataaaaataaattttaataaaaatagaaataaaaaaatttaattaactgtacctctttagccctcccaaggaagctaaacaccatctactccagctctgctatcttcctagcttcaccagcctaacgttgccaaaccctttccctaccttaaagagtctatgaatcatcagaaaacccaatgctccagaaaggaggcaaaagtacgtgaaaaaggaagctactgtccttgtacagtcctataacgaatcaccagtattatgtgtttaattattgtgtttataaagtacttctgaactggcaagtgatgtccgttcagtttggaactatcctatcttatgctg

SEQ ID NO: 714392 - DNA, 541 bp, Homo sapiens
ggacggcgctgccgccattttgtggggtgttgtcgcagcggccgaggagggaagacggcagtttggcgacatttctcggccgaaggcagtttgcttttgcggagatgcggcattccaaaagaactcactgtcctgattgggatagcagagaaagctggggacatgaaagctatcgtggaagtcacaagcggaagaggagatctcatagtagcacacaagagaacaggcattgtaaaccacatcaccagtttaaagaatctgattgtcattatttagaagcaaggtccttgaatgagcgagattatcgggaccggagatacgttgacgaatacaggaatgactactgtgaaggatatgttcctagacattatcacagagacattgaaagcgggtatcgaatccactgcagtaaatcttcagtccgcagcaggagaagcagtcctaaaaggaagcgcaatagacactgttcaagtcatcagtcacgttcgaagagccaccgaaggaaaagatccaggagtatagaggatgatgaggagggtca

SEQ ID NO: 714393 - DNA, 397 bp, Homo sapiens
  misc_feature (349)..(349): n is a, c, g, or t
  misc_feature (389)..(389): n is a, c, g, or t
ggacggcgctgccgccattttgtggggtgttgtcgcagcggccgaggagggaagacggcagtttggcgacatttctcggccgaaggcagtttgcttttgcggagatgcggcattccaaaagaactcactgtcctgattgggatagcagagaaagctggggacatgaaagctatcgtggaagtcacaagcggaagaggagatctcatagtagcacacaagagaacaggcattgtaaaccacatcaccagtttaaagaatctgattgtgttccattgggactgtttaccagattgcctttctaaattagccagctggggttactttaaaaaacagacctgtgtgggatacnaaaacgaatgcccttaccctcaatccgtctttggctattngaaagggc

SEQ ID NO: 714394 - DNA, 1051 bp, Homo sapiens
  misc_feature (563)..(563): n is a, c, g, or t
  misc_feature (568)..(570): n is a, c, g, or t
  misc_feature (573)..(573): n is a, c, g, or t
  misc_feature (575)..(575): n is a, c, g, or t
  misc_feature (579)..(583): n is a, c, g, or t
  misc_feature (660)..(660): n is a, c, g, or t
ggacggcgctgccgccattttgtggggtgttgtcgcagcggccgaggagggaagacggcagtttggcgacatttctcggccgaaggcagtttgcttttgcggagatgcggcattccaaaagaactcactgtcctgattgggatagcagagaaagctggggacatgaaagctatcgtggaagtcacaagcggaagaggagatctcatagtagcacacaagagaacaggcattgtaaaccacatcaccagtttaaagaatctgattgtgctccatgtgcatccctcttgaagcttcgcactctgttgaagaggacactcatcccagtcattatttagaagcaaggtccttgaatgagcgagattatcgggaccggagatacgttgacgaatacaggaatgactactgtgaaggatatgttcctagacattatcacagagacattgaaagcgggtatcgaatccactgcagtaaatcttcagtccgcagcaggagaagcagtcctaaaaggaagcgcaatagacactgttcaagtcatcagtcacgttcgatatgattggtttcgntttcnnnttnantggnnnnntatttgtgtgtactcttaacgagctgataagtttctaattttttatatatatatatataaaatactatttggatatnttataattgtatttatattacttaaatccttaaaggaaacctccaaattcttgtagctgatctgtatatttattagctagccctcatttgcccacatttcctcatattctgcagaccagataatgagtttattgattttaataataaaactatttttttatttgtaacatattcttatgaaaaaatcatgcacccatatcttttctttcatcttaagcattttttttttcttagaaaccctttatctggtacttgaaaataaatgtgaaatattgcactggtggacacctgaatgttactaacctgcatagagcatagttccatagtccagtgcatcattgtctgcaatgaattcttttgaagttgtgaaaatgggtgctgaatgggaaac

SEQ ID NO: 714395 - DNA, 644 bp, Homo sapiens
ggacggcgctgccgccattttgtggggtgttgtcgcagcggccgaggagggaagacggcagtttggcgacatttctcggccgaaggcagtttgcttttgcggagatgcggcattccaaaagaactcactgtcctgattgggatagcagagaaagctggggacatgaaagctatcgtggaagtcacaagcggaagaggagatctcatagtagcacacaagagaacaggcattgtaaaccacatcaccagtttaaagaatctgattgtgctccatgtgcatccctcttgaagcttcgcactctgttgaagaggacactcatcccagtcattatttagaagcaaggtccttgaatgagcgagattatcgggaccggagatacgttgacgaatacaggaatgactactgtgaaggatatgttcctagacattatcacagagacattgaaagcgggtatcgaatccactgcagtaaatcttcagtccgcagcaggagaagcagtcctaaaaggaagcgcaatagacactgttcaagtcatcagtcacgttcgatgaaatcgtggacactttgggtgaaggagcctttggcaaagttgtagagtgcattgatcatggcatggatggcatgcatgtagcagtgaaaatcgt

SEQ ID NO: 714396 - DNA, 1142 bp, Homo sapiens
  misc_feature (654)..(654): n is a, c, g, or t
  misc_feature (659)..(661): n is a, c, g, or t
  misc_feature (664)..(664): n is a, c, g, or t
  misc_feature (666)..(666): n is a, c, g, or t
  misc_feature (670)..(674): n is a, c, g, or t
  misc_feature (751)..(751): n is a, c, g, or t
gaggaacccagtcagctgctatcaatcatgctcttacattacaagagaaaggaatcctttttgcctgcctctgattgtacctctgtgagagactaagacagcttagatacaggtgcagaaggtaaaggaacacttaatcaagtaaacactagacatgaattaatgatttgactcaagctttattccttggtgtgaagtgcttgacagcaaactctataatgggcccattggcttgtttgtaaaagtaaaattatttcttaagctttatgagataaatataaatgctaattcatctgtttgaatttttttcttatatggagttagctgtttaagaatttctgagaaaatgttttgtttgaaccacatttattgcagaatgaagagaataatttgaaatcttttaatgtgtttgcagtcattatttagaagcaaggtccttgaatgagcgagattatcgggaccggagatacgttgacgaatacaggaatgactactgtgaaggatatgttcctagacattatcacagagacattgaaagcgggtatcgaatccactgcagtaaatcttcagtccgcagcaggagaagcagtcctaaaaggaagcgcaatagacactgttcaagtcatcagtcacgttcgatatgattggtttcgntttcnnnttnantggnnnnntatttgtgtgtactcttaacgagctgataagtttctaattttttatatatatatatataaaatactatttggatatnttataattgtatttatattacttaaatccttaaaggaaacctccaaattcttgtagctgatctgtatatttattagctagccctcatttgcccacatttcctcatattctgcagaccagataatgagtttattgattttaataataaaactatttttttatttgtaacatattcttatgaaaaaatcatgcacccatatcttttctttcatcttaagcattttttttttcttagaaaccctttatctggtacttgaaaataaatgtgaaatattgcactggtggacacctgaatgttactaacctgcatagagcatagttccatagtccagtgcatcattgtctgcaatgaattcttttgaagttgtgaaaatgggtgctgaatgggaaac

SEQ ID NO: 714397 - DNA, 173 bp, Homo sapiens
ggcaggggacaaggagcatggtggttttgggtatttgcttaccttcccgtttttcctttgcccctggaagggaatgtgggggccccctttttttggacatgtaccccctccctttccttttactggacataaacctcagactttccccctttcaacaaagggttgatgcccca

SEQ ID NO: 714398 - DNA, 799 bp, Homo sapiens
ccgggcacgcaccgggaccgaacgcggaccagtcgcagcgcacgccaacgtctcccagggctcaattcctcgctaggcaacctcttacagccccagccacccacgagcagcggattctatcaacaaggccaaatacctcaccaagtccacaccaggcagccagcgttggagcctcgttaagatgctggatgagagtcctccggcagctgagcgcctcagtgacccagtggaacgtgatgaccaggcgagctcgagtcccagcgaagttacacgcctcccccagcagcccgcgtccaccccatgcaagttcccgctggccaactgcatactccacgctcaagctggtcaccaaccgcctaccaggccaccattgaatggagtcagatttttggggacatcaggacagaacgtgagtgacattttccgagtacagcagacatggaggatcacttggagatcctggagtggaccctgcgggtccgtcacatcagccccacagccctgacactctaggttgttaccccttctacaaaactgacccgttcatccttgcccagagtgcccgcatgtctacttttgtggctaacacccacagctttggctccaaaatcatctcgaggtcctgaggaccagacagtgctgttggtgactgtccctgacttcagtgccacgcagaccgcctgccttgtgaacctgcgcagcctggcctgccagccacatcagcttctcgggccttcggggcagaggacagatgacctgggaggccaggggcatgggcacctgactcaaaaaagtggtt

SEQ ID NO: 714399 - DNA, 1332 bp, Homo sapiens
gctttgaaataagtgaaaacagagacacaacataaccaaagtctctgggatgcagcaaaatcagtgtcaagaggaaagtttatagtgctaatcacctacatcaaaaagttagaaagatctcaaattaagggtctaaagtcacacccagaggaactagaaaagcaagaataaactaatcccaaagctagcagaacgaaaagaaacactaaaattagagcagaactgaaagaaattgagaacccaaaatccacacaaaagaatcaacaaaaccaaaaactggtcccccgcggaatggatcaacaagattggacaggcttctaactagatttaccaaggagaaacaagagaggaagctcaaaattaccctaggtaacggaaacggacaaagggttgcccttacagctggaacgcacaggacatttagaaagcattcccaggaagaattattactggacacacaggtatgtgaaacacaatcagaaaacatctatgaggggaccggggttcaaattccctagaaattatacgagactctcccaggagatgagatcccggaagaaaattctacactctgagacagaatatctaatttagatatccccagttttggaacccggaatatacagaaaaaccttcacgcagttaaacaaccccccggaggaaacaatgtggaccaacagagggcagcataaaacacaaaatagtaacgcgacacagggcggctgcaaacacctccctgacgacaaatgcccgacaaaaaaaatgagcagacagcgaaggagcaaccagcacacaaaaaagcacagcctcgcagagaacacagcgagatactgaccgcatagacaccaacaacaccgatcgcgacagaacaccactgcttagaacaacgagaagcccaccaggggcgcaacccgccgcgcacacaataactgcgccagaccgccgtccacgagacaaaaagtaagacaggagtcgacgagcgcagccgcaacagagcacacaccacacacaaacaccatcaacgaggacgcgcgaggagagacccaccaccacacccacggaggcgcctacgcaacgaccgagaccactaccgtcagctaaagtgcagagacagcgcagcgcacgccatgagcgacgacccagcgaaaacggcagcagacacgcgccaagcgcgcaccaaggcggccagaagccagagcaggaacgccaacagagcgacgaatcagcagcgcacgcaccctcggacgtttcgctccacgacagaggcgcgcccacgcgccccgccgagacgcgcacctgacccagcgacccacacgacgagcagcgcatagc

SEQ ID NO: 714400 - DNA, 1710 bp, Homo sapiens
  misc_feature (973)..(973): n is a, c, g, or t
tatattagaacgatctagtgaggaattttattattatatatcaacgtaattagtgtaacattgttcgtgtactagctccttagattcgcaattagtcttagcgctcaagatgtacgcttagagactagaccaaatcgtcacctgtctgctctctactctgccattgtctcgcactatcactagcagcgcgcgctggtggcatcgactcacgctttaacgtggagatcgggtaggatcatagctgagtagaagaacacatacttaggtgcggcgaggattacgctcaaagtaggagtggggaaggaagaagttcgatagaggtgagaagataataataacatatgttgtacataatgtgtgataaataccctaggtggctagagagagataagaacatgcttttatagtcctgggagaaggaagaatagtggaggacggtagaggcagtgtagctgcagggaaaagaattacctgagtttaatcatgagtcagtaacgttatctatgtgggagtgaggagtaagggtgcaaaaagtggcactcgatacagcacctaacttagtgtgggtagtgcactctgaaaggcaaggtgagaacaccaaagaggctgcgcagactgtgtctattatatccagggaatcgatgcacacatcatagcgctaacacaaagcgaaaggcatgaggagacgaaggcccgcacaggtcgcaccatggggtgatgcccgaaacccgctggatgatcagagggcaaaagatatgcgcaaaaactctgaagcacgcgccgtcgaagtgtcaaagatgtacgccgtatggagacgtgccaaacgaaatataaacagcagagacagtgaggacgtcccctaatcagccggactgtgacaaccgctgtgtggtcgtaacctccggttgacaaccgactggccacggcgataggcggacgcccgaacccgtttgcggattcacaacccctatanttcggagaggcgctcaccgaggaaacgtactagaaagttgtcagcacaggaaacacgttgtctgcacaaataaccagcaagcgagacaccaacgcggaggttacacccgtacaatagggaacacacatagggaggaacttcaataatggctgcgacacacacagagatacacaaaaacacatacggataggtcgaaaatatattggagggaggatttagcgaatcgccataatggatgagtctggaaaagtcaggataactattattgagcatgtgttcacaccgattgcaacgagaggggctgataacgatatgtgttgtctgggaagaaatattctttgagggtcattattgtatgatcgagatgaattacgcaagtagacactcctttaggtattgaaaataaactagggactgatatcaacatacaatctgatagttggctgcaagacacaactaagagtagcttggcgccactcctcaaaatttgatagacagaaaggtagcaaaaataagaaataggatcagcgagaggggtataagagatattagtgcacgtcaaaattaatggcggctgggctgtttatgaggcttaacatcaagtagtagtctgctgtgtatggttagcaagttgaacataatgaatgatgatgataagatgagtactagcacgcatgagtttgttgtggtcggactgtttggcttgttagtatgctatgattgattatgaaatagag

SEQ ID NO: 714401 - DNA, 1069 bp, Homo sapiens
gagagcaaggccaagctgtcatcggacgtgctgacgctgctcatcaagcagtactgccgcgagagcggtgtccgcaacctgcagaagcaagtggagaaggtgttacggaaatcggcctacaagattgtcagcggcgaggccgagtccgtggaggtgacgcccgagaacctgcaggacttcgtggggaagcccgtgttcaccgtggagcgcatgtatgacgtgacaccgcccggcgtggtcatggggctggcctggaccgcaatgggaggctccacgctgtttgtggagacatccctgagacggccacaggacaaggatgccaagggtgacaaggatggcagcctggaggtgacaggccagctgggggaggtgatgaaggagagcgcccgcatagcctacaccttcgccagagccttcctcatgcagcacgcccccgccaatgactacctggtgacctcacacatccacctgcatgtgcccgagggcgccacccccaaggacggcccaagcgcaggctgcaccatcgtcacggccctgctgtccctggccatgggcaggcctgtccggcagaatctggccatgactggcgaagtctccctcacgggcaagatcctgcctgttggtggcatcaaggagaagaccattgcggccaagcgcgcaggggtgacgtgcatcgtcctgccagccgagaacaagaaggacttctacgacctggcagccttcatcaccgagggcctggaggtgcacttcgtggaacactaccgggagatcttcgacatcgccttcccggacgagcaggcagaggcgctggccgtggaacggtgacggccaccccgggactgcaggcggcggatgtcaggccctgtctgggccagaactggatgtcaggccctgtctgggccagaactgagcgctgtggggagcgcgcccggacctggcagtggagccaccgagcgagcagctcggtccagtgacccagatcccagggacctcagtcggcttaatcagagtgtggcatagaagctatttaatgattaaagtcatttgcagtaacacacacaaccacaaa

SEQ ID NO: 714402 - DNA, 526 bp, Homo sapiens
gagagcaaggccaagctgtcatcggacgtgctgacgctgctcatcaagcagtactgccgcgagagcggtgtccgcaacctgcagaagcaagtggagaaggtgttacggaaatcggcctacaagattgtcagcggcgaggccgagtccgtggaggtgacgcccgagaacctgcaggacttcgtggggaagcccgtgttcaccgtggacgtggaacactaccgggagatcttcgacatcgccttcccggacgagcaggcagaggcgctggccgtggaacggtgacggccaccccgggactgcaggcggcggatgtcaggccctgtctgggccagaactggatgtcaggccctgtctgggccagaactgagcgctgtggggagcgcgcccggacctggcagtggagccaccgagcgagcagctcggtccagtgacccagatcccagggacctcagtcggcttaatcagagtgtggcatagaagctatttaatgattaaagtcatttgcagtaacacacacaaccacaaa

SEQ ID NO: 714403 - DNA, 1641 bp, Homo sapiens
acttatctgagtctcgttacaaggacccagtatggaccaaggaaacctctatatagggtacagcgctgcaggtaggcagcttcatcctgcaccccaaaaacatcaccattgtgacagtgtgcccccacggccaccgcacatatgggcgcaggtgttcttgcgtgagccaggcaggccaggcggagcactgcaggcaggcaggccaggtgtcttggagggctcgacaggttgggctgcctcatcgtctggcaagcgccaatatgcccctggcaagaacacagcaacacatgcatcggcgtcggccagtgcacctccatgcgtcgtgtgctgcccacctaactcacttttgcagatggacaagcaggacagtagagcgggtgcacatcctatggtcttccaatgcaacccaagggccgcggaaccatccattcgcctgcttcaccccaatcgacataccatatctcatccatgtgcaccacagatggacatcatgcacctaatagcagactacaatcatcgatgagagccacgcaaatcgggcatggaccaattccaaacgcgaccgcgcacatgggacacttgacaccaagcggacatactacaggccttcgccgggagcacgccgcacccggaacacaggaccagggaccatctgccggaccagcaaacagatggctacagcaactccccaagtcccaccacaagcaccagaacatcccaccacagcagcgaggacatcaccgcatacacagagcaacacagacacagccacaaggcgcaaagggagtcaaaagtcaccacagatgggagaacgaaacgcacaacaggcagtcggagaggagcacagttgggcgcctctgggaggctatgatggcgccaccacacacccacaacaccgcacgcgctatcatacacccccagttccaacaaccaggagaggacaaagcaagtagagagccacaggagcgagcaacatgtaaagcagacacctctatccagtacacccaccaagcacgaccacaacacatcagagtatcggagaagaaacgaggaccacataggaaaccaggacacgacaacccaacacgagggcgaccctggcacgttggaggcagcgacacccacagggcgacgcacagcgactcaccaccaacaccacaaccgaaccggtacacgcaaacaacaaggcggacaccacctgcggagcagtcgaccaccaacagcggaccacacacaccgcgcgagcctgtgtgcaaacccccgcgtcgccacaccacgtcggacaaccgcggcacacaccaccccacccgagagaggtgacagacacacagacagaggacacgacgagtgcgacagcgcgcagaacacaacagcacagacagagggcacgagcgagacaccaccagcatcaacggggggccgcacgacgcacggcacaagaaagcgagaatgtgcgaaagcaaccgagaacacgccgcaacgacgcggaacagcgaggcaccgagtgcctgccacccagaccctacctgttcagcagcgaccacaccatccgactacacgaagcgaccagcgtaacgcccacacgccgcgcaacgctcaggcaagaccagccaacacaccacgcacgagaaccagcactca

SEQ ID NO: 714404 - DNA, 331 bp, Homo sapiens
ctgagcctccaggcgaggctggtgctcacatacagtgatctctccgtagcagaaattccccattcctactcccctatatgctggctctgaagggtcactgtactcaagcggatacaagccatgattcccaagggtgcgctagctgtggcagtggcccaggtgtgccgcgtggtacctctggtggcggacggcatctgccagtgcctggctgagctgctactccgtcaatcctgctcgacacgctgctgggccgcatgctgccccagctggtctgccgcctcgtcctccggtgctccatggataacagcgctggaccaagagaatggctgcc

SEQ ID NO: 714405 - DNA, 791 bp, Homo sapiens
  misc_feature (27)..(27): n is a, c, g, or t
  misc_feature (159)..(159): n is a, c, g, or t
  misc_feature (231)..(231): n is a, c, g, or t
ttgttgtctcacacaggtgcgctgcanaggcatgttcacaactctttgagctccccacccctactggaggttctgtgatctatcagcatggagtcagattgtggcctttggcatcaacaggcgtctactgctgggcgttacacatcaattggtgataanctagtttgctaatcagtagtgtagtctgtagagaatgtctttgtgggtcagctgagtggttcgtagaattanacttgtccctgtttgcagataggcacgatctgcaagccaccactatgggtcgttgggcagaatcagaattctggacagagatcgcagttcctcaagactccatcgcatctgttctccatctctgttgatccaccagaaggctggatgtgaaggtttctttccagccttttcgatatcagtccattggtccaggacatctttatcaaagttgaaataatgtggaatccccagtttaaagtcctgtttcatggattcatagttggagatattcagaggggtcgctgttctattatctttatgcagtgccctcacagaaccaagaattgctaggtgctgaacacacttggcatgacgtagcatcttcctggtgacacgagctagcatcagtcttgttgtcagcttcagcactcaggatttgcacagagaccagttcattagttggcagattccaacagcagatggagattatggcagacttgtttcttagaagagcagccctgggccttgagttctcacatctgctttttccctccgtgccgaattcggcaccagggctcgag

SEQ ID NO: 714406 - DNA, 1116 bp, Homo sapiens
gagagcaaggccaagctgtcatcggacgtgctgacgctgctcatcaagcagtactgccgcgagagcggtgtccgcaacctgcagaagcaagtggagaaggtgttacggaaatcggcctacaagattgtcagcggcgaggccgagtccgtggaggtgacgcccgagaacctgcaggacttcgtggggaagcccgtgttcaccgtggagcgcatgtatgacgtgacaccgcccggcgtggtcatggggctggcctggaccgcaatgggaggctccacgctgtttgtggagacatccctgagacggccacaggacaaggatgccaagggtgacaaggatggcagcctggaggtgacaggccagctgggggaggtgatgaaggagagcgccctgctattaggccgttacgaaccttctgcccctaaggaggcccttttcccttccaattggccaatgccaaaccgtggcccccccccccctgggcccaaaatgactacctggtgacctcacacatccacctgcatgtgcccgagggcgccacccccaaggacggcccaagcgcaggctgcaccatcgtcacggccctgctgtccctggccatgggcaggcctgtccggcagaatctggccatgactggcgaagtctccctcacgggcaagatcctgcctgttggtggcatcaaggagaagaccattgcggccaagcgcgcaggggtgacgtgcatcgtcctgccagccgagaacaagaaggacttctacgacctggcagccttcatcaccgagggcctggaggtgcacttcgtggaacactaccgggagatcttcgacatcgccttcccggacgagcaggcagaggcgctggccgtggaacggtgacggccaccccgggactgcaggcggcggatgtcaggccctgtctgggccagaactggatgtcaggccctgtctgggccagaactgagcgctgtggggagcgcgcccggacctggcagtggagccaccgagcgagcagctcggtccagtgacccagatcccagggacctcagtcggcttaatcagagtgtggcatagaagctatttaatgattaaagtcatttgcagtaacacacacaaccacaaa

SEQ ID NO: 714407 - DNA, 470 bp, Homo sapiens
  misc_feature (8)..(8): n is a, c, g, or t
  misc_feature (50)..(50): n is a, c, g, or t
tttcctantttaattaaaggtaaaaaaactgttaaacagttccattgtanatctccttaaaaatatccagcataatatctgtatcttttccgaaaatcctacacaatgttatttcaagatcctatagattattttgcccatgtctttaatatatcattctgttcaatatatctttcattagccgggcgcggtggctcacgtctgtaatcccagcactttgagaggctgaggtgggcagatcacttgagatcaggagttcaggaccagcctggctgacatggagaaacctcatctctgcgaaaaatacaaaaattagctggcatggtggtgggtacatgtaatcccagctacttgggaggctgaggcaggagaattgcttgaatttgggaggcagaggttgtggtgagctgagattgtgccactgcactccagcctgggcaacagagtgagactccatctcaaaaaaaaaa

SEQ ID NO: 714408 - DNA, 868 bp, Homo sapiens
ggaatggagaatggaatggtatggagaactggaatagagaatggaatggaatggagaactggaatgaaatgcggtggttgaatagaatgagatggtggaatgggatgtacactggaactggaggatggtgtggcagtaatgggactataactgcgagtagtggaatggtaccaaaggcactacgacctactgcgacactcgacatgcagcgtacgtgagatatacctggcactgggcagaactggcacactgctaactgcacactgcgacggctccggcacacgcgcacgacactgcgaactgcgtcgcgccacgcaactggcaaactggaccacatacgaactggacacggcgagaacttggacacacggcaccttcgcaacacactgcgccacaacccacactcggacactgcgcaacttggcacgggactgcgacccttggcacactgggcactacgctgcacactggacaactgcggcacatggcacggcactgggaacagggcacactgcgaccctcgcgacggctccgcgcacaccgacccacctggaacaactggcaccactcgacagaaactgcgacactcgcgcgccaacttgggaccatgtgcacatgcgccagcacctcgggcaactcggacacacactggcgcacagaagccaatgggcaattgggcatcaaattgcccacttggcaacttgcggcaccaactgctccctcggacacactgcccaatggtcgaaattacacactgccagttcggcacaaacatgtcaatcgtaacactgaacggactggcctcatggaaaccactcgggacaatggtcaccagcaaaacattgccaagaacaaaccagggacactg

SEQ ID NO: 714409 - DNA, 226 bp, Homo sapiens
tctgtggagacggggttcacatgttggcaggatggtcgatctcctgacctcctgatccgcctgcctcagcctcccatagtgctgggattacaggcatgagctaacgcacctgggctcaataattcatttttaaaacatgaaaaccaggtcccaagctttttgtccattagttaaactgtatattgcagtactttattttgttgcctggccccttgttctaaaagta

SEQ ID NO: 714410 - DNA, 127 bp, Homo sapiens
tgtgtgtcatcccctttgtgtgtcatccccttcgtgtgtcatccccttgtgtgtcatccccattcgaagtcacttgccgaagaaggggaatgtgacagtggaacgcgatggcgatggacacgcgacg

SEQ ID NO: 714411 - DNA, 357 bp, Homo sapiens
accaacatcaacaaagaaacaaaaatcagaatataagatagatatatgacagtacataatagagaaaattttctcatatcccaggtgatattggctgtcttcaggtcagtcagttgttagaattcagtgacaactacaacggttttcccttacacaaggctttgccttctgcaatttcagttacccacagtcaactacagtccacaaatattaaatggcaaataccagaaataatatggtaagtatgaaattgcatgctgtactgagtagtgatagaaatcttgtgccatcatgcaccatccagggacagatatgaattatccctttgtttaccatatctatttatgataccgcgaa

SEQ ID NO: 714412 - DNA, 426 bp, Homo sapiens
tcaacatctgcctctcatgaccagagtgcaagacaccgggaagccatgacagagacagcttggaagggatcctgggcccccagagctgctcttcaagacaaggtgtgaacccccacttcgggccagggccaggcctgcaggtgtggccactctccagaagggaccgaggccgggcggggactcacatctgtaatcccagcattttgggaggtgagacaggagaatgcaggagttcaagaccagcttgggcaatacagtgccaccccacctctactaaaaataaaaatacaaaaattagtcgggcatggtggcatgataattccagctacttggcaggctgaggcacgaggatcgctcgaacctgggaggccatgactgcgccactgcactctagcctgggtgacagagagagaccctgcttcaaaa

SEQ ID NO: 714413 - DNA, 168 bp, Homo sapiens
tcgaccggggatgcggggattgggggtgaaagagcttgaggaaggtaagtagagaacataaactgtattttaggtagcagaattctgctcaaagaggaacaatgaaggatatacctgtgtgtcagagggagaggctgcattattcctcttcgagcagaattctgctca

SEQ ID NO: 714414 - DNA, 620 bp, Homo sapiens
caattgcttcaactagaagaccggagactgggtccaggtacatcttcaatagctaagagacctggagcaaggcatggtctctctcttttgttgctgttgttcttattgttttgagacagagtctcgctctgttatccaggctagagtaaagtggcatgaccttggctcactgcaacctccacctcctgggttcaagccatcctcccaactcagactgttgtgtagctgggacagcaggtgtgtaccaccacacccagctaatttttgtattttttgtagagacggggttttgccctgtggcccaggcttgtctcgaactcatgggctcaggcgatccacataccttggcctcccaaaatgctgggattacaggcgtgagctcccatgcctggcctctgaaaatgtctttattcagtcataattgttttttgtttttcttgggatgggatctcgctgtgtcacccaggctggagtatagtagcgagatctcagctcactgcaaccttcacctcctgactcctggttccctctccagcctcataccttgccacagcctgcctcagattctataacaggtgtctctgccatgctatgtaaggctttgtccatgctctcttctg

SEQ ID NO: 714415 - DNA, 1843 bp, Homo sapiens
ggatgggccctgctcaccatgatgtgcctacatgatgccctgttggccactcatagctcacactagctgcagtgatgcacttgaacgtcactgaccccctagaacagtgaccttgcaaggtagccctatacctcgtttgctatcatcacgtgccacgaagcgccccctaatcttggagcatagtgccggcttgactacggctacaactctcacgctcaccttccctcactacctgcactgcttcgtgcaacccccgcatgcttctgccacgcacagtccacctattaacactaaaccgggcgccaacagcaccaggaaaaccatctcctcggcttctcactctactgcgcgcagactgcacccacacgcagtcgcgccctaacgcggacacacaccagcgtcttgccaacgaccaacgcctcctgcatacggcgccactcacggccccacctcacgcatggcctacccacgcgcccacggcgacaaacaacacacgaggcgcagacacacctacagcaacgccacccgcaagcgccaccgccggccctaacgcaacttacgcgccgaccccgcacgacctcgcgcccacgcccaacgcaacgacaccactaccagcccccccctctccaagcacggcgggcaccacaacctcacaacgtaaccgccccactgcggcgacaacccatcccccaacgcagccacaagcaggcacaccgcgccgtcggcgcccctaggcacgcgcaacccgcccagacggcatctcccagaaacacgaccacaccacaccctcgcccgagcactcaggggcgccccccataaacttcaccgctccccccccattaaagcccatcccctacccaacgcaaccttgcctggctcttaactcggccaatcgcacgccatgtctggacccgccttcttcagacatgcgacctcaacctgcccacctataccaaaccgctttgacacaagcatcccccattagctcaccgtgcttgccccccaattccatattccgccaggtccattcactgccagaccacctatgacagtccatataaaccacacttacttgcaacgatccgtgggcgaccctccaaacttacaaggccaaagacgaatctacagaccatacacacacttcgcgactcacccacttggcccacgtcggactccccccgttccggcgcccatcacccacacggagacttccccgccttggcgaaccccctacgggcgagccgacactccccgcccagaagacgcattaggtgcacacacaccccagggaccccaggatagtgacaagcacgaccaacgacgctaagaacacccttagcgcagctactgcgcgcctactcccccgactcgctgcacaccagcagcgacaccaacccactcgagtcctacagacgcacatgatgcgccaaccaacacaacagacccaagacactgcacaaacaccacgccccgacgctgtccctgcggcccggtcgacagaacctaccaccaccaccccaccagcaacgctcacgtgcggcacaccgcacgaaacaaataggcaccacaaacgagacccaacggcggacgaccaccccacccacacgcagccgcgagaccaccaaaccgacatcacacccaccccaagactgaaaggcacacaccaggcgagccaccacacgcaggcacgccaagccaccagagcgcacgccaccaccaccacttcctcagtgcagccgacacacgcacgccccgcacgacgacgcgataacacacacaccaggcacgcgccagacaccacagaaagcggaacataacaaaagacaggcacataatagaaaca

SEQ ID NO: 714416 - DNA, 382 bp, Homo sapiens
attagaggatccgctccagctggccccaagctacagcgtggacccacagaggagagtgtcgcttcttatacccattggccctagctatgggatgctgatgtgttttctcgagaaaacgattctctccctctcctcgtagtttcaccatgtctagatggacggacactgactggagatgataccacagccagctaataagttgagatcaggactgagtcggaggccctgacaatactctagtgctctgctagcacaggagagtgggatggagtgtccaacctgtgtactagaggttgtactacagaaaacttttaacaggtagttgtgggcagacagaggggaggacattttcaggtctcagtttacccttgggggccagctg

SEQ ID NO: 714417 - DNA, 136 bp, Homo sapiens
caaggtttttctgcagaacaaacactcctgatgcctgcttccaatcctccctgccaactgcattgcataattcagtgcttacttctcttgagcccagcagcacatgccagattcaatcaatctgctttcacttgct

SEQ ID NO: 714418 - DNA, 390 bp, Homo sapiens
tagtaagcgagtcagctcctacagtgatcagtgggcacctctagatctgtgtattagccggtctagacgttatcgtgatgcacttccttgaagtgcgccggttagcaagcgatcccagacgcgttgataacgtcgatctgatccctacagttgcgacctgtcttcctgtaacgcttccgaaatacagaggtccggtcgcaaaagagttgaacgatacgaaattaggtggtcgttggaatcctgatcgcagtacagtggtccttgtgtaactgctcgcgtagaacatgtctgcatcccgccaatagtccgctaatcgggagggctgtgcgattaaaaggggcttccatcgattgggtagtgtccttcaagtgggtatgcgaagagccacgt

SEQ ID NO: 714419 - DNA, 901 bp, Homo sapiens
ttatctctgcgacgcctctgttttgttgccctgtccggttgtgagaggatgtgaacctggctgggtatacaacctcccgggcggcgttggtataaggagctctttgtgacctactatccatggggccgtggtttctctcacagagcggcttggtcaatgctcgatgaaggaccgcctccacttgggggccacatcccacggcgccgcgcccccggccgcggtctagaaggagcaacatttcgtctcttcgaagaaataccgccggggaaaccctcggtgggtcgcctgcgaaataatatgttcctccacacgcgtggtgtgcgagaccccctccttcaagagggcggagcccctcgcgttatgatcatcacccaggccacctcatttggggcgggtaatatataggggttattacaggcaggcgcctcgtttctgctcacacttgtggagggctaccgcggagagagcccgcctcagatagcaagtaaggggggtacatagtcttttagatcatggatcatcctcgcggtgagagacgaactgctatcgccaacaggaaaggaaggattgtttttgcccacgaaattcgcgcgccacacagggtcttatccgctgtgtggggctccgtggggtgcggcgagggtcactcacacggggggaggcaggtggcgaccttgcgcggccctctcccagtgtgcgaggggagaagccggccagaccaccctatggcggagccacgacaccccccaacatcgacccagggtacgctcaatgtacccccccctcggagactccggggggtatatggcaacatggccacaagacaaagaagagaagcgcccgtacgagagcagcaacaaggtttaagaaaagcatctgccaccacagcggaaacaagaca

SEQ ID NO: 714420 - DNA, 394 bp, Homo sapiens
gtggacctgggacgggtctgggcggctctcgggggttggcacggtttcacgcacccattcaagcgggaggacccacttgtcttagcaattttggatgaccgcgctagctgcgggttatacgctccggctctctgagttcatcagcaaacgccttggcgtttgtcctcacaatgcctagcctttgggaccgcttctcgtcgtcatccacctcctgtgcgccctggtccttgccccgaactcccaccccagatcggccgccgcgctcagcctgggggtcggcgacccgggaggaggggttagacctctccactagcctggagagctcagactgtgagtccttagagagaagcaacaatggcttttgggccggtggaagacacggcttacctggaag

SEQ ID NO: 714421 - DNA, 123 bp, Homo sapiens
ccctaacccgcgatacagcagcccgcctggtccagcagcacttgcgatctgcgtctgggctctggatgacattgaatccaggaatagactccagcttatccaaggttgcctcctgatgtgccc

SEQ ID NO: 714422 - DNA, 129 bp, Homo sapiens
tcgatacgactctttctttctttcttttctttttttttctttctctttctttctttctttctctctctttctttcttcttttctttttctcttttctttctttttctcttctctcttctcttctctcct

SEQ ID NO: 714423 - DNA, 93 bp, Homo sapiens
tccccccaaggtcaatttttaacctgtgcatgtacgggagtataattcatctataaaatgtttatgtcctcaaaaaaaaagaacaaaaataag

SEQ ID NO: 714424 - DNA, 284 bp, Homo sapiens
  misc_feature (10)..(10): n is a, c, g, or t
  misc_feature (171)..(171): n is a, c, g, or t
  misc_feature (194)..(194): n is a, c, g, or t
  misc_feature (232)..(232): n is a, c, g, or t
atttacagcngttatggtaagtcaaggtcaatcttcacagcagtcctgtgaagtaggcggggctattgactttgtcctaatctgtatccaggagttggaaaggttgtgtgttacctagtgtctttcgggtgacactgggatttcatacaggatgggtttgtgtggttgtgnaggtctagtgcttgttataggtnggctataactgtcaataaaaatacctaggaagctgganctctaattctagttgaatacatgtctttaggattgagggatatactatgcta

SEQ ID NO: 714425 - DNA, 454 bp, Homo sapiens
  misc_feature (36)..(36): n is a, c, g, or t
  misc_feature (58)..(58): n is a, c, g, or t
  misc_feature (128)..(128): n is a, c, g, or t
  misc_feature (347)..(347): n is a, c, g, or t
  misc_feature (350)..(350): n is a, c, g, or t
  misc_feature (353)..(354): n is a, c, g, or t
  misc_feature (417)..(417): n is a, c, g, or t
  misc_feature (420)..(420): n is a, c, g, or t
aatggtcctggtcccccaaaaaggccgccttggaangggcaagcggaaaggaatcggncccctggaataggggccttgaccctaacccctccctccctccctccctccctccctccctccctccctcnaaagtgggccttgccttccttccggacgttcccaatgcaggcactgggcgaggctctcaaaccagtcgcctcacggggtcccgcacacagatggaggggagtgggtagcatgaggtagtgatgctgatgctgtctccatggcggatctcttgtctcttccgtccatcaaaggacacccatgctgtgttccttgcttcaggtgacagcatgatcttcagnctncgnnctgcggggaccacgatgggccggaaggacagcgagtgggggcagatgggcgtgatcatgatanttntatacgttggggtggatcatggcaggtcacgccc

SEQ ID NO: 714426 - DNA, 130 bp, Homo sapiens
tggacagcacaggaaggtggacagcacagaggaggtggcacagcacaggcaggtggacagcacttaggaggagttgagcctctgacacctccagtgattctgccgtgccacatggttcctcgtggtaccg

SEQ ID NO: 714427 - DNA, 683 bp, Homo sapiens
  misc_feature (79)..(79): n is a, c, g, or t
  misc_feature (145)..(145): n is a, c, g, or t
  misc_feature (218)..(218): n is a, c, g, or t
  misc_feature (477)..(477): n is a, c, g, or t
cccgagccccccttgttgtccaaccaggatcacagtatgccttgctcgctttaaggacaccccgggaccactctggccntgagacctctttaagactgtccctccgatgggtcgctttcacccctaagagatgaggcgttagacnccttgccacttggaaaagtttctgaaaactggttccccgaggaaagagctaagccactttttccttgagtganccctgcacccatatctgctgaggaaaattggagctgcacgaagcctcactgtcaccacccgcccttctgcttatttgtctgcccactttgatataacctcctccccacctattgttgcccaaagagggagaatttcaccacgccaaagtccacccttatgtgcacgctgttctcatattgagagctctgctatgccacctcgttgaattttttccccagagttcctcgtccctagccctccagcttccaactctgcttncctctggacagatttggccatagctttgtaagtgatgtggacataattgcctaccataatgaaacctaccgggatttttttatttttcattttccccttaggcatatttagtatttttccccccggccagatccttctgagtgtgcgagtgtgtgtgcacatgttaccaaggccactaccctgttaattaaatattccaatttgga

SEQ ID NO: 714428 - DNA, 979 bp, Homo sapiens
gagctgcccccagtgagtccctcccccgccgcagcagcccatttggagggaggaagtaatggtgaagagggagaggaatgggggagcctggaccgactacccagaacagagccggtgaatgggtttgtgtgtgacccactgagagagaggtggaggacacagacaggaggagtcgcacacaagagagcaagaggcagagattaaaagctcaagcagaaggcgaggtaacaaaggaggagaaagaagcagaggaggctaagtaggacagacagacaagacagagtgagagcgagaggagtagaagagcatgcgcgaacctcacaacgagacacataaaagagtagacagagaatgaagagcgaggatcaaggacaacaaccaccatcaggacacaagaaggaggaaagaaaaaaaacaaagaaaagagagcaaacaaagaagagcagggaaacgacagtgaatatagacgccacaacagctcatcaagcgagataagatgaggagtagagaaaatataaagagatgaggtagaatggatgagacagaggtcggagcgtccgcagtggaggaaacacaggtaccgatcgcataacggaaggaacacagaactaaccaggcacgcacaaggacagacaagacagagtagacagcgagtaaccaagtagggagacactaacgtgatcaggagaaggagatagcagaagagaagctatctgagagaccacagcagcgatagataagtagagaaaggacagcgccaagaagaggagagccaggggcgagatacaaagcaaggagcacaatgccccagacgctaggatgagacaacatacacaccgacctcccaccgcacaggactcagcggcgatacaagggagacgcacagagctaaaatcgcgagcgacacgcgtggggtaagacgcaccagcagagaaccagttcacatgcgtgagaatgtatatgactagaaggtaccaag

SEQ ID NO: 714429 - DNA, 521 bp, Homo sapiens
  misc_feature (44)..(44): n is a, c, g, or t
  misc_feature (47)..(47): n is a, c, g, or t
  misc_feature (103)..(103): n is a, c, g, or t
  misc_feature (209)..(209): n is a, c, g, or t
  misc_feature (213)..(213): n is a, c, g, or t
  misc_feature (261)..(261): n is a, c, g, or t
gcgcgccgtctatgacatcaaatgaacgtagtgcttcaaactgngtnatcaaatggtattagccatgtcccaccctctcactgaactgtggctacgcacctgnaactaatttcttaacccagagagccaactcctcttagtgctcactgaaccttttccgctaggacagtgtgcttttttaaaaatacacttctaaaacaaccgtgatnttgntacaaatacttacaaatgcttttagtaaaagacataggaaggaatgantctcagaaattggtaggatgtccaatcttttggcttccctaggccacagtgaagtataattatcttgggccacacataaaacacactaacataacgatagctgatgagctaaaaaaaagaaaaaaaactcgcaaaacaatctcataatgctttaagaaaatttaccaatttgtgttgggccgtattcaaagctgtcctggaccacatgcagcccatgtgtgcaggctggacaagcttgaatagagtcttttttatctatt

SEQ ID NO: 714430 - DNA, 581 bp, Homo sapiens
gtttgcggccgcccgtgcgcctgaaccctggtgccctgggtgagcacatgcagcgagcgtgacgggacgcggacgggacatagttatgccggacgcggctggaagccagtacgactgacaagaaagagttggcgcaagcgatgcgaggggaaccctctgcacgggagagcgtagactcgaaggaggcatataacggtcctgtagcccatgtcataatgcaggacgacaggttgggccctgacggaagaatgctggtaccacagcaatgaaccaacacgggattgtaccctgcaatggcccactgcgaggtacatctatgtgacaaaaaaacttttaacattgtatacctatgtacaatgttttccccttagacatgagcgcctattatcacaatggctcgcacccttggtgtagccaatacttacacactagaagagtctatacactcacctcatcgctagtggaacaatgggattcactatatgaaaggtagagacgaaccaaacctgtggacttgcaataggggacaattaacgagagccccaaagccagcttacgctacaggtacctacaatgcccac

SEQ ID NO: 714431 - DNA, 512 bp, Homo sapiens
acgagaccaaagcatttaacagtcaagtaacatgcttgtgagtacggaactgactccaggagagtcaagatacaagaggttcttctgacttctaatgcaccgccccctttcgactaccataggcttcttttagacctacagccacagagctggcatgttggttactttcatgcttaagagaccagcagcatacaaatgtgagggactggcaggattacaccaaaggaggattctgagcattatttgaatcagtgttttactactttccttgggcagcttagctcttcaaagaattttaatactcaacctgtagaaatatgatagacaactattggttttattttcaagattgagaaagaggtctaaggaaacccttgttctcccaactcattagagatgacagggcggcttcctctactgtgaccttacatcaaccacagtggattttatcatgaagggctgctcacactggatcacgcaatcaggataaggggacaggactttttcctggg

SEQ ID NO: 714432 - DNA, 435 bp, Homo sapiens
tagtacccggtcacctgctcacgcaaggcaacatccgttgttcacaggtaactacaatcagtcttatctacaagtgcctttaaacagcaagatactaggtgccgtgtagcccgatagtgtgacatgtttactgacgggagtatgtaccacaaacagtactaccatgattctgacgcacagtgtacttcagaaccgactaccgggaacccaacgtgcagtatgtaacggactgaaacgaagacagacgactaccaaagaaattccagagtaaagtgccttgttctttgcaaactgtttttactacttacactcataacggacacggaacctaccttggccttaaactgttcacatatccaaacacgcagttttctacacaccaaggttgacatcaccttcagtttcttacaacattttatttttctattagtgtgt

SEQ ID NO: 714433 - DNA, 1779 bp, Homo sapiens
  misc_feature (1285)..(1285): n is a, c, g, or t
  misc_feature (1429)..(1429): n is a, c, g, or t
  misc_feature (1672)..(1672): n is a, c, g, or t
  misc_feature (1716)..(1717): n is a, c, g, or t
  misc_feature (1734)..(1734): n is a, c, g, or t
  misc_feature (1758)..(1758): n is a, c, g, or t
tctcttttgtctttttctctttctcttttgtcttttcttgtcctctcgctttttttgtttgtcttttctcttttcggtcttgtttcgttcttcttttctcttcttctgctttcgtttccttgtctgtcctttcgtcgctctcttttttttcttctttttctcttttgtctgctctcttttctcttgtttgctttttttctttcttttctcttctgctttctcgtgttttcctcctcttgtttgtcttgtcctttttctctcttgctgtttcttttttttggcttccttcttcgattctgtactctcctccttgtttgctctttcactttgctttggttgacgtcttcttttatgtctttgctattttttcctgcttcggtgtttagctctcgccgtctgcctctgttcttgttctttttcctttccttctctttgcctgggtcgctgttgtctgctcttccctctcctcctctcttcttcgtgtccgtctcatttcgttcctctctcttcgcgttttctctcttttctttcctctttccttttgtatctctctctcctcttttctctgtctctcttctcgtttctctccgtcttctctttgttctcgtctgtgtactcgttctctttcgcctctctcttcttcttctctttctatcaccttcctttctctttctctctgtattctttctgtttctttgtcttttcatcttcgactactcgttattttgtttctgttctgttgagcctagacgacggcgagactgtatgataacgcgatggttgtcgacccatataggtacactcgtagatccggttttggttatacgttaacaaaacgtgatttttacccccgggttagcgccagatgtcgttttttcctcgggtgagtccctacatctcttcgcagggcaaagaatctgggcaattggcaatactgtcgaggccctacgccactttgttcaaatgctgcccagatagggcctgcgctattgccctctatggatggcaccctttgtggtccatgtagagtctactatggacgaatctgggtatatcttctgggcccccggagtttgcgccccttaatgagcataattgattatgccagctccaaggacgccttctagtagaagtctgtacagggtatcaagcatgaattgcaagctaactgctttcgtaggaggtcaaggaccgctgcaccctggctagtagaagctttgggggcagtgccgttcatctccctggagggcaagcctttgtgagccctttggccccctgctggagnatttggcagccccacacctgccttgggggttgcaggctgcccccttcctgccagaccggaggggttggggggatcccagcagggggagggcaatcccttcaccccagttgccaaacagaccccccaccccctggattttccttntccctccatcccttgagggttctggccttcccaaactgcttttgatcttttgattccttttggggtgaagcagaccaagttccccccaggcaccccagttgtgggggagcctgtattttttttaacaacatccccattccccccctggtcctcccccttcccatggtgccaatttttaaccgcaatagtgactctgggcttgtctgtttagttttgtgtataaatggaatgttgtggagatgncccctccctgggccgggtggttcctttcccttttcccctggtcnnggctattcatggaagcnggcccagtaagggccctttgtttnaaaaaaaaaaagccaatatta

SEQ ID NO: 714434 - DNA, 207 bp, Homo sapiens
ctgtgggcggccagtacggggcggcggcacagccagcggtgagggccagtctgggtagcccctggggccctgcagctccacgcagcacttggtgcgctgccgcggcgcccaaccagtgcactcaagccccgtgttccccccatcgcagtatctcccatatgccgtccgccctagcagcctcatgctccccgcagtatggcgtgtcgc

SEQ ID NO: 714435 - DNA, 620 bp, Homo sapiens
  misc_feature (126)..(126): n is a, c, g, or t
  misc_feature (270)..(270): n is a, c, g, or t
  misc_feature (513)..(513): n is a, c, g, or t
  misc_feature (557)..(558): n is a, c, g, or t
  misc_feature (575)..(575): n is a, c, g, or t
  misc_feature (599)..(599): n is a, c, g, or t
acagactgctacagtgagatagcatatcagcactgtgagagtcagcctacctgaaagagctggggcagtgccgttcatctccctggagggcaagcctttgtgagccctttggccccctgctggagnatttggcagccccacacctgccttgggggttgcaggctgcccccttcctgccagaccggaggggttggggggatcccagcagggggagggcaatcccttcaccccagttgccaaacagaccccccaccccctggattttccttntccctccatcccttgagggttctggccttcccaaactgcttttgatcttttgattccttttggggtgaagcagaccaagttccccccaggcaccccagttgtgggggagcctgtattttttttaacaacatccccattccccccctggtcctcccccttcccatggtgccaatttttaaccgcaatagtgactctgggcttgtctgtttagttttgtgtataaatggaatgttgtggagatgncccctccctgggccgggtggttcctttcccttttcccctggtcnnggctattcatggaagcnggcccagtaagggccctttgtttnaaaaaaaaaaagccaatatta

SEQ ID NO: 714436 - DNA, 127 bp, Homo sapiens
  misc_feature (60)..(60): n is a, c, g, or t
tgtttcgactccagttgccaaaactcaacagaatattgtcgatgcctgtctggaaatggngcctgaactggctcaatttcccatcgtcaaacaatgggcgggactacgaccaagctctccaacaggt

SEQ ID NO: 714437 - DNA, 1191 bp, Homo sapiens
gtgcccctcacgttacataacagtagtgactacctatagcagtaaagtcatcttaggttctaggaagtactctgatatatcgcttcaggacctcataatgctgctctgaactatttgcctacagaataggaactaactgacctagtgctggctgttcagttgactgttgctacactcataccatacaaccacttcaaagatcctcgacgtgccctactatatgggcatactaattgtagccgtgatgttgccatgacgtaagctctgtatgactccgacctgcagcacgcacgctggttgcggccatagacccatacactcagtcttcagatcttccgaagcacattattggccctagcactcacgtaaccataacactctcaaagcctcactcccaatgcctccacaacgtacattcgtacccaaagacactgtatcattactaaccacgtgaccatgcacttatccgaaaaagacacccataagtctcgacagtcaagagcaaagcacaccaacagccctcactctacttcagccatccactccgcttcctacctaactctctcacacacccaaaagtcagacaagcaatcatatctcacgcttgttcgcccaaacgcctttgtcctatcaggcccccccatacaacaaaggcctccactcactacactcactcacactcaaccttgcaccttcctaccgccttccagcacactccatgggccaagccccaaagcggcgcacattaactccgcaagcttgacacgccaacgtaactccaacgacaagacacacactctctaaccgcttcctactaatagctacactcgctccacctcacagacagatactttccctataacgcataattacaccgactccacccagcccacacgcgcaaccgcataaacctgccacataacttgtgccaagcaactcgatgcacgtacagggaagtcaacacacaacaacacactataagttacccgcccaacgacgcggtagggggacaatgactcgcacgaccacacaccacgggaagtggcaaggcgcacaccacgcaaagcaccaacggacaaagagccgcctgcgacaacgccgcacacgtgacccacgactgtacgctcactacccagcatgacacagaagagccgacatagcctacaggggatgccactgtaccgccgacta

SEQ ID NO: 714438 - DNA, 519 bp, Homo sapiens
acgcagcaggaaagactatttatttacttcaagagtttagagtagcagttaggaggatagcaccaggagatatcagcatgtgaatggtttgagagaaacagtgtaaagcggcagtgtaaacaaggagcagggcatgtgtagaggtagttgagaatggtgaataggagtatgactagagagaagatagtagggatgacaagtttgtttggggggtacagtctaagttggtctggtgtctggaatgacgacgggggcctaataagaaaggagtgtcgatacacgcagatcaaatgggctgtacctgggaggatactggagggacaggtctgacttctgagaagggaaagtggtaaaggtattgtccagtcctttttaagttggtggctgagcttggtgaggtgtgtttttaatagaccattagtctgtcactgaatactaagaacctgagaaaatgcttggctgatttgactaataaaggctggtctgttatcagactgtatagaggtgggaaggctaaac

SEQ ID NO: 714439 - DNA, 162 bp, Homo sapiens
tctagaggatcaccctttgggggtctatgctttggattattatcctcatccttatcctaatcttcctattcaatagaaaataggagaggccaggcacaatggctcacacctgtaatcccagcactttgagaggccgaggcaggcagattacttgagcccagg

SEQ ID NO: 714440 - DNA, 186 bp, Homo sapiens
  misc_feature (1)..(1): n is a, c, g, or t
nagagctagcaccatgagcttcaataccctgtctctactaaaaaacaaaaattaatcaggcatggtggtgaacacttgtaatcccagctacttgggaggctgaggcagcaggatcacttgaacccaggaggcagaggttgcagtaagctgagatggtgccacagcctgggaaacagagtgagactc

SEQ ID NO: 714441 - DNA, 112 bp, Homo sapiens
aatacacagcgtgtgtactgatatgtctaacataacactgaagctgggcttgccacaatgacgcctgtgcatccacagcttgcgatcaccactggaatacgtaaggtgagct

SEQ ID NO: 714442 - DNA, 586 bp, Homo sapiens
gctcgtgtggtcttttctggcatcgtaggaggtgcctgtgatgccctgcagcatttgtcttcatggggctgaacaggatgactgctgtggttgctgtgcccatgaaaactgtggcaaacgatgtgcgatcgttcttctgtatagggctgctctcatggaatggcaggatcgggctactgtgtcattgtggcagcccttggttagcagaaggaccatctatgtcttgattccctcgggcagtgaactacaccttttgccagcaccgagggccagtaccttctgatacctccacatggtccgagtgcattgaacccaagcacattgtggactgcactgtatctctgttccaatcctctgtggctctgggtgaactgaattcatctggtgtcttatccacgtcactaacatggcggtgcttggaggcatatgtggctttgtgctctcaccaacagcaatatgattgctaaaagaacaaacccaggacagagccacaatcttcctctatttcatgtccatttataatatttcacttgtattcctttgtaaaccttcgttcttagtgtaccaatatccccaagtctattta

SEQ ID NO: 714443 - DNA, 260 bp, Homo sapiens
  misc_feature (243)..(244): n is a, c, g, or t
agtcggtcctccgtggacttgttccggcctcctcggacccgacagaaatgcgatggtctgggccaccttcttgtgaatgccggccaccctgtagctcctccaggctgaagccgcggccggtcgcgcaccttcgtgtggtaccgacaccgtggggcagcgcacgagttggccggagtgggacccgacgcgggtgcgcggggcgcatgcggcgctgccttggcttgccaggagccttacgctctnngcggatacttacgggc

SEQ ID NO: 714444 - DNA, 223 bp, Homo sapiens
  misc_feature (163)..(163): n is a, c, g, or t
  misc_feature (189)..(189): n is a, c, g, or t
actactaccctgggagagggatttggtaattctagctgtgtatttggtgaattggttaatttggtggtttttctgtgaaacacatacatgggatatgggaggtaaaggagtgtcccagttgctccgggtcactccctttatagccattactgtctggtttctngtaactcaggttaggtttgggtctcnctggctccactacaaaaaaaaaaaggggtaccga

SEQ ID NO: 714445 - DNA, 359 bp, Homo sapiens
  misc_feature (270)..(270): n is a, c, g, or t
tagacgatccttataggcgagtcgggtactggaccggagtatgagggctcatcagcttcgaggaggagcgggccaggtgtcttcaacacggatcacgctctggtggagcaccagagctgggccagggagtgacacgctcccactgaaccacccagagctgggccagggactcaacaattgggggacagaagtccccccagtgcctgccagggcctggatgtgcaggttcaggaccaaggggcttctggtcctccagcccctgtactcggncatgccctggggtcactgcggtttgcgcccctaattgtgccaaaggttgaccgggcctgggctggggtacaccctttgcccttgtttat

SEQ ID NO: 714446 - DNA, 876 bp, Homo sapiens
tgaaacctggagcctggagcagaaagtgaaaccctgtgtgcgtccagacaaagatcttagtccgggactagccggccaaggatgaagcctcacttcagaaacacagtggagcgaatgtatcgagacacattctcctacaactttcataatagacccatcctttctcgtcggaataccggtctggcgtgtgctacggaaggtgtaacacacaaagggttccctcaagggccccgttttggacgcgaaggatctttcgaggccaggtgtattcccagacctgagcaccacgcacgaaactgtgcttcctcgtcttggcttcatgtggtcaacccagctgcctgccttacaaggtgatttccaagatcacctgggtgttgtattccatggacgcccctggcccggaactgtgtgtgcgacagctggaccgaatttcctgtctgagtcaccccaagtgtcaaccctgaaccatctccggacgccccggctctactacgtactgggaacacgagatttaaccgaagggcgctctgcaggcatgagtcaccgcaggggcccgtgtgaagattcatgggacgatgaacgaatttgcatactgctgtgcaccaacttggtgtacagtgaaggtcagccattcatgcctgtggtgcaaaattcggatgacaattatgcgattcctgcgaccgcatcgctaacaggagatgctcagaaacccgatggaggcaatgtatccacacatattctacttccactttaaaaaccgtacgcaaagcctatggtcggaacgaaagctggctgtgcttcaccatggaagttgtaagcaccattcacctatctcctggaagaggggcgtcttccgaaccaggtggatcctgagac

SEQ ID NO: 714447 - DNA, 286 bp, Homo sapiens
gagccacatattatgctgtacctctttgggtgaatcacgttagcatctccaaccttcagttacttcatcgtgggatgactcgcaaaatcatacctggtcccaagattcacgtgtagttgagctaataagcatggcattacctagatcagttcctgagtcacctaaaaattgttagttttctcttcatcgaatctccccattcccacccctcatgctaagtctcccctcccacacacacacacgcacgcacgctgtcctgtacctccctacacacacgcacgctgtc

SEQ ID NO: 714448 - DNA, 383 bp, Homo sapiens
tacttcacagggagtgtttcagattggaagtttccatcagttagtgtctatatcatgcatgtgcgcaagtagagaggtctctaagactacaactgagaaatgtattcttgtggcgttggcctaggtacaagttcactggtgacataggaaagaacagtttcagccaagagctggaaggaatgataccaacattgtctttgtctttggtggatttctaagtccccaaatggaagttgatgataatctacggttctcctttgtgaaatgtctcagcaacttgaaagaaagaatctctacataaatctagcactctgttgttgcttagtcactgtcaacctgttttattttgttggtttgagttaccttaatgtttcctcgttata

SEQ ID NO: 714449 - DNA, 333 bp, Homo sapiens
acagccgctgcctgctcttcttcagacctgttctgacgtctagactctagagggggtcggatgacgtggcatactttgcctaaagcattgagtatactgcaaggtcagaaaagcatgcaaagccctcagaatggctgctaagagctccaacaaaacaatatagaactttattacggaatagggggcagctaggaagacactcacaacatcaagattttacctacgcttcttggtctccttgctataattatctgggatacgcatgctgttatctgtctgtcccttacatgccctgtgattatccgcaaacaacacacccaagggcagcacttt

SEQ ID NO: 714450 - DNA, 266 bp, Homo sapiens
  misc_feature (2)..(2): n is a, c, g, or t
  misc_feature (48)..(48): n is a, c, g, or t
  misc_feature (76)..(76): n is a, c, g, or t
  misc_feature (93)..(94): n is a, c, g, or t
  misc_feature (151)..(151): n is a, c, g, or t
  misc_feature (170)..(170): n is a, c, g, or t
  misc_feature (177)..(177): n is a, c, g, or t
  misc_feature (181)..(181): n is a, c, g, or t
  misc_feature (188)..(188): n is a, c, g, or t
  misc_feature (203)..(203): n is a, c, g, or t
  misc_feature (208)..(208): n is a, c, g, or t
  misc_feature (214)..(214): n is a, c, g, or t
  misc_feature (216)..(216): n is a, c, g, or t
  misc_feature (226)..(227): n is a, c, g, or t
tngccacgaggacttgcaggctatagttatggtggtgacatgcatgangtgggctggtagagcaggaagctctgtnatgtcagagcatctacnnggactacaggtgcactgtagtccccactactgggggtggcaatgaagacactctgtntgttgggccctagaatttnatgtggntttnctccttncttccaagttctganattcntaaatnanagctggctgnnttctagaggtaagacctggtatggagtccagttggtact

SEQ ID NO: 714451 - DNA, 408 bp, Homo sapiens
cgtcgactgcaggccctgggtcctccctgcaggctgactacgtgactctttcagctctgagtgtttgaaggtatttcttggatgactgtgtatgggaggagtgagtgcactggtgtcttctgctgagagtttattaggtttgctgaaaaggacaagtgaattcaaatactcaacctctgctcttatccaaaccatcatgttgtgagtgagctgaaatctaggccgatcgttatctctgaaagcaactcatagctgaccctgtagcatttgaatgtaatctattgttctgttccacaaatgtctgaaaagatgaacttggatttaggcttttataagaaaggtgacaataaatgtgtgattatggcctctgaataagcctcaactagaaattggattctgagtcgacgc

SEQ ID NO: 714452 - DNA, 402 bp, Homo sapiens
  misc_feature (4)..(4): n is a, c, g, or t
  misc_feature (63)..(63): n is a, c, g, or t
  misc_feature (109)..(109): n is a, c, g, or t
  misc_feature (117)..(117): n is a, c, g, or t
  misc_feature (126)..(127): n is a, c, g, or t
  misc_feature (135)..(135): n is a, c, g, or t
  misc_feature (184)..(184): n is a, c, g, or t
aggnccccaacggcatcaccccgctaatccctagagtccatcctaaacacctccgtaaccgcntcggagtatcatcactgagctcacctagtctattgaaaacaacganaccaaatnattcagcannctatacanatgggtctctaacctcctacagcttcgagtattcgagtctccttcaccnttccgacggcatttacggctcaacattttttgtagccacaggcttccacggacttcacgtcattatggctcaactttcctcactatctgcttcatccgccaactaatatttcactttacatccaaacatcactttggcttcgaagccgccgcctgatactggcattttgtagatgtggtttgactatttctgtatgtctccatctattgatgagggtc

SEQ ID NO: 714453 - DNA, 403 bp, Homo sapiens
cactttcattttccctcccctttgtttctactttcaccgtattgctttttatccatttttataatatgattttttacagtggaaccgcctacgggaaaggtgcttttaattaatacgaaagaatggaaggaatttcagctaggcctctctaagagggtaaagctttgtgaaagaaaggttttttagctgaagttttaatgagaataagagtagttggcagatgtgaaatcagaagttttttcagacaagaaaataatacgactcgagtgaaagggaatggactagaaatcagaaacagttttattccttaattaccgtaagaaccaaagactggaggaaagtttttcctattctataaagaaaaatgggggcccccctccaccagccagaccttcaaaaaaaa

SEQ ID NO: 714454 - DNA, 183 bp, Homo sapiens
caagagcccatctctaaaaaaacaaaaccaaaccaaattagccaggtgtggtggctggcacctgtgttccaactacttgggagactcatgtgacaggaggatcgcttgagcccgggagttagaggctgcagtgagccgtgatcttgccactgcgctccagtctgggcaacacagcaagatact

SEQ ID NO: 714455 - DNA, 791 bp, Homo sapiens
tcggccgcgggagccccgggagtgggggcagcggtacttctggtgctgctgttgggtggctgctccgggcgcatccaccggctgtcgctgacggggagaagcgagcggaatccagctgaacagcttcggtttctacaccaagtggctctctggagtgtggcagttgagcgtcctgcgggctgggccctccgtggagggccagaacgagcacagtcccatgctggttgggcgtacagatctcacgccggagttcggttctggcagagcttcggctcctagttacaacgccggcgatatccagtgactgccctcatccaagaaaagaacagtcagcacgtttatcctgagtcccgtgttctctcgatcaagcacgcacaggatcatgccaggatccagcgtgcgagaagcctactggcagagcacgaagaccgatagttgtactctattccccgggagctccttccccgtgaaagacaccccttccaaaaccagggtcattccgcgaagccccaacacggcacacacagttcccccccgacaaggatgacattggccggagcggacccctctgacagcacaggacaaagccccaacgttcaaaccacaccctgcagagtgatcacaagtggatcctagatggcgacacgcgacacagggaccctgcacttgtcgcggccttgcagccactctgcaaccaactcctacgcaatcttcagtttcccccgtggttgatcggcgctctcagggcggaaacaacgggcaagtacacagcctgaacttccaacaacctg

SEQ ID NO: 714456 - DNA, 313 bp, Homo sapiens
ctagagaagttggtgcaaaagggaaacaagaagaggagcttagattacctcacgtacaaaaagccaaagaagaacacaagggaaacaggtaatacaggaaatggacaaaatagatataaggaatatataaaataaatggcaaaatgacaaaagtaaatccttcccttatcagtatttactttaaatgtaactagattaagctctccaattaaaagacaagattagcagaatgtatttttcttctatttttaattatactttaagttctaggatacatgtgcactagggtacatgtgcacaatttgtcgagatt

SEQ ID NO: 714457 - DNA, 1193 bp, Homo sapiens
cggacgcgtgggtcgcccacgcgtccgcttaaatactaaaaatattaatattcccgtttgaattcgatgggaagcccttgtgcccttgtcttcaagaagttccaaatcacctgttttccaaaggtccagcattttgtggggacaaggccttgcctttggctcatcagaagacctgtctttccatcctactgagtggcaaaggtttggcaaaggacaaggtggttttcaaacagctgaagattttcttttgatgctatgaggatgaagtgtacctccgcgactgcacatcatgtccaactggaagactcatgtcttgaattacatactgcggacataagtttggtgggacggttttttcctacttttgagttactggtgatgtaaccagcccatgggtctgacttgatcattatgacaggtcgctgccctccagtggtaccactgacctacagaaggacatcatggcagagcaggaggctgtttaaaaattgagccaggagggaacttttttccatctgccttcaataatgtgaatgagtttaatgctaagagccctgaaacaggcctggtttacctggtatggttgcagaattccttcatcaactgggcagtcagacctctgctgtgctgattgagactgtctccaccttctctgccctcacaaacagcagttcatcacttggtcctcagaacctccttccagcaggggctgtatatttcttgatggaaagttggaggcagggttagaagtaaaggggaagtgagtggcatatcaaaactggtctgtttcagtccctaaaatggggggttatggagggtgggagtcctgaggtgagcagaaaagaaaggtgctgctttatttgaaatgttttcttacctcattctgtgccccagtaaagggtccagcctcatctgtctggcttggccatgttcctgtcactgctccactgcctctctggtgcagctcatgattccaggtgctgcttgccacactaggttttctctcgaccaatttcagctcatcttccagtgctgctcctccgaagcctacacaagtttcctttttccttttgttgtcgttttcgttttctaactttaaatttttatgttgttttgttttacctgtttttatggaagccttagaggagaatctctcatggctccctctgtttggattggaatgggaaaataac

SEQ ID NO: 714458 - DNA, 502 bp, Homo sapiens
gatgtgagaagagacgagatgacctctggagcttaaagtttattaatgcaagacagtacctaacaaagccacaggtcctaaactacgcaaagctgcattaaaaatttcggtaggggcgacctcggagcagaacccaagcctccgagcagtacatgctaagacttcaccagtcaaagcgaactactatactcaattgatccaataacttgaccaacggaacaagttaccctagggataacagcgcaatcctagttctagagtccatatcaacaatagggtttacgacctcgatgttggatcaggacatcccaatggtgcagccgctattaaaggttcgtttgttcaacgattaaagtcctacgtgatctgagttcagaccggagtaatccaggtcggtttctatctacttcaaattcctccctgtacgaaaggacaagagaaataaggcctacttcacaaagcgccttcccccgtaaatgatatcatctcgtctcttctcttg

SEQ ID NO: 714459 - DNA, 127 bp, Homo sapiens
cagcggatgtcttctcagcgaaagtatcaggcatataaggtatcatgagcagcaatgcagggaaacggtgaagttggggttcacatcagcatagagatggaaagtgaacttaactgagatggggaaa

SEQ ID NO: 714460 - DNA, 692 bp, Homo sapiens
gaagggagttccagtgtgtatcctctgatgggactacatcaaagataattaaaggttgccatataaaataaccacttaaatgattgtatgagtcttacacaggttgcattcttaaccgggtagagtgagtactcgatgaaaccagggttgttgctctagccgtcgttgggacagcaatctgctatgaacgaagagaactgtcatgtaacaccacactatgatagctaacatgcagagaagtaaaattgagatgggcgcctcctccggaataaagatacttgctcgcagcgagcatacctgtactagaaccgagttctcgcaggcaatcatggggtgggctgctcctgttatacgaacctccacgcttactggggatcgcagttgacgggataagtacctaagaaaatggatccaggcagacacattcctttgctagcggaagaattggtgcctatgatacctgtcgaactcacctgcaggaccctgcggactgaagatagggccctgcggctagaacccctctggttgacgaggtgaagtgaggcgtatcaacaaattatcatggagtgtctaaaccttggagaaattccttgattaattggagacgcccttggcttagttgagggactggcgacttagttgtcagtggcagaaagcctctggttaacttccctggtctgaataatgtgatg

SEQ ID NO: 714461 - DNA, 190 bp, Homo sapiens
cccaagggggtttttttttttagcaatgaaatccccgtttggggccctttttaaggttggaaccgcccccccagacttataatttttaaaggattttcctttgtttaaactgctgcttcctttgttttattggattgggccagttatcagtgggttttgggtttaaagtaataaaaaatttccaaactta

SEQ ID NO: 714462 - DNA, 461 bp, Homo sapiens
  misc_feature (45)..(45): n is a, c, g, or t
  misc_feature (206)..(206): n is a, c, g, or t
  misc_feature (371)..(371): n is a, c, g, or t
  misc_feature (387)..(387): n is a, c, g, or t
  misc_feature (402)..(402): n is a, c, g, or t
  misc_feature (426)..(426): n is a, c, g, or t
  misc_feature (455)..(455): n is a, c, g, or t
caagacagagcctcactctattgcccaggctggagtgcagtggcnaattctcagctcacctccacctcccaggctcaagcaatccttccacctcagcctcctgagtagctgggaatacaggtgcacaccaccatgcccagctatcctttccttgttctctacagtcatttcaaacctgcttgagaggattgccctgctctcctggnacctcaattatgttaataaaccttttcataccctcttgttatgcatgtaacacgaatagtcttaacatccaaaccaaattttaagtgggggtctataaatgcccttgcagggtgaccattaacagggaactgtttcccaatttaaatggaggattaaaggataanaggacaattggaatgncagttacaggatccngggtttttttttctattaaggggncattttttgtggacaattggggaaaattnggtagg

SEQ ID NO: 714463 - DNA, 331 bp, Homo sapiens
  misc_feature (27)..(27): n is a, c, g, or t
  misc_feature (40)..(40): n is a, c, g, or t
  misc_feature (49)..(49): n is a, c, g, or t
  misc_feature (52)..(52): n is a, c, g, or t
  misc_feature (55)..(56): n is a, c, g, or t
  misc_feature (61)..(61): n is a, c, g, or t
  misc_feature (63)..(63): n is a, c, g, or t
  misc_feature (77)..(77): n is a, c, g, or t
  misc_feature (88)..(88): n is a, c, g, or t
  misc_feature (91)..(91): n is a, c, g, or t
  misc_feature (97)..(97): n is a, c, g, or t
  misc_feature (110)..(110): n is a, c, g, or t
  misc_feature (126)..(127): n is a, c, g, or t
  misc_feature (139)..(139): n is a, c, g, or t
  misc_feature (150)..(151): n is a, c, g, or t
  misc_feature (178)..(178): n is a, c, g, or t
  misc_feature (186)..(186): n is a, c, g, or t
  misc_feature (190)..(190): n is a, c, g, or t
  misc_feature (195)..(195): n is a, c, g, or t
  misc_feature (210)..(210): n is a, c, g, or t
  misc_feature (212)..(212): n is a, c, g, or t
  misc_feature (225)..(225): n is a, c, g, or t
  misc_feature (240)..(240): n is a, c, g, or t
  misc_feature (252)..(252): n is a, c, g, or t
  misc_feature (256)..(256): n is a, c, g, or t
  misc_feature (268)..(268): n is a, c, g, or t
  misc_feature (276)..(276): n is a, c, g, or t
  misc_feature (315)..(315): n is a, c, g, or t
tatttctgaaaaacagccttttaaacnagttgaacccaangaggggggnaanaannaaaananttttttcccttcanaatttgattanaanaaaaanggggcagaggggnctcttccaaaggaaanngacaacccccangtccccagagnngtttttttttttttcttcaaaaaaaanaaaaaaanaaantcaanacaagggcatgccananaattccaaccccnccccaccccgccccnccccccacaggnacanaaaaacacacancaaagggnccccttcctggaacggggggagagaaaggaaaaaaaaanaaccaagggggcaccg

SEQ ID NO: 714464 - DNA, 414 bp, Homo sapiens
gtttgacctgtaactataacgagtcatatactatcaggccataatatttcctgtgttaacttcaacattatttttggggctcatacctcgtatgttttgtgctatacaattcacagtattggctgacttataacattagaatacatcgagtgtcttttcttaacagattagtgcctttttattttagtattccgttttacgttactggtccgagcggaccgctccgctcgtacgaggcaggaggactggcccgcgagacacattcgggcaggaggactggtcagggaggagacttagggtaggaggaccggtcagggaggagacttagggcaggaggaccggacagggaggagacttagggcaggaggactggtcagggaggagacttagggcaagaggactggtccgcgcgga

SEQ ID NO: 714465 - DNA, 210 bp, Homo sapiens
agaagggttgggagaaaatcactgttgttttaaaagcaatcttctgtaacagataaagttctctcctttcctttcctcaccctgacatgtacccctttccttctggctgttccctgctctgtgcctctctaggtaacattatagagagatggaatgaatctccaggctttaggactgtctgaaattgggctgggtgagttaaacacttct

SEQ ID NO: 714466 - DNA, 978 bp, Homo sapiens
  misc_feature (691)..(691): n is a, c, g, or t
acctttccctgcatttgagagttagttgcagtaatcagtgacactttacctctaaatactttaattagtatgcatctcttgttgttgttgttgttgttgtttgagacagggatcttgctttgtcacccaggctgaagtgcactggcatgatcatagcttagtgtaaccttgaactcctgggctccagcaggtcctcccacctcagcctccctagtagctaggactgcaagcactcaccaccacacccagctaattttaattttaattttgtagtgatgggggtcttgctatgttgcccaagctggtctcaaactcttgacctcaagagatcttctcgtctggctccccaagtgctggaattgagccactgagcttgatcagtgtgtatctcttaagaacaagatcattctcctacaaaattgtaacaccattattatactcaagaaatttaacattaatgccaatactattatctagtatacaatccacattcacatttcctcagttgttccagtagtatcctttgtatctcttttttggcgtaaaggatccaattaagcatcatacgttgcatctagtcatatctctttattcatctttaatttagagggtttccccagtctttttccctccgttattttattatgaaaattttgaatacacaacaaagttagaagaatcttattacttngattccattaatatcttactatgttttattacaaatctatgtatctctctagccatcctttaatccatgttatgtttttgatgctttgcaaagtaagttgcgaatattggttcattttccctgaaatacttaagcatgcaaatcatgaaccaagttccaatatttgtgtgaaatgcacaaataagtgtaaatttgcagagtttgggcatatgcgtatacctatcaagacacggagcatttatatcaccctggaagattcctcatatctcttcttcacccttccccta

SEQ ID NO: 714467 - DNA, 176 bp, Homo sapiens
tcagacacacttgatcttgatggtacatcttgtttttatataaaatttcaagctggcgatgacatgtgtaaaaggaaaagtgctgcaagcagtaaatgctgctcagtttgcagtccattacatcaacctatctaaatgatcctctttagcccagtacttcaataggatgttggaaa

SEQ ID NO: 714468 - DNA, 218 bp, Homo sapiens
tttttttttaaaaagggggggggcccccccaaaaacccccttttccctttttgtgggggggggggggttttttttaaaaggggcccttttttaaagtttttttccccccggcccaggggtttccccctttttttcggggggggggcccttttttttttgtttttggggtttccccaaaccttttttttttaaaaaaaaggccccccccccccccttta

SEQ ID NO: 714469 - DNA, 884 bp, Homo sapiens
caacagagtgtaccgggactcagtgcctctgatcaagttacccccagaggatcagagatggggttgacgaatgtgagaagctattcatgatggtgcactggcttctggacagcaactgatgtgccctgggccacgcggcccgaagccggcgaggtgaggcatgctccaccctgggtgaacttgtgatccctgtggctgagatgttcagacggaggtcgatgtgcagccagtgggagctccaagcccagcttatggccccacctccggtgagctccgggctggatgcagctggtgccccatggaggaggtcagtggccaaggcctaggaagcaggtaagacccgcttggtctgtgcccttcactccagtccagacgcatctttgccatccacagatctgctgatgtgcctgctctgctcacacacctaaccataggctccctatagccttcagcctgactttcttgagggaacggaagtctaggctgatgacaccgcaaggcttgtaagtggcatgtgcaagtgggcacgaacctcggctcaaagcaagaccgctggcaacccaggagtacaacaaggaacgccagcgacaaccatgacgaagacatcgggaaatgtcccgtctgacagccaaccgccacaaacaaagggcgaaaccggacacagccgcgaaagagagacggggggccgccgaagcggcgcccagggcgcggcaagagcgagcgccgcgagacgccgcgaccccgacacgcgacagcagcccgaaaaaccgcggagggacccagagccgagcacacagagccccggagcgagggtacgacgcagagagaacggagggggccgcgcgagccacggagagcgaagacgccgagggagagccgagggg

SEQ ID NO: 714470 - DNA, 505 bp, Homo sapiens
actgtaatgtttctgtgaccctttttttggccccaaacagacgagcaattcaacaccgtttggcacattgcagaatttaaaatgtgttggaaagacggacgctactcaaactacttgtagtgcaaatactgagtccgtcttgacctgtagatattcatgttgggtgttgagcaacatgcatcacatgtacgtatgtgtgtgtgtgtgtggcagactgtgccgtgccttcatcctcaagcacgtacagatactggtctgaaagcgctgtaggtttaccatccttttgtttcttaattttagttgactgtagagctgtctttgtttcgcataacctcttgatggctatattatgttttattctcatcccgccctccccaacagcattccttgtttgcaaatatgtagtttcagaagaagaaaaaaatagatggtatacctatcctgttggacatagactacaggctctgtacctattcaaataaatattcaaatgtgaaaaaaaaaa

SEQ ID NO: 714471 - DNA, 396 bp, Homo sapiens
  misc_feature (396)..(396): n is a, c, g, or t
ggtcgtacgaacctggtatgagggaatacgcctcttagtccgtatagaacacgggacccttattcaacaccgcggaactagtagtagcaaaatacggctaagtcccatagttccccctcgaaacatgacgtatttacgacagaaacaaacttaacggcggaagacctagacggagtcgcaccgagcacggacgtaaagactaaccccgatctcaacctagttcactgttaaaagaaaactcccgactcataggatcggatttaggaagacgaaagggataaagacgtcgtcaaggtaaactctaatcataccggttctgacggaaacacaggtcgttcagccggcgtcggacaggtcacggttataacggacacctcctacggagggatcttgttn

SEQ ID NO: 714472 - DNA, 227 bp, Homo sapiens
  misc_feature (14)..(14): n is a, c, g, or t
  misc_feature (30)..(30): n is a, c, g, or t
  misc_feature (148)..(148): n is a, c, g, or t
ttccttttccccanttgtcaacccctcttnaaaggaggaacagataagactgggtcagcctagtcatgcctcccaacttgtggtggtattatgtgtacacacattacacagggtggatggagaagaggttgctgattaaaattacacntcccctataaaggggaagggggagtgtgacactttttttccatgttcaagtgaaaataaataatgtccctcaaaaaaaa

SEQ ID NO: 714473 - DNA, 327 bp, Homo sapiens
  misc_feature (266)..(266): n is a, c, g, or t
  misc_feature (305)..(306): n is a, c, g, or t
ctcactttgtcacccaggctggagtgcaatggcacaatcttgactcactgcaacctccgcctcccaggtacaagcaattctcctgcctcagcctcctaagtagctggaattacaggcatgcaccaccacacccggctaatttttgtacctttatcggagacagggtttcgccatgttggccaggctagtctcaaactcctggccttaagtgatccacctgcctcggcctcccaaagtgctgggattacagatgtgagacaccatgncccagctgagatctttttcttcttttgcagcaggagagnncaaaatagaatacatttaatg

SEQ ID NO: 714474 - DNA, 873 bp, Homo sapiens
  misc_feature (69)..(69): n is a, c, g, or t
  misc_feature (76)..(76): n is a, c, g, or t
  misc_feature (229)..(229): n is a, c, g, or t
  misc_feature (303)..(303): n is a, c, g, or t
  misc_feature (349)..(349): n is a, c, g, or t
  misc_feature (397)..(397): n is a, c, g, or t
  misc_feature (433)..(433): n is a, c, g, or t
  misc_feature (439)..(439): n is a, c, g, or t
  misc_feature (442)..(442): n is a, c, g, or t
  misc_feature (456)..(456): n is a, c, g, or t
  misc_feature (497)..(497): n is a, c, g, or t
  misc_feature (510)..(511): n is a, c, g, or t
  misc_feature (514)..(515): n is a, c, g, or t
  misc_feature (517)..(517): n is a, c, g, or t
  misc_feature (520)..(520): n is a, c, g, or t
  misc_feature (522)..(524): n is a, c, g, or t
  misc_feature (530)..(531): n is a, c, g, or t
  misc_feature (535)..(535): n is a, c, g, or t
  misc_feature (538)..(539): n is a, c, g, or t
  misc_feature (545)..(545): n is a, c, g, or t
ccctctcccttctgttcagtaaacaaactgaagcccaaaaatgaagccgtggccaagcgtgacccaganatggggngtcctggcccttagtgacacagctcctctctggggcaccctatctgcttgtctcgtccaggaagcgttagggctgatgggtgactcagcaaggcagtgtcagagctgggactgggcgtaggcctttgtcctcatccccagcactggcctcccngtggaagatgaacatatcccagccacctgtgtacaggggctcactttgtgtgctccttgttgcctgagaagaanccttggggtgccagggtgggggcagaagcatgcgctccgcccccgnccaccccccccccccctcccgtgtgtgtggtcacaagaggacccctanccacctgccccctcgacgaccccccccccggtcccngacccnccncccaaccccccccncgaggaccccacccccccccctcacccttgccaagtgagcngctcacagtgtgnncanncngcncnnnctgganncccnccnncctggnccttgtggggcaaatattgggtccccaggctggaaagatggacagaggccaatgggtgaaggctttgaagagcacacagaagccctggcccccacgagagctggagaccatgtatatgcttcaaagccactacggcagggacacactctgagcatgtgtgctgcagttcaggtgatacatttaccagtgttcttgtttgtgtgtgccaggaattgatttggaaaagtgaatacattaaaggtgaatgtgaggttacttttataaaaggagctatattagtaggctgtttgatatccaatcattggtttaacaataaaggcaatttgtt

SEQ ID NO: 714475 - DNA, 399 bp, Homo sapiens
aaatttatttggcttattccggaaaaaccccccccttatttcacctaccaaaaaaaactgcttcagggcgtgtaaaatgaaaggcttccaggcagttttttgtttaaaaaaccctaaaaaagggacagggtttaaacccccaggctgtttacactttagcaggccctttttgggttggctggaggacctgtgaaaaacatggaaaaattggggctggaaacccccatggcttttcctcattgttattacaaagggaggttctttgtgtgcccactggtttgaaaccctttttccaataatgatagaatagtccccccttgaaacctgaattggcccaaccccaaaaagaaagcccaacttgatcctcaaaaaacccttttagggacaatacccgatgag

SEQ ID NO: 714476 - DNA, 81 bp, Homo sapiens
ctcctcagtgactctggcttctatctctgtgcctggagtctcacctacggacagacatccagcggaaacaccatatatttt

SEQ ID NO: 714477 - DNA, 247 bp, Homo sapiens
aaaaaaaaaaacgcattccagccactcagtggagagagatgggagggctaaggagcagatgatagggtataatttaagggagctactacagaaagcttgggccagagatgatggtggctcccacaggatggcagtgagtgccctcactctgctttcttctttgaatccttgcaggtggacaggtagacagcagcccagcccagtgccttgaagagcccaagcataagataatgtgatagcggggtca

SEQ ID NO: 714478 - DNA, 496 bp, Homo sapiens
atactcaaggggctataaacccgtatcatataaagtggccattggaaaagtcatgataatttactgcatattagttatgctggaaacagaaaatggggctttgcattggtgtcttgggtattattgaacacaaggggtcaaatatgatagtccataaaagctaaactatatactagtcacattttcaataatctaaaaaagttcaggtcagaaatagatgaaatctcaaagaatttcacaatcttaaaacacagtgctcaggctccttagatagaagacagctggctcctgccacagaattgccctttaacacacccaactgcattgtgagctttatggctttgaaaattacgacacaattcttttacgactcctccccttcaccatttgtgtccacattaccattgctactgtctggcatagcagtcctttttataaatctaccctaaggctccttccatcttgtactgtttcctttctccctcccatctgctcc

SEQ ID NO: 714479 - DNA, 106 bp, Homo sapiens
cggaaggaaaaagaagaaaacggaagccatgagatgatatgagtgcaaacggttctacagggggacaggacccagggagcatagcactggtacaaaaacggacaca

SEQ ID NO: 714480 - DNA, 819 bp, Homo sapiens
gagcggggtgctgtgcgtggatcgtggaggtggggccgaggcagctggccgcctgagccccgctcgtgccttgtgtgaacactggtggtgctggtggctgtgcctgctggctctgtggctgaccctgctgggtgcactagtgctctgggtcccacctgccctgagtgctctgctgctcgagctgtggtcatgtctggtccggctgtgggccttgctgctgtgtggccctgggccctatggctggctgtacggactgtgctcttgtcttgcagctgtgctggcatgcggcgggccctgtcttggccttgtgcgtgttgcgtgctgtctgcgctcagcttgcggcccgaggctcggtacggcgccttctgcaagggggctcacgctgcacagctgctcaccttcttcgacctggcctggcggctgcgcatgaacttcccctacttctacatcgttgggctcggtgatgcttaacgtcctgctgcaggtgcggatcgagtgagcgccggcgtgcggcgagcggctgaaggcccttgctgaagcgggctgccagtgtcccctgccagaacccggcctgggtcgccggcatgaaggaagctgggccagcggcgagggaggcggaggctggggcggatcggacccctggactctagacctacgccgacagggcacaaacgtgcgcagccctgagcccggctgcggacatcagcccgggggcccatggaatcgcgcagaaacgcactgaatgggcccatgccatcggagctccagaaactaccatgggatcggacgaacctggtgcctcataattggccaaagagg

SEQ ID NO: 714481 - DNA, 224 bp, Homo sapiens
  misc_feature (8)..(8): n is a, c, g, or t
  misc_feature (12)..(12): n is a, c, g, or t
  misc_feature (18)..(18): n is a, c, g, or t
  misc_feature (50)..(50): n is a, c, g, or t
  misc_feature (52)..(54): n is a, c, g, or t
  misc_feature (56)..(56): n is a, c, g, or t
  misc_feature (69)..(72): n is a, c, g, or t
  misc_feature (100)..(100): n is a, c, g, or t
  misc_feature (117)..(117): n is a, c, g, or t
  misc_feature (120)..(120): n is a, c, g, or t
  misc_feature (125)..(125): n is a, c, g, or t
  misc_feature (168)..(168): n is a, c, g, or t
  misc_feature (206)..(206): n is a, c, g, or t
  misc_feature (211)..(211): n is a, c, g, or t
ctcgtgcnaatncggcanagaattgtctctaaaatacataagtaaatttnannnanaaagaataataannnnaacagtgaatgttgatgtaacatcttanataatagagcaccaganaantttcnaccaaatgagacaacaactttagggtaagttcatcctctaggngctttctaatgtgcactcagttcctgtatactgtgtgntttgntctgatcaagggg

SEQ ID NO: 714482 - DNA, 1271 bp, Homo sapiens
  misc_feature (268)..(268): n is a, c, g, or t
  misc_feature (272)..(272): n is a, c, g, or t
  misc_feature (297)..(297): n is a, c, g, or t
  misc_feature (342)..(342): n is a, c, g, or t
  misc_feature (351)..(351): n is a, c, g, or t
  misc_feature (359)..(359): n is a, c, g, or t
  misc_feature (365)..(366): n is a, c, g, or t
  misc_feature (369)..(369): n is a, c, g, or t
  misc_feature (403)..(403): n is a, c, g, or t
  misc_feature (449)..(449): n is a, c, g, or t
  misc_feature (552)..(552): n is a, c, g, or t
  misc_feature (588)..(588): n is a, c, g, or t
  misc_feature (632)..(632): n is a, c, g, or t
  misc_feature (655)..(655): n is a, c, g, or t
  misc_feature (660)..(660): n is a, c, g, or t
  misc_feature (690)..(690): n is a, c, g, or t
  misc_feature (704)..(704): n is a, c, g, or t
  misc_feature (718)..(719): n is a, c, g, or t
  misc_feature (735)..(735): n is a, c, g, or t
  misc_feature (818)..(818): n is a, c, g, or t
  misc_feature (864)..(864): n is a, c, g, or t
  misc_feature (1125)..(1125): n is a, c, g, or t
tcgcacgcttttctatattacttcggttccccgtgcaaacggcaaacattggacgccatgtcgggttattccgaagtgaactgaagaacggcgggccggggaaccgagagggtttggttgcgaactctcaatttgggagagaagtcaagggcaggggccccttcatattgggacaagcaagagtttgggacaacccctgtgtggcagcaacattcacgttcaaacacagcaacgatggcacatcccttggatagcagacctaggcccntaanactatttgcaagcaacgcacatatnttctcatactcaatgcagaccacaccgctgtgcatattagagcgntctaatgcntgcgcacncagacnnacncacagacaagaggtgtaggacaaactcatttacncagacacagacacagacccacaggtggacacatattacccagagtntcaagtcagagcgtctcacacatacattgtggcgccgtgacagacgcccagagtatcctttacacaatatatctatcaatagggacagaacgcccaaaatctntctcgcgctgtgcccagacagtgcggtcccataggngcactgtgtatccatattggggcacaggcacacaggcacatatntcccacacttgtgatacaccccnacatngtggctaaatatcacaagggccttcacagnggtaggatgggggncacagggtatggcnntctctataagggtggngagatttggtgagatatatgagggtatggggacaggtgtggcgaccacagacacctagtgagcatccttgtgggagacacacncacatttgggtcctgttaatgtttgggctttctcctgtggcacatntggtctcaccacatctcagatcacatctacagggcaccatttccctattgaaggaaggaaggggccgacatgtgggagcctcaaataatgtgatatggggtgtgcagagggacaccaaaacttccggtggaacactgtgggcgcccacaaggggtgtgcaggcaacggataagcttgcgtggaactatataggtgcgaaagcgatggtcgtcgcttgtaaagtgtctcactgtggaatatctaacgagggggagggttccntaagtgggaaccacccaaatactggtgtttggagacgcacggtgtgggaacatcctgtatttggcacaccctgtggacgactggtttgactttttagaaggggtgaagaaccagcttgggagacctccctgttcttgtgatcgcgt

SEQ ID NO: 714483 - DNA, 233 bp, Homo sapiens
tacgttgttgagctgtatagttatcttgtcgctatgtaacaaattgatactcaaaattaatggtgttgaacaataaacacttattatctaatagtgtcagaagttcagaacatttcgtacaacaggcttagcctgggtacgttcttggctctcttgactgtcttcggtcaaaacgatcaagcttgaacgtttgcaacttactcttgaacacttgacctggatggcttggacgg

SEQ ID NO: 714484 - DNA, 1100 bp, Homo sapiens
cggagtgaggctgacagcggggaacctggtgagacccctccgccctccccgtgtgtggcagctggcctgatccccgtgctccgtgcgcgaggtgacggccgcgatgcgctcggcctgagtgttacccgtgcccggcccttcctcgcttccctcgactattccactgctgtctccgcagcccctggctgtcatcctgctgagtccctctgacggtgacgggaagatgtgctgcactggagctggcatggacgagctggcccagcaggcctgaggagggctcgtgcccggctgcgcggaaatgcatctcgtgtcggcctagggctttcttgcgcacctgagctggtgcctcgacctgggcgctggatgccgaaactggtaccccggctgggtgatcctggttgggcacttggcgcagctcgagggctgctgctgcctgcacgcactgcaatgggccatacagggcatgggaccggcgggacacataatgacggccgagaggacaccagcacacacaagcgcgagagagaccacagaaccaccgcaaagacagggaccgggagggccggccggcacaggtggcccagggacccgcgggacccccacaggagcgaaccgctggcgaccagatggctcggacagcacatcgtcacagggaaggccggacgggcaacgaccggacaggaatcgacggcgaacaacccgggaatacgcaacacgagccgggcgcccgccgacagcgcacaagggaccgccaaaagatgccccggcaacattgggggcccccgcgcaacgaggcgccacaggaaaccaggcttcgcagcgccatgcgaccgcggcgcgcaggagaggccgcggcgtggagcgtccaggcgaaacgccgccgccgccagcacccagaaccgggggggatcacaaccccacgggccacgcgagcgccgccaggcgacgccaaacggcgaaggagaagggcaccctagtgggaggcccaggccgcgacgacccgcgaccggcgccccgaccgcaccagcgcgaccaacgcaccgacgccgcacgcaccccagcaccgcatcagcgggcgcacccaggggccaacggcccgt

SEQ ID NO: 714485 - DNA, 1298 bp, Homo sapiens
  misc_feature (400)..(400): n is a, c, g, or t
  misc_feature (403)..(403): n is a, c, g, or t
  misc_feature (458)..(458): n is a, c, g, or t
  misc_feature (461)..(461): n is a, c, g, or t
  misc_feature (467)..(467): n is a, c, g, or t
  misc_feature (469)..(469): n is a, c, g, or t
  misc_feature (473)..(473): n is a, c, g, or t
  misc_feature (490)..(490): n is a, c, g, or t
  misc_feature (506)..(506): n is a, c, g, or t
  misc_feature (510)..(510): n is a, c, g, or t
  misc_feature (522)..(522): n is a, c, g, or t
  misc_feature (524)..(524): n is a, c, g, or t
  misc_feature (535)..(535): n is a, c, g, or t
  misc_feature (593)..(593): n is a, c, g, or t
  misc_feature (623)..(623): n is a, c, g, or t
  misc_feature (665)..(665): n is a, c, g, or t
  misc_feature (857)..(857): n is a, c, g, or t
  misc_feature (901)..(901): n is a, c, g, or t
  misc_feature (932)..(932): n is a, c, g, or t
  misc_feature (937)..(937): n is a, c, g, or t
  misc_feature (992)..(992): n is a, c, g, or t
gggcagcaccgagatctcgatgaagctaccgtgcaccgaggtgctcatgaagaaacgcctaccgtttgacactcatccatcagagccgaaccgagaagcccatgatgtgcataccaaccttccagtccactggctatagtatcatcagatagcatccaatagtcccaagcggccagtagatcttaatcgaagtctccgtctgctgcgatactgctcctattcttgtcatgcaagcgattcgaactccgtacatttagcaacggcctctccacagtacgaagtgatctgaccctatacgacgctaaggccctcggacagtcgtttcgcctccagccaacggcgcgtagccttagtcattatgctaaatacggtgtgaggtgagtccctaattccgacggcngcnctctttaatggaaagaccgtcggcaggggcgcaccagactgcattgagaaggaanctncaagcntnactnatgcgttgcgtggatanagtgatgctttgaacntccnaatactctcggncntagactgtgantgcgcgtcaggtacatattattatgaagacacaaccgtactcgtctcgacccggctcnatttgaccccgccgatcgcgtatactaatnctggacgataaggtggaatcatgaaactgtacgtgacagtcntggcttcctagccgaaagaagaataagccaccgagcgaaatcgaatattggatctcccgcggacccctaccagtcggttgggacgttaggatcctccctgtaccagccaactccgtggaccttgaagacgaagccacaggatcccaaacagctaccaaacggaatattgagtactcgttttgtagtaggggntgcgcctgaagaggcaaggctcataactttcgatggaaggtagngtgggtggatgccagcccttcggtaacacgnggatncgctggggtaccactcgttcctcggccggcctgttaacggtccaagtaacgaaancgggttacgggtatcctcaacaccaggcctggcttgaccaccagcaaccatcggcattagcgcgtgcagcattatgtgaacgatgtgtccatatgcttatgtggtccaagatccattccacctgcccacgatccccacgggtacgtctaacgaaactggttttatagccacacacgggaagggtgtactctatgactgtaaggacatgttaacgaacctgggagccaatgttatacgaagcttaccaatggaattccctccttatattgggaacttccaactaaatgtactcggcataaaaagacg

SEQ ID NO: 714486 - DNA, 287 bp, Homo sapiens
ttatctcgggagttcgggctgtctgccaatcacaagcaataacagctaagatgtgatcttctgcacaatatgtggtgttctcccgacttttgtgactgacatggtgtcttccgcatttgacactgtggccgtgaccaagagccccttgacatatcccctactgtcacggagcatccaggtattgttcccattcctcctggaattggggaaagccttccttatcccctgtcccacctcccctctccaagtaaagcacctgttgccctcagtcacgtggcctgccattg

SEQ ID NO: 714487 - DNA, 200 bp, Homo sapiens
ccccccccctttttggccccccgggggtccttttttttcccccccccccccccccccccccccgggggggggccgggaaaattttggcccccccaatttgggggggtttggggggggtttttttttaaaaggggggccagtttgcccctttgcttttttttccgggggggccccccggtttgggggctttttttccccca

SEQ ID NO: 714488 - DNA, 300 bp, Homo sapiens
ctcctaccccacgacaacatgggcagatgtgcagaacattaggctaagcgaaataagcagattcagaaagacgggtaatgcataatctcctttctatgtggaatctaagagtacaactcacagaagcagagagtagaatggcggctgccttgcggggtaggggaaaatgagaagcaattggtcaaagggtacaaggtttcagttacccaagataaagaagatctggatttccaaggtacaacacggtgactatagttaataataacggtattgtatacttgaaatttgctaaaatggtac

SEQ ID NO: 714489 - DNA, 1081 bp, Homo sapiens
ggtgaccagcaccatggcgggttggcaagaacaagcgccttacggaaagggcgggaacaagagggagccaagcaaggaaagtggttgagtccattttctaagaaagatgggtatgatgtgaaagcacctgctatgttcaatcataagcaacatattggtaacagacgcgtcggtcacccaggacccgaaggaaaccgaacatatgccatcatgtatgggtcgtcgacagggtctggtgtgcttaggaaggtgcagtctgtgcctggattagcgagcaatggatggaagttgccatttcacagagacattcgaagctgagttatttgaaggatggtatcagggggttaaaaaaccgtggagcagtacactaagctttccagtgtgaactggaatgctataccgcggtgaaaagaattgtgttgaccactgggtcaagagaaattgggagactaaatgagttggacaggtcagggtatgaatgggtcaaagcgaacataacgcagaatggggtgtgaacctatgcgctaatccgatacgtgctgaacatgggaggtggagggcttgatcgagcgtgaggacacagaacggacaagagcaaaaatgcgcggaattaacgagaacagaacccgtcagtgtcatgtctcgcaaggaaaaccaagagcaagtggtacgcgggaccatagaggcccggggacacgacacacgcaagtggaccgtggaccacgttcgagtggaacccccacggagcggaatgggtggccaggagaccacaaactggaacatgatggaaagaaggaacagactggggtgcgaaagaaaccaaatttggccagaggcccaagaaacccagggacaatgtgggcgcaaaaacaggaaacgatatacggaacaccaacggggggtagggacacaacatagcgaggaaggtcgaacagaacgcaagccccgccaaagtgggaagagagtccctgttcggaacgcaagacaaaaaacgggtacaagaaagaccggcgatgacgaagcaagagacacacccaagagataccaggacaacacagcaggaaaatagcgcgtacaaggg

SEQ ID NO: 714490 - DNA, 334 bp, Homo sapiens
ggttaaaaccacctgaaagtttgggtttggtggtttgggggccgggccacccaacctgtatggggcaggccaaacaaactaatgtagtgagtgtacctgtacctaaggcttaactgggaagggatcccgaccttgctggaactactgggaccaaaaagcggggtaccccacgcccctgcctgcactcctcgggggggtggggggtcccttgctccacccggactccttgggttgggtcccccatcccccctcctgccccgtggggcaatttaccctttttcatgaaagttttttccaatgaaaagtttttaaaaataaaatttttaaaattcta

SEQ ID NO: 714491 - DNA, 591 bp, Homo sapiens
  misc_feature (102)..(102): n is a, c, g, or t
  misc_feature (129)..(129): n is a, c, g, or t
  misc_feature (137)..(137): n is a, c, g, or t
  misc_feature (139)..(140): n is a, c, g, or t
  misc_feature (158)..(158): n is a, c, g, or t
  misc_feature (171)..(171): n is a, c, g, or t
  misc_feature (182)..(182): n is a, c, g, or t
  misc_feature (189)..(189): n is a, c, g, or t
  misc_feature (192)..(192): n is a, c, g, or t
  misc_feature (237)..(237): n is a, c, g, or t
  misc_feature (240)..(240): n is a, c, g, or t
  misc_feature (248)..(248): n is a, c, g, or t
  misc_feature (268)..(268): n is a, c, g, or t
  misc_feature (286)..(286): n is a, c, g, or t
  misc_feature (308)..(308): n is a, c, g, or t
  misc_feature (330)..(330): n is a, c, g, or t
  misc_feature (347)..(347): n is a, c, g, or t
  misc_feature (363)..(363): n is a, c, g, or t
  misc_feature (366)..(366): n is a, c, g, or t
  misc_feature (564)..(565): n is a, c, g, or t
atggagcattattcagctcctttttaatagaatgtgaagattacttgatatcaatttataaagaatttatttttcagaactgcatattattttactgtatangtatgccataatttatttaatcattcncatagccntnnaggttgattgctttcttngccttagcagcangtaattttcanctaagtnatngcacacattcacacgtaggaatatgcatgttggctaagttactanaanttagtgtngttgagctacagtctgtgtngtaattttgataagcatngccaaattgctcttcatagttnttatatcaattcagctctcatnggcagtgtatatacgtnagaatgagaatttcancanccctggccagcacaagtactgtcaagttttatcttggtcagactgataggcaaaaatggaatattgcagttttgatttaatttttctcatatgtattaggtattgaacatctttctgtttgtatttcctactttaagaactttgttcatattcttcacccatttttcttagtggctgaaaactgcacagatcttgttnnctttcatttcttcggagcccggtgga

SEQ ID NO: 714492 - DNA, 1788 bp, Homo sapiens
  misc_feature (1599)..(1599): n is a, c, g, or t
  misc_feature (1644)..(1645): n is a, c, g, or t
  misc_feature (1647)..(1647): n is a, c, g, or t
  misc_feature (1654)..(1654): n is a, c, g, or t
  misc_feature (1668)..(1669): n is a, c, g, or t
  misc_feature (1674)..(1674): n is a, c, g, or t
  misc_feature (1676)..(1676): n is a, c, g, or t
  misc_feature (1683)..(1683): n is a, c, g, or t
  misc_feature (1689)..(1689): n is a, c, g, or t
  misc_feature (1694)..(1694): n is a, c, g, or t
  misc_feature (1701)..(1701): n is a, c, g, or t
  misc_feature (1708)..(1708): n is a, c, g, or t
  misc_feature (1712)..(1712): n is a, c, g, or t
  misc_feature (1717)..(1717): n is a, c, g, or t
  misc_feature (1732)..(1732): n is a, c, g, or t
  misc_feature (1744)..(1744): n is a, c, g, or t
  misc_feature (1749)..(1749): n is a, c, g, or t
  misc_feature (1760)..(1760): n is a, c, g, or t
  misc_feature (1763)..(1763): n is a, c, g, or t
  misc_feature (1766)..(1766): n is a, c, g, or t
  misc_feature (1768)..(1768): n is a, c, g, or t
  misc_feature (1784)..(1784): n is a, c, g, or t
agcgagcgggccgccgccattttggagcgatcggagtgccgcccgcggccccgagtcggtctcgagccgccggccggccgtgccggtgtccgtaggcgctgcgccctcggccgggcccatgtgtgtgcggcccgcccgaggccgcccgggctttgcctccaccagcgccctggcctccgctcgggcctccacacgggcctccgaagagctgccgcgacgcccggcccgcagggcaggtaaagagattataaatcttccactgaatgaaaaaaattttcttaaagctgcatatactccaagaaaaaaaccacaaatgtttttctgttttgcctgaatacatgatttaaacaagagatttccacagaagctctgcggcgctttcatggaactatatgatcatatgggcaacattctgttgcagtctaccttctgtctgacggatatgccatcctgaaaaaggaaagaagctgaacttcaagttcctttcatttagccttggctctgcggccgtcacgatgttctggaagtttgacttgaacaccacgtcccatgttgacaagctgctggacaaggagcatgtgacgctgcaggagttaatggatgaagatgacatcttgcaggagtgtaaggctcagaaccagaagctgctggacttcctgtgcaggcagcagtgcatggaggagctggtgagcctcatcacacaggatccgcccctggacatggaggagaaggtccgcttcaaatatccaaacacagcctgtgagcttctgacttgtgatgtgccgcagatcagcgaccgcctcggtggggacgagagcctgctgagcctcctgtacgacttcttggaccatgagccgcctctcaatcctctgctcgccagttttttcagcaagaccattggcaatctcattgcaagaaaaaccgaacaggtgattacgtttttgaagaagaaggacaagttcatcagcctggtgttgaagcacatcggcacctcagcgcttatggacctgctgctgcgcctggtcagctgtgtggagccagccgggctccggcaggacgtcctgcactggctgaatgaagagaaggtcatccagaggcttgtggagttgatccacccgagccaggatgaagataggcagtcaaatgcttctcagactctctgtgacatagttaggctgggcagagaccagggcagtcagctgcaagaggctctggagccagacccgctcctcacagcgctggagtcgcaggactgtgtggagcagcttctgaagaacatgtttgatggagaccggacggagagctgcctcgtcagtgggactcaggtgttactcaccttgctggaaaccaggcgggttgggacagagggcttggtggactccttttctcagggactggaaaggtcatacgctgtcagcagcagcgtactacacggcatcgagcctcggctgaaggacttccaccagctcctgctcaacccgcccaagaagaaagcgatcctgaacaccattggtgtgctggaggagcccctggggaatgcccgtctgcatggcgcccgctcatggcagcactgttgacacaaacacacccaggatcaancaggagctctgccggtcaacacgatggacttactgctggacttgnncntttaagntacacctggaatannttttngnacttccnagtggnactantgatagncggtatntctncccangctgcccgtgagagnaggacaaagccngggancgagagcaggnggngcncncatgaacgggaccggnccgg

SEQ ID NO: 714493 - DNA, 1706 bp, Homo sapiens
  misc_feature (1517)..(1517): n is a, c, g, or t
  misc_feature (1562)..(1563): n is a, c, g, or t
  misc_feature (1565)..(1565): n is a, c, g, or t
  misc_feature (1572)..(1572): n is a, c, g, or t
  misc_feature (1586)..(1587): n is a, c, g, or t
  misc_feature (1592)..(1592): n is a, c, g, or t
  misc_feature (1594)..(1594): n is a, c, g, or t
  misc_feature (1601)..(1601): n is a, c, g, or t
  misc_feature (1607)..(1607): n is a, c, g, or t
  misc_feature (1612)..(1612): n is a, c, g, or t
  misc_feature (1619)..(1619): n is a, c, g, or t
  misc_feature (1626)..(1626): n is a, c, g, or t
  misc_feature (1630)..(1630): n is a, c, g, or t
  misc_feature (1635)..(1635): n is a, c, g, or t
  misc_feature (1650)..(1650): n is a, c, g, or t
  misc_feature (1662)..(1662): n is a, c, g, or t
  misc_feature (1667)..(1667): n is a, c, g, or t
  misc_feature (1678)..(1678): n is a, c, g, or t
  misc_feature (1681)..(1681): n is a, c, g, or t
  misc_feature (1684)..(1684): n is a, c, g, or t
  misc_feature (1686)..(1686): n is a, c, g, or t
  misc_feature (1702)..(1702): n is a, c, g, or t
agcgagcgggccgccgccattttggagcgatcggagtgccgcccgcggccccgagtcggtctcgagccgccggccggccgtgccggtgtccgtaggcgctgcgccctcggccgggcccatgtgtgtgcggcccgcccgaggccgcccgggctttgcctccaccagcgccctggcctccgctcgggcctccacacgggcctccgaagagctgccgcgacgcccggcccgcagggcaggtaaagagattataaatcttccactgaatgaaaaaaattttcttaaagctgcatatactccaagaaaaaaaccacaaatgtttttctgttttgcctgaatacatgatttaaacaagagatttccacagaagctctgcagatggacttccaggacttgggtctagtgttgctgagggtggatctgcagggccgtcacgatgttctggaagtttgacttgaacaccacgtcccatgttgacaagctgctggacaaggagcatgtgacgctgcaggagttaatggatgaagatgacatcttgcaggagtgtaaggctcagaaccagaagctgctggacttcctgtgcaggcagcagtgcatggaggagctggtgagcctcatcacacaggatccgcccctggacatggaggagaaggtccgcttcaaatatccaaacacagcctgtgagcttctgacttgtgatgtgccgcagatcagcgaccgcctcggtggggacgagagcctgctgagcctcctgtacgacttcttggaccatgagccgcctctcaatcctctgctcgccagttttttcagcaagaccattggcaatctcattgcaagaaaaaccgaacaggtgattacgtttttgaagaagaaggacaagttcatcagcctggtgttgaagcacatcggcacctcagcgcttatggacctgctgctgcgcctggtcagctgtgtggagccagccgggctccggcaggacgtcctgcactggctgaatgaagagaaggtcatccagaggcttgtggagttgatccacccgagccaggatgaagataggcagtcaaatgcttctcagactctctgtgacatagttaggctgggcagagaccagggcagtcagctgcaagaggctctggagccagacccgctcctcacagcgctggagtcgcaggactgtgtggagcagcttctgaagaacatgtttgatggagaccggacggagagctgcctcgtcagtgggactcaggtgttactcaccttgctggaaaccaggcgggttgggacagagggcttggtggactccttttctcagggactggaaaggtcatacgctgtcagcagcagcgtactacacggcatcgagcctcggctgaaggacttccaccagctcctgctcaacccgcccaagaagaaagcgatcctgaacaccattggtgtgctggaggagcccctggggaatgcccgtctgcatggcgcccgctcatggcagcactgttgacacaaacacacccaggatcaancaggagctctgccggtcaacacgatggacttactgctggacttgnncntttaagntacacctggaatannttttngnacttccnagtggnactantgatagncggtatntctncccangctgcccgtgagagnaggacaaagccngggancgagagcaggnggngcncncatgaacgggaccggnccgg

SEQ ID NO: 714494 - DNA, 1414 bp, Homo sapiens
  misc_feature (41)..(41): n is a, c, g, or t
  misc_feature (1225)..(1225): n is a, c, g, or t
  misc_feature (1270)..(1271): n is a, c, g, or t
  misc_feature (1273)..(1273): n is a, c, g, or t
  misc_feature (1280)..(1280): n is a, c, g, or t
  misc_feature (1294)..(1295): n is a, c, g, or t
  misc_feature (1300)..(1300): n is a, c, g, or t
  misc_feature (1302)..(1302): n is a, c, g, or t
  misc_feature (1309)..(1309): n is a, c, g, or t
  misc_feature (1315)..(1315): n is a, c, g, or t
  misc_feature (1320)..(1320): n is a, c, g, or t
  misc_feature (1327)..(1327): n is a, c, g, or t
  misc_feature (1334)..(1334): n is a, c, g, or t
  misc_feature (1338)..(1338): n is a, c, g, or t
  misc_feature (1343)..(1343): n is a, c, g, or t
  misc_feature (1358)..(1358): n is a, c, g, or t
  misc_feature (1370)..(1370): n is a, c, g, or t
  misc_feature (1375)..(1375): n is a, c, g, or t
  misc_feature (1386)..(1386): n is a, c, g, or t
  misc_feature (1389)..(1389): n is a, c, g, or t
  misc_feature (1392)..(1392): n is a, c, g, or t
  misc_feature (1394)..(1394): n is a, c, g, or t
  misc_feature (1410)..(1410): n is a, c, g, or t
caccttatattatcagctaggatttaaacaagagatttccncagaagtctaccttctgtctgacggatatgccatcctgaaaaaggaaagaagctgaacttcaagttcctttcatttagccttggctctgcggccgtcacgatgttctggaagtttgacttgaacaccacgtcccatgttgacaagctgctggacaaggagcatgtgacgctgcaggagttaatggatgaagatgacatcttgcaggagtgtaaggctcagaaccagaagctgctggacttcctgtgcaggcagcagtgcatggaggagctggtgagcctcatcacacaggatccgcccctggacatggaggagaaggtccgcttcaaatatccaaacacagcctgtgagcttctgacttgtgatgtgccgcagatcagcgaccgcctcggtggggacgagagcctgctgagcctcctgtacgacttcttggaccatgagccgcctctcaatcctctgctcgccagttttttcagcaagaccattggcaatctcattgcaagaaaaaccgaacaggtgattacgtttttgaagaagaaggacaagttcatcagcctggtgttgaagcacatcggcacctcagcgcttatggacctgctgctgcgcctggtcagctgtgtggagccagccgggctccggcaggacgtcctgcactggctgaatgaagagaaggtcatccagaggcttgtggagttgatccacccgagccaggatgaagataggcagtcaaatgcttctcagactctctgtgacatagttaggctgggcagagaccagggcagtcagctgcaagaggctctggagccagacccgctcctcacagcgctggagtcgcaggactgtgtggagcagcttctgaagaacatgtttgatggagaccggacggagagctgcctcgtcagtgggactcaggtgttactcaccttgctggaaaccaggcgggttgggacagagggcttggtggactccttttctcagggactggaaaggtcatacgctgtcagcagcagcgtactacacggcatcgagcctcggctgaaggacttccaccagctcctgctcaacccgcccaagaagaaagcgatcctgaacaccattggtgtgctggaggagcccctggggaatgcccgtctgcatggcgcccgctcatggcagcactgttgacacaaacacacccaggatcaancaggagctctgccggtcaacacgatggacttactgctggacttgnncntttaagntacacctggaatannttttngnacttccnagtggnactantgatagncggtatntctncccangctgcccgtgagagnaggacaaagccngggancgagagcaggnggngcncncatgaacgggaccggnccgg

SEQ ID NO: 714495 - DNA, 1937 bp, Homo sapiens
  misc_feature (1748)..(1748): n is a, c, g, or t
  misc_feature (1793)..(1794): n is a, c, g, or t
  misc_feature (1796)..(1796): n is a, c, g, or t
  misc_feature (1803)..(1803): n is a, c, g, or t
  misc_feature (1817)..(1818): n is a, c, g, or t
  misc_feature (1823)..(1823): n is a, c, g, or t
  misc_feature (1825)..(1825): n is a, c, g, or t
  misc_feature (1832)..(1832): n is a, c, g, or t
  misc_feature (1838)..(1838): n is a, c, g, or t
  misc_feature (1843)..(1843): n is a, c, g, or t
  misc_feature (1850)..(1850): n is a, c, g, or t
  misc_feature (1857)..(1857): n is a, c, g, or t
  misc_feature (1861)..(1861): n is a, c, g, or t
  misc_feature (1866)..(1866): n is a, c, g, or t
  misc_feature (1881)..(1881): n is a, c, g, or t
  misc_feature (1893)..(1893): n is a, c, g, or t
  misc_feature (1898)..(1898): n is a, c, g, or t
  misc_feature (1909)..(1909): n is a, c, g, or t
  misc_feature (1912)..(1912): n is a, c, g, or t
  misc_feature (1915)..(1915): n is a, c, g, or t
  misc_feature (1917)..(1917): n is a, c, g, or t
  misc_feature (1933)..(1933): n is a, c, g, or t
agcgagcgggccgccgccattttggagcgatcggagtgccgcccgcggccccgagtcggtctcgagccgccggccggccgtgccggtgtccgtaggcgctgcgccctcggccgggcccatgtgtgtgcggcccgcccgaggccgcccgggctttgcctccaccagcgccctggcctccgctcgggcctccacacgggcctccgaagagctgccgcgacgcccggcccgcagggcaggtaaagagattataaatcttccactgaatgaaaaaaattttcttaaagctgcatatactccaagaaaaaaaccacaaatgtttttctgttttgcctgaatacatgatttaaacaagagatttccacagaagctctgcggcgctttcatggaactatatgatcatatgggcaacattctgttgcagtctaccttctgtctgacggatatgccatcctgaaaaaggaaagaagctgaacttcaagttcctttcatttagccttggctctgcgcttccaccttctctgtggctagaaacaggaccgtccagaagtcacctgtaactgccctatcttgcaagttctgattttggcaaaaaaaaaaaaaaaaagccttgacaaggttggattcacttctttccctggattgtgtgtcatccaaggccgtcacgatgttctggaagtttgacttgaacaccacgtcccatgttgacaagctgctggacaaggagcatgtgacgctgcaggagttaatggatgaagatgacatcttgcaggagtgtaaggctcagaaccagaagctgctggacttcctgtgcaggcagcagtgcatggaggagctggtgagcctcatcacacaggatccgcccctggacatggaggagaaggtccgcttcaaatatccaaacacagcctgtgagcttctgacttgtgatgtgccgcagatcagcgaccgcctcggtggggacgagagcctgctgagcctcctgtacgacttcttggaccatgagccgcctctcaatcctctgctcgccagttttttcagcaagaccattggcaatctcattgcaagaaaaaccgaacaggtgattacgtttttgaagaagaaggacaagttcatcagcctggtgttgaagcacatcggcacctcagcgcttatggacctgctgctgcgcctggtcagctgtgtggagccagccgggctccggcaggacgtcctgcactggctgaatgaagagaaggtcatccagaggcttgtggagttgatccacccgagccaggatgaagataggcagtcaaatgcttctcagactctctgtgacatagttaggctgggcagagaccagggcagtcagctgcaagaggctctggagccagacccgctcctcacagcgctggagtcgcaggactgtgtggagcagcttctgaagaacatgtttgatggagaccggacggagagctgcctcgtcagtgggactcaggtgttactcaccttgctggaaaccaggcgggttgggacagagggcttggtggactccttttctcagggactggaaaggtcatacgctgtcagcagcagcgtactacacggcatcgagcctcggctgaaggacttccaccagctcctgctcaacccgcccaagaagaaagcgatcctgaacaccattggtgtgctggaggagcccctggggaatgcccgtctgcatggcgcccgctcatggcagcactgttgacacaaacacacccaggatcaancaggagctctgccggtcaacacgatggacttactgctggacttgnncntttaagntacacctggaatannttttngnacttccnagtggnactantgatagncggtatntctncccangctgcccgtgagagnaggacaaagccngggancgagagcaggnggngcncncatgaacgggaccggnccgg

SEQ ID NO: 714496 - DNA, 1037 bp, Homo sapiens
tgtgttaaattaactatatgttgtgggtcccttaatacctctatcgcgacttccggtgaggtacccatgtagatgtggactgatgaagagtagagaaacgtttccccaaggtcactaacacacatgttaatcaattatcactttctattttttaccaatatttgagattgaacatctagactgactgtcaggtatgcacgtcccgttccttatttggccatatcagatacgaatatacgttatactaaagtcagtctacatgttagacttctctgaggacaagaaacggcctcgtgtatccgatcattcctttaaactggcttggaaacaggacttctatatattactgacagggtctctgggaaagcctggttcactatctcgtgtagttctaagttggtgccactcgttccttggccttgggaagggcagtaggaagaaaggagatctacattcggtgataaagtcctgtagtacagggctctgtggctcgatcggccagggacactcttggagacgtacattccatcactttaatctcgcgcacgaacgaagatactggcaaacttcattaacgttcatttaaagcaactttgttccaggtggttggaccctggagctttcaaacctattggacctttttgcacgtctcaattcaggacatctaatactaggggctggcctcccaatggggctatttttcaacagccgcccgagttcaaagttagtaacatggcgtatggagtaacaaccttaaattcttcacctataacgagcaaacatccttctccatttattcatgggaaaccgtttcacgttttaagtgggccttttcaaccgtgggttgagctccccaggttaggttgatatgggactggttctttcaggcttaatttgaacgcgtaaagtgtcgcccgggaattagagtttgccacctgtggctcagccattctaggggacaccccactaattccccgtcatgttagacgttctcatccccaaattgggcggaactcttcacatcggcctggtgacca

SEQ ID NO: 714497 - DNA, 1731 bp, Homo sapiens
  misc_feature (198)..(198): n is a, c, g, or t
  misc_feature (251)..(251): n is a, c, g, or t
  misc_feature (1542)..(1542): n is a, c, g, or t
  misc_feature (1587)..(1588): n is a, c, g, or t
  misc_feature (1590)..(1590): n is a, c, g, or t
  misc_feature (1597)..(1597): n is a, c, g, or t
  misc_feature (1611)..(1612): n is a, c, g, or t
  misc_feature (1617)..(1617): n is a, c, g, or t
  misc_feature (1619)..(1619): n is a, c, g, or t
  misc_feature (1626)..(1626): n is a, c, g, or t
  misc_feature (1632)..(1632): n is a, c, g, or t
  misc_feature (1637)..(1637): n is a, c, g, or t
  misc_feature (1644)..(1644): n is a, c, g, or t
  misc_feature (1651)..(1651): n is a, c, g, or t
  misc_feature (1655)..(1655): n is a, c, g, or t
  misc_feature (1660)..(1660): n is a, c, g, or t
  misc_feature (1675)..(1675): n is a, c, g, or t
  misc_feature (1687)..(1687): n is a, c, g, or t
  misc_feature (1692)..(1692): n is a, c, g, or t
  misc_feature (1703)..(1703): n is a, c, g, or t
  misc_feature (1706)..(1706): n is a, c, g, or t
  misc_feature (1709)..(1709): n is a, c, g, or t
  misc_feature (1711)..(1711): n is a, c, g, or t
  misc_feature (1727)..(1727): n is a, c, g, or t
gggagagacacctgggcgcattcgcctaacagaactacagagcaagcaagagcattgaggggcatgtcgagcacgctggtgggtgggggacagtgtggtgaaggagggcaaaggagggggttagcccagaggagaacctggggaggcaggtcctggagctgggggtgcagcctcagagctgttgagcagctgggaagnctgctaactttgtgagcccaacctggagaggtctgatgggaatggttactggngagggccccacatcctgagctctgggaatcttgtgtgttcatgctgcagatggacttccaggacttgggtctagtgttgctgagggtggatctgcagaggtgagagaaatgacccctttggacttgggtctagtgttgctgaaggtggatttgcaagggtgagagacgtgacccctttgccctcgttgcagctctgcggccgtcacgatgttctggaagtttgacttgaacaccacgtcccatgttgacaagctgctggacaaggagcatgtgacgctgcaggagttaatggatgaagatgacatcttgcaggagtgtaaggctcagaaccagaagctgctggacttcctgtgcaggcagcagtgcatggaggagctggtgagcctcatcacacaggatccgcccctggacatggaggagaaggtccgcttcaaatatccaaacacagcctgtgagcttctgacttgtgatgtgccgcagatcagcgaccgcctcggtggggacgagagcctgctgagcctcctgtacgacttcttggaccatgagccgcctctcaatcctctgctcgccagttttttcagcaagaccattggcaatctcattgcaagaaaaaccgaacaggtgattacgtttttgaagaagaaggacaagttcatcagcctggtgttgaagcacatcggcacctcagcgcttatggacctgctgctgcgcctggtcagctgtgtggagccagccgggctccggcaggacgtcctgcactggctgaatgaagagaaggtcatccagaggcttgtggagttgatccacccgagccaggatgaagataggcagtcaaatgcttctcagactctctgtgacatagttaggctgggcagagaccagggcagtcagctgcaagaggctctggagccagacccgctcctcacagcgctggagtcgcaggactgtgtggagcagcttctgaagaacatgtttgatggagaccggacggagagctgcctcgtcagtgggactcaggtgttactcaccttgctggaaaccaggcgggttgggacagagggcttggtggactccttttctcagggactggaaaggtcatacgctgtcagcagcagcgtactacacggcatcgagcctcggctgaaggacttccaccagctcctgctcaacccgcccaagaagaaagcgatcctgaacaccattggtgtgctggaggagcccctggggaatgcccgtctgcatggcgcccgctcatggcagcactgttgacacaaacacacccaggatcaancaggagctctgccggtcaacacgatggacttactgctggacttgnncntttaagntacacctggaatannttttngnacttccnagtggnactantgatagncggtatntctncccangctgcccgtgagagnaggacaaagccngggancgagagcaggnggngcncncatgaacgggaccggnccgg

SEQ ID NO: 714498 - DNA, 1037 bp, Homo sapiens
  misc_feature (293)..(293): n is a, c, g, or t
  misc_feature (1037)..(1037): n is a, c, g, or t
ggccgtcgcgccgggtgggcggcatggttcgggtgccagcatgggggcttcgatggtgactgtcaagcaaagagcgcggcgagggttcgacagctgcggtcgagattggggtaccatgaggaggagctgggtgaagaaatggtcgggtgagttcaagggtgaagaatgcgtgaaggaggattctggggaatgggacccaaggtgacctggtaacgggttacgtgtcgctgtccatgtagacgagcggcgtcgaaggagaattccgggacagcggcggagcgcgcgaatcatgncccctttttccccggaagatcaccctatggacttggtggaggcaggcgcgacggttgggatgctaaagccttggccacgccacagatcgcgcagaaaaggcaacgacgtgttacccgtggggaattagcaggcgctctgaacgcatgcacggaggacacgcccattgccagtgttaccatttgcacacggtgaaggcttggcgtgggcctggttatcccaatgcaagctgctttggtaaagtgctcccgtaatataccactgcaactggtttgccaatcgggtgaccgaacaggaaattccccagggtgggcagtaaaacggcacaaggaaattccagaggggaaaaaccggacagaggaacgttccggaaggccgttcatgggggggctttccaaattggagaaccaatctttcctttccgcgtttggactcactttggcggcaccgctaaccacaacgaggcggcgggaatgaggcgggtgaggcaaccaatttggggccccgaacccatttgggggcgcgcttttttacgtttccgcaaaagaccacccttttcatccgcgggcaaactataggcgtatgctccccccaccaaaaattttcctgtttatttaccaagccctttgtggggaagacagcacgaaaaagggggttttattccgattatatagagggtaacaccgccgtagagaggaatacaccgccacaaataataatgggactaggccccgcgatatatggan

SEQ ID NO: 714499 - DNA, 324 bp, Homo sapiens
ataaaaataaaagcaatgtgcagaaagaggctggccacaaaaaggtcacatactgtatgataccacttatatgaaatacccagaatgggtaaatccaaagagagcatattggtggttgtcaagggtcggagggaggatgaaatgtgtgacagctgcttaatggatggaggatttcctttggggtgatgcaactattttggaactaagaggtggtggctgcacaatgttgtgcatggactaaatgtcacagaaatgtacatttttaaaagttaattttatattgtgtaaattttccctcaataaaaaaatcaggaaaacagcaaa

SEQ ID NO: 714500 - DNA, 140 bp, Homo sapiens
ggtcaggcactgaagcctggtcaggcactgaagcctgggtgacagagtgagactccatctcaaaaacaaacaaacaaagaaacaaaaaaacaaaaaactgtctgtggcttattaggcttcagtgtgaccaggcttcagtg

SEQ ID NO: 714501 - DNA, 279 bp, Homo sapiens
  misc_feature (63)..(63): n is a, c, g, or t
  misc_feature (90)..(90): n is a, c, g, or t
acgcggtactctctcgggcgaccattcaggcgcctgcctcacaagaaggagactctcccgggnctccgccgcttctcgggatcggtcgcngtacgcactggacgcctcggggccatctccgccactccggatcggggatctgaacccgactccctttcgatcggccgaggtcaacggaggccatcgcccgtcccttcggaaacggcgctcgtccaattctctcaggaccgacttgacctatgttcaactgcttgttcacatggaacccttttccacttc

SEQ ID NO: 714502 - DNA, 1340 bp, Homo sapiens
tttgccgccagaacacaggctgtcgctgaaaactaccccctaaatagccaacacatgggacacaggaaacagactcatactcagacattgctcgctcacttggcacacgctacgattcggcgcacagctccaccactactggccactctgactctactacaactgccggctggccactccgcaccacaaaggacacccatctgcaacaaactttgcagcacagcgcagcgcctgcctgacgcactggcggaacagcggccctcccttcacagtaatgcccctggcgctccttgcgactaaacaccctgcgacacacgctgcacgccgctgcaaccgctgcgctatccaccccacttgcactactcctccctctgctgcgcacccaccttctcgcacgcacccacggccaacgcctacctactgctgaccctacctccactctgcactgcccccagcgaccacacgcacgcacctcttactccaaacaacactgcactctacaacgggcacactctccagcgcctgcacccctgctgcctgctccctgcactctgctctgcctgccctggcctgcttcgcgcctgcacactcctgcacacggcctggcctactcgtcccaacgcaactgcgctgcacgaccctgcagcagccacttgcccctatctgcgacttacaccacctgcggctggtgcacaacccaactaactcgctcggctgctttaaaccaacacactgggcacttccaccctgaggcccaccccttaccagctcacgcacacgcaccactactgcaggcacacactcgctaaaacgcgcaaccttcaagcccacctctacgactccaccccacacacactttgggcctaccaacccccccgtaccacaggctacgccactttctgctggccaaactcttcctgcctccgcgcacactgcgtgacccaacattgccctgggcgccccacgttgcctaaaacattgccctttggaccccaaggcgacatcgcaacagttcaacgccgctaacggattcgccacatgcccaacgggcaaaccaccgccagccctgtgacgccacatccggacatggcagctcccttacccaccccacactttggccccacaccttggacaagggccccttggccggcgcaggccaacccccacggaaggctaaccacacccacgggcggccaccacagcgggacagatccccaggtcagcccgccaagcagaaaaacgaagagactcgcaacaacgccgagcaaacagcagcctagccccctatgcgcgccccgcacaagcgctatcacagcacagcaaaaacatacgagcagaaa

SEQ ID NO: 714503 - DNA, 122 bp, Homo sapiens
ccttccccataacccgacgtccagtagttgcggcgccaggaattgagttcctcgcgggccgcgatggccgatgaagtctgcaggtgatggcctggagcgccttcgtggtaaacggtggtgag

SEQ ID NO: 714504 - DNA, 304 bp, Homo sapiens
tttttgggggccccttttttaaagttttaaaaattggtgccccggggggtccgttttttaccccttacttgggggttttgccccccctttccggggttggggttttaaggggttttttcccccccggttgggggaggtgtttcggggtttctgttttggaatttaacccggtaaagttaatgggttaaagggctgggttttttctttgtttgggtaaaacctattttggttcggcctgggccttattttttatccccttttttccccctttccgccccaattaagttttggttttttcccccca

SEQ ID NO: 714505 - DNA, 806 bp, Homo sapiens
gcctgtaatcccagcactttgggaggccaaggcgggcggatcatgaggtcaggagttcgagaccagcctgaacaacatgatgaagcccccatgtctactacaaaatatgacacattcaggccagggcgtggtggccggggtggcctggtaagttcacaagcttacttcaaggacgggctgaaggacagggagaaattccgccctacacacttgacaggcaggacggtcacacgtaaagcccaagaatacacagccactggcactgccagaccatggcgtgacccagagcgaagaacttcaatactcaacaacaaaaaacaaacaaaaacaacaaacaaacaaacacacagacacaacacacgcaaagggcaacacccacagacacagagcctataacagaacacagcagagagtgagagagcacaccagaggcggacacaagaaaagagaaaaaggagaacacatggtaggaacaagaaagagagaccaccacagagagacaacaacggagtgaacaaaggacgaacaataacgaccaacgcgagagccaaacgagcacacacaaacacaaaacaaccacacccgacagcggtgcagaagaaacaacagacgacaacgggatgcacagatacacagaaacaagaaacaaaaccagagaacgaagccaaaacacagagacgaagagcaaacacactgcacgcgaacaaagccatgaccacacacaacaagacagacacgaccacaagcaggaaacccacagaagcaaagcactacacaaaagacaacaaccgccggacccaccaggc

SEQ ID NO: 714506 - DNA, 295 bp, Homo sapiens
tcggttaacccaccctaaatcttgaagatgagagaactacatcagcagcagatagttatatgcgtgagccaatgtttacataatacagaaagtggaggctttttctagattaagatgctccacgcagacccgcactaatgagtggtctggcaattcttactgcaagcccagcaacttaagtccacacctggtatatgaccagctgactggaagacctggttttctagatagaccagtattagttattgaatagagaatacatgcacctatatagtatagttagactgatcctgca

SEQ ID NO: 714507 - DNA, 435 bp, Homo sapiens
aatggaagatcttacctttttctatcttgtaactctggggttatggtccccctaagagatagcactttttgtatgggggtaattcagctgcatagataaccagcttgatccctggtgaaatgaaaagccttccttctcctgaagcctctttccgccctgccctccactaacaacactgaggagcacaagcccaggcttgcccacctggtaggaacggaagaaattagaacaatgggagccttggctcccctctcgtctcctcccctccttcttgtcgctggctttgttgaggcccacttcccagaggctcctgggcctgtgaatgcaggagctcattctcccctcactgctgaagtctgtgacagcttcttcctccagttatgtctttcttccaaagcaatttcttaaccatcagccatgtgctgctatttctag

SEQ ID NO: 714508 - DNA, 509 bp, Homo sapiens
catgggtaggaaatacttttcctgcccatttttttaaatatcagcacctagtgctgacctggcactagtaacccttgaataaatcttgaatggatggatgaataactgttagaggatacagcatgccaagtacttaatagaggtacagcacagttcgggggaggggggtgaacccaagtttagggccccactgtaatggccatcattattgggtagaaaacacaacatgaggctgggcaccgctgtcacgcctgtaatccaagcactttgggaggccaaggtgggtggatcacctgaggtcaggagttcgagaccagcctggccaacatggaaaaaccccatctctactaaaaaatacaaaaattagctgggcttggtggctcgtgcctatggttccagctactccagaggctgaggcaggagaatcgcttcaaccaagggggcggaggttgcagtgagctgagatcacctcactgcactccagcctggagacaagacgccatctcaaa

SEQ ID NO: 714509 - DNA, 168 bp, Homo sapiens
aaaaaacaaaagtagtatgaaatatgtcgaagacattgatttttttgatttaacctttatatatgatatattcttatattaggatttttgagggatttaaaacaatccaaattcgacttgtagactactagtttatatactgtagactggaccacctgaccatctgac

SEQ ID NO: 714510 - DNA, 451 bp, Homo sapiens
gactgtagagatagcgtcagaagcattgctacgagagcaactccatgttgaataggggctgggtaaaagtgtcagaggtatttgaaccagagcgactccattttgagtgagggctgggaaaatgaggctgagacttactggcctgcattctcagaaagttaggcattcctaccctctaggattgaattgggacccctttcctgtaacatatttctggtgaccacagaagggactatagtgcagaaacgttgacccaacggctacctttgcgtaagtgttggggtcctgtaacatatttctggcaaaccacagaaaggatgatactgaagaaatccccccaaccccaaagaaatagactgcagcactgattggacgactttgggtaagtgatggggtaccgagtaacaaatgggattgggttagaggcccacttaggggagttggagtttct

SEQ ID NO: 714511 - DNA, 1369 bp, Homo sapiens
gggagagcgagaaggaggatctggggtttatcttctgggcccccgagttctgcgccgccgttaggagcaaagtgatttatgcacatgcgtaccgacaggactgccattctatggaatacagctgacagggatcaaagtaatgaaattgcaagctaagtgctacagagcgaggtccaggatccgctgcgagcccatggtcagaagaaagctgagggggctaggtgccggtctagtcgtccctgtgagtggtcaatgacctttgtgatgccgccgttcttgagccgcccgttgtcgcgtggcagacaatactgggccaatgcacaccaataaccctgacctcgttgcgcgagggtatgcaaggggcttggtcgctcgctttcgcttgcccatgacacaggtaggggcgtgcctgaggaggcgcatccctaagaccaagaggtgggatggtgccataatcacacatttcatcccgcgcaaggttggcccacaaacagggatgctcgcacacatgcaccacgctggtaatatgttgccgttcgtcccggctccaaatccgcttgaagcggtttactaggccgtgtaacccataaactggcgtgttgggacgtacgtttcccgacttgtcctactgttggggtcgtgagaagcaggatgcagaggcgtttgcgcccctcgcatgggcaagggctcaagctcttggtgggggggggaggcccatagtcattctatatattttctaagcaaaccaaattccacgcgattttctccactaacgcatgggggttcacattccaccacttttaccccaaattgtcgtggaactaaacatctcttaaaacgcggggcatattatgtttgcacctcgtgatgggcaattttggttcgtgctcttaagagatatcctttgtaggtgacttcatcagtttgggaaacttcgtttctagtttgggagccagattagaaccaccccccaattctcgcggttggctaagcccgagagacgtttggtgtgtgccctcacttctctccccgcaatttttaaccacgcaccttcggtgttcctatccggtgaccttagttttccgatttggcgaagaagcccaagtgaagcaccaagggtttaaaggtggggagccctcttcggaagtataaacaccccagaacaacaacggggccctttgttacttcctgagaggcgtggactgggaacgaaaaagggaggcgtaacagtcgaacaccttggggccaccaagtgggctacgatgtacgacttgctcccctgtggaaccccctaggctttgttctctgctaaccaatgacgtggggtagacaattccttgccgggcgtggtccggcatatattagagtc

SEQ ID NO: 714512 - DNA, 397 bp, Homo sapiens
  misc_feature (155)..(155): n is a, c, g, or t
cctgcagcagacacagcaaaacttttcaggcgcaaaataactctgcacttaaagaaaaatagcaaattaaaacacaaaatcctaacaagttaattaacgctctgcattagcacactggtatctaaaacacacatctcacagcacgtctctaatcnctacgggtaaacaatccttgacttatccagaggtgcatatctaagatccacatagcttaccaagtatcttctatgggacgtaggccataaagggaaaccaggaaaacccgacatattaaaaaaacagttttcttttcggcttaacgttttcctggaagccgaatctgaagttggcggaggacgtccagtcggtccctcgtcctttctccgttgaagtccatcggtcctccctcgttcgtccc

SEQ ID NO: 714513 - DNA, 151 bp, Homo sapiens
  misc_feature (10)..(10): n is a, c, g, or t
  misc_feature (77)..(77): n is a, c, g, or t
  misc_feature (117)..(117): n is a, c, g, or t
aagccaagtnagacgggctctgggaccatggtgaccagggtcttcccctgctccctggccctcgccatctgccaggntgaaaagaagcctcagctcccacaccgccatcctcaccgnccttcctcgggagtcacttccactggtggaccac

SEQ ID NO: 714514 - DNA, 915 bp, Homo sapiens
  misc_feature (705)..(705): n is a, c, g, or t
ttccccccccacctgggggggtccctagcaaccgcggagttccttgtctcgtggttctcggctccgatttatttgttgtggtttctcgcccacaattgccttctcttctcttggccgcctttcccccccgtggaccccctcgtgccgtccttgcggatctgattatggccgcgttctcgtttacaccggttgggtttaatatttctcaactcttaaagagggttctttcctctcctcacgaaaacttgggaacgtttgtttcaacaaaaattccttggacaccgacagaattccacgcgatttctctcaacctagatataaaaaattttaagccctttttgaattgaggccccttctccacacgtgttttgtacttatcacgtcaacccccctgtttctgtttgtaaaacacactggtctttctgttttttttggcgtcttgctttctttcgagtctttttttcgtcttgtgagcgaacacacacctcgtgcctataagagtgacactctctagaagctgtttacccgttcttgcactcttcccacatctttgtgtttgaaatactacttctgtgaatcttataaatatttttcttttcttatagctcttgtataatatttttgcggggataactcctcacttttgtcaccactcacagtcaccacttactcggtatcttcacggcgctacgacgtgattttttntttgccacgcacagtatgtctctaaaattgtgatggcccaccaccccattgttatagaaatatttgtgtttaatttgcccctactagaaataggtcaacaagtttctgggcttgctaccatttgttaactcccctggccccggcgaatatacctgtttattttgttgcccccatgcagaaataaaagtgaagtaagtattttggggccca

SEQ ID NO: 714515 - DNA, 296 bp, Homo sapiens
aggatccccgttggtatgcccacgatcacgcaaatatgtaactcagagaaaggggctgtttagaaccttatctgaagagttgtcgtatgttaggtcaactgatccaactatgattgagacactgatagcttgaaattttgacgaaacttggcaaatgaagccaaattatcaactcttcttcgagaatttcagacctatgtgaacagcctaggataaactaatttgcagcagccactattcagactctcggccgatgtgcaaccaacatcgttgtcagtcactgagccgtgcctcaa

SEQ ID NO: 714516 - DNA, 171 bp, Homo sapiens
gggtgtcatgaagggtacagctcctaagaaccccacataccaccctccatttgtcaagctcctctggttacgatcgatggccttgtcgtcactcacaccggaccccctcagagggagagatgagcttgtctaggcgaccatttcctcccatgaagcttctgatttataccg

SEQ ID NO: 714517 - DNA, 395 bp, Homo sapiens
  misc_feature (191)..(191): n is a, c, g, or t
tcaccatataaacctggtaaaatcaatgcagaattacagtgatcatgtaaatgattacagcaagtcacacaactaatctaattgaagtgtgcttattttactcaaaaggacttgttatatggcagacaagccaagttttaccacataaatatattaaagttcggtgttgttaatgaatccccgctttaaanccgcaacaaaggtaaggaagcatatagtgctgatatgtaacatctcagaatggttacatttaaaaacaaggagtagttgcctgacaacagtaccattattggaacaaagtaatcacttatgtaagattatctagatatataacaaagcttgcagtagaaagaagcgattcaaccttgtaacaaacatttcaaggtagctcgtgc

SEQ ID NO: 714518 - DNA, 669 bp, Homo sapiens
  misc_feature (16)..(16): n is a, c, g, or t
  misc_feature (25)..(25): n is a, c, g, or t
tggaccatccaggccntattagccncggctatgcgcctgtattggattgccaacccggctcacattgcatgcacagtttgctgagctgaaggaaaagattgatcgcccttctggtcaaaagctgggagatggcccttcaattcttgaagtctggtgatgctcgcccttgttgatatggttcctggccagcccatgtgtgttgagagcttctccagactatccccctttgggtcgctttgctgttcgtgatatgagaccagaccgttgcggtgggtgtcatccaagccgtggaccagaaggctgctggagctggccaggtccacccagtctgccccagaaagctcaagaaggctaaatgaaatattatcccttatacctgccccacccccctcttaatccagtggtggaagaacggtctccagaacatgtttgtttccattggcccatttaagtttagtagtaaaagactggttaatgataaccattagccatcgttaaaccttccagaaggaaaggagaatgttttgtggacccctttggttttcttttttgcgtgtggccagattttaagattattagtttttaaaatccagtactttttaatggaaaccacttgacccaaaatttgtcaccagaattttgagaccccatttaaaaagttaaatgaga

SEQ ID NO: 714519 - DNA, 86 bp, Homo sapiens
tatctacgcggatgagggttgttttcgcttttttcagctgtttttagcaactgaactggaaacaagaagcaggggcctttttcaga

SEQ ID NO: 714520 - DNA, 213 bp, Homo sapiens
aactagcataccacaaatatgtacccccgccgtactccaagccatagtagatatgtgctccggatccatcatccacaaggcttaacaatgaacaagatatacgaaaaataggaggactactcaaaacatacctctcacttcaacctccctcaccataggcagactagcataagcaggaatacctttcctcacaggtatctactccaaagttca

SEQ ID NO: 714521 - DNA, 929 bp, Homo sapiens
  misc_feature (601)..(601): n is a, c, g, or t
cttgcctttccgtttggcggcaagccatcctagttaaccccagattggggggcataccacagtacatcccccggagctattggtggtaaggacccccttctgatgttccatgcgcgttttcttttgaggtggtgccccctgtctgcgcccgttgcccgccacgccttctgctggctcgtcacaccacggggctgtccccgcccccccacccccggccctcgatataaggcgtgcccccgcatctgtggcttacacaggcccacacgacacaggtttacccgttatataataatatagggattctctggttctcgccccgttggttggccccgaatatccgcgcccccgtttctctatacagagagtggcccacacttttctcgcgcacacagcgcctggtccacacatcacatgggtggttaacgccaccgcttaaaagttttgctcgcaaaagaccctctcacagttccgcttgccacagaaggaggccgaaagctttggagcgccgccactcgtgggggctctctctaggaagtgcctcgagattgtctctaactcgggtttggtggagaagagttgccacacactgccacaaattttnttgaaggttaatcctcacttgagtccctctccactataaggctattcacgagagagaaatcctgacacaccccgctggagtcaccccacaacccgttccaccacacgcaccacgggaagaatgcgctgggctgacaatctgcacggccgaaagagccgctggcccttggaaaagggccacccaagttccacccaccacactaattggtggctctcgccgggcacgcttggagaaaggcgccataactctccacgctccacccgttatccgctaatataagtataagtttgttaaattcatacttaataccccctttaggaccagtcca

SEQ ID NO: 714522 - DNA, 1475 bp, Homo sapiens
gggaacagggtgagcagaggatgtgtgcagggccttggaggaagggggccgagaccgggcctaacgtctggtaacagatagctgtgagggatcgtgaaggccagacctagtcggtagtccggccgtggggaagaatgaacggagaccagaattgcgagatgtttcatgcaccgaagaagaagcaggatgttcggtgtcagcaagttcgtcctcagatcgttagggtgctgacatgaggatgaggatggggcaccgcagaagataagagacgaggctaatggtccaggcatcgaacggacggtcgcgtggcaagtgacaactgtcgctactcggcatggcatacgttagtacatccagtggaggtatacgaccgtgtcgggtcacgtaggcgagttccctgggagagtctggatgggactgcataggaaacactgggatgactggatagatcatcgcaggacggaggcccttgggatcttggtgaagactgggatggctagtgggaaacctgcgtggacaaggagacaagtgccatggcctgggccgtgcaaggaatggaagcacttccattgggcatttccaattcaccctataacactcgggcacgtgagggcccaaccaagaaatcatggaccgtggggagtgattccatgcgaagaggtcccgtggtgccttgtgagggggtcccggggggaatggcaccaccctccaaacatggaattgacatgtacaacgcttcccttggggaaaagggaacaacttgggtgattgcggtgaaaaccccggcaaagctagaacccctaggaaaagacgctacttggagatatcgactgaccgggagagataaggactaagcacattacacctcaatttttaacccacctgttcggaaacgtacagttggaggttcccagaaacgcggcttcgagaatcaggcctggggcggattggaaacagctctactacccgaaaagttcgacgcggaggctaaggcacggccagtttggtggaggcgacacaacgtaaaccccactttggggaaaccacacttagccgcctctctggacacaacagagagccgcacacagcggtggaggtgggagaacatttgcgagccggagactgctgtttaatggcctacgaggagcaccatggcacaaccatcggaggaaactaccgtcagggcgggtcaacactaccagctaccgtgggtgtgggcgcacacagacgaggatgacgccaagaagggcacaccagaggggggtaagcaccactaatggctcccccatttcatatatagggcgatcacaccgcgtaacactataaggtggtggacacgacggcgcgaaaccgtggagtccacaaacctgggcgtccacaatgcggcaatagagcttgggaaaaaggcgaagccacgcgaaccgaagtgaaggacagggggcccccgcaacattggggcgcagacaaagaagaaa

SEQ ID NO: 714523 - DNA, 378 bp, Homo sapiens
ataaattatcattgacccagcataccattcttaggtgaacacccaaaagaactgaaaataggaactcgaacactatgtacaccaatgtttgctgcagcattattcacaataaccaaaaggtgaaagcaacctaagcgtccatcaacagaagaatggataaacaaaatgtgatgtatatataagtacaacagaatattattcagccataaaaaggaatgaagttctaggctgggtatggtggcacatgcctgtaatcccagcacgttgggaggctgaggcaagaggatcacttgaggcccggtgtcaagaccagcctgggtaacatagcgagattctgtctctagaaaaaaaaaaaatttttttggagatggagtctcc

SEQ ID NO: 714524 - DNA, 164 bp, Homo sapiens
gctcagttcctgatcgttgtcatggctggtttcctgttgtttacagcgtttgggaccagctcgatcacttgccctttctctcgccattactggtttgtgaggtgagcctggcgctcttctttgcgctgagctatagctacatattatggctttgtggcagctcc

SEQ ID NO: 714525 - DNA, 371 bp, Homo sapiens
tgctgaaacgctgtccagggcaaggttatgcttcacgtacccccacgagagtgttgagggagccacaaggtgataggagcgggctgaataaactcgaatcgttacattgctggccagacacttcttccgcttcattcatcagagtaggtgaatgagatacagtattgagcgggtgagacattggcatgggctgctcaccgagaatccttctaaactcaagcccttactcagtctgccttctaccttgtatcaaataaagcgttctcccgtgaaagggaaaaacctcttccccttttatgaaaaaggtcgcaactcgaaagccccaagcggcaactcgaaaggcccaagcggcaattcgaaagacccaagcg

SEQ ID NO: 714526 - DNA, 433 bp, Homo sapiens
agttcatcagggcccatcaaaatttcccaaatttaagtgttaggtggtattttacgggtgtggccccaagaacaatttcttctttcttcttgatgtggcccagggaaagccaaaagacgtggccaccctctgggttcaaaataaacatttacacgcctcatgtcacatatattagaaaaatgaaaagagactgaaaaattgtgccaggctactgtgcttgacacaggtacaacagaaaaaacaacacgcaaagcaagcagaaagaagcgcagaagaaggaaggaacaccataaagtataaggagacgcaattaatgaggctagaaaacaaatgtaataatgcagaaatcaacccaactaaaagccggttccttgaaaagagtgataaagccatttctggcaagaatgaccaaggacgagagaaaaaaaaaaaa

SEQ ID NO: 714527 - DNA, 431 bp, Homo sapiens
gctgctttaatttcctgcgatttcttcataaaacattgaatattcaatgctcattttgatgttggggttttgagaggtttaggggtgggggtttagcttgcttttcctggagttaatttctccatttgatgtgagattaatggtcctgtggatgcttgtgagtaatcagagtttactagagagaagcacagagctttacaagccagaagggctttctttgcctctatttactgtttcctgagaaatcaacaacaccatattgtggaaagccaattaccaccctatacaaggttaagcttttcatccaggacagcttaattgttgaggtaaatatatcattgagaacttctgtcttataagaccaaagcatttcggagcacctcatatagcatcagagacaaaagacctcaataaaattttaatgaatcaaa

SEQ ID NO: 714528 - DNA, 441 bp, Homo sapiens
cccatagcttcaacttgatctgacttgaccagtgatgacccacatctggttctacacgccgctgctcctgtatgtcacacttgttgccaaggaccacgatgatgacctccttcttgttccttgggatttgtcactctccttcttgaacagctccacacgctgaaaagactctctgctatctgtgctatagaccaggacgtagccatcagtgcaagagaagcagtgtcggggcagttcggccccatctcggagcccccgggtgtcatagaaacgcacctgctctcgcacgccccggtctgtctcaatggagcccacgtagatatcctcctgcgtctcgatcatttccgaacccactacatggttcccatacagaagctgctccaggattgaagtttagcccacagacgcctggccaaacacgaacaccttgcagctcttcca

SEQ ID NO: 714529 - DNA, 933 bp, Homo sapiens
ggctgggctcgtgcgcgccaggagcgtgtctctgtgcactgacagaggccaccgtgcagtacgcagccagtgcgtgtgggtactcagcgacttggaccatatagtggacattccacgctggagaccctggtggcctcgtatgaagccatatgaggacctggatgaaggaagtcgcatggagggcgatgggcacttctacgctatgagtctggagcagcataggtggtctgctctgctggagcgcacgcagtccacctgccaggcccgcgaggctgcccgccagcagctcctggacagggagctgaagaagaagccgccgctcacgggcgcacatgccccaaagcctgctgctgcccctgcaacggaggagagtgaggcagtggaagcaggagaccccccctgaggagctgcgcaagaacttcaccacctgacatgggtggctggaccagtgagtgcctgacagagcgtatccgtgggaaagatgcacacccaccaggatcgaagaatccacattccgagggcgccccgtctacacgacaagctcaccgggaggtgccctggggatcagcagctaagcgtggtctggtgcccgttgtgatcacccggggataacataagtacggggctacctaataaaggcaaggagaaagaagaacaacgaggaggaccaaaaggcgcgcccgagagaaagagaaggccacaggaagagaaaccaggcgagggccagaccagcatagaggcaagaaggcatgggaccaaaagcggcacaccgggagcacagggcacgcaaggctaaccgagaggaataaattcgcgaaaaaggaccagcgaccaacgacaagaggacgggaggcggataataaataggggagaaggggaaacaaaggccaaccgaaagcaaacagagaaacccacaaaaatgaaccccccggt

SEQ ID NO: 714530 - DNA, 390 bp, Homo sapiens
ccctcggaggaaggatacaattatgtcttctgaggaagcagccaatggaaagaaagcccactggggaaagcttggaaccagtggaaaagtaagaagcttaagcgcctctttgggggcactaactcacctgacagctttgcatttgagggacaatttcctggcccgaattccttctgaaattgacaagcttcacaatttgggggatttggaccccgcgtctaataaaaaatctagcttaccccccgaactcgggaaactgggggtactcctggagcttctttaaaataacaacctggtgcgaggcctaccttttgggctgggaaaaactgttcagttgcagactttaagcctgaaaggaaaaccccttacccacgatatattgaaccttta

SEQ ID NO: 714531 - DNA, 664 bp, Homo sapiens
agaaaaaacaatgattaaatgagttctttctttaaactccatccaattgtggcgggtgatctcgattcctgtgaacaacaggatttaagtgttccccccggcacagaaataaatgctgtcttgctggtagtgatcccaatcgcgatggtcttttccataactaaaagaagaatagggtttttgtcctggaatcactttttttgtaacattctccctaatgccggtctttatgatgatcatggtattgagttaagtgtctataaaagaaataactgtccctgctgctatcatcgtgatttgaattctcttttagtctccccacatttggatttctaatcacgtaaggattccagttgctgttttgatcactgtttaaatgagactccgctcgtttttgaatagcatgcttatataatttatgaaattttcttgcatcaaattcagtcatctaagatacaacaatccacaggttttttctgcattgcttaatttgttcaggatttgtatactctcttaaacattatgtgatatggtccacaatttttattaaacattgtctagtatgctctagttgttctctttgtgaaaggcctttgcaggcctatcaagttgtttcaaaactgctttaacagtcgtcattctttctttacaaatgctgaatgtc

SEQ ID NO: 714532 - DNA, 386 bp, Homo sapiens
  misc_feature (10)..(10): n is a, c, g, or t
  misc_feature (75)..(75): n is a, c, g, or t
  misc_feature (375)..(375): n is a, c, g, or t
ttcctgcccnaagtcctcaaccagacaagaggctgcaggcaccaaatctatggagctggataatagaaaaagacncaaaagctcacctaacagactacatgaagcttcaacagctagtttgtaccagtgagtcagcattaaatccaccagaaaagaacagcaccacccaaagactggggggcagctgggcctgaagctgtagggtaaatcagaggcaggcttctgaatgatgagagtactgagacaataggccacataaacgtggctggatggaacctcacaataaggtggtcacctcttgtttgtttaggggtgcaaggataaggcagctcagttatatgagagaagcagaacaatagtcttcagagaaatggntgcatcagagt

SEQ ID NO: 714533 - DNA, 468 bp, Homo sapiens
ggtcggtgttatctgatgccacagatgggggagcttctgagccaggagaagaagttcacgaggtaatgtcatcagttaaggcaagaaccactcattttcacttcttttgtgattcttcagttacttcaggccatctggatgtgtatgtgcaggcttgggctcagaggcctgacaattacctcccgaaggccccacttccttctttttcattttctttcttttttttttttggaggcaggggtcttgctctgtctcccaggctggagtacagcagcacgattgcagctcactgtagtctgcatttcccagagtcaagccatccttaccttagctttctgagtagctgaggcaacagacaaacaacattacccagctacttttttggtttttaagagacagagtctcactattttgcccagaggctggtcttgaactcctggcctgaagcaatactcctgctgaagcctc

SEQ ID NO: 714534 - DNA, 408 bp, Homo sapiens
ttgacaaatgcgagtttgcaaattgcgcgatgaggcgatattacacgttattcgttactatacgcgcgaacgcaggggtgcgcgaattaaaagcgggcatttggcgtccctttagccgcaaagcgggtcgtttgatccgtgtcagaagagaaaaaacgcgtcgtcgtgacgggaaaaaattagaagagttttaggaacacgaaaatatccgctacgggccagcggaattgccagaaccagttaggggtggcgacaggactggcataataccccatttgggtggggaatacactctcgattgaggtgttgttcatcgctggggaaaggaaaattggttcttactggaaaatataggggacgttatgaaagagtcggcgcaggcggcatttagttatgttcgttccattt

SEQ ID NO: 714535 - DNA, 89 bp, Homo sapiens
cctcgcgtccctaggcggcggcgggcgggcgtcccgggatggccttcatggagaagccgccaggccggcaaggtgctgctggacgacac

SEQ ID NO: 714536 - DNA, 211 bp, Homo sapiens
gttgctcagtcaaaacacttgcgtagtataaatcagtagagaacctactgaatcatgcagaaagaaaatgctgattcccttacaacacagatacactctcctttcttcaaggattaccaagagggctgagaagctgcttctaatgtcagataaactaacattttattgggaagcttctccatctttccctgaatgcaccaacacagacaga

SEQ ID NO: 714537 - DNA, 343 bp, Homo sapiens
ccggttacggtcgggctggccatggcgctgagcgtgtccacctgaggccctgcgcgctagctgtccatctcctccatctggcgatgatgcgcaccgccgaggacaaccgcagccacagcgcccacttctttgagtttctcaccaaggagctagccctgggccaggaccggatacttatccgctttttccccttggagtcctggccagattggcaagatagggacggtcatgacttttttatgattgggcacggagggatccaggacatctgtgaactggctgcttcttccagagagatctcttggcagagtgagggcctggagataaccagctttggattatc

SEQ ID NO: 714538 - DNA, 745 bp, Homo sapiens
taaaaagtctatattttatatgggggggagggattaaaaaacaagcccctataggggccctattcaggtggcagcttctagtgtcccataggattaagggaacgactctgaggaaataaaatggttgtctggcgacacaaatccaggctgtacttcgctttgtcatgtcgtgatcggagtagaagggatcgaccgtgcaacctgtcgaacgtgcccctctcaatacccatcaatatgtgcctcaaaacagctagtgctccaggcagaacccctgtggggagagggaacaaacacgcgcccacattcacaatctccgtgcatagcaactggcgaagtgagatcagacacgcgaccaccgaccgaaggaaaacagagacaacagacacacagccaagagaaacacgcgaacagcgccacaggcacagtgatcgcgccagaaaagtggccagaggccggtgcagaccgatacccgcgtgaacgccaaggtcgcgtgaaacacccaaagctaccgggggaaacgtccgggaacatccacccgaaggcccagaccacaaacaaagaaaccgcacgtgcgaagaaagaaagcgaagacccccttagaggcaacaccctaacccctcatagagaaaggtgaacagagggaagaaacaccaaagaaaaaatacacgaaatatggatatcagagagccccaacaggaacccacgcaaggcagactgcgccgtcaacaaggaagtagtcctcaca

SEQ ID NO: 714539 - DNA, 410 bp, Homo sapiens
tctctacaggatccccccacagtcttctccgtcccgcaactcgtgccacagcttctcggtcgccactagacttctccaagacagccgggaccatagacatgaaccaccatgcccggccaatctttgtgcctccagcagaaacggggttccgccactttggccaggtcggtcccgaacacccgaccccaggcgatctcatccgaccctggcctcccacagtgctgagatcgcacagacgtcagccactgtgcccgacccgctcccatggtcttgagtcttggcccccacgaatttgttttcggtgagacagagtctagctctgctccccaggctggagtgccgtggcgtgatcatcgctcattgtagcctccaattcctgggcccaagctatcttctctcctcggcctccc

SEQ ID NO: 714540 - DNA, 198 bp, Homo sapiens
atagtaatcgcggcgctcgactagtttacatagcatttacattgtattaggtattataagtaatctagagatgatttaaagtatacaggaggatgtgcataggttatatgcaaatactacgctatttttagctgaggacttgggcatccatgtatgttggcatctgcaggggatcctggaaccaatccccctatagat

SEQ ID NO: 714541 - DNA, 472 bp, Homo sapiens
atactgagatagcacccagtagctccagacttatatcctattgattcaactatccacagagagcagctccagcaaaaacccagggatttgctgtgattggtctggactgagtcatgcatccatcctcaagctaatcactgaggcttgggtgatagacgatatagattcaccaggcctggagctgagggatgagaatgaatcccatatgaagcatgtggcctgagcaggaagatgaggaaattcagctgctgttaccaaaagaaaggacaggataaaactacagatgtccctctgcgagattttagccctgcctcaggtatgtgaccctgcacaaattatttctcctctccagtctttgagttccctacctgtaagattctgacttcaaactcaattgctgattttgataccttttgtagcagaaaacttttttacttttcaataaacaatacacggaacccaaaacataaaa

SEQ ID NO: 714542 - DNA, 176 bp, Homo sapiens
ttatcgttgctagctagaacaccacctataaaagacttgcaggctaatgtgcattgtcatatactgtacactgacacatactattacagtctcgtatgttatagactacaaaatcagttagatggtaaaagtataggtagtgagcttaatgttatcgttcagtaatacgcctatca

SEQ ID NO: 714543 - DNA, 441 bp, Homo sapiens
ttttagcacttacccaatgtcatccgcctcactgggcaaaccccctaacggggtctccagctacctcctacaggtgtgtttgggccagcaacaagttcattcatacctccctagggcaaagcttccaaagggagcagtaggctgccaacttttctgtttcacagccttcactgatgataactccaggtactggaaaatctgaggctactagagactgaagtgggccctgggcatactgcaacagccctatggaaaagtggccagactgttacctgggttcccattcctgtatcttctcactaggcaagtcttgcaggcctgggcctctacctaacccccctgtcagatgctcagagcaggtacctgaaccattccttcttgactgtcacgatcttgagaactctatccaggggagaatgtgaatctctgtcagctctagaa

SEQ ID NO: 714544 - DNA, 153 bp, Homo sapiens
gagtctcagatctgtacgtatctgtaaatagcataaaatggattcaagaccctattatggtactgttaatatttaaggtctattaaaacagactaaattccacaatcctataataggtaaatgggcatatttgcccgaggaaaaaaatccaga

SEQ ID NO: 714545 - DNA, 89 bp, Homo sapiens
attcttgtaaccatcagagggcaccaccaaaaactttgagaagtctatgatgaacttgcaaactaagatgatgccaagaaacaaaaaaa

SEQ ID NO: 714546 - DNA, 423 bp, Homo sapiens
atgttagaaaaaaaaaaaaaaaacccccctcttggggacttgaaaccagccggcaatcatgcggggtccacacgtggtgtgtttcttggaaacaactgggcctgggatggggcttcactgctgtaacttcctcctgccaggggatttggggctttcttgaaaaacagtccaacccctggaaaatgcttaactttctgtgttgaaccactgttggttttttggttagtgactgatgaaaaacggttttcttggggggaggttaaagaggctaacttcagaggggacttgttttttttcttttaaaagaggcaaggtggggctggtgcccacagctttaatcccagcactttgaggttggctgggagttcaagaccagcctggccaacatgtcagaactactaaaaataaagaaatccgccctga

SEQ ID NO: 714547 - DNA, 420 bp, Homo sapiens
tcgcctagcatccatcgggtgtaccatacccttctggccactccataagataaccacttccattccactcggaatgagggataccatgccattccattccatatcattccgttgcaatccattccaatctattccattccattccattccactcgagttgatttcattccattcctttccattccattcctttccactgcgagttgattccattccattccattccattgcattccattccatgcctttccactcgggttgattccattcctttgcattccattccattccattccattccattccattccattccatttcattccgttgcattccattccattacattcggattgattctattcaactcccttactctccattccattccattccattcgggtagtaacataccattac

SEQ ID NO: 714548 - DNA, 119 bp, Homo sapiens
caggacgcgggggccgcaccggccggaagaccacaaacccaaaccaaaagaacaacacacaaaaacaacacaaccaacacacacaaacaacccaaacacccgcagcagcacccacacaa

SEQ ID NO: 714549 - DNA, 316 bp, Homo sapiens
atacagaaaatgagggacaaaggtacacaggatattaaacaactgcactggattgagttctattatgctaaagaataaacaacattactcgatgggttccaatagaagaatacattttatcgatagaggtttcatttatcagaagtggtctgcttattcgtaagtggcaaaatgtataatctgtatcaatgtgacctgtatgaattaagttcccgtttattaccaatgagactgtaggtttcaacatgagttctatatgattttataaataaacttaaagtatgtattaatcactcttccagcatagcaggcagga

SEQ ID NO: 714550 - DNA, 296 bp, Homo sapiens
cactccaagtctctggccgtgcagattgaagtgcaggttgtcctccatataccaggtacgaccccctcttcagaatacagggcaccaagtccacagacaagctgaacaactaaaaacgcaaaccagtcactccagcagcccgcctctaaaccaggcttccacgcacccccaagtgcagccatgccaccgcagagacacattacttccactggcatgacagtgtataatgtattactaatacggacaacatctaggatagtatccagccaggaaatacatcctgagttcaacaaacc

SEQ ID NO: 714551 - DNA, 211 bp, Homo sapiens
tagcagtccaaactctccctgtgactaacatctgtcaggcagctgacgaatagctattcacgcttgttgagtgggcaaagagaatccacatttttcctccttgcctctggattatcaggtcattttgctgcgggcaggtcagtgatcttggatccctttgacttcttgacattttacccctctttgactccccgatgcgccacccccagag

SEQ ID NO: 714552 - DNA, 479 bp, Homo sapiens
tggattacatgtcccagaaatataaccaactgctcaattaccagaagactttaaaataaataagatccaacaactttttatcttttaatccagtcctcaaattcacaaatttaaaaaggggttggggaaatgacacaaatcattaacgaattattccaaatataaataactttagttaaaaacattcttaaaatttagttaaaaacattatttaaaaaacatcttaggccaggagcagtggctcatgcctgtaattccagcacttcgggaggccaaggcaggcggatcacctgaggccaggagttcaagaccagcttgggcaacatagtgagacccccgtctctacaaaaaaacaaaaacagttagtcagacatcgtggtgctcccctatagtccagctactcaggaggctgaggcaggaggattgcttgtgcccgggagttcaaggctgcagtgagctatgcttgcaccactgcactc

SEQ ID NO: 714553 - DNA, 512 bp, Homo sapiens
aatatgggcatttacctcagctggacacaggtacccagtttctgaccccacaagccaagtaccatgccaaggaaagatattgatgcttagtattaattgaaataaacttgaaattaatatagttagttaacttagtttgtctcaaaaaaaatatggacataggacaaaatgctcagaacttaatacaaatcttcttgcttatattcctaacagacatcccttaaaaagtagttggaatgtacccaagtagaggtgagacaagggcactttggaaactcgcatatgacttgtattcctgtccttctaaatataaattgggacgaatagaagtaaatatgttgatgggtgaaaaagaatcccaggtatgtaattaacacatacctatttttcgtactgagtctgtaatttttctctgagtactcttaatctgtgcgattttactgtcgggctcgtgacatttgagggtctaagattgtaattaaattctgcagagccgtctaatgctcaggttg

SEQ ID NO: 714554 - DNA, 376 bp, Homo sapiens
  misc_feature (202)..(202): n is a, c, g, or t
aaggactctgtgggcaataaaatattattcaaaaaaggaagtgaaagcataatgcattgcttggcttggcactggacatatatgccaagtataataacaaacactgaatacccacttttgaaaaaatacataatttacttatactggagtaatggaggaccgaaaatggagaggctgtatggtcatcattagggctgttcangaatattccagagcatcttttcccaggcacattgtagggttgtacttccaggcctcttttcagattaagtatagtcgtgttgcttgctttgacccatataatgtgagttcaatttatttttttcataccagggaagaagttttgagatgcagccgtctataaattctttgtttg

SEQ ID NO: 714555 - DNA, 201 bp, Homo sapiens
atcaaattagtgacgcgcatgaatcggatgacacgagattcccactgtcccgtacctaactatcgcagcgaaaaccacgagccaagggacacggcgcttggccggaatcagcgcggggaaagaagaccctgttgacgcttgactctaggtctgggcacggtgaacgagacatgagcaggtgtaaggggtaccgaagctcga

SEQ ID NO: 714556 - DNA, 714 bp, Homo sapiens
tcagatgggtcgttctaccggtcagcaggcgctcctcatcgacaatcgggtcgcgtgagtgctcggcatgaccagcgcctggcggttgctgatctcaatgggcagcgtcgaatcgcgccccggcttgaccagcaagcgtgcggtggattcgtatttggctggtagtaaaaaggcccccagcagaatgatcaccagcgccgcgatggccgccagcttgaactcgtgccggaagatgaagaacaggcgcagaagatcgcgaaaagaacggatctcgatcatgggatgtcgctcctttagttactgccgccgctggttcgggtgtagttgtagccaaccccgatcgacttggtgaatgggatcaactggttcaagtaggtatctacgccctggatgcgctcgcccacgttggatttgggcacgaacaccacatctccccgctgcagcggcacttgtttacgcccgttggggccggtcttgaggtattggctgaagtccaggaagtaagcgcggtaggtgccttgggtatcttcgcgcaacagtgcaaccatgctggcgttgcctgcagggttcaccccgccggcgccgacgatggcttgttccagggtgttggccgaggcgatcggcaccgtggtcgggttgtttaccgcaccgccgacgatgatcgagttgcccggtgcctggttgatgtcaccgtcacccgtggctccgataaac

SEQ ID NO: 714557 - DNA, 991 bp, Homo sapiens
taattcaatctggaatcaaaaagcgggggattctggcaaatggtccttttgtgcccttccccaactcatccctgtggttctggttccccgtgttgtgcccatagcccttttacccgtggagcaccaccccaacgagacgtggggcaccagcccccttcgccgtgccgtggtgtctcttcccacaaacccctttataaatgtgggagaggagaaagaggagagaaggggggagggggacctgtgcccccttccttcaggcattctgggaggggccctgtgcccccatgtgggctttaaccctttcccgtgggggctcttcttcccgcgaacacatttgtgttaaaatctcaaagccgtgaattaaacattacaagttttacatattgaaaaaccaaaaaaagaaaacaaaaaaaaaaacaaaaaaaaaaaaaaaaaaaaaaaaaaaagggggggcacaaaaaaaaatacccagagagggacaaccaaaaaaaagacaaacacgaatacagagaaaagagggccccaaaaagaagcacaaaataaaaacaaaacagagaccagcgcaaaacacaagagaagaaaggaaaaaacacaagcaaagagaaaaacagaacaaaaaaaaccacacaaaaagagcggggaaagaacaaatggcgacaaaaaacaccaagaaaaataaacccccaaaagagaatataaaatacaagaggatataaacgtgtaacaaaagagcggcacatgtacgcgatgagaataaaatatgcaacacggaatacagtgtacaaccattttaccgaagggacgtagaaaaccaaaaaattataatgaatcagaaacaaaaaaagaaaaataaaagaagaaaaggaacaaatggtcacaaaaaaggcacacacagcaacatacaaatggataagaaaaaaatgaccgagcaagagacgaaaaaaaacaggacagcagacaacaaaacaaaaccaaagaacacaggacaggg

SEQ ID NO: 714558 - DNA, 553 bp, Homo sapiens
ggaacattttgtctggcctagaagccagggtattatctgcacaggcccgatttgctattgaacatgatgtccagtgtggagatgcgagatggctctctatgtagaggacgtcattcacttattgcaaacaaataatggctcccaatggcacacaatgtattgctatggattgctgcataaggcgaagaatgtcttactcattgagatgtttgcaaaggcagcactgagagctacgggatttctgctggctgactcaacaatgcattcagagagaccatgagacacatatgtaggctatgctcagtaaagtatacactcttgcctcactgtcttaacacttacccatctatcatgaagcatgagctcttggtcccaccatttaactgacgaaatgacttagagtgaaccatgctcctataacatgttcctgcacttgcaacccaataaacttcccactagatttagaacttgctgaatttccacatcttaacatattttagtagaatgtagctcatgtctcatatttagaacaactcgggacttggacttcttc

SEQ ID NO: 714559 - DNA, 287 bp, Homo sapiens
ctagcggccgcccgggcaggtaccaatctactgacttattcttatttcacactgctgatgaacacatacccaatactagtaagaaaaagaggtttacttgaacttacagtttcacatggctggcaaggccttataatcatggcaggtggtgaaaggcagttcttacatggatgtggccagagaaaaggaggaggaagcatgaagcagaaacacctgtgtaaacccatcacatctcatgatacttatttactatcacgagaatagcatgggaaagactggcccccatg

SEQ ID NO: 714560 - DNA, 151 bp, Homo sapiens
tgagccgtccccatcacttgtacagctccattgaagaagcttcagagtgtatctattgatgacggtgactacgcttctgcgttctggctcgggagctgatgaggatgttgagagtccatagctgacaactactcgaacacttccaaagata

SEQ ID NO: 714561 - DNA, 240 bp, Homo sapiens
agacaggtcacaggtgatagagcaaagcatcaaagaatctttaagggaggtttacaaaaaaagacaaaaaaaaaagatgggttgccccggccttggtgatcctggttccagatgggtccacatggtgattatagggtgatgtcactcacctaaacacccagaggcgggcattgaggctaacctccaacacagggcttctcagatgcctcatgtaggcttctgtttgtcgctcgggtccct

SEQ ID NO: 714562 - DNA, 777 bp, Homo sapiens
tatcaaatgcactgcaagatggttttagctggagattctgcatatcaatataattattctgagtcagttgaaattagaacaagaaagcatacagtggtccaccggatggacaggattcacaagtcattgtgatgcgtcgtttttgcttctgtgtgtcagacagacataagtctatgatttaaattcgttacacaagagtgtagtgcaaagatatagaagatgttgcttgaacaatgatagtccttaggaagagtcaaactttgtacattgtaaatgttgtctagagtatactgtatgccaagcagagtgtacgttgtccgatgcaaagatcttcatgtatgtaagtgtggaacgattcaaaggattgcaagatagtaaaatgatctctggtgattttgaaaccatggagtaatattgtctttgtccatattcatgattacgaatttgaagaaattttgtcagtttgatattgtgagtgagtgggtgaatgtgcacgtctacagtgttatacatttagtcacctaactctagtcaacttcttgggcatatgctcctggaagacattcgaagatcatggcagcttttagataaaaacatcttctattattttgcgtgcaaggttgttactgtgttcacagaggtggcagtcatgagaccatagaggaaacagctgcctttagtgtctacataccggctgtgatatagatgggcatttatcctgtgaagcatgacatttgaagtatttacccttgtaatgctcatctggtattatgtgac

SEQ ID NO: 714563 - DNA, 193 bp, Homo sapiens
cgacgggaacttgtacaggcaggcatgcacctgcagtggtgaatacacgatctgaccaggctccaggttaacaatattgtggaggtcaacacggtgctcactgtgtctgacggaacttgtccagtgaaggcatgcaccgcagtggtgaatacacgtctgacctggaagcatgcatgcatgctcgggtactgga

SEQ ID NO: 714564 - DNA, 417 bp, Homo sapiens
acgtctgtgtcgactataaaatatccctcgaaagtactgagcaatgctctactgtcgacttacgattacgaatctaagtaaatatttcataatactatacagactgtctaccaaacttagtgaaacggaacctagtgagtgtctggacttggaaaaccctgggcggagtagaatggtcacatttgtccccacggtgtctgacctagagtgctctggatcctggaagcctcgacttcaggtaaataaccaccgcctcttgagggtgcagaagaacgccctttaaggccagttggggccatgagaacccaaaggtaaaacaactggtttatagttaggcagcatgccaacagaggttttgaagtttataattagtatttttaagaacaactgctctccgccactgagatataaacttca

SEQ ID NO: 714565 - DNA, 146 bp, Homo sapiens
gatcagccggtccgacaacagctgcacttgactgaaattgtttggagtactcagaatcatagtgaccactacttgagtagcagagtagaatcttgtcttcatagccattatctgtgacataagttggagggtttcttagcgatagt

SEQ ID NO: 714566 - DNA, 956 bp, Homo sapiens
  misc_feature (13)..(13): n is a, c, g, or t
  misc_feature (307)..(307): n is a, c, g, or t
  misc_feature (557)..(557): n is a, c, g, or t
  misc_feature (559)..(560): n is a, c, g, or t
  misc_feature (566)..(566): n is a, c, g, or t
  misc_feature (573)..(573): n is a, c, g, or t
  misc_feature (584)..(584): n is a, c, g, or t
  misc_feature (587)..(587): n is a, c, g, or t
  misc_feature (653)..(653): n is a, c, g, or t
  misc_feature (661)..(664): n is a, c, g, or t
  misc_feature (666)..(667): n is a, c, g, or t
  misc_feature (670)..(670): n is a, c, g, or t
  misc_feature (673)..(673): n is a, c, g, or t
  misc_feature (676)..(676): n is a, c, g, or t
  misc_feature (688)..(688): n is a, c, g, or t
  misc_feature (703)..(703): n is a, c, g, or t
  misc_feature (729)..(729): n is a, c, g, or t
  misc_feature (737)..(737): n is a, c, g, or t
  misc_feature (746)..(746): n is a, c, g, or t
ccgcgattcctgnccacgttttctcgcctccatagggctccacgtgtccccacgttttgtggcgtacgagctcacggtgctggtgttcctcaccttgtcagtgggtggtgatgaagtttctcctggcggcgctggtcctgtctctcattctgccgaggagcagccagtacatcaagtggatcgtctctgcggggcttgcccaggtcagcgagttttcctttgtcctggggagccgggcgcgaagagcgggcgtcatctctcgggaggtgtacctccttatactgagtgtgaccacgctcagcctctngctcgccccggtgctgtggagagctgcaatcacgaggtgtgtgcccagaccggagagacggtccagcctctgatggctcggagatgatggaccgtggaagggaagcgtctgtggggagtgagcgcttagatggccagcagctgctccttctgggaagctcgcaccttggcaacagaacagccctctagcagagcgtcagtgcagtcgtgttatcccggctttgccagaatattcttgccctattttagantnncccggngtggttnattggccgtcngtngattatgtgcagtagacccgggacactgcgttttcccgatcacctggaatggggcccccggcggcnccgggggnnnngnnccntgnaantattattaattntctattgtgaggtcntcagttcatagtttttttataaagangcaaaatnaaaaggctnttaaaaatgtacaacttcagaattataatctgttagtcaaatatttgttattaaacatttctgtaatatgaagttgtaatcctggccgtgagcttggaagcttacttttgattcttaaagcctatgttttctaaaatgagacaaatacggatgtctatttgccttttattgtaacttttaaatgaataatttcatgtcaatttctattag

SEQ ID NO: 714567 - DNA, 294 bp, Homo sapiens
  misc_feature (165)..(165): n is a, c, g, or t
  misc_feature (176)..(176): n is a, c, g, or t
cctgggattacaggcatgtgccaccacgccggctaatttgtatttttagtagagacggggtttgccatgtggccaggctggtctcgaactcttgacttcagatgatccatctgccttggcctcccacatgtgctgggattacaggcgtgagcaaccatgcccggnctctttctcanctttacacctgtcttcttatcctcacatctgtttccacccttcatccctgtcttcctcatgtcccacacttgtcttcccgatgttcatagctgcctttcttcacatttgggttcgcag

SEQ ID NO: 714568 - DNA, 328 bp, Homo sapiens
cgaggtctcactgtcacccaggctggagtgcagtggtgccatcatgactcactgcagccttgacctcccaggcgcacaaaatcctcctctcagcctgagtaactgggactacaggtgtgtaccactacatccagctaaaggagagcgttttttcctttttctttttgagacagagtctcactctggcgcctggtcactgtgcccttcaccttctgggttcaagtgattctcctgcctcagcctccctagtagctgggattacaggcatgcaacaccatacccagctaatttctgtatttttagtagagatggagtttcaccatgttgg

SEQ ID NO: 714569 - DNA, 208 bp, Homo sapiens
atactggctcggtcccccgactagcccgacagaatccggcaggcaagagaggcaatgcaagtgcttgagaagataagtcacacgcaacacaggtaggactgcagactatagacttacagacggtcacttggggactgggacggacacacggaccggtacggacacccatggacacttacccgacacttacactgacgttactggggac

SEQ ID NO: 714570 - DNA, 1154 bp, Homo sapiens
caaaaaaaaaaaaaaaaagtcatcctcctccaactacggatggacatatggatcatcagttcagaccctcactgggcatacaggatcccctaagaagggtcctaatttaaataagctggaggaagggagactttaaaagggacgtgtggtgagtgacataggatatagccataaaccacggtgccaggacctgacagcgtcccaatatcttttggcacgcatgggggaatcaaagggtgggcatggccaaggttcaactacagggctagaggtatccacattggtccacatcaggcaagccctggcactggacgggttggacgcctcatgggaagacggagcatggtgtcgggaaagaagatcccttggtaaactggtattaggtgggtggtactccttcaatggaattagagctcatggccccattttctgggcttggctggtgagattcacggcgatgggccaaacgaatacatcccctggagaagcctaccctatatggggcccccaagcctaagagccacccaactctcataactctgggtcggaatccccctcaaaggaaagggtccactgtcgcaataggacccggtacacgctcacaactcacgtcctccactatactaatcggcagtcaccattatatattgggtcgtaaaaccctcagagaacactcaggggtaagagcttttcccttggaccagttatacaggcacgcctgaaataccaagcccccacaacgctcgcccacagaaaaactgggatcgtccacagccacggcaacacggccgtgcgaaacaccccggaatggcccggataacccggacaacaaacagggatcaccgcaaacacggaaaacaaggatctggtagggcccaagcaccacccggtgtccaaaggaatttccagctcgaagtacataggcttaacaggcaaccctttaaactacaacaacaacaaaccatggcgagcaaaaaaaaaaacaaacgaacccggaacggaccaacccatcaacaaacccccgcgagaaaatgagaatacgatacgagaacacgttgaagagacctgaccatcaccaaagagagagcgcacaacagacccgtagcaccccacggaagcagaccacaaaagcgaaacacgagacaccacacccc

SEQ ID NO: 714571 - DNA, 107 bp, Homo sapiens
  misc_feature (17)..(17): n is a, c, g, or t
  misc_feature (29)..(29): n is a, c, g, or t
  misc_feature (33)..(33): n is a, c, g, or t
ttacggtcttaagcggnctaaatggcccngganggccctgggtggcgagaagatacattccatggtgaaggagaccaagaaccaggactggagccaggcgatattac

SEQ ID NO: 714572 - DNA, 197 bp, Homo sapiens
caaggacttatactcaggaggctgcggtggcctgatcagtaggtcagcagttcaagaccagcctgaccgatatgtgtgaaaccccacctctactaaaaatacaaaaattagctgagcatggtggcgttttcctgtggccccagctactcaggaggctgaggtgggaggatcactggaacccgggagcagagactgca

SEQ ID NO: 714573 - DNA, 124 bp, Homo sapiens
  misc_feature (71)..(71): n is a, c, g, or t
tcgagctcggccccaattattagaacaaaaaagtggtagagataactatattaaaaatctgttaggtattntctttaaaagtaggtgtttttttttttccttccctttttttcctaataactgg

SEQ ID NO: 714574 - DNA, 1048 bp, Homo sapiens
tcaaagcaatacactgaaaatgtttagaaaaaataaaaaagaaaaaaacaagaaaaaaaaaaaaaaaaaaaaaaaaaaaaaaaaaaaagaaggggggggtggggagtaatatattgtctctctgtgagaggtgcggcgaatgatgcctggagttatccaaggtatgttttttgatcaagaggggtggcctgaagagggaggcagtttctttaagctggcgaaggggtgagaggttggagtgtaaatgcttgaagagtggggagaacagctgtgttgcacccatgggaagatggcaggggtgaaaaaggagcaccactgtgtacacgtccgagggggggggagaccagatcgatgtggggctccagacgctaccaccttgagaacgaaacattttcaagggaccgacgacgggagagagaaaattagaaatttttatcacaggggtgtatataagggcggtgtgtgaactacaacaagaggcgtgatattggagtggggaaagcgcttgaagtaaaaatttggagcagaggcgggagagaatgaataatggtatagaagaattttattttattataacagtgggaaggttttgtgtttttcaaaaaaaaaaaggcccataacaacagttgaagaaaaatgggccaataagggccaaggattacgttaagcaagttgtcagagctgggagatggttcttcttcttttgttgccaaaagtggctaacaagttgtacaacaggccccctaaaggcaattgaaaggtgggcaaacaatcgggtttggagatttcagcaaaaaagtaacttttccaacagttaacagaaggtttaagttttttggccctggtggtctgggtgtccttgggacctgggctactattttccttggctggttccagttatggtcgtttcactggggtaagacaacaccaagacccaagaccagaacgcttcaacccaaagcaaacaggaacctacccaaaaaccttaacgttacagacagttttaacaagccatatggaccgacaagccaaacccacggaatagagc

SEQ ID NO: 714575 - DNA, 284 bp, Homo sapiens
cttgtgggatactgcctgggaccggtttccgtgacttctgaagagactgtcacttccctctcacgatcctgcggcgatttcaggcttactaactccccaactttctgagtctgggtgcactcgttctgtcacctttccgcgggtctcttgcgtcgcccttctgtgctcacgccactcatatattcttgatccggagttccaggagaatcgggatccattcttgtcgcatctttgtgggtccaacatgcacttgtcccgcaacttgtaacggcggggggtaccga

SEQ ID NO: 714576 - DNA, 467 bp, Homo sapiens
  misc_feature (103)..(103): n is a, c, g, or t
  misc_feature (109)..(109): n is a, c, g, or t
  misc_feature (271)..(271): n is a, c, g, or t
  misc_feature (290)..(290): n is a, c, g, or t
  misc_feature (296)..(296): n is a, c, g, or t
  misc_feature (413)..(413): n is a, c, g, or t
aacgggtgatgcggttgggcagaaccgcaccaagctcgtcgacagcaagattgtgtttcctcatggcatcacgctggacctggtcagccgccttgtctactgngcagangcctatctggactatattgaagtggtggactatgagggcaagggccgccagaccatcatccagggcatcctgattgagcacctgtacggcctgactgtgtttgagaattatctctatgccaccaactcggacaatgccaatgcccagcagaagacgagtgtnatccgtgtgaaccgctttnacagcnccgagtaccaggttgtcacccgggtggacaagggtggtgccctccacatctaccaccagaggcgtcagccccgagtgaggagccatgcctgtgaaaacgaccagtatgggaagccgngtggctgctctgacatctgcctgctgccaacagccacaaggcgcggacctgccg

SEQ ID NO: 714577 - DNA, 557 bp, Homo sapiens
ggagctcggtaccagtttcgacggagactctctgcaagtatcccccacagtgatatgttgtgagaagagaggcagtgttgcacaggatctaaatgcacacgctatgagtcagagagacatctgggttatgcagcgctctacccctatagctagtaatcgtctaaactaagtagcttaacctcactttcctcagttgtattagggggtgataacagtaccaacctcatagggctagtgtgatgcttgcatagactactaaagtggtacagtaaggacttagcatgtagtaagtgctcatacaaaatgttagctagcactgactactgctataataggcccattccaaagttaaaacagctccaactatcaggaaggtcaaaaccagctgtctgcttcctccctctcatgaatcctagtctgccctacagaatttcaccagtctctgagttgctgtcaacagggagggtggatggggccatggcccacctgagtctccttgttaccaagcagaacatgcccagcttcctcgacggttcctcaggtggcctccatgatca

SEQ ID NO: 714578 - DNA, 294 bp, Homo sapiens
  misc_feature (241)..(241): n is a, c, g, or t
  misc_feature (276)..(276): n is a, c, g, or t
  misc_feature (291)..(291): n is a, c, g, or t
gtaccaccagtgcaactgaaggaccagtttgggcaaccctctcccacgtcagcatggacgatcaaatagaaccatgtcacctggagtctggcagacatcacacctgccaacaacgccgggctgaaccgccacactactggaaacagcatttaccatccattgcgtcgtaaatatatggtagtaacgccgtaataaaatatagtaatcacaccaaggttgtagataatagtaatcaatccanaaaccgccatattccactgagacaatccattattncacggatcgacgtcncgc

SEQ ID NO: 714579 - DNA, 448 bp, Homo sapiens
  misc_feature (1)..(1): n is a, c, g, or t
ntgtttactgctgtttgactttccccttgacatttctcagaaaaatgcagggctgcagctgagagcagactgctgattggtgactctggtctgcctagcttttgcaactctttaagcttactgtgatcacgtgccctctcagtagggggcttttagagcagttgaaatctgcagaactgaacctctgagggccaaaataggacatttgggaacaactccttaacccatgaactagctgtaacatagtttgtggatccatgcactgatgctgtgaagcctgcccctgtgtgtatctgttctctcacctccctagcactgtaagcagcggtgcctcttgtagcatgtgtgtttgttttttaatgtttcatgactcccactttgattttacatgttttcttgtaaataagcctgccttcctacctggaatttgtgtgtgtgtgactaatac

SEQ ID NO: 714580 - DNA, 2580 bp, Homo sapiens
gctgagagacgacctggaagttctgaggcagcctttgtctggctggaacacgcattggcagcgggagctgtcggtaggacctgggacaccgcggaagtcgggaaatggcctcagtggctttagaggatgtggctgtgaacttcacccgagaagagtgggctttgctgggtccttgtcagaagaatctctacaaagatgtgatgcaggaaaccatcaggaacctggattgtgtagtaatgaaatggaaagaccagaacattgaagatcaatatagatatcccaggaaaaatctaagatgtcgtatgttagagagatttattgaaagtaaagatggaactcaatgtggagaaacatctagccagattcaagatagtattgtgaccaagaacactcttcctggagtaggtccttgtgaaagcagtatgagaggagaaaaagtcatgggtcattcatcccttaattgttacatcagagttggtgctgggcacaaaccacatgagtatcatgaatgtggagagaagccagatacgcataaacaacgtgggaaagccttcagttaccacaactcatttcaaacacatgagaggcttcacactggaaagaaaccatatgattgtaaagaatgtgggaagtccttcagttctttgggaaaccttcaaagacacatggcagtgcagcgtggagatggaccttataaatgtaagttgtgtgggaaagcgtttttttggcccagtttattacatatgcatgaaagaacgcacactggagagaaaccatatgaatgtaagcagtgttctaaagccttttctttttacagttcctatctaagacatgaaagaacacatactggggagaaaccgtatgaatgtaaacagtgttctaaagcctttcctttttacagttcctatctaagacatgaaagaacacatactggggagaaaccatataaatgtaagcagtgttctaaagccttccctgattccagttcttgtctaatacatgaaagaactcacactggagagaaaccctatacatgtaaacaatgtgggaaagccttcagtgtttccggttcccttcaaagacatgaaaccactcacagtgcagagaaaccctatgcatgtcagcaatgtgggaaagcgtttcatcatctgggaagctttcaaagacacatgataaggcacactggaaatggacctcataaatgtaagatatgtgggaaaggctttgattgtcctagttcactgcaaagtcatgaaagaactcacactggagagaaaccctatgaatgcaagcagtgtgggaaagcattatctcatcgctcaagctttcgaagtcatatgataatgcacactggagatggacctcataaatgcaaggtatgtgggaaagcctttgtttatcccagtgtatttcaaagacatgaaaggactcacactgcagagaaaccctataaatgtaaacaatgtggcaaagcctaccgtatttccagttcccttcgaaggcatgaaacaactcatactggagagaaaccctataaatgcacacttgggaaagcctttattgatttctgttcctttcaaaatcacaaaacaactcacactggagagaagccatatgagtgtaaggaatgtgggaaagcattcagtcgtttcagatacctttctcgacataaaaggactcacacaggagagaaaccttatgagtgtaaaacatgtaggaaagccttcggtcattatgataacttaaaggtacatgaaagaattcactctggagagaagccgtatgaatgtaaggaatgtgggaaagcattctcttggctcacttgctttctacgacatgaaagaattcacatgagagagaaatcctatgaatgtccacaatgtggtaaagccttcactcattcccgttttcttcaaggacatgaaaaaactcatactggagagaacccgtatgaatgtaaggaatgtgggaaagcatttgcttctctcagttccttgcatagacataaaaagactcactggaaaaaaactcacactggagagaacccatatgaatgtaaggaatgtgggaaagcatttgcttctctcagttccttgcatagacataaaaagactcactagcattctctctaaatgtatggaatgtgggaaagcatttattaattttatttcatttcagatacttgtacgaaacacattggagatagaccctgtgaatgtaagcacttggtaaagccttaagtagtttcagtttctttccagtacagtcatcccttgatacctgctgggtattggttccagcactccgtgagccatgtccagtcccttttataaaatgacatgtttgtatgtaacttacccacatcctcttgtatagtctcaattatgtctagattacttaaaatacctcatgcattataaaagctatgcaaatagttgttctattgtattgtttagggaatcatgataaggaaaagagtctatgtattttcagtatagatgcagtaattgtcagcctatcaacatagtgtagtcagccagaacattaaagtttctttgtttcaactcccaaaaaaaaaaa

SEQ ID NO: 714581 - DNA, 3601 bp, Homo sapiens
ggagacacaccgcggccgatgacaggcgcagagcaggacgtggtgaggtcctcatacctaggaatgcagaacaagggcaagaaactcggtgcccgcctggcatctgccctgcaccagtggcctccaggaagttctccaccaaggatgttccccaggcactctgtgctcgccttcaccagcgtcctgtgaggtctttcacactgatggggaagcctttctaaagggtattagggggctggggggctgggggtgctgagtaccaagggtcccaggaagagacaggccaggcttatgggctgggcatccagagatcgccctgacgccagctccaggtggagttaggagggcactcttgtcccgacgcatttacagaccactccctcttcttgttcccctcgactctgagagtgtggtggggtagctgtggaacctgactgcttgcctgaaggttgggcagcgtggctagaaattgcggcccagacctgggatctcacccacacctctatgagacgtcctgaaggaaaccatcgactgagcggagaggcttcgccttgcccgcctcctcccaggaaggaagagcggaagaggcgtcgccagccaccgagactgccagccaccaccccctcccagactctctgtccccaccccagaccagggtcaccttcttcctgcactgggggtggggtgcggtaggtttcgcaatccagactgtggggtgggggtgggagcaggtgtgtgtaaatgagcagctcgtcaggagtcactgagaaggaggcagatggagctggtacccagcaggtctcctctcataagcgtcaaccctcgcctgggcgggctgggggatcctcagcaccccagctctgagccaggggtctgcaacccgggcaccagcgatgggccctcatgcacacagggcgccgagcggggcgcggaggaagagtgacttcagacaggaacccgacgccacagccggtgacgcggaccctgggtcagccagcacgatgggccgctggggagaggagggctggaggcaaagagtgtaagtgtgcagccttcatcagcttaattttaatcgcgttatgtaagtggcttcatctcaacgtcacatgggggggggtctcagatttaattacaggatgacagcctttgcttttcaagcaagctgttctcctggcaagccaggcgaaggattggggagttttgctaaacagaaggagccctttctgaggtgaccacccgtcaaaacttgaacccgcttccacctccgtctccctcttcccgaccagcctcacccagcctcggctgaatgtggcctgagagtagccacttgtccgcaatcacagggacgttttatgcctgtcaagggagcttcctctctcctcttcctccccctcccaccttctgcctggcagctttgccttctctccaagagaagggtccacccaatcagaactcctcttccttttcattcctggattaaagcacttgtaatcagtaaccagaaagttccagagcgggagagaccggaaggcactggagtgctatcggacgggtgtctggggcagagccaggagggcgagcctcttctctccccgcctgcccttgctcacttccccctccatgccaggtgctgtgggagcagctgggcctggccggggtcggcgggtgaagctatccgcatggtgtctggagcaccgtttctttgcttcctggatgggctggatgggctcccgtgttcttcaccaatggcagcgttaccagcaccaatggcagcgttaccagcaagaaggcaaaggcaggagcacatcgagggtgggagccaggctgtggggtcaggagtcccgctccttgccgcgggaagcctggctcagccacctccagcacacttcggctttgtccagcataaaaggcagagcgacgttttcactgcaggctgtttcccaccagggcaagtgggacagggcgagtgctgacgtctgcaggcatggtgtgcatttaggggtgggcggcaccgagggggcatcatttggcataggcgggcccgggggccactgggctagatgactggctggttgctgggggcaggtgtcacagcctctctgagcaccctctaagtggaggacagaacattgttgggaggagtccaggcataaagtgacataaacagcgcagagaatgggaccagcgcacctgagaggtgatcattagcctcagcaactggatgggacattccgaagagctcccagccaacacagatggtcactccagaggctgacatttaaaaggaaggggcccggccgggcacagtggctcacgcctgtaatcacaacactttgggaggctgaggcgggcagatcaactggggtcaggagttcaaaaccagcctggccaacatggtgaaaccgcatctctgctgaaaatacaaaaaattagccaggcatggtggtgggcacctgtaatcccagctactcaggaggctgaggtaggaggatcgcttgaacccaggaagtagaggttgcagtgagccgagattgtgccattgcactccagcctgggcgacaagcgaaacttcgtctcaaaataaataaaagtaaggggcacagggagggggccccagctcgtgccccttctgtgtgggctgcacatggtgacttccttccagagagcacagagtgggaggtaggcaaggcgtctccacagtggagagcccgacccactgtctcagcccagaggtcaaggctggcaccatcaccgagaggtcacacgggcagatgtgacagggcgcttcaccactgggctcttcctcccagacccataacccttgtcttagtattagaaaaacactggcagaccgggcgcagtggcttacacctgtaatcgcagcattttgggaggccgaggtgggaagattgttcaagagcagtctgggcaacatagtgagaccccatctctacaaaaaaaatttttttttaattagccaggcgtgatggcacatgcctgtggtcctagccactagaggctgaggtgggaggatcactggagcccaggaggtcaaggctgcagtgagctgtgatcacaccactgcactccagccttggcgacaaaccaagaccctgtctcgaacagaaaagaaacattaaccttagcgcaaatcccaacaggggcgacactctacagaaaaaccgacagcctcctgaaaacttcccagtcctcaaacccacgaagtgggctgggcgcggtgggtcacacttaatccagactttggaaggctgagggggcagatcccaggtccggagttgagaccaggctagcacctggcggaactctctctttaattccaaaatatcggcggggaagggccgtgttccccatcggagggcgggaaattttggtccacagcggggtgtcgagcggacaatacccagatggcggggggagaagaagcgtgctgtgtaaaaaaaacacaacagggagggtgggtcagaggaggagcacaatcttctggcggcaaaaacagcaaggttaaacagacgcagtgtgcgtgtgtagttattcttttgtcgtcttcggtgcggtccgtctggttggtgtgtgggtatgg

SEQ ID NO: 714582 - DNA, 204 bp, Homo sapiens
gccaggctgtgtgtaaggtcttgaggatttagtaacgtactcaggtacaacatcaggtgaggtttgtcgggcacagaccagcgtagcagtgtcgggaaaggcaccttgtccactcctacgatacgctactataaagagaagacgaaatagtgacataatatattctattctcatactcttcctactcccgtcgcttgaccctgt

SEQ ID NO: 714583 - DNA, 434 bp, Homo sapiens
gcgtcagaccccatgtacaaataaaaaataagagacataaatgaatacaatgtaagatagtatctatcttcagggagtatcctgagacaattcaaggtgggcaaaatgaaacattcattgaaaagttttggtgaagaagaagttaaaatgatgacttagggttgtatgtcagatattttaataatgttggcagttcctagattctacagtctttctcaaaactaagaggtttatccctaaggcaattttcttctctttttttactaccaaaaatgtttattctatcggcaggtttccagtgactagaaaaatttccttctttacaactctgaaatcgtagctcaaatcattttctaacagagtgaaagtaaaaacattattagttgatgtcagcaccagcagaaaatctcttaaaactggacatttctttaaaa

SEQ ID NO: 714584 - DNA, 3574 bp, Homo sapiens
ggagacacaccgcggccgatgacaggcgcagagcaggacgtggtgaggtcctcatacctaggaatgcagaacaagggcaagaaactcggtgcccgcctggcatctgccctgcaccagtggcctccaggaagttctccaccaaggatgttccccaggcactctgtgctcgccttcaccagcgtcctgtgaggtctttcacactgatggggaagcctttctaaagggtattagggggctggggggctgggggtgctgagtaccaagggtcccaggaagagacaggccaggcttatgggctgggcatccagagatcgccctgacgccagctccaggtggagttaggagggcactcttgtcccgacgcatttacagaccactccctcttcttgttcccctcgactctgagagtgtggtggggtagctgtggaacctgactgcttgcctgaaggttgggcagcgtggctagaaattgcggcccagacctgggatctcacccacacctctatgagacgtcctgaaggaaaccatcgactgagcggagaggcttcgccttgcccgcctcctcccaggaaggaagagcggaagaggcgtcgccagccaccgagactgccagccaccaccccctcccagactctctgtccccaccccagaccagggtcaccttcttcctgcactgggggtggggtgcggtaggtttcgcaatccagactgtggggtgggggtgggagcaggtgtgtgtaaatgagcagctcgtcaggagtcactgagaaggaggcagatggagctggtacccagcaggtctcctctcataagcgtcaaccctcgcctgggcgggctgggggatcctcagcaccccagctctgagccaggggtctgcaacccgggcaccagcgatgggccctcatgcacacagggcgccgagcggggcgcggaggaagagtgacttcagacaggaacccgacgccacagccggtgacgcggaccctgggtcagccagcacgatgggccgctggggagaggagggctggaggcaaagagtgtaagtgtgcagccttcatcagcttaattttaatcgcgttatgtaagtggcttcatctcaacgtcacatgggggggggtctcagatttaattacaggatgacagcctttgcttttcaagcaagctgttctcctggcaagccaggcgaaggattggggagttttgctaaacagaaggagccctttctgaggtgaccacccgtcaaaacttgaacccgcttccacctccgtctccctcttcccgaccagcctcacccagcctcggctgaatgtggcctgagagtagccacttgtccgcaatcacagggacgttttatgcctgtcaagggagcttcctctctcctcttcctccccctcccaccttctgcctggcagctttgccttctctccaagagaagggtccacccaatcagaactcctcttccttttcattcctggattaaagcacttgtaatcagtaaccagaaagttccagagcgggagagaccggaaggcactggagtgctatcggacgggtgtctggggcagagccaggagggcgagcctcttctctccccgcctgcccttgctcacttccccctccatgccaggtgctgtgggagcagctgggcctggccggggtcggcgggtgaagctatccgcatggtgtctggagcaccgtttctttgcttcctggatgggctggatgggctcccgtgttcttcaccaatggcagcgttaccagcaccaatggcagcgttaccagcaagaaggcaaaggcaggagcacatcgagggtgggagccaggctgtggggtcaggagtcccgctccttgccgcgggaagcctggctcagccacctccagcacacttcggctttgtccagcataaaaggcagagcgacgttttcactgcaggctgtttcccaccagggcaagtgggacagggcgagtgctgacgtctgcaggcatggtgtgcatttaggggtgggcggcaccgagggggcatcatttggcataggcgggcccgggggccactgggctagatgactggctggttgctgggggcaggtgtcacagcctctctgagcaccctctaagtggaggacagaacattgttgggaggagtccaggcataaagtgacataaacagcgcagagaatgggaccagcgcacctgagaggtgatcattagcctcagcaactggatgggacattccgaagagctcccagccaacacagatggtcactccagaggctgacatttaaaaggaaggggcccggccgggcacagtggctcacgcctgtaatcacaacactttgggaggctgaggcgggcagatcaactggggtcaggagttcaaaaccagcctggccaacatggtgaaaccgcatctctgctgaaaatacaaaaaattagccaggcatggtggtgggcacctgtaatcccagctactcaggaggctgaggtaggaggatcgcttgaacccaggaagtagaggttgcagtgagccgagattgtgccattgcactccagcctgggcgacaagcgaaacttcgtctcaaaataaataaaagtaaggggcacagggagggggctgcacatggtgacttccttccagagagcacagagtgggaggtaggcaaggcgtctccacagtggagagcccgacccactgtctcagcccagaggtcaaggctggcaccatcaccgagaggtcacacgggcagatgtgacagggcgcttcaccactgggctcttcctcccagacccataacccttgtcttagtattagaaaaacactggcagaccgggcgcagtggcttacacctgtaatcgcagcattttgggaggccgaggtgggaagattgttcaagagcagtctgggcaacatagtgagaccccatctctacaaaaaaaatttttttttaattagccaggcgtgatggcacatgcctgtggtcctagccactagaggctgaggtgggaggatcactggagcccaggaggtcaaggctgcagtgagctgtgatcacaccactgcactccagccttggcgacaaaccaagaccctgtctcgaacagaaaagaaacattaaccttagcgcaaatcccaacaggggcgacactctacagaaaaaccgacagcctcctgaaaacttcccagtcctcaaacccacgaagtgggctgggcgcggtgggtcacacttaatccagactttggaaggctgagggggcagatcccaggtccggagttgagaccaggctagcacctggcggaactctctctttaattccaaaatatcggcggggaagggccgtgttccccatcggagggcgggaaattttggtccacagcggggtgtcgagcggacaatacccagatggcggggggagaagaagcgtgctgtgtaaaaaaaacacaacagggagggtgggtcagaggaggagcacaatcttctggcggcaaaaacagcaaggttaaacagacgcagtgtgcgtgtgtagttattcttttgtcgtcttcggtgcggtccgtctggttggtgtgtgggtatgg

SEQ ID NO: 714585 - DNA, 851 bp, Homo sapiens
  misc_feature (682)..(682): n is a, c, g, or t
tggaaactttaaaatccctcaaaaacggtttattatacaagtgagtttggagtcacgaggggcttatcggtaggatttctgggtagcgagcgcgggcaccagggcctccaaacttttgggactcgcagcgacgagggtcagctaccagcagggtccggtcatacgggatgaggatgtctttgatctccttctgggaagcctcatccacatatttctgggtaataggccaccggggcttgggagagtggactgacggatagcataaatcgtgggccacgtgaccaccacccttttacacggacacggttgtttacaccagcaaatcgcctccttgccgagaagcagaacgtggcctccagcagcttgtactggtagcgtggcgcgggctcaatcatctccgggggccgcccgttcaccttgatgagaccttggccgcgtttggcagtggcgccacagtgtgtcgctggtcttctggggtccgaagacctgcacagactgcagggggcccttgtgacggcttggtctccgagcgtggactagcgggggcacctgaaggagactggggggcccccgggtcgtgcctcctgggttgtgaggagtcgccgttgccgccattgcctgtgcttcatgaggaagatgctcgccgagcgtctcccgagtgctgtcggggcgctttctcaanagccggaaagcaagagtgcggggtaagcaccccgtaaatttggccaagtgatgcacacttggaccatgacgaatgtgtgaccttcaccgggttgaaaagaggccccctgtcaccaaagggctccacggggaggaggggcccaaacctacggtgatccgatcgtacccaa

SEQ ID NO: 714586 - DNA, 227 bp, Homo sapiens
tgggatcgacgggcagattcttgttcccagcccttggggctccgtgtatggggtgggggagctgcttagagactgtgcccgtcctcgtgcccccacaccgctgatgtgccagcaccaccatgcaccatgatccgtccgcctgccaacacctggcacttgagtgacactgcctggcctgggcctgcctcgtactcaacgttgtatacaagttgtcccctgtggtccct

SEQ ID NO: 714587 - DNA, 3009 bp, Homo sapiens
  misc_feature (2978)..(2978): n is a, c, g, or t
  misc_feature (2995)..(2995): n is a, c, g, or t
  misc_feature (3006)..(3006): n is a, c, g, or t
ggagacacaccgcggccgatgacaggcgcagagcaggacgtggtgaggtcctcatacctaggaatgcagaacaagggcaagaaactcggtgcccgcctggcatctgccctgcaccagtggcctccaggaagttctccaccaaggatgttccccaggcactctgtgctcgccttcaccagcgtcctgtgaggtctttcacactgatggggaagcctttctaaagggtattagggggctggggggctgggggtgctgagtaccaagggtcccaggaagagacaggccaggcttatgggctgggcatccagagatcgccctgacgccagctccaggtggagttaggagggcactcttgtcccgacgcatttacagaccactccctcttcttgttcccctcgactctgagagtgtggtggggtagctgtggaacctgactgcttgcctgaaggttgggcagcgtggctagaaattgcggcccagacctgggatctcacccacacctctatgagacgtcctgaaggaaaccatcgactgagcggagaggcttcgccttgcccgcctcctcccaggaaggaagagcggaagaggcgtcgccagccaccgagactgccagccaccaccccctcccagactctctgtccccaccccagaccagggtcaccttcttcctgcactgggggtggggtgcggtaggtttcgcaatccagactgtggggtgggggtgggagcaggtgtgtgtaaatgagcagctcgtcaggagtcactgagaaggaggcagatggagctggtacccagcaggtctcctctcataagcgtcaaccctcgcctgggcgggctgggggatcctcagcaccccagctctgagccaggggtctgcaacccgggcaccagcgatgggccctcatgcacacagggcgccgagcggggcgcggaggaagagtgacttcagacaggaacccgacgccacagccggtgacgcggaccctgggtcagccagcacgatgggccgctggggagaggagggctggaggcaaagagtgtaagtgtgcagccttcatcagcttaattttaatcgcgttatgtaagtggcttcatctcaacgtcacatgggggggggtctcagatttaattacaggatgacagcctttgcttttcaagcaagctgttctcctggcaagccaggcgaaggattggggagttttgctaaacagaaggagccctttctgaggtgaccacccgtcaaaacttgaacccgcttccacctccgtctccctcttcccgaccagcctcacccagcctcggctgaatgtggcctgagagtagccacttgtccgcaatcacagggacgttttatgcctgtcaagggagcttcctctctcctcttcctccccctcccaccttctgcctggcagctttgccttctctccaagagaagggtccacccaatcagaactcctcttccttttcattcctggattaaagcacttgtaatcagtaaccagaaagttccagagcgggagagaccggaaggcactggagtgctatcggacgggtgtctggggcagagccaggagggcgagcctcttctctccccgcctgcccttgctcacttccccctccatgccaggtgctgtgggagcagctgggcctggccggggtcggcgggtgaagctatccgcatggtgtctggagcaccgtttctttgcttcctggatgggctggatgggctcccgtgttcttcaccaatggcagcgttaccagcaccaatggcagcgttaccagcaagaaggcaaaggcaggagcacatcgagggtgggagccaggctgtggggtcaggagtcccgctccttgccgcgggaagcctggctcagccacctccagcacacttcggctttgtccagcataaaaggcagagcgacgttttcactgcaggctgtttcccaccagggcaagtgggacagggcgagtgctgacgtctgcaggcatggtgtgcatttaggggtgggcggcaccgagggggcatcatttggcataggcgggcccgggggccactgggctagatgactggctggttgctgggggcaggtgtcacagcctctctgagcaccctctaagtggaggacagaacattgttgggaggagtccaggcataaagtgacataaacagcgcagagaatgggaccagcgcacctgagaggtgatcattagcctcagcaactggatgggacattccgaagagctcccagccaacacagatggtcactccagaggctgacatttaaaaggaaggggcccggccgggcacagtggctcacgcctgtaatcacaacactttgggaggctgaggcgggcagatcaactggggtcaggagttcaaaaccagcctggccaacatggtgaaaccgcatctctgctgaaaatacaaaaaattagccaggcatggtggtgggcacctgtaatcccagctactcaggaggctgaggtaggaggatcgcttgaacccaggaagtagaggttgcagtgagccgagattgtgccattgcactccagcctgggcgacaagcgaaacttcgtctcaaaataaataaaagtaaggggcacagggagggggctgcacatggtgacttccttccagagagcacagagtgggaggtaggcaaggcgtctccacagtggagagcccgacccactgtctcagcccagaggtcaaggctggcaccatcaccgagaggtcacacgggcagatgtgacagggcgcttcaccactgggctcttcctcccagacccataacccttgtcttagtattagaaaaacactggcagaccgggcgcagtggcttacacctgtaatcgcagcattttgggaggccgaggtgggaagattgttcaagagcagtctgggcaacatagtgagaccccatctctacaaaaatgctgcgattacaggtgtaagccactgcgcccggtctgccagtggnttacaccctgtaattgnagcattttggngag

SEQ ID NO: 714588 - DNA, 244 bp, Homo sapiens
atagttcaatcatcccaagtaggcgatgtgtagaagtctgtgcttgccagaaaggtcatcttcgtagtaggggaggcagcagaagaagaaggcacagccactcaggactaatctgtgtgctgcccaccacaaagccgataggcccagttatagatgtaagtgacagcagggttggcatgaagggtgaaggtctgggtgtacttcacggggtacattaccagggagatgatctgggacacagcag

SEQ ID NO: 714589 - DNA, 3050 bp, Homo sapiens
ggagacacaccgcggccgatgacaggcgcagagcaggacgtggtgaggtcctcatacctaggaatgcagaacaagggcaagaaactcggtgcccgcctggcatctgccctgcaccagtggcctccaggaagttctccaccaaggatgttccccaggcactctgtgctcgccttcaccagcgtcctgtgaggtctttcacactgatggggaagcctttctaaagggtattagggggctggggggctgggggtgctgagtaccaagggtcccaggaagagacaggccaggcttatgggctgggcatccagagatcgccctgacgccagctccaggtggagttaggagggcactcttgtcccgacgcatttacagaccactccctcttcttgttcccctcgactctgagagtgtggtggggtagctgtggaacctgactgcttgcctgaaggttgggcagcgtggctagaaattgcggcccagacctgggatctcacccacacctctatgagacgtcctgaaggaaaccatcgactgagcggagaggcttcgccttgcccgcctcctcccaggaaggaagagcggaagaggcgtcgccagccaccgagactgccagccaccaccccctcccagactctctgtccccaccccagaccagggtcaccttcttcctgcactgggggtggggtgcggtaggtttcgcaatccagactgtggggtgggggtgggagcaggtgtgtgtaaatgagcagctcgtcaggagtcactgagaaggaggcagatggagctggtacccagcaggtctcctctcataagcgtcaaccctcgcctgggcgggctgggggatcctcagcaccccagctctgagccaggggtctgcaacccgggcaccagcgatgggccctcatgcacacagggcgccgagcggggcgcggaggaagagtgacttcagacaggaacccgacgccacagccggtgacgcggaccctgggtcagccagcacgatgggccgctggggagaggagggctggaggcaaagagtgtaagtgtgcagccttcatcagcttaattttaatcgcgttatgtaagtggcttcatctcaacgtcacatgggggggggtctcagatttaattacaggatgacagcctttgcttttcaagcaagctgttctcctggcaagccaggcgaaggattggggagttttgctaaacagaaggagccctttctgaggtgaccacccgtcaaaacttgaacccgcttccacctccgtctccctcttcccgaccagcctcacccagcctcggctgaatgtggcctgagagtagccacttgtccgcaatcacagggacgttttatgcctgtcaagggagcttcctctctcctcttcctccccctcccaccttctgcctggcagctttgccttctctccaagagaagggtccacccaatcagaactcctcttccttttcattcctggattaaagcacttgtaatcagtaaccagaaagttccagagcgggagagaccggaaggcactggagtgctatcggacgggtgtctggggcagagccaggagggcgagcctcttctctccccgcctgcccttgctcacttccccctccatgccaggtgctgtgggagcagctgggcctggccggggtcggcgggtgaagctatccgcatggtgtctggagcaccgtttctttgcttcctggatgggctggatgggctcccgtgttcttcaccaatggcagcgttaccagcaccaatggcagcgttaccagcaagaaggcaaaggcaggagcacatcgagggtgggagccaggctgtggggtcaggagtcccgctccttgccgcgggaagcctggctcagccacctccagcacacttcggctttgtccagcataaaaggcagagcgacgttttcactgcaggctgtttcccaccagggcaagtgggacagggcgagtgctgacgtctgcaggcatggtgtgcatttaggggtgggcggcaccgagggggcatcatttggcataggcgggcccgggggccactgggctagatgactggctggttgctgggggcaggtgtcacagcctctctgagcaccctctaagtggaggatgggaggtaggcaaggcgtctccacagtggagagcccgacccactgtctcagcccagaggtcaaggctggcaccatcaccgagaggtcacacgggcagatgtgacagggcgcttcaccactgggctcttcctcccagacccataacccttgtcttagtattagaaaaacactggcagaccgggcgcagtggcttacacctgtaatcgcagcattttgggaggccgaggtgggaagattgttcaagagcagtctgggcaacatagtgagaccccatctctacaaaaaaaatttttttttaattagccaggcgtgatggcacatgcctgtggtcctagccactagaggctgaggtgggaggatcactggagcccaggaggtcaaggctgcagtgagctgtgatcacaccactgcactccagccttggcgacaaaccaagaccctgtctcgaacagaaaagaaacattaaccttagcgcaaatcccaacaggggcgacactctacagaaaaaccgacagcctcctgaaaacttcccagtcctcaaacccacgaagtgggctgggcgcggtgggtcacacttaatccagactttggaaggctgagggggcagatcccaggtccggagttgagaccaggctagcacctggcggaactctctctttaattccaaaatatcggcggggaagggccgtgttccccatcggagggcgggaaattttggtccacagcggggtgtcgagcggacaatacccagatggcggggggagaagaagcgtgctgtgtaaaaaaaacacaacagggagggtgggtcagaggaggagcacaatcttctggcggcaaaaacagcaaggttaaacagacgcagtgtgcgtgtgtagttattcttttgtcgtcttcggtgcggtccgtctggttggtgtgtgggtatgg

SEQ ID NO: 714590 - DNA, 160 bp, Homo sapiens
aagtactgggatgtatgtgctgctaacaaacccagctgatttcttttttttttttggcgagacagatatcgctctgttgcctaggttggagtgcaatgcgtgatctcaggtcactgcaacctctgcctctcccaggtccaagtgatactcctgcctcagc

SEQ ID NO: 714591 - DNA, 2055 bp, Homo sapiens
ttctcaatgagctgttgggtacacctcccagacggggtggtggccgggcagaggggctcctcacttccccctccatgccaggtgctgtgggagcagctgggcctggccggggtcggcgggtgaagctatccgcatggtgtctggagcaccgtttctttgcttcctggatgggctggatgggctcccgtgttcttcaccaatggcagcgttaccagcaccaatggcagcgttaccagcaagaaggcaaaggcaggagcacatcgagggtgggagccaggctgtggggtcaggagtcccgctccttgccgcgggaagcctggctcagccacctccagcacacttcggctttgtccagcataaaaggcagagcgacgttttcactgcaggctgtttcccaccagggcaagtgggacagggcgagtgctgacgtctgcaggcatggtgtgcatttaggggtgggcggcaccgagggggcatcatttggcataggcgggcccgggggccactgggctagatgactggctggttgctgggggcaggtgtcacagcctctctgagcaccctctaagtggaggacagaacattgttgggaggagtccaggcataaagtgacataaacagcgcagagaatgggaccagcgcacctgagaggtgatcattagcctcagcaactggatgggacattccgaagagctcccagccaacacagatggtcactccagaggctgacatttaaaaggaaggggcccggccgggcacagtggctcacgcctgtaatcacaacactttgggaggctgaggcgggcagatcaactggggtcaggagttcaaaaccagcctggccaacatggtgaaaccgcatctctgctgaaaatacaaaaaattagccaggcatggtggtgggcacctgtaatcccagctactcaggaggctgaggtaggaggatcgcttgaacccaggaagtagaggttgcagtgagccgagattgtgccattgcactccagcctgggcgacaagcgaaacttcgtctcaaaataaataaaagtaaggggcacagggagggggccccagctcgtgccccttctgtgtgggctgcacatggtgacttccttccagagagcacagagtgggaggtaggcaaggcgtctccacagtggagagcccgacccactgtctcagcccagaggtcaaggctggcaccatcaccgagaggtcacacgggcagatgtgacagggcgcttcaccactgggctcttcctcccagacccataacccttgtcttagtattagaaaaacactggcagaccgggcgcagtggcttacacctgtaatcgcagcattttgggaggccgaggtgggaagattgttcaagagcagtctgggcaacatagtgagaccccatctctacaaaaaaaatttttttttaattagccaggcgtgatggcacatgcctgtggtcctagccactagaggctgaggtgggaggatcactggagcccaggaggtcaaggctgcagtgagctgtgatcacaccactgcactccagccttggcgacaaaccaagaccctgtctcgaacagaaaagaaacattaaccttagcgcaaatcccaacaggggcgacactctacagaaaaaccgacagcctcctgaaaacttcccagtcctcaaacccacgaagtgggctgggcgcggtgggtcacacttaatccagactttggaaggctgagggggcagatcccaggtccggagttgagaccaggctagcacctggcggaactctctctttaattccaaaatatcggcggggaagggccgtgttccccatcggagggcgggaaattttggtccacagcggggtgtcgagcggacaatacccagatggcggggggagaagaagcgtgctgtgtaaaaaaaacacaacagggagggtgggtcagaggaggagcacaatcttctggcggcaaaaacagcaaggttaaacagacgcagtgtgcgtgtgtagttattcttttgtcgtcttcggtgcggtccgtctggttggtgtgtgggtatgg

SEQ ID NO: 714592 - DNA, 1848 bp, Homo sapiens
ggagacacaccgcggccgatgacaggcgcagagcaggacgtggtgaggtcctcatacctaggaatgcagaacaagggcaagaaactcggtgcccgcctggcatctgccctgcaccagtggcctccaggaagttctccaccaaggatgttccccaggcactctgtgctcgccttcaccagcgtcctgtgaggtctttcacactgatggggaagcctttctaaagggtattagggggctggggggctgggggtgctgagtaccaagggtcccaggaagagacaggccaggcttatgggctgggcatccagagatcgccctgacgccagctccaggtggagttaggagggcactcttgtcccgacgcatttacagaacattgttgggaggagtccaggcataaagtgacataaacagcgcagagaatgggaccagcgcacctgagaggtgatcattagcctcagcaactggatgggacattccgaagagctcccagccaacacagatggtcactccagaggctgacatttaaaaggaaggggcccggccgggcacagtggctcacgcctgtaatcacaacactttgggaggctgaggcgggcagatcaactggggtcaggagttcaaaaccagcctggccaacatggtgaaaccgcatctctgctgaaaatacaaaaaattagccaggcatggtggtgggcacctgtaatcccagctactcaggaggctgaggtaggaggatcgcttgaacccaggaagtagaggttgcagtgagccgagattgtgccattgcactccagcctgggcgacaagcgaaacttcgtctcaaaataaataaaagtaaggggcacagggagggggccccagctcgtgccccttctgtgtgggctgcacatggtgacttccttccagagagcacagagtgggaggtaggcaaggcgtctccacagtggagagcccgacccactgtctcagcccagaggtcaaggctggcaccatcaccgagaggtcacacgggcagatgtgacagggcgcttcaccactgggctcttcctcccagacccataacccttgtcttagtattagaaaaacactggcagaccgggcgcagtggcttacacctgtaatcgcagcattttgggaggccgaggtgggaagattgttcaagagcagtctgggcaacatagtgagaccccatctctacaaaaaaaatttttttttaattagccaggcgtgatggcacatgcctgtggtcctagccactagaggctgaggtgggaggatcactggagcccaggaggtcaaggctgcagtgagctgtgatcacaccactgcactccagccttggcgacaaaccaagaccctgtctcgaacagaaaagaaacattaaccttagcgcaaatcccaacaggggcgacactctacagaaaaaccgacagcctcctgaaaacttcccagtcctcaaacccacgaagtgggctgggcgcggtgggtcacacttaatccagactttggaaggctgagggggcagatcccaggtccggagttgagaccaggctagcacctggcggaactctctctttaattccaaaatatcggcggggaagggccgtgttccccatcggagggcgggaaattttggtccacagcggggtgtcgagcggacaatacccagatggcggggggagaagaagcgtgctgtgtaaaaaaaacacaacagggagggtgggtcagaggaggagcacaatcttctggcggcaaaaacagcaaggttaaacagacgcagtgtgcgtgtgtagttattcttttgtcgtcttcggtgcggtccgtctggttggtgtgtgggtatgg

SEQ ID NO: 714593 - DNA, 913 bp, Homo sapiens
gagccccgtcgcgctcggagcagattcccgggactagggggcgggagaaagcctgttgcgtggaagataagtgcggcgcgggaagtggacacaggctgggctggagatctaactggactctcgactcctgactggcatgtgacatggagtgattttgtgaggaagatgtaagtgtttatatgtggatgagacggttgagactttgtgggggctgtacaccaatctgaccagccgtgagtgaggaagacataacatgtgtttggtgactcacgagatgaaagccacttctgacgtgggacctcatacccaacctgagagtgaccgcaaagttgcatgtgtgcaaccatgacacccaccagtcggtgttgaagggctccagtccgtagggacccacctacaatgtaccaagagagagagcctggcgatcggaaaaatcaccatcgaacatgaagggcccacggcccggggccttgggcaccatgcactccaagggctatgagaagacatatgtagtttggcccacattgcaacggtggaatcacgcacggaatgatagcgagcaaagggacgagaaaggaacacaattggagaggaccatcgagccactgaagtcgcttgtcaaaatgctgcccatggaatcacaataagaatacatgggacgaaaggtaaacgacgaatattggcatgaacgccatgtcacaagggggaaaaacagcaacccaatgacaacaccagaaagaaacgaacagcaaaagacccccaaaagaaggatagagaaagaatacagacaagaggaaaaggaaaagagaacgaacaaacaaacacaacaaaacacaacaccaaaaagacaagagaaccaaaggaaacaaagccgaaaacacgaaaaaacataccagacggaagaagaaaaaaa

SEQ ID NO: 714594 - DNA, 853 bp, Homo sapiens
gcatgtcatattcctggtggctccactcaggtcccgcgccaggtcatctcagtgtgcgattggaccgagcgtggtgccacatatagccgggtcgttacagagcggtcatctgaccagctttctctacttgttgtagtacaacgagaatcgtatcgatgagcggtacaactcgggttctgctggcaaagggaaatgacagcatgaacttcaatccggtgacagccgaattgtacgtggtctcgcctctagagtgatccatcgagtccgtgaagtcgtccccatcgacgtcacggatgggggaagtcatctccctggggctgcctttgggaaggtcaccaaccttctgatgctgaaggggaaaaaccaggccttcatcgagatgaacacggaggaggctgccaacaccatggtgaactactacacctcgggtgacccctgtgctgccgcggcaggccatctacatccagttctccaaccacaagggagctgaagaccgacagctctcccaacaggcgcgggcccaggcggccctgcaggcggtgaactcggtccagtcggggaacctggccttggctgcctcgcgggggccgtggacgcagggatggcgatggcgggcagagccccgtgctcaggatccatcgtgcgagaacctcttctacccctgtgaccctggattgtgctggcaccagattttctccaagttcgggacagtgttgaagatcatcacttcacaagaacaccagttccagggccctgtgcagtatgggaccccgtgagcgcccagaagcaagctgcgcgtggagggcgggaaatttacaaggctgtggagtgggcttatttcccaggtaccaac

SEQ ID NO: 714595 - DNA, 423 bp, Homo sapiens
tgcaggaattcggcactatgcagggcccggctgagaccaccccaagccctcttctcagtcccacccccagcaatccctcacctcttcatttcccagccctatagctcctcctccaggactcagtgcccttcatagccaacggcgcctctgctgtccaggggctgagccacaggtgactcgaatcctggtggaatgctccacaggctctccggtcactattacagagggtgtggacagaggtgtcaccatcttggggaaggggctgctgccaggtacagctggaggagaggtgattctgagtactctgtgactctcccagaagtcttgatttggacatacctgagagagaagcggccgctgagagagctgggcacagtggctcgcacctgtaatcctagcattttgggaccgaggcggctggtc

SEQ ID NO: 714596 - DNA, 723 bp, Homo sapiens
  misc_feature (185)..(185): n is a, c, g, or t
accaagatattgtattaagttgatgatccaaagcacgcgtcgtgcaacaggataattccttccggcttacgggtgttgagggttggcatatcgcttccgttctcggatatgggctgcaatagttgaaacattgcaacagcaaagtgactagagctcttcatttcagtattatgctcagatgtgangataaatgttatctgtcgatcattgctatagtcatacgctgtacaggaagacacttaggtgcgtccattttcacctcttgtgcacataagagcacagagctgctctctctgtcaccttcctggttctttacagcggagagaacattttcttgtcattgtgctgccctatataagggtggcatatgtgccttttgaactagcgtagtatttcgtgcatgttattaaacagttgatagttgtaatgcctttcaaccttttcctgctgtggtcatttttcttacaggctttttcacacaagattcagcagtcaattgttttttgcacacctataacatattatttgctgttcttgcatggatcgaacctccattctgtagccggccatcctttgccgtatctatcagtcttttttccaggaaggtggaaaagcaagtgttgctctcattgtgtgactcagtgttgctgtccatcccatgcaagcatggggctttcatagtatttgtccagcatactgcaggcttctcttgactttataata

SEQ ID NO: 714597 - DNA, 1566 bp, Homo sapiens
  misc_feature (160)..(160): n is a, c, g, or t
  misc_feature (452)..(452): n is a, c, g, or t
  misc_feature (1112)..(1112): n is a, c, g, or t
caaatgtgtcctcccttttctcccgggagcaagagctcctgttgtggttaccttataatttgggcacaaaacggacacacgccacatggaagttgccgcacataggcgcccatatctcctgaagggcgcactcccctctgggtgtgacccactacacccngccagacgtgtgcttgggaggggataatacccttctgccgttgtgccgctttcataatattataccccggggggtgataacttttttgtggggcccattttttgtgtgtgttgtcacacaccaccaagggaatggtggtctccctttcctctcgttggtaggagtcccatcaggggggacccaattatttgttcccttggtgcgccacaattaaaaaggtggtggtcatcaacacacgtggtccgtagtcccccctggtgtgccatgtgggtgttcccccaccttgtggccncccccaacaattgttgagaaagttctcacacttggtggcaccacagctccccacgaaaccacacactgtgggggttttcatcccggggcgcctccccgatggatgaaggaccccctcccccctcttgtgttgttccaccacagaggcctttttatagggtgatggtccacgccgcacctcgttagtagaaaagtttcttctcacacaggggggggcacacaccacacctgtggaagaaattctccctcggagagttatgatattgttggccacgccccttggagttctcacatagaaccccttgtggagagaacccacaaacagttggtgggagagtcccctcttgctgaagaagcccaacacgctctctgctgtgagacacacatgggctgcacacacactgtgcgtgccccgcgcttgtttttcctctttggggccttgtgtacacatacccacaccacagagttgttctggacacacaatggggcacagacactgttacgacacacaccctctgagaagtggcccttagacatattcacacacagagaggataactcttctggcacattttcttcgggctttcctctggagagcggtggtgtccgccacaatgtgttggggcacacagtgcgtgtctctgttctcgccacagagatntggctctatacccacacactcgtgtgggcactccacgtgaacccgcactcttctaatcactccacaccgggtgaccacacacacgaggtgtcctggccctctgttctcgtggagagaccgcgagttaacaccctttcccacactctggctgagaaaaggttacaaggcctcttcttgggtgagataccactcctgcctcttgtggactgctgcccctcgtggctgctgccacccaccagcctgctcctcgctgctgctgcacgccccacgctataaggttgaaaccccaaggaaagaagtcgcgagaggaagtcggaacgaaggaatatatgggaatttggtctctttgacactaaatcaccccaaaagccaacccacttagcccgcttgttaatttgccaaaacacagggaatataaggccttacttcctttataaaaaagagaaaaaaaaaa

SEQ ID NO: 714598 - DNA, 365 bp, Homo sapiens
gagccggaaacccagtccgaagtcgaaagccacggtcatgctcacgactaagagctgaaacgctttgatgtcacgcgcgaggagagctagttgcgcgtgacaatcagcattttccttttcttctcggctaccgctacatcatgcagctgaagtgttgaatggctgcttttggccggtttctgcctgttgcgtttctgctgcccactggccaagtcgtatgcacgcggtgttcagcaccaatgcaattgactggtcaaatgggtgcaattgcgcaggtatggactataagcctcaatttcctgggaaagaggttctttctatggacatccgacatcagagattgagtatcggtatgtctgagctga

SEQ ID NO: 714599 - DNA, 655 bp, Homo sapiens
gaaggaacgggagagggagaagtttggtagggaaggaattggggattaagcggtccctcagaggatccagcgaggggtgccaacaagaggcgaagaggtggcaccagggcggcggcaggaagaggagctgggagcatgtgatgcgcggagctggagctgtcccgaccctgcctgtgcgtactttctggagtggaagtgtggcgtgggtgaatcggcccctgagtggaagctgccctgtgtggcgagggggttagccaagttccggctgcgtgcgccactccctctggttccacggatgatggaaacgtttttttattattccagagactgctatcctgccttgtgctctgcgtgcccttcctgtgtgcccaggctctctcctggatgcctttcggatgctgtggctgcctgtccccagccctagctcctgggtgaaactgccgagccgctgattgcctggggggtgctcccggggccccgccgcctggggacgggcgtctgcggctggcgcgactagcgctggtactcctgggctgggtctcctcgtcttctcccacctcctcggcatcctccttctcctcctcggcgccgttcctggcttccgccgtgtccgcccagcccccgttgccggaccagtgccccgctgctgtgcgag

SEQ ID NO: 714600 - DNA, 146 bp, Homo sapiens
tcataatgtcgcccagcttacactcattactattctgcctgcaaactcaaactacgaacgcactcacagtcgcatccataaatccgtctcgtctagaggacttcaacactcgtactcccgactaattagcatttttgcatgacttc

SEQ ID NO: 714601 - DNA, 1094 bp, Homo sapiens
ctggcgcagagagtatcctggaccgccggtgggtggtcgctagggctgggccagccgcttggaggtccacgcccgccgagcccacgctggctggggccggggtgcctggcgcgctcgggactcgtctcagcagtcgctcactggtctttgtgtcttctcttcctgcccctttcccttgcctgcctgcctcctggcctgccactgatgcccctgctgccccgcatgcatgcctgccgcggactggctgctgcctggctgctgcgctgcttgcatgcgtgcggtgtgttggcgccccatctgctacactgggcctgaagaaggaacgaagaggaagctgaatgctgcgcccccctggcccatgccgcagccactgggcccagacccgccacggctgcccgcgccgccagcccatcgccaggaagcaccacagagacctgcatggacgggcatgggcttgagaagcagcaccattccagacgccagccgctgccggccgccgaggttgagcagcgccgccgacccgggcatctgccccccggctgctggagcatgctgctgctgctgatgttcagacatcgggctgatccaacgcaggtgactgccaacagccagcccaatgtcgaatccagaaatgcaccacggacttcgagtcccatgacttctcaacctgaactctgccgttgacgtgctttgactcatgagattatgcatggccttgcagtgctatgatgtgtgaaccagtgaacttcaaaagactgcggtgggcaacctggtataccatacagccgggaggggataagtgacctcatgaccaaaggaatggaccacggatggaccaaagtcatctaccagcccagagtgaacatgaccttgcagcacacagcaagccggccccaggacacagcggagcggggaccggacgtaccaggtaacgaacaggggcaaggacggagaccacaaacaggaatcaggggaactccaccactcacgacagggcgcgcccccatgacagcaaacacgaagacacgcacagaccagcccaggaccagatcgcagagcgagcaataaacacaggcggcgcaaacccggcagaa

SEQ ID NO: 714602 - DNA, 1268 bp, Homo sapiens
cccacgcgtgcgccacgcggtcggtaatgaccgaggttcgcgatccgtccctgacgagcagctgaagcagctaggccgttcctgctccacgttcccggccggactctgccctcgaggtctgggtgcagcggctccaggaggtcgtccctgcgtggcaggtgcatgagtggccgagcccgagggcgtgctggccgtcctctgttgatgcaaggctgacgagagtgaccatccgggaccgtgccgagtcaaacatcgcctggcaagttacctagtatcacgcacgggagccacgctgaggaggctgaggcggtgcgcggacagttgcagggcgcacagcgcgatggagcgcgtcagaggacccaagagctagacgggctcattctcggttgtggcagggatgtgtcttccatgctgcctccgatgcccgagaggcgccggtgtgggccagtgacccctgccctgcgctggcatgacacactcctgctgggtgacaggggacgcaggtagatcccgatcaaccatcacgccgtcacaagacgaatatcgtaccaggtgtccatgcattgccagtattgccttcttgcgtgtcggagcacggaagaagggatggtccatggggctatgatagggacaaacatatcacaggcgagtctgacgacgcatgacgaacaataatcccaagacacatgggtggctggaagttgtgcgtgagaccttcgaacgatgggcatggaccattacagatgaaccatgactggcgaggagagctagactacaatcacaaagaacaaagaagcatatcgcaagaatagcatggcagcaataaccccagcacgtatcctatggcaccgatggggacatatccattgtcgcaaggatgaggactaccaacgccaaacaacaacacaagaacgcacaattatcccacaaaagagccaacaggagatggcacaaaaaaccggaaatacgcccagaatgaaggaaacccgcaacccacaaagcacgtgaaggaccagaaaaatcgcacaagaacaaaaagaaaaccgaagacaagacaccaagggacattgaccacaagagcacacctagggaaggcccagagacagacaaggggaacccacaaggccagccccgagggacaacaagagtgtaaaaccccgcagaaaagacacaaggcacacaagaaggagacaagaacaaaaaaagaaaaaacaagaaagaaccaagaagaaaaacacaaacagaagcaacagcaaagcaagaaaacg

SEQ ID NO: 714603 - DNA, 157 bp, Homo sapiens
tacgacgtatttcagagaggaactggacccaaataaggaaggaggacaaagaggagaaaggactttctgcctcgagaacatcaggtttctgaaagggatgggctactccacgcacgcggcccagcagattctgctcagcaatcctcagatgtggtgg

SEQ ID NO: 714604 - DNA, 828 bp, Homo sapiens
cattccggatgcgcctaaacacgttaatataaacaatggggtctttcaaattaaacttttatggtcctataatacctccttctcaatccttcctaaaatatcccggtccccccctcctttccactgctggcgccttcccaacggcagccccttctcaccgggcatcttctgccacgctcccccccccttttgtagacctcctattgctcccctcaaatctaccggtgattccccccccccctgccttttcttcagaaggaggataatattgggcgcgcataagatgctctcccgagggctccattcacatcgtagtcccagtcaacactccgtggctccaccacaacgacttccccgctttcttttagtccagcgtttcaacaaggcgctcacccctttccactttgaaccacgcgcgcgccgcgtgtcacccaactaccacacgtaggcccctcctctccccacacaatttactcctctctcttgtaatcaaactgttgtcaccctctcacgaacctctcacaagcctgttataactattttcccccccaccgcaacaatgtgtccaccttatccagtcatatgtctggtaagaaccaccttccaatcgcacttgatagatccactctcattcacgcaccctcgcacctatcctgctatgctcccctcttggggcagaactaaagggcaatttttttcatctatgctttatcatccactaaacatcctgtcatttttgtcttccacagcatctatatcaggaccgcatcggaatctcctgagataaaaaataatctctcttcatccaccgctccatcaataacgaaa

SEQ ID NO: 714605 - DNA, 383 bp, Homo sapiens
  misc_feature (1)..(1): n is a, c, g, or t
  misc_feature (28)..(28): n is a, c, g, or t
ncactcttaaaaatggtagtgttttaanggatatatttatcttcttttatcttttctttttttgcttttttctttttgaaatggaatctcactctgtcgcccagactggagtctagtggcatgatcttggttcactgcaacctccacctaccaggttcaagtgattcccatgccttagcctcctgagtagctggaattacaggcatgcaccaccatgcctggctgatttttgtatttttattagagacagggtttcaccatgttggccatgctggtcttgagctcctggcctcaagtcatctgcctccctcagcctcccaaagtgctaggattacaggcatgagccactacacctggcaggatatatcttctttctgaaaact

SEQ ID NO: 714606 - DNA, 307 bp, Homo sapiens
  misc_feature (249)..(249): n is a, c, g, or t
ggcggccatcgacagatgtgtgccaacgatagacgccgacaagcatactgggaatagtagaagcagggtgggctcagtgcaacgctgccacgcggtacaaaggatggatgtactggaagtgccgcaaagcgtggagcgcgcataaccacgagaacgcgctgtaagctttctgccaatatagggacccccgcgggctccctgcgtgcggtggacttgcggcgtcttcatgatgacttacgagacgttctnatggacggcgcacgccggtctaaaacgtctaggcgaatagtatggggcagagtgtgag

SEQ ID NO: 714607 - DNA, 260 bp, Homo sapiens
gaacgagattcccactgtccctacctactatccagctcgcccagctcgcccagcgtccgccgcgcttgggcaaggtttaaacggaccacaccaaattgccatcttaaattggaccaggcaatggaaaccatgatgttacaatttacaaaatttcgttgggatataagggttattacaaatggagggactctgagatactctcgtggaaaggagagttcccttggtttttgagaaatcataaagagaccctcgtctctgtg

SEQ ID NO: 714608 - DNA, 284 bp, Homo sapiens
ttttttttttagcaatgaaaataaaagttttttatcaggcagactccagacgctcaaggcctttcacaacaccccccaatttagcaatagacttcagggaccaaaggaccctttaacagaaatagaacaacaagaaaacaaactcaaagacactcgagggccagggcctcaccacaccaacccccacttccaaacaggcaacctgcaccggaggggagactttttcgccaaagcgacgggccagcacacagaccaacacatcgcccaggaacctgaagttttca

SEQ ID NO: 714609 - DNA, 139 bp, Homo sapiens
ctttaatcccaaccatcgggaggctgaggtgggaggattgcttgagcctgggaggttgaggcttcagatgagtccgtgacttgtgtcactgcgctggagtcttggaaaacagatccatccacgcaatgagtacagatta

SEQ ID NO: 714610 - DNA, 359 bp, Homo sapiens
actgtcttgaattactcacctgctcgttcccagtctgggggtggttttgtgccagtgatgtgacaaggctttctcctttggccaacgagctagtggcatctcaggctgcttctcttcctctgtactcctggtgatacttcgcttgctggagggtctgcactacccatgaactcctggtcagtactgtctgaagctctcctggtcagtgctggcctggttggaccctgtgcggcgcattagcatctgttaagctggactcactttcactggacaatgccatgtaatcttcaaatgagttgtgtttcttcaagatagcagcttcctttctcactttcagagttccaagaagcaggaacggg

SEQ ID NO: 714611 - DNA, 188 bp, Homo sapiens
agaggagtcttaccaatgcatgagcccaacaggacgtatctggtttctaaatactgcattttccattgaaaggaaccaaggctctggagaatgactgaggcagagaaagtactagatgagtctaactaattttcttactgtgcacggcaaaggaagtgctcaacagacataacagctgaaactatcaa

SEQ ID NO: 714612 - DNA, 648 bp, Homo sapiens
cgtaagtaaaatgtttgccgggagaagcggtaagacctaaaatttaaagtaaaccctcgggtcccaaaggtcatagccttcgtcccaattcgaacggtgggtatttcccagcatgtgaatacatcttagaatccgctgtatggcatacgtagcgtaccatatcgacctagggtctcccggtaattcaggcacaaaggttattcttaggcatagtataggacggtgtacgtacgccttgtctatagctcgagatactacacgcgatacatgggaccactatgaatctatgtcggttcataagcagagtggttgaacagtagcagcagatgttgagtcgtagatttgtaggagtttcagtcaagcgcaagtgctgacaaatagacctcagaacacaagtagattcaccatacagatatgtcataagtgcggggcacagtccttaatgtcggatctgcggtgcatgtacagccatgttgatgtgcttcatctgaccactcaggatagcatcttgaattagcataggtcggcttcactaatatgtgcaggcctgcctacacatcgaaaacagtgcgcagggtcgcagggtagcactgggcaaatggcaggcctgttccagtacggttaaagggtgggtaatgcgcattacag

SEQ ID NO: 714613 - DNA, 812 bp, Homo sapiens
  misc_feature (6)..(6): n is a, c, g, or t
  misc_feature (78)..(78): n is a, c, g, or t
  misc_feature (114)..(114): n is a, c, g, or t
  misc_feature (282)..(282): n is a, c, g, or t
  misc_feature (375)..(375): n is a, c, g, or t
  misc_feature (728)..(728): n is a, c, g, or t
tggtanggttggaattctcgggattgcggggagggccatggcggcgaaattgagctggaacggccagcgctgcaagangcgtacgtgcgggtggttaccgagaagttttcgatngattgggctttttttatttatgaaggaaaaagcaatgatatccgcgtggttggcacaggggagggtggcctggaggagatggtggaggagcttaaaagcgggaaggtgatgtacgctttttgcagagtgaaggaccccaactttggattgctcaaatttgttttcatnaaatggaaaggggagggcgtgaacgatgtggggaagggagcttgtgctagctacgttagcaccatggccagctttttgaagggggctcatgtnatcattaaagcacgggctgaggaggatgtggagcttgagtgaataatggagaaggtggcaaaggatttaggtgcaaactaaagattttataaggagagtgggcgcttttaggaagtgggaacacaggctccagtgggctctgtgtaccagaagaccaatgccgtgtctgagattaaaagggttggtaaagacagcttctgggccaaagcagaggtgagtgctgccccggggcatgctgggcacgtgggagtgttctgcttgctgtggctcatctttcctcacaagtgagctcatgcagcatccactctccttggtgcccattacagatggtcacactgaggctcgggtaagtnaagccacaaggtaatgatcgactggctctggtgcccgtctttggccatgtgcctaaaactcagtcctgggcaggggattaggct

SEQ ID NO: 714614 - DNA, 711 bp, Homo sapiens
tccaatgggttagtcggtgccccctcccgggcccttatcaggtcctcttcatggttcttaccgcaggggactcctgtcgtgttcccccacggggcggcccagggcttgtgttgccgccaccctcgctccatggccttggctggcaacccggacccgtgtgcagcttgtgtggtccctcgcgcctcagtccctccaaccagagcgtcttcattcgcccccaacaggggacgctgctcactcccctcaaggtcccccacttttccgcgcggtcaccccctaggcgccataattatcggcccgcagaggcgtgtctatatgtcttcatgtctccgccgtgcttatttcgctaactttttgtaggcaccacagcacaaaaggtttctcgcgatttatccccataggcccgcccacacttactattcagtatctccccggagacattaatctaccccactcgtcaaactctctttctttcatctccctctcggagtacatcacatttctattataccccccagtaatatttcaaagacttgtgttacgcattatgaagatccctctttcctgtgctagaccgaaaaatctcgaaatatgaatagaatagacactcccactcgccacctcctcggtggcgctaccaatactggggtcgccccccccccctcccccccccttcgggaccctaaaaaaaaattttcaacccacataaca

SEQ ID NO: 714615 - DNA, 235 bp, Homo sapiens
  misc_feature (7)..(8): n is a, c, g, or t
  misc_feature (10)..(10): n is a, c, g, or t
  misc_feature (15)..(15): n is a, c, g, or t
  misc_feature (20)..(21): n is a, c, g, or t
  misc_feature (28)..(28): n is a, c, g, or t
  misc_feature (53)..(53): n is a, c, g, or t
  misc_feature (61)..(62): n is a, c, g, or t
  misc_feature (82)..(82): n is a, c, g, or t
  misc_feature (89)..(89): n is a, c, g, or t
  misc_feature (115)..(115): n is a, c, g, or t
  misc_feature (151)..(151): n is a, c, g, or t
  misc_feature (209)..(209): n is a, c, g, or t
  misc_feature (216)..(216): n is a, c, g, or t
  misc_feature (226)..(226): n is a, c, g, or t
tcggcanngnacttntaagnncttaccnatagtacaagtacatgatgctactnaatatttnnccacttggaaactgtgagcnggttgtngcattaaaacacacatacaaacaaantcaaaaacactgcggactttcactcaagctggtctntcttccccagtgtaaggcaatcctgcctactaacaacaccaacaacaaaacattccanctgtgangctgacgganttaaggggg

SEQ ID NO: 714616 - DNA, 101 bp, Homo sapiens
actctgaggatcccgaatccggggatgggatatgtgcagtcatagaaggtcactttatgcagagaatggggccgggccgacccattccgtactactgcact

SEQ ID NO: 714617 - DNA, 452 bp, Homo sapiens
gctgttggtcgtctctagcaggatcccgtcagcaatggtgatgctcaacaccctcctaatgcacaggacaggtccctcaaaagattatccagcccaacaatgccaatataccaggttgagaaagcctgtctttaggagataatgtttctactacgttggagttgtctttatataaatcataatacagaggggcaaaaattaagtttggtaagaatgtttacattgaagaatgccttaaccccttatttcatgttgatcaatcttcaatctagcagaggactcatttattcttacttctccatctatctttactcatagatgatctttatttccattgcataatgacgagattttaattagatcatagatagcgtaaatgtttaagactacatgaataactagcaactcctaatacaccagtccaagttaagtattctccaggtcataaggcc

SEQ ID NO: 714618 - DNA, 586 bp, Homo sapiens
agagagtggtcacgtccgggtcaggagcggaagaattctataaccatcgactaaaaagagaattcaatatgggtccaaatagcgaaacgcacgaacattcttataatgaagcagacccagggacacaccataaaactgacacaaaatcacatcacaacgacattccaccattttcggggggggccgaatacatcccacacccctgaatactcttacacaaccctcaacacagttgggccatcttgtccatagcgcaatccactttcaaataaactcccccaaccaaaacaatctcattccctgctcatacgcaatactccacctaaacaaaaaagccaaccacaaccacccctcccaatctaatctctaaaacgcttgctccctccccaattcaacccccaccattccacaaaaaaaaaaaatccccacacaccaacccccccctctttcaaccaaaacaccccacaacacaataccccctcaaataaaatacccccctacctccccaataataccaaaatccccaaccccccccttttgttaaaaaaaatacacccccaccccaacacttccccccccacattct

SEQ ID NO: 714619 - DNA, 198 bp, Homo sapiens
gaacgagtgcctcgtgtgtgatgtttttctcccgaaaatggctcagattttttgatctctcttggctgtagaaaatatgtttgaggagtggagaaaggcatatattctctcaaaatatgagagtgtgtttttcttgaatcacttaggtaaagcgataaaggatggtttagggcacagggaattttggcccttatcgag

SEQ ID NO: 714620 - DNA, 338 bp, Homo sapiens
ccccccccccaagggcctttgtggggtggcttttccccccccctttgggggggggggggggccccggtgggccccatgtttttttttcccccccccggcccgtcccgggggccaggggggggggggtttttccccgggttttttgggcccccccccccgggggggcttttttttccccccgggggaaaaaaagggggccggggggcccccttttttgggggggtttttttgggtccccccccccccccccccggttttttttttttttttgcggggggggggggggggggcctttccctttttttttttttgcggggggatattggcccccgggggga

SEQ ID NO: 714621 - DNA, 251 bp, Homo sapiens
ctgcacaggtacatactggaggcgtgagcaccgcagtgcacattccccgtgcgtgtgcctttgaggccttcctggccaggtggggccagcacctcggtgcaggactgacaaggaggccaccgtgagtgactggcagccccgggagtccttctgattggagatggagtcactctgcccaggactgagcgtaggacccaaccctccctctctctcctcgtcctctcatcctctctctctctctctttctctct

SEQ ID NO: 714622 - DNA, 611 bp, Homo sapiens
atagcaggtagcgaggccttggggtggcgacgctgtgcggtgggtgtgtgcagtgtgatgatcctccggaatgggaggctggtctctggcccctgaccctgctcctgctgatcgcccactcgggctgcccgtgccgggccttgcagggaatggtgccgcgccgccgcctgcgcgtttgcgatggcctggctggtggcctgctggtggcccaggaatgtgctgtaagtgggccccacctcagactcctgagacgtgcccgagcgggtcgcggctgtgggacggcggcgtgcccttcctttcctccactcaccagtgttctgcgccctgagctctgctagccaccctgtacgacaacttccggactcccagtggacagccctggccatcaatggaagacagcacatggactgggacaccaaccatgaacccttctcaggacaacccaacagcaccagtggggatgttctcctaaggccgcaggagggcctgggcacgccatccgtcctccaggaagagccatggtgttaatgcaggacaagggcagcatctcaccagtggcctggtctggcggggcgagggtggtggaacacggtcccttagcaatgctcgaa

SEQ ID NO: 714623 - DNA, 1233 bp, Homo sapiens
cttagcgtctcccgaagagagaacacagagcgcgacaccctgggatggtcgtcttttcgctgcgacaagaccgatcaattgcgggagagtcgatagagtgctcccatcggcggtggacccacgaacaagggagtgccgcaaaaggaggacgcgctcgcgacaaggagaccttccgcttccggcgatgggctcacaggggcaggaccccccccatggccctatccttgccaatgcgtgcctgatcgggggacgttgccaagggagcgcatccgaacaatggcgattccaatgcacaaacggttgttctgccatgattatccgggcttagcacaggccgaacccccgttgccccgggcaaacagcctacgcccaggctccggactggaccaagggcggtatcggactgtcggatcgagatttgtcggggcacaggcagatgcataccttcctgagtcgccttgcgtactgtgaagtcactctccttacacaactgtcgttgttcgccaccttatcgctacgtggccacacaatcccatgtctgcacaagagaagcatctcgagagatggtagacgtctgtaagaggagaaacacataggcccctgagttacggcagcctcgaggaaggacctgcccatatctggacatggtgagttgcagagacgctgaggaagtacccgccagcttgtcagattcacatcgggagcgcagctcaggactggcgaggtgctcggggcagcgcatgccacgcaggcgctgtgctagagatggccgtgggtgccctgcgatccatgagccactgagcactgggcacaagcccggagaccatgtcaaccacgtggaaaggttcacgggctgaggcccggcagcagcaccggcccatcacgtacctgccctatcggggccggcccaacggagctgcctcggggtgcgtctagggctgcttgaggctcaagtacgacactgctccacgtgctgcacaagtatcgcggtatcccaagcctgccctgagacccaggttaccgcaagcaggtagaatccaaatctggccgctaggtccgaacaaatggtgtctagtatgcaagagtccagtataccgcgctgacacagaaggctgccgggtggcggggagggcaccgccgaaactccaaagagaaccctaagtgtggatgttcagaattgttgggagaatgtcactgaagtgattgaaagattacggccacgagataagaggg

SEQ ID NO: 714624 - DNA, 114 bp, Homo sapiens
tagccggacgcacacttgtcatgcgattgatcttcagtaatggtttggtcctcggcgtgtgctgcacacgccgagtcaccaaaccaccccagatcgcaatggacgaagttgttg

SEQ ID NO: 714625 - DNA, 438 bp, Homo sapiens
  misc_feature (391)..(391): n is a, c, g, or t
tgcagtggctcatgcctataatcccagcactttgggaggccaaggtgggcagatcacctgaggttgggagttcgaggccagcctgaccaacatggagaaaccctgtctctactaaaaatacaaaattagctgggcatggtggcgcatgcctgtgatcccagccactcgggaggctgaggcagaagatggcttgccccagcaggttgaggctgcagtgagccaagatcatgccaccccattccagcctggacaacacagtccctgtctcaaaaaaatcaaaaaagaagaagaagaaaaagtattttaaacctgtcattaagaagaagatgtttacacacttagggaggccagagtgggcagattgcttgatcccaggagtttgccagcctgngtgggccgggcatggtggctcacgcctgtggttctagccttttggtg

SEQ ID NO: 714626 - DNA, 246 bp, Homo sapiens
gcgcgcatgcttcagttgagccaggaagaggggcaagaggtgctcgatggtgtagtctttgcccaagatgggagagagagccatgatgactgaggccaggtcagacttgtacatgttggttgggatcggacaccagctcacttgatgcagggcaagatctgggacatgatctcattctcccgacagtcagctgagaggttttcacagaactctttgaccttgtgggaaggtgatcttctgcacgat

SEQ ID NO: 714627 - DNA, 117 bp, Homo sapiens
  misc_feature (1)..(1): n is a, c, g, or t
ntcctggcactcgtagctttcctggagaaaaccccaacagtagacttattggggcaaaggttatgtgtatcttaaattttaacttaaaactacacctgggttactttataaaaagtc

SEQ ID NO: 714628 - DNA, 232 bp, Homo sapiens
  misc_feature (9)..(9): n is a, c, g, or t
atgtagggnctggcacgccagcccctgacagggtttatggtttgtttctgaccttggagtaatcctggcgcccgaacgggctcacctgatacccctcgacatttttgcgcgtcagcgcaaacgccgtcgggtgcgccagtggcagccacaacgcctgttgctggatctgcgcctgggcctgctggtacagcttgctgcgcacgccttgttcgctggtggtcttgccagcgct

SEQ ID NO: 714629 - DNA, 116 bp, Homo sapiens
gaggatccccctatattgtccctatgcatgctagcacaggcaagtgaagactggacttcccccctcattgggctgtggtgagagcaccccagtatccagctgggataccagagaag

SEQ ID NO: 714630 - DNA, 167 bp, Homo sapiens
  misc_feature (87)..(87): n is a, c, g, or t
ctggtgttagggttctttgtttttgggggttggcagagatgtttttaaggtcttttgccaaaagcgcgggggaggggggggttttgnggaaaatttttgttatatatgtctcttgtgtgagagcgcgctctttcagacatatcaattgttattattatgtcgctcca

SEQ ID NO: 714631 - DNA, 497 bp, Homo sapiens
ggtgatcttgagtatcccggtatccgctacaccaagccgatgttgtaaagagaagtatatatggaaagtgctgagaggaacagggagacatgggtatgacaaacgtaatcgtgaatcaggacctctgaacatctgcatacactttacagtgagagctctccttagagccattacgagaaccagcattgtgttttgtaaccacagcacctttgcctgcaatatacggcaagtgtagatcgagcgtctaatgtgtgccagggcctgtgttaggcactggaggatgcaaggatgaatggaattggccttgtcctcaaggatccctttgtttaatggtggggcattgatgtcataaacgagagagaggccatggtgtacccgtatgctacagtgatgagcaacgtatgaaagctgaacgaagcctgctcctggtacggcacagctttaactattcagccctagagtcaattcattgtcgcattcattcattccataaatat

SEQ ID NO: 714632 - DNA, 510 bp, Homo sapiens
cctggtgtaggctccgtggcaacaatagccaagacatgaatgcaaaggaaaagttcttaaaggacattaatagtgctaactccagtgaacaaacgaatgataagaaaatgaaacagtcttattgcttatatgggtaaatttttatggtctggatagcaggtcaaaccagccacaaaattcccttaagccaaagcctagtgcagagcaattctctgaaggctgagagagatggggaagctgcagaagaaaagtttgaagctagtggaggttggttcttcaagtataaggagataagccatctccataacttgcaagttgaagcagcaagtgctgatgcagaagctgcaacaagttatccagaagatgaaggtggcactgactctcctcttggggaccaatgcagctggtgactttaagttacagtcagtgctcatttatcactctgtaaatcataggaccttaagaattatgctaaatttcctctcctgtgctctctaaatggaacaaaaa

SEQ ID NO: 714633 - DNA, 1005 bp, Homo sapiens
  misc_feature (759)..(759): n is a, c, g, or t
ggacgcgtgggtcagcgcagtagttctccttgtagcctctggtttatcagatccccaaccaggttgacttccctggactccgaaatatagcaggagggttacgatgtccgatgtccgtggaccctgaggactttgtaggccagaatgtgctgatcctgggtcgtgggaactcggcctttgagacaggcagagaaacatcgttgtggtgtcacaaactttatccaatagtgctcagccgcatcccgggctccggtcatgtactagggccacccatatacgttgggaagacgcttcaggatgccaatcaacaattgcgtcatgcttggaataccttaccaagcatcaatgtccctggatcgggcgtgcgtctgatgtcttgaccttgactggattcgtggcacattcgcttgaatggacacgcatatggcaacgtggccatgtcacgccgagaattcttcctggaagaagccagcaccaggccagagtgcctgactccatgcaccctcccccaggacgacaagtggacaactttgcacagtgcgcgtgcccgtatgagcgtggtaagtccgactgcccgtgggctggaagcgtttgacttctcgcatcttcaataagtccctcagacttaactcgggaaaatgcgttcggcaagaagtacccgcgtgattcgaagctagctacgaatccaaaggaagccggggtcggtcatccctgggtactgcagccactcggtgggacttaccgggaatcttgctgggngcttcatccacggattccgatacacagggcgtgctgttcaccggctcctggagcaccggcaacacaaggttaactgggccgcaactgaagttccccatcacaccaggtgaccaacccacaacggcggggccgggacagaaggtcagggcttacagattttggaggggccatgacctctcgaggagaaaacagactgcaggaggaagagaccacgaattgcacacggacccgcgggagagaacatac

SEQ ID NO: 714634 - DNA, 742 bp, Homo sapiens
tgtaatcgtacaaattataacagagcattgcatgtataggtatatatgtatcataagacaggatttaaagtaggatgtgtgtagattacatgcaaaaaccgcgatgttctacaaaagggacatgaccatctgaggattttggtaacattattgggcaatggactaaatacatacgttcatttatttcaaaaatttatacataattactttagggccaagtgcggtagctcatgcctgtaatcccagcactttgagaggccaaggcaggtggatcacttgaggtcaggagtttgagactagcctggccaacatagtaaaaccccatctctacaaataattcaaaaaaattagccaggcttggtggtgtgtgccggttccagctacttgggaggctgaggtgaaaggatcactttaccccgggcagtcaaggctgcagtgagccaagattgtgccactgcactctaacctggcaacagtgcgacaccctgtctcaaaaatacaataataaaaataggctgggtgcagtggctcacacctataattccggcactttgggaagctgaggcaggtggatcacctgaggtcagtagttcgagaccagcctagccaacatggcgaaaactggtctccactaaaaatacaaaaattagctggtgtggtggtggcgcctgtggtccagctattgggaggctgggtggaggatgttgagccataggtgtggtgcatgactggacaggcgtgc

SEQ ID NO: 714635 - DNA, 172 bp, Homo sapiens
agttctgctctgccgttctgctgcttcctgcttcgctccaggattcaggccattctcgtgcctcagcctcctaagtagctgggattacaggcacgcaccaccatgccccgctaatttttatatttttagtacagacaaggttttgccatgcttcctgcttctaccctgtctc

SEQ ID NO: 714636 - DNA, 405 bp, Homo sapiens
  misc_feature (112)..(112): n is a, c, g, or t
  misc_feature (312)..(312): n is a, c, g, or t
  misc_feature (325)..(325): n is a, c, g, or t
  misc_feature (342)..(342): n is a, c, g, or t
  misc_feature (360)..(360): n is a, c, g, or t
caaagacattctatttgaacacttgcaattacctagatctagttggcctttggttgatagatcctctgcctcggaatttcattgagtttttttcttccttgcctttgggtgnctgcttgccacttcctaagaattcttgtagaaggcagtttctctacttgcccaagagcactgagtacttctctactatcctattattagcttctatctcttagtgtaacttcaaaacttttaaagagcagtgaagttggcagggaccatgtggccacttattattacctgcattggtcctggtcatttatttaaggggcnagaactacattgnagtggcttttaccagangacttctactggttcatnaacttccttctaactagactagctttctctccaataggctttctt

SEQ ID NO: 714637 - DNA, 547 bp, Homo sapiens
catcctgcaactgtacactgcctcagcctcccgagtagctgggactactggcacgtgcaccatgcccaggtaattttcgtatttttagtagagatgaggtttcactatattggccaggctggtctcaatctcttgacctcgtgatctgcccacgtcagacccccaaagtgctgggattacaggtctgagccacccacatagttgttttaattgtgatgttagggtgtcgattttagatcttacccgctttctcctgtgggcatttagtgctataaatttccctctaaacactgcttcagctgtgtcccagagattttggtacgttgtgtctttgttctcactgttttcaaagaacttgtgtatttctgccttaatttcattatttacccattagtcattcaggagcaggttgttcagatagaaatgacccctgaaaatatagtctttcctagtttttttaaatgtagtttactggacacattttttcatttttctctgctttttaaattgagaccttcaatttcacccacgggttctccccttaagt

SEQ ID NO: 714638 - DNA, 2273 bp, Homo sapiens
  misc_feature (1030)..(1030): n is a, c, g, or t
ttgtgtgatgtgtgttgtgctgttttgtgagtgtgtgcgttgcgttgtttgttgatggttgctctgtcatttggtgttctcgttcggttgtttgtgtgtgtgtgtgttgttattgctggagttttgtgttcgagtttgttgtgttttatgctgttccgtggtgttgttgatggctttatgttgtcttttcgtggttgttagtctttgtgggtcgtgtgtcgttcgcttcttccttgtattttgttcgtgatgttagttgctcgtacgcttgttgtgttgtgatttgtttgttgttggagttgtagtgttgtgttcgctctgttctagttcgtgatgcgttgtctcgcgttgacttgcctgtgctgatgatcgtatctttgtgttactgtggagtggtgttcttgtccttctgtcgtttttcgtcatgattggtgtcgttgcgtgtttctctatgctttttgcgtatgtgtccttgttacgtttttctgtgtggttctcgtatctactctgtctgtgttgcttagtgtttgttttcgttgcgcttagagttgcgtcatttcgtctgttgctgtgtagtgttgtttgctgtgtcttctcggtgattgcgtactagctgcgcgtggcgttagccgctgtgtgctcgtttgtgttagcgctaggtgtcgccgtctgtggtgttcgctagctgactcctgtgtgtggttcggtgtgttgcgttcgtctagtgtggactctcgttgtagtcgttctcgctgctgcctcggagtggtgttgtgtattgtatgttattgtgttttgtggtgcttttgtgtgtttttgttttttttttctgttatttgtttcttggtttttgtttgtttgtttgtttgttttacgacgacaagaacgaaagagtggaagcaggagagacaacgcaacagaacaaacgaaagagcacgcagacaagagatctattcacacaacaaggatttttgctgttgtttggactatctggtctgtgtcactcagagagtgtgtctctcctctacanagtacgagcgatctctagaaagttacaaccccacttgttgtgttggtcgaatgcaccacagcaacatgtttgttgttaatgtttcccagtggcgagacaacatggtgggttgcttgttctccctcaccggcggggctgtccataacccccacacccgtgtggtgtgaggacccacaataaatttgtgttgtgtcccgcactcactctcgccgtgttgtctgcaaactaagttggtggcgtggggcccctcgcgtgccccactcattggtgttgtaaggagttgttcttgttgtgcggcaccacgcgggtgtgttcgaccagctccttctcttgtggtggtttcgtccacgccggcgcttcccagttggtgttattcttcctcgtccccccccttgtgagggaagtaccctcgcgcgggggtgtgttccaactacggttggtggtctctctccctccgtgtgagtgtatttgttggccctcgctccgtggttggccttgcccctacgtttctgtgtatgggaacccctccgttgtgtggtgtgttactactcccatctcgtgcgctctctcatgtggttgtccgtctgtgccgactcgcccagtgagggtctcttttgtcgatcgatcctgtgtgtccatccaggaggcaactcccttctccgcggctgggcccaccactctgtgtggtgcagttatattccgcctctgtgtgtgcgtgcggtctcgctctctctcttcaccatcccctgctgtgtcactggcccgtgtgtgtgcgcagtctgtgtgtggctggttgtcactccactgcagtgtggtcggtgtgtgtgtcctgtgtggtgtgttcaccccctctcctcgcgtgtggttcgcactgtggtgccccttctctctctgctccctccttgtggggagcacgctgtgtgtttcgtggccgcccacgtacgaggaggcgtggcgtgtgtgtcccccaccgcgtgtggtcgatggggtggggggcggacacacagaaaacaccagcggtggtgtgtgttgtggtcggccaccgtgttgtgtgcgttggtgtgtaggagggtgctggttgttgtgtgttgtctctccctctttttctcaccacgcgagagagaaaagaggagccccctcacagcgccggcccgccacacagttgtgcggtgggagccacccgcggccctcccagtggtgtgtccacccacccaaaattattacccatgggcgccccccccca

SEQ ID NO: 714639 - DNA, 291 bp, Homo sapiens
tatttgacccccatttctcccgtactccacatatcacgcttgtcctgaactatcacggactccaccactactatgtcatcgcacccctattaactccctttaacatattgtaccagacaacacacatggggtcaatatcttagccccaccaccctagaccaacactaataacccctctgtcatacaccgagaaccaccccttcaagttcaaaacacccattaatcccccacctttcgtcccgttccctctcaccccgaacatcacttaccccggcgtttcttcactgtaca

SEQ ID NO: 714640 - DNA, 237 bp, Homo sapiens
cctgcagctagactatagaggtacctcgtaggaggtgttggacaaaatggtaattcagtttttaaatgtttgaggaacccacaccacagcctggcttggctttgctttcagcctctaaactgccacctgccaagacctctaccccagaagacttcatccgaatgaccaacgtgagcctcaccatgaaccagacacagctactgtgccccgagatgccagatgcaaccactgtgcgta

SEQ ID NO: 714641 - DNA, 173 bp, Homo sapiens
acacgcgtctaatgaagcctcaacgggtttaatgggaaattacatggaaacttgtaatccataatatgcttttcatctgacatgcttacacggactccttttcaactgatacggaaacaaacaaagaaaagacaaccaagaaatagatatataacactacagcgggctcccgg

SEQ ID NO: 714642 - DNA, 115 bp, Homo sapiens
caggagatgccaaaatctaatttatctcactgaggtcctctagagaagaaacgcttcatgggaaagatctccctcctttacatgttctcttctccctcctcctccttattctaaa

SEQ ID NO: 714643 - DNA, 896 bp, Homo sapiens
  misc_feature (317)..(317): n is a, c, g, or t
  misc_feature (366)..(366): n is a, c, g, or t
  misc_feature (371)..(371): n is a, c, g, or t
  misc_feature (385)..(385): n is a, c, g, or t
  misc_feature (409)..(409): n is a, c, g, or t
  misc_feature (417)..(417): n is a, c, g, or t
  misc_feature (438)..(439): n is a, c, g, or t
  misc_feature (443)..(443): n is a, c, g, or t
tattcaagcacctttgttgaagctcaaaaaaaattgatgcctcattataaactattagcaatttataggagtatttatgtaactatcttatgcttcaaaaaacaaaagtatttgtgtgcatgtgtatataatatatatatatacatatcatatctatcacacatcacaatttatgtatacctgttgaatgtatttatcatgagattttacaccagacacaaaggcagataaacaggcattccatagcagagctttagatcacttacaaattttttgaataacacaaaatctcattctacctgcagtttaattggaangatgtgtgtgtgagagtatgtatgtgtgtgtgtgtgcgcgcgcacgcangcctngagcagtcagcatngcacctgctatggagaagggtatncctttatnaaaatcttcctcatttggatnngctntcagttggttttcaatttgctcactggccagagacatagatggcagttcttatctgcatcactaatcagctcctggattttttttttttttttccaaacatggggtttgacacacctacggggatttttggtccacaataacgcggagaagtttggttggtaagtatcgcctcaaatataactggactggtatactataggggaaactttccaaacacgcccttagcatttttatactatttaccccattggtcgcttagagtttctttaaaaaatgtttgttggtgaaagacacgagatacccagtattgcttaaggttgaagagaaatgtgtgtccgtgtttggtaagggaccttccaagtttttggttgtaaactcctgggaccagaggttgctgacttttaaaaaaatttattttatattataaggacctatttattactcggaagata

SEQ ID NO: 714644 - DNA, 378 bp, Homo sapiens
  misc_feature (363)..(363): n is a, c, g, or t
  misc_feature (373)..(373): n is a, c, g, or t
ttgggtgttttgcttatttgttttgagatggggtcttgctctgatgcccaggctgcagtacagtggcacaatcacagctcactgtggccttgacccccaaggctcaagacatcctcccatctcagctttctgagtagctgggaccacaggcatgcactaccacagtcaactaatttagtttttgtagagaccaggtctcactatgttgcccaggctggtctcaaactcctgggactaaagggatcctcctgcctcagcctccccaaagtgctgggattccagggagtggggccaccacacccagcctcggggaactctataaatcaacaagacagaaattcagacattttatttcaggttctngcaagtcttnttcat

SEQ ID NO: 714645 - DNA, 176 bp, Homo sapiens
ggaaaagctactactacgaaattcgcggcccgtcgacattagaagtccctaagttgggtattgtgagtccctaaggccgggcgcagtggctcatgcccgtaatcccagcactttgggaggctgaggtgggcggatcacgaggtcaggagtttgagaccaacctggccagcatagca

SEQ ID NO: 714646 - DNA, 248 bp, Homo sapiens
cagcctggccaacatggtgaaacctccgtctctattaaaaatacaaaaattagccgagagtggtggcatgcacctgtcatcccagctactcgggaggctgaggcaggagaatcgcttgaacccgggaggcagaggttgcagtgagccgagatcgcgccactgcactccaacctgggtgacagactctgtcttcaaaacaaaacaaacaaacaaaaagattttattaaagatattttgttaactcagta

SEQ ID NO: 714647 - DNA, 295 bp, Homo sapiens
  misc_feature (236)..(236): n is a, c, g, or t
tggagactgagtttcgctttttcacctaggcgggagatcagtgacctgatctcagcttacggcaacctctgccctgggggttcaagtgattctccggcctcagcctctcgagtaacggggattatgggtgcgcgccaccacactgggctaattttggtattattagtagagagggggttccagcatgtgggctaggccggtctctcctgacctcagggtgatcagcccacctgggnctcacaaagtgcggggattacgggcgtgagccaccttgcccagccaacgggggactagg

SEQ ID NO: 714648 - DNA, 344 bp, Homo sapiens
  misc_feature (250)..(250): n is a, c, g, or t
gatgtaggcgtatgggtgttcattggcgataccggcgctgaggccttggctacgacccttttccagcaggcccgcggctagggccgaggaggacggggctaggttcaagagcacgctggcgcacagcgggccggcaacgacagggacttgatagcgttcatggaggacctggagagaatggaaaggggtgccagacagttaagccgaatacatgaccgcgtagcgccggcttgctggcgaagaggtccgntgagacgctaaaagcttcgcgggcaagccctgctcctacaggttaggtggcatttttgagatcccatttccttaactgactggcaccggcgaca

SEQ ID NO: 714649 - DNA, 680 bp, Homo sapiens
cctgaagatgtggcgacgaggctaagagatcgttgtgacataaccactgtcttagtgatgagagtgtgaggagggtaggagatagaaaggtatgggggcaacaaaagctctgggggcccatatgtgacctgggcacgcggacaagatgctatccacgattgtgggacacttggctgagtaaagtcggttgccacgtgaggccagtagctgtgatgaggtaacaatacagtgataagttgacaaatccacattggcagtacatttgggggacctcaaaactcgataggacgcgaactccggcgtcgattgtagccacaattgtggggctttcccagtaactgtggccaagtggccgggaacttagttgtcgggcgtcacggtgcctttaggcaggccaccggcccttctccaaagtcacttgggcggtttccccactcggaagggaaaacaaggggtgtggcaactcccgataaaccaaagtttttaaaaacaccaggaaataagttctctccctatccattgggcgccacgtcccaaactctatgttttgctggaccggccaggagtgggatcccagtgcagttccccttggactcctttgggataaggacccacaaaggaccggaccgtggttcagcgggcggaatcaccgacaccctccctattagggcacgaaatac

SEQ ID NO: 714650 - DNA, 751 bp, Homo sapiens
gctgtccagtgtgagcccgacccgagctccagtagttccgcccgctggtcatcgcgccctttcccctgccggtgtcctgctcgccgtccccgccatgctgtctctagacttttctggacgatgtgcggccggatgaaccaagccggcagctcttattatctcagtctccataatttttgggcaatagtagattgggtctctattcgggcactagttgatctggcaaggggttaagatgggtaataactggaagtgaaagtccgattgtaggtgggtgctcagtggcagcatggaacctgcatttcatagaggagatcttctctttctaacaaatcgagttgaagatcccatacgagtgggagaaatgttgtttcctacggatagcaaggaagagagattcctatagttcaccgagtcttgacaagattcatgaaaagcaaaagtgggcatatcaagtttttgaccaaaggagataataatgcggttgatgaccgaggcctctataaacaaggacaacattggctagagaaaaacagatgttgtggggagagccagggatttgtttccttatattggaattgtgacgatcctcatgaatgactatcctaaatttaagtatgcagttctcttttgctgggtttattcgtgctggttcatcgtgagtaagacctgcgtgctgtctgggaagatgccatagtttcgtactggcggtggagccatactggctggattggcggactggcgaacaccg

SEQ ID NO: 714651 - DNA, 1032 bp, Homo sapiens
  misc_feature (6)..(6): n is a, c, g, or t
  misc_feature (279)..(279): n is a, c, g, or t
  misc_feature (301)..(301): n is a, c, g, or t
  misc_feature (346)..(346): n is a, c, g, or t
  misc_feature (375)..(375): n is a, c, g, or t
  misc_feature (379)..(379): n is a, c, g, or t
  misc_feature (448)..(448): n is a, c, g, or t
  misc_feature (455)..(455): n is a, c, g, or t
  misc_feature (457)..(459): n is a, c, g, or t
  misc_feature (581)..(581): n is a, c, g, or t
  misc_feature (607)..(607): n is a, c, g, or t
  misc_feature (663)..(663): n is a, c, g, or t
  misc_feature (692)..(692): n is a, c, g, or t
  misc_feature (712)..(712): n is a, c, g, or t
  misc_feature (758)..(758): n is a, c, g, or t
  misc_feature (777)..(777): n is a, c, g, or t
  misc_feature (779)..(779): n is a, c, g, or t
  misc_feature (797)..(797): n is a, c, g, or t
  misc_feature (870)..(870): n is a, c, g, or t
  misc_feature (872)..(872): n is a, c, g, or t
  misc_feature (874)..(874): n is a, c, g, or t
  misc_feature (878)..(878): n is a, c, g, or t
  misc_feature (886)..(886): n is a, c, g, or t
  misc_feature (949)..(949): n is a, c, g, or t
  misc_feature (963)..(963): n is a, c, g, or t
  misc_feature (1029)..(1029): n is a, c, g, or t
ccgcanaacttcatactttctcaaaagaattcacatttgctaaataaatttctaccctaaagaattcatagctgaaaaaccacttcaatatatgcacaaaagtgacttttctgctaaaggaaccatagtagaaaataaaaagtcagaaaatactataatcaataaaaaccaatgagtctaataaattacaaatgtcattaaattccattcccataaccattgcaattagcaacttttctatatatatttcaataatgccaacaaaatctgccaaaagtnctcttaagggttgccctgagcnaaaaatggcttctcaccttcagaaaacagcagccctgccacagtncttcatagccaattacgtcattcatcgcnaaanccatcactacttacagccttgggcagccgatggagagctttctggtcacctccgaggttcctccatttnctgaccncnnntctggactcaatggatctctccttccaagagctatctgctctacttgggttcatctgcttacagctccaacagagaacaaatgctcatggtaatagcctggagagacttctagcactaagtnacaagattagaaaagagctgagagtngtgctgcttctccctgccactcagcagtgaggattgatagtcgctttcatcatctnttactgacacagggagggaaatgcaagcnttaatctaggaagaagagtncaagaggcttatagctccacagagggtatttccaatggaataaatnttggttctcagcaagtgtntncagattattgacacagtnagactcatgactagtgcgcaggatgtactgaatgcacctgtctctatagctttgctgcgaaacatatactgcnananaggnagcgtccnagcatggtgcacagagtagagctgctatagtacacacagattcaggggaggcaagagagtcgncaagagaatatatnaaaggagctgatctgcctaagacacattgctctcattctgagatcttcagaagcaaaagcaggtanatc

SEQ ID NO: 714652 - DNA, 237 bp, Homo sapiens
aaagagagagagaccctgtctcttaaaaaagaaaaaaaaaagcaagctgttttctatctatagtggatatacaattatacattcccaccagcaatgtataaaagttcaagtttctccaagtccctggcagcatttagtgttacagtttttttaattttaactatctaacaggtaagtagtgatatctacggtgatttcaatttgcattggcgatgtctaataatgttgacagtgtcc

SEQ ID NO: 714653 - DNA, 92 bp, Homo sapiens
aaaaaaaattttttccccttggggggggggggttttttaaattcctaaaattaaccccccttttttttggtggaaaaataaaagttttttta

SEQ ID NO: 714654 - DNA, 1795 bp, Homo sapiens
cggtctggctggtgtgctggttggttctggtcggcgtgtttgggagtacgcacggttgttggttgcgtgtgtctgtgttcgtgtggcggtgtgtgttgtgctccggtggggtgtctgttggtgttctacttgtgggtgtgtgtggtactctgcttgtggtggttgtggccccatgttgtgtggtctcgtcatgtcctcggttggtgtgctcgccccgcggtcgggtaatgttgggcgggtgcctgttgcttgtgttggttgtggtggtgaacataagagatggtggttgtcagcggggttctcttccctcccgttgtgtgtggttgcttgtgtgttgctttctcaagggatggggcaactgtgttgtctatgcgcctttggggtgggtctctttctccgttgatgtttcctattgttgggccgtgtcttggtgggtatgcaccgcgtggcctttggggcacgcccactggtggacaaggtgttcaaggggtgtttttcgcccagtcctcctggtggggctttcgtgttcgtctcttgggtctagttttccctgggagggcgttcctgcccccgagatggttgtgtgctcctctaaatcgtgtgctgttataagtgtttgttgccagaggggggtagtcgattgtcctgctccaggagtttgtgtaattcaatatggggaagtggttctccactagtgagcaaccagccatgtgtgcccacaagggggtgttgtgcgtctgttgtattatagaataggtagggtaggatagtagtgtagttcgtatcaccaccaggggggatggggaagttctcccgtgagagaggttgatgtgttgccgcagtgcggtcccagggacttcgcccccccgtatttctacagggggggggggtaaccaacagctcagtttgtggtgtgtggggctactaatatggcactaggctgcggacatgctgctgctagactcaagcaccctatgtgttgtgctttgatgcagagggtaccccacgtgtggggggggttggggaccacccctctctgcgtagcgcccccgccgagatttatggctccctgtgatggtatcgtccccagcgtgctgggcctaaggggtggtttgccgcgcccacgcccacgtgtgccgtggtggcgcacccccgctggcggtcccagagttcctcggtcgttatagcgagggtctcacacacgagggcgccccccctgggcgctcgcacacacaggggagagagcctgtggggcgccaccgccgctggtgttctgtctcgctctgcgcgcatcgagaggagctatttgcgcttctcaccacacacaaagtgggttcaccccgtggctccagcagtgtgccacactcgctcgtctaacacccacacggcttctgtcacacttgcgtggacaacaaacacgcgggagcgtgtcttcgtagctggggccctcgggttgggataccgcggcgaatcccctgcgtggaagaaccccgcgtgacgatggaccatcctgccacgcgatgaggggatccccgttttcacagcaataccgctgcatgtgcgtcaattgtttgcagtttgcttccatttcacaatgatcgatcacgtgacctggggggaaggggaaggacgcacccccgtcagccccccctgaacactgcacccaaatgccctgtgcttttgctcccccctttgttatgtaagccaatgctgtataatgagcaccaaaatccaccctgcacccacctaaggcaaagccccttctaccacccaaacaaaaattactaaaataaac

SEQ ID NO: 714655 - DNA, 943 bp, Homo sapiens
ggcagacactgaccattcagacgcctcggatccagctgccatggctgccctccatgtgaagttcttctgttgtgtgtgtgaaacttgtgaagatgaactgtgtgctgtgacagcagagtcatgggggagctcatctgtgcactctgaactgctggccaaggttgcctggactgaaacacgcaggttggaatacgatgacatacaccccatcacatgccatatactcgagcatatcgacacacgggacagaaaagctacataatccacaatgatatggcatgtgagacttgacgacagacaaacatggcataccaaactgtgtacaaaaaatggagggccaaacgacagccatgagcgagaaagacatcaacgccaccatggccaactggacagcaaaagaggacactgcaaggaagcacaaacgagtgagcgatgagatcacaatggagaagaaaacatcaaagacgcacagcaccagagacaagttgctacatcagggagagaaagcaacaacagaacttggcaaggccgtggacctctcgggacgcacacaggacaaccaggacgaggcaccccagtacgacatccattgcgacaaaaacacaggggcaacttcacgccacaaaaaaacactcaagacccatgaacactacgcggtggacagcacactccgacacacaacactgaacaacgggggaacacagaactgggcacgagctcacacccgtcgcacagaaacagggtatcgtgatacacaccagaccgcaggcacaccaaaagggatcacgtacgcaccggcagtacaaccgatgaccccgcggcaccgttggaacgcaaccaggcgcaccagcccacatggcgccctacctaacggccacagatgaatgagacgccaaatcggggagaacctgtgagccgacatgaaatggcacacggagacccc

SEQ ID NO: 714656 - DNA, 345 bp, Homo sapiens
gtcgacgaaaaggaatatcacagagcagacagccctgcctctttctagaggtcagagtcagaaagtaaaaggccaggcacagtggctcgtatctgtaatcccagcactttgggaggccgaggctggtggatcacctgaggtcaggagttcgagaccaacctggccaacatggcgaaacctcatctctgctaaaattacaaaaattagccgggcgtggtggtgcgcacctgtagtcccagctacttgggaagttgaggcaggagaattgcttgaacctgggaggcggaggttgcagtgagctgagatcacgccaccgcactccagcctgggcgacagagcgagact

SEQ ID NO: 714657 - DNA, 190 bp, Homo sapiens
caattttctcggtattatgcctattgtctaatatcgaagaggaatgatacgcatatgaatggactcggtggtatgtctatacagtctatacctagatcactcacttcgcatctatttctctcggatattatgacactatatgtcctaatatcagaagagaatgatgcgcattgaatggatctcggtggat

SEQ ID NO: 714658 - DNA, 446 bp, Homo sapiens
  misc_feature (254)..(254): n is a, c, g, or t
aaagaggaggcggcccggaggaaacaggaacaagaagcagcaaagctggccaagatgaagattccccccagtgagatgttcttgtcagaaaccgacaaatactccaagtttgatgaaaatggtctgcccacacatgacatggagggcaaagagctcagcaaagggcaagccaagaagctgaagaagctcttttaggctcaggagaagctctacaaggaatatctgcagatggcccagaatggaagcttccagtnagggggcacaggcctcacttttttaaccattgtggactagtggctgctgaaaaaaacagtgaccatgttctaacaaaacatatcatgtttacaataaaccttgggtcctaaattaagagttgtgttcatgtaggttcgtgtcgtcgttggctctgagacattgataataaatttttctcaacagtgaaaaaa

SEQ ID NO: 714659 - DNA, 1130 bp, Homo sapiens
tagccggttgtggtggtgcacgcctgtagttgcagctatttaggaggctgaggcaggaggatcactggaacccgagaggcagaagttgcagtgagctgagattgtgccacggcactccagcttgggcaacagagccagacgtccatcttaaaaaaaacaaaaacaaaaaggagggacaagaggccaccagaaagctccttgttccaggtctgggcctcccctcgggtcacctcagttctcccccattcattccattcatttcacctcacttcacttccacctcacctcatttcccacactctcttgcagccccttgacttctcagctaagccattgcctggactcgctaacgacattacgacgctcccccggccactcaagggccagttcccactctccgaggtggcctctctcagaactttggcacccgggagtatgcacccccggggagccccctctaaaggcgcccccgccacgacaggccaccaccccctgcgcctcctctgtatcccctctttcctggggcgcctgcccttcgcaccggcagcgggcccccccgcgcctgctgtgccccccttgccacgcgccctcggggctcacccggcgcgcccttggcgccaggggccctctccagcgcgcgcccattcccccagggggcgccccgcgcccaccaccacacgctcgccagggcccctcctggcccgggcgccccacaccccctcaccgggcggcagcagcccaaccgtggcgccgtgcgccagcgcgtcgtgccccctgtgcggcacctctggcccagggggcttgtgttgggcccccggcgcgtcgtcacactgcccccccccgcgcctctcctcttccacggcgcggcgccaccccacgccccccgtgcggggcaacaccacacccgcgcacctcctctccaggccgcggcccccacctctcgccgcctctcttgcttggcgggccccccccgtggcaccccatgtcgtcaccgttgtgccttcccccaagtctttggcgccccccccctcttctgggcgtgcccctcaccacgccggtgtgacgcgcccttccccgcgcccccgtggtacctctctcacctgtggcgccacccccctgtcccgccgcgc

SEQ ID NO: 714660 - DNA, 290 bp, Homo sapiens
gtttacatcacaccacaagagggatgtaccatatatggtatgagagatactggtgtaatgataagagaatataaaatgatagaattgaagtcatggtcccacacctgcataaaagtaaattccagtattaaatgttaaaaacgagagagcgagagaaaaaaattagatgtatgtgtgttttacgtccttgagaatgaatgtcttctaaaatcaaaattatcaaacagaagagcttataaaaaggaataaacctaacgtacctaaaatgtaatttctagtgcccatttcaa

SEQ ID NO: 714661 - DNA, 129 bp, Homo sapiens
catcctctcccagtcgagcaatcacctgtgcctcccctccccctttttttgcccctgtgtggttggtcaaggagggatgtgaagggaaatagggaccccccgagcttgtccctcctgcctcagtctttc

SEQ ID NO: 714662 - DNA, 1374 bp, Homo sapiens
  misc_feature (546)..(546): n is a, c, g, or t
gggactgttctatgcatctggactggaccagattaagttcacgcagagtgctctgtagtgcatgagtgtggaggtagagacggtctgcttgtcccttcttgcgtgctggaggtcagcgaggatacagatattgccctcgctgcctccgggatcgggaaaagcttgcattgacatgtgacgatctctgtcgagtcactagtcgagatgatacgatactcgaatggtcgaatagcctagggcatcatggatgctcctgggatcccacgctgctctgggctattggagcacatggttatctagactacgctcctaggactgcctgtgacaacatctccggacggtggggctccgcaggcctgttgctagcgatggatgggtgggctacgactcgcctgacttgctcctagttgcaggttgggcgcgcatcgtggcaggcatcacatgacgggggccttagccttggtggggctcgcttcgtggaagggcaacctagggcttatccagaaggccacaggcgatgcacaaatcttagtcgggagtccactntctcgattcagtcccgctactgaaggttgtcatggagcccaaagtcaagctgtctgatgaatccggtcgaagtcacgtgtacgcaatgggaaacaaaagctttgagacgattttgccttgttgccagggcaagagagggatgctattaatttttccaagaaggaagggtggccgcgcaagcaaccgcacgtctctcacgggctttggaacgatggtgggggcatgcctggtcgcgtgtcggtggccaagaggacgcgatcaagtctcgcctgaaatggggccgtggggggtgttcgaaaggtaatccagttcacccacctccgacggatgaacgacgttccttgtaacggaacgttgtgcacgggaacccttggatcattccagaagtagagggcgggcagccccggggtgctgttacatggctcgcaccgccctcccattgaatgtacgcgtcatggcaaatcataactgtgcttagactattccctgtttggcgacccgtgtagtacttgacccaacagggaattgtccgagcaatgtcaacggccgcccattctgcagaaaaatggttccccggcaacttccgtgacttgggaagggagtagacccgaggggacatattggcttgtctgaaaaaggcaaggcgaccgacacggacagtttccgcgagcggtgcacctctatgcggtctgcccctttctctagggctcagcaaccatgttggtgtgcccaagactttgggaaggcgggcgaccccaccgtggcaggacaagctcaacagggccacgacagttttgggaaaaaagcgccggggtggcaaaaacgccg

SEQ ID NO: 714663 - DNA, 923 bp, Homo sapiens
gccgggaggacgcagctcccaccaagccagctcccccagccccaccgccaccgcaaaactgcagccggagagcgacgcccctcagcagcctggcagcagcccccggggcaagagcaggagcccggcaccccccgccgacaaggaggcagagaagcctgtgttcttcccagccttcgcagccgaggcccagaagctgcctggggaccccccttgctggacttccgggctgcccttgcccgtgcccttctgcgtgaggtgatcaagtgctcgccgcatgtccgcggacccctcagccttctcctacgctccatctggtcacccactgacccctggggctccatgtagagctgcccgtgccgtcctgtctggcacgcatcatctccgagacctggcttccctcatctcctctggcaagcaccccagctgtgctctgagaggcaagatagggttgcatctcccaaggaatgtctggtccaggctccacgttcccgtactcagagcatgccaaggaccccggtgggccctgtcaccatggtggctgccctgcccatggaccccataaagctggcatcgcttcagcggagtgaagcatggagcagttgtcccacggggacaggtgggctaccggagagtctgtggggtgccacatgccaggagggtctgtgttgagaggaaaaggtctgggatcaggttcagggggaaggatacggaaaggtgttccaagtacaaggttgcctcggatagggcatactatcggggtcttttacccagggaagcacgtgaagtctggcaggggcagtaacagggtatgagaggaagacacgtgttgacgggcggaagaagtgcgaggcatttatatggaaagcagttgtaagagagggggttttacttgcatgtgaggtatgttacctctgaagagcaga

SEQ ID NO: 714664 - DNA, 456 bp, Homo sapiens
cctaggactagcaacatagtgtatggaagagagcatagacaactgcaagttcagatattaatctgtatcacaaggttattcgattgggtcatagctatagggagtaagagatccccccccacctcagcgctccatccacacacatcaggtgccccccccacacccttacatccatctgcccactcagcacagtcaagtcggggtagatacagcgttatggagaacacacacccaaagcaggagataaaaaggccagggttatgaccatagtttactaggctaatcttttttacatttcctaggtattaatgctcacacctccttatagcctaggaagaaagtgaatgcaggaggccttcttttcatagcctttgtagtattgtctaccttcctttcccttcctccacacctttcctactactccgcagcccccccccccccccgcacccccccccc

SEQ ID NO: 714665 - DNA, 1002 bp, Homo sapiens
gaagggacccttacccccggctcttctcctgacctgccaataaaaatttatggtccaagtgaaaaaaaaaaaaaaaaaaaaaaaaaaaacatttggggccgcctggccggaaaaatttttaaaaccttggctggggcgccgcgggccccgtgatagctaatgtcgacactgggtcgcataagccgtgtttccatagaagagacaacccgtggccacgcaacccgatggctcggctctctccccccaatataaaagagcgccgggggggggtaacccggcaggcgtgtctggaacaaactcccaagaaggatgctgggaagcgacacatacggcgatctttacaacacgcggtggtcacacggacagttcaaaatatgaaaattacccccgcgtcgggtgcgtattattgatccggactactatataaggtggcctagtgcatcaaaatggtccccaaatgcaaggcatacgcgacacagcgacacactggcgtacgacgcctgctgggaccatccattagtaacccaagtcctgaccagaaccctcgttcgagagggaacgcagcgaagcaaaccctaatcagtacagggcaccctgtacgggagcaagccatgcaagccaacatcatgcttcaaacgaccaccacgcacgcccttcattcacatcaaatgcagcagagctgtgataactcaggacgcacaaaaacaccaaatagaccaaccgcgcacctctagccacgcaccaacgcaccgccagtaggcagtgccagccaaaactaccgcccgccaaaaaggtcatcaccgctcactagaatccggcgcaccgtccacaccgggcatcaagggacagcacaacagcgaaccaccgccacggccacgagcgcgcccacgacccacccccgcgccaaccccacacgacaggagcggaacacacacaacacgcaacaacacagcacacccaccacacaccccacaacaagcaccacacaccccgcccaccaac

SEQ ID NO: 714666 - DNA, 235 bp, Homo sapiens
agagttcccaagcttacgaggatcatgccactccttacaggtctgcaaagtttctgctgaaatgtttcagttgatagccttttgggtatttccttgtgtatgattctttgtttttctcatgcttcctttaggattctctctttaacttttgccatttaattgtgatatgtcttggtataggtatgtttgggttcatcttgtttgggacccctcgtaagcttgggatcctctgatc

SEQ ID NO: 714667 - DNA, 344 bp, Homo sapiens
  misc_feature (69)..(69): n is a, c, g, or t
  misc_feature (116)..(116): n is a, c, g, or t
  misc_feature (119)..(119): n is a, c, g, or t
  misc_feature (151)..(151): n is a, c, g, or t
  misc_feature (156)..(156): n is a, c, g, or t
  misc_feature (183)..(183): n is a, c, g, or t
  misc_feature (190)..(190): n is a, c, g, or t
  misc_feature (195)..(195): n is a, c, g, or t
  misc_feature (199)..(199): n is a, c, g, or t
caataaagccctacccagtgaactttggggatttttgagatcagggtcctaccaagaccccagcccaantcaagttacagcagcagcatttcccaagcctgttgaccccagtcacntcncccatcagcacatggaaggcccctggtatggnccctnaaaggaagggctggtcctgcccctttnagggggngcaancatnattgggccctaaaacccaaaggctgtgtaaaggctcctgctccccctcccatttttgtaaaaaatggggttgctccagtgttggagtaggggcaaagggagggacccaaggtccctccaataaaacaagctcatggcaaaaccca

SEQ ID NO: 714668 - DNA, 961 bp, Homo sapiens
tcttcaacttgggatattttatggaaaaaagtacacaaaaaccactgaggtacacaagcccaggtaagcttaccaagcaagccccctcacaccttttggtctgaaaaaagcttgacttcttggcagcaattgtctcgcccatctccagcagcagtactcctcagtataactgggtccctttccctccaggctcaaaacaaaatcaaactctcccggggtcaggggctggatggataatctcgtggcgagtgaagagacaccatatttttaagggggcccaccagtagcttggtgacgcttgatgataggattggacgctcagccagggggaatgaacacgtttcatcatccgaacaaactgtacttccaccatgggacccacttagggttgctcctcttggctacacagtgggtcataaggggggcactggttttccctcaaaacgtgtgttgtgcgctcggggtaacgccctcttccacgactcttcctgagtcctgacgaatgccgtggctctttgccgttgctacggggtacccaaacagagagccttctttctcccccagacttcagaggggcctctaaagggaacgttcccaagccgtggtataagtctacgaaacaaccattcccaagctatgtgtgccttgtatggggcctagacgcattgagagaacccctccaattgcttgaaacatctgccccatttcttaccacccgttttctctctagaggcgggacccctcctggggccttcctgaaagtttcagctcacggcccacagaggggcttggcttttcagcaattccttttgccacaccaggttttataggtgacgcttcgaaggtcttactcgaaagggggtctggaggccccccactttgatgcgtaaatggcctcaccccgtgatggtccaggtatgggggccgttccccgaaatataccccctggtatggcagacca

SEQ ID NO: 714669 - DNA, 330 bp, Homo sapiens
gtttccatttatcccctcatgaaaacaacaatttggaaaaccattcaaggccaggtgtggtggctcacgcctataatcccagcactttgggaggctgaggcagcagatcacttgaggtcaggagttcaagaccagcctggccaacatggtgaaaccccatctccactaaaaatacaaaacttagccaggcatggtggtgcccacctgtaatcccagctactttggaggctgaggcaggagaatcacttgaacctgggaggtggaaattgcagtgagccaagatcgtgccactgtactccaacctaggtgacagagcaagactccttctca

SEQ ID NO: 714670 - DNA, 842 bp, Homo sapiens
  misc_feature (248)..(248): n is a, c, g, or t
  misc_feature (252)..(252): n is a, c, g, or t
  misc_feature (598)..(598): n is a, c, g, or t
  misc_feature (601)..(602): n is a, c, g, or t
  misc_feature (698)..(698): n is a, c, g, or t
  misc_feature (709)..(709): n is a, c, g, or t
  misc_feature (716)..(716): n is a, c, g, or t
  misc_feature (728)..(728): n is a, c, g, or t
  misc_feature (735)..(735): n is a, c, g, or t
  misc_feature (738)..(738): n is a, c, g, or t
  misc_feature (745)..(745): n is a, c, g, or t
  misc_feature (749)..(749): n is a, c, g, or t
ttttgaatattaaatgagatagccattaatagattaatgtataagtgtctgaaatgtattagcacttaacaaacattaatgctctctcttccatctaatcacatgcacacatgcccacgcacacacacacacacatacacacacacacaagtggctttaatcagtaacagaaagtgaaatgttgatgaatcctagttttttttaattgcaaagtgtgtgaaagccaagcatacttgcagaaactgganattntttttatttactcagagacaatactgactttaaagaaaacaaaatatctaaactaacaatggaagcataaacatcgccctcaatgatggtcattgtggtgtccctgtcttcagacagtggccacctctgtgctttaacctggaccaaagcctctgaattctgccgcccttaatggtgacaggcacctgcaggatagcctaagtccccaacaccagcatggcctccaggttttggcgacaagattcctctcatcagcatgtctgcaacgctcctttctcttaggagatatgttgactcattatacctattttaataaaaaggcaaatttaagccttaatttgtattntannataaattattttaaggcatggacccactagggaattagttacaaatggtttttagtggtacacatttaatgaacatttaaccaaagaaagaaaatngctggtatgcntaattcntttttttaaccngctggtnttnaatccantcgnccttctctttaacacttggcttaaaccctttttcggggtgggcactcccggggtcccttggttaacaggttgccctcttttcttcccaggggt

SEQ ID NO: 714671 - DNA, 134 bp, Homo sapiens
gaggcaggttcgtcctcaaggcattgttctcagccaaaagccttccacttgtcctgtgcatctgcactctggatggatacctgatcttgtagggcccgcaaagctgctgcatgttccaggcgctccccctgccg

SEQ ID NO: 714672 - DNA, 181 bp, Homo sapiens
  misc_feature (114)..(114): n is a, c, g, or t
gggctggggaacccccttattcctggcttacttactgcagaacgggaaggaaatgcttgtagatcgctataggagcctctgcaataggctgtcccggagttaacccggtacccncctttgcacagtatgcacggaaacaagaccttgaagggggataaggacttaggcccagtactaccgc

SEQ ID NO: 714673 - DNA, 662 bp, Homo sapiens
cacgcgtcgtctagatcgcgagccggccgcctttggggtttttttcaccttttattatgattttattatatactctctttaactagaatttggcaaggtaaaatatggaactaagacccaacttatatttttcctaagttcctaccccataggaccaggtctattattgaacaattggcttgatgcacaattaatccgtgactcaataaaatactttacacaagactaaggcagtgtttagtggtattcctataaaactataaaaaattaagattcccacagatggaccctcccccccttagactatcatatacaactgggggactctactgggtacagactgacaacaaaatgggtcaaaacactagtatactacacacacatatacgtgctagacacagtgcgcgaggttcgacagtataatactatatgtaggcaccaatgggagggtacaaggggatgacggatatgacatactcacctattttggggaaaacaaacaacaggtgtgggcaatcatccaattttacaatgtggtgatacaatatacacacaaacctcctcttgccaaaccctcttgtgaggtctcgatgggccacagtccaacctttccccgtggaaacaagcaacgtgggtcactagggggcaacacatgttgagac

SEQ ID NO: 714674 - DNA, 126 bp, Homo sapiens
  misc_feature (1)..(1): n is a, c, g, or t
natactgttggttctaaactaaaccatctgcagatgcaaccattgtttctgctaaatccaatacatccgccccaacatattgacactagcagcagcagcaggcaaacaaatagtcagcacgcaggg

SEQ ID NO: 714675 - DNA, 192 bp, Homo sapiens
tttttttcccgggggggggggggggaccccccctccccgggatatttttttggggaaccccgaaaagaaacccccccccttttttaatttgggtttttaaaaaaaaaaaacttttttggagcccccccgggggggttttcccggggggtgcccccttttaaaaagggaaaaaaaaaaaaaattttttgggga

SEQ ID NO: 714676 - DNA, 366 bp, Homo sapiens
ttacgaagtgaataaggctgtcatagtctcagagccctccagaattggatgtattttggagattattaatttcagttctccctaattaccctgataaagaaatggaggtttaggtaagttaagtgatggcatgttttgtgtcctttataatcttttgagtcaataataaggtgattacaacacacaaatgaacattattaggcaattaaatattattaggtaattgaagctttattaataaattttacttaaaatcaatgctttgttctacttaacacagtttttccttacttaagtatgcctgtttttcctttgtctgcaaactcaacaaatctggtttagacaatagattcttacacacaaaaa

SEQ ID NO: 714677 - DNA, 821 bp, Homo sapiens
  misc_feature (629)..(629): n is a, c, g, or t
tccttggttttccccccgcgttcacaggcgcaggttttcccctttcgatcttgacacaccacagtgtgttggcgttctctcgcgtcatcccccgtggggcccctactccccgttgtggccccaaatcgggaaaactttatttgggggggccactcagggaggtcccccaccatgcgggggatctccacttttggctccccacccaacgctgctgttccccgcgtgttccccccttctctctcataggggtgtggtccgctccaccccactgtctcggtgattgcttaatagagacattccgcaaaaacagataccctcgggttgtcaacaagatcatgaccacggcggtgaacacccccggatacagtgtgtacaacgtgacagggagtcgcacaactcacaaagtgagaagaacactgcaggggggtaagcctctacaccccccgagagccaggcccccccccccccagagaccgactttgtagaagctggggtcctaccgccacagacaaaagtccccccatgggagcgaactcagtcgtcgcctcacccgcggcagtaccccacaacatctggtggcgtcatgtgcaaaaacgtgacctgacccacagcggacgacagcttcttcntctccccgccggagaaaacgggtgtccccccccaaccccgcccagcacaaagcaggagacacctcaaatccaggcgggcccaccagccgaggagccgggcagccaacagcggcacgaccgcggtcagacagacgatccagacgacgtcctgtgacccgcgtaaaacaatttgacccggcccccacaagcaca

SEQ ID NO: 714678 - DNA, 755 bp, Homo sapiens
  misc_feature (279)..(279): n is a, c, g, or t
  misc_feature (303)..(303): n is a, c, g, or t
  misc_feature (306)..(306): n is a, c, g, or t
  misc_feature (332)..(332): n is a, c, g, or t
  misc_feature (335)..(335): n is a, c, g, or t
  misc_feature (370)..(370): n is a, c, g, or t
  misc_feature (421)..(421): n is a, c, g, or t
  misc_feature (449)..(450): n is a, c, g, or t
  misc_feature (460)..(460): n is a, c, g, or t
  misc_feature (472)..(472): n is a, c, g, or t
  misc_feature (476)..(476): n is a, c, g, or t
  misc_feature (515)..(515): n is a, c, g, or t
  misc_feature (521)..(521): n is a, c, g, or t
  misc_feature (528)..(528): n is a, c, g, or t
cacctggtattatttttcttactggaaaagttagtattaaaatctacagaactacatattgtgcctccttggtaaatacaacacatctaattaaatgtagacagatatttcaaacatcagctgaattcacttaagtttttccaaaacctcagttaaactgtgaagctatggaatttttttttcctggaatttttcccctttgattcacagtggtcccatttatatctgcttctagcttagtgctatgtgtgagatatgtgtgtgtcgggtttgtttttngttttttttttttaaaggttggcnaanttaaaaggggccagaaaaattgggcnccnggcaaacgaataaagataggatggggaaagaagtngctaagtgtgcttagtttaataagtaattccttctctttttcagagaaggncttacagaaaatggtggtgcttagaatnngggatgcatntttaccctccanaaanctaaaaattgtgtgacccctttcatttacctgaaaagtngagaantggttcngataggataaggagggaggtggccgaatgaaatgtaattttttacctaatataattaattgagggaagatacgactcagattatcaggcttgaatccctgtgtgcggtaagttgatccacctggggaggggttccataattttgaacaaagaaaaaaaaaattgtgggggcaaaataaagtggggggaaagaaggaaggttaagaaaggtgcaaagggggacagagt

SEQ ID NO: 714679 - DNA, 124 bp, Homo sapiens
gataatcagacagcagtgggcaagattacacttgcaagacgtctggaatgaggaggcttttatcctcatggtcctgtaacttcactatttgaaaagctaagtgtgagggacctagagttggaat

SEQ ID NO: 714680 - DNA, 210 bp, Homo sapiens
caacgccgatgggtccttgtccctaacgccattactccattctttgtgtagtttttagattccagagctggcatcaattttggcatttgactagctctgctatttttcaagcccacctcaggatgtattcatgctcttgttaaataaaatatagtttagtagaataggaaaatattttctgtaaaaatatcactccacccatcgcgtgtg

SEQ ID NO: 714681 - DNA, 321 bp, Homo sapiens
ctggccagccctttacatagccccagtgaaaccaatgccggaatctgacacggtcattacccaaataaaaacctaaagtcccgcaaagccttctgacaactctccaagcccatgccgtcgcgaggacacagaccacaccagccatcccttcgcccccacccacgagccaacccaccgcgaccacatcttgccctccagcaccatgcaccgcattctgtaccatccccccaaaagcctcgatcaaattacgagttttaatactcaaagtcatttatatcgtgtccctaaagcatatacaacaaatgtacgtatcactcagga

SEQ ID NO: 714682 - DNA, 609 bp, Homo sapiens
gtagaaattgaacctggccgccatagatatagtccccccagggaagatggaaaattatgaacccagcattatatagccaggctaacccctataccttcgggcataatgagattgaactagagaataactttgcacaggagagcccaagcttagacccccgaacccgacgagctacctaagacagcttaaagagcacacccgtctatgtagccaaatagtgggaagatttataggtagaggcgaccaaacctaccgagcctggtgatagctggttgtcccagatagaatcttagttccactttaaatttgccccccagaaccctctaaatccccttgtaaatttaactgttagtcccaagaggaacagctctttggacaactaggaaaaaaccttgtagagagagtataaaaatttgacacccctagtaggccttaaagccgccccccattaagaaagcgttcaagctcaacactcactacctgtaaaaatccccaacatataactggactcctcacaccccattggacccatctatcaccctatagaagaactaatgttagtataagtaacatgaaaacattttcctccgcataagcctgcgtcagata

SEQ ID NO: 714683 - DNA, 263 bp, Homo sapiens
gacctacttacggaactagaaaatataaggaggagcaagaaaaactagaacattcatttgcagagatgccaactgaactaggggcagtaaaaaccagaatgaataatgcagaagaacgaatcagtgatatggaagatagactaatggaaatcactcaatccggtcaacagacagaaaaccgaatcaaaaaaactggcaaagcaatatcaagagacctcatggagatcaatcataacagcaggcctaatctcacgctataatca

SEQ ID NO: 714684 - DNA, 111 bp, Homo sapiens
cttcacgcaggctcagccactccaatctagtgcatttaggacgacaccttacactggactcagctgtttaatcttggatgccctcgacccatctagaagtcggtgcggggt

SEQ ID NO: 714685 - DNA, 1841 bp, Homo sapiens
  misc_feature (1210)..(1210): n is a, c, g, or t
ggcgccggggcggcgcgggtgggctgtgtgactagtgagtcgatgttagtgtgtctgtttggtttgggatgtggtgccgtgtcgtctgtcgtgctatacgtgctgggcgtgtggcttgctcttctgttgttcgtggttcgatcggatcgtctgtcgctgcttgctgtctgtctcttgggtctgtcgagtgtgcggcgtgtttgcttgtaccgaccgcgggtggggccctgttgctctgggggtcccacggtgggtgccacacggcgcggtttttgctcgccgccccgttgtatgtcgtcggtttcttatgtttatgtagactccctctgtgggctgccgatttttgccgcacacgaggggttctgcttgtgggcgcgggttggttgggtgtagttgcagctttctgtacagatctcgcgtggtttttttctctgcgggatatccgtagattgcgggtctcgctgctggtctctgagaatagttggggccctactaataatcttgttggagtccgtttgggtgttaaatatagattaatcttgggtcgccggcatgacgacaaggcaaaacactgtgcctccggtaaaaggtgctaaccccccggtggggggtaaagagcaccccgccccggaccaagagaccaagtgctgtggggctcaccgatataatggctcccgctgcccccgtggtttatttgccggcgctcgctcctcgttgttgtatcccccgcgcccgggggggttgtaaatagtatggtccctgtctactttctcggtctttttaacacagtggcctctccggggggatgcgtcgctgtggggcgcccttttttctgaggagggaattttttttgcgtcctggtttagtgtccaacagaaaaatggttcttgtgcgcactgagagtcctgtgcgtgtactacttctcccggcagtgtagttgtccatcgtggccacacctctgttccacacgaagaggctttttgcgttgtaacgcgcggatgtatttttcgctcgcccccaccgcggatgatgtttttctccactagatgcgtcggagcgcctccttcggagtggggttttgtttcacgaggcgggcgcccccgggccccatcatctcggcgggtgtgtcggctctggcatcacagcggagtgggggtcttatttgttccggatatagaggcggttaacacccctcggcgtgtgggtggtntctctttttttccgaagaaggagttaaccccaacaccctcgtgggtggggcacacatggccacacgcgctattatagagagagaggttcacacccactggcacatggggcccccacacaagagacactctccacgctttggggctctcccccggcgaagtatccgcggggagagatagagagagaggctttatatagtgaaagggcccacgttttttattgggccgtttttggtatggtaaatgttctggtataaatatactgttggggtgttataattttgtgtgaactcttgttttgtgtatagaaaagttggttgtattaagatattgtgttgccacagttgggagactctatagttcacttccacttctgttcacactcacggagtgaaatgcgaaaaggtgagctgttcaccacgagcctcacgtgaatgtgaggcacctgttgctccacggaagtgacccagttgctataatatgcacgaaagggaatgggtgataactttttgctttctcactgaatgcacatgtttctgttatgttaatgacttggtttgggtagcctcttaaggtactagagttgataaaagtgtacccgggtccctttgccaataaaactggttatgacct

SEQ ID NO: 714686 - DNA, 174 bp, Homo sapiens
atgtgcagtcgatctagaggaccccctcctaattagtgggggagacaagagcctaacaaatcatcatttgaaatggtggtagtttccatgaagagtaattatagagtgctatgagtaacataaagggtgctcgtctagtccccgaggttggtgagagaaaccgtcgaattcgag

SEQ ID NO: 714687 - DNA, 177 bp, Homo sapiens
tgtaggccagcgagtacgagctactctctactagacaaaggcagtgagaaagactcggaattttatcatttataacaagaaaggggaaaaaagaaaaccttatattgctttcaaaaatacctgtgcaggtggccgatatttaaactatactgagtcaacggtgcaggtaaaccaccc

SEQ ID NO: 714688 - DNA, 1273 bp, Homo sapiens
ctgtcatttcctattcactacgtcttaagtgagacaattatagcagcaacaacgaatttctaggatttacacctggttaaaaacacgttcgacgtgacaatccatacagtgcaccaacaattcattacattaaatgaactatgctcactttaaacaattcgattcgtttaacgctagcgttgtaggtcggtgccctgcctgtatgtcccagcctacttggcacagcgctcggagatgtgaggatctgccttacacggttcaggaagtttccatgcgctagtgcgttgtagtcactttgttaccatgtcgacatacccacctgctctcccacggaccggtgcgcactataaccaatgaccctggcctcttacaaaattaaacaactgcaaagtataccaacattggcacctgcttatcgtggctcctctcactactcgggcttgggcgaaaccattgctcactccaatagacagctacattgtaacttacctcgtctcttctggactcctccctcaccaagccactataaaaatcccctgtaagcacggtacacagtataacgctcccacccttacagtcaacagattgtactcaaactaattgaggaaacaacatgttctaacacatccccccaagcgcttcatcggctgccatatgcgccacgggtcattccactctaacttgggctaccacgttcaccctacgtttccaaaaccgtcatcacatcaaactgagccccttcacaccatacgacaccctcgacactacctacttcggggccctctcctcgaacgttccattccaacatctgcacccacctacacgaggaccgaaaacttactctgggtcacgcactccacttcatactacccgcttcacccctcactcaaatattaccaacttttgccttggtcaccttatctcggcaaaccattacccttctagaaccctttcaatcctttcttgcacaccatcaatttcatcgtcaccctattttttttgggcaacagcgcaacaaaccaagatgcttgatacgctatcatcaccgaggggtacattcgttacacactcttcctcaacagcttatcacttatacaccccaccacgttaatctccgctatatatacatcggccactaacacaactagggtagtatgataaaggcaacgtatacaacaatctttacttgatgcgtgcaaacccattataatatgtaccgccatattaaagccacgtgggagcactcaatgtgtatctactaattcggcaatcg

SEQ ID NO: 714689 - DNA, 730 bp, Homo sapiens
  misc_feature (119)..(119): n is a, c, g, or t
  misc_feature (226)..(226): n is a, c, g, or t
  misc_feature (241)..(243): n is a, c, g, or t
  misc_feature (249)..(250): n is a, c, g, or t
  misc_feature (253)..(254): n is a, c, g, or t
  misc_feature (259)..(259): n is a, c, g, or t
  misc_feature (261)..(261): n is a, c, g, or t
  misc_feature (266)..(266): n is a, c, g, or t
  misc_feature (271)..(271): n is a, c, g, or t
  misc_feature (290)..(290): n is a, c, g, or t
  misc_feature (292)..(294): n is a, c, g, or t
  misc_feature (313)..(313): n is a, c, g, or t
  misc_feature (318)..(318): n is a, c, g, or t
  misc_feature (330)..(330): n is a, c, g, or t
  misc_feature (332)..(332): n is a, c, g, or t
  misc_feature (371)..(373): n is a, c, g, or t
  misc_feature (378)..(378): n is a, c, g, or t
  misc_feature (380)..(380): n is a, c, g, or t
  misc_feature (382)..(382): n is a, c, g, or t
  misc_feature (391)..(391): n is a, c, g, or t
  misc_feature (399)..(399): n is a, c, g, or t
  misc_feature (402)..(402): n is a, c, g, or t
agcgggcaggatccggagctggtgctgataacagcggaatcccccgtctacctctctccttggtcctggaacagcgctactgatcaccaagtagccacaaaatataataaaccctcagncacttgctcagtagttttgtgaaagtctcaagtaaaagagacacaaacaaaaaattctttttcgtgaagaactccaaaaataaaattctctagagataaaaaaaaanaaaaaaaagggaaannngccagnntgnntatantnggagnaaaanttcctcgtccccgggggcngnnnaccccagccagggtcaacncgacnccggataaaccnanagacagcatctgagcacagaaagtcatcaaagcctattnnnggagnanangacgaagancaagaatnaantgaaagtctgagcccagctgaaaacactgatttgggatgctctgaagaaagatagctcgcggcatcccaagctggagaaggcggcactttctggcgaattgcaccgtgaagcccctccggaacctgcagcgggccggcagatgacggctgcgctgagcacagcacccaatgtgtgctggggaagtcaccgagccggcttcagcgagtgctttgaacgaggtgacccggttcctgtccccgtgcgagggcgttaatccccgaggtgcgcactcgcgtgctcggccacctggccaactgcttgacccagatcattgccatgacctacccg

SEQ ID NO: 714690 - DNA, 359 bp, Homo sapiens
cttgtttcctgcacttcctcacctttctgcactttcatagaattgaagagagttaagggcgggctctggcttagagtgtggcttaagggaatgttgtgactaatttgatcacttatccagaccacaaaaatctcttccagcagggcgcggtggctcacatctgtaatcccagctctctgggaggccaagttgggtggatcccctgaggtcaagggttcaagaccagcctggccaacatggcgaaaccccgtctctactaaaaatacaaaaattagctggctgtggtggctcacgcctgtagtcccagctactcgagaggatgaggcacaagaagtgcaggaaacaagatccggtaccga

SEQ ID NO: 714691 - DNA, 749 bp, Homo sapiens
  misc_feature (18)..(18): n is a, c, g, or t
cggcagtataggccgtgntaatcgcattccagcggtccttcagactgcccggagagcgcgctctgcctgccgcctgcctgcctgccactgagggttcccagcaccatgagggcctggatcttctttctcctttgcctggccgggagggccttggcagcccctcagcaagaagccctgcctgatgagacagaggtggtggaagaaactgtggcagaggtgactgaggtatctgtgggagctaatcctgtccaggtggaagtaggagaatttgatgatggtgcagaggaaaccgaagaggaggtggtggcggaaaatccctgccagaaccaccactgcaaacacggcaaggtgtgcgagctggatgagaacaacacccccatgtgcgtgtgccaggaccccaccagctgcccagcccccattggcgagttatgagaaggtgtgcagcaatgacaacaagacctatcgactcttcctgccacttactttgccacaaagtgcaccctgtgagggcaccaagaagggccacaagctccacctgggactacatcgggccttgcaaatacatccccccttgcctggactctgagctgaccgaattccccctgcgcatgcggggactggctcaaggaacgtcctggtcaccctgtatgagagggatgaggacaacaacttctgactgagaagcagaagctggggtgaaagaagatccatgaggaaatgagaagcgcctgggaggcaggagacacccg

SEQ ID NO: 714692 - DNA, 403 bp, Homo sapiens
  misc_feature (18)..(18): n is a, c, g, or t
  misc_feature (337)..(337): n is a, c, g, or t
cggcagtataggccgtgntaatcgcattccagcggtccttcagactgcccggagagcgcgctctgcctgccgcctgcctgcctgccactgagggttcccagcaccatgagggcctggatcttctttctcctttgcctggccgggagggccttggcagcccctcagcaagaagccctgcctgatgagacagaggtggtggaagaaactgtggcagaggtgactgaggtatctgtgggagctaatcctgtccaggtggaagtaggagaatttgatgatggtgcagaggaaaccgaagaggaggtggtggcggaaaatccctgccagaaccaccactgcntgctcccctcatccccatggagcattgcaccacccgttttttcgagacctgtgacctgggcaattg

SEQ ID NO: 714693 - DNA, 502 bp, Homo sapiens
atatctacttatttttattcctaggccatttatctatcactgatgagccttcatgtatgtactttaaaacaaaatatatacaaatcttgcactggtttgaagattttagtaatgaaaagttacccaatcggttgtcagtatgttatctagaaaccaatcttagaaatgtgtgatgacgtttttttctttatagctgaaaagaaattattctgtgcctgcttttactttgtccttgtatagtcctataatattaagtgaagggagattatttagcctcatattgaatttccaaaactgatatatgtgtttgccattttttaatgatggagagaaaagttcgttatcttactttgataagtttgacataggatctatcacttctggaagcttacggtgacagttgtcactagaatgctagccattagatatatgcaatgaataactcggttacattaataaactgtcttgaagtgctgcagacagtaactcatggacaccaaat

SEQ ID NO: 714694 - DNA, 275 bp, Homo sapiens
gggggggggggtttttttcccccgggaaaccccaagggggccaagggagggggggttttttttttccctccctttggggctgccccccccccccggcccctttggggttttttttgggtttttgggggggcccccccggggtttttttttttttttcccggccccttttttggctttttgcccttttttggttttccgggggccccccttggggggggtttcccccggttggggggggccccccttgtcccaaaaatttttttttttttttttta

SEQ ID NO: 714695 - DNA, 818 bp, Homo sapiens
  misc_feature (119)..(119): n is a, c, g, or t
  misc_feature (132)..(132): n is a, c, g, or t
  misc_feature (134)..(134): n is a, c, g, or t
  misc_feature (163)..(163): n is a, c, g, or t
  misc_feature (169)..(169): n is a, c, g, or t
tggcagggattttccgccaccacctcctcttcggtttcctctgcaccatcatcaaattctcctacttccacctggacaggattagctcgactagatacctcagtcacctctgccacagnttcttcgaaccananctgtctcatcaggcagggcctcttgctgnacggtncaagcctcccggcctggatcttctttctcctttgcctggccgggagggccttggcagcccctcagcaagaagccctgcctgatgagacagaggtggtggaagaaactgtggcagaggtgactgaggtatctgtgggagctaatcctgtccaggtggaagtaggagaatttgatgatggtgcagaggaaaccgaagaggaggtggtggcggaaaatccctgccagaaccaccactgcaaacacggcaaggtgtgcgagctggatgagaacaacacccccatgtgcgtgtgccaggaccccaccagctgcccagcccccattggcgagttatgagaaggtgtgcagcaatgacaacaagacctatcgactcttcctgccacttactttgccacaaagtgcaccctgtgagggcaccaagaagggccacaagctccacctgggactacatcgggccttgcaaatacatccccccttgcctggactctgagctgaccgaattccccctgcgcatgcggggactggctcaaggaacgtcctggtcaccctgtatgagagggatgaggacaacaacttctgactgagaagcagaagctggggtgaaagaagatccatgaggaaatgagaagcgcctgggaggcaggagacacccg

SEQ ID NO: 714696 - DNA, 913 bp, Homo sapiens
tagaggccctgtgtccgtcgccgattactccgatgcagatagcagatcggtaaaggacaagtcgacggttagagggaactgcgaggcactttgctgtctgcaatcgaagttgagggtgcaaaaatgcagacgtaataaaactttaagcttggatgaagcaagaaccagtactccaagaaagcatcatcaagcagtcaccaccagctagcagcaccaccagcgagcacagcagcagccgccatcaccgccaatacctgcaaatgggcaacaggccagcagccaaaatgaaggcttgactattgacctgaatcaatttctagaaaaccagtgagacgaagaccttcagcccaacgaagccgtctatttatgtgggaacatctttcctcccgaccatcacttgaggacgaaatgcaggaaactatttgaggacaatactggaaaggcaggcgacagtctatcacttccataacggactcacaggattatcggctcttatcccgcattggaaagaccacgaaccgctatgccgggcagactttgcgcacaacgtgtgcaggcttggaccaatattgcccacataccgatgccacacagcaagctgcgatgtgcgcctttggccatgcacaatagatgcgaatcccctatacgaggtttacgacaaacccttcacatacaagataattgatgattccaaagcggaaaccatggctgagaaaacaacagacctatatcatcctggcatgagttacaggggcacaaggctaacgaaggaagggcctagataggacccaatatgttaggaactggagtcagaacagaaataggcagcacatcccatgtgcaaaacagcggggaattaggatatagaaggattatacttccagggcggaacaaagcagaggcatgcactccg

SEQ ID NO: 714697 - DNA, 196 bp, Homo sapiens
cgcccccaaagtgctgggcatacaggctgtgctgcaccacaccctggccccctatgccttacattatgaaaatgtcctcttcggcctcatcaccaggtatatagcagcgactcaattgcactggctgtcctggaaaggggctcacggaaagcctgcatgccaggctctgacaaggagaagcatctgccattccttg

SEQ ID NO: 714698 - DNA, 251 bp, Homo sapiens
  misc_feature (33)..(33): n is a, c, g, or t
ggagatgagccggtaccgtatctctaatattanggacaaatgcagtcccctcccatgctgggagtccctttttcttttctacctagccattctggtaccagcatcgccagggtgcctcttcctcccgctcgtggccagcccggctggttttgtaagatactgggttggtgcacagtgatttttttcttgtaatttaaacaggcccagcattgctggttctatttaatggacatgagataatgttagagata

SEQ ID NO: 714699 - DNA, 691 bp, Homo sapiens
  misc_feature (18)..(18): n is a, c, g, or t
cggcagtataggccgtgntaatcgcattccagcggtccttcagactgcccggagagcgcgctctgcctgccgcctgcctgcctgccactgagggttcccagcaccatgagggcctggatcttctttctcctttgcctggccgggagggccttggcagcccctcagcaagaagccctgcctgatgagacagaggtgtggaagtaggagaatttgatgatggtgcagaggaaaccgaagaggaggtggtggcggaaaatccctgccagaaccaccactgcaaacacggcaaggtgtgcgagctggatgagaacaacacccccatgtgcgtgtgccaggaccccaccagctgcccagcccccattggcgagttatgagaaggtgtgcagcaatgacaacaagacctatcgactcttcctgccacttactttgccacaaagtgcaccctgtgagggcaccaagaagggccacaagctccacctgggactacatcgggccttgcaaatacatccccccttgcctggactctgagctgaccgaattccccctgcgcatgcggggactggctcaaggaacgtcctggtcaccctgtatgagagggatgaggacaacaacttctgactgagaagcagaagctggggtgaaagaagatccatgaggaaatgagaagcgcctgggaggcaggagacacccg

SEQ ID NO: 714700 - DNA, 847 bp, Homo sapiens
gatggtgcaaaggtgggtctgcagacataatttaggcattgaaggagctgtggttgtaagcactctacaagatgggttatccgaaagccgtcatgttctttatagaagctcatcataattgaagtctgtcttcgcaataccagactctgcaagtgatggatgtaccagggaatagtcttgtctgcaagggagattgagaagaaacttgagatgaggaaggggaacagtttgtgtgaaggaacatagtcgatgtgtatcttagtcgcttctaaatggttgagagatgggcctccgtgggggtagagagtgggcaactgcggtgagtgagatgtgaagatattgggaaaatggatcagtgtttgctaactcagataagaaggctgagtgaactagagtctaagtaatggcatgtactggctaggtacattaccaatggcttgttaattagatctggtagatagagtagaatcctcagtcggtgcattctttgcaaggctaatgtgatcaatcactgtggaatatgggtctcgctattggaaggttagaaattcttcaggttggagttcaggaaagggtttagctctgaagaaacctccctttgggtacttttgagaaatcagagatggagatatatatgatatgtatccatacattttatcgtcgagaaattgatgactggaaattacactagttggcaaatagcgtgggatagattggtaactgaagatgggtgtgacaatctgttttgcctatgctctggggtgaatagagctgatggtatagtactggtttgcggaattgcatacaaagtgtgcattacaacgtgtaatatgggtaataataggtc

SEQ ID NO: 714701 - DNA, 144 bp, Homo sapiens
tgactctaagaggatcccccctgtggcggcgtgcgcgccgagtggcgatcatgcctggccagcgccaggccttgggctggtcggggttgacctgccagcgcctgtgccaccgccgcgatcgaggccgcgtccggcgcgccctgg

SEQ ID NO: 714702 - DNA, 707 bp, Homo sapiens
tggtgtaaagatggcccatggtccccgaatgggcctagatcccagctgtgctctggtggcctcagcctcttcctcaacctcccagtgacctatctggctccatgccctctccacctaccccagtcttctcccccgcctcagccccatccgtgtcatacctgcctggggactgtgttgacatgctttaacaagtggcctggcagagaaccatcctgggacaactattgtgatgtgtggactacactgcctgtgtgagtgaagagaattttgtccaaatacaaatgacacagtgagaccctgcctggtagagtgtgcttggagggtgtgtgcaacaagtcacgacttcagagatgccaccgcctgctggagctgagtgcggatgctggctggacgagctggtggtatcacaatgcagcaaggaggccccaggacctcttccagatggcttgtgctcatgattcccttgcactgctctgctgcccctgccaggcaccttcgtggccctcctgtccttcccctgtcctgctggtgcacctagagacggccccttgcggagtgtgcctaactgtgtgcaagctgttgaccctggacacaggatacacagacggtgtgcaagctgggcaactgtgaacttgccacaccgcgctacagtggggttaggccttgtgtccactgtggccttggtcactatgaagcagactgaatgc

SEQ ID NO: 714703 - DNA, 220 bp, Homo sapiens
cttcactggtcacatatactgagtctgatctcaaaaagcagtattaaaaggccaatttctaatttaatgccacaagaaatttgctgtcggcataccacataattaaagaccagctggcctcttagtatctgtaccatggacagaccctggaaattctgggcggtcctctactgacagtttttgtttatcgtaatatcctctgcgttgagatcaggcatgt

SEQ ID NO: 714704 - DNA, 374 bp, Homo sapiens
  misc_feature (19)..(19): n is a, c, g, or t
  misc_feature (48)..(48): n is a, c, g, or t
  misc_feature (162)..(162): n is a, c, g, or t
gtccagggccggggtcatntgtgacccccactccagcaaccccacccntgagtgttctctgtggaatgagaggtccttttggcgctctgtgagggggaagaagggcttccctggtcacgtccacctccctgcaggggactcacgagagcacacagaaaaccntggaggccttgagtaaagaaatctgtgaatcccatcacacccaaccgggcccagcctccttacagcatggaaccttttacaaaggtaaagtcagctaggcacagtggctcacacctataatcctagcactttgggaggccgaggtgggtgaattgcctgagctcaggagtttgagaccagccttgccaacatggcaaaaccacatctctatt

SEQ ID NO: 714705 - DNA, 369 bp, Homo sapiens
  misc_feature (323)..(323): n is a, c, g, or t
  misc_feature (355)..(355): n is a, c, g, or t
  misc_feature (360)..(360): n is a, c, g, or t
catattcagataatgctcaagttataattgtctcataaataatatagcttacactttaatattttgtttaaataggcttccaaataacactcacatgttgtaatgattaaaaatcttttaagccacttttaatctgtaggtcaaatcctcatcttgctcctctttgcttccttccccctccccctccctctctctttttaactctatctctgaaatttatttactgaagaaactgagttgaggtcttggcaaaatccatacctggctggcaatgtgtagattgtttcccacatgtggcctttctggcttggtttccggaatgncccttgggtttcctacaaaattggggaaattnggatnctaaaaggt

SEQ ID NO: 714706 - DNA, 416 bp, Homo sapiens
  misc_feature (315)..(315): n is a, c, g, or t
  misc_feature (370)..(370): n is a, c, g, or t
  misc_feature (377)..(377): n is a, c, g, or t
gatctgcctgcccaccaactggtgatggaaggttacaagtggcacttcaatgagacggtgctcactgtgtggtcggcaccaactactgctaccgtgtgggaatgtggcagcatcttggagctggacgagcatctccagaaagatttcatcatctttgagctgctcccaagagcacggggcatccctccaagagccgtgccgctattcctgtgacccgccggcctgccctcacctttggctcgacatgtgcttgcatttctagcgagctggcgtgggggctgtctggttgtgtcccaagaggtgttgaggtaggtnttgagagctgagactagtcatgtctctctttccattacatgagttcatatttttnttttctnttttgtgttagtaatttggaaatgaaattataaggaatg

SEQ ID NO: 714707 - DNA, 191 bp, Homo sapiens
attcgagctcggcacccccacgtcgcggctggcaggacgacgtccgaatgcagtgtggtggacgtgttgcggaaatccgcggtccacatgaggtcgagttagcgggcggggtgtcgtcgcgcaacggatgtcggtaggacgcttgccttcaggtagctcggtggcgttgacgtcattctcgcagccaagca

SEQ ID NO: 714708 - DNA, 426 bp, Homo sapiens
  misc_feature (71)..(71): n is a, c, g, or t
  misc_feature (101)..(101): n is a, c, g, or t
  misc_feature (111)..(111): n is a, c, g, or t
ggccccggcatcggtcctggggctcggggcaccagggctatggcttttcaccaaagtgctcaactcgtggnctggatcaaaaaaaagatggaggaggaggnctgagccccnatttccctaggtttgaatccaaagagcagtgtggaaaaaaaaaaccaaaaaccccctgccccgttgttgataacccctaagggttttttttaaaatttctgatgcagaaagcccgggggggaaattttctttccgggagtccccttgatggcctttccctgaaacaacccaaagggccccttttttttttttgggggttgcaggggaaatagttatcaatctctagggggccctttccttttcccctttgaaccccttggggccttgaaaataactttttcccaataaagttttttgagaaatgcccgggggcca

SEQ ID NO: 714709 - DNA, 802 bp, Homo sapiens
cacaaagacgtgtccaacagtagacctcattaatgcggagcatgagcgggagtcccgtaagcgcaggtctaagcgtccttattcgagccgagcgggggcagaccagggaatgttctaagtaacgaccacgtgtactaatgggttgtcgtcacatgaccatgtctacttttgtaactaatcttacttcgagtagttaagtagctccactcattaatggtctggacggctgattggcaacatggactaggttccccgtaagtagatcggtgcaccgcgcgaatgatggcgtttgacggaaataaacaatcatcaagcttctgacgtctgagcactcccttctctccttaacatgctcgtggcgtcggagagtcttggctgatagatgggacggtcccgtggagagcaagcgcaaccagggggtgtgatatcaagggtccattaccacccgtgcacgcatattgagtccggggggacatctaaactttcgccagcgcgcgtggaagcccatcccggtgagtagcactaatcctaattcgtgcctccctttagccacgccataaggccacgggatattgcttcgcggttctatatgcgggttagggtgagcgccccaaattcgaagagcagaatcgcctaggtcgaaacaaaaagccgaagagttctatttccaaaggatatttaaattaaagggcccacacttggggcgctcacttaagacccccaaatcaaccaaaagcgggctccgcgatccgtctcggggtcgtcgaaatccgggtaccgtaaatgcacaaggctggttcgt

SEQ ID NO: 714710 - DNA, 356 bp, Homo sapiens
ctcgcgaacgtgttatcccctagccccccctgtcgggctagtcggggctgtcgggctagtcgggccccgactagcccgacagactttggatcctggggcgagatgaagggaagagggttgtttttggtttcgtgacgacccttgctcttgaccttgaagacgaagtccctactcccacatcctgccttgtcacggttccgctcccactttccccatgcgcacatgttgagtggcacgcctctccatgctctcattgttatatgcaacacgcctgagcgccctgggagtgctcgtgtagtgagtgagtcattccactgtgcccctgaccctgcccctgttctgggcctagtctgggg

SEQ ID NO: 714711 - DNA, 941 bp, Homo sapiens
actgagcggttgtggccgcgttgccgacctccagcagcagtcggcttccttctacgcatatacccgggagtaggagactcagaatcgaaatactctgtctccctccgccttcttgttttcgggttggtgagaaaccttaccgtccacacatgatggtccgagctccgttgccggcaagacggttcctcgctccaatgacctcccgtgtattcacttgggaatctcaaccgctcttgtgggtcagaggatctgatgtgtgaggctatcttttcgatcgctatggcagtacttgtgggctgctctgttcatcagggctttgccttcgttcagtgtgttaatgacgagacttgcccgggctgctgtagcaggtgaggattggggtgattgtttggctcggtccacggttttagatattaacctggttggcgacgccgaaatgtgcaaccgttgtgaccatgctggtgttgaaatcgttcttgcagctggagtttgttctgcggtcagtgactgaacgcccttctcggtgccctctactcagctcctctttgactgggtctatgactttcgacgggctcttcatgctgggatgtacaggtacccccgcatgtgtaccttcgtccttcctggtattgcccgggctgagtggccctccgacaggtctagcgtgttgtcagggaacccttccacgagggggcaaaggtggttcaaatcaatgcgggagagggggggatttacaaggtcggacaggggcaggggaagtcctcagacatgaagaagcgctgacgcataaaccaaaggggtcaccgggaaaaatgagagaggagagaaaaggagaggcactaagagaaatcaaggagagaacgcaaaacagaaaattaacaagaagaagaaaaaaggagacgagaaaaggggaaaaaaaaaaggaaacaaagacagaacaa

SEQ ID NO: 714712 - DNA, 327 bp, Homo sapiens
  misc_feature (230)..(231): n is a, c, g, or t
tcctgccctcaggtgatccgcctttttcagcctttccaagtgttggggttacaggcatcagcccttttgcccggctgggatcattttttccccacatgtttgttcaataagcttggggtgcaaccccctacatggattttcatagctcctcctgtagcctgttgaatatttatgtttagccaaccttttcagcataaaggtcctgcccaaaccccccctggtcctaaatnnctctttttggttttaacccggggttgcttttcccaggttgttgggtgggtcccttgcaggctgtccccctttacaagaaataaagtgtcctttgca

SEQ ID NO: 714713 - DNA, 790 bp, Homo sapiens
gacagtcgctcttcctcaggcggggccatggcgggacaggaggatccggtgcagcgggagatacaccaggactggctacccgggagtacatggagataatcaccagcagcaatcaagaaaatcgcagatttctcaactcgtccgatctgtcttgtcgtccaggattgggcaacactaaaggagaaatgtgacagccctgtgcaccggagaatagagtcacatggaacgctcgggtgaccaacagggggagaccattcaccttagaacagtgccggtgttgttgtggaggaagtggctttacacaacacaggccacatggaaaagggcccagaagcctaaagatctttcctttctccttaaagagcaacaggctaatctggtatcttttccccacacagtttgtgggccttggggctctgacaattcgtgggggtgggcgggtgcactgtgggcacgaccgttcacgaggacaccggtgggacacccacggttaggcattttacacctttcaggacaccatttatacctctactgggtaatggtcttgggacattagaggcaaaaggctgggaccctgggtgaggtcttctcacttaattatattttcttctcaaattctaaagtgcaattggcttgcggtctgaaagcttggtcccacctggtggagcggggctgtcgaactctcggggtcgacagtttgtcccatctgttgtagacgctggtggggatcattgggggcctctcactactttgtggttgttgagtgatcatctattcacttgaaacaggg

SEQ ID NO: 714714 - DNA, 86 bp, Homo sapiens
  misc_feature (17)..(17): n is a, c, g, or t
  misc_feature (19)..(20): n is a, c, g, or t
tgtgccacctgggacgngnngtcttattataagaaactctttggcagtggaacaacactggttgtcacagataaacaacttgatgc

SEQ ID NO: 714715 - DNA, 293 bp, Homo sapiens
  misc_feature (3)..(3): n is a, c, g, or t
  misc_feature (128)..(128): n is a, c, g, or t
  misc_feature (134)..(134): n is a, c, g, or t
  misc_feature (231)..(231): n is a, c, g, or t
  misc_feature (290)..(290): n is a, c, g, or t
agntagggtaccgttcattcattcattcagagacagggtcttgctctgttgctcagacaggagtgcagtgttgtgatcacagctcacggcaacctctgcctcccaaactcaagtgatcctcccacctnagcctnccgagtagttgggactacaggcatgtgccaccatgcctggctaatttttaaaaaaattattgtagagatgagatctcattacattgcccaggctggntttactatttttgggtagagacggggtctcaatatgttgcccaggctggtgttgaactncta

SEQ ID NO: 714716 - DNA, 755 bp, Homo sapiens
gctcctctccctctccctctccctcctctccctctccctactccctctccctctccccacggtctccctctccccacggtctccctctccccaggttccctctccccaggtctccctctccccaggtctcctctccctctcttaccacggtctacctctgatgcccgagccaatagcttggactgtactgctggaccaccaaggttccgattcgggggacgatacaacgatgcacacacgcgttccgcgccattgttcccaggtttgggcaaaaaatatgatgacccaatttaccatgcacgattttggagaagccagccggttacctaaaaggtgagccaccgcaggtatttggaaccgaccccactgggacaaaaaaggggaaatattatgggccccacacccggaattatgggggcacccagagtgtgaagaaaagagttcatatgtattgggggccccacacgatgatggcgatagagtaccaaggaacgccgaggaaatcacaacctcagcgagtaaagacccaaaaaaaaagccagtgcgaaacgcacaccccgaacgattagggcgaggcaaagaaagccacgcacgcttatgggcgcccggacgaatataatcacgatcagttacccacgacggggattaggagacaaggcgtatttaccgagaagtagcgaactgcagcacagatgaagagcaagatacgaatcaatagtactagcatacaagaacaaacataaggggcgaagagc

SEQ ID NO: 714717 - DNA, 207 bp, Homo sapiens
cgtgtggtggttgcagttgaagatcagcttctgagcccctgcgtgtttaggtgggaggggaacctctgagcgtaagtttcctgccacagtgcactggtgtaggaaactgagcatgctgtagcagtttctacgagaagtcggggggtgttgtggcaacattgttctctgaattcatgtggaaatggctttatcgatgccactgtccca

SEQ ID NO: 714718 - DNA, 951 bp, Homo sapiens
ggaggcggccaccgtggagagcagatcgcggcgcctgaacctgctagttcagagccgcgatgtccggattgaggtcctcgtgacgaagctggccccggagcacatgacctgtaagatgcgcgaggatgtgatctcctccatacggaactttctcatctacgtggccctcctgcgagatcacgtccagttgcatcttagacgtgaaattgtggaacgatggcatatgaccgcatgggagccatcacgaatatggacatgcgcagattatggacgagcccgggtttacacagggtccgacgtccttcgtctgcacggtgagataggccccagaaccaggtgtaggaagactcttcgagtggacgtaacgacttctgcttgttacgagacaagttgtggctctggtagctgagcttgaaagttaaatgtataacaactattggggaagtatgagacgagtgtcgcgtgattcgtggtgtaccctttatcctctgtgactgtttggcctcctgacaattactggtataatttgtaatatacatgtcagaactccgttttacataggcacagtattgggggagctgtgtctgacatgggactgtctgtgtcagtgatctctgtatacttttattctgccagaggtgtatttgcgacgacgctctcatgctatgtttcggtggacatcccgctacaaggcactagtgactttaaagccggagggtcagtaatcaggctaccgttttaaataaccatttcttttccacccacgccacaaaaagaacaacacttttcgccggcccggcccaagatttaaaccttttggggcggccatttgtaaattgtcgtggttccaggacacgcggcggggtccccccaaacgccggggccccggaacccggctcggatgtcccccgccccgtccaccccgcaaccaccgcatgcaactcctgcacg

SEQ ID NO: 714719 - DNA, 900 bp, Homo sapiens
tcctctgtgtgtctctactctagatgcctaggagagtctagatacttctaaaagctcctaaagcttatattccaagagagatgactatctgagttcgtgtaggtctctaccgcacaggattacattaaagcttgttatgacgttatatgtttccaggtgggcatggttgtatttcccagtttaacagtgcagtaataggggcatgtattttattatatttaagggtgggttaggagtatcctttgctggagactgagaaaggggtgtagtttaagttccatcaggtccagtacagtactaggagtcataatactttataatcaattaaataagatagaaccactgagagaataatgtattttgttaaagtggagaaatgtggtttgcttttttgagcttgcgctttttcagtatttgagcatagggagataattgttttataatacaaaagtaaccacttggaattttaaagataatgttatgtgtgtatgtgaaatatatatacatatatatatatatttcctaaacagaagaaaagatagctttctgttacaactggtatcaactcctcttttctaattgctgtgaaatggcaactgttgataaattatgtgatgttttaaaatctaaatgggaagtaaaatatatcttgattttacccagcttaatctgtaaagtagcacttaaatatatctgatagcaacacttaagatatctgctggggattactttcctatcatccatatgccatttgtgcaattccaaacatatggggtgcttctgaattcctgatgaatggtttaggctattgaaaattgggataattaaacttaggcattaaaaattctgaacttaaatgggtcatgcctataatcgtgggatcccaaaattggcccttgg

SEQ ID NO: 714720 - DNA, 323 bp, Homo sapiens
gaagctatctgactactctagaattgggaaattatgaaatatcaaagatggttctaaaagtcgatttctacattttatttcctgcagtgtggatgattatggctgtcggaaacgataagtcaacatctaagacattaacgtcaagtgaatttataaggcgctgaacgataggcacttaaatcaattacagtgcagcaaggtatggtatttacaacattactgggtatacgtagcgcagagtgacgctgacagggctgatatttgcagcagtcacaaaggtgacaaagtttacgtcaactttgtgccaaatgatgcgtcattac

SEQ ID NO: 714721 - DNA, 171 bp, Homo sapiens
ttttaaaattttccccagggggggggggggcccctttgggccccctttttccccgggggttttgggggcagggttttttttggcttgggggcaaaaaattccgggggccccggggggcccccccccccccccttttggggggcggggccggcccctttttcccaaatggga

SEQ ID NO: 714722 - DNA, 168 bp, Homo sapiens
gctggtcctatttgtccggcgcgcaggacaactgcatcgtgtcccaccaatcaagatgaccgtgtgcagccccgacggccccggtcggccgtctgccagtgccgcgcgctgggctctgggcatggctggtcggctgctccagcgctgacctccaacgtgtctgctgct

SEQ ID NO: 714723 - DNA, 449 bp, Homo sapiens
ggatccaccagagccaccccctgcagtacatcggtcataaatgaaccatgcactcatattgtttacaaattggtaccagtgcctccaatgaagcggaaatgagaacgcagagggagttcgtatcacaaattgggcatggagtgtgacggcgagagatccaagggtgagacctgcattactgaatcggaaccagaatctgaatcggaactgatacaaatgaaaagctggagagaagagagggaagacagaccccacccgaagacaatatggagcgacgcaggaaagaaagcaagaagggaatgaaatgatagcagagagagaacaagatagaaagaaagaaagcatagccgagaagaatagcaagtaacaaaaatgagaacagaaacaaatgagactacaacaaatcacaatgcaaaaagtgaaagaggacgctataggaatcacaaatg

SEQ ID NO: 714724 - DNA, 215 bp, Homo sapiens
agttgatctagaggatcccttggggctcattcaggggatttctcactaaaaggcaatctcaacggaaaaagaccctcggggaaatcctcaagcaagatctgcccgggtgcatgctcggaggaagggacggggtgagggaggaagggaggtaacggtgaagaatcgtgtcctcatcctaacccccaaaagctttccgggcctctttaggggaaggg

SEQ ID NO: 714725 - DNA, 264 bp, Homo sapiens
cctgattgcagccgctgaggtagttggcagctgctggtgtgacccgggaattcctgtcaccttcactcctaccacctggtgtctgacacgcctcctgggcagctctggtgaggcctcttgaggctgggaatccagactaggaatcccctctgccacatgggtgactgcagtgactgggcgttggtcacactggtcctggggatggaacagcacctcctcttccagctgtgccccacagaattcacatgggataatgatgctctc

SEQ ID NO: 714726 - DNA, 167 bp, Homo sapiens
tgaccagcgcgctcgcatcaccaatcagttctcattcggtccaaggcttccaggtcgcccgggcggatcatcggcatgcatcatgaccagcgggccattccggttgcccaatagctaggcatcattgcgtgccaggccgacccaggttcccaggtcggtcgattttc

SEQ ID NO: 714727 - DNA, 1322 bp, Homo sapiens
gcagcgccgccgctgcagtgtgtcgtccctgccctccccggcccggggtgcaccccgcaaggctccgcgactggtgtccctggagcatgggaggctgcgtgagcgtgagtggctggtgtcttggcaggagctgcgtggcagggagggcgtccatggctgcagccaacaagggcaacaagcccacagagtccggagatatccgctttgcggcaagccaacgatgcagacaggatcccacagcccaacgtccacttttgatgagatcgctgcatgactctggtggtcatggtcacgccaggagagatgacagaagacttactggtacaaggtatggcttcctgaagatcctgcacaaggtatgagattaccttcaatcatgacccccagatgcacaggctgagcacaggatgtccagcgaggcaccatgtcccccaggccattgcaaccatcaagacgtcctcacagccagtggatgcacctgtcaccctgcacggttaataggtggtcacagttgttgagatacactcgagaggcacaaacgagggcggatacttccaagaaggagcatactgatagccctgacgaaaggtggcacactggcaacaccagaagaaagaggccgatgaacggcagcgccaggccccagacagatccaaggggagccgagacacccacaggggacacaggcccacagtactgccagagacatggacggctcaaaagatggatgcaggagacagcacggaagccaggagacacatacaccgaacctacaagaagaccacaaaggcgcaccggggacaaccggacatatcgaaagctgaagaggccccccgtgcaggggccaccacgtgacacttgggcactcactgggaagacaccacttcaagagcagaatataaacagaacaccgaacatattgggatgccgcaccacaaccacttgacgatacagctggaaagctactgctagcacacaatcccaatgcaacccacacatcaacaacgcgcggggaaatagacatataacgagaccgaaatgaaaagagagacgactcgaaaagacaacgcaacacaacaacaccagacgcgaacaacagacagagaggaagcaagaacacaacaccacaacaaccacgacaaccaaacagacagacacaacagacaacaggaaacagcgaagacacggagaagagaaaagagaaaccacaccgaacaagagagggaaccaagacacacccgagacgtaagacacgcaaaacaaagcaaacgagactagaacacaaagaaccaagagaaacacgacaaagagagagacgagag

SEQ ID NO: 714728 - DNA, 421 bp, Homo sapiens
  misc_feature (15)..(15): n is a, c, g, or t
  misc_feature (49)..(49): n is a, c, g, or t
  misc_feature (153)..(153): n is a, c, g, or t
  misc_feature (224)..(224): n is a, c, g, or t
  misc_feature (416)..(416): n is a, c, g, or t
tagcctagtcccccnagatcctgtgatttatttttagggccccggggcntccccttgtcatttgtcccaaataaaaacatgtctgtgagggcagtttgtaatgtgtaaagaaagccatggtttatttcctgattatattttctgattttattncttatttggtctcttctttgcatagagaccaaataagaaaaggtaaataatgaggtttcaccatgttggcnaggctggtcttgaacgcctgacctcaagtgatccacctgccttggcctcccaatgtgttgggattacaggagtgaactaccgcgcttggcctgtagtgtgcttttcaaaaacatgatcttactcaattatatcacagaataccacaattaataaaaggcccccaaataaatatagttaaactcataaataanatttt

SEQ ID NO: 714729 - DNA, 1206 bp, Homo sapiens
  misc_feature (193)..(193): n is a, c, g, or t
  misc_feature (1206)..(1206): n is a, c, g, or t
gatatagcttaaagtggagtgactgacactggagtggagtgggaggcgtgagccacaggatggtgcgcatgaatgtgggcatcgtgaatggtagacacggagttggtgtgtacgagggaaggtcacgggtcggtgtgacctatcgagaggcacctgggctccgtcgtcgcccggtgtgctctgtggtgacaangcagctcagagggtcacgacggtaccgctgtcagcagcgaagagcaattccgaggatcagagtacccggatcgttgggccttcctcctggtgacccacagcgttgacgctgggtgcttggatctgatgggaaccccttggacctggataccaccttattcacgcgtagggaattgaaaagctcgtgactttcgtcctatgctgccacatggtggccctagtttacccttgctagatgccagtaataacctcgatttcgcaacattcgtcactccgcttgtgggcgatgcttcctgcgtcgaacgggagtgccaggggctttctcggcatgaggaattatcattgacagaagtgtgaccccgcaacaaccagtgaactccccgttcgaacccgaggcctccgagtcggacgaaacctagcggtgtatctaaaagagccaaattactgactacgggccttacttccggcggacgcgacttaacaaatcatttgggcccccaaccccgtcccacgggtgccttgagaggatgggttacccatagacgtggacctttcacccagatgtgcgtagcgtgttgaggttccccaacccggactctttccccgtttggcagagcgaccccaactacaagatcccctagagggcaccaaaagaccctgtcttcctcaactaccgttttcccccacgatttggcccgggcacaaccaaccggggggcttaatcatgccggggcagaaccatccacaattcaaatctggtgccccacgggccgctgaatcaacttcggttgcccgcctattgcccacattggcgtaggatcgagtgtgaccccgacacttgaaccgggcacaatcttttcgattggccctgtggataccccgtcacctttcaactttccgctttgacacacgccccaagaagggtggcccatctttgggacaattatctgctcattcccttcaaaacccatttgctagtcccttaaattcgataccagaccttaagcggttcan

SEQ ID NO: 714730 - DNA, 356 bp, Homo sapiens
  misc_feature (109)..(109): n is a, c, g, or t
tcctacgtgcagttgcccatgggcaaaccttcccgttccccgatttgttttcccaaaaaaacgagagccctgaagggagcgctgccggcggcctttttcagcatgcttnaggaggaaaggcaccaaaggcaaaacaacgacccccggggggggggggtccccaactggtttgggtttttacggggtggccaacagggacgcgccccaggtgggcaactttggcaaaacaacgacccccggggggggggcatccccaattggtttgggccgttacggggcggccaacagggacgcgccccaggtgggcagctttggcaaagcagtccccccccctaaataaaaatttttttgcagca

SEQ ID NO: 714731 - DNA, 297 bp, Homo sapiens
ctcgtacgatctgaagacgcagaaatagaagaatgtggcaaagctttctaccattcttcacaccttactacacataaggtaattcatactggagagaagcccttcaaatgtgaagaatgtggtaaagcttttaaccacccttcagcccttactacacataagttcattcatgttaaagaaaaaccctacaaatgtgaagaatgtgagaaagcttttaaccgattctcataccttactaaacataagataattcattctggagagaaatcttacaaatgtgaacaatgtgcaaggctt

SEQ ID NO: 714732 - DNA, 417 bp, Homo sapiens
acgacacctactgctgcatgccttggggcatctgtttgcgttccacacattgctgactatgacacacggacctctggagttcaagatgctatacagtgttctccactctatgagcctggagaccctattcaatgttgttccctggagtagcagccattacagcgttgaacatcctaagcatccatcacagaggtggcaattctgggcgtagatgaggacggtggctaccctctggatttggatgaagctgtaatgtagaggacccctctatgggagcaagtagtcgtatacactatagttccttacggaatgcctaaccaggatactacagtatgggtgatccagtacgacacagagtccagtgttcacaactaacactgaatacctagagctacttgtgagagtcatggggttctc

SEQ ID NO: 714733 - DNA, 337 bp, Homo sapiens
gtcgatacccattcaaagcaatcgcaggtgtaacctcaccgggaaccctcacacagcgaccatttccacatccatggaggatgccggcattcctcagccggtaactcctcaaagctatttagaaaagggcctgggatgaagtagggatcggcttcgggagtatacggttcactgaagtcaaccaaggcgtcccgtccatattggctgcgggcgtcccgtcagggggattgtacacaggctgagcattagtcatctgaatccttcagggggcagaggacacacggcatgccccaggcctctccatacagacggcagcactcggggtccgagctcgaat

SEQ ID NO: 714734 - DNA, 626 bp, Homo sapiens
gcgaattcactagtgattgtgagctgagatcgcaccactgcactccagcctcagaaagggagtgagacctgctgggaagcatgtctccagccaagaccagagacaggcacttcaaagaaggaggggttagggtaggagcttcatgctcaatggattgactaaacatacacattcaacaggttacatgaggagctatgaatattcatgaaagtggttctgacacatgcatattgaacaaacatgcatgcaacatacaacccatggtcactttggggtggagacttaacatttaaatgtattataattaggccctatatggcaaaaggtcttttcaggacacaaagacatgcaagtgcaggagctctgtaagccagccagaaccagtccatgatgggtagtcaccttgtcaggaaaaagttactgaaatcagtcacttgtccaaccaaagctgtagttatggctggtggaacagtggttggaggtcagttagtcagcatctgatgaagctgaaaatgttttaatattgcttatctcaaagccgtgctggacgggttgaactcggtcacaatcaattccgaggcgccaggcggcgggacatggagttgggccaatgccatagggtcgat

SEQ ID NO: 714735 - DNA, 140 bp, Homo sapiens
  misc_feature (33)..(33): n is a, c, g, or t
  misc_feature (79)..(79): n is a, c, g, or t
  misc_feature (96)..(96): n is a, c, g, or t
  misc_feature (127)..(127): n is a, c, g, or t
gacaaatgttctcctgctacacctctcatattnacacatttccttgcctccctgttacatcttcacggttctctgttcnagcgagtaccccaattncctggctgcttctgtgagtttttcatctatntttttcaagaaat

SEQ ID NO: 714736 - DNA, 132 bp, Homo sapiens
cgtctggtatacagactgtattgtcatctcgtgtgtgacgcacttgtcctctagagttgggaccgacgctcgggtcgcgtactagttacatgcgatctcgtcgtttcggattaccagaaatcgtcacactaa

SEQ ID NO: 714737 - DNA, 1543 bp, Homo sapiens
  misc_feature (791)..(791): n is a, c, g, or t
  misc_feature (842)..(842): n is a, c, g, or t
  misc_feature (960)..(960): n is a, c, g, or t
  misc_feature (1104)..(1104): n is a, c, g, or t
tggcgcgcaccttacctccgtctaggcttgtgttgttcactatcccacgccttgtgggtttgtttggacaactccttttatgatgagttgtcgtacgacacctgtggtttggtacaaaactagccgttggagaacccccctgtgatggattccactggtgatctctctccgctcccgcttgggggaaatatccccgcgtcttatattatactccttttccctgatgcggctagtgaacttgctccccgccaacattctgtgtgtgccccctatacaagtttctccgttttttgttgagccctcgtcgggggcccccccccatggttggggcacactttgtgcgctcgttgtcgggctccccccccttccgtggtttgggaaaaagtgttgtggaagtttgttcgcccctgctattttggtgccaacgcgttgttgtttcggttcccaagccccactttccccgccctatttgtggcgaccccagacccccttgatgggggaagaccacgggaaatgtctcccaaatgtggtggtagaaaaccaacgttggtgtcgtcaaaattaaggggtataaattatgagagtcccctttatcgttaatggttggtttaccaagaggagaattgttccccccccccgcaccagtcccctttgattggacctgggaagtgttcacagtggagccgctctttgtggttttgtgtgggttataacggagattttttcctcccccctgggcctcgagactttataggccccacttttatgagaagcccacccccacgcgcccncgctgggggagagcgcacgctggagaccactgctcgctcggagactcggtntttctctgttgggagatctcttgtgtgttccacgcgggacacacatgtggggtcgacacacatggcccctctgtatatgttgtttatgagaggggttgtgacaatgtgagatgttgtntttttggcgccctgcacatgtgagagttctctgtgtgtccccgctctttcttctcccgggagtgtcacacacttccccaacacccacaggggcgcaccgctctgttatactcacaagtgtgtgttctctgcccctcacagagtnttggtgtccacacaggagaggtgcactcccacacctcgaactctgtgatccacacagtggcgagatttgggaataataatcttgagaaaaactcttctgccttcagaccacacacacttggagaaaaagggtgttttctcttttccctcgcacacagctaccactcctcaactcgctcttgagaactctccacacagtaatgttctaagtgcaccctctttataaaagtataaccattttcagagaaaaatgaggagttgcccttcccttgtaatgccgcctttctgtacccttgagctatccctgagaattgccaagggagtttttaatataattcaataatgttaccaaagtcacgccactcttccctgttgggtcaattattgaatgtgctgttaaattaagtcgtttgccatttaaaaccaggtttgccccccca

SEQ ID NO: 714738 - DNA, 209 bp, Homo sapiens
ccatgccacacgatatgttttccatcactaaataggttgaacacattcggtacagtccctgtcttagtatcacgtgtaacatacatgtactctccacccatacatctgtgcatttactctttaggtgcctgtctcaaaaatttgtgtgcattcttatctctttccttgtgaactgttgtatcctgttaatgcatattgctctgtgactc

SEQ ID NO: 714739 - DNA, 363 bp, Homo sapiens
gcgtcgactgcgctgccaaatccgaacaaaggcttcgtaaatggcctcgacggtgaatatcgcccgggcctgactgggccgcttgagcgttaggcgcgaggcttgaggctatgtgcagccggcttgcggaatgatccgaacccgttcttcatggtttgccattaagctggttccacccgcaatcgtcgcagagaggagtctgattatgccaagtgccagcacggtaacacgactgatcacccgcaagaacgacctcggccagagccggatcgaaacgcaggaacgtgccctggtggtcggtcccggcgaggcgatcctcaaggtcgaacgttgctccctgaccaccaacaacatcacctacgc

SEQ ID NO: 714740 - DNA, 599 bp, Homo sapiens
  misc_feature (207)..(207): n is a, c, g, or t
  misc_feature (355)..(355): n is a, c, g, or t
gaggagagatgttgtcgccttaaaaaaattatttaaaggcatgtgggggggtcagggggggtgggacacttcctttgtgttatcctggggggtttgtttccccattgtccccaaggtttgtgtggaaacggtgttaatggcttaattgcggtggtgcaggcacaaaaaggcctgggcacaattgcggtgattgtcatggcccgctcncgggacattgtgaaagccatcgcccgcctcattgagttttataagcacgaaagttgtggccagtgtcccccatcccgtgagggtgtggactggataaacaaggtaatggccctttttttgaggggggatgcccggccggccgagattnactccttgtgggagatcagcaagcagataaaaggccatacattttgtgtttttgggtgagggggccgcttggcctgtgcagggttttatcccccccttttggccggggtttgaggaggggatgcaggggtttgcccaaaagcattaggcccgggaggttgctttttagcccccccccctggcctgtttttttgggtttatccatttggaatgttggacaataaagggggtgttgccccccctca

SEQ ID NO: 714741 - DNA, 223 bp, Homo sapiens
tttagggcctcgaactcctcacctgtgaatgagggacctgaccatggcatccctgtgtccacattactcgaacagcagaagcaaccaggctggcacagaggctcacacctgtaatcccagcactttcagaggccgaggtgggtggatagcttgagatcaggagttcgagaccagcttggccaatatgatgaaaccccgtctctactaaaaataggaaaacaaa

SEQ ID NO: 714742 - DNA, 291 bp, Homo sapiens
atcaccagaaaaggcagacagctggccaacatggtagaacaccgtctctagtaaaatagaaaaatgagctgggcgtggtggcgggcacctatatcccggggactcaggaggctgaagcacaagaatcgcttgaacccaggaggcagaggttgcattgagccgagattgtgccactgcactccagcttgggtgatatagcgagactcagtctcaaaaacaaaacaaaacaatcttcatatgtaggcatatcctttctcaatcctgattttattttaatgttacctttttccc

SEQ ID NO: 714743 - DNA, 81 bp, Homo sapiens
ccccgcaccggggcaggtgctgccaacccccacactcactcgactctaggcaggccccctgcaatgcgagcgaatccactc

SEQ ID NO: 714744 - DNA, 248 bp, Homo sapiens
aaaaacccccctttttttggaaaaagggggggggaggggttttttaagcggggccccccttgggggttccccccccccccttaggggaaaaaaggttttgggtttccgggggcccccccggggggggaaaaaaaaaaaagggcgggggttcccccccggggggggggggaaagaacccttttttgggggggggggggggggttttttttccccccaagggagaaacccccccccccttttttttttta

SEQ ID NO: 714745 - DNA, 610 bp, Homo sapiens
  misc_feature (31)..(31): n is a, c, g, or t
  misc_feature (94)..(98): n is a, c, g, or t
  misc_feature (103)..(103): n is a, c, g, or t
  misc_feature (113)..(113): n is a, c, g, or t
  misc_feature (143)..(143): n is a, c, g, or t
  misc_feature (146)..(146): n is a, c, g, or t
  misc_feature (155)..(157): n is a, c, g, or t
  misc_feature (163)..(164): n is a, c, g, or t
  misc_feature (173)..(175): n is a, c, g, or t
  misc_feature (194)..(194): n is a, c, g, or t
  misc_feature (196)..(196): n is a, c, g, or t
  misc_feature (198)..(198): n is a, c, g, or t
  misc_feature (203)..(203): n is a, c, g, or t
  misc_feature (208)..(208): n is a, c, g, or t
  misc_feature (217)..(217): n is a, c, g, or t
  misc_feature (225)..(225): n is a, c, g, or t
  misc_feature (246)..(246): n is a, c, g, or t
  misc_feature (266)..(266): n is a, c, g, or t
  misc_feature (274)..(275): n is a, c, g, or t
  misc_feature (278)..(278): n is a, c, g, or t
  misc_feature (297)..(297): n is a, c, g, or t
  misc_feature (303)..(303): n is a, c, g, or t
  misc_feature (339)..(339): n is a, c, g, or t
  misc_feature (341)..(341): n is a, c, g, or t
  misc_feature (350)..(350): n is a, c, g, or t
  misc_feature (389)..(389): n is a, c, g, or t
  misc_feature (395)..(395): n is a, c, g, or t
  misc_feature (430)..(430): n is a, c, g, or t
  misc_feature (439)..(439): n is a, c, g, or t
  misc_feature (460)..(460): n is a, c, g, or t
  misc_feature (468)..(468): n is a, c, g, or t
  misc_feature (489)..(489): n is a, c, g, or t
  misc_feature (507)..(507): n is a, c, g, or t
  misc_feature (516)..(516): n is a, c, g, or t
  misc_feature (519)..(519): n is a, c, g, or t
  misc_feature (550)..(551): n is a, c, g, or t
  misc_feature (563)..(563): n is a, c, g, or t
  misc_feature (574)..(574): n is a, c, g, or t
aactctaaaaaacatcttttccacgcaaatntttttaccagaaataaataaggcggcattcaatgaaccagtctgtcttcttcctaaggagctnnnnngaggntctgcctctnccacctacgggctgggatccttcagctctnaangaagggttnnnaaaggnngggggtaannnttgtaggaacacttttttntngnttggnacttncagcttgtnagcttggnattgcatttacaatttttgangtttgttctagatatatttnttttcagnngantccagcttctggttcctantccagntttttcatcatgggttctttcttccctctctaactntnaagctaggntgataagctccttattcttagttaagaggattggttgtncaaaanggaagcttgtgttaggtacttttttttcttttccnccttggttnaggggctgaggggctggttcntgcttganattggtcagcgggtggtaagntccatggtcttcttccgntcttcacgntgntccttccagttttcgttaggctcatacgtgnntttgatgatggncacacgcttanttaggtttagggagttggggaagagcaggtagaagt

SEQ ID NO: 714746 - DNA, 781 bp, Homo sapiens
gtctctgggtgttttagggaatacccgggcaaaaaaaaaaaaaaaaaaaaaaaaaatgtgggggggcgggcgcccggagaaaaggcttatccataagacaaataccggttggggcggcggcgggcgccgcgaggacagggaaacggtgagaaacaggggcacaggacgcgtggtgcccataggagagaatctccggggcccggggacataggggggaggggggatgtggtataatcacatatatacaaaaaagcgacacgcggggggggagagaggcggagagcgggtttgtgtgtatagagagaaattcacaagagagggaagggttgtcgtgagtgggtgtcggttatatgtgggagatgtgtgtattccaacgcggggggaggtcgcgacaaatgtgagaaaggagtcggacgaaaatatgtaaacatatctaaaagcgcccgcggacccggggggggaactggggactaaaacaaagaaaaaacaaaaacaaaacaagaaaaaaaaaaacaacgaacacaacaacgcgggcgacaaagccgaagacaagacaagcacggggactacaccaacaccacacgaacactgacgaaaagaaaaaagagaacgcagcacggacgaaaaacgaaccacaccaacaggagcccacacaccccgccaaaccggcacgcgaaacacgctgacaccgcacaccccccaccgagacagagccacgccaccaccacacccgaacccaaccagacccacacgcacacaccccacccacaccaccacccac

SEQ ID NO: 714747 - DNA, 592 bp, Homo sapiens
gaagtgattttatctaatacagattttttttttgggggacagaatttcactttatcccccaggctggagtgcaggggcgcggtcttaggttactggaacccctggtgcctgggttaaagggattttcctgcctcagcctcctgggttgctgggattacaggggtctgccaccacccccagctaatttttggatttttcatagagagggggtttcaccattttggccaggctggtcttgaactcctgaccttgggatccacctgccttggcctcccaaagggttgagattacaggggtgagccaccgcacccagccagaaatcatttctatctccatttcatattgaacaaaagatggggaaggaaggtttcactttttatttcagggtctgaaacaggaggagggctgttcataccaaggtaaaaagcaagggactggtttgtcacttaacacctttccaaagggtaacctaaatgatctttaagggggagacaacaaaagcttccggacaggggtgggaaattaagtttatttggcgtaattaacagaggaaattttaagcttcctaaaaaaatttgggtacttgtatcct

SEQ ID NO: 714748 - DNA, 382 bp, Homo sapiens
  misc_feature (9)..(9): n is a, c, g, or t
  misc_feature (176)..(177): n is a, c, g, or t
  misc_feature (181)..(182): n is a, c, g, or t
  misc_feature (192)..(192): n is a, c, g, or t
  misc_feature (219)..(219): n is a, c, g, or t
  misc_feature (255)..(255): n is a, c, g, or t
  misc_feature (265)..(265): n is a, c, g, or t
  misc_feature (278)..(278): n is a, c, g, or t
  misc_feature (283)..(283): n is a, c, g, or t
  misc_feature (296)..(296): n is a, c, g, or t
  misc_feature (300)..(300): n is a, c, g, or t
  misc_feature (307)..(307): n is a, c, g, or t
  misc_feature (347)..(347): n is a, c, g, or t
  misc_feature (349)..(349): n is a, c, g, or t
  misc_feature (371)..(371): n is a, c, g, or t
  misc_feature (376)..(377): n is a, c, g, or t
  misc_feature (380)..(380): n is a, c, g, or t
aggagaaanaaccagaaactgtaacttcagtacatttcaaacggaatgtccctcaggtcaattagaaatgcaagacaaaatagcttcaattccgtttttttttcctttaaaaatacttgttttctgtacaagatacactacagtaaacactggaaatcattttatccctttctttnnttcnnattttttttnttcataatgcggttaatactagatttntttattcatctagttaatctgacaaaatattaaganaatttttacnagagaagggctancttcnccttggctttaancctngttttcnctccatttttttccggtttaatgttcccccgtgtgtgttncncgttctcttgggtttctttttnttccnnctncc

SEQ ID NO: 714749 - DNA, 652 bp, Homo sapiens
aagcagcggtatcaacgcagagtgcccattacggccggggaggcttccgcgagatcttcggtgggggtacgggtgatttacgccaggactgctgatgcagttgtgggtatctcgtcctgcagactactcgtggaccctggtcacggattcccataagtgtaccaacaaacagtagtcagaagcggccactggaccttctccagcggaggaaacgcaacggcttggggcaaggaatttgcggggcttggaacgcccaaacgcggcaaaattttcagattgcaaacgcctgttggcccaaaagggggggacacaaggggtttcttccgaattgatccacgtctttctttgagcctctatgaggaacactgacacctctgcaaatactatgagacacacggttattggccattctgtccggtgtttaagccagccaattggcccaaagggaatcctgggttggtgcggttaccgggccttgggccccttgctacttttcccacaacggcggtttcccatccttcgttttaaactttacacaccctttcacggtaattgcgaatatcacccccatgcgattacataattgcctcactttgtgccatttttgggcctgcaacaggtagcactgcactttcaagtggtactctacgtc

SEQ ID NO: 714750 - DNA, 373 bp, Homo sapiens
cttactgggaccatgctcatggggtcggaaaccgggtgccggcctgacggtgtatcccttggcattggcgccatcgatcaacaaacctctcgtggctaccggtacagtatcggttacgccacctgtccgaaccacgaagaacgcgtcaaggtggtgaaaatactcgatacgacgaggattcgggggaccaactgtcagaggagttccagcttcatcctggccagtccaccgacgccttcgtcgtacatcacccggagggcaactatttcaatgccacgtgagacgcacacagcgaccgccgaccgttttttcgccgctatcttgtgggatttcgacggtactctagtcgacactgagtcccgggaggtcgagg

SEQ ID NO: 714751 - DNA, 670 bp, Homo sapiens
  misc_feature (25)..(25): n is a, c, g, or t
  misc_feature (32)..(32): n is a, c, g, or t
gcggccgcctactactactaaattngcggccngtcggctctacgcctcctacgtttacctgtccatgtcttactactttgaccgcgatgatgtggctttgaagaactttgccaaatactttcttcaccaatctcatgaggagagggaacatgctgagaaactgatgaagctgcagaaccaacgaggtggccgaatcttccttcaggatatcaagaaaccagactgtgatgactgggagagcgggctgaatgcaatggagtgtgcattacatttggaaaaaaatgtgaatcagtcactactggaactgcacaaactggccactgacaaaaatgacccccatttgtgtgacttcattgagacacattacctgaatgagcaggtgaaagccatcaaagaattgggtgaccacgtgaccaacttgcgcaagatgggagcgcccgaatctggcttggcggaatatctctttgacaagcacaccctgggagacagtgataatgaaagctaagcctcgggctaatttccccatagccgtggggtgacttccctggtcaccaaggcagtgcatgcatgttggggtttcctttaccttttctataagttgtaccaaaacatccacttaagttctttgatttgtaccattccttcaaataaagaaatttggtacccaaaa

SEQ ID NO: 714752 - DNA, 134 bp, Homo sapiens
  misc_feature (39)..(39): n is a, c, g, or t
  misc_feature (69)..(69): n is a, c, g, or t
aaacatagaggattggtcagtaagtgcagcaaaccaccnatggcacatgtatacctatgtaacataccntgcacattctgcaaaagtatccagtttgtttattttttgttttttgtggggttttttttagaaga

SEQ ID NO: 714753 - DNA, 664 bp, Homo sapiens
  misc_feature (64)..(64): n is a, c, g, or t
  misc_feature (68)..(68): n is a, c, g, or t
  misc_feature (89)..(89): n is a, c, g, or t
  misc_feature (100)..(100): n is a, c, g, or t
  misc_feature (117)..(117): n is a, c, g, or t
  misc_feature (120)..(120): n is a, c, g, or t
  misc_feature (125)..(125): n is a, c, g, or t
  misc_feature (130)..(130): n is a, c, g, or t
  misc_feature (150)..(150): n is a, c, g, or t
  misc_feature (167)..(167): n is a, c, g, or t
aaaccgccacagtaaccaccttcttaaaaccacatgtaaaatcctcctatcgaaaattaaatanaccnctagaatagtccaaatatcanctgtgtagcancaagatttgtgctcttnttnagagnccaanccaaagcactcctcttaaancagaaaatgaaaagaancctcatctaagattctgttcaaagcttagtactcgtgccgaattcggcacgaggatgactgggagagcgggctgaatgcaatggagtgtgcattacatttggaaaaaaatgtgaatcagtcactactggaactgcacaaactggccactgacaaaaatgacccccatttgtgtgacttcattgagacacattacctgaatgagcaggtgaaagccatcaaagaattgggtgaccacgtgaccaacttgcgcaagatgggagcgcccgaatctggcttggcggaatatctctttgacaagcacaccctgggagacagtgataatgaaagctaagcctcgggctaatttccccatagccgtggggtgacttccctggtcaccaaggcagtgcatgcatgttggggtttcctttaccttttctataagttgtaccaaaacatccacttaagttctttgatttgtaccattccttcaaataaagaaatttggtacccaaaa

SEQ ID NO: 714754 - DNA, 458 bp, Homo sapiens
  misc_feature (25)..(25): n is a, c, g, or t
  misc_feature (32)..(32): n is a, c, g, or t
gcggccgcctactactactaaattngcggccngtcgatgcaatggagtgtgcattacatttggaaaaaaatgtgaatcagtcactactggaactgcacaaactggccactgacaaaaatgacccccatttgtgtgacttcattgagacacattacctgaatgagcaggtgaaagccatcaaagaattgggtgaccacgtgaccaacttgcgcaagatgggagcgcccgaatctggcttggcggaatatctctttgacaagcacaccctgggagacagtgataatgaaagctaagcctcgggctaatttccccatagccgtggggtgacttccctggtcaccaaggcagtgcatgcatgttggggtttcctttaccttttctataagttgtaccaaaacatccacttaagttctttgatttgtaccattccttcaaataaagaaatttggtacccaaaa

SEQ ID NO: 714755 - DNA, 99 bp, Homo sapiens
atggggagactgagtgaccctttgcttggatttgtgtcatgtggatgaaacagtgtctacctcctagtagcatgcatggaagtgtgctaacagttttcg

SEQ ID NO: 714756 - DNA, 340 bp, Homo sapiens
  misc_feature (48)..(48): n is a, c, g, or t
  misc_feature (80)..(80): n is a, c, g, or t
tttgccccgggggtggaatttacttcagatacggaacccccctaacanccggtttccaggaggaaccaataacttttggnccggccaaaacagagttggggaagcgcccgaatctggcttggcggaatatctctttgacaagcacaccctgggagacagtgataatgaaagctaagcctcgggctaatttccccatagccgtggggtgacttccctggtcaccaaggcagtgcatgcatgttggggtttcctttaccttttctataagttgtaccaaaacatccacttaagttctttgatttgtaccattccttcaaataaagaaatttggtacccaaaa

SEQ ID NO: 714757 - DNA, 227 bp, Homo sapiens
gaggcttagctttcattatcactgtctcccagggtgtgcttgtcaaagagatattccgccaagcctcgggctaatttccccatagccgtggggtgacttccctggtcaccaaggcagtgcatgcatgttggggtttcctttaccttttctataagttgtaccaaaacatccacttaagttctttgatttgtaccattccttcaaataaagaaatttggtacccaaaa

SEQ ID NO: 714758 - DNA, 605 bp, Homo sapiens
tcacggatcttacttcagaaatcgcggtcctgcatcatttcacggatccattgggtctaggacgcgccctcggcgtgacctggctgtcaccctcatcctgcagaggaggagcaccatggcgctcaaacagaacctcaacctgtcgatcttcgtcggtggtgagacattcgcgtcgaagattgccggtaacttctccgaggccattagcgatcccacctcgctgggtgccctcgtggcgtcggccctggccctgttcgtcattaccttcgtggtcgacgcgactgcccggttgattgcggcgaagggggttaagcgacgagcgccaccacccctgaccacatcacccaccatggcgacaacacgcccggacagctagatctctcccgcccgtctggtaaacggactatcaagagcggctgcgcctcagcattcatgatcgtggccaccgtactggctgttatcccactggcctggctggtcaacgcggccgtccggcgcagcatcggatcactattccacgcgtcgtgtaggaccactcgatggatcctccttcgacttggcgagcagggcgcatccacgctatcgtcggaaccttgaaatggctt

SEQ ID NO: 714759 - DNA, 702 bp, Homo sapiens
  misc_feature (106)..(106): n is a, c, g, or t
  misc_feature (137)..(137): n is a, c, g, or t
  misc_feature (141)..(141): n is a, c, g, or t
  misc_feature (162)..(162): n is a, c, g, or t
  misc_feature (173)..(173): n is a, c, g, or t
  misc_feature (190)..(190): n is a, c, g, or t
  misc_feature (193)..(193): n is a, c, g, or t
  misc_feature (198)..(198): n is a, c, g, or t
  misc_feature (203)..(203): n is a, c, g, or t
  misc_feature (223)..(223): n is a, c, g, or t
  misc_feature (240)..(240): n is a, c, g, or t
cccagggccgtataataacttagccacagtatcttctataacattcatcagtaacccttctaaacccatgaaaaactcaatcctgttcctatctgaaaagtggtanttctccattcatacccgggaaaattaaatanaccnctagaatagtccaaatatcanctgtgtagcancaagatttgtgctcttnttnagagnccaanccaaagcactcctcttaaancagaaaatgaaaagaancctcatctaagattctgttcaaagcttagtactcgtgccgaattcggcacgaggatgactgggagagcgggctgaatgcaatggagtgtgcattacatttggaaaaaaatgtgaatcagtcactactggaactgcacaaactggccactgacaaaaatgacccccatttgtgtgacttcattgagacacattacctgaatgagcaggtgaaagccatcaaagaattgggtgaccacgtgaccaacttgcgcaagatgggagcgcccgaatctggcttggcggaatatctctttgacaagcacaccctgggagaccagtagccgtggggtgacttccctggtcaccaaggcagtgcatgcatgttggggtttcctttaccttttctataagttgtaccaaaacatccacttaagttctttgatttgtaccattccttcaaataaagaaatttggtacccaaaa

SEQ ID NO: 714760 - DNA, 461 bp, Homo sapiens
  misc_feature (271)..(271): n is a, c, g, or t
  misc_feature (280)..(280): n is a, c, g, or t
  misc_feature (283)..(284): n is a, c, g, or t
  misc_feature (303)..(303): n is a, c, g, or t
  misc_feature (306)..(306): n is a, c, g, or t
  misc_feature (319)..(319): n is a, c, g, or t
ccccacagctactggaatccccgctgttgctccaggccaagcttttggttgattaatgagggcatggggtggtccctcaagaccttcccctaccttttgtggaaccagtgatgcctcaaagacagtgtcccctccacagttgggtgccaggggcaggggatcctcagtatagccggtgaaccctgataccaggagcctgggcctccctgaacccctgggttccagccattttattgccagcctccttgtggaccttttggcccccagcccnttccccacncanncccagaagggtcccaaagntgncccccctccaggncctaggcccagcccctcagcctcatttggagccccttaagaccagtcccccccccctttttggcctcatttgaccctgctccgcatcctgctgtgtgtcctgttccatgttccggttccatccaaataccctttttggaaca

SEQ ID NO: 714761 - DNA, 162 bp, Homo sapiens
gcggccgcctactactactactactgctcgaattcaagcttctaacgatgtacggggacatgttggggtttcctttaccttttctataagttgtaccaaaacatccacttaagttctttgatttgtaccattccttcaaataaagaaatttggtacccaaaa

SEQ ID NO: 714762 - DNA, 246 bp, Homo sapiens
aaaaaaaaaaaaaaaaaaaaaaaaaaaaaaaaaaaaaaaaaaaaaaaaaaaaaaaaaaaaaaaaaaaaaaaaaaaaaaaaaaaaaaaaaaaaaaaaaactcgagccgtggggtgacttccctggtcaccaaggcagtgcatgcatgttggggtttcctttaccttttctataagttgtaccaaaacatccacttaagttctttgatttgtaccattccttcaaataaagaaatttggtacccaaaa

SEQ ID NO: 714763 - DNA, 151 bp, Homo sapiens
tggtaatagccgtgggcgtttgataggatcttaccatgtggggggatagattggtataacggaataaggtggataagactgtgttggtggcgcaacctggctgggcgatcctcgtggaccggccgagccggtcggaccactggcatggtcc

SEQ ID NO: 714764 - DNA, 1131 bp, Homo sapiens
  misc_feature (74)..(74): n is a, c, g, or t
  misc_feature (77)..(79): n is a, c, g, or t
  misc_feature (83)..(83): n is a, c, g, or t
  misc_feature (99)..(101): n is a, c, g, or t
gggaacatgttatcacactcatgaatctgctaacctcaacgtgggcattttccttcacgatatccataatccanacnnntctnacttggaaaacccctnnnatgcaatggagtgtgcattacatttggaaaaaaatgtgaatcagtcactactggaactgcacaaactggccactgacaaaaatgacccccatttgtgtgacttcatgagacgttcttcgccgagagtcgtcggggtttcctgcttcaacagtgcttggacggaacccggcgctcgttccccaccccggccggccgcccatagccagccctccgtcacctcttcaccgcaccctcggactgccccaaggcccccgccgccgctccagcgccgcgcagccaccgccgccgccgccgcctctccttagtcgccgccatgacgaccgcgtccacctcgcaggtgcgccagaactaccaccaggactcagaggccgccatcaaccgccagatcaacctggagctctacgcctcctacgtttacctgtccatgtcttactactttgaccgcgatgatgtggctttgaagaactttgccaaatactttcttcaccaatctcatgaggagagggaacatgctgagaaactgatgaagctgcagaaccaacgaggtggccgaatcttccttcaggatatcaagaaaccagactgtgatgactgggagagcgggctgaatgcaatggagtgtgcattacatttggaaaaaaatgtgaatcagtcactactggaactgcacaaactggccactgacaaaaatgacccccatttgtgtgacttcattgagacacattacctgaatgagcaggtgaaagccatcaaagaattgggtgaccacgtgaccaacttgcgcaagatgggagcgcccgaatctggcttggcggaatatctctttgacaagcacaccctgggagacagtgataatgaaagctaagcctcgggctaatttccccatagccgtggggtgacttccctggtcaccaaggcagtgcatgcatgttggggtttcctttaccttttctataagttgtaccaaaacatccacttaagttctttgatttgtaccattccttcaaataaagaaatttggtacccaaaa

SEQ ID NO: 714765 - DNA, 376 bp, Homo sapiens
cgtcgacggaagaggttttatatgatggagaatctttttaaagtaaagattaataatttttagttgtgtgcctgcacatgtggggtgtgtgtatgtgtgtgtgttttgagtgtgtctgctacagcatgtgtgtggagattagaggaggacttatcaatagataaaatgaaattatactcatcaaatgtgtgtgtgtatatatatagattgcaaagactctactttggagttagagttccacccagggaaacaaaatgcccagagagaacaacaccacagatccacagaagttcattaccagtaaaacgtaagattaacaaaaatgaaggtgtgtcaaaccaggtcgacgcggccgcgaatttagtagtagtaggcg

SEQ ID NO: 714766 - DNA, 1121 bp, Homo sapiens
  misc_feature (32)..(32): n is a, c, g, or t
tctagaggatcccccaacgcatgtgccgctcncccaatcttccttcaggatatcaagaaaccagactgtgatgactgggagagcgggctgaatgcaatggagtgtgcattacatttggaaaaaaatgtgaatcagtcactactggaactgcacaaactggccactgacaaaaatgacccccatttgtgtgacttcatgagacgttcttcgccgagagtcgtcggggtttcctgcttcaacagtgcttggacggaacccggcgctcgttccccaccccggccggccgcccatagccagccctccgtcacctcttcaccgcaccctcggactgccccaaggcccccgccgccgctccagcgccgcgcagccaccgccgccgccgccgcctctccttagtcgccgccatgacgaccgcgtccacctcgcaggtgcgccagaactaccaccaggactcagaggccgccatcaaccgccagatcaacctggagctctacgcctcctacgtttacctgtccatgtcttactactttgaccgcgatgatgtggctttgaagaactttgccaaatactttcttcaccaatctcatgaggagagggaacatgctgagaaactgatgaagctgcagaaccaacgaggtggccgaatcttccttcaggatatcaagaaaccagactgtgatgactgggagagcgggctgaatgcaatggagtgtgcattacatttggaaaaaaatgtgaatcagtcactactggaactgcacaaactggccactgacaaaaatgacccccatttgtgtgacttcattgagacacattacctgaatgagcaggtgaaagccatcaaagaattgggtgaccacgtgaccaacttgcgcaagatgggagcgcccgaatctggcttggcggaatatctctttgacaagcacaccctgggagacagtgataatgaaagctaagcctcgggctaatttccccatagccgtggggtgacttccctggtcaccaaggcagtgcatgcatgttggggtttcctttaccttttctataagttgtaccaaaacatccacttaagttctttgatttgtaccattccttcaaataaagaaatttggtacccaaaa

SEQ ID NO: 714767 - DNA, 901 bp, Homo sapiens
acgagaaacatcttcaagatctacaagacatttttgatccatctagaaacatggcaacgtatagaaatattcttagctacgtcaaacgtatgcagcctccaatcacttccacctcttccctgttgtcacacgaacagactactgaccctttctaccatgaacggaaactgacctccaaacgatacgactggctttcagtaaaccctttggacacacgttaacgacactgactttccaacggacacactccgccaacgttgatctcgacattgcactttactggcttacacactggaacaccaagctcatgaatgataacggacacaagaacgggtccaccttgaagttcccacaggcacacgccaccaaccattatccaagaaacccatctggcctatggacacttaggtcaccgaagcacggcacgcgtttggcctaccaacccacacacataacaaatgagagcaaaccggcccaagcaaaggcatccctcacctggccacataacccactgtgccccccaaaggcaacaggcacattaaattcacttgcaagcggcacttggcaccaccaaaaaagtaggctcacaaatagcgacaccacgcgcctggaaacaccaaccacgacataacttcctatttatatccaccaaaaggttctcattcccggcacactggattcacgacaagcgctaacccaaaacgacaactctgccccaaggctggcaacgttacaaactgtgttatccgccagactggcacagtatggaaaaccttagtaatccccacgtctttacaagccaatactgattgggcgtggcaaatgagcccccttctgccacacacgtataaatttgccagaacttaccgcccgcttagtgacacccccacgtacaccgcca

SEQ ID NO: 714768 - DNA, 223 bp, Homo sapiens
ggatatttggatagctttgaggatttcgtggaaacgggattgtcttcatataaactctagacagaagcattcccagaagcttcattgggatgtttcaaattgaagtcacagtgttgtaacagtcccctttcattagagcatgttttgaaacgaatctttttggtagtatctgggaagtggtcattttggagcgttcctcaggactacggtcctgcaaaatgtt

SEQ ID NO: 714769 - DNA, 287 bp, Homo sapiens
gtcagggcgagtgagtaaggggcctccgtgtatgaggtacggagggagatgaaccatacaggagactgagaggatgtctagggcataggagaaaaaccgtaagagtatagagttctggaagtcacgtgtggaaagtgtttcacggaggaaggtgtgatcaactatgttaaatgctgctgatagatgaggaggaagtataaccaggttagcaaagtggagattattgatgaacttgaccaaagcatttttgttggtgtggtggaggcacaggcctgactgaagtggat

SEQ ID NO: 714770 - DNA, 1208 bp, Homo sapiens
  misc_feature (187)..(187): n is a, c, g, or t
  misc_feature (492)..(492): n is a, c, g, or t
  misc_feature (565)..(565): n is a, c, g, or t
tcaagtaacggacaaatataggaaaccagaaggagggagccccgaggctgtgggacaaatctctgtgggtataccccttccccaacagaaacagggggaggagggtggccccttacagcccttttagtgggtcgatttcgggccccccttgtgctcactctgtggtgtgcgagaaatctccttgagngaggcgagggccccaactctttccctgtgggaaccgtggggatagctcggctcaacccaagcctgtgccaagtgcccccaagccccttctttccccaaaaagaagagttattcttgtggggggagggagaccgggtggcgcaagacaccacggacgcgcaatgtgacgagatgtagacacatttgtgccgcgctgtggtatacgccaggcacgccaatgtgcacgggaatgtgttcagaacaacatgtggaccacaatgtggtgacacaaagaaacaccaacaacaaaactgtgtgtcacacagnagggactacgttgtgggtagaaaacgagagaggagaacacatagtgtgggacccccaagaacacctgtgtggnggggcgcagagcggaatcgagaccgcacacgagagggcggcgggttgtggaagaacgcggcggccaagggggtgtgagcgcctcccgctggagataatcgtgggctgtgcccccacatctgtagacgcgaagcgggggggagacaaatggtgcgcttagacctctggggggagagaacacgccaaaaaggataggggtgtatacggcggcaacggcaacgcctccaaatgaacacacacctttcaacggtgtggcgcgtgggccaaacaagggggggcctcatttgtggggcgcccactccaacacctttgggggacacgaacaataaagggtgttagaacagtggggcagttcgttaccaaatcttcaagcaccaacatacaatatgtgtggttaccgtctagaagaaattcacaccaagggggcggcgagaaggcgggcaccaggggggggggtctttgtctgtgccccaccacgcctggaaacaaaagcgggcgactaatcggggggaaactaccaacccccctaacgggagaattacccactgggatatgcaccaaaagagggcggcgtctttttccacaaaccatcagaattagcggggggcacatacggcagacaaacaattgtggcggagcaaagg

SEQ ID NO: 714771 - DNA, 977 bp, Homo sapiens
  misc_feature (19)..(19): n is a, c, g, or t
  misc_feature (85)..(85): n is a, c, g, or t
  misc_feature (106)..(106): n is a, c, g, or t
  misc_feature (176)..(176): n is a, c, g, or t
  misc_feature (260)..(261): n is a, c, g, or t
  misc_feature (264)..(264): n is a, c, g, or t
  misc_feature (275)..(275): n is a, c, g, or t
  misc_feature (283)..(283): n is a, c, g, or t
  misc_feature (318)..(318): n is a, c, g, or t
  misc_feature (353)..(353): n is a, c, g, or t
  misc_feature (392)..(392): n is a, c, g, or t
  misc_feature (412)..(412): n is a, c, g, or t
  misc_feature (415)..(415): n is a, c, g, or t
  misc_feature (419)..(419): n is a, c, g, or t
  misc_feature (423)..(423): n is a, c, g, or t
  misc_feature (429)..(429): n is a, c, g, or t
  misc_feature (433)..(433): n is a, c, g, or t
  misc_feature (439)..(439): n is a, c, g, or t
  misc_feature (459)..(459): n is a, c, g, or t
  misc_feature (465)..(465): n is a, c, g, or t
  misc_feature (467)..(467): n is a, c, g, or t
  misc_feature (548)..(548): n is a, c, g, or t
  misc_feature (563)..(563): n is a, c, g, or t
  misc_feature (615)..(615): n is a, c, g, or t
  misc_feature (632)..(633): n is a, c, g, or t
  misc_feature (638)..(639): n is a, c, g, or t
  misc_feature (807)..(807): n is a, c, g, or t
  misc_feature (822)..(822): n is a, c, g, or t
  misc_feature (874)..(874): n is a, c, g, or t
  misc_feature (877)..(877): n is a, c, g, or t
  misc_feature (905)..(905): n is a, c, g, or t
  misc_feature (973)..(973): n is a, c, g, or t
gcaaaatgggtcgtaagtnaaagacagaattgaacactatcctctgagtgtgtgtggatatgtctctgtataggcaagtgtctgngtctatagatacttttcgctnttttgatagtgattaaagcgccactttagtgaatggataaagtcttattctaataatgcgaaaaccagantcaaatacgccccgagtccaatgccctccccgccccagcctgcctccctccatccctcccggaaggccgcccccccgcccccannaangccagggcctnagacagcnccagcattcctactgagaacccagggatggatgcnggctcttatatccctctgacctataccccctgggngaagagcctctcgggcgagggggggggcaggaggagtcntgggagtggcgcgtcagagnggnggantggnacctgngganacctcngcgggagggtcaggtgctgngagggngnggtgttcggggaccatggagacttgaagcggggcggggccctccgaggagtcagcggagagaagcgtatgagcctttgccntgtcttccatctgcnttgcctctccaggctctgaagcaacctgagatgtcatgaaggggggggaagnacaaagtgcttcagggnncgganngtggatgttttcattttctttggcctcaggagttcttactggcttctctggtggttctggattaggagagacctctagggaggtcctaggacttgcagtcccagtccccaaggaggccctagggctggtgggtgaacccctccagaggctgtagggctggaaggtatntccctgaggagggcntggggcttgcagtggctctgggtggaggagggcctactaggggggtgctganggnctctggatagaggctctcttcttttggntggtcagatccttcacttgcggtgcgggttcggaggactacttctgtggcagatgatgaaggctgccngaag

SEQ ID NO: 714772 - DNA, 138 bp, Homo sapiens
  misc_feature (4)..(4): n is a, c, g, or t
  misc_feature (23)..(23): n is a, c, g, or t
  misc_feature (123)..(123): n is a, c, g, or t
  misc_feature (125)..(125): n is a, c, g, or t
cagncccatcatcccccctgctntgagcgctcaccctgttgaaggctcagcccctcaaccggtggtcattctgggggaggaagtggggtcccacagctctccgccaccggaataaatccctcntnccccagtcggaac

SEQ ID NO: 714773 - DNA, 141 bp, Homo sapiens
gtgagctgggatcctgacagacccaggcccccttcccatcaccctgtgtgggagggcgcgccccagcaccccttccctgtgcgatgagaaagcaccttccttaagaccaaagaaaggctctccctctgcctgagggagtgg

SEQ ID NO: 714774 - DNA, 205 bp, Homo sapiens
gagctaatgggcagcagtcagctggggtgttctgagggatgctcatctttatacacgtcctcccctcaatgtaacttttggctgttttacacagagatacaggtagaccccacagaggagaaggaggggattcaacagccttaatgtctggtagcagtgagatttggtgattgtccggggggatccctgggtttccctgggtacc

SEQ ID NO: 714775 - DNA, 359 bp, Homo sapiens
cagactgaacgtagaagcacgcattacagcatagcaccttgagttatgccctagacccctgcaagaaactaccctacaatctcatagcaccatggggcgtacagacttgagatggatctccagtggaagtgatttgtcggatgaagatgagacatttgctcagttacagagagccaagttctagagaaattttaccagctatctcatcagattgttgaataagaagcatgatacggaacactgtcctactcattgattcagaatcccgctcatcaataccacgtgcagtttgcctcggatgtcagacagattatggaaagactgatagatcctagaacaaaatcactagagaccatttg

SEQ ID NO: 714776 - DNA, 423 bp, Homo sapiens
aatctgatcactcccgtagggatgcatagacggctagcatgatgacttggcttgttaaagtcgcagacaagggagccagtcctcaattgtataatgatatccacttacttggtttgtttgtctatttttgagacggagtctcgctctgttgcccaggctgcagtgcagtggctcactgcaacctccgcctcccaggttcgagcaattatctgcctcagccttccgaggagcgggattagagacgaccaccaccaagcccggctaatttttgtatattcagtagagatggggttcaccatgttaaccaggctggtcttgaactcctgacctcgtgacccacccgcctcggcctcccaaagtgccgggattaccggtgttaggcaatgcggctggcctgttagatctttatacgcaacaccttcc

SEQ ID NO: 714777 - DNA, 259 bp, Homo sapiens
tcgaggcaggtttgtacttgacgcagaatatgctcactcaatgactgacatgcccaccacgatttccatcttatcacagtatgctttatatcttgtaagatattaaatatttgttctcctcacagctcaaatgtcatgcaatttcgatctcagatgtgggtcagatacctataaatctcctgaggtagtcgttgaaatgacttttttttttcttgagacagagtgtcactctcaaccatgctgaagtgcaggaaacaag

SEQ ID NO: 714778 - DNA, 102 bp, Homo sapiens
tgtactattgagggaagctagatgaaggctctatgagaacacgcattatttttgcaccttgtctataagtgtcaaattacttcagacagatcacccttcgtg

SEQ ID NO: 714779 - DNA, 106 bp, Homo sapiens
  misc_feature (104)..(104): n is a, c, g, or t
tggtaatctttattagtatatgatcatcctcaagggctcacttgctagccttttaaacaaatttctaacaaatttacagttcatttaaaaggtaataaataccngg

SEQ ID NO: 714780 - DNA, 182 bp, Homo sapiens
agatctgccagactgtacaggtagcccacactgcacggggtggaggcacttatgtaggtctgtatgataagctggcagtacagctcgtcccgcagaggtcgcaggtcatagccctgatctagtaggcatgcccaggaattattaggaatatgggtcagacatgtgactccagatagcatgca

SEQ ID NO: 714781 - DNA, 813 bp, Homo sapiens
ctgggcgtattaggcgcggtgctcgcgttgtgctgcagtcggatagtctggcggtggtgttcccccccccggtgtgtgcggattttttggtgctcgggcgggggctttgtctgtggccccgtgtgggtggtgtggccccccccccccggagtggcgggcggtggctgggtttcacccccgcgcggcagtactccccggtgtgtgcgggctgcttggggggcctgggtttgtgtcgcagtccgcgctggggtgtctttgcggccgctccttgtggcgcccccccgcggtggtgttctcccgcaggttgtgggccgccccgcgccttcaccctccggggggtctctgtgggtgtcggcgtcctctccccaatagtggggcgccggcccgctccgccctttttgtggtgcgcgcagggggcgggcgcttccctcctgtggtgtttctctcgcctccgctgttgccccgcgtcgtaggtggtatgccgcccccccccgttctttctttctttcccccgtggtgccctccccccccggggggcgctctttttttgtgtaagatgggggcccccccccctgggggggcgtggtgtttcccccccccgggttttttttatgagagggagagttctggctcttccccctcccgtggggagaggaagttggttttcgtctccttcctttttttctctctgtgtgtgggcgccccccccccgcgccgtccgtctcgcgttgccgcggcccctctccccccctccccccccccccccggtttttaacaaacaaaaaacacaccccccccctgggtctgtttgta

SEQ ID NO: 714782 - DNA, 603 bp, Homo sapiens
gggattacaggacatgagccaccgtgcgccggcccgttgaatcctgcttttgtaaaacaaccttaggattttgatatatccagcatatggacaaatccatacatcacagaatgcagatccgtcgtgtccagtgtgctaggtgcggtcaagatggaaactgcctgaatagagcgggcgtttcctcctggggtgaccagcatgttctgcagactagcagatgatgcgctgtgccaccattgtagagggtactaaaatgccgccgaatggtacaccttaaactggtcagattttatagttatatgaacgtcccttccatacattatttgaggctgggcacggtggttcacacctgttatcccaacagcttttggaggccgagatgggtggatcatctggggtcaggagtttgagaccagcctgaccaaagtggtgaagccccgtctctactaaagatacaaaaaggttagctgggtgtggtggcgcatgcctgtggtcccagctactcgggaggccgaggcaggataatcgcttgaatccgggaggcagagattgcagtgggcctgggtcatgccattgtactaaagcctaggtgacagagcaaat

SEQ ID NO: 714783 - DNA, 397 bp, Homo sapiens
  misc_feature (68)..(68): n is a, c, g, or t
  misc_feature (98)..(98): n is a, c, g, or t
  misc_feature (106)..(106): n is a, c, g, or t
  misc_feature (113)..(113): n is a, c, g, or t
  misc_feature (166)..(166): n is a, c, g, or t
gttgttgtataaattaattacaaaatgactaatgttaattttacttttattagagatggtagaaggantgaggatctggggaggagaaaggaggaaantggaggantgtgaangtggttatgttttttttaatggagagaaaaattaattggatttgggcactccntacatttttccacctcctgccgcccccgtgagccaatgcagggagatttttttgaataatggaacattttcctgttttaattagatgcaattttgcaagcagtttttatgatttagcaagtccattaaaaatggcatttgttttggtttgacacttgaaagggggtccacagagcataaacattggaaattacttgtagggagagacaatattaaaattccccagcctgga

SEQ ID NO: 714784 - DNA, 372 bp, Homo sapiens
gtcgacggagggtagatcacttgaggtcaggagttcaagaccagcctgaccaacatggtgaaacccatctgtactaaaaatacaaaattaggctaggcgcggtggctcacacctgtaatcccagcactttgggaggctgagatgggcagatcacaaggtcaggagatcaaaaccatcctagctaacatggtgaaaccccgtctctactgaaaaaacaaaaaattagccaggcatgatggtgggcacctgtagtcccagctacttgggaggctgaggcaggagaatggcgtgaacccaggaggcggacttgcagtgagccgagattgggccactgaacccaggaagcggagttgcggtgagcgtagattgggc

SEQ ID NO: 714785 - DNA, 125 bp, Homo sapiens
cacgaggactcactcttctatatctacggctcacatttttttggccacaggcttccacggacttcacgtcattattggctcactttcctcactatctgcttcatccgccaactaatatttcactt

SEQ ID NO: 714786 - DNA, 194 bp, Homo sapiens
aaattgtgggtactgtggatacaagttattttctacaggtagactgagataaactgaaaactcaggtgctggcatcaaactcgtagtcccatagtcagggttaattacacacattgttaactattggatgaagaatacatggtattgattgtgtgcaaagcctcccgacggacctccggggggatgctctggta

SEQ ID NO: 714787 - DNA, 195 bp, Homo sapiens
gagatccccacgttggcctggtctgacccaccggtccctcaactggctggctcatttcggagagatggcctcaaaggtccgcctggagtacacagtgaccactgagccaggagctggacactagctggcatagtgtctgagaaagccagggtaccgcaggctcgaattcgcttatcatcgatccatggctgcttt

SEQ ID NO: 714788 - DNA, 1109 bp, Homo sapiens
tttcagaacagctgtctgcaggcaacgacctatcatgttgaccctctggaggagagcgctgtgcgagcccctcggcgtgattccagctccgactgccctgatgcctattatatacacatgcggttctatccatactgtgctgtttatctgtgatattcatcgttgacaaccatgtctctcagacgaggcccaaggaccaccttggactccttatcacgacgcacccaaagcacccttcagaccaagcttcccaatgcctgtgaactcactcaccattcggacaagtagctcaccgtgttacacccttcccttcatagtatacacagaagtttaagttaagaatgagatatttatgaatttaagcatggatcagtacacaggacagagagcatcacgccagggccttgaggacaggctgaccctccgtaccccggggtggcagtaggggctgggagcacccatccgacaggacagagccctccttacagaaagtgcagctcaagtcttaaagacaccaaaacatgagccatgggcacgcagccgactacccgggccatggcgttcacatgcagggcagggggcggcaccgctcccctgatgactgcatcccgcactccctgggggacctgacctgtggcaggcacggaatggggggcccccagagcccaggacgagaaggagccagcggacgacaaagcagcaaacaacagatagctccaacggtagcccctgatcgaagtcttgccatcagaagtcacaggcccatgtagctaaagcgggcgcaatagtaacaaaggacatgccaactggaggcaacacagaaagtaaccaaaaagacgacgagaaagaacaagcgagaccgggagaaccctgcaccagaaaaagtgagaagaggacgcaacgtggccgtcgcacacgataagatagaaaccagacacggagaggaccagaacaacaagacagagaaggaaaaacaaacaaatgaacttagatacacacaaaagaaaaaatgacaaaaacaaagagagaagaacaagaaggggaagaacaaagcaaagaaagagaagccaccaagaggagacgacggacgtcctctactctcgtaaaaa

SEQ ID NO: 714789 - DNA, 395 bp, Homo sapiens
aaggtatcgcccaacactggtggcatctgctcctgtgacagtgaatctgtagagcaaaatttctcttcaaccgagagcatctgttcccaatggaggcacaccacctaaaatcagcaaaactgtacttttatctactaaaagcatgaaaaagagtcatgaacatggatccaagaaatctcactctaaaaccaagccagctattcttaaaaaagacatagcagtaaaggaaaagattcctagtcatcattttatgccaggaagtcctaccaagactgtgtacaaaaaaccccaggaaaagaaagtgtgtaagtgtaagcgtgctactcaaaatccaagtgttcatacatgccgaggccaacgctgcccttgctactctaaccgcaaagcctgcttag

SEQ ID NO: 714790 - DNA, 135 bp, Homo sapiens
agcgagcgcacggtatgttggacccacctgtgtagtctcagctacttgtgatggctgaagcaggaggctcactcctaggaggtcaaggctgcatgtgagctatgatctcaccactgcactccagcctgggtgaca

SEQ ID NO: 714791 - DNA, 223 bp, Homo sapiens
  misc_feature (151)..(151): n is a, c, g, or t
  misc_feature (218)..(218): n is a, c, g, or t
agcccctgaaaccactgtcctactctgtttctgtgagctgtgacagttttagatccacatatgagtaacatgcagtatctgtctttctgtgcctgggtcgtttcacttaacataatgactttgggttcatccactgttgtcacacatgacnaggatcatccttcgttttcactagctgaataatattcacgttgtgtacacacaaccagcattgtcantctaa

SEQ ID NO: 714792 - DNA, 465 bp, Homo sapiens
  misc_feature (28)..(28): n is a, c, g, or t
aaaccttgagccctgattcgggcacggnagaccccaaatggcctatggacggggccatacttgagggctctaagaaaaagagaactcccgagccacgaaagctgaagccaaagcgaacgctcaaaacgccaaaaaggcaggggtgaaaggtgaccacagcccctaagagaagaagatccgagcgggacccacctaccggcggccgaagacacagggactccggagacagcccaaagaggcaaggaagagcgcccccaggagaaacaagcttgaacactatggtatcatcaagttaccagtgaccactgagcctgccatgaagaagatagaagacaacaacacacttgagcccattgaggacgttaaagcccacaagcaccagatgaaacaggctgtgaagaagctggaagacattgatgtggccgtcaacaccctgattcggccagatggaggggcattgttcgc

SEQ ID NO: 714793 - DNA, 1381 bp, Homo sapiens
  misc_feature (705)..(705): n is a, c, g, or t
tcctggctcaccgggactaaaatggaagcgttttgggggtcgcggcccggatttggggcggggggtccggccccaggacagtttttaccgcatttccattccacttccgcgattcctttcagtggactccgggcgttcgttgcacctttacaggaggtccaattcagcggcggaacccagaaaccccatgtggttgacccgggacctcagtctcctcgggcgtaaagttccgagggccggagtgtggtgattgccgcaaactgtgcggggactccatagggctctccttgggcctcgttctcccgaaacattcttcttcgcatttagtgcgagttcaacaacagttaccagtgcgtggggtgccctcgtgggcgacatacgctgatttctccagttatttgtgaagcagagtttctgcggccaagattggggtgattggcgactagaggagagccttttcttggggagaaatattggtgaccaccagcgctatatataggctccctatagagacgcttattctcattctcatgggggcttagacccaggggggccaatttgtaccaacgccgggcgcgccctcagaaaagatttgacacccttttgtgggtggaaaccacccatggggctctactcggagaaggggcaataatcggctagattggagaagaagaagctctccccctcgggtttattgttggcgancatttcgccttcgtgggtgtgtaccgccatattatgaaaggcccccttttcggttgtgggccccacttgcgtcttattgggggggcaatatcttgtgggctcacagccctctgtgcttggcaggacagaaatgtgtttctggagaaagaaagcacaacgccagatgttgtcataacagggcccaaagaactcggaggggccccggcggaactataaggataaagaaacgcggtctgcagtgtcgacagatagttggcgtggaacaatcaccccggagaaattgcccgcggttttataaccaaacccggcgtttttcaaaaagttccggcccacttgggtccaccccgaaaacgaggatggttgttgtggcaacatttagaccgggagcactccatgtgggtgtccctcaaacgaagagaaacacccccaactggggcgaataagtttggccccccacaatgttaatccaaggccggcgtctgcggcaaacttcgacaaattatccacgaatgtcgtctttattcccccgaaaatcgttggagaagtttcttggcccctcaaactatttgagaacctcttggaaaacctgtggtgtctgattctccaacggaagattacatcatcttttctttcgtggtccagacgcaacacatcaacattttcttcccacagatgg

SEQ ID NO: 714794 - DNA, 158 bp, Homo sapiens
gacagatccatacacggatcccctcttctccgaaaggcaacatccctgccccccttttcccaccagggtagtctgtacagagattatactacgatattattttttccttttcacttttctcagagatggggtcttactatgttgccttgcggagaaga

SEQ ID NO: 714795 - DNA, 206 bp, Homo sapiens
  misc_feature (17)..(17): n is a, c, g, or t
  misc_feature (81)..(81): n is a, c, g, or t
  misc_feature (84)..(84): n is a, c, g, or t
  misc_feature (122)..(123): n is a, c, g, or t
  misc_feature (199)..(199): n is a, c, g, or t
gtttttttttccctccncccccccgcccttttggctttttttaatccacctgtgggcccgagtgtttattagatgtttttnccnaaaagatttagaaaattgggttttcctgccgataaccnnccaaatctttttgttacgtaaaaaaagccgttttttttttgcttgtgccccccccgttttagtgatatttaagggnttgggga

SEQ ID NO: 714796 - DNA, 137 bp, Homo sapiens
  misc_feature (53)..(53): n is a, c, g, or t
agtattcatccttctcaggcatcagtcagggcaggctcatgcaggtgtgcccncatatactagtattcctagaagtgagatggtacatgctagtataatatttatgtaaatgaggggcaactcgaaagccccaagcg

SEQ ID NO: 714797 - DNA, 446 bp, Homo sapiens
ctctagagtatccccctggcaccacgcatgggaggtaggaatagatacattaaggttaaaatatagtatataaagaatagactaaaggtaaatggaaattctgatgtatatgctgtagttcaggaactctgctatcttacctgtactttaccaatagttctatgacaagagatcctaatgccagaaatagaggtcaatcacaggatttctccattaaagctgtcactagccattattactatccccaaatgagacatgactctagtacatttatagcaatatctgaatgttattaatttcttatgaatttcattattctcttgtcatatataaggatcatagagcatttgccccataatgattttgatcttttttttccaagcaatactatgtcctacagaatgccacataaaatctatgatgtctatggctataaaactgtgaag

SEQ ID NO: 714798 - DNA, 883 bp, Homo sapiens
  misc_feature (164)..(164): n is a, c, g, or t
ttccaggacaaccgtgtgcattgtgtgcccccaatactcgggggccagaaatgattgtgtttccccacggatcgtaacaaaagccgctgccccacactctcacccgcgttcggtatggtgcgggagccgcacccttcttttacccacccgcctggtggcgggcnccctccatcggaccctctctcgtatagacaccacgcttccgccgtgagccaaacttctcttccctctcgggagtggctctctccagggggggactctcctaccctccttgtaatctgtagccgccggcttttctaccccccgcgcagggtctctcatgttgcaacgtgctcctctctcgttggacccaccccagcgcgccacctcctacagcaaagacgccgcccctccctccccccggcgaccccacacagacagggacgaccacctctgctgacgacccgctccactgctcgctcacgagggccgaaagcacccaaccacctgtggcgagtagaacatccccacagataaaaagaactcccccgcccgacgacacacacctccccgcgcggttaaacgcctcccccgggcacgcactctcacccgctaaatcaggctgacgacgtgcggcgccccaatcactcggtgccagagcggaaacgtcccgcttgtcagcacacaccccgaggccggtgcagagcacatccgcgcgacgcacccccacacagatgggccccctcggggcagagacctcgccccacccggacagggaggaccgtatgcaagatagcacaagaaggctagatgcgcgggatgcgcgcattcggattccatgacgagcgaatatggcccctgcaccgccacaaaaaacacctttccccctttcccccccaaaaca

SEQ ID NO: 714799 - DNA, 170 bp, Homo sapiens
  misc_feature (8)..(8): n is a, c, g, or t
  misc_feature (12)..(12): n is a, c, g, or t
tgtccacnaagnttggagtcatttataacactatctcttcctcactccatgttcaccaaatccttttgattttactattatacaagctctcaattccatctacttctctcaaccctcactgccatagatatacttcaggttctcatcatctttcatctaaactaccacag

SEQ ID NO: 714800 - DNA, 136 bp, Homo sapiens
gctgcggcgtacctgctgagtccagaacccccaggggccatggcaggaggccgctgcggcagccgctgcgtttctgcaccatttccgaggacgacgcagcccgtcgagcccccccactgacaccggccgccccagc

SEQ ID NO: 714801 - DNA, 265 bp, Homo sapiens
tattctaacattatgtctggggctagatgtcagaacccacgtaatgacagaagtcagtggtaccagcctaatatagtggtttgttatttataatgatcaattagcgtataaaattgcatcatctatttagttcaggaggatctttcatattcatgttcatccttaagatctcgaccgccaggtgcttttataaaggaaacattttttagagacgtctgagctcacttttacatggtggtgcctacggccgttaatgttagagata

SEQ ID NO: 714802 - DNA, 295 bp, Homo sapiens
ctggcaattgatcagccattattaaagggcacattggatccactcagaatcttgacaaacccgagtagttctccctatccccgtatctatgcctatgattactttgcgcgtgtatggggctaaacctctggcgggtcaagtctggcaccatctttgacaacttcctcatcaccaacgatgaggcatacgctgaggagtttggcaacgagacgtggggcgtaacaaaggcagcagagaaacaaatgaaggacaaacaggacgaggagcagaggcttaaggaggaggaagaagacaa

SEQ ID NO: 714803 - DNA, 453 bp, Homo sapiens
  misc_feature (32)..(32): n is a, c, g, or t
ccattatgctaactgaattagcccccattccngaaggccaaatactgtaagatctcacagatgtgtggaatttcaaaaagcccaaactcacagaagccagagtaggatggtggttgcccagggcctgggacgtgggggaaatagggagatgtttggtgtctgttaggaagaatgaataagctctggagagctaatgtacagcatagtgactatagttaatagaaccgtattatatacttgaaatttgtgaagagagtagatgttaaatgttttcactaacaacaacaacaaagataattgtgaggtggtggatatattaacttgattgtggtactcatttcacagtgtatacatatgtcaaaacatcatgttgcatactgtagatatataccatttttgtcaatcattcctcaataaagcaggaaaaattattgcattttccacatcaaaaaa

SEQ ID NO: 714804 - DNA, 1368 bp, Homo sapiens
gatgactgaacactagagaacccacctctttactctcaggacacggacaactctaggtattagaacaagtcacagcagacgatactgccagactcacagtgaacgaaaacagaacgagttcacgacgacgtccagagctcatcgcaacaggcggttctagtcagcatatcacacacaagcaaacttgatgaaacaaaggcatttcaagcaaacaggcagtcaggaacccaaaaccacgtcctgttagcaagaaagtcaaaagttatagtgtggcatacaaactcaagcactttccctgccaactgtgttctctatcatgtgtcaatagcatgcaacatcagcagaacccacttcattgtgtactaagggaagggacaatcatcagtgttaagcaaacagtctaaagccagcagcatcatggccaaagcaatccaccagtcggacagaacacaagagcaaaccaggcctcacaacagcaagtccaggcagcctcatgggcaaaagggtgcgcttccaagcccacgcatatccaacaaacacagcacaaggtcaatggacacacgcacacgggacatattccaccactccattcatagaagcgacaatcccagccaaaaggggaccctttgtacgacctcggggtccataatagggaatggcacaaccgtacaggacgcatcaaggaaagaacgacacgggagccattacattcgggcatgggtcaacacgctgggatcacaaaaccgcaacaacaagagctccatagggcattccaaagaggaaggcgcgatcttcacaagtgacgagcatttcaagcaggcaaagcgcggaaaagaaaaaacacaaaaggaaaaatggccgacacggacctccaacgacaaatatggaccgtcccaaggaaaaaaggggacagttacccaaggtatcacagtaacacaaattacacgagaaccatcctaacaacgaattgggaccaagcaactcacccgaccgggtgtgccatataacagcaaacacactgagacccatggagtagacaacagaggccaccccacgtggggcagcggtaggctggaacacaactaccccgggagtacacgggaaaccccaccgtgcccttacgacacgacacaacagcgaagagataatgacgcacaagttaccacatgcaaactacatactagcgaaagccaagtaggcgagaaaaaagggtcccacaaacaggcaaacggccccggtgaaccgtgagccgccacctcgacaaccgggacaaccacaaaccacgaaacacaacaacacccacacaacaaaccaaatacaccacaaagagagggtaaaaactagaacgagagagaacacacgaaaagc

SEQ ID NO: 714805 - DNA, 1134 bp, Homo sapiens
  misc_feature (261)..(261): n is a, c, g, or t
attctagaggcgaggcggccgacatgttttttttttttggacgaactttttgttttttctggaaacgggggtctcgtggttcccattggcccagaaggtggagttgcaggggcatgtgactcacagctctcatgtgcagccagttaactccttcgtggccttaagccttcccaggttagtcttagaaacttacgggtgtgtaccaatatagtgcccgtgcgatagttttcttctccatttttgtgggtagaagaagacggnggggctcccttttttttttcttgtgagagagagaggggggagctctcccgcctcgtgtgtcgtgcgcccagacagggtgtaaagatatggcgacacccgactgggcacagtgggaaactctggggggggcgtcgcacaaagacaagaggactatctgtgtgctctcttcaaaaaaaaacacaaacaacaaaaagaagcgcaaacactttttgggagaaaatgtgagattgtgcgaaaaatgtgtgttcgtgggaaaactatggggcggatgtggggcggggggaaccaggttttacttgttatatatataggcgagggggcggagactcttctgtgggtggggcaatggggggaaataaaggcgcgtctttttttgtataaagagggcgatataagagatctctccccatatatataaaacagcggggggggagtgtttctccctcttcttttattatattattagatgagggtaggacgaggagacagcgagtcagcgtggggctatactggagggaataaggggaggtatgagagaatgagagtgatatataaaaaacaaacatgaagttaccccacggtgggttcataagggggggggcgccacaggggggtataacacacgtggcgaacaaattatcccgccggatggagaaattatagagaggggcccatgggagaatattttttccaacacacttatgaccagcagggggggacaccccatctagtgagcgagaggcacaattaggtggagacccgccgatgagggacgcaaaaacaatagcctgctaagccgcttatgaacaatcacttctggattcgaattaagcaccgagattttttctatcccaccaccacctgactatgttg

SEQ ID NO: 714806 - DNA, 155 bp, Homo sapiens
cgctgctggattagggtctccccgaccgacctggtctcagcaagtggtgcccattcatgggggctcgaatacaggtcaaaggatcgctggagcaacgattggagaatgtggaactagctggaggacacctgagtactcttaaagcaatccccgtg

SEQ ID NO: 714807 - DNA, 989 bp, Homo sapiens
cgttggaccagtatgtgaccacgcgttcgccagcgtcgatcagcaaaagcatagtcttgcagacaggagctctacaaaacaactatgagttgctgccactggtatcaaccatcgcctgtaaatgtggtaggtagtaacgttcagcttaaggtcagcacgccttccatttccagtttggctcaaccccagctaccatatactcaggcggtcctccagtgcaaagtccccttccaggggcaccaccaacccaacagttacagtatggacaaaagcaaccaatggtttctacacagatggccccaggccatgttcaaatcagatgactcaaaatcctgcttcagaagtatgtacaacatgcagccaattcttcaaacagcaatgtcctccggacagccagttctgcaggagtaggagcaggacaacaacagtgattcctgtggactcagccacagggtatccagctgccagtgcagccaaagcagtcccagacacaactgaaggggcatctgtaccagcctgtatggccaggctaccggcaccacagtgtctgcatgtacctacctgcagtcagattgcaaatattggtctggaaagacaaacatactatttgcagtgagccagccctctacaccagggttccaacctttacagatctattcagcagggtgctcctccaatttacgcaaggtgatccaactgcttcaaactgggataattcatcaggagtcaaatagtgattcacggcttctcaaaattggtatgatccaagtcttgtaatgtggatcccagcaaagagtagaccgtagtatgaatgtaacagagaggatgagtaagttagcacggaatccatgaaagaaagttgaggcttggaagtttcaaaagtcacaacaaagacctgacaatgaagagagaaccgaaaaatatgagaaaacatatacaaaaatccaaccgggcagtaatagaaacaaaaagagtaccactctcagaga

SEQ ID NO: 714808 - DNA, 351 bp, Homo sapiens
  misc_feature (28)..(29): n is a, c, g, or t
  misc_feature (177)..(177): n is a, c, g, or t
  misc_feature (269)..(269): n is a, c, g, or t
gggaaactgaaccagacctgccgccagnnccgagcgcgccgccagcctgtgcatggcgcaaggccactacgaggtggacctggaacacctgttcctggcgctgctggaaaagcccgccagcgatttcagcatcgtggcgcgccgcagcgcattcgaggcctcggtgctcgaggcgancctgaacgccgaaatccgcggcttcaagaacggcaatacccgcacgccggtgttttcgccgcatctgccacgcctgttcgagcatgcctggntgatcgcctctctcgacacgcagaccacccgcatccgttccggttcacctgttgctgggcgctgcttcaccgagcccgattt

SEQ ID NO: 714809 - DNA, 440 bp, Homo sapiens
aaaaaaagaaaaaagaagaaaaaggaaggaaggaaaaagaaagggaaaagaaaaaaaaaagaaaaaaaagaggagaaagagagaaaaaagaaaaaagaaaagaaaagagaagaaagaaagaaagagagagagaaagaaaagaaagaaagaaagagaagagagaagaaaaaagagaaagaggaagaaagagagagagaaggagaaaaaaggaaagaaaaagaaaggaaaaggagaaaaaaaaagaaaaggaaaagaaggaagaaagacaaaaagaaagaaagaaagaaggagagagagaagaggagagaaaagaaagaggcacaaaaaaagagaaaaaagagaaaaagaaggggggtatcagggtcactctctatctctctctcactctctctctctctctctctctctctctatctctctctactctctctctactcgtg

SEQ ID NO: 714810 - DNA, 736 bp, Homo sapiens
cccgacactcaattaaggctaggtacgaggcttgggttgcgccgtcagcgaggcaagtcgcctggcccttcttctccaccaggaaagctaagagtctggacctgcatgtcccagcctgaagcagaggtcctcagggtcaccagctgccggggaccccgagagctacgcctgtgctgtggacgctactgacgcacggatgccagttcctgcccggcacgagtgcccacgggcgtgctgcctggccgccctggcacgcacacgctgacacacgcggcgcggggagccctggccgaggagcacggccccacacgcctggcatccacacacctgctcccctccctgctcctgacccaacgagcgacccgcgccccccacacgcacacccgccgcacgcgcaccgcgccgacgcgcacagacacgcactcccgggccctgcgcttccactcgccccatcaccctggcgaccgcgcatcgccccccccggttgcggccctgggagcctcgccacgcccagcggcacccctggcgacccccaccccgggcccccccacacgtccccgttcgccttcctccccctgccgccctagccgccccccgcgctgccacaccgctcccactgctgccaccgccttcttgccaccgcccccccccgctcgcccccctacactcgcttcttctgcgcgccaccccccttcttcctatctcctctagcgccggcctcctcccttgccccccg

SEQ ID NO: 714811 - DNA, 510 bp, Homo sapiens
  misc_feature (90)..(90): n is a, c, g, or t
  misc_feature (104)..(104): n is a, c, g, or t
tagaggatcccttgagcacgaatgtacgccgggcgctgcttgagttcttcggcggcggtgcccagcacgtgcgtctcgcccagcaccagngcttggggggtgcngtccacaggcaggtctgtcgcttcgatcggcaccttgtcgcgttctttttccacactctgcgccagcagcgcgggggacgaaagggtggcgataaacgccaacgatagatggctgagcctgaattgagacgacatgtccacaaagtcctttaggaggggcgattgaacgagagtcgtctgaattttttcgtgcatccagcgctcttcatgcgccgtaatggtattgattctcaaacagaagtaaattgcatttacaatctatacactttccttaaggctctggctcaatgttttcaaggctgtcggctgtgaagggcgaggtttaatcggtatgttctttgttacaaacgcgcaaaaaaaagcccctccgggcagactgatgcgcaatcacattctggtggctaaa

SEQ ID NO: 714812 - DNA, 381 bp, Homo sapiens
gtcgaccgggatcaggagattgagaccatctctgactaacacgatctgcccgccttggctcccaaagtgctaggattacaggcacaagctaccgcgcccggccctagcaaggccatttttacactttctgcagaaagggtacactccccagcagatttgccatgagagtacaccgaacaaaggagacaggttcatttataacctgacgcatccaccctactgctgtgtccagtttccactggctggaatggaacctcacattttgtacttgttttgattggcttagaactttttaaaaggcgtaaaggcagaggagaagaaaggaaggaggaagtaacttgtggaatgctgagaaaggcaaaaacatcttcaaatgtcgac

SEQ ID NO: 714813 - DNA, 645 bp, Homo sapiens
gagcaaggacgcccaggcgtcagcgaccctgtagaacccttgcctgagcggaactctctcagtgccatcttcaacaatgtcatgaccctatgtgccatgctgccacctgaatgttattcacctacctcaactccttcctgcatcagaggatcccccagatccgtacggatcctgggcagcctggtggccatcctgctggatgtttctgatcactgccatcctggtgaaggtgcagatggatgctctgcccttcatttgtcatcacacatgatcaagatcgtgctcattaattcatttggtgccatcctgacagggacagacctgttcggtctggctggaccttctgcactgccagaatacacggaaccaccatcatgatgtggccagggcctagcaaggcattctatttgccatccgtggccatgatctgcgctattgccagcatggctcaggagctaatcagacagtgccttcggctcaatcatatcacagactgttgctgtctatcatttagaccatcatcatgtaaccatgggcctgccccgccctggcaattataccgctactaccagcagctcacgccttgaaggacccggggtgcaggagaaacaagttggacctcattagcaacggaaggagccaagg

SEQ ID NO: 714814 - DNA, 337 bp, Homo sapiens
gcccccccccccccgggggccctccgggccctccccctagttccccgggccggccgcgggccccccgggcttccaaagtgtcacccctcccgggcaggagttgggtttcccccccccgacctcccctcgccccgggagtttagcggccgggtaggtaatgaaaaccccctgggggtcccccccttccctttccgcgctttccccccctcccttttttgaattcgccccctctttttaaaggaatttttagttttttggccaaccccaaccgggggggccgggggggggaaaaggggggaaaaaaaaattttttaaaatttaaaaaataattaaacca

SEQ ID NO: 714815 - DNA, 1083 bp, Homo sapiens
caaaatagtgggaagatgtatatggtagaggcgataatagcctacacgacgtcctggtcgtagtagactggttgtccaccacgatagaatcttagcttcagacgtgtgtgaaagttgggccacacaggagacccatctgagagaatcgccgcttgttaagattgtaaactggatctagatcgcaaagagatggatagctacgtcatcttgtaggagccacgtcaggcaaggaaaacctctgatcagcagtagcaggtagaacacagattttcatagcaccacagtagttagggcgctgaaatatgccaatggcactcaattcacacgacatagcgttgcaaaggctgctaaacgaacctagctagccacgtcgaataggaatcaccgagagagctatgtataacgtggagatctgccttcaatacgccgaaatgtggataccgaaattctatgcaccgcgtataggagagaaatctagatggttaatgatacagtgaacaatggaagaacgatgctcactccgagataagcccctgagtcgacgagttcaagaaacgacttgatactggaccaactgttagaacaagggcccatatattctacaagtgcataggtcaagacaggtccagtgtactctagccactcagctgttcaagcccagagcaatcagggcaatgacttcatcagcggcaatcgcgtctaacaggacagatggtcaacaacggaaacgtccgggccacaaatcttatactccacagagcagtggtattgcgcacagagagaagcattcaccgtcgtagtcatcaccgaggtattaagaagcgtcaaccagcctggcccccagttgaccaccatttggttttaaaacagagaactgagtggtgaacctccttaaaaccgggtgcaaaaagggttcagccattaaattcgaacatgaggatagcccttcagagattacagggggcacccctgtattcgacacttgggggctccaacggaaaggagtatcacaaggatgggtcctcgattaacctttttcacaacccaaggttgaaaacttggacgctggacccggtcgcaccg

SEQ ID NO: 714816 - DNA, 601 bp, Homo sapiens
cgtgctcgtccccttcgcctgtctgtgtgtggtatccgtaggtccggggcactttttttttggtgtgtgtgtgtgtgcgtgcgcgcgtgtgtgtgtgttgggtgtgtgtgtattgggggttttgccggggcgcggagagtgagagccgggcactgagtgggaaggaaggaagccgtagagctccccggtctcgtggcatgtgtctcccctccagcgctctcctggcctgctgcgctcctgacgcggcagacggcaggtgtgccgctgatgctgctcctcgagtggccgacgctggtgctcaatgctggagagcagcgacgaacccatttgcgcgaggccttcccagtgccctgcttggacttagcgatcgccagggcgtttggattttgcacctaactagagcccgggagttccctccaccgagccctgggcaagggcttgcagccggcgagccggcaggccgcgcggcagccggcacgtagcagaccggaaccagcagagctactccatctccagaggaggagaggcgatcgaaagcggccccagcacacgaggcctccccgcaccctcacccactccggacgctccttgcggcccccca

SEQ ID NO: 714817 - DNA, 1098 bp, Homo sapiens
  misc_feature (574)..(574): n is a, c, g, or t
ctgggttcttataatatataatccccggggggcttttcctttttatatttggtggaacgcccttctacaggtgttgtccccccctcgtgtgttgatacctccctccactttcttacccccccctccgttttgttgtgacacccccccccccattatggtggaagggatgaccctcccgcggggtgctcggagtctattctacgtgctcctcttccgcggtgagctgtttttgagtccactcatgttgccccccccgcggggataccgtgagtttttaccgcacagttggttgtttgcacccaccacgggggtacacacggcctttttttggcgccccctttttgggtccctatcttttattaggggtggcgaccccctcatatagtgagaagcccacgtgttgttgtggacccccagaaaatacccacgcggtgcttgggtgatcccgcgttctccgcggaaattttttccccgggagtgtgtcacgaaaatttgtgactccacctcaaggatatgtatatacgcgaccccctttttcgccacagagttttacacctctttcccccgcgcgctntgtgagacctctgtagacacacacgctgttctgggaaacacaggttttctcatacgcagacgtacactctgtatatgacacgagctgttacacgatgggggcgccacaaacggcgcggcgcgcctgtataacacgcgggggcactctcgcggcgcgatagaccagacacctcccccgggctgtaagaacgcccccggcgccacagagtccacagaaagaggaggccccgccccacctgtggaggaagaccgcgcaagatgggtgaaaacagcaccttcgggacatgtatctatctctacccgcagaatgtgtgggcaacatgtgtgtggcgtttacaacggcaagaaccttctaacccgagtggagatcaagaccccagatgtatcggccactacctgtggcgagttttcccatcacctacaaaccccttaaacatggccggcccggcattggggccaccccatccttcccgtttatcccttttcaaataatgggtcaacttataaaggggcacatgactccca

SEQ ID NO: 714818 - DNA, 355 bp, Homo sapiens
  misc_feature (152)..(152): n is a, c, g, or t
cgtacaaggcccgtggttgcccatgagaagtgtccttgttcattttcacccaaatgaagtgtgaacgtgatgttttcggatgcaaacgcagcgtcagggattcattttcgtgtcttagcttttatattgcatccatcatttttaattacacnctgcttcacgtcgcctatgttgaggaagtccactatttgtctgcgttttcttgcgagcatcagtttcctgtacaatagctgtccgagtggacaacactgacatattgatagtgttcttctgagtataagttacttgtagctgcactaagcagtacagatgcttgttagatggttaagtataggcggggccttgtacggggtac

SEQ ID NO: 714819 - DNA, 185 bp, Homo sapiens
  misc_feature (101)..(101): n is a, c, g, or t
  misc_feature (150)..(150): n is a, c, g, or t
atgatcgcgaggtatgctgcacagtgtctggactggacaccactgctataaaagatgcagggggccagtgcctgatcgtcaccgactgatatcccgactgnagtcccacaacttgttgtggcggctcagcccgaaggctgggcgaagaanaggatgctgaatgggcttcacccaatggtcagcct

SEQ ID NO: 714820 - DNA, 228 bp, Homo sapiens
agtaaagaatcatattagatgtgaatggtctagagacaccatatgtaagactggatttaaaaagcaatgacccttgggacctggtgcagtggctcatacttgtcatcccagcactttggtagtctggggacggtggactgcttgacccaggagttttgagaccagcctgggcaacatggcgagaccccatctctacgaaaaattaataaatttctgtgcccttttcaa

SEQ ID NO: 714821 - DNA, 228 bp, Homo sapiens
tggagatagccacttactccactgataggtgaggactgcttcaatatctgcaatactgcgtgtaggcatcggaactatatgaatggattatagatcggatgatccgcatgctgattgcgatagttgaatttagccattttaagcacagctttagctggacactcttcaccattcattcaatcactcgctcactttacagtcattaattagtacctatcatgacttcgg

SEQ ID NO: 714822 - DNA, 1146 bp, Homo sapiens
gcggcgctgtggacgggcgaaggaaagtacagtcttaggtatgtctttatcagcagtgtgaaaacggactaatacagtaaattggtaccagcagagtggggcattgctgaaaagataactgaaaatgtggaagcgactttggcactgggtaacaggcagagattggaacagtttgaagagctcacgaagaagacaggaaaatgtgggaaagtttggaacttcctagagacttgttgaatgcctttgaccaaaatgctgatagcgacatggacaataacaatgcaggctgagatggtctcagatggaccatgaggaactttctggaacactggagtacaaggtgattcttgctactgtactcagcaaaaaagactagcgtcatatataccatctgccactagagactcagtgcaaccttctgagcaaccgcatgatcttagcggtacctcgcagcacgcacgtttctaagccagcaaacgcattcacagaggtagcagttggatactgctcacaagggcattccagcattcaacaacggagaaatacagacgcgattattaccagtttccgcacaaaactcgacgtagaccctggctcctgccgcccgcgagcacaacccctacgtacacgccatgtcacaaacccaatccacatcatcggttgcacgttcgcggctaccatgtaacaaggaagccaatcaaggcatcaaaaatcggggagcaccgcacgccttcacacagacatttcacgaaaaacaaccatgttggtacgcaccctagaccataatggacaagaacgaatgaagcataaacacaaagcatcggcattaccacggcgggcagcacaactccacaggcgaagtgctgtctgagagagagcctggacctatcgaggaagtaaagcaacgtccaaaacgggtgtcaaaacaccgccaagggaaataaagtgggaggcaaaaaggtgtgtctcgaggaccatgtgcaagaaatcatttcggaaggctgagcgcagtagcggtatcaacagagtcccaggaggattccagagcaaggtagagaaacaggacataattggggcacgcgcacaccatgtgtccgatgtgatgaggatccggccgttattaactcgggtgcaccgaagtgccca

SEQ ID NO: 714823 - DNA, 717 bp, Homo sapiens
tctgagacaacggagggagcgtgccgaggagttatgcagcggcgctggagctttctgtcggactgaggctggtggaggttgaggaggttattgagtgagtcccgcgcagagcgtatcaagcgcagcggcctgcggcgcgtggacgacttcaagaaggccttctccaaggagaagatggagaagaccaaggtgcgtacccgcgagaacctggagaagacgcgcctcaagaccaatggaaaacctggagaagacgctggcacatctcctggagaagctgcatgaacaagctggtgcactgctgcctgtgtgccctgccgagctggcgcgagaaactgaagactgtcgctgggacaatgttgcgcaaatccttcacgcccgaccacagtggtgtacggcgctgctccaagaccgcggtctacaagtgtgccacccttcaccttccactgtcaagaagatccagcagaggtgccagtgtggaagtgctcaaggccaccgagatggtggaggtgggcgccgacagacagacgagggcggcgcggatgcgcgagggaggcccggctgaccgtgcgtgcgccgtggacgcaggaccccagaacggtggcaacagcagacagtgcattgggaaggaatcagccagaaggaaggtccgaggaacagccggagcacttggcgtggaacaaaagaagcgaacaagcagagactggagacacgacacac

SEQ ID NO: 714824 - DNA, 125 bp, Homo sapiens
  misc_feature (82)..(82): n is a, c, g, or t
ctttctgcacgcacactagtttaagccacacagtggccaattcttcttcttatgacagcaaagagctggaacttccccacgngagtgtcctccagggagctacaggcctgcccaggaggtgctgg

SEQ ID NO: 714825 - DNA, 90 bp, Homo sapiens
tgatcagggctgcaaccccctagtccttttcaaggagaggacaatccaagtcaccctcgccacatggagaaacctccatgcagtgggggc

SEQ ID NO: 714826 - DNA, 828 bp, Homo sapiens
gggtggccctggggacaagagggaggagcccaggggcttacctcactgagagtgctccccagcaggcatccactaccccagggcccccacatgtcatggcaaggttgcgtagtgaatgggcctgcgttggagcagccccgtggccattgcccacccgaccatctcactatgcaattcgagttccaacgcaacatttgttcctgcctggggccaagctcttgccccaagcccttgagaggggtggtgaggcagcccacctggaccccaagaaaccccaagacaaggggggcagggggggcggaccaggggcccttctcctgtgggactctttggtttgcgtgtttacccccataagtgtgttgtgtacatggaaccaactttcaatattggtaatatatcactatctatatatataatctccttaaagactcagccatcctggtttaacacaccacggacgtggggcactttgagcattcccaccaaccccagtggtgacttttaacattccaggacctgagggccggaaccattttgtgattatcccgccttcttgcaagcgtcttgtaaggggaccatggggtggtatgtactggacgctggtgataagtctaagagtgattaagaaccgtgggtagagcgggcatgatatataataacattagggggagccttatatagtcgtgggagacagtactaaaggatttcggtagatgtaattactgtgggtactatcaggctgggtcaatgtttaacatacttttaaaagccaaagcactcaagaaaagaaaacattgtggcaccggctatcagaattatacacattgg

SEQ ID NO: 714827 - DNA, 228 bp, Homo sapiens
tagtggagaagagagacaaaaatatcttcatgaggaatgagaagatcgtcaaggaagttgtgctgatggttggaacgactttgttgaatgacttgaagagggactccacggtaggcagccgattggtaactctgaaagacgtggaagacggggctttcctcctgcgtctaagtgggtgaggctgtagctaccctgacataggagaatttccaaccggtacaaaacaag

SEQ ID NO: 714828 - DNA, 140 bp, Homo sapiens
ggcgattcttgaggatccccccttcaaagattcatgttatctcagtaacccatgaatgtattatattacatggaaaagggcaattgagattgcaagatagaattacaattactgatcaggttatctttaaatggacgagg

SEQ ID NO: 714829 - DNA, 498 bp, Homo sapiens
ctatcatatagtaaaatccagcccatgtacccctaacaggggccctctcagtccctcctaatgacctccggcctagccatgtgatttcacttccacctccataacgctcctcatactaggcctactaaccaatactactagccatataccatatgatggcgcgatgtatacacgagaaagcgctgtactcaatggcccgacactagaaccaccatgtcctaataaaggccttcgactacgggataagtccgtatgttaatatagcctcagaagtatctattgtctgacggcaggagtgtctatcgtgagccctgtattagccagctccagtccataggtcaccctactcgcgccacaattttagagagggggtccttgaccacgccaaaacagggtcattccaccctccgggtacatattcgcaccctaaaacagtcacccagtcgcgtgatacaagagtccgtagttgatgggcgccatcggggaggtagtcatatc

SEQ ID NO: 714830 - DNA, 778 bp, Homo sapiens
  misc_feature (48)..(48): n is a, c, g, or t
  misc_feature (72)..(72): n is a, c, g, or t
  misc_feature (75)..(75): n is a, c, g, or t
  misc_feature (81)..(81): n is a, c, g, or t
  misc_feature (87)..(87): n is a, c, g, or t
  misc_feature (96)..(96): n is a, c, g, or t
  misc_feature (112)..(112): n is a, c, g, or t
  misc_feature (186)..(187): n is a, c, g, or t
  misc_feature (230)..(230): n is a, c, g, or t
  misc_feature (256)..(256): n is a, c, g, or t
  misc_feature (354)..(354): n is a, c, g, or t
  misc_feature (491)..(491): n is a, c, g, or t
  misc_feature (519)..(519): n is a, c, g, or t
  misc_feature (564)..(564): n is a, c, g, or t
  misc_feature (569)..(569): n is a, c, g, or t
  misc_feature (577)..(577): n is a, c, g, or t
  misc_feature (657)..(657): n is a, c, g, or t
  misc_feature (709)..(709): n is a, c, g, or t
  misc_feature (762)..(762): n is a, c, g, or t
gtaaaagcccaagacgtcctgcttcccactgggaccctcaatgataanagggtcagtgactgagtctgaggnagnaagganagaggngaggtggancccgtggtcgaggggngcgggggggggggggggaggaagaacacagatgtgagggcgggctcaggaacacaggtcccaggtgtacaagannagtctcctgaactccaggaagcagtgacacccccgagggctgnggtgggtgggtacttagcttacagcnggctggccaggcagcccaggcttccggggctggttggggccgatgtgctggagaggcacgtgggtgggggctgtgatccgatcagtgccgaggtaggnctggagggcagggggcacgagcactgagccgtccttctgctggttactctccaggagcgcgatgagaaggcgggggacagcgcaggcggtggcgttcaccgtgtgggctaactgcagccccccagcctcggtctggnacatgaggtggaggcggcggctctggangtctgttcggttggaagcgctggtgatctctccaaagcggcctcngcctngcatccangcctcaatgtcaaacttgcggtaggcggggaggcccagtgcttgggtgggcatatccaggacccggaagtgcaagcccanctctgtcaagatctccatctgaagggacaggaactcctccagcagctgttanctctgctccagcccagggcctgtcaccccaaacatctccaccttggtgaagtngtgtgctcgatacagc

SEQ ID NO: 714831 - DNA, 252 bp, Homo sapiens
ctaattgaacatctcaaattaacactttcaaaaacgaatctctatctccagctcccaaacctgctccttcctttcttcctccacctaaataaatgccaacttcatcctggcagctgttcaggaaaaacccttggagccgtccttggcatttgtctttgtctcacatctcatattcaatcaatcaccagtcctattgtgtctaccctgagaatggattcagaaactgaccactgctcaccatgcctgtcctag

SEQ ID NO: 714832 - DNA, 282 bp, Homo sapiens
aagcaagtcaaatgaagagcaattgagcaggaaacggggggaaataccctcagagtaataagattatctcattacacttaagttttgctgatgcttcaagtttcctgagtaagttatgcgaagcatctttctctgaaaatcttcttgctgcagaacaaaccatgtttagtgtctgtatatgtctcaacttcctgtccccactggcggatgggaaaaaggacacggtccttgcttgtgttttggagtgaaagaagcattaaaggtcttgcagactttaaaaaa

SEQ ID NO: 714833 - DNA, 384 bp, Homo sapiens
ggtagctaggtcattccgtatggaggagcagagatactctggggtgggagggatctaaaggagccttagaatgaatgctgccctttaaaaagagaaaattagctgggcgtggtggctcacacctgtaatcccagcactttgggaggccaaggcaagcggatcacctgaagtcaggagttcaagaccagcctggccaacatggtgaaaacccccgtccttactaaaatacaaaaattagctgggcatgatggcaggtgcctataatcccagctactcgggaggttgagatggaagaattgcttgaacccaggagatggtggttgcagtgagcggagatggtgccactacactccagcctgggcagctgagtgagactccgtctcc

SEQ ID NO: 714834 - DNA, 124 bp, Homo sapiens
aagccctctcaggtctctccgagtcactgcttcaccgaggagtcagctgactgtatgctgagggcagatatgcttactgtgaaccttataggaatggcatcagactgtatgtcatcttttggat

SEQ ID NO: 714835 - DNA, 148 bp, Homo sapiens
ggttacaacatcccctagaggcacaagggagggagacaggcgcatgaaacttcagaacagggtcaaattccccttgactgggccgggacatgacacctcacgtggttaagaggagccagagcagctgggagtttggcaattggattgg

SEQ ID NO: 714836 - DNA, 938 bp, Homo sapiens
gcctccctaccgtgaccaagcccagccctcagccatggcatgccccctggatcaggccattgggctcctcgtggccatcttccacaagtactccggcagtgtagggtgactaagcacaccctgagcaatgacaggcatctgaaggagctgatccgatgcaaggagctcaccgattgtggcgtctggaagtcttgcagagatagcttgaagatattgctaacgggctcgatggaatgaccttgggacccggaaccacggaccaggaggtgaactttccaggaggtatgtcaccttccttgaggggccttgcgtctctgatctacgaatttgacagcccctcgaatggtgctagaatagctaagatattacgggaaagcattgtgtaagacaacccctcctgcgagggcgatccctactccttgcagtttcaaacatctcgacgtcgcgcttggggttaaattgcgttaccaattacatatctatatcaatctcgcgatcacagaatttagagaaaaagatcagaagcatacaaaactcacacacttggctggccgggtgcctcaataaatgttggcgagtagtgcgttgggaagtaaatacgcacggcgccttggtcgacataggtgcgggcactatgtgtgatcccatgggcgagtgtaagtccctgcgatggatcccacgtagtttgtcgtgtgtaaccgacaatagcgtgggtggagctaacggcggtcccgggtgccactctcgcataattcaagccttgaacgtccaggtacatttggggatataagccggaatgtacatgccaccaggttgttcaatcccggtgacagtttatggagaaacacgccgcggacaaaattgcgccgtgacttccaattttacgcgtaacagcaacatctacacagttcgttccagttggaacaacccggggtcat

SEQ ID NO: 714837 - DNA, 180 bp, Homo sapiens
tagtgtatgggtgtgtgtgcgtgcatgtgtgcactgtccatgggtgtgtgtgtgtgcactatgtgtatattcgcatgtatgtgtgtgtgcgtcgcctgagctggcggtgtgagggctcagtcctctgtcacagcattggtgaggcatagtttggcggagctcctttgccacgaactcaaa

SEQ ID NO: 714838 - DNA, 365 bp, Homo sapiens
tgtgtagtatagtagagatggggtttcaccatgttggtcaggctggtctcaaactcctgacctcaggtgatctgcccgcctcggcctcccaaagtgctgggattacagacacgagccaccacacccagactcttttctttttttttttttaaaacaaagtttcactctgtcacccagattggagtacagtggcaagatctcggctcaccacaacctccgactcccgggttcaagctattttcctgcctcagtctcccgagcagctgggattacaggcatgagccaccgcgcccggcctccattcaagtctttatggaatatctgctatgtgctacacactgtcctaggtgtgggggataacatca

SEQ ID NO: 714839 - DNA, 822 bp, Homo sapiens
ggggctgcgccccacgcagcccgtgcccgatggtgccgcggggccaggcctgtggagctgggttcgccgagtcgggccgggtggggatggcaggagcagtcccccagcaaggtgggcgggcggctggcatggtggggcgcggccggccttgcggggccccaaggcctctgcttgcgaagcttgtgcggccgcccggttctccttccctggctgcagggtgttatgccgcccgattgtctttgggcccgccgggacgctttcccaccggcgttgcattctcccctcttcttgttgccgagaaggcaaccggtgttgtgccggagcttggcgaagtttcgaagagatttcaattacccggggaaaaaaagcggattcttacttcaattattgaggccactctttcgtgaggaattcttccccccagaaaaacagcgagaccctcaggggttggtcccccagggtaaagggtctaggggcaccattctctgcagaggtttgaggaggctggtaagaggccccaaaaagggttgcctcccagatagccaacaagaggcattattactggacgcaggggaaggcttcagacctcttaaggagtggagactgcgggaccataaacagagcgctggggtgaacaaaccaaggatcaattgtgggaccaatattagttcccaggcccacaaatttcccttttccccagacctttggaatgggcataggcaccccgaagatgcgattattgcctgaaggttgtgaacacggacagattcctcagagaataaggggcctgggacataccggagccacccccacgggtagatc

SEQ ID NO: 714840 - DNA, 718 bp, Homo sapiens
ggggattcctgatcctgcctctgggggggcggcgatgcctaaatgcagtgttccttagctaaaccttgacctactaatatctttatgctctggaggcgatccatcgtactccaaagattcagggtagctcacgatctccaccagggaagggatcgccacttatcctgaaaggctatttttttgtgtcacgtacatgcaacatggacgtacacttactgacgacagtatacagaatggatatactgtccattttagactggaccttcaggaagacggttctatatatctatggtgctacactcgattcgcaccaactgtaaaaaatgaatatgcctgcctacgcgaaccatgcctctatgatacagccgaggataataatgtggaatcgagtcttgtaagcagaaacaggcattgttaaaaatgccgcactgggatgtgtataacaacaaattctgccagcttgctttttaatattggtaggctgattcactgacacttcatccacaaagtgaagtggcttattaatgtaataaaggacatgatcttcctttataattctacttggagtgctggctccctggttggtcgatctgagcacattgcttcatagagttgctctaggcggactgtccacttcaaagtgggggtcaaataatccatttatccatcatgagcgtcttgtgcaaaattaaacgccgaattttatagactcaaagct

SEQ ID NO: 714841 - DNA, 236 bp, Homo sapiens
catgaagcagtattcagtcatcaagtgatgcagagcttgtatagaagatcgactagaaatcatcttcatgaagagtgattttggcacaagtgaccgaagaacaaaacaccatagcagccaaaaattgcctggagtgttgttctatccccaagtactgtctccttcagcaggaatttacctatcccattggaaaggcaagtttgtacccaaagatgcaacagtgaataatacccaaa

SEQ ID NO: 714842 - DNA, 172 bp, Homo sapiens
gtatggacagagtcgtaatctacaaaaataaaaaaaaaaattagcaaggcatggtgatgcacacttggtggtgccagctacttaggaggttgaggtaggagaattgcttgagccagggaggttgaagctgcaatgaactatgatcaaacactgcactccaagctgtgtgaca

SEQ ID NO: 714843 - DNA, 679 bp, Homo sapiens
ccgatgacgcgtgcctggtttaggcaagattgccgatagtaagggactttcatgtatcaagatacggcgcttgggcaaggtcaggatgaccccgatcgtgtaggagatctgtatcaggtcagtgactatgaaagtatcagcgctcatcgctttcatgctggtcgactctataaaacttgcggagctatagatactgccagagcacgatcagacacgtgtcatggcgtgtacctggatgatgttataagttgatgtcagagtcaacggagttcaccgtctactaggtggcaaaggctcaacggaggcgtgcgtacacagttgttagaaatgaccgtggtcatgagctctatcactatgctcgtaaagcctacttggattcaagatcggtgtgcccacactgtgccttgaaagtagacaggccatatcctgactgtggtgccaggacttagactgtatgcagaggcactgctactgtttccacaactaggcccactaagccaatcatgatggcagacaatctacttcggattaacctaggacagaggacctgcaaccaggcaactacgcatcgtcaccctggaagcctttcttaagcgactgttaaatacctagactattgaaggccgggattaccctttcaggatcgtcacggacgaccactctccccaccttagcctcg

SEQ ID NO: 714844 - DNA, 314 bp, Homo sapiens
agcctcggattccccattttcgtttcggcgctcgaggaggaactgggctacgacccgttcacgctgtcgcaggacgcctattatccgcagacctttgccgagttcgtggcattctatgacaggtatcggctggctccatgatctcgctcggcctgctcgtccacgttggcttccacatggccgggtcggctgattcgaccgcatctgagttacggcaactcggagtccgtcccggacttgccatgtcgcgccctgccctgaccctgcgcgatccggccgagttcgttcgggtgatctgcgcgctcgatggacag

SEQ ID NO: 714845 - DNA, 248 bp, Homo sapiens
cacagttgagctttgggtactatatacattctgggaggataaagtggtccatctggtgttggaagtgttaccttactattttggttacaggatagtcgatggggttgattcaggatgtaacaaatatattcagtaccatttctggtgtggtatggtgtggtgctgtgttaggtttttacatacggtagtgtttggctgtatatgtgtggtgttggatttcaattaaatgtgctgaagggtaccgagct

SEQ ID NO: 714846 - DNA, 538 bp, Homo sapiens
gatgccctagacggacggctgatgatctatacaaaagcctgcgtattctgctccaagactggcctgacctgctgaaagactttgctgctttcctgttgcctgagcaagctctggcctgtggattatttcaggagcaccaggcttttgctaagagccgcaagttccttcggccgctggagatttgctttgcagacaacccctcacaccaccagacgattatcaaggtcctccaaggctgtgcagactgccttccccacgagatcaccgagctcaagacacagatgtggcagcttctcaagggccacgaccacctgcaggatgagttgtctatcttctttgaccacttgcgcccagcagctagccggatgggtgactatgaagagatcaattggactgaggaaaaggagtatgagtttgatggcttcgaataagtggccctgcctgatgtggaagaagaggaggagcctcccaggatacccacagcctcacagaacaagaggatacaagagatcggggtcgcaaatcatgattaggagac

SEQ ID NO: 714847 - DNA, 894 bp, Homo sapiens
gaattttcgggatctttaaggcatgttggtctcaaggggatttgggattgaagcgcagctttctgttgaggaaacctaggtgtcactttttagaacattaaaaagaaagttgtagggtgggcttttccatttaaaggaatgtgatgatcctaggttctgatgagtgataggtggtctccgtttataccctttcttcttttggcacctgtaagttccggtagtggccatcttacattctcatgtcctgctggaagtgcctagttgcctgcaaagccagctaaggcttattactttcacaaaacgaagattattctaacaacactgacgtgaccagcgctaggtcacgaaagagcaacaaccaggacgcaaagcatacctcctactacgcccaacgtcacgcttcggaggcgccaggactggcgctttggctgacgctgaagtcgccgctcacttttggattcttatggactgccgagcttagtcttccctctacacggcagtcacacgccgcacagggtatacactgcactgttcctgaggtgccctcccccaaagaatgtacctgcactcaaaccacggatctgttctccgctgtctcaaatcataaactacgactagctctagtacgcaacgactctccgaacgaacaacaacgctaacacactctccccctccccactctacaaacgatgtcccagcaggcaaaagcgccctgtgcacgccccactaatatctctcaatgacctgcctggaacccatgttccctcacatatggtggctctccaccgtttgttcgggcccatcggctcctctccccgacttaccgacactcctgccccccctccttacccaacctttccacgcttccactcgacctctccccccctccgtgaa

SEQ ID NO: 714848 - DNA, 168 bp, Homo sapiens
gctgtactatgtctgcagggcgagtaatggacgatagactatgtgggatacaggtgacgtgccgagctcctggcctgaatgaagcctcctgatctatcgctgtgactgcactaccaacactgttatgatgacgagcagaatggttatgacgatgtccatgatcagggt

SEQ ID NO: 714849 - DNA, 339 bp, Homo sapiens
  misc_feature (71)..(71): n is a, c, g, or t
caaagggggacacccccttggggggggtttggccccaaagggaggggaccacaaacctttgtcatgttaanagggtgggggggggggaccaaaaaagggggggtccccccccccaagtccttggtgggggaaaaaaaaggggggggtttggaaaaaatttccctttagttttttggcccccccccccaggttgggcagggggggttcccgcccctgggggggaaaaaaggatttttggggccccttaaaaaaaaccgaattgcaaaggaaaaagggggtttatgcccgggacaaattttgcggggggggggggttcaaaaaaaggttttttcccctgga

SEQ ID NO: 714850 - DNA, 328 bp, Homo sapiens
tcacagacgcccgccatcatgcccgaccaatttttgtatttttagtagagacggggtttcacaatgttggccaggctggtcttgaactcccgacctcaggtgatccgcctgcctcggcctcccaaagtgctgggattacaggcgtgagccaccacgcccggcatgtttccagatatttttactctctggtgtttattaaacttaacccaggcagattgagtctcagccatgttagagattttcctggattagctgccttgtagtacaatctagaatttttagtgttcaatttatttcttgaactaatcattcaagtagattgaaggaa

SEQ ID NO: 714851 - DNA, 759 bp, Homo sapiens
cctgcaggaattcggcacgagcatttttatacactattatacaccctgttcctggcttatatactggacaactacaacactacgacggaagctactacactatgcaccagatagcaactccacggcttttacactgaaacactgaccactccaatggcccctagcgatatactagacaccacacaccaacgggtcctacaacgggtccaccttgatcaccactctaacgtcacacttcgcagacgctacactactatcttaacaatataacatatccgtgtatcactgatccctaagctactatagcccaccattgacatccatatcattgacacaatctactagctactacgcgcgctactaactcctccactatttatcccgtacctcaactatctccaactatatatatcctatctaaacacaactatctttctccttgccaacgccgtctttcttctccatataacaatgtacgtatcacatacccatatgaccttgcatgcgcttgcgccctagagcgcaatagccctattcatgtccccgacttgcgactatctatctcatgaaacattcttacgcaaccttgcgcgctcttgctatccatccctggctgcctttcaaaaaccccaaaatctcaccttatgtacccaaccccatatcccatcctattcaccacgaggtagattggttacttgcgacacttacttggtcagctacattagacacgtggagagacacagcttcttctcacacttt

SEQ ID NO: 714852 - DNA, 390 bp, Homo sapiens
ccccccaaatcccccccaggaaatagggggcggggtttttttaaacccccctttaacccccccccccccccccggttggaaggaaggggaaatggcccccccccccccccccggcccccccttggggggggccccccctccccccaacccctttttccctttcccgggggagggccaagagggcccccccccctttttggggtttttccccccccaaaggggggcccaaaaagggggggtcccccgccctggattcagggcccccttcgggggggccccccccattttgggccctccccccaaaatttttcccccccccggggggattcccttggaaaaaaacaaaaaaaggttttttcatgggacaaacacacacaaaaaacacacaca

SEQ ID NO: 714853 - DNA, 293 bp, Homo sapiens
  misc_feature (59)..(59): n is a, c, g, or t
  misc_feature (208)..(208): n is a, c, g, or t
  misc_feature (223)..(223): n is a, c, g, or t
  misc_feature (257)..(257): n is a, c, g, or t
  misc_feature (278)..(278): n is a, c, g, or t
  misc_feature (281)..(281): n is a, c, g, or t
  misc_feature (284)..(284): n is a, c, g, or t
aaagggtcgggctttctaagcgaagtggccccagtgaaccaaaacatctgccaggagantgagcggctgcagtctacaaactttgccctggccgagtgaggtgtagcaaaaaaaggctgtgctgcccttaaaaatggcgcccccagctctcccgtttttggagcggaatttacctgattttttcagggctgctgggggcaactggccntttgccaattttccnactctccccctggttttcaatgaaaaaaagggtntttgtgattttgagtaaagcnccnatntgttttcca

SEQ ID NO: 714854 - DNA, 605 bp, Homo sapiens
gatgaaaaggaggccacgggagatacctgggagcactgggtgtagcaaaacaaagccactcgctgctgtcagtcgcaccatgtgctaattgaaaatcatatcctgaatcatactgagagtgatcaacttaggtagcttctattagttcagatcttatgatcacactgacgtctatctcagcgtgagattttctcagcccagctgagttagtacattctgacaatgctgggcgaccaggagacggcccacagagcacagcactgctaagtgtgaagatgggaactaaactggaaatgaaatttatactgacaatattatggcatttttaacgatcatggccttttaactttacattagagtggagtagcatcatactcaggggttagcttccaaggtcagtacatagcgtagaatgggctattaggattgatccttgaaagccctttgagcaagggtgccagtgttcggaaagctgtacatccacaacaagtagctttgcctcctatgttggaaacaagagagactgtttcttggtgttgaagaccaagtgaacgttgtcggtgtggtataggggccattgtgttaaagaaacaaaaaaaaaaact

SEQ ID NO: 714855 - DNA, 401 bp, Homo sapiens
tttcctgtaacatatttctggtgccacagaagggactatagtgcagaaacgttgacccacgggctacctttgcgtaagtgttggggtcctgtaacatatttctggcaaaccacagaaaggatgatactgaagaaacccccccaaccccaaagaaatagactgcagcactgattggacgactttgggtaagtgatggggtacccgagtaacaaatgggattgggttagaggcccaacttaggggagttggagtttctcctaagacagagtgagttagaggcccctcttaataaaaggcaaggacacttgactgacctcaggttagaggttactccatcctactctatggagtagctgtcctttcaccactttactttcttaataaacttgtttttgctttgc

SEQ ID NO: 714856 - DNA, 116 bp, Homo sapiens
gcggtcaccagaggcagagtgaagtgcggcggtcttgccggtgccggtctgggcgatgcccagcacgtcgcggccagcccggccgacggggactcgcctgttcttgaataggggtg

SEQ ID NO: 714857 - DNA, 797 bp, Homo sapiens
tggttactcattcaacaattttatattaaatgtataccatgtgatcacgagttacaacaagtgtagaggacagagtcagtatgcccttgggacactaatcgtgtccgataaagctctgagccagcaatcaaacccttttagagactcaccacttaaagtaatcatgcttgtactaatttattcagtatttccttcttccctatcacaacgaattgtaatggaagcctttattacgtccggcacaactatacacttataaactgtcttctctgctaaaatccgctggcttcagtcaagtctactttctacgtacatactaatcaacctgtgacaatcaagttttatcctggaaaacaagaaaggaccccattatcttccgtctgtccgtcagttttgagcatgtccttttctctccttgtgcccatggcttgaagtagcattggctccgacctttgtgcctcactgcattcctcttgtctcctgagactcctgggttcctacgcatgattgtctatagaattcaagctctagcaatcatgaaggaccactctcacgctggcacatactcattagcaaggcccctgcaggccatatcacataagcataatgcctcataccagaaacatacaaaaaatttgtccatgccctagtcacaattggatcaacacctaatatactatattaagtagcatagactctatctcaattaaccattgaaacaaataaggacgattctggttactaacaaactcctaccaactttagcaaaattaaaatccatctataccatccatccc

SEQ ID NO: 714858 - DNA, 127 bp, Homo sapiens
gggatgttgaggctgcagtgcgcctcgatcctaccactgtgctccagcctgggcgacagcaagcccgtgtctcagaaaaggcgggaggggtgggatattattgatgataggccattcaacgcctccg

SEQ ID NO: 714859 - DNA, 620 bp, Homo sapiens
gggtgggggtgggcatctctggtacctattggggtggggggcctctagaaaagggaggctcctaggcccccctcacccctccctctccccagggacccacgattctgcagccttaaggttgaacatgagtgcacgtcatgtcagtgctgtgggacatcctgatgcgtgccatcgtgacgtgcgtgatagtcggcgggacgcagagcacacgatagggtgtgtgtgcatgtgtgtttgtgtgagggcagcgatgtacatccagatgtgcatggatgtgtgggcattgggcaccacaatcactgggaccagagacatatatcagtaccgtgtagaggaggaaggtggatgcatgacactatgattgaggaggaggccacacagcatgaatggaatcccacaagaaggaagccatggacgcccgattgcaacccataagcacgttcccacccgtaccaccatggtaaggcgaaaggaacacgatccattggaagatgataatggagaggattcacgaccattagttgctacggggaatttatgcaatcaacacgcactaatcacccaactacatcacagtggtagcataaaacgcaaagtttacaattgaggcaaggaggcag

SEQ ID NO: 714860 - DNA, 427 bp, Homo sapiens
  misc_feature (1)..(1): n is a, c, g, or t
  misc_feature (6)..(6): n is a, c, g, or t
  misc_feature (25)..(25): n is a, c, g, or t
  misc_feature (27)..(27): n is a, c, g, or t
  misc_feature (31)..(31): n is a, c, g, or t
  misc_feature (44)..(44): n is a, c, g, or t
  misc_feature (46)..(46): n is a, c, g, or t
  misc_feature (79)..(79): n is a, c, g, or t
  misc_feature (83)..(83): n is a, c, g, or t
  misc_feature (93)..(93): n is a, c, g, or t
ngaacngacagaaattgattagagngnaganaggaacaaaaaancncgcctttttaaaaaaaaggggggcccacccacnactnaaaatacagntaactaatcaaacaaaaaaaggaaataaattcctgaaggctatgacctggtttcaccaatccacatgaaatgactactgaaaaaggaaaagaatgaaaaagggaaattaaaaatgctttcacaaagatgggcaattatctcttgacaaactgaataaacccactgaaaaaatgaggagctgcccggaaacaatgaaattgcaaaaccaaaaagtaaagggaacaaacaagaacagaataagaggttgaaaatccccaattgatgaaaaaactaaaatctgctgctggttttaaaaaagaaagctaaaaaataaaattaatcaaaaaagaaggca

SEQ ID NO: 714861 - DNA, 208 bp, Homo sapiens
gtatagcattttaaagcggcataccctaaagaggtgtgtaatcaccatccgcagccaaaatatagtttattatctctctccctctttgtgaatgatatgtgtaaagtgaatccaattcctggcccccagagcaaataagctactgtcagaggcaagaacatccaagctgctgatatgcagcaaaccccattcatgccccgcagtctag

SEQ ID NO: 714862 - DNA, 540 bp, Homo sapiens
ggggggtgatcacaccagcgcgactaaatacatctgacccgatcccatgcgtgcagaggtcataaaggatgcagaagagacagcaaagatgggtgcctactccttctgctgggaccacatgacctcaatggggcaccagcctgatagccagtaggatcactcctgcagagggtatctgacaagccctgtagaagggtctcacccagttgggtggcacagggagcaggatccgtttaatggagcactctgtcccttggtggagagggtgtgtctatgcttggagggaaacccactcatctgggctgtccagattccttggaactaccaggagtgaaaagctaaatctgctggtcagcagagactgcggccacccctcccctatgggctgaggcccaggagatccaaattctgtcccttagcctctggctggagttatcggagatccagcagggaagcgccccgacccacacacacccaaactacgaacggatgggttgggattgggcctgcaaagcactctagccgagactgccacagcca

SEQ ID NO: 714863 - DNA, 768 bp, Homo sapiens
attctaagttggttctacttaaggaacttccagggattcatcatctatatattaagtacgccattcaccgattcctgtgtaatatgttttgactgacaatgatgactcaatcacattggcctctatctttggggtctattcgatccgtcttaatcataatccttaacataacaaataatgacgttagcgaaagtattccctttataccatgaattttctagaggacacaatatgttctctccgaaatctcatctaccaagttgatagcagattggatattatgtttcctgaagaagtctcttttgcaaagcataacgcttaagaagttcctagaactacataagtaaagctggtattttaatatcctgattgactatttaggaaagattgcttaataagaagatggatggagtggcattgtagtacgtattgtgtgtatccacatagttcactttcgagtacagttatatgtatacattgttttgattgagagttgtgactatacaatgttagaatcagatatagcttgtttcttgttaaatatacgatatacacgaaatacatataattttctctcctttttgttgtgcatatctctatgcatttataaacttttgagactttgtgaattcgaccgtatgtgtaaatttttgtgtgtttagtacaaccagaaagtatacaagcttttaatgtgtgtcagacaacttcgttccatacaatctgtggtatcgagcaataatgttaataactgtgcggcaattatattaa

SEQ ID NO: 714864 - DNA, 367 bp, Homo sapiens
agtttttccccaaattttttttcccgggggcccattgctaaacccaagatggtgaggggccttttttttttaggttttccttaaaaaaaattcccaatttcccactataaaatccaaaaaaggggttttttttttccaccctcttaaccttttttggagaaggcatttttggttttccgaaattaacataaaatcccaaagcaaaattccggaagctgagaactttgggcagttggtcagctttacctatggggctttgcccttaaataaagggggggatgggagattttttcaaaaatggaaggaaaactgtttcctgaacaataaaagggatgaacggggcaaaaaaaaaaacttttttttatta

SEQ ID NO: 714865 - DNA, 1209 bp, Homo sapiens
  misc_feature (263)..(263): n is a, c, g, or t
cggggttccggacaactcccccaagacaaaccctctgtgctcctctccttcagtccccagcctgggtaaagatggccccatggtcccccgaaagggcctagatcccagctgtgctctggggccatcagcactcttccgtcagaagcctctccaggcatcgctatctggctcaccagcgccgtcgttccgagccttcgctcccagatctatcgtcccccgtgctacaatccctcgagtccgtggtacatagcctgaccgcgggnactaggtcgcacagtatttagagcacatgggcctggcagagaaccgatctcgggtgcacaacatttcggacgtgaacacaggtggccctggtgaggcaccgaggaaattatgctgccaatatctaacatagaccaccagcggataacctcggctggcatagatgtggtgcgtaggcacgcagctggtggtgcagtcaagagctcatgaacgtctcggatggtgccatccgggcggtgtgcgtgggagcttagagggtgaagggaaggctgcatgggatacgccttgtgattggcttattccacgagatggcgaaggcgagcgaaggacccctgcgtaccctcctgtacgcgagtgtgccttcgttgcctactaggatttctccatgcaaaggcatccgtagacttgaccgcaccctggcacggtcgagccgtttaccgcgtggcgcgctccgttgcccgtttcaccctcgtccgctaggtggggacaatcccggaaggacgggggccttgacttgtgctaggagctttgacgtcggccaagctgctcgacaggggcccgcacccgggggacccccgccaagggggggggcgcccactcctggcgggcgagcgtttgtgctgaccgtggtgctaaagggcgccgggtccatatcaagcggtgtgagtcgaccggccccgtggtggggttcgaccttggttggcgctctattgggcgcttagcgataccggaggggcgaggacaccggcgatgacctgcccccggcccaatcgctgggggtcacttgtttccgggactcttgtggtggttggggggcgcccttggcttgcccccggtgttggcttcagagtgaactcctctgcacgggtgtccagacctctggtgtgttgggcaatgggggcggattggaacagtggcgccttgtgggccccttggggaattacaccc

SEQ ID NO: 714866 - DNA, 956 bp, Homo sapiens
  misc_feature (294)..(294): n is a, c, g, or t
  misc_feature (549)..(549): n is a, c, g, or t
agcggggaaccggattcgggagagcgtggccggccatgggtgggggcgccggtaggaggcggaggtggcgcgagcatggaggaggggagaagagctgctgggctgggtcgcggagagccggcggcacgcgacgaggctcatccagcgggcgacggtaatgataggaacgttactgtcactgtgacgtgacaggagttcttccacgcgtgtccagcagagccacgcgtacatcgactggaagcatacctggttctatctcgacactgacgagcactccgaatgttgggtcgcgcngatcattacactgtcaacagaaacacatactagacatcgagcaatgcgtaaactcctcgtagacatgcagcgattccgagacagaccttcaccatgcatcattgctcccgtcgagactttggcatacgctggactcagtcgcgtctctctgtgctggcgttgagtcaccggcatggttagtacaggcattggccgaaacattggcgctcttcctggtagttcaacttttgattggcttgggaccccacgagtggnttgggatcgcctgcaggtggcggtttcgatctgtcctgttggtgtgtggctgtgattagcgaattcacttcgctggtgtgagagttacctcaagaactgtcgtccatcgtattgccgtctacgtgatgtaacgcaagtggacatagttcccagggctatattgaataatgtcagtattcctactggccagtcgtctcatagttcgtgtcgtgggtaggcgcttaggtcgcagggtccctcgcatgtaagcgtggactcccgtgggaaagggaacttcaccctgcaagtagaccccctaaaagtacttccccatccattggcgacgtacgaaaggcgcaagttgcttcggcgcaaacctgacgtgttaatcacactgtgtgtcacaagttgtaggactcggaggaacc

SEQ ID NO: 714867 - DNA, 334 bp, Homo sapiens
gggcacatcaaaacacaccaaacctagctgcaaagaatgtgaaaccaccaccctctcatacattttcaagaaggcaaaaaaaagagatcctcaagcacctggggatgtgtagctgttgatcccggcagacaaccgtgagtttcagaggcaaggaaaagattttttaaaagttaagcagcgattaatagagattgctaatcacggtgacaagttttacagaccactgaacattcggatcgtgttgcacggcgggaaatgtgtaatgacatgcacaaatgctctgtaagtcaggacccattcacctgcctccattaatttctggactggaggaaga

SEQ ID NO: 714868 - DNA, 393 bp, Homo sapiens
gacttgtgtatagctgagactgtaactggcaggtgttttcagttgctgcactttttatttaatcttgctcaggtcccagtaactatctcaaaggtaatcgcaggaatatgcatatagaaatacggttcaaaaaaaatctgtgtatggtttcatctaaaaagacaagcactattggaaacactaaacacgtgttatactttgtcgttattttgcattcctgtactttacaaactgtcatcacagcaaaaagtttaaaattaggtaatgacctatctctgtaaatacgtaccgttcagctggtattttaaacaatgtattataaattaattaatgtttctggacacatgttcatatatatgtatatgaatgtctctttatgctgaagtgtcaacg

SEQ ID NO: 714869 - DNA, 131 bp, Homo sapiens
taaacaagggcttgctctggcactcaggctggcaattgtagctcactgcagtctccaactcctggccttacgcgatcctcctgcctcagcctcataaatagctgggactaaaaggggcgcagcaccatgcc

SEQ ID NO: 714870 - DNA, 237 bp, Homo sapiens
cagggcatagaacagtaggaactatgttggccctgtgcggcaggcacatgcagccatgtcctgatccacggctgtgcttttattcttaaagaggatcatctagaatcctcagaaatgttctcttagcagccctgagatcatgccctcaataactctgccacgggacgagtgggagaaaccacagacctagagatgagtcaggatgcccactttgtgccttggggtaagctagggggg

SEQ ID NO: 714871 - DNA, 532 bp, Homo sapiens
aaaaatagacagtgcctttcaagagaaaaaaaatggtgctggcattttccctccggtaacctgaaaacataaggggtgtacttatattaaatatattcttacaaatgtccaggtcatgtttaccagcgggaatcctttaacttaaggtgtatttggcatggtgatattaaatcaagacattaacatgagtagaaggtggtggattaaagacaagttggagatccactaaaataaatggtggtatgttggtccttcgggtggcggtggaagcttcatattttcttgggacatcataagacgtctaagctctggaatgtacaactttaaggctatatgaatttggccatttggcaaacacgggatatgctcggggcatccaccatcccagtggaaataatttatcccggtgcatattaattttggtcacaaatctaactgagggaggagctcctgggtatgtaggcccacattctacttgcaggctatatatcctgtttgcataatctgtgcttggtgccccaataatcatgct

SEQ ID NO: 714872 - DNA, 235 bp, Homo sapiens
gtatttacagagtcggaaactgcatttcaggggaagattgatgctgcttaggttgagaccagcaaatacctgtgggatgctctcaataaaaagtacagcttgctgaaccacatgcgaataatgaggtcgtacctgctctttgttcaaggagactttataaggcacttaatggacttgctaaaaccaggacttgatcgcccagctacgactttggatcagcataactggacttgaa

SEQ ID NO: 714873 - DNA, 365 bp, Homo sapiens
  misc_feature (13)..(13): n is a, c, g, or t
  misc_feature (20)..(20): n is a, c, g, or t
  misc_feature (28)..(28): n is a, c, g, or t
  misc_feature (34)..(34): n is a, c, g, or t
  misc_feature (39)..(40): n is a, c, g, or t
  misc_feature (45)..(46): n is a, c, g, or t
  misc_feature (81)..(81): n is a, c, g, or t
  misc_feature (110)..(110): n is a, c, g, or t
  misc_feature (112)..(112): n is a, c, g, or t
  misc_feature (150)..(150): n is a, c, g, or t
  misc_feature (153)..(153): n is a, c, g, or t
  misc_feature (172)..(172): n is a, c, g, or t
  misc_feature (206)..(206): n is a, c, g, or t
  misc_feature (215)..(215): n is a, c, g, or t
  misc_feature (218)..(218): n is a, c, g, or t
  misc_feature (221)..(221): n is a, c, g, or t
  misc_feature (267)..(267): n is a, c, g, or t
  misc_feature (282)..(282): n is a, c, g, or t
  misc_feature (295)..(295): n is a, c, g, or t
  misc_feature (314)..(314): n is a, c, g, or t
  misc_feature (331)..(331): n is a, c, g, or t
  misc_feature (338)..(338): n is a, c, g, or t
  misc_feature (350)..(350): n is a, c, g, or t
  misc_feature (358)..(358): n is a, c, g, or t
tggaaaagaacgnaaatttnttgaaacnggtttnggggnnggggnnggggggacagcggggggttttccaaagagaactgnggggggggccagcgcccggccaggggggngngggggcctggccacagaccctatctcaggcccagcttnttnttttccttctgcttcttgnggaccacgtccagattccggtccttccacatgcncttgcgaanttnganggggggcgagccacaaacttcccattcatctcacgcatggggcgcncgttgtcgctggggnccttgaagctgangaagccgttgcccttggtnttgcctgtgcgcttttnacggatnaccttggccttnaggaaggntgggaag

SEQ ID NO: 714874 - DNA, 503 bp, Homo sapiens
gaacttctatgatttcacttcgttagtacgtgaattagatattcctggtgaaatttatgaaaggaagacgtctccatttgagttctcaactgttgaaatgccatacgacgtcttacaattgggacaaatgtcagactgaggtacattttgaaggtgacaattggcagaaactatgttgggaatattgtcgagtaccgggatttctgtgtgagaaactactcacctgtccctacgatcaataacagcattaaggttgaactggtacaatcttccatatcggcattgtgtgtgcctggggccttgacaatgttgacaaaatttcttttcacagttcatgttagctgtggtcagtggtcacagcaggttctagaaactcctgaagactgttctttttctttctttctgaaaactttgaattttagtcagtcttgttttgactaaatcggatacttcatagcccaatagacacttttgtccccttttaagaatggatactttttttt

SEQ ID NO: 714875 - DNA, 1502 bp, Homo sapiens
ggatcgaggtgctggctggggcagaagcagacaccctcccagacagagtgggcagtgatggtgtgtgcagtgagagttagcaaatgtgtgacatcttctcgtgggtgtgatgcctgagacttgctgcaatggcttggtgtgtgtgctatgtgtgccctgttccatgtgcatgaaatgatgcaatgagtggcagtggatggtgatgcacatgtggtgtgtgccatgctgtagtgtgtccatgcactgtggtgtgttgtgtacccacatgtgccttgtgtgtcatgacatgtggacaatggcatgtggtgacacatgtgacatgatgtgggtccccatgctgcacacctcaacccacactgcaagttcagtttatgtacgcatgtgcacatgtggtgcaatgctcctgtgcactgtgctttctcatgtgcctattgcctgtgagcctctgatgtggcttggacgatgcgtggaatgacatgtgcatgttgctcgtggtgacgtttgcatgcatgtgaacattcacacaagtgatggtgcgaaatgctgtgccacagggaagtggtgtgtgccccctggagacatttgcgacagccaatggatggctgcatggggtgctcggcactgctggtgcgccgtgtcccatcagacgggcacttgcagtgcccagggtcttggtgctgggaggatggggcccaacatgttggactctgggtgacgccttgtattgccctcaacctggatcaagaccctgagggcctggattgggcagacaagtacatgcatccacggggacgtcacatggcgcatggtcggagaatgacacgacctagcgctgaaggcctgtggcggtcggacggggagctgaaattgacggctctcccaggggacggggagggactggtcgcagggccaggggggtgacagagagcgtcacgcgggctggcaggagctggaagggcacttgtgccatccaggagacccggttgggcaaggcggggacatcagcgacgccggtccgaccggaacgacacggcagaaccagggaggaccaccagccagccacggaggccagtgcagaacagggccaaggagctacacgactgcggtgcaacgtgaccaacacaagtggccgaaggcccacagaacgccagggcacagcgtcgaccgtgacaacgccatcgacacatgaaccgcgtcgccagggttcagacagcgaacggcacagacagcagcagggagccggaggcaatagtaagaacccaaatagcagagcgagagccgctaccgaacgagggccagcccccatctaatccacacacgagtcttagacaatatgccagcccacagcactaaagaacaaaccagagcaacaggcgacaccacgtcctgagctcatcaacaacctcagtagactagaaccgcagcagacgaatcaagcgaaccgaagatgagcgacagaacagaggacgcgacacaaccgagatgcgctctcttaagagaag

SEQ ID NO: 714876 - DNA, 242 bp, Homo sapiens
  misc_feature (23)..(23): n is a, c, g, or t
  misc_feature (31)..(31): n is a, c, g, or t
  misc_feature (39)..(39): n is a, c, g, or t
  misc_feature (47)..(47): n is a, c, g, or t
  misc_feature (96)..(96): n is a, c, g, or t
ggtgagattagaggatcccagtncgggtctncacggtangtatgcanggatcgctgggccaataattatgtcagtgaatctgagactggtataaancactttagacattggtagaagggaattcgtagacttttcacttacatacgaaaggtttttttttttttttttttttttttttttttttttttttttttttttttttttttttttttttttttttttttttttttttttttcttttc

SEQ ID NO: 714877 - DNA, 91 bp, Homo sapiens
tcgaccaacaataaggccaactgtctttgctcaagctgtaactctcgccgcttgtactatacaccacctggagggagagtgggaacgtgag

SEQ ID NO: 714878 - DNA, 334 bp, Homo sapiens
tgtatgtcccgatgataaagaatattgtgccttagatcttatgtctctggctagggaagcagctaaaagcgaaggtagcttagatctaaggaccactgcacctaaaatcatcaagacctatatatcttctggtctcaatcctaccaaatcaaatcgtcacagctcacacctgttgttaataatacacacatacacacaataatatacacagtacaagtcaagactagtcatgaaaaaagtctttcaggctagcaaagctaattacttacttagtagctaaaattattccaatcataaataaacgcacagcaccattgaacagacgacatatttg

SEQ ID NO: 714879 - DNA, 165 bp, Homo sapiens
tccagtccccagcaacaccaagggacagctgcatattgttcactccttgattcttcatttagggaaaatgtctggaggatattggcatctgaagattcatagtctgagattttgcttatagatcaatttcaccatcagtagcatttagaatgttgctattggtgt

SEQ ID NO: 714880 - DNA, 442 bp, Homo sapiens
  misc_feature (6)..(6): n is a, c, g, or t
  misc_feature (26)..(26): n is a, c, g, or t
  misc_feature (53)..(53): n is a, c, g, or t
  misc_feature (109)..(109): n is a, c, g, or t
  misc_feature (434)..(434): n is a, c, g, or t
ccactngtatagtcaatgtgactggntttcaaaagccctttcagttatagagncaatgactgggcaacagaaatgcctttcatttatatcattcttctgttttcttggngcaaagggctgtagttaagaggaacagttagattttagtggcttaccaagttgctttagaggaagtctatgaaaggactgttgagccaaacaatgtccagattaaaaaccagtctgttagcaggacagaatcctcttgcagatactttgtttaacctttaacttagtgcaagaagagttcaagctatgacttttgagattaaatcttaaattatgtaagcatgtttctgataaggattgttttatcatctgcatcagaaccatttggactgctttaaaatacagatttttggactcctacccagatttactaaatcaaattctgngaatagaa

SEQ ID NO: 714881 - DNA, 173 bp, Homo sapiens
ttggaagtgtaagcccttgtcattaaaattttaggttaagaaaaaaattattttttgttcttagtctaatgtgaactgaatgcctgagagatgttgtgggcagttaattataaagtagtgtagttatgttaattctgaagtcattagagaagatgagaagataggatgcaatg

SEQ ID NO: 714882 - DNA, 425 bp, Homo sapiens
gacaaatgggaaccaggcaagtcctcaggcttgcaccaggtttacctaaagcttgttgccttttcttgtctgtttatccgcgtagagcactcaagaagttctgaaactgctttgtatctgctttgtactcttggtgccttcttggtccgtaccccagcatttgcatagattatttagtataatggtaagataaatgttaaggaagatttattaagaatctgaatgttattcattatttgttaccatttacattaacattgatttgtggtatttgtgatttggttaatctgtatgaaaattgtaagtagaaaggtttatatttcatcttaatctttggatgttgcccacgtacttgttggaagatggattatttgaatgctcatggcacctgacttgtaaaaaatacagactacagaaaaaaaaaa

SEQ ID NO: 714883 - DNA, 311 bp, Homo sapiens
gggctttttgaggggggtatggaaattaaatgttttcgttaaaaacttatccctattaaaacaggcagttgtttttttgaaaatgcctaaataacagtatttttaaaatttgacagacaagtaacaggtcaattacttgatattccttgtttccagtaccacaggccatttttgacatcccatgtttgcctggataaagttcctcatttcaaacagtaaaaaaacttttttgcagttcattaaagtaaggcttaacctgtaaacagtatttgatggcccccctataaataaaattcagcattttattttta

SEQ ID NO: 714884 - DNA, 754 bp, Homo sapiens
cggacgcgtgtggctaggcaggggaatctgaggcgcggctccggggattcggctcgggccgctggctctgctactgcgtggtgcatgtgtgatgctgtgtgccctgtgcccgtcggtgtgccctgatgcccgtccgtgatccggccccttcccctggtacccggccccctcggacgactacctctggctgctctgtgcgggttcagctgtgggccgggggacccgctgtggtccgtggccgccagtgccgtggcctacgcttgcctcgctgtcaggttgctagccggcccgcagtgggccctgtggccggtgggcccgtctaccccttggtgcttcagccccttggatgccttgctacagctgtcacccttggcgtggcagtgaggcccggtgcggccccaagtgcacccggtcaccaccaacccttggaatgaccgtcttagaagctttggccagcactgacgagcgggtcaaacagccgaaacgggcgtgccagcaggccttgggccacagacttacggggtggccatggcccctgggaacctggggaagcaggcggacgcacaaggccccgggtggggacccagggcgccgcaaggagctggcccagcggctgaagcaccgtattggggcgaagccacgacgcgcgttcgttagcgcgcttaaggcgggctcacttgcgaacacggcccccccgggggccaagtggcccggccccacaacacagcgaccggtcaagtggaccgccggcgta

SEQ ID NO: 714885 - DNA, 320 bp, Homo sapiens
gggattacaggctcataccaccatgcccagctaatttttgtattattattattgttttttagtagagacggggtttcaccatgttggccaggctagtcacgaactcctaacctcaggggatccacccacctgtgcctcccaaagtgctgtggattacaggcatgagctaccacacctggtttggagagtcttaattaaggacatttccctaatggtcatttattttgcttaaatcccagaccgtgtttcagagtgaatgcttactttgagagtagccattctcttgtcctgtactttgtcagaactaagaggagatagcc

SEQ ID NO: 714886 - DNA, 215 bp, Homo sapiens
attcgcggccgcgtcgacaagtgactaaaattttgaatttcttataaagaaatatctgtgaggcagggtgtggtggctcatccctgtaatccttgctacttgggaggctgaggcaggaggcttgcttgagcccaggtgtttgaggttacagtgagctatgatcatgccactgcactctccagcctgggcagcagaaagagaccctgtctcttaac

SEQ ID NO: 714887 - DNA, 349 bp, Homo sapiens
ttatactgtcacccaggctggagtgcagtggcaccatctctgctcactgcggccttgacctcctgggctcaagcgattctcctacccctcagctactctaggaggctgaggccggaggatggcttgagcctgggatttcaaggctgcagtgagctctgatcacgctactgccttccagcctgggcggaagaacgagacctcgtctcaaaaaaaaaaaagaaaggagaaacatggttgaaggcgataagtatgatggaaaaaaggatcaaggagcaggatgagggagagatcacagttggagggggtacattttattttattatattattattctttgagactccatcgc

SEQ ID NO: 714888 - DNA, 168 bp, Homo sapiens
  misc_feature (141)..(141): n is a, c, g, or t
  misc_feature (153)..(153): n is a, c, g, or t
cagagatcttccaaaaatttattaagtgtttacttttaaagtggaaacaatgtttttaagaggtgatataaagaatggcccccactgtaatccctaccatatgttgattctatgttgggtgtttggaggggagaatgattnctttttctagantcagagaattgggaa

SEQ ID NO: 714889 - DNA, 137 bp, Homo sapiens
aatgaatagtaatttttgactctgccttataatcttaacaaacattttctcttgctctagtcttactttattgagtaatgaagtacagtatattatacatattctaacatagaatcacatcagtgtgatacctaaaa

SEQ ID NO: 714890 - DNA, 103 bp, Homo sapiens
tgtatcccaaaaacagcccacatcatcctttccccatcacaggacttctgcctctgagtccaaagtagttgccccaattcctgccatcacatctgcaccccag

SEQ ID NO: 714891 - DNA, 300 bp, Homo sapiens
  misc_feature (7)..(7): n is a, c, g, or t
  misc_feature (18)..(18): n is a, c, g, or t
  misc_feature (68)..(68): n is a, c, g, or t
  misc_feature (138)..(138): n is a, c, g, or t
  misc_feature (141)..(141): n is a, c, g, or t
  misc_feature (156)..(156): n is a, c, g, or t
  misc_feature (185)..(188): n is a, c, g, or t
  misc_feature (204)..(204): n is a, c, g, or t
  misc_feature (208)..(208): n is a, c, g, or t
  misc_feature (213)..(213): n is a, c, g, or t
  misc_feature (233)..(233): n is a, c, g, or t
  misc_feature (247)..(247): n is a, c, g, or t
  misc_feature (255)..(257): n is a, c, g, or t
  misc_feature (274)..(274): n is a, c, g, or t
  misc_feature (283)..(283): n is a, c, g, or t
  misc_feature (287)..(287): n is a, c, g, or t
  misc_feature (300)..(300): n is a, c, g, or t
tgatgtntccaacgtccnttgtcactggtcgtggtgagggatgaggaagcgagtttcagagcccgtgnagatatgctgcccgtgagaaggattatgaggaggttggtgtggatctgttgaagagaggtgagtaagaanatnaggaatactaattanccatccttttgccctcacatgcatctccnnnnaattcacttcacttantggnagcgntaaactttctggtaagatantttcacttgtgacngctttccnnnggacgggaaatttcccngcaatcgcnaatnaaagcataacagn

SEQ ID NO: 714892 - DNA, 163 bp, Homo sapiens
  misc_feature (43)..(43): n is a, c, g, or t
ccagggatggccaggatgatgggggaggaggagggaaattttngcgggtgggaagtataaaaaggaaatttatttaaattaaaaaacaaaacagaagagatgtcaggaactttttttaattcctttcttttcagaataatatattaaaagactcatgatccta

SEQ ID NO: 714893 - DNA, 1045 bp, Homo sapiens
  misc_feature (203)..(203): n is a, c, g, or t
  misc_feature (216)..(216): n is a, c, g, or t
  misc_feature (395)..(395): n is a, c, g, or t
  misc_feature (435)..(435): n is a, c, g, or t
  misc_feature (640)..(641): n is a, c, g, or t
  misc_feature (658)..(658): n is a, c, g, or t
  misc_feature (717)..(717): n is a, c, g, or t
caggaaggcctggagggatggcagacgcgcatctcccagaaggagctggagcagcagcaacagcaggtggtgcagctagaaggggtggagaatggcactggccggaaccttctggggcaactcatcaacattctcctgggctggcatgggcagtccttttgggtctttggtctccactggttagccaactggtggtggtcccncctctatgtaagnaatcggccaaccgaggacggttacagaccacatttcaattcccttggtagggttatattatatgcgcccttatctcctgggaagaccactggaggacaggcccctccttcacggctaatggtgtgagaacggggttccctttatcacatctccccttaagaatgacatgtgcttggcancacgacacgcggcacttttgggttccccttaaccccctcntgtggcggaaggtggcaatgtgacggcacgacagaaggttacgaacacggcacaactgtatacctatacttcctggaaaggttttttcctataccaagcaagacacacaacggaaggtttgaaggtgtaacatctctggttgtatcacattatatgacagtatagtggggttattattatcgtttcacaaggaagaacgggccannttgggccactaaggtanatatttcttaagaaatcttttcatctccaaagaaaaggtatttatttggggggcgaaanaaatccttggggttcacattttttgatggttcggcattgagttttttcccttgggggattgcaaactcctttacaaccgggtccttttaatattgaaacccagcatctggggagcacagcggagagggtgatctaaattgttggcttacggacgggctaaaaaccccttaaagaatggccgttttggggacccgtttactaaaccctcttgtgggggcctaccttcctttcacaaattgtgtggaccctctatctggtagttaccacggggtggtttgttgggcaacacctgttctccgaggtattcccgtattgatggcccgtatct

SEQ ID NO: 714894 - DNA, 4742 bp, Homo sapiens
gtagcagtgcagactgcctcaaaacaagttgatggtgattatgttgtgtctgaatggagtgaaattatagaattctgcaccgcagactattcaaaagttcatctaacacaattgttggagaaggctgaagtgattgcaggacgcatgcttaagttttctgttttttatcgtaatcagcacaaagaatattttgactatgttcgagaacatcatgggaatgctatgcagccatctgtcaaggataacagtggtagccatggctctcctatcagtggaaaattagaaggcatcttcttcagctgcagcactgaattcaatactggaaagccaccccaggattcaccttatggaagatacaggtttgagattgccgcagaaaaactttttaaccccaatactaacttatactttggggacttctactgtatgtacactgcttatcattatgtgattcttgttattgctcctgtgggatcaccaggagatgaattttgtaagcagcgccttcctcaactaaattctaaggataataaatttttgacctgtacagaagaagatggggtgctggtttaccaccatgcccaggatgtcattttagaagtcatttacactgaccctgtggatctttctctgggcaccgtggcagaaatcactggtcatcagctcatgagtttgtctactgcaaatgcaaagaaagatcccagctgcaaaacctgtaatatcagtgttggacgttaatgcccacttttcttattcttactcagccccttttcctcccttaggagcattggtcctctgttgtccatttttatcaccagatgttttccactgaagcatgcacatgccactgtcaccaaaacaaacaactaccactttccaaatttcattcagaaccattttagtgttttcctattccctacccctcccactactttcaatgatgaaataccctaagttaagttctccttttgacactttattgcctagatgctgcaatgtttttatgtttcctttatgccaaacataacaaaacagttatatagactgctttagcaaagtacacaataatggcttataaatggtgtttaaatatgcattcattttaatctactgaacaaatattgggataactccaaaccgcatgaaagggtgtaattgcagcatgagttaaatcttgaagcctagaattgtcagcacttccaacttcttgtttgacagtgttatttatgttatttatattagctaacaggaaacaactactgtgtttcaacataataaatataatagaaaaatattttatttgtattgttgtataaaatatttacaatcatatagaatatatagagttacattttaatagcaactgtgtacatgtcacgaaaccatttcccttatcaaagatgtaatttgtaaacctcaaatagttgtgtatctgtcctgttagaagtagatgacttcaattaaacaaatttatgaaggacattattctgattcataaaagttataaaatattaggtaaatacagagaaaacaataagcctctgaaataagtctgtttctgaaatagtcaatagtcttcccatccaaactataagagaatgtgaatttcttcaacatcatacttaaacattacagaaaatagaaatacaaacaaggttggtacatgagagaaaatgttgaccttttacttccttttacaaaaatgaaaataataaacatgttttcgtataaaataacacaaaatgatatacactgaagttgatgaagcaaataaatattctggcttctttttcaaggtatcagggcaaacaatttccaaacttttcattttgtacagaaggatgaataactacagctcatgggaaatgttttgactttacaaagtatagatgttggaacattaagaaaaatgtatattcccaatgaaaaaatagttatatcatcttatagtaaaccaaaagattagcaataatactatggacacattagattatatactacagacacatatctatccaaaatacctattttaaatttttaatacaatattttattttaatataaacatctgtcagttatagacaaagataataattcacaaagtacatgctatcagaatgaactttggtaaccagaaatgtaaaatttcaaataacggataaaataatgtgttatttttatagagaaagaaaaaaaatagcaacacaatctagtttattttagggtactgagagcctagcagacttaaaggacaaggtagtaaatgttttatcactcaaaaatccattagaagtttcaaataaattgctttcttgctagctgtattccttcctacttgaaaagcgaatttcttttcctcctatgattgattttttaaaatcatgctcttttccatacatcaacataaacagtctttggatactaaataaactttccctaacaagtgtcctagctatgttatttagatttgataaaatattagacatttttaaaaatacttgtattgactatgagttttctgcttggcatggaggacactgaattttttcccaattatatggctacctgttgtattcttccccccgtttaaatcccttctccttgtatataattaaacttgctattccttcttaaaaacagctaatactaccactaaagtgcttccattttcattgtgtcaaaactacttagcaaggatggcagaggaaaataaactttactttatatcatgggtgaaagtgatcataacatttcctgaacctcaaatagttttggccacatcttgcttgctgatgaggacctctaatagtctcagtttggcttttatgtgcttatattcataatactcatctgccattggtatcctatcttccttttgtggacttctgcaaaacaaaaatacatttgttagttcacaatgagtcaagtcattatttaaacattcttttataattcatacatgagaaagtatatgaggacctctaatagtctcagtttggcttttatgtgcttatattcataatactcatctgccattggtatcctatcttccttttgtggacttctgcaaaacaaaaatacatttgttagttcacaatgagtcaagtcattatttaaacattcttttataattcatacatgagaaagtatactgtaacagcctccacttggtttttgcatcatgtcttcttttccttccctttcaccttcattcactccttcttccatgtgttactaagtttctaaataatagtaacctttgaaaacttgaatgtcataagtgttttgcaaatatgtggtctagtgcttagacttacaacaaaggggtcagtgaaaagatctaaggagaagcaaacaaacaagaaacagaactttcaaggcattctttgtccagtcattcttccattatttgccacacccctacagctgtacaaaatgatcagccctaatacagttgttaaaaatattaacctgaaaatactacaggaatttcattataaaaataacataaacctatggtaacaagaaaagcatttagggtctgtcttacaaacttgaaacgtttccagattttcttgtaattataatacctatctctgctaatatatagtagaaccactgagctgttccttgattgaagtaattgacaagagtctaaattgtggtggttctcttctgtacactaattctactaaggctagacatgtaacaatgcatagatttttatacatatgcagcatactcttgctgtttacttggaagaataacttggtaatatcaggagttaaaaccatttgccttcccacaaaaatatgttgtcaggaaacgttttctaaagggaaaaattgcgacagggtctcagaaggctcttgttttcttggttaataagatagccaatcgttttgaaaacatttccacccacgactttgaaattcaaggggtagaggacacagatatagtcaccacaattacaactgaatataaccacaagtattctctaatgttagtatggctgaaaccaggtaaatagcatatatttaatgttttatctttagctcccttttatttttcccagtagtgataaagagatatttctatctcttaccaaataaaaaacaagctaatctatacaaattaagaatatagtatctacttgtatttcaacactatttattgccctgcaatttctagtacagaactcagaacagtatacaaatccatagacagcattcttcttaactgttgtctaaattatataacatatatctttgcctccattctgtgttatgagtcaaacttatcatggctggatgtctgaataccaccttaatttgtataaatagatctaagtaaagaaattgtctaattattacagagaaacattaataatcaattatgtaattttccgtagttttgcatattccattttggctaataagagtgctttgaggccgggcacagtggctcacgcctgtaatcccagcactttgagaggccgaggcgggcggatcacaaggtcaggagattgagaccatcctggctaacatggtgaaaccctgtctctactaaaaatataaaaacttagccacgcgtggtggcgtacgcctgtagtcccagctacttgggaggctgaggcaggagaatggcgtgaaccgtgaacccaggaggcggagcttgcagtgagccgagatcgcgtcactgcactccagcccaggtgacagagtgagactccgtctcaaaag

SEQ ID NO: 714895 - DNA, 253 bp, Homo sapiens
aggatatcaccactgctattccagacctgtatctattaataaattactattttagtcgggcgtgttggcatgcgcctgtagtctcagctactgtggaggctgaggtgggaggatagcttgagcccaggaggtcgaagtctgaactgagcggtgattcacgcctctgcactcaagcctggatgacagagccagaccctgtctcaaatgaagtaaaataggccaggcacggtggcccacgcctgtaatcccagca

SEQ ID NO: 714896 - DNA, 261 bp, Homo sapiens
ggtggcaattctcccacttggaatggtgtatatacccaatgtatctaggaagtaactaacttgcttttgatttacaggctcataggcagaagggacttgcttgtctcagatgagacttaggactgtggacttttgagttaatgttgaaatgagttaagactttgggggactgtgggaaggcatgatttcttggaaatgtgaggacatgagattggggaggggccaggggtggaatgatatggatgggctgtgtccccacac

SEQ ID NO: 714897 - DNA, 165 bp, Homo sapiens
aagtgacgagcgagacctcgtcaaataagaaaaagaatgaatgaagcgaaatgccatttctctagtgagaaactggaatattatcaatgtcacttcttcccaaattgatttataatttaaaaacaattttagtacttctgcaacttgtctggagtacggtcaact

SEQ ID NO: 714898 - DNA, 350 bp, Homo sapiens
tcgtagaaactgtaaatggatattggatagcactaatgattacgtatggagacgggaatatcatcatctaaaatctagacagaagccctctcaaaaactacttagtgatatctgcattcaagtcacagagttgaacattcgctttcttagagcacgttggaaacactctttttgtagtgtctggaagtggacatttggagcgctaagatgccataggtgaaaaagggaatgtcttcccataaaaactagacagaagcattctcagaaacttgtatgtgatgtgtgtacccagccaaaggagtagaacacttactattgatagagcagataagaaacgcacttatagtgga

SEQ ID NO: 714899 - DNA, 90 bp, Homo sapiens
tgtcactcggaacttcaggatggaggaccctgaccctaagcctccttcagatctctggcccaggctcaagcctagagatgggcagggcta

SEQ ID NO: 714900 - DNA, 251 bp, Homo sapiens
cgtcgacgtttttcatcttggaaggataacaattcatgaaaataaaattacttcaggttattttaagagaccaattattgcccatgtttcatcagttagctgatggtcagctctggccacagtggtaagagagaaagaaaagacaggatctagacaggaaatctgggcaacagaagactgagcctcagctaaaaaggctcagctgtgtcagactcaagttatctatttgagatacactctttggtcgacgc

SEQ ID NO: 714901 - DNA, 2995 bp, Homo sapiens
ccggaagcccatccaccaatcctcacctctcacctctgtgtccgccctgctgggaaatattccaggctttggccaaggccagtgcagccccaggttcccgagcggcaggttgggtgcggaccatggcctctcacaagctgctggtgaccccccccaaggccctgctcaagcccctctccatccccaaccagctcctgctggggcctggtccttccaacctgcctcctcgcatcatggcagccggggggctgcagatgatcgggtccatgagcaaggatatgtaccagatcatggacgagatcaaggaaggcatccagtacgtgttccagaccaggaacccactcacactggtcatctctggctcgggacactgtgccctggaggccgccctggtcaatgtgctggagcctggggactccttcctggttggggccaatggcatttgggggcagcgagccgtggacatcggggagcgcataggagcccgagtgcacccgatgaccaaggaccctggaggccactacacactgcaggaggtggaggagggcctggcccagcacaagccagtgctgctgttcttaacccacggggagtcgtccaccggcgtgctgcagccccttgatggcttcggggaactctgccacaggtacaagtgcctgctcctggtggattcggtggcatccctgggcgggacccccctttacatggaccggcaaggcatcgacatcctgtactcgggctcccagaaggccctgaacgcccctccagggacctcgctcatctccttcagtgacaaggccaaaaagaagatgtactcccgcaagacgaagcccttctccttctacctggacatcaagtggctggccaacttctggggctgtgacgaccagcccaggatgtaccatcacacaatccccgtcatcagcctgtacagcctgagagagagcctggccctcattgcggaacagggcctggagaacagctggcgccagcaccgcgaggccgcggcgtatctgcatgggcgcctgcaggcactggggctgcagctcttcgtgaaggacccggcgctccggcttcccacagtcaccactgtggctgtacccgctggctatgactggagagacatcgtcagctacgtcatagaccacttcgacattgagatcatgggtggccttgggccctccacggggaaggtgctgcggatcggcctgctgggctgcaatgccacccgcgagaatgtggaccgcgtgacggaggccctgagggcggccctgcagcactgccccaagaagaagctgtgacctgcccactggcacacagctggcactggcacacacctgtcccatgcccaccctgagggatcaggagcaaacagaccctgcaaggtcctccaggcctggggacaggaaagccactgacccagcccgggaggcagaaccaggcagcctccctggccccaggcagcccttttccctccagtggcacctcctggaaacagtccacttgggcgcaaaacccagtgccttccaaatgagctgcagtccccaggccatgagcctcccgggaatgtttaataaagggcctggccacctctcctcactgtgtggggtggtctgtgaaagagtgagaggagagcatctctgctccctgagctgcctgattgtggactttagggggacactcctcatcctggagcccacagggtagatcctcccctggaggaggtgctgtcaccacactctagccccagatgtcacacccccaaacgtcctcacgcaccacatccaggtgaacccacatggcgcacagggctggttggagacccctgtcatggacaagggtacctgcgtgctggagagcgcacagccaggacctgagcccatgacacgtggaagcctccaatggaaggtcccctatgctcccatccagccagtgcccacccctcaactgcctgacttctgtgaccatagatcagcctggcatatttgaatttatttatttatttggaaacggagtttcactcttgttgcccacgctggagtgcagtggcatgatctcagctcactacaacctccacctcccgggttcaagcgattctcctgcctcaggctccggattagctgggactacaggtgtgcaccaccatgcccggctaatttttgtatttttagtacagatggggtttcactatattggccaggctggtctcgaactcctgacctcaagtgatccacctgcctcggcctcccaaagtgctgggattacaagcgtgagccactgtgcccagccatagttgaatttcatggtcagtggaacacacagcaggtcctccactgtgccagcttctttcacttactgtttttgacactcacatgtaccgtcgtgggcgccggtgtgtctttgttgctgagtgccgtcccgtcatatggacgtgcgtcggggcccccggtgtgtcttgttgctgagtgccgtcccgtcatatggacaccccatgaattggtgggtcaatcaccataggtgaacatctggggttatttctattttggggctgttttgaatacggaggtagtgaaattcttactcaagccttcgtgtggccatatattttcatttttcttggataaataactaggagtggaattgcagggtcatacaataggcttaaccttatacgagactgccacgaaattctccgaagtggctcttccatgtttcattcccgcagctacagcgtccagggtgctccacgtcctcacccacactccatgttgtctttttttgctagggggtgtaaaatcctgtctgatttggttttagtttgcatttccctgatgcctattgatgttgagcaacttctcataagctatcggccgtttgtagatcttctgaaaagtgtcagttcaaatattttgttcatatttggatttttatcttcttattgtcaatgtgtgatcattttaaaatatattctagatactatcagaaaaaaaaaaaa

SEQ ID NO: 714902 - DNA, 2651 bp, Homo sapiens
ctggcagagtgcagattgcaggggcacatgcgcagagaagacgggccagggccagagtagagagcagctgctgctccggggacccacctggggtggccatgagagctggtggctggaggccgggaggacccgtgaccagaggtaatggcactgaggggcccagggctggagagaccacccctcacctgtccagagctgaggcaggagcagtgctgtggaggatgccaggtcgggggagctggccctgagaggagagggggcctgggagccagcaccctgagccctggccctgatccactccagccctgtgtagcccaacagcccttcccctccttgcccagtcccctccccctgcaaggcactctccactcttctcccccaggggccacaggcagacctcccctctgtctctctgaaccctcctctgtctctcccagacccagatgtttccttctgccctggggtagtcccaggccctgccccaggcaaagtcaaactgggggctccaggggctcccctgcaccaaggcctgcagagtcaggttcttcctcccgcaccacagagggcggggcttcctgcccaccccacccatgtcactgcccaccagcgccatctcccacacagggcctggagaacagctggcgccagcaccgcgaggccgcggcgtatctgcatgggcgcctgcaggcactggggctgcagctcttcgtgaaggacccggcgctccggcttcccacagtcaccactgtggctgtacccgctggctatgactggagagacatcgtcagctacgtcatagaccacttcgacattgagatcatgggtggccttgggccctccacggggaaggtgctgcggatcggcctgctgggctgcaatgccacccgcgagaatgtggaccgcgtgacggaggccctgagggcggccctgcagcactgccccaagaagaagctgtgacctgcccactggcacacagctggcactggcacacacctgtcccatgcccaccctgagggatcaggagcaaacagaccctgcaaggtcctccaggcctggggacaggaaagccactgacccagcccgggaggcagaaccaggcagcctccctggccccaggcagcccttttccctccagtggcacctcctggaaacagtccacttgggcgcaaaacccagtgccttccaaatgagctgcagtccccaggccatgagcctcccgggaatgtttaataaagggcctggccacctctcctcactgtgtggggtggtctgtgaaagagtgagaggagagcatctctgctccctgagctgcctgattgtggactttagggggacactcctcatcctggagcccacagggtagatcctcccctggaggaggtgctgtcaccacactctagccccagatgtcacacccccaaacgtcctcacgcaccacatccaggtgaacccacatggcgcacagggctggttggagacccctgtcatggacaagggtacctgcgtgctggagagcgcacagccaggacctgagcccatgacacgtggaagcctccaatggaaggtcccctatgctcccatccagccagtgcccacccctcaactgcctgacttctgtgaccatagatcagcctggcatatttgaatttatttatttatttggaaacggagtttcactcttgttgcccacgctggagtgcagtggcatgatctcagctcactacaacctccacctcccgggttcaagcgattctcctgcctcaggctccggattagctgggactacaggtgtgcaccaccatgcccggctaatttttgtatttttagtacagatggggtttcactatattggccaggctggtctcgaactcctgacctcaagtgatccacctgcctcggcctcccaaagtgctgggattacaagcgtgagccactgtgcccagccatagttgaatttcatggtcagtggaacacacagcaggtcctccactgtgccagcttctttcacttactgtttttgacactcacatgtaccgtcgtgggcgccggtgtgtctttgttgctgagtgccgtcccgtcatatggacgtgcgtcggggcccccggtgtgtcttgttgctgagtgccgtcccgtcatatggacaccccatgaattggtgggtcaatcaccataggtgaacatctggggttatttctattttggggctgttttgaatacggaggtagtgaaattcttactcaagccttcgtgtggccatatattttcatttttcttggataaataactaggagtggaattgcagggtcatacaataggcttaaccttatacgagactgccacgaaattctccgaagtggctcttccatgtttcattcccgcagctacagcgtccagggtgctccacgtcctcacccacactccatgttgtctttttttgctagggggtgtaaaatcctgtctgatttggttttagtttgcatttccctgatgcctattgatgttgagcaacttctcataagctatcggccgtttgtagatcttctgaaaagtgtcagttcaaatattttgttcatatttggatttttatcttcttattgtcaatgtgtgatcattttaaaatatattctagatactatcagaaaaaaaaaaaa

SEQ ID NO: 714903 - DNA, 311 bp, Homo sapiens
agcaccagcaagtccgccagatccggaagaagatgatgaactcatgacccgagaggtgcagactaatgacttgaaggaagtagttaataaactgattccagacagcattgggaaagacatagaaaaggcttgccagtccatttatcctctccatgacgtctttgttagaaaagtaaaaatgctgaagaaacccaagtttgaattgggcaactcatggagctgcatggggaaggcggcagctctggcaaagcagctggagacgagacgggtgctaaggttgagcgagctgacggatatgaaccgccagtcca

SEQ ID NO: 714904 - DNA, 1595 bp, Homo sapiens
ccggaagcccatccaccaatcctcacctctcacctctgtgtccgccctgctgggaaatattccaggctttggccaaggccagtgcagccccaggttcccgagcggcaggttgggtgcggaccatggcctctcacaagctgctggtgaccccccccaaggccctgctcaagcccctctccatccccaaccagctcctgctggggcctggtccttccaacctgcctcctcgcatcatggcagccggggggctgcagatgatcgggtccatgagcaaggatatgtaccagatcatggacgagatcaaggaaggcatccagtacgtgttccagaccaggaacccactcacactggtcatctctggctcgggacactgtgccctggaggccgccctggtcaatgtgctggagcctggggactccttcctggttggggccaatggcatttgggggcagcgagccgtggacatcggggagcgcataggagcccgagtgcacccgatgaccaaggaccctggaggccactacacactgcaggaggtggaggagggcctggcccagcacaagccagtgctgctgttcttaacccacggggagtcgtccaccggcgtgctgcagccccttgatggcttcggggaactctgccacaggtacaagtgcctgctcctggtggattcggtggcatccctgggcgggacccccctttacatggaccggcaaggcatcgacatcctgtactcgggctcccagaaggccctgaacgcccctccagggacctcgctcatctccttcagtgacaaggccaaaaagaagatgtactcccgcaagacgaagcccttctccttctacctggacatcaagtggctggccaacttctggggctgtgacgaccagcccaggatgtaccatcacacaatccccgtcatcagcctgtacagcctgagagagagcctggccctcattgcggaacagggcctggagaacagctggcgccagcaccgcgaggccgcggcgtatctgcatgggcgcctgcaggcactggggctgcagctcttcgtgaaggacccggcgctccggcttcccacagtcaccactgtggctgtacccgctggctatgactggagagacatcgtcagctacgtcatagaccacttcgacattgagatcatgggtggccttgggccctccacggggaaggtgctgcggatcggcctgctgggctgcaatgccacccgcgagaatgtggaccgcgtgacggaggccctgagggcggccctgcagcactgccccaagaagaagctgtgacctgcccactggcacacagctggcactggcacacacctgtcccatgcccaccctgagggatcaggagcaaacagaccctgcaaggtcctccaggcctggggacaggaaagccactgacccagcccgggaggcagaaccaggcagcctccctggccccaggcagcccttttccctccagtggcacctcctggaaacagtccacttgggcgcaaaacccagtgccttccaaatgagctgcagtccccaggccatgagcctcccgggaatgtttaataaagggcctggccacctctc

SEQ ID NO: 714905 - DNA, 182 bp, Homo sapiens
taaaacgggaaatttttaatttcttttttaaaaaaataaatttgtctcttagaggtaaaattttctttaaaaaaaattgtcaaatgtcaaagttttaaacccattcccaagatttttatgttttttaaagaaattttgttggggaaaattgatcggattgattaaaaaaccaattttttgga

SEQ ID NO: 714906 - DNA, 2437 bp, Homo sapiens
ccagcacagcagagggagaagctgcgctcgctcaggcctgaggtcatggctgccacgcagcagtgcccagatttgaacccaggactcccttccacatctcccctgctatcgtgtacggattcgtggtagggtcgtagcctaccagcccattagctaggcaggcatcccgctggactggcctgccctgaggtgggactcacccgtcccgagcccacccatctacaggcatcgacatcctgtactcgggctcccagaaggccctgaacgcccctccagggacctcgctcatctccttcagtgacaaggccaacttctggggctgtgacgaccagcccaggatgtaccatcacacaatccccgtcatcagcctgtacagcctgagagagagcctggccctcattgcggaacagggcctggagaacagctggcgccagcaccgcgaggccgcggcgtatctgcatgggcgcctgcaggcactggggctgcagctcttcgtgaaggacccggcgctccggcttcccacagtcaccactgtggctgtacccgctggctatgactggagagacatcgtcagctacgtcatagaccacttcgacattgagatcatgggtggccttgggccctccacggggaaggtgctgcggatcggcctgctgggctgcaatgccacccgcgagaatgtggaccgcgtgacggaggccctgagggcggccctgcagcactgccccaagaagaagctgtgacctgcccactggcacacagctggcactggcacacacctgtcccatgcccaccctgagggatcaggagcaaacagaccctgcaaggtcctccaggcctggggacaggaaagccactgacccagcccgggaggcagaaccaggcagcctccctggccccaggcagcccttttccctccagtggcacctcctggaaacagtccacttgggcgcaaaacccagtgccttccaaatgagctgcagtccccaggccatgagcctcccgggaatgtttaataaagggcctggccacctctcctcactgtgtggggtggtctgtgaaagagtgagaggagagcatctctgctccctgagctgcctgattgtggactttagggggacactcctcatcctggagcccacagggtagatcctcccctggaggaggtgctgtcaccacactctagccccagatgtcacacccccaaacgtcctcacgcaccacatccaggtgaacccacatggcgcacagggctggttggagacccctgtcatggacaagggtacctgcgtgctggagagcgcacagccaggacctgagcccatgacacgtggaagcctccaatggaaggtcccctatgctcccatccagccagtgcccacccctcaactgcctgacttctgtgaccatagatcagcctggcatatttgaatttatttatttatttggaaacggagtttcactcttgttgcccacgctggagtgcagtggcatgatctcagctcactacaacctccacctcccgggttcaagcgattctcctgcctcaggctccggattagctgggactacaggtgtgcaccaccatgcccggctaatttttgtatttttagtacagatggggtttcactatattggccaggctggtctcgaactcctgacctcaagtgatccacctgcctcggcctcccaaagtgctgggattacaagcgtgagccactgtgcccagccatagttgaatttcatggtcagtggaacacacagcaggtcctccactgtgccagcttctttcacttactgtttttgacactcacatgtaccgtcgtgggcgccggtgtgtctttgttgctgagtgccgtcccgtcatatggacgtgcgtcggggcccccggtgtgtcttgttgctgagtgccgtcccgtcatatggacaccccatgaattggtgggtcaatcaccataggtgaacatctggggttatttctattttggggctgttttgaatacggaggtagtgaaattcttactcaagccttcgtgtggccatatattttcatttttcttggataaataactaggagtggaattgcagggtcatacaataggcttaaccttatacgagactgccacgaaattctccgaagtggctcttccatgtttcattcccgcagctacagcgtccagggtgctccacgtcctcacccacactccatgttgtctttttttgctagggggtgtaaaatcctgtctgatttggttttagtttgcatttccctgatgcctattgatgttgagcaacttctcataagctatcggccgtttgtagatcttctgaaaagtgtcagttcaaatattttgttcatatttggatttttatcttcttattgtcaatgtgtgatcattttaaaatatattctagatactatcagaaaaaaaaaaaa

SEQ ID NO: 714907 - DNA, 993 bp, Homo sapiens
atgacccaccaatcacatgcctatcatatagtaaaacccgagcccatgaccccttaacaggggccctctctagccctcctaatgacctccggcctagccatgtgatttcacattccactccattacgctcctcatactaggcctactaaccaacacactaatccatataccaatgatggcgcgatgtaacacgagaaagcacattaccaaggtcagcaacgagaccacctgtccaaagaaggccttcgatagctgggataatcctatcgagtacctcagaagtgcttctcttcgcaggattttactgagtcctttataccactcgagacgcatagggacctaaccgcagccaacttaggagaggacccctggagcacaggagaaagggcattcaacgccgtctaaattcccgcgtagaatgtccacagtccctaaaagcagcattctcgtactaagcttcggcagtgcagggacgtatcaactctacgctgagggcatcacccattacgtctagaatagtaaaaccagccggtgaccaaaataagatccatcggacacaatgccgactggattacaagagtgaagaacctggggcgtccctcttaagtcgttagcccgcatccttaacagaggcagctcatcacagaaggtaacgttccagaaaggtcaccaccgcggtgacaacgcaagtttatacccgagcgaggctgtccttacaccggagcagtatccacaagcaaaattcgttggtacaggggcaagaccctactcgagaggcctcttccacacaaccgcgggagccgtatgcaccccggtgtaacgctgccacattcaggagggcaattccaccaagcgttacagcgcggcctcactagactcaactatcctcgtgactgtccaagaatcgcaccggggcacctaagcggcaacgtatctttttagccaaagcgtcgattgtcacgcaccgatcccccatgaactctcagatttcgc

SEQ ID NO: 714908 - DNA, 2516 bp, Homo sapiens
ggagatgccccagcctcctcctcccatgcacaccatcagggaggagtagaggcaggcccagccctgctacctggagctgtgccacccatgggggttgtgggggtgtctggcccctgccctctgaactccaccacagcgtccctgcttcctcagggcctggcccagcacaagccagtgctgctgttcttaacccacggggagtcgtccaccggcgtgctgcagccccttgatggcttcggggaactctgccacaggtacaagtgcctgctcctggtggattcggtggcatccctgggcgggacccccctttacatggaccggcaaaagaagatgtactcccgcaagacgaagcccttctccttctacctggacatcaagtggctggccaacttctggggctgtgacgaccagcccaggatgtaccatcacacaatccccgtcatcagcctgtacagcctgagagagagcctggccctcattgcggaacagggcctggagaacagctggcgccagcaccgcgaggccgcggcgtatctgcatgggcgcctgcaggcactggggctgcagctcttcgtgaaggacccggcgctccggcttcccacagtcaccactgtggctgtacccgctggctatgactggagagacatcgtcagctacgtcatagaccacttcgacattgagatcatgggtggccttgggccctccacggggaaggtgctgcggatcggcctgctgggctgcaatgccacccgcgagaatgtggaccgcgtgacggaggccctgagggcggccctgcagcactgccccaagaagaagctgtgacctgcccactggcacacagctggcactggcacacacctgtcccatgcccaccctgagggatcaggagcaaacagaccctgcaaggtcctccaggcctggggacaggaaagccactgacccagcccgggaggcagaaccaggcagcctccctggccccaggcagcccttttccctccagtggcacctcctggaaacagtccacttgggcgcaaaacccagtgccttccaaatgagctgcagtccccaggccatgagcctcccgggaatgtttaataaagggcctggccacctctcctcactgtgtggggtggtctgtgaaagagtgagaggagagcatctctgctccctgagctgcctgattgtggactttagggggacactcctcatcctggagcccacagggtagatcctcccctggaggaggtgctgtcaccacactctagccccagatgtcacacccccaaacgtcctcacgcaccacatccaggtgaacccacatggcgcacagggctggttggagacccctgtcatggacaagggtacctgcgtgctggagagcgcacagccaggacctgagcccatgacacgtggaagcctccaatggaaggtcccctatgctcccatccagccagtgcccacccctcaactgcctgacttctgtgaccatagatcagcctggcatatttgaatttatttatttatttggaaacggagtttcactcttgttgcccacgctggagtgcagtggcatgatctcagctcactacaacctccacctcccgggttcaagcgattctcctgcctcaggctccggattagctgggactacaggtgtgcaccaccatgcccggctaatttttgtatttttagtacagatggggtttcactatattggccaggctggtctcgaactcctgacctcaagtgatccacctgcctcggcctcccaaagtgctgggattacaagcgtgagccactgtgcccagccatagttgaatttcatggtcagtggaacacacagcaggtcctccactgtgccagcttctttcacttactgtttttgacactcacatgtaccgtcgtgggcgccggtgtgtctttgttgctgagtgccgtcccgtcatatggacgtgcgtcggggcccccggtgtgtcttgttgctgagtgccgtcccgtcatatggacaccccatgaattggtgggtcaatcaccataggtgaacatctggggttatttctattttggggctgttttgaatacggaggtagtgaaattcttactcaagccttcgtgtggccatatattttcatttttcttggataaataactaggagtggaattgcagggtcatacaataggcttaaccttatacgagactgccacgaaattctccgaagtggctcttccatgtttcattcccgcagctacagcgtccagggtgctccacgtcctcacccacactccatgttgtctttttttgctagggggtgtaaaatcctgtctgatttggttttagtttgcatttccctgatgcctattgatgttgagcaacttctcataagctatcggccgtttgtagatcttctgaaaagtgtcagttcaaatattttgttcatatttggatttttatcttcttattgtcaatgtgtgatcattttaaaatatattctagatactatcagaaaaaaaaaaaa

SEQ ID NO: 714909 - DNA, 171 bp, Homo sapiens
gcccgatttactctgtctgggagtgactctgtctgtagtatctgcactttcccaacaccttctccctggataccttaatggaacctgggcctcaggtctaactcctacctcaacgtgggctcatccccaaagaccactgaggttcccccagctgcaggacagagtctactc

SEQ ID NO: 714910 - DNA, 950 bp, Homo sapiens
gggcgcgcgcgcgaggttcccctcgttggcggcggggggttcttggttcgtgaagagaagcgagacgcccattctgcccccggcccggcgaggggcgggggaggcgcgggaagtcgacgggccggggtcctggaaggccacgtgtcgttggcagctcccggtgaagatggttccactcagaggaccaccccgtgggcggaaactcctcgggccaggtcccttccccgggggccgtgccctttccccttgatgctattgctgggggccttagccctgggttcacctccgcgcggggcttccgccccaacatgcttggattgggggccccaagaccagggcgcggccttcaaaggggggaacaccacatcacccaactaagggcgcctgggaggggcacccccttcggggaacaaccatggccacatgattgcacaaagcacaatgtgggaagtccaatggcattggaagacaggggcaattgtcggaaacgacgccgccgctgacaacccaagagttgaaacggaattgggggaatcgcggacaaaggggggaccaatcgctgggaatggggaccccccgcggacccaaggcacgccagggggaccacaagcactccacaagggttaacccctccggccacgggggggggctccgggagcagtggcctctaagtacaagtaccaaggacagaggggccggtctacgggaggccgccaagattgtcctccgggggcaagagagggttgccccggctgaattgggtgtagacccccaaaggcccgtggggcaggagagacgcgggggccaaaccccaattatacagcagcaggtggaccaaagtcagagcgcagatcctggcccacacagatggtgggcggggaggagccccctaccgacacttgaattgggggcgagggaagcgccaacgcacggatgagcagagtgcaaga

SEQ ID NO: 714911 - DNA, 2929 bp, Homo sapiens
ccggaagcccatccaccaatcctcacctctcacctctgtgtccgccctgctgggaaatattccaggctttggccaaggccagtgcagccccaggttcccgagcggcaggttgggtgcggaccatggcctctcacaagctgctggtgaccccccccaaggccctgctcaagcccctctccatccccaaccagctcctgctggggcctggtccttccaacctgcctcctcgcatcatggcagccggggggctgcagatgatcgggtccatgagcaaggatatgtaccagatcatggacgagatcaaggaaggcatccagtacgtgttccagaccaggaacccactcacactggtcatctctggctcgggacactgtgccctggaggccgccctggtcaatgtgctggagcctggggactccttcctggttggggccaatggcatttgggggcagcgagccgtggacatcggggagcgcataggagcccgagtgcacccgatgaccaaggaccctggaggccactacacactgcaggaggtggaggagggcctggcccagcacaagccagtgctgctgttcttaacccacggggagtcgtccaccggcgtgctgcagccccttgatggcttcggggaactctgccacaggtacaagtgcctgctcctggtggattcggtggcatccctgggcgggacccccctttacatggaccggcaaggcatcgacatcctgtactcgggctcccagaaggccctgaacgcccctccagggacctcgctcatctccttcagtgacaaggccaacttctggggctgtgacgaccagcccaggatgtaccatcacacaatccccgtcatcagcctgtacagcctgagagagagcctggccctcattgcggaacagggcctggagaacagctggcgccagcaccgcgaggccgcggcgtatctgcatgggcgcctgcaggcactggggctgcagctcttcgtgaaggacccggcgctccggcttcccacagtcaccactgtggctgtacccgctggctatgactggagagacatcgtcagctacgtcatagaccacttcgacattgagatcatgggtggccttgggccctccacggggaaggtgctgcggatcggcctgctgggctgcaatgccacccgcgagaatgtggaccgcgtgacggaggccctgagggcggccctgcagcactgccccaagaagaagctgtgacctgcccactggcacacagctggcactggcacacacctgtcccatgcccaccctgagggatcaggagcaaacagaccctgcaaggtcctccaggcctggggacaggaaagccactgacccagcccgggaggcagaaccaggcagcctccctggccccaggcagcccttttccctccagtggcacctcctggaaacagtccacttgggcgcaaaacccagtgccttccaaatgagctgcagtccccaggccatgagcctcccgggaatgtttaataaagggcctggccacctctcctcactgtgtggggtggtctgtgaaagagtgagaggagagcatctctgctccctgagctgcctgattgtggactttagggggacactcctcatcctggagcccacagggtagatcctcccctggaggaggtgctgtcaccacactctagccccagatgtcacacccccaaacgtcctcacgcaccacatccaggtgaacccacatggcgcacagggctggttggagacccctgtcatggacaagggtacctgcgtgctggagagcgcacagccaggacctgagcccatgacacgtggaagcctccaatggaaggtcccctatgctcccatccagccagtgcccacccctcaactgcctgacttctgtgaccatagatcagcctggcatatttgaatttatttatttatttggaaacggagtttcactcttgttgcccacgctggagtgcagtggcatgatctcagctcactacaacctccacctcccgggttcaagcgattctcctgcctcaggctccggattagctgggactacaggtgtgcaccaccatgcccggctaatttttgtatttttagtacagatggggtttcactatattggccaggctggtctcgaactcctgacctcaagtgatccacctgcctcggcctcccaaagtgctgggattacaagcgtgagccactgtgcccagccatagttgaatttcatggtcagtggaacacacagcaggtcctccactgtgccagcttctttcacttactgtttttgacactcacatgtaccgtcgtgggcgccggtgtgtctttgttgctgagtgccgtcccgtcatatggacgtgcgtcggggcccccggtgtgtcttgttgctgagtgccgtcccgtcatatggacaccccatgaattggtgggtcaatcaccataggtgaacatctggggttatttctattttggggctgttttgaatacggaggtagtgaaattcttactcaagccttcgtgtggccatatattttcatttttcttggataaataactaggagtggaattgcagggtcatacaataggcttaaccttatacgagactgccacgaaattctccgaagtggctcttccatgtttcattcccgcagctacagcgtccagggtgctccacgtcctcacccacactccatgttgtctttttttgctagggggtgtaaaatcctgtctgatttggttttagtttgcatttccctgatgcctattgatgttgagcaacttctcataagctatcggccgtttgtagatcttctgaaaagtgtcagttcaaatattttgttcatatttggatttttatcttcttattgtcaatgtgtgatcattttaaaatatattctagatactatcagaaaaaaaaaaaa

SEQ ID NO: 714912 - DNA, 573 bp, Homo sapiens
  misc_feature (1)..(1): n is a, c, g, or t
  misc_feature (34)..(34): n is a, c, g, or t
  misc_feature (54)..(54): n is a, c, g, or t
  misc_feature (67)..(67): n is a, c, g, or t
  misc_feature (84)..(84): n is a, c, g, or t
  misc_feature (113)..(113): n is a, c, g, or t
  misc_feature (278)..(278): n is a, c, g, or t
naaaggcatttgcccggcaccggatccggctgcnggagaagggaccggttatantaaggaatggtcngatataaaccttacggnggtctcttttctggcagccatcttttttngcttcctctacgggatgtcacttgcagtatgcctgctttctggtgttggataccagagttcttcattgataagagttctataaataaaattactacaaagataaagctttattctttagtataaaaatatatctaataacagcctcattaggacaatggtatgtnataacaatgttttatataagaaatatttatcttcagcatcaaatggctcttaaatgtatcaatcattatttatacatagaacttggaagcactcctcagaacatcttttaagtattttagagaagtaacttgctgattatttgaacatcattttaattattacaggacaatgataagtgcaagtcgtcatgattctgtggtggtaaaaacacacgcagattgataagaaaggcacctattaagacttggacaaaactagaatgccagcttaagtcaataaaagtttcctaatgta

SEQ ID NO: 714913 - DNA, 709 bp, Homo sapiens
gagcgggggggggaagtggtgctgatttacggctcaagggcctctcgatcgcagcccgggcccgacccaactcagtcaaaagccgcgccctccatcctgactgtgattgggcgcggcgtctagaaattacggccacttattcgctatagaggaggtccaggcgcctgtgggcctgcaccacactcgcccagccgagtatttccttccctgactataaatcacgcttagctccctgattctcttcggacgtcctgcgggaaagatggggccggccgaatgtcgctaatgtatactgagatcctgactcccctcagggcagctgggaaactagcgtgctggcacctttcagtccttgagggaactcgcccctttgcccatggccacgtgtggcagttaacagcctctgaaactcggagcaaacatcacttacttccacaaacaccgggaaacaagtccgagcgcaggcgagacggtgcaaggaagacaagaagccaccgcaagataaaagcccactaccattctcccttcctccaacgacacggggtcttggaccttcccttcgatcccccaaggtacctgtacaggacaccctccacagtattggcgaatacccttttttagggagccccggctgagggaaaaaggagaaccgggatgaagcaaaacttttggcccacattaagagccgtggagaaaaacagaaccgcaa

SEQ ID NO: 714914 - DNA, 124 bp, Homo sapiens
tagatcgagcgagagacctccacagtatccggtggttccagttcacctggattgaatcacctaagctcctgtatcagcactcctcatcatcactacatctgccaggctccgtcgctcgctctta

SEQ ID NO: 714915 - DNA, 128 bp, Homo sapiens
aaccttgagcttagacggtagaggttgctccggacccgcactgctgcacatgaggtaacccatggcctcatcatacctgatatctcctgggagcgaaaataagaaaggacatagagagcaaggggaag

SEQ ID NO: 714916 - DNA, 214 bp, Homo sapiens
tactcccatggtcatcatttatacatcatcatatcattcaactcccacgtgggcatcacagcatgggatgggacagcacccccagctccctcccactctgaatgcatgtcatgcaacagtctgcagcactctgtctgaatccttcaggtcgtcagccactttattccagtcccttgaacatccacagtgcttgtgttttcatttatgggcacca

SEQ ID NO: 714917 - DNA, 253 bp, Homo sapiens
tgagtgccccatagtggtatttctgtccctatggggccataagactgaaagactcaccctcccgagtctctcgcacctttcacggtcatcccctatcccctgtctgtgatggatcgaggaggccctgggctggacaaagcacctgcagctccctgtacaaacctgcacgcctttccccgaagcaaagcacgaatttatagggtccatgcagcaggatctaggatccccagctgtggcactgagcgtccgttcc

SEQ ID NO: 714918 - DNA, 443 bp, Homo sapiens
ccaggtcgtactaaaacagaaactctggaccaccactctgaagtctaactgtctaacactgtcataacgtgctggaagcaaggagccaatgaggtgacactggatttcgtacctgtttggaggcttgttcttgctgaagctctgtttgttctacttggtgaggctgactagaaaagctctggttataactggcctggtactgattttgctgttttaaagtttctggttcattaacaggaggaactggggcattcatattgaacacctgttagtaaataaagtaaatgattagttcatccttttattctctggtttataacatggccaaactcaatggtgttttacctcagacataaataaagacatcacagaggtctcaaacacaaaaacatcacacacacatacaaaaatccctccaagtgattcaatggtacagaccgtcg

SEQ ID NO: 714919 - DNA, 1137 bp, Homo sapiens
ggccgcttttggcccgagtcatgtagatctttgactagcggcctgggactgcggtatccccgaacctgagtgtcgggtgatagcaaagaccagaatatgaactgacgttgtagtgatctgacgattgagagtaggatcacacaatcatgtatgcgtaagcttgaggtaggttggacgccagtgctcgctgcctagttgaccgttgttcggtcatagccagaagtgcgtgtgtctctaaagactagagcgggggtcccatctgagcccgacgagaacaggttgatcattcccgtaggaggaatggttgaaagctcatagcgtagccaggttcgcctgccgatccagttgggcgattcctttggagcagcgttaatctgtgcattcacacaactggcgtgtccgatagccatgcattgccattatcgtttatccagaagcggactatgcatcagcacagatcccgaaagcatatgtgctgtcgagcctctagacttttaacaagcaccatgtgggtaattgttttcttacaataatattagaggtgaaaagaggccttcaattgttgtgtgtgcgatgagagagaccagggtttggctcccattgagctcctggatgaataatggtagggcctgaaagcctgctgaaacgattgctactcgcgagaaaacgcctcgggtacatatgaataatccgtgcgctccttgggtatggagcgtaggcagggctccgagttcctccagggtcaagagaagtatgaccctggacctccaaggtttcccgattgaccccgggatgtacatcttgcctgaggcagctggatggactgtacgacgctccttcatcaggactacccgcaggtgtctatccgaaggccccgttcgaacagggactaccggggggctttgtcgctgttcagaacggggctagacacagggatgtggtggggagacaactcttacaacggcgaaaagtgaaacccgccgaaaagtaacctggggcctcgtacaataaccaaaggtctgggcggaacaaaacaaagcagcaaaaagggggggtgtaacacatagggccaaaacacacactttagagctctgaggaaaaaaccgccagtgaaccatcaatagagggtgagttata

SEQ ID NO: 714920 - DNA, 649 bp, Homo sapiens
cccaggggagcgtaagatgtgcctttcactttccgccatgattgtgaggcctcccagccatgtggaacctgagcacctgtttatgcactgcagtcgtgagtgagatagaatcatgtgaggagtggacagtctgccttacagcccatgctcagtacatatcctaatgaggaattggtccctggctgtcgttgtctccacgcccttgagttggacaatgctccgtcccaaggatgtgacagattctttcatttatgactatgccacgctcagcccatctaacctcaaatctaacctaatcctggtggccctcccaccttcccagcacacaggagcaagcagagaacatgggcaagtcaaagtcaaaaaggaaaggatggcctacagatgctgttctgtgaggacagtgtccaaaccagaaagtcaagatgcctctttgaggatccgtctgaaaacaaacaaaatacgtgaaatccaggagagctggagtagaaaacgccgtgaaggtagcgtggagagcatcagggagcagctgctatttcaacacagtggggacttcacacctgggcctgagggagcctcactgtttcactgaatttatgttcatatatttatgataataaatatgttcatacacttacgttcaaaaaaa

SEQ ID NO: 714921 - DNA, 491 bp, Homo sapiens
gtaaacagcccggctcgctggcgtggagccggtacacctctaggggctctcgattccgtgggcggtatatcggctgagcaacgaggtggtgaggttgatcggggtttatcgataacagaacaggctcctctagagggatatgaagcaccgaccagagttcctttgagtgtcaggctgtggctcgtagtgtgctggcgagcagttgtgttgatttaactgtagaggtatagggctaaacatagtggggtactctaatcccagtttgggtcttagctattgtgtgtccaaatatgtgaacgccactatcgtagtctattttgtgtcaactgtagtttgtaacaactcaggtgagttttagcttaaattgaggaggaggtgatctaaaacactctttacgccggcttctattgacttgggttaatcgtgtgaccgcggtggttggcacgcacttgaccaagcctgaggttagtctagcttagtttaactttcgt

SEQ ID NO: 714922 - DNA, 317 bp, Homo sapiens
tagagcatcccccgtatggtcctgcacatatgttctttattcttattgtgccctgctatattagttaaaaaccaccatttcactgtaaaaagataaatacttcatttatcactctaagaagtatcatatcttaatcgtccatccaggaataactggatattctctaacatcaatacatcataacttaacttcttatcataccacataaactagaaaggcttcatttctagatagtctcctcatatttctaattggccatgacaatttggatactaggtactctccctatctttccttataatagcttatttttctaa

SEQ ID NO: 714923 - DNA, 196 bp, Homo sapiens
cctattatgcggatgggaggcctctctctccctcgggtgtgccctctctacacagtggccctcttctgtgaacgcatatcccaattatatttgtgaagaaagaacttttaagggataggggccctaataaagaaccggccagtcacacaagaacattctcaatttttatagccttaaacaccccaaacagttcaca

SEQ ID NO: 714924 - DNA, 870 bp, Homo sapiens
  misc_feature (624)..(624): n is a, c, g, or t
gcaaaaagaacaaagctagaggtatcatgctacctgacttcaaactataatacaagactacagtaaccaaaacagcatggtactggtaccaaaacagatatatagaccaatggaacagaacagaggcctcagaaataacatcacacatctacaaccatctgatctttgacaaacctgacaaaaacaagaaatggggaaaggatttcctatttaataaatcgtgctgggaaaactggctagccatatgtagaaagctgaaactggacaccttccttacaccttacgcaaaaattaactcaacacagattaaagacttaaatgttagacctaaaaccataaaaaccctagaagaaaacctaggcaataccattcaggatataggcatgggcaaagacttcatgactaaaacaccaaaagcaattgcaacaaaagccaaaatagacaaatgggttctaattaaaataaagagcttctgcacagcaaaagaacctatcatcagagtgaacaggcaacctacagaatgggagaatatctttgcatctacccatctgagaaagggctatatcaagaatctacttaagaacttaactttacaaggaaaaaaacaacccatcaaaacagtgngccaggatattgagcaggacccttccagaagaagacatctatgcaggcaacaaatggaaaaatgtccataacccggccacgaacaatgcaatgaaaccagggaaaccctcagcacgaatggaacatacaggcgcaacacgagcgaggtggaacgatctcacggggaagtcaaacacgggaaagggccaaaacgaaaagaaccaggtcacaagacacaaaaccattcgaacaaagaacggaaaaacc

SEQ ID NO: 714925 - DNA, 373 bp, Homo sapiens
  misc_feature (253)..(253): n is a, c, g, or t
gagatatggtctggctctgttgcccaggctagagtgcggtggcacgattttggctcactgcaacctccgcctcctgggctcaagccatcctcctacctcagcctcctaagtagctggaaccaaaggcacatgccatcatgtccagctaatttttgcattttttgtagacacaggatttcaccatgttgccaggccggtcttgaactcctgaactcaagcaatctgcccacctcggcctcccaaagtgctgggntcatatgcatccatcactgcgcctggccaacatttttttttttaactatcatcctgttcccaggaagctcagagtctctcacaggcccttttcagttcctggggctctcatatttcctca

SEQ ID NO: 714926 - DNA, 337 bp, Homo sapiens
gagaccgggtttcaccatgttggccaggatggtctcaatctcttgaccttgtgatccgtccaccgcagtctcccagagtgctgggattacaggcgtgagcaaccgcgtgtggcctacactaactttttaaataatcgtacatatttattatttgcccctcttctcttccccaggcaaaacatttagcattccttcaaatgatcttattattctgtaatttttttttaaattgatatgaagtctcgccctgtcacccagacttgagtgcagaggtcgcagtgagccgagatcataccactacactccagcctgggccacagagtgagactccgtctca

SEQ ID NO: 714927 - DNA, 175 bp, Homo sapiens
actctagagatccctgtgtatacaactcacagagttgaaccttcctttgacagagcagttttgaaaaattctttctgtggagtttgcacagtggagattccaagcgattggaggctaatctttgaaatggaaatatcttcgtgtacacactacacagaatcattctcagaaactg

SEQ ID NO: 714928 - DNA, 310 bp, Homo sapiens
caaggcatttaatggttgaaaagttgatattttccaagataatttaaaaattattgatggagtgacactctgtcttcttatgctggagtgcaaatgagcgatctcggctcacggaaacctctgcctcccaagtacaaacaatactactgccacaacctcctgagtaactgggattacaggcatgagacccattatgtttatattataacccatcaaatgttgatatccccattgaaaaagtgagacaactgaggcaaaaagatacaaaaaaattttcctacaaatgcacaaataaaattaacaaagctgg

SEQ ID NO: 714929 - DNA, 197 bp, Homo sapiens
atgtttctttatacagcacatgcggttgaatcttaaggttaatttcaatataaagatcctcatgaattaaatagttgatgcaatttttaacgttcattgatatcaaaaaaataaacaacaaaattaggcttgtaaaactgacttttccattacgtgggttttgaaatctagccccagacttactattgttcgagata

SEQ ID NO: 714930 - DNA, 84 bp, Homo sapiens
gctagaaacattgctggggcccacggctacaatgcctaggtgaacagtgatggtaagtgatcccgtaaggaatagtccatgtgt

SEQ ID NO: 714931 - DNA, 1007 bp, Homo sapiens
  misc_feature (473)..(473): n is a, c, g, or t
agcggagtgatggagggggcgggctctgcagggaagtgcgtcagaggatggcgcggggagagtaggtgtgctgtggtctgagctagagggtgaagctggcgtgaggcagtgagtgattgggcgagcagttctgaatgccacgacatggagtaaccgtttttgcatacatgcattgttgtatattgacttgatgattgcttagctcttctaatttccatcgcattctagcatggtcagtcctcctagtttggtcacagtacattcttgggtatgatctatctgaaagtcgcagttcacgatacattccagtgagttcgagataacaacgcatcgtggtgggtagttgaattcatttcatgtagcattgaggagcagaatgacacatagaccttgtaattggaatgctactttattcgataatcatatggctactagatggcgatttgtgcgccgacggctgtaatcgactcaantaaccgctaataatacattgcattggatagtaggcccgagccaggacataggaccagagtcatttgatgtaggtcccaaaatgtgctgagtttcagcatctatactagtagcaggttcactggagcacaactttgttggatcccggtaaaccagaatagcgggattgatctcccttaggacctatctttggcgttgccagttccttttacctttcgtgagttacggttgatgctgcttgtggggctttgatcggacttgtgcttgctgtgccgacagcttatatccaacattgcacgggcattctccatctcttgccggtctgtgtacacgtggggctcagataacgttggtcactgttgctgggacattggagatacttccgggcagaaactagaagctcccttaaaattggtggccggtggatttgggattgggccccttctgcctggatagtagtacacatgcccccttaaaggccatgggtccagggccgttaaacatgggtgttgaaacagaggggaagagtacagctg

SEQ ID NO: 714932 - DNA, 219 bp, Homo sapiens
  misc_feature (1)..(1): n is a, c, g, or t
nattataccacccaaaagacgaactgacgtacgaacctggggtgactctcagagacacagtacccgctgtgtatattttctctgtccaccacaagaaaaacacagacaaatagaaactccaaaacaagcaatcctctaaaagctgtaaagaacgtcagaaccagatatgaataaactaaactctggcctgtctgtgagcagtcaagggtgctcaggaaa

SEQ ID NO: 714933 - DNA, 193 bp, Homo sapiens
atcaggcgaagacggggcggggaaggggctgaaaaactaccagttgagtaccatgctcacaacctgagtaacaggatcaatcgtacgccaaacctcagcatcatgcaatataccccatttaagaaacctgcacatgtacacccttactccaaaataaaaggctaggcacggtggcccacagtcttcgcctgat

SEQ ID NO: 714934 - DNA, 358 bp, Homo sapiens
tgaaggttagccaacagactccatgctttccaaagcttcaggtttctaaaattgtttaaaaattccacatatctctggctgggcacagtggctcacgcctgtggtcccagcaccttgggaggctgaggcgggcgggtcatgaggtcgggagatcgagaccatcctggctagcgcggtgaaaccccgtctctactaaaaattaaaaaaagattggccgggcgtggtggcgggcgcctgtggtcccggctactcgggaggctgaggcaggagaagggcgtgagcccgggaggtggaggttgcagtgagctgagatcacccactgtacttcagcccgggagacaatgcgagactccgtctc

SEQ ID NO: 714935 - DNA, 996 bp, Homo sapiens
  misc_feature (394)..(394): n is a, c, g, or t
caggggttaccccctggggattacggagggcctttaaaacggggcgtctaatggggggtttttttggggggaaggccccaaaaaggcccttttggtgagtccaccagttgtttgtgcgagccgagagacacacaccaaaagggggagaatctctttacattgccgcgaacccccatatgtgccacaaaggggccccctttttttgggaataacacaaaatttggggcacacatatccctggggaacaactttggccttgagaggcacttgtgaaaggggcgcacaaaggggggggcccaccaacgatggtccccccgggatattgttgtccaacgagttaaaatgtgttttccgcggctctttacgcaggatccgggggaccttttccgcttgnggcaccacgactttgtgcgggagaaatagtttcgcgcgtggtctaagaaactggggatatttccgcgcgcggttttagaagagggggtgaggacacagattgtgcccgcagagataacacccccttgggcctgtgtggccaccaaagagaaggtggcacctctgggaattattcacgagcggccctctcagagaggctcatagagcacccacatctcagagctggtttttaccctcccctcacagggaactttttgtgggcaaacagaggaggatttcggggacaaattattggggagattcaccctgtagcacgacgcacggtcaaaccacggagttctgccccaaaagaggttttggctgaggcttgacggcccctcggaggaaaacgctgctgcaccaaaaaatgtgacacccgtagggccctaggtttacgccaaagagggacacataagcaccccttaattctgggaaataagggaaggccccttcccaggaaattatgggccatttgataattacagacaattttcaaagggccataagaacactttcccccaagagctgtcccaattaataaagaaaaaggttattttattttta

SEQ ID NO: 714936 - DNA, 838 bp, Homo sapiens
ccgggattccaattggggtcgaactgtggcctgtagccgcttatgcttgctttttgcgttcctatcccctatcggtgtcctaacgtgcgcattgtgttgttgctagcacttgccatgcggctcgctcgtgtcgtaagcccttttggcttgcccctctgttccctttggttgccctatagtcttcaaagtgttgtgggtgtgccacgcatctatggggactcgcctggtcagtgttttgcctttcggtgcgtcaaagggcaatcaggatgggtttgaaaaacgggaacaaggataggatgggcacggttcacgaggtcgtagcatcgcttgcctatcggacttcctgggttgtcaagagttgtctagcctcttgttgctccttcccagcttaataaggtcacgcttccactcctagcctctgtcaatgtgaccttgggctcactcctgccctacgcattctcagtccattgtgggcaagggagccctcgtaccactatcagaggggccagggagatccctctgcgtccactagtgccttccaccctttagctccccagagcagcttggccacagggaggggggatgcttgcttagcgtgatcccagccctgacccagaggaagccgtctatcttagtttattagcttgttgtttacgaccgtggaatgtgaccacgcttcctgcaggggtcttgggtgggaggagcccagggctccgtgtgacccctcgtttcttcctccaatccccagtttgtatattagctgccatataagattcccattggactacctgtgttctcttggggagtcagggtgcatgtcccctcccctccggcaaaa

SEQ ID NO: 714937 - DNA, 216 bp, Homo sapiens
tgatgatagacttatgtgtcatgatgctcaattgtataacagtcgacactgtgatagctaaactttttaacaaaaatttattcggattacctccctgcttaaaagattcaccagaaaagcttcatataaaaattcaggcccttattggacaacccccacaccccgtctcctcactagaacatgagaatcttctccccttgcacgcttgacttatca

SEQ ID NO: 714938 - DNA, 1647 bp, Homo sapiens
  misc_feature (1060)..(1060): n is a, c, g, or t
  misc_feature (1433)..(1433): n is a, c, g, or t
cgcacggtaaaatgccgccccccctcctgtcgctgtgttatactcactaatccgttcgtgcttctgactctgctgggtgtgttgtctcccccacgcaacactcgtctctcaaagagggagggttctctcgttctatgtagttttcgcctcctcgctcgatagataacattattttgctcctccctcactttatgtttagaagcttcccctctggggggaggatcctccacggtctgttaacaaaatggtctttttcctcagcaaatagagtagttggggggtggtgctccgaacaaccggaaccaccacacacacgggaggcgctcttgtggatgataaataacacccagccccaacacggggtgtgggggattccgccccttcccccctgtggggagcctttttttttctctcgggcggtctcgcttcctacgatcggtgggtcgccctttcccgcccccgttcgtcttcgctttgggcgggttggataaatgctttcggtggaaacggcggtgctgcaacagctatcttcttctctctccccttcttatccaacagttgtgtgccccccgcggtcatatacttcctgtggtaataacgggggggctccctcattcgggcgggttgttctctccacacacagaggtgtgtgtcctcccccatcgcgtccccaccatcatgaagatttgggaggaaattaagagcctttctttgtggtagtatataataactttcgtcgtcttcgtgaaaagggctcatactagtggggcgcccagataacgtctctaccacggggttgtttaccaccatcggccctctttataggggcggtaatatatcccactagaaatgtggtggtgatatttcttcggcggccacacaccgcctttcctcacggggagatcttttctcccacactgctgcttacaacacggtggaggcccatcacatcatcttgtctctcgtggtagggtctcctcaccacagcgggggcttttgtcaacacactcctggccccctctcgggggggtcttaccacgacctctttttggcacacaantatactctcacggggggggtttgcccgctctcgcagaagaagctctctcagattcttttcgctctcttcgcgacaacagaggtgcacacttttctgggcttacccggcttccctcctctctatatctcgggggatagcacacagagggatcaccaccacagagcacatctccctgcagcactctctctcagagagatattcgcacatgtggtgacagcaccgcagacgcagtttcgagagagacactcacctcgtggcgcccacacatatatagatggagagacccccctggtcttgttcacacaataaatatcttataatatatcacgcatatgtagcgccgcgagctgtgtggcgtgggtgtgagatgacnctgttgagtctcccagcttacattacggaggccctgtagtatggccaggatctgccttgagccccagggagattcaaggctgccagtgtagccgtgattgtgccccatgtacatcccagcctgggtgaccagagcaagactccatttttaactaaaagtaataataataataataaagtaataatcataataaaaatttaagagtgaataaata

SEQ ID NO: 714939 - DNA, 108 bp, Homo sapiens
  misc_feature (33)..(33): n is a, c, g, or t
  misc_feature (86)..(86): n is a, c, g, or t
cagtctgaatcgtctgtgcagagccccacacangtcagcatgatgtgtctcagtctcccagagcggtggctcacatcacccccagncattagactgagccagtttgca

SEQ ID NO: 714940 - DNA, 228 bp, Homo sapiens
ggacacagagaggggaacaacacacaccagggcctgttgcgggataggcagtgaggtgagggaacttagaggacgggtcaataggtgcagcaaaccaccatagcacacgtatacctatgtaacaaacttgcacattctgcacatgcatcccattttttaaaataaataaataaaagaacctaggcttcacctcatacctgttagaatggctataatcaaaaaaaaaaa

SEQ ID NO: 714941 - DNA, 924 bp, Homo sapiens
gaagcgggagagttgcttgagcccggggggtggaggttgcgtgtgggtcaggggtcgcgcaagtgaactgccaggttctggcgcaacagagcagaggacctactctctcatagaatcaacgaaaagtaaacaacacagaaaagtaactgggtttgttctctggttaatcctacgatacttttgtcttccctttcagacttaagaacattctatggatgctacatctcttgtgtcgtgtcccttggcatggcggcatacgtgatccataaacgtgcatcgtgcagcatcatttataatagcctgggaagtggtgttgctcttggggttggtggtttcacagttgtatttccaacagcagatgaggatcggcctgttgcccaggtctagttcgttgaacctcctgtgtctcaagtgaccctcgtctagcctggcgtctctccaaggtggctaggattataaggcatgagccaactgcgacctgtggccgttgcgcggaatcatgttgacactgggccactaatattaggcttgagatcctaagtgaaaccgttgcaggaagctaagcgtatacagggcatgcagtagtctgagggatagcctgttgcactcttgaggatcctcacgactcgtctgtaatttcccctgtctctggcctggtggttttcttcgaccagttctgggtaacgcctcggttaaaggcggttagacagcacgacgatcatggttttggggagaaaccagagagtgtctcgccgtcgtgagggtggcagaccccacggggttcgtgggacaaatgatgccattcgtgtgggaggaagcacgcatcgggtatggagaggcggagagacagcgacgtcacacacattgtgggatgggtatatcaaagcgagagtatcacgtgttgaccaccagacgccgccacat

SEQ ID NO: 714942 - DNA, 671 bp, Homo sapiens
ggccaggctcgctgctgctgcggagagagatgactggggagcgacccatcatggcgctcccggtctgacgctgggtggctgaggattctgggcttctggggaggctgtagggtatgggtgtccgtcgtgatcttcctgctggtgtctctggtagtctcctgattcatgcggtgaccacacgattatcggggtctgtgctcgcgagacgcatggatgatcaatggtaagtcgaacctgttgtcgtcgtcgtacggtcgtgcgcagactacgcatggtggctcatcttggcataccattcgcgggatcccggactcatcaacagggctagtccgacgggtgaccactcttcttcagcctgtgttgcattgaggcgaggaaaatgtcctcatcccgatgagggggccaagttcatcgccctgccgggaggtccatggaccagggcatgcacatgtgtctccgtacagcgttcatttgtcaatgatggggatgtccccgatgggctgaaccttgggtgcagtagtgagcgatgttgagacaggagtagtatttacttttctactccctttgtgctcacaaggggcggctgccaggtggtctctaccaatgttggtatggagcaaggactgatggtgttccttggaagcaaccccggaatctctccctggatatgc

SEQ ID NO: 714943 - DNA, 427 bp, Homo sapiens
agctatttgcagaaagctatttgcagagggattccaacaggtttaaaaatagaccttctggacctgaagtacagtactcacatttttctcttgtagagagggaatccagttttagagacaacaaatacaacttaatgaacattttacaatttaggtagaaaattaccggaatttttcatagaaatatccttgagaaactagaatttctgtattaaaagccttgtttgcactttgaatcaatagattatatattagcgtgcatacacatctgtaacaaatgtttgtttaaaaagtatgttaatcctggtaatctttttttaaagcaagacgtatttgtctatatagacaattgtgtatgtgtgtgtcgtaatgtatgtagataacaaagactggtggttacttctagatcattaaaaatgtcttccct

SEQ ID NO: 714944 - DNA, 103 bp, Homo sapiens
accgtgttgatgtgtgcttctaataagcgaataccgtcgccttttcgatgagttccttcattcatggcttggaacaacagagatgctcctgtcttgcagaact

SEQ ID NO: 714945 - DNA, 157 bp, Homo sapiens
tgcctgtacgcgtaaccgtaacattactgcaggccacctactcatgcaccatattggaagcgccaccctagctatatcaaccattaaccttccctctacacttatcgtcttcacaattctaattctactgactatccttgaaatggtcgccaatccg

SEQ ID NO: 714946 - DNA, 658 bp, Homo sapiens
  misc_feature (2)..(2): n is a, c, g, or t
  misc_feature (39)..(39): n is a, c, g, or t
  misc_feature (200)..(200): n is a, c, g, or t
  misc_feature (210)..(210): n is a, c, g, or t
  misc_feature (294)..(294): n is a, c, g, or t
  misc_feature (411)..(411): n is a, c, g, or t
  misc_feature (450)..(450): n is a, c, g, or t
  misc_feature (513)..(513): n is a, c, g, or t
  misc_feature (518)..(518): n is a, c, g, or t
  misc_feature (530)..(530): n is a, c, g, or t
  misc_feature (584)..(584): n is a, c, g, or t
  misc_feature (605)..(605): n is a, c, g, or t
  misc_feature (642)..(642): n is a, c, g, or t
  misc_feature (655)..(655): n is a, c, g, or t
tnaggttgacccacctagagcagatcctctggggacagngaggaaacaggtgtcacatcaccacgcaggttacattcgtcttccactggaatgactagagcccccaggcagtaggcagtgacctgactgcagaagagaaggggaaagactccgctcatggggacagacaggctctgttgcttctcctcactggtcatggnttagcatggntcctccccaaagtccttagtaaacaaagcactcgcaaaaacccaagtcactacttttaaactctgttggataaggggagctttnccatagcttagactgagaacctgtgctctagaactgctattctgactagattgtttgaagggagtgggtgcaggcgacaaaatggctaaaatgaaaatgggagccactggtccccgnctgcagctacaactcaagatgtctacagatgtggccagngtgacatgtgcagggtgggaggggcagagggacaagacgggcagggagggtgctcctgggganagttncccccgaccggnctcacttcttggcttgccctgggaggcaagttccatggtttgggacgctctcanccccagaactgatggctggtngctcaagtctggcaatcagttgggttaccaggtgagnaaaaaaaaaaagnccc

SEQ ID NO: 714947 - DNA, 897 bp, Homo sapiens
aatcatctgctcgagtcatgccgctacgctgagggcaggtgcttccaggagtctgctgggggacgccctggcggtgccacctatatgcccctggacggtagtggctggcctgcggggcggcgctccgggtatccccaatacccagccccccgggtcctggggacgatctgtgctccgagctggtaggaggcccctgaggctgaactgagtcaggctcctgctgagagggcccgagcttggctgcccggcagccgctgggactacgcctgtagccagcatgctccaaaattgctcacggtagttgtcctcgtgacggtgctttgtgtgacctatattgccagcgcatgagttctcgtgctgtggggggtgaggctccgggccctctcctgggactctcactccctctctctcccaggggattcagatagttgcgtgaggagtacgtggactccatggcaataagtctacaccagagtcattctcgctccgctctcctcttgcaatggagtgagtctttcgcagagggcacgcgcaccttgtggtaataagcacatgcgcccagatccagggcctcgcagtgcccgtgttacttgatgaatatctttttatgggaaccctgcctagtctctgggagtgggtggaggggacgggagctacgtggcacggatggaagaattttagtagaactttggcagtcgactctcccagggttcacctcaccctagaagtttcaccgagtgcctgtgcgggctctggtgggcagaagcgtggtaagacaatgggttgctgggcacttagtgtttcccaaggcaagtcctgtgggctagactaaatgcttgaacttgccacttcaggcggggagatgataaggcaaggtgtcactgacctgcattgtcc

SEQ ID NO: 714948 - DNA, 503 bp, Homo sapiens
  misc_feature (426)..(426): n is a, c, g, or t
  misc_feature (428)..(428): n is a, c, g, or t
  misc_feature (497)..(497): n is a, c, g, or t
agactctcaccatatctcgacaaggcaatatgcccgtattgtcaaacgctgggtagctgaaataggcctagatccttctgcatatgggacgcatagcatgcgtcgcacaaaaccaactctcatctatcgtcggacgaagaattttcgtgccgtccaattgcttttgggacacacgaagcttgagagtacagtccgctatctaggcattgaagtagaagatgcgttagcgctcgcggagcaaacagacatctaacgccaaaatagaccggtcgtcgcttagatggccgggcctagccgatttcagacatcatatgcccctcgcaactcgccactatacatccgaaggtaaagcttgcttcaacagaaacgccacgaaaatctcggccgaaattgtgctggagaaccattcgtcggagagcaacgcananttgccagcgccgaaaaaaagtaaaggtcccgtctggacaattaagatccttttgtttttgatgcgcccnggtagt

SEQ ID NO: 714949 - DNA, 795 bp, Homo sapiens
  misc_feature (64)..(64): n is a, c, g, or t
gcctcactcgcgcgttaggaggctcgggtcgttgtggtgcgctgtcttcccgcttgcgtcaggnacctgcccgactcatggccccatggcatcagatgaaggcaaactttttgttggagggctgatttgacaccaatgacagtcgctggacaggtttccaaagtacggacagatttgaatgtggtgtaagacaggagaccaagatctcgggattgggttgtcacctttgagaacattgacgacgctaaggatgcatgatgcatgaatgggaagtctgtaatggacggcagatccgagtaaccagcaggcaagtcgtcagacaacgatcccgtggtaccgtggtggctctgcgggccggggcttcttccgtgggggccgaggacgggccgtgggttctctaaggagagggaccgagctatggggggaaccggttcgagtccaggagtgggggctacggagctccaaactactatagcagccggagtcaagtggtggctacagtgaccggactcgggcgggtcctacagagacagttacgacagttacggtaagtcacactccgagggcgccacgctgctgtggcctgcggtgggagctcggtacaccttggtgccctctccaagcactttaggctggacactcagaccttgtccactggtgcttgcccagaagaggcgcatctgtcctctcagaagccatttctatcggcaggacgcaaaaaagccaaatgagaatgagcaaaaaaggcaaggaaaagcgaggacccgctgggacagtcagctaggtgccattgtg

SEQ ID NO: 714950 - DNA, 194 bp, Homo sapiens
gaggctctctctgtggggctcagaggttggagaaggcctgaggctcctgaggcccaggccatggatccagtaggagatggggcttgggtccttgtaagccacctcccagcaggctgatgtgtggttctccaaggaagatgccttgagcccctccatgcaagatggttcatttgctatccacagtggctcttctt

SEQ ID NO: 714951 - DNA, 122 bp, Homo sapiens
ctggccctaggttcttagggagcaggctgggagtcagtgggagatagagtccaagtctgaacatgttacatatgctatgtctagcacttggaactcccaagtctcccactgactccctaaga

SEQ ID NO: 714952 - DNA, 223 bp, Homo sapiens
tccgcattgtagtgggcacctgccatgtccctcctttccttcagctatccccgctctgaccttgcattttcattcttatgttgtttctcttttcccgttcagtagctcgagcgcagtgttcaccatttgtggctatgcggcgttctgggtctcggccctctctgcggttgtagggcccataggactgagagatggagatgcgtcccctccctccccccgccaa

SEQ ID NO: 714953 - DNA, 572 bp, Homo sapiens
ggtctttactctgtcgcccaggctggagtacagtggcgtgatctcgggtcactgccacctccgcctcctgggttctagcaattctcttgccttggcctcctgagtagttgggattacaggcacataaaaccacgcctggctaatttttgtgtttttagtagagatggggtttcaccatgtcagccaggctggtctcaaactcctgacctcaagtgacctgccccttggcctcccaaagtgctgggattacaggcgtgagcaccgcgcccgtgaggcagttaatagacactgaagggcagagtgatgaagcaggaatgctggctttgctgtcctcttgttgctcttcatcagctcctgcctcccaaggaaggatgcatagtggaaagccttgaggagagcttcccaggcttgctaactctctctctctctctctctctcaaaaagcttacagtgctggaaagtttttccaccacagcgccacagcttatcagcgtagatgccatctcagaagaggtgataccaagggattacatatctcagctgtgatctttctgctccaagctgcctttggg

SEQ ID NO: 714954 - DNA, 149 bp, Homo sapiens
gatctacaagaatgtacaagactgatctggaagaaggacactatttcggacacatctggtgacttccgcaagctgatgcttgcctgtcaaaggttagaagatcagaggtatggctctgtcatctgattatgaactgattgaccaagatg

SEQ ID NO: 714955 - DNA, 430 bp, Homo sapiens
gatatattgcatattcacattatgcctatatgcatctttggtagtaaactttaaccatcaggtcaattcagttatgggagctcatctccttccatctctcctaattctagatgctcaagggaacagtcaggccttacagcagggttgtgaaggcaatatgaccggcactgaactatgtgaaagggcgtctggtctattcagaggaagaggctggatatggcttatcaatagcaggcatttataattgcccatccctcaccaatgcatcgggggtggtccctagatatgaaaggtgaggaagtctctgcatactgtgatggtaccacgggctgcttcaattgtaaggcaaaggaagcaggaaggaaaggaagggatgcatttagaggcttttccacactagcgagtgtgccacgccccactaggttttccg

SEQ ID NO: 714956 - DNA, 213 bp, Homo sapiens
  misc_feature (15)..(15): n is a, c, g, or t
  misc_feature (28)..(28): n is a, c, g, or t
  misc_feature (74)..(74): n is a, c, g, or t
tggaggcagaaaatnttttaaggatttntttcaaagaataagccacagcaatggttttttagaaaactcctgtncttttaagcaaggacttttgccctctagaaagcaactgaggccaggtgcggtggctcacgcctgtaatcccagcactttgggaggccgaggtgagcggatcgcctgaggtcgggagtttttgagaccagcctggccaac

SEQ ID NO: 714957 - DNA, 252 bp, Homo sapiens
cagtgttacccgcatgacgacgttcatctagtgtgtggtgtacactagttgtccctttgtgaatatcggactgctggctttgacgactggactcatgctgctgtatcactatttgactgctcatcatatgagccttgatgtaaatcatagcctgactgctggtcatatgaatcttgtagaacatagtctggctggtcataggaaggtgctcttccacctaggattcctgatgattccatgtaaagctgctgt

SEQ ID NO: 714958 - DNA, 878 bp, Homo sapiens
  misc_feature (878)..(878): n is a, c, g, or t
tggggcaggtaggaaaggtcttaattatgggcctgtgagtcatcaggtgggtcggacataggttacgtgtccaaaggatcggccgggcacacgctagctaccccgtgcccatgggagcagcccctcgggccgacgccaggccttggtccatcagtgccagggaagccaaccccaccatcccacaagttcaggctagggggtgcgtgaggaacagggcgtgtcctaggatgggaccctccatccgggacaggggtccgggggaggatgaggcgtgaggccgggaatagaacagctctttgggttccatgatcatctaaaaaacagaaaagacaaacatttcacagtcttaaaaaaatagaagtctggaggagaagaacgccagagtccggggcccggggaggcccctcgaggcctcagcattcccggtccctggaggtctggtctggcagggccgggccacagacacgtggcccgtaatgggagccagggcctacaccccagcaaccatggtccagggaccggcagtgggtatggatctgggcaccacctactcttggggggggtgttccagcacggaaaagtcgagataatgcggcaggattcggaaaccgaacatcaagtagagtcgctaaggacactgaacggttgaacgcggaagccggcaaagaaacatgtggattgaccccacaaacaagtcctgggtgccaacgtctgaggcgcaatgaagatccgggcgcccgcggataaaatgggccttaggggggacagcctgggccggcaggccaaaacacgggagaccaagctaccaggggggcaggtcgaccaaaagaatgaccctcggatcaaatgtggaaggggcacaagatcacggcacaagn

SEQ ID NO: 714959 - DNA, 314 bp, Homo sapiens
cctttttttcatttaattccaagggtgggactccaaaactggcaaagtgggagccccattagtttgctgtgaaatcaaattaaaaaactgggaggaaggtaataaactattttacccccagagccttaatttttaaagtattaaacttgaaaattagggcttccctttcttgctttagaatgtaaccccccataagggctcatttttgccctttgtgaaaaacgggttttatcccgaactaaatgaaggcatttatttttcttgtttcaaaaatgtttttgaaaaactattattgttttcagaaacctctttga

SEQ ID NO: 714960 - DNA, 200 bp, Homo sapiens
  misc_feature (123)..(123): n is a, c, g, or t
tctggcgagtctgccagcatgcttcgccatcctttttatatgtcctttgcttcccacttctggtacattcaacatacgttcacgtagtcagcagtctttctgctttttgtgaagcctcagaantcctctgttctacttggcacccaagctatgcctggattgtatctgacttggctcgatagtcggtggtctggcagttt

SEQ ID NO: 714961 - DNA, 228 bp, Homo sapiens
cgagggggttgatagctggtcccagagccgagcaggctctgctctgtggttctgggccacaccacacagcattctcgccggcagacaagagcggggcttctgggaaccggcagagggaagccattttctctcggtaagtatctgtcttcatggccgaaagcaggcaggcgcgtacgtgcacagacaggtccacatgcccacattttcggtatggcagcgtcggatggg

SEQ ID NO: 714962 - DNA, 231 bp, Homo sapiens
acaggcatgtgctaccatgcccaggtaatttttgtactttttgtagagatagggtttcaccatgttgcccaggctggtttcaagcttctggggtcaagtgatttgcctgcctcagtttcccaaagtgctgggattacaggcatgaggcatagcgctcaacttcctttgttttataaggaccccaggtattggatttagggcctacccctcatccccccatggcctccatga

SEQ ID NO: 714963 - DNA, 122 bp, Homo sapiens
atataatcatcttctttttattacttctctggcattcttgcctggatactttgctcgcataattatacctacaatgaaaccagcatcccaaagtcaccaagataaaccctcctactccaact

SEQ ID NO: 714964 - DNA, 664 bp, Homo sapiens
  misc_feature (32)..(32): n is a, c, g, or t
  misc_feature (71)..(71): n is a, c, g, or t
  misc_feature (81)..(81): n is a, c, g, or t
  misc_feature (90)..(90): n is a, c, g, or t
  misc_feature (155)..(155): n is a, c, g, or t
  misc_feature (184)..(184): n is a, c, g, or t
  misc_feature (208)..(208): n is a, c, g, or t
  misc_feature (210)..(211): n is a, c, g, or t
  misc_feature (227)..(227): n is a, c, g, or t
  misc_feature (232)..(232): n is a, c, g, or t
  misc_feature (234)..(234): n is a, c, g, or t
  misc_feature (236)..(236): n is a, c, g, or t
  misc_feature (286)..(286): n is a, c, g, or t
  misc_feature (293)..(293): n is a, c, g, or t
  misc_feature (297)..(297): n is a, c, g, or t
  misc_feature (319)..(319): n is a, c, g, or t
  misc_feature (322)..(322): n is a, c, g, or t
  misc_feature (324)..(324): n is a, c, g, or t
  misc_feature (374)..(374): n is a, c, g, or t
  misc_feature (385)..(385): n is a, c, g, or t
  misc_feature (419)..(419): n is a, c, g, or t
  misc_feature (421)..(421): n is a, c, g, or t
  misc_feature (457)..(457): n is a, c, g, or t
  misc_feature (475)..(475): n is a, c, g, or t
  misc_feature (535)..(535): n is a, c, g, or t
  misc_feature (541)..(541): n is a, c, g, or t
  misc_feature (556)..(556): n is a, c, g, or t
  misc_feature (567)..(567): n is a, c, g, or t
  misc_feature (576)..(576): n is a, c, g, or t
  misc_feature (654)..(654): n is a, c, g, or t
gggaggccaaatcgcacaagggcaaagcaaanagaggaagaaacagtaaaaaaaaaaaaaagaccaaaatntctttgtttngtttttccngtaaaaaaaaggaccccaaaaaaaaagggagggaaagggacaagagggaacaaacccctaagggnagagaaaggggaaggagaaggagaagccncaaaaggagaggggggaggggaangnnataaaggcagcaaagnaatcncngnggaaagagggaggaggaccccccaaagcctcagagaaaaaggcaaagatngcccccncagngtccagaagggaaagggcagcnttncntccttccatggcagccactccattacccactccggataacctacaccctnatgtagaaaanagtgcggcagagcccgaaaggcagaaaatcgctngngtgggtaaaaagtcagcattaccagcagcagcggtncccccgactcccccatcncagggaccaccgactgccctgggcggggccctcgggggggaaaggctccacggggcaggnatacanctcgaggccagtaancctctggaggnagcccaatnaggtcaaagattttgcccaactggtcggcttcagagtttccacagaagaaaggctttcgacgaaacaactctgcaaanatacagcaaa

SEQ ID NO: 714965 - DNA, 220 bp, Homo sapiens
cattcgtgtcccgctaatcctgatacgcagtccatcattaccaatagggtttacgacctcatgttggatcaggacatccctatggtgcagccgctattaaaggttctgtttgttcaacgacttaaagctcctacgttgatctgatgttccgacagagagtaatccagtgtcggtttctatctacgttcaaattcctccctgtactaaatgtcacggcgga

SEQ ID NO: 714966 - DNA, 343 bp, Homo sapiens
  misc_feature (3)..(3): n is a, c, g, or t
ctncaggagagagaactgaatcatggaggcagtttcccccatgctgttctcatggtagtgaataagtctcatgaggtctgatggttttataaatggatgttcccctgcacatgctctctcctgcccacgtgtctgactaaattttgtatttttactagagacgggctttcactatgttggccaggctggcctccaactcctgatctcgtgatccgtccaccccgaactcccaaagtgctaggatcataggcataagccaccacacccggcctctttttttttctttttcttttctttatctggagactgagttttgcactcgttgaccaggctgaagtgcaat

SEQ ID NO: 714967 - DNA, 328 bp, Homo sapiens
ggaatgacttaaatcgaactaaatggaatgtgaatctgcatgtacagaagcatattcccaatctgagtgagcaaataattgctagtgcccaattcctgtggctggccagaaatcagctgccattcgctgaacggagacaagaacacattatgtccctgatgccaaaatatgcacctactctttcctctaatctggtgaggtcatcctgggagtgacatggatggcctccgcacagagcttcataacctcttcatggactttttatcttcaagccgatgacggaaaaatagttatactccagtctaaagccagaaatccagtaggcaac

SEQ ID NO: 714968 - DNA, 218 bp, Homo sapiens
  misc_feature (80)..(80): n is a, c, g, or t
cgaattctttgtggtgagaaagcccctggctgtgttcacgtacattatggatggtctgcaattgagaggacatgcgtcanccttgaggagtctttctcccttttttggagacagggtctcactctgttgcccaggctagagcacagtggaacaatcatggctcagtgtagcctcaacctcccagcctgggcgacagagtgagacttcgtctcagttta

SEQ ID NO: 714969 - DNA, 213 bp, Homo sapiens
cggagtcgttagaggatccccagtctccactccacctcctcgagtccagcttctcctgactcagcttcctgagtagtgggactatagacgtgccaccacgcccagctaattttgtatttttagtggagacagggttacaccatgattggccaggtctggtctcaatctcttgtacctccgtgttccacccacacttgagcctcccaacagtgc

SEQ ID NO: 714970 - DNA, 981 bp, Homo sapiens
gggtccagttcccttttccggtcggagtgatcttgcgagtggagtgtgccgttgtgcccggtgcctgcaccgatgagcgtgccggcttcatcgaggatcagtgaagaagatcagtgactgtctgtaagacttacgctagtcctcttaatctagtagatctgaatatgagtcgcctagaagaagtttccagtatagtaggaaactcgggacaaggtgtggacttccactgttcgatttacgctcaaaattcagttgttagatgcccttgtcgattggtgatgtcctggaagggtaggcgagtgtagttggacagatagtcgcacaatgtagtgcagtcggaagccagctgttggtatcccatacgctatgatcctggcaaccacgtgacaaacacgaagctctgattgacagcctatgtgaaaagctggtcaacatctcgcgaaggtgaacgcccgtctctgagactgcggtggtcaagcaagcttttccatcgggatggataagaatactcctgtacgagacacagttgtattgcaggcttataaaagtggcagcatcttgtggggccatccagttacatcccaattgaggctggatccagttagaaaaatggattgctgactggaaatctctcgcattgagtacaagcgcatcccttttgagactacttgtgtgaggcacttgtggatttgtaggaagagtgatgctggttcaaccgttatggggaatggctcggaacttcacgggtgcaatgctgcccggtccagttgtgcgcgcgtgtttgttcggcttggggatcccctgctttcttttgcccctcttcttgagacccgccagttgggcggcagttccgactcaacctgggggcgccacggccctgtcggttcaaaaccccttggcggcggctgggatggggagctccttgggggcaccgtttttcgcccacagcgctgttgtgccctccccctcttgacacgtgtc

SEQ ID NO: 714971 - DNA, 235 bp, Homo sapiens
  misc_feature (29)..(29): n is a, c, g, or t
  misc_feature (80)..(80): n is a, c, g, or t
  misc_feature (160)..(160): n is a, c, g, or t
  misc_feature (192)..(192): n is a, c, g, or t
ttttttagactagtttattgaagtgaggnggaaaagaataaagtttttttttttcctttgagatggagtcttgccctgtngcccaggctggagtgcagtggcacgatctcggctcactgcaagctccgcctcccgagttcacaccattctcctgcctcancctctcgagtagctgggactacaggcacccgncaccacacttggctaattttttgtatttttagtagagacgggt

SEQ ID NO: 714972 - DNA, 200 bp, Homo sapiens
atctcattcgacaattaactactttcacatggacgctatcaaattttcctcctgcccatgcctctttgcatgtagcccttgtctctgactgagctggccatctgtctaatatttacataatttctttaataatatctgccgttctttacctacaacatatcttggattgtggctttaccaccggcaaaactgaccctagg

SEQ ID NO: 714973 - DNA, 1046 bp, Homo sapiens
  misc_feature (1)..(1): n is a, c, g, or t
ntgacagtgatgtgtactcaggctaggcggcctttggcggttgaccgttcccgtgattattgtggcttctcccgctgctccggtcggttaggtgcccctccgccggtgtgccctgcaccagggtggccctcccctccttgcggcggcctaatgtcacccatccgggcaattcccctccaccagggcagagagacctgggcttgtatcccagccctttgccccggggtgtcccctctccccttcccgcgtgtataccaagggctttattttttccgccacgagttggccgtaattctcagaactggggaatctccccgccctcgggagcctggggtcctcaatttcgccggttgtgtaggcttaggccccccttgggtgccttgcgagcttcctcaatagacaccgttatcccttggggccagttgtgagctcttttcttccgggtacggccgccccggaggcgtttgtctctccccaaagaggtcggccccccttttccttgtggcgccctgtgtgcgctcctgcgcccgcaggctcctcacccgggggccccccaggtggcctctcgcaccgtttcttctgttcgcacgcgccagacatgttgggtgggtatcatggggggtctgttcatgtgaggcccctgaagaacgttggacaaatcctgttcaaaggccccttccaagggaaggagaaaccccggcccgcgcgggtcctggccacggtgaggtgttccccctgtggccccttcacaatgtttgtgctgtttgtttttttttataaaacaacaggagcaccttttaagacaacctgccccgttgaagaaacccagaaccagtcccgttgtgtgtgtgggaccacaaggcaattttccaataattgtaattggggattccgtttctgaagatttaggaaatttttccgcccattaagccccccgttttaagccccttttattttgaagtttgggtattgtgtgggggcaaatggttttttttttttttttcaaagcgtgtgtgaaccaatggaaataaagcccgggactgtga

SEQ ID NO: 714974 - DNA, 105 bp, Homo sapiens
ctattacagtggacagggggacaagggatggggggaacatatgccaatctattttctgagctcttcacacggtgcctaaaaaatcccaaacatataactgaactc

SEQ ID NO: 714975 - DNA, 693 bp, Homo sapiens
agaacgtttacaattcacgcatttctttaggttcacctgtaattaagtcgtcttcatgtgaagcaacttggaacatagcttcgatattctctcaacctcgctagaagtctgggaaagcagtcatactttgcatgcactatatttcatacaaagatcatcagtatgctgtaaatcacaccatcagtcgtaacttagctatactcttagaccacattggtcaatttctcattgctcagaaatgtcactattaggagccatgtacacactcattagatctatcgagatatcagtatgcacatgtatgtggtcacagagtcagtagagctcatggtaccgagcagtatctgcagaatcggcacagctcagcgtctcagggctgggtgtcagtctgttcaacagatttctgaacaatcactggaggcgtgtgatcagaccttgtgaaacagcatgtgtgtgatggctgagataattacatagggcctcaaggcagtgactggcaccagtgcctactctggcttatgacgcaggaaagcatcagtagtgagttcagattgtctgcctgataggatcatgacaggcagatctcactgggtaggtgctggaaagtcaatggtcattacctatgaaggacagttcagagaaatagtcctgtaaaataggcatggcgatgtcctgacgggactcacagccatg

SEQ ID NO: 714976 - DNA, 975 bp, Homo sapiens
ctagaacatgcgtaagatgcgggcgcccagtaggtacgttcgttaggacgatggtcatccgactgtgtgcctacggggatcctggtgcatgagtacgctggttgtagctcgaccgaatagaaaacgccttggcggtaaccgcattgtgctgaaccaatatcgcgagatggagttgtgaaggctcatggaggggtagtctagtctagacagtgagtccattgcgagcttagatataagaataaagccctggccatgcattgtcagagagggttcgcagggctgtgttccaattgggtcaggttgggtggatgaatggaaattgatttaaaattcgaaattaaaatttggattggtgaaatcttggattgttacagaagcaatattcccaaattcttgattgaggcaaatattgcttcgccaattcctgtggtcgccagaaatccagtgccattccggttggaaccgtgagacaagaacaactttagtgtcccttgatgggccaaaaaatgcacctactctttcctctaaactctggggaggtccattctgaggtgacaatggatgggcctcccggcacagagaagcttcataaccctcttcatggactttttatccttcaagccgatgacgggcaacaaatagttattatccagtcctaagacagaaatccagtacgcaccacattggggagcaggagcctacaatttgggagaatcatcttaagcaaatgtctatctgcaattgaaaatcccagggccaagaatttctgaagatggaaaagtgatggtttaaggatgccttctaatctggggggattaactaacacctggcctcgggaggtatgtgacttgtgggcaacgtgacctgtgcgaatttcctcgaggggaatatggggcgttataaaacacaaatcatttgtggggatacaagagtaaagagcgcacaagggtcaagattaaagaaaacacaacaggg

SEQ ID NO: 714977 - DNA, 386 bp, Homo sapiens
gaggcgggttgagtaccaagatccatcatctcgttgacggccacgggatgccgttggtgattctgaccgcacccgggcaggccggtgatgcaccgatgtttccgatcctgatgggacacctgagagtggctggcagtggcccgggtcgaccgcggacccgcccggacagggtccgcggcgacaaggcgtattcatcgaaagcgatccgtgggctgctgcgtgaccgtggcatcaccgcggtaatcccgcagcctgatgaccaggtcgcccaccgtaaacgccgcggcagcacaggtggtcggccacctgcgttcgacgccgaagactacaaaggccgcaacgttgttgacgccgctttcaacgaccaaacaattgggcgccatcgc

SEQ ID NO: 714978 - DNA, 394 bp, Homo sapiens
gcgatcagaggatccctaatcacagtcgtcagtctgcacgtataattttgtgtgtcataatagctcttattttaaaaaacaggactagttaacagtgtcaattactagtaattcatggtataaataacttaaacaaggaagtgttaaaaagagtgttttaaataaagttttattttacgtcttttttttacttacacagaaatcgtcaaaaaaaaaacagcagagatttccccatgtagccgcaccctagtttccctctcttattaccttctcctatcagggtgtctcacatgggttaataaatatctaccatatttggccggagttaatgacccaatatggatagacggtaataacctaaaagtccatattccattggggttccccttaagtt

SEQ ID NO: 714979 - DNA, 234 bp, Homo sapiens
agagatgcaacagcagatatgtctatgacagcctgctcacaccagccatgagctgtgccggcttcctgcagggagacgtcgactcttgccagggggacaggggagggcctctggacacttcgaagaacaagatccggcggctgataggggatacaagctgcggtgctggctgagcgagagcttacagaccacgagtgtacgggagtgtgatcttattcacggactggatgtatc

SEQ ID NO: 714980 - DNA, 448 bp, Homo sapiens
  misc_feature (35)..(35): n is a, c, g, or t
  misc_feature (91)..(91): n is a, c, g, or t
  misc_feature (143)..(143): n is a, c, g, or t
  misc_feature (167)..(167): n is a, c, g, or t
  misc_feature (340)..(340): n is a, c, g, or t
  misc_feature (343)..(343): n is a, c, g, or t
gaagactctgggatggggccagagtttgtttgacnagcccccttgtgcccactgatgtgaagctcaaagcttgaaaacactgaatgagcantaatccctcccccggcctcttctccctgggccagcctcctccttcacctcantcaggtctcagcaaaaccctcctnccaagggccagcaggcacactggctcatgcctgcaatcccagcactttagggggccaagacagaaggatcacttgagatcaggagttcaagaccagcctggccaacatgatgaaaccccatctctcctaaaaatccaaaaataaattagcccggcgtggtcacaggcacctanaancccagctactctggaggctgaggctggagaatcacttgaacccaggaagcgaaggttgcagtgagctgagattgcgccactgcactccaacctgctgggcgacag

SEQ ID NO: 714981 - DNA, 1015 bp, Homo sapiens
  misc_feature (131)..(131): n is a, c, g, or t
  misc_feature (141)..(141): n is a, c, g, or t
  misc_feature (146)..(146): n is a, c, g, or t
  misc_feature (165)..(165): n is a, c, g, or t
  misc_feature (284)..(284): n is a, c, g, or t
  misc_feature (291)..(291): n is a, c, g, or t
  misc_feature (302)..(302): n is a, c, g, or t
  misc_feature (320)..(320): n is a, c, g, or t
  misc_feature (322)..(322): n is a, c, g, or t
  misc_feature (329)..(330): n is a, c, g, or t
  misc_feature (336)..(337): n is a, c, g, or t
  misc_feature (358)..(358): n is a, c, g, or t
  misc_feature (364)..(364): n is a, c, g, or t
  misc_feature (366)..(367): n is a, c, g, or t
  misc_feature (380)..(380): n is a, c, g, or t
  misc_feature (406)..(407): n is a, c, g, or t
  misc_feature (416)..(417): n is a, c, g, or t
  misc_feature (434)..(434): n is a, c, g, or t
agcctatatgcgcagtacgcaatgcagatcccaactccatggtaaatgtgatgtacacggccccccggatgatgacggctacatgaacggcagggtatgtccgtaactagtcatctcaaatggctcctacntgagaaggtngacancgtgggcagtccacaaaanctacggggcatcactattggattgatctgcacaaatacctttgaagagtacgatttcaaaaccagcaattggtgtgaatgcaaaaacatttgtggcaccatttatttaaaaaaaaaaanagctgtntgcagcagaangccttatacaagtggttntnctttttnncctttnnctttttttgggtaccttcatntctgtnanntttatataaaatnctctgcaaaggaaggcctctcttggnnctacaattnnggaggcagccacttgtngtgcctggcttctggttaaacaatggtgggatatcaaggcccccccaaattatctggtttaatcattggaacctagagctttttttttcccttccctggtccactccatggtaaatgcctttagcatttcagtaatggcatatcgggttcaaggtgacacttcagcattgccgctaaggtcttggtaagtgacagtgcatttggtagtactgtacaactttttgtgctaaccagtaagccatttcttaacgtttttggccttgattagggtgcctaatttggggggtttaaaaaaaaaactaatatatcgggtgcaattattacacacgtgtacaagacgctataaaaggctattcgcattttggtttacgtcaacacgggttcagtggctaactggttgcggtaaaagttgaggacccttttccatttgggggcacagattcttgggggacaaaaagcgagtttactggttatataatggagagatctctgtaaattgattgaagcatatttcagggtaatctgacaggttctggaaccatttcatattttccaatattggaagatttaaaaacattgtg

SEQ ID NO: 714982 - DNA, 223 bp, Homo sapiens
  misc_feature (85)..(85): n is a, c, g, or t
ctctggcagcagacagcggctggggtggcacggcacgggctgacgtaatgtcacggtggttctcgtcactcatcatcatcatgtncatgagcatccctgttgccgagcgtgtgttgaagccgaagacgatgaccttggaggcgtcgctggcgcactcgcatacgggcaggtacaggtcgctgtagatctcctctgtctggaatagccgaacctgccggaccag

SEQ ID NO: 714983 - DNA, 139 bp, Homo sapiens
aatgcgcgtgagcatcgacaaatagaaccatagaaaaattagagaaggaggctgcggagatgggaaagggctccattcaagtatgcctgtgcgatctaggactatactgaatagctgagccgtgtaacgtggatatcac

SEQ ID NO: 714984 - DNA, 1077 bp, Homo sapiens
gccgagatggaggcgacggcacctgggcgctgcctggcgctaggcgctgcatcctgctgctgacgctggcgctgtccgggaccagtgtcccgaggaccacctgccccccgtggcccgagccgataccactgctgggaaacctcctgctgactacgtgccctggggcgctgtattcagtggctcatgcgtgctgagtaagaagtacggaccggtgttacaccatctacctgggacccatggacggcctgtggtggtcctggttggcgcaggagcgctgtgcgggaggccctgggacggtcaggctgaggagttcagctggcctggggaaccgtagcgatgctggaagggacttcttgatggccatggccgttttctatctccaactgggcgagctggtggaaggcagcctcgagtgaagtttaccgatgcttgcctcatgcggcgaccatggcgcattgggggaagcgcagacagggcgaggagctgatccagtgcggaggccccgggtgatctggattggagaccattccagggagcaccagacaggacgacccacttcgactcacctcaacgtgactgcatgggcaccaggcaaaacatccaaacgttagctcttgagttccctccatactcaggacactccgagtttataccttattgaggactaagagcagtccccagggccagctcggtccggggaaaaatagggaggaaacgcctgacgtgtcgaacatcaaggcttcccaagggcaggcgatacacgaaccgtaaggcaggaatgatcatcgcatggctatccttgagggaccccttcacaatgggccccccgacgaaggcacgattcctcacaaccaagggcaggcgagcgctgtgacctggcatttcacgcagcgtccccgagcaatggtcgcaaagcagcacacacctggcaaaccttggaatcgatatccgggccccccggaaaggtgaaccatgtcgacttacctttccgttgggatgatggatgggagacacggcagggcgacagggttcggcagggcacccacacattattgagcatggaatggcaaccagtga

SEQ ID NO: 714985 - DNA, 282 bp, Homo sapiens
agggtattctatgtaacagtcttgtaaaccttaaaacagccacgactctatcgctgagatagaataaggtacttaacgcaatataaatatctaccataatttaaaaatgcaaatataagcaatgcactaaaaaataacctttagcttatttatagttaagaaacaagtgtattgcataatacaggcttcaaaaaatataatagaattactctatactgatatctataatcggaaggtccaggagtcaggtccaccttccatgccatcatccttctttccacc

SEQ ID NO: 714986 - DNA, 599 bp, Homo sapiens
  misc_feature (569)..(569): n is a, c, g, or t
ggcacgaggccttcttttcaaagttcctcaagcctgttactcatttgtcaaggctgggcttctcctacaaagccctcaacctgcccagccagcagctgtgaggctgactgaatatttggtgaccatatcaccctttctggtgctgaagctcatgtcagctccattggacagtgttattctgggctcttctcactgtagaggactggagcagaaagggttccttggaaacctgtgctgggaagccctgtttggtctaaggctaagctttggttaactctgggctccagccctttcttcctttaaatagctgatgcacggccagcaggtctccattctcatcctctctttctattctgtttctttggttcagaaatactcttctgctttttttggacgaactcaatggcccgatgttagatattgggtatttttcaatcttctgttttctgacccttccaagaaagtttgaggaagaacatgtactgctttcacgttcatttcgcccattcagatgtcttggcttgaaccttatgactccgtatcaaagtcctcacaacctgtctcagatncctgctggaatatacgggagcctctagagt

SEQ ID NO: 714987 - DNA, 644 bp, Homo sapiens
cgcggttgttcacgtctgggatcacagcaatttggagggtcgatgccggcggacgacgaggtccccattcagagagcatgatcgctgacacggcgaaaccacgtttctacttaatatgcaaagtaactagactcatgtgactaaggtaccctgtcgtcacagttacacaggtggctatggtactagaaagtcttgaacccgagaggctagagattgcagtgagccgcgatcgagcttgagtctggttgacagtgccagacatcgtcttaaaacactatttacggactgcactgatgactccatgaagcccatgtcggtccccccaacgctagagcagtagaagcttatggatgcggtctgaaaactagtctacttggccattacacgctatagagtgacgtttatacaataagtgaccgacattttcaacgcttcgtgggctatacctaggcggacccatattaaaggctttgaatgcatacgcctttagacagatgggggaatattgaataggccctaatcggtcgcattgccctgtgtgagaccttattatgcaatggaattgggagtgctagatccgcattattacgagtgacactttagttaattagtatcttttagtgcttgggccttattctgtgctt

SEQ ID NO: 714988 - DNA, 221 bp, Homo sapiens
gcgaggcctatattacggatcatttctctactcagaaaccgaaacatcggcattatccccctgcttgcaacctatagcaccagccttcataggctatgtcctcccgtgagccaaatatcatctgaggggccacagtaattacaaacttactatccgcatccatacattggggcagacctagtcaatgatctgaggaggctactcagtagacagtccccccc

SEQ ID NO: 714989 - DNA, 374 bp, Homo sapiens
ccaggctggacttgtacatgttttgctcctctacgttctaattcttgtgtatctctggcggaagggtctgctgccccgctcaccgtggattggcgatttagtcccaaagcgtgaccattaagtcaatcgtttctaaacgtttcgcgactttggtctaagacgccacctgcgctacaggataatgacaatcctataaatccaaaatgaccgttttatgaattcgtaagatttttacggaatatggttggaacctttactgccattcgttgtagcagtcgcacaattcataacttttggttatttgcaaacgtttgctcataacctaattccgtatcgttctatagggacgaaaaagcctagcgggctccgctgat

SEQ ID NO: 714990 - DNA, 193 bp, Homo sapiens
agtaaagggtgaactggtagaatggagagtcaggtccctacagtgctgctttatctcagagtcaagaattgtgaaaagttacagggaattggtttgtcagactgagcccattcaacaggaatggggtaccacaaaaaaaaaacaaaaacatatccccccaattttgcctttttgattttggacaaacggccca

SEQ ID NO: 714991 - DNA, 137 bp, Homo sapiens
tggtcaaatgaaatttaaaatttattaatggtattttacattaattttataattcttttaagcaagtggccccataaattatagactacattgtctccatacccattaacaatctccagcatttccccctcaaacct

SEQ ID NO: 714992 - DNA, 185 bp, Homo sapiens
cgttctacttcagacgatgcagtggtcttaacaaatctcctggctggtacaggaagatgtagtgagagtcgccagtgtctacgaacaatatgagagcacacctcttagaggaagacagaaaacaggtcttgattccccgtaatggcattgacttttcgtgatattactgacaactacttttactg

SEQ ID NO: 714993 - DNA, 484 bp, Homo sapiens
  misc_feature (107)..(107): n is a, c, g, or t
aggtgcagtagcttggccagcacacagtctctcaggaaggaagtctcccagggctgtgtctgggctgctgaagctagtgtgaattcttttccacatagccacgcggntgggaaggatccagtgtcctttttgttttttttatttttggaggcagggtctcactctatcacccaggcgggagggcaaggaggcagtctcggctcagggcaacctcgtgcctccggggttcaagcgattctccttcctcagcctcccgagtagcgggaactacagacacgcgccaccaggcccagctaatttgggtattttaagtagagacgaggttccactatgtgggcaagggatgggtctcgatctcctgacctcgtgatccacccgcttgggcctcccaaagtgcggggatcacgggctctcaccaccacaccgggctaattttttttttttttttttgggaaaaagggtctcctgggtggcccgggtggag

SEQ ID NO: 714994 - DNA, 809 bp, Homo sapiens
  misc_feature (74)..(74): n is a, c, g, or t
  misc_feature (92)..(92): n is a, c, g, or t
  misc_feature (111)..(111): n is a, c, g, or t
  misc_feature (151)..(151): n is a, c, g, or t
  misc_feature (163)..(163): n is a, c, g, or t
  misc_feature (196)..(196): n is a, c, g, or t
  misc_feature (200)..(200): n is a, c, g, or t
  misc_feature (219)..(219): n is a, c, g, or t
  misc_feature (221)..(221): n is a, c, g, or t
  misc_feature (241)..(241): n is a, c, g, or t
  misc_feature (243)..(243): n is a, c, g, or t
  misc_feature (247)..(247): n is a, c, g, or t
  misc_feature (281)..(281): n is a, c, g, or t
  misc_feature (283)..(283): n is a, c, g, or t
  misc_feature (348)..(348): n is a, c, g, or t
  misc_feature (350)..(350): n is a, c, g, or t
  misc_feature (367)..(367): n is a, c, g, or t
  misc_feature (385)..(385): n is a, c, g, or t
  misc_feature (388)..(388): n is a, c, g, or t
  misc_feature (394)..(394): n is a, c, g, or t
  misc_feature (410)..(410): n is a, c, g, or t
  misc_feature (420)..(420): n is a, c, g, or t
  misc_feature (427)..(427): n is a, c, g, or t
  misc_feature (439)..(439): n is a, c, g, or t
  misc_feature (444)..(444): n is a, c, g, or t
  misc_feature (456)..(456): n is a, c, g, or t
  misc_feature (460)..(461): n is a, c, g, or t
  misc_feature (463)..(463): n is a, c, g, or t
  misc_feature (471)..(471): n is a, c, g, or t
  misc_feature (482)..(482): n is a, c, g, or t
  misc_feature (488)..(488): n is a, c, g, or t
  misc_feature (492)..(492): n is a, c, g, or t
  misc_feature (494)..(494): n is a, c, g, or t
  misc_feature (507)..(507): n is a, c, g, or t
  misc_feature (514)..(514): n is a, c, g, or t
  misc_feature (526)..(526): n is a, c, g, or t
  misc_feature (528)..(528): n is a, c, g, or t
  misc_feature (542)..(542): n is a, c, g, or t
  misc_feature (566)..(566): n is a, c, g, or t
  misc_feature (596)..(596): n is a, c, g, or t
  misc_feature (629)..(629): n is a, c, g, or t
  misc_feature (631)..(631): n is a, c, g, or t
  misc_feature (783)..(783): n is a, c, g, or t
atctggcccctagaggctggtacttgggcccgaaacccccatctccggcggagagaccgtccgaggtaattttnttccacgattgcacattntgaaaacaggagattttanttcctaaaaatgggaagaacctacattttagaagagactnttggccagtatntttcaaacataaatctccaaggaaaggcttttntctntggccttttaataggacantnttcgtcacaaaaggattatntnattnttgccactagaacgccacccaaagaggagcaaantnagaacctcaaacatcccaaagctaagttggataacttggatgaagaatgggccacagaacatgcntnccaggtatccagaatgntaccagggggacttttanttnttggantatttattattactantttagaactngcaaatnattttcaaaatnccctncgtagactaatntttnntntggaaaantctataaatanaaaganattntngaatttcacagangaggaantctcagaacgantnacacttcacatttntgcttctacaaaaaaaatattttntcgaacttatgatatccatgatccaaaganttcagcaagaccagcagattggaagtatcaaantngattatcatcctcatggctttctttagagtgtacagttcacattaatattcacatcccactttctgctacttctgtcagctatactctggagaaaaatacaaagaatggacttacacgctgggccaaggaaatagaaaatggtgtttatttnattaatggacaagttaaagatgaaga

SEQ ID NO: 714995 - DNA, 271 bp, Homo sapiens
gaaataaactccggggggtagggtgggggtgttgccagggagtccctttttgtttttaaccacccctattaaggggggggttcccaggtgcccccaaaaattaaagccctgccccctcccacttttgaagggggggccccccccccgggggtcaagggtgggtttcccccgcttttttttcccccgggaaaggggggttggggggcgtctttgaatgtaaagcccacccccctttccgcaaacctccaaataaacaccttttttgggggga

SEQ ID NO: 714996 - DNA, 444 bp, Homo sapiens
gccctcccagtatgtacctggatactgaactgtaggagacccacaggacctctggactctcagctggtgcagacgaggggaggctggacaggagaccagtgtggactggctcccacccaaaggatgccccaggttgggggacaggacaggacaccccctgatcttggaggtacagtcatgtcttaccccaaccccaaaggtgccctacatgccacccatggggtgagagtaatatggcagccactgcctgtctcaccgatgtccagcctggaccatctgaggggaggggagggaactcaggaagcagaggtcgtgctgctctctggatccccccatcctgtctccacccctgtgtccgggggtttcgggtaccctggggccctgacagccaatcccaccaggagcaggccatttcctgcccatgaaactcctactaggacctgt

SEQ ID NO: 714997 - DNA, 322 bp, Homo sapiens
atgtggtggtgttactcccaatctaaggataaattgccagcgccatggctcacgcctagagccccagcactttgggaggctgaggtgggaggattgctttaggccaggagtttgagaccaggctgggcaacatggtgagaccctgtctctaaaaaaatatattttttgattagttgggcctggtggcaggcacctataatcccagctacttgagagtctgaggcgggaggattgcctgagcctaggagtctgaggctgcagtgagctatgattgtgccactgcactccagcctgagtgacagagcaaacaagaccctgttct

SEQ ID NO: 714998 - DNA, 143 bp, Homo sapiens
gcgtcgacagctggagtgccgtgacacgatctcagcgctctgcaacctctgtctcccaggctcaagccctcctcccatgttgcccaggctggtctcgaacttgtgagctcaagtgatccacctgcctcacgcctgtaatccca

SEQ ID NO: 714999 - DNA, 913 bp, Homo sapiens
tgtggtggcgtgcgcctgtgatcctagctactcaggaggctgaggcagcagaatcgcttgaacccgggaggtggaggttgcagtgggccgagattgcaccactgctctccagcctgggcgacagagcgagactccatcccaaaagaaaaaaaaaaaaaaaggttttacaattttgggtactttctaaacaaaattggcggtttaaaattaccaagagagggctagtactttacaaaaggctggaaattaagagaaattctggtggtaaaggtacgtgggttctcttccattcaggttaagggtctttaaatgggcgttttgcttctataagggttacaaacggcggaaaagtcttatttcaccttccaaacccaacctttaactcttttcccaataaagggtaactctcgtggtaaatggctcgggtcaaactccgtggcgtggtcacagagcaaacaaacactttatagaaagatcacgagataggtaagaaactctttaaaattactcaggattcaatcttcaaagcctttatttctagagatattaaggcttcaggccttcttttcccacttaaaactttggagccttcagagaattaccttaggtaaaccttggtaaggttactcacgtttccttctttcctccaaacttaggccccagaaaaagtgggagattactagaaaaagacataaggcaacacttctaaataacggtgcatggtggtgtttgaaagtttcatagggcacatttcgcggaaaactggttctattaaggagatttagcaaaggtgtcctttaaaaaataacggttagcaagggaaaggaatggcaacgggagaacagacgggggtgtgggtggtttccaaggttcaaattccattgcggagaccggggttaataaaattccattt

SEQ ID NO: 715000 - DNA, 366 bp, Homo sapiens
cacactgacttacccacctccttcccaatccacttctttttctgatttcctgtttgtttgtttgtttgttttttgagacagagtctcactctatcacccaggctggagtacagtggtgcaatcttggctcactgcaacctctgcctcctgggttcaagcaattctcctgcctcaacctcccaagaagctgggattacatgcatgtgcttccatgccaggctaatttttttggtagagatgaggtttcaccatgttggccagggtgctctcgaactcccaacctcaagtgatccacccacctcagcctcctgattagctaggattacaggtgtgcaccaccatgcccagctaattttggtattttta

SEQ ID NO: 715001 - DNA, 1128 bp, Homo sapiens
ggagagagagaactagtctccagttttttctgattgtttttaaccatgggggaatggggtgtatttcctaccactggtgtcttgggaaaaccggtatggcgagggattaatccatatattccgggtccaaagccacactgtgaaacacagaggcagagcacttgttactcggggtggtgatctctgtggtcctcaggtgtctcttcgagggctccgtgttcccttcttggctttatagctagctgcccggggaaccaagggtacgaggtgaaagcagaggatagcagctatggggggagaggaggccgtggtcgtgggctatataccgagttcttattacactgtggtgggccttcagaccttcccgagaacggaggggcgcagaagaaacacgtggttgggacagctctcgatatgggcgctttcataggccgtgggccgtggaagacaagggtggggggacgcctcaaatgtgagaatagacaactctcaagtggagagtgtacaaacacccattatttcttgggggacacaacagagggggtatatcctctccctttcgaggcgagagaagagacactcaagtgcggggcactttaaaacactgtgtgtcaccaaaaattcccagagtgtggcacactctgtgggccagagaagtgagactcccgtatatccccttgtggggcgagagagtcatcacagtggggcactccatgtgggggggtttccccgagggtaaagaagcttggtggcaacccacaaccacaacatagttgagacaccactccatatttttcatcccctgtgaggatacaacctgtgggggttcccacctgggcagactttaaaaacagcaccgagagcaacacaatagctggcgcggaggaatcttccccaaagaagcggctcctccacacagatgatagcaccacagcgcgagagcagggggcgccacccagaggttacaacacttcaaccaggggaggggggggcagggtctacacaaacagtcggggcggggacctcccctcaccaaatatatgtgagggagagctccccgtggggcgcttcttccccgcggcgaaacaaatcttccaagaaacacacggggggggacagccccccaat

SEQ ID NO: 715002 - DNA, 266 bp, Homo sapiens
ccggatctagatagtgagactgctaatgataggacgggtacagtggctcacacctgtaataatcccagtacttcgggaggccgaggctcggtggatcacctgaggttaaggggttcaagaccagcctgggcaacagagcaagactccatctcaaaaaaataaataaataaaaattggttcttacctcataaggttattgtgaagattaaatgaaataaaccatgtgaaataccaagaacactatgtctggttaagtgtatctataa

SEQ ID NO: 715003 - DNA, 138 bp, Homo sapiens
tgtccctgtcagcagcatggagacatcactcatggtggttgtaaacattgtgggtgaagtagaacccctgcgatccttactcagctgagtgaagctgagctgtgataaaataaaagaataaagaggctggcgcggccg

SEQ ID NO: 715004 - DNA, 1563 bp, Homo sapiens
gccgagtttgtagggtaccgcgcagccaccgtcgcccgagctgcaggcgtacgtgtagccctggctggctactcggggccgtacggtcagttatgccatggacaactattaccatggctataagccaatttctacagataacccaaggttcatcatagacattgaaaagcgagtcacgtgctacgacgaggagaccacgtggtagacatcgcggagcatgccatgtcaaggccatactctgtcgcagacatactgaaggcacagcagatcgaaagtaaggtagctagctccactcgagcgttccatcgccgcgcgtgataggctttctcgaagcttcaacgccatgtaccaaggccacgacaagtgttcccacgaatttcgaacacgcacggccgtgaagtgaacgatacaatcctgggtgcacccggggagctatcttatatgatgtcatcacagaagacgagacttaggagacgggtgagcctacttcttctctgtcagaagactccttgacttgacacgcaagcgagtggacaggactagatctctcgggactgaactcagccatcgtctgccttagacttattcttgcatagcacccgttaatagacacttgagcgaaaccgttccatggatttcacaggtgttgtgaccaccgaagggattcgagaagataaggctaggcgttattccctgtgatctaacaaactattggacgcgtgcctttttgccctttaccacttgtttgtcgcgcatgtgaggaccctggttgcccagagcctcattcggggggattcaagaacacgcggtggacctgctgctatttgcctatcgggacgacttgagcaggcactcaaaggtctgagggggaaagaactgcttgcacgggctcagaataagacaacgctttacccctgttactacacccatgagatgacacttgaagaacacaccacctaacggttgtggttccccgtgaattaccagcgagcttggaggtaccacgccttggagtaacttccccttgggtacaaacatcacaccacaagctttaacgtcgcctgaaagagaaagaccctttttatcttacccttaacttagagagcttaattggagaagggacaagactgtggggagacaagtaaaagtgatgcacaaacccgaaaattaagccccggggtgtttctgtcatcagaaccttcaaccgtggagagaaacaatcgcgagttgttggcccatgagagcagactgacatgctgtgaaacgtcggcacgtgccactattgtagagggcagattatagcaatcatgtcgttggcaaatcgtgcacgacggtgtgagcaacaactgtgtcagtgtttactaaacagacagaaagtgcggcaccgaggtgcatggaggaaacatggacgcatatacgacatccttcgacaccatggatgcacactcatgcatagtagcgctacgctgaacccctctcattgtcgccacgagagagcatcggcacggagtcatcaccgagccgacccatagagattctaaatgagaatcacatgtatacacc

SEQ ID NO: 715005 - DNA, 154 bp, Homo sapiens
aggctttgtgtcaggttcgtgacttcacacagccctaatggcactggtggcaagtccatctatgggagaaatttgaagattagaacttcatcctaatatgcatacggtcctggcatcttgtccattgcaaatgctgcacccaacacaaatggtt

SEQ ID NO: 715006 - DNA, 134 bp, Homo sapiens
ggaaccccccgggggggcccctctctttttgtggggggggtttcccccccccccctccccccccccttttttttttgggggggggggggggggggggggccgccttttttttttttccccctttttttttttta

SEQ ID NO: 715007 - DNA, 401 bp, Homo sapiens
  misc_feature (17)..(17): n is a, c, g, or t
  misc_feature (47)..(47): n is a, c, g, or t
  misc_feature (70)..(70): n is a, c, g, or t
attgttgaccggtctcnggtgtaagtttcctggttttgctcttactnggtggttgcttgcctttctttgnaaccaatagagagatgttttaccatcagatgggtagtgtccttgtcaacagtggctaatccctgtaatcccagcgctgtgggaggccaagtcgggcagatcacttgagttcaggagttcgagaccagccgggccaacagggtgaaacccagtctcctaactaaaatacaaaaattagccaggcatggtggcacatgcctgtggtcctggctactcaggaggctgaggcaggagaatcgcttgaacccaggaggcagaggctgcagtgggccgggatcatgccattgcactccagcctaggtgacagagtgagactctgtctcaaaaaaaaa

SEQ ID NO: 715008 - DNA, 474 bp, Homo sapiens
tccaatcacagtcctggtcacccctccgttcttccaccgttgatctttcttgctgcagatgttgacaggattcttggtgccggcttcctctccaggaagcgctcggggctctgcatcgagttggtgggaatgcagaccttgcccttcttgttttgttagcaaagaacattgtagtcccaacataattgtgggaagtgggctaggccacacgtcattccttttgaaaaagcccttttcacgcaaatatactacgcgcacgcacacacaatgtgtagaaaatctgcaagcaaaatgttgagccagattttttttttgccggccaaagtaatttatgatcttttgtctgaatttgtctattctacttgttaacatttgggccttttaaatgtattggcagtgtgtgcatacaaagctttttattctcatgacgatgatgtattctggaataaagcagatggttttgtgtatagcata

SEQ ID NO: 715009 - DNA, 1332 bp, Homo sapiens
ggggcagtagaagcactgcctgcagaccgtattggaacaagccaacagtgaaatcccttccctgcgacatatgcaaagacgttgtacaccgcagctggtgcatatgctgcacaggacaatgccaactgaggcaggcagcatccttgtttcacttggcagcaagcaacatgtgcactggcttccagaaaccgcaaccatgtctgcttcatgcaaggcagcatagtggcactcctaccatccctgtcacatccatggcacatccattcacaaggcagcacaatgcagccagtccgtgggagcaggatgtgctctcgctcatcaaccatctgcagagatctcatcccagcaagcaactagacagcagctgcaatcacaccagaagccagctggcagtccaaataagatcccagcagctggacaatgacatgcaggtggtggcccccattcatggaccaacacatcccatcatccatcctcatcacccgtcaggacggaccacaccagcacgccaagaccacccagacaaaacaggcatacatgggcgcaccagtttcgccagagactgccattcgagcatggtgcactgcacatccaagcacatgcatgtacgggacccaacactacccacacatatagatccaggagccccttgcgccaggacacacctgaccaaacggccggaagtcgtgcaaccggacatgagagacccctgcacaactggacccgaacgaatcatgcgacgaaagcctaatacccagacaaggcacaacgaggcacaatcgctaacaccagaagtgactgcatcgccacacttccagcgcaatcaagcaagaccaacagggacgaacaggggacgcaggccaggagaacagagacacgccgagcatgaaaaaacacatacacatcacaacaccacagaccccacagccgcaccacggcacacaaaaaaggacagcccagaccagagaacaagcagaaacaccatgaaagaacgcacaaggcccagcacaagacacggccctctcaacgacgcgaagaaggagacgagaacgcacgacacacaagagaaagccaccccgccgacgagtaacaccacaacactggaaacagaccagctgaccccatcgcccacacgggcaggaccagacgagaacgcagcaggcggacccacgaaccagcggggtgggcagccacagaggagacgggcacacagccagaggagacccccagcgagggctacagacgaccaactgagagcacaccacacaagcagacacagagacgaaacgaggaccaacagcaccccgacaaaacaaaacgaggagcgacacc

SEQ ID NO: 715010 - DNA, 465 bp, Homo sapiens
  misc_feature (422)..(422): n is a, c, g, or t
  misc_feature (427)..(427): n is a, c, g, or t
  misc_feature (452)..(452): n is a, c, g, or t
acagatcccacgtgggccctgttctctgtcattgccatctattctccaagaattctgtctcaatgagaagaaaaacagatcaacaggggagctgaggaatagatgggagctgcgagctgcagagggccaggactcggtgtgttccccacagcggccatctgcttggcttgtggagacgaccagctcggccacacttctgagattaggactccctgacgggccagcagaaggggctcttgtcaaatcccactttccctgattaaaccggaacaggaatgtctggcagagtagaaaatccagggaggagaggtgaggcctgcatcctgggagggaaggttgtcctgagatgttcctgccatttttgtccccaaaagcgggatgatactaggaggcgatggggggcaggatccatcctgaatgtnttccngagagtttttggaagattttgaccntcattgcaatagt

SEQ ID NO: 715011 - DNA, 927 bp, Homo sapiens
ggacatcttgctcaagtcaggaggccggagatcaggaaacggcaacaagcctcccagtactgacctgaaaacttgtgacaagaagaacaccaacaagtgctccctgggctgaggaccctttcttgcctccccaccccggaagctgaacctgagggagacaacggcagagggagtgagcaggggagaaatagccagaggggcttggcagggttcataggtagatggtcaaagcagcaatgcaggcagcaaaacggcagcaacacagggcaaacagccagcaacaggcacccaaaaaggcaaggagcagcaggaaagggcagaaaggggagcaggcaatggaattggagagaagtgaaaggaaggcaaggcaggtaggaaagcagcagggcaggcaggcacacgggacagggagcagatgcctcaggcttccagaaccttacctgggttgttcagggcaaacataaatgtaaatacactgatttattcttgtttactagatcaggttttaggggtcctgcaaaaggctagctcggcactacactaagggaatttgctcctgttctgtcactttgtcatggtctttccttgtggtattaaaggcaccattttgtaaaaaaaaaaaaaaaaaaacgaatataactagtccatatctcatgaactccatagctcgaccagaacacaacagctctcacgagacaacaacaaaaggggcgcgggaccataaatatacacggcgggggcacaatatgcgcgaacagatttgttaaagagacccacagaggagtagataaaaaagaagcggggcgggattaaaaagacgatgggggaaacatgagcggtttggaggacccctttgggggggtgaggcagacacaaacaattcgcgggaaaaccgaggatgtcacacacttgggaatgagctattaa

SEQ ID NO: 715012 - DNA, 109 bp, Homo sapiens
gcggccgcctactactactactgctcgaattcaagcttctaacgatgtacggggacatgacatcatactgtaataaaagcagcttgttttctgcttgaacaacaaaaaa

SEQ ID NO: 715013 - DNA, 179 bp, Homo sapiens
cgttaatacccaggggtctataggaccagctcccattaatcctcccctgtcctagtctgccttttctccctgtgtctacacaatgcgaggtctctttctagtttgccctccttcgtagccctattgttcagctttcccattccatagtccaaatgccctattttatacgtatacgattt

SEQ ID NO: 715014 - DNA, 762 bp, Homo sapiens
tggccaacggatgtcccttaagggcagcaggcttctcaaaaaaaagggaaaattaataattctatttagcaagttctacgattatcatgcatctctattctcctaatacttcagtggtgctactggtgccgataaagatgtacgcccaattggtggattattaccacaatctttattaacaccctggttggacaaagatcttggcaagacaatatctacacgcaagctttggccttagcgaacacacgggaactagttcccttaaaaggattacagcatattctggaacatttcctcaaccattgtgcattcccagaggggggggactactatacatggataggacgtgttgggccaaaggtgcttgaagcatttaggacacaacaaagaatagtttggaaagtgtgttacgtgtgggctcaaaaatcaccatttgtgctcctatagggaccacaggctataggtgcctcatttgcacattctccagtgccctgtgaacgttgttacaaacaccacgtggtggttacagggtttacctaagatacgtgagtgtgggccaacttttgtggaacactcccagtggtgtcaggcataggttaagtgtggtgccgtgatctccgatagaaggggggtataaacattcggggggaaactcccccatttccttgtatagttggcaccaatccctgtgggataaagggcaacacgtgctaatccataaagggcataatcaaactaagagaactggggaaccccccctgt

SEQ ID NO: 715015 - DNA, 102 bp, Homo sapiens
atgcagcctgacatcccgtttccccaggccaaatgtaggtttgaaagtaggtctgtgtcactgtgtattatgattacgtttggggtaagactacgtatggac

SEQ ID NO: 715016 - DNA, 156 bp, Homo sapiens
tgacgtctagaggatcccggaagccatcctctctgccggtgtgtgttatttcacaggaaaagaacaaaaggaataaattttctaagctctaaaaaaaaaaaagcccatcctctctagcaagcccagcatcccccattcgggcctcgagctcggtcg

SEQ ID NO: 715017 - DNA, 955 bp, Homo sapiens
  misc_feature (219)..(219): n is a, c, g, or t
  misc_feature (317)..(318): n is a, c, g, or t
  misc_feature (333)..(333): n is a, c, g, or t
  misc_feature (343)..(343): n is a, c, g, or t
  misc_feature (346)..(346): n is a, c, g, or t
  misc_feature (355)..(355): n is a, c, g, or t
  misc_feature (360)..(360): n is a, c, g, or t
  misc_feature (381)..(381): n is a, c, g, or t
  misc_feature (397)..(397): n is a, c, g, or t
  misc_feature (399)..(399): n is a, c, g, or t
  misc_feature (426)..(426): n is a, c, g, or t
  misc_feature (444)..(445): n is a, c, g, or t
  misc_feature (447)..(448): n is a, c, g, or t
  misc_feature (452)..(452): n is a, c, g, or t
  misc_feature (455)..(455): n is a, c, g, or t
  misc_feature (477)..(478): n is a, c, g, or t
  misc_feature (484)..(484): n is a, c, g, or t
  misc_feature (499)..(499): n is a, c, g, or t
  misc_feature (945)..(945): n is a, c, g, or t
gtgcgtacggcatctgacttgacgtggccacaactgaaaggtctggggagaaggcgccgtgtccgggtgtggagaggggcgtcgtggaagcgagaagagtggcccgtccctctcctccccctttccctctttcggaaagtggtttctgcggggaccgggagcctcggagtaccgaacctcgatctccggggcggggtccttggtggggactgagcgccncctcccggggacgggcggtctggccgcggagtcccctgcgggagcgtgattggctggaaacggtcccgaacccccagggagcccgatccctgggggannctggcttcggactcnagtatctgtngtngcagggtcnctgcnctagtggcctatgtcccttgntcggggccatggaganantgcggccagtaaggcggcgcctctgtntgaagaaggggaagtganntnnggantcnaggctctggcagtggaggatannggaggnccctctgcatcggcnggtaaggcgaggacgagggggaaggaggccgagaggagaccgagcgtgaggggtccgggggcgaggaggcgcagggagaagtccccagcgctgggggagaagagcctgccgaggaggactccgaggactggtgcgtgccctgcagcgacgaggaggtggagctgcctgcggatgggcagccctggatgcccccgccctccgaaatccagcggctctatgaactgctggctgcccacggtactctggagctgcaagccgagatcctgccccgccggcctcccacgccggaggccagagcgaagaggagagatccgatgaggagccggaggcaaagaagaggaagaggaaaaacacacatgccacggaatttgattttgatgatgagcagtgacacaaaggactcctgattgaccggagagcacccaggaactcagccggagcagaangggaggccgc

SEQ ID NO: 715018 - DNA, 214 bp, Homo sapiens
  misc_feature (1)..(1): n is a, c, g, or t
naaaacaagaacaacaacaactaaaaaaaaacacacaaaacagtgacttacttataattcacaatatttattagaccaagattttcactatttttacccctaataacaaggttctagtctccatttctctcctagttgaatgacttggggcaaatcttttcatatctagtggctgtttcctcctttgtaatgaagatatgtcagagttaatgag

SEQ ID NO: 715019 - DNA, 378 bp, Homo sapiens
  misc_feature (256)..(256): n is a, c, g, or t
cacatgcaaccaggtgcacgtagcaaatactaaaaaaaattttttaagtgtttttttttggttctgtttggtttggtttttggtgtttttagggccacacccatacatatagagattcccaggctaggggcctaatgggagctacggctgcgggcccacatcacagccacagcaacataggatccaagccacgtctgcgacctccaccacagctcacggcaacgcgggatccttaatccactgagcgaggccaggnatggaacccgaaacctcatggttcctagtcagattcgtttccgctgcgccacaaggggaactccccccaaattttaaatacgtaagtacaccttctagggagggcgcagtaatccggtacga

SEQ ID NO: 715020 - DNA, 1187 bp, Homo sapiens
gggccactgttctatactaccgacggacgctccgggcccgggcggctggcctcaccgcccactggggaagacatgtaaggaatttagcataagacagctatgcaaaatgtgagctggcggagctttcatatgtgcacagagatactcctgagaataaccctgatactccatttagatattcacaccagacacctctttagcaggatacgaggcacatctgtacaaaaactatccagcaaggccataaagcagcagctgttcttccagtcctggactttagcccaaaggcagaatgggtggttgcccatactctgactatgaccacaggttcgcccgcaacgtttctacaacgtaacctccaatcgagagtcatatgaacgtcagccaacctatcaaccactacaactggtacataaactctgacaaaggcccacgccctggcaacacgctctcaccactctccaagcgtacctcgcacgtaacttcacagcacctggccagtgcctgcagaaacagctactagacacgcgattacctggcagggccactctccacgacaacagaagctctgggaactacacacagagacggagagcagaactacgacacctgaacagaacctctctcacaacactctttaatcgcaaccgtggcaacctgtctcaagagggcccatgtggtgcacacgtcgcccaactgagtacaccaggagaccattgatcacctaccctcacgtcacggaactacatgacccacgcacaaccaagggacctatgaggacaccgaccacctacaattttgacatgagagaaacgaacagtccgtgccccggcgcactcccccaataccccgcaggtcgcccaacggaagctggaaccgctcagccaccccttgctaaacgcatccccatgacagagaaccacaaacctccgcatcggatcgcgacatccaccaaggcacacccgagacatatgcgccgatcaacagccgcgcccacacaacaaagccagcccacatgtctacaccgtgctacccatgaggacaacactaagggaccgatcccaaaccactactaaaaccatcacccgcaggccctcccaccgccgtacacacacacgctacgacacacagcagcgacctaatcacactatcacgcacccagacacagggacatgcaggcaacagag

SEQ ID NO: 715021 - DNA, 134 bp, Homo sapiens
tcacttttggcctccaaaagtgacaagattacaagcagaagcccccttgcctgcccagcccggtttactgttttttttttttgagatgggatttcgctcttgttgcccaggctacagtgcaatggcacgatccc

SEQ ID NO: 715022 - DNA, 185 bp, Homo sapiens
tagaggtgcacacgtaattacaatactaacttatacagacatctcatacagttgagacagatctagttctatgaatctgaggaggctactgcagtagacagtcccaccctcacacgattcttctacctttcacttcatcattgcccttcatctattgctagccctgagcagctactcctacctcc

SEQ ID NO: 715023 - DNA, 266 bp, Homo sapiens
actcagccttagcggagctgatcgcgcgctctgaggtcgagttacgggccggacactaccttctggactatcctgcccaggacctccgcagtcctggctccgtttgcggctttggacactttccgacgaagtcaacccgttggactcggcggtctctgtggaatcgccccgttcagattcttctttgcctcaacatgcagacatggtttcgccgctcatcatcagactggtggacataagctctgctcctttcaaatggaatcatt

SEQ ID NO: 715024 - DNA, 388 bp, Homo sapiens
cttcgttgccatgcacatcctcaacattgcaaggtttggcatggctgcgaccctgactggtaccatgagaggcatcattgctaacgcggagataaccctgaccgactccataggttatccaagcagacttctcactgaccaccttaccatgtgaccctgatcacttgcaggcactcactacactagcatctcctaccctaccagcagctccacttgctatcttaggtctccatccaccgtatactgagctctggttgtatgcataacccatcgttctagcgcaagctcaacccctatactatgaagactgcagagccacactgaaccacagcgggatgtgcggaccctcttccaggtagatcatgccacttcgtacccagtttgtagg

SEQ ID NO: 715025 - DNA, 414 bp, Homo sapiens
gcccttccctctttcttagaggctggaagcttttagtatttgtgcctttctgatgctttgttctcaccttggaagagaaaacacaagagtttcaaaagcaactttgatgtttccccagacgaaaggcccttttgggaagttcaggtggagttaaggccactgtttaaagcgtactgcctttgtgtgcctgaagcttgaatgacaaccatcaaccgattcgactgggcactctttttttttttgggtctccaactgggcacattcaaaagtagtttatttttttaaacaccacctcaaaattaccccccaattttttatttttaaattcagccccttaaaaggattttttttttaatgaaaaaaaccgttttgacccaaccaaaatacagaccctggcccattaaattgggggat

SEQ ID NO: 715026 - DNA, 108 bp, Homo sapiens
aacgagggggacgcccgttcaattcattgtacaatccgagacatcgatggtcatcttgtttgtcacattttcctagcgagctgttctgcccaccgcgaggtaatagac

SEQ ID NO: 715027 - DNA, 178 bp, Homo sapiens
cagggggctttcccttttaatgacgccgctgacatcattggcgtagaccacggactgtccattgatgctgattgggacgtcgttttccttgagaccaccagcttctgctggggtatcaggaattacttcaattatatacactccaaagaaatcactctggggggctgggactagcgtc

SEQ ID NO: 715028 - DNA, 160 bp, Homo sapiens
aaaaccttttgttttaactatactgctttgagatctcatttcagaggaacggcatgaacagtcttcagccacagttgtgatggttgttaatgctcacaattgtgcattctgggggttttccatccctggggttgcaagttgttcacttaacattctaaaa

SEQ ID NO: 715029 - DNA, 167 bp, Homo sapiens
tagagaagaacagaaaaagcagaagtcagtgagccatcggacgatcaactgatacaagcattacaatagactcctgtgacgataaacacaattgttcaaagctttccacagtgtccacagagtcagtgtcagggactagtccttgtgacatcctttcctgtatcaca

SEQ ID NO: 715030 - DNA, 4392 bp, Homo sapiens
tgagcgggactgggagcgactgggagggacggggaaaagtccggctggcgcctgagacaacaagcctggatccgggagctacggctgctggggtgctccggatttgcggggttcgtcgggcctgtggaagaagccccgccacggacttcggcagaggtagagcaggtctctctgcagccatgtcggccaaggcaatttcagagcagacgggcaaagaactcctttacaagttcatctgtaccacctcagccatccagaatcggttcaagtatgctcgggtcactcctgacacagactgggcccgcttgctgcaggaccacccctggctgctcagccagaacttggtagtcaagccagaccagctgatcaaacgtcgtggaaaacttggtctcgttggggtcgacctcactctggatggggtcaagtcctggctgaagccacggctgggacaggaagccacagttggcaaggccacaggcttcctcaagaactttctgatcgagcccttcgccccccacagtcaggctgaggagttctatgtctgcatctatgccacccgagaaggggactacgtcctgttccaccacgaggggggtgtggacgtgggtgatgtggacgccaaggcccagaagctgcttgttggcgtggatgagaaactgaatcctgaggacatcaaaaaacacctgttggtccacgcccctgacgacaagaaagaaattctggccagttttatctccggcctcttcaatttctacgaggacttgtacttcacctacctcgagatcaatccccttgtagtgaccaaagatggagtctatgtccttgacttggcggccaaggtggacgccactgccgactacatctgcaaagtgaagtggggtgacatcgagttccctccccccttcgggcgggtggcatatccagaggaagcctacattgcagacctcgatgccaaaagtggggcaagcctgaagctgaccttgctgaaccccaaagggaggatctggaccatggtggccgggggtggcgcctctgtcgtgtacagcgataccatctgtgatctagggggtgtcaacgagctggcaaactatggggagtactcaggcgcccccagcgagcagcagacctatgactatgccaagactatcctctccctcatgacccgagagaagcacccagatggcaagatcctcatcattggaggcagcatcgcaaacttcaccaacgtggctgccacgttcaagggcatcgtgagagcaattcgagattaccagggccccctgaaggagcacgaagtcacaatctttgtccgaagaggtggccccaactatcaggagggcttacgggtgatgggagaagtcgggaagaccactgggatccccatccatgtctttggcacagagactcacatgacggccattgtgggcatggcctgggcaccggccatccccaaccagccacccacagcggcccacactgcaaactttctcctcaacgcccagcgggagacatcgactccagcccccagcaggacagcatctttttatgagtccatggtcgatgaggtcagggccgatgaggtggcgcctgcaaagaaggccaagcctgccatgccacaagattcagtcccaagtccaagatccctgcaaggaaagagcaccaccctcttcagccgccacaccaaggccattgtgtggggcatgcagacccgggccgtgcaaggcatgctggactttgactatgtctgctcccgagacgagccctcagtggctgccatggtctatcctttcactggggaccacaagcagaagttttactgggggcacaaagagatcctgatccctgtcttcaagaacatggctgatgccatgaggaagcacccggaggtagatgtgctcatcaactttgcctctctccgctctgcctatgacagcaccatggagaccatgaactatgcccagatccggaccatcgccatcatagctgaaggcatccctgaggccctcacgagaaagctgatcaagaaggcggaccagaagggagtgaccatcatcggacctgccactgttggaggcatcaagcctgggtgctttaagattggcaacacaggtgggatgctggacaacatcctggcctccaaactgtacccccaggcagctgtggcctatgtctcacgttccggaggcatgtccaacgagctcaacaatatcatctctcggaccacggatggcgtctatgagggcgtggccattggtggggacaggtacccgggctccacattcatggatcatgtgttacgctatcaggacactccaggagtcaaaatgattgtggttcttggagagattgggggcactgaggaatataagatttcccggggcatcaaggagggccgcctcactaagcccatcgtctgctggtgcatcgggacgtgtgccaccatgttctcctctgaggtccagtttggccatgctggagcttgtgccaaccaggcttctgaaactgcagtagccaagaaccaggctttgaaggaagcaggagtgtttgtgccccggagctttgatgagcttggagagatcatccagtctgtatacgaagatctcgtggccaatggagtcattgtacctgcccaggaggtgccgcccccaaccgtgcccatggactactcctgggccagggagcttggtttgatccgcaaacctgcctcgttcatgaccagcatctgcgatgagcgaggacaggagctcatctacgcgggcatgcccatcactgaggtcttcaaggaagagatgggcattggcggggccctcggcctcctctggttccagaaaaggttgcctaagtactcttgccagttcattgagatgtgtctgatggtgacagctgatcacgggccagccgtctctggagcccacaacaccatcatttgtgcgcgcaccgcggtggagctggtctccagcctcacctcggggctgctcaccatcggggatcggtttgggggtgccttggatgcagcagccaagatgttcagtaaagcctttgacagtggcattatccccatggagtttgtgaacaagatgaagaaggaagggaagctgatcatgggcattggtcaccgagtgaagtcgataaacaacccagacatgcgagtgcagatcctcaaagattacgtcaggcagcacttccctgccactcctctgctcgattatgcactggaagtagagaagattaccacctcgaagaagccaaatcttatcctgaatgtagatggtctcatcggagtcgcatttgtagacatgcttagaaactgtgggtcctttactcgggaggaagctgatgaatatattgacattggagccctcaatggcatctttgtgctgggaaggagtatggggttcattggacactatcttgatcagaagaggctgaagcaggggctgtatcgtcatccgtgggatgatatttcatatgttcttccggaacacatgagcatgtaacagagccaggaaccctactgcagtaaactgaagacaagaactcttcccccaagaaaaagtgtcagacagctggcagtggagcctgctttatttagcaggggcctggaatgtaaacagccactggggtacaggcaccgaagaccaacatccacaggctaacaccccttcagtccacacaaagaagcttcatattttttttataagcatagaaataaaaaccaagccaatatttgtgactttgctctgctacctgctgtatttattatatggaagcatctaagtactgtcaggatggggtcttcctcattgtagggcgttaggatgttgctttctttttccattagttaaacatttttttctcctttggaggaagggaatgaaacatttatggcctcaagatactatacatttaaagcaccccaatgtctctctttttttttttttttacttcccttgcttcttccttatataacatgaagaacattgtattaatctgatttttaaagactttttgtatgttacgtgttaagggcttgtttggtatcccactgaaatgttctgtgttgcagaccagagtctgtttatgtcagggggagggggccattgcatccttagccattgtcacaaaatatgtggagtagtaacttaatatgtaaagttgtaacatacatacatttaaaatggaaatgcagaaagctgtgaaatgtcttgtgtcttatgttctctgtatttatgcagctgatttgtctgtctgtaactgaagtgtgggtccaaggactcctaactactttgcatctgtaatccacaaagattctgggcagctgccacctcagtctcttctctgtattatcatagtctggtttaaataaactatatagtaacaggaattcctgca

SEQ ID NO: 715031 - DNA, 1010 bp, Homo sapiens
tgggtgtgtgtgtctttatggtagaacaatttatttattccttgtggatatagtactcagtaatggggtgctgagttgaaatggtcgttcgaactctagttcttggagaaatcttataagagtgttctccatagtggctgagcgtaatttacgattcgccaccgaacagtatataagtgttcccgttttcatctagcagtctcgatcgaacacctgtattttctgttttttagcttatgaacgaaaagccattttgactgggtatgagatggtattatattgtgggttgacatttgcatttccctgatgattagtgatgatgagcatcttcttcatcgtagtttgctgggctcgataggtgtcttctttggagaagtatcgtgcatgtcctttgcccatttttaatggtgtcgtctttaggatagtagagattttaagagtactatagatatgtacttcttgtttattgtgggctttttcgaaatctacataaaaatagagtggtaatgaatgtgcatattctcacggcaacaattcaacaatctatagactcataagtaatctcatctaatccttctaaaagagttgggcacttgaaaaatccatagcttcagggttgttattattcatcaaacatttagcaatattccttaccattattagatcttcattaaggttcgtaattttcttaaatggtcctaatttttccttgagtaattggttcaaacaggttcaacgtccatatatgggttgatgggcttttaaaagtttctctaaatcgggggtcgccgggaattgaattgagattaaaatttttgtttttaataccacgtgtgatgttaaattatttgatttcagcttgaagggggggagatggcaatgtgtggcagggtggctgtgaacgtcggggtcaagggaaactttgtgttcaaacaccgagtatgggataaggggatgttcttaaccggctgttttaaaatttgcactggtgtgaaaaaggtgttgggtaa

SEQ ID NO: 715032 - DNA, 720 bp, Homo sapiens
actgctgctttcctaagttactcaaacgcactgcttacttgagtccttgttttcttttgccttgtaactactcttgtataactgtattactaacaacgacgcctccccataaatcagacgaggcaaaaacggtagcatactaaaacagaagacaccaacacagcacaacaacgcaacacacctgtgcattctctacacacagtagacgtgggggggtgctcccactataaacagagggccagcaggctgccgtgaacccaacagagagcagatcgtagttaatggcatagccaagcaaggcagcacgccaaacaacatgggcttcacacatattctaaaacatcacatgggcatgggagacaaagttaggatacaccttccacatggataggaagaaagcatctccaacttctaatcataaaatggagtttggcattaggtccaaattaaaccacacattatacaaaaaagcacacgcacctatatggcatagagtccacatggccagagggatttctaacaaagattttagttagtgaattatatgtgggaattagttggaaatgggacgacttcaattaccttcacatataaaattgaggcactatgagtttgaaggaatttaggtaaaataataaggtaggaacaaagtagattgattatggattaaggtattgacaaccaagtcaattccaaattggggtcattatggcttttaaa

SEQ ID NO: 715033 - DNA, 174 bp, Homo sapiens
gaaagaaattaggatagcttaagaaagtcgctattggactggacgggagaggcattaggcagaagcacctattactttgcaaggggcacttcagaaagtcgctgggactcagaaggctcttagtcgtgcttgagagtgagcctttcgaagagactaatttctctcggaccaatg

SEQ ID NO: 715034 - DNA, 130 bp, Homo sapiens
tcatgccacaccagaacgcaacacatgcacatactgcctgtctacacctgcactcacacctgtatacactgtctacacacccccacacctggaagaacccatggtgaaagtaaacatgctgatgtttgct

SEQ ID NO: 715035 - DNA, 248 bp, Homo sapiens
  misc_feature (116)..(116): n is a, c, g, or t
  misc_feature (245)..(245): n is a, c, g, or t
ggggtggggtggtatagatggggcagtggtgccagtgtagacaggaggacggtgcagacgaagggggacattgtggtgtacacgggtggattatgtagacggcgtggtggtatagnatggggtagttgtgtgctggtgtagacagtgaggatggtatatgacagaggagaggtgattggtgtagattgggtggattgttgtagaccagtggtggtggtatagatatgggcactggcggaggctangga

SEQ ID NO: 715036 - DNA, 264 bp, Homo sapiens
gctcggcccgttgacggaacattgaataggagcgcgaacatttaagttggtattacaggaacatgaggccatgattaagaggggggcagcaacatatgaagccctcatgagtgcagagcccgccacttgtccagagggccacgaatggaggatgtggaatcgagggcttgtcagaaaatggtggtttctttcctagtgtgaagggttctctatcaaacggagctaatgaacgatctaggggaggtttcgtgctatccggtcgaa

SEQ ID NO: 715037 - DNA, 710 bp, Homo sapiens
tcctctgtggtctgatgatgaacttcctgtgaggaaagtgacacagtaagcctgcattttacctttcctcacagcaagcctccctagatgactgaggagactggagcctgcgttgatgagatctgggaatcagggatctgcgacatgtggctaggtggagtgcagggtgtttgcagaatcagctgcgtcacatgtcaaggcgctcaacgcgtcccaggggccactaagctaagtatacccaccgcccatctcccctactgagttagcttgggagcatactaggcattgtcctcaccatgctctgcgcatgcaattttaagtattgaatatataagagacagaggtcatcacgtgtggttgcctcagggactggtgctacaaagctcgcgtgggacatcaacgacaggtgcgctaccatagcctacaggcatataccacaaaagatgatactacgcgacaatgaagcacaacgcactgctgctggaacaatgcaccagtatccgtggtcaatatttgttacgcagactgaactgaagagtagcacaatgaatatgtgagtgcaccaatcgagaacacgtccagcctgagaaatgccaccacaggttgaggagaacaaatccctattacagagggcacatgtataagaacaaaacctctcctacaaattaacagcaatgagaaatatgagggtaatgataagaagagaataa

SEQ ID NO: 715038 - DNA, 178 bp, Homo sapiens
tcggcggcccacatgccaccggagaagggtagaggaacacgcgaggtttgtcgaccggcaggtttttctgcacttcggccacctgtgcctgcatctgtgcaataagcgcattggcgcggtcctgcacgtcgaagatcttgcccaggttgcgcaggtccttctccgagtggcgtggtat

SEQ ID NO: 715039 - DNA, 1436 bp, Homo sapiens
  misc_feature (507)..(507): n is a, c, g, or t
gctttcaaggacccagaagtacggttttggtctatgtaacgggtcagagatgtggttcgagattctccccggactctccggtcactgggcgttgtggctattttagacttccaaggatctggctatctgtcgtacaatcctagcaaggttcaactaacagggggcaatggagacataaagggttagctcagtatgttgggtatcacgtggcatggtctgatggaatacgagcataggtcgcatctctgggagttgatcggttacgtatgtagtcagaagggtttgggagacacattgagttgaaggatagcagtgtaccgtgatttcgatggaacaaagaatagagttcaagttgatgagccagtcttagaccactgttatgcaaggtatacaggtggtatgaatagtaagctatgcgaagtggtgataagtggtacgtgcgttatataaagaagtcaaagatcgcacaagagaagagagaagaagacacaataagcttcagaaganggctccagggttgcaagagtcgcgtcgagaggcagataaccgcgtcgtgatcgagttaccagggagccacggtgaggccaataaccggggcgtgggccctgggagtcacccaaggactttggctgctccgtgggccagataagcgtgggaggtgcgcacaaagattggcggcccgagtgggaatccattcgccacagcattgaaacgtttgacacctgcgattggttcataagtttgtcacacatgactaagtaggaccccaacggggtggtggcatactcctgtgggagtatgttaaatgggagcaatgtcgccacgagagaagacattgcccaaatcccctggcaaatgttacaagtttacacaacaccacagagagttatcccaattgggttaaggccccaatggcggtgagcacggggtcttggaatctcttccaacataaaacagcaccaagaggaagacttggggggccacatcatttgggatggagcgtgggcacaaactggtatcccaaaattctcatcaattagggggaccaaagcaagacggcttccccgagactctggacatctggcaacaaacaacagctttttagaagttatccccttccacaaaaagcgaccagattaacacggggggaacgccacaaagcggtatcctctaacagttacattcgccccataggtgggcccaaacacatctcctatgggggacccccaagaaaatcaagcgccacaaacattgcgggctgctttcttctctccagcagctatgaaccatttatcacatttgggcagcacaattgttttctcaggcacccagatcggaaacaccatgagagcactttatctgtaggtcctttgggccagcaatttgggctcacaaatggacacctctgagctgagggctgtggtcagtcagggcga

SEQ ID NO: 715040 - DNA, 406 bp, Homo sapiens
aggtatacacataccctggcttcacgctcatggcttcacatatgcaaaacattatatccatccttattcatccaccattaacattcacaatctattcccgtctagatatatagatactattaaggaaccacacaggtcacgtcactcaggttaaatgataccatcataaggacacatacacttctgctccatataagtctgatcactgtagataatccaggtcacccagcctcccattaagatttaatcaaagtcttctgcaccccaaaccctcacaaaacagacctctatgatgaaatcacagaaagatacatattagtccagtaagtggccaaacataggtcttcagaagtccaaagacctctataaccagtaacagtagttgggagacacgcaggaataaaga

SEQ ID NO: 715041 - DNA, 584 bp, Homo sapiens
  misc_feature (129)..(129): n is a, c, g, or t
atacatgtcgaggctcatgttttgtaatccagcattagagggcaggtgggaggatccctaaggccaggattttgccagcagcctgggctgcatattaggagtgagaccttgtcctcaaggaataatgtnttgttttgttttgttttcctgaagaaaagactactgagagccagtaagactgaaataatggacatcttcatatcctgttagtttgagtgtgaatttgtacagttttcatacagagtggctctaggtataaaaacttttgagatgttaatagcttttgacctagtcattctactcttaaaagtatcttaaggaaataatctcaaatgtgagcagttttacgtgagggaggatattctttgtagcataatttatatgaagaattagaaacaccctaaggtccatcagctaggggaggacagcagaggggacggggaagcatcaggagggctcggcagccacagcaggggctgggccggcatctagcaggatccaggtctttgtgggacaaagaatcttagagaagcaacggggacaccaggctgtccactgcagcaccagtgagttcccaagacgaa

SEQ ID NO: 715042 - DNA, 1978 bp, Homo sapiens
  misc_feature (835)..(835): n is a, c, g, or t
  misc_feature (1346)..(1346): n is a, c, g, or t
tttgtctgttcatctcgctgttggtaatagtcgttgtctctctttattagtaggcgagttatgtcgccgcctcgtttttccacctgggtgttatttaaccagacatggtgttcatgtggggtagtctaaacacatacgtccatcgtttgggtgggatagtgatcacatctttttgagtggcggctatcatactatatgtttgggggtgggcaatgacaacaagatttctgtatgcgaccggtgtggtgcgtccgccctggtttcgtggattagggtacaccacgatggtgtggttcccatccattaggttcgccaacatcaacttgtgtgatggtgtgtcttctactactcatatgaccatcgtgtgttgccggttggtttgcgtcggtgtgttgtttcgtacaacggctgtgacggtggttggctggtgtggttgtctatactacccacttttgtttgagtgggtgagtggggagatgaaaacaataggtggggagtgtggtcgtgttgttgggaagcaagcacaacaatggttggtgagtttgttatgttggcgtcgtgtccgtcatgttttgtggtgcggtcttcgcgcctcgttcggctcgtgttggtgccccgaccggggtgggtttgctctgctgtggagtgtgttgattgttctcgtgttgggggcgcctccttctctgtgcgtgctagtttttcagtggtggctcgtggcgtccagacacgccccctgggtgggtgttttttatcttggcgtcggttgtactgcctcctttctctctttgattgtgggggatgtcgacgagaatcgatactgctgttgttttgagcnatacccactcctgagtgtgttgtgtttgttgatgtccctcactcccaccttgcggttattattcttgtggttggtgcgggcaacaacaaacaatagatgctcaccatctcttgtttggtgggttgttgcttctaccacaggagcatagttattgtttttcaacactagcggaagggttgttcgatcaacatatgggggacatcggctggtaggtggagtagtttgtttttctccgttcgtgtggatgtgggacctcccccccctagctggatggagcttcttttgatgatatgtaggccgcccccaccaactggttggttcgtcggagcgcagcacggagaattattatctctcgcgcagatgattgtttattgtgggccccatcagcgctctactactgcggtggtgtcgactagtacaacaagtgtgtacgccgccggggcttggtctcgtcttgttgtaagagaggagtggttcttgtagagcgcctagcggcggagattagatgatnttgcgcgcgtgctagaggcgcccacaccgcgaggtgtccccacacattttttgtcgcacgcttgtgagagccttatgttagggggatgacacacacgcacagctgggccacgactgtcgcacacactctctgggtgcacacacacagagaggtgagatatactctctctgtgtctgttctgttatagaaatattttatgaaataattttttttgcccactcgcaactttgtgtgtgggtcttcacacgaccgctcgtatatatctctctaggaccctctcttgagatgggctctataggtctggggcacagagttcacactctgagaggttctgcggagagtgttcgagagagacacacaccctcgagaccacacacactcggagagagaaaccaccactatctgttagcttatataataacaccaatattagactgggtgttgtgtgtggcgccctagcttgtgatatatccccgacttaacttcgaggagaggctgagagccacagaagaaattccgcttgttaaccccgacgagggcgctaggttgccacctgtgaactgatgattgcccccattgcactcccgcctgggcctaccccccgtgtgtgactcccgtttccacaaaatata

SEQ ID NO: 715043 - DNA, 216 bp, Homo sapiens
ggccagatccatataaacacatacaaaaagtagtcatgcttgtgctgtcacttcttaccacccttcttattgtctatttttccatagtataacatctagcttgttcccccggcgcccaccagcccatgaccacattgtcgacaagacagcctgagtgacctacatttctaatttgattggattttatacttctatcttttcatctttcttgtgatc

SEQ ID NO: 715044 - DNA, 161 bp, Homo sapiens
  misc_feature (122)..(122): n is a, c, g, or t
aattcggcatgagggagatgccccatggtgggcaggcagatgatgaagtactggcagatttgcaggctgggaaggctagacttcctcagccccgaagggtgccccttccaaaactctatcgnctgatgcaagcgtgctgggcccttaagcccaaagaacgg

SEQ ID NO: 715045 - DNA, 193 bp, Homo sapiens
tcacaacagtgccgggtatgaacaacagtgcaggtatgaacaacagtgcaggtataacaacggtgcaagatatgaacaactagtgcaggtataaacaacagtgcaagtatgaacaacagtgcaggtatgaacaacagtgcaggtataaacaacagtgcaagtatgaacaacagtgcaagtatgaacaacagtg

SEQ ID NO: 715046 - DNA, 127 bp, Homo sapiens
tctgaacacggggtggtatttgtcgaagttgatccggtgtgtgatgcagaccaccagcattaccgcggccgccgtgggatgcttccggtgcttgtcctatgcggcctgtggccgtggctcacgtggc

SEQ ID NO: 715047 - DNA, 455 bp, Homo sapiens
agaaactgatgcgttatctgtatatgtaatttaactagggatatttttccattttaaaacattgcattttaggtaatacgaaagtgagcttttgtattttgtctgtataattcaatagcaatgattttagtgaacataatctggcagggtattctttgattgtcttaatatcttccatccaatttaccagcaaattctatcatttcaaactcaaaatagatcttaaagcagttggctactcttcatttccactgaagtcctcccagccacagtcaccatcctgacctacctgtgctgcagtgccttccttaattgtctttctgtatttaccctagcttcccttcaaaactgtctccaaaaaagaggcttatctttgttttccttccttccttccttccttcctccctccttccttccttcctttttctttctttcttctctttcatttcttcttt

SEQ ID NO: 715048 - DNA, 562 bp, Homo sapiens
aggaaaaagattgtctcccgctctggtgaaaaaaggggaaaagggccccaattttttgaagtgtggtggggcggccccctgtttaaatgggtcccggccaggccactgtgtggtgggagcctctccaaccatccccccttggggggcttttctgtttgttatattaaaccaaccatttcggggggggtcctccaaaccatgggccaaaagggttctgggggtgggcagggcccccagtttgcccccaaaggcccgaagggttaattaattttttcccctaaacccgccccccccctttttaaccggggggggagaacgggttccaaaccgtttgtttccattggcccctttaggtttggggggaaaaaccgggttttttatacccaggcctcggtaaaccccccaaagggaaggggaatgttttttgggcccccttgggttttttttttggggggggccggttttaggtttttggtttttaaaaccgggcctttttatggggacccccttgcccaaaatttgtccccggatttttgggcccccttaaaaagtttaattggga

SEQ ID NO: 715049 - DNA, 1410 bp, Homo sapiens
agcgggtgttcctggaatggctggtttgaagtgcggtgccggggtggggtgtgaggctcagcagagcccggtggcaacatgagcctgaggggctgccagtgcgcgaagggtgggttcacgtgaggaagctgggggtacgctgggcagttttaagagcacccagtcagtggaaacctgagggctgggcttccttggctatgcctcgctgagcttcttcattggtctctgctggctgaccttgagtgttgcctaagaaatggggtacccgggacctacctgagggaagaggtccccaagtaacctggatggaggcgaaccaactgtgaatatttggcagatcttgactgagtgtggaaaaaagcccaagaggtcgactaaacccgtatatacgatcagcgtaaacttatgcggcttacacactatcaccaagggaagccccctggccgaagtgcagcagtctgtaggacacttgtggggcaaacccattatgggacagggtggacttgaagaaaaggtgaattgcactcactatggcgaaaagattgcattgacaacacgtccatccgtgcaacataattagaatgtccggaaattggtcaaggcgcctaaacgaattggcaaagagtacaccaagcaaaatgtggaaggggatatgacatcaattgacaagacgaacagcatatctaatacaaggtttaacgcagcgaagacgcgcgagacagaacagggaatggcctcgacggaaacgagcaaacgaaggcacttattagggcacaactagggttacgccaaaacaaaggcgcacccacctggcaaaacatggccatgaaacaacacattgaaacccgagaaaactggacagcagaagatgatcgtggccgcgaaaagagaccttagaccacaagtaaaacgcatgtcaccatagagcacagagcacagaaacgcacgtacgcgagtcagacgacaagccgacaagaagaaacaagcccacagagcaagacactaaccacaaacacgaacgggggcatcgaaggaacaacgaacgagagaagaccagtagacagcagcggacacagaaatttgaccagcatgtaaatataacgaacaaacgtaggggtcacaacaacaggtgaacaatgaccaacaaagacggagcaacacgaaaacctagacagaacaactacaaatagagacaacaaaaacaaactaaagaaaggcacagaagaatgaataggaaaacaccaaagcaagaataccaaaagaaacaatgaataaaaaagagaaaaaaaaaaataaaaaaaacacaagaacagacaaaagcagaaactaaccagcaagaaaatagacaaaacgaaaaaaaaagaaaaggaagagaagaggtaaaaaataagaaaaaagaaaagtgaagag

SEQ ID NO: 715050 - DNA, 122 bp, Homo sapiens
tttttaaacccctttttaaaaaaaagggttagggttaacgggggcttaaaaaagatttttttttttacccatttccccctccccgggcgggatgtttggaattggtcataaaacatttccca

SEQ ID NO: 715051 - DNA, 284 bp, Homo sapiens
gctcttgtgagactccccaccgtttgatcttcgtcacctagtcaaatcttcattcgcatcatcgccgcccagcttctacccttgagtgcatagccctcaggactgaacgcactcatgtacaaagacctgaagttccccgttctgatcgtgcaccgcgacatcaaggccgacactgtcgccggtgcagtatttaaagcgcttgcgggttgttgaaggcgcagcagttgctgctggtggaaggcttgggcgtggcgcaggcggcgcacaacgtgggcacggagagc

SEQ ID NO: 715052 - DNA, 279 bp, Homo sapiens
tggactctgagctggcgatgaggtgtgctccggtggaagcaagggagcccagcacggagccatggccaagtacagtggtagcagttaggactgacacattgctgctgacaggatactcgcagcgccgtctacgtctctcgcacagcccatgaagcatataggagcctcaagtaacaacaacgtttttcaaagcctaccaaacatctgcccttcagtggtgccctaataatagcaggtgggtttgaatcccaaaatgacaacaacgggacagcagcctat

SEQ ID NO: 715053 - DNA, 831 bp, Homo sapiens
ggatcctgggacctggaaggcctttagtctttcaggtgcgatggggtgctacatgggaaagaaaagcaagcggtagctgaagacttcttcagaggatgaggaggagtatgtggtggtgaaggtgctcgacaggcgcgtgactgagggacaagtggcatatctactgaagtggagagggcttttctgaggagcacaatacttgggaacctgagaaaaacttggattgccctgagctaatttctgaattgtatgaaagaagtataagatcgatgaaggagggtgagaataataaagcccagggagaagtcagaaagtaacaagaggaaatccaatgtgctcaaacagtgccgatgacatcaaatctaaataacaaagagagagcagagcaatgatatcgctcggggcgtttgagagaggcactggaagccagaaaagatcattggggcaaccagattcctgtggttgattgtaaggatcctaaggtgacaagttggaagagacacaagatgaagctgacctggtttcttgcaaaatagaagctaatgtgaaatgtccacaaattgtgatagcgctgttatgaagagagactgagcatggaattgcatatcctgaggatgcggaataacatgagagagagagaaacagcaaagagcttaacgggaggggatggcctctgtcatgactctttggatcgttaatagattcacctgcctgctccgtctcttttttagccacccttttcagtctaaacacatcctttaccaatgtgcttttccatgtgcccacaatgagaaagaagctgaaaaaaacagagggggcggcaaaaaatct

SEQ ID NO: 715054 - DNA, 298 bp, Homo sapiens
ttttatggggaaaaaaaaaaaggaaaataaggtttggagagctttcccaaggagtttccccccctttttgtttgttgataagcaaatttttgatttccccttttccaaaagtaaaagaccccagcagggccttttgtttgcccccccggaaaagaaacttccaaaaaaaaggggatttgaaagggagagttcatgacaacaacccgttttccctttcatttggattttatccccgggacccccacttggggggttgttttgtttttccaagaaaaaaaaaaacggggggtttttttca

SEQ ID NO: 715055 - DNA, 393 bp, Homo sapiens
ggctcactgcagcagcctcagcctcctgagtagctgggactataggtatgggccaccacgcctggctaatttgttttttttttttgacggatggggtctaggcatgtagtccaggctggtctcaaaatcctgggtaacatagtgagacccctgtctctacaaaaaatgtaaaaattagctaggcatggtggtacacacctgtggtcccagctacttgggaagctgaggtggaaggattgctttagagcccaggaggtcaaggcagcagtgagctgtgttcatgccactgcactccagcctgggcaacagagtgacatcctgtctcaaaaacaaaaacaaaaacaaaattgttcagcaacttttttggccaaagcagaaatttaaaaaataacc

SEQ ID NO: 715056 - DNA, 584 bp, Homo sapiens
  misc_feature (1)..(1): n is a, c, g, or t
ngccgggcacgggattgccgccgcggcgacagcatgagtgatcagcagctggactgtgccttggacctaatgaggcgcctgcctccccagcaaatcgagaaaaacctcagcgacctgatcgacctggtccccagtctatgtgaggatctcctgtcttacagttgaccagaccactgaaaattgccagagacaaggtggtgtggaaaggattacctttatgtgtgactacaacagagatggggactcctatagtgtcaccatggagtaacaagtatgaccctaccctatggaggatggggccatgccgtcatgactcggctgagaaagctggaggtgtgacgccaacaatagcctttgaacagctatcgagacctgtatatatgaagagtggacgtctcatctgtctaacctctgggatactggaatcatgggtaaagcttggagtgatcctcattacaagaaggctgtgtagatggatcaaagaagatcaaagtgcttgcttgggataccataccacgtggtaaaaagtgcaggagaaatccacgcggacgcagcgcacacatacaagttgaactcccacggtg

SEQ ID NO: 715057 - DNA, 609 bp, Homo sapiens
tgtcacaagtagtacgtacagttgctcggagtcatgattgtgttgactttgaggctttatgcgagtgtttctcaggttcatcgcattgacatctttgtctacaggtaagtgtctctcaatgttcaagtacatgacatcctcttaggtgcactggtcagtcatgtacactgtcacagcgttgtcttgctcgtagattgtcacgtcagcatctttcatatcgtattagtctcactttgtgaagagcatgtcttacgcgctgctgtgccgtaaggtatcggtcataatcagaatgtcatacgtggggctttggcagtcatatcatgcctgttcatagtttaaggatggttaccctgctccacacaggtgatcaggtttggtttatagacgacaatagcgaggaagatcaagtttatgtagttctctagcatcacatcagtatatagatgcgtctgtgcagcgtccaggcaatgcagctactgcagagatgattcaatggccgcatctgtgtgttgccatggttgcttatctaggcgtccagggggtgctggtgtagtagctgtgtccctcataataccggcaggtcacaggaacacacaggctgggcctcgg

SEQ ID NO: 715058 - DNA, 449 bp, Homo sapiens
taaaggaaagtgggggccttccattccctccagaaaatactggttttttttccaccgttgaggcaaatgcgggggggttgatcacctggcaaactttttaggaaacaggaccaccggtctggaaaactgttggcctggcctaacacctggccctgtggtgcaggcaagtgagtggtgacacagtgctggttgggggggggcattttccttcctggcctaaggggcccatctgttcaatgggagtgggacttggtctccaaagttttctactatgaaacttgattttgggagggaaaccttgggggggaggtaaagggccctgacatgaaaaaggtgggtggaacactcggttgtaaggggtttggtagtggggcgctccaggtctttgcagccactctttttttggcagccccaacgcccccaaggcgtttgatttctggttccaccca

SEQ ID NO: 715059 - DNA, 891 bp, Homo sapiens
  misc_feature (8)..(8): n is a, c, g, or t
  misc_feature (106)..(106): n is a, c, g, or t
  misc_feature (145)..(145): n is a, c, g, or t
  misc_feature (151)..(151): n is a, c, g, or t
  misc_feature (212)..(212): n is a, c, g, or t
  misc_feature (215)..(215): n is a, c, g, or t
  misc_feature (226)..(226): n is a, c, g, or t
  misc_feature (257)..(257): n is a, c, g, or t
  misc_feature (265)..(265): n is a, c, g, or t
  misc_feature (404)..(404): n is a, c, g, or t
  misc_feature (408)..(408): n is a, c, g, or t
  misc_feature (410)..(410): n is a, c, g, or t
  misc_feature (510)..(510): n is a, c, g, or t
  misc_feature (512)..(512): n is a, c, g, or t
  misc_feature (538)..(538): n is a, c, g, or t
  misc_feature (562)..(562): n is a, c, g, or t
  misc_feature (671)..(671): n is a, c, g, or t
  misc_feature (762)..(762): n is a, c, g, or t
  misc_feature (765)..(765): n is a, c, g, or t
  misc_feature (785)..(785): n is a, c, g, or t
  misc_feature (880)..(880): n is a, c, g, or t
cggggccncagtctccagtcccgcccaggcgccttttcaggctgcggtgggatttcgttttgcctccggttggggctgctgtttctcttcgccgacgtagactctngaacccctgtggtcttctcttcatctaattaccctgagnggatgnagttttcaagtccttccatagaggaatgtcccaagcctttgagtagggtaagcatcatggntgncagcctcacangattgcttctacttcaggcagtgtcgtgggnatcaggtncccgcccctgcatccctataaatcttctggctacagctcggtggtgtttgtctgcaattccacatactgttactcctttgaccccccgacctttcctgcccttggtaccttcagccgctatgagattacacgcattggncgangnatggagctgattattgggcccatccaggctaatcacacgggtcacaggcctgctactgactcctgtcagctcagatacagatagttctagaaatttgaantngatttgggagggggccatgtacatantgctgctgtctctcacacatcctntgccctggtcaccccctggcccaaaatttgtctactttaaatcgctacttcctctgtaagaaggtaatcggtatataacatcatccgggctacccatggcccagctgtngacttctccatccgcacctacacctatgcagacacccctgatgatttccagttgcacaacttcagcctcccagaggaagataccaagcttnagntacccctgattcaccgagcnctgcagttggcccagcgtcccgtttcactccttgccagcccttggacatcacccactttggctcaagaccaatggagcggtgaatgggaaggggntactcaaggga

SEQ ID NO: 715060 - DNA, 254 bp, Homo sapiens
gctcacacgcgaatcctgtctggatactcatggagctgtgcccacttggcgcagctgaggtcattttagcaagtacggacatccagtttggatctcgcatctttgatacctgtatgcctatcagcttagtacagctcttgcatctctagagagcaaaagatttgtacacagggacattgctgctcggaatgttctggtgtcctcaaatgattgtgtaaaatataggagactttggattatcccgatatatggta

SEQ ID NO: 715061 - DNA, 140 bp, Homo sapiens
  misc_feature (127)..(127): n is a, c, g, or t
agagttcatagctgtgctgacatacacagagatttaaaatactcctccttgtaccatgtgacaggcctgaatttcgagaaaaggatttattcttattctggttctccatttctagtcttaacaaatnggcctctgacaac

SEQ ID NO: 715062 - DNA, 136 bp, Homo sapiens
ggtttagactcacactctcatcggcaggtggtagaagggggtctctcatcggtaatggtaatctcagctctcctaatcccatcacttccccagcccagagaagacattccaccccattcttggtccagtagctgta

SEQ ID NO: 715063 - DNA, 560 bp, Homo sapiens
  misc_feature (24)..(24): n is a, c, g, or t
  misc_feature (41)..(41): n is a, c, g, or t
  misc_feature (70)..(70): n is a, c, g, or t
  misc_feature (72)..(72): n is a, c, g, or t
  misc_feature (74)..(75): n is a, c, g, or t
  misc_feature (80)..(80): n is a, c, g, or t
  misc_feature (85)..(85): n is a, c, g, or t
  misc_feature (92)..(92): n is a, c, g, or t
  misc_feature (108)..(108): n is a, c, g, or t
  misc_feature (114)..(114): n is a, c, g, or t
  misc_feature (178)..(178): n is a, c, g, or t
tttttcctagcttacattcaccanatcgcactggctcctgnactcttttcctatcttcaccacgaactgntncnngctcncttgntcctcantcctagcttcatctanatactngaacctggaatcctgtctgctgctgtcttcctagattcactgaatccacttctgtgtagcaccngggtcagctgtcaattaatgctagtcctcaggatttaaaaaataatcttaactcaaagtccaatgcaaaaacattaagttggtaattactcttgatcttgaattacttccgttacgaaagtccttcacatttttcaaactaagctactatatttaaggccttccaaattcttctaactcttccaaaagccttctgccttagttctgtttaaattacaccagtccttttagtagctttttgatgtgatttgtaaccaacttccccttctagcttcaagtattcttctaaattggttctggtctacgtaaacaccctcatcttctcaagctttaccttctaacttctgcaccaccagaaattaaattgatgggctattaaaata

SEQ ID NO: 715064 - DNA, 110 bp, Homo sapiens
gtagtcggtcacacttctacacgtgacattagctacttgaagaggctatttggtaccttcctgtggttggcccaagccgaaaaaggcggtacccccatttcccccccccc

SEQ ID NO: 715065 - DNA, 442 bp, Homo sapiens
cacgagggtggtgactgaagcgggcacaccgacgtcgacgactcagacactcaaggcatggctcgcgggcttgccagacttcgagctgtcgggacacgaaagtttttccatcccacaatggcgatggactggcggagcggccaaaatcagcgcggcgatgatgcaggcattgcggaacccgatcacgattgaggtaccgaagtccgatgtcgctaaccttgatacggcgaacaagaccctttcgtttaccactgctccgatcgaggaatttttcaacaggtccccaaagatctgcgatgacaacggttgtcaagcttgggaggaggttctgaagcgggccctcaccacgaactcgacacagcattacgaggctatcgaagatacgggcgcgagctacaagataacgttctggcccgactacgaccctgctcgccatatccgg

SEQ ID NO: 715066 - DNA, 881 bp, Homo sapiens
ctctctcagacaccaagcatgcagatccaggcttttctgggaaagtgaggccaccatggctctggcgaagtcatcatatgtaccggctccattcatgcttgatcctgaatacctgctgtgtgcatgggctgaggatccatgcacttcccctgggcaatggaatccacggagacacaaagaaatatccaagcgtgcaagcatcatggactcagcaccagttcccccaagacagccagactcccaccctcactagtcaacccacaatgcattgcaggcgcctggacatcttgcaccaccagggcgctgcgtcggccaaaacccatgctgacacacacatacagggcgcaacagacgcgcccacatggctacgacatgtcccagcaatggtacagataaccccaaagcgcaacacccgggtcaacacgtgacaacgacaaccggggacaagaggacaaaaatgccacacaaaagcaggcaaaacatcccacagcaatgggcaaccatacaaccaggcacatgggacccgcgcctggcacacacacaccgcgccaacacaagagataaacccccacacaacacggtagcacatacacatggacaaccgcagcacccacgacacgagaacgcagcaccacacaaacccaactacgggacgagggcaccatacgggagaacaacgtgggcacaggccccacaactacacacggcacgacaccacagaacacaacaacctaacataggaaaaagacatgtacacacggacagacgacacggggaacgaacataacaactagaaacagcgcgccccaaagacacgaaaaaagacagcgaacagacaacaaacaccacccaccacacgactgacaccactaacacaaccc

SEQ ID NO: 715067 - DNA, 130 bp, Homo sapiens
acccactcggtgcgttctacgagtacaattaggacattagctacacacaagtagtaaaaacccttcctactcagatcgtccttcaatgcctgtgtgtttaagaattgtggagctttcgcttaacgttaat

SEQ ID NO: 715068 - DNA, 517 bp, Homo sapiens
actgcgcttcaacctgggcaacagagcaagactccctttaaaaaaaaataaaaaaaatattggcaggccgaggcaggcggatcacgagttcaagagatcgagaacatcctggccaacatggtgaaaccctgtctctattaaaaatacaaaaattagctggtcatggtggtgggtgcctgtagtcccagctacgcgggaggctgaggcaggagaagtgcttgaacccgcgaggcggaggttgcagagagctgagatcgctccactgcattctagcctggcgacagagcaagaatccatctcaaaaataagtaaataaacaaataattggatgtggtggtgtgcgcctgtagtcccagctaccgaggaggctaggatgggaggatcatttgaagtcaggagtcttcagactgcagggaagtatgatcttgcccctgcactccagcctggacaacagaacaagacactatcttcttaaaaaaaaaaattaactaatacagatcccaccataacaatcatt

SEQ ID NO: 715069 - DNA, 162 bp, Homo sapiens
ggtaaaataaccccttattagagagacagtgttatatgtctttacaaaattatatagggtccattgggattgtcttgatttggtcattttcccaccctagtacttggattggatagtcctccatgccatgcctagcaatagctctataatgccaccagggga

SEQ ID NO: 715070 - DNA, 119 bp, Homo sapiens
ctatgcctcacagatattctaactttaattttatttgtaggagacagggtctggttctggtcacccaggcgggaaggcgagggggcgtgatcccggctcatggcaacctccgtctccca

SEQ ID NO: 715071 - DNA, 149 bp, Homo sapiens
ccggcatgccgagtcagggagaatcatctgaggccatggagttatcagacctagctctgtgctaccatgttagaactgttcttctactcttcatattttaaaactaaagctgggtgtggtaagcatgtgcctattgctcccagctatta

SEQ ID NO: 715072 - DNA, 538 bp, Homo sapiens
gtattggagcttagtgagttcaatgctgtgcagcttcataaaggaccatgactggtgctgttcgtacatgatgaggaggaaggagagctggatccggccatagagctcatccagccaatcgcagaatagatcatggctaaatacaaagccaaggaggaggagacgccactgctcttttttgtagctggagaggatgatatgagcgattccatgcgggactacactaacctgcctgaggctgcacctctcctcacattctggaacatgttggctcgcgccaaatacgttaaagatgttgaagagatcacaccggctgtggtagaacagtttgttagtgactttctagcagaaaagctcaagccagagcccatctgaagtcctggactgcactaaaccctcccacagccgttacccgaacctccatctggcccttggcctccaggcgtgcactctcttctcttcctgtcagactgtttgaacagaagcatactttgtattgacatttcacttctttttaaacgtgcccctccatcacaaa

SEQ ID NO: 715073 - DNA, 129 bp, Homo sapiens
gtgtgaagcagcctcctcggcagcctgcagacagtgagctgccacaggagaagaggcacatgaagaagatggcacttggcaaaaggcatgggggtcaaatcaccttccaggcccacggcaaaaggtgtg

SEQ ID NO: 715074 - DNA, 114 bp, Homo sapiens
agacccactgtacgttcggctccatcaaatccaaggcaaggctccaggttctgaagtgctgctgccgcagggggttctcacagctgtcacttctgtatgtgaagcgaagctatt

SEQ ID NO: 715075 - DNA, 343 bp, Homo sapiens
tgcgatgacacgagatctagcagtgaaagtgccatactgtgcactcatgtgtaggagggtggaggtgagagtctgttctgtacagctttctgtagtgtgtcagaaagagtcacaagcccaagaattagtctaaactgtgtcgtccagagcaggtgaccttagcagatacatagaaatagccctcaaacgacctggctgtgtggatgatgaaaagtacagcaggaaggaggatgtcttagtgaacgcatcatcctgtgagataaagtactttacatacagcccgtttgtttggccaggcaaactctatggagacgcagactacttggaatagctgctgtagttg

SEQ ID NO: 715076 - DNA, 1080 bp, Homo sapiens
aataaacaaacatcctttgggaggtaaatcaaacctctctgttttattatcacacactgtcaccactctgccgcacaccaatctctcaaacaaaaaagtggggttccccacactatcatttgttctttgatactgaccctccccacacccttcattatcattctttgttttttttacccgcgcgctttttttctttagaaaaagaaaacatgactatgcccgtgtgctactacgcatgttttgtcccacgcgcaaaacatactaccacacagagatataagagagagatatatgtgggcgagatatcactcatatcacccctcagattaggatataaaatagatgggcccccccaacagtgcacgacacccacacgtgtgtgttgtatatgcgcctttccccctccctccatctctctctcccactctttaattattttctcctctataaagacacacacccgagaataaattcactccggccgcaataataacactcccccacaccaccccctcctctctgccacacacacacttgagcgccacacacacactgtgtgtgtcatcacagagactctttatacacacacccggggtgtctcctctcgataaagagaaggcggcacacaaatacccactctctgtccccacacatagttgtgcgtgttgtgcgctctctcacacaggtggatagacaacacacacttctctctctctccacaggggcttttcatatcccctcacccacctcgtttatattagactctctccccaccctagagaaaacactccagggcgagataggcacacaactcccacatttgtgttttccaccacacgatgtttttgtcacacgtgtgtctctcctgcgcctctttatagaaaaaatatcccttctttggagaaaatttgttaaaccgcaaatttcttgaagcagtgtgtggtcaagaagagaaagttagtaaaaaatgtatggtgggctcctaataaacattttttaaaaaaaaactgtgggaaaaaatccccccttttttcaaaaaactttttgttacaatacccccccataaaaatatatacaata

SEQ ID NO: 715077 - DNA, 354 bp, Homo sapiens
ttttaaaaaaaaaggggaaaaaaatgatttgccgttttttgtaatgtccgataccccccataaaatatattgggctgttaaactcttgaatccccgtggaaatttccctttgaagaccacctcccttttaagggttttccgccaaaaaaattccgtagattttctttaaaagaaaaccgttaaaaaagcccccccctatggccctggatatattggaaacctgttttttctgttttatgctcttggggaatctacctgacctcctttttctcttggaaaagtggggggaaaaccagtatttttttaaaaaccttgtaaataaagttttggggctaaaatgccccttccctttta

SEQ ID NO: 715078 - DNA, 842 bp, Homo sapiens
tgaaaaagccagctgactttatgtgctctgtggcggcagggggctcaggagctcttggttggggcgggtccgtttcctcttcaccatcacaggcttctaggctggcgcaagagatggcagctaggccctagcgagataggactagccaatagcagcaaggtcagagaggcaggaactatggtactatagcagagactcaggtagtctagatagctagctagagctgtaggccgcagacgcaattctatagtcagatggtgtggctccagccacatatatagagatgagcttgtgcactaggctatctcctcgctatagcgctctgagaaatcctccagcgatataaaatagacccaacctaacgagaaacccctttttagcccagatcaagagaatcgcacaagtgctctcccaaacagcccacaacagagtctattagacagagatagacatatcaaaagtcccatgtaaagataacgcgaggagaaatagagacattttgcggcggcgcgcccttatcaaaaggtataactagcggggaggcctcccaaggggtgcgaaaggataagagatccatcggctataattctcccctcatcattttagaattccagagagaacacaatcttgagaggaacgccaatagtttccaccccagacaaaacaagaacgccaatcacccatattgtgagggaaaagattttggcgcggccaaaagaacatatttgagggccgagaggagagtggcctccccatctcacacgagaacaatgttgggggcaaggaacctctttattgtggggaaatccccacagaatgaggtgttttttgagcaccccaaa

SEQ ID NO: 715079 - DNA, 289 bp, Homo sapiens
ccgttaggcagatcgccctgtaatgtgattatcaaagatcgtaattatcacaaaaacgttagatctgcatagccatagatgcaatacactaggctaatatgggaagaagacatattagatccaaagagcataagttatcctgataacagaaatgatagacatacgttggacaatactacataggtcacacttggcagacacaacaagagaacataataagctggtatcatcaaacatctaatgataacagcagcagcacaataacggcaacacgcacaaacactactgg

SEQ ID NO: 715080 - DNA, 114 bp, Homo sapiens
tccgtttgcgacgactgcttgcgcacagaacaggaagatgcgtgctgtcgccaagagcaaactggggagctcaacaaggagatggcagcagaaaaggccaaagcagtcgtcgaa

SEQ ID NO: 715081 - DNA, 461 bp, Homo sapiens
ttacgagagcaacaagaagactcctcaggcgtgtgctggatgtcctagagtgctacgactccaacacagtgaagcagaaatgtctgagctttactcctcctgagaaagatggcttcccttctggaacagcagcactgaaggcccagggaccagaagcgcccgcagtactgagcagaggaggaggatgatgatgaagagactgctcctccgcgttatggccccgcgaccggatcatacgaactcagtttacacacggtcatgtaagttaaacacctgttcctggcaccagttggtgattcacatgtagatggtgctgccaagtcttccgacaaacagaaaaagaagactaagatgacagatgaagagattatggagaaacttaagaactatcgtgagcataggtgacccatagaaaaaatatacaagatatgaaaaaattggacaaggggcttctggtacag

SEQ ID NO: 715082 - DNA, 1143 bp, Homo sapiens
tctgccggatgcgacaatactacttcgtgtttcaatatcgcgtagtttgctcgggtgtagtgtgctgctgtctacctcgagtgaccgtccgctagctttgttgtgtctctgtgctctcttcgtacctcgttcgtctccggaaaatgtctctgtgttctcctttctttctgtgtgcacccccgctgttgtggttgcccccagtttttcttggggacaccaacatggggccgccacagcgatgcgccagtccccatgccttctccccgagagcctttgtccttatatggccaacaccccctagtgcccgaagccccattccggggcccccttggtacacacctcccgctttggggaactgtctcctcaatccggggattggccttgtgttccccaggggccctccctggagattcaggacaagtttcgtgcccataaggtccccagcctgtgctgtccccgtgtctggtgccccttgccgccatgtgaagtctcctgtgtcccgccccgaacactggtctcggcccgagtagacctccctgttcccggctttaggtatccccccttaagtctcccggggcccccttggaatcctgagtgatgtgcacgctgatccagactggaggaccaagtgggagcccgcggagcccccctgctgacactgctccacatctcccccttttcctttgggctggtcactccccccggtgttcgaccatggccgcactttaccaccctgaagtgcttgatatccccgagggaactctgcattctcgcttcctggagggtgtcccccatgttgcccgtgtctgtctgccgattggctaaccccacctgttgcactccgtatcccccttctatcactccaccgggtaccaacgaggtcctggccttgtctgtggagaccggattatccccttcccccttgctgaaaaggtccaggcctttttggctgagtccctctgcctttgtggctgctgcccctgtggctgctgcccccccacgctgctcctgctgctgctgcacgcccccgcttaggttgagccccggaagagtcggagggaggtcggaccgaaggatatatgggaatttggtctctttgactaatcccccaaaagccacccacttagcccgttttatttgcca

SEQ ID NO: 715083 - DNA, 595 bp, Homo sapiens
ttggctcggtcccaggtttgtcgttggtggtgtttgcctggcagtgggacagtgggcaggtgaacattgctcacggtcagtgtatgctatagtacgtaggcatgtggaagatgtcttggggtgctgccctgtgaggtggtgtggcatccctcctgccgctgcctgctggggcctcggtctgtggcttacagctcggtgtccatcacgcggtaagctggtctgcctgagtcaggcttcgacgaataccgaaggctggcctccttttgtagctgaatctccttttactgcaaatatggaagtagtgtacagagaagtctgtggatcctgctcccccagactgatgaagaatggatgtttcatggcatcctctgcggagatccgatttcgaccctcaaactgcaacagcttggttgaggagtgtcggccccgtcgctatcaagtcggggtgcgtggctcaaaagggcctcggctcggtacttgcggtagttgtatgtcttgaactcctcgttggacaggatgcctggccacgtctcctcagttggggttcctaagatacggaagatgattctagctgtcctccaccgtggagccggaa

SEQ ID NO: 715084 - DNA, 775 bp, Homo sapiens
ggtatgacttaagaggtcaggtttcttggaggaggcaaatcttatagaaatgataggagttcgctgggtaaagagtggaactttagagggagcaggtaagggagagcagaaaccaagttttcaggaacagtcatgaaggtctgagtggcatatgcaccttttctacacatctgtgttctagagactaaaacagaaacagctggctagggaggcagtagcctgactgcagagggccttgcttattatgctgggccaagaactcagtatttgactccaggcaatcaggaactactgaaagatgttaaggagtggagggatggtgacaagcagaaatgtatgtgaggatgaccaccttgtaggcatttgaaagatggatttgaatgggctgagactgggagcaggagaccaggaagctcttttgtcaatgatgcagataagagatgatgggggtcggaagaaagaaagagacaggtaagaaatatttaggaggtaaaatggcaaggctgggtgattatgtgtgggaagagaaaaggagggacagagtcacagttaacaccagataagagcttaggtgatttgactaggtcactgggctgcaggcaggggccaggttggggtatggaggcagtggggtcatgagtcacaaccaagcagtgggtgtgttccaccctccgtgggatacaccggtggagatggcagtgggaactgattctcagttcaggagaaagtctgatccatttggtagcatagtacatggtagtctcaaaccaggttg

SEQ ID NO: 715085 - DNA, 286 bp, Homo sapiens
gtctttatatgcatcctaaccaggagcttcgtctgtagttgaacatctgccttgctggctgcagacgcctctgtatgcattgacttgaggcttctgcctctcgagcttgtagctttcagaagcaataagtgaaggcagggaacgtatatatctagcacagggcttaaccctgttttccagccaatatcaggacaatgtccttgttatagctacgggcccaagactacattcactataaacacattatacaaacgtcacctttttacatctctgacataattctcaa

SEQ ID NO: 715086 - DNA, 380 bp, Homo sapiens
cccataaataaacattttctaggtaaatttgttctttggtgttaataaatttttcgtcttgaactacaaaactttttttccctctcttttaagggtatttggagcaaagtacatttataaatctctattagtttgctagggctgctacaacaaaatagcaatagaaatgtattttcttccagttctgcaggctggcagtccaagatctagggctggcagaattggtttactatgaggtctttctccatggcttgcagagggctgcatacttgctgcatcttcacaagagcttgttcctccatgtacatgtgcccttggtgtttctctgtacattttagatgagaatatgatattttaagtcctgcctcttaggcataaac

SEQ ID NO: 715087 - DNA, 1129 bp, Homo sapiens
actataacgggccatttggtagcgaggccatgggtggcgcggggcctccagcgccggctctgggccgaggcagccagagcgcggaagaggcctggaaatccacgcggattcccggagacggcgcctctgctctgcgtggttcgtggcgaggaagtccacccactgcccgcggcgccactgaccatgatcggccaccaatgacatctactgccagggacgcccatggtccatggggcagtcactgaggagacacaggctgacgaggaagctggtggtgttgatcactcctcagagtgtccagcctgctcagggtcatcctctcgcaggtgttcgatgaagtcacttgaagatgaatctaatcgctagtgccgactacatccacctggaactttctgaagagacctgcagctcggagcatcacacactcaccaagcttcacatgtaggactctcaactcactacacagcaagtgatgtcttcctggatgcagacacatctggtgcatgttcaaatggtagactgaagcatgatttgacagagggagaagatacatggcggccacccgtgaaccacgagaatgtgcggatatggattaaatagggcgaggagtaaggaataaccaaccattcaatacatacaaagggcaataaaaatcgtgctatgatgaagaacatggtaaaacgggaagctatattgaacgggggcagaacaaaaggcttaatgaaatagtaactcaaggaccatgatcgaccacagaaataaacaagaaccatacaggcaagcgtacaaacgcgagtcggaaacgaaccgacacgtcaagccagggccacaaccgaaagggccagggaaaggcgaccccaagaggcagcacgaaaccatggacaccagcaaaacccacacgacacaggaggaacaggatacgaccactgacgaaacagagagaaatactcagatgtggggcgagattcacaacaggtgtagcgagatacaatgcaaaggggcaaggagattggtggccttggcagatttggggacgatgaacaccgtgtcctcagcggatatacacgttgacgtaaacgggctaaaaacgaacggacagtagacaggaggatttgaacagagaaaacaa

SEQ ID NO: 715088 - DNA, 232 bp, Homo sapiens
gattgtaagtgcctggcacatggtgaggttggtgcaccaaagtattataaaaaacaatagagcggctgggtgtggtggctcacgcctgtaatcccagcacttcgggaggcaaggtgggtggatcacttgaggtcaagacttcgagaccagcctggccaacatggtgaaaccccatctccactaaaaatacaaaaattagccgggcatggtggcatgcacctgtagtcccagc

SEQ ID NO: 715089 - DNA, 744 bp, Homo sapiens
gggttggtggatgatcttgagctcctcaggaacgatatggctggttctctggtaggctgagtgcctgtttgctggtgccctagaggtcgagctctgttgcttcgaactccagtggtcagacctgttcatatctcagcatttcttcaggaccgacctattccagtaatggtgtggagtgcagcatatactcttgtctccgatccaccattctggactccaaggctgtatctctccattggactagcgagagggttgctcagtgttgttgctcctgggtctgacttccggctgcttatttggaagtccttgctctgcgatggactattctcctggtctgcacgtcctcaagtcttcatggtcacatggcggccttggacaagttgttcactgactatgttcatggaggatgccattgctagaaagctgctcataagctagggcatttatggtaatctttcatgctttaacctttgctgggcttttgctatttcaactatcacgatgtgggcatctgctaacgtctgttgccaatgtctgtgtgaatgcatctgactctttttgacttcatactttgaagaattgatgtatgcctctttgcctctgctttgtcaatgccatttaagctcacgaataaggaaagaccatacagtatatagtcattgggtggacaagcttcttctcttaatcacaagatgatttcaagcaatttaatccttgaggaaacaggttggaagacggacttat

SEQ ID NO: 715090 - DNA, 443 bp, Homo sapiens
agttctgggggagcccagcaagtggctccacctgactcacactctgggtggggcaggtgctgaagctgcatggctggccacgaacctttgtactgtcaactctggcttcctttacaagaaactaggagaacttctagcacattccttccttaacctgctctctcaaaaccatcctgacccccatggcccctcctggaaacattgtactcagaaaagcagggaccaccagtggctgtcacagtgtttggggaaaaaaggaggtgccaagtcagcaagaaaacaaatgtccgctggtcccgcccaagcagggtgtggctagtcccgggggatgttggggggcgggaactgcaggtcggagggctccacaccccagatctcccgtgcatatccgtgatggtccggtcactggagacttgcccgagcaggcgatgttctgattactt

SEQ ID NO: 715091 - DNA, 1492 bp, Homo sapiens
  misc_feature (430)..(430): n is a, c, g, or t
  misc_feature (433)..(433): n is a, c, g, or t
  misc_feature (447)..(447): n is a, c, g, or t
  misc_feature (628)..(628): n is a, c, g, or t
ggggagcttgtgcagaagttcacatgccagtgcagtgaatccaggtagttggggagatgatcatgacagtgaccaactccaaagaggatcgccaaggggccgtgtaactgcagaagtccgtgtcgaactgcgctcctgctcaaagatcgaattcaagattgggctccgctgaccgtagtctcttgcagggcagtgcaatgctggctccatgcgccaatggattggagtgccgtctagtgggtgtcatcattcgttctgggggtgatgactggagatgatagccttcagtcgctgcaccatggttatggtgtgagtgcctgttgacatctggtgcctaagcatcgaaggcatgtggtttgcccctcatttgaccgaatacctgaagtcgtcgtagtggcacgaagtttcaccaaaccaaggctacccatcnagnaaatatgatacagntaggatagctggtgatgaacccagaggacctcatagcttgtgctcaggcctggaagccacactctttcctaagaaaagaccccaccgtttggggccacacaaagtttaaaggcatggggtgcgcgctgaggtcgaacacgcgccgctttccggggtcaaaacccagttgatttatgtgccnttacccacgaagtaacaccccttcactccggtcgggatggtttcaagggccatctcaagaggctaggctttctggaaggggacccacccacgggtaactctagaacagacgtttatgtcaggagagaggtgcccccttagacattaagttataaagacagaccccccaacacagacccggtgggggaaggttcctggttaacccggcttgtgccctttatggaaaaccttttcgtaagcaatggaaaaggcccaaaatggcttcccccctttgggaagccccccttggttggggcaaagcttcctcaaggcgtttttgcaatggtccggtagttaaacttggtgccccaaaggttcactgtgggttctcttccatcaggcccttcaagcttttttcacaatccaaatggttggttctaaggaacgtctgttgttgaacgcccctccaggttgttcatacttctcccgggggagaggttgggggccacaaaggggccttaaggaattccccgccgggttggggttttattggtggcttccaaaataataaacaaaaaaggccctttcaaggttggaaccccccatttgcaaacacacaaccacaccacgagacacagaagacccaccgacacaccagaacgcccctcggcgggggacacctcccaacagagggaggggaggtggcgcggcgaacaacaacagcaggggtacacacgacccaaccgtggcgccccagatgggggctcacaagaagggtgtgtgccccagagaccccccacagttttggttgtgtgctcaccaccgccgcggcaacaacctcgcgcccgaggaccccccccacaattgaagggcgcgacgggacaaa

SEQ ID NO: 715092 - DNA, 289 bp, Homo sapiens
taaaggagacagagtctggctctgtggcccaggctggggtgcaggggcacaatcaggctctctgcagcctcaccctccggggctcaagcaatcctcctacctcagcctcctgagtagctgggaacaggcacacgccaccacacccagctgatttttttattttaatttttggtagagatggagtctcagtatgttgcccaagctgccctcgaactccttcagagaatttacggtgcttggtctcaggtgtgcagagcagcacagggttacggtagcacaatctggggag

SEQ ID NO: 715093 - DNA, 1437 bp, Homo sapiens
  misc_feature (347)..(347): n is a, c, g, or t
  misc_feature (681)..(682): n is a, c, g, or t
tggtctctattcttgttctcaaaagatggtggtaagaaaaaaggtagagacaaaaaaaaaaaaagaaaaaacgcagagagggcaagagggcggagcatgaacccaaagaaagcaacaggacggtgaaacatccgcgttaaagtagggaacccttggcagcggcacgcttctctctttggagaaacctggggagaacccctaagtgtcaaccctcggggtgtgaaaatattctcttcacccggggtatattagaggttgtgggtggctctctcctatacaaaatattttcaacctctaagagcccagagtgtggctctctgggcgaggggccctctcacacaatatcncccagagagacgagtctctcttgtgaaacacccatcgtgcgaggggaggggcaccaatacaagagagagagactatatatctctctctagagtccgccacagagagaccatgttgtgcgtcggaggagagcctcctttctcatataaaaagagagcgtcgtcgcgcagttatccacgagttacgcggcgtcatatgtgggaggggcgaaaatagtgtggtgctctatagtagaaacagcgcgagtgtcgtgcccgacaataatagagcagccctccttttatatatatgtctcgttctaaactcctcccccatctctgaggggtgggtcacaanngccacatatatatacttcgcgggtgataccctattattattattttcacaaaagagtgtgtgcgccatatatgttgtggggggtgtccccccccatatattatgtagtagtgtggcgagacacagagtagtgtagaatctttttgtcacgcgaggcgaagaaaaaacaccccagcgtggggtgttgcgcggtgtccacccattgttttacacacgagagcagaggttggaggacaagagtggtcttcccttaacaaacacacatctttttcgagagcagacccactatcaaattatttattgcccgaccccagcaggagagggtctcccccccagggatttagaagcctccccagtgctgagacaagagaagatttttcaaggcggggtgctttcaggaaaatacaaaatgcccgccggctatataattcacccacgagagcggcgtcggatgagaacgccctcataataacaaaaagtgagggaaaccacacacagcaggaacatcactgatcccccccggtggagagcaagagggaggggggggaacactcccgcccaagataagctagcgcgggcggagacattagttgccgcaaacaacacatcgtcccaggagaataaacgacagagcggacgtaagaaaaagtgcgcgtgatcacacgcgggagacaaacaaatcacaagagggggggcacaacttattataaagcaccacagcgtggcgagccaatatggagtgtgtgtgcgacccgc

SEQ ID NO: 715094 - DNA, 322 bp, Homo sapiens
tgtgtggtgttatgcctagaggtaatgataagtccgtttagtatgtttgtaaaaaagaatgtgttcttcaaaattgttaaataatcacacgattatcgatgaatttacttgacaatgtcatatatgtgctagacataggatatttgcataaaatatgataggtttaggctgcaagattgattcgaagtatgttccaactattgtttgcttcgaattgactcttatgtgatcatctcgaggtatgcttcatactttatttgccccgggaattatgtgcgagcatactaaaaaatggttagaaactgcataacaaccacacaat

SEQ ID NO: 715095 - DNA, 475 bp, Homo sapiens
gtcctacaaagagaggtggatttgccgataaggggggggttaattgaagattttcccaattttgaggggaaacccaagaccagacgctgcgcgaaaacccatttcaagataaaattaatcggggggagatgaaattttttcccccaaaactttttggggctaacggaaagcgcccagggttagtggggataccggaagggaaacaccacatgaaacatcctatcattgggagggtcattcatttctctaaaagcaggaaaattaaaaattttcaggatttgagaagcctttggtttgaagggaaaagtcctaaaagtagaagaaccctccataaacctggaggggtaaaatggaggcccccccccctaccacacatttgaagaaccgggataaataaaatttagacaaaaaaggaaggaattgaaccccccaaagggggttttaagccaaccccagggcctccatgattttttta

SEQ ID NO: 715096 - DNA, 866 bp, Homo sapiens
ttggcacgaggactggacctggagttataactgctccactgactgatagagctgacctggcctgaccattgctgccctggatgtttgcccgcgggccgacgccgtactggagtgttgcgcctcgtgtggctgcctgcgctgctcctgctgctcatccctggtggccgccgcgcatgtgatgcctcccgggagctgccgtgtgattcctgaacactcgttaccacatgtcttgcaatccaatgtgctatgcttatcagcagtggtgctacagtgaattagtgacctatcatatttgctatgttctacagcaacacaaacaaaaccttgtgcaagcagtgcctgaacgaacgtctccttgctctattggtagcaaccactaaccaagtgctatgctctagtgcactacccagctatacaaaagcgtctttagccacccggcctataccctatatgctacaactctggagctactagcaccgcatgggcgagatacaagtatagcgcgtagaacctatactgcagagccgctagatacatacaacacattgctacgcgataacgctcagcggtccgaaacccctccccttccttgcgtgcatttgccccactcttgccttgctttacttgctttggcttcgcaagctggagtgcaaccgacctgcactccccgggaacgccccgggcacaagctgatgcttgacctcgcagacacccgccccactagctgttcaaacccgggcgagcgaagatgtgcggactacctggcctcggaacgaacaccggaacagcaagacatgacagaccaacaacacttattcaaacatcagaaccacaaactattgccctgtttacaacaaacaaaaccg

SEQ ID NO: 715097 - DNA, 345 bp, Homo sapiens
  misc_feature (184)..(184): n is a, c, g, or t
  misc_feature (196)..(197): n is a, c, g, or t
  misc_feature (227)..(227): n is a, c, g, or t
  misc_feature (248)..(249): n is a, c, g, or t
catcgacggttccctccagtgttaatctctgatgataacgaagggatgagctagacttaaaggctgtgcacattcattacataagtaggacttctttctgagatgaattttctgacttccagaaagggaagtgctgtaactggatgccttcctgcctggatagtatttatggggatactcttgngcatggattttnngatgtataaaaagcccagaccttcgactgnaggatttaccacattctttanntctatagcatttctccacagtatgggtccttaaatgcttacaaagggatgcactatggctgaaggctttcccacattctttacatatatagggttt

SEQ ID NO: 715098 - DNA, 227 bp, Homo sapiens
ggaagcccagatatgacagagacgcaaggcaggctgtacgctgggttcccgaaagaaagaagatccgggtgccatactggagaaatatccagactcagtctcttgtcttctctctgtaggtctgtcttattcttgtcctttgccaggcaacttaggctgtgtgtctggatcccatgcatcagataaccaccacatcactcctgtgatgacccgagtctggtcatctg

SEQ ID NO: 715099 - DNA, 425 bp, Homo sapiens
atgctcaggatgaaaggcgacactactgtcatactcaccaacacctggctggacgaccgtgctgagagagatggcctggcccagctgatgtgtgagctgaagatgcactttgacttcctgatagagtcgtgtcaagtgggaatggtcaaacctgaaccttatatctacaagtttctgctggacaccctgaatgccagccccagtgaggacggttatttggatgacatctcagctaatctgaagccagcccgtgacttgggaatggtcaccattctggttcaggacactgacacgtgcctgaaagaactggagaaagtgaccggaatacagcttcttaataccccggtcactctgccgacctcttgcaattcgtgacatgagccatgggtacctgacagtgctcacggtccgtctgcatattgtgg

SEQ ID NO: 715100 - DNA, 358 bp, Homo sapiens
  misc_feature (166)..(166): n is a, c, g, or t
  misc_feature (186)..(186): n is a, c, g, or t
  misc_feature (260)..(260): n is a, c, g, or t
  misc_feature (282)..(282): n is a, c, g, or t
  misc_feature (298)..(298): n is a, c, g, or t
gcagcagctgtcgctggccgtgccccaggcccctcagctttgaggcgctgctcgccaggtggggggcatgggggcggcagagctgcagctcggcctctgctgcctgccggtgctcttcgtggctctgggcatggctcggaccccatcttcacgctggcgcccccgntgcattgccactacggggcnttcccccctaatgcctctggtgggagcagcgtcccaatgccagcgggtcaggtcgccagcgctgccctagcagnaagcgccgccagccgtgtcgcnaaaaataaaaaacccncgtgcagcggcttcgcccgccggacttcaaccattgctcaaggattgggactataatggc

SEQ ID NO: 715101 - DNA, 1126 bp, Homo sapiens
  misc_feature (140)..(140): n is a, c, g, or t
  misc_feature (270)..(270): n is a, c, g, or t
  misc_feature (278)..(278): n is a, c, g, or t
  misc_feature (539)..(539): n is a, c, g, or t
  misc_feature (542)..(542): n is a, c, g, or t
  misc_feature (577)..(577): n is a, c, g, or t
  misc_feature (639)..(639): n is a, c, g, or t
  misc_feature (646)..(646): n is a, c, g, or t
  misc_feature (656)..(657): n is a, c, g, or t
  misc_feature (710)..(710): n is a, c, g, or t
  misc_feature (717)..(717): n is a, c, g, or t
  misc_feature (721)..(722): n is a, c, g, or t
  misc_feature (724)..(724): n is a, c, g, or t
  misc_feature (734)..(734): n is a, c, g, or t
  misc_feature (757)..(757): n is a, c, g, or t
  misc_feature (768)..(768): n is a, c, g, or t
  misc_feature (792)..(792): n is a, c, g, or t
  misc_feature (827)..(827): n is a, c, g, or t
  misc_feature (832)..(832): n is a, c, g, or t
  misc_feature (836)..(836): n is a, c, g, or t
  misc_feature (863)..(863): n is a, c, g, or t
  misc_feature (865)..(865): n is a, c, g, or t
ggggcgcctagaggatcctctctaatcatcaggcgattcctgcaggttatatgaggggggtgatcttaaaggacattaggatggtgctcagaaatggttaatcatgctgtgtgctagccaggccagctggtaccttcttngccatgagcattcaagggacagctaacctttattgacaatctatattgcaaaagtcaggaaagaggttgtgagcctgattggattaaaagaccctggcaccttcaggtaacctcagcaccgcttcccacnttccactncaacttaagagggttccattggaccagtgtttagggatgtgaaggctgggaaacacttatttgcttcaagagttccacttggctctcccaaataggtacctcaaaaactgttagcaagcggcatttggatgtcttgacaggggctttgcagggatttttagggttttttccacattgtccacattaatggttggcatgattgtgcttgcaggccaagaaatgatcataccccttgccaaaggtaaaaaaaaaaaaaaaaantgngttgaaaattgaagtgacctctttccagctgactngcaggcttatttggtaacctttcctcatccagttttccctgaaaaccggggtttatctctanaatagcngtcaggtttnnagctgagggtaagtatcctagctgagagtttggcatcttggggcggggttcgncggggtngtgnntnggcataaaangtctagtcttggccacagatagngagctacccantaatgagcccatggtttatttcanaagcacatgagggtgtgaaaccactctgtaccttncggtntggncttagctattcaagccagtcagagganantatatatattctcatcagcactcagagtagtcagtgaagagagtagatcacactggggcacaccaggattcacataaacatggtatcttcctctggggatgcacaggccatggtctacaatgaggctttacaaccttccttggttgggctcgggataacttccggctgtctaataatggaaccatacccatgtaatattatgtaaggcctgacattactgtgctaaaacaagtcatgtagtcacgtagtgtaccaatcctg

SEQ ID NO: 715102 - DNA, 240 bp, Homo sapiens
gatctagaggatctttactctcgggcctgagagtgtgcatgtacagaggttcggactgctgactcctgaggatggagaaactgtggcaccctgggggccactgagggaggccagctgattgcagcacgtgtaccttcctcttcatcgtctctgtgtttagtagatgaccgcacctcgagcaggagtggggatgccacgtctgaccccagcgcccggccctctgtccaccacggtcattcc

SEQ ID NO: 715103 - DNA, 552 bp, Homo sapiens
ctaagtctcaatcgatggtatagctagaagtgtaaaacgacggtcagagtataggtcatatcctgtgtagtgtaacacgagggccagcgcatagctcatagcgtggtaatgtaaaagcgacggccagcgcgctgaagtgcgctggaagtgtaagacgctggccatatcgtagaggaagctcgtggaagaagcagcataggcccaggctcgcagcagagaaggcaattacacaagcagatcaagacattcaaggaacccagaagctgctaacttcgatagaggtctgaaccagcagcttctgaggaaaccttgtgcaaggcgttccagcgcatcagcgagttacagaggacatgtggaagaacttacagcggaaagctggccaaaaactccgggaaggcagaatatattgaacaagtagtatatacttgtgaagccaaagtgcagaagatgtttaagaagactttagatggtgaacttgagtgaaaagtattaaaaagtaaacatttacttgccacaaaaactgcagagtccgctgatgcccgaaggaaagcc

SEQ ID NO: 715104 - DNA, 231 bp, Homo sapiens
  misc_feature (39)..(39): n is a, c, g, or t
  misc_feature (190)..(190): n is a, c, g, or t
  misc_feature (206)..(206): n is a, c, g, or t
ttggcaagcagagatagttttccagttttaatgcctttnatttctttctctggcctgatagctctggctaggacttccagtactatgttgaacagaagtcatgaaagtgggcatctttgtgttgtttcagttcttaggaggaatgcttcaactttttcctattcaatgtgatgctggctgtgggtttgtnatatatgacatttatnattttaaggtatgctctttctatgc

SEQ ID NO: 715105 - DNA, 576 bp, Homo sapiens
ttcctggagtacgtggctgagtctctggagccaccgtcccccttcgagctgctggagcccccgactccgggggcttcctcagtgctgggccggccctgctgctacatcttccctggaggcctcggggatgccgccttcttcgccgtcaatggcttcacttgctgctggtcaactgtgtgtgctcaaaccccaatgtccagtttctggaagctggtgctgtgcacctggacctgcgtggatgccgtgctggtgacccaccctgtgcgccgacagcctccccgtgctcaacagcctgctgcggctgcaaactggctggagctgctccgatgtgtgtgctgctggtgcggggctcctgcggactgacatggctgctgcatggctcatctcccccaacctgggggtcgttgttcttcaactgcctgcgaggccgcgtcgcgtgcttggcgctgctggctgagcgatgaggtgcggaagctgtgctgctgagcctcctgtgcgcagctgggcatcacgcctctgccactcatccgcggccccgtgccagccaaacccaccgtgctcttctgaggaagatgg

SEQ ID NO: 715106 - DNA, 405 bp, Homo sapiens
  misc_feature (75)..(75): n is a, c, g, or t
  misc_feature (142)..(142): n is a, c, g, or t
cgctcgttcgctgtgccaggacaaagtcctgtagctcatagtcctgccgtgtgagagggggccacatccccgttnctcgggacgcacgacccattaagcagggtgctggctgccccctccatctcgtcgatggagaggtcancaggcatcagcgatttcgtgttttgtgtgcgtgacacaaattttgggtcccttgcatacgcgtcccacagccttacggagtatcagcgactgctctccaccaatgctgcccgcgactcctactgcttgtccgctgtttttggttccggaagctgctggggacagtcaggctggctggtgtgaaagtccggtaggagatgtcgggctcgtctgtgtaccaggagctgcggtgcagggacggcaggctgccgttcacctggtccg

SEQ ID NO: 715107 - DNA, 396 bp, Homo sapiens
  misc_feature (184)..(184): n is a, c, g, or t
gaattcggcacgagggcagagggactcggagtaatcgcctgcattgggggagaagctagatgaaaggggaagcttggcatccactggagaaaggttgttttccgagcagacacaggtccatccgcagatacacgtgaagggactgggagcaaggtccgccctcggcctatgagcctcgtttggncatttggtactcggcaagactgcaacaccccaacaggcccaggaagtacacgagaagctccgaggatggctgaagtccaacgtctctgatgcggtggctcagagcacccgtatcatttatggaggctctgtgactggggcactcgcaaggagctggccaaccagcctgatgtggatggctccttgtgggtggtgcttccctaaagcccgaat

SEQ ID NO: 715108 - DNA, 956 bp, Homo sapiens
cggcgctggcagcggcaactgcggcggcggcgtcggaatcagcagtcgggattactgccgacgcttctgtcaggtggttgaagattatgctggaagatggcaggtccctttgccacagcttcaggttcttcagactgccctttgttgttttacaacagccagtgcatcattcccagatgaatgtgagcatgtacaatatgttttgagtagccttgctgtgagtttctttgagttgctgctgttctttggaagagatgagttttatgaagagcccttaaaggatattcttggatcattccaggaatgccagaatcacctccgcagatatggaaatgtgaatctggaactggtgactcgaatcattagagatggtggcccatgggaagatccagtgttgcaagctgtccttaaagctcagccagcatctcaggagatagtgaacaaatatttaagttctgaaaatccactgttctttgaactacgtgccagatacctaattgcttgtgaacgcatacccgaagcaatggctcttattaaatcttgtataaatcacccagaaatcagtaaagacttatacttccatcaagcactcttcacatgtctgtttatgtcacctgtagaagatcagctattccgggaggtattgtttgagactatttttgcctattaccattttaaccctaccaaaaaaaaaccaaaaaaaaaaagtagcccactgttgttgttaaattccttttacagtaatgccaaagatttaaggattacattatctggatgtgttttcttttggcaccataacttaaggtcatgttgaattagtcaaaatctgatattaacaaatgatgaaatcaataaaatatactcattaataagtattattcacattgcacttttgatgtgatggagaagaggtcaaataaaagtcaacaagctcacagcttgccaggagtaaaaaa

SEQ ID NO: 715109 - DNA, 573 bp, Homo sapiens
  misc_feature (82)..(82): n is a, c, g, or t
  misc_feature (331)..(331): n is a, c, g, or t
  misc_feature (353)..(353): n is a, c, g, or t
  misc_feature (362)..(362): n is a, c, g, or t
  misc_feature (418)..(418): n is a, c, g, or t
  misc_feature (461)..(461): n is a, c, g, or t
  misc_feature (552)..(552): n is a, c, g, or t
aacggcacatattttacagtcatttgctagaatacctccacttcaatgatgtcatccagtgaccccgacaaaaggattatcncaatgtcttgcactttgcaatcaagcagcaagttatgcttctctaatcgtttctgttccagagaagtttgaatacttacaacttctttttgcaatttccccacttccctgtaattacacagatatgaaaaagtaattttactcatatgtaacactgcaccaaggaagaaaaatgtatgctataaacttttatgaaaaaagaatatttattccgtgagtgctgtaagttctagaatcctctcatgatgcntgtaattaatgttaacactccngagaaaggncacgaatatactcagttaatctaaggggagcatttccactaataaatgttactggnttaatccagggtaccccagggcttcctcactccaatataagcnctacatttaggaccccaacccaggataaacagactcctaggccaaaggaaatccctggccgtaagtcacatacaccttaataaccggtttncctggcccaccaccactgggg

SEQ ID NO: 715110 - DNA, 1364 bp, Homo sapiens
cggcgctggcagcggcaactgcggcggcggcgtcggaatcagcagtcgggattactgccgacgcttctgtcaggtggttgaagattatgctggaagatggcaggtccctttgccacagcttcaggttcttcagactgccctttgttgttttacaacagccagtgcatcattcccagatgaatgtgagcatgtacaatatgttttgagtagccttgctgtgagtttctttgagttgctgctgttctttggaagagatgagttttatgaagagcccttaaaggatattcttggatcattccaggaatgccagaatcacctccgcagatatggaaatgtgaatctggaactggtgactcgaatcattagagatggtggcccatgggaagatccagtgttgcaagctgtccttaaagctcagccagcatctcaggagatagtgaacaaatatttaagttctgaaaatccactgttctttgaactacgtgccagatacctaattgcttgtgaacgcatacccgaagcaatggctcttattaaatcttgtataaatcacccagaaatcagtaaagacttatacttccatcaagcactcttcacatgtctgtttatgtcacctgtagaagatcagctattccgggagcatttattgaaaactgattgtaagagtggaattgatatcatctgtaatgctgaaaaagaaggcaaaactatgttagccttgcaactctgtgaatcctttcttattccacagctccagaatggggatatgtactgtatctgggagttgattttcatatggagtaaactacagcttaaatctaatccttcaaaacaagtttttgtagatcaatgctaccagcttttaagaacagcaactaatgtgagagtcatatttcctttcatgaaaatcatcaaagatgaggtaaataggatatatttgtcccttaaatttaaaattgagtgacagttcactgaaacttgaatctcttttgataaaatttatttgattttaaaactgaaggaaaggaggattttaaggggcacatttctccatacatttaacattctcctctggcctaaatccaaaatctcaacatgggaggcgattaatgctacttaaattcacatgggagcaacgcctccatacaacccttttcctatacctaacatttggtcctttcaatatcctaatccatattgacacttacattgcaacaccggcggttattgacgacctcgggcgacaaaacatccgtcgtgcgtagaaggaacaaaactcgggcccacgcagacaggctccaacagtgctctctacatcttttctcctcttatcttcgctctttataatttatttccggaaaaga

SEQ ID NO: 715111 - DNA, 958 bp, Homo sapiens
attaatgtgaactaacatggttttaatgtgacagattaggattcagccttttaatcttaaagaaaatattgagcagtaagaagataaagtatgtaatcttagactaaaaagacatagacccatgttacttggaacatattttaacatattaatgaactgaaagaagaaaaaaaatttttttttaaattttgtttctgttatttactttttagactaagaaatcaacaaatatttcttgagcactgttttggtgtcactcttattttcctttttccaaccatataactgaatattttcacaaataaactcctactaaggaaaatgctatttaagtagttaaatctaattagaaaccatattttagtggtaaagtttcaaagaacaaagttgagagaatcttttcttgagagtaatagagtctgttttctttttaatatagtgaacaaatatttaagttctgaaaatccactgttctttgaactacgtgccagatacctaattgcttgtgaacgcatacccgaagcaatggctcttattaaatcttgtataaatcacccagaaatcagtaaagacttatacttccatcaagcactcttcacatgtctgtttatgtcacctgtagaagatcagctattccgggaggtattgtttgagactatttttgcctattaccattttaaccctaccaaaaaaaaaccaaaaaaaaaaagtagcccactgttgttgttaaattccttttacagtaatgccaaagatttaaggattacattatctggatgtgttttcttttggcaccataacttaaggtcatgttgaattagtcaaaatctgatattaacaaatgatgaaatcaataaaatatactcattaataagtattattcacattgcacttttgatgtgatggagaagaggtcaaataaaagtcaacaagctcacagcttgccaggagtaaaaaa

SEQ ID NO: 715112 - DNA, 670 bp, Homo sapiens
  misc_feature (37)..(37): n is a, c, g, or t
ccgatcgagaggaccctgttgctaggtggagtcaaantttctgggactcaacgatctcccaagtatctgggactatagtcaagcactgtaggtttggacgaaagtatataacatgtatccaccattactatattatgcaaaatagtttcactttccaaaaactctcctgtgctccatcttcatccctccattacataaaaataaagatcctagcccttttaatttcatgttttactattcaaagcatttggtcgtttaagtctcataaaaatccagtgaggtaaatatgaatcctatcattgctatcctgcaaataataaaatggaggaatgtgaaggaatggtagagaagttaaaaagagtaagggtgaatgtgggtttaaaaaaagaaatactctctcaacatcaaaagaaaaggacataggaatagatggtttaatactttgtgaaaaggaaatacatacacctttccacagctaatttaaaagaggaagaataaatgtaaagttgacaataatacagataagaaagtaataggctgggtgtggtggctcatgcctgtaatcctaaccctttggaaggctgaggccagaggattgcttgaagctatgagttctagaccacactgggcaactttggatttttttatttagctgggatgggggtaactc

SEQ ID NO: 715113 - DNA, 965 bp, Homo sapiens
  misc_feature (19)..(19): n is a, c, g, or t
  misc_feature (61)..(61): n is a, c, g, or t
  misc_feature (69)..(69): n is a, c, g, or t
  misc_feature (71)..(72): n is a, c, g, or t
  misc_feature (85)..(85): n is a, c, g, or t
  misc_feature (89)..(89): n is a, c, g, or t
  misc_feature (119)..(119): n is a, c, g, or t
  misc_feature (132)..(132): n is a, c, g, or t
  misc_feature (136)..(137): n is a, c, g, or t
  misc_feature (156)..(156): n is a, c, g, or t
  misc_feature (170)..(170): n is a, c, g, or t
  misc_feature (192)..(193): n is a, c, g, or t
  misc_feature (195)..(196): n is a, c, g, or t
  misc_feature (256)..(256): n is a, c, g, or t
  misc_feature (302)..(302): n is a, c, g, or t
  misc_feature (364)..(364): n is a, c, g, or t
  misc_feature (367)..(367): n is a, c, g, or t
  misc_feature (369)..(370): n is a, c, g, or t
  misc_feature (377)..(378): n is a, c, g, or t
  misc_feature (381)..(384): n is a, c, g, or t
  misc_feature (396)..(396): n is a, c, g, or t
  misc_feature (408)..(409): n is a, c, g, or t
  misc_feature (412)..(412): n is a, c, g, or t
  misc_feature (418)..(418): n is a, c, g, or t
  misc_feature (429)..(429): n is a, c, g, or t
  misc_feature (436)..(436): n is a, c, g, or t
  misc_feature (444)..(444): n is a, c, g, or t
  misc_feature (447)..(447): n is a, c, g, or t
  misc_feature (482)..(482): n is a, c, g, or t
  misc_feature (486)..(486): n is a, c, g, or t
  misc_feature (503)..(503): n is a, c, g, or t
  misc_feature (506)..(506): n is a, c, g, or t
  misc_feature (510)..(511): n is a, c, g, or t
  misc_feature (515)..(515): n is a, c, g, or t
  misc_feature (518)..(518): n is a, c, g, or t
  misc_feature (530)..(530): n is a, c, g, or t
  misc_feature (549)..(549): n is a, c, g, or t
  misc_feature (569)..(569): n is a, c, g, or t
  misc_feature (576)..(576): n is a, c, g, or t
  misc_feature (583)..(583): n is a, c, g, or t
  misc_feature (586)..(586): n is a, c, g, or t
  misc_feature (591)..(591): n is a, c, g, or t
  misc_feature (950)..(950): n is a, c, g, or t
atgcatttaaaaaataagngggaggtgggcagcaaacacacaaagtcctagtttcctgggnccctgggngnnaagagtgtggcantgtntccacccactctccacagggaataaatctntctcttaaatgcnaagnntgtttccatggcctctggntgcaaatacacagngctctggggtcagagcaagggnngnngggaggaccacgagtgaaaaagcagctacacacattcacctaattccatctgagggcagnacaacgtggcaagtcttgggggtagcagctgttcccagagtcaagnaataccgtacacccctggggagatttgctcctaaaaagaagtggcagttacaaacaaaaaanaangnnaaacaannggnnnnttttttcttcanccacactcttcnnganaatgcnataaatatgtnatttaanattttaanttnatagcattggacacacactcaacatattgaaatantgantccttagagaaaaaaanggnaaannaggnaanaaaaaatattgnatttttctgatggagaatntcggcccccaggcatggggngtagtgnaccagtntcntagcntgcaggaggcgctgaggtcggccgggtcctctggggaggaaggctgtgcccattgcctggggctgtatggcaaaaattgtgttgggtgtccttggccttgccagctcaggccctcagtcgccggtcacctgggggggcctgcccgtcggagggctggttggctgactggatgaacatgggctgggcgaggtcctggcccgcaggcatgggtgacttgctggatctggtagagctgctgtccatctgtgaactggctgaactgctgctgttcttgctggacctctgtctgtgttatctgttgagcattggtggcaagtgtctggatctgtccctgcacaacttgagtgcctgatacacgntggggctagcggata

SEQ ID NO: 715114 - DNA, 903 bp, Homo sapiens
attaatgtgaactaacatggttttaatgtgacagattaggattcagccttttaatcttaaagaaaatattgagcagtaagaagataaagtatgtaatcttagactaaaaagacatagacccatgttacttggaacatattttaacatattaatgaactgaaagaagaaaaaaaatttttttttaaattttgtttctgttatttactttttagactaagaaatcaacaaatatttcttgagcactgttttggtgtcactcttattttcctttttccaaccatataactgaatattttcacaaataaactcctactaaggaaaatgctatttaagtagttaaatctaattagaaaccatattttagtggtaaagtttcaaagaacaaagttgagagaatcttttcttgagagtaatagagtctgttttctttttaatatagtgaacaaatatttaagttctgaaaatccactgttctttgaactacgtgccagatacctaattgcttgtgaacgcatacccgaagcaatggctcttattaaatcttgtataaatcacccagaaatcagtaaagacttatacttccatcaagcactcttcacatgtctgtttatgtcacctgtagaagatcagctattccgggaggtattgtttgagactatttttgcctattaccattttaaccctaccaaaaaaaaaccaaaaaaaagtagccagttggtgttaatcctttaaggagcaagattaggttcatttcgggggggttcttgggccatattaggtgggatttgccaatggtttacaatggaagcaattccttaagttcactggtggggggaaaggaaaacaccggggaaaaaaaaaggcgggaaaaaggggggggaaaagaggtaaccaaggagagta

SEQ ID NO: 715115 - DNA, 346 bp, Homo sapiens
  misc_feature (169)..(169): n is a, c, g, or t
  misc_feature (172)..(172): n is a, c, g, or t
  misc_feature (270)..(270): n is a, c, g, or t
  misc_feature (315)..(315): n is a, c, g, or t
  misc_feature (336)..(336): n is a, c, g, or t
aataaatggtaaacatgggtttttttaactttatgaaaggaaaaacttctggatttaacacattcagataatttagaaatttagaatgtgaaattcctctcaccgttgacctttttcccattccgagttccatgagcagtgaggtgtgtgtcagcgtgtgctcctgcancancatttacacccgtgcaggtgcagccacaccttttctttgcattcatctgtcatgttgaagggtaggatcgctgcctttgctccacggggacttctttnctgcgtgttctgcagggggacatccacgggcccagcttcggccantacagggggcatgctttgctncgggggcgtt

SEQ ID NO: 715116 - DNA, 1272 bp, Homo sapiens
gagctcacggaggctgatgcgtagactgtcgatgaatggccaagtatcagatggaaatgatgcggaaccgttcgccatgtcgacattgatcatcttgaccgtggtctggatatccggtccacatacgtagtggcatcattcgggttatgcacggtgcacatcactgggagtcctctagatggaagctgtgcgcagcgatgccccttgcagagactcgtgatgggttctcgatttatgatccctataaaaaatgcccaaggatctctcgtcgctaaaggcatctcggactggagctcctagaactgagtggacaggtctgtgacgaggacgctaggattctgtcgccctggaaggccttgcagagacacattgcgaagatatcagcctgtggatgtacagtgttcagaagaagtgccgattgtaaagtggagaatagatctcagatctgactcgaagtgtcctaatgtggtggtaactttgaatgcatgaagtccagctgtttgcgagactagagacatgaattcgtcagatctatgcactacgcagctagatccgatttgggggagggaaatcttacaggtttgcttgtatgagaactagagtgggcatgaacacttgagccagatgatatgtagttgtaaggattatgcaaaatggaatagccttgagagaccgaactaggtgaaggaaaacccacgtgagcatcgaaagatacctccgcgatacttcacgtcaagacgatttggcacaagttacggaagatacttttagcagggtgaccaaggacggcacgatgcggatgagaaccccgaggatttctcctgcagggaatgggaaccctctgttctcggaaggcattcctttggacatacttctacccaataggtctcgaggcttgcttcgaggggacttgcgaaggttccgactagcgtcccaatttttgcagcagcccaaggagtccaaagtcaactctagcgtagacgcacgcaaaacaggttcaacgtggatggataatctaagaagggcggcagaagagaggtttaaagtgcgggaagtcgtcgtggtcctagtggcccccaaggtgatattccttgtcaacggaaaattacgaagaagtgttatgtcaataccggggaacggtgttttccccacgaataagacggcaagggtttcaaccattgtgaaacacttctttgtgatggttccacaacgcatgggaacaaacatcgttggggaaagaaacaattatattgtggccattagttgtaagca

SEQ ID NO: 715117 - DNA, 90 bp, Homo sapiens
gcggccgcctactactactactactgctcgaattcaagcttctaacgatgtacggggacatgtaaataaatacattcttggaggagcacc

SEQ ID NO: 715118 - DNA, 171 bp, Homo sapiens
atgagttgtcctgtttaggcttttatcttccgtaaccaggatatcaaattgttccccttgttaggaaggcagactgacattctgttctgggtcgcctgacttccttgaaactgttaaagcttcatcgtggagacccttcagagagaaaaattataagccaaatcggacaca

SEQ ID NO: 715119 - DNA, 217 bp, Homo sapiens
gtcacagctaagtaatagctggagacccttgggtctgcattcttattactaacggtctgtctctgctgcccctgtgatgctctatcaaagacggtgtggtgtgttccatgtgttcatcggacaaggggagtgatgcttgtgaattctcaaatccctgcgactgctaaggcactggaggtaggagtcaacaagacaaagatcctgcctcaacctctgg

SEQ ID NO: 715120 - DNA, 708 bp, Homo sapiens
  misc_feature (636)..(636): n is a, c, g, or t
gtgaaccgtatatgaccaagaccacactatgccttgtagtgacacctaataactattgatcttagaactacgagagatgttctacggatgatctctagaaaataaaacatctaccttacctctggactctccggctgagagtagaggtttcttttaagtcttggaggaaacagttcggtgaaactttactgactcactgtagaggctacaagaacaagcaccccttccatgtgtcgtcttgagaaagatctcacagaagcttttctcagcagtactctatggcttaaaacgttcagcacaatagggcagagggggtgacttttcttacattaatgagatttacatccaagacactgaatcttccgttagaggcaagactctattttctatactgtaaatatttggtatatttgccactacgtgaatgattggttttcactaagctataatcgtgaagctagaaatgctagtctcttgcctgattctgtgtactcattgctgcatgttaagctgccagacattaaagtgcactcttgcatattttgaagaacaaatttttctgtctgcaccaagatccatagaagagaccagacagtccactcgtgggggggccaggtccccaattcggcctatagngaggtggattaacattccctggccgttgggtgacaccctttgactgagaagaccttgcgttacgaactttcg

SEQ ID NO: 715121 - DNA, 103 bp, Homo sapiens
cggcacctggaaatcgttaatcttgactattacctgtgtgaaacttgttattcactaaattcagtactcctcaaccatctcctaatgattggaaccaagcaac

SEQ ID NO: 715122 - DNA, 165 bp, Homo sapiens
gggcagcataagcgtgacttcggtggaggcgtccagtcgggctgggagacttctctgacctggcaacaatttcttccggggttctggagccctcgtagtctacagccggccccgttcttaaggatcttgatggtggggtagccactcacatcaaaccggctggcc

SEQ ID NO: 715123 - DNA, 185 bp, Homo sapiens
gttggttcgctcggagaacagcgtcaggcggacccgcccgtcggtccacttgcgctcgatgttcaactcgccggtgaagtcctgctccggcttgaggaacggattggcgaaggtcgcgacgccgccgatcgtgacgttttgataaagctcggtcaccgtcggataacgcgatggggtaccgagct

SEQ ID NO: 715124 - DNA, 311 bp, Homo sapiens
gattcgcggcatgtgtgctattttaaatcccggtagagatgggtctcctttgttgccaggctatcttgaactgctgtgctcacgtatcttcctgctcagccatgaagcaacatgcccagtgccaattttgtgtaatcaaatgatcatgtgtactcagtacccttaattacctgatgaggaatggtgatggcatgcaaccaacgttttggggagagtggcgctcacatctccactatctccagaagtccttactccctgtgatttcttccaagccacttgagataaacaccacatggcacgcgacatcgcca

SEQ ID NO: 715125 - DNA, 260 bp, Homo sapiens
  misc_feature (35)..(35): n is a, c, g, or t
tagctcggtacccttggagaagtctgggcctgggnacagagaggatgtaatctgaacactcctgttgtcacagtgtcaccagcgtatgcttgaggggacggtagacataaacggaattcagaggcaggaagactgcagagtagaaaggtgatgtgccacaagctcccgacaatggatcaactgggagctatccatctgtgctttctgaagcagttcaattgtaagagaaagccaatcaggaatgagtttctccatttcca

SEQ ID NO: 715126 - DNA, 744 bp, Homo sapiens
  misc_feature (2)..(2): n is a, c, g, or t
  misc_feature (83)..(83): n is a, c, g, or t
  misc_feature (85)..(85): n is a, c, g, or t
  misc_feature (200)..(200): n is a, c, g, or t
  misc_feature (213)..(213): n is a, c, g, or t
  misc_feature (231)..(231): n is a, c, g, or t
  misc_feature (251)..(251): n is a, c, g, or t
  misc_feature (263)..(263): n is a, c, g, or t
  misc_feature (267)..(267): n is a, c, g, or t
  misc_feature (284)..(284): n is a, c, g, or t
  misc_feature (306)..(306): n is a, c, g, or t
  misc_feature (311)..(311): n is a, c, g, or t
  misc_feature (333)..(333): n is a, c, g, or t
  misc_feature (353)..(353): n is a, c, g, or t
  misc_feature (356)..(356): n is a, c, g, or t
  misc_feature (361)..(362): n is a, c, g, or t
  misc_feature (370)..(370): n is a, c, g, or t
  misc_feature (379)..(379): n is a, c, g, or t
  misc_feature (382)..(382): n is a, c, g, or t
  misc_feature (388)..(388): n is a, c, g, or t
  misc_feature (392)..(392): n is a, c, g, or t
  misc_feature (395)..(395): n is a, c, g, or t
  misc_feature (410)..(410): n is a, c, g, or t
  misc_feature (433)..(433): n is a, c, g, or t
  misc_feature (442)..(442): n is a, c, g, or t
  misc_feature (445)..(445): n is a, c, g, or t
  misc_feature (461)..(461): n is a, c, g, or t
  misc_feature (557)..(557): n is a, c, g, or t
  misc_feature (609)..(609): n is a, c, g, or t
  misc_feature (625)..(625): n is a, c, g, or t
  misc_feature (650)..(650): n is a, c, g, or t
  misc_feature (665)..(665): n is a, c, g, or t
  misc_feature (671)..(671): n is a, c, g, or t
  misc_feature (732)..(732): n is a, c, g, or t
tntgccctcgggggtccctagaaggcgacaatggctcgagtccaggcgccgaggctggcgagcgcctgcttggcgcacagctncncgttgagcggcggcggctgctccgaggagtccggctgtcggctcaccagccccgagaagccggagccaaagatggagatcaagtttgagatgttggacgcgtccggggacgagtncgggcagaagtcntcgaagcgggcgcgcttncagggggcgaacggggcgcncccggggggctnggcncccagcccgcccgcatncttcttgttgtttttttttttnttttngccagggtaatatttgtgcttncagccggcggcggacgccangcncggtnncggagcgncttggtcanagnaggggnagtnggnggaggcgcagagtcntggtggaagtagccgttcttcancgtggttancangtgagtgtttaggtcnagcacggtggtctggctgctgcagtgcaagccgaagtccgaaggggtagggtatgcgccccggtagaagccgggggaggaggcgggggccggggangcgggcggagaagcggcggcggcggaggggcggcccctgggggcgcggacangcggccggggcgcganggtcccgcgggcagagcgcagcggncgcgggcggcggcancggcangccagggcgcaggacccggctggagaggctccaagggctgcccgcggtggggcgcgcggtnggggctggagcg

SEQ ID NO: 715127 - DNA, 790 bp, Homo sapiens
  misc_feature (149)..(149): n is a, c, g, or t
tttaagagtaaatcgcctccttaggtacaaacagaaaagggtctttaattctaagggaggccattattaccttcaactcagagacacagtgtgggtcggtacttctgaaaagaattttgttggtttctcagctgtttttccacaaagcnacaggaagtctttatggttttttttctatttccagggttattgtgattggtttataagatttggtgggggtgcatcaccaatatatcttggttcttaagatctgatccccgtgttcacctataactgatgtgtgaaaactataaaaaccatgtgtgaaaccccggggttcttaaaataccagcatagattttatcagggtgttttgtccaaccggttattccagtgattcctccccccccttcttaagaaccgttaaataatgctgttgtgttagctctgagtagaaaggaaacgagtaaaacctctgtttggaggtaatattgggttgaattctgactgcccctttctagctggaccctttaaccaatcaccccatcttttttgtgtttctctaaagtcatttataccttaaatgtaattatagccactgtggggttctgttgagaattaagagctcacactatatatgtaaagtttcccgtactagtccccagaatttagaatatgctccacaccaagtaacagcattatataagtttatatttttgtgagttataagtactttgatatattctccttaatctgtaatcacctctataagtaagtggtaataataagcagatatttttgtcccccttta

SEQ ID NO: 715128 - DNA, 177 bp, Homo sapiens
acggtccatgcctatactcctttcatgggaaggccagcatcctaagactgcagtcaggtgagtctttttcaggcagcactttcttcataaccttccaacgtgtgaaatggccctttcacgacatgctggcgccggggattttttcttaaattaattttcacacattcctcaattcct

SEQ ID NO: 715129 - DNA, 1147 bp, Homo sapiens
  misc_feature (196)..(196): n is a, c, g, or t
gagaatcggtgaacgtggcgaactaggtaatcaagtgcaaggctgcggtcgcttgggaggctggaaattctctcatccatagatgcgagatatgacggtggcacaccccaaaggctcttgacagttgcgaaatcaatgatcatgtgctcgatgtgtggtttgccacaccagatgccatatattcctgaagtggagnctgattactctagagggttagtagtgcacgagtgatgttgtggggaaatgtagatggtgcttggaaatttgtgtgcaaagtgtcttgcgttgatgtggaagttgagtaaggctggagaggctgtggattgagacttgtgcattactactttgacatcgccacgagtggtgtggagaagggcgaaagttgtttgctgctagaactccgttgaaaaactaagcttatgcgcagaaagagtaatgaagatcattcgaaggggcatgaggtattgaatgctaagactggtgtacgcagtctgggattctacttgggaaaaggtgaatgaacagatgtttggcgattaccagttgctgaaaacacaagtcaacagtttttcttgaaataccaccagggtatgatggcctggagtattctcatgttatgcctacaacagttaagactccgttaaaagcaatccgttatgcgcctacaaggttgctggccgttcagtaagcgtttggtaggggcatttgtcgacatccgggggtctaaccgtgttggcttggtttgggtgacaccaaggtggcccaaaaggatttggaagggcactgggaattattgggtaatggtagcgccgggtggtttgggagtctggtgaagagagaaacgttcaagagaagttgggggaggttgtaattcgaattgaggggctgtgtaaaaaaggtggggatgggatggctttcccacgggacttcaatttgggggtgtgttgggatcatgttccaactttagaagaatttagagttttgtgcaaggggggccaaaagaaggaagttttggggagggccacgtggcaagtggtaatttaagggccctttaaggggaattattaaagagtaaaaccccaatgtcaatggaagttggggtcatttggataattgagctgttgtgtgtgggggtgtgggactgaaa

SEQ ID NO: 715130 - DNA, 140 bp, Homo sapiens
cattcaccagaccctgcaggcagaagcaggaagcagttcaactagttagagaaagtagaagaagctgttcttttcattttacttcttggatgcaccaagaccctgtctctaaataaaaaataataggcagaaccaggaag

SEQ ID NO: 715131 - DNA, 819 bp, Homo sapiens
tgctcccttgggctctagagaggaggcccctcttagccctcagcccctccttcctctctatcttaaagtaatttgatcctcaggaatttgttccgccctcatctggcccggccaaatcccgatttgacaaatgccaggaaaaggaaactgttgagaaaccgaaactactggggaaagggagggctcactgagaaccatcccagtaacccgaccgccgctggtcttcgctggacaccatgaatcacactgtccaaaccttcttctctcctgtcaacagtggccagccccccaactatgagatgctcaaggaggagcacgaggtggctgtgctgggggcgccccacaaccctgctcccccgacgtccaccgtgatccacatccgcagcgagacctccgtgcccgaccatgtcgtctggtccctgttcaacaccctcttcttgaactggtgctgtatgaacccctgctgcctgggcttcatagcattcgcctactccgtgaagtctagggacaggaagatggttggcgacgtgaccggggcccaggcctatgcctccaccgccaagtgcctgaacatctgggccctgattctgggcatcctcatgaccattctgctcatcgtcatcccagtgctgatcttccaggcctatggatagatcaggaggcatcactgaggccaggagctctgcccatgacctgtatcccacgtactccaacttccattcctcgccctgcccccggagccgagtcctgtatcagccctttatcctcacacgcttttctacaatggcattcaataaagtgcacgtgtttctggtaaaa

SEQ ID NO: 715132 - DNA, 232 bp, Homo sapiens
ccccactcctctccagccaaggttacagagtgagacactatcttaagaaaaaaaaatggatatatatatacatatatattcatttattaatttatttaattaattaattaaagggctgtaccttatattcttcttgattcctagcctttattggctctcagatcgccagagttgtaactcaatagtaagaaaccattttgttgaggtggtagtgattctacccggggagggg

SEQ ID NO: 715133 - DNA, 868 bp, Homo sapiens
ctagtcctgacttcacttctgatgaggaagcctctctccttagccttcagcctttcctcccaccctgccataagtaatttgatcctcaagaagttaaaccacacctcattggtccctggctaattcaccaatttacaaacagcaggaaatagaaacttaagagaaatacacacttctgagaaactgaaacgacaggggaaaggaggtctcactgagcaccgtcccagcatccggacaccacagcggcccttcgctccacgcagaaaaccacacttctcaaaccttcactcaacacttccttccccaaagccagaagatgcacaaggaggaacatgaggtggctgtgctgggggcaccccccagcaccatccttccaaggtccaccgtgatcaacatccacagcgagacctccgtgcccgaccatgtcgtctggtccctgttcaacaccctcttcttgaactggtgctgtatgaacccctgctgcctgggcttcatagcattcgcctactccgtgaagtctagggacaggaagatggttggcgacgtgaccggggcccaggcctatgcctccaccgccaagtgcctgaacatctgggccctgattctgggcatcctcatgaccattggattcatcctgttactggtattcggctctgtgacagtctaccatattatgttacagataatacaggaaaaacggggttactagtagccgcccatagcctgcaacctttgcactccactgtgcaatgctggccctgcacgctggggctgttgcccctgcccccttggtcctgcccctagatacagcagtttatacccacacacctgtctacagtgtcattcaataaagtgcacgtgcttgtga

SEQ ID NO: 715134 - DNA, 999 bp, Homo sapiens
  misc_feature (838)..(840): n is a, c, g, or t
tgctcccttgggctctagagaggaggcccctcttagccctcagcccctccttcctctctatcttaaagtaatttgatcctcaggaatttgttccgccctcatctggcccggccaaatcccgatttgacaaatgccaggaaaaggaaactgttgagaaaccgaaactactggggaaagggagggctcactgagaaccatcccagtaacccgaccgccgctggtcttcgctggacaccatgaatcacactgtccaaaccttcttctctcctgtcaacagtggccagccccccaactatgagatgctcaaggaggagcacgaggtggctgtgctgggggcgccccacaaccctgctcccccgacgtccaccgtgatccacatccgcagcgagacctccgtgcccgaccatgtcgtctggtccctgttcaacaccctcttcttgaactggtgctgtatgaacccctgctgcctgggcttcatagcattcgcctactccgtgaagtctagggacaggaagatggttggcgacgtgaccggggcccaggcctatgcctccaccgccaagtgcctgaacatctgggccctgattctgggcatcctcatgaccattctgctcatcgtcatcccagtgctgatcttccaggcctatggatagatcaggaggcatcactgaggccaggagctctgcccatgacctgtatcccacgtactccaacttccattcctcgccctgcccccggagccgagtcctgtatcagccctttatcctcacacgcttttctacaatggcattcaataaagtgcacgtgtttctggtaaaaaaaaaaaacaaacaaacannngaagaaagaaaaacaacaatccacaaaaatgggaaaaaaaaaaaaatagctcgggggcccacaaaaacaaaactgggggggcgcaaaatagtttcacaaacccgaaggggtccacaaaaggggggggtaacctctgttttttttctagctacccccccg

SEQ ID NO: 715135 - DNA, 407 bp, Homo sapiens
  misc_feature (288)..(288): n is a, c, g, or t
  misc_feature (295)..(295): n is a, c, g, or t
  misc_feature (354)..(354): n is a, c, g, or t
gtaattgaatgggtcgagatgtcgacgtgagtgagtgggggtatgtttgggaggcgtaggatggtactggtatatctaatatctatatttctctagtttagctttataggttaaagtattagtattagaatgtacacccagcccagccccaaagagaaagaagagagtaaaaagttgaagcggtggtttgcactccgccttgcaaatagcagaggttccgggctcactccttcctggtgggaaaggaagatgcctgtcctctccgtggaagaccctgggccctcaccncaggcancagtttgcgttttgaaaggttattgggtcccttcctcgggctgtgttcttgctggtgancaaaagtgttgcctgcagaaataaaatgcagaacgtactctacgataaaaaaa

SEQ ID NO: 715136 - DNA, 134 bp, Homo sapiens
gtattcactcgaggctcggtaccctcgataagggccaagctgctcatgaaccgccaggaactgacctggtgtttgtgctctcttgccaggaatcccaatgctttcactcttatctaccctttggccttatcgag

SEQ ID NO: 715137 - DNA, 427 bp, Homo sapiens
gaggtggtccctgatctcagggcggggagagccaatgaggagacggagccatagcacgcggctctcaggtgggggatccttgtccccctccacaatccctctccccagtctagggacaggaagatggttggcgacgtgaccggggcccaggcctatgcctccaccgccaagtgcctgaacatctgggccctgattctgggcatcctcatgaccattctgctcatcgtcatcccagtgctgatcttccaggcctatggatagatcaggaggcatcactgaggccaggagctctgcccatgacctgtatcccacgtactccaacttccattcctcgccctgcccccggagccgagtcctgtatcagccctttatcctcacacgcttttctacaatggcattcaataaagtgcacgtgtttctggtaaaa

SEQ ID NO: 715138 - DNA, 101 bp, Homo sapiens
acggccgtgtattactgtgcggtagagtccttagtggtggtagctgctcctcagcccgggagcgaaagggccgataattactactactacggtatggacgt

SEQ ID NO: 715139 - DNA, 106 bp, Homo sapiens
tgactctacaggatcctatgtgagcagctggcagggacgagggtatggtgagaggagaagccagcttcccattgaagatcagcctcaggtaaaggtcagcttcggg

SEQ ID NO: 715140 - DNA, 368 bp, Homo sapiens
cgggggtttttttaccccttcccccccgcaaccattttcaacaacatggccaaaatttccgaggcccccaaaacggttgaacagcttaagctggaggttacacttgcccgcattaaggttttccaggcaccagcggaatttttggcttttttggagacgcatgccaaaaattacccgctggttacgccagtaccccccggggagaacccctttcgggacaagggccttttttttgttttgttttgagccctccgggcaggtttccctcccctgcccaagtatggatcccataaacttggtaactttggtggggcctgtgcttttagggggatttaggcccgcccaaagtttggggcccccgttgggga

SEQ ID NO: 715141 - DNA, 755 bp, Homo sapiens
  misc_feature (168)..(168): n is a, c, g, or t
  misc_feature (416)..(416): n is a, c, g, or t
  misc_feature (538)..(538): n is a, c, g, or t
gaagaggaggatattggtggtggaggacctggatatggcaatacaggagtgggggctacggaggtggttatgacaactatggaggaggaaattatggaagtggaaattacaatgattttggaaattataaccagcaaccttctaactacggtccaatgaagagtgganatttggtggtagcaggaacatggggggaccatatggtggaggaaactatggtccaggaggcagtggaggaagtgggggttatggtgggaggagccgatactgagcttcttcctatttgccatgggcttcactgtataaataggagaggatgagagcccagaggtaacagaacagcttcaggttatcgaaataacaatgttaaggaaactcttatctcagtcatgcataaatatgcagtgatatggcanaagacaccagaagcagatgcagagaagccatttgtgaatggattggattatctaataacattaccttactgtggatgaaggattgtctaaaaaaatgcctttgagacagttgcttaactttntaattgttgttctttctagtggtctttgtagaatgtttaacattccttttttgaaatgtaaatttgaagtttaggtgacagtgaacctttttaagattttctcaaattttaaagcttttaccagaacatgtgtataaacataacttttccttaaaaaattaatgctgttatagtaagaactcttttcatttatattaataattcatctaatgaaaat

SEQ ID NO: 715142 - DNA, 468 bp, Homo sapiens
  misc_feature (25)..(25): n is a, c, g, or t
  misc_feature (27)..(27): n is a, c, g, or t
  misc_feature (34)..(34): n is a, c, g, or t
  misc_feature (45)..(45): n is a, c, g, or t
acgcgaccgctggcttgaacgcttntngaactgncgctggctgancttcatagcattcgcctactccgtgaagtctagggacaggaagatggttggcgacgtgaccggggcccaggcctatgcctccaccgccaagtgcctgaacatctgggccctgattctgggcatcctcatgaccattggattcatcctgttactggtattcggctctgtgacagtctaccatattatgttacagataatacaggaaaaacggggttactagtagccgcccatagcctgcaacctttgcactccactgtgcaatgctggccctgcacgctggggctgttgcccctgcccccttggtcctgcccctagatacagcagtttatacccagaccaacttagattgtgccccaaaaaacttgtcatccctactatcttctggctagtcatactcctattcaccgttctcgggtaccgagc

SEQ ID NO: 715143 - DNA, 891 bp, Homo sapiens
cgttcctgggcctggagggctgctttggggcaggaaactttggccaccaggcctctgacctgcaccaggagacactgggaggtttagtccccaaacccgcacagagcaggactgcagcctgaggaaagagcaaggatttcaggagagaggcctgcgacaagtgagcaggaaatagaaacttaagagaaatacacacttctgagaaactgaaacgacaggggaaaggaggtctcactgagcaccgtcccagcatccggacaccacagcggcccttcgctccacgcagaaaaccacacttctcaaaccttcactcaacacttccttccccaaagccagaagatgcacaaggaggaacatgaggtggctgtgctgggggcaccccccagcaccatccttccaaggtccaccgtgatcaacatccacagcgagacctccgtgcccgaccatgtcgtctggtccctgttcaacaccctcttcttgaactggtgctgtatgaacccctgctgcctgggcttcatagcattcgcctactccgtgaagtctagggacaggaagatggttggcgacgtgaccggggcccaggcctatgcctccaccgccaagtgcctgaacatctgggccctgattctgggcatcctcatgaccattggattcatcctgttactggtattcggctctgtgacagtctaccatattatgttacagataatacaggaaaaacggggttactagtagccgcccatagcctgcaacctttgcactccactgtgcaatgctggccctgcacgctggggctgttgcccctgcccccttggtcctgcccctagatacagcagtttatacccacacacctgtctacagtgtcattcaataaagtgcacgtgcttgtga

SEQ ID NO: 715144 - DNA, 876 bp, Homo sapiens
ctcacaaaaaaaaaaaagatacacttatttgaataagatacctcttatcttggtgtcggtaactatttgtaaatagctttcaaaataattgaactttttttttaatattccctaaaaaggagttcatggtcatgggatagatttgggtatgatttagtcatgatttaaaccatgaccataaaataccccatcatcgcaggacaacctgaatttacaaatatagtattattatctaatagctatttagtggatctattgaataattgctgtgctgatgtcagacattgtcctaagcactttacatgtattttctctacgtactgtagtactgactaacaaccttaagaattaacaccattatccccatttaacacgctgaggagagtctcaaatgacagtgaacatgacttgccaccacgtctataagttcgataacatgcaaactgcctggatttgaaccccaaattttctcagacttccaaacctcaggacatactataccattatatctcttgtcctagttgtgcaatgagtaggttagaaaaacctactacaagccagatttaagtagagcaaatatcattcatgacgaaatgcatattagtgtatattcttcatatagccaatttaaacggattatagtaactatgatacctatgaacaacgagtacgtttaacattaggagacttatagaaaccgtaataacaaaattctgtggattaagtagccttgttaccttcacaggatctgacccgttggtattgctcaacttctgcctgcaatgctacaggataacaagtcataccaaatttgcgaatttgtgtttggagttaaacaattagcatcttaatcgctatatatagtattataaccta

SEQ ID NO: 715145 - DNA, 544 bp, Homo sapiens
tgttctgagggtccccgaaggctggtcacaccggtacccatggatctactgagacggggatcgaacaggaggctttatcggctgcaaaactatcctagacttcagaacagaataccaatcacatagtgaaaattcctttgacaaaacacaaagatgttttgtttttaatgggagtttttttagagttttctttttttaaaaaaaaaaaaaagaaagttaaggccaacgggcaaactcacactgcctgacgcagggccgggtttctcttccttgagggccttttacagatgtcagctttcacggtgagcggcgtgggccaacgctgctcacggggcagaccctggtgtcttccaaagctagctacactgtcagatccttgggcatcgggaaaattgagaagatggctgtccatggcccagttcgaggggccagggcagagaaaatctgggagaagggtctacaggtgcgggagtatgagttacgagaaaacactttctcagatacgggacacttgggttgggggatccatgaccacatcgatctg

SEQ ID NO: 715146 - DNA, 656 bp, Homo sapiens
  misc_feature (23)..(23): n is a, c, g, or t
gctcggtaccccttgcatgtacnggggagaaccatcccagtaacccgaccgccgctggtcttcgctggacaccatgaatcacactgtccaaaccttcttctctcctgtcaacagtggccagccccccaactatgagatgctcaaggaggagcacgaggtggctgtgctgggggcgccccacaaccctgctcccccgacgtccaccgtgatccacatccgcagcgagacctccgtgcccgaccatgtcgtctggtccctgttcaacaccctcttcttgaactggtgctgtatgaacccctgctgcctgggcttcatagcattcgcctactccgtgaagtctagggacaggaagatggttggcgacgtgaccggggcccaggcctatgcctccaccgccaagtgcctgaacatctgggccctgattctgggcatcctcatgaccattctgctcatcgtcatcccagtgctgatcttccaggcctatggatagatcaggaggcatcactgaggccaggagctctgcccatgacctgtatcccacgtactccaacttccattcctcgccctgcccccggagccgagtcctgtatcagccctttatcctcacacgcttttctacaatggcattcaataaagtgcacgtgtttctggtaaaa

SEQ ID NO: 715147 - DNA, 952 bp, Homo sapiens
cgttcctgggcctggagggctgctttggggcaggaaactttggccaccaggcctctgacctgcaccaggagacactgggaggtttagtccccaaacccgcacagagcaggactgcagcctgaggaaagagcaaggatttcaggagagaggcctgcgacaagtgagcaggaaatagaaacttaagagaaatacacacttctgagaaactgaaacgacaggggaaaggaggtctcactgagcaccgtcccagcatccggacaccacagcggcccttcgctccacgcagaaaaccacacttctcaaaccttcactcaacacttccttccccaaagccagaagatgcacaaggaggaacatgaggtggctgtgctgggggcaccccccagcaccatccttccaaggtccaccgtgatcaacatccacagcgagacctccgtgcccgaccatgtcgtctggtccctgttcaacaccctcttcttgaactggtgctgtatgaacccctgctgcctgggcttcatagcattcgcctactccgtgaagtctagggacaggaagatggttggcgacgtgaccggggcccaggcctatgcctccaccgccaagtgcctgaacatctgggccctgattctgggcatcctcatgaccattggattcatcctgttactggtattcggctctgtgacagtctaccatattatgttacagataatacaggaaaaacggggttactagtagccgcccatagcctgcaacctttgcactccactgtgcaatgctggccctgcacgctggggctgttgcccctgcccccttggtcctgcccctagatacagcagtttatacccacacacctgtctacagtgtcattcaataaagtgcacgtgcttgtgaaaaaaaacaaaaagccttcagctacttggccattccccttaggggtcggatacaatctgcc

SEQ ID NO: 715148 - DNA, 943 bp, Homo sapiens
gggcaggtggattgcctgagctcaggagttgaagaccagcctgggggaaaccctgtctttactaagaggacaaaaaaaaaaaaaaaaattagctgggtgtggtggcacacgcctgtagtcccagtactcaaaaggctgaagcttgaaattcgtttgaacccaggaggtaatgttgcgtgaaccgatttcaccccatgtgattcagcctggggcaacagagcgacagagagagactggtgtcttccaaaaaaattaaaaattattaaataagattaacattaaaaggctacactataattataagcgcattccgtgagcgtggcaattgaaaaccgagaaaattctgcagaattttaagaaacttaaatgtgaacaaagagttttctgaaaaggtaagacgagttggccaaagctgtggctgtgggtgctttcgccctgtgatgatttcttgtaagagcccttgtggaagctttggggctttactcacttaaaaactggcttgggacatatggtgagcggggccttgaaagcgtggggttgcgcccttaggtgaggaatgatgtaggaggcccttgcataaagggggatcaaggcttagggaaacctaattggtgagcatttagcgaccatgagctaaccctcacctgagttgagagtctgaatccatactacctatgtcactctgaaaaaccttgagccagacagatggttcaatttaaaacgggatctcaggggtctgacagtgtccccagggtacccgagaaaaggccaggaaaggtcttctctgggaaaagagaagtccaactcagggcacaaagaattcccgtggaatacaggttccagtggaattacgcccacgagcttaaataatacttaaacgggcattattattatgccaaaaaagctacttggaaaggataccacaagggtaccaggcattgag

SEQ ID NO: 715149 - DNA, 1031 bp, Homo sapiens
cgttcctgggcctggagggctgctttggggcaggaaactttggccaccaggcctctgacctgcaccaggagacactgggaggtttagtccccaaacccgcacagagcaggactgcagcctgaggaaagagcaaggatttcaggagagaggcctgcgacaagtgagcaggaaatagaaacttaagagaaatacacacttctgagaaactgaaacgacaggggaaaggaggtctcactgagcaccgtcccagcatccggacaccacagcggcccttcgctccacgcagaaaaccacacttctcaaaccttcactcaacacttccttccccaaagccagaagatgcacaaggaggaacatgaggtggctgtgctgggggcaccccccagcaccatccttccaaggtccaccgtgatcaacatccacagcgagacctccgtgcccgaccatgtcgtctggtccctgttcaacaccctcttcttgaactggtgctgtatgaacccctgctgcctgggcttcatagcattcgcctactccgtgaagtctagggacaggaagatggttggcgacgtgaccggggcccaggcctatgcctccaccgccaagtgcctgaacatctgggccctgattctgggcatcctcatgaccattggattcatcctgttactggtattcggctctgtgacagtctaccatattatgttacagataatacaggaaaaacggggttactagtagccgcccatagcctgcaacctttgcactccactgtgcaatgctggccctgcacgctggggctgttgcccctgcccccttggtcctgcccctagatacagcagtttatacccacacacctgtctacagtgtcattcaataaagtgcacgtgcttgtgacaaaacacgaaaaagcgggggggcggtacaattgccaagtagtgataatacggccggttacagcgagggaacgtggtccagctgaaacctttgcgtggacgccgatcccacagcccagcggagcgattgcggtgtcttgg

SEQ ID NO: 715150 - DNA, 282 bp, Homo sapiens
  misc_feature (33)..(33): n is a, c, g, or t
  misc_feature (79)..(79): n is a, c, g, or t
  misc_feature (102)..(102): n is a, c, g, or t
  misc_feature (126)..(126): n is a, c, g, or t
  misc_feature (137)..(137): n is a, c, g, or t
ggtcctgtgtttgatcggaactcatagctatgncctgatagaggtgattaggaaaatgttgtttgttttaaagttttcnccagttattataaatattatatngtgaatttggaaaaatgtggaaanggtagaaggangaaatttcatcatcctcaagtttctaatatttgctgtttctatagcaaatttgatgtatttatttccagaccttgttactctttttttttttttttaaagacggagtctctctattgcccaaggatggagtgcaaatggtgcaaa

SEQ ID NO: 715151 - DNA, 1126 bp, Homo sapiens
  misc_feature (902)..(902): n is a, c, g, or t
  misc_feature (913)..(913): n is a, c, g, or t
cgttcctgggcctggagggctgctttggggcaggaaactttggccaccaggcctctgacctgcaccaggagacactgggaggtttagtccccaaacccgcacagagcaggactgcagcctgaggaaagagcaaggatttcaggagagaggcctgcgacaagtgagcaggaaatagaaacttaagagaaatacacacttctgagaaactgaaacgacaggggaaaggaggtctcactgagcaccgtcccagcatccggacaccacagcggcccttcgctccacgcagaaaaccacacttctcaaaccttcactcaacacttccttccccaaagccagaagatgcacaaggaggaacatgaggtggctgtgctgggggcaccccccagcaccatccttccaaggtccaccgtgatcaacatccacagcgagacctccgtgcccgaccatgtcgtctggtccctgttcaacaccctcttcttgaactggtgctgtatgaacccctgctgcctgggcttcatagcattcgcctactccgtgaagtctagggacaggaagatggttggcgacgtgaccggggcccaggcctatgcctccaccgccaagtgcctgaacatctgggccctgattctgggcatcctcatgaccattggattcatcctgttactggtattcggctctgtgacagtctaccatattatgttacagataatacaggaaaaacggggttactagtagccgcccatagcctgcaacctttgcactccactgtgcaatgctggccctgcacgctggggctgttgcccctgcccccttggtcctgcccctagatacagcagtttatacccacacacctgtctacagtgtcattcaataaagtgcacgtgcttgtgaaaaaaacaatntatataaaatncccctgttggccgcctggcccaatcgactttgactcaagcaagcttatcatgccggcgcattagagctcattggccaattggcctatatggagggtattgcaatactggccgcgttttaacacgccggactgggaaacccggcgttcccaactttatccccttgagcccccctttcccagatgctattaccgcccccccatccccttccgggg

SEQ ID NO: 715152 - DNA, 337 bp, Homo sapiens
atacagtgccaggatacctctcattatagcactacaatccttttttgggggggactggattatttattttgagacagggcctcactctgccacccaggatggagtgcagtggcacgatcacagctcattgtagcctcgaactcctgggctcaagtgatccttctgccttagcctcccgagtatctaggattacaggcatgtaccactacacccggctaatttttatttttttacatttttgtagagatggggtcctgctatgttccccaggtcggtcagtcggtcatgtggtacttcatttaggccaggtatggtgcctcggcgtgtgcagggtacc

SEQ ID NO: 715153 - DNA, 220 bp, Homo sapiens
tgctgctgccccgggtgcagaataccagcgtgtcattgcagagagaacgtcgctattgaacctgcatttaccaggaagactctgtgcattctgctgctgagtcttgcagaacaagaaaaatgagctctagaatttgctttgacagctacagaggaattgctattactcctgtaccttctgctcgatttcctttcctcatccccgatgacatgccttgggt

SEQ ID NO: 715154 - DNA, 299 bp, Homo sapiens
tcaggctggcaggactcatggatcagatctgagactggagggagaggcatttcgggtagcctagcgagggcgactggcggcagctgaaccgaggaaggcaaggttgtttctccccacgctgtgcttctgtgttcaggtgcgatatcacaattctcatgtgaacagtgatcacccatgcgctgcccttgatgatcaacggttgggtgcttacgttgatcaggcgcaggcaagttctgtgttccttgcctcttacatacgcatgacggtcaggctctgtatcccccctttttcagaggctt

SEQ ID NO: 715155 - DNA, 282 bp, Homo sapiens
ggtggattgcatacagcctggacacatggtgaaaccctgtctccacaaaaagtgcaaaaattagctgtgtattgaggcacacgcctgtggtcccagctacttgggaggctgaggtgggagtgattgcttgagcccgggaggcgaagtttgcagtgagccaagatagtgctactgtactccaccctgggcgacagagcatgaccctatctcgaagggaaaaaaaaaaaattctatactctggtttcttctggctttacaaagaagggctactggatccctgcc

SEQ ID NO: 715156 - DNA, 691 bp, Homo sapiens
  misc_feature (20)..(21): n is a, c, g, or t
  misc_feature (146)..(146): n is a, c, g, or t
  misc_feature (163)..(163): n is a, c, g, or t
  misc_feature (178)..(178): n is a, c, g, or t
  misc_feature (199)..(199): n is a, c, g, or t
  misc_feature (576)..(576): n is a, c, g, or t
  misc_feature (580)..(580): n is a, c, g, or t
  misc_feature (583)..(583): n is a, c, g, or t
  misc_feature (585)..(585): n is a, c, g, or t
  misc_feature (599)..(599): n is a, c, g, or t
agagcgcccttgtcccacgnntgctggggccccccagtagccatggctccggtgtccggctcacgcagccggatagggaggcctcgggctcggggggaagacgtcgcagttcgtcgaagagtccgaagcccagcaaatctgcccgntccccgggggccgccgntctcgctcgactctntgctctcggtccggggaccgngaatggactcacccatcagctgggtggcctcagccaatggctcccgaaaccagtcctaccgctcacgctcgcggcgcgtctagagagcggcctctgcgcccggggcatcccctttcgtttctgcctcctcgtcaggtctataacggaggtactgcgggcccccttacgggagcgacaagccttggcctagcctcctcgacaggagagggaggagagctgcggaagaagagattaggtgagagagagagatgtggcgaattggggagctcctgaagtatggggactttctccaaagaatcctgaaccagattctgtgaactacaccatgtggggatgagagcaagaaaagcactacttcaggttctacttcagaagangacnagnangaagaagtctagcngttcaaaaagaaagggtccagaaaaaggggaacggaacaaatcttttgacggaagccataagagtttctgacgatgcgacggtgactctgtt

SEQ ID NO: 715157 - DNA, 415 bp, Homo sapiens
  misc_feature (404)..(404): n is a, c, g, or t
agattgtttggtgtggctgttttctaacaagtcatcaattaatattaaaactgtcattcttccatcttcaacttttcaagttagttttgctgagaggtattcatataatctgttaagacatcctaggacaggccgggcccaagttgtcacgcctgtgaccccaacactctgggaggccgaggcaggtgcatcatctgaggtcgggagtttgagaccagcctgaccaacatggagaaaccccatctctactaaaaatacaaaaattagctgggcgcagtggcacatgcctgtaatcccagctactcagtaggctgaggcaggagaatcgctggaacctgggaggcggaggttgcggtgacccgagatcacgccattgcactccagcctgggcaacaggagcgaantccgtctcaaa

SEQ ID NO: 715158 - DNA, 392 bp, Homo sapiens
  misc_feature (20)..(20): n is a, c, g, or t
  misc_feature (37)..(37): n is a, c, g, or t
  misc_feature (267)..(267): n is a, c, g, or t
aaatccccttattaaagggncccctaatgccttcccncttgttgccttttaaaacaacactgaaaataaatatccttgcctcattagtcccaatttgttctttaagattaaaaaccccaggccggacatggtggctcacacctgcaatcccagcactttgggaggccgaggcgggtggatcatctgaggtcaggagtttgagaccagcccggtcaacatggtgaaacctcattctctactaaaaatacaaaattagccaggcatggntgcatgcgcctataattccagttactcaggaggctgaggcaggagaatcacttgaacccagaaggtggaggttgcagtgagctgagattggccactgcactccagcctgggcaacatgagcgaaa

SEQ ID NO: 715159 - DNA, 172 bp, Homo sapiens
tttttttgaactggtaatagaatttattcaaatgtgccttatatggcgctggggcttgcatggtgctcttgatatataggcccggacatctgccagtttttcttgagcatgacaccaagaagttgacagccaggtgaatgtatccagctcatcgtctgtcatctcacgtgac

SEQ ID NO: 715160 - DNA, 712 bp, Homo sapiens
attgctttctagaaatgacctaatgtccccaaccacttgtagtggcagatcactgtttcacagcatattttctcccaaggaaagtattcaaaagagactgcaactaacaagactcttatttcatcaaaatttaaatatttctgagttgtatttttaatgcctctttcttttctgcctaaatgcttagaaattataaagcaaaaaaaaaaaaaaacagcaacaaaaaatcgaagcagacaaaaaaggcactttttcagaaacattcaaattccttattgaagaagaggagaagataattggggaaatttggacatttggatataaatttatattggtaatgtgtatgtcggttaattgcaccgggaatattggacttaggtgagtatcagttaacatcctgtattatatagtggacttcaaacataattggcaatcatctggaacttggatggtcagggggagatttggaaaaaatatttagttattccaaattcatatgggtccaaaagtactcagtttctggctgaataatattttcaatttcaaagggtttggtcccctctgtgctccattctgaggctcaagagctttaatgccagtatgttttctgagttaaaataaccacttttagattgagaaaagtggttgttttcatacagggctaaacattgtagataacttacttgtttgtttgcaaacacaaaaaaaggcg

SEQ ID NO: 715161 - DNA, 93 bp, Homo sapiens
ccaatggttggtcactgtgagatcatcccccacagccagtgcaggaatccaggtagtgggggatgatctcacagtgacaaccaaagaggatcg

SEQ ID NO: 715162 - DNA, 565 bp, Homo sapiens
ctagaggaccgcaacttcgacggacattcatcctgacagtagtacctcagcttccagaatcacttggaacagatcagctcacacccagtctctcacaagtgttcattccataagagtggttgactaaagtgaatgcgtccgtctagtttatttgcatagaggtgtttgtagtattctctgatggtagtttgtatttctgtgagattggtggtgatatcccctttatcatttttttattgcgtctatttgattcttctctctttttttctttattagtcttgctagcggtctatcaatcttgttgatcctttcaaaaaaccagctcctggattcattaattttttgaaaggttttttgtgtctctatttccttcagttctactctgattttagttatttcttgccttctgctagcttttgaatgtgtttgctcttgcttttctagttcttttacttgtgatgttagggtgtcaattttggatctttcctgctttctcttgtgggcatttagtgctataaatctccctctacacactgctttgaatgcgtccgtcgaagttggggta

SEQ ID NO: 715163 - DNA, 173 bp, Homo sapiens
gaggatcaccagaggaagaatgtgctatggcagccgtcggcatagcgcatggctggctaggtgatctaaatgatctatggtgatggtgggcgggttatcagtgattattacaagaatgcataagattcctactaatgttatttatccaaaaaccttactgcacatcttccaat

SEQ ID NO: 715164 - DNA, 100 bp, Homo sapiens
  misc_feature (11)..(11): n is a, c, g, or t
  misc_feature (43)..(43): n is a, c, g, or t
  misc_feature (45)..(45): n is a, c, g, or t
tggggcaaaantgtccggccaccccccgggcaatctgttggcngngtctgtctcttggctttgtcacttttccttttcttaaaaacagtgccatgccaat

SEQ ID NO: 715165 - DNA, 667 bp, Homo sapiens
ctggtatcttagtcaagtaaatgatagaatgacagccaaagaaagggaaaaattccctaccggccagcaagctgtctccagtataggatccccactgggacctcaactcagatcagggccactgcagtcaaaacacaggttgacctgttttctagaaagactaaggagaattaggaaaaagcccatgaattattcaatgatgtccaccataactcagggaaaggaagaaaatccttctgccttccttgagcagctataggaggccttaagaaaatatactcccctgtcacctggctcactcaaggttcaattgatcctaaaagataagtttattacccaatcagctgcagatatcaggagaaagctccaaaagcgagccctaggccctgaacaaaatctggaagaattcttaaacctggcaacctcggtgttctataataaggaccaagaggaacaggcccaaaaggaaaagcaacatcagagaaaggctgcagccttagtcatggccctcagacaaacaaaccttggtggttcagagatgacagatggagccggccaatcacccagtagggctttttatcagtgtggtttgagggacactttaagatgtctaatgagaacaagcacccccagtcatgtcactatgccgagcaatcctgggcacctg

SEQ ID NO: 715166 - DNA, 781 bp, Homo sapiens
atctgcatccacacgcaatgcgcacgtgagcgtggaggtgtcaggcggaggcacctgctcacctgcatagtggcacgcatgtgtgagggacggctgtaatggtggctatcctgctgaactcttggaactccgtggacaacaaacaggcctggtttctaggtggcctctatgtagatcccgatgtagtggtgcatggaccgtactccatcacctccctgtgagcaccgacgtcaacggctcccggcccccatgacacgagtgggagggagatactcccgcaagtgtagcaagatctgtgagccatgtgctacaggcaccgagctacaatagcaggtagcaagacactacggaatacaagtgtcctactaggcgtctccaataggcgagaaggacatcatggccgtagatctactaataaacggccccgtggaggtgagctttcatcgtgtgtaattcggacttcctgatctacagagtcaggagtgtaccaaacaggtcaccggagagatgatcgggtggccatgccatccgcgatcctgggctggggagtggagaatggcgacaccctactggcgtggattgccgaactcctggaagcactgactgggtgtgacaatggcttcgtcttgaagagtacgtcagcaggacaggagtcactgtggacatcgcagtcagaagtggtggctggacttccacgcaccgatcagaactggggaacacgcatctactctgccgagggtcctgtagttgccagtacctgaggggcgagatgggggtagaa

SEQ ID NO: 715167 - DNA, 707 bp, Homo sapiens
  misc_feature (5)..(5): n is a, c, g, or t
  misc_feature (83)..(83): n is a, c, g, or t
  misc_feature (137)..(137): n is a, c, g, or t
  misc_feature (168)..(168): n is a, c, g, or t
  misc_feature (172)..(173): n is a, c, g, or t
  misc_feature (178)..(178): n is a, c, g, or t
  misc_feature (180)..(180): n is a, c, g, or t
  misc_feature (182)..(182): n is a, c, g, or t
  misc_feature (184)..(184): n is a, c, g, or t
  misc_feature (204)..(204): n is a, c, g, or t
  misc_feature (272)..(272): n is a, c, g, or t
  misc_feature (278)..(278): n is a, c, g, or t
  misc_feature (280)..(280): n is a, c, g, or t
  misc_feature (285)..(285): n is a, c, g, or t
  misc_feature (289)..(289): n is a, c, g, or t
  misc_feature (291)..(291): n is a, c, g, or t
  misc_feature (336)..(336): n is a, c, g, or t
  misc_feature (339)..(340): n is a, c, g, or t
  misc_feature (347)..(347): n is a, c, g, or t
  misc_feature (352)..(352): n is a, c, g, or t
  misc_feature (362)..(363): n is a, c, g, or t
  misc_feature (375)..(375): n is a, c, g, or t
  misc_feature (379)..(379): n is a, c, g, or t
  misc_feature (381)..(381): n is a, c, g, or t
  misc_feature (394)..(394): n is a, c, g, or t
  misc_feature (396)..(397): n is a, c, g, or t
  misc_feature (400)..(400): n is a, c, g, or t
  misc_feature (405)..(405): n is a, c, g, or t
  misc_feature (422)..(422): n is a, c, g, or t
  misc_feature (429)..(430): n is a, c, g, or t
  misc_feature (433)..(433): n is a, c, g, or t
  misc_feature (437)..(437): n is a, c, g, or t
  misc_feature (447)..(447): n is a, c, g, or t
  misc_feature (482)..(482): n is a, c, g, or t
  misc_feature (488)..(488): n is a, c, g, or t
  misc_feature (499)..(499): n is a, c, g, or t
  misc_feature (502)..(502): n is a, c, g, or t
  misc_feature (509)..(509): n is a, c, g, or t
  misc_feature (522)..(522): n is a, c, g, or t
  misc_feature (540)..(540): n is a, c, g, or t
  misc_feature (547)..(547): n is a, c, g, or t
  misc_feature (559)..(559): n is a, c, g, or t
  misc_feature (576)..(576): n is a, c, g, or t
  misc_feature (592)..(592): n is a, c, g, or t
  misc_feature (598)..(598): n is a, c, g, or t
  misc_feature (608)..(608): n is a, c, g, or t
  misc_feature (620)..(620): n is a, c, g, or t
  misc_feature (644)..(644): n is a, c, g, or t
  misc_feature (702)..(702): n is a, c, g, or t
gggcnggctggggttcactgatgtctactggaggcagcttccatgccttctggggtcctgagtctccatggcttgtggggtcngggtcccccctggattagtggatggccagagtggcatagacactgggctcagcnggagaggccccttcctgggatggaggaggcncagnngcctncngncngagggtaaagctgtgcagcngggcgtaggtcacatcctggggggcttcagatgcagcagcctcagtgtccatctgtctgtcctcttcngcctgncngtccnttgngnccaggaattccccagacagtggggagggaggagaggccatttcanacnnaggtctngagtntttcaccttnncatacgtcactncctngnggtcttcatcgtntnngcnccgantttccatttccaccccntcctcannctntttntctatcacgncagcccagaagtgttctccctggacgtcagcagcngggctngacctcctctntangcccccntccttgggctctngctcggcatcccctggangacgttngaaatcagcctntgtgctgggccaatttncttttttttcccttantccatnattttattantattaataatantatttatataatcattatttatancaccaatacccctatcattacctcccatttccttctcataacaattttttttacttanccttt

SEQ ID NO: 715168 - DNA, 969 bp, Homo sapiens
caaaagacgttggaatgcccattgcaatgttagcatgtacgacagatggggcgcatgaaacgtcgccgcgaggtgatggccgactgtttagcaactatctcatcgactatactacccaaagagcagttgaagaagacatagaattcgtatgctaggatatctgtcacataatcttgcatgcaggtattcctaaatctgatcgacagcagatatgatctaaggacaggagcagctagctcattgatgtgggaataaatagagttctagagatacgcttgtaacttagtcaaataccgctagagttggtatggaggatgtggattcggataggagtacagacagacataacgcgtgggctatatcactctcagttcctggtacggtgcttggcctcctagtgactagtggcaaggctaatgaagaataccatgatcgctgtcaacactacggtgctgaggcttgaagagcgagaagtgctgaagtctaagagagcttggggtagccacttaattcatctacgtgtgtcttcttgtgtcatcaaagcagcactccatggccagcatcaagaagcataagcagtgccaatacgacaatgcaatatccaaatttattctactgcaactggttgatccgtgatgccttgtattaatccgaaagcttacatgggtgggctgtttctgcacatagctctgacagatatactcatcagggagcataccacttatcatgcagggccctgagatctagccaggagcagacataaactagtgattaatcatgggacgactttaccatatggacggatggatgctataacttagactaagcagctcagggacacatccgccatatcgagggattgcatttcccagagtgactattagccataaggagatgataccgcatggtaccgtaaccaaaaccttaggaggtccactgatggaacacaggaaaggtgtgcttagagaa

SEQ ID NO: 715169 - DNA, 110 bp, Homo sapiens
tccactgttgacacttcagtcattggtagcagcaatgcagcattttctccagttctaaatggatctgttttatccatgcttctttctgaccatgtctgatcagtctgtct

SEQ ID NO: 715170 - DNA, 1731 bp, Homo sapiens
  misc_feature (994)..(994): n is a, c, g, or t
  misc_feature (1318)..(1318): n is a, c, g, or t
cacagagcgacgattagcaaggttcccactagagggcttgctctcctctttcacctgctctgttgctacagggatactaaccggacgacaggcatgaatctgactacagcagtttagctctttgtggtgcctggtacttagttgttgctatagtagcgtcgtgtatcaccgcgcaggtcgtcgtggcgaacggtctgccctgtcaatgcaactaccaggagagatgacatattccagcatcatgtctgcagttatcccagcgcagaacccaactcaggtgagtcctgactcagtatgtagacgaggagcaaggcgcccagtgcacctaggggctacgacttgcgagccgaggtgagcttagcaggcagagtgatcctgggacctcccagcggcggtggccctaccagagtgtttcgtgacaagtcggtatcgatgagatacggcataagatggaacatggagactacactgttcgtccatacatcgtcagcgactcgtacatttatggtaagacgcatcaatcgctggaaatggagagccttgtacgcagggtagagtggtaactggtgcgtgtattctctgcgaagggcgccatagacgtgcacatacgggagaatgtcaaggttgcgtggcgccatggatgaatatggcgcagatgggaatggcgcgacgcatttccgccagacatgaacggctccgtgcatattgtttgacatgaaaccgtttgtgccgggcagtactattgctgaatgggttttccgtatatacatcctggagttgcaagaagtgggagactcagcacacatttacgtaggaactaaaattctttgagcgggcccatggggggagcccttttaattaacaccctgtggggttatgagatattcgcggaagccccaaaaaagttacgaccgtggaatcgcgcggaagaatcaaccttattgagtacatcttagtttccaatggacacccaatccttttacaagacaaaagnccaattgtaatccccatagggctaagttgcccacaggctgatgggaatgtgctgctgggcacagcgcgtttgcacacgggtcccccgagtgactaattttgccagcacacggggttgatcattttctatggggggggcccgcacaaatatgtgtcttcttgtggccattgcgccccacatgagaagttaaacagttggttcttccaacagagcgatgtgttgggttggcgccacacagaaagtttgctcccccaggcgtgcgatataagcgcaggatctctcatacgagagaattatgcatcacaatattacccgccgtgtganaaaaaaaaagaagaagggggcctggagaaaacacgaggcggagtattggccaccacatataggggggagaagagaccccagaccggtcacctgagagaagagaaaagatccaagacgaaatgaaggaagatgaaaataacaacgagtacaacatagagcagagaaacagcggaaaggagaggccggagagcggagaacaaaatgcagcaccaacaaagaaaagtagacaaaaagaacgatgaggagaagcagaagagacgagtaggactctcacggtgaggttctacactagcttgtctctctcaactactaaccatagccaagacgagacaacgaagaacacacagaagaacaacgtcacacaaaacacagagagagacgacgcaaagagagaaaccaagataaaaacaacc

SEQ ID NO: 715171 - DNA, 229 bp, Homo sapiens
  misc_feature (114)..(114): n is a, c, g, or t
  misc_feature (154)..(154): n is a, c, g, or t
  misc_feature (170)..(170): n is a, c, g, or t
  misc_feature (177)..(178): n is a, c, g, or t
  misc_feature (217)..(217): n is a, c, g, or t
ccaatcagcactttgtaaaatgccccaatcagcaggattttaaaagtagacaatcccagggaggattgaaaaaaagggccctttgatagggcaaaaacggaacatgggaggggncaaataagggaataaaatttggcccccccagccagcagcngcaacctgttcaggtngcctgcnnctgtggaagctttgtccttttgcttttcataataaaccntggtactgttca

SEQ ID NO: 715172 - DNA, 417 bp, Homo sapiens
tgctgggattacaggcattagccaccatgcccagcccgaaatcttgctctctctttttttttaatgcaaaatcactctagtttctttggtttttttgagacaaagtttggctcttttcactcaggcttgaatgcaatggcacgatctcggctcactgcaacctctgcctcccaggttcaagctattctcccacctcagcttcctgagtagctgggattacaggcacctgccaccacacccagctaatttttgtatttttagcagagatggggttttgccacgttgaccaggctggtctcgaactcctgagttcaagtgatccgaccacctcggtctcccaaagtgctgggattacaggcgtgagccactgcacccggcgttttatgttaaaaatagggtaggaaggtaaatggaaat

SEQ ID NO: 715173 - DNA, 320 bp, Homo sapiens
tgtcacccaggccggagtgcagtggggtgatcatggatcaccgtagccacaacctctggggctcaagcaatcctccatctcactcctccaccaggtagctgggacttcaggcacatgccaccatgcctggcttcaatactgtttttcattaggggaatgtaaattaaaaacagtgagataccactgcataactaccaaaatggttaaaatccaaatcactacaactccaaaagctgaaaggggagcaataataattctcactcattactggtgggaatacaaaatggtacagccactttgagattgcggtgataggggta

SEQ ID NO: 715174 - DNA, 234 bp, Homo sapiens
cccagttttcgttcctcctttgtttgggtggggttgcctttttggttgccctcttagggggttgtttccccccccttttgccttggccttcccaaaggccccttcccttccaagttgtaccggaaattaccgttctggcctttggttttaaaaccaggcggtttttcctggaggattgtttcttgttttccctgtgggttattctttggattttaaaccggcttaaaatttcca

SEQ ID NO: 715175 - DNA, 384 bp, Homo sapiens
ctgtatacggggagttcccaaatttccctgagcctcacttccttgtctgtcagatggtgatggcaggatctagatcatgcctgcaaagagctagcctagcactatatgtgggaatgaaggacagtttggattcacagggttataggatccgagggttcttatgcaagcataagaggtgcctttgcagcatctccaacatgaacttgcatgcttccagagacagggagctcagttcttcttaaggctgcctgctccatccttgggcacttgggagtgttggaaagttcttccttatggtgataccggctctgtctccggccccaggaggcagaccagctcctctgcagatgaagggcagggcaggcactgaaagccaactctggt

SEQ ID NO: 715176 - DNA, 479 bp, Homo sapiens
aacaaatttttatatttataagcacaatgttgtacagcagatctctagcacttaccttatataagtgaaactttatacccattgaacagcagctccctacttcccctctcgccagcccctggcaaccaccattctatgcttctatgagtttaactattttatgtagtatttgtctttccttcacttatcataatgtcctcacgatttgtccattatcctgattcatcaattctgtcacatatggcaggagttccttactttttttttttttttttgagacagagtttcgctcttattgcccaggctggagggcaatggcacgatctcagcttaccacaacctctgcctcccgggttcaagcaatgctcccgcctcagcctcccaaatagctgagattacaggcgcacaccaccacacccagctaatttttgtatttttagtagagacggggtttcaccatgttggttaggctggtctcg

SEQ ID NO: 715177 - DNA, 449 bp, Homo sapiens
agcattaaaaaggaaagaggtaacgtcctttccagggacatggatgaagctggaagccatcatcctcagcacataacacaggaacagaaaaccaaatactgcgtgttctcactcataagtgggacttgaacaatgagaacatatggacacagagagggggaagaacacacaccagggcctgttgggggtagagggtgaggggagggaacttagcggatgggtcaataggtacagcaaaccaccatggcacatgtatacctatgtaacaaacctgcacattctgcacatgtattccattttcttttagaagaaataacaagaacaacaaaaccccccaaaagtattccttttattaatccacaacttaagtaaaattacacatcttacgtctctgtttcctaatgctttggattcatttaataaaggcctattgcttttttgtttgttaa

SEQ ID NO: 715178 - DNA, 1274 bp, Homo sapiens
cagcctgagcagccacgcctatatgggggcctgggcagccatgcactggctacccggtggcagcatctattgcccccaacggatgggctcacatccgatgcacaggacatgcccaagcacccccatgatgtgcctaggaacctgaactagcatccagagacacctgtccatacacatatccacggtatccagaacccacagtggacccaatgatccagtgagaacagccgagcagccgagagattgtcaagccgcatgaccacaaaaccagtgcaaccagagacaagccccaggcacacaaacagcgccacaagcagcaaggaaccacaacggcaaaccgagagacaccagaccctgcggcaacgaacacgcaccagacacgacacatgcattgaaacccagaaaacaatacaaacacaaacaacaaaaccaacgaaatcaaaatcaaaaaaacatacaacagaaaataaacacaacacacacaacacacaaacccaaaatcaaaaatcatacacatacacaacacataaacaacaccccgcacacgactacaacacaccgagtccaccgacagcaccgagagagcgcgaacgaaagtgacagcgaacaggaagccgcaaagaaacgacataggaccagagcgcagcaaccacgcgtgcaacacaaaaacacacacacaatacaaccccagcacgacagcaacactacaaacacacctaatcataataattaccagaccacgcaacgtaaataactctgcacaagataacactcaataaattataaatcacaaccaccaactatctacacaccacaacaaacctaaaaaaaaataaaatcactaccatactacacaccaaaaccaacaacaccatcacagatcagaccacaaccacaataaataccaccagtaaaacactaacaaatccctcctataaccaaacaacaacaacatagtatgaaaaacaacactacacactacaacaacgcaaacacacacaccaaacatacctcacaactagagacatccggtaaaccacacaacctacaaagataattcacgacgacactacacaaatccccacaccaacataccacgaagaagcccaaacacccaacacctaaaacaccaaccacccatagcccaatccacaaatcaactccaacataaaccaaaaacacataaaagacacacacataatccactaacaatccacaaatacatcactacaacaaactaacaataatctaacaactctcacactcaacacaca

SEQ ID NO: 715179 - DNA, 505 bp, Homo sapiens
ttggccagcacgtggtcgcttactcctgtaatcccagcactttgggaggcccagtgaggtgggagaattgcttgaacccaggaggcagaggttgcagtgagctgagattgcaccactgcactccagcctgggtatcagagtgagactcttgtctcaaaaaaaaaaaaaaaaaaaattctaaaatagaggttgggccaccaggtgcctaatattaaattaaaaacctccttgccatcatattttcccgtgctgcacccaatccccaagacacccttcacgaccattgatatacgcggtattaccacagttataaagacttgtgcaccttgcattatgtcattacgggcacatgtggttccaggagaggcacagtttgagttgcaaaaaatggtacacttgtgaggcttgccccaggctttgtgtaccggcaataagaggtgacccagggttctccccgtaagcgcatttctcccggaccaagtggggccaccatgggggtaccgag

SEQ ID NO: 715180 - DNA, 361 bp, Homo sapiens
cttgtatactacctatatttattcaacctctctcatttccgttttgaaaaactggagtagtctgaaactcttttggcttatggtgaccagaaatagtgttctggctggcacctctctaaaagcatcttcttgacgagacataggttgaaatgttaaatacatctccacttacccacaactctggtgctgcagtaatctgggagcatgcgctcacacaaagccacaagcagccagaaagcttcctcctctttggcataaagcagcagcactgaagtgacaatattcatggcctggcaataccctatgttgggatttcgaaaagcataagctgttaagactctccttagtgcagcaatgccca

SEQ ID NO: 715181 - DNA, 317 bp, Homo sapiens
  misc_feature (204)..(204): n is a, c, g, or t
  misc_feature (301)..(301): n is a, c, g, or t
agctcgatacccgcctggggagtacggaattcattctggtcgtagggatgcggaggtattgttagaattagagtaggtgacccctgagttacatcaggatgaatagaaattagctaagccactaggacatcacggttggttaaataccaccgcgcctggtgcagtattacaccatatttttaaaaaatgaggccgggcgcgtgnctcacgcctgtaatcccagcacttggggaggctgaagtgggcggatcacctgagttcaggagttcaaaaccagcctagccaacatggtgaaaccccntctctactaaaaatag

SEQ ID NO: 715182 - DNA, 345 bp, Homo sapiens
agctcgatacccgcctggggagtacggaattcattctggtcgtagggatgcggaggtattgttagaattagagtaggtgacccctgagttacatcaggatgaatagaaattagctaagccactaggacatcacggttggttaaataccaccgcgcctggtgcagtattacaccactcctggccaagcatccacttgttaacctcccacatatcagtgacaacatgtgatcatttgtcttcctgtccttcgcttatttcatttaacgtaataacactccccttccatccatgttgtggcacataacaagaattcattctttttatggccaggacaatattcattat

SEQ ID NO: 715183 - DNA, 196 bp, Homo sapiens
tctagaggatcccggcctgagtgcactggctcaatcacagtttactctagtcttgacctcccaggctaaaatgatccttccacctcagcctcctgagtagctgggactataggcacgcaccgtcatgcctggctgattttttaatattttgtagaggcagggtctcgctatgttgcccagggtggtctcgaactcc

SEQ ID NO: 715184 - DNA, 867 bp, Homo sapiens
gcaaccacacaaaaaagccaacataataaccagccaacagcacaatgacaagatcaaatctacacaaatcgatactagccttgaatgtaaatgggcaaatgccccacgttaaaaggcacagagtggcaagctagatttaaaaaaaaaaaaaaaagggagacccaagggtatgtcgtcttcaagaagacccatctcacacataaggacactcatcggtctcaaacgtaaaaggagtggagaaaaatctaccagaacaaatagaaaacagaaaaaaagcagagggtggcaatcctaatttcagacaaaacagattccaaaggaacaaatcaattttccaaaagggacaagggggcaggggcaagatagccgacctcaaaagcagcggcagttggaggctcccacggagaagaactaaaagagtggtggcaaatcctggcagcagcaactggacatatccaggtcctaaggatcaggacggacaagggggtggccgggacccaaagagaacaaggaaagatgggctggggggatgggcccaccggggagccacagggggcaaggggagccgtcaccctcagccagccaagggaggcagtgagtgagcaggctacccagccggggaaacggttggcccagggatcttggcaatccacagatcagaagatcccatcatgagaccacaccagagggcctggggggccaacaaagaagcttgcagatactcaaaagcagtcaagcggagtcgggctaaactaccgaatcccaagtggggagagagggcaaaacatggggtgtctggaggcaaaaccgcgagtccgggcgagggagcaaccacagaaacagctgccaaaactgaacccagaacgg

SEQ ID NO: 715185 - DNA, 92 bp, Homo sapiens
tgtttttccagccccccttttatgcgatgtcatcttttttaaaaaagacaaatgaagccccagggaaagtgaaataaagccttggccctcca

SEQ ID NO: 715186 - DNA, 354 bp, Homo sapiens
cctgctagcattcatccaagtgttttcatgaggtctgagccgcacgctccatgtttcgctcatctctactgctcctcgtgccctgtgtgagcatttgtcatcccaaaagagggggctcagatggtgcggcctgagtgtgcggccggcggcatttgggatacacccgtagggtgggcggggtgtgtcccaggcctaattccatctttccaccatgacagagatgcccttgtggggctggcctccttggcgcctgtccccacggcccccgcagcgtgagccacgatgctccccataccccacccattcccgatacaccttacttactgtgtgttggcccttatcgagggggatcct

SEQ ID NO: 715187 - DNA, 116 bp, Homo sapiens
tctgagagctccgactgtggtgtacgtaccatgtgctgcaatggtatatttgtccttttatggctgaatagtatccattgtatatatgtgcacatcttcttaatccattcatctgt

SEQ ID NO: 715188 - DNA, 677 bp, Homo sapiens
  misc_feature (139)..(139): n is a, c, g, or t
gaagggggctggcaataccttatccttcaaagcataaacaagacctgcagccattatgagtgtgcatttctaggtggactaaaaaccgaaaactgtattgagaacctagaatattttcaacccatctatgtctacaacnctggtgagaaaaaccagaagcttgaagaccatagtgagaaaaactggaagcttgaagaccatggtgagaaaaaccagaagcttgaagaccatggtgtgaaaatccttgaacccacccaaatacctgctccaggtccagttcctgttccagggtcccaaaagccatccttctgcatccttgggcaaactgctgcttccacagtttgggatggtcatcattttaatcagtgtttctgctataaatctctttgttgctctgtagtttgatgcattgtttatctttcttattctttacttgaaataactatagggatacacaggagatcaaaaggaatgatgtattttttacgtgttggccaaagtcactggataaaatgagaattgtatatttgttattcattttgcaaattcagaaagttggtccagatatatgtcacagaacttttcacttgtatactactcttacaatggaaaaaaatcccgaaaactgtatacttctgattaaattcaataaaagattttgattagatatttcagaa

SEQ ID NO: 715189 - DNA, 825 bp, Homo sapiens
agacctgtaataactataggtgcccatgccgtaacatcgactgaccaatcacagcgagctatgtgatgctaggcaagtgtgcggtagattcttcggtctatgcatgacatgatatccacgtgctcatttcagggaccggcgaaatattccctgcatttcagtgcatgcacagacgaaattatacaagagctcccatagccacagaaatcgctgagtaacaaagcaatcgcaaggctggaggcatcacatgccctgacgtccgaaatctacattaacgatctgctggtcgtagtacaacatgatatgccccagctattcaggagagtctgacagcagtggaggatcccatgagcccaaggagactgtagggctgcaggtgacctatgatcataccactgcactccagcctggacaccagagaaaaaccctgtctctaaaataaaacaaaaaaacaaaatgtagtacaaagctatagtaaccaaatcagcatagtactggcataaaaagagacacaaagaccaatggaacagaatagatagcctagatataaatccatgcatttacagagaactcatttttgacaaaggctccaggaacacacaatggggaaagaacagtcctttcaataaatggttctgggaaaaactaagattaaccacatgctgatgaatgaaactagacccctatctctcaccatattaaaaaatcgaatagaactggcttataacatttaacatgttcagacggtgatgctgccaacttactgatttagtgtatgatggtgtttgaggtgcccagtggtactgtgtctatcaggtgtcctct

SEQ ID NO: 715190 - DNA, 381 bp, Homo sapiens
  misc_feature (3)..(3): n is a, c, g, or t
ggnggggcagcaccatgcccagctgaaaggatggggttaggggagcatcatgtccggctgaaaggacgggctggggggagcatcatgcaggccaagacacagcacctgtcttactcctcacagcaggagctggctgaggattgccgctcatcacgcagaggggcgagagcagacaccgggctgacgaatgcccaggacctcaaaatctgcacaactgcactcagaagcacactgcttctgtctctgttcaaaacacccagaacaacaatcaggaacgaggctcccgtgacggccgtccccagagccagccccaccccaccacaagtgctgacaccaggccacactgccccagccaggccagagagggaccactggctacag

SEQ ID NO: 715191 - DNA, 133 bp, Homo sapiens
tgcgtagagtccgggcggcttgggatcttggcaggtaaattgaccctccagacctcacgttggttccggagcccatactcgcggatcagcttcagctcttggtcggagacgagatttctcgcaagggtctccg

SEQ ID NO: 715192 - DNA, 1000 bp, Homo sapiens
gctgggaactggagcccgaggctcccgcgcggcccgggcctggcgccctgacggggaagatgcggccctggcccgagggtgctggggctggacgagcttttactccaatacctttcctagccatgacggcacgggcactcctagggaaggcagccacaatggacgatccctatccacgggaacggctgacagcccagtgctatgcttccttgcaactgcatgactgtggcttgtgacgcaggacctccagccaggtgactggtagtcatggaccccaaccctcaactgaacaccacgcactttgtgtctgtgtgtgctatagggcgcgctcctggttgactgcgacctcactccgcctcagggctctggtcctgccatacgcatcttcacatacaccaattccatatcatggtccctggcagactgagcgctggcatcgcgcggacaattgcctgcgcagcaaaacgcttcgcacatacgctccaagcaaatgtgctgcgccactccacacaccctatacacgctgccacctcacagccaacctgctccatcagcaaccgcattctgcgctccgaggcctcaccgcggcaactgttggaccctgttcgggccttagctgcctcgtcagcactctgcacggtctggcctgccgctgaacggacccgcacacgccggcacgcgctacttgacgccacgtgctcccctgtccattccttggtcgccccgggggctgcgcttgcacccgcggtccctactcgtcgtatccacgcccgttggcgtgccaggaccccaaggcactgcctacctaggcgttgcacttgccccttcggcctggaactcttcttgtcaaggaacgttcactccagaagcattcagacagaaggcaacatcctggggcatcccacattgccactatacacaactgcgcacacctatcatattgccacgcacatggccggcacaacagccttcctagtgcaagcacgtggaaccattccac

SEQ ID NO: 715193 - DNA, 484 bp, Homo sapiens
  misc_feature (136)..(136): n is a, c, g, or t
  misc_feature (186)..(186): n is a, c, g, or t
  misc_feature (280)..(280): n is a, c, g, or t
ctcaaaaagtcttggagaactccttttcttcccccagagagggggtcttactcggtccccccaggctgggagcaccagggcacaatcagggctcactggagcctcccagactccggggctcagacagtcctccggnctgggcctcccgaagtggtaagattacgggcatgagccaccacccagggncacaatggattctggagaacacagtggcaggcactacaaatttggggataaaacaaaggcgtgaatctggccatcacgggtttacacgtctccnagactggtaagggggtccgcaaactaactccagccggagggcctgatctttcagcatcggttttggtaaccaaagctttatgggaacacaaccaggttaagccacgacagcagagtggaataatggggacaaagactatacagcccctatagccaaagagatttactatcgggccttttacaggaaaagtttccagccgctcat

SEQ ID NO: 715194 - DNA, 245 bp, Homo sapiens
  misc_feature (28)..(28): n is a, c, g, or t
  misc_feature (58)..(58): n is a, c, g, or t
  misc_feature (85)..(85): n is a, c, g, or t
  misc_feature (93)..(93): n is a, c, g, or t
  misc_feature (113)..(114): n is a, c, g, or t
  misc_feature (125)..(125): n is a, c, g, or t
  misc_feature (135)..(136): n is a, c, g, or t
  misc_feature (149)..(149): n is a, c, g, or t
  misc_feature (152)..(152): n is a, c, g, or t
  misc_feature (154)..(154): n is a, c, g, or t
  misc_feature (165)..(165): n is a, c, g, or t
  misc_feature (174)..(174): n is a, c, g, or t
  misc_feature (196)..(196): n is a, c, g, or t
gggcagaccttcactggccacgagtctnacatcaatgccatttgcttctttccaaatngcatgcatttgccactgctcagacgangccacctncaggcgtttgaccttcgtgnngaccaggagcnaagacttacnnccatgacaacatnatntncgggacacctntgtctcctnctccaagagcgggcgcctcctncttgctgggacgacgacttcactgcaacgtctgggattgcactaaagcc

SEQ ID NO: 715195 - DNA, 133 bp, Homo sapiens
ggcacgaggcctcgtgccggaggctgtttctgagcataatctcatggactacccaggagaagagaattttaagttgcaaagctatggggcctaccccacccagcccgggcagggctattcccaggagagcagt

SEQ ID NO: 715196 - DNA, 244 bp, Homo sapiens
ctatttgaatcactgacttggggcgatacagtcaactagctcgtggaaatctaagggccacctcgtctctagtcgaccagtaggcttgcacttttaatatgagtcctacgtaatagaacgtcttgtctggtatagagtgatgtttggatacacgtatatatttggtgatgatcaaatcaggctatatagcatatttttcacctcaaacatttatcatccctttgtggtaagaacattcaaaatc

SEQ ID NO: 715197 - DNA, 989 bp, Homo sapiens
tacctgtcctctttcaatggactgttgcctattgagcattgtggatgatgtgttcttcagatttaccaggatgacatgttctagagcacctaccgtgttgtggtccaacagacgtaaattgagaggaaaggccttgcgtacttgctctgatcaaccagcatataagcgaacagaggcttaatgcggatcactcaagaggcagtcatagcaatgtcaaatggcatataagtacggtgttcgggtgcctttttcctagaccaggaatggggaatatataacacctgtgccaccgctctttttaaggaggcattatgaatgagtgcagcattcctgtcctctgtgccaggttttggtcttagaatccatgtcacgattggttgcttccagaacatctatttcccaagtttcaattcaggagttggcccttggaaagggctatttggccaatccccgtgccgtataagacagggaggcaagtgaaacggaattaacgttggggttaggaccaccaaagcataaatggactttgcacacgccgggtgaacgctgcattgggagctcccagttccttgtgtgtttacgcaggaaaatactggaatggtctggtccatggtggccaagaacacgtggcttaagaaacccgaaatacccggacatttacacttaaggttacaccgggcacaattgatccctttgcaaggaagctttaacggggcctgttataaacacgacggggttccccctgtggtcactctggggtctttcaaacccaagagggcggatccgtttcttccaaataggaatgtgtccccaaacagttttatggttcttgggggcaccacattttgtgggcgcactcgcaggagaggaccatggggtggggtacccccatattacggatcctgttgggcaccataatacttgtgggcccttcattggatttagagggaagcttgcagctgataacaatctcgtgtcagggtaaaagc

SEQ ID NO: 715198 - DNA, 129 bp, Homo sapiens
agaggatgccacacgctggaaggggccctcaagttgtatgataggttccgtaaagtcgcgcatgggggtatagtctggaatctgccacaccatgatggtggtgtcgtctgaggcactggcgataacgtt

SEQ ID NO: 715199 - DNA, 627 bp, Homo sapiens
tttatgagtacaggtgatttacaacagaagagaggaccaccccgccaaccaaatgtccaggtcctattccatggaacctatgaacaggttgtcccacattgcaaaagggacttcacagatgtcggtaagttaaggccattgagacgaatgattctggattgtctgttgggcccaatgtgatcaaaagtttccctagaagagctagagaagatgcgataatggaagcggaatcaaagacagatttgaagatgctgctgtctttggagagaatggccaggaggcaaggaacacaagcagcccctagaagttggaaaaggtaaggaaatagatttttcccctaagagcctctagaaggaactcaggttcgcagaccatcacctggaattcttcatacctagtgaaactcattgctgacttctgacttccagaattgtaagctaacaatatgcattgctttacgtcactgtgtgtggtgatctgttacagcagtgatgggaaacaacacaataggtaaaatggaaaggtagagtcttgggtcctaactcttccagttgcatcataaggctccgaatgatgaatggcggaagaaccacagaataatattaaatgactgtgttttgccggaca

SEQ ID NO: 715200 - DNA, 963 bp, Homo sapiens
gacatgacttgccaaaaaacacataattggaatcaacacaacgcacccacagcctaatcattagcatcatccctctactatttttgtaaccaaatcaacaacgacctatttagctgctccccaagtccttttcctccgacgcccctatagcaagccgcccacctccgtaatagtaacataccatgactccgtaagccgctcagaatcatggagaagccaacgccagcttatgcagtgaaccagttatcacgaagaaaaagtcgtacctctctatagctacttctccctagcaaagtctccgttgaggtgtgataagcattcgacaggcaccagaactaatcatagttttcatatcttcttcgaaaccatgacttgtgccccactcctgtggcgtatcatcacccgagtgaggcaagcacaaggcagaaggcctgaacgcaggcagcatacgttcctaattcgtagcgccctagtaggctcccttccccctactcatctggactaatttacactcacaacacgcctaggctcactaaaccatgtctactactcactcgtcactgcccaaagagctatcggcatcctgggcaacaacttgatattgaatagcttacacaataaggttttatagtaaagagatacctctttacggactccagttagtgagtcgcttaaagccatgttgaagcccccatcgtggtcaagtagtactgccggagactctgaaaaataggggagggagtatacgcgtcaagatcatttcaacccctggaaacaattggtacccttgtgtgtatgccaagaagcattataaaggccgttgttcaaaaagtcaattggcttggttttccttaagcatacccgtggggaagtctcgcaaaaaagaacacagcacagaataacaaaaaaaatccgggccacagggggggagatctggtgtgtcaagggattcggtcagtcata

SEQ ID NO: 715201 - DNA, 386 bp, Homo sapiens
aatcccagattactgggacgctgaggcaggagaattgcttgaaacccagaaggcagaggttgcagtgagccgagatcacaccactgcattccagcctgggcgacagagtgagactccatctcaaaaaaaaaaaagtatcttagataacgtgatacagtcatccactcattatctgcagtataccctcaactctctttacctacttggtatctacctagcagaaggccaacaaacctagatgaatcaactctaaacatctccacacccatacctggacaacataaatgctccgtggataccatcactatacaggcatatctataaatttccggtacagaaactacgctgggccttctggcaggctaagtgatgatctcccagattcg

SEQ ID NO: 715202 - DNA, 133 bp, Homo sapiens
tttgctaatgtagaaattgtgcatctgtgcaatttattatgtttggcttactctgattatgtccaaatgctggaatgtggggacaaataattagtgtgatggctgtcagattatgaattctagttggtacctg

SEQ ID NO: 715203 - DNA, 250 bp, Homo sapiens
cggtggcggaggctgaggagaaggaggagcgggccgtggaggcttcgccgcctaggtactgctataaccagaatttggtagaaaaaggatttacttgttggggccctcttgataaaaagagatgtggggggattctcgacctgctaacagaactggaccttttcggtaagttctcaaatttgaatattgaaattgccagtattttaattataaatgtgtacattttcgcctactataaatgaagatattt

SEQ ID NO: 715204 - DNA, 851 bp, Homo sapiens
tccacctgagtatttggctttatccaatctaataaacttttaatttttgtaaaaaacaaacaatgctatagaataaaaataagtgcttgaaactttggatataaaaagagtatatagcatccacttcccttattttaaatcactatgagtacagctgaagtgtccctataaaagaatcaaaacttccccttttatgttatatgtattgtgaaaaaagtcagttatttttaggaactcacagatatgtgtattccctgggctctttttgtcttgatataagaaaacaaaatactattaacacaaacacaagccacagtaatcctctgtacactactatcccatgtttatatgcgctggtataaccccaaaaatgtggaaaatatacttctgtgaatattctttggatattatctctatggatatgggcccatgtatattcctaaaaaaaatctcccaccacttaagaagtgtccatatgggcgcaaccaggctatatttgggccatgggtcatccaagctatggccctaacgggtcgcaagtgtgggaaatttcctaaagggcgcctcttattgtctactggccggcccacagtggtctttaactctgcagcccacccacattgtagggaggggtgccctagaagggtcctatatcccaaaactcttgggctgttgttctttaacacattctctataaatgtgagcccttccacccatccaaaacagagctgattatctctataaccaggcccctttaaaaattcctaattgggtgaaaatgacgtacgctcaaagcgtttcccagggagttcctgtgcgctaacttctttgtgtttcaccagttccagcgt

SEQ ID NO: 715205 - DNA, 158 bp, Homo sapiens
ggtgtggctgttctagaggatccaattcctgctgctttcctgctgctcgcccgcgagctgctaccgccgccgttgccgctgccgccgccccgtccccgccgaactgctcctcccccgcgagaattattcctgctgctcccgcgagaatccctgctgct

SEQ ID NO: 715206 - DNA, 115 bp, Homo sapiens
aatagccagaaaaatgagaaagctctgacaaatatccaaaactcgtatggcacgaaaagagagaaacagtgttgatagagactcagctgaagactgtgcctctcttatacgaaca

SEQ ID NO: 715207 - DNA, 355 bp, Homo sapiens
tatagtcactgaatctgcatgtcgtgactaaaactcacatacacccttctcttaccacagaggtatcactattacaaagaatcctggccctactcattcatattcatcaaagaactcctttaattttagtagcgttcacaatctggttagagtggctctcttactttggttctccttaatgcttgcctggtaaatcttgttggactacctgcatttgtctacgtactctgttcttacgggacgccactggtaaccttgatcttcacttacttaacatcttacgtacctgtgtcactacaccaccttaacacaacatgacgtgtcaacgtcgcctttagcgggacacgacacacct

SEQ ID NO: 715208 - DNA, 389 bp, Homo sapiens
gagatgggaatctgattgttcctcaggatttacgatcaccataacatggggctgtctacatcctgtcaggcttggtaaatattcaacctgtcgcactgaggaacattatcgtgcaagcctctaaactagacctgtcagcatcttctcttgagattgaacagcctgaatgggaaaagcgaagatccatcaacctgtctgagctcattgatgtttacagtgatggtgttgaactactccagatggtgaaggcaccagattccaactgcagcaaccttctgattacaaccagacaaagcctattttgaagatgaggaagaagattctagcaacgttgatttaccttacattcctgctgaaaactcaccaactcgccagaaccacaaatatcg

SEQ ID NO: 715209 - DNA, 176 bp, Homo sapiens
aaaagggtttttcccaaaaaccggggggggggcccttcccctaatccccaattgggaatttgggaattggggaaggctgggttgctttgttttgggccctctccccggggggggtttgaaattaaacccccccctggggatttttttaatgtttaaataaaagtaagaaatgggga

SEQ ID NO: 715210 - DNA, 163 bp, Homo sapiens
  misc_feature (3)..(3): n is a, c, g, or t
  misc_feature (49)..(49): n is a, c, g, or t
  misc_feature (101)..(101): n is a, c, g, or t
ccnggtgtcactaagtgaagtttgtgccttctatagcaaagagaatatnttttacatcctactaacagtagatttttttgtagtgaacattttttgtattnttatttataagtctcataagaaaaatagcaatgttcagttgtataccttgaatctgcagtta

SEQ ID NO: 715211 - DNA, 108 bp, Homo sapiens
gtggatcgctccgtcagacgtaaaaaaaaaagttcggaggtgaaatctggtaaaggaaacccttacctatgctccagatcacaacaagacacaaaattatcaagcaca

SEQ ID NO: 715212 - DNA, 204 bp, Homo sapiens
gtggtccggacacgtacatggaggaatttgaagtagatagaataccagagcctggattactccgagtctgaactcagatcacgtacggtactttaatcgttgaacaaacgaaactttaatagcgggtgtgccatcgggatgtcctgagtccaacatcgaggtcgtgaactctatagtcgctgtggactctagaataggattgcg

SEQ ID NO: 715213 - DNA, 615 bp, Homo sapiens
gcgagccttcgccggtgtccggatccgaggccggacccgagtccagtcccgtcgcctgcgcggctgaagccagtgcggtgcctgagagggacgctgctgccccggtgcccctgtccgcgggctccttgggtcgctgccactccgcgtctgaggaggtgcggagagcctcgagggcgagaatggcttctcatcggatcagatcgatctgctccatcggagatttaaggcagctgagtggagatcatcctaccattcgcaaggatgaacttcaacaatgtcccggacctggagctcaaccccagtccgagtccaatattgttcgtgccttcttcgacaacaggaacctgcgcaagggcacccagtggcctggctgatgagatcaatttcgaggatcttcctgagcctatcatgtcctacttccggtcccagtcgacgaccaccatggacgaggaactaggtggagctgtcccggaatggagaagctgagatttctgttccacatgtactgcactcggacagcgacggccgcatcactctggaagaatatcgacaatgtggtcgaggagctgctgtcgggaaaccctcactatcgacgcaaggagtccgtctcgctca

SEQ ID NO: 715214 - DNA, 1968 bp, Homo sapiens
  misc_feature (1087)..(1087): n is a, c, g, or t
gggttcctgcatcttgctgagtgctggtgcgtcgtggttgttgctgcctttcggtgcggtgtgggtgtggtgttgttgtcgtacccgactccgtcgttcgttggtgtgtggattgtctgtctcggttctgtcgtgtgtgtgggctgatcgcgtagttgcctgctccggtggttgtgtcccggggtgttggatcagcctgcctgctttttgtttgttgctgctttcttcgcacagcacaagctccggcggcggtgttacccccccgcgggtttgttttgtcgttcggtcgtggggggggtcctcgccgtcttttctggtgtgctgtatgttagagcgagttgtgtggttgtttccgtgtagtcgtttgtctgtctcacggacacagagtttgttgtttagggcgcgaggtgtttgcctccctcgcctcccgacggagggggcggtttccgtctgtctcgttgtgagcatcggtgacgtccctgtggtgtgcctcccccgcccgtttgtatgggaggcgtggtttttgtggcgcccgttttcttttttacatccatggtgggggttggcttacggcgtgggtggtggtgtgtatttgtcgtctcctcccctctagacggtgtgttcttccttgctgtcagggggggtcggtgttccgtcgtgcccttgtggggctcctgttgtgattgtcgcctattaatgtgcgcacgagtcttgtgctacagggtccgaagcgtcgttgggttggacgaccctaccggcgtttgtctaagttcgtctgtcgcccctatggttgtcgtgccgccgcctgctcgctgtgatctccctcctcctcttcttttggtgtaggggcctcctcctacatatggccggcgagcgccgtgtgttgcctcacctccgcgagtgttgggcagtttcctccctgcgggggaattagggtattttattcgtggtgcactcatcttttgttaagatggaggggggttgcaccccacgtctcctctcgcggtgatatgtgtcgtctactacggggcatcctccatcaatagggggggcggccttcggggatgcaagagatatttttctcttncgtgttgtcgggaacccaacagcgcaagagatatgggtgcagcactcggtgaagagagaagaggagctgggcgttctcagcagagcactcagcacataagagatgtaaccccatcgcagcacaccttgtgtccccccactcctcggaggcgcccccgcgtgagatgtgagatatatagaggggatgataaatatcactactcgtttatatcatctcagcaggtcttccctccaccgcgggtatttggagtgtgaagctcccccgcgcgctacacgtgttgtagggggagcacacacccccacgggtaggccccctcctctctgggagtgcgttcgcccccacgggtccccctctggtaggcgttcttctctcacgagtggtgtcttggtcctcccacggcgctcctagcacaccagttctgttttgctgtctttctcacgcggggagtgtcccctccggtgtgacacgatgccgcgcgcgcgagatcttcttattcgccgcatgtacagtgccaccacgcctcgtccacatatggggaggctcccgagagacatgtataatatgagtggtacccgcgcggtgccacgtatgtgtgtggatgacaccacgcaccagcgaatcgggattccccagcctcttggaggaagagccctcgcatggaccaaccacctccctggccatttgttttgtgccccgcatggtatctcaccgcattgccaatagagaaagaccacaagtttacttcctctcccgccttctttgggggggttccccaggcctgcagctatgtgctataccaccccaccaccaccaccaccaccacccccggatgccatttaattaagatgagttggttctccaaacaaaaataaaaaaataaa

SEQ ID NO: 715215 - DNA, 421 bp, Homo sapiens
atggctgccaccagcctcttgagccacagctttctgtatgggacccgccaggtgtcctggatgtccagctctttttgacacctgtctctggagtttccagaacctgaacaggtcatgagccatgcttcccgcatgcctctggatagcttatatgggcagagctcctagtcttgcctgaatcctgacagtactaccaagccactcctccccaagcaaccacagggaagggtgattgtgattgccatacatgttcctcttgatggcagtactgtaccagaattaccagcaaacttcctcccctccctcaagatcctgtccctgtgccatctgttattaaagaaacagccaagaagtatccattgtagctgattactgggtgcctagttctcacaactggtacatcctgcataacctcttccca

SEQ ID NO: 715216 - DNA, 499 bp, Homo sapiens
gatgagttccttgcagagattggggccgctgtgtgtctccatctatgggctgttagtgcagagtatcatactgcaccagtccaggataggtgatgcacttgatcagccgtctcactggtggcaggatgatcttcaccacctgcccacgctttatcccaaagtagcagcgccacagtggttcccccgaactggatcctggtcagctgattctcatcggagcttatatcgggccagcagctctgtctacttcctccttgttcatgattagatgatccgtggactagctcgtgctccgtgatgttgatgagcagctcctgctgcagaaactgctccaggatgtacttggggatcatgtcgaccagggactgcttggcggagggtgtcatgccctgctgcaccacgatgagagcccgtgtgatgttctcctcctgcatgcgctggcagtacaccttgatggtcttgatgcccaccttgggctcctctgcaaggaacccacgcg

SEQ ID NO: 715217 - DNA, 264 bp, Homo sapiens
  misc_feature (214)..(214): n is a, c, g, or t
ttctcaggaggctgaggcaggaagatcacttgagctcaggaggctgaggatacagtgagccatgattgtcccactgcaatccagcctggatgataaagtgagactggtcttaaaacaaacaaacaaacaaacaaaacaaacaaacaaaaaaaaaccaagatgactagaaggtttcttaccaacttaggtaggtgaccgagtgccttacttggancttagttaaaaggattgcttgtccattgggaatcactaaaatgtacagta

SEQ ID NO: 715218 - DNA, 279 bp, Homo sapiens
tcgttcccagcctgggcatccttaagttccaatggcctcattcatgctctcggaacactctcgaagcgctcacgcccacagaatctgaagggtgaaaatattctccatccagtgatttcttctttggctggggagaggagctggtgttgttgggcagtcgtccgcatagtgctccctgggggcagctcgtggtgaggctcccctttcttgcggagattctcttcctctgtgcgccggtctctcccaggacaggcacaaacacgcacctaaaagctgttc

SEQ ID NO: 715219 - DNA, 400 bp, Homo sapiens
cttttggggctttaagggctttggctaaggttctccagggaggctgctctgccaagtctggtatttcatgaatagatctgaaaacagacattatctcttctcccagtgaagagagagcgatgaagcctcaggacaaaaggaggcagtgggatgatgccaccaagggaccattctgaagagccatcagcaaaaagcagccacacctgcttatgtggctctgggacaaatgatgtgagccgtgacgtggaacttagatgcagtaaagtccattgtattgagccttctctggcactcctcccaaaacagagagacaacagttctgttatgttttgtttggtttggtctccctcaactcatcaatgagcctttttaaaaagaataattcggtactttctttaaa

SEQ ID NO: 715220 - DNA, 481 bp, Homo sapiens
gggtgtggctatgaaggggtggctgccttgtgatgattcaatatgctgtgtttgtcctttgtggttttctgtatctatgttttatgttattttttttcagttctgtcacccaggctggagtcagtgagccgagatcaagccactgcactccagcctgggcgacagagcgagactgcgtctcaaataaataaggcaacaaggagagtctggatgcagtggctcatgcttgtaatcccagcactttaggaggccaaggcaggcagatcacaaggtcaggagttcaagaccaacctggccaacatagtgaaaccatgtctccattaaaaatataaaaattagccaggcatgatggcccatgcctgtaatcccagctacttgagaggctgaggcacaagaatcacttgaacctgggaggcggaggttgcagtaagccaagattgtgctgctgcactccaacctagggggcaaagcaagactctca

SEQ ID NO: 715221 - DNA, 215 bp, Homo sapiens
gatcctctagcaggatccccttcagagaagagacgagatgactactgagcagtaggtatgtacatggagccgagaagtacactcttgcccatcccatcttccatggtaatctagaatattaggtcttcaattcactgactcatctttatattcatctttcaccaaggaattgctcattagctatctgttcttcccagcccttttgataatgcctt

SEQ ID NO: 715222 - DNA, 142 bp, Homo sapiens
cttagcaggtttatgcaaattattctgggtattttagttgttagtttaatatagagacaggagtctccctactgtagatacccatagagctggagatgcagatggtgcagacttttggcatcactgcaacctccgccatccg

SEQ ID NO: 715223 - DNA, 177 bp, Homo sapiens
attactaaaaaattttttttaggccgggtgcagtggcttaatctgtaatcccagcactttgagaggccaaggtaggagaattgcttgaggccaggtgttaaagaccagcctggggaaaaaaaaagagaaaagggaagaagaccagcctgggtaacatagcaagatcctgtctcttag

SEQ ID NO: 715224 - DNA, 307 bp, Homo sapiens
gcaccaacgccctgcttgtggtcaaacatcgggacatgaatgagaaggaacttgaagctcaggaggcacggaaggcccagctagaaaaccacggacccgaggaggaagaggaagaggagatttgagacagaagagaaagaagcttggggctcagatgaggagcagagagaagggcagcagcagttagaaggagggcagtgaagatgtgcactctggcagcgcgagtttacgggaggaaggtgacaagggcgagggcacttacaagagtcgcagtagtgaggacgagagcagcgcggatgatgacccc

SEQ ID NO: 715225 - DNA, 119 bp, Homo sapiens
cagagaaaactctatgcctgtaaagaatacaaaagttaattttacctactatcatatgtctgtctgaaacttcttttctctctgagaattaaattttccaatggaccgttatgtcagga

SEQ ID NO: 715226 - DNA, 371 bp, Homo sapiens
gggactatgagtctaattaggaacttgtgaagtgcctgtgtctggggccagcactgatccacacaactgactttgcactatgtctcccctctcatatatcatacctggaatgggatccggcactggatgtgggacctaagaaacggcctgcagattacccagttataccagactggagctggaagcctggatcttactgtgttgctctctatggggctggccgacatgtgaagaaaggaggctcccagcatcatcttgctacacattattacattcacccagatgtctggttgtaattcttatctgcagactgcggtggaatacctgttggaccataatcatggaggggtgtagctttaccgtagtatctg

SEQ ID NO: 715227 - DNA, 190 bp, Homo sapiens
gtagcaaccggcgctcaataaaattcaaccagcaaactcgacaagtaacaaccataaaaccagccacactaagtccagccaccactactcaataaaaataacacgtatcttccaccgtacaaccaatagcaactgcaggctactgcaacgccatccatataccaaaaatgctacttacaacaccacaaca

SEQ ID NO: 715228 - DNA, 563 bp, Homo sapiens
  misc_feature (283)..(283): n is a, c, g, or t
  misc_feature (325)..(325): n is a, c, g, or t
cattcatatctgagtctttcatcccccaacaatattcctagagcttcttccagcatatgttggattagagtctctgagtcttgaatgggcatgaaggccctcggacatgatgcaaaggcctggacttcatgtcagagacctttcatgccatcagaaagatgacgtgtgagcctggaccagtggaggacacgctgtgcagctggaccgtggtgtagcgtcacacgagacggactcatcgcgtgtctccttccccatgcacagccaagtgaggagaacttccggnagcaaccctccgtgagggtggcgcaagatgctcaaggtccanaacatggcaggcaactacctgctgttcaacctactctgaggcggagacctgaacatcacgacagctccatgcacaaggcactgggaattttggctggcccgaacctccacaccccagtcctggagaagatctgcagcatctgtaaggccatggacacatggctcaatgcagaccctcacaatgtcgttgttctacacaacaagggaaaccgaggcatgaaagccctggacatgaaggg

SEQ ID NO: 715229 - DNA, 145 bp, Homo sapiens
cactgcagtgatagtcaccttctaacagtgctactgaaattgttcagttactgcgggaaggtgaaagtcaaccggcagcaactggccaaactggaaatgaacaccttgaacgtcatgctggtgaccctaaacctggcccttgtag

SEQ ID NO: 715230 - DNA, 103 bp, Homo sapiens
atagtataggctaaaatgacgcaattctccctgcgtcatggtagtcttgtaatcacctcggttaatctctttgtaaaagatcgccttcaaattattttaatca

SEQ ID NO: 715231 - DNA, 247 bp, Homo sapiens
tgacaagaacaagccaaacccttaataaatggagagcagctatgccgatgatggttgatttacggacattcaatatcagtaaagatttcagtgctccccattgggattggcagcatcaatgtcgtacactacaaattctggaaaattgagatataatagttatatgtattttagggggtacaggtgactattttgatacctgtatgcaatacatacgacatttttcttttgtgttgggcgataacat

SEQ ID NO: 715232 - DNA, 211 bp, Homo sapiens
ttgctcgactctgaggatcccctcaccgcagacgtgacgaggtatcagacactggaaatattgcgggactgattagagggaggtgaaaatgaaagatgaaagagttgtattggaaggaacaaggtctaaatctagcaagacaatggaacaactgtgcattcttagaatcttctgcaacatccaaaatttatgttcatgagatcttttatga

SEQ ID NO: 715233 - DNA, 711 bp, Homo sapiens
aaactcgtcccatcagatactatttaacaagctcttcaagatctggattgctcaccggatataccaacactggctcacagagcttactctcaaaagcatattctccaagatcaccataaccttttctctaacctgatgggagccagtcttgctcccatcagtacctaatttattgagagtttttagcatgaagggctgttgaattttgtcaaaggccttttttgcatctattgagataatcatgtggtttttgtctttggttctttttatatgctggattacatttattgatttagcgtatgttgaaccagccttgcatcccagggatgaagcccacttgatcatggtggataagctttttgatgtgctgctggatttggtttgccagtattttactgaggatttttgcatcaatgttcatcaaggatattggtctaaaattctttttgttggttgtgtctctgccaggctttggtatcaggatgatgctggcctcatgaaatgagttagggaggattccctctttttctattgattggaatagtttcagaaggaatggtaccagctcctccttgtacctctggtagaattcggctgtgaatgcatctggtcctggactttttttggttggtcagctattaattattgcctcaatttcagaggctgtaattggtctattcagagattcacttcttcctggtttagtcttgg

SEQ ID NO: 715234 - DNA, 1502 bp, Homo sapiens
tgtggaaattggaaccaaaatttttttccctttggttgggaaaaaaaaactcacggggtggttggtgtgtccgggaccccctatccctctcacccctctcccagaacaccaaaaaaagacaagcagcgcccaccaaatgtggcctcccttctgtgcccaagtgtgaaaccccgagagaggctcagcggttgtggtgtggggaggcaggttgagcgcaggccgggcaaaggccaggggcggtgcttgcgtttgcacagggcgggcgcggtgccagtgggggctcttgcgcccgggtttatagaggggacacatgggcggggggttggcttggggatcggcggggcgcagccctgtggggcgcttgccgcgcgtttggacggggtgccccccaagaacttcgagggggccccaataagcgccggtatagggggcttgcctcgtggagatgtgttgcttctgtgtccgccgcacattttgtgcaccaccccaggtgtgtgttactctccccgcgctttgtcccccttgtgagcacaggtgttggggcaccaccgcttgtatatacacccccggggtgtgcgccacgggtgtggtgttccacacgagagaactcttcctatcagaaagggggagttccttgtgggcgcaatgtgaaaccccccccacaccatagagagccagatgttgagatacgccagtgaatatggggattgacagctctataccgtgggagagaggctgtgtcctcttctctgtggcccatagggttaggaggccattgtgcattcaagccccccatgtgggccctatttggtgccacacccacctttttgtcttgggacgcttccggatggtcccccagtggtaccccctgtgggggccccccatattgtctttgggtgggcgccccccacggttgttgcgccctttatgtaatcaaaaaaggaggagctctatcacgaacccccactgatattaaatggttcattcggatggacagctatgggagttattgatggacacaaacaacggggggccctagtgaaaaattaggagcgcttgaaaaggggatttgcccccccaatgtgtgttcaagaagagccccgccgtacatgtctgggccgaatcaatagtacatcgtcacaagagcccaatgaggagatcataaggtggaggggataccctcctaggacaactaccggtgaaaacatgtttcacccctgtgtgggggcgccaaaagttgtcatacaagagggggcataaccccccctgtgcatgggttactcagaaccaaccaggatgggtcctgttgagaacactctactacaagtcgctgatgatagacacagggtggtgtctctaaacatgactccaaccaaatatagaaggcaaccacgagtggcgtgcatagacaataataactcagtagatggtgcagcatagactgatgctactcgatccactaggtacatttcaacacgaataagtcttgacaacatccatgt

SEQ ID NO: 715235 - DNA, 235 bp, Homo sapiens
tacccgtcagtagccaaggagagggtctttattgaggctagtcgtctgcttttctgccctgtgtgtgatgttgttatcccggataccctgtgtgatgttgtcttccgaggaaggcatgaggcttctccgccagcctcctctggacggcaggctcactgccaggccagcctccgagagggagagagagagagagaggacagcttgagccgggcccctgggcttggcccttatcgag

SEQ ID NO: 715236 - DNA, 212 bp, Homo sapiens
agccgacttagaggatcccggctgaggacatctgagccacggagcctgaacagcctgggaacatggagaaaccacatctctactaaaaatacaaaaaaattagccaggcatggtggctggtgctgtaatcccagctactggggaggctgagcgaggagaatcgcttgaacccaggaagtggtggttgcagtaaggtgagatcataccactgc

SEQ ID NO: 715237 - DNA, 200 bp, Homo sapiens
gtacgacttagaggacccctctgataggagctactgagaagcaggtgacttcgcagaggagctaaactgtaaggaagttcgcattgaaatgctggagccaaggtcggtttcgtgggtatgcatcaggcatagacagggcctcgtgctacagaagagctctgttcaaaagggtcctgcactggggggtccggctgtctaga

SEQ ID NO: 715238 - DNA, 724 bp, Homo sapiens
  misc_feature (350)..(350): n is a, c, g, or t
  misc_feature (398)..(398): n is a, c, g, or t
  misc_feature (467)..(467): n is a, c, g, or t
  misc_feature (508)..(508): n is a, c, g, or t
  misc_feature (623)..(623): n is a, c, g, or t
gttttccttcatcaggggccgccccgcccgggtggaggaagccctaggagcgtggatccggtggatggacggcttgtccagcactccttccaggctttggtcctgaaggagcagggccggcagttctataatgtggcaccagaccctgtcccccaaggcctgaagggcctaaaggaaggggccctgaaaagccctgtttctcagaaacgcaggctgtgtttcccatgtgcacagattcctcaaactcaccttgtggagaggacacggctgcgttgctctgaagcccaggggatgtgtgcccctcacgggtgtgacctggggcaccgtcctcagagcgctcggtccctcanaggtgtgatcggcccaggtgagcacaccgcccgccttgcagccacctntggaaggctatgaactctcaggggtgtgatcggcccaggtgagcacaccgcccgccttgcagccacctntggaaggctatgaactcaagtttgatgaacagagagacagntgtttgtccaggaccatcagccctgagggcagatgagctcaggctgatggcggccaccctgctgctccttgcagaggagcggcctgcgagtgaagccacacagaggggagacttntgagcgacaggcagggtgggggcccagtgaactgtggatctctagatacactgtcagctgcaatccggtctttattatgttttaaatgtcattttgtctga

SEQ ID NO: 715239 - DNA, 132 bp, Homo sapiens
ttatccgtgcgtaaaaagacaaggaataacattctgtagtcctaaaagtactgacttttttcactactatacattaagggaaagttttattctttatatggaacacttcagcatgtactcatgtattaaaat

SEQ ID NO: 715240 - DNA, 800 bp, Homo sapiens
tagagcctttattttaattcaggcccttgtaggggccgcatgccaccgccaacttctttctctgcagtggctgttccagcgcctataaggcataaagtgggatccgttttgtcccccccagagcccttgtgtttttgtgagggcctcactggtggctcctctgttgttacagactcatttagtaatgggaggtcccctggggcaactatacgctggccaccatttcagtgtttgtgtttcaccaaggggacggtctggacagcagcttaagtgtgattttagtcacaactcctgagtgtcccgctctcctgcttacctaggaggtgtattgccaggagataatacacccaatgctgtctagtattgtttcccacacttaaaatagttgccgtgctttaaattcacactggtgtggtctgatgttctgagagcatcaggaaatacaacccttttgcccattgtacccttcctccccggatcccaaggtggtctgttgctctggctgtcctttcattgtcttaggaccttcatggagtagggatagctgcctcctcctggctgtttttgtgcctgtttgaagctagctgctagcctccatttctgggaaagacctcttgagactcctagcccaggcctaaggggctatcgtttggtaccagtattttgtctttagcttttcatatgtgattgtgccgtcattttgttttgaagctacatggatcaatggatttgtttacaatgtcgataatgtctattaaatccagccattttgcaaatactaaaattacaactgcataaaa

SEQ ID NO: 715241 - DNA, 905 bp, Homo sapiens
tcgcgggacgttatgccctgccttgtggggaagcccctgtctgccccagctgcttcgagaaccgcgtagtcggatgcaggctcgagcctgtggccggggcactggaagggcaggcattccttggggagactggactcgaccgaactgaatggaagggaccaaacctcggatgaactctgcaaccctctcccgaacactccttctcgctgctgccggcggttccagcctgcaaactctagagggggctgcctggatccagtccccagcaggagaaccgacctggggacaaagcggaggcacccaaagggcaggagcaatgccgcctggagactattcgtgatcccaaggacacccctttctccacctgctcctcctcctctgactcggaacctgaaggcatttttcttaggcgagcgccttccccagtcctggaagacccccggaagcctccaagcagaggacagcaacgcctctaagcacgcactgcaccatgatcctagctggcgcagcctcagacgcaggggcatgtcgaagctggcgcacggacacaggggctctgtaaaagcggcgcagcaaccaagggcctagcctccccctaacaagtcctagactgagacgcagtcaggcgcacgcccgccacgcaggcggcgagcgtgaccacgctcccggagtgcgccccccttcacgtccttgccgcggcttctccgcactttatgcccgtccctcactttccttggcccaaacccattccaccaagcctcacgccttcaccctgacatcaacaataagccccccacaaaaccacacactcccacaacaacaccataaccctctccccactaacacacaccatccaacaacaaacacacaccacaccacccaacaaaaaccaaatcacaaatcat

SEQ ID NO: 715242 - DNA, 305 bp, Homo sapiens
  misc_feature (114)..(114): n is a, c, g, or t
  misc_feature (120)..(120): n is a, c, g, or t
  misc_feature (145)..(145): n is a, c, g, or t
  misc_feature (175)..(175): n is a, c, g, or t
  misc_feature (177)..(177): n is a, c, g, or t
  misc_feature (181)..(182): n is a, c, g, or t
  misc_feature (184)..(184): n is a, c, g, or t
  misc_feature (186)..(186): n is a, c, g, or t
  misc_feature (240)..(240): n is a, c, g, or t
  misc_feature (256)..(256): n is a, c, g, or t
  misc_feature (263)..(263): n is a, c, g, or t
  misc_feature (276)..(276): n is a, c, g, or t
  misc_feature (283)..(283): n is a, c, g, or t
  misc_feature (296)..(296): n is a, c, g, or t
  misc_feature (300)..(300): n is a, c, g, or t
gaaaaaagtgctgagattacaggcgtgagccaccgtgcccagcctactctggttttcaaagaaaataactcatgatcatcatatgtgttatagtcagtcttaaaagcctaagtnaatgcnaatctgacttggaacatttactganacattacaaagaaaagcatggccttcacgntntttnnangncctgagtccccataaacctggcatgtgaccctgaacgtgccagtaagccttcangttaaatgtagccgcngtttgcnaattgagaaaagntcactcnacagtacagccangcangcagg

SEQ ID NO: 715243 - DNA, 479 bp, Homo sapiens
ttttgcccaaacaggggtgcagtggcgccatcttgactgactgctgcctccacgtgcctggatcaagcaattttcctgcctcacagcctactgagttggtgcgattacaggtgcactaccaacacacctggctaacaattggaattcttatgagagactgcgttccaccatgaagggcaggctgaaatccaactcatgacctcgtgatcccttgtgatacttactgccaagtgctgggattactggtgagagccaccgaccccggccgctcattgataactgacgcaaactaataacgaccttgccttatggttagtaaaagctagctcatgacatgccacctttaagctgtcctgtgcttaaatatcgatttcaaaatggtctatcggcgtgatggagccatcaagctccctcggttctaaagataattatggtgtagatatttggggggatctttccatctgcaagaaataataccg

SEQ ID NO: 715244 - DNA, 175 bp, Homo sapiens
tatctgtgtggtgtaaaccagcctatatcagttttatgtcccacatcgtcctgttctcttgcttgcccgactgattttatttctccatcattaacaaaaataaaaaaaagaatttgtgacaccggatctggagtgccctaaatcctataagaacctggaatagcccaggggaccc

SEQ ID NO: 715245 - DNA, 407 bp, Homo sapiens
gagctcgggcccgaaattctaattacgggccaaggagggtctgggctgctctgtggctccgtgggcactgctgcttggctggtggtctccgccggtggaaactcaagctccatacgtcttctccttcgcggagaaggctgatttggcctgaagaagccctgtgtgcactggccctagtaatccccccagagccagctcgggagggcccctactcgtagtggcctagctccgaatccgcacaaataggcgctgctaggagctgcattctgcaaagggaaactgggctcggggaacatacctcagccccgatgcggcttggctcaggagcgcagcgctctgcttggttcttacctagccctaggctccccatagggccagggctggtctgagcttgcgtaatagggtat

SEQ ID NO: 715246 - DNA, 317 bp, Homo sapiens
gccaccacactccagcctgagtgatgagagaccctgtctcgaaaaaaaagtcttatggtcaggggcacagtagctcatgcctgtaatcccagcactttggaaggctgaggcaggagaattgcttgagcccaggagtttaagaccagcctgggcaacatagcgagatcttgtctgtgaaaaaaacagagaatttccaagaccaggcatggtggctcatgcctataatcccagcactttgggaggccgaggcgggtggatcacttgaggtcaggagttctagaccagcctggccaacatggtaaaatgctgtctcttct

SEQ ID NO: 715247 - DNA, 180 bp, Homo sapiens
agagttgggaagggcagcccacagtacgcagtcctcaccacccagcccagggtgctcacactaaccagtctatgtagttagaggaatgatagctggctcatcctcggagatcagacccacatctctattcttgcgcttaaatacgcgcttttaactttcttgctcagaacaccgtcgaag

SEQ ID NO: 715248 - DNA, 658 bp, Homo sapiens
cgcggtggctcaccccgtaatcccagcactttgggaggccgaggcgggcagatcacgaggtcaggagattgagaccatcctggataacacgttgaaaccctgtctctactaaaaataaaaaaaaaattagccaggcgtggtggcaggcgcctgtagtcccagctactcaggaggctgaggcaggagaatggcgtgaacctgggaggcagagcttggcagtgagccgagatcgtgccactgcactccaaccgtgggtgacggagggagactccgtcttcaaaaaataataataaaataacaataacaagtgtgcatttcattcattcattaaactatttactggagtgcctgccaaagtgccaggcattggtatcaattaataacgaatgttaccaccaaaaaacaaacccacagaaaaaaaccttggggggggatagggccccggagaaaagagattacaaaacaatacggttgggagccgcgggccaagagggaacgcaccagtgcgcacaccgggccccaagagaaccggggcacgacaagcgggagaatctccaaaaaaaaaaggccgggggaaccgaggctggagaaaaccagaggggacggagacaaaaggggacaaagggggcccgggagcgaacaaaacccgagcgggcgg

SEQ ID NO: 715249 - DNA, 469 bp, Homo sapiens
  misc_feature (456)..(456): n is a, c, g, or t
tggctgttcccgcctgtccacagggctgcatcaactgctatttacaagcaaagcaaagaggttttctagggtttttaaatttcacaattctgaaatcatattttctaaattacatcctgaaggaaaagtagactgaaaatcatgtcaaacatgataaagggcagggccaggacccatgggctatgacaaacccgcccctgactccaaggtgacacctgtgctgggggcagctgggtagagaatcttggggcaggattccgaggcaggcagatgagtgaggataaattgggttctgacggcacgttacaccagtggactctaacgacgacctcacctcgtgcacagataattctgccttgtgcttaaccgttagaaatgtgtcactgaagtgtgaacatattatgctgttagatttcccatcatttctgttctttcattccctctcatttgcatggnttactcataaatg

SEQ ID NO: 715250 - DNA, 306 bp, Homo sapiens
gaaaatgaatacattagaatggaagtggggggaagaaaatgcatgtaatggaagaatgctgtcatgccactaggtttcttttttttttttgaaatagaatcttgctcttgtcgtccaggctggagtacagtggtgcgttctcagctcattgcaacctttgcctcctgaggcaggagaatggctgtgaacccgggaaggcggagttttgcagtgaccatgagatcgcgccatttgcactccagccgtgtgcaataggagccagactcggtctcaaaaaaaacacccaaaacaaaaaaacccccgggg

SEQ ID NO: 715251 - DNA, 1614 bp, Homo sapiens
  misc_feature (850)..(850): n is a, c, g, or t
  misc_feature (1177)..(1177): n is a, c, g, or t
  misc_feature (1350)..(1350): n is a, c, g, or t
  misc_feature (1413)..(1413): n is a, c, g, or t
ccaacggtttttgtagggactcgttcgtctacgaatactctatcgttcgcgcttgtatttgtcgccgcacacgttctctaaaggttggtggtgcactctcggagcctctgcaggttggtggcctgtcgacgacatattctccccggcacacacctgtttgtgtcgcaccgacacgccttcgtggcgacaacagggagtatggtggggtaccacgtcggtgggagcggcttcgttcgtcaataaaacgggggcctatctacatatccccaccacacacaggggatgcaccccaagaacgccgcggtgtagtgttcgttgcccgcccggttttcgggcccccaacgggccatcaccagatccaattgggcgcggtcgccaagccctggggaccacaccatggggcccacgggggcgaccccacatgcaaccaccctggtgttgtcaaaagacgacccacgggagaagtgtgttaatttaaaggttgttgtgccacaacacctaccccacgaagctgctgctcagagagaacccactacggagaaggtgtgtgtgaacccgccggcattgggtgtgttgtcttctcacccggggcggggcccttctcgggatgcccacggtccctttgtatatgggttctcacaccgccgcgtttctcactggtggccacacagcgagcaccaccagtgtcgcccctcccacaggtaaccccctggtgtggcgttggcactcccacacgccttggcgcgccaccaaacatttccgggccacagacctcccgtgggagagacacacaccctttgtgaagggttcttttcccccgtcttgtgctccctcaggggccatacaatanaccccaagggtgtctgtacacacacaaacacaaagactttggcgcccttgtgggttctccctggacgcccactgaggttccgccacacccccgcctcgccacaagggcgctctcccacgatgggtccccggagaaacaccccaacgcgctcatgcgtgacaactctctctcgcgcctcaacactccctacgcacacaggtctcgcgggagactctctcgcggccccctcgcccacagagggtgaaagccgcctcgtccgctccgcgagcacctcgagactcgagactgttccacacgctgtgagaactcgccctctttctctggggnctcgggaccacggccccccgctctttgtcctctctcgattcacactcttctcttgtctctctgtgccctttcctttccacagccaccacactccccgcggcgcgagacttggagatgaaggccccgcttccgcgagagggagagccactctttcttggctccccagagaggcntgggaccacagctgcctctttctcgtgggggtcttctatgggccccccttgctgcgtgtgctngggtggggaaagccggctgcccctgaggcccccggtctttgttgggaaggctgcgaggacgagagccctggctggaggccccgccgttgctgttccccccgggccctccggtttttcctaacttgctctgcaagcctgtcagacggctgcccccccgtcatagacttaaaggactgccataaatgtagagttgaagtctaa

SEQ ID NO: 715252 - DNA, 653 bp, Homo sapiens
agacagctgtcttctctccatgccctcatataacagaaggagcaggtagctctctgaggtttcttccataagggcactaatcccattcatgagggcttcaccctcataaccttatcacttcacaaaagccccaacatcagtaccgtcacattggggattagattttgatgtataaatttgatgagggcacataaatttagtctattgcagtcttctttaggattagctaatgtaattcttatgattctttgatgcaactagacttgccatgattaaataaatgggaaaaaagtccaacttcactgtgctagcagcagatcccaaatttgaaccaaaatttgtctgtctctaaaaccagcatacttacctcaaaaataagtattaaacattattgctaatgaatgctaaaataaattatatgctattcagtaaataataatatcgtataatcaaattaattatcaaataataattgatatgatttggtcgtatcccaacccaaatctcatcttgaattgcagttcccataatccccatgcatcgtggaagggacctggtgggaggtaatttaatcacaggaacaattaccttcatgctgttcttgtcatagtgagtgagttcttacgagatctgatggtttataaggggctgtc

SEQ ID NO: 715253 - DNA, 146 bp, Homo sapiens
cccccgtgtctataccggcagtgctgggattataggcatgagcctctgcaccagcccaagggagactttttgctgtgggtctgtgcttctgcacgtgtgtgaggaggagaccaaggcgcagccctggtgtgaggggcacatgtttc

SEQ ID NO: 715254 - DNA, 278 bp, Homo sapiens
gtgtcttttccaagcatgttgctgctgcatttattatgtgataagctctttgattgcccattggcatccataatctgctctaagcctggccgatccatcattcactagctcttagatgtatataattcatgatctaatagcctgtgaatgctcactgttatccttccgatgcattaactctagatcatggatacctaaacctggaatgtcaacaacctagcatacgtgatcttgtaatttgagcagtgatcagagcacttcttcaaaaatcagtgcta

SEQ ID NO: 715255 - DNA, 556 bp, Homo sapiens
accttggtgggatgagcccgagtcgatggtgaacctggcgttcgtcaaagaatgactcgtatgagaacgggcccggcattcagatggatggtgcacgtgtacgtgaaggacgatctgctgggacacctcaacgagtacttgtaccgtgagcaggacttcacgctcatcttccataccatgggatggaaacttcctgaggctgcacccgggctgtgggccccataccaccttccgttggcaggaatctgattgagccagagcagtgcaccttctgtttcacggcttctcggcatctgacatcgtgcccttcggtacacgaaggcgagacgttcagtcgcctggcggaggggccctggatggcccccgggtgcacgagcgtgcagttgggtggtgcacaggttgccgtgccgacgggtccaacccctctggatttcacccaccaggaggtgctcccgatcccctgataggccatggaggaggcccgggctgttggccgaacggatagactccaggcagggatctggggacacagggtctagacagtgtggcaacccga

SEQ ID NO: 715256 - DNA, 1183 bp, Homo sapiens
  misc_feature (34)..(34): n is a, c, g, or t
  misc_feature (63)..(63): n is a, c, g, or t
  misc_feature (113)..(113): n is a, c, g, or t
  misc_feature (126)..(126): n is a, c, g, or t
  misc_feature (133)..(133): n is a, c, g, or t
  misc_feature (135)..(135): n is a, c, g, or t
  misc_feature (150)..(150): n is a, c, g, or t
  misc_feature (245)..(245): n is a, c, g, or t
  misc_feature (268)..(268): n is a, c, g, or t
  misc_feature (273)..(273): n is a, c, g, or t
  misc_feature (300)..(300): n is a, c, g, or t
  misc_feature (326)..(326): n is a, c, g, or t
  misc_feature (362)..(362): n is a, c, g, or t
  misc_feature (368)..(368): n is a, c, g, or t
  misc_feature (377)..(377): n is a, c, g, or t
  misc_feature (386)..(386): n is a, c, g, or t
  misc_feature (419)..(419): n is a, c, g, or t
  misc_feature (440)..(440): n is a, c, g, or t
  misc_feature (496)..(496): n is a, c, g, or t
  misc_feature (539)..(539): n is a, c, g, or t
  misc_feature (544)..(544): n is a, c, g, or t
  misc_feature (548)..(550): n is a, c, g, or t
  misc_feature (553)..(553): n is a, c, g, or t
  misc_feature (601)..(601): n is a, c, g, or t
  misc_feature (720)..(720): n is a, c, g, or t
  misc_feature (1110)..(1110): n is a, c, g, or t
  misc_feature (1148)..(1148): n is a, c, g, or t
attaaaattgggttttcggctggccggctgcttnagccacccacaccacaacccgccttcccntttttaccgggctgtttgggcccctaactggggctggtggaactcccccntggctttctgctnaaggctntnattggcattaccgcnggtgccaaatggtgcctttgtgggaacaccagccgaagtggctctaatccgcataactgccgatggccggcttccagctaaccagcgccgtggcnacaaaaatgtgtttaacgccctnattcnaatcacccgggaagagggtggcctcanactgtggcggggctgcatccctaccntggctcgggccgtcgtcgttaatgctgcccagctcncctccnactcccaanccaagcagntctaactgaactcaggctacttttctaacaacntcttgtgcaacttctgtgccngcatgatcagcggtcttgtcacaactgctgcctccatgcctgtggacattgccaanacccaaatccagaacatgcggatgattgatgggaagccggaanacaanaacnnnctntacgtgctgttcaaagttgtccgctacgagtgcttcttcagcctgtgnaagggcttcacgccgtactatgcccgcctgggcccccacaccgtcctcaccttcatcttcttggagcagatgaacaaggccaacaagcgtctcttcctcagtggctgaagcggccgggngctcccactcgcctgtgcgcctatagccactgcgccctgggggcctgggctctgctgccctggacccctctatttatttcccttccacagtgtggtttcttcctctgcggtaaaggacttggtctgttctaccccctgctccagcttgccctgcttgtcctgatcctgtgatttctctgtccttggctattcttgcagggagctggaaaacttcctgaggatttctggcctccccctgggttttagtttcagggcacacaggacagcagaagatcccctttgtcagtggggaaaccaaggcagagctgaggggacagggaggagcagaagccatcaagatggtcaaagggcctgcagagggagatgtggcccttcctcccccacatgagnacttaataaattggattgatgacaccagccccagaatntggagagtctggggggtggctaggagaggggagga

SEQ ID NO: 715257 - DNA, 144 bp, Homo sapiens
ccccccggggggggccgggggggggtttttttttccccccagggggtttgggttttaaaaagcttttggggggcccctgggtcccccccgggggggagccccagcccccggtttttttgaacctcacctttttttttggaaaca

SEQ ID NO: 715258 - DNA, 86 bp, Homo sapiens
gggtttgctttggtttttgctggaaatttaaaacagggtttgggctccccaaaacaaaaaagttattgcccaagccaaaaaaaaaa

SEQ ID NO: 715259 - DNA, 730 bp, Homo sapiens
tgggccctaaagggggtagagggggtgctatagggtaaatacgggcccaattcacaaaaattttaaggggaataaattctaggacgatgggcatgaaactgtgtgttgtgccccacagatttcagagcattgacctgtagtatacccccggtcgtgtacgcggtagaaatgtgggttggtgttaaaactgtccgggaatggcatctggttttaaacgcctaatggtgggggacagctcatgagtgcaagacgtctgggggatggtaataattatacagaaggggggctatcaaccgggagtacaaacccgattggtgcaacgcgccaaggaggtccgcaggtcgccgggtcctaggaataaggggggaagtattgtaggatgtggaaaataagcccgccgaatccggggacccgaaggtcacagtcccatggggggcccatggatctggagggtaagggagggaccgtggacctcgtcggtaatgtaaaggatcgcgaagggatgggaagggcaataagcgacacgagggaatgaaagggcggcccagagaattgccccacaaggggtccatattacccggaagcgctcagaagaagtggtcagcatcaaggcaaaacatctggtctggcagcgggtttctaggacaaaggggccaacggcgactagagacgcgcaaatccgggcaaacggctctcacaggggcgcaacacgacagggggaaaagcgcct

SEQ ID NO: 715260 - DNA, 522 bp, Homo sapiens
cacagtgactcacgcctataatcccagcactttgggaggctgaggccggcggatcacctgagattgggagttcgagaccagcctgaccaacatggagaaaccccatctctactaaaaatacaaaattagccgggcgtggtggcgcatgcctgtaatcccaggtactcaggaggctgagacaggagaatcgcttgaacctgggaggcggaggttgcagtgaaccaagatcgtgccactgcactccagcctaggcaacaagagcaaaactctgtctcaaaaaaaaaaaaaggattaattttcaaattggccaccaacctggttcaaaatcatttccatgggttcccaatggtctttaatagtaggtactggagtaattatgatattctagagctacattctggcagtatctattaatcaaaacaatgggttagggtaatggaagtggtctataaaatacctaaaggcaatattacaacatacaattggggtattaaggagaacccaatgttatgggatttaaaa

SEQ ID NO: 715261 - DNA, 746 bp, Homo sapiens
  misc_feature (24)..(24): n is a, c, g, or t
  misc_feature (72)..(72): n is a, c, g, or t
  misc_feature (75)..(76): n is a, c, g, or t
  misc_feature (85)..(85): n is a, c, g, or t
  misc_feature (127)..(127): n is a, c, g, or t
  misc_feature (137)..(137): n is a, c, g, or t
  misc_feature (177)..(177): n is a, c, g, or t
  misc_feature (203)..(203): n is a, c, g, or t
  misc_feature (218)..(218): n is a, c, g, or t
  misc_feature (246)..(246): n is a, c, g, or t
  misc_feature (255)..(256): n is a, c, g, or t
  misc_feature (309)..(309): n is a, c, g, or t
  misc_feature (319)..(319): n is a, c, g, or t
  misc_feature (513)..(513): n is a, c, g, or t
  misc_feature (558)..(558): n is a, c, g, or t
  misc_feature (589)..(589): n is a, c, g, or t
  misc_feature (592)..(592): n is a, c, g, or t
  misc_feature (622)..(622): n is a, c, g, or t
  misc_feature (641)..(641): n is a, c, g, or t
  misc_feature (654)..(654): n is a, c, g, or t
  misc_feature (674)..(674): n is a, c, g, or t
  misc_feature (724)..(724): n is a, c, g, or t
gcccaccagctggttttgccatgntgatctgttccactttaagtgcagtgactgccgctttagtagcgagtntgnnagcccaatnttttcccaggtaagtttctagatttccagcttccagcatgtnctttacagcngggacttcagcctcaatatctaatccaacgtttttttttncttcttgatgttctgcataaagtttngttattacttcattngccttaactccagatttttctgccagtncgcgcgggnntagcttcaaatgccttagcaaacttcttaatagcatactgttcaagttcaggncatgtttttncatatgatgtgatctgtttggctaattcaatttctgttgctccacctccgggtacaagacgtttatcccttgttagaactttgaaagtattaacaccatcgtctactgccctttctatgttatccatcagattgtctgttgagcctcgaagtactatggtagaaatggcgccatctctccttttcatgcttaanaaccaccacctgagtatcttcaacttctgagaggtaaacactgtnacagtgtcccatttcttcaaggacaggaggngtnaatctaggaagagctgtagcaccaacagtnttacaaagtcttcggagancccattttgagtntagcctcactaacatgaaantatatttatttgcataatgaagagccatgtctgccactctgccacctgtnactacgacatttgcaccagtat

SEQ ID NO: 715262 - DNA, 1525 bp, Homo sapiens
  misc_feature (1)..(1): n is a, c, g, or t
  misc_feature (929)..(929): n is a, c, g, or t
  misc_feature (1147)..(1147): n is a, c, g, or t
ngtgcgtatcttctccctaccttgtggtaaacttcttcttgttgctggctgggtggtggctctttcttctctcgtgtgggctctcttttctcgccctctgaggggtgtgccttatttattttctttgggggaaaacatggtgttttgggagcacccccccaacacagggtgctcgtaaccgccaatgtttttgtttttctgggggccacaccaggggtgttttttcccccccaccttgggtggggcatctttttttgttctctccctctccgtgtgtgtgttttatccacccgtggcccccttgttgtcgcccgcggagttttgtctctcccttgtgtgtgggccaacctttgtgtgagacaccctcctctcccctcctgtggtaactttttgggccgcaatttttccacgagaaagccccccctttggaaaagaattgttcctattaggaagtgtttggtgattagctcccggggtgaaaatttggagaggcggtttatttttttgggcgccacaagaaaaatatttttgcgaaagaaaaaacattgtgggcgtgcggtgcggcaaagaccaacactggggtgcgctctttcctgagcacttgtgcgctgtcgtgtgaaaaagggtttatcctttggagagaggcccttctttttctctctctataatatttatatggcgtgtttttttctttctctaaagatggctggaagtgtccccccttccactcttgtgagagtatattatagatcgggcccgttttttgcccacgtctataaagagaatttaaaaaatattttttgggaccacacatgccccgcagttaaaaaagggtatatagagaagatttataggagtgtcccccaccctccatcttcacaatttatctcgagaggagagatgttgttgttaagccacgctagaacacncacactatatttttgagacagtggagaacacccacagagatgttcttctttctctcccccacacacaaactctttttataaccacacaaaatcccaagagccttcttgtttctcttaagaattggggtgccacacctatattgcccacccacccaccacgaagagtattttcacaaatacgggaatatcccgcgggtctcacctctgagagagaactngatatgttctctcgcgcccaataatatgtgggtgtctcttggggcgctgtgtcttctttaatggagcttaatattatattaaaggagatatcttacagctgggttaaaaccagatgtcacaggcgtttcttatagttgtttaatgagaccctcctaaataagcccgtgttaagaacacatggaataaccacgccacgccagggtacccaaagcgccacacaggtgtagtttcgcatattatagtgtaaacacatatccagaaaatagaagattttgaaattgtttgggcaccttccaaggacttgagagacattttatgtggaaactttaaaaaaattaaaaccactgtccccttaataaaaaagaaagaaaaataaa

SEQ ID NO: 715263 - DNA, 730 bp, Homo sapiens
attgacagtattcagcatgtgagcgtaagagcctacatgccttggccctgctctctgtgaccatcagcttataggatatacaagggtgtgatccatgctatccagaaatcagatgaaggccacccattcagggatatatctggaatctgaagtagctatatctgaggagtaggttcagaagtacagtaaattctgttcttgtgtcatgttgcaactgctcgtatacttggacctcagtgcgcctcttcttagttgatgcattgagttgattctctgaagttgcagtgttgatgtgggtatgtacctatgttggtgccttgtctaatgtgtgctgacactactgatttccggcctctcatttcactcttcagtggttcctgtaatttatgaacggcatcaggcacagctagatcgattatctaggacttgcaaattaacgaatgtcaaagatgctatggtctaaaatccaagccaaacaatcctctgtgatcgaacgcgcaaaagtctgaatgcaaaagcgcccaaattacagttagtaggacgtatcatcgtattaaaaggggggcaatcttccattttagatttaattacggccggaagggtcccgggaagatacgtaaaccttggacgtttgccaggtgccgtctttcaccagcatcgtcggctagcatcttaatcttaagtccttgcgcaccgtcggttgagggaaacatttaccggttctggctgc

SEQ ID NO: 715264 - DNA, 550 bp, Homo sapiens
  misc_feature (387)..(387): n is a, c, g, or t
  misc_feature (399)..(399): n is a, c, g, or t
  misc_feature (426)..(426): n is a, c, g, or t
  misc_feature (456)..(456): n is a, c, g, or t
gcgaggtgatctagaggatcccggtcgctgtatcgagggatagtttgttgagttatcttttagaatatttgtaaagctaaaaaatcaagttccaggtagaccatcactacagcaagcccactgcagtattaatctattaatactgtcaatgttaattaaaccattattcgtgtagcccctacccatcccattccagtctctcaggaggcttagctgtatcccagagaccccagtgctatgaccgcaggtctctcctggggcgggaagaggtaagaagtggctgatgtcaaagtcaacagccagcaagtggcgtgagcagtctcgatgaattctttcaaataagcgtttttcagatccactctagggcttgccttttccctctgttgnagtctcagaagntcttgaggtagaccttgtgagacctgnagcagtacttgctgtcttaggtacagaagncaggatattgattatttctccctgactcaacaaagagttgagatgtttatccaggttaggatgacactgcccccctgtcccccccgccccccaa

SEQ ID NO: 715265 - DNA, 498 bp, Homo sapiens
  misc_feature (95)..(95): n is a, c, g, or t
  misc_feature (107)..(107): n is a, c, g, or t
  misc_feature (242)..(242): n is a, c, g, or t
catcttaactgggtcgagtttggctctaagattatagtcacctctataggaggtctatctagtcaaccgttgatgataacactcgctgccaatcnagaacagcaaanctcaaatttgtgtcacgactatactgaggctcaggaacgtaccaatacggcacgaaatgagcaacgggcgactctgaatagtattaccctgagacacagaacgggacaaaagttaagattcgtcactttccaaanaaaacttggtaaggattcttccccccagatagctctcacgggggtagagggaatactggcaaaggttgaaagtggcagtttgcatgtttttaaaccctctccattttctaaagaagacaacacagtcaatacatttgattgtcttgaaaatgaagcaaccgatgagagctttaaagtgcccatgtcacctaacgacaacgactgagatgactggaattgagagaagacgcagtcttccttccagggaaggtcaatc

SEQ ID NO: 715266 - DNA, 141 bp, Homo sapiens
cgtgatctagaggatccgtgcaatggccggacgttcacggatttgtgtcacagatagcattctcgtggcaggggttgctgacacaggcgtcatccaggtgacacaggaggccagtcttgcccacgcaactggtacggcggg

SEQ ID NO: 715267 - DNA, 171 bp, Homo sapiens
gccagcccacagagagatataacaagatatttggtatattaaattatatgggaacatcgtcaataagaaatgatgtttaacttccttcgagttatatttgtatggatacattatttcgtattccaaagtcgtatgagattcctaaaaatctggtatgtctggttgggagct

SEQ ID NO: 715268 - DNA, 133 bp, Homo sapiens
tgtgttggctactagcacggttggctactagtccacgggttggctcctttgacactctctaatccgggctgattctaatttccatatactacctgcctcccccagccaagcgtggactagtagccaaccgtgg

SEQ ID NO: 715269 - DNA, 176 bp, Homo sapiens
tcatcgagctcggtccaggtgtgcattctccactccgcatcctgggctggggagtggagaatggcacacccgtactgtgctggttgccaactcgctggaacactgcactggggatgacaagtggacttctttaaatatactcagagtgacaggatcactgctggaatcgaattcag

SEQ ID NO: 715270 - DNA, 362 bp, Homo sapiens
gtaccttgcatggatacggtgttaataccaatatggattagtgtgaccacacctgaatcagattcaataccgaccgcatgacgtgttgagaaggttgaacgaatcacaccatcaatggggcgtaaacacggccatcggttggtttaatggcaaatccttcgccaagcgcacctgaagcaaaggcaggatccgagacgtttgctaaaggttctaaagtaccggcaattggcgcatagtattgtgtgtgtgcttgatccaaatcaatgagatctgactgactattttcaaactttttaccccaagtcttttcgagttggtaacaatttcggcatgtttgtcttctgtaacggaacgccgaaaag

SEQ ID NO: 715271 - DNA, 219 bp, Homo sapiens
gcggatcttggaagagtacgttgagctccagtccgcagcgttttgaagtagctggacgcgtacctgctgtatatactgctgaccggggcgctgcagttcggtaatgtctcctcgatggggaccttccccttcaactctttactctcgggctacatctcattgtgtggggagtatcatcgtagcggttagactgagaatagagttcgtccccagcgaggg

SEQ ID NO: 715272 - DNA, 706 bp, Homo sapiens
  misc_feature (17)..(17): n is a, c, g, or t
  misc_feature (24)..(24): n is a, c, g, or t
  misc_feature (35)..(35): n is a, c, g, or t
  misc_feature (39)..(39): n is a, c, g, or t
  misc_feature (42)..(42): n is a, c, g, or t
  misc_feature (81)..(81): n is a, c, g, or t
  misc_feature (155)..(155): n is a, c, g, or t
  misc_feature (170)..(170): n is a, c, g, or t
  misc_feature (218)..(218): n is a, c, g, or t
  misc_feature (229)..(229): n is a, c, g, or t
  misc_feature (271)..(271): n is a, c, g, or t
  misc_feature (322)..(322): n is a, c, g, or t
  misc_feature (343)..(343): n is a, c, g, or t
  misc_feature (376)..(376): n is a, c, g, or t
  misc_feature (434)..(434): n is a, c, g, or t
  misc_feature (454)..(454): n is a, c, g, or t
  misc_feature (479)..(479): n is a, c, g, or t
  misc_feature (490)..(490): n is a, c, g, or t
  misc_feature (493)..(493): n is a, c, g, or t
  misc_feature (502)..(502): n is a, c, g, or t
  misc_feature (572)..(572): n is a, c, g, or t
  misc_feature (695)..(695): n is a, c, g, or t
cttcttttgcgtctgcnagccgantcacattgctnaganaanatggggaaggtgaaggtcaggagtcaacggatttgagtngtattgggtgcttggttaccagggctgcttttaactctggtaaagtggatattgttgccattaatgatccctanattgacctcaactanatggtttacatgttccaatatgattccacccatggcaaatttcatggnaccgtcaaggntgagaacgggaagcttgtcatcaatggaatatctccatcacnatcttccaggagcgagatccctccaaaatcaagtggggcgatgttggtcgntgagtacgtcgtggagtccantggagttttcaccatcattgagaaggctggggntcatttgcaggggggagccaaaagggtcatcatctttgccccctctgctgatgccccnatgattcgtctatgggtgtnaaaatgagaagatatgaaaacagcntcaagatcatnagnaatgcttcntgtcaccaccaactgcttagcacccctggccaaggtcatccatgataactttggtatcgtggaaggactnatgaccacagtccatgccatcactgccacccagaagactgtggatggcccctccgggaaactgtggcgtgatggccgcggggctctccagaacatcatccctgcctctactggcgctgccaangctgtgggcaa

SEQ ID NO: 715273 - DNA, 245 bp, Homo sapiens
ggagactcaagagtctctgtgcatcgtctttctagcaaaggcacttgaatgtgtctgcatccctgttaactcgagtgtgaggaggtggagagacagcccacccccgagtccactgtgacccctgttcccatgctgacctgtgtatcctccccagtcatactttcttgttccagagaggtaggggctggatgtctccatctctgtctcaactttatgtgcactgagccacaacttctaaggttaag

SEQ ID NO: 715274 - DNA, 170 bp, Homo sapiens
  misc_feature (7)..(7): n is a, c, g, or t
  misc_feature (45)..(45): n is a, c, g, or t
ggtccgnctctgctcccatcagcggattctatacattgacctctngtggttataaaaacagcagtaacgacgtgtcagacaatgacgctgttgatgggactgatgggacgcgcatcttctcccatcagtatgagtcacgttttcctacttctttgcatgcctagtaattt

SEQ ID NO: 715275 - DNA, 1517 bp, Homo sapiens
  misc_feature (111)..(111): n is a, c, g, or t
tgggttggccacgggtgagtttattaacccgactaaagttcaaataaaaaaataaaaaccaaaatctgtggcagggaacgctagacgccaaaattcaggaaaattcttgcnttcctttgttccccaggactctccctgtggccaagccgcagcttccactataacttcattctgtgacctcgattcaagtttccctcatctcaagactttgcattcttgtaccgctgtggacattctctctgtgcgtgctctcccactgtggacgacggtgagtctcgtgggagtctccctgtggcacctgtgggggctttgtgggtgaggggcctccatatatttacacccatgtggcccgtgaaggcacaccatgtggcgtggggtgaccatttccgcccaggggtttgtggaaggcgccacgataagagaataaggtgttggagaggctccctgtgtggccccagtttgtgggaagaaacgagccggctgtgaccatatactgtgctctcggggcacacaatgcctcaggttagaaccctttgtcgttgacattctttcccatatattagtgtgtttggtgtctacacaacactgtgtacagacacaagagacactctgagaaatataggctttcacgcgttttatagcccctttggcgcgcttttcggcccgaaaacatcgtgggacctggtgggccctcttccccgtgaatgtggcccgttgaaatttgtaacatctgtgttctacaaggccctttatctgtcgggtgcctttgggaaaaagggcccaaggagtaactcctgtgggggccctgtggtttttactttttccccctttttttgttggcccccaccatttttggctgtggcgccccggaccacctccttgcgggggttctcccccttctctaagaaccttctttaaacacaccttgtgggtggcgccgcgcgatatacccagcgcagacatccgtgggccatacaaaccgttggaacaattacttgggcatttaggaacctcttttttgtcacacccccggggggtgtgttggcccaccacgtggggaattacttccccttgagaaatccttcaaatacaacggcgacagaggcacgccgggagaatataacccccaaaggagatatcaagcacacgcgtggggaatcgcaaaggggccccttcctccccacaagaggcgtggcagcaaattcacggggagaccccccccggatttccccccgggaagacacaacaatttttggtgccaccacaaagaagagaagcagtttgtgcgccaagaggctaccgagcataacctcaacggagcgcaggcttacgacaacacaacaaccagtggcgggtcaaagaggaagaaacacgacgagggggccctccccaacaaacagagccagaaatagtgacctagctagtagagaggagagcactcaacaaatacgacgcgcgacaataggagagacccacacactacactgaggctgcagagcaacaatactagtcgtaga

SEQ ID NO: 715276 - DNA, 390 bp, Homo sapiens
acttagaggatcccggctgagtgcatggtcggctcacttcatcacaactcttctcccggttcagtgattctcctgctcagcctcacagcagctgagattacaggcacccgctacatgcccggctaatttttgtattttagtagagatggactttcaccatgttgggcaggctgacctcaagtgatcgcccaccccggtctcccaaagtactgggattacaggcgtgagccacaacgcccggcccttgggcaagttctttgaaatgttgtttctaatcttaacaactcctagagataggtgtgcagtttcttgtacagtgtgctgggattggaaaccaagtctgtttggttctaagccctgtggtgtttccacacagccattgcacaccgg

SEQ ID NO: 715277 - DNA, 325 bp, Homo sapiens
cctcccaggttcaagggattctccggcctcagcctcccaagtagctgggattacagggtgcccaccaacacaccgggctaattttggtattttaagtagaggtggggttccaccaggtgggccgggctagtcttaaactcctgaccggaggtgatccacccgcctcaccctcccaaggggcgtgggattacggggtgtgagccaccacgcacagccaagggtttctaacggagggtcagtgtgctgagattctagcttcttcggtcctgtgaatcaaaacccctttcttcattccctctctatccccaggtagagagccgggcaa

SEQ ID NO: 715278 - DNA, 243 bp, Homo sapiens
gtcgtcgctcgaactcgtgaccagatcatcatccacagaggccgaggggaagttgccccaggtctaggtcaagataaagaaagcatagtacttctcagattccccttgtggtgaaaaaaattctgctgtggctatgaaaataaaaatggagagaaaacactggcaaagtattttcccctcctatttacatcctttgctgtaggtcaacgtagtgtccaagaggaggagtgagagagcatatca

SEQ ID NO: 715279 - DNA, 884 bp, Homo sapiens
agcggtaatacatataatgaaagaagaaatatagaaaagatcgtgggactatttttgaatgcatgttgttttatagataatgaccatgtaaaaaaatggagtgataatcagctatggaagaagtattgctgaaatcattcctgttttcttatatgtaccattgtcaatcaaggtaaggtaataattatttgaaatcaaataaacagacaaaatttaagaagtgtttctatataattatatatataatgtgtatatatagtgaatgagtttatacacacacacatatacaaactatcttgtgtgtttaatatatatgaaccaaatggattacctatatatgtgaagatagaaatatttttaaaaactctaaaagtttagtaaactgactatatggtactatttaaattagaaagtttggataattctacggcatttgttttaattttccagcaaagaaagattacaaatgatcctggcttttgaataaaaccagtccctcttcaagaacagaacattttaagatctaagattctgtgtggctgctaaagtgtttaagccatttcaagctgtgatctctacagtaccactgcaaacagttgggacacaagtgaacaaattttatcagcctggtgttaatttgatgctttctttcctttttctgtccccccccccttttttttgcctctttccttacttcttccctttctttctctctcctttccttcctttactttatttctaattgaatgcatgaaatttcttgcaatgtccccagggtcctgtaatcagagtattgacactctaaaattgttcatcacctttgtcttctgcaaatttctgaaagcgtgcttaacagaaatccaggaaaagccagttgaatactc

SEQ ID NO: 715280 - DNA, 131 bp, Homo sapiens
tagatcgaggacaaatagacaatgagaggtgacactgtatcagaaaacaggagaacagtactaaagaggagccagttcagccaatactatttctgttccacaacgaagttccactggtgttaagtttcagg

SEQ ID NO: 715281 - DNA, 848 bp, Homo sapiens
agaccggggacggggacaacggccccaggcccctccccagaggggttacagccggagtccaggatgtggcgccccccgtcgcccccgcaaagctttttaacggactcagcagaagcgtagcatttcccgcagggttaattgcagaatagaaaattgccccggccaatggcacaccccctcatgctagccccccggaactgggatacagcctcgcgaaagaaattggcccctgaagctcgttatctagattatcccacctgggttgttacagacctgtttgctcgatttcgaccctgtattgaaggttacgtgtccccctgggatgttggttaaaaccccggacaaaatcttggagggtccaaccctttagtacgtgtggcttggtccaccttctgtggctaaggtaagaaccgtgcttgttggaagaccaagtctgttggcttggtgacatcttctgtgggccccccacgccctttgatctttcccgggtattaaccgtttccggctgagtttctgggatttctctagaggctggcacagaacccgcttgttttgtcttcgggtcttcagggttggaaagtcccagccgtaggaccccgtttcccttctagctgatgtctttggcacgaacaccctgggctgttacttgctttgagttggaagcggtttgcatttacgcccgtaaaagtattcattcctaatttatgtaaggttttttttgtacgccattttcgattttttgaagagatgaccaccaattttggttttttactgttatgtgagaaccttaggcccccgcaacacgtccttgtgtaaggaaaaataaaagtgctccgtaacccaaatta

SEQ ID NO: 715282 - DNA, 369 bp, Homo sapiens
gaggatcccttcagcacataacgttggaccccattttattcatagttgggggttttttaaattagttcacaaatctggtacataccgggcagttaaaacgggttatcactttgataatcagaagcctcgggggtaacatagtcttcatgaaaacatatggtaaaacagggagaatacacagtaataatctcttggaaagcaagggcggtaaacatccatgtttctaagaaaatataactttacatatatttgtatttgaagcaagctatacctcttacataaattcagacggtagaaggagtgtgcaatcataaggcttatttaagggaaacaggggaaataattttaattatgactaaaggtgctgaa

SEQ ID NO: 715283 - DNA, 278 bp, Homo sapiens
ccccaagcaaacataggaacttaggtataatgtgtaatcagacccatcagtgaattctgactttggtgtgtgaaatccgtttgctttgctggagagagcaggaatatgcataactgatcaagattgtcctataggagatacataatgtctcgcaacttttaataactttgcaaatagctctgtaaaaaacggtggggggagggattgattgtccaaatgtcgtgaggtcaagaatgctcttcaagtgaaattgcttggctgcaagatggttttaatta

SEQ ID NO: 715284 - DNA, 139 bp, Homo sapiens
tgggcccgttttaaatggcatttgtagctgcagcaggatgcaggaaccagagcctggacctttggcggtatgtagtgtgtgaagaggagttctgaagagatgtgggccaaagggaaggttggtcttgaacggacagttc

SEQ ID NO: 715285 - DNA, 259 bp, Homo sapiens
ccgatgtcagcagctcatcagctgcaggccatgcacgcacagtcagactgagctgcagcgcttggcgctggaacagcagcatgtggctgctatgcccatcacccgctgcacagtgtgccgctgcctgcccaggaggactactacagtcacctgaagaaggaaagcgacaagccactgtaaaacctgcgatcaagagagcaccatggtctcctacattggaccttggagcacccccaccctccccccaccgtgtgccctt

SEQ ID NO: 715286 - DNA, 323 bp, Homo sapiens
tttctggacagcatttggtctggctcctgttgcccaggtgggcgtgtagcgttgggctcactgcagcctcgacctccggggcccaagtgatctccctgcctcagcctcccacgtaatgggaccacaggcacacgcaatgcctagctaattttggtagagatgggtctcactttgtggcctaggcgggtctcaaactccggggctcaagcagtcctccggcctgggcctcctaaagtgcggggatcacgggcgtgaactaccacacccagcgggaatggatttttaaaacctaccattcattataatgggtatggtagctaagg

SEQ ID NO: 715287 - DNA, 180 bp, Homo sapiens
tgacaacgaggcataatatgtcgacactaagtcaaagcctattctgaatactagtagctgacctcattacactaacatgaattggaggacaacccgtagaacacccgtgcatcatcatcgcaaacagctattagaatgacgagtctgtgtagtatatcaaataccagaccggtcttaccg

SEQ ID NO: 715288 - DNA, 130 bp, Homo sapiens
aaggctccgaacaagagaggatagcagtctatttcatgccaagcaagaggtagtcagtataatccccgtctaccagaagcaagtatctcagctttctgtggaaaagcgtgcctcccagtccgctgtgttg

SEQ ID NO: 715289 - DNA, 310 bp, Homo sapiens
gggccctgggtttttaaaaacttgctggccccacagttggcccctggacccggccgcgcaactggtggactgtaagggctccttactgggcacaggagcttccagcttttgtccccggccagcaggattggctgttgtgtatataacttgggcgagggggcaggccccccttgtgcaaaaccaggggttttagggcacctggctgtgtttccaacttaaggagggcttgggcgggggccgggcttggaaccatgtacgataccctcatagtggccctttaacctgatcctcccccgcgaaaaaaaaaaaa

SEQ ID NO: 715290 - DNA, 220 bp, Homo sapiens
aaggatcccgcgtggtacttgcagatttcctgttctggacgcaatgacctagaagataaaaacaggctttttaataataactggcacagcctccaggttggcgggctcatctgcgctggggttctgtgcgccatgggcatcatcatcgtcatgagtgcaaaatgcaaatgcaagtttggccagaagtccggtcaccatccaggggagactccacctctca

SEQ ID NO: 715291 - DNA, 81 bp, Homo sapiens
  misc_feature (12)..(12): n is a, c, g, or t
tttcggcacagnggtttttccagaaacgttgtcaccaaataagtatgagactgttaatttggagaaacaattagcccctac

SEQ ID NO: 715292 - DNA, 813 bp, Homo sapiens
tccagctaattttttaaagttttttcatagagacagggactcactatgttgtccaagctggtctcaaactcctgggttcaagccatcctcccacctcagcctcccaaaatgctgggattacaggcatgagccactgtacccagccaaaattgtcttctttctttaagctgaattcaacaatttctgtgagtggctctttgcatgaacactgtgcaaggtgtcgcgagaaatccaaagctgaccaaaacatggtccccacctttcggagcttacagtctagttctggggaacagagattcagccaaagtcaagaaacactggactgccagctagattatctgttctgtgcttcggctgtctactaacgtacatatgtggatatgggttcactttccatccctaaacttagtaccaaaccagcactttaatatctaattataactctaactccggcctaaactttattattgcacactgcctgaacaaaacctatttgtctctatgtcacattttcacctcatggaacaagggtgtgaacatgaccaatactcttaccgatttattcaaccaccacagactattctgtttctcagcttcagcaactgtcctctcgaatcctaaggaacctctgtcaacagttgacggttgctgcttgaacaagcaacgcagcacggaccgcggacaatctcctaacggcacaactacatcccttacccaccaaaccacacgatacctggacgggctgcgcgcacagctcagacctcgtaacgcgacgggccccccactgccgacatctgcgccccgccgaccgaa

SEQ ID NO: 715293 - DNA, 565 bp, Homo sapiens
ggaaagtagtatcttactacaaatcaaacatataataagtggaggctacatcaagcaaggggaggtccagccctcttgcaagtgtggtgagaggctctactagcagagccatgtacgtcactgaattctctacagcaccgcatgctacacgggacctactccggagcccatgtagcatgcgggatgctgtcagagaaactccagtgacgtacataggcgcggagtagacggaccacacaagccgacaccgggagaaggcacagagaaaggcacaagagcacaggcgctgcctcacatcatccgagcctggccaggcacaccagaagacaccacgacacggaccatgcgcagagcagcggcggagggggagagcgcgcagaaggaggacgaaggcgcgggatacgacatcatggcggagcaccgaacaagagggaaatggcaggcagaggagccagcgagaccgcgagatcagctgagaagcagcagagaggaacagcgaggggccagcaccgacagggggacaagaaaggggacgggcgggaacacagccgaagcaacaacagcc

SEQ ID NO: 715294 - DNA, 320 bp, Homo sapiens
gtggtgggaagcgcctttgatctcccttgtgattcgccccaagaatgacgtctcatctgagttctacgcgccattggtgcgggcactgcaagcagctagagcccgtgtacaacagcctggccaagaagtacaacggcgccattcagggctctgttctcttgccctgatgtatgtcacagacaacgacgtccccagcgaccgctataaggtggagggcttccccaccatctacttcgcccccagtggggacaaaaagaacccagttaaatttgagggtggagacagagatctggagtagctcttattgcccaggctggagt

SEQ ID NO: 715295 - DNA, 601 bp, Homo sapiens
  misc_feature (68)..(68): n is a, c, g, or t
  misc_feature (98)..(98): n is a, c, g, or t
  misc_feature (190)..(190): n is a, c, g, or t
  misc_feature (231)..(231): n is a, c, g, or t
  misc_feature (235)..(235): n is a, c, g, or t
  misc_feature (240)..(242): n is a, c, g, or t
  misc_feature (244)..(244): n is a, c, g, or t
  misc_feature (247)..(247): n is a, c, g, or t
  misc_feature (252)..(252): n is a, c, g, or t
  misc_feature (255)..(256): n is a, c, g, or t
  misc_feature (258)..(258): n is a, c, g, or t
  misc_feature (324)..(324): n is a, c, g, or t
  misc_feature (331)..(331): n is a, c, g, or t
  misc_feature (354)..(354): n is a, c, g, or t
  misc_feature (361)..(361): n is a, c, g, or t
  misc_feature (368)..(368): n is a, c, g, or t
  misc_feature (400)..(400): n is a, c, g, or t
  misc_feature (447)..(447): n is a, c, g, or t
  misc_feature (462)..(462): n is a, c, g, or t
  misc_feature (468)..(468): n is a, c, g, or t
  misc_feature (530)..(530): n is a, c, g, or t
  misc_feature (537)..(537): n is a, c, g, or t
  misc_feature (548)..(548): n is a, c, g, or t
  misc_feature (555)..(555): n is a, c, g, or t
  misc_feature (567)..(567): n is a, c, g, or t
  misc_feature (594)..(594): n is a, c, g, or t
gcactttgcctgtatactctgtaaaaatgaggaccttagaaaatcaacatttcctgtgaacttgaganactatacaagcagtgcccaaatcagtaggnttaggcaggtaaaaccagttggatagcagatatattatgatctgttggacaaaggtatagttgtgtgcatgtctacaaggtcatcgtgattngccattagcttaaggatcatgtaggttgaacagggtgaggnaggnttatnnncnggnttgtntanntngtggtaggggatgcagtatacaatattcatgaattaaacacttagctaactgccttcctgaaaatngtctgtnttctaaaagacaaagatctaggnttttgcngtttttnactttaacttatgaagattcaagtcactaatntgttacttgctctggtttaaaatgaaagcaactggctatggtaaggnagagaagacagctgnattgtntcagaatatttaagacttttaaattaagttctgagttacctcaccttataaaaatatatgtnaatatantaaataccaanagagatncagggtgtgggntatttaaaaatagatttgtgttgtatnagcacca

SEQ ID NO: 715296 - DNA, 211 bp, Homo sapiens
aaattgggggaacccccttttggtttttaaggggtttggggtttggggggggaaaaccggaaaaaaggggttgttttttaaggggggttttttttctcccgggggggggggggggccccaaacttttccttggggggggaccccgggggggggcccggccgggttttccaaaaatttttttttggggggggttaaggggttttccctttta

SEQ ID NO: 715297 - DNA, 87 bp, Homo sapiens
agcttctaacgatgtacggggacatgttacttttctggtcttttcatggcatatgagcaaataataaactatttacactacaaaaaa

SEQ ID NO: 715298 - DNA, 160 bp, Homo sapiens
atagatactcatgctgtcagcacttgcaacggttttgagggaaaagatgggctaagcttctgtctgataggagatgaccgacctgaatttattcaagatgatggagccttcatcaaattcatatcccgaatttagtcattcacgggccatgactgacgct

SEQ ID NO: 715299 - DNA, 1500 bp, Homo sapiens
  misc_feature (703)..(703): n is a, c, g, or t
  misc_feature (836)..(836): n is a, c, g, or t
tgtttaccaggctgagtgcagtgagctgaggtcatgccattgcactccagcctggtgcgacaagagcaaaactctgtctcgaaaaaaaaaaaaaaaagcaaggaggttgacatcaaatacggttgattccaaggctattttatgttccctcttgctggctactaacaagttaactaatgaacaataatgcgacttggtaaacagcaacacgaattggatggctgctaacgagttccttgcaggtcttttaagttcggcaatgagagcgtgatgggactctaaaaatggcaagacagggcggttgtgggcatcagagacggagctgtgggcctccagaagagtgtctcgtggtctccttctcggtggggggccctcctgtgaggcatacactctcatgtgtctcctgttgtgcccttgtctaccccacgtctttctccagaaaagctcgtgcctctcctctcgcctttgtggcctctcatgtgcgaccaagtatgtctcagcaatatctctccgctgttctctctctatctgtgtgccacgctctcttctcatctctcaccgtgtgtggatgccctgtttctctctctcttccctagtgtgtgcctgtctccttgtctcctattctccccagctgcttgtatatctcagacggggcccataatgtgtggggtgaaatttaataagacatctactactgttgagngagaacgccctatataccacatacgaggaaagcatctccccacagggggcaatataatatgttctttcccacacatctctctgctgaaagaacatctcccctttataacacgctttataaaacaacgagaagnatctccggtggacagaaaagactccccgtaatgatcaaatatgtggcgggccacaaacagcttgtgttgtaccacatttcgtgcaccaatggttgttgtctaccacccccctgttttaattccccccccttattttggcgccggggcgtggccaattctatttctggaccctggctgagtcgtcttgtatcgcgacaatgcggtcggattgatctgttctccaagtgtggttggccgccccccagacagagtgggggacattcaaaaataagccaccgcctcatattgaggggcgggggcgagccaactccatttcgcgcacgacataatcgggcgcaacacaggcgcataattggcggatgcgggaaacagacccaattatgtacgaggggggagggccaacacgcagaaccctccgccatatttgggacgcgagcgccctccccccagagggcaaaatattgcgaacgtcgtggtgttgctatcacgcagatgccctcccccccgtaacaagggccctccctcacatgcagtggtcgctcacatggtctgtgttttcacacaggggtggtgtgccatccatcttgagccacgtcttgtttatcgtccacataactctgccgatatcgggaaacatgccagtggagtgtgctaaagactcaca

SEQ ID NO: 715300 - DNA, 83 bp, Homo sapiens
tgtgctgcgtgggctcgagtcagctacgatggttcaagatatttgctgaagggactaagctcatagtaacttcacctgataac

SEQ ID NO: 715301 - DNA, 792 bp, Homo sapiens
atcaccctcctctcaagggtcctgtgcctataggtggtggccagcctgcactgtccccagaatcttttggatactggaggtcagattgcatagtgtctccctcttctagggtcatccagtggactcacgctccacgccacaagactacctctgcgttgctagatcgccatccccagtcgtggaggcctcttctggtacgacctcaagtgaccaggcattctctacacggtgtctctataatagagccaacaatgagacgacgtgggttggagcgaacgcagttgaggagtgagtttgacgtgacgcagggagacccgtaatagattgccctcagttgatttgacatgggtagcatgtacgaacacttagtagctgttttcgttggcgactgagataggtctccgagttagtttatggccgagaaagaagacaacacaatactagggaggcctaagtttcgcttacttgagacatgtattccacgtacagggggtgtgcgcactaaaggaatttgtcccaggcatattaacgctacacgaggggactatcctgtaggggaatcggccaagcagatggtcgtacccacaatattatcctatgaattcgtcgtcctactttgaaataaccatgcaataggggcgacgataggtcccacttggacaagttcgttcaacatacaggagtgctaaagctcctcactttgtgagatagaaacactgatggtggatccccatagtggcgggacatcctctataggtagacacagtgaagccatcgcctaggttattcatg

SEQ ID NO: 715302 - DNA, 1051 bp, Homo sapiens
  misc_feature (302)..(302): n is a, c, g, or t
  misc_feature (352)..(352): n is a, c, g, or t
  misc_feature (365)..(365): n is a, c, g, or t
cttgatgaatcattcacgactgtcttccaactcttgtgttgatactacctcttactacgtactccatctatccagcgtggacgtgcgtgtcccatatggtgcatcttcgagcagcagtcacctatgccatctgatagtaacgctgtatttcatctaatatattgccgacttcgtagcatggagtgagcaattgtatcattctgtctaatggattgtaggagtatatgcgaatattcacgtaggagtagacacctcggtctgcactagagtagacgatgtactatacagtgtgctcttagccntgagacgtagagtaggtgttgtcgtcccctactcgaaaaagctgtgctgntctcattgcttcntcttttggcgcctactttgttggttgactagggtgtcgcgccggaggtttggccttgctagttcgttgccggtatcctttatgtgagtatcgcgcggatagtatggacgcatttgacatattgggttagagtgctagggagttggtctcctcgacttgcgtggtaagggtgtgctcgttcacctatggtgatggtttcttatggctagtagcgtgaggctcctttggtcagagaaggctcccatttggctgtttcgggcttttgttgccattggtatttgctgctattggtcgtgtatgcctctggccgtgcctggtgtcctgaatgcgtcgttgccgtgtcttccctctctcagggttattgagtggcttcgccgcgtcatactgattcgggaggctctgggtccatctcgaaatcatctcaagtgatgggagtgtgtaggacagggggtgcagtcgctgcttactgcatgtgtgtttacctattttcccttagctccagatctgttagacttgatgaagatcctttcccccctttcgcttgagggcatggttcgggtacgtacggacgtcgagtgggatggaggatagtgtggagggccgatctcccggcctcctggtcgaccggccatggaaacgcgtagggggcagttcccggcgggttcggtagcggcccctgtggatggg

SEQ ID NO: 715303 - DNA, 248 bp, Homo sapiens
cattcaaccatccaaccactcattcattcaaatatccatgcactcagtcatccatccatccactcattccttcatttattcatccatctccatccatccagtcacccattcaccctcccaaggctgaggaaatgctatgaacagagaagagcgaattcaagatttcaaaaactctatatctatacagtgacatataatcatgcaaagtacatttataattatataggtaatgtgtgtatcagaaagtc

SEQ ID NO: 715304 - DNA, 312 bp, Homo sapiens
ttcatgtcagggctttcatccccaggtgcagtgtatgagttgttgggaaagggctttcgagggggtgggggccaatggaagggctcgacatgaatcatgtcgagggccttcatccccactaaatacaaaaaattgaagctactggccgggtgccatggttcatgcctataatcccagcactctgggaacctgaggcaggcggatcacctgaggtcaggagtttgagaccagcctggaaaacatggtaaaaccccgtctctactaaaaatacaaaaattagtagggcatgaaagcgctggacatgaagggtac

SEQ ID NO: 715305 - DNA, 370 bp, Homo sapiens
cccattcctcctgtgctcccagctaccccgttctcttgctgtttttcttgagtagaccaagttggggcctgcctcagggcctttgcacttgctcactctacttgcagtgctctttttgtagctctctgcatttcttcttcttattatttatttttgaggagtcttactctattgagtgcagtggtgtgatctcggctcgctgcaacctctgcctcccgggttcaagcgattgtcctgcctcagcctcccgaataggtcggattacaggtgcccgccaccatgcccagctaatttttgtatttttagtagagacggggtttcatcatattggccaggctggtctcaaactcctgaccttgtgatccaccca

SEQ ID NO: 715306 - DNA, 116 bp, Homo sapiens
ccgatcgagctcggtcctcctcccacctcgttcccaaaaaccctggtttttggatgatgaggagaagtccaagcttttagccaagctgctgaaaagcaaaaacccagaggacctgc

SEQ ID NO: 715307 - DNA, 262 bp, Homo sapiens
accctccagcttctcgtccctggacacagtcagttcccgtggtttcctagcttccagctcgtacaagacttgcattttcaggcctggcctgggcaggttctggggctcggagggcctggcagttggggtccccagagctgagggtcatggttgctgtgtcttctcctgcaagaaagtgtgaggtgctccctaacctatgacttccccgccgaagggaaacagggtcctggtatcctaagggtgcttggatgaagcgtgacag

SEQ ID NO: 715308 - DNA, 180 bp, Homo sapiens
ggagaaggactggggtggcagagacagccagagattcaggcgacaagggacaggacaggaataggatgagggacaggagaggggacagtgacggggtaagagagcacctcggttcccggccaagctgtacagactctcccatggggtactgagcacggaccagtccccattcacgaagaa

SEQ ID NO: 715309 - DNA, 111 bp, Homo sapiens
cctcagttagggtgtgtaaggggaatttgttaccccatggtttcaataccttgtatgaattttagtttgggaaaaggagtcgttgcatgtgtccacagcggtttcttgtac

SEQ ID NO: 715310 - DNA, 470 bp, Homo sapiens
atcccccgggctgcaggctccacgagggttcagctgtttcttacttttaaccagtgaaattgacctgcccgtgaagaggcgggcatgacacagcaagaccagaagaccctatggagctttaatttattaatgcaaacaggtcctaacaaacccacaggtcctaaactaccaaacctggcttaaaaatttcgggtggggcgaccttcgagcaaaacccaacctccgagccgtacatgctaagactttaccaggcaaaggcgactactatacttaattgatcccataacttggcccacgggacaaggtaccctaagggatacaacgcaatcctattctagaggtcctataacaataagggttacgacctcgatgttggataggacatcccgatggtgcagccgctatggtttcgttgtcaacgatgtctacgtgatctgagttcagaccggagtccaggtccgtttctatct

SEQ ID NO: 715311 - DNA, 149 bp, Homo sapiens
tcactgtatgtgaatggtccagagaaggggagtgagagaaagcgacagggagcatggattcggtgaagattaggaggattggggggctgtagcccccccagtcagtggagacttaaccaaagaggatattgactctgggggctgggcgt

SEQ ID NO: 715312 - DNA, 212 bp, Homo sapiens
atcctctagtagcgcctgctactactactgagttcgcggccgcgtcgacgggccaggcatggtggtgcacatctgtggtcccagctacttgggaggttgaagtggaaagatggcttgggcccaagaggtggaggctgcactgagccatgattgtgccactgcattccagcccgggcaacaagcaagaccctgtctcaaaaaaagcatagatc

SEQ ID NO: 715313 - DNA, 836 bp, Homo sapiens
tattttgttttttttcctttaaaaggaagctttaatacatagctacccacttttgtccaagcagctcttagggcaagagaagttaatcccaaatttatagagccaggggggctctacagattatacggagttaacacccagggattaaatctgaggtcaacagctatcgggggaggctcagccttaagccacgggaggggggggaaaaattaacgccaagagtaaatatcttcactattctggaaatataatagtgggcaaacactataacactccgggcacggggggaaataaatatggagagggcactatgattcagaagtaacacttctagaattctcactattcccgggttctcttcaattggggtcccaacgggtgcacatccccgagtagtccccagtctatccacttcaaagttggatagagaaggtatgcccccacggggagcagcctgtgcgggtgctggaggatggtgcacaccactggaaatggagctctgggatcagttctgggctgaagtccaccggggcccctttcacgagggccagctatcagagtcaaccaccactctggccccacccgggttcaaatccccgtgtcgctcggggtggataccgtgtttcaccgtgacactctggtttgtggaatccggagcatccacctccctccatttgcagcttgagggattcttgaccctgcggtgatttcccaaaacctctggaggcgatgtctgtaggggcgttctggccttgccggctcggggtgagagagaagccccgaacgcctgggtcccggagcggaggactgcctcgcagggggaccgtctggtaggg

SEQ ID NO: 715314 - DNA, 1076 bp, Homo sapiens
cgcggtggctcacgcctgtaatcccagctctcagggaggctaagaggcgggaggatagcttgagcccaggagttcgagacctgcctgggcaatatagcgagaccccgttctccagaaaaaggaaaaaaaaaaaaacaaaagaccaaaaaaaaaaaaaaaaaaaaaaaaaaaaaacgacctgctgggcgcgcgcgccgccgcgcgcccctcagacaaagagccttctctaaagacacaaccctcggcggggaggcgcgcgcggcggcgccaaacagaggagtcatagcagacaactagcgggcaacaacgcgggggctcctcaacggaggagaccccgggcggccacggacacaagacaggcggcgggggctccttcactcacaaaatcaacaaacagccgccgcgggcggagacaccggagagggtggctcgtaaggaccaactccagcagaggaggagggctatcagaagggccgaaaaacgggaggatactaacaacacagaggggagccacaaaaacgagggcgcgaggatcacaaaataagaccccccagcgcggggcgggtccccacacacacacaccaggcacaacacagcaaaacgagaggcagccaccaaggagccaggcagagagagaccacagaagcaaagaacacgagaagcagcggaaagacgagaggagcgggagaacgagcaacagacagcaacgacacacggacaaacgaggaaacaagcgaacacaggagacaaacaacagaacacacagaacaaagagcaccaacaaacccacacaggacaaaagcaaccgccagcgaacgccagagccggcgacggcagaggccgaccaaccacagagagcgacagagcccaccagagacgaaagggggcgccagaacaagaggcgcacggcgcaaacagagacgcaggaaggagaggaggcacacgaaagacgagacgaaggggaagacgagcagcgcgagaagcacagagacggcagacacgaagagcagcggagcacgcagaagcaaggcagagagacagaagcgagagccgagacagccggcgaggagagaaag

SEQ ID NO: 715315 - DNA, 983 bp, Homo sapiens
cgagacgaattacctggttcagggaattggagcccagggttttgagtgcagcgtttgggatacggggccatattaagccaaccctgcttgttgaaaaaacttacaggctgaaactcccaagatctgaatggggctttccctgaagtgggaattctaagagctttagccctatagaatgattaccttgggaattgtgccccacaaggtctactgaagctttacgcgaaggactaataaatgggactaccagtagctcacgttacagggaaggaggttagcagtgagcttctgtgtgttaaaatgagggtctccctgctttaggattgaaatggctggaaagagtgatgcctggggaaggagaatggagttatgagggtactgtggctggtactttctgtactgaaccatttcccttttctattttcacccctaattttgttttaaactgtgacccgcgtcccaagtccagaaggaagcaccaccccaataaaacgcccactttttccccacaaaaccaatttacacttttaatacaagtatgaaaatttccattttggagaaccattcccctggaaattgcccaccataaattccattaaaaaccatattttttaacgccacaccaccttggaaccagatgtttacactttaaactcccttaaatggccttaattaatttctccagattcctgcccccatcacttcccagaacccattccacttttagagtgactaaaaggaaaccattacccttagacttttctaaagacccccctgtgtccctccaattaccagagggttaggaatgggtataacctctaactgtgccaaagccagagtgaaattccaattcatagaataacaccaactgctgggaataatccgtgcccaggaaaagaaaaatttttggcaaatattttgtcactgctgtaaagccaaatatttgtgaaagtgcccaaataaagtctgtcatgcccaaagta

SEQ ID NO: 715316 - DNA, 610 bp, Homo sapiens
  misc_feature (77)..(77): n is a, c, g, or t
  misc_feature (499)..(499): n is a, c, g, or t
  misc_feature (519)..(519): n is a, c, g, or t
  misc_feature (543)..(543): n is a, c, g, or t
  misc_feature (565)..(565): n is a, c, g, or t
  misc_feature (582)..(582): n is a, c, g, or t
  misc_feature (598)..(598): n is a, c, g, or t
ccttccaacatctcatttctaccgaccacttcatcaacaacatcggcatcgttggggttgccctgctcgcatgcctngtcatttcctgggcgctgcggaagctgccggtgttgcgcgatcacctcaacgagtactcctcgttccaggtcaacaaggtgtggatggccctggtcagtgttgtcgccccgctggtcttgctgagcctgtggatcacggagatcatcactgtcgcgagtaagggatatggcgaaatgcccagaaacttcgttgggatcttcggctggggaatgtccatcctcgtcgtcgttctggcgatagtgctgtcactcatcccgtggccacatcgctcggcgattcatcatgagcttacccacgaggaggagctggcctgcgaaaacttccaagaaaccgaggaaggagccctgtcatgagcacttcagcgatcatcatgatgatcagtgcgatggtcacggtgtggggcggactaacttgcgtcggncatctcgctctttcgacatnctgaacaggactgacgtgaaagangccatgaacccgagtcgattantgggacgacaaatccanttgatggagaaatganatgtttggaaag

SEQ ID NO: 715317 - DNA, 494 bp, Homo sapiens
gcatggctgttctagaggatcctcgtatccaccaggagctgagtttatcctcaaggtattgaggtgtgaaggaggggatgggggtgtgaagctggtagactgggagtgtggttatggtgtgtggtgggtgtgtggtgggttatggtgggtggtgactagcttcatgttgggggtgggaggagcttctcttaggaaggatttctgggtgagtctgcggcctagtccctgtggttcagtgaagagtggggaaagagtatactagacttggtttgtttagtaagtacccattctctcaaggagcttatagtattgtcagggaagcaaaatacttttccaaatatcatacaaatacagctggaatattagatagtgaacatttctgaagcaaagaagagcgcggtgggaaatatcttctatgatgctttggaaaatggcaggtttactcaatgatttgaacccagaataaatttttgatagctgttgatgcaggtggg

SEQ ID NO: 715318 - DNA, 270 bp, Homo sapiens
tgtgccttcaaaaaatgacttttctaacttaagggtgggtatttgttaagtgtgctactaacttaaaaaatagtgggtggtcgcggtggctcatgcctgtaatcccagtgctttgggaggccaaggcggggggatcacgaggtcaggagatcgagaccatcctggctaacacggtgaaaccccatctctactaaaaacacacaaaaaattagctgggcgtggtggtgggcgcctgtagtcccagctactcgggaggctgaggcaggagaa

SEQ ID NO: 715319 - DNA, 878 bp, Homo sapiens
  misc_feature (68)..(68): n is a, c, g, or t
  misc_feature (70)..(70): n is a, c, g, or t
  misc_feature (86)..(86): n is a, c, g, or t
  misc_feature (94)..(94): n is a, c, g, or t
  misc_feature (117)..(117): n is a, c, g, or t
  misc_feature (124)..(124): n is a, c, g, or t
  misc_feature (135)..(135): n is a, c, g, or t
  misc_feature (155)..(155): n is a, c, g, or t
  misc_feature (157)..(157): n is a, c, g, or t
  misc_feature (169)..(169): n is a, c, g, or t
  misc_feature (176)..(176): n is a, c, g, or t
  misc_feature (178)..(178): n is a, c, g, or t
  misc_feature (181)..(181): n is a, c, g, or t
  misc_feature (184)..(184): n is a, c, g, or t
  misc_feature (189)..(189): n is a, c, g, or t
  misc_feature (192)..(192): n is a, c, g, or t
  misc_feature (198)..(198): n is a, c, g, or t
  misc_feature (201)..(201): n is a, c, g, or t
  misc_feature (218)..(218): n is a, c, g, or t
  misc_feature (222)..(222): n is a, c, g, or t
  misc_feature (224)..(224): n is a, c, g, or t
  misc_feature (230)..(230): n is a, c, g, or t
  misc_feature (236)..(236): n is a, c, g, or t
  misc_feature (244)..(244): n is a, c, g, or t
  misc_feature (251)..(251): n is a, c, g, or t
  misc_feature (254)..(254): n is a, c, g, or t
  misc_feature (259)..(259): n is a, c, g, or t
  misc_feature (265)..(265): n is a, c, g, or t
  misc_feature (269)..(269): n is a, c, g, or t
  misc_feature (279)..(279): n is a, c, g, or t
  misc_feature (281)..(281): n is a, c, g, or t
  misc_feature (290)..(290): n is a, c, g, or t
  misc_feature (297)..(297): n is a, c, g, or t
  misc_feature (305)..(305): n is a, c, g, or t
  misc_feature (314)..(314): n is a, c, g, or t
  misc_feature (332)..(332): n is a, c, g, or t
  misc_feature (348)..(348): n is a, c, g, or t
  misc_feature (358)..(358): n is a, c, g, or t
  misc_feature (373)..(373): n is a, c, g, or t
  misc_feature (441)..(441): n is a, c, g, or t
  misc_feature (737)..(737): n is a, c, g, or t
  misc_feature (817)..(817): n is a, c, g, or t
  misc_feature (841)..(841): n is a, c, g, or t
gagccggggctgggtctgggggccgctcttgggagctggggcgcaggaacataacggaggcggactcncnggtaatagtggccccnggacgccngtcccaacgcccctttactcccnggttccnggacctgcccngggaagacgtgctgctcccncncgtcctgaaccnggtcccncngcnccnccgcnccngctgcngcncgttaccgggccttccngtcncnggtgcngcttcncctggccnggctgcntcncttcnatgccncccnggtgggtccncngatcccccnggccccnttggcccngctgctgcnggatgccgaggggctgcnggagctggcactggcnccgtgtcacnaatggctgtcagacnaggacctggtgccggtgctggcgcggaatccgcagctgcgcgagtgtggcgttgggcggctgcgggcnactgagtcgccgggcgcttggggctttggccgagggctgcccacgcctgcagcgcctgtcgctcgcgcactgtgactgggtggacgggctggcgctgcgcggcctcgctgatcgctgcccggccctggaggagctggatctcaccgcctgccgccagctcaaggacgaggccatcgtgtacctggcgcagaggcgcggcgctggtctccgcagcctctctctggccgtcaacgccaacgtgggggacgccgcggttcaagagttggctcggaactgcccagaactccaccaccttngacctcaccggctgcctccgcgtcggaagcgacggtgtcaggacattggccgagtactgccccgtgctgcgttcgctgcngggtgcggcactgccaccatgtgngggagtccagcctgtagccgcttgcggaaacgcggcg

SEQ ID NO: 715320 - DNA, 617 bp, Homo sapiens
ggagagagagagagaactagtctcgagttttattttttattcttttttgggggtcccaaatttctttattggaaggaagggtccaattcaaaaaccttacagggacttgtttgggctcacaacttctatacaaagggtcaaggaacccccaaaattgaattgaccagtgaccctagggtgcaccgcgggaaaagttcaccccacagggcacaacggggggggaaaaaattaaggccgcgaagggaactacagactagtacactaataattgacgagcgagaactcccaaagggggagggatgcacgatgggcacccagagaggagaacaaatactctccgcgaaccacaaaggcccaaaaagtcgcgagggcggcatccaccacaagatatgaagagagcagaaccaacaagagtggagaagaaccaacgaggtgaggaggaatcacaacccgccaaaaaaaaaccattgatggatggaaaacagatggggggcaataataaatcaacaaacaaacgacacagcattggaaacgaccgaacacaaagaataaccgaaagaggagcaataaaaaaaaagggaagtagagataaaataaaccaaaaagagagaaacaaa

SEQ ID NO: 715321 - DNA, 578 bp, Homo sapiens
  misc_feature (29)..(29): n is a, c, g, or t
  misc_feature (88)..(88): n is a, c, g, or t
  misc_feature (97)..(97): n is a, c, g, or t
  misc_feature (123)..(123): n is a, c, g, or t
  misc_feature (148)..(148): n is a, c, g, or t
  misc_feature (180)..(180): n is a, c, g, or t
  misc_feature (226)..(226): n is a, c, g, or t
  misc_feature (243)..(243): n is a, c, g, or t
  misc_feature (247)..(247): n is a, c, g, or t
  misc_feature (301)..(301): n is a, c, g, or t
  misc_feature (450)..(450): n is a, c, g, or t
aagaaattgcggaaacaaggttgcccatnccaattatgatgaaagactgaaccacagaagcatggaagcccaagaccagacaatgaanacatatgtngtgccatgccccccctcaggacttgnaaagtcctcaaagagacccactatncccatattcactgacccagagggatgatgggnagaatgacagaccttgatcatgtgaacttccagacatgatcacctnactgccttctgagtagnaagnaacttcactgacagagcagttttacctcattttaccttagttgcatgtgatcgncaatgtttgagttattacttgcagagatagggagcaaaaattacaaaaacacacagggtagtgggtccttttgtgggctttcctagttacttcaaattgactttcccccacctttgcacaggtgctttcaatagttttaaaattatttntaaatatatattttaggctttttaataaacaaaataaataaatgacttctttgctattttgggtttgcaaaaagacccactatcaaggaatgctgcatgtgctataaaaattgttcaaatgtccaaaa

SEQ ID NO: 715322 - DNA, 328 bp, Homo sapiens
ttttttgagatggagtcttaaactgctgcccaggttggagtgcaatggcgcaatctcggctcactgcaacctccacctcctggattcaagctgttttcctgcctcagcctcctgagtagctgggactacaggtgcccgccaccacgcctggctaatttttgtatttttagtagagacgaggtttcaccatgttggccaggctggtgttgaattcctgacctcgagtgatccgcctgcctcagcctcccaaagtgctgggattacaggtgtgagccactgcgcccggccaaaatcaggaaatctttcccaaaacatcctgtatatagca

SEQ ID NO: 715323 - DNA, 176 bp, Homo sapiens
  misc_feature (98)..(98): n is a, c, g, or t
aaaaaagccacctgcaccagcaaatttagtgcccaactctctactgaacctcgcctctgggttaaacgatctctgcctcagcctcctgagtagctggnattacaggtgtcgccaccatcccggctaatttttttattttagtagagacaggttcaccatgttggtcaggctggtct

SEQ ID NO: 715324 - DNA, 384 bp, Homo sapiens
  misc_feature (9)..(9): n is a, c, g, or t
  misc_feature (140)..(140): n is a, c, g, or t
  misc_feature (218)..(218): n is a, c, g, or t
  misc_feature (234)..(234): n is a, c, g, or t
  misc_feature (244)..(244): n is a, c, g, or t
  misc_feature (260)..(260): n is a, c, g, or t
  misc_feature (271)..(271): n is a, c, g, or t
  misc_feature (357)..(357): n is a, c, g, or t
gactgcccnattcgagtcttgggaagattgggatgtattctgcacaagcaaaaatgactgaagttttatgtatagacacacctctaccaatccatcttcagctgactgaatgttgtatgatagcccttctccaaagcagnggtagaatgtttcaggtttcaccatggatcttctacttatttcgtttttggaatcagcttacagattccaggtccctnttgtatatacctttantcttttgctnttttaaaaaataattntgtctcatatntaaagcacttgtattagtcaatgtttcgtgttccgcattatctgaaccatttgcccttacagaaagagaaatacttgttttgtgtnttaaataaaactgatgtaggaaagtca

SEQ ID NO: 715325 - DNA, 199 bp, Homo sapiens
gtatgtactgtcctcaagcacagctgcttttattaaataatagcaggtagtgaaaattatccattatcagatacagttttatgtgctttataatttttgttgcaatcctcactaactccacaatgaagatattcatcctttcagatgaagtcaagacacagacaagttaaaaaatggtccaggtttgcagctgatgaag

SEQ ID NO: 715326 - DNA, 168 bp, Homo sapiens
catcgcatcatggccccatttgggcaaaagccggttagcggggtgcaggcctccctagggcagcaggcagggtggcatggcacattcaagggtgttcagtcatgttcagctatgtttccaggtgctgcagcatcagtagtcagggtctgtggttgcttggcagtttca

SEQ ID NO: 715327 - DNA, 290 bp, Homo sapiens
tcgtatggaaaaaaacccttaaaagtaaaattacatacatcagatatttatctagactttaaactagatgctagctagaggcagggaggatcacttgaagacaggtgtatgagaccagcatgggcaacatacactgagatcctacgttctaataaaattacaaacaaacaaaaaaaagcttatgccagtatacatgtcagtgatctaagctctggctacattattgaatttcttcaatttgacaagtctaaaaattgcgactgttgcacaggacacctcactgttacttc

SEQ ID NO: 715328 - DNA, 163 bp, Homo sapiens
tggtgcgcttgagctagtgcttaggataggcgcgtcaggtttcgagggtctcatgacttgggctctccttgactgatgtaatgacgagttcatccatgatgcagaaggtataggggtaaggccttgcaaaatgatgcgtggtcacataaccgatcgtggtaag

SEQ ID NO: 715329 - DNA, 261 bp, Homo sapiens
  misc_feature (55)..(55): n is a, c, g, or t
  misc_feature (63)..(64): n is a, c, g, or t
  misc_feature (167)..(167): n is a, c, g, or t
  misc_feature (239)..(239): n is a, c, g, or t
ccatgacttgtcattataaattagacaaccaggtaattgtgtgatatacatcttnatttaatnnttttttgtacagcaatcccctgagccagaatagattaaaagcgattcccttcaattttcaaatctagaactggatggtttttgtgtttatgcatcttttagantaccggaaagaacagagagccgtgttcagctcttgataatgagcctattcaatttgactacattcgttaaantgaagttggaattttgtttttc

SEQ ID NO: 715330 - DNA, 591 bp, Homo sapiens
agcggggaacaatcacttcagcaaggggttggggtattggggggtgctatggttagttaggaggtctggggacagggtcctgagattttccagataggtcggaagatgaaactgtctatccggggggtgttgatgacaaatctggcagccataaagatgattctatgatgctataattttggaagtatttacggtagaatttggtccaccctcccggtccacatacacactagcttaggttaattagaagagcaaacagaattaacaggggcatcatggtatctggtggggtcttagagtagcttctatacccaacaagcccacaggagatgtttcccaggaggaggtggcgggttaaagccatagaaaggaagtactacagtcaggaagaagagcaagatcaaggctcctattcccatctacagcattacattacctcttctggctgagggtggattattttaaataggtagcagaggtcttccaaagctttactgatatgggttgtggttgtagtggccttccttggtgcctgtgactcataagaaacaggtttagtcctggatctgtggtgccaagtgattgttcccc

SEQ ID NO: 715331 - DNA, 745 bp, Homo sapiens
  misc_feature (4)..(4): n is a, c, g, or t
  misc_feature (184)..(184): n is a, c, g, or t
  misc_feature (186)..(186): n is a, c, g, or t
  misc_feature (292)..(292): n is a, c, g, or t
  misc_feature (350)..(350): n is a, c, g, or t
  misc_feature (435)..(435): n is a, c, g, or t
  misc_feature (441)..(442): n is a, c, g, or t
  misc_feature (446)..(446): n is a, c, g, or t
  misc_feature (448)..(448): n is a, c, g, or t
  misc_feature (506)..(506): n is a, c, g, or t
  misc_feature (510)..(510): n is a, c, g, or t
  misc_feature (532)..(532): n is a, c, g, or t
  misc_feature (584)..(584): n is a, c, g, or t
  misc_feature (721)..(721): n is a, c, g, or t
tggntttccaagcctcattcccctccctaggtccctagaaataacctctgtcatgagtgttgagcgttttttccagttagtagaattagatctatttacacacagtgatatgtttactacatctcaaaaattacaatttagacagaaaaaaagttgtagaatgagtttttacagtataacggantncactgaaacacacacacactaagcagtgttatgtattgttcatcctttaaataaaaatttctttaagaatggagcacttggggaaactttcagaaatatcagtgcnatttaagaataactctccataaagaaaatctttatgaaagaagagggaatagcaatcnaatactgtttaagataatgtcaatttcattttacacatttccttgagtttctaaggatttttaaaaacttatggcgataaagtcnagaccnntacnancacagggggattggaatttatccattggataattgtacagttgaaagaagcccttganaggnattagatacatgactggctaangaggagggtcattcggtcgtcggggaggggactgggggagaaaacaggccanacgatgtttgcagaactctatttagcaaacctttggtcttggtgactgtataaattggcaattacatgcactttaaacagaggaatattgtgttgaattaaattgtacagtggtttgggttgaacccagttcaaccnagcaagtcttttgcctattaaaac

SEQ ID NO: 715332 - DNA, 311 bp, Homo sapiens
ggtgtatggatgcactccatttttggtcgcggcgtgtcctggcttcgcctcctctcctgatcctcctgaggcgtcctcctcctcctggagctgttggcacgctccgcgctggagtgctcctcttcctccaggaactgagtctttctccctctcgcgtcgctggcggcgccgttgttccttctcctcctcctcggggagaaaccgttgttcccgctgctggggctcctcggccctcagctgccttctcctgttgctccggaaatgggggccttggccgaaagcttcttgatggcccctcccgctcttttcct

SEQ ID NO: 715333 - DNA, 1081 bp, Homo sapiens
  misc_feature (1081)..(1081): n is a, c, g, or t
gaaatgagaagaaattcaggccagcttgtcgctcaggaactattgtgctggagttgaataacacctacgaagagagatgcagtcgcatagtgtccgagaagacccgtgtaggagccaagagtaagagtgcatgagagcccgttcttggaccccgagcagaacatgtggccgaagagaggattgaagtcgaaggcacgtccgtgctccgaagagtcgtcgccgaaagctcgtacccatcctcttaccccaagagccggaaagaggctggagcttggtagacttaggtaaccgctcgagatgtcccagcagacttcatgtgcctccttggattctccaggaagaataagaacggagaagtggccttctcggagatcacctcaccttctaagagatctcagcctgataaacttcaaaccgttgtctccagctctgaaagccccagagaaaaccagagagactggactctcttatactgaggatgacaagaaggcttcacctgaacatcgcataatcctgagaacccgaagttgcagcttcgaaaagcatagacattagagaggagagaacacttagccctatcagtgggggacagagatcttcaggtggtgccatccgtgattctgaaaccagaaaagcatcagcaagagggatgcaaagaaagcaaagcccagaatgagcgactctagtcccatcgtatccgcagaagagtccggctggactatgcatcggatccaggcagcagctcgggtctaggaacaagtacaggtaccagcagccgacagaagatcgcgccaaccaaagatcagacccagcggccgcaaaaagagtccaaaccgcctccagggcagaccagaagtggcggacgggacccgggagacaccctaaaccccggaagagctcgcagagactctagcctaaaccacgggcgacgccaaacgcacaaacgcttcagaccaggtagaagaccgagacggctgatgcacacaccgcgacaaacacatgggacacactaggggagcaccggaagacgatatcgcaccacggtacgcagaacgcatgatctattaactgcatatgagan

SEQ ID NO: 715334 - DNA, 1113 bp, Homo sapiens
  misc_feature (412)..(412): n is a, c, g, or t
  misc_feature (468)..(468): n is a, c, g, or t
gcaaggtgtgcctcaattcacagctgccgtccacggactctccggttattgttaggaggtccctgggcaagagatttatttctcttgacaaccaagggtgctccgtctggattctccaacggaatgaattatcctctgaaagcaccgtgaagcttgctatctaccgagcgatgcatgcccataccagatatccagtcatctgcatccccgtgagcacgcaacgaacggagctcgtactgacacatcgctcacctggatctgatggcacactgtggcgaggtgcagtcctcggcgtgcgagactgacgtccagctggtgagtcattcgctcagatgctggttctgcaatgatccacttggtcgatccagatgacacatccgcaaggatgaactcagtgcagctatctactcgncgaaggcatagtctgggtgacagtcatgcaccggacccgcgtggaaaccccctgancattgggtgtgtggtcactccttacttctcgatgagaacactctaaacagaaatggtccggagtgactcggtgctgtcccatttctccctcaaaagttagtcatacaatcctagagtggaccgtgggtctgttcggggcacttcacacggtacgaccaagggcgtaggtacccgcctgtgcgatgggacctaattgtgcgatgaataccaacccaagggtttggatggggctggtcctcgagtcgcttggtgccccatgtacaacggacaggaccgggagtcttagaactttcggccaaaggttggccgttgggtgttgctcgacaagcactctgggggcgaaacagaaacccccccttcaggtccccttcggcccattccattgcgcaacacacaattggccccaattggtttccttgagccccggttaaatggcccaaaggtgaattcctgggccaagacacgacattggtgcatttgtgtccccaataccggttgggacggccttggaataattacctccccctggattggggggaaccccattggactctgaaaggcgctctggccacgtaattgtggacccggaagaacatggtgcctcgggattggttggtactaacacagggttcctggaattgaacc

SEQ ID NO: 715335 - DNA, 184 bp, Homo sapiens
gacttagattgtcatccttggcctctgccatgatggtgaggcctactaccaaccacgtggaacggtaagtacataagatctcgtacattacgtaaattgcccagtctcaggtatgtctatcagtagcgtgaaaatggactaacacacccccatctctacataaaaatatagccaatgcgtatgg

SEQ ID NO: 715336 - DNA, 89 bp, Homo sapiens
gccttcctgccagggatcatcttacctccaaggacatcagagtctccctgtggaatctccccagacccccttgtctgcctgtgggtcag

SEQ ID NO: 715337 - DNA, 92 bp, Homo sapiens
aagacagcagcatatatctctgcagcgttgaagacggcactacgccagcccaagagacccagtacttcgggccaggcacgcggctcctggtg

SEQ ID NO: 715338 - DNA, 1067 bp, Homo sapiens
ggcgtccttttgtttgtttttagcgatacaggaatttccctgattgtccccaaggattgtgagtgtagtaggcgttgatcctcgtgcactgtggtttacttcgtgcactcatgtgggttccggaataaccgtgattcctagatcctacctgacgatatctatgagtgatacctgggacgagtgctgcacttatccccgagatgttaatgtctaggtgaattaataagtacaatataaatatagatccttcgcacgattgttggcaacccagaataatcgtttcatcagaacactctggggccttcgaagcaaaaccttgccttgatgtccaatcatcccacatacatggttgttgggatattgacatggcaatgtagcctagtcgcagccacgatccttaggcggtcctcgataatatcccatgatagtcctatcaaagacctttgtggccgaccacacataatgagctttttcctttgttcgcctcgactattcgcgaatgagttatactgtgtgtacatacgtgtgcgctttctgaattcgtatatatgcacaatataacggctagcattgcggcatcgtggagacctatgcacagcagtaaaaaccaagcctaagatgcagtgttttgtctggaaaaagtacccgcggggacatcgcaagaaccaaaatatctccatgggaaccgaccattggccggacacaatgatctccacaaatattcaatgttgtgtcggaaacattgacttaactctgcacgctaattatactagccccgcttcatgtaggtatagacacatcgaattaatacaacgacgcttcattgactctctacagatagggcgccaaacgcgagtggcgattggccccgagaagttactgcactcgacacataccgtggcgagtcagaaaataagtccacaccgcgcttaaagccctgacgggaacaccccggagagtaaccaagggttcgcttacacgaatcccttcgccatatggcaattctttgccccccattttttttacagccagcggtgctcaccctgtgtcacccaggcgttgggtcg

SEQ ID NO: 715339 - DNA, 254 bp, Homo sapiens
gtattaagcgtcaggcactctcctcaatagtgctaggtgggagctgcctgagagctaggatagccacaatggccacagacactgtctcgaggccttgtagacagtgggatctcctgggctgatactagttaggggtctgctcctaccccaacccgattaacattgtgaagtgactgaggctagggtgcctctcgcttggccccttccaactgccaaagttctgctatccctctgaaaccccaggaaaatacttt

SEQ ID NO: 715340 - DNA, 965 bp, Homo sapiens
  misc_feature (125)..(125): n is a, c, g, or t
  misc_feature (187)..(187): n is a, c, g, or t
  misc_feature (189)..(189): n is a, c, g, or t
  misc_feature (202)..(202): n is a, c, g, or t
  misc_feature (206)..(206): n is a, c, g, or t
  misc_feature (213)..(213): n is a, c, g, or t
  misc_feature (223)..(224): n is a, c, g, or t
  misc_feature (231)..(234): n is a, c, g, or t
  misc_feature (255)..(255): n is a, c, g, or t
  misc_feature (258)..(258): n is a, c, g, or t
  misc_feature (260)..(260): n is a, c, g, or t
  misc_feature (268)..(268): n is a, c, g, or t
  misc_feature (271)..(272): n is a, c, g, or t
  misc_feature (279)..(279): n is a, c, g, or t
  misc_feature (284)..(284): n is a, c, g, or t
  misc_feature (286)..(286): n is a, c, g, or t
  misc_feature (292)..(293): n is a, c, g, or t
  misc_feature (299)..(299): n is a, c, g, or t
  misc_feature (303)..(303): n is a, c, g, or t
  misc_feature (305)..(307): n is a, c, g, or t
  misc_feature (317)..(317): n is a, c, g, or t
  misc_feature (324)..(324): n is a, c, g, or t
  misc_feature (326)..(326): n is a, c, g, or t
  misc_feature (329)..(329): n is a, c, g, or t
  misc_feature (333)..(333): n is a, c, g, or t
  misc_feature (335)..(335): n is a, c, g, or t
  misc_feature (353)..(353): n is a, c, g, or t
  misc_feature (356)..(356): n is a, c, g, or t
  misc_feature (370)..(370): n is a, c, g, or t
  misc_feature (373)..(374): n is a, c, g, or t
  misc_feature (382)..(383): n is a, c, g, or t
  misc_feature (386)..(386): n is a, c, g, or t
  misc_feature (400)..(402): n is a, c, g, or t
  misc_feature (407)..(407): n is a, c, g, or t
  misc_feature (413)..(416): n is a, c, g, or t
  misc_feature (419)..(419): n is a, c, g, or t
  misc_feature (433)..(433): n is a, c, g, or t
  misc_feature (439)..(439): n is a, c, g, or t
  misc_feature (445)..(446): n is a, c, g, or t
  misc_feature (946)..(946): n is a, c, g, or t
gctgtgctgcgcggcgcggcgcggcgcggcacggcacggtgggagtgtctccggctggcctgcagggagaacaccgactgagacctcaaaccctggctccagtgtcatggaatccgtcacctttnaggatgtggccgtggagttcatccaggagtgggcattgctggacagcgcacggaggagcctntncaaatacaggatncttnaccagtncaggaccctnncctccannnnaactccaccatgcaaacccanttntntctcccanctnnggcaaanagcananccaaanncaacanaacnannnattctccgtnccacagntnttncctngnaatctcaacttaaacccnaanattttccttctatncannatcttttnnaanaatgcatcctccannnacatncaaatnnnnccngggctgttgcgctnaggatncagctnntgccctccatagaagagagggagacaccattgactcgagaggaccggccagctctccaggagccgccttggtctctgggatgcacgggactgaaggccgctatgcagattcagagggtggtgataccagtgcctacactgggccaccgcaacccatgggtggccagggattctgggaacaattcttagatctaagtcttgtgttgctcttcagtatatttttgcgggtaacaccactactgtcatccgatggtgagatggggacaggaaacagtcacaaagaaaacaccgacccctcctccgtggagctcacggtcagctgggtggtcagagttcgaaatgaataacagagtccagtggaagtgtgttatacaaggacttcatctcaggggacaggggagagttctgggaaaggatggatatttaagcttaggccagggtttctcaactgcagcactgctgataatgggctactgcagcactgctgataatgggcctgtncactctcagctgtgggccg

SEQ ID NO: 715341 - DNA, 218 bp, Homo sapiens
gggtgatacacccagtgatcgatctccgcagcggacaaatccgagaggtgttcgaagacgacgataaggtcaggattgccttacggcgtggtcggatcgtaatcacagcgcttcagatacaaaccaagatccgtgagcggctcaagcgaatcaaggacaagctcgatcgtggcgagaaactgccggtggcaagtctcttccatggcgggacgcgggtg

SEQ ID NO: 715342 - DNA, 433 bp, Homo sapiens
  misc_feature (50)..(50): n is a, c, g, or t
  misc_feature (59)..(59): n is a, c, g, or t
  misc_feature (85)..(85): n is a, c, g, or t
  misc_feature (89)..(89): n is a, c, g, or t
  misc_feature (126)..(126): n is a, c, g, or t
gacgggtgctgagtattcgacggcgtagattttgtccttggctttgatanctgcccaancatcttcaaacgtgggtggtttgcangcancaacaataatgacatgagtaatgtggctatccttatntgtctggtagcttctttggaattcagcgtacaactcgactgcccgaacatcttccatacctgttgtcccttttcctattcacttgggcttgccggtggttgatctgttcagaaccggctagcggctcactttgcccgagcgcacgtcgaggtatagtcgattggctatagtcatgccgccgcagtacatgaaatacataccttgacctcgggcaggggatgccatccatccgccgatttcttcgaagtcactggcggtgcaggtgccgttgtctatgagctcacgcgctgctttggtgaactgggcg

SEQ ID NO: 715343 - DNA, 220 bp, Homo sapiens
tcttaggccatttacaactatctcaacatccgttcattagataaaagggtggagttccctagggctggacattacaaagtcactcagaggtagcttagggccgggcaccaaagcagggctagacaaaggtagtggcaaaaagaacacaagtgactagctcccagggtgtagctccgtgaaggtggtgacagtgggttcagatagttggtaaagtgggcgg

SEQ ID NO: 715344 - DNA, 201 bp, Homo sapiens
tcttctcccctgagcaaataggcaggaccatgagactaggttatggccaactggattgtatatgaagataaagtatgtcatttcctagcgtggaactatttaatggccagaggtgataacccttcttaagcgttctctatctgcgtgtgactattgaaagatatgacatatcattctcaatgtgtgtagccgtccgatcag

SEQ ID NO: 715345 - DNA, 292 bp, Homo sapiens
tttccactcaaagattaacactgtcaatgcctactaaatgtgcactttggaaggctaaggtgggcggatcacttgaggtcaggagttcaagaccagcctggtcaacatggtgaaaccccatctttaccacaaatacaaaaattagctgggagtggcagcaggcacctgtaatcccagctactcgagaggctaaggtaggagaattgcttgaacccaggaggcggaggttgcagtgagccgggatcacactactgcattccagcctgtgagacagagcaagaccccatctggg

SEQ ID NO: 715346 - DNA, 591 bp, Homo sapiens
acagtgatgtgctgacagtcctggcgtgctcggtgccaggcttcgagcctggatgtgacgtaaatgcgctatatcatcacaaagaactgggtgtgactatatcaagaagagagcatccatagggttccatcgggtgtgtccacaattttgccacgagggatcagaagacccgtgtggcagattttactgtgatgtatgtcaagtctgtgtggtacagatgtgcgacacggaagtgtgagacgtgtacccactaagttgtcaacgtgccactgatgtcggtcatcttgataccatagcggggcatctgcatatggattcgctacaacacagtataggcttatggggttaccaggtagggtcaagggtaggagttaaccggagtctcaacacggaggcgggggctcccagaatggaacgcctctgtcatcagaaagtctcagaatgggttcaaagtgtgcagaaattagcgggtgggcatgtgacatagcctttgtaaggccgtggccctcgatttaccctgcgcgtcgtccggggctcttggtgataggcatgactacgaagcgtcccccttcggtggggaggaggcttggc

SEQ ID NO: 715347 - DNA, 193 bp, Homo sapiens
  misc_feature (170)..(170): n is a, c, g, or t
gtgtgacataagttaaagtgctggagcaggagagaccatcttgatggcacaagcagcgcatcattttggcattaaggaccacaagtctcctctcatgatcttgcagcttgctatctctcactgtacctttccttacgttgagtctttgtcctaattctttccattacccnccttgttacggaattgagtgctt

SEQ ID NO: 715348 - DNA, 365 bp, Homo sapiens
  misc_feature (63)..(63): n is a, c, g, or t
gacagtgtaaaaaaacttcctaatcctgtctctctctttcctactcagttccggttctcacangcagataacctcccaagcttattgactgtctatccttccagattttcttaattcttacagaaacagccgtgaatgtgtattcttttttttttacacaaaatatgctacctatttatacatttggtaacttgggcttttttttttttttgttaactgaaggtcatatacttcttctcagtgaatagagagagaccgtgatccttttcatagcgtgcaatattatcccagggggggagtgtaattaataggtttcccgggggagagaccctaccagggggagagaccctaccagggtggagaga

SEQ ID NO: 715349 - DNA, 260 bp, Homo sapiens
catgagtctatcatccttcttacagagcatctcttttaactgttggacaaaaccataactttgtcattttacaaggaagaacctcttaagaagtcctcagaaaccaccaacactgtgcactctcagcactggtcctggtgcgtttgctgaccatgactgggccaagccgttctttttgctggccatcttcctcatcatacagtgtggaacatgggcaatcgctttgagattcttgcgatagaagaggacaacattctgca

SEQ ID NO: 715350 - DNA, 324 bp, Homo sapiens
gtgaacaccacagaggtaagatgctagaaaagaggttaatgatccatggccgggcacagtggttcacgcctgtaatcccagcactttgggaggccatggcgggcggatcacgaggtcaagtgatcaagaccatcctggccaacatggtgaaaccccatctctactaaaaatgcaaaaattagctgggcctggtggtgccctgtagtcccagttgcttgggaggctgaggcaggagaatcacttcaacctgggaggcggaggttgcagtgagccgagatcgcaccactgcactccagcatggtgacaaagtgagactaagtttcc

SEQ ID NO: 715351 - DNA, 742 bp, Homo sapiens
tatgtctctggatgaagatgaacctcgattcctgtgaagaacttgtattacagtgcaggaagtaatgatgacgttagatattgagttggctgcaaatagtaggagattatgaaccttctgctcaagaagaagtgactttctgactctggattatcaagaacataccttgacctgtgagcccgctgccatgctgcttgttcactgcaaagaattaatgaaatatacttggttatttatttcccatggaagacttgagagaaatgagtttagtacagagcgtgactacccaagaagaccacaaacgtgaactctgggcccagttctggtgtttcaagaataataaatgtgcttatttaattaactgatacaaattgcgcgctctgtctttatctttccgatattcgaatcgcactttatcgtacgcatctgaatcgatcacaatatatggatttaccctttgaaacaacagaaaagcctggagtatacattcgcatgaatgtttatctccctatggttatatcctgcatcaagtggataattttgaagtgtgttcagaatataaaattggaattttagagttgttgaaaatcctgacttgttgaaaactaatatatatgtacatggatttctatagatgtgtttgtttagaagtgggtagatattgcagataagactgttcttcagaatcatgttaactattgggttgtgactgaagtagtccagggtatgccgtgaaaccata

SEQ ID NO: 715352 - DNA, 215 bp, Homo sapiens
aggcaccattcacatctttagatacaataggaatacatgcccactggtcaggagtactcctgggcagcaatattttaatcacaatcaatacttacaacagtaatagtgcaacatgacaaaattatagtgaaaaaaatcttcacatttcctttatagtaaggtaggtagttggtgttttacttcagtggtactttcatgttgcctttcggagaaga

SEQ ID NO: 715353 - DNA, 500 bp, Homo sapiens
accctcgcggtagactccggcgaacggagtgacacggaatgactgtaggtgcccatgaggggcgtgcacctgggggtacttgcagtttccagggcaacaagcatctctctaccaacctctcctggcccctgagaggaggctggcttgaatgtcgcatgtgatgcctggacttggtggccacttggtaaccataaggctccaagcttcatatagaagactatcatatgaaccagaaagggtagctgaaaacaaagaaaggactccagtatcaggctaaggacatggcttaacaggatgagggaggagcagaagtcttacacagcaaggcacgaaagaagccgtacgtgaacaggtggtcagtataagcaatacttaatataccctgttgtgattattcagcaacgtgacgcttgtgaagtgcgtagcccgagtagcgaatcttctgtgataatctcggcaaacgactgtgacagctctgcttttaggcccagaaggacgcg

SEQ ID NO: 715354 - DNA, 412 bp, Homo sapiens
  misc_feature (5)..(5): n is a, c, g, or t
caatngtccctacaaggacaggccctaactggataaccgtggctttttttttttgggtgaacatagtgggattggatcacgggtcaaaaacgctttatattttcgaaagactcggggcccctcttccctcttcggggttccctagcggttccctttcggccccagtcggacccagtgaggggtcgctttaaaacacccataatccaagatggacggacggcacggatgctggtacctcgggacaagaggcctacacccaggggctaggacattaactctttcctttactacaccaggtgtcggcatgtgtgtgtgggtgtgacatgtgtatccatgcccatcagcatatagtcacatgtctgaattcacggtgtccagacggagccccatcaaactagtgggacagggcccc

SEQ ID NO: 715355 - DNA, 999 bp, Homo sapiens
  misc_feature (979)..(979): n is a, c, g, or t
ttttcctgtgcatgtcgccttttgcgcagctgacaaaacgggccccatttatcctcattttgttgttgctctatcattattactttgattattgctctcgtcaaatggttcgcttgtgcgcggtcataccacttccaacggcgtgtttgatttcaatacggtgtcaaccttacaatgctgcgccttgtatattgtcctccttgtggttatattccatagatatcgatggttttgttcaccaagtgttcttacggaataacgccactggatatgggttctttcaagtcgatggtgtgtttcttttgggactttgaatgtgggcgtctttccttttgcgacggttttcgtgcgtcgtggggtgctctcgtggtatagggatggctgctatgtgtctgccctccttgtatgtaggcgcgtgttgccgccgccccgcgtcatgagaagaaagaagctcggccagctttggccgttggagcgtgagtggttgcgaaccatggccatgggaacagtgcgtgtgccacgataatgtgtggcttgcctttgcatcgtatccgggataagcgagggcttttagctcgactgcaagacgcaaccctaggttgcggaattcctagagacatgtgcatgctgagtgttcgagaacgtgtgtacaaggttacggagaatggggttagggccatgtaatccgagacggaagatagccttaggtagctcttctggaaggaaggcctgtgtagactacctctgataaaagctgttgaagggtccaagaagagtatggcatagggggatcaatgtctcaattgttacatcatgaccttgttacttaaggaaagctaacctgcatctatgagtctgcctagagtctgggaatccagagaaggaaaatctttgcattgttggtagggaggaagctctaagcgttcagaagaaaaagaattgcttcccgacacctagaagtaatgtcaaactgagattntacgcccggggtactgtaca

SEQ ID NO: 715356 - DNA, 179 bp, Homo sapiens
taataggaagtatcaaggaaaatggatttggtagtaaattagaagaaaacacttcaaactatcaattctttaaaagaaaaaaaaaactagtctatcttgtcctgtaaaaaataagaacgctttgtcatacaaacaaatgatgagagaattcttccacatgtacttctgtgcttagaaca

SEQ ID NO: 715357 - DNA, 1295 bp, Homo sapiens
  misc_feature (788)..(788): n is a, c, g, or t
  misc_feature (1151)..(1151): n is a, c, g, or t
ttgtggcttgtgtacgttttgctctcttgttgtcggtgtgttgtcagtttgttctgcctctccttcgtcgcttgttgtccgtgcttgccttctcttctacatttgtgtgggctggctcatcacgtgccctactttggggtctttccttgtgcccggggatttttccgagccgccgggattttgggcgcccccgcctctggtgtgtctgttacttggtgaagagccgctttcgccttttatacaccctccttgccgaacgggtttgtgggtggatgatatgccacgtcctgcgggattctcagtattgagaggtgataacacgaagagtatgaaagaaacatttttttgtaaacccccctttcaaagatatataatgcgcccctcttttcccccccctagagcgggttttcccccagattctgtttagaaagtttccttccccccttatccccgcaaatgtctcccagtttataaaaagaattgtctcggggccccccaccccaaaattttgcccaacaccaaaaggggttccacccccccttggctttctgacccccaaggaccttggacacttttttgggggtttttaaaacaccccttttttctctgtaaaaagcactttttccacaaatttttcccccccaagctcgcctctttctgggaaaagagagaacccccgcgtccacgaggccggcccctcttaactcttcccaatgtgttctacactgcctgaggaatatgaggcctacctctatagaggagaaaatggagaggtttcccagcgtgtngaaccacgcagattggagattataggaattacacgagagtttgtgaattggggcactctttccacagtgtcctcgtaattctaaagagagaaaaaaaaatagcacccgttatagggcgcctcctgaccactttgttctcgtggttttaacgtgggttctgtgtcactccaaaatttcccctctttcccgtgttttaagaaatgttcgttctaccacgagagagaaatgctgtaaaaattttggaacccaccactctttttttaacccaggcccacaaaaaggaaaaaaaggtttttgggaaccacaatgagaacttatttaaagtggttttatatgaaacactcacattgttcttgtatattnttggataagcacccacgtaccacgcttttactttgtaaccacgttctgtggcacttggagaaaaaaggaggttctgtgattgttgaagtgaattatgttataaaagccaagagaagattaaatatttacaaacatattttttta

SEQ ID NO: 715358 - DNA, 176 bp, Homo sapiens
cattattcagagggttcttccctgtgtgaattctctgcatgtcatcaaggtttgcacttccctcacagcaaagcattccccacattccagtcaccattccaacagggtccttccatcatagcagtcgttgttcatcgtagcatcgtcacctcctcacagcagcattcatctttcca

SEQ ID NO: 715359 - DNA, 962 bp, Homo sapiens
ccccatgattcaattatctccacctggtccctcccaggacacatggggattatgggaactacaagtcaagatgagatttgggtggagacaagccaaacgatatcagtacctttgacaggatgcgtgaccctgctgaggtgtgcgggagcttggcctgagggcttcgggctgcgagcacatgtcctccatggagcacacggaggagggcctccggggagcgacttgccagaagccatgagcgagtcacctagccgggacgtagtgggaatccggaacagagacagccttgaggtagcagtaaaaaccttcccccctgagaggacacgtggcaagtgaagtgtttggggaaaaaaaaaggcacaccacacacatcatggcccaaaaagccacaagcgtacggtagaggcaacccccaacaagataacaaacagcattggcagtaacggacatgagacgcaacagaaattcaggggagaggggaaagactcgagcagctctggcgtaacaagtgcaagggtcaccacacagggggaagcactaccgaagacaactttgacggctaacggaatctccgcgtgccacccaatgagagaggcagcccatcacgactcttcccgaaagggattcccgtagggcacaagcaacctcggttcacaatctgggaggccccttccttgttgatgaaggtgaaacagcggggttagggccaaccataaagtttggcttcgttaataaaccaactcccaggtttttcaagcgcgcgccactacctggttgggagagaccttctcaaaagacaaaggattggcttgcacactggtcatgacactgcgcaagaacagagaaatgcgacctgtatgtcaatagacgcgcatgggcacgtggataaccaccacgggggtgaggagcgaacaagcaatggcgtcgagatatcccggtctggagacgctgctgtggatccc

SEQ ID NO: 715360 - DNA, 805 bp, Homo sapiens
  misc_feature (11)..(11): n is a, c, g, or t
  misc_feature (15)..(15): n is a, c, g, or t
  misc_feature (292)..(292): n is a, c, g, or t
  misc_feature (308)..(308): n is a, c, g, or t
  misc_feature (315)..(316): n is a, c, g, or t
  misc_feature (338)..(338): n is a, c, g, or t
  misc_feature (344)..(344): n is a, c, g, or t
  misc_feature (681)..(681): n is a, c, g, or t
  misc_feature (687)..(688): n is a, c, g, or t
  misc_feature (692)..(692): n is a, c, g, or t
  misc_feature (703)..(705): n is a, c, g, or t
  misc_feature (714)..(714): n is a, c, g, or t
  misc_feature (729)..(729): n is a, c, g, or t
  misc_feature (736)..(737): n is a, c, g, or t
  misc_feature (740)..(740): n is a, c, g, or t
  misc_feature (747)..(747): n is a, c, g, or t
  misc_feature (749)..(749): n is a, c, g, or t
ctggagagaanaacntaggctaggtacgaggctgggtggtgatcattcacaggtgcctctctagcctgcacaaatgattgacaagagatcacccaaaggattatttctgaaggtgtttttttctttatttctttttcttttttttttttttctttttcttttttttggcacatgacagtgttggtatggaggaccttccaaggaagagggatgctgtagcagtggtgcctgggtgcctggcctccagtgtcccacctccttcaccaccccacttgggctccttggccatctngatgctgaggttcccngttgggnngagatcaggtggttggtggtanaagaanggaaagggcttctgatggcttggccacaagcttacctggtgggttcacagtccgtggagaggccaccaccagtttcccatcagcacgggtctccagtgcagcagttgcggggtcccagtgtccagctgcctcttgggctcaggggttataccggcttccggcccccacccccacatgtgcaatcctcaagattggtccggattctatttccgggcacctccctgcctgtcctgggggattctacttcttcctgtgtgggagcccatagctgtggtctaacaggtacgaaatgaaattgaacctatgtgactgggcccagaaatcataaaatggtgcngacagnngttnctgtgtcctgnnntacccccantccagtacataactnctatgtnntgngtagagncnttctatatgctgaatgatctgctgtagaaactatgccagatataagccagtgtccg

SEQ ID NO: 715361 - DNA, 403 bp, Homo sapiens
aaaccttctctcctgtcaacagcggccagcctcccaactacgagatgctcaaggaggagcaggaagtggctatgctgggggtgccccacaaccctgctcccccgatgtccaccgcgatcaatcgaggagactccgtctgacatgtgtctggtccctgtcaacacctcttcatgaacactgtgcctgggcttcatagcatcgcgtactccgtgatctagggacaggaagcatggtgggatgacggtgcccagcctatgcctccacgccaagtgctgaaatctgccctgttgggcatctctgaacattctgctcatcatcatcccagtgttggcgaccggccagtgaaataggaggatatgaggcaggacctgcggacgttcagtatctttcacccgctgccagg

SEQ ID NO: 715362 - DNA, 271 bp, Homo sapiens
atacacagtttgctagaaaatagagagtatatcggctgaacaagaggtggtgaggtagaatcggagttatcgattacagaacaggctcctctaaagggatatgaagcaccgccaggatcctttgagattttacagctgtggctcgtagtgttctggcgagcagtttagttgatttaactgttgaggtttaggactaagcatagtggaccgtctacttgcccaacttcatgcactggtacacccagtggctcctctttaacttcccccagca

SEQ ID NO: 715363 - DNA, 168 bp, Homo sapiens
gcagctctctctgttgggctggcggtggttcctataagggaggtgctgctgtgtgccttgcagtgtgcttgagcacagccttggcagctcctgtagtggactttctctggcccaggggcctgcgagagtgaaaagttgcttgtggtcatctcaagtgtccacgtgggt

SEQ ID NO: 715364 - DNA, 133 bp, Homo sapiens
ctgagcccgcgagtcattagctatagtgagtctatgatcatgccactgtactccagcctgggtgtcagagtgagaccctgtctcaaaaaacaaacaaacaaaggcacagagaagttaactaacttgcctgtgg

SEQ ID NO: 715365 - DNA, 789 bp, Homo sapiens
tagaacagagcctgatgttaatcaggacgaggcgttccctcctccccgcctcaggtccacggccaccatggcgtattagtgggcatgcagtgcctgcggcagcattggcctttgcatgcggcgtgcagctagcaccaggctctgcatgtggaacccccagcggcttaagccatggctgcttctcactggcattcagcagcagcgttgctgtaacctgacaaatgacaccttcgaattaagcacattcctctgattccagcaaatgcaaccgcaacattgacctgaaatgagcttcctgagacagcgaggatgtatggtgggggacttgattgtccccctttcgaccagatcgggatagggggctgaacgaacagcctagagtctcgttagactgattaccttgggagggttgcccacagcactttcaaacctcattgtgattctccagctgactgaggcataatggctggctcctccgaatggcctggctgtggatgggttggccagtccctccaacaacagccacggaaggattgccctatctcctgggaccatatttggcatgttgggagacaattggattttgaatggagtccgactttggatgcccctgttagagtatagaatagacctggaaacctatgcaagatgacttctgaccagcgttggatgacacctctgtgatctctatgccccctagtccaggaacactcataagcgccccccagacggtgacccaattggcctctccctcattttaacaaaaccgacaagttgcccttcacttta

SEQ ID NO: 715366 - DNA, 896 bp, Homo sapiens
  misc_feature (100)..(100): n is a, c, g, or t
ggacgcgtgggcgacattccatcccttcagagatggagtttgatcctaactccaacccaccatgttacaagacatgggcccaatttctgtgaactaggantcaagcgcagttgactgaagaccccgctgacaagaatgcgatgcgagagacccgtgctgcgatcatcagactgtgacagtaatcatgcatatgttcgcgcttgcccctgtatgcgagagagtataccgttgcgtgcgcgttgatacacgcatgatggccttgtgttgcgaccatcccgttaaccccccatcgagtatctcgatacctacttagaggaacatgcgtgagtgacatctatgtttccaccgaaccaatctacgtcgacgtgtatgcgtaatcacaaggcacgcgatcacatgacgttcttgcgaccatgacattgctttagacttgcgcacgagtgacaacgtgatacgcggcccaaacagttccagtgccactaagacatactcgcggacgacttccttgggggattgccattatccaccttcgacgtaacgcccatgtaaaaccttttaagccttgggacctcttgccccatccagacttctatatctccccaccgcctaagttgtatggcatatccccttacaccgccttacttaaacaacacacggatccccacatctgtcgtcataatcatatccacccctataaacacaaaacacaactaaactcacacaaaccacaaccaaaaaataacaacaccttcaccaccagaacatataaccacacacgacacaacacacacaactataatacaaaccataaactaccaacaaaccaacctcactaaacaacaacaccaccaaaccaacacactaaccagcatacacatccatacaatacacactat

SEQ ID NO: 715367 - DNA, 126 bp, Homo sapiens
gtgatagtatctccaagaccaatgataggtctagatgaaccatacagactcctctgcgccaattatgcttagtaccaccgggaacatttccattactagtgaatcacatgagacggtaaagaatga

SEQ ID NO: 715368 - DNA, 795 bp, Homo sapiens
  misc_feature (276)..(276): n is a, c, g, or t
  misc_feature (515)..(515): n is a, c, g, or t
gggggccaaacctttctcagaaagaatgggaggcgcaaaaatacgctttgtctggttccatataaactttgctctttcaaagcactgggagctctgaaaaatatttttaggctaactctcagacgtgttacgacaagacagcatggatctgttttttcaaccaaaagcattttcatatgtgtcaacaatcttaggggggagccactccaaacaaaagttctcttaactgggcgagaaaggcctcaaaaatccaagtagaaacctttcatgaaactntgagtctagaccctgataaccacgaacaacccctcatttttatgcacatgaatgcccttggccggccggccttaagcccataactactcatgtacttaagacccctttttctttggcggcacagatgcaggcttcacattgccacaattgaccctaaaaggggggcgtctttcacaaaaacatgtgcccggctgttttcaaacggagagtatctagaaaatcccagagggtcacccaanctaaaaccgctctgggggcaatatccccttttgcaccgctggcgtaaaagcaaaaagggcctgccggatctctttcccaaaaattgcccagacaactaaggcgaaaggaattccaaaccttaatatcttttaaattccggcggacatttttgaaaaccccctcatttttaaccttgggccgcactgggaaaaccccttttaaaaaattccccgattcgggtgggggttttcccctttaaaccaagttcccatttaagagcggcctccaaacccccagggc

SEQ ID NO: 715369 - DNA, 740 bp, Homo sapiens
  misc_feature (610)..(610): n is a, c, g, or t
acgcgcccgctgcactggcccgctgggcctcccctgagacccctggctcccggcccgcttccgggaacccctcgtgcctccccggcctcttcgccagagcgcttcggccttcccgacctctccccgtgagccccgggccttccccggctgcttccctgcagtccttcctcctctcgccagagcccgagcgcccctcggagaccctcgcgtttccccgtccgctctcccggaggcagcgcggggctataggacgaagttatacggaagcgtctcctcattgatggagatggtgctggagatgatcggagaattaatctgctagtgaagcagtttcattcaaatgtgtgcaacgtcttgggtcccagcgcaacgcagggcatataggccagtaccaacgtatgctgagtcacggctgtctcaatgtgaattttcacatgggcaaaactttactagtatattgatttgaatctcagagaagtggccccattttgacccatctttaccagggcatgcaatgtagcatagcttggagcccatgaaagacattgctgagtgcgaaaaagcaaattcttcaagcaaaacgaatacgaaaaaatccggccagaataantatcctttgggccaaggtgtttagcgcccatccgacaggctgaggacattaggactaagggcccgggacaaaattaggcggcctttcctttagaaagtttggaaaacgcgttgaccgaacattcgtgtcc

SEQ ID NO: 715370 - DNA, 318 bp, Homo sapiens
tgactgctgaaggctcaggttgggggttgcccccaggacagcgacctcatgctcctccttgagcatatcatggttggtgggagcggccggtgttggcaggagtgaagagggttgggacagtgtggttcatggtctccaggaagaaccagctgtggttgggtggctgggatggtttcagatatttccattgggtgcctgcttccggggtagaacctcaaacatgggaagacaaggggagtttctgagatgctggtaggtaattttcttaggagccatcgcttctgggctcagatcagatcagatctgcccttcttagcc

SEQ ID NO: 715371 - DNA, 547 bp, Homo sapiens
  misc_feature (39)..(39): n is a, c, g, or t
  misc_feature (55)..(55): n is a, c, g, or t
  misc_feature (61)..(62): n is a, c, g, or t
  misc_feature (64)..(67): n is a, c, g, or t
  misc_feature (105)..(105): n is a, c, g, or t
  misc_feature (439)..(439): n is a, c, g, or t
  misc_feature (444)..(444): n is a, c, g, or t
  misc_feature (470)..(470): n is a, c, g, or t
  misc_feature (479)..(479): n is a, c, g, or t
  misc_feature (525)..(525): n is a, c, g, or t
  misc_feature (547)..(547): n is a, c, g, or t
gacccgcactgcagtctccagcctgagccatggccgccnagccctcctgctcctnctttgnntnnnntggcgccctgggccaccatagccctccggccggccttnagggccttcgcagcctacacttgccaaccaaccccacatccctcccggctgtagcaagaactattcggttctctacttccaacagaagcctccgctggtgataccaggcaaacagggtctggaagggacctccagcaaactccagcagacctgcagctgaggatcccgactgttagaaggaaaactaacaaacagaaaggacatccacaccaaaaccccatctgtacgtcaccattcattcaaagaccaaaggtaggattaaaaccacaaagatgggggaggaaaccaggaggcaggaaaagctggaaaatttttaaaaaattcaggagttgcnttttnttccttccaaagggattgtcggttcnttcaccggnaacaggaacaagttgggttgggagattgtttttggtgggtttgagnggaggagggttttcagtggttn

SEQ ID NO: 715372 - DNA, 291 bp, Homo sapiens
  misc_feature (85)..(85): n is a, c, g, or t
  misc_feature (94)..(94): n is a, c, g, or t
ccatagaggccatggaaagtgatgactgacctaattgaactgtagaccaggatatttttataatatatattgactgtatatatgngtatgatgntgctagcaatgagaataacaaaagcaagaagactcatctctcctttcagggaatcacatctactggcagagtttacttgtaagtgtataattatcatactacatggaaacgtaagtagcaatcaaattcttagattaaaaaaaaaaaagtccctaggttatcctacccataagcatattaaacagctcgcttcacat

SEQ ID NO: 715373 - DNA, 307 bp, Homo sapiens
gtcgacgatagacacagggagagacagagagatggagggagaaatggagaaggttacagagacagacacagagaaagagatggggaggggggagacagagaccaggagagagagagagagagagaaagagagggagggagaataaaagagggagggagaatgagagagggagagacagagacacagagagagagatgggaacggggagagagagacagggagagagagatggagggagaaagggagaaagatagagacaatccagcaggtcgacgcggccgcgaatttagtagtagtaggcggccgc

SEQ ID NO: 715374 - DNA, 831 bp, Homo sapiens
ggcccaataacaagatgcacattaactgagtaggtggagtttttatttctgcaaccagttgcagggaaaaggcctggaaattatgccagaccaacttaaaattacaaagtttttcagagcttatatattttttaagctatatgtctatacatatgtgtacatttatgtaaagacataagttactgacttttaatctattaactaaggatgagtcttgaagaccttcctctggagcctcagtaaatgacttaatttaaatggctgtgagtgctggggtaattacccttgcttgccttctgctaaatcacagcagttggggagttttcttcccaataaaactggcttaatcctaaatgggtcctgacgtattcttcgttattttatgttttaaggcccaggaaaggcctaagctaaactttggtgggcttttcttatatcccagccttgtataagggccttggttttaatatttaactactcagacagtactaaaacacttgttacagaggcctgcgttagtgagaactggctggcacaatccccactgtcaattgtcatgctttttatcatgctgtatatgtcttattactcccgagaatcgtaggagatgaagcatgtattctttcggcggtccgctgaaaagggtgcgcctggggccaaaaccggccgggggggaagggatggtccggcggaccctggtggggccgaggagcccgctgagaagatgacggcacaaaaggggggggcccacaactcaggggggagacaaacgtgctcgacagacaaaaacacagggatatcagagggacgcacccggaaaaaaacacctag

SEQ ID NO: 715375 - DNA, 485 bp, Homo sapiens
ggggctttttaattaagctattgtaattaatagctgtttacttggatcatttcttatttttgtgatgcctgccttgagactgatttctagaagtgaggttgctggtcaaaggccgttgtatcattatcaacagcaatgtatgagagccgtgtttccacacagactggaaagcagactatgctggattttgtcaagcagagagattaagtaactcctccatgagcactcagctagtacaacttctccagaacactgagctatcgctaaagaggagctgtggacatctaatctaccaacattaagccattgccaccacccggagaaacacaacttacccttgaagaatcttttaccttagaattaacggttccggggaattgaaaaagggggaaattggggaatgggaattagtatcatttggggtggtccataatgctcaagtgcctattaaaaagcctgctaatttattggtaaagaaaaaaaaa

SEQ ID NO: 715376 - DNA, 896 bp, Homo sapiens
gaccatgactggctaattttgttgttgttgttgttgttttgagacggtttcactcgtcaccccagctggagtgcagtggtgcgatctcagctcactgcaacctccgcctgctgggttcaagcgattctcctgcctcagcctcctgagtagctgggattacaggcgcctgctaccacatccagctaatttttttttttgagacggagtctcgctctgtcacccaggctggagtgcagtggcacgatctcggctcactgcaaactccgccttccaggttcacgccattctcctgcctcagcctcccaagtagctgggactataggcacctactaccacgcctggctaatttttggtatttttagtagagacggggtttcaccatgttagccaggatggtctccatctcctgaccttgtgatccacccacctcggcttcccccagctaattttttatattttagtagagacaaggtttcgccatgttggccaggctggtcttgaactcctgacctcaggtgatccgtctgcttgggcctcccaaagtgctgggattagaagcgtgagccaccacgcccagccttttttgtatttttagtagagatggggtttcgccatgttggccaggctggtctcaaactcctgacctcaggtgatctgcccacctcagcctcccaaagtgctaggattacaggataagccactgcacctggcagctctagtcttatttggtgaaaaagggaggcattgagggaaaggctgctggcctggacactggagacgtgggtttacccacacagcttgggaaatttatctaaactctctgggcccttgtactttcagttaaaattggggggtaaagtagaacaggtaatttcaaattcttccagagttccagg

SEQ ID NO: 715377 - DNA, 152 bp, Homo sapiens
tgcacagctaccgtcattatgacgcggccagttatcacattgttgatcaatcgcaaacgttgattggttatatggtgatacacatagcgaccctgatcgtttaccacggtctccagcgagtggtataaccagatcaactcgttggtaccact

SEQ ID NO: 715378 - DNA, 144 bp, Homo sapiens
catgcgataaagctgcggaaacacaagatctgatgaaggtcttacccaaccaggtactgaagcccttacctggaggattccaagtaccgaaatctgctgccctttttgtggggcacaatatgctgctggtcagtgaagagccca

SEQ ID NO: 715379 - DNA, 241 bp, Homo sapiens
tcagtctgaacggagcttacgggtctgagactatgggtttaggagatatagaattaagtcatctgcagactgagacgtagttgacttccctcttcctatttgaataccctttatttctctctcttacctgactgccctggccaggacttccagtactatgttgaataggagtggtgggagacagcattctcgtcttgtgtcagttttcaaagggaatgtttccagcttttggttatttcag

SEQ ID NO: 715380 - DNA, 144 bp, Homo sapiens
tctgcggtgcttggggggctgcccttcgtgctgtctgtcgactgagctcaagaaggtgatctaagggccgcggctcctccacacacacacacacaccagggaaccaagagaaccacgtagaatcctcaaccgacaggaccattg

SEQ ID NO: 715381 - DNA, 268 bp, Homo sapiens
taattaccagatttcggaatggctaatatccatatgccagacatgtgatgcattcatcagacgtgtgcggactttggggctgttgggaaacagcatttggcctttaacctcctcctcagacacaaagaggaaagggaaacaggacaggaacccacactagtaaatccaaactcaaatcacattctctgaagaactccgacatgttccctgctcaacgttccacctaaagtaagtaaggacccctaaccccatataccagatagggaaa

SEQ ID NO: 715382 - DNA, 404 bp, Homo sapiens
attaagaggaggtttccgatccaaaactgggtacccttttttgtccgagggtttgatgcggcccctccttcggctcccccgaattcctagactggggtaatagggtcctattgtgaatgtctccccaccaaatgacttgagtcccggggaatctccttaggggttaagaatatttccggggtccctaatggtttgatttttggtttctgaaaatgggttttattttattttatcctaaaaattccggtcctctaaattgggggttctggcactgggaaggttggccggacccctggctggtatggaaggtcagcggtggatgtctccctctcccccgtggggccccttacctgggggatttttatactaaaaatggagaataaaggccattttggagatttgga

SEQ ID NO: 715383 - DNA, 130 bp, Homo sapiens
ggtgtgccggtcggtgatcggcgactgaacacggaggactcaccagggagtggggactgagctgggtttccgtttggctgtggtagaagaggtgtccagtggtgaggtgcaggtggtggagtcgtggggg

SEQ ID NO: 715384 - DNA, 174 bp, Homo sapiens
  misc_feature (5)..(5): n is a, c, g, or t
  misc_feature (22)..(22): n is a, c, g, or t
  misc_feature (35)..(35): n is a, c, g, or t
  misc_feature (68)..(68): n is a, c, g, or t
  misc_feature (73)..(73): n is a, c, g, or t
  misc_feature (165)..(165): n is a, c, g, or t
caagnccctgcaattgaaggangattgacctcctngctaatggttgaactggcaattgtcccaaccanatttntgaactgccgaggtgaaaccgatgtcagctctgactccccgctccacacccccaggtacttcttcctctccatcctgtgctgggctgacatnggtttcacc

SEQ ID NO: 715385 - DNA, 364 bp, Homo sapiens
  misc_feature (294)..(294): n is a, c, g, or t
  misc_feature (296)..(296): n is a, c, g, or t
  misc_feature (359)..(359): n is a, c, g, or t
cgcacagtgctgccaggtgtaagagccacgtctggatgagactcgtgctggaatgtgtgtgcctgaggaggccaattaaccttctcaggtctccccactcgggctgtgtaatggaggtcactgcctgccttgcggcccgggagggcttccagtgacatgcgctgagagcgtgggctcttgttaggtgcttggtgaatggcacaggtgatctttacctcctgggcccacggacatccaggtccctgatacttattggcggatccagggcgctgaacaaggtgcccagggaacatnantgaaggtgacatgcagttcctacgtgctaggagcaactcggccaggatggaagaaggaccttnggttt

SEQ ID NO: 715386 - DNA, 1121 bp, Homo sapiens
  misc_feature (581)..(581): n is a, c, g, or t
  misc_feature (1121)..(1121): n is a, c, g, or t
agcgcaggggccggggtctgcacgtgactggtcgcactcccctggtaggtggggagctgacgtaatgtgcccgagcccgagaccgtggcgtcgcgcgaccggtccacgatgatcttgctaccgcggacttcttgcttgtgcagctgttgtctcgctggcgaggccgtgctgggcggtgagtcgcgtgcgcggagcactctggggtgcggtgaggctcgccgtccgacgcggcgccctgggctgggcgtgtgaaccggctgtgctggtctggcgagcgcctcttgtgtgtgatcgggggcgacgcacgcccggtagactgagtcgggccttgtggtgcaacgctcagtcaggcgggtccggctgtgctttttcctccgccgccgtcgccccggtggtcgggtggcggtgtgttgggtcctagaaagagccaaccgcacgggtcatcgcacgtttgtcggaggccaggtcagggcagggctgatccgcttgaacggacgggaaggcttcatccgaggagagcagagtaccctttgacacgacgatgactaggcttgggcgtaggaagaagcgtcattgtcagnttcaccagttggggaacgtctcgtatggaaagctgaccaatcaatcacttcgacatccgaacacagagtggttaggaaagccgagtcagtctgagtagcagtaggatttttaaccgggacattggacgtggggcacttgtgagcggcctcgcgctctgtagaagtaagggacgcaaaggaggagtaagatcctgtgactcgaaatcagaacctgtgtgcacgcccttggggcgcatcgaatagccttttgtcacctagagcaatggagagtgagaggctgcaatcgcgcgactagaatgccttgcttgtgccactgacagaaagttacattgtgctttctgggacactagcgatcttttgaacggagcacgagggctccatattatagagcggggggtaggaaaccgccgtgggattcgcagcgaaaactggggtcgattggcacaaggctccagtttataattgtgcgcttgggacttcgcgaatgcgagttatatacggggcagttttaccaattttttcccagacaagccatttaan

SEQ ID NO: 715387 - DNA, 106 bp, Homo sapiens
gtgccatatgtgatatccaggtatcccagtctccatcctccctctcggcatctctgggagacagagtcacaaccacttgcagggcaagtcaagacattaatagttg

SEQ ID NO: 715388 - DNA, 385 bp, Homo sapiens
ccatatggactgggaagggaaggatacgtgcatagttcacaggctgtcttgaaaaacgtgtggctcagcttggcccaggcctttggcccgggatcaatcaggagctgaaggaatgattgatagatgctgcttagcttggcccaagacttatcagaagttaaggtgaaagtttggccaaggagcttggcccggaagcactcaggggctgaagtaattattcatagaggtcagacttacagtccaaataaacgagagtgtcgaccggaatgcaccagatcccacagtgcccatgccaacaaaaagagaaggaacattttcctgggagcccactgactgtacaaagacaaaagtgcttcttttttctctttctcgtgtctctcttttt

SEQ ID NO: 715389 - DNA, 781 bp, Homo sapiens
gtgcctggagagcttgtcaaacatggtcaccaggaacagagtcatccagccaatggggatgactccccggtgatcatctatacgtccctgacaggtatgccgatgtgcgaggactactggatgcaagcaagtgtctgcctcgtgacccctagactctggaccgctgactgagagctggcagacatcttactgtctcccccgatctagcgactggtggctcgcttccacgacgatttccattgagggttgtcaatccttgagggaacggcactatgcccacttgggatcgcactactcgcggtccacgcacttctctcattctgtaagaagccaccgttcctctctgagctcctcgtatcttgtatcagtgaatttgccgtcttggtcacagtattcatcatactcttggacttgcacatcggtctatctatgtagctgatggatactacagagctcgagtcgctctggaattgccagcagactgaacgttacgtttctctttgtcatgcgtccagagaggagactgtgttccagaagcgttgctgcgctgcagggcaggagcctaccctgtggcacatcaggaacgagcgtactgggacgggcaggggggttgggagtgtgcggtgcacaccaaagcgaagcaccaatctgggagattggcacacatggcgagagtcacgtgtgtagagggtatgtagctgcatcttcccagcgtgagagaacctgtcagaactttccatacgaggtatatcaggaagacacccttccaaggtatgtaatg

SEQ ID NO: 715390 - DNA, 438 bp, Homo sapiens
  misc_feature (110)..(110): n is a, c, g, or t
  misc_feature (125)..(125): n is a, c, g, or t
  misc_feature (283)..(283): n is a, c, g, or t
tggatctctcaaaataccttcaagttcttggtccaatgcctatggtatcagaacctggctcccttttagtcatgcagatctctctagcaagtgatgatctgcagctgctngggttcttcccctgnaaacaggcttttcttttctgatacattgctaggatgcaaattttccaaacttttacattctactttccttttaaatataactcccaacttaaagtaattttttgttcctgcatctgcacataggctgttagaagcagccaggccacatcttgaaatcntttggttccctagaaattttatctttcatatatgctaagtcatcactcttaagttcacacttccacagatcccttggttatgaacacaatgcagccaaattcgttgctaaggcataataagcatgacctttgctccagttcccagtaagtttctc

SEQ ID NO: 715391 - DNA, 232 bp, Homo sapiens
ctcccgacatgtcgcggcttcaacatggaagtggggcagtatatctttgataattgcccctttatctctctactggaatggcatacttttactttgacctctgctccagatgaagactgcttctccattcatatccgagcagcaggggactggacagataatctcataagggctttctaacaacaatattaaccaattcccaggattgaagtggatggtccctttggcacag

SEQ ID NO: 715392 - DNA, 364 bp, Homo sapiens
ttaagacggaggtagatagcacaatggccacatgagcctgccatgtttggggcatattcgaggaatcagctgggagaccaatactgtttgacaaaatttagccaattatggtagataggagatgaagctggggtggtcgggtgggagaacagggattcagatcatttaggtccttgaatattctttcttaaggactttggattttactcaatgagagaggaagccatggaagatgtaggtatctatagtgctgtgactctaatattacgtcataatataggtaaattatgaagagtagaatatagagtagttcagcactatttcagtagcccaagtggtggtgacttggaaaagggtattagca

SEQ ID NO: 715393 - DNA, 974 bp, Homo sapiens
ttgccagaggccattgactcgggggtaaatggaaaactgtgtctttgaatctataatcgtataatctaggagttatctttgctactcacaagttgcaaatgcagatctccacgtgttctctataacctaaacgtagcgtcgtaggccattcaatcacgtctagagagaagatccggccgcagattttgttgcctgtagatgtatggcggacacggattttcagagcattgtcccctgagtcctaatgaaatagtcaaaaccaatgattcctcttgcgttgcatcccattctgactgtgtgccaaggatttttgactctatttgcctcttcctatgtacctgcttgcctccttgggcggggttgccgaacgctggaaaattctgagcgcgtgattaccaaggtgggacctgttgtcgtgtgcgctctcttgacttgtctaactattctagaagacaagccaaacaaaaaaactttatgaggaggaggacgaaacttctctacccctgtggtaacttatggtcaggtagtggcgtgatccttcagtccatggtacctgatgttcactattttacctctacttcttgccaaaaaaaagaaactggtcttcaaagccagagccaatgctaaaaaggcctggaacgaagggagccagagggtacccaacagggaaacaacgggcacaaccgatgccggcaaggacggtgacacaaccctgcacgaaatgggatgcacacaaacccggcccgaagcgacgtgctgcactgcccactactgggcgccttgctacacggacacccgggccgccggacgaaaccaccgcgcgccgtatacaccggacacgggccctctacaaccgctgtggcaccacaccatgtgttggacgcatcccacaaagcccaggtgtgcacccccctatgaacccgcacgaagaaaacagcgcaccgaaaaagtcaccccacccagcaacgtagagg

SEQ ID NO: 715394 - DNA, 611 bp, Homo sapiens
  misc_feature (93)..(94): n is a, c, g, or t
  misc_feature (530)..(530): n is a, c, g, or t
  misc_feature (539)..(539): n is a, c, g, or t
  misc_feature (552)..(552): n is a, c, g, or t
  misc_feature (581)..(581): n is a, c, g, or t
acctccccctgcaaggacagcatgggattcatggttagggaggctgcacctgaaaaaaggtgtccatttacagggctcttaatgatggtgacnntggtggtggggcaacagcagggtcacttcactggttcttgtagatggctgctcttaaaaggccaatggatgggggaaggccatccttgaattccaaaccaattagccctcacgcctgcccttccttgatattggccctttggacatcgggggggctgaccaggaattttttgtgggcattgggcccgtttgtttcaaataaatggactccattttaattaaaaaagaaaggaatttggaaaaactttttttttgccctttttttttttttttttttaactgaaaggtggatccctcccttttttttggccctttccctggtttaattgtgggccaaaaagaaaaaaaaagggttggtccgggccttgggccataccgtttcctttactccttcccccggtccccccaaaatttggatttttttttccacccttttncccctggtntgggaaatggccncctttggaagaaaacccaaattaaaattngaaaattaaaacccttaacctttggcccca

SEQ ID NO: 715395 - DNA, 397 bp, Homo sapiens
  misc_feature (326)..(326): n is a, c, g, or t
caactgtcttgttacaaatgtttggtccttgcttctttaacctcttagtaaagtttgtgtattctagattaccacagttccagagacaatgctggcacaaggcttccagcccatcctgtccactgacacggagaatgaaatcgtcctgcctctgggctccttagatcaggtatccagagatttttactcctccagtgccaggcagggccttacgtccataaacttcaggcagggaagtagttacgggaaaacagatcttccgcccttctggcagccccctttaaggttaagggagggagtatctaaattctctggaagggggggantgagggtagggaggtggggacttcaactctggggaagttggggggctcaaggcacttcaggacccaaactt

SEQ ID NO: 715396 - DNA, 233 bp, Homo sapiens
tgactacgccggtcgatctgactacgcggctcgatctactaccggctatgggccctgcccacaagcacaccctcaggccgagggtgcatactgatgctctggcctgatggagaccctgagatcttcctcacccccaatcatgatgtcttcagtgtgggactggcgtccttttggttctgcctgcagcctgcctggctccgcccctagtgcccccgccagccgcgtagtcagat

SEQ ID NO: 715397 - DNA, 340 bp, Homo sapiens
atgcctgctgcgctatttaaaagagtgttttccactccatttccctgcaaccttgccatctacttacccttcaacccattctaacttggctttagctccctccacactactcacatagctcctgcaaagtgtagactcagttttgctaaatccaatgaaccttttgttggccttatctttccttctcggagcattcagcataaattacttcatctgtttttcttgaaacgttatctttggtatctttgccataatagctataccatcttcctagtaacttcatggtctatggatttttttttttttaagagaccgagtctggctctgtcatccaggctag

SEQ ID NO: 715398 - DNA, 697 bp, Homo sapiens
tggggcttcacctcgaccttttttattggcatttttaaaaaacaattaatttagaatacaaatattagaaaacaggggccttcagctgcccgtgcgggcgggaggggccgagctgcgcagcgggctgcgggctctgcagtggagactggaactggccctcggccaagaggcacgtccctattctttagacctgaaaggatatcggcttccggactaggagtcctggtttatcacaagggaaaattctggggcgggggaggacaaaagcaaaacagaccgcaggcagcggtgtgggagaaccaggtgaggccggtgccccgcctgcgccccggtctccgggggggcaaggggggtgcccagctgtggggctcctgaaggcagagcccgggtagctcccccagttgtgggacccttgaggccaagggcattgggtggggcctgcgaggggccgggaacgccgggggacaggaaggaggcccgggtctggtcctgctggaagagtgaggctcccgggggacagggttgcccgggccagcctcgtacccgtcggaaaaccaaagagcaaaacaggagaggaatcacccaaaaccgagaagccgggggtggccggggtccctggtgcccctggggaagcgaccgaacaatggcccaaggacggggtactggtgcggggcgggcggcagctgtggacatctgg

SEQ ID NO: 715399 - DNA, 626 bp, Homo sapiens
gatttggcgaggcagtctcatttggcggcttattgtctcttttgatctttgtggttcaaagtctgtttaatcagagactaggatagtaaccgctgcttttgtgctttccatttgtcaggtagatcttcctccatcccttaattttgagcctatgtgcgtctttgcacatgaaatgggtctcctgaatacagcacacccatgggtcttgactctttatccaatttgccagtgcgtgagttttaattggggcatattagcccattttcaggttaaggttaatattgttatgtgtgaatttgatcctgtcattttgatgttagctcattattttgcctgttaattgatgcagtttcttcatagcatcaatggtctttacaattgggcatgtcttagcagtggctagtaccagttattcctttccatgcttagtgcttccttcaggagctcttcttataaggcaagcctggtagtgacaaaatctctcagcatttgcttgtctataaaggatttatttctccttcacttatgaagcttagtttggctggatatgagattctgggttgaaaattcttttctttaagaatgttgaatattgggccccactctcttctggctgtagggtttct

SEQ ID NO: 715400 - DNA, 569 bp, Homo sapiens
  misc_feature (205)..(205): n is a, c, g, or t
  misc_feature (535)..(535): n is a, c, g, or t
acaccacggccttaggaatggaagacaggccccacttacctcttcgactccagatgcagctcatcctcacgaggggctggatgaagaggacttcctctctttcccccctaagcatgtgcctcatgagcctctgtgcaaatatggtggtgcaaacctttggtctgccttcatcattttgttgttgttgttgttgttgagacggagnttgcaggctggagtgcaagtggcacaatctcgctcactgcagcctcagcctctgggttcaagcgattctcctgcctcagcctcagcctcccgagtagctgggactacaggtgtgcaccaccaggcctggctgatttttgtatttttagtagagatggagtttaaccatgttggccaggcagctcttgaactcctggcctcaagtgatccaccctaataaacttgctttcactttactctgttggctggctcttgaattccttcctgggtgaagccaagaaccgacgtagcctcccaagctgaacctcagtttggggctttaccccatganaccgcaaagggctgggcttcccttcttctttggg

SEQ ID NO: 715401 - DNA, 837 bp, Homo sapiens
atcagtacgagcctctgctgtcggaacctggccgtgggagaaagccgtgagcgagctgccgttcagagtgtggcttctgcctgcgccaggtttccccgctccctcctgtgagaggcaccataaagaggaatgccaggacagggctaacctcatgtgcaagtacaaacgcatcggctgcccatggcacggccccttccatgagctgcacggtgcacgaggctgcgtgcgcccacccgacttcaagacaggcagtgagcgtgatggagatcctggatgggatgtgaccagtagcctaccgcataggatgcatgcacgctgtacaacagcatcttcaccctgctcagtttccgataagattggctacacaggtgatcgcgccccgccgcctgcttgtatgccacacgaggtttgggttggggggctggtcaagtccaggagttctgggggacagcaggcatctgggcacatgagcactgactagcgccaggacatggccgggctctggacgaagtctccctggtggacatggtggacacctcggtctgatgaagacaggccggagactgagtggaatggaggggccgaggtagacccacaggtgcacacgttgtgtggcatctcacaaggagccccgttcagcttgtactcgccacctggttccaccacctgcaagtggcatcttcacttgtgtggctccagagtctcggacagtcccggtaaccgcaaagtgggcagtctcaaggggctgggaactagaggctgcctcggacctggggcagaaaggcccgcgaggagcctctcttggcgatcatggccgaaggctataggtggaagctc

SEQ ID NO: 715402 - DNA, 257 bp, Homo sapiens
  misc_feature (69)..(69): n is a, c, g, or t
  misc_feature (73)..(73): n is a, c, g, or t
  misc_feature (156)..(156): n is a, c, g, or t
  misc_feature (171)..(171): n is a, c, g, or t
  misc_feature (232)..(232): n is a, c, g, or t
  misc_feature (249)..(249): n is a, c, g, or t
tctcgattagtccacggatctggatcttcagactacccgccttcgtctccgagtttgcgaactcgcggnaccngcgttccccggcgcgaagagggctggactcggattcgttggcctgagcaatggctgccatccggaagaaactggtgattgttngtgatggagcctgtngaaagacatgcttgctcatagtcttcagcaaggaccagtttccagaggtgtatttgcccanagttttgagaactttgnggaaattt

SEQ ID NO: 715403 - DNA, 1256 bp, Homo sapiens
ttagccaaaccatttacccaaataaacgtatacggcgactagcaaacttgaaacctgtgcgcaatagactatagctacccgcaacggcgaacacgactgaacaagattactacgccaagccactacacctactacgccaaccggcacatacacccacccctactaccccctctcactgccacctacacctgcacacctccacacccctacgccacacacctacaaccctctctgcccaaaggcgcaacgaaacgcacccaacaaccacggcccttacacgcaaccgcccacctcggcaacccacaaagcccccaccccaacccgcaacgcgccactaacacccgcataacaacgcaacaacccaagggcgccttaccacaccaagcaaaggccccaaccacaccaccccggccactcccccctcaacctcgcccttaacgcccgccccaccacaccaacccacactgtgacacggcccttgggcgccgtccacccaacggtaaacctccctccctacgcgcctcacaagcgcgcggccacctcaaccgcccaaaccggccggccccacgcccaaacccccacaccaacccacacccccccccacttacaaaccccccccgggcaaaacgacaccccccccccctgagacgaccacacgcgccacaccctcaacccggccgcctcctatgcgccggccccctcactcgggccatttccccccccccaactccaccatagcctacaccccttcacaaccgacctaacccacgctttccccccgcttactctcacccagaccaccactataccaccccccacaaccacccccctcctcctcccacccactatcacctcacctaccaccgcccatccatctccgcccggtggcccccacacccccccccgacacacccaccacaacaggcggccccaacaaccagagcagacgacccaccccccagtcaccagcacataccacccccccgtttacacacgcctcaagcccagcacgatctagccccccgccccacccgcacccaccccacatccccatggggacgccctcattcaccacacaacccgcacagcagcctccccacctcgccaccaaacccacccacccccccgcacttagggggccacacacacacccaaacaacgcggccaccctacccccgccacacccactacacgcatcacccacacaccggccccaacacaccccacccggacacaacaaccacaccagccacaga

SEQ ID NO: 715404 - DNA, 846 bp, Homo sapiens
tttccggcataaaacacacacattctatacacatggactatactttgttaatattcccccgcaagatattccgggttaaacaatatgttcttccacaagcgacagacttttcctctcacaccttctttcctcttttcgcgttctttccgggcgcttctggattaaaaatctggccccttttaaccttcagatactcggggctaaacccaccggaacttgtatctttcctctcggccccgttttatacagaatatttattgaccccatccctttttagaataatttcccccacgtaccaaaacccgggcctaagaataccgggaccacaaaacggttctaaacaaagggccttgaaggtcccccccgggacacattgcgatagcctacacctcctgcggtacacggatcggggaggcaaaaaaccacacgtcggtggggcgccacctatgctcatcagaggagtgcagtggacaccgcgtccctctcatcaggagcagccccccgtatgtgcacggagtgtcccaacaaagccccctggggtcggaggtaccctccccccacgggaggtccccccgtgtcacgacacgagcatccggtgctaaatttcttggcggggcgctcaacatatctacgcggccctcacaaggcctgcgaggcgtactggctagaatatagacgtaaatgtatgggaaccgacatcagtatatacgtgtacaaagcgtgccccgggtacaatacttagccatcttgatacaccgtgccccacagcaagaatgcttagaatttcgattcctgccactaacgcgagatcagctaatttggcttacaaatgcttttttttagtca

SEQ ID NO: 715405 - DNA, 131 bp, Homo sapiens
tccgggatgccccggcgttactctgtcaagcacatcatgtctatctgaatggagctctcaagaacaagcattgtttaggtaagtcagcgcgagccttcaaggtcttggaccctgagggaaagggcaccatc

SEQ ID NO: 715406 - DNA, 352 bp, Homo sapiens
  misc_feature (258)..(258): n is a, c, g, or t
  misc_feature (335)..(335): n is a, c, g, or t
cgacatgaacccgagcaacctacacttattcatcagcgcctacaacagccggagagacctggagattgagcggccaatgcctggaacccacactgtcactttgcagtgccctgctctgctggtagttggagacaactctcctgccgtggatgctgtggtggaatgcaattctaaattggacccaacgaagaccaccctgctcaagatggcagactgtggaaggccttcctcagatctctcagccccgccaaagcttgntgaggccttcaagtactttgtgcagggcatggggatacatggcttcttgcagcatgactccgcctgatgcggtcccngaacagcctctgggttc

SEQ ID NO: 715407 - DNA, 220 bp, Homo sapiens
agaatctgatgagccttttaggcctgttcaggccaaatttgagtttcatcatggtgactatgaaaaacagtttcttgcatgtacttgagccgcaaggacaagacttggatctgttgtcaacaatcctaaccaggtcagtgtttctcttcaatgacagagcaggcacttgcagacttcccaaaaacacagagtatcacatctctacagtgtatatgcacgg

SEQ ID NO: 715408 - DNA, 918 bp, Homo sapiens
gcaaaattagccccctaataaaattaattaacgcactcattctatcgacctccccaccccatccgaacatctccgctagtgatgaaacttcggctcactccgttggcgcctgcctgatcctccaaactcaccacaggactattcctagccatgcagctagctcaccagatcgcctcaaccgccttttcatcgaatcgcccactatcactcgatgacgtataattattggctgaattcatccgctaccttcatcgccaatggcgcctcaattattctttatctgcctcttcctacacatcgggcgaggcctatattacggatcatttctctactcagaaacctgaaatcatcggacgagttatcctcctgcttgcaaccgatagtcaagcgagccgttcataggtctatgtcctcccgtgtaggccaccatatcattctgtagtgggccactagttaattacaaatcttactatccgtcatcccatacattgggacagacctagttcaatgaagtctgaggaggctactcagtagacagtcccatcctcacacgattctttacctttcacttcatcttgccctgcagtgtattgcagccctagcaggactccacctcctattcttgcacgaaacgggatcatacaaacccctaggaatcatctcgcattccgataaatcacttcaccttactacacgatcaaagacgccctcggtacttctcttcctttctgccttatggccttaaactattctcaccagaccccttaggggcccagaccagtatacccaagttagcccctttaggcctttccacattatgccgaaggatttcctattagctaccaatttcgaacgtcctaaaataggggggcgtgcccaaaatattccacccacttagaaaacccacctcattttaac

SEQ ID NO: 715409 - DNA, 416 bp, Homo sapiens
  misc_feature (172)..(172): n is a, c, g, or t
  misc_feature (198)..(198): n is a, c, g, or t
  misc_feature (249)..(249): n is a, c, g, or t
  misc_feature (305)..(305): n is a, c, g, or t
cttcctcagcaaaatgccctccaaggcacagacacacaacacgggcttgtatccccaccaaactcagccaccctgaacctaagaccatcatcagcccctgaaagggccaaggggttgaaaagcagcagttgccagagcagccttttgagaagctgcccttccagaaccagantgatacccccagggggctcagcctcncactgtgtctcccatccgttccagccgccccccaccagcaaaaagaagaantctcagtccaggggcaacagcccagctgctgctatcttagatggttgaaaactaancggggggctcactgccattgtcaccagggtggaactcttgcctctgtaagaatgccttctctactgtggcatacccatgaaatttaatccccattttaaaacctctgaaaa

SEQ ID NO: 715410 - DNA, 444 bp, Homo sapiens
taaaagtttcagcaagaaaacctaggaccttgatggttttcctgattatggcaaacatataaggaagaactatagcaatcctactcaaactattctgacaaatagagtatcagggaatatatccagaactcattgtatggaggacagtattaccctgataccaaaaccagacaaagggctattaaaaaaaaaaaaaaaaaaaaggaaacctcacggccaatatccctaaaaaaaattgatccaaaattcctcaccaaagtactagccaactaattccacaagcatataaaaaagttcattcctcatgaccaaatggaatctatcccggggatgccaggatagttcaccatttcaccatttgtattcgccacatttgcctctcgatggatatcgcaaagcattcattgtgaacctttttttcaccagaaatgagatgtcggaagg

SEQ ID NO: 715411 - DNA, 313 bp, Homo sapiens
cactagcctgctgatgctcccagctgattaaagccactcccttcactatcttggtgtctgaggggttttgtccgcagctggtcctgctacagtgagatgggaaattttttaaattacatttttaggctgggtgcagtggcttactcctgtaatccgagtactttgggaggccaaggaaggaggcttacttgaagccaggggttcaagaccaacctggcaacatagtgagaccccatctctgcaaaaaaaaattttttttaagtaactgccttttaatagcaaaataacaccatcctaatctaaccacagagtt

SEQ ID NO: 715412 - DNA, 110 bp, Homo sapiens
atcttagctaatgaccggcatctttactactgaacggaccgtaactaatgtccggcatctttactaatgagcggatctttactaatgcccggcatctttactactgggcg

SEQ ID NO: 715413 - DNA, 1171 bp, Homo sapiens
accatctttcttgttgttgctcttctgctccagcatcattgttgtctttcactcctcgctgctctgtcttcgtcttctgtctcatttcggttgtgttttctaggtgtcccttgttttgctacttagtcggtccctcctactttgtctgtaggggtttgtttgtctccatcgaggcccacctacactgtggctccctcacccaccgggttgctcgttttattcactattgtcgtctcttggtgtcacaagcctccccattgtgggttccgtaccaccacccccgcgcaaagttgtgggtgtttttttttaaaccctggatcttgtgcccttccccacccccaccctggggtaaaaaggggtcgaaagtgtgattctcactcgtgtggactcctgggttttcacagttgatgcccctggcaactgttggttaccctggatgggaccttgcccatctatgacctggcgtacccagacttctttagacatacaagtgtcaagcaccatgcggggcatcgtgccaactgctctgggagcaaggcactgccctggtaaatacctgccagcctggatggcatcgtgcccctctgggacccccggaccggccgcctgcttactgactaccggggccaccacggctgagatcctggactttgccctcagccaagatgcctccctggtggtgaccacgtcaggagacccccaagcgaaagtatttttgtgtcccaaggcctgacccttatatggctgcacgcccctcgcctcgtgtgtctcggttttgaaggggacgaagggagcccccgcccctgttctgccacacacagaggcacgtagggcaccacagagggaagaggagggtggggccctggatgactttccacgcctcttcaactgacttgctcccctctccttttcttctctttagagatccccgccccgggccctcccaccccttgcccacgaacctggtgggcccttcacgagggaggggtggacctgtttctctttcacctttcactttgctggtgtgagccctggggtgtgtatttgtatgtggggagtaggtgtttgaggttccccttctttcccttccccagtctctgggggtggaaaggaggaagagatactagttaaagattttataaaatgtataatccaaatatacttccccaga

SEQ ID NO: 715414 - DNA, 241 bp, Homo sapiens
ggcgctgcgatggcctggcctgggctcagaggcctgcacattcctgccttcttatattaataagacaaataaaacaaaatagtgttgaagtgttggggcagcgaaaatatttggggggtggtatggagagatcatgggcgatgtttcttcagggctgcttcacagcgtgcatcagcggcggcgctgggcagcctagagtgggagccatcaagctgcaagggaggtctagtagcgcaagggg

SEQ ID NO: 715415 - DNA, 100 bp, Homo sapiens
agcggccgcctactactactactgctcgaattcaagcttctaacgatgtacggggacatgcatatgataaaaaatataaaaaaaaaagttgtactgcacc

SEQ ID NO: 715416 - DNA, 954 bp, Homo sapiens
ggagcttgaagaaatccgcaaatgtgggatgcacaacacttccgtaacatccaggttgcatgacagctaatttattgacttggccaagggcttattgtccctgacaaccctccatatgataacgggagccttcagaatcgaacatcaactttccagcagagtacccattcaacaccaccgaagatcacatttctaacaacacaagatctatcacccaaacatcgcacgaccccgcgggcaccgctctgctctgccagctaacttagctgccgaaaacctggaagccagcaacccaaaaccgaccaagtaatccacgtccctcatagcactggctgacatgacccccagcctgacgcacccgccttcggcgctgcaccgtagccttgcccgcaccctacctcatcaaggacccgctcacaatacactctctgtaccgcaactgctcgcccgcacgctatacacagccaccttcatcgcggccacaccttcggcgcaccctgctgcccctcccactcttggccccacgactcgcgctgtccagcaccacgctgttcacgcccgagaccccccgtgcccgcggcactccaagacacccccggcccaccagttccccctgctcggccacttcgcctccttgccacccgccctccccttcgcctcctccccccaccacacccccacacccccctccaccccccccgccctcctaccctccccaccccctcccccccccccctctctaccccccccccacccccaccacccccccccccccaacaccccccctccacccctcccaccccttctctccacacacacacatcacaatcaccaccgccccgcccccgcccccgtcgatcccccaccccgtacccccccgcccccacgccgccccgcgccccgcccccctcaccgcccctcccctctctcccccccgcttcccctcccacctac

SEQ ID NO: 715417 - DNA, 614 bp, Homo sapiens
gatttttccccccgccccccacctccggaggggggggggaaatcttgttccgtcccccccccccccccaatccgcggaggggttttccggttcttttcccccccccccccccctggagaaaaaggcctgggggccttttttttttaaattcgcgcgccgggtgcccccccccacaaatgtgtggggaccctggaaataatatccccgcttctccccgcccccccaaaagttttttgttggcccgggccccccttcccccccccgccaaggggttttggggaatcccccttaaagaacccgggtttggccaaaaaccccgggggggggccccccccctttttttaggggtttttttttggggccccggggggggaaatttaaccccccccccccttttttccccccccccccttgggtagggccccccccccgggggggttttttggggccccccaaaaaaatttaggggggtttggggggccctttttttcccccccccccggggggggggggccccccccacccccccccccccgcccctaaataggggggggccccccccaaccctgggggggggccccccccgggggttttaaaagggggtttttttttga

SEQ ID NO: 715418 - DNA, 887 bp, Homo sapiens
gatctatctcattggtccatgtcctcctcagatgaggttacttgatgttcttactagaaagaaaggacctacgagcagcgtcggagctagttatgacctgcatatagtggctctaaagcaggaaattgtgtagatatgtggagacggagtccctgtaattgagcataccttctgaacgtacatgtggaagcaattgtgctaggagtaggcaaagtctatcatatctagaggagtcatgagccaaacagtctggccaggcccatgcatgtaaggagtatgcattatgtatttgacatgtgaagctgggactcagtatgtagagaatagcaaaggcaggatcgtctcgcggttcgccttggcatgtccagttcattatggttcaaatacagtcatgtcaaggcagagttgagggaccggtgattagccagaatggtcttctcaattcatatgcggtggcgacaggatgcatcattcaacattgggttgcaggatgagggtcagaagacggcggatgctagagaaggggtgaggtcgagagtccaggtaggctagaggaatttaggtaccaagaaattgcaaagccggaattgtacggggtgccaccgaatggtcgctagaagattgccaggttgggcttcagcccatggtcctgagtccaggtttgctcccaagggtaaatgaacacggattcggactggcaacccggtggttcagcataccaagtgctacgggatatatggggggaagggcgtggtaaaaagattcggaaccccaaacgaattacaaaacgttcccttcaaaggcctcaagggcaactagttccctcaggtaacctatattacacgccatatgcatgaccaagccgcctttgctcaaagtctcccaag

SEQ ID NO: 715419 - DNA, 493 bp, Homo sapiens
  misc_feature (22)..(22): n is a, c, g, or t
ggagagagactagtctcgagtntagtttttcattaaaattattgtaatggggtccgcccaaaaggaaggggtggagggtggggtacatgcggggacacggaaccatgacttggccaggccaaattcttctgtcgtggggaaaagggatgaaaagacaaaccaggctgactggggtggaagaggggagggggacattggctgcattcccccgcccccaaggaagcacctctaggccctggacccctcgctcaccctggcccctaagactccatctctatctctgcctcgtggccctccgggctcttcctccgtgttccccttgactttttcccctgacagattctcaagtaggacgatgttcagggcctgaccccaagccccataccaccttatgagggtacaacctttgccggccctgttttgcccctcctcaaacctcaccgttttccctcttggggacagtctgatccccctccttcctctcatcctcccg

SEQ ID NO: 715420 - DNA, 877 bp, Homo sapiens
tcaaggccactagagtatcaagagtactataaggttaacatcaggggcatgataaaggctcaaatttaaaacaaatcttctggggaggaggaaaagatatcccttttttcttttcttcttttctttttttggagacagggctctggctctggtcaccaggctgggatgtgcaggggcatggatctcagctcactggcgaacctccgcctcccaggttcacaccattctcctggcctcaagcctcctggagtagctggggaggacaggcgccgggtccgggctaatttattttattatttttagtaaaagacaatatcagctggggctatgggtgggtggcactatctggtggggtccccagctggtcctggggaaggctggacatatggggaggactggtcttgaagcccagcgaggaggtcaagggctatagtggagctggtagtggagtcgtggattggtggccatgtgcaaactcatagcccttgagggtgaccaacgaaggtgaagactcactgtggtgtcccaaaaaaaacaaaaacaaagaatttttcctggggcaacaaatgcggagatgcggctaacactggggttggggacgcacaaaatctgctccacattactcactgtggctatttgtgtacacccgctgtcgtctttctcagcggattggtccacccaaacttctttgttaacttttgcccccagctgttttattccggggatgtaacacatttcacacaactggacacccggtgtgcgggggccacacccctcgtgtaattccccgccacctggtgggggggccaggcaggagtggatccccaggagtcccagagtgtttgaaaaccccccacacagtggtggacccctctta

SEQ ID NO: 715421 - DNA, 692 bp, Homo sapiens
  misc_feature (400)..(400): n is a, c, g, or t
  misc_feature (449)..(449): n is a, c, g, or t
  misc_feature (483)..(484): n is a, c, g, or t
  misc_feature (490)..(490): n is a, c, g, or t
tggctgagcaggctgcggggtcgggagaggggaggcgcctcggccggctccaatgtcttcgcgtgcatggggcccgaggaacgggctgctcccctgccgtgcaggcttcctagaatctctggcacctctgcggggatgcggtggtgtgggtgggcccggccccaaagcggtccaagcctcccctgcgcctcgcggttgggtgcgggcttcccagggtaggctgcgggagcggctcccagcctcacgggaacctcaactccctgcggggctcaccccagcctgcggtacaaggcgtagcaaagaacctcgagagtagctgttgcttcgttcgtttgatacgttgcagaattttaggagcattaacgcccatcatgtttttttttttttcccctttttaaantttccgccccagggagaggaagcaggtgtagacagcagcaagagggagntgtgatgagggaattatctctgtagcgtagatgnntgtgcntcaacgttctctgaggagtttgaaatcagtattggtttttcgcggtttggccctgaatggttacaaggagagaacactggacttggagtcacgaaaactttcatccaagtcattccctgctctaagtcccatttctgttccatgagattgtttccacctcagatgagattagacttaaggtggcatcggtatcggtgtggta

SEQ ID NO: 715422 - DNA, 704 bp, Homo sapiens
catttagactcatgacagcgttaggtgccatttgatagaccaaagcactagtcatacatgcgaacatgcttgcgagtacgccctgtctagcccgcttaatactcagactttgcaacaaaactatgattaagacttgattctcgcacgaaactgggataacaacgtgtctacagatagagtctggagcatcatttgcctcaggcagtgaaccctttctgagactctccatgaaggctgagcactcgtatgcatgcggcatatagagattgatttagagataggtgccttttaatgctgtagaccaggggtgactcaaggcatacctataaatccaggcggcatgttgtcacatgacaaacactaggccccatctgaaggatataccaaatatctacctcactaaacgcaagccattgtatcactctctcacacttattcatcatagcaggcagctgaggagcattaaaccagacccagctacgccggttacgatactcctcaattactcacattggatgaatattagcaggtctaccgtcaaccctaacatacgcattcttatttaactattgatatatcctaactactacggattcctactgttaacttcttcaagcacacggtcttactacaatctcgtacctggaacatgcttacatgacttacaccccttacttcatcacccctcctttccctgggctgcc

SEQ ID NO: 715423 - DNA, 366 bp, Homo sapiens
gtggtctagtcgcattatattcttcgagcgaatgcctatgatcattgcgcctcgctctataatgtcgatggccatgtgctacggtttactatgattgttgggtgtctggtgtatctgagtgaggccggagtccgaggccgcgttagttgtggctataaaaatgattaaggatactagtattacgagatcaggttcgctcctttactgttgtgtctggttatcattctgtcaagaggttagtttgattagtcattgttgggtggtgattagtcggtcgttgctgacatattcggcggtggggatcactagagggggatatcgaatgatcagtactgcggtgggtgtcgacgcgatgtgatttctgcc

SEQ ID NO: 715424 - DNA, 531 bp, Homo sapiens
ggagcccgttgacgatcgttggcgaagttaccgccagaggccttgccgcccttttggccagcgcgcgaagcccgttcccggtcattggcgaagttgcctgggttggtttccttggtgccgccgcgctggcggtttcgctcttggtcttgcgccatgtcgtttctccttgcgatggggtcgctggtcgcatgaatctttgccatgcctagcttccgagcctctgaatgatgagtctgctcaatggctttgccggcagctgaccaatggcacgaaactcaggcatgcacactccactgaacggcctccaccccgatcggcatttcgtcaatggcatcaatcagcccgttctccattgcctcgcgtggccctagaatccgcggataggccatcaggtagcgtggcacatccagcacctcggctgccccctcggtccgctcggtgacgatctgcgcatagagccgcaaatcgaaatccaggctcatcgcatactcgggcatccgtgaatggtccaccgaaccatgcgaaggccag

SEQ ID NO: 715425 - DNA, 354 bp, Homo sapiens
gaggaaagttcttagagttatttatattcttgttttcctcttagttagaatctacagtttaactttatctttaaattatttgaacatatttgatatgtagcttaaatacaaatgtttcagataacctctttaccataactaatcctggcaagcatggtctcttttttttgttggtgtttaaagcctgtaaacagtttttctgaatgatcatgaacttttcttggtttagcactaggatttagctatgaagagagctcataggctttcaggtgctaattgagatctgccctgttagagtcttggggtgctagattggtcacattgacaccagtggcagggaaggcatctatgagt

SEQ ID NO: 715426 - DNA, 330 bp, Homo sapiens
cagggtccggggcggaggatgctttgtttttttttggttttggttcctctttcccggggggtgggggaggtccacagggacttagtggggcaaaggcccaaaagtgccagcctggggagccgtttgggggcagccccttttgccccccccctcctttttcctttccaaaaatgccaggggggggggtatgctttcccccttccctcaaacagggggtgggtgggggggcttttttggctcaggagaagcctttttaaaaaaccccccccctcccgcccccctttttaaccccggggaattatccatagaattaaagtggccgcctgtcca

SEQ ID NO: 715427 - DNA, 167 bp, Homo sapiens
aaacaggctagccagagaattaccttcagctgtatcacgagacaagttaattcaggacagcagaagagaaactaaaatgttgcatctgccggtaccaatcgctatagtagtcgtatacatcactgccgtgttacacgtgtgactggaacctgctacactagctgcag

SEQ ID NO: 715428 - DNA, 767 bp, Homo sapiens
ggcctggtccacgtgcgtcccttcccgggatccccgacagcttggcgcccagccggctacgtgagccaaggcacccggatgtccgcgcccctctccgagtgacaagtcccggcctccgtgtcccgcagtgcccgcagactcgagcggacgtaccagcgcattgccatggtgactgtgtgtgacaactacgtgcgagtgctggaagggtcccgatggtggtccgggcctggatgcaggatggcctgagtccctgcttcttcttcacgctcgtgccctcgacgcggatggctctagggagctctggcacttggtgctggctcttccctgcagacgtccgggagcggccgctggtgctgattcgctgtcttggggggccggccctcgcatctctccctacgtgctgcagctgcttctggcgcacacttcaggcggcgctgccctggcccggcctggctggcccgggttgggcactgccctggggggccccactgccaaggctatctacttctggcctccgtgctggactgagtctggccggcgcctgtggcctgtggctgcttgtcgtggagcggagccaggcacggcagcgtctggcaatggggcatctggatccaagttcaggcacaagccctggtctcctgcttcctctggaactggggctgtttgccgctgagaacttggcccctggtgtcttggaaccagcccacagtggtggtgggcagggcagattgggccagcacggtcaggaaactggggtgctgcggatg

SEQ ID NO: 715429 - DNA, 262 bp, Homo sapiens
acacacagacacacagacagacacacacacacagacagacacacacacagacagacacacacacacagacacacacacagacacacacacacacagattggaatgataagtcatgatataatgcttttaatgtacaaccgtgagtcattataaaacaacagtccaagtcacatagcaacacaccgatcacatagcaacacaccgatcacatagcaacacaccgatcacatagcaacacaccgatcacatagcaacagtcgac

SEQ ID NO: 715430 - DNA, 421 bp, Homo sapiens
ggtgtgagcatagcgggggccgtttttaatagacgtaagtggttagaatgaggataactgtcagaatgtaggtgatgagaatgagtaggaaatttttttaattacgcagaagccaaaagacatccccaaatcatagggtgtgttctttgggaaggtacagctttatcttcggctgataaagtcttagacttgagggctttgggtcaaagatcactatcagatttacaaactctacattcaatagtgtaaaaaaaaacaggtacatggtagaaaaaaatggctgggaagaaaatatggctcaactattcacaggggatagttattggctgaggggtatggaatatggctgatttttccttccttggtatactttactggggttcaacacactggtggcagcactggtgctcgtgcgggggga

SEQ ID NO: 715431 - DNA, 103 bp, Homo sapiens
tcgagcggccgcccgggcaggtactggatgtcaggtctgcgaaacttcttagattttgacctcagtccataaaccacactatcacctcggccgcgaccacgct

SEQ ID NO: 715432 - DNA, 142 bp, Homo sapiens
tcgagctcggacccagaaagcctgggcatatgtactctgcatctatagcacataaatcacgtaactcaaattatccctttctgttcagggcacatgatctccttcaacgcagctacatctattgaaccattgagtatctata

SEQ ID NO: 715433 - DNA, 103 bp, Homo sapiens
  misc_feature (41)..(41): n is a, c, g, or t
gggtcgacacggccgtgtattactgtgcgagagcactaacngggtaccagtactttgactactggggccagggaaccctggtcaccgtctcctcagggagtgc

SEQ ID NO: 715434 - DNA, 203 bp, Homo sapiens
atgcattgggagaagctcagctctgttgaaatagctcccgttttttttcttgatgaccctacttagttcctgtgggctcccatagggagctgattaatttctgccaatcagaacccatccctaacacatccagattgatagtggctttgacctagggaagaagaggttcagcgaagaaaccccaccagttatggtttgagagt

SEQ ID NO: 715435 - DNA, 121 bp, Homo sapiens
gggtcgacacggccgtgtattactgtgcgagaaagaacaaatattgtactaatggtgtatgctatagacactttgactactggggccagggaaccctggtcaccgtctcctcagggagtgc

SEQ ID NO: 715436 - DNA, 1240 bp, Homo sapiens
aatttggatgcggagaggggggggggggttggatgaaagaggggcaggtcgtagtgcgcatctttggattggttgttatggagataagtcgtttgaaggttacgatttgttttgtagatgggagtgtctttttttagatttgtggtatattggtggagtctgggttcggatatcgtttgtagtagtttgagggcgcagagggggcttttaatgcgcttttggtggctatgtgctctatttgtcttgatttgttgttagccttgtccgtacttgtgtagtctcgagttcgttgtccctcttgtcaactgttgtctgacgtgtaccgttcgtgtatgcgcgttctgtgtgttgttctaatgctccgttctagtatgccacggtgtaccataattgcgggtgaagtgggttccttccttattatggtagtagggtataatgtttaatggatgattgaggtaagtaaaggttgatagtcattgttggtgttatatcatggagtaggaagtcggtttgtgctagaggagtgtagttttatagtttttaggtggtgagtattgctatgttagttgctcaggatgtccctgagagtatagaatttacatatcagtgctagagggtatagtgtatctattttgtaagtagtgcgtacttccctgttcagaaatatagaatacacgtttcgtgttatttaagtagtttgattagctaattcgaatcatgatggcaattatgaattctgtctgagaatgctatcatttgtaactgtatcgccctgtgattaatatgctgcattaagccacaggcagctgttacagataagctgctattgtttcactattgagctgttacattagttcaggctaaatgttgggagctccttaccacatccaagaataaatctggaaacacactgctgggatactgctgttagagcccttcttggccttgtattcccagaaatgagctccctttccttagcttagaagaatgtgaattatataccaggacatcatgattcagaaaacgttagtattactttcagcatagaatgcaattaactgattggaataattggacactctagactcattaaatgtatatgataacattattaaataatactatacattataataaaatagaaagcaaactaactataattagaagtaaaaatagtttcagacctaataaatataagaaatatacataatacaagctaactaccgataggatgtataaa

SEQ ID NO: 715437 - DNA, 98 bp, Homo sapiens
gatagtattactatggttcggggaattattatattaggtggtgggcactttgactactggggccagggaaccctggtcaccgtctcctcagggagtgc

SEQ ID NO: 715438 - DNA, 301 bp, Homo sapiens
agagagaatatcctacaggacagttctccttgtatactggcataaaggactagaatgtggattcatttctgcttgctttcgatccttatagtcctttatgctggcctcaaactggtcaagcacatgtgggcagacattcatgagctcattcaggcctctcggaaatggctcaacagctggaagggtaccctcgagtctgaatgcgtaaattactttggctctcgggaggactgggtcgtagtgtaaccacaaaattccccttccgggttcttcatgatcatgtaacgactcgagaacatag

SEQ ID NO: 715439 - DNA, 297 bp, Homo sapiens
agcgctcttccagtccaaaagcttcttgatacagaaaaaagagcctggatttacagaaacatatagatctggtttgaattccagatcgagttggcacctgtgaagtcttgaaggtattaattatcttcactacagattgtctagaagaccgttctaggagttatctgattgtagaagggtctaggcttgtcctcgtgtttaagctattggccaactgtccctgttgtagaaaactgataataataccaacgattgttgtccatggaaaggcaaataaattttcaacaaaaaaaatgc

SEQ ID NO: 715440 - DNA, 400 bp, Homo sapiens
acagaataaagctcacgctcatagccttcacaatagaatttttctaagcagttaaggaagaattaacaccaatccttaacaaactgtttccaagaatacatcaggtgggaactcttcccattcatacagaaacgggaggccgcaccccttaggaatgcacacgtggggtcctcaagaggttacatgcagactaaccccagcagcacacacagaaggcccataagccgccaccaggaggggttggttccccataccgtggcaggaaccagaggccacatgtggctgttcagatttaagttaatcaaaacggaacgttggccgggcgtgttggctcacacctgtaatcccagaactttgggaaagctaaagctgacaatatcacttggagtcaagacttcca

SEQ ID NO: 715441 - DNA, 361 bp, Homo sapiens
tctagagtatactagtaaatcggaaatcgcagtagtcagcgtatctctagacatccagaggcatgcgctttgaactcccaggcacaggtccatttagactccactgtcaaggaattgatagcagagctcagtatccaaatgcatgtatcaaaacaggttaatacattatgatttcccatttctcatatttaggtaaaacattgtcctataaactcggggttgccaacttgatagctcttgttatgttggccaggtgcctccataaaattagatgcttgagatatcagatataccagctgtcctggagagcagaaaagtttcctatcttattgcgccatttttcccataaaggagtttttcc

SEQ ID NO: 715442 - DNA, 159 bp, Homo sapiens
ctcattactattcgtcagcaaactcaaactacgaacgcactcacagtcgcatcataatcctctctcaaggacctcaggagtcctcatgctgttagagcctcatggtgtgaggtacagcgctccacttgtgtatgatgctcatgtgtggggcctgggtga

SEQ ID NO: 715443 - DNA, 154 bp, Homo sapiens
  misc_feature (50)..(50): n is a, c, g, or t
  misc_feature (71)..(71): n is a, c, g, or t
catgaggccgctctgagacacttgtgggccttagtgggtgtcccagcggnagtgcccgtaacggccagagnagagggagtgtcttcatggatttggctgtgctgcgggacccagaagacaagtgccatttccaaaggccccagtgcagggttag

SEQ ID NO: 715444 - DNA, 689 bp, Homo sapiens
  misc_feature (582)..(582): n is a, c, g, or t
ccccattcctataccttcaatcttctgaggcaattctccaacctaacctggggttgaggagggttgctccagtttgcatacctgcttcttagacaaagctgaagtgtctgaataccaggatttctacagttatacttcatgaaggcaaaaagctatgaaagaagttaagcgtgttcacagtcaggatgtggttagaggtgagacgggtcaaaatggggagcttaatatgggccagttatcatcagaccataagaaagtatgatagtgtacatttcccataagcaattccatccagatttttcactggattatttagatttgcttgggagaaatggtatgggtttctctcttatcagcctcctgtgcttttttcagtgatctttgggggacactgtgcagtcattaagatttaaaattttgaagactattcaacaacaaggaaaattattatgagacattaaatgaaaaacaaacataaaattgtatctacactgtgataactattaaaacgtatccatgcatatgcatagatgttggtaagaaacctcagagttgtatttggttgggtgtcaagagagtgtnagggcctttctcataatggtggtttcattaaactttggttgaaccaagaatattgatacaataccctattttgtggattttcatagggcatctcctgatcagataaa

SEQ ID NO: 715445 - DNA, 84 bp, Homo sapiens
ctgttggttaaaaaaaaaaagccagaccatagtttgactggtggcatggaatttgtgtatccaataaatgcatttgcttatttg

SEQ ID NO: 715446 - DNA, 341 bp, Homo sapiens
catcgttgtgctgctttctgaattcgtacatactcatgtggttttctccataactagtctacccagttactaccaaggagctaaggaaagttcaggaatactttgaaaagtgtcgccataacatctccaaacatgcattaagtttaaccaaaagctgcaatattccagattcttaaattctcaatggcaaccaatttatgctcaagttgaaaatctggcaagcaccgtacgccttcagcacacgcgtgagtccggattttcccatcacacacacgctctcccccgtccaaggtgcctgtttacttctggtctacgcgtgcctattaggcacgcgtgcctaa

SEQ ID NO: 715447 - DNA, 154 bp, Homo sapiens
ctgttttgaggtcctgctggtgcaggcagtgatctccttctgcatctgtcggcaatgccagggtacatggtggtgccgccagtacatgcactgtgttggcgtcaggtctttgcggatgtccacgtcacacttcatgggaactcggtcagaggtg

SEQ ID NO: 715448 - DNA, 1255 bp, Homo sapiens
caatcgcatccatagtccttctaatagctatcctcttcaataatatgctcttccggacaatgaagccataatccaatgctaccaattcagatactcactcatggtaataagtcatagatggactatagacaataagaagctaggaatagtcccccgtttcacttctgaggtcccagaaggttacctaaggcacccgctctgagcatccggcgcctgctctccttctcatcatgacaataatacatagcccccgatctccaattcatattacgcagaatcgtctctcctcagctatgacggtaagccttcgtcgcttcgacttctcgacaactcgttagtccaatcagtagcaggcacgttgacggtggacttaaaaccgcaagaccccaagtcttacgccaaaagattcgtttagctactatcctccgtacaaactttacccccacgataagggagtgagcatcatagtatggcagctatcttacccgtaacaatgcactaacatttaacctgtctctctaagtctataaactatttgtataattaatccctaaactatcctaacccgcaaatttcgcttaactaacattcaaagctttagaatcgttccaatggctaccaactagaatcctttaataacattatcttccagcaccattgaataaaccaaggcttaaccatttgatcttataatagcaccccttttgactatcgcaatcacactcccttcccattctttcccattgagcgcaggccattagcccccctcggtgtaataaaccgcgcggcaatattgttggcctcaaaaagtggggcccaattttaactgcgcaaatgacaagttccacaggacatgacatggaatttaggcctcgaatctagtccccgccaacgcatacaataaggcccgactcgaattcatccctttcgctgtagaacgcgtctaaccgttcttagccatatacgcccataaaatcttaacttcccaaatccttaccaattcaaacaatctttaacttccccccatttattcctaagacaaagcagtttaatacattcacacaatctggaccctggtctttggaaccatgtctccctagaaaaacacagaaaccactatatctcccattaccaccaagaattcatagatcaagacagcgtttagcccaacaggctaactttcaattacatatattttccccccatattttataacaacaacacatactagcaacatattacaaaaataccatac

SEQ ID NO: 715449 - DNA, 480 bp, Homo sapiens
aatcactcacgtcagagataggaatggaagcacatactgtaagcattgagtctcatctaaaacatgaagtgatcttatctcaccagaaatgccaatctcttatgtagaatagtccagtcttcaagatagatggtgcagggtgtgcagcaactttgaccagaaagctccaattttctagcaagtggtcttttacagtactcttccagacttcaaagtttgactccctagagatgagtggatgactgcactaataatagcttatataccccatctcagcctcgtccctcttagcttgaacaggtagtgactagaggctgtgtgccatgtccagaaacactagtctttacctttgagcagtagaatcttcaggcagaattagtattacatacgtagggtaagtataagagacatagtctccctctgtcgcccaagctatagtgatgtggaacgatctcggtacattgaaacctatgcttcctg

SEQ ID NO: 715450 - DNA, 392 bp, Homo sapiens
gaaagttaaagtggactaagaaaggccaattctcacgtaatttgaatatatgttgctaggttaatggatttgactaaaattttgtggagccttagaaataatttctttacgtttgaagaagagtcaattattaaaaatggatatctagatactgagaggttttgggagaaaacaatcaacagatcacttatatcggatctactgtttatgctctgttgccactcaatttatcttggccaaaatgtttatatctatctaatacttgcaatgaattgtcattccgtgggggattgtttattaagtaattattcctttaagacatagcaagtgggttgataaaaaataatccatcctttcctaaggccttatgaaatttgccagtatccggtgat

SEQ ID NO: 715451 - DNA, 572 bp, Homo sapiens
  misc_feature (12)..(12): n is a, c, g, or t
  misc_feature (41)..(41): n is a, c, g, or t
  misc_feature (97)..(97): n is a, c, g, or t
  misc_feature (149)..(149): n is a, c, g, or t
ccaggaagatcnagcaaggccaaaaatgtctgttcgtatgntgacaggcactggcgaccttcagcgtgacgctgatgacttctgagatgtgacaggntcctcaacagctggcaccaacatgaccctggatgcctggcagtctggggctntccgaattcggcacgaggagagagagaagagaactagttctttaagtacaatttaaaaatcattgaaaatgtgatccacatcatagccattcttttcctcagacttagtcagacaagcttctcagagtggtgggatggggattagaataccacagacactctgcagtcctgcaggcagtcggccccaggacaaccactgctgtaggagtttggggccagggtggcatggttttcacaaggtacacgtgtcacgtgtttgtttgcctgttgacattctgaaaacagcaagtttaccaattgcagaaaatactttctgttttctctttcacatgctcagaaagcttctcaaaggtatctggtcacagcagcttccttcctgttatagaggtaaaaggtgttcttatatttaactggtaacaaaag

SEQ ID NO: 715452 - DNA, 203 bp, Homo sapiens
ggcccttaaagcatcagcaggcagacacttgcttaggtgtcaaggcagaagcatggttcaggtctcactggcaggctccagtgttggtgcagtcagttcccttgcgtcaggggcagggtcagcactgtctcaacctgtgttcctgtgctcctggccttcccacgtgtcagccagcatgctgcagctagtgcagtcagtgcagc

SEQ ID NO: 715453 - DNA, 137 bp, Homo sapiens
actgatagagccaataaagcctcttcctcatccctctttaccgcttatcactagagacataatagaaaaactatataaaaatcgaaggaatgtcttaaactccattttcccatttacatcaatgcgttggcagcagc

SEQ ID NO: 715454 - DNA, 144 bp, Homo sapiens
gcggccgcctactactactactactgctcgaattcaagcttctaacgatgtacggggacatgtttcttaaaggcattttggttttttaaaatctgtacagcaagagcaactttttctgtcaaataaaaatgagaaatacaaaaa

SEQ ID NO: 715455 - DNA, 1209 bp, Homo sapiens
  misc_feature (993)..(993): n is a, c, g, or t
tgaagtggactctgagtgtgctacctgtctacctgacactgctgcgtgcagtggtgctgtggagtgtgcatgatgtgtgcctgctgtgagtgcctgcagttgcaaacatgtgctcatgagcatgagactggctggaaaccctgttctgcctgatgcccatgctgatgcttgacaacccctttcatgccaccaccatgccatatgatgcctccatgcccctgccccattgcctccaccctcatgctccctccttgcagccctctgatgaaatgctcagccccacatgaacctaatgaactatgtgctcatacatgcatctcatgtgccatcatgcttgcatgcatgccacatgctgatgctgctgaagaaacaggaggagctcaacctggaatggcacgatgtgagtttggacctgaatgtgtgatgctgagagcttgcagcatgctgccctgggtgtgtgcacagatacatcgacagaacaattggacccctctaccttcttttttgtcccagttcagccctgctttttccaggacatctccatggagatcccccaagaatttcagaagactgtatccaccatgtactaggctctggatgtgcagcacgctggctcttctcctgaacttcctcgcctgcctggccagctacttgtgttgaaaccaacaaatggcgcaggcttagagagcttcatatacatctgggtctccttataactccttgctcctatgtatgctggatacgagccatgtataaggcatacaggagatagagtcattcaataatccgtatactactaaagattacttaccacacgatttgctccatgttccctccaatggcaaatgtggatattcccagtgttgggcatctaaagctgcatgcaatatctgacgtgcgagatgcacaagtgaaccacgaaaggacacgagacaacgcacgatagatccaactcaactatcaactggagtagcgtgcactctacgttcgccnctcggacagaagcaacctacccaggcagatggcaccattagaaaatgcaacaaaaacggcgtggtactaaaacatcatgagaaatagatcacaagcagacggtcgactaacgtgcctccacaactagacacagaagttaggcacacactagcgtgagatgcatcacaactcctatatcttgtcgatcttctcgtctctgttgacgctcacgcgacg

SEQ ID NO: 715456 - DNA, 1836 bp, Homo sapiens
catttgactcaatgagtgcgcctacgcggggcctcatcgtgcgagtgtctgtggctgttatttcagataggggatgcgacttattgaaagacgcccctgaaggcgtatggttggccgcaaggatatgtgtctaactgtagaggagactagagtgtggtggccagacagtgaatagcctgcaggctgctagggaccatgataggcggactctgaaggtgcctcgaagagacggcactcagtcgctctggcatcctgaacctagccaacatagatggaagcttcggtactttgatcaaccagtcacagagacgcaaacatctaagcgatgtgtgccacgggcgtgctgctgattggcgctgtgcgcacaaaccgaagtgatgtctggtagggccgctgatgagacatgcgagtggagcgaatccctttgcgccatgagtcgcaaatcctcgcacacgcgaaactagggcgtagatcaagcaacctcgagccgttgcggttgacctacattggtccacattttgctagcgaacgatcgtactccgagtcgttggccacattgcgacccaaggggttgccccactttacacgccctaggggccagaatcgggggcatcttggcggcaattgattgggggaagtggagggcaagattgttgtgagaatggccagagaatttcataagggtcccaagtggagtttgattgttggacccttgtgattgtagggcactggtgcaaacgcgttggggagggagaatggctttgggaagagcattgcttatcagggggaggaatggagggcatggggaagggaaggacgtaattaccaagctgtgggtagtcggcgcagtgaactcttgtgtgcggtggggcacttcgaattacggtaggcggacactccgacatctgggtgcactaaggaccctcccttcgaggaccatgtgtgcagctggctcaagcaaggggatcgtgtgcccgaaaggggtcccgataagaggcgcaagaaacttattggaagggtatgtggtttccacgtcgacgcatggggcacttatcccttagggacactccatttacaagatagatatgtgagtataacccacacgcgttgggccaggggttgattcctgggcacacttctcgcgtccccaatgtcgagaccacaatcgaggagccgattggggttgggaagatgcggaccacaacacaacccttctttgacaaccgaggatggccatatcgcacaggaggagatgtgagcctgggaggatgggccgcaaagacggagcgacaactgcaccattggaaagagtagtgacacaccctctttaggaacacacggacgtcaggttcgcacccatccgagaccccgggtctagagaaattaggacgagacaacgacaccccgtctagggactgtggagcaaacagcacacagcgacgagacacgagagtagagacccttccacagggcagcagaagcgaccagatgggtgagagaaaattgccacaaaacgccaaacgcacgttgggaaggcacataccagcagaaagagcaagcagcaggcgcgacacggagccacaccgaggagaaacacccaagcatgcgcaggaagagagaaaacagagtagagagcagcaagagcatcagacgcgaaggaaaaaggagagagaaaaaccgaacaggcgaagaaaacagagaaacgaagaagaccaaacggcgagagacacagaagaggacgacgaaagagaaagacactgaacaagaacaacaagacgaaggagcgaacagcaagcagaacagcagcaacaccctacgcacagtcgacacgccaaa

SEQ ID NO: 715457 - DNA, 907 bp, Homo sapiens
  misc_feature (709)..(709): n is a, c, g, or t
tgttgtggcaacgatgccgttcagcagtatcacttcgaccatgcacaccgaggccgcaagagacctctgctatagttctggtgaacgccagtcatcaagaagctgctcgccgagtcattgcaactcgagacgacattgggtcggcgtccgttaatcatgctgaatatcgtaacgagcgtatgtgtgtgaatgctgctcccactcctgcggccgatgctgagatcagtggcccactcgtggtgcctgcgtggtgactgcagcgtcgctgccgtgagggcctgcgcgtttcgcgtggagacgattacaggagccacttagctggaatgccttggaccacaatggaatcgtcattacaatggcttgggcataggggtctctcgtcgtacacctgccgtattgccaattcagaaagaacgcaatggaatcccgcacgcattgggtagccggtcgattgggcccagaagtactccacagcccggcattcgattttttatgcccccaaagtcgtggccattgccacccgagaattacataccacgtggatacatggtcgcgcatctcagtgggagaccaaggcgcacgccaaggccaaaaatacataccccggaaaacacacataaggcgtgatgtgcttgagatactctataagacgaggtatatgtcactccacttggaggcgcgagagggcaaccacaattggctgctaagnacgaacgtagtaaattacgcaccctcggtgtggattgtctttatggtcgtttgccacacaggcaaagtcgtgttcccctcccgataaggaagaaaagtcgataggagtcccgcaatgttttatgcacatatagggcaatcacgagggtacttttgtaagccgccagcagcaggatcatttggcgaagaaccaggcact

SEQ ID NO: 715458 - DNA, 457 bp, Homo sapiens
  misc_feature (27)..(27): n is a, c, g, or t
  misc_feature (48)..(48): n is a, c, g, or t
  misc_feature (59)..(59): n is a, c, g, or t
  misc_feature (414)..(414): n is a, c, g, or t
  misc_feature (436)..(436): n is a, c, g, or t
aaatacggccacaacactcttatactngaaaatagccctttgcccacntgagtcacccnagaaagaggtaagcgtgtgttactaggtgatcctccaacttcaaataacttcattaggtcaaagaattgtccatgaatatcaccacatactgtgattggagcatctacttctatcatagtcttctcttgcctcaggatggcagccccatcattgattatctttaaggctacttcctcttccagtcgtccttcctttaccaaatggttttttaaaacatcaactttaggtttcccattctcaaatacttccttgaaagtaagccgttgggttggaggaaaggggacagctttgatgacgcggtcggtggtggagaggtggaagcgcctcccggacatggtcccctcggcctcctcngagctccaggagcccgccggancgttgcctacgccgcggtcgc

SEQ ID NO: 715459 - DNA, 913 bp, Homo sapiens
gtgtggggccccggccccgtaagggccgcctggttctttaatggaattttttgcccccgccaagcggtttatacctattgccgcccttgaccgagcagcacattgttctcgccacggtctcctgctcctctaccacacgactgcccagggggcgcggtattattcctcgccccaagcccgtgtggttcgctcccacaacgagttacctcgtggcccgcccatctatggggccgctccttgctctcttcacgtcccccccggtgatgtcaatgctgtcgctggcctcgcgctcgacctacttgcgtcacacagagagacgctcttccaggacgggggtgcgacaagaccgctgcgcaaagcacaggcctctctgaagagcttcacaaacacacctcgctgtacacacggaacgcgcaagacaaccctctcttgcacgggcgttctgcggcgggaacccccacactacacccacacacagtgggtcccccgcgcgggaagtcgaccaccacacacgcacattcgtggtgggacgcacgcggaggtcgttgagacagcagcacgcacgcggctcgtgctgaacagtgctccgcccccgcccggccgctcgagggtcaacccagcgcgcacattatgtgcttgctcggtgcacacacgcgccgactgttgagtgagggggcacgctctccgcggagcactctgatgagcccacatgcaggcgggccggcgacgagaggcgtgactccatgacctcccaaggggtcctccgaacgccgaagcccctgaacgagcaggacggagcagtggggacgcgcggcaggccacagacccaccctcctgagcagttcgcccctagggcgcgccacacaaccctcggtcagcccttggggcacccgtccccccacaataggacaag

SEQ ID NO: 715460 - DNA, 148 bp, Homo sapiens
ggaggcctcgctccggggccgacccgaggccacagtgcctgccgcggtagaccgggacttggggtgacgggcttccgggctcccgagggatggaaggggtctaagacgtccaacaacagtcaccatgcaggtgagcgtcggtgttcca

SEQ ID NO: 715461 - DNA, 1096 bp, Homo sapiens
ggaacagagctagtgaaacggtagtcggccaggtatggctctgaggccccaaggcccccggatacctcaccagagatgacggtcttcaaggcagccagcccaggacacggccccacctgtggttcgttccagaattgtctagatggcggccgtgcgaccaattttcccccggtgagtatgaggtccccaaagcttcttgctgcgtccacgcgacggatttctgctgcgtgaaaagggatacgaggcccacgggacttatgtgtctaggcccattcctgttgaaacgggtactcatcgaaaccagtttggatcatgccgcatgtggtcttgaagcctgtgttgagccatcgtacgcttctctggacaactcgtggggggtaaccgcagaagagagttttaagagttagcacggcggatggacgagctgagggcaaccgcataaaaatctgggggccgtggctcgttcgagaactaggggctcagttgacaccttgaagatcgcatcacgctatgtcgcggtcagcccggttgtgccctttgggggatgggttgccacccagtcttgttgggggtggaccacgatcgcctggcggtgccgcagaatctttggggcgggccgaggaccatgatgttggcctcacgtagttacccccatcgggggacgccgtgaggtttgcgagctaggatgtctcggtggggccctcgacattttcggtcggaatgtgggtacgtcaagggtatggtttgcgaatttaaccccagatttctgaagccaccgtaggactttggctgtggcccttcgtccgcagcagggttttttttaaactcggggccacacgggccagcttaagccccaaagataccctgcgtaccagtatgtgaagtctggcattgctgggcgcacagaaaaaccaagttcttacgggggacccgcggatcgtgtggtatcagtggaggcatacaaaacacgggcctgtttcacataggtaaatttgggcgcctactcaataagagctggcagccctccgggctccaacatgtccctaacgaaaggctacacgagcacccaacacgtttactggtgtaaaactggacg

SEQ ID NO: 715462 - DNA, 212 bp, Homo sapiens
  misc_feature (194)..(195): n is a, c, g, or t
ttgcaggacccttaccaggacagatcgacagacgagggctttagactaaagtcagagacactactgttaaaagtacgacagagtaaaagaagccagttaaggaagactataaagtaggaggaaacatgggaatgtggtgtcttggaaacaacaatgttcaaggacaggaacaattgacgtgtcaagctgctacnntggggaggaagacacgc

SEQ ID NO: 715463 - DNA, 262 bp, Homo sapiens
gtgacgactagagagactgggtgagtaactcagtgaaactgctgagttatggtggtgatacatgggtgcctggaacgtgactcccgttgtcctctggggcatggttggatgagtagctgtggacgcacagtgagagtccctgatgtggctggggagtgacgacatagagagagaccgtgggagtaagctgagtgaaactatatgagtagtgtggtgactccgggtgttgcctgggacactgattccatgctgaaactgtggg

SEQ ID NO: 715464 - DNA, 142 bp, Homo sapiens
ggattctggctgtgtctgtatcgactgcgaacagacgacatacatggtgttgcagcctgccttctgggttgcccataacctggtcatctctgccaaaatggacatacagtaacaaagggacctttagtggcccactacaaaa

SEQ ID NO: 715465 - DNA, 132 bp, Homo sapiens
ggactcaagcgatccgccagcctctgcctcccaaagtgctgggattacaagggttgaaccgccccactgatcaaggggaacatattaatactttgtgtgtttctttgttttgagatggagtctcactttctt

SEQ ID NO: 715466 - DNA, 175 bp, Homo sapiens
  misc_feature (4)..(4): n is a, c, g, or t
  misc_feature (111)..(111): n is a, c, g, or t
  misc_feature (115)..(115): n is a, c, g, or t
cganagagagaagaaacagaaaaagaaagaaaaaagagaagacatgagcatggtgggcatggggacagatggcaatgttaaatagaatggtcaggggtgtcctcctaagtnaaanttgagcaaagacttgacggaggggaaggcgttggccaaggtgctgagggacgaaggattt

SEQ ID NO: 715467 - DNA, 90 bp, Homo sapiens
ctcctatttttgctacttatgttcttgcttatctaaaagtagttcccaactcagtagttaaaacgatctttaaaaatggacatcagacca

SEQ ID NO: 715468 - DNA, 392 bp, Homo sapiens
ctatccagacaaacaagcatcttcctatacagtaagtgtctcaactcaaaatggcacctacaatcacagaatgagttacctataaagtgtctgtctaaagctatcataaaatcctcatgtattctacaactaggttgcaagtataacagaaaaacctataaatagtacataaaagcaggtttcttaaaatttatgacacctacagtgtgtcactatagacagagtattcggggggctctgtgacaatcaaacatggctgccatgagtaagggagcgtgtcccctgatgcgcagaaccgaagcagtgattatgcctcagcctcgagctcaccgcacagcatcctaccattccaaatacttgggactttgagttgagttgagaattactacaag

SEQ ID NO: 715469 - DNA, 110 bp, Homo sapiens
  misc_feature (53)..(53): n is a, c, g, or t
gtggtcactctagatgatcccgacagcacagaggaggagaggaggcatccatngaatgagaccattcacccccaaccagcactgcctcctctcctcctctgtgctgtcca

SEQ ID NO: 715470 - DNA, 109 bp, Homo sapiens
  misc_feature (38)..(38): n is a, c, g, or t
  misc_feature (50)..(50): n is a, c, g, or t
gcacctacacacgccccagcaaggcgaagttccccccnaatgggtggaantgagcctgcctcttggaatagaatcagactcacagactgagttcccactgctgccagat

SEQ ID NO: 715471 - DNA, 1811 bp, Homo sapiens
  misc_feature (125)..(125): n is a, c, g, or t
  misc_feature (1532)..(1532): n is a, c, g, or t
  misc_feature (1684)..(1684): n is a, c, g, or t
caggggcggtccttattgtcgggctggttggttggtctgacgctttggtcgtgtgtatggtgattgtttttttagcgtccgtgttgtgaagggggcgctcctatgtgtttggatgttgtttgggnccctccatcggtgggagagcgtgttttgcgtgggttgaaagacgcgacctggtggtgtgttttagcctgcgtgggtgtttttgtgaggctcgtcttgtccccgcgaatgtgtgggtgccgcggggtgtgccgccgctgtggttggtcgcccgggggtctcccccgcgggggtgttgaatgtggtgcctcgtgtctggggggtcgtcgattttttgaagggggacgttgttggttgttgtgtagacatctgcctcgggttttgagttttgttgggacgtacaatttgttgcccgcctcggtgtttgaggaacccatcttgtcccttgggatttgagaccccacaatagttcttgtggcggatagggcacctacgggttatgttgtgtgttggagaggaagcagtgttgtcccttgggggtggttggaaagaagtgaaccggcgttttgtgagaaaaatatgtggttgtgaattgcgttactccccaaaggggcgcccacatgggggggacaaaaaaagtatgttgccaacggaggggatcagctttttatagtgaaaaatggcgtagtaatctaacacccccccttgtatttagggccgcttgtgttggtagaacaaccccctctggtgtgtggtgcgccccccccactattgttttataaatgcaagagttttaaccacttttgagaatgtagtgtcttttggggggttgaacaccacgttttgtggtgaagtacgccgccgcgttctcgccaccacgtggtgttgcgatcccaggagaagtgtgccgctaacgacccccttttgaggagattttatactaaaatggtgccaccctcctcgtgggcgcccccacatgtattttgtcgtggtgcgttcttggagaagaagagtcgccgcctccttgggaatattgttttacgccgccacctctgaatttgtggcacacattatcaccccagggccgcacatgtataactctttgttgccaccgcagcagagttgttattatttgttgtcctcggaatattatgggggggcaaccctccctgttgtgggcgagttgttggaaaattattgttatatgatggtgtatgatgttaagatttgtttgtataatcgtgtgtttgtgtgtagagatgagtgtcttcggggggcgccgtcttgtgtcttatattcaccacccttctcttttgtcgtataatgtcttctgtgtataaaatgagtatatttgtgggtgtgtgcgcacagcatttttcttgggcggtaataaaacgacgtctctgtgtgtttatatacgagagtatccttttgtgtgttttgtcgagaaagtgttgtatacgccggttgcacacattttcgcgccttgtgtttataatgggacacacatggtgagaagtgtatatatnctcggtgggcgtatatcgccaccacagcgtttctacacctataccgcgagagttttttatacttctgagagttatgtggccactaaccacgagccacctcgtaatgtgttaactgttctgcacccactttggggagtgtggcccacttcttngtgtgtgcaccacactaagtgcaccactttcttgtgtttaaagtggcctcttaagtgtttaaccacgttcacctcttttaccgtgctatttactgaagttatttattaaatatgccctaaatactta

SEQ ID NO: 715472 - DNA, 1645 bp, Homo sapiens
  misc_feature (1026)..(1026): n is a, c, g, or t
  misc_feature (1517)..(1517): n is a, c, g, or t
  misc_feature (1585)..(1585): n is a, c, g, or t
  misc_feature (1604)..(1604): n is a, c, g, or t
  misc_feature (1623)..(1623): n is a, c, g, or t
tcatcacaacacaaaaacaaacaggaccccgccctgttttaatgcccttgcgtggggacccgaaatggcgggggcttgcttggcgggggagacgccagaaaggcgggggcttgcttggcggtgggagaaacgcgttgttccgggccgcttgcactctcttgccgcaggggctctcttgtgagattggcgcgctctccaccatgttctcacggtgtcttctcgtgtgtgctttctcgggccaagccaccgtggtcgccacgtggtggccgtgtctcacaccatctcacagcgcgtgggcctcacgccctgtgtgtgggcgagacactctctctttctgtgggccccattgtgtgtggccacggtgtgtccccagcgtgtgcccgcggtgacaccctctctctcacacagagacagctggcatgtgtgcgtgctctcacaacccctgttgggtgtgcgctccctgttctcgcggtggatctcagcgtgtgtgcccgtgggcggccagtgtgtggacagtgagagacccctattgtgcgaagcggcggagattctcccgagtgtggtgtcgcccctctcccttagtcccctccgtgtttgagaatcgccagcctccgtgggtatcaagagaacaccgtggggcccccgtggtgtagccccccacaaaacaatagtggttcctcagtagggcgacgatgacaaccaagaaggggggggcgtgttatcccaccacggtggtcacacacccagaagggaggcgctccgctgacgaggggaggactccccccaagcacaacgcaggtctgtatgcacccacatcacccacttcctacagacagcgggggagggagaggacctctccccgggaggggggcccccgccgacacaacccctcgtgggtggggcaccacccgcgtgtgatctccccatctggtgtgtgcacacatcaaggtgctgcgtggaggtgcaccaacggatgatgagcaagaacgggtgcggcggacaccccctactctctgggagtatggnaatccttcccacagaggggggaaaaaccttactaaagggacacatccccgggaaggagggagcagtgtcgttcgcccagatagaggagcgagccctattctcacatccccagcgcaataggagtcatctctagcagaccaccacctactctagtgttgtgatctactatccggcccccccgcatgggtacactcccacctggttggtgtgctccactatataaaccaggacagggagtgaggtagacaacacttcactccccccacaggtgcatggctagtagtaacacaacgctcgacccataccatgttggatagacttatcgtgggaccaccctctctctcgtcacccacaatgttggaccaccgatgaagtgatggtagagaaacccacccttttcaaacaagatacccagaatagagtggttgttgtcggcctcccccgcagtagtgagatcatcacacccctgcttttgtgtgtatgagagactnccccttctattttgtcgtgatgacgaccaacatcacacatgtgtttcttgtggttgcgaaacctgacntcgaaacgtaggcagtganaggactgctgtcagatcgntcagatgatcagacaccgcacc

SEQ ID NO: 715473 - DNA, 207 bp, Homo sapiens
gccatcgtcaaaagaaatgaataaataaataaaaataaataaaacaaaaagggagacccagaccacccacattcttctaggccaaaggagcttggcaccatgcactgtcttaccaggcgataggctgagtttctcagtcctggagacgggtacaagtgagctcacccatcctccatgtttgatgccaggtgagaggtccatgtgtaa

SEQ ID NO: 715474 - DNA, 904 bp, Homo sapiens
  misc_feature (904)..(904): n is a, c, g, or t
ggtctttcccttcgggtgtggtgagtaaacgcagttgtcgtctcttgcgggtgccgttgctggttctcacaccttttaggtctgtgctcgtcttccgtgccgagtctctctttttcgttgcggccactgaagatcctgtggtggccatgtgggccgcccgcgccgcgccgtggtgtaccgggtgatgtaagaacaagaccgtgaccaaagtgctcgcattctgtccgaggtgtgcctgatgtccaagattttcgcattttttgagactggggcgggaaaaaaggcgcaaagtgtggatgagtttccgcgttttgtgggcacattgggggttcagatgaactatgaggcagtgtcctcttgaagccctggagggttggccgaaatatgtggcacataagtaccactggtgaacacacagtttggtgggcaaagatagtgtttccataatcccgggtgcgggtccacccccttcccacagtcatcccggatcaacaagatggtttgtgcctgtgcttggggctgacaggctccaaaacagggcatgcgagtggcttttggaaagccccatggcccctgtggggcccgggttcacattggggcaagtatcatgttccttcgcaccaaggtgcgacccagggcatgtattgggggctgggcaggcagttaaggtactgggcgcgaagatcacatttaagagtggggtagcagtcaagccgttaattgagactgttgttgaaggggcatccaatgtgggggtagtaatccaggttggcttgaatgggcctgacagagggcaagtgtcctttaataaaatttttgggaaaaaaaaaaatagtggggggaataattgggcgaagaataatatgttcaaggggtctgtgcacatgcgttggaaggaagaaan

SEQ ID NO: 715475 - DNA, 476 bp, Homo sapiens
tgaatctagaggatcccttttgggctcattcaggcacaattggatgaggcagtcagtctgtcagctcggcccaccagcaggtcgccggtgggggggtagcagcttcccttggaaacagccaggcacatccggggcaggggcctgtgccagtgtggcagccagcacgcttagcagtcggcccagtcgaagttcccaggggcagaggctgtcccttccctctttcccgtgaggtcagctccatccgtgagagggagggcggccagtttctcctccccgaggctgagggggggaggggtcgtcccaggatcctcgggaactgcatctccagatcctgaggcttgagcagaggggcgccctcatagagccacagtttgaagaacgctgtcccttgtggtagacagccacgtgccggttgactgagaggtgctgagcaaatccggttaggcccggcctctggctggaccttcctgccccct

SEQ ID NO: 715476 - DNA, 527 bp, Homo sapiens
attttacatatacaaaagtatgagagagccagtagtgttcaagaaattataagcagctttctatcatttggtatataaaatgttatcagatactggtggtcaatgggattggacagtgatagacagtgggctaggtcacagcaggctttgtgtgctataccatggagattagattttatcctctttgcaaataggagccattgaaaactttagctcagaagaatgatgtaagatttgcttatcagaatgagtattgtgagaactgtataagtggtagggtagccatatgaggatggtgaaactttaagaacaaagactccattaatgattaggtactgttacaattgttgtagatgaaatatggatctattatagctggttctgttatgctttcctttgcttcctttacttcagccttggcagcctccttgatcttcctcatacacactaagcactctccctcctcaggtctttggatttactgttgcataggtctgtagtagtactgtttgcttacttgccttgct

SEQ ID NO: 715477 - DNA, 256 bp, Homo sapiens
gtgtcttggtcatagctgttcctgagtatccccctcttgcagctgctgacaggcacacgctccctcttccagcctcctgtgttgtgttccagcgccttccctggttctgccttgccgcttcacattgccttttctctctctctattttgtctcttccaataacacctgtcattgcatttagggcccatcttaagttcaggatgatcccacctcaagacccttaattacatctgaaaaaacgctttttccaaataaa

SEQ ID NO: 715478 - DNA, 376 bp, Homo sapiens
  misc_feature (27)..(27): n is a, c, g, or t
  misc_feature (220)..(220): n is a, c, g, or t
tgcgggcctgttttccaggcactttgngaggctgatttgagggcatcacttgaatccaggagtttgagaccagcctgggcaacatagcaagactccagctctacaaaagtttttaaattagccaagtgtggtagtgtggtcctgtcatcccagttactcaggaggctgaggtgggaggatcacttgatcctaggaggtcgaggttgccctgagctgtggntgtgccactgcacttcagcctgggggacagagtgagaccctgccttaaaaaaaaaaaagaagaagaagaagaagctgaagatgtaggaagcatctacatgggggggggcaagaataggataaaagtggcctgttcagattctcttctgtgcaccat

SEQ ID NO: 715479 - DNA, 421 bp, Homo sapiens
gagatcgcatcattgcactgcagtctgagtgacagagtgagactccatcccaaaaaaaaaaaaaaaaaaaaaaaaaaaaaaatgggggggggccgcgggcccccggaaaaagcttttaaaaacacacatcgcggtgggggcgcgcgggggccccaggagggtaagggaaaccgtggggcaaaagcgggtgttcccagggagaaaccgggggccaggaacaaggggcgggggatttctccccacaatataaaaaaccgcgccgggggggggaaaccgcggagcgggtttggagaaaaatctcccaaagaggggaggggttccggaggggccccatacggggggcctctatataaaaagggagaggccacaaggaggaggcccgagaattctcaaaatataagcgcccccgcgcttcgtgggg

SEQ ID NO: 715480 - DNA, 894 bp, Homo sapiens
  misc_feature (17)..(17): n is a, c, g, or t
  misc_feature (109)..(109): n is a, c, g, or t
  misc_feature (141)..(141): n is a, c, g, or t
  misc_feature (191)..(191): n is a, c, g, or t
  misc_feature (194)..(194): n is a, c, g, or t
  misc_feature (209)..(209): n is a, c, g, or t
  misc_feature (217)..(217): n is a, c, g, or t
  misc_feature (219)..(219): n is a, c, g, or t
  misc_feature (252)..(252): n is a, c, g, or t
  misc_feature (255)..(255): n is a, c, g, or t
  misc_feature (286)..(286): n is a, c, g, or t
  misc_feature (289)..(289): n is a, c, g, or t
  misc_feature (292)..(292): n is a, c, g, or t
  misc_feature (328)..(328): n is a, c, g, or t
  misc_feature (437)..(438): n is a, c, g, or t
  misc_feature (487)..(487): n is a, c, g, or t
  misc_feature (498)..(498): n is a, c, g, or t
  misc_feature (535)..(535): n is a, c, g, or t
  misc_feature (556)..(556): n is a, c, g, or t
  misc_feature (561)..(561): n is a, c, g, or t
  misc_feature (586)..(586): n is a, c, g, or t
  misc_feature (588)..(589): n is a, c, g, or t
  misc_feature (617)..(617): n is a, c, g, or t
  misc_feature (625)..(625): n is a, c, g, or t
  misc_feature (629)..(630): n is a, c, g, or t
  misc_feature (637)..(638): n is a, c, g, or t
  misc_feature (649)..(649): n is a, c, g, or t
  misc_feature (671)..(671): n is a, c, g, or t
  misc_feature (673)..(674): n is a, c, g, or t
  misc_feature (688)..(689): n is a, c, g, or t
  misc_feature (693)..(694): n is a, c, g, or t
  misc_feature (706)..(706): n is a, c, g, or t
  misc_feature (712)..(712): n is a, c, g, or t
  misc_feature (733)..(734): n is a, c, g, or t
  misc_feature (740)..(740): n is a, c, g, or t
  misc_feature (747)..(747): n is a, c, g, or t
  misc_feature (756)..(756): n is a, c, g, or t
  misc_feature (760)..(760): n is a, c, g, or t
  misc_feature (777)..(777): n is a, c, g, or t
  misc_feature (788)..(788): n is a, c, g, or t
  misc_feature (793)..(793): n is a, c, g, or t
  misc_feature (817)..(817): n is a, c, g, or t
  misc_feature (828)..(828): n is a, c, g, or t
  misc_feature (864)..(864): n is a, c, g, or t
ggagtgagccgtgaganaggtaaaatgatcaaaacgagaaacccctcttcactttctctatatgactcaggcccctctcagtagagacgtggggaagtcaatgactccnctcaggaggtaacctgtccagcacagcttgtnctgaaactggcagccccctaaccctgacatcacgaggcaagaagagatcnccncgcctgacccggccncttgactncnggcactccctcggaactgccccgggccactgcntcnctggctgccggggagggggtggggctggtcngtnccngggtagagcctgggcagtcacctagcacggtgaggnaggccttggccaggtcttggtctagctcggtgctggcgacacacgtctcactcccctggtcccgccctgccaccccaaagatggtcagggacgtcgtcttccttctccnncctgtctccaatatagagcggctcgtcatccttcagccaggagacggtnagtatcagggnggggtacgtgactctgacccgacactcccgccagcanccgtgggtgccccctctctgngccanctgtgtacctcgaggcatccggctngnntcctgtgtgaggagtctttttacctccncggcaggncttnngttattnngcttttgcccnaggatgttgagtggcgacacananngtacaatgacctanntccnntattgcggatcntcttantttccacgactgtccgttctnntaaacntgggtantagccaccntccnggttgcttccttgcccntacttaaaccntcgcngtatgggggatgggagaaccaaanaaagggcagtncagccgcgtccggttgttaagaatcactcgaatganccggttccggggcgacacctccgaggcggc

SEQ ID NO: 715481 - DNA, 730 bp, Homo sapiens
aagagaacttattttaacaaggtcccgggttctcgtgcgacacagtgagctaaacttgcctgcgtgttaaaaggcagcgtttgtagggatcaagcttggtagacagtatttaggcggagaaaccgccttgatcttgggtttggcaagcccttcctccgcagacagtcctagattaggccactgttcagccatgcaggggtagttgggtttatagcgtgctgcagacagtgggcattaatgcaatgatcatttaccccgtggcaccaaaggtgtgtacccagtgaatttaaataaattggtgtggattggcccagtagcttaagaagctgggcttttcaaagagtgattggaagatgtgaaaggggtttttctttgctttctttagtaagagagggagaacacaagctgatgtgaattgtagataatgcaagagctagggtttgccctcttgcatgtgctactgctgccttccaagatagttatatcccaagactcgtgttttccctctcccctaccttgtcccccctaattaaaatagaaaccacagggattgattaatgtcccgctcctgaatacatgctaaaatttgtaccaaaatatcttctatgaaaatgatttgtaatctgtagacttattacctgggagatgtcttgatgtagaatcccatcctttgggttgtgggtttctttgattttctccgaataaatctgatcgttaaagttcacttgta

SEQ ID NO: 715482 - DNA, 103 bp, Homo sapiens
ctgtgccaagctgctatcgcgtggactggcagtggtgggctctgtgctgggtgcttcctcaccttcccaggcctgcggtagccccagacccacgggaggcatt

SEQ ID NO: 715483 - DNA, 153 bp, Homo sapiens
ctcacacacgtaaatctgaataccacagtgattttaacctgtgacacacgagaggcttgccatgtgtctctgctagttcgcacggatataggtagtaggttccctccatactctctgggccgggatgtaaacttctcccttgacaacctgctt

SEQ ID NO: 715484 - DNA, 303 bp, Homo sapiens
gatgggtcacgcgggacacgacggggagcctgactccccacgcgggtgctactccagccgcgggctgactgccttctgcacccttctcatggctgtcctggcgccgtgttcccaacccgaggtcccactccatcgaataagcacaggatggactggcggaaggcaggtgagaaggccaggtacggacctattacaacaagcagaagtaaaaggtgacagtggtcatgggtactggagaggtaatgacacacaagtcacatttcagaggctgaagccatatgatataatgatcaaggacaggcg

SEQ ID NO: 715485 - DNA, 799 bp, Homo sapiens
  misc_feature (13)..(13): n is a, c, g, or t
  misc_feature (111)..(111): n is a, c, g, or t
  misc_feature (175)..(175): n is a, c, g, or t
  misc_feature (194)..(194): n is a, c, g, or t
  misc_feature (310)..(310): n is a, c, g, or t
  misc_feature (346)..(346): n is a, c, g, or t
  misc_feature (396)..(396): n is a, c, g, or t
  misc_feature (429)..(429): n is a, c, g, or t
  misc_feature (501)..(501): n is a, c, g, or t
  misc_feature (542)..(542): n is a, c, g, or t
  misc_feature (613)..(613): n is a, c, g, or t
  misc_feature (659)..(659): n is a, c, g, or t
  misc_feature (673)..(673): n is a, c, g, or t
  misc_feature (712)..(712): n is a, c, g, or t
  misc_feature (718)..(718): n is a, c, g, or t
  misc_feature (720)..(720): n is a, c, g, or t
  misc_feature (727)..(727): n is a, c, g, or t
  misc_feature (780)..(780): n is a, c, g, or t
tctagattaagangtggccccgggtgtgggatttacattttgagtggccactggtggtgcgaccccgatgatccggggtttgtctatgattctggctgtccggttgccctnctctacaatcccaataatccatgcctggtggccttcaccatatttgggggactttatctctgcncagaaccgagccgcttgcncacgtggtaaacagatcagaaggccgcctgaagtctccgggcaggtcccgtgcataaggccgaacatgtatccgcagccttgctcaccgcagcaatcttggccagccccgggaggntgtcaatcacaaacgacaccccgttcctctcccgcntggccaggttctgcgcatggcccaaaatcccgaagcccgtaaagtcagtngcggcgtgggccttgaacgtgtccctcagtccngtcctgtcgagcctcgccatgtccatcaccgcctcccggcaggccagccctacatctccttgggtgaccacnagtctaatctcatcccattcctcagggatatccagccactngtgcacacgccactcccacccgtttccccaggggtcttgtcagccccagcccgtcccccggcactgcattntctggcatgacaaattcattgggttggcagacagtggtagccactnctcccaggacaatncaggggtttagtactgtttggccgcctgttacagaagtncctgcntnctcagcngcgtttttaaaaccttggataatcagagggatcaatttatcccttttcctgtnggtcattttattactgaat

SEQ ID NO: 715486 - DNA, 1061 bp, Homo sapiens
gaatctcttgaacctgggaggtggaggttggagcgagccgagatcgtgccactgcactccagcctgggcgacagagcgagactctgtctcagaaaaaaaaaaaaaaaaaaaaaaaaattgggggggaccggggccggggcgctggtggcctcaatgccttgttaaactcccagccactttggggagcctcccagggccgggggggctcaatgagactcagggcagttttggcacgacttaggctgggccaaacacgggttgaacaccccggctcttcttacttagaattcacagaggaaatttacgctgggggtggggccactcggggtggcctggtaaatcccaagttacacgtgggggaaccttgaggcaaggaagaatttggtttgaaccctggggaagcgcagacattttgcgcagttgacgccaagaaatctagtgccattaacacactccaagtctggggtgaccagaatgtgagaaatcgtggtcttccataaaaaccaacacagaacaaaaaaacaacagggggggcggcgccgggccactaagagagttttcccccttcgggggggggcgccccaagggttatgagcgcggtgttacccccacggcgtttttctttgtggtcacccaaggggggggcgccccaataatgagtgagagcgccggatatatataatagccgcaaggcgccagcgttgccgcgcgcggattttatacaagacggtgttggtgaagctgtgggcaaaccagcctgttctacacggtggggcaacacttggtgtgcgacgaggggcccccatttttaacttcgggggggggggggcagcaaccatatagttggggagaagacaatatttccgcttaggagagggagtttttaaagaagggcctgaaaaggggggaaaaattttataacaacttttaagaagggtggtcaaaaagtggtgtggtagaaaccacattagcgggggaaaatatgcggtagggagagggttgagaagagtttgcgggatagaaggggaggtagtcgtgtttggggaacagttttttttacg

SEQ ID NO: 715487 - DNA, 174 bp, Homo sapiens
caagagcgagcgaggagctgatattacaggcgcgtgccaccgtgcctggataatgcctcccgggttcaagtgattctcctgcctcagcctgacgtgaagctgagattacaggcgcgtgccaccgagcatggtatatgcctcacgacttcaagtgatgctgctggctcaaccttg

SEQ ID NO: 715488 - DNA, 480 bp, Homo sapiens
tgagatttcttcatttcctatagtggcatgtagacatatctgaatttcttgatatttattccaaagaggaagaagaataaggaagaagaagaaaaagaaagaagaagaaaagaaggaagaagaggaagaaagaagaaggaagaagaaaggaagacctaagaagaagatagaagaggaaagaagaagagaaagaagatagaagatggaagaagaaagaaaagaaagcagcataagaaggaaagagaaaagaagagcagaaggaaagaagaagaagaaaagaaggaagaagaggaaagaaaagaggacgaagagaaaagaaaaggaaagaagaaagaagaagaggaagaagaaagaagaagaaagaataagaaggatgaagcagaggaagaaagaagaaaagaggaaagaaagaaggaagaagaaaggaaagaagaagacaaaccaaagaaggaagcagaggaagaaggtgactcgaaaagg

SEQ ID NO: 715489 - DNA, 300 bp, Homo sapiens
ctgggtgatctagaggatcccttcagaagtgcattttttggaggccctttcctcgtgtaattcttatgcattacacagtgaaactggtagtataatgtggaacgggtcacttggatttagtaacataaggtatagatgcatgaaaacataaacagtaaggccaggcacagtggctcacgccggtaatcccaacacttggggaggccgaggccgggggatcacgaggtcaggagatggagaccatccgggctaacacggtgaaaccccatctctactaaaagtacaaaaaattagccgggc

SEQ ID NO: 715490 - DNA, 679 bp, Homo sapiens
aatggttcgctagtcacttgacccggagaaccccacgaacactcatgcaaatcaccgaggttccacactcttcgtgttcactttaaagaacactcgtgaaactgctcaggccatcaagggtatgcactatacgaagagagccacgaagttatctgcaagagtatgtcactcttacacgaaacacgtgtgtaccattccgacggttacaatggtggagttggcagtgtgtgcgcaggccaagcaatggggctggacaccaggtcggtggcccaaaaacgacgtgctgaagttgtattgctggcacatgtcttaagacaacctgcaggagcacggtagatgactgaacctctaacgcggtttacgcattgtacgtacttcttctgcgctcattagacgtcatagtccaaggatgaacataatgctacctagagatagcgctcgaccgtgtatcctacagcacgctctatggttccggcattaaacccagtatcatgtaggcgctctcctgccatcattgagtatgtagtcgcttacgggaagaagggaacagagttgtctcctaaacctatgaacgaggcaggttgccctacgtagagaaccaccgcatagtcccaggagagataacgtgagagagaaccaaaaacgttatgggcacggggagctgaatgtcagtcattga

SEQ ID NO: 715491 - DNA, 176 bp, Homo sapiens
  misc_feature (89)..(89): n is a, c, g, or t
tgatcctcccacctcagcctcccaaagtgctgggattacagttctgagcccccacgtccagccaaaagatatctttcttgggcggcatncgtcttagttggttaactgcctgtctagtaaaaagttacctttcttattagatgctgtagtagtttgtgttgtggcccatacacaca

SEQ ID NO: 715492 - DNA, 103 bp, Homo sapiens
gagctggtatcatatgatactcagacgcttggaaaaataaagatttgtcagccctatctcaaacttgaatcaaatatttctggggttgtgagcactacatagg

SEQ ID NO: 715493 - DNA, 171 bp, Homo sapiens
atctcatgaggtcttgcgatgcaggattgcattgtccagtgtacacaacatctattacctgtatagttacagcaggcagatacgctactgaggactgacatgaggttctcagtaatgagatttctgtaggagtcaatattgagtgtgtagttcccttcacttcccaaagag

SEQ ID NO: 715494 - DNA, 456 bp, Homo sapiens
agtggagcagcgctagttcataatataaaaaaataaaaaaacgcagcagacaacttttcgttaataccatataactttaaaaacacagtggcaggtacatcagtggaagagaagaatattactgtctctatcctaagtagactgttcttattccactggtttctttaacaggactgttctactcagcctctgtggaagaaaacttcccacaggactgcactagacacagacagactttgcttttacagcctgctcttgcctattaccataccagtgtatgtattcttccacctttggacttggatgggtattaaactcttcaggcatccttgatgcaactagagtcaatatgctgtatatattaatgatagctcttgggcatcgatctctgaaagctcaaatggatggaatttagtttgcgggaaagaggctttgctttgcgcatatcaggcttag

SEQ ID NO: 715495 - DNA, 185 bp, Homo sapiens
gaggatcctgttcctggaggcggaggctgcagcgagccgagatcataccacatgcactccagcctgggcaagtagagccagactttgtctcacaaaaaaaaagaaagaaagaaagcaaaagaaaactaaagggaggcaaagagttaatcataactgtttatacctctctctctctctttttctca

SEQ ID NO: 715496 - DNA, 156 bp, Homo sapiens
cggccggtacgatcactcatagttggggaactctgtatgtccggcagaggaacgctggcatccaatctgatgtatcccagatgataccctcttggttgctgaggtcaggagcagccaaggtgatcttctgcacgataggtgatcttctacacgata

SEQ ID NO: 715497 - DNA, 308 bp, Homo sapiens
cacgaggggtgccgtacttcggcgcgggcaggccggccgcggtcagcacgtcgccgaaggagccgcggtcctcggccaggtcgatggcctccggcgcggtgcccacgatcggcacgcccgcgtcggcgaggcgttgcgccagccccagcggggtctgcccgccgagctgcacgatgacgcccaccacgcccgggccgccggcaccggactgctgctcggcccggaacacctcgaggacgtcctcgaaggtcagcggctcgaaatacagccggtcggcggtgtcgtattcgggggacaccgtctcgggg

SEQ ID NO: 715498 - DNA, 365 bp, Homo sapiens
ccagaaaaacgtttcctaagacaaggcaggtcttacattatatttaaattttttttaatgatgtcttttttggcagtgcacagccagagaacaacacatcacacacaagaaacagttgtgctcatgtgatgggggcctcagcactaggaaggagtggactgttcgtgcacgcagcagcttgaataaatctgaaagtcactatgccgcctaagagaagccaaatcaagcgcatgctgtgtacagaggctctccagaatccctcctacctcaccgaaagcacatccgtggctccctgccgactcgcaggagccgcttccacaggcccaggaagacagcttcccggtagcaatgtgttcatctacctc

SEQ ID NO: 715499 - DNA, 354 bp, Homo sapiens
gcccctttgtaaaactttttttttaaaattttcccggttcattctcactttttttttcccattttcaccacatgggtttttttgctaaagagtcacacccccccagggttggcctttgggttgtccaaaggtcaaggttcctggagcggtttctccttttttggaaaaaaatgctgagaccaacgcatttctttacattcagtccaacgtttacggaaagtgcttgggcccccccacaaaaacaatgcactttttacacgggcagggggcaagtttttatcatagggttacgttccattaaaatttcagtcccgccagacccacccccaatagggcgtaattgttttttgttga

SEQ ID NO: 715500 - DNA, 732 bp, Homo sapiens
gtgcgcggggcccggcgcagagccaggcgggagcttccgggcagatggggccgccacctacgaagagaaccgtgcctgaggcccagccgctgggccactgccctcacctgtctgctccgaggactgccacttgccctggggattgggggagatcaccccatgatgctgctacctccggcgcgctcccggtttagctatctatatggtcaaatcccgttgtgggggtcgagtggcctggtcttggcacgtggttgtaagaaccacgtgctatcccattgatctctgaagctgtggcttgtccttcaaacctcatccaggacatgaacgatcagaaccacgcccgaggagcatggtccaggggcgtgagcctgacgtgacgtgggatgtgaatcgtcacgtgtctcggtgagactggtgctgcttccattgatgggtgctgaatcggtgctcctaggatcgccgctgacctggtgaggaagctgtgaagatgcctgtggggcagtcctcccctgctggctcggggcaaacggctgctgtgccggagcagttgaaccatcacggtgggatttgagccaagccctgggcctctgacctgttgctcaactgctcactgttgctgtgccggggtggtggcacccagtggagctgctctccgtgaacgctggcctcgggctccccgctgtttctccttcctgtctgtggcctgtggctacgtgtcagatgtggatatcc

SEQ ID NO: 715501 - DNA, 216 bp, Homo sapiens
tcctacgagcgcactcctacgagcgcactttgatccctcacatgtgcagttcacaagtagggtttacgcttctatgagaagctaatgccactgcttatgtgacaggaggcagagctcaggtggtgatgtgagctgtgggcagcggctgtaaacacagatgaagcttcacttgcttgcctgacgctgacctcctgctgtgcagcctggcgctcgtag

SEQ ID NO: 715502 - DNA, 1219 bp, Homo sapiens
tttttttttttcttctttttaccaaatctcccgtgtcctgtgtcccttgtggggtggactatattcttccagataactttttccaccctttcttccgaatgtgttatgtgcaacacgtgagagccagggggtgtgggagtggggaataatttttatattaaaagaagttttctccacttggaaaaaaaaaaaaaaaaaaaaaaaaaaaaaaaaaaaaaaaaaaaaaaaaaaaaaaaaaaaaaaaaaagaagagagggggcgggcgcgcgcgccacgaaacactcctccccgcgggggcgcgcccccgcggcgcgcgcgcgccccccccatctgttgttggagaaaaagagggggcgcccacaaaagagagaagggcgtctatatatatatagcaccgcgcgaggagcggcgggggcgggtctatataacaaaaagaggcggagggcgggaacaacacggcggacgaaggcgggagaacctggaggaaagagagaccacccctcacccggggggggggggggagaaaacaagagggggcgaccacacccccacacaaaaggagaatatataacaagccccccagcggggaaaaaattaacaccacttaccaggcgctccaaccggcgggcaaccaacaaccgccgggtgaatcatgctgcgctgcggcggagagaagaaatggtctcgcgctacccgagggaggtaattacttcctcgacacaacacttttttatcaccgggggggttcttctcttaccctaacacccgaaaagcgcgagacaaacgagaaaaacaaccagagaaaacgacgagaggcgcaggacagaaggaaaggcagaaagcagggggaaacaaaagcgcgaaggcagccgggcgcgggagatgcgcgcgacgcagagaaaaacaaaaaaacatacgacacggaaaacaagcaacacaaccaagaaaacgacggaaaaacagagaagaaagggacaacgcggaaaaacgagcgcagagaggagcaagcaaaaacagaacaaacaaagcaagagaagcaggcagagaagggggacaggcagcgagggcgagccacagggccccgacgacgcaggccgagggcagcccgggcaatgggacgcgcgcccacagcgacggaggcaggacgagaggggagcggaggagccgagcaggcgccgggcggagcgagagcgaccgcacgagagcaccagaacagaaa

SEQ ID NO: 715503 - DNA, 1007 bp, Homo sapiens
aactgtcgtagaaccattcgtatgaatcgcgcgttccatgtctgtgcagtgaacgtggtcatagcggtacctatgaaaaatctgtggtcagtgactcagtgttcggtatactcagcacattaaaaaaaggcccaggtgagatgagcaggagacgtttgtgaacacagtccgagagtcgaatgcgctactgagggccctcactgtgcatctatgaaccgcgaatccatagcgttatcatctgcctattcttcggtcatggtccgccctggccttggaataaggcctatagaggttcggttaataggtgtgggatgatgggccgaaaccactcatgagactctcctaaacgtcaagcagaatgccagatcggcacagttgtcacacggaatcgcctgactcaatatctccatcgaaatgaggagaagcccctggagtgactactgtaggatgtatgacctgtgagcagtgtgcactcttgagagaaggtggactgggtttctgcttaacaatacactggaatgttgatgctgattgcaacttcgctgatgacatgactggcctgggacgggttatgattctctaagatgaaaatgtgaattagaactaaagagagaaatctgagatcattaaggtcttaagagagaaactggttagcagatcatggtccaaagaattaacgtcagaaacccatcgtggggatcacaggcacgcctgaaaacactgggtaggggacgatctggggactgaggccgaatgaagacttgatgatccatgcagccctgttgagcgagaagcaacgcggccaggtgccagggtcatacactgctaaccagagcgaaccattcggaggtgtaaaacacggagagcgccgaaacaaatcgcacggtgagtaataaacgcacctgggaggaacacccatgaagaacgaaggagcaacaaaaacgcgtggcgacaaacaaaagaaccacagcgaagagacaccccactctctcgtcatttccacccgg

SEQ ID NO: 715504 - DNA, 970 bp, Homo sapiens
ggtaagtgacatgactaacaagaagcgggagaatctgggctgtcgctctaggagatcgatgggctagagtgagaagctgtcccagtgtcggagagacctgggggccgtgacactccgagattccaatatgccggggagctgatgcccaagagtgccaaagagattccgctgacacgaagggagaaaaaaatatatcttagtttgaaacaagaaggcctccaagatagggaggaaggagcgtgaaggttggcttcgggtaaggagaaccggattgaccttttgcgtgcgtctctgtggccgatctttaatccatccctgactggttcgtatatggcctatgaccaatgtgaaggccttggcaatatttcccaagaagcagcaagaagggctttccaacattttgcggcccttttgattcagggactcacacggctaagttgcacgttcgaaagccggtcaagtagggtaccaaaggtggtgctggggcgtgggtaccccctctcctaacactagtgtttcgaacgcaatgggtttaccatgggggaggcccaaaaggccttggccgatcaccctttgggcctgcatggcaggacggggtccagggggtctcccaggacgaggccattgttagcttggtcacttcaccgtttagggccctaaggtaatggaggggacaactgcatgcggaacccgccaaaggtgcgggttggaacacagattcctccgggaacagatagcatacaatagaagattttgccggggcgtttgtattcgcgccccataggaaaaagagttattatacacaccatttcgtgtggtgaggacggaggcggcccctagttaggtattagagaagtgtggggagatctgcgggtgtcacacagggagagaccgtgggtggagacaacgtggggggagctggccagacaaaaagcgcggggggaacagggggttctgggaccactccagg

SEQ ID NO: 715505 - DNA, 193 bp, Homo sapiens
cgtgcttgcaggttgagtacagtgacactgatctcggtcactgcaagccctgctcccgggttcatgccattcttctgcagcgccaccaccagtctggctaatcgggtgtattccaagtagagatagggttcaccatgttagccaggatggtctcgatctcctgacctcatgatgcgcttgcctcggcctccca

SEQ ID NO: 715506 - DNA, 250 bp, Homo sapiens
tgggtggctgaggcatgaggcaggagaattgcttgtacccaggaggtagaggttgcggtgagccaagatcgtgccatccagcctgggtgacaagagcgaaactccgtcaaaaaaaaaaaaaaaaaaagggaaattttgggcccggttttttttttgattttgaaaacaaaatttttggttaaaatcttgccaaaagaatttcgcccttttcccaaagggggggttggaaagggattccggggaccgggcc

SEQ ID NO: 715507 - DNA, 1752 bp, Homo sapiens
cggacgcgtgggggaaggatgtggccgcctagtggggcagtgcgtaacttggctctagtcttggcgaggtcgcagagagctcggacctgcagtggggtcgagcgtgtctcctacacacagggtcaaagcccggagcccagaacccgcgagtatttctactatgtggatcaccaaggccagcttttcctagatgactccaaaatgaagaactttatcacctgcttcaaagacctgcagttcctggtcactttcttctcccgtctgagacccaaccacagcgggcgctacgaggcttccttccccttcctctcgctttgcggcagagagcgtaacttcctgcgctgtgaagaccggccagtggtcttcacgcacctcctggcttccgacagcgagtcacctcgtctctcctactgtggcggtggcgaggcgctggcgatacccttcgagccggctcgcttgctacccctggcggccaatgggcgcctgtaccacccggccccggagcgcgcaggcggtgtgggtctagtgcgctcggccctggccttcgagctcagcgcttgcttcgagtatgggcctagctcccctacggtcccctctcacgtacactggcaaggtcgccgcatcgccctaactatggatctggccccgctgctgcccgctgccccgccgccctgagactccagctggggctgtgtggggagggttagagcaaactctgggttttgtagtactcgcaggttacccctctgctccaacactctagattaacttagatgtccgctgtcacctgcacgctggtgactgagagcgcgtgcgcgcagaggtgagcccagggtggttggcgctgtccaaggttctggtgctgccctgctatcctctgtccctacagaggtcctctctcggccacctctaacccttacaccggctttgcgtcccacggattggcctgcgctggtcacgtcaggcagggcggcaggcgcaaggcgcgcgtgggccggtgcgcgtgcgcgcccaccccaaccccccccctccgcttctccagtcttgcagccgcaagcaccgcggggagtcgctcgccactggagcaggtgagggggtggggggagatcctggcccaaggtcaccgggcttgggggcgggatcgggaccctctaggttctgactgcctcaccgagaaaaggtcataggatctggcagtgggaaggggatggaaaccacaccctcaatgagcaggctcggacccactggaacgggagggggcggttaggggaggtagtgctgcttaaaagcgccggatcgcaggggctgccagagacctccgctgggcccgacagaggacacaggactcctccccaccctcttcccgcctagataggcatccaagagaccgacaccccactcctgctcaggattagaggttcatgtcctgataaaaggatctctgctgggctcatctaataaggggcccttattcctgacatggctgtcttgctctggtgcacatctgggcctctgcataagcagcagctctgatccctaatgcacagatcaaggctttgctactgaaggctgaacagctagctgtgcaaggcctggtgccagggaccaaccagtcattcgtgttccaggaaataaaacccagaaacctagcaagcgtccccacttcttggggctccacatgtcctgagatctaggaactgcctttgcctgcgccaaagctattccattaaaactttactgctgtgctgcctc

SEQ ID NO: 715508 - DNA, 1312 bp, Homo sapiens
ggcgtagcacgctgagagtcctgaacattggttatatattctatgagggtaaaacatgatagaagttcgtacgaactgtgagacaggccatggacaagtctctcctgcacatccacagggacgccagattcaacagcaggaaatgcattgtataaaaaactcagccttggccagtgaacatatgcattgctatcactactgaaatcatccagtagttactcctaatcatgtatattacaggaagcgaagtattaaaactgccttcacacatgaaaatgtgcgtggagacgagactttgcatatgcaccgtcaagtgatgaccatgcattgccagatttgaaagtggggttttgcctgcacagcaatatccaaccttgggttgtcatatgtactctcttatcccagtaaatgcacttggggatggtcaaaaggtaaccggagtattaaagcttttaaagccctcaacacttaagaagatggggaagataaggtgtccaatcaaatggagtggatgccaaaataaagtgaacgcccaaacaaagttgggttcctaggatgcgtacaactaggacctcgaatttcgacttgggctaaaagaggatttctgggttgttagccttaggggatccatttactgtgaatcatgcggccccaagcaccatgtagagggttggggatgaatacgaggtgaagctgcaacttgccgttaaccaccaaggggcctttagttagtttttgggacacaaattagcaacggggagaaaacacttccccctgggaggtgtgggcccccataggaaaagtagggataacaaggtggcgttttgccattgattgacaccgcattctgagaatgtcttccggatcggcttggcacttcgttaaacagcccgaacccgaatccaggcaaaacaattttagttgtacttatgaggcacgggcattgggatgcccacttggaatccacaacgtagtaattgttcgccatggcggaggaaaccttcggagggaccccactcagaggggaacgacaatcggaagagaacacagaccaaggaaaaaagcgaaggaaaagcaactggtcccgtttggacttcccgggggagagacacgtccagaaacacgcaggcagatcaacgcgttccccctttgagacagagtgtggagcgtgctccaagagagagtgtggtcgacacaggggacaaaggaaacacctgcatcctgaagggaggcggagcatttgagcacagcgcatagcaagcagcgctaacgagaagcgtcgtgggttaacctgggcaaagatgcgaaggac

SEQ ID NO: 715509 - DNA, 352 bp, Homo sapiens
tctttaaagcagcatgatttataatcctttggatatatacccagtaatggaatggctgggtcaaatagtacttctagttctaggtccttgaggaatcaccacactgtcttccacaatggctgaactagtttacagtcccaccaacagtgtaaaagtgttcctatttctccacatcctctccagcacctgttgtttactgactttttaatgatcgccattctaactggtgtgagatgatatctcattgtggttttgatttgcatttctctgatggtaatggcacataaagtttaatctgcaatacggaatctgatataccacccctttcctctcaccatcatctactctattt

SEQ ID NO: 715510 - DNA, 247 bp, Homo sapiens
aaaaataataataataaaataaaattggaagtcagagtcaaggtagagctaaactgtattaggctgttacagtgcacaactccaggtgccgtcactggcattaaagccaggaagcaattgtggaaaaggggaatgtctaatggtacctatctctatgaggtaatataagatctctatttttctggcatacgctttcagtaattttatcatgtttgataattcttttgtgacactggattgattttgg

SEQ ID NO: 715511 - DNA, 263 bp, Homo sapiens
agacccagagcatgggaagaaaaacgtggcagaggaaagccaagttaagcaacaatgatccgaagacgaatcccacagctggtaccataggaagagactccagctaatgaaaagtagagattcaaaacatgccacaggaagaagtctccagcaaagagtcctaatcccagcacacctcgtgggaagaaaagaaaggctttccagcatcttagacccaaaggctgcagagtcttagacccagggaaagccagagaggagccaaa

SEQ ID NO: 715512 - DNA, 154 bp, Homo sapiens
ttcctctcagtcattgccgaatgccttccgcctgctcaatcaaattaccgtaacaagtactgcatgtcgatgattacatcaaggaacaaccttgccacattttcagctgcccatggcatttatgggcacaagtcatgttccagcgatatccctg

SEQ ID NO: 715513 - DNA, 102 bp, Homo sapiens
gaataaatatatatacatatatacatatatacataatattcataaatatatatacacataatatatcaatatatatttacatttaatatgtatatataatat

SEQ ID NO: 715514 - DNA, 390 bp, Homo sapiens
gtgctcagaggatcccctcataatgtgtgccagtatccagtagttatcttttctgctcctctccctcctcccaccctctcctttcaagtagatcccagtgtctgttgtttcccatctttgtgcttgtaagttcttaccatttagctcccacttataagtgagaacacgcggtatttggttttctgttcctgcgttagtttgctaaggttgtgccttttaattgaggcatttagcccatttacattcaaggttggtattgatatgtatggatttgatcctgtcatcgtgtcagctggttattttgcagacttgtttatgtggttgctttacagtgtcactggtctgtgtacttcagtgtatttttgtagtgggtgcgccgtcgcctacgca

SEQ ID NO: 715515 - DNA, 625 bp, Homo sapiens
tgtgttatgttggtagctactgtgaattaagttgtggtttcatcatgagtcttaatgttctttgttgataagacaagtttagaattggtttacttaatacaaaaaaaaaaaaagaatttcaaaaaaaaaagtggtttgcttaaaaaaaatttcatgtgagggaaaaaaaaaaacctattccagcaataagtttcggtgtgggcttgtgacgcattgatgtcattttttctacattgtggactattatagatgtgttggtgtccacgcacaactgtgatctgtattactttcttttaaagaaacaaacaggtgaaacatatattagtgccaaattccaaaggtacttccttcctagagcctcgcacgtgtgtcctcttgctgagaagtaacttggcataacatgggtatatcacatcatgctgttgtgtattaaactccctacattattttaagaaacaaaaaaaccacaccaacaaaacagtgttaccaaacgtttggtaaccatgtgttatccctgtgcatctgcgtttgacctgaaattatgttacctcgttggtcaataccctcccggaagatatattgcaaaaccatagtataattgccatgtcccattttttaaccacat

SEQ ID NO: 715516 - DNA, 668 bp, Homo sapiens
  misc_feature (4)..(4): n is a, c, g, or t
  misc_feature (12)..(12): n is a, c, g, or t
  misc_feature (19)..(19): n is a, c, g, or t
  misc_feature (24)..(24): n is a, c, g, or t
  misc_feature (28)..(28): n is a, c, g, or t
  misc_feature (44)..(44): n is a, c, g, or t
  misc_feature (81)..(81): n is a, c, g, or t
  misc_feature (130)..(130): n is a, c, g, or t
  misc_feature (180)..(180): n is a, c, g, or t
  misc_feature (196)..(196): n is a, c, g, or t
  misc_feature (641)..(641): n is a, c, g, or t
  misc_feature (657)..(657): n is a, c, g, or t
ttgnaatattgnccatctncttgnctgnccaaactatcttgtgnaaatttgccttaacaaatatatggtcttgccaatcgnaagaaccatattcttcatttttccgggatttcaccagtgtgactttagntaggtttagtcaggtctggtctggtaagcatctgtaccgtcctgttctgnaccgtggggtacaagncttcctctctctacttgcacttctatccctcggtccaaatcttctcactccttctgttaaccacaccactccggcccacttcttggatcatgtatttccctcatcataactatcttcttcattatcagatactggttcaggatcaggacgacttactggtatttgaactttcttcttccttctaattgtaatttttgcatttttccccacttttccttagttgctgaacagcaaaagcatgttcaacattatccattgaaactccgttaaccattgcaactcggtcattttcctgtagctgtccttcagctggtcctcctttcagcacatctgaaatcactattgacgtttccccactctgaaaatgaggattatctcgtccaccagatattgcaattccaaatccaaatccaggagccctgtgaagcgtcactgtatgttagtngcaattatagctgttncctaccattgc

SEQ ID NO: 715517 - DNA, 107 bp, Homo sapiens
tacctgcaccttacgttcgcgattctcttggctttaatttttctggtttatgcctgtctcctgtcactacctacttgggagtttcctatcttctcatccatggcaat

SEQ ID NO: 715518 - DNA, 120 bp, Homo sapiens
cactgttaccaagaaggccaagaaggagccagcagaggaaaacagaggagaaagaggggcacagggagaaagtggagcaaaacagtaacactgctgttaggaatgtaaaatgccatagct

SEQ ID NO: 715519 - DNA, 161 bp, Homo sapiens
gcaggaacggtatgagggcagagtccatacacacaaacatcacagtatagctccccgtcaaacatacagacacaagacacagaaaaagcacccacaggaacttccacagtgaattcctaatttacaaaaaataaaagaacccacggaagaaatctccaggc

SEQ ID NO: 715520 - DNA, 212 bp, Homo sapiens
tgatctagaggatcccataaaaaatttatatagctgtatatagttataagcttgttttgtggaaaaaaattaataaaaactaaggtaattctagatttaggccagttcaggtgtattttgtatcttagtaatggatcatatcgtaaaaataggaaataaggtgggaagaatatattggttattgtggtctggtggggatggtccggaaaagg

SEQ ID NO: 715521 - DNA, 162 bp, Homo sapiens
agagagagagagagagagagagaaggtagtgtagttcttcgctcatatctccagcccccacttttcaccggttctgctggtgtctatttctattaatctgtgtacattatcctccctgcaaaatgggtgtggagctgtccctctatgctgagattgttgtgg

SEQ ID NO: 715522 - DNA, 122 bp, Homo sapiens
ccattctactgtcccggtgcgcagtatcgccggataatgactgcgtggcgtggggctgcgctcgggtctgcgatcagcgccatgctatccttgcgtggaaactttcggcgcggaaccagtct

SEQ ID NO: 715523 - DNA, 448 bp, Homo sapiens
caatagtcctcagaaagcaagcgttcctctcagaaatctcaccaactttgtttgtcttatgttcttaaattaagtgcttatagtaatgcttagatttgatggccctatatagttatatttatttgattttgttaatcaaacgtctgcatggctttaagttgctgattaaaagaaatatgcacatatacccagggatgtttcatgcgactttgcatttaataattcaaggtttgcttttgagaatgtgattttttgtttgttggtttttgttttcatttggtacccgaatgtattttgacatgcatattttgtgcttcttgaccctgtcaatgttcatttcgacattttgtttgtaagacacgctccacaggtactttgcatttagggagtatttggttcttgtcaaatggtgagattctgcaaaaaacagttttgttaatgaatccca

SEQ ID NO: 715524 - DNA, 391 bp, Homo sapiens
gagttcagaggcaagggacgacaaacgctccaataggagcgtagaatagcctagtgtagcgaaccgtttacttttcacgtataccgagaaatgtcgaccaaaaaccgaaaatccgcttcgcgaggaatattcgaaagcctgaaggatccaccggtcggtgaagaaaagacggaggaacgcgccaaccccaagggtcggcacgcggaagaagagtacccacccgcgccttgacgaacaatcgttccaaaacagctttctcagtagagaccatccgccatcaacagaagacgacaacccattctccagtttcagacgaccgtacaccacacaggacgacacacgcgaagaacctcttacaagccacccccgctacggcacccaccaccgtttg

SEQ ID NO: 715525 - DNA, 304 bp, Homo sapiens
cggatcagttttgcaggtggttaagccatttaccaatgattgttgtaggctaagaagggcagattattagagaaattgtgaaaatatgttgcagtgggcagctcagcagagaaggggctacctgcaaagaggcaagggctggaggaaagtttatagggtcctgctgaagggtgctacgtgctgaaatgaggtcattgtgcccgcaggttgtttgtgattagctgtctctaacaattgttcatacgataattgttcattattgttctcaacttggggctctccccaacctggggacccttcctta

SEQ ID NO: 715526 - DNA, 127 bp, Homo sapiens
agacaacatgagggatggaaggttgttcagatactggcgttgtgtaaaaacaccattgtgttggactgcgtgtaatgtgctatcaataaaattggctgcttgggcggtaatagttccccccttcaca

SEQ ID NO: 715527 - DNA, 115 bp, Homo sapiens
ccttccaacatctcataccctgtttccttcccactttcatcccagcaggccctttcttcctgctgacaaaacactcttccaacatctcatgcctgatttggcgggtaccgagctc

SEQ ID NO: 715528 - DNA, 726 bp, Homo sapiens
gctcagcactcagggcgcaagggccagcttccgtcaaaatgtctacttgttcacgaaatcctgtgcaagctcagctgtgcgggtgatcacctgctgacaacaccccgagagttgcatatgggtctgtcacagcctatactaatctgtgatgctgagcgggatgcttgaacatcgaacgagccatcatggaccagattggttgtggatgaggtcacgatttgttcaacattttgatcaacacgtgatgctaaatgtgaaaagatggaccgtgtgtgattgccattagtcctaactagaagcaaagggatctaaaaaaggaacttgttatctggataaatgatagtctagtcgtatatctgggatcacatgggagacgttggattctgggtgccctatttgatagactaccctggtctggaataatggatattgatcctttccttgttctgtttagattgggtgagaaaatggcggggaggatgtcatcgtcattgggatttttgcatccttgcgtaccatgagatcaaacacaagagaagttgcaagaaaaatgactgggatgttctaactatggaaatgtgtactataaatgagtctgttataaacgagaatatttgtggataacatgtgagtgaagtttacgtaacgattgaattggtatgctattgtctacagtttacgtatgatgggactagtgtggtctggggttgtatatgaactggggga

SEQ ID NO: 715529 - DNA, 1031 bp, Homo sapiens
ctctgaagacgcgcaccgacatcacatacacctcggatatgacacaagcacaacacccccctcacacacatcgagcatccaccaatgacaagagacaagtgatgatgccgaacaagacacacatgcacacaacagcagaccaaaatagacaacctaaacatccgacgcacatactacgcagctgcactaaaagtaagatatgttgtagctcagacaacacgctcacaagatagacgtgctgcacaagaaaacatgtgcatggagaggtcccacaccaccaccgagcagagaatcaggcgtagcgaacgggcacacatgggatttaagcatcctgataaggataaagagagaaacacaagaagagagagacacaacatagatccagggtgcagcaaacacactaagacgtgacggcggattcacgccgcgcacacaagtactccagatgaacacaggacggcgcgaacaaaaacaagtatggggcaatagcgacactgatcgacggtgcgtcgtcacgcgtcaatgatgacacacaatccacgagtgagcgggggcggaaagtcagagctccacgaagagcgctcagacacgctcacacaatcagccagatatgagtgtagcgtgaacgaagccatgcagccatgtccagaaccactaaagagctgaagatctactaggcgtaccacatcacagacaatacacagtacatcagaaataggcaacaacacgacactagtctagagcagcatagccgctagacacgagagcgatcgagtctgactactacgcaaaaaggggagagagagagagcggaagtctaaacagacacaaggtcgcagtctaagcacgtacagactcaaacgacgataataaagccgtgctcagcgagactagcatatagaatataatacacagaacgcgacgacgctacaatgtatcggacctagcaaagcaccaagcactgagcccacaaagaactcgcggtcacgacgtgcgtaagtcaagagaccacctgaccaaacattggagtc

SEQ ID NO: 715530 - DNA, 197 bp, Homo sapiens
tgctgcaaagtcgatcttagaggataccccattagtgaagagcagtgactatagagtaccgttactatcgtgaaaacattcaccgttgaccccagaccaagtgttctacaggcccatggtatgattacatgcaaccagaacaactttgtgcacgactgcgatcaatatcacaatcaagcagcacacggtcaccacaa

SEQ ID NO: 715531 - DNA, 195 bp, Homo sapiens
  misc_feature (1)..(1): n is a, c, g, or t
ngaacacatacaatctactaagattgaaccaataagaaataaaaaattatccaagcattgtagcacatgcctgtaattccagctgctcaggagactaaggtaggaggatcgcttgagcccaggaggaagaggttgcagtgagcggagattgtgccactgcaatccagcctgagcaatagagcaaggtccggtctc

SEQ ID NO: 715532 - DNA, 233 bp, Homo sapiens
  misc_feature (193)..(193): n is a, c, g, or t
  misc_feature (227)..(227): n is a, c, g, or t
ggtaaaatgcttaaggattatgtgtggtacataatacgcattcagtaatattaattgccattgttcacattattctgattccctacagcttgcaagtgtgaactagtttaacacaaaggagcttagctcatgtctggttctttcatcacctctctacaacttcctccttcacctgagctccattgaacaactngctccacaaacacactgagcccaattatgccctntgtgct

SEQ ID NO: 715533 - DNA, 1569 bp, Homo sapiens
gctattagtccttcccggtgtgggcttgctcgcgtattgtgtttgtgtgttgcttcgggcgtacaggacttcgctgcgcgctgttggagctagcccgccccttgtagttgaccaactcctgtgcgtgtgttgggtagcctctcgcctcctgatatgtttagtggctctctctcgcgcggcgggcggcgcgctgaggagtgttcgccgcatggtcgtgatcattctgaggggtgcgatctgcttagtttgccgtctgattggtcgaggctaccgcgcgtcgctggttggattcgctcgtgtggtgtattgatgatgcttggtggttgttgttgtttatacgtgctccaccgctgggtgtgttggctgtcaggcaaggttgtcgtatgttagtgtgcccacgccatgtttgagtagtggcgcgccgaatgttggcttatccatagcgagcgcagggactaccttacgtctttttggggatggtgtgtgcatcctacgcagcagctggttggtggttgatcgctcctgctccattcgtgtggctagccgcgcccccctcccgtgggagaaggggggtcttacatagataatatttgtcgcccccggtggggctttctcctgcttttataagggggtatgacccccgctctctgtcgtgatgttgtcggccccccttggtggtggatgaagtggcccccacaaggctcccgaccgctgcgtctggtgttgtgttggtggtgaccccctcccctcctgcgttatttgtgcagggtagcacaagctcgctggcggggggtactctcgtgtgtggctcaccacgcctttctccgcgagatcttgtttatcgccccctctttgggggctcgccccgcgggtgtctcctcgagattatatcccccacattttgtttacaccgcaccacagtgggatgacacacgcgcgtatatgtgcccccccctttgtggggcccctcttatatatatagggtggtacacacacttcatatatgggacacacacaagtgtgtgtctcaccacacacaaaagacacacgcgcgtcgtcgtcggtataccgcggtatctcgcgagaattctcccccccgcgagatatattttcgtgtcgaaaccacacacgcgcgctctcccctcgtgtgtattatgtctctgtgtgttgtctgacacaggggtagcaacacatggagagttatccacaagtgcacatatacgcgtcccaccacgagagagtgcgtatacactccgctaagaagtttcctattgagttcttctgagaccctctatgtgttataacaccctccgctataaaatgtagaaaatatcatctctttggttttgttctattaatatgttaaacttctataaggcgcggccttctgagctaagtgttgcttgtggacttgaatggctacgcacgctattaggcaccaacggctaataagctcccctatccacccacaattaagcccttgcttcttcggccttccatcattttgaacccttaacctcatagatttaggacgaaacactgtatataacaccaacagataaagggtta

SEQ ID NO: 715534 - DNA, 191 bp, Homo sapiens
acccacacctcctgctgaccaagttccagaaagccggagactcacaggatgtaataacaattacaggccacgcgcggtggctcatgcctgtaatcccagcactttgggaggccgaggcaggcgcatcacccaaggtcgggagttcgagaccagcctgaccaacatggagaaaccccgtctctactaaaaat

SEQ ID NO: 715535 - DNA, 328 bp, Homo sapiens
gcctggcctagtttttttaaagacagggtttcacagttttgcccaggctggagtgcagtagtgtgaagctagctcattgcagacttgaactactggactcaagtgatcctcctgcttcagggtattgaatagctaggattgtacttgtgtggccccacatttgactaattttaaaaatttgtatagagacaggatcttgctccattgcccaggctggtcatgaactttttgcctcaagcagtccttttgcctcagccttccaaagtgctggtattatagttgtgagcccctgtgccctgccaagtttcttttaatattgaggttttga

SEQ ID NO: 715536 - DNA, 207 bp, Homo sapiens
aaaatatcaatacaaatggaagtgaaaacaacatatcaaaacttatgaaatataggaaaagcagttctaagaggggtgtttatagcaataaatgcctacattaagaaagaagaaagatctcaaacaacctaaccttacacctcaaggaactagtaaaagaagaagaaactaatcctgaagtcagcagaaggaagaaaatataaagat

SEQ ID NO: 715537 - DNA, 152 bp, Homo sapiens
ctccacgcatactcgatgctctgtctcctagtagctgggattacaggcacctgccaccatgcctgggtactgtttgtattttggtagagaatgggtttcaccatgttggccaggctggtctcaaactcaggagttagtaccaccataaggca

SEQ ID NO: 715538 - DNA, 352 bp, Homo sapiens
ctccctaggatgatggaatgtcaaagacgatattccgccaagcctagatcgggcgctccctatcttgcgccagtgggtcacgtggtcacccaagttctttgagtggctttcacctgctcattcaggtaatgtgtctcaattaagtcacacaatgggggtcatttttgtcagtggccagttagtgcagaaccagtagtgactgatacacatcaaatttaccaaatgtcatgcacactccattgcattcagaccgctctcccagtcatcacagtctggtttcttgatatcctgaaggaagattcggccacctcgatggttctgcagcttcatcagttcctcatcctatggaaga

SEQ ID NO: 715539 - DNA, 926 bp, Homo sapiens
ggaactcggtggtggacagtgctggcagcagcaagacttcgctcgtactctgtgcgcctcgcttatgcttttcctccgcaatccatgtctgataaaaacctgcatatggcctgagtatcgtatgtaaagtatcgagtaaggatcgacagactgaagatagacatgcagatgcgtcacatggcagaaaaaagtccagctgtcgcttccaacatgaatagcgactgtgaaaccagtgacgcaaggcagaagtcagggcgacattcgtgtacttgcaggggcgttgcgccccgtctgaactttgtcaccctggtactgatttccaacatagaccactgtggccttgctataatttcagcgttccttgtcatgctggtttacacttgttgtcaagactggcaaagaaggtgtggcactgcactgtgttttacacattgaacctgtgggctgacgcccctttttgcacgatgcaaaagcaaactgactggacaaaacgaaagcggaccgcggtcctgaacactttttcctccccgaatccatgtctgcttaattcataattcctgaggacttggtgtcaaaggggcctacacagtgcatgaacgtaaacctttggaccaattgattgtggagctgtaaatgcggacacgcaaagcattggtgcgcgtcctgtgcaaccgaaaaagtcgtgcgcgctcggcgctaccatgaacctaggtttgtagcacttcgttcaggcaacggtgaaaaggatccccaaacgcgtcgggcgccccagacacgggcttgtgtgcctttcgtcatatcggtgcgtttggtccacactttgctacgctctcttaaaattcgcaacgaagctcgtccccaattagtggttctaaaattctttcgctctccagattggtggcaattttcattcccatcgtacaatg

SEQ ID NO: 715540 - DNA, 155 bp, Homo sapiens
atcaagatgaggaaatgaggatcagagagatgacatctcttgtcaagtgtagctaataaaagtaactggaaaatggaggcgcagcccaggtgcctcccactaaagcccattctcgcaactctttcactgtcgactctgttgctttctctttccca

SEQ ID NO: 715541 - DNA, 460 bp, Homo sapiens
gcagaccagtcacatcgatttgcaagggtaaaagttaatcttgtttatgccaacatctcaattggttcagcttacacaattttgatggaaaattaaatttgagcaaactttccactcattggatgccacaactgtacacccagatcagctgaagacaagagcaaagctttcaatggaaatttaaacaagtgtgatcaagaccctaaaggatttctttgaaaaattgtaacaagagatagaacatggctttactagtacacttttgaagacaaagcacagtcaaagcaatggctaccaagaggtggaagtggtccagtcaaagcaaaagcaggctggtcaagagcaaaggtcaaggcaaaacaggtttttggaatgctcaaatcgttttgcttgttgactttctggagggccaaagaacgataacatctgcttatgagagtattttgttgaaaaaaaaaaa

SEQ ID NO: 715542 - DNA, 184 bp, Homo sapiens
cgtcaaagtaacccaagcattaaagggtttttattggctcacataactgaagagtccaagggatattctagctacaggcacggttggatccacgggcacaaacgctgtcatcaggattcaaatatatccatattagggctatgctttaccctgcactggctacactctctacatggtaagccct

SEQ ID NO: 715543 - DNA, 540 bp, Homo sapiens
ggcggatcacgagggtccaggagattgagaacatcctggctaccacggtgaaaccccgtctctactaaaaatacaaaaaaattagctgggattataggcgcacaccactacacctgggtgattttgtatttttagtggagactgggtttcaccatgttggccgggctggtctcgaactcctgacctcagtgatcccaccactcggctcccaaatgctggactacaggcgtgacccggcccggctgcaccaggcctgtttattccttggacactctgaaggtcagctctcttgacctcttcccaatcatgtctagcctgcagtgtctgactcagttttcaacgaaccatctcaaatgcaagtcttccttaacttccattcataattaataatttcctttggtttccagagtagttggtcttcacacttttggtcaaataacctttaaaattatttggaaaactgtttcaccctcttgcagataattaagttgacactcccaatattcttaaagtttaagtagtcgtataggattggtctcc

SEQ ID NO: 715544 - DNA, 359 bp, Homo sapiens
cccctacgcgtgctgtgctgtgcaggaagtgaagcgatctcagcgagggtgtggctggaagagaaggtgtcccttgtggtggctgaagttcagtgacttaatccatcctccaggcaatggggagccatcggggctcccactagcatgggcagttgctccacaaggagcccctttttctgatcacctccaccctcatctctcttctcggtctcagcggcatggtggtggtggctgacaatatctcgtagctctaccagaagacctactgtgtcagctacaacataccgtgcgtgccttctcactccgttccccgtcaccctccagggcatccacctcactccttttccagagtcttgcga

SEQ ID NO: 715545 - DNA, 463 bp, Homo sapiens
taaaaattggaagaaaagaaggctgggaaagacatggagccagctgcctccagccttgtgtcttttccctcctgcctttccaagaaaggtgaactacagatgttgtagctttccccaacccagtacactcttgaatacttttgctttgctattctccagtgcttcagaggccagacgtacacggtaggctggctcatggtagtacttctacatctccacaactgggcaatgtaaagaacctaggagaccctcttatatttttcagagcttacttgatggactgtgctacaaccatcctgtcactgcttaggagaccagaacatcttttcttcttagctttgtaatactcttttattctgaagcaaaaatgtattagattgggtatgctttttaccatagattactttataaatgtgccttgttcctggagcattggttaataaaggtatcattatgctgttaa

SEQ ID NO: 715546 - DNA, 96 bp, Homo sapiens
cccccgaaattccccttggggggggtttttttccttccccccaagggggccccgggggggattttggttttttttttaacggggtttgggccggga

SEQ ID NO: 715547 - DNA, 228 bp, Homo sapiens
ccccaggaaaaaacagggtttttgggggggttttttgggcccccctttgtggtttatcccccctcacccccccaaaataacccccccctttggaagatttgaaattttcccctgaaattggtcaaaaccctttttttagcccccggactttggggatgggttttagcccccccccctttgggttttgtaaagggaaaccaatttgggaaaaaaagcccagatttttta

SEQ ID NO: 715548 - DNA, 137 bp, Homo sapiens
ccaggtaactcacctgaatggttacctcactgctgaaaacccagaggggcgtggcacactcgctgtgtgtgcgaatacagcctctaaatgcgtcccttccttttctttcctgtcttcctctggcgcttacaatctga

SEQ ID NO: 715549 - DNA, 419 bp, Homo sapiens
  misc_feature (98)..(98): n is a, c, g, or t
  misc_feature (225)..(225): n is a, c, g, or t
  misc_feature (227)..(227): n is a, c, g, or t
  misc_feature (234)..(234): n is a, c, g, or t
  misc_feature (253)..(253): n is a, c, g, or t
  misc_feature (261)..(261): n is a, c, g, or t
  misc_feature (294)..(294): n is a, c, g, or t
  misc_feature (314)..(314): n is a, c, g, or t
  misc_feature (332)..(332): n is a, c, g, or t
  misc_feature (356)..(356): n is a, c, g, or t
  misc_feature (358)..(358): n is a, c, g, or t
  misc_feature (360)..(360): n is a, c, g, or t
attctcaccagtcacctccacttggccttcatagattttgtccatgcccaacctattgagaagcctgcgggcccgaatgttgccgattccctgcgctncttaatggaagaagatgaagatgcttccaaaaaaccgttttccccatacataaagaacaggggtactcccgccctgatgggggggatggataaaaaaggtcctgctgctatacgagagaatcccgtntntgaaaanaagccccagaaagaagttnaaaaaaangggggggcccgtccccaaatgtcccttgctcanaaaaagggtgggggggctcnaaaaaaggccagcttccncagaggtcagggggggggtggtgngngntaaaccccgccattttttatgattttttcagaaatagataataaacttttggcccgcca

SEQ ID NO: 715550 - DNA, 261 bp, Homo sapiens
  misc_feature (139)..(139): n is a, c, g, or t
  misc_feature (175)..(175): n is a, c, g, or t
  misc_feature (260)..(260): n is a, c, g, or t
tcaagcaattctccgtgccttagcctcctgagtagctgggttaacaggcttgcaccaccatgccgggccagttttggtgtttttagtaaagacggggtttcaccatgtgggtcaggctgggagtaattctttatattanttgaaaatgatttttttctaaagtagagaatcctantcaaggagattcttttctggggagtctcatccattcagtatttattaaatgctgatgtgtgccaagcaaaacaaacttattttcnt

SEQ ID NO: 715551 - DNA, 141 bp, Homo sapiens
caagtgctctccctccttcatctctctctgtttcattgatatagaaatttagatctgtaaggaccatcagtgtggtgaaggtcacatgacgctgctgctgaatccatggagagaacaaggataaatttccagaactcaggt

SEQ ID NO: 715552 - DNA, 951 bp, Homo sapiens
  misc_feature (12)..(12): n is a, c, g, or t
  misc_feature (14)..(14): n is a, c, g, or t
  misc_feature (936)..(936): n is a, c, g, or t
cgggcggcgtangnactgtctgggccgcctcgtggggagggagggggcgcccggccgcccggcggcgaccccggggcctggcgccaccatgggcttcgagctggaccgcttcgacggcgacgtggacccggacctgaagtgcgcgctgtgccacaaggtcctggaggacccgctgaccacgccgtgcggccacgtcttctgcgccggctgcgtgctgccctgggtggtgcaggagggcagctgcccggcgcgctgccgcggtcgcctgtcggccaaagagctcaaccacgtcctgccgctcaagcgccttatcctcaagctggacatcaagtgcgcgtacgcgacgcgcggctgcggccgggtggtcaagctgcagcagctgccggagcacctcgagcgctgcgacttcgcgcccgcgcgctgtcgccacgcgggttgcggccaggtgctgctgcggcgcgacgtggaggcgcacatgcgcgacgcgtgcgacgcgcggccagtgggccgctgccaggagggctgcgggctaccctttgacgcacggcgagcagcgcgcgggcggccactgctgcgcgcgagcgctgcgggcgcacaaggcgcgctccaggcccgctgggcgcgctgcacaaggcgctcaagaaggaggcgctgcgcgctgggaagcgcgagaagtcgctggtggcccagctggccgcggcgcagtttgagctgcagatgaccgcgctgcgctaccagaagaaattcaccgaatacagcgcgcgcctcgaatcgctcagccgctggcgttggccgcgccgcccggcggcacagggcgaagaaaccaaaagtctgactcttgtctgcatcgggactccgctccctgggattcatattattggtggcggccgagtgtggataactacgatggatattcagtgaagaatctttgtatcnagatagttgaagtgg

SEQ ID NO: 715553 - DNA, 108 bp, Homo sapiens
cgctgtagtcggtgtactcgtaggtacagtaccattggtggcctgagtgggagtggggggccttgctaccacacccatacccctactgtgactatgcgaccaggcgta

SEQ ID NO: 715554 - DNA, 171 bp, Homo sapiens
cgtgttgcggtcgctctgaggactccccacacgccgatgtgcagccgctattaaggttcgtttgttcaacgattaaccgtcctacgtgatctgacgttcagaccggagtaatccaggtcggtttctatctacttcaaattacctccctgctacgaataggacaagtagaaa

SEQ ID NO: 715555 - DNA, 208 bp, Homo sapiens
acgcatggggatggtcttctaaagtgaagcagcacttcgaaaggcgatgttggacaaagacggataatttgcctagtgggattgggcctggtggtcttcttcttcagttttctacttgcaatatttcgttccaagtaccacggctatccttatagtgatctggactttgagtgagaagatgtgatttggaccatgcgtggattgccag

SEQ ID NO: 715556 - DNA, 565 bp, Homo sapiens
  misc_feature (103)..(103): n is a, c, g, or t
gattgaaaaatgggagttgtgcctggagcgtgttacgcaatcaaggaagggtgtcaacgtgacacctagcgcatgttgactcccggatatacggagaagacangtagtgagatgggccaggtatctcggcaggctaatttgcaagacactgcgtgtgtgggcgcggaccggaggagctccgagacccgaaaaatacgttgaattcgggtcggtgtacatggatcggtgcgactagaacgaagggcagtaccttattgcaaaacttcgtgtaagctccctacaggccggaaagtcgtgccaaacaagatacccaaatccaatcggacacggcgtccggtttggtaaaaacagggggatgcaagcaagaccaaggggtccggaatagagcgccttcacgttggagacgaacagaaaacagttcgtgaagtgcgcatataagacgtcgattccggatttttccggaccaaggagtcccttaatatggaacaggattaattaaggaagaacgtagagaacctgttggacatgggggcggaagggtggaatgcaagaagaaaggctgctc

SEQ ID NO: 715557 - DNA, 457 bp, Homo sapiens
  misc_feature (231)..(231): n is a, c, g, or t
  misc_feature (246)..(246): n is a, c, g, or t
  misc_feature (270)..(270): n is a, c, g, or t
  misc_feature (297)..(298): n is a, c, g, or t
  misc_feature (319)..(319): n is a, c, g, or t
  misc_feature (337)..(337): n is a, c, g, or t
  misc_feature (343)..(343): n is a, c, g, or t
  misc_feature (352)..(352): n is a, c, g, or t
  misc_feature (430)..(430): n is a, c, g, or t
  misc_feature (453)..(453): n is a, c, g, or t
aaaaaaaaaaaaaaaaaaaaaaaaaaaaaagcggccgctcgaattaactttatttcaacataactatgcttacagaaatacactcatattggttaatagaatgcaatttaagtttaacttatcctacataatttggaccaaaaacttggtacatggtttaggattttaaaaaaggattgcaatcggtttaattttaactattacaaatgtataaaagatcttcccatcaangctgctaaagaagcngcaagaacctgagaatttaccttnggttgccccgaaagtaacactattggnntgcttaagtttataaaatggngcacaaaacttgttgtangttcangccgtttanaagttcaatactaatgggtatgggagggaccgggagggaccttgtaccatgtgaactgtgctaccggattagtttgcngtagatgtaatctccccccaggntcgg

SEQ ID NO: 715558 - DNA, 1448 bp, Homo sapiens
  misc_feature (1447)..(1448): n is a, c, g, or t
tggaggagggagtctgggctcggtgggcccagggtgggaatggcaggggtggcgggtctcggctcgctggcaacctccacctctcaggttcagggtgagttctccggcctcagctctcccaggtgggtctggggattggcagggtggtgtggccacccggcccagtctaattttgggtgattttggggtgggaagacggggtttgcgccactgtgggccagggcggggtctcgaggactccgtggacctacgggatgagatctaacccggcgcttgggcgctcccggaaggtggcttgagaattaacaggggcgtgtgagaggccccccgggagccgggtccgaagaaggcaaaggctaactggtaaattctgactgtgtaccggtgttataacaggatattaaaacctatggggcataaagggcgcccacaaatcactcaagaagggagcttacctggagaaaggggaacaaagaaagcgcaacacgtgtaagatttgtccacaatttggtgtataaaaacacataacatataagaggataacccacacgtggactatataaatattagcgcgcggacgataatttttatacaccaagaggcattgtcttctgggttaacacgaggggtgtactcaccgcagggtggacttatataatggccgattatttaacagcggaaaataaggcggatcaaaaaattgtgtgggacaggtcacactgggggagttaccatgagaagccccaggaagggggagcgaggcactatagagggcaccccacattggaggggacccacacgtgttgtgaccactatataaaagcacacgacttgggtggtgctaccacacaaaataaaaagttgggtgtagccccacaacttctgtggtgtttataaaaaaaccaggtcggttgcgggggaaacacagcgcgggtggtacttagtaaacaagcaaaataaccaatgtagagggcgggaaggcagcaccaacaaataaggcacccaatatattgagggaggacgcgacccacaacaacgtgctggagcgacacattaccacagaacacgggaggcggccacggagacaataacgaaccacaaaaagacggaggcccagcattggaggcaacaaccttccaaaaagacacagttgaaaaacatattgagggaaagcgagtcgatgatagcccaaaaaaaaactcaataagaagagcgggagaaatatcacgcagcaaagaatcaagaaagagactaacgatctgtatagcgaagaggtagtaagcaatgaaattaagaaccgatgacgtcgataactaacaaatgattgagataagaacaaagaaggctaaaaagaatcaaataaagtaatgcatagatagacaggatcagtctgtcttcagtctgtttgctttcctcgctagcctctcatacttactgctccgtcgtnn

SEQ ID NO: 715559 - DNA, 1235 bp, Homo sapiens
  misc_feature (1235)..(1235): n is a, c, g, or t
agcggccggggcagagtgagggctttacccaggtcacccgcaatgggtggccgtacgggcgaagaaacgacaggctgaacagctgtccgcagcaggagagggcggggatgcggtgccggtatggtacatcagaggaggccagtgccggggaagaggcccgtcttcccagcccgcgtctgtggggtgacgggccgtcctgccgttggagacaagacagacatacaagggaaaatttccatgttcccagcttagacagattaccacatccatttggaacacggaaaatctggaactgacaggattatttgtagcttcgcttagttgggtggaaacgattatgtggggaagagttccgagaattagcggcagttttgaactttttgaaaaattcaaggggaaagtgttagggaaatttcaaggggaccatttgggtacaggggaacaaaccgaagaggcacttgctctacgctggctttcttgagcaacaaacgctacgtcttgaagtttgcgatgaaacaagctttttaaacagttccttccgagacatttttacagggggttgcgacggcgcaatgccaaccttttggcgcccccattcgaatttcaagggggtagggggcaatttgaaagccccttcctttttccccttttaaggaagaattcgatatattggtggaagaaagttttacccagcgcaagttgcctttaaaaagagcccgcccgtttagaacacggccgggcaggaaaccccatatttcctttaatttccgcgaggggggcccagacttttagggggcaaaggacaatagttccggccgtttgggtcccaaacacgggggaagtgggacaaatataacacggccaaaagatttttcaacccgcaatttaagataagaaaaaattggttggaaacgaagcgggggcaacacacaggtggggcacattaggcgttaaataagtgggggccgttggcagtttggtttgaaaacaaccggctttttccaaccaaatattcccctttttgagcggcttccccgtgttttcccgagacaagagagttaatttcaaatagaatcttgcgggcacaacagaaaaaccctgtggcccaaatttttggccagaagcgccttaaagcttattatggggggaaagatattcacgttccctttatcccaagaggagagatctcacagtgggggcacacctattattcccgaagagctttgtgggggcan

SEQ ID NO: 715560 - DNA, 261 bp, Homo sapiens
actccaatctcaccagttctaaacaagggtattagattctattgtgactccattagaatttatgatagattattttttagctattttttccctgtgtgaacttgttttcctaaaaatcatgtaaagtaagagttctcttatgtattattttcggaagaggggtgtggtgactcctttatattcgtactgcactttgtttttccaaggaaatcagtgtcttttacgttgttatgatgaatcccacatggggccggtgatggt

SEQ ID NO: 715561 - DNA, 236 bp, Homo sapiens
gatccagcattctcaagtgcaacctggacgagggccacaaaaagtttagctaagggagcgcttcaggtgagaagcagcacccccttggtggacacagtcctgcgactgtggaaaatgccaccatctctccccttggcctgagatgacagagctgttcagatccacgaatgtgcatgattctcataaccccccagacctgagagcagaacaccagagctctgtagctaaatgctttg

SEQ ID NO: 715562 - DNA, 157 bp, Homo sapiens
cagaagggaaaggtttgctttgttaatcatgccctatggtgggctgaaattaactgcttgcacaaatatacgtttcacttttaattaattgtgcttaaggctttaattaagatttgggggtcccttcttagacgcagctcgtactgacgatcgtggg

SEQ ID NO: 715563 - DNA, 681 bp, Homo sapiens
ttagtggtcgtcatggtgaccaagaccaaagccggacaggtacctcagtcacccccagaggcctcacccagagctgccccagagtgcctctacatccttcgacgatgtggcacgcatgtcaggacgatgtcctcatctgccacacacgtggcctggaccagagtaggacgaagagcccggttccatagagcaattcgggccacgaagcaggttccgcatggagctctggagtcagtgctcctcgagtcccttcctttcactggtgagcatgggagtcgtatgatgggaagtaccgcaggcacatacctaccgttcagatgtacggtctactggaagtggtgaggatgatagcatgcacgggaagaatacctgtacgtggagacttatagagccctgagtcatgcggcgggtgcgatcgacccgtcgcttagcacgtagcgcaatttgcacggaccaaaacgcatcgcaacgcagaaggcacggatcggacatgtgcatccctttgggtcaaacccggagcaaattacacttggaaaggatcccacacggatacgcaattggcatacccatcgcgttgcatgcgtgccaaaggtgaagtacgccgttggttgggtactcgcgagagcgaggtcccgagtcccattgggcccttccgacttggtgaccgaaaccttccctagg

SEQ ID NO: 715564 - DNA, 703 bp, Homo sapiens
  misc_feature (3)..(3): n is a, c, g, or t
  misc_feature (56)..(56): n is a, c, g, or t
  misc_feature (67)..(67): n is a, c, g, or t
  misc_feature (74)..(74): n is a, c, g, or t
  misc_feature (112)..(112): n is a, c, g, or t
  misc_feature (114)..(114): n is a, c, g, or t
  misc_feature (119)..(119): n is a, c, g, or t
  misc_feature (123)..(123): n is a, c, g, or t
  misc_feature (152)..(152): n is a, c, g, or t
  misc_feature (165)..(165): n is a, c, g, or t
  misc_feature (224)..(224): n is a, c, g, or t
  misc_feature (231)..(231): n is a, c, g, or t
  misc_feature (247)..(247): n is a, c, g, or t
  misc_feature (299)..(299): n is a, c, g, or t
  misc_feature (301)..(301): n is a, c, g, or t
  misc_feature (306)..(306): n is a, c, g, or t
  misc_feature (308)..(308): n is a, c, g, or t
  misc_feature (315)..(315): n is a, c, g, or t
  misc_feature (324)..(324): n is a, c, g, or t
  misc_feature (382)..(382): n is a, c, g, or t
  misc_feature (408)..(408): n is a, c, g, or t
  misc_feature (411)..(411): n is a, c, g, or t
  misc_feature (425)..(425): n is a, c, g, or t
  misc_feature (448)..(448): n is a, c, g, or t
  misc_feature (543)..(543): n is a, c, g, or t
  misc_feature (545)..(545): n is a, c, g, or t
  misc_feature (549)..(549): n is a, c, g, or t
  misc_feature (563)..(563): n is a, c, g, or t
  misc_feature (595)..(595): n is a, c, g, or t
  misc_feature (696)..(696): n is a, c, g, or t
tgnattctctctccaagtccttcctttaatgtcagggagtgcttcaacccaaaaanaagcagtatanataccanagagaaagggacctgagggcatctgagtaatgcatggngnggtanatanaaaccttggcccagcccaaaggagcagtnaagggcctggaanaaagatggtttgctctttccccctcctcctctctctttcctaccgggcttaaagtccgnggaaganaaagtttttaatcagnggaactgaaaaggcctcagggccggggaggggagatttggttgttcagtaananaaaangngtttaanaaaaaaaanagcccaggcttcccagcagtagcccatgtgttggctggttcagcagcctgacctctanatctagacaagagaagtgaggagggngantgctgggcattggngtaggtttatgacggagcagcanaagattttccgtgcccagtgaaaacgtatacaaaaattcaaagccccttcccctcagccctgctctgctgacaaggaagctgctgagagtgagtnanagcngggcacaaagtgtnttgtgagaccagctatagggtctaatgcagtnaagtcagttatttaggacctattttcacacaggggcaaggaaaaaccagaaacaacttctctcttaccctttaaactaagatacttcattctacacgattncctgaaa

SEQ ID NO: 715565 - DNA, 205 bp, Homo sapiens
ccgataagtagctgctgattctaacaaggaccttctattaacacgcctcctggcgctgacgggtcccatcaagggaacaaataaaaagataccttgtgcatagcgggcggagctattcctatacccaagaatcaaaaaggagggacctcgcctactttacctccctgtccagcttattcccggtgctggaaaggcgcctccaggg

SEQ ID NO: 715566 - DNA, 907 bp, Homo sapiens
tggatgtagctgctggtgcttaggaacccagtgtgggctgcccgagtcggagatggtttcttccggcggaggcggcggggccgtggccgagactccgcagggacgcgcccccgccgccgccgccgcgctcccccgcgcggcctgagtgaggcgccgccgccactgagtggaatgcgagcccggcccttggcgcgcgcggtgcagcatgcgggccgctggggttgcgctggggcacctgctggctgccgctggctgtaggagctgtccagccggcccctgtgccgccctgccctggctgcttccttctcagctcgcaggcctgcctcagcgagagccgccctgccagcactgtgcgcctgcctgccgcccggcctgcgacgctcgggagcaaattgcccgccggtgggctctgcctgctctgcccgtgggccagccatggctgtgctgtggttgctgctgctggggcttctatgcctggcctgtgtgcctggggcccgtctggtgtgcctttgctggcatcccccgttgattgcgtgcgtgattgtggctgtgctgtgccatgcctgggtggccccctgaagagggacagatgcccgtgggtctgcgccgagctggggttgagtgcgtccgggcgggccgctccgcaggcccgccggatgctggcgacggtgtgtcatggtcctcaaaaaaccttcttgttgagacctaaggaacccatttctcctccatatgaccaggtacaatacagtggaaagccttctcaaaccccaggggtccttgtgacattcgtcatggtatttaaggaacctagctaaaggtccaatagtgagtacccattccaggaaggtaggctcagaagattaaaggaaattgacacctgtcaataccgggagagaacacaatgccc

SEQ ID NO: 715567 - DNA, 1863 bp, Homo sapiens
  misc_feature (1299)..(1299): n is a, c, g, or t
tcaactttcaactcccatatcttaattggggacaaaggagtgaagtgatgcaaaccatcaccaaaggcccacccaccaagggtgtccaggctttcagcaccatagttacagcattgacgtgaggtacatttattcaaatacaggtgcaaccttggggatgtggattgagaagtgggagaaaatttccaacacaggagaagtggaagacataagagtgtcctttcatatgagctgtgtgggtgctagaggtgcatgtgatattggagcacgtggcaccagctccacctatatgtggattagaacacgacagggaggtgtcataaagaattatctcccactatttggcgacagatatagagatataggcgaaatgagacacagaacatctctccccatataatatatacagaccggtggaaacacaagtggagacagtgtgaggaatataacctgtgagaggggccaaaaatctcccttatatttaaaaatatatattttggtggaaaagaaaggaatcgcagagattttcatcaccccttatacacaggggcgtgggggatacatagagggcagggcgaaacaaacagtgtgaaaaggggtaaaacatttagacaaaatatcttatacacggacaagaggacacacctcagaggactccttgtgcgtgtcgaaaaagaacacactgctgctcaatctaagtgtgccaacagaattgtggaggacaaaaaattgagtcatcatcactggggggagaactgtgtgttgtggttcaacccactcgtgtggtggcacaatttactccccaattatacccctcagtggttgtttggacacccgtacagacaaaagggaaatgaacccacaaattaacaccgtccaaggtagcaagagagtgggtttcccccgaaagggagtatataacacaaggaaaaacaacacgagtgtggggaggaggtgttaaattaccgcgcccaacagagagggggcgagacgaggagaaaacccttatacacagatgatgggcacaaaaatcaccgcggaccaccccaaagaagatgggtaggcaagcacacgaggattaatcatacaaacatcaccaacggtgggtgtgcggttgagtatatagtgaacatgcagaccaggagacaccttatcagccccaagacgaccacgggatgaaactacccatcaacagcagtgaggccaagaagagttattatgagacaagcaacgacgttggtgtaacatccaacaggaagaaaaggagcccgagagaaatgtggtccccttagtggtggnttgttgtgaaccccactaccgtgggtggtgtggcaggtatgagcgccacaaaaagagccccatgagagagagagaagagagcaacactcgaggagagaggttgacccccccccggagtacacgaaaaagagaggacgaaaaaacaccacatttagagcacgggatcgccgcggcagcgcataagtagaggcgtcctgggagcaatcagaggagggacccaaaccaaaagatagtatgcgaggggagcccccaggggcacgccacaaaagatggcttctcccaaacccaagaggatcctggtcaggtaggttcactcaacaaggggggagcagagaggactcaccagcgagacacaacatacatagatgagcagaagaacccggtcgccaagcgcaaagagacagcacactagacacaacataaaacagaggagagcaaaagcacaccactgagtaaaggataaagacagaaggaacaaatgaagaagcgaagaaagcaagaaagacaaaaagtaagaaaggattgcactaagcagagagacaccaagagaatgcaaaaagacac

SEQ ID NO: 715568 - DNA, 596 bp, Homo sapiens
gacagcctcaagggcttcagcaccggcgcccatggcagagccagactcactcagattcagactctgagggaggagccgctggtggagaagcagacatggacttcctgccccatccagatggggaggtgtgatgcgcgtcattgactagagcgaacgctgtcgcagagtcatctgtttggtgggagctggaatctcccacatcccgcaggcatcccccgactttcgctctccatccaccggccttctatgacaacctagagacccctacaacaccatactaaccccacaccacaacccccaaacaccaccatcaaccacccccccaccccctccccacacacacccactaccgcacacccgcacagcacaaccacgccggagcagagcacacgcgatgacccgcgccagccgccgccaaaacgacgcggacgaccaccctcccccccccaatccgccgcggacccgcccgaacacgcaccacacgcagggcgggcccaagaacacacaccagaagcccggcgagggaaacggaccagaccgccagccgacacgagccacgagacggagcgagcgagaccccgacacccaggagccga

SEQ ID NO: 715569 - DNA, 317 bp, Homo sapiens
actgattcctctgctcttccttccatcttttgaacctgtcgatgagctcgtacaagtagcacgttttctctgctgggggagaataaacttgtgcttcaataactccttagcagtgggtctaaagctcggctccttattcaaacaggcctccacaaactccttgaggggtttactgtagtttccttccaacgtcggagggttgttctttggaatgaggaataaaactttcagggggtgcagctcgaaatgaggtgcttcccctctcgcaagttcaatagctgttatgcccagggaccagatgtctgccttcgagtcat

SEQ ID NO: 715570 - DNA, 1228 bp, Homo sapiens
gaattggttgcagcgcaggccagtacataaaaatgggtttgctgcttatcagcagtctcgattggtgcctgtaatatgccagagacccagtggttcatgacctacttagctctagtcactctggccaagctctgacctgcttgccactgatagccagggaggacattatataacgcacagcgattgcctcaaacactcgtccaatgtctagcgagagtaaccaagtttgcaggtatggtcgagaagctagcctgtgggtagtcttgagcattccccgagcgcccttcaccctcatctgttcgcacgcgtccatgcaatttcatacgatatgcgtctgtatagtagctgtgcgtcatgctcctagatggcaattcaggagcattgtggtctgtgtttcaggtaaagattaactggtatgaaaattgtcccgcgagctcgctgttcggcgaattctatagagtgggacagagcccaatgatgttggctctatgggtacatgaatacttgaatccccgacctaaggccattgaaaagcaagctagtggagcgtacgtagaaattcaagcggtagtgatgcaaagcaatacctagataactaggatactagatatggtgacttttgatgcacattaaccacactgcctagactggccttttggcacttgacttgtgtctctacttttgacgtcgtttgtagaacatcaaagataccttgtagacgggtaagaaggctccttagacatgtgccctcgattcttaagcgagaacgatgaccccagatggtatcatcgaaggacgcgtctaacaggtgacctgggtccgcagcaagtgactagtccgagcttaagggtcactgggacagtgcatgaacggtgagaaattcttggacatcccaagcggagagtataggcctggtttgacacactttgtttgactccattacgaaagtattaacgtctggttaagagagtcttgggaaccacgtagtccaggagattaaccctttcaaggggcaacaatccaggggggtccaagaatcggtggcatggtacattcagtaagaggtggcatctttgctgtgtgcgtacaactcttgggccacggctgtaatacttggaatctggggaaagcgaacacttacagaagttcccaattcccaacgcagtgaatttagacggccccagagtgggtttacgcccaagagggcctagctgttgtacgaaaattg

SEQ ID NO: 715571 - DNA, 876 bp, Homo sapiens
tgctctgtgtggtcacagatcggatattccttctgcatagtctattaatggtcccctgaaatgaggtactgcaaatggcttgtgatattaacttgtatgttcaatgtagactagatgaaggaccaaccttatctctctaaatcgtactatagtcccttatatatttgatatcgtctgtcacacatacgacatctaggcgatatcatcactaattggctatctttgcacatggctgcattgtaccaggcccatcgagtactacaaatgcactcgttcattgttaaagattccaagctcctggtggtcgttgccattaatattgggacctactcacataggttcttgaaatcgttagattccgaatgattgcaattgaggtatttgggactgggctaggcttgtaagttccctttgaaggcttaattacggaaggtggccacttctgacctcaactcgcggaatagaaaattgctccattttcaaccgtagcttttttagaaccaaggtaaaatttgctatgcctggggatcatgggtttgggtgcccacttttttgcgaacccgagaatcgtgatcgaaaaacgagaaacgggttttgacctggaagtgccgcgcacaagagaatcgattgtttcgctataaaaaggaaagggctccaaactcttttgcggaggcaattgcgacctgtgtgtggacgattggtcgaaactatacctttccttataatgcgtgggatttattcccccagatttgtgtcacacattccccttgggggggggggtaaattttgattatcttaacccaatttacttcattggacgctttcctaattccaaaacaaggtctgcttgggggtgggaagatgcctagacgaact

SEQ ID NO: 715572 - DNA, 772 bp, Homo sapiens
tgggctggactcaggatttaaaaacgggaacggtgaaggtgacagaagtcggtgggagcgagcttcccccaaagttcaacaaggtggccgaggacttggatggcacttggtggttttttaaatagtcatcccaaatatgagatggcgttggttacagggaagtccctggccatcctaaaagccaccccatcttctctctagggagaagggcccagtcctctcccaagtccacacaggggaggtgatagcatggcttccgtgtaaatttatcgtattgcaaaattttttaaatcttcgccttaatactttttaatttggttataaatttggaattgatgacgccttgcggggccccccctttccccctttttggtcccccacattgtgagatgtatgacgggcttgtgggctctcccgggggagttgggtggacggcagccaggggttaacctggtacactgtgactttgagaccagttgtgaaataacaacgtgcaccaccttttaaaacaacaaaacaaaaaaaaccccgcgcaagaaacagagttccccggcgaacaactcatatgtcgacgggagcggaggaaaacaaagagggctatgggcaagggggcaacggtgcaacacaaacagcggttgcacggggaacgccaagtatccttgggctaccacgaggggggcaacaactaggcgcggggatcccccccgtaatggggaccgcaactaatcacacgaccagaaaagaccgggtgaccaccggcattagaacgccg

SEQ ID NO: 715573 - DNA, 362 bp, Homo sapiens
tccccatcttcgtgccccatgatctttacacacagagaccttcccaggagctgtgacttgaacttcacaatcggcagggtccacccaggagccgtgtcctcctcacagtgcaattggatcccctcctctctcaacctgtgtgggaagactggaaacaaaaaatagagaaagttggaggtaacacactaaggggatgggcatccccaggacagaggaaaacactgaggggatggatgggccacacctgagcaatctcaggaccgaggaaaacactgaggggatggatgggccacaactgagcatcctcaggaccgaggaaaacactgaggggatggatgggccacacctgagcatccccagga

SEQ ID NO: 715574 - DNA, 587 bp, Homo sapiens
  misc_feature (9)..(9): n is a, c, g, or t
  misc_feature (577)..(577): n is a, c, g, or t
gttcttcangtggtgattctgagattttagtgcacccttacctgagcagtgtacagtgtacctaatcccctttctttgggtacgatacgacaaaagaatagaaatgatggccaggcgcggtggttcacgcctgtaatcccaacactttgggaggccgaggcgggcggagtcaccccattactactaaaaatacaaaagtagccagacgtggtggtacatgcctgttatcccagccactcgggaggctgagattataggcatgctccaccatgcccagttaatttttgtatttttagtagagacgggttttcaccatgttgaccaggagggtctcgatctcctgacctcatgatccacctgcctcggtttcccaaagtgctgggattacaggtgtgagccaccgcacctgactgcaaatgattttttaaattttaatagttttttgggtacaggtggttttggattaaacagataagttcttcagtggtgatttctgagattttagtgcacccttacctgagcagtgtacagtgtacctaatatgtagtcttttatccctcactcctctcccaaccgnatcacccgtt

SEQ ID NO: 715575 - DNA, 305 bp, Homo sapiens
gtcggcaatgagaaacattgaggacttctagtccaaggaagtaatattattggatctgtatattaaaataattatttgagaggtggtacacaggcctgattgaaataggtaagagttggtggctgggaaacgggttaagaggttactgagcttggaatagaaaagctaaaagggatgtgagcaattttgcaggtggcagcctcatatggcttgccaattcatgcaggcagcaaaggggcaaaagcaagtttgggtaactgcaacagcatgctgggtggtgtggatctgcatcatctagcaagtcc

SEQ ID NO: 715576 - DNA, 503 bp, Homo sapiens
gtacctcaccaacccccaaggtcctaaacttcccaacctgccatttaaaatttcggttggggcgacctcggacccagaaccccacctccgacccagtacatgctaagacttcccccagtccaagcggactactatactccaattgatcccaataacttgacccaccgggaccagttaccctagggataaccagcgcgccaatcctattctagagtcccaaatccacaccaatagggtttacgaccctccgatgttggatccaggacatccccgatggtgccacgcccgctattaaaggttctcgtttgttccacaccgattaaagtcctaccgtgatctgagttcagaccggagtaatcccggtcggtttctatctacttccaaattcctccctgtacgaaaggaccagagaaataaggcctacttcaccaagcgccttcccccgtaaatgatatcatctccacttagtattataccccccccccccccagaaccgggtttta

SEQ ID NO: 715577 - DNA, 80 bp, Homo sapiens
actcccagcagcgcacaaactgctctaatttcttctgtcttgtttatgccaaaaaagcaaaccaaaaaaccactcttgac

SEQ ID NO: 715578 - DNA, 453 bp, Homo sapiens
  misc_feature (32)..(32): n is a, c, g, or t
  misc_feature (66)..(66): n is a, c, g, or t
  misc_feature (166)..(166): n is a, c, g, or t
  misc_feature (171)..(171): n is a, c, g, or t
  misc_feature (451)..(451): n is a, c, g, or t
gtccctgtggtccccagctacttgggaggctnaggcaggaaaaatcgtttgaaacccgggaggagnaggttgcagtgacctgagatcacgccactgcaccccagccctggcgacaaagcaagaaggagtctcaaaaaaaaagaaaaaaaaagtgtgtatggccaanagtgngtgtcacgcctataatcccaacatagctgaggtgggaagattgcttgagcccaggaatttgagaccagcctgggcaacatggtgagaccctgtctctacaaaaaaatacaaaaattagctgcatgtagtgacatgcccctgtggtcccagctacttgggaggctaaggtgggaggatcgcttcctcagctcctgaggctgacccaggaggtcgaggctgcagtgagccgtgatcacatcactgcattccagcctgggcagaagagaaagatcctgtttcnta

SEQ ID NO: 715579 - DNA, 229 bp, Homo sapiens
agtactatataaggaccaatactatccacagggagtaacatactaggtgctccgtgaacaccctaccctatatactagctagcgtcggccccaaccactgccctgagccaagacctagggtagctaaccctctccaccaggccacctagtggtgatctacaacacaagtggcacttgattccacgcactcgattccatgcccccatcacctgctgtctttgcccgcggg

SEQ ID NO: 715580 - DNA, 658 bp, Homo sapiens
gggggtcgcggggcaacctcgggctttcttgtccaaggtcatgccccatggataagcccgtgggggtcatttcgtatccctgtggccatgttaggagtcgtaatgcacggtatcgtcacccagaatcgggattgttaacgatcatggtcgaccatggaagtaagcatttcaaagttgctttaagatatggagcaaaaaactcagtaaattcgttatcatcagtctagtgcaatcactgggaaatagagtctcactctgtcgcgcagctgtgactgcactgccacattaccgcctcactgcaacctccgcctgctgggctcaaacgattataaggccgcagcatcctgagtagctggtattacaggtgcattccaccgcagccggctaattgatagtatgtcagtagagtcgggtcgacaccatgttggccaggctggtcatggactcctgacctcaggtgatccacctgcagcagcctagcaaagtgctgggattcatcgcgtgggccgcagctgtcagccagtaaattttttacaagcacatgctagaggatacaagaaaggaatgtgccagaatcgtaatcactgaagctggatgatggatataatcaggagtctgtagcgatctctctactgttccaagtgccgaattcctgcag

SEQ ID NO: 715581 - DNA, 1197 bp, Homo sapiens
ctgtgcacgtgcctggcgcagcctgtttccctatgaacgtctttcgttgtttcatcgctgtgttttattttcgcgagcttgttccttcctttttggcctattgagccggtgttcaaaaacgcaggttgtcccggtccgatctccggggatttctggcgcaacccactctccctccccactcctcctggtcaccccccaccccccttgggatcccccgggcctcgcgccaccccttgccggggtgaaaggaggaatggaaaaggtgaagttctttgctttacggcctccgctgcccttttgcgcctgtgcaattgggacttgttggccctggggtttcggggcacacactttgtccctgagtccagaccactaaatcccaggggcttacacccggacttctctggtttgcccactgggtcatcataccccacttgggtggtcttcctcttccctgtgtggcttttttgggcttccttcggggccctccaaggagaagctaattgtctgtatgagtcaccctttgccacgtctgttctgtctcttaatcacatgttggtgtgaggtgtgcccccacgcccacttgtctcgcgctaatgttgtttttatgaagaatataaggctgaaatgttcacgaaggttttatatataaccacaactttccgcgccacgccacgaatgggaggaattttattcccgcgattaaccacaccccccccactcggcttcgagatcctcggacccacggaattgcacggcacgatttttaaagtgctcgttggggcgttgctaaactaccaccacgaattgggaggagaaaatgccctctccacatcgtcgagagaacccgcaggttccccgagactcctcgctgcacatctaaatgttaactgttgggctttgggaattaaatttccaccgcagaaggcgaatccacataaggagggctgtgttggagaagaattgtggggctggctgaggagaaaaatgtgctggtggtaggctgcacgcacgcccttggaattgcttttgtcgaggttttgggaattgtctttgcctgctgcctcgtgaagagtaatcacgaaagtggctaacgaaggtgaatgtaaggggtctggtctcctcacgcctcctcaatctgggggagtggaatagtatcctcccggtttttccattaaacggattattttttcagaccga

SEQ ID NO: 715582 - DNA, 540 bp, Homo sapiens
  misc_feature (10)..(10): n is a, c, g, or t
  misc_feature (28)..(28): n is a, c, g, or t
  misc_feature (36)..(36): n is a, c, g, or t
  misc_feature (91)..(91): n is a, c, g, or t
  misc_feature (175)..(175): n is a, c, g, or t
  misc_feature (497)..(497): n is a, c, g, or t
  misc_feature (530)..(530): n is a, c, g, or t
tccagacctngcggaattaggaccaggnacgaagtnagcctgattgtgtaagagcatctgcactcagaaacccatcatttggataagtgtnaggggtgtgtattggctgttttttcattttaattttttgtttttagagacagtctcactctgttgtcgaggctggagtgcagtngtgcagtcacggctcactgcaacctctgcctccaggttcaagcaatcctcccacctcagcctcccgagtagctgggactacaggtgcgcaccaccacgacctgctaatttttttatttttatagagacggggttttgccctgttgcacagactggtctcaaactcctggcgctcaagggattccgcctggccttcagccttcccaaagtggttagggttatgggatgttgaggccaccacacccaggcctggtttgttttctcatctggttgctgggtagggttgcagagattcccaggaaccccgtaggaatggttaaacntgcataggcaggttgaggcagttcatttttttnccgtgatttt

SEQ ID NO: 715583 - DNA, 226 bp, Homo sapiens
cattacatgtccaccagaaatcttcatgatctataaaacattaatatgtatatctattttactcatttaattgtgtttattttgtttttaaatcaatcaagtaatctaggactagcattatgtttgctagacctggcatttgctcggtacataaggttcaaagtttcctttccttttttttatttattttatattttgcactgtattttttccataccctgaagat

SEQ ID NO: 715584 - DNA, 179 bp, Homo sapiens
ggatctgaggtcatatatattaattagcctcatgatcaccatgttaaagtcagtatggagaaagatcattctgacctcttcagaaaccagctggtatatgaacattcttgatcacccagattgtgtttgaaaaccgtgattcttttcacccatcgtcccttaggctcacacaaataaaa

SEQ ID NO: 715585 - DNA, 172 bp, Homo sapiens
tgaggtgccgtattcccagtaacatctttgtgagaccagtgggtgagaaagacacctggtcaggaatgcggacacgggtcaactcaggctcgcccatggcgtcagactagaggcgaacaaggactctcgtgtataagccaatcctgaggcaaaagaaacattttaattcact

SEQ ID NO: 715586 - DNA, 384 bp, Homo sapiens
  misc_feature (29)..(29): n is a, c, g, or t
  misc_feature (35)..(36): n is a, c, g, or t
  misc_feature (56)..(56): n is a, c, g, or t
  misc_feature (70)..(70): n is a, c, g, or t
  misc_feature (81)..(81): n is a, c, g, or t
  misc_feature (84)..(84): n is a, c, g, or t
  misc_feature (87)..(87): n is a, c, g, or t
  misc_feature (94)..(94): n is a, c, g, or t
  misc_feature (96)..(96): n is a, c, g, or t
  misc_feature (108)..(108): n is a, c, g, or t
  misc_feature (119)..(119): n is a, c, g, or t
  misc_feature (125)..(125): n is a, c, g, or t
  misc_feature (129)..(129): n is a, c, g, or t
  misc_feature (138)..(138): n is a, c, g, or t
  misc_feature (154)..(154): n is a, c, g, or t
  misc_feature (156)..(156): n is a, c, g, or t
  misc_feature (163)..(164): n is a, c, g, or t
  misc_feature (166)..(166): n is a, c, g, or t
  misc_feature (168)..(168): n is a, c, g, or t
  misc_feature (173)..(173): n is a, c, g, or t
  misc_feature (184)..(184): n is a, c, g, or t
  misc_feature (189)..(189): n is a, c, g, or t
  misc_feature (192)..(192): n is a, c, g, or t
  misc_feature (194)..(194): n is a, c, g, or t
  misc_feature (199)..(199): n is a, c, g, or t
  misc_feature (202)..(202): n is a, c, g, or t
  misc_feature (209)..(209): n is a, c, g, or t
  misc_feature (215)..(215): n is a, c, g, or t
  misc_feature (217)..(217): n is a, c, g, or t
  misc_feature (221)..(221): n is a, c, g, or t
  misc_feature (223)..(223): n is a, c, g, or t
  misc_feature (225)..(225): n is a, c, g, or t
  misc_feature (230)..(234): n is a, c, g, or t
  misc_feature (236)..(236): n is a, c, g, or t
  misc_feature (242)..(242): n is a, c, g, or t
  misc_feature (245)..(245): n is a, c, g, or t
  misc_feature (248)..(248): n is a, c, g, or t
  misc_feature (259)..(259): n is a, c, g, or t
  misc_feature (280)..(280): n is a, c, g, or t
  misc_feature (288)..(288): n is a, c, g, or t
  misc_feature (296)..(297): n is a, c, g, or t
  misc_feature (303)..(303): n is a, c, g, or t
  misc_feature (305)..(305): n is a, c, g, or t
  misc_feature (334)..(335): n is a, c, g, or t
  misc_feature (343)..(343): n is a, c, g, or t
  misc_feature (347)..(347): n is a, c, g, or t
  misc_feature (363)..(363): n is a, c, g, or t
  misc_feature (370)..(370): n is a, c, g, or t
  misc_feature (373)..(373): n is a, c, g, or t
gaggacggacggcctagcccaggccaagnctgccnnttgccccggtggtgggagcngggagacccctgtncttggccgggncanggncgggggncncgcaggatgacnccccgcgaccnctggcncatncttgcctgncagtgtacagtatttncnccaaggnncncnccgancggcatgtatncccancancnggtgnccnctttgtncatgtntnggcnananaatannnnncngggganttnccnccttacccaanacctggcgagattagtaatgntcccatancatttaanncaaatntnatgggttacccagaccgccctggatggcnncgatatanccanaggcccccatatagtnatggagnccnatatgggtccc

SEQ ID NO: 715587 - DNA, 126 bp, Homo sapiens
  misc_feature (53)..(53): n is a, c, g, or t
  misc_feature (117)..(117): n is a, c, g, or t
ccttccactgccttgaactttcttcctttttattcctggtgccatctgtccangcagctagacaagaacttgttcaccagcagccggattcaggccttcccaggggcataataaggnaccaagccc

SEQ ID NO: 715588 - DNA, 447 bp, Homo sapiens
gatgttagctacaaagactagtaaatgtgcttcatattcaaacatgctgtatcgcaagcctatgtgatcaattaataaacgctatttacttgtgttccttacagtcgttgttaggtatttaaatggtaggtaatatgttagagtctagcaagtttaataaatcatgagatttcccatcgttatacccttttgtattcacctttcttggatcacacattttgagtgaactacgggtttttatttacagacatttgttgtattttatggttgtaactgcacatgcttttcaggatgagactgaaagaaggtagggcaaaaatggttgaatctattttcagatagtagttcattcttaagtgaagtgtcttgtctgcattatgcagcctggtatgtatccagtactaaataggtaggttaaatgtggtaattctagttcagtgtcttacc

SEQ ID NO: 715589 - DNA, 171 bp, Homo sapiens
gcgtgcgcaggggcttcgagtgcgcagaacacacggattgctagttgaatgcacacctgaggcttccccatctgctcacggttcctgcagaccaggccagagtccaggctgtgttccacgagcgtggccgcaactccctaggctcgactaaagcattctactagctcactc

SEQ ID NO: 715590 - DNA, 377 bp, Homo sapiens
gaaaagccgagaactgactttgcttactgtgagtggactgactctaattgaatctgcggggctttgatactttgatggatcccagcggaataaattcaggctgctgaaactataaaccctgagcccaggaagcgggctcttctttcttcaaaagaagcccttcttgttcatattcaggagctcatgttatattcaaaggaaattctacgtctataacagctatattgtttggtatcatagtgcattgaaaatcctcacctaaaatggagtcatgactgaagtatgtgcaatatttaacgggcatagagactaatctgcagttgtacttataagcttagaatgtatgttcattaccaaatgttgtgtcctaagagttt

SEQ ID NO: 715591 - DNA, 108 bp, Homo sapiens
tacaacgaggacgtcgtaagcgtgcagctgggtgtacagcgttaccatccgtatgtgcactggtgctccagcgtctgtgtgccactgggccccataccacgggagcca

SEQ ID NO: 715592 - DNA, 1035 bp, Homo sapiens
  misc_feature (101)..(101): n is a, c, g, or t
  misc_feature (132)..(132): n is a, c, g, or t
  misc_feature (142)..(142): n is a, c, g, or t
  misc_feature (144)..(144): n is a, c, g, or t
  misc_feature (168)..(168): n is a, c, g, or t
  misc_feature (176)..(176): n is a, c, g, or t
  misc_feature (223)..(223): n is a, c, g, or t
  misc_feature (250)..(250): n is a, c, g, or t
  misc_feature (525)..(525): n is a, c, g, or t
  misc_feature (539)..(539): n is a, c, g, or t
  misc_feature (559)..(559): n is a, c, g, or t
  misc_feature (573)..(573): n is a, c, g, or t
  misc_feature (581)..(581): n is a, c, g, or t
ggagcgcgggaaaagggaagcgaagccggagctgcgggcgctttttctgcccgcggtgtctcagattcattcttaaggaactgagaacttaatcttccaanatgtcaaaaagaccatcttatgccccacctnccaccccagntnctgcaacacaaatgcccagcacancagggttngtgggatacaatccatacagtcatctcgcctacaacaactacaggtngtgggagggaacccgggcaccaacagncgggtcactggtatcctctgtgtcatcacagatgcctaaaaacccccaaaagtccaccacgataagccgctgcatagcacctacaatagagtgatacgagccagacatacggtctggtgaccaaagttactaggcttgccaaccctgacctataggttggtaggggatgattgcgcaagcattattggtaggcattgtgacgagatctcacgtgatgatgaccagcatagaatactaataaatcgaatacgatggcatacataagatagagtacnatgaatctatgaanggctatcataattcccccgngtaccttgcttacntaaatgcnaaaagtcgtgcagaagctgctttagaggaagaaagtcgacagagacaatctcgcatggagaacggagaaccgtacatgagcattcagcctgctgaagatccagatgattatgatgatggcttttcaatgaagcatacagccaccgccgttccaaggagaaaaaccagcgctcatcagtgaaattcttagtgagagtgtggtgccagacgttcggtccagtgtcaccaacagtaaaatgcagtctcaaacggcagtccaggccttatggttcatcaggaaatagaagtgacttttcaatgcagaacgccccgggaagaaaagaatcctggagccatcttaacatacttcacgttcggcggaacaatgttggcaatgtatgagcagaaagcccacagggaaggaaaggcaaggcacaaacttcagaaatagggaagaactgagggtacaaacggtg

SEQ ID NO: 715593 - DNA, 336 bp, Homo sapiens
  misc_feature (33)..(34): n is a, c, g, or t
  misc_feature (80)..(80): n is a, c, g, or t
  misc_feature (98)..(98): n is a, c, g, or t
  misc_feature (103)..(104): n is a, c, g, or t
  misc_feature (201)..(201): n is a, c, g, or t
  misc_feature (233)..(233): n is a, c, g, or t
cgactctagagatctctatcgccaacacttggnnagcaaggtgaggatcactgaggccaggcatttgagaccagcctggnaacataggagaccctatncctannaaaatttttttttaattagctaggcatggtggtgcgcacatatggtcccagctactcaggaggctgagatgtaaggattgcttgaacccaagaagtngaggttggactgagccatgattgtgccactgngctccagcctgggagacaaagtgagatcctgtcaaaaaaaataaaaaattttaaaaaaggaacatctactatgtgctaattgtgcgtgttggggataacatca

SEQ ID NO: 715594 - DNA, 1338 bp, Homo sapiens
ggcgatgaggactaatgtgcggacgccgggaggcttcgtgcgcgttgctacaggtccgggcgtcgggtccacagcgttcgcagaggccgtcacaagtggcttgggaaagcggatgagcacgcggctcctattcccaggtagccccgatgctgctgtcgcccactagtagctcttccttgtcggccttccggtaccctcgtcaggcctcaagtacctctggctactctgcgttttgcgagaagtcgcaggttcacggcctcctcctgtttgttgctgcagacgtccctgcacgcactagcatggcgagtgaccctgagggtagagcgtatctgggaggagtacgtgcatggatagtaagtctcgaagacgatggcgggcaaggaggccagaagcgcttatcggcatagagacgtgtggaggcgtgaggtgtctatgacaacccccaagcgtcggcgacctagatccaaggaaatttggacgttggcgcatagtgtgtaccctggacgatatgatcaggaacttcgcgtgggggcgcgtaaccccttgtgggattgagtgcggcgcgccccacatgtggccttgcgagttgctagcatcgatcctatagggcaccccggcatgggcgcgattgtgattgttcttgcccctccattcaagtccggttgaaccgggggcacaacggtcgaacggacggggtcaacgtctgcgaaggggattcccaaaccgaacatgcaagccttttgtccccagtggacgtaactccaaggaacagggtgttaatcgcaacgattcggaaactttcaaggacaagaacaggtgcgccaccagggtgtataagggccacggggaaatggaagcccaaagttcagttggagaacgggatatgttattagaggcagaagagggccataatgccgcgttccacggggaacggcaacttggcgggcggagcttattggtacaccaccgacggaaagaggacaaagaggaaccgaatttggagcattctaatttaaaagaaccattcccgattaaatgtaaacaacaaatcgccctttcccattcacaaagttttaccgttcgcacccactgggagtggaaacacatcaaacggggaacacccccactaaaaaatcactctttcaaagtgtccctccaccatgtatcagtttacacttgtggacaattgaggggcaacgtcacaggaaacggataactgggtgacgaccaaaaagacacacttgtaccctttggtatggcacacagcgaaaggatacgcacctggtctagagaaacaccaacggcggctggagcccccatctcctgtggggatgtggt

SEQ ID NO: 715595 - DNA, 161 bp, Homo sapiens
tctttgacacaggttttcactcctacgccccggatggcgagcacggggtatggctcactggcagccttggccgccggggacactccaggtgtgcacggcggctagttttggtgcttttggtaaagtttggctatgtttacccaggctactcttgaactccg

SEQ ID NO: 715596 - DNA, 790 bp, Homo sapiens
  misc_feature (586)..(586): n is a, c, g, or t
  misc_feature (707)..(707): n is a, c, g, or t
  misc_feature (711)..(711): n is a, c, g, or t
cccgaaatcggacattatggccggggaaagcgtgaggcaaacaggagatgtggaacaagggaaatgaataagtgagcgtgtttcgcgaagattaagtgtatcttgtatgtagtaattttataagtgatattaaaagagagtgaagaacgccccgcacccaccaaaacgactcacgcctggatcaggaggggtagcaggtgcggccctgtaggggtggcagtatgttcattcgtttgtgaggggtcacgtttatactactgtgtgggtttcggttcaggcgcccatgttattgcttggtatttatttcggttttggtgtgtggttcgtgccagtacagaggccctgacgcggtgaggcagttgaggcagggcgtgcgggagggaggaatgtatgcgtagtccaaagcgtgggatttatggccagtacatgtaggtatcgtgcggggtagtccgctccgtgtgcccggtatcggcgctcggtccgactgctctgtgtgcacgcggcgtgcctccgcggctctcggtgcagcctccgttttcgccgcctcgtcgccggcccccgctcaccccctccacgcttactcccnctgacatcacgagagtacactcggtctgctgccgctggtcgtatacacgccggattatattagttaatagtggtccgatacgtcttatttcttagtcttcccgtgttcgatgctgtctcgngcgntcccacggcagatgtacgcagcaggcgacgttgcagacagagcatacacactcctcacatccacaatgctacatatcct

SEQ ID NO: 715597 - DNA, 1044 bp, Homo sapiens
  misc_feature (101)..(101): n is a, c, g, or t
  misc_feature (132)..(132): n is a, c, g, or t
  misc_feature (142)..(142): n is a, c, g, or t
  misc_feature (144)..(144): n is a, c, g, or t
  misc_feature (168)..(168): n is a, c, g, or t
  misc_feature (176)..(176): n is a, c, g, or t
  misc_feature (223)..(223): n is a, c, g, or t
  misc_feature (250)..(250): n is a, c, g, or t
  misc_feature (316)..(316): n is a, c, g, or t
  misc_feature (340)..(340): n is a, c, g, or t
  misc_feature (534)..(534): n is a, c, g, or t
  misc_feature (548)..(548): n is a, c, g, or t
  misc_feature (568)..(568): n is a, c, g, or t
  misc_feature (582)..(582): n is a, c, g, or t
  misc_feature (590)..(590): n is a, c, g, or t
ggagcgcgggaaaagggaagcgaagccggagctgcgggcgctttttctgcccgcggtgtctcagattcattcttaaggaactgagaacttaatcttccaanatgtcaaaaagaccatcttatgccccacctnccaccccagntnctgcaacacaaatgcccagcacancagggttngtgggatacaatccatacagtcatctcgcctacaacaactacaggtngtgggagggaacccgggcaccaacagncgggtctacgggcgatcgctctggatatccaccgattctcaatagaacgctcccaaagactcgatnctagataaagccgctgagtgcccnatacagtgatggctacagccacgcaaaggtcttgggcaccctaagataagagcgattcctaatcctgtacctaatagcttgtggggagattgggacatgattaattggatggcatgtggcgagatgctcaattgatgaagaaagaacgagagaattatttaaacgagatatgaagcagaaaaggatagagtacnatgaatctatgaanggctatcataattcccccgngtaccttgcttacntaaatgcnaaaagtcgtgcagaagctgctttagaggaagaaagtcgacagagacaatctcgcatggagaacggagaaccgtacatgagcattcagcctgctgaagatccagatgattatgatgatggcttttcaatgaagcatacagccaccgccgttccaaggagaaaaaccagcgctcatcagtgaaattcttagtgagagtgtggtgccagacgttcggtccagtgtcaccaacagtaaaatgcagtctcaaacggcagtccaggccttatggttcatcaggaaatagaagtgacttttcaatgcagaacgccccgggaagaaaagaatcctggagccatcttaacatacttcacgttcggcggaacaatgttggcaatgtatgagcagaaagcccacagggaaggaaaggcaaggcacaaacttcagaaatagggaagaactgagggtacaaacggtg

SEQ ID NO: 715598 - DNA, 342 bp, Homo sapiens
ctgtacaatagtttttggttttttttttaaatacagatggggtctcccactcttgaccaggctggtctcgaattcctggcctcaagtgatcctcccatctcacgcctgtaatcccagctctttgggaggccgaggcaggcagatcacgaggtcaggagatcgagaccatcgtggctaatacagtgaaaccccgtctctactaaaaatgcaaaaaaaattagccgggcatggtggtgggcgcctgtagtcccagctacttgggaggctgaggcaggagaatggcatgaattcgggaggcggagcttgcagtgagccaagatcacgccactgtactccagcctg

SEQ ID NO: 715599 - DNA, 367 bp, Homo sapiens
acccttggaccagttggcacagcatgcacttctccccctttgaggcccataaaagccccaggctcagccagagctgggcaaatgttgggatgaccacctgcagacaggagcaacccactctagggccccctctttgctgaaagctgcagagatgatggaaagatgacagggagatgatgggacgaccagctgcagagaggagctaccctctctactgatagctgaacacttgttgggacgacttgcctaaccctttctgctaggagctgaacagacgttgggacaccctggctgcagaaaggagctgcccccctgtgggtttcctcagagctgttctgtccctcaataaagctcctcttcatctggc

SEQ ID NO: 715600 - DNA, 648 bp, Homo sapiens
ggtgtcttcagatttgggggtctggaggtcctcacaattgctctacagctcagagcagcaactgctgaggctgccttgggaagaggatgatcctaaacaaagctctgctgctgggggcccttgccctgaccaccgtgatgagcccctgtggaggtgaagacattgtggctgaccatgttgcctcttatggtgtaaacttgtaccagtcttacggtccctctggccagttcacccatgaatttgatggagacgagcagttctacgtggacctggggaggaaggagactgtctggtgtttgcctgttctcagacaatttagatttgacccgcaatttgcactgacaaacatggctgtgacataacacaacttgaacatcctgattaaacgctccaactctaccgctgctaccaatgaggttcctgagggcacagtgttttccaagtcctccgtgatgctgggtgagcccaacaccctcatctgtctttgtggacaacattttcttctcctgtggccaacatcacatgagctgagcaatgagcactcagtcacagaaggagttactgagaccagctttcttcttcaagagtgaccattccttcttcaagaacaggtaccctaccttcctccctttttggtgatgagaatta

SEQ ID NO: 715601 - DNA, 805 bp, Homo sapiens
ccacatggtgacaatgcatgatgtgcttgacgctcagtggctgtatgataaccacaaggatgagagttacctgcggcgagctccgtttaccctttggaaaagctgttgacatctcataaacgggtggttatgaaagcatcagggcagtaaatgccatctgctatggggccaagattatgcttccacgtgtgtacttcgatatgacgacggccttgaggtcaatcaggagattgtggttatcaccaccaaaggagactcgatctgcatggctattgctattaatgaccacagcggtcagtctctacctgcgagcgatggtatagtagccaaggatcaagagagtgatccatggagagagaaaagttaccctcggaaggtggggttgaggtccaaaggccaaggtcaaacagaagctggtgatcatagcgagggacttctggacaaacatggtaagcccacagacagaacacgctgccacctggaagacaggagatactgttgacgtacagtggagtctagcaaaaaagaggtggttgctagaaagtgggtaaaagccccgacaggtagttggcgaaggctagaaaaactgtgaagcggaagcgagacagagtgagagtgaaatgtgacgatgactcctccagctagcgtcctcagggcgatcaaggaaggaagaagaagaagagtacgagaggacaagaagggcaaagactggtctgagaaaagcgggggccgaagccgtgatagatgggcgacaggtgtataccaagcaaaggaaggaaaggaagcacgaagaagagaagccaaa

SEQ ID NO: 715602 - DNA, 1130 bp, Homo sapiens
gcctgtaaacttcctaacgtaaccaacaacctcaaaacaaatcatattcatacaaaacataacaaaaacaataacaaacacaacaacataccataaacataaaaaacacataacacataacacccataactacatattacaaagaaaaacaaaataataacaatatacacaatacatataaatattcaacacctataatacataacatcaaacaccatacacaaacaacatcaaataaccataaataatcaaccaatcaaacaaacaaaacaactaaatatatcaatacattctaacaatacacaatcataaaaacacacataaatccactcaaacaacataacataatcaacaacccacactaaacacaatacaccacatacacaaaacactaccaataaatcaccacataataaaattagaattacatacatctaatatacatactataaaactaatataacacataaaactaatatcaaacacatctataacacacaaattcccataacaccattcactatcatcacactattacaccaaccacacaatatcagatcaatacaaaaccacattacacataaactaataaatataatatcaattacaactcaccaccacaatgcaaatccaataatacacaacatcatcacacacacatcacatcaacaaacacaacatacaccatcaactacaccacaaactacaaacaacaaatacccactgattcaaactacaatccacaaacaacaaatcaatctaataataaacaccacatcacctcactcaacacattacaactaacaaatcactacactaacaccttcgacaattatacaaatacacaacacactcatactacgaaataacataaacatattacacacatcaaacacacaaaatataaccaatatccacagtatatctaaacaatataccactcatatatatccaccatctacaacaccaaacactaacaacaatataacacatacctatcataccataccacatatcatatcacatatcaatcaatataaacacataaaagtatactcactttactaaacacttaaccaatacatatacaacctccacaacacactcaactcctacaaattcaaataaag

SEQ ID NO: 715603 - DNA, 280 bp, Homo sapiens
  misc_feature (227)..(227): n is a, c, g, or t
  misc_feature (255)..(255): n is a, c, g, or t
ctttcccttttaaactctagatcagaattgttggcttgccttcagaacataaatgcccaaaatttggacatgtttcccctcagaaaaattcattggcaggcccccaggggattttcctccttcttcctgtaaagggccccaataaaaaccaaattatggggctgcttttgtccccctagcatagagaatgggttgaaatttaactttgtaagcttggatgggggtgntgatcttttttttccttccagccccccntaataaaatatcatattaaaattca

SEQ ID NO: 715604 - DNA, 131 bp, Homo sapiens
ccttttttcccggggggccccccccctttgggggcccccgggtttttttttcccccccccccccccccccccctgggtttttttttggttttgtgggggggggggggattaaaaaaggggttttttgccca

SEQ ID NO: 715605 - DNA, 394 bp, Homo sapiens
  misc_feature (331)..(331): n is a, c, g, or t
  misc_feature (387)..(387): n is a, c, g, or t
ccaggtatcatggcaaaacaaccccatctctacaaaaaatacaaaaaacaaccgggcatggtggcatgtgctgtagtctcagctactcaggaggctgaggtgaaaggatctcttgagcccaggaggctgaggatgcagtgagccaagatcaggctaccgcactccagccaaagtggcagagcaaggatcctgtctcaaaacaacaacaacaaaaaccctcattgtgatgtaggagtaagtaaggaagcttcatccgctggacctctttcactttgagggttctccctgttaggagttaagcagccttgacagcttctttgaaacaggttantagagagcattttttttaggcaccaccacaaaaacatttgggattgcaaagcagcnttttagg

SEQ ID NO: 715606 - DNA, 236 bp, Homo sapiens
ctgaccgatgccttctgtagacctctgagtcttcgcgggaggtcatgtgcaatccaggccccttgtccgtggaaaacactggtcccttctcactcagaaggagatgctctgaattgttcctttggattgagtccttcacccggtagctggaagttcttgcaaaagtctagcctaaatctttcattatcaaaagcttcacttttgcaagtacacatccgtcgcacactccgtcctgg

SEQ ID NO: 715607 - DNA, 417 bp, Homo sapiens
  misc_feature (188)..(188): n is a, c, g, or t
  misc_feature (370)..(370): n is a, c, g, or t
tgcgcccaagagagctgggcccctcgtggcacggaggccacagttgaattctcctgtcaggcggctgtctcgctgtgggttcatcaggccaaagccttggaagtccccaggggcaaagtgggtcgcagatcaggtggcgtgtgtacgcagagctggcgcactgctgggtgatgcccatacagaagggngccaggcagccgtctgggttgctggcactcaggtggaagtggtggggccggcagtggctgcaagtgaggccttccacctaggccttgcactggcactgaccagcagcatcacactggctgctgacgctgccttgggggtcacagttgcagcctatgggccctggcaccttgctgtctctctngcatggctcgcccttgctggggttggcatagtaacctggggcgcatt

SEQ ID NO: 715608 - DNA, 595 bp, Homo sapiens
ctgattttgttaaaagatatcagaagtgtccttggagccaactagaggcacgggtcatccttgcccttgtcctccccttgtcatccctatgtggaaaacgtaggtggtaaggtgggagaaatcatcagaaatttggaaatcaaaggacagaattgggaagaacaagtgaatatgtctgtctgaatgttttcaagaaatagctggattgtagttagcgaaggctttcatcagattgaccatgacctgtgtgattggcgatatgtataatgactactacgttcgtggatgacgcttgtcatgtgtactctaaaccagtataatgacgtggaggtcgaagtcttcagagatccgcacagctccgggatgtgcccttgggaagagggtctgtgttcacaattacgtggacggggaggacccttgggggaccgccattctaaatatcatgtaggaagtgtataaagccaaaatgctaattatgtctttgtggtgtgataaaggaatgtagtgaaagagacatgaacccaaatcttgtggaattcatcaactctttactcagagcctctctccaatgcaggtcacactccaatgatgatgc

SEQ ID NO: 715609 - DNA, 446 bp, Homo sapiens
  misc_feature (5)..(5): n is a, c, g, or t
  misc_feature (34)..(34): n is a, c, g, or t
  misc_feature (126)..(126): n is a, c, g, or t
  misc_feature (190)..(190): n is a, c, g, or t
  misc_feature (197)..(197): n is a, c, g, or t
  misc_feature (252)..(252): n is a, c, g, or t
  misc_feature (269)..(269): n is a, c, g, or t
  misc_feature (316)..(316): n is a, c, g, or t
  misc_feature (342)..(342): n is a, c, g, or t
  misc_feature (362)..(362): n is a, c, g, or t
gaaancaatgacgcaaatctcggctcactgcaanttctgccctccctgggttcaaacgattctccctgcctcagcctcctgaagtagctggaattaacaggcatgtgcccaccatgcccagctaanttttgtattttagtagagacagggttcaccatgttggccaggctggtcttgaactcctgacctnaggtganccgcctgccttggcctccccaagtgctaggatttcaggcatgagccactgtgccnggcagagccaccgcgcncagcctcaatttctttctatttccttttttgagacggggtctagctntgttgcccaggctggagtgcagtggnacaatctcggctcactgcanccccccacttccacattggagtgattctcctacaggcatgcaccaccacacccaataaagcgaatggaccatcaaaaaaaaaaa

SEQ ID NO: 715610 - DNA, 575 bp, Homo sapiens
cagggacggacgagtcctcacaggtaatacaaaccaggttatgtcagtagtcactaaagtagtctttttccgggcggtcgagccacagaagccttcccaagttcagggtccgacctctaacggcaggccaagggatccagttttccaaaatcctcctcccaccctccttatacatataaaaaaaatcttagtccatcaaaaccggcctacccctcagatcctcccacatagaggaccttcctcacatagaggaccaacacagatgcgggggggtctggaagaaaagaaccagccacccaatatttggcggaaaggtggttctattcgggaaggaaattggagatgagataatccaccttcaaagtcaaaagtaagggggaggggaggaagaagatagaattggtctgaagaaaggggagggcccttaacagaaacgatgatatatgggggaggtggggggcgcttgcttctcagatacttactctgaagcatttctaagtgggtgaggcagatttttactaactaagattttttccttaacggagactgggagaaagattcagaaaacgagatca

SEQ ID NO: 715611 - DNA, 1354 bp, Homo sapiens
ggtctagtccacgctcggagccatgccggtccatggggcccgctgccaagtctgtggcaggtcttcggacgctcacgaccgacgaagcgacagggtgtggcagcactgtgaccaagcgggcgaatgcgtcatccagtccaacggctgaactgggtggggtccctgggcacggatgagttgacgccgtgtcacgcgtacaagttctacaagcgtgcatggagcctgagtttctgcgtgttcatcgagttctaggtagcgtagtttggcttggttgatcgtacattccagtgtccgctgataacaagaggtggatgtgctctaacggctgggtccgcgagtgaatttgaatgactacttccgttcagtgccatttctccacaaggcccgttggctggcaccgtagttaaccacgtaacatatgctgggaatgacgcgcttcctcaagaaggagcactgccaaagagccatcctcatcgccagtactgacctcgggagcctagtctcggctaagccttgaattcatccgtccgatggtgagtccaaaagaagttagagagggagtcctaggtgccacagcagctctgcgtaccgagataatcgcctaccttgataaggctcacattcggtgacttctaggaatcttcactgtgtatattagttaaaccctatgtctctctgggaccggggaattgttccaaaagagttctttcccaaaggaaggatctccccacaactaggaactctcggagggactagtgccacactggggtcgggttagttggcaggagacataaacacacgttgcgattaattgcataccatcttgcgacaactttgtggccaaaattagacgttgctcttcccatgtgtaggaccacagtaaatgtttcctattcgccacacccaaaacgcggctggtggtgcacaaaaacaatacccggaggtgaggggcgcaaagtcccacgacaatcaaaaagttagagacggcacgcgactcatcataacattttaggcgaggaagataacaagccaccgggggtgttataacaccacgtgcggcgagttaagacaatagacatgtggggccgaagaaaacacacaacggccgtgggagccacagcgtcaaacgcagcccattaacactagggaggggttgggtatcgagaccaacacaaagcaattaggatgagtagataagcccggtaacagagccagccgatccacagttatctgagtgcgcacacggaagaccagcaaaagacagaggggaagcaaaccaacccccagcggagaccttgggacgatggaaagcaatggagcccgcacacccagtaaacgtccaaacaaccaatgg

SEQ ID NO: 715612 - DNA, 380 bp, Homo sapiens
ttctagaggccgagatgggaagatttcttactcctgggaagttaagtctgcagttcagttgagatcctgccactacactttagcctggttgacaaaaacaaacactcaagcagttcttctccattagcctcctgagttagctgggattacaggcacatgccaccacacctaattttttatattattagtggaaacagggtttcaccatgttagccaagctggtcttaaactcctgacctcaggtgatctgcctgtcttgccataccaatgtgcttgaactaccgtgcctggcctgctttctattctttaattgtacttaacatttgatagtcaatcaaggttgaatacacctgttacccagctaacttatggggttggcg

SEQ ID NO: 715613 - DNA, 388 bp, Homo sapiens
tggatcctctatcaacccataagactacacctagacataacagtaaaaatagtgttatgattgtgcttactatagttccttttataggataagctgaagatggcggtatataggctagaataggcaagggttggtaaggtctatcggggtatatcgattatagaacaggctcctctaggtggatgtgaagcaccgccaagtgcctggaccctctctagctgtggtgggacagccacgtactcgtttccacaccaagactcagactttttgagccaaaaaagccacattcttacactatccagcttgttatggttaatgtaaaacttaccagatgaaccttgtgtatcagcttttttctcttccccctccccttgagagagggtccagg

SEQ ID NO: 715614 - DNA, 501 bp, Homo sapiens
  misc_feature (29)..(29): n is a, c, g, or t
  misc_feature (267)..(267): n is a, c, g, or t
ccaaaggggaagttgctgaaagccatcanacgtgactttggttcctttgacaagtttaagaagaagctgccggctcatctgttgggttccaaggctcaggttggggtttgcttggtttcaataaggaacggggacacttacaaattgctgcttgtccaaatcaggatccactgcaaggaacaacaggccttattccactgctggggattgaatgtgtgggagcacgcttactaccttcagtataaaaatgtcaggcctgattatctnaaactatttggaatgtaacaactggagaagtaactgaaagatacatgctgcaaaaagtaaccacgacgttatgtgagtatttaagctctttatactgtttttgtagtgtaagagacgcagaaccagaagtgctcccctcagcatttttgatgtgcttagcactatttcaaacaacttaatgttctgatatttctactaacatttgttattggcagtgatgaaagtaaagctgtg

SEQ ID NO: 715615 - DNA, 178 bp, Homo sapiens
acatagcaagcgaggcaggcataatgccgcatgttccaggtttctgcagtcagcagcaaatgcatcctgtcaatcatcaggacctcgccctgcatgttgtcaggaccagcagtgccagcatcaacagcacatcattgcaggctgcccattggctgatgcacaggtcagctggcatgca

SEQ ID NO: 715616 - DNA, 107 bp, Homo sapiens
ctagaggatcctaatatgctcacgctctagtcagtcctctggacctggactccctgcagaaagacagcttgacccccaagctcagaaatgggacgggaggagcggtg

SEQ ID NO: 715617 - DNA, 423 bp, Homo sapiens
atccccggcaaggatcctgtaggctaataaaatattattcaaaaaaggaagtgaaagcataatgcattgcttggcttggcactggacataaatcaaagctatataacaaacactgaataccaattttgataaaatacataatttacttatactggagtaatgtaggaaagaaaatggagaggctgtatggtcatcattagggctgttcaccaatattccagagcatcttttcccaggcacatggtagggttgtacttccaggcctcttttcagattaagtatagtcatgtagcttgctttgacccataaaatgtgagttcaatttatttttttcataccagggcagaagacagtgggtgtagccatttatacatgccatgttagacccagctctagcatacgtgaagccttcctctacttttc

SEQ ID NO: 715618 - DNA, 199 bp, Homo sapiens
ccccgggccccggggggggcccccttttaattttttgcccagcataaaaattttttccccttcaatctcggaaaggttttataaaaagggggtttttgaattaaaaattttgggggccccttttttgggggggggggttttaaaaaggaaaaaaaaagtaaaagggggaattttttttaaaaaaatctttccccctcta

SEQ ID NO: 715619 - DNA, 290 bp, Homo sapiens
tgtgtcagactacatgtagtgtggacaggatgtacatcgagtcatggcagccaaggatactgcaggagctccttgtgggggtcagtatggggaggtcatgcctgtgtaccgggcgggacagccactgagacgtgcaggctgggggccatgactagcctggtgagggcatctacctgctcaagttcgagaattcctactccctgctgcgcaagaagactctctactgccacatctactacaccagctgaaggactgcgtggcacaggggcaggctgtcgggctagtcgggg

SEQ ID NO: 715620 - DNA, 137 bp, Homo sapiens
  misc_feature (31)..(31): n is a, c, g, or t
  misc_feature (68)..(68): n is a, c, g, or t
  misc_feature (83)..(83): n is a, c, g, or t
  misc_feature (110)..(110): n is a, c, g, or t
ggcgggggaatagcaaatacacaacccctcnaactaatttattttaaaaattaaaccaccaaataaancaattttattattanttatacaaccaaaacaaaccaaatcanaattaaaaaacattttcctaataataa

SEQ ID NO: 715621 - DNA, 128 bp, Homo sapiens
  misc_feature (9)..(9): n is a, c, g, or t
gtccggcgngggggcagcagtccgtgctgggcaaattggctcaggccggggcacggcagctaaggttcttggcgcagttgttcgatgcgcgcatccttttccatccagagctgagaacgacccaccga

SEQ ID NO: 715622 - DNA, 884 bp, Homo sapiens
gatggccgagcccgacgctatgtccagcaaaggctccgatggtgctggcctacagtggcggcctggagacctcgtgcaatcctcggtgtggctgaaggaacaaggctatgacgtcattgcctatctggccaatcgattgcgcccagcaaggaacgacttcggagggaagccaggaagaaggcactgcagcttggggcccacaaaggtgttcatctgaggattgtcaagccgagggtagtttgtggacggagttcagtctggccggccatgccagctcgcagcgcatctgtatgacgtgaccccgcttacctcctggtgcaaccttcctcatcgccagaggcccttgtgactctgctccgcaaagaccatagggtggaacattcgtctccaggcggagcgcatggggcggccacaagttaatgtgctcacccacgggacgcacacagggaccattggggaatcgactcacgcgctccggctttgagctcagctgtcttacttcacgtggaccccccccagatcaacgggtcctttgcatccccttggatgagatgccctgaatttcttacaaccgcgtgccattgtgcccgtgactgacctcgcactggacgtcacgcacacaggcaacggacgggactaccccatccgcgtgtccatgttcccaagaagaccgtggaagggtctggattgatggactcgtcctatgcccatctacttacatacgggtgggatatccctggaaaacgccaaaggaagcaaagcgcctccagggtctctacacggaatgagccaggacccagccataggctcgcaataccctgtactttccgagaccgcgtccaccacggtcgcctgggatgtgccaccctatgtgtggcccatcc

SEQ ID NO: 715623 - DNA, 961 bp, Homo sapiens
gtatatttgtatattgcatgtgacaaatacttattcccagtgtgtttaaaaatactttctaagggggggccctgtgatggaggaaacaggccgctcgcacatctactcttcccaatagtgtgtccaggtcgttctccaagactctgggggtccctcacgggttctgatgcacagctgtataagtgaccgattgagtctgaggaacagcggatggggacgggatgcgcaaggaggcctaggagcctccaggggctggcgcagctacacagacataggtcggaaaaagacgtgcccaaggcggagtagccacgccccgagagcacggggggtgtatcggtgccccaccacagttctctgttagcgaggagtcctaatacagacatgtgttctgtgggttcatctctgctggtgtggagctcttaaaaaattgcctgcaaggcgggatccccgctgtacactcaagagcacagtaatggctgagaagggggattatcctggcacggagtgactgggtgagaggtgcgtgtgccacgaggtccctcagaaaaccgagaatttctccaaggggccactcttaagtgtactgcgggtgtggcgggcaaggaaaaagaagcgttacagtgcacagcggtgggcccagtggggtaccacttagagcgtgttgttcccgtgaaacacccaagttttctctgtgtttcaccaagagtgtgggttcaagcacttcgtggcggcggcggcatcctccccctatagtgagcgtgcgagtgcccggataaatagaaaaatcttgcggaaataaaagcgcgagcgcgtataaaccccgtggccagcttaaaggaaacgacggggggcaacaaaaacccgggaagagacacacgaaacgacgaagaaggcagggaatcggcgaatgggagacgggcgacaagaggcagaagggaagacatcacacgaaaatagccag

SEQ ID NO: 715624 - DNA, 832 bp, Homo sapiens
  misc_feature (57)..(57): n is a, c, g, or t
  misc_feature (69)..(69): n is a, c, g, or t
  misc_feature (71)..(71): n is a, c, g, or t
  misc_feature (81)..(83): n is a, c, g, or t
  misc_feature (88)..(88): n is a, c, g, or t
  misc_feature (132)..(132): n is a, c, g, or t
  misc_feature (174)..(174): n is a, c, g, or t
  misc_feature (178)..(178): n is a, c, g, or t
  misc_feature (204)..(204): n is a, c, g, or t
  misc_feature (212)..(212): n is a, c, g, or t
  misc_feature (214)..(214): n is a, c, g, or t
  misc_feature (223)..(223): n is a, c, g, or t
  misc_feature (234)..(234): n is a, c, g, or t
  misc_feature (246)..(247): n is a, c, g, or t
  misc_feature (267)..(267): n is a, c, g, or t
  misc_feature (274)..(274): n is a, c, g, or t
  misc_feature (313)..(313): n is a, c, g, or t
  misc_feature (329)..(329): n is a, c, g, or t
  misc_feature (347)..(347): n is a, c, g, or t
  misc_feature (357)..(357): n is a, c, g, or t
  misc_feature (364)..(364): n is a, c, g, or t
  misc_feature (381)..(381): n is a, c, g, or t
  misc_feature (396)..(396): n is a, c, g, or t
  misc_feature (417)..(417): n is a, c, g, or t
  misc_feature (831)..(831): n is a, c, g, or t
tagtcgagggtaaccgagtgagcacgccagggagcaggagaccaaacgacgggggtnggagtaagagtngnagtgggagtnnncggancggagcacgagcctgagcgggagagcgccgctcgcacgcccgtngccacccgcgtacccggcgcagcagagcaaccagcgcaggcntgcnatggagcccagcagcaagaagctgangggtcgcntnatgctggcngtgggaggagnagtgcttggatnnctgaagtttggataaaaaantggagtnatcaatgccccccagaaggtgattgaggagttctacaanaagaaatgggtccacngctatggggagagcatcntgcccaaaangctcacnacgctctggtccctctnagtggcaatcttttntgttgggggaatgattggctnattttttgtgggcttttttgttaattgttttggaaggaggaattaaatgctgatgatgaacatgatggccttcgtgtccgccgtgctcatgggcttctcgaaactgggcaagtcctttgagatgctgatcctgggccgcttcatcatcggtgtgtactgcggcctgaccacaggcttcgtgcccatgtatgtgggtgaagtgtcacccacagcccttcgtggggccctgggcaccctgcaccagctgggcatcgtcgtcggcatcctcatcgcccaggtgttcggcctggactccatcatgggcaacaaggacctgtggcccctgctgcgtgagcatcatcttcatcccggccctgctgcagtgcatcgtgctgcccttctgccccgagagtcccgcttcctgtcatcaaccgna

SEQ ID NO: 715625 - DNA, 149 bp, Homo sapiens
gaagcacagaggagggaggagggaaccagctactagatggttcgattagtctttcgctcaggatagctggcgctctcgcagacccgacgcacccccgccctcctctgtgctagtccacccccgtgtcctgtccacctcctctgtgctgt

SEQ ID NO: 715626 - DNA, 106 bp, Homo sapiens
cactaattaagagatgttcctcagcaggcataagtgaaagggtctctctgggagaatagtcaagctacttaagtcgataaatacaaggggccaaaacttaggagga

SEQ ID NO: 715627 - DNA, 831 bp, Homo sapiens
  misc_feature (86)..(86): n is a, c, g, or t
ggtcgaatcatcctctgaacatgctctcaataaggaagcactgatcaagaagatctggatggagcacccgatgatgcccctataangagtcgctgttggaaactagtggatcgctagcaagtgagatgatgatggtcgacatggaacctggggatccaaaccagatgtacacactcggtgcggagtccactggaaactcctatggtatgtgcttgggtgaccatttcatcgtctagaccgtagtagaagggatataattatccacgtcatcgacgatgtctgagacaccgggaatgatgagggtggagcacacatacgagtgccggccccatagaatgtacgcggcgttgcgatacgtttgacagtggacaccaatcggagtcttagcatcggcaggcaaggactgccgaaaggaaggtacccattgcacctcgatacataccccaataaagttctgccatgccagtgagccagtaagacggtactccaaaaagcaaaagtcacgcggtgtaaatcgtgggtagaacgcttcctgattctcgcacaggtgcgaacgtgggactagatcagacctgaattactgggtacccccggaaggcccgtggacgagataagacgcataggaacgaaggtgctagcgcattccaaatgtagtaaaccatgacctgacaagacgtcacatctaaactaattggcacacacaattcattaggctcggttccagacggtccaatggtccttcttacacaaactcaatcggcaccaattaacactttgtgcgcgaagagaggtgaggtctcgtgaatccggctggtgatagaaatgacttgg

SEQ ID NO: 715628 - DNA, 176 bp, Homo sapiens
  misc_feature (48)..(48): n is a, c, g, or t
  misc_feature (144)..(144): n is a, c, g, or t
aaatgtccattgctgtattgcgtgaccgtggtccttgcctgtcaaatncaacaatgaccaaatgatgatgcgcccttaataccaggatgagaccaaacctacacatctcccaagtgccgaacaaaaacctgaacaaaaaccatntgcaccctacatctggctgacatttacatttt

SEQ ID NO: 715629 - DNA, 253 bp, Homo sapiens
tggggagcaataaagctgtttatttcacatgggtgcaggtggtctgagtctgaaaagagagtcagcgaagggagataggggtggggccgctttatagggtttgggaagataatggaaaattacagtcaaagggggttgttctctggtgggcaggggcgggggtcacaaggtgttcagtgggggagcttctggtctaccccgtcccaaatttaaaagtatgaggggtcctgtctataggatcccattcttattt

SEQ ID NO: 715630 - DNA, 1172 bp, Homo sapiens
cttctttgtgtcgctctctgtttgtggggctcgccttttggatgtttgatagccgagtctctgtcgcgctcctgccgtgtgtgacgctggtgatcttcgtcctgcggtgttgccccactttgtctgtctaccgaggcttctagccgttgtgtgcaacaccccgtgtgtcttatccagttttatagacgcagcgcccctgccccaggggttcccgccgtgcttgcccaattgaatcccccggcatccttcctgccaccccgagttctcccccgagttgagtccctgttgacccttagtccacatggtaccccccaagtctctctggtgacaagatacgggaaagaggaccaggattactatccctatgcacacaggcccttttgagccacggagaccttgacgtatggtcccggaagctgagaaagtaccaagctgaagatgagaaccgagggcaccaggtgtcatcccagaattcacttggagtcctatgcccttccacctggaacccactgttgaagatgagaaacttcacaggccagattaaccgatgaggcccccaccagacagattcttggcacacaagtgttaatgagaatttatccaacatggcgttgatacagaatctcagactctcccgaagaaggaagacaatttgagcacacatctccaccacggcatagagcctgtgaagaaaaggtttgcacaccccacggtcatgtcacccacaagcgtgttacacccagaggtctcacaggaaggcacatgtccacaggagggaaaatgccctcgtggggaaatttctcttggttggttggagagcctccctccctctctggtgtgtgctctcctccacgggcccacaccacttgaaagaggggttgagttaacccacaccccaggtgtatgagatgtatcccattgttccaccaccacatttaaaaccactttgagaggacccttaaattcgtacgccaatttctgtggcacgttttaaaaaagttatacgctgctatagtaagttatctgggcacttctcacataacttgagaatactggaaacacatactgcacccggggaaaggaaataaccacttgcacctttattaaacccctgtatttgtaagtggaaaatcccatgtttttaattaaactattttaaattggcccccata

SEQ ID NO: 715631 - DNA, 230 bp, Homo sapiens
ctcaagactgcgccgtggtgccagcagcgcttcaagcgcaagggacgcatgagctaccacgtcgctctacatacggcgctgtgcacaagcgcctacaactgctcctactgtggcaagagcttctcccggccgaatcacctcaacagtcacgtcagataagtgcactcagatgagaacgggccttcatatgtgagaaatgtgaggcagctttcgccatgaaggatcggctg

SEQ ID NO: 715632 - DNA, 379 bp, Homo sapiens
  misc_feature (2)..(2): n is a, c, g, or t
  misc_feature (330)..(330): n is a, c, g, or t
cntctgggatgggaggcagcaggaactccagtggggcaggctggttgggaaaacctggggcacagaggctgctgcagggccaggtgaactctacttcttattctgtcaatacgttgttaacacgtacttttctgaaattgaatagattcttatagatgattgaagaaaatcaaattaattcaagtagtcatgaagcagaactatgttagctgccaggcaagcagctgatttcctttaataagatgaatcattaatgggttgggagatttaggccttcgtgtgcagtaagggaggaaacagatatgagtgggagaaaatgtgaggtatttnggaaccacaacaatcctgttagttactcttaatacccttagaccttctg

SEQ ID NO: 715633 - DNA, 876 bp, Homo sapiens
  misc_feature (23)..(23): n is a, c, g, or t
  misc_feature (110)..(110): n is a, c, g, or t
  misc_feature (129)..(129): n is a, c, g, or t
  misc_feature (132)..(132): n is a, c, g, or t
  misc_feature (137)..(137): n is a, c, g, or t
  misc_feature (158)..(158): n is a, c, g, or t
  misc_feature (172)..(172): n is a, c, g, or t
  misc_feature (179)..(179): n is a, c, g, or t
  misc_feature (200)..(200): n is a, c, g, or t
  misc_feature (202)..(202): n is a, c, g, or t
  misc_feature (211)..(211): n is a, c, g, or t
  misc_feature (213)..(213): n is a, c, g, or t
  misc_feature (227)..(228): n is a, c, g, or t
  misc_feature (230)..(230): n is a, c, g, or t
  misc_feature (233)..(233): n is a, c, g, or t
  misc_feature (250)..(250): n is a, c, g, or t
  misc_feature (256)..(256): n is a, c, g, or t
  misc_feature (259)..(259): n is a, c, g, or t
  misc_feature (262)..(262): n is a, c, g, or t
  misc_feature (266)..(267): n is a, c, g, or t
  misc_feature (274)..(274): n is a, c, g, or t
  misc_feature (291)..(291): n is a, c, g, or t
  misc_feature (293)..(293): n is a, c, g, or t
  misc_feature (298)..(298): n is a, c, g, or t
  misc_feature (308)..(308): n is a, c, g, or t
  misc_feature (310)..(310): n is a, c, g, or t
  misc_feature (318)..(318): n is a, c, g, or t
  misc_feature (326)..(327): n is a, c, g, or t
  misc_feature (358)..(359): n is a, c, g, or t
  misc_feature (361)..(361): n is a, c, g, or t
  misc_feature (522)..(522): n is a, c, g, or t
  misc_feature (539)..(539): n is a, c, g, or t
  misc_feature (691)..(691): n is a, c, g, or t
  misc_feature (695)..(695): n is a, c, g, or t
  misc_feature (713)..(713): n is a, c, g, or t
  misc_feature (718)..(718): n is a, c, g, or t
  misc_feature (723)..(723): n is a, c, g, or t
  misc_feature (727)..(727): n is a, c, g, or t
  misc_feature (741)..(741): n is a, c, g, or t
  misc_feature (746)..(746): n is a, c, g, or t
  misc_feature (751)..(751): n is a, c, g, or t
  misc_feature (754)..(755): n is a, c, g, or t
  misc_feature (758)..(759): n is a, c, g, or t
  misc_feature (768)..(768): n is a, c, g, or t
  misc_feature (779)..(779): n is a, c, g, or t
  misc_feature (781)..(781): n is a, c, g, or t
  misc_feature (784)..(784): n is a, c, g, or t
  misc_feature (789)..(789): n is a, c, g, or t
  misc_feature (795)..(795): n is a, c, g, or t
  misc_feature (797)..(799): n is a, c, g, or t
  misc_feature (803)..(803): n is a, c, g, or t
  misc_feature (846)..(846): n is a, c, g, or t
aaaataattaggaaagaatattnagcatgtttcaaaacatttaaaataggagcagaacattttacaaaaagttgtacaggaaattaaattcttaaactatcagtacaaanatgacattaaagagtatcnaanaaaanacaaagacaaatataaaaggnctatgatgctttangtctganaactattggccaaatatttangnttaaatttncngttcctgggtatgnnantcntattactatatacatcncccaanccngtngcgnngtatttnccaattacccatgtgtngnatcancttctaccangnctttgggnatctctgnngtggtcgcgtcaatatggctgggcttatttnngngctttgcgccatagggttggtgagcggggtcgggcggttcagggctaagagtaattgtaataaactgagcatgtacagcaagttccataatcatatctgacacagcctttctgtgctgagcatccagagcctggtcaatttcatcaaacaagtaaaatggngccgggtcacatttctnaatggcaaaaatcagagcaagggctaccaaggatttctgtccacctgaaagctgttgcatttctctcatttcaccttgttttcctgtaaatgacaccctaattccaactccagtaaactggtcaactgatgggacactgctttgtgagccanaacncctctcactctcaccacnccctnctccntcancttgagactgactnaaaancaaanatnnttnnttcatcacnaaaaaaaaaangncancaggnaaaaanannnggtntacttcactgaagttcttagatacctgtttgaaagttcactgnatagcttcatatttccgaggttcaagaaaa

SEQ ID NO: 715634 - DNA, 212 bp, Homo sapiens
  misc_feature (201)..(201): n is a, c, g, or t
tcctcagcgctacttcactagttagggccaaataactatttaagtcctaacaacttaatacaatttgaaaaaataatacacatcataagatttccatttcatcttttaatcttttctttttttatttaagcctacgcttggtaagtctcgaggcctctgtggtttttagatggaaatgagaattgcttaagccttgcattngttttgttcaa

SEQ ID NO: 715635 - DNA, 364 bp, Homo sapiens
tatctggaaaaccctgattgactggcagacctggatactgtactgaaagacactgattgactggaagatctagattttctggaaagaactagatatactggaagacttggatttggtggaagacacagatattactggaagacatggattagctggaagatctgtatttgctggaagaccttgaaattattggaagacatggatttcctggaagacgtggattttcctggaagatctggatttggtggaagaccagtaattgctggaagactggatttgcaggaagacttgatttacatggaagacttggagcttcttggaagacatggattgtccggaagacatggattgtctggaagatgtg

SEQ ID NO: 715636 - DNA, 479 bp, Homo sapiens
tgtgcaggaggaggatactcacaggtatggagatcctggggtcgggcagctgagttgcagggaggcagatccaggtcctggaaaggagacagaggagaggctctgagcctggaaggagggagaggagaggctctgagcctggaaggagggagaggagagggtctgagcctggaaggagggagaggagagggtctgagcctggaaggagggagaggagagggtctgagcctggaaggaggaagaggagagggtctgagcctgggaagggggcagaggagaggctctgagcctggaaggagcgagaaggagaggctctgagcctggaaggcaggggcgagggagaagggtctgagcctgggaaggcagggagaccgcgaggctctgagccaggctgtgacaaggccccgaggtgtcagtgcccatttgcacacccgggactcagggaaggagaagaggcctgattctgaccatgcgaggtt

SEQ ID NO: 715637 - DNA, 175 bp, Homo sapiens
  misc_feature (6)..(6): n is a, c, g, or t
  misc_feature (107)..(107): n is a, c, g, or t
  misc_feature (149)..(149): n is a, c, g, or t
ccatgncggcccccaggtcctcgatcttttcgagctgacttctcatggctcgatttcctggtgcttggtttggtagcttcaagctgggattcgagggtccccgactnttccaccatacaggacccatcgaggaggcatgttctggtctnttggatccactggtggaagggttgcg

SEQ ID NO: 715638 - DNA, 314 bp, Homo sapiens
  misc_feature (6)..(6): n is a, c, g, or t
  misc_feature (36)..(36): n is a, c, g, or t
  misc_feature (38)..(38): n is a, c, g, or t
  misc_feature (60)..(62): n is a, c, g, or t
  misc_feature (66)..(66): n is a, c, g, or t
  misc_feature (81)..(81): n is a, c, g, or t
  misc_feature (120)..(120): n is a, c, g, or t
  misc_feature (144)..(144): n is a, c, g, or t
  misc_feature (155)..(155): n is a, c, g, or t
  misc_feature (160)..(161): n is a, c, g, or t
  misc_feature (163)..(165): n is a, c, g, or t
  misc_feature (182)..(182): n is a, c, g, or t
  misc_feature (205)..(205): n is a, c, g, or t
  misc_feature (238)..(238): n is a, c, g, or t
  misc_feature (263)..(263): n is a, c, g, or t
  misc_feature (302)..(302): n is a, c, g, or t
tttttntttttaattattacctgatttaaaaatctntntaaaaacgtgtagtgtttcatnnntctntaactcgcattttantgatcagctattataagcttttaatagcatgaaaattgntaggctatataacattgccacttnaactctaaggnatatnncnnngatatccctttggaagnaccttgccttggtagagcctggncactaacaattctacaccaaattgtctcttcantacgtatggtactggataactctgngaaacacatctagtataactgaataagcagagcatcaanttaaacagacag

SEQ ID NO: 715639 - DNA, 714 bp, Homo sapiens
agggcaaaaaggccggggtcccttaagcgacgaacacaatttaagacgcgaccaaagggacacagcaaaagggggacaaccccaacccccagaagcactaacaaacaaaaaaccacacgacaacaaaacacacaaactaaaacacaaacacaaacaacaacccaacgacaaacacacccaaaaaaaagaagacggcccaacgaggcaaacaacagacaacaccaaaaccgagccacaccagcacaccgggccaacaaggcgaaacaaaccacccgaagcgaactgaacgagaccccgacgcagcagactaacgccgcaacccaacaacacgagcagaacacacaccaactgaaggaggaacaacagacccaaacacggcaagccgagaacaacaagaaggcagacaaccaaagagcaccaaccggacaccaacaaggaacgaacccgacaaccaccaaaaggccgcaagaagcacgaacccctcgaacaacaagcctgacacccagtaccgaatcgccaaccacacaacgccactacctgccccccacaacaacccagacaaaagacccaaaacacccacaaccaagcaaacagcccaaacaagcacaagataacacaaagagcaccgaagcaaaacccacaccacacaaatcgaaacacccaaaggcagaaccagccgcaaaccaaacacaaacacaccccacacatcggcgt

SEQ ID NO: 715640 - DNA, 206 bp, Homo sapiens
gtcccccttttttttcaggggggggaaccccaaattcctgggaatgcattaaagggattccccagactgaaaggtttccctcccagtttttcccccctttgttgggtcaagccagggggggtgctttttaaagaagggaattttggaaaattttaacctatactggcccggaagactgtcccaattaaaaaattgccattctccca

SEQ ID NO: 715641 - DNA, 232 bp, Homo sapiens
cctgagactattgcaggactctgaatttttgcagtgctatttttggatactgtaaaaaataaaaaagaaaaacaacacacacacacacacacactcatagcagagtggtttgcccggtcatatggcctctttgaggaaaggacagtcccaaaaggcattgacgggtgacatggttgggccttgcccttcttaaggaagccagttcagcattgtccttgccaagggggcccac

SEQ ID NO: 715642 - DNA, 812 bp, Homo sapiens
ggcgacactaggctggagtgagaccctgtctcaaaacgaaaaaaaaaacaaaaaacgaaaggagagagaaatgggagagcgagagcgagagagagagagagacagcgagacagacacagagagagagaaagataaagagaatggacgcgcccaatgcccactcctgcagccctgccgcatgctcctggcctgtgccctggagggtgctgaccattcgcctttctgcccgtgctacatccttggtgcctcattgtacctgtgtgccatactgcctgccgtgtgtgtgcctgcttgtgcctcctggatctgctactgtgccttccttggccattctggccctcatacgtggtgccttccttttccagcgcaccttgtgtggctgcaagacgccgtcttcgctgtaccttggatgcacctggctggtgtgtgcggcggccggccgctgggggcccgctggatgcagccacctgctgctgcatgtgtgtgctgctgacacatctccggccctaccaggggaggacccctgcgttaccttgcagccatgtgccatggcgtcctgccctgcgccctgcgtgtaccctgcgctgctgcgtgcttgcgcgtccgtcatggtggtgcgatggcaaccggcgcgcgaggacgctctacattggtccgacagtgttccggcgagggctcttcagctgacggaggaccccgaccacgtacagttgtgggaccggcaagctaccaccagcccctggtgaacccgctggcggccgggcagcggtgggcgcccggagcctatcgggagggtggagtgcggaggatcc

SEQ ID NO: 715643 - DNA, 331 bp, Homo sapiens
agcatatgtggagtgtatgacgtatactgcttacagaggtctgaagactgcctcatcacgatggctagcacgtgatcggaagtgccaagcttagacagcgcaagccatcttgtgtgcttgctcccactgtgatgagctattatgtcagtggtgaggccttgtgctgaacaccaatcaactattaggttgtgacacagaaactaggagaatggtaggctttgtaaatgacagagaggggaaccccgtaagtgttggttgcagttgggtgacggccgcactgtacgggggggacgagctcgaatcgaatctggctagtgtcctggtaatgtat

SEQ ID NO: 715644 - DNA, 974 bp, Homo sapiens
atctctaaggaggaaacaagacgcaacagcatcctcttctatacaactgtaatgtattgtcaatatttataattatgtatttgtctgactctggtcatggctggaatgtctagtccttgaacaaggacatatttaaagttcatcacagaaaagggtccctaaagccaggtatctctatatagataggtaggtatagatatataaatagatctcttttccttgtttctctgccaactttgtctcgagtaaaataaccacagcctgcactgaatcaaagggggatgggtacacagaaaagcttctagaacatcctcgtttggagacagactttgtgtatgtgtatctgacaggttggcaggaggaagatgggggctccgaggcccccagcaggacaacagaacactctagccttgggcgtttcctaacctattattgtttatatgacaacccccaaatactttcatgtctctaggccaggccgcccaaagcagcccaggccacacctggaaagaagacttacctctgcatttcctgttgccatttttctggccctagaagcatctatatcctaggacgtccacacatctcagagtagtctattttttgttcagataaaatatatacatatatgtatttaagtatatttatactacggcaatgagtcttaatctctttgttaacagaggatatctggggattatggtgcccattgcatagcctggcccttcctgcggcatcccttcccatgtccctgggcagaatacggggtagcaagacggaggaacacgtgtctggaaatggcaaagatgcggtcacaccgggaaagcgctctctccaggggtgaaggggctgggaacaccgtgctttccataggattgcccggggaccaaaccagctaggaacagataggatagaacggcgcacaaaccggcgtcccacagaggcggcataacaccgacacagcaacacttgaa

SEQ ID NO: 715645 - DNA, 185 bp, Homo sapiens
  misc_feature (24)..(24): n is a, c, g, or t
gcacgagggatggggatgactggngcaccaccttagaagctgcctttcacagggtgtcttcataggcttttgaaatggaccccagaaagggaatttgaggataaaattatttttgttactattagaaactcaatcagaaattgaatccttcctgatctgaatgcttaccggttctaagcttactg

SEQ ID NO: 715646 - DNA, 443 bp, Homo sapiens
aagtagtgtgtttaacaagacagactttggttgctgtattcaagtatttggattatgactgtggaggagggcttgcttaaaatatgtggttgtgtttttttgtggaaaagtgaggagttaggtggctttataataggcagggaaaccaaattgttggggctatgacctttttttccagtatgctacctgatttgtttgggtggccactaggtggcagcattggttttacttttttgctttttaaaaaaaatttcaggaaggatgatcattccagttagtttggcattttttgttgtttgggcacaaaaattggggttatccttatgttatcaaattcctcctaggggaaagtttttgttttaattacaaaattaaattttacattgtttccaaaaaatttgtggtgataaaaatggaaaaataaaaatttggggagttagtta

SEQ ID NO: 715647 - DNA, 184 bp, Homo sapiens
aatcgaagagttataaataggcaagacaggacttggtagtacttgtatcatttttacttctaggtactgatctattcactatcttcaacaatcgattataagtgctgcagaatgaaacttgggaaaacacaactttgcaaattcaacagtaataaattcagccatacaaaaattacggccctgg

SEQ ID NO: 715648 - DNA, 209 bp, Homo sapiens
  misc_feature (5)..(5): n is a, c, g, or t
  misc_feature (91)..(91): n is a, c, g, or t
  misc_feature (98)..(98): n is a, c, g, or t
  misc_feature (152)..(152): n is a, c, g, or t
  misc_feature (155)..(155): n is a, c, g, or t
  misc_feature (170)..(170): n is a, c, g, or t
ctggntcctcaaaaaacctccaatctaacaattccaagtcaggggacactccctgcttcagctcacaaaatttgcaactggggaggaccanaaggaangttcagccaaccaggttaattcaggaagcatcaacccaccacctgccaaagcangtnaccttgaaataatanagtacgtactctatgtcagacaccaaggaggcacagata

SEQ ID NO: 715649 - DNA, 567 bp, Homo sapiens
  misc_feature (4)..(4): n is a, c, g, or t
  misc_feature (21)..(21): n is a, c, g, or t
  misc_feature (112)..(112): n is a, c, g, or t
  misc_feature (212)..(212): n is a, c, g, or t
  misc_feature (214)..(214): n is a, c, g, or t
  misc_feature (407)..(407): n is a, c, g, or t
  misc_feature (478)..(478): n is a, c, g, or t
  misc_feature (501)..(501): n is a, c, g, or t
  misc_feature (521)..(521): n is a, c, g, or t
  misc_feature (562)..(562): n is a, c, g, or t
cggngcccgccccgcgcgcanccatgtacgcctttgtgcggttcctggaggacaacgtctgctacgcgctgcccgtgtcgtgcgtgcgcgacttcagcccccgctcgcgctnggattttgacaaccagaaggtgtacgccgtgtaccggggcccgaggaattgggcgccgggccagaggagccccccgcgcgccccccgcgactggggcctngntttgctccacaaggcccagatcctggcgctggcatgaagacaaatctgaccttgaaaacagtgtgattgcagaagaaaataaaaatccccaagctttctcttaatcatgttagaagaagatgggagaggttaaagattatgggggaagaagatttacagcttagacacatcaagagacctgaggggcggaacngaggcgaaagtggcgcacaagagcatcgaggcagttgtggctcgctagagaagcagaacggcctgagcctngggccatagcacgtgtccggaanaggtctttcgtgaagcttcncaggcacagaaggacatggacagtttagaagattctgttgntcccc

SEQ ID NO: 715650 - DNA, 331 bp, Homo sapiens
gttatttgcttggggattccccccttgctcttttttagtttgaaaaaacaaaaacggggccctggaattttccttttgacgccgaaattttgaaattgaaaatgggcctgttttggggcccaaaaacccttttgggggcaaaactttgtttttgttttgccccgtaaaaacccataggccagcgttatgtttttgggaagttaactatgaaagcttttttttttttttttttaaaaatggacccattttcccccccggaaaaaaaaaattcctttggatgcttgtttgacccccatgggtttgtttttttaataaaatttttcccctaata

SEQ ID NO: 715651 - DNA, 188 bp, Homo sapiens
tatttcgcacacgcacggagaagggaatggaggatggaggctccagcccagcagcacagatggtgcgaccagtgaggcatggaagtcctcatgtgttgccgaggctcatcgtccagcatagatgcaggcaaagcccagtgaagatttcaaagtcaagaggatagtgtacccttctccggtggcgtggt

SEQ ID NO: 715652 - DNA, 117 bp, Homo sapiens
ttggaggacaggtataggagggcaggctgagcatgcttgcatgatgtgcatgatgaagatggtaaggccaggcgaagatgtaggctgcaaaggcgtgtgtagaagtagcgtgtgggt

SEQ ID NO: 715653 - DNA, 294 bp, Homo sapiens
aggtgaaggttttgagggaaaaacccggggtccgttttgaaccataaaagtttggatattccccctttgaaggatatttttttttggggggctcttgtttccaaggggattccaggggggtttttgaaaaaaaaaaaagaaattttttttttgttttgggttttgggggtttttttacccaaattttaaaggccggataaaagggtttttgtttggaagggataaaacctcttttttttccttccccactacgggatgaagaaattttccttcccttttttttatttttggcca

SEQ ID NO: 715654 - DNA, 966 bp, Homo sapiens
  misc_feature (717)..(717): n is a, c, g, or t
  misc_feature (748)..(748): n is a, c, g, or t
cagataaccacctttaactgtaactttccacagcctaccccagaccctataaagctgcctctctcctatctcccttcgctgactctcttttcagactcagcccacttgcacccaagtgaattaacagccttgttgctcacacaaagcctgtttaggtggtcttctatatggacatgcgtgacacttggtgccaaaatctgggccagggggactcctttgtgagaccggccccctgtcctggccctcactccgtgaagagatccacctgcgacctcgggtcctcagaccagcccaaggaacatctcaccaatttcaaatcggatctcctcggcttagtggctgaagactgatgctgcccgatcgcctcagaagccccctggaccatcacagatgccgagcttcgggtaactcttacggtggaggattcccagccatatgaagacaccctagctggacgatcagtccttgtcaaaagtctgacccctcaaactctacagcctcaatggaccagaccctacccggtcatttatagcacaccaactgccgtccatctgcaggaccctctccattgggttcaccattccagaataaagccatgcccatcagacagccagcttgatctctcctcttcctcctggaagccacaagattaggccgagagccgatcagacaaacaagctacaacccttaagctcctggcagcgcccaggcaaggcnatgcttccatgcaacactccttccaaatggncatcccagcatgcttccaaagcaggcttcatccgttcctctggaacctcatctcttaagacctggcgcctataaaaggattatatcttgagacctatctctaaaatttttcaccaccaaacaaaaatttgggtcaagttacacgctagctggaacacgaatctggcaggggccaagccaactagacaggcacccacggcatgggggcccttttggccc

SEQ ID NO: 715655 - DNA, 108 bp, Homo sapiens
agcgggaaccaatcacttctagtagcagttaataattttagagagagagtaaacaaccacctgaccatcacttgatgtgtcaccttgccattcgttggttttgggcag

SEQ ID NO: 715656 - DNA, 119 bp, Homo sapiens
cgtagctgatactacaggcgtgtgcacacacatagctgattttgtatttttctgtagagacatggttccccatgttgcccaggctggtcttgaacccctgggctcaagggatctgcccg

SEQ ID NO: 715657 - DNA, 121 bp, Homo sapiens
cgcgattaatgtgtccccctcgatccttcacatatccgcacaccacggaaattcggggatactccccagaggtcacatccggccacgctcgctccccccattacaccgatccccgaaacca

SEQ ID NO: 715658 - DNA, 305 bp, Homo sapiens
  misc_feature (81)..(81): n is a, c, g, or t
actctagaggatcgccttagagtcttaaccctcagcaggcatcagtgctttgtcagtggcagtctgtctatctagagcccntcctcgcggctagactggagctggctccctcttcgttccttccctggcttccggaggagaccccactacccatgcctgctggggtctgaccactaacactcttgtgcatggacagcctgcacaggacctgctccctgctcttgggcacttgtgctcccgatttctgtccttgggccttgggatgtagcttgagggggcagatctaggggagtaggggctggcag

SEQ ID NO: 715659 - DNA, 995 bp, Homo sapiens
  misc_feature (11)..(11): n is a, c, g, or t
  misc_feature (46)..(46): n is a, c, g, or t
  misc_feature (60)..(60): n is a, c, g, or t
  misc_feature (66)..(66): n is a, c, g, or t
  misc_feature (71)..(71): n is a, c, g, or t
  misc_feature (76)..(76): n is a, c, g, or t
  misc_feature (81)..(81): n is a, c, g, or t
  misc_feature (86)..(86): n is a, c, g, or t
  misc_feature (91)..(91): n is a, c, g, or t
  misc_feature (96)..(96): n is a, c, g, or t
  misc_feature (117)..(118): n is a, c, g, or t
  misc_feature (134)..(134): n is a, c, g, or t
  misc_feature (141)..(141): n is a, c, g, or t
  misc_feature (152)..(152): n is a, c, g, or t
  misc_feature (156)..(156): n is a, c, g, or t
  misc_feature (160)..(160): n is a, c, g, or t
  misc_feature (164)..(164): n is a, c, g, or t
  misc_feature (168)..(169): n is a, c, g, or t
  misc_feature (172)..(172): n is a, c, g, or t
  misc_feature (186)..(186): n is a, c, g, or t
  misc_feature (191)..(191): n is a, c, g, or t
  misc_feature (197)..(198): n is a, c, g, or t
  misc_feature (201)..(201): n is a, c, g, or t
  misc_feature (206)..(206): n is a, c, g, or t
  misc_feature (216)..(216): n is a, c, g, or t
  misc_feature (227)..(227): n is a, c, g, or t
  misc_feature (230)..(230): n is a, c, g, or t
  misc_feature (232)..(232): n is a, c, g, or t
  misc_feature (234)..(234): n is a, c, g, or t
  misc_feature (238)..(238): n is a, c, g, or t
  misc_feature (240)..(240): n is a, c, g, or t
  misc_feature (244)..(244): n is a, c, g, or t
  misc_feature (270)..(270): n is a, c, g, or t
  misc_feature (278)..(278): n is a, c, g, or t
  misc_feature (296)..(296): n is a, c, g, or t
  misc_feature (304)..(304): n is a, c, g, or t
  misc_feature (313)..(313): n is a, c, g, or t
  misc_feature (358)..(358): n is a, c, g, or t
  misc_feature (373)..(373): n is a, c, g, or t
  misc_feature (414)..(414): n is a, c, g, or t
  misc_feature (450)..(450): n is a, c, g, or t
  misc_feature (464)..(464): n is a, c, g, or t
  misc_feature (468)..(468): n is a, c, g, or t
  misc_feature (480)..(480): n is a, c, g, or t
  misc_feature (540)..(540): n is a, c, g, or t
  misc_feature (547)..(547): n is a, c, g, or t
  misc_feature (563)..(563): n is a, c, g, or t
  misc_feature (593)..(593): n is a, c, g, or t
  misc_feature (729)..(729): n is a, c, g, or t
  misc_feature (968)..(968): n is a, c, g, or t
ggccgcgaaangccaggccggtgccctgcggggacgcccagcgcanccagccccgcgcanccagcnctgcnctgcnctgcnctgcnctgcnctgcnctgcgcccggggcgcgcccanngcgccgcatccatgtncgatgtnacatgagtgcntacnctgnatcntgtnncgnattgtgctgggganagagnagtganncanagaancgtgaagganttggacctgtnatnananagtnanggcncagagtagtccaggatgggagcagcncaggggantgtggggtcacgcatgancaaaagtnctgaagganaaataaggatttgctaggcaaagaagaactacgatctggacaganagaatggcatatgtnaaggcttggagcaccacaccccactctggccggagcacgcnaagcagctccccatcgctccggaaacggctgcagcncctgcccccaagcnggcncccacctgagcnagaaccaggcaccatggtggagaagggatcagatagctcctcagagaagggtggggtgcntgggacncccagcacccagagantaggcagaaggaacttcatccgcaacagcnagaagatgcagagctggtacagtatgctgagccccacttataagcagcgtaatgaggacttccggaaactgttcagcaaactccccgaagcagaacgcctcattgtggattactcctgcgccctgcagcgtgagancctgctccagggccgcctctacctctctgagaactggatctgcttctacagcaacatcttccgctgggagaccacgatctccatccagctgaaggaagtgacatgtctgaagaaggaaaagacggccaagctgatccccaacgccatccagatctgcacggagagcgagaagcatttcttcacttcctttggggcccgtgaccgctgcttcctcctcatcttccgctctggcagaatgnctgcttgaaaaacgctgagtcccgcga

SEQ ID NO: 715660 - DNA, 483 bp, Homo sapiens
  misc_feature (201)..(201): n is a, c, g, or t
aggcggaggttgcagtgagctgagattgcaccactgccctccagcctgggtgacagagcaagaagacattgtctcaaaaacaaacaaacaatcaaacaaacaaacaaaaaacagtgactaaactgagagcaaagaaatggaagggagggagcaggaggatcatcagtttccatccttttactgtgtgctcaaatgtaattnggctgcaggtgaggtctgtgcagaccctgggtgaggggcgagttggctatggcctgtttaactccacctgtgcatactgcagctcagcctcgtccatgcttcgtgactcagccttgtcctcagggaagctggggctggtgcaactttcagaagtggtcccaggtaagcctggccctcctgagtccatgggtggggaatgctggtacaggcctagcagctggctttccggggctgggtggaggtacagatcggtgatgtgtggtgttcgccatcctccatgag

SEQ ID NO: 715661 - DNA, 159 bp, Homo sapiens
atcttgtactggcgtggattctgcataaaggggagcacacgtttcacctcatactcagtgagttctcccgccctcttggggaggggaatgtgtgcttttctcaacaccacatgagcatatattctgcccacacccttaatggcagtgatggcgaaagcc

SEQ ID NO: 715662 - DNA, 188 bp, Homo sapiens
accatcgcccaacaacgtggtgaaagcaaggctttgagcctccctcctttgtgggctggtaccttggcttgggatgatgattactggtctgtggaaccctatggacaagggccatggctagaggctggatgccatgaggaggggcagggcccacccaatgtacaccaggtcacgtgcctatatggcaa

SEQ ID NO: 715663 - DNA, 442 bp, Homo sapiens
  misc_feature (26)..(26): n is a, c, g, or t
ccccggtttaatccctcacgacagcnatcgagattgtaagtgcctgtggttatcctgcaattcctacagaagtcattcaataaatacccaaaaaaggacctaagttcctggacacttccctcctaacacttaaatctttaacaaagaatataaagggcccaagtgtggtggctcacacctgtaatccccaacaatttaggaggctgaggtgggaggatcgcttgagaccctggagttcgagaccagcctgggcaacacagcaaaactcccatctctacaaaaaaaaataaaaaattatcccagggccagccttggtgcctcacgcctgtaatcccagaactatgggaggctgaggtagaaggatcacttgagcccaggagtttgtttgagaccagcctgggtaacatagtgagatcccatctgtataaaaaattaaaaataa

SEQ ID NO: 715664 - DNA, 655 bp, Homo sapiens
  misc_feature (655)..(655): n is a, c, g, or t
agcggatgggggacctaaatttagaatgtattccatgaactgttcctccctgttctctgcgttttctcctctctgtaaccgtctgataataccacacgtctgtttgcttgcatttagtttgtcttcttccttcagctgtgtatcccagacgtgttaatacaggaagaagagacgatttcagcttgtgattatgaccatcgtgatcatattccaggtctaaagaagaacgaacagcagactaggtacttaaggtggggatttccataggttccaaagaagaattgagcacgcattaagacgtgagttccaccacttggtcaggtggccactgtaagggttctctcagcctgggaaactatcgaactctttctttaacacaccgaacagagggttgacagatcctctggacgaacagaagtcacttgtggtctgttcagtaaggccgaatgttgagatgacacgtgtagagcgaggaaatagtgcagagctcaagttaaatggttatgacttattctgcgtactcattagaagaagcgccagagatagcatttcgtctattatatgggacatttcttagtggatgggaatgagttgaatgtgggaatgacactttatgtggcaaaagtaacatgagaattagggaagaagaaagatn

SEQ ID NO: 715665 - DNA, 293 bp, Homo sapiens
atataacctgccgaagatcttgtacgaatgtatacatgaagtgacctgtactaggagacctgacttagtcctaagattccttgttgttcctaggattaagatggctacatattgacatatattactgtttcagttatggtgtattgcaggccggatgctgatttgtggtacggattaactggtaaggaaaggaccttatagaatatatagtactatacgatgaccgcgtttatgcctatgagatcctggtcatgcactgggtctactcagctgtcagcatgtctactgacgag

SEQ ID NO: 715666 - DNA, 847 bp, Homo sapiens
  misc_feature (51)..(51): n is a, c, g, or t
  misc_feature (77)..(78): n is a, c, g, or t
  misc_feature (80)..(80): n is a, c, g, or t
  misc_feature (99)..(99): n is a, c, g, or t
gaaaactatgacattccttctgcagaccggcacaagagcaagctgattgcngggaagatcatcccagccattgccannancacagcagccgtggttggncttgttgtgtctggagctgtacaaggttgtgcaggggcaccgagagcttgactcctacaagaatggttatcctcaaccttggccctgactttctttggattactcgtgagacgcccttgcacgcaccaacgatcagccagatacatataaacacaacaagatggtacattggtgtggtatcgcgtgtgagtgtaccaaggcgcggtggagtcctaatgggtgagagaggatgaccctcagaatcgaggtgtcgctcgactatttataagacaggaggcacgaaagttaggaagactcgacccaatgcagatcccagggcggtgtccagttctctaattccgtttcttcgattgccaggttgccaggctgcaaggaatcgggttggagtcagccgatgacaggagattgttgagccgtgtgtccgaagcagaaacgcttgaggcctggcacgtgcgggcgcttggtgctttgacgctgtgcttgtgaacgaccgaggagcgggcgacggatgtccgacggttccctatgtccgatacgaccatccgctgagcccgtctgtcctctaggcgggacccttgtcaggccctcttcacagcgccgtttcagccagagtttcgcagtatagggttctggcagtggccaactagccaagtcttggtgttccctcataaatacccgctactgaaccctctggcatggcttctaccttgttttgaaactggatcctaataaagaattaataattgcc

SEQ ID NO: 715667 - DNA, 263 bp, Homo sapiens
  misc_feature (18)..(18): n is a, c, g, or t
  misc_feature (87)..(87): n is a, c, g, or t
  misc_feature (89)..(89): n is a, c, g, or t
  misc_feature (97)..(97): n is a, c, g, or t
  misc_feature (118)..(119): n is a, c, g, or t
  misc_feature (121)..(121): n is a, c, g, or t
  misc_feature (137)..(138): n is a, c, g, or t
  misc_feature (167)..(167): n is a, c, g, or t
  misc_feature (169)..(171): n is a, c, g, or t
  misc_feature (173)..(173): n is a, c, g, or t
  misc_feature (194)..(194): n is a, c, g, or t
  misc_feature (203)..(203): n is a, c, g, or t
  misc_feature (206)..(206): n is a, c, g, or t
  misc_feature (212)..(212): n is a, c, g, or t
  misc_feature (216)..(216): n is a, c, g, or t
  misc_feature (221)..(221): n is a, c, g, or t
  misc_feature (224)..(224): n is a, c, g, or t
  misc_feature (227)..(227): n is a, c, g, or t
gatatgtaaataacaganttatcaacattaaaatcttattcacaatggctaacaagaacaggatgacagtcaagtcagtagcttttnantaaaatgngccgactcccatcgtaacacnncnttgtcacatgacttcnnatacacagcagaccactcatgttccctgncnnncnaccctcaatcatacttaatanaggcctgtnagngctgtncctnaagantcnaantcgaaggggggggggggggggggggggggggggggg

SEQ ID NO: 715668 - DNA, 499 bp, Homo sapiens
taccacgcgaggccattagctatcgatcagtacgccctggccacactgggcattgatgagcccgactgaccaaactcgaacacttcatcggcccgcccttgctgcaggcgttcatgcagttttacgccttcgacgaggccaaggcatgggaggcggtgaatttctaccgtgagcgcttcaaggtcaccggcctgtacgaaaaccgcgtgttcgacggcgtcatgccgttattggaagagctgaacattcaagggcgtcagctttacgtagccacctccaaaccgtgggaatttgcccgcgagattgcgcggcatttcgactttgccaagtacttcaaggtgatctacggcagcgaactggacggcacgcgtaccaacaaggtcgagttgatcgcgcatttgatgcgtgaggaacggctggacccggccaccaccttgatgatcggtgatcgcaagcatgacctgatcggcgcacgcagtaatgggctggattcgggcga

SEQ ID NO: 715669 - DNA, 144 bp, Homo sapiens
ggtcacatcataactccacctgggaaggcctgggtgagcataggggctaacgacaggactgtgcctggtgtcctgctgcggaacgcgcccgacatacctcttctccaacagtctgccacctgctgtcgttggcttgccctccaa

SEQ ID NO: 715670 - DNA, 262 bp, Homo sapiens
tcggaacgaggtaaggacggggctgggaagaggggaaaggaggagggggggtggggtcttctcatcaaatagctaggccatttcctcaagagaggggcctgggggcactggcctgggtggggggggcaagtttgggggcagccgggggctggtggctttccttgccaagggaaggaagggcatggctggagagggctaggatggaagggcctgtggccttctgagtggcagggggctgtgctcttgtcccaccagtggactg

SEQ ID NO: 715671 - DNA, 246 bp, Homo sapiens
gttttcattagtaagttaacaaggattccgttgtttgttgttcatttgttgttggcttgtttgagacggagtctcactcttcagctcaggctggagtacagtggcgtgttctcggctcactgcggcctccagttcccgggttcaagcgattctgtgtgcctcagccgtcctgtagtagctgggattacaggtgtgcgccacctatgcccagctaattttgtatttttagtggagacggggttttgc

SEQ ID NO: 715672 - DNA, 929 bp, Homo sapiens
tatacacgtaaacactcctcgttctacacatataatctctaatatgaaccacccgcgttaaaacattctacatttcacaaacgagggacatcatattcccctgacgatttccactgtaaataccccttcccccacctcgcaaaaattacacagagactggtgcccgccccttatagattttcccaccgcaccctgtctctattaccaccacgcactgccatttcttcatttctccagcaggagtattcgcgctaaaccacaccctaagcgcccattaggtccaattagagccaaaagataataccctgccccctcagctatacgggagtcctgttcccactgacaccgccttccccggtaagcacgtggttaaaaagctggtgcgtccccacgcagccccccggaattgtttccatctgtagttaaagagaggacggcgggcttcccccacatgggttcaggggtattatttcagggtctcctgacgccccacgggggttgtaccccccgctggcgcggctccacacaaaccggggtcataacacgggccggtcccaccgccaacagaggcgcgaacatatcttcagataccactacatagacgctttgaaggaaagtactccacatccatcaaggaattaacaggaggttcccccaaacaatagaataaaaagcattctttccgttcacacaccccgtcttgtcattcttacagagactagataccctgtttaacaacggtcctctccacctatcaaaggaagtactcattccatgacaaacaagttgtttcattgaacccactcctagtactcgtcaacgaagacacactcatatcctcacttgcactatccccttccgatgatggtcggccaacatttccccatctttccaaaaaaaaatttctttcaaaactgcccaacatagac

SEQ ID NO: 715673 - DNA, 209 bp, Homo sapiens
gtatgtaattataggtaaaaaaatttaaatttggcctctcaaaatctactagtgccgttgtgactgcagcttgttaacttgctgccgtgttgcatgcgatcgggctactttcattttttacttctctgtgcatcggatgatatatcctgtgccctgagttatgtctttggcacattctgtgtgcctgtctaatcgtccgtcgcgtacag

SEQ ID NO: 715674 - DNA, 130 bp, Homo sapiens
ctctcttctccctttgttttctcttcatatatgtgaattttattaaaatctgtgctttgcttaggtatggaagctattatttgaatttttaagggtttcaacatatcttttcctttaatggacctcctcc

SEQ ID NO: 715675 - DNA, 508 bp, Homo sapiens
tcctggacataatgattgagagtctcttcatgtccagtggccgttgtaacaggtccttagcgatcgatttcgtattcatgcataggacaacattagtcagtaagatttccatgttgccttaccttattcttcactcaaaaattgtccctaactcgggtaatggcagtgatcaagtcacatgctctcactttggtcaccactgtattctgggtttcaaagacttgtaattcatttcattaagactctccaaaccatccccttaaacatttgttgaaatgtctctgttcttcattagcgttttattacgttacattctctaggctccagaaaaacgaggcaagaaataggaggatttgttttgttgggccttattagctttgttggggtggaagttggggtcaaacaagccaaaataacattatcattaaacagatcgagcggtactttgaagtggagggaataaggatataaaaggaagtgaggggtgtaagtaccctcttggatttgt

SEQ ID NO: 715676 - DNA, 191 bp, Homo sapiens
attttccaaaggatgaggtacacagaccactatgcagccttatctgagaagtggagatgattagcaagtcatcataatgccttctttgttttagacacagtgaacagaccacgcacaaccttagttttttaagtcatcatgcttgctgccttagagaaataaggttgtgggtggtctgttcattgtgtcta

SEQ ID NO: 715677 - DNA, 157 bp, Homo sapiens
ttacacgcctcaatcatggttggctcccttctagctgcagtaagtttatcctaagaaagtccaggtctggttcttcagccttgctccttcgcgaaatgatcctgtgtgggttagttctcctctctggggggttcctaatctccgtggggtaggaggt

SEQ ID NO: 715678 - DNA, 1269 bp, Homo sapiens
  misc_feature (1107)..(1107): n is a, c, g, or t
cccaaccactacaacgcggctagacgcgaactccgctgtccgacagcggctcggtgaccgcgacgtaccgtagcgcggttctacgctccccaggcaacatctgcatgctaacactcgagtcaacacggcccgtggcgtctgatgcctacaccattggcctagtctcttggcgcatccgtctttcgtcgctcgtcggctccgacccttccgtcgttcgccctctcggtcccattggcacccgtaggagctcgccgactcgcactacgaatcagagcactgctcggcgcctcgacgcactgcgggagtctggacgatcccgggacggaggggtgtgtatcgctctggtcatccctgggagagcgtccgagacgtgtggggacgtcacccattgtgacatgcaagtgcgtaacgagctttgtgccttcagcgggcgcgcgcgagggggacagacgagcacgggccttaaccatgcgcattagcgcgagtcgtcagtgacggtcccgacccttccaagagttcgtatcctacggctagacccacgttggaagggatgggacataccctatgttttgttgacccaatcccttgaatgacaggtcctcgggcgtcgacaacgcgaacgcacggctcttgcgcccgcacgaagtcggccgggccgtcgcgtgcttccctactgcacttgccaccattggaggcagccgcttggcttggaaatgcctacgttatgctcacgatttgcgttgagaaggcccacgcggtgggaggcctacccatttacagcataagcatgggcttgcccattgggtcgcctttaccagaggtcgtgagtcccggaagtgcccggtggctgccattgtccgcggaggggtgtccttgtcgttgcttctgtgggaacagatttcatatggccgcgctggggaggtcagagagggcgggtagggggagcgcttggccccacatgggggtcttgaggtgcgctgcaacggggcttggtggacaaacggtgcgatagtacccccgaggggacacctgtggtgtggttaccccaaccgccttgtgccactaggagacttgtaatgcccgccttcgaggtagttcttgggacgncccgttgcgtgaagtcttggcgagggggacacatgtcatgggcccccccaagaaggagacttttgcaggggggcgtaaccttgtgtttcatgtagggaactttcctctcgcggcaaacaacttatcattacgcacaattttacgctctatccccccttgtgg

SEQ ID NO: 715679 - DNA, 925 bp, Homo sapiens
  misc_feature (373)..(373): n is a, c, g, or t
cttcaggtgacacagggtgaaaaggttggaaacagacatcggagaatgagaaagtgagtgaaggggctgaaaccaaagaagaagaaacaggagaagcggtggacctttcatcattcacatccatacaccagtgacccttgaacaccctcgctatcctacacccacaccaacccgtgaaccaacctccacgttacgcctccacttctcttcccaatcacctcgaccctacgtcgtataaactgtatacatcacacttttattaccctcctcatcccacctccctatctcctctcctctacctcccttttctcccctctatcctcccctccctcttctccttcccccttccctcctccccctcccctatcccctntatttctccctttctcattactccatcccctccatactcattccaactctccctcccatgtttcactacacttccaccctctccccctctacccaccacccattcatcaccttcccccactcccctacctatttcaattataaaactactattcctacccctcccctcccctactacccctcttccacccccatcttacatccaattccccttatccactaccaccctcctccttctatcacctcactcccctctcttcctctatactcgctctcccatcacatcacttctcaacacccccaccaccatccctttacttaccatcctcaccctccccccaactaccttcaccccaaccactctccactctcacccctactctcttcctcctttcttcccacccatatatatatttgcctccctaccccccctcccgtcatacacctcatatcttctcattcctccaccacccacacgctaactttcttcttatcccctaccgtattccttttctacacacacatttccacgccccccttcatcacatccacg

SEQ ID NO: 715680 - DNA, 187 bp, Homo sapiens
cagctttagctcttaaagaggacagagggtagctgcctgtcgccgtcggagtcaagcagttctgcaaattctcagcagggtcagtgggatgacaggctcccccccaaccaagcggcagcggggcgggacctcgggggccggccccagtgggcggtgccacagaacggccggcgggagaagggggccc

SEQ ID NO: 715681 - DNA, 163 bp, Homo sapiens
acgcaactaccacgtgctgcacgcttcagaggcttctggtccctgctgtggctggggcaagagctgcactgggcgatccccctctggctagaccacatctccgtgtggcacggggcacccaaatccattcagctcattcatttcaatgcctcttcttccttgt

SEQ ID NO: 715682 - DNA, 239 bp, Homo sapiens
  misc_feature (21)..(21): n is a, c, g, or t
  misc_feature (40)..(40): n is a, c, g, or t
  misc_feature (56)..(56): n is a, c, g, or t
  misc_feature (62)..(62): n is a, c, g, or t
  misc_feature (68)..(70): n is a, c, g, or t
  misc_feature (82)..(83): n is a, c, g, or t
  misc_feature (118)..(118): n is a, c, g, or t
  misc_feature (132)..(132): n is a, c, g, or t
  misc_feature (138)..(138): n is a, c, g, or t
  misc_feature (154)..(154): n is a, c, g, or t
  misc_feature (166)..(166): n is a, c, g, or t
  misc_feature (173)..(174): n is a, c, g, or t
  misc_feature (208)..(208): n is a, c, g, or t
  misc_feature (230)..(231): n is a, c, g, or t
  misc_feature (236)..(236): n is a, c, g, or t
  misc_feature (238)..(238): n is a, c, g, or t
aggtagtgtgtgaatgtctgncctggcctactcttcctgnccaccctgcataaggnagttgntggttnnntcccaattcttnnaagtaggtttgtttacctactcccaaatcctgagncagaagtggggtgnttatantccaaaccttgagtgnccagccttcccntgttctnntagtctcttgtgctgtgcctagtggcacctgggntggggaggacactccccccgtnntaggntnt

SEQ ID NO: 715683 - DNA, 305 bp, Homo sapiens
tcatgcctggctaatttttgtgattttagtaaagatggagttttgccatgttggccaggctggttttgaacactgacctcaagtgatccggccccctcagcctcccaaagtgttaggattacaggggtgagcccctgccccagccagttttatttatttttaatgcaggaatttaagggtttaccattttcatgtgggattttagctggatcccttaagtttcgacctgtgggattttccttgttcccttttaactattttgtcatttaccttttggctttttttggcctgcggctccttggcga

SEQ ID NO: 715684 - DNA, 929 bp, Homo sapiens
aagctgcatatacgatgcgttaggatcgcggtcatatgaaggtctatgagcatggtcataccagtttgctactatatcttggtctggaatagtgctcgggtactcgccatgtaaaacctgcgctggaggaagacctgagaagtacttgtaaagatagtccagatggcagtatactagtggcgcgcattaggtggaagtgcgtactcagaactagagaggttctagacgcgtaggtctcgattaatacacttatttcgtcacccaaacttgatagtctccgttggaaaacctgggtgaatcttggacccctctttggcatcttctcaaattcgcttggacttacctaaggtatcctaaaggaaatcccggtaacccaataaggaagctattaccagatttgtatcgtgattttattaaagttccgcaacgtagagtacgtggatttcccagaaagtgaaacttaaaagagctgtcaggaagcagagaaaatgttcaagggcaaacggggtgcacaagtgtgcaaagggatatggcaggagaagcaaaacttttaatccaggttgcttggttttgcaattgacaaaaagaacggtgggccatctccagggatgtagaagcaatcaagaatgccatagcaaatgttcaaactctggtgaagtgcagaggttgaaggtgttgtgcagtctgtcagatccttggagagaagcagattagggcccatgatgatggtgaagcagaattggtataagacacggtcccaacggtcctgagcagtgaggcgatgtttataattaggcctttggaaagtttgtttcgacatggttaaaagctggttggttcaagtggatttacgttggaatggaaaaagggggaattgagaaactggaacaaggcggtccattaaaaactcttgaaaaaaataaaaatag

SEQ ID NO: 715685 - DNA, 897 bp, Homo sapiens
  misc_feature (365)..(365): n is a, c, g, or t
  misc_feature (396)..(396): n is a, c, g, or t
ggcaactgaaagccagactccaaatgctgaacaaggggcccaggccaagatagcctcggatcagaccaactgtaggtgcccttgtagaactcacgtgtgctgctgcatgtccaggcccatggcagatgactatctggctcagctgagcctggagcccacaaccaggacccggggcacaagataacgaaagtccacgtcgatctgaactggggactgagagcatgttggcatgtatctgaccaggcgggattcccattgcgtgcgctcggatggttctggactcagcgaagatgatgtgtgccaattctgtacatcgacaagggcctatctatagattgcgtcgactactaccgtgcttggttacngcgaacctcgcacaatagatccccatcagancgactcagaacatgcggacgggactgtcactccacacgatatactgactgaattatttatcctagcaagagtcaagatgatactgcagcagacgtcatatcaactcatggtagcaacgcatggttctacgatgatcaactcttgacatagaaaatctgagaatgcaaaaagtaagtcatgggtatagttctcatacagcactcatggatattttctgacaaggcatacgtgggaatcgacccaaggcacacacactaagctggtgtctcctcatggttgcattctgagagtcatcctcattgattggcaacaagggccagtgaggctgtcatctgggaggtgctgcgcaagtaggggctggcccctgggtgtgactgggtctctcagcgcgtgctgtcgggtggccttggccagaggggtggcctaggattgggtccggcgggggctggggcaccggggggggtgtgctctgggctagggcccggtctctgccgggtggtg

SEQ ID NO: 715686 - DNA, 358 bp, Homo sapiens
ggctggggattacaagcgtgagacacggggcctggtccctatacacattcttaaactaccacttataaatgagaacaggcagtattggtcttccggggtcggagtggtttcacttaagatcagggcctcccattccatccatatggtggcaaaagacacaatttcataatttgaaaggtctggaatagtattccagggtgtgaatataccacattttcattatccaatcttctggtggatgggacacttaggctaatttggtatgttggctatggtgaatagtctgcaataaacacttgagtgcagggaacttttggatgtaatgatttccactcctttgggtagacaccttgtagta

SEQ ID NO: 715687 - DNA, 431 bp, Homo sapiens
acttatgatgacggacggaggatgtgaagctcttaagtatatctggaaaccggctgcctctggaggtggtagcaaggttccacagaaaaaagtaaacttgctgctgatgaagatgatgacgatgatgatgaagaggatgatgatgaagatgatgatgatgatgattttgatgatgaggaagctgccgaccccgcgccagtgaagaaatctatacgagatactccagccattttatgcacaaaagtcaaatcagactggacaagactcaaaaccatcatcaacaccaagatcaaaaggaccacgaatccttcaagaaacaggaaaaaactcctaaaacagcaacaggacctagttctgtagaagcacattacagccacaatgcaagcaagtatagaaacaaggtggttctcttcccaaagtggaaagcccaa

SEQ ID NO: 715688 - DNA, 943 bp, Homo sapiens
ggacgcgtgggccagaacacaggtgtcgtgaaaatcgtacccctaagaagccaaaatgggagaaggaaaagactcatatcaacattagtctgtcaattggacgactgtagattcgggcaaaggtccaccgactactggccatctgatctatcaaatgcggtggcatcgaccagaagatgaacccattgacaacagatttgagaaggcaggctgctgcaccatgggaaagcggctccttccacagtatgcctgggatctctgcattaaactgaatagcctgagcgtagaactgctggtatcaccagtattgactatactcctctgtgggaaatttcgagacacagtcaacgtactatgatgcactattcaattgatcgacccacaggaacaacaaagcaacttagatacaagaagatcatggattgaccagggcactatctccagcgctcgacctgtgcatgctccgttgatatgttgggctgtcgcgcgatgtatggtggaaatcttcgtaagccgggtaactcttcccagatggacactggggccaggaccccgtacgagcccattgcagcctttcctgggcattaccacacctggggttgttgagacatcgaacctaagattggtgcgcgtagtatccactgatagctcgcgatttcccactttgaaggtggcaatacgcccatgaacaaatggtctccaattaacaagccagaaagttacttcggaggctgctaaagcgttcgggtctgacacgcggggaacatgtttcaatggcacaacctctatagcaacgtatagcagccacacagatatttgtgcgccctaactcaacgccaccccggcaaccgaacaatgtgtagagccaattatcaagacggctccacaacattttcccacgcgggatcagagggacacgtgttctggtttgtaaccaacacga

SEQ ID NO: 715689 - DNA, 465 bp, Homo sapiens
accctcatttcttgttactgctgaataagattccatgtatgaatatttattcacttactgaaggacatttggttgcttccaagttatggcagttatgaataaacctgctgtagacgtctggtttttgtgtggacctaagttttcaactcatttgggtacgtacaaaggagtgcagttgctagattgtatggtaagattatgtttagttttataagcgactgccaaactgtcttccaaagtggctgcaccagttggcatttttaccagcaatgaatgagagtttctgttgttccacatccttactagcatttggtattgtcagtgttttggttttttaccattctaataagtgtgtagtggtatctcgttttaatttgcaatttcctagtgagcatcttgatgttgagcatcttttcatatgcttcttggccatcttctttggtgaggtacctgttcagatccttt

SEQ ID NO: 715690 - DNA, 152 bp, Homo sapiens
gtacctgagcaggggtgggagcagtacacaagaggtctagccgggagattgtgtcacgattgcctttgtactactggaagtttgtatgtatgccatgaaaaagtgtatggcattttcagtttttgttttttatttattagagacaggagtct

SEQ ID NO: 715691 - DNA, 434 bp, Homo sapiens
ccgggcatggtggctcatgcctattattccagcactttgtgaggccaaggcaggaggatcacctgaggtcaggagttcgagaccagcctggccaacctggtgaaacctcgtctctactaaaaatacaaaaattagctgggtgtggtggtgcacacctgtagtcccagctacttgggaggctgaggcaggagaatcacttgaacccaggaggcagaggttgcagtgagccgagattgtgccactgcactccagtgtgggcaacagagagaggttctcgctcaaacaaactaaccgaattaaacatcataaccaagtgagattagttcttagaacataaggatgtaaggatgcttcattcaacattaaacaattaattaggagtgcaaaaggcttattgctatacttatgcgcaatgcatcacattaatagcaggg

SEQ ID NO: 715692 - DNA, 152 bp, Homo sapiens
ccctagagacagggttttgccatgttgccaaggctggtcttgaactcctgggctcaagccatctgcttgccttggcctcccaaacggtagggattataggtgtgagccaccacgtctggcctccaacttgattattgaatacagtctttctc

SEQ ID NO: 715693 - DNA, 494 bp, Homo sapiens
cccatcgccaagaaaccctcgtaacaaagaccaacaagacttaaaggaacaattttgtccagcaccccaaaaaataacattaacaaaggagaaatcttagagggtgtagcctccactcaaaatcaccaggcatgcaaataagcaggaaaatacctcccacaggtggaggaaaaatcaatggaaacaaaaccaaaaatgcacagccgatagaattaagagacaggaattttaaaacagctattataaatgtactccatgtgcttaagaatacaagcggaatacaagcggaggggccaaaagaaagaaaaagacactttcatctagagatgaaacatataatatatgaaaaaaatacagtggatgagattagcaacaggttaaacactaaacagaagaaaagatcagttaaggacataaaaaaactgtccaacatgaaacaaaaaaattgaataaaaaaactaacaaaacatcagtgaattgtgggacaatattaa

SEQ ID NO: 715694 - DNA, 122 bp, Homo sapiens
ccttcctgaggggcgggcccgggaacgccccctggaggggagggggtgacaacctcaatctagctcgcggtccagtcctccacctcgtcgagggcgacagctgccgaattccggatttctga

SEQ ID NO: 715695 - DNA, 255 bp, Homo sapiens
gatggcagaaggcaaagagagagtttgtgcagagaaactccaatttttaaaaccatcggatctcatgggaccattcactatcacgagacagcacaggaagaccaccatatgattcaatcatctccatcgggtctctccacaacacgtggaattatggagctacaagatgagatttggtgggcacagagccagtcatatcatatttgaggtagctgtatatttaagcatactgacacactcagcaccactaaaaaa

SEQ ID NO: 715696 - DNA, 318 bp, Homo sapiens
  misc_feature (80)..(80): n is a, c, g, or t
  misc_feature (202)..(202): n is a, c, g, or t
  misc_feature (233)..(233): n is a, c, g, or t
  misc_feature (246)..(246): n is a, c, g, or t
  misc_feature (252)..(252): n is a, c, g, or t
  misc_feature (260)..(260): n is a, c, g, or t
  misc_feature (264)..(264): n is a, c, g, or t
  misc_feature (302)..(302): n is a, c, g, or t
atcgggtagctgcggccgaagaggaactgcgagatctgggtgctgtcgacgcggaggggccggattacggtgagggggcngtcaccttgccacgtttccccttgacccacgtctggcaagggctttgaccgacggtgccgcatcgtcggatcccgccgctgtgctgagatcgccgcatgcttgcctggaagacggcaggtcngaccttcgtgggcaaatgggcgtcaatttgngatcggggccganacccanagcttgtnaatntgccgccgctaaacttgaacggcttggcccggttaatnaccaaggttcccctta

SEQ ID NO: 715697 - DNA, 399 bp, Homo sapiens
  misc_feature (149)..(149): n is a, c, g, or t
  misc_feature (240)..(240): n is a, c, g, or t
  misc_feature (380)..(380): n is a, c, g, or t
  misc_feature (385)..(385): n is a, c, g, or t
aaagagacagggtctcactctgttgcccaggctgaagtgcactgaagtgatcacagctcaccgtaacctctaagtcttggcctcaagaggtcctcccacttcagcttcctgagtaggtgggactacaggtgtgcactgccacacccagnctaatgtttaaaatttttttgtagacaaggagtcttgctatgttgcccaggttggtcttgaactcctggcctcaagcaatcctcccacctntgcctcccaaagtgttgggattacaggtgtgagccactacaagcaggctgccttgcttctcttcgtagtttcaccacatagggatgtattcccaaacaataacgctattcaagttgaggtttttttgttttttgtttttntttgnagacagagatttca

SEQ ID NO: 715698 - DNA, 334 bp, Homo sapiens
  misc_feature (37)..(38): n is a, c, g, or t
ggtctggtttatatactgagcgattagactccgggtnntgttggtttggtttagctttttgatgggttttaagggccccaatagcacgagaaggaggtaaaacgataaacgaaactggaatttaggtcagaaaaatagaaataaaattaacacaaaattgattagcaacactagatagaactttagaaaggtcttataaagatatggcgatagagaaaatggttaacgatgcagataagaatgtattaaacagagttatgagaacaaggtagtagggttcaacatttatatattaaaagtaaattaagaaatattaagtaaaatgatgtagctc

SEQ ID NO: 715699 - DNA, 111 bp, Homo sapiens
atctagaggatcttctaggtttcgatcgttacgcattttggctacagctattaatgccaatcaacttaaggccatacggggttaatgaaaatctagagtctcgggattgga

SEQ ID NO: 715700 - DNA, 123 bp, Homo sapiens
cgttgtgctgggaaaacctggtgtacaattgcacttatgttaatctaattttatctactttatgaccttgagcagcatggacaaagagcaaggatattacatgtgactttacaaacgtatgtt

SEQ ID NO: 715701 - DNA, 103 bp, Homo sapiens
  misc_feature (79)..(79): n is a, c, g, or t
ggctgtggggtcaggatgctctcgggcactagaagccagctgcctccacagagcggctgcacatgcgcaggatgtctcngacttgtccatgtccttcctgaag

SEQ ID NO: 715702 - DNA, 334 bp, Homo sapiens
ggtcgacgttctctgttgttttgttcagatctcagtctttggcagtcactgtgtccctgtatcttgggagtgtggccttatcagttatcctaccctacccccagtgatattctgaactctgcacgtctcaaccacaaaaaattacaaagtaaggtaaatacacccccctcctctccccagccgcagtgggctttaacaaatgtcctaagtgtgatggcatttttgctcttctccccacagattaaagctctcctccccccactccccataggtaagatgggagagaagggtctgggtaaatttcttacccttcctccagtgattgctggtcgac

SEQ ID NO: 715703 - DNA, 417 bp, Homo sapiens
gtaaaggaccctacaggggacacgttctgacttaaacaaagatgcgagaaggccaagaccaagcactatccctgtcagcagtgacctgttcttcagcatccccttggctccagtcatattttcacagatgtgttatcccatatggtcatccaatgctgagaggggatcatcgaagaggtaaatgtcagcgtgggagtacacggcccggcctaggttcacgcggtgcttctggcccccagacaggttcacgccctggggagagacacacacaggagtgggttacctgggaaatcttgagactcacaatacgtagaagcaggccgagtgtgctgtaatcccagaacttcgggaggccgaggcaggaggattgcttgaggccaggagtttgagaccaaggcttagcaacatggcaagatc

SEQ ID NO: 715704 - DNA, 917 bp, Homo sapiens
  misc_feature (199)..(199): n is a, c, g, or t
tctttttttttttgttttggtgatgagagagtaggagagaaaagaagagaaataaactaagtcagacgcctgcaggtgcccctatgttagagcttgctttcccagatccaagaacgccgaagagcccccccccctgggagaccgggctaagaggggaccccgtggaaaacctcaaattgcccatgacaggactccgccnagggcctccccgcttggaaagcccgcaaacaggttcacggcagagaccctctttataacgtctgtagtccctcctgcgattgaccagtcacccaggccctggcccccaaacagctactcagctgcttaagctggccccccagtaccgacccgagaccaagccagagaagaaccgagactgttggcccgggccgagaagaaggctgctggccaaggggacgtccccacgaagagacccccgcgtccttcgagccggagttaacaccgtcacccccttggtggagaacccagaaagctcagctggtggtgattgcacacgacgtggatcccactcgaagctggttgtcttcttgcctgccctgtgtcgtaaaatgggggtcccctactgcattatcagggaaaggccagactgggacgttctagtccaccaccggagagacctgcacccacctgtcgccttcacaccacggtgaactcggagagacccaaggcgctttggctaagctggtggaagctatcacggacccattaccatgacacgatacgatgagatcccccgtcaactggggtggcacaatgtcctgggtcctaagatctgtggctcgtatcccccagctcgaaaaggccaaggctaaaggacttgcccctaaactgggttaaaagtaccctgttgagttttctgtacataaaaataattgaaataataccaattttccctt

SEQ ID NO: 715705 - DNA, 563 bp, Homo sapiens
ggccagaatcacactcaaagacgtattattcaacaagttaaaacctagttcacaaatataccattccctgagttatagaaccatttttctgcccttttatctttccactagaaagtggtccggtttcttcaaatctggcaggttactattgtgccagccatttttcaatggggctgcttccctggttccccaacacaaaggttccctcaagttcatagaactcaaatcctaaagaaaatattgatcccagcccaaattttactgaaaactctcaccccatttatgcttgtctgtaaactgcagagcatgatgcaaagataaagcaaaactggaaagtgaagaaagcaagaatttggactattttctcaagaggcacatgcagagttcggtcaaaaagatgtcagaaaaaaagttaatttccaaaaacagcaggtgatcctacctgctacaaaaagcacatggtactgaattttccatgagaggttcacatctgagtccccaaggaggttttgttttttattggtaaatccaggcgggtaagtgttagagtgtgattctggccg

SEQ ID NO: 715706 - DNA, 206 bp, Homo sapiens
tggaagacggcaccaccaaagtcactcgcgccctggaggcaaccacagaacacatacggcaggagctggcggctttctgttccccagagccacctgccaagacctctactcccagaagacttcatccgaacgaccaacgtgatcctcaccatgaaccagacacagggcctgtgccccgagattccagatgcgaccactgtgtgtaa

SEQ ID NO: 715707 - DNA, 354 bp, Homo sapiens
cgtcgacgcgcgatcgacatcgaaacaacttgtttttggcattgtgaaggctccccataagagcttaccttggcttacaacgttagactattgaacagtgctgacactgttttgaccatgaactggctgtgtttttcattaggagacagccacaagcctgccaggaacactggcgagatggtgtgatttgaaggtgaagtggcctccatagtgcatgcgttgaacacctggtaactagcaggtgctggtgtttcgggaggttgaggatccctgagaattgtggctttgcttccaaaagtgcgaagtgggaggtgcatcgtgaaagtgataaccatctctacactgagtcgacgc

SEQ ID NO: 715708 - DNA, 435 bp, Homo sapiens
  misc_feature (13)..(13): n is a, c, g, or t
  misc_feature (133)..(133): n is a, c, g, or t
  misc_feature (167)..(167): n is a, c, g, or t
  misc_feature (208)..(208): n is a, c, g, or t
  misc_feature (225)..(225): n is a, c, g, or t
  misc_feature (290)..(290): n is a, c, g, or t
  misc_feature (316)..(316): n is a, c, g, or t
  misc_feature (382)..(382): n is a, c, g, or t
  misc_feature (402)..(402): n is a, c, g, or t
aagtgccctcggncattggcactgatgagaagtgcctcattgagatcttggcttcccggaccaatgagcagatgcaccagctggtgaagagaatcacaaagatgcctacgagcgggacctgggggttgaaatnatcggggaaacctctggccacttccagaagatgnttgtggtcctgctccagggaaccagggaggaggatgacgtngtgagcgaggacctggnacaaaaggatgtccaggacctatacgaggaaggggaactgaaatggggaacagatgaagcccagntcatttacatcttgggaaatcgcagnaagcagcatcttcggttggtgttcgatgagtttcttgaagacacagggaagccgattgaagccagnatccgaggttctgtcaattncaatgaaggggtttgggaaagggaaaaaggagg

SEQ ID NO: 715709 - DNA, 488 bp, Homo sapiens
gtattgcctctagaatggtgtactaccaaacaagtacagcagcctgtgtacacacacagcacagctacctgacatagaaggaggaccatcaccttcagtgttgatttatatccatacttccagtctccatgttgtagatccatagttcttctctaggcagatacccgtcatataatactctgactatgataacacttttagacgccccagacgaacatgtggcgcccgtcgctgacggctacgtggccgctgcgctcagcggggcaggcaagctccatggactcatagctctcgaaggctggaccaggcaagtcgtcagcccgccgctcctcgtagccatcagccatcttgaggctgcacttttgctaaccaacaatgcccacacccgcgaggggagccaacaaaaacccaaggaaaaggagaagaactgcacagcggctcccggccgggagcacgatgtctgctagtcttgtacctgcattatcaga

SEQ ID NO: 715710 - DNA, 787 bp, Homo sapiens
  misc_feature (325)..(325): n is a, c, g, or t
ggagatgaaagagatagagacacgaaaacccttcaaaaaaatcaaggagtccaggagctggttttttgaaaagatcaacaaaattgatagactgctagcaagactaataaagaagaagagagaagaatcaaatagatgcaataaaaaatgataaaggggatatcaccaccaatcccacagaaatacaaactaccatcagagaatactataaacacttctttgcaaataaactagaaaatctagaagaaatggataaattcctggaaacatacacccacccaaagactaaaccaggaagaagttgaacctctgaattaagaccaantaacaggctctgaaattggaggcaataattaatagcctaccaacaaaaaaaaaaaaaaaaaaacaaaaaacttttttggggcgcgctcgggcccgaaaaaagtttttaaacctctctgtgttggggcgcgggggcccattgttagggaccccgggccatacgggggtctccccaagaaaaccccggcgctagacaagtgcgggtgggtttctcaccccataaaaaaaaggcgccggggggcaacccggggtgttctggaacaaattccatcgaggcgggctcccggggggcatacgggggtctatcaacaggggagcccagcggaccgaaataaaaattacccccccccgcggtagaggaacacaagaaaatacacaaaacaaagacagagcaaagaagaagatacgacagacaacacgagacataggtaagaccaatagaaggcacaacaagagagaaggc

SEQ ID NO: 715711 - DNA, 415 bp, Homo sapiens
ccggtgcacagttctcacagtcattccagaagctttctccaggctacaaaaaagttattgaaatagtgcagcggttagggcattatttcataaccgagttaaccgtctatcccaaggcgtgaacatttagtaagctgatcgtcagtgagtcagtactttcgtttccattcttttcctttttatctattttcttcttgtttggtaagttaccctttccattttagcctatgactagtgggcatacaaacaaagtttgggtctgcttcttgtctgttctgaatagctgtctgcttttgtagaaggcagaattgaaaacagcagtcacgtgatgttctttcactgttaaggttacatcatgacacaaagctgagttgcgcacacgcgcaaaatacgcagcagtgctacttcctgccat

SEQ ID NO: 715712 - DNA, 313 bp, Homo sapiens
gaaattatgtggggtgagctgggaggctgatgagtggattattttgagtgtcaggagttcacagaccacgcctggccatcatggtaaaatccctgccactactaaaaatacaaaaatcatccatgtgtagtgacgggtacctgtagtcccagcatactcgggatgctgaagcatgagaatcacttgaatctgcgaggcggcggttgcagtgagccgagactgagccactgcattccagcctggtcgaccgtacgcgataatctctgcctcagagaaacaacaagagagccaagaacaaacgggggggggcgaa

SEQ ID NO: 715713 - DNA, 328 bp, Homo sapiens
agtctcactctgtctcccaggctggaatgcaatggtgcaattttagctcactgcaacagcggcctcctgggttcaagcaattctctcatttcagcctcctgagtagctgggattacaagcgcgtgctgccacatctggctagcttttgtatttttagtagagataggtttcatcatattggccaggctaatcttgaactcctgacctcaggtgatttgccccccttggcctctcaaagtgctgggattacaggcgttggcttcaaatttttaatatgtcccagggttaatcagacagaaagttttggagataagggctttttagagga

SEQ ID NO: 715714 - DNA, 275 bp, Homo sapiens
gcaccgcgggcctccgaattgccaggtgttgggaagtccggacaccctcctgatcttctctgtaacatgcacacttaggcctgtgtcagtgtgctggaaccacatcaggccgggcctcttcctgggacaaaatgctttctttttctttctttcttgttctttctctttcttgcttttgcttgctctttctttctcttttcccttccttccttccttccttccttacttccttccttccttccttcccttttcctttcttttctttctactgtgac

SEQ ID NO: 715715 - DNA, 1130 bp, Homo sapiens
gtgctatgtgttaatgggaagcgttgggacatgagttggtacgtttgggggttagctagggatgggatggtggtttgtcaagggttcgtgcagagtgggcatgggggtgcaattggggtggaagcgtaaattagactttctttcacctggtaacatgatgctgggttgtcttgcgcctggggagctgtttgtttacataggggctccttaggagggggtccccctttcggccgggagggtggttacaccgtgtcttgacccggggccaaggatccagggacgccgagcccttggggcccaggccttatggtccgccaaggaacagtcaacggcagacccgttgctctagcgtctcgtagcggctgaaatgtgggacaagcagagtcccaaggaaacgctaggcatccgtgttgtgagggtctcaccgtgtgattgcagcggtttctctgggacatttggctttatgccgcaagcatgtcagtcgtcgcgcatactcaggacagtctcgaagatgcgttgtatcgtacggattacgggcatgactgccagttcttgcagtctcgttgactgtcgtggtgatacgtgccccggagagagcactcagccgagtgcaggtgggggctctcgaggggaaaggacgactggggcacgaccgcagtcagggcactgcgagctggaatcgtcggagaggggggccggacaccccggtcagcctggctatcaggctgcgctgacggtgtctgttacccgccatcgctccgctcccgccgagccatccaccctcgagggtgcctccgaatctggtgccttcgagccctaggccccgtgctgggtgaaacaggtactttcgggggtacagtgaagcggctcggaaaagcagacgtgacacccatgggcccttgtgctccccttgcttggtgataaggtgcagacatgccattgagtgccggtaaacactcgtacacggactagaggtgcctagctcaggtgatatgtcccaagagccataagggggtggcaataggggagggagaaagggtagttcaaagagtctagtcttgagatctggattttgttccccctttacctagctgtgccccctctggttatacatctccgggagtgccagg

SEQ ID NO: 715716 - DNA, 712 bp, Homo sapiens
cggggggcgccggggcaagaggggcggggctccgcgccccccggtcggccggggcccgaagggcgcagcggggagaagagcgccgggggtacgggccctatgccccgtagggagcaggcggggaaagggggccagggagagcggggcgcacttgcgcccgggcggtgcccgcaggtgcgccccagtcggggggggtgaggcccgggcgcccccgggccttggtgggccgccctccacaaaggcgcgtaggtgggggccggggccgccccccccgggggggcgggggttccgattccgcccgcagagggcccttcggcccgtggagggccccgaggcgagagtaggcaatgtgggttgttcccccccgtgggcccctggcgggggccgggggcgcccggggaagcgcccaacgcggcatgccataggcttgggctgcgccgcccagggcagaatggggcggagttgaacagtccccaaagggccgaaggggggcacgacccgccggcgggcggagggagcagggtgacccgatgccctcaggggtagggcacgaggaaggggatggcctgcggggtgtcccccgggccggcggacccgcgtgtggtgccgccccggtcccaaattcgccccggggaggaacccgctcggggaagaggctcttttttaaaaggaccccgaggccgggtccccccccccccccctcgtgccgaat

SEQ ID NO: 715717 - DNA, 830 bp, Homo sapiens
tctcccaggcgacggtccgagaagatggggagagaaggacagggaagagataatagtagcagaatttcaaaaaaaatcaaagaggcatttgaagtcttggaccatgagtcgaataatacagtggatgtgagagagatgggaacaattatcaggtcataaggatgctgtcctacggaaggagagctgcatgatctgatggcagaggtagaggaagaagaacctactgatacatcgattcgaaaaatttcttccggtgatgaccagaaatactacttagaaagaaaatacagcccaatcccagaagatgtccttcttcgagcttggaggtttaagatcagctaaagtgggtttcttactaaggacgagctgatcaagtatatgatgaagaaggtgagccttttcctcacgaggaactggaagaaatgtgtgtctgctgcaatggatccagaatcaaattcacttaattacaaggcctattataacaatgatggtgatagatgacacttacttgtctaaagatacttctgatggaaagacacacttttacgaaattgttgtcttcggtaaattccccatcttaatcttaggatccctattatgtggcatatcaatacctgtgtggacataactattttcagacacttgtgttttaaagaatgatcgtaaccttaaacaaattagttatgtctaccttacgaatggttaattactaatttttaaacctatttctaacctttaacatagcatggtggggtattcacaaaaaatcagggcctcgttaatacgggcaagaaagcactccacgggcgccatacagggcacactcaagg

SEQ ID NO: 715718 - DNA, 153 bp, Homo sapiens
tcgtcgcagccaatgatgcatgaccttctctgggcctggcgaccccagtgcctcactgctgagccccaacgacgtgtctccagctgccttgggcagcaggcgggacctgtgccttccccacatgacacagagctgcccccattccattgcaca

SEQ ID NO: 715719 - DNA, 776 bp, Homo sapiens
accttggggtgagaaatcttaaagtgttttggggggtctgttccctaaagaaggccaggccagtgcccccaagtttttggtttcctttaagaaaaagtgtgtgttctgtgtgtgtttcgggaatgggggtgtctaagttttggttcttgaaaccgtagagaagccaaggccttccctccccatcagcctttcttccaagaagcagcagatcagcctccaagactccttggtagcagggccagccttgccttggcaaaccaggagttctgcttggtagaccctgcaccccgttagaaagccattggggtggtatgttcatttgcccccccccatccttagtaggacacctgcaccactttttaccacattttctgggaccatcagagtacagatataccctcccattcagacaaatccaatctatgggaacttggggctgctaaacaagacatatttgggggataattattcaacttccctcaaagataatagaaaaagtggtgggtgtgttggctcacatctgtaatcccagcactttcaaaggccgtggcaggtggatcacctgaagtcaggagttcgagaccaacctgaccaacatggtgaaaccccgtctctactaaaaatacaaaaattagttgggtgtgatggtgagcactggtaatgccagctactcgggaggctgaggcaggaaaatcgcttgaacccaggaggcggaggttgcagtgagccgatattgcgccattgcactccagcccaggccaacaacagcaagactc

SEQ ID NO: 715720 - DNA, 227 bp, Homo sapiens
gcagcacggccaggcgctcgtaggtaggcatcgagcgctccttacgcgttgttgtaatacaatgaatccccttagctcatggtgtataggcgtacgctcagctccgttttgctcattatattgctcggtcaagtctgctcacgcgagcctgaaggatctatcggacattctttggaccagtgcccctctttcccgcaccgatttcgaggcgctctggtctcccatcc

SEQ ID NO: 715721 - DNA, 725 bp, Homo sapiens
  misc_feature (313)..(313): n is a, c, g, or t
ttaggccacctgtgacatagtcaacgttgatagtcctccgcgagagtacatatgtgatagagtggccacgcggtgttcacagagaggccacgacgaagtgaccatatatatgtcgcgatacatattgtgtgagatatagtgatgacaagagctatatatacactcaccccgtatacacgtggattacaatgtgtgtgttcacacacgctgtgcgtccaccggcgcgcttgttgcgcgctcgcggcgcggccatcgacaggatgtttatctttttcacgatagtgtccacacaggtcaccccccgtgtgttgtncccacgagacagccgtcttgttttgcacagacacggggcttctgtatactccgtcagcgccgcgacgtgatgtgaatgtctccagaccacacctgtccgaagctgcctgcgttgtatgtccccgtgtccacccccgtcacgcgcgagtgagtaattgctccagaccaccctgcccgcaggtggtcttgcgtcaacgtccccgtgtccaccccgtctacgcgtccaaaccctcacgccggagtgatgtaagtgcgtccaaacacccctcctgaggtgtgtcgtgctctcctcccccttccccccgtccaccaccggtatgatacatttctcagaaacttacaggacagaaaattacatataagtgaaatatgtataacaaatctaaactgttatacaacaataaagaaaaaaa

SEQ ID NO: 715722 - DNA, 262 bp, Homo sapiens
agcctggtttctgcagtaagaccaactccatcggaagggaaaggtttacagtcaacatctgccactccctcctctatccctcctcccgcttgacgtgaccgaggagaagctgcttcaggatgctagaggaggaccaagctgggttacgcatccccagtgcagtctgggagagcctcatgcagaactggatgccggtggacaaggatgtaccgtctacgacgtacctgtctacagcgacttctaccggaggatagcagaacag

SEQ ID NO: 715723 - DNA, 1039 bp, Homo sapiens
  misc_feature (3)..(3): n is a, c, g, or t
  misc_feature (71)..(71): n is a, c, g, or t
  misc_feature (220)..(220): n is a, c, g, or t
  misc_feature (486)..(486): n is a, c, g, or t
  misc_feature (1001)..(1003): n is a, c, g, or t
  misc_feature (1007)..(1008): n is a, c, g, or t
ctncacagtctcgctcccacaaatgaagccttccgagccctgccaccaagagaacggagcagactcttggnagatgccaaggaacttgccaacatcctgaaataccacattggtgatgaaatcctggttagcggaggcatcggggccctggtgcggctaaagtctctcccaaggtgacaagctggaagtcagcttaaaaaacaatgtggtgagtgtcaanaaggagcctgttgccgagcctgacatcatggccacaaatggcgtggtccatgtcatcaccaatgttctgcagcctccagccaacagacctcaggaaagaggggatgaacttgcagactctgcgcttgagatcttcaaacaagcatcagcgttttccagggcttcccagaggtctgtgcgactagcccctgtctatcaacagttatttagagaggatgaagcattccgcttgaagcacttacaggaggaatgcaccacggcagctcncccgccaatttctctcagatttccacagagactgtttgaatgttttcaaaaccaagtatcacactttaatgtacatgggccgcaccataatgagatgtgagccttgtgacatgtgggggaggagggagagagatgtactttttaaatcatgttccccctaaacatggctgttaacccactgcatgcagaaacttggatgtcactgcctgacattcacttccagagaggacctatcccaaatgtggaattgactgcctatgccaagtccctggaaaaggagcttcagtattgtggggctcataaaacatgaatcaagcaatccagcctcatgggaagtcctggcacagtttttgtaaagcccttgcacagctggagaaatggcatcattataagctatgagttgaaatgttctgtcaaatgtgtctcacatctacacgtggctaggaggcttttatggggccctgtccaggtagaaaagaaatggtatgtagagcttagatttccctatttgacannncctnntgtgtttgtaataataaaaccaaagaaacat

SEQ ID NO: 715724 - DNA, 815 bp, Homo sapiens
  misc_feature (28)..(28): n is a, c, g, or t
  misc_feature (181)..(181): n is a, c, g, or t
  misc_feature (226)..(226): n is a, c, g, or t
  misc_feature (251)..(251): n is a, c, g, or t
  misc_feature (255)..(255): n is a, c, g, or t
  misc_feature (265)..(265): n is a, c, g, or t
  misc_feature (269)..(269): n is a, c, g, or t
  misc_feature (272)..(272): n is a, c, g, or t
  misc_feature (275)..(275): n is a, c, g, or t
  misc_feature (280)..(280): n is a, c, g, or t
  misc_feature (286)..(286): n is a, c, g, or t
  misc_feature (288)..(288): n is a, c, g, or t
  misc_feature (293)..(294): n is a, c, g, or t
  misc_feature (296)..(296): n is a, c, g, or t
  misc_feature (299)..(299): n is a, c, g, or t
  misc_feature (304)..(304): n is a, c, g, or t
  misc_feature (309)..(309): n is a, c, g, or t
  misc_feature (311)..(311): n is a, c, g, or t
  misc_feature (313)..(314): n is a, c, g, or t
  misc_feature (521)..(521): n is a, c, g, or t
  misc_feature (630)..(630): n is a, c, g, or t
  misc_feature (651)..(651): n is a, c, g, or t
  misc_feature (659)..(659): n is a, c, g, or t
  misc_feature (681)..(681): n is a, c, g, or t
  misc_feature (709)..(709): n is a, c, g, or t
  misc_feature (715)..(715): n is a, c, g, or t
  misc_feature (718)..(718): n is a, c, g, or t
  misc_feature (732)..(732): n is a, c, g, or t
  misc_feature (739)..(739): n is a, c, g, or t
  misc_feature (748)..(748): n is a, c, g, or t
  misc_feature (751)..(751): n is a, c, g, or t
  misc_feature (782)..(782): n is a, c, g, or t
tatactattctcaaggcacatctgatgnatatattttataacacagtaggtgtcaaagtatgtttaacatatgatttcttcaggatccctcccctttttgaattccaaatggaggaactgaaagtgcgatgtaaagactggcgatccatattctatctttggcagcttgtacaagcactantgtaaatgtaatgtaaaagaactgtaaactaggaacttcttcagnttatgaaacaccattcaggactgcngctncttgagtgtnttcntcnttnaaggnattaancntttcnncnccnggagnacgcngnannctagaaagggcaccgccagaagcaccagtggggccgggtatggcccttccggaaggaccaggccccccaaccacacccttggcccagcccatctccatcaacggaagcgggaccagacccaggcaatccacccaccagaacagcatccccaacagcccctcggcgacgagaccgcccacgacggggagtactgtgatgagattcgcnggcatcagtgtctgcagtctgatctgattctgtattatcaagtaagctgtatggattgctgtctggatctttgagcacagaactgatggaggatttgccaccacggggnccaccacgacctcgacccccngaaacacntctgcctcttccccctgggcgnctcctgcggtcacgctgatgtcggcggnctcgancancctctcctgccaangaccaancactcagcncgnctttacgcccagattccgtttcagagggggnagacagctcagaatttgtaccataaccgggggg

SEQ ID NO: 715725 - DNA, 94 bp, Homo sapiens
  misc_feature (66)..(66): n is a, c, g, or t
ctaaagcaagcagcaaaccagctacaagtggaccttctagtgcagttgttcctaatacctcatctnggaaaaagaatataactagcaaaacaga

SEQ ID NO: 715726 - DNA, 291 bp, Homo sapiens
aggttcctggaggggggggcctgggggaggggttggaaaccctgggccccccctcccccccctgaattgttttttttttttcccctcaagaaaattttccccggcccctgggatgggcccccaaagtcattaaaaaattttatgaaaatttttaaatgtttccccgctcctaaggcccttccccagggtttagcatgtcaaagggggggattgggaaaaagctgaaaaaaaaaacaaattaaactatcccccctgggaattttttaaaaaaaggtttggtcttttcatgca

SEQ ID NO: 715727 - DNA, 294 bp, Homo sapiens
tcaaccagaggtctcgggaatccacaacccttattgtcctgggtgtgaccaactccaaaggctaagtgatagtgactcatcaatgttgggtccctggtggggtaccagtttatggttcctaagtaatagtgaccctttcacgtcctggagtcccgagtggaccaatcggaagcctaagtgacgatcaccctcgcatgtcctaggtccctggggtggaccctatcatggacccccatgtgatggttacccagtggtcttttagatcctcagtagaacagtccagaattgccccga

SEQ ID NO: 715728 - DNA, 899 bp, Homo sapiens
gctgctggtgctgctggctgcggccctatgccacggtccagcggctgcgtgggcgcagccactcagtgagggcgcccgcagtgtgcctgacaagaacgtcaaccgcagccagtcctttgcctgtgcggccccgaaagaaggggcccccggttgctcccacccaatgctgctccagctcgtgcctggctagtgccaacctggcgtgatgagcctgtgtgcctgacgccgagcctgagtgatggcctgctgggtggtacctgggcacagtgccggcgggccattgacctggcctggcagcttggacacgggtagttgccggcagtgtgaatgagcatcgccggccatgctggagctgtcctccatatgggtagtgggagcgcctggtgctagctccaggcagtgcctccgtgagtggccagctccaaatcactcctgctcacttgtacaatgccccagatgcccggggcccgtgcgttgactcccacactgatgtttgacacctcaggtggaaacaccaaactgaatagccattcgatagcacttgtgctggtggatggttggcttgaacccacgtgcctgcaatgcatcattggggctatagtcaagctgtactttcatgcacccagcttgccaaagcatcaagcgggacatggagtattctagagaatgatcccaagagccaccgtttgtaggaaaggactatggaactagaccaagtcaataagtgcctcattgggctcccttcatcaggggcggagttcgcaatatactaaatagtgcccaggcatatgagcactcggctgaaaactagatctctacagctcacacaccgtcacgtacaagtacaaatacagcaacgccacttgagagtagccatacaagatacggactaggagcgg

SEQ ID NO: 715729 - DNA, 141 bp, Homo sapiens
tgttcgctttgtctaaatgtgaagtcttgaggcggcggtagttgcagtgagccaataccacaccactgcattccagcctggatgacagagcgagactctgtctcaaaagaaaagaaaaagaaagaaagacaaagggaaaca

SEQ ID NO: 715730 - DNA, 401 bp, Homo sapiens
gagaggagattctagcaaatggaacagaaaacaagtagtcgatcctagtttctgacaaaagccaaaaagagcaaaaaaaaaaagggaaagggcatcacataagggtaaagggtccaattcaatccaccaagaagatctacctatcctaaatatatatgtccccaacacaggagcacgcagattggtaaggcaggttttaagagaccttcaaagagacttagattcccatacaatagtagggaaggtcttaaacaccacagggaaaatataagaccattcatcaggagagaaattcaccaaagatattcaggaccggaacccaagaggggctcaaaggaaccggagagaaatctatataactctccatccaaaaacaagagaatatacattcttctcatcct

SEQ ID NO: 715731 - DNA, 122 bp, Homo sapiens
gtcttctcaccagcatcagctctctgcatcatacctcatatatctcatgtcatcagatattaccaacgaggagcatgtatgaagtggatcactactaggctgtagaacgaggcggtcatcta

SEQ ID NO: 715732 - DNA, 211 bp, Homo sapiens
  misc_feature (30)..(30): n is a, c, g, or t
  misc_feature (39)..(39): n is a, c, g, or t
  misc_feature (47)..(47): n is a, c, g, or t
  misc_feature (115)..(116): n is a, c, g, or t
  misc_feature (119)..(119): n is a, c, g, or t
  misc_feature (141)..(141): n is a, c, g, or t
  misc_feature (145)..(145): n is a, c, g, or t
  misc_feature (150)..(150): n is a, c, g, or t
  misc_feature (166)..(166): n is a, c, g, or t
  misc_feature (168)..(168): n is a, c, g, or t
  misc_feature (173)..(174): n is a, c, g, or t
  misc_feature (178)..(178): n is a, c, g, or t
  misc_feature (183)..(183): n is a, c, g, or t
  misc_feature (185)..(185): n is a, c, g, or t
  misc_feature (196)..(198): n is a, c, g, or t
  misc_feature (204)..(204): n is a, c, g, or t
gccagcaccgacctagcctaagccgtctanaaccacctnagcccctnaggaaacctgtggtcacactgggccctcctcaggaactctccctgcgcagaggcgtgtcttagcactnnccncctccctagccccttatttggnggcngaagnggcctccaccccttcncngtttnnaaanactcngnggagaaaagannncttcanggagtag

SEQ ID NO: 715733 - DNA, 396 bp, Homo sapiens
  misc_feature (303)..(303): n is a, c, g, or t
  misc_feature (396)..(396): n is a, c, g, or t
aaagagtgtaacctttgataaagagattaggatgagtaggtgaaatcccaatgctatttattcatcaagacaatggaagaatgaccctgaaggcatttggagatttaaggctgccagggccttgggaacagaacaatttaatgactctgctctgtgccttgtgttatgttgatccttggctgccccagttgtggctcaagtggccccaggcatggcttaggctgccctctggaaggcacaggtagtcagtgaggacatggctatctccacctagatttcaaaggacgccgtgtggggccttgnggcccagaaagagaacagaggtgggaccaccgagaaccctcactagggctgtccactagggctgtgaggccagcatcatcacagaggccctcn

SEQ ID NO: 715734 - DNA, 337 bp, Homo sapiens
tttttttttttggagacgctccgtcacccagttcagtggcatgatctcggctcactgcaacctccaccttctcggttcaagtattctcctgcctcagcctcccaagtagctgggactacaggtgcacgccgccctgcctggataattttttgtattttcagtaggggacagggtttcaccttgttgcccagactggtttcgatctcctgagctcaggcaatccacccgcctcagcctcccaaagtggtaggattataggcatgagcactgcgcctggccaaccattttttatattatttggtatctcttctgaatgatcatatatagttgacagtct

SEQ ID NO: 715735 - DNA, 923 bp, Homo sapiens
acccggtctcctgtgggggaagcaaaaaaaatttttagtagaaaaggttccagccacctgtttggggcaaaagtatccaagcagctggtttttccccgccaaaatgtatcaacagtaaccagagggttgcacccccacctgtgattggtcacgagagacttgtctttttttttcctactaggagaacaaaagtggttccacccttctgactgctccaccggttgtgtgggagccaaccagctcccaagaatttgtgtgggtaggcataacaaagtcccacaacgcctcccggggggttcaaacacagcatgtattggcacgaagcataccgactgttcccacaattaagctcgggggacccacacacaggcccccgccccccacccgcccgcggcatataatcttcattgtccacattctccctatagaacgcggggggttccaccgcctggctaatacacaggggaagtggttttatagatcattcccccacccctatgggggactcgcccaccaacacggggagacgacaccaaacagatacggtcgcgggatcgaacacaaggcggcagaacagctcctcgcagactcctcgcggcctccacccaagagagggcagagacatgggtttaaagataggcagcaccttcttattatagacagaattatggcacccttattaagacaatatttgttctcactcaacaatgcctcccggcgcccacgttgtggttccagcccgggggaatttatcctccagaccctcgcaacaagcgaagcgagagcacgccctaaacgtatgtagaacacgtatgccgagggaacgtccccatcaatgagagcgaaagcactcccggttgaataattcaaaaaggagcaccatattttaaaataaaaaataaaaaaaccaggcggacataaca

SEQ ID NO: 715736 - DNA, 816 bp, Homo sapiens
tggaaacggagtctcactctgtcgccaggttgggcgatctgggtcactgaacctctgcctcaggggttcaagcgatttccctgttcagcctcctgagtagctgggactacgggcacacgccaccatgcccagctcattttggtatttggggtagagagggggttcaccatgtgggccaggagggcctccatctctggacctggtgatccgcccgactcggcctcccaagatgcggggataacaggcgtgagccactcaagtcgggcgagagagatggtccataaatagagggtgggggcgggtgtcctatagcccaaagctgtggtgtcccaggttctcgtaattgcgcaaaaataatgtggccccccccaaaaaccctccaaaaaagaagaaaagcaaagaacagcagaagacaaaggaaacaaccgatgaaacgaagttagcaaaaacagaaaaacgaggcggcggcacgaccgccacaaagcaacatctcccccgacggagggggacaccgaagaagagaggcacaaccaccccttgtgttttcatacaagaggggccgcccaccaatcagaggacgcaggccctatcaacaccgaaccacacgcagcgcgtcaaaacaccaaaccaaacatgatgcacaacacctcacctcaccgtcaccgctgacacaaaacaccccttcacgcggggtgaccactggcgccaaccaccacacacaacacatacacctgcagcacaacacatccggagccaaagggacaaccccacgactgagccatgacaaaacgacacagactctcaaacaccatacgg

SEQ ID NO: 715737 - DNA, 187 bp, Homo sapiens
tcagtcggaccaatcttcatgctacagtcgcagacctaatacaatgtaatgctatataaatagttgctgcggcacacggaaacttactggaattttttttccaaatatttttgatccacagttagttgaattcaaaggcatggaacccagggccagagggctagccgtactttgaactcagtaggat

SEQ ID NO: 715738 - DNA, 724 bp, Homo sapiens
  misc_feature (10)..(10): n is a, c, g, or t
  misc_feature (77)..(77): n is a, c, g, or t
  misc_feature (88)..(88): n is a, c, g, or t
  misc_feature (103)..(103): n is a, c, g, or t
  misc_feature (121)..(121): n is a, c, g, or t
  misc_feature (138)..(138): n is a, c, g, or t
  misc_feature (145)..(146): n is a, c, g, or t
  misc_feature (183)..(183): n is a, c, g, or t
  misc_feature (206)..(206): n is a, c, g, or t
  misc_feature (238)..(238): n is a, c, g, or t
  misc_feature (277)..(277): n is a, c, g, or t
  misc_feature (309)..(309): n is a, c, g, or t
  misc_feature (316)..(316): n is a, c, g, or t
  misc_feature (327)..(327): n is a, c, g, or t
  misc_feature (330)..(331): n is a, c, g, or t
  misc_feature (333)..(333): n is a, c, g, or t
  misc_feature (363)..(363): n is a, c, g, or t
  misc_feature (386)..(386): n is a, c, g, or t
  misc_feature (418)..(418): n is a, c, g, or t
  misc_feature (515)..(515): n is a, c, g, or t
  misc_feature (578)..(578): n is a, c, g, or t
  misc_feature (609)..(609): n is a, c, g, or t
tctttgagcnccttttcccagtaatctcaggaatgtatagagccccgccccacacttcatacccgccctaggccttnggtgatgaggnccctcacagcttgtncaatggcatccctgtcgntaccaaacatcttcagnagctcanncggcttcccacttcttggtacccggttaactgccagntgggtgacagtgatgccaggttngcccactactgcactggacacagcctcaccantgccaccttcataataatggtcctccacggtgaggatcntgcccttggtggcacgagcgctgtcgagaatnatttttntgtccaggggnttnntngtgaaggggtccagcacgcggatgttgatnttttctttcttcagcagttcggnagcggccaaggcctcgtgcagggtcaccccanccccgataacggtcacctggtcatccttgctcttcaggaccaccttggctttttcgacctggaagtcctcattgttgttatagatgatggcattttntgggcggttggtccggttgaagcagataccctttgtattggcggctagttccactgctttttntgtagcaacgccatcacttgggtataaaganagttgatgtggggattgaccgaaacatagccagatcttctagggccatctgggagggcccgtcttccccgatggaaacgccgcaatgggagccgcagaggttgatgttgctctcg

SEQ ID NO: 715739 - DNA, 741 bp, Homo sapiens
aaaggaaaagtcgaaaaagcccagcgcccgggtagttggtgttttcccctttccctttctcgtgggtcattgcgtgtgtgtattttttttctctcaacacacgccgtgtactttcctgcaccgcgccgcaacgttgggctccaacctttgttcttaaagaaaaggaaacgccttcaaatgacggcccagacgtcgcccgaactttcagtcggctggagggggaagtggcgacttcttgcaactgggtggcaggagtgtctctactctctccttgcagggagcccgagaggagcaagtgggaggtttttcctcctggaccgaatcagctggagaccagcaggtccctaagagaggaagaaatggtcttcaggcgatcctggatttcatccctacctcatcacccttcaagagcccgcgtttggtttggaatacgtaactgggctttgagaacgtttgtactgtgtctggtacccgcatttatactcgggatgtcaagatataggacttaaaacttcaaaaattttgacctcaacaacattctccccctgccctccactcccatctccaggacatattcctggagcatatgggacttcggtcgttttaatttttggttttgtcgcttctctcttttctcccggaccctgccacaaggggaacattttcctggagcagccatttgattttgggggatggaaaggaacaaatagatctaaagcctggcaagtttatcctaaaaaa

SEQ ID NO: 715740 - DNA, 1481 bp, Homo sapiens
gctgatttggtgctcagtgggagtgccgcagtgtctaggctgactcagtctgtcccggctgaaccttacgtgccccgtcctgttctggcccgatgttgccttgttggaagatctcttgtccccgaggtagggacttcttttgtcgaggaaggcggggattcgttagaattggagactgtttgggagagtctgcgttgcgtcctcgtgtactctgtaggtcgctacgtgtacaagacgatagccggcagcctggcagtcggcgtcgcttgtcatgatgggggacgaagctgggtgtctcttcatgagctgtcgtagtatggtcgcacgcactgtctggagatgactgtctggctctgaggtcgtggatcgaggaaggcataggacgtaccaaaagaatgcgcgactttcaagtacttggcgcactcaagaacttgtaccgtgacgcgaaaggaaggcgtggtaagagtatgccctgagggatttcgtcgcgaaaggaaatgacctcgaccaacgtggactgtgatcgcgggcgataccattgtaattgaagaacgaacaagcgtcgttttagttctacttggggcccctaggcatgagccgcacggtgacatgggtgccagccgttgtaccatcctttcgggcatttcacttgtgaggcgcagttaagcgactttctccgtgcggctaatcgcacgcgggacctacaacgattgcgtgctaggcacttcgccaggaaaatcaggggggcgaaggagcttactaagaaactcgatggaatggtgcgaccccggaagcggtcgtcctgtaatcacgggttgtttgttcacattctctctctactgtgatgatcgcgtaacgggggctcggtccttggtgcctcgtttttggccacggggcgccttggggcccttcctgagatccatcggcgtagcagcccgtgccccccttgggacttgcgtttcccttaggcacaatttggcccgcgttttctcccaggacggccgaggcattcgagttgactccgacttcggcgggtgggtccgtaggcctccagggtgggcggccctcgtgtgtgggtctaggtgagaagagttcccccgttacggacccggcccgggggaattccggttggggggtgtggaactcttaggagagcgaatccgcggagaaggcggccaaagctgctttgcgacggaccaccttaggtggtttgaaatcacgcgagccatcgatcgtgtgtggcgtgacctcaatgccttggccttcgcggggaccacctcgtacacaatccatccgcataaaggcaagtccccggtggaaaagcaacgccgttttagggagccctgcgcttcaaccaacttttttggtgggcatcgtttggaaaacgccaccatagtgtgctccattagaagcccagaagcactagtggagaaagccgcatttaccccctttgtgaagccgtataaggtgtgtgtggcaca

SEQ ID NO: 715741 - DNA, 330 bp, Homo sapiens
  misc_feature (108)..(108): n is a, c, g, or t
tttttaaaataaatgcgggagccggtaaagcattaaatgcaagttaaaatgtttcagtgaacaaggtttcagcggttcaacttttataataattataaataaccctgntaatttttttggacaatgccagcatttggatttttttaaaacaagtaaattttttattgatggcaactaaatggggtttgtagcatttttatcatacagtagattccatccattccctatacttttctaactgagttgtccaacatgcaagtacatgtttttaatgttgtctgttttttgggcggttccggtaagtttgctattaaaatcccttaaactata

SEQ ID NO: 715742 - DNA, 1276 bp, Homo sapiens
  misc_feature (672)..(674): n is a, c, g, or t
  misc_feature (677)..(677): n is a, c, g, or t
  misc_feature (679)..(681): n is a, c, g, or t
  misc_feature (690)..(690): n is a, c, g, or t
  misc_feature (696)..(696): n is a, c, g, or t
  misc_feature (702)..(702): n is a, c, g, or t
  misc_feature (706)..(706): n is a, c, g, or t
acccccacaaccggagccgaaaagagaacgagaatcatagcgcttaagtagaggctggtgttgaatcggccgagggcctgaggtgatctgtgaaaatggttcgctattcacttgacccggagaaccccacgaaatcatgcaaatcaagaggttccaatcttcgtgttcactttaagaacactcgtgaaactgctcaggccatcaagggtatgcatatacgaaaagccacgaagtatctgaaagatgtcactttacagaaacagtgtgtaccattccgacgttacaatggtggagttggcaggtgtgcgcaggccaagcaatggggctggacacaaggtcggtggcccaaaaagagtgctgaatttttgctgcacatgcttaaaaacgcagagagtaatgctgaacttaagggtttagatgtagattctctggtcattgagcatatccaagtgaacaaagcacctaagatgcgccgccggacctacagagctcatggtcggattaacccatacatgagctctccctgccacattgagatgatccttacggaaaaggaacagattgttcctaaaccagaagaggaggttgcccagaagaaaaagatatcccagaagaaactgaagaaacaaaaacttatggcacgggagtaaattcagcattaaaataaatgtnnnacncnnnacacacacncacacncctacncacnacaccaccacccacggggggcggggagcgcactaacagaagaataacccccaagagggaggcgacaccaacaatgatatccgacgtccacaccccaacgcgtcttcctggattcaaacaaagggtggggccccacaaataagagggcagagcagcaacacacactcaccaccgcaaagagccgagggggcacgagcgtcatgctaataacaaaccacgcggcgtcgcgaagcacgcggcagaacaaacctaggtgaaccaacacgacggacacaccctgttgagcagaaacacacaccacccaacacaccagggggcggggcagcacccacacacggcgggagaccacaagaaaccaccgccgaacagcaacgatactaacgacgacgcaccaaaggagaccacaccaacaacaaccatccaccgcgaccaccaacaggcgagcccaaacacacccagcggacccatcaatcacgacggcgccccaagacagccgcggtgcgccacaagccgaatcaagccagcatgcacaaacagcacatacaccccaacaagagccgcgccctcagaa

SEQ ID NO: 715743 - DNA, 630 bp, Homo sapiens
atccttaattaaattaatccccccccccccgctctttccctaagcgcctgaggtgatctgtgaaaatggttcgctattcacttgacccggagaaccccacgaaatcatgcaaatcaagaggttccaatcttcgtgttcactttaagaacactcgtgaaactgctcaggccatcaagggtatgcatatacgaaaagccacgaagtatctgaaagatgtcactttacagaaacagtgtgtaccattccgacgttacaatggtggagttggcaggtgtgcgcaggccaagcaatggggctggacacaaggtcggtggcccaaaaagagtgctgaatttttgctgcacatgcttaaaaacgcagagagtaatgctgaacttaagggtttagatgtagattctctggtcattgagcatatccaagtgaacaaagcacctaagatgcgccgccggacctacagagctcatggtcggattaacccatacatgagctctccctgccacattgagatgatccttacggaaaaggaacagattgttcctaaaccagaagaggaggttgcccagaagaaaaagatatcccagaagaactgaagaacaaacttatggcacgtagcatgcggcataatatttc

SEQ ID NO: 715744 - DNA, 589 bp, Homo sapiens
  misc_feature (565)..(565): n is a, c, g, or t
  misc_feature (571)..(571): n is a, c, g, or t
  misc_feature (576)..(576): n is a, c, g, or t
cggacgcgtgggtcgacccacgcgtccgcaaatcaagaggttccaatcttcgtgttcactttaagaacactcgtgaaactgctcaggccatcaagggtatgcatatacgaaaagccacgaagtatctgaaagatgtcactttacagaaacagtgtgtaccattccgacgttacaatggtggagttggcaggtgtgcgcaggccaagcaatggggctggacacaaggtcggtggcccaaaaagagtgctgaatttttgctgcacatgcttaaaaacgcagagagtaatgctgaacttaagggtttagatgtagattctctggtcattgagcatatccaagtgaacaaagcacctaagatgcgccgccggacctacagagctcatggtcggattaacccatacatgagctctccctgccacattgagatgatccttacggaaaaggaacagattgttcctaaaccagaagaggaggttgcccagaagaaaaagatatcccagaagaaactgaagaaacaaaaacttatggcacgggagtaaattcagcattaaaataaatgctgatncggccngactnctttctctatctc

SEQ ID NO: 715745 - DNA, 390 bp, Homo sapiens
  misc_feature (52)..(52): n is a, c, g, or t
  misc_feature (345)..(345): n is a, c, g, or t
gcggccgcgactactactactagtctactactactaaattcgcggccgtcantaaaaacgcagagagtaatgctgaacttaagggtttagatgtagattctctggtcattgagcatatccaagtgaacaaagcacctaagatgcgccgccggacctacagagctcatggtcggattaacccatacatgagctctccctgccacattgagatgatccttacggaaaaggaacagattgttcctaaaccagaagaggaggttgcccagaagaaaaagatatcccagaagaaactgaagaaacaaaaacttatggcacgggagtaaattcagcattaaaataaatgcngagcggccgaatttcaacacaataaggacgagcacataatttgaa

SEQ ID NO: 715746 - DNA, 2035 bp, Homo sapiens
  misc_feature (31)..(31): n is a, c, g, or t
  misc_feature (39)..(39): n is a, c, g, or t
ggcatgacgaggccgggggtgaacttggcancgaggctngctctttccctaagcagcctgaggtgatctgtgaaaatggttcgctattcacttgacccggagaaccccacgaaatcatgcaaatcaagaggttccaatcttcgtgttcactttaagaacactcgtgaaactgctcaggccatcaagggtatgcatatacgaaaagccacgaagtatctgaaagatgtcactttacagaaacagtgtgtaccattccgacgttacaatggtggagttggcaggtgtgcgcaggccaagcaatggggctggacacaaggtcggtggcccaaaaagagtgctgaatttttgctgcacatgcttaaaaacgcagagagtaatgctgaacttaagggtttagatgtagattctctggtcattgagcatatccaagtgaacaaagcacctaagatgcgccgccggacctacagagctcatggtcggattaacccatacatgagctctccctgccacattgagatgatccttacggaaaaggaacagattgttcctaaaccagaagaggaggttgcccagaagaaaaagatatcccagaagaaactgaagaaacaaaaacttatggcacgggagtaaattcagcattaaaataaatgtaattaaaaggaaaaacaacacaaaaaaaaacaaaaaaaaaaaaaagaaaaaaaaaaaaaaaaaaaaaaaaaaataagagaggcagagacacgagagagaagcgagtcagatgacacacacagaacgcgcctctcttctctctctctcttatatataagagaagagagagtaatctatctctcctctgtatcttgatagacacctcgacccccctatgagatatatctgatttctcgctatatttatggcggccctctcatcaatcggccgtagagacacacctctatcttgtttctaacagcgaccgacctacaagacataaaatagatactatatatctctgtttgactacattagtgctcttttgtacaatcacccgcaccgattcacagtaagacacgcacacaacgcgtagagagtagacctactcttcgcgcagccgcccccgacgcgacgactctcagtatgccttccactgatatagtcgttccatcctcacattgccaattttgttaataaacagtgactctcttgtaaatataaattaacaacacatagagagacagtgacaccaataaagggcccccacgcgcatgacatcaaaacaatcacaagcagctctacacgtcgcggggcgcccacccaaagccggtagggtacagagaaaaaactctccaaaggcaaaacaccatgcgcggtacatcatccgggggggggagcaaattgagacttatcataaaacgcacagatctactaaatatcttttcccccccctaactacaaaaatttatttcccaaaaaataacaaaggaggaagatccagcacgcgcaagaacttcctcctcgtggtataagcgacagaaaagtaaccaaccccagtgtgtaaaagttgcccccacacagcaacgatagtgagtgtcaccccctttcgagttatttgaaaaatatataacatcacacctctgaccacaaacaacactgcttatcccgttacacaaaacgggaagcactacgcacccccacccttattagggcagctcttaaccaaaacacgggggaaacacgacaaccccaccgaaggagagagtagaaacacgacaacaaaacaccagtattattcacacacgacaacactgcagacggggggagggaagataaaacaatcaacggcaacgacagggtacgccaaaaaacgtcccgtagggagggcgacaaaaccacccatgcggatacgaagaccccacgcagaggacccacagcaacagagtagccacccccccaaccaaaaaactgtacttgaaaaagaagagaacgggcgcaggataatccaccaccaagtagaagcccccactcatcacccccctatataagagaaaaacaaaat

SEQ ID NO: 715747 - DNA, 1075 bp, Homo sapiens
  misc_feature (31)..(31): n is a, c, g, or t
  misc_feature (39)..(39): n is a, c, g, or t
  misc_feature (766)..(766): n is a, c, g, or t
  misc_feature (772)..(772): n is a, c, g, or t
  misc_feature (775)..(775): n is a, c, g, or t
  misc_feature (780)..(780): n is a, c, g, or t
  misc_feature (782)..(782): n is a, c, g, or t
  misc_feature (805)..(806): n is a, c, g, or t
  misc_feature (820)..(820): n is a, c, g, or t
  misc_feature (824)..(824): n is a, c, g, or t
  misc_feature (833)..(834): n is a, c, g, or t
  misc_feature (836)..(836): n is a, c, g, or t
  misc_feature (1075)..(1075): n is a, c, g, or t
ggcatgacgaggccgggggtgaacttggcancgaggctngctctttccctaagcagcctgaggtgatctgtgaaaatggttcgctattcacttgacccggagaaccccacgaaatcatgcaaatcaagaggttccaatcttcgtgttcactttaagaacactcgtgaaactgctcaggccatcaagggtatgcatatacgaaaagccacgaagtatctgaaagatgtcactttacagaaacagtgtgtaccattccgacgttacaatggtggagttggcaggtgtgcgcaggccaagcaatggggctggacacaaggtcggtggcccaaaaagagtgctgaatttttgctgcacatgcttaaaaacgcagagagtaatgctgaacttaagggtttagatgtagattctctggtcattgagcatatccaagtgaacaaagcacctaagatgcgccgccggacctacagagctcatggtcggattaacccatacatgagctctccctgccacattgagatgatccttacggaaaaggaacagattgttcctaaaccagaagaggaggttgcccagaagaaaaagatatcccagaagaaactgaagaaacaaaaacttatggcacgggagtaaattcagcattaaaataaatgtaattaaaaggaaaaacaacacaaaaaaaaacaaaaaaaaaaaaaagaaaaaaaaaaaaaaaaaaaaaaaaccggggggcaatataggggggggggggaaaaaaggtaaaaagggncgggtnatntttcngnacccttttttttaaggggggaanngggggcccaaaggngggnaaacaaaanntngtacccgttctctcttttatctttcgttcgaaaaacaggacaaccgcaaaaagaacatagctacaggggatcaatgtgtaacaacaacgcgctaggacaaaaattcatatagatacaaacttaacaacaatacgaatagtagaaatatacaacgtataaacgatcacatgtaatatcacagtaatagatagataatgaatattaaatctgagcgaggagaacgagggaaaatatccgtn

SEQ ID NO: 715748 - DNA, 461 bp, Homo sapiens
  misc_feature (15)..(15): n is a, c, g, or t
gccattctatatganataatatatatttataatttttaatatttatatgtggtatattttcccataatgaaagattaaaattaaagcagttggatctttaaaaagaaaagaaagaagtgaataatacacaccagctttctcctgattagaggaagagccccaaagcttctatggacactcacttttctcttcttcttcttgcattattatgaggaaatccttaaaggttggggaacttgggcgactttggctaatgaggagctctgtgccttgagccccccaggccatagaatagtaaatagtctgtgcctccagccctgcagtgtgaggttccagtcctgtgggctccacacccatcacctgtatcaggaggctcatgtctcaccctgtcttcttgccagccttgaggatggagtctgagcctccatcgtgcaccacgcagggaggacagtggacttgtt

SEQ ID NO: 715749 - DNA, 358 bp, Homo sapiens
ctgatattctgacatgtgttaccaccgagaagtcggctgtcatactatattttactctctgatgcctgtaatgtgtagtttttctctgctattaagatattctttatattattgatttataagcagtttggttatgagctggcttactgtagttttatacatgtatacttgtgcttgggtttattgagcttctttgtatttagttttaaatgagatggagtctcgctctgtcacccaggctggagtgaagtggtgcaaactcgagctcattacagcctctgcctcccatcttcaagtgattcttgtgcctcagcctcccaagtagctgggaccacaggcacacaccaccactcttggc

SEQ ID NO: 715750 - DNA, 1028 bp, Homo sapiens
  misc_feature (719)..(719): n is a, c, g, or t
  misc_feature (725)..(725): n is a, c, g, or t
  misc_feature (728)..(728): n is a, c, g, or t
  misc_feature (733)..(733): n is a, c, g, or t
  misc_feature (735)..(735): n is a, c, g, or t
  misc_feature (758)..(759): n is a, c, g, or t
  misc_feature (773)..(773): n is a, c, g, or t
  misc_feature (777)..(777): n is a, c, g, or t
  misc_feature (786)..(787): n is a, c, g, or t
  misc_feature (789)..(789): n is a, c, g, or t
  misc_feature (1028)..(1028): n is a, c, g, or t
gagttaggctagtacgaggcgggtgtgaatcggccgagggcctgaggtgatctgtgaaaatggttcgctattcacttgacccggagaaccccacgaaatcatgcaaatcaagaggttccaatcttcgtgttcactttaagaacactcgtgaaactgctcaggccatcaagggtatgcatatacgaaaagccacgaagtatctgaaagatgtcactttacagaaacagtgtgtaccattccgacgttacaatggtggagttggcaggtgtgcgcaggccaagcaatggggctggacacaaggtcggtggcccaaaaagagtgctgaatttttgctgcacatgcttaaaaacgcagagagtaatgctgaacttaagggtttagatgtagattctctggtcattgagcatatccaagtgaacaaagcacctaagatgcgccgccggacctacagagctcatggtcggattaacccatacatgagctctccctgccacattgagatgatccttacggaaaaggaacagattgttcctaaaccagaagaggaggttgcccagaagaaaaagatatcccagaagaaactgaagaaacaaaaacttatggcacgggagtaaattcagcattaaaataaatgtaattaaaaggaaaaaaaaaaaaaaaaaaaaaaaaaaaaaccggggggcaatataggggggggggggaaaaaaggtaaaaagggncgggtnatntttcngnacccttttttttaaggggggaanngggggcccaaaggngggnaaacaaaanntngtacccgttctctcttttatctttcgttcgaaaaacaggacaaccgcaaaaagaacatagctacaggggatcaatgtgtaacaacaacgcgctaggacaaaaattcatatagatacaaacttaacaacaatacgaatagtagaaatatacaacgtataaacgatcacatgtaatatcacagtaatagatagataatgaatattaaatctgagcgaggagaacgagggaaaatatccgtn

SEQ ID NO: 715751 - DNA, 290 bp, Homo sapiens
  misc_feature (7)..(7): n is a, c, g, or t
cctgtanccggtctgggtagctgggaccacaggtatgtgcaccacgccacctaatttttgtatttttagtagagatggggtttcaacatgttggccaggatggtctctatctcttaaccttgtgatctgcccgcctcggcctcccaaagttctgggattacaggcgtaagccaccgcgcctggactatttcaaggttttcagaaacaaaagcaatcgtagtagaatcaagaactagtacattataacaaaccaacaaaaatgtcacaagtgtaacgcgtcagcctgggcc

SEQ ID NO: 715752 - DNA, 755 bp, Homo sapiens
ggacaattcagaacatgtcttttcaagcaaaggactggtcttttctatctcgtgtgacgcaccagcgggattccccgccccttgggaaagatgaggtatgcctcgccgcggtggaccacgggacatttgtcaccgccccagaatagattaaatgggatcgagaccatgtttagccagccatcctggagagtttgtaagatacccccatttggattggatgaattcccgattctgcttgcttgccttttaataattgataatgcttatacacttaccccttaatgccccgaaatgtaggggtataaataaaggtaacacatggacctgatcttctttataatttctactttgaggtgctgtctcccaatgtttgaatgtatctgaggccgggtgctcccccggtagctctaggagggctggccacttagaggtggggagcagaggattctcttatcccacatccacatcttggtgcaagatattggactcttccatctcttgcactccaagcttggtaagatagttaagcgtgcataagtttaacttcccatttaccataactctgcttagaatttggggggaaattttagaaataataaattgacaggattattggaaatttgttataatggatgaaccttttgtcaaataagattcataatttactttttaaacctttgataaagataaggcactggttgtggtttatttgggttatttttgttcccccaggttaattaatcattaaacttgga

SEQ ID NO: 715753 - DNA, 1016 bp, Homo sapiens
  misc_feature (7)..(7): n is a, c, g, or t
  misc_feature (25)..(26): n is a, c, g, or t
  misc_feature (707)..(707): n is a, c, g, or t
  misc_feature (713)..(713): n is a, c, g, or t
  misc_feature (716)..(716): n is a, c, g, or t
  misc_feature (721)..(721): n is a, c, g, or t
  misc_feature (723)..(723): n is a, c, g, or t
  misc_feature (746)..(747): n is a, c, g, or t
  misc_feature (761)..(761): n is a, c, g, or t
  misc_feature (765)..(765): n is a, c, g, or t
  misc_feature (774)..(775): n is a, c, g, or t
  misc_feature (777)..(777): n is a, c, g, or t
  misc_feature (1016)..(1016): n is a, c, g, or t
aactagnctaggtcgaggcgggtgnnggcctgaggtgatctgtgaaaatggttcgctattcacttgacccggagaaccccacgaaatcatgcaaatcaagaggttccaatcttcgtgttcactttaagaacactcgtgaaactgctcaggccatcaagggtatgcatatacgaaaagccacgaagtatctgaaagatgtcactttacagaaacagtgtgtaccattccgacgttacaatggtggagttggcaggtgtgcgcaggccaagcaatggggctggacacaaggtcggtggcccaaaaagagtgctgaatttttgctgcacatgcttaaaaacgcagagagtaatgctgaacttaagggtttagatgtagattctctggtcattgagcatatccaagtgaacaaagcacctaagatgcgccgccggacctacagagctcatggtcggattaacccatacatgagctctccctgccacattgagatgatccttacggaaaaggaacagattgttcctaaaccagaagaggaggttgcccagaagaaaaagatatcccagaagaaactgaagaaacaaaaacttatggcacgggagtaaattcagcattaaaataaatgtaattaaaaggaaaaaaaaaaaaaaaaaaaaaaaaaaaaaccggggggcaatataggggggggggggaaaaaaggtaaaaagggncgggtnatntttcngnacccttttttttaaggggggaanngggggcccaaaggngggnaaacaaaanntngtacccgttctctcttttatctttcgttcgaaaaacaggacaaccgcaaaaagaacatagctacaggggatcaatgtgtaacaacaacgcgctaggacaaaaattcatatagatacaaacttaacaacaatacgaatagtagaaatatacaacgtataaacgatcacatgtaatatcacagtaatagatagataatgaatattaaatctgagcgaggagaacgagggaaaatatccgtn

SEQ ID NO: 715754 - DNA, 1017 bp, Homo sapiens
  misc_feature (708)..(708): n is a, c, g, or t
  misc_feature (714)..(714): n is a, c, g, or t
  misc_feature (717)..(717): n is a, c, g, or t
  misc_feature (722)..(722): n is a, c, g, or t
  misc_feature (724)..(724): n is a, c, g, or t
  misc_feature (747)..(748): n is a, c, g, or t
  misc_feature (762)..(762): n is a, c, g, or t
  misc_feature (766)..(766): n is a, c, g, or t
  misc_feature (775)..(776): n is a, c, g, or t
  misc_feature (778)..(778): n is a, c, g, or t
  misc_feature (1017)..(1017): n is a, c, g, or t
cggacgcgtgggtcgacccacgcgtccggcctgaggtgatctgtgaaaatggttcgctattcacttgacccggagaaccccacgaaatcatgcaaatcaagaggttccaatcttcgtgttcactttaagaacactcgtgaaactgctcaggccatcaagggtatgcatatacgaaaagccacgaagtatctgaaagatgtcactttacagaaacagtgtgtaccattccgacgttacaatggtggagttggcaggtgtgcgcaggccaagcaatggggctggacacaaggtcggtggcccaaaaagagtgctgaatttttgctgcacatgcttaaaaacgcagagagtaatgctgaacttaagggtttagatgtagattctctggtcattgagcatatccaagtgaacaaagcacctaagatgcgccgccggacctacagagctcatggtcggattaacccatacatgagctctccctgccacattgagatgatccttacggaaaaggaacagattgttcctaaaccagaagaggaggttgcccagaagaaaaagatatcccagaagaaactgaagaaacaaaaacttatggcacgggagtaaattcagcattaaaataaatgtaattaaaaggaaaaaaaaaaaaaaaaaaaaaaaaaaaaaccggggggcaatataggggggggggggaaaaaaggtaaaaagggncgggtnatntttcngnacccttttttttaaggggggaanngggggcccaaaggngggnaaacaaaanntngtacccgttctctcttttatctttcgttcgaaaaacaggacaaccgcaaaaagaacatagctacaggggatcaatgtgtaacaacaacgcgctaggacaaaaattcatatagatacaaacttaacaacaatacgaatagtagaaatatacaacgtataaacgatcacatgtaatatcacagtaatagatagataatgaatattaaatctgagcgaggagaacgagggaaaatatccgtn

SEQ ID NO: 715755 - DNA, 137 bp, Homo sapiens
cacggaagagagtgaactgggtagtacggatagtgtcatccggacactttgctgaagtatatcagctgaaggagctttgggctgagactatgggtttattagatatagaattaagtcatctgcaaagagacgtagtt

SEQ ID NO: 715756 - DNA, 1020 bp, Homo sapiens
  misc_feature (31)..(31): n is a, c, g, or t
  misc_feature (39)..(39): n is a, c, g, or t
  misc_feature (714)..(715): n is a, c, g, or t
ggcatgacgaggccgggggtgaacttggcancgaggctngctctttccctaagcagcctgaggtgatctgtgaaaatggttcgctattcacttgacccggagaaccccacgaaatcatgcaaatcaagaggttccaatcttcgtgttcactttaagaacactcgtgaaactgctcaggccatcaagggtatgcatatacgaaaagccacgaagtatctgaaagatgtcactttacagaaacagtgtgtaccattccgacgttacaatggtggagttggcaggtgtgcgcaggccaagcaatggggctggacacaaggtcggtggcccaaaaagagtgctgaatttttgctgcacatgcttaaaaacgcagagagtaatgctgaacttaagggtttagatgtagattctctggtcattgagcatatccaagtgaacaaagcacctaagatgcgccgccggacctacagagctcatggtcggattaacccatacatgagctctccctgccacattgagatgatccttacggaaaaggaacagattgttcctaaaccagaagaggaggttgcccagaagaaaaagatatcccagaagaaactgaagaaacaaaaacttatggcacgggagtaaattcagcattaaaataaatgtaattaaaaggaaaaacaccaggaaacaaagaaaaaacacgcggggacaaagggggggggggannaggggtactgaatggggaatgctccttagtgtttttcgggaccagtttttttgttacacgggagattcggcggtaccccctatggggagtgcgtaatattcgataagcagttacggttagaacgcgtgaaaacgaaagaagagacaaaaaaagccaaaagcacagatgacaaagtagaccacacaagagggaagcagaagataaacacatagatgttatagataagagaatgataataagtgataaaaaatagagacaaaaaatcaagaactaaaaagcaaaacagagaagatcgtggaataaga

SEQ ID NO: 715757 - DNA, 1008 bp, Homo sapiens
tgccctcatgctgccagcttctactcagagctcttcacgctctacctgctgcttcatgagcgggaggacagcttctacagccaggcattgccaacttgagcctctttcctgatacccaactgctcgagttcctggatgtgcagaagcacttgtggcccctcaaggacctcacgctgacgagcaatcagaggtactccctggtcagggacaagtgtttcctgtcagccaccgagtgcctgcagaagatcatgaccacggtggacccacgggagaagctggaggtgctggagaggacatacggggaaattgagggcacggtgtcgagggtattgggccgggagtacaagctgcccatggacgacctgctgccacttctcatctacgtggtgtcgcgcgcccgaattcagcacctgggagccgagatccacctgatccgtgacatgatggaccccaaccacacaggaggcctgtatgacttcctgctcacagccctggagtcctgttacgagcacatccagaaagaagacatgaggctgcaccgcttacctggccactggcactccagggagctctggtagcctggcctttcctggacagactgaagagctgagcagggcactgccagcctgtccctcattacccaaggcaaggggcaggacaggccctcagaagcagctcttggaggagatgagcattttgttttgcacaggaagatgctgctgctgccctgactgggatgagggtgaggggtgacgggtgtggccctggatgtggtggttttcccttggccactagcccatcttcaatgaccccttaatctgcagcagctcacaggctgggggtgaggagtccctggcttctcttagcctgagcctttctcccaagttccagagcctctccgggcctcagtgctgccatctgtacaatggtggagtgagtacgctgtaaaggaccttccattcattttgctgaattccagagagtaccattatgtgataggctgaataa

SEQ ID NO: 715758 - DNA, 576 bp, Homo sapiens
  misc_feature (19)..(19): n is a, c, g, or t
agctgtggaggtgcactgnaaataggacatgtgaaaggactctgattaagctggggacactgagcttgtaaactctgatgaacttttcttgccataaaaaacaaaaacacaaacaaaaaaaacagcttctttattctagtagtggcaacatccccttcctgacccatgctgccatcagtctttccacctttgtctgaggagataaactctgcactgcctgaagcaacagtgatggcctcccctgaggcagttgccaggcaaaataaggttgattctcctcaggagctacccccaacacctctgtttgcttccagacctataactagactagagtctcagtgggcccctagaggtgaagatctgagtgtcacctatgaggaggtgcaccacacttgaaaagcactgcttgagtttactgatttacgtaaacagaagtctggagactaggcatgggaatggatattaagggtatggcataatggtggaaagaacatttagttggatcaggctgaatatattgattcaggcccacttagtatgaattccgaattcaatgttgcaactccaacagcctct

SEQ ID NO: 715759 - DNA, 207 bp, Homo sapiens
aaaccctaataacggagaccatctagacaagtctaaaatgttatatatccatccaagagattccagtaccgttgataaaatactgggaaactgctcagaatttatacggggtttgttgatggtggtattattctctcccaggaggaactagcaaattatagcagccttttgaaaaagtatccgtgaatagaaaaagcgtaattaggg

SEQ ID NO: 715760 - DNA, 921 bp, Homo sapiens
cgtcttacctgtggagacggggtctcaggccggccttgggaagaggggatgtcagagctggggggccatggcctcatccagccactccctccaccatgcagaggtactccctggtcagggacaagtgtttcctgtcagccaccgagtgcctgcagaagatcatgaccacggtggacccacgggagaagctggaggtgctggagaggacatacggggaaattgagggcacggtgtcgagggtattgggccgggagtacaagctgcccatggacgacctgctgccacttctcatctacgtggtgtcgcgcgcccgaattcagcacctgggagccgagatccacctgatccgtgacatgatggaccccaaccacacaggaggcctgtatgacttcctgctcacagccctggagtcctgttacgagcacatccagaaagaagacatgaggctgcaccgcttacctggccactggcactccagggagctctggtagcctggcctttcctggacagactgaagagctgagcagggcactgccagcctgtccctcattacccaaggcaaggggcaggacaggccctcagaagcagctcttggaggagatgagcattttgttttgcacaggaagatgctgctgctgccctgactgggatgagggtgaggggtgacgggtgtggccctggatgtggtggttttcccttggccactagcccatcttcaatgaccccttaatctgcagcagctcacaggctgggggtgaggagtccctggcttctcttagcctgagcctttctcccaagttccagagcctctccgggcctcagtgctgccatctgtacaatggtggagtgagtacgctgtaaaggaccttccattcattttgctgaattccagagagtaccattatgtgataggctgaataa

SEQ ID NO: 715761 - DNA, 1057 bp, Homo sapiens
gccgcgctcccctgctcgcctcagtggttcggccgcggcgacccactccggcggcgcgtccccgagcttggtacggctcagcccgtctcccccgaagcccggcgcccgcgcccggcccctcagtcggtggagcccgcagccccccttgtggccgcggagtccccgccgctcggctttgcccgcatggtccgtccggccgtgccaccagtaaccagctcccagagaaccaggagaagcacacccatcagagagtctccgaggaagaccatcacaacggaccactagtggatgcgcagccagtacatgatcagaactcatgagactagacaaaccccaccatatggcacagaagacctcactgctacgaattccgaagaaccagatcgaacaccataccaatgaaaaaggtgatcgaatacttaaaaagcaatgagtcacaattagatccacctaataaacatagggatacaacatcggggagtctggcccgttgagcagacacaacggaatcaccctaacaagtctgctgtcctcgtcagacggcgctcaaccaagtgtcaagcgaataacccagcaaaaacccttaactcattgactccccactgaaccccctgacagcggacccatgcccctgccaaaactcaccttgaaaccaacgagagaacctgacagacacgaccaagtggaccgctcacaaagatgatcatgcaactagatacctcaacatcgctgataaacctcatgtggacccacatgttacagagaatctccaaagtacggaaagttacccctacacccaccagctcacttgaaatcgataaaggggaccaacgaccgacaaactaggtcacagatgcaccaggcagaccgttgtatcaccacatctcacctaataagatcacctggcaaatgcccgtaacctcaaacagacaactcatgcgcaccccacaacaagactgaacgactcagcagatacaccgcgacccatcgcctgtcgtacagcacaacccacaatccacacgaaccgaacacaacatcccgatatattcaaagcatc

SEQ ID NO: 715762 - DNA, 396 bp, Homo sapiens
attcgatctgaagctgtgacaaactagtgaaataaacacaacctcaagaaaaggaagaaacgcccagataaaagtggtaatttgctctcttggtgtaaaaagcttgattgtccggaattgttgattttcttactctcgattcaactgtcagtcagtttgccttcgctgtgtttatgaatgaagagtcatatataccgtgttcactaccgagcgtgcgccacactgtggctcctgtctgcttggaaaatgtgggcgtggtgagcgacataagccaggttaaccccctcaaccagtttatagtgctgtggtaactgtatttaaattaatgcactctaaatggcattaaaaaacagataagcttaacggaaagcatctgtcgacacggccgccaattta

SEQ ID NO: 715763 - DNA, 1304 bp, Homo sapiens
  misc_feature (669)..(669): n is a, c, g, or t
tgccctcatgctgccagcttctactcagagctcttcacgctctacctgctgcttcatgagcgggaggacagcttctacagccaggcattgccaacttgagcctctttcctgatacccaactgctcgagttcctggatgtgcagaagcacttgtggcccctcaaggacctcacgctgacgagcaatcagaggtactccctggtcagggacaagtgtttcctgtcagccaccgagtgcctgcagaagatcatgaccacggtggacccacgggagaagctggaggtgctggagaggacatacggggaaattgagggcacggtgtcgagggtattgggccgggagtacaagctgcccatggacgacctgctgccacttctcatctacgtggtgtcgcgcgcccggtgaggcagtcaggagctgggggtgcaggcaggggcagggtcccacccccaaccacgatatcttctgatacctctgaaccccaggtttatggatgcagcttctctctgtacagatggggaagccaaggcccagaaaagggagggtcccagccaggtgctggggtgctagaggtagagtgaggaccacaccccaggtgtccagccatccaggccagcgctccttccccagctgcctgtccgcgacaggcctcttctccttgtctccctcnctctcttggtggggcggtgttctccagaattcagcacctgggagccgagatccacctgatccgtgacatgatggaccccaaccacacaggaggcctgtatgacttcctgctcacagccctggagtcctgttacgagcacatccagaaagaagacatgaggctgcaccgcttacctggccactggcactccagggagctctggtagcctggcctttcctggacagactgaagagctgagcagggcactgccagcctgtccctcattacccaaggcaaggggcaggacaggccctcagaagcagctcttggaggagatgagcattttgttttgcacaggaagatgctgctgctgccctgactgggatgagggtgaggggtgacgggtgtggccctggatgtggtggttttcccttggccactagcccatcttcaatgaccccttaatctgcagcagctcacaggctgggggtgaggagtccctggcttctcttagcctgagcctttctcccaagttccagagcctctccgggcctcagtgctgccatctgtacaatggtggagtgagtacgctgtaaaggaccttccattcattttgctgaattccagagagtaccattatgtgataggctgaataa

SEQ ID NO: 715764 - DNA, 556 bp, Homo sapiens
ctgcagagaccctcaaggatgtggttatgatggataactttcaccatatttttgcaactctttctcgattgaagatctcagtgtctacgaacgcagaataaaaagaagccaatcaaaaatagacagatcaccgttcagtcttatgtcactgtattcgtaaagaccatgctcgttgaaaaactaaatcatttctttgaaggtgttgaagctcgcgtggcacagggcataagggaggaggaagtaagttaccaacttgcatctaacaaacaagaacttcgtaaagtcattaaggagtaccctggaaaggaagtaaaaaaaaggtctagataacctctacaagaaagttgataaacatttatgtgaagaagagaacttacttcaggtggtgtggcactccatgcaagatgaatttatacgccagtataagcactttgaaggtttgatagctcgctgttatcctggatctggtgttacaatggaattcactattcaggacattctggattattgttccagcattgcacagtcccactaaaccttgtgaaagaagaaaagc

SEQ ID NO: 715765 - DNA, 283 bp, Homo sapiens
ggaaaattagccgaagtggtagggatcctgctagggtgtagaataggaaataaagtcctgcattgagtcgttctgtttggtttcctcagcgtgtgatgataattagtgtgggtactagtgttgcttcgaataggatatagaataggattagttcggtggcggtgcaggttataattaggaatcagttgtcagtaggattagtatggtaatcatatagtttcctctcgggttgtggtcccttcctgataggtgagcattggctagctcattcagtatacagggg

SEQ ID NO: 715766 - DNA, 1389 bp, Homo sapiens
gatatgaagccgccgcctcccgatcgccgactcccgtccaatcgatgccgccgccgcccgggccgatgcccccggcgccgcggcgcggcggaggtgtggtgcgtgggcggctggcgtgtcacggtgctgttggcggtcggtcgatcgcgaaccgtgtgactcctggcgatctgtggtgggcccggtcctgctgatgctttcgtcctacctgcctcaaggcccgctaccaggaccgccgggcgctcttcatcgctgggcgcttggtccgtgcctgactggtgcagtggcgggtccccggccacaacaggcttctccacctccttgcgaggggcccaggtggtcccggcggtcggtcccggctgacgcgctgggcgcagtggcgtcgggtgtgggtgccagtgggcgtggtggttgcggtgctggtgtggtgcccgcatcgctgtcggtaggtactagtaccagagccagggagtcagagcgtgaaaactcaggagacactcatccaaagcatacatcagaacagagcatagggatagacaggaatagaagaaatagcatgagacatagtacaccgaacaacgattagaagttgaagaaaaaggcatacaacggctcacacataacaacaatagcaggtaacaccaagataaaaccgtccactctgcgtttcacaatggtcattctagagcaattgcgaaccggcctacataggatgactcacattgctaccacacctttgcttcatgaaaccacagagcaaacaggaacatcccttgggcttctgtcgctcacaacactcgggtcggcacaaaacaagtgaaagaagagaaagagggccataccaaaaaatcagcaagcgacaaacgcaagcacaagcaaacgacgcaacaagaccatacattaccagcagcctcgcagcggaatgaaaccacagtgacagaacaacgagacaacacaaacgctcaaagtccaatctatacagaaactcgtaacgacacagaccccttaacacagtggagacctaaatattaatatcacccactcccgacaatcatcatagccacccaaaccaacagaaaggaaaagacaaccaaccaacacagcaaagacagaggacgaacaacgcacaggaacacaaccaagaacaaagcgacaccacaaaataaaaacaaaactattagatacaacagtatcaagcaccatcacatgaaaacaaactaaatcactaaccaaccaaccaaaccgcaaaaaaaagcaacaaacatacaacaccgaacacaacagagacacagacagaacagaaacagaaaaaacacaatacacataaaaaaatcaaagaatcgaaaacaattctattacattccttcttaaaaacaaaatatgcactaa

SEQ ID NO: 715767 - DNA, 298 bp, Homo sapiens
ggtaggctgtctgggtcatggacatcagtgtggaagtcacctaggctgccacagacctgggagaagaggagggcggccgtgcaggaatggagaaggctgtggctgggcctgagggaagactctgtgcctgagggtagaagtgtgaagtgagcaagcttcaggctagaagagggggaatgaagagagcagggtctcctttcagagaagagggtaaaaggagtgtgtagttcttgaaggactgaggatgttacaagaaaagagctatccggagcacagaaagactcaggagggccgatag

SEQ ID NO: 715768 - DNA, 679 bp, Homo sapiens
  misc_feature (509)..(509): n is a, c, g, or t
ggagggcaggaagccacggccacaggggtgtagcccgagacccacctgcattaatgaatcgtgaacagaaaacagcagcgcagccatggcggggatgacagacagctccggggactacatcgactcgtcatggagctgcgtgtctgtgggagagaggaccagaggccgagtcgtcacctctgcgggatcacgtggggacgtcgacacatcgggctggtggtgctcactgaagattcgtggagacagagtcaatcggcaagccaggacatggtcagaccgatgctcatttgcgtgggaaacagaacgaggcacgtggaatgcctgcaagacaccagataggacagctggaacaaggtaccgggactccttggcccgaacgacacgacactcttacttatgggcgccccaagcgataccaggagacccagtataagtccattcgagggttggacacaaagcacacgggcagccgacaacgttgcagcacatcacggtggcacagctttcantcacccaagacagcccacttcttaccaagaggcttgattgggcttgacaatcttgaccgcaacatccagtcaaaggaatcccgggacaacacccagaatgggaggacttgttaaccccattggcatccgggggcatccttgaagaacgaaagggagaaagaaagaaggaa

SEQ ID NO: 715769 - DNA, 144 bp, Homo sapiens
gggaacagcatacccacgattccgctacgaccagactctatacacctctctattaaaaaacttcctaccactcaccctagcattacttatatatatgtctccatacccattacaatctccagcattcccgctgcaaaccaattc

SEQ ID NO: 715770 - DNA, 281 bp, Homo sapiens
atgtgtaggtgcttgaggatctcccgactagcctgacaggggtgtggctgggggaagactataccccacgctggcctggtttcacctcaccctaatccccggtgggagctgctgatgcaaaaagctgagggggcctgtgggagtggctgtttttatgccccagccccgcaggttggggagtgtttgtgggggtccagagccctcccccagccagtgagagaacctccgggaggggtccttcgtgtggggccctgtgtcccctgctcggggagtaagggctg

SEQ ID NO: 715771 - DNA, 161 bp, Homo sapiens
gcgctgattcacgtgagtaagtttataattcaaagcagaattgagctcaaaagaatacacaatagtgttgcaaatatccattttctgtaaagaataaaagctacatagttttaggaaagcgaaggaaatcctgactcttggtttaactgattcattcactg

SEQ ID NO: 715772 - DNA, 86 bp, Homo sapiens
  misc_feature (10)..(10): n is a, c, g, or t
  misc_feature (35)..(35): n is a, c, g, or t
  misc_feature (44)..(44): n is a, c, g, or t
tttttttccntcttttttctgtttgtttttagatnaaaattttnagaaaaaaaatgaaaaaattctaataaaagaagaaaaatgga

SEQ ID NO: 715773 - DNA, 1536 bp, Homo sapiens
  misc_feature (484)..(484): n is a, c, g, or t
gctcccggaggcccattacgggaatctgcggagcttagctgtcgccacgctcgcgccgggtccgcgcggtccacggtgacccccctatctgatcgcccccggtgagcggtccatctatggacgtgcggggctcctgaaaggcccctcgagctgtggactgcagtcgctgcgagagatcgcggcatgaaaaatctattatcagagaacattcagcgcacacagttttcaacgcgtctgacgtgtgaacactttaacctcagaaatatgcttttctagctttcactcgaaatgcctgctgtaattctttccggacattgggtaagaattaatcagtggacgatacttcattgaccagtcgggtcctgtgataagatacgctacgtatgactcttgatgcgccactgagagcacgtgacgagatgatctctttgaagggcgcactctcctgtgactgctgcacttcggttgctgcgtcccatggcangcttgccattgtctctctaacgactgtaaggccgtgcgcatgtacaccatgcatggtagccttgggacacttagaacatggaggagtatactacgaacactatgacgcgtatgctttaaccaccgtaaacgcaccagtggttacatctcggactttttacacttgcgtgtggcacaaggcacctagtgacttctgttaaataattttctaactttactggggtacaccaaaagctcttgtcactcgaattggagacccattagacgcttttggtcgtggctagtcggttcgatggaaatctaacgcgagagactgagcttggggggggctctttcgataaccacggaaaccgatcaccctatatgacgtggctttgcacacttctgcgtttcacccctcgatccgggcctagggtgggggctcccaatctaagttcccttaggccatgtggaattttcccggtcggttttgctttcgcaggaatagggcatgagccgggctagatgggttcgccgatcagggcggcattggttttcatactcgccctcgccgcatgtcccggttcacaccccggttcaaggaaaaggcgaaagggccagactatcgggagagtaacacaggcgcattatggggtgtgaagtctcgcggtttgcgcccccacgagaacattatgttccgattttaccgggaaggctctagtgggcaaccttctttatgggcaatatcccttggagcggacacctttcccccccaagtatagaatgagcgctgggcaccactcctgcttgggaaagaacagccactggagggcctataacccttgggtacccgggtatagtaagagacccccggattctccgcaaatttcgcttgagaagggctacaatatatacgcggcgacaaatggcgcaccactgtgccctgtgaaggcgcccagagtgttgtacatatgcgcccagttgagtatgcgcaaagcacagctttttttggagcccccttgatattgttattttgcacaataaacaggcttgccctatgtgtgtctacacact

SEQ ID NO: 715774 - DNA, 108 bp, Homo sapiens
  misc_feature (4)..(4): n is a, c, g, or t
cgcnggaccccgatttccttcacttcgtcggtagcgttaccgatgatgcgggctttctcgtccgggataacgaagtcgttaacaccgatggaaaccgggaaatggtcg

SEQ ID NO: 715775 - DNA, 330 bp, Homo sapiens
gatcggtatactcgtctggtgcggtaccattggcgtgcaacttgatttgatggtgagggatggatcgttgagctcgatcagttatgtagaggatgcgtaaggatgggagggcgaagaggactaggatgatggcgggcaggatagttcagacaggatctatttcctgagcgtctgagatgttcgtattagttagttttgttgatgagtgttaggaaaatgggcatacttggactatggaagcagataaggaaaactgattattgagggcctgtctcaatcaggttgtcggggataccgagattcgagattcgaaaatcatggatcatagcg

SEQ ID NO: 715776 - DNA, 573 bp, Homo sapiens
agagcttggatctgctcaggagttggcatgggcccacgattcttcagagtatacaataagagagagcaacagcattgtaagagatcatttaagaactttaaggaagaaaaacaaaagaaagaaatacaaaaaacacaacctttcttggggccggctttccgccccctggaaaaaaggttcaagaagacacaatgctgttggcggcgccgcgggggccacataggacatgaaacactaggtccgaacgtctggttgctccagagagtcgcggggccaggcgacgatgggttggccattctcgcacaataaacaaccgccgggggagacagccggcatcgcgtttagagagaccaaactccaaatggggcatgacaggagggaccgaaaagtgggggctctgtcgagaactggggaggttcatatggtcatctggattcaaatattagccctccgctgggattgtaactatgtagccatttcatcatatctatcatatcagcactatacttacatatgtcacgccttcagtgcgccatgacagttcttactgggccctgcgcgaaggtatcctac

SEQ ID NO: 715777 - DNA, 817 bp, Homo sapiens
  misc_feature (31)..(31): n is a, c, g, or t
  misc_feature (39)..(39): n is a, c, g, or t
  misc_feature (724)..(724): n is a, c, g, or t
ggcatgacgaggccgggggtgaacttggcancgaggctngctctttccctaagcagcctgaggtgatctgtgaaaatggttcgctattcacttgacccggagaaccccacgaaatcatgcaaatcaagaggttccaatcttcgtgttcactttaagaacactcgtgaaactgctcaggccatcaagggtatgcatatacgaaaagccacgaagtatctgaaagatgtcactttacagaaacagtgtgtaccattccgacgttacaatggtggagttggcaggtgtgcgcaggccaagcaatggggctggacacaaggtcggtggcccaaaaagagtgctgaatttttgctgcacatgcttaaaaacgcagagagtaatgctgaacttaagggtttagatgtagattctctggtcattgagcatatccaagtgaacaaagcacctaagatgcgccgccggacctacagagctcatggtcggattaacccatacatgagctctccctgccacattgagatgatccttacggaaaaggaacagattgttcctaaaccagaagaggaggttgcccagaagaaaaagatatcccagaagaaactgaagaaacaaaaacttatggcacgggagtaaattcagcattaaaataaatgtaattaaaaggaaaaacaacaaaaaaaaaaacaaaaaaacccggggtttttttgcgggggggggaaaaaggggntgaagggatggcaattggtttcggacccatttttttgtaaaagggggaaatgggggggcccaaaggggggggtaaatgaagccggtacgtagc

SEQ ID NO: 715778 - DNA, 350 bp, Homo sapiens
  misc_feature (14)..(14): n is a, c, g, or t
  misc_feature (35)..(35): n is a, c, g, or t
  misc_feature (290)..(291): n is a, c, g, or t
  misc_feature (293)..(293): n is a, c, g, or t
  misc_feature (335)..(335): n is a, c, g, or t
gctcgtggggggcncaagtccttctgatcgaggcncagcccgcacaacggatctgcaggcgcggagcaaaatgcacccgccgcgccgcgcggtcctgcagccccgccacggccccgcggcccgcacccccccggggcgacagtgagcctctcccgccaccaccgggggccgagcggagggctctcgggtgggagagcgggaccagatctcgacagctgttcatttccaggaagccaccgcagccagagcgaaaggggaccttctgccaccagcggggcatcagccagcgnngngcatggatttatgaagacactcatgcaagaagtgggcagganttggacaaacttttc

SEQ ID NO: 715779 - DNA, 439 bp, Homo sapiens
cctgactagcccgacagacggactagcccggacagtccgcgactagcgagacagtccccgactagcccgacagtcccggactagcccgacagtcgcgcgactagcccgagagtccccgactagcccgacagtccccgactagcccgacagtccgtgactagcccgacagctccgagtagcccgaaagggtttggaatgtccttatggacgtacttacttccctgatggggcatttcctggggctcgtggtctgagaccgtctggtcccccaggaccgtgcccacgtctcccaggtcagcagcagtcccgcaaacagcagcggagtcttgatcatgcctccaattctggagtctttgcacgcctcggtcagcggcaccctgtgcccgcgcgctcctcctggcgatgccgccctgtcgggctagtcgggggggtaccgagc

SEQ ID NO: 715780 - DNA, 1055 bp, Homo sapiens
  misc_feature (31)..(31): n is a, c, g, or t
  misc_feature (39)..(39): n is a, c, g, or t
ggcatgacgaggccgggggtgaacttggcancgaggctngctctttccctaagcagcctgaggtgatctgtgaaaatggttcgctattcacttgacccggagaaccccacgaaatcatgcaaatcaagaggttccaatcttcgtgttcactttaagaacactcgtgaaactgctcaggccatcaagggtatgcatatacgaaaagccacgaagtatctgaaagatgtcactttacagaaacagtgtgtaccattccgacgttacaatggtggagttggcaggtgtgcgcaggccaagcaatggggctggacacaaggtcggtggcccaaaaagagtgctgaatttttgctgcacatgcttaaaaacgcagagagtaatgctgaacttaagggtttagatgtagattctctggtcattgagcatatccaagtgaacaaagcacctaagatgcgccgccggacctacagagctcatggtcggattaacccatacatgagctctccctgccacattgagatgatccttacggaaaaggaacagattgttcctaaaccagaagaggaggttgcccagaagaaaaagatatcccagaagaaactgaagaaacaaaaacttatggcacgggagtaaattcagcattaaaataaatgtaattaaaaggaaaaaccaaaaaaaaaaaaaaaaaaaaaaaaaaaaaaaaaaaaaaaaaaaaaaaaaaaaaaaaaaaaaaaaaaaaaaaaaaaaaaaaaggggggggggggataaaaaatatccggggggggacaaattgaagcagacaacacggttttttgtttgttaaaaaagaagggcccaccataagaaggagtttatataaaaaaaagagagagagcgacgcggattaacaagtgggtgaggggggaagaacaatcttgtgggagtatagttgggagaaacaccctcttgggggggtgggaaaatctgcgaaacatcatggaaattataggtgcggggaaaaaaatgtgggtggtgtgtgtaacggttattggcgtggaaacatgcggggttttggaata

SEQ ID NO: 715781 - DNA, 1251 bp, Homo sapiens
  misc_feature (31)..(31): n is a, c, g, or t
  misc_feature (39)..(39): n is a, c, g, or t
ggcatgacgaggccgggggtgaacttggcancgaggctngctctttccctaagcagcctgaggtgatctgtgaaaatggttcgctattcacttgacccggagaaccccacgaaatcatgcaaatcaagaggttccaatcttcgtgttcactttaagaacactcgtgaaactgctcaggccatcaagggtatgcatatacgaaaagccacgaagtatctgaaagatgtcactttacagaaacagtgtgtaccattccgacgttacaatggtggagttggcaggtgtgcgcaggccaagcaatggggctggacacaaggtcggtggcccaaaaagagtgctgaatttttgctgcacatgcttaaaaacgcagagagtaatgctgaacttaagggtttagatgtagattctctggtcattgagcatatccaagtgaacaaagcacctaagatgcgccgccggacctacagagctcatggtcggattaacccatacatgagctctccctgccacattgagatgatccttacggaaaaggaacagattgttcctaaaccagaagaggaggttgcccagaagaaaaagatatcccagaagaaactgaagaaacaaaaacttatggcacgggagtaaattcagcattaaaataaatgtaattaaaaggaaaaaccaaaaaaaaaaaaaaaaaaaaaaaaccccgggggcccctttccgcgcgggggcgcgggaaaagggggcacggcaagggcgcaacaggggcgcaacaaggggttcccgggacccaagttttcttgtgtgtcacaaggggggagaaatctcgcgcggggaccccctatatataggggagagcgggaatataaatttgagaaaaacccggggttacccgggttttagggaccgcgcgcgacaaaaagaaacaaacacaccagaaccacaacagcaacagacaaccaacaaaaacagggagaccaaacacaaaggcaaacaaaaaaccgcaacacacaaaacacataaacaaattaaacaaaaaaacaaaataaaacaaacaaacaacaaaacaaaaaccatatataattaaatacaaccacactactaaaaaaataaacaactaaccaaataataaaaaaagcataaagaaaaaaagaagcaaataaaggaagggggaggggagagggagaggaggagagaggaaacgagggggagggagggggcgagaaaggagaagggagaggaggcagaaagggacagcggaga

SEQ ID NO: 715782 - DNA, 141 bp, Homo sapiens
catgtatcagtgtcatgtatacgtgtcatgtactcgtaaattaaacccataattctatttatttaataagaattaaataaacgcccaaatgcttatttacatttcacaaaacataaagtattttaaatcacaacttcaggg

SEQ ID NO: 715783 - DNA, 144 bp, Homo sapiens
tccgccctgcgcaccgcctcaatcacatgctccttgttctgcagcttggtgcggactggacatgataaccttggccaattgtgaaccctggtccacatgttgccctggggctttccataggcacctcgcatgcctgtatggagc

SEQ ID NO: 715784 - DNA, 1290 bp, Homo sapiens
  misc_feature (31)..(31): n is a, c, g, or t
  misc_feature (39)..(39): n is a, c, g, or t
ggcatgacgaggccgggggtgaacttggcancgaggctngctctttccctaagcagcctgaggtgatctgtgaaaatggttcgctattcacttgacccggagaaccccacgaaatcatgcaaatcaagaggttccaatcttcgtgttcactttaagaacactcgtgaaactgctcaggccatcaagggtatgcatatacgaaaagccacgaagtatctgaaagatgtcactttacagaaacagtgtgtaccattccgacgttacaatggtggagttggcaggtgtgcgcaggccaagcaatggggctggacacaaggtcggtggcccaaaaagagtgctgaatttttgctgcacatgcttaaaaacgcagagagtaatgctgaacttaagggtttagatgtagattctctggtcattgagcatatccaagtgaacaaagcacctaagatgcgccgccggacctacagagctcatggtcggattaacccatacatgagctctccctgccacattgagatgatccttacggaaaaggaacagattgttcctaaaccagaagaggaggttgcccagaagaaaaagatatcccagaagaaactgaagaaacaaaaacttatggcacgggagtaaattcagcattaaaataaatgtaattaaaaggaaaaaccaaaaaaaaaaaaaaaaaaaaaaaaaaaagggggggccccccaaagatttctccccggggggccccaatcttatcagcgcgcttccacccagttttttcttgttcacaagggggtcccctatatgaggggagctgcgtatattatataaggcctaagagcatggggggccgctgcgttttaaacagactgctgggagacagcgggggaacaaagcggcctacagctggggggagaatcctgtggggagaaaaggaggaagcacttttaaatatctgtgtgagggggggggggacacaatatatagtgtggggcacacaaaactttatacctctatactagaggagatattatataagggcactctctaaagggggagaaaaatatatttataaacacttttttacagacaccgtgtgtatataataaggcgtgggtgtataaacaccgaatagtacgctgtcgggaatatatgtgtgtgatgcgagggtgtgtatgagagaaaaaaggttttgtgggcgacttacacgggggagatactatgtaaatcttatgtgagaacacaattatttttttatatcaccacgagggcgagcattgagtggtagtaataaaaaaaagctga

SEQ ID NO: 715785 - DNA, 836 bp, Homo sapiens
  misc_feature (31)..(31): n is a, c, g, or t
  misc_feature (39)..(39): n is a, c, g, or t
ggcatgacgaggccgggggtgaacttggcancgaggctngctctttccctaagcagcctgaggtgatctgtgaaaatggttcgctattcacttgacccggagaaccccacgaaatcatgcaaatcaagaggttccaatcttcgtgttcactttaagaacactcgtgaaactgctcaggccatcaagggtatgcatatacgaaaagccacgaagtatctgaaagatgtcactttacagaaacagtgtgtaccattccgacgttacaatggtggagttggcaggtgtgcgcaggccaagcaatggggctggacacaaggtcggtggcccaaaaagagtgctgaatttttgctgcacatgcttaaaaacgcagagagtaatgctgaacttaagggtttagatgtagattctctggtcattgagcatatccaagtgaacaaagcacctaagatgcgccgccggacctacagagctcatggtcggattaacccatacatgagctctccctgccacattgagatgatccttacggaaaaggaacagattgttcctaaaccagaagaggaggttgcccagaagaaaaagatatcccagaagaaactgaagaaacaaaaacttatggcacgggagtaaattcagcattaaaataaatgtaattaaaaggaaaaatattaccaggaacacaacaaaaacagaaaaacaacaaaacacacaaggacaccccaaaccggcagggaacagaaaggccccaaaagacccaggggggccaggaaccataggccaatagagaagccttacagggccgagctaacctgcccccggccccgggagccaccttc

SEQ ID NO: 715786 - DNA, 345 bp, Homo sapiens
  misc_feature (69)..(69): n is a, c, g, or t
  misc_feature (101)..(101): n is a, c, g, or t
  misc_feature (106)..(106): n is a, c, g, or t
  misc_feature (158)..(158): n is a, c, g, or t
  misc_feature (173)..(173): n is a, c, g, or t
  misc_feature (189)..(189): n is a, c, g, or t
  misc_feature (193)..(193): n is a, c, g, or t
  misc_feature (203)..(203): n is a, c, g, or t
  misc_feature (247)..(247): n is a, c, g, or t
cttcacgttgaggattcaactggccaatcacaggacaggtgccctggcctttcttcctgaggtctctangggaggggcatgggtaagggtgtttcctcagnacccncctggggtggggattatgtctgcttgtcatgtctgggtctttagggtagganaggttgtggtatganaggcaggagtctccanaagntttcatgtgnccctttaatagcagcccttgcctctgggaaggccctttcatgcntggaggcacacagcttttaaggaagtaggttgaagtaggactccttcgtcctctcacgtggttttggctcccttaaataaactgtgtgggaaccttga

SEQ ID NO: 715787 - DNA, 234 bp, Homo sapiens
tactgggacacaggtgtgggccacatgcctggctaattaaaaaaaacattttttagagatagggtctcaccgtgtggttcaggctgttcttgaactctgggctcaagcgatccccccaccttggccttccaaagtgctgggattacaggtgtgagccaccatgtctggcccttttttttttttttttttttggggaagggagccttgcttttttcacccgaggtgggtgtgcag

SEQ ID NO: 715788 - DNA, 665 bp, Homo sapiens
gtacctgtctataaggagtcctgcttatcacaatggggctcccaaacttggctgtgcagtggaaactccggggaatttggaagaacatgacacccatcttccacccggaactctgatttaatggggctgcagtgagaccagagcatcaatttaaaaggctgcccagaaggtctcctgggcagcgtggtgatcttgtgccaccttcgtgactttatgcaagtgattcatggctatttacatacctaatgagggagtcccaggagatcaaccaggacactgcatggatctcaaaggaaacaaaacccaataaactcggagtggcagactggacaatgtgtgagacatgcactgtgtacgaaacagaactttcatggtttgcacccttgtttcttacacctggtgggtttatgacaaacgacaatggccaaagaatcttcaagaaggaggactggcagttaatatccgtggggcacgacagaggccccaaaaaagacctggtctgtcagtgcactggatactctactgtggttctagtaaggcacaggctctcccaggccaggcctcaattctcctttgggctcaaatagtccatgcttggttgtgccattgcctataagtacaacgacatttgagcaacccaaaaaaacacaacacacaaacacaac

SEQ ID NO: 715789 - DNA, 712 bp, Homo sapiens
  misc_feature (31)..(31): n is a, c, g, or t
  misc_feature (39)..(39): n is a, c, g, or t
ggcatgacgaggccgggggtgaacttggcancgaggctngctctttccctaagcagcctgaggtgatctgtgaaaatggttcgctattcacttgacccggagaaccccacgaaatcatgcaaatcaagaggttccaatcttcgtgttcactttaagaacactcgtgaaactgctcaggccatcaagggtatgcatatacgaaaagccacgaagtatctgaaagatgtcactttacagaaacagtgtgtaccattccgacgttacaatggtggagttggcaggtgtgcgcaggccaagcaatggggctggacacaaggtcggtggcccaaaaagagtgctgaatttttgctgcacatgcttaaaaacgcagagagtaatgctgaacttaagggtttagatgtagattctctggtcattgagcatatccaagtgaacaaagcacctaagatgcgccgccggacctacagagctcatggtcggattaacccatacatgagctctccctgccacattgagatgatccttacggaaaaggaacagattgttcctaaaccagaagaggaggttgcccagaagaaaaagatatcccagaagaaactgaagaaacaaaaacttatggcacgggagtaaattcagcattaaaataaatgtaattaaaaggaaaaactttaaggaaacaacacaaaaaccgggtttttgggggggaaagata

SEQ ID NO: 715790 - DNA, 380 bp, Homo sapiens
  misc_feature (328)..(328): n is a, c, g, or t
  misc_feature (378)..(378): n is a, c, g, or t
tcagtgggaaaagcagggagctcccttgttcaaaaattataaagaatgtcaaggacggcgtggtggctcatgcctgtaatcccagcagtttgggaagctgaggtgggtggatcacttgaggtcaggagttcaagaccagcctggccaacatggcaaaacccagtctctactggaaatacaaaaattagccgggcatggtggcacgagcctgttaatcccagcttactttggggaagctgaggcagggagaatcgctttgaacccgggaggcgggaggttgcagttgagccgagattcgcaccatttggagccaagatcatttccagcntggggttgacagagcgagtttccctttttcaaaaaaaagatttttttttnaa

SEQ ID NO: 715791 - DNA, 2019 bp, Homo sapiens
gagttaggctagtacgaggcgggtgtgaatcggccgagggcctgaggtgatctgtgaaaatggttcgctattcacttgacccggagaaccccacgaaatcatgcaaatcaagaggttccaatcttcgtgttcactttaagaacactcgtgaaactgctcaggccatcaagggtatgcatatacgaaaagccacgaagtatctgaaagatgtcactttacagaaacagtgtgtaccattccgacgttacaatggtggagttggcaggtgtgcgcaggccaagcaatggggctggacacaaggtcggtggcccaaaaagagtgctgaatttttgctgcacatgcttaaaaacgcagagagtaatgctgaacttaagggtttagatgtagattctctggtcattgagcatatccaagtgaacaaagcacctaagatgcgccgccggacctacagagctcatggtcggattaacccatacatgagctctccctgccacattgagatgatccttacggaaaaggaacagattgttcctaaaccagaagaggaggttgcccagaagaaaaagatatcccagaagaaactgaagaaacaaaaacttatggcacgggagtaaattcagcattaaaataaatgtaattaaaaggaaaaacaacacaaaaaaaaacaaaaaaaaaaaaaagaaaaaaaaaaaaaaaaaaaaaaaaaaataagagaggcagagacacgagagagaagcgagtcagatgacacacacagaacgcgcctctcttctctctctctcttatatataagagaagagagagtaatctatctctcctctgtatcttgatagacacctcgacccccctatgagatatatctgatttctcgctatatttatggcggccctctcatcaatcggccgtagagacacacctctatcttgtttctaacagcgaccgacctacaagacataaaatagatactatatatctctgtttgactacattagtgctcttttgtacaatcacccgcaccgattcacagtaagacacgcacacaacgcgtagagagtagacctactcttcgcgcagccgcccccgacgcgacgactctcagtatgccttccactgatatagtcgttccatcctcacattgccaattttgttaataaacagtgactctcttgtaaatataaattaacaacacatagagagacagtgacaccaataaagggcccccacgcgcatgacatcaaaacaatcacaagcagctctacacgtcgcggggcgcccacccaaagccggtagggtacagagaaaaaactctccaaaggcaaaacaccatgcgcggtacatcatccgggggggggagcaaattgagacttatcataaaacgcacagatctactaaatatcttttcccccccctaactacaaaaatttatttcccaaaaaataacaaaggaggaagatccagcacgcgcaagaacttcctcctcgtggtataagcgacagaaaagtaaccaaccccagtgtgtaaaagttgcccccacacagcaacgatagtgagtgtcaccccctttcgagttatttgaaaaatatataacatcacacctctgaccacaaacaacactgcttatcccgttacacaaaacgggaagcactacgcacccccacccttattagggcagctcttaaccaaaacacgggggaaacacgacaaccccaccgaaggagagagtagaaacacgacaacaaaacaccagtattattcacacacgacaacactgcagacggggggagggaagataaaacaatcaacggcaacgacagggtacgccaaaaaacgtcccgtagggagggcgacaaaaccacccatgcggatacgaagaccccacgcagaggacccacagcaacagagtagccacccccccaaccaaaaaactgtacttgaaaaagaagagaacgggcgcaggataatccaccaccaagtagaagcccccactcatcacccccctatataagagaaaaacaaaat

SEQ ID NO: 715792 - DNA, 175 bp, Homo sapiens
gcttctgggcaagatcagcaacattgtcattaaggaccgacgtggcatctgaggtgtacaaggctgtagctgcccgtcccaggaaggtcggcaggaggagtttggcgtcttgggcaaccttggcatcttgccctttggtcggccagccaaggaggtgttaccatctctgagactt

SEQ ID NO: 715793 - DNA, 359 bp, Homo sapiens
aaaataaaaaaagcccttttttgtgtaaacccctttgtcccaaaaaacttagtgtttttttttccctgtgcccaaccaatttaacttttttttccccccatggaggggccgtccaagtcccgtttttttaaaaagcccatgtttaaacccccattttccttttcttattttgggagccttttccccggattttttaaagttttgtttaaggcgcccaaaattttttttgtaaaaaccctttaatttttcttttttttaattttttttcccccccccttaatccattttttttttcaggccccaaggcttcccttagtttttttccaattttcccataaattttttttaattatagtcca

SEQ ID NO: 715794 - DNA, 696 bp, Homo sapiens
  misc_feature (96)..(97): n is a, c, g, or t
  misc_feature (133)..(133): n is a, c, g, or t
  misc_feature (155)..(155): n is a, c, g, or t
  misc_feature (162)..(162): n is a, c, g, or t
  misc_feature (168)..(168): n is a, c, g, or t
  misc_feature (171)..(171): n is a, c, g, or t
  misc_feature (213)..(213): n is a, c, g, or t
  misc_feature (256)..(256): n is a, c, g, or t
  misc_feature (319)..(319): n is a, c, g, or t
  misc_feature (332)..(332): n is a, c, g, or t
  misc_feature (341)..(341): n is a, c, g, or t
  misc_feature (353)..(353): n is a, c, g, or t
  misc_feature (360)..(360): n is a, c, g, or t
  misc_feature (370)..(370): n is a, c, g, or t
  misc_feature (401)..(401): n is a, c, g, or t
  misc_feature (409)..(409): n is a, c, g, or t
  misc_feature (414)..(414): n is a, c, g, or t
  misc_feature (537)..(537): n is a, c, g, or t
  misc_feature (573)..(573): n is a, c, g, or t
  misc_feature (578)..(578): n is a, c, g, or t
  misc_feature (592)..(592): n is a, c, g, or t
  misc_feature (596)..(596): n is a, c, g, or t
  misc_feature (608)..(608): n is a, c, g, or t
  misc_feature (614)..(614): n is a, c, g, or t
  misc_feature (621)..(621): n is a, c, g, or t
  misc_feature (631)..(631): n is a, c, g, or t
  misc_feature (634)..(634): n is a, c, g, or t
  misc_feature (645)..(646): n is a, c, g, or t
  misc_feature (649)..(649): n is a, c, g, or t
  misc_feature (651)..(651): n is a, c, g, or t
  misc_feature (670)..(670): n is a, c, g, or t
  misc_feature (689)..(689): n is a, c, g, or t
caagcaaaatcactgacccttaaggaaaggatgaaaaaaaaaaagcactgaaagtatgacctcctgctcagcatatatgtgcttgttgccccactnngcacatcttgttgtagatggagcatcttgacagaanatagatcaagacatagtaagtnggcagcnattttntcnaaagcactcaaaaaaaggcacatgaaagccttcaggtttggnaaaaaatccaggcacattggggtcaaatatacggttctgaaanaagatatcataggtgagaaaatccacaaaggtgagcatttccccggcaaaccatgagaatttncccagaaacatgnagaattgtntcagttgttcangtagctnttccaagttntgaggcttcagtttttcgtggtcagaactgnaacagagncttanaagttgtgtgcggaaatccattacatatgagtatctctataaatgtcactcgaaatattttcttcttcagtttcaccacacatgttgtgcttgcgagcaatgtagcgcaagatggcattgctntgggtgatattgttcttcccatccaggaggtagggnagatnaggaaatttcaggnatancttgaatttcanatccanccattgncttcgatcanagnaaggaacccannaananaccagtacccgagaaccanagacgactcgcacgacatngtgacgg

SEQ ID NO: 715795 - DNA, 1027 bp, Homo sapiens
  misc_feature (7)..(7): n is a, c, g, or t
  misc_feature (25)..(26): n is a, c, g, or t
aactagnctaggtcgaggcgggtgnnggcctgaggtgatctgtgaaaatggttcgctattcacttgacccggagaaccccacgaaatcatgcaaatcaagaggttccaatcttcgtgttcactttaagaacactcgtgaaactgctcaggccatcaagggtatgcatatacgaaaagccacgaagtatctgaaagatgtcactttacagaaacagtgtgtaccattccgacgttacaatggtggagttggcaggtgtgcgcaggccaagcaatggggctggacacaaggtcggtggcccaaaaagagtgctgaatttttgctgcacatgcttaaaaacgcagagagtaatgctgaacttaagggtttagatgtagattctctggtcattgagcatatccaagtgaacaaagcacctaagatgcgccgccggacctacagagctcatggtcggattaacccatacatgagctctccctgccacattgagatgatccttacggaaaaggaacagattgttcctaaaccagaagaggaggttgcccagaagaaaaagatatcccagaagaaactgaagaaacaaaaacttatggcacgggagtaaattcagcattaaaataaatgtaattaaaaggaaaaaccaaaaaaaaaaaaaaaaaaaaaaaaaaaaaaaaaaaaaaaaaaaaaaaaaaaaaaaaaaaaaaaaaaaaaaaaaaaaaaaaaggggggggggggataaaaaatatccggggggggacaaattgaagcagacaacacggttttttgtttgttaaaaaagaagggcccaccataagaaggagtttatataaaaaaaagagagagagcgacgcggattaacaagtgggtgaggggggaagaacaatcttgtgggagtatagttgggagaaacaccctcttgggggggtgggaaaatctgcgaaacatcatggaaattataggtgcggggaaaaaaatgtgggtggtgtgtgtaacggttattggcgtggaaacatgcggggttttggaata

SEQ ID NO: 715796 - DNA, 1256 bp, Homo sapiens
  misc_feature (31)..(31): n is a, c, g, or t
  misc_feature (39)..(39): n is a, c, g, or t
  misc_feature (652)..(654): n is a, c, g, or t
  misc_feature (657)..(657): n is a, c, g, or t
  misc_feature (659)..(661): n is a, c, g, or t
  misc_feature (670)..(670): n is a, c, g, or t
  misc_feature (676)..(676): n is a, c, g, or t
  misc_feature (682)..(682): n is a, c, g, or t
  misc_feature (686)..(686): n is a, c, g, or t
ggcatgacgaggccgggggtgaacttggcancgaggctngctctttccctaagcagcctgaggtgatctgtgaaaatggttcgctattcacttgacccggagaaccccacgaaatcatgcaaatcaagaggttccaatcttcgtgttcactttaagaacactcgtgaaactgctcaggccatcaagggtatgcatatacgaaaagccacgaagtatctgaaagatgtcactttacagaaacagtgtgtaccattccgacgttacaatggtggagttggcaggtgtgcgcaggccaagcaatggggctggacacaaggtcggtggcccaaaaagagtgctgaatttttgctgcacatgcttaaaaacgcagagagtaatgctgaacttaagggtttagatgtagattctctggtcattgagcatatccaagtgaacaaagcacctaagatgcgccgccggacctacagagctcatggtcggattaacccatacatgagctctccctgccacattgagatgatccttacggaaaaggaacagattgttcctaaaccagaagaggaggttgcccagaagaaaaagatatcccagaagaaactgaagaaacaaaaacttatggcacgggagtaaattcagcattaaaataaatgtnnnacncnnnacacacacncacacncctacncacnacaccaccacccacggggggcggggagcgcactaacagaagaataacccccaagagggaggcgacaccaacaatgatatccgacgtccacaccccaacgcgtcttcctggattcaaacaaagggtggggccccacaaataagagggcagagcagcaacacacactcaccaccgcaaagagccgagggggcacgagcgtcatgctaataacaaaccacgcggcgtcgcgaagcacgcggcagaacaaacctaggtgaaccaacacgacggacacaccctgttgagcagaaacacacaccacccaacacaccagggggcggggcagcacccacacacggcgggagaccacaagaaaccaccgccgaacagcaacgatactaacgacgacgcaccaaaggagaccacaccaacaacaaccatccaccgcgaccaccaacaggcgagcccaaacacacccagcggacccatcaatcacgacggcgccccaagacagccgcggtgcgccacaagccgaatcaagccagcatgcacaaacagcacatacaccccaacaagagccgcgccctcagaa

SEQ ID NO: 715797 - DNA, 1712 bp, Homo sapiens
  misc_feature (31)..(31): n is a, c, g, or t
  misc_feature (39)..(39): n is a, c, g, or t
  misc_feature (1403)..(1403): n is a, c, g, or t
  misc_feature (1409)..(1409): n is a, c, g, or t
  misc_feature (1412)..(1412): n is a, c, g, or t
  misc_feature (1417)..(1417): n is a, c, g, or t
  misc_feature (1419)..(1419): n is a, c, g, or t
  misc_feature (1442)..(1443): n is a, c, g, or t
  misc_feature (1457)..(1457): n is a, c, g, or t
  misc_feature (1461)..(1461): n is a, c, g, or t
  misc_feature (1470)..(1471): n is a, c, g, or t
  misc_feature (1473)..(1473): n is a, c, g, or t
  misc_feature (1712)..(1712): n is a, c, g, or t
ggcatgacgaggccgggggtgaacttggcancgaggctngctctttccctaagcagcctgaggtgatctgtgaaaatggttcgctattcacttgacccggagaaccccacgaaatcatgcaaatcaagaggttccaatcttcgtgttcactttaagaacactcgtgaaactgctcaggccatcaagggtatgcatatacgaaaagccacgaagtatctgaaagatgtcactttacagaaacagtgtgtaccattccgacgttacaatggtggagttggcaggtgtgcgcaggccaagcaatggggctggacacaaggtcggtggcccaaaaagagtgctgaatttttgctgcacatgcttaaaaacgcagagagtaatgctgaacttaagggtttagatgtagattctctggtcattgagcatatccaagtgaacaaagcacctaagatgcgccgccggacctacagagctcatggtcggattaacccatacatgagctctccctgccacattgagatgatccttacggaaaaggaacagattgttcctaaaccagaagaggaggttgcccagaagaaaaagatatcccagaagaaactgaagaaacaaaaacttatggcacgggagtaaattcagcattaaaatttaagggtttagatgtagattctctggtcattgagcatatccaagtgaacaaagcacctaagatgcgccgccggacctacagagctcatggtcggattaacccatacatgagctctccctgccacattgagatgatccttacggaaaaggaacagattgttcctaaaccagaagaggaggttgcccagaagaaaaagatatcccagaagaaactgaagaaacaaaaacttatggcacgggagtaaattcagcattaaaataaatgtaattaacaggaaaaaaaaacacacaaaacaaaaaacaaaaacaaaaaacacaacaaaaaaaaaaaaaaacaaacaccgcgcgcggctaatttggggggggggaaagaaggggaaacagaagggaggcgggggaaaaagagggtactgagaggccccaagatattgaaagaaaagagaggggaaaaacagcgggaggacaccaataaagaagaggagcaataaaagttgacaaggacacggggaaacacacgcaataaaaacagagcggcacaaccggaaagagaaaagagagagaaagagaaaagcacagaaagagaccgtgacagaggagaacgaagggaagacgaggaagacggaacaggaaaagtacaagacgaaagaaaaagaaagagacggaaaaaagacaaagaaaggaagaagaaaaaaaaaaaaaaaaaaaaaaaaaaaccggggggcaatataggggggggggggaaaaaaggtaaaaagggncgggtnatntttcngnacccttttttttaaggggggaanngggggcccaaaggngggnaaacaaaanntngtacccgttctctcttttatctttcgttcgaaaaacaggacaaccgcaaaaagaacatagctacaggggatcaatgtgtaacaacaacgcgctaggacaaaaattcatatagatacaaacttaacaacaatacgaatagtagaaatatacaacgtataaacgatcacatgtaatatcacagtaatagatagataatgaatattaaatctgagcgaggagaacgagggaaaatatccgtn

SEQ ID NO: 715798 - DNA, 768 bp, Homo sapiens
cgggtcctgcgcgctccggactgagtgtggctgtcctgtggcctggatcggcggtgtcccggcgtggcttgtggaagccggcactggagctgggatgctgcactggtgcgcggtgaccgtgtgatggctgcatgggacctggacggctcccgagtctgcccacctgactggtacctgatgatgtgtgctgtgctgccccatccgatgcatgatgcctgtccctgtgccactcctcctgtgtgatcttgactttgtgctctttgctgtgtctgctggtgcaccttgtgaactgcccttgtgtgtgttgttgcgttgtgctcctcctggtagtgcgccctttcccgggctgtcctggctttgtggtgttgtgttggttgtgctgtttgacttccgatgcccctgcctctcccatgtgaggatggagtggctccacctctgctccttctgtgcctcctcccctgtgtgtgcctgcgatgctgactcggtggcctgtgcttcctttgcttcccttgccttgcctggcgtgttccctgtcttggctatggaactgacatgtcttcgacttccccaggatgatgccaaagctgttgtcttggcccctagtgttggtggacaatcgagatcttggcttgttggaccgttcttgcccttgaccttggacatggggcccatggccttgggtgcttgcaatggcagcaccctacggcccggccctgtcacgggtgcttgacccagctttgcttggttggctctctttctgggcctggg

SEQ ID NO: 715799 - DNA, 382 bp, Homo sapiens
cgtgctgcgggctggattccctgctgtcgcgctgggactgcaagcacaggttcaggtgccgggtccccggagcctcgatctctggcccgagcagggtaacccgagagcacgttactggcgaaactgccccgaaccactggcacgtggctctattaccaagtttaagcccattaagcaatattaatatttatgcttctctgccttataaaagtactactggcttggtgaagatgtcttaaaaaacaaaggaaaagatttttaaacatcactctttattccgcctaaatcgtataatttttttctgcctttgctctgcaattttaagaggtcttttttccaggtagaatctggagctcttgtaaataaaggatacttcatggag

SEQ ID NO: 715800 - DNA, 685 bp, Homo sapiens
cgcccacgcgttccggaagtgcagttcttcttccacctaagggaccgccacgcagacgctggggggatctgccctgcccccaccagttcccaccatcctttccaaaacaacagtcaatgatctggttggtgaggtgagcttccaacaacggaagatatttaaatgaaaaaagaattgataataaaatcaggagtcaaaattcatcgtctgcaagcccctcttttagccttttatactccctgttggtcaaggttgtgccccactacagaacagggctaaattagccaccaccactgaaaactcagccgaatttttttataccactctgatgtcagcattttttccatctgttggggctttttcctcttttttccattctccccaaatattttatctggcttcaaaattaagaggattatttttcagatgtttttattcagtgtggccgattcctcatctgattcaggctgtccagtcaggcccctcccattttaggagctggagccttcatttatgaagagattctcatctatgaaatggatcctcattgtaaatcttttttcttccattttcacaaagctgtaaagaaataatccatctcaaccttaaccttttctctggagtcagggggtctttcctcgctcatcttacacagaactgagctggagctcactggtttggtccc

SEQ ID NO: 715801 - DNA, 256 bp, Homo sapiens
gtcattcagcaggcatccctttggcgtccatttaggcacattgctcagtggggcacatggccatggccaccacttgcctttcagtgtccatgcagggcacatggcacctttcagtcaactgggcagggcacccatccatatcacaaccaccccaatcaccatccaccagcaagctgttgcttgagtagacatcatgcccccaggcagcacaaggcacagtgcatgttgcaacagcacagggccaggggcaccatcc

SEQ ID NO: 715802 - DNA, 429 bp, Homo sapiens
  misc_feature (65)..(65): n is a, c, g, or t
ttatccagctttcttttctgttgttggggaagagaaaccttcccttctaccctataggtttagcnaaatgagggcctgtgagttaaactgacaaaagacagattagcaagagaaaagagagagtatgtggggtgggggggcaccggtagtgggtgcttggtggctcacacctgtaatcccaggactttgggaggctgaggtgggcagatcacgaggtcaggagatcgagaccatcctggccgacatggtgaaaccctgtctctattaaaatacaaaaaattagctggctgtggtggcgtgcgcctgttttcccagctactctggaggctgaggctggggagtcgcttgaacctgggaggtggaggttgcagtgagctgagatcatgccactgcactccagcctggcgacagagcaagaatcagtctcaa

SEQ ID NO: 715803 - DNA, 127 bp, Homo sapiens
tagaggatccctcagtgcgatatgcagattcccaaaattttgtaatacagatgacacttatgaagagctcatttaatcgtttataaggccatgagtgcggctgtgtgctttatgatcgacgctctgt

SEQ ID NO: 715804 - DNA, 222 bp, Homo sapiens
gcgatttgtgtgtttgcaaccgggtgtggggcaagggaggggcccggccacccaggtgggccagcgggatgcctgggcaggccggtgggttatggctgaccacttcttcccattcctcagtgcaagaattgggcactcccggtcatccgagtctgtcccgaaggtttaactgcgcgcggagagagagaggccttgtaggtatccaaaagggacggagctcca

SEQ ID NO: 715805 - DNA, 834 bp, Homo sapiens
  misc_feature (244)..(244): n is a, c, g, or t
accgaggccaacctcatcgtctacattgcgtccgtcccgctatgacaggacgcctatgcgccagacatcgtggcagctgcatgtcgacttacagctcggtatgggcatgctcgctaccagacaccactatgctcctactactgaaaggcacaggagcgcactgcgtcgggcagcactcatgctccgccacatactggatgagagctacgagacttatccatagagtgagttgatctcatgcttncagcagctacacggtatcttctgtatgacatggtccgatatcaccggaagaaggttgtgtacgcagcccagaacagagccttttacagactctaagcgagagatgcctggaactgggactaagatgacactccaactgcctagaataagacctatgctgtcagagaacacgtctgagagccatcctgaagctctgcacgacagtatccaagacgcgcaaactacactgtagatcctggaatctgtctaacgaatggcacagattgcctgtggactgtcaccgtgtgagagtatgactccaaccatctaggtccttatgagatgacaacaaatatcattggctagagagaacattccttccccagatgaagcgaagtcgccttcacagaacactctgagagatctaacagttgatatgcgccgtcagagtatcaggaacaggatttgactgcacatgttacatctgctacacagagtggaacttaagctccttcaggacaagttctttgccctaagccatgccgaaacatgagagggagcacgcagaattatatgggaaccttgttgaatcagactctactgtcagttagg

SEQ ID NO: 715806 - DNA, 331 bp, Homo sapiens
agccagctactcaggaggctgaggtgggtggatcacttggacccaggaggtcgaggctgcagtgagccaagatcacaccactgcacttcagcctgggcgacagagtgagaccctgtcaaaaagaaaatgaagggtattttgttgtgaggaatcagtttatgcatagtctgggatgtggccagtgacctctggatactgccctgtttggtgccttcctgaaacatgttacaaattctgttttataaaatgcctgatctctctgtctaaaactttagaatcagctgggcacggtggctcatgcctgtaatcccagcacttttgggaggccgag

SEQ ID NO: 715807 - DNA, 334 bp, Homo sapiens
ctagaggataccctctgcatcgctaatcctttcctccgcttacagtactaaccagtggtttgtacgctcactgtcactcactgtatacagaaatgtgtgccctatacttcctgtgacgatcattttgctgacagaatgctggatgtagaaaatatagcaccaagtactttctagaaaggtctgttaggaccagaagcagagacaccaattttcacaggacgtcttggtttcagcattacctaaagaccagggaattgggagccatcatatgtcacagtgtgcagaattcaagcatatttgagggcatcactaatgatactcaaagttcagcatt

SEQ ID NO: 715808 - DNA, 926 bp, Homo sapiens
gctcctgaagatgggagtggtgtaagatggctgctaccgagcgtatgttgcccgacatgtgaatgccattaccttgggcgcattcctgccactgctgacctcaggcctgctgcgatgtggaagccaacagatgacttgatgaatactttacttgtggtactaggctccaagttcaaacgacgaacaattcatgtcgagcgaatcatgttcctcgatggccatggcaccctgactgtccaaccgcagtgatgcgacgcctattatctatgcggtacacgccgtcgtcagatggagagtacatcagacctaagcccttgatggactttgataggggaaatatttagatgcttttctactatccgttgggatttcagctttgtgttgtcctggcatgaaattggttgtctctctatagtgacaaagctaacgaatttcacgatgtgaaactgtgaagttgtcgcagtctcagtggattcccactttagccatcttgccctggataaatacaccaagaaagaatggtggtttgggccacatgaacatcgcgactcttgtcagacttaataagcagattcccgagactaccggtgtgctgttagaaaggttctggtcttgccctaaagaggtctcttcataattgacccaatggagtcatcaagcattgagcgtcaacgatctcccagtgcgccgaagcggggacgaaacctccggtggggaaggggtccagttgttcaaacctggaagttgcgccggatgggaccgattctcttaaacacgccggccgtgttccaagtcttcaaggaacgaaccacggttttgcttcacggaaacacgggaacgtttcttaaaggtttgcaagccccctgctctatccacgcggtctgtgcacacggggcagacagggggggccacaacacatatacact

SEQ ID NO: 715809 - DNA, 279 bp, Homo sapiens
cactctagagatccatcccggtctgggtatacgttagaaatacctgaattgatcagatgatcaggattgagtgtacaggaagttgatgacagatcactttgtatgtgattgagagtggctgagtgaaacaatgaaaaagtgggggaaagagattttgttaaaaaaagcagcccaactcagggatataaatattaccctaggcgcttacaacaattagttacacatctactggcatttaacccccacatttggtttacctctcatattccaattaaggtt

SEQ ID NO: 715810 - DNA, 810 bp, Homo sapiens
cggggagtgtgccccccccgttgcacaccgtctggtggggcacagaaatgtgggcccccaccggggacaccccgttccttctccgtggggggacagagcgggctgcgctggtggccggccgagatcacccccgcttggcgtgccccccctcgtcagaccccgcgttttgttttgggcccccaccctgccctccggcggccttcttcctctctgtggtggtgcacctggcccaaccttttgtggtttcagcaggagtttcaacggaggaatgtttggtcccccaagtgccccgtgggggttccatcccggagaagacactggtcccaggactgtgctcggtttgacagtggtctctatccctttatactgctcttgagggggccctcatgctttgtcatagtcctgtgcagactatccccccggggaatccactctctacaccccgcgagcgttgccggcccagtttttccccgctttggcgccgtggcaccctccagcgccgcagacgcctacaacattgtcccgaatgtttctgggcgcccgcccagagcaactccccaaggacgcccaaccccagcccctgatatgtataacccacgaaaaagagatttcaccagaggaagcgcagcccacgaggagttgatgtagctcctaagagagcaccagggagtgggcggcacccccgacccccgatcgtgagactgggggcaacccccccccccccccccccccgccggatgggggggggggtaaaaaggaaaaaaaggctccccccaatccccctaaattccgggttttcattcaaaagga

SEQ ID NO: 715811 - DNA, 154 bp, Homo sapiens
  misc_feature (7)..(7): n is a, c, g, or t
  misc_feature (122)..(122): n is a, c, g, or t
  misc_feature (140)..(140): n is a, c, g, or t
tccatgncacatatgggaagtggggatcaaatgaggtcttttctgactgatacagaattgttttcccctacaggtttttgggggcatagttccaagcacactggcaattttgctcattcctnaatgcagaggtggccttnaagatgtggccttc

SEQ ID NO: 715812 - DNA, 799 bp, Homo sapiens
tcccaacagattaccccttcaaatcacctaaggttgcatttgacacacaagaatttatcatccaaatattgaacagtaatggcatgcatttgtcttgatattctacgatcaacaggtggtctccagcactacactatttcaatacagtactcttgtgcatctgttctctgtctcgtgtgatcccatgtccagactgatcctttggtaggtgcctgatgattgctcggatctacaaaacaggatagagaaaaggtacaaccatgaatacgctcgggaatggactcagaagtatgcgatgtaattacaatgaacttagtggatagcctctagcaaataacagataggggaactctgaaacgagaaagtccttttgatttccattggacctgctttctatgagcccacggcctcatcttccccgtgtgcacatgtttacctgatacagcagtgctgcgtgtggtacatacttggaacaacaaatagaaatactgtacttctgtaccaacgattgctcctagcagagaagtgtgtgtgtgacaacgccagttctacaggcataacctaggtggtgagactaagagctttgcttattgatcttaaattgtggttaccagcaacgtgtgaggggcggtggtgggaatggtgtgtgctcggaatgggaaaaaaaaaggtcaatcagataataggagataattttaacgtggaattcatttaatcccaaccggtttgaccaagcaaggtgaaacatgaagtgggctgggtccatattacaaagaaaaaggttaaggaaagtttgcac

SEQ ID NO: 715813 - DNA, 324 bp, Homo sapiens
gcggccgcctactactactaaattcgcggcccgtcgaccggcgcgctgctgtcgcccgaaacataggccgccacttccacgccctcgccggcatggtgcaaggcgttgcgagtcaggttattcaacagccgcttcatcgacacccgccgcaacgggaacggctggatcggttgcaaccgcgtgcgtacccgctcttcgctctggttatagggcgccaccacttcgcgcaccagctcgctcaggtcgacctcttccaccgactcgtcgcgaccgtcgcggataaaggcgaggaactggtcgaggatcgcgtccatgtcgtcgacg

SEQ ID NO: 715814 - DNA, 80 bp, Homo sapiens
gttattccctggcctgaagatttggattgctgagattgacattatctaattggaattcatcctgaacccgaggttgtgcc

SEQ ID NO: 715815 - DNA, 161 bp, Homo sapiens
aaatcctaattacggagaatcacgctcacgcttcaggaccgagcttccctgactcccagatgacctcctgctctcctaacacgcatcctcacagcactccgagtcctgtgattgtgtgtgtgataacctgtctaacatcttgaatcagggctgagactggg

SEQ ID NO: 715816 - DNA, 131 bp, Homo sapiens
cccctcccccaaagggggggggggggggggaaatatggttggcctgccccagggggccttcccctttaagggccttttttggggttgagggccctggggtttttaaaattaaaaggaaagcccgcccccta

SEQ ID NO: 715817 - DNA, 152 bp, Homo sapiens
atcccacctcaatctgcctgctatgatggattagattgagagagtgaggagaaggcttacgtttagtgagggagagatttggtatatgattgccgctggtggctagttttagtcatgtgctatagctgcatagccggatgtcagcaggggtg

SEQ ID NO: 715818 - DNA, 680 bp, Homo sapiens
  misc_feature (31)..(31): n is a, c, g, or t
  misc_feature (39)..(39): n is a, c, g, or t
  misc_feature (656)..(656): n is a, c, g, or t
  misc_feature (662)..(662): n is a, c, g, or t
  misc_feature (667)..(667): n is a, c, g, or t
ggcatgacgaggccgggggtgaacttggcancgaggctngctctttccctaagcagcctgaggtgatctgtgaaaatggttcgctattcacttgacccggagaaccccacgaaatcatgcaaatcaagaggttccaatcttcgtgttcactttaagaacactcgtgaaactgctcaggccatcaagggtatgcatatacgaaaagccacgaagtatctgaaagatgtcactttacagaaacagtgtgtaccattccgacgttacaatggtggagttggcaggtgtgcgcaggccaagcaatggggctggacacaaggtcggtggcccaaaaagagtgctgaatttttgctgcacatgcttaaaaacgcagagagtaatgctgaacttaagggtttagatgtagattctctggtcattgagcatatccaagtgaacaaagcacctaagatgcgccgccggacctacagagctcatggtcggattaacccatacatgagctctccctgccacattgagatgatccttacggaaaaggaacagattgttcctaaaccagaagaggaggttgcccagaagaaaaagatatcccagaagaaactgaagaaacaaaaacttatggcacgggagtaaattcagcattaaaataaatgctgatncggccngactnctttctctatctc

SEQ ID NO: 715819 - DNA, 259 bp, Homo sapiens
  misc_feature (2)..(2): n is a, c, g, or t
tnctttatttttccggcgtcaggaaagatgcaggctggcagtggtataacgagaaaataagtccaaaggaaaaagaaaataaacctgtacctgcagccccccgtcaggagccggatattatgcagaaactggccgcgctgcagacggcaacaaagcgggcgctgtacgaagccattctgtatcccggcgtggataattttgtgaaatatttccggctgcagaattactggactcagcaggccgggcttttcaccatgag

SEQ ID NO: 715820 - DNA, 326 bp, Homo sapiens
ccgacgtcgcgacgctcatccccggggacatagcgttgccgtcggtgcgtcatcttcggggaaagtgtctttcagcactgcagcgcgttttatgagtggcatgggttttgtgggcgtagagagttctgtatgtgagtgtgtgttcagctatgtggtgtccagtatgggcggcgggtctgaagcgttctcttcgtttctctcagagagaggtctttcacagagcaaaggtgtttcattttgatgaagtccggtttatcagtggtctcctgtggattgtgctgttggtgttgtgtgtgataactcttcacctagccctagatctcaat

SEQ ID NO: 715821 - DNA, 697 bp, Homo sapiens
  misc_feature (31)..(31): n is a, c, g, or t
  misc_feature (39)..(39): n is a, c, g, or t
  misc_feature (652)..(652): n is a, c, g, or t
ggcatgacgaggccgggggtgaacttggcancgaggctngctctttccctaagcagcctgaggtgatctgtgaaaatggttcgctattcacttgacccggagaaccccacgaaatcatgcaaatcaagaggttccaatcttcgtgttcactttaagaacactcgtgaaactgctcaggccatcaagggtatgcatatacgaaaagccacgaagtatctgaaagatgtcactttacagaaacagtgtgtaccattccgacgttacaatggtggagttggcaggtgtgcgcaggccaagcaatggggctggacacaaggtcggtggcccaaaaagagtgctgaatttttgctgcacatgcttaaaaacgcagagagtaatgctgaacttaagggtttagatgtagattctctggtcattgagcatatccaagtgaacaaagcacctaagatgcgccgccggacctacagagctcatggtcggattaacccatacatgagctctccctgccacattgagatgatccttacggaaaaggaacagattgttcctaaaccagaagaggaggttgcccagaagaaaaagatatcccagaagaaactgaagaaacaaaaacttatggcacgggagtaaattcagcattaaaataaatgcngagcggccgaatttcaacacaataaggacgagcacataatttgaa

SEQ ID NO: 715822 - DNA, 352 bp, Homo sapiens
actgcatatgggtatgtcttatacattccctagggcatggattatatacataacaaattaacctctaagcctgtagcatgggactatttacctactgttctcagcaaagttcagaaaacactcaaattatttgctgtttttttgtttttgtttttgtttttctttttttgaggtggagtcttgctctgtcgcccagggtggagtgcagtggcgcgatcttgcctcactgcaacctccctctctggggttcaagtgattctcctgcctcagctttccgggtagctgggactacatgtgtgcactacaatgcctggctaattttatcatatttttggtagagatggagtttcgc

SEQ ID NO: 715823 - DNA, 1457 bp, Homo sapiens
  misc_feature (31)..(31): n is a, c, g, or t
  misc_feature (39)..(39): n is a, c, g, or t
  misc_feature (1148)..(1148): n is a, c, g, or t
  misc_feature (1154)..(1154): n is a, c, g, or t
  misc_feature (1157)..(1157): n is a, c, g, or t
  misc_feature (1162)..(1162): n is a, c, g, or t
  misc_feature (1164)..(1164): n is a, c, g, or t
  misc_feature (1187)..(1188): n is a, c, g, or t
  misc_feature (1202)..(1202): n is a, c, g, or t
  misc_feature (1206)..(1206): n is a, c, g, or t
  misc_feature (1215)..(1216): n is a, c, g, or t
  misc_feature (1218)..(1218): n is a, c, g, or t
  misc_feature (1457)..(1457): n is a, c, g, or t
ggcatgacgaggccgggggtgaacttggcancgaggctngctctttccctaagcagcctgaggtgatctgtgaaaatggttcgctattcacttgacccggagaaccccacgaaatcatgcaaatcaagaggttccaatcttcgtgttcactttaagaacactcgtgaaactgctcaggccatcaagggtatgcatatacgaaaagccacgaagtatctgaaagatgtcactttacagaaacagtgtgtaccattccgacgttacaatggtggagttggcaggtgtgcgcaggccaagcaatggggctggacacaaggtcggtggcccaaaaagagtgctgaatttttgctgcacatgcttaaaaacgcagagagtaatgctgaacttaagggtttagatgtagattctctggtcattgagcatatccaagtgaacaaagcacctaagatgcgccgccggacctacagagctcatggtcggattaacccatacatgagctctccctgccacattgagatgatccttacggaaaaggaacagattgttcctaaaccagaagaggaggttgcccagaagaaaaagatatcccagaagaaactgaagaaacaaaaacttatggcacgggagtaaattcagcattaaaataaaataaatgtaattaacaggaaaaaaaaacacacaaaacaaaaaacaaaaacaaaaaacacaacaaaaaaaaaaaaaaacaaacaccgcgcgcggctaatttggggggggggaaagaaggggaaacagaagggaggcgggggaaaaagagggtactgagaggccccaagatattgaaagaaaagagaggggaaaaacagcgggaggacaccaataaagaagaggagcaataaaagttgacaaggacacggggaaacacacgcaataaaaacagagcggcacaaccggaaagagaaaagagagagaaagagaaaagcacagaaagagaccgtgacagaggagaacgaagggaagacgaggaagacggaacaggaaaagtacaagacgaaagaaaaagaaagagacggaaaaaagacaaagaaaggaagaagaaaaaaaaaaaaaaaaaaaaaaaaaaaccggggggcaatataggggggggggggaaaaaaggtaaaaagggncgggtnatntttcngnacccttttttttaaggggggaanngggggcccaaaggngggnaaacaaaanntngtacccgttctctcttttatctttcgttcgaaaaacaggacaaccgcaaaaagaacatagctacaggggatcaatgtgtaacaacaacgcgctaggacaaaaattcatatagatacaaacttaacaacaatacgaatagtagaaatatacaacgtataaacgatcacatgtaatatcacagtaatagatagataatgaatattaaatctgagcgaggagaacgagggaaaatatccgtn

SEQ ID NO: 715824 - DNA, 1287 bp, Homo sapiens
  misc_feature (31)..(31): n is a, c, g, or t
  misc_feature (39)..(39): n is a, c, g, or t
ggcatgacgaggccgggggtgaacttggcancgaggctngctctttccctaagcagcctgaggtgatctgtgaaaatggttcgctattcacttgacccggagaaccccacgaaatcatgcaaatcaagaggttccaatcttcgtgttcactttaagaacactcgtgaaactgctcaggccatcaagggtatgcatatacgaaaagccacgaagtatctgaaagatgtcactttacagaaacagtgtgtaccattccgacgttacaatggtggagttggcaggtgtgcgcaggccaagcaatggggctggacacaaggtcggtggcccaaaaagagtgctgaatttttgctgcacatgcttaaaaacgcagagagtaatgctgaacttaagggtttagatgtagattctctggtcattgagcatatccaagtgaacaaagcacctaagatgcgccgccggacctacagagctcatggtcggattaacccatacatgagctctccctgccacattgagatgatccttacggaaaaggaacagattgttcctaaaccagaagaggaggttgcccagaagaaaaagatatcccagaagaaactgaagaaacaaaaacttatggcacgggagtaaattcagcattaaaatccaaaaaaaaaaaaaaaaaaaaaaaaaaaaaaaaaaaaaaaaaaaaaaaaaaaaaaaaaaaaaaaaaaaaaaaaaaaaaaaaagaaggggggggcgcccccaaaaccccccgcggggggccccatcccccccccttttaaggggcccccaggggggccgtaaataacacaacacgacgagcggcggggggggcggttattaaaacaacaccgccgggcggaacaggaaaaaacgacgctcgcggcggggcgaacattgtgaggaagagacacccccacagccgggcggggggaacaaagagggggacacacacacctccgagagagagaatataccgcgcgccggggggaagacaaaaaaactgggcgggatacgggcggggtccaccccacgacgatacaaaatttgcgcggcggcgaagaaaatttggggccccaagacggtacttgtctctccgatcacactcttcttccgcggcgcccctcctcgaacatacaacacctcgggacgcctgacagacaatcatccgcagaccagcacagcagcgatggatcagacgagagcacagagcacactgtctgccgacgacaacaagcggagagacagacatcaatcagtcaatgacacacaactaaacaagac

SEQ ID NO: 715825 - DNA, 1085 bp, Homo sapiens
  misc_feature (31)..(31): n is a, c, g, or t
  misc_feature (39)..(39): n is a, c, g, or t
  misc_feature (776)..(776): n is a, c, g, or t
  misc_feature (782)..(782): n is a, c, g, or t
  misc_feature (785)..(785): n is a, c, g, or t
  misc_feature (790)..(790): n is a, c, g, or t
  misc_feature (792)..(792): n is a, c, g, or t
  misc_feature (815)..(816): n is a, c, g, or t
  misc_feature (830)..(830): n is a, c, g, or t
  misc_feature (834)..(834): n is a, c, g, or t
  misc_feature (843)..(844): n is a, c, g, or t
  misc_feature (846)..(846): n is a, c, g, or t
  misc_feature (1085)..(1085): n is a, c, g, or t
ggcatgacgaggccgggggtgaacttggcancgaggctngctctttccctaagcagcctgaggtgatctgtgaaaatggttcgctattcacttgacccggagaaccccacgaaatcatgcaaatcaagaggttccaatcttcgtgttcactttaagaacactcgtgaaactgctcaggccatcaagggtatgcatatacgaaaagccacgaagtatctgaaagatgtcactttacagaaacagtgtgtaccattccgacgttacaatggtggagttggcaggtgtgcgcaggccaagcaatggggctggacacaaggtcggtggcccaaaaagagtgctgaatttttgctgcacatgcttaaaaacgcagagagtaatgctgaacttaagggtttagatgtagattctctggtcattgagcatatccaagtgaacaaagcacctaagatgcgccgccggacctacagagctcatggtcggattaacccatacatgagctctccctgccacattgagatgatccttacggaaaaggaacagattgttcctaaaccagaagaggaggttgcccagaagaaaaagatatcccagaagaaactgaagaaacaaaaacttatggcacgggagtaaattcagcattaaaataaaaaaaaaaaaaaaaaaaaaaaaaaaaaagcaacacaaaaaaaaacaaaaaaaaaaaaaagaaaaaaaaaaaaaaaaaaaaaaaaccggggggcaatataggggggggggggaaaaaaggtaaaaagggncgggtnatntttcngnacccttttttttaaggggggaanngggggcccaaaggngggnaaacaaaanntngtacccgttctctcttttatctttcgttcgaaaaacaggacaaccgcaaaaagaacatagctacaggggatcaatgtgtaacaacaacgcgctaggacaaaaattcatatagatacaaacttaacaacaatacgaatagtagaaatatacaacgtataaacgatcacatgtaatatcacagtaatagatagataatgaatattaaatctgagcgaggagaacgagggaaaatatccgtn

SEQ ID NO: 715826 - DNA, 878 bp, Homo sapiens
  misc_feature (569)..(569): n is a, c, g, or t
  misc_feature (575)..(575): n is a, c, g, or t
  misc_feature (578)..(578): n is a, c, g, or t
  misc_feature (583)..(583): n is a, c, g, or t
  misc_feature (585)..(585): n is a, c, g, or t
  misc_feature (608)..(609): n is a, c, g, or t
  misc_feature (623)..(623): n is a, c, g, or t
  misc_feature (627)..(627): n is a, c, g, or t
  misc_feature (636)..(637): n is a, c, g, or t
  misc_feature (639)..(639): n is a, c, g, or t
  misc_feature (878)..(878): n is a, c, g, or t
actacactaattaaattcgcggccgcgtcgaccgaaaagccacgaagtatctgaaagatgtcactttacagaaacagtgtgtaccattccgacgttacaatggtggagttggcaggtgtgcgcaggccaagcaatggggctggacacaaggtcggtggcccaaaaagagtgctgaatttttgctgcacatgcttaaaaacgcagagagtaatgctgaacttaagggtttagatgtagattctctggtcattgagcatatccaagtgaacaaagcacctaagatgcgccgccggacctacagagctcatggtcggattaacccatacatgagctctccctgccacattgagatgatccttacggaaaaggaacagattgttcctaaaccagaagaggaggttgcccagaagaaaaagatatcccagaagaaactgaagaaacaaaaacttatggcacgggagtaaattcagcattaaaataaatgtaattaaaaggaaaaaaaaaaaaaaaaaaaaaaaaaaaaaccggggggcaatataggggggggggggaaaaaaggtaaaaagggncgggtnatntttcngnacccttttttttaaggggggaanngggggcccaaaggngggnaaacaaaanntngtacccgttctctcttttatctttcgttcgaaaaacaggacaaccgcaaaaagaacatagctacaggggatcaatgtgtaacaacaacgcgctaggacaaaaattcatatagatacaaacttaacaacaatacgaatagtagaaatatacaacgtataaacgatcacatgtaatatcacagtaatagatagataatgaatattaaatctgagcgaggagaacgagggaaaatatccgtn

SEQ ID NO: 715827 - DNA, 640 bp, Homo sapiens
  misc_feature (31)..(31): n is a, c, g, or t
  misc_feature (39)..(39): n is a, c, g, or t
ggcatgacgaggccgggggtgaacttggcancgaggctngctctttccctaagcagcctgaggtgatctgtgaaaatggttcgctattcacttgacccggagaaccccacgaaatcatgcaaatcaagaggttccaatcttcgtgttcactttaagaacactcgtgaaactgctcaggccatcaagggtatgcatatacgaaaagccacgaagtatctgaaagatgtcactttacagaaacagtgtgtaccattccgacgttacaatggtggagttggcaggtgtgcgcaggccaagcaatggggctggacacaaggtcggtggcccaaaaagagtgctgaatttttgctgcacatgcttaaaaacgcagagagtaatgctgaacttaagggtttagatgtagattctctggtcattgagcatatccaagtgaacaaagcacctaagatgcgccgccggacctacagagctcatggtcggattaacccatacatgagctctccctgccacattgagatgatccttacggaaaaggaacagattgttcctaaaccagaagaggaggttgcccagaagaaaaagatatcccagaagaactgaagaacaaacttatggcacgtagcatgcggcataatatttc

SEQ ID NO: 715828 - DNA, 568 bp, Homo sapiens
gggagagtgagattttttccaagccattcctgcttcagtatagggttgtggtagctgtcaaaagaaggctttgaaaccatcctctaaaataaataaaaaataaaagcagcttattttagtatctctattgaaatacaaattacaggccattgatcttttccacaattccttgcaattatttctgttgacgatttttttaaaataagacaatgcaatatattttaaaaagcaaataaataaacctcaaggataagaattgcaccaaatgggtttgtaaatggctgtgacacacatttagtaggagaaaagcatcataaaacctagctttgttgttatttactacaatccacaataaagtgtgtcagtcattaggttaacacaactctgaatcagtctaaaatctcaccatggagggactgtttaactctacaagtttagactgtcttattcttgtcaggtcaactagttttccaaaatatgcataaattttaaataatgtataatgataccagaaaacagaaatgcatccctgtttacctcccctcagccccttgccttcccttctttg

SEQ ID NO: 715829 - DNA, 113 bp, Homo sapiens
cccgagacgaaaacagctgggggctgctggagattgtaatgggtatggagacatatcatatgagattgttgggctactgctcgcagtgcgccgatcagggcgcggctttcgtc

SEQ ID NO: 715830 - DNA, 352 bp, Homo sapiens
cccccccccctaaccccgggggcccccttaattttaaaaaccggcttacaggtttcccccggggggaaaaggtattaaaaatggttgggaatttgaaaaacccgcccccgggattatggccaaaaattttgtttaaactaggggcccattttttttggcccgggggtttaaaaaaaaaaaaaaaaaaccctgttttcccggggggggaaatgggggggtgcccaaaaaaccaaacccgcaaattggctttccccctttgttgtttttttccccccccaaaattaagaaggtaggccttttgtaaaaggcccaattaaaaatttttgttgggttttttatttaaagcctggta

SEQ ID NO: 715831 - DNA, 713 bp, Homo sapiens
  misc_feature (31)..(31): n is a, c, g, or t
  misc_feature (39)..(39): n is a, c, g, or t
ggcatgacgaggccgggggtgaacttggcancgaggctngctctttccctaagcagcctgaggtgatctgtgaaaatggttcgctattcacttgacccggagaaccccacgaaatcatgcaaatcaagaggttccaatcttcgtgttcactttaagaacactcgtgaaactgctcaggccatcaagggtatgcatatacgaaaagccacgaagtatctgaaagatgtcactttacagaaacagtgtgtaccattccgacgttacaatggtggagttggcaggtgtgcgcaggccaagcaatggggctggacacaaggtcggtggcccaaaaagagtgctgaatttttgctgcacatgcttaaaaacgcagagagtaatgctgaacttaagggtttagatgtagattctctggtcattgagcatatccaagtgaacaaagcacctaagatgcgccgccggacctacagagctcatggtcggattaacccatacatgagctctccctgccacattgagatgatccttacggaaaaggaacagattgttcctaaaccagaagaggaggttgcccagaagaaaaagatatcccagaagaaactgaagaaacaaaaacttatggcacgggagtaaattcagcattaaaataaatgtcattaaccggctaaaagacctagaggaaggcattcaaacgctactcgagggggggcccggat

SEQ ID NO: 715832 - DNA, 442 bp, Homo sapiens
  misc_feature (15)..(15): n is a, c, g, or t
  misc_feature (37)..(37): n is a, c, g, or t
  misc_feature (97)..(97): n is a, c, g, or t
  misc_feature (156)..(156): n is a, c, g, or t
gggggcttaattcantgatttccccaattttcagggnacaccctaggccaaacctaggccaaaatccatttcactatcatattcatggggggaaatntaacttttttcccacaacactttttgggcctatccggaatgccccgaggttactgggantaccccgagggataccccacatgaaacatcctatcatttggagggtcattcatttttttaacagcaggaaaattaataattttcatgatttgagaagcctttggttcgaagggaaaagtcctaatagtagaagaaccctccataaacttggggggattatatggaggcccccccccctcccacacatttgaagaaccggtaaaaataaaatttagacaaaaaaggaaggaattgaaccccccaaagggggtttcaagccaaccccagggcctccatgattttttta

SEQ ID NO: 715833 - DNA, 749 bp, Homo sapiens
  misc_feature (438)..(438): n is a, c, g, or t
actgggtctacgggcccgtggtacacgcgcagctcaagatattttgtcttttggaggtagagaccgtgtttaagcatgatagcccagtgatgcgtaactcgcatctcttgatcgtcgtgatccggccgactcggattcgcaaatttctgggagttacaggcgtgatgcctcgggacccagagcgaacattttatctctctagaagtctgtgatccctaggtatttaaaacctgattgcttctatatacctccataattcactgtcgctaaattgaataagttatttataactctgtgacttgctagactctaaatatctctttgatcataggtatgagtgctcaggagaggtagctagcagatgtcctgtattaggtagcaactttctattatacgacttcacagtggttcctctgatatcttgccttatcatcgttnatacactgtagatatcattttactctatcttatctactatacgtacatttcttaaaataatggttcttagtcgctagttcacaattgtgtgtcatggacggtcgcccctatatctctttagatacctttgtgttctggtttagcctgtaacaatctcagtgtcctatttacaggtatgaagtagatcgaaattccaggttgctcccttttaagtcgtactgtgtgctaacacaagaggtaaatgtttttgcttagaccatagtgccttgggttaaccctctgccagctgtgggcgcccggattcggctcca

SEQ ID NO: 715834 - DNA, 564 bp, Homo sapiens
  misc_feature (31)..(31): n is a, c, g, or t
  misc_feature (39)..(39): n is a, c, g, or t
ggcatgacgaggccgggggtgaacttggcancgaggctngctctttccctaagcagcctgaggtgatctgtgaaaatggttcgctattcacttgacccggagaaccccacgaaatcatgcaaatcaagaggttccaatcttcgtgttcactttaagaacactcgtgaaactgctcaggccatcaagggtatgcatatacgaaaagccacgaagtatctgaaagatgtcactttacagaaacagtgtgtaccattccgacgttacaatggtggagttggcaggtgtgcgcaggccaagcaatggggctggacacaaggtcggtggcccaaaaagagtgctgaatttttgctgcacatgcttaaaaacgcagagagtaatgctgaacttaagggtttagatgtagattctctggtcattgagcatatccaagtgaacaaagcacctaagatgcgccgccggacctacagagctcatggtcggattaacccatacatgagctctccctgccacattgagatgatccttctggtttaggaacaatctgttccttttccgtaaggtcga

SEQ ID NO: 715835 - DNA, 627 bp, Homo sapiens
  misc_feature (31)..(31): n is a, c, g, or t
  misc_feature (39)..(39): n is a, c, g, or t
ggcatgacgaggccgggggtgaacttggcancgaggctngctctttccctaagcagcctgaggtgatctgtgaaaatggttcgctattcacttgacccggagaaccccacgaaatcatgcaaatcaagaggttccaatcttcgtgttcactttaagaacactcgtgaaactgctcaggccatcaagggtatgcatatacgaaaagccacgaagtatctgaaagatgtcactttacagaaacagtgtgtaccattccgacgttacaatggtggagttggcaggtgtgcgcaggccaagcaatggggctggacacaaggtcggtggcccaaaaagagtgctgaatttttgctgcacatgcttaaaaacgcagagagtaatgctgaacttaagggtttagatgtagattctctggtcattgagcatatccaagtgaacaaagcacctaagatgcgccgccggcctacagagctcatggtcggattaacccatacatgagctctccctgccacattgagatgatccttacggaaaaggaacagattgttcctaaaccagaagaggaggttgtttttgtttcttcagtttcttctgggatatctacttcttctgggcaacctcctcttccgg

SEQ ID NO: 715836 - DNA, 115 bp, Homo sapiens
ttttggggggggggcccccccccccctttttccccggggggtttttttcccccccctttttgggggcgggccaaaatttgggccccgttccaaatttaaggggggttttttttta

SEQ ID NO: 715837 - DNA, 423 bp, Homo sapiens
cagttacaacagtggaatgagatgacttccagaagttagaaattgacgtattatgccataactgttcaccagagttgataaatctctaggtttacaattgtaccccaaggtcatgggactggaccccatcccatgtgtcgtcatcagtttagcaatgattaagaacatcaccttctgaaaatttgtatagatcgataaataaagtattccttgtgcaagacctatttttaagtattgtaggtactatttcctttcttgaattcatattgcagatttacggtgtggattcattgttttatctcttcaaaccttaagagtataagattgctagggccaggtgtggtggatcacgcctgttatcccagcactttgggaggctgatgtatgcggatcacctgaggtcaggagtttgagaccagcctg

SEQ ID NO: 715838 - DNA, 193 bp, Homo sapiens
cttgtatcagccagcttcaggaactcctgcagcgtgtttgttccacagcctccacgaagagctcatagtccccacagtactggtccccgttgacaatctggggtggggtggccttggtggttgcctgccaaggctcgcatctcatcctcctctgctgtccagtcctccctgtgctgtccacctcctctgtgct

SEQ ID NO: 715839 - DNA, 240 bp, Homo sapiens
  misc_feature (21)..(21): n is a, c, g, or t
  misc_feature (45)..(45): n is a, c, g, or t
  misc_feature (108)..(108): n is a, c, g, or t
  misc_feature (165)..(165): n is a, c, g, or t
ttttttttgaaggtcggaaancatctttattgtggggagggagancatcaggaaaaatagctaatgcatgccgggcttaatacctaagtgatgggttgataggtgcancaaaccaccatggtacacgtttacctatgtaacaaacctgcacatcctgcacatgtnctctggaacttaaataaatttttttttaaaaaaagaaatgcagatggataggagaatgattggttctgcctgaaa

SEQ ID NO: 715840 - DNA, 124 bp, Homo sapiens
caaaatccatgcgaactgaagtaatggcacgagcctcaccccctaaatcttacatctcaattgcccatccataaagaagcactcatacttgatgcatccccgcagctacacacacacaacacag

SEQ ID NO: 715841 - DNA, 1402 bp, Homo sapiens
ggagagaactagtctcgagttttaattataatatataggggtttccagacttgcaaaacatctggaggagggccttaacctctgcttccgggacctccatctcagactttgatagaggctcaggctcgaagggaccacgtggtaatccgcagtggggccatagggcatgagcagaactgtaaattacaaactgggcaaaaaattcaaccaccttctcatagagaacactataaatggttgcagcagatcacatgtaatgacgcactccacacaaaccacaatcacgagcctatcgattcatcaatattacaaatgcctcttaagagtaaacggctgtggaatctcaaacagcgcctattaccacccctcaatgtgacagacagtgcaccgtgacagttatcacatttcacagtcccatacctgttaacaggggatccccgatttatgggtacaaacgtcgtgtgggattctacatcctgtggataccgtgaacaatccccattaggacgcttttaacaccaccacatttcctcgagacagacgttcacgaaagaaaccccattcaccaaaggacacataaatagcattagaatggatcaccctcaacatatctcacggatttatcgaccagtggggacaccatatcactacacatgcatgagaacattgaaagaaaaatctccatgagaacctctacctcgctcttactatatgaccatcccactccgacactacgaaccaattgtgaccagactataccaacactgtggagagtatagaaaccgaatacataacacttaaataaatatgggcacagagttccacaactacaaatagcagtctgcgaaccacactatggtacaacaaggaacacataccgccaccaacatggacacagaaacctagaagtttaaccacaagggataataacacaagagggaaaaagagcaaaacatatcacgacgcaaaacagggaagaagagttacacttcaaaaaacgcaatctttgcatatacgcatccaccagatcacactgacgcacccccagaagacaaagaaaacaaagcgacaaaatagattagtgacgcacacacttaagcgacaaataaacgcccatcacaatatggacaccccacaggcgaaacagttaaacccacagagaacacttacccgaagaaacactccaaccacccagcggcccacaacaaaaaaagggagaaaacagaagaaatgaaacagagacaatcaacccacgaacaagacggagaaaagacaacagaacaagcagacaactaccagaaccaacaacataatcagagaaaaaagtacgcacgcgtaaccacacacgaaccaaacgggatcaccactaactacaaccaggagaacagcaacaagcaccacg

SEQ ID NO: 715842 - DNA, 680 bp, Homo sapiens
  misc_feature (43)..(43): n is a, c, g, or t
agtcgagctcgtacccgtagaagagggtgcgggctgtggtaangttacatctccaattgctgtcttaacataggcaataatggagaagaggttctggaaatcgcttcaaacatcagaaaagtagcccgtgtaccagtccaaacctgggagggatgggacccagcaaaccttctaggagggtggttctctaatttaggaggatttaaaatgctggtggggacagtcattttcatcactggggtcctcctgtttctcccctgtggtatcccattaaaactcttgttgaaactacagttaacctcctgacaatccagatgatgctcctgctacagcggcacgatggataccaacccgtctctcaagaataccccaaaaattaagtttttctttttccaaggtgcccacgccacccctatgtcacgcctgaagtagttattgagaaagtcgtccctttccccttttctataaccaaatagacaggaatggaagattctcctcggggcctgaaagcttgcgggatgaataactcctcctcctcaggcccagtcccaaggtacaaacttgcacctgcagcaagatagcagaggcaggaagagaagcggttggaaaacacgttacccctgaagatcaagagggaggtcgccctggtactacataagcagtcaccgttacgccgggaa

SEQ ID NO: 715843 - DNA, 144 bp, Homo sapiens
ttgtcacctgggggaccgcaggttgcagtgcaggcaagattgcaccactgcgactcccagcctgggtgacagattgcgaccctgtctctaaaacaagaaaaaaaaaagaaacacaaaaactccaggtggtcgcacagattgaca

SEQ ID NO: 715844 - DNA, 177 bp, Homo sapiens
gttgtgttactgaggagtgcgtctggtggtgcataccgaggtctcagatgtgactgttgaagaccgtgagggaactacagtgaaatgcatccaggttagagacccattaatcttgatcgttctttttttctccatcctgctttcatttgactttctttatccactacactccgccaa

SEQ ID NO: 715845 - DNA, 371 bp, Homo sapiens
ggcgatctagaggatccctgatatgctggtctcagaacaataaataaataaaaaagagattacatacctaggaagatatgtaacaagaatatgaagagagcttaaaaacactagtggaaacaaaaaaaagacgtgggactatatagaggggcgtggtatgttctgaggaagatttaacatcatacccctgtcagtgctccttaatttaatctataatgtaaaggagtgactccccctaaaaaaaaccaagtaggacttggggcttagtgggcttatttgtggggaagagaaatgagttgtaaagctcatacagaagatatagtgtacgactaaaatacacccagaaatctcccgagaaagaaaagaaatag

SEQ ID NO: 715846 - DNA, 237 bp, Homo sapiens
gcgtcgactacggccgcgtcgacttcaaatattatccccttcccagtttctccttcacaagcctcctattcctactcttttcccttgcctctatgagggttctaccccacctgtctacccacccctgcctcaggaccatagcattaccctaccctgggtcatcaagcctccataggaacaaggggctaccctcccagagatgcccggtcgacgcggccgcgaatttagtagtagtag

SEQ ID NO: 715847 - DNA, 190 bp, Homo sapiens
  misc_feature (19)..(19): n is a, c, g, or t
  misc_feature (48)..(48): n is a, c, g, or t
  misc_feature (53)..(53): n is a, c, g, or t
  misc_feature (99)..(99): n is a, c, g, or t
cacattgcaggaggatatntggatagctttgaggatatcgttggaacnggatngtcttcatataaactctagacagaagcattccagaagcttcattgngatgttcaattgaagtcacagtgttgaaacagtccctttcatagagcatgtttgaaacatcctttttgtagtatctggaaagtgggtccat

SEQ ID NO: 715848 - DNA, 426 bp, Homo sapiens
cacagacccgagccgccgacgacccagcagccgccatggctatgctccgacgtgtgcctgtatatgctgctcatccaacgccctttggagcttacggaggccttctgaaagacttcactgctactgacttgtctgaatttgctgccacagctgccttggctgctgacaaagtgtgacctgaaacagatgaccgtgagattatggtcaatgacctgcaaagttcttcagatgctatatattaggccatgcatgaccgtttgcgtgtgggaatcccagatgagaccccagctctcacgattaataggatctgtggttctggttttcaggccattgtgaatggatgtcaggaacttcgtgttcatgatgctgacgttgttttatgtcgatgaaccgcatgcataagcccatgcttactgtgtcgtgtgg

SEQ ID NO: 715849 - DNA, 238 bp, Homo sapiens
tgactcgaagtgtgtaacctttgtgctggacgccagtgttattccatagcacgcccagaggcggagtctcgctctgtcgcccaggctggagtgcagtgtggcccgatctcggctcactgcaacccccacctcccgggctcaagagatccacccacctcagcttcccaagtagctgggactacacgcgcccgcaccacaaccggctaattttgtacttttagtagagaccaggtttcac

SEQ ID NO: 715850 - DNA, 421 bp, Homo sapiens
  misc_feature (14)..(14): n is a, c, g, or t
  misc_feature (73)..(73): n is a, c, g, or t
  misc_feature (418)..(419): n is a, c, g, or t
  misc_feature (421)..(421): n is a, c, g, or t
cctaattgcgattnatgacttgcctggaggccttagtatagacaaatcctgaaagttaaaaactcctaggganacctttttttggttttaccctccccggagctcctaccccggttcctcacagtaaagatcccaagcccagtgtggtggctcactcctgtaatccccagcactttgagaggccgaggcaggtggatcacttgaggtcaggagtttgagaccagctggaccaacatagtaaaaccccatcgctactaaaaatacaaaaattagctgggcatggtggaggacacctgtaatcccagctactcaggaggcagaagcaggagaatcgcttgaacccgggaggcagaggttgcactgagccgagatcacaccattgcactctaacctaggcgacagagaaagactgtgtatnngn

SEQ ID NO: 715851 - DNA, 375 bp, Homo sapiens
  misc_feature (47)..(47): n is a, c, g, or t
  misc_feature (55)..(55): n is a, c, g, or t
cgagtggatcacaaggtcaggagatcaaaatcatccctggttaaacnggtgaaanaccgtctccactaaaaaaaaaaaaaaaaacaactagctgggcatggtggcgggcacctgtagtcccagctactccagaggctgaggcaggacaatggcgtgaacccgggaggcagagcttgcagtgagtcaagatcgcgccactgcactccagcctgggcgatagagcaagactccatctaaaaaaaaaaaaaaaaattagccaggcatggtggtacgcacctgtaatctcagcttatcgggaggcttaagtgggaaaatcgcttgaacctgggaggtggaggttgcagtgagccgagatcacgccactgcactccagcc

SEQ ID NO: 715852 - DNA, 319 bp, Homo sapiens
agctcctatgagcataaacataacatgggatcagatccacatgaaactgaagtccaatatccatgcaaggcaccatgagggagccacaagcatatacacacagtactcgctgagaaatggtatacaatctcatggtgtggtgaaaacaccacatacagaaacttactataaacaggaacagagaaaacaaagtagtaaaaatctaaatagatcctgggtaaacacatggttcaacacaataccatcaactcaaagacctccctagcaatacacggtttccaattcatgaaccttctaaacagcatactcatctattcat

SEQ ID NO: 715853 - DNA, 827 bp, Homo sapiens
ggcaagaacctgggctgtaactgccacctgacaccgctgactggctaaatgctttgcagaaagtgatgaccttacaccacaaccagcttctccaggtcatatgtgccttacctccagagagtcttttttttttttttcctggaaatgggatgttccactcttgttggcccaggctgggagttgcaatagctatggatctcggctcactggaaacctccgcctccggggttcaaaaaattctcctggcctcaagcctcccaagtagctggggattacagggctctatggccaccatggcccagttaattttggataataatcaatgggttgtttttcagccagagacgggggtttcaccattgtgggccaggctatgtcacgaaatcttaacctcagggtgatccacccaccctttggcctcccaaagtggctggggatcacgggcttgagctaccacacctggtgttggcgagagtctaaataagggaaatttccctaattggtccattaattcttcctaaatccagaccggtggtttcagaaataatccttatctgtgagagtagaccatttttctgggcggtaactgtgtcagaaacctaggaggaaaatacgccaagactatgggcacacaaagattactctaacccttaaaagacttttaaatccctactagaggtgccccttttaacaaatacactccagtggtttaccttatttgaccctcctttagtgagtaaaagtgaattcctccgtgttcggtttttcaaaccagctaatttttggtccaccacaagtgctttttccactgtgggcaactttcaatt

SEQ ID NO: 715854 - DNA, 564 bp, Homo sapiens
  misc_feature (12)..(12): n is a, c, g, or t
  misc_feature (383)..(383): n is a, c, g, or t
taatgttctagnttggtttggttttgaaaagattaataattactccaaatgaaatgttttttctttggttactaatgtgaagggagggtagaaacttgaggctagatttctgataaaagaagaatctgtcgagagtatagttttttagttaataagaaggaaggagagagggggatgagtttgtacccttgagaagaacttttatgagccaatttctaaagtattaatttggtatggatactttgtatataaattagctgtgtttaatggacacacaaatgtgaataaaaatgtgagcacatgccgggaccacagacctttatccaaaatatgaaagcagcagttattggtcaatttaaggaattcattttgtaaaaaaaaanaaaatccttcagcctggatgagagaaaaaaaaaaaaccaaaaaaaccatcttgaagctcaacctgtaaaacttgaaattctcctggaacagggctgggtgtttttgttttgttttttctttcgaacttttgttccacaaacaggaagttttgtcttttatgctgaagctcagacaccagca

SEQ ID NO: 715855 - DNA, 370 bp, Homo sapiens
attagggctggctgggcctaaaggtttccccggctcacgttcacgttcacgttcatgtgcacgctcattgatctttgtcgatcccctagaagtggattttctggtgctcaatcagggcatgaactatgaatggaaggtttcctatacacaccctgtcactcgtatcaatttgtctttgtccacatattttctcgatgctcactagactggtggggctaaggcatgacggcttccttcacattcctgattcttacattccacaagataacctctagcatgaatcttccgatgttcagccaaggcggcactcttattgaaggtctctccacagtccttacgttcataacgtttccctccaacctgacttctc

SEQ ID NO: 715856 - DNA, 1324 bp, Homo sapiens
  misc_feature (39)..(39): n is a, c, g, or t
  misc_feature (1015)..(1015): n is a, c, g, or t
  misc_feature (1021)..(1021): n is a, c, g, or t
  misc_feature (1024)..(1024): n is a, c, g, or t
  misc_feature (1029)..(1029): n is a, c, g, or t
  misc_feature (1031)..(1031): n is a, c, g, or t
  misc_feature (1054)..(1055): n is a, c, g, or t
  misc_feature (1069)..(1069): n is a, c, g, or t
  misc_feature (1073)..(1073): n is a, c, g, or t
  misc_feature (1082)..(1083): n is a, c, g, or t
  misc_feature (1085)..(1085): n is a, c, g, or t
  misc_feature (1324)..(1324): n is a, c, g, or t
gaactgccatcagagccaatctctgttcacttagacccnctgaactgctcggcctcagggctttacgaaaagccacgaagtatctgaaagatgtcactttacagaaacagtgtgtaccattccgacgttacaatggtggagttggcaggtgtgcgcaggccaagcaatggggctggacacaaggtcggtggcccaaaaagagtgctgaatttttgctgcacatgcttaaaaacgcagagagtaatgctgaacttaagggtttagatgtagattctctggtcattgagcatatccaagtgaacaaagcacctaagatgcgccgccggacctacagagctcatggtcggattaacccatacatgagctctccctgccacattgagatgatccttacggaaaaggaacagattgttcctaaaccagaagaggaggttgcccagaagaaaaagatatcccagaagaaactgaagaaacaaaaacttatggcacgggagtaaattcagcattaaaataaaataaatgtaattaacaggaaaaaaaaacacacaaaacaaaaaacaaaaacaaaaaacacaacaaaaaaaaaaaaaaacaaacaccgcgcgcggctaatttggggggggggaaagaaggggaaacagaagggaggcgggggaaaaagagggtactgagaggccccaagatattgaaagaaaagagaggggaaaaacagcgggaggacaccaataaagaagaggagcaataaaagttgacaaggacacggggaaacacacgcaataaaaacagagcggcacaaccggaaagagaaaagagagagaaagagaaaagcacagaaagagaccgtgacagaggagaacgaagggaagacgaggaagacggaacaggaaaagtacaagacgaaagaaaaagaaagagacggaaaaaagacaaagaaaggaagaagaaaaaaaaaaaaaaaaaaaaaaaaaaaccggggggcaatataggggggggggggaaaaaaggtaaaaagggncgggtnatntttcngnacccttttttttaaggggggaanngggggcccaaaggngggnaaacaaaanntngtacccgttctctcttttatctttcgttcgaaaaacaggacaaccgcaaaaagaacatagctacaggggatcaatgtgtaacaacaacgcgctaggacaaaaattcatatagatacaaacttaacaacaatacgaatagtagaaatatacaacgtataaacgatcacatgtaatatcacagtaatagatagataatgaatattaaatctgagcgaggagaacgagggaaaatatccgtn

SEQ ID NO: 715857 - DNA, 206 bp, Homo sapiens
atggagctggaagtagagccggtagattggactaactgccaagaagagagaacttgtggtcaggcatgatggctcatgcctgtagtcccagcgctttgggaggccgaggcgggaggctcacctgaggtcaggagtttgaggaccagcctggaccaatatggtgaaaccccacttctactaaaaatacaaaatttagccagctgcgg

SEQ ID NO: 715858 - DNA, 627 bp, Homo sapiens
ctctggcggaacacaggtctcgtgtgacattgtacactgtagattacagcatgtccaccactactgagcatatgaactataaatgctgatgaattagcccgagacctattgatggattgggtaacgctgatgatgagatggtaaagggctcattcaagtatgcctgatgcttgcataaactgacagctgagcgttaacgatgtatcaccattgatatctccttgtggaaatatgagaccagcttgtactatgtgactatcattgacgtacgacgacacagtgactttatcaaagtcatgattacagtgacatctcaggctgactgtgctgtcctgattgatgctgttggcgttggtgaatatgaggctgatctattcaagaatgggcacgatccgcagcatgccccttaagattcacacgctgacatggaaacagctaatggtcggagtcataatgcattccactgagccaccctacagtcagattagatgtgaggtaattgataaggaagtcagtacttacattgcgaacattgtctacaaccccgatacagtagacattgagccaatacctggtagaatggtgacatcatgctgtgagcaagtgctcatgctttgttcacgggtg

SEQ ID NO: 715859 - DNA, 1014 bp, Homo sapiens
  misc_feature (31)..(31): n is a, c, g, or t
  misc_feature (39)..(39): n is a, c, g, or t
ggcatgacgaggccgggggtgaacttggcancgaggctngctctttccctaagcagcctgaggtgatctgtgaaaatggttcgctattcacttgacccggagaaccccacgaaatcatgcaaatcaagaggttccaatcttcgtgttcactttaagaacactcgtgaaactgctcaggccatcaagggtatgcatatacgaaaagccacgaagtatctgaaagatgtcactttacagaaacagtgtgtaccattccgacgttacaatggtggagttggcaggtgtgcgcaggccaagcaatggggctggacaggtgtgcgcaggccaagcaatggggctggacacaaggtcggtggcccaaaaagagtgctgaatttttgctgcacatgcttaaaaacgcagagagtaatgctgaacttaagggtttagatgtagattctctggtcattgagcatatccaagtgaacaaagcacctaagatgcgccgccggacctacagagctcatggtcggattaacccatacatgagctctccctgccacattgagatgatccttacggaaaaggaacagattgttcctaaaccagaagaggaggttgcccagaagaaaaagatatcccagaagaaactgaagaaacaaaaacttatggcacgggagtaaattcagcattaaaattaaatgtcattacacaggacaacaacaaaaaaaaaaaaaaccgcgcatacatgcgcggccgaccaaaggtataaaaaaggacatggctaatctgtgtccccgacacaagctttgaacaaggtgtaactcgcgggctcataagagagtggatactcaaaccggtactgtatatcgttgcacaactagacgaccagatgtcagtaacggatcagggatcactgataaaactcatacagacatacaccaactctaactacgcaagttaattacatgtaacagaaccgcgagacatcaacaagcataaactaacagccaatgctactcatcatgactgtaa

SEQ ID NO: 715860 - DNA, 1452 bp, Homo sapiens
  misc_feature (31)..(31): n is a, c, g, or t
  misc_feature (39)..(39): n is a, c, g, or t
  misc_feature (1143)..(1143): n is a, c, g, or t
  misc_feature (1149)..(1149): n is a, c, g, or t
  misc_feature (1152)..(1152): n is a, c, g, or t
  misc_feature (1157)..(1157): n is a, c, g, or t
  misc_feature (1159)..(1159): n is a, c, g, or t
  misc_feature (1182)..(1183): n is a, c, g, or t
  misc_feature (1197)..(1197): n is a, c, g, or t
  misc_feature (1201)..(1201): n is a, c, g, or t
  misc_feature (1210)..(1211): n is a, c, g, or t
  misc_feature (1213)..(1213): n is a, c, g, or t
  misc_feature (1452)..(1452): n is a, c, g, or t
ggcatgacgaggccgggggtgaacttggcancgaggctngctctttccctaagcagcctgaggtgatctgtgaaaatggttcgctattcacttgacccggagaaccccacgaaatcatgcaaatcaagaggttccaatcttcgtgttcactttaagaacactcgtgaaactgctcaggccatcaagggtatgcatatacgaaaagccacgaagtatctgaaagatgtcactttacagaaacagtgtgtaccattccgacgttacaatggtggagttggcaggtgtgcgcaggccaagcaatggggctggacacaaggtcggtggcccaaaaagagtgctgaatttttgctgcacatgcttaaaaacgcagagagtaatgctgaacttaagggtttagatgtagattctctggtcattgagcatatccaagtgaacaaagcacctaagatgcgccgccggacctacagagctcatggtcggattaacccatacatgagctctccctgccacattgagatgatccttacggaaaaggaacagattgttcctaaaccagaagaggaggttgcccagaagaaaaagatatcccagaagaaactgaagaaacaaaaacttatggcacgggagtaaattcagcattaaaataaatgtaattaacaggaaaaaaaaacacacaaaacaaaaaacaaaaacaaaaaacacaacaaaaaaaaaaaaaaacaaacaccgcgcgcggctaatttggggggggggaaagaaggggaaacagaagggaggcgggggaaaaagagggtactgagaggccccaagatattgaaagaaaagagaggggaaaaacagcgggaggacaccaataaagaagaggagcaataaaagttgacaaggacacggggaaacacacgcaataaaaacagagcggcacaaccggaaagagaaaagagagagaaagagaaaagcacagaaagagaccgtgacagaggagaacgaagggaagacgaggaagacggaacaggaaaagtacaagacgaaagaaaaagaaagagacggaaaaaagacaaagaaaggaagaagaaaaaaaaaaaaaaaaaaaaaaaaaaaccggggggcaatataggggggggggggaaaaaaggtaaaaagggncgggtnatntttcngnacccttttttttaaggggggaanngggggcccaaaggngggnaaacaaaanntngtacccgttctctcttttatctttcgttcgaaaaacaggacaaccgcaaaaagaacatagctacaggggatcaatgtgtaacaacaacgcgctaggacaaaaattcatatagatacaaacttaacaacaatacgaatagtagaaatatacaacgtataaacgatcacatgtaatatcacagtaatagatagataatgaatattaaatctgagcgaggagaacgagggaaaatatccgtn

SEQ ID NO: 715861 - DNA, 169 bp, Homo sapiens
agaggatcccgggtgcagcacatatgctccaacccctgacactgaatggactttgaaatatgcccacaggtatcctttatccacggacaatctctgagtgcttattattcactttactagtgtagaagctctttaatcattgtctctgcatttgctttaatctagaaac

SEQ ID NO: 715862 - DNA, 1672 bp, Homo sapiens
  misc_feature (1363)..(1363): n is a, c, g, or t
  misc_feature (1369)..(1369): n is a, c, g, or t
  misc_feature (1372)..(1372): n is a, c, g, or t
  misc_feature (1377)..(1377): n is a, c, g, or t
  misc_feature (1379)..(1379): n is a, c, g, or t
  misc_feature (1402)..(1403): n is a, c, g, or t
  misc_feature (1417)..(1417): n is a, c, g, or t
  misc_feature (1421)..(1421): n is a, c, g, or t
  misc_feature (1430)..(1431): n is a, c, g, or t
  misc_feature (1433)..(1433): n is a, c, g, or t
  misc_feature (1672)..(1672): n is a, c, g, or t
ggcaggcggagggttgactggattggtgaggcccgctggtggctacttctgtgtgcaagcagggctgtagtgactggaagggataggagggaaagcaatgcccttggagggggaacagtgtggctgggatgatggcatttcttagtgagaccttggattgataatgagaacaactactctctgagcaggatgtgcgaactcagtctgagtattgtagtactgaagtgagttgacgtgtaagtacgtatggacaagaatgagccctgtactgtatcgcctgaggtgatctgtgaaaatggttcgctattcacttgacccggagaaccccacgaaatcatgcaaatcaagaggttccaatcttcgtgttcactttaagaacactcgtgaaactgctcaggccatcaagggtatgcatatacgaaaagccacgaagtatctgaaagatgtcactttacagaaacagtgtgtaccattccgacgttacaatggtggagttggcaggtgtgcgcaggccaagcaatggggctggacacaaggtcggtggcccaaaaagagtgctgaatttttgctgcacatgcttaaaaacgcagagagtaatgctgaacttaagggtttagatgtagattctctggtcattgagcatatccaagtgaacaaagcacctaagatgcgccgccggacctacagagctcatggtcggattaacccatacatgagctctccctgccacattgagatgatccttacggaaaaggaacagattgttcctaaaccagaagaggaggttgcccagaagaaaaagatatcccagaagaaactgaagaaacaaaaacttatggcacgggagtaaattcagcattaaaataaatgtaattaacaggaaaaaaaaacacacaaaacaaaaaacaaaaacaaaaaacacaacaaaaaaaaaaaaaaacaaacaccgcgcgcggctaatttggggggggggaaagaaggggaaacagaagggaggcgggggaaaaagagggtactgagaggccccaagatattgaaagaaaagagaggggaaaaacagcgggaggacaccaataaagaagaggagcaataaaagttgacaaggacacggggaaacacacgcaataaaaacagagcggcacaaccggaaagagaaaagagagagaaagagaaaagcacagaaagagaccgtgacagaggagaacgaagggaagacgaggaagacggaacaggaaaagtacaagacgaaagaaaaagaaagagacggaaaaaagacaaagaaaggaagaagaaaaaaaaaaaaaaaaaaaaaaaaaaaccggggggcaatataggggggggggggaaaaaaggtaaaaagggncgggtnatntttcngnacccttttttttaaggggggaanngggggcccaaaggngggnaaacaaaanntngtacccgttctctcttttatctttcgttcgaaaaacaggacaaccgcaaaaagaacatagctacaggggatcaatgtgtaacaacaacgcgctaggacaaaaattcatatagatacaaacttaacaacaatacgaatagtagaaatatacaacgtataaacgatcacatgtaatatcacagtaatagatagataatgaatattaaatctgagcgaggagaacgagggaaaatatccgtn

SEQ ID NO: 715863 - DNA, 346 bp, Homo sapiens
gacagcagaatttcgtgagacttgtaagacctgtttgtgttttgttcttctctctggcaaaaatcttggtgttgggaggagattcttactaagtgcctggacaatcgtaccttggaagatggtcacatgcttagtattgcagaggctcagtggcagaagagactgcagctttgtctcagttgagactttgggcttcagacatttgagcaaatgctggaatgaggtgagaccttgagcgtctgatacaagacgaatgccaagactcactgactgcatgtcgaggctcgacttcgcagcgctaatttttagtgtgttcatgacaaaaggcggattaattggcttatgg

SEQ ID NO: 715864 - DNA, 1449 bp, Homo sapiens
  misc_feature (52)..(52): n is a, c, g, or t
  misc_feature (1140)..(1140): n is a, c, g, or t
  misc_feature (1146)..(1146): n is a, c, g, or t
  misc_feature (1149)..(1149): n is a, c, g, or t
  misc_feature (1154)..(1154): n is a, c, g, or t
  misc_feature (1156)..(1156): n is a, c, g, or t
  misc_feature (1179)..(1180): n is a, c, g, or t
  misc_feature (1194)..(1194): n is a, c, g, or t
  misc_feature (1198)..(1198): n is a, c, g, or t
  misc_feature (1207)..(1208): n is a, c, g, or t
  misc_feature (1210)..(1210): n is a, c, g, or t
  misc_feature (1449)..(1449): n is a, c, g, or t
gcggccgcgactactactactagtctactactactaaattcgcggccgtcangcctgaggtgatctgtgaaaatggttcgctattcacttgacccggagaaccccacgaaatcatgcaaatcaagaggttccaatcttcgtgttcactttaagaacactcgtgaaactgctcaggccatcaagggtatgcatatacgaaaagccacgaagtatctgaaagatgtcactttacagaaacagtgtgtaccattccgacgttacaatggtggagttggcaggtgtgcgcaggccaagcaatggggctggacacaaggtcggtggcccaaaaagagtgctgaatttttgctgcacatgcttaaaaacgcagagagtaatgctgaacttaagggtttagatgtagattctctggtcattgagcatatccaagtgaacaaagcacctaagatgcgccgccggacctacagagctcatggtcggattaacccatacatgagctctccctgccacattgagatgatccttacggaaaaggaacagattgttcctaaaccagaagaggaggttgcccagaagaaaaagatatcccagaagaaactgaagaaacaaaaacttatggcacgggagtaaattcagcattaaaataaatgtaattaacaggaaaaaaaaacacacaaaacaaaaaacaaaaacaaaaaacacaacaaaaaaaaaaaaaaacaaacaccgcgcgcggctaatttggggggggggaaagaaggggaaacagaagggaggcgggggaaaaagagggtactgagaggccccaagatattgaaagaaaagagaggggaaaaacagcgggaggacaccaataaagaagaggagcaataaaagttgacaaggacacggggaaacacacgcaataaaaacagagcggcacaaccggaaagagaaaagagagagaaagagaaaagcacagaaagagaccgtgacagaggagaacgaagggaagacgaggaagacggaacaggaaaagtacaagacgaaagaaaaagaaagagacggaaaaaagacaaagaaaggaagaagaaaaaaaaaaaaaaaaaaaaaaaaaaaccggggggcaatataggggggggggggaaaaaaggtaaaaagggncgggtnatntttcngnacccttttttttaaggggggaanngggggcccaaaggngggnaaacaaaanntngtacccgttctctcttttatctttcgttcgaaaaacaggacaaccgcaaaaagaacatagctacaggggatcaatgtgtaacaacaacgcgctaggacaaaaattcatatagatacaaacttaacaacaatacgaatagtagaaatatacaacgtataaacgatcacatgtaatatcacagtaatagatagataatgaatattaaatctgagcgaggagaacgagggaaaatatccgtn

SEQ ID NO: 715865 - DNA, 86 bp, Homo sapiens
  misc_feature (58)..(58): n is a, c, g, or t
ggcaggaaaagagaaaccagcagccaggtcaggacaggtttggacaatcctctctgtnccagctcagccactgcccgcaccaggaa

SEQ ID NO: 715866 - DNA, 737 bp, Homo sapiens
gtgccaaagtgttttctggagttgctaattatttgtaccaggagtttgctccgtgccacccctccctagtgtacactgggttagggccctgctggggaaagcgggccgcgtatttaccacccgcggccttaccccccgagtcggccccaggaggttgaactcctgtttccgttcgcgaagccttgactctcttacggaagtccccggtcattctgactagatgcgcccccttccggtcattatttcgtttgcatgagtgtattgcttcttcacggtttggctttttattgagcccgcgagtagaattcccgggctgccttgagcttcttccctgcatgctccctccccgtgacgtttccctccccttcacctgaggatctgccgtctcactggttgctttctcccgttgtcctcttggacttgagggcacttgtgaaaagctttgctgtgatttaaaaatgccacgccattgtttaatctagcacgtgttgaaagctgggaattttttggcgccatccactgtagccacgtgacccacggcttgggagcccgaaaccagtgtgaccctggggagttttattttaacaccactgttgcccaagagttggctttgtttatttggttttggcgcgggagaggagtggtatcttgatgctttctgtggaccatgtaacccttaacacctcatgtattttcaatgccacctacataaataaacataagcatattgaatacca

SEQ ID NO: 715867 - DNA, 713 bp, Homo sapiens
gggatgtcgcaagtgtcgtgcacttacgaaactcgctaaggatatgctcctggtgcgtcacccggggagatacacatgactgttggcatttgatatatagactcacggtaattacatcgaaacatcgttcctattttcaaggctcgtcgtgcccccatttagtaggtgcggcataccccatttatgagcgaacgcgtggcttgcatctcacgttggccagaaatagcggggaaagtatctgtttgcgttggggcactcacaacctcaggtaccagaacgtacgacatgctcgagcaactttggccaaaattttcctcgttcgccactctaaacgtgagatgctaggtagtcacggaggtcacacgcatgagattctaagaattctgcgttctgcgacacacaaaggagcaaattccgtctcctcatatttgctaaaggctccaggaagatgtaaccggactctgcgcctttcgaacaacacttgcttcactatcgcacgggcatgaatttgcactcgcaccagtctttctcatgcgctttctgccttgtgaatatacttggcgctgcagctcgcaaagtgcattcccatggcatggtcaaggctgcatgtaattatgccactcgtcgaggcttcaacggtcttgtacaggggcctagggtgacaaaggttgatcccccaactggattcatttcttactttaatcgggactgcc

SEQ ID NO: 715868 - DNA, 705 bp, Homo sapiens
  misc_feature (31)..(31): n is a, c, g, or t
  misc_feature (39)..(39): n is a, c, g, or t
ggcatgacgaggccgggggtgaacttggcancgaggctngctctttccctaagcagcctgaggtgatctgtgaaaatggttcgctattcacttgacccggagaaccccacgaaatcatgcaaatcaagaggttccaatcttcgtgttcactttaagaacactcgtgaaactgctcaggccatcaagggtatgcatatacgaaaagccacgaagtatctgaaagatgtcactttacagaaacagtgtgtaccattccgacgttacaatggtggagttggcaggtgtgcgcaggccaagcaatggggctggacacaaggtcggtggcccaaaaagagtgctgaatttttgctgcacatgcttaaaaacgcagagagtaatgctgaacttaagggtttagatgtagattctctggtcattgagcatatccaagtgaacaaagcacctaagatgcgccgccggagcagtcggagcagttccacttaggcgcctaagtggaactgctccggcctaagtggaactgctccgcaggggaggaaaaaagaaccaaaacttccaaggccctgctttatttcttaaaagtactttaaaaaggaaatttgtgagtatatcatatttacattttatatttttgtacatattgtaagggtcagccatttttaatgatctcggatgaaccaaaccagccttcggagcaagtccacttag

SEQ ID NO: 715869 - DNA, 338 bp, Homo sapiens
  misc_feature (119)..(119): n is a, c, g, or t
  misc_feature (131)..(131): n is a, c, g, or t
gggggcccagagtaattctacaacgttccacagcgggagtaatttctctgggggggccccctcgtcgttgttgcacaagtgcgttgcacgctccctcacacggagtctgtcctccctanggttaagtagtntgtttcgccccagaagcgacccacgcccttggagagttttaccaccccacagtcttatcaaccctacatggtgacaacatatgagctatagaacccccccatcacttgccctcatcacatgaaccccccccccaattattctctttcactcttctctttacaccccaatacaaagtcaacccccgttctctctcccaacaaatagaa

SEQ ID NO: 715870 - DNA, 554 bp, Homo sapiens
  misc_feature (31)..(31): n is a, c, g, or t
  misc_feature (39)..(39): n is a, c, g, or t
ggcatgacgaggccgggggtgaacttggcancgaggctngctctttccctaagcagcctgaggtgatctgtgaaaatggttcgctattcacttgacccggagaaccccacgaaatcatgcaaatcaagaggttccaatcttcgtgttcactttaagaacactcgtgaaactgctcaggccatcaagggtatgcatatacgaaaagccacgaagtatctgaaagatgtcactttacagaaacagtgtgtaccattccgacgttacaatggtggagttggcaggtgtgcgcaggccaagcaatggggctggacacaaggtcggtggcccaaaaagagtgctgaatttttgctgcacatgcttactcgaccattcctctgcgccccaagcctctccgtgctccgcctcggctgtatgtctgtactcttcgcccacaccctctccgcgcctcctcctccccacctcctcccctcccctccgccccggccacccgcctcccgccatcgcaccgccgcacgctccaccgcctctcgcgtcccctcccgccctccctccct

SEQ ID NO: 715871 - DNA, 290 bp, Homo sapiens
ttacgaggacccggaacaggacaagcaaggtaccataagatggctttgaactgaaagcaggtcagagtggactacagggggagtgtgtcggacgtgcctgactttgacttatcttccgaactctatgagcatgccatggctctgagcgaggatgaagatatgcgcgcctgctacgaacgctccaacgagtaccagctgatagactgtgcccaggacttcctggacaagactgacgcgctcaagcaggctgactatgtgccgagcgatcagcacctgcgtcgctaccgtgg

SEQ ID NO: 715872 - DNA, 582 bp, Homo sapiens
  misc_feature (31)..(31): n is a, c, g, or t
  misc_feature (39)..(39): n is a, c, g, or t
ggcatgacgaggccgggggtgaacttggcancgaggctngctctttccctaagcagcctgaggtgatctgtgaaaatggttcgctattcacttgacccggagaaccccacgaaatcatgcaaatcaagaggttccaatcttcgtgttcactttaagaacactcgtgaaactgctcaggccatcaagggtatgcatatacgaaaagccacgaagtatctgaaagatgtcactttacagaaacagtgtgtaccattccgacgttacaatggtggagttggcaggtgtgcgcaggccaataaaaacgcagagagtaatgctgaacttaagggtttagatgtagattctctggtcattgagcatatccaagtgaacaaagcacctaagatgcgccgccggacctacagagctcatggtcggattaacccatacatgagctctccctgccacattgagatgatccttacggaaaaggaacagattgttcctaaaccagaagaggaggttgcccagaagaaaaagatatcccagaagaaactgaagaaacaaaaacttatggcacgggagtaaattcagcattaaaat

SEQ ID NO: 715873 - DNA, 1406 bp, Homo sapiens
  misc_feature (1097)..(1097): n is a, c, g, or t
  misc_feature (1103)..(1103): n is a, c, g, or t
  misc_feature (1106)..(1106): n is a, c, g, or t
  misc_feature (1111)..(1111): n is a, c, g, or t
  misc_feature (1113)..(1113): n is a, c, g, or t
  misc_feature (1136)..(1137): n is a, c, g, or t
  misc_feature (1151)..(1151): n is a, c, g, or t
  misc_feature (1155)..(1155): n is a, c, g, or t
  misc_feature (1164)..(1165): n is a, c, g, or t
  misc_feature (1167)..(1167): n is a, c, g, or t
  misc_feature (1406)..(1406): n is a, c, g, or t
ttatcgcagtgacggggcgggggtttaggtgcgactatgactgggccgtgcgtcgtacacccagaaaatcatgcaaatcaagaggttccaatcttcgtgttcactttaagaacactcgtgaaactgctcaggccatcaagggtatgcatatacgaaaagccacgaagtatctgaaagatgtcactttacagaaacagtgtgtaccattccgacgttacaatggtggagttggcaggtgtgcgcaggccaagcaatggggctggacacaaggtcggtggcccaaaaagagtgctgaatttttgctgcacatgcttaaaaacgcagagagtaatgctgaacttaagggtttagatgtagattctctggtcattgagcatatccaagtgaacaaagcacctaagatgcgccgccggacctacagagctcatggtcggattaacccatacatgagctctccctgccacattgagatgatccttacggaaaaggaacagattgttcctaaaccagaagaggaggttgcccagaagaaaaagatatcccagaagaaactgaagaaacaaaaacttatggcacgggagtaaattcagcattaaaataaatgtaattaacaggaaaaaaaaacacacaaaacaaaaaacaaaaacaaaaaacacaacaaaaaaaaaaaaaaacaaacaccgcgcgcggctaatttggggggggggaaagaaggggaaacagaagggaggcgggggaaaaagagggtactgagaggccccaagatattgaaagaaaagagaggggaaaaacagcgggaggacaccaataaagaagaggagcaataaaagttgacaaggacacggggaaacacacgcaataaaaacagagcggcacaaccggaaagagaaaagagagagaaagagaaaagcacagaaagagaccgtgacagaggagaacgaagggaagacgaggaagacggaacaggaaaagtacaagacgaaagaaaaagaaagagacggaaaaaagacaaagaaaggaagaagaaaaaaaaaaaaaaaaaaaaaaaaaaaccggggggcaatataggggggggggggaaaaaaggtaaaaagggncgggtnatntttcngnacccttttttttaaggggggaanngggggcccaaaggngggnaaacaaaanntngtacccgttctctcttttatctttcgttcgaaaaacaggacaaccgcaaaaagaacatagctacaggggatcaatgtgtaacaacaacgcgctaggacaaaaattcatatagatacaaacttaacaacaatacgaatagtagaaatatacaacgtataaacgatcacatgtaatatcacagtaatagatagataatgaatattaaatctgagcgaggagaacgagggaaaatatccgtn

SEQ ID NO: 715874 - DNA, 209 bp, Homo sapiens
  misc_feature (37)..(37): n is a, c, g, or t
cccccccccctttttttttttcctccttatggccggnggggggggccccccccccgtcttttttttctgggcccggggggggattttttttttccccgggggcccccttcccccctgtgcccctttttgtggccccttttggcccctttttttcctccgccccggggggtggggggcgggttttttcgggtttttttccccccccgggt

SEQ ID NO: 715875 - DNA, 1572 bp, Homo sapiens
aattcaagcttctaacgatgtacggggacatgagctctccctgccacattgagatgatccttacggaaaaggaacagattgttcctaaaccagaagaggaggttgcccagaagaaaaagatatcccagaagaaactgaagaaacaaaaacttatggcacgggagtaaattcagcattaaaataaatgtaattaaaaggaaaaacaacacaaaaaaaaacaaaaaaaaaaaaaagaaaaaaaaaaaaaaaaaaaaaaaaaaataagagaggcagagacacgagagagaagcgagtcagatgacacacacagaacgcgcctctcttctctctctctcttatatataagagaagagagagtaatctatctctcctctgtatcttgatagacacctcgacccccctatgagatatatctgatttctcgctatatttatggcggccctctcatcaatcggccgtagagacacacctctatcttgtttctaacagcgaccgacctacaagacataaaatagatactatatatctctgtttgactacattagtgctcttttgtacaatcacccgcaccgattcacagtaagacacgcacacaacgcgtagagagtagacctactcttcgcgcagccgcccccgacgcgacgactctcagtatgccttccactgatatagtcgttccatcctcacattgccaattttgttaataaacagtgactctcttgtaaatataaattaacaacacatagagagacagtgacaccaataaagggcccccacgcgcatgacatcaaaacaatcacaagcagctctacacgtcgcggggcgcccacccaaagccggtagggtacagagaaaaaactctccaaaggcaaaacaccatgcgcggtacatcatccgggggggggagcaaattgagacttatcataaaacgcacagatctactaaatatcttttcccccccctaactacaaaaatttatttcccaaaaaataacaaaggaggaagatccagcacgcgcaagaacttcctcctcgtggtataagcgacagaaaagtaaccaaccccagtgtgtaaaagttgcccccacacagcaacgatagtgagtgtcaccccctttcgagttatttgaaaaatatataacatcacacctctgaccacaaacaacactgcttatcccgttacacaaaacgggaagcactacgcacccccacccttattagggcagctcttaaccaaaacacgggggaaacacgacaaccccaccgaaggagagagtagaaacacgacaacaaaacaccagtattattcacacacgacaacactgcagacggggggagggaagataaaacaatcaacggcaacgacagggtacgccaaaaaacgtcccgtagggagggcgacaaaaccacccatgcggatacgaagaccccacgcagaggacccacagcaacagagtagccacccccccaaccaaaaaactgtacttgaaaaagaagagaacgggcgcaggataatccaccaccaagtagaagcccccactcatcacccccctatataagagaaaaacaaaat

SEQ ID NO: 715876 - DNA, 223 bp, Homo sapiens
  misc_feature (22)..(22): n is a, c, g, or t
  misc_feature (35)..(35): n is a, c, g, or t
  misc_feature (69)..(69): n is a, c, g, or t
  misc_feature (153)..(155): n is a, c, g, or t
acatcgtgctttggctttagcntttctaacttagnttcggaattacgttagctactttggttccatagnacaagttttcaacttggggtctaaagttcctacagtgtgcacaatgtcccagtgaagatcctttggtttcaaagattcatggtnnnaaagtgtattttactgctatcaactaaaatgtatttataataaaatgcctttttaataataaacacag

SEQ ID NO: 715877 - DNA, 534 bp, Homo sapiens
  misc_feature (12)..(12): n is a, c, g, or t
tgcccacggggnacgcggtcagtccgtgggcatgtccagcctggagcagctggagcagaagcttggcagcaacagaggaagggcccctggagccggactgtcgtggatgcctttaatcaagcctggcattggggttgcgcacgaatgtcccaactacttccgctaggtcccatcgatggcctcaggcatgccgcaaggtcgttctgctggtacacgctctatttggtatctactgcaccactgcaccgagtctgggcccttgaaggctgagcattaggaagaggttttgtactgagattcgtctagcatcctatgacattaattttgtcgtagcttccttgcctatgactccctgattcacatttatcacgtggtgaaaagggtggggggagtgagttcccaactttgaggccgcttgcctggttagatatacaaggcatggcacgttggaccctgggctggtcaggcctaggtctttgacgtgaaaccccaagaaaacaaagaagaagcaatcaagaaataacgggggaggcc

SEQ ID NO: 715878 - DNA, 513 bp, Homo sapiens
gctcaggcagagtcctggatataggaacacagtaattctatgaagtagaacttcagttggcttaatcaaactaatgatagtctaacaactgaggcaagatcctcatctgagaggtgcttagaaactgggatccccagtagacccattaaccaatactggaacgtggtatctagctaccgtgatgtcttactttgagttactttatgcttcagaatacagttgttggccctgtgcattgaattacagccgcatattggtggtgtgcgatatgtgaacgctttttccaaactagagtcgtctcagcaagaacttaaggttctttaccttctagattattttgcgcattaccttcggcagttacaactccgaactagagtattaccatataacagtcgtagatccttatgtgtgtggtattagcccagacatctgtaatgtttttgcactgggtgacagacaaaatctgttttcaaactcatatccagcaccaaaatactatttctggctgaactg

SEQ ID NO: 715879 - DNA, 149 bp, Homo sapiens
atctagagcatccccgtcgagcgccacggtatgttggcacccacctgtgtagtctcagctactttgaggctgaagcaggaggctcacacctaggaggtcaaggctgcagtgagctatgatctcaccactgcactccagcctgggtgaca

SEQ ID NO: 715880 - DNA, 256 bp, Homo sapiens
atatacaatacccgagatatggaaacacctaaaaatgctggtgttaatgacaatgtggtgtgtgtacacactgaatattattcagctatgaaaacgaaggagatcctgtcatgtgtgacacgtggatgaacccaaagtcattatgttaagtgaaaggacccaggcacagaaagacagatactgcatgtcactcatatgtggatctaaaactgtcacaactcacagaaacagaataggacagtggttgccagggggt

SEQ ID NO: 715881 - DNA, 356 bp, Homo sapiens
gaggggagttgcgtattcatgaaggtgatgatgtttatccaatgtaccacctagagtgcccttggtgctctgcgtgatctttagtggaaccctgttgtggagaatgatacacaggacaaacttaccctgatgttgttaaatatatgttagatgaccagttgctttgatttctttgctcaataaacattggattacagctggtttgctgtgtggcatgcctacatggaggggacacactgagccaatgatttcatcatctgggtccctttggtttatatcagtttccaacatgacttgtttgtggggcttgtgggaggggcacatacatcggccccaggattctaacatctcctggt

SEQ ID NO: 715882 - DNA, 738 bp, Homo sapiens
  misc_feature (1)..(1): n is a, c, g, or t
  misc_feature (125)..(125): n is a, c, g, or t
  misc_feature (169)..(169): n is a, c, g, or t
  misc_feature (257)..(257): n is a, c, g, or t
  misc_feature (260)..(260): n is a, c, g, or t
  misc_feature (262)..(262): n is a, c, g, or t
  misc_feature (264)..(264): n is a, c, g, or t
  misc_feature (275)..(278): n is a, c, g, or t
  misc_feature (281)..(281): n is a, c, g, or t
  misc_feature (283)..(283): n is a, c, g, or t
  misc_feature (285)..(285): n is a, c, g, or t
  misc_feature (294)..(294): n is a, c, g, or t
  misc_feature (301)..(301): n is a, c, g, or t
  misc_feature (305)..(306): n is a, c, g, or t
  misc_feature (308)..(308): n is a, c, g, or t
  misc_feature (310)..(310): n is a, c, g, or t
  misc_feature (313)..(313): n is a, c, g, or t
  misc_feature (316)..(316): n is a, c, g, or t
  misc_feature (319)..(320): n is a, c, g, or t
  misc_feature (337)..(337): n is a, c, g, or t
  misc_feature (342)..(342): n is a, c, g, or t
  misc_feature (344)..(344): n is a, c, g, or t
  misc_feature (353)..(353): n is a, c, g, or t
  misc_feature (359)..(360): n is a, c, g, or t
  misc_feature (370)..(370): n is a, c, g, or t
  misc_feature (455)..(455): n is a, c, g, or t
  misc_feature (466)..(466): n is a, c, g, or t
  misc_feature (487)..(487): n is a, c, g, or t
  misc_feature (644)..(644): n is a, c, g, or t
  misc_feature (662)..(662): n is a, c, g, or t
  misc_feature (665)..(665): n is a, c, g, or t
  misc_feature (670)..(670): n is a, c, g, or t
  misc_feature (731)..(731): n is a, c, g, or t
ngtggctggccaccctccccactctggccatggtcctgcacagaggtttgtcctcaagggtgacccttcttggccgcccacagctagacctccggcggcgaggcacgcagtccatgctgctggcncaagtcacttggccagctcctcagccaccgctttgcgcatcttntccttggggtaggcgcctttctgccattcagacttgagttccagccactcatagaatgggacgtccactatcaggaagcctgcagccnctntntntcgccgggccnnnnctntncntcccttctnttccttncttnngntnttntanttnnggtactcccaccgcaanaacgntngcctcttantccctnntggtggtgtntggttcccagttggctgggcaaggtgtggtgccacaaagtcccttacgggcggaaactcgccgtcactgtccagcagcactctcngcatcgctgcngcctgccttactgcgtggccncctcggggctgcgcttgtcggcgctccccagcagccccttcagcgtctcctgcagctccttttgcaggggggtcaccttcctgtcaagggctgagggcccaggggccacagccgaggcaggcagaaggggacccgagtactcggggtactccagcanggcagtggcgttgatgtngancaccntctggaaggtgttctgatccttctgagacttgcccctagaaattggatgtgaattcagggnggaggac

SEQ ID NO: 715883 - DNA, 1459 bp, Homo sapiens
  misc_feature (1192)..(1192): n is a, c, g, or t
  misc_feature (1295)..(1295): n is a, c, g, or t
ggcttctctgcaaccagacgcacggttgctcgtggcagctcgcgtcggtccactggaatcctcggtcgtacacgggcgccggacgaggcgagcgatcagatcctcgttacaggaagtcatggcagggattggtacttgagtgtgagataactaatctcgtacttctgagcaagcttcactattgagtcgcccacttcaggaccccacgttctcccgactgtcgtgatcgcggtgtaaatcatgccatttgatgctcaagtagcgtccagtactgtgagcacgcgttaggtcgtgactcggtgaaggcaataagatcatgtcgtttccacgtgtgctgttgggtacctaggtacctatgcttcgtcggagcgcccggggctcgagtcgttccagagggtcgaccggccacagggacgatcgcacggaaacatagtaacccagtggtaggactgtgcgggcgtagacgcaccctcactgggctgctatgcaggcggttgagcctagatcgctgatcagacgaagtaacgcgagtttagtcgggccagcgaagacacgggcatctcgtgaggtgggtctgagacgtaataagagttaagaactggaccgtcgggaagacgttcttttgcgccccgggatgtgtgatgtctcaaacgtgaagatggcatggtccgtcgttggccttgtccttctgccatgttgttttctggaggggggaatgcataccgcggtggtagactcaaaaatccgattggggacataagtcccagggaatctacctcggtagcccagcacggtgaagccgaggcccctccactcagagtttggatttggccccaaaggtagggcagccacccgaggtgagtccaactacggttaaccgcccgtttccgcataagaggcgttgcgacaccatggtaaacaagccaaaaacggagggtgcgttaaaagagggggccgtacacagggaccaggcagtgaaaagcgacagcaggaagggtacagggtggaattggccaaacgaaatctgcgaagagtaacgtatacttgtagggcgagagtatctgcaccttcgttttggagcgttatcacacaggtttaaattcttgttgacgaattctcatactcggggagcgccacgttggagccatgttttgtcgtgccaacatataaagggggtcgcacccttaagggncacatggagagctgtgagattaagaggttgggacaaacacatcgcccctgattttgggataggttcatcgcatatttttgccccccaccttgggatttgtccnccccaatggttccggagcatgccactgtgttatacacaacaattagtgtgaggggacaagatagctgggtgactctggtgaacacgagacgcagaagcatcctctctgttcatagacgggtgacctttctagacgacactctgctctcgcgggaatcaataacc

SEQ ID NO: 715884 - DNA, 226 bp, Homo sapiens
gtctagcctcgtcatactgtcccagtgtgcactcacctagcctcatcatagtgtcccagtgtgtgcacacctagcctcatcagagtgtcccagtgtgcgctcacctagcctcatcatagtgtcccagtgtacgctcacccagcctcatcatagtgtcccagtgtgcactcaccaggcctaatcataatgccccagtgtgcactcgcctagcctcatcatagtgtcc

SEQ ID NO: 715885 - DNA, 842 bp, Homo sapiens
tggagaatatcggggtcacagcgtgaatgaaaggctttctttaaaaagtaagaattttcttctcaccaaaagtctggactgaacgcagataccatcttaagctcactctatgacaagatttggaagtaaaggcaaataagcagtactgtcttacttaagattgtttctagggacaacataacgtatctgtgaactgatcgcttaaatttgggttattttatcaactcattatatttcctatatatatttggtgatagttccatattgcctatgtcaaagaaaaccgagtgttccatcccagagcaagaaatcatggccccttcgacttgattctggtttctatgtctttacttctcatctaataaagctagacagaatcctctttcatattcaagttgtactgttagatgaacttaagttatttcaggcgtagaacaaaaattattcatatgttaatactgatctttttgccatccaagcagtcggagtttagtacttaagagttctgtagccctttaaaccagactccctggattaatcgcgtgtgataccagtgggcaaggtgcctgaattctctatacacctaggtttcctcatctgtaaaactggcgaataatagtaatagtacctaatgtgtagggttgttataagcattgagtaagataaataatactaaagcacttaggacagtgccgtggaacataaaaacagcttaataatagctcatagctaacatttcctatttacatttctctttagaaatagccagtatttggttgagtgcctacatgttagttcctttagctagttgcttactatgtattatcttatattctgttgta

SEQ ID NO: 715886 - DNA, 87 bp, Homo sapiens
ttcttgccattgaggtgattctcggcctgcgctgactcctgttgagctcggcgacccatcttggccctggaggtagccaagctgtag

SEQ ID NO: 715887 - DNA, 793 bp, Homo sapiens
agagcatcttcaccgtgtgcctagatgcgaccatgcccaggtctcagaagacgtgtaccgcacccacttggcaggccagatgctgcatgggggcggcagcaggctcaacagcgcgcaactcgctggattctgaccaagtacgcttgcacgcttcagtcgctggcgagaagatggcatcctgtgtggacttgctgtacgatgacatgctgcatgcgtgaggggccccctattgtcatccgttctgagactatgtcagtcgacgtacagcgaatgaaacccgcagcttggtgcggtctccgcatgggtgctcgctgccgcatgaccacaagaaagctgcggttcacacaatcgatgccctcgaggatcaacgtagcgactatcgagaaggccaagcagaaccttcagtcatcatgatccaggatctggatatcaccgtgatggtgttccaccagatttggcaaagacttccccaaagtcggagaagctaagcccgagatgccttcatccagatggctttgtagctggccatagcatacaaggatctacggacaggcagtgtgccagcgtatgaaaagtgcctccctgacggcatgttatcacctggggccgtcacacgatgaccatcacgactcggcttgccagtgtgcactcactcaccgttggtcaatggcacatggcattgagctccagcgtcacggaagcaccagaagggtggacactgtctgcgagaagtgcccgtgcagagtcccaccggaggctatcagccgactcgtgccatcctgtcggggaaggc

SEQ ID NO: 715888 - DNA, 958 bp, Homo sapiens
gctggcttctcctacgccttccccgaggccgtcagggtcttcttcaaggagctcatacaggagttagggatcggctagagcgacacaggctggatctcctccatcctgctggccatgctctacgggacaggtccgctctgcagtgtgtgcgtgaaccgctttggtcgtagccagggccgttcatgcttgtggggggtctctttgcgtcgctgggcatggtggctgcgtccttttgccggagcatcatccaggtctacctctaccactgtgggtcagtcacggggttgggttaggcagctcaagtatcgcagctccgtcgctcatcaatgctgaaccgcttacttcagcaacgcggcgccccatggcgcaaacggggctggcggcagcaggtagcacctgtcttcactgtgtgcacctgagcccgtctggggcagactgactgtcaggaaccgctacggtgtggacggggtcggcttacctcatcctggggcggtcgtgctgctgcaatctgctgcgtgtgtgccgcactcatgaggcccctggtggtcagcggcccaggcgggctcggggccgtcgcgaccctcccggcgcctgctagacctgagcgtcttccgggaccgcggctttgtgctttacgccgtgggcgactcggtcatggtgctggggctcttcgtcccgcccgtgatcgtggtgagctacgccaaggacctgggcgtgcccgagagccaaggggcgcttcctgctcaccatcctgggcttcattgaccatcttcgcgcggccggcgcgggcttcgtgggcggggcttgggacggtgcggcctactccgtctaccttttcagttctccatgtcttcaacggccccgcggacctggcgggtctacggggggcgatacggggcctcgtgacttctgcatctctttggatctctacggcatggtggggccctgagtcgaaagc

SEQ ID NO: 715889 - DNA, 336 bp, Homo sapiens
tgcaacccacgcatgtcggagcgaaccctactaaaggcctaagccatccctggcccacagtggacgtttcttaccatggctcgagactaagggccacccaggctgctttggggttggagatgagttaaggaaggcagggagagatgctgtaccggtctgataacaaagtcggcgccaacccggctgtcctcccactcttccctcctatattgctgcctgcttcgctgccccacttaccacggtcgatgagattgtgctcctcagtgcataccacagttaggtcacatcacatactaaccgactgctgtgccgagctgcctgcctcttttcatgccc

SEQ ID NO: 715890 - DNA, 146 bp, Homo sapiens
atcatgtgtcatggagccctttttgacctgatttgcctgctgctgctaggaggagccctagtagtgcagtgaggcatcggattagcgtttagaagggctatttgctgaggctctcatgagatggagtgcaggataaatcatgctaa

SEQ ID NO: 715891 - DNA, 571 bp, Homo sapiens
ataataatgctgattaaaagccacaccaataaaaaattagtttttaaagacggagtctcactccgttacccaggctggaatgcagtggcgtaatctcagctcactcactgcaacctccacctcccaggttcaagcgactctcctgcctcagcttcctgagtagctgtgaccacaggcacacaacaccatgcatggctaattttggtatttttagtacagatggggtttcaacatgttggccaggctggtctcgaactcctgacctcaggtgaactgcctgccttggcctccccaaagtgctggaattacaggcgtgtgtaaccatgctctgccaaaaaacaaaattttttttttggagacggtgtctggtccttgtggcccaggctggattgcgatggctcaatctcagttcattgaaacctcggccgagaaagcctctctaatggtcttggcccttagctacagatagggcaaccagggggcaagaaacttactgggtatggaagagaattcccggtttcctatccaggcttcaggcgggcccatgctatggcctggagccccctttgac

SEQ ID NO: 715892 - DNA, 468 bp, Homo sapiens
gtgcgcctttaccccgagcatacacgtttaaattctgagagggagcaacacctaggtgagattgaagcagtagataacgaagtctcccagtcaaggaagaagcccaggacctactggcttcactgctgaattttaccaaagatttaaagaactaataccattcctactcaaattattctgaaaaacagtgaacagaatacttccaaacttattctgtaaggccagtatgaacctgttaccaaaaccagacaaagacacatcaaagaaagaaaattggccaggcgcagtggctcacacctgtaattccagcactttgggaggccaaggcgggtagatcacctgaggtcaggatttctagaccagcctggccaacatggtgaaatctctgatctctaccaataatacattgaaaatttagccgcgcgtgatggtgtgcgcctgtagtccccagttactcgggaggctgag

SEQ ID NO: 715893 - DNA, 1032 bp, Homo sapiens
taaatctttatgttcctttattgggagcaagattcctggatcggtatacaggtgatgtgtattttactaaacagagaaccgtgtgtgcagaaatttacattactactccattctagaataggtgtgtatacacttttgtgccatatgtgagtggaattagtttccattttactcaagttttatatacattctaaaaagcttttgtgaagtttcacccagacgtggtccatataatttcaccttctgtgaaaaaggtggcatttataattctcaggcgacatatatttcttacaggcatttaacaaagccttagtgcattataggggtgcattctcgtggcaccaagtggcatttgagccaagacagagcgtgagtctccattatatccacacccaaaatttcaccatgtgggtcacatttgtgagaagctttataccagaaaagcaggggacagtatacgggttcaccatcgagaacttcttacgtgagaagcctatcttcttggggcccacattttatattagccaagtgaagaaattgccagcaagtgtggtcccggtgtataactgtggctttagaagcaccaggtcgtgtgtggagtggtggttggcaggcacaatttaatttatatccgaggtacaaaggccaatttttaaaacatggtccactgtggagatacaaaatcaagggccacaagtgtacctcaggagagatatggagcatatctgggtaatcccaaaatgactgtgaatcactttccagaaaccaatgtgggcactttgaaccccacgttttcccagctatggagacttttaataccatgggatcaaattcccattactcaattcccagtttgccccggagggtactctcagacagggtgggtattcaacaaatccgaagttacgggtagcaccaagtttgcaacagggttgttcatcacagctcaaatttgggagggtcaagacggatacctatctggaagaaaacggtctcatctcgtggtccattaggttatggcaaacatcctta

SEQ ID NO: 715894 - DNA, 495 bp, Homo sapiens
ccggcattattgccccgcgtagagctcacccgcgctcattatttccttttgggtggccaaccgacccctttccctgggaaccgggttttttttggggctggcttgggtgcccccggtgaaaagccatattgattacagggcagcaaagaaccagtaccaggaatttacttgaccattccccttatttttcatctaaaggaatctcggatttagccctttcattgctaagaaaccttttcactggagttcttaccagctcaaccaaatttccactctgctatagcaaaaacaataatgtttgctttaaaaagatttcttgacctatgccttttcttaaaaagtttgatagattagttagaactttagatcatcagatcagtcttaaatggggttcttggaattttatatttgacaatatttatactataccaaactcatttgcagctcttagggttggtgggtaaaaacatttttttaaaggcagtaagtttataa

SEQ ID NO: 715895 - DNA, 326 bp, Homo sapiens
tggatatggagtctcactctgttgcccaggctggagtgctgtggtacgatttcagctcaatgcaagctctgcctcctgggtttaagcaattctcctgcgtcagctccccagtaggtgggactacgggtgtgcaacacaacatccggctaatttttgtatttttcgtagagacagggtttcacatgttggccaggctggtcttaaactcctgacctcagttgatccacctgcctgggcctcccaaagtgctgggattacagggataagccactgttgcccagctgcattggtgccggttttttattgttagttaagagaggtcgacg

SEQ ID NO: 715896 - DNA, 1070 bp, Homo sapiens
  misc_feature (37)..(37): n is a, c, g, or t
  misc_feature (761)..(761): n is a, c, g, or t
  misc_feature (767)..(767): n is a, c, g, or t
  misc_feature (770)..(770): n is a, c, g, or t
  misc_feature (775)..(775): n is a, c, g, or t
  misc_feature (777)..(777): n is a, c, g, or t
  misc_feature (800)..(801): n is a, c, g, or t
  misc_feature (815)..(815): n is a, c, g, or t
  misc_feature (819)..(819): n is a, c, g, or t
  misc_feature (828)..(829): n is a, c, g, or t
  misc_feature (831)..(831): n is a, c, g, or t
  misc_feature (1070)..(1070): n is a, c, g, or t
gctactactactactactactaaattagcggccgtangagcatccaagtgaacaaagcaccttagatgcgccgccggacctacagagctcatggtcggattaacccatacatgagctctccctgccacattgagatgatccttacggaaaaggaacagattgttcctaaaccagaagaggaggttgcccagaagaaaaagatatcccagaagaaactgaagaaacaaaaacttatggcacgggagtaaattcagcattaaaataaatgtaattaacaggaaaaaaaaacacacaaaacaaaaaacaaaaacaaaaaacacaacaaaaaaaaaaaaaaacaaacaccgcgcgcggctaatttggggggggggaaagaaggggaaacagaagggaggcgggggaaaaagagggtactgagaggccccaagatattgaaagaaaagagaggggaaaaacagcgggaggacaccaataaagaagaggagcaataaaagttgacaaggacacggggaaacacacgcaataaaaacagagcggcacaaccggaaagagaaaagagagagaaagagaaaagcacagaaagagaccgtgacagaggagaacgaagggaagacgaggaagacggaacaggaaaagtacaagacgaaagaaaaagaaagagacggaaaaaagacaaagaaaggaagaagaaaaaaaaaaaaaaaaaaaaaaaaaaaccggggggcaatataggggggggggggaaaaaaggtaaaaagggncgggtnatntttcngnacccttttttttaaggggggaanngggggcccaaaggngggnaaacaaaanntngtacccgttctctcttttatctttcgttcgaaaaacaggacaaccgcaaaaagaacatagctacaggggatcaatgtgtaacaacaacgcgctaggacaaaaattcatatagatacaaacttaacaacaatacgaatagtagaaatatacaacgtataaacgatcacatgtaatatcacagtaatagatagataatgaatattaaatctgagcgaggagaacgagggaaaatatccgtn

SEQ ID NO: 715897 - DNA, 818 bp, Homo sapiens
ggcagaggtatcgtgagctgacattgcgccactgcactccagcgcggaagacagagtgagcaaaaaaaaaaaaaaataaaaaagaaaaaaaaaacaaaaaaaaaaaaatctcccaaggcagtcatgcttttggtttgccattagcattttttggttttagaaatattcaaaggtgtaccaacgtagagaaaatagctttaaacaaagcccatggtgtacctatcagtatgcttaaactggtggtcacctttctgccccacttttatctatctcgaacaccccttttctggcacactctttaagaccactggttttaacaagacacttttagactggcatcctggccagacctacccatacagacttcaaaggtactggattaatggcttaattggcctggacctaaggatgtgagctccatggagaacaggagactggtttaccttctcgctccccctgggacctaaaacaatggcctggcttgggtggtaaaggtaaggtggctccagtaaattttttaaactggtgtgtggaccattggaatataatcttcaagacgcaagagagctctttaagattagagggcacttactaaggtggccagctttcaacaaaatgacagaggggaattaaggacagatggcaaatagatctcatttataacctggtgtaatggcagtctgccacgtgcaattaaacaaagaaactttttagtattcaccctttcaaatttcctcaaaatttaaggtttatgactaatttccaccagcaagggaaaactttgagggctgtatcacgttgccatttttaggcccata

SEQ ID NO: 715898 - DNA, 337 bp, Homo sapiens
  misc_feature (15)..(15): n is a, c, g, or t
  misc_feature (56)..(56): n is a, c, g, or t
  misc_feature (166)..(166): n is a, c, g, or t
  misc_feature (230)..(230): n is a, c, g, or t
  misc_feature (318)..(318): n is a, c, g, or t
  misc_feature (329)..(329): n is a, c, g, or t
aaggaggcactgcangcaataggtctacaagacgctattccctatcatagaagagntatcactttctgatcacgcctcataatcatttcctatctgcttcctagtcctgtatgccccttttcctaacactcacaacctaactaatactaacatctcagacgctcangaaatagaaaccgtctgaactatcttgcccgccatcatcctagtcctcatcgcactcccatccngcgcatctttacataacagacgagtcaacgatccctcccttaccatctcaatggccaccatggtatgaacctacgagtacaccgatangcggactaatntcctcctt

SEQ ID NO: 715899 - DNA, 1382 bp, Homo sapiens
  misc_feature (1038)..(1038): n is a, c, g, or t
tctgaaattagtcagattgatgtcttgctctgaggcataagtcccaggtacttagccgttgtaactacctatgatgccactgcaggatttgggtgagcggagggggaagaacaagtcactacatggatacgcggggcacggcgtaggatcgtgaagactacatccacgtggagttggaccttgcgactcgcgagtgtgaattcatccttacacggtgcaataaccgttcatcttgcggattgtcgaatgatgggccagctggtagcgctcgaagtagagaatctcatggtagaatcgtactatgtccgatgtattgtagcaagccgattaactacttagaatagatagctctatgaggattggcgagtcgtatgcagtaggagactattgtctggctgagcaatgattgattaggcgtactatgtcgctatgattattacaagtggcctatagtggtgagtacaagcgttgctagatcatagtatgctaagtccaaggagaccaagtttactagtattgtagcagtagaactcgacgagtatacagttagggtagtagatcaccacgtgattgttctagaattaatctggtgttgtccgtacgtataaaagtgttggcgtttctaaggcgttaacacgacgttctatagggacgatttttggtaagaagcaaggtttagacatttcaatcaagggttagctgactgtgtttacgaacggtgcacctctgggaaggaatcaggttttctttaacttgacggttgacaaattcaaaccgttttgctgccacacttacacatgacaagctaccatcggattcacggcctcccactttggactcaattcttggactagaaacatgaacccctgggtatgggcaattaagacgtccacttggtaaggccatagaatcccttttgggtcccttgaaacaagcaggggtcgtaagagtgccccctaaaagaataactataaaaggtcccatatgaattcgctctttgcgattctcgtctgcgaaggaaaaatcgaggacgttatntgggctaaacacgctcattaacactttggcaaacatttcaccacgagatcgggccagtaggaaggctgagccctttgatcatgaaacacgctttaaaagtgtggaacacagataaaaggtcacacttcgacgaattttcagtgcggaaccctcaagcgtctggccaactacacgttcgtgccaatcacactacggaaacacccgtgtgaggtcttgaatctaaacttaagaacagctcgggacacttgagacagtttacatggcacaacaaacagacaaacagcagcacacacagcagacctacagccacagacaacagacgacacaagaaacaacaacagacc

SEQ ID NO: 715900 - DNA, 396 bp, Homo sapiens
tctcgcgaggaggcggcagtctggtgaccatcccagggtcgctcaacttcccgggtgtccgagttggcaccacgtgctctgccgatgcagccagctgccttccaggctttatattctgtctgcagaagcctgacctggaagatgagcatctcgttttcttctgtcagatgggctacgctggggcctccgggccacgcagctcgcccggagtcttggatacactgggtctcgcaactacgctggagccttatagagtaatggttggcgtacagagagttaggcaggaggcagcttactgattgccaccccctggccccttcttggccaccttaacttagtgctgtgaacaggctgacttggtgacttgggcaactccttatagtgttgtgcgcacat

SEQ ID NO: 715901 - DNA, 1049 bp, Homo sapiens
tccgggccaaggtcatgtagtgaattgacctaagttcattagggcgtacttgaggtcgaaggaccgtgaaacaaggttgtacaagatcaactaagttggaagccgtatcaattcaatgagcctgaatctaaatgtttgtgagccagtataagtactaagtaggtcaaactgtcagggtatgctataaacctgagttcttccagtcaagcagggcgaggtgcagggatgtgttggacgtgtgctgactgccttcgatagttggagctacacatatcatccaaaatacccacctagctgaaagcgtcttttcgctcgggcaaggattagtttgttcctggcaggtatcaggacttggcacactcgaagcctatggtggtacaattgaaaccttcattcatagccgacgttgaaacaacgtggtttacatggtacccaaaggatgtacctatcgcagatgggatgagaataggaccaagtttacccacactcagaggcatcggaggacatccctcgtatgcgaaggaagcacgacccggtcttacgcgtcccggacacttgcttggcaccggagataatgacactcacgacccacagcattgccgagaatcaatcagacaaggaacatcactctgcgtacggagtattaccatcacgctgccggctgaatccatgcgaccgaggcagtgggcgtcaacgtatcaacacaagcagagaacgtggctgatagatagggtcaaagggtggactacagaacgacaagagcgttgttcaatcgaggggccgttgcctcgcaagccgctatcacagggcgccacttcccttggttgtaagatgggggcccacacagtccaggagactgatagtactcatagagggacgagcgccccaaggtgcgaaaagtgcttgggcacaccccattagcgcaattacccgagcacaagctgatgcgagcgatgcacagccatgtaggcatagtaacaaaatctggacagtaccggacacagtagagacaactttgagggtaacaccgttgcagcaactcctctcaa

SEQ ID NO: 715902 - DNA, 780 bp, Homo sapiens
cgcagtggctaacgcctgtgaatcccagcacttcggaaggctgaggtggacagatcacctgaggtcaggagttcgagaccagcctggccaatatggtgaaaccctgtctctacaaaaacacaaaaattgagccaggcatgatggctgcatgccatgtaattcgctagctactcgtggaggcgtgtagagctggagaattcgcttactgacccgggaggcggaggttgcagtgagccgagatcgcagccattgcactcccagcctgggtgacagaacgaaggactccgtctgcgaaataaacaaaacaaaataaacaattctcatggaatactctgtatggtttcaagaaattccctgaaagagttgactatagagtaataatgtaagtctaacgagcgaaagcataaagtgtataataggtattacattatatttatagatctaggcttagcgagatctatgaaatattgagctaatattatgagtcttctgtgatggggcttctttctatgctactttctcagtggcttgtactttgtataattcaggccctaggtttggagcactaagttgttgcattttagtggtgaccttggccaagttatgctctttgtataaaacaccagttacgcaaatatggtacgtgttatcaacaactaataacttttagaactagagcatatcttgaaaaatttatcgggggctttttgtccacacgtgaagaacttccaccatgaagggacaacagcgctggccaaaagcctccgggggattaaacca

SEQ ID NO: 715903 - DNA, 126 bp, Homo sapiens
tgtaccgtgggatatgactgaacgcctctaagtcagatccgcccagtgcggaactgatactggcagctgccgctggagcctcgtgttgtgcctcgtgatagcctggtcccccgccctttctgtcct

SEQ ID NO: 715904 - DNA, 395 bp, Homo sapiens
  misc_feature (114)..(114): n is a, c, g, or t
  misc_feature (119)..(120): n is a, c, g, or t
  misc_feature (126)..(126): n is a, c, g, or t
  misc_feature (135)..(135): n is a, c, g, or t
ctctatctcgtccgggcgaggatgtagaggacgacctcatctttaccagcaagaagtcactctttgggaagatcaaatcattacctccaagaggactcctgatggatttggggnaaaanncccttncccaaggtngcccggctgaagacatcctcaggaggcccagacatggacctgtgagaggcactgcctgcctcacctgcctcctcaccttgcatagcacctttgcaagcctgcggcgatttgggtgccagcatcctgcaacacccactgctggaaatctcttcattgtggccttatcagatgtttgaatttcagatctttttttatagagtacccaaaccctcctttctgcttgcctcaaacctgccaaatatacccacactttgtttgta

SEQ ID NO: 715905 - DNA, 1631 bp, Homo sapiens
cgaaaaattctaggctagtatacaactacgtcaaaggcctccaagcgttgtagagcccctacgggctactacaacccgttcgctgacgccataaaactcttcaccagaggaagccccgtaaaacaccgccacgatctaccatcagcgcctctacatcgatccgacgccgacctgtgagtcatcgtcaccagtcgacgtgcttctactgatgaactccaccatgcagaagtagcccgcaaacgccgccaatgcgatcacagcccatcaacacgacatacgggaagctcacccagtgagacacatcatacgcaccacacctgcgtacgacacatcagaccgaaagcaggagacaaaaggcatcaagaaatcgcggcgctagcagacaaatagaaagaccatcaaacagcctacaagcaccacaagaacatccgcgcaggaccagcatgggcggaagcacaacgaaaccgccacccgaacgcaaaacacataccaatagtgccaaagtacaaccaagaaacacgcaagtaaacaaaacataagcctcaagtcacaaaacagaaagccctcacacatcaaagaacagaagagacacagaaacagacagaacatcacaaagaacaaagcaagacaaaaacacaagaacaacagaacacaagcaacacatgaagataacaaacaccagaccacaacaaaaatgcaaccgcacaaccgagacagcaaaaaaaaaatgaaagacaacgaaacacagaaccacaaagacacgaaagccccgacacagcacgcaaaacgacacgaaagagcccaccacaaaaacagaaccacaaacagcaaccagcacaagcgaacgacagcaacaggcacaacaaagaaaacatcaagagaccaacacaaaaaacaccacagccgacagcaacgcacccggcacagagcaccgcaaacaccaaccccgaaacaacaacacaaacaggacacacaccagacacagacaggaaccacgctgaaaaacaactacacgaccacaaaccaacacaaacacaacaacatacacaccccaacccccacagaagcaaccaaacaccgacggaaagacacaacaacaccccaccccacgaccccctgaccacacacaacaacaaaaaggccacagaacacagccacaccaccgcacgacaacaccaccaccaccacgggcaacgatacacggcacacgtcaccgcaacaaacaaccgacacacccacacgaagcaggcaggaacaaaacacacgacaaatgccagcatacaccacgaccagcacctagcgaggagcaagacacgaggagacacacaaacaagaccaaacagcaactgagagaaccacacgacaacagcacgaaacacacgaacaacggagcctaacagcacaacaaatgaacagcacgacaacacacaaggcgagagaccacagacgcaaatcagaccacacacagcaagagccgcgagaagacgccgcagaagacaagcagaggagagaagatacacgacacagcacagtccgcaccagagcacacaacaaccagccagaacaaccagacacaacaaagcagccacaaaaacacaagcagagagaggacacgaaacggaaagagaaca

SEQ ID NO: 715906 - DNA, 1106 bp, Homo sapiens
tgggggaaaaatacttttataaaaaaaaaaattaccaatcaaaatattgaacaacaaaatggggggtttaaaaacaatgggaaaataaaaattgaaacacgtggctgtgggggcagggagtgcccgggggggggaacctgtgaacaggggccacggatgacccgtccgcctcgatagataactggccaccgagtggaagtgcaggctcgtggtgcggcaaaagagctgggggagcgtaaaaaatcctccagggccgcaagtggaatcagcgccagtgaatgcccggggatcccacggcccctactatctataccaagagggggcatccgcgcccgggtgacggagccccccgtgaaaaccgcctgtcaggggaggccaacacccacgagataagccccccagaagatgtggccgagccagagcgaccgaggccgcgaaagagagaggaggacacaccccgccgatatgagagggcgtgacagggtgttggccccgcacagagggccaaccctgtgcccggaattcacacgacgagactacggagggaggcgaaacaccatgtggtgctccccccgccgtattaagcaccaccaaaggtggggggtgtacccacagccaggtgtggaaactgaagagcggcgcccccgcgacacgaccagagaggtgtgggacagcatcgcagagacagtaagacgggccgtggactacaccagacggaggggggcccgtatctacctccccccccacatattcaaccagagccgcacaagcaatataaccacaccgacggaggggacaaaagcagcgaaagccctcacacgagagaaggtgcaaccacaacacaccgcggcggagcacacgccccggcagagtagattcaaccccacgggagacaaggaaagcaaccccaaagccaccaccccatgctgaacagccgcaggaggcgcaccatataaatgacaaccaccacaaaagagaaagccaccaccagagacaaagcatctcaccacaagaggaggaggcctcaccacacgccgccgaccgccgtcgtcgtacacacaagtcggggaggaacatcactaaccgcgacggcagcaaaacagctt

SEQ ID NO: 715907 - DNA, 199 bp, Homo sapiens
cgcatgtgagcagcgataagtgcgctgtcatgtcttgaaggctccctcccaatcctcatttctccagaactgatcatattgatatttggaactgtgcagatagtcttttgcagtttcctggactctggctttgtgagggaggatgagagataggatcttcatagaagcgtggaagattggagtacatgtgttatgcatg

SEQ ID NO: 715908 - DNA, 402 bp, Homo sapiens
tgcatgatatttcataccgcagctatatttaacagggtctgtgacccacaagttgggccacagcgcaaattgaagcatttgcatgtatgacaacctcagtgggaagtgaaacatcagctgactcataacaacaaacaacaaccaaccagcaccaagtcacagttgcacctattcaaaactagctctaacgtgcgctcatttttaaacttcataaaaatattcatgattttatgcagtttgcaatcatctctcacacagcattcgggtgggcttcacctttaggtgaaaacagctatccactcctgtgaccttataaactcaggacatgctggggatgcaaacgtagcaaacaggccagggggaatgctgaccaggcttgagacctggaagcagctaggagtg

SEQ ID NO: 715909 - DNA, 884 bp, Homo sapiens
tattaaagaaatcacaagtgcaacataaaaagtcattgatcattcgttctaactatagatctgtcatggtttagtttacaatttttaaaaagttcttaaaatactgaaaaggcagttgacaaccttgtgtatggctgatgaagttattcttgatagtcgttacattacttgaatgttcaagagtacagtatatttaaaagttaagaaaagtgaaactatatgtattggtgtgtgatacatttataggcttagagtcataaataatgctattgtttatgattgaaagcgttgcgaggcgaaatccgaatttacgattgtgtccctgcacctaggaagttactttttgtccagcgtttcaagtcttcttagttactaatactttgttgaggcttgaaaaaggaaatcattcacaggaacttttggtatatgatggagaatgaagaactagagtcgagacagctttaattgacattgtcaagatctccagtgatcaggaatacatttgtttacttggcttaaactgtagtgcgtagatatgctcaatttcttgaaggagacttctgtcttgatacgaagtttcctgttgttctcgccttgtggtccaataaggggcgggtcctgcgtgaagatgctatggattgaatgattgcgactgttcaccttttcgggcgggtgttctctgggcacgggcggttgcgaccatataggccgcgcgacggtcccgttatgcctgccccagggggaggcgctacctccttgcgggggggaacaccccctttcttctggtgggttctgcgagcacggtccgtacggggcggcccacgcttttggggagtctctcacacccacttgtgttgtgtgtgcacccacgcgccggggctgta

SEQ ID NO: 715910 - DNA, 220 bp, Homo sapiens
tgcagaaatgtttgccgacgtgaggaaatagaggcccagtaatattaagtaacttgctgaaggacagccgacatagaaagtgggagaactaagactccaccctggcacgtgggctctagagttctaaagaaattttcatagaaattcaagtaccataaacagcactcctatcatccctcagctcagccaaagcgatgctgtctaagcaggtactgaattt

SEQ ID NO: 715911 - DNA, 106 bp, Homo sapiens
tgttactaaattcttggctcgggtgttgggttggggaaggggttatattatttaagggggattccgttttccaaattcggggatccgcggaaaaaatttgtgcaat

SEQ ID NO: 715912 - DNA, 1315 bp, Homo sapiens
ttctgctctttcttgtcttctggcatagattgattttaagcagactcaagggcaatttcaccaaactcaaagcattttagtcatctaggtggcaacaaggagactttaagattgtattacgggctgggcggcggtgactcacatctgtaatcccagcactttgcggcaggccaagggcaggagaacacttgaaggacgttcaagaccagcgtggccaacgtggtgcaaaccctggtcatctactaaaacatacaacaaataggttcagcctctgtccaatcatacctagcaacatagacaaacggtcaaacattgccttctactccctgcacacggacacaagtcatcgtccatccgaaagaaagacgtctctcgttgcactgcaatacagacagttgcctgcacctacgtcatcacgctgtcgcctctcacacaccacctccagcccatgcatacagatggttagccggcacaaccccacgggacaggcaataatcacacataactgtggatactatggaaacattccctatccatcgataaggcattgaaacataagtccttcgtcaactactcaaacacctttcgactggtaagacgacacattcagcagcacttaacgcgggtaccaatatccatttgacacaaccttggcacccacttccccatggggatgcttcaaaatggctgaacgacttttgaccattacacctacatagtgacgcggccactttcaaacaacaacagtaaaaagtacacacaacaaccacactacaaggtaacacaacaactcgaatagctactacatggacatccctagtcatataacagcaacggtattaaacgcatacaacatggatttctacgatggcaatacaaattgcgccgtgatgacagtagaacttggatatcgcagcaaaacacatatcattatataaagacaaaacggtttactacaaatatcaacacgggatcagccctacattgttacggcatcactacctgcacacatggttgccacggcacgagataataggtctgagtgcttaccagatcggtggaattcgcacccgtgaaccaacaggtgcgtaaccacacatatagggcaacgggactagaattaggagtgacaataaatatagagagaaacacagtacagtgtcacagtgcgcagatcaacgactgtctgcataaagactgtctgataacagacaagacgaacaactcgaacaagagactctagcgcggcacaatagaattgtcacacaacgacgtcgagaataactcataaatagacatgaaagagctcaaccag

SEQ ID NO: 715913 - DNA, 147 bp, Homo sapiens
cttgtctctgagtgttgtataagtgtgctttcccttttttcttgattaaagttgccaaagtttcatctttcttatcggctatttatttattttttagacggggtctccctctgtcgcccaggctggagtgcagtggcgcgatctcgg

SEQ ID NO: 715914 - DNA, 1040 bp, Homo sapiens
  misc_feature (450)..(450): n is a, c, g, or t
  misc_feature (460)..(460): n is a, c, g, or t
  misc_feature (490)..(490): n is a, c, g, or t
  misc_feature (613)..(613): n is a, c, g, or t
  misc_feature (616)..(616): n is a, c, g, or t
  misc_feature (624)..(624): n is a, c, g, or t
  misc_feature (640)..(640): n is a, c, g, or t
  misc_feature (644)..(644): n is a, c, g, or t
  misc_feature (649)..(649): n is a, c, g, or t
  misc_feature (652)..(652): n is a, c, g, or t
  misc_feature (656)..(656): n is a, c, g, or t
  misc_feature (659)..(659): n is a, c, g, or t
  misc_feature (667)..(667): n is a, c, g, or t
  misc_feature (677)..(677): n is a, c, g, or t
  misc_feature (689)..(689): n is a, c, g, or t
  misc_feature (701)..(702): n is a, c, g, or t
  misc_feature (712)..(712): n is a, c, g, or t
  misc_feature (715)..(715): n is a, c, g, or t
  misc_feature (720)..(720): n is a, c, g, or t
  misc_feature (729)..(730): n is a, c, g, or t
  misc_feature (740)..(740): n is a, c, g, or t
  misc_feature (748)..(748): n is a, c, g, or t
cttcaagaggcgtgatctggccttcggactcgctatgtccactaacaatatgtcggacccacggaggccgaacaaagtgctgaggtacaagcccccgccgagcgaatgtaacccggccttggacgacccgacgccggactacatgaacctgctgggcatgatcttcagcatgtgcggcctcatgcttaagctgaagtggtgtgcttgggtcgctgtctactgctccttcatcagctttgccaactctcggagctcgagaggacacgaagcaaatgatgagtagccttcatgctgtccatctctgccgtggtgatgtcctatctgcagaatcctcagcccatgacgcccccatggtgataccagcctagaagggtcacattttggaccctgtctatccactaggcctgggctttggctgctaaacctgctgccttcagctgccatcctggncttccctgantgaggccgtctcggtgcccccagctggatngagggaacctggccctttcctagggaacaccctaggcttacccctcctgcctagaagggtcacattttggaccctgtctatccactaggcctgggcttgggctgctaaacctgctgccttcanctnccatcctngacttccctgaatgangccntctcngtncccncanctggatanagggaacctngccctttcctanggaacaccctanncttacccctnctncctcncttcccctnnctgctgctgngggagatnctgtccatgttctaggggtattcatttgctttctcgttgaagacccggtggtgcactcaaaggttgttccactcctggacaaaaaaggaacaaaataacaaacaaaacagcaaacacaacaaaagcagtacgacaaagaaaacaaaaaaagacgcggggagaaacaaaacggagaggagaaacaagatatgataagcaacacaaaggcgccaacagcgttacgcacaccaaaatagttaaaaagagagagaacaagcggcgccccaaaggagggagaaaaacaggacgctcc

SEQ ID NO: 715915 - DNA, 215 bp, Homo sapiens
atttaaaacacaaagcatcgacttctgaaagacacgcagcaactggcaaacagctagaaaaaaatcagttggagaaaattcagaaagaaacatcccttctccaggagctggaagatttgggattgggtaccttaaagatatacggaaagcaagttgatgaccagaaatcagtgcatacacatctactggtaaacctattggaatacacatgaata

SEQ ID NO: 715916 - DNA, 961 bp, Homo sapiens
  misc_feature (345)..(345): n is a, c, g, or t
  misc_feature (534)..(534): n is a, c, g, or t
  misc_feature (537)..(537): n is a, c, g, or t
  misc_feature (545)..(545): n is a, c, g, or t
  misc_feature (561)..(561): n is a, c, g, or t
  misc_feature (565)..(565): n is a, c, g, or t
  misc_feature (570)..(570): n is a, c, g, or t
  misc_feature (573)..(573): n is a, c, g, or t
  misc_feature (577)..(577): n is a, c, g, or t
  misc_feature (580)..(580): n is a, c, g, or t
  misc_feature (588)..(588): n is a, c, g, or t
  misc_feature (598)..(598): n is a, c, g, or t
  misc_feature (610)..(610): n is a, c, g, or t
  misc_feature (622)..(623): n is a, c, g, or t
  misc_feature (633)..(633): n is a, c, g, or t
  misc_feature (636)..(636): n is a, c, g, or t
  misc_feature (641)..(641): n is a, c, g, or t
  misc_feature (650)..(651): n is a, c, g, or t
  misc_feature (661)..(661): n is a, c, g, or t
  misc_feature (669)..(669): n is a, c, g, or t
cttcaagaggcgtgatctggccttcggactcgctatgtccactaacaatatgtcggacccacggaggccgaacaaagtgctgaggtacaagcccccgccgagcgaatgtaacccggccttggacgacccgacgccggactacatgaacctgctgggcatgatcttcagcatgtgcggcctcatgcttaagctgaagtggtgtgcttgggtcgctgtctactgctccttcatcagctttgccaactctcggagctcgagaggacacgaagcaaatgatgagtagccttcatgtgagacttgccctacagaacaagtgactcttgagtaaggggtggggggaccccnacctgtccatcctaaactgacacctctctcctgtctcaagctagctgtccatctctgccgtggtgatgtcctatctgcagaatcctcagcccatgacgcccccatggtgataccagcctagaagggtcacattttggaccctgtctatccactaggcctgggctttggctgctaaacctgctccttcanctnccatcctngacttccctgaatgangccntctcngtncccncanctggatanagggaacctngccctttcctanggaacaccctanncttacccctnctncctcncttcccctnnctgctgctgngggagatnctgtccatgttctaggggtattcatttgctttctcgttgaagacccggtggtgcactcaaaggttgttccactcctggacaaaaaaggaacaaaataacaaacaaaacagcaaacacaacaaaagcagtacgacaaagaaaacaaaaaaagacgcggggagaaacaaaacggagaggagaaacaagatatgataagcaacacaaaggcgccaacagcgttacgcacaccaaaatagttaaaaagagagagaacaagcggcgccccaaaggagggagaaaaacaggacgctcc

SEQ ID NO: 715917 - DNA, 584 bp, Homo sapiens
cttcaagaggcgtgatctggccttcggactcgctatgtccactaacaatatgtcggacccacggaggccgaacaaagtgctgaggtacaagcccccgccgagcgaatgtaacccggccttggacgacccgacgccggactacatgaacctgctgggcatgatcttcagcatgtgcggcctcatgcttaagctgaagtggtgtgcttgggtcgctgtctactgctccttcatcagctttgccaactctcggagctcgagaggacacgaagcaaatgatgagtagccttcatgaaactatggactagcatctccccctagcagcatggcaggggaagtggaggcaggatggggtaagcctagcggtgttcctctaggaaagggccaggttccctgctatccagtctgggggcaccgagacggcctcatgcatgggaagtcacaggatggcacgctgaaggcagcatggtttatgcagccaaagcccaggcctagtggatagacagggtccaaaactgtgacccttctagtctgatatcaccatgggggcgtcatgggctgagattctgcagatagcatcacgcacg

SEQ ID NO: 715918 - DNA, 1037 bp, Homo sapiens
  misc_feature (271)..(271): n is a, c, g, or t
gatctctaatatagtaagctgtaaaatgtcttcatataaaaaagtactatgtagtacgatggcgttcgattgattgtaatcgtactcgaacatgtaggaacatatctaaagtctgattacatccagatagatggtggtagcgtaaatataatttaattctcatatttattactaggacgagtagtagttgcacacgctctaattactatgtctggggctccgttacttcccttactgagtctattcatgcttctatatttaagtaacacantgcagacatttgtactatgtagtaaattgtatggacccaatattcaaatgctttatgcataatctatgctgaagagctgccatgtatactaccccctgttatactatgcatgtccttgcgcgatgtattggtgtgtacactgggaattctctatggcgtataaatatagagcaaaaagagacgcaaaagttaaactgaaaaatacactatcctatgtacatcgtgtgtaactggacttacaacttattctaacataacttgaatgtaaaaatcgtagaagctgaggatgatgcgatgtgtgtactactagtccatgctgactctccatgtcaccttttagggatagagcgtgtaggtgcattgacagtaaatatcttgtgtattccactagcgaagatctccaagagcacatgtcacttgtgggcctatcagtacgatgtagtacctctcgtactcttcacaagtataaattatctaattaccctataagctcgtagtgattagtgtggggcatcgaccctgtgaggtctccgatgcatacttggtggtatacttggcgaggcaaaggcatcgtattggcagttactccgggggaaggcaaagatttgccgtgcactctcgtagcaatggatggccattgagccactccagaaacacttggttgctcaacagcaatcgaaaccatgtcctctaattggaaaacaaactggcggacttcgactgctatttttgtacatcaacctctctttgtgttgaaaccttaccc

SEQ ID NO: 715919 - DNA, 550 bp, Homo sapiens
cccagctaatattccttgtttttttataaaaggccgggatacaccattgttggccaggcgggtttttgtcttcttgacctttttttttctggccacctttgccttcgggggtgatttgttgacagggaccacccccggggctggccaaacattatagggggaaaaaaacttttgcttttccttttgggggggaacccccccaaaaaattgtctccaaagggatgccctatactttaacaaaccccggactgcagaggaccttcttttgtctaccatatgaactctttatgggcggcagggaaatcttttcaaaatattaattctaaacacacatacacaaggcggcgtcaagaaaaattttaaaaaaaaaaaaacttttttttggagacctctccaacacagatacaaaatttcttacttttaacaaccaatgtctataaaaggtggcctcctagaagcaaaaaaaaacggggcttatttaaaaaacccccctggagaaaaaaaaacctacctcaacttcttttatctgggggcacccgtggctcttttt

SEQ ID NO: 715920 - DNA, 110 bp, Homo sapiens
tcatcaaggggcatggcccatggctcaggtttcatcagcatagtatgggtggttggtgtaaatagcagtgcaggcagagcagtcagcaggcaggttcagttgtaggccaa

SEQ ID NO: 715921 - DNA, 156 bp, Homo sapiens
  misc_feature (38)..(38): n is a, c, g, or t
gcgactctagcaggatctcatccccaaactttgagagngcaaggtgggcgggtcatgagatcagaagttcgagaccagcctgaccaacactgtgaaagcccatctctactaaaaatagaaaaactagccgggaggtggtgttgggcgataacatca

SEQ ID NO: 715922 - DNA, 314 bp, Homo sapiens
agggggtctagagatccgtctactcgcagtgatggataaggtgcacgacacgctgtatttgatttagtaagatttcacatgttggcagatgtctcaaaccctgactcaggtgatcaccacctctgtctccaaagtgctggattaaatcatgcgccaccatgcccagctaaactttgtgttttcagtagagatggggtttgccatgttgggcaggccggtctcaaactcctggcctcaagtaatccgtctgtgccttttacccccaacacaatcttggtgacaaggactttgtgttttgttctctattaaatccc

SEQ ID NO: 715923 - DNA, 252 bp, Homo sapiens
  misc_feature (24)..(24): n is a, c, g, or t
gaggatcccttcagcacagttagntacttaaatatattggttaatggttggagggcatcagtgtccaagttcaagaataaaacttggcatcgttagatattttcaaaagtgaacatctggatggttctctataccgggagatgtgttggtgtatatatatatatatatctgcaaaatatgtcctattttatcttaaaaattttttcaaaatcgggcttttctattggagaaaagccctacggtgctctctcg

SEQ ID NO: 715924 - DNA, 359 bp, Homo sapiens
gagctgatgcacttgtgcatgcggcacgaggcctacctagaggccctctaccacctgcagtccccactcgaccccaggacgcgtgctgtctgaagtctgcgtggagcaccgcaccttcatggactccaagatgaagcccctgtggatcatgtacagcatcgaggaggcaggcatcggcggcagccgtgggcatcatctttaagaacggggatgacctccggcaggacatgctgaccctgcagatgatccagctcatggacgtcctgtggaagcaagaggggctggacctgaggatgaccccctatggctgcctccccaccgggtgaccgcacatgcctcattgaggtggtactacgttc

SEQ ID NO: 715925 - DNA, 255 bp, Homo sapiens
cctctctgggctgcatttgcagcccagagaggctggaagcctggctgagcttcaagtcaagaaactagcctgaggtgtattgcaatggcgtgctctctgaacgagatgatgtctatcctgtgaagcactaagcctggaaacgggacagtcaccatctagtgttcctggtctggaatggctgctcaagtgtgcaatgcgtgttgtgtgttgtatgtggcatggctacctggtaaagccttatctgtatctccacca

SEQ ID NO: 715926 - DNA, 1151 bp, Homo sapiens
cgtcgcacttatagatgtggccagaacatctcttcgtacctaacagttcatgctgaacttgcagatgtcttaacagaggctgtagtggactccattttggccattaacaaagcaagatgaacctattgatctcttcatgacttgagatcatggacgatgaaacataaatctgacaactgatacaagcttaatcagcagggcttgtttcggcaccacggagcacggcatcctgatatgaagaaaagggtggagcgatgcatacatcctcacttgtaacgtgtcattagagctatgcagaacaacagcaagtgacattctggcttttattctaccacacgagctgccaccacagcaagagcagacaaacacctcggtgcaacagcctgacacaccacaccacttccctttcgacagcataagggctcaactcaaaactcatctagcacacctgcaccacagcgcacacgctctgctggcgcacttcagccactaaacggcactttgctacggttacttaaacttccaacaacaacgggccaactcgaaccccccatattctcccctcttaaggaatggcttcctctctccaacacgcaagcgcctattagcttgccatcctgccgccagcaggtcctccaccaaccgagcaacactactgggaccaagcgactgaacctccttgcccatctgaatggcatgaggcggtcagcccccatcacaattgtctcttattgcaccgcaaccccttttaaagttcacttgtaaccttgccctttgtgagcgaaccctattgcaacgcgaacctaacgcctacttattggaccttaattacacttcgggcacacagtaaaagaagcaaagcgcattccaacccctattcaacttccgaagcacacactggcttacaccacaagtcaccgttccgcaattcattggttcaaccaacttgtactgtgcgccttcaaccaagggcaaccccaacaaatacaaggccaacacccagattatcaacctccacgtccaatcccactaagcaactttccacttagcttggcgcaacgtgcgactatgaaccggggacatggttcaacaaaaaactgtccataatcgcgacctgcaacttcccctggcaacatagtatctccaaggag

SEQ ID NO: 715927 - DNA, 668 bp, Homo sapiens
  misc_feature (22)..(22): n is a, c, g, or t
  misc_feature (24)..(24): n is a, c, g, or t
cgtaaactaagtatcttaatgngncctaaaacaacatattttcaggaagatgacagtaaagtctacaagtctctaatgaattattccaggactggcaactgtgggaactgtgtgtgttaggtttgaattcttgttataattagctgatctgccacacgagagtgctatttggattactgggaccagctggagtcaaggctgtataattcatcactggctgcttaggcttctattaatgcgctcaggaaagtgtcaaagcataagactgagggccctcaaaatatcctatcttctggctaaaaaatatctacacttctagagtaaatttgtgccatacagagatctatcatgaactaagaattgtccatattagacctgagccctccaaggagcatatgacacggttcccaactacatacactttgtttaaatactcttagatcccttgataaggtgcacgacatttatttccccgaaaaaaacccggtattgctcacgcccctttaaaccctttaatttttccaaccccccccaaccaaacgcgtattacaaaatcgtaactttcgccacccaacctgcccttctcctcatcttccactctaaccccgccttcatcaaccttcccatatacacgcccgcccttagcacaccgttttctcatctgccct

SEQ ID NO: 715928 - DNA, 130 bp, Homo sapiens
ttagagacgtgtgcaattgaggaagtcccagacataggaaggaggtcagatgccagactggcccattaatgacagatgtactatacagcaagtttgccagcttgtggggattcgtctgggaacttctgca

SEQ ID NO: 715929 - DNA, 351 bp, Homo sapiens
  misc_feature (278)..(278): n is a, c, g, or t
  misc_feature (321)..(321): n is a, c, g, or t
aaaaggaaaaggttgaagaacaagaacaacaacaacaacaaatcatcaagattagaatcactttgacctccaccaaggttaagcaattggaaaacgtctcttccaacattgtcaagaacgctgaacaacacaacttggtcaagaagggtccagtcagactaccaaccaaggttttgaagatctccaccagaaagactccaaatggtgaaggttctaagacttgggaaacctacgaaatgagaatccacaagagatacatcgacttgggaagctcctgnttcaaatcgttaagagaatcactcaaatcaccattggaacctngtgtgggatgtcggagttgtttgtttggtt

SEQ ID NO: 715930 - DNA, 213 bp, Homo sapiens
agtgttctagaggatcccttacagaggaggagacagacagaaggaaagatggcttggagaaagccagcagtctgcgaggctggggaggatggagagtggtttggggttttgggtcgggctctagtgtgatcaactgcagaagcattacaccgtggcctggtttctttactcagcccctggtgtccacctcctctgtgctgtcgggtaccgagc

SEQ ID NO: 715931 - DNA, 334 bp, Homo sapiens
tggcacgaggccaagatcctggcacgaggccaagatcctggcacgaggccaagatccggcacgaggccaagatccggcacgaggccaagatccggcacgaggccaagatcctttggcacgaggccaagatcccccctgactcgtagtagcagattctgctgttataaatataaaatcaactttatttaatcatgtcttggaaatgcatatgtgggcacgaagggagcggactgcatatgctgatagattgggctttaaagctctttggaagtttctcctttgcagctgaatattgtctcaatttcttaccatggcatatgaggctggccgtaac

SEQ ID NO: 715932 - DNA, 561 bp, Homo sapiens
aaggtcggaaaaggggattataaatacagaaaaggtaggacaatatcctgccctagagcacttatgttctgggtgtatgattgaactaaacactaacataataaggcaatagctatcagaacaataaatggtacgggccaagtgagtggtattaccagaagtgggttggggatttcagaggaggagggtgtgccatgggctgtcatgatcagggagagccaaactatattgggctggatgcttagctctggaggttatggtagacaggtccatctgggaccacaaactaaatatttatgtgaagtacatttgagttcaatgtgaaaaggggcaatttaatgaacagactgtcaaaaaaggaaactcataagacgaggaacttcccatcttaaaagtcttctgtcactagaaaacaataataaaaataacaattataatagtagtagtggtggtggtggtagtgataccaggaactatgccaaatgcattttctcacctattacttacgctaactctatgaggtactaaaggtaacaacaggtaacacatagtacgtacaat

SEQ ID NO: 715933 - DNA, 118 bp, Homo sapiens
gcgggccgccgccccccccccttgggaaacccataaaggggcattgccctagccggtccggcctttttccagtccatcctgaacccctggaaaacccataaaggccgtttttttggca

SEQ ID NO: 715934 - DNA, 135 bp, Homo sapiens
cccagacaccgggacgattttctagctgctgcgaagcctgccaggtcaagaagacggagctgtgtcctccgacacttggcggttcgctgaactttctctttcttgtttgattcaccgtggataaaagggaggtag

SEQ ID NO: 715935 - DNA, 134 bp, Homo sapiens
tgatgacagtgatgttgatggtgtcgatgttgatgctggtgatgatggtgttgttaatgttggtgatgatggtagtggtgaaggtagtgatggatagtgatgatggtaggtgatgatggtgatgagtggtgatg

SEQ ID NO: 715936 - DNA, 983 bp, Homo sapiens
ggcacgagcggcacgaggaaggattcctatgtgggcgacgaggcccagagcaagagaggcatcctcaccctgaagtaccccatcgagcacggcatcgtcaccaactgggacgacatggagaaaatctggcaccgacaccttctacaaatgatgactgcgtgtggactcccgaggagcaccccgtgctgtctgaccgagtgcccccgctgaaccccagggccaagccgccgagacatgatgacccagagtcatgttctgacgaccttcaatcagcccccaggcacattggttcctgttgcgtattcgcagggctgtgctagtccctgtgcggcctctggcctgtaccgactggccatcggtgatgggaactccggtgacgggggctcacccacgagctgtgcccattctacgaggggtatgccctcccccatgccatcctgcgtctggacctgggttggccgggacctgactgacctacctcatgcaatgatcctcgaccgagcgctggctacggtcgttcagccgatccacgggcgagcgggaatctccgctgcgctgacattgtcggcagaacgcctgtgctgctctcgccctggacttcgagcgaagtcgatggccgcgcgtgcttccaggcgtcctccctggagaggagtctcactagctgcctgacggccccggtcatctccatccggcacctggagcgggttctcggtggcccttgaggcactcttgccagacctctcctcccctgggcctggtcgtcctggtggcctctcggtcgaaattgctctttcgactcctgtcgctgcatgtgtgcgtggtcatcctggaagaccgctacgccaatgctgtggtgtctggcggggcccaccagttcctgggttgcggccgggtgccccttgtgttctctgtccgggcccggactgagataagcgcctcgccccgaggggcaacccgcggggacggggccctggcggggcctc

SEQ ID NO: 715937 - DNA, 224 bp, Homo sapiens
ggagcaatcacaccgggccgcccggctaccgatcccaagttccggggaggttgtgctgcaaaaccgcgttgacgcggtcgaacgcaaccgggtggcggaaaaccagcccgaaaatcgccgtgcagttgcactcgggcgctgctgtgcgcgccacgttgcccagcctgacctgacggcgcaaatccgcatcggagatcgccgtaccgtcaggctcgggaaggtaa

SEQ ID NO: 715938 - DNA, 230 bp, Homo sapiens
aaaactaactcaacaaacaaatctccacccacaaataattataatttcataaagcatgccaccatgtttttgacagaactaccctaataaccccttttccagttttactttttggtggtgatatagaagttcagcaccgagaacgtcttctttctattgatggctggatctattttcaggcccctgtgaagatagctgtcattttcaagcagctgagagttctcattgat

SEQ ID NO: 715939 - DNA, 126 bp, Homo sapiens
tcaaaaaaaaaatagttgggtataatacatgctataaaccaatacacatttctgactttgggggcagagacagacgggctgatgttgtatagttggtagccctggagtaagaagttgacattaatg

SEQ ID NO: 715940 - DNA, 327 bp, Homo sapiens
tgaaaatagccagttcctgccttaacctgatgacattccaccattgtgatttgttcctgccccaccctaactgatcaattgaccttgtgacaatacaccttccccacccttgagaaggtgctttgtaatattctccccacccaccccacgcccgcacccccgcacccttaagaaggtattttgtaatattctctccgccattgagaatgtgctttgtaagatccaccccctgcccacaaaaaattgctccttaactccaccgcctatcccaaaccttacaaggaactaatggataatccccaccacccttttgctggattctttttg

SEQ ID NO: 715941 - DNA, 158 bp, Homo sapiens
aggcagttgtcaagtgaggccgttcgcctttaagcagccagtaccctacaaatcagcatcttgtatggacggggagattgaggacacaggcagatagattcctatgtactcacgtgtatctaggtatcatagatggtgaggcaacagtggttatgtct

SEQ ID NO: 715942 - DNA, 834 bp, Homo sapiens
catccgtgtcctgggcatccaggtggacacagatggctctggccgcagctttgctggggccgtgagcccccaggaggaggaggagttcctgtcgcctgggtgtgcctcccacaatgtctatgaggtcatctccaagagcatctgcccctccatctttgtggggcgaccagacatgaagaagtggcattggctgtgctgcgtcttagtggggctccctgaaagaggctctcctgatggacttactcgccgaggtgagacatcaaactgcgtgatgctaggggaccctgtggacagaccacagtcccagactatcttgtaacgtatttgtgtgagaacagttgtgtctcccactttggggggatatcaccgtcttgggaaaatgtgcgcgcactgtcgcacgcctggagcttgagcacagtacctcgcgtgactgaggggagcccccttcttgtccggaaatttcactcactggagtggcggagccatggtttcctgggcgaaatggtcagggggacccggccatgggatatgaccgaaagttatatgagagaaggaatatgcgcaggcaaagcacatgaccccgagcttggggcgacacatcccacggcagaaggccacatggaaagacacacgcagagacaccaaatcatcttaataatcagcccacaaggagcgtgggtgagatcacccacaaccaacccccctgaaacactatccaccgccatgtccatcccgtgtacaccatgttgaccatgtacggaccacaacaatcacagatgcgatccagcgcacgacaatggcgaaaatgacacaccgaaagaggggggaagggaa

SEQ ID NO: 715943 - DNA, 446 bp, Homo sapiens
gtggtatctgacacaactagatcataaataacctacagttcagtacacatctatctactctgttatgtgcgaaaagatagaagaaagctaacacttagaaactaagctaaattcaacttcccaagtataccttctcccaatactgtaagaataataatagctaacatgcctagaacgtgtgttataatcccaacgattatactaaatattgtacatatactaacttgtctaatccttacaagtctatgagccagacagcatttattattcccattttgtatatgaggaaactgagatcacataggagtaaactggtctacgatcagaactggcaaactggcaccgtaaggattcacatctcagtaatctggatcagagtctccattcttagctacaccataaacctacatatacaacaaaaactcactagccatagtcattcatgc

SEQ ID NO: 715944 - DNA, 93 bp, Homo sapiens
aaaaacgggaatcaaactgaatgtcgtcttcagcccagacactgctataactccctgacattgccagcgcatgcaccacgaagaatcgtatcg

SEQ ID NO: 715945 - DNA, 796 bp, Homo sapiens
ctcttcttttttctgttttgttttgctgttttttttccacccttctctgttgttctctcggtcctctttctttcatctttcttccatttttttccttcggcatgtcctcccaacgtcgcttctgtccggccttttggatccccttcctctatccgtctcttccactcattgcttcttttctgtcgtgtgtcccctcgtttaccctcgtccctacacttctcgcatcttctgttccttaacgctagtttctgcatcattcctgcatttcgtctacgtacgtgctgttacttccttcttctcattatcaactacttatctactagtttacttgaacgaggcctggttagcggtctagctgcaacctcaagtctaggtactgacgcccgacagactcctacccttactagtctcaagcccctttccattcagtttattttgcagcaggtttttattattattattattattattattcacaacagacactttccctaagaatctcaaacgtgatgttcgtaacaatccggtaaattagataggggccctcgctagttttctgtgtcagtgctgtcactggtcaaatgtggatacatcaaggatacgccgagccgatcaaagagcaagctcgaagtttactctggagtgtttcggacatgatacaacgtagccctaggcacaatgcccgtctggattgtgatagtgagcaaccaagttcgcttagtgtattctgtaatgtgtatatagtcaatgtacggtataacgaatgtgatgcatgaacgtgaaaatattgtagata

SEQ ID NO: 715946 - DNA, 217 bp, Homo sapiens
ccgaggtagctcgtcatccactgccttcttgcttgcccttccatcttcggtgagcctggccgcccagtacgcaccctctttgttgccattgctccatccaacaacttcttgagctccaacattttcctcccgctagcctctcggcagcctgatcccgctgttccaggcccttatccacactgggtaccgcagctcgcaattcagtcaatccatggtc

SEQ ID NO: 715947 - DNA, 1489 bp, Homo sapiens
gcgcggaccccgagcacgcgcctgacagcccctgctggcccggctgcgctggcagttagacatgtgccatgctatgtgtccccgaccctggtgtgcctgcctgagacctgctgtgctcagtggacctacccctgctgctacttcacctgtggacgcaggtgtgcccacgctgctcagtggtgcgatgtgagctggttggcgtacgtgatctgacctgtaacgggtgtacaaacgatcaatgacgatgttcaaccctgacctggcaatccacgaggtgagcttccctgtggtcaatcagggccaactatcagccctgtgtgcatgtgaattgccaactggtatcccaccttatggtgtgccatttccaacaatcacaccacaggtgccattggtgacacgcaacgtagtatagacacatcatcatccatggatctggacggaaacttgtctccaagaaggcaagcaccaagacgtattagaagcaccaacgcaaagacatacaaaggcagctagcacgcagcattcgcagattcctgtgcgaacgcctagctgaggctcaactagattgagaagcagggcatcgtgcgagctacgattcgaaagagccaaaacaccatagtcatatacattaccatcggcttgtaaccattgccttgccaccaattctttaggcattgacatgagacattggagatagacaagacaccttgagacatcaaccccattatgaggatctatatgaggagcacggatacactaataataagacccactattccataaccattcttggtgccaggatgacattgcgctaccagagtagacaaggattacaagggacaccacaagcgaggccatagagaacttaggcgcttagcacacgacacaatatgaaacaattatattggaggaggcaacaccaattgactccagagaatcaattacaacgacaacgaccgttcaaaaaactggtagggaaaaaccccacttacttggccataacaagtccaacttatatacggtaggacatatggagcagcaaccattagaaatcgcggaggggacgacccacagaccaaagcaatcggattaggaatccacaccaaatatgcaacaactttaccacaacaaaccccacttccccataatacaccaacaaacactgggcattccagcaaacaagataaccccaagataaccattcacaccagttgacaataccacataaatatacatttcagcctttggcgaggaaacgatctccctcctccatgaagagaaggcattgtgcgacccaccgacagaaaccccactctattcgccgtagaaccaccagaggacaaaaatacagtcgcttcacaaaatggggcgccccacacatcaagatggctctcctacaccccgggagcacttcgaactcgtggaccaccggacaacatcggagacatacgacacatatacacactcagaacgagcaccaaaaattccg

SEQ ID NO: 715948 - DNA, 286 bp, Homo sapiens
ctaaattcgcggccgcgtcgacggtgatgcggcggtccgcaagggctccgatggggtccgaggcgaggttgtcagggccggagaagggccaccacgcaatgacgggggagtccgacagtagcagcggaaggataactgaggcaggacgcttcgccatggctccggaaaaccgcagcacgatgacatccccgggggtgccttcaccggcatgcacctcggcgtcaagcttgtctttacgagaacgcgtcgtcacgaccatgaggaggtcgacgcggccgcgaattta

SEQ ID NO: 715949 - DNA, 979 bp, Homo sapiens
ctgggcctgagctcctggctccgtgctggggcgcctgcgagtgtctcaatgatgtgctggagctagggcgaattaaatgcacattgtgatgagtttcctgtggatgtctgagctccaggtgcttcttggctttgctggccggaacaagagtggacggaagcactgagctcctggccaaggctctgcacctcctgaagtccagctgtgcccctagtgtccagatgaagatcaaagagctttacctgacgacgctttcccctggaagaccctggggccctctgatctctcccttctctctttgcccccatggcacctctcctgtaggactacccctggtcctctagactcccattcccccaactgctgtatggccctggcaccctgctagggccccaagcgttgaggttgacattgcaacccaccatctgacccagacctgttgcaccactgatgtcaccatgaaaccattgcccttctatgaagtactatggggagctcatccggacccatcagccttgcattctcactttctagccagcggtttgaggaatgcgctactttaacctttgccctacacaacccagcaatgtgcgagcagcattcttacatccagagaggttcttgccaggagccaaactgtgcattatacccataacaggtgcagctaagggtcttgactctgtgagtaacaagtcttgctccaccaatgggattgatttattaataccctgtccgaaccagtcgtagtgatccaacgtgggtcaacactgtgcgcaaagagcatggtagtctcagcccatgtgtcccggtgggtttaacccattatgaccccgctacgtagcccaaccgtacaatttgcggtcctgatcacgcagaatgatggtgtcgcgctaatcaccagacccccagagatcgagacagagccacttaacgccacgtgtggtgtacggaattccttaatgtacacgtggtatcacca

SEQ ID NO: 715950 - DNA, 426 bp, Homo sapiens
tgtcatgcggcggccagaaaaggtccaggtgaggtagtccacagcatcctgcttgtctcaataggtcttggtagacaatctcagcattgatggtggatcgtgcatacaagtggtccaaggtagagattctactggacaatggctcatatatagaacttcgttgacagaaatccttcctatggagccctgacgacatgtatgacgacagcgcccctcgatcgtccatgcaagagggtcggttggtcgtggcccaccaatcgtgaagcacgtcactagataggggtaatccacatatagcgcgtggatcttgcctattagtagtactagagtatccactgattgattacccaggctgggcagccgacgttcactgccccgagcaagggacccacgtcgcgggtccctgacgctcgaatatcgtaatca

SEQ ID NO: 715951 - DNA, 1083 bp, Homo sapiens
ggcgtagtccgcccggatttacgggatctgagaccctcctgcaggcttcctcagggacagccccactctgcctcttgctcctccaggtcagcaccattgcagcccctgtggctctgctggtgcactctgggtgttgcccctgtgccagcccctggggccgcctgaccggggagcagctcctgtgcgctagcctgcatgcggtagtcatgcagctcaatagaggtgcccaccctggacagggccgacatggaggagctggtcatccccactcacaagtgagtggcccagtactgttggccctgctgcagcgcagccacggtgacctgtcccgcgggaaaaagaggttcagccagagctttcccgagaggtggccggcaggcgtcctggcagtttggagcggccagacaaaaccttgcatggtatgtcagtgcattggagcacgcggaatgagcgaccaaacaagcgagctggtgcagggccgtgctggcgagaatctatccaaggaggcctggtccccaaaagtgcccgacgtccttgcacatgggtcacgggtgcgtgcttgtcccccggcgtcaagacgccctgtgggcaccgagggatgacccggtcgaaggtggtcatggcgcggttccgaggtacgaactgggattccaagctgacacctcaccttcattagaaatcccagtggcgtggtggtcccaggatcacaacgggaggaacaccgagctattggacaaaaggagaccttaaccagaacacgttagacccaggagagggcacagattgaaaacttagccatgacaaaggccacgctataaacgaccggagtcacaaacgtagcaacatctcagtgtttgaaattgcactacacagggagattgataggaggtagaacagaacaagacgaaagaaatttattggggacccaggaaaatggacagatacagagagtagcacagaaacaaaatgattgagaagccagaataacgagcactgtcgacatggggtggtgagccccaagaacaggtggaaatgtgagaaaaacgaccacaagaatatttgaacagggcctgcaaaccgaag

SEQ ID NO: 715952 - DNA, 876 bp, Homo sapiens
gctacaatcgtaggtgacttggcaagaccgcggaaggctatcttaccaacagctggttggggggctggtgatccctggtgtagtagtgtaaccttaccctatagtgcttggcttgcacctctaccttgttagctcatctggagccgctcccagggccaagtctcctgacaggagattggttccctgcaaagatccactggcaacggtgtcagttgtatgacccagtgttagaatgcaagaggtcaggttattctatccctcatggtctgaaaggtccatgtccttggttccagcactcactccacgtccagagaggttctcgagaccaatcacagtgccatgttacctcgggctagtaggcactcgcgaggggagacacttgcggtgtcacaactccactggacatgcctgtggctgcgagataacccaagggtctggctttgttgcatcgctcacaaattcggtgctggcggctagttgtcccataccacccatgcagctaacgtagcgtgaggtataacaagttcccaggagccctgtcaagttgacctcctcgagcttaaaacccttcgattcttctgctttgttcgacatgcaaaatcgaacctcgcggagatcgggagggtcgactccgcccttctcgaagtatttccttataccaaaggaattccactgatgagaataactcgggtgatccgggaccctgagtcaacgtaagtcctccgtctattgcacatactttctgccgcaagagttcccagtaacgttcttcatgtgggcaagcagtcactgactccagggtgcgtgcgaagagggtcggcctgcagatcctggttgaaacatcccgggtgtgtgtccatccaggtatcggaccgg

SEQ ID NO: 715953 - DNA, 641 bp, Homo sapiens
agcggagtgcactgctagctgaggaaggaagacggacattaaggtccaatgttctgtctgtactcatcaatgcctgtgtctgggtcctaactgcatctattacagtctacactcctactatgattctggacggatgggatgagagtttgattcttacaacacctgcttagagctattggttgcccctctccacatactcttcggacaatagcgaaagccgtgaagcaagtcagttgatcctagctgtcctttcgatcgtaaccaacagcaacacgggccattggactatcgactcgtccctgtctcgtgtgcacgaagatgggtctgccgctaatactgcatacgcgcaaaaatgcgcttggaactcgttccctcccctggaactacatggttcaccttgttccactccctgaaacgtgtgactcgtcgcatctgtgacactctaggaaagccgcgatagcgagttcgtcgcgaaatatgcaaattacgagaccacttcttgacaagatggagcaacgataggtctgggagactaacaagacctagtcgctttgtatataatacctttccactgtggcattgcaagcgttccttgtcgctacgtgaagcaaggacatggactcgacctctaagcactattg

SEQ ID NO: 715954 - DNA, 491 bp, Homo sapiens
agctggagtgcagatgtgccatcccgggctctgggctcctagaccgtgtggtggtgcctgccagtgagtgggcctgagcctcgcacgtcctctgaaactacgctatgctctgcttttgctgtgctgcgatgggcgtgggaggcggggtgcttggccaaagatgggctaggggttggaggaagatggcccggtagcccgctgtggtgtccttgaggccgtactgtgcgtcctgaacccacccctgaacgctaggagacggacgcagggcctgtgaactcttacgctatagtcatgaatccgcgatggggaccgcccgaagcgatcaatcgtccttggaacacgcagccccagaacagccctgcgacagaggcatcattccagggaaggcacatcaggaacgttccattgaagaagcgatcgaatgaggagcatatatcaggccaccgcgggggaggtgtccggtcacgggggcagcaggtcatcacatgacc

SEQ ID NO: 715955 - DNA, 355 bp, Homo sapiens
ctctagaggggttggtcccatgggttaagagctccccccaggttctcccctcaggggttaagagctcagagttcagacaggtccaagttcaagcccaggccccccccttatagggtacaggtggggttcgcctgtaaatgaggacttctggaccattccaaatattctggggttgagggaaattgctcctgtctccaaaatgccaagggtggccaggccctgtggctcccccctgtaatcccacccctttgggaggctgaggtaggaggattgattgagcccaaaagttaaagcccagcctggtcaatataccaagcccccgtctctaaataaaaaataataggccggccagcca

SEQ ID NO: 715956 - DNA, 276 bp, Homo sapiens
  misc_feature (44)..(44): n is a, c, g, or t
  misc_feature (213)..(213): n is a, c, g, or t
  misc_feature (215)..(215): n is a, c, g, or t
gccccgctgtctatgaggacgatttattattccactgggggtanctggcagtggggtcatcaggtactttcaagaagggctcgtgcaggacatcacacagcctccgggctttctgagggcccaggcctgggcataaggccagatcttctcttgatgcggcgatgagctgtatccagagatccaaatgtggtcaggagggtctgactgtccgtntngttgactgacttcacggtggtcagacattcagtcacccgggagacgaagtcctgctctagc

SEQ ID NO: 715957 - DNA, 632 bp, Homo sapiens
aaattgttctgccccatggccctgctggtaacacccctttgtcctccaaacccccgttgtttcaccggcactcatttttcaatatttgccccccgcggttaatctccccccttactattggcggcgccggcgacaaatcctcaactttcaaaaggcacactcacaacttggccctcataataatcacctcttctcacaggagcttccaaaattcggtgtgcccccccaataaagctctttttgtgagaaatttttttacgccacagccccctcgctccttacctccgccctttccccgcccctattttaaccccctgtggagaaaatctccgttgtggtaggaaacagcgttgttccctgagtctcaataatcaccttctcctacttatcacggaactgcaaacactactatgttcccacgcccctaaatcttccccccttaacactaattttaacacaccaccaccaccatgggggtcatactaccaccccccactacgcttaaccacacacttaacccctctccttcaaccaccgcagcaaccacaccccaaagttcaaaaccccatcccccctttttcccctttccccccacccccaaaaccttacccgggttttcccccaaaaaaaaa

SEQ ID NO: 715958 - DNA, 555 bp, Homo sapiens
  misc_feature (525)..(525): n is a, c, g, or t
aaagatgataaacaagttgattgtcagatgttgtgtctagatgcatcgggagctcaaatagaacagatatcatatgctatgttagacgcaaacacaaaaggaagagggattctcagtcaaatactgatagttcacaaagtcattcgagtttcgtccgctctccctgtgagagcttgaggccaaggactaaacctgcggtagttgaagagtcggaatggagcaggacagctgaagcttctgctgctaaaaggggtaagagggcaaaaacagtgggatcatttcagtgtgatattgatctgtgtgatatgacatttgagactagggctgaacttaatgcccacaagcgcaatatttgcactgacgagtcatgtggcaagcgtttcagctcacacaaatacttgaagcgtcatcaatgtgtccacagtgagatgaggccatttaaatgcccctgggaaggatgtaaaatgactttcaagtggctatgggctcagactgaacatatcagggtgcacacaggagagcggncatattagtgctcagctcctgattgtgggc

SEQ ID NO: 715959 - DNA, 460 bp, Homo sapiens
  misc_feature (448)..(448): n is a, c, g, or t
  misc_feature (457)..(457): n is a, c, g, or t
gttcacatggtctttcctctgagtgtgtttgtgtcctaatcttctcttcttataaagacactagtcatattggattagggcctccccatgacctaatttaaataaattaactatttaaagaccctccaaatacagtaaccttctgagatattgagatttaggacttccaacatatgaattttagaagggaacaatttagcccataacactgtgtccaattcttttaaaattaatgtttttgttgtaaatgggactatataaataccttcgtatatatgggcagaccacagggacttctgtccaagaggaactgagttccaactccatctatggccagcctgggggcaaccagagccgagacttccaacttcgggaaaaggccaaaaccaaaaccaaaccaaccagggcaaaaacccccattttgggcttgacaggttgactttttttngggggccanctt

SEQ ID NO: 715960 - DNA, 1312 bp, Homo sapiens
  misc_feature (1312)..(1312): n is a, c, g, or t
ccgctgttcctgggacgtacggttgaccgcgcgtatgctgcagagaccatgatctgcctgactggggcagagtgctgatggcatgcacccagtgtgacatgtggaagaaccggtacagcagcccagtgtggtggacctgtgtggccatgcatgcctctgatcagctccacctgctgacatggttgtcctgcatgacctaatgcctacacacgcaacggcagatgctaaccctgcgacataccaatggacttgtcttgctgactgcaagccacgacgagacgtgcgatgctcgacgtgacacctacactggctggctagctagtacagctgtgggctacagcccgatacctactaccaatgctaggatgccccaagcattagcaatacaaggcaccagtcggaagtaagctagcgccacaagggtgagcccttgggccacccaacaagctatagagcacggagcagaccgcgtaccgccccgataccttggccagcaaagccgccaaccggccagcacacgcggtaccttagtgcctgtgacaacaccacagggacgcctttgttgctctctcaccttcaaaccgggcgatggtacccggagccggagagcccgacaaaagcgaccgcactttcgcgttaggtacctaaacgactaggccaccacaactggcgggcaaccaacctgaggtctcggtgccacacaaaccgccccgcacagtctatgggtacccccgcgcacaatcggctcgccgagggccgacctctggtggcgcaaccactgcggccatcgagaaccgcacccccagaggaccgaggcgggatcaggcccattccacgcgatgcgcccaacccgggcaaaggcgacacgggcacgccgcgcaactatgagcgcaccaccaacaacgacgaaagcaacaaagcaaccgggatctcaccacaccaggggctgacaaccgcgccatccgggcgaacacccccccccctggcgggacacgcaggctgcgctctcagcccgtacaacacacgcaaacaaagagagtcttcaacgacaacagcgtggtacccccgacaaaattttataggctacggtacgagagcccttttaccaccaccccaccttgcgtctccgttcatacttcgagcggaaccgtaagaacgcagcccaccagatagacagaccaacacttatagcgacgcaggtccatagctgacgcccctctatctgcgagcatacagcagcgcgggttgcatagtagcgaggcagacggagcgactgcgctactcacaccctacgcaaacgaaagcccaaagn

SEQ ID NO: 715961 - DNA, 204 bp, Homo sapiens
cgtagaggatccccatgcttctccccaggatgcaggttgcctcaacatacacgtcaagttaactctgattcatcccataaacagtaactaaagattaataaccatgtgattatctcaatatatgcagaataggctttcaataaaattcaaggcctctccatattaaaaactcttaaaaatcagggtacatggggaacatgtggg

SEQ ID NO: 715962 - DNA, 173 bp, Homo sapiens
ctctacagtctcatccaagacttgaagagctcccgactatgtaatactactatgtgtttaccaagtggactgttgacactgctatcgcttccgaaagaccgtatagggacgtggggattcagattaccctcgcgtatataacggaatacggcgtctaaggggtttaacgtgtc

SEQ ID NO: 715963 - DNA, 715 bp, Homo sapiens
tacaaaagccagtcggagttaatggtttcatttgcccaaaaatacaccttgggggacctcaaattctttccaaaaatcactaccacacatatagaatttgagaacattcgccacccttccaccatccatttctcgcagagaacttcaaaataaaaatgggccagtctggcccccactcgggctcctcgtcaatgggctggtctcttcttttccaggggctgcagttctgatgtagaatgatgggtggccattccagcattggggcctcgggcaggctgcatcacatgatgggcacagcatgatgttttggtgtcccgggcagtttaataagaaggcttttacactggtgtccccagcacctcggatttgggacaccaaggtcatctagcttctcacctcgctctaacaagaaactccatggttgtttgtcgcaaaatggatctagggtctcatctagttcggcctgcactttagtcatggggatcaggcttctcgagggagtactgggaatctacctggagggtgaccatccagggcggggaaagggattggtacgcaggggatccaactgggccagttctatcctgtcgacttgctgtggacaatccatctagtcccttctccagacaaggtaaaggccacccgggatgcgtatccatggtccgaatgacccacacctgaagactatcatcccggacgtaaacgtgcacaaatg

SEQ ID NO: 715964 - DNA, 123 bp, Homo sapiens
cggccggtaccttcctctcctcccacctcagcctcccaaaatgctgagattacaggtgtgagccactgcacccagccatatcttttgatttataccttaggcatatataccagttgaaaagta

SEQ ID NO: 715965 - DNA, 374 bp, Homo sapiens
  misc_feature (34)..(34): n is a, c, g, or t
  misc_feature (121)..(121): n is a, c, g, or t
  misc_feature (125)..(125): n is a, c, g, or t
  misc_feature (246)..(246): n is a, c, g, or t
  misc_feature (260)..(260): n is a, c, g, or t
  misc_feature (367)..(367): n is a, c, g, or t
tgctgcctgttaacatgatgcctttgaaactctnccgccctttgaaactttcctacccctccccttcaatccttatccctaacccaaatgagaataatgacatattgaaaacagcctctancttnaggctggccacggtggctcacagctataatctcagcactttgggaggctgaggtgggagaattgcctgagcccaggagttcaagaccagcttgtgcaatatagggagactccggctctacnaaaaagagtttttnaaaattagccaggcgaagtggcacacatctgtggtcccagctgctcaggaagctgaggtgggaggatcacttgagcccaattcaaagctgcagtgagctgtaagttnatcactg

SEQ ID NO: 715966 - DNA, 126 bp, Homo sapiens
gactattgcctgggtgactagagatcccgtgctgctcacatcggacagctgaagacaacatgaagatgtgattcagcactgccagcgagtcaaacccatcattgatctcgtccataaggtcatcag

SEQ ID NO: 715967 - DNA, 238 bp, Homo sapiens
  misc_feature (7)..(7): n is a, c, g, or t
  misc_feature (22)..(22): n is a, c, g, or t
  misc_feature (43)..(43): n is a, c, g, or t
  misc_feature (144)..(144): n is a, c, g, or t
  misc_feature (153)..(153): n is a, c, g, or t
  misc_feature (233)..(233): n is a, c, g, or t
tatctcnccttgcacatacagngtacgtaactggtaggctgtnccgcacagacagactgatctacagcttgtctagcaaaagtgattcaatcttgtgatgacctgccttgcaaacccaaacataattcattgataataatgtcncatattccngtgataattgaaatagttaaggttatatttgtttaacattgggacataattatcttctaataaagctaaagtttctgttnaaaaa

SEQ ID NO: 715968 - DNA, 711 bp, Homo sapiens
ggggaacaataaacctggctaagacaaaacaaaaaaaaaataaaaaaaaaaaaaaaaaaaaagaaaaaaaaaaaaaaaaacacaggaacaaaaaaaaaaaaaaaaaaaaaaaaaaaaaaaaaaaaaaaaaaaaaaaaaaaaaaaaaaaaaaaaagggggggccccccgggccaaatgctctttaaactgggacaatttttagcaaggggccaaaattgggcccaaatgggcaaaatgccccaaaggggggggggtaaaaaaaaaaggggccgggtcttaaaaaccgtgaaacgggaaaaacccgggggaccccaaaataaaacccctggaaaaaaaaccccttttccccaggggggaaaaaacgaaaagggccccaccaaatgggctttcaaaaaagggggccccccaaaaggggaaagggaaaatggaacggaaaaaatttggaaaaaaacccggaaaaaatgtggtaaaaacacccaatttttaaccaaagggggcaaaatggggaaaaacccttataaacaaaagaaaatcccccaaaaggggttaagggtgcccccatgtgggaaaaaggccccccttaaaaagaccgggccccccaacctaagggggaaaacacgtatatagggggaagggcccacacgggaaaccatccccaaaaaaaactttttggggcccagggccccagccctgggcccccgggggcccccc

SEQ ID NO: 715969 - DNA, 248 bp, Homo sapiens
cgaatggacggaatgttatggagagtagggagttaatagaatcaatccgaatgtaatagaatggaacggaatggaatggaatggaatggaatggaatagaatgcaatggaatggaatcaacccgagtacaatggaatggaatggacctggaactggaactcgaactggaactggacctacgaactggaactggaactggaactcaaccccgacgtgaaactggacctggacgaggacctggaactgga

SEQ ID NO: 715970 - DNA, 124 bp, Homo sapiens
tttccattttacctcccaccagatccggagatcgcccgccatggctttacttactgcggccgcccggctcttgggaaccaagaatgccatcttggtcttgttcttgcaagccccggcatgccag

SEQ ID NO: 715971 - DNA, 1472 bp, Homo sapiens
gggtggagacttacattactcctctcatgaaagcgggagtacaaaacaacatcccggcggggcggctatagtggaagccctgcttcttggtgtagacccgcagaaagttgggccacaacgagggactgttttttttcatgttgaaaggagaatctttttctataggcgccgggggtagccacacacccacaacggtgttgccggacccccacctgttggtatttaaaaagggggtttctctttctatccggcggcgatatttaaaaaggcgtaattaaatgtcgttcctgttccgccatcttaggtggtggtgtgcccctctggggccacatttttgtttgggcggacaccaacaacaaaatatggggggagatttctctttcaacgggaagcccctcttggtgtgaagacagggtggaaacatttccttgaaaacctttttctttgaacgggataaagtacagggcccccccgccttgtttgatgtaaggaacaaggagtgtctggcgacgcaaatatcacacacttcttttgtggggggggaagtatcctcccctaaaatggggatgtctgttccacacatgtttgtaaaaaaagtttcctctgtttggaaaatgttccaaataattgccacagtgtgttccacacctcggtttcgtattaggggccgtatcacaaacacaacgggaggatttttttttaggagtttggaagaaggtttttggtcgacaaaaagtgtgggttccccccctctttttgatatgatctgaagattgcctcgctgggagattttataaaagccaccgctatatatatttgtctttaataagagctggtgagacctcgtggggagagaaagacacactttcaaacacttttccctcgagaaagtctatagagaaaatatatgagaaatcgtggtcttgtttaaaaaaaatgccacccacgcgcgtatatatttccctcgatatggctgtgaaatggggtatattaaaattcttggtgtatatggtctttctacacacctggggttaagtgtggtgataaataaggttcttgcccacaccgtcttgagacggcacccacctcgtccacaatggcttgtgtaacgctatctgcacatttggccacctctgaagccacgcgtggaatgtgttaaccgtggtgttaataataaactttcctcgggctccgtttacactgagaacacatggcctaagtccacaacactcttttttcccacgtgagagtgcaacactctcctgggagtccacgtgtataaaatcccaatatcacatgtcttgtgcactaaatttttcccaaggagttttatttttgtgaaactaataatcacgtagtggaacacttaccaataataaatgtataaaaagagtttaacataccaacaatgcaacccactatccaagtgttatatcaacttaaaccccccatataaccttggacagtgacca

SEQ ID NO: 715972 - DNA, 379 bp, Homo sapiens
  misc_feature (175)..(175): n is a, c, g, or t
  misc_feature (278)..(278): n is a, c, g, or t
  misc_feature (353)..(353): n is a, c, g, or t
ttttttttaaagcagggtctcacttggtggcccaggctggggtgcagtggcatgatcttggctcactgcaacctccacctcctgggctcagttgatccttccatctaagcttcccgagtagctgggactacaggtgtgcaccaccacctctggctaatttttgtattttttctanagatggggtttcgccatgttgtccaggctggactcaagctcctggcctcaagtcatctatgctcctgtttggcctcccaaagtgctgggattacaggcatganccacccgtgcccagctgaaagcctaattctttaattccatacaaggtctggaaattctcatgggcaatacaaaanaagtttgcctcacctcctgaaaggcg

SEQ ID NO: 715973 - DNA, 335 bp, Homo sapiens
tagcggcccagacttctgtcacagctactttctgtctcgatgaatttgactatcctatgtaccttatgtaagtggaatcatacagtatttctgtgactgtcttatttcacttggtgtaatgtcctcgtggttcatctatgttgtagcttgtgtcagtgtttccttgcctttcaccctgaataatgtttcattgtatgtacaacatatagcacatatttgtttattcattttcccattgatggatacttgggttgcttctaccttttggctgttgtgaataatgtcgctatgaacttgagtgtacaaatacattcaagtgtccctttgagacactg

SEQ ID NO: 715974 - DNA, 218 bp, Homo sapiens
cagcaagaatgcatatcaggaagatatttacgttctcaccccaaaatttccacgaattggacctgaacatcagccaaatggtagaaacacattaaagccactagaatttatgttgcaatacgatgcaatggataggaactccttacagtctgctgtatctcacattgcccaggtcgcctctgtttattcccccctattctgatatgccattcttgctg

SEQ ID NO: 715975 - DNA, 212 bp, Homo sapiens
  misc_feature (24)..(24): n is a, c, g, or t
  misc_feature (91)..(91): n is a, c, g, or t
  misc_feature (93)..(93): n is a, c, g, or t
  misc_feature (95)..(95): n is a, c, g, or t
  misc_feature (103)..(104): n is a, c, g, or t
  misc_feature (108)..(108): n is a, c, g, or t
  misc_feature (141)..(142): n is a, c, g, or t
  misc_feature (156)..(156): n is a, c, g, or t
  misc_feature (212)..(212): n is a, c, g, or t
gagacagagtctagctgttgcccnggctggagtgcagtgagtcgagatcgtgctactactgcctgggtgccaagggtgagactccatctcnananagaaacgnnaaanccgggaaagttttctttactgttggttaattannaaaaagccagaccntagtttgactggtggcatggaatttgtgtatcgaataaatgcattgctattgaggn

SEQ ID NO: 715976 - DNA, 149 bp, Homo sapiens
gactgtgaggccggtggctttgccttcgcacgggcctgtgaatgtcgtgtctggcttactcgttaccgtgacactgtcgagtatcggaatcgtttccacctcacgcagtgctcacgaggttagggacgcttgtccttggtcctatagcc

SEQ ID NO: 715977 - DNA, 631 bp, Homo sapiens
  misc_feature (424)..(424): n is a, c, g, or t
ctctaacttactatcaaacttacttcaacacaccatttacccaactattgactcagctatagaatttgcaacctaactcgatacatatcgcaccacatgtgaaacctcaagggttatatccaaacttattatcacacgtactatcccctatacttactgcattacctattaactaaagatttctctacaagtaactccacaactctatacacccaactatttagcagatttataggaagatgcatcagtcctaccgaccctcctaataactctgtgtacaacatataatcctagatcaactcttaattcaactacaaatccctctacataaccttgtaaattcaactgttaatccaactaggaacacctatatgaacactactatagacactaggaaagagccttataaatatagcacccatantaacactcatagcaggcatcaattcagacaccatttaagctaaacatccacttcctcacacactacctacatattactaaactcctgacatcacatttgacacctctatcaccctatctatcaacctatgttagaactactgacattataacatacatctcacatgatcctacgtatgattcaaactctgatcttaacactaacatc

SEQ ID NO: 715978 - DNA, 297 bp, Homo sapiens
ggatcctaataccgcgtatagagacacatcaaattatccaccatactctgtgaaactggggcaccccagacacctgaacagggggacattcaagagctggtgcgaaaagatctgccaaattttctcaagaaggagaataagaatgaaacggtcctagaacacatcatggaggacctggaccaccaatgcagacaagcagctgagcttcgaggggttcatcatgctgattggcgaggctaaccttgtgcctccccacggagagagattgcacgcgttgttaaacttacgggttacccg

SEQ ID NO: 715979 - DNA, 454 bp, Homo sapiens
atacctagatgaagttaaaggtacctatatccactaagccccaaacaccatatacattaagttcaatttataagcaaatgtagagaaaagcaacaagaaatagttaactatatattaagacaaagatgattcctcaaattacttggcatccttactctgaaagcctgaaattatgtaagattcaaggcacatagtaggactgaaagtcaaaatggaaatggatatatagttacagaaatcagtgtagacctgaatatcaccagcatctaacatatttcctgcctggctcatactaggtactaaataaatgtttattcaacgaatttagtctgctacagaacctgctgatagcacttttttttttttaaaactgagcttcaatcttgtggccaaggatggagtgcgatggcgcaatcatggctcactaaaacctccgcctcccgagatactggga

SEQ ID NO: 715980 - DNA, 112 bp, Homo sapiens
  misc_feature (17)..(17): n is a, c, g, or t
gattcttgtctggctgngttccctttatgtttgaaactagaggaaataggagtatgccggtcaacttgtctggagtaactccagacaagttgaccgagtgagacgctatctc

SEQ ID NO: 715981 - DNA, 859 bp, Homo sapiens
  misc_feature (859)..(859): n is a, c, g, or t
tggaaaaacgggctatttttttccaaaaaaaaaaaaaaaggggggcccgggaaccggggttgcccatccggccctccagggcccggggggggatttggccctcccgcgattgatggtggacaaggtgactctccacatgtgcctgtgaacactttgcatctcccgggctcacaacagacattacagacatgtggctgtgggagaagatgtggtttacaaacaggggtgactcgggaactccatgtgtgtggggctccccagaggggacctcacaatattcccgaaccatttttgtccgggcgaacagggtgccatgtagaccaacaaagttcatctcactaaccacccgaggggggcccacccgcgaagtgaggggttcactagagagagggagccacattggccagggggctctacagagaggggtatctacggcggagcccacaacccccgcggcacagagtgaagcggggctctcacagcgtgataaaagaaaaagcggggcgcacaaaacagcgcgtcttctctcaccataacacagagcagagggttgcgggccccaccatagtgctctcaccagtgaggggcgtaaataacaaggcgtgtgagagatctcttgggtcccgaggacctcattcctcatgcacaaatctacaaaaaacgagggtgtgtcacagcgcgcgggagacatctttggagcgcgctcctcctggggagcaacatgttgtgctctaggggagacgtgtctacagtggggagaaagcccctcgggcacaaaaaccccgagatgtttacaacaagcgcccgggtgtcccacctcatgggggggaaacaagatccctctccggggggaatgccn

SEQ ID NO: 715982 - DNA, 152 bp, Homo sapiens
tcgtaccgcatctcagctgtcttctctacatagttacccagttcccactcgatgagcacgtgttccacatcatgcagcttcccaggtacatacatagaactcgtcacgtgggacgagtaattctttccctggtgaaagcatatgaagacaaa

SEQ ID NO: 715983 - DNA, 130 bp, Homo sapiens
gtcctagtatttcagtgccaggataaacaggtaaagaaaggctggcagttccagagaggctcatggacagtccaggcagaggggagggccctctctgtcccccttcccacgctaaccgccgctcagtaca

SEQ ID NO: 715984 - DNA, 425 bp, Homo sapiens
  misc_feature (331)..(331): n is a, c, g, or t
  misc_feature (362)..(362): n is a, c, g, or t
  misc_feature (364)..(364): n is a, c, g, or t
  misc_feature (371)..(371): n is a, c, g, or t
  misc_feature (374)..(376): n is a, c, g, or t
  misc_feature (378)..(378): n is a, c, g, or t
  misc_feature (381)..(381): n is a, c, g, or t
  misc_feature (383)..(384): n is a, c, g, or t
aagcttgcggccgccccctcccctggaggacaacctgttcctcccgccccagggtgggggcaagccgcccagctccgcacagaccgcagagatcttccaggcgctacagcaggagtgcatgaggcaactgcaggctccggccggctccccggccccctctcccaggtgatccaggcccctggcccgcgggctggtccctgcatcctgcccatcgtccgggatggcaagaaggtcagcagcacccactattacttgctgcccgagcgaccatcctacctggagcgctaccagcgcttcctgcgtgaggcccagagccccgaggagcctaccnccctgcctgtgcctctgctgctgcgcccacnancaccccnttnnncntcntnnccacggtcaccgtgcggccgatgcccaaggctgtcttggac

SEQ ID NO: 715985 - DNA, 450 bp, Homo sapiens
  misc_feature (356)..(356): n is a, c, g, or t
  misc_feature (387)..(387): n is a, c, g, or t
  misc_feature (389)..(389): n is a, c, g, or t
  misc_feature (396)..(396): n is a, c, g, or t
  misc_feature (399)..(401): n is a, c, g, or t
  misc_feature (403)..(403): n is a, c, g, or t
  misc_feature (406)..(406): n is a, c, g, or t
  misc_feature (408)..(409): n is a, c, g, or t
aagcttgcggccgccccctcccctggaggacaacctgttcctcccgccccagggtgggggcaagccgcccagctccgcacagaccgcagagatcttccaggcgctacagcaggagtgcatgaggcaactgcaggctccggccggctccccggccccctctcccagcccggggggtgacgacaagccccaggtgatccaggcccctggcccgcgggctggtccctgcatcctgcccatcgtccgggatggcaagaaggtcagcagcacccactattacttgctgcccgagcgaccatcctacctggagcgctaccagcgcttcctgcgtgaggcccagagccccgaggagcctaccnccctgcctgtgcctctgctgctgcgcccacnancaccccnttnnncntcntnnccacggtcaccgtgcggccgatgcccaaggctgtcttggac

SEQ ID NO: 715986 - DNA, 561 bp, Homo sapiens
  misc_feature (12)..(13): n is a, c, g, or t
aaagttgcaggnncaccatttaaagctaatacgttaatagccttcaccaagctattaggagctcctacacacatcctcagggattgtgtgcacattatgaagctggagctgttccctgaccaagcaacacagctaaaatggaatgttcagttttgcctgacgatccctcccagcgcgccgccgattgcacctcctgggacgcctgctgtggtgctgaaatccaaaatgctattttttcttcaactaactcagaaaacatcggtccctccccaagaacctgttagtattatagttccaatcatttatgacatggcttcaggtacaacccagcaggcagacattcccagacagcagaactcttctgttgctgctcccatgatggtcagcaacattctgaagaggtttgcagagatgaatccaccacgacaaggttcgatcaaggggactggatgcccaagtgattttctctaataatcgggttgggacttaactttaaggtgttttcaatgtgattttagtatttacagtaataaataaaatttatacaaagtttcagagaaa

SEQ ID NO: 715987 - DNA, 856 bp, Homo sapiens
ggatgaaggggtacccctagcgagatgtgaagtgtgggttatggttaagcgaaatgcttaccatcccccacccccaacgcaagttcttccagactaaaggaattaaggtaacgatcgaatatcgctaggcctgagaaataaccccatccttgattggagcaggcgtccctgctttgtcctgcactgaacacgagttgatgaacgtggggtgtgggcaacaagtggctttccttgcctacttatagtcacccagcgaagagccacgtgaagctgcgctagatccagcccagaccattggtgtcctgactcttccactaatgggactcctcacccttccactttcattgcaagaaggcccagttgccacagattatacaatccattacccaaaccactctgacaggtctcctccagttccaggcaatgcctacagacgatgctccctgcccgtctccatcagtgcatgctcccacatcactctagacctttcgttctggaaaccccagagagggctagggcgttgactcatctcagggaatgtagcccctgggcccctggcttaagccgacacgtcctgacctctctgttcaccctgagggctgtcttgaagcccgctacccactctgatggctcctaggaggtaccatgcttcccactctggggcctgcccctgcctagcagtctcccagctcccaacagcctggggaagctctgcacagagtgacctgagaccaggtacaggaaacctgtagctcaatcagtgtctctatactgcataagcaataagatcttataaagtcttctaggctgtaggggtggttcctaacaaaccacaggccataaacaaaaaaaacct

SEQ ID NO: 715988 - DNA, 171 bp, Homo sapiens
tcatcggctcggtacctacttttccacaggtgcattttagtcttcctcttctatttgtattcccttctctgacagtgaaaaacctggctccttttaccctccgtatctttacttattcactcaatcctagaatatgcagaaagtaatttgagaatgctaacccacaccacg

SEQ ID NO: 715989 - DNA, 375 bp, Homo sapiens
ctgcttgagaagcaggttgaacggaccttgcgtgccgccgccgatcacggaaatgcccaccgtcttgcccttgagatcggcaatcgtcttgatcgttgagtcatccatcacagcccagtagaccgaaaaaccgccgggcttctcgaagacgtgctgagccacgatgtaggccttgagattaccgccaaccacgccgttggcgagcgagagcggcgcctgcgtcgcgcaatcgagcgcaccggcagccaaagcctgcgtcatcggcgccgtgccctgaaactgggtccattcgatgttgtaggccttgccgatattgggaaattcagccgggggacgcatcatccagtacttggactcctcggccgggatggtcca

SEQ ID NO: 715990 - DNA, 162 bp, Homo sapiens
  misc_feature (112)..(112): n is a, c, g, or t
gtatccgctacacacacaggattcctaaagaacatgaagaggcctgaagatctcacctggaagctctgtaaaattatcagaaagaatagcaggtgctcctagggcaacactnactcaaacctattggtccacgcgatggacacgcattggcatcgtctgggg

SEQ ID NO: 715991 - DNA, 110 bp, Homo sapiens
actttaagttgctctaagaagtttcctatgtgagtcaccgtgcccagtcttttatatcattttaagtttattaaacattaggtagagtgttcaagtggacattattttag

SEQ ID NO: 715992 - DNA, 1116 bp, Homo sapiens
  misc_feature (427)..(427): n is a, c, g, or t
ggcgttcccctgcgctcgaggcgcgtatggttggggtcctcgctcaagccccgagactcgagctccgagcgggtctggcattctccagaggcatcatgacggaccgctcaacagctcgagtatcgatactgaaagtgcaacccagtggtccggacctaggatcgagaatatcatgtgccactagtatgcccgagtgggcaggaccatattgcactcatagcaagtccagaaactgtcgcctagcatactgtcggagcggtagtttcgcgtatatgaacatccaaactcaagatagaacatataacaatacaagtgggcatatattcattagtcatgctcagatcggaaagatccaacgtgtatgcatgatcgttaggacatcctaggctgcagtgcgtagggagcggggaactttggagacgagacnaatgaacaattctatcgcgaagatggcagtgaggatgcgccgtaactcggtgcgcgaggacaagtagatgttttcacaacctgtcgatatgccttcgtgagacggggagggtctccgggaagtgagacgaaagtatcgggcgatcagtccattccgtaggatggttccaggcgcccgaagggaaccaagcccctagaggcttgactccgaggtcaaacgggccaaactcagggcacggacaaagttcacaggggcggcatcacacgaacggggaaggctgtaaacagatgaaacacgtcctactacaatctttcagcccaagtgccccggacggggggcccttcgaatggccttcccccgtgtcacaaactgtgggtcacaaattttccacaacccggttaggccccgggcattcgcacggcttcacttggccggaagagggcccgaaggagaagtggcgcagaagtgacggcaaccaaaggtggctcagaaaagcacgattcaggcacatcatggcacggacacgggacggccccaaggaaccaggacccagggacgacagatagaagaaggagaacacggcgaaaccacgggcgcccgaaaggggacggagacggccaccacaaaccaggaaagagcacagaaaacagcccccatcccagcatcccaggtcaagcacgggacgaacc

SEQ ID NO: 715993 - DNA, 114 bp, Homo sapiens
ggaaacaaggcagaagtgatagttcaagtaagcaaggatgtgtttgagctgacagacgacagctttgataagaacgttctggacagtgaagatgtttggatggttgagttctat

SEQ ID NO: 715994 - DNA, 490 bp, Homo sapiens
ttttgcggtgccttttccagagaacaaaagaggcaggtgcagtgggtcatgcctgcaatcccagcactttgagaggctaaggcaggtagatcacttgaggtcaggagcccaagaccagcctggccaacatggtgaaaccctgtctctactaaaaatacaaaaattagcctggcgcagcagcatgtgcctgtaatcccagctactcgggaggctgaggcaggagaatcgcttgaacttgggaggcagaggttgctgtgagctgagatcacgccattgcactccagcctgggcaataagagggaaactccgtctcaaaaaaaaagaaacatagtcgtcagggaagaccttactgcagagacatgtgagtggagacctgaaggaactgacgagggaaggagtcgtgctgatatctaggaggaggaatatcccaggcagacggaagagaggcacaaagtcttcgaggaaagggcaccgccaaaggctaccgagc

SEQ ID NO: 715995 - DNA, 110 bp, Homo sapiens
ggctcggcaccttattcgtgttgcactgcaatctgccagctatcacactaaatgataatccaaactagaattaatattcttaaagtaccacaaaccagcattcaatgttc

SEQ ID NO: 715996 - DNA, 102 bp, Homo sapiens
ccttatgtttgacccacctgtatgctgccttcttgtgcgtttctcggagaagttcttatgcctgatgaaataacttggggcgttgaatgagctgtttaattt

SEQ ID NO: 715997 - DNA, 797 bp, Homo sapiens
gccaaccttgaccactgtgcctgggccggctctgggagcgcaccctccccaggggccctgctgcttccactggctgtgctctccctacgcaccctgttctgagggtgcaggtcccacaagcccgcaatggacagccagctcccctccttttgtggcccaccaccgggcagcccacactcaagggagaggtccaggcaacttccagcaggaacagaagttcgctatctgccttgcctgtatctggaatcctccatgggccagattcctggctctgctttattccctagttattgccctttggccagcaggtttctctcttgggcaggcaagacacagactgcacagattcccaaagcaccttatttttctaccaaatatattctccagaccctgcaacctccatggaacattccagatctgaccttctctcctccatcccttcccttccctctggaacactgggccccatagtcacggccagtcctcaagcccaaccctccctggggggaagaccaggtctgctcaggatgagactcccaggaagccacctccggggttggctgtctacccagggttgccaagctgggaagaacactccagccggacaggacacacacacacactccccacccaattgcagagactcgccaacccttcactgaagtggctctcctgtttggaatagcggggtggggtgggggagaagaaagaaagaaagaaaaaaaatttttaatttctctttttggtgttggttaaaagggaacacaagacatttaaataaaacatccccaaatatt

SEQ ID NO: 715998 - DNA, 540 bp, Homo sapiens
  misc_feature (283)..(283): n is a, c, g, or t
tactgctacctagtggtactgctacctagtggtactgctacctagtggtactgctacctagtggtactgctacctagtggtactgctacctagtggtactgctacctagtggggtactgctacctagtggtactgctacctagtggtactgctacctagtggtactgctacctagtgtgttcaaatgatccaacagaggaaatcttggaagtaagataatgctggctggcatcactcacttggaaaccttggcagtccagagttaagttctctcacctcaagnacccatttcacatttctaaaaatctccaggaggcagtatgtccccacggtttctgggggtcatgataaccgattttcctgaggtaataactgtgagtttcaactcaaatgcagcatcagtgtcctcactgctcgacgtgttctctctgcagtcccttccagctggctttattcaggcccacgtgtccaagcatagtctgggatagccttgtattgggaaacctggcccattctgtaaattaagggcccactaagtag

SEQ ID NO: 715999 - DNA, 297 bp, Homo sapiens
ctagaggatccccgtaagatcaacgcgaggatgagagagagggagatcagagaggacgaaagaacgacagctatagaaagagaagacagaggacgagcagatacacggagagatcgagacagactagagagacatcacaaactgggacctccaccacatctagcagtaagtgagtcgagaccatggatgcacgaaggagagagagtgagaagtctctagatcatgaaacagtctataaggaggaagattggcagtctccaacttctaagtctcgtaaatctgatcagcccctatagg

SEQ ID NO: 716000 - DNA, 230 bp, Homo sapiens
tactgctacctagtggtactgctacctagtggtactgctacctagtggtactgctacctagtggtactgctacctagtggtactgctacctagtggtactgctacctagtggggtactgctacctagtggtactgctacctagtggtactgctacctagtggtactgctacctagtgtgggtgctatagggtatatacggccctatttcaaagatttttaggataagctt

SEQ ID NO: 716001 - DNA, 269 bp, Homo sapiens
tactgctacctagtggtactgctacctagtggtactgctacctagtggtactgctacctagtggtactgctacctagtggtactgctacctagtggtactgctacctagtggggtactgctacctagtggtactgctacctagtggtactgctacctagtggtactgctacctagtgtgtactgctaggtagcaggtactgctacctagtggtactgctacctagtggtactgctagctagttggtactgctagctagtggtactgtta

SEQ ID NO: 716002 - DNA, 295 bp, Homo sapiens
cctattcatatcggttttttaccaggggtgctcatggctatacacaccctcccttcatagatcaggggtgtagacaccctctctccatcgctcagcggcttttaaaccctaaatacatcgctcaggggttttcacaccctctatccatcgctcaggggtgtggacaccctttctccatcgttcaggggtgtagacacccgcctttcatcgctctaaggagaggacaaaatttctatgtaacggggtgttgacatcctctttccatcgctcaggagcgtagacaccccctctccat

SEQ ID NO: 716003 - DNA, 210 bp, Homo sapiens
cagctgcaggctgccacctgtcatagtgggcccgcaaccagtccagcaggacctcctcggcgcgcaggcaggctccagtgctgatctggcctgggaaccgcgattaccgcaggaatggcggcgtcaatgcatttcagcacccgcgatgcgatgtacaccggtctggctggcgggcacgatccagcggttgacaagcacacgcttgaacgg

SEQ ID NO: 716004 - DNA, 349 bp, Homo sapiens
tagtatgacatgcctgagccaggatcaaactcatcaagcggcatcaagcagacatcaagcagacatcaagcagacatcaagcagacatcaagcagacatcaagcagacattaagcagacatcaagcagacatcaagcagacatcaagcagacatcaagcagacatcaagcagacatcaagcagacatcaagcagacatcaagcagacatcaagcagacatcaagcagacatcaagcagacatcaagcagacatcaagcagacatcaagcagacatcaagcagacatcaagcagacatcaggcagacatcatgcggacatcaagcagacatcaagcagacatcaagcaga

SEQ ID NO: 716005 - DNA, 343 bp, Homo sapiens
ggtagggcaacctcacgtcttccggcttgtgagcgtgaggtagatctcatagatcttccctcgggtatggcatctggggggatgaggaggctgattcctgtattagggatcatcagccgtgccccgaggaagttgaaggtcccataggtcatgttgctggtcgctcggggcagtggagctggaagtagttctagggtggagaggcgggcagagaactcctcgggctcagagggtgggagagctgtggtgcagtgtgtggcggacgccaacccaagggggctttagcaggtccccattggtgagctggaactttggggctgggcccatcctgccggggaccatg

SEQ ID NO: 716006 - DNA, 506 bp, Homo sapiens
ggggagcagactcatggaagagaagcagatcctgtgcgtggggctggtggtgctggacatcatcaatgtggtggacaaatacccagaggaagacacggatcgcaggtgcctgtcccagagatggcagcgtggaggcaacgcatccaactcctgcactgtcctttccttgcttggagcccgctgtgccttcatgggctctttggcccctggccacgttgccgacttcctggtggctgacttcaggcagaggggcgtggatgtgtctcaagtgacttggcagagccagggagataccccttgctcttgctgcatcgtcaacaactccaatggctcccgtaccattatactctacgacacgaacctgccagatgtgtctgctaaggactttgagaaggtcgatctgacccggttcaagtggatccacattgagggccggaatgcatcggaacaggtgaagatgctgcagcggatcgaggagcacaatgccaagcagcctctgccacaga

SEQ ID NO: 716007 - DNA, 293 bp, Homo sapiens
  misc_feature (119)..(119): n is a, c, g, or t
  misc_feature (136)..(136): n is a, c, g, or t
  misc_feature (145)..(145): n is a, c, g, or t
  misc_feature (165)..(165): n is a, c, g, or t
  misc_feature (170)..(170): n is a, c, g, or t
  misc_feature (226)..(226): n is a, c, g, or t
  misc_feature (283)..(283): n is a, c, g, or t
ctagggggagaaaaaggaagaaaggaagaaaaaaaaaagaagaagagtggacaacgaggcggggggaggaggggggaggtgagtggggtggggagactgaaggggggtatggggttggnggtgtggggcggtgtgnggtggaggngctaagaagcctagagaagnctgtnagccaaggaggcagggtcttcctttggcatgggatggggataaagtaaggacaggncctggaccccctgaaagctgattcactatggggggaggtgtattaaagtcctccagncaaccctcag

SEQ ID NO: 716008 - DNA, 879 bp, Homo sapiens
  misc_feature (780)..(780): n is a, c, g, or t
  misc_feature (783)..(783): n is a, c, g, or t
  misc_feature (785)..(785): n is a, c, g, or t
  misc_feature (791)..(791): n is a, c, g, or t
  misc_feature (803)..(804): n is a, c, g, or t
  misc_feature (811)..(811): n is a, c, g, or t
  misc_feature (832)..(832): n is a, c, g, or t
  misc_feature (868)..(868): n is a, c, g, or t
atggaaggagcaggctccatgcatgcatttgggctctgtggaaaatctggccagggatgcgggcctttctgaacgccgctttcattgtgccccctgcagcattatctcttcaatgcgatgtccctgctgactgaaatgcagagaagctactaagatccacacaccagttgctgcaatcggtgccctgctgtttgtcccccattcaccccaggtgattcagctcttctggcactcccagtgattcctgtgggacaggcccatagtggacttcccacgaagattcccagactgggggagagctctaagatccacttccaattcctttgtctcacctaggagactctgggtttatggaagttctctctgattagtgctgttgcagctgggtttgggggtcatgtagtctaaatgattgtttctcttactggtggtgatttttccagtttctgtgggcccagtggatttctctgcttctccttagagttctggtgaactcagaatgttagtgttattcttttctttgaaaatagtttccatttgtaatttgcttggagagtgattctgggggattctattctgccatcttgctgctgtcactctttaataagatttgtaactaattctcaaattgttcatagtcttaaaactacatagagttgatttcatacattttattatgagaacaataaaagtattttgtgtctttgctagtgagatttttagttatacagaaattacagtgtttcctgctatgatcaatcattccagattcatttactntgntnaaatgntatcatttggtnncatatgnatatttattttttttctgaanaccccaagcatatctcctactatccggataatatanattagtagttc

SEQ ID NO: 716009 - DNA, 506 bp, Homo sapiens
  misc_feature (53)..(53): n is a, c, g, or t
tggcaatcaactcattcctcccaatgcacaagtgaagaaggccactgtttttntcaatcctgcagcttgcaaaggaaaagccaggactctatttgaaaaaaatgctgccccgattttacatttatctggcatggatgtgactattgttaagacagattatgagggacaagccaagaaactcctggaactgatggaaaacacggatgtgatcattgttgcaggaggagatgggacactgcaggaggttgttactggtgttcttcgacgaacagatgaggctaccttcagtaagattcccattggatttatcccactgggagagaccagtagtttgagtcataccctctttgccgaaagtggaaacaaagtccacatattcttatgccaaattgccattttaagggggccagtcccttcattgttcacggtcagggtaaaaggccacccttttttcaatcccgccttggtgggctttagagtcgtcgctaaagacgacgctggctttg

SEQ ID NO: 716010 - DNA, 582 bp, Homo sapiens
  misc_feature (53)..(53): n is a, c, g, or t
tggcaatcaactcattcctcccaatgcacaagtgaagaaggccactgtttttntcaatcctgcagcttgcaaaggaaaagccaggactctatttgaaaaaaatgctgccccgattttacatttatctggcatggatgtgactattgttaagacagattatgagggacaagccaagaaactcctggaactgatggaaaacacggatgtgatcattgttgcaggaggagatgggacactgcaggaggttgttactggtgttcttcgacgaacagatgaggctaccttcagtaagattcccattggatttatcccactgggagagaccagtagtttgagtcataccctctttgccgaaagtggaaacaaagtccagtaggcattatgtaaacaaagctctgctctttcaagaagataggagtcctgaatttgagctttgacagtgattaataacatcattttgagcaaatagttgtcaagaagacccaaataaatggagagatagctgagagatcagttgcctgatggttaacgtaagctttgtgacacattggaggaagtcaataaataaatatttgttgcatg

SEQ ID NO: 716011 - DNA, 236 bp, Homo sapiens
  misc_feature (103)..(104): n is a, c, g, or t
caggtgcacccccccgggcctagggaattgcgggtatactcactgctattagaattgagtccggctgcttttagaagctgctcagtcccaaaagggtccgctnnggaagttaatgcggttcgacgagatgggggtttgcggcagtccgtaatacgcaacacggcgaggcatgcggtgagactcgcgcatcaatcgcaatcgaatctacgctatatctaatgcgctattctaatgca

SEQ ID NO: 716012 - DNA, 420 bp, Homo sapiens
ttagcgcagcctatataccagccatcttcagcacaccctgatgaacggctacaaagtaagcgcaagtacccacgtaaagacgttaggtcaaggtagtaacccatgaggtggcaagaaatgggtctacattattctgccccagaggacacctctacgggccctctcagccctcctaatagacctccggcctagccatagtgatttcacttccactccataaacgctcctcatactaggcctactaaccaacacactatccatataaccaatgatggcgcgatgtaacacgagaaagcacataccaaggccaccacacaccacctagtccaaaaaggccttcgatacggaataatcctatttattacctcataagtttttacttcgcaggatttatctgagccttttaccactccaacctag

SEQ ID NO: 716013 - DNA, 114 bp, Homo sapiens
cctgctattacagtattattctattatataaagttaagggactactgcctctgataacctgataaaaaaaaaaacaatttatcgatactacaaaatataaaatttcttacagtc

SEQ ID NO: 716014 - DNA, 236 bp, Homo sapiens
  misc_feature (70)..(71): n is a, c, g, or t
gcttggaccagcattatactgtggacatgacagaaactgagcactctatccagcacccagtcaccaaganntgccacggggcggcattcggtccattgcagggcctaccaggcccaattccttggttgaccccaggttcttgggaaccacttcctttggcccttttgcccttaaatttggaaccttaccggaaaccattcttggccttcattggttggcaagaaaaccaaaacggg

SEQ ID NO: 716015 - DNA, 796 bp, Homo sapiens
cccctgggaaggccagagacttgccagtgtcccatctagcgggctcttcgcaagaatccccccgggcccgtcgcagccaggcggagagccggcagagggcgctgctcgaggacaatggcggaggacgcggagcggtgggacctgagttcgagtcttgcggtatactgcggtcttcggtgcacggagcttgtggactccggagcgcgggcggccacggtgcagcaggcaccacacgttccgcctgacgagagtcgggggcgtcgagcatactgtccgctgtgattgcgcgagctgtgagctaacaccgcatttcgtagaccccgtgcgagtgccgctttgcgaggctgtcctgtggtcttcaatggcccaaagaccggtgggccgcggcccggggggaccggacggggaacaacgactagacaacagggaaccggcgatgagtgcactcgtgcatggggctcctcgcagggtgctggcgtcggccgtggccgggcgccgtgagcggctgttgactagccagggtctggagcggcacggaatcaggcgcgtgcgtaggggagccagttgtggggcccagaatagtggtagcccagaggccgaaggggaagacgatccggccgggtgagagcccagggctgggaggctaacgcccgtgctgtcctgccgcctgtgcctacgtgagcccggagggcgcccattctaccggcctctggctccggagctgccggccacgccagctggagctgggcgccgagccaacgcgttgctgcgtggacgctgctgggcagtgttctct

SEQ ID NO: 716016 - DNA, 147 bp, Homo sapiens
ttaggtgcatgcatgtgaaagggaagaggcgctggtggttgtgctttgggcctgagcagcagaagcctgttgcatcacctatgacaagggagacagcgcctgggtgagagcccaggtatggggtgcattcaggggtagactcaggag

SEQ ID NO: 716017 - DNA, 411 bp, Homo sapiens
gtgctttatttaaaaaaggggccaaagttcctggctttcgtttgctttgtcaaaaaggaaagctttgaaaaaaaaggggtaattgcctataattttccttgcttccggagggccattcatgaagtttttgaggggagaatgaaagtagtaaaatctcgaaaggttcagaatcggctgcaaaaaaaaaaaagagccccccctaatgggccccccaaagtgctgctgtaggtggggtttcaggaatgttttttgaaatcagcccttatccatgggggtgggggcccctgttgccctaaaggaaaaggaaaaaggggattgggccccaaccccttgttttgttgttaaaaaaaaaaaattcccgccccccttttgttttttttttttataaataaagtaagccctttgaagcca

SEQ ID NO: 716018 - DNA, 198 bp, Homo sapiens
catcgatccacataaattaccgattttgtcagctactcggaaaaaaagcgtacccgcggggaacgctttctcgacaagatcaagccgcgttctgctgccatgcgtaccacggtactggtggtttttgtggtctgttttagcctgttcatgtccttgtggttcttttggcgtaccctgtttttacctgaaatccagcaa

SEQ ID NO: 716019 - DNA, 292 bp, Homo sapiens
gctccccaacaagataggacaaacattcttgaactaatgaaaagacagaatgtctcagcaaagaaacagaggatataaagaagaatcaaatgaaaattttagaactggaaaatataacaaccagaacataaaaactcacttgatgagttcaacagcagaacagaaatgacaggggaaagagtcaatgaatttgaagtcagatcaacagaggtatcaaatgtgaacactgaatttcaacactaaaggaaaaaaacttctcctgtttttttgttttttgtttttttttttggag

SEQ ID NO: 716020 - DNA, 388 bp, Homo sapiens
  misc_feature (5)..(5): n is a, c, g, or t
  misc_feature (54)..(54): n is a, c, g, or t
  misc_feature (90)..(90): n is a, c, g, or t
  misc_feature (112)..(112): n is a, c, g, or t
  misc_feature (267)..(267): n is a, c, g, or t
  misc_feature (345)..(345): n is a, c, g, or t
gaaangcgaagaaggaagctcctgcccctcctaaagctgaaaccaaagcgaagnctttaaaggccaagaaggcagtgttgaaaggtgtcncagccacaaaaagaagaagatncgcacgtcaccaccttccggcggccgaagacactgcgactccggagacagccaaatatcctcggaagagccgctcccaggagaaacaagcttgaccactatgctatcatcaagtttccgcctgaccactgagtctgccatgaagaagatagaagncaacaacacacttgtgttcattgtggatgttaaaagccaacaagcaccagattaaacaggctgtgaagaaactgtatnacattgatgtggccaaggtcaacaccctgattcgggctgatgg

SEQ ID NO: 716021 - DNA, 437 bp, Homo sapiens
ctctcgagggtaaaaggacttgctgcctgcactgtgccatggctatggggggaaatttggggcggaacatgaccgaatggataagtcagctgtcgtccacgaatagcagtcgaaactttccaagcactgctcgcaggtggactcggtccgtggcttcggaggcaagtttggtgtccagatggacagagttgatcagtctgctggaggctttgaataccaggggaagactgagaagcatgccccccagaaagactactccagtggttttggcggcaagtatggcgtgcaggccgaccgagtagacatgagcgcggtgggcttcgactaccagggcaagacggagaagcacgagtcacagagagattactccaaaggtttcggcgagaaatacggtatcgacaaggacaaagtggataagagcgccgttggctttgagt

SEQ ID NO: 716022 - DNA, 202 bp, Homo sapiens
attccttccacgacagaaaaacatacaagacttccttcagccaacatgatggtactgaaagtaggaggaactggtcactggaaagaagaatggcaatggggaggcaggggaattcttcctgaggatttcagagatggagagtataaggctgctgttactttagagaggcaggaggatctaagacacttctagcccaccctgt

SEQ ID NO: 716023 - DNA, 420 bp, Homo sapiens
  misc_feature (115)..(115): n is a, c, g, or t
  misc_feature (219)..(219): n is a, c, g, or t
gagcgttatatagtgagaatcataatatggatcaaccattccctttctacttgttggtgtatagatcagttaaataaaagtcaactactggataatgttgtttacctgagcctgnctggaacattttccacatcctcacagactatgtttgtgtcatttgtttgactaaaaatacttagtttccctggggttcccatgtgacagtacgccagtgttggnctaagctaaactcactttctcaataggactgatggacgccgctggtcgttggcttctctcccttcctctggctatgggacaaacacacccagctctacggtctctgtaagtgcctgactttttttttttttcttttcctcaaaaaaaaggagttttaaaacgggcggtgtttcctctggggtggtccctgggtagggagga

SEQ ID NO: 716024 - DNA, 224 bp, Homo sapiens
tgaacttatgtaaagtctgatttactgagcatgagaagaacacataattgactattcctgtacctgctccatttctcctgcaacatgtggatacagtaatatgatcataccctcccttgttcccctctaggccactttcccctttaaatattaacaccatcataatcatctttggagaaagacacctggatctgtcctgaaccttggcaaaaaataaataaata

SEQ ID NO: 716025 - DNA, 931 bp, Homo sapiens
  misc_feature (374)..(374): n is a, c, g, or t
ggcgcgtttcccgtgatcagttcccggcgtcggtggatgatgggacgtgaaagaaatcgccatctcgtgtcgacgtgttggccggagactggatccctgcgctgcctggctggcgtccgtgggccgttctggaggctccctccgcgcggctgcacgagtggctgtgccgttgccccgtcctggggctcggaggctggctgatgtgcctcgcgtggcgcgtggggtagtcgtatggcgtatcgtgcaagacgcggtgccgtcgtgcgccgcgctgactagggtgtgggtccccggtgggtctgtgcgcgtgggtggtagcaaacaatgctcctgtcctaacggaggagtgctaagagtgcttacagcgcaccgcntgcccactcacgcatgaagactcaagggccgcagcagaagtaaagatttgggcctgcatgactactgtttgtattgcaggtttaccctttgtctttgactaacattcagagtaagtcgctcaagcataggatccaaggtacacagagaaccacatttcccttgagtcctttggaaggaactacgccagacattgagaggaaagaaaacgaagatccattccgagcgagaccattgtgtagggagatggcaccgcccaccgtgaggggatatacacatttgagagagcttaccctttaggattgggattggacaaggattattttcccttcgagtggaaacccctgttgtattagctttagagcggtcccgggtacggccgcctttgaaccgaaggaaacaagaggaagcaaagagggcgcccattagacgacaacggctaacttttcgacgtgtcacggaaagggtgccctaaaagggaacccttttcgcaaatgtagaacattacataaagattgccaattgacaaagacccgagaacaaccacaatggacacacc

SEQ ID NO: 716026 - DNA, 169 bp, Homo sapiens
ggaccccgggttaagccttttgggtttcctttgggccttttccccacaaaatcaaaatttaatttaaccccctttcccccttccccaagggttcccttttttttttttgggaatttttccaatgaaaataaaaaatcagctgggggggataaaatttagttgggtccca

SEQ ID NO: 716027 - DNA, 451 bp, Homo sapiens
tatggccccctatggcgcacattttgtacgaacacaacaattttaagcctctgtaatttttggccctgctctaacaaccggcgtaaatttaataaggttcggttttgccagtccccaaaagagttttttaaaaaaaaataccacccttttttgttttttcccccaactttagcaaaggagaatcttgacccctttatttttggggttttttaaaaaccccaagggatataaaccccctttcaagttgttccacgattttgttcccccagagggtctttcatcaaaaaccttattttacccatcaaattttttgtccccaggccgaaaagtaggtatttaaacagctcaatttcggttctataaaaaccgcaaacccaatttgtgtcctgggccaaagttacttaaaataaataaaccggttttttggtttgtaaaaaaaaaaaatttgtcc

SEQ ID NO: 716028 - DNA, 265 bp, Homo sapiens
gctgaccctaaggaaatagactgcagcaccaatgggccaactttggggcgatcatcttgcccagaaacatcatgttgaaactcttggtcagaggttggatgaaagctgacagggtccatccaggagcaagtttgagccttgccagttcattttgggtgctgagtgagtgcgactatagcaacctgtgatctctggctgctgctcagaagaacaggagggaaggatgagtatgttaactctgggtcaatattctgatctgggctct

SEQ ID NO: 716029 - DNA, 585 bp, Homo sapiens
gctgctgagctcctcacctggacagtctcctggacgaggagtttccagctgctggctggagtctcaggaccctggagggcactggactaagagtctagtggttccaggacccctgaccaggtaggtgactcaactaaatgtttgttgttgaatgaaaacaatagaaagaaacatgaaagaaagcccaggcgggcatctatctggcggggtggcgagggaacgggggtacctgaaggggcccatggtgtccttgaggggattcccctgaagccaatgtttctctgtgcgatccatagtgtgggccagatcctggcgcgcgggatctgctcggatataaggggagaagccggccactaattctcgtcagagtatcgccaggaggtgtagccctcggtggtctacggagaaccccgggggagaaatagccagccggagccggtatcggccaggcaagcggattaggacgacttgtacttcccaccccattttgggggacttggctggcgggcaactgctccgcggctgcgacatacatatagtgatccttggttttgcggacaataaatgataaacggaccatagaat

SEQ ID NO: 716030 - DNA, 1366 bp, Homo sapiens
tttttttttttttttgctttgtacttgagtttatttcacaaaaccacggagaaagatactgaaatggagctctttccagcctccaagcaaggaggccccagcagccagtctccagccccttgagccctttttgttaggcccacacccaaaagaggagaaccagtgtgtgcgcgaaggtacatggcaaggcacttttgaaaacatcccagtttaccgtggtgaaattgaacttactctgaaacagatgaaaagggacatgcaaatttgctgagcacatggaggtgtttgttagtaggtgaaaatcatgtcctgggtataacccagcttctccaggttagggtgagccgccgtctggatcagtggtggcgggccacacaccaggatgagcgtggacttcgctggaggaggaaggtgctccttgatcatgtcggcagtaacgaagcctgagctgtacttccagccaatgggaggcctgtccagggtgtaccacaggtcgaactggtctgggtgagtcctggcaatttcttcaagctcttttctgaccaagatatcctcctctgtctggttggcaaagatgagggacatcctggtcctgtcactggggtccttggtgatgtggcgaatgagctgcaacatgggtgtgatgcctgtgcccccagcaatcattcccaggtgatcggccagtgtttttttaggctcactcgtctggtctggtctgattccaagattccctggcccatggtaaaacaagcgtccccttggccctcgaaaaaagatggtctccccgattttcatgttctccaaatactgagtcatcttcccaccttcaggatattgggggtgtacatttttgaagtagatctttataattaggtccacaaagcctctgtcatcatcactggagacaggggtgtaagccctgaccaccaattcattatcgatttttgccaagagctggacatagttacctacaggaagccctaagacatggtccggcgaaggcagtccaaagcggaacctccgggtgttgtggctgattttctctttctcaatcaagggcagcgggtacttggcttcagggtcctgtaaggtgattggctctctcctcctggagttcatgctcttcaggaccaacacgagcacagtgaccccagtgacggtgatggtcaggagcagggacgggtccctacaaggccgccctgctcctctcccaactcaagcccgacagggaaagttgcctctcctcccgccgggtcactggagtctcagccttccggaatccgagccggcccgccccgctccccgcccttcgcggtcccgcccacgacctctccccacgcctcccgctccggcccccacctccgct

SEQ ID NO: 716031 - DNA, 169 bp, Homo sapiens
ttcacagatcagtctgcgatgatcatagtcagagaacagatgatagattaagaaatggtttttcttgaattcgagaagcatagatctgttctccatattggtatgttctccctcaaccaagatcttctaaaaagaaataatattttagtcttctgcttgaggaactgac

SEQ ID NO: 716032 - DNA, 1479 bp, Homo sapiens
tttttttttttttttgctttgtacttgagtttatttcacaaaaccacggagaaagatactgaaatggagctctttccagcctccaagcaaggaggccccagcagccagtctccagccccttgagccctttttgttaggcccacacccaaaagaggagaaccagtgtgtgcgcgaaggtacatggcaaggcacttttgaaaacatcccagtttaccgtggtgaaattgaacttactctgaaacagatgaaaagggacatgcaaatttgctgagcacatggaggtgtttgttagtaggtgaaaatcatgtcctgggtataacccagcttctccaggttagggtgagccgccgtctggatcagtggtggcgggccacacaccaggatgagcgtggacttcgctggaggaggaaggtgctccttgatcatgtcggcagtaacgaagcctgagctgtacttccagccgaggtgtgtgaatcagtacagccagctggagttgtccggcagggtgtggcctggtgttagtggaactgcgcagaattgctcagtagggtagcgccctctgccgaccagggaccaatgggaggcctgtccagggtgtaccacaggtcgaactggtctgggtgagtcctggcaatttcttcaagctcttttctgaccaagatatcctcctctgtctggttggcaaagatgagggacatcctggtcctgtcactggggtccttggtgatgtggcgaatgagctgcaacatgggtgtgatgcctgtgcccccagcaatcattcccaggtgatcggccagtgtttttttaggctcactcgtctggtctggtctgattccaagattccctggcccatggtaaaacaagcgtccccttggccctcgaaaaaagatggtctccccgattttcatgttctccaaatactgagtcatcttcccaccttcaggatattgggggtgtacatttttgaagtagatctttataattaggtccacaaagcctctgtcatcatcactggagacaggggtgtaagccctgaccaccaattcattatcgatttttgccaagagctggacatagttacctacaggaagccctaagacatggtccggcgaaggcagtccaaagcggaacctccgggtgttgtggctgattttctctttctcaatcaagggcagcgggtacttggcttcagggtcctgtaaggtgattggctctctcctcctggagttcatgctcttcaggaccaacacgagcacagtgaccccagtgacggtgatggtcaggagcagggacgggtccctacaaggccgccctgctcctctcccaactcaagcccgacagggaaagttgcctctcctcccgccgggtcactggagtctcagccttccggaatccgagccggcccgccccgctccccgcccttcgcggtcccgcccacgacctctccccacgcctcccgctccggcccccacctccgct

SEQ ID NO: 716033 - DNA, 205 bp, Homo sapiens
acgacacactaaacataaacatctctattatcaaaagcctagacagtcatttctgcagctgtatggcaacttctacctatgatcgcgatataaacggtaccgatacacgacttcgtcttcgtatacagaggaatatgtcgtgaagaacctgtgtagcttacttacaacaatggttttggcctttactccactgggtaccgagctc

SEQ ID NO: 716034 - DNA, 110 bp, Homo sapiens
ccaccggcgattgaagcccagacctgcagggttcgtggataataaactcaagcagcgagtcatccagtaccttaccagtaacaaatgttggcaaatatgttggacattgg

SEQ ID NO: 716035 - DNA, 2492 bp, Homo sapiens
atcctaccactgcaagctcagcaggaactgacctggttggcaaagatgagggacatcctggtcctgtcactggggtccttggtgatgtggcgaatgagctgcaacatgggtgtgatgcctggaacacagtgagcgagcagccagctttctccctgtctctgaagcccacagtccctgacctgcagcaagcttcataccttcccccagcccaagttatccttttctcacttctgtccccaaaactcaaagcaggaaacagcccttcattttggttttcctttctaatgcaacagtaagtcaggtagtctttctcattttcatatggcaagatggaaagaacactctaagttcttcagtgtcctcattcatcaaacaatgacgggtaaatgtgatcgttttaagaatgcctattacagtgcctggcacattgtatgtctccttcaaagactgctctctttcttcaggcagtcattttcaagggatggggagagtcaggcttgaactggatctaggagcccctgggacagcatgggtgggcctgcccagcttgcccccaagcctgacctgaaaggtccccataaggctcctgagcagccaccatattggttaggggaagcagggtacacagggtcagtttcaagacctgtcactggttcatcgttcccaccttctacagctggaggcgaaatctctcatgttgtcccttcgaggatcaaatgactcccaagtcagaatgggtctcggggctcactctctggatggagcccctagaagcctcttacctgtgcccccagcaatcattcccaggtgatcggccagtgtttttttaggctcactcgtctggtctggtctgattccaagattccctggaaacacagagaatgcttatgacctctgcagttcttgcctaaagagactgcaaaagatcactgacattccttaggactcccaggaggcacgtccagctaagggactgtctgcaccattttaagctggagaagcaggccagggcagtctcctcagctagccctggtgctccagtgcacaaagtgggaatagagcctgggcttggtcggggaatcgccgggccttctgttctgaggaaaaagaggggcaagttgaagttaacacagagactcaaagagcattctcactcacggaggtgaaccagtgagtaaacaatggctatgtgagtaaccaaggagcatggactccctccatccatttttcagtattagcaggcaccatttatgtatcaggcattgtgctggagattttgatacaatgacgaggaaacaccaagtcattcccctaccttacaaaagctgacaacctcatgaagtgggtgtgtgaatgtgtaacaagtgtgatcattatgcattgtgtgtgaatgaatgaagactaagaacaaccccatgtgactcaaatctgaggagtgtacgagaacaatggaaccattgcaggaatcttcctcccagctgggagcccaagtattaacccctccagtacctggcccatggtaaaacaagcgtccccttggccctcgaaaaaagatggtctccccgattttcatgttctccaaatactgagtcatcttcccaccttcaggatattgggggtgtacatttttgaagtagatctgaaaagcaaggcagcactgctttcacattcccagacacaatgccacagccacgtacaactagaaaatgcatttactgctggaagctttgcagagaaagtgttctcctctctgaattgctgtacgcaatccctgaagatgaagctgccacaaggttaactgtagcttcactgctggaaagccctgcctagggcatatgtgccctcagagaaaaagcactgcccctccaccccaccaccctcagtaggcttggaagcacgagctagccagatatggtgggcactatttacctttataattaggtccacaaagcctctgtcatcatcactggagacaggggtgtaagccctgaccaccaattcattatcgatttttgccaagagctggacatagttacctatagaaaaggcatcaagcactgagtcaaagcatatttagcttaaataaggcccaggaataaaggactgagcttcagtgaagggagcaaatactgggggcacaacgttaagaggggtgggaagaagagagcagggaaggagcccaaatatgggatgcccggatcctaggcctgccctgcctccctgtgctaccctaggcaagtcacttcacctctctgggttttggtctcttcatctgtaaaatgggggtgatatgtctgcccacctgtgatcttagtgtaactgctttttggagcaggaaaagatcattaaagttggagagtgagtattaaaaattacagaaaggggtcagacatggtagctcacgcctgtaatcccagcccagaggcgggtggattgcttgagctcaggagttcgagaccagcctgggcaagatggcgaaaccccatctctac

SEQ ID NO: 716036 - DNA, 695 bp, Homo sapiens
tttttttttttttttgctttgtacttgagtttatttcacaaaaccacggagaaagatactgaaatggagctctttccagcctccaagcaaggaggccccagcagccagtctccagccccttgagccctttttgttaggcccacacccaaaagaggagaaccagtgtgtgcgcgaaggtacatggcaaggcacttttgaaaacatcccagtttaccgtggtgaaattgaacttactctgaaacagatgaaaagggacatgcaaatttgctgagcacatggaggtgtttgttagtaggtgaaaatcatgtcctgggtataacccagcttctccaggttagggtgagccgccgtctggatcagtggtggcgggccacacaccaggatgagcgtggacttcgctggaggaggaaggtgctccttgatcatgtcggcagtaacgaagcctgagctgtacttccagccaatgggaggcctgtccagggtgtaccacaggtcgaactggtctgggtgagtcctggcaatttcttcaagctcttttctgaccaagatatcctcctctgtctagaaaagaagcaacactgaaaaagctcctccagggccatcctcttgttccctggactgactacaccggtcagcatactcctggccaaagctgccaccactccagctggagtgctcgctgccaactcccacgg

SEQ ID NO: 716037 - DNA, 1174 bp, Homo sapiens
tcggagggccttttcccgggagtaagttgtttctacaaccagagaacttccccggttttctgtgggatggtctctcccccacatttgtccccgagttcttttttggtgtggttggtctcccccttagagcggtcgttttccacgcgttcatataggagaaaccacccacgggcctcgggttaaaaaatgttcttcctccgttcaccgaatttcccgcgcccaaagggtccaactgttgccccacttcactcgtgtccgggacccacgtgttcttttctttggggaatacccacgggagctgtggttttttaccccacaggggtaattcccgccccccgcgccattgtttacccctttgggtcctcgctgtgcggtatttcctccggtgttcggggattcccgcctggcccccccagaccccccgggggcctaatttgaaacgccccgggttaccccccggggtacccccctggagagccttgtgaaaatgtggggctccacgtgttttccttgagggtgttgtctttgacctttttgtgcccccccattttcggttttctgggaccctccggatgttctgccccacctttccaccacacccttttgtggaggtttcttgggccggtgtggtgttttatacctggaggttgcgctgtgagagccacagagcacccaggttattttttctccactgggctatttggaagaacacacaaggtgggcctgtataattataatgccgggggtgatataagggagaatattttcttgagtaaaccctggagacgcccacgccacaagagttaccacacaggttttgagagagaatgccttgtctttgtgtcttcacatgttctgtgtcaagccagcgcacccacaagccccttgttgtgggcaccttattcacggggccgtgagtgtggaaaaagagattctcaagaactcacatatcaagaagtcccacacaagctgaaagagattgtgacaccaatatttttggctgggatattgaagctttaaactcctcgtgggatatccacacatccaaataacccagtgtccagtgtttgtccattggtttttagtaaatattagtgtcccatttgtaaaagggttactttcatactccttatgtacagaaatcacatgaaaaataaaggctccataaagcata

SEQ ID NO: 716038 - DNA, 682 bp, Homo sapiens
  misc_feature (569)..(569): n is a, c, g, or t
  misc_feature (584)..(584): n is a, c, g, or t
  misc_feature (594)..(594): n is a, c, g, or t
  misc_feature (597)..(597): n is a, c, g, or t
  misc_feature (615)..(615): n is a, c, g, or t
  misc_feature (636)..(636): n is a, c, g, or t
  misc_feature (638)..(638): n is a, c, g, or t
  misc_feature (646)..(646): n is a, c, g, or t
  misc_feature (657)..(657): n is a, c, g, or t
tttttttttttttttgctttgtacttgagtttatttcacaaaaccacggagaaagatactgaaatggagctctttccagcctccaagcaaggaggccccagcagccagtctccagccccttgagccctttttgttaggcccacacccaaaagaggagaaccagtgtgtgcgcgaaggtacatggcaaggcacttttgaaaacatcccagtttaccgtggtgaaattgaacttactctgaaacagatgaaaagggacatgcaaatttgctgagcacatggaggtgtttgttagtaggtgaaaatcatgtcctgggtataacccagcttctccaggttagggtgagccgccgtctggatcagtggtggcgggccacacaccaggatgagcgtggacttcgctggaggaggaaggtgctccttgatcatgtcggcagtaacgaagcctgagctgtacttccagcctgaaatgaaggagatgcaggagcaagctgagggatgccaggtggagttcctgatcccaggccgcctgcacacccaccctcagccagggaggaggtgacaagctgctnttacaaaggcttagnaagtctgtantantgcaccctgcaaaaagcntcagaattagttaaacagccntntgcagcantcaccccaggncccaggttcattgcagggaccttga

SEQ ID NO: 716039 - DNA, 2503 bp, Homo sapiens
gatagatttgagaccctggaacctgaagtatctcatgaagaaaccgagcatagttaccacgtggaagagacagattccagtgaaccagtagtagaagatgaaagattgcaccatgatacagatgatgtaacataccaagtctatgaggaacaagcagtatatgaacctctagaaaatgaagggatagaaatcacagaagtaactgctccccctgaggataatcctgtagaagattcacaggtaattgtagaagaagtaagcatttttcctgtggaagaacagcaggaagtaccaccagatacttaaagcttcaaaaagactgcccctaccaccacaggaggaccagcctaaccatacgctccaaaagatggctgtgatagatcttgtgaagcaattactgagcagatcaagatctttgggaaggaacactaaagatgttttgaatgaattatagtccactggcattttagtgtatttttttttctttttagaaacacacatttctaaaaatgtcatgttacattcctgcatgtcccttttgatagcattagtggatccattggatttcttttttctttttgtgagacagcttttagtcttacctgaatttatgtgtgtttttccgacagtggttaataattatattggtgatgtagcagcaattgtgttggcagggttttcatatattattagtaattaacactaactgttggactgacttgtgtacactgtgttaaacatgatttaaaagctattaagagtactttgtgttagcactcttaaaaacgctaacagagatcatcattagctgtgaagatttgagttgtatatacctgcactgatattcttatcaaaaatttctacattagctttaagtgttcagattaacacttttgaaatttttgtagcttttagctgattaattagaaaaattaatatttcagtgaaagttttaaattatcatttatttatttttttaaatgagaggggaaagctgaaattccttgttaagacacaaggaaaaagaatggccctactattatcatgcaaaaatgctttgttggcacctcagattaatcatataatagctatagtctcttcagcatttgtttaaattttagaaaacctgtataaattactggtgcataacttaaagattattctgcctttggctaattgagtaattcccctccagcactagagaccgctcagtgctcttactagatgaactcagtaacgccttgagctgggttgattgaggatgtgtgaaaagctcacagagcccgatgcctgctgctatttcacggcaatgagcctttttctttctacactgaagattttcttcttatttaatgtggtttattttgggctcagaaataattgctctgttgaaaataatcctttgtcagaaaagaaggtagctaccacatcattttgaaaggaccatgagcaactataagcaaagccataagaagtggtttgatcgatatattaggggtagctcttgattttgttaacattaagataaggtgactttttccccctgcttttaggattaaaatcaaagatacttctatatttttatcactatagatcatagttattatacaatgtagtgagtcctgcatgggtactcgatgtgtaatgaaacctgaaataataagataataagaaaagcaataattttctaaagctgtgctgtcggtgatacagagatgatactcaaattataataaaactcttcattttgtgaattatagaagctactttttataaagccatatttttttagggaaactaaggagtgacatagaactgatgaatgagcaaaagtaagttttgctggatttttgtagaactctggacgttgaggattcattatgctgtggttaactttaaatatttttgaattccaaatatctgaattaatgagccttgtctttacaaatatgtgccattgtgcaacatcggtggattttctaaaaataatgtaaatgtcttctattaaatgttgagtgcaataaaatacagaagaattctcaaaaaaaaaaaaaaacaataaacagaaaaaaaaaaaataataacaaaaacaagaaaaaaagaaaggggggggggggcgcgcagaaaaattttccccagggggcgccccacgttacgggctacccgcatttttctgcacaaggggggcccaatatgagggggggacaataaaataaaacaacatagggcggcgggggcgcgacttttaaacaacaaccgctgtgtcatgggggagacaacacaggtatgatgcggggaactttttggagagaggaccccctaccgctgtgggggggcgaaatatatggggacaacacttccctcgaagtaattttataaggccctcgaggggaaactaaacaaccttgaggggttttttgggtgtaacacacgcgatattttgcgcgagaaaaatttgggccagggatattttattaaaaagttatagggatatttataaatt

SEQ ID NO: 716040 - DNA, 2461 bp, Homo sapiens
gatagatttgagaccctggaacctgaagtatctcatgaagaaaccgagcatagttaccacgtggaagagacagattccagtgaaccagtagtagaagatgaaagattgcaccatgatacagatgatgtaacataccaagtctatgaggaacaagcagtatatgaacctctagaaaatgaagggatagaaatcacagaagtaactgctccccctgaggataatcctgtagaagattcacaggtaattgtagaagaagtaagcatttttcctgtggaagaacagcaggaagtaccaccagatacttaaagcttcaaaaagactgcccctaccaccacaggaggaccagcctaaccatacgctccaaaagatggctgtgatagatcttgtgaagcaattactgagcagatcaagatctttgggaaggaacactaaagatgttttgaatgaattatagtccactggcattttagtgtatttttttttctttttagaaacacacatttctaaaaatgtcatgttacattcctgcatgtcccttttgatagcattagtggatccattggatttcttttttctttttgtgagacagcttttagtcttacctgaatttatgtgtgtttttccgacagtggttaataattatattggtgatgtagcagcaattgtgttggcagggttttcatatattattagtaattaacactaactgttggactgacttgtgtacactgtgttaaacatgatttaaaagctattaagagtactttgtgttagcactcttaaaaacgctaacagagatcatcattagctgtgaagatttgagttgtatatacctgcactgatattcttatcaaaaatttctacatttttgaaattttgtagcttttagctgattatttcagtgaaagttttaaattatcatttatttatttttttaaatgagaggggaaagctgaaattccttgttaagacacaaggaaaaagaatggccctactattatcatgcaaaaatgctttgttggcacctcagattaatcatataatagctatagtctcttcagcatttgtttaaattttagaaaacctgtataaattactggtgcataacttaaagattattctgcctttggctaattgagtaattcccctccagcactagagaccgctcagtgctcttactagatgaactcagtaacgccttgagctgggttgattgaggatgtgtgaaaagctcacagagcccgatgcctgctgctatttcacggcaatgagcctttttctttctacactgaagattttcttcttatttaatgtggtttattttgggctcagaaataattgctctgttgaaaataatcctttgtcagaaaagaaggtagctaccacatcattttgaaaggaccatgagcaactataagcaaagccataagaagtggtttgatcgatatattaggggtagctcttgattttgttaacattaagataaggtgactttttccccctgcttttaggattaaaatcaaagatacttctatatttttatcactatagatcatagttattatacaatgtagtgagtcctgcatgggtactcgatgtgtaatgaaacctgaaataataagataataagaaaagcaataattttctaaagctgtgctgtcggtgatacagagatgatactcaaattataataaaactcttcattttgtgaattatagaagctactttttataaagccatatttttttagggaaactaaggagtgacatagaactgatgaatgagcaaaagtaagttttgctggatttttgtagaactctggacgttgaggattcattatgctgtggttaactttaaatatttttgaattccaaatatctgaattaatgagccttgtctttacaaatatgtgccattgtgcaacatcggtggattttctaaaaataatgtaaatgtcttctattaaatgttgagtgcaataaaatacagaagaattctcaaaaaaaaaaaaaaacaataaacagaaaaaaaaaaaataataacaaaaacaagaaaaaaagaaaggggggggggggcgcgcagaaaaattttccccagggggcgccccacgttacgggctacccgcatttttctgcacaaggggggcccaatatgagggggggacaataaaataaaacaacatagggcggcgggggcgcgacttttaaacaacaaccgctgtgtcatgggggagacaacacaggtatgatgcggggaactttttggagagaggaccccctaccgctgtgggggggcgaaatatatggggacaacacttccctcgaagtaattttataaggccctcgaggggaaactaaacaaccttgaggggttttttgggtgtaacacacgcgatattttgcgcgagaaaaatttgggccagggatattttattaaaaagttatagggatatttataaatt

SEQ ID NO: 716041 - DNA, 844 bp, Homo sapiens
catcacaaaaattcttctcttggccaagtatctcatttccctatatagtatacaagcaccatttcttctcaatttgtaagaagagaaattagtccattaccacaggggttcttgtcactactaattatacaacaagtcttttcccaacaagacaagatgtcctccacaaccttgttttcaaagcagacgagcatctatgtgggccaagagtatactttgcggttgttcttgaggatactggtcttgggctgatgactatggtgggcagacatggatccatagggctccttctgctaaacagcacacatttgaagatggtttaaaagcgacgtcagatcaggtgatctgtactaattgtatttatctgtacatgtatgggcttgtgattcccaccaaggaaatgagagaaagttatctgtttgagtataaaaccaaatttcagctttttcaaaatatcttccaacttatgtattggttgtcactcaatgtgcctatatatatatatatctgtgtgtgtgtgtgtgtgtcgcgcgtgagcgcaggtgtatgtatgccgtgcgcatggtgtgtgtagtagtgtatttatcagaccagttgcgtgtctaacgtgccgagactatgaaagagggacgcaaaccttctactgcgccatactgtggcgttctacaacgtggtggctcacattctcagacctatagtgattactccatgtagtttagcaagaaggagttcctataaatatcctatgtggcgagtatttaccctttggagggggtggcgggacaacgtgttgaactattcgtgggacacagcagattggtgacaccccgggtgctaggaggta

SEQ ID NO: 716042 - DNA, 2292 bp, Homo sapiens
  misc_feature (2027)..(2027): n is a, c, g, or t
  misc_feature (2029)..(2029): n is a, c, g, or t
gatagatttgagaccctggaacctgaagtatctcatgaagaaaccgagcatagttaccacgtggaagagacagattccagtgaaccagtagtagaagatgaaagattgcaccatgatacagatgatgtaacataccaagtctatgaggaacaagcagtatatgaacctctagaaaatgaagggatagaaatcacagaagtaactgctccccctgaggataatcctgtagaagattcacaggtaattgtagaagaagtaagcatttttcctgtggaagaacagcaggaagtaccaccagatacttaaagcttcaaaaagactgcccctaccaccacaggaggaccagcctaaccatacgctccaaaagatggctgtgatagatcttgtgaagcaattactgagcagatcaagatctttgggaaggaacactaaagatgttttgaatgaattatagtccactggcattttagtgtatttttttttctttttagaaacacacatttctaaaaatgtcatgttacattcctgcatgtcccttttgatagcattagtggatccattggatttcttttttctttttgtgagacagcttttagtcttacctgaatttatgtgtgtttttccgacagtggttaataattatattggtgatgtagcagcaattgtgttggcagggttttcatatattattagtaattaacactaactgttggactgacttgtgtacactgtgttaaacatgatttaaaagctattaagagtactttgtgttagcactcttaaaaacgctaacagagatcatcattagctgtgaagatttgagttgtatatacctgcactgatattcttatcaaaaatttctacattagctttaagtgttcagattaacacttttgaaatttttgtagcttttagctgattaattagaaaaattaatatttcagtgaaagttttaaattatcatttatttatttttttaaatgagaggggaaagctgaaattccttgttaagacacaaggaaaaagaatggccctactattatcatgcaaaaatgctttgttggcacctcagattaatcatataatagctatagtctcttcagcatttgtttaaattttagaaaacctgtataaattactggtgcataacttaaagattattctgcctttggctaattgagtaattcccctccagcactagagaccgctcagtgctcttactagatgaactcagtaacgccttgagctgggttgattgaggatgtgtgaaaagctcacagagcccgatgcctgctgctatttcacggcaatgagcctttttctttctacactgaagattttcttcttatttaatgtggtttattttgggctcagaaataattgctctgttgaaaataatcctttgtcagaaaagaaggtagctaccacatcattttgaaaggaccatgagcaactataagcaaagccataagaagtggtttgatcgatatattaggggtagctcttgattttgttaacattaagataaggtgactttttccccctgcttttaggattaaaatcaaagatacttctatatttttatcactatagatcatagttattatacaatgtagtgagtcctgcatgggtactcgatgtgtaatgaaacctgaaataataagataataagaaaagcaataattttctaaagctgtgctgtcggtgatacagagatgatactcaaattataataaaactcttcattttgtgaattatagaagctactttttataaagccatatttttttagggaaactaaggagtgacatagaactgatgaatgagcaaaagtaagttttgctggatttttgtagaactctggacgttgaggattcattatgctgtggttaactttaaatatttttgaattccaaatatctgaattaatgagccttgtctttacaaatatgtgccattgtgcaacatcggtggattttctaaaaataatgtaaatgtcttctattaaatgttgagtgcaataaaananagaaaaaaaaaaaaaaaactgtgtgtcgggccgcgcctggaggacccacagaaaaagtttcaaaaacccgagcggttgggggcggcggggcaccagtgaggtaggcgaacgggcgcaacacgcggcccacaaggaaaccgcgcagagaactaagtgcgtgatctcccacaattaaaagcggcggggcacggggttctgacacaatcaggagggtcgaagccatacggctctacaggatcaaggagcaatatatagcgaaggga

SEQ ID NO: 716043 - DNA, 215 bp, Homo sapiens
gttgttgtatgtatagtaagatgttgagacaggttctcccagagctgctcaggctggtctcaaactccaggcctcaagccatcctccgaccctggcctcccaaagtgctgggattacaggcgtgagccaccgtgcctggctgaaacacaagaatttaagagaattcttgttatctgaaaagaaagatgatgtctcatacgcccaggtgagcaggc

SEQ ID NO: 716044 - DNA, 1532 bp, Homo sapiens
tttttttttttttttgctttgtacttgagtttatttcacaaaaccacggagaaagatactgaaatggagctctttccagcctccaagcaaggaggccccagcagccagtctccagccccttgagccctttttgttaggcccacacccaaaagaggagaaccagtgtgtgcgcgaaggtacatggcaaggcacttttgaaaacatcccagtttaccgtggtgaaattgaacttactctgaaacagatgaaaagggacatgcaaatttgctgagcacatggaggtgtttgttagtaggtgaaaatcatgtcctgggtataacccagcttctccaggttagggtgagccgccgtctggatcagtggtggcgggccacacaccaggatgagcgtggacttcgctggaggaggaaggtgctccttgatcatgtcggcagtaacgaagcctgagctgtacttccagccaatgggaggcctgtccagggtgtaccacaggtcgaactggtctgggtgagtcctggcaatttcttcaagctcttttctgaccaagatatcctcctctgtctggttggcaaagatgagggacatcctggtcctgtcactggggtccttggtgatgtggcgaatgagctgcaacatgggtgtgatgcctgtgcccccagcaatcattcccaggtgatcggccagtgtttttttaggctcactcgtctggtctggtctgattccaagattccctggcccatggtaaaacaagcgtccccttggccctcgaaaaaagatggtctccccgattttcatgttctccaaatactgagtcatcttcccaccttcaggatattgggggtgtacatttttgaagtagatctttataattaggtccacaaagcctctgtcatcatcactggagacaggggtgtaagccctgaccaccaattcattatcgatttttgccaagagctggacatagttacctacaggaagccctaagacatggtccggcgaaggcagtccaaagcggaacctccgggtgttgtggctgattttctctttctcaatcaagggcagcgggtacttggcttcagggtcctgtaaggtgattggctctctcctcctggagttcatgctcttcaggaccaacacgagcacagtgaccccagtgacggtgatggtcaggagcagggacgggtcccggagtgagacgcccaacacgtcgtcgaactggggttggccgggggccgctccccgccgcgggcccgcagactcgtggcgtcgccccgcagctccgcctggccgacggggaaccggccgagacccggacacgcacgcccgggaggacaaaagcgcgggcggaccccgcaggctgggaccccggcggctggcccgctccccgagaagggccgtggtcggggggctctcactcacgagccgctggctctgggtcagccctgcccccagggcagcgctccatcatgaggctggcggggcgctgagccgtggcgtcctcgctcctgcgctgcccctctgcaccctccgct

SEQ ID NO: 716045 - DNA, 885 bp, Homo sapiens
gtgcatgctgtgacggtgggatgtgctgaaggctacctgctgcttgattgtcgagtgttataatatcatagtgagttcttgcttactgcaagcatcgattgcagatagtccagttgcgccagccaaattttttctcttgatcatcctagcgatcataggtgctagggaacagcataccagacagcggatagcgctgagaaactcgcgtcctggataaagccgtcacgatcaaaaccgagggcgagagacacaacttgggaacgcaacaacttggcagtccagaatgaatgtcgacagagggacgggagcgaccgtgatgctcatgcacttgaccatctgtttgacaagtggggcagggcacggcgttggtaccagaatcttcggtgcagacctcaggtcgattaagacaaataacgtaagtaaactaatctcccgtgatgtagcactaaagatgaaccagagatgacctcactggtggtagctcacgattgttattccaccagtaaatccaacaaggtggcacggatcggaaatcaatctctgagtaaccagaaatagtttcacgtcgaacgatgtccatcgatagaccattggtctccccaagatagaaatacgaagcaggaaatttctggcaaggtacacaaaatggtaatataggaactaaggtagaattgatgtcgatgttattgtataagatactaattgtattggtaagaaagtgttgttgaaattatattgcaaagtgaagaagaaataacttagagaactggatggtggtaacataccattaaaaataagtgtgaacaagagtgagattgggatacaaagaaaaacgatgagagatataaagagaggtaggtgagataactagggaaagaagaaatg

SEQ ID NO: 716046 - DNA, 116 bp, Homo sapiens
acgctgcaccgcgcgtccaaagttaagaacgggaagaatgggtggcaaggtggctcctggagaagctcacccagcacaggctgccctgagctcggagcctttggttttctgtccct

SEQ ID NO: 716047 - DNA, 1894 bp, Homo sapiens
tttttttttttttttgctttgtacttgagtttatttcacaaaaccacggagaaagatactgaaatggagctctttccagcctccaagcaaggaggccccagcagccagtctccagccccttgagccctttttgttaggcccacacccaaaagaggagaaccagtgtgtgcgcgaaggtacatggcaaggcacttttgaaaacatcccagtttaccgtggtgaaattgaacttactctgaaacagatgaaaagggacatgcaaatttgctgagcacatggaggtgtttgttagtaggtgaaaatcatgtcctgggtataacccagcttctccaggttagggtgagccgccgtctggatcagtggtggcgggccacacaccaggatgagcgtggacttcgctggaggaggaaggtgctccttgatcatgtcggcagtaacgaagcctgagctgtacttccagccaatgggaggcctgtccagggtgtaccacaggtcgaactggtctgggtgagtcctggcaatttcttcaagctcttttctgaccaagatatcctcctctgtctggttggcaaagatgagggacatcctggtcctgtcactggggtccttggtgatgtggcgaatgagctgcaacatgggtgtgatgcctgtgcccccagcaatcattcccaggtgatcggccagtgtttttttaggctcactcgtctggtctggtctgattccaagattccctggcccatggtaaaacaagcgtccccttggccctcgaaaaaagatggtctccccgattttcatgttctccaaatactgagtcatcttcccaccttcaggatattgggggtgtacatttttgaagtagatctttataattaggtccacaaagcctctgtcatcatcactggagacaggggtgtaagccctgaccaccaattcattatcgatttttgccaagagctggacatagttacctacaggaagccctaagacatggtccggcgaaggcagtccaaagcggaacctccgggtgttgtggctgattttctctttctcaatcaagggcagcgggtacttggcttcagggtcctgtaaggtgattggctctctcctcctggagttcatgctcttcaggaccaacacgagcacagtgaccccagtgacggtgatggtcaggagcagggacgggtccctggcagacacaatgtgaacagagcacctcaggtcttgcccgccctggacagggcagctctcaggcgcagaacaccctccccacaccaaaggcacaggagctgagctctgcctgcaggaaataggcaaagagaacagtagtgacacagaaggcggctgggagagcctgtggtggaccagagggtagggaggggtcagctgcaggtcacacaggaaggatgtttcaggcccctggagcaggcagcacacatggcctggggtgctcaggtcactaggcccctcctggctacagccaaacgttcatacactggaagtcccttccttgaggtgaagggggaggacgtcacccctaacacacaatccggaatgaggggcccagtccctaaagacagaactagggtgcgtagctctaagaggtgccccgtgacttagggcctggggactccccaacagtctcctggacagggcgaagggggcctgggcactcaactgccagagactcgggagcctccccgcatctgtccctaccctacaaggccgccctgctcctctcccaactcaagcccgacagggaaagttgcctctcctcccgccgggtcactggagtctcagccttccggaatccgagccggcccgccccgctccccgcccttcgcggtcccgcccacgacctctccccacgcctcccgctccggcccccacctccgct

SEQ ID NO: 716048 - DNA, 796 bp, Homo sapiens
  misc_feature (213)..(213): n is a, c, g, or t
  misc_feature (224)..(224): n is a, c, g, or t
  misc_feature (305)..(305): n is a, c, g, or t
tatgtaaagcttatcaagacatatgaagtgtcaattgactccatctacatcccacaaaatgtgtagctataaactgctcgattctactgacaaccgtggaactcacctctctcttgtgtgcgttccttgacgtgtaataaagactcatgacttcagcaagtttaggtctgttgctgtgatactgcacatatcgcaactagctgaatgtataanaagtgatgccncttgtagtagcacaccttggtgatcttgccacatgaacatatgctaggctgtaaggtccacatgctacaaggatgtgatgntatatgctttctgttcaactactcaataggcctaattctctagtaattccctaaacatttagaccaagcgatagaggcatgctactcctttctggcattgtctatatcatgagagccatggccttcctctcacgccaaattattagcacctgttctatatcaacacagcaacttctatgtatatcctttcactggttcctagttctatcggtcttagtgcagtcaagaaatatttgacatattatcctcttagcgatataacaactaagtgatataactgttcacttttcagactgtacatggcacaacaattgttacaaaagtctattaacttgatgcacgagaatttgccctggactatccctatcccagggagggaaacaagaaggttaggacggcaaccttgggataggtgctagaagcataggaaaagcaccagagaaattggacaaaccaggtcctatttcctctttttctcctgatgttttaac

SEQ ID NO: 716049 - DNA, 404 bp, Homo sapiens
caaaggctgaggcaggagaatcgcttgaacccagaaggcagagatggcggtgagtcaagatcataccattgcactccagcctgtgtgacgtgaagactccatctcaaaaaaaaaaaacggggggaccaggttgccttcattgaaaaggttagatatttgaggaaaaccctgaggggggtaaagaatttagccttggggctatctgagggaagagtattctgggcgggggaaacagccagccctaagactgcaagccggaggaatgcctgttccattcagggaagagcaacagggccatcgtgcccactgcagagtgagtagggccgagaatgggggaagatcaggcctggcctactttttggcctttgtaaggactcccttggctttcactctgggggaaaaga

SEQ ID NO: 716050 - DNA, 367 bp, Homo sapiens
  misc_feature (57)..(57): n is a, c, g, or t
  misc_feature (74)..(74): n is a, c, g, or t
  misc_feature (100)..(100): n is a, c, g, or t
cccaagactggatatcactgtgttgcccaggctggagttcagtggctattcacagangcaatcatagcatgctncatccttgaactcctgggctcaagcngtcttcctgctttagcctcccactgtgtttggatggtaaggggtgaagaagactgagtaaagaggctgttgcattcagcattaattatgcatatttcccacgtagctaggactacaggcatactccaccactcctggccctatttttaactgatgctcatttcaaagtgagagatatgtcttaggatatcagattttttgaaaccataacattgactaggaagactagttaggaagtacttttcattttaaaatacacattagcaaa

SEQ ID NO: 716051 - DNA, 285 bp, Homo sapiens
  misc_feature (16)..(16): n is a, c, g, or t
  misc_feature (45)..(45): n is a, c, g, or t
  misc_feature (135)..(135): n is a, c, g, or t
  misc_feature (238)..(238): n is a, c, g, or t
aacccactgaagcatnggcaatggtggctcatgcctataatcccnagcgctttgggaggccaaggcagaactatcgcttgagaccaggaattcgagagcaacctaagcaaaatggtgagaccctgtctctccaangtaaatggatcaatcaataaaacgtggtggtgctatttgacaagctgaggcaggaggattgcttgagcccaggagtttgaggctgcagtgagctatgattgtnctactgcactcttgacctgaatgacagagcaagaccctatatcttaa

SEQ ID NO: 716052 - DNA, 383 bp, Homo sapiens
  misc_feature (9)..(9): n is a, c, g, or t
  misc_feature (81)..(81): n is a, c, g, or t
tctgctttnctgtgtaaaaactggccataaagaaattatcttaccctaccttgtttaactgaaggtcataagatcctcatncccagagaggccctgccacatagccaaaaggaagaagtgcatgctcagacaggtcaagaagaatctagacagacaggcctttctgggtttccctactcaatctattagtattaggtcatatcccttttgtccagtcatatttcttcatgactgttcataccttgttgaacctaaggattaaaatggtcaattttccctgtgtctttggtcttcattctgaaggcttatgttggaaatgtggtgttcaaatttcatgtaaagcttatgatcaaataaatttgtatgccattttctccgtctta

SEQ ID NO: 716053 - DNA, 111 bp, Homo sapiens
aagtccacggaacggggtgagatcagccccagagtagtatacatgggaacaatctgtctaaaagatgagcctggggcattccaacatttagagtaggatacagtagggaga

SEQ ID NO: 716054 - DNA, 1628 bp, Homo sapiens
  misc_feature (22)..(22): n is a, c, g, or t
  misc_feature (30)..(30): n is a, c, g, or t
  misc_feature (237)..(237): n is a, c, g, or t
  misc_feature (1046)..(1046): n is a, c, g, or t
  misc_feature (1054)..(1054): n is a, c, g, or t
  misc_feature (1059)..(1059): n is a, c, g, or t
  misc_feature (1072)..(1072): n is a, c, g, or t
  misc_feature (1082)..(1082): n is a, c, g, or t
atgtcttcaccagtcctcaggnactctccngtctgtcccagctactctccaaccacgcccacatttcagctggagtccgttccaggcaccccggaatcaccaccaaactcaccaatttcactcagttactccccagtctctctcatgtcttcacccatccctcagggactctcctgtctgtcccagctactctccaaccacgcccacatttcagcgggagtcagttccaggcacccnggaatcaccaccaaactcaccaatttcactcagttactccccagtctctctcatgtcttcacccccagccccctgggactctcctgtctgtcccagctactctcccaccacgcccagatttcagcgggagtcagcctcccacactccggaatcacctacagactcacagacttcactgaggtcctccctggtctctctcaggtctttgccctcagcccacagggactcttgtgtctccttcagctactctcaaaacttctctagattccagctggagtcagttccaggcacccacgatacaccaccgaactcacgaatttcactgacttactccccagtctccctcatgttctcacccccagccctcagggactcttctgtctctctcagctactctccaaccatctccagatttcacctggagtcagcttcccgcacccaggaatcacctacaaactcacggaccttactgcaaccctcccccatttctttcacctcttcaccccctgccttcagggactctcctgggtctcccagcttctctccagccttccccagatttctgccacagtcagccccaggcacccaggacaaccctagacactcacaggcctcacgagactatctccctatgacctgtacctatacagggattgctcccacgcatccctcagtgaccccaaacccatctccacttacactcaggcactcccagggcctgacagctactccccgttattgtccttcagttcgaagccctggccaatctactagcccacatgacgcagttacctggccgtttctccacngttcccgngaggnccccacacccagncgcacaagancccctcctgcattccgtcctcacacgcaggcctgtccatctacttgctactgtcacactcttgccagcagaagaggcccctgtaatggccgatatcaccacccagtctatcctcaccccacagctgtgcagcgggaacctcctgctggcccacgtgctcgccacagcccatgctggcacgacgctccagcaggccggcgtccctgcgggccacactaccggtgacatggctagcatgaccctccttcctggcagtgacactgttgatgtgaaccccagtttcacatctgtcatttgtaaataggaccattttcccttttcgctctcccttccattcacagggcttttcattctctctgtttctgcctccgtttcagatatttactcacctttttctctctcactatgtctgccgtggtctccatgagagtacgccacgtaagattcccccattaaaggtcatgaatgagtgcttttagtatacctgtgttgtgcacattctattttaattcgcaatccattgtagacgtctagatcctctagagca

SEQ ID NO: 716055 - DNA, 520 bp, Homo sapiens
gctgcatcagaggcaggtcaaacacagaaatgatactttgttccataatttgagggaagaaaataccctgcaagtttgagagctagttttctatgacgagtgcacgtgacggcgtggtgtaaggtaaccggaggcgatgccagaggcggcgacacgcccgccccttccctgaagctcaggggctctaagataggaccggggctccctgtgcctgacccactgggcggccccgcctgctctctggaaactgggtcctgcctgtgacttaattacaaggaataaaataaaagtaacagcatacaaggtaataccacaaggaagtttagattacactcataccattgtatcatcttgctataaaaagttacttaaaactatttcttttgcatataaatgaaaaaagattagaatatttggtcaactggaaatattgctaggcacagacgtctgcaactgcaaagtatataatacagagattatgtcgaccagctccgcagctggagcagcagggacccactcg

SEQ ID NO: 716056 - DNA, 171 bp, Homo sapiens
ttcacatgcccaaaggctggaagcagtgggatcagcttggtcccctgtaggagattgaggatgcccggagaaaagatgttcaatacagtcatccagtctgggcctcagcgccacaattacgggttctaaataccccactcgtcgcccgtgcgggccatgtccagcatctca

SEQ ID NO: 716057 - DNA, 1779 bp, Homo sapiens
  misc_feature (22)..(22): n is a, c, g, or t
  misc_feature (30)..(30): n is a, c, g, or t
  misc_feature (388)..(388): n is a, c, g, or t
  misc_feature (1197)..(1197): n is a, c, g, or t
  misc_feature (1205)..(1205): n is a, c, g, or t
  misc_feature (1210)..(1210): n is a, c, g, or t
  misc_feature (1223)..(1223): n is a, c, g, or t
  misc_feature (1233)..(1233): n is a, c, g, or t
atgtcttcaccagtcctcaggnactctccngtctgtcccagctactctccaaccacgcccacatttcagctggagtccgttccaggcaccccggaatcaccaccaaactcaccaatttcactcagttactcctcagtctctagcacgtcttgatctccaaccctcagggactcgcctgtctgtcctcagctactctccacacatcgcccagcactgtaagcgggctgctcgagcagacaccctgccatcaccgcctcactcaccgatttcactgcgttactccccagtctctctcatgtcttcacccatccctcagggactctcctgtctgtcccagctactctccaaccacgcccacatttcagcgggagtcagttccaggcacccnggaatcaccaccaaactcaccaatttcactcagttactccccagtctctctcatgtcttcacccccagccccctgggactctcctgtctgtcccagctactctcccaccacgcccagatttcagcgggagtcagcctcccacactccggaatcacctacagactcacagacttcactgaggtcctccctggtctctctcaggtctttgccctcagcccacagggactcttgtgtctccttcagctactctcaaaacttctctagattccagctggagtcagttccaggcacccacgatacaccaccgaactcacgaatttcactgacttactccccagtctccctcatgttctcacccccagccctcagggactcttctgtctctctcagctactctccaaccatctccagatttcacctggagtcagcttcccgcacccaggaatcacctacaaactcacggaccttactgcaaccctcccccatttctttcacctcttcaccccctgccttcagggactctcctgggtctcccagcttctctccagccttccccagatttctgccacagtcagccccaggcacccaggacaaccctagacactcacaggcctcacgagactatctccctatgacctgtacctatacagggattgctcccacgcatccctcagtgaccccaaacccatctccacttacactcaggcactcccagggcctgacagctactccccgttattgtccttcagttcgaagccctggccaatctactagcccacatgacgcagttacctggccgtttctccacngttcccgngaggnccccacacccagncgcacaagancccctcctgcattccgtcctcacacgcaggcctgtccatctacttgctactgtcacactcttgccagcagaagaggcccctgtaatggccgatatcaccacccagtctatcctcaccccacagctgtgcagcgggaacctcctgctggcccacgtgctcgccacagcccatgctggcacgacgctccagcaggccggcgtccctgcgggccacactaccggtgacatggctagcatgaccctccttcctggcagtgacactgttgatgtgaaccccagtttcacatctgtcatttgtaaataggaccattttcccttttcgctctcccttccattcacagggcttttcattctctctgtttctgcctccgtttcagatatttactcacctttttctctctcactatgtctgccgtggtctccatgagagtacgccacgtaagattcccccattaaaggtcatgaatgagtgcttttagtatacctgtgttgtgcacattctattttaattcgcaatccattgtagacgtctagatcctctagagca

SEQ ID NO: 716058 - DNA, 203 bp, Homo sapiens
tgggcttggagcatagcgtggtcacaaaagcctggataacggaacggtattggacggtaccagcctcttgaagccagtggcagtgcagtagcagtggcaaaagccaggagcaggtacgtccaggagcctggagccattgccactaggtgagcttgtcctacagtgtaccctgagtggttcggggggccattcaacgcctccgg

SEQ ID NO: 716059 - DNA, 542 bp, Homo sapiens
gttccgtcatccagggtatgtgaccacgctatgctccaagaacatcgcgcgcacagcatggcattgacacctaccagtgagttctcgaatgaaaccgtatatcccaaaggaccagaagtattcattcctggatgactcccagacctcccttctgcttctcagactctattccgaccccctccaccatggaggaaacgcaacagacctccaatctagagctgctccgatatactccctgctgctacatcgagtcgtgtgctggagaccgtgcggtccctcaggagtctgttcgcccaacaaactggtgtatgacacctcggacagcgatgacgatacacctcctaacggacctagaggaaggcatccaacacgctgctggggaggctggaagacggacgccgccgtgactgggcacgatcctcaagcagacctccagcccctctgacacaacctcgcacaaccatgacgcactgctcaagaactacgtggctgctctactggttcaaagaggggcggacagcagcaaggggcggagcaggtgt

SEQ ID NO: 716060 - DNA, 879 bp, Homo sapiens
gggcgggctgcgcgatcaatccgcaagctccctgtgatgcaaatgggaaggcagttcccgggccaagtccccaacgtggttctggccagtttaaagcccactgcgaaccggggaagtggctatattcctgtgacacggggtgaaagctgaagtaggtctcggtccctggccgacagggaggttgcgaatgcaaagctaccactactggaagacgctccaggcccgaccgcttgtgggtcggtgactcggggaaaggatcccatctcggccttgcgtaccttctactacaacgcagacaggaatacgacaactgtctcacgcctgctctgtcgcctcccctgagctatgaccctgtgagattctgggacattgcaagtcaatctggtagtgggggacagacgttccgagaatgggccccgtccgttagaattcccgtgcccaaatccccagaagcctgataaatatgattatctcagctatgaagtagttactgctagcatggttgaaagggtgtgcgcggaaatacatttcgggttactcattagtctgatcttggctataggatatgattctggattatgtgggttaggtccacaggctatcattacggggtccttatatgcgcacgaaggaggaaggtggaagaagcttgaagtcaggcagaacgcggttccagaggctttgaaggtagagaggtccactgagaagaccatgcggacacggacgaggttgccttggtgcacgaatctgagcaagaggctggatcaacagcgcgcaccagaccagatctcatggcccggaggcgtggctcatgcctgtaattcccacgacttgacgaaggcaggcggggtgatcaggcagggaaatcgaggaacaccg

SEQ ID NO: 716061 - DNA, 331 bp, Homo sapiens
taatcatagcagagctgctctgctcgctctacaggcctctttgagaggaaggacagtatccaaagggacactgaacgagtgacattggttgggccgtgcccctcctcaggcagacagaatcaagccatggacctgtacaaggggtccacagaccagtaatcatcatcccagccaaggaaccagcccacaaaggagggaggctcaaagccttgcttcaccacggtaataagcgtacgccgatcccgattggctgggtccgactcgatataccgcttagcagaagtcaaggcttctgtcttatctacttcttgagaatcctttccaacccaga

SEQ ID NO: 716062 - DNA, 726 bp, Homo sapiens
  misc_feature (10)..(10): n is a, c, g, or t
  misc_feature (36)..(36): n is a, c, g, or t
  misc_feature (92)..(92): n is a, c, g, or t
  misc_feature (105)..(105): n is a, c, g, or t
  misc_feature (121)..(121): n is a, c, g, or t
  misc_feature (129)..(129): n is a, c, g, or t
  misc_feature (148)..(148): n is a, c, g, or t
  misc_feature (160)..(161): n is a, c, g, or t
  misc_feature (165)..(167): n is a, c, g, or t
  misc_feature (176)..(176): n is a, c, g, or t
  misc_feature (178)..(178): n is a, c, g, or t
  misc_feature (183)..(183): n is a, c, g, or t
  misc_feature (190)..(190): n is a, c, g, or t
  misc_feature (201)..(201): n is a, c, g, or t
  misc_feature (214)..(214): n is a, c, g, or t
  misc_feature (222)..(222): n is a, c, g, or t
  misc_feature (224)..(225): n is a, c, g, or t
  misc_feature (234)..(234): n is a, c, g, or t
  misc_feature (241)..(241): n is a, c, g, or t
  misc_feature (247)..(247): n is a, c, g, or t
  misc_feature (267)..(267): n is a, c, g, or t
  misc_feature (272)..(272): n is a, c, g, or t
  misc_feature (278)..(278): n is a, c, g, or t
  misc_feature (282)..(282): n is a, c, g, or t
  misc_feature (290)..(290): n is a, c, g, or t
  misc_feature (293)..(293): n is a, c, g, or t
  misc_feature (297)..(297): n is a, c, g, or t
  misc_feature (300)..(301): n is a, c, g, or t
  misc_feature (303)..(303): n is a, c, g, or t
  misc_feature (306)..(307): n is a, c, g, or t
  misc_feature (310)..(310): n is a, c, g, or t
  misc_feature (312)..(313): n is a, c, g, or t
  misc_feature (318)..(318): n is a, c, g, or t
  misc_feature (323)..(324): n is a, c, g, or t
  misc_feature (328)..(328): n is a, c, g, or t
  misc_feature (334)..(334): n is a, c, g, or t
  misc_feature (337)..(337): n is a, c, g, or t
  misc_feature (340)..(340): n is a, c, g, or t
  misc_feature (344)..(344): n is a, c, g, or t
  misc_feature (354)..(354): n is a, c, g, or t
  misc_feature (363)..(363): n is a, c, g, or t
  misc_feature (365)..(365): n is a, c, g, or t
  misc_feature (368)..(368): n is a, c, g, or t
  misc_feature (373)..(373): n is a, c, g, or t
  misc_feature (377)..(377): n is a, c, g, or t
  misc_feature (379)..(379): n is a, c, g, or t
  misc_feature (382)..(382): n is a, c, g, or t
  misc_feature (388)..(388): n is a, c, g, or t
  misc_feature (397)..(397): n is a, c, g, or t
  misc_feature (403)..(403): n is a, c, g, or t
  misc_feature (407)..(407): n is a, c, g, or t
  misc_feature (419)..(420): n is a, c, g, or t
  misc_feature (423)..(423): n is a, c, g, or t
  misc_feature (426)..(427): n is a, c, g, or t
  misc_feature (440)..(440): n is a, c, g, or t
  misc_feature (442)..(444): n is a, c, g, or t
  misc_feature (446)..(446): n is a, c, g, or t
  misc_feature (450)..(450): n is a, c, g, or t
  misc_feature (452)..(452): n is a, c, g, or t
  misc_feature (463)..(463): n is a, c, g, or t
  misc_feature (466)..(469): n is a, c, g, or t
  misc_feature (531)..(531): n is a, c, g, or t
ggcacgaganaacaatttctgaggattctgaaactngatttctagcctcagcatctctactgattgacttgtaattttgactctcaactttnctatttctagctncagcatctctactgantgacttgnaactttgactctgaacttntctatccttgcnnaaannnttaattatnanatatnatctgcngttaaccttgnactggtgattaanacagttgngnntatatatgncttaganctagtnaactcactctgctataaaanaatcntgattngacntgcatganaanggtnttnntnaanngtntnntgganaaatnntaanccatanatngtntaantagttgcctnttagctaantngancaatntccntnaanttccantactgattncccacnccancaccattagtannttnganngataatcactatntnnngngatnantgaatgaaacnatnnnncttcaagcatgttgggagcattgccctatatttaatgcagagtgtaaacttatctaccagtngatgaaacaatgatcataactcaacgttatgtaagtatccctagacctcctgaagacacagttccactgttatcaatgatttgacagaagctcttggccatggcatgatcgtagctcttcaaccaagattctaactgtcaaggtacctccgaggcctttatgtcatagtaatgccaatctcttgagattattccc

SEQ ID NO: 716063 - DNA, 176 bp, Homo sapiens
cgtcaccggaacagtataaccatctccagagtatccacgctcgcggaagactgatgttcgcgttgtcacgcactccagtgctggaacagcctctaagagtgcatcacttcctttctaccctgcgtcctttgtcttacgatttaagcagcccgtgataccatcacagtatgcagaga

SEQ ID NO: 716064 - DNA, 692 bp, Homo sapiens
  misc_feature (10)..(10): n is a, c, g, or t
  misc_feature (36)..(36): n is a, c, g, or t
  misc_feature (92)..(92): n is a, c, g, or t
  misc_feature (105)..(105): n is a, c, g, or t
  misc_feature (121)..(121): n is a, c, g, or t
  misc_feature (129)..(129): n is a, c, g, or t
  misc_feature (148)..(148): n is a, c, g, or t
  misc_feature (160)..(161): n is a, c, g, or t
  misc_feature (165)..(167): n is a, c, g, or t
  misc_feature (176)..(176): n is a, c, g, or t
  misc_feature (178)..(178): n is a, c, g, or t
  misc_feature (183)..(183): n is a, c, g, or t
  misc_feature (190)..(190): n is a, c, g, or t
  misc_feature (201)..(201): n is a, c, g, or t
  misc_feature (214)..(214): n is a, c, g, or t
  misc_feature (222)..(222): n is a, c, g, or t
  misc_feature (224)..(225): n is a, c, g, or t
  misc_feature (234)..(234): n is a, c, g, or t
  misc_feature (241)..(241): n is a, c, g, or t
  misc_feature (247)..(247): n is a, c, g, or t
  misc_feature (267)..(267): n is a, c, g, or t
  misc_feature (272)..(272): n is a, c, g, or t
  misc_feature (278)..(278): n is a, c, g, or t
  misc_feature (282)..(282): n is a, c, g, or t
  misc_feature (290)..(290): n is a, c, g, or t
  misc_feature (293)..(293): n is a, c, g, or t
  misc_feature (297)..(297): n is a, c, g, or t
  misc_feature (300)..(301): n is a, c, g, or t
  misc_feature (303)..(303): n is a, c, g, or t
  misc_feature (306)..(307): n is a, c, g, or t
  misc_feature (310)..(310): n is a, c, g, or t
  misc_feature (312)..(313): n is a, c, g, or t
  misc_feature (318)..(318): n is a, c, g, or t
  misc_feature (323)..(324): n is a, c, g, or t
  misc_feature (328)..(328): n is a, c, g, or t
  misc_feature (334)..(334): n is a, c, g, or t
  misc_feature (337)..(337): n is a, c, g, or t
  misc_feature (340)..(340): n is a, c, g, or t
  misc_feature (344)..(344): n is a, c, g, or t
  misc_feature (354)..(354): n is a, c, g, or t
  misc_feature (363)..(363): n is a, c, g, or t
  misc_feature (365)..(365): n is a, c, g, or t
  misc_feature (368)..(368): n is a, c, g, or t
  misc_feature (373)..(373): n is a, c, g, or t
  misc_feature (377)..(377): n is a, c, g, or t
  misc_feature (379)..(379): n is a, c, g, or t
  misc_feature (382)..(382): n is a, c, g, or t
  misc_feature (388)..(388): n is a, c, g, or t
  misc_feature (397)..(397): n is a, c, g, or t
  misc_feature (403)..(403): n is a, c, g, or t
  misc_feature (407)..(407): n is a, c, g, or t
  misc_feature (419)..(420): n is a, c, g, or t
  misc_feature (423)..(423): n is a, c, g, or t
  misc_feature (426)..(427): n is a, c, g, or t
  misc_feature (440)..(440): n is a, c, g, or t
  misc_feature (442)..(444): n is a, c, g, or t
  misc_feature (446)..(446): n is a, c, g, or t
  misc_feature (450)..(450): n is a, c, g, or t
  misc_feature (452)..(452): n is a, c, g, or t
  misc_feature (463)..(463): n is a, c, g, or t
  misc_feature (466)..(469): n is a, c, g, or t
ggcacgaganaacaatttctgaggattctgaaactngatttctagcctcagcatctctactgattgacttgtaattttgactctcaactttnctatttctagctncagcatctctactgantgacttgnaactttgactctgaacttntctatccttgcnnaaannnttaattatnanatatnatctgcngttaaccttgnactggtgattaanacagttgngnntatatatgncttaganctagtnaactcactctgctataaaanaatcntgattngacntgcatganaanggtnttnntnaanngtntnntgganaaatnntaanccatanatngtntaantagttgcctnttagctaantngancaatntccntnaanttccantactgattncccacnccancaccattagtannttnganngataatcactatntnnngngatnantgaatgaaacnatnnnncttcaagcatgttaaaagatttaaagcctaataaattcatacttcccctgccttcatcatgactgcaactcttcctttattatgcctgattaaccttataaccgtgttaaaaaatgttatctatcaaagttttcatctcccctaaattcttaaaaaccattttcatgttatttactaattaaccaagcatttgccacgcctaatgtacctttcacccttttct

SEQ ID NO: 716065 - DNA, 529 bp, Homo sapiens
actggggatgccagactgtcctctgcagcagctttatctcacagtggactgactcgctttgtgacatgttcatcctcaagtccccctgccttaccaccggtgtggggggcatcacaactgcaggacggagggacgaagtgcagcacccctctgctgtgggcttgggacacgcttaggtgggcagcttcccctgccgtgggctcgggacactcttaggtgggcagcttcccctgccgtgggctcaggacacgcttaggtgggcagctccccccctgccgtgggctcgggacacgcttaggtgggcagcttcccctgccgtgggctcaggacacgtttaggtgggcagcttcccccactgtgggctcaggatgcgcttgggtggggtgcactggcgttaactgcatgtttagcactcagcttatctgcaggtgggtagcggtgcacgtgcttttgtttactctgggctggccttggtcaaggacgggttcccaacaagaatgcgtgtaatggacgcttggcaccgcggccg

SEQ ID NO: 716066 - DNA, 337 bp, Homo sapiens
ccaacactgctttttatctttttttttttggacgcggtttcactttgttgcccaggctggagtgtggtgatgcaatctctgctcactgtaatctctgcctcccaggaccaggcgatcctctcacctcggcctcctgagtagctgggaccaccggtgcccaccaccatgccacattaatttttttttttagttttgttagagacagggcttcaccacattgcccaggctggtcttgaagtcctcggctgaagcggtccacccgccttggcctcccagagtgtggggaatacaggcgtgagccaccacacttgccccctgcttctttaaaaaaaaaaaa

SEQ ID NO: 716067 - DNA, 136 bp, Homo sapiens
gagggtgcggtggcacagactgcacacagattcgccatgcatctgtcagggctgtcccagacacagattcacctctcctacaaaatgtgtgcttgcattcattttaacattaagatggcataacaataagcgtgct

SEQ ID NO: 716068 - DNA, 176 bp, Homo sapiens
accggggaagcactgccctctttcaataatagacagctatcttccttgtcctgtgatagagttgctcagcgtgtaagagctaggcggtaagtgccatttcgaacttcatcaatgactgtgggttccaagtctacaaacactgcccggggcacatgcttgccaccacccatcacctg

SEQ ID NO: 716069 - DNA, 174 bp, Homo sapiens
  misc_feature (23)..(23): n is a, c, g, or t
acccctagtttgagaagttcaantagcatttattatcagaggtacatgagcaggctcagcctaggggaataatgccaacaaacactttggggaagcctgggaccatggctttgccaggaatctgtgacagtctccccctgacagtcatatgctgttttgccttcttagtttagg

SEQ ID NO: 716070 - DNA, 439 bp, Homo sapiens
  misc_feature (135)..(135): n is a, c, g, or t
  misc_feature (367)..(367): n is a, c, g, or t
aggtcagcagggagggaatattttagattgagcggaaagaggtaagtctctctaagaagtgacatttgcagagacctaagtgaacaaggaagtaattcatacagatacggtaaggaaggtaaagggagcaacaanggcaaaggccctgaagtgggaatggctttagcatgtttaaagaacgaaaagatggttgttatgtttggactgacctgttggcaagaattgtgatagatgaaattagagagatccccaggccagattatttaagatccagtcaaccacagtaaggtttttggactttattttgagtgtgataagaaacctctgagctgggcgcggtggctcacacctgtaatcctagcacttngggagccaaggcaggcagatcacctgaggtcaggtggccagcatgatgaaaccccgtctctactaaaaatac

SEQ ID NO: 716071 - DNA, 229 bp, Homo sapiens
  misc_feature (45)..(45): n is a, c, g, or t
  misc_feature (207)..(207): n is a, c, g, or t
gctgtatattgtgatatactacatgactattcagtgtggtgtggncatagttgtggtgagaccatagaagaggaagaagacagtgttttttttccatattcagggtgtgcacccatgtgccaggcgtgctgaccatgggtgtgggatatgcatgccccacttgcactcgtggtcccacccatgtctcacattggtcacccccatggnttcaatggcggaaccgtgtgtg

SEQ ID NO: 716072 - DNA, 543 bp, Homo sapiens
  misc_feature (6)..(6): n is a, c, g, or t
  misc_feature (61)..(61): n is a, c, g, or t
  misc_feature (64)..(64): n is a, c, g, or t
  misc_feature (74)..(74): n is a, c, g, or t
  misc_feature (99)..(99): n is a, c, g, or t
  misc_feature (106)..(108): n is a, c, g, or t
  misc_feature (127)..(128): n is a, c, g, or t
  misc_feature (134)..(136): n is a, c, g, or t
  misc_feature (142)..(142): n is a, c, g, or t
  misc_feature (144)..(144): n is a, c, g, or t
  misc_feature (159)..(159): n is a, c, g, or t
  misc_feature (185)..(185): n is a, c, g, or t
  misc_feature (192)..(192): n is a, c, g, or t
  misc_feature (197)..(197): n is a, c, g, or t
  misc_feature (236)..(236): n is a, c, g, or t
  misc_feature (243)..(243): n is a, c, g, or t
  misc_feature (257)..(257): n is a, c, g, or t
  misc_feature (400)..(400): n is a, c, g, or t
  misc_feature (519)..(519): n is a, c, g, or t
atcccngccccggggagccttgccccccagagggccccgcccagtgcagtcggggggaccnganagggaggagncgggagcacagcggcggcgggaaangcggacnnngaacccacacaagcgaatnnctgccnnncgagcncngcagcactctaatcnacaaaaggaggaagggaatccggagngagcaanggagnggcggccagggaaggaagaaaagcggccattgcccttcnggacacngagagggacaatcnttgcctttatctctgaggctatggagggtcctcctccatctttctacagagattactttgctgccttaatgacattcccctcccacctctccttttgaggcttctccttctccttcccatttctctacactaaggggtatgtnccctcttgtccctttccctacctttatatttggggtccttttttatacaggaaaaacaaaacaaagaaataatggtcttttttttttttttaatgtttcttcctctgtttggctttgcnattgtgcgaattggaaaaaccact

SEQ ID NO: 716073 - DNA, 754 bp, Homo sapiens
  misc_feature (40)..(40): n is a, c, g, or t
  misc_feature (67)..(67): n is a, c, g, or t
  misc_feature (81)..(81): n is a, c, g, or t
  misc_feature (110)..(110): n is a, c, g, or t
  misc_feature (150)..(150): n is a, c, g, or t
  misc_feature (156)..(156): n is a, c, g, or t
  misc_feature (169)..(169): n is a, c, g, or t
  misc_feature (192)..(192): n is a, c, g, or t
  misc_feature (195)..(195): n is a, c, g, or t
  misc_feature (197)..(197): n is a, c, g, or t
  misc_feature (210)..(210): n is a, c, g, or t
  misc_feature (226)..(226): n is a, c, g, or t
  misc_feature (254)..(254): n is a, c, g, or t
  misc_feature (268)..(268): n is a, c, g, or t
  misc_feature (270)..(270): n is a, c, g, or t
  misc_feature (286)..(286): n is a, c, g, or t
  misc_feature (303)..(303): n is a, c, g, or t
  misc_feature (305)..(305): n is a, c, g, or t
  misc_feature (333)..(333): n is a, c, g, or t
  misc_feature (375)..(375): n is a, c, g, or t
  misc_feature (382)..(382): n is a, c, g, or t
  misc_feature (395)..(395): n is a, c, g, or t
  misc_feature (470)..(470): n is a, c, g, or t
  misc_feature (472)..(472): n is a, c, g, or t
  misc_feature (539)..(540): n is a, c, g, or t
  misc_feature (545)..(547): n is a, c, g, or t
  misc_feature (552)..(552): n is a, c, g, or t
  misc_feature (555)..(556): n is a, c, g, or t
  misc_feature (562)..(563): n is a, c, g, or t
  misc_feature (594)..(594): n is a, c, g, or t
  misc_feature (668)..(668): n is a, c, g, or t
  misc_feature (673)..(673): n is a, c, g, or t
  misc_feature (679)..(679): n is a, c, g, or t
  misc_feature (681)..(681): n is a, c, g, or t
  misc_feature (702)..(702): n is a, c, g, or t
agcacatattagcacagcccaggccagaaggttgggcttnttgtctctgggaaccatcatacccttnccgccaaagaattntaaataaggcaggttaaaaaattggagtncagtgggagctgggtgcctggtcattcctagaagacaggnagtgtntttttgatggttngacttttagcaacactgggattnttntntgggtcctatggnctgctatgttgagagntggcagaaggatggggacctggtagaangaactggaagaaantnataggttcttgggtgnacatgaacgtgtgtttnanagggcaaaggttgtgcattttacttgtncttgatgcctccatctgccatcctctccctgacagcagcctnatacttnacacctacatttntttctgtggctctggatccggaaaccaagcgtttctccaacagaactgctgtgatttggcaacattgcaaaggtnantgctgtgatttggcaacactgcaaaggtaacagctagtaaacaaggagagaaaaaaaaaaaaaaaannaaaannnccccnccnncccccnntcctgatattctttgattttttttttctctntttataagcaacagggctgtgtgagcaggtatttgtgcgctcacagagtgggcatggcttcccaatctatgttnattancgctcnanagaggctcccccttacctgancctctgcagagtaccaaggcttttcaacagcacagaggctcattgcttgcag

SEQ ID NO: 716074 - DNA, 163 bp, Homo sapiens
gatggacttgtggtggtcgttgactttttttttgtgtgtgatgttcaccctcacgggcgcacgactcactcgctccatcttctctgttccccttcctcctcctcttcactataacaacacaagaccaggcgagaacaaagctctttttacggcttcctcttgt

SEQ ID NO: 716075 - DNA, 105 bp, Homo sapiens
tatcaaggggaactccatgtttccacagcagcttggtcacgatataggtatcaggccgggcgcagtggctcacgcctgtagtcccagcactttgggaggcagaga

SEQ ID NO: 716076 - DNA, 394 bp, Homo sapiens
cgtcgacgctgcatctctgatcagtcttctccttgtatgagctgaaagtttagagggacagccaggtcttggtagatttgcagtggtctgatactccttccatttcaatattatcgcttgcacagtgctccttgggatgtttaaagcttgggaaatctttttgtatccaaatccggctttaaacttcttcacaacagtatctcggacctgcctggtgtgttccttgttcttcatgatgctctctgcgcttttaacagacctctgagactatcacagtgcaggtgcatttatacggagacttgattacacacaggtggattgtatttatcatcattagtcatttaggtcaacattggatcattcagagatcctcactgaacttctgggtcgacgc

SEQ ID NO: 716077 - DNA, 561 bp, Homo sapiens
  misc_feature (532)..(534): n is a, c, g, or t
  misc_feature (542)..(543): n is a, c, g, or t
  misc_feature (561)..(561): n is a, c, g, or t
atgagtttccaccgaaatgtcggagaagtcaggccagagcacaaaagcaaaggatgggaaaaagtatgcaacactcagtttatttaatacttacaaggggaaatcattagaaacacagaaaaccacagttgcagctcgacatggattacagagtcttggaaaagtcggtatttcacggcagtatgcctccaccatgctaacctcccaagttcttaaagccagaataacaaagagcaaatgatctctaatggtaaaacaattgataccataaaagatgtgcactaagggatggggcactcataaaccaacgaggcaaccattgaaagaaagataaataactaccagtaaagtggccgaccaagcgacagacacaagaaccatggggtgatgcagcatccctccaagaaagtagcgacctgtctctccaaactctatgggccactgtaacaagacaagagtgggcacagagagagtggagatctcaagtggaaatagtgcagtgttcaagacaagaactcttctccagcctgcnnnggcagctnnggggatcagaaaaaaaan

SEQ ID NO: 716078 - DNA, 177 bp, Homo sapiens
cccaggtcaagcaattctgttacctcagcctcctgagtagctgggattacaggtgcatgccaccacgcccatttaattttttgaattttattagacgatgggatttcaccactgctagccagagatggtcctagatctcctagacctctgtgactctgcccacactcgggcctccca

SEQ ID NO: 716079 - DNA, 824 bp, Homo sapiens
tccgtcagccaggcgggagtgcagtggcgagaattgttaccggaaagggatcccaatccagtaccctcaagaggattcttggatcttgagtaagaaagaattcagagagtatggtctcgctatgttgcccaggctggtcctgagctcctggtctaaagcgatcctcctgcctcggtcccccaaagtgctgaaattacaggtctcaagaagaaaagtcgtggaacctgggattctttgtagagatatctggctgtgctgttggtattatatgaaccagagaaaataatcttgcagtatgatattgtgtgtcagtatagtacctcaaccctaatttgcctggtaagcctttatccagagagctttgtgttcaacttacagtcttattctggggtgggggatgtacaggctggctgtgtggacttgcacggagagatttatgggttctaacttgcttcttactgactttcaaccgcaattctcctgtattctagtgcttatacagagcctccacttatactagagtaggctggtagtaagccaaagcctgtcaatagaaagtctattgggagtctcaaggtgcaagtagagtggttctctggacgtttcatgccctgtggggtataagaagtcaggctttcacaaagcctgttaaggtcagtgtgttatttatactgcttttctagccctttcaagaattttacatgaaacatttacgttgttgaattgagaattatattattatgggatcactatgaggttggaggtatacatgttgcttgggaggatattgagcgatagcatgtaaatcaaaattttttggtgga

SEQ ID NO: 716080 - DNA, 180 bp, Homo sapiens
cgagcagtctcgttcagtggcgtctcagctcgcgctgagtttcggcggagcgttgccgtggctctcttcggctctcactgcgttgactgtcagggggtaatccttgtcggctgtcttgtactgctcgggtctccgctcgtcatccactgcagcagcaatccttcagcttcttctcggtcc

SEQ ID NO: 716081 - DNA, 359 bp, Homo sapiens
acagaaagacccagtccagctgtcaagagtagagagggaatggggcttgacacccttagtagtactgcctgtcgacacaaggcacaggacgagggaaaaaaacactagacaccagcgagggggagccaggctgggacagggcgcactcgcacggctgcgagtggtgacgcccctgggtgacacatatacaatgggcacaatgttttccaagctattgaactcctaactctaatcgacttcttccatgacgagacgcatccgtcatcgccctcgacgaggggggatctcatcaggaactgcagcattgggttcctctgctgccacttcatcttcatcaatacctagacctagcttgatca

SEQ ID NO: 716082 - DNA, 309 bp, Homo sapiens
ttccagtcgaggatcatcgattaaatatagatgcatcaaagtcctctgagacaaaagaaatatttgtcatacaccaggaaggtggaggcaggcttaagggctggccatgggtggtaaggatctaccagagggtaatcttcatccctttgggggaggaagtggaaggggcagctctgaggttcttgtaagagctgcagagtggtagacgcaggaagctggcatgcatttctaggtgccatgggtcttcactggtgaagcagtgacagagagaaagggaattgcccagtggatgagggcatggggtaccga

SEQ ID NO: 716083 - DNA, 289 bp, Homo sapiens
aaggcaggtttgtgtgttatagtgttgaagcagaattcctgcttctctgggaaacctcagtttttgttcttacggccttcaactgattggaggtggcccacccatattatggtgggtaatctgttttacctaaagtcaactgactgtcagtgttaatcacatctatgaaataacctcccagcaaggtattgacaagtatttgaccaaacaacggggcaccagagcttagccaagttgacacataaattaaccatcaggaacgagtagaatatccaaaacagccattagg

SEQ ID NO: 716084 - DNA, 325 bp, Homo sapiens
ggcccggttatagcacaataaggaagggtccccagcgttgtagagagcccaagttgagaacaataatgaacaattattgtatgaacaattgttagagacagctaatcacaaacaacctgcgggcacaatgacctcattccacatgtagcacccttcagcaggaccctataaaactttcctccagcccttgcctctttgcaggtagccccttctctgctgagctgcccactgcaacatattttcacaatttctctaataaatctgcccttctttacctacaactatcttggtaaatggctttaccacctgcaaaactgaccctagg

SEQ ID NO: 716085 - DNA, 252 bp, Homo sapiens
  misc_feature (148)..(148): n is a, c, g, or t
  misc_feature (193)..(193): n is a, c, g, or t
  misc_feature (250)..(250): n is a, c, g, or t
acctgcatgataaaaaacctggtcttcacaaccccttatctcaacccagttatgtgacttgaatgatatctgctgagaagagaagaaacacaagattctacaaagcgccagggaagtttacaaaggctaagaagctagagggtgtcanggccgtgcgtcctgatctgatgatggcagccaagccatgcttcangagtcaccgtgctgagacccaacatgttcctggagattccaattgtgggggggtacnca

SEQ ID NO: 716086 - DNA, 270 bp, Homo sapiens
tgagtgacatcgcttaacctgcgtgcatcctgacgaccgcgtgatgccagggaggcaggcgactggagtccactactccttaggtcatccactatggatgatatcgaatgttcatgtggagcagcaatgtggctccagagtgcagcagtccgatgtcctcgcggaagctgtgtctgatggcagacacatgatcgaagccatccaggcactggaaccaaccagctttgggaactgctgcttattcggggattggccttggttacagagcct

SEQ ID NO: 716087 - DNA, 767 bp, Homo sapiens
  misc_feature (327)..(327): n is a, c, g, or t
  misc_feature (336)..(336): n is a, c, g, or t
caggtttctaccattcggcattgtaggattggtgtaaaatcaccttgtctgtggggccccaagttttgtagttcgcccttagtaagcccgtcctttgctccagtagtaacgtttcgttatacacctcgggcccctgcttgaatgaaagtgtatctttcgcctcgccaatggttgtacttctgcagtattcttatgggctcttcatccgtgatgactgtgctctttcatacaagagggtcctctgtattgtaggttttggtctcatgttcaatggaggaacagtcagatccagaaaggtttcctcattcctcacaccattcaggcttntagggcctntgcagcccatgctggttcccaaccggccattgagtttctcccccccgagtatgttctgcacgcaagatatgttatcaggcaagcgcctggcctttatcttttcatagggctgaatcgtgtcttcacggggtctgtggattcttcccctatccacacaaggccccttttcttgccagatgctatgaaatagcttccgcaatccatccaggtcttttgtggtgtgctcatattcatgtgatgatgctgtggtcagcctctctcttgtgtcgcttcttcacagatctctccagctcgtgccgacatgacttcttgggactgagaagcgccatcttggttccccgctgagatagagtgatcctgatccagtgacagatagagagagagagacagagagagagagagagagagagagagagcgagacagagagagc

SEQ ID NO: 716088 - DNA, 937 bp, Homo sapiens
  misc_feature (52)..(52): n is a, c, g, or t
aacgagcttcgtaacccccacacccgccaacacccccttctaggaaaacttncgagaaggatttaaagctgcgttctcttgctgttgccttggagttaccatcgccaggaggatcggctgggcaggggacgaactagcacagagagccggaagtccttgaccactcaaatcagcaactttgataacatatcaaatgtttctgagcaagttgtgctcactagcgtacgcacactcccagcagccaatggagcaggaccacctgcacactgggagaatgtttggggataggacaaggatacctgagtcaaactatcctttctataatccccgggaacagaaatcttcattatgctatgatgcggaactaaaagcactgcgggatattatttctacccaacgttccgcgtcctgactcagaactcaggcccagatcagaatgggatcccagatttgtcttgaaaagatcgagaataacaaagtgcgcttgcagttagaaaaccgctcgagttcttcgcgacgaagagctgcaccggcggcggatatgtctcccgacatatcgaacacagcaacctacccaccccgcaaacacaagctcgaacccctacctagctaccgcgccgcgccgccaacacgcccctaggcacaatagacaccaactcggtctcacaacacggagccaccgcgtcgagcatcgcgcgggcccggcacgtcgtcgcgctccagcgacacacgcccccgcctctgtctcgaacgacacgctcttgtcaaccgcgcgcgcactgctgtaactacatacccccacacagacaatcacgcatctggcgctggacaccagcgcaaccgccggcgcgcctcggccccgatctcgccacgttaaggccaccccgcgattcattatgctacattaaccggcagcacgcctgcctagacgtatatg

SEQ ID NO: 716089 - DNA, 234 bp, Homo sapiens
atagttgtcataagcacctccggtagcccccaccctggttgccatatccaggtcctccaccaacatatcctcctcttcctcctccataaccggggctacctccacaattgccacctccaggtcctcctccatacccattggagccatccccaaatccacgtccacatgccatatacatcagatcctcatctaaagttacttcctggtcctggtccgagcagcagggacagacac

SEQ ID NO: 716090 - DNA, 265 bp, Homo sapiens
agatgtgcgagaatgacgagaggagaaagagaaaagagaaaacgtggagagaacgatgggagatgagaaagcacaccacgatgggatggagaaaaattcagaaggggcttttatcttagtcagcatatttcttgagctgtggccaacggcaccccctttcagttctgattagttttctcagcatttaaaagctcattggttgttttatctaaaagagtagttcctataaaagaatagtctcacctaaggagtgggagattgttct

SEQ ID NO: 716091 - DNA, 897 bp, Homo sapiens
agggataggcgacgcgtagcatgagtgggtgttgtggtgtctgacgtggtcgcctacatggccgcaccgggtcctggggctgcgccgtggtcttgtgaacgctttctgtgcgggtcgccccttaggggccctctttccgttacggtcccgccggagtctcttcggggcccccggcctttgttcattcccacgggtggtgaggactagtcgttggccccaggcgaaaggttggcgtaccccaaggagccaacgcgcacacgggtggttgttccgagagccgcctcacccggtggggttcgagcctcaatgtccccaccttgtcggagcccggaagtgcggcggaccctgggggttgcagtagccgcgcgagcatgggttctcaacttggggggcattactcaagtctgtttcgcaggcccacgcagagcggagggagatttggttccccaccaggggcgcgccctacctaggtggtctttaagggggcggctcctagaccccacgggcttgggacccgctccggggtgcccagcccccgcgctagacccgggcccatggtttacaagcccactcatagtcctaagtaagtacagcgcgtctcatcttcacaccggggaaagaaacccgctgtaacctccccatgttcgggtcctatgccaacaccaggctcccattcgtaacccccttaaatattaatatagtgcgatcaaatgcccccctatttaagagcacccacagcgtgacgcacaattggggcgaagagagcacaaagtccacatgcgattaatgcttatgttcagggagagctctattttcacgatgcacgaaaaaccaccccccggttgtaaaaaaaaatggggcgaattttttcaacccataaccaaacccaccaaatca

SEQ ID NO: 716092 - DNA, 556 bp, Homo sapiens
  misc_feature (386)..(386): n is a, c, g, or t
tgtgcttttgagacaaggactttggtccctctatgatagtgctaatctagagtggccaggtgctggtggtctcacgcctgttaatccctagacatcttaggagagtgccgatgggtagaagcggatctacactgaggtcagcgagtctttggatgacacagccctggtcgctaaccatggtagatagtcccgtactctactaataatcattataatattggagcccggtcattgattgtggtgggcactctggtaatgcccatgctatcttggagtaggtgctgaaggcacgtgatgaatcactttgaacccacggaggcatcaggttcgcaggtggagtcgtgaagtatcatagctcacggggtcaacttcctagtcgctttggnagctgtagcagagccgagggctactgatattgtaataataatcaatagattgggtgagtgagggggatagattcgaaagttctgttaacgcagctagggatgggaattcttggacaagcattgcacttaaattaaaagtgttggggaggaataattggcttgttattaac

SEQ ID NO: 716093 - DNA, 1151 bp, Homo sapiens
gggacacacacggcatgttatcgcatctggatgtgcaatgtgacagagctccttcaacacaatgccagaaatcaacgaccaaggtggctgaatccacagcaggcagccttgcctgggttctaatcgcgcggacagatatcctgcagcgattcctcaacgtgatgagcttcacacaggccaaacggggaacgtatctatcgagaacccttcttcttcgccctgagatgggcaaaacaccattcgatcacagggccctgaacaagctagcaccagaccagggctattatccaaatggccctgagggatcccctggatattcaacactcacgagataaaacaacaaacgcccataactgcgacattggacacttttccaagaccatcataccagttgagacattaccaaggcaccaagcaactcattacgttggcgatcgagacaaggactactctaaacaatttgccacactaacttaatcaaggcccaaggacccaacgttggcactcgcccacttccaacgacgggtgcccatctgctggatatccactagccccaaatcgcataactgcttgcaacccaaccatgaaagcgaattacaccacttgggatggaggttacatacagtgggcatacaccgtgggcctatcgcaaacagggcaaccaccccatataaattaccccaccaaaacaatccaccaaggacatctcatcacctcagaggcctatttggaacaacaagaacacccacagtacccattggtacgccatacagtatcccaacgaaacacactatggcgcaatagtggcataccccccattcccgacaaacggtgttggagactaacatgagctcactcacaaagatgtacctcccttttgggatgaacaacgccacaccaaaagtattcatcacaggacgaaaaatcatcaattgagacaccgggcgaacttacgaacacgctttcgggccaccaaaccacaaccacgtgctatgaggacgcaccaccaattaaaacttaacggtgaaggcgggcaaacaacggcacacatcggaagattctgagacatgtgtgacaacaactggctcaaacagcaacttatgcacgagcaggcaacattacgtgccggtttacgacagacacattgtggg

SEQ ID NO: 716094 - DNA, 422 bp, Homo sapiens
  misc_feature (14)..(14): n is a, c, g, or t
  misc_feature (27)..(27): n is a, c, g, or t
  misc_feature (151)..(151): n is a, c, g, or t
  misc_feature (161)..(161): n is a, c, g, or t
  misc_feature (188)..(188): n is a, c, g, or t
  misc_feature (237)..(237): n is a, c, g, or t
gaaaacctcccggngttaccagcctcnggaaaaagccctgctgaatttatgttgtaagcattaccttaacacagtataaagatgaaaagacaacaaaaatatccttcatacttccctcatcccctcattggaacaaaaccttaaactgggngaaccttagncccctccctttccccctcccccctccnactccccccttattgtccccttgtaatattcagagagcacttggattanggatcctgaatagagaaatgcttacagataatcattagcccacatacccagtaacttaaagatgggatggagttgtaaagtgcttttataatacaatataattgttaaaggcaagggttgactctttgttttattttgacatggcatgtcctgaaataaatattgattcaatatggcaaaaaaaa

SEQ ID NO: 716095 - DNA, 328 bp, Homo sapiens
aggcccatggcgagcgcgaagtggcctatcccgacggcagcaggaagctggtcaagtccggcgtcagcaccgtgcagaacggcgccgggcagaagaccacccatctgatggcgctcaacacgctcgcgctgcaggtgctggcgaccccggtcgaggccgacgaggtcgagctgcgcttctgcttcacccatgatccggtcgcacccggctcattcgaggagcagatgatcaaggcgcagatcgcgggcacctgcgggcagaccggggtcgaaggcgacatcccgatctgggcgcacaagatccaccgcgtccagccgctcttgtgcga

SEQ ID NO: 716096 - DNA, 913 bp, Homo sapiens
ggaggcttccccgcgccggccgtgtcccgcccgttcgccgggcaccagaagttcctctgcgcgtccacgggcgagcatgggcgtgcccacgggcccggaggccgggagtgtggcgcgggggactccctgctcttcgctctcttcctggctgtgtcgcctaggctccggtggaaggagcttcaagggtcgcgcgacgcgcgtattccgcgtgtatgtctgtcccgaggggcaaaactgtcacccatcatcgcttggcatggactcttgcggcgcactgtgagacaagatcgggcgacgaatgctgaaccgttcgatacagagaacggtgcgtgtaccaagccaagcgtctgcaaggcgagcagatgcgtgtgcacgaccttgcgtcgaagatgcggccagagcccgatgcctgcaaactgcacggtacctcagggaccattgcaacctggccacgcatggcgaaggccaaccaaggcatgccgaacaaccagcctacgaacctggctcatgcgccaggggctggagtcggacaccgaccaccaagggaacaactccaatcaccatgcgcaacctgaccctgctggatagcgggctctactgctgcctggtggtaggagatcaggcaccagcaatcggagcacagggtccatggtgccatggagctggaggtgcagacaggccaaagatgcaccatccaactgtgtggtgtacccatcctcctcccaggagagtgaaaacatcacggctgccagcctggctaagggtgcctggcatcggtaagaatcctctggcttcccctcatcctggtcctgagtctacaaggcaaggcacggagcttcaaacggcgggcccaggaacttggggcacgatggcacggcacttccagggaatgaaaacccggttgaaacctaaa

SEQ ID NO: 716097 - DNA, 359 bp, Homo sapiens
  misc_feature (74)..(74): n is a, c, g, or t
  misc_feature (85)..(85): n is a, c, g, or t
  misc_feature (89)..(89): n is a, c, g, or t
  misc_feature (343)..(343): n is a, c, g, or t
gtagtgatactgtctcactatgttgcccaggctgttctcaatttcctaacctctagccaccatgtttgttggtnaggttttttgngacnctcccaaaacttaactactattattttaccactgaccagcagccttaccaatcccagttgattaacatatattctgtatgttgtgtgtattatttactatactcttatattaaagctagaaaaagaaaatgttattaagaaaaccataaggaagagaaaatatatttactgttcattagggggaagtggagcccagtaaaggttttttgcgtggcatcttcacattgagtaggctaaggaagaggaggaggaanaggaggggttgggctt

SEQ ID NO: 716098 - DNA, 190 bp, Homo sapiens
tttaaaagaaggtcctcgtacataacaagacagcatctgctctccagtggcccgggactggcagcggggacctcaggcaggcaggcaggcaggccgaagcgctcgtgtgaagatcatgtggtttggcgtgagacatgtcatgctgcacagaaaggtggccatgtcactgagcaccgcagctgaaacttca

SEQ ID NO: 716099 - DNA, 616 bp, Homo sapiens
gtatcccctagtcgaacgcagtggaaaattgttacatgaatgaacaatgtatatgtctgccagtatccttgttaggagttacatgccaatatatgtttatattaccttaatttgttctcttcatctataaataaatcttgcctacttctgtccgcagggtaaaattaaggtgattttcttctacaacatgattgagctagcatactctccaggagggaacagacaggcattctgaaaggatgttcggtatttttagagccttttatacatttgtttctgctgttgtgctaatatgctaatgtttatcaaggttgtatttttttccctcccttttctttcttgctgctggcagagcagcattatagagttatgcagcaaactctcctttgggcatttgtcattactacaaagtgttttacatttctttgctccttaaaatatatgctgcttttctgctgaacctaggataaaaagaacaaggcagtatctttgcgaatcttaattctttcgagttagggaaaccgatccagcaacctctctttcacaccttcccattttcccagtgaaactcatattcggtacagctctgtaacttcctgcagtgaaatctataaac

SEQ ID NO: 716100 - DNA, 366 bp, Homo sapiens
aggcccaccccctcatgatgaggaggcatgtgacaggaggaacagaccatcaagggagggctgtgcgttctcccaagggagatatgcttcctggacaccttcctcatcttctgtgcatgctcatgaagttgatgggctgagcactcctgagcttaagcatttgaaaaaacagacgaggagtttccgcctgtaaatattatctgtaaaaccgtgaggctggatgggaaagcccatatctcaggccatggggtctgcgtctcccctcttgaggtgacgctggacaaaagtccccagggtccgccagggggatagcacatggtggatgagtgccacaagcatgccgatgacagccagagcatagtccgg

SEQ ID NO: 716101 - DNA, 854 bp, Homo sapiens
gcacatagtgagaccttgtctgtacaaaaaaataatttaggctgggcgcggtggctcacacctgtaatcccagcactttgggaggccgaggcgggtggatcatgaagtcaggagttcaagaccagtctggccaagatggtaaaaccccatctctactaaaaatacaagcagagaattgcttgaacctgggagggggaggttgcagtgagccgagatcacaccattgcactccagcccgggtgacggtgcaagactgcatctcaaaaaaaaaaaattaaattagctgggcctagtggtggacgcctgtggtctcagttaatcagaggctgacatgggaggatcacttgagcccaggaggtcaacgctgcagtgaggcatgatcataccactgaactccggcttggatgacagagtgagaccctgtctcaaaaaaaaaaaaaaaagaccacccacaattcttatcttaaatagattccaagaccatagtggagtagaacgcacttgaaacttgtctctcatcagtcaacctaccggggagccctggcctttcagatcggggcataaccgaggcactgtcatctgcctgggtgacagcttatcctcatgggtgtaaaagcagagggcgtgactgaatacaaaggcttgccgggtcccagactccgtggacacaactgtgccacccaaaacccaaagattcatcagcagcccctgtcatcacttgacatatgccagacttcgtgaaggaaggaagggcttggggcaccccaagaagggagaacagactcgaggattaccactatggctatcacgccaggcgtcctaagagaggcgtttccagtgtcatagggcacagc

SEQ ID NO: 716102 - DNA, 405 bp, Homo sapiens
tgatctagagctccccctttctacgtctcatcactgtaggacatttgggttggtccaagtcttatgctattgtgaatagtgccgcaataaacatacgtgtgtatgtagtctttatagcaggcatgatatataatcctttgggtatatacccagcaatgggattgctgggtcaaatggtgtttctagttctagatccctgaggaatcaccacactgacttccacaaaggttgaactggtttacagttcccaccaacagtgtaaaagtgtacctatttctccacatcctctccagcacctgttttttcctgactttaaactgattgccattctaactggtgtgagatggtatctcattgtggttgggatttgcatttctctgatggccagtgatgagacgtagaagg

SEQ ID NO: 716103 - DNA, 221 bp, Homo sapiens
  misc_feature (40)..(40): n is a, c, g, or t
  misc_feature (49)..(49): n is a, c, g, or t
cccaggattagataaaaaccacagagtaaaagttggcccnatagtaacntttttgatgtcccaaattggagaggaatcccctcaaatgttcaaaaatataggaatgggtcgggtgtggtgctcatgcctgtaatcccagcactttgggagccaaggcaggaagatcacttgagcccaggagttcaagacccagcctgggcaacacagtgagaccctgactc

SEQ ID NO: 716104 - DNA, 228 bp, Homo sapiens
atctcgaggatcccgtcttacacaggctcggtaggttgtcgcctctacctataaatcttcccactatttagctacatagacgggtgtgctcttttagactgttcttagagtagctcgtctgggtttcgggaggtcttatgctttgggtctccttgcaaaagttatttctacgttaattcattatgccagaaggtatatggggttagtccttgcgtatagttatgcttg

SEQ ID NO: 716105 - DNA, 983 bp, Homo sapiens
  misc_feature (13)..(13): n is a, c, g, or t
  misc_feature (923)..(923): n is a, c, g, or t
ataaaataaaatnaataatagaatatttgaaataatttggggagggaaggaaaggctgctagaataccacctcagaacgattccagtgcctgacacgcatccgctaccatggcagaggtcgctttgggttcatggagaaggtttattcttattattttttgaaaaaccgctccatcatcattcagcaataccaagagcaccaatcatacactgtgtctcttttcctcatttgtgttttgcgtcgtttgatgattcgtattagtatagatggccgattgttagtgtcgagttatgcctctctcttccagtctcgttcacacccggcacgcaagaggcgacgaacacattcaatctgcgaaaaatcatttctagacgccagacgtgcggtcgctaactacgctagatgtgttatattgttgtaaacaaggccacgccaaactccgacacccccgagcatagcacagttcctctcatccattacttcacatgactcgactttaaattctccccacccccccgcactcacctcgcccccgccgccgaccatcacctccgcccctcctccagctttctcacccacccttaccacgccgacaacaaccgcagattcacaggacgcgccgtagctccagtgccaacctccaacgtcatatcgacgcgaccacatgactatcgtagcgcctcgccatcacctgtattcctgattatcacacacctactaacacagcattctctacttataccctaagatctctcccctcttgtccctcacctccctcaccccgcctctaacccgcgcacccctcccgctaactatctcgcctccgacacctacccatcttaacgtcccccccacccacccctactcagcctatcccctcccgcgactcttgtccatcgaatctaccatcgagtctcccttntataattaggatactcactgctgcgagcaccatccatcacactgagtacgccagtcccgt

SEQ ID NO: 716106 - DNA, 2007 bp, Homo sapiens
gggaacctacaactcggtaagttaactaaaatgaatatatctcttgatggcagaactgtctgaaagacaagcacaactaataaccacatatattcactctcttactccaaccttaccgcatcactcgggaaccctacacaaccaaacacaacaacaaaacacacccacacacaccacaaaaaaacaggggcggcgcccctctgctaacagcagatatctctcccgcagaagaggggcgccacaacgcgatagatcacacgcagtatacacacagggctatcacagtgatgagacaaaaaagaagaggagccccacctataacacacgagagagcgccgagacacataatacaccagcgaccacagacgagacgcgagcgcccacgcacagcacaaataacagcaaccaccagccccccacacaacaccgtgacccacacacacaggcagaccaacacaaccgttgagaggcacacaccatccaatcatgaggagagacaaagacgagaaaaccaccatataaaccaatagaacacgtgctgaagaagtagtggtcgacgacaagcacatcacatactgatgcggaacccacaaaacaacaaccgcactcaacaactcaacgagaagagaggacaaatatcaccaccagactgcccactacacataagcgcagcactaacacacaccctctcaaccaaacgccaccgtactgcacaaaccaggcgcgcggattaccaacccacgcgacgtagtaacaacaccaaacacaagaacgagcgcaacacaaactaccagcgccaaacagcgacacaacgcaacactgcccaacacacccaccccactgccgcgacaccaaccacacagcacagccgacctcacagccaccagccctcccatccggccccacccacacacccctgactcaacacacccacgcccccagcgcacgcccccccaccgccagagaaaataaaaaagcagcatccgccgcccggccgccgctccgccatcgaccaaccgcacacaccaccaagactgaccacccacggagcactgcagagccactcacaacagcgacagtatcatagagcggagcccacacacagacggaacatccgagcaaccaagagacacggcgccgcatcactaacgccagcctccacgctcgtgacgaccgtcatcgcacgacagactcgcgcaaaccgggcagagcagacgagcgccaccagagcccaggcgtccgcacacacccagcgcggcgcgcaccgccgcacaccgccgcgcacagcagctaggacccacgcacacgccgagcgctcaggacggccgccagcaccgacgccgagcccgcccacgcacctgctcgcgccgcgcgcgcgtccacagcagcgcccgccagagactagacgagcacacgcgcgcccggcgagccgcacgcgaacaccacggcaatgcggcacaccgcaccacacacagcacaccgcaaccggcgaccgacgcagcagccggcagcgcagcccaacaccacccaccgcacgccgccagccgcggaaggtgcagcaacacacactcacgtgagcggcagcgggcaacaacagacggcacgagaagacagcagcccacgaccaccgctgcacccacagcgcgcgacaccagaagacgagcgacggcacgacacgggactcagagaaagcacaagaaggaagacaaggaccacgcgacgcgagagcagagagaacacccgaggccgacgccgacccagcagctgcgccgcaggaccaccgcggcgccgcgcaagccccaccacacaccaacaagggcccacccaagccacgacgacgcaccgaacagcacccagaccacccctgcacgacgcgcaacacagacacagcggcacagcagcacgacagccgccacgcgacagccgaacggccaaacagcaagagacacacgcacgaacgacacatagcaaccgaccacacgcgccgcacagcccacccgcgagccc

SEQ ID NO: 716107 - DNA, 341 bp, Homo sapiens
gcagggaagctaggaaggaataggacaactgagggtctcgcaggaacaccatcaccggcatgactgccaagtcccaggtctgtctggaagccagcgggaggatcagcatcctgccccctttggtccatcctgtgggctgtggggaccaggcccctctcctcaagcccaaggtagcaaacagtctttcccgttttgtgcagggtcgtaaccagagtgtccatgtagtgctcggattcagtacaggcattcatgttgggctcggtcaatgtcacccttaactcctacgagcctattgagagccccatacccagcttcagctcagcctccccaggtcatgtcca

SEQ ID NO: 716108 - DNA, 518 bp, Homo sapiens
gctcaccagttttacagaaccagcctggtttatgggtgaagaaacaccttctcacagaacttatggggcctaagcgtgtttcagtaaagtactgggcagtttgcctgagggccccagcatgcctaactctcacccagcgtggatatgaagcgaggaaaacctgagctcacagcccaggcagcctcaaggacataggcacaccctcagcagtgtctacaagatgccctggccaccaggcaatccagccatctccctgggtagaatccttcacactgcatgtctgattgcatttttcattttttaattacagccgtagactcatatagactctgactgccaatctaaagcacctagagagtttttttaaattgttaatgttttgctaaattcttaataattatacaaaatcattatgtagaccaatagatattattgaccaagatatagtgatgcttaaaacaaagtcctctgtaatcagtacaacatgttggtagaatttaccctaaatgttaaatatt

SEQ ID NO: 716109 - DNA, 184 bp, Homo sapiens
gtgtatgcgtacaccctttcttgacaaaacctaacttgcgcagaacacaagatgagataggcatggctttatttgtttattttgtatagtataggttttactatttatcttggggctggcctcaggattaaaaaccgggaagggggaaggtgacagcagtcgtttggagcgagcatcccccaaa

SEQ ID NO: 716110 - DNA, 224 bp, Homo sapiens
taagggtcgaaagcagccgctcgcgagtgactgatttcgacttgtagccatcgttcgagatgggtggaaatcggcgaaaagtggcctactctctcaagtcgttttgaagcggatacgactaatttcaactggcctctgctaatgtagatgcgaaaggaaaattatatgaatctcgtagatttacagccggcaattgaatccgtctctgcaagtcttgtggtgac

SEQ ID NO: 716111 - DNA, 309 bp, Homo sapiens
gtagtgtgtagcatcttatccatgtagctggtctctgtgcttgggaacctgcttatcatcctcactatcacctctgattcccacctccacacccccatgtactatttcctctcccacctgtctttttccgatatttgtgtcaactcctccgtagttcccaaagtgctggtgaacatccagacagagagcaaagccatcacttatgcaggctgcatcacccagatgttttttttcctcagcatttgtgtgttaggacaacctcctcctgagtgtgatggcttatgaccgctttgtggccatctgtcaccc

SEQ ID NO: 716112 - DNA, 1321 bp, Homo sapiens
  misc_feature (275)..(275): n is a, c, g, or t
  misc_feature (514)..(514): n is a, c, g, or t
  misc_feature (1066)..(1066): n is a, c, g, or t
gagctggaagatggcggcgtccgtggtctgtcttggccgctaccggcggggcacatgtgctagttgctgcgctcgccgctcgggcggtcccatgctgcggacgcacagctcttggtggatgtactggcagatcttcgtctcagtggcagctccagagttctgttgccggagatcgcagcggttacgtcgtgcatggacaatcgtggctgccgctgtggccttccggatgcatgtcctcttcgtgctccgagctgtcgcagctgcgtggtgaagtngtaggagttgatgcgttggtgcctgaccgttgtttgatgacatgagaacatgaataagtgcgtgtgcgccaaggcatacatgtgcttgtgggatgccactccttgggcttcctccatacgagataacgaaacaagacattcggcgcccttgaccatgtggcgccattgggacgcacaccgatgcgttgcgtatgatgcgatgcgcgcggaagccacatcgtgtgcattggcgccttacnaggtagggactcgtgccaatcgacttgcgatgcaatgttagcgtgagccagtgccagaggggaccggccttagctcaccacaaggtggagttcctttggcgctgaacaccaaggcgtttggtagggcacgcccgtccttgtgggccggtcgcaaccgatcttgtggtcggtccatatacacccttcggttaacccctttgtggggcatatgggaaccgttcggacaacagtaactatcggaagcaacaaagcgagcatcgcgtagaataagttttgatcgctaattgggcgggagggatctagacacccagttgaacctttgagctgctagtgcgtgaagaacgcggaagaagatttttgggccaacgaatgatagaacgttatgcgccccttgggacttcgcaccacaaagggggaaatcttcgccaaggggttcgacacacccaattcctagggctcgccaaaagtccataggtgcgtatggtgggaagctgctacggttgaaggacaagttcgtccaggcgtataagccatttgaaccccacctgtggngaccttgtcgtaacgctgcattggttacacgtggacgcctttggagcactctaagggagaggttccacggccattcaggaacatttcgatgacgtgtggtgggaagccccgactctgttgtaggacgcctcgcgaaacgccagggggaaagccaagggtggttcccatggattgccttcgttccgtgggaaattggcattcagtaagggcagtgggttacttctggagagagcacattggtaatgttctgtagtg

SEQ ID NO: 716113 - DNA, 1091 bp, Homo sapiens
  misc_feature (230)..(230): n is a, c, g, or t
tctcgggctcggtaacgagactgcaccggtatgttttaagaaaatggcagagaaaccagacatgggggaaatcgccagcttcgataaggccatgctgaagaaaacggagtacgcagtgagaagaagcaccctgcgcgaccaaagagaccattgagcaggagaagcggagtgaaatttcctaatgatcctggaggatttccgtacgccccggtccgtcttcgagaccccangtcgtagagtgtggaggaagagccacgctgcaatgatggacacgagccacaatggctgcactgtgaagcctgggtcatctccgcgccgagtgccaccgggcctgtgggtctctgaagggtaccccgccgccccaagtcggcactgtccgaaagtgtctccggttgtggcccggggatagttcataggaaagattgatttgtgatgcaattgatgaagatataatagacgacacctcgtggacaaatagagaaatcagaagagacaccagaaaaaagaacatacacttaaaaacaaagacattaaagggtaattcaaacaaaaaaaaatctcacagggagacgagcgcgggggagggtcctagagatgattgttgcaaggctggatcacagactggagaccaacacgctcggggaggcctatgtagaaaagccgcagaggcgctggccatgataacaagtgggtcacaacaatataatacaccacgcgtttcataccattttggggcgcatggattcaaattccaaagcacgggtgggtatcggaccgaacaatgggcacggcaattcgtaaggaaaccccttgaaaaggacgcgatgggactatccaccacgaaggggagaagattccgtgaacaatatctaggggcgataacataggtacccggaggataccgcaaaagggctcgcccacggggagctagtcttgacacacacttggggaatcgcaaatatgtgtggcgacacagagcgccccatttttattcctatcacagaggcggaaacaaatgcagctcccgggagccgctgattagtggaggattataccgtgcgcatgccatcagccactccagctacaaggag

SEQ ID NO: 716114 - DNA, 347 bp, Homo sapiens
gacaggagcagcagacgagacggcagatcctgagattagctgagtaggagtaagacctgaaattctcctgggaccttggggaaaaccgagatgacaaggagaaattcaagattgaagccaggaggacaggtccaggggatcagtattgggatgctgagaattccaggacaaaagaacagagaagagggagaaggagaagagatgttttttttacagtggaaggaacctctgtaaacagaaggtagatttgattctgcaagtagggagggtttgccggggtaggtaaaaataatgaaaggggccgacacgcccacattttggtgacatttttgaatttcaaaaacaag

SEQ ID NO: 716115 - DNA, 892 bp, Homo sapiens
  misc_feature (24)..(24): n is a, c, g, or t
  misc_feature (38)..(38): n is a, c, g, or t
  misc_feature (96)..(96): n is a, c, g, or t
  misc_feature (139)..(139): n is a, c, g, or t
ctaacaggtgaccaagctcctggnttcagtgccatggnttcatggcattcagtgattagtggtaatggtaaacactggtgtgttttgaagttgaantgtgcgataaaattattagccttaagattggtaagctacgcantgaatgctagggtgggaagctggtgagccagtggccatgtagataaatacctttcaagtgtgagctgtagacgtcaatccatagaaatacttaaccgtaatgctaattgtgatcagttatgaagtcccttcagtcacattaggggtgaagagtagattggcgtagtaagtacgtcagttcttagtccatgtcagtcttaagaaacatcttgggttagccactctgtccactcccagtaggctacagaaaaagtcacaatgcgcatggttgccaaccatatgtgtattactgcgagtgtatttactctatgtctctaggcgcaaaggaaccctaaaaatccttaccattccacaaagttggagccatcgacgttgtgcagcgccactttgactaatgagtatacacaccatattgcatttctgtttgcaccatgtcttccaggagactagactactgtagtccagggtcaatttgagtgtacagaaaatgtagacaaggaattgcccaattgttaaattctgacttgctgacttaatttaagatgctcgttctggaaccaattttctccgtatcttctctaggggttgcaaaagactcagttaattgatttccaggacagtactcatagcaagttcataaaagtgtcttgagagctaaatttcttgacaaaaaagggataagatcttaagtcatacattttaattggtgtagaaggttgttcaactgaaggtaataaatgtctattaaataaaa

SEQ ID NO: 716116 - DNA, 331 bp, Homo sapiens
tgagagatgacacgcacatcaggtctgataagtaaaccttttaacaaactcttctatcatgaccttaaaaaatataggactaaagtcccagcgcgctggctcacgacctgtaatcccagcactttggaggtatctgacggttggaggatagcttgagcccaggagtacaaggccagcctgggcaacatagtgagccccatctctacaacaaattaattacctggctgtggtgacgtgtgcctgtagtcctagctacttgggaggctaaaggtcagaggattgttggagtccaggagttcaaggctgcagtgagctatgatctcaccactat

SEQ ID NO: 716117 - DNA, 196 bp, Homo sapiens
catgcttgcatttcccccacccagcatgctgcctgtccttgtgcatgtgccctgtccctgtcacttgtctgttcccacgttcatctgcctactgtcttggcccatgcccacagccctgtctgggctcagtctggggtggggcatccgtctcagcagtctgcacgtgcctggccatgccctgctttggccacttggc

SEQ ID NO: 716118 - DNA, 654 bp, Homo sapiens
  misc_feature (146)..(146): n is a, c, g, or t
acgccctcataatcattttccttatctgcttcctagtcctgtatgcccttgtcctaacactcacaacaaaactaactaatactaacatctcagacgctcaggaaatagaaaccgtctgaactatcctgcccgccatcatccgtagntcctcatcgccctcccatcccttacgcattcctttacataatcagacgaggtcaaccgagtccctccctttaccactcaacatcaagttgggccaccaactgggtactgaaccctacgacgtacaccgatctacggtcggtactagatcttcaatcgtcctagcatagcttacgccaccattattcctgagaacccaggcgaccatgtcgaactgccttgacagttgacaagtcgagtaagtactcccgacttgaagcccccaattcgtataagtacttaccactcacaaggacgtctgtgcactccatgagctgtcccccacattaaggcttaaaaacacgatgcgagttccccaggacgatcataagaccaaaaccacttatcacccgctatcgacgaaccggggggttatacatacgggtccaatgcgtcttgaaaatccttgggggagccaaaccacaagtttcatggccccatcggtccctagaaatttattccccctgaaaa

SEQ ID NO: 716119 - DNA, 1079 bp, Homo sapiens
ggcggacgcaagaggaggcgcgagggcgcaaccggaagacgagagttgaagaccagggctacactttcctaccagacttgggcctccctttgttctcctgtattcgctggctcccgccctgggtttgtttgtggtgggggtgtagcttgctcctgggtctgcgcccccttttgcggggcctggggccctcggcccccccacgccgagggtgttcccccactcaggagatctcgcgcgtggcccacaatgggtcagaatcaaagggccccatgctcatgtggccggcttccctccggccccccgcgatccccggccgctggagagaaggagtgttgtggcacacagaagtcaaaccagggtgggaccaaagtccggcaagggtataatagttcctgtgtgaaatggttagggctttaataacagtacaaggttctggacttttaatcccacggcatgtccctccgtaacgttttgctgttgtgcacgcaggttctggttatcgctctatccccccggggaatccacccccacgcccggcttccccggagctaatggtatgagcgttccctgaggctcccttaattcggtcacattcagcacttttattgtgcacacctaactaatgtggccgcggcactgttgggatatcccacgatataattgcacttgcggcactggccccaacgcccatgtaaggaaactttaaccgcctatgtgtccgcagggacaccacttataacgcagcaccgcgatgggccggcgcaccgcgtggctctacgcctgtttatcccccgcaccacttgggagcgcccgaggcacaggtggactcacctctgaggtcacacgagctttgacgccacgcctggcccacaccatggtgagaaccccactctccacctataaaaatatgagacaaatttataggcccggccactggtgaacaacagcccgtagtcctaggctacttgggaggctgaggccgcgagaattgcttgaattctcgggaggcccagcgtttccctgagccgagattgtgcccttgccctgccgcctggatgaccgagcgagactctattctc

SEQ ID NO: 716120 - DNA, 296 bp, Homo sapiens
gctcgacatgagtgctgctgcaaggaggggtttccctgagtgacaatcagcacacctgcattcaccgctcggaagagggcctgagctgcatgaataaggatcacggctgtagtcacatctgcaaggaggccccaaggcgagctgtcgcctgtgagtgcaggcctggttttgagctggccaagaaccagagagactgcatcttgtactgcggatggcagctgcactctgggccatcgctagtatcgtcacaggagtgctggcacccaccgttcccatggttacaggtcaagtcgacg

SEQ ID NO: 716121 - DNA, 1972 bp, Homo sapiens
  misc_feature (444)..(444): n is a, c, g, or t
  misc_feature (453)..(453): n is a, c, g, or t
  misc_feature (1666)..(1666): n is a, c, g, or t
tggcaggttaagcattttattaaattaaaaacgggaagggaggggtgccttacccacccctgtgccgtgctggtggcgtcgtgaggggcactccttcaaatttccccaagaaagagaggacgcgttctcgtgacacgtggtgatctctgtgacgggggtttcaaacagaaagagtgtgcctgtggcgccctctcctttcttaagtctctgtggtgtctcaccacaaaagagaggcaacacacacgaacgagagatatctttctctggagattcacaaaatcctgtgggacagagggcagcacttattacctgtggctctcttgagcgccatagagtgtgagagagaggtctctatctcacctctcgcgcgggacaacccaaagagcgatatatgtaacaaagagggggcttcttccaataattatactacaggctgtgtgggcnccgcgagtngataatagcgttggggcaacgcacgtggcgagacaaggtaatcacaacatataagatgaggaagaaatacgatgtgctgcgagaaccccactctcaataatatcatcccccaccgaaggcgtagctcgcccctgctcacccaccagcgaggccgagcgcaacatacgaaacgaagacaccgaatggacggccaccgtgggcgcgacagaaacaacgaggcaccacccgagtggtgacacaacacctggtgggcgatccccacaacaccccgaggtgtagacggcgccaagctagaaagcggcagactaggggcgacaccaaaagacaacgaggctagtggacaacctgccgtgaggcacacccaggagggaaagaccacacacaactaaagaaagcaaccacggcgtgaaacacagcaacgcaatagtggcagacaaagaacgaccgcactagggagcaagccatcctgcgcgaggcgacgaaggcgagccatgaagggacccacccaatcactcaacacaccctaaggtcataacaggaggccgaccacaaagtcgggatagaagcgaaacccccaccccgattcaggccgaccacgctataaaaagtacaaagcgaggtgctgccccacacaaccaacaatcgtccacgacccgcgagaggaacaaaggattacacatataccccacatcacgaagcaagggaacaaaacatgtaggctacccagagagaacacaagacgcactaaacagaggcgggacagtggaggactgcggacacccccccaaaaagagcactagcacatgctgacagcagccacaccacggatggtgtatcgacacagatggcgcacacaccacacggcgggctgccaacccaaagcgagaacaagaggaggaggtgactcacaaccatgtacacactggagcacgaagaacgcaaacgaggggcaaacacaccagagggaccatcacgaaaaaacacccgcgcggaatcacagaagcacgcagaaagcacacacgaaacacgacgaggcgcacatcagcgggcaccgagaaagaggacaccacaccaaggcaaacccacaccggcgtgtgtactgcgtagaagaaacaccaccagtaggaataaaccacagatgagacaatcacaccaacgcaatctaataagcaggggagcagacaatgagacaaaggagcaaccagccaaacanattcactaagaaaacacggtaaggggagacaccacaccagcgagacaacagaggacgagatgcacaacctccacatagcaagcagacaaccagaactatcgcgcaaacacgggcaataatatagtggagaggccccccacgagcgacagagacaaccaagaccacaaaaccgccgccaccacgacgtatagagtgagacaacgcagaacagggatggaaacacgcaacaccaagtcgtgaaaaacaaacacagcgccccaaagatagaagaaagaaaaacaagcagagcaaacaacagcaacgatc

SEQ ID NO: 716122 - DNA, 314 bp, Homo sapiens
tggtgatagacaactaggtcagtttgaggtgtagagcatttaccaagatagttgtaggtaaagaagggcagatttattagagaaattgtgaaaatatgttgcagtgggcagctcagcagagaaggggctacctgcaaagaggcaagggctggaggaaagttttatagggtcctgctgaagggtgctacgtgtggaatgaggtcattgtgcccgcaggttgtttgtgattagctgtctctaacaattgttcatacaataattgttcattattgttctcaacttggggctctccccaacctggggacccttcctta

SEQ ID NO: 716123 - DNA, 1415 bp, Homo sapiens
  misc_feature (395)..(395): n is a, c, g, or t
gagtggcgcagtcggagccctgttgctggccctgaggaagcgaggagtgctgtctgtgcgtcgtgctgagtgctgggctgtgacctggcgagtgctgatggctgtgctgtgccccagtgccctgatgtgtgactctgtgtgatgctcgatgcatgctgtgctgtgctgtgcaatgaccctctcccccactctgtgatgtgctgtgctgtgtgctgtgatgtgctgtgctgtggatgctgtgtgtgttgcccgccccctgtgtgcactgtgtggccattgtacaactgtgtgatctgtgtgcttgcctgactgcccctgtgtgtgcaagctgtgcaccaagctgtgcatactgtccatgctgcaaaccattgtccactgtgttgcatgtgtgtgcnctgcctgagtgtgttgatgctgtgcctatgactaccaatgtgtgatgatgtgattgtgaacctttgctgtgctgccattgtgacgtgcattgcccttgtgttgacatgctgtgccctcaattcctttgcaccatccattgtgaaccaactgatgcttgcaatgctggctgctgtcttgatgcattgcagattgccgtcggcatgctttggatgtgacgacttgcattgcgcacaggcatcgcacggcgtgttacctgatgggcagaccacgcgcaagactttccatgtgaccaacatatgttgtgcctgagcccttttctggaacttcaattggtttgccttgtgacaggactgctggactttgttcgcaacctcatagcgtgctgtgccacgcctgcgcaggtgacggacccaccacatgtggaacatgatgggcccagctgggtccacctgtgaggaccttcaacccagagtatgggcacgacattcacacattgacgacggacagacattgacactgcacttcctgttggcttgccttttatgggccaaccaagttggatttctttaccgttagcattgggcacggcgctcctttttcggaagtccttcgaggcggctcggagacccccgaagacaagattaagacagagccgaggcgtccttggaggcactacccagaaccttttacaggcctttgtttcccgggaggctctaggccaggttcatccggctcgccaaggcgccaaaagggcaaagagacacacacactacctacagcaccaccaagccaccacaacaacaacagagcagaagacaaacacaacgagccggcaacgaaccacacaaccgagccacccacgaaacgagagagctaaacgacacgggcgcagcacacacgatacacacgagaagaagacagcacaggaatacgacgcaccgcatgagacaatcaccacgggccccacacagacaggcaaaaaaaccaacgagcagggagccgacgaagcacgacacagg

SEQ ID NO: 716124 - DNA, 753 bp, Homo sapiens
tccgaattaagcgtcaattggaacaattacaacttgcggacaaacccaggaaaatgagcaattctagggtccctacccacccggttgaaaaggggtggccccaggggccgaatgcccagccccggagggggccctatcctcctcctttccgcgaaaactctctctcaaacctgtttaggccatctgaacgacaaggcgtcgggctttttgggaggacaagggggatgcccgggtcttacaattcctcaaacgcccaaaaagctgaagggttcgaaaagcaggggggttcatgtccctcgcaggttctgtgtgagaacgcaaattgacaaaacttggtcggtctcgaaacgttgctccctcagcagaactccaggacaacctgtgcaaacgttgtcccttgctccccctcgggaaagcgcgcccgccggggatcttctcgatttgataaaaggctgtgcccgccacacttcacgaaacgtggttccgcccagctacaatgtgcgttgagggcggttctgtggaagaccccctgtgagactgggacggttgagagaaatctcctctcgctactagctcggttgggaacgagtaaagtacccctcgtgtaccatttccagccggaactatctcgagcaggtaagaactataacgtttaccgcctgacaacgcattctgggttgccgccccctcgtgaaccattctcccctcgccccaccccagggacaattcatacgagggggttgtgctgtgaag

SEQ ID NO: 716125 - DNA, 245 bp, Homo sapiens
ctctgcttctgccaggatcttggtgaggagtaagtgagacaatgcatgtggagcataacaccgtgtctggcccagaattcatgcttgtagaatggttgcagctcttcttaattattacatgatagcacatagatgccacacggctgcggcgagtggcaatagggccacttgaggctcactcactagctgcttcctgcttctgccagctgacatttaaaatctgtttttaggcaggctctggtgag

SEQ ID NO: 716126 - DNA, 439 bp, Homo sapiens
gcagctgagctcccaaagtgctgggattacagatgtgacacgtgcccggcaacagatgctatcattcttaggattaagacaggctgaggagtttgcccagccgtctgttggtggtattggggtcgtattcctcgctcctctccagttcactgcctttagaagctgctttcaaagaagacggctttcaggacaaggcatcacacttcttctccagcacgtacagtcctgaaacctccaggaggaagctgccccaaggtttcctgtgtcccaagcttgctgggaactcctcatccttccattcaccctattctcaatatccctgcccctccaatcccttggcatacttgacttagccttggccaccctggctagggacattgatcaggaaggagtacagcgtatagaatcatagaggaattgaaaggaactttggaatata

SEQ ID NO: 716127 - DNA, 499 bp, Homo sapiens
gagaatggaggtaaagtgtctggatctgggagctcgttaactatgctgggaaacggtccaaaagaatcagaatttgaggtgtaattgtatacatatatattatttcaagatggacagatctatggagataattatcttaccatcaaatagatgagaaaaaataaaaaccagaaaggagaaatgaatgtaaataaaaaactcataaaggaagaagcagaagaaggaaagagcatgaatcatatctattataaattaaacaaaacaaatagaacaaacagaaaagacaaggaaagagaaatatgaaacaaaaaataacaaaagggaatataaagaaataaaaaaataaagagaaaatggaaaggaagatatgaaatatagaaatccaaaaagatgaataaaaaataaatgataaataaaaacatgatgaggaacaagatcttaaatgaaaatggagaagaaaaaaaaaaataacaaagcaaaataaaatcaaaatttatat

SEQ ID NO: 716128 - DNA, 179 bp, Homo sapiens
  misc_feature (41)..(41): n is a, c, g, or t
  misc_feature (49)..(49): n is a, c, g, or t
  misc_feature (107)..(107): n is a, c, g, or t
  misc_feature (129)..(129): n is a, c, g, or t
tgtaccaggccccatagatatagatttgtaatgtttttaanggctgtanagttttgcattatacctgaatcttgatgtttaagagctatgtatattgaggacattanttctttgtcttgtgttgcaaantttttaccatgttattattagtcttttaaccttatttatagtttttttgt

SEQ ID NO: 716129 - DNA, 181 bp, Homo sapiens
caatccaacagtagactaaaaaaatcaacttgagctaacatctaaatatagatagcacagccagagctaccaaaatgaatactggattctagcaaataactaactacagtaatttgcattgtaaacaggaacatactcacttggacattttcagtagcaacattgctcaacacggaaggag

SEQ ID NO: 716130 - DNA, 362 bp, Homo sapiens
  misc_feature (115)..(115): n is a, c, g, or t
cctctttgtcatcaatgtgtatgctctgtccccatccttcactcctcctcaagctcacaccaattggtttggcacaggcacagagctggtccctagttaagtggcatttatgttncaaaaggggagttcccaatttcggccatttatgtgtgtggcccagcggtttctccaccgaaatttggtccctggttttttagcccgccacacaaagagggaggtccccggcgggtgttttaaaaggtcttattggggggcacaacgcgttttgggcttttcccaccggggggggtgttttctggatatgttgtttccaccggttttcccaaaattatttgtttgaggcccgggggtgggctgttaga

SEQ ID NO: 716131 - DNA, 289 bp, Homo sapiens
accaacattaagtgacgaagaacaacttccatctatatcatcataaaaatgtttaagtaaaataaaaaaagaaaaagaaagaacaagaggaggtaacgggggtccccgatggaacaaaatcctcacatttcatctattacagtctcaatctctggactcacagtataaccaacagtgttaaacaggcattactactatatacataaacttcccactaacagttcacgctgtaacactacctaatgttcccatgtccccacccctaccccctcccagttgcttccacagt

SEQ ID NO: 716132 - DNA, 1066 bp, Homo sapiens
  misc_feature (501)..(501): n is a, c, g, or t
tgccacctccacctctcgggttcaagagattctcctgactcagcctcctgagtagctgggaatataggcgcccaccaccatgcccagctgtaatatttgtatttttagtagagacaagaatttcaccatgttggccaggatggtggtttcaatctcttcacctcgtgatctgcccaccttggcctcccaaagtgctgggtttacaggtgtgagccactgcgcccagccaacattaacttttaaaagatgtagtagaagctgtgcctagaggaacatttatttctttatattaggaaaggagaaaggttagaaatcagtggtccaaacatctttctcaagaaattagaaaaacaacaccaaattaaacctaacgaaaaaggaaataataaaagcaaaaattaatgatgtagaaagtacacattagtgagatattcagcaatgtcaggtggttcttagactaatgagggctggacctggtgtctcacgcctgtagtcccagcngttgggagtccgaggtgggtggatcacttgaggtcaggagttgagatcagcctgaccaaaatggtgaaaccccatctctactaaaaataccaaaaattagccggctgtgctggcacccatttgtaaccccagctacttgggaggctgaggcaggagaatcgcttgagcctgggatatggaggttgcagtgagtcaagatcttgccactgcactccagcctgggtgacagaaggagactccatctcaaaaaacaaacaaaaaaaaaaaaaaaaaaaactttttgggggcgcctctgggcccttcgagaaaaagtctttaaaacacacattcggtggggcaacgagggggcccaagtagtcagaagacgacgcacgttggggcaacagcggggtccccaaaggaaacaccgggggcagcagcaaaggtcgcggggtccccgccgaataaaacaagcgcgggggggacaccagagccggtgtcgaacaaacacaaagtggacgccggagagcgctacagggagtctacaagggaggcccaagcagagtgaataaattaccgcggcagg

SEQ ID NO: 716133 - DNA, 588 bp, Homo sapiens
aggagaggctgagatggaaggatagtttgagttgaagagtaagagagcagcctaggcaacatagacccgaactctaccaaaaattgaaaaataagccaggcatgatggtgtgcacctgcggtcccagctacttgggaggctgaggtgggaagatcacttgagcctgagaggtcgaggcagcagtgagccgtgatcatgcccctgcactcgagcctaggtgacagagagaaagaaaccccagtctcaaaaacaaaacaaaacaaaacaaaacagccatattggttcagggaagcagaactcaaagaaaacagagaatctgaaacaaatctcatagctgcagaagttgcagaagaatagaaatgacaaaaaattaagtgttgaaataaatgtctttccatatatggggaaaaatagaactagattcctatcttatactatatataaaattaattccagatataccaaagacccagttctgaaatactttaaaactttaaagctattaagaagactcaggagaatatctttataaaaggctcaaaggcggggaagattaaagggggaagaacatcatagaccggggcagta

SEQ ID NO: 716134 - DNA, 626 bp, Homo sapiens
  misc_feature (54)..(54): n is a, c, g, or t
  misc_feature (69)..(69): n is a, c, g, or t
  misc_feature (82)..(84): n is a, c, g, or t
  misc_feature (103)..(103): n is a, c, g, or t
  misc_feature (149)..(149): n is a, c, g, or t
  misc_feature (244)..(244): n is a, c, g, or t
  misc_feature (253)..(253): n is a, c, g, or t
  misc_feature (389)..(389): n is a, c, g, or t
  misc_feature (399)..(399): n is a, c, g, or t
  misc_feature (401)..(401): n is a, c, g, or t
  misc_feature (478)..(478): n is a, c, g, or t
  misc_feature (598)..(598): n is a, c, g, or t
gcctactatgtgcaaggaatgtactagacccccccagaagaaaaaacaaaaaanaagaaagaggcagcnaaaacaaatactnnnggagaggaaaggggcagtngagtaagagggctaagggaactgagaagcctgaggtgatgggggcnctgccttaggccttctcttcggcctcctcaccgaaatcctcctcctctcctgcggtggcatcctggtactgctgaaactcagagacgaggtcgtncatgttgcnctaagcctcggtgaactccatctggtccatgccctcgcctgttttccagtggaggaaggccttccggcggaacagggcagttaactgctccgagaagcgcttaaagagctcctggatggctgttctattgccaatnaaggtgactncnatcttgaggccacgaggtgggatgttacaaaaggctgttttgacatttttggggatccatttcacaaagtagctgcngtccttgtcctgcacgttaagcatcttctcatcgacctccttcatggacatccgaccacggaagatagcggccacggtgaggtatcggccgtggcgggggttacaggcagccataaagtncttggcatcgaagacctgctgggtgagt

SEQ ID NO: 716135 - DNA, 975 bp, Homo sapiens
tctgtcaaaaatcagttgactgtaaatgcatggattcacttccgggctctctattctgtttcattggtctgtttgtttttatgccaataccatgctgttttgattattatagctttatagtatattttgaagttaggtagtgtattgtctccagctttgttctttttgcttaagattgcttaggctatttaggggtctttgtggccattactgacagttaaaatggccctggctcatgtctcctgggcctctacagtactttaggtggggaagtactgtggcccacatgtcccaacaggctgtgtgtggcacctgacagtgctttgtgccactgtggagcaggtgttactccctcatacgaattttaggattattttatttatttcagtgaaaaatgtcaatgaaattttgatagggattgcattgaatctgtagattgtttggggttgtatggacattttaacaatattaattcttccaattcatgaacatgggatgtcttttttttggcacctgatctcagatatgggacagctttctaattatttgtatcttcaatttctttcacaaatgttttatagttttcagcatacagatctttcacttccttggttggatttatttgcaagtattttttgtagctattgtaaatgacattgttttcttgatttctttgttagggtatagaaatgctacagattgttgtatgttaattttatatcctgcaactttactggatttcatttattctaacatcttatcggtggaatctttagggttttctataagatcatgtcatctgtaaacagggacaatttaagttcttcctttccaattgtggataccttttatttcttcctcttgctaattatttgtggtgagggcaacttgtggggttgcggaggaggaaaggctggtctaggggtacggttgctgggttccagcacacagtcacagatattgaggcagaagaaa

SEQ ID NO: 716136 - DNA, 137 bp, Homo sapiens
aggatccccccctaattgctgttttggtgtcacaaaatgaaatgaaatattttatcctttggcaaataagacccgtacaccaaacttcattttacatgatgtccagaattagaactcaaacactttgatttattcct

SEQ ID NO: 716137 - DNA, 154 bp, Homo sapiens
caagcggagatgctgtgagactgatgttgccagctgatggtatatcgctgaaggcgaactcagccaggttgggaggtgatcttgttgaagcgttgggtgatcctgatcatggtgggatgtatctgtcttctgggcagcatctccgctttggaaa

SEQ ID NO: 716138 - DNA, 702 bp, Homo sapiens
tgttcctcatccgcctccttgttcgcagctgccgcctccgccgcgcgctcctccgccggcgcggactccggcagctttatcgccatgagtccctgagactctacgctttcttttgaatcccctgcatcggatcaccggcgtgcccacaccaagtgtcgagacagcagcccgtagacgaccagctccgaaatcaccaccaaggacttaaaggagaagacaggcaagttgctggacagcacggcaggatatacatggcaaggagacgcccctgcataacgggcaatgctcaccatgcatgggcacccaatgggggcaagcccaagcgccagcgtctttggcaaccacactgtgccagcgtaaggcaccgccacaggcacaacgcagggccacagcacaagcggtagcgcgcgcacgggcacagccaaggcaaggcagcgcacagcacaccacagcgtcgcatgcgtgcaggcgggaccaatggcaaacgccggaccaccttggcgggggcaaacgcacaaactttcgggaacacacggggaaaccactttcggcaacctggtggcgaaacacacgaggcgcccgattagggaatacggagctttcccaaacaggcacccctattcaacccccctagggcaagcgacccaacaaaggtcacggtggcgacacaacgggccacttgggcacaacggacaagtagga

SEQ ID NO: 716139 - DNA, 102 bp, Homo sapiens
atgcagccaaaacccgggtttccccaggttagaggtaggtttgaagtgagggctgtgtcactgtggtattatgattcgttgggggtaagactacggtatggc

SEQ ID NO: 716140 - DNA, 1213 bp, Homo sapiens
cctactcctcattgtacccattctaatcgcaatggcattcctaatgcttaccgaacgaaaagattctaggctatatacgaactatcgcaaaggccccaagcgttgtaggcccctacgggctactacaacccgttcgctgacgccagtaacaactcttcagccaaagagccccgtaaaacccgccacagtctaccatcaccctctacatcaccgccccgaccttagcatctcacgcatcgggtcttcgtacttgatgagcccccactccccaatacccgaagccccctggtcaacgttgcgaagcttgagggctcctatttattcgtatgccagccatctagcctagccagtttattcaactccgtctggatcagcggatgtagctactcgaacatctcacatactacggcgcctgtagtcgcgcgctactgcggtagtcagtagcccacaaactacagctcaatatgacagtcacactctacgtcatcagttcctatctatcgaagcattacataactacagtgggcctccctgttgaagccgtgcgtcctaacgccttagtcaggaatcgacgaaagaacatccgtccgtggatgcacgtccgtgcccatgcatttgacccttttcgcctactacctatggactacagcctccaaaacgtacgctagagaccaggcggaaaccccacggcgacactacgcccgaagcgggaagtgcccgacactagcacaccaggcctacaacatccgaatccagccgcaaggcccccttcggccacctactcccacaaccacgcccgaagtaccatcgcaacagataccccactcacccaaaacgccgaaaaccactaacgcaggcatcggaggaacaaccacaacgacgcccgctccccggaacccacaacagcacatccgcgacgcaaacccacccctaaccacccggacaaccgtcaatccgacagataacccggatacgccccaccatcgtacccccgccaataaaaaccgaccgagcccccccggacatgactacggctccccacccgcaacacacaaaacccacacgcccaccaaaaaagggcgccgccatccccacggaaacgagcccacacaaaccaacacgaccaccaaaactacacacacacacgacaccgcccagaccacccgccacaacccccccaccacaccccacatcgcgcaccaacaacgaacca

SEQ ID NO: 716141 - DNA, 418 bp, Homo sapiens
cccaggttcacgccattctcttgccttagcctcccgagtagctgcgcccgccaccacacctggctaatttttttgtatttttagtagagatggggtttcaccgtcttagccaggatggtctcgatatcctgagcttgtgatccgcctgcctgggcctcccaaagtgctgggataacaggcgtgagccaccgcgcctggccgactctgaggttttcttgaaactcctattttatgagttgatagaggtggttatggggctgggttaggaaggtcgttgtgaccttgaactcctttatgggttgatttgccaattgatcccagtgggattgacagtgcatttggggcttgatggattctgctgcactggctcacgtggacttggggacacaggcgtagtggcctctggccttgtgtgcct

SEQ ID NO: 716142 - DNA, 354 bp, Homo sapiens
tgcctgagactggctttccgtactacgttgaataacagtggtggaagtgagcatccttatgtgttctagatcttagaggaaaggctttcagtttttccccattcggcatgatactagggtatagaaggtatgttccttctatacccactttttttagagttttcatcatgaagggctgttgaatttctccttttttctagtttgagtgttcaaatgatgattttaaatgtggaaaattctgtgtttcctttccttatttcttattctccctatgacccccgctgtccccgccaaggccatagctttttacatgatgtaacaaatacttgctgaagaaagcacccatgacttcag

SEQ ID NO: 716143 - DNA, 192 bp, Homo sapiens
cggcccctgcttgtgtcgctaacaatctacacacaagtctccatgcaggacgaatgggcctgagcatgagcgtggtgactgcacactggatttggaatgcaatgcagctccatccactttctctcagcaagacgactaactctagagccagatactctaaaaagcgccctgtaaagtcccatgtgcttatgg

SEQ ID NO: 716144 - DNA, 255 bp, Homo sapiens
gcgccagacacaggtgtcgtgaaactaccctaaagccaaatggaaggaaagactcatatcaaccattgtcgtcattggaccacgtggattcgggccaagtccaccactactggccatctgattctataaatgcggtggcatcgccaaaagaaccattgaaaaattttggggaaggaggctgctgagaatgggaaagggctcctccaaggatgccttgggcttgggtaaactaaaagctgaccttcacgttgggat

SEQ ID NO: 716145 - DNA, 358 bp, Homo sapiens
  misc_feature (358)..(358): n is a, c, g, or t
gtaacctgtatttcccttctttttctctttagctcggcttattccagcggtgagtttcgccgagatgctcacaggagtgaggtcgctcatgggtttaaagattcgggagtacataatttcacagccttggtgttgatctgcctttgctcagtatcttcacctgatgaccatttgaagatcatgtaacattagtgaatgaagttactgaatttgcaaatacatgtgttgctgatgagtcacctgctctcttcgggaaacctatggcgacacggctgactgctgtgcaatgcgggaccctgttacagatgtgctccttgtcacacacagatgacagccgcctcccccgattggtgagccn

SEQ ID NO: 716146 - DNA, 801 bp, Homo sapiens
cgctcagctcagcccgagcctaacccagttctccccacgctttccataggaatctatggggttggcaagagccggcctgctatcccccagccgctggccgtcaactcagaccacaccccagatggagccacgcaggaccatacgcctggtgtgggcaaatggcaatcgtctatgacactggaggcctcgatcatcaaagggaagactaccatgccgagtggatgaacgcgagactgctggtgggtaggctgcgagcctgtccttggagggccttcaggagccgcaatcaagcaagggtttcaaagacaagcctccacgctagtgcttcgtgcttgtgactgacgaatctcgcgtggggcccaaatgcgaacaaggaccaagaatgacattccgacctgctgtactcatgggtaacatgacggtgtgaaatcaacaagcacggattgccgaggggcaggcgtggttgctggcagactgggcgtgtccatagtgcattgcaaggaccatgggggccgacagtcaatccatgggacattggccactccatgaccggggcatcaagggcagttgccatcatgggaagttaaccacagccgcggtgcttcaccaaacagacgctgagctggagaggcgctgccttgtagtagacgcgcgggcagagacagtgtaggggcgacctggtgctaacccgctggtctaactagccaccgagctgccacttcagcgacgttcagcctcagcttgttggcgtacattgaagaagtacagtaggaggaccgagacaacaagccccagctcccg

SEQ ID NO: 716147 - DNA, 117 bp, Homo sapiens
gactgcacgttcagtggtgggcaggtgctggcagcacacctctttgttctctgggcattggctccagcggagttgaaaaatgccaccatggcctcccggctctccaggtcccctggg

SEQ ID NO: 716148 - DNA, 555 bp, Homo sapiens
tcggcgtgaaatgcgggaacacgggaatcacgtgttcctgggtaagaggtaggtcatatataacgggagaatccaggttatagttgaattataaatccaacagaacagtattaaaaactcgggcatatgtatccacatatttactattcccagcactcttcaattcttcctacggattcaaattaatatctggcgttacttcctttcagcctaaatctcgttgataactctaagactgtattcaactctgagataaaaatacaagttcacttttttgttattcatatgctatacatagacatgtagttatagtaagccagagatattagacttagcttcatttattttttgttgttgctggagaaaactgattttttttgcatacatgtatggtaggcagaaggagctgagtaggtctctacatccatactataaagaagctgctaaaatgtaatacaatcataagtaaaatcatgctaataaactatatctatgcagtccagacaccacagtatatgagggacactgataacctatagtacataagaattatac

SEQ ID NO: 716149 - DNA, 485 bp, Homo sapiens
cacaagtgtcataccagctgtgcagagcgcagcacacaaaatgaactctgtcagctttctgagagtaagctctatcaaactatgtcatgcggacatgagatggaggctcacatattgtaagactcctggaggcgcagaacgtcctctgagttcgatgctgccccagcctgaggcgtagcaggtggtccccagtgctggctcctgggtgggcaggcccaggaccttcacaacatctgtgatcttggcaggctctgacaggcggagcagcatgaggtcatggctggagtctgcatctggtctaaggctttgatgcttcagaaggctcatattgtagagcgggtgtgggaagctgtggctgacagggaccctctggcctgtgtcttcaggctcaaacaggttgtgccgacccagccagacctggctattcctggggaggaagggggtggatgcatgaggagagagaaaatggggaaagggatggatcg

SEQ ID NO: 716150 - DNA, 475 bp, Homo sapiens
  misc_feature (58)..(58): n is a, c, g, or t
cacgaggcggctggaggcgcggctctcggtgcggcctgagctcatggccaccaacggntttctccacgcggcgacggtgatcgccctggcggacacctcctgcggctacgcgaccctggcccacctgccggagggggcgagcagcttcaccaccatcgagctcaaggccaacctcctgggcacggtgcgggaggggggcatccgctcggtcgcccaggcccagcacctgggcaagagcacccaggtgtgggacgcggtggtgaccgatgagggcaccgggcgcaagatcgcgctcttccgctgcaccgagatgatcctctacccgaaggaatagcggtagggtgcgtagagcgaagcgaaacgcaccgaggggcgccggtcgacggtgcgccctgccgcggaagcaatcctgagtcaggtttgaggctcggtgctcgccatggaggggctagcgtcttggaccgactatacccgg

SEQ ID NO: 716151 - DNA, 955 bp, Homo sapiens
  misc_feature (638)..(638): n is a, c, g, or t
actaactattgaatttaattgttgaactagtcctaattaatcgatacacgcatgtagtatgtgtcacgaagataattcacataaggcaatcatgatagtctatagcaacagacttacgtaggattatcactagtccattggattacagtagtcagctgtgtccttccacactaacaagctagaagccggacatcactatactactaaaacaatacgttcataactgtacgtacagaactcagtgtacatttagtggcctaaaagtggtagaaccaccgctgtgttactggtgctaagattgactaatcttagtctaagaatattcatgaaatggtatcattgaggtcctctatgattgtaatgggttattccttgtgtaacagctcattactcagcggtatcacatctcagatcgcttcctcacgtcgcgcaacgcatccttctcaagacaacacataataatagtaatccatgtcgcaagtttgcatcatcgttgcatatatttgatgcaatgccattgttcggtgttcctatacggtggcataagataattgcatcgtagctacctttgctttaccatggtcagcaatcattgtgcataccacagacgttagcatgactactcgtccgctcctggnctcgtccattgggaacggagacgtgactccaagatgaaaccacgcaagaggaggcgcacatttagtaataaattatgtccatttctacatcgaaccacattgatataatacaaggtagtactcctagctagtgttaatacgggctcatactggatcgcgcactgtgcattataccgcgagatgatggtcctgttggccgtttaatgtggtatcactgaattcacacacccgactagtgaaggtggccattgtcactttgtccacatttcgggtacacttattcccatgaatcaaccgcgttagctcacaaaggctcc

SEQ ID NO: 716152 - DNA, 530 bp, Homo sapiens
cctacgcgttattttctttgcactgactatctattatctggatatacccgggttatattgtccatttacttactgaaggacatctaaggttgctccctagtataggcaatcgtgaataaagctgctataaacaccaaacatctgtgtgcgtgtcttttgtgtggacataatttttcagttcgtaggggtaaatcgcaaggaacacagttgctggatcatatagtaagaatacctttatttttgcaagaaacctctaaactgtctttcacagtgatggtaccattttatattcccaccagtcatgaatgggagtttctgttcaccttctcaccagtcatttgatattgttcattgttaatgggtttaggccattctattaggtgtgtagtgctatcgtttttaattggcattttcctgatactgtcacttttttctcatatgcatattctccatctttatatcttctatagtgaggtgtccgttaaggtcattgtcctgttcttaaagtctggttcttcgtttacttattg

SEQ ID NO: 716153 - DNA, 264 bp, Homo sapiens
tctacaaaaaaaaaaaaaatcaaaaaattagcggggtacgggggcatacacctgtggtcccagctactggggaggctaacgtaggaggatcactgggagaccaggaagtggaggctacagggagccaggatctgggtcacggctctccagctcggggcaactacagtgagaccccatcgtcaaaaaaaaaaacacgagagaaaaaacgaaaaacacccaatatcaaaacccagaagggaaacctcggaaatcccacaaaagaag

SEQ ID NO: 716154 - DNA, 1920 bp, Homo sapiens
gtggcacagtgcggtcactgcaggtgctcaggaggcggctcctcggatggctgaacgggtgagtggaaccacccctagtcggcacgagcgcccgctaggcgtacccattgtaactctcatttggctgcatgcctatccggtatgtacatctcgcagcgccaacaggatataagagaaaaataatagcgatcatacgcctatctgtgctcatctcatattcatcattagtttggcgtgcttataagtgcagggccatacagcatatattgaatgctacagttcaccatatgtgatgccctaactaacctggcgcactgattactgagcttgtaatatgtgtgtgctacttaagccacagcgatatgctcaatatacccacgaatagacactctctatactagctaaagctacgcacgtgaaattgtgcctctaaaaggtgtgctgaacctcctaaagcttcagagaggaccccttaaaacgcgagggcgaatcttatcacgtgcatctgccatatgatcccccaaagaaaacgatgtgacagaggccggtgggaataaagctacaaatcataatacacgtcgtcgagaagtcgacgagtctcaacttcttataggcgccgaatggcgcgtagaggcaccccccacgagagggcgccacacgtgaagtattatctagtagcaacaacgttgcggtgtatatgagcagcgaagagtgtgacaaacgcaggcaacacagcccagaagacgcacgcccatgaatactaccccgactaaaccaaagggcgcctcgtgtcgccaagaagagagcagcgcctcgtagtcaccccacgagtagtgtgcgccacgaccaggcgatgacgggatatggagagataaccacccgggacatgcacgaggagagatgtacttcccccccccacaaggaaaggcacaccaccaagggaggctatgtagggatgtgttccccccctcttaaacgtatacatacctataatacaccacgtattaagaccagtccctctgaggctaggaacacttcggcctttcggagcgccaacactcatatacggacaattacctttaagaacatccacagagggggggcagccgacaggataatacgacccaacttcatactatcacaaggatcacacggatatttggatcacacacacacagcacatacagaataggatacacaaatcaccactcgaagacgagcccacattgttcctacagaacagcaaagaatgcagacaccaaactcctttttgtggccacatcaaacctgctccaacgttgtaaacctcaacactagttcatctcgtcacccttgatcacatctaaacacacccgaacgcagtcatccatgtatccacaacacgccagacaagtcaacaccaccaacccacgagacagaatccaactgatcgtgtcaacacgacacagaaacagagcaccccgcccaaccacaacagactcgctcaaatcgaccagcgcgcgcaaacacaaagaacgccatccatcgggccacacacgcctatgcaactcaaaacgagaacacatagaacgaagaacagctagcaaacacgacaaccgaaaggcaggatagacagtgagagcacaacagagcgtgagacaagtagatagcatacaaagatatgtagtcaacagacggccaatcaaacagaataacagcccaaaccagacccgaatgcgcgatccgaagccagcacacgaagcaagacaagatcgatcagagacactcgctacacggcaacagcgcgaacgacgacaaacgagagcatcgacacgcacgcaccgagcagagcacgatgagacgatccaacgagacacacaacgcagccaacagatacgcacacagactcagatccgacagaacaccacaccacagaattaa

SEQ ID NO: 716155 - DNA, 123 bp, Homo sapiens
tcatcatcatcatggatttgctggtgcagtacaactaggcttaatagggactcgaattcgagcgaattcaagcttctaacgttagaagcttgaattcgagcagtagtagtagtaggcggccgc

SEQ ID NO: 716156 - DNA, 171 bp, Homo sapiens
tcatcatcatcatggatttgctggtgcagtacaactaggcttaatagggatttggatttgctggtgcagtacaactaggcttaatagggaaattcaagcttctaacgttagaagcttgaattcgagacgttagaagcttgaattcgagcagtagtagtagtaggcggccgc

SEQ ID NO: 716157 - DNA, 817 bp, Homo sapiens
tggtatagcatttcaaggtctatgctctaacacgcaaccgcgcccaactgtggccggtacacaacaatccacttttctgataggactcgctaatccactgtctgaagtctcagctaagaagactccaaggcctggtctccaggctggaactgcctggggctatctccaccacacaacacactggtaccttggctggaccaccagcaggcttctacatgccccgtgtttctctcacagatttgtcagcttgggctgatttgaggattgctcacagaagtatcagccaagatcccaagatcaagtatccgaaagagaacaccaggtgggacttatatgttcctttgtatggccgagtcactggaatatgtggcatctctctgtccatagtcacagagggaagaaacagatggcatctctcagatgggcgaaccagaatgtatatggttaaaagaacacatgggatggaacaggttgccaccatcgttggcagtacacttaataaagtctgccatgggccgggtgtcggtggctcacgcctgtaatcccagcactttgggtggcagaggcgggcggatcacgaggtcaggagatcgagaccatcctggctaaaagcggtgaaaccccgtctcatactaaaaatacaaaaaaattagccgggcgtggtagcgggcgccaagtagtcccagcaactcgggaggctgaggcaggagaatggcgtgaacccaggagtaggagctcgcagtgagccgagagtggggcagcaaaataaaacgacccgggggggatgctcttgggcaagccaatgagcaaggctcgt

SEQ ID NO: 716158 - DNA, 298 bp, Homo sapiens
ggtccgctggccacccagctgagaggagaggcgcccccggggacgcactgagattatgaggctctggtcctccactggccactcactcgtgaccctttccatccacggcggagccttccaaggcctacctcctgccgtgtggtgatctacctgcatctggtaaatgtcgcgcagggacaccgtgcgatgatactgaatcggcagtggtcacaagaaagagacatcacgtaacgtggagacggacagaaggaccaagatgaaaagcagtggacatccatgacccgatgaaagtacacca

SEQ ID NO: 716159 - DNA, 155 bp, Homo sapiens
tgacaataatggccaagggtgcctgcctgactgtaggggcccccaacccaacccctgccccaaaagtgccccgccaaccttgggatttactttttaaacaaatttcctttaaactgtttcaggccgcctgcggattaaaatggggggggctgtga

SEQ ID NO: 716160 - DNA, 876 bp, Homo sapiens
  misc_feature (1)..(1): n is a, c, g, or t
  misc_feature (207)..(207): n is a, c, g, or t
ngttctgtatctcttatgttgtcggtgtttggttgctcgcctacgtttggtgtcgccgtgctatatgtgtggtggttgttttgcgcgtctctgcttgttttctgcggttggtgtgcgtggcctcccgcttagtttgtcttgttaattcctctccgctagacaggcgctggtgctgctgcgcaacgcgtctgtttgtccgccggtaancgccgtttgcggggaaagcccggttcgtcgcccctcccgcggtgttaaacccccgcccccggtagttttgtttatccctctcccatatttgggcccttgcttccccccacccgaggaccctgggtcccccgagttctcttgtcggtgggaatactcgcgccccccatatatttttgtgttgtgcgccacccctttttccggggttttcccttgtgcgcgggtcccgcgagaactatttcccccgggatgttctgcgcccctttcttccgcccgctggggcgcctgcttattgggccgtcgccaaaccccccctggtggtcctcttggatacgcccgatcacgcccctccttacgtgtaggttgtagccgcctcgtcgtggtgccctgggaatccttgtacccccccacccgttggtggtcagccgtcagccccctccgttcctctcgggtcgtcatttttcgctgttcttcccccccccgcccgcggtaaaagggcgcgggcagcatgcccccgcgccggttttgacagctgcttcttttctggattgtgccatttccattatgcatatctcctcctgccggggtcgtgtataaagggcctctacccccccttttttaatttcccccccaatgttccccccccccttttccccccccccccaaaaaaaa

SEQ ID NO: 716161 - DNA, 185 bp, Homo sapiens
cttgtcttccacaacctgagctatgtattgccatctctgccaggcttcgagctagtgcgcagttatagcgaaagtgctgaaaaccgtggctctagggaggtcaagacttgtgtcttagggttagggtgtcatgcattgtacttcttccattgacccaaagttcaggtgattcactgctcccacta

SEQ ID NO: 716162 - DNA, 552 bp, Homo sapiens
attgtatcagaatggtggacatcactgcatcgagctctcccctcccccacccgccagccaggcgccccagagaggaccagagcagccctgagcaacgcaaagcgcaggtgcacaccttccatctacagcctcgtgccggacgggacctgtaaggacacggccattgtgggcaacaaggacccaccttccatctgtgccaccgtcccagtgaaaaccttcctcaacatcacgccagctgaggttgctgtcctggtttgggcaaaagattggtcaagcttttgtcatgaattgtgctgacacttgggggccaaaaaatatacttgttggtccttgggactacacttgctgcaaggatgaacgaattgacccacggattcctttgtaatgaacgagcatcgggtggagccccccaaccatttaaacgtcaatttgtcacccatgactgccaaggacggctaggcgtgatgattgggcaaaagaagggtatccagtggcaatttcatcaagcaagtaaatgttattgaaatggcctcccccaccttcaggcgtacc

SEQ ID NO: 716163 - DNA, 169 bp, Homo sapiens
cccgagatcgtgccacttcactccagccggggcaaaagagcaaaaggccatctcaaaaaatatacatatataagggagataaagtttccgattttccaatacagtttcacattggaacagccctaatggatacaactttatggcagggttttagtgtgtgagtgggatc

SEQ ID NO: 716164 - DNA, 458 bp, Homo sapiens
  misc_feature (234)..(234): n is a, c, g, or t
  misc_feature (384)..(384): n is a, c, g, or t
agtgatcccctgcgtggctgggctgctcgggttagatcgtcaggaaaagcataaaaaaaaaaaaaaaaaaaaaaaaaaaaaattttgggccgcccgccccaaaaatttttaaacctttttggggggcggggccccaggtagggaaaggtagacctggggcaatacgcggcccctaaggaggaaaacccggcgccataactaaggggctgtgggtttcttcacaaaaaaaaaaangcgccgggggggaaaccgaggcttgttctaggaacaaacttcccaagaggggggctctggagggtccataacggggtctcctacacacaagggagtctccaagcgcgagagcgcctggatattaaaaattagcgccccggccgctggatncacacaccagccacaccaagaaacctccaccgacacacacggaacgccacacaacaagcaaccgcacaaacagt

SEQ ID NO: 716165 - DNA, 442 bp, Homo sapiens
atataactatttcaggtcatcagaaactcttgaaaacaccattttttagtggatccatggtattttattatatgaatttatgaaatctagttaaccaactccctattattagatatttataaaatctacttaaccaaatccctgttattaggtatttaagtcattctcaggttttcactagtctaatcaagttgctgaataggtacatgagattttgtctgagtttgtgatgatctttcaaagaaaatacagaaggcagtggcctggttaagagctcacatttgggagctaaggcacttggatctgggtcccgcttccagaactagtgacctatgtgatcttgggcaagtcccctctgagtctcacatgattctgctgtatgatgcaccatccttagtgatttcctattattggaaataaaaatatttttaaaaagttaaaa

SEQ ID NO: 716166 - DNA, 860 bp, Homo sapiens
  misc_feature (614)..(614): n is a, c, g, or t
  misc_feature (618)..(618): n is a, c, g, or t
  misc_feature (624)..(625): n is a, c, g, or t
  misc_feature (645)..(645): n is a, c, g, or t
  misc_feature (648)..(648): n is a, c, g, or t
  misc_feature (653)..(653): n is a, c, g, or t
  misc_feature (655)..(655): n is a, c, g, or t
  misc_feature (662)..(662): n is a, c, g, or t
  misc_feature (671)..(671): n is a, c, g, or t
  misc_feature (675)..(675): n is a, c, g, or t
  misc_feature (677)..(677): n is a, c, g, or t
  misc_feature (682)..(683): n is a, c, g, or t
aggatagtcagctgtaccaagccccttggcctctcccatgcacacaaacacctcctagcaagacctgttggttagctggcacatgcttcggcaatttttttatactaccaacgtgaccataaaggcatggcattcgttgtgactggcacccatatgtttgactttttttctttaagactatccacatttacaaattaacggtctggcgagtgttctgtttcccatttactttaatagctcacctcctcccagactttctacaccctgtttcgcacctcaggctgaggatgtcctggacctccccctcttggtccctactagagacctctcatacagatctgtggtgcccagtcattgggttgttgatcacgtgcttcacatgtgaactaagttttttacttccatcagactacaggccactaccttctgtgcctcctccacccctcaccaaaccccatcttttactatgctgtggggcatcagaactccggaatgaccagcatgatattttcagagtcttgtccccggggtattagcacctctttttgaacagggaattgattcaagattggacatggtctcctctgattatcaggtactggggctgagggcantaanaatagnnagcctccctcctcgtccccngcntcaananattgccnccatatttntcancntcttnntcctcccatcccttgagagcacgcagtacaatgagtcagaagccccgggtaggcaggtagccagcacctcataatgccatacatctgtgtagtgtacataggtgtaaaatgcgctctcatgtaaggcccactggtgtgtgtcacacgaagaggatcctctatagtcggccgcacgca

SEQ ID NO: 716167 - DNA, 210 bp, Homo sapiens
gagatggcactactgcactccatgcctgggcagcagagcgagactccacctaaaaaaaaaaaaaaaaaaaaatcagattttgtgaaacctcactcactatcacaaaattaccttagaggtacccacctccatgtttcaattacctcccaccaggtaccttcaatgacgtgaggatttgggggctcaccaatataggggatcctctaaagt

SEQ ID NO: 716168 - DNA, 766 bp, Homo sapiens
  misc_feature (614)..(614): n is a, c, g, or t
  misc_feature (618)..(618): n is a, c, g, or t
  misc_feature (624)..(625): n is a, c, g, or t
  misc_feature (645)..(645): n is a, c, g, or t
  misc_feature (648)..(648): n is a, c, g, or t
  misc_feature (653)..(653): n is a, c, g, or t
  misc_feature (655)..(655): n is a, c, g, or t
  misc_feature (662)..(662): n is a, c, g, or t
  misc_feature (671)..(671): n is a, c, g, or t
  misc_feature (675)..(675): n is a, c, g, or t
  misc_feature (677)..(677): n is a, c, g, or t
  misc_feature (682)..(683): n is a, c, g, or t
aggatagtcagctgtaccaagccccttggcctctcccatgcacacaaacacctcctagcaagacctgttggttagctggcacatgcttcggcaatttttttatactaccaacgtgaccataaaggcatggcattcgttgtgactggcacccatatgtttgactttttttctttaagactatccacatttacaaattaacggtctggcgagtgttctgtttcccatttactttaatagctcacctcctcccagactttctacaccctgtttcgcacctcaggctgaggatgtcctggacctccccctcttggtccctactagagacctctcatacagatctgtggtgcccagtcattgggttgttgatcacgtgcttcacatgtgaactaagttttttacttccatcagactacaggccactaccttctgtgcctcctccacccctcaccaaaccccatcttttactatgctgtggggcatcagaactccggaatgaccagcatgatattttcagagtcttgtccccggggtattagcacctctttttgaacagggaattgattcaagattggacatggtctcctctgattatcaggtactggggctgagggcantaanaatagnnagcctccctcctcgtccccngcntcaananattgccnccatatttntcancntcttnntcctccctttgggtgacagctctcagtgcaatgttccgatgccctcgtggtgtgtctcagagagagggtcttctatagtctcg

SEQ ID NO: 716169 - DNA, 141 bp, Homo sapiens
aaacaaagctagatatctttataataatagcgaataataccaaagaaaccgattgtatcacgtttcggtgttgtcgctacatcattttcataaactggtgattcttccaatttacgacgtaggtataatccaaataatcct

SEQ ID NO: 716170 - DNA, 454 bp, Homo sapiens
aagtacaattatttagttaccttaagttgcactgatactaccattatatcacagtgcacacaaaacaaatgagatatatgcttatactaatcagttttacacaaactccctagtcaaatttgtttcaggccaatttaaacattagcacttaacagttttatacctgtactttaagtaaggttttaagttgaaaggtcattatttctttatctgaaggattaaaggaaacaggaacccagtggctaggtggtttgggaagaacactcggtgatggcggctcactgaatttggctccagcatagttctgattggcttgtggcttaaaaagtaagctaggacttgacaagttcgcgttccagttttgattatttgggaagtttttgttcttccctccgttttgcatggcctgccatgtggctgctgacgagttgtaaccatgtcctctttctttttt

SEQ ID NO: 716171 - DNA, 282 bp, Homo sapiens
aaaaaagaaacccattttttaaaaaaaccgctttcaaggccccttttcccgtttttccggggggcaaaaaaaatttgggaaagggaaaaggttttgttttttacccccccccccccccccaaggtttaaaaaaaggtttcccccaaaatttggtttccaaaaaaattttgggggaaaaacctttttaaaagggtttttgaaaacaattaaaacgggttttttttttcccccaaggaccccccccactgggtttgggttcaaaaaatttttggaaaaacccca

SEQ ID NO: 716172 - DNA, 103 bp, Homo sapiens
ctagaggatccccgcgatatcttgcacgtactggtggcatgaactcctatcaatttctcagcgcgcagtgatggccctgagctacctgacggctcgatacttc

SEQ ID NO: 716173 - DNA, 1263 bp, Homo sapiens
ccctatataaatgctcgctttttgtcgttgtgtttgtatacgacttagatgagagaattttttgtgttccgacaacgaggggtagtggtttgctgaaatagcgttggtcagccaagtgttgatgtgcactcctacctcctgcgttgtagtgagagaagctcgttgtcctcctttctatacgggggatgtgttcttggtttcttccctcgacagatactcgtctggggggaaagataataatataatatttgggggagaaacaccaactacttgggtggtggttgttctttgttttcctcgtttataaatatattatatgatgcgtcactacaaaaggttgttgtaacacacatcgtggagaatggggaattgtgttgtgtgggggggtggtttgtaaagaggttgtttaatatatgtggtggagaacagttcgtggtttctgtctcctcgtgtggggggaatccttggttgtatatactccttgtagttgttttttgttggctcgcacgcagttttatccccctctcacaggggggaataactcctgggagtggggtgttgtgtttgtgaagagggtgtgttccacagaggcaacacacggtttatatgacccccacataggcctcctgttgtggggtaaaatactcccgccctctttctcacagtcggtaccacagggggaatgtttgggggtcacaagggagcacacacctcacactataagccacgagtggccctgtcgcgtgtgtgttagacacacatgtacacacgttgtgtattgccacgcgccttgtgtgtgttatatatgtgttacacacatgggcacacgcgtttttgtaatgtggagaaaatttgtcccacatgaaccacacacgggggtttctgtgaggttcttgcttttgtgtttgttctttctgttctttgtttcgcggcggaccctgtgggggacctctcctctccacacgagtcaccacgtgtttatgcacgtcgtttctgtcttccttatcctccacgtgtttgagaaaacaccaagttacacacggtgaaaatgttggttctcacggggttaacacgcggagaaaatttctggcgtaaccgggctccttccctgagatgagttttgtaaataacacctatctgaaacgaggcttctggctggtcctcttttatcctggatgtggtttttctgtgtaaccattccttgaagtcccggtttggaaaaatgtactcttttccaccagaaaaacctttaatccctcggcc

SEQ ID NO: 716174 - DNA, 334 bp, Homo sapiens
  misc_feature (25)..(25): n is a, c, g, or t
ttactagactatccctgggccttgntaggattctcctatccaattccatgcagtacagcatagggcaaactggacagaatagaaaggacctcaaggctctgggcctgtgttccctgtatatcccaagatctggagatttgacatgctaactaactcatctgcagctcagtggcagccaccttgtgcctctgaggtatagtagctacgctggggacttcctgttaaacacgtggaccccaagccagttctaacaccaaaggtgtttacaaagaaggacttggctggtcacatatccttaggccttgagtttaatgggtagaagtgccgccctctt

SEQ ID NO: 716175 - DNA, 200 bp, Homo sapiens
accacaacaggcccaccttgctcttattctgccaggtggtgagggcgtctaccagctgggtgagcataaaggggctctatgcctccagaaagctgatgccctggcgctcgaagatgcgaatgtccatctggaggcaagatgtggcgtgcctgggtcagccaggagcctgggctgggtctcacaggaggctcatggacaaa

SEQ ID NO: 716176 - DNA, 217 bp, Homo sapiens
  misc_feature (19)..(19): n is a, c, g, or t
  misc_feature (50)..(50): n is a, c, g, or t
  misc_feature (91)..(91): n is a, c, g, or t
  misc_feature (131)..(131): n is a, c, g, or t
  misc_feature (172)..(172): n is a, c, g, or t
ttggataataccttccttnaagtaacctgaaaggtgatttacccaccttnagtccccactgcctaaagtcttatgacttccaaattgctcnagtaaatgctgagtggatatttagtaagaaacctatgganactagggacaaatatgtgttcattaaatatgcatcatatantctgcaagcacctggcctggtctcttcaaaaaggcagtattggcc

SEQ ID NO: 716177 - DNA, 1312 bp, Homo sapiens
  misc_feature (363)..(363): n is a, c, g, or t
  misc_feature (808)..(808): n is a, c, g, or t
  misc_feature (822)..(822): n is a, c, g, or t
  misc_feature (858)..(858): n is a, c, g, or t
  misc_feature (860)..(860): n is a, c, g, or t
agctaggaactactattttgttttaattgcgtacattttgcttggaaatcacaggaagaaacacaacaaagcattgcccaaggtacagaaacaataataaacgtacttaaaactcatttaaattccagcatttttctccttattttagaagtttaacatttcagaagcagacactgcctcccttcctgcaacaactttctcctcttaagtctcatttttccccagtttcaagggcgaattctagaactccccggaaccgccaccagttaaccagaattccgtggctttggaaaataaaactgctgttatagctcttctgggtatttgagaaatgcacttgtgaagggttagagttgaatcttntgatgcgaaagtcgggttttcctgatactgggattccgggattccaggtgttggggtggcccaattcctgcgagaagcaatagcgggcggtaacatgaggagcacggtgcgtccagcgagtccttccgcctggggccctgccgaccccctgcctgcgcccccaggactctggcctcacccggccgtgccggggcctctgtgacgcggcgttccaggcactcggccccggccgagcccgtagctagagcggctcagagacaggaggcggcggcagcagcggcggcatgaaccactgccagctaccggtggtgatcgacaacggctcgggaatgatcaaggcgggcgtggctgggtgccgggagccccagtttatctacccgaacattatcggccgcgccaagggccagagcctgcgcggcccagggcgggctagaactctgcgtgngcgaccaagctcangactggaggagctcgctgttcatcagttacccagtngnagcgtggtctcattactctcactggcgaggacagtggagatcatgtgggaacgcatatctagtgactataagctaaagctgaagccgtgttatggcccagtcttgattactgagccagtgctgaaaccagtggccaaccggtaacagatcacggaaatgtcttcatgagcatctgggtgtccatgccttctatatgtccatccaagctgtgctggcctctctttgctgctggcattcaatactggccatagtgcatgaattcaggtgctggggttaccacagagtgtgcccatctttgaggggttactgtctgactcataggtgtgcaacaactggatctggcaggcttgactcacaaatagctcatgtgcctaataaaaacctggtataatgttgtcaatgttcggaaaaaaatggtgaaactcaagaaattcgtatgtggcgctacacaa

SEQ ID NO: 716178 - DNA, 1389 bp, Homo sapiens
  misc_feature (400)..(400): n is a, c, g, or t
  misc_feature (1223)..(1223): n is a, c, g, or t
tgacaagtttgccaccgggtgcaccaggtgcccgtgtgattgtgacagacacgtgggtgatgaattgttaccagctaccgaggtgctctggtggcccagcacgcagtgagcgtgcacctgtactgtgaacgggagtctcggtatgcatgtacgtctctcgaccatgatctacgaacttggcctgtcgcagtggtccgtcagaccactaccagatgatggccatgcagccaagaccactgcgttgattagcatagtggctattgagcagtctggagtaacgagttgttggtgcactgtgagggctagtaggagggtgcatcattggcgaggccaagagccagggcatctggtagccacggagtccgctgggacaggtgcataggagaggtgaggcgtgggnttgtagggagctcctagagcaaactctcctgggagacctttggttggtgaacaaccgatgggcataggggatggttcgcgaccatatgtaccacctcgaagttcgaacttgggagactcgcgtacacacggacgattaaggcgcgcatacgctcgttactgtgggctacacgcgctcctgccaagcttactctggaggaccgtacccacgctatctcaatactccctcgtggtgaaagggcccaacggcgtcagcgcgcccattggactttgccttttggggtcgcgaaggcaattcgttcaaaggagatcgaagggtgcgatgtcgcgcatcaacgaggcgtgggtaacaattggcgatagtcgccttgttggtcgtcccgttagggaggtccccgcccgcgcgagaattgctaccccacgcggcttttgggaggcatttgtttccattgggggggattggcttggggggggtccctcgggttgtgagccctttctgtggcgacacgtatgagggagagggcgctggtcccttcattccggtcggtgggttaggtggtaccctttggtgctttggccggtatctaccgttggttcgtcgcgccttggaatcagatctctccgcgttctgagggacgggattggcttaaggcggcttgccggattccaattgttcacctgtagttacccccctttttttaggttcaccagttgggccaagaaattagggggtgcaccccaggaggacaagggctttcctatgccgcatccctcttgtggggaaggcgcctttggagagcgggtacacgagccctttgaatgtnttatcctggggggggtacgagccttctttggcggcgtaaggcaaacacgcattaccactgtgcaggcgaacccgatagaatcttcgagcaggagtaccgggggagcagagagcgtcaacaatggtggttcggtggatcgaaattatcatccgcggagcgaaagtac

SEQ ID NO: 716179 - DNA, 307 bp, Homo sapiens
aaaaaaaagcacaggtagggcagtaactgctgatgtgtaagctacaggaagttatccagaagatctagtgaacaatattgtacggtagctacagtacagcaagcatatttacaaagtagacaggacagtcttctatgggaagaagatgccatctaggactttcatagctagaaaggaaaaaaacacctggcttcaaaggacaaggtgactccggttaggggctaatgcaggtggtgacattaagctaaagcaatgctcatttaccattctgaaaatcttagggcctttaagaatgatgctatggaaa

SEQ ID NO: 716180 - DNA, 2572 bp, Homo sapiens
  misc_feature (2398)..(2398): n is a, c, g, or t
  misc_feature (2488)..(2488): n is a, c, g, or t
  misc_feature (2530)..(2530): n is a, c, g, or t
  misc_feature (2552)..(2552): n is a, c, g, or t
  misc_feature (2561)..(2561): n is a, c, g, or t
atgggactgccccgaggaggacaagaagggcctgtgtccagcccccaaggaaaccggccggcccgggggccccgctcctggtggtcgggagctcccggaatctcctgtctcccctgtcagttatgtctgcctcccaggctctgcagaccgtggccctgtcggcagcccacggcagcagctcagagcccaacctggcactcaaggctttggccttcaacggctcccctttgcgctttgacaagtaccggaactcagattttgcccatctcattcccttgacaatgttataccccaagaaccacttggatctcacattccaccctccccgacctcagactgcgcctcccagcatcccctcacccaaacactccttcctggcctatctcggactgagagaaagagcagagactgtctgagggcagccatgttctgtaccaaaaacagagagacaaaagacaaaaaaaaaaaaaaaaccacaaaacttaaacacaaccccagcaggtgtatgttgctgcaaaacctacagaccccgatgggtctggaacatgtgtactgtatatctttagtaaggaatagaaaattggctctgtgtgtatacctattgcattgacctgaaagctgctttatccaatcttcagagaggtgacctactgcatacttctaccttcagaggcatgcctccccagccacccactcccactctcagcccttctccgtacttttctctgaaaggaatcttgtcttgttaaaccctaaagagagtgtccttaatagcaatcagcacttgtaagcttatatactggtgcatttggttttctgttgggtgaatgcggtgtgtgggcgtttgtggattctgaaagagaaagccgtgtgtcgtgtgccatgacatttctattgcacattctttgtactggcttctttaacagcgatgaacgttcttttccctcctgggttgttcatccacgacagtctctccctgtgctccttcatcacctttccctctctctttgatggctacagagtggtagggcctggtgcttagtcgatgaaggaatggtagccatctacagtgctgctggagatttccgccagagcgctggagaccttgcgctcagatcttctctggtgatgaagaggcgaggaatcaagtgactgatctggaagaaatatctcgcagcactgcagctaacatcacagaacttaagtgtgttttgtgtgtgtgcccacacgtagacaaatgtgtacggtgcacacacacagtgcatcattttttaagggcagattatatatatatatgagatgtattaattcagtggttaccatttgtttgcaggaaaaagaaatgtatgggtgaaaaaatttatggttgataaatccagccaaggagattaaaaggggtttggataaattctgggtataaatgctcagactaaaaaaaagaaatggcagttttgcacagtgctatggtcttgcactagtttttgtttctcatctgaaaaaaaaaaagtaaaataaaaggaagaaaatgtaccttttttatggaatgagtagactgtatgtttgaagatttagccacaacctctttgacatataatgacgcaacaaaaaggtgctgtttagtcctatggttcagtttatgcccctgacaagtttccattgtgttttgccgatcttctggctaatcgtggtatcctccatgttattagtaattctgtattccattttgttaacgcctggtagatgtaacctgctaggaggctaactttatacttatttaaaagctcttattttgtggtcattaaaatggcaatttatgtgcagcactttattgcagcaggaagcaggtgtgggttggttgtaaagctctttgctaatcttaaaaagtaatgggtgatttaaaaagaaaaaaggaaaaaaatctttggctgaatatgttcattgcttgtatttttaaaacaacagaatttccagtatgaaacaggctgaaagagcaggaagaaatgttctttgtataataatgggaagtttggaatataaaagtttatatattatttatctattggagaactggtgtacaggaggaacattttcttactgtgttgctgttttccatcatgtgttatcctaagagttggggttttttaaaatctgtttcaccaggggaaaataaaagcatccctaatgttcttcctctagtcagtttgctttgctgaaagctccctggaaattagtacagttctacaggaagccagaagactgtactgtctgtccacaccatggtctcctcagtcccctccacgccagcccctcttccccacacctagtaggtgtgcttacaccttccctttgccagtcatcccgccatgggatggggggagcctacttgggtgccctgggnaaaacctgtttacactaagggagatgcccacagggagcggggaagtccaaaaaacccttcagttcatttttccagcagagacctttgctnttgggcaagggttttaaacgatgtttcaaccttggccaagtnaatgtttttaagttaaagggcnttttgggtngtttttggggg

SEQ ID NO: 716181 - DNA, 2570 bp, Homo sapiens
  misc_feature (2396)..(2396): n is a, c, g, or t
  misc_feature (2486)..(2486): n is a, c, g, or t
  misc_feature (2528)..(2528): n is a, c, g, or t
  misc_feature (2550)..(2550): n is a, c, g, or t
  misc_feature (2559)..(2559): n is a, c, g, or t
ggagatatgttttacgagtacatagatatgtacacatgcacacactcacacagagagacacacacaggccttctcatcctaacaaacccttaataagcacgattctgacccctgtcagttatgtctgcctcccaggctctgcagaccgtggccctgtcggcagcccacggcagcagctcagagcccaacctggcactcaaggctttggccttcaacggctcccctttgcgctttgacaagtaccggaactcagattttgcccatctcattcccttgacaatgttataccccaagaaccacttggatctcacattccaccctccccgacctcagactgcgcctcccagcatcccctcacccaaacactccttcctggcctatctcggactgagagaaagagcagagactgtctgagggcagccatgttctgtaccaaaaacagagagacaaaagacaaaaaaaaaaaaaaaaccacaaaacttaaacacaaccccagcaggtgtatgttgctgcaaaacctacagaccccgatgggtctggaacatgtgtactgtatatctttagtaaggaatagaaaattggctctgtgtgtatacctattgcattgacctgaaagctgctttatccaatcttcagagaggtgacctactgcatacttctaccttcagaggcatgcctccccagccacccactcccactctcagcccttctccgtacttttctctgaaaggaatcttgtcttgttaaaccctaaagagagtgtccttaatagcaatcagcacttgtaagcttatatactggtgcatttggttttctgttgggtgaatgcggtgtgtgggcgtttgtggattctgaaagagaaagccgtgtgtcgtgtgccatgacatttctattgcacattctttgtactggcttctttaacagcgatgaacgttcttttccctcctgggttgttcatccacgacagtctctccctgtgctccttcatcacctttccctctctctttgatggctacagagtggtagggcctggtgcttagtcgatgaaggaatggtagccatctacagtgctgctggagatttccgccagagcgctggagaccttgcgctcagatcttctctggtgatgaagaggcgaggaatcaagtgactgatctggaagaaatatctcgcagcactgcagctaacatcacagaacttaagtgtgttttgtgtgtgtgcccacacgtagacaaatgtgtacggtgcacacacacagtgcatcattttttaagggcagattatatatatatatgagatgtattaattcagtggttaccatttgtttgcaggaaaaagaaatgtatgggtgaaaaaatttatggttgataaatccagccaaggagattaaaaggggtttggataaattctgggtataaatgctcagactaaaaaaaagaaatggcagttttgcacagtgctatggtcttgcactagtttttgtttctcatctgaaaaaaaaaaagtaaaataaaaggaagaaaatgtaccttttttatggaatgagtagactgtatgtttgaagatttagccacaacctctttgacatataatgacgcaacaaaaaggtgctgtttagtcctatggttcagtttatgcccctgacaagtttccattgtgttttgccgatcttctggctaatcgtggtatcctccatgttattagtaattctgtattccattttgttaacgcctggtagatgtaacctgctaggaggctaactttatacttatttaaaagctcttattttgtggtcattaaaatggcaatttatgtgcagcactttattgcagcaggaagcaggtgtgggttggttgtaaagctctttgctaatcttaaaaagtaatgggtgatttaaaaagaaaaaaggaaaaaaatctttggctgaatatgttcattgcttgtatttttaaaacaacagaatttccagtatgaaacaggctgaaagagcaggaagaaatgttctttgtataataatgggaagtttggaatataaaagtttatatattatttatctattggagaactggtgtacaggaggaacattttcttactgtgttgctgttttccatcatgtgttatcctaagagttggggttttttaaaatctgtttcaccaggggaaaataaaagcatccctaatgttcttcctctagtcagtttgctttgctgaaagctccctggaaattagtacagttctacaggaagccagaagactgtactgtctgtccacaccatggtctcctcagtcccctccacgccagcccctcttccccacacctagtaggtgtgcttacaccttccctttgccagtcatcccgccatgggatggggggagcctacttgggtgccctgggnaaaacctgtttacactaagggagatgcccacagggagcggggaagtccaaaaaacccttcagttcatttttccagcagagacctttgctnttgggcaagggttttaaacgatgtttcaaccttggccaagtnaatgtttttaagttaaagggcnttttgggtngtttttggggg

SEQ ID NO: 716182 - DNA, 342 bp, Homo sapiens
cgtgagacagactttcctttcccctatcaatctaagttttgtttaaatgcccatcactctttgcaggggggggattaaagtttaaattgggggggcaagataaacacatgattgaaggacaggtactacttcagaagaggtaaaggcaattaattaattaattaattaatgggtttttttggagccagagaatcactgtttcagccaggctgtagtgcagtgatgtgatcataattaattggcagcctagacttcctgcactcaagcgattctcctgccttagccttccaactagctgggactacaggcgcgcatcaccatgcccagctaatttttttattt

SEQ ID NO: 716183 - DNA, 370 bp, Homo sapiens
ctgaatgctctgggagctccagctgccactcctgcagttctgggagctccagcggactctcctgctagctctgagaagctccagctgcccctcctgctgctccgaggtgcttcagctgtccctcctgctagctactaggtgcttcaggtgcccctcctgctgctctgggagctccaacagttgctctttcttcattcccagttgctcatctctcttgactagctcttgatccagttgctggtctaagagcttcttctctcttaagacaggttacatctattctctgttcaggccaggtgcagtggctcatgcctgtaatcataatactttgggaagccaaggtgggaggatcccttgagcctaggagttc

SEQ ID NO: 716184 - DNA, 2344 bp, Homo sapiens
  misc_feature (2170)..(2170): n is a, c, g, or t
  misc_feature (2260)..(2260): n is a, c, g, or t
  misc_feature (2302)..(2302): n is a, c, g, or t
  misc_feature (2324)..(2324): n is a, c, g, or t
  misc_feature (2333)..(2333): n is a, c, g, or t
tttttttttttgtcttttgtctctcagattttgcccatctcattcccttgacaatgttataccccaagaaccacttggatctcacattccaccctccccgacctcagactgcgcctcccagcatcccctcacccaaacactccttcctggcctatctcggactgagagaaagagcagagactgtctgagggcagccatgttctgtaccaaaaacagagagacaaaagacaaaaaaaaaaaaaaaaccacaaaacttaaacacaaccccagcaggtgtatgttgctgcaaaacctacagaccccgatgggtctggaacatgtgtactgtatatctttagtaaggaatagaaaattggctctgtgtgtatacctattgcattgacctgaaagctgctttatccaatcttcagagaggtgacctactgcatacttctaccttcagaggcatgcctccccagccacccactcccactctcagcccttctccgtacttttctctgaaaggaatcttgtcttgttaaaccctaaagagagtgtccttaatagcaatcagcacttgtaagcttatatactggtgcatttggttttctgttgggtgaatgcggtgtgtgggcgtttgtggattctgaaagagaaagccgtgtgtcgtgtgccatgacatttctattgcacattctttgtactggcttctttaacagcgatgaacgttcttttccctcctgggttgttcatccacgacagtctctccctgtgctccttcatcacctttccctctctctttgatggctacagagtggtagggcctggtgcttagtcgatgaaggaatggtagccatctacagtgctgctggagatttccgccagagcgctggagaccttgcgctcagatcttctctggtgatgaagaggcgaggaatcaagtgactgatctggaagaaatatctcgcagcactgcagctaacatcacagaacttaagtgtgttttgtgtgtgtgcccacacgtagacaaatgtgtacggtgcacacacacagtgcatcattttttaagggcagattatatatatatatgagatgtattaattcagtggttaccatttgtttgcaggaaaaagaaatgtatgggtgaaaaaatttatggttgataaatccagccaaggagattaaaaggggtttggataaattctgggtataaatgctcagactaaaaaaaagaaatggcagttttgcacagtgctatggtcttgcactagtttttgtttctcatctgaaaaaaaaaaagtaaaataaaaggaagaaaatgtaccttttttatggaatgagtagactgtatgtttgaagatttagccacaacctctttgacatataatgacgcaacaaaaaggtgctgtttagtcctatggttcagtttatgcccctgacaagtttccattgtgttttgccgatcttctggctaatcgtggtatcctccatgttattagtaattctgtattccattttgttaacgcctggtagatgtaacctgctaggaggctaactttatacttatttaaaagctcttattttgtggtcattaaaatggcaatttatgtgcagcactttattgcagcaggaagcaggtgtgggttggttgtaaagctctttgctaatcttaaaaagtaatgggtgatttaaaaagaaaaaaggaaaaaaatctttggctgaatatgttcattgcttgtatttttaaaacaacagaatttccagtatgaaacaggctgaaagagcaggaagaaatgttctttgtataataatgggaagtttggaatataaaagtttatatattatttatctattggagaactggtgtacaggaggaacattttcttactgtgttgctgttttccatcatgtgttatcctaagagttggggttttttaaaatctgtttcaccaggggaaaataaaagcatccctaatgttcttcctctagtcagtttgctttgctgaaagctccctggaaattagtacagttctacaggaagccagaagactgtactgtctgtccacaccatggtctcctcagtcccctccacgccagcccctcttccccacacctagtaggtgtgcttacaccttccctttgccagtcatcccgccatgggatggggggagcctacttgggtgccctgggnaaaacctgtttacactaagggagatgcccacagggagcggggaagtccaaaaaacccttcagttcatttttccagcagagacctttgctnttgggcaagggttttaaacgatgtttcaaccttggccaagtnaatgtttttaagttaaagggcnttttgggtngtttttggggg

SEQ ID NO: 716185 - DNA, 2424 bp, Homo sapiens
  misc_feature (2250)..(2250): n is a, c, g, or t
  misc_feature (2340)..(2340): n is a, c, g, or t
  misc_feature (2382)..(2382): n is a, c, g, or t
  misc_feature (2404)..(2404): n is a, c, g, or t
  misc_feature (2413)..(2413): n is a, c, g, or t
gtgtcatcggagtgctaagatgcagggccgaaagggagaaagggtttgtgaaaggcaaaagctatataggcgccttacgctctagtcaatgtccagcatgagtttctactgcgaaatgctcttgtgaaccctcttgctaaaggaggcgttgcccgcgggtcggacattccaccctccccgacctcagactgcgcctcccagcatcccctcacccaaacactccttcctggcctatctcggactgagagaaagagcagagactgtctgagggcagccatgttctgtaccaaaaacagagagacaaaagacaaaaaaaaaaaaaaaaccacaaaacttaaacacaaccccagcaggtgtatgttgctgcaaaacctacagaccccgatgggtctggaacatgtgtactgtatatctttagtaaggaatagaaaattggctctgtgtgtatacctattgcattgacctgaaagctgctttatccaatcttcagagaggtgacctactgcatacttctaccttcagaggcatgcctccccagccacccactcccactctcagcccttctccgtacttttctctgaaaggaatcttgtcttgttaaaccctaaagagagtgtccttaatagcaatcagcacttgtaagcttatatactggtgcatttggttttctgttgggtgaatgcggtgtgtgggcgtttgtggattctgaaagagaaagccgtgtgtcgtgtgccatgacatttctattgcacattctttgtactggcttctttaacagcgatgaacgttcttttccctcctgggttgttcatccacgacagtctctccctgtgctccttcatcacctttccctctctctttgatggctacagagtggtagggcctggtgcttagtcgatgaaggaatggtagccatctacagtgctgctggagatttccgccagagcgctggagaccttgcgctcagatcttctctggtgatgaagaggcgaggaatcaagtgactgatctggaagaaatatctcgcagcactgcagctaacatcacagaacttaagtgtgttttgtgtgtgtgcccacacgtagacaaatgtgtacggtgcacacacacagtgcatcattttttaagggcagattatatatatatatgagatgtattaattcagtggttaccatttgtttgcaggaaaaagaaatgtatgggtgaaaaaatttatggttgataaatccagccaaggagattaaaaggggtttggataaattctgggtataaatgctcagactaaaaaaaagaaatggcagttttgcacagtgctatggtcttgcactagtttttgtttctcatctgaaaaaaaaaaagtaaaataaaaggaagaaaatgtaccttttttatggaatgagtagactgtatgtttgaagatttagccacaacctctttgacatataatgacgcaacaaaaaggtgctgtttagtcctatggttcagtttatgcccctgacaagtttccattgtgttttgccgatcttctggctaatcgtggtatcctccatgttattagtaattctgtattccattttgttaacgcctggtagatgtaacctgctaggaggctaactttatacttatttaaaagctcttattttgtggtcattaaaatggcaatttatgtgcagcactttattgcagcaggaagcaggtgtgggttggttgtaaagctctttgctaatcttaaaaagtaatgggtgatttaaaaagaaaaaaggaaaaaaatctttggctgaatatgttcattgcttgtatttttaaaacaacagaatttccagtatgaaacaggctgaaagagcaggaagaaatgttctttgtataataatgggaagtttggaatataaaagtttatatattatttatctattggagaactggtgtacaggaggaacattttcttactgtgttgctgttttccatcatgtgttatcctaagagttggggttttttaaaatctgtttcaccaggggaaaataaaagcatccctaatgttcttcctctagtcagtttgctttgctgaaagctccctggaaattagtacagttctacaggaagccagaagactgtactgtctgtccacaccatggtctcctcagtcccctccacgccagcccctcttccccacacctagtaggtgtgcttacaccttccctttgccagtcatcccgccatgggatggggggagcctacttgggtgccctgggnaaaacctgtttacactaagggagatgcccacagggagcggggaagtccaaaaaacccttcagttcatttttccagcagagacctttgctnttgggcaagggttttaaacgatgtttcaaccttggccaagtnaatgtttttaagttaaagggcnttttgggtngtttttggggg

SEQ ID NO: 716186 - DNA, 773 bp, Homo sapiens
tggaaaaagagtctcactgtgttgcccagggtggagtgcaaatgtggctttgactctgggtccactgtgcgaaccttctgtgccctcccaggttcaaggcaattctctgttgcctcaagcctctcccgagtagcgtgggcactaaaggcgttgtgccaccagtgcccagctaaatacgtggtattttatagctaaagacggagtttccctccagtgttgtgcgcccagaactgtggctctctcgaagacctcccgtgacaaccctcgagggtgtaactcgtgcacccgcctgtgtggcctctcccggaaaaagtgtgctgtgaagaaattacacgaggtgtgcggaagccccaactgtgagtgggctgggtggggcccaacacagaccttgtgagtcagactacaggaaaggacttttgaaagccgtgggtgtggttgcacgtgttgtcacaccgctctctttagtctccccgaggtacacatgcggggagagggcccctaagggacgagagagaggataatcaactctttgataagcgccccaatgagagtttataaaggggggcccaccggccctgtggggcggccaaccgatgttagcgaacaaagcgctctatatgttccccctatagagaatttttaaacaaaagaaaaaagacgagaacagaaacaaaaaacacaagtagcggtgagaagacacatcaaagataggagagagagatgtttagataagaattgtgtcgagtcgacatagacaacaactagagtagggg

SEQ ID NO: 716187 - DNA, 753 bp, Homo sapiens
tgaaccgggggcgggaccagcgcggagccaacgatgtgtctgcgcctcggaggcctgagtgtgggcgacttccggaacggtgctgatgaagacaggcctggtgctggtggtagctgggccatgtgagcttcatcacatgctgccctgttccatggcacagtgctgcactacgtgggcacccctcaagatgcggtggctctgccgagtactgccgtggtcaacatcctctctgtcatcttccgtgcatcgtggttcatctatcttcaggccatcgtcagccatcgtgttgtgcacgctagcctcgcctatcacccccctgcgctgggaccagtgtttagctcgagcgtgggctgtgctctcctttctctgacctgtgccctcggcctcttgggctccactcgtccatgacctttgccagccaggggctaggcactgcatggctgcctgcacttcttggggagctctgactctacctgggtccctcgccaccgtgactgtcccttcgtagccctatacgcagttatactaggctcccagccctgtgcctctgggggcatccgcctaggtgctctgcgtggcggcagcaccgtgttggctgtacgctgtgctcagctcgacccaccaggctgctgcgagtctgaggccctggtgggggagacgcagcccaccgcatgactgcggggagaccccagacctggtgcggggccgtgcctgctgagctgccccaggtctgagctctgaccctctgtgaga

SEQ ID NO: 716188 - DNA, 176 bp, Homo sapiens
tgccacaaccaagaggctactgataaatctttacaagcttgtaaaatctcagatatctgtttattctcgagctcaacaagcattgaagtaagttttccgggagctcacagcaaattcacatccaagcacaaagcaatcaatcagcagggattcatcttccacactgcaagtggctg

SEQ ID NO: 716189 - DNA, 275 bp, Homo sapiens
cctgagatacaagaatactcattagaacaattactaattctataatgggccgaagtgagaggatcacttgaggtcaggagttcaagaccagcctggccaacatggtgaaacgccatctccactaaaatacaaaaattagccgggcgtggtggtgggcgcctatagtcccagctactcaataggctgaggcgggagaatcactggaacccgggaggcagaggttggggtgagccgagatcacgccattgcactctagcctgggaaacatggcgaaa

SEQ ID NO: 716190 - DNA, 414 bp, Homo sapiens
cggcacgaggacagaatccaggtgtgtacacccgcatcaccaaatacaccaaatggatcaagaagcaaatgagcaatggagccttctcaggtccctgtgcctctgcctgcctcctgttcctgtgctggctgctgcagccccagatgggctcctgacctccctaccttttcctcctcctgccttgcctctgctgaatggggccagatggtttgaccaaggtcatgtgtccatcttcaaaaagagtcagggtggggaagagtaacccctgggagaatgggtctggctttggcatcccggtgaggagaagtgtggtggatgactaggccttgggtgagcaggagaagggaagtgtggcctagaaggattctggaatctgggaccaggagagcagggattaaacatgtgcaaacttga

SEQ ID NO: 716191 - DNA, 105 bp, Homo sapiens
agggagagggagaccgtggggagagagagagggatctctaatttttgtgacaatcctacaaggaaggcagccttcccttttttgctaaacctcagagagttaagt

SEQ ID NO: 716192 - DNA, 308 bp, Homo sapiens
tgaactctctcgtgaactctccgtgaaccatctcgtaggtcaggcgtggggacgtggggtgtgaccctggggttcagggcctgccctgtcccctgtacttcagatctgagttcaaagacaagtttttctgcttcatatttgcagtgtgatcttgagcaagtcttatcttcctgagcctcaatttccttatctgttcaaagggataacagtggcacctgtaacagtgtctctccccagcctcctggaattgttgggggatgaaaagagataaaacagatcaatcattgagcccagagcagtctcacgga

SEQ ID NO: 716193 - DNA, 402 bp, Homo sapiens
  misc_feature (110)..(110): n is a, c, g, or t
ggaaaatctggaatttttagtatttaattgttacagttctttatatattctagatattagatccctgtccaatgggtagctggcaaagactttcttcatactgcagagcngattgctttgctttgcagaattttttttttttttgacttgtaactgcatttgacaactctttggcttcctttctgtgctattggagatcttttcagaaagccctcacatgtagcagtgtcttgaagtttttagctatgtcattaaggcttttggtctattggaattatttttttgtgcagggtgacagatatatggacctaacttcatcctagctttaattctgtgcttaactcatttaactctgttctcctggcttgacttcatcttgcctacccacccactcctccttta

SEQ ID NO: 716194 - DNA, 205 bp, Homo sapiens
ttttttgggacagggtcttgcgtttttacccaggctggaacgcagtggcgtaatcttgtctcactgaggcctcaacctccctgggctcacgtgatcctcccaccagagcctcctgagtagctgggaccacaagggtgcaccatcacacctggctaatttgtttaatttttggtagagttggggtcttgctatcttacccaagcta

SEQ ID NO: 716195 - DNA, 577 bp, Homo sapiens
tgcagtcctgacccatggaattctactcgttcatcgcatctgcagcctcgggttcgcatactctctttacttttcctcgtttccctctttccctgggattgactctgagtggaataccttgtgcaaatccagtaggatctactgtctgcactgtatactttgcatgactttatacgcagtatgtatgttgaaaacaaacaaaaagaagaaaacactcaacaaaaccaatctacatgtcttggactaaaaaaaaaaatatgaggtcgtatactcagttgtccgactcggaaattattgtggcttgcctctcgtgtgctttttggccctctgttgtggcctgtgtatcagccatgcatgacgatacttgtcccgctcttggaggcataacagggggaggaagagccactgtccccggtggattggaggagtgctccggtaccctctgactctcctgtgggtgttggtcggagcagaactggtgaggatgtttgatccgagatttgctgagctctccccaatcacaagctgtctgctgggttctaacctcaaggtcctgctgccaaggcccaggtgagac

SEQ ID NO: 716196 - DNA, 141 bp, Homo sapiens
gtggaatcagcgtcacttacacaaagtggtgcatctaagtggtaaaaggtaaaactacacaacttgacttatttatttatttatttatttatttatttatttatttattatatttgcgacagggtctcattgtgtcaccca

SEQ ID NO: 716197 - DNA, 244 bp, Homo sapiens
agggggtaatggtcccagagcccatggagttagtgctgagaagatctgcaggtggtgacacattccccagtggtgcagagtagaagccctgggcctggaatccccgggctgctctgtgaagtgggctggtgcagatggggactcctcgtggaagcccctgggaagaaattaaccactgtgaagggcatagcctgcctgactgtcaacgctgggctcaccagctccttgctttgtatccccagtg

SEQ ID NO: 716198 - DNA, 237 bp, Homo sapiens
ctgggatgtacattcctggcatccatggaggactggtccaggacctctgccaataccaaactccacggatgcccaagtcgcttatataaaatagcacagtatttgtatataagctaagcacatcctcctgtatactttaagccatctctagattatgtatgataactaatatgatgtagctaatgctatgcaaagtagtaatacttcctcatttagagaataatgactttttgaaaa

SEQ ID NO: 716199 - DNA, 413 bp, Homo sapiens
gcatgattcggcacgaggagatttgagagacagtgtgagagagtgagagagagagagagagagagagagagacagagacacacacacagagtctctctctttcactccccctcttttctcctcttccccttcccctcctctctttcttcctttttccatcccttttcctccctgctcgtatccccctcttttttttctcccccttcttttcctttctacctcctttccccttttttcccctgctttccctctccctccccctctcttttcctccttctcacttccccttccccccccccttctctctttcctccccctttccccgctttccccccccctctcttctcctttcccccctccttttctttccctttccttccccccttttcttttcccccccccccccccccccc

SEQ ID NO: 716200 - DNA, 364 bp, Homo sapiens
ccactgagtctctgtctgttccgttggtgtatatctctgttttggtactgtaccatgctgttttggttactgtagacttgtatagtttgaagtcaggtagcatgaagcctccagctttgttctttttgcttaggattgtcttggcaatgcaggctcttttttggttccatatgaactttaaagtagtttttttccaattttgtgaagaaagtcattggtagcttgatggggatggcattgaatctataaattaccttgggcattatgaccattttcactatatttaagactacttgaactgattacaattcttttatgattgggcagtggatcagtggctgggtttttaaaaatcatatttaat

SEQ ID NO: 716201 - DNA, 311 bp, Homo sapiens
ttaagagacagggtctctgttgcccaggctagagtgcaggggcgcaatcatggctcactgcaacctcgacctcctgggctcaagtgatccttccacctcagcctcctgagtagctgggaccacaagccggtgatggcgcttgtgtgtagtcccagctacttcagaagctaaggtaggaggatcacttgagccccagagctcaaggctgcagtaagctgggactgcaccactgtatgccattaaggtcactgaagccgccgtttcctatgtacagtgataatctgccttagccttcctgagggccttggctt

SEQ ID NO: 716202 - DNA, 173 bp, Homo sapiens
acatacgaacgtgacgatttacactacacttgtatcaaggaatcgaaagtgtcacgggtaaaaactctccaaggttaatttctgtcaaatgcagtatattatgaaaggacaggttggtattatcaggaaatgttttcttaagcttttcctttctcttacccctgccctaccca

SEQ ID NO: 716203 - DNA, 216 bp, Homo sapiens
  misc_feature (195)..(195): n is a, c, g, or t
ataccacagtctgagcagttcacgggattgcagactcttgagtttttctccacaagtcgtaatggtcttgttttcacaaacatagtttactcatcataagaatgtgtaattcgccagtgtttttcatccatacttcatactagattatctctaatgatctatcttcagtttgctacttcttcttctctcagctcnacgctactattgaggccctct

SEQ ID NO: 716204 - DNA, 675 bp, Homo sapiens
aggaattttgtttgtttgtctatatgtgcggcttttcagaagaaatttaatcagtgtgacagaaaaaaaaatgttggatggtagcttttactttttatgaaaaaaaaattatttgccttttaaattcttttcccccatccccctccaaagtcttgatagcaagcgttatttgggggtagaaacggtgaaatctctagcctcttgtgtgtttatggtaagtgtcgtagtttgtaggttatatataatgcatgtattcactaaaataccaatttacaaaaactcctgtcttgctagaccaacggtctgctggttgtgcagtgtgcctgtcactactggtctgtactcctatggcattcgcatttctggtattatcggtacaaagtacaaaaataaaactggtctatcgagtagtaaaacaaacacacaacaaacaaaacaaaaaacaaagcacacacaaatgaacaaaaacaaaaaacgacacaagaaagaaaagacagcgagagaaggcacggcgacggcagcgcagagacgacaaagcagcaccagagaaagaaagaacaaacacatcggcagcgacgaggaggaccgacaacggagtgaagaagatcacaagagagcaaggccacagatagaggaacaacaagagaatcgagcggacataacgaataggagcga

SEQ ID NO: 716205 - DNA, 356 bp, Homo sapiens
tggtgagtgcgtgtatacaagcaccatgccaagcaatgtaaaagcataatgaaagagccaggatgaagtgcagccaccctaactaccccatgcaactcttaccctatggaacaaaaatccttccttagtctcaagttcatccatcctaaaaggaaaaaggaggatccaatgagcactcggaaccttcggtcactatttatccagattcttgttagaccacagggtatcccgaaggagtatgccatggcatgtcagcaaaatccaaataccactcttcagaaggtaatatacttaaaacagaaataaaacagtaaaattgcaccctatatattcacaaaatttacactggaaattat

SEQ ID NO: 716206 - DNA, 447 bp, Homo sapiens
acaactcagttacgttacatagtaataattgctcgcttgggtggaatagggacgcagaagtataggaccatgtggaactcagaaaagggagccctgaagaatgagatttattgttcttaccaggagagtccaggtgctagagttctctccttgtaagtgactaaccttctcccttttggtacacaatcctcagatgaacggagatgattcattaggccattctagcttaatggatgcatcactgtgcaaccacgcaaatgcctcatttctgattcactcatttaatatttattcgaggagtgctgggtactaggccattagaagaacaaacaacaacaacataggcctggaccttgcacttgcagagttcacaggctagagaggcacacaagttaaatatagagacagctgaaagagctgacgtctgggacagagggaggcccctgg

SEQ ID NO: 716207 - DNA, 1284 bp, Homo sapiens
gtgagggttgtctctcaagaaagtatcttggaggctactccctacatgaggtcccagcattggtttcgcagggcccagctgtgaacatcacttgcaacatctgagggccttatacaccaatacggcgcaaccgatcctagcttccccaatgtaggaataattttgtgcggcgaaatcggtcccgaggctataaagcttcccatagaaataagatcatggttgaatttcaacgcctaaagtacgcaaaaggggtgaatgtttgaatctaggggaaaccaatcggttggagggccaaggagaatttggttggggctccagcataaagttgggacattgtataaggacccaggtcgcccttggaagagtattaaacggtctaagaagcttaaattgtatggggataatagttatatgttgtggttactgataggtaaggggccctaggtatagagttagaagtgttaatgaaaggtctcccattagggtggggggtcacttgaaggtctgcgctgcgttatctgatatgtgaaggtttcgtcgtagtttagtagatggatcaagttaagtttggaaaagtggatattgaataattaagagacgaatggtgttaagagagatgtatagggataactagaaggcggaaatgaaacaccacgtttgtctagtagccaaacctattaaatcggtaactatcttatattgctagcgaaagtcctagcgtatatcatatgctcgtatagggtggtaaagtagatattctagcgtggtagttctataagtctaggctagctggatagcaaataggacggtcaagataggtgtcggctggctgtagtacgtggaactgcatagatatggtcttttacggagagttgaatgctttcagtgagtgtcttatctaatatgtctaacataacgtcaggagtaggagtatataggagggaagagagatacgaaagtgtccagctgttcaagtgtagacagaaaggaggcactgaaggttcacttgtcatgtttctagcagcccgcagcgtgaacccgtcaggccgtggttctagatagcgccagtgtagtgtaagtagttgcagagcgtgctgagcatgctcggacgatagaagtaaagagagaaatagggttcgtttagtcagaagagagctgagaatctattctgccatccagaagtgctgagaatcgcagaaggaaaagtgataatgattcaggcactggttccaactgctgatagctagcagtagttgacgttgaagttaattccaatctctagcg

SEQ ID NO: 716208 - DNA, 131 bp, Homo sapiens
taatcgctagtatatcattttggtcagaaaatatatttggtatgatttcagtcttcttaaatttctgaagactagaggggaaactatcacctaaaatcagtttggaaaacaagtacataaaaatgggaagg

SEQ ID NO: 716209 - DNA, 134 bp, Homo sapiens
cgctatggatttagttggacatgagtcatgtcacccacagcactgaaccactatttaagaacgtcagtccatgggaaacatctacttctagctattcttcctattttgtgctccggccgttggttcctatcttc

SEQ ID NO: 716210 - DNA, 1096 bp, Homo sapiens
gagccttccccgcgagcggacgcggaagcgcctctgtctcgctttttacttattttatcccccctttccccttacttttagaatattatcactatacatattagctcccacatccaaccaaaaaacgaatttcacctggagaggcggaaaaccggggaaggggacagagacgaggaacacacaacaagaaagagaagacaaaagcagaaacacagagagacgggaagaaacgaaaaaaggaacagaaaagagaaaaagaaaaaaaggaaaagaagagagaacgaagagagagagaaaggacaaaagagaagaagggaagaagaaagaggaagaggggggggagagagacgggggagagaggggaagagaagagcaagggaagagagagaggggagggggcgaggacaggagggcaggggagggggggaggcggaggagggcggggggaggggggaaaggagggggagggggaagagggggagaggagggagaagagagaggggggggagggggagggaagaagggagagggaggagaggggggggagagagaggggcggaggagggggggggggcgggaaagagcgagggggcgaggaggggggagggggagggggagaaggaggacggggagggggagagggggagagaggaggaagagagcgggggcagaagcgaaggggcagagaacggaacagagaaaagagaggccgaggaggaggagaggagaaggagagggaggagagacagaagaagggggggggaaggggacgaagaagagaggaaaagggcggacagagaagagaggagagaagggagggaggaagggggggggggagggcggaggagcgagagacgaggaaacgggaagaagagaaggaggggagagaggagaggcgacagagagaggggaaaaaagggagcgcacggaggagaagagaaagaagagaagggaaaagagagaagaaagagagaaggaaaaagagagagaagaagagaaaggaacaagaaagagaagagaaaaaagagaaaggaaaaaggaaaagaagagaagagagaaaagaacaaagagaagaaaggagaaaaaaaaaagaaaa

SEQ ID NO: 716211 - DNA, 194 bp, Homo sapiens
gtgacaagtgtggggtaagcttagtaaattctatccctcagtttaccccacacgtgacaagtgtaaagctgctgagggatagaatttactaagcttgttttttttaatagtgaagtctgtgtaatatgttgtactgaataaggctgtctagaatttataaatcgtgaatacacaggtaacattgtcaaaaaaaa

SEQ ID NO: 716212 - DNA, 186 bp, Homo sapiens
ctgattcgtcatgggtgtgcaccatgaggacgtatgacaacagcctcacgatcatcagccatgcctcctgcaacaccaactgcttaggaccctgggcaaggtcatcccatgacaactttggtatccgtggaagtgactcattgaccacagtacccatgcgcatacactgccacccacgaaggactg

SEQ ID NO: 716213 - DNA, 114 bp, Homo sapiens
gtgatgtagagtatccccaagtacagtgtctatccaagaagacaaaagcatctcttcttctaaggcttaggttctgcccagacttcctgatacatggaatagctgctgtagttg

SEQ ID NO: 716214 - DNA, 110 bp, Homo sapiens
actcggcccctctgccgccccagtgaaatagaagactgattaggtttctgagtagaatcaaggcaggatccttcctgtctttggtcctcaagtagacagaactccagacc

SEQ ID NO: 716215 - DNA, 472 bp, Homo sapiens
cagtatttagctcctacttttaagtgagaacatggcaatatttgtttttctgtttctgcattaatttgtttagaatactatgcagccataaaaaatgatgagttcatatcctttgtagggacatggatgaaattggaaatcatcattctcagtaaactatcgcaagaacaaaaaaccaaacaccgtatattctcactcataggtgggaattgaacagtgagatcacctggacacatgaaggggaataccacactctggggactgtggtggggtggggggaggggggaagggatagcattgggagatatacctaaggctagatgacgagttggtgcagcgcaccagcatggcacatgtatacatatgtaactaacctgcacaatgtgcacatgtaccctaaaacttaaagtataaaaaaaaaaaataatgtgtcagtcatgatacaagatgatttaaataaaagacctcttta

SEQ ID NO: 716216 - DNA, 736 bp, Homo sapiens
cctgagggtctggcccttaattctctgtgtctatatgagattctgaatccccagagaaagctgtctcttgcaagaagctttgatgaagccattgtgaacttgatacattaagtgaagagtcataaaagacagagctaataatgcaattactgagagacaacttgacattgtggacatcggatacccaaggagacgaagctgaagcaggagaaggaggggcaaattcaccggcttccaagcttttgtctgcctcattctaaaatttacacagtagaccattttgtcatccatgctgtcccacaaatagtatttagtatacgatttatgacaggtttcatgtccacttctattcgaatttctatatttcccatgtggtcccatgttactattacgggacgtcgagccagttcaccatctagggagtcaatctgtatcatcttgaggtggccaaatatgcgcacatgctgagaattttctatacacagttcatcacgtgtcgcccatagtacttctcgcgaacatcgtggcttccaacgcggccagtgtacaccacttgcttcccatgctctaagcccaagcaaacactgcactacatacctgtttctcctggcgcggccataaccgcgcaatcatgcgctctcagccacaggtgtagtcctctgcggtactctccacgttggcagccttcacaggctgtgctgaatcatcccatggtccaatttcaccattatctcga

SEQ ID NO: 716217 - DNA, 934 bp, Homo sapiens
agcggataaaatgatttgacgtttgctcaagatcatactatgataaatgccacagccaagctttgaaatcagtttggcctgacttactgttatgtactaaacactctggggtgtttaacaaaaaaaaaaaaaaaaaaagactctccatcttatcccagaaagtttgctgtaagttaacttggctcctactcaggttggaggaagatacctgaggttaagaataagcagtcactgaaaagattgaaaatttaccacatagttatttaaacacacacacctaacttgggaaattctttacaaccttggctggcaaattaaccctatttttagagaatttaccaaagacgctttctggttttcttctgggtggctggtggttacccctttattttttttctttggcttggcaacctgggagcctactcagaaatggagggtcctttaagaagttatccttagttaaatggaaggattgtccatttcacttaagaaaaaccttttttacgggaagaactcagtacacggttcctggacttagttaaccagaacctgaccaaagaccacaatcaatacctgaaatctagttctctggccccaaaacaattaggtcccatgggggctccacggccctttaactgaacataattgctagaaccttaatattgacagattctcttttaaaactcctggaccatgacttatggggggcacattcttaaaaagaaattccaagagtggaacttcccatttgcaagggtctaagggtgtgggaattattgcagtttgcaccctttcttacaccgacttacactgggccaagtggaaaactacccggaccttttttcaacaaatctcccgagcttataaagaaacagggacatcctttccaaaaacccaacgaaacccaaaaaagcacactttgacacgcagttct

SEQ ID NO: 716218 - DNA, 686 bp, Homo sapiens
tttgaaactttgatatagcacctttctaattcccgtcttgttgttcctgcttttaatgtgatattcgcaaaacctgcccaaacccatgtatctaggcttctccccatattttcttctaagtgttccagagttataagtctctttaattttaagtttttatagtttagtgtgtgtataagtattttgtttcgcacttgagaggaagacaagggttccacaggtctccgcttaatcctcttccactcttaagaccgcttgagtttttctcacccccactctggttgtgggagtctgaaccccctttcttcacctgctttggtcactggtaaccctagtaaaagattatatgataatacttgcacccggtttatttctgggttctttgttctgtcactgtatttttttttcacctttatgcccttacccccttggttttatttttgtagctcttggactcttttgacactcactcgagtgtatgggtacctcttgttctttttctaaagctgttggctattcactggtacccttgagattacaccatgaattttagaattatataaaatatctctgcccaataagtaaccttggaattttaataaggatgcaccttgaatttgtcaccatactccagaaatattgcccgtttaaccagtattaccatctcctggctgagaaaccatgta

SEQ ID NO: 716219 - DNA, 123 bp, Homo sapiens
tcacacagcactagggaaaacatggcttatactgtggaatgcctgcggggtgatgttgatattctaatggagttcctgctcacgtgtcaccacagcaccggagtttcgtcgttgggaagtagc

SEQ ID NO: 716220 - DNA, 315 bp, Homo sapiens
ctgttaccaactctgcctatccaagttcaggatcacaggtggctgcagctacttgcagcagtttcagggtacaaggcaggaaccaaccatggacaggatgccattccatcataggctttgctcatacacacacacactcactcagattgggacaatttagacacatcaattaacctaacgcacacatctttgggatgttggaggaaattggagtacatggagaaaacccatgcagacacggggaaaactaacaaactccatatagagtggccttcggtgggaatcgattttttttctcatcaatgttataccaaa

SEQ ID NO: 716221 - DNA, 331 bp, Homo sapiens
tagtcatgggatggctgatataactaaaagaaggacctagcttgtattggcgcatttttcttacagtgcctagggagtaggtatctaataaagaaaggtgtatcctttaatattaatgcccttaagaaaaatgcctttctctataaaattaactctgcgcctcgagccttcggcgaccgtgggcctaggccataggggttcccgtctttgctcgggtttttggctggttgcgccccacagccagcgccgacccccaacatcaccaagccacccccgcttcccacccgacccctcgctcctaccactccaccccccatacctccggcacaca

SEQ ID NO: 716222 - DNA, 113 bp, Homo sapiens
gtcatcgcgtccgcttctgcttctgccgcttcctgcttcctgcttctgccgttcctgcttctgccaaccccttgcttcctgcttctgccctcgtattccaggtcttggtgagg

SEQ ID NO: 716223 - DNA, 248 bp, Homo sapiens
  misc_feature (178)..(178): n is a, c, g, or t
ctcatatgtggaagggacttgccttgcctcagatgagattttggacttggacttttgagtaaagactggaatgaattaggactttggggacttgtcaggaaggctggattggttttgaaatgtgttgtctccagatttttctgaaaatattaatgaagccagctgggaggaggagcantttggatgagactgggataagaagtggttaataaaatctgggtatctattctgaaaaaaataaagcatga

SEQ ID NO: 716224 - DNA, 482 bp, Homo sapiens
tacaaaaatatctatggaatttgccagtttaagtcccaaagtatcagcacactaagatctgaaacaacgtcaaaaaaatgtaaaaacaaagataaatatttttcattttcagtgttacaagtttgaagtgtctttatctgtgtgttaggaggtaggcagtctttaggcagaaggtacttttttttccatataaatttaggaggtacccgtgcagttttgatacatggatatgttgcatagtggtgaagtctgggctttgggtgtagccatcatctgaatagtgtacattatacccattaagttatttctctttccttaccctccccactttgagtctctagtgtccattatgtcactctgtatacctttttgtacccataagttagctctcacttataagtgagaacacacagtatttggttttccattcctgagttgcttcacttagaataatatcctccagctccatccaaaattgctgc

SEQ ID NO: 716225 - DNA, 671 bp, Homo sapiens
  misc_feature (1)..(1): n is a, c, g, or t
  misc_feature (564)..(564): n is a, c, g, or t
ngttaaaaagcttacttattttaaaaagacccgacaaagcattcagctcagtcctgcccagctgtccagccccagtggcccttctctaaggctgtggcgagagtcagtgcaaacccggccactgtttcctgggggtgtgttcttgcgggttacacggcctcttggaattcaactcccgccacccccctgcaaacctaaagcatccgtggcaccaccttggcacctgggccagaaactcagatgtctttcttgactcctccccgtctcaccacacccaagtccccatgccctggctaagaaaatactcctccttttttctacaatgcctgtgccgtggaatgtccatctgtccaatttataaataaaaccgggggcttcttctaggccaggcctgaggatgctgtggtcatgctggcagacgaggtcctggctgcctgggccttgcagcctcgggtgtgaatgggtgtgcgggtgggagttgggaggcacagtgataaacaagtaacaataaacaagaacgcagggctgccgtttaattggggctcctgcaggctcagctattcnctcccttcttcttctgctcctgtttccacaaagggaagcgcaccaggaaatgctggtgaatggaattgggtgaaaagtgaagaaatggctcctgcaacttgaaaaga

SEQ ID NO: 716226 - DNA, 219 bp, Homo sapiens
  misc_feature (39)..(39): n is a, c, g, or t
  misc_feature (48)..(48): n is a, c, g, or t
  misc_feature (52)..(52): n is a, c, g, or t
  misc_feature (66)..(66): n is a, c, g, or t
  misc_feature (69)..(69): n is a, c, g, or t
  misc_feature (88)..(88): n is a, c, g, or t
  misc_feature (90)..(90): n is a, c, g, or t
  misc_feature (94)..(94): n is a, c, g, or t
  misc_feature (97)..(97): n is a, c, g, or t
  misc_feature (100)..(100): n is a, c, g, or t
  misc_feature (103)..(104): n is a, c, g, or t
  misc_feature (123)..(124): n is a, c, g, or t
  misc_feature (155)..(155): n is a, c, g, or t
  misc_feature (166)..(166): n is a, c, g, or t
  misc_feature (178)..(179): n is a, c, g, or t
  misc_feature (190)..(190): n is a, c, g, or t
  misc_feature (202)..(202): n is a, c, g, or t
ggcgaaggggctcatggcaagtggcagccattggaacangggttgagncccnggcctgggaaagcncancagggtatgggggaaaccntntatngcncgnttnntggtgcagtgcacaccatnntctcataccctgtcagccctcactgggtcangggccttgggnagatgtcaaagnncccagcagcancggggtggccanctggggagggcatcctt

SEQ ID NO: 716227 - DNA, 280 bp, Homo sapiens
tacagcgccagatctagaggataccctgccaaagtcgtagtacaagtagttgtagattacagtgcacgcgccacacacccagctacatttattccatattttacgtagagacaaggtttcaccacgtatggccaggctggtcttgaacttactggcctcaagtgatctagccctgcctacggcctcccaagagtagctgggacttagcaggtgtgaggccacctgcgccccagccaaggatctacatatctattaattataggctagacagagtaatcca

SEQ ID NO: 716228 - DNA, 909 bp, Homo sapiens
tctctctcgcgtgctccctctcgccgctgtggggaagtcggggccgccgagcggccgtcgccaccgcctcgccccgacctccttcccggtcccctcccggccagtccctcccgcccgcgcacccgagtagtgagtggccccggcagggtctggagagtacgcggggcgccgggtggatggttaaaccatgtacaccggaggattttacagaggactcctgggagagttggctctcacggttctgatttacgattcatcagcaactcctataaacacacgcggacgtcactcaatgaaagctcttcagcagggtttcatatgtccccactgtctgaaatctcttggactctgctcgatgaacttccaaacatccactcccacacgccgtcatgatgctggctaatgactcaggtcacggaggagagccctaatctcgcctcgaagccccgatgcatgtacacactgctcagacaagaggtcccaggacctacaggctcacttaaggcagaccaaggctacacgcgaaccaaccaccgacagcactaacccatcatcaacggcgcaccagcgaagacgccccccctgcagccggcccaccgacccccccgctcacccccgcccagacacaccaaccacaaccagccccagaccacaacacctcccctcacgctcagaacgctccttgcacccaagcagcccaccccgccgcaccgcactccgcctgcagcgacacgccccaccaaccgccccaccgcgcgccccccgccaccgcacgcacctccacacaaccccaaccccccgcccacccccacacaaagcacgccgcgcccccacccccacccccacccaccccacccccacccccaccccccacccccccccccaaccacccaaccccccccaccccac

SEQ ID NO: 716229 - DNA, 353 bp, Homo sapiens
atatacaccacatatcccatggccaataaagcgcattcaatgtgtttataagccacacagtcacttgtgtttaagcaaccacaagtccaaagtaaaatagacccacaaaataatgacgtgcatgttcatacacatccaaaattcgcggcatactcagtaggtacctacacacattccgagagttcagattttgttttagattgtgttttcttacattctggagacccgaagctacagctcagctctcttccatattgcgctcacaaagcctcccacatatcctcactctgtgccccccttaaggctagaggtgagcatgtccctcacaagtgcacatgtcgagccatcagcaa

SEQ ID NO: 716230 - DNA, 772 bp, Homo sapiens
agcggggggcacggcgcgtggcgtgagacggggcggggcgcgcgtatcggcgccgcggcgcgtgacgcgttttcaaatcttcaaccgccgcagcccactcgtttgtgctttgcgccttcctcctccgcgccttggagcccggatccggccccggaaacccgacctgcagacgcggtacctctactgcgtagaggccgtagctggcggaaggagagaggcgtgcgtcctgtcaacaggccgggggaagccgtgcttacgcgtgtgccctggtgcgacacgtttctccggacccagcatgtaggtgccgggcgactggccatgaactccggagccaatgaggatccgacaagtaaaggacatttccagggtgggaatccaagtcagaaaagtgaaaaaaacagaccatactctgaaaatctctgagaaactggataacaggccagaaaaaattccaaatgtaagccacttgtggggcaaacacggtatttaccttgacttaaccttctgtcaccatatctgaaaaaattcaaaaggacattaaggatctgggaagggcgagttgaagaatttctcagcaaagatatcagtgatcttatttcaaataagaaggaagctaaatttgcacaagagcttggggtcgaaatttctccctgttaccaagtccaagaatctgcatataacttggaggaaacccactttcacctcattcccaggcatgatggcagttcactttacagtcaccagacacagtgtggttaacgcagaggaacac

SEQ ID NO: 716231 - DNA, 374 bp, Homo sapiens
  misc_feature (4)..(4): n is a, c, g, or t
  misc_feature (12)..(12): n is a, c, g, or t
  misc_feature (19)..(19): n is a, c, g, or t
  misc_feature (29)..(29): n is a, c, g, or t
  misc_feature (56)..(56): n is a, c, g, or t
gacnatttttcnttctggngcgttatcgntctggtcgaatgcagcgacagcaccancgtaggttttagccagtacggtagtgattgcagcggtcagcgttgttttaccatggtcaacgtggccgatagtaccgacgttaacgtgcggttttgtacgttcaaacttttctttagacatcgattgtccctctaagacacggataaatcggtgatatcaccacatcaaccaggcaacatgcccgacttgttgaatgcaataaacagaaggaaaaaacagggaggagaaaagaagtggtgctgataggcagattcgaactgccgacctcacccttaccaagggtgcgctctaccaacttgagcttattatccagcaca

SEQ ID NO: 716232 - DNA, 595 bp, Homo sapiens
cacatgcccggctaattttgtattttaggtggacacggggtttcatcatgtggccagactggtgtcaaactcctgaccccgggtgatctggctggctgggcctcccaaggtgctgggattataggcgtgagccaccacgacccaaccttagaaggaatatggggagtctgggcatggtggctcatgcctgtaatcccggcactttgagaggcccaggtgggcggatcacctgcaggttaggagttcaagggccagcctggctaacgtggtgaaatcccgtctctaccaaaatagaaaaattatgccgggtgtggtggcagatgctgtgtagtaccagctactagggaggttgaggcggaagaatcgcctgaacccgggaggtgacaaggtttgaggtgaacctagatggtgccacgtgcattccagcctgggcacagagtgagatcctcagaaacaaggttattgggaaaagtggactgtgaggggggccatgttgggaagttgacctgacacaagctcgcacctggacacgctgctgggagcggaggacctgagcctgccgagctgtggacgaggagacgtgctgcggagtgca

SEQ ID NO: 716233 - DNA, 180 bp, Homo sapiens
  misc_feature (174)..(174): n is a, c, g, or t
atctttgaatgttttaatctccagatttatgaactttttttcttcagcaattggtaaagtatacttttgtaaacaaaaattgaaatatttgcttttgctgtctatctgaatgccccagaattgtgaaactattcatgagtattcacaggtttatggtaataaagttatttgcanctgttc

SEQ ID NO: 716234 - DNA, 304 bp, Homo sapiens
ccgtgcagtgtgtgatgttatggtattttcttatatttttgacgatttgccaaaacgcagtgtggcggattcccgccggagaaaaacccaagatatgagttgggtatattagagagtggcctaatacggcccagtgacttgtggatacagtgtacaggaggattggtgtcctgacactgtgattatgtccatatcatgataccgtatgcggtatcgatacccagttttcatattttattcgggagattacacagacttgtagcttatatcctggtattatatctgttcataacaccacacaatt

SEQ ID NO: 716235 - DNA, 474 bp, Homo sapiens
cacgaagtggagtactgatacgagcgctgtcttgacaggagaggcatggtgaaaattgtattagcggtgaagatagctggttacctacagtaggacggaaagacccaatggagctttactgtagcttggtattgggttttggcattgcatgtataggatagttgggagactatgatggtatggcgctagctgtatcggagtcatcggtggaataccaaccattcaatgctgaaattctaatctgtggtttgaagccacggagacagtgctaggtgggcagtttgactggggcggtcgcctccgaaagagtaacggaggcgttcaaaggttctctcaggttggatggcaatcaaccatagagtgcaaatggcataagagagcttgactgcaagactgacgggtcgagcagatgcgaaagcaggacatagtgatccggctgatccgaatggaagggtcgtcgctcaacggattaaa

SEQ ID NO: 716236 - DNA, 221 bp, Homo sapiens
caggctcagtttattttaaatgccatattgaaaacatcattcttaagatccagtacgtaggacatttattggattaaactgcagcatttatctatgtctttagctgtcattgttccctctctgaattagctgtacctatcagccttcctttggttttaagtactgatttttttttaaaaaaacgagggactgtctaccattctccccactgtgctgttata

SEQ ID NO: 716237 - DNA, 1463 bp, Homo sapiens
gttcaagtagtgagaaacggccttgtcacagttcctacgcgatccctttacttggcactcataggaggtggctatacgctgtcgcagacacgcactgcacgggtcaccaatctgatactgtgtcggctctaacgatcgtccgacgaatgactgagccattggtgcattagggtggacattgggttggtaattcagagtctgcctgtgtactcgcagtctcaaacacacagttgtatgacatttgaccccactcgccattgttccgagtaggagagagaagagattcatcgtaattgtggaagcgagctaagatgttccagagggatgagtaccgaaatggctgctgcgattgaataaagcctttggcccatggatatgaactatgagctaatgattgctagtggtgaatgcttctgaatgaaatgaatgaagcccccattgtgccttaggctctctgtgtgtggatctagctgggagcgagtgattttgcgcgtgagatcgtgccactggagaggtgtgcgacagggcctatatgccatgcaaaaccagaaacctgcaaggagccgagtatggactggcaacgcgctgttgctcaagatccgtgaagcatcaaacgtccgggctcggtgcgtttccgacattcgctcccgtttggggcgtggtagtttcgggcccgttggggtggcaccccgtgtatctgcgtccggtgcgttggccactagcagcgtgaatcctgtagtccattgagagctggggcgttgacgagacggtggattccgttaaaggtcacgatgatctcaataccatcgcgagatagtggctagcgatcgagaaaacgattttgtcgccagagcctctagcgtagataggcatcggggtgggcccctgtcgagttgcggaaacgagaacgtgcacgtgcaatcgtttggagccaccttgagcgcggtctagggtccgctcaacggttttctggcacagtgtcccatgcttaggttggtaacaactgggccctccccccatcggttgcgagggaagtaggtgccttttcgcaatgcaccagttgtttggcttaggattatacggggacagaatttccggtctcagggcggctagggtaaggattgggggcggcgtgggtgttcttctctgggcgttccccgttatacggtccaatggttgtttaacgatattttggtatctgtagagccacgtttttcgacggcctttgggggcaatttggggtcgttgccacccccatttaacagaggttgtttcccgttgttggctcacttcgtcccttatggacgagaggcaaggggggagaagtcctctaccgtggcgcgggcggagaccctcccggttccgttaaggagggctccgcgaaaccatcgtggcttccttggagcgtcaagttctttacactttttcgttgctccccggagcctttttttgacacttacacc

SEQ ID NO: 716238 - DNA, 482 bp, Homo sapiens
  misc_feature (185)..(185): n is a, c, g, or t
cctgggtgtgtgggtgcttgaggatccctgaatcgacggtttttgctgactgcagaccaggttcggcctctcggacgtctgctcagtccctatgacgggcacacgtgggcaggtgctggaggtggtgcgctcgccgtcgccgcgctgcgctgagctgcagcaattccaccaggtcgctgttgtcntccgcttggcaccagagcttccagtttgacgaggacgacggtgacggggaggatgaggaagacgtggatgatgaggaagacgtggatgaagatgcccatgattcagaggccaaagtggcgagcctgagaggaatggagttacaggggtgcgccagcactcgggttgaatcagaaaataaccaagaagaacagaaacaggtgcgcttaacagaaaggcggctgacaccatgggaggtgtgggttattgggcaaagaaaaagaagaacgtgaccgggttgcaatgaaagctctagaggg

SEQ ID NO: 716239 - DNA, 233 bp, Homo sapiens
cccaatttttttgggcccccggtttttaacccggtgtgggccccttggggggccccctttttccccttaaaaaaaaaaattttccgggggggggggggccccccctggggtttcccccccccgggggggttgggggggggggttttttttccccgggggttttggggtccggtggggggggtttccccccccccccccccccgggggggggggggccgcccctttttttccca

SEQ ID NO: 716240 - DNA, 139 bp, Homo sapiens
gcctgaggagttggatgactctgactatgagaaagaagattgatgtcagaagcaggacgagcgtcagacagaagacgatcagctgatagctggccagagtgccgggcgatcatggctcagcttccccagggaccgagag

SEQ ID NO: 716241 - DNA, 418 bp, Homo sapiens
  misc_feature (40)..(40): n is a, c, g, or t
  misc_feature (71)..(71): n is a, c, g, or t
  misc_feature (76)..(76): n is a, c, g, or t
  misc_feature (85)..(85): n is a, c, g, or t
  misc_feature (110)..(110): n is a, c, g, or t
  misc_feature (186)..(186): n is a, c, g, or t
  misc_feature (202)..(202): n is a, c, g, or t
  misc_feature (208)..(208): n is a, c, g, or t
  misc_feature (232)..(232): n is a, c, g, or t
tgcaggaataaggggaaaggtgcttaccgtatcgagtatngcacctacggtttcaccgaaatcgtaacgtncctgnctcccgggntaccgttgttcgaaagggatgttgnagtagcgctactaccgggctgctggcctcacgcggcagacacttaatcatccgctctgccatcacccttagtcccnactgcaggcgaaccgncacggnacacaccggatgcacgggctggantagctcatgcagcaggcagattttgcggctgatattttgtttctgctctgtggaaaggatatttccaccgctggtggttcagctttgtctgactggctgataacaaacagcatcttatgccggtatgcttcgccaatcacctgacggtaaaagtgctcatcagtcgccagtgcccgatcatcagcc

SEQ ID NO: 716242 - DNA, 246 bp, Homo sapiens
aaattcgcggccgcgtcgacagcttttttgcaaaaatcaaaaatggcaaaaatcagacattttctgtccaaaaatgatgcataaaaatgtatccatgcttttgtcacttctaggttagactactgcaattctctactttccggctacccagataaagcactaaataaacttcagttagtgctaaatgcggcaatcctgactagaaccaaaaaatgtgatcatattactccagtgctattctcccta

SEQ ID NO: 716243 - DNA, 208 bp, Homo sapiens
gaattcggcacgaggagagactgaggggaaagagaggagagaaagaaaaagagagttggaacagtaaagagaaaggaagacaacctccagagaaagcccccgagacgtctctctacagagagggcgacgcaccccggctaacctgcaacggctggggagcgagtgcccctaaatagccgtttcccttgcttttatgcctcggagtact

SEQ ID NO: 716244 - DNA, 293 bp, Homo sapiens
  misc_feature (52)..(55): n is a, c, g, or t
  misc_feature (117)..(119): n is a, c, g, or t
cacgacgggtacggtatgaacaggggataaaggtactgaactctcatacagnnnnaccttctcactcagagacttcttcctcctactacccttgacaccctttgcctccttgggaannntagtgaggctagtaggcaatggactcttggcactcggccgtctagacttcttgcccattggggtgcgcttcaggctgaggaaagatctgttgggcccacagatgacaggtgagagagcagaagtcaacacggtgcctagagggcttggggtcacattgtattcatccagaaggc

SEQ ID NO: 716245 - DNA, 968 bp, Homo sapiens
tcgaagatgggtgtgtaccttggttatgtatgaactcctcagtatgtgtcgtgaagctatgaaatggacgggtaaccaatgtctcgttaacacatgaatcactggcttcttacttacctgcgctgaaccgaaattctggctgatgaaggatcatgatcctataccccagcttgaagtacgtggatgtatacagaatgctgggattcggggctctagcaaactgtgttattgtagtaaaatatgttggtcattatcgtataaggattgattttcataaactagggaggctttctaagaggatgtgtgtaggacggtgtttatggtgtctgtgttcgtcaagatcttagggattggaataggtatttgaagatagatctaggttggaaacaagagatgcatacatgtgtcctagtttgttctgccttataaatgaggaggagagtaggggaagggaaagagggtcattgtgatcaccatgagattctcacattgttatgaacgtgcaggtgttcttatatataatgagtgatgaatgatgtgtggacttgctaacctgtagtactttcaggaataaatgaagttaaatgattctggggtgagtatagtaagtgaggatataagatgtgaacttaatgatgctggtaggtagaaaagaaatattttgtctatttgtgaacttgtacttggtggggatgaatgatggggtttgacagtgtgttcttagggtatttgtgagtatgggtaagccaatctttaggttgactaaagaatagatgtgaaataaacatcgtcgggttaaagataatgtatctgggggacttgagttggaaagaggggggaagggtcgagaaattgacctgggaagagggaaaaaccttgtttcgaagaggcttttgcaaaggggggccgtaggagagctggtacaggaaggggggcttttttaactgttggggaaaattgtgggggcc

SEQ ID NO: 716246 - DNA, 195 bp, Homo sapiens
  misc_feature (5)..(5): n is a, c, g, or t
gtcgnggtctttcactggactatactctaaacagaatttggtttcctgaagggcatgccctgcttcaaatgggcccttatcctactgactacagaatactgtgtttgagtcgtatacgattacaccagacaagactgtgaacacatgtgagctactcaaagatcctattctgcttccttataaagataaagggct

SEQ ID NO: 716247 - DNA, 417 bp, Homo sapiens
  misc_feature (127)..(128): n is a, c, g, or t
  misc_feature (224)..(224): n is a, c, g, or t
  misc_feature (248)..(248): n is a, c, g, or t
  misc_feature (271)..(271): n is a, c, g, or t
  misc_feature (280)..(280): n is a, c, g, or t
gtctggatcagacaaatgtgtctgctgctgcccggaggagaaaaatgtgcctgtttgcaggcttccagcgaaaagctgttgtagttgggccaaaagatgaagactataagcaaagaacacagaaganngcagaagtagaggggaaagacctaccagaacatgcggtcctcaaaatgaaaggaaactttaccctcccagaggtagctgagtgctttgatgaatancctatgttgacttcagaaggagangcccaaaactcttgagcatatanggagaagcnaaaggctctccccagaaagaacagacactgctcaagaaagcataaaatagagtgcagccccgtttccaagtgtgcctgaggcgtgagttcattcgtgtgatttcaggagcccctgactgtgcgattatgggccaacc

SEQ ID NO: 716248 - DNA, 317 bp, Homo sapiens
tgctttggaccggcggcacggacggctgccttcatgggggattcggaggccccctgctgtgtacaactgtggcccacggcatcgtctcctatggaaagtcgtcaggcgtttcttctataactcttctcctaggttctcccgtttttgccctggataaggacaacaatgagaagcttcaaactgctggatcagattgagacccccctgtgactgactcttcttctcggggacacaggccagctccacagtgttgccagagccttaataaacgtccacagagtataaataaccaattcctcatttgttcattaaacgtc

SEQ ID NO: 716249 - DNA, 402 bp, Homo sapiens
  misc_feature (127)..(128): n is a, c, g, or t
  misc_feature (224)..(224): n is a, c, g, or t
  misc_feature (248)..(248): n is a, c, g, or t
  misc_feature (271)..(271): n is a, c, g, or t
  misc_feature (280)..(280): n is a, c, g, or t
gtctggatcagacaaatgtgtctgctgctgcccggaggagaaaaatgtgcctgtttgcaggcttccagcgaaaagctgttgtagttgggccaaaagatgaagactataagcaaagaacacagaaganngcagaagtagaggggaaagacctaccagaacatgcggtcctcaaaatgaaaggaaactttaccctcccagaggtagctgagtgctttgatgaatancctatgttgacttcagaaggagangcccaaaactcttgagcatatanggagaagcnaaaggctctccccagaaagaacagaccattggttacacagaaaggcattaaaattaaggagtaggcaggacccagtttaacacaggtggtggccatagggcacgtggaggattcaatatgcc

SEQ ID NO: 716250 - DNA, 298 bp, Homo sapiens
  misc_feature (7)..(7): n is a, c, g, or t
  misc_feature (14)..(14): n is a, c, g, or t
  misc_feature (16)..(16): n is a, c, g, or t
  misc_feature (58)..(58): n is a, c, g, or t
  misc_feature (62)..(62): n is a, c, g, or t
  misc_feature (272)..(272): n is a, c, g, or t
agccggntagtgangnggcaaaggcacgaaagcatttaagcaacctgcaaagcggaantggnaccgcagaagatgtaattggcagcaggagacagccaagagcacctaaggaaaaggcccaacccctgggaagatctggccagcttccaagagctctctcaaacaccaggccacacttgagggaactgggcaaatgggtgctgcttgattagctttttacaagcgctcccaaagcaaacaccttgacagtggggaaaacctttttaaaattnttcccaggaggatttttttcggggcc

SEQ ID NO: 716251 - DNA, 813 bp, Homo sapiens
gcagacctgaaccaggtggacgaagaacgcagatgtgtcagaacaagtctccaagtggccccgtggaatcggtcacctctggagaacagcccgttggtgtggaaggaggggcggctagcttcgtccgactagtaccgtggaagaggtgggctacgagcagacatccatcctcgaatcatgcggtccaagcagcggtccgttccctgcatgggcgcgctctgcgtgtgcagcatcgagactgtgggcatgtggagccagagatgaaggggcccccagggcgtcctacctaggcccttgcagggctcagttggtggggagtctgctgctggtgaaacagatcgaggagcagatacaggaggaacgcggtagtgcaaagatggcgaaatgatgcgctttgggcggctcactgctgggtgcatgatccgcacgttcctgcatgaactgcgaggacgaagacagaggacgaggaacgatgaatgctggtacagaggatgctagaacaagaagcagcgttgtgaatgcgtctcactatccagagggctctggtgcccgaacagtggtaatgagaggatgacgtgaagatgagtctgaggatgggtatcaagtgagttacgattacttgggctatggtagaagatggtatgcccgttgctccatgcccatcgcgtggggtgctgcgacctggcgcgggacccgggcaccctgaagctggacataacctcatcgacgtactcctcaccagaagcgtgcttacaggattctgcagccatgtggcgataagggaacctcgtgcggtgacatgtgcacggacaa

SEQ ID NO: 716252 - DNA, 346 bp, Homo sapiens
catttaggcaatataaagttgaactaagattctatattggacaatcagctatcaccaggctcggtaggtttagtcgcctctacctataaatcttcccacgtatttatagctacatagaccggtagtgctcttatagagctagtatctataggtacgctcgtataggtttcagggaggtcatagctatatagagctctcctatgcaaaggttatatatctagttaaattacatataatagccagcaagtaataagggagtaaagtccttgactaatatatatagcttaagttaataaatttttacatactattaccctatgacggtaactaataatactaataagca

SEQ ID NO: 716253 - DNA, 259 bp, Homo sapiens
ccgaatgcctggtggcagggacccgcaccaggtatctccaacgatgctctgacatttgtttctttcttttctttctttcttcttcttcttcctcttcttcttcttcttcttcttctcctcctcctccttcttctttttcttcttttctttttttttttctcctatctccctttcctggtcaccactgacattttggacgggataatacttcgctgtggggcctttcctgtgtgtagtgggctgtacagcaacgggtccc

SEQ ID NO: 716254 - DNA, 445 bp, Homo sapiens
  misc_feature (43)..(43): n is a, c, g, or t
  misc_feature (49)..(49): n is a, c, g, or t
  misc_feature (71)..(71): n is a, c, g, or t
  misc_feature (105)..(105): n is a, c, g, or t
ataaaaacattcgatccagcaatcccactactgggtatctacncaaagnagagtaaatcattatactaaanagacacctgatcacagcacaattcagaattgcanagatatggaaccaacctacatgcccatcaactgatgagtggataaagaaaggtgagtacagaaatatagactaagacaactaaaatactttaaaagtaccttataacgttggatttggcaaggatttcttggatatgacaccaaaagcacagaccacaaaagtaaaacaagataaattagactatttcaaaactaaaaatttctatacatcaaagaacacaatcacaaaagtgaaaaagtaaccttatggaataagagaagatatttgcaattcataattctgataggggattaatatccggaatatagaaagaacttctacaagtccacaaacctcgtg

SEQ ID NO: 716255 - DNA, 851 bp, Homo sapiens
gtgatgacccatggccggtccctacgcccattttgggggtgatctcgtttttgtggaccttctctaaatgcgtggaccctattggacgttggctgttttacccagcccatggctgatggcccccaccccaaggggcccacccgggtctttggggtctttatgatggaggcattggtggtgagaaggaccctcccgcctagcaaggtggcggtggccgctgaggaatttttggcgcacattttttctcaggggcgcaccccgtagggggtggtaccataggaatgggtctcccacccaggagttttccacgtggcgtggtccaagaatctactccctcgtcccaattatgcgccgccgatgttggcgtaattggattataaggaaaactaccctggagttttaatgggaaggggtggacaccacgtgttcctcctccctggcacgcccatttataagggtgtcttctaaagctgcttttaattttaggagagggccccatttgttttttgtcacttggcgggccacacccgtgtggtggtgtgtgtgtgtgtggtcgtgtaaaggtgtctttataatcttttacactatttctttaccattgccagatgactgggcgtttactatttgagaaactggtgtgtgtgtatcaatgatccatatgatccatcttaacgccacgtttgggaggcataacattttgccatagaaattaaaaaaatactgatttggggccatgagggatatttgaccattaagagtaattttcacgctttttgccaactttgatttttatttcatttggacttgtttccaagatttatatttaatatttggcataccagagatatgta

SEQ ID NO: 716256 - DNA, 289 bp, Homo sapiens
catcctggacctgggcaacaacatccaccagtggtgtggttccaacagcaatcgatatgaaagactgaaggccaccacatgtgtccaaaggcatccgggacaacgagcggagtggccgcgcccgagtgcacgtgtctgacgagggcacttgagcctgaagcgatgctccaggcgctgggccccaatccggatctgcctgtaggtactgaggacaccgccaaggaggatgcggccaactgcatgctggacaagctctacaaggtctaccaaatggtgcaaagaccatatc

SEQ ID NO: 716257 - DNA, 366 bp, Homo sapiens
acgactgtgttcggcaagacagtttgtggaggagcacctatgggagcactcaggaggaggcctggagggctcagggaatgctcccaaagagagcttgggttgaattttgaagaccaagtaggagtaggacatgggaaaaattgggaaagggaatccccagtagtttggtgggagcagaaggtgcgtttgggaacatgaaaggagatgaggagggaatgacaagaggggaaagaagggccttgtgtgccaggcagagaagcctggctgcattccaggggtgacagagcgccttggagggttgtcagcacaggagtggtgtggttgggctgtgttttagagacgctctgtgtggggagtgtggggttt

SEQ ID NO: 716258 - DNA, 874 bp, Homo sapiens
  misc_feature (571)..(571): n is a, c, g, or t
gcatgttataatttatgattttgcaggtactcatgaattagtatagtattcaaagcaattatatatatatgatagttaaggaacatttgtaatattcatatgacacttaaatctatgtatatgtaggtctagttctaacatgtagcataataccaatataattttgtgcaataacaatttaatttctcttatgctactttgttactaaacttgaacatatatgcagacactttggtatactttctaatcttaagtattatttttatagatttcagttgctgtccccaactgaaacttcagcctagtgaagtttctccaaatttagattaataaaaaactttaaaaactacatgactcaagaaaagttgtctaattggcattaataataatggaacaaaaattatgtaaaaaccttaattataacaacataatgaagcaataaaaatattttattgattagaaatacaatatttaggagtctatgtatctttattctattattcaaatactacaaactcttcagcaggacacctagtcatgtgtaataataattatattcaatctttagtanttttgctacttccaattatatagtgtaatttcccagtttttaaaaaattgtcattatgaagatcatctgtccagagggagaagagctattagagttgctagctgatttatacttagatattatcgtggatgtagttaatggattctgccgggcgaatgtcgaagcttaattggaagggttcgaatatcgatgattggaaaagaataaatagtttaggaaaggacagtgtttagggaagaaaaatggttggatatacaagacaatgttaaaaagggggagaggaattattctatgaggaataat

SEQ ID NO: 716259 - DNA, 927 bp, Homo sapiens
gggtcggggtgtgagaggtattgctcggtctagggagattcttcatgccaaatcactatgtcaacagacatcaggtgtgaccctatcctctcaggtatgaggatagatcagggatcagcagacgtctatctcgcaatacagctacacaggaggcaacctattcagtcacccagtatggaattagcggggttgtaggcatgcaatcgttggctcttatggattatgataaaactgcaatggagcagggtgacacatgaccataataattggccgatatcatcctgatcccacaatgcgtgtggccagcgccaaggcttagattgtcatgagctaatgattgtatggtatggggcttatgtccatgtaatcgagagaattcatgggcaataaatcgtgaagcgcttagaagagagagatgctgtctagaggtctggttaggaggagctttgactttagcttcacgatggtcttgaattattgaaagttacctatttattgtgggaaatagactacttagtatgggtggagatggtaaggatgtgcataattgtatatcggattcgtttcttgtaggcttgagtcgcttggtgaccgaattgctagtgactagtttactaactaggtactatgcaggggaagtcaagtaaagtgttgaatgtcacctgaatgcgttgagggtgtggaaatgtgcaccttgcttaaattgttaagatgagcttagttctaccgcagataacgggcattcttgaaggtactgccggtacgctgcgatgtcgcgatattacgggtgtgctaggagtcctattggcccagatatcaacgcggctgcggtagggctgtgggcgtacacctggcaggggcggcataacgggaagtccgaggcagttgcgcgtgtacgacccgcaagtacaaacggtacacccacag

SEQ ID NO: 716260 - DNA, 217 bp, Homo sapiens
tgggatagaaaaaaaaaatttcaattttcttttaatgtgtggtctctttcaaagagggtcacatacatcaacacacacactttatacaccacccgcacctactccagtggagggagctcgggaagtgatccacctcgtgaagaggaaagaggggagaaaaagaagagaatcacgtgcctcgtgataagaaactttgggcacactttcaaatctgcgg

SEQ ID NO: 716261 - DNA, 302 bp, Homo sapiens
  misc_feature (59)..(59): n is a, c, g, or t
ttgatagtagaactaaattattaggctatttcaagaaattaatatattactggtagaanaactgaagctacaaaatggcctggtttctcacttcagttaaattttgtgctttctgagtgctttgtattttagggtgaacccacactgaaagggtatttgggggccaaaccctgattcctttattaaaattggttggcccagaaaagtggttaaaaattctggttccaaggaaggtctgtggtgacgaggtatgaaaaagaagcctgttctctgcccttctttttccaataaaatgttccaac

SEQ ID NO: 716262 - DNA, 844 bp, Homo sapiens
tctggaagtggctttatattaatggaattttaaaaaatctgggtttcatctccagcggtgtcatttttcccattgcggttcttatagaatttaggagaaaacccagcgggagggcgcggggctctccacaggcgcggtctctaagtgaagggaaggcggtgcctcgaagttcagtccgcgggtggcgcccccatccttccccgcgggggccccgttaccacaagaaccgcggtgcggaattctaccaagagggcgggaaaatagggcgggtggcggcgtggaagaccgcggcgcgtgatgacagtcgatagagaacacgcggagatgcggcggctgtgccggcggtgcggggtggcgcaagcggcgcgcaagctctgggggagaagagacaggtgggtgcgacgaaatagacgcgcccacaattggcgccccggggccccggtaccacttcccaccgcggcgggagaagaaataacggcaaagacggggccacgaggataaccaggggggggggcgtccaaaaggggggcaccaccggatcccaagggcgtgccaaagggccaccgcaccgaatgagaggggggcaacactacaacgcggaggagacacattttagagggagatacagagagagaagggcaaaaggatccccgggagaggacaacggcatccccagaggggggcccatacgagaggataaacacacagtaagggggtttgtcccacaaacacaaattagggacacccgggtagagagacaggagcatagtccacaacaggaaagcgccccgggagctcatcccaaagccatccacgagaggggagacaccaccatcggaaaaga

SEQ ID NO: 716263 - DNA, 200 bp, Homo sapiens
gaccggcatcgtctcggctcctgtgcccaagaagctgctgatgatggcgggaatcgatgactgctacacctctgctcgcggctgcacggccacactcggcaacttcgccaaagccacctttgatgccatctcaaagacctacagttacctgacccctgacctctggaaggagactgtgttcaccaagtctccataccagg

SEQ ID NO: 716264 - DNA, 295 bp, Homo sapiens
cgcgtccggcactctggtgacagagcgcagtgccgttcccttcctgcctgttaacccggaatactcagccacgcggaatcaggggcgacaaaagctgccccgattgaatgcccgagagtttgccaccttgatcatcgaggcattctcagtgaggccaagcgggagacggcagggcaaggagcctgagcgagccccacagacaaacgcttcgagctgtctctgctggagccagagtgacctctgaggagcaaaaagagtacgacagcgtgggcctctgaggaggacacagaccagg

SEQ ID NO: 716265 - DNA, 335 bp, Homo sapiens
  misc_feature (159)..(159): n is a, c, g, or t
  misc_feature (176)..(176): n is a, c, g, or t
  misc_feature (214)..(214): n is a, c, g, or t
  misc_feature (216)..(216): n is a, c, g, or t
  misc_feature (276)..(276): n is a, c, g, or t
  misc_feature (292)..(292): n is a, c, g, or t
ttgaacccaggaggcggaggtcgcagtgagcccgagatcatgccagtgcactccagcctgggtaacaagagtgaaactccgtgtcaaaaaaaaaaaaaaaaatgttactcatcctctctcaaagcaaaaaaagaaaccctaacagctctgaactctggntttatttttcttgctgnatttgggtgaacattgtccattaggtataatttgcctntnttagagaccggggaggcagagtctctagaggaagtgaagtctgatggaatcatgcctgcnaatgagggcttgaacnggatgcccaataaagagttattatattttatcttttgtgggtt

SEQ ID NO: 716266 - DNA, 255 bp, Homo sapiens
atttgaggcaggacactgcaggcgtaagtagacgggcagacgtgactgcagctgaaacgcacgttctgtgtgcgccccacctgtccccggatgccctacaacgtgacagacggcacactgactgcccacccagctgtgcgggaggtgcagagcagagggctttagggagcagtgactgcggtcaccccctttagttctctgggtgtagaccacaagcaacttcccacttggcacgccccaacacagtttctggcc

SEQ ID NO: 716267 - DNA, 448 bp, Homo sapiens
cctgattccgtctcaggtcgccgtgaaggagccgccgcatgtctggcatctgcaatgatggtcgtgcggactgctccagttcctggatcagaggaatacagacctacagatgagcccaataactgaggcccgcagaattcacttcacgctacaaacggagctgattacacccgcagagacctgtagggcagtgcgagcccggccagccaggagcggacaagagagtgtcagatggtcggtcaatatacagcaggaagatccacgagccaggcggaaaggcattgcacaacctccactaatgttgcggggacccacacatacaaacaaagaattgactcgcgcccaccgcatcaagagcaatcagaacacattgaatccgcaaagaaccaagtaaccggccccgaccgtgcgcattggaagccaatccgcagggccaagcgccatcctg

SEQ ID NO: 716268 - DNA, 153 bp, Homo sapiens
tgaaccaccacagatacctttgccgtcggttggcgattccaagctcatagtcttgcggtgaatcagtccgtggtaccgtcagaaattgcaggtctcccatgttattggggatcatctgatatatcgtctggtatagtccttctgatcaggaca

SEQ ID NO: 716269 - DNA, 340 bp, Homo sapiens
gctcgactcactatgttgcccagtctggtcttgaactcctggcctcaagtgatcctcctgccttggctttctaaagtgctgggattacaggtatgaactatcatgcccagcccaaaaactttaaaaatcattataattttccatttttattttagattcagggagtacacgtgcagttttgttacaagggtatattgcgtggtgctgaggtttgggcttctcttgatcccatcacccagacagtgagcacagtatccaacaggaagtgtttcagctcttgttcccctctctccctccctccttttggagtcctcagtgtctactcttcccatcgtcgacg

SEQ ID NO: 716270 - DNA, 490 bp, Homo sapiens
tgagaaatgtgcaggatcatggtcagttgatgttttttctccttgctaaaaagataattagaaattaaatatctttccaaaatttgaagatatgtctcccccagtcagattataagcttctcaaaactggcttgcccccagaattttactgcttacccagcagacatgtattgaccatcacatggcaaatgatatcagcaaatcaaaagatgggcgtaggggtccagccgagacagaaattttttgtttcaattcctggggcattaaaatgttgcttttctcgtgctctttcccccccccccccaatgaaaacaatacatgtatatgttagttttttctagcaaacaaaatataaatattaagcgagggggatcatactgtcaagaccatcaaacaaaacaaagaagcttaagtgaactaagcacagggaaaaggtgttttttcactcgttcattttgtcatctgcttctagatgctgcaatcaagaagt

SEQ ID NO: 716271 - DNA, 900 bp, Homo sapiens
  misc_feature (897)..(897): n is a, c, g, or t
  misc_feature (900)..(900): n is a, c, g, or t
gactcgcggcatggagtcaagatggaggagtacgcgcgagagctttgccatgggaattgtggatgactgtggtggggccctttacgatgggtaccattgctggtggtatctttcaagcaatcaaaggtttcgcaattctccagtgggagtaaaccacagactacgagggagttgtgacagttattaaaaccaggctcacagttaggaggtagcttgtgcagttgggggagggctgtttccatgatggatgtagtatggtctcaagtcagaggaaaggaaagatccctgaactccatcacaagtggtgccttaaggggagccatatgcaagcaagaattgaccagtgccatggtgtggttcagccgcaatgggtggcatctcctagcttaaatggaagggagctggtatctgtgtggacaagattgggcctctgaaacaagtttccccaatgtcctcagttgggcagaagaccccttcccagtgtgccttcaacttcagtaaccttcctcacctttgggagactatcgacaattatcagtaggacttctttcctaggatttctttaacaagaacgagtgggggtcgagacaggttccagaagatccagtacagtctgttttaaaaccatacgtggacagctatggcaataggtataagagacattagccattttctattaaggaacagcgggacggtgctaaagctatacgttattatccctgatgcttgtgtcacatatgtattcgtagaaaaccgatgtgaaatgaggcccagcaaaagaatattcaatctggggcgcggggtgtgtacacacaagcggggcctaagagggcgcacaagtagtaccaacggtgaacatcggttgttgtgtcattttatcttctttctttctttggntgn

SEQ ID NO: 716272 - DNA, 191 bp, Homo sapiens
ctgatcctccctgtggtgtttatctgatgcaccctgtggtgtttatctgatgccaccctgtggtgtttatctgatgccaccctgctggtgtttatctgatgccaccagccaacctgtggacatagtggtggatcctcctatgagtctgaccctgcatgtgcatgcaatgcttgtgcacttggcctgtctgt

SEQ ID NO: 716273 - DNA, 392 bp, Homo sapiens
ggtactgctgtaaactgtgaattgtttccgtatgttactactaatagtagcaacaaaaaacactgcccaaggagtttgagggagggaatgaaagtctctttcttgggtggagtctggagaaacacagcttagttttctttgatatgaaatggttcaacggtgagagggtaagtttgctctggagttttgggaaaatcaaagggctccaattatccccttaagaaaggaaaattgattgaagttttggtggatccctgcctataccttctcaataggattcctgcagagttctgccatggggcaaagtctcacgagactagagggtctccatctcatgatccggcagattactttcgttgggctcttgaatgcccgtgtacttcatgggaggt

SEQ ID NO: 716274 - DNA, 238 bp, Homo sapiens
  misc_feature (207)..(207): n is a, c, g, or t
gaagaggggccttggtgatcagcacccctgcttgtctgcaaaaggggtctgagagtaggaccttattcacatggcatgggcaaagtggttttgcacactttctgtccacggtgtgtgcctgtggtcacttacaactgtgtcaccttgtttgtccaaatcgttgcgtcttatggagcagggtcactccctgaccggcaagggcaacanggaagattggagggtggacgatgtggcagtg

SEQ ID NO: 716275 - DNA, 1206 bp, Homo sapiens
  misc_feature (930)..(930): n is a, c, g, or t
  misc_feature (957)..(957): n is a, c, g, or t
ctcaggaacctccaatcatggcagaaggcaaagggggagtgagctgtctcacatggccagagcaggaggtagagaggggaaggtgccacacacttacaaacaaccagatctcaggacaactcactcagtatcaggagaacagcaccacaaaattgtggttaatcattcatgagaagcctcccacgacccaatcacctcccaccaggccttacctccaacatctgggattacaattcaacatgagatttggtgggaacacagatccaaaccatatcacgcacaaattgcaattacttcacactcacgataacccattaatctgtgaaggattaatctgttcatgaaggcagggccctcatgatggaatcacatcttaaagcccctacgtctgagtactgttacattggggatttagttttaatatgattttcagagcagaaaaacattcaaaccatagcaatatgtattgaatatctagatcatttccaaataagatattaatatgatactgaaacatttattgctgaacataaatttagaacttactttgcctacctattacagaagaacaaaagatatttgggcctattaaacctttcctctgccatttcctgtcctgtgtcataggactaggaatcgtgtttctagaaagtatgaaatcgtgtgcttgcaaacttggaagaaaacagttcatgactgcataccttctagttctctagtgttcactggaaattaaagacactaaaagttaacaattcttattaattaatcatattaatgtaattggaatttctagaaatattaggggaagcaactttatacgcaaagcataacagaaaaataaggtgtattttttctttgaaacctatgaaatatactggccaggcacggtggctcatgcttgtaatcccagcactttgggaagctgangcggtggatcacctgagctcaggagtncgagaccagctggccacatgttgaaccatgtctctactaaaatacaaaattagcagtcatgtgcggtgctgtaccccagtactcggagctggggggaatcgtgaccgggtgggtgctgaccaaacctggcccagcgggaaagagactttaaaacaatggaccaaactgcacaagctctgccacacttgtcgaacccgtggacgcacaagaaaagggcatctggacctggaataacgaaacgacacatct

SEQ ID NO: 716276 - DNA, 557 bp, Homo sapiens
  misc_feature (53)..(53): n is a, c, g, or t
  misc_feature (295)..(295): n is a, c, g, or t
  misc_feature (409)..(409): n is a, c, g, or t
  misc_feature (411)..(411): n is a, c, g, or t
  misc_feature (502)..(502): n is a, c, g, or t
  misc_feature (522)..(522): n is a, c, g, or t
atgtgtgtgcttcttgagcctgcacacttttcagacactgcaaacagattgantgttgctgtcctcatttcctgttccacatggattttagcatagttgctttttatcacaggaaccactgaaaacccagctttgcaaagatgtgatgtcatagagatgaatgtggtgtgatgtaatgttgaaaccgtaaactgatttgtgtttgcggttcactaagtgatcaacaaatgtcatgtgttctatttctcttaaaaagttaagatatcccacagtacttctgtgacttctttatggngtcttggggtgccttgatacacaatttgggacatatagcccttagtactcttttcttgctaccttgacaccacatttctggtgtacatcaagtgtttggaagatggtaggtttngntggtttctattgccttaggcaaatgtctgattcatggaagttgggacaaagaacatatatacaatctgctgtctgaaataagacattttanagtgtaatactttgtttagntatgcttgcccatgcttattgctttctcttgaatg

SEQ ID NO: 716277 - DNA, 1101 bp, Homo sapiens
gaaacaatctagcctcttcctcctcagaggacaggtgacactgatgaaagctcctctaggttccgtcatcgctcagtccctccgtccacaacctcttcctcctcctctgattcatgacttcagacttccagtcgtcattccagtagcagatagcaccagtcacagagtagcatgcttctgactgattgaaccactcaaatgaagaatgaaaaaggaaattagagtggcgtccgattcacttattggacgtgagtggactgtaataacattcgtagtgtgattgctatgaagaggggaagttctcagaatattgttaaggtccaaagtagagttaactggatgacacgaattgtcgtaggagaattcagagaaggtttactaaaaatagtatctaacatatgttagagatggcagtaagtagtacatagttcaactagactgtgcttgactcagacgaggagtacctttatagttattgacaggggtgcaaatcttttgttatctgtgtggtactactttcacaagatagtatctacttagaaaacttgataaggctggtaaactcttgcagaatactgttgagtagtggatggaacactgatcgttgtgtacttctctggatgaaataaagtggccaatacttgagtgtcactatatggttaagtgggatatgtagtcatgagcatattttcaaggatggtgcagttcaggatattctggcaagtggatgtcataatgctttagggctgtatgtgatgtaacgatttactatgttagtactgtaagcttaggagtgagcctactattagtaaatgtgctctatttggacatgtatgttcagaaagttatctgacttatgtcctaagtggtatgttcaggagcctataatatatgactagtaggaatgctgaagttccagctggctgggtacggctaatgcagttgcctccggggtccataagcttttgcaggctatcccattcctgaggaaaagtatctctgaaggaccctaagaggggacaaaaattgaacccttacaggactaacctggagccggcgttacaccagggacacaaaacacggccttaagggaacatacaa

SEQ ID NO: 716278 - DNA, 144 bp, Homo sapiens
taacaaaaaaaaacacccccctctttaaaggggggggccccccggggggggggggaaaaaaaaaagaggggggcagccccaaaaaacaaccccccgggggcccaccgacgtaacaccgccccccccctgcttgtgagagaagag

SEQ ID NO: 716279 - DNA, 195 bp, Homo sapiens
tgggaggattgctagaggcaggaggttgaggctgcaatgtgccatgatcacgccactgcactcaagcctaggtaacagagcgagaccctgtctaaagagagagaaaaaaaaaagccaagttttattttggtttacgaaatggataattttattaataactaatagtaacttatgtggtatcagtaaggcactcaa

SEQ ID NO: 716280 - DNA, 329 bp, Homo sapiens
tctctctctctttctctctcttttctctctcattggaagagagagagagagagagagaaagagagagagagagagagtgtgtgtgtgtgtgtgtgtgtgtgtgtgtgttttactacctgtagtagtgtgaatggtgacctggtgaccctacaaaaaggtatgtcgtgtatctgtgaacaccgtgtgtactatgcaccttattgtggaaaatagtgtctttgtgcagactgtaattcagagcatctataagaccaagcatcatctatagtattatccgagggtggattctcaacttccaaggctctcgtgtcctttatcaagacacaaaa

SEQ ID NO: 716281 - DNA, 190 bp, Homo sapiens
aatggtcagaagctggctagaagttgatgcgttattggcctcagagtctctgatcaagcagatttcacgaatcctcggcccagagtttacataagagcaggaaagtccccttccctgcatcacacacaacagaaaacatgtgtggccaaacgtaggatgagtgtgacagtccactattctccgacaggga

SEQ ID NO: 716282 - DNA, 167 bp, Homo sapiens
  misc_feature (4)..(4): n is a, c, g, or t
  misc_feature (14)..(14): n is a, c, g, or t
  misc_feature (17)..(17): n is a, c, g, or t
  misc_feature (19)..(19): n is a, c, g, or t
  misc_feature (24)..(24): n is a, c, g, or t
  misc_feature (48)..(48): n is a, c, g, or t
  misc_feature (53)..(53): n is a, c, g, or t
  misc_feature (60)..(60): n is a, c, g, or t
  misc_feature (113)..(113): n is a, c, g, or t
  misc_feature (135)..(136): n is a, c, g, or t
  misc_feature (167)..(167): n is a, c, g, or t
gcantgtgacacanggncnggccntagtatagtgtgttcactcgtgantggtntcctttnatgcttctgccctgtcaaaggtccctatttgaaatgtgttataatacaaacanggaagcacattgtgtacaaaanncttatgtatttatgaatccatgaccaaattn

SEQ ID NO: 716283 - DNA, 153 bp, Homo sapiens
ctagaggatgccacgtagtatgtaacagctgacaacgtgaagatactggtacttgatagcctcttaaggaacattgcttccaaattttaagctggaaaggtcactggacataactttaaaaaaaaattacactacatggctttttagaatttc

SEQ ID NO: 716284 - DNA, 594 bp, Homo sapiens
ttttaactgccagtactaagaagtcagagttgaaagacagaggcaccccggccagagacgtgaagcactgattaaatggatcagaatgactgaaaaggccccagagccacatgtggaggaggatgacgatgatgagctggacagcaggctaaattataagcttccaccacagaagtccttgaaggagttgcaggaaatggccaaggatgatgagagtctaattaagtccaggaaaacgctgttggaagatggtcctgtggtgacagatccgaaggcccccaatgtcgttgtaacccggttaaccttggtttgtgagagtgccccgggaccaatcaccatggaccttactggagatttggaagccctcaaaagggaaaccattgtgttaaaggaaggttctgaatatagggtcttcacttcaaagtgaacagggatattgtgtcaggcctgaaatacgttaaggacaactacaggactggggtgaaggtggttgcaccatttatggttgggaggtttgggccttggccttggggagttaagttccttactccagttgtggaggtttccaagggcatgttgttcccggggcgttcc

SEQ ID NO: 716285 - DNA, 107 bp, Homo sapiens
cctggacagcaggtgagactggaggcaggagagggcaggcatctgaggagaggctctgcagccagagagggcctgaggactgtgtgaccgagagctagcagacgcac

SEQ ID NO: 716286 - DNA, 184 bp, Homo sapiens
gctgactgtgggagcggatgtttgacggcctcgatgagtgaggcgtaggtgccaggtatggcgacacacttctggaccagcgtctccaggcgcaggtagtcctcagtcactgcccttgactcatgtaccccctgcagcagacgtgggccagggggtaggcgggtccatgcacccggagcttggg

SEQ ID NO: 716287 - DNA, 216 bp, Homo sapiens
ctaattgcttcttcgatgacgtaattattgatagatacatatttattgccattttaaaacttgatttccagttgatcctaagtttcttttttcttctttttcgggttggatagtttccatttattctatgcttgagtacttttctttgtagtttttgtgaatgtaatgttcagttttgttttgtggatgccctgtcgtcatcgaagaaccaattag

SEQ ID NO: 716288 - DNA, 752 bp, Homo sapiens
agcgggtctcgaggatgtccggctggcgtgcaggttccgggtgcgaggcgtcgggacagagccgtgatccagggttcggcggccggtggaagcgtactgcgatcgagctctgcgcacttcggggaggcggctaaggaaaggtgcctacaggcgagtagacgcgaacggagaggcccatagaacgctttctcaaagcaagaatggagagaaaccatgaagcttgctgacgatggaagacacagaggagtactgcctgttcctgataccagatgagtcaggggactcagataacacatcaaggagattctgtgcagaagtacgatgtgagagaataatcactcggtttgcactctatgcgtggtccccgtacagtcgtaggcgagaatcgagccttgtcgaatcttcaatagtataaacgtgggaaaggaggtgttcctgctcagtagtgtttggcgtgacagaaggttgggggataacgattgaggatgaatggtttattgtgtatgtaatagagctagatctacaggggaatttccaggagttagtagcaaggattgaagagaatgatggtgaattcttgtcagtagaagctgctgactttctcctctaaatggctggatcctgacaagtagcaccaatagggtatttgactgccatggggaattgtgtattatcgcctggcagcacagaaaatgctggagcagaagtcttggttagcgacgcaacccccaacaataccgggaagcatggca

SEQ ID NO: 716289 - DNA, 208 bp, Homo sapiens
  misc_feature (8)..(8): n is a, c, g, or t
  misc_feature (62)..(62): n is a, c, g, or t
  misc_feature (90)..(90): n is a, c, g, or t
  misc_feature (158)..(158): n is a, c, g, or t
acaagatnctgcttgacataaagacacggctggagcaggagatcgctacttaccgcagcctnctcgagggccaggatgccaagatggctngcattggcatcagggaagcctcttcaggaggtggtggtagcagcagcaatttccacatcaatgtagangagtcagtggatggacaggttgtttcttcccacaagagagaaatctaagt

SEQ ID NO: 716290 - DNA, 983 bp, Homo sapiens
  misc_feature (268)..(268): n is a, c, g, or t
tggattaaaatttcgctactgtctaaccctctttgggtccacactgtgctattaactgagctagttgtacaatcaccgctatcaggtgtgtagcttcagcatccatgaacccagtgagcccttacgagcccacaatggaaggaatgaacaagctccagatgcaccgcctataaggagctgctacacactcatgtgtggaagtgtctgctagttgtgcaacatgcgtgagacctagcgagacctagttaacccactcagtatatggaangaaactctcgtaacacattccgcatacactgagaaggatgcatatgtccagatggacgccacctaaagtagcgtggtaacatcttcatcctgccatgggatgcacgggacttcgttgcttgaagtcatgtgtagtaccctaagaatgccatgcaatttgcgggagcagcagtagccaattaatcaaccacggaattttactagcaaactttccttggatgcgactggtggttccaatactcaataacctttttcttctctcagttgcgcttatgcgctgcaccactggttatcctactacatgcatgtaactggtgcgaaaaagcgagtgctgacttactcattggaattatgggatgctggttggaaaagaccctgggtaggtaagctgttgatgtagaaggaactctaagaacttaccaaaagcatgaataaaagatcgtgcacaattttcatgattgggataacctcagcttgatgtaaaaaggacgtacaatgatgcatgctgccccaatggtactccaggggaaaccatggcttatgttactaaaaactacaatgctagtgtaaaggttgattctgcccaggtacgaaccctcagaaaatccctgggagtattcctctctcaagtgttaatggcggcacgcactgatgtccccacctttttgctttggacccaatttttgttgtttcgtaagggggatcaattttttcga

SEQ ID NO: 716291 - DNA, 944 bp, Homo sapiens
caagtgtgcgtgctcaaggacacggtgtggtagtatcttttcatttaatgtgaacatgactaaaaaaaagcagtcctgccttttaaatcttgtggcagctcagacagggaggtgcttaagaaccttaactactatgtcagataacaaaatattttttttcgcattgtgggagatttggttactgctcaggacatgatgtattagggctaaatatatgctgtgtataccttgcaccgtgtgtacttcccctctctccctccctttcccttcccctgtggggcaataagatggcgcattttgcaagtagacgacaatgataatgaaggcctacggataataaaaaggtaggcgcgggccgacccggagacctgtggaagccatgtgcttaaaggacccaatcttgtgaggtggagggcgttagcgccccgagaacgagatcccacacatgggcctagggcgtgctcgataaagggaacgccggcggcagtgaaagagagtgtggggacacgccgaagtagaaaaaaacgcacggggtgaacacacaaggctttggagaaaatatccgaagaaggggctacgagagtccaaaaggtgggctattcacagggggggtcacgggaaggatgataatcatttgccggcaacggtgaacttatcaaatttctaatcaagagatatctaaagcgggcctttactctactaagacaaagataagactttcattgggtattaagaatccagacaagaattctgatggggaataagtacacacacgacttgctacagaaaactagggggggtaagttcaattagaagtgtctgcaagctgcttacgcgcaaaagtaagataacaagagtgggagtggaagaacaccaagttgtcagagaaggacaaagtatagaataagaaaaggggaacagacataaggagtgcaggtggttca

SEQ ID NO: 716292 - DNA, 143 bp, Homo sapiens
ggtggtgcatcctttggggcttcctctaggtcagtgtgtgagatgaatgcaggagagaagatcagtgggcatgttgggagcagtggaggaaggaaggaaggagaggagaggaaaaggaagaaattaataacgccttcttccta

SEQ ID NO: 716293 - DNA, 256 bp, Homo sapiens
agcggagggacctggtgggaggtgattggatcatggggagggatttcccccttgctgttctgttgatagtgaacgagttctcacgaaatctgatggtttaaaagtgcagcacttctccctttgctctctctctcctgctgtgccatggtaagacgtgccttgcttcccctgtcgttccgccatgattgtacctttcctgaggcctctccagccatgtggaactgtgagccaattaaacttcttttctttagaaatt

SEQ ID NO: 716294 - DNA, 488 bp, Homo sapiens
aacgatggtcctcagctgcttggaggctgaggcgggagaatcgcttaaacccaggaggcgtaggtttcagtgagccgagattgtgccactgcatttcagcctgggcgacagagtacaactctgtctcaaaaaaaaaaaaaagaaaaagaaaaagaggaagggggtaggagtaatttttttttcctaaatggatcatttaactttttggaaggtcattggaaatgtgacatttatatcagggacaattatattaagcctccgggagtagaatttatgcaacggctaaaatctagaaatatccgcggggcaggggggctcgcgcttgtaatctcagcacttggggaggccgagggggtggaatcactggaggtcgggaatccgagaccagccgggccaacaggtggaaaccccatctggtactaaaaatagaaaacataagcggggcgggggggggggcactgggggtcccagcggctcagtaagctgag

SEQ ID NO: 716295 - DNA, 142 bp, Homo sapiens
aatgatgcctagaagtaaaaatagtggtgctaccatgcccaagctcccctgcttgtaattgggaacaacagtcattatctcagaaacctcactgacaacgtgcctgggtacctgatgctctgaattctgtagatcatggtca

SEQ ID NO: 716296 - DNA, 1165 bp, Homo sapiens
ggctgctgctgagatcaggcatctacgcgctggaacccatgcagcctccctggggctgggctggctctggatggagccaggacatcggcaagggctcatcggcgagctgctagcactgtcagactccatgccttcaagccctgagtgtgaagtcatccgctgcaggaccggggagtggggactctgaccgtgtgggcctggtctcaggccctacgttgcatcgatgactgcctcatctggtggaagccaggcattataagctcgtagccctgttgagagcatatccgtgttgcctcatgcagggaagtgaagtcagagataatagccactatctgacttactctaatatacacatagaagacacaaaatagaatagagaaaaaacaaacaaaagacagatacatacataatagggtgcgggtgcgcatgaacatgaactttcctctggagggcgcgcgacggttcttataaagagacccgtcagcgcttctcattcgagaagcaagcgtgagtggagctcgcgcgagatcagtcgagcgtggagcctatagagatgacacgtgaacagcctaggtcgtgtaaccgaagcggaatggacagtcagttgcggtcaagggcgtgtgggataaaaggagccggagtgcaaagcgtggagtgtcccctgtgtgaggggacagagagagccattttcacatgtctgtgaggggagagtggagacacattaagagagttgttgacgacctaacattcgcaattcagtggaatgtgtctaccaatgatgcttcggagagtggccacaccttctaagagattttattgtaagagcgcgagatgttcaaagaccatggggcgcttacaatataaggcggggagtataccccggtgtgcccagttgtagttcagatagcccaccgagttgggggatccccggagaatgatttccttccaaatctttcgcgtggaaatcttgtcaggccggcgcgtgcagtcatccatgtgggaaatagaacacaaactggccttgcacgccaactttgcgaatccctggcggacaaggcacattcttaaagcatgcacagcgccacccctccaggttctaacccttaccgcgatggggctctgcccaattggcggacaggttcacccaccacgctcgactccaacc

SEQ ID NO: 716297 - DNA, 3130 bp, Homo sapiens
agcgggattaggtctggctctctcgttctttctcccttctctgcctctctctcctccacgctgctttgatttcgctcttgcctctcttcttgcgctgctcagctgggaacatcgtctcaccagggcagcagcgacgcgctgcacagccagacaggagctggctgcggggcatggaagcagcctccttggcagccgggagaggagcaagcgcacgccactgcccgtgacccaggcgtccggctgctgtcccctgccggggagctcatccacgcagaggtctctccctgtcctccctgcgagcttttcctctgcagagcccagtggagccagccatgtaccgcggcaacgcttgctgaccccagtgaggagagaggcctgaatccgagggccctggcacctgtgagctcttggctgtcacctgccccaagcctcgcacctccgctccacagcagtccccacaggagacaaccctgacgggagcatggagctgctgtccacgccccacagcattgagatcaacaacatcacctgcgactccttccgcatctcctgggccatggaggacagtgacctggagagggtcacccattacttcattgaccttaacaagaaggagaataagaattccaacaagttcaagcaccgggacgtccccaccaagctcgtggccaaggcagtgccgctgcccatgacggtgagaggccactggttcctgagcccccgcacggagtacagtgtggccgtgcagacggcagtgaagcagagcgatggggagtacctggtgtccggctggagcgagacggtggagttctgcactggggattatgccaaggagcacctggctcagcttcaggagaaagctgagcagatcgcaggccgcatgctccgcttctccgtcttctaccgcaaccatcacaaggagtacttccagcatgccaggacccactgcgggaacatgctgcagccttacctgaaggacaacagcggcagccacggctcccccaccagcggtatgctccacggggtcttcttcagctgcaacacggagttcaacacgggccagcccccgcaggactccccctacggccgctggcgcttccagatcccagctcagcgcctcttcaatcccagcaccaacctctactttgcggacttctactgcatgtacacggcctaccactacgccatcctggtgctggcgcccaaaggctccctgggggaccgcttctgccgcgaccgcctgcccctcctggacattgcttgcaacaagttcctgacctgcagcgtggaggatggggagctggtcttccgccacgcccaggacctcatcctggagatcatctacactgagcccgtcgacctgtccctgggcaccctgggggagatcagtgggcaccagctcatgagtctgtctactgccgatgccaagaaggaccccagctgcaagacctgcaacatcagcgtgggccgctagggactcctggggagctggggggcgagggagagatgagcggaaggtggaggtgggtagcccaggttcagggagctggctttctctctcctgcccccctgctccctccactctgcccagctgccctcccctcgccccttggcattggaggcaacagacggtggtcctcttggtaagtgtggcccacacccagcctggtggacatggaaaggcttctcagcctctgtagttggcagctgggctggacttctggagaacttcccctttcctctggtttccttgtcctactgttctttgcctcgtccaggtctctatctcccaaagacctgcccacctcctgggctctcccagggaagcccctctgggccaaagcccatgggtagcttggctgcctccagaagagatgcagagagctgtggggcgatctttcttagtcccactcaccccactcagggccaaccacagaatgccccctccctgctgagctgggtctctggggcttcccactccaggcctggatcccttccttctataaatagtctcctgcaccaccgtgactccctggctgctccttgccccaaagaaccctcttcctgcatgggagagctgtccctccttctccacctgcccaccgggacactccccctgctctctagaaaggaactctctttcttctcttggcactgggggcgtcaggctgtcggatgttccttccttccataccccagcataccttctccttgcttagagtgcaggggtctgagacagcagccactggggttgaggagggggaggagacccctgagacccagaggtgccccttcctcagctgggagtgggccgcctcatgctctgctggggcctggcatggaacgtgagacctgtaagctgtcccgcgggccccggcaccccgcccagctgtgcactttgctcactcgctctgccatggtgccatgactgtactgtgcccatgcgtgacctggactgtggaccctctgctgctccgcctctcccctccccactggctctgtctgctctcctgccaccctgctggccgggagcccctccccggggagttcttggtgaagtccttcccgggcctccttgtgtttttgcctcattcctactgtcacacaggtcacgagggtggactccctacaatcaacaaagcaaacagagagcctgtgggaggggctgacagcagcagccggctgtttgggggatgatggaggtgacatcaggcagaggagagtgcagcctcacagtgactttctcagaggtgacagagatgatggatgagcagctggattttcgtgatgaaggacggaagcagcagcgggccggcaaggccatacctcggtgagggacaggtggacaacggtcacctatctgtagccaggggcagttgtgtggccagctgtctctctgggatgagtcaggaggcctggaggcttggggagaggtgtggagaaggagagaacatggcccaggccctttccttccccctgtgctgacagcattgctgtgggggtggcccactgccctcccctggccctcatgtccccccggggctggggtccgcctgcctgtgctgtgcttgcgacgtgcatcaataaaccaccatggcctgagggccctgctcgtctcaaaaaaaaaaaa

SEQ ID NO: 716298 - DNA, 241 bp, Homo sapiens
ccccttggccccccccccctcccctttttcctgccgccccccctttggctgggtttttttccctggcccaaacctctctcctctctcttttttggggcaggttctctccctctcctcccccctctatcccttccttccgccccagccccctccctggggtttttttttctccccttcagccccccggctgatgccctttctggttttgggccattttccaatatttccgtggggagagaga

SEQ ID NO: 716299 - DNA, 124 bp, Homo sapiens
ggacctgcatacatacatattatgacattttagtgttgaattaaaaaattcatgatttttaattcaaaactaaaatgtcattaatatgtatgtatgcaaatgttttatcttattttctgaaatg

SEQ ID NO: 716300 - DNA, 2256 bp, Homo sapiens
ggcctcagcccggctcaccagccacatcttctcttccctttggtgtgtctccctggggtgggcaggacccactgcgggaacatgctgcagccttacctgaaggacaacagcggcagccacggctcccccaccagcggtatgctccacggggtcttcttcagctgcaacacggagttcaacacgggccagcccccgcaggactccccctacggccgctggcgcttccagatcccagctcagcgcctcttcaatcccagcaccaacctctactttgcggacttctactgcatgtacacggcctaccactacgccatcctggtgctggcgcccaaaggctccctgggggaccgcttctgccgcgaccgcctgcccctcctggacattgcttgcaacaagttcctgacctgcagcgtggaggatggggagctggtcttccgccacgcccaggacctcatcctggagatcatctacactgagcccgtcgacctgtccctgggcaccctgggggagatcagtgggcaccagctcatgagtctgtctactgccgatgccaagaaggaccccagctgcaagacctgcaacatcagcgtgggccgctagggactcctggggagctggggggcgagggagagatgagcggaaggtggaggtgggtagcccaggttcagggagctggctttctctctcctgcccccctgctccctccactctgcccagctgccctcccctcgccccttggcattggaggcaacagacggtggtcctcttggtaagtgtggcccacacccagcctggtggacatggaaaggcttctcagcctctgtagttggcagctgggctggacttctggagaacttcccctttcctctggtttccttgtcctactgttctttgcctcgtccaggtctctatctcccaaagacctgcccacctcctgggctctcccagggaagcccctctgggccaaagcccatgggtagcttggctgcctccagaagagatgcagagagctgtggggcgatctttcttagtcccactcaccccactcagggccaaccacagaatgccccctccctgctgagctgggtctctggggcttcccactccaggcctggatcccttccttctataaatagtctcctgcaccaccgtgactccctggctgctccttgccccaaagaaccctcttcctgcatgggagagctgtccctccttctccacctgcccaccgggacactccccctgctctctagaaaggaactctctttcttctcttggcactgggggcgtcaggctgtcggatgttccttccttccataccccagcataccttctccttgcttagagtgcaggggtctgagacagcagccactggggttgaggagggggaggagacccctgagacccagaggtgccccttcctcagctgggagtgggccgcctcatgctctgctggggcctggcatggaacgtgagacctgtaagctgtcccgcgggccccggcaccccgcccagctgtgcactttgctcactcgctctgccatggtgccatgactgtactgtgcccatgcgtgacctggactgtggaccctctgctgctccgcctctcccctccccactggctctgtctgctctcctgccaccctgctggccgggagcccctccccggggagttcttggtgaagtccttcccgggcctccttgtgtttttgcctcattcctactgtcacacaggtcacgagggtggactccctacaatcaacaaagcaaacagagagcctgtgggaggggctgacagcagcagccggctgtttgggggatgatggaggtgacatcaggcagaggagagtgcagcctcacagtgactttctcagaggtgacagagatgatggatgagcagctggattttcgtgatgaaggacggaagcagcagcgggccggcaaggccatacctcggtgagggacaggtggacaacggtcacctatctgtagccaggggcagttgtgtggccagctgtctctctgggatgagtcaggaggcctggaggcttggggagaggtgtggagaaggagagaacatggcccaggccctttccttccccctgtgctgacagcattgctgtgggggtggcccactgccctcccctggccctcatgtccccccggggctggggtccgcctgcctgtgctgtgcttgcgacgtgcatcaataaaccaccatggcctgagggccctgctcgtctcaaaaaaaaaaaa

SEQ ID NO: 716301 - DNA, 298 bp, Homo sapiens
ccccccccccccccccctttaaaaaattttgccctttggcaggcaagcaattgcacccaaattggtgggcaggggggtggaaggcccccgcccccaggagaacccccaaattcccccctcaaccctttaaccatggggggggcccccaaaggccccccccccccccctttgggtaatgttcccgggggggggggggggggtcccccccccttccagggggcttcccctggggccccccaaagggcaaacctaaaaaaaggggaaaaagggccaaaaaaaccccgttttttcccgggga

SEQ ID NO: 716302 - DNA, 3008 bp, Homo sapiens
agcgggattaggtctggctctctcgttctttctcccttctctgcctctctctcctccacgctgctttgatttcgctcttgcctctcttcttgcgctgctcagctgggaacatcgtctcaccagggcagcagcgacgcgctgcacagccagacaggagctggctgcggggcatggaagcagcctccttggcagccgggagaggagcaagcgcacgccactgcccgtgacccaggcgtccggctgctgtcccctgccggggagctcatccacgcagaggtctctccctgtcctccctgcgagcttttcctctgcagagcccagtggagccagtccccacaggagacaaccctgacgggagcatggagctgctgtccacgccccacagcattgagatcaacaacatcacctgcgactccttccgcatctcctgggccatggaggacagtgacctggagagggtcacccattacttcattgaccttaacaagaaggagaataagaattccaacaagttcaagcaccgggacgtccccaccaagctcgtggccaaggcagtgccgctgcccatgacggtgagaggccactggttcctgagcccccgcacggagtacagtgtggccgtgcagacggcagtgaagcagagcgatggggagtacctggtgtccggctggagcgagacggtggagttctgcactggggattatgccaaggagcacctggctcagcttcaggagaaagctgagcagatcgcaggccgcatgctccgcttctccgtcttctaccgcaaccatcacaaggagtacttccagcatgccaggacccactgcgggaacatgctgcagccttacctgaaggacaacagcggcagccacggctcccccaccagcggtatgctccacggggtcttcttcagctgcaacacggagttcaacacgggccagcccccgcaggactccccctacggccgctggcgcttccagatcccagctcagcgcctcttcaatcccagcaccaacctctactttgcggacttctactgcatgtacacggcctaccactacgccatcctggtgctggcgcccaaaggctccctgggggaccgcttctgccgcgaccgcctgcccctcctggacattgcttgcaacaagttcctgacctgcagcgtggaggatggggagctggtcttccgccacgcccaggacctcatcctggagatcatctacactgagcccgtcgacctgtccctgggcaccctgggggagatcagtgggcaccagctcatgagtctgtctactgccgatgccaagaaggaccccagctgcaagacctgcaacatcagcgtgggccgctagggactcctggggagctggggggcgagggagagatgagcggaaggtggaggtgggtagcccaggttcagggagctggctttctctctcctgcccccctgctccctccactctgcccagctgccctcccctcgccccttggcattggaggcaacagacggtggtcctcttggtaagtgtggcccacacccagcctggtggacatggaaaggcttctcagcctctgtagttggcagctgggctggacttctggagaacttcccctttcctctggtttccttgtcctactgttctttgcctcgtccaggtctctatctcccaaagacctgcccacctcctgggctctcccagggaagcccctctgggccaaagcccatgggtagcttggctgcctccagaagagatgcagagagctgtggggcgatctttcttagtcccactcaccccactcagggccaaccacagaatgccccctccctgctgagctgggtctctggggcttcccactccaggcctggatcccttccttctataaatagtctcctgcaccaccgtgactccctggctgctccttgccccaaagaaccctcttcctgcatgggagagctgtccctccttctccacctgcccaccgggacactccccctgctctctagaaaggaactctctttcttctcttggcactgggggcgtcaggctgtcggatgttccttccttccataccccagcataccttctccttgcttagagtgcaggggtctgagacagcagccactggggttgaggagggggaggagacccctgagacccagaggtgccccttcctcagctgggagtgggccgcctcatgctctgctggggcctggcatggaacgtgagacctgtaagctgtcccgcgggccccggcaccccgcccagctgtgcactttgctcactcgctctgccatggtgccatgactgtactgtgcccatgcgtgacctggactgtggaccctctgctgctccgcctctcccctccccactggctctgtctgctctcctgccaccctgctggccgggagcccctccccggggagttcttggtgaagtccttcccgggcctccttgtgtttttgcctcattcctactgtcacacaggtcacgagggtggactccctacaatcaacaaagcaaacagagagcctgtgggaggggctgacagcagcagccggctgtttgggggatgatggaggtgacatcaggcagaggagagtgcagcctcacagtgactttctcagaggtgacagagatgatggatgagcagctggattttcgtgatgaaggacggaagcagcagcgggccggcaaggccatacctcggtgagggacaggtggacaacggtcacctatctgtagccaggggcagttgtgtggccagctgtctctctgggatgagtcaggaggcctggaggcttggggagaggtgtggagaaggagagaacatggcccaggccctttccttccccctgtgctgacagcattgctgtgggggtggcccactgccctcccctggccctcatgtccccccggggctggggtccgcctgcctgtgctgtgcttgcgacgtgcatcaataaaccaccatggcctgagggccctgctcgtctcaaaaaaaaaaaa

SEQ ID NO: 716303 - DNA, 852 bp, Homo sapiens
  misc_feature (621)..(621): n is a, c, g, or t
attacaacatttcctaaactctaaatctttgataatacttacttaaccattgtaaaatggacttttaaaaacaacccttaaaattgaatttatttttaaaaattaatattctagatgcttgaggattcttacatcctctttgtttaaagttttatgtttaatgtttttgtatcatgttttgtactttttgagaatccgtttttgcgactactcctttagttttgtatatcttagcactcacctttatatttactaatgtaggggagaaaagattgttatctctaacaaaagacagattaacaagagaaaagcataaattttacatgacacaagagtcttcagaagtgaaaattttaaaaaggcagggaaactgtatttttatgcttaggtttgatgaagagtggacagtcatgtagaaataagattggacaaagagaagtacgatctaatggcaacagactgggaagaacttaaggcctatttgttcatattcttcttggtgtctctgtgtcttcatcttttcctctgggtgttagaaggacccctctggaatgaggatcttataacctacttacaggaaggtcagagaattattttatgacctgcctcaggggagaacanacagataatttggcatgaccctgatacaaatttagaatcttgtctaaatgtgtaattaaggtcacatcttattactcagttataaatagtaactatatatcaagattatcctgatcctaagtctttgtatccttaagcaaaacaaatcggagaattgtttttcagtgattttgaaaaattacttccctccaccccagaaaacccccctaaaatatagaggaaagggaggaa

SEQ ID NO: 716304 - DNA, 670 bp, Homo sapiens
tcgatcctcagctgctctcaccgtgacctgtcacggtccaggtccatctcagcagcgtgagggtgcactccaagggttttttagagcgtcctcgtgtgtgctagacgcacccctactcgttcctataggaccccgaggacatagggaacccctgaaacaccacctgggattctctggtcacccgttttgggtttaggctaatctgctttgggcacggtggagcaccccccgaggaagcctgccagtcccagggcacacggctgccttttggaagggaagggctggcccactaaggtgctgctggctccccgccaccacagctgggcctcagccctcacggcaattcctgctgaagcacccctggggcaccccgggaacaggggcgtcagggatcctgctgccggcacaccctgtgccgctggcatagagggccgtgtcccccctgtgaaggatgaagagccaggccctcaggacccgtgtcctcagagcaccacaccctgagcaccccgagacagcgggcctggcaacgggccgggccaagcagggagcgcctccctatgttgcctgccccttctgggcaccggccagcacccttctggtgagaagaggtcccccctttttatgtgcactacccccccatctgtgattataattaatttattattcctga

SEQ ID NO: 716305 - DNA, 370 bp, Homo sapiens
gagctgccgcctactactactaaatccgcggccgctcgacggaaggtcagagaattattttatgacctgcctcaggggagagcaaacagaaaagatgagagagacttcccagtttctgctggtttctcagatgccaagatgccataatttggcatgaccctgatacaaatttagaatcttgtctaaatgtgtaattaaggtcacatcttattactcagttataaatagtaactatatatcaagattatcctgatcctaagtctttgtatccttaagcaaaacaaatcggagaattgtttttcagtgattttgaaaaattacttccctccaccccagaaaacccccctaaaatatagaggaaagggaggaa

SEQ ID NO: 716306 - DNA, 283 bp, Homo sapiens
  misc_feature (158)..(158): n is a, c, g, or t
  misc_feature (164)..(164): n is a, c, g, or t
  misc_feature (247)..(247): n is a, c, g, or t
  misc_feature (279)..(279): n is a, c, g, or t
aagctgaagttaagatctctcctaagtcctcttctgttaagatattttgtcacctttacagtatttcacagggtcccctggcccgggggtcatggccagaacgcagagactttatgatgaggacggtcccacgatgatccgactagcccagcaccagnccaggnacagagcacagtctccgttgtctcaggcatctggattgctcttggcctcccagtcttgaggagcggctggccaagccccagtntccacccatgcagtcatagaatgtcctcatcntagg

SEQ ID NO: 716307 - DNA, 263 bp, Homo sapiens
  misc_feature (104)..(104): n is a, c, g, or t
  misc_feature (154)..(154): n is a, c, g, or t
  misc_feature (157)..(157): n is a, c, g, or t
tccttctcgttcttggagcagctcagttcgtgctccaggccgcagctgccccccttgacctcaggccccgggggcggctcagggggcagtgccagggctgctcnttggcttcaggccgttgggcagtggtggccctgaccgattttgttccggnggnggctgaggctcagaggaccctgtgtcccgggtgtcactggccccggctggtggtagggaaggtgaggcggatggggaggtttgttttctttgttttctttctcgcg

SEQ ID NO: 716308 - DNA, 196 bp, Homo sapiens
agttcgacgctgcactgtctgtataagtatggtctatagctaatgaaaatatatagtacactcttcattgggtagtagctaccatgccaggccagcaatcactgaatgccaatgtgctaacgtatgtgcagggcgagatggctgtgtgtgttggtacacaagttctgcagaatcagtggaagccccatggcgcaca

SEQ ID NO: 716309 - DNA, 964 bp, Homo sapiens
ccgtgggtggtggtggcgtgtgtagtggcaggtgttgtctgcgcggctctaccagggaccgtgcgctgccgttaccgcccctatttttaagacccctatgggcgtctgttctggcaagttggcgcctgatctttggggaccggctcgcaaacttggttgcaagaaccttttcgacgtgttcacttgctgccggatccggtgacatattgccgcgggtgtgtgtgtccctttccgcgccgcggggtaatagggtgttccacacccgcgcacgcaccgccgctgggttcaatgcgccacccgcacggttttcaaacgtgttctgccctccgggcggggtcactcattcatatccagcgcccccctcgttgggcaggcaactagcagggtggcatggcctctttcgccagagctgagcgcccggaggatccttgttgttcgccgcaccgcacacgggctgtgttactcccgcgtctgtggggcactgcctcatagcctggccccgggcacctagcactttctttccacaaggaggcccctccacccagtcgtagaccgcgcgtgaaagtagttttcccccccattgtggaaaacgtgtgtgccaccacggcacgcgcagtttaaccagttactcaagtttcaaggggcgtttgatgttctctcactttaaaaagagaagctgtgctccctaacgtcacatggttacaccatgcgccccgtcgccaacatgtccgtaaaacccctcttgtttttgccgaaaaaaatgacacttaatagacacaccgtgctatttggcgcagacgcccactatgctgccgccctccaacttatgaggaggcggccaaaccttgtggaagtgctctgcccatgacccccggcgggagtcgggcccctcacattgtcatgccccgggctcacccccccactcccgttgggggccaacaaaaacctcttcttccaaataaca

SEQ ID NO: 716310 - DNA, 154 bp, Homo sapiens
ggtattgaaagcaaattaaaaattttaaattagggccaggcacagtgctcatgcctgtaatcccaagtgctttgggaggcagaggtgggaggattgcttgaggccaggagtttgagaccagcctgagcaatatagtgagactcctccatctaca

SEQ ID NO: 716311 - DNA, 595 bp, Homo sapiens
ggagctttctagccacaaggggatttaaagagacagtacctattttttttcttatattcctcctttgtggcaaagccagatatttaaggaaatcttaggtcactggttaaccacagagatatcacaacagaaacttcatgacccatactgcaaagaatacaccacttcacaaaaatagtgggacaaacgtcacaaatagttggctccagccctcaataagcaaaaatcaggcaatctctgaggcatgactcgaattagattcctcagttaccacaagtgtaatacctcataatgtcccagttctccaacaaaaaatatttaccaaacacttaaaacacgaacatagaaaacccatggctcccatttcaacagcgaaaaaacaaattcgacaggcaccatccttgaggaagtcccagactattcggaatttattacccaaagaacattaaatcaagtatcttaagtatgttcagcgaagctaaaggaacaacttggcaccaagaattaacagcgaaaatcaggaaaaccatgcttgacacaaaatgaggaattatcagtcaaccagacgacatcagcaacattctacacaggaacc

SEQ ID NO: 716312 - DNA, 175 bp, Homo sapiens
tgcattagctcctggctcggtgatgcctcctgatctatccatatgcctggaagatcagcactgggatgacctgatgagcacgaatggtcatgagtgatgcccacgaatcagtggcccagactgttcatgtgcactatggacgtgtggacgtgcatacgtgccctgtgtgcccctg

SEQ ID NO: 716313 - DNA, 1359 bp, Homo sapiens
  misc_feature (300)..(300): n is a, c, g, or t
taagtcacagaaaaaacaaaaatttttttataagtgcttgggaacgaaaaagtgcgtggagtggaatgtttaaacaaccagggagggagccacgtggtagaggtgttccctcacctctctgtgggaagtgggcacctaaggggtgcactatagctctatagagaggcaacttagaaaagagggcatttatagtctcatatatataatatatagagtgcgtcgctcgagcgcgaattttctcacactctcctcgagcgcaaagatatgttgtctttagagtggagggcgcccgcgggaganacacccgatatatatatgttattcttataacaagatgtggcggctctcgcgaggggttcgcgtggcgcgcggggtctcgacgggcgagtgtgtgtatacaaccgcagtgtgtctcccgcgcggggtagaggggtgtggggcgccgtgtgaagaagagtctctcccgcgggggtcccacacccctctctcgctgtggcgccacaacgcggtgggccttcaaccactctcctcgcaatctattttctgcgagaggggagtgtcacactctctgtggttctcccgagtgtcccccgtggtggaaacaccccagagaatttctctttccgagagagaaatcggtgggccccctttacccactatacataaaaaaagtggggcaatttgggggggagaccccccccgcgaaaggggagagtcaattatacaggcccaggggaagcgtgggaaaaacggtgagtgtacaaaaaaaaacgcatacgagtatagtgaagacgccctttgggggggggtgtgggaccactcaccaaaaaaaacacgacgggagaccgcgacaccagaataacgacacacggggagacccccaataaaagaaagaaaaattggaattgagagaaacaggagaagaccccaaaaagaaggggccaagtagggtgacgagacgcagaaaaaggggtggaccaacagaaaaaaactaaaagaggacaaaggggggacgaaacacccaagagggcgaagtgtgaagaaaataccggaataaacgcgagagacggaccaatatgtgggacacagagaacccgagggaaacgtgtgaaacggaaacaaaaggaaagtacgaaaaataagaacagaggaagatcccgagaaagagcagagatgcagcggttccgagagaaggttagaaaaaaactataggagaaaaacatagaaagaaccgagggatccgggcaggagagactaggaggacacgggcagagacacggggaacaaagtgaaaaaagattagaaacagcaaaacagtagacaaaaaatggggaaaaaaagaggaactagaaagaataa

SEQ ID NO: 716314 - DNA, 227 bp, Homo sapiens
tttgcgatgatggcagctgtatccagcactttggaggcagtggaggatcattgaggcagagtcatgacagctagcgaacatggaaacttgtctctctaagaaaaaataattagctggtgtggtggccacacctgtaatcctagctacttgggaggctgaagcacaagaaacacttgaacccaggagacagaggttatagtgagccactatcagccattgcactccgg

SEQ ID NO: 716315 - DNA, 385 bp, Homo sapiens
tcgtatgtgccagccacgacacaaacgcacagacacacacgcacacacatgcacacacagcacacaaacgcacggcacacacacgcacacacatgcacacacagatacacacacactcatacccccaccacacccacacacacactacagactcacacacacaccacatacacacaccccacacacaggctcatatacccaccacacctacacacacacccccatcacacctacacacacacctacacacatacacagacacatacaccccacaccacactacacctacacacacaccaaatacagacacacataccccaccacacctgcacacattacacaccacacacagacacacctcaacacacctatacacacaccacac

SEQ ID NO: 716316 - DNA, 477 bp, Homo sapiens
  misc_feature (109)..(109): n is a, c, g, or t
  misc_feature (140)..(140): n is a, c, g, or t
  misc_feature (181)..(182): n is a, c, g, or t
  misc_feature (184)..(184): n is a, c, g, or t
  misc_feature (195)..(195): n is a, c, g, or t
  misc_feature (228)..(229): n is a, c, g, or t
  misc_feature (235)..(235): n is a, c, g, or t
  misc_feature (248)..(249): n is a, c, g, or t
  misc_feature (307)..(307): n is a, c, g, or t
  misc_feature (357)..(357): n is a, c, g, or t
  misc_feature (376)..(378): n is a, c, g, or t
  misc_feature (382)..(382): n is a, c, g, or t
  misc_feature (386)..(386): n is a, c, g, or t
  misc_feature (477)..(477): n is a, c, g, or t
atttattagaaaagattaatactaaaacttttcaatgacagagacaatcaactttgtaacagaaagtcagagatactttatttttacttctaaatccaaaggctaagtngggcggggttgtaaaaatgaaatcccacttngtctggttcgcacggatactaacgtttaatcctgttttcanngnccaggattggnaacttgcgattgaacactgggcgggccacatgnntaggtnatatttcttaaanngtcttagggggaaaagtttgtttctggtcctttgttttcggtggcttttttacttttnacacttgttctgttttctggttggtctcttctgtcctgttttttcttttntttttatttttaataaacnnnctanctgngctttatactttttctttgcctcttttgctttctttctcctcttttttttattgtcgttcttctctttttgccgttctcggttttcttccn

SEQ ID NO: 716317 - DNA, 158 bp, Homo sapiens
atctgaggatacttacagtctaccacagcatgccaacagctcatgcccagcagtcgcagccggctacactgcctactggaagccagccgcagtcccagcatgcggccccagtcctgtccagcatcaggcggggcaggccccacacttgggcagtggac

SEQ ID NO: 716318 - DNA, 561 bp, Homo sapiens
taataaacgctgctgaaacaactggacatactcatgaaagagaataaatcgaattcagaccgtataccctccacgaacataaattcaaaatgaatcacaggcctggcacggtgtctcacgcctgtaatcccagctttcaaggaggcagaggcaggaggattgcttgagcccaggagctcgagacctgcctgggcaatatagtgagaccccgttctccacaaaaagtgggggaaaaaaaaagacaaaatgaacaaagagcagaccatgtacgatggtaatatcttctcaaccaaaacatagtgggaaaaaactttgaagacacacaggcttgggttagactcctgcatctaccttgcattaggataggctccccagaggcagggctagcagtgaggattcgtgggaaagatcaattaggaggctctgaacctcttcaagaagcatctggaacatcagatggctgcgccaccatctcggcgatcctgttcctaaagaagcaagatctgctcgctgagaaagtcctcgctgggaaatcgaagatggaggactactttccagaaa

SEQ ID NO: 716319 - DNA, 218 bp, Homo sapiens
tgtgtacttttcagtgaacatttgtctggtcatgagcttgttcttttctgtagataggtcatttgtgcatattttagatccacatgttagtgatagcatatggcatttatctttctgacttacttcacctagtgtgagaatctctagttccaaccatgttactgcaaatgaaattattttgttccttttcatggctgagtagtattccactgtgtatg

SEQ ID NO: 716320 - DNA, 214 bp, Homo sapiens
caggccgaggcaggggcatcgcttgaacccgggggcagagcctgttgttagctgagatcacgccactgtactccagcctggtgacagagacagactacatctcaaaaaaaaaaggaaaaggaaaaaggaattggctcagcccagggcctgggactcttctgttgagtatatctgggaagaaagtgagacaactagaaagtaattttttagtatg

SEQ ID NO: 716321 - DNA, 125 bp, Homo sapiens
agacgtcgggctccaaggttgggcatggcccttgaatccgggcatgctgtatgacaccttcgcagcctcgggggtctcctggggcctccaggtgccagtttggtaggcacttccggtaactacag

SEQ ID NO: 716322 - DNA, 295 bp, Homo sapiens
tgtgtctataatcccagctacttgggagcttgggaggctgaggcatgagaattgcttgaacccgggaggcagaggttgcagtgagctgagattacaccactgcactccagcctgggcgacagagcaaatgtcccaaaaaaaaaaaaaaaaaaccgggaaaaatttttcctttttttttgtttcaaaaaaaataggaaaaaaagggtttggggggagggccctgaaaccccagttatttagggggttggggcgggggaattttttgaccccaggagttgggccccagccggggggg

SEQ ID NO: 716323 - DNA, 379 bp, Homo sapiens
gacctctgcctttgggttcaagcaattctcctgcctcagcctcctgagtagctgtggttacaggcatatgcaccacacccagctaattttgtatctttagtagagatgaggtttcaccttgttggccaggctggtctcgaactcctgacctcaagggatccacccacctgggccacccaaaatgttaggattacagtcgtgggccactgtgccagccttctttttttttttgttttgtttattaatatgttttaataaatagagacagggtctcactatgttgcccaggttggtcttgaactcctgagctccagtgatactcgcaccttggcctcccaaagtgctgggattatagctatgagcccctgcacctggctgc

SEQ ID NO: 716324 - DNA, 310 bp, Homo sapiens
gggccacctgaaaatcccttgttaaaaaccagatcacaaattctggggctcttggtcccattggagaaggagggagagcctcaaaataagtgtgcacccatgcacatattcaggaccagcttgtttagtctttacactttgccttaaagttgcttttcctcgtccctttgtgtgcctggggggcctcggccctgttcgttggcaacgaggatcaaatgtgcctgcaggttttgcagaaacccaacctagaccacaaaacgtggaaaacagttaatttttttttccctaatgtttctcacgggccgtgggc

SEQ ID NO: 716325 - DNA, 317 bp, Homo sapiens
gtgctgaaaattgaaattatgtccagacatatccgtaatcttttcggtttctaaactatacagtgtagccagaatctcctaggttccgtggtgtcgaactggtccaaagggtgacactatcaaacctgtagcgctgatcttctgcacaaaacatcgtttgatacaacacaatcaacacatgcaggtccacccgaagaacatttcctactggccattgagcttaacgaggtttcttcttttttcacactactactgctataagatgcgctatactcgattgaaaaagtcacgccttgcttgaggcatgcagtcgacgc

SEQ ID NO: 716326 - DNA, 290 bp, Homo sapiens
tgcttaatctcatatctttcatttgcaaatccagttagtcagtcccagccaggcgcaggcactcatgcctgtaatctcggcatatagggaggacaaagcgggtggatcacctctgggcctttgcactgccactttactctgcctgtggacgcacttccccctatcttttgcacagctgactcccgcttgtcggccagattttggctcaaaaatatcactttctagagggagctaccccgactctcagctaaagaggtaccctccagtggctgtaccattttctccaacat

SEQ ID NO: 716327 - DNA, 106 bp, Homo sapiens
ggaaagactctgaaagaacagtccaaatgctactctaattctctagacgagatgtattaaggacccaaattagggctggccgcattgggcaggtccttcagcctca

SEQ ID NO: 716328 - DNA, 828 bp, Homo sapiens
cctacaaatctccttaattataacattcacagccacagaactaagtcatattttatatcttcttcgaaagcacacttatccccacctggtgcatatcatcaccctgatgaggctaagccaagtcagaaggccgtgaacgccaaggcgacaatagccttcctgattctacacccatagtaggctcccttcccctgactcatcggactatatttacactcacaacaccgctaggctcacggtaaacattcttgacatactgcactcatcagctggccctaagaactatcgaaactccgtgagtccaacaacgtattaatatggagctagtcttacacaatagacttgtatagtgaaagatacctgctgttgacggactgccactttatgagctccgctagagcccgatgtcgaagccccggcatcgctgggtcaatagtacttgccgcagtactcttaaaactaggcggctatggcataatacgcctcacactcatgctcaagcccctgacaaaacacatagccgaccccttgcttgtactatccctatgaggcataattatgaacaagctccatcggccgtacgagaagagagacctaaaaatcgctcatggcataactcgtccaatcagccacattaggcctggttagttaacaggccattctcgttccaaaacccccctgaaagccttcaccgggggcaagtcattctcataattcggcagggcttgcagtctcattatattctgctaggagattcaaatatcagcatcaaaagtcgctcaaaaacctttctcaggattcaatctatccaaaataggtttggagatc

SEQ ID NO: 716329 - DNA, 438 bp, Homo sapiens
aattcggcacaccggggggacttgaggagtgcacaggaggcctgtggcacctgggagtgagtgagtggcgagcaaacgctccttctcggaaaggcagatgcctgcaggtgcggaagtagctgcttggtccccagtgtgtcagcttggggggcacagaaaatgagagggtgacaggaagcttccggccaggcttggagagagggctgtgctttcttccttctgtagtttctttctctctctctctctctctctctttctttctccctctctatctctctctttctttttgagatggagtctcactctgttgcccaggctggagtgcagtggtgcaatctcagctcatggcaacctctgccttttgggttcaaacgattctccttcctcagcctgccgagtagctgggattacagggccacaccaccacacccagataat

SEQ ID NO: 716330 - DNA, 314 bp, Homo sapiens
ggctcggtacctcaatgaaaatcaggctgggcaagtgcggtagctcatactgtaatcccagcactttgggaggtggaggcaggcagatctcttgagcccaggagtttgagaccagcttgggcaacatggtgacaccccatctctacaaaaaatacagaaattagccaagcatattgccacacacccgtagtcccagctactcaggaggctgaggtgggaggatggcttgagcctggaaggcagaggttatagtgaaccgaggttgctccactgtactccagcctgggtgatagagccacacccagaccttgtct

SEQ ID NO: 716331 - DNA, 886 bp, Homo sapiens
gggttgtggaatggcctgggacccattgacagcacgatgtgtgactgtgagcaggagtgtggatgccatcggtgcagacgctggtggaccccaatgcatgccctctgcatgtgccctgcattcctggtgctgcttgttcactgtctgctgctggtgctctgtgctgtgcccatgtgctgccacttgcatggatcatgccatgtgccttctgatgactgattcctgcccttgctcacatgcactgatgcttgtgcctaacttgcctgtgtgccatcgatgctagtgaatgcctctgctgcacaatacccccaatagcttggctagtgaactgatagcattgcaagacacccgtcaggagcccataggtgcgccatagaggcaggggaggccctggtgggccatctggggacccggaagttctggagatcctgaagcatgtattcctctggacccctgtcatcgatggtggcctgagacctgccatgctggcctgtgcgcatggctggatgtggctgcagcagcacggcggggagccggcggctgtggaccctacctctccgtggaccctgcccctgccggctgaggagcgtgactgtgggtgctgcctgctgggaggcgctgctggatgagtcccggccgctcttcgagcgataccgcgccatgttctgccctgtgcaacggcgggagtgcgaggaggccgccctgtgtgctggccgagggtctgcactgtgggagcgccctcttcctgcacgaggtcggttacgtcctgggacagctgctcacgaggcggtggtgccccagctgctggctgcctgtgccgattcaccgagaaccccatggtgcggcccgattgcgcggagggcctgggcgccattgccggctgctg

SEQ ID NO: 716332 - DNA, 190 bp, Homo sapiens
acacactcagttagactttggctgcattctcacttggctgtatgcgtcacactagtaagaatagacagcgtcaccagagaggactgctctcacctcgggattttactgacacgacattagacttaggtcattggccagagagacttattctttaccgataccaccccaaccatggtcgagcggacgcgta

SEQ ID NO: 716333 - DNA, 618 bp, Homo sapiens
gatcgaggaagcccccttcctacgaagaggaacaggacgtcctccttggacacatcctgtctaggcgagcgagtgcagtgcgccggacctggtatggaacagcaaaatcctgttgaaccgatagttcgctcggtggaaggcgcctctaagtggtgacccatgctcgactctgtactgatagtctaccaccgtttgtagttgaggatctcgagccaagctgagagcctctggggaatgtgggggctagcagaggtaagaaatctacatacgagagacactccgacacaactctgttttaacggtagttgacatgccttgatccgccgccagggcaattaaagtcagctgttcatgggccgtaagatcccatgtccagtcgacaagtgtcggcgagcaaaccagtggtgcgccctgaagaatgaggcacatagccgtgccttcaatactgaacgggagagaaccactccggggagaaacccgttgtcgggcccaagatggaagtggagtttacctggcatgcggtaatgcgcccttgagcacgttcttgcaaagggccctacgcaagagtatatctctggagaaatcgtccccttttcggcgtcaccttaagccgccctt

SEQ ID NO: 716334 - DNA, 115 bp, Homo sapiens
tctagagcttacggttcagcaggaatctcgcgggggcagcagtgaatagcagcaggaattctcgcgggcagcaggaattctcagcagcaggaattctcgcgggggcagcaggaat

SEQ ID NO: 716335 - DNA, 1015 bp, Homo sapiens
  misc_feature (1015)..(1015): n is a, c, g, or t
gagtgctgacagtataaggtctcggagatccgggcactcagacatcggtgagtcggtccgttgcaagcaccccggaattataattatctacctacttcttattagcatcatatgttgattgtcgtctgcttgcaacaattgtgtagcaatagtgttgctaccagagacgactgctgcatcttacgatgagagataccggtcagtaattgtccaaactaaccatgtgggtcgaattcgcagaatgtatccatgtcttgagcatgtagtcacaaaacctatacacgtgagatcgacaggggtattctagcagctggcttatggaccagacaatcgttaaccaatcaaggtttgaaaatcacaaaacactcgggaagtcgataatcaggcctgatcataaggcaaatcgctagagcgtccaactataattgagatgcgttaggatagtaaatctagtacaaagacaaccaaagatatatggattaggacggctgggcatgactttatggtaattgtccgtaggtacacatatgcgttcaagaatgaaaattgatgtgaaggatttatggagaagcaatcgggattatgttaaaagtagaatagaagtcaaaacgtaatatcggatgattttcgcaatgcgatagtatagtaacttcgacagactacatccatataaggatgtgttcaagcgcatatgatacagaatgacacgggtatgacccgctaggccttgaaagggacgatcaatggtgcgccatgggaaaccaatttgcccacatgaccactggttgcaataattctcgactagatattctacatggaggaaagagggaattggtccaaaagtaccaattagcccaaatacatgggaagctgaatagcagcaatcgggacttcaacttgtacttaagggcctctggaaaagacgtaaacctagcaaattcgttaaggcgtacgtgtgaagatcggattggggtccggaaaattggattggacgtgtgtttaagaaggagaactn

SEQ ID NO: 716336 - DNA, 530 bp, Homo sapiens
ctggaccggcgagtattaactggacaagcaaggggcacgaggtacgcttgcgtcagaggcgcttcgtacaaacggaagcacctcccaccaacgtgtgcattcatcatgaggtgacgcccaccttcgggggcacttggtaactccgcacagtcgcagagtgagcggcaagatgggatggcaccatagcaacctcggacacaacctagggactggagttgcgcgtttctacgtacagagccggagcatgccgctcaagtccctgtggtggtggaactcccacatcgtggcagagtaagaggcccctgggaaccccgtgggaaaccccggtgagagggcggacaccccttgctgtagaaagctgctctgcccgaagcctggacccagctgctacatttagccgaataacaggggcacctgataagctgactagcgggaacctgaacccccaacaggactcagaccttttcagcaatcgtgctcgataccctgtgtccaatctggttccatattcagatatcatcgccgggtca

SEQ ID NO: 716337 - DNA, 119 bp, Homo sapiens
aggagtcatatcaacaagtagggtttacgaactctgatgttggatcaggacatcccgatggtggagccgctattaaaggttcgtttgttgaaaaatccatggtgctacgtgtccggcca

SEQ ID NO: 716338 - DNA, 105 bp, Homo sapiens
ctcgcaccaactggcaaagaagctgtgattcacatgtatgagcaccagtgataaccattctcagcttaaacacagttcacagggagttcctccaggaatacaaca

SEQ ID NO: 716339 - DNA, 1049 bp, Homo sapiens
  misc_feature (261)..(261): n is a, c, g, or t
  misc_feature (398)..(398): n is a, c, g, or t
  misc_feature (601)..(601): n is a, c, g, or t
  misc_feature (703)..(703): n is a, c, g, or t
  misc_feature (705)..(705): n is a, c, g, or t
cccccgtttagtgggttagtcgaaaaacgcagcacaattacccgaatttttaaagggtggacccaccccttattttatggggcacctcctggagaaggggaatccccccaccacaaaaggtgtgttggtgaacacacgaagaagacgcccaggcgccccttggttataatacccgcgccgggccccacggtatgaacctatattacacccgggtcctctttaaaaggggtttaatcggaaagggccctctcgtgggttgtngacgagaaaatttgtcgggcgcccccgaagagggttgtaaacagagatatagagggtgtcgcccccactctcacctggtgagcgcagccccccccggcgattatactatttggcccgcccacacttatagagagaangggtgttcacatggagcccccaccacgccgcagatctatttctctttcacgagagggagaaacacccacaagtgggtcacttgagattgtccctcgtcacccccccgcggaaaaaggcgcgaccacggtgtgcctatagacccacgcagaattttttcgcgggagaaaaatctatgctccccacaatatgggacccacagggncccacccccccgcgagtgggtcaatcctcttggtatatttggagattcacgagaactcacatttttggctggttgcgcacaagacccacacactgtggcttntntgggcactgagatttatatgagatttccctcgtgagattatatgcacacaagagaaaatatgagaccccccgacaccactatgagacttgcccacagacacctggccctgtattgagaaagagaaaagaccctccaaaaacagccaccgaaaaggaaccgccagaaccacgaatgtaagaaaagtccagggggactcgccaaggcccaatgttggtgctgcgccaaaaagtgaagctggagagattggatcccccccgcaaggagtataaggtgctgccatgatgttagctgtggcccctgtggatttttccccagaaccctttattaacttaaaaccttccca

SEQ ID NO: 716340 - DNA, 121 bp, Homo sapiens
cagtattagagtcagggacgttactagtaaataattgattgtatatttcaaaatagccagaagagaagatttatgttcccaacataaaagataaatgcttggagtaatgggtagtcacaga

SEQ ID NO: 716341 - DNA, 785 bp, Homo sapiens
ccacacacaccaccccaccacagcacctgccatcggctacgtccacggcgcgtgttaatacggacgaggaacatatctgtaggagatagatcaacagatcaattgtaggtactagcattccaaggatatataccttccaaatgatgatggcgaattttatacacgttctgctatacgttacccataagggtgaaattcgtggagcaagtacacctttccagtattcgagcttcttctccagttgaagcagctgcttactatggaagatgaaggacaattctagacatgtaagtggtgaccacaaaagcaggcctatctatgagttgcaaaattgacgacacaacccatgaacagaacaaacgaagacactgttcccgttaattgccgttctggcaacaagaccacagcacaacttcgagaacaagttgggagcaatggaaagagacacttaaccatgagaaagaaagcatgtgaccaactgcacaccagaacaaaagggtcttactgaagtaacacaaagcttaaaacatggacacaatgacagagtttaacgacagaggttcagtgatgctacatccaaagtcccatcagcttgaggaagatattgtgtcagtaacacactaacagcacatctgcacaacgaaaccgaatatagacagttcacaaggacaaactcaagaaggcaccacatgacacgagaacacttgattgtcagtcgaagaccgagacggtgacaggagcctatcaggtactttgacgataccgcaatagaaataccagctttg

SEQ ID NO: 716342 - DNA, 535 bp, Homo sapiens
ctcgaggccaagaattctccaaagtttgtatagtgtaggatttgttggtattcgtgataaaaacacctcatcctattcattttgccatgacgggcgaactccagataaaggttttgaaagtaatgagaaattattaattcatccatgttactggcttggtttgaatctaaatcgtaatgcacttgctccagaggaagcagaggagataaatgacgaatatgatattaatattatttcagataattcagccattagaaataaaacaataggtcaaataactactcatctagatcagataccgataggaaatgaaggtgccactgaatttgaacaatggtgtttagacgcactaagaatagtatttgcatcccacctaacagacatcaagtcccatccaaatggtaacgcagttcagagacgagatattataggcaccaatggtggcaaatctgatttttggaaacgagtattggaggactataaaacaagacaagttgtttttgatggcaaaaattttgaagaattaggtccatct

SEQ ID NO: 716343 - DNA, 477 bp, Homo sapiens
ccactaaatgtactgtgctagaagggggaaaaaataagtaggaagaatctctgtaacccataaaatggtatacaaatttcttactagtattattgtacaaagatgacaaacaaggaacttaaaatctacaagtgtactcaaataaatattatacaaagcaaaatatgatgggttccacaaagctttacaaataaaatactatggggaagcaagagagaagttgtgtcaggtggggcagagaatgaagaagggcattttagagaaggtgacattagagatgagtatataaaaataagcttctaagaggtgtaaaggagagagaaaggcattctatgtggagaagatggcatggacagaagcacaggaaatagtgaggaaatcgtattcttgaaggccaagaatgtgcatagccttggcttctctttgtattattattataaatatttttttgccacctatcacaccccaaaaaaaaaa

SEQ ID NO: 716344 - DNA, 645 bp, Homo sapiens
  misc_feature (39)..(39): n is a, c, g, or t
  misc_feature (64)..(64): n is a, c, g, or t
  misc_feature (174)..(174): n is a, c, g, or t
  misc_feature (192)..(192): n is a, c, g, or t
  misc_feature (197)..(197): n is a, c, g, or t
  misc_feature (205)..(205): n is a, c, g, or t
  misc_feature (207)..(207): n is a, c, g, or t
  misc_feature (212)..(213): n is a, c, g, or t
  misc_feature (226)..(226): n is a, c, g, or t
  misc_feature (236)..(236): n is a, c, g, or t
  misc_feature (239)..(239): n is a, c, g, or t
  misc_feature (244)..(244): n is a, c, g, or t
  misc_feature (252)..(252): n is a, c, g, or t
  misc_feature (256)..(256): n is a, c, g, or t
  misc_feature (264)..(264): n is a, c, g, or t
  misc_feature (335)..(335): n is a, c, g, or t
  misc_feature (337)..(337): n is a, c, g, or t
  misc_feature (374)..(375): n is a, c, g, or t
  misc_feature (384)..(384): n is a, c, g, or t
  misc_feature (407)..(407): n is a, c, g, or t
  misc_feature (432)..(432): n is a, c, g, or t
  misc_feature (435)..(435): n is a, c, g, or t
  misc_feature (461)..(461): n is a, c, g, or t
  misc_feature (463)..(463): n is a, c, g, or t
  misc_feature (525)..(525): n is a, c, g, or t
  misc_feature (571)..(571): n is a, c, g, or t
  misc_feature (597)..(597): n is a, c, g, or t
cgggaaaaagcaacatatttcatgctttgaatattttcncttgagaatagttttaaagttattnccttttgtaacattcaaaagtaaaacacacatataaaattccatcaaggattccctgtatgattaacattctgtacaagtcaaacatgaccacatctatattggaaaganagcactgagaagcaacancaggngaatgcancncctgnncctgtctcaggangaacagtttngtnaagtncagcagangaangtaacaangaccacttgtttccaaatacccagaggtttcttacgggccccccactaatcaataacacaagggctaagtncnaagtatttaaaaaaacaaaagactgcaggggaccccnncccccgggnccctttaccaaagccccaaaccncttaggacattaattacaatattcngcnccccaaaaaaataggcaaacacaggntngccaaattttagttacccagggaacctaccaaattttaaaggagaaaaaagacttacatccncaggacacaaactttagttttcacattcaccaaaacattttaaaancacccaaacaggagaatggaaaaggngggggcttatgtgggggggggtattacggcatttttttccccagtaaa

SEQ ID NO: 716345 - DNA, 153 bp, Homo sapiens
acgcaactccgggatcttatgttgtcttccacttggcactcatggtagtatagcattgaggaggacaaggctgggtatctggagggcagactgtctagcagccggtgatcttgttgtttggtgttcttgtgccacccaggtgtttgatgagct

SEQ ID NO: 716346 - DNA, 468 bp, Homo sapiens
gatcgctaatatgctgtctcaaaaaaaaaaagaaaagaaaagaaaagtgttactatagtatcctggcatttggctagcttgtaagtatctaagttaagttaggtaatttgatgattcaaagtttgactgtgaaaagcttgccgtaacatgcagatgggctgtaattgagtaaagtatgaaaatatgttttcggggttgccatttttctttctgaatttgattgcctggataatctgtggtcttctaaattattcttgaccttgggtttcccagtaattttatggctaataagtaaggctaaaaagtgactgggtgaaccattttagggtcccccaggttttagatcccataggatggcccatttaatcttatgtcagtatatacctaaggtcccattctcagaaactgctgtttccctagagcccagaaggccacagtcacctgccttcattaagaacactgtggcaa

SEQ ID NO: 716347 - DNA, 649 bp, Homo sapiens
  misc_feature (620)..(620): n is a, c, g, or t
  misc_feature (623)..(623): n is a, c, g, or t
cgcggtggctcacgcctgtaatcccagcactttgggaggctgaggtgggtggatcatgaggtcaggagatcgagaccaccctggctaacatggtgaaaccccgtctctactaaaaatacaaaaaattagccgggcgtagtagcaggtgcctgtagtcccagctacttgggaggctgaggcaggagaatggcgtgaacccggaaggcggagcttgcagtgagccgagatcgcgccactgcactccagcctgggtgacagagcaagactctgtctcaaaaaataaaaaataaataaataaataaataaataaataaataaataaatatcattatatagccaggtgtggagctcaggccagtaattcctgtactttggggagccgaaggggacggatcacttgagctcaggagtttgagaccagtctgggcaacatggtaaaaccccgtctctactaaaaaaatagaaaaaattagccaggtgtggtggactgcacctgtagtcccaactacttgtgaggctgaggtgggagaatcgcctgaacccaggaggtggttgcagtgagctaagatcacaccactgcactccagcctggatgacagagtgagacccttgctcaaaanatnaagttaatgtaatacatgtcgggcgg

SEQ ID NO: 716348 - DNA, 152 bp, Homo sapiens
tttgtatgggcaaaaaagtcgaggattgtatgggtgattatctggtataacaggtaatttaagtttctgtgctgtggaaagtgtaaagcatcccaagaaagggttttaatgtagattttttttttggccccccatgctgtggatggctaaag

SEQ ID NO: 716349 - DNA, 182 bp, Homo sapiens
  misc_feature (177)..(177): n is a, c, g, or t
ctgctcattgtaacctcggggttcaagcaattcttctgcctcagccttccaagtagctgggattacaagtgcccaccaccatgcccagctaattttaatatttttatgtagagacagtgtttcaccattgttgaccagtgctgatcttaaatctcttgactctcaaagtgatccacnccacc

SEQ ID NO: 716350 - DNA, 117 bp, Homo sapiens
tggggcagagctggcggctgttgttgtggtatggcggtggtgcgtgtcaggctctgcaggaagattcggtcagtgatggtgccagcagagctgcaggcctcgtccagcacggccagg

SEQ ID NO: 716351 - DNA, 188 bp, Homo sapiens
  misc_feature (9)..(9): n is a, c, g, or t
  misc_feature (15)..(15): n is a, c, g, or t
  misc_feature (101)..(101): n is a, c, g, or t
ctgaaacanactttnagaacagctggtcattatgccaaccaggagatggacagtaaggaggaggaggaggtgcctcagcccatgccaagcatcccggaggntctagagagccagaaggccatggtggcatttttaaactcagctgtagctagtgccgaggaggagcaggcacggctatttgggcagct

SEQ ID NO: 716352 - DNA, 295 bp, Homo sapiens
  misc_feature (24)..(24): n is a, c, g, or t
  misc_feature (60)..(60): n is a, c, g, or t
  misc_feature (127)..(127): n is a, c, g, or t
  misc_feature (148)..(148): n is a, c, g, or t
  misc_feature (150)..(150): n is a, c, g, or t
  misc_feature (160)..(160): n is a, c, g, or t
  misc_feature (237)..(237): n is a, c, g, or t
  misc_feature (247)..(247): n is a, c, g, or t
gaattctggatcctcggggggggnaccacgaggaccacgcttaaccacgcgctctgtgcnacctcttatgtgatgacgcacatcacagcttccacaagcattatctcacctcactggtgggtgaacncaggcctagggaccatccgcncnagtctgctanccctgccgtgccagtgggtctgcacagcctctacatgggagaaatgagcgagagagtgtggatgtgagtgtaaagcnctgtgtgtcnagagagggtgtggatctacgcttcgaatggtatttctatctggatatg

SEQ ID NO: 716353 - DNA, 304 bp, Homo sapiens
gtccacaatcaagttccaaatgcagaaggtgttgggcgataccatcacgtgatgttatcgcccatcacccttctgagccccagaccactctagacccaagcagccttatcaatttaccctgaagcatcatgaactatgttgggaagcaatttctacattcccaacctattacacttgattcccattcctctcaacacaaactggaagcataactagaagtcatctggccacgttgcctttatagtacaagaagtcacttctacccatatgtataacgtggtagcggtggtgtcggggataacta

SEQ ID NO: 716354 - DNA, 116 bp, Homo sapiens
acccgcggcgagttcatgcactcatgggcccggctgctcggcaggctaaggcgggaggattgcttgagtctgggaggtcgaggctgcagtgagccactgcactccagcgagtgatg

SEQ ID NO: 716355 - DNA, 131 bp, Homo sapiens
tccacacagcactaggggaaaaaaagcagtagacaaggaacagcaaagtaatttatcttgcatgccactttcagtcaacaggatgtggctctctagaatgctgtgtggagcctagttgcctgtgctggatg

SEQ ID NO: 716356 - DNA, 1235 bp, Homo sapiens
catagtggctcacacctgtaatcccagtactttgggaggccaaggcaggtggacggcttcagcccaagagtttaagaccagcctgggcaacaaagtgaaaccccatctttacaaaaaaaacaagtcaaaaattagctgggtgtgggggtacatgcctgtaatcccagctactcgggaggctgaggtgagagcgatggttggagcccaggcaagcagaggttacagtgagccgagatcattgcacattgaactctagctggggctacagagccagaccctctctcaagaaaaacaaaagcgaaaacaaggaaaaaaacaaactcgggtcacctgggatatacaggtcaaacacggtatcctcttgcaaaacacgtaagtccgtggccccagcacttgggaggctcagcgccttataacacccagcatcttcgggagagcgccaaaagtggggtgcgcaatcactttcgagcacccagggcagtttggcaagattttagcccgctgtgaccacatcaccgggaaaaaccgcaatagtctctatcacagaccaatactatccgcagacaacaccactcagcctcggaccacactgtcggggcagttgcacccccggtgtaggtcaccaaggcatagcctcagggaagggtttgacgcgcacgcaggcatcgacttgtgagccccaaaagggggatacgcagggcccaccgagcagtgaagggccaatgcgtctgcgaaccccaacgggagcaacccaccaagccccgtgaagacaacagggggaccggccgtaaacaccccccgatgatcgcccaccaaaatgaaccatcacaccaaccgacactcgaccaccacaaaccagacagcgcaccagcgttgcgtgcgacgaccaccactctgacccaccatgacagaaacacaaagcccttcctaccaccaaacacgccacaccgtcgacgtataggtggcgacccacgcgaggaccgcccccacacatcggaaagacacagacccgacgacacccacgcgcggaccgaccaagcagcgtgcttcagacccaaagggaggagcgaccgaccagggggcgacaacagacaaaaacaaggcgagcgcgtggacgactcaacacaagcaaccgacgtaaaaaaaatccgccccccgcggggcgaagccacgcaacacaggggccgaactcagcacaacacaccccccacacacatcgagcgacgaccatacac

SEQ ID NO: 716357 - DNA, 130 bp, Homo sapiens
  misc_feature (105)..(106): n is a, c, g, or t
tttttgatggaaattgtgaaaaacagtgttaaggattgttatcctgctgtccagaaaacgattttggtcatcatggaacgactgctttgcctcttgagatggagnnacatatgcagagctcatccgtttg

SEQ ID NO: 716358 - DNA, 845 bp, Homo sapiens
ggagggaagggatcctatatgtcctgtaggctctgtagcaaagggtcagcatttctaaatcttagacttgaacaaatcaaaacacccaacaaaaaagaacaaagagaatgatttagcaagttgggaatcatgacttgacataacagagcttcggttccaccatgtactttatcactagccctctgttctggaacagtcaccttgtaaatttctatttctggaaaattattttcccacgtctgaccttcacttctgactgtaccctgtacctagcttggtttgctgccattctgtctatagtaagtggcgtacacttgccctcgtgaattggattgaagagaaactatttacatcttttcttccataaaataagaaagtaatcaagctgactgtgatccttaaatttgagaccagagcagaataacagtctcactttgacatgttggtacttctgtccctgtgatttaatctctctaaacttgctttaggtcaccattgcggagcgcgggcatgggaggaaaatagtgttcaatatatccattaaatgttcattattctttttgaagatttgtgtgttggaattggtgtctctacacctaaataatacggggataatggctgaaatgtcctttgagaggacggtaaagcgcccgaagacatttaatggaccctttttgtgtgggagcggcgccaatattttatccctggaatatcgttcctaatgatcactacaaaactcccgggacaacaaagggggggggggtccccaataggaagcgcggggcaagggttgtctacacaccaagggttgggactggggtttaagggcaggtcgtacccgcgga

SEQ ID NO: 716359 - DNA, 117 bp, Homo sapiens
ttcagaggcacaaggaggctgctgcggatattggtaggcccgggcgagatttacaccctctccgcagcaggcctccttggtgctctggctccttggtgcctctggcttccttggtgc

SEQ ID NO: 716360 - DNA, 198 bp, Homo sapiens
cagcagagaagtcattcattctggcagctatagtcttcaagaaatcatattttttcaaatacatacagacttgcaccgttacacttactccttgcctcatgggctgaagcatggatgttgtgttagcaggcatggaaacaatcttttcttttcttttcttttcttttcttttctcttctcttctctgctggatacctt

SEQ ID NO: 716361 - DNA, 318 bp, Homo sapiens
  misc_feature (255)..(255): n is a, c, g, or t
tacaggatctcaagacagacactcggggcggggccagggggtggggctgggctgatctcaggcagagctgggcgcttagcatcagtgaggaagtggtaaaaaaacgcgacttcctttttcacttcctcaattttctctgcatgcttgttgaagatatgttggcgcacaaactcaggacccttgaattcctggccactgagaggacacagccactttatcctggcccaggttccggcggtgtgggaggatgacganacttctccagcttccgggctcgtggggtcttggcggccccagtcttcgtgggccctcttcctc

SEQ ID NO: 716362 - DNA, 193 bp, Homo sapiens
agaaaggtggatcgtctacccaggagtttgagaccagcctgggcacactgtgagaccccatctctacaaaacatgcaaaagttggccggccatggtggcatgaacctgtggtcccagctactccggagtctgaggcaggactgctcgagcctggggaggcaaaggctgcagtaagccaagatcacgccactcc

SEQ ID NO: 716363 - DNA, 916 bp, Homo sapiens
ggtgcctgtgtggatgtgcctgctggcgctggtcacgtgctgagcctgatgcctgatgcctgctgcctgatgcctgcgcctgatctgccatcctggcctcgtgcagctcgctgctgctgagtccctgtgcctgtgctggtgctgctggccctggctgtgtgccatgtgctggctgccacagcccatgtgatgctcgagaacatctgtagctgaacacggtgtgctactcaatggccctgggaagtgtggctggtgtgaaatctgcaaagtgctaataagcaatgaaatggcgtgcagatgctccagttcccgtcacatcatgccagtgctggaaagagcttgcggctcagcctcgagctgtgactatcacagcctgttgctgatgctggcagcccattgggcgcctgcttgttcccgagagttcttgtgccacgatggcctggagcttgaggccgctgctgtcgccttccttggatgggggtggccgagtatgaagtgaccccggatgacaatgcggaaggcatgtgggcgtgcagctaacgcagaattttctgagccacactgggtcctgacctcatccctgaggtcccccggccagctggtgacgaactgcaacccagctggctggagcagggtccctgcaaagaccttttccaggaactcacccggtttgagccacgagtacctgatgcgtggcccttttgccgactacctcgacagcatctacttcaaccgtttacttgcagtggaagtggcttggaaaggcagccagtgaccaaaaacaccttcaggcaataccgagttcctgggcaaaggtggctttggggaggtgtgcgccttgccaggtgcgggcacaggtaagatgtatgcctgcaagaagctagaagacaaagcggatcaagaagcggaaaagggg

SEQ ID NO: 716364 - DNA, 427 bp, Homo sapiens
  misc_feature (7)..(7): n is a, c, g, or t
tgggagnttaggaagaaggtttcccccctcctttcccccttggttgagaggggggggtccccccccccaggggtgggggtttcccctccccccccctttttgggtgtttaagggaaggggggccctttggccccccttttttttacccttaaaccttttcccctggggccctggggccccgggtttaaaaagttagggaaagttaaagttaggtttgggggggggcggccctttattggggcttggcgggaaagggattcttggggttttttaaatttggatggggccccaggcccgggggccgttcgggggggggtttttccccttggggggggggttgggggccccgggggtcccggcttgggtttcccccccggtttttgggctttgttttccccccttttttaaaggtttcaaaaacccccca

SEQ ID NO: 716365 - DNA, 160 bp, Homo sapiens
tagcataaaagaggataaaacaaatggaagacatccatgctcatgggtaggaagaatcaatatccgtgaaattggccatactgcccaaggtaatttacagatacaatgcaatcccagctcttcttactaaccaactttgttttcaccttctcattttact

SEQ ID NO: 716366 - DNA, 165 bp, Homo sapiens
cctggctggagcggggtctgacacgcttctgggacgggccaggttgtgccctgtttcttgctgcgaggaccaggacacggaatgtttgcccggtgagaattcattgggctgcacgcttatgatctatgcatttgtctatctatttcaataaaacatttacctaat

SEQ ID NO: 716367 - DNA, 103 bp, Homo sapiens
acttgcggatccttagacagcggaccccatggcaactcattagcgcattatctgagttgagcgaggcacagagtaggaggcggggggggggccggctgtctga

SEQ ID NO: 716368 - DNA, 712 bp, Homo sapiens
  misc_feature (196)..(196): n is a, c, g, or t
  misc_feature (218)..(218): n is a, c, g, or t
  misc_feature (507)..(507): n is a, c, g, or t
  misc_feature (538)..(539): n is a, c, g, or t
  misc_feature (674)..(674): n is a, c, g, or t
  misc_feature (680)..(680): n is a, c, g, or t
gcgaagaaagtcagccaagtccttgtagtacaagcatttttcagcagagcccgaaaaacagcacttgtttcacatggaggaggatccgatgcctgtgggtgttcggggttgggttctctgtggaaaactcgtcagcccatgtcttgagagtattagaagtaaacaccctgaacccttagttaaaaacgttaacgcnacggcacagccttatgtaacanggctttccgaccgacaaggtgaagttttacgggagccaaggtgatcttctgcgggagctgaagtgatggggttcagggggctgcgtgagccgttgcgggaaaggtcgtgagcggattcgggatcacagtgaaacacgagatttcccaaaggtgaggtttttcggggccgcacagccacagaacccgcgcggtgactgactgcacagttttctgcctgtgcagacataggtgagaatttgcgggacctctttgcgccccgattctgcccatctttaggcaatttggcganaggtgaggtttcacgggactccgcggggatnnggtgtgaggatttccgggaaacgcccgccatttgcacagcaaaagtgctctccggagcctgtgatgccctaaaggtgagccttttcgggagggaaatccgggtttcctgccctgatcgcactaaggtgagctttncggggntgtcggtcacaagacggtgaacggatcacagg

SEQ ID NO: 716369 - DNA, 262 bp, Homo sapiens
aaaattcaactgtatctaattccgccaaacgtctttcagctgtttgacgatttgacaaataggcggctacgtgtgcgtagtgtaaatgacgcttggcttcaccaaattaccacgcttttcttccacttttgccaacaattcactcaagtctgggacccagaacaaatcgacgcgcttacgtaatacttgcaacgttcttgcaaaagttccgctgcgctatccaaatcaccacgctcattcaaaattcaacatgacgttgccg

SEQ ID NO: 716370 - DNA, 157 bp, Homo sapiens
tcagaggatccccttagggaggactaaagtcatttcagtctacaccgtattctttatactctgtctcaataacaaatgtcactgcccaaataaagcacattacatctttgctggctctgcatcattctttctgaagtctcctctatcctaagaccct

SEQ ID NO: 716371 - DNA, 801 bp, Homo sapiens
  misc_feature (166)..(166): n is a, c, g, or t
agagacatcggtgtggttattgccctggcatccaccgagttgaggaacctaggggggacaccagggcatggggccctcctgaggtccgtcgccctgtagttgcccagacagcagttcgtggacagtgcagcttcccccaggaaagggacctagtttagcacattgnccgggagcatgaaacttaatggagcctcaaaggatagatgacgctctgagtttttcagtactccctcaagactggacatcttggtcttcttctcaggcctgagggggtaccatttttggtgtgataaatagccctcacagcctgtggtgtcatttttgaggtgggggggagggaggaggtactattggcaactgcttcatgaacctcctgtgggctataatgttgttcactcgagtgtgactcattatggattgggactcatttcgcgtccctttctcctgtggtgcacagaccttgggggaaaggaaggaagtgcatgtttgggaactggcattactggagactaatggtctttaacctccttataccaaccagcatccctcctctcacccaaggtgaactggagggtactgtggtgagctggccactccagagcatgcagtgccacctggaggagtcagactaccatcgacatcgtagggaagagaggggagatctttttttgtagtgttttaattggggtgtgggaggccggggaggttttctatcaactgtatcattttctcctgagggtggagtgtcccatccttttaatcaaggtgattgtgattttgactaataagaaagaatttgta

SEQ ID NO: 716372 - DNA, 161 bp, Homo sapiens
gtcagtgtcttaaacctctctgcgatttactagaatatatgtgtacaactaactctgtaaatatacatatctataaatatttttcctgtgtaactaattcatgtctcttttagataactagtttatactgatgtctctgaacctaatctccttagcataca

SEQ ID NO: 716373 - DNA, 274 bp, Homo sapiens
tattatcctgcatgtaggcgaatgtaagatgctcttaaattcttaaccttatatgttgtgcttctgaccattttctcgttgtcctctctttccttttttttttgttggtttgtttgcaataaacttaagttcttgtgtccagccttttatttggttaattttttaacattgtttttgtgtgctgccaattgtgtatcatgccaaccgtggaaaaaaaaaattcaaagagcatttgaacatttcttgtactcttttaccaagagagttagtgctt

SEQ ID NO: 716374 - DNA, 528 bp, Homo sapiens
cagtgagttcttcttgcctgctgcctttactgagccagtttatcaagatgggggaattgcaataaagtttaattcacacagagccagctatacaggagaccagggttttattattactctaatgaatctccccaagaattcggggattggagtttttagggataatttggtgggtagggggccagtgagtaagagtgctgattggtcaggctggagattaaatcacagggagtctaaactgtcctcttgcgctagagtcggtcctcggcaggggccacgaaaccagatgagccaatttatcaatctgggtagtgccagctgatgaagccatcaagtacagggtctgcagaatatctcaagcactgatcttaggttttacaacagtgatgtcatccgatgagcaatctggggaggtttagaatcttgcagcctccagctgcatgactcctaaaccatgatttgtaatcttgtggctaatttgttagtcctaccaaggcagtctagtcctcaggcaggaaggagggtttt

SEQ ID NO: 716375 - DNA, 431 bp, Homo sapiens
gccacatgcagaagggtggccacggagcccacaggggaccacaccatgtccgtcctgctgggatccggccacggccccggggtctccccagaagatgctggcactcgagtcagggggcatcagatttctcagcaacccctgaggctagaagacagtagaggggcgttaccatgaccgtcaggagaatgacccctgccccacagccacgcacagccaggcttccagtggaggtgcagtgtgcgtgtgtcatggggacgtggatgcgcctgtgccacagggacagtctgtgtatgtcacagggatgtcggtgtgcacgtgttacgaggatgttggacgcgtgtcacggggacatggttgcctgtgtgtcttggggatgtgtcttggggacgcgggtgcacatgtgtcacggagacgtcgacgcggccgcgaat

SEQ ID NO: 716376 - DNA, 88 bp, Homo sapiens
aaaagaataaaaaattgccatatttgcactaaaacaattgcccgtgtccggggttttttcggagctctttttttccctcacccacttt

SEQ ID NO: 716377 - DNA, 397 bp, Homo sapiens
  misc_feature (308)..(309): n is a, c, g, or t
  misc_feature (325)..(325): n is a, c, g, or t
  misc_feature (355)..(355): n is a, c, g, or t
  misc_feature (384)..(384): n is a, c, g, or t
ccctgttaactgaattgtcaacttctataaaccatttcactgctaataacctttcatcagatcagacagaggaaataaaagttttccacttcttgttgagaaagcaaatgttagctgtgagatttgcaaattattggctatagatctattctgtatacatcagtgaaaggttactttatatttaaaactgaaactagaagcacaagcaacagaagaaaaaaatagataaatcggacatcattaaaattacaaactttagggtgatgcacggtgggctcacgtctgtaatcccagcattttggggaggnncaagggggggagggtncactttaaggcccgggagttttgaggaccngccttcaacaacacaggaaggaccccgtnttcttaccaaaat

SEQ ID NO: 716378 - DNA, 192 bp, Homo sapiens
cttgtccccttccactgtaccgggcctgtccaagggagacgacaaagggctggttctggggcaggctgctggtcaaactctgtcccatcttccagcttccccgtgtagtgcatgtcctggacatcccctttgcgcgatttgatgggacagtggtccatcctgcttcttgaccccggtcacatgcaaggtgtc

SEQ ID NO: 716379 - DNA, 549 bp, Homo sapiens
tgaaacggagtctcgctctgtcacccaggctggagtgcggtggtgcgatcttggctcaccgaggctctgcctcccgggttcacgccattctcctgcctcagcctcccgagtggctggtactgcaggcttgcgccaccatgcccggccaattttttggtgttttgggtagagacggggttccactgtgttggacgggatggtcttgatctcctgacctcgtaatccgcccgcctcggcctcccaggtgctgggattacagacttgagccaccgcccccggccagaaatgaggtttttctctgttgcccaggcgggcttcaaagtccggggctcaagtgatcctccttgcctgggcctcccaggtagctgggactatgggtgtgctccactgacactcaaatgggtttaaatgcctctttaaaatccactcagaggcctggcgcggggactctgcctgtagtcccagcatttgagaggccaaggcgggggatcacttgagggtcaggaagtgaaagccgctggcggtttggtggaaccccgctctgctaag

SEQ ID NO: 716380 - DNA, 487 bp, Homo sapiens
ccccgactagccgacagggaacaatcttgtggggtccaagctcaatgtgccctattactgctccatgttgtgataggggtggagggcagatggtgtagagatgctagggtaagctcccggtggcagttgaggcctctgagactgagtgcctgtggtcagctctgagagtgagcctgtgtgtatggctccattggatggagtcactccaggatggattgtctgacagtgagccatgtcggagggatctattggtcaagtacggaatcctcagtttaagtgagcctggtgttaggaaaagaattcccaacaaggtacaggaaaatcagggtagagtgtggccttaggcaagccacttctccgaacctgtttccttccctctaaaatgagaatcgcgatccagaatctgcctcccccgcaacctgttgggaagtctcagctgaagatgcctactgaggtcaccttggctgttgggtggaggggtggggtg

SEQ ID NO: 716381 - DNA, 106 bp, Homo sapiens
gtagccgttcttcatgctccctctccggatatcagaaccctgatttccccgttacccgctggtcacctataggtaaagcactgggagattacccaatttgaaatgt

SEQ ID NO: 716382 - DNA, 122 bp, Homo sapiens
aaccccccattaggattagggcccagactggctgtcggacactggggttgtgaagaatctctgggttttgatttagtgtaacacacacgtgatgtcatgacccactgggggttggcaagata

SEQ ID NO: 716383 - DNA, 736 bp, Homo sapiens
ggttgagagtagacagtagaaccagcgctcgagaggcttaagacaggacgacgtggtacggtagacggtgacaatgtgactactggcagacgcaatggcatggggccggaggctcagaactcgcggtgattctcgcgtgcgttgctaggtgaggacacctgtgtgtacccaggtgatcgcatgcgtggcgtgatgcgatctgcgggcggtcgaatagaggacgcggcgaagtgacacctgtctttgcacatgcgaaaaatagcgtaaggccgagatgcattggcgccgtggtgatcgaatgcgaagcggatagggttgctcggcgtgggccatctcagctaagcctcggtagagtccacggaggcttgtccttggtagcgccagtgcgtgggttggttccaagggatcgttcacggcccagtcgggagaacgaccctagcggtgctcatgagagcgccgtgaatcgcaagacggtcgccaatgagaagcgaagtccgttgggtggaatcacacagtcgcacacattagttccgcagtagccgtcaggcacacaattaacccagacgcagagggaatctcgaggggagaagaacggatcgatagcgaacgtggcgcaccagaaagggcgaacggcgtgttgcgatttggaaggtcgcaaatggaaggcgttcggactactcccttttaccccctatgtggggcttgatgcagcttgaggcgccctagttgcattaca

SEQ ID NO: 716384 - DNA, 544 bp, Homo sapiens
gcaacagcaggctgggatgaggtaggggatgcatttgagaaggaggaaacgttcaccttgtctaccatcaagacacttgaagaggctgtgggttatattgtgaagttcttggcattgcaccctgctgagaggtcagacaaattgccggattacaagaacacccactcgttgctcctggctggtgtgttccggggtggtcatgacttccaaaatccctcccggctgctgcttttggacacagtgacaatgcaggtgacagccagaagtttggaggagctgccagtagacatcatcttggcatctgtgggataagaggccagcctgcataggacctcatacccttccccaacactacctggaagttgtgccttcctcatgaaactggcagaaaccccttcccaagcttctgtattgaaaaacaattaggaatcattgcagatttttttttattctgctcccacctcccacccgggactacttgctggtgacttttttttttttttttttattttttttttttcactcctatttactttaataatat

SEQ ID NO: 716385 - DNA, 350 bp, Homo sapiens
gagagagagagagaactagtcgcgagtattgtttttttgttttattgccaggctcacaccacctttctttatttggaatgagtggtactcttcctcccaatgcagggccaggccccagaagcggccctgctgttgccgggggaagccaagtgtccagggaggccacagatccttccatcagaactacagctccacagaccggccggaggattccactccggagggcccctctgggaaatccagcctgcgctctctgacggcagagtggtcattgacctgccatcagtgcgcgtgtgccgtcatcagacgctgatgcagatccccagagcacctactggtcgagccggagc

SEQ ID NO: 716386 - DNA, 571 bp, Homo sapiens
gtgcctggctccgagtgctccgtggcggtcagttagacctgcgctccagtgtggtctcggtcccaggatggtcccatgctggtgtgtgagcctctgtgcttgcatctgtgcagccagaatccttgtacagagcgcataagtgttaccagcccacagcacgcaggaccggagatacttgctgcaacaggcccaggatccgtgagccggtactcatcgccattaccgtctccttgttgcggagagactcaatgctcgtccatgacgcagacaccgccacggaaacggaccgtcacttgctcttcgcatgactaattgcccccacgtgtgctagccactgtggcacccccattgtcgtaccatgcgcgagcatgaagtgccagtacatctactaatcacacggaggaacgacgagcaacgcacgttagacgccaagaccgagggcaataactgtccttcatctgcccctttgcgggaaaaacctcacccgaacgccccatcgcaaccatatcaggcattaggacagcacccattgcaattcccccttggaggtcctcatgcagccccgtcgtgc

SEQ ID NO: 716387 - DNA, 1448 bp, Homo sapiens
  misc_feature (874)..(874): n is a, c, g, or t
attttccattatactttctttcggttgtttgtctacagggtgtcacacaaagtttgggtgtttttgatcgtgtttccttgtggcgcccagggggagcagctcggtggtgtctgccaagcgccgggttggggggacaccccctgtggcaccacagtcaacactggtttccccgcgggtgtagtataatgtcgtgttcgagagtggccccccccgtgaaggtttgtgcacggtgggaacctttctttctcctggggggaacaaacatcagtgggccatttctaaaattcgtcacagaaaagtgctggttcttgttcacagagaatatttttttttcgttgcggcaaacagttgtggttgggtgaaccacgctctaatagattggcgcccccccccagtgggagatcccatacttgggcgcgtctaaatggcctctaagggtggatattatttctctctgggcgcccacgtctctacgggcgccaaaatattatagtctccccggggtaatattgcccccccctcggtgatttgggaggtttgcacccaacacacgggcgttcaacacacttgggcacaagacacaaagtgtttcgttcggaagatttctgagaaagggagaaaacagattttgagttccccccgtttttctcgggtgaaaaaaaaagcctcgggagaaggattggcgccccctcacaaaatgtgtctctggagaaagtctctcgggtagagatgagccgtcgcgcccactgtggtttagaaaataaatggggtgtgtcccttgggcgacacaggccacacatcagtgtgtttgttttgagagagagcttttctcgcacaagagacctatagatccacacactcttggggggtgtcnctctctcttgctctgtgttcgctgagatatatttgagagacccacagaccacacttttgtcgcgtgtggggtgtgtgtcactccacacaagcacacactgggacacacaagagacagggctctgttctgggaggtctcggccacaagcgtgtcacacacacatcagtgtctcggctccacgagaacagtctccacagagaaggggctatataatgagaataatgtatttccctcagatatacctcggccacaccccacacgttcttataatacacgctggtgggagaagaaccgcgttctcacagagaactgctttgtgttcacaattggccacatcttaaagtttaagaaggtaaaagaactgggttaaagagtaacccaatgcactctgtaaacccttcacgaaaggaaaaggagaaatgttttgctggacccacctttggttttctttttttgcgtggtggcacggtttaaaggttattaggtttttaaaatccgtactttttaatgggaaccacttggcccaaaatttgtcaccagaattttgagaccccatttaaaaagtttaatgaga

SEQ ID NO: 716388 - DNA, 510 bp, Homo sapiens
  misc_feature (8)..(8): n is a, c, g, or t
  misc_feature (23)..(23): n is a, c, g, or t
  misc_feature (29)..(29): n is a, c, g, or t
  misc_feature (36)..(36): n is a, c, g, or t
  misc_feature (45)..(45): n is a, c, g, or t
  misc_feature (111)..(111): n is a, c, g, or t
  misc_feature (190)..(190): n is a, c, g, or t
  misc_feature (200)..(200): n is a, c, g, or t
  misc_feature (287)..(287): n is a, c, g, or t
  misc_feature (386)..(386): n is a, c, g, or t
  misc_feature (419)..(419): n is a, c, g, or t
  misc_feature (430)..(430): n is a, c, g, or t
  misc_feature (487)..(487): n is a, c, g, or t
  misc_feature (494)..(494): n is a, c, g, or t
actttagnaagttggttaacagncaagtnacaaaantgccatatncacaatttgattcatgcagctgatgttcacttcaaactgtggcattacataatgcttcatacaggntatcatgcactggctcactgtaactggtaaattttagtcaatgggtctttgtctgactgtccattcatgtattatgagncatacagggnacaacaaacaactttcacattcagacaaggtcagatgttgccattttgtataatgttcgctctgtccttgagaatcaccacgtgagngcagcttatcgacttatgcaagaagaagaaatgaatatcttgataaatttatccaaagatgactgggagggttcttcggaacctagtgattgaaatggntttatctacagacatgtcagggcacttccagcnaattaaaattntaaggaacagtttgcagcagcctgaagggatttcagagccaaaccatgtcctgattntccacgnagcaggcatcagccac

SEQ ID NO: 716389 - DNA, 1315 bp, Homo sapiens
  misc_feature (60)..(63): n is a, c, g, or t
  misc_feature (260)..(260): n is a, c, g, or t
  misc_feature (286)..(286): n is a, c, g, or t
  misc_feature (289)..(289): n is a, c, g, or t
  misc_feature (308)..(308): n is a, c, g, or t
  misc_feature (310)..(311): n is a, c, g, or t
  misc_feature (313)..(313): n is a, c, g, or t
  misc_feature (319)..(319): n is a, c, g, or t
  misc_feature (324)..(325): n is a, c, g, or t
  misc_feature (328)..(328): n is a, c, g, or t
  misc_feature (373)..(373): n is a, c, g, or t
  misc_feature (376)..(376): n is a, c, g, or t
  misc_feature (385)..(385): n is a, c, g, or t
  misc_feature (398)..(399): n is a, c, g, or t
  misc_feature (402)..(402): n is a, c, g, or t
  misc_feature (474)..(474): n is a, c, g, or t
  misc_feature (511)..(511): n is a, c, g, or t
  misc_feature (538)..(538): n is a, c, g, or t
  misc_feature (572)..(572): n is a, c, g, or t
  misc_feature (583)..(583): n is a, c, g, or t
  misc_feature (604)..(606): n is a, c, g, or t
tggagcccgagcggagtgggactcgaggccctgtagccggactgggcccctcgccccctnnnncagcggcctgcgggccttggcatgcgccgcccctgcccacactgaccccgtgtggcggggcctgctccgcgcccccgggccgctctgtaatggtagggcagcctcagccccgagatgacgtctgggtctccgcggcccgggttattgtaggaaccatccggccccgcgtaatcgtaggaactatccggccccgcgtnaatcgtagggtctgcgcgggcccggnccngcaccagacgggactcccncnncncccaanttggnnggncgaagagtctcctcgccccagagtcatcttcgggacgcccagggnccngggtgattnttgggctcgccgnnggncccgggtgattgtttcatctccgtggcccgcggtggtcgtagctgtctccgagaccgctggactcccgtagnggtccccgtggccccgagttgtagtcgggacaccccnggcgcgggtgatcgtcgggtctccacngcgcccgggtcgctgacgcggatccggcctcggngccttctcagnggcgcctgcaaggccgcaggnnnggatgaacattctggcacccgtgcggagggatcgcgtcctggcggagctgccccagtgcctgaggaaggaggccgctttgcacgggcacaaaagacttccacccccgcgtcacctgctgcctgccaaggagcaacccggacaggcaccctgtggggattttacggatctccaagggtcattgtggtggggggaccctgtcgggtgcgggaagacttgcctcaattagtaggttctgcaaaggacaccttttgactaggaatcaacaatggccacccatttgtgacgtggaccttcgacgatggaacgatttgagggtgctgggcattccccttcagtttgcagctttgcggataccgctgggccaggagcaggtcacactgcatttgcatcaaccctatctatagaggagctcaagccatcatcattggtcttcacctgaatgatgtggcatctctggaacataccaagcagtgcttgtccggatgccctgaaaggagaatgaccccttccaggtgtgcttctcctccttgtaggttccacgacggttctgagtaccccttctcagtatgcgctgatgagaaagacgccctcccaggtggccccgggagattaaggccgagaacgggggcggctccatctcctcccgtgggaaagggcggaactctcctcgcggggagcgggggacttggcccatggctgccggggaac

SEQ ID NO: 716390 - DNA, 236 bp, Homo sapiens
tggacctttggggcagtgtgggtggtggtggcggtggctcttggtgtctctgccaggttggtaatcaaaatatggcgggccgcataaaagagttaggcagaatctcccccctctaaagtttggggaacagctccagtaagaggggtcccagctctccttaatacttctggtagaatccagctttaaataaatcgggttgggggctttacctggtgggaagctggggaaccctctag

SEQ ID NO: 716391 - DNA, 184 bp, Homo sapiens
  misc_feature (2)..(2): n is a, c, g, or t
antataagtgtctgtcagaaataaaacacaatgcgataccaccctttactctacaagatgcataatcgaaaaatcaaaaaacatgaagatttggcatggatgcggtgatcagggagcacttctaactgctgataggaatgtaaactaaataatgccaacgcgtggactagttgggtaccggagc

SEQ ID NO: 716392 - DNA, 379 bp, Homo sapiens
  misc_feature (22)..(22): n is a, c, g, or t
  misc_feature (41)..(41): n is a, c, g, or t
  misc_feature (49)..(49): n is a, c, g, or t
  misc_feature (372)..(372): n is a, c, g, or t
tttcaagagaaaaggcagttcncctaataagccagaaaggntcttggantgcccagcttttcaatgtcattctaaagctggaagtaggttgggcatagtgctcatgcctgtaatcccagcactttgggagtctgaggtgggaggatcgcttgaggccaggagttcaagaccagtttcagtaacatagcgagaccctgtctctacaaaaaaaatttaaaaaataaaatttagctgagcatggtggtgagtgtctgtagtcccagctacttgggaggctgagttgggaggatcgctggagcccaggagtttgaggctgaccaagccatgactgcacctccacactccagcctgagatagagtgagaccctatcnaaataaa

SEQ ID NO: 716393 - DNA, 282 bp, Homo sapiens
aaaatggcttaagatgtattacagatcctgaattccagcaaaagagctattgacaaccagttgaagaacgcccccgactctccccaagaggaacagaatcagcatgaaaatgcagtttcttcatcatcaccaatccatgtattcttcaaccacgtgatcccccacctcggtcactccaactcccttaaaactacctagacctaaacggcatcagacaggcagattagaggtttccccctgtctccttattcggcagccttatgattaaactacctactctga

SEQ ID NO: 716394 - DNA, 483 bp, Homo sapiens
  misc_feature (4)..(4): n is a, c, g, or t
  misc_feature (473)..(473): n is a, c, g, or t
  misc_feature (477)..(477): n is a, c, g, or t
  misc_feature (479)..(480): n is a, c, g, or t
  misc_feature (482)..(482): n is a, c, g, or t
ttanccccccttttttggcaaccttgagcgggagaacggtgctcacacagcacctcttgttttaggcggtatttttttaaagtggaagggtgagcagcctctgcatccccccactggggggagagagcaccctcctttgcttttgtgaaaacagacccattggaaagttcgcctccaacacacagtttatttcggatattgacaggccggggtggcagtggggctcctgggacccaagtgaaaggaaaaggggtgggctcactcagtcccccccaaaaggcccgcagaagaatgcaggggaccgggagtttgtgttcatggatccatcccccccatgccggggggggaatgcggggtacatcgctctccatgttgtcgtcctaaaaccccagaaaaatgccccccccttggtaaaattccccttcagctctttttttttgaaaaaaaaagggttgaccttggaaaaaaacacnaacnanncna

SEQ ID NO: 716395 - DNA, 996 bp, Homo sapiens
  misc_feature (583)..(583): n is a, c, g, or t
tgctgctcgcgcgttctgttaggctcgagttctcgtaccccgtttggtctcgacacagatggggtctcggattatcagaagatggtggccacggtagtcttctccacaaggacgtgttcacaacagaacagcatggtgtacatggaacacgttgtagccgggcacgagctacagtccgtgttcctgggtgtatcacgcgctggaacacccgcgttgtggtccacccctcctatgtagggtgggggcggggatcttccccaaccgctgggttggttgttgaaatgttcccccccggtggagaattgttacccacagtgccacatggggggacagccccgcgtcctagagccgcctatctccgggggggtgcgagggcacccatcttgtagagttgccgcccgcgcgagtattgcggttgctgttggtgtctgctctcttgggtccgtttctttcctctgtgggttgggccctcttttttcttctctctccaagaaggagttgcacagcaaagatggcgctcttcttgccaccgtgaaagctcttctcggaactagtatttgtgaacacaggcgggatgggggtnaccgcctcgctgtcgatcttgtaagaaaccccctcgctggggtgccctcccccaccaaggttgtccccgcagcggtccgctctgttgtcagcactgtggtgccccctcggaggagacgaagtcgctgacccgttgtcgtgtcaacggccccccccgtgatgtgtcgctgtgtgttcccccccccaaagtcgctcggcgcgggatcatcgtgttttctcgacgccgcagcccccggaccttctcgcgctcggggcgagggccaccgtgtcggtgttatcattccggtgtccccacggggtttcgtttgtaattcttggctctctgacactggtgcgcaagagaggcgctctgaaacaccattaactccttgaggcttttttaaaaaataccgccctggttttccccaaataaca

SEQ ID NO: 716396 - DNA, 126 bp, Homo sapiens
gaagtggtttgtgtttttccccccccccccccccccttttgggccccggggtggcctttttcttccccctaatttttttttttcccccccttggggggaaaaaaatttaattttttttgggtccca

SEQ ID NO: 716397 - DNA, 241 bp, Homo sapiens
aaatttttcccttaaagaaaaaaaatgccctgaaccctttggactgatgagccccagaacttccgttgaaatttttttccctttttagcctgctaaatatacctctgggtttaaatgttctgtttaatggcccttcataaattccagccccccccctggtcagttttgtgtgatagaataaaaatatgttccctccagggtaagtccagccccctgtcaaattcttttccttaaggggccc

SEQ ID NO: 716398 - DNA, 108 bp, Homo sapiens
agtttgttttttaagaagaccagaagggaactggttggggttttttccgtaacaacaagaatttgggtggggatgattatattattaggagaattttttgggggtata

SEQ ID NO: 716399 - DNA, 273 bp, Homo sapiens
  misc_feature (31)..(31): n is a, c, g, or t
  misc_feature (118)..(118): n is a, c, g, or t
  misc_feature (141)..(141): n is a, c, g, or t
  misc_feature (164)..(164): n is a, c, g, or t
  misc_feature (166)..(166): n is a, c, g, or t
  misc_feature (198)..(198): n is a, c, g, or t
  misc_feature (232)..(232): n is a, c, g, or t
ttaacattaaataaagtggatgaagaatttntggaagaagagacagataatgaagaaaactttattgatctcaacgttttaaaggcccagacatatcacttggatatgaacgagactnccaaacaagaagatattttggantccacaacagatgctgcagaatngngcctagaagtggaacgtgtactaccgcaactnaaagtcacgattaggactgacaataaggattggngaatccatgttgaccaaatgcaccagcacagaagtggaatt

SEQ ID NO: 716400 - DNA, 270 bp, Homo sapiens
gggttttgcaggacattttgaacgaaccccctttgcttgaggctcgcacccccccgatgatcaatgatcgtttcaggggaaaaaaacccttggcgaaaagcaaaggtttaaaggcccaattttgctttccctggaactgtgtcattcaggactttgcaaattccctaaagtaggaggaaaaatgcccatgtccaaggaggcagtgcccttcaaggatgtggcagtggttttccctaaggaggagctggggctgttggcccttgccccata

SEQ ID NO: 716401 - DNA, 136 bp, Homo sapiens
gtacagcaggctcgcgtgaaagcactgctggcaggattgcctttcggccggagacttaagagaagcacagacgcgctttgacgaagcggacggcttgctcaaatcgagccatgaccccacggcacatgcgaatctg

SEQ ID NO: 716402 - DNA, 144 bp, Homo sapiens
gagcgaatatcaccaggtttggatgtttgaaaccgcttgccgactgtaggtgttgcgggtctgttcgtcagcgcaagtcaggcgaggatgtctgttttgcagacttgccgtatgttcgtgtatgtgcttccatgcagcgcctgg

SEQ ID NO: 716403 - DNA, 458 bp, Homo sapiens
tctcatagacactctcccgagtgtctgctcgatccgccttccacccttcagcggatgataactctccagactcctcccgagtgtctgctcactcccctaacaccctcagctccagcctcagcggatgataatctcaagacacctcccgagtagctgggattacaggtgcctgccaccacgcctggctaatttaaacgtatttttagtagagaaggggtttcaccatattagccacaatggtctcaatctcctgacctcgtgatccatccgccccgacctcccaaagtgctgggattacaggcgtcaggcaccgtgaccggctcagactgtactcttatagccctctgaaatacgttttctaggtcgagatagattgtgtaagggtacagctgtgaggataacagaaacatggcagattattttaaatcatcctgaaagtggtgctatatctgatgaaa

SEQ ID NO: 716404 - DNA, 391 bp, Homo sapiens
gcctttgattggaaaccaggcgccacctgctgactcccaaagctcacttctttggtcagtttctgtgcctgggacaaggagtctaagagctcccatccatctagttctcaggcaaagttgcacattgactctgcctttgacattggcaagaggagccccttcctttggccccaagcattagagggtcaaaatgacttattcaaacagcatggcctgtctacaggacattcaggcatacacaatagtggctaaattcagacatctttgatattataccaactttctgtcatttaaaacaacagctttacatatattgatacagagtctgaaatttgtatctgacaaaagtgacactaaactcaaaatatctgctcaggtcaataatacaatg

SEQ ID NO: 716405 - DNA, 170 bp, Homo sapiens
tgtattagggagggaggctgaatctgtaaccaagacctaccaggtcagaatctgcattttaacatgattcccgggtgattcctttgacattaaaatggtgacatgcatgacttagagctatctgaatcacagtgcctccagggcctatgcatcctctccctaagacccta

SEQ ID NO: 716406 - DNA, 200 bp, Homo sapiens
gttgcagtgagccgagatcacgccactgcactccagcctgggcaacagtgcaagactcagtctcaaaaaaaaaaggacgattggcagccctgtctacactggccctctctcaggtgcatcataacctattccattcaggcttttgactccagcacttaggggcagttatcttggcatagttccaaaacctccattgccaa

SEQ ID NO: 716407 - DNA, 347 bp, Homo sapiens
tttttttttaggggttttttttttggggggttttttaaaaaaaaattgggggggaacggccccccctttttttttgggggggggccccccgggaaaccccctttggggttttaaggggggggttccccccttttttttaaagggccgggcctcttttggggccggggggtttgttattaaaagggtgtcccggggggttttaacccccccccttttggggggggccggggggggtttttttttttttgggggggggggggggggtttgttttcaaaattggggggtttttttaaaaaagggggggggagggggggcccccccttttaaaaaactttttggcccttta

SEQ ID NO: 716408 - DNA, 552 bp, Homo sapiens
  misc_feature (475)..(475): n is a, c, g, or t
ttagattttttccattttttattaattgaagcacagcgtatagacgtataaagattaaagaaatttttgttttgtagacagggtgttgggtttacatccaccggaaaagaaaagcagttgtaaaaaacttgcgtaaggcggttcttactaaaattttaatggtggggtgagatgatcttaagggtgaagaaataagcctaaggcaggttgacttgcagcagcaggttttttaccgtgcttggctgagcaagactcattatcgtcaggcttgcattagttctctacaaaagctgggaaaccatccataacagttaacagttgctttatggttgccttgggcttgaatttcacgagctcttcaacagcggaaagtggcttgattcggcgctccttctaaaaaagagttcttataagtgcatggaaagcgaattgtccagtagttgacgtctacgggaacgaatggttcatccacttncagacctggaaaacatgggcgccagtttccatagattttgagctggtttagagactctggcacttagtggtgcttgc

SEQ ID NO: 716409 - DNA, 1086 bp, Homo sapiens
gtggcatgatcacagttcactgtagccttgtcctcccaggcacaagcaatcctacccacctcagcctcctgagtagctgggaccacaggcacacaccaccatgctcgtgtcattaaactttatccttcttataacttttgtagagacaaggtctctctatgttgcctaggctgcgtcttaaacctcctgagctcaggttgatcatctatacctacagcctcccaaagtgctgcgcattacacaggcatgagccaatgcaacctggcttgcgacactacatcacatcgggacaaatatcttgtgagcatggagtctcacttctgtcgctcagtgcttggatgtcgcagttggtgccaatcttcggttacaccggagacctaccagccttaccccaagtgtccattgccatatctaccctgcctcagccttcccgaagtacgcttgggacctacaggtgcttccccaaccaaccactgccttggcctaaattatatatatgggtaactctctcaacgtacgaacgacgggggtatccacctgctgtaaaggccaaggaatgggctcttagaatctacattgaaccggcgttgaatcccatccccgcgcctccagtcttcccaagaagtaggcctggggaattcacaacgttgtttgagaccaccaacggcccccggccctgcaaattcaatttttccacaactgtactggctatggataacgcattcaatatggagaactctcaaccatatgggccctcaaatttgcgccagcgttgcaccaacctaccctggtctggtgctcctgggcaacggtcccactcacacgtctcaactaaaaaccaagaacgaacgacacacacaacagaccaccacaaccaactttttaccgccgcccctcatgcccctccgaccaaaactctttcagaacgcagcacttttgtggggcgccgccacacgcactaactagacaccacacggatagcgcgctgctccgaaaggacctccgggtacaatccaagtcgtcaggtgcttccccacaccaacacagcgccggcagtcacacgctgtttataaccacccactgttc

SEQ ID NO: 716410 - DNA, 416 bp, Homo sapiens
  misc_feature (5)..(5): n is a, c, g, or t
  misc_feature (73)..(73): n is a, c, g, or t
  misc_feature (91)..(91): n is a, c, g, or t
  misc_feature (107)..(108): n is a, c, g, or t
  misc_feature (275)..(275): n is a, c, g, or t
atttnatctttaatctgaggccatttcttacataagaaatcttattgctatctggagagactaaagctgtganacagttttatttttcaangtagaaaattctgatnntattacaattcctttgaatattgcttgcaatctcaagagttctctctttagctcatctcatgcttcgccagccttttcagatgcagctaatggaagccaattgtcactttcaaagttcttcctggtaatatccttagccagatctgcaaattcattaggaatatttnctttcagctaactcagatgacaatttgacactgctgcataacacaaatcaactgttttccaatttccaaaggcagtttccttagcacttttcaaggccataaaaaaattgtgttcactactttacaaggtgtaaataacag

SEQ ID NO: 716411 - DNA, 374 bp, Homo sapiens
attggattgctttcacgaatacgaaggcctggaggtagatctacagaacagtcatagctagaatcaatggggacaaagttacagagagagatattctcctcagtttcaagagtgctacaaagagacttagactcccacacaataatagtgggagactttaacaccccaccgtcaatattagatcaatgagaggagaaaattaacaaggatatccaggacttgaactcagctctggaccaaggaagtccagatatgtcaaagatcagataggttgtagatgcctgatgtaatttctgaggcctctgatctgttccattggtctatgtatctgtaaagggaccagtaccatactgttttagttactgtagccttgt

SEQ ID NO: 716412 - DNA, 597 bp, Homo sapiens
  misc_feature (597)..(597): n is a, c, g, or t
cgcggtggctcacgcctgtaatcccagctctcagggaggctaagaggcgggaggatagcttgagcccaggagttcgagacctgcctgggcaatatagcgagaccccgttctccagaaacaaggaaaaaaaaaaaaaaaacaaaagaaacaaaaaaaaaaaaaaaaaaaaaaaaaaaaagagtgtgtgtgtgcggcgcgcgcgccgcgcggccccgcgagaaaagagttttatacaacaaccactacctgcgcgtgtggggcgcgcgcggggcgccacagagagagagtgataagagagaaaagcgggcgcccacaagagcgggttctccaagagagagagaaaccgcgcgggccgagagagataagaggaggcgcggggatttccccacccatatataaaaagagcgcgcgcgggggggcgaaaccgcgagagagcggtcgcgcgagaaataaacctccccaaggagggagaatccagagagaagaggccacaatatcgcggggggcactctatacaacaagaggggagagccccaaaggggagagacggcgagagaatctataaaatattatcgcccccccgcggggggggggacn

SEQ ID NO: 716413 - DNA, 851 bp, Homo sapiens
gctggcagagatttcccacccggtccgggaacccgcgttatggggggatgatttctccccactgtgccccacgccacaggggggttctccctaggcgcgctgtggcggaggacattccttgccagaattggcgtcctggcgtcgagagtcgcacccagagtttggcgctcccctgaccggggtcttttcttctaggcggtgcccaaactggccccacggccccatggttttgggggcgccttcctggggtctccatctctttcggggggagaactgttagagtaccctcgatcgcctgcgccccggttttggggcttttcccctgggccagatcaagactggggcccctgccgatttgagcgcttggcccagtacaaacgccagctctctccagaattgaagaggacgtgggcccaccaggctaaatttccccggccaggaacttctaagaaaccccctggcgccaagtaatactttgggccagggcaagccccttcggtcacccgttggggtacacagacgccctcccctccgggtccagcgtcaggcgagctcgaggcgccccggcccacacttgcaggggtctctgctttgttagcgccccccccccgtggggttctgtgaccgcttccttagaacttttcccggagcccagcgtccctggggccccgttggccagctctaggtttgccgtcgtgtgattggccccagatccttgtttttttcgccccactttccccccaaggtttagagtcatgtggacctcttgtctatttccggggtggccccagggtagatccccggtggttttgttggtccaaattaaaagcctccgtgacccctgggaatta

SEQ ID NO: 716414 - DNA, 199 bp, Homo sapiens
gataaactggtcaaccacggtgggcacaaaacgaggacccagtggcaaaaccagctgaacgcgccagtactaacgtcctagagcgagcctggggcggcgaccaagacggtggagctccataagcaaagctgccgaactaaagcaagatgtctgctcgtggtttggagaccaagggaataaagcaagatctatccacaga

SEQ ID NO: 716415 - DNA, 478 bp, Homo sapiens
tgtgacattatggtgctgaggatgtggatgatgagaaggagtcaggcagccgtgccctggagtgagatacgcgatgcacgaacatgacgagaaatgcccgtgcagtgtacgagagtccagctgacagtgccatgtgtgtgccagagcgtggagaactggacgacagttcaaatcagtccactggaattgatatcaacagacgggagactgacacttgcgtgtccatgtatggttgttttgcatgatcccttccttaagcctcaactagttgtatgcctcggtttcccctggctgcaggatgctcgtcagaagttccagctctgttctatgttgacatggaagggtgaaagtggattgaacttggtcgaggaagatctggcacatgctgtggaagagtccaagaacgtattggtattgcacagattggtggtgaggaggctcagatggaagctcagaaagcatgaggagttccagaggg

SEQ ID NO: 716416 - DNA, 380 bp, Homo sapiens
  misc_feature (93)..(93): n is a, c, g, or t
ggagtgggtgttcccgggggcatttgccgaccggccccttgggtccccaggtttgcagttttcccttgggccactaaccatcttggcccgggntgcctgtttgacccccgtgccaagtggtggctttccattttgtttcctccccgtgtccccaatgttttcagtggggggcccccttttgggtcccctcttttgccatcacctgaagacccccacgccaaacattgaatgtcacctgtgcctgccgcctgggtcccccttggggcccgtgtttgactcaactcagctcctttaacgctaatatttccggcaaaatcccaggcttgggttttgtttttacccttgtaacgcttgcaatcccaataaagcattaaaagtca

SEQ ID NO: 716417 - DNA, 431 bp, Homo sapiens
taccgggagctcggtgtcaacggtcgagaatctgttattaccatggatggaactggatatgggaaccggagtgagtctctggcagtcatatttaaatcctgtcatattgcctaaaagcagtcatatctaggttgtggtccaacagatacttcgattaaattccttggctacatctagtttactttggccttgagagaaatataacagaataccaccagcatcgtgattgcaaatagatggttaccgtggcaacctgacagtttgtaatattagaatcttcgtgttaaatcaaaacttatgaaattggagacctttccctgactgaaaacattatgctgcctcttatagttggaattacactgtgtccaagcagaaaactgtttttctttattaagaaaacaaacactttgtttgctcagtcgaacggactg

SEQ ID NO: 716418 - DNA, 146 bp, Homo sapiens
tatcgcattgaattcgacaatggggttagcaatccggcacttctctggccgcatgaccttacgaggcataataggcgcatctgcatacccagcgtcctgcgcgccgatacgccagcgactcgccgtcggcaatacggtacagcgac

SEQ ID NO: 716419 - DNA, 805 bp, Homo sapiens
  misc_feature (152)..(153): n is a, c, g, or t
  misc_feature (156)..(157): n is a, c, g, or t
  misc_feature (160)..(160): n is a, c, g, or t
  misc_feature (163)..(164): n is a, c, g, or t
  misc_feature (173)..(174): n is a, c, g, or t
  misc_feature (176)..(176): n is a, c, g, or t
  misc_feature (197)..(197): n is a, c, g, or t
  misc_feature (210)..(210): n is a, c, g, or t
  misc_feature (394)..(394): n is a, c, g, or t
  misc_feature (404)..(404): n is a, c, g, or t
  misc_feature (409)..(409): n is a, c, g, or t
  misc_feature (428)..(428): n is a, c, g, or t
  misc_feature (438)..(438): n is a, c, g, or t
  misc_feature (450)..(450): n is a, c, g, or t
  misc_feature (452)..(452): n is a, c, g, or t
  misc_feature (461)..(462): n is a, c, g, or t
  misc_feature (465)..(465): n is a, c, g, or t
  misc_feature (502)..(502): n is a, c, g, or t
  misc_feature (504)..(504): n is a, c, g, or t
  misc_feature (517)..(518): n is a, c, g, or t
  misc_feature (531)..(531): n is a, c, g, or t
  misc_feature (555)..(555): n is a, c, g, or t
  misc_feature (569)..(569): n is a, c, g, or t
  misc_feature (574)..(575): n is a, c, g, or t
  misc_feature (577)..(577): n is a, c, g, or t
  misc_feature (587)..(587): n is a, c, g, or t
  misc_feature (593)..(593): n is a, c, g, or t
  misc_feature (595)..(595): n is a, c, g, or t
  misc_feature (718)..(718): n is a, c, g, or t
ctgtcatgcaccgtggtggagcgctagtacacaggcaatgccagcgcactattgatgctgactgagcaagacaagatggaggatgtgcaagccaagctgctcccagagaccctgtagcgggggagagactctatggagttcagagagatagnnganntcnacnngccaaagtnntncatctcgagggactataaccngaacgacatactnctccagctgggcattgaggaagccttcaccagcaaggctgacctgtcagggatcacaggggccaggaacctagcagtctcccaggtggtccataaggctgtgcttgatgtatttgaggagggcacagaagcatctgctgccacagcagtcataatcaccctcctttctgcattagtggagacanggaccattgngcgtntcaacaggcccttcctgangatcattgtncctacagacacncngaacatctnnttnatgagcaaagtcaccaatccaagcaagcctagagctngncatcaagcagtgnngctctcagtaggnacttggaatgcgctggatgcctgngtctctgtgcacanactgnncnctgtgcaccnagtggncntggatgtgtggcgctgactgcttatccttgtaaggtgacagagattgcctgtgtagttctcacatgcacagtcgcacatggactcttcagtctgcagtgtcctgcgcctcctgactagaatanattatctagatggactacacaaccggatgtcaattgatcactcgagactagatctctatctgtgttctctatcgcactatgtcgatc

SEQ ID NO: 716420 - DNA, 285 bp, Homo sapiens
  misc_feature (19)..(19): n is a, c, g, or t
  misc_feature (46)..(46): n is a, c, g, or t
gttttatagacaccccccnctcattatgtgatgggtttgcatcctngataaacccattcataagttgaaaatatgatcataagttgaaaatatgatcataagtcaaaaatgtatttaatatacctaacctaccaaacatcatagcttagcctagcctgccttaaacatgctcagaacacttacattagcctacagtgggcaaaactatccaacacaaaatctatattgtaataaagttataaagaattttgaataaaaattcaatatttgaagtacagttaaaaa

SEQ ID NO: 716421 - DNA, 595 bp, Homo sapiens
tgtgctgcctcccgcccgagtactactgtatcttccaaagctgagagttcaaggatataaggctccatgtcactatactactacatatagtatgtctggaaattcctgaggtgaggtggagtcagcaaccaactctccagtgcgagggttcagagactgggactaatgattctcttatactaaaacactcccttaagacgcactactttagctcattggagatgcaggctcagaccgttggagcatgagctctgtgtgtaccgagtaactggggtgatgtttgacttgtcacagcatgggctacacagcagcgtgtcaacaagagtcaatatggtcaccgaggactgaacctctggctagaggacatattcacagagaaacatagagcgtgtaacatatatgataaggcttctgggacttgaaatcaaatgtggggaatggtgcccttggaggcaagctcccatgtgttagatgtttaaaggaccctatatgtggattcctttctttaaactataggtaattaaggcagtgaaagtaaattgcttctagacactgaaggcaatctcctttgtccatttaactggaaccagaatgc

SEQ ID NO: 716422 - DNA, 567 bp, Homo sapiens
  misc_feature (29)..(29): n is a, c, g, or t
  misc_feature (42)..(42): n is a, c, g, or t
  misc_feature (59)..(59): n is a, c, g, or t
  misc_feature (97)..(97): n is a, c, g, or t
  misc_feature (100)..(100): n is a, c, g, or t
  misc_feature (104)..(104): n is a, c, g, or t
  misc_feature (303)..(303): n is a, c, g, or t
  misc_feature (316)..(316): n is a, c, g, or t
ccccccaatgggggcaagtggtcattttngaccgggtcatcncaaccaggaagaaccgnaccagaaccactccggccgatttgtttgcactgtaccnggntacnaatacttcaccttccaggtgctgtcccagtgggaaatttgcctgtccatcgtctcctcctcaaggggccaggtccgacgctccctggggttttgttacaccaccaacaaagggcttttccaggtggtgtcagggggcatggtgcttcaactgcaacagggtgaccaggtttgggtttaaaaaaacccccaaaagggtcncatttaccagggntttgaggccgacagggtttttaacgggttcctcattttcccatttgcctgagccagggaaggaccccctcccccccccccctttttgggttccatgctccgcctgtaaaatgggggggctattgcttcagctgcttaagggagggggctggcttttaaagccccaggactgggtgccccgtgacacatgctttaaaaagctcgttttttagacctcttcctggaataaacatctgggtttgggtttgctga

SEQ ID NO: 716423 - DNA, 762 bp, Homo sapiens
tgtgctgcctcccgcccgagtactactgtatcttccaaagctgagagttcaaggatataaggctccatgtcactatactactacatatagtatgtctggaaattcctgaggtgaggtggagtcagcaaccaactctccagtgcgagggttcagagactgggactaatgattctcttatactaaaacactcccttaagacgcactactttagctcattggagatgcaggctcagaccgttggagcatgagctctgtgtgtaccgagtaactggggtgatgtttgacttgtcacagcatgggctacacagcagcgtgtcaacaagagtcaatatggtcaccgaggactgaacctctggctagaggacatattcacagagaaacatagagcgtgtaacatatatgataaggcttctgggacttgaaatcaaatgtggggaatggtgcccttggaggcaagctcccatgtgttagatgtttaaaggaccctatatgtggattcctttctttaaactataggtaattaaggatggatttcccaaggctaggtgtggtggctcacagctgtaatcccagcactttcagaggctaaggtgggaagattgcttaaccccaggagttcgagaccagcctgggcaacatagcaaaactccatctctacaaaagcttaaaaaaattagctggacatggtggtgagcacctgtagtcacagctacttggcgctgagcaggaggattgcatgagccaaggagttgagcttcatgg

SEQ ID NO: 716424 - DNA, 858 bp, Homo sapiens
cccgccgccgcgcgccgcatcatgagggaaatcgtgcacatgcagtgccggggcagtgcggcaaccaaatcggcgccaagttttgggaggtgatcagacgatgagacacggcaatcgaccccacgggacacctaccacggggacagcgacctgcagctggaacgcatcaaacgatgtactacaatgagtgccaccggaggcaagtacgtgccccgggccgtgacctcgtggatctggagacccggacgaccatggactccgttagcgctcggggcccttacgggcagatcttccggccggacaacttcgtttatcggtcagagtggtgcatgggaacaactgggccaaggggcactaacacagaaggcgcggagcttgcatggactcggatgcatggatgtaggtgagaaaggaggctgagagctgtgacctgcctgacagtggttaccagctgacccaactaccctggggatggaggggactggatacaggggatggaataccctcctacataccagcaaggataccgggagtgaggtacacacagacgaggatcaaagcagcacgtacagggtgggtcgcctacgccccaaagatgtcagaacacaaggggaggaagccctacacagacaacgcgcctcaaaacaccagcatcggagaaaaacaacgacgagacctacggcagtgaaaagaaggacttcgcgaatgagcgaagaaccaaaagtgacaacgcccactatggtgactggaacctccggtggatgcacaagaggggaaacccaggaggccccaagagacaagaagaggagaggaggaagacgaaacgggagaacaggcgaacacgaaaaggaaaaagga

SEQ ID NO: 716425 - DNA, 201 bp, Homo sapiens
ctagaggaacccagtgcgtagggggtacccacgacacttaaaattaatagagctagtatgagtacaaacatatacctatgtctattaggctctagatcggtagtaagccacagtcctaccccctgacaccactttactatacccgtattaacaacatagattatgacttatctaggctatagtaaagccatataaggagta

SEQ ID NO: 716426 - DNA, 368 bp, Homo sapiens
  misc_feature (71)..(71): n is a, c, g, or t
atgctcaaaaggggaagagggatgactgaggggatgtcacccgggattcccctgtgttcatctctgccctngagtggccagtcgaggtttctgggctatgccaggcagtgaggtcatgccagacgctgtagactcacaacattaaatctctgctctcagctgggtctggttgccccgcatctgcgatggtcgtgcctcttgacattctgcactttcagggtcacgtacgtgttgaatctctctgtggcagtgagagtcggggtcagcgctggggctcaaggactctccaatgccccttcccaagctctagaccatctgctgtgatcccctcaggaatttctgggccactcaccccctaaaccagaatc

SEQ ID NO: 716427 - DNA, 317 bp, Homo sapiens
cgattctagatgatcaccggctatcacattatctccacaaagtacataatatatatttaaaaacctcaacacaaccgagcatcttgcaaagggcctcaggacagcaagggtttggccagtcatggaatgaggatggtgcccagagggtctaaagaaggcactatcatgggagcacgtggaccgctattgggctctcacccagctctagttcacagtctgcccatcttagtgtgaggaaagtagggcttgaggtacccttgtttacttttgcgctgggccaagtcctcatccatcgtcctgagatgataatgtgatag

SEQ ID NO: 716428 - DNA, 209 bp, Homo sapiens
gatccatgcaccatccgatcactggctgtctgcttggcaaattgggcagctggactgtagggtcttcacctcatggtccagctttctctgtgttcatgtaggcctggtgccactacccacagttgaggtgatccacctaaagcttcttgtcaggcatggtctgctgcagatgactcgccgtctctgcctcctacttttccttgcatgct

SEQ ID NO: 716429 - DNA, 275 bp, Homo sapiens
tgtgtattagagatccggtggttcctgcagagagaagcgaactagtgaaatgcaagaatagctgtctgaatctaagggcacttttatggggagcaggtggattatataaaagtatatcaaaactgcttggattacttagcagcaagggcaagtctccaaaaagcctagggaaatgaaaggaaagaaaagcaaaaagatttctctgaaatatacagcagcaagactacatgaaaaaggagttcttctggaaattgaggatctgcaatgaacccacg

SEQ ID NO: 716430 - DNA, 1330 bp, Homo sapiens
gtcctcaggatttcagagcactcacacgattgagctgggactgtagaatcagaactatgccgtctatacatgctctcggtgagggccatcctccttgcttggtgcaatagcctgtgctgactctggttcccatgatcttccgcgtggctgagcgatcgcccagggcagagtagtcttgccacaagaaagaccaggcatacatctccaccctatgatcaaggatcagaccataatcttcagtcaaaatgatcagccaccgcaaatgttgtgcattgacgctttcagccattcagagccctaatatcctaggacacgactaggccatcatcgctatagtctctaaaccatcgccactccatagatagtcgtgttctctcttcacgctcgatgtgtagccgactcgccgatagcaatgtcccgttatttgccacaattggcatatcttctcccctgggtgggatcccagagggcgcctgggtagcaacggatccaacagaatgggacataatcgcgttgtgtacgggggtcccattgcacagtttttgcatcacacccttcttacgcggcggcagaaacttttctcggtggaagggcgtcttcccaagaaagtttaccgcttatgcaacacgccgctttccgcaagtttgtgaaaaacgtacgctgttccacgtgttgaaccacctttgcagaaaacctatgatccaaggtaatctacggtacacaagttctttcccacggactttggagcaccaattccccgtgttcacaagagttgggacaccgtagctttcccccttcaagtcccagcaacgggcagacacctttgtaaggatgtcttaatgtttggagaacattagaacgaatatggtacgtagggacacgctggagatggtttcatggcgcacaacgttatgcttagcccatcattcccagctagagcgcgcgctgttcacacatttgctttcaaacactgtcttcccgctggtgcatccaacccagtatgatgcacgggtcccctatacgaagaatcccacgccacattccagcgccggcatgatatacactgcctcgcgcgtaggaacaaccggcggcgttacccgtccaacttgaggggcaagcacactctggccaggagactcactgcgctccaaagcgcggacaccgttgcgagcacagtacacatgcccatgagagctattcatcggcgttccttgtggcttgcgaaccgtttcagccagttccctcgccgctgtcaacaaacacgagtcccgacgcctgtgcaacgacagcaaccccacatatcgtggacaaagcgtccgacggggtacca

SEQ ID NO: 716431 - DNA, 511 bp, Homo sapiens
gacgtggttttgaactagtagagagctgatagcagagataggtgatggattgggataatctgatgtgtccgtcattaattttactcatgaagggggacatgggccgaggcaagataagcaaggagaagagtttcttggaccttgtggttgagtaggagaaactaaatctggtggccccagatcaactggatttattagaaaaatgcctaaagaacatccacagaatagacctgaagacaaaaatccagaggtacaagcagtctgttcaaggagcagggacaagttacaggaatgttccccaagcagcaatccaaaagagtctcaaggatccttcaaataacttcaggatgataacaccctatgcccatggtcctgatctgaaaattcttggaaatggttccatgtgattaacatggaactgcctctacttaatcattctgaatgattaaatcgtttcattttctaaatgtgttataatgtaggtattagaggaaggaggaatgatgaaaca

SEQ ID NO: 716432 - DNA, 369 bp, Homo sapiens
atgtcatagctgcttcctgaggataaaactacttcagggaaagccgtaatcttggccgtgcttattcctgcccttaaaaaaggggacagtgaagacagctagaggcctcagagagctttgggcctggaaaagaagagcaggaggagcaggaggaagaatattaagaggagccggaggaggactatgacgaggaggaggaagagtccagtgaagatcagcactggtctgacagcccgtcggatgctgacagagagctgcgtttgccgtgcccagctgagggggaagcagagctggagctgagggtgtcggaagatgaggagaagctgcccgcctcaccgaagcaccaagagagaggtccctctcaagctt

SEQ ID NO: 716433 - DNA, 396 bp, Homo sapiens
tcgcagcagaaagaccagcgaaccttacttatcaacactccctacatatgtcaccttatgcagctaacgtcaacactggttacattcagcgatatagaatgctgcatgtacctatcagtggagagccagacgccaacctggatgtacgcaagcagcactcgcttcagtagcttaagcccggttgccaacgccggacagctcccaggccagcaaggcccactcggcaggacaaggctctcggtccacaagctgcatcatccatccagcgccagcgtcgaaggcgcgcacgcgtggtccaaggcgcgccaggcgtcacgggccctactcgcgagcgccaacggcgagtccggaaacagcgcgagtccggtaagggacagcttccgctgcacatcaggc

SEQ ID NO: 716434 - DNA, 966 bp, Homo sapiens
tggcccctgtgggcatttgagtttgcgacccctgtgttaaaccaataaacatgcaaataaatgtaaaaaaaaaaaaaaaaaaaaaaaaaaaaaaaaaaaaaaaaaaaaaaaaaaaaaaaaaaaaggggcaaaaaccccctcggttttttttattttaagggttttgggaaaatggtgacacgaagcagggggggcctctactaagacgtcgaagtgtggtgcgtctccccttttttttccccccctttttaaacccccgggggttctcttttatcagaatttttttcacttcaggaaaaaaaataatccctttaccacatttttatttctctctttttggcaaaaagaactcttttttaacacaacaaacttttacgtatggcccagtatcgttggccccacatcctttggaaaaattttccccttttgtaagagcgaacccttgtgggtttcaccacctcgtggggcagggcggcacactattatattttccccctatcaatacttttatatattcttctcccgagaaagggggggctactaacaacaacatttttaacatggaacttctctgtattatatcccggccaaagggacccttttggtgcttccaaatggggaatcacttggagcaactttctgacaaaaaaatcccagttctcctcttcttctaagccttgtggttggcaggggtaccccctgttgtggcgccgctaccccatgcgccggttgtgtttgacaacgcgcgtttttggtatcaaacccccccgggggtggccatcagaaagctctgcgtctccccacagacccgtgctcgggtcatcttcccatgggcctggtcttcccgtggcccaagggagtgtgacagccctgtacatgggctcggggacacccgtttcggcgcgccctgcggtgggccccggccttgccgtaggatctcccgttcgacgctggaccctgttctga

SEQ ID NO: 716435 - DNA, 167 bp, Homo sapiens
atggagacccaaggctgagggagggaggaagggaggaagaaaggaagggagggaaggcagaagggaaggcagggcagggcaaagcaataaagcagcagcagcagcaaaaagcagtgggcagcagaagtcagggcaggggcagcagcaagtcagggcaaggcaaggca

SEQ ID NO: 716436 - DNA, 767 bp, Homo sapiens
  misc_feature (212)..(212): n is a, c, g, or t
gatacatatatataaatcgatatcgtgtactgtctgtacccggtcgtgattttctacattatgataatagtctcgtccagggtagtgtcaactcatggtgtcttgccatagtgactagatttcgtacctatattaatatagcgtcgacagtaggtactccagtatgctgtactagtgatccaattctcgcatgatcctattcgatcgtcctntgactgggtcatctataggattgggtagctataagctgtggctagtatatgaatatatagcgtacagtgacaggtgggagtgcaagatgcctttttgatgtactgatttcatttcctttgggtaaatacccagtagtgggattgctggatcatatgctagttctatttttaatattttgaagaacctccatactgtttgccttaatggggatactaatttacatttcctccaatagcatacaaaagctttttttttctccgcatccttgccaacacttaccttctgtctttttttttttttcccaaaaaagggccaaaaaaagctaatcttgggcttgaggggaagtggccatttaccgggtatgagggtgacggaggggaaatttacagtgggggaattaggagagtacacatttgcttaaggaattcgggatgttgaaccattgttttcaatataccgtggttggggccattggcgtggctctcttttgggaaaagtctaatacgaggtctttagaccatgtttttgttttgttatagtgtgagaaaagtttt

SEQ ID NO: 716437 - DNA, 389 bp, Homo sapiens
  misc_feature (355)..(355): n is a, c, g, or t
tttgagacaaggtcacccaggatagagtgcagtgatgcaatcatggctcgctgaagcctcgacctcctgggctcaagtcatcctccgatctcagccttctgtgtagctaggactacaggcctgtgccaccatgtctcgctattttttttggtattttttatagagatggcagggtctcaccatgttgtccaggctggtcttgaactcctgggctcaagtgatcctcctgcctcagcctcccaaagttctgggactacaagcatgagccactgtgcccagccaagaagtaaatatttctttcttttttaaaattatctcatggcaacagatggaaagaagtatatattttctttantctgcactttgtaggttgaaaggaaaccaaggtt

SEQ ID NO: 716438 - DNA, 445 bp, Homo sapiens
gccaaagatgctatcaaagtaggtttttctcagttctttgacctgtgttcagaaagcatctttcattttataacatggtattacatattctaaaatgatctaaaaacaaattaatatatatgtttgttttcttatttttttgctttttttaagctataattatgtttgtgcacaagctacataaactagagaaaaattactttgactgtatacatttctgtgtttagattaagtataatttgtataaaatctatacatagtatggattttaaagtggtgtgtcatgagttttttttgcttgtttgtttgtttgtttaatcaaaatcatataaccaaagtgatccttccttagtcttcatgagtaaacatagaatcaccagctggggcagccagactggccttttgaggccaccatggctttgatgtttgtggatcaaaaaaaaaa

SEQ ID NO: 716439 - DNA, 266 bp, Homo sapiens
atgtcccaaatctggggaaggaagggggcatgcagatttggaaagcccagtgaatcctgaataagaagaatccaaagtaatcaacatggagacacattataagcaaattgtcaaatgtcaaagacaaggagtaaattttaagaacagcaaggggaaagggacttctcatgtacaagaaaatctcaatagtattaatggattttgcagcaaagatctcacagtccagaagtgagtgggatcaatgtgctgaaattaagaaaaaaaaa

SEQ ID NO: 716440 - DNA, 986 bp, Homo sapiens
aagggattgaaaatacagccttgggtcacatcaggaagaagcaagttaatcaattcatgcaatttcttcatggaagccatgaatgtcttcagtggcacagatagattgaggaaaatcgtctctctcatggcaatagggacaattaatgggacatatgttgtcttgtgttcggctggggcgctcttagaccgtccaagtgtgcggagcacatgggttgtgcgtggaatccgtcttctcgtacgcctcgtatggcatatattgggacactttcgactgctgttcagtgagaatacccacaataattaagccacggtgtaacgtgcatgtaacatctaggataggttctacgactggatgaataacgtgtatgaaagctgtaggagggggccgctattatgtactcaacaccaagatcagttgcactaggtctcgtcgctagcttaaatgccttggatataggatgacgcttatattgctgagattctatagcagattgaggattagagttgccgctccctgctaaaacttttgtaggtaataggaatgtcagagtgattaacacattgatgagaatcataaggaaagatagagacactatcaatagcataaaggagagatggggggaacagaagttacagaaatttaaaaatcatcaaaagtggatcacacttattcagaaaattagaacataggtggatcggcaaggtgaatctggccctaccttcattccaggatgcggcagaggaaacagagcatggaacttatggaaagagggtcagaagacaggaataattctagtgaccacggtttaccataatgtctggcaacatgaagtccctgcaagaaggattaagaaccctgcagcagggattgaaggtcacgaagacgcgtggttaaatttattcaagaatgggtgaaacgacgtgagtcctagattcggaaggccagattctgcggcctacaacaatcacgagtcactcctctag

SEQ ID NO: 716441 - DNA, 99 bp, Homo sapiens
cactgtgtacggacagtcatgactcctaccagacactttcaataccaaggtgcaaagagtgagtgactatccatagcagcagcaaatcttgaacattct

SEQ ID NO: 716442 - DNA, 131 bp, Homo sapiens
ctcccaagaatgagaaattgagggatccgtgaagtaagaaacagtaacaaataaggtttgtagcagtgatgtatagagttagaaatatgcagttcctcatccttgggacgtggtacctgagctcgaattac

SEQ ID NO: 716443 - DNA, 2047 bp, Homo sapiens
  misc_feature (86)..(86): n is a, c, g, or t
  misc_feature (123)..(123): n is a, c, g, or t
  misc_feature (133)..(133): n is a, c, g, or t
  misc_feature (136)..(136): n is a, c, g, or t
ccctggtggggtgacacgccgtgagaaatcagtttgtgggcgagcacggctgtggctcagacccctgctccgggggtctcagcatncatttcgcagtgtgtctcctctccttaagcctggcanacactcggantcntctgcaccccgtgaggaggaggggggccagccagctctcccaggaggccgagggggcggtcggagcccttcccggaatgatcaccttctctcaggattatgtcgcaaatgagctcactcagagcttcttcaccatcactcagaagattcagaagaaagtcacaggctctcggaactccactgagctctcggagatgtttcctgtcctccccggttcccacttgctgctcaataaccctgccctggagttcatcaaatacgtgtgcaaggtgctgtccctggacaccaacatcacaaaccaggtgaataagctgaaccgagacctgcttcgcctggtggatgtcggcgagttctccgaggaggcccagttccgagacccctgccgctcctacgtgcttcctgaggtcatctgccgcagctgtaacttctgccgcgacctggacctgtgtaaagactcttccttctcagaggatggggcggtcctgcctcagtggctctgctccaactgtcaggcgccctacgactcctctgccatcgagatgacgctggtggaagttctacagaagaagctgatggccttcaccctgcaggacctgaaggaggcagacactcccaagtgtgaagagaaggaaaggaggaagagggagttgcgcagctcggccacaggaaggtcttgccgaggggcatctgagcagaggctgggggacgcgccaagctgccgtgtggtggtgcacggcgttcaggcctgcaggatggagggagtctgcctgaagtgccgcggggtgaaggagaccagcatgcctgtgtactgcagctgcgcgggagacttcgccctcaccatccacacccaggtcttcatggaacagatcggaatattccggaacattgcccagcactacggcatgtcgtacctcctggagaccctggagtggctgctgcagaagaacccacagctgggccattagccagccccgggccccgggtgcctctgcgtccgtgccaggcctcctgatgccaaggccacatccccgtgcttccagtgaccagaccactgaccaccctgactgtccaaacctgtgaccccaggccagggaacggggaggaaaccaaagaaaaccattttcagggagctcagacgtcacaggagggagcgggagcaggatgtggccctggcctcgccagagcacctgaagaagcaggccgtgagcgaggctgcgagtgccctgggcgccgtttctcacgcagtgaatgcttttccaggcctctgttgcttcctgcaccacacctggtggggtgggagcgtcctctaggtgcccctagttctttgtcctgcctcccagagggaggaaaagcccctgggggcttctggctccctgagattgggctctgagacgagacgggttcccaaggccctggtggggctggagtctcacctgtttgcatggagaaatgggctggccccacagcctcacaggagcagtttgtgggctggtttccccgggaatccagaccctaacccgtgagaatctggattttggcttgtgagccctgcttatttggagccgggtctagagggaaccctctatcagcctcaggaaaacaagacctctgtgcacctcacttttggctcactgcagcccttgtccttcacctccacacaggaccagctggaagcagaaagaagaaaggccaatttcacagggcaccaaacaagtatgaaatgtaaatcagaaatgcagacaccccagacgagagcctcacaggagggagggggccccacaggctccccaggaggctcgtgtctttggcccagagccagccttagtttgtccctgccatctactgtctgaggccatcgctgctacactttgtttttatttgtatttcatactgaagtttctaaaaaaaaaaa

SEQ ID NO: 716444 - DNA, 544 bp, Homo sapiens
  misc_feature (322)..(322): n is a, c, g, or t
gaatttgagctcgggtacccccaataacctccgtgggcgcgcgcatcaagcagcggcttgcgaacaaccacagtcttgacctgtggcaggcgcgctgggaacaagcgccgtgcttccagcacattgatcccaaccatcagccagaacagcgcgaccatcacgacggcaaaactgaagtagtggtcaaataacccactgaccagcgccgacagaattcctgccgtgctgcccagccacagggcattgtccttggtcaggcggatcgggcctttttccggcctggcttcacgccaccaacgcaccgtaacggctataaagagcngcatgccgacgatgccggtcttgtagataaagttcagccacaggttggagatccccagcaagtgtgtgcccggtaccggagggtcaaccttgaagccaatgccgaacggatacgccaccatggcctgggggaacatgcggtattcatcaaaacgaacttcggtgctggcgttgctcgacgaaaagatcgtcgccaggcgttcctgcagcggtggggaggggt

SEQ ID NO: 716445 - DNA, 1739 bp, Homo sapiens
tgtgtgtctgattgctccactcacgggccattctgccatctcgccctttctccttgggcctccccagtcccggtgacacaacactatagaaattaggtgctgtccctggacaccaacatcacaaaccaggtgaataagctgaaccgagacctgcttcgcctggtggatgtcggcgagttctccgaggaggcccagttccgagacccctgccgctcctacgtgcttcctgaggtcatctgccgcagctgtaacttctgccgcgacctggacctgtgtaaagactcttccttctcagaggatggggcggtcctgcctcagtggctctgctccaactgtcaggcgccctacgactcctctgccatcgagatgacgctggtggaagttctacagaagaagctgatggccttcaccctgcaggacctgaaggaggcagacactcccaagtgtgaagagaaggaaaggaggaagagggagttgcgcagctcggccacaggaaggtcttgccgaggggcatctgagcagaggctgggggacgcgccaagctgccgtgtggtggtgcacggcgttcaggcctgcaggatggagggagtctgcctgaagtgccgcggggtgaaggagaccagcatgcctgtgtactgcagctgcgcgggagacttcgccctcaccatccacacccaggtcttcatggaacagatcggaatattccggaacattgcccagcactacggcatgtcgtacctcctggagaccctggagtggctgctgcagaagaacccacagctgggccattagccagccccgggccccgggtgcctctgcgtccgtgccaggcctcctgatgccaaggccacatccccgtgcttccagtgaccagaccactgaccaccctgactgtccaaacctgtgaccccaggccagggaacggggaggaaaccaaagaaaaccattttcagggagctcagacgtcacaggagggagcgggagcaggatgtggccctggcctcgccagagcacctgaagaagcaggccgtgagcgaggctgcgagtgccctgggcgccgtttctcacgcagtgaatgcttttccaggcctctgttgcttcctgcaccacacctggtggggtgggagcgtcctctaggtgcccctagttctttgtcctgcctcccagagggaggaaaagcccctgggggcttctggctccctgagattgggctctgagacgagacgggttcccaaggccctggtggggctggagtctcacctgtttgcatggagaaatgggctggccccacagcctcacaggagcagtttgtgggctggtttccccgggaatccagaccctaacccgtgagaatctggattttggcttgtgagccctgcttatttggagccgggtctagagggaaccctctatcagcctcaggaaaacaagacctctgtgcacctcacttttggctcactgcagcccttgtccttcacctccacacaggaccagctggaagcagaaagaagaaaggccaatttcacagggcaccaaacaagtatgaaatgtaaatcagaaatgcagacaccccagacgagagcctcacaggagggagggggccccacaggctccccaggaggctcgtgtctttggcccagagccagccttagtttgtccctgccatctactgtctgaggccatcgctgctacactttgtttttatttgtatttcatactgaagtttctaaaaaaaaaaa

SEQ ID NO: 716446 - DNA, 169 bp, Homo sapiens
  misc_feature (90)..(90): n is a, c, g, or t
ggagccgaagactgttgtgaaactggggctgcttgaagggaagctcttttactccccattcctgtcctccggatggcccccttttccctngcgtgtattgatgtcaacctgggtaagtggctggtggactcacccctgctccccgggcgggcgcggttccccgggcggg

SEQ ID NO: 716447 - DNA, 6160 bp, Homo sapiens
ccccgccgggcgccggcgccaattggagcgcctcggggggcgggggaggggcggagcgcgcctcttgatggacggcggcatttccggctctcgcgagtctgggtgggagcgcgccaaatttctcccctgaagcagaggtggtagccaacggctccatgtctctgaggagcggcgggcggcggcgcgcggacccaggcgcggatggcgaggccagcagggatgatggcgccacttcctcagtttcggcactcaagcgcctggaacggagtcagtggacggataagatggatttgcggtttggttttgagcggctgaaggagcctggtgagaagacaggctggctcattaacatgcatcctaccgagattttagatgaagataagcgcttaggcagtgcagtggattactactttattcaagatgacggaagcagatttaaggtggctttgccctataaaccgtatttctacattgcgaccagaaagggttgtgagcgagaagtttcatcttttctctccaagaagtttcagggcaaaattgcaaaagtggagactgtccccaaagaggatctggacttgccaaatcacttggtgggtttgaagcgaaattacatcaggctgtccttccacactgtggaggatcttgtcaaagtgaggaaggagatctcccctgccgtgaagaagaacagggagcaggatcacgccagcgacgcgtacacagctctgctttccagtgttctgcagaggggcggtgtcattactgatgaagaggaaacctctaagaagatagctgaccagttggacaacattgtggacatgcgcgagtacgatgttccctaccacatccgcctctccattgacctgaagatccacgtggctcattggtacaatgtcagataccgaggaaatgcttttccggtagaaatcacccgccgagatgaccttgttgaacgacctgaccctgtggttttggcatttgacattgagacgaccaaactgcccctcaagtttcctgatgctgagacagaccagattatgatgatttcctacatgatcgatggccagggctacctcatcaccaacagggagattgtttcagaagatattgaagattttgagttcacccccaagccagaatatgaaggccccttttgtgtcttcaatgaacccgatgaggctcatctgatccaaaggtggtttgaacacgtccaggagaccaaacccaccatcatggtcacctacaacggggacttttttgactggccatttgtggaggcccgggcagcagtccacggtctgagcatgcagcaggagataggcttccagaaggacagccagggggagtacaaggcgccccagtgcatccacatggactgcctcaggtgggtgaagagggacagttaccttcctgtgggcagtcataatctcaaggcggccgccaaggccaagctaggctatgatcccgtggagctagacccggaggacatgtgccggatggccacggagcagccccagactctggccacgtattctgtgtcagatgctgtcgccacttactacctgtacatgaagtacgtccacccattcatctttgctctgtgcaccattattcccatggagcccgacgaggtgctgcggaagggctctggcactctgtgtgaggccttgctgatggtgcaggccttccacgccaacatcatcttccccaacaagcaagagcaggagttcaataagctgacggacgacggacacgtgctggactctgagacctacgtcgggggccacgtggaggccctcgagtctggggttttccgcagcgatatcccttgccggtttaggatgaatcctgccgcctttgacttcctgctgcagcgggttgagaagaccttgcgccacgcccttgaggaagaggagaaagtgcctgtggagcaagtcaccaactttgaagaggtgtgtgatgagattaagagcaagcttgcctccctgaaggacgttcccagccgcatcgagtgtccactcatctaccacctggacgtgggggccatgtaccccaacatcatcctgaccaaccgcctgcagccctctgccatggtggacgaagccacctgtgctgcctgtgacttcaataagcctggagcaaactgccagcggaagatggcctggcagtggaggggcgagttcatgccagccagtcgcagcgaataccatcggatccagcaccagctggagtcagagaagttcccccccttgttcccagaggggccagctcgggcctttcatgaactgtcccgcgaggaacaggcgaaatacgagaagagaaggctggcggattactgccggaaagcctacaagaagatccacatcaccaaggtggaagagcgtctcaccaccatctgccagcgggaaaactccttctacgtggacaccgtgcgtgccttccgggacaggcgttacgagttcaaagggctccacaaggtgtggaaaaagaagctctcggcggccgtggaggtgggcgacgcggctgaggtgaagcgctgcaagaacatggaggtgctgtatgactcgctgcagctggcccacaagtgcatcctgaactccttctatggctatgtcatgcgcaagggggctcgctggtactccatggagatggctggcatcgtctgcttcacaggggccaacatcatcacccaggcacgggagctgatcgagcagattgggaggcccttagagctggacacagatggtatatggtgcgtcctgcccaacagcttcccagaaaattttgtcttcaagacgaccaatgtgaagaagcccaaagtgaccatctcctacccaggcgccatgttgaacatcatggtcaaggaaggcttcaccaatgaccagtaccaggagctggctgagccgtcctcactcacctacgtcacccgctcagagaacagcatcttttttgaggttgatgggccctaccttgccatgattcttccagcctccaaggaagaaggcaagaaattgaagaagaggtatgctgtgttcaatgaagacggttctctggctgagctcaagggctttgaggtcaaacgccgcggggaactgcagctgattaagatcttccaatcctcggtgtttgaggccttcctcaagggcagcacgctggaagaggtgtatggctctgtagccaaggtggctgactactggctggacgtgctgtacagcaaggcagccaacatgcctgactctgagctattcgagctcatctctgagaaccgttccatgtctcggaagctggaagattacggggagcagaagtctacatccatcagcacagcaaagcgcctggccgagttcctgggagaccagatggtcaaggatgcagggctgagttgccgctacatcatctcccgcaagcccgagggctcccctgtcacggagagggccatcccacttgccattttccaagcagagcccacggtgaggaagcactttctccggaaatggctcaagagctcttcccttcaagactttgatattcgagcaattctggattgggactactacattgagcggctgggaagcgccatccagaagatcatcaccatccctgcggccctgcagcaggtaaagaacccagtgccacgtgtcaaacaccccgactggctgcacaaaaaactgctggagaagaatgatgtctacaagcagaagaagatcagtgagctcttcaccctggagggcaggagacaggtcacgatggccgaggcctcagaagacagtccgaggccaagtgctcctgacatggaggacttcggcctcgtaaagctgcctcacccagcagcccctgtcactgtgaagaggaagcgagttctttgggagagccaggaggagtcccaggacctcacgccgactgtgccctggcaggaaatcttggggcagcctcccgccctgggaaccagccaggaggaatggcttgtctggctccggttccacaagaagaagtggcagctgcaggcccggcagcgcctcgcccgcaggaagaggcagcgtctggagtcggcagagggtgtgctcaggcccggggccatccgggatggtcctgccacggggctggggagcttcttgcgaagaactgcccgcagcatcctggaccttccgtggcagattgtgcagatcagcgagaccagccaggccggcctgttcaggctgtgggcgctcgttggcagtgacttgcactgcatcaggctgagcatcccccgtgtgttctacgtgaaccagcgagtcgctaaagcggaggagggtgcttcgtatcgcaaggtaaatcgggtccttcctcgctccaacatggtctacaatctctatgagtattcagtgccagaggacatgtaccaggaacacatcaacgagatcaacgctgagctgtcagcgccagacatcgagggcgtatatgagactcaggttccgttactgttccgggccctggtgcacctgggctgtgtgtgtgtggtcaataaacagctggtgaggcacctttcaggctgggaagcagagacctttgctcttgagcacctggagatgcgctctctggcccagttcagctacctggaaccagggagtatccgccatatctacctgtaccaccacgcacaggcccacaaagcgctcttcgggatcttcatcccctcacagcgcagggcatccgtctttgtgctggacactgtgcgcagcaaccagatgcccagccttggcgccctgtactcagcagagcacggcctcctcctggagaaggtgggccctgagctcctgccaccccccaaacacaccttcgaagttcgggcagaaactgacctgaagaccatctgcagagccatccagcgattcctgctcgcctacaaggaggagcgccgggggcccacactcatcgctgttcagtccagctgggagctgaagaggctggccagtgaaattcctgtcttggaggaattcccactggtgcctatctgtgtggctgacaagatcaactatggggtcctggactggcagcgccatggagcccggcgcatgatccgtcactacctcaacctggacacctgcctgtcgcaggccttcgagatgagcaggtactttcacattcccattgggaacctaccagaggacatctccacattcggctccgacctcttctttgcccgccacctccagcgccacaaccacctgctctggctgtcccctacagcccgccctgacctgggtggaaaggaggctgatgacaactgtcttgtcatggagttcgatgaccaagccactgttgagatcaacagttcaggctgttactccacagtgtgtgtggagctggaccttcagaacctggccgtcaacaccattctccagtctcaccatgtcaacgacatggagggggccgacagcatggggatcagcttcgacgtgatccagcaggcctccctggaggacatgatcacgggtggtcaggctgccagtgccccggccagctacgatgagacagccctgtgctctaacaccttcaggtgccaccctctctgggaaggagtgttactaatagaaggctcttatccttggcccttaatttggaaagctaaggtctaagacagggtccattgggcttcccttagtcttaatggcagagccagagaccactgtgtggcgagttttccatagtctattgtctttaccactgtgggggtccggcctggtccctggcgactgttcagtgtactgcctctgacctccctgtggccagaggtacttcacacagagtctttctaaccagggccacttttcgatgtgaccaaaggtacatcacagggatctccagccagctctactgagtatgatgtgtgaggcatcagcacttaggtgtcaggagctgtcggtctgctgcagagggcgtggttgagggtcaggagccatcagtctgcggagagcatggttgagggcagctactcgcattacccaccagcggtggttcatgctgggcaatgcttgctgtgtaccaggaggtgggccgagcacttcgcattctgcctctgtccccacatcagcccagggacggggagcggttattgtctgtttttcagataaggaaactgagtcagagagcggcgacagcagagagggcggagcaggtaccgaca

SEQ ID NO: 716448 - DNA, 911 bp, Homo sapiens
taaagacatacctgagactgagaaatttaccaaataaagaggtgtactggacttacagttccacatggctggggaggcctcacaatcatggtggaaggcaagaaggagcaagtcatgtcttacatggatggcagctggcaaagagaaagcttgtacagggagactcccgttttgaaaaccatcagatcttgtgagactcattcactattacaagaacagtgcaggaaagatgcacccctgtacttcaatcacctcccagcaggttcctcccacgacatgtgggaatgtgggagttacaattcaagatgagattggttggggacacagccaaaccatatcactactcttgtgcttggggccattatgaagtaaaacaagcattatttgaatacaagaactgcaataccaccacagtagatctgataactgttggctactaagtgactaaggggcaggtgaagtatacagcgtggatgcgatggacaaaggggaagatctacctcccagctgggatggagcaggacgatgcaagatttcatcacactactcagaaaggcatgcagtttaaagctcgtaaattatttcaggaattttccatttaatattctcaggctgtggctgaccgtgagtaacaaacccaggaagcgaaactggagaacagtggatgggagacgggtgaattactgtatactcatgagggatattagtccatagttcttttttcctttaacaattttgggttggtatagttgactgattggaatcgggaatatagtcataaatgatgggagcgttctctgttctaaagatatggatggcttttttaatggtgaaatttataaacctttgtggaaaaaagaaaaggggggaaaatcagggaaagacatttgaagggtagggaaagggggaaa

SEQ ID NO: 716449 - DNA, 2081 bp, Homo sapiens
ccccgccgggcgccggcgccaattggagcgcctcggggggcgggggaggggcggagcgcgcctcttgatggacggcggcatttccggctctcgcgagtctgggtgggagcgcgccaaatttctcccctgaagcagaggtggtagccaacggctccatgtctctgaggagcggcgggcggcggcgcgcggacccaggcgcggatggcgaggccagcagggatgatggcgccacttcctcagtttcggcactcaagcgcctggaacggagtcagtggacggataagatggatttgcggtttggttttgagcggctgaaggagcctggtgagaagacaggctggctcattaacatgcatcctaccgagattttagatgaagataagcgcttaggcagtgcagtggattactactttattcaagatgacggaagcagatttaaggtggctttgccctataaaccgtatttctacattgcgaccagaaagggttgtgagcgagaagtttcatcttttctctccaagaagtttcagggcaaaattgcaaaagtggagactgtccccaaagaggatctggacttgccaaatcacttggtgggtttgaagcgaaattacatcaggctgtccttccacactgtggaggatcttgtcaaagtgaggaaggagatctcccctgccgtgaagaagaacagggagcaggatcacgccagcgacgcgtacacagctctgctttccagtgttctgcagaggggcggtgtcattactgatgaagaggaaacctctaagaagatagctgaccagttggacaacattgtggacatgcgcgagtacgatgttccctaccacatccgcctctccattgacctgaagatccacgtggctcattggtacaatgtcagataccgaggaaatgcttttccggtagaaatcacccgccgagatgaccttgttgaacgacctgaccctgtggttttggcatttgacattgagacgaccaaactgcccctcaagtttcctgatgctgagacagaccagattatgatgatttcctacatgatcgatggccagggctacctcatcaccaacagggagattgtttcagaagatattgaagattttgagttcacccccaagccagaatatgaaggccccttttgtgtcttcaatgaacccgatgaggctcatctgatccaaaggtggtttgaacacgtccaggagaccaaacccaccatcatggtcacctacaacggggacttttttgactggccatttgtggaggcccgggcagcagtccacggtctgagcatgcagcaggagataggcttccagaaggacagccagggggagtacaaggcgccccagtgcatccacatggactgcctcaggtgggtgaagagggacagttaccttcctgtgggcagtcataatctcaaggcggccgccaaggccaagctaggctatgatcccgtggagctagacccggaggacatgtgccggatggccacggagcagccccagactctggccacgtattctgtgtcagatgctgtcgccacttactacctgtacatgaagtacgtccacccattcatctttgctctgtgcaccattattcccatggagcccgacgaggtgctgcggaagggctctggcactctgtgtgaggccttgctgatggtgcaggccttccacgccaacatcatcttccccaacaagcaagagcaggagttcaataagctgacggacgacggacacgtgctggactctgagacctacgtcgggggccacgtggaggccctcgagtctggggttttccgcagcgatatcccttgccggtttaggatgaatcctgccgcctttgacttcctgctgcagcgggttgagaagaccttgcgccacgcccttgaggaagaggagaaagtgcctgtggagcaagtcaccaactttgaagaggtgtgtgatgagattaagagcaagcttgcctccctgaaggacgttccaatcccattggggggcccctttttataccttggagacggggggcatctagccccacaacttccttgttaaccaccggatggcatt

SEQ ID NO: 716450 - DNA, 122 bp, Homo sapiens
aagtcaattcttataccagctcctcatgattctgcttagggtcccaacagacacagagggccatggggccctctccatttctccacatcagcagaagtccaggttcccatgcagactttctg

SEQ ID NO: 716451 - DNA, 2138 bp, Homo sapiens
  misc_feature (1949)..(1949): n is a, c, g, or t
  misc_feature (2071)..(2071): n is a, c, g, or t
  misc_feature (2077)..(2077): n is a, c, g, or t
ccccgccgggcgccggcgccaattggagcgcctcggggggcgggggaggggcggagcgcgcctcttgatggacggcggcatttccggctctcgcgagtctgggtgggagcgcgccaaatttctcccctgaagcagaggtggtagccaacggctccatgtctctgaggagcggcgggcggcggcgcgcggacccaggcgcggatggcgaggccagcagggatgatggcgccacttcctcagtttcggcactcaagcgcctggaacggagtcagtggacggataagatggatttgcggtttggttttgagcggctgaaggagcctggtgagaagacaggctggctcattaacatgcatcctaccgagattttagatgaagataagcgcttaggcagtgcagtggattactactttattcaagatgacggaagcagatttaaggtggctttgccctataaaccgtatttctacattgcgaccagaaagggttgtgagcgagaagtttcatcttttctctccaagaagtttcagggcaaaattgcaaaagtggagactgtccccaaagaggatctggacttgccaaatcacttggtgggtttgaagcgaaattacatcaggctgtccttccacactgtggaggatcttgtcaaagtgaggaaggagatctcccctgccgtgaagaagaacagggagcaggatcacgccagcgacgcgtacacagctctgctttccagtgttctgcagaggggcggtgtcattactgatgaagaggaaacctctaagaagatagctgaccagttggacaacattgtggacatgcgcgagtacgatgttccctaccacatccgcctctccattgacctgaagatccacgtggctcattggtacaatgtcagataccgaggaaatgcttttccggtagaaatcacccgccgagatgaccttgttgaacgacctgaccctgtggttttggcatttgacattgagacgaccaaactgcccctcaagtttcctgatgctgagacagaccagattatgatgatttcctacatgatcgatggccagggctacctcatcaccaacagggagattgtttcagaagatattgaagattttgagttcacccccaagccagaatatgaaggccccttttgtgtcttcaatgaacccgatgaggctcatctgatccaaaggtggtttgaacacgtccaggagaccaaacccaccatcatggtcacctacaacggggacttttttgactggccatttgtggaggcccgggcagcagtccacggtctgagcatgcagcaggagataggcttccagaaggacagccagggggagtacaaggcgccccagtgcatccacatggactgcctcaggtgggtgaagagggacagttaccttcctgtgggcagtcataatctcaaggcggccgccaaggccaagctaggctatgatcccgtggagctagacccggaggacatgtgccggatggccacggagcagccccagactctggccacgtattctgtgtcagatgctgtcgccacttactacctgtacatgaagtacgtccacccattcatctttgctctgtgcaccattattcccatggagcccgacgaggtgctgcggaagggctctggcactctgtgtgaggccttgctgatggtgcaggccttccacgccaacatcatcttccccaacaagcaagagcaggagttcaataagctgacggacgacggacacgtgctggactctgagacctacgtcgggggccacgtggaggccctcgagtctggggttttccgcagcgatatcccttgccggtttaggatggtgtgcttcttccctgggattcagattcttcccactcttgtgctgtggtaggacccagaagctgcaggggctgtaataaagccccttctccccatcctgtcccacggnccctcaccgggtgtggcttctctggcccagcaccccccgggggcttctttagggcagtgcactgcagattgtgcacatgagtccttctggagctttctcgggcacaacctgccacgtgccgncacagngtcaaacctgaggcaggctagtgtgggtgtgtttcccctctgatgccacatcgaaggtacc

SEQ ID NO: 716452 - DNA, 214 bp, Homo sapiens
ttactgatcatatggtctgggtgctcatagaatggttcattcaatcaggcatcggttggtccaaccagttttacattaaaaaaaaacggggatataaaagtggatatttaattaatggtgggggatgacgtggaggatattctctagtactggatccacaagagaaatctctcaggagtcagtctcagtatggctcagggcggggtacggagct

SEQ ID NO: 716453 - DNA, 1097 bp, Homo sapiens
ccccgccgggcgccggcgccaattggagcgcctcggggggcgggggaggggcggagcgcgcctcttgatggacggcggcatttccggctctcgcgagtctgggtgggagcgcgccaaatttctcccctgaagcagaggtggtagccaacggctccatgtctctgaggagcggcgggcggcggcgcgcggacccaggcgcggatggcgaggccagcagggatgatggcgccacttcctcagtttcggcactcaagcgcctggaacggagtcagtggacggataagatggatttgcggtttggttttgagcggctgaaggagcctggtgagaagacaggctggctcattaacatgcatcctaccgagattttagatgaagataagcgcttaggcagtgcagtggattactactttattcaagatgacggaagcagatttaaggtggctttgccctataaaccgtatttctacattgcgaccagaaagggttgtgagcgagaagtttcatcttttctctccaagaagtttcagggcaaaattgcaaaagtggagactgtccccaaagaggatctggacttgccaaatcacttggtgggtttgaagcgaaattacatcaggctgtccttccacactgtggaggatcttgtcaaagtgaggaaggagatctcccctgccgtgaagaagaacagggagcaggatcacgccagcgacgcgtacacagctctgctttccagtgttctgcagaggggcggtgtcattactgatgaagaggaaacctctaagaagatagctgaccagttggacaacattgtggacatgcgcgagtacgatgttccctaccacatccgcctctccattgacctgaagatccacgtggctcattggtacaatgtcagataccgaggaaatgcttttccggtagaaatcacccgccgagatgaccttgttgaacgacctgtaagttttgcttgtgttaccttcatcctaaaatttccagttttctggagagaatattcttcagtgctggagagtgaatctgactcaaagatatgtttgctgcttttcccccaaatactttattaaaggaaatatggagtt

SEQ ID NO: 716454 - DNA, 365 bp, Homo sapiens
attcgcggccgcgtcgacctggggacagtggctcatgcttataatcttaccgctttgggaggctgaggtgggtggatctcttgagcccaggagttcgagaccagcctgcgcaacatggtgaaacctcatctctgcaaaaagatgcaaaaatcagctgggcatggtggcttgtaccttggtccccgctgcttgggaggctgaggtgagaggatcatctcatcccaggagatcagggctgcagtgagctgtgatcatgccactgtactccatcctgagctacagagtgagaccctgcctcaaaataattagattagtttataatggttgacgcgggccgcgaatttaatagtagttagtctgccccg

SEQ ID NO: 716455 - DNA, 426 bp, Homo sapiens
ggtggacctgatatagatgagttatgtttctttttactatcataaaaaaacagctcgtcccccctagaagggggcccaaaactttaggggggaaagcaaatatacctttccctaaacgctcaggtaaaggcccagggttggccacttttctttttaagaatttaaaggtaaatttttaaaactagattccccaaaacccaattttccaaggtaatatgccttaaattacttacccgggggggtgcctaaccttgggaaccacctaaaaaatattggattgcccactttaaaggggataaatttgggccgggcgccggggcccacccccggaatcccgggtatttggggggactggaacaggaaaatcccttcaacccgggaggggggggttgcaagaagtcaaaaaggccccactgggccccagcc

SEQ ID NO: 716456 - DNA, 1706 bp, Homo sapiens
ttcaccgtctgttgtgtgggaggcatgctaggtttgttgctggtcgcgccacaggagtggtgttcgtctcgcaggcttctcgtgttgggtgggctcacatgccgctcttggtagaggagtatgtgggttgtcggggtgttcagccgcgcagagtggcgccttgtttattgatggtatgaagggaggccgcttcgtttttcgcagggggcgttcacgcccgttgtttttggtgcgtccgcccctcttgtcggccgcccacgttgtgttgggaagaggcgcccaccatctcttcttcggggggggtttcaccatctatatggtgtagctttggctcccccacgcgagtggtccgtgctgatagcaccgattttgtggcgccgcgctatcatttggtgtagatataatataagcgccgcggctgttgtatccacccgctgcattttgtggttggaagaagcgccccgccccggggggtgcgacgggtaggcgccgactttgtgggctgcttatccccccccctgttggccctttggggggcacgttgttgtgcccccctctttgtaggcggcgacacgtattttttttgatgaacaccacagcggggtgctgcaacagtgtggcgccgtcttttggggggcgtcagtacgtctgtaggcggcgcctgttgttgatagtttcggggccgtcagccactggggggcagcaagagaggttgtgtggttacacataattctagtggcgcacaacagttgatggtgcccccctcttcgtggtagttggtgagtaccaccaccgagccgcccgaccttttggtggtgttaattatgccgcggcagaacagctccccccctcttcggagtatgagtggtttttttaatcaccgcggcgggggcggcagcaaccgcgggataatcattttgttgttgtcagccagaaagatgttggtcggcggccccccacccccggcggggggcgtatttataaaccacatctcctctccgcatctgttatacatattttttttgttgtcggcgccttatgaggcagcacaaagctttcacacagatcttttgcgcgtagtacgcccgcagcgtcttttcaacacacgcgttgtggcgcaccttatcatatattagatcctcgtctcttcttctctcacaagggggagcttttcacaaaacttttatatctctcgcaccgctatatatatagcctctttttgaagagagaggactcttttttgtccacagcactctttcgcgcattaaccctctcgcctcttctatacaccccccccctctctgttatacaccccctctctcgggagagaaaactctttgttctttgtgtgttatgtggaacacacacacgtgtttttctctctgagtgcacacatattatcacacttcttctctcatacttacacacgcgagtactctctcacacactcttattattgtcacacacgccccttataaactctccctctctacacataaattttaccacaccacacacacaccaatggggcgtccacatccacaccccaccaccattgacacacacacattataacaccctctattctcacaccggaggaaaacacacccctctatggttctaaacacacactttctcccccattttctcctctccttatctccctcttacccccgacacatctcatttcccggtttttcttttta

SEQ ID NO: 716457 - DNA, 546 bp, Homo sapiens
gcggtattctagaggatcccatatttctagcagaacaagattcaatagtgtgccatagtgcaatctttatcagcaagagacattgaaattaccagaaaataaatcatagtaatcatactctgtcacttaatctcagatttaattctcaagaaaagccatgcaaaagaagctaacacaagcccgcaaggcttgctatctgagtctgtttgggtgacattctagatgtggctccggaatcatgcagggcgaggaaactagatgtcgcgggagcccggcgctctgtatccagggagaggactgacagcaggggctgtgagtgaattcaggatggagaatgttctccgtcttcacggactaggattctgtgggctgaagaagcacatccgaggtagagaaccaaggaccagagagaaaacctaactggtcaaggtcacgtaaaattcaccaggaaacactatatattctaactgaataatactagatctgggtcaaatagaacttcaagagatttggctacacaacagcattaaaacttaggtcctacta

SEQ ID NO: 716458 - DNA, 1370 bp, Homo sapiens
  misc_feature (166)..(166): n is a, c, g, or t
  misc_feature (189)..(189): n is a, c, g, or t
  misc_feature (232)..(232): n is a, c, g, or t
aaaccggatcacatatctacttgatttaaacgatgttatgcatggagctgttacgttatctatcactcttgaaatccataattccatgtgcgtaacgtgtttggagtgatagtgtaacgaatatcttagtcacgagcatgtccgctaaatgagtaggaggatcatntgtcaggtcggggaccacatgantttattgtttgacatcattggtatcagacactggttgtaactncttggctaggtgagaagtaatctgtagagcgttggaagcacccatcttctatctgatgacttgaatgtttcagcgcaggagcgttgagagcactggctgctttacatgtctaggctactgctgtctgtggtggtagctttagggtccaaaggtaccttcgtcgtttacagaaacataggttaatagattagggaccataggttagttattcttaataaatgcaacttaagacttttttggaaggtggcttgtagggagattatcatctttaggtttgttaccaaataaatattctctattgtatatggtaggggatggttaaaaacttatcgttgatacttccatgtgggtttattattctttgtataatggaatacggaaaagaccctttgggttggttatctaaataaggcggttatccaaattttttagtggttgaagttaggaaccacggaacttaacactgtgaggtacggaagaatttgatggattaggaatcctatttactttcttaccttagatgcgaatgaatacttaacatccggcttaataaaattcgaagtagaacacttaattgttccacggatttggtgtcacgagacaaccttgctttacaaatttaccttccaaaaggtaagggatagatttgccccccatgtattctatccagtcggcaatagaatcccaaattgattaggtcacaattccacaccgaatgacgtttttgtttcatacccatctttgtgcctaaatttaaatagggctgggttgcaagcttcacacatctgtttggccacatccctttggttaaaccttccatgtgtggagccactggtctttgcaggattactcttaagcggaattccctaataatttcctacaccctggaagagaaaaccctaattctaaccagccttcacagtttgagcgtttcaacaggcgggggcttctcaactccacctcccaaacgctcggtacaccgtaaccacgcagcgaccccatcagccctggtgctctacaagaacccggtcgcacacttccaccttggcgcaacacaagagcggcgggctcctttcaggacacctctgtgcgagaacacagtgcaccagcacaccgaaacccgtgcctcacgcacacg

SEQ ID NO: 716459 - DNA, 184 bp, Homo sapiens
ttgagtagtacgaatgcaggtattaattatgataatctagtagttaaattaagaatggttatgttcgggttgtacggtacaactgctattattcatcctgtgtgagttttttatgcgaaagctaagattttgcgtagctgggtttggtttaatccacctcaactgcctgcaatcaagcctggaa

SEQ ID NO: 716460 - DNA, 747 bp, Homo sapiens
  misc_feature (747)..(747): n is a, c, g, or t
gactcggcactctgaacgcggaacaaggtgccggccgacaccgaggtggttgtgctccccctatcttgcctatatcgacttcgtccggaggaagctagataccaagatttgctgttggactgccgggccagaggcttgctacaagggtgcctaatgggggctttaactgggggggaggattaaagcagccgtgggagagtgaatccagagagggagctgccggagacctgctggtggttagtgtagtcgtggggagcacttcaggaagaggaaccgcgcactggtcgattttgtggggaggtgaagaatgcaggcttgcttgggggcccgaaaatggtgggcctcccaattggctttttgggcaggaagggggacccctcccgggcagaatcaaattccagcacgctggccattatggggagtgaccggaaacgacctaaaagaacttcgggaccagccggtgggcacaagtgcctttgcggtcccagttccccaacgttaggaccgcaaaaccagaggtctctaggttagatgcgccccagaatacggcggaacggaccatatcaaaacaggtggcttcacatttcttacaccacgaaacgctacaaatcgtggggtacacaacggtggcacgcattggagacacagtcccacaaagtgtggctccaggctacccccttcgggagaccctatacggatggaggcccccattggtgggtagagggagacgccagcgccggagttacn

SEQ ID NO: 716461 - DNA, 111 bp, Homo sapiens
acgctgcatctgtcttctcttgcagaatgtgtgtcaggacaaggaaaagacccacaattagttatcaacaaggttttatttatttatttatgttttattattattattatt

SEQ ID NO: 716462 - DNA, 341 bp, Homo sapiens
tgaatgcaatccgtagtgtagtaatctcaaaattttcttcatgaagccgggcagtagatgttccgtgctgtttctccatctggtggtggttggtccgaatcccagggcgactgaaacatctccttcatttgagtaggggtagcagtggtggcaagaatctatatcctgaggctttactccatttaataaatccctcactgctcctcctgctattcttaattcgtgattctctttgacaaataattctgagatgagagagaataagatttttattcccaagttctttatttcaatgtgtttattttaaccacaaaagtacaaggcttttccatctagtcgga

SEQ ID NO: 716463 - DNA, 539 bp, Homo sapiens
  misc_feature (85)..(85): n is a, c, g, or t
  misc_feature (89)..(89): n is a, c, g, or t
  misc_feature (124)..(124): n is a, c, g, or t
  misc_feature (136)..(136): n is a, c, g, or t
  misc_feature (171)..(171): n is a, c, g, or t
  misc_feature (185)..(185): n is a, c, g, or t
  misc_feature (278)..(278): n is a, c, g, or t
  misc_feature (372)..(372): n is a, c, g, or t
  misc_feature (396)..(396): n is a, c, g, or t
  misc_feature (473)..(473): n is a, c, g, or t
  misc_feature (537)..(537): n is a, c, g, or t
aagacagaagtggaaaagaaaaaggacaataaaaggaagactagaaagaaatggatatgacaagaacaggaacaagacagactancagnaaaacaaaagacaaacaacagggacagacagaagnaagacctttgtnaaatgcacattgacgagtcgtccccaggacactgnagatgggaaacgantggacccggactgtgtgactttaaccccaagtctagacaagcaggaccaaagatgtctcccgcatgacgcttcagtcctcatctccctcaagncaggccccgctggtgcactgaagagccaccctgtggaaaacactacatctgcaatatcttaatcctacttcagtgaagctcttcacagtcattngattaattatgttgagttcttttngaccaaacctatttgtctttagagttgttcattgtttgtgattgcatgtttccttcttcaactgtgttcttcctggnatttagagaggagggagaggagggagagggaggggagggaagttccaagagtagctaacctgtnct

SEQ ID NO: 716464 - DNA, 1005 bp, Homo sapiens
  misc_feature (271)..(271): n is a, c, g, or t
  misc_feature (391)..(391): n is a, c, g, or t
  misc_feature (395)..(395): n is a, c, g, or t
tgcaaaagctccgactcgtgcatcaatctgaacgcgaatctagagcgactttaattaagctaagcccttactaggaccaatggtgacttaagagcccacataagcgacttagttaacgagcgtaagcaccctaatcgaactggcattcgaatcatacttcatccgcgctctgaccgcggaagacaacaggctgggcagaagctcccaggcaaggattgtgaagcgtgcttcttacgaattatgccaattcgaataatgaccacatcacccntcggagcctaggtaaagacagcagggccataatgccctgatcttgtaggactttacgagaatccgaagtggcgttgcacgtgcagggccgcagtatttagccgtgctaccccccatttgnatgntgtcggcgcggaccggtgtggaactgattgcatctgacaataggcactaatagaccattgaggtaaccatgtattagcctgatctcattcggcgtcgccattgacgcctgggagcttcccttaggaccacgaagctcgtgacatgccgtccgtttgattccggaggcgcagatggcgtgtgggcctagtcgcgaagggcagatccgttgtccctaggcgtacatccggaacaccaaacaattcgttaacaaaaccgctgtaattgccggttctaactagcgcgcgaatgccaatttgtgttacatgtatacgtgcctttacctttcccagttaacgttaaagttaacccgcaagttctacttaaacttcggggaagtggcctttcttggggcaaaaccgttgaatcctaagttttcccccctcgtgaaagtaacaacttctggggctagaacgcacccgcggaattaatttgtgggcagtttattcgccccccggcgcaattgtaaacaaccatatggattgaaagcccttttccttggaaccctccctttaaacccgtttccccatgcgtacgtacccttaaccttcccttgccttccggccaattctg

SEQ ID NO: 716465 - DNA, 692 bp, Homo sapiens
tagatagtaacagacgcaggcaaagggaatcttgacacccgatggagaaagtggagctctactccccaactcccttacccaacagctcagaaagtgcggcacaggtccttccagagacagggtgaaggcagagtccagagcaggatggctggaagtcaagttagtaagcaatccataccacagctccccttgcgcagatggtgactacatctccccgaatttgacaggaaacaggaggttagtctctgaaatgaggtaaaacagaggggtacctggcatggcccaggacagagttaactacaggttgagtaacccttatctgaaatgcttgggaccaaaagtgtattagattctgaatatatacagatttcagaatttaagcattataacttacaggttacacatccctaatcccacaatacaaagtccagaatgctctgataaacatatacttagagagtcatgtcagcgctcacaagatacagataagggagcaattaaggattaacgattagaggattaggcctactcaatctgtacatggacaccgggggaataacgacaaggatgacatttacctgtacgggcttctttcctcttctacgctcgcagaacatggaaactgattgagtccttccccggtagtgatggaaatggatcgacgatctgcccgccagaaacagagtaagtcg

SEQ ID NO: 716466 - DNA, 113 bp, Homo sapiens
tttgccgcattccttttcactttttttcaacctttccttatgcagcatgcctgtgttgggttgcacagtgcagggtcacatcaatgcacttgtatggttgcatctgtcagcat

SEQ ID NO: 716467 - DNA, 420 bp, Homo sapiens
gttgatcttcttggtagtctctacagatcccctcgcattccggggacgctgacggccctgcccacaccgtgaatcgcttggccatgccttgatctgttttcgttgttggcttcatggtttatgggtcaggattacactgtgttgcccacgctaccagtgcagtgctgccacagctcactgtgaccttcaccttctgcactcaagtaatcctcctgcctcagcttcccaagtcgcgtgtatcacaggcttcagcctgcctcacccggccatcacacctggattttcagtgtgaggtttttggtttggagacttcctaagcctgaagccaggtcggtgtgggctcgggctgcattttatgaaactgcccagcaagctgcgctccctggggccccaggatccacctaactggcctggcacctg

SEQ ID NO: 716468 - DNA, 134 bp, Homo sapiens
tggttgatactagtcacggttggctacgagtccacggttggctgaggcaggataatctgcttgaaccggggaggcggaggtttcatgtgagccgagattgtgccattgcactccagccaagctgtggactatgt

SEQ ID NO: 716469 - DNA, 633 bp, Homo sapiens
cgagcgctggctgcgccgccctgagccgctgggccggggaagcactggccgttcgctcccgggccggctccgccaggcgctcgcaggcatgcagcccgggagcaggaggctgctccccgtggcctgctgcttgagcctggcctggggctggctggggaccaagctgcctagctggatgccctctcccaccttgccccgtgggcagacgagcggctgccccgtacacccctctcttcttcctgtggctccgtcctagcgccggcctccgatgagccagaacatggagcatcaataccaacaccccagaccacaggagaacgctggagctacgttggattaaacaagcgcaagaagtgcctgggatttgggctagaggtaatagagcaagaagacgaggcgcaatgagaaacgaatttcaagagccccattgacgaactctcatcgcgccatgaatcacacatcaggagctcatatcaccgtttatcagttcatttggctaagacgatttcaccgacgccgagaaatgaacccaacaccagttccccactgcgagtttagcacaacaagaaaatccacactcaagtaatgtatgagccagtagaagtcatttagaaagagattacacatagtgga

SEQ ID NO: 716470 - DNA, 215 bp, Homo sapiens
cagcaggacccgcagtgtctccaagcattttgctctgctggagcattctcgggagcatgtccagggccagatcctcagcagtccaaccacaccacggataaaattgagatactctggtatcaactcatcacagctgtccatgatgaacacacggcggcacatagagtttgatgttgttctttttcttcttgttctcaaacaggtccaagggagcc

SEQ ID NO: 716471 - DNA, 786 bp, Homo sapiens
ttgccaagatgtgagagggagattctgcaatcatgacttctggagaggccactgcacaaggctctaacgccttcatctgtttatacacaggctcaatctgctagctctataggagattccaggataccaaataatcatcatcataataattattacatttagagacaagttgttccttttttctggtcaaaataatgagactttccagaagagctgaacattcaaatttcaaatcatttcctttagtgtcagtcctaactcctcttaatacaaacctttctttttactcccaaagcaacctcaatccaaagtatttaactaggagctgcaaataaaatttcaaactagagttgattttcctgataataattgtctgtggaaggtgaaaaaaagcactgcctagagcagaagtcagttcatgggccatttctgaggttgtggccctgagctaacctccctcctccccagaccgcagtaagcatctctgtaaagtgggcaggagtaggctatctactaaatccaccaccccttcgaccccattcttggaggtagcagggattccaactttgcaacacacacccctcctctgctgtcacaaagccactctaacttcacagcctgtaaggcaggggcagggtgccacagcctcactaccaccctcctgtggaaggtgaaagcagtccccttctgaatgtggggtgcttacagacatcaaaactccttatatcattagagggtgcaaggacaaagcccattgtgttgtctctctgcaactaaaccataatc

SEQ ID NO: 716472 - DNA, 476 bp, Homo sapiens
tagagatcctcgcgctccagatcaggtatccttaactctagcatcccaggtttggtgatacacgttagctctggcaacactgcctaggctattttctgtattctacgtgcagaggtgatttcatccgatgttggccatgctggcctataagttcttgattggaaaacccctgcctgtctcagcttcccagagtgctgggattacaggcgtgagccactgtgcccagctgagatctgatggttttaaaaagaggagctcccctgcatgagatctcactttttgcctgctaccatttatgtaagatgtgacttgctccttcttgccttccatcatgactgtgaagcttccccagccatatggaattgtaagttcaattaaacttcttttctttgtaaattacccagtctcgggtatgtctttatcggcagcatgaaaacggaccaatacagtaaattggtaccaggagtgggatgttc

SEQ ID NO: 716473 - DNA, 248 bp, Homo sapiens
  misc_feature (71)..(71): n is a, c, g, or t
  misc_feature (113)..(113): n is a, c, g, or t
  misc_feature (148)..(148): n is a, c, g, or t
  misc_feature (212)..(212): n is a, c, g, or t
  misc_feature (234)..(234): n is a, c, g, or t
aaatataaaaaacaagaaaatacatgctcattgttttagtactaaagacaataaatattttgtcatatttnctctgtccttttgctaatactttagctttcattgtttgtttnacatctttgtaatcatactgtatacatgaaagttnatagtctgaaaattctggcttaacagtcatatatatttttcagtaaagcctaacttcttaactntccttcctgggatattagatanggaacatgagttag

SEQ ID NO: 716474 - DNA, 507 bp, Homo sapiens
tggtgttaaggtttctgacaagcaattcagaattttcttgccccgccgaggcccgggatggcgatccgacttgaccgcgcaagtgccgccgcctccgaggggatggccaggggggccagggcgccatggacgttcggaacggaaaggcctggaaagtcagtaggtgagatgagcgcggtgcccccgactcaactgcagattgggagaggacgtcgctccacgtcctcatgcaccgaggagccgagccgctcgggagcctgctctggctctggccctaccctgggtgcctgctgtcgtccgacccccgcacagccacccgccggcattctgcaccagcgcccgcctctcctcacagcacgggccgggccgggcctgggctcatctcatgcgccccgcccacagcacagaaaagcttccgccgccagcacagacacgggccctcggcaagcagtggcgtcccgggactctatcgtgcgcgcccatgcctccatgcagacgagcggtcgc

SEQ ID NO: 716475 - DNA, 441 bp, Homo sapiens
ggattacagatgtgagccactgcacccagccgcactcccctcttaacagggtccctgccatctcatgggatccacagtctccccagcacactcagtgtccacctccatggcagggactgagggtcctgcagtcactgccaggcagcaggcagcacggccctcccaccaacatcaacacctcgagggccctccgttcaggctgggctgggccaggccaggccctctgacttgagtatccgcaacaagtgggtcccaccacccaagacgccgccccgtggagcccagaggtcctgggtagaggggagtggtccctgaaggtggccatcatgccttagcctactcagggactgagaggctcgggaaattcatgcagcagaggcgggaataggcatgggctccaaggaggggcaccagatgccctgaagacaccgggcccggggg

SEQ ID NO: 716476 - DNA, 273 bp, Homo sapiens
agcggggaaacaatcacttacaattttcttctttggagatggagtctggctcggttacccaggctggagtgcaagggcgcgatctcggctcagtgcaacttccacctcccggattcaagcgattcttctgcctcagcctcccgagtagctgggattacaggtatgcaccaccacgcccggctaatggtggcatttttagtagagtcgggattttacggcgtgggttagacgggtcttgaactccggacctcaagtgatggttccccgcggggt

SEQ ID NO: 716477 - DNA, 117 bp, Homo sapiens
tgtcagtgagagggcccctcaggctcccaaacctgctataatacaggactgtgagcggctcgagaggggcctcctttgctctccatccagcgggtcgccgggtctgcggccgcagga

SEQ ID NO: 716478 - DNA, 213 bp, Homo sapiens
agaaagcaacacatattttttttaaaacagagtttggctcttgtagccccaggctggagtgcaatggcacaatctcagctcgctacaacctccacctcccgggttcaagcaattctctcgcctcggcctcccgagttagcccggaactacaggggtgtggcacaatgcccagctaactgttgttatttttagtagaaacggggtttcaccatg

SEQ ID NO: 716479 - DNA, 455 bp, Homo sapiens
  misc_feature (282)..(282): n is a, c, g, or t
cactctagaggacccccctggctctgaacttagggaggtggagcttgcaggtgagccgagatcacaccacggcactccatcctgggcgacagagcgagactccgtctcaaaaagaaaaaaaagaaagtagataaatataagggccacattaatttctcacaggcccttctccctcagttaacctttttttttttggttttgggaacacagggacactttttaaagttagcaagaaaggtacatacatggagtatttatggcaaggcactctaatccgtggtnacatttattctccacagcagcttggtgaggtatagatactatggtctctatccctccacctcattggcaattgaggaaccggaagcttataaaataaggtaacatcaggcagccagaaaaggacagagccgggccaaagttcagagccaggcctaagttcagagccggggggt

SEQ ID NO: 716480 - DNA, 473 bp, Homo sapiens
caaggcgatagctccaagtgctggactacggtgtgagccacacgctggagctttgtgttctttcttctgtgatcttgcttagatcacacagataaacatgacaggacctggacttaacacagttgggtctcaatcctgttctcataaacatcactggcttcatttatctgtgtcatcctcagacctgacacatagtaggtgctcagtcagtgttcactaagtaaatgatgacccagaactctttgactgggtccaaggtgcttatcccaatacttcgccatggctacctccctcattcctcagctgactagctctctctagcctggctgctcctattttatgtcctagacatggagccatggcaatgatgtagagctaacaggtgatacggtagccatcataatttaatgagtatggggctcatgcaaccacaagacacaggagccgagagctagctgtgcccagacaacaaa

SEQ ID NO: 716481 - DNA, 183 bp, Homo sapiens
  misc_feature (3)..(3): n is a, c, g, or t
tgncaagcttgcaacaagcgaaactctgtctcaaaaaaaaaaagaaaagacagtagtttatgttcatgtcaagcacctctcatcacagtctagtttccaaggaaaaaaattcccagcgtttttctacatttcggtgctgcgttcatctagaaactcggcacatttccatggcaggagaggagt

SEQ ID NO: 716482 - DNA, 89 bp, Homo sapiens
tcaagcttctaacgatgtacggggacatgtttgattcctaaccttttgctacctgaataaagcagagtctatttcaacacaaaaaaaaa

SEQ ID NO: 716483 - DNA, 281 bp, Homo sapiens
tgagatgggagtgatgatggccaagggagatgagtgaaggaagggaggtgcagagctaaggaaagccccagaggagctgagagaggaagagagacaggagagagacttccacggagatggggaggccttaagtagggcagcagcacatgtgggagagaaaccgagagggtggtgttagggaagcgtaggaggagccccactcacttccagtacagaaattcacccacagcagaggccaggcctcaattagaggcctacacaatggggtagacgctctcaca

SEQ ID NO: 716484 - DNA, 187 bp, Homo sapiens
gggctgatgttcagacgacgtgactattactctaaaaccacaaagaccttggaacactataactattattcggcgcatgagctgggagtcctaagcacagctctaaggcttcttattcgagccgagctgggacagccagggaaacctatctagggtaaacgaacaacatttacaacggttatccggc

SEQ ID NO: 716485 - DNA, 178 bp, Homo sapiens
ataaaggattcatggccaggcgcagtgctcaagcctgtaacccaacactgtgtggcctggttttgttttgctttgttttgttttgtgtaaccccaactctttgggagctgaggccagaggatggaggcaggagttggagaccagcctgggcaacagagggagacctcgtctgtattta

SEQ ID NO: 716486 - DNA, 197 bp, Homo sapiens
cgtggcaagcacgctggtggagcaaagggttgtcctgacacgaactgagcgacagcgaagccacgccctgtgatggggttccgcccttcccttccctgactcgctgaccgatcattgaccggtgtgtgcgacgagcaaagtgctgcttgcgttctggtcaccagcgttctggggctgacacaagcggcggtgcacgg

SEQ ID NO: 716487 - DNA, 360 bp, Homo sapiens
ggcggtactttcaagtatgcaagaagtaaaatgagtggaaaagtggtatgtcaaaacacatatagaccatgctagaaataacacaagaacagggaaggtactacccagaccaagaacacgtacaatattatgcttaaatatggatggtcattacttcttccaggcaacagctcataaaataaatccatagttctcggccagctaagaagtcacaggaaacagaaactccctcaaaatcttagccggtttctggagggtaaacctgagattgcaggggcactcattctgctcggctacatttttcccggtctttcttttttataaacgaggattggcttcagaggcaaggcagacaactga

SEQ ID NO: 716488 - DNA, 896 bp, Homo sapiens
  misc_feature (175)..(175): n is a, c, g, or t
  misc_feature (276)..(276): n is a, c, g, or t
  misc_feature (289)..(289): n is a, c, g, or t
gagatgtagaaatgttcttgcagttaagggttagtttacaatcagccacattctaggtaggggcccacttcaccgtactaaccagggaagctgtccctcactgttgaattttctctaacttcaaggcccatatctgtgaaatgctggcattgcacctacctcacagaggtgcatngtgagggttaatgaaataatgtacatctggccttgaaaccaccttttattacatggggtctagaacttgacccccttgagggtgcttgttccctctccctngtggtcggtgggntggtagtttctacagttgggcagctggttaggtagagggagttgtcaagtctctgctggcccagccaaaccctgtctgacaacctcttggtgaaccttagtacctaaaaggaaatctcaccccatcccacaccctggaggatttcatctcttgtatatgatgatctggatccaccaagacttgttttatgctcagggtcaatttcttttttcttttttttttacttgtccttttccttggagacggggtctcgcttggtggcccaggtctgggatgtgggagtgggcgtagatctgggcttactgggagccttggctctccccggttcgagcagtcctggcctaagcctccggagtgagctgggaccccgggttcatggcccaccatggccggccaatttggcatgtcggctcgagatgggggtctcccagtgttgcccaggcgggtctcaaactccgggggctcaagggatccacctgtctcgactcccagagtggctggcatcccatggggtgagcaccatgtccagctgcagggggtcacttttttaacattctgcaagccttcgcttttcaccccagcttccttctctccctttttatatccc

SEQ ID NO: 716489 - DNA, 283 bp, Homo sapiens
gcgctgcgtatgccagaagacaagaactgaggtttgggaacctttgactagatttcagagaatgtatggaaatgcatgtatgtcccggcagaagtttgctacaggagtgaggcctcatggagaacctctgttaaggcaatgtggaaggggaagcccccacacagagaccccactgtggacactgcctagtagagctgtcagaagaaggccaccgtcctcccagacatcagaatgttatatcccactgacagcttgcaccatgcacctggaaaggccacagaca

SEQ ID NO: 716490 - DNA, 669 bp, Homo sapiens
  misc_feature (486)..(487): n is a, c, g, or t
ctcaaaataaataaataaataaataaataaataaataaataaaagactgaacccaggaatctgcatcttaagcagctgtcgcactgatgattatgacccccttggatattcacttgtagacatgtgtgaatgctgaggggcaggctccaagagagagggtgggtgaagctggaggacctagctcccagcaagtctctggagaagacagtgggagggattcagagctcctgagggagagtgagagtgagacttcatctcaaaaaaaaaaaaaatgtttaccagatagacgtacgaatgagaagactgggctcagctccatcacttaccagctaggtggcagtgaccaagtaaactgccggagtctcactctctcccaggctggagtgcagtgagctgagatcgaaactccatctcaaaataaataaataaataaataaataaataaataaataaaagactgaacccaggaatctgcatcttaagcanntgtcgcactgatgattatgacccccttggatattcacttgtagacatgtgtgaatgctgaggggcaggctccaagagagagggtgggtgaagctggaggacctagctcccagcaagtctctggagaagacagtgggagggattcagagctcctgagggagagtgagagtgagacttcatctc

SEQ ID NO: 716491 - DNA, 316 bp, Homo sapiens
gctcacttgaggtcaggagtttgagaccagcctgggcaacatagcaagatcgtggctctacaaaataattaattaattaaaaaaatttcaggccaggtgctgtggctcactgctgtaatcctagcactttgggaggccaaggcaggaggatcggctgagctcaggagttcaagaccagcctcggcaaaatagtaagacccgtctttgttaggttttgagcgatggtgaggttaaagaagatacacagaagaggggggctggacatcaatacaggcttatgtcagcataaacttacagagtggggccacctatccaa

SEQ ID NO: 716492 - DNA, 709 bp, Homo sapiens
tttttctattactttcccccccccctaactaagggcctattactggtcgctgttttaatctttagctcttagggcttagctattggggttccttgcggtgtccggctcccgtctcccgtggctcccccgcccgccctgctggccccaggcgccccttcgctctcatcctcgccctggtgatggatgtgctgggctgccgcgccagcctttaaacgcgaggccagggagcgaggcggtgacctggccgaagatccggccctcgcctcctccctcgggtggcgctatgggctcccggcctctcttcctcagtggcgggcgtgagaatgcagaaagcaggattcgacctcggttggccagccgccttctccgggactcagggctgcccctccccgtgcgcccaacccacccaggtccgggctggacttggagcgtacgccgtggccgtgttcaccccggcagggattgtccgaagcctggagatgagctcccattctacgcctccaactatcagccatctggtcaggccagtacactggttcctcggccgcgcccaggcggctagatccttcccccttgtaccccgcggcgtttaaaatggccctcctactgcatcgtaacattctgcacgccggcgtggggacttggggcggcccgtaaggtcttgagtggctcggcgcagcctcacggcttggtcgttcccgcgctttca

SEQ ID NO: 716493 - DNA, 184 bp, Homo sapiens
aaagagagagagggagaagaagagggagagagagagagagagagagagagagagagagagtgagcacgtgagctctggtgtctctccctcttcttatggagacaccggccctatgggaatcgggccacacccttacgccctcttttaatctgaattatctcctaaagggccctgtctccaaaca

SEQ ID NO: 716494 - DNA, 175 bp, Homo sapiens
tgactctcttctcgcacaggcccctgtatttcctctccccattttctggccctgtgttgctcctgaggttcagtcgctgggatgtaccctctttccttcactgtgcctgttgcctatatgacccggcaggcgacatcccccaagccgattcctttgcatcgggttacttgtgggc

SEQ ID NO: 716495 - DNA, 100 bp, Homo sapiens
gccaagatgcgctagcagttgatggagaaatttaagaagaaagttcatcagctgctatgaccgtggtcagtttccatcaggtggattataccttatgacc

SEQ ID NO: 716496 - DNA, 176 bp, Homo sapiens
aagggagccggtccttgttgcacctgtgccgtccccaaagctacaggccccatttggtcctaagtccctgctgcccttccccttccccccctgtccatttttcctcccattcaggatgcccccggctggagctgcctttttcatcccctttccaataaaaagttccttttgctcca

SEQ ID NO: 716497 - DNA, 404 bp, Homo sapiens
acacaacatgtactggaacaagcagatatccacatgcaacaagaatgaagttggatccctgcctcacaccaaaattcactaacaattgatccaagacctacatatcaagacctaaaactatacaattcttacaagaagaactcaggcttaaaatctttgtgcactttcgattcaggtcatggtttcttcacactcatcaactgaaacaaacaaacacgcaaaaccacatcagcattcactgccatccaaaattcaacacacttctgtacttcaacggaccatccccaagcacagtgcaagcagcacaacctataggctgggagaacgtttaagtaagtagaaatgataaacatatattttagtaaatgtttgtaaatgtctctatccaatatatttttgtactt

SEQ ID NO: 716498 - DNA, 241 bp, Homo sapiens
taaaatacgtaagacatactgctaacgggggacactagtgagtaaccaagaaaagagtcaactactaaggaaaatagtatatcaacttaaacatacttggtatgtcaaacatacatattgcataacaactaaatatgtatctataagaatcaatagtgatgactatagatacaaattttgcaagaatataacattaacaggctcatgtgatcaggaatggtgtggggccctgacgataaaa

SEQ ID NO: 716499 - DNA, 698 bp, Homo sapiens
aagattccaagaaaagttgttttttctagtggctactttgccttaaagaggctctataagttcattcacacagctggcttctctggttttaagattctggagaggatgataatcctagtaacaccgcagtgcttaaaaaaaaaaaaaaaactaccatcaccagaaaattccaccggtctgttctccttttatctatgtgctgatgtgatgtacttcccaactaagtcaactttacctctagtgagagctttaggtgacctctttccatatggtacgtgtgatagaacggacccttcacttgatagatattctatctccagaaaggcgctatactacacatcacttggttgttcctctggaatgagaatgacaaactctcctaggttgcctttaatctagtggaaacttgagcaaagattcaattgtcttcctataaagaaactgacattctggcaacaattgatgagcctattgatcatacagcgtataggatagtgaatggcaacagtttaattatgtgatatttgtttctaatggggcaagtacctatttattctagccgtctaatatttgattgacgccctcgacgcgttatatctccatctcagagttagacgttcatgtcctttttggatgctctcatttggataatatcttttttaaggagggaacacattcattgaactcctttgtgctgc

SEQ ID NO: 716500 - DNA, 670 bp, Homo sapiens
ctgtacacgtatcctgaaaacatggagtggcttcaatggctctcatcgctgctcagtacatgcggggctcagtgtcctgcgtgctctccgcaccaccccacttccattttggccaaaccaacctgcacccctgaatttctccgcaaatttcctgcctggcaaggtcccagcattatgagggtgatgatggattctgtgttgttttgagagcaactgccattgcctactatgtgatgcaatgatgtgagcttgctgtgtgtgaagtactccagaggcagcagcccagtgtggtgcagttgggtgagcttatgctgattcctgatataagttgcccccagccagtacactgggtgttcccaaacttgggcatcatgcaccacaacaaacagggccacttgagaatgcaaaagtgaggaagtgacggctgaattctgtgtgtgctgcttggatgcttacttgaatgacgaggacttttctggtgggcgaacgagtgacattggctgacatcacagtatgtctgacacacctgtatgtggcatctataagcaggttctagagcctacatataccggacaggcctttcccaataccaacgcgctggtatctcgacctgcattaccaagacccagttcagggctgacttggcgggaagtgaactgtgtgagaagat

SEQ ID NO: 716501 - DNA, 586 bp, Homo sapiens
tcgatacagaatagctcctcttgcaagaaactagccttcggccccaaagcagagatcaaagggctagctcatactgcctagccgacagcttgtaggccactctacaatggctgcaaatgcctcctcagcatagcgataagtgacgaagccgtagttgtccccttggacacggaagtggatggtgcactcctcaatctctccaaaaacggagaacctctagtttcagctctgatcgagtcatgcggccaggtatctttccaatgaagaccacccttctttcttctatagcacgctccttttgtagcactctttgcctttggtaatggtcatgtgaacgataagagctgtacctgacaaaagagggtgtcatcagccccccaaacataagacaattcaagactcaactcttaggcacctgcatcccaggtgcatggggctccctgaacacatgctcaccgccgactcctgtcacttctccggcggggggatggggatcgtgagcggcttcgagaaactggatgatgaggatgaggaagacgaagaggaagatgatgacgaagaagagggagagcatcttcgagaacgt

SEQ ID NO: 716502 - DNA, 281 bp, Homo sapiens
ggggggggggcccccccccgttgttttttccccccttttggggggggcgggggttcccccccccccccttttttccctgggtcggggggggggcccctcttttcccccccccccccctccccccctttccccctttttgggggccccccccccccttttttccccccccccgggggggggggggggggggttttttggccttttttttgcccccccggtggggccggttggggtttttgggtgggggttttttggggttttgttataaaaggaggagggga

SEQ ID NO: 716503 - DNA, 352 bp, Homo sapiens
tcgcggtcgatccggtgcaggacgctgagccagccggacgtctcgtcaagcgcagcagccgcctcaccgactcggtggccgccccgaacacgtattcgatctgcccgttgacccccacgtccaagtcgctgcgccattgcaggatggggtccccggggcgtttctcaccaatcgcctctacacgttttcgaagcggggcttttcttcacgtcgtgatgagacccgtagatgctcgagacgagggtcgcgcgtgcgatcgcagggcagtcgtaggagtcctgtcgcgtccagcgcccccttcacgatcagctcgctgcttctcgccgtccggggtgtccgccacctgcagctc

SEQ ID NO: 716504 - DNA, 490 bp, Homo sapiens
  misc_feature (21)..(21): n is a, c, g, or t
  misc_feature (165)..(165): n is a, c, g, or t
  misc_feature (171)..(171): n is a, c, g, or t
  misc_feature (173)..(173): n is a, c, g, or t
  misc_feature (193)..(193): n is a, c, g, or t
  misc_feature (240)..(240): n is a, c, g, or t
  misc_feature (246)..(246): n is a, c, g, or t
  misc_feature (292)..(293): n is a, c, g, or t
  misc_feature (301)..(301): n is a, c, g, or t
  misc_feature (321)..(321): n is a, c, g, or t
  misc_feature (327)..(327): n is a, c, g, or t
  misc_feature (337)..(337): n is a, c, g, or t
  misc_feature (351)..(351): n is a, c, g, or t
  misc_feature (370)..(370): n is a, c, g, or t
  misc_feature (394)..(394): n is a, c, g, or t
  misc_feature (455)..(455): n is a, c, g, or t
ggcatctgagtcatgcatggngtggtacatacaaaccttggcccagcccaaaggagcagtcaagggcctggaagaaagatggtttgctctttccccctcctcctctctctttcctcacgggctttaaatccgtggcaacataaatttttcaaccatggaaatgtncaagcntncaggccgtggcaggtcagtnttggttgttccagtcaacatcaaaaagtagtttcaagaaaaaaaaanagcccnagcttcccacaccatcaccccagtgttggctggttccaccacctgnnctctcacnctcacacaagcaatgcagcnggtgcntgctgggcantggtgttagttttngaaggtgaccaccacaacntttccgtgccctgtgcaacagtcnaacaaacatcaacaccccttcgcgcgcgtccaccctgctcttgctgccaagcaactgctgnaaatgaatgaaaactgggcccaaaaatgtcttgtg

SEQ ID NO: 716505 - DNA, 106 bp, Homo sapiens
cgtactgtggtgttaccgtggtgttacctatgaagcaaaagtccatttatttggcagagaagttaatcagacagcaaaacctctagtgaagaaacaccacagtacg

SEQ ID NO: 716506 - DNA, 410 bp, Homo sapiens
tccgcactgcacagggagacgacaggaaaaagtcagtagggtatcttacatctatctagatcgatgtgttcgttcgtgactcttgtgttttttacttctgtgccgcatgggtacttgtgtcgctgtgtcttctctgtaattccttatccttgttcttgttctagtgtctctttctgtcgtgtcgttagtcttctcttctcttgtttttcccgttgcctatttctgcttattgtctatgtactttgctctacattgcttagtgtcgtacgtgcagttgttcgctgtttccgtgcgtgctcctctgtgcctatcgtgttctttcccgtttgttgctgtgtgttttccctggttgtgtgctgcggttgcgcttgctagtcctttcggtgtgtttctcagttgctgtatctgct

SEQ ID NO: 716507 - DNA, 440 bp, Homo sapiens
cgaatagatactgtttagctcagccagcgacaatgtgcacaggccgccaacacagctcgtccccgtgccgcgaacttcagcgttccctgtcccagatgggccaatggaacgacacggttcacaggctcgccctgctgttggtattgcccttcataggtatagaagaaaaacaacttgtcctttttgatcggaccgccaatcgtccgccgtaaacatcacgtgcgagactcgggcgtggaataccagccaggttgttgaagaaagtgttcgcagatccgaatgtcgggcgatagaaataatacagagatccgcggagttcgtttgtaccgctcttagtaaccagagagatctgggctcctgatgagcgtccctggtttgcatttgcaccgagagtcgtgatgcgaaactcttctacagattcggtggttgctcttaaagct

SEQ ID NO: 716508 - DNA, 819 bp, Homo sapiens
ggtcgagatgcgggtcatggcgcgccgaagccctcctcctgctgctctcgggaggcctggtgctgaccgagactgggcctgctcccactccatgaggtatttcgacaccgccgtgtcccggtccggccgcggaggaagccccggttcatctcagtgggctacgtggacgacacgcagcttcgtgcggttcgagcagcgacgtccgcgagctccgaaaggggagccgcgggcgccgttgggtggagcagggaggggccggagctattgggaccgggagacacagaacttacaagacgccgaggcacaggctgaccgagtgagcctgtccgaaccgtgccgcggcatatctacaaacaagagcagaggacgggtcgtcacaccctccacgaggatggtatggacgtgcgacactgaggagacccgaacggaggcgccgtcctcacgcggggatatgcaccaagatccggcgcgtaacgaacgagcaaaggatataacatcggccatggaaacgaaggaccatggcgctccgtggaaccgccggtggcaaaccgcggcctcagaatcaaccagcgcaacggtggggacggcggcccgtgcgggcggcaccaagctgaggaagcctaccttggaaggggcgatccgtgccgttgccacggtggctccggcgaggattaactcgtggaacagaacctggtcatacggaagatcgcgtagcaaagccgcagcaagtaaacgcgcccgaagaggaaaaaggggcgttgaaccccaactattacacttctcttccgtgatcatggaagggcaacaccggtgaggatg

SEQ ID NO: 716509 - DNA, 505 bp, Homo sapiens
  misc_feature (25)..(25): n is a, c, g, or t
  misc_feature (204)..(204): n is a, c, g, or t
  misc_feature (218)..(218): n is a, c, g, or t
  misc_feature (222)..(222): n is a, c, g, or t
  misc_feature (225)..(225): n is a, c, g, or t
  misc_feature (227)..(227): n is a, c, g, or t
  misc_feature (232)..(232): n is a, c, g, or t
  misc_feature (234)..(236): n is a, c, g, or t
  misc_feature (240)..(240): n is a, c, g, or t
  misc_feature (249)..(251): n is a, c, g, or t
  misc_feature (253)..(253): n is a, c, g, or t
  misc_feature (258)..(262): n is a, c, g, or t
  misc_feature (266)..(266): n is a, c, g, or t
  misc_feature (274)..(274): n is a, c, g, or t
  misc_feature (277)..(278): n is a, c, g, or t
  misc_feature (282)..(283): n is a, c, g, or t
  misc_feature (291)..(291): n is a, c, g, or t
  misc_feature (313)..(313): n is a, c, g, or t
  misc_feature (315)..(315): n is a, c, g, or t
  misc_feature (326)..(326): n is a, c, g, or t
  misc_feature (329)..(329): n is a, c, g, or t
  misc_feature (331)..(331): n is a, c, g, or t
  misc_feature (333)..(333): n is a, c, g, or t
  misc_feature (341)..(341): n is a, c, g, or t
  misc_feature (344)..(345): n is a, c, g, or t
  misc_feature (347)..(347): n is a, c, g, or t
  misc_feature (349)..(350): n is a, c, g, or t
  misc_feature (352)..(352): n is a, c, g, or t
  misc_feature (354)..(354): n is a, c, g, or t
  misc_feature (358)..(358): n is a, c, g, or t
  misc_feature (364)..(364): n is a, c, g, or t
  misc_feature (372)..(372): n is a, c, g, or t
  misc_feature (375)..(375): n is a, c, g, or t
  misc_feature (379)..(379): n is a, c, g, or t
  misc_feature (381)..(381): n is a, c, g, or t
  misc_feature (395)..(395): n is a, c, g, or t
  misc_feature (404)..(404): n is a, c, g, or t
  misc_feature (406)..(406): n is a, c, g, or t
  misc_feature (411)..(413): n is a, c, g, or t
  misc_feature (420)..(420): n is a, c, g, or t
  misc_feature (430)..(430): n is a, c, g, or t
  misc_feature (470)..(470): n is a, c, g, or t
atgtaattcttcttatcctaaaagnctgaaaacattgctctttatagtttgcgggaatttttaatgccctaaacagaaactccaacagcctcatggcttgctttaaagcagagcctgaatacagggggaacacaggtttgcctgagggttaagaagcatccaagagtaagggaagactgggtaagcaaagcaaaataaaggggnaaacaaaacaaacnacanatnanaatanannntatnaaattgttnnnanatttnnnnnacanttttattnacnnattnntttttttnttataaaatatttttttatttntnttttgattgtnagntnanaaaataanaanntnannananttanaaaatntgattaanttnaagngnaacaatttttatanttaaaatgntnttttnnncttaagnatctagaaantgccactatatataattaatacatttttttattatttttnttttattttttttattatactaaatatgaacgaga

SEQ ID NO: 716510 - DNA, 1046 bp, Homo sapiens
gcaggtccatgatatcatctggctaaagtcaaacctccgtgcttctcagtacagatgcccttcttcaccagtgacgctggggtgcctcacttctctcatggaagacaactttttggatatacgttgtcagacatagaacttccctcgtacaatggcaggcgatagactacaaatctacgagcgcgtgtgtgtgaaattaagaagccacgtcaacaggacggtcttcatctactgcggaactacctgcattgtcgcgaaccccgttctctgagatgctctaagcatactgcgagcgtgatactaacggactctaatctccatgatgaacatcttatctatcatacactcatcagagctttatgtaacatctggttctaagtcagaatctctctggtgagcttgggcattctgttcgcagagactcatctgcaggacattggccatgtccagatgcatgaactcggaacacttgctctaagggttgttctcttcgtgcatgtcacctcgtagctgtcatgatgatcctgaaaactgactgagtgcagcctcgattttccactatctggagtacgtattgatcaggctcgtgcacttcatatgactttcagaagagttacttatcgtccagacattcaggctatgccagtagttatgcaaattgtccgtatactatctagaaatataaggactagggtgtgctatcaggtaatcattgaggaggtcccctttatagatcccgcaccgtgacctctcaatctgttgattaactttccaaacagtgaccgaacaaactccattgcatcctggctgacctttaagaatccctttgatggccatgggacatactggaccatttttttgggcaattataggctgagagggcagtgggtcttgttcgaacacagcgaaaccttcccatttggttcaaggcagtgtccacaccactgcgtacatttaacaacttcctatgggagagaacagccttgcaatgattcacattatcaccctaagtacggcgcccatgggtaaccagtgacatattcaca

SEQ ID NO: 716511 - DNA, 161 bp, Homo sapiens
agcgcgtatatcaacaccctgctctgcatacactaccatatgggacaccctggaacatgtgcaccctcctactctccctgagacataccaacatgtgtggactggactgtaagctcccctcccccccctaccctctccgatgatatccatgcgcctatctg

SEQ ID NO: 716512 - DNA, 400 bp, Homo sapiens
tggtcagtgtgtgggttctagtgtgctgtgttccatgcctgtgtgtcagtatcaatggtatgcacttgttgacatctgtatgaaatgagtgtgttcatgctttgcatggaaacttcccagaccactctaccacatgtggctgcaccactcctgcactcccacacagcaatgaatgcagggttctgttgctccacatccttcaaagcactgcactcaactgcaccacaaatgcttgctgtcacggcttctttctcaagagtgttcacggtcccagcagaaattgcctttcacgaatgtgctttagcagttggtcaagccgcaattgcttgtctacggtgagccagtgctgttgtgttgggatctctccatgtcatcatctcacttgaacacggtctctcag

SEQ ID NO: 716513 - DNA, 694 bp, Homo sapiens
caggcacccttggagagcatatatcagatggaccccctgaagctggtggccactttcatgacaaatacttcaaggagagaaaaaagctgttatggaatcatgttccgccacttgccaatgcctttccactggaatgcaggaagaactcaaggtttaagacaggcttgctggaggctggcacgtcacctgaggtaggggagatccaccttctccgatgaagccctgctagaacgggggctgatgtgctggccaagtgtctctgcacagcttgatagaaactcctgctagtgggactgggccaatgtgatgtgccctggccatgctactgcatggagaccactggagatgctatgaggcagccaaatgccctagtgctgaatgatggatccagatttggaaacggcatgcatgcatgcttgtgcatgtggaaattggtctgcatcctgtttgatggatgagccatggtcccacagctccatcggcatgatggttgtgaaagcctggtggacatttattcccagctacagcaggaggtaggggctggttggtggggagctttgagcccaagactccgggcatcgctgactggctcggctgtgatgaagtccttgagaaccctcgtcaccagttgcttcctgcttggcagaagcatgccccctttgtactgaaagactcaaccaagttccagctgaaa

SEQ ID NO: 716514 - DNA, 706 bp, Homo sapiens
ggcctcactcctaactcatctgggcggcggcggcaagtggtgacagggcgtggtggcgcatcatcggcgcggaggcaggaggagcaaatctcatgtgttgccgtggcatgccgtcatcacaacaagatatgggtcgccctcggactccaggatgcgggtccctagacaccacatacttccaggtactcgtgcaccttcaatgcacgcgctacaaatcccgtcgccagcgtgaccttcttgaaagacagcggggccccgcggaagcgtcggactgggtcacgacaatcatggcacgcatcatttcgtccaactccctcccagtccccatgcgaaacggaaccttgtggacccaagtcctccatcttggttctccgatccttcgtgacccatgacccaacccccagggccggcaaggcccccggcggatttccacagagtaaccaggttccggtgaggcgggagcccggaagggaaccgaccgcgaagggaaaacggaaaacgaacggggaaggggcagcgaaaacaggacgggcacggggaacgggaagcggcgaaccaagcaaacagaaacccttgggggcacgggaaagccttggaaagggattgcctcgggggaaggcaggagcacaggccccccgggccacagctcagggggcctaggtccccggcagggcacccccaggtggccacccaaccgagacccacg

SEQ ID NO: 716515 - DNA, 308 bp, Homo sapiens
atgcagagaaccccatatatcttctattcggatttacttattttaagcattttccccttttgctctaaaagttcaatgttgacagggactgtatcatttttcattcactgatgtacctccagtgcctagaataatgcctcatacacagaaggcactcaatacatgattttatgaatgaacaaataacgactttaggatcagagtgaagcaccactgtttcacagtttcataaagagctctgtgatgtgttatataaactgaggggctgggggaaataaaaagagaattctgggttctctgcatcatct

SEQ ID NO: 716516 - DNA, 341 bp, Homo sapiens
gggcttttaaggaaccaaaaggagcatggttgcaaaacccggccttccacgtgggccagtccccggcccctcctcaactggagccgaaaggcccagcagggcaaaattggagggtgcccccagccctgtgccccagttaaaccagctccgcccttatcctttaagcacccagggtggccgttagggccaggatccctgcacgcctcagccctgggtccagttggcagcaagcaccgagcatgccctccccccccaaaggacctccgggcaatgcctgttccccctcatgttggagggtgcctcgggcccctgcctgccccttaaagactggtcagacctta

SEQ ID NO: 716517 - DNA, 773 bp, Homo sapiens
  misc_feature (202)..(202): n is a, c, g, or t
  misc_feature (207)..(207): n is a, c, g, or t
  misc_feature (213)..(213): n is a, c, g, or t
  misc_feature (318)..(318): n is a, c, g, or t
  misc_feature (322)..(322): n is a, c, g, or t
  misc_feature (339)..(339): n is a, c, g, or t
  misc_feature (344)..(344): n is a, c, g, or t
  misc_feature (347)..(347): n is a, c, g, or t
  misc_feature (359)..(359): n is a, c, g, or t
  misc_feature (369)..(371): n is a, c, g, or t
  misc_feature (374)..(374): n is a, c, g, or t
  misc_feature (379)..(379): n is a, c, g, or t
  misc_feature (383)..(383): n is a, c, g, or t
  misc_feature (386)..(386): n is a, c, g, or t
  misc_feature (391)..(391): n is a, c, g, or t
  misc_feature (406)..(406): n is a, c, g, or t
  misc_feature (408)..(408): n is a, c, g, or t
  misc_feature (433)..(433): n is a, c, g, or t
  misc_feature (449)..(449): n is a, c, g, or t
  misc_feature (451)..(452): n is a, c, g, or t
  misc_feature (455)..(455): n is a, c, g, or t
  misc_feature (459)..(460): n is a, c, g, or t
  misc_feature (467)..(467): n is a, c, g, or t
  misc_feature (476)..(476): n is a, c, g, or t
  misc_feature (481)..(481): n is a, c, g, or t
  misc_feature (485)..(485): n is a, c, g, or t
  misc_feature (493)..(493): n is a, c, g, or t
agaaactcgaaaatgtgaggccagttgtacagttcagaggaaatgcttaacgtagaatcagatagctggaagagatcttcgagggaaagtaagttccctaaagtcacatctatgtctcctagctcaggttcttgtcatgtgtgtgtgtgtgtgtgtgtgtgtgtgtgtgtgtgtgtgtgtgtgatagaaagggttataatantttcnttggantggaaaaaaaatttattatcttttacaaatgaaatatattgatttctagtaatctatatgtgaatcagtgtgaaagtatatatagtcttatgtgtaaaatagatncttnagattatgtgaacctgngagangangttacactcaantaaaatcatnnncangattntagnganataanatcactcagtgtgtngnagagttattctaagaagacagagtntatttaataaaaagtngnngtngcannaaatatnttaaaaccntgtgngatntcatcttnacgagtttatgtggtaaaaacaaagatgttttgggtatgtgtcgaaaattccttgaggggcgtgataatagagagtattttccaaattaataagtgtggatactactcactcagagggagtgcaaggattttttggaggtctttttgagcaggtaagatatattggacgtggtttcggaccaggctcacaaaggttattctagcgtttgggaaatttcggatatgggatgtctgttgttggaacttggcgtaaaattgtgggaaccttgttgagggaatc

SEQ ID NO: 716518 - DNA, 874 bp, Homo sapiens
ggtcccgcgaatgggtctcgttcagctccgcgtttcctgtgctcgtaattctaggtccagactattaccaggtttgccgatgcttgtgttcgcagcgcgtcgtgcatagtccatgaaatggagtgaccatgcatgtccagaaatccgctcttcgagaccgagtgaaatggagggtgaaatcatcgatcatgtggagagctgctacagtgataagttactccctgcataggagggaactttctggtaccctgataaaagtgaacgtaactgaaagccttcgagcaaagacccatgatgagaaattataagagttcctttttaagtcatgtcaagaccgggagtacctcattactgcgttctatcgatattccctggccgtcctctcacggcactattgaagaattgaacggaaatgggaatggtataagaggctagaggtgaataaacaaagaacagtcatgatcggtagacaatatggctgacgcctagaagtgatccaagaaatccacagatgttagaattaagaattcagcaacgttggtgaatacaaagtcaatattttttagatgccattcttagttagcacaaaacctaattagaaatatatcttttacagactagagactggcttggataaaattattcgtgtaggtaatccattgatatctgcttttaaactatatggtatgaatacacttattcggctgttaccacacaaaaacacaacaaatcaaacatctgttgcccctccgccccaactttataacctcgttggggcgggcccacgatagaacggcagcggtccagcgaatggcacaggggtctccacaaacgcggggcggcttaacccgggtggcataggaccagaccggca

SEQ ID NO: 716519 - DNA, 298 bp, Homo sapiens
ctttttgtgctggggcttgaagaactgagtatatcagacggagaaaatgtgtgatgggcgtggcatgcaaagggaacagcacaggcaaagaatggaatcttaagcaaagataggggtcagaagaatgtggactacagtcaggaaacaaaaagcagtttggtgggtggagtggaagatatatatgggaataaataacagaaaaggaagcttgaagaagtgggctgtggtcagagtataaagggtctcgtatgcctatttaagaggtttgggccagatgcagtggctcaaacctgtaatc

SEQ ID NO: 716520 - DNA, 889 bp, Homo sapiens
gggtaccttcgtaaagatggcgcggaggctgttggagtccagttggtggagcgcacgtatgcgtgttctggagcatgggctgaggagacaggatgcaagcgtagcatccgtgatctccgatggctgaagcgagctcctccgggagctgactggtccgtcattcgcgtggaaggcgttggtggtgcctaggtagaaatagggaataggccagaggcggcgaaccatctggcggtgcgcggttcctgtgagttcttcacggtattccacgcgcaaggatgcacgacaccgcgttcgtcggtcgtcttggtcggagaatcgtgagcaagatgttggaactgtggattcgaaagctatggtagctccgtcatacgggggaggccggcggatacactcagtgccccggggggtgttgtggatcggacgccatagttcctctatgcctgtagaaagatgatcgatgaggctgagcataggagattgtgggcatgtagtatatcttagatgctttctgacacttgtggttgatggaagatgtacagaattgggaagtgttgagatttcgagaggtcatagttggggttgggtcatcagatggtgctgagaaaggttggagacaagatgtgtgtactatgatagatgacgatgacggattgtgtcacatgggcgttcgacattggtgtagagagagaggaaagcgagaagtcgagtagaatgtggtgctgcgagaaactctgtgtgaatgtgggatgggatctgaggatttttcaggaaaagggaaagcgtgggaccgttaagatcatggcctggaggatatggtgagtcacagaattctggaatgacatggaaatgtgtaataaaaaagggcttaaggtgaggctttaatcggatg

SEQ ID NO: 716521 - DNA, 306 bp, Homo sapiens
agagcgtaggagtaccactctaacaggaagcatacttcctaaaaaattagattaactgcctattttacaaatagctcagtgaaactactcataaaaatagctaaatacattacgttttcgtgtattaactttttaaagaaaaaaatgaaaaactgtcattaagattggaaatagggagagtctcctagtttttatttgaccctgtgtgaaaagccaaaagaaaccaagatgctgatttgtcgatcgattatttctcaaagggtaaaatgacatcaaaaaggcttttttaggatgggtagtcacaga

SEQ ID NO: 716522 - DNA, 304 bp, Homo sapiens
ccagaggcccaaggaggctgaggtgagtggactgcttgaactcaggtgcttgagaccagcctgggcaacatggcaaaaccctgtctctacaaaaaaattgccaggcatggtggtgcacacctgcattctcagctacttgggaggccgagtgggaggactgcttgagcccgggaggcagaggttgcagtgagctgtgatcatgccactgtacttcagcctaggcgacagagccagacccaatctcaaaaagaaaaacaaaagaaaaaaataatcacacagagagactggtgcccagctctctgcc

SEQ ID NO: 716523 - DNA, 258 bp, Homo sapiens
cttggccggagctgccgggtagtggtgacgtcccggaagtgtctctcgaactcgtggccacgcatctcttcgacggtgtcatctgttgtaggctcccgaggtgtcggctgtctctgagtccgcattgcggctccgtcctcaataaggagaggcgagttggccgccaagcactgtcaggccttacgtctcctccacatttcaccggccgaggtttgttcgctccggtgcgcattcatctgtccatgcagaccagggagc

SEQ ID NO: 716524 - DNA, 204 bp, Homo sapiens
gcccccctttttttaaaaaaaaaaaattttccccagcttgggggggtaaccctgttgtccccccccctttaagggttggggtggggggttttttttacccccgggggttggggcccccgttacctttttttttccccccccccccccggttgggttatcccccggggttgggttcccaaaaattatttaatttaaaaattatta

SEQ ID NO: 716525 - DNA, 175 bp, Homo sapiens
  misc_feature (41)..(41): n is a, c, g, or t
  misc_feature (175)..(175): n is a, c, g, or t
cggtggtcatttctgtgtgacatggaagtagagtgagatcncgtcagagagtccagtagcacggtgcctggagagctctgaggtgtccatagtgccagagagttaagagctgtggtggtggttgtgagaacgagccctgagacgcggccagacgtcacggttgagagttccaggn

SEQ ID NO: 716526 - DNA, 905 bp, Homo sapiens
  misc_feature (202)..(204): n is a, c, g, or t
  misc_feature (231)..(231): n is a, c, g, or t
cccttaagatggccatgagactgcagcaaatacactacctggcttccagtgtgaaggtggcccacttgcaacaaggaccgaaagaagtccagctcagagtgccaagcccacaagccagtgggctagcaggagtgtaacaagggctcgtgggagcggagaatatcagagacgggcactgccactgcccctggggtgtcctctnnnctcctgtcagttgcagcccaaacactncagagctcggataccaaggagcagcttctgtggggcagaatggctgcacacagtcagggaacctggcttagcctggcccaagccttctcccacagtggggtacacagcctggacggcagggaaatagaccgtcaggcactacgggaactgacacaggtggtgtctggcactgcatcatactctggcccaaagccttctactcagtatggagctccaggccactttgcagcccctggtgagggaggtgaccagtgggcagccctgctgctgcccacctgagctgctcattcccagcacatggccagtgaggacatagcaagtgacgaggagcacacggtcatccatgaggaggagggggtgatgatgtcattgctgatgatggctttagcaccactgacaccgatctcaagttcaaggagtgggtgaccgactgagagtggggacaactctggggaggagccagagggcaacaagggctttggtgggaaggtatttgcacctgtcattccttcctcctttactcctgccgccccttgctggatcctgagcccccagggtcccccgatccacctgcagcttttggcaaagtctatggtcccaccttgtcctcctcctacacatactcggatgcttcctcctcaaccttggcacccacctccttcttactgggccca

SEQ ID NO: 716527 - DNA, 782 bp, Homo sapiens
  misc_feature (697)..(697): n is a, c, g, or t
  misc_feature (735)..(735): n is a, c, g, or t
  misc_feature (757)..(757): n is a, c, g, or t
aaaccccagagctaatagaagacaagacaaaaacaagctcagagcagaactaaaggagacagagacacaaagagcccttcaaaaaaaatcaatgaatccaggagctgtttttttgaaaaaaatcaacaaaatagatagaccaccagcaagactaacaaagaagaaaaaagaagattcaaataaacacaataagaaatgataagggggataccatcactgatcccacacaaatacaaacaaccattagagaatactataaacacctctatgcaaataaactggaaaatctagaaggaatggataaattcctagataaatacacacttccaagactgaatcaggaagaagttgaatccctgaatagagcaataacaagttctaaaattgaagcagtaataaatatcctaccaatcaaaaaaagtccaagtccagatggatttacagctgaattttaccagaggtacaaagagaagctggttccatttattccgacactatttcaaacaactgaaaaggaggaacttctccctaactcatgctatggggccatcatcatcctgataccaaaacctggcatagatactacaagaaaagaaaacttcaggacaatatccctgatgaacatcgatgcaaaaattctcaacaaaatattggcaacccacattccaatagcaccaaccaaaaggatttatcccgnccggcccgggcgccggtgggcttcacgcctggtaaatncccaacactttttgaaaaaggncccaaggccgggcccggaatcaacg

SEQ ID NO: 716528 - DNA, 469 bp, Homo sapiens
  misc_feature (38)..(38): n is a, c, g, or t
attggttattagttccagtattccttggagtgcaaacncaggagatagaattgctcagctgttgttattaccttatgtaatagtagaaaaaagtacagtaaaaagagaaagtggttttggcagtactgacagtgaaggaaaagcagcctattgagtaaatcaagcttctaaaaacagacctgtgtgcacaatgattcagggaaaacagtttgaaggactggtagacacaggtgctaatatttcaattatagctctaaatcagtggccaaaagcgtggccccgacaaaaggcttctatgggcttgattggagtaggcacagcatctgaagtctatcaaagtgctacaattttacatcgtttaagaccagatgggcaggaagtcaccatccaacctatgattactttcattcccattaatttgtaggggagagatttgttacagcaatggggtacagaaatctctccccta

SEQ ID NO: 716529 - DNA, 142 bp, Homo sapiens
aaggcagggttcagacaagatagctagggtagcaaggggctaggcggagagggaggtctagagaagtagactatattttattttatataaaaggacagagatactacacgctagcctacccaggctaggagtcgcgtgtgga

SEQ ID NO: 716530 - DNA, 236 bp, Homo sapiens
tgttgtttgtgcttttggtgtcacatctaagaatctattgccaaatccatggtcatgaagatttactcctgttttcatttaaaagttttatagtttcagttcctacatttagggtattgatccatttttagttcatttttgtatatggtgtgaggtaagggttcaacttctttctctggcatgtgtcccaggtgactttttcccattgtctcagcaccaattgttgaaaagaggta

SEQ ID NO: 716531 - DNA, 1543 bp, Homo sapiens
  misc_feature (876)..(876): n is a, c, g, or t
  misc_feature (1133)..(1133): n is a, c, g, or t
gtactccaccaggtttcccgtaacgagggccacgagctgtcgccatacggttgccgggaaaggcccgttgcgagatatgagtgtaagcagggttactcactccatgtgctgcagtcccggatgaggcggcggctcgtcctcagtgcttgatcgataaggacacagtgcgggagcgagagcacgacgcatgcgtgcctgaagaatcctgtcccacatggtactgtctatgagcaccagactgcgattatgcaattgggcgcagccaaagagctagcatgcgcgactaacgacgaggtccggagaagccagtcgaagcagtgcgtattcagtcttttgggaagagccacttgtgagtggcccctctaaatcagggcgcgtgattccacaagttgttggctagcgtcgcccaagagaacttggcttcatcaaatcccagcatcgcattgcattacctacgtaggttttttcgcttcctccgtgccccgaggacttctttgggtcgaccttgcggagggggcttttcccttgtgttgcagagggaggcgtacccccttttcccataccccacggcacacctagaggataccgcccgcattttacttcagccggggtccccttgctataccttcccagcgtttggccgcgttcccccgaatggacgctttcttcgggggcactcagaccaatgcttaagggaaaccctgcacacccatggtggcctttctcccacacccttttgtctgtggcggtaagaacctaagggggcttgggaccctccccatttttgccatttatacccggtgttgaagctgcggcaccacgcctcttcgggccactttacatggactcccttttacgcgcggcgcgcgccacttnccgcgagggcttatggcgtcttcaccacacattcactggcgcttttccgaaaacacctttctagggaacgcgccaacaaatctgaagcacaatcgccttgtaggcgcctgatcgcccacacttaaagaccccagaagattggtggctcacaccaatcggactccgcatataatgtcttgccgaacggctcatctcaggtgtccgcactttctgctcgtagccgtaatatcccgtctagcgcacatagccaccgtcanataccttttacaaatttagacccccaaagtcaatgtccgacggaaatgccgtatcctccttggctcacagacgctccatatccccgattgtgaccgcctatgtcgtgtggccgctatccctagttgcgtcatggcacgccacttcccgggtagggccacttattgcggcactcggcttacgccggggtccgcgccaccgtcttcgcccatagttgctcgaagttccgtattctcgacttgtattgtgcgtgtcgcttccatcagtgcgtgcagtccatttcatactgccacgaagccaacgtatttctcctctgtgtgccacccgcggtcgacgtttgtcccgcttccccagatattcttccccaacccatcctggcttgactttgcaggctcacacgggtcgcgctccg

SEQ ID NO: 716532 - DNA, 351 bp, Homo sapiens
ggcacgagaggaaatatacatcacattgaagagacacacagggccaacacattcaggatatgacaatatattaatggaggttaggaggctgagatacaatgggcaaggaacatgtgcatgaagtagatatatttaattagcgagcattatgaggaatcacagcaattcagtgaaagagtaatgatatgatcgttaattagagtgatgatcttcagaagcattaatctggcactgtgtacagaatagataggaatcaagaggaacctggaggtgtgaacacacagttgcgagaatgcaatgattgcacgtatttgctgagcactatgtatgtgatagattgtatttcgtccc

SEQ ID NO: 716533 - DNA, 866 bp, Homo sapiens
gggaactggaaaatgccgcgcacgtgaccggtggccagatactggggagattgcgcagtgtgatgagaaaccacaaggttaaaggcgacaaatggggacaaccggacccctagtgcacgtcacccgcgctcaaggggcctccctgtactcccagagggccccccgaggaagactgggtcacgaggcactacccagaaaagggttcccctacgaatggtgacaatacactccgcaacgtgggagaggccacaagtgaagcctgcgactatatgggtctgtgagggattacttacaacgtcagtcagagtcctcaaaaatactaataagcgaccaaacttttactccgacatctgatctaccctctccccgagaggaatgaggccgttccacaaaatccgtttaccccatataccccccctaaggatatctcgaacagtatactccctgtggacctattatcggaacacgcaaaactgggcaagatacttcctgtaggtctgctataccctctcttcgaacattctacacccagcttctggtacgccagaaacaatgagtctgagtcaaacccctcgtggatccccacgcaacaccaaagaagaatcttgccggcctctaccaacatagacaccatataaagattggggaagctcccctgcaaggaaacaattaaggttcaactctcttacaacaagtataaggtgttatgcagactcctttggatcccttatactggtgttaaacgagtatagtcacaaattgctccgcaccaaattcctcccctgcttgagctcccccccaagtaaaccgacctatgctttccacttttaacgcttcccattaaaaaccccacaacaaacaaaaca

SEQ ID NO: 716534 - DNA, 368 bp, Homo sapiens
agtctcatgtcgcaggctgagtgcagtgggcaatctggatcactgaactctgctcctgggttaagcgatctcctgctcagctcccgagtagctgagactgcaggcacctgccacacgcccagctaatttttgtatttttagtagggacgagtttcaccatgttggccaggatggtctcgatctcttgacctcgtgatccacccacctcggcctcccaaagtgctgggattacaggtgtgagctaccaagcccggccggtttttgttttgttttttttttttttggaaaagggtttccattttggtcacccaggttggattgctggggcagaatttgggttaagggaaccctccgcttccagggtccaa

SEQ ID NO: 716535 - DNA, 602 bp, Homo sapiens
  misc_feature (13)..(13): n is a, c, g, or t
  misc_feature (34)..(34): n is a, c, g, or t
  misc_feature (110)..(110): n is a, c, g, or t
tgaattcagtgcngaattcacactccagtctggnactccgggcgtcatttggttgtctttcaaaatgaaggtatacgtacttatgataggatttaaaaccagtacagacntcggcctttggttttattcatgatgggaattttcaaatactgtgtaaactgaaggtctgatcctcgcccttgtctggaattcccgcagattacccactgaagatgttaataatttccatgggccttccacaaacttccttggtaatcacaagctcagacctctgaatattccatacaagtgagatcccacttagatactattctgtattaattctttaagataggccaggcatggtggctcatgcgtgtaattccagcactttgggaggctgaggtgggaggatcacctgaggtcaagagttccagactagccaggccaacatggtgaaatcctgtcgctactaaagatacaaaagttggctgggcgtggtggcgggtgcctgtaatcccagctacagtcaggagaatcgcttgaacccaggaggtggtggttgcaatgagctgagattgtgccgctgcactccagcctgggcaacagagcgagactctgcc

SEQ ID NO: 716536 - DNA, 148 bp, Homo sapiens
  misc_feature (23)..(23): n is a, c, g, or t
  misc_feature (59)..(59): n is a, c, g, or t
  misc_feature (103)..(103): n is a, c, g, or t
  misc_feature (117)..(117): n is a, c, g, or t
gaaattagtaaaatatatttatnagatgttcttaactcctacagagaataacgtatgantagtaattatattcttgggaattaagccagagaaagttgaggantaaaagcttcagcntttttcaacattagtgaaaaaaatagtaata

SEQ ID NO: 716537 - DNA, 724 bp, Homo sapiens
ttcacgattcttgacatcgttgtaatctgttgctgccctgggtaactaattcgtagtaatagcctatatagctcaggaatctcttctgaaagcttcttaatcactagtgcctagacacgagaacgtaaaatcatcggattctgtgtagatatcaatgtatcatgtctgcatcgtctatcagtcgcatacgattctccatttacacatccatgtgccaacccatatgctgtcgaataagtggatccagaatctccatgtggatatcaaagtattgcaggcagtgccttagtagctcatccgatatgcccgcatggtttgcgatgagaaaatcgcttatcatcaagtctcaacaagttaaatacgttactgcatacagacttactcgatacggcactctgatggatttcgatcttacccatgtggcttatgagtctcctcacacacctggattccttggaccttactaggccattatgctggtgatgaactaaaccaaccagacagtcttaggtcctaaaacgttgcatacaggcgctgtttgccatgttctgggctgctaggactgttcctgccatggttcagtgggtatcaattgatccctgtgagagtggcaactttagagtacactacgagtcgatgaccctagaaccagcaggacatggtctagctatacaagctcagactctcgtccgaatcctctcacatggtggcttcaggaagatcc

SEQ ID NO: 716538 - DNA, 913 bp, Homo sapiens
tttgaccctgcctttatgtttactggcctcccccgtaataggagtgctttggagacctcttctcgcagtgtccctcattctaatccgtttgccctgctcttattcctataatatttggcctcttgtccctcaaatactagctcaggagggacgattcatctgcgcctcaggaaaagagggggtcacgcggactccgcgactcctggtccccccgcatgttgtgcgctcctccgacacctggggtttccccccgaagctgccttgtttggtgtctccccgcctccttacccgcgttctccttcatagctctgttccggagtgtgggaacattctaacatcccgttttctaggcagatcccccacaacacttggtggagagtttaactccctgctttagttctcataagaggagttcttttcctcccaccccgtcgggcaccacaagggcaaggacgctcccacaacacggttggagaagacaaccaatcgtacagtaaaaaattattgtgtccagagtcgacaccttggtacttacaccacgtctcgtcggtgttgccacacgtgcgagtgcccaaccttgcgagttttattcaatgaccgcagcattgcggtgagagctatccaactctcggagatagactcaggaggggaccaacatcttcgctcccgaagtagttatttcggacccctcttcaagtcctcgccgcggctgggatcatcagactcccccctccccacgcaggagtgaagaggcgagacggtcccggcaggaattcacagagcctcccctatgggaagatctccccccaatctcttgagcacggccccaaaaatccctcttcttcctgtggcgaaatttaaaaccaagcaagaagagccgcccccaatttttaaattgagacccacaaaaaca

SEQ ID NO: 716539 - DNA, 449 bp, Homo sapiens
  misc_feature (431)..(431): n is a, c, g, or t
tgagatggagtcttgatctgtcgcccaggctggaatgtagtggcgcgacctcagctcactgcaacctccaccttctgggttcaagcaattctcctgcctcagcctcctgagtggctgggactacaggtgcacgccatcacacccggctaatttttgtattttagtagagacggggtttcaccatgttggccaggacggtctcgatatcctgacctcatgatccatcaactcagccttccaaagtgcagggattacaggcgtgccaaccgcgcccggccaagaaactgatttttttttaaggcacccccactgcgactatactggcccaggtgattaacttcagcaccaggtggtaacactggaaattggttcccagttgctccaagtttccagttagggtccttatgatttgaaggataaaatgtgaaatngggttcactattagttca

SEQ ID NO: 716540 - DNA, 997 bp, Homo sapiens
  misc_feature (104)..(105): n is a, c, g, or t
  misc_feature (140)..(140): n is a, c, g, or t
gtgccgctggcaaccagcacaccccggcacctcctctgcggcagctgcgcctcgcaagcgcagtgccgcagcgcactgccggagtggctgtagcttgccctggnngctggcgcctgccctgcgctgggctgtgggctgcngggcttgtgcccccgctgctggccagctctgcacggctgctgggctctgctggctgccctggtgctctgcaacgcttgcgtgcgtggctggcattgggataactgcggccatggttgcgcctgagatctgcctccggcaggattgacgggccgttggttggggttccagtgtgtggtgcttgcttggcctgttgcccgctgctatgcttgctgtaccttgcacatccgcaccccctcagctctcccctgcccttcactcatggaagtcttcaggcaagtttttcacttacaagggactgcgtatcttctaccaagactctgtgggtgtggttggaagtccagagatagttgtgcttttacacggttttccaagatccagctacgacttgtacaagatttgggaaggtctgaccttgaggttacatcgggtgattggccttgatttcttaggctttggttcagtgacaaaactgagaccaatcactattccatattttgagcaggccagcatcgtgggaagcggcttttgcgggcatctgggggctccagaaccggaggatcacacttctttctcatgactatggcagcatactggtggcccaggaagcttctctacagcttccaacgccgaattggactggggcgcgcttaccataaaacgtctctagcgttgtcacaattcgaggaacttattcctggagaactctacggtccactcatttctcaagaaggtaactcaaaaattgcgcgttggtctgaccccgacttttacaccgactgtatgacacccttgtgcattcactcaagagtctacccacaagtatgggacgcaataacagcgccttttataatacgct

SEQ ID NO: 716541 - DNA, 299 bp, Homo sapiens
  misc_feature (29)..(29): n is a, c, g, or t
  misc_feature (53)..(53): n is a, c, g, or t
  misc_feature (73)..(73): n is a, c, g, or t
  misc_feature (247)..(247): n is a, c, g, or t
caccccccaatccctctcttgaaacttanaaccagtgggaatataggaaaggnaaccaaatttcattaattanttgttctcccccattacccccctgaatgaatggccatacaggctagctgaataaatacaaagttgaaaggaccaatccagccccttttataggattttgaaatgttttgcaaatgaattggtccctgtggtgtattttggaacccttttcctgggcttcagctcccctacttcntgtatgtggatgcatactgtagctaaccattaaagtcatgacacacaaaaaa

SEQ ID NO: 716542 - DNA, 282 bp, Homo sapiens
gctttgccagcccctgttcatccaagttttaagtcctcccccctgttttaaaagactgttccaacggctttgggcctcagtggtcacttgacccccattgtttcaaaactgccccctttgtgtgtgtcacatgctgcctgagtcacacggacattttatttttgcctctagttttgtaagctcctggagggcggataacatcttatactacttttgtattttcatggcccctagtgcagtgctgggcccaaagtaggtgctccataaaaacctgttgaatta

SEQ ID NO: 716543 - DNA, 253 bp, Homo sapiens
ggtgaatcccataatcgctgtgtatactcagtatctttgtgtagtaccaaaggcggatgtgatcatctgaggtcaggagtacgagaccagcctagctaacatgacgaaaccgccgtctctactaaaaatacacaatcagccgggcatggtggctactcgggaggttggccctgaggcagaagaatcgcctgaacctgggaggtggaggttgcagtgagccgagatcgcaccaatgttactcagcctgggttga

SEQ ID NO: 716544 - DNA, 192 bp, Homo sapiens
ggaaccccgaaagctgagggacggaggtcagtgactcttggggtcttggggaccccgagacgaaggaaggcaacctttttccttaagagggagtatcccgtttcttggcaattattccattgaggtttctcttacctcttaacaaaggacacaggagagaggtgtgtccccaacgagaaagcacttttgggg

SEQ ID NO: 716545 - DNA, 377 bp, Homo sapiens
cctaccggacccccacataaattcttctccttctaatcctgacaattattgacctggacaaacctaattaactcttaggtgctggaactcaagtgaatgctactgcccaagtgaggctgactgggtctcactttaaatggatcacaaatattgagccctcagcaagtctatcaatccttttacatttttcctaagttagctctcctatacctacctcatctctgaaggttctccctcactcttgaggtgatgaccttcagaaatgagatgttgccaggaacatctcatttcttgtggagttatatcacaagtatccattccgtgttacctattgcaagagatgagatgttgggaggcgaaatgagatgttggacggc

SEQ ID NO: 716546 - DNA, 887 bp, Homo sapiens
gaggcgcggcgagggcgccagatggctgagagctacgcaaggaaaactcaggacccatgatggctcagtttcccaacagctatgaatggcagggccaaacatgtgggctattacctctgacgaacgtactacgcatgacaggcagtttgataacctcaaaccttcaggaggttacataacaggtgatcaagcacgtaatatttttcctacaactcaggtctgccggcccctgttctcgctgcacctatgggcttaatcagacctaaacaaggactgggacagactggctcagcaagagttctccatagcctatgacacctcatcaacactgaagcttcaaggccaacagctgcctgtgagtactcactcctatcatgaagcaaacccctatgatatctccatataatttctgctcgatacaggaatgccgaacgcactgcccaatactgtccatccctccagccattgcctccagctgcacctcataacatcatagtccttctgcgactccagggaccaaccttcctccccttaactgatgccaatcccctaagtgctttctggcagcaaatcatcattaccacatggaaccgccagtctcattcaagccttacccattctttatacttactcacacacttggcctccatggagtcatcctaaaacgccggaatgatgcgcacgactccgtcacgctgctcagctttcgccgaaaggcgcgcttctgcattgcactctagcaaacttaataagaccaaccactcctcgaaagggttcaccatcatcgggcccttccaccattcatggcacctcatcatgtgaaaaatctcaaacctcccccgactcccccttcggctcaattccaaactctgtccacagataaaccg

SEQ ID NO: 716547 - DNA, 429 bp, Homo sapiens
gtcctctgaggatcccgcgcgttgtgtttacgtctgtatcccagcactttaggaggcaaggcgggtggatcacttgaggttcaggagttcaagacgagactgggcaacatggtgaagtcccatgtctatgaaaaatttaaaaagtaagctgggtatggctgggcacggtgactcatgtctgtaatctcagcactttgggagggcaagttgggtggatcacttgaggtcaggagtttgagaccagcctggtcaaaatggtgaacacccgtctctactaaaaatgcaaaaacttacctggccgtggtagcgagcacctgtaattgcaggcacaagaactgcttgaactcgggaagtagaggttgtcatgaagcccagatctcacgcattgcattccaacctgggtgatggagttagactatctcacaacat

SEQ ID NO: 716548 - DNA, 868 bp, Homo sapiens
gctagatcgaatcgcggtgcgcacgaaggagtaggtggtgtgatctcaccgtgagtccggatcagcctttattctgccttggttgattgagcgcattgcgcaatacgaaatggctggcgggtaaggctggaaagggactccggaaaggccaatacaaatggtggctgttcccgctcgcagtacgtaatcaggatttgcgatgtatccgcaggtggtcccgttatttacatcggagcccctaaacactgctaggacgaccagtcaatggaaccggtgtggggcgcgacttggccggctgttgttaccggcgcagcccatcctggaagttaccctcacccgcggaggtactttgaacctggcaggaaatgcattcaaaagacttaaaggtaaagcgtattacccctcgttcactgtgcaacttgtgctatccgtggagatgaagaactgggatcctctcatcaaggctacaattgtgctggtggtggtgtcattccacacatccacaaatctctgatgtgcgacgacagcggacaccagaagactgtctaaaggatgcctgatccctttgtattctcaggactcctaaatactctaaccagctgtccagtgtttggtgatcccagtgcactgtattctctgtgaaaaacacaatttgtgccttttgtgtaattctatttgaaccaagtgggaaggttacttaagttccaaccaaccaattctgcttcgagttcttaccatatttaggtgtctgtggttccaaaactattgttctgagagggttgagagtgcatgtcaaccccggtgtttatgggcgcgccacttcttccacattgttgtcgacattcccggggatcaagcttccccaaaa

SEQ ID NO: 716549 - DNA, 872 bp, Homo sapiens
ttatccctcacaatcatgggaagccacgcctaattatccagtgaaccactatcacgaatgaaaactctacctctctatactaatctccctactagtctctttatttataacatgcacatgccacagaactaatcatattggatatcctcttcgaagcacatcacttaatgcccgaccttggtctagtcatcacccgtatgaggggaggcagcacagatacgtcgcgtgatgcgcaggcactgtacttcctattgctgaacaccctagtaggactctcttacgcagatactgatcggactaattgacacgcacaatacgctaggctcactaaatattgtattacgtcagtctcactgcgccgaagaaagtgatcgaaattgcaatgagccaatcacactgtaatatgatctagctttagtacaatagctttatatagtaaagatacctcttgacggtactccacttgtgactccctaaagcccagtgtcagaagcccccatcgctgggtcactggtacttgccgcagaagtcttgaatctaggcggctgatggtataagtacgcctgacattcattctgaatccccttgagaaagtgttataggctagggcgtttcattgtaggaatccctaatgaggcataattatgaacaggcgccattctgactacgacaaacgagacttaaaatcgctcatgggtaatctttaagcaggcagatagcctcgttgtgacaggcattctcttcaaaaccctgaagttacggggcgtttctcataatgcccaggatagatcccattaaatttgccggaataattggaagcccgcgggtaaatcccccgggggaaacttcccaattggggaaaaacggacctt

SEQ ID NO: 716550 - DNA, 730 bp, Homo sapiens
  misc_feature (24)..(24): n is a, c, g, or t
  misc_feature (64)..(64): n is a, c, g, or t
  misc_feature (66)..(67): n is a, c, g, or t
  misc_feature (70)..(70): n is a, c, g, or t
  misc_feature (79)..(79): n is a, c, g, or t
  misc_feature (96)..(96): n is a, c, g, or t
  misc_feature (98)..(98): n is a, c, g, or t
  misc_feature (111)..(111): n is a, c, g, or t
  misc_feature (116)..(116): n is a, c, g, or t
  misc_feature (119)..(119): n is a, c, g, or t
  misc_feature (126)..(130): n is a, c, g, or t
  misc_feature (136)..(136): n is a, c, g, or t
  misc_feature (140)..(142): n is a, c, g, or t
  misc_feature (151)..(152): n is a, c, g, or t
  misc_feature (154)..(154): n is a, c, g, or t
  misc_feature (164)..(164): n is a, c, g, or t
  misc_feature (172)..(174): n is a, c, g, or t
  misc_feature (184)..(185): n is a, c, g, or t
  misc_feature (189)..(189): n is a, c, g, or t
  misc_feature (208)..(208): n is a, c, g, or t
  misc_feature (217)..(217): n is a, c, g, or t
  misc_feature (341)..(341): n is a, c, g, or t
  misc_feature (355)..(355): n is a, c, g, or t
  misc_feature (661)..(661): n is a, c, g, or t
  misc_feature (701)..(701): n is a, c, g, or t
gcttccaccagtgggcctccatcnggttacttaacctacctgagacatggtattttcatttaananngcntagcatganatgaaattagtattaananaacagtaattacngttgnganaaaaaannnnncaagcnaacnnngggggcctnngncagaaagggntacttttnnntctataaagnnttanacattacaatattccctgnggatatgangtgttctctaaagcagagagaaatcctttatcgggatttctaggagattatttttttccttcagttcactttatttatttatcccaggcatagtacttttcttaatcttttaatcacattttgntatacttttttggnttcctcttcagtccctattgaaacaagttttctcttcatgcaatcatgaataaaccttactcatttctattcagtaatgtaagcattatcttttgtaacattaggataaattttagcatgcaaatgaactaaatagcaagggcaagagacaagataaggtgtctgttaataaataaatgacatgatgttaggtgaatggaaacagctgggagacctacttttaattttctcgttatctaaaaatcagaaaggccaaatgcatcaagtttactgataattcacttctgtttgctagccatgaatccntcatgtaaagagtggtattgatgacaagagcagtattgtnacctacaaaatgtacttggtactaatgta

SEQ ID NO: 716551 - DNA, 719 bp, Homo sapiens
tctgccttttaaattgagcatctgggccgggcatggtggctcacgcctgtaatcccagcactctgggaggtcgaggtgggtgggtcacctgaggttgggagttcgagaccagcccgaccaacatggtgaaaccccgtctctactaaaaatacagaaaattagctgggcatggtggtgtgtgcctgtaattccagctactcgggaggctgaggcaggaagaatcacttgaacccaggaggcggaggttgcagtgtgccaagatcataccactgcactccagccctggtgacagcagtagaccccgctctcaacaaacttgattgactcaattcagcactctgagggctgcaagctacagacaggaatctattctcagcagcggcatagggcacgcactggcttaacagttctagtatataaggctcaaatagtctatacctgcaactgctataagcaacggtcgatagcggaaagtgcggcactagcattgcttcagcacaagtgaaactgtgcagatctccaccgacagagcggacacacgatctgatccacaatgacgaacaccatcggcctcttgcaggtactcacagcctaaaagaaacttatcttccctggccaaagcaactatcaactgatttagcagtctcccacgtgtgtcaatgtttcaaccgtgtatcctaatgtctttccccggctgtaccaactgcccccacaaatct

SEQ ID NO: 716552 - DNA, 123 bp, Homo sapiens
cctggtgcagcatcactcatgaaatctggtaacttgtaccaggtaactggcaagggaaaaaggacgggggaggcatgcaatgagcgagaatccaaacaaacaagcttgaaattggcttagggg

SEQ ID NO: 716553 - DNA, 771 bp, Homo sapiens
tgtccaaaaagggtttgttttatggcaattattttaaagcgggtccctggggggagggaaagggggaggggaaggggggggggctcgggatatcaacgtggacaaatgtttggtacacctggagaagataatttggtggaaaaaaagacaaaacacagaaattcccttcaagatcactgaggcgccccgtgcacgcagcacaaaaggaccctatcgccccggaggttgccgccgccctctcttgcgcaccctctagtgctcaccttctcttgttgtgtaccctctcatcatctctctctcaattctctgtaaacaactagtgttactctataatatctccttcaccaaaactatcagagggggttctcacatactccccacatttcttggtcttgccacaacgcccccaagtacacctggtggtgggcggaggccaagacaaatggggcgtccacaccgggcgcagggacgcagacttcacctgggcgagcacggtgagagagagaccacaccacccaacaacacaccgagcacagcagggagacatatccatgggcaacagcagatggagggcccaaggcccccgcgccagacacgggccccccaggtccccccaaagaaccagcccggcaagggcgccaaaacatcggcacaaaaaattcaacgccactcacggtaacaacagacacaccatggaagccccccccgcgttgatacccacacaaatcgaacagcacgcatctccaacttagaccatcgacacacagtgac

SEQ ID NO: 716554 - DNA, 107 bp, Homo sapiens
cagagtgctcgggcggggacacacacttggtggcgctagacaatagtggggcaggtccttctctatcaccaggtgctcctccatgggtccgtagcgcttcaccacgc

SEQ ID NO: 716555 - DNA, 519 bp, Homo sapiens
ggtctgatgctgaattaactgcaatggctggagccgttacagtcgtggcatatggggtcagtgtcacctatactgcacattgtcatttttgaggcttatttccatactttattcagaatgggctatggagaacttacaggctggtggaaacatgcctgtcttctctgatcggcagataccctgacaccagaaggcatgatgtaaattaatcctgtcttttggcatggttcgtgcagtcattagtttggaatgcgctttgcttcgcatcaggccatggtttctagcggatatgctgtccgcagctggaggaggtaatcccgtacaaacttgtccccgaagcgcaagagcgatcatccgccagatctggtgggagagactgcagtggatggcagcgtatcgtaacggacggacagaaaatccttatggtgcgtgtccctatgtggtcagccctcatgacagacttgagaatctgggtcaagtatgcaagcctgtggcgagccacgagtgggaggctggctc

SEQ ID NO: 716556 - DNA, 346 bp, Homo sapiens
ctacttggcagtgtggtgtcaggcagagctatgatgtgtcattcaattttgtatccaggcaacatttgctgaattattttatcagttctaggagcttcgttggaggagtcttctgggttttccaggtatcaatcatatcatcagcaaacagtgacagtttgacttcctctttaccaacttggatgcctttattctttctcttgtctgattgctctggctaggacttccagtactatgttgcagtggtgaaagtgggcatccttgtcttgttccaattctcagagggaatgctttcaacttttccccattcagtattatgttggctgtgcgtttaatcatctgacca

SEQ ID NO: 716557 - DNA, 1014 bp, Homo sapiens
ctgctcatgctattgtgaatctggttgaactgagcttgttagtgaatagatctctgctggcgtaggtctcactcgcattgctgatgtaccaatgccggtgtctaactctggatgggtcgcagtggtgagcaagttgctgttagtagcaccgagtgaaatgcgattcctgtagtttatacacatagtttgggttgtatcatctgtactcagtacaggtgcctttacgctatggatattatattgtgagtatctagatagtaaataacacgtaggtatagattgtttgcgatgcggcacgtggaggattgggaaagattagtgaggagttcggatgtatatcggtgggggacaaaaagtagtatgtctcgcggtgctgttgagactataagacattatatcgagatgagacctagttgatgcagtgtgtggctctctgtaatcattgcatgaacaatccagatccttaagagtggtccacttggggattgacgtgcaaagactacgaggtattgataagtcgaaccgtgaactagattagtttaaattgagaaatgaataatcacttctgtatgtggattcactcgttcggtatggcatgcgatcatagtcgtattctcgtcaaatgggggatgatgtagatagggttttggcttggtgatacatctgtggtggcccattagtttgaagcatttaacaaagtaattgggatgaccatctgtgcatggaaggtgagggaaaaagggcaaaggagggacacattcttggtggtgactgaatttgagggcgaggcccagtaggagattgtgtgttttgactaggtaatcgatttcacagaggctaagaaggtaagaaaggggagcggtccgtgagaattttggacaagtggggggggcctcggagtataggggcttaaggggcgtatggacagatgccgaaaaaaagggggcgagaacagcggttgaggcaacagaagccacgggggaaaaaaggggtatgggaatatattgaagcaga

SEQ ID NO: 716558 - DNA, 84 bp, Homo sapiens
  misc_feature (47)..(47): n is a, c, g, or t
tttagaggtgtcgtgtttactttttatttaggagtacaaactgaganaaaatcatccttccagttagtgaggttttgagggatc

SEQ ID NO: 716559 - DNA, 217 bp, Homo sapiens
ctgttatagcaccgtggtaaatatgtatgagcggagtatagggctgtgactagtatgttgacgtccctgtaatgctatggatgagtgatatttgatcagtgagaacgtggttactagcacagagagttctcccagtaagttcatacgtggggggtatcggcgatcgcttagctgaggcttgctcagaagtcatcacaaaagctattacgtggtgaga

SEQ ID NO: 716560 - DNA, 940 bp, Homo sapiens
gtagtcccagctattcaggaatattgcttgagtccagcttgggcaacatagcgagaccctatctaaaataacaataatatatagccatcccgcctggccatatattattgttattttagatagggtctcgcctgtaatcccagcactttgggaggctgaggcgggcagatcacttgaggccaggagttcaagaccagcccaaccaacatggtgaaaccctgtctccactgaaaatacataaaattagccgggtgcagtggtgaggcctgtaatcccagctactcaggaggctgaggcaggagaatcgcttgcacccaggaggtggaggctgcagtaagtcgagattgtgtcactgcactctagcctgggcgacagaaaaagaaaatttaggtggggaaaaaaatcagaattgcgtctgtgggaacaggaataaaggagaaaccactattgactgggaagacacacaaagaacttgtcaaagttgtatggctgaggcccacacggtggctcacttctgtaatcccatcactttgggaggcttaggcagaaggatcacctgagatcaggagttccagaccagcctggccaacatggcgaaaccccatctctactaaaaatacaaaaattagccgggcgtggtggttacgcctgttatccagcacttgggaggccagtgggcggatcacaagtccggagtcgagacagctggcatatggtgaaacccattctactaaatatagaatcagaaaaaaattagcagggtggtcatgatgcctgtatctagtacgggagtgggaggaatggtgaccgtgggagttgggacggaaatgggttccacgtgagggtggacttaaattaatataattttgaaattacgttcggaggtatataaaaagggatcggcgcagtggatagggggttgttatatagttacgggaaa

SEQ ID NO: 716561 - DNA, 130 bp, Homo sapiens
gtagcagcgagcacgttagcaccttcagtaccaggctggtagagagcccgagaggggggccggggggggcagtcaggaccctgcttcgctgcctgggccctttagatgccttctccaggccgtccaccac

SEQ ID NO: 716562 - DNA, 318 bp, Homo sapiens
gaaataccccagtcattttgcgggaaacataatgtgcaatggtgaatgatgcacctgaccagaatacacttgatgcctggaatgcacaggtatgcccacctgtccacgtcctggaattcccatgatcacaaggctgttcacgccaggtatcttaatagaccacctgcaccacagcaactgtacctgcccacagctcagttactaagcctctttccccagtgctggacaggctcaggcagctgtccaaggacctgttggtacagatttcaaacccttaaatagtacccctgcaacaactacagaacccccaaagcctac

SEQ ID NO: 716563 - DNA, 578 bp, Homo sapiens
atctcacctccaaagcttagaaaattaagcaaacccctaaaaaccacaaaacagaagggacaatcacaaaaaaaccctgacacaaaaccccccccgcccaacacaaaaaaaaccccacaccaaccccaaccagcccaactcaaaaaaaaaaaaaaaaacccggcaaaaaaacaaaaaaaaccgccatcacgcgcaacagcgggacactgccacaaacacaattccccacaaaaacacaaacagcaattctcaaaaatagacccccaccaatacaccaaaaaaaccccccaacaacaaaacacaaaaaacaccgtacaacccaccaccccgggtccagtaaacaaacaccaccaaaaatttgaacaaaataccgcacccacccaaagggcaaaccaccgcgcacccttcaaacacaaaaaagccccgcacaaacaacaggcagccacaccaaaaacacggcccccgagcagaaaacaaaatcggcacacaatcaaaacaaaaaacacccccacaacaaaaacaaaaacatcccgggcgccacaaacaagaaaaccccctaccaaaccccgcgcaaaaac

SEQ ID NO: 716564 - DNA, 137 bp, Homo sapiens
agactcgggaggggctgatatacgggcagaaagaatagtaatctagagacaataaatcttgggccaaaaactaagaaagagcttcatagagatggccagggtcttggctgggcatggcggctcacgcctataatccc

SEQ ID NO: 716565 - DNA, 139 bp, Homo sapiens
ggttgcagtgagctgagatcagtgccactgcactccagcctggcgacagagcgagactctgtctcagaaacaaaaagaacaaacctccccccggccaaaaaaaaccaaaaaacaaaaacagagtctgacacaggaagga

SEQ ID NO: 716566 - DNA, 109 bp, Homo sapiens
ctattgatcccaagcaaatcttagaattacttcatttaaatatactgagcggtattgaatacttcgaagcagaacatgcaatgtgcagcccttcatttatgacgaaaac

SEQ ID NO: 716567 - DNA, 212 bp, Homo sapiens
gttttaatttttccagcacgattcccctttggatgtatagcactccaaaagggttaggcctttatggctgtgcccaaaaatgagctttcttatactgtatatcatgccacttctggtctcgtcggagactacggagcttcctagcagtacgaagtccacaaacttgccatcctgtcggcgccacggcctgagcgaaagaggagggtgctcgt

SEQ ID NO: 716568 - DNA, 421 bp, Homo sapiens
ctggttaaaatgttcttttccccaaaggggccctagggccatgatttaaatatttttattacccttttgaaatggagaagcccttttgcataagcctttgaattcctgcccctttttacccccttttcctccccctcaaaggaaaaacatttcatcccagtaaggtaacggcattttctgtaggatttttttatgccctgccccctttgggcctcccctgcaaaaacagttccccccctgccaggagcatttgcatgtgggacttttcttttcccccagttgatattttttatatgatattttaaatactatagaaccccatttgtcagattcagtataaccccagattttgttacctgttttttaaaaaagcagattttgtcaaatcaaataaagatcaatggatgttggggataatcca

SEQ ID NO: 716569 - DNA, 399 bp, Homo sapiens
caggagtgagcctgcacttcgtgctctggggctgctgcaggtgtaccagcgcatgatcgacaaggcggaggatgtgtgcctgtcgtagcgcagcccgggaactggtggggcagctggcggtgctcactggctgaacctctcatcttcacactgcgagcccaacgcgatgcaccttcctgcggatctccaagtccgacttctatgagaatcatgcgcgcacagaccagtgtggttgctgagtgcggctgcacacggtggaaagcgcagtgatgtcgcccttcgtgcgccagaatggacttcgccatctgactgtgacctgccagttggtagcgctgtggacagcgcgcttgtacaggcagggcgacagatccgaacttgcaattaaatcgtgcatcaatt

SEQ ID NO: 716570 - DNA, 263 bp, Homo sapiens
  misc_feature (68)..(68): n is a, c, g, or t
ggctcccgggttcaagcaattcttcccacctcagcctcctgagtagctgagattacaggggcacacgnatcacacctggtaatttttccatttttgatagagacggggtttcaccatgttggccaggctggtcttgaactcctgacctcaggtcatccacctgcctcggcctcccaaagtgctgggattacaggtgtgagccaccttgcccaacttcgtgtctttattgaaaatacaaaaataggcccttctgtcgtcttctc

SEQ ID NO: 716571 - DNA, 86 bp, Homo sapiens
ttttggggggggggggcccccccttttggggggctttaaacccttgtttttgttggggggtcccctttaatggttttttttttgga

SEQ ID NO: 716572 - DNA, 209 bp, Homo sapiens
acttattacctcaattcttatttcccaaaatgtcacagatctcctaaatgtaattgcatacggtatctttcatgtatattccttcagatgctttgtagatctagctgaaatataaatcacaaattataaatcaaagtaatttggtcatatatagcaaaaagaaggctgtatactatgtaaagggcctcccaaagtagcagactgtactg

SEQ ID NO: 716573 - DNA, 189 bp, Homo sapiens
gactgatcttgagtacctggtagtcgcgatgtcatacataggatgatgctttggtaatcctgataacgtagtacttcccaactgcggaactgaaggacctggagggataccgaaatcctttgagagatccagagaggactgctattagatattaaagccataacctgtggtgctttccgtcctcgtctg

SEQ ID NO: 716574 - DNA, 379 bp, Homo sapiens
  misc_feature (46)..(46): n is a, c, g, or t
cccataggcttcaaatacccctgcctcaatgtgatacccccctccnggcctgaaggggccccatcctacccacacccattccccttagttttcccacgccctataatccctagcactttgggagaccccaggcgggaggattgattgaagacaagagttcaagaccagtctaggcaataaagagagaccttgtctctacaaaaaaaaaaacaaacgataaaaaaaaaaattagctcggagtggtgacacatgcctgtaatcccagctacttgggaggctgaggctggtggattgcctgagcccaaaagttggaggctgctgtgagccacaatcacgcgattgcactccagcctatgcgacagagtaaggccctgtctca

SEQ ID NO: 716575 - DNA, 174 bp, Homo sapiens
  misc_feature (170)..(170): n is a, c, g, or t
cgagtcggtaccggtcccatgcacagttacatcctaatctcatcactatcacagtccaaaagcaagctcagcacatttcacaacttccctgtcttccaactcccctctgttcccagtgaaccttcagcatcactaatgtagttgatgcttgccatcgtgctgctttctanaggc

SEQ ID NO: 716576 - DNA, 400 bp, Homo sapiens
aattcggcacgagggggatccgcagaagaaaacattaggtctggctcatgggcgtggcctcccccaggcccctcaggcagaaatttagaacaaggaatgggctcagagttctgcctcaactgcaccttttccgaggtctgcgagcaggggacgcatttggtctgggtttctgaaaagcgactcgggcacatcatgaagagggtctctagtttctaccaggagctaaacgtctcgtgactgctgcttccttggctattgttttaagctactgttaccttcttgtttgtgaagttgttcatttacttctcagggcgagctgggtacctgaaatttctcttgaaagaactcaagattttcctttattttcatgcttgggggtgggggataagactcctaagca

SEQ ID NO: 716577 - DNA, 249 bp, Homo sapiens
aactccccaggctccatcatctaaacgatattttgtttgtctagctacggtgctcacgttccgacggaacttgtacaggaggcatgcaccgcagtggtgaatacacatcgaccaggctaccatctttacgatatttggaggtcatcacggttctcacgtgtcgacggaacttgtaccagggaggcatgcaccgcagtggtgaatacacgtcgacctggaggcatagcatgcatagctcgggtaactgga

SEQ ID NO: 716578 - DNA, 173 bp, Homo sapiens
actgagcagctggcaggtaaaggcagctacacacccccacaacctcacacaggcaccccgggcgcagtcaggctgcagcacccagacccccgaggtcagtggaccgtcatagagatgactgggagcttcacagaaggtcaccgtgcgacccatgcagagccccctagcctcag

SEQ ID NO: 716579 - DNA, 222 bp, Homo sapiens
cggggggccccccccccctgtttttttcccccctttaaaggcccgggggcggtccccccccccggttttttctttggggggggggggggggcgtttttttccccgggggcccgttttcccctttggccctttttgggggcccttttaaccccggtttttcccaaaagcggggggggggggggccgggttttcccgggtttttttgccccccggggccccgga

SEQ ID NO: 716580 - DNA, 83 bp, Homo sapiens
taagatttcaaactgggttacacactgagataaggctgggttaagggccgaaatttaataaatctgtactgcaagtagacatt

SEQ ID NO: 716581 - DNA, 231 bp, Homo sapiens
cttgtgtgagatcacttgaggttaggagtcacgacagcctgcggagatggtgaaacgccatctctattaaaaatacaaaaagttagctaggcaaggtggcacacgcctgtagtcccagctactccagaggctgaggtgggagaatcgcttaaacccaggaggcagaggttgcagtgaacctagatcacaccactgcactccagcctggacaacacagcaagactccatagc

SEQ ID NO: 716582 - DNA, 170 bp, Homo sapiens
acaaccggcacactctaaacttatcaggtgacatgctgtctcataatcaaatacttcatcataggctgaacataattcattcaaaagcagcaaagtttccccctccctttcttcatttcaaacaaacaccaacacagcagtcagttttcattctggcaggcggcatcctc

SEQ ID NO: 716583 - DNA, 117 bp, Homo sapiens
ggtggtacagagcaatgttggatatgtttcagagcccttgttccagctcttgggacattatagtcaacacagtgtcctgctcgttgcatcttcaaccagtggaaatcatgaacctat

SEQ ID NO: 716584 - DNA, 527 bp, Homo sapiens
ttcaccaggacagatcgacatgaatggagccatcacacttgggacctgccctctttaggacaggggcccaaccccaactcaagatttgcacagatcagaacaacgctgacttcttacgaggaaacacagtttaatttctgcttttcccatataaaagtagggagcagccagttagtgcaacaggtccctttctgggaaagcaaagaacggagatgggatctacccgccgtggcatcttcatgcacttcttaggcacaattcgcatttgcggaaaagctcggagttgccttcatcgcctctgagccacccaccgccctgtctcagtgggccgcatggccaccctcacgctgcttcccgagcctcctcagggctgcctggcggcaccggccggaacagcacagccatattctcgtgtccaggtgcacgtgcctggccctcaccactgtgtggactcaggtcggctccactctcccgccccggttatttctgtgcatttttagcatttgtgtcacctcggggtgactgtg

SEQ ID NO: 716585 - DNA, 396 bp, Homo sapiens
agaaaacttttaagagatatttgcatattctctgccttgttcttatcaacttgaaatgttggcattttctaaccttggttttgttggctacaataattcagtattcatgtcaaaatttctgtgcccatttcaaagaatgatatttaacactatttattattattattatttttagagacagggtctctgtgtcaccccaggctggattgcagtggcacaatcctagctcactgtaacctcgaactcctgggctcacgtgatccccccatctcagcctcccaagtagctggaaccacaggcatgcaccatcatgcccagctaatttttgtattttttgcagaggcagggtctcacctgttgcccatactggtcttgatttctgtgcccatatacagg

SEQ ID NO: 716586 - DNA, 241 bp, Homo sapiens
ggatcccccgaggagtaagtcccattgtattttgactcacagttaaaccatgaaattcacgcatcaacactcacttagacataattcatctcaggacaggtaacgggtgtacaataaaactccccctgccctcaaaatatggcagcttggattgtgggcaaaaaaaatgaaacaataaataacttaacatctttaatcattaagctcacaaattatttaaaattcatttaaatcccagtgt

SEQ ID NO: 716587 - DNA, 838 bp, Homo sapiens
tggtgccacagcaaaacctgtagtacatgatacagtgtgctttccctcctccttttccttccatatatattatgttttgttaaggggcatgcattactttaacgaattttaaagaatctctaaaattagttctgaaggatgttctgagggccagacgattagaagttagtgagtcgtgtggttgctggttgtactttcctatttagaagacagacgcgtctgacagttgttgtgtagcttcatgccgttcccccagtaactaacccatgaacagtacaccccttttatctgacttgtggataatgaccttaaaaatgttaggaaatgggccgggcgcggtggctcgtgcctgtagtcccagcactttgtggcagggccgaggcgagtggatcatgaggtcgggagatcgagagcatcctggtcaacatggtgaaacccgactctactaaaaaaaatacaaaaatgggcgggcgtgttggcgggcgcctgtggtcccagctgcttgggaggctgaggcaggagaatcacctgaaatccaggaggcggaggttcgcggtgaagccagacgattggcgcccactggcacctcccaggcctggggcgaacgaagcgagactcccgtccccaaaaatatagaatacatcaaagcaacacaacaacgaactgttcgggctttcaggccctgaagaaagctctaaaaccacttgtggagacgaggccaaggatatgaaaaatggaagggggccagaggaccgcggcacacaacgggggggtctccccaaaaaaggccggggcacgcttctacaatctccgggtcggggcaggcttcaacgggaca

SEQ ID NO: 716588 - DNA, 807 bp, Homo sapiens
  misc_feature (3)..(3): n is a, c, g, or t
cgnggagcgcagagcggtttggtcgttcgttgggcggtgctggtttttcgctcgtcgactgcggctcttcctcgggcagcggaagcggcgcggcggtcggagaagtggcctaaaacttcggcgttgggtgaaagaaaatggcccgaaccaagcagactgctcgtaagtccaccggtgggaaagccccccgcaaacagctggccacgaaagccgccaggaaaagcgctccctctaccggcggggtgaagaagcctcatcgctacaggcccgggaccgtggcgcttcgagagattcgtcgttatcagaagtcgaccgagctgctcatccggaagctgcccttccagaggttggtgagggaagatcgcgcaggatttcaaaaccgacctgaggtttcagagcgcagccatcggtgcgctgcaggaggctagcgaagcgtacctggtgggtctgttcgaagataccaacctgtgtgcccatccacgctaagagagtcaccatcatgcccaaaagacatccagttggctcgccggataccggggagagagagcttaagtgaaggcagtttttatggcgttttgtagtaaattctgtaaaatactttggtttaatttgtgactttttttgtaagaaattgtttataatatgttgcatttgtacttaagtcattccatctttcactcaggatgaatgcgaaaagtgactgttcacagacctagagaaggaggcctgtccgtaagactacagttggtaatttggggatggggatccttctgcttttatggagcaattcctgtatatgactagtgg

SEQ ID NO: 716589 - DNA, 343 bp, Homo sapiens
gacacagacagaaagttcaagtgaggctggattgatgtggccacaagccaggagtccctggtcgaccaagagctggaagaggcaggaaggaccctttatctccaagtctcagagggagcatggctctgctgacaccttgattttgaacttccagcctcggaactgtgagactatatatttctattttaagccacccagtttatggaaatttttatggcagccctaaaaaactaatacaatcgtacttctgataatataaaaatgcatcctcaggataaaaataatctcattataaaaatacacataagtacaaaaaataaagaagagattaaaaatcttcaaa

SEQ ID NO: 716590 - DNA, 1179 bp, Homo sapiens
  misc_feature (256)..(256): n is a, c, g, or t
ctcttgggtttttgtttgttttgtgtgtgttttttgtgtttttgttctttgttctttttgttcttgttgttgttttatgttctgtgtttctcttgttgctatatgttcttgatattgttcctggtagtagccttagagtgctgaagagagaagaggagcgacgcgggagcgagagtgacgtgtagcttctgattcatgtgagcacgcgcgctgcacagtcacacacaactctaccgggtgactagcgggccccttnaaccgagcctttcccccccctttcctctgataccgcctgtgtcatcccagatccgatgacgccggtggtcccctccgccccacctcgggtttccccgccccctgcctcttctgttgaggacttttttgtgcttttcgcttttggcccctggtgctaacccagagtcctcacccggggttttccatgaccatggtgggcaccgttcccagtttcgcctatctctttttgctgattcacattttgtcccaaaccaacccctctctttggacccgccattggaaaagggaaccatctggtatctgaagtatcattgcccttgaggaagaagaccatgctcttaccgggcgtccaatctttgaggtcacgagaagagaatgcccttttagaacgccaaatctacctcccaacccagacccacttgtttcttgaacttgccctgttttggcccttagctgccttataaacgttttaccacgccaccctttggaatgccctagttttacccaatgcacgcgtgtgtttcccttgccctttttgcacctttggtgaatttaacgtgcctccactaacctgagaactgtgccgagactcccccaaacgcatttatgtacttctcttctgaggatagcaagatagcctgtttctttctgaagagattacgcttactctctcctctgggaatactcgtggatattgaagatggctcctcgcctctttcaccgctggggaatacagctgaagatgttttagaaactgctgcccagcaccaaacccgaacttcccgatggggtggtccaataggagagcaccttcagagggaagagaccatttccacaagaatcgccccccactataccttccggatgaatatttttctttttgccctcttttgggataaataattttcccccctttctatggga

SEQ ID NO: 716591 - DNA, 801 bp, Homo sapiens
  misc_feature (3)..(3): n is a, c, g, or t
cgnggagcgcagagcggtttggtcgttcgttgggcggtgctggtttttcgctcgtcgactgcggctcttcctcgggcagcggaagcggcgcggcggtcggagaagtggcctaaaacttcggcgttgggtgaaagaaaatggcccgaaccaagcagactgctcgtaagtccaccggtgggaaagccccccgcaaacagctggccacgaaagccgccaggaaaagcgctccctctaccggcggggtgaagaagcctcaatcggctaacaagggccccggggaaccggtggacagcattcgacgcagcattccggtcagtaaatcaaggcaaagttcagaacctggagctaggttcaattccaggggaaagcctggcccctttccaagaaagatttagaggtggaagagggaagaatccaggaaccaaggagaaattctccaaaaaaaaccccaggaatcttgggaaaaggttatcccgagtaggccggccaagccccaaatcgcaggagatcgagccagacttggcaacggagagaaagggaataaaagccaggcacaacagacgtagaaataaccccattgtgggacagtagaacaaaacagtatgagtacacaaaaaaagaggacaatttttacacgaaaaaaacccccgggggtcgtggtgtgtaacgcccccaatattccccacaaaaaacggctcactaatagagagggatagcgcagcagggctattcacaacacacacaaatatcgctagagtgggcgccccacaaagagaagggggaacaaatatttgcccagag

SEQ ID NO: 716592 - DNA, 405 bp, Homo sapiens
gatcatcttgaggtcaggagtttgagaccagactggccaatgtggcgaaaccccgtctctactaaaaatacaaaaatagcaggacaggccgggcgcggtggctcacgcctgtaatcctagcactttgggaggccgacgcgggcggatcacgaggccaggagatcgagaccatcctgactaacacagtgaaaccacatctctactaaaaatacaaaaaaattagccaggcgtgttggcggacggcctgcagtcccagctacttgggaggctgaggcaggagaatggcgtgaaacccgggaggcagagcttgcagttgagcaagatcgcgccactgcacttccaagttcatatcaagtaacattggggtaaccgaagctcgaaattccgtaatccatggtcattagc

SEQ ID NO: 716593 - DNA, 459 bp, Homo sapiens
cggcacgagctggagcagacgcctccaggatctgtcggcagctgctgttctgagggagagcagagaccatgtctgacatagaagaggtggtggaagagtacgaggaggaggagcaggaagaagcagctgttgaagagcaggaggaggcagcggaagaggatgctgaagcagaggctgagaccgaggagaccagggcagaagaagatgaagaagaagaggaagcaaaggaggctgaagatggcccaatggaggagtccaaaccaaagcccaggtcgttcatgcccaacttggtgcctcccaagatccccgatggagagagagtggactttgatgacatccaccggaagcgcatggagaaggacctgaattagttgcaggcgctgattgaggctcactttgagacaggagaaagaggatgagcccgatgagaggctttctcaacatgatgcatttgggggt

SEQ ID NO: 716594 - DNA, 644 bp, Homo sapiens
  misc_feature (3)..(3): n is a, c, g, or t
cgnggagcgcagagcggtttggtcgttcgttgggcggtgctggtttttcgctcgtcgactgcggctcttcctcgggcagcggaagcggcgcggcggtcggagaagtggcctaaaacttcggcgttgggtgaaagaaaatggcccgaaccaagcagactgctcgtaagtccaccggtgggaaagccccccgcaaacagctggccacgaaagccgccaggaaaagcgctccctctaccggcggggtgaagaagcctcatcgctacaggcccgggaccgtggcgctggaacagacctgtaatccctagactttggccggccgctgatcgcgaagctgcccttccagaggttggtgagggaagatcgcgcaggatttcaaaaccgacctgaggtttcagagcgcagccatcggtgcgctgcaggaggctagcgaagcgtacctggtgggtctgttcgaagataccaacctgtgtgcccatccacgctaagagagtcaccatcatgcccaaaagacatccagttggctcgccggataccggggagagagagcttaagtgaaggcagtttttatggcacattggcctcatacggacttattggcccaaggcccttatgcctaactagggacgttcccgcggctgtccccg

SEQ ID NO: 716595 - DNA, 471 bp, Homo sapiens
  misc_feature (223)..(223): n is a, c, g, or t
cggcacgagctggagcagacgcctccaggatctgtcggcagctgctgttctgagggagagcagagaccatgtctgacatagaagaggtggtggaagagtacgaggaggaggagcaggaagaagcagctgttgaagaagaggaggacttgagagaggacgaagacgagcaggaggaggcagcggaagaggattcttaagcagaggcttagacccaggagaccanggcagaagaagattaagaagaagaggcagactgagcgggaaaagaagaagaagattctggcttagaaggaggaaggttctggccattaccaccttaattaagatcaacttagggagaaggccaaggagctttggcaaacatctataacttggaggcgaaaagttcacctccagagagttcagcagcgaattttagatcattttctccaacaggatcacgataccagaagtctccaacccgcggaggct

SEQ ID NO: 716596 - DNA, 750 bp, Homo sapiens
ctcgttgttcggttcaagcaattctgctctcagccttcctgtgtgcctgggacagcgggcgtgcaccaccacacacggctaatttttgtatttttattagagacagggtttcaccatgttggtcaggctggtcttgagctcctgacctcatgatctgctcatacctgtaatagccgcactttgagaggctgaggaggacagattaatttgccgtcagtaggttgaagactagactgtacaggatggtgaacgtggggcttatgagattcgtccggacatgatggcatgtgcctggaattccagctactgtgcttccagaggttggtgagggaagatcgcgcaggatttcaaaaccgacctgaggtttcagagcgcagccatcggtgcgctgcaggaggctagcgaagcgtacctggtgggtctgttcgaagataccaacctgtgtgcccatccacgctaagagagtcaccatcatgcccaaaagacatccagttggctcgccggataccggggagagagagcttaagtgaaggcagtttttatggcgttttgtagtaaattctgtaaaatactttggtttaatttgtgactttttttgtaagaaattgtttataatatgttgcatttgtacttaagtcattccatctttcactcaggatgaatgcgaaaagtgactgttcacagacctctccctggagcgctctttgcttaaggagtatcacgtgcccacatatgtttctggttgcgtcc

SEQ ID NO: 716597 - DNA, 282 bp, Homo sapiens
atcgtggtgctgatatggcttggatgggcttagagatgtcagctggagtgagtctgaaataatgtacttgtgggcttcagtgtgcccggctgcacaactgcatttcgtgggtaatttatttcctttgaaatggattctcatggaactccagccggggcacctttgaccactgattgaccaaaactcggtctgaaacccgggcacctcggaaagccgaggcaggcagaattcactcgcggtatagcagcaccaagattccgcgggggactcctctagagtcac

SEQ ID NO: 716598 - DNA, 489 bp, Homo sapiens
cggcacgagctggagcagacgcctccaggatctgtcggcagctgctgttctgagggagagcagagaccatgtctgacatagaagaggtggtggaagagtacgaggaggaggagcaggaagaagcagctgttgaagaagaggaggacttgagagaggacgaagacgagcaggaggaggcagcggaagaggatgctgaagcagaggctgagaccgaggagaccagggcagaagaagatgaagaagaagaggaagcaaaggaggctgaagatggcccaatggaggagtccaaaccaaagcccaggtcgttcatgcccaacttggtgcctcccaagatccccgatggagagagagtggactttgatgacatccaccggaagcgcatggagaaggacctgaattagttgcaggcgctgattgaggctcactttgagacaggagaaagaggatgagcccgatgagaggctttctcaacatgatgcatttgggggt

SEQ ID NO: 716599 - DNA, 397 bp, Homo sapiens
  misc_feature (3)..(3): n is a, c, g, or t
cgnggagcgcagagcggtttggtcgttcgttgggcggtgctggtttttcgctcgtcgactgcggctcttcctcgggcagcggaagcggcgcggcggtcggagaagtggcctaaaacttcggcgttgggtgaaagaaaatggcccgaaccaagcagactgctcgtaagtccaccggtgggaaagccccccgcaaacagctgcgcacggccgccagggcgctctctctaccgccggggcgaagaaccctcatcgctacaggcccgggaccgtggcgcttcgagagattcgtcgttatcagaagtcgaccgagctgctcatccggaagctgcccctctccctgctccccccccgacccgccaccacctccacccaccccccttcccacgcgccccccccc

SEQ ID NO: 716600 - DNA, 1753 bp, Homo sapiens
  misc_feature (3)..(3): n is a, c, g, or t
  misc_feature (1306)..(1306): n is a, c, g, or t
  misc_feature (1693)..(1693): n is a, c, g, or t
  misc_feature (1695)..(1695): n is a, c, g, or t
cgnggagcgcagagcggtttggtcgttcgttgggcggtgctggtttttcgctcgtcgactgcggctcttcctcgggcagcggaagcggcgcggcggtcggagaagtggcctaaaacttcggcgttgggtgaaagaaaatggcccgaaccaagcagactgctcgtaagtccaccggtgggaaagccccccgcaaacagctggccacgaaagccgccaggaaaagcgctccctctaccggcggggtgaagaagcctcatcgctacaggcccgggaccgtggcgcttcgagagattcgtcgttatcagaagtcgaccgagctgctcatccggaagctgcccttccagaggttggtgagggaagatcgcgcaggatttcaaaaccgacctgaggtttcagagcgcagccatcggtgcgctgcaggaggctagcgaagcgtacctggtgggtctgttcgaagataccaacctgtgtgcccatccacgctaagagagtcaccatcatgcccaaaagacatccagttggctcgccggataccggggagagagagcttaagtgaaggcagtttttatggcgttttgtagtaaattctgtaaaatactttggtttaatttgtgactttttttgtaagaaattgtttataatatgttgcatttgtacttaagtcattccatctttcactcaggatgaatgcgaaaagtgactgttcacagacctcagtgatgtgagcactgttgctcaggagtgacaagttgctaatatgcagaagggatgggtgatacttcttgcttctcatgatgcatgtttctgtatgttaatgacttgttgggtagctattaaggtactagagttgataaatgtgtacgggtccttttgcaataaaactggttatgacttgatccaagtgtttaacaattggggctgttaagtctgaccatacatcactgtgatagaatgtgggctttttcaagggtgaagatacaagtcttaaccacagtgtaacttacagtttcctttaaaaaaaaaaaaagtaaacctggcagctatagaatacactatgtgcatttataatagctattttatatatggtagtatcaacatttttaaattaaatggttttacattcacaagtggtgggggagtctggtcattaaggtgtggtgtaatttagagtccagttgggttttcttctgactgcactgggtctcatagtagtaaaaggctatgcgcatttatacctggcataagtcctcattctaccacatgttaaccctctagctgataatgcaaacactaacggggggatttnatttataagggctctagaaaaaacgagttattcacaccagcatcatcttaactaacattctgaactagttagtgcagcttttcatggtgttgtgtggttggtctcataactaggttgagtttttctcctctgctgaggaaacagtaccgaagttctttttcttgtggcatttgtattataaaaacttggtgtgggggaggagcacaaaactccagcccattgaacctctgccaattaagatggtgttgggttaggttacatctggttactgtcctgggaaaatcattttatagagatggccttccaagtggttttaaaatttactgaagtttttaggtcaattatgtatgttgactaaatttacaaataaacttgtttatccaacananaaacaaaaaaggcaagaaacaaaaaaaaacggcaacacacacgagggggggggccaac

SEQ ID NO: 716601 - DNA, 1798 bp, Homo sapiens
  misc_feature (3)..(3): n is a, c, g, or t
  misc_feature (1306)..(1306): n is a, c, g, or t
  misc_feature (1738)..(1738): n is a, c, g, or t
  misc_feature (1740)..(1740): n is a, c, g, or t
cgnggagcgcagagcggtttggtcgttcgttgggcggtgctggtttttcgctcgtcgactgcggctcttcctcgggcagcggaagcggcgcggcggtcggagaagtggcctaaaacttcggcgttgggtgaaagaaaatggcccgaaccaagcagactgctcgtaagtccaccggtgggaaagccccccgcaaacagctggccacgaaagccgccaggaaaagcgctccctctaccggcggggtgaagaagcctcatcgctacaggcccgggaccgtggcgcttcgagagattcgtcgttatcagaagtcgaccgagctgctcatccggaagctgcccttccagaggttggtgagggaagatcgcgcaggatttcaaaaccgacctgaggtttcagagcgcagccatcggtgcgctgcaggaggctagcgaagcgtacctggtgggtctgttcgaagataccaacctgtgtgcccatccacgctaagagagtcaccatcatgcccaaaagacatccagttggctcgccggataccggggagagagagcttaagtgaaggcagtttttatggcgttttgtagtaaattctgtaaaatactttggtttaatttgtgactttttttgtaagaaattgtttataatatgttgcatttgtacttaagtcattccatctttcactcaggatgaatgcgaaaagtgactgttcacagacctcagtgatgtgagcactgttgctcaggagtgacaagttgctaatatgcagaagggatgggtgatacttcttgcttctcatgatgcatgtttctgtatgttaatgacttgttgggtagctattaaggtactagagttgataaatgtgtacgggtccttttgcaataaaactggttatgacttgatccaagtgtttaacaattggggctgttaagtctgaccatacatcactgtgatagaatgtgggctttttcaagggtgaagatacaagtcttaaccacagtgtaacttacagtttcctttaaaaaaaaaaaaagtaaacctggcagctatagaatacactatgtgcatttataatagctattttatatatggtagtatcaacatttttaaattaaatggttttacattcacaagtggtgggggagtctggtcattaaggtgtggtgtaatttagagtccagttgggttttcttctgactgcactgggtctcatagtagtaaaaggctatgcgcatttatacctggcataagtcctcattctaccacatgttaaccctctagctgataatgcaaacactaacggggggatttnatttataagggctctagaaaaaacgagttattcacaccagcatcatcttaactaactagttcagaatgttagttaagatgatgctggtgtgaataactaacattctgaactagttagtgcagcttttcatggtgttgtgtggttggtctcataactaggttgagtttttctcctctgctgaggaaacagtaccgaagttctttttcttgtggcatttgtattataaaaacttggtgtgggggaggagcacaaaactccagcccattgaacctctgccaattaagatggtgttgggttaggttacatctggttactgtcctgggaaaatcattttatagagatggccttccaagtggttttaaaatttactgaagtttttaggtcaattatgtatgttgactaaatttacaaataaacttgtttatccaacananaaacaaaaaaggcaagaaacaaaaaaaaacggcaacacacacgagggggggggccaac

SEQ ID NO: 716602 - DNA, 1671 bp, Homo sapiens
  misc_feature (55)..(55): n is a, c, g, or t
  misc_feature (66)..(67): n is a, c, g, or t
  misc_feature (303)..(303): n is a, c, g, or t
  misc_feature (1224)..(1224): n is a, c, g, or t
  misc_feature (1611)..(1611): n is a, c, g, or t
  misc_feature (1613)..(1613): n is a, c, g, or t
aagagcctcatcgctacaggtaggtcggcggggaacaatggcccggcgtggccgntttgtgcggcnngtccgctcactcctcccctgctcgctacaggcccgggaccgtggcgcttcgagagattcgtcgttatcagaagtcgaccgagctgctcatccggaagctgcccttccagaggttggtgagggaagatcgcgcaggatttcaaaaccgacctgaggtttcagagcgcagccatcggtgcgctgcaggtaagacaaaggcctggagccgggggagggctgggcggtttccgctccccnagtgggattaatagtgcggctctcgtcctcaacaggaggctagcgaagcgtacctggtgggtctgttcgaagataccaacctgtgtgcccatccacgctaagagagtcaccatcatgcccaaaagacatccagttggctcgccggataccggggagagagagcttaagtgaaggcagtttttatggcgttttgtagtaaattctgtaaaatactttggtttaatttgtgactttttttgtaagaaattgtttataatatgttgcatttgtacttaagtcattccatctttcactcaggatgaatgcgaaaagtgactgttcacagacctcagtgatgtgagcactgttgctcaggagtgacaagttgctaatatgcagaagggatgggtgatacttcttgcttctcatgatgcatgtttctgtatgttaatgacttgttgggtagctattaaggtactagagttgataaatgtgtacgggtccttttgcaataaaactggttatgacttgatccaagtgtttaacaattggggctgttaagtctgaccatacatcactgtgatagaatgtgggctttttcaagggtgaagatacaagtcttaaccacagtgtaacttacagtttcctttaaaaaaaaaaaaagtaaacctggcagctatagaatacactatgtgcatttataatagctattttatatatggtagtatcaacatttttaaattaaatggttttacattcacaagtggtgggggagtctggtcattaaggtgtggtgtaatttagagtccagttgggttttcttctgactgcactgggtctcatagtagtaaaaggctatgcgcatttatacctggcataagtcctcattctaccacatgttaaccctctagctgataatgcaaacactaacggggggatttnatttataagggctctagaaaaaacgagttattcacaccagcatcatcttaactaacattctgaactagttagtgcagcttttcatggtgttgtgtggttggtctcataactaggttgagtttttctcctctgctgaggaaacagtaccgaagttctttttcttgtggcatttgtattataaaaacttggtgtgggggaggagcacaaaactccagcccattgaacctctgccaattaagatggtgttgggttaggttacatctggttactgtcctgggaaaatcattttatagagatggccttccaagtggttttaaaatttactgaagtttttaggtcaattatgtatgttgactaaatttacaaataaacttgtttatccaacananaaacaaaaaaggcaagaaacaaaaaaaaacggcaacacacacgagggggggggccaac

SEQ ID NO: 716603 - DNA, 833 bp, Homo sapiens
  misc_feature (12)..(12): n is a, c, g, or t
  misc_feature (15)..(18): n is a, c, g, or t
  misc_feature (20)..(20): n is a, c, g, or t
  misc_feature (23)..(23): n is a, c, g, or t
  misc_feature (25)..(25): n is a, c, g, or t
  misc_feature (345)..(345): n is a, c, g, or t
  misc_feature (348)..(348): n is a, c, g, or t
  misc_feature (360)..(360): n is a, c, g, or t
  misc_feature (363)..(363): n is a, c, g, or t
  misc_feature (368)..(370): n is a, c, g, or t
  misc_feature (374)..(374): n is a, c, g, or t
  misc_feature (381)..(381): n is a, c, g, or t
  misc_feature (392)..(392): n is a, c, g, or t
  misc_feature (400)..(400): n is a, c, g, or t
  misc_feature (406)..(406): n is a, c, g, or t
  misc_feature (410)..(410): n is a, c, g, or t
  misc_feature (412)..(412): n is a, c, g, or t
  misc_feature (441)..(441): n is a, c, g, or t
  misc_feature (727)..(727): n is a, c, g, or t
tcggctaggtangannnngngtngncagctcctgtgcctgccagtcggtgcccctcccgctccagccatgctctccgccctcgcccggcctgccagcgctgctctccgccgcagcttcagcacctcggcccagaacaatgctaaagtagctgtgctaggggcctctggaggcatcgggcagccactttcacttctcctgaagaacagccccttggtgagccgcctgaccctctatgatatcgcgcacacacccggagtggccgcagatctgagccacatcgagaccaaagccgctgtgaaaggctacctcggacctgaacagctgcctgactgcctgaaaggttngtngatgtggtagtnatnccggnnnggantccccanaaagccaggcntgacccgngacganctgntncaacaccaatgccacgattgtggccaccntgaccgctgcctgtgcccagcactgcccggaagccatgatctgcgtcattgccaatccggttaattccaccatccccatcacagcagaagttttcaaagaagcatggaagtgtacaaacccaacaaaatcttcggcgtgacgaccctggagcatctgttgagagccaaaactttggtttgcaagcttggaacgggtttggatcccaggtccgagtctaccgtccctgtcacttggttggccatgcttggggaagaacatcattcccctgatctctcagtgcacccncaaggttggacctttccccaggaccagtgacagactcactgggcggatcaggaggccggacggaggtggtcaaggtaaaagcggagcaggttctgtcaacctttca

SEQ ID NO: 716604 - DNA, 422 bp, Homo sapiens
  misc_feature (138)..(138): n is a, c, g, or t
  misc_feature (281)..(281): n is a, c, g, or t
  misc_feature (289)..(289): n is a, c, g, or t
  misc_feature (371)..(372): n is a, c, g, or t
tggttcagtgtatccgaaaatctagtgaccaaaagaaggaatgataggaggtgaagtctttcagcctcaataagaaggtgaagtgcactggaagccaattgaaggatttaagaaatggagtatctggccgggcgcagngtgtcacgcctgtaatcccagcactttgggaggccgaggtgggaggatcaagaggtcaggagatggagaccatcctggctaacatggtgaaaccccgtctctattcaaaataaaaaatttttttaaaaattagccaggcgtgntgcgggcncctgtagtcccagctactcgggaggctgaggcaggataatggcgtgaacccaggaggcagggcttgcagtgagccgagtacnngccactgcactccagcctgggcgacagaatgtcggtccgtctcaaaaaaa

SEQ ID NO: 716605 - DNA, 658 bp, Homo sapiens
  misc_feature (12)..(12): n is a, c, g, or t
  misc_feature (15)..(18): n is a, c, g, or t
  misc_feature (20)..(20): n is a, c, g, or t
  misc_feature (23)..(23): n is a, c, g, or t
  misc_feature (25)..(25): n is a, c, g, or t
tcggctaggtangannnngngtngncagctcctgtgcctgccagtcggtgcccctcccgctccagccatgctctccgccctcgcccggcctgccagcgctgctctccgccgcagcttcagcacctcggcccaggtatggccagacgaggggctggcctgcatggctggatggccccccgtgccctgggccactgtgctgtcccctgtgttctgctggtgcatgctctagaccactctccatgtgccatgccctggacctgcatggtgatgccctgtgcacttggcttggatgacttgtgagcgccctgtgggcatgtgccctgaacacttgtgccttgtgaaggttgcagagtggagatgaaaaagcctgtgtgtgaaaaatggtgtgtgctgatgggtaagtaccctgactcccaggtggacctgtggtcccatatttgatcatgtgagttcccccacaagtgtcgtcaccaagaatattgcccaagatgggaccccttggcttcgtattgggccattttgccaacctggcactttcgacaatggtggtcttgggcgacacaacccaatggggccttcatagcaattacgtaggaaaatggtaaaaagcgttacccagatttaatttatccttggcaaggcggattcccatttgtgc

SEQ ID NO: 716606 - DNA, 933 bp, Homo sapiens
  misc_feature (552)..(552): n is a, c, g, or t
tcaaaaatggtcgttggttgttgtatgcgcgtcgcaacgagagtaacaataaggttcgctgcttgaagaaaaagcgtgtgttagtatggcccccctaaagcccgggggtgtgcccgcccccactaagtgctccccacacatgttcgcgcacgggttgaaaacaccagcccggggttacaccacagcccgtgcgccaaaagaaggtcttcttaaagcaccgctttagaatgtgtgggcgccaccccacacgcatgtataaattgttgcgagggcaacaacccctctcctgctgtctgtcatcatttatatctttgcgtgagaaaggttctctgtggagtctctctccaacattatggtgtgagagagacttcgcccgttagttggcccccccagatcggaggtgtcttgtacaaagcgctggggtagatagcccaccggctagccacaatgtgggcttttacagagatattctcccacccagaggatagttcgataatttctccgaaaacacatatctctcccgcggcacttcaatgtctcttcaagtcgcgncccctgtattatctataaccccacagagaggcctccccacgtactcaccattattatttagccgcgcaccacccaccgccctcccttagttaaaatggaaggctatataatagcccccttcttttgtccgaaaatataatttacaatgtaccccctgaaagcagtctgccttattacaacctcttctcgagcacccccaccatgttgtatcatgcggttatccacccttggagctccccccgaacgctcttttttagtttttgaagcaatcacctccccttatttaacaacggtccctactttcctttttaactcttgcaaccacttctcctcttacaacgagacaccccgggaaccccattttaaaacccccccataaca

SEQ ID NO: 716607 - DNA, 219 bp, Homo sapiens
  misc_feature (64)..(64): n is a, c, g, or t
  misc_feature (78)..(78): n is a, c, g, or t
  misc_feature (80)..(80): n is a, c, g, or t
  misc_feature (87)..(87): n is a, c, g, or t
  misc_feature (90)..(90): n is a, c, g, or t
  misc_feature (95)..(96): n is a, c, g, or t
  misc_feature (101)..(101): n is a, c, g, or t
  misc_feature (140)..(140): n is a, c, g, or t
  misc_feature (142)..(142): n is a, c, g, or t
caggttctgacagctttacttgcgaagacaagtgcttcttttcacgactgttatttcacggtcntgacttggaatccncntgagctnaanatggnncctanatgcaatgacaggtgttcttgtaagagacaaaatagaananggaaaaggccatgtgaagctgcaggcagagccaaggaaggcctggaatcaccaggagctggaagagggagcgtgtcc

SEQ ID NO: 716608 - DNA, 702 bp, Homo sapiens
catggaccgaggtggctatgttggaggaagacgaggcgaccctcgacccctccgcagtacaccgctgagacacgaccaccgcaagtagtgtacatccgcacagtccacagactcatctctagcccttgctatgcctggccatcatcactcgatgccgatgatgccagcactacagaccatctctgtatttatagacaccatgctgtcctccgctctacctaccgtttctgcctgccacttaagcacttatgcgtatccctagtattcacaatttcctccactatcttcctgcatcctcgcccctcttttactattccataccacctcctccctactctatctcgcctagcgtctcactctgcactactctctaccctcttctccccttctttccttccctgtatcattctgctcctctcccttcctctacctttcagctcctcactcattactcccctctcccctcctcctatctcctcttccccccctccttccctcctctactctttctccctccttctctctcccctctttttctctcctcctcctccccacctcagtccgctcattatgcctacatctacttcccttccgccatttctctctcacactccctacttcttctcgctccctccatcccctcactcctgctacttcctcctatcctcctcctcctctctctttccccctctctctcccccg

SEQ ID NO: 716609 - DNA, 492 bp, Homo sapiens
ttataactcccaatcttgctcataaatatctactttattttctgtaatccttcttctcttctttatcttgcattgacaaggtctccccagcatcatgaactccacttttcaacttctgaggctcaaccttaactctgattcttaacttgctgtactttcttagatacaaatctcatgttcaatttgtaatacgtaatttatttaattttaaaatgttgtcaaatatgacaacatagtaatagttctgggtagtggtatatgatatttctttgaatattctatgtgtttttcatattttacagcatttttcaaaataaaaacaaaaattctagtaatccttattttatcaaattccatacagttttaaccttcctatagccattcaacgggtgccctgagtgagtgattcctttcttttcgacccttacatttgtagttttagatataattttctctattcagcagtaaattataatctaagctatttatctt

SEQ ID NO: 716610 - DNA, 113 bp, Homo sapiens
atccatagcagacaaaagcagaaaaaggcaaacgagaaagaacaggaactcaaggaactccaggatgtactatagacactacagagtacaaacctgagtacgtgaagtcccca

SEQ ID NO: 716611 - DNA, 203 bp, Homo sapiens
gtatgtactccatcagatagaatagctatagcacacacgatagtactacagcatgtatatagtcatataaacataacttctacatgccttaggaaaccaaaaacctagagtgactagctacatagagattagctctgtagtggatgtggagctgaaggtgcagtacctccaacgctttcctgtatgtagtagcctataccaaa

SEQ ID NO: 716612 - DNA, 396 bp, Homo sapiens
ctcgaactcctgacctcaggtgatccacctgcctcggcctcccaaagttctcggattacaggcttgagccactgcgcccggcctatttatttatttttgagacaggatcttgctctgtcacccaggctggagtgcagtggtgtagtcctggctcactgcggcctccgccttccgggctcaagtgatcctcccgcctcagcctcccaagtaactgggaccataggcttgtgtcaccatgcctggctagttttttgcgtttttagtagagacagggtctcactgtgttgcccaggctggtctcgaactcctgagctcaagccatctgcccaacctcgagccatccacaacagtggctaggcgacttacagcacatagccaccatgcctggtctcatac

SEQ ID NO: 716613 - DNA, 275 bp, Homo sapiens
ttttcttaccctactttttttttttaacagaaaatttccaacccctgaaagtagagaaaatagcataatgaacccggtatgctgtcagccatcctcagcaatcatcgggggagggccaatcttgggtcatttaaaacctcccttttttcctcccttaaagggtttctttaaagcaaattccccataaaatttcagcgggaagggcttctttcaatatatatttgtaagagataagggcttttgaaaacatatggcccccaacctccttttcccta

SEQ ID NO: 716614 - DNA, 225 bp, Homo sapiens
ccccttccttaaatttcccccccccttttgaaaggcccggggccggactaaaattttccttttatggaatctctgggggggccttcccggccctggattaagggtttccccccccccagccaatttagggccccctaaaaaccaatctctgggggggtggttttttagggctggtttttttaattaagggggttttgttttaattaaatttttttgtggttttga

SEQ ID NO: 716615 - DNA, 211 bp, Homo sapiens
  misc_feature (33)..(33): n is a, c, g, or t
  misc_feature (36)..(36): n is a, c, g, or t
  misc_feature (39)..(39): n is a, c, g, or t
  misc_feature (49)..(49): n is a, c, g, or t
  misc_feature (70)..(71): n is a, c, g, or t
  misc_feature (81)..(81): n is a, c, g, or t
  misc_feature (93)..(93): n is a, c, g, or t
  misc_feature (103)..(103): n is a, c, g, or t
  misc_feature (113)..(113): n is a, c, g, or t
  misc_feature (123)..(123): n is a, c, g, or t
  misc_feature (134)..(134): n is a, c, g, or t
  misc_feature (142)..(142): n is a, c, g, or t
  misc_feature (146)..(146): n is a, c, g, or t
  misc_feature (159)..(159): n is a, c, g, or t
  misc_feature (166)..(166): n is a, c, g, or t
  misc_feature (181)..(181): n is a, c, g, or t
  misc_feature (201)..(201): n is a, c, g, or t
ccccaacatgaccacacgtgggtgctgaactcnggncgncgtgcccacncggcatggtcctcccgagctnncgacagcatnacctcacccggncccatgctgntggcccggtncagccctggntgggcgcgcgnctgcgtgntgtnctgattgcccctnagccgcncaccccacgtttctngtgaccgggtgctctgcagntgttaaacgg

SEQ ID NO: 716616 - DNA, 250 bp, Homo sapiens
agcacttctgcagctctctctgatgctctcatgagcccgaaggcagcatatacagctgctagctgttctctatcaatgaataccggagttcagctcctttccatagttgggaccaaaaagcctactggcattcttaggcgctctgtgcaatagccaacaagcctcaaccaaaaccgtctgtggccacatgcacctccagctcaaacaggtgcccctggttaattacttgtagtggcttgtaggctgctga

SEQ ID NO: 716617 - DNA, 950 bp, Homo sapiens
ggccggtgcagatcacgggtttgctctttgcatcataagaggggactcgcatgtgcattctagcacggcaagcttgagtcaggacccttaattcagatcctcaagttggctggagggcagatctcgcgagtagggtacctaggtgactatgaaatgatctattttcgtgggcaacgcggtgaaaaaatattgcttcgcgctggtgtgacggcaggtacatgcctgcaccagaaggtggcgttcgttaacgggaatgcccgaagctgtgggaataaaggtgagcggtcgtgcggaagacaggggtatgagctcaggacagtagcccgtaggccatggaagagtaagacggccagcaaagaaaatctgacgaaagaggcacgcaggagagggcccagctcctgtatgaggaccccccagtatcagaaaacctcacccagatggtggaaaccatgcgcacactcaagatctgctctttgagaatgtggatgggcttcgagcctggcattagtgacatgcacgaggattagattgggtaaaggaagaagccccagatatactgtgccttcaagagaccacatgttcagagaacaaactaccagctgaacttcagagagctgcctggactctctcatcaatagtggtcagctccttcggacaaggaagggtacagtggcgtgggcctgctttcccgccagtgcccactcaaagtttcttacggcataggcgatgacggagcatgatcaggaaggccgggtgattgtggctgaatattgactcggtttgtgctggtaacagacattatgtacctcaatgcacggcgaggtctggtacgactggagtaaccggccagcgctgggataaagcttcgcgaagttctgaagggctgggttcccgaaagcccctgtgtggtttgggaactcctgtggccttgcgaattgacctgaacccag

SEQ ID NO: 716618 - DNA, 322 bp, Homo sapiens
  misc_feature (38)..(38): n is a, c, g, or t
gtctggatatctttgatttataatctttcttatatttnagataactgatatagctcactactatttaatgtttatctgccttgataactctttatgttgtgtttataggccagagtccctgtagacacatgtactaattgaccagaattacacaataaaattgcagagctacatagtagcagaatagtaatttgccaaattattttaataggtcaatactgaaaggataatattatttgctgacttttattaagacctatattaagattctatagtgttatatttctaaggttacaagtttttttcaagaagcaggaactgg

SEQ ID NO: 716619 - DNA, 155 bp, Homo sapiens
agcggagtactggcctcataactgatctacacagtccctgcaaagggttcctaactttgtggtcagtaaagaatgtcactttctaacagagtccaggagctcagaaggtttatacttaggacctcaagaagaaaagggtcacccacaactcacag

SEQ ID NO: 716620 - DNA, 1828 bp, Homo sapiens
  misc_feature (1389)..(1389): n is a, c, g, or t
gtacggaggagcttcctggaccccgagcgagaagtgatgtcattcatctcaagactgatagtccaagggtagaagtatgtcacataacatgagtacattcgtaaagagcacgtgcacaacgttcactgatatgcagctaatggcgtcgcacgtgagtggtactatcacgccgccatcgtcgctgcgtgcatccatgtgacctatatgtacgctcggctgtcttgcgctgcctattgtctcacatgaagaggcaggggctcagtcgacaatctgacctcataggcacgtcctactcagctacaagtgcgcgtgcaagacctcgcacgccctgcagcgccagagaccccttagtcaccctgcctgaactaccacttctctgtactcgactagcgtcatgcgcacgtcattgaactgcccccaatcttggatctacgactacagatccagacgatcctcccgcgataagcttccgctgcgtcagcggaaaacgacacgaggaccagcgaccacgtcctagaatagtaacgctcgtcacgaggctcgagtctagtacgggtggctcccccttagactttgagggcaacaaaagccaaaggggcacccaagcgtggtgatagaaaaggtatggccacgactatggcggaacactctcgcaaaaagtgtttaccccccacgtgggaattccgacggtaagcgagccctagcaggttaggcgactccctgcgaggtaatgccattccacttgagcaatacggggcacggccatctgggtaatccaatccactataggtttaaccttcgccaccatatggaggggaaaacggtggtaccgcctcagggccctttactaggactaggcggaactgcgtcaacacgctctagttccttaaccagccgcaatagggccacgcgacacgtctctggtccactctgaagcgaggtgtggctcgtatggaccgctcttccaatataatcgctacatagtcgacctgtagcccctaaactttcctacaagaggaggaacccgcttatggtcacaccagggtcctcacctagaaggagaattatggcaccaggaacttgaaccccataaggggggccttaccaggaaaacgtagtgaggtcatgaaccgcaatcacaacatttagcaggcttccccaagtcggaaccggctatatcccggaatcttgtaacatcaaccgggctatttcatgtgtgcccccttatctacattatatctccgctgcagactatcatcgcactttaaaccgtttgaaaagagtcccgccacattatccgcttttgtgcgcacgccaaccgcgcggtcaacacgggagatgccccgtgaaccaggtaacgacatcaatggcgttatttcacacaggacnctcacacaatcgttgtccccaaatctttcagcgacgatcggagaatgcctaatcgcgcgcaatatacggtgatgcctatgcgcgcacacacatggagtatagctctcccaaaatacctgatgcctgtgccttccctgttagggcgagctgttccctcttccatcggcgctgggaaatctacctctcccatacaggtctcgtgatagtctcccgtgtttgacctgcggatctccgtcgctcgcgacgaggctccgcatcgtgccggttaatcggtcaagcgcgctttttcgtcggctttgtgtgctcataagacgccctgtcctgtgtagttcctcccatcggcggccgtctcctgagctcgctctatgccctgcgccggttttgtgtcacctctgatcagtgctggctgccgtgtctccattcgcccccgtagccgcgg

SEQ ID NO: 716621 - DNA, 189 bp, Homo sapiens
aacaaatccatgtctcccatcaggaaagatcattggaatgccacgggatactcctccttcatcctgtaacggtcagcaataaaaaccaaattatggggctgctattgtcacactagcatagagaatgtgttgaaatttaactattgtaagcttgtatgtggtcctagatctggtaattcctttaagacc

SEQ ID NO: 716622 - DNA, 1006 bp, Homo sapiens
atatgacattgtgttggaaatggatgagatcaagccatgattcttccagatactgatattcggtccttgctaattggagctaatgacactgttaattcagcagctcatggaagatccctaattctattattgcaggctatgccatgctccttgaggtctggaaatcaatagcagtgtgattagttcatgaaggaggtcttatgggtgttggctatgctgcacgtggacaatccatatcttctactaagacctaacatggccatgcttctatgtgtgatgccaagaaaacatgtgacgcgctccagggcgaaatgttagtagaatcctatcagaagtaaactgttaacggatcaatctgttagctaagtaagtgcctacctctgcagttcctgggatacatggcacaactataagtactctagtatacatggtgatgtacatctgtagcaaagctcttggagaaaatgatcgactgaagaaagcaaagcaaaaactgtatagagagatttttcaagatagcagtaatccctcaatgttctcacacaacaatggattgtaaaattctagaatgtcttttctgtgcatatttttgtgttaggaatcaacagagtatctgataaaaggagtacagacacagcctcattctagatgtagtcctgtggattttatgcctcctcagtaaccagaaatgttttcaccaaactaagtgtgtcaggatttcaacgacaacattatacatgggctctgaaatatctgacacaatgtaaacattgcaggcacctgcatttatgtttgtctttttcacccaaaggtgactaagtttgggaactttaatagacttttgaccgttccctttaattcaccgcagttggattagtctgttcaatcggtctaatttgaaaaatgggctcagagttattttcaagggcatttgtcacaacttttgtaaacacagggggtaaatactcacaaagtcgggaccaagcagggttcgttgcttcaaccg

SEQ ID NO: 716623 - DNA, 313 bp, Homo sapiens
aattatttcaatttttgaattccctggggattttttactgccccttccaagcccttaagtgttagatttaacgtggtccagggtctgtttgaggggacttaaaaaatccgaaccaaacttttattatcccgagttctgggaaaggtcccccccttccaggaataatgttttgggaaaccctgaaaaggaattttccccggattataaattgggggtttaaaaaaaaaaaacttttttgaatgcccacccggcgggggaaaccaggcagtgggcccgttttaaaaaatgaaaaaaaataaaaactttttaggga

SEQ ID NO: 716624 - DNA, 211 bp, Homo sapiens
cccgagacgcacgtggctgagtctgtgagccagcagattttgcgccagaactttggcgcaatgcctgtgacgtgcctgtgaccaagaccaagaagaagaaggctgagggcacgtgtacaccgacgaagacttccagaagttccagcaggaatacttcggaagctaggctccctggagggcacggtgaagaggcctatcaagccctgaaggc

SEQ ID NO: 716625 - DNA, 155 bp, Homo sapiens
gcagctcaatggttgctctgcgtctcgtcccgaagtgacctgcttgttcctgacaaggacactgaggattgcagtgcctggaagcaagatccttccaggagagcggctccacctgagccccacggtggcctgaggccaagagagaaggctctgag

SEQ ID NO: 716626 - DNA, 446 bp, Homo sapiens
  misc_feature (26)..(26): n is a, c, g, or t
  misc_feature (28)..(28): n is a, c, g, or t
  misc_feature (146)..(146): n is a, c, g, or t
  misc_feature (211)..(211): n is a, c, g, or t
  misc_feature (245)..(245): n is a, c, g, or t
aacctgtatgatatctacttatgtcngnaatactcactctacttcacttatttaaacccgaccggactgaaggtagttgcggtatagactaaaggcctgggttcacagtttcccagttccttttgagagagcgggagggagtgaancagagggaggtgatcataaggattgctagagaaaagatgcacacctaaaaacaaataaacaaccnccggctgtcatgatttgcgcctgacaaagggctncacctgcatgtctctggacttagtataagcaatttttccttcaaaaataaaatcttatcagtcaccactaaatccatgaaccatattactgaatagaacctccacaaaatccatgaactatgttgctgaatagaacctttactattctgcttctattttccaagttacttgtgacaaaaaagcaaccaaacactcttagcc

SEQ ID NO: 716627 - DNA, 920 bp, Homo sapiens
  misc_feature (10)..(10): n is a, c, g, or t
  misc_feature (62)..(62): n is a, c, g, or t
  misc_feature (69)..(70): n is a, c, g, or t
  misc_feature (72)..(72): n is a, c, g, or t
  misc_feature (74)..(74): n is a, c, g, or t
  misc_feature (76)..(77): n is a, c, g, or t
  misc_feature (85)..(85): n is a, c, g, or t
  misc_feature (89)..(89): n is a, c, g, or t
  misc_feature (135)..(135): n is a, c, g, or t
  misc_feature (181)..(181): n is a, c, g, or t
  misc_feature (185)..(185): n is a, c, g, or t
  misc_feature (201)..(201): n is a, c, g, or t
  misc_feature (211)..(211): n is a, c, g, or t
  misc_feature (215)..(215): n is a, c, g, or t
  misc_feature (221)..(221): n is a, c, g, or t
  misc_feature (223)..(224): n is a, c, g, or t
  misc_feature (236)..(236): n is a, c, g, or t
  misc_feature (245)..(245): n is a, c, g, or t
  misc_feature (265)..(265): n is a, c, g, or t
  misc_feature (267)..(267): n is a, c, g, or t
  misc_feature (276)..(276): n is a, c, g, or t
  misc_feature (278)..(278): n is a, c, g, or t
  misc_feature (282)..(284): n is a, c, g, or t
  misc_feature (308)..(308): n is a, c, g, or t
  misc_feature (314)..(314): n is a, c, g, or t
  misc_feature (329)..(330): n is a, c, g, or t
  misc_feature (337)..(337): n is a, c, g, or t
  misc_feature (347)..(347): n is a, c, g, or t
  misc_feature (349)..(349): n is a, c, g, or t
  misc_feature (354)..(354): n is a, c, g, or t
  misc_feature (372)..(372): n is a, c, g, or t
  misc_feature (374)..(374): n is a, c, g, or t
  misc_feature (379)..(379): n is a, c, g, or t
  misc_feature (431)..(431): n is a, c, g, or t
  misc_feature (436)..(436): n is a, c, g, or t
  misc_feature (455)..(455): n is a, c, g, or t
  misc_feature (462)..(462): n is a, c, g, or t
  misc_feature (472)..(472): n is a, c, g, or t
  misc_feature (482)..(482): n is a, c, g, or t
  misc_feature (495)..(495): n is a, c, g, or t
  misc_feature (521)..(521): n is a, c, g, or t
  misc_feature (524)..(524): n is a, c, g, or t
  misc_feature (541)..(541): n is a, c, g, or t
  misc_feature (544)..(544): n is a, c, g, or t
  misc_feature (555)..(555): n is a, c, g, or t
  misc_feature (573)..(573): n is a, c, g, or t
  misc_feature (578)..(578): n is a, c, g, or t
  misc_feature (582)..(582): n is a, c, g, or t
  misc_feature (587)..(587): n is a, c, g, or t
  misc_feature (607)..(607): n is a, c, g, or t
  misc_feature (609)..(610): n is a, c, g, or t
  misc_feature (615)..(617): n is a, c, g, or t
  misc_feature (622)..(622): n is a, c, g, or t
  misc_feature (626)..(626): n is a, c, g, or t
  misc_feature (640)..(640): n is a, c, g, or t
  misc_feature (648)..(648): n is a, c, g, or t
  misc_feature (675)..(675): n is a, c, g, or t
  misc_feature (685)..(685): n is a, c, g, or t
  misc_feature (694)..(694): n is a, c, g, or t
  misc_feature (697)..(697): n is a, c, g, or t
  misc_feature (702)..(702): n is a, c, g, or t
  misc_feature (706)..(706): n is a, c, g, or t
  misc_feature (721)..(721): n is a, c, g, or t
  misc_feature (732)..(732): n is a, c, g, or t
  misc_feature (757)..(757): n is a, c, g, or t
  misc_feature (766)..(766): n is a, c, g, or t
  misc_feature (791)..(791): n is a, c, g, or t
  misc_feature (795)..(795): n is a, c, g, or t
  misc_feature (825)..(825): n is a, c, g, or t
  misc_feature (832)..(832): n is a, c, g, or t
  misc_feature (913)..(913): n is a, c, g, or t
atattcaccnaatagttacagaatattgccagaccattcatcttctttttaattcctttcanattctanntnananngaactctnattncctaaagattttttatatcaaggggacagtaatgcaaagcaatccntttctgaggcttttgctcttacaaagatacaacacaccatagtacnaaangacacacgtccccacnttgttacatnagantttaananngcaataaatgcnttgaaaaanacacattttaaacttaaaangntattgaaancnattnnnctccaggaaattaccaataaccanaaaggntggtagctgtaaaannacttgancagaaaaaantnttggncttattcaaaagtaaaantnaagtnaagggcagttgattatgatttctttactgttcccatctgagagaagtatggnatttnttaattgggaccatttgtnggaagangttgagatanctcctttgtnatatttttttttntgcttggtcaaatgctctagatagtnganaggtgaaggtgggtggnganagtggtctggnccaccaccctcccggctnaacancatnttatnctatttccaaagataactcncnnttttnnnaaatnactncaaaacaccagganatggatanaaaaaaaaaggctttaggtgcacgtgnggccccccancctggggcnccnagggngggngagaaaaatccgttnagataaaggcncatgccttagggaatttccccccgngggtccccnaggtccagtgttcttgcagatccantggngtccttgtagaagggaaggtggatggtgangcctgcnggggtcatgtagcggttgtccagtcagcgttcttgggggccttgcatgtgtgcacatccagagcttccaggcagttctganagcgcac

SEQ ID NO: 716628 - DNA, 87 bp, Homo sapiens
  misc_feature (16)..(16): n is a, c, g, or t
  misc_feature (62)..(62): n is a, c, g, or t
tcattaatctacaccntgttaactaataacctgtgatgtgttagacaagctggatatgtttncctatatattgctaagggtagacag

SEQ ID NO: 716629 - DNA, 379 bp, Homo sapiens
  misc_feature (36)..(36): n is a, c, g, or t
gcaattcaggacccaagcccagctcattttgggaantgtgttcccagcatttttgtccttttgattaaaagattttccttccaggcctaagcctgggatttgggccaaaaataagaatccaaactatgagggtagtttttgtttaactcaagactgttttggaatgagggtccaggcctgtcaaccatggggtttttgccctgagccccaaggttgagggacaggattaggcagggtttgtcctgtggccccctggaaagtcccaggtgggatttttttggggacacttggggtccccaatcccaggtccatattttaggttttggatcccatgagtatgtatgtttccctgggcctaataaaggagaattatgaaata

SEQ ID NO: 716630 - DNA, 492 bp, Homo sapiens
  misc_feature (39)..(39): n is a, c, g, or t
gttgcatgaaagacatatggaatcatgtagcacctgttntgacattgattctcacgtatatgagttgttcctctgattttagatcacatttgtcctcatcactcggcatatccacattgagattgacacggttttattttagtttttgacacgtgacaaatcatataatgtttgaaattgtaagggtatatttcatggagcctgtgttccctttttcagtgtatttctgtcatgttctgatccccagacacaaagtagaagccatcaaagcctccactaatacaggcaggaggacagaggttgatgctaacactgtgtgaatgtatggataactttatcatatttacatgtgagtgattatgtatcccttttgcttttcagtgtcttctcggaaaaaaccagccttgaagttcttctcagaaacaaccagcattgaaggctatctgtgacaaggaagattctgttccgaatacggccacggaaaaaaaaaaa

SEQ ID NO: 716631 - DNA, 184 bp, Homo sapiens
tatagaggatcccgacagccggaccccccggacacaatgagtctactgtggccacgatgtacaccagtcaacaacctcaagtttgcacgcatcgtgagccctggcaatgccggcatccgggagaagctggcctgggccaaggagaagtacagcatcggggagcccacagtgccatccaccctga

SEQ ID NO: 716632 - DNA, 933 bp, Homo sapiens
tacgtttgctccccgagctgttcgaagatgggtgtctggtgttgtactctcccggtgcccctgtggtttccggcgtcttttcgcgtgtttttatcttgctgggtttatatgccgccggcactctttgatacacgggccctatgggggtcggtgttggacccctgtcccgcggtgcgcgattagtcccaccgcgcggcgcaccggtgggctccccagcgtgtaagcctgtaagccctgggatcaacgtgctgcgacgaggcaccgtgtggcttccccccccggttgtgtggctagggtctcaccgcgtgggcggtccccccgccgtggctacccgccggtctttttagggttgctggtcaataagaaggagtccggccccgcgagacttttttaaaaaaagagttgtacaaccgggggccccctcccgaggcatgtgttgaacggaaattttctggaaaacgttaacattgtttctacgaagagaaaaacgaagagaagattgtgtaagcaacgggcaagctcccccccccccctcgccgtaggattatgaagagtaggatataggctcctcattggtggtagacagcgggcagcacacactcgctgggcagtatgaggtatcatctccaccaggtaacgcacgcgcggtcttctcaagtgttcgagtacccattcaaaaacagtaagtagcgtttctccccaacaaaacccgcaaaaagcggggggtccaacaccccccccttgtgattgaccacatgtgcaaccaccttgttttaccacccgcctctcctaaactttagtaaaaacaatcaaattattaaatactgcgacccaatgtgaacatagcacataacacaacataataggtttttatcgaaaaccacaacatgggttccaaagaagccctcaagggcaccccgccccacaaagaca

SEQ ID NO: 716633 - DNA, 761 bp, Homo sapiens
gaagacagtccagcagggaagacgaacgcacttaaaactggagataaaatacttgaggttgcagtgagccgagatcacaccatgcactccagcctgggtgacaagagcgagaccccatcccaaaaaaaacaaacaaaaaacaaaaaaaaaaaaaaatgtgtggggggcgcggcgctgggggcccttgggaagaaaggtttcttataaaacacccatttcgggggtggcggggcggggggggggcccagggagggggtacagtgggacaaaaaggtggggccataaaagggtggggtacccaaataagggagagaaacgcccgggcgccacaagagaccatcagggtgcggtgtgggcgagtttccccacccaccaatataaagaacacaccgcggccgggggggggaaaaaacacgagacgcgcgtctcgctgggtacccacactctccccaaagatgggggcatgtgcaagcaaggcggcaccaatgacggggggagcagtcattctacaaaaccggagggagatgccccaaacgagagaaggacgccccgagaaactaatcaaaaaaatgtaagcgcgccccggcccgcggggggatgacaacagaaacagaaaagcaaaagacaagaagaaagacagcaacaaaagaaagaagcgaaccagcaaacaaacagaaacacacagaacaaggagacagaagaaagacagaaaaaaggaaggacaaagagcagacgaagacgacagagcagaaacaacgaga

SEQ ID NO: 716634 - DNA, 432 bp, Homo sapiens
actcctcgatcagctgcccggcgaggtcggcatcccagttcgcgaagacccacggtgcgatgcggaagacatgcttgcccctgaagtcgtcaggatacctctggctctcattgatgaacgagacgcgtcccagcacgctggcgttctccaccggcgactgcccgaagacgcggatgtcgccgtcggtgacgaagtcctgcccggtgagcagctgcatgagggtcgtcttgccggcgccgttgcgcccgagcaggccgtagatcctgttctcgtcggcgctgaacgacacgtcgtcaacggcggtcaccctaccgaaacgcttggtgacggagtcgacctcgatgatggcggtcatgccccttccgttctgatcatgtcggcgagctcacgagagccgatgccgagattggacgcatagtcgagcagcggccg

SEQ ID NO: 716635 - DNA, 199 bp, Homo sapiens
cgattctctgagggcagggggagcggccgcagggcccttccttatcgccgacaagtggcccgcgctgccctgaagctggactcggtctttgaggagccgctctccaagaagcttttcttcttctctgggcgccaggtgtgggtgtacacaggcgcgtcggtgctggcgccgaggcgtctggacaagctgggcctgggag

SEQ ID NO: 716636 - DNA, 107 bp, Homo sapiens
ccggtaacgctagactggctattgaggagtatcctgaggcatgggggtcaggcgttgaggtcttggtgagtgttttagtggggttcgcgatggaggtaggattggtg

SEQ ID NO: 716637 - DNA, 126 bp, Homo sapiens
tatttatgtggtaatacatgttacatacattttaccatttcaataatgttttaagtgtacagtgaagtggcattacagtacagtaaaagaagacatttttaataaggatcccctagggataccgag

SEQ ID NO: 716638 - DNA, 165 bp, Homo sapiens
gcttcacgtagaatgagtctctcctcttgtcttcggagtgaagtggaggacacgcggaagggcaagagatgcgtttttttcgaaatttttttaggggtaagaaaggatgtattctttgaaagggaaaaactctttagatattgttccagctgggaagtagatata

SEQ ID NO: 716639 - DNA, 251 bp, Homo sapiens
cagaacattgacataccttgaaatgattcatagacgcatacaggtatgctttgctgagatccagtgtgcttagggattgaggtgaggtctaaggccctgggcctcagtggatgagaccctgagtgccccaagagtgcagctttggtttaaaggtgtgtcctagctttgggagattgggatagaactgaaaaaatggtctagtggtgacctagaacactatgtatctttttaaaaggagttagccagcctgt

SEQ ID NO: 716640 - DNA, 181 bp, Homo sapiens
gcgaggaaggaagctcctgcccctcctaaagctgaggccaaggcgaggcttttaaaggccaggaggcagtgttgaaaggtgtccacagccacaaaaggaggagatccgacacgtaccaccttccgcgccgagcaactcgactcggacagcccaatatctggagaccgctccaggagacaag

SEQ ID NO: 716641 - DNA, 795 bp, Homo sapiens
  misc_feature (2)..(2): n is a, c, g, or t
  misc_feature (73)..(73): n is a, c, g, or t
  misc_feature (75)..(75): n is a, c, g, or t
  misc_feature (86)..(86): n is a, c, g, or t
  misc_feature (138)..(138): n is a, c, g, or t
  misc_feature (188)..(190): n is a, c, g, or t
  misc_feature (213)..(213): n is a, c, g, or t
  misc_feature (216)..(216): n is a, c, g, or t
  misc_feature (253)..(253): n is a, c, g, or t
  misc_feature (302)..(302): n is a, c, g, or t
  misc_feature (316)..(316): n is a, c, g, or t
  misc_feature (322)..(322): n is a, c, g, or t
  misc_feature (354)..(355): n is a, c, g, or t
  misc_feature (361)..(361): n is a, c, g, or t
  misc_feature (366)..(366): n is a, c, g, or t
  misc_feature (368)..(368): n is a, c, g, or t
  misc_feature (372)..(372): n is a, c, g, or t
  misc_feature (377)..(377): n is a, c, g, or t
  misc_feature (379)..(379): n is a, c, g, or t
  misc_feature (396)..(396): n is a, c, g, or t
  misc_feature (405)..(405): n is a, c, g, or t
  misc_feature (430)..(430): n is a, c, g, or t
  misc_feature (443)..(443): n is a, c, g, or t
  misc_feature (456)..(456): n is a, c, g, or t
  misc_feature (465)..(465): n is a, c, g, or t
  misc_feature (473)..(473): n is a, c, g, or t
  misc_feature (492)..(492): n is a, c, g, or t
  misc_feature (518)..(518): n is a, c, g, or t
  misc_feature (526)..(526): n is a, c, g, or t
  misc_feature (536)..(536): n is a, c, g, or t
  misc_feature (556)..(556): n is a, c, g, or t
  misc_feature (558)..(558): n is a, c, g, or t
  misc_feature (563)..(563): n is a, c, g, or t
  misc_feature (575)..(575): n is a, c, g, or t
  misc_feature (649)..(649): n is a, c, g, or t
  misc_feature (691)..(691): n is a, c, g, or t
  misc_feature (696)..(696): n is a, c, g, or t
  misc_feature (699)..(699): n is a, c, g, or t
  misc_feature (724)..(724): n is a, c, g, or t
  misc_feature (774)..(774): n is a, c, g, or t
anagtttcacaattctgcggcgcattcagatagacagcaaaagcaaatatttcaatttgtggattacaaaagnanactttaccaantgctgaagaaaaaaagttcataaatctggcagaatcaaaacattcaaagaancagcacattttccaataaaaaattatgaaaacattatccttttgattatnnngtccaataacattgagttttttnccnctttgtcttgaatttcatgaaggtatcagcctgttcnttttctcagtgtctcagttgttgcagtcacgactgagactctgtcaggnctccatggcagggnccaganactttgactgtcatggatttggagatttcctnnccagtngctgncntatnaacanancaagcatagagcccgcnatgatttcnagtaattcgggggataaagagcttncgtcctgattgcngaaacttcgcgcngtgaattgnccaaaaanactctgccggtgggttacnctccgtgaagcaggacaaatcgaggntttccccngaacggtaanaggtgaatgaagggtaaatncncgggnggtccggaccanagaggacatttaggatgaccgggtgtaccgccggaggccaccatatcggtccgcggatttcacattgatagggncctgtttcatttctcgtgacactggggtagaatgagtatccngtttncantgggtcgctttaccccgggactganggggaggctctgaccgtttagccaccaaatgtaggtgtagttctcactcnttaggttcacaggtgaaggct

SEQ ID NO: 716642 - DNA, 594 bp, Homo sapiens
gtatcaacgcagagtggccattacggccgggattctagagtgccgaggcgggccgacatgtgttttattatttattttttattttttatattttattattatatattatttgtattattatattattataagagagtggtgaggagggtataatataagaattagaatatatgaggtgtagataaatatcaacacaaaagaagacaaaaaataatagaaaagaaaggagagggagcgatgattatatactacgcgaggcagcgggatgagatataagacaggacagaaggaagagagaagagagaggggggagagataatagagaagaaagagagagtgtgtgagagaacagacaagaccacgcaagcagactgcccgcggagtcgcagacggaggagtaagaaagaaggggagaggggagagaggacagaagagggacgtgcgggggcgagcggggcgccgggaggcaaccaacgcgcgcagagcgcactcctgacggaggcggagagcgagagcggcagggacggacgcggacccggagggacggagaaggcgacgcgaaggaagcgacgggggcggaggtgaacgcgggca

SEQ ID NO: 716643 - DNA, 487 bp, Homo sapiens
tttaacgtgctgtttttatgtctgacgatagtaataattcaggagaaaagtgtcacggcataacactttgcatgacccatgtacatgtctgtaataacctgtctgaaatgacgtaatccaccagccattttctcattggataactaaaccaagtggaaaataacctccaagttgaagagtcacacttgtttgaagttccccaacattatttcgaaggttaaaagtgatttaatttgatttgtttaacaactaaaagagtagcacatgtgactaaacaacaatgcctttgtgtgagggttgctcttcctcatgtggatattcatctgtcataacacactctttttttaatgtttttatttgtgtgtgttgctgtttacttctccttaatttatttccaaacgttgggaaaagctatcaaagtgttctaaaagcagttcatgagttttgtataagtgggcttcaaaattaataaatgcaagaaaactca

SEQ ID NO: 716644 - DNA, 398 bp, Homo sapiens
tgggtcgtaggaacctggcatgagcgcaaaccccaatcgccagcttaaagaggaatagtctcccggatatcacgaaaaaattccgccgagagagcaaaaaacccaatattcacagcaggttcaaaagtagttattatccaagaaagtgcctaagtctaatactcatcattcaaaaaactttaaatacacaaccgaatcttccatatttaaccggattaactcactatttcacagaagaatcaacgccagcacaagcaatacgaaaacacctcttcttgtacaagttcgtgctagaccaaaatatcgaatcgataaccaatagcttaacactcataactaattaataagccaccaccatttccatcgctaatttaatataggtacgtctacacgggccg

SEQ ID NO: 716645 - DNA, 377 bp, Homo sapiens
  misc_feature (66)..(66): n is a, c, g, or t
  misc_feature (79)..(79): n is a, c, g, or t
  misc_feature (88)..(88): n is a, c, g, or t
  misc_feature (192)..(192): n is a, c, g, or t
  misc_feature (197)..(197): n is a, c, g, or t
  misc_feature (200)..(200): n is a, c, g, or t
  misc_feature (289)..(289): n is a, c, g, or t
  misc_feature (308)..(308): n is a, c, g, or t
  misc_feature (314)..(314): n is a, c, g, or t
  misc_feature (316)..(316): n is a, c, g, or t
  misc_feature (355)..(355): n is a, c, g, or t
  misc_feature (358)..(358): n is a, c, g, or t
caggtgctcatgattctccggcgtcagcctcccgagtagctggtatacaggaggaaaacagaaatnatttctcatagtnctggaagtngggaagtgaagaccagggtgctggcagatgtgatgtctgattaaaaagtcttacttatatgagtataaattataaccaactagccagcattcctagagaacttngtttnctngagaatctggttgaacttcaacttaactacaatcagctgatatgcatacctgaagagattaaattcttgaagaagcttcagaagctttngctagccagaaacaacatnggagtntngccggaggtaagcaaaacatggaaccacagtagttggcngtnggagaagaactcaacatga

SEQ ID NO: 716646 - DNA, 1389 bp, Homo sapiens
  misc_feature (516)..(516): n is a, c, g, or t
  misc_feature (792)..(792): n is a, c, g, or t
  misc_feature (1042)..(1042): n is a, c, g, or t
ggaatctgtgacccattcatgtagcagggaaactgaagaaagaccaagaccttccctcttacttatggttcttcgttagaacaagattaggtaaggtaaagaagaacacgttactggtgtatataccctaatcaaatcagtgctgcgcacattgcaactgctggacgtttgcgctagttacctgttcctcgagcttatacgtgtcttttggcatatctatcacgagctttagcaccagccactgcagcagcccaaataccaaaaagatgtctcggtggacacagccccggaagtcgaacgctgggtccccagtctcacacaggctcagacgaattagcttgggccaccttttggagtgggcctattaggccaaggtcaccccaaggaagggcccaggaaaaaactttttcccaaggggcaaaagagcgcctaaggcggaattgagaaatgaattccggacattaccccgagcggatttttgtctccaacggcagtggagggccattcacctttcgntagggttagaagcgaggcctttccgtggcatttccttaagaagcttgtgaaaacgtgcgggttttgtatgccccgtttccgtttgcccattaaggctttctaagaacacggtttggaagcgtggggctacacaacgtttgttaggcgggccgacgtttatacacgttctcgcagggcccagcaggaacgggcacagccggaacttatgtctaccgcccagattcgcaatgggaaccaacatcgtgggcggccgccctattgggagacccttttgtncggcctcttttgggagcgcgacgatgagaagacaacacttggggcgccttgcgcagagacatttcccagggcccttttatcatggcccaaagcggaaggggttgggggaacggacaaaattttctccttcgcccgaagatgtggccttcctagaacatattctgcgagacaagtcgggcgggcacaagggcgttccccctttgccgacggggcttttaaaccataaggtcgccaaggccgacattttttngccgaagttcgtgacagtctgtgttcacacacaagcagacaggcagcattaaacttctacgggagaccacttggccccaatatttagaggggaaacattctcccccaacagttggggcatttgcgtacgtcatcataaacagacaagtctgagcgccctttgttagtctaccttaaaagacgaacgggagcttgtctagtacataacactatttctattgggcccatctacgggttagtgtataaatacaaggcccagagcgagtatatgagcagactaggcatatagcacatatactacgaggcacatcgcgacaaccccactcgggagctaagagggcgtaccat

SEQ ID NO: 716647 - DNA, 276 bp, Homo sapiens
ccccccccccgttaaaacccgttcaaactaaattttttggttcaagccccccaaagggagaaaaacggggggcccccctcaaagtttaattttgggttttccttaaaaaaaatttgctttccttgtttttttttttaattggtagggttcaaaaacaatttgggttttatgccctttccccccggtttgtaaggcaattttttttttaaaagccccgggggccagggtcataaaggaggagggttttacgggttttttaaaaaacccttttgttta

SEQ ID NO: 716648 - DNA, 906 bp, Homo sapiens
gggttgttccccaaaaattttcggggaataaaaacgggggtggacacccccgtgggcccacgccgtgcgtccttgtttttggccgtggtaccgtctcctcgccgcggcccgtgtgattggttgcccccccatttcccgcgcttggtcccctagaatgttccccccaactgtgcctctggcgcccttgctgcccaatgctcgtcccccgggggggaaatttttcgggccacaaatgccgcccaactgggttctcacgcaccgccacacgtggggtacatactatacggtgttgtgtatggttgcaattcttatccgcgcgcgcacattaggtgtttgccccccctgggcaccaccgttcccttcaagatcaaccaacactatgtttgtttctctttacaaaaaaatttccctccatctcccaggaactttctctctcccaaacagaataatattctccgtgcgcaggaaacttggcccccccccctctctctattttccctccggcggtggacgcgaaacccaccccccggacatgacacccccttatctgtctcttaagaaaataaattcccacgtgccacacacaccaccatttgctctcacgtaagtaagggccacggaacccacacttatcggcggaacacaccagtgctcacgatatacctcggctgaggttccacacacaggggctcctcttatggtcgccccgccctttctctgaggagtaagctcacgacccgtggccaagcttaatttatgtacacacagggcgatcgtattcgtttttggagagtctttatctccaaataatacatggaggacttgtcttctgtctacgaaagcagggaccgaagataccacccccctcccccccattcaaaaccctttaaccccgtctacatgaca

SEQ ID NO: 716649 - DNA, 1657 bp, Homo sapiens
  misc_feature (1296)..(1296): n is a, c, g, or t
agttgtgtgtgagtctgtcttgtatggttgtgcgttgtgctttcggtgctgtgttgtttgagtggtgctgtcgctcgtatatcgtcagctgtcgctgctagcagggctcaagctctctgtatctagtgctagaggtatgtattgcttcatgctcgttaagctgagtgtagtctgtggtcttgttagtcgttagtgtcgttctactctcgttttctgaagtgctcgtcgtctctgtgctctgcttggtggttatgatgggtatgtatgctgtcttctgtgctacttcttcttgaggtcgtccgtggttcaggctgtgcttgtgaatcactatcgtctactatgtccagctgtgtctagttttgttgtattatgtatttatgagagcttgtttgttagttttatgtagttgatgagatgtgaagtgtaatagttgattggtttgatatgcttattatacttgtatatatcaaactaggagtaagaatttaattgatttagatgcgttacttttttgttctcattctatattcctattcttagttttttattattgaaatactattggtatgttatctgtgagtgtttgatagtattgtggtggtgatcagtcaatgtctaatggatttgttcgtgaatgggtggagtcgtataattgtttgtgttcatttttgtgattttgtatacgtttttgtcttgtagtatagtttggatgattatgtggtataggtggttgtttgtgttggtggtggttgtgttgtgttttgggttgtgaggcgcgccgcccggaggggggggagggggggggttgctctaatatatattacagcacgcggagagagcttctcgcgtcttttttagtgtggggtgcaccgccgcctctccgtcgagattttcgtcgcccgtcgcgtgagagagcgccccctccccatctcccccaccgcggctgctggtgatgttttgggggaccactccccccccccctcttaggtagagaggtagcaccacccccccgcgggggggccgcctgatgttcccgcagccccttctcccgcgggatctcttcttggtcactcttcttaggcgcccgcgcgcgacgagagccgcggtgatgtacacacacatgttgtgtcgcacacaccccagagagacacacacactttattgcgcccacatctttagacgcgctctcatatttttagagggcgccacacacatctcatatgagagacacacacacatgttgtgtgcacacacacagaaacgacacacggcgtgtgggtgcacaccgcgtctccncgcggaatttcccccggcgggaaattctcttctggcacccacagcggttctccgcgctctaagagcgccttctttgtgcggtggaaccacaatctgcgccactctttgtgtgcgctgcctgccccccgtgtggcgcttcttgcccacaccacacagagagtgttcttctctctgttgcgtgtcgctgcagcccccagcactaagagttgtaagacccagagagaagaagatcgcggagaggagtctcgacggagagatatgggatttggtttcttttggacataatctcaccccaaaagccacaccccacttagccaggttttatttgcccaaaaaaggaaaaaaagggttatttttttta

SEQ ID NO: 716650 - DNA, 1480 bp, Homo sapiens
  misc_feature (919)..(919): n is a, c, g, or t
  misc_feature (936)..(936): n is a, c, g, or t
  misc_feature (1284)..(1284): n is a, c, g, or t
  misc_feature (1288)..(1288): n is a, c, g, or t
  misc_feature (1337)..(1337): n is a, c, g, or t
ttcgcagcgggtgcgggaacgcctgttgtctgtcgtcttctacaacacgagggtgggtgctacatcctgctcctttcgcactgtgtttgtgatccagccccccaacaagcgtggtgtggagaaagtcgtggggaaagttcgccccagaaaactatttcgttcggcgagacaaatttctcaagatcaggttggggaggaacgcacccataatgccttcctagctacacatttttttctctggggggtttgcccaccatctttgggttgaagacccttcttgtaacgcaccattgtgtttttctcgtgacggcgtggggtgcgccccacacacctctccagacaccgcaaaagttgttttgagatgagttgataacgactccgcagagaggtattcccactggtggccgatgagaattgcgcttcccttttggttgtgtcttcctcttggcccgcccacaaaaccctgtgtgataaaggggcaccttcctttgagagcagcgacggctgttttaatatgggggaaaggggcacggcccttgttttttccttggtgagaaactagctctggaatagggcgccttcataataggcccgtggtgggacacaacacacggccttgtgcgcccacaattatggagaccacgcacacggggccacaaagagaataggccctcggttctcgccaaaaatgggggagaggttctttaatatggcgtaataaaggggcaccctgggagggagagtgggtgtggccgcacacgacccacttgcacatatgctcgggacgcacaaatgcaacgggcataaatggacacacagggcaacagacacctcggggttgcgccacacacgctcacacggggctcggctacacacaaaggtgaaagggccaaaatacacccaccgtgctggggagatntgagaatatatgagagnggaaaagggcacacaacattgggaaagaataatgggctaatctcctcggggtaataacacacgagaaaagttttgtcacaaaagtgggaaagcccgacacacgggtgttctttctggagagtgccacagctgagaagcacagcacacagagaggtggatttctcgcgcttgtgggaacaaacattcatgcacataagcggcacacccacggagaaacgtggtgtccctggagttcacccacccccctcgttaaagcatattcgccacacgtggcttgtcgatatctttgggagaccacgtgtttctaggcacaaagttgtggtttgaaagaataactttgatataaangaangactgtgggcaatactgtttatacggtggccccattaataataccttanagtttgggataatattagctggacacttcgcgtttaaaataaggtgctaatattatttgccgtgtcattttccatacaaatcagttgatttaaaaaagttcatttctcatactgtgcattaccactaaaaatttgaacaatta

SEQ ID NO: 716651 - DNA, 98 bp, Homo sapiens
gcggccgcctactactactactactgctcgaattcaagcttctaacgatgtacggggacatgtaccatcaataaagtaccctgtgctcaaccaaaaaa

SEQ ID NO: 716652 - DNA, 1828 bp, Homo sapiens
gtcgcatagagtttgcttgcagagttgcacccgagctaggccaaacgcgtggacacatagatcattgcatgtattcgacatctgtgcacaaatgttgagagtatccagattgacccatcgtctccatactctacagtcatagtcatgcatactagtcacggaagaacgagaagtacagacaaacaagctctagacccgtggcaaatatccatgactcagtacaatcgatgcctcacctatacggatttccgcgtcatccatagcaagacagagtccaggcggcaacaaagtacgccttgaaagagtacgctagcatactcatgacctgacgcggtacacagatgatacgaacacacacgtagcaggatcccactccacagcgttcgggacctggcccagcgcagggaagtctgtggggcaaacacgacgagaacacaacgtgaatcaccgcaaggtccacagccaggcgccatgcctaaccaggtagacttgacccctgagagactctagcgtccacccaacacatatgccacaacacacgcccgccaccggacgagacgcaacagtaaccgacgcagctacaaacgggaggaaaccccacccgagcgaaaggcgacaactaatccccacaaccagcctgcaaaacgcatggactgaggcactagaccagccacgcaagaggaaactaaatcaactaccgacacaccacctagccgaactaccatggaagttagaacaagacaagcaaaaggaaccagaagccacgcaacaccgcaccacgtcacctcgcggagactagtgcgactggaaaagacacacagagcaacaagccgagcgctgtcaaccaagtgatcagagaagatcacccgaagtacaggaacgcggactcgccaaagccaggtaccaccgacgagcatgcgcagcgcgcccgaatgccgacacataccacacagctcgcccatccgccaaacacaactgcagcagcactacgcataggctcccaaggagagagaggagagcgatgcgtaccacacaccgtggacgtcccagacgcgagacatatcgtccacaaacgggtacggcaaccgacacaccgcataagccagtggacctaccgaagacgaacgccgcgtccgcgaatagagccgggcccctgtcagcccgcaccacacgcagaagcaaaccacactctgtagtccaaacacccaatgacgagacaagtaaacagtaaccgagcagcgcaaggctctcaacacaaagatgaacccccccgaattccagctggatactccgctgtgacacacgcctcctcacaccagcctgagctaccacaaacgacaccgccaaccctcatctccaacagcaaggaggcacaagcaacaaacagctacacgcacgcgagagacaacacaacaagcaaagcgccgaccccacaccaccaggcgacgaacccaatacgatagccgcctaaagtagatcgataagcaaccgcacacagcagcgtatgcccgacgcacgaagacagctaactacgagagggacgcggacgtagaacaggacacgcaacgatacgtagcacacacacaggaggcgacggccatgccaccatccacgtaaagatcgagcagacacgcaacatacagcacgccaacaacgtcctaactaccaaacttcacagcccgcctgccactcagataactacatcacgaggagagcacaagcactagacaacacgtggagtctagagggcaatcgcaactacaaagcagaacgagctagacgagataacacaccggcacaagccaacagcaagcagaaagacaacacg

SEQ ID NO: 716653 - DNA, 653 bp, Homo sapiens
  misc_feature (146)..(146): n is a, c, g, or t
  misc_feature (148)..(148): n is a, c, g, or t
  misc_feature (154)..(154): n is a, c, g, or t
  misc_feature (156)..(156): n is a, c, g, or t
  misc_feature (160)..(161): n is a, c, g, or t
  misc_feature (166)..(166): n is a, c, g, or t
  misc_feature (170)..(170): n is a, c, g, or t
  misc_feature (186)..(186): n is a, c, g, or t
  misc_feature (188)..(188): n is a, c, g, or t
  misc_feature (198)..(198): n is a, c, g, or t
  misc_feature (205)..(205): n is a, c, g, or t
  misc_feature (212)..(212): n is a, c, g, or t
  misc_feature (241)..(241): n is a, c, g, or t
  misc_feature (243)..(243): n is a, c, g, or t
  misc_feature (246)..(246): n is a, c, g, or t
  misc_feature (255)..(256): n is a, c, g, or t
  misc_feature (269)..(270): n is a, c, g, or t
  misc_feature (272)..(273): n is a, c, g, or t
  misc_feature (279)..(279): n is a, c, g, or t
  misc_feature (283)..(284): n is a, c, g, or t
  misc_feature (286)..(287): n is a, c, g, or t
  misc_feature (291)..(291): n is a, c, g, or t
  misc_feature (311)..(311): n is a, c, g, or t
  misc_feature (317)..(317): n is a, c, g, or t
  misc_feature (332)..(332): n is a, c, g, or t
  misc_feature (334)..(334): n is a, c, g, or t
  misc_feature (336)..(336): n is a, c, g, or t
  misc_feature (338)..(338): n is a, c, g, or t
  misc_feature (345)..(345): n is a, c, g, or t
  misc_feature (353)..(353): n is a, c, g, or t
  misc_feature (364)..(364): n is a, c, g, or t
  misc_feature (379)..(379): n is a, c, g, or t
  misc_feature (389)..(389): n is a, c, g, or t
  misc_feature (403)..(403): n is a, c, g, or t
  misc_feature (407)..(407): n is a, c, g, or t
  misc_feature (421)..(421): n is a, c, g, or t
  misc_feature (425)..(425): n is a, c, g, or t
  misc_feature (471)..(471): n is a, c, g, or t
  misc_feature (511)..(514): n is a, c, g, or t
  misc_feature (519)..(519): n is a, c, g, or t
  misc_feature (522)..(522): n is a, c, g, or t
  misc_feature (542)..(542): n is a, c, g, or t
  misc_feature (548)..(548): n is a, c, g, or t
  misc_feature (552)..(552): n is a, c, g, or t
  misc_feature (554)..(554): n is a, c, g, or t
  misc_feature (558)..(558): n is a, c, g, or t
  misc_feature (560)..(560): n is a, c, g, or t
  misc_feature (565)..(565): n is a, c, g, or t
  misc_feature (567)..(567): n is a, c, g, or t
  misc_feature (588)..(588): n is a, c, g, or t
  misc_feature (598)..(598): n is a, c, g, or t
cgccctaacttttcttgctaatcctggtttatgagctatcccatctaaaatatttaatcctaattcttagtccttgcctgtgagatatgaggtcttacaggagacctcagagctcccagcccttctcctcctgctaacccttctcncnccctcnanaggnnttagnaaanaggtccttgtcattcncncctcattatngaaaatngaataanaaataatcatatcctttcttcccaccctncnccngttatttannatttctgacaaanntnncttganattnntnncttngaaccgactgtctcctctgncttttntttttcagactatcngngncngaatccnatatagtnccagggacctnggtcactgggagagnaaggaagagngagggagcaaaganattngggtatgtaccctntagnacactcttacctcttacttcctagagctttgatttctccggcagcncagaagttcagttctcttgagcccctctctaccccttcannnnctctngtnttccttttccggtccttttnccctanccantncccncnctccntnccctccctccccccccttctntctcctttcnttccccctcatcaccaccacactccccccccctcccccaaccaccccccaccccc

SEQ ID NO: 716654 - DNA, 226 bp, Homo sapiens
caccccagtggcagatgacagagagcatgccatatgtgatcaccagcagaggacgtggtcgttgccactgacccagaggaaagggactgagaacctgatacagtgagtgtgtctgggcaatcaaacaacgggatttggtctgaaaaagcagaaggcacaggagacctcgagctgatcctgatgactggagggagaagagactgtgaaagagccttgcccattctag

SEQ ID NO: 716655 - DNA, 266 bp, Homo sapiens
agcaaagttagaggcacagcacagaagacagacaacattaaaaacatgtacttgcatgtaggacaactcagttagaagagtctagtgaatggctggactctactgtatgatcaagatgctacaaacaccatttggttgccatcaataagaaatttactggttttaaaaaaatccaaaggctggcatagtccagaaaaatttaacaggtttatttataatgattataaagttgaagcgctgatgctattgaaagttctaaaactagg

SEQ ID NO: 716656 - DNA, 378 bp, Homo sapiens
cctacccggccaaattaattttcgagagtaataatttttcaaaagccaattttttttttggattttcgggaagaaaccgcccatatcatgaatagaaagggagaaccataaaggagaaagaacgggatgttttgttatgttcatgtaaacctaaaaaaacagtgtggaggcaggggggatcaaccgaactttagggacttggtgttgcttggaaggcatccaaacctgcattttgcattttttgtagggaatcaaattgccaaagacaaactatttcatcatttattgtaaaaaacacttttccccagacctaccaaaaagtttttgtgatggattgttttccaggtgcaataaaaattactgaggtgcctccattga

SEQ ID NO: 716657 - DNA, 451 bp, Homo sapiens
taatcttaactaattacattggcatggatcttatgtccacaaaagtcacagtctgaggtgctgtgggttaggacttcaatatataaattctgcgcttacacagttcaatccatgacagaatccaaaggtttactctggttataataacagtacaataaaatatcgtttatagcctgccatgcaaggaataggagagctattgtacattcttcccaagactgcattcgatgtaaacatattgtctgtagaaaccatgcccctgcagctcatatagccagaaaatttccttattgtccagccacggcgtgttacacctgtaatcccagcactgtgggaggccgaggtggccagaccacgaaggcaggtgttcgagaccaccctgaccaacatggagaaatccggtctctactaaaaatccaaacattaactggccatgcaggcccttgcctgc

SEQ ID NO: 716658 - DNA, 447 bp, Homo sapiens
gccattatggccggggcacccaggtgattaaaaagctttattgctcaaaaaaaaaaaaaaaaaaaaaaaaaaaaaaaaaaaaaaaaaaaaaaaaaaaaaaaaaaaaaaaaaaaaaaaaaaaaaaaaaaaaaaaaaaaaaaaaaaaaaaaaaaaaaaaaaaaaaaaaaaaaaaacaaccaacaaccaaaatatcaatccacccaaacaaaaaaaaacaccccacaaaaacccaaataacacacaaccaaacaatcaacaaaaaacaaaaacaaaaccccaaccatcaaccaacacacaccctacaccaaaccacaaacacacccacaacaaaccaaccccacactaacacaccaaaacaaaaccacacatcaacacaaccccaccaaaaacacaacaccacacacacccacaaaaccaaatacaaacaatcacaaaccacacaaccac

SEQ ID NO: 716659 - DNA, 451 bp, Homo sapiens
acaaatcaacatttttaaaaagaaaatgtaaagagatggggtcttgccaggtcttggccaggctggtcttgaactcccggactcaagcaactctcctgacttggcctcccaaagtgttggaattacaggcatgagccactgcagtagccctgattgttttaaatagaagaaggtctttagacaaacttcacccaattgtcaaccagaaaatgttggaagttccctcctaccccgcccgcctttgagttgtccggcctttctggacctaaccaatgtatttcttaaatatatttgattgatgtctcatggctctttaaatgtataaaagcaagttgtgccccaaccccggccaccttgggcacatgttctcaggacctcctgaggactgtgtccacaggccatggtcacttatatttggctcagaataaatcttttaaaataaaaaaaaaaa

SEQ ID NO: 716660 - DNA, 301 bp, Homo sapiens
  misc_feature (56)..(57): n is a, c, g, or t
  misc_feature (247)..(247): n is a, c, g, or t
tcatggctcatctgtatcccacactggaggcaggtggcagatcactgagtaggagnntcagacagctgacacatgtgaaacccgtctctactaaaatacaaaaaataagctgggtgtggtgcgcatgccaatagtcccagctactcaggaggctgagacacaagaaatcacttgagcccggaggcgaaggttgtagggagctgagatggtgccactgcactccaccctggctgacagagtgagactncatctaaagaacaaaacaaaggaaataacgtctgtgagctgtgttgactcatac

SEQ ID NO: 716661 - DNA, 124 bp, Homo sapiens
tgactgctgcttgaatgtttttggaggctgttttttaaggaaggggtttttttaatgtgatcccttcatttgaatattaatggctttttccattaaaaaataaaatattttgggcaatgccgga

SEQ ID NO: 716662 - DNA, 585 bp, Homo sapiens
ccactaagaccttatggcccaaggtgcgcaactgccagtctggcgcggtcgttgtgcacctgtggaggtgcctacaggagacaggacggtaagatctccgccaggcaccatctctccgcactcccccgtgaccatggacccatcgtagatcaatgagactttcaaatacatcaacacggttgtgtcctgccttgtgttcgtgctgtggatcatcgggaactccatacttctgagaattatctacgagaaccaagtgcatgcgaaacggtcccagtatcttgatctgccagcttgtgttctgggagacctgagtgccacaatcagtcattgacatcccgtatcaatgtctacacatctgcatggctagaggactggccattaggagctgagatgtgtaagcgtgatgcctttcatacagaaagactccggtgggaatcactgtgctgagtctattgtgctctgagatattgacagatatctgagctgttgcttcttggagtagaattataggaagttggggttccagagatggatagcacgtagaaattgtttgagtagggaatggtggtttggggttctgggatg

SEQ ID NO: 716663 - DNA, 157 bp, Homo sapiens
cgaggtcttgacgtagaaggagattgcttggcgttggttgggttttgtctggcttgagcttgggcaccttcaggcgattgacagattaggctctttcattccagacttccttgccccagggcttgcttggcccttccccagcttctgttgctggaac

SEQ ID NO: 716664 - DNA, 400 bp, Homo sapiens
ctgctctcctatatctcacatgggcataaaactatcttagatgtcatgatgtaattgcattattgtttcagattttccacccctccctctatggaagcccttttctaggttcctctggtagagtaccaggcatatggcttcctgccacagggatcctgctgttggtcctgtgacagtttggccaacgaaatgttagcagacatgatacaagcagaggctttagaagtaggtgcttgtgtagctggattcacctatgtgtgcgtctttcattactatgagaatcatggtttctaaatgggtgtgacatacggagctcacctcacccatcccacaagtgggacttaaaccaagtttagaagaaatgaacttcatctgacgtacagatccatgagtggccaaa

SEQ ID NO: 716665 - DNA, 869 bp, Homo sapiens
tgtagtgcctcacgcctgtaatcccagcacttgggaggctgaggtgggcggatcacctgaggtcaggagttgagaccagcctgccaacatggtgaaaccccatctctactaaagatacaaaaaatagccaggtgtggtggtgcatgcctttagtcccagctacttgggaggctgaagcaggagaatcactcgggcccgggaggcgggaggttgtagtgagccgagaatgcgccactgcactgctgcctgggagacagggcgagactccactcaaaaagtaaaaataaaaataaacaaatacttttccacaaaatatttacctgccaacaagtaatagaatgaataactataggctttggcacttgtatgttaacagacccttgtaaattgtccaaccaagccttttctgtgccacacatttctcgtgtcagtaggatccgtagtgatgtcccatctgtcgttcctgatgtggctacttgtggcttctatttctgggtcagtctggtatagatctcagcccatgtggtctgttaataccagcccggaaggctggcaccaagggtcatgctggtaactccagcaagtgggagagcaagggagtggaccacctgagtcagggagttgagaccagcggcacatggaaaccggctctactaaaatacgaataactgggcggggggggcgccgacccagactcgggagcgcgcaggaaagagagctgtgggacagccctactgggacaattctctggcacggcaggggacaacgaacagaggggatgagcacaccactagcgagagaggtggcgagaaagagagcaccaaaacagagagagagacacagcggacggaaaggcgaacgcaacacag

SEQ ID NO: 716666 - DNA, 317 bp, Homo sapiens
ggcacgaggtggaggctcgctggtgtccctgcagtgcatgactgccaccttctgaggtttccacactgcctctaataattgtagaatttcttgttgatattttatgtcctttcccctagagtttaacaggcccttttccttatataatgctccatgcacttggagggttagaaaggcatatcaagagtcagtgtagatatttacagtcttaccttcactgagttctagagcccgagttaaagcaatgagctcagccttctgggctgaagtgccctgtggcaatggtttggcttcaatgacagcgttcaaagttacca

SEQ ID NO: 716667 - DNA, 262 bp, Homo sapiens
aaacagtgcccggctcacggtcttataagagttctagattgttaagagaattaaacaaatttgtgtgtgttacaagcccattcattacaagcgtgggggctatttggtattaaactccaaaagagccatacgaaggcactacatgaaataatgcactgagtttgcaatgctatcactgtctttgactgggattttatgtctaaaaagtatgttctaaaattattatatgtacatgggtgaattatgtttcccaggcactgtt

SEQ ID NO: 716668 - DNA, 248 bp, Homo sapiens
gcccctttccatccagtggctgctgtttcccaagacgggctaagcgtttcttatctgaaatgcttgggacaggagtgttacagattttggattttttcagactttggaatatttgcatatatacataatgaggtatcttggtaggtctcatgtctaaacatgaaattcattcatgttttatatataccttatacatgtagcctgaaggtaactctatacagtattttaaataattttgtacatgaaac

SEQ ID NO: 716669 - DNA, 223 bp, Homo sapiens
  misc_feature (180)..(180): n is a, c, g, or t
agccggtctttccttggctttcgccgcgcactccgccgcatggagcagcgccgcgtcaccgacttcttcgcgcgccgcgcccgggcccccgatggcgcaatggtggaccagcgagcgacggacggtgtaaggacgagggcgcacgcaagatggggtggggggcgggggggggtgtggtgnggggagcagggaagcggggggcgcgcggggggtctgggtgtgc

SEQ ID NO: 716670 - DNA, 364 bp, Homo sapiens
tgtatttgaggccagactgttactctgagagtggggatagtccataggcgctgcagtgctgctgcagcagcgtgggtggccacaagccactccctgccagacgcacccttagctgcgacaagcacagatgtccccagacactgccagtgtcccccagggggacaaaatcaacctccttaatagagagaaacactaaagtatttatgggcttaacacacaactgtggccgggaagatggtggctcacgcactgataatcccagacacttctgggaggccgcaggcggggcggctcacgaggtcaggagatccaagatcatcctggaacaaaaatgtatgaaaccccgatctccaccaaaaataca

SEQ ID NO: 716671 - DNA, 255 bp, Homo sapiens
catgtatctaattggagctacagctgcccgcctacaccacagtcacggaaacaacagatccgagccacagtcttagacccacaccacagctcacagcaaagccagatccttaacccactgagcaaggccaggaatccaaacatgcaccctcacagtacactaaacagatacgtctaccactgcagccacgacaggaactccaacactgtgatagttaagggtatacactgtggacgtctcaacggagaagcgaaa

SEQ ID NO: 716672 - DNA, 309 bp, Homo sapiens
  misc_feature (6)..(6): n is a, c, g, or t
  misc_feature (71)..(71): n is a, c, g, or t
  misc_feature (73)..(73): n is a, c, g, or t
gcatgnccgtgccccgtgcgccccgtggcccgccgcgacagtggatcgcagcaccacatcggagccttgcncntctcgccttgacgcctgcctcgaggctgcgcgtggtctgcgcgcgaccacgtacacgcggcagtacatgaccacgatgaccccatgggcaggtataggagcacacggaggagaagacagctagcccgcctcctcgtgatacccagaagcttcttcagggcacgggctccttccagccagcaggggcctacggacaccaccaggctacgacccagagcagggccaggatggcggccc

SEQ ID NO: 716673 - DNA, 346 bp, Homo sapiens
acccgcgtgggccttttcctctgacccgcgatctaatctctgtgctcggtgtaatcggcgacgcgctggctgcgaataacgtgcgtgccaaacagcaacgagagatactcacggctacactggggctttccggtgcctggatgagaatgctggagacgtagcattagtgaaagatgtcactagtctatgcagaacactgatggaaataacaatgaggcatgggctaaggattagaaagcaggcagactattgcgctactgtgcctcgatagcaaacggaagcctgtgactgaggctagaagctgccatcttgccatggccccgaatcatgccgtggtgtctcggat

SEQ ID NO: 716674 - DNA, 100 bp, Homo sapiens
ctcagaatctgtccctgaaggtctgattccaaaaagacagagaaaacagggaaggacggaaagaagggaaggagagaaggaaggaagagtagagggaggt

SEQ ID NO: 716675 - DNA, 1413 bp, Homo sapiens
cgggaatggagtagatgggagacccggtcgatgctggccacgttggggatcaatgcgattggaattaatacgcatactctttgttccactccatctggcacagcctgagaagccttctgaggcgctagtggggcggttggaggagcacaggtcttgcgaacatctggagaggactggagtgagtagaactcacgctgtgacttcattctcctagtggcggagactcactcaattgaatggccagtatgcgagattgatgcgtgagatgataggcaattcatacttcacgccgatcatcctgggagagatcattgagtccagtgctagcgcatgttcatgcagtctgctaggcgttttccatggtactagggacttgaaccactacgcagggcgttcgtggcaagacggttaacagtgcaaattgggatcgtgtggataagccagggaatggcgtaggctaggaatagcgtttcggggtcaggcgcttactcacgcaggcacaaaatacgcacaaaaaaagacttcccaaagaaccttgtcgacgccaaagggccagtgcacgccatgtatgcggatttgtacgctttcacactccccagagatacacgtataccgtaacttaagacggtcgtgttgtgctctagtacagccagacacgaacttttccgcctttgtggttggcgtagcgcgcaatgggcctgaggacggggtaccgggaaaggccccgcgttgtcatagggtggcgagggcagcaaggccagaaggcaagagggaacggatccggggcaaagatttgggggcggttaggtaatttgttccccgttggcacgggaaaacgtccgagaccggattctaggaggaaaggcgctttccgtgtagggtaacccaaataggggttaatacctcgaaagaacttcggttcccaggggggctatgggcgttcccccaggagagggcaaagtaggccacaagggacaaagattggccgaaggaatggcgacacgctgctatagcccttatagacctataggggtccccccaaacggagagacttggggccacgaattagggcatacacggggcggcgcctttggggccgcaagcgtgtgaatttccccataggcgaggtttcggcttttgggcaggcggggggtcacacactccccccaaaattgttttgggctaaagggcgatcttcgacggtggggttctaaaggtagaccccaccgaaccaggcttgggggcggggatttggcccccctttggttgagatcccacaatttggcccgtaggatctcgcgcgcttaccgtgcgcttcaaccccctttgctctatgtgcgttcctcttggtcacgttatgcggccctgccttccacagatttttatctccctccccgcggttgtgccccccaa

SEQ ID NO: 716676 - DNA, 122 bp, Homo sapiens
gagcggtagagggatcgcggtagacacggcactggagtggcagaagattgcagaggagctagggaccagccgcagcgccttccaggtgcctgcagaaaattccagcaggcacaaacaaaagc

SEQ ID NO: 716677 - DNA, 177 bp, Homo sapiens
ttcatatcagagctgtgatcttgagagcctctccttggctttccctgctgagtctcgaggagctggggcatcaaggcggaccatgtgtcaacttatgccatgtttgtacagacccatagaccaacaggagagtttatgtatgaactttgattgaagatgagcccctcccccccccct

SEQ ID NO: 716678 - DNA, 790 bp, Homo sapiens
  misc_feature (334)..(334): n is a, c, g, or t
ggtcaatggactctacgggagcttgggggaacccacccaggccttggtccggccctcgggagccctgggcaacttctccctggagcatggaggcctggctaggtgccctagagcatgtaccgagagctgcgtcctggcagcccctatcgtgtgtcccccacagtcctgcgtccgcgtccgtctgcatgtatgagtcggaaacaggcgatgggggagttattgccatggcgtgacccattcatcatggatctgtgttccagtgcggtctcacgtgtcttcttgggcgtcggtcgtgggccctcatcgcagaatcatggtactccgaccagtcganctttgatttccgtcatggtacggcgaggtgatccggagttctaaccagtagcttcaacggtgaaggccctcgaagcagtcgaggccgtttgggagattgccaaaagtgaccagccgacgcacgcatcgctccgcgcgtacccagtcttgtctggacagacggggttcgtccagagctctaagtttcgtagcaactcttgggatcacacactccttgggagcagggtgggcacgagggggacaccatgggtggttctagggggcacgaaagggctcttgtcccctgacggcgcagaccccgagtgtgttggcgtctgagaggacctcgattctccttgttgtgggagtcgctgataggaccgccctccggcggttccgcttacgcaacaagcttgggaaggaatttcagaacctggccttatacataatcaccctggaatcatttcctcatagcctg

SEQ ID NO: 716679 - DNA, 138 bp, Homo sapiens
gaagtctttgaccgtacaaagaaatgcatacatatcaaaatgtggaatagaaaggaaaacctatttaagatatcaaactatgacacatcataaagaatactattacataaaataaaggtccaggatagtggctcttgc

SEQ ID NO: 716680 - DNA, 383 bp, Homo sapiens
aaggaaatatagaatataaaaaattttatgcttaatttaactcccacttcataactggggtagaaaacatatatacgtaagcataaaaaaagattgataggggccaggttcggtggctcccccctgtaatcccagccctttgggagacccaggtgggtgggttcaaggtgtcgggggatcgaggcccttcctggttccggtgaaaccctgttttttctaaaaatacaaaaaattagccgggcttggttgggggggcctagagtcccagctactcagggggttgaggcaggggaatggtgtgaacccgggggggggggcttgtagtgagttgagattgggcccctgccctccagcctgggcaacagagtggggctccccctcca

SEQ ID NO: 716681 - DNA, 411 bp, Homo sapiens
cggggatgcaagcggatagaaactgcagaaacccagagctgtacccttgacgtgtgactgcccagtgcattgctgagcggcaggggtgatgttccatgtgtgtgtgggtctgttgggctggagatggctttctgtggaaaggatgtggacttcgacggttaccccgacgaagaactgccatgctctgccaggaactgtaaaaaggacaacttgcatatatgtgccaaattctggccaagaagatgcggacagatatggcattggcgacgcttgtgacgaggatgctgacggacatgggatcctgaattagcaggataactgtgtcctgattcataatgtggaccaaaggaacagcgataaagatatctttggggatgcctgtgataactgcctgagtgtcttaaataacga

SEQ ID NO: 716682 - DNA, 745 bp, Homo sapiens
  misc_feature (465)..(465): n is a, c, g, or t
  misc_feature (507)..(507): n is a, c, g, or t
  misc_feature (511)..(511): n is a, c, g, or t
  misc_feature (528)..(528): n is a, c, g, or t
  misc_feature (542)..(542): n is a, c, g, or t
tgatgagggaaccccccctcctgctagacactatcgggggcccccaggggatccacggtcccctctgtagaaggaattcacgtcatctttacccccggagggaccttccctgccctcctgtggggtgctctttgggacactcgattatgaggaaaaggataaaatggatgagctagggctctgggggtctgcctgcacaactctgggagcccaggggccccagcaccctccaggacaggagattctgggatacctgtctgctggagtacaagtgcttcacaagggttactcctccaaacccccagtgtttcactcatgtccccaactcaagggcgtagaaaacagccagatggagaaataaatgttttagcatgcgtcccccccccgtgacctgcacgggcactcaccctgtctcacgggagacacaggtacaacaggtcaccacatggggaattctagcccccnctggggggatgttacaaccacccagctggttattttggcggnctgntagttgtggggggaatngtgtgtgtgcacgntgtgtgtgtgtgtgtgtgtgtgtgtgtgtgttctgtgacctcctgtccccatggtagcgtccccaccctgtccccagatccccctattccctccacaataacagaaacactcccagggactttggggagaggctgaggacaaatacctgctgtcactccagaggacattttttttagcaataaaattgagtgtcaactattta

SEQ ID NO: 716683 - DNA, 464 bp, Homo sapiens
  misc_feature (6)..(6): n is a, c, g, or t
  misc_feature (384)..(384): n is a, c, g, or t
  misc_feature (410)..(410): n is a, c, g, or t
  misc_feature (445)..(445): n is a, c, g, or t
  misc_feature (464)..(464): n is a, c, g, or t
ggttancactaaggatgtacagtcataatattatgctgtcaaatcacctgaaataattcttctctgtgtgtttaagcctgccaatttcatagtgttaggttcatttgtttggttttggttttacgaattgccttatttattttgatttaaccttattttgtaattattttaaaacatttaggccaggagctgtggctcacacctgtaatcccagcattttgggaggccaaggaaggaggatcacttgagcccaggagttcaggaccagcctgggcatcacagggagacccctgtctttacaaaacatttacaaattagctgggtgtggtggtgcgcacctgtaacccaagctacttgggaggctgaggtgagaggatcacttgnagtccaggtatttcaaggcagcagtngagcgtggattgtgctactgcattccagcctgagntacaagtgagaccccttgn

SEQ ID NO: 716684 - DNA, 155 bp, Homo sapiens
aaggagttgccaagatcacaaaaaaggagacagccgaagaatgacacatgaatgtaatagctcacagaataaacctcatgtacctagttacatgtcatgctacgatgtgggggaaagatccaaaaccagataagataaaaagaacaatcggaggg

SEQ ID NO: 716685 - DNA, 427 bp, Homo sapiens
  misc_feature (126)..(126): n is a, c, g, or t
  misc_feature (166)..(166): n is a, c, g, or t
ggcaaacccaacagcacactgtagctatagtccctatgtgattgctttttaatccctgtagcatcctgttccttcagcaggtgaaaaaccaaacgccgttcaactcccatggttctcaccttccantcagcagcactcaaaaacccaaacctccactaacccgcanttcttcaacagacttagtgtatccagccttcactccagctgctctaaaaatgttgcacttatcagcaaccctcccactttcatctgctgaaaggacaaatgcccttcgttccactattatgtcctcacacccaccttctccgcttgcagttgcttacactcatgcattttgtcttgccctgcaattcgttttatgcttattcttattactctactccagtagttcactttgctgcatgccaaaataaattgaaattcccct

SEQ ID NO: 716686 - DNA, 177 bp, Homo sapiens
tgcaggtgatctctagcaggatccccctaccgagcctggtgattagctggtcgtccataggatagaatcttagtttcaactttagaattttgcccacagaaaccctctaaatctcccttgtaatatttgagctgttagttccaaagtagaaacagctcttctggacactagcgaaca

SEQ ID NO: 716687 - DNA, 236 bp, Homo sapiens
caacaacacacagcgggtccttgaaaggccgacctcataaaacaccagccaatctgaaaggatattttcaggtggaaccagaacagcacctagcttccaacttaggaagcttcgtgatttccagatctccgcaaatgacttcattgccaagaagagaagaaaattgcatttaagtggaaattcggacctctaatcccaggcatattcgcttcgctattcaatcgcccaaaccagga

SEQ ID NO: 716688 - DNA, 312 bp, Homo sapiens
gccagtttgagtgtacatgtggagtagcttgggctgatgcccgatctctaaaacgccatgtcagaacacatactggtgaacggccctatgtctgtcctggtatgtagcgaagcctacagtagatgctcgtaacactccgggaaacatatagactaagattccacagtagactgatgtgccttgcgaaaattatgctgtgaaaaagacaccctttcagatttcataacccaatggaactcatagtggcacatgtcttttagcagtcttaactagcaggcatgcagggctgctttcagggctggttcttgttcg

SEQ ID NO: 716689 - DNA, 971 bp, Homo sapiens
gggagcatttcctggcagaaggcgcgcaccgagcgcaggaggcgaggtccagctcccggactatgagctcgcccaccccgtgacgcaaggctctgggccgcactccgcgggtccctggccgggagcttcgacggcgggagttgacccagacggtctcttcgagacgcagccgcgcgggtaccggggggagccccagtgataaccccgcgcctcacaagggccgcaaaaagcttcggggggccggtggcgagcggcccaaagcaccgcgttttgtttcagcccccgggtgaattccaaggcacaagtttcttccccccgaagaaaccccggggggggcgccgccccagggcccagaggccgccgccggacacaaaagaggcgcgcaccagatatcaggtgcccggccgagacagggtgtggcccgtcgtggccatcgggatcgcagggcgcccaggtaggggccaccaaagcggggaccacaccaacggggggagattacgcgcaacgcccgggccgcgccattcacagaggcacacccaaagggaagaacacccagcggtgtacggcggaacaaacgcgcgtgggacgccgcagcagctgagcagttgcgaccccagcagtgtggatcgcccatataaacggctgaggaagaagggacacccccaaaaccgccgtggggggtgccccctgtgaagatggggtggaacaacggggcgggccacaacaaacgaaacgatggcggcgcgacacggaactctatcaccacaaggcaggggcacctatggggggggctcccacaggacacgcgaaacaggaggctgcgcggcatacatctacaagagcacccacgagcgggctcgcaaggggattctcacaacagcagggggacgccagaagcggggcggtgccctccatggctggcaacgaggcgacggccctggcacggaaccaagctcaccggacactcggga

SEQ ID NO: 716690 - DNA, 335 bp, Homo sapiens
cacacgcttggctaattttgtattttaggttgagatggggtctcgccctgttggccaggctggtctcgaactcctgaactcaacgatctggctacctcaggctcccaaagtactgggattacaggcatcagccaccatgcccggcccatgccagcctctcttctacgcatcttgtatttatcatcttatttaatcctcatgacaaccttatgaggtaggcacatactattattattcccatttaacagatggggaaattgaggcacggagaagctaagtaacttactcaagatcacagaactctaagtggtagaacaagaaggcaaacacagcag

SEQ ID NO: 716691 - DNA, 774 bp, Homo sapiens
aatctgccaaaattccagatcttttctgtcgccaggtgtcccaagggcttctgctgagtacccccccaagcccctgggcgtctacagaccggcgcaccagtgtgtcgcggatcgggaacagcctgttggtcttagtcgttgtcctggagaatgatgttcttgtaaatcgccgttatggtataacacgggcttatggtcccgtgtgtttccccctctgttttaaaccacggaaatcaaaggggtgtcagcgtcccttttctccaattccgaagttgcgtaccccgggtatcgccacgttattagacccaaggcagacaccacttcccgttggaccactttattgcgcctagtgtgaccaaccacttgcgttgaatgctggtgggtccctatccccttgaccactagcagcaagtgttctgaataagtgtttatgctatgtgaccaaaacgcccccgattcctagggcccaaagggtctactttatgtatataccctggaaaccccacgccaattgggctccttttttttttttatggtgcttgaagttaaccagccccatcctctgcaagtcccatctatgttgttcttaggccattctatctttgctccaaattgttgaaggatggtgattttttcatggtttttgtatttgagtcttatgcacgttctacatgatagaggccatgccttattggtagccccggttttctgggaaagttgatattttaggaattgtatttcagatcttaaattaaatttgtttctaaatttcca

SEQ ID NO: 716692 - DNA, 179 bp, Homo sapiens
cgccggtacctttctccctagcagcataagctgttcactttcttattcatatctagtggagtagcacttgatttttcttcaagaacttttcctttgcattcacaacttggcctactgtttgccttaagaggcctattttagctttcagcatgccttcctcacccgtctaggagcgtaat

SEQ ID NO: 716693 - DNA, 664 bp, Homo sapiens
agaagagcaataatgcatgcgcataggttctgaaaaataatgttagcagcatatagtgggttgtaacctgggactgatacaacccatgtgcaatgcaaagtctgactcatcaggccaggatagatctacacccgaagccaatactctttgattttcatctcggggtctagggagtatgagtccatattttcaaattggggactttaaagaaggtgatttagacaatatgacataaatttcccatgttaaacatggcttgcttttcagaatgctgagaaataattatgcaggcatcaagctcctgtggaaaggctgatcattctccatgctctcatcggcattcaatgactgcttagcctggtcaattagaaaatatgggcatactattcgtgtagcgtaagctcccttggaacattcgagtatgtttagcgacaacatctaaattgtttccagcaatggacagtatagtccttcatttcaacaggtatagcgaagtactgacattatatggtggctggtctttgtgtagttcagtcatcgcttctttctttgtactcaaagtcatcgctgtaaaggcctacattgtatgacgtcatgtgcgtatctgaccctagctgtctaaaccagtagcgcattcgtcagctcgttacgaattcggcacgag

SEQ ID NO: 716694 - DNA, 859 bp, Homo sapiens
  misc_feature (299)..(299): n is a, c, g, or t
  misc_feature (356)..(356): n is a, c, g, or t
  misc_feature (360)..(360): n is a, c, g, or t
  misc_feature (377)..(377): n is a, c, g, or t
  misc_feature (391)..(391): n is a, c, g, or t
  misc_feature (582)..(582): n is a, c, g, or t
  misc_feature (619)..(619): n is a, c, g, or t
  misc_feature (626)..(626): n is a, c, g, or t
  misc_feature (632)..(632): n is a, c, g, or t
  misc_feature (695)..(695): n is a, c, g, or t
  misc_feature (701)..(701): n is a, c, g, or t
  misc_feature (745)..(745): n is a, c, g, or t
  misc_feature (759)..(759): n is a, c, g, or t
  misc_feature (771)..(771): n is a, c, g, or t
  misc_feature (818)..(818): n is a, c, g, or t
tctcccccaccccctcctcccctcccccattccccccctccacgctcccacaccatcttcccccccccaccttctctccacaatcacaatcccaatccaaccaccctctctcctcttccccctcctcctcctcctccctctcttctcccattcacctcataccctccactcctacaactctcctaacccaactcctcactcccaaacacccctcaattcttcatctcattttcatgcctctctcattaccaaacctcccttacaactctataacaactcttccaactttcaccattccnatttcaaccacctcacaacccccttcacccaaaatcacctaacctactactcctccnacanccacctctctcactttnaccaacaccttcanaatcctcccacatccttatcacacaaaacacttcttctcctcctcactccatttctcccaccagcctccagccttcatccctaagtcaacaccaggagagcttctcccaaactccccgttcctgcgtagtccgctttctcttgctgccacattctaaaggcttgatattttccaaatggatcctgttgggnaagaataaaattagcttgagcaacctggctaagatanaggggcnctgggngactttgaagaccagtcctgtttgcagggaagccccacttgaaggaagaagtctaacagtgangtaggngtgacttgaactagattgcatgcttcctcctttgctcttgggangaccagctttgcantgacagcttgantgggttctctgcagccctcagattatttttcctctggctccttggangtagtcagttagcatcattagtacatctttggagggtgggg

SEQ ID NO: 716695 - DNA, 126 bp, Homo sapiens
cattacacatattaaattctatttactatttgttgaatttatttattccagtcagtatatgtaaaataaacatactcttcttcctcccctgaagatgcttggtggcctgaagatttgctttgctgg

SEQ ID NO: 716696 - DNA, 138 bp, Homo sapiens
aggatcgccaggtcatgtatacaagcacagcagtgtctgtagaggagcataatttaaacaagtgctactatcatctacaaaataatagtggtaaagtgtagtatatattttttccttttatgtcagcaatattttaaa

SEQ ID NO: 716697 - DNA, 1495 bp, Homo sapiens
ggccagcaacctctggttttggaccagtttccattttataaggcatttggagcatcagcattacatcaggcagtcatgcgcagtcatgctgtcaacatcacacacaatcacacagctcagtgctttgtccttcagtcagttattcaagcacacattcaacaggcaacaccacacatttcacagtctttcctgtgtcattgcacacacatcaaccgtcaatgcattgctatgcattattagcgattccatagcaagatcaggttttacacctcgctgtctcttccaacactattggttcatcacactctccaccaccgtatctcttgacaaagttctgctcgcataacagacacactctctgtacctgtggcctataacaaccgttcacagacacgaccgaatgaaccaaacgttatggattcctctctcgcactgttgactagcgcgtactatttcgcaaactctgtcttcggtttacactcggtacacgacattttccaaatcagacacacctcacagacacaaattcttaatctcgcaaaacacccatttcacacgtcaatgtgtgcaaacacttgccacattctggtagttctcttaaacacaccattttcatcctctcattcctgttcacatcccttctggcaaacggcacatatcgggtcctctccaacaggtcatcaaacctcggcctaattgtctgaagtgggaatccaacatatccactgcgcaaaccacctttgctctgggtcttcacatatcccacacacatggctcgtttcggctgggcactactttgagcacctggagggcacttccaggtccttcacacattccacacgtatttttctgtaccccacattacgcgcctcttccactgtcggaccgtgggactggttatccatcttcactaagctcgctccttacctaagtttgtggacaaattgttcactccttatttcagttgcacaccacaccaacaaacccagcgcttctccgctgacacctctgtcggcagcccattaccctgtccctgatgccgttgccacaccctcggcaccttacgacaaccaattaacgtgtgtggctggctgaacactgcccctaacaccacaaagacgcaaacacaacacacaccggtgctcggacagcacgcccgccacacccaacacacactacgaaaacagacctgcgagcggcgcgacacgccggcgaacaaccacggagtacccacgtcgacccaccagagaccccacggcaccgcagacgcggaggctctgcacgccaaaaagcaaggcgtgacgcacagcgcgatgatgagacacacccacggactcgccgcagcatgagaacaacccagaccacgaggcataacaacaagcacccagcaatagcctgagcgagacagccaacgccagaccccgccaccgaccaagccagacgcccgacacaccgcgggaggagccgacgccagcaaacgaccacgacgtgcgcc

SEQ ID NO: 716698 - DNA, 362 bp, Homo sapiens
cacattctttgtgtgtgtgattcacaagtactgattttctctcgttctttaaacagaggagtgtgcctccctagtcctcacctgtctcttctgccagttcttggactgcctcttcatgctccctgacacgtgtgagacagtgtgcatcaacctgtgctgcccctctcacaggtactactctgcccccagctcccatccccaccccgcactcaggaccacacactctctgcaagaacaaagagccaaatgagaagtgtaattccctgaatgagttcccaagctccctgtctgttcaacccagctgtgtggtcttcactcattgtccatctgtgtgaggagtgggtggaattcctggtcgacgc

SEQ ID NO: 716699 - DNA, 761 bp, Homo sapiens
gagcgggggggctggtgccaagcggccctgcagtgaggcggcgtgcggcgttcagtcccttgttccccgccgccgccgtcgctgacccagcccgtcaggcgctcctgaccgtcgcgttcctccggtcccaggtccccggtccctcgacctacaagactcccggcccttgttcctgcatgctccgtcgatcgctgggcgcggaccgcacgctcgtcgtcaatgttcatcgaggagtgccaccggtgccgagaggatatcctggaccttgcgaggtcgatgtgggagcctgatcaggcaggaataacacaacaactcaggagtcgaacaagattaccggaggcggctagtagtgcaaccgcccgtctgtactgtgctctaggctacatgcgaccaattaatccactgaactatgctaaggcaaaattggagcgcagaagaagttccactatttccatgaacattactgggggcccacgagttcatcctggggaaaaatcacaaaataagtaaatggtggtcgtatcggtacaacaaagttggagttccgtgaaatttgaggagatctacaaggcacaactacttcgcagaaatgcggacattccgccaaagaatgataccccctggaaggcttgagacttccaaaagggacacggatcctgggcctaccaagcttattggccaacaaaaaaaatccctcgcgtggcgcgggcaacataaagaagcaaatttgaaccaagcaagacttggaccccatagaacaa

SEQ ID NO: 716700 - DNA, 166 bp, Homo sapiens
gatccgggtctcgactattgtgctgttcagagtatgttcaagccactgttcgtggtcatattccgtgtcagctgggagttttgtactactcaagtgagttttagctttattggggagggggtgatctaaaacactctttacgccggcttctattgacttggcttat

SEQ ID NO: 716701 - DNA, 1720 bp, Homo sapiens
cctcattgactccatcctgcgggagagtgaacctgcccccggctccgtcacagaccctcacggacgccaggggccacacggacaccgagggccggcctccctcccccccgacaccaacataccaacacctgcaaaagtgccatcagacatagacatgacctggaacaagaatgagactcaagaagacacacttggatgcactaatggacaacccaacacatgagcaaaaaccaagcacgcaccactgcatgagcacacgccagcggcaatatacagccgaagagacaaacaagatgccacacagaaagagaacaatcgaacaggcccccctacgagtgacacagaagaccacagaaccactacgcagagcacgcgagcaagcacgcatcgcaacaagcacaagacctcatggacccacagaatacatcccacagcaacgaccaacacaaagttccatcacgcacaaagcgaaaaaccaaccacccaagcagacacaaaccacagaagagacaagcaagcacacacaagaacgcgcaacggcactacacacggacacagcaagcccatgagcagccacaatacaacccacaacggccacccacagcctagacacccaacgacgacgacaacacacacagcgcaccccagctgtgcaacaccacagcacacagccaacaccagaatcccacagacaccgagaacgccatgcaaacacgacgacatgacagaacacacgcgggcatccctaaccgcacatacaccgcacacaggacgagcaccggcgcccatagtccgcaccaggacgaggcaacgaccacgaaacgcacagaacaccaccgcacggccaggacacaaggcagagctaccggaaaagcgcgcctaccgccacaaacaggcatcaaaaagcaggaacaccacccacacataggaccagtcccactacccacgcggacacgcaagcgcgaacggcgcgcctacgcgcacccaccagagccacacgcacgccagcagccccacccacacctcccacaacagtcagaaacacacgaccagtacgcgcaacaccatgcgaacaacacgacaagacgacaccaaacactaccacgcaagcacaacaaagacagcaaacacaggagaacagcgacacaccaacagcacaaccaagagccacacaacagaccagcagaaccctcaaacgacaaaaacagagagaagagcaaccagaacccacaatgagcaagaaagcaaagagccaaccgaaacaggcagcacacagaaactgaagcacagaccaagcacaacagcacgaaagaaagaatgagacaacagcagcaggcgacacaacgagagacacgcagccagagcagccgaatcagcacgagccgacagagacaccagacacagagaaaacaaacggagcagaaaggcaccgcagcagcgcgacaccaccagacagacaagacaccaccccgcgacgcacacgcggagcacacaagaacagccacagaacacgcgccaccaagcacaccacgcgaagaacccgaccaacgagcgcgcgcagcaccacgcccacgacactacagaagcgcacccgagagcaggcgaaacgagagcagagaaagcccaacgacgaacaaccgccaggcgcacaagagacagacagcagagcagcaaacaacgccgacggaagcaagcgacaacaaacgagacacaaccggct

SEQ ID NO: 716702 - DNA, 382 bp, Homo sapiens
  misc_feature (239)..(240): n is a, c, g, or t
agcagcatggcacttaacagagagttctctttcattgtgatcactaccgtgacacttactttgtgcctatcaggactttttgcaatattgcgctctgtcggctttccaatcttcagggatatcatcgagctagaccattccctactatggatttattttttttcctttcaaacacagtaaggaaacaatctattacttttttccttaaaaggagaatttatagcactgtaatacagctnnaaaatatttttagaatgatgtaaatagttaaccttcagtagtctattaaggcattaatacttctctgacatgcgcgtttgagggtggaggggtcctgaaggtgcttcatcgtctgtgattactgcttgggatgtgttctttg

SEQ ID NO: 716703 - DNA, 134 bp, Homo sapiens
acttgttgttgagtgaagtcggagattgcggcgcggcgctgctgctcattgagttgtgctggagccagcctcgtgtgtacttgtgcgcagatggtgcttgcacagaagtctggctgtttcggcctacgtgctgg

SEQ ID NO: 716704 - DNA, 545 bp, Homo sapiens
  misc_feature (78)..(78): n is a, c, g, or t
  misc_feature (186)..(186): n is a, c, g, or t
aaggagggcaatgaccaaatgttaacggccagacaaaaccagcagctctttgtgggaatggtccccaccaatgttcangacagccgtttgtgacatccccccttgtggcctcaaaatggcagtccccttcattggcaatagcccacccatccaggagcttttcaagggcattttggagcagttcantgccatgttcccccggaaggccttcctcccttggtacacaggggagggcatggacaaaatggagttccccgaggttgaaagcaacatgaacgcccttgtttttgagaatcaccagtaccaggatgcccccccaaaaaaggaggaggatttcggtgaggaggccaaaaaggaggcctaaggcaaagcccccatcccctcagggttttcagttcccttacccgttttaatcaaaggcccctttcctttcccccaaaatttgggtttgcggcctctattttgttttttgtttttttttttgggggggggtttaaaacagggcctggcccaaagtaggggcccaaaaaaaacttgtttgttga

SEQ ID NO: 716705 - DNA, 352 bp, Homo sapiens
  misc_feature (62)..(62): n is a, c, g, or t
  misc_feature (75)..(76): n is a, c, g, or t
  misc_feature (80)..(80): n is a, c, g, or t
  misc_feature (87)..(87): n is a, c, g, or t
  misc_feature (93)..(93): n is a, c, g, or t
  misc_feature (98)..(99): n is a, c, g, or t
  misc_feature (107)..(107): n is a, c, g, or t
  misc_feature (115)..(116): n is a, c, g, or t
  misc_feature (118)..(118): n is a, c, g, or t
  misc_feature (135)..(135): n is a, c, g, or t
  misc_feature (161)..(161): n is a, c, g, or t
  misc_feature (169)..(170): n is a, c, g, or t
  misc_feature (174)..(174): n is a, c, g, or t
  misc_feature (176)..(176): n is a, c, g, or t
  misc_feature (182)..(182): n is a, c, g, or t
  misc_feature (188)..(188): n is a, c, g, or t
  misc_feature (199)..(199): n is a, c, g, or t
  misc_feature (209)..(211): n is a, c, g, or t
  misc_feature (234)..(234): n is a, c, g, or t
ttttcaaatagctttttgtttgttgggaagttggggttttggggggagggggagtattagtncgttgcatgaaanngctncctttanaatganggaanngctttttnttttgtcnngngattttttttttgaagngaaatttacctttttgggcaagtagnactattanncccntnttcagngttttncttgggctgtntcccattccnnnccctcatttaatttttaataaanctgttcccttgtttttttggggagcatggtaattcctggaatagtataaatgtgttgaatggtttttgaaaaaatgaattaagattccaataaccccccattgcaggaaaccaatgta

SEQ ID NO: 716706 - DNA, 253 bp, Homo sapiens
  misc_feature (32)..(32): n is a, c, g, or t
  misc_feature (57)..(57): n is a, c, g, or t
  misc_feature (59)..(59): n is a, c, g, or t
  misc_feature (66)..(66): n is a, c, g, or t
  misc_feature (68)..(69): n is a, c, g, or t
  misc_feature (98)..(98): n is a, c, g, or t
  misc_feature (109)..(109): n is a, c, g, or t
  misc_feature (200)..(202): n is a, c, g, or t
  misc_feature (229)..(229): n is a, c, g, or t
  misc_feature (231)..(231): n is a, c, g, or t
  misc_feature (233)..(233): n is a, c, g, or t
gaagacttaaagaatctgctcaaatgatttantttctgagtctcttcacattaactntnatatgantnncaaaaaattattacctgcttatatccccngagtatctgtntcatataaagagatgctgcatgttcactgtgaagtattgctgaattaaattgaaaatgtcagataaaactgatacatgatgtagttataannntgctgttatgaagaaaaaaggaatgcntncncctcggtggcctttgataaa

SEQ ID NO: 716707 - DNA, 870 bp, Homo sapiens
gcaggccgcgcatgcagcctccgtgtgagtcccgggacagcgctggtagggagtcagtaaggagcccagcgatagtgccaacacctaagagacctcgggggccgaccaaaggtgaagctaaaatacaagggtgctgccaagacccggaataaccgacctactaactcctaggaatggaaaccaagggtgcatgacccaaaaaactggagaaggaggaagaggagggcatctcgcaggagtcctcgggaggaggatgcatgtgacccatgctgtgcctgcctgctcctcactggaggagcagcttccttctgggactggacagcttttgcttccgctccccatcccgcgctcccgcgcctcgttcccccaggggcccaaacgatcagtcgacgcggccgtcgtgggtccggcgtcgccacgctgtcgttccaaccttggtgctccgttctacctccagggtgtcagcctgggtgaccaggccggtgcgcgggcgtccggattgggcttcttcgaagttgggggaggcgccacgcgagttacccgcctgtggaccggtcagggttccggccgatggaatccggcgccgggcccaacctcgggtcattagccacaggttttgccccgtccgttgtacccctgtgcttaacgtgttccccgcagtttatgcctgcgcaatcttttgtgccatgcgatgtcttgttgccgcgacttccccgtagggtgggttgagggcactcggggccttctgggcgctttgggactaggggggtcgcccgtctctgcttgcttcagtgttcccctcttggattacccatcgtggtgtggctggatgggtccccctgacgtgaccagggtccatacccccggcta

SEQ ID NO: 716708 - DNA, 155 bp, Homo sapiens
ggaaggtcttcttttcctccttcttccctttagcacctctgctaacttttgctccaggttctttcttagcagatgtttttcttggtttgggttcaggtttggtggagcaggtttcgctgacaatccagcggcggcgcagagttcccagtccgttg

SEQ ID NO: 716709 - DNA, 536 bp, Homo sapiens
gagtgcagaggtgctctatctctgcctgcgatgcagcgctcctcagcggtagtaggggccggagctctgatacagagagctccagcagtgaggaggaggaagagaagacgtctaagtctgcagtacacgaagaagccacagagggtagcaggaggtgcagccccttccaagccagcctctggaaagaaaggaaaggctgagagcagcaacagctcttcttctgatgactccagtgaggaagaggaagagaagctcaagggcaagggctctccaagaccacaagcccccaaggccaatggcacctctgcacgtgactgcccagaatggaaaagcagctaagaacagtgaggaggaggacgaagaaaagaaccaggcggcagtggtagtttccaaatcaggttcattaaagacgcggaagcagaatgaggctgccaaggaggcagagactcctcaggccaagaagataaagcttcagacccctatcacatttccacaacggaagaaaggacgaacaaacgggcatcatccccattccg

SEQ ID NO: 716710 - DNA, 755 bp, Homo sapiens
agctagcatgaaggctcagcttcccgcagaaagccctgagcctagtaagctgtttcgcggggggcgtattaatggccacgttgtctcctggacctgctgactgactacctggctgacatagatgaggccctggcagccttgacacgtgacgctccagttcccactgcaagagttcatcctggccatgggcttcttcctggtcctggtgatggagcagatcacactggacttacaaggagcagtcagggccgtcacctctggaggaaacaagggctctgctgggaacagtgaatggtgggccgcagcattggcatgatgggccaggggtcccacaggacgagtggagccaccagcaaacccactcagcacttgcgtgcctgtgtactggtgtactccctggaccctcacactccgatagtacgaggggcatggcggtagaggctgcagacgagaccgggactcgggccatggagctgtgcctggcatatagcatgcatccacaaggagcatcctggcatgtcaagcctgtccctgcggcatgttgcagagccaccattaggggcacaggtggtggctggacatgtgggatccttctatcgtcatgcatgacacctctaggcatcgggctgggctgccgctcatggcaggagatcggcagagacctctgaaacagaaggacccagactgtgctacagggcatggcagaagaaaacattactctatatcaccattctggaaatcaggcccaggagctg

SEQ ID NO: 716711 - DNA, 287 bp, Homo sapiens
tgctgggattacaggtgtgagccactgtgcctggccgggattcaccattttaaatgccataaagaacatttgtggttcatgggaagaggtcaaaatatcaacattaacaagagttaagttgattctagccctcacggatgactttgagaggtttaagacttcagtagaggaagtaaactacacgtgcagtggaaatagcaagagagtctccgtcgaactagttcgacggggactctcctttataaatcatcagctggcacatgctatagatttttcctttgggattc

SEQ ID NO: 716712 - DNA, 1265 bp, Homo sapiens
  misc_feature (2)..(2): n is a, c, g, or t
  misc_feature (44)..(44): n is a, c, g, or t
  misc_feature (68)..(68): n is a, c, g, or t
  misc_feature (72)..(72): n is a, c, g, or t
  misc_feature (90)..(90): n is a, c, g, or t
  misc_feature (105)..(105): n is a, c, g, or t
  misc_feature (230)..(231): n is a, c, g, or t
  misc_feature (235)..(235): n is a, c, g, or t
  misc_feature (281)..(282): n is a, c, g, or t
  misc_feature (284)..(284): n is a, c, g, or t
  misc_feature (336)..(336): n is a, c, g, or t
  misc_feature (357)..(357): n is a, c, g, or t
  misc_feature (360)..(360): n is a, c, g, or t
  misc_feature (385)..(386): n is a, c, g, or t
  misc_feature (388)..(388): n is a, c, g, or t
  misc_feature (413)..(413): n is a, c, g, or t
  misc_feature (459)..(459): n is a, c, g, or t
  misc_feature (461)..(461): n is a, c, g, or t
  misc_feature (508)..(508): n is a, c, g, or t
  misc_feature (802)..(802): n is a, c, g, or t
  misc_feature (868)..(868): n is a, c, g, or t
  misc_feature (954)..(954): n is a, c, g, or t
  misc_feature (994)..(994): n is a, c, g, or t
  misc_feature (1106)..(1106): n is a, c, g, or t
  misc_feature (1187)..(1187): n is a, c, g, or t
  misc_feature (1256)..(1256): n is a, c, g, or t
cngggagaggatagtatcgttgtgaagaagtatgagcagtcttntgggtaacagcatggatacatagnatanaaagtagatgcgatatcnatcacgctgcgacgncgacgccctcgcaccgcctgccattgtctgcgcggcggccacgcagcacttacacactaactcggtcggacatcatcacgactaccaaagacaacaagatgtatagatccaagacacaaaagaannatanagtatcgtgatatgcggggtagagataagtagcgtgcgcgcagctnnanctacatcggcccgcacagtagtcagtacacgcgcgtcgtgtcggcatggagnggcgaaggacgagaggagagnagnagcaggagaagataagaatagagannangatatatatgttataatgatgtgtnatataggttgtacatatcatttatttcctcttttactcgttatatncnctaccaccgttcaattacctcctcttcaacaagccaaacaccgccancaataaccggcttcgtatggaggcagaggtagattgcactcaatcaataaatatgataaacgacagaaaaactagtaattagagagaagatgattagggtgtgtgtgatgatagtggatggcgggggtggccggtaggcaggtcgtccagtacacatcaactcgtacatcctcacgactacaaatctaaactaatcaaacttcctttatatagagatgttatccattagtagtgtgtcacataacaagatacagtgtgcatatagatggagaacgaggcggtgttggacgcgcntactgatatagtaaggagatgtaagagtacgaactggggcgagtcagctacagagtatacagatgntcagacacatatagtaatataggagccgcaatatagatcatctcgcgcacacgcggcgtagcgcgtgctggcgtgacgccgcgggnctagacggatgtcagtagtgacgtgccgcgaacacatggnactgattacacatacgtgtcgcagaccgtcgggtcgagcgagtgcacctcttcgagtaccagaatagatgagtgcaaccgatagggtacagcaacttcacacgcagcgtgcntgtcacgtaccgcggagtcgtaacgcaaaggtgacggcaagagtaagtgcgcataatgtaagcgcaaccgtagaataaccnacagtacgcacagtcacggatcagcagcgagacagactgatatcatatgtgagttataagttatcatanactacacag

SEQ ID NO: 716713 - DNA, 175 bp, Homo sapiens
  misc_feature (18)..(18): n is a, c, g, or t
  misc_feature (63)..(63): n is a, c, g, or t
  misc_feature (117)..(117): n is a, c, g, or t
  misc_feature (121)..(121): n is a, c, g, or t
  misc_feature (130)..(130): n is a, c, g, or t
aagctctctgtggaagcnctgaacagtctgacgggcgagttcaaagggaagtactaccctctnaagagcatgacggagaaggagcagcagcagctcatcagatgaccacttcctgtncganaagcccgtntccccgctgctgctggcctcaggcatggcccgaaactggcccgac

SEQ ID NO: 716714 - DNA, 450 bp, Homo sapiens
  misc_feature (321)..(321): n is a, c, g, or t
  misc_feature (333)..(333): n is a, c, g, or t
  misc_feature (387)..(387): n is a, c, g, or t
  misc_feature (410)..(410): n is a, c, g, or t
  misc_feature (428)..(428): n is a, c, g, or t
  misc_feature (444)..(444): n is a, c, g, or t
gatgacaagttctaagtagaaaccaaaaccatgaaatttatcaagataaaaatgaacagaaggagcaaaagaaaaacaggtaaaaattttctatggctttctcagcaagatttatttacctcttgctacctataacaaactaaaattcaaactcttatgaagtaagattgatggcccaaacaaacttatattgagctagggagaaatatttgttaagatattgtgacaaagaatattaaatgagttacctcattatttatacagtgatacatgtattattgaaacacttcaagtacttaagggttagtccagtatttagcntgagtcctgggncccaaagcttacagtcctagttgataactgggaggtgggtatttttccggtttnaaatcccggggccggtttttgtnttaaattggaaggtcttncctccccgggggccangggccc

SEQ ID NO: 716715 - DNA, 108 bp, Homo sapiens
cctgctactactcggcagcgtccaccctgctctggcaggccttttgggagtgcgtggtggtggcctgggtgtacggagctgaccgcttcatggacgacattgcctgta

SEQ ID NO: 716716 - DNA, 734 bp, Homo sapiens
tgctgttacggtctggaatttttgggatggcggcgctggcagtaatgaggcgtgctggcggtcgggtctgtcttctgtgtgtgcctttgatgccatgtgtcggtgtgctgccgtgtaccgcggagctgaggagcggggcccggccaggtctggagactttgcgcccgggggcaccggggctgctgcgcggtcggcacacattccacctggcgcggcttccctcggcggccctgggctccgctcatcctgctggcggtcggcgccgtctcaggggcgggaagaggaggcggtagacgcgaccacgagaagatgtcgggccaaacgctcacggatcggatcgccgccgctcagtacagcgttacaggctctgctgtagcaagagcggtctgcaaagccactactcatgaagtaatgggccccaagaaaaaagcacctggactatttgatccaggctaccaaacgagaccaaatgttaatattcctcagatggccgacaatctcttttgagactgggcaacaaaacaagtagcttgggtgagtagtgtataagggctttaggtgacaacacatcatctcattggtgcattggaaaattgagcagattaattcaaatattttggcttctaggaaatacactattcaaatctcagcaattttttggacaaaaagtggatcccatgggttatgatattgtctaacctttcataaggcgctatagtagatatttgaatgac

SEQ ID NO: 716717 - DNA, 221 bp, Homo sapiens
cacgagcgccccaaggagctgagactaagggtgcgtgccaccatgcctggctagagtttaagtgaaatattatcatagcacgagatggagtccagctctgtagcaccaggctgtagtgccgtggcgcaatctgcgctcactgctcgctccacctcccgctttcacgccacactactgcctaagcctgcctgagcagctgcgaccacaggcgcccaccacca

SEQ ID NO: 716718 - DNA, 145 bp, Homo sapiens
ggggcccccccccccttttaaaatttttttccgggtttttttccccccccccccccgggtttcaaggggggggggggggggccccccccttttttttttaaaaaacgggttcaaaaaaaattttttttttttttttttcggggga

SEQ ID NO: 716719 - DNA, 179 bp, Homo sapiens
  misc_feature (40)..(40): n is a, c, g, or t
gggggaggccgtagagtcccgtttagatatgggccccaanacaatgggggtctcttcaccccccacatgaaaaacaaaaaaccctcattcacagggggaaacaccctcaggttcaaacacctatcccccattttcctcctatccctcaacccggacatcattacggggttttcctttta

SEQ ID NO: 716720 - DNA, 256 bp, Homo sapiens
cccccccctttgggggggttggggggggggttttttagggccggaaaataaaaccctttttggttaaccgggggaaccccctttccccttaaaaaaacaaaaaaataagtgggggcgggggggggggccctttttttcccccccctcgggggggttggggggggaaaagggggttccccccgggggggggctttccgtttttttaaaaaggcccccccccgtcccccgggggggaaaaaagggggccccctttcca

SEQ ID NO: 716721 - DNA, 766 bp, Homo sapiens
gttgctgaagtacgactccccagagtatgatgtccctcgtttgggagcttactgtggagagatgagttgctgatggctatccccaggagtggctcaggtctgctatatgatgctatattccctaccaggggactgtcttgatagactgtatgcaaatctttgaaagtcgatgcctatggagacctctggtctgtgcgcatggactttaactttatagaggggaccagaaactacgagaacaggtatccaacataagatttatccagcgagatgatactgaaaggattttacattctgaacacaactattcaacctaccagagacctacctgttggcctgcctagtagattctttgaagctaagtgtcccagatataccagtgtgtgaaacaggatttaaacgatggggacctcttcatgtcctaccggagtatgttccaggatgtaagagatgctgttgactgggttcattacaagggctccttaaggaaaagacagtgaaaatcttgagaagtatgtagtcaaagatggagaactgctttgcttctgagccggactgcacggccgtgggtccgtctttctttgctacccacagtgctataaatatacagatacaaatcctgacttaccgtgttgacttccacatggcccaaggccatggggacgtcccatcgaccatggggagtcctacctttgcccttgggtccttgggggtgcccgggaaccctccttttggacaaggccccggcgtggggccacgggggtcc

SEQ ID NO: 716722 - DNA, 116 bp, Homo sapiens
tcgtgatgagatctggccaggcacagagaacgagaagaagctgaagagcagctgtccaagagttaggctgacctagagtggcagagccaggagtaccaggagactgcctcgccaat

SEQ ID NO: 716723 - DNA, 522 bp, Homo sapiens
tttttttttttggaaacaaaaattttattttaataaaaaattttggtttgtattttttactttcccaggggaacccatttgggacaccccgtgtgccccccccaaaagtgtggcccagtctcgctgtgggggcagggaaaaaaggaaggggtagtaaaaataaaaaaacacccggtttttctccctcaggtgctgtggggggttgtgaaaaaaccacccctcttttgtgtggtgccctctccttctgtgggtgtctccgagagaagagagaaaaccaaatataaatatctctcgagcgccgtgtgtgggtattctctccaacacaccatatgtgcccccccgcgaggtgtgtggagaggggaactcttaagaaaatgtagaacaaaaggggagacacaagagggcaaaaaaaaatatgtgttgtgctctcaaaaaaatatattagaaaccccagggggcgtgtgggggctgtgaagagagaaaatatctcaaaataatataataatatcccggtttataaaa

SEQ ID NO: 716724 - DNA, 166 bp, Homo sapiens
ggtcctctcatagcagctcgttaccttctcgctgctggtctcccgtcggccacctagggccagcatccacacgacagcttgttctctgggtcctgcctttcttcactatctttgccttgcacccattccacgtcaggctaccttgcactccgagtccccgctgtga

SEQ ID NO: 716725 - DNA, 229 bp, Homo sapiens
ccttctacgtctcatcactgctttcattacatgatacctgtgcttgaaggacaggaatggactcctgcctggcctttgagggcttccgtcctcattcttatcagtctcattctatctaatagccttcaaattcactctcttcttcaagccagtacatttttatagtcactttgcaccctccccttctatgaaagtcactgtaacatagggctcccagtgatgagacgta

SEQ ID NO: 716726 - DNA, 458 bp, Homo sapiens
  misc_feature (43)..(43): n is a, c, g, or t
  misc_feature (117)..(117): n is a, c, g, or t
  misc_feature (185)..(185): n is a, c, g, or t
  misc_feature (188)..(188): n is a, c, g, or t
gttaacctcctttgccctgccctgtaatttaaaaaagaaaatnacaaaagttgttaaaaataaatggaaattcctttggaatgcctgaaatgccagtgaatgttaatcaagtcagantctttcctttggcctcagttgtgtttgtatttcctttcttaattccccaaatcttggctgggcaacgngtntcacgcctgtaatcccagcactttgggaggctgaggcaggtggttcactggaggttgagttcgagaccagcctgggccacatggtgaaaccctgtctctactaaagatataaaaattagctggatgtggtggtgcacacctgtgatcccagctacttgggaggctgaggtgggagaattgcttgaacctggaaggcagaagttgcagtgagctgagatcacaccactgcactccagcctgggtgacagagagactctgtctcaaaaaaaa

SEQ ID NO: 716727 - DNA, 417 bp, Homo sapiens
attgttgccgggtccaaatgatcaaagtgtttccagaaagggatgcatgtaaatatcatctgctgaggttttgaagactagctctaacgggtgagaggagtgacttgaatctttcaatttaaaagtaaaatgccagccaggcatggtggctcacgcctgtaatcccagcactctgggaggccgaggtgtgtggatcacctgaggtcagcagttcgaaaccagcctggccaacacggtgaaaccccatctctactaaaaatacaaaattagccaggcgtggtggtgcgtgcctgtaatcccagctacttgggaggctgaggcaggaggatcacttgaacctgggaggtggaggttgcagtgagcggagatcgcgccactgtactccagcctgggcaacaagagtgaaactccgtctca

SEQ ID NO: 716728 - DNA, 158 bp, Homo sapiens
gtcaatccttctttccttcaagaacccttattacacatctccattcctatattccacttggatttcctataggcaaagagacaccatacatgtgtatggaatcaaatgtatatagtctaaacacactgcagctatgggaaaacttcattccttgatat

SEQ ID NO: 716729 - DNA, 276 bp, Homo sapiens
  misc_feature (16)..(16): n is a, c, g, or t
  misc_feature (106)..(106): n is a, c, g, or t
  misc_feature (113)..(113): n is a, c, g, or t
  misc_feature (121)..(121): n is a, c, g, or t
  misc_feature (128)..(128): n is a, c, g, or t
  misc_feature (185)..(185): n is a, c, g, or t
  misc_feature (229)..(229): n is a, c, g, or t
  misc_feature (259)..(259): n is a, c, g, or t
ctgatagcagcatgtnccaatgaccagactgtgcgtgtatgggtcgtagcaacaaaggaatgcaaggctgagctccgagagcatgaccatgtggtagaatgcattnctgggcnccagaaangcatatnctccatctctgaagcaacaggatctgagactaaaaaaagtggtaaacctgggccatncttgctgtctggatcagagacaagactattaagatgtgggatgnagtactggcatgtccttatgaccccgtggnatgataactgggtacgt

SEQ ID NO: 716730 - DNA, 257 bp, Homo sapiens
cgaaggactctgtgggctccattgcccgccagtctgacccgcgtgtaccctctggtggcctgcggattgaactccagccaacctacaggtccccaggaaactgtggaactcgtcgctgtcacgctggtggcctctgaatcttccagaccgccaccgctaccgaccatgtgacctcagatgcccgcccgctctctctagtctcactgtgcgcagtagtgcgcgtacgttccgtaaaatcctagcctgcccctgcggtc

SEQ ID NO: 716731 - DNA, 797 bp, Homo sapiens
tgttctccctttgacgaatacacaaagggccctaccagcgcgcatgcacttttcacaacgtgcgtgaaacatgggagttctaattctattaaggcgagaaagcccaaagtgtcacctaggagacaatctgctcgagaaaatcgtctgaataagcaaaacgggagagcaaaccgaaaaatcgtgacctctcgatcgtcccaatacgcttagacaacgagtagaaccggcctgaccgaattgagtattttccgcaactaccaccaacgcttgaaaaactgccactcaataaaattgctatgtcagtgagacatgagtcgcgtgacgacatcgaatccaaaacaacgttatccatagcaaagttccaatcgctaattgaagcggtcatttgtggaactaaacaaacggtggcagccgtaagcagttagtccaccggtcgcttggaacccggcgcacacgagggtgtgctgcgcacagctaccataagatgcaggcgatggggatcctttgcgcagcaatccgatgcaaacattatgcgccaacaactgtctcttttaagttgacagtaagactccttccacccgatttatccctcgtcacccacccattaatctgtgcccatgttgaacgcaacgcccaaccaagctaaacaaaaaaggatcaaccatgagcatggaactacaacgcttgacaaagacgagcattgtctgtgtcgatcacagacggcgattccggtgcagatctccaagagtgaacaggtgccggtgagagaccgggtctaatacggtaggggggggaaa

SEQ ID NO: 716732 - DNA, 222 bp, Homo sapiens
ctctcgacggctccctgccgctgcttctcacccgccaggacgcctttcctcacgtttccgctacgttttccttcccctgcacttttgaccctccttttacgtggttggtgctctccttgggtgttcactgcctttgtacccccccgtccctcccgtccgcggccggggtcccgcgctcgccttcgtcctcctggtcctcgctgtttcctgtgtgcccttgtt

SEQ ID NO: 716733 - DNA, 475 bp, Homo sapiens
attcaatagaaagtatcagactatttgaaactgggctgttttcttggggctatatcaaacagtgacatagtccttgccctgacatagctccacatttggtggggaatatctacaattaactgtgggaattaagcaaacaatattgtccgaaagacaatgaggaaagtacaggatgctatggagtcttcctcgcaggaaggacactgcatccaaggttctgttttcaaagctggctgggtgttgtaaacagggagtgatgtctatgcttaaacttgaataataaagtaagtgttagccgggtcacaggttgagataggaagactgggagggtattctcagtttaagacctagtgtgggtccagacactaaggcaagaaaaaatttagttctatagttccttgaaaaatgggaggtttagtttgtttggagcaactcttacgaacaaggtgtctatccccactggggaccccacaaa

SEQ ID NO: 716734 - DNA, 241 bp, Homo sapiens
caaatccttgaaaatcaggatagcacattttgctaacgactatgacagtggtcagttcttatgagagaatctgatatgattttccctttatttcccaatgtcaaatcatgttacaaaattgtacccagaaattgagtttcagaagattgaggtttacctttgtgtggtttttaaaatatgttataagttgtgaagattatagcatttttgaagtatggatattaaaaacaatatgttgtga

SEQ ID NO: 716735 - DNA, 277 bp, Homo sapiens
agcagagattgtgccactgcactccagcctggtgacagagtgagattccgactcaaaaaaaaaaaaaaaaaaaagctgaaaagaaagaggtaattagcaagtttttgtgaggatatggagagattggaaccctcacacatggctggttggaatgtaaaatcgttcactaactttggaaaatggtctggcagttcctcacatgtttaaacatagagttatatgatccagcaatttcccttctagatatgtaaccaagagaaataaaagcatattccac

SEQ ID NO: 716736 - DNA, 461 bp, Homo sapiens
caatagcactgaatctagtaaattacttggggcagtatggccatttcatgagactgattcttcccacccatgagcatggaatatttttccattggtatgtgtcctctcttatttctttgagcagtggctggtagttctccttgaagaggttcttcacacccatcattagctgtattcctaggtattttattctcttggtaacaatggtgaatgggagttcattcatgattgggctctcttgtctattatgggtgtataggaattgaagaaataggtctatggctggtgtataagaatgcttgtgatttttgcacattgattttgtatcctcagactttgctgaacttgcttatcagcttaaggagtttttgggctgtgacaatggtgttttctagatatagaatcacgttttctgcaaagagagacaatttgatttatctcttgctattgaaacttctaaa

SEQ ID NO: 716737 - DNA, 286 bp, Homo sapiens
  misc_feature (84)..(84): n is a, c, g, or t
aagaatgcctgggacaaggagccagtgctggttgtgtcctttgtggtcgggggcctcgctgtaattttgcccccattaggcccntatttcaagtattcggtcatgatcaacaaggccacgccctacaactacccagtgcccgtccgtgatgatgggaaaatgcccgaggtgcccagccacccccaggaccctcagggccccagcttggagtggttgaagaaactgtgagcacctccactgacaaagggggcccctcccacggttcccaataaaaatgtgaaaacca

SEQ ID NO: 716738 - DNA, 1109 bp, Homo sapiens
taccagagcaaccttagccaaaccatttacccaaataaagtataggcgatagaaaatgaaacctgggcgcaatagatatatgtaccgctagagggcaaaggatgacaaacattatagaccgaaggcataatatagcaaggactaaccccgtgataccgttctgcagtaatgaattaactagaagatgaactttgcaaggtagagcgcaaagctaagaccccgcgaaaccagacgaggctacctaagaacagctaaaagagcacacccgtctatgtagcaaaatagtgggaagatttataggtagaggcgacaaacctaccgagcctggtgatagctggtggtccaagatagaatcttagttcaacgtttaaatttgcccacagaaccctctaagatccccttgtaaatttaactggttagtccaaagaggaacagctctttggacactaggaaaaaacctggtagagagagtaaaaaatttaacacccatagtaggcctaaaagcaggcagcaattaagaaagcgttcaagcgtcaaaacccatgtaccgtaagaaagatcccaaacatataactgaactcctcacacccaagtgggaccaagtctatcaccgctatagaagaactaatgtgagtataagtaacatggagaacattctcctccgcataagcctgggtcagattgaaacgagggaactgacaattaacagccaatatctacaatcaaccaaaagtcatgattacctcaatgtgaacccaaacggggagctcatagggaaggtgacaacgttcaggaatcggaatttaacccgctggtttccaaaagttactttagattcaccagatcaggggacgctggccagggaacatgttaaggggggaaccaacgggcaggtgccatacaacgtgccttaaaagggccagagaaagaggcccaagggacaaggggcatcatacacaacagaagaagagccgcaaagggggcgaaacacagagagaccacggcgcaccatatatgacacaaacacaccagggcacaaacacgatatagggggggcgacacccaaagaaacaaaacatatataacaaaacacaactgcgcggtgacaa

SEQ ID NO: 716739 - DNA, 107 bp, Homo sapiens
aggagaacggggctgaggaggaagaagaagaaactgccgaggatggagagagagacccctcccctgggagcctggagctgcaggatcccaggggaggggtctctctc

SEQ ID NO: 716740 - DNA, 284 bp, Homo sapiens
  misc_feature (126)..(126): n is a, c, g, or t
ctttcatagctgaggtttatgtttcattttactgccttttgctacaagcactgggaacagttgctattaagtatttatgatattttggtaaacaccatcctaaaatggaagtgaataatatatatnctctaagccaaagcattgaaaaaaaatcttcagggaaaaaaatatcagtttcttctaacatttggttctgggattttaaatttctctttaaagatcatgttgtttagaaacacaaaatgagatttattgtatttgtttttagtagcacgtaggctttt

SEQ ID NO: 716741 - DNA, 217 bp, Homo sapiens
cggccgctgtgtcgtatgtggtgtgagcattgaagctctctcacactccaactctatctgttcttccttatatttttaatggaaaggacagtgaagtaccttaaaggagggatcagtattaacacagtaatcactatgaataatcatactttctatagtaattctctccgtctagccagttacaatcttcagacatgtgtattttataattactcta

SEQ ID NO: 716742 - DNA, 1001 bp, Homo sapiens
ctcagttcactgcaatctctgcctctcaggttcaagccattctcctgcctcagcctccccagtagccgggattacaggcacccgccaccacacccggctaattttgtatttttagtagagacggggtttcaccatgttggccaggctggtctcgaactcctgaccttaggcgatccaccttcctcggctcccacagtgctgggattacaagtgtgaagcactgtgcccggccagtcatccatgatttcaatggggtccaaaggcctctttttctttgttaagtatttccctggtctgaaatttcttttcttcttctttgttctttcttttaggaacaccagacgcttgtgcgcatatattcacccccagggcgtgagagttgcaaggggggcaccaagatcttcgtgccacacatgggaaggcatatcgccctcccagggatacaccgccatttctcctgccttcaaagcacatccacagagtcacgctggcggatacaacagggcacccagtgcccaccaaacagcaccggggcaaaattctccattaacagggcgaatcaacaaagcactaacacagagaggggggtcacaacacgagggttacaacacacggagacaggggtcctaagaagaatctccatagacaccctcgagagacaaccacccaggccaacagggaccaccccacaaagggccgtgggagaattacacagggcggatggcagccaaatgcccccccggggcatctggtgggcatgcgacaaagtcccaccattacaagagcgccacactccgcccccacgtctcccagtcagcgacaccacctataccaaggagaaaggggagaattggtcggaacaacaagtcaaacgatcaaccagctgataatttcccccagacaacaacgacagagcagaacaagagcagacagacgaaagaacaacaccgccaccgaccccacatcaagacgagggcagcaacaaacaagcaacacgctaa

SEQ ID NO: 716743 - DNA, 108 bp, Homo sapiens
gagaaagtccttgccattctaaaagccaccccacttctctaaggagaatggcccaatcttcccaagtccacacaggagggaaacattgtttgcgtaaatacgcaatgc

SEQ ID NO: 716744 - DNA, 503 bp, Homo sapiens
tcataggttcgcaggtgtaggttcctgacgatttgtggatctcctcgagtgcagactgtggaagtatgcttttcaagataacgagggcatgcattgtccatgggaggaggaggagggcctggttgagctgcacagcttccactgtcctccgggccaccgtctccggcttcagtgggggaaagaggttgggaaacctgaacacaggaagagacacagtgggtttctcctggagaggcatgtgcttatctggaagtctttatgaggctgacatgtctgggtcaccctttggcttttcctgtctgagagattcgaggcctgcttggaatactccctctaccccacaaccatccaggtgccacattccctcactcccccaggcacacaggggtctcttcttgagtcaaggacttctagcccacccactggggacccactctcccaagccctccaagggctcccagtgccctagggcttggcctttccatggccctgcgaacctatga

SEQ ID NO: 716745 - DNA, 358 bp, Homo sapiens
gatctgcatgtctagcaaggttccaggtacttttaatgttgctggttctggctcatactttgagaagcaagttcctagagtcagagggtatttcctctatgttatttgttaccaaaaacccttacaactatgaacaggtttaactaggcataaatgaagataacaggtgggaaaataattgccgatatttggaaaatccaacaaaaatttaaataatgtctcaaagaaatgagagaggccaggcgtggtggctcatgtctgtaatcccagcactttgggtggccaagatgggcagatcactccaactcaacagagttggagaccactctggccaacatagcaaaaccccatctctact

SEQ ID NO: 716746 - DNA, 150 bp, Homo sapiens
agtgcaccagctctcccatctggcgcagcttttgtgctagctcctgccctctctgtggatgttcctttcagcctccgtcacaagatgtgagctccttcctggccttcagagtttcaagctacataatcattttctcatagtctgtctctc

SEQ ID NO: 716747 - DNA, 798 bp, Homo sapiens
  misc_feature (527)..(527): n is a, c, g, or t
tgcggtggctcatgcgtgtaatcccatcactttgggaggccgagtcaggcagatcacctgaagtcaggagttcgagaccagcctggccaacatggcgaaaccctgtctctactaaaaatacaaaaattagtcaggcttggtggcgggcacctgtgatctcagctactcgggaggctgaggtaggagaatcgcttgaaccctggaggcagaggttgcagtgagccgagattgcgccattgcactccagcctgggcgacagagcgagacttcgtctcaaaataaataaataaataataaataaataaataaactcctttaatctgaatatggtagtgaaaggcaagatcccatgtctcagaaagttgatattgagggatattgactataagaaacgaacaacttagtacaggtgaataagcagcaaaacagcttggagtcaattcctgactattcagtggcattatccaggtagatttctggagacaagtgactgtcctccatacctttctttgtgccctgtgaactgncacgaacatctgccagtagtatttatggggaccggagaaaacgcggatgttcacccagggtgaaacgtggtgtgggctgccttatcttgtttaatttgcccgcaaacgcttccttgaaagggggtaattatgagttggcactttattaacaggatcccatggttccttttgcagggaaataactgcttaggatcccacagtcggggccaattgaccccggtcatttaatacgagcccaccttcttccacaaaaggcgcgcctccccctttg

SEQ ID NO: 716748 - DNA, 441 bp, Homo sapiens
gtgctgagcgtcgaccttctgctctcaaagcgatgtaccaaccagacagagacccattgagggcacctaaggaaccctgagaggaaatggtgttctttcagatcagtggcgatttcctgagcattcacgtgttctaggccgggtgctagtcactgatgagagatacaggcctcatccctgtgagcctggattccaaggctttcaggaacctttgaccaggaagtaacaggaagttctgaggggccctggggctttagactcattttgaaatgtcctttgtggcaccagaagtggttgtgtagaggaagtgtctctaggctgcggtgtgcatgggtgcgtgtgcaatgccggcaaattcacagaggtctcctctatagatgcaagggtgctgcattgaggccagcaaggttgatggctgtggggtcgccgctgctggtttcg

SEQ ID NO: 716749 - DNA, 871 bp, Homo sapiens
  misc_feature (5)..(5): n is a, c, g, or t
  misc_feature (14)..(14): n is a, c, g, or t
  misc_feature (27)..(27): n is a, c, g, or t
  misc_feature (148)..(148): n is a, c, g, or t
  misc_feature (391)..(391): n is a, c, g, or t
  misc_feature (393)..(393): n is a, c, g, or t
  misc_feature (871)..(871): n is a, c, g, or t
ggggngggactttnggggggaaaactnaaggagaagaactggaaaggaaggagaggaaagaagaggagtgggaaaggggtgaaagcaaagaaggaggggagaatgagtgataaaggaaaagggagggaatagaatagggaacggagangaaggggagaagaaagaagaggaagaaagaaggcgaggggagagaaaaagagagagggggggtgaagggggggaagaggggaaaggaaaaagaagcgaagagagaagagaaaaggagggcgggcgaggggagggagagagggagggggcggagagagggagggagagcggaggagaggggggggggcgggggcgagagagggggagggggggggggggagggggcgggggccgaggggggggngntggaaggagggagagggaggaagaagagatgtccgaagaggaagggaggggggggagggagaaagaaggagaagaaaaagagagggagagggaaaaggagaagagagaaaaggaaagagaggagaggaaaaggaagtagagagaggaagcgagaagcaaaacgaaagaaggaggagaaggaagggaggggaaagagagggagagaagaagaggggagacgacgagaaggaagggaggcgggggggggaggagaggggagggaggaggcgggcgaggaaacgaaggggggggagggaagagggaggggcaagaaggagagaggaagaggaagaagagaaggagagggggagaaggggaggcgggaagggggagaggggaggggggaaggggaggaggggggggagcgagaaagaggaagcgaggaaggggaggggagagagcagacaagggaggggggggagagggaggaggggagagn

SEQ ID NO: 716750 - DNA, 158 bp, Homo sapiens
ggatacctttcctcacaggtttctactacaagagcacataatcgagaccgcaaacatatcatacacaacgcctgcagccctatctattactctcatcgctacctccatgacaggcgccttggaactggatattctcttaaccctaaggtcaaccctgt

SEQ ID NO: 716751 - DNA, 839 bp, Homo sapiens
gcttctccggcgtctccgacgacagacgccgccgctatgcgactacgattccctcctatctgctggctgtcctaagcggcaactcctcccccagcgccagcgacatcatgatgatcttggtcgatgtgggtatcaagtgcgtcgaggagcgggctccgcatcgtcatcggtgacctgaagtggtaaatgaacatggacgacgatttttgcccacgtgtatatcggctgaagtctatgtccagtagatgcctcgcctgcgcctggggacatgccgaccgtctctggcatggcccaaggactactggcagtcccctggctgtgtgggtctcctgtcccctggctgagaactctaggtacctacaaaatgaacatgagggaaggagaagcatccctctcctgaagattctggatggtatgcatctggctactcacgttgtgtggagctgtccgtgggtccatgcgcatcggcagtgggctgctggcagaggattcccaactggggttcccatgaccccaggctcctgcaggaccttgctgggccagatccgtgtgggtaggcgggccatcccaaacaggtgatgaccccaccaaaggagagaggtactgttgcaggccggatgcagcgtgactgccacagacagtattgccggggtctccaaacccagtacccacctggccgtgggggtcacttccccacaacttatggggccgaggaagcaccccctccagggcattgatgggcccacctcctggtatgagactcctatgtgtcccccaatgggggatcccccctgtaaaagggaatccatggggcaatgtccctccggattgggttccag

SEQ ID NO: 716752 - DNA, 334 bp, Homo sapiens
  misc_feature (254)..(254): n is a, c, g, or t
cagagtatctagaggatcccttctttgctggagcagaaacgggaaactaatacattgtggatgctgttaactaaaccatacatggcaggattccatagcctcatgcactagcacagtgccttacgtagtaaggtaagccttggtgtatttttgggagagaaggaaaaattggaggaaagaaagaaagggaataaagtagctcgtatggagcatggttgtagtttgtctagtttcgtggattgaagcaaaagctntgaagttgagctatggaaaactttgaaaggcccaccccaggcaacaagaaacccagggttaccgaagctacgaaatatcg

SEQ ID NO: 716753 - DNA, 356 bp, Homo sapiens
  misc_feature (268)..(268): n is a, c, g, or t
gcgtcgacgtccgttccagcaggtcacggacggagaatagccaagggaaaagagctgtcaaacagccttgtggctattgggtcatttttcgactggtggtcacgggtggttggagtcggtgggcaagcgttctaacatgagggctcaggcctgtcggatattttcatccggcggcaagacggtcaggagaatgcatgaatttccacacccgcaaatgggtcaaacccgaagacctcaatcccaatggcacgctgttcggcggcactgnctgcgcatggatcgacgaggaagcggcgatctacgccatcgtccagctgggcaatcagcgcgtggtaaccaagtacatctcggaaatc

SEQ ID NO: 716754 - DNA, 628 bp, Homo sapiens
gagcgggggtcagtcgggacagaggagactagatggcgctgcgggcgatgcgggggatgtcaacggggccgcacccgagtctagccgtgcccaccggttgggccggtcggtgggagctcatggagtaggcgctggactcgatcagtcggaactacgctctcccaatctcgtctcgacatatgagacagtatctgggagtcagattggtccacatagtgatcttagatcatgttaatgtttcccaggtatgcgtgaaactgtcgatttgagcttacctggatggcaggaaagagaaggtgggcaagttctggaagtgagatggttccaaggctagtagttgaggtatttgaagggacttcagggtatagatgctaacgaaaacgtcctgtgacgttatactgtgggatattctccgtagacatcgcggtgtctagaggatatgcttgggtcgggtattcagatggctcgggaaaacccattgagcaggaggtcctgttgtactggccgaagacttccttgatatcatgggtcagccaatcaacccgtcaatgtcgaaatctacccaggaggaaatgattcggacttggcaattccggccatcgaatgggatgaacagtattgctagggg

SEQ ID NO: 716755 - DNA, 434 bp, Homo sapiens
  misc_feature (1)..(1): n is a, c, g, or t
  misc_feature (8)..(8): n is a, c, g, or t
  misc_feature (100)..(100): n is a, c, g, or t
  misc_feature (134)..(134): n is a, c, g, or t
  misc_feature (221)..(221): n is a, c, g, or t
  misc_feature (227)..(227): n is a, c, g, or t
  misc_feature (261)..(261): n is a, c, g, or t
  misc_feature (329)..(329): n is a, c, g, or t
  misc_feature (432)..(432): n is a, c, g, or t
ntgcggcngaccggtggcggcatccaagcgccccagcagacccccatcatgggcagccagagctccaaggctccccggggcgacgtgaccgccgaggagnagcaggcgcttcccccgcgaaggccaacgcagtnagaatggcacgtgaaaagcaatggagacttatccccaagggtgaaggggagtcgcccctgtgaacggaacagatgaggcagccgggncactgngactgcatcgagccagcaccccctagccagggtnctgaggcaagggggaggtcccccaaggagacccccaagaagaagaagaaattctctttcaagaagccntttcaaattgagcggctgtccttcaagagaaatcggaaggagggtgggggtgattcttctgcctcctcaccacagaggaagagcagaacagggggaatcgttnct

SEQ ID NO: 716756 - DNA, 170 bp, Homo sapiens
ctgatttctgtacccgtatttttccactcgcactcatatacttaggtaccttttgaccccatggaaaaaaaatatctaactgttcagaactaccaataacatggaagaagagaaatttatttttttttttttggaaaatgaatttgtcccccatcaaagtgaattctaaa

SEQ ID NO: 716757 - DNA, 736 bp, Homo sapiens
aaaaacaccggtgggactaaatttacaaacatttataaacgacctcattttaaaacaaaactagggcaaattcaaaggggggtcactgatatcccataagggaccacactacaagactatacaaacaatgtaacttaaaacgcaaaaacaacaaaaaatcctatgcagatagacaatacacagatcaaaacactaaagctactctacaacactcttacatatatcacacttaaattcccataaccttagaagtctataatcatattcctaaccagtcaccatttttaaaaaatccaacattaaccacttattccataactaaccacaaccctgaactaaaagacactcatatactagacacatcttaaaacaataatctcatctaacatacaatagttacaatatacatataaacaatcgtatatactaaacttcaaattaatatacaaataattagaacatccatagaaaattcaaaaacaagacatacactcatcatataaccaataaatccaaatcatattccctagaacacccacacaatctcaaaaaaacaaacaaagccaaccaactttaacaaatctactacttaaaacagcctatattacacaccaatccttcaccaaactgtaatacaacacactccttatattatatgcgcaataacagctctatatcattgcctactacgaactttatcctacatcttactctcactactataaccctctccacg

SEQ ID NO: 716758 - DNA, 170 bp, Homo sapiens
  misc_feature (8)..(8): n is a, c, g, or t
  misc_feature (29)..(29): n is a, c, g, or t
  misc_feature (45)..(45): n is a, c, g, or t
  misc_feature (56)..(56): n is a, c, g, or t
ttcacttnattaaacagcgcaaaatcttnctaatgttccagtacnaaactttgagnaggaactgttatggggctatagggctccatttttgagtttggttccgtaccctgttactaccacagttggtctgttttatccttacaaactaatactgcagatggagtttataa

SEQ ID NO: 716759 - DNA, 893 bp, Homo sapiens
gactcacagggctgtctttgtttaggctggtgataggggaggtcccgaagccaagccacccttgtgcaggggacattagaaaataagatctacctgtccatctagggcatccgtctcttgtgagcctggaccatgggcaacatcatggagggcaagtccgtggaagagctgagcagcaccgagtgccatcagtggtataagaaatttatgacggagtgcccatctggccagctcaccctctacgaattccgccagttctttggtctcaagaacctgagcccctcagccagccagtatgtggaacagatgttcgagacctttgacttcaacaaggatggctacattgacttcatggagtacgtggcagccctcagcctggtcctcaagggcaaagtggaacagaagttgcgctggtatttcaagctctacgacgtcgacggcaacgggtgcatagacagggacgagctgctcaccatcatccgggccatccgaaccattaatccctggagcgactcatccatgagtgccgaggaattcacagataccgtgtttgccaagatcgacatcaacggggatggggaactgtccctggaggagttcatggaaggtgtgcagaaggaccagatgctcctggacacgctgacccgaagcctggaacttgaccggcatcgtgcgcagactccagaacggcgaacacgaggaggcaggcaccggcgactggcagcggagctgggggttgaagcatcaccctgtgggttctgactgctgagggctggccccgtgcggtgctggtggtgggtgggctggcctgtcttaacttcattaactccttgaaaaaaaaaacacaaacataacctctcgacaatctcctcgggaccccacaaaccaccacg

SEQ ID NO: 716760 - DNA, 153 bp, Homo sapiens
gctgtaagtttatgcaatgcaaaagaatcctctccaatttaggtgagttgcctgaccacgtcctcgaccaaatcggcctctaaagcgtaattcggttgctgacccagccccagcatcggctttattgtcggcaccaggtggcacagcactcag

SEQ ID NO: 716761 - DNA, 188 bp, Homo sapiens
ccccctcccaggaggggccggggagagtggcagtttgcatggcgaaccccccccttcctttttgctgccccttcacttttttggtgccccttttccagtctctttttaccccccctcctggtttgtcctgatccccttttttggatcaggttttttggttggacatataaattatactttcctttcca

SEQ ID NO: 716762 - DNA, 359 bp, Homo sapiens
ccaaaatataagatctgagggtaggacatgtctcattgcccttacagctcttagcgtaggtcaagtaagcattgtttaaaaaaaaaaagggggcagccgggtgcgggggctcacaccggtaatcccagcacttggggaggccgaggcaggcagatcatctgaggtcaggagttcgagaccagcctgactaacagggtgaaaccccgtctctactaaaaatacaaaaattagccgggtatagtggagggcacctgtaatcccagctactcaggaggctaaggctggagaatctctggaaccaggaggcggaggtggtagtgagccgagatcgcaacacggcacttcaggctgggcaagag

SEQ ID NO: 716763 - DNA, 986 bp, Homo sapiens
tgtggtggcagggcgaatgtagtcccagactactcaggaggctgaggcaggagaatggcatgaacccaagaggcggagcttgcagtgagccgagatcgcatcactgcactccagcctgggcaacagagcgagactctgtctcaaaaaaaaaaggctgggctactatgggaggctgaggcaggagacattgcccgaaccccagagggagtaaggtatgcagatgagtcgagcatatgtgccacatgtactccagcctagcgtgacagagccacaaattccatctcaaaaaaaaaaacaaacgctacaccaaaatcttaacacaacttacaacatacaacatcaaacacaacacaaaacaaaaatacagaaccacataagacacctaaaaacaaataacatacaacaactacactcgaaaatatgtaaaccaccaattattataataaatcaaagtgaacacaatgacaaaacccatagagaaaaccacatgtcataatcacacataattatctcctatttaacaaccatactatatataaacaaccctagtacacaccacacacaaacgttataaaaaaaacaaatcaaaaaaaaaacaactacatcacaccccaaaaaaacacacttcttcacaacaaacacacaatcacacaaaaatacacaactaaaaaaaacacaccacccacacataaaaaaaaaacaaaaaacaaaccacccataaaaaactcacaaaacatcaataccaccaccaaatcatcaaaccaataatacaaacaaaaaacatcaaaccacatatacgcaaaaaccaagaatacatataatccagaaacaaatcgaacacctcaaacttccaccgaacacaccactacacccataaactccacaaacaaaccatctctcttattattctcacatatcacaacactcatcaacaaccacaactcaatagcccatactttatcatctacctataactaccaccacac

SEQ ID NO: 716764 - DNA, 699 bp, Homo sapiens
  misc_feature (5)..(5): n is a, c, g, or t
  misc_feature (68)..(68): n is a, c, g, or t
  misc_feature (72)..(72): n is a, c, g, or t
  misc_feature (87)..(87): n is a, c, g, or t
  misc_feature (92)..(92): n is a, c, g, or t
aagcnctggcagtatgtgacaagaaggtgctggctgctgtctccaggctctgagtgaccacacatctncctngaaaggcccctgctnaagcncaacatggtcaccccaggcccatgcttgcactcagaagttttctcatgaggagattgccatggcgaccgtcacagcgttgcgccgcacagtgccccccgctgtcactgggatcaccttcctgtttggaggccagagtgaggaggaggcgtccatcaacctcaatgccattaacaagtgccccctgctgaagccctgggccctgaccttttcctacggccgagccctgcaggcctttgcccttaaggcctggggcgggaaaaaggagaaccttaaggctgcgcaggaggagtatgtcaaacgagccctggcccacagccttgcctgtcaaggaaagtaccctccgagcggtcaggctgggggtgctgccaacgagtccctttttgtctctaaccacgcctattaaacggaggtgttcccagggtgcccccaacacttcaggccctgccccctccccctttttaaaaggaggccccctcctcgggggtccagggtgggttgcccgcgctcttttttccctcgtgacagtggtgtgtggggttgtctgtgaatgctaagtccctccccccttccggccccctgcccaataaacagcttttttagggggga

SEQ ID NO: 716765 - DNA, 288 bp, Homo sapiens
ccatcctctcccctaccctaccaacacatcccctttccgccgtcagcgggggcaccaataatcacagctgagacgcatggttaaatccagattgaagtaatttgttatattgtgagaacattcacattgcatttcaatcaatgtcacacttaattgaggagtagaaggctttgcattctttgtttgtttacgattccttcaagagtaattaacataataattaagatatttatattcttgttaaatttcaaaaacaaattcttcttttattaaagatgagataaattc

SEQ ID NO: 716766 - DNA, 379 bp, Homo sapiens
cagtagagagggaaaatcttaagccagaggaactccaaaaatgagtgtttggagcgcttcagttcacctttaaaggccaggacgggccccacgtggctggcggcctcgttccagtgggggcacgtccttgggggtttttaatgtttgcagctcaagggcgggcccttttttaaaaataaaaatgggggttatttttatttttttttgtaaagtgatttttggtcttctgttgccattcggggggatcctgttttgccctgtggccaatgtgagatcggggggttctcctaatgttttcccggggcttggggattggacccggggccagctcccgtaatgcattgcctgtaccaatgtaataaaaagcctctttttttta

SEQ ID NO: 716767 - DNA, 124 bp, Homo sapiens
gagccttaacctcacctcccctaaaccagttcactgggacagggcagaacaggcagagcaggctgggggatcgggactggtggcaacaagaaattcttatcgtcgttgctttaaagtagatatt

SEQ ID NO: 716768 - DNA, 206 bp, Homo sapiens
  misc_feature (46)..(46): n is a, c, g, or t
  misc_feature (78)..(78): n is a, c, g, or t
  misc_feature (90)..(90): n is a, c, g, or t
  misc_feature (102)..(102): n is a, c, g, or t
  misc_feature (106)..(106): n is a, c, g, or t
  misc_feature (130)..(130): n is a, c, g, or t
  misc_feature (153)..(153): n is a, c, g, or t
  misc_feature (178)..(179): n is a, c, g, or t
  misc_feature (193)..(193): n is a, c, g, or t
  misc_feature (199)..(199): n is a, c, g, or t
cggcacgaggcagctggctgagaaacgagagcacgagaaagaagtncttcagaaggcaatagaagagaacaacaactntcagtaaaatgngcagaagagaanactncacccacaaaatcggaagctaatnaaagagaaccgagaggcacaaanggctgccaaacttggaacgtttgcnnagagaaggataagnacattnaagaagt

SEQ ID NO: 716769 - DNA, 251 bp, Homo sapiens
aaaaacccccccttggccaaaaaagggttgcccccgggggggtttttttttttcccctttttggtaggggtttttcccccccccttcccccaaaaaaccctttccctttccccggttttttttttttgggggcccccaacccccccccccccgggttttttcttttccccgggatttttttggcggtcccccttttttttttttccccccccccccccttttaatttaaccccccccccctcccttttgga

SEQ ID NO: 716770 - DNA, 128 bp, Homo sapiens
cacgccaccggagaaggtctctttccataaacaaaccaccagcaagaatgatcatcatcagttggtgacctgtgcccacctgcccacacctgtcagccaccaagggaccccttctccggtggcgtggt

SEQ ID NO: 716771 - DNA, 142 bp, Homo sapiens
ggtcggtaccacttcaaactcaatgtatctgaagtggctcttcatcacgcctcccagaaaccattccctgcaatgagtccggaggagaggaggagagtctgtgtgaggagctagagaccgcaacggggtcagatgtgtgcac

SEQ ID NO: 716772 - DNA, 430 bp, Homo sapiens
atttcacacacacactttcaagagctataagctatcacttactgaatttcaaaggggtctgatttatttataattgattatgttagtgagggtaggttaactgctattaaaattatatcaaaaatatcaccagtttagtgcaccgtaattcacgcaaccatcttaaggcgatgttctttgtcttagcagctgtccttgtagtagtgactaaggtatgcaagctcctgtcgctctgccttcccctaggtcatttgagttctctctgaggcagatgggcaaagtgcatggaggatctcacgtaggaagttttgtgggagataactgtgtgtcatgcattacttccacccacatcccaatggctaaaatgcatgtgcatggctctatctaactgcaagggagcctggaaaatgtagtctacctgggtactaaa

SEQ ID NO: 716773 - DNA, 411 bp, Homo sapiens
  misc_feature (34)..(34): n is a, c, g, or t
  misc_feature (37)..(37): n is a, c, g, or t
  misc_feature (46)..(46): n is a, c, g, or t
  misc_feature (49)..(55): n is a, c, g, or t
cacacacacccccacccccccccacttaaggctnggnacgaggccnggnnnnnnntccgccactcagggtcacgcccagaaccccctgcaggtcggggctgagctccagtcccgcttctttgcctcccagggctgcgcccagagtccattccaggccgcgccggcgcccccgcccacgccccaggccccggcggccgagcccctccaggtggacttgctcccggtgctcgccgccgcccaggagtccgccgcggctgctgcggccgctgccgccgctgctgccgccgtcgctgccgcgcccccggcccctgccgccgcctctacggtggacacagcggccctgaagcagctccggcgccccctccgccacccccgccagtgtcggcgcccgcggccgaggccgctcctctc

SEQ ID NO: 716774 - DNA, 186 bp, Homo sapiens
acgcgcggtgtattctcctcctccaagcatgtccaccattgtgtcatggtgctcgggacacagtcacctgatgcggggaccacggccactccacctcgtgcttgcgctgtcagtgggcagcactgtgctgtggcctgcactgagtgtccctgtcgggctagtcggggactgtcgggctagtcgggg

SEQ ID NO: 716775 - DNA, 117 bp, Homo sapiens
ctaggggtcaatcagagctgcagctggtggcctacaccacagccatagcaatgtgggatctgagccacatctgtgacctacaccacgggttacagcaatgctggatccctggagtgt

SEQ ID NO: 716776 - DNA, 183 bp, Homo sapiens
gattgatcaaagccgccacggtgcaacaagctagcggtttacttgtgacctctgcctcatctttcttcttttgcagcttcagactctgcgcattcgcttcttcctccatttggctctcatggcgcagaggtttccaaaagaaatggcgctaaggccgagagaaagcgcggcgttggatgcagt

SEQ ID NO: 716777 - DNA, 700 bp, Homo sapiens
aaaaccccctttttttttacctaggtgaaaacgcctttgttatgtgaaaaattcagttaaccgtaacacatggcccggggttccttttacttgttcccagaagaggggcaaaaccaatttagaatttgttagagttgtccctattaaacaagaaagattttggttataaagtgttcttgctttcacagcaccatcccagggtgttaggcgacaagagggggaattttctctgcctccaggcaattggtgccaagtcagttgaggggataaatataagatagatcgttttcttcatcaaagagtactggcatatgtcccaacatagctgcctcagccaaatggtactcaggtttcaaatgggtgccgaactttgtggtagcatgtcagtcatcaggtgtttggcaacgtgatgtaggcctcaatattgtcaggtccgttatctctttggggtccaggaatggcaagaccagcaagttgttctccaatgctagctgtgatctctgcaaacaagtgtcacttgtgctttatcttaaccgccagaacatcccttctgtagctcaggagtgcgcccctccgccccatttgctcgcagtatcctagaatttttgagctctccctccagttccctaggagttccatgtctttccatgttccctcccatgcctagttggagtgcagagttaaggttatgaatatgaca

SEQ ID NO: 716778 - DNA, 1001 bp, Homo sapiens
  misc_feature (22)..(22): n is a, c, g, or t
  misc_feature (34)..(34): n is a, c, g, or t
  misc_feature (46)..(46): n is a, c, g, or t
  misc_feature (55)..(55): n is a, c, g, or t
  misc_feature (69)..(69): n is a, c, g, or t
  misc_feature (83)..(83): n is a, c, g, or t
  misc_feature (94)..(94): n is a, c, g, or t
  misc_feature (107)..(107): n is a, c, g, or t
  misc_feature (126)..(126): n is a, c, g, or t
  misc_feature (129)..(129): n is a, c, g, or t
  misc_feature (176)..(176): n is a, c, g, or t
  misc_feature (191)..(191): n is a, c, g, or t
  misc_feature (204)..(204): n is a, c, g, or t
  misc_feature (212)..(212): n is a, c, g, or t
  misc_feature (246)..(246): n is a, c, g, or t
  misc_feature (281)..(281): n is a, c, g, or t
  misc_feature (304)..(304): n is a, c, g, or t
  misc_feature (309)..(309): n is a, c, g, or t
  misc_feature (318)..(318): n is a, c, g, or t
  misc_feature (323)..(323): n is a, c, g, or t
  misc_feature (330)..(330): n is a, c, g, or t
  misc_feature (333)..(333): n is a, c, g, or t
  misc_feature (456)..(456): n is a, c, g, or t
  misc_feature (465)..(465): n is a, c, g, or t
  misc_feature (480)..(480): n is a, c, g, or t
  misc_feature (482)..(482): n is a, c, g, or t
  misc_feature (490)..(490): n is a, c, g, or t
  misc_feature (580)..(580): n is a, c, g, or t
  misc_feature (896)..(896): n is a, c, g, or t
gtgcgtccaacccagccccccncctcggtccctnaccccagctcgntgccccatnaccgcctctccctngctcccaagggtgnaggtgggcgcnaggcccgcccccntaacatgttcccttgcctnagngctgcccctggtctcccacaacagccacccagaggcacccccatgangtttttttctggttnactcccaaacccnagtgtccnaggctccagtcctaggagaacagtccctgggtcngcagccaggaggcggtccataagaatggggacagngggctctgccagggtgccgcacntgtcnagaaacacntgttntgttccnccncctcatgcatttccagcctttcaaccctccccgactctgcggctcccctcagcccccttgcaagttcatggcctgtccctcccagacccctgctccactggcccttcgaccagtcctcccttntgttttttntttccccgtccttcntntctctctntctctttttttctctctctttgtgtgtgtgtgtgtgtgtgtgtgtgtgtgtgtgtgtgtgtcttgtgcttcctcagacctttctcgcttntgagcttggtggcctgttccctccatctctccgaacctgttcgcctgtccctttcactccacaccctctggccttctgccttgagctgggactgctttctgtctgtccggcctgcacccagcccctgcccacaaaaccccagggacagcggtctccccagcctgccctgctcaggccttgcccccaaacctgtactgtcccggaggaggttgggaggtggaggcccagcatcccgcgcagatgaccccatcaaccgccagagtcccagacaccggttttcctagaagcccctcacccccactggcccactggtggntaggtctccccttatccttttggtccagcgcaaggaggggctgcttttgaggtcggtggctgtctttccattaaagaaaccccgtgcaacgtgaaaaaaaaaaaa

SEQ ID NO: 716779 - DNA, 541 bp, Homo sapiens
  misc_feature (469)..(469): n is a, c, g, or t
  misc_feature (482)..(482): n is a, c, g, or t
  misc_feature (510)..(510): n is a, c, g, or t
  misc_feature (518)..(518): n is a, c, g, or t
  misc_feature (522)..(523): n is a, c, g, or t
tggcattttaaaggagcttgtttaagtttttcttttgttgtataccattcggcttttaaaaataaattcacacttgtttcaaaggctgaacatacagccggaagaacaatatctaccttagagcttgtagcatgttaggtagtgtcctctaaaatttcatgtccactctgtacctcaaaatttgaacttatttgtaaataggttatttgcagatgtaattggtttaagattgagatgagatcatactggatgagggtgggtcccaaacccaatgacatgttcttataagaggaggagaggacacacatagtcactaagaagagggctacgggaagatggtggctgagattggtgtgatgcagttatacaatccaacgaatgccaagggtctccatgagcccccagaagctaggaagaggccaggtacggtggctcgcacctaatcccagcactttgggaggccgaggtnagaggatggttgngcccaggggctcaagaccagcctgggcnagaaggtnagtnntcgtctctacaaaaaaaa

SEQ ID NO: 716780 - DNA, 976 bp, Homo sapiens
  misc_feature (22)..(22): n is a, c, g, or t
  misc_feature (34)..(34): n is a, c, g, or t
  misc_feature (46)..(46): n is a, c, g, or t
  misc_feature (55)..(55): n is a, c, g, or t
  misc_feature (69)..(69): n is a, c, g, or t
  misc_feature (83)..(83): n is a, c, g, or t
  misc_feature (94)..(94): n is a, c, g, or t
  misc_feature (107)..(107): n is a, c, g, or t
  misc_feature (126)..(126): n is a, c, g, or t
  misc_feature (129)..(129): n is a, c, g, or t
  misc_feature (176)..(176): n is a, c, g, or t
  misc_feature (191)..(191): n is a, c, g, or t
  misc_feature (204)..(204): n is a, c, g, or t
  misc_feature (212)..(212): n is a, c, g, or t
  misc_feature (246)..(246): n is a, c, g, or t
  misc_feature (281)..(281): n is a, c, g, or t
  misc_feature (304)..(304): n is a, c, g, or t
  misc_feature (309)..(309): n is a, c, g, or t
  misc_feature (318)..(318): n is a, c, g, or t
  misc_feature (323)..(323): n is a, c, g, or t
  misc_feature (330)..(330): n is a, c, g, or t
  misc_feature (333)..(333): n is a, c, g, or t
  misc_feature (456)..(456): n is a, c, g, or t
  misc_feature (465)..(465): n is a, c, g, or t
  misc_feature (480)..(480): n is a, c, g, or t
  misc_feature (482)..(482): n is a, c, g, or t
  misc_feature (490)..(490): n is a, c, g, or t
  misc_feature (580)..(580): n is a, c, g, or t
  misc_feature (871)..(871): n is a, c, g, or t
gtgcgtccaacccagccccccncctcggtccctnaccccagctcgntgccccatnaccgcctctccctngctcccaagggtgnaggtgggcgcnaggcccgcccccntaacatgttcccttgcctnagngctgcccctggtctcccacaacagccacccagaggcacccccatgangtttttttctggttnactcccaaacccnagtgtccnaggctccagtcctaggagaacagtccctgggtcngcagccaggaggcggtccataagaatggggacagngggctctgccagggtgccgcacntgtcnagaaacacntgttntgttccnccncctcatgcatttccagcctttcaaccctccccgactctgcggctcccctcagcccccttgcaagttcatggcctgtccctcccagacccctgctccactggcccttcgaccagtcctcccttntgttttttntttccccgtccttcntntctctctntctctttttttctctctctttgtgtgtgtgtgtgtgtgtgtgtgtgtgtgtgtgtgtgtgtcttgtgcttcctcagacctttctcgcttntgagcttggtggcctgttccctccatctctccgaacctgttcgcctgtccctttcactccacaccctctggccttctgccttgagctgggactgctttctgtctgtccggcctgcacccagcccctgcccacaaaaccccagggacagcggtctccccagcctgccctgctcaggccttgcccccaaacctgtactgtcccggaggaggttgggaggtggaggcccagcatcccgcgcagatgacaccggttttcctagaagcccctcacccccactggcccactggtggntaggtctccccttatccttttggtccagcgcaaggaggggctgcttttgaggtcggtggctgtctttccattaaagaaaccccgtgcaacgtgaaaaaaaaaaaa

SEQ ID NO: 716781 - DNA, 390 bp, Homo sapiens
  misc_feature (78)..(78): n is a, c, g, or t
  misc_feature (220)..(220): n is a, c, g, or t
  misc_feature (226)..(226): n is a, c, g, or t
  misc_feature (229)..(229): n is a, c, g, or t
  misc_feature (285)..(285): n is a, c, g, or t
ccctttttaaaatcccaaaccaaccttttgctttggcctgaggctggaatggttttttggtttggccggccctggcanccccaggcccctggcccaaaaaaaaaacccccaggagggggttcccccagcctgccctgctcaggccttgcccccaaacctgtactgtcccggaggaggttgggaggtggaggcccagcatcccgcgcagatgaccccccanacaccngcnaaatccagacaccggttttcctagaagcccctcacccccactggcccactggtggntaggtctccccttatccttttggtccagcgcaaggaggggctgcttttgaggtcggtggctgtctttccattaaagaaaccccgtgcaacgtgaaaaaaaaaaaa

SEQ ID NO: 716782 - DNA, 355 bp, Homo sapiens
  misc_feature (250)..(250): n is a, c, g, or t
gggggggggggggggggggtctgctccaccttgcttagtggcgtctcatttcgacgttgcgtcttatcacacttgcttgctgagggatgttgtgtcgctgcacagccctgccaaccagaaggttccactcctgtagctgcccactgtatgccgagaggttgaggtgaggcagcatccgccaatgcccatcaccccaagtccgacaccggttttcctagaagcccctcacccccactggcccactggtggntaggtctccccttatccttttggtccagcgcaaggaggggctgcttttgaggtcggtggctgtctttccattaaagaaaccccgtgcaacgtgaaaaaaaaaaaa

SEQ ID NO: 716783 - DNA, 138 bp, Homo sapiens
  misc_feature (30)..(30): n is a, c, g, or t
  misc_feature (46)..(46): n is a, c, g, or t
ggtggaggttgcagtgagccgagaccactnctttacactccagccnggacaacaagagcaagactctctcaaaaaaaaaaagtccgtgatgaaattttaagaaattcttgattaaaataatattattgtataaatgtt

SEQ ID NO: 716784 - DNA, 628 bp, Homo sapiens
gagtaactcacttgatgatcttgccaccttgcttcaatgagccaaatgccgtcttgaatttaagaaaaaatgggctgtctcactgccagctccgcctcctggggtcacaccattctcctgcctcagcctcctgagtagctgggactacaggtgtccgccaccacgcccggctaatttttttattcttagtagagatggagtttcaccgtgttaagcaggatggtctcaatctcctgatttcatgatccgctggcctcggcctcccaaagtgctgggattacaggcgtgagccaccacacccagcctattttctacattttctacaagaaattagtattctgtgttgacattttatttataaattacattactgtatttataaattacattacaggctgggattacaggtgtgagccacgatgcccagcccagatttaaattattgagtaaaagagcactgatttttttaaaaaataaagatgacctctccccaactgctgaggtttgggatgtagaccagggactaataagtaaactgaaggaacagtacaagaaggaacgaaaggggaagaaaggggtgaagactgaaccaataacgtttcatctggaggggcagtcattatatggg

SEQ ID NO: 716785 - DNA, 137 bp, Homo sapiens
ggaccggggcagggaagagggcagctgcgtatttaatttagctctggtttatgacctgacaaaaagccaaaaatatcattctttccaggagtggggaaaagtgagtgatgcctcccaagttctaggtggcttcacaa

SEQ ID NO: 716786 - DNA, 847 bp, Homo sapiens
gagttctatttggtgatcatggacgctgtgtttatttccctccgatggtcctcccctgcttgttgctgtgtgtgaatgtagcaacacctggggtctacgcacttttgtattagccccgctcggcgccccctaagtatacctcggttcgcgggcccacgcgtctttttgctggccgtgactcacccaagagcgtttgtactccatggaagtccctcttggagggccccctccttattggggctccgggaggccccaccgttggggaccacccttcactagggtcacaaaataactttcccccagaaaatttatgtagacagaaaatcacgtgcgtttatgatttaaaactcgctcgcgcctcacacatcattgtttcactcaaccccccctagttggctgatacacaccggttgcttcaaccctctctcctgtgtaggtaactaccattggggcgcaacaatattttaacacaacaagcccactcttctgtctctcctgctccctcacgaactcaattgctacttatatatcccatgcccataaaatatttggcagaactcgacgccctatataccccctcgtgccaccaccccttttgcaccccaaccccccctaatattccccaggcgcgcaccattttcgaaataatgacgccccctggtacataacccctctatgatgatgtttcctcatccctcgcaccctccgatatctcagtactctccttcccacgtcgctatctataagacgccacctcgaaaagaggttccgatatactattccccctaaagttttttgggcattctcccacccccctacccccccttcccccccccaacataacaaa

SEQ ID NO: 716787 - DNA, 294 bp, Homo sapiens
gcaagctaacatatacctgcattatgtctaacaccctggaacagaaggtggccacatttacctaactgtcatttcatcccccaatggtgactcttcccagagtagcatggggcatgaagatgagggctggaccacagtgggcattgtcatcatggtggtggtctgctgtgtggtgggcacttcttggatcggggtcatggttattaaccaccatgagacggcacacctgcacgactatagtatcacaaacagagaggagctcaatctggctgcagacattcccagttacttgtc

SEQ ID NO: 716788 - DNA, 663 bp, Homo sapiens
gaagggatagctggtattgactggagagtgggcagagggtgcatggattggccatgggctctcacaagcctgggcagccccaagtctcttgctctgagcagatacctaatctgggaggagagaggtgaatgggaggagagacaagatgaggggaagccatctttggactaccaggctcctctcccatcatcagcgtggtgaccacctcgcactgtctcctcccagtcacagggaatccttcagctacctctcttcctccatcatcactgcctttcgggcgaacacactggcacccacagtatactgctcaaccacagaatggcttactctactctgcaacccggacatgtcacagatgcctgctatcctgaagtgactatgatcttacgtccatccgctacagaggacagcctcatagaaccatgccgtaggcccttgcagccatttttcctgcgcagaggatcacccaggcacccaccgtatactccctgtccatccatggccctgctgtaaaccgacattctatcgccctaatcctcatccttttccataagcgctaaccctgggccatactcccaacccgcgcatgttcttcccagcgtggcctacggggcttggcccacctcattgtctatcattggtctctcctggccgatggggccg

SEQ ID NO: 716789 - DNA, 280 bp, Homo sapiens
taatgaataacgaaatcccatcataacactttgaacccatctacttagaggacacaagcagcaacaacatgaagaaacgtacgtaaccactatgtcactgatgaacctgcgacgatgttccacactgtgcaaagcccaattaaccactccgacaacatcgccacaaccgctaagtacgctaacccgttaagcacccgcgctttgtcacgtcgccgtaccgacgtagcccacgttgagaacattgctataatgggcatacccagagagagcctgacagcta

SEQ ID NO: 716790 - DNA, 434 bp, Homo sapiens
agttaacagcgtcagggtatcctcttgtctgtggcccatgatcatgtacaagtctctctcacccgaaaagaaatgaaaacagcaatcacctttggataaccctagatctgccactgacacatctgcatttcacaatttttacctgcttgaaagtgtggatcacaccccctcttcattttctcatttccaaatttctcatttgtctctgagtccactgaaatctgtctgctcccaccacccactaaagctattactgccaaggtcatcagtgtcattactgtgctaaagttatgagcaatttcagccctcttggcagtatttggctcgtgtgattgctccctacttaaaactctatttttccatggctgtcacaacactaagtgttgtttaaagtgagtgaaagagagagaagtttaatttttcaccaattccac

SEQ ID NO: 716791 - DNA, 583 bp, Homo sapiens
gatggaagttcagaaaaacaatcccaaggagaaattgacttttcttttgtgtatctggcccatcctcgagcagtaatggattttcctggcgtaaacaagcaaatatatgcctagggcttctgtatgtaatgtactgttgacttgctgcaaagataatgtgtgtcgtctttgggtagagacatttttaccaaatgattgtttgctatacggaggtgactgcagccattggactgaatcaattaatttaacaaataacttcaagagaaatgcttccagtaaagaacgagttcaaaatgctttagaagtaaatctgagacattttcgtagaggtcggaggagatcacttgctcttgtagcacatacgggatatctaccacatcagcaggatcctcatcatgttcacaggaacactccactgcatgccaatgcactttgccactttcatattgcagccagcatcaacccagccacagacattccacttcttccatctattacatctctgagtctaaatgaaaatgaagagaagaccggaccttttgttgtacactggctaaacaataaagaactgcattttactttg

SEQ ID NO: 716792 - DNA, 525 bp, Homo sapiens
  misc_feature (5)..(5): n is a, c, g, or t
  misc_feature (19)..(19): n is a, c, g, or t
  misc_feature (22)..(22): n is a, c, g, or t
  misc_feature (523)..(525): n is a, c, g, or t
catcntgaccaccctgatncangaaacgggcaccctgatcccactctcctaaaccctcccctttggagatttccaaatttttttgggagcaaaaattgggcccaaaaaatccaaaaaaccccttccctctttaagaaaggttggtgttttttgtgaaaaacaccttttttccgggggcccctcggggccgcccaaaaaaaacccccctttgaaaaaaacctcgcccttttcgggggggggaggtttttttttttcccaagaggcgccccccttataaaaagtgttttttcttcaaaaaaaaaggccccccccccccgcgggttccccccccccaaaaaaaaaacccccccccccccaatatttttgggggcgaaagaaaaaaatttttttttttgggggggggagaacaacaaaaaaaccccccgcatcttaataattttggggggggccccacaaaaaaaagagaggggggggcccccccccccccccgcccccccccccccctcttttttggggggggggnnn

SEQ ID NO: 716793 - DNA, 1222 bp, Homo sapiens
  misc_feature (771)..(771): n is a, c, g, or t
gatggaagttcagaaaaacaatcccaaggagaaattgacttttcttttgtgtatctggcccatcctcgagcagtaatggattttcctggcgtaaacaagcaaatatatgcctagggcttctgtatgtaatgtactgttgacttgctgcaaagataatgtgtgtcgtctttgggtagagacatttttaccaaatgattgtttgctatacggaggtgactgcagccattggactgaatcaattaatttaacaaataacttcaagagaaatgcttccagtaaagaacgagttcaaaatgctttagaagtaaatctgagacattttcgtagaggtcggaggagatcacttgctcttgtagcacatacgggatatctaccacatcagcaggatcctcatcatgttcacaggaacactccactgcatgccaatgcactttgccactttcatattgcagccagcatcaacccagccacagacattccacttcttccatctattacatctctgagtctaaatgaaaatgaagagaagaccggaccttttgttgtacactggctaaacaataaagaactgcattttactttgtccatggaagtttttttacagcaacttagaaaaagttttgaacaaccatcttctgaggccagtgtagaagattctaatcaggcagatgtaaaatctgatgaagaaactgatgatggtgttgatgatctgaaaataaatcccgaaaagaaggaattaggctgtgataaaatggtaccaaactcaagttntacatcattatcgtcagctgccattgatcatcagattgaagtacttctgtctgaatggagtaaaaatgcagatatgctatttagtattcatcccatggatggttctttgctagtttggcatgtggattggctggatgaataccagcctggtatgtttcgtcaagtacaggtgtcctttgtttccagaattccagtagctttccccacaggtgatgcaaactctctctgtaaaagcataatgatgtatgcctgtaccaagaatgttgacttggctattcagcaggggaaacaaaaaccttctggcctcacccgttccacatcaatgcttatttcttctggtcacaataaatcatctaatagtttaaaattaagtatttttacgcctaatgttatgatgatatcaaaacatgctgatggttctctgaatcagtggctggtcagttttgccgag

SEQ ID NO: 716794 - DNA, 107 bp, Homo sapiens
  misc_feature (60)..(60): n is a, c, g, or t
agcacagcattctaaactattcacccatgggttcctgggtgcccctttccccccactttnagggctcaccaggcactgccagggagggtaagggctggctccagata

SEQ ID NO: 716795 - DNA, 160 bp, Homo sapiens
tacacaaaatataatcacctaggatagaagaaaagaaaaaaaaaaattcagaattacattcttaacatctattacatctctgagtctaaatgaaaatgaagagaagaccggaccttttgttgtacactggctaaacaataaagaactgcattttactttg

SEQ ID NO: 716796 - DNA, 932 bp, Homo sapiens
cggacgcgtgggctcagccctttcatctgtctctggatatgcatcgtggccctaatcaatgtaaatcagtctgggcatgactttctggctgctcattggaatcatgattgattatattttttcaataactcatcaaaggaccttaggttttaatcaaagacttcagaatcttctgtggggccaagttaaatcattgccagcctggagggaagtctccagtggcataccacagggctctgtcacgtcaaatacttctagaatttagataaagacgtcaatgcataaatattgcatctactgattacccaaagctgagcagaacaggtagatacaacagatggcggaatcgaggtcatcatggtcacctcaaggggagggattaatgccccaacatcagtgagctctggctcaacccacataactgtaaaacctcatgtatagaaattgattgcacttggccaaagatctttttcagggtgacagattcttccagaaggatggtgtagctgtgacaaaagtgaatacacagttgcctacatgggtggacacacgggaccccacggcacaggccagagacagtccagatgaggtggctggcacatcctgggggcatgtgggaagccaccaaaggacacagagctgtgaatccctggagaaggcttgggaaggatgtagcatgatcttgggactcagagcgctagaattgcttctgggcctccaggaggtgtgggcagaagcatccctgcagggaggaagattctctctccattacagattcggccctaccgactgggatttcctcagtaaaacttcgttccttcacagttcattggaaaactcgttacgtttaaattccagccaaaattgtgcataacttattagaccggggtttaaaaacacaaaaaaaaaaaagggggcattggcacacatct

SEQ ID NO: 716797 - DNA, 249 bp, Homo sapiens
  misc_feature (2)..(2): n is a, c, g, or t
  misc_feature (19)..(19): n is a, c, g, or t
  misc_feature (49)..(49): n is a, c, g, or t
  misc_feature (52)..(52): n is a, c, g, or t
  misc_feature (56)..(56): n is a, c, g, or t
  misc_feature (64)..(64): n is a, c, g, or t
  misc_feature (68)..(68): n is a, c, g, or t
  misc_feature (71)..(71): n is a, c, g, or t
  misc_feature (86)..(86): n is a, c, g, or t
  misc_feature (89)..(89): n is a, c, g, or t
  misc_feature (101)..(101): n is a, c, g, or t
  misc_feature (113)..(113): n is a, c, g, or t
  misc_feature (127)..(127): n is a, c, g, or t
  misc_feature (131)..(131): n is a, c, g, or t
  misc_feature (135)..(135): n is a, c, g, or t
  misc_feature (149)..(150): n is a, c, g, or t
  misc_feature (153)..(153): n is a, c, g, or t
  misc_feature (158)..(158): n is a, c, g, or t
  misc_feature (180)..(180): n is a, c, g, or t
  misc_feature (188)..(188): n is a, c, g, or t
  misc_feature (195)..(195): n is a, c, g, or t
  misc_feature (209)..(210): n is a, c, g, or t
  misc_feature (222)..(222): n is a, c, g, or t
  misc_feature (236)..(236): n is a, c, g, or t
  misc_feature (238)..(238): n is a, c, g, or t
  misc_feature (247)..(247): n is a, c, g, or t
cncagggccaagttccaanttctcctcggccgccagaagatcccacatnctncatnagaagttngggnttncaccaagttccaatnctngattgaattttnaagacattggtnggcttgaaaagctngctncatncccatgatcggctnnttngggtncaagtaacatccccaatcgttngccctctnggacaanttggcggggccctnncacttcattgangggttccaattttntngcccccctntt

SEQ ID NO: 716798 - DNA, 401 bp, Homo sapiens
tcgaccgctgcacccaccctactttgggaccaagtttaaacacccagagggcaaaacaaaaaggggcgcaaactaacaggaagtcagccccaccgcaagccggactacaactaactcgtgctctccacgctcaggcgtggaagccaaggctgtgccaggcctggccaggccaagcaggatgacagcaaacgcattctgaacgtgtagcaatcaggtcccctgtaatgtgcttggagagtgtggacaagggccgagatgacgagctatgagctgtgcaagagaatgggcgaagcagaagggcacaaacagaagtactggagggagaggccgggctctcaggaagcagcaggcacgtgccaggtggaagccagctgcaggcagacgaggaaggaggcccttac

SEQ ID NO: 716799 - DNA, 421 bp, Homo sapiens
gatgaacaaataaagaaaatgtggtatatccatacaatggaatattattttgctgtaaaaagtacttataaattctaagtggaaagaaggcagatagtaaaggggacatgtgggggattcgcatttatatgaacatcccggaatgaggtgaatttagagacagaaagaagattactggttgcctagggctgaagaaggggacctgttgagggaaaatggggagaagctcctaacatgtactaatgggcatggggtttctttttggaatgatgaaaatttctaaaattgattgtgatgttgattgcagaactctgtaaatatgctaaaaagcattaaattttacactttgaattgcatgtcaattgtatgtcaagtgaattgtatggtatatgaattacctctcaatacaagctgttattta

SEQ ID NO: 716800 - DNA, 163 bp, Homo sapiens
ggcgagcgacttagtcgtccgtgagaaaaaagaggcgaggctttcccgagatcgtctcagcgatggcgcttcggtcgcagttttgggggttctcggtttacaggaaccctcggtacaaggttcgcagccctctcaaccagctccgagccggcagcaaaaccta

SEQ ID NO: 716801 - DNA, 413 bp, Homo sapiens
ttaaaaaagacaagttctcatcatccaatggtcatgctaataaaatatcattaatggcttatttccgttacagctacttattaaaccagattttttttcttttaattttttcgagatggagtctcactctgttgcccagcgggtattacagtagcgctgtctcagctcactacagcctctgtctccctaggttctagtgattttcctgcctcagtctccctagtagctctgactactggtgcacaccaccacacccggctgattattgtattttctagtactgaccgggtttctccatgttggccaggctggtctcgaactcctgacctctagtgatccatcttgcctcgcttcccacggttactgggattttagatcttagcctacgtgtctagccgaaactggtttattga

SEQ ID NO: 716802 - DNA, 406 bp, Homo sapiens
  misc_feature (76)..(76): n is a, c, g, or t
cagtcaaggtcaagagcctgtggtccagcatgcctggcctgggcgggctacctctgagaacggctgaaatggtgcncagtccatcagcagtgatggaatttgctggaggactaggccagagcaagcctcactgccactgtgcctttggggcacccttggggttggacatacaccccctttagattcctctgtttcttctacctggataattcttggccatgttctctcttctttaggttcaggtcagctgtgccccttcgcgcccctcgtgttggttccacagcccttttccttggccgtggcttgtagattctgttttcgatctcctttgagtgccccctttgtgagcatcagaggggcctttcctatgttctgtcgggatcggtggataaccgtcgttcaatcc

SEQ ID NO: 716803 - DNA, 232 bp, Homo sapiens
acgagcagtggtgggcaggagtatactgaacgagccccatggctgccgatagatgggctggtggtgccgatggatggcctccttgcatgaagtatgtgcagaagggctatgatagacaatccaatttgctaccttggtcccaaataccgatagaaaatggctgtaagctcttgtcatggggtaaaggtcaaggtgtgctcatggtgccagggacgctccggaactctgtcac

SEQ ID NO: 716804 - DNA, 391 bp, Homo sapiens
  misc_feature (287)..(287): n is a, c, g, or t
  misc_feature (291)..(291): n is a, c, g, or t
  misc_feature (322)..(322): n is a, c, g, or t
  misc_feature (340)..(340): n is a, c, g, or t
tactgaagtcttaaccccccaggacctcagtgtgtaagtatttggagaaagggcctttaaagatgtagttaaattaaaatgaagacattagggtgggccctaatccaatctgactggtgtccttgtaagaagaggagatgaggacacatgcagaggcatgaccacatgaggacacagggagaaggtggccatccgcaaatcaaggagtgaggcctcgggaggaaccagcactaccaacaccctgatcctggacttccagtctccagaaccatgagatgatgaaagtntgtntttaagctgcccagtctgtgatattgttttncaaccctaaatagatgantacataccccaatgaaaaaagcatgattctcttgcccagttttctgcacct

SEQ ID NO: 716805 - DNA, 874 bp, Homo sapiens
cgcgcgggtggctgagcagcggcctggtgcgctcgcttagctgggctgacggaatcagactggactgtggactgcccccggtagtggaagcctgaagcaggagttgtttgtttgctgagtggtgctgcctgcagccgcctgcgagcctccggacagacgccagagcgatggagggcgctacgcgacttggcaagatgacccagttcctgcctgccaaccttctggccctctttgcccccctgtgacccctattccatacctgccatccctggagaaactgccacagtgaaaatacatccaacaagtcagaccttaatttgtgcgcatttgctgcctgtacattcgagagtttgagtgaccctcgagatgcccctcctccaactcgtgcttgaaacccgagaggagcgcatggagagtgaaaagcacgggaaaagatttgagcggcgacagcaagaagtggagacagagcttaaaatgtgggaccctcacaatgatcccaattgctcagggggatgccttcaagactctcttcgtggcgagagtgaattatgacacaacagaatccaagctccggagagagttgaggtgtacggacctatcaaagagaatacgcatggtctacagtaagcggtcaggaaatgcccccgttggcctaattgccgtttcaatcggaggtactgacgccacgagctgatgcacatgcagctccgccttacgaagccacgcaggattggcacagaagcactagactgcgtcagtgagggcgtcctttgttggaccgtttggcagtagggaggcacagaactcggtgaaggtgccatggaagtgcccaggcggcgctaagtatggaggtgcctccggactggtatccatg

SEQ ID NO: 716806 - DNA, 146 bp, Homo sapiens
agatctaccctggtcacatgagacaacactatgtgaattttcacatatacatagaaaacgtttagaatggtattaattcaagaccaagctcctaatgtctttccaagttagccgactgtgcggtgtctgcttagctgcactgaccc

SEQ ID NO: 716807 - DNA, 252 bp, Homo sapiens
tccacctcagcctcccaagtagcggagactataggcatgtgccaccatgcctggctaattttttattttttgtagggatgagttctcactgtgttgcctggactggtctcgaaatcctgaccttaagtaatgcttctgccttgggctcccaaaatgctgtaattacaggcgtgagccatcattcccagcccaggagtcttcatcttaagaagaaagctgcccaacgagaagcggcgaagggggatcctctag

SEQ ID NO: 716808 - DNA, 130 bp, Homo sapiens
ggcggtcctgcacacgcgtacgtcaaactaaatactaccgtatggagccagatcccggtggacgaagttgttgcgcaacaacttcgtccatagcgatttagtgatgtagtgtgggctctcggcgtgtgca

SEQ ID NO: 716809 - DNA, 339 bp, Homo sapiens
  misc_feature (149)..(149): n is a, c, g, or t
  misc_feature (289)..(289): n is a, c, g, or t
  misc_feature (298)..(298): n is a, c, g, or t
gccaagctaactttgggagacatttagtttatagtttaaatgataatagctcttctccaaagctcaaccacatttgtaaagctgatgagagaccgccagggtaagaggatgggaggagcctgatttctgctaaggtgtagacataaatnattacctgccattattctggaggtcacaagacatggaacttccccaattactcctgcaaatcacatcactattgtagaacccacgatcagccttttcggatgtcttttcaggtttttgcttgtctgatgactgatggctncacccaganctgccaaccactcccgggggcccattccagaagtgggtcag

SEQ ID NO: 716810 - DNA, 164 bp, Homo sapiens
agggagaatagaagtcccaagactaagattctcaaaatggtatattacccagaactctttgtcttggtcagtcaagaaccatttccaaacaaggacatggagcgaagcttcctaagggaagacttcctgtcccaaaaggaagtgaaccgcaagatgacgatgag

SEQ ID NO: 716811 - DNA, 142 bp, Homo sapiens
cagcgcaaagcgcgctcagaagctggcacgcgcacagaatcgcagacctcagacgagccgctggcgcaagacggaaaagctgactcgaaggcggagagaccggacatccacgaaatgaggaacccccccggaaggaacacgc

SEQ ID NO: 716812 - DNA, 171 bp, Homo sapiens
tagtgactcaggtctaccacaagtactccctgataaagtgggaattaccactgccgtctacagggatgacctgaagaatatttgctagagaccgatgtgtcctcagctatatcagagaaaacagggtgcatacggtctagattcaaacgagttcggatttcaactactgaa

SEQ ID NO: 716813 - DNA, 106 bp, Homo sapiens
caaattgctgctctgtatgacagctttactagtaaatccttaaaagaacacgtgttccttcctctgtagtcaacagacaagacatgaaagccaccatcactcagca

SEQ ID NO: 716814 - DNA, 125 bp, Homo sapiens
tcccttcttctgccaatgacgaagatctgagctaggatgcatgtcttgtgtgaggagacatgagaggcagaagcaggaagccagaagaggaagtgcagaagcagtgaagcaggcagaagcaggaa

SEQ ID NO: 716815 - DNA, 1163 bp, Homo sapiens
ttttctgttttcttgtcgttcttttctttcttcttctgctgtttcgttcttcttttcttcggtttatgccgtttgtttcttgtttgttctgtttgtttctgttgtttcgtgttgttttctcttttttcttctgtcggtcctggttgtgctttgctttcttcggtttcttgccttgtgttttcttctgctttctgtgttgtgtttttctctgtctgtctttgttgggtcgggaggggcgggcgtgataggggaaccgaggaggaagaagcaattaactatcatcgcggctattctcgtgtgtccgcggagttttctgtgtccgcccgttgggtgtgcgcgcctgtgcggcctgagagcttccaaaggtgtcgtggccggacccctccatagctagaggtttatagaaccgtttttccacccgagacccaatttccggcccattactttccagaattgtggggtcattgttcagaaactggagcacccacgaaatggtgaacgatgtccacagtgccctggccagagctgtcttgcgattttcctgccctaccatcgcgctgcccatgctcctccaggctcctgccctctcccaggagtaccgggtaccagtactggcctctgaaaccgtgctgaacttggcttttgccccagctcattcttggaatccccgaaccggccttaagtcttctccccctggccctcgagcccctcttggctgacggggctatcctggaccaaggtcgtgcccatgtttttagtggcccagtgcccaggtggcttcagccagcttcctacgatccagccgaagatagccagaagctttggaggctgccctcgagaacctccatgaagcccagaactattttgccaaggttgactgccaagagcgcatcagggacctcgtttacttcccggcccagactctacccataccctggggaagaccccggagaggaacccggtgtgcgattagctcttccggccagctgcatccggagctgccctctcatggggtaccccttgataaacccatctttagagaggacatccctgctgggctgctgtgccgagtataagattttggacttgttcatgtcccctctctcccctataaatgatgtatttgtgaccccctatcttgtccataaaccgccttcctgatt

SEQ ID NO: 716816 - DNA, 1532 bp, Homo sapiens
  misc_feature (1531)..(1532): n is a, c, g, or t
ctgatcaggatgatcatcaaactcaaactacgccctattcgggcgcactgtcgagcgagtatcccaatgaatctcatatgaagtcagcctagccatcattctactatcaacgattactaattaatgtggctcctttaacctctccaaccttatctacaacatcaatgaacgaccatcgtgattactccatgaccatcattgacccttagccataatatgattgatctccacagtatgcagatgacgcgaaatcgatacctcactcttactgtacctttgccagaatggggagtccgagacatagatcttcaggcgtatgccacatcatcgcaatacgcccgcatgggcccccttacgcccctattcttgcgataggccgaagtacacaaacattgattataactaagacaccactcaccctaacgtacgaatctatcctatggaacaaatatagttgatgcatctctctcccgttgaatatctaaacaactataatttcggtcaatccgaaggaacctctactttctagaccttccactgtttcttaatgaattcgaagcagtattacccccgatttcccggctaacgaacaaaattccatacgatcatcctgattgcaagcaacacctttctctaaagctaatttcatctcccttaggcattttacctttattattgattaatcggtctcccaataccctcatttaacggaaatcttcccaagcaatttcccccccgttcaataaccgttaataaacattacattcggtcttcaacaaatactaccattcacaactaatacataggatattcaaatcacaagaactaaaacaaacgtaactcacaccaaataaaaacaattccgaagaagcgagtacagacagaaggaacatatccagacacagcacaagaagggccaagaataactaggggacagatcaccgcgcaacaaattcgtggagtgtaagcatacgtcgagcccgacaaatacgatccgccagccactgaatataagacagacgaagcagaccagaacgaacgcaagcagacaagcaaaaaagagagcagagcaagcagaaagaaacaagaaaagagaagccgacaagcaagagacacttgcagaaaaagacgaggacacaaagaacacaggagagggggcgacgacacaagaagggacgacagacaccccacacagcacgaacaagcaagacgtcgcgcacagggaggaagacaacacaaacagacagaggcgcaacgctacgtggacacaatcaacgcgacaaagtagacggcaagaaagcaagatgagggaagcggcgacgagtagacaataaacaccacaagctagcgcttgtcaaccgagaggagcagcacgaggagaaagagagacagagaaacaacgaaagggacgaccgagagagcgggagagagaacgaacaagccacgcagaggatgagaagggcgagaaggatgcggacgtcagcaaaagtggaaacaagcagagagagacatacggaagcaccacacagcnn

SEQ ID NO: 716817 - DNA, 182 bp, Homo sapiens
  misc_feature (130)..(130): n is a, c, g, or t
  misc_feature (146)..(146): n is a, c, g, or t
  misc_feature (164)..(164): n is a, c, g, or t
tggccagtttcttgaaaaacgctatctaccaaaactcaaacaaggagaaatataatctgggtgggcctacatcaattaaaagaaatggaatccataattaatactcttccaaaacggaaagcacaagacntcaagatgttttcacntggtgaattctaccaaanaatttaaggaaaaaaaaa

SEQ ID NO: 716818 - DNA, 326 bp, Homo sapiens
gcacgtggccagagtggccctggcagattccctgggtatgctctgtgcacaggagcgattatagtgaccgcagtttgtgcgaggctgtgaaagtaaaggcgtgggaggtgggagatgattgtatatgtgttggtttcgtccagggttcctagctcataactcacatgaccatggttacagtcttacgttgtcatgttggggtagctcaggcctcaaaaaacagcctttcgtctctctgaccttctcctgtcctcttttcagctgcccaaggcaggactctaatctgattgtgggttgtaggatcctcattccagagtgggtcctaa

SEQ ID NO: 716819 - DNA, 537 bp, Homo sapiens
cgcccacaagggactccagcatagacgagagagagaccctgtctcaaaaaaagaaaacaagccaggtgcagtggctcatgcctgtaatcccagcactttgggaagccaaggcaggtggatcacctgaggtcaggagtttgagaacagcctaggcaacatggcaaaaccctgtctctactaaaaatacaaaaattagctgggcgtgttggcacacgcctgtagtcccagctacttgggaggccgaggcaggagaattgcttgaacctgggaggcagaggttgcagtaaaccgagacagtgccactgcactccagcctgggtgacagagtgaaactccgtctcaaaataaataaataaataaattagctgggcatggtggtgcacgtctgtaatcctagctactcaggaggctgaggtggaagaattgctggaatctgggaggcggaggttgcagtgagctgcgatcacaccactgcactccggcttgggcaacagagtgaaactctgtctcaaaaaaaaaaaggggttaaatatgtgt

SEQ ID NO: 716820 - DNA, 360 bp, Homo sapiens
gtagaaagaaaaaatatagaggtaacccttaaaaatccagtttagggtggggcacgggtggctcaatgcgtgtggtcccagcactttggggaggccgaggtgggcagatccaccctgaggtcaggagttcaagaccagcctggccaacatggtgaaactcccgtctctgctggaatatgcaagagttagctgggcgtggtggtgggcatcatgatggtgcatacctgtaatctaagctactcgggaggctgaggcagggagaattgcttgagcccgggaggcagaggttgtagtgagcggagatcatgccactgcactccagcctgggcaacggagcaagcctccgtctcagaaaaaaaa

SEQ ID NO: 716821 - DNA, 1839 bp, Homo sapiens
gtagaagagatcatttctggaggcttcagcaaatggaataatgcatatataatgagagattgaacgaaatccagtccaaacgtggtccgagattctataaatccaggtagggaactcactcttcttatcttctctggacctaattgggcataggtggctttagtgagaccacagaccaggcccgtctctcctgtaggctttctacattcaatgtgcaactctatttcacaagactaaaagcctatggagcagttgcggcagttctagggggcgggctcaggagagtccatagatcagccgtaacatggaacgtagaatctatgtactgcctctgaatggacttacccacctcctctctctatgctctgatagcttgcctctgggcctctaccatgtcccaaggtggtctttcatccttgacaggctggtaaagtgatggacacctccagctacctgcagtcagagtctagtaaaaccaggagctggtttctcatgggcttcgtcacgataccaggatacggaggggagccaagagacatacataccagcccaggtaacggggcatggctggattagacatacataagtgcccaggcaaacatcagatagagattccttctgaccttgcagcaagggccctaaggagcgccgaggcagggccagaaaggacctagagtggaacagggcacattgaaagcgaaacctgaactaaaaatacacaaggaaacggaaaggcaaaaggagggatcgagacacatcgcaccaccaaccagagagggaacgcacatggagacgtaggaaaacacacgaggagcagagacacacacaaccagcgcccaacaaagcagacaagacgagagataatcgcaacgccacgcaccaccgcggcaccgaagagcgagggagagagagaggcatagcgagcatcggcagcggcatctccggagaagaaggcggaggagagaggagcggcgaggagagcggcggagggagaggagagagggaggaggaggagggcgcggagagggagggaggagagaagggaagcggggggagagggagaagaagagcgggaagagcgcgaagggcagcaagacgaagaagaacgagagagcgagagcagaaaagagagagaagataagaggagaagagagggagggaggacagggagacgaggatgacgaaggcagggaagagcgagagggagagagagcagaaaagagacggagaagcgaggagagcagcaggagaagaggaagacaagaggaagcggaacgaggagagagacagagcgaggagaggaagagcgaagcaaacaggcaagagagacaagagggcaggaaacagaacaagggaagggaaaagaacagagggacgcgagagagcaagcgcggaaggagagagagaagagagagacacgaacaagaagagaagaagacggagacagaagacggaaagaaaacaggaagcaggagaagagaaacgaggagaaagaaaagaaagagagagagaagagcgaggaggagaagacagaagagagacaggaaaaagaagaagaagacaagcaaagagaaggaaggaagaagagagcgagagagaaagacagcgggacagcagcgcgagcgaaaggagaacgaagagagaagcaaataaacgaaaaccacgacagcaaagaaagaggaggagagaaaacaagcaaagaacgcacgaaggagaaagccggacaagcaggagaagaggtgaaagagtcaaagagcaggacgaggagagaagagagacaaagcagcaaagagcgaaagaagcgcgcagcacggcaagaggcagaagagagacgaagaa

SEQ ID NO: 716822 - DNA, 102 bp, Homo sapiens
tcctcgacgccgaggtcccgctccacatcgcggatgtcgatcagcttgcgggagccctgggcttccatccttgcgccggagttcccggaagttgagactggc

SEQ ID NO: 716823 - DNA, 498 bp, Homo sapiens
  misc_feature (1)..(1): n is a, c, g, or t
  misc_feature (4)..(4): n is a, c, g, or t
  misc_feature (9)..(10): n is a, c, g, or t
  misc_feature (14)..(14): n is a, c, g, or t
  misc_feature (20)..(20): n is a, c, g, or t
  misc_feature (22)..(22): n is a, c, g, or t
  misc_feature (24)..(24): n is a, c, g, or t
  misc_feature (26)..(26): n is a, c, g, or t
  misc_feature (30)..(30): n is a, c, g, or t
  misc_feature (35)..(35): n is a, c, g, or t
  misc_feature (39)..(39): n is a, c, g, or t
  misc_feature (41)..(41): n is a, c, g, or t
  misc_feature (48)..(48): n is a, c, g, or t
  misc_feature (51)..(51): n is a, c, g, or t
  misc_feature (59)..(59): n is a, c, g, or t
  misc_feature (104)..(104): n is a, c, g, or t
  misc_feature (125)..(125): n is a, c, g, or t
  misc_feature (127)..(127): n is a, c, g, or t
  misc_feature (134)..(134): n is a, c, g, or t
  misc_feature (139)..(139): n is a, c, g, or t
  misc_feature (142)..(142): n is a, c, g, or t
  misc_feature (177)..(177): n is a, c, g, or t
  misc_feature (186)..(186): n is a, c, g, or t
  misc_feature (189)..(189): n is a, c, g, or t
  misc_feature (195)..(195): n is a, c, g, or t
  misc_feature (198)..(198): n is a, c, g, or t
  misc_feature (210)..(211): n is a, c, g, or t
  misc_feature (214)..(214): n is a, c, g, or t
  misc_feature (216)..(216): n is a, c, g, or t
  misc_feature (222)..(222): n is a, c, g, or t
  misc_feature (224)..(224): n is a, c, g, or t
  misc_feature (226)..(226): n is a, c, g, or t
  misc_feature (232)..(232): n is a, c, g, or t
  misc_feature (236)..(236): n is a, c, g, or t
  misc_feature (238)..(238): n is a, c, g, or t
  misc_feature (240)..(240): n is a, c, g, or t
  misc_feature (262)..(262): n is a, c, g, or t
  misc_feature (264)..(264): n is a, c, g, or t
  misc_feature (279)..(279): n is a, c, g, or t
  misc_feature (293)..(293): n is a, c, g, or t
  misc_feature (312)..(312): n is a, c, g, or t
  misc_feature (332)..(332): n is a, c, g, or t
  misc_feature (335)..(335): n is a, c, g, or t
  misc_feature (341)..(341): n is a, c, g, or t
  misc_feature (350)..(350): n is a, c, g, or t
  misc_feature (353)..(353): n is a, c, g, or t
  misc_feature (362)..(363): n is a, c, g, or t
  misc_feature (366)..(366): n is a, c, g, or t
  misc_feature (373)..(373): n is a, c, g, or t
  misc_feature (387)..(387): n is a, c, g, or t
  misc_feature (409)..(410): n is a, c, g, or t
  misc_feature (412)..(412): n is a, c, g, or t
  misc_feature (423)..(423): n is a, c, g, or t
  misc_feature (434)..(434): n is a, c, g, or t
  misc_feature (449)..(449): n is a, c, g, or t
ncancaagnncccnggcttnantnanaaanccganaccncngggaaanaanaccccccncccgggcccccccggccaaaaccacttttttgagtaaggggcccncccccaggccccccaggccancnccccccnccccnaancccgaaaagcggaggggcgggcaggccaggccgcncaggtccanaangcaggnggnccgcggggcacnnaananaggganananaccaanaacncngnctggcccccaggaccccggaanantttggagccaaaacngggggggttgccanaaaaaaaaaaaagcgggcnccccgggaaaaaaaacgggncanttttgnaaaaggggnaanaaccaaaanngtnaggggcnggggggctgaaggnacggacccccagcaacccccannanccccaaaaaancccccaacccnccgtatcggaaaaantcacccacgtcccgccccaaagcccccaaaaaaccaaccccaacaatgg

SEQ ID NO: 716824 - DNA, 911 bp, Homo sapiens
agcgggctatttgaaagacagcgctccgggtagctagagcctgaaggtcggcgtgcgtcacgctgttagccctcgttgggtcttctgctccctcgacttgtcttctcgggcttctcgccccggtcgtgggtcgggtccttcagtgagtcgagaatgactaaggatctagaagatcgccaacagtgattttcaaaaagtcccattgataagtagggtaagcaagaagcccaagttacatacatgctactcctatcaaactttagaacgaagactatgcatctgcctgagcgactcgaagcaggatggaacacttccaacagaacaatagaaaagcttagcatagacggattggctgtcgcagatgcatcactacaatgctggggttaaacaaagtgctcttctgggacttaaagaccttttgtctcaatacccatttatagattgatgcggcaccttgcaagacatattgaagtgaagtgacgtagctgtcgtaggagcagataaagatgctaatggtacgattatgcagcagttcaacttctgtcaattcctggcgccccagaagatacgagctgaacaagatttctccattttttcctttggtaagtgcccatctctctagtgccatgactcacattactggaaggaattcaggaggactctttaacagttgtgggacattctgctggaacagtacgcagctctaattactggccgtagcagcatatttgcttaagaatttcgtggaactttatttgctcataagcagctggtcccaaggactgataaatagagacagattccccaggcctggataccttctggaatcctaacgggagactcacttctcaggaagggagggcggaagtcttttgaggaacccgtaatccttcgggcttggcatgggtccg

SEQ ID NO: 716825 - DNA, 576 bp, Homo sapiens
  misc_feature (2)..(2): n is a, c, g, or t
anatagtccacgggttggctatagtccacggttggctggtcaggatttcgagaccagcccagccaacatgacaaaagccccgtctccactaaaaacataaaaattagccgggtgtggtagtggacacctgtaatctcagctacttgggaggctgaggcaggagaatagcttgaaccccggaggcggaggttgcagtgagctgagatcatgccactgcatttcatcttgggtgacagagcaagactcttgtctcaaaaaaaaaagggccgggcatggtggctcacacctgtaatcctaacactttgggaggccaaggcggttgaattgcttgaggtcaggagttcaagaccagcctggccaacatggtgaagccctggctctactaaaaatacaaaaattagccaggcatggtggcatgcgcctgtagtcccagctacttgggaggctgaggcaggagaatggcttgaacttgggaggtgtaggttgcagtgagctgagatcaggccactggactccatcctgggtgatggagcaagattccatcttcaaataaattaaataagttaaatgatgttg

SEQ ID NO: 716826 - DNA, 1234 bp, Homo sapiens
  misc_feature (3)..(3): n is a, c, g, or t
acncgcattcttctttattgtggtcgctcgtgttgattttgcttctctgcttgctctcggcctgtgtgtcggttgtggggcggctgggtgcgtgcttctgtctcctgttagtgccgcgggttgcttgctgtcgtctgtgtggcttgtggggtgggcccgtcttgtccgaacggcgcggttgtgcgcccccgctgggtgtttgggtctcttgtcctgtggcgtgtgttttattcgttccggtgggttgtctttgttttggggtgtcgtggtggttgttgttggcgttcgatttgcgttgagtagtgcccgtgtccccccggtctttcttctgacgtcacgggttggccggacaatccgagatttttcaaccctcgtcgcgctgcgagttctggccgcgtgcaacctccggccaatctttcggccatttcctgctttgggacctgcccgcccccgttttttgggtagctcctgtcggcgcacaccgaccctgggctcccagattcgtccgaagtagtcccccgacgtggagcacaccggcacacgcctggtccaattggtacctgcaggcctcctacaccgtacctctctctggcttctatttcgaccccgatgattgggcttctggaaggcctgagccactttttccccgaattggccgaggagaagcccgagggctacgagcgtttcctgaagatgccaaacccgcgtggcggccgcgcttttttgcccaggaccatcccagagagcccacgcttgaaagatatgaagttgggggttaaaacaccccaagacacgcccatatgaaaagcttcgccctatggcccttggagaaaaagcttgagacccaggccctttttggattttccatgccctgggttctgcccgcaccggagcccccacttctctgtgaacttcctggagaactcaccttcctagatgaggaagtgaaagcttatcagaagatgggtgacccaccctgagccacaccctccccacggctgggtggccccgaggctgggctgggcgagtattcttctttcgaaaaggctcacacttctcacaagcaccgagctaaagagcctcttctgaagcccacagcgaactttctgaaagggccccttgccaagtaataagggcttctgcctaagcctctccctcccaacccataggcagcttttttaactatcctcaccagccccttggacccaatggaaattaagctttttgatcccca

SEQ ID NO: 716827 - DNA, 425 bp, Homo sapiens
ttatcgattgaagctcaaaacggtacttattggccgggcatggtggctcacgcctgtaatcccagcactttgggaggctgagatgggtggatcacctgaagtcaggaggtcgagacgagcctggccagacatggtgaaaccccatctctactaaaatacaaaaattagccaggtgtggtggcatgcacctgtaatcctagctactcgggaagctgaggcagcacaactgtttgaacccacgaggtggaggctgtagtgagctgagatcacgccactgcactccagcctgagcaacagagcgagagcccgtctccgaaaaaaacagcagtacttactcaaacgggtctataattcaacgtcggaaactaaagattctttaaagaggtgcttatatctatttcccttgtccaaaatggccggggatc

SEQ ID NO: 716828 - DNA, 161 bp, Homo sapiens
tcaagtactattagtctgggcatgtgggatatgcgtgcactcgcagcactttgggaggcgaggtgggatcgcctgaggtcggaagttcgagaccggcctggccagtatggtgaagccatgtctctactaaaaatacaaaattggccagacaaagggaaaca

SEQ ID NO: 716829 - DNA, 789 bp, Homo sapiens
gcatcgagggaaaccttatgttagaactgcttgctatggagtagaagcaggaggtgtttcaacctagtcacagaggcagatcctagacccctactactgtccagcactctgtcaaccctcttatacatctgcggggctgaaaataatctcgagtgctaatctggcatccttcagccttatcggtgagggctcccctgtgtgtgcccaaatcttcgcccgcgagtacatcaaagacggtgtacgccacccatagtgcggtaggtagacaatacagctaatcaactgcacgcattaacagtcgcactcggacgacggagcaacccttaaagtcaacttcccctccccatgtcctggcactttggccacaaataggttatatcacctcgagcggacatggacaaccctgtgccgatcgaagcactggaccgacgcgcgtactaactcgctgacatattgtatgatggcctaacgaaacggaactgacgaggcctctcctaggcgactaggagtcgcccaaggaaaaggctttcgcgctgaattgcaaacccggacgtaagcttcaccagcaagccacccagtaacccactgtaagtgagcccaccaaggatggtttggagccccccttttctcacggtcatcgcttcacgagatgtggccagcatccctttactgaatcgtcgggatacccacacggctgagatttccttcgcacatatctaggagcgctccgttcgggcaaccgatcaaatggtctggccgccacgatcgggcaattctttcccaccacac

SEQ ID NO: 716830 - DNA, 310 bp, Homo sapiens
cctgctgagtacaggagtcttagctgtttcacagagtccctcttgtcagcctcccacagcgctgaggttacaggtaatcttcagctgtttcacagcgtgaccagattctccaaacacaatttaattttatttacatatacagtgctccattgtcactggggacaggcgctttgtgggtgtttttggggggggaatatttggccgattcaacaacaggagataaatgtctgagggtcctgtgttgccaccccaggcacctgctttgaccagggatggagagtcccatgcccaggaccaaaggggatggaca

SEQ ID NO: 716831 - DNA, 92 bp, Homo sapiens
gcctgcaccgacaatgcccagaactccagaacttcacctatcacgtatccccaacaacacagacggcgaaaacaaaacaaacttaaacctag

SEQ ID NO: 716832 - DNA, 519 bp, Homo sapiens
tagcagttctggttctcaaactcctgaatctgagaactctcgagatttccatgcgacagaatcccaaacagttctgaatgtctccaagggagaagcaaagccaactcgggcagatgccatgtgaacagagtacctgaaggaaaagccaagagtctccctgtacagggtctgtcagaaactgttggaatcttacataaagtcaagtctcagaaatgtccgatgcttcaccatattcttatattctatgcaattgttgtctgtgcactaatcatctcgaccttctacatgagatacagaattaatactctggaggagcagctggggttactaacctccattgtggacacccataatactgaacaggcagcaccatctggcctgaggtcacaagtacaattcaatgtggaggtgggtctgtcaagagctaacagctaacatagtgaaattagaaaaagatacaaaataacttacagaagtagcttgagaatgattagttatgaccaagcgtagtatagcgcg

SEQ ID NO: 716833 - DNA, 152 bp, Homo sapiens
tcaaagatcacatgttaatgagatatttaatgacctcgtcagacagataaatagggaaaacaccagtgggaaaaggaggaggccttaaaaaggaatcatgtcttctgtctctaggcccatagtcagcagcagctctttagccagattacagg

SEQ ID NO: 716834 - DNA, 295 bp, Homo sapiens
  misc_feature (20)..(20): n is a, c, g, or t
  misc_feature (90)..(90): n is a, c, g, or t
  misc_feature (124)..(125): n is a, c, g, or t
  misc_feature (144)..(145): n is a, c, g, or t
  misc_feature (158)..(158): n is a, c, g, or t
ggccaagacctgcctgaagnccggattcttccccacttggcctccttcaaccccgccttcttccttcctcctgggtgggactgccccccncctcctggtgaggctagatagatgccctgtatcnncaagcccaatatgggacannccagcaccgagtnccgggacctccgtggaccacctggcaaggcgaccccctgacccctgagttcatcaagcccaccatggacctggccagccccgaggcagcccccgctgcccccactgccctgcccagcttcagcaccttcatggacgg

SEQ ID NO: 716835 - DNA, 1047 bp, Homo sapiens
  misc_feature (13)..(13): n is a, c, g, or t
  misc_feature (98)..(98): n is a, c, g, or t
  misc_feature (100)..(100): n is a, c, g, or t
  misc_feature (113)..(113): n is a, c, g, or t
  misc_feature (160)..(160): n is a, c, g, or t
  misc_feature (182)..(182): n is a, c, g, or t
  misc_feature (192)..(192): n is a, c, g, or t
  misc_feature (196)..(196): n is a, c, g, or t
  misc_feature (238)..(238): n is a, c, g, or t
  misc_feature (262)..(262): n is a, c, g, or t
  misc_feature (307)..(307): n is a, c, g, or t
  misc_feature (314)..(314): n is a, c, g, or t
  misc_feature (318)..(318): n is a, c, g, or t
  misc_feature (369)..(369): n is a, c, g, or t
  misc_feature (376)..(376): n is a, c, g, or t
  misc_feature (403)..(403): n is a, c, g, or t
  misc_feature (426)..(426): n is a, c, g, or t
  misc_feature (429)..(429): n is a, c, g, or t
  misc_feature (501)..(501): n is a, c, g, or t
  misc_feature (505)..(505): n is a, c, g, or t
  misc_feature (509)..(509): n is a, c, g, or t
  misc_feature (520)..(520): n is a, c, g, or t
  misc_feature (523)..(523): n is a, c, g, or t
  misc_feature (535)..(535): n is a, c, g, or t
  misc_feature (546)..(546): n is a, c, g, or t
  misc_feature (568)..(568): n is a, c, g, or t
  misc_feature (584)..(584): n is a, c, g, or t
  misc_feature (586)..(586): n is a, c, g, or t
  misc_feature (588)..(588): n is a, c, g, or t
  misc_feature (667)..(667): n is a, c, g, or t
  misc_feature (672)..(672): n is a, c, g, or t
  misc_feature (681)..(681): n is a, c, g, or t
  misc_feature (692)..(692): n is a, c, g, or t
  misc_feature (694)..(694): n is a, c, g, or t
  misc_feature (697)..(697): n is a, c, g, or t
  misc_feature (712)..(712): n is a, c, g, or t
  misc_feature (732)..(732): n is a, c, g, or t
  misc_feature (737)..(737): n is a, c, g, or t
  misc_feature (743)..(743): n is a, c, g, or t
  misc_feature (773)..(773): n is a, c, g, or t
  misc_feature (786)..(786): n is a, c, g, or t
  misc_feature (790)..(790): n is a, c, g, or t
  misc_feature (795)..(796): n is a, c, g, or t
  misc_feature (801)..(801): n is a, c, g, or t
  misc_feature (813)..(813): n is a, c, g, or t
  misc_feature (843)..(843): n is a, c, g, or t
  misc_feature (852)..(852): n is a, c, g, or t
  misc_feature (860)..(860): n is a, c, g, or t
  misc_feature (878)..(878): n is a, c, g, or t
  misc_feature (894)..(894): n is a, c, g, or t
  misc_feature (926)..(926): n is a, c, g, or t
  misc_feature (936)..(936): n is a, c, g, or t
  misc_feature (986)..(986): n is a, c, g, or t
  misc_feature (1042)..(1042): n is a, c, g, or t
acagcggcaatgnagtaaagcccgcttttccatggagcgggcagaattgggacacgcctcctccagtcagtcgggcacagggcgcagggaggccagcncngcgaaggcaaggnatgcgcctaggtctgtgtctctgcctgccttcgtgtaagccgtccgnttccgcgcgggcggccagccangcatccttcngacngcaggtgttctacagtgtgtgtgtcggggggcgcccccttgncggagggggagggaagctctcttnaggcctgcaatcaatcttcagaaaccttttgtttcaagcaaacgntttgcgnagcnttgcctggaaggaggttcgtcccttacgcctgcacacagcaatgcgcctgntctctcnatccagcagcacttgggaggaagcggnctccccacgcagccctcgcaagntcnttccaccctcaactgggggctccaactttccaacctccgcccgaaagtccaagcggtcatccctccagggcngagngacntgtagggtccnagntgggcaacacgncctcgcgctcntgcagccagcaagcttattctnccccttctcttcctgngntncaactgcctctgggccctttttccaacagggaactgcttttcaaatggcaggggttctgtaatgtcctaattctgaacncggcntggtggtangggaaaaaagngntanctttgaaaatcccgntccctttcctaaaaaaatantttgntcttgnttgctttaattttcaaaacctgagccgcgncttaagaccgggnaggngtccnngcagngtacccagcaangggtaatgggaacccctgggcggaaaacantcatcttgnaaatctgnatggagcccaattgccanttgcagcctggggagnttgcctgggccctgccgctaaatgcccaaagnaaatgtttgnggtgggtgtgacaatcaactttcaaaaccggcaaaaaacctcgggccagnccaagcctcgccaaatcccgcagcaccccaatcgaaaaatgggagagaaagctgantttgt

SEQ ID NO: 716836 - DNA, 144 bp, Homo sapiens
ataaggggacggctggcgccggcacagttggcctgccgcccttggcggcgctgatgctggatgcgcagcgtcagtccgccatcgcgatcgcgcttgagcgcgggcagatcgccgaatcgatcacgtagcgctggatggggttgg

SEQ ID NO: 716837 - DNA, 827 bp, Homo sapiens
  misc_feature (488)..(488): n is a, c, g, or t
gaactgcacttcagcaataatgggaacgggggcagcgttccagcctcggtttctatttataatggagacatggaaaaaatactgctggacgcacagcatgagtctggacggagtagctccaagagctctcactgtgacagcccacctcgctcgcagacaccaaagataccaacagagcttctgaaacagatacccatagcatgggagagaaaaacagctcacagtctgaggaagatgatattgaaagaaggaaagaagttgaaagcatcttgaagaaaaatcagatgggatatgggatgggtcaagtcggccggaaaatattccccccaaggagttcctctttaaacacccgaagcgcacggcaccctcagcatgaggaacacgagcgtcactgaagaacgggggcatattctctgcagaatttctgaaagtttcccttccatctctgctgtctctcatttgctggccatcggattggggatctatantgaaggcgtctgacaaacctccacagcacctttgtgatgaagaactggagtctgactgtggtgcgttagtggattacttctgagggttgggaaaaataagtcagtgaagagctgtagattcctgggggtggcacgtcacttgtgtttatttgtgctgtaaatgctgggtccttaatttagtaaataaaagaattgactaaaattcttgttgttctattattaacttagggatcataagctgttggaatggttaggtactgggaattggggcaattccttgcttgaataaattggaataaactaaacaagcagggggggtgtaaaattgtgcaaggggta

SEQ ID NO: 716838 - DNA, 962 bp, Homo sapiens
  misc_feature (689)..(689): n is a, c, g, or t
gagacgtgccggctctcgcatgggcttgttgtcccgggtttcatatatctctccgaagtcagtttcccacactctggcctcgcctgtgtgctataacgacgtctagttcctagccatctgcagatcattgagtcgtccattgacggaccacgcgaaacatgggaatgggatgagcaggcatttaggcgtgtaaagcccatgtatctattgagcattggtatcctcattttatgggaccacaagccaattactgggctcatagaaaatacggaggagattgctacacatgtggaaccagaggcatacaagattttagcccactgcgataaacccagtcctttgagttcctgctgcattgagtaagtaccacttaatgggggtcttgtctgtgcctatgattgcccacattaaaatgccaaacaaatgtgctttcattattacactattctatgctttgacatattaccgtgtagaaggcggactcgcagtgggtcgttaaacttaccctttgccgtgctagatttctactattctcatctctaagcgataatgactattgtacgcactggctcaggtgatccgtaatttggtgtccaaacgaacattgcagacttcttgcgttctcaacaagcgctaatcctgtcgctacgtggttattactggggtggtgtactacgtcgtccgttgtnggtgtggccttcggatgggtgatcgttcgtaactcgtgtgcgctttgttcctcggtgttcagggcgcatctgatcctggcgcagacggggtattcgaaggaggggcgaccttggttccttcctaccttactggagtaggatccttgggctacttcgggacccgtccccttggtttctccctggttgggatccctaacaatcgggtttctcagctggccgttttatgcctcttctgtggtctcttttcttctgggtaactctcacgcgccgaag

SEQ ID NO: 716839 - DNA, 723 bp, Homo sapiens
agcggtgaggtgtagtcgcggcaaccaggagcaggtgcacccaccactagaatttgaacatcctaagaacaggtattttgtctctgctttgctgatgtatcctcagcaaccggaactgcctgacatctgatcctttctgtgagacaccaggctgttgaggaagaatctatggcaacattgtatctattaatatacagcttctgtatttatcaggcccagttctggtgatgatttcacttttgacagaagctgtccctcaaaagcaaacatgcaatagaagaaacagatctcaatggagtctcactctgtcacccaggatggagtacagtggcgtgatctcggctcactgcaagctccgcctcctgggttcatgccattctcctgccttagcctcccgagtagctgggactacaggcgcctgccaccacgcccggctaattttgtatttttagtagagacagggtttcaccgcattagccaggatggtctcgatctcctgacctcgtgatccgcccgcctcagcctcccaaagtgctgggattacaggcgtgagtcactgtgcccagccaagtttagtatttttgtagagacagagtttcaccatgttggccaggctggtcttgcactcatggcctcaagtgatccacctgcctcggctccgaaattgctgggattacaggcgtaagccactgtgcctggccttaaatgggtaaattcatatgg

SEQ ID NO: 716840 - DNA, 178 bp, Homo sapiens
gactgtcgaataggtgaaagaagaagtagacatcgtggtccacctcccgtcttggggtcagtcgcccgtcgagcatgattatcgtagtgaggagtcctcctacctcgtcgcaggatctccacagaaggagaagcttctctcgcagcgcggagcagttccacattagtgcgggtagcga

SEQ ID NO: 716841 - DNA, 1002 bp, Homo sapiens
tgcaggggcccacgcctgtaatcccagcactttgcaaggcagaggcaggcggatcacctgaggtcaggggttcgagaccagcctgaccaacaaaacgaaaccccatctctactaaaaatacaaaaattagccaggtgtggtttcaggtgcctgtaatcccagctacttgggaggctgaggcaggagaatctcttgaacctgggaggcagaggttgcaatgagccaagatcacgccactgcgctccagcctgagccaacagagtgagactccaactcaaaaaaaaaaaaaaaaagagttaggggaggtaaccggtaaggtatctatatgtgggcagagaccgtggcacattttccattatttaaactctaagggtaaacaggtccattaggcaaataagggactaatattggagaccgggtttacaattcgggcgtacaccttcaatattatactaacaatattccctccccataaccccttctctttgttccccctgtgaacagagctcggcaacatagtgtctcggggggcccacattattcttacaccaacaaaacaccctatacagcgcccaactgtggacctttgtgaccctggggtctgcgacaccccttctacccagagcacccgtctttctacaccggcagcacaactcttcggggcggccccaacagcgaccgggcggactatacagcccccccaatcacacaccacgggccgcaccacacacgctgcctactcccccaattcttgtgtacttcctcccctctctctgcttatcctacatatcacaacgatcattctctatacgcggcgcccacaaactttgcgggcgacgactccgcgccatttcttacccgtcggggctcccccaacgggttaaaaaaaagtcgctcctttctcaaccccaaccagggggcgcaaccacttactccgccactttcctcacaatttcaccaagagcgcttcccccactgatacaggggctctaacacctcctg

SEQ ID NO: 716842 - DNA, 280 bp, Homo sapiens
  misc_feature (165)..(165): n is a, c, g, or t
cggcagcaggtcgtcccaactacatggagtgggctttggcacatgcctgcacgtgacagacttgtcctgacagcagccacagctggagctacacagcgccaagactcccgctgggcctgcagggaaaagtctccgacactcccgggcagcggccattatcaccangaagtttttaccccttcaacagcaaaccggggtcctccctcccaggacacaggagtcaaggcccagtgacctgcggaagaacgcaggggacacgctgcctcaggaggacctgccg

SEQ ID NO: 716843 - DNA, 240 bp, Homo sapiens
  misc_feature (142)..(142): n is a, c, g, or t
aacttctcagcacaattcgaagtaactcacatcattgtcttgcgtctttgtgtggagaagaagttgttgttgtggtcccgttagagaattacccgcactgcccccgcacaaaggcggtcccgggcttaacccggcgacctcnctttggtacaagggcaaacagcacgcccagcaaacacggccacagtagggctcccctgagaatccatgtacaactccagctaggccttcaatctgtca

SEQ ID NO: 716844 - DNA, 656 bp, Homo sapiens
ccgtcgcatgccgccacccggaggctcttgtcaggatgtgtgaagctgttcatcggacaaccgttccccgggaggctacagagcaaggatgattcgctcactcttcgagcacgctcatgggaaggtgctggaatgtgacatcacttacatatattacggcttttgtgcacatatacacgacaagacggcagctgtaaggatgccactacgcaaccgtgtcaccacttacaagcttcatggggtgcaacagtcaacgtggaagccagcaagaatacgagcaaagcttcaaccaagttacacgttgggttaacatcagccccacttgtaccaacccaagtagcttctgagaccaagttttgaggagtatgagtccggtcatcgaatgtgacatcgtgtaaatgattactgtccttcgatatcagcatggatgccgggacagaggcatgcagttggtaggccatcagggtgcctttggactacactacaggagttctcataggactaagatagaactgcatgtgcagttgtccacaagccggcttcggactgaccctggtatgggagaccacgagtgactgctatcggtgtgggaaacgcaagggcactggtccaaagagtgcccagtagatcgtacgcggtcgtgtggcagactttgc

SEQ ID NO: 716845 - DNA, 369 bp, Homo sapiens
attgcccccgctgatataaaccccttccttctttaactcagtgtctgaggagttttgtctgtggctcgtcctgctacaccaccatgtcatacatgtcccaagatatgtgcaacccatcccccactgcaaagtgcagggctattacaagcactctcattgggaggaaatatcccttcaaatagcagactcccagttattgccccaggaggataaggtgcaagtgactttaactgatggaatttgagattcaagatttaccttaagctatccaacctcgtacctggtttcaggctgataagtggagttaaatggaagtcctccaaactctggtcttgcaattagtatggatcaaaggaggtgatgactaac

SEQ ID NO: 716846 - DNA, 116 bp, Homo sapiens
atgctagtgagactcgaatcaccagaagctgcgacagttttcatgtgccccaagctagggaaatatatagaaacatgatggctagctaattacaacggtgaagacgtcactgctca

SEQ ID NO: 716847 - DNA, 299 bp, Homo sapiens
gacagagtgagaccctgtctcaaaaaaaaaaaaaaaaaatttccttggttgaatttaccccccttggaggggaaaaaacctaaccatttttttaaaaaaattttattaattttggttaaaaaaattttagggtttggtttaagccattaaactttaaccattaccattaaaatttttaaaatttttaaaaccctttttttttttcaaccctggaaccacccattgggggaaccttttaaagccaccctgcggccttccagcttggcccctgccggtgttttaaaaccgtgggaatggga

SEQ ID NO: 716848 - DNA, 119 bp, Homo sapiens
  misc_feature (5)..(5): n is a, c, g, or t
gcaantttctacacaattgatgtgagggaagttaggttaggagccacctttttctcttctaagttaaaagaattgttggtatagtgatggaatggcccattagagagggagaaatgatg

SEQ ID NO: 716849 - DNA, 375 bp, Homo sapiens
cggagactggaagggaccgaggcaaggttacaagaaaacaaccacatagaagtaggcaaaggacatgaacagacacttctcaaaagaagacattcacgcagccaacaagaactgaaaaaaagctcaacatcactgatcattagagaaatgcaaccccaaaccacaatgagataccatcttacccagtcagaatggcaattagttaaaaagtcaagaaacaacagatgctggcgagggtgaggagaaaaaggaatgcttttactctgttggtgggaatgtaaattagttcaaccattgtggaagacactgtggcgattcctcaaagatctagaagtaatcccattactgagtatatatacccaaaggaatataaat

SEQ ID NO: 716850 - DNA, 412 bp, Homo sapiens
aagaagagtggtactctgtacagtcgaatgaacctactgtgacccacaatgatcaaccaaagtccatagttaacagttagggttcacgactagatgtacgtgcatacgaccatctttgacatatgtctaatgacagtgtagtgctacttattatagtactgtacgtaatagttccattgccctaaaaaccctgtgctctgattatacacccctctcgcccctgtgaacccataataatggtctaatcttgcaacagtcaccatggttttggccttcactagatttcatgcagtcgtaatcatatactgtgcagcctttccagggtgtgtgcacttagtaactatgcatgtcaggttcctccatgtctcttcaggggcctgatagctcatttgatcctagtgctaatatttca

SEQ ID NO: 716851 - DNA, 132 bp, Homo sapiens
gggccccgaatttttctggttggcctgggaaaggtgggggggggtttttattcccttccggtttggtttgggatggccgggatttttccaaaaaatttaaagaggggccggggccttttttttggggattga

SEQ ID NO: 716852 - DNA, 972 bp, Homo sapiens
gtgaacgctgtggtgtcgacgatatcgctgggaatacgggtcggaaacacactggcgtacgcttagcggcagtctcagcggtttgcccactcctgtctagtccgcaacagttcccagaaaataacgaaactagctagacaatgcacgtatcgtaataccttacagacaaccgactactctaaagtgacacgagtatcagcaagtatgaaaattgtcgagcgagccctgtctagttcaaggtggtaacacagggtacgagtgatacctcttggactagggttcgcatagttgggcagtctagaaccctacctctaaggagccaaccagcacaattgtataggtgatagaaagcgggctagctcgataccgtactatcatattcgaagctcgatagccacccctctaacgtacttgcgctagggctcacaacgatacgcccttagcggcattagtagggtaaggcagaattcggatcacattgacacgagactccctatccattattgcatacgcagatactacaccagtaagatatcacaatcgcgtgtgtatactaaacacgggccactgccagtcgtcacaagaccctgtgtaagacgctggctagacttagccataacacctcgccaaccgcgaacggtgctcaaaacaggcagaagtgctagtccccaccagggaaaacacgctccacgagtataaaacgcagcctgcatccaactcgggggtagatcgccaagaacctgagcctcacaaacacacctttggaacctcacgcggggacccccaatgagcacaacacagctaaacaccctaggcgttgtcctgtcccacccgagaacagccaagccagatacataactcgtaacgacaccacttcgggcaatgacacaaccgtcataaacaccgtcatataagtgcggcgacagcaacccacacagagctgacaacttcggcccaagaacagctgactta

SEQ ID NO: 716853 - DNA, 170 bp, Homo sapiens
ggtggagtggatgttgtctgttccaatgagaggtgcccacgaaaatcacacatcaccgggcgaacggtgctaacattaattagcaggtcccatcctctcctttgttgctggccaatctttccatccaaccgaatgtaggttcatgattgcagtggacacatttggcgatg

SEQ ID NO: 716854 - DNA, 140 bp, Homo sapiens
taggtgaggggcagaagcaggcagcaggtctttgcttcctgcttctgcccctcactaagaccctgcttcctgcttctgcctttcttccttttctgttgctgtttcttcgcttcctgcttctgccatgtcagaccgtctct

SEQ ID NO: 716855 - DNA, 275 bp, Homo sapiens
cacgcccggatcattttatattttagtagagacggggtaacaccatgtaggcaggcgggtctcgaactcctgacctcaagtgatcctcccacactcggactcccaaagtgtagggattacagagcgtgagccaccgaaaccagccaactttaatttaaacctaagttttcagtagctctttgtggctagtgttattgtaccaggagaagctgtggaggacggagaagcttgtaggcggacggagaaagctgtggcggccggagaagctgtgacgg

SEQ ID NO: 716856 - DNA, 391 bp, Homo sapiens
  misc_feature (2)..(2): n is a, c, g, or t
  misc_feature (5)..(5): n is a, c, g, or t
  misc_feature (13)..(13): n is a, c, g, or t
tngcnttccagtntccagaccatgtctcacttagtcgagccgccgccgcccttgcacaacaacaacaacaactgcgaggaaggggagcagcccctgccgccgcccgctggcctcaacagttcctgggtggagctacccatgaacagcagcaatggcaatgagaatggaaatgggaagaatggggggctggagcacgttccttcctcgtcttccatccacaatggagacatggagaagatcctcctggatgcacagcatgagtcgggacagagcagctcaagaggcagttcgcactgtgacagcccttcaccacaagaagatgggcagatcatgtttgatgttgagatgcataccagcagggaccacagctctcagtcagaagaagaagttg

SEQ ID NO: 716857 - DNA, 167 bp, Homo sapiens
aactcgttgttggaggcgctgggcaggaagttcatctctagaggctgcagcgcttgggtggggggatctcgagtagcgtcttctccagactgtttgcgcagacgccagcttggcggccgcctgtcgactatgctgaagactcggcagaggtgaccacagaggccaaa

SEQ ID NO: 716858 - DNA, 208 bp, Homo sapiens
ggtgtggtaggtgttgtagccgctatggtgaagttcgctttgtagcggccccggctagagagttggcctgttcctgcctttgtgacccggagagcttttggggtgcgtacagccctgccttaggagcaacctggtttgtggcctgtttgattcctgtacgaggtttgctgaccacgacacgactcgaaaatgcatctacggtcactta

SEQ ID NO: 716859 - DNA, 923 bp, Homo sapiens
  misc_feature (922)..(922): n is a, c, g, or t
ggtcccccaacgctacgtgtggcgtttctgcatggcctgcactcggcaccccgcttcttgacagccttcgcctatggaaccactacctcagctgtgcgtctccatgtccgggttaccgccttctctgccgcattaacttcagtctcaatgtggtggagaacctcgcgctgctcgtgctcacctacgtctcctcctccgaggacttcaccatccacgaaaatgctttcattgtgtttatcgcggcatccctcggttacatgctcctcacctgcattctctggcggctgaccaagaagcacacagatcgcaagtcctacagctggaaacagcggctcttcgtcatcaacttcatctccttcttctcggcgctggctgtctacttccggcacaacatgtatgtgaggctggagtgtataccatctttgccatcctggagtacactgttgtcctaaccaacatggcgttccacatgacagcctggtgggacttcgggaacaaagagctgctaataacctctcagcctgaggaaaagagattctaaccccgtctgtgatgctggaaaacaagaaaccactctggccttccctatctccacgttctctctgggcctggagagaagagcggaagggtatgacagggctgacccagaatgctgactctccccacattcatggggatctcaagaaggataccattcactggaaggtccaaaaaatgagctggcggaaagtcccccttggggctaaacaaaaaaggctggggcccaggggggtcaaaccgggggccgaaacgcgcttccgggcaccgaggggagctccggcgccggtgccgggggccacgccgggaagccccccaggccggcggagacaaacaggagacggaggcgaccgcaatgtctcgcgggcgaaaaccggcacggcant

SEQ ID NO: 716860 - DNA, 98 bp, Homo sapiens
  misc_feature (24)..(24): n is a, c, g, or t
  misc_feature (51)..(51): n is a, c, g, or t
ttgtggtagcggagtttcgagatntcgaagctatccgggccgatggaagtnccgagcgccatgatgagcgtgcggatttcctcgaagccgagcacttt

SEQ ID NO: 716861 - DNA, 161 bp, Homo sapiens
catgctgtggtcgatctagagttccccttatgaatcaacagtatacccccgattccgctacgaccaagctcatacacctcctatgatataaacttcctaccactcaccctagcattacttatattatatgtctccatacccattactatctccagcattcc

SEQ ID NO: 716862 - DNA, 300 bp, Homo sapiens
  misc_feature (89)..(89): n is a, c, g, or t
ctaagaggatccgtcagtgatctactgcgcaactgtggacttagacagcactgggagtgtacggaagttgtagaaatgcaaatctcagncaggaagcgtggtggtcgcgcagtaatcccagcactttgggagggcaaggcaggtggattgcttgagcccaggagtttgagactagcctgggcaacatggcggaaatcccgtctcttaaaaaaatgcaaaaaaatattagctgagtattgtggcaggcgcctgtagtcccaactacttgggaggctgagatgggaggatcacttgagccca

SEQ ID NO: 716863 - DNA, 438 bp, Homo sapiens
cgcagcatgtgctgatgcctgtcactaaaacaggccaaaaactgagtcctgctgtagcatagaaagcttcatgctgctaaaccaatgttaagtgaatcttggcaaacaacaagtctccaaattactgggatgtgcatgtcgaaacgtgggttacactgactgggcagcgaacgtcgactatttgccatgacataagaaataagtgtagtggctagtgtacaccctatgagtggaagggtccattttgaagtcagtggagtaagctttatgccagtttgatggtttcacaagttctatcgagtgctattcagaataggaacaaggttctaatagaaaaagatggcaatttgaagtagctataaaattagactaatctacatcgcttctctcctgcagagtctaataccttttatgcttcgataattagcagttcgccta

SEQ ID NO: 716864 - DNA, 306 bp, Homo sapiens
  misc_feature (13)..(13): n is a, c, g, or t
tgaacattcgtgntcaccacctcttgtcagctatataccgccatcttcagcgaaccctgatgaaggctacaaagtaagcgcaagtacccacgtaaagacgttaggtcaaggtgtagcccatgaggtggcaagaaatgggctacattttctaccccagaaacctacgatagcccttatgaaacttaagggtcgaaggtggatttagcagtaaactgagagtagagtgcttagttgaacagggccctgaagcgcgtacacaccgcccgtcaccctcctcaagtatacttcaaaggacacgaatgttca

SEQ ID NO: 716865 - DNA, 672 bp, Homo sapiens
gatatggggatttgatctgaagaagtaccaaacatatgatgagaaaaatcggctactgatgcaatcccaagagtgcgcgaggaaacctataataagtgtagatcaagattgggggagttggacttaaacgatgaatcaggtgatccagatgaggaaagtgatgcagtggctaatgtgtcttcattgattgcgccacctcaataatttgagagcttcaaattatatccatgtgataatggtgacctaatgtgtcatgatcacaaagaattgtgatactggacgattctcttatatgatgagagttcattgtgcgtttcaaagaatgggtgttatgataccttattttaaatttgacgatgtgctttccatttccattaagtggctaaggatagatagatgtgatctgcagaagtttgtgaggtcttcatctgaagtccaggctgggagggagcaattataactaaggacaaagaaatgttagtagccgtgtggtatccatggaatcacctaatttcaggtctcgtggacattggacagtaaaccgtgtttcctgaaaggattccgtgtgggatactgctttgagctgtgatcagacgcaaaatgtgtttgcggtaatatatcaccctaattgttctttttaaactttaaaacctattttcttttgtacagata

SEQ ID NO: 716866 - DNA, 115 bp, Homo sapiens
actagctttctgccacctgggccgcctgggtagtgtgagtgaagccaaggtccttttgcttgtgaggccctaaaacttacaacaaagctgcagataccacgccagtgtgccctgt

SEQ ID NO: 716867 - DNA, 217 bp, Homo sapiens
aaaaaaaaaaaggggccccatgggggtttggggtaccggggggtttgtttcccccctttcccccccggccggggcatttttggtgggggtttttaaagaaggggttaaaatttttttggggggggcccccaatttttttttaataaagggggttgggaaggggggggggggttagaacccaggggggggggacaggggaaaacccccggccggggga

SEQ ID NO: 716868 - DNA, 709 bp, Homo sapiens
ggacgcgtgggtcgaactggagcagaaaaaaaaaaaaaaaaaaaaaaaaaaaaaaaaaaaaaaaaaaaaaaaaaaaaaaaaaaaaaaaaaaaaaaaaaaaaaaaaaaaaaaaataataaaaaaaaagaaaataagaaatagaaatgatataaatagaaataataaaaataataaaagaaaaaagaagagaaatgataaataagaagaagatgaagaaatagaaggatgattgagagctggcatgtccatcaatgctactgcgccaggtattagtcgtcagcaagggcataaactgaactattagtcccttaattacgctgtccatcacatatttcttaagtcagttggttggaagtaacgcatctcttaaactgttatgtctacaaattggacacattcatacacatttacgataagctaacacacgcacctgagattaacctgcactacaacacactgctaatcagtaaaacacctttacagaaaagcgaaagcgacgcactgcaccagatagttaccatcttagcagctacatcccatcatattatctagccggatgctcaggcacgaatttacacacagataacgttaacgatatattttagaaaaaatcagagtaactatgattaagatggagaaaaccaaactttggaacacgaaaggcacataagagtccacaagaactactaagaagaacacaatttacaca

SEQ ID NO: 716869 - DNA, 161 bp, Homo sapiens
tcgagctcgctaccccatcgtcgccatcaacaaggacgaggatgcgccgatcttccaggtggccgacatcggcctggtcggtgatctgttcaaggtggtgccgaactgaccggcaagctgtaaccgaattggcttgagtaggaaagggcgtggagagtgat

SEQ ID NO: 716870 - DNA, 434 bp, Homo sapiens
actttggtttggcaaggggaagggaaatcgagttgaagcaatctcacagaagtaaaaacaggcaaaaaaagttaaaaagacaaatggttacaggaaaacagttccaggtgcaggggctttaaattcatcacaaggtgataggtgcgtgggctctgggtgctatctacaggacacaaatgcgggggcttaggatactatcacctgagcgaatttctgggaactgtggacagagcttgccacagtaccttatcagttaattgcactttttgatgtgctgggagtcagcttgcacaagttaagtccttgaggaagggggtgggtaaggagcccttgttgtcttgcaaatgaaggagccaaatggagtctgtccggctttctcagctaaggaagagtctattcatattaaaacaaggtaaggtatcacactgtctcaa

SEQ ID NO: 716871 - DNA, 1081 bp, Homo sapiens
tggcaagcactggagcgttatttggaaggaactatgcaatgtagttgggttcttgtgtgaaagaacagtcaatgagcaatagccatgggtagaacctccgtctggtgcgtgcccagaacactggccctgggctatgcgacttgcctcaggcccatttcccggaagaggctgccaatgaatgatggaaagccggcggaggtcttggtgctggacgtcgtgagggcttcgaggcaggacaccaaggactctcgctctggaggtagcagccacccagagaaggttagctgttcgtctgatgataagacttgtgtgacggttcccgtcgacccagtacacggatgcgcggtaacagctaggctgcgtgaaacctaatccgagtggagctacttgctgaactacgttctgggcgtgataagaaggagcccacaagggtgacggcgagccgctgtgctggcgttatgagactactgctccatgaaacagctgagagggccaagggaaatgcccaaggacacatgtcagaattcatccgggacaaggagtgatgatcgaagaagactatgcgaagaacttagctaagctctactcaggaactccgtggcttcacaggaggaaggctccttggggagaggcgtgggcccagtgtgaaagaagaagcctggccggtaccgaacgcagacagttcacgctcagggttctactggccaagcttgcgcagcgacggtggagacagcgcctgatgcaatttccgtgagaacgtcaagacaaggaccatggaaccaaggtgcgaccaagccagattaggccgagcttcggcaagcagcgcgccagccgatattgcctcggaggagaagggcccggaaaggcccacacagaccgggcagaagggaccgggagacatgacaaaagcagccagacggaacatcaaggctgagcacaaagaaccgagcacggacctaaagaacgggggcgcaaaggtcccccacaggcgtgaaaaaaccacatgcgcgatgggatcacaacacagcgccggacaaaggagtcgcaccgacgcgcccccgaagggcacaaggcgaggcgg

SEQ ID NO: 716872 - DNA, 401 bp, Homo sapiens
taacggtagcgggatgtgaacaacgactgctggtggaacggatggctcgagaaaacgtagagcctgggcacaaacggtttgccaggtcccttgggccggtactcggaatgcaccatgaagagcatgtgagggacaccagtgccgaagtaggcgccatccgtgtagatggtgtcttgatgagtggggtgtgtacacatccatgcgcttgtgggcagtagagcttcaccatggcttcacctgggatgtctgaaagtgccaatggtgaagcattgacttggttctcacagtacacacgaggacagtaaccaaatgtctccttgctgttacttttccaacatctgggcgatgccacggttggtaaggatgtagcggtcgaggatcaatccataatgcatctcggc

SEQ ID NO: 716873 - DNA, 288 bp, Homo sapiens
  misc_feature (223)..(223): n is a, c, g, or t
cgaggtgacttagaggatcccgatatgctagggtttcagtcccttttgttctggtatgctctgggagaatgactgttaactccataagcagttgaaaagggaggaagaaagcagaagcacgaattagctatttttgaaagtagtggggtgtggagcatcatggtagcacaaattctatgcacatcctctctggatccttccttcactcagcacttatgtacantgtagccatgaatttttttctttcttttctctctcttttttttttttttgggagacaccatatcg

SEQ ID NO: 716874 - DNA, 1650 bp, Homo sapiens
  misc_feature (394)..(394): n is a, c, g, or t
  misc_feature (1127)..(1127): n is a, c, g, or t
ggggaaagcaggactggggagagatccaggactgagccagcctcaggccaggcgggaaagcaggctgtccaggctgggcttggtggtcaggaacaggggcatgctcactggtggctctggagtacgtttcctctgtcagatgcttcaacggttttttttttttttattttttgtggctagaggcgcacgtatatttggcccacaagcgcccttggggatccaagattagagggccccaggggcatagactggcttttgcgcaaaaaacggggtgtgggttcagcacctgttgaagaaagaggctcctgtgagaaattatctagggtgtgcgtgggagttacctatattcagcaggagccattttaaaccttgtggggaagtgtgcaaggataanccctctataggggaagctcttttccccacagaaagtgtgcttttttatgtgtatgagtgctctgtgaacaatgtgacaggaagtctctataaacaggtggtggccaagtgtgagtgtggccaagagcctactcagaagatatataactgttgtaataacacacctctgtggacgctcatcgcgtgggagatattcaaacgagtgtttataagcaatagcgctgtgtgggcattttaacaacaaaaaagcccctgttgtgttgtggccccccaaaaggggccaccgaagcttatagaagacattgtagaaggatatctacctatcagacggcatagaacacaccaggtgggggggtctttcaaaaaccaacagattgtgttgtgtcgcccaccccaagcgagggctaataaaatatctcttctacgaagtttctcccctgtggcgacgcactctaaaaagcgacgagaaagtgagtagacgccagacaacttttgcggggacctcactcgaggcgaaagaagtgttgctaccagggacggattcaaccgagcatgtgtgtgagaaaacccacacgtgggttggttggccaatgtggcgaccacagtagtattagtgggatagaagtgtactgaggtcttaaaacagcacagcatattattctcgtcagcaagaatacaacggcatacaaatatcgtcgacagagaggcgttccccacagagaaggagagagaanaagagcagttacgtccgactagataggcactcactgataggtaggaaacgaccctagtctgtgtagaaccaacacacccgtgggacgaaaataagttgagtgtgcacactcaccaaagcagaggttttataacagtggtgcccgacagagggagggtagctcaatagaactctctctgcacaacaacaatagtttgattcacgacaggaaagtcccttcccacaactacttattattagttgtatcagagactacggccacaacatcactgttttcataatagaaaaagaactttatctctctcaacaggacctcactctccctggtggaagagatttacacccactataagatggaagcctaccctcaagttttataacactactaagtcacactctctcagtccatacacagagacaaagaacaacttactaacggctatcaatataaggtagaccagacacgatattatattcaaacgaacgacacaataagaacgaaaaaaagaaagcctatttcagtt

SEQ ID NO: 716875 - DNA, 144 bp, Homo sapiens
ctcgctgttccggatacgaatcaatgtgaccgatcatgactcgtcagcccccggacagacaacatgggggaaatgggccatggaacaacaacaacgaaaacctttgttttattttcatgccaggagaggatcaaggtgtagctc

SEQ ID NO: 716876 - DNA, 1351 bp, Homo sapiens
ggagctggacccctaatgctggaccgctggcaccgtgtctgtggtgtgtgcagcagagtgtcgctcgacatgggggatggccggggctggctgctgtgctgcctcgggagggcctggaggcaagccctggaggcagaggtggtgaatgctgctgcccttcctgtgcgccctgtgcgcgctgggcggacctgcagtgctgtgcgtgtgtgtgcgggcacgtgctggctgctgacttggctgctggaacccgtgcctgcgcgcttgtttggctgggggcaggctggctgcttgcatgcagggcgctgacttgggagcctgggcgcccggccctctgcccctggccctggtgacggccttcactgcggcctgctcggtgacactgtggcctgcctgaccccggggccttgcacgagaccatttgcttgggctggcctgacccctggtgcttgccatgcggctgcctgattgggggcctgcggcgtatgggaaccccggccagttggggcccccttggtggaccgagagcatgggccgggcacggcaccggctggcagtatggcgcaaagcccttcaaaggtaccgcagaagcctgggctggccctgattggtgccatggcgtggcatacaaattggcctggagactgcattgtggctggaccagctgggaggcccgggcagagaactactggggggcacttgggaacgaccggggacgtttgggtgttagctagcaaggctgagcatttggttggcacacgggcccccagaggagttaacaaagagtagagcactggcagactgaccccctgctttgaggcaacgttaaagcgccttaatccatggcacaggcttagtgtccatcacgaagagcctacagagccaaacaggctcccataggctgggacgcacgggtgagccgtttaccttaacattgggaacccccccgggaacaaaggtggttgtggccggttgggttccccaaaggcgcgagggttagtatgtgaccacccagttttagcgcgccaaaggtaaacccaccggggaagcattccccattctttgttacccgacacgtgtggaggtccggaggactatggggcttggtcggggggaacacgcccattgtgcagcgacgagtctgtggtgatgcggaatatcggaagagcctcagccaggaagcgagttgaaccgaacaggtggagaatgggcttatggggagagcccattgaaggtgttggaaaacagattacattcccccgcgtattgttagggtgcgtacgatatgcaccctcagttgtggttcattgtgggcccgtgtacgagaagctattactcccagagtgcaatagaa

SEQ ID NO: 716877 - DNA, 845 bp, Homo sapiens
gaaagaaaaaaagtggcccttcctgtactaagggactatgtaaccccttagagctagtaataaccaatccccctgatcctcactggaaaaaaggggagcgtgtgaccctaggaattgatggggccatactggatcctcaagtaaatatcttagttcgaggagaagtttacaaacgctctcctgaggcagtgcttcaaactttctatgatgaactaaatgtgccagtaccagaaattccaggaaaaacaagaaattgtttttgcaattagctgagcatgtagcccagtctctcaatgtcacttcatgttacgtatgtggaggaactgtaatgggaaatcaatggtcatgggaagcccaagaatgagtacctacagactcagttcctaatgaattcctggtcaaaagaatcaccctaataattctgggtcctaaaaagcctcaattattggccatattgcataggtagagaagaaaagaattcactcaaccataggatgactagttgtctaggacagaaactgttatgtaccccgaacgtcactgatgggtccatccctagaaggatccatttagtaaatccaaagtgggaactgtgtgaccacccggagtgcccccggatggcaggcccactgtgttctggatgtgggctagttttgccaatactgccggggagtgggtgacttttctttactaagggaccgggtcccgttgtccgaagagtcgtgaatggaggggggccggataatggggctggaaggtgggggcccttcagcgtggggtaacaagaggggggggagtaggcgggggggtgcgttcgcgtgtttgttttgtttcatctcgtcgcc

SEQ ID NO: 716878 - DNA, 246 bp, Homo sapiens
ccccgggctgcacggattcggcacgagcacgaatatcataatcagattggcacctttgcctctggttggagcagttctggaggttttatagccacatggtacgttcctgggacccttgacaggccaccagtgacttccatctcttcaaagaaggaattaaacccatgttgggaagggatggaatggctaaattaaaattgttggtcaagtgattatcgctgcgaggcttgctccgtgctggagact

SEQ ID NO: 716879 - DNA, 115 bp, Homo sapiens
cacgagacgagatgtgtgagggacgatatgaatattaaagtaatcccgagagaacgagcacctcctcgaagtcttcccacgttgatcaatcttgcgttatatgatagacaatcag

SEQ ID NO: 716880 - DNA, 455 bp, Homo sapiens
aggttttgcccgtctctcgagtgatccccctgctgaccaagcagaggcatcgtatgcatggataactagaggatggtatcagccctgatgatgtaactgttgcaagagcttggtcctcatttgagcatttctctatttttccatgttatccccgaaatatctatgtattatatttttaggggaagtgaggtgtgcccagttttgtaatctaagcaactacttttggggacttgcccacatctctgggattcgaatggggattgtatcccattttactgtcttttaggtttacatttaccacgtttctcttctctgctccccttgccccactggggactcctcttaggctccttgaagtttgctgcttagagttggaagtgcagcacgcaggtgatcatgctgcaagttctatctgaacctctggcaaagggagtggtcagtgaaggccatcgtta

SEQ ID NO: 716881 - DNA, 880 bp, Homo sapiens
  misc_feature (8)..(8): n is a, c, g, or t
  misc_feature (79)..(79): n is a, c, g, or t
  misc_feature (114)..(114): n is a, c, g, or t
  misc_feature (129)..(129): n is a, c, g, or t
  misc_feature (139)..(139): n is a, c, g, or t
  misc_feature (162)..(162): n is a, c, g, or t
  misc_feature (193)..(193): n is a, c, g, or t
  misc_feature (247)..(247): n is a, c, g, or t
  misc_feature (250)..(250): n is a, c, g, or t
  misc_feature (272)..(272): n is a, c, g, or t
  misc_feature (297)..(297): n is a, c, g, or t
  misc_feature (305)..(305): n is a, c, g, or t
  misc_feature (355)..(355): n is a, c, g, or t
  misc_feature (438)..(438): n is a, c, g, or t
  misc_feature (478)..(478): n is a, c, g, or t
  misc_feature (507)..(507): n is a, c, g, or t
  misc_feature (537)..(537): n is a, c, g, or t
  misc_feature (575)..(575): n is a, c, g, or t
  misc_feature (581)..(581): n is a, c, g, or t
  misc_feature (599)..(599): n is a, c, g, or t
  misc_feature (634)..(634): n is a, c, g, or t
  misc_feature (651)..(651): n is a, c, g, or t
  misc_feature (654)..(654): n is a, c, g, or t
  misc_feature (676)..(676): n is a, c, g, or t
  misc_feature (712)..(712): n is a, c, g, or t
  misc_feature (745)..(745): n is a, c, g, or t
  misc_feature (777)..(777): n is a, c, g, or t
  misc_feature (779)..(779): n is a, c, g, or t
  misc_feature (838)..(838): n is a, c, g, or t
cccctctnactgtggggcagaggcacatttcccttttaatgttaaaagcaaacagaggtgggaaacagcattctatccngaagccgttttaactgcccaaacccttagattacnataaacaagagaggnatggattgcnttagtcgccggttgaaagccgcnatgccattccctttcccataataacactgtntagctcagtcccttctggggctaatcccctatcacacccaccggaaacacaganatnaaccaaagcgtgtgagtctctnccctgagtccatttctgccaaagcntgtctganagaagaattggtccacggaagccaggggacccactggcttgtctaatgangcctgggccccctccaggagccacacaattccctccaatctcagccctccttatccctgccagagcccacaagcaggctaganatcaccccaggagccgagccccccccagtctgaggcagangtgggaagaaggccaacaagtcacaagtngatctctggctccaactctgcccagcaganatgccttcaatttgcccatcttcagtcctgcgagcgtnagagangaagccaaagtttcagangcctagaagctttactctctattcctccaggattnctgcggtcacaccttgnaancagtctcccactcaactgccancgtttccctaaatcgcattctctgaatctggaagtnccaggaaaccttaggccgagtccagtgacattnctcgatgcaacagcccaactgtttctccaganancctggttcttggtgacaatgtcccttcttggcatggttatttaaggagaggttgggccngaaaaagaggggctccatggctcaccggagttggacattaac

SEQ ID NO: 716882 - DNA, 299 bp, Homo sapiens
  misc_feature (252)..(252): n is a, c, g, or t
gtttagtctcttttctgccaattggctaatgtcgttaacgtctttaaaatgtcatcttgcgcatcgggatgtaagaagaaatcagcgaccaaaccatgaaccgactgtgtcaccaaccactcatttattgtttggtcatcagcatctggcttgagatggcgtagtcttttgcgctgttgatctggtagccgttgtgcaataattgccgcattaacggtatagtggtactttaaaaaatcatagtcctcacgngttctcacatgattcaaaaaagcaatcgtctgcgcaatttgttcccc

SEQ ID NO: 716883 - DNA, 730 bp, Homo sapiens
agcggaatacgttaatttagcttttgaagatgcaactgaaaatgaatgtcgtgaattttctgcaaataaaaagtttaaaaggtcagtttactttcagtcgatgaatgtgaagagctgggatcagatgaacggagaagtccatactccctttcaggcttctgtagattcttaattcaccttctgatgtattgatggcatttctcatgaacatcatggaaggacctgctattccagattctacacgagaaagtgaacgataatatattagaatgtcaacacaacatcacggcaatacgtgtatgtaaaaatgaaagcactgtcttggatcttagtagcattgacctcttcaagaaacaaataacacagagtgttacagccacagaaacaaacgaacacaatagacgtcctatccagtagaacgcagacagcttcttcgcagaagataaaaaagtaaccaatggcaacgccctgtggaacacatgacattcagcaacgcagcacattcttggatagtgcatgtacaatctcaagaaagacatgtcacttggatcttcatcaaagagaacccaattctgacataccaaagaacagctctacaaaatctctaaaactccttacggaagtcaagtactagcctcaggcaaggtccagtgaacagaagagccatactacaaatactgagacaagctcaatcttgcttatctagcaggtaatgtagagaactagacat

SEQ ID NO: 716884 - DNA, 936 bp, Homo sapiens
gggaaaaggtgctgtgggggcttatggatccgagcgcaccactacagtccatgcaagacttccctgtggttgactcagaggaagaagctgaagaggagtttcagaaggagctgagccagtgcaggattagcaagaagctcactgctccccagaaggaactttctcaagtcaaggtcatagacatgacaggccgggagcagaaggtctactacagctacagtcagatcagccacaagcacaacgaacccgatgatagggctgacgctacagtaccaacagctgccacagtctggcaaagaggacaaggacaccggctatagcgctgcccgagctggagcacaacctgcagctgctcatcgacctcacggagccaggagatcatccagaatgaccggcagcctacagtatgagcgggacatggtggtcaacctctaccatgacctggagaagatgaccgaagtacctggaacacgacgagcaggtcatctcgaacctcaaaccacagtcctgcagatggcggaggactgccgagcggcggactgccgaccgacctgccccacaccccacaaccaaaaaagaacaatataaaacaccaatacaatcacaacacacacccatacaaaacaagatctaataccaaaaacaatacacaacaaaccacaacaaacccaaacataaaaacacatcaaccacatccaccatccataaacacacataattttcaagaaaaatccaaaaacaacaattcaaccaaactgaaccatcatctaacaccacatacaaccaacccactaaaacagaaaaaaaagcacaaaccaaccaaagaaactaacaccaaacaataaatataatctcccaaaatcgaacaaaaaacaaaaatgatcacactattacataaaaccgtaccattacagcaaaagaataacagaagaactt

SEQ ID NO: 716885 - DNA, 234 bp, Homo sapiens
gtgtatcactggctaacttagaatagtttggtatagtctggcaagagcacataaagcttatgtcataaaaaaaaaaacaaaacttcggttggtctcatttggagatattttctttactccttccaggagctgatctggatagggagggccgttccactggaaagggaacgtcccttcctctatactcagtatgaggaaagactcggtccacatgacagggccaggggaaccgag

SEQ ID NO: 716886 - DNA, 257 bp, Homo sapiens
ctttttattatcttttgaggtgaattcctcttcattggtattctgttgggctctcactgcaaacagtttctctgtccgctttgatgccttaagcttccaaagacaattcttccagttctatcagtgatatcatcttcatcctggtcctgcttttttttctctttttgctttttcccttttgacttttgaggctcctgttctttggcagaaccagctccatctatttctgcatgccaaggacatcaagatcaatgtct

SEQ ID NO: 716887 - DNA, 625 bp, Homo sapiens
ccctcttcctccccccctcctgaggtggggcagagactgtgttccatcaaccaggtggcggaccaacccacgcagtttggtcggtccctgacccattgggaatccccccgcagatggtttgttaattccttggagggcaaaaccccccttttgccccaggggcagacaaccatgggtgaaaacctggccccagtttaggggaacttttccagcatttatgaacggattaaaaagctgggaaagtgggcccctttggggggtggagaacaggggttttccccccccctgtgaactttgttaacaggttacatagggtttccccttttctaaaattttaggatccccctccccttttaccctgggggcaagggttttttttgcatggggggtttaaccccccccccctatgaaaacaaagggggaggtagggggtgggtttccccaaaagggggtttcccccccggcctgggggataaggaggggggcccccccccaagcccactcatgtcccaaattgctttgcctggggggggggagggttgggttttgtcccccccccccggttttggggggggctgtaaaactggccccctgtttttgcccctttaaaggtgttggtttttga

SEQ ID NO: 716888 - DNA, 1476 bp, Homo sapiens
gtgtccaccagcagtattagggcggggatattgcttgctctctggagtccttgtagccgaccgcgcccgacgctttttgggcacccttggggggcaccacacctatgtagggccccttcttttggggcccaccaccgggggccagcaattgtgtcgctgtgtaccacccgccagcccggtttccgttcacagttctacgattctgacccgaggcggacggcctttggtatatacctttagggggcgccgccctcttctcgcgcagtgtgtgcaccctctacgcggcccactgtctattaggttgcgtgttgctgccccacttggggggcagcccccaactaggggtagtagtgtccacagaccccacgaagaatttcctgggggcaaggataagataaagataaggtgtcgcaaagtttttagtcctgggattgccgaccctttttaggagtgtttgtgtgggtaccttggtgtgaaccacccggggtgtgtctcccaccagcgaaaatttttcggtggtcccccttttttatagatgcccgcgggaatattttataggcgggaccccacaaacgccacacatggggaggaggccccccccccgattccccggcgcccgagagttttttgtggtgggcgttttccaaaaagtgtttgtgggtgggcacccacgatctcttaataattgggcgggaatatctcctccaggcggcttcctgtttctctctgttgggcgcggtgtcccccacccagagaccgcaagtcggtactccccccccacgaagagaggcggtccccaaaatattcttggagagagttgtgttttttgggctctctttgagagcactccgttcttcacacacgagagcgctctcccacgtgggttgagagagggagtctcggagagcgccactttgagaaaaccctctcacttatccccccggtatggacacacaaaaatttttttggcgctctctccctctatgtccaccaaccccacggcgccaccacgtgttgggagcacaccagtgggcgctcccagagtgttcccacagtggccacccacagtgccacttgtggcgttatcccttacggggatataccatttgggttgtttgaagatgtgtgtggtgtttatatcctcgggagtgaccatagccacccccgcgaatagggtcccactcttccctcggagagatagctcgtcctctctggatattttagactcgctgcctccccagccctctctggggcttggagaacacatttatcttaaagagccactcttcccttctcctgttaaacacccctgttaacatctctcccataaatttggtgattcttcttgctaggccctaagattttgagttaacacatcttctttgaagccccaacactccccccttcttgtgcctttttgccttgggataatggagtttttttttagaaaccgtgcccagaatgacccagatatta

SEQ ID NO: 716889 - DNA, 1710 bp, Homo sapiens
  misc_feature (1038)..(1038): n is a, c, g, or t
  misc_feature (1045)..(1045): n is a, c, g, or t
caatggtggggttatcacacacctccctcatcaagaagagcgctgtgttttatgataattggccgccgccccagacgaaagaaaataaggggggggggttaatataaccgacaccgcccccgcagtgtttggcatacgagcgctcttgctgaaaatgacgccccgtgggggtccacctattggttcctacaagagaggagaatatttgttgggaccatcaaggggtatatttttgcgtcccccgtgatgtttggttgccccgacgacgtgttaggatttctccgccgagtcaaatgtatgcgggcccacctcattggtgtggaccaccaccatacaggtatgggggggtgaaatggtttattccttttctcgcagccccctgcgtgccgtgttttaattaatttcctcagcaaccgaagagggagctgtttgttatatatgaatgaggttgttatactagtgatataaggatggtgaggaaaaagaagggttgttttttcttgtccgcacacgacagaacatcgggggtttagacaacccaaagaccacccccaccgacttttgtgtgttgagggggtgtgtgaaacacacaaacgaagtatctcgcgctccggcgttttagaaaccacaccgcggcgttggggtgttgtttgataagacaactggttgtcggcgctccacaataatgtggcccctcttctaagaatttttgttatgttctctcttctctcctcgtagaagaggagatgtgttggcgcctcctctcgcgtataatagctcttcggctggtaggtgaggcccacccccggcggctctccatcatttattagcaactcctctcttctcacctgctgttcagagcagcaccaccgctgcgaaggagaagtaataacatcttctcgtcgcagaggcccccaccccactgttgtgacccccactccgggggacgcccactattttcttgtggagtgtccactctccttctcacacttgtggtgaccggcgccccacacacaggggtggccacaacagagaggngtgttgngtttgtgtctctcctctgagatacgcgacacactctgctgtcttttagtgtgcggccgctttttttatatgaacacattggtgtgttgacagctggtgagaccaccctgctgctggggagtctccttctccacaatctgcgaagagtttcctctcttctttcatcagcgagagagacacacaccgcacacccagagaatatttgttgtgtctcactgtgtcccccacactttctcacacaccgcaagattctggaattatctctacacccacatagtgtgtaaatatactctcccaacaacactatctgtttactctgtgagagcgctttacttttctcacagagatagagatagatatagacttcgccggggatagaccccgcgacacacacccagaggaagagtgtagagatcttttctggaccaccaggaaaaagagagaaaatatataggagaattttcagggaaccagccccagagattggatccaggaaagactgtggacatccaccacaagatgttgaccccaaaatcctaagcttattccctccaggctcccgggcttacactgcgatctgggtttgctttgacgcatgggtatttatcctcccccattggtgttttttaatagtttttaggacccttatttaattagctgactccc

SEQ ID NO: 716890 - DNA, 858 bp, Homo sapiens
aattctgggatgcgccgcatccgtgttcatccctgtacggctgctcaacttgtgtcaggatcgtcgggtacaagtgtgaggcaatccgtggagactggctgccggccgagccacaccgaggtgtctcgccgctcgagttgccactgcgctttgaagtcaggcatactgcctcgttgctgctagatgcatgtttaggcagaggataaagacttactctgcaggaagctgatcgactgtggtgcggccctggagaacacatgtgcactgatactgtgaactccatctagcacgatgatgtgaaccaatgggggcctgtaggtctaaaacccccgaaatttcgaggcaggcttgggcactccagatcatgctgccgttaatgctctgcccgcatgtggtggtgtgtatcccataagaccgactctggaaggaaccatccagtaactggtcttggcaagaacctggaaaaaaatctccaccaagggttcactcacatgttttggggccccccccaaaaaaagaccggggtttggatacacgaaaggctattggcaaagaagttctcggcaagaaagcggggcctcgctggtgagcgtgggggaaccaatgcaaaacacccacttgaagaatggggtggaacccctatggaaaagataaaggccggggtgcgcggatgattttttcagccggtgggagagactagggggggaaatgcacggttggatggggagcaagtggcggaaagactaaaccggcgagggggagagaaggaaaacctctggcagaaggcagaaggcctgaaacccacaacgggccggtaagaactggcaggggaacaaaatagagaacccggggaccaaa

SEQ ID NO: 716891 - DNA, 243 bp, Homo sapiens
gatcgactgcccgtgacggtggccaatggggcatgtcttgcgctggctgggcacgacaccgagtacggcctgtatttcatgaactaccacagccgaaccccgaccgtcggcaccaccaccgccagtgccagtaccatcacggcgctgggcagtatcctgccgctgacaccggcaccgttccgtagcggcctggcgcaaagcatcatgctgggacgcggtcagtactatctcgagtcgacgcgg

SEQ ID NO: 716892 - DNA, 269 bp, Homo sapiens
ctgtaaaaaataataataagaggtactgaagagcaatgttaacagaatgctttatatccagaatgctatgtttttttcaagccacattttagttgaatgacgtcaaggtattccaacctttattttcaacattttgggacgtgtcacaatgtgattacctctttgatatgatgaacctataagtctattcatctctgttatttcatttctcaaatgtgagccttgttgaggtccattatcaaatctacactttggttgattatatgatg

SEQ ID NO: 716893 - DNA, 544 bp, Homo sapiens
  misc_feature (109)..(109): n is a, c, g, or t
  misc_feature (303)..(303): n is a, c, g, or t
  misc_feature (365)..(365): n is a, c, g, or t
cgcgcctccccccccgggggggtttctcttttttggaaatcccggtcgggggagtttttaaccatttttcaccaccggggttttggttcccccttggccgggcctcctnggaaaagtttgtcccccgtgtgggagggggggagccggtttggaaatggtcttcaggacccgcccgcagggtccccataactgttcagggtttttgcatttttgggtaaatggaaacttcgggttcctgtcggggggtcccccatgcctggaaaaggagttggtggttcccacccctggggccgggaaaagggnggggccttccccttccctcaagccgggggtcttcctcctgtggggggggttattgggccccngggcctttttaagggcgggcttggggcctgttaaaggcaaaaccccgcccctttattccgggggggggggggggccaaggatgttggggtttaatcaggcggggccggtttttcggggttttttttttcccaatggaattgaacccctgggccaaataaggttggatttttccccccca

SEQ ID NO: 716894 - DNA, 173 bp, Homo sapiens
cagtacttgtaaacacgagcatgtgaagtcacctaattaatacctttgtgactcataatacctagattcataagcgtcaatgttctcagttctgtcattttaggaaaatcagaaatactggaagttttgggttccctagacccaggagaattgaaaatctcagaattaaggcc

SEQ ID NO: 716895 - DNA, 792 bp, Homo sapiens
  misc_feature (2)..(2): n is a, c, g, or t
  misc_feature (64)..(64): n is a, c, g, or t
  misc_feature (75)..(75): n is a, c, g, or t
  misc_feature (78)..(78): n is a, c, g, or t
  misc_feature (89)..(89): n is a, c, g, or t
  misc_feature (112)..(112): n is a, c, g, or t
  misc_feature (133)..(133): n is a, c, g, or t
  misc_feature (135)..(135): n is a, c, g, or t
  misc_feature (137)..(137): n is a, c, g, or t
  misc_feature (157)..(157): n is a, c, g, or t
  misc_feature (161)..(161): n is a, c, g, or t
  misc_feature (163)..(163): n is a, c, g, or t
  misc_feature (173)..(173): n is a, c, g, or t
  misc_feature (175)..(175): n is a, c, g, or t
  misc_feature (177)..(177): n is a, c, g, or t
  misc_feature (181)..(181): n is a, c, g, or t
  misc_feature (197)..(197): n is a, c, g, or t
  misc_feature (212)..(212): n is a, c, g, or t
  misc_feature (226)..(226): n is a, c, g, or t
  misc_feature (230)..(230): n is a, c, g, or t
  misc_feature (248)..(248): n is a, c, g, or t
  misc_feature (266)..(266): n is a, c, g, or t
  misc_feature (280)..(280): n is a, c, g, or t
  misc_feature (299)..(299): n is a, c, g, or t
  misc_feature (305)..(305): n is a, c, g, or t
  misc_feature (332)..(333): n is a, c, g, or t
  misc_feature (340)..(340): n is a, c, g, or t
  misc_feature (351)..(351): n is a, c, g, or t
  misc_feature (358)..(358): n is a, c, g, or t
  misc_feature (390)..(390): n is a, c, g, or t
  misc_feature (488)..(488): n is a, c, g, or t
  misc_feature (606)..(606): n is a, c, g, or t
  misc_feature (615)..(615): n is a, c, g, or t
  misc_feature (629)..(629): n is a, c, g, or t
  misc_feature (631)..(631): n is a, c, g, or t
  misc_feature (634)..(634): n is a, c, g, or t
  misc_feature (636)..(636): n is a, c, g, or t
  misc_feature (782)..(782): n is a, c, g, or t
gntccaacattagtcgtacttcctccctcccgctatcaaaaaaagaagaaactccaatgggatnaagtagagccnggnggtgtccagcnttgtatgggcctcaaaaaaatantccatccagcatccagaattntnantccctctcatccctgaagtnctanantgtcaaagcncngnaaangcctcctttgtgctgncattggagacaaggntccgttcttcaggntgcngggagaattgggataganactgactctggacttganatgtagtgctcagngacaggccctcacgggcanctgtgnattctctactctgatgagggggaaagnncactgcnaggggggtggnatctggngtgttgtggcggtggcactgctggtgggttcnacggcgtggcgcatgctgggtgacggtgtcacgccacacactgctctggggcaggcgtgatcagtgagggtgggagacagacaatgtgaaaacgtaanactggccaatgattcccctgcttctttggtactttccaaaattctctgatcaaaaaagtataagggaagcacaccattaaaaaattacagttttacgtatttacaaaagcaatgatgntatattacncaacaatcaatacncngtntntgaacaaatcttcagtgaaagcacttgtgagctcccgtcccgctgtcatcccacagcacgcgacctctgcagggtcaggttgcctgttctgaagctcattaccttacagtatattagaaggcaaaacatcatttggaaaaaaatcnttttcaatct

SEQ ID NO: 716896 - DNA, 612 bp, Homo sapiens
  misc_feature (133)..(133): n is a, c, g, or t
  misc_feature (157)..(158): n is a, c, g, or t
gccttcggttttcccccccggttctttgcggttgggccctttttttttgggccccccccccccaaaggcccctcctcccgccgtgtggggtttttttttgtggtccccgcgggcgcccccttctcctcccccnggtcttttgagttttcccacccanncggtgggccagggtggtgggttttttggcccccccaccggggggttcggggcccccttttttgttttcaccccccaaattaaaacccctggggggccccggggtttcccccccggggggggttttctccccccccccccgggggtgttttttcctttttttggggctttttccccctcggggccccccggggccccgggggttttgggggtttttttccccccccgcccccccctttttgggggtttttttccccccccggggggggggggcggggccctttttttttttcccccccccccggggcccctttttttttttttttgggcggggggggtttttttcccccggggaccctttccctgggcccccccccccccggccccccccgtttcccggtttggggcccggggtttttcgggggtttccctttggggttttttggggccccgcca

SEQ ID NO: 716897 - DNA, 253 bp, Homo sapiens
tatctcactggttcatgcacactcacgaggtatgctgatcatgattgcggggtgaccaggctcagagaaggttgagaagtgctgaaatctgacgcgtgagagaatttgctatcttacagttttcagtcccaacatgagttcagcagagtaccatgcccaatcaagagtgctgggagtgggatcccactcagccagctagcaccagagagcaggaggtcctgggagccaatgggctctggatgaaacgtcagga

SEQ ID NO: 716898 - DNA, 144 bp, Homo sapiens
  misc_feature (14)..(14): n is a, c, g, or t
tactaagggcgtantctgtcttgctgggcaagggtgccgtataatcatccaggtgctttatggcatctcccaaggaagtcagcacttcttgccatgtgccttgactttggggttgccatgatggcagaggcagaggacaggttg

SEQ ID NO: 716899 - DNA, 1374 bp, Homo sapiens
ttttttattttgtcacaaatcatttaatcttaaaaaatcctgggagtaattaaaagaatatgtgaaaaaaaaaagttcaaagtggtgttcccctttatgtgggtgtgagtgccaccagtgagtggccctcacacaagccagtgactcaatcgccagcgaaaagcacgtggagtgccaaagagttagtggcgtggcaaaagggcactcgagggcgcccacgagtccgcgaaagaagttgtggggtatcacgggagcctcgtggcacagcgggttacacagaagcggcaagcaaacaagaaccatcagttaagagggaacccctcagagaggacaccagggccgcgcggagggcggaggctcaagtacaagcacccttgggaaaaggcggttatcgtgtgggagtgaggtgacactctcagggtgtctcgacagaaagactaatgtggggtccaatccgctggcggacataacacccgtgaaccctaggacagttgggctgtgaacaccagatctctttgttgtggtccccatactgcgcgggactccacaaatttaccatacacaaggcggtataaacagaccgcgcgaaacaccatccgcgtgggcacgcggtgaggagggcacacaccccgcgggcgcggaaaacaaaccgatgcacagcgcgctatagataagaggccacacggggggagcccccaaaatcggcgggcgcatagcatacccataagaaactccggccgcatgagcgcgcccggcaccaaagagagaataatcgccactcggggggggtgccccccaaaagctataatagcgcccggaacacccgccagaggaatctccctgggggtaccacaggggggggtaccccgaaataagagcgacgacccagaaataaaaaaacgcatagggccactgggggaccgcgcgcgattaacaccacgtcccgcgccacgtggggcacacctctgccaaccctaggggacaaccgtcgggcgacaaggaacccttacctaccgggccgccgtcgccccccaacttgggccccacaccaccaaagcacagaatacaccgcgccccacgagcacccactacaaccttcacaaccgcctcccccgtgccaccccacccgccccacccacacagctgaccaacttggcccaagggaaacaacccaacaccccttacccacgcagcagccacacaaccaccccccaccgccaccccccgccaccgcaagagcacccaacccacgaacaacaacacccaagcccagcacccaacgacacaacacacacaaacgcacccaccgaccagacccaccagacccgacacccacacccccgaacaaacagaagcaccaggcagagaccccag

SEQ ID NO: 716900 - DNA, 346 bp, Homo sapiens
ccaaatcccatagatggggtgaagctggggtggggagggtctgctctttgaattacttgatggttctgactccaaggctgctgttgcccacttatgtgtgagggggacactgtcactgcatgacctgtgatgctgcatacaccaccattctgtgtgcgggtgtgtgttggggggcacgtaggtacatgttccatgtcctgttgcatccttctccctgtgacccatgttctctgttggggggaagcaaagacaactggacacaattcactggatgctagtggactttttctctacccaatttttccattactggctgttccctgcccgcgaaccacctgtgtttgtt

SEQ ID NO: 716901 - DNA, 333 bp, Homo sapiens
tataaaaaccatcttaactattgcttacatcttaagtactattagttttattcggggcagcagactgggatattggtgttacttctttgaagttaccttctgtttctatatgctgtctactacactaaaacatgttacccaggaataaagtggctaattccataagtggcttattacctgtgacacctattgactgagcctggtacgacatcgatgacattacagacattctatgtgaagttgaaataatctcctattattttacattatttatttattctttacatatgacactaatctggatatgtatgcttggaatgctgttgtatctcg

SEQ ID NO: 716902 - DNA, 194 bp, Homo sapiens
gagctgataaccaggaatacaaactcctgctgcatgtgaatacgccactgcagcagaagactggccatactaacggtgcgactgctggatggagaggatgaccacctgattcagttcataaaagaaccggtgtatcacccgtcaggtgcgtaccattgtggaagaggtccaggatggcaaggtcatctcctccc

SEQ ID NO: 716903 - DNA, 380 bp, Homo sapiens
ggcacgaggtgaggcactcaaactgccgaggagccgcctcccgagagacatttaatccgggggatttgcagttaacttctaaattaaggatagcccttctgcagctgaggggggcacgccggtccctgcgcccggcagctgccgtgagtcacgccccgaaatacgccgagggcctccttccgcagctgccactgggtccggctgtcactcagaggaagcacggagcccccagccaaagggtcccctccccttcgcatcgccggggtttttccagccgaccatgggccattttttcctccgacggctggcagggaagagggggacgggggcgggacccaagggaggcggtacccatgtgggtgggcgaagggggcggccgc

SEQ ID NO: 716904 - DNA, 121 bp, Homo sapiens
tcagctcgtacccacttacacgttggcagtggggacacggaaggcatgcagagcttccctgttcagctcagtgatgacttgcccacagccttgtgcagcgacagctgaggctgcggggcat

SEQ ID NO: 716905 - DNA, 727 bp, Homo sapiens
ggtgagggctccctgtgccctacaccagccccactaagcagtgaaggaaccctctgtccttccccagccaggaggagcagagctgtgggctgtgtaggggctccagccagtgcccactcctgtctgctctgccagtgtggaaggagtggaccacggtgaactcacagcattgaagaacgtttctgaacttgtgctcctcaaagccagcagccagaaggtcatttggggtctgcctagtacgcgttctttgaaccctacacgagggggcacagacctgacgtgtttacagtgcaatacacagcgagcagtgctgtgatatggcaatctgtgcgtcaccctctcagacgccactgcgccacacacaacgctcatactactagtccaggccgcagaacctcccgcccctgaccccaaaacacaggcacatgcagcgtgcacatctacacacctgggcctgacgggccctggtggctgagctgcacttgtgtgtgtgtgcactggtggaaagagcgatcacgacagagggcgtgcagtgacttacgacatctttagcgaagtcacctactccagagaccctcatgaagggacagcactgacatcagtccatgataataatgacatcctgaaaccacagcaatcggcagacaacacaacatcaggactcccgaaagcccaaagacggacagtaagcatatggacagcaccacaataaactttagagaaccac

SEQ ID NO: 716906 - DNA, 102 bp, Homo sapiens
gtctattcatataatataaggcgaattatagagtgtgacgaaactctgatacagagccaactttgagcatgcattaaaatttacaaaagggcgggctttaat

SEQ ID NO: 716907 - DNA, 225 bp, Homo sapiens
aagatcatgttttcctctatcaatacttcatcaaggctattaagtgtgactgctctgtaattgtaaacccctgttttctttctccctctacttatgttctcctgagcaaattctttatctgaaaactgtttcttcttaatatgtaaataaatataatcattatacatacttcctatcagtatttcgaagaaaagaaggtgatgtttgccaagtgctttccgttgc

SEQ ID NO: 716908 - DNA, 1120 bp, Homo sapiens
aaccacaaagacattggaacactatacctattattcggcgcatgagctggagtcctaggccacagctctaagcctccattattcgagccgagcatgggccaggccaggcaacctatctaggtaacgaccacatctacaacgttatcgtcacagcccatgcagtttgtaataatcttcttcatagtaataccccatcatcaatcggcaggctataggccaactgcactcagtatcccctcaataatcggtgcccccgatcatggcgtttccccgcgataaaccaacataagcttcatgactcttacttcgccatctctcctactcctgcatcgcatactgcatatagatggaggccggagcaggaacaggtagaacagatctaacacctcaccttagcagggaactacgtccacaccctggcagccatccggtagaccgtaagccagtcttcgtccattacacgctaagccaggtgatctccatcctatcttcaggggaccatcaagtttacagtcaacaacaatgtatcacactagtaaaagacccgctggccataaacccacatacccacaacgccgcctctatcgtcatgatcacgtagctcaatcgagcagacgtcactacatatctgcgcatatcgtctcgccgagtcctaagcctgctgggcactcgctaatagtcactaagcagatcggcaatacatcaacagcgaacattctatcgaccaccgccgggacggaggagcacccacagtgtctactcacaagcacataatcctgcatataaatcgggttcaccctgaaagtctactatcttatcctaccacgggctcggaccatacctaccaacatgacaaccacaccatacggacaaacacagcaccccctgccaccctacgacgaaccgacccagaaccacaaccgggaacacacggataaccagaaaaccacacaagattacacgaagcaaacgacgccaacagagagataaacacacgcacaaaaaaaccgacaacacccgaagcaacataccacaaacacaaccaccagaaaaacacgaagcaacacaaccgaacaaaaagcacacgcagcaaagacaccagagtacaaaacaaaaacaa

SEQ ID NO: 716909 - DNA, 960 bp, Homo sapiens
tctttccagaataggggtttgtcaaaagcattcccccctttttgatcggtgtcactcgtcccactaatcttgggccactatcacatttgtcgttatagcattccaagtgatttcctcgcaacctctttcccgccatgtggcccataaaccgatatgggttccatcggcaatcgtcacaacgtacccctacgtgcgaatactttgaccccgggccaatgtgcatcgatacaccgccgccaagacgtgatgccactaaagacccgcgtgtagaaagtcaaaactggtccaataaggcctacctgggttcggcactgccgtctgggctactggaaacggccctaggtcccctttttgctaccctggcggataagacacaggacgtaatctatcactgctagcgtatacgaattgctaggaccagcgccatagcttgaagttgcttcgagcttccatctactcgctagccatttacagcatctatttaggtagaggcctttttccactacttggtcagttgtggagtaggtacaaccatttcttgcacaattgctttgtctccctcgcttgtacgcatgcatacgtcgagtagtcgacatcaatggatgcaatgacaactccccccttcattgcttcgctataccaatagagcagtatactattagactgtcagttagtctcaactcatcgaatgccatgtggcgtttgtgtatgtctctgctgcttggttttggcctcctcgttctatgccttcttatgttgtcgacaatggtagacatgtatgagatatttaaagttcacatggtaattttgttccggtatcagcagtaagcaaaaattagcaaagagatagtctaaatggcctctcagcttggtatgtgaaaatgagttgacatacctttctataagtccaaatacaaaagcatagtctctggaagattgtgttcatgtgcatttctgata

SEQ ID NO: 716910 - DNA, 143 bp, Homo sapiens
caggcttaggagcctagcttggtcatgaagttggttgcttccactgtgcgatgcactcctcagaaattttgaagtcagcctgcaacttctcgaagactttcttcttgggcttgagctcctcgagtctggttggcccttttcat

SEQ ID NO: 716911 - DNA, 906 bp, Homo sapiens
tgtaggcaccggtccgaggtgcctgccctctgtccccgcggctgggtctcgatctgctccggttcctgggctcctaattcttggtccagacttcttccaggtctgcgcgtctgttgttcccagcgctctgcgaagcctgaaaaggaggagcaacctgtccagaatccccgcaggacaggaaaaggaggggaaatctcgacatggaaaaactctacagtgaaaatgaaggaatggcttcaaaccaaggacagatggaaccatgaagaacagccacaagacgagagaaagccagaagtaacttgtactctggaagacaagaacgttcgacaacgagggaacgacagaaaacaagggcaaaacaggagatgaggacatgttaaccggctagccggacaagccacgacgagtgagggacgaggcacaaagacggaaagtcagcagagggagggagagtcagagatggcagggaggatcagagagcagagggaaaaccagagcatagcagggcacagccagagagtgcacagggagagccagggacgtgaaaccacagggctgccaggaacgcgcccaggctgacggatgcatgctacccagggacaaagccaaacagaaacacactcacatacaggggctggcctccataacctcaacgcaggcactacaagagggccacacgctcgacactgacacgttaccgccaacagacggggacagggacacagacaacctgcgaccaacaatgcactccgggtcgccggcatgcccacgacacaagacgcacagcacgaccactagccgccccctcccaggaggcaagccacaaaaacatacacaggacacccctataacccccaaagggacccacgcaaaacaacggcagacacaccgacccccagaaaaggc

SEQ ID NO: 716912 - DNA, 125 bp, Homo sapiens
  misc_feature (13)..(13): n is a, c, g, or t
  misc_feature (26)..(26): n is a, c, g, or t
  misc_feature (29)..(29): n is a, c, g, or t
cttatggccgganccgcggccgcaanaanaatattcccccccccccccccgctttgtggttttcaggaagagctaaatatggctgaatttctagatgaccaggaaactcgactgtgtgacaactg

SEQ ID NO: 716913 - DNA, 874 bp, Homo sapiens
  misc_feature (325)..(325): n is a, c, g, or t
  misc_feature (358)..(358): n is a, c, g, or t
gacagagacccttgaagatttgtactcaaaccacacaaaatctcaaatcctcgagttgagagattatttcaggtgtctgctgcacgagtagctttacaatccccgggagcgtcttacccccaattacatgcgagacagtatgaggaatatcgctgatatccgtcccgtgtgaggtgactacatcgagaagtcaagattcctctctctaaaataaagaccctttttcctctgattgacgccaagaaaaaggatcaagtgactgtcaggaaattttccaagacaaccatgaagatggacctacagctaaaaaattaaagactgagcnagggggagcccacttcagcgtctccagtctggntgaaggcagtgtcacctctgttggaagtgtgaatcctgctgaaaacttccgtgttctagtgaaaccagacagaaggccagctttgaggaagcgagtaaccagctcataaatcacatcgaacagttttctggatactaatgaaacaccgtattttatgaagagcatagactgatccgagcttccgggagaagccattagtttcagaagagcaggttaacaattctgaaagccttcagagaaagtggacataacactaatcattctggaaatgtgtcccggatggaatatctgatcacaaagaggaggctccggaattctgtagaagtgggagccaaaaggttctggcccaagacaaccgttggacaggacgtgcttgcaaaggggggggccaattgcacaaaagcggggttggggcaaaaaagcccggggcgagctcaacacaggggcccagggcaaaaaccacccgggcgcattggcacattagatcccacacagactggtcggcaaaacacaaca

SEQ ID NO: 716914 - DNA, 641 bp, Homo sapiens
  misc_feature (585)..(585): n is a, c, g, or t
cctaatcctaactacctgattcctacccttaacaatcatggcaggccaacgccatttatccagggaaccactatcacgaaaaaaactttacctttctatcctaatctccttacaaatctccttaattataccattcacagccccagacctaatcatatttaatatcttcttcgaaaccacacttatcccaaccttggttatcataacccgatggggcaaccagccagaacgcctgaacgcaggcacatacttcctattttacaccctagtaggttcctttcccctactaatggaactaatttacactaacaacaccttaggttcactaaacattctactactaactttaactgcccaggacctatcaaactcctgagccaacaacttaatatgactggcttacacattagctttaatggtaaagatacctctttacggactccacttatgactccttaaagcccatgtcgaagcccccatggttgggtcaatagtacttgccgaagtactcttctaggcggctatggaataatacgcttaacactcattctaaaccccttgacaaaccacatagcctaccccttnccttgactatccctatgaggcatattattcaggttccatctgccttacgccggctt

SEQ ID NO: 716915 - DNA, 409 bp, Homo sapiens
ccctgtctccacaagaaagctgtaacctgtaacagagttgtaatttaaagcttctacaacagtatgctatttactataaattgtaatgtgggatacttaaaaaaaattttttttcaagatacattaagttctgaaagattagaaacaaagggttaagaaaagatatctaaacacacacacacaaaaaagaaagtagatttagttatagcatataaagcagaaaaaacaaaaacattagttatggtaaatacagttttatttgctagtcagttacagcatgttttagaactacacaaaacagcctagtgtggaggccatgtcttaatcacaacacttccattactctggagtcagaggcgagatgatttctctcagttctaggactaccagaggtacatagagaaaattc

SEQ ID NO: 716916 - DNA, 433 bp, Homo sapiens
  misc_feature (36)..(36): n is a, c, g, or t
  misc_feature (41)..(41): n is a, c, g, or t
  misc_feature (86)..(86): n is a, c, g, or t
  misc_feature (148)..(148): n is a, c, g, or t
  misc_feature (421)..(421): n is a, c, g, or t
  misc_feature (423)..(423): n is a, c, g, or t
cccaccaagcccccctccaggagtaccctcctgggnccctnccccccggaaatcccacctcagtcagcaatgatttaggggggccnccccatggcacagcacccatggtaaagcccatgtggattaaagggaattcctactcctgagnccctaattcctaacaaatttacatcctacagacagtccctagaccttataatgattcaacctaaatgattcccttgactttatgatggtgtgaaacttcccaattttaacacaatgtacagtattcaataaacatgagatattccctactttattataaagtaggctttgtgttagatgattttgcccattgtaggttaatgtaagtgctctgagcatgtgtacggtaggcgaggctaagctacagaggtttggtaagttgggtgaattaaangnattttcaact

SEQ ID NO: 716917 - DNA, 486 bp, Homo sapiens
ttcggccagaggggcggcggtcaccagcagcctggagatgtcagcgctctgagggcccacccgaggggttaaagctgccagcacagaacttaacgatggagccagctctgcattatccgaggtcacagggcctggggagatcgagaagtgatatcccagctcacgtctatctcacctcgtcccatcaagccttacttgactctacaagtgaccggattatgggctctctccagtggggctcctggtccttgagacaaatctcatgcaggcctgcaagtgggtgaaagatggaacccgctgctgagtgcaccacttcaagtgaccaccaggaagtgccgtcacaccactgtgtatttaactgccatgggtacaattatttatgcctctgtttaaaaaacgaacaccctagtctgttcctaatggccccttgggtcttctctgtatgattccctgatggagatatttacatgagttgaattttacttt

SEQ ID NO: 716918 - DNA, 137 bp, Homo sapiens
gcttttccctagcttttccagaaggcctgttaaaagcaaggtcttccacaagcaacttctctgccacattggcaccccgtgccttttgatctagcacagagcccttcacccctcacctctgatgcagccagtagctt

SEQ ID NO: 716919 - DNA, 390 bp, Homo sapiens
  misc_feature (21)..(21): n is a, c, g, or t
  misc_feature (38)..(38): n is a, c, g, or t
  misc_feature (92)..(92): n is a, c, g, or t
  misc_feature (99)..(99): n is a, c, g, or t
  misc_feature (109)..(109): n is a, c, g, or t
  misc_feature (113)..(113): n is a, c, g, or t
  misc_feature (128)..(128): n is a, c, g, or t
  misc_feature (134)..(134): n is a, c, g, or t
  misc_feature (145)..(145): n is a, c, g, or t
  misc_feature (158)..(158): n is a, c, g, or t
  misc_feature (182)..(182): n is a, c, g, or t
  misc_feature (195)..(195): n is a, c, g, or t
  misc_feature (240)..(240): n is a, c, g, or t
  misc_feature (255)..(255): n is a, c, g, or t
  misc_feature (286)..(286): n is a, c, g, or t
  misc_feature (342)..(342): n is a, c, g, or t
aatgtgatggctggaattccngtcccccttttggcccntgaggccacccccctaaaaatgtggagtggctaaaaaaagcctgtgttcctganaacttanaggccccggncctntattccaggcttggncccccncctttagactnttatatgaggaanccatcaacttttcccttgtttcancccctttcccttncagtcaaacctgaattgtaagggaaattgctttcctgaaagcaancctgttggatttttnccagaatccctgggccccttttaccagtcanatttgtttaatccccctttaaaaatgggggcagtgaaactgggccatgggccccgnctgggctttgtttgcccctttttgataatttataattttttccaaata

SEQ ID NO: 716920 - DNA, 488 bp, Homo sapiens
  misc_feature (154)..(154): n is a, c, g, or t
  misc_feature (249)..(249): n is a, c, g, or t
  misc_feature (358)..(358): n is a, c, g, or t
  misc_feature (393)..(394): n is a, c, g, or t
  misc_feature (470)..(470): n is a, c, g, or t
taatttttaatttaaagagacaaggtctcactccctgtcatccaggtgggagtgcaggggtgctttcacagctcacggcagcctcaaacttcgtgggcctcaaggtgattcctccgtggcctcaggcctccgtgagaaggcgtgggcaccacanggcagtgttggcccagttatcacccaagttaacttcttttctcgtgtttatcttttgtgcacagaagttctcaactcgtgttgtgggccgtgggntggagagtgtgacaggtggtcaacaatctcttgtgggtctccacgagacaagccttctacacccttccgcgggttctccaaggcagaattcctcgcgtggccttacagncctctccgtgaaaatattctgtgggaacatcacgnngggcgcccacacacacacagcgcccacagacataatatttgtgtggatatttttatagatagaacaagcggggggntcttcgagccgagagatg

SEQ ID NO: 716921 - DNA, 488 bp, Homo sapiens
tcggagcaagcggggaaccagcgggaaagtcatcagggcccagggacatgagcacctcgggccatggctctagggccaggtgacctcccatctcagaactttctcggcttccggggggatgtgtggaagaagggcctctgggccctacagcggttcagctccaaccccacagccagcggtgctgagtccttacccgtgcttcggaccccggtgatataactcacatcccatacgattcccctccctccgggagcacgggatatgggcttctcgcggcccggtcggaggcctacatctcatccggtgccttcagccgggaggtcgtgccctcctccagggctcagattccccggacacggatctctcggtgcccatctccttccttccccttccttcttcggtgtgttttctttcttttaaaccagccgggccaaaagggtgaaactctgtctctactaaaaaatacaaaaattagctgggtgcagtgg

SEQ ID NO: 716922 - DNA, 245 bp, Homo sapiens
atccgcggttaccatctgtgctcctgaaatcaaagagtaattcactcctccagtcgagcatggcagatcaatctataatcccagtgcttttggaggccaaagctggagcatcgcttgagaccaggagttcaagaccagcctgggcaacatagtaagaccttgtcttctacgaaaaataagatattagccaggtgtggtggctcatgcctgtggtcccagctacttgggaggcacagattgcacgt

SEQ ID NO: 716923 - DNA, 151 bp, Homo sapiens
gctgacatggaagctgtggcaggatgcgaagccctcaatggacagtccgacttcccctacctgaggcgctttcccctatcaacccagtgcctcattcattcatgaccccgagaagtgtgtgttccgtggcctgagatgctgctgctgcaca

SEQ ID NO: 716924 - DNA, 1113 bp, Homo sapiens
  misc_feature (1113)..(1113): n is a, c, g, or t
ggagagagaactattctcgagttcttttttctttttttttaacgaacaaaaggctttttaactatgaacaactatgtattggggcaccaaaaatgcaaccacacgagtaagaaacaccatattctactcaatttagtgatatctcgtgtaatctaagaacaccaccagaaaagtttggttattaggcacaagtgccaagagaggaaaaagaaactcgtggtaaaagtcctattcgaatatatcactgtgtggtatgacggagaaagaggagtgtttatatttgtggctttatgtggtcaaacagttctccactcaagtgtgtcttacactctttctgtgaatacagtctctcaagacttctcaaagtgcgttactctagtattcactgcgctttgcggctatctctctacacatatctatcaccatctgtagagagcccaaagagagacagcgcgtatatggcggccctatataagacgtctctaacaaatagagggaaacctaccccctatatatatgtctcctctctcacaacaagagggataatccagcacagctgcgcgtagagcgctctttaatatctcttgggcgccacgagaagtttttccccttcccgtggactagtagaggacgggcctctcacatcttcaagaagagcatcgtagatagtagagaacacaacacgagcagaagacaaaacagagctaatacaccagtggcggcccctgtcttgggcagcgttgcacacacacgttagtggctatcaaccctcgctttggagcaagcaccccctgtggaaaattatccccccacacaaaatgccgtcgaaacaattctaacgccgtaccgttgtgcaacctgttgtggagccgtagtagtataagacaacaaaacgtcattcaccgagatgaaattcctcactgtggaacaaccacaagacggacaatattgtaatctcacaacaactcatttagtgggggagccccgccctacttataccgtgggtatcagagagcacactaaggcaaagtggtcgcaacaacacttccagtagagacactattccatccgctttggggacacaacaattagccccatccgtggagctgatan

SEQ ID NO: 716925 - DNA, 274 bp, Homo sapiens
cggatcccttctcatttcagttctagggctcggcacacagatccactttttcctcctgcgataccaggcttgcaatgggaggaacttccacaaaagtctctgacatgccctggagacattttcttcatagtcttgagtgattaaccatttggctccttgttacttatggaaatttctgcagtgggcttgaatttctcctcagaaaatgggattttcttttctattgcattgtcaggctgccaattttccaaacttttttgctgttttccttttg

SEQ ID NO: 716926 - DNA, 100 bp, Homo sapiens
gccgctttttttttacagtttgaaacagccctttatctcagaatatgcacagagcacagtgagctactgagctctctcttctctctctgatcaggaacgt

SEQ ID NO: 716927 - DNA, 102 bp, Homo sapiens
  misc_feature (35)..(35): n is a, c, g, or t
  misc_feature (69)..(69): n is a, c, g, or t
tgtttttttgaaggttacagggaagactaaacatntatttagaagttacagtgtttgtttttacagagntatgttgccacggattattgattctggaaggtt

SEQ ID NO: 716928 - DNA, 1245 bp, Homo sapiens
  misc_feature (1008)..(1008): n is a, c, g, or t
gggccggacactctatgagggctgctggagacctcgcgtcgtgttggcagacatccgctggaccgtcaggaacgttattgtttggcgcctgggttcattgacggctcttgcttctctctttaccttattccagctctaaggccagctgactgccggcatgtacccaagacctgtgagcaagggatgttcagcccgacgcttgccggagaaagcttaaccctcgcttgaccccttattgaacggcacgtgttggttctcaaccttactacggcaatcctgaatgggcgcaccttggtggttgttaacacatgataaaccacgcattggactttcacgttataacgaaccatgttgttcctcgtgctaccaaacgtgtgggctccaagggccattgccacgtttcgacaggtgggcacaatttgaccttcacttgggactccacgtgggcaaattcttatcgtgaacaccttccacttgggagcgctcttcaaagcgccagggattcccctacatttggtgcattccaagaccctttccacgttgaacatttatgacaggaagacatctacaccaggatcgctctctggggctggctacctacaacgcaccatggcactccaaatgttcttacaaaggtcacttgttcccgcggacacacgtgactttggtgactaaacaactttttccacaatctaggtctccacacgccatacaatttggccggcaacttttacaatgtggatataggccgcaaaaggggcacaaggtccccccgggccacatatggtgttaacacccaaagttggcaagacaactttggcccggcgttgaccacgtgttgggtttgtcttggcaaaccattgtggcacacagcaaccctttgtggggttctgagtgtcggattcaccttataacagggatcacaccctgtttacgtcacagtttcaccttcagtgtatgagtggccacacgctgtaaacgtcactgcacacaacgctgtttggtttncgtcgtggcgcacacctaggacccacaagtggctcaccgcttatgcaagtcttgtatcacacccctaacacaagttggtgggcagtctgtggtttccacagtaaaaaccgtcattacaagcacacgggctcccacatctagaccgtgtgtcacacgattctttcgcctatctttctagaacgcttaaccaccttattagcgaccagccacgccattactagtgagacatttgtgcca

SEQ ID NO: 716929 - DNA, 124 bp, Homo sapiens
atggaacaaaacgaccagcaatgttagatattgaagccgacggaaataaaacaatgattgagctcagtgattatgaaaactctgggacaatattcctggataaagttgatcccgagctggctgc

SEQ ID NO: 716930 - DNA, 234 bp, Homo sapiens
  misc_feature (55)..(55): n is a, c, g, or t
  misc_feature (123)..(123): n is a, c, g, or t
  misc_feature (154)..(154): n is a, c, g, or t
  misc_feature (188)..(188): n is a, c, g, or t
  misc_feature (199)..(199): n is a, c, g, or t
ccactgctgctgtgtccttccaaagaagaattagccgtctcctcaaacaggaaangctgattttaatggtggggcccaattgatgactgagtctgcctggctggcctgaatggaagtcattgntatccatggaagaagccatgtcttctcaggngttttccaccattttgtgaagaaagtacgtcgangcggcccgaanttttaggtagttagttaagcgggccgctccttaga

SEQ ID NO: 716931 - DNA, 721 bp, Homo sapiens
  misc_feature (66)..(66): n is a, c, g, or t
  misc_feature (92)..(92): n is a, c, g, or t
  misc_feature (96)..(96): n is a, c, g, or t
  misc_feature (99)..(99): n is a, c, g, or t
  misc_feature (114)..(114): n is a, c, g, or t
  misc_feature (117)..(117): n is a, c, g, or t
  misc_feature (122)..(122): n is a, c, g, or t
  misc_feature (126)..(126): n is a, c, g, or t
  misc_feature (141)..(141): n is a, c, g, or t
  misc_feature (144)..(144): n is a, c, g, or t
  misc_feature (146)..(146): n is a, c, g, or t
  misc_feature (152)..(153): n is a, c, g, or t
  misc_feature (155)..(155): n is a, c, g, or t
  misc_feature (157)..(157): n is a, c, g, or t
  misc_feature (193)..(193): n is a, c, g, or t
  misc_feature (214)..(215): n is a, c, g, or t
  misc_feature (223)..(223): n is a, c, g, or t
  misc_feature (229)..(229): n is a, c, g, or t
  misc_feature (231)..(231): n is a, c, g, or t
  misc_feature (238)..(238): n is a, c, g, or t
  misc_feature (286)..(286): n is a, c, g, or t
  misc_feature (307)..(307): n is a, c, g, or t
  misc_feature (311)..(311): n is a, c, g, or t
  misc_feature (349)..(349): n is a, c, g, or t
  misc_feature (351)..(351): n is a, c, g, or t
  misc_feature (423)..(423): n is a, c, g, or t
gagggagaggcggtgccaatgccaggccttgactaaacctggagactcgggtggccgaggggcttnataccagctgaagagcgacaagccgntggnagncgcggatctcaccgncgntcagngttnttagaacttcagccnatnanaatggnntnanattttccttgatcatatcggtggtacccgtctgttntcttgtgcaaccggtgatgcnnatcctgantctacngntcagaantcatctccactcgtttcacaggctgccactgggagagcatttcttttnaacaaggtagttaacctgcantacngtgaagttcaagatcgggtcatgctcactggccgcacntnggtacgagatgtgagctgcaaaaactgcaatagcaaactgggatggatctatgagtttgccactgaagacanccagcgatataaggaaggccgcgtgatcctggaacgtgctctagttcgagagagtgagggctttgaggagcatgtaccatctgataactcttgaagatacagagagaaatccatcttttcccaggtctccttcactgaaaacaaaaatctacttacatacactgtcaccttagcatcagagtcggattaatgaactgcggaacaagaggttgtgagaatctaagatggaacctttctttcttttctttctttttttaaacttttgtattttccatccaacagcagtgtgtagcagaga

SEQ ID NO: 716932 - DNA, 179 bp, Homo sapiens
ctcagggtttgttataattttttatttttatgggctttggtgagggaggtaggtgtgccttgtggtaagaagtgggctagggcatttttaagcgaagctcgcaacccactgatcactgggcccactcataaggggatgggcatcgctaggttcatagactatcgactggcccttctgta

SEQ ID NO: 716933 - DNA, 329 bp, Homo sapiens
gatcccccgatgggtcgatgaccctcacaggtcctttacaaatcacgtcacttttctgtcctgctccaccatcttccacaactttcctactgctcctattatcaaaatacatgactcctccttctggctggcctactgggcgcagccctggctcccccttccatcccactcactgtctccctgctactccctcctctgcggcccacactggtcaacccttcctctttcctctacacgacgggcctattgcccttgccatttcctctactcagaatgctcctcctctagctctccagtgggttggctcctccttaccttcccagtttcct

SEQ ID NO: 716934 - DNA, 1000 bp, Homo sapiens
  misc_feature (717)..(717): n is a, c, g, or t
ggcgtttgaatcgcggtgcgagaaggatagtggtggaatctcctcgtggtccgattagcctttctctgccttgcttgctgacctcagggaatcgaaatggctggcggataaagtgctgtgaaagggatctccggaaaggccaaagacaaaaggcggttacccgctcgctgagagccggtttgcagtattccagttgagccgtgattcatcgacaccctaaaaatctaggatgaaccaggtcatggcatccgtgtgggcggcaactgcccgcttgattttacaagcggccaccccactcctggaagtagccttcaccgaaagaagggtactttgaaactgggcagggaacaagcttgcctgttcatgatgggatctttaacagcgggtgtaaagaggggatattgacccccgtcgtcaactttgacgaacttttgcatattccggggagagaatgaccgacatgtagggattgtctctacatcaagggattacagaatgcctgggtgggtcgttggtcatacccaccgaattcggacgaaatctcctgattggggttgcacgaaaggggacatagcagacagactgtctaaagcggattgcctggtatccctggttaatcatcaagagactctaaaatactctagacagcgtgctccagtcggcaggagcatacccagggccagctgtatcctctgtgagacaaccccacatgttgcncctgttggtaatacctatttggcagcagttggccaggtttgaattgagctttccaaacaaccaaatttctgcattcgacgtctcccgatatttaaagtgttagcggtggcctccaaaaagacaatgaattctggacagaggggtttgaagagacaggcaggcttcaacacacgcgtggcgttgtatgtgtgccccaaggttttcgtccacacgttggttgggccacatatctctcctggggaaatctacaaggccttccccacattttttcaacaacaagaaa

SEQ ID NO: 716935 - DNA, 527 bp, Homo sapiens
  misc_feature (230)..(230): n is a, c, g, or t
  misc_feature (242)..(242): n is a, c, g, or t
  misc_feature (255)..(255): n is a, c, g, or t
  misc_feature (279)..(279): n is a, c, g, or t
  misc_feature (336)..(336): n is a, c, g, or t
  misc_feature (393)..(393): n is a, c, g, or t
  misc_feature (425)..(426): n is a, c, g, or t
  misc_feature (456)..(456): n is a, c, g, or t
  misc_feature (494)..(494): n is a, c, g, or t
  misc_feature (501)..(501): n is a, c, g, or t
aaaacaaacaagaaaaagaaaccattattatagacaccaagtgctatgcaaggtgatttacatctgttatttaattctctgacaacactgcgaggtaaatattattatccccatttttctaggtgagggaatggagggtcagagaattagttaaacttgtctgagtccacacagttaacagctggcagagcatggtttgaacccaggtcactccaccttcccaaacccgnttcctcatctgnaaactaaatctgngccatcataaaattcaggctaggnacaggctagcgggtttagaaaccctttctgcttttcccacccctagggtcaatggcnaagaccttgggcagggctttagctgggccaagcatggcaatgaagacccaagactgnatttggaggcttctagggcccggccagggggnnctgaggctggcctcttcttccacagatccnttacgaatgaatggtgtaggaatttcatccagcatggnacaaccnaatggaaggaggtggaaatgggatgg

SEQ ID NO: 716936 - DNA, 465 bp, Homo sapiens
cgacactcttggttggagtgtaatggcacgacctcggctcactgcaacctctgcctcccgggttcaagtgattctcccacctcagcctcccgagtagctgggattacaggcacccaccatcatgctcggctaatttttgtatttttgtagagatggggtttcaccatgttggccaggctggtcttgaacttctggcctctggtgatccgcctgccttgacctcccaaattgctggaattacaggcgtgaaccaccgcgccagtgagccaaggtcacacagctgcactccggcctgggcgacacagcaggactccatctcaaaaacaaaaaccaaaaaaaaaaaaaaaccaaaaaaaaccaatttgaccttaattggaatattggaggaattagctagctgtggggatggcaactctgcagctgtccaccgttgggaaaccttgagatctgcacccaagagtgtcg

SEQ ID NO: 716937 - DNA, 164 bp, Homo sapiens
gacgctcaatatatacatactggcagaaaagtacacgcaaggtgtcactcaataaattttcaccaagtatgttatatattgagtgaagcatttatttaaaaataattagattttttttcccctcgggggtttacttaggttggattcagatgctttcagaggta

SEQ ID NO: 716938 - DNA, 1034 bp, Homo sapiens
gcaccgagtcgctccctgttggggtgctggcaaatcccaagagagcatgctggagagtggggacatcctcatgtgtgcaggaggtctgtgcaacacttatgtgtcgttggttcgctgaactgtagtgtgtggtctccttgtgtcactccgtgcggatctcgtgcctgatgtgtcggtgttggtcgcccgtccagcaggctgtgccaggggatgaggttgcttcgcgatgtgcggcgcgggattctgcgggagctgagggttgctagcagctggtggcttcccctcgtacgtccttgtgggagtggaccggtgatctctacatggcctagcccacgtgctctggtcgagttgttaggtagtccgtgagccgcatatggactgattcatttctttggacagggcagtagaaacgacatattggaatgtgaccagcagagagcaggagcgagtcgagatagtccgccatggcgtgatctaccacgtctcgaaacgtgcacctgtgtcattgtgagacttgaccagggtgcgtgggtagcgggaacccttttccctttggcacgtgtatggaagtggaaaaagatgcaaggggagtgcctcatacagaactgaatctaggggtgctaaaaagaggcactgcaggtgaggggctcacttgaaaagcgttcgtgcctcaattggtaaccgttgtggatgtaagacagatgggcgttgaacacgccaagtggctctccgtcgcaagggggatcgttgccaattggcgcccttgggttatttcagtagctcaccgatacctggggaactccgggcgaagtccgttcattgggcgatcatttttccccttggggagagagccttgatcggtttcgcctaaggcaattggagggagcaccgttgaacaggggttgaactcaaaagggatcgagaactagtgacgtcggcggcggggccctatgagtcgcaagaccattcacaggaattcgtgctagccgattgtaccccgggcacgggccttaggggccacctggggtcacgta

SEQ ID NO: 716939 - DNA, 183 bp, Homo sapiens
tgagtcgccctcgcaggttacgacgaggaagtggcggagacatgcacggcgacatgtgcacagggtctgggaaggagcctgagattattcttctcagtgccatgtgaagccactgaaaagcttttaatgtataccagggacacttaatcagcctccctcattttacggaggtgtgcctctgga

SEQ ID NO: 716940 - DNA, 315 bp, Homo sapiens
ggcggctgggtcatgcctgccaaggcaggttgatcatttgagctgagaagttcaagaccagcctgggcaacatggtaaaagcccgtctctaccacatactttgctgtgcattgtggtgtgcacccatcgccccagctactttggacgctgatggggaccgcattgcttcagcctgggaggtggatcgcgccacttcactcctacgtgtgtgacagaacgagaccccgtctaaaagaagcaagccggggtcaggcacagtgactcacacccatcatcccgccactttgggaggccatgcgtggactgccaggtgtt

SEQ ID NO: 716941 - DNA, 369 bp, Homo sapiens
cccgaaagttgcccaaatgctggaattacaggtatgagccacgacacctggttccaatgtttattctagtagtttcataatttcaggtcttagacttaagtctgtaatccatcttgatttgatttttgtgtatatagtgagagatagaggtccagtttcattcttctgcgtatggttatccggttttcccagcaccatttattgaagagactgtcctttgcccattggatgttcttggtgcctttgttaaaaatgggttggccgtaaatgtgtggatttacacctgggttctgggtcctgttccattggtctttgtgtctgggttgttttgttggtttgtttgttttgttttttaccaatgccatgctg

SEQ ID NO: 716942 - DNA, 618 bp, Homo sapiens
cctgggcgcaatagatatagtaccgcaagggaaagatgaaaagattatagccgagcgataagtatagcaaggacgtaaccgcctgagtaccttctggcataatgaagtgtaaggtagaagataactctgcgaaggagagccaagagctaagacccgccgaaaccgagacgagctacctaaggaacagctagaagagcacaccacgtctatgtagcaagaatagtgggaagatttactaggtaggaggcgacaaaccgtaccgagcctggtgatatgcgtggtcgtccaaagatgagaatcttagttcgacttcaaatttgcgcgcacagaagacctctaagatccccattgtaaagtttaactggttagtccaaagaggaacagcgtctgtcggacacgtaggaaaggaagcgtgtagagagagtaacataatttaacacccatagtaggcctaaataggagccaccaattaaagaaagcgtgcaggctcaacacccactaggcgaaaacagcctaatacacaaatcccgggggaacatgccggggggggcgaatgaggatgagcggggccctggtcgaagcggtgccgggcccgcttctggtccaatggggcccccc

SEQ ID NO: 716943 - DNA, 784 bp, Homo sapiens
  misc_feature (486)..(486): n is a, c, g, or t
ctctctgaattacagatgatctgtttttctaacaatacgacccaacgtggagaaaccccatctctacttggctggttttttaattttttgtagagatggagtctcgctgtgttgcccaggctggtctcgagctcctggcctagggtgatcctcctgccctggcctcccagcaaattttttaaaataaattggctgggcacggtggctcccacctgtaatcccagcactttgggaggccgaggtgggcggatcacctggggtcaggagttcgagaccggcctgaccaacaagagcaaaactctgtcaaaaaaaaaaaaaaatttctccgtggataatagggctcttggaagaggggaggattacccatgggtttcacgtaggaacatattttgagtgagctacttatttacgcaagaaccgtgttgcctaaagaaatatctgatgagcctgaaaacttttcttagtaacttggaattaacttgttcnaaggggaaaaatctccgtaggtattaatattcccatggttccaactttgagaaccattttcaggactcaattcggaagtaacttcaatcccactcggagctaatgggtcactatgtgttcctaaaaaaagttcagtcccatagagtatcagaaaaaaagctgtgacacaaaagcggttggccatatctatcgcatcatgctcacttcgaacggcacattgttcatatatcagtgtagattcccgtggacattggcacgctttgcactttccacacgagtccaatgaaggtcatctacg

SEQ ID NO: 716944 - DNA, 419 bp, Homo sapiens
acggccatctggaagttgttagctgttattacctgtggacagtgtggatggcacatgagcctcagttcccctcgtctgtaaagtgagggcggtgatcccacatcatggattagagctgccgttccctgggtgcccatgttgtgcagtcaggagccaggctcggtggccaccctgccttctgccacgcagtctgccccaggctctgcagagctccgaggaggggccccggaggccttggtggtgcagtgccatgcccctgggaggctggggacacgtgtcccaggccctgacaccctcgcaggccgctcagtggattacagggccacagacctgtcctgacagggccacatacagctgccaagatgatggctgcttacctagcaaactctaatgccagaaaccaccttcttccttcaaaa

SEQ ID NO: 716945 - DNA, 212 bp, Homo sapiens
  misc_feature (34)..(34): n is a, c, g, or t
  misc_feature (83)..(83): n is a, c, g, or t
  misc_feature (96)..(96): n is a, c, g, or t
  misc_feature (114)..(114): n is a, c, g, or t
  misc_feature (120)..(120): n is a, c, g, or t
  misc_feature (129)..(129): n is a, c, g, or t
  misc_feature (134)..(134): n is a, c, g, or t
  misc_feature (137)..(137): n is a, c, g, or t
  misc_feature (139)..(139): n is a, c, g, or t
  misc_feature (165)..(165): n is a, c, g, or t
  misc_feature (174)..(174): n is a, c, g, or t
  misc_feature (195)..(195): n is a, c, g, or t
ctgggcccaggtgggcgtgggtgaggctgtccanccgaggcgctcttgggggggtgtgggctctgggccctgcccgctgagantggacaggcagcngccggacatacccagccncctggntggttctgnggtgnctngngttttgcgcaatttggctttcccccngccgccggngccatctccacagccctgtcnagggcagggggcaggct

SEQ ID NO: 716946 - DNA, 139 bp, Homo sapiens
tatgcttctgggtatatacccagaagtggaattcctcgataatatggtaattccattttaaatgaagagataggattgtcctactgtattaccacaatggtgtgccattttacattcccatcaacagtgtacaaatgta

SEQ ID NO: 716947 - DNA, 1871 bp, Homo sapiens
  misc_feature (223)..(223): n is a, c, g, or t
  misc_feature (329)..(329): n is a, c, g, or t
  misc_feature (1697)..(1697): n is a, c, g, or t
  misc_feature (1870)..(1871): n is a, c, g, or t
cattgaacgcacctgagtgactttacttgaggtaacgccttactagcaccagggggacttggagccaccagagacagcttctagttaacctatgctatagcactcctaacatcaatactggcgttgaattactactatctctcgctgccagccgggagagaagcagagcgggtagtagaggcctccggcgacggattggcaaggcaggctttcgttctgatantcttgcagactgtgcaaaatgagtcgtagatagagttcgacctcgtactggggaggccatagggataacaaaccacaagtaggagtcgcctgacaaacacgcgccntgattcctctgtaagggagtctatcacctagggtacaacaaaatagacctctccaagccttccatgggcgcaagtatattaatcatcgcgttcgaacccttcccactaacttcgcaggtgggtgtccagactcgggtaagcgcgggcttttgtagctttgattttccctcataaacgagaaaaggcgcaacccatacaacgaatccgaattaagtggcaaagcgaggcattaaatatagctctttgacttttgagtcctcccaagcgtccaaggccgaggtttgaaccgccttgcgggtagacgattcgccctaaagggggtccacctagggggctttgccctaaatatggcccgctccccattttagatatcccagaaaagtccccacgatagccggtcgcgcgggccacaaggcaacgaaggagcaacaatacgcctgttcttctcttgagggggctcacacgggagaacaccaggacaaaattctccttcactttaaactggtctcctgagttctgggttcttacagaaggctccactcaaatggcgaatttttaggattaaatctttacaacttcagttggtgcggttctcaccaccttaagtttggaaagttaactccccttagttccaagttgaaatttgccgtggggacagggtcctttttagggtgcccaaaaaaagtgtgtgagcttagagagatataccccgcgcggtgaagattggaacatcacggggggtggaacgcccccaggggaactttaagttggggggcggttctattcgcgccctcgggacaaagtaataactatccaacaccccactataaaagggtcctccttcctgtggagagcgtacctttgttggatcccttttcccccaattagcttagctgtctcgtttaaccatcaccgttgaacatgcggccaaagttcattggcgtaaataaaggcacggcggagaagagaccctggggatgtcgcaagtgaatcaccaccgcggctattggaaacacacggttctctggaaacactctttcctcccctatatagcccacagtggggaagagcggttatgggttctcccgcgaaacacccctggtgtgaaagccccgattccgggttaggataacccgttcaagccccaatttgcgtgttgttcattccccctaataacaagtgcctgatgatgcatgagttgaggccccccccattgtacatatactgtaatgcaggggccgcggtacacaaaaattcgcggagcatccagaaggagcaccttatgacctatgaggtgaagagaaccccgcgtattggcagcaataattgcgcaccaaatgatcggaagagaaagcccccggtatattngcggagtttagagttagcgtgcgggatacaacacacaacggaggcggatcgtgaaggtgtctacctgacatcactcaatggtcgacgactgaaagaacagacaggagatgtcacacacataatgtggagagagaagacgcgagaccttgtaaaatgaacatcgactgctaggnn

SEQ ID NO: 716948 - DNA, 188 bp, Homo sapiens
acccccccgaaatatttcttaaacccacttccatcccaacctctatcccatacttcaaccccaactaaactcttatatcaccatacacccaccccatcatctcacaatctacaactaattaatttataaacttcaccatcctacgaaccaccccttttatgataattgaaatacaccaacccacccac

SEQ ID NO: 716949 - DNA, 796 bp, Homo sapiens
ggaagatctacatccatcccccttgctctagccctccctgcggtgagattcatgttgcagcttttattattgaatcttcttctccttaggacacgcagcccccaattcgtccctccggcctgggcggcccctggctcccgcgcgccagcagtgggacgagctgatggtgactctgcccgcggacccgccgtgcgtgatgcacatggaaggtccacgtcctgcctgctgtcccgcatatcctcggtcgttcgtgaggaaccgggtgtccaagggaaactggataacgcgcatgcgtgaagatgcggtacggttggcttagatcattggatttagtgtgttagcagggtacgaatcgttatggggaccctaggaaccgcacggtattcaattctcctggaaggtgacgctagtagtgttctaggccgcggcgatacgccccgtctggaagaaatccctgggcgctaaggtctcgttgctttaccagttgaacacagaactctcaccaacacccactcgttaactttactgactaaccaagacggggtctcgtacaacttgggacgctattaacgcaaacttctgcatgagctcatgggaaatgctttatctcactacgataacgactcgtgccagcctagcacgtggggtgtgaaccatgcaaaatggcaggcccaacagcgacatgagtccatacttataactaccgtcactttcctctgaatgagtggtgagtactacgcagttcaagcggtagaactggtggcctaagcctcggggacaataagcttacttgtca

SEQ ID NO: 716950 - DNA, 756 bp, Homo sapiens
taacatcttgtttttaaaatagaatgatagaacttgccagtctttaagatctggcttaatttaatgtattaatctgttagtgcgaacataataccaccatttaaaaatgttagggagatgagttgcaggtgtttctactaatagacttttcttctgtaacagcttagggctatagtaaagacattcacaccgtctgtcccgtcaaaactggactaacttacgttttaacagtgcacgctcattcgctggtttagaactctcggtactggttgcgctctccacttattgagctctccctcctaaccgaacatcgaggagagggactgaatagacacgcccaacattcagtactaaacacgtcgcgtctcaaacgccttcgtactctacaaacgtagatcatatacacgaaaaaacatcacttcctcactctgactgtttggttagaccaccgaaagtccgatgtcgtcgtctctggtagctcagttcccagaccagcttttacaggctagtggaggacggtcgcctctcatgtggccactctggccatctctatattccacattggccacgggctcaggctgtggctcttctgaagccaggtggctcgttaagggaacgctaccagggcatgcccgtgagctccggaatagatgtccttcactcacttcttccacctgtcatgtcgacccctgtattcttacctatgtcctcagatccccagctttctcctctgcaatgcattccttccagtgccgc

SEQ ID NO: 716951 - DNA, 365 bp, Homo sapiens
gcggagttcccacatccgtagggactgcgatcttgtgtagaggctgactgttcactccttactgcacgccctccatcatcttcaggaactcgtcgaagatcaatgcggccgtcggtcgttcattgtcgccgtcgtttatcagagattcgatctcctcgtcagtcacgtgctccccggaggccctgaaaatctcagccagctcctccgggtcgatgtaaccgtctgcattcctgtcgaagatgcggaagcactcggccagctcctcctcgctcttccctttcgcgtcctctttcatctggcgcaccatcatgagcaagaactcctcgaagtcgatggtgccgctgccgtcctcatccacctcctcg

SEQ ID NO: 716952 - DNA, 422 bp, Homo sapiens
  misc_feature (75)..(75): n is a, c, g, or t
  misc_feature (82)..(82): n is a, c, g, or t
acaaacattgtggggctgctgctggagcgtgacgtggacatcaacatcatagattggaatggagggacgcccctnctgtacnctgtgcgcgggaaccacgttaaatgcgtttaggccttgttggcccgaggcgctgacctcaccaccgaaaccgactttggttacaccccgatggacctttccgtggccctgggataccggaaagtgcaacaggtgatcgagaaccacatcctcaagcttttccaaagcaacctggtgccccctgaccctgagtgaaggccgcctgccggggactcaaacactcagggaacaaaatggtcagccaaagctggggaaacccaaaactgacttcaaaggcagcttttggacaggtggtgggaggggacccttcccaaaaggaaccaataaaccttttgtgcaga

SEQ ID NO: 716953 - DNA, 177 bp, Homo sapiens
gtcgacaacacggtgaaccctgttagacaggatcgtcttgatctcctgatctcgtgatccgcccacctcggcctcccaaagtgctgggattacaggcgtgacaccgcgtctggcctattcacacacactcttgatttcagaaaccatgacccaatatgaagcgtcgacgcgtccgga

SEQ ID NO: 716954 - DNA, 429 bp, Homo sapiens
tggtttctaactatttctaaactttttttcattctttaaaccaaattatataacattccttggcctctatttacacattctcttacatatcaccactatcactctttattatctaatcaccccaaataacttttcaccaataccactttttacctttctaaatactatcaaactatttctcctcaataattattacccaccaaaccccattatttctctatctcttttaattaatcttaaatatcaatcttcatttcctctcaactctcctctatcctcttacactcattactcttcatatctaactaatttaactccttcttcacctaattactcattcccactaattaaacaaatccttttttatcactattaacctaacatcctctatcccccactcaaatttccacacctcccatattcttttcc

SEQ ID NO: 716955 - DNA, 344 bp, Homo sapiens
tttgttgaacgttgttatcctaggaagagaaacctatgacttgtgtacctagatcatctggttacattagaaagcgggtctttcagcagtagagcgataaatggaggttaccttgtcgggaaacaatctaggttgtaggtgtatgaggtaggttgattatggtgctgatgttgagtagccacatttgactgatgtctggattctctgtgatgctgtggctagcagcagagctcgccagttcatgcctggacatagtgggcaggctgggccctccagctagctcctttggggttgagtccgtatctttgtgatgtggaagtataaagcaagtatggtgatttgta

SEQ ID NO: 716956 - DNA, 408 bp, Homo sapiens
  misc_feature (44)..(44): n is a, c, g, or t
  misc_feature (62)..(62): n is a, c, g, or t
  misc_feature (154)..(154): n is a, c, g, or t
  misc_feature (399)..(399): n is a, c, g, or t
gtttttcctgtttgccacctgaatacgtggaaccaccatccacncagctggttaaaccagantcactcagaaatctacctctccttcgatattattcataactgccagtgttaaaattctaattgctggccaggcacggtgctcatgccagtantcctagaactttgggaggccgcggcaggtggatcacgaggtcaggagatcgagaccatcctggctaacatggtgaaaccctgtctctactaaaaatacaaaaaaaattagccaggcgtggtggtgggtgcctgtagtcccagctactagggaggctgaggcgggagaatggcgtgaacccgggagcggagcctgcagtgagcggagatcgcaccattgcactccagcctgggcgacagagcaaantccgtctca

SEQ ID NO: 716957 - DNA, 669 bp, Homo sapiens
ccgagtgacctctaccgcaagtcgggtgctgccaaccgacttgcgggagctccggcaggcgcttgcagacagaccccgcagcagtcaagctggagaacttcccgcatccacgccatctacatggggtggctgacagctagtagggtagcgaggagcgtgcccgagcccctcgatgaccttcgcgacagtacggcgacttcctccgaagccgtcgagctgccggagaagcaggagcagctggctgccatctatgccgtccttggagcaccttccagaagccaaccacaactcccgtggagagactcatcgttccaccttgttcaaggtggcccgtgcatcgaggatgtcaaccgcatgtcacctgtgtgcgctggccattatcttcgcaccctgctcctgcgctgcccgtgacaaactcggacccaactgaccagcatgaaggacgtcctcaaagatcaccatgtgcgtggagatgctgatcacacggagcagatgaggaaatacaaagtgaagatggaggagatcagccaactggaggctgcagagagtatcgcttccgcaggctttcgctcctgcgacaaaaatgctccatggcctctcgaactggggttacagactccctatgaggggggtcctgaacaagagccccaagaccgggacctccaggag

SEQ ID NO: 716958 - DNA, 910 bp, Homo sapiens
gcaccaacatggggagatgacgccggtgcgaacgtgggtggctcgtaggagccttgcgtggacctgggatggggtaccgcagtggcttccgggtaagcttgacggctataggaagtaccggggcacgggggtacgctagagccatggaaccggaggtgcatgtggcgacgcgaccgtcggagacgtgcgacgagagtgaatgcgacgcgatgcgtgtaaagagcgttgtattgtccgatatgcaacggcgtgccgccttggtcaattgtaccttgcactgcatgcaacggttccactggagaggtaaattctagtgctgcgttactcgcctgatgccatttatcactgacatgcagaagagtcattggaatttcactgtcctgtgtgcggtgcacgctgctacatgagtggtgagggctaagtggagggaatcaagtgcacagagtggaatcgaacaaactagcaaccgctgggtgccccgagcacatggtccgcaatagcgaagcggtctcaaagtcgccagttcttgatctgctttattcaggcgggactataaccgctttgtggcacagcgaggtactggggtcagtgtgcaggttgggtaacctttgggatctcaaaggggcaagtgttgggccaacggtgtcacaattgccggataggggggccatttctaattcacgtggtccccaagagcttacatttgctattctgttgcccacagttgcacgcacaagaacgtagctaacattgaggtgtggacagcaacgaactccgcgagaaaggccctccagcaacataggttccccgtatggcactggggatagacaaagggtaacgaggttgactacggcattcttgcttgcgttgggattacggacgcttaccagttccccgtgccaccccacag

SEQ ID NO: 716959 - DNA, 89 bp, Homo sapiens
agaagcaggatgaacttgaaacggatttgccacaagaatttggcagcaagcatgcacagcatattaaagtgagtgaccctgcgacccac

SEQ ID NO: 716960 - DNA, 418 bp, Homo sapiens
ggctaggttctgatacttagacaggtgggctcatcctgacttagaactcgaggaggagcactcttccttccccttctatgagcagcagctccaacacctcgcacttctgtcctcgacatgtgtcccagaataaccagccatgatgagcgctctgagaagggtctataggccttgcaagcagacagaaaggtgcctgacctctgacctggattcagggggtgtctggggtcatccccaaagccaagtatggttggaaaggagaaggactgagaaaagactgatggccctggaatcagcaggttgaggcccaggatgacccatgctagaatctgggggaggacgcgggccctgcccaagccaagcagttggtcatctctgggggcacacaaggccatgccagtcaagctcctcctcagat

SEQ ID NO: 716961 - DNA, 258 bp, Homo sapiens
  misc_feature (214)..(214): n is a, c, g, or t
tgagtggagagagaaggaaatagggaaaaggagttgggactgagggaagtggtgaggaagggtaggaagagaggggatcctgagagaagtggatcaagaagatttgtaacccgtgatttcccgtgtgtccgtgaatggtcgtggagtgagggtaagtggagggtgtgtgggcagtgcgcatgagcctgtgcacacatcaccctttgagtgtccncttagatgggttcccctctcagtgctagactacccccgtctccc

SEQ ID NO: 716962 - DNA, 294 bp, Homo sapiens
tatgctttctttccaatcctgctctgcaaaacaaacacaagatttgtgtcacagcgtgccagtacaacttttatcaggtggacctaatgctgcacaatcctgtagaaagaacactaattcagatgtgagaagatcttggttctacttatctgctatgtaatcttggccaaatcattcaaactcaaaattttggtataaaatagaaacatggtttgtatctgcactgtcctacagaaatataatgaaagccacaaatgaaattttaaaaatttctagcagccatttgaaaaaggg

SEQ ID NO: 716963 - DNA, 118 bp, Homo sapiens
gagtggtatgtcgccgtgcgtacctcactgttgacccagctggtgactgtaactcgggttcgattccggagagggagcctgataaaacggctaccacatctcaacggagggtacctga

SEQ ID NO: 716964 - DNA, 293 bp, Homo sapiens
gagacacacaggaggttgacgttgagaggagcacatcagttcaaggacacattgggtggcttgcactttttttccctttcctagaaggaaaaattttcgcggttagaggggtttccccccacggacccgcactctctggcgggcacccggccctttggtttaaaatagggtttggctgggaacccaagagaggccctggcctctatatccccccttaaagggaaactcttttccccttttgggccccccctctttaagaactctccccataaaaaaccctacccttctcccga

SEQ ID NO: 716965 - DNA, 702 bp, Homo sapiens
cgcacacatgcctattgctgaagaggcttctgtcttatttgaagggcagcccacacccagctactttgaccccaggtttatggaaaatgtcaggccttcccccccactcccgtctaactgctgtcgcccccctacttgctggctctcagaagcctaggggagtccctgtggtcctggattctttcccccaagacgagcccgccttttacccaccttaagggccccaaggccttggaccaactgcatggagctgccactcttaggagaaggaggggaacccagatagttagatacaggggagggagccggagtgtccctcccgtcagtgcctacccacacctgtgaggcacgccttctgatggcctggcccacccttccccacgaaaccacggggaggcctgaggcttcacgttttatctctgctgccaaatgaaggcgggcctgcagccgagctacaccctacggaggctgttgaggaccatttcacttcccattaaaaattataaaaatactgactggctggcacaggcacagtgccaagtctgggaacagggacgcggggagcttcacctttttgttttggcttttctttgggctgtgggggggcatccctttccaccgggtcggggaggaaatacccaaagcattgttgttctgctccatacatctcacttgtttttaataaagcaagcagctgaacca

SEQ ID NO: 716966 - DNA, 439 bp, Homo sapiens
gaggatcccccgagagactgtcatcgccttactctagttatgactagtagtaaagtaggtaaatgatcctcccatgtacaattatcgttcgtataatctaatctgctccaggtgtccgcccttccacagagggcctgttataacgctttgttttcacaggacggaaaataattagaatcacaagcataataattcggcgcgaacctttcgtgatcccgggccgaagcaggtcataagcgctgagactgtggagtttgcagtgcatgcttcttaaatcagttcttactaaatcatcaagaaaagtcactggtagatgtttggagtggcttttctcattgcgaagcttatttcaaaagcaaaaagaaacaaactcacttggcagagaacagaagccaaataacttgcatttccaagagtaaatattgacaagatgacagtc

SEQ ID NO: 716967 - DNA, 1244 bp, Homo sapiens
ctgagatctctgtggcatggtatagggaacacaggaacgggtaccgatataccacaagcacacatggcaggccaagatctcagtcattcgcccttcaacgggacacgagagctgtatggcgggctgtggctgtctgagctacttatgtgctgacagcagcacatagtattcacatgatggcactgaccacaggaacactcaatcacaggctcacgcgtaggaggggagcacagcgggaccctgggagcatagaagctagctcactcatatcaccccaactcacaaccattaatgggaacaaacagaaccagcgacatcctgaaattacactgactatcgacggtacgcctgatcacagctcaacgacataacgctgacacatatcggccaagcactaatccaggcctcaataatcgtactaccccctgcaccgcgaggggaaacaagatccgagcctctatgagcgattacctaccgaagataaacagttagacaagccaatcacaaccggacagacacccgccacccccatgacccaccgcgacaatcaaaagactccatggcacagacgcaacccgaacagacgcgcacgaaacacacagcacgcgacacacaaaacacggacgacacatacaatcaccaggacatgcaggccaaacacaacaaagccccgaacgacgacaacaacgacggcccacacaagtaatagacgaccaacaccataaccagacacaagtcaaagggaaaacatcacaacaaacgtgctgcaacaacactaccgaagaatcccataggatacaatggacacagacataacatccaaaatactaggacacccgaaatacgtcatgcacaaaggaggaatcacgagtacgctccctatctgaatagacaaaaccaaccaacagacggagtcctacattacaccgctcaggtagtactataacaatgtgagagagaacataattagaacatcgctgtgctgcacaaccacagaaaagggaaaaagcaggagacaaggaataaccgcccgcgccaacgacccacatcacccaattacatagaagtagagtccagataaggagtagcaccacaacaaacatgacagtgctatcacaatcaaagacaacatagcaagaggacagaccaatcagcaactggaccatacaacagacaagcaatcacaaagcgcacagccatgcagtacaagacactacgagagcgaagaggacgttccatatcaa

SEQ ID NO: 716968 - DNA, 949 bp, Homo sapiens
ggtggcacctgtgggttcccaagctacttgggaggctgaggcaggagaatcgcctggacctgggagactaaggcaggagaatcggcctgggcctgggaggcggaggttgcagtgagcccagacggcaccattgcactctagcctgggcaacaacacgaaactccgtcccaaaaaaaaaaaaaaaaaaaaatcccaggggttgatgccaaacccaataccctttttttaacccctatttgtttaaaaaaaattaaaaaaagttttcaagcagtagcacctcgggtgttggcataacaccgtgtttgcagggcttgaccttacacaatagttcttgacattaacaacatcatcctcttaacaccggtgttgaattgttgccacttagaaagttcaggtatggcgtggttgacacaaccgtggggggtctcccgtgcggaaagcgggtgagtggtttctctataagccaccccccacaaggagaatttacaggtagccaaagggctagtgacttaagaaacgtgggcgattttaggggggcgcaatagccttcttatcgcaaagtgtcccgatatacgagctcatctagcccccttggtgagttctgggaagtgttcgacataaaaaagtcttctccacagttcgtcaagttggacgccgatcattgaggttggtcctcttgagagaacaggggatcctataaagacggagtcaggggcgtagaagcctggatcggaaagagaggacaacacaaacagagccacgcatagcgattgttagtcagcctacgacaagtgttcggtaacgcgaccccaagccccttgtttataggctataaaagcgacaagaaataacacaggcaccgtcgtaacgacaggcagagagcattaacgtggggagacaaccccccggcatttagtcggggccatttatcgtcgcgacaagatagaag

SEQ ID NO: 716969 - DNA, 782 bp, Homo sapiens
  misc_feature (48)..(48): n is a, c, g, or t
  misc_feature (66)..(66): n is a, c, g, or t
  misc_feature (171)..(171): n is a, c, g, or t
  misc_feature (177)..(177): n is a, c, g, or t
  misc_feature (202)..(202): n is a, c, g, or t
  misc_feature (209)..(209): n is a, c, g, or t
  misc_feature (243)..(243): n is a, c, g, or t
  misc_feature (271)..(271): n is a, c, g, or t
  misc_feature (273)..(273): n is a, c, g, or t
  misc_feature (299)..(299): n is a, c, g, or t
  misc_feature (317)..(317): n is a, c, g, or t
  misc_feature (333)..(333): n is a, c, g, or t
  misc_feature (345)..(345): n is a, c, g, or t
  misc_feature (379)..(379): n is a, c, g, or t
  misc_feature (381)..(381): n is a, c, g, or t
  misc_feature (432)..(432): n is a, c, g, or t
  misc_feature (472)..(472): n is a, c, g, or t
  misc_feature (515)..(515): n is a, c, g, or t
  misc_feature (571)..(571): n is a, c, g, or t
  misc_feature (657)..(657): n is a, c, g, or t
  misc_feature (680)..(680): n is a, c, g, or t
  misc_feature (694)..(694): n is a, c, g, or t
  misc_feature (774)..(774): n is a, c, g, or t
cagcggtgaggggcccatggggcggggcctgaaggtggattgagggcnttggttttttgttgagtnatgatagctccatgttccttccagtggccctgcagcccctctattccccagctttagccgctacttccagtggggcaggaggagcttccattgccatctggagancctggnagggacttgcccatccgatccacanaccagcngggacctcggcgctgcccctgggaggagcggcantgccgttccggtagaagcctcgatggtnanaattgggcacgtagagtgtttgagcncctgggtagaactcagtntggagttgctgcagcnctgagtccagangtctacggcatgggcccatcttagtgttttggananccgcagaattgggctgggagggcgtggtagaggtgcctggattcctctgtnggtctctgcggttcaaatcctgtgggcgggcagtgcctgnatggggtttaatctccttaggattttcctctgcaacagcaggngcgcgggccggaaggagcggcctcggccgagcagtagcgccccgcaaaggggcctngtcgtccttgggcggatgggaatgcagttctggggcgcagtcaggggtgtagacccgcactcctgcccctccctcctgagaaagcnctcagcttccgcgcagcctcggntggggaccccccancctccttctccacgcagccccctggacaacccgcctgcaccccttgcccgcagcctgggcaccgcgccaaggcgcatacnggggctgg

SEQ ID NO: 716970 - DNA, 464 bp, Homo sapiens
agataataaaaacgcttccccacccgaaacccccagtccggggttcctgtatcgggaaagggaaaaagggcccaaaagcaaaaccctcttccgggggggggggagtatttttaataaaaaggggggccaaggtttccgcttgaaaaaagggcaatagaccccccgccaataatttggtttggctccccccttaagagccccccggtttacaaatttttcttccggcccaaaattttttggggaaattgaaaagaaaaaaaattttccccaagaaataattttttcccttttttccccaaaccttaaaaaaaccccccccaaaagaaaaaaaaaagggagggcccccccgggggggggccccttaaaaaaaaaaaattcccccgcccccaaaaaattggccccaaggggggtccaggggggggcccccagggaggttttgcccttaaaaagggggggtggggggg

SEQ ID NO: 716971 - DNA, 222 bp, Homo sapiens
tagggtagcgagggtgggatgtagccttgggtcccgttcaccggcgtgacggtgggcaagaactcgagtgttctgtgtcccccgggccgtggcacccatgagtacgtggggaaacccgtgccagtgtggggtcccaaacgaggctggggtgggggtgactcagtgattcacttcaccccttgcccgggtccttcttccttgcatccagcttccgaacggagg

SEQ ID NO: 716972 - DNA, 125 bp, Homo sapiens
taagcattggagagcatatgacacgcgccagctagcaggatttcacatcaaattagagtctgattttgattaatatcatcactagaggagtttggattttgcaagaccaatcttcaatgttgagc

SEQ ID NO: 716973 - DNA, 254 bp, Homo sapiens
tgcattctaacctgggcgacagagcgggactccgtctctaaaaaaaaaaaccaaaagaatgattcctcagttaggtgcatcattaaaaggggattgcaaatatcttttaaataaaaatttgcatcctatatgttgtagaatacagaggattttaaaaataaattttatcgcatgtttagacaattgctttctttcaactgtttacatatggaagcacaaatgctaaacataagtcagaatggaagaatctttaa

SEQ ID NO: 716974 - DNA, 251 bp, Homo sapiens
atccccaacacccatcccaggtgtagcaccaaatgtaagaagtaaagaaagagaaaagaaacatgaaaagtggctcaacagtcaaagacaagtttattttggagaacaaacctgagaggggcttctggacaattttttttttttttttgggtaaggagtgcttgcccctatggactaagagttttaatgggtttcagggtgagagagtttatcacaggctgggaatgtacctgtgtggggcgataacatca

SEQ ID NO: 716975 - DNA, 255 bp, Homo sapiens
ggcgtaatgactctgcctcacgggttcaaatgattctcctgccccagcctcctgagtagctgggattacaggcatgtgccaccacgcccagctaattttgtatttttagtggagatggggtttctccatgttggtcaggctggtctcaaactccctacctcaggtaatccgcctgcctcggcctcccaaagtgctgggattacaggcgtgagacaaccaacgcccagaccctctcgttactttttaatgtcccca

SEQ ID NO: 716976 - DNA, 106 bp, Homo sapiens
ttttctacacagtgttttccaggatcagcatcttcacacactactagatctgtatgacaaaattaacacaaagtcttcaccacaaatcaggaatcctccaagcgat

SEQ ID NO: 716977 - DNA, 87 bp, Homo sapiens
atagtttgggagacctgaagcctggaatatgtttcactgggccaaaatcagtgtgttagcagggctgcacccttctgtcgtcttctc

SEQ ID NO: 716978 - DNA, 552 bp, Homo sapiens
  misc_feature (386)..(386): n is a, c, g, or t
agaaacatttacaaaccacatatccaataaaagactggtatatagaatataaaaagagagtgctcaatactcaacagtaaaagacgaacaatctaattagaaaatgggcaaaaaacatgaacagatatttcaccaaagaggatatataaagatggcaaatgaggatataaaaagatattcaaagtcattagccatcagggagaaatgcaaattaaaacaacaatgatatatcacgtacacatctatcagaatagctgaaataaaaaaatagtgacaatactcataactggtgaagctgagggaaaatcgggcatctcatacattgctggtgggaatgtaagtgatatggcttccatagaaaatagttgaacacgttcattaaaaanacaaacacacaactaccataaaacccagggatgacactcctggagtattcacctagagaaatgggaacattgtatgttcactcagaagcctgtacatgaatgcgtcataacagctttatttataacgagccaaaatctataaagatacaaaatagaggtgaacagc

SEQ ID NO: 716979 - DNA, 818 bp, Homo sapiens
tctgtcctgtcccgcgagggccccgtgcgccagctctggcgtgtttccgagatgccctggtctcaccgtgggagccgggcgcgggtccgccggcatctgcgcggcgtctgggggtgaccgcagcccctcggggtcggcagcgggcccctttgctcccggtggctgcggcctgagggtccctcttccctgcgcagggtgccctgcgctgcctcacctattgtgccccgtgagcctgggactgccatgggcccagcgcttgggggccttcctgggccagcccgtctgccttcatggcaggtcccgagggggaggatttgggtcgcgacctgctgagcgacctgagaagtgagaagctgagcgaacagaccaaggtttccctgctggccctgagcatggagtaccctgcgcagctgtggcccgacgcctctgcggccgaagtggccgacacctccctgttggacaccttggtcctcctacccccgcggacctcagctctccgtacggcactgctgctggcggcaccactgccctggcggcgggcggcgcgctgggccccagctcgggcgcctcctgccggctcctgcccctactgctcggcctggccgcgggtagcgatctggggcgaggctttgtcccctgctcggaacaaggccccttgcaggccacgggctgcgagtgctgcgagagctagagagctgcagcccgggctgctgcggggctccctgaggttgctgcggggcctgctggggcaggaaggccctgtccagccacttcaacctgttgctggacctcgcattgcgccaaaacctatgggctca

SEQ ID NO: 716980 - DNA, 285 bp, Homo sapiens
aatacacccatgtttcccatgttgtgccatgtttttccccaagcaagcatccctactcccgtcaacaaggctctggtccatatcagtgttcgtgcatgctgaagtatgtgatggactgaatttaaatgagctctacataccagtcgcgaacccccggtgcctcgcattggaactcttttggggagtgtgatctgagcagagaaagcagcatctcgggacaaagctccagttgtaatagactttcaagttggtctcttgtgatgacatgtagtatccatgaacatg

SEQ ID NO: 716981 - DNA, 500 bp, Homo sapiens
  misc_feature (12)..(12): n is a, c, g, or t
  misc_feature (63)..(66): n is a, c, g, or t
  misc_feature (74)..(74): n is a, c, g, or t
  misc_feature (85)..(85): n is a, c, g, or t
  misc_feature (89)..(89): n is a, c, g, or t
  misc_feature (91)..(91): n is a, c, g, or t
  misc_feature (100)..(100): n is a, c, g, or t
  misc_feature (125)..(125): n is a, c, g, or t
  misc_feature (188)..(188): n is a, c, g, or t
  misc_feature (284)..(284): n is a, c, g, or t
  misc_feature (333)..(333): n is a, c, g, or t
  misc_feature (375)..(375): n is a, c, g, or t
  misc_feature (477)..(477): n is a, c, g, or t
tgaggccaaggnacacgcagccgggcctgcagattcgagcccagcagggaccattaggttttnnnnggaggcanctgagggcganaggntntgcacaaancagttaggggcagaggacgcagggnccagatgggtctcccaggccaggtgagcccagaacggcccttcccagcccctctagagggtangttgggggcagtagctcaccaggcccaggagcagccccatcctggaggcaaagcctatcccaaaaactggccctgcctcttcctgaggtgaccttnagtccgtaaaactgacgcccctggggtgacgcttgaaaaccggaagctnttccaggaggagggaggggcctcggtttctcccggggcattnttggcaaggaaggccctcgggaatccgcatcagtcccacggccgcggtgcggtcgtcacctgtgatcacggctgcctggcgccccctgccggcccacctcancccttcctcgcaggcctggccgg

SEQ ID NO: 716982 - DNA, 151 bp, Homo sapiens
ggggcggtcaatcggcaggctgcgtgccgatatgccgtttcaccgcgtcagccgcacgccggtgtggttggcggcgtagcggccgtgcacgttgaccgtcaccgttttgccgctgcggcggaatttccattgcgcgtcgctcggcgtttct

SEQ ID NO: 716983 - DNA, 880 bp, Homo sapiens
tgctgcttctggttctcttgtggccaccgtcgctgtccggcttgccttggggtgcgaacagacaaggcgtgggccacagcacctcagaagccgacgcaggtcgacgcaggggccggcaggagggtgggcgatcgcgtgtcggagggcgccggcggtgcaggcgggctgggcgccaagagggggcaaagaggcgcgtgggcggcgggtcagccgttggccgggccggcggggaatgtcgatgcctgacgcgatgccgtgccccgggtcggggaggagctgaatggcaggccaggagatcgatggacgccgagatgtactccttcatggccaccgtcaccaaggcgcccaagaagcaaatccagtttgctgatgacatgcgagggagttcaccagtattccccaccagaattggccggaagatcttggtctcgctcgatctcacagtcctccagtgacagctacgagttcagctgtatctacacagatagctctgatgatgaggttctccccgagagaagcaggaaccaactccgagggcagcagcaatttcgtgtgtgaagaacatcaggcaggcaagaattgtggactgggggaagatgagattgggcgagcaagtacattgtcttgctctgatttcacctcagtgaaaacgtgctcagtgggaagaaagcccttggtggtgcttacaattagtggggctggacacccattcaccagccagactgggtgttgcttggagacactctgtggccctgggggtccaaaggccgtggccagcttgtaacttttatccatcccgaaggattggcttgccactggttgagctgtgtgcaggtcccttggaggaggcgccaaaagaccctgggggattacaccggtg
